United States Patent Application Publication US 2017/0009304 A1 - sequence listing, part 10

SEQ ID NO: 193963 - DNA, 76 bp, Homo sapiens
gggcgaaaattggatgtgaaaatgaagccagaccgaggattcgcccaaaatgaggacttccctgcaggcagtggca

SEQ ID NO: 193964 - DNA, 83 bp, Homo sapiens
cgagattcaagattatttgcaacagctcacgggagcaagaacggtatagtcgtctccccctccaccacggcaagtcctgcaga

SEQ ID NO: 193965 - DNA, 71 bp, Homo sapiens
cttcctccctgtgtactttccatttgccttcctgggagacaaggacggcagcaaggtgacaacagtggtgg

SEQ ID NO: 193966 - DNA, 97 bp, Homo sapiens
aaatccaaaggtgaatcttttggttggtgattttgatgatagccacaaagcaagcaggacctaagtcaatgttagtctaccactgtacgtctggtaa

SEQ ID NO: 193967 - DNA, 51 bp, Homo sapiens
tgctggacaccctgtcgcagcttctgaagattcgtattttacatggagaag

SEQ ID NO: 193968 - DNA, 50 bp, Homo sapiens
ggcggcggcggctgcggcccaatataggttcattttccagacactgaaag

SEQ ID NO: 193969 - DNA, 100 bp, Homo sapiens
gtcatggacgaggacatcatggtagaatcaggagtattgtcataggcaacagtccagaactcaggagaatgaactgaaaataaatgctgtgttttcagag

SEQ ID NO: 193970 - DNA, 54 bp, Homo sapiens
ccccaccttcacggctctgctctgcctcgggctgagtctgggcccccggaccca

SEQ ID NO: 193971 - DNA, 98 bp, Homo sapiens
ggaaaggagaggatcccggagccgattgaagccttcagctgactgtggcccttttcgaggtctgcctctcttcattcactccatctacagctggatcg

SEQ ID NO: 193972 - DNA, 96 bp, Homo sapiens
tttgccataggtagtcagacgacaaagaaagcatcagccatatccatcaaacttggatcaagtgagacctgtcttctggttacctggatgatacta

SEQ ID NO: 193973 - DNA, 50 bp, Homo sapiens
ataggatcaagatggccatgtggcagggtccctcgtctgagctggctcac

SEQ ID NO: 193974 - DNA, 75 bp, Homo sapiens
ggagcataggaggaaaattcatcatctggtttggcatagaaatggtaccccttgttcaaaatgaacaagaagcct

SEQ ID NO: 193975 - DNA, 96 bp, Homo sapiens
ctgtgctgtccatgggaagagcatgcattgtgggttactggaggaacccgacatggattccacagagtgattctcatcagttccgtgtaatggcag

SEQ ID NO: 193976 - DNA, 90 bp, Homo sapiens
aaggattccaagtaactcttatttggaatctgagaaaaaggggttgattgaaagaatctatatggtacaggatattgtttcaactgttca

SEQ ID NO: 193977 - DNA, 106 bp, Homo sapiens
cagtattgaaatgcatttgccttatacagctaaagccatggaaaggtcaccatatcatcagccaacctcttacaggccacgcttattgctctctggagaacggggc

SEQ ID NO: 193978 - DNA, 100 bp, Homo sapiens
gggaaatttgattacatactgttagagaccactggattggcagacccaggtcttaaagaaagtgcagaagagatggtcaaaaacaaattggaaggaaagg

SEQ ID NO: 193979 - DNA, 83 bp, Homo sapiens
ctctcaccctccgtgcgccagggggctcagcatctgctgcgaatctccggcctcggccccctcagaccgtgccatgggtgaca

SEQ ID NO: 193980 - DNA, 100 bp, Homo sapiens
tgcaccccaccttgatccagcggacttacggtaagactttgaccccgacgcaggcttcagtgattgccgcggatcagaagcctgagcactttggctcgag

SEQ ID NO: 193981 - DNA, 78 bp, Homo sapiens
gaaagccacccaggagagaagatattgaggttgaagcactggacaatgccacatactttgtggatggtgtgggtcttg

SEQ ID NO: 193982 - DNA, 86 bp, Homo sapiens
cccggcagtgctgcaaccgctacagcagccgcaggaagcagctcaccttccaccggtgtgaccatgaagctcatggatgaggtcgc

SEQ ID NO: 193983 - DNA, 75 bp, Homo sapiens
gaaagcatggcgtcggtggtgttggcgctgaggacccggacagccgcgttacagtgtttctgccacctctgtaca

SEQ ID NO: 193984 - DNA, 90 bp, Homo sapiens
acctcggctggctattgcttgtgaatgtggtggaggcacttcaggaattctggcagatgaagcagtcccgtggtgctgacttaaagaatg

SEQ ID NO: 193985 - DNA, 82 bp, Homo sapiens
gacttcagcgtgtggaccatcctgaagaagtgtgttggcctgatggtcatcatgggccagtgctactacaacgagaccatcg

SEQ ID NO: 193986 - DNA, 101 bp, Homo sapiens
tgcagggaacaaactccagaaggccaaatggcctatggcatgtctgcgttacctttaaatctgataaaaggcactagaagcgctgcttatgaacgtttgga

SEQ ID NO: 193987 - DNA, 76 bp, Homo sapiens
gtttcacactccaccaagcatcccattacagatagaagagttggctggggaacagaccagggaattggtggatttg

SEQ ID NO: 193988 - DNA, 100 bp, Homo sapiens
agaaggagctagctgaaataacccttgatcctcctcctaattgcagcaacagcttgcacaactacagaaagaaaaatcagagattctgaaaaatctggca

SEQ ID NO: 193989 - DNA, 83 bp, Homo sapiens
agcgggtcaggctcttgctagatcagcaccggaggtggaagactggtgacttaagagattaaaattaatttggttgctgttgg

SEQ ID NO: 193990 - DNA, 98 bp, Homo sapiens
ggaaaacaacactcagtggctaatgaaggtaactagttctcccaactgtacagacatgagtaatgtttgtcaaccaacagagttcatctcccgacaca

SEQ ID NO: 193991 - DNA, 100 bp, Homo sapiens
agccattgctatcaatcttctgtctgtaggaagtacagagcaactgattttgttgttcctgggcctggaaaagtagagataacctacacaccaagtgacg

SEQ ID NO: 193992 - DNA, 90 bp, Homo sapiens
gaatctggtgttatcaacttaaaagatgccacctctaagatccaggccccagcctcagctgacattcgcgttttacgggggcaccagctc

SEQ ID NO: 193993 - DNA, 100 bp, Homo sapiens
agatgcgaaagccatggagttgagctgcagcgaagcacctctttacaatctctaccctttgccgaggagctgaagtaaaccagcacatgttttcacccac

SEQ ID NO: 193994 - DNA, 100 bp, Homo sapiens
aagcagatgatgtttcctgtccacttctaaattcttgtcttagtgaaaggaaatgctgacttttaacccacacaagcgaatctctgcctttcgagctctg

SEQ ID NO: 193995 - DNA, 100 bp, Homo sapiens
agaggagttgcaaagacgggctaggcatcttgagaaaaaattcctggaaaacccagacctggccataagggacacctttgtgaatgcctctcggaccctg

SEQ ID NO: 193996 - DNA, 98 bp, Homo sapiens
ccgaggggcggacgcgcggcggggcagaccgctggggactgcgggcggcgctgtgtccgtcgccatgacaggaccggaagctcaccaagctggagcgg

SEQ ID NO: 193997 - DNA, 74 bp, Homo sapiens
cccactgccacttgactggatgtatcttgtctacaccatcatgtttctggcgtgtgaaggcaaagaagaatgct

SEQ ID NO: 193998 - DNA, 125 bp, Homo sapiens
gttatgcccaccctccaactttgcgacggaaatgtgtcatcgaaagccagacagcccattttttcttatgataaagacggcatttggctcatgagcaaggtggcaagatcatcaagtgagtcaga

SEQ ID NO: 193999 - DNA, 75 bp, Homo sapiens
cggagtttgagccccggaggcagagcggctgccatggctggcgcccatgcggctctacacgctctccaagcgcca

SEQ ID NO: 194000 - DNA, 99 bp, Homo sapiens
ggagagccatcctcatggagctagaacgtgtcaaagcattaggcgtgaagcccccccagaatctctgggaatataaggacagtcattttgtttactcat

SEQ ID NO: 194001 - DNA, 71 bp, Homo sapiens
actgaaatcacaatggaaagtcttgacttgactgggtgaagttgaacaaattgctatgatgaaaccaaaag

SEQ ID NO: 194002 - DNA, 51 bp, Homo sapiens
ggctcatgcgggatttcaagcggtccattttagcttcctatctcctgaagg

SEQ ID NO: 194003 - DNA, 100 bp, Homo sapiens
ctgggagcggagcgccgccgctgttgccgggcaacgcggttactataacaacagtaccaaggtggctgtgaaaaccctgaagccaggaactatgtctgtg

SEQ ID NO: 194004 - DNA, 114 bp, Homo sapiens
gacgaattccaacttgtttcacgctatatcaggatgagataactgaaagggaagcagaaccatactatgaccagtcctgcctctgttgtagaagacatgtggtgtatataaagt

SEQ ID NO: 194005 - DNA, 100 bp, Homo sapiens
tgttaaacacaaaccaccctttaaattttcaagggaaggacagattcaagatggaaaaggtgatgtaaccattacaaatgatggtgctaccattctgaaa

SEQ ID NO: 194006 - DNA, 74 bp, Homo sapiens
gcaaatttctgttccatcagcgtttgtttggttacacgacagatccatgagcatgagcaggagaacgagttgcg

SEQ ID NO: 194007 - DNA, 100 bp, Homo sapiens
ttaagactctcaggcttactgtggatctggattctaaggcaacacttccttgaagaaacaagcttacagatcacaaaatttgtccaggatagacatagag

SEQ ID NO: 194008 - DNA, 98 bp, Homo sapiens
cactgctttctggaattatgtctggaattttattcttcctggttcgtgcattcatcctccataagaccctgatcctgaaaatccagaacccacaacta

SEQ ID NO: 194009 - DNA, 82 bp, Homo sapiens
gacctggccgatgaggaagtactgagcctgttggaggaactggcccggaaacaggaggacgatcatccagcagctcgtcaac

SEQ ID NO: 194010 - DNA, 75 bp, Homo sapiens
ctcggagcaacgagcgcagcgccggtgagaagccctaccactgcaactgggacggctgcggctggaagtttgcgc

SEQ ID NO: 194011 - DNA, 121 bp, Homo sapiens
gcggcagcgaggggctcggagaggtgctcggattctcgtagctgtgccgggtattgttgcagcatctggcagtgagactgaggatgaggacagcatggacattcccttggacctttcttca

SEQ ID NO: 194012 - DNA, 50 bp, Homo sapiens
agacggcggcagcagcggcattcagacacgaatgcagagtttgagtccag

SEQ ID NO: 194013 - DNA, 82 bp, Homo sapiens
gacagccattcggagctacatccagtgaataaggttgctgcttttgctcagaggacatccatgaccctaatggtctttttgt

SEQ ID NO: 194014 - DNA, 80 bp, Homo sapiens
cagtttggaaaatttggcagatgatgggcttccccaaggatttattgacattgctacttgagtgtgaacagttacctgga

SEQ ID NO: 194015 - DNA, 83 bp, Homo sapiens
caactttcccagaagttgttctaacgctgcctttgctttaaaacagtattacttgcgagacttggaggaggccttggagatgg

SEQ ID NO: 194016 - DNA, 50 bp, Homo sapiens
gtcatgaaaattctaaaagctgtataagatggttgacattactactgaag

SEQ ID NO: 194017 - DNA, 75 bp, Homo sapiens
gaaaacagcctcaagaaaccagtaacagattgtgttatttcaggtgttggaactcgccataaggcattgatcagg

SEQ ID NO: 194018 - DNA, 74 bp, Homo sapiens
cgggacctgggccctcattcaggcccagccctgttactaaaagatgtaactgaactgcagatccttggtgaaat

SEQ ID NO: 194019 - DNA, 96 bp, Homo sapiens
tgtggcagttcagaatgatggatcaagctagatcagcattctctaacttggtacatgtcccagagcaagcacacggaggcccgggagctcatgtac

SEQ ID NO: 194020 - DNA, 83 bp, Homo sapiens
gttcatcgaggagggcacattccttttcacctcagagtcggtcggggaaggccacccaggtctcggcgcggaagatggccggc

SEQ ID NO: 194021 - DNA, 75 bp, Homo sapiens
cgggcgagaagccctacgagtgcaacatctgcaaggtccgcttcaccaggactcctcctattttgaggacttctc

SEQ ID NO: 194022 - DNA, 83 bp, Homo sapiens
gtcttcggtggactccttcggcagtccacccaccgccgccgcctcccagggcatatctggaatctgaagttgctatatctgag

SEQ ID NO: 194023 - DNA, 75 bp, Homo sapiens
gaagattctgccgctgattgctatcacttctgcagaatccagtggggatgttctgttcttgaaggactgtgtagg

SEQ ID NO: 194024 - DNA, 96 bp, Homo sapiens
tcaatttaagcctgatctaacccctagaaacagccacagcatgttccgaagagatgattggaagatggaagtggagggttaaataatgaaatgcag

SEQ ID NO: 194025 - DNA, 90 bp, Homo sapiens
agatgagacttcacgactttttgtaaagaaaacaatagtagtgggcaatgtgtccaagtggtgtggaccctgcaagatcctggggccgag

SEQ ID NO: 194026 - DNA, 100 bp, Homo sapiens
gatagtctccagcgggcctggactgtgggctggtgtgtggaactgaaaaactgcttaaggttgaaaagagaaatttaagaaattgctgacggaataaaaa

SEQ ID NO: 194027 - DNA, 83 bp, Homo sapiens
gtggaagttactgccgcgccaccgagtccggaccggagactttggggcctaactagactgagaactatgagcagagaatacgt

SEQ ID NO: 194028 - DNA, 95 bp, Homo sapiens
aggtcaacaaggacaacaatgagatcgtggacaagatcatgggcaaaggacagatccagggcgtctctggccgagcctctttttgtggaaaacga

SEQ ID NO: 194029 - DNA, 87 bp, Homo sapiens
cgcacgtggattcagcgcgatgcccaaatccaagcgcgacaagaaaggagttatggtacagcacctgtaaatcttaacatcaagaca

SEQ ID NO: 194030 - DNA, 75 bp, Homo sapiens
aacgttgagggcacgagtcgggtcctgagaccaggtccatattcaagcctttcatctttgttgatgacgtaaaac

SEQ ID NO: 194031 - DNA, 90 bp, Homo sapiens
agtctgcactttcacccgtttcagcaccagggaaaaattggagttaagtttaatgttgggacagatgacatcgccattgaagaatccaat

SEQ ID NO: 194032 - DNA, 100 bp, Homo sapiens
cgggactagtggaccagctggtgaaggcagacagcgagtggcgacgatgagaaaatgcagaagtctccatggacgtttccctggcttaccgtgatgacgc

SEQ ID NO: 194033 - DNA, 91 bp, Homo sapiens
cctggggctgctaatgctctgggtctctgcaatggctgccatccggaagaaactggtgattgttggtgatggagcctgtggaaagacatgc

SEQ ID NO: 194034 - DNA, 97 bp, Homo sapiens
ctcggcttcatccaccgtgccaacctggacggctcgttccgatcgggtgctaccaaggttttgcttttgcatggaaatgtctactgcacagttgcac

SEQ ID NO: 194035 - DNA, 75 bp, Homo sapiens
cctggcttctatgaacatggcgatggctgcgtgtcctgccccacgtgctgacctcgctatcaaatacccaagttg

SEQ ID NO: 194036 - DNA, 80 bp, Homo sapiens
cctcatctggccggcagccttcgtccctgctcctgggcaacgtgctggtctgtgtgctggcccatcactttggcaaagaa

SEQ ID NO: 194037 - DNA, 75 bp, Homo sapiens
taagaatgataatggcaaaccagattctgtgggactccatagttctgccccagagacaagtatgaataccacaga

SEQ ID NO: 194038 - DNA, 99 bp, Homo sapiens
gcccggcctatgcctacgtgctcacggtcaacgagcggggcaaccactgcgagtactgcttcaccaggtaaatcaacagactgggaagatgatggttgg

SEQ ID NO: 194039 - DNA, 74 bp, Homo sapiens
gaaattagtgaaggagatgaagtagagtgctggtcccaaaggcgataacatctatgaatggagatcaaccattc

SEQ ID NO: 194040 - DNA, 74 bp, Homo sapiens
gtacagaccactttatggagctttcagatttgcatctgctggtgatgatggaattgtagttgtgtggaatgccc

SEQ ID NO: 194041 - DNA, 100 bp, Homo sapiens
gatgaagtcgagatctcaaatactgatggacttcagcagaaatctttatgatattggggaacaactggacagtgaagatctggcctccctcaagttcctg

SEQ ID NO: 194042 - DNA, 100 bp, Homo sapiens
ttgagtctctcctgcgccgagccttcggggcgatgtgtagtgccttccatagggctgagtctgggaccgaggaccgtataatagacgctggccccaaagg

SEQ ID NO: 194043 - DNA, 129 bp, Homo sapiens
ccgacacgggtattgtaccgctgagggaaaggagcgggactccggacctccaggagatgtgtcaccggtggtggccggcctcatcggggcctctgtgctggtggtgtgtgtctcggtgaccgtctttgt

SEQ ID NO: 194044 - DNA, 100 bp, Homo sapiens
ggacaacatcaccgtactgcatgtgaagctcaccgagacggcgatccgggcgctcgagacttaccagagccacaaggaggccgccgagcggctgaattcc

SEQ ID NO: 194045 - DNA, 97 bp, Homo sapiens
ctgcctaccagaccaggttttggaaaatgacgatgtgccgcagaatggaattcggcattgttcctacacagcttctcggcaacatctctatgttgat

SEQ ID NO: 194046 - DNA, 73 bp, Homo sapiens
tcagggggactgcaaaggccaatgttggtgctggcaaaaagatgctgcctcgaactctgtcactgagacccca

SEQ ID NO: 194047 - DNA, 74 bp, Homo sapiens
cacacttatagatcttctgcactgtttacaggcacagatgcctgtgaggagccaccaacatttgaagctatgga

SEQ ID NO: 194048 - DNA, 81 bp, Homo sapiens
cccggaggtgcccacgcagctgcctggacaaatgaagactggcccatttgcagagcactccaaccagctgtggaacatcag

SEQ ID NO: 194049 - DNA, 75 bp, Homo sapiens
tgaagagctgaagaatggagactacgtcttcatgaggtggaagaccacattgtgcaacacatcattggacaaccc

SEQ ID NO: 194050 - DNA, 50 bp, Homo sapiens
ccaggatgctatagcattgtcagtgattctttctactaatccagatactt

SEQ ID NO: 194051 - DNA, 107 bp, Homo sapiens
ccccatgggcgggtgtgtgggcgcccagcacgactcctcgggcagcctcaacgagaactcggagggcaccggagagataattgacgaccttgccaacctagtggaga

SEQ ID NO: 194052 - DNA, 87 bp, Homo sapiens
cgcggcagtgacccgccctgggagctgcccccagcggggccctggtgaaaacagatgaacaagaagtaatcaactttttattaacaa

SEQ ID NO: 194053 - DNA, 75 bp, Homo sapiens
tccaagctccgcaagctggaggcctcgggcaaggggccaggttgttaccccttctacaaaactgacccgttcatc

SEQ ID NO: 194054 - DNA, 80 bp, Homo sapiens
tgtggaggtggagacccacaggagccccggacttcacctgagctacctcagatgaaggatttgggggcagagcacttggc

SEQ ID NO: 194055 - DNA, 97 bp, Homo sapiens
gaagcccagacctgcagggttcgtggataataaactcaagcagcgagtcatccaggtcccagaacagttttcttctgggctccaattatgaaatggg

SEQ ID NO: 194056 - DNA, 100 bp, Homo sapiens
gtcgggaacagccatgcaaaggcaggggaggaagccacctcgaggaccagtcctgcctctgttgtagaagacatgtggtgtatataaagtttgtgatcgt

SEQ ID NO: 194057 - DNA, 89 bp, Homo sapiens
gacaagacgatccgggtaaagttccagggaggccgcgaaggatcagggagcttccaaggcatttgatacctttttgatgggaagaaggg

SEQ ID NO: 194058 - DNA, 90 bp, Homo sapiens
caagcagacaggccagtggatcggaatggtggagaacttcaaccaggcactcaaggatgaggatgagaacagtacggggaacaagggaga

SEQ ID NO: 194059 - DNA, 75 bp, Homo sapiens
tctacgtcaggctcaagcaagcttccgggatgatgaagttgcggagaataatgaacatgatgtcacttctactga

SEQ ID NO: 194060 - DNA, 75 bp, Homo sapiens
tcacttacaacattaatcagatactgcatttaaggaagatgttaccgagtacttcagtgaattccttagtgcagg

SEQ ID NO: 194061 - DNA, 82 bp, Homo sapiens
aggataagggcgacagcaacagctctgccggctggaaggtgccaagtcctgccctgccaacttcttggcagctgccgacgac

SEQ ID NO: 194062 - DNA, 74 bp, Homo sapiens
cggccccgacatcttcctgcacatctctgagtgcataaggcaaatccaatacgcaagtaccagggtctggagat

SEQ ID NO: 194063 - DNA, 90 bp, Homo sapiens
tgacctgcccatcgccactgcctcagctgatgtcgccgctgatattgccaagtacactagcaaaaggatcaactgaggccaaaattactg

SEQ ID NO: 194064 - DNA, 98 bp, Homo sapiens
cactctccagcaccagcttccagttagtggatatagcacaccatccccagccactcggtcaaggagtgtgatgactggcgagcagatggctgccttcc

SEQ ID NO: 194065 - DNA, 49 bp, Homo sapiens
cggcgaccggcggcgtccgaggagcaggttcaggagaagtggcacctgg

SEQ ID NO: 194066 - DNA, 100 bp, Homo sapiens
aacagccacccaaaaagtttgccccggtagttgctccaaaacctaagtacaacccatacaaacaacctggaggtgaggggctaagttctaaaaacatcag

SEQ ID NO: 194067 - DNA, 101 bp, Homo sapiens
gatggggaggcaccggcagctgtgacctctgcccaggacagaggctgatgggaaatcctacgtaaagtaccaggtcatcggcaagaaccacgtggcagtgc

SEQ ID NO: 194068 - DNA, 75 bp, Homo sapiens
aacaccctgagtgcggatttctgctatgatgacaggaaagtatgcctcagactcctcccttttcagcaatgtttg

SEQ ID NO: 194069 - DNA, 90 bp, Homo sapiens
aaaaaagccaaggagcgggagaaatcatctttggacaaaagaaagcaagaccccgagtggaagatatgtgtcacaaagatgtctacacgg

SEQ ID NO: 194070 - DNA, 74 bp, Homo sapiens
cagtccacccaccgccgccgcctcccagtcgtccctcatggaccttgctgacgtcttcacggccccagctcctg

SEQ ID NO: 194071 - DNA, 74 bp, Homo sapiens
tgtgaaatcgcgtggactgcaacacccagcagcgcgagctccttaataagcatttatagtcagtttttggcagc

SEQ ID NO: 194072 - DNA, 93 bp, Homo sapiens
tggagatgaagaagaagattaacctggagttaaggaacagatccccggaggagaagctggaggatcaggagcagcgggcccgacagctcaagg

SEQ ID NO: 194073 - DNA, 100 bp, Homo sapiens
gttccagaagagaaaaagcccaggcataaaatcatctccatattctcaggcacagagaaaggtgcaagtgaaagtgtaggaaaacatatgcttgaagcgt

SEQ ID NO: 194074 - DNA, 75 bp, Homo sapiens
agaaggcagtacattttgggttaccgtatgaccagtataagactccaatggagaacattgggctacaggactcac

SEQ ID NO: 194075 - DNA, 98 bp, Homo sapiens
gaaatctctccaaccaggaacaaacacctgccttgcaatattaggttccatgcctctgcagcggtgcctcatgtttgctgtgtagttgctgtcctaac

SEQ ID NO: 194076 - DNA, 83 bp, Homo sapiens
gcaacatgacagaggaccatgtgatgcacctgctccaggactccctggaggaaaagcggaagcggcagcggtctgaacgcctg

SEQ ID NO: 194077 - DNA, 98 bp, Homo sapiens
gcggcacctacggtcacgtctacaaggcgaggcggaaagatgggattttttatcaagcagaaatgcatcgaacaacgagaatcaagatcactgagcta

SEQ ID NO: 194078 - DNA, 100 bp, Homo sapiens
tccgcacctcggggacattattgcgcgtggaacggctgcttttggaagaagcccccgagcgcccacagcatgaaggaggaggccttcctccggcgccgct

SEQ ID NO: 194079 - DNA, 80 bp, Homo sapiens
aggagctgggcctaggtctgcgccctgtcaagttcagcagctgtgtggggaccaaggggacacaatatgagaccaacagc

SEQ ID NO: 194080 - DNA, 75 bp, Homo sapiens
cacagatctatggactcattcatggtgacctgtttctactttccaggtccactggtgtttggtgtacccatgtga

SEQ ID NO: 194081 - DNA, 90 bp, Homo sapiens
ttgaaattgttacttcaacttctgctggttgctccactgtgcctaggaagagctggagcttgtgttgtgactgtaaaattataatttagt

SEQ ID NO: 194082 - DNA, 82 bp, Homo sapiens
cgacgggccgagcctgccactagattcgtcagcgaactgcagctcaaagaaacctttctccaacaccagcaagccctaacca

SEQ ID NO: 194083 - DNA, 60 bp, Homo sapiens
tttttgatgaaattgtagagaactaagaagctcattcacacagaagacccatttaatgat

SEQ ID NO: 194084 - DNA, 75 bp, Homo sapiens
tttggaagtgtgccagaattggaactcgatcaaaatgccactgaaaaagtccagacaatgttcacagccattgat

SEQ ID NO: 194085 - DNA, 80 bp, Homo sapiens
ccacaagcaggtccaaagagagacttgatggaccagacaaataggatgatggctgcccccacacaataaatggtaacata

SEQ ID NO: 194086 - DNA, 96 bp, Homo sapiens
gtaacttggccaggctggccccgagcggaactggagaaagctgagggagaaatggcttccctgaggcaagtgtaacctacattcccagcccaccag

SEQ ID NO: 194087 - DNA, 99 bp, Homo sapiens
aggtggactatgaggctatccgcagcgagatggagcagctcaaggagataacgaaggaggcccaacttcattcaataaggagcctgacggatttatccc

SEQ ID NO: 194088 - DNA, 101 bp, Homo sapiens
gacatcgagcctgagggaggggaaaggcgcagggctcaccagctggattccctcctgggggcttcattcccaaaacggccaccacgcccaaaggcagcagc

SEQ ID NO: 194089 - DNA, 75 bp, Homo sapiens
cccgcgcggcgccgggcgctgactgagcctcctgacaaggtgatccgggcgggccccgcaggaattttatcccct

SEQ ID NO: 194090 - DNA, 75 bp, Homo sapiens
cagcaacccaataggtcagctacacaagacgtgggcaggagtgtccaggtgatgtagtcaaggtgatcgtctccg

SEQ ID NO: 194091 - DNA, 90 bp, Homo sapiens
aaagacttcagggagaaatgatgaagctatcagaagaaaatcggcacctgagaacttgtctgcagcgcagattgctacatattgcttggc

SEQ ID NO: 194092 - DNA, 49 bp, Homo sapiens
ccacccgcctgcccgccatgttaaatcttgctactgctcactctttggg

SEQ ID NO: 194093 - DNA, 73 bp, Homo sapiens
agcacattttgaaaaatcctctcattattaacagcattatcgataaggctctgtgtgctccgggatggagcag

SEQ ID NO: 194094 - DNA, 72 bp, Homo sapiens
cctctctctgtccccggccgccatggagcagccgccggcgcctaagagaacatccatgatagcagtcttctg

SEQ ID NO: 194095 - DNA, 75 bp, Homo sapiens
catgggctttcacaggcccgggagcggcgcgggtactgatgctttgggttggaaaaaattgtacacagaattttc

SEQ ID NO: 194096 - DNA, 97 bp, Homo sapiens
gaaaaatgaaaaccgattttatctgaaggaagtgaacatcagcatgtatttggttaatggctccgctatcattgttaattatgcaagtaaaatgttt

SEQ ID NO: 194097 - DNA, 90 bp, Homo sapiens
agaaggagtgcttctaccagcccatgcccctgaaggcctcgctggagatcgagtaccaaggctgacagatgaagagattgatatggcctt

SEQ ID NO: 194098 - DNA, 80 bp, Homo sapiens
ttcctgtattccttgtatcgacatacacactgggtacgctgtgccaaattgttgccagcaaaggaggttttgaaatggtc

SEQ ID NO: 194099 - DNA, 100 bp, Homo sapiens
tgaagaggagtcgaggattggcactcacagcggcagcgatcaagcaggcagcgggctttgccagcaaaaccgaaacagttttcggctttgtgagaaacct

SEQ ID NO: 194100 - DNA, 90 bp, Homo sapiens
ggacctccacctcagtttaaccggatggaagaaatgaacattgatgatggcacctcagatcgcccctacagccatgctctggtggctgga

SEQ ID NO: 194101 - DNA, 100 bp, Homo sapiens
gcaagcgcgggccgcggaggaggtctcaggagttgctggagaatgtaaccctaatccataaaccagtgtcgttgcaaccccgtgggctgatcaataaagg

SEQ ID NO: 194102 - DNA, 90 bp, Homo sapiens
cctctcctgatctggcctcatctgttccagggaggtgggattgactccgccgcatgcaagagatgattgcaaggatgcaggcgcagatgc

SEQ ID NO: 194103 - DNA, 76 bp, Homo sapiens
tccttgtggcagccaaaaggcagaaggcccagtctgcgctcctcagaccaccggcaggtgaacagcctgatgcaga

SEQ ID NO: 194104 - DNA, 90 bp, Homo sapiens
caatgtgacacaaggaaagtattctacaggtggccagcatcgaaatgttcagccttttagtgatgaagatgcatcaattgaaacaatgag

SEQ ID NO: 194105 - DNA, 100 bp, Homo sapiens
tcgggccggcggacagtgagggcgcgtattctaccttgtaaatactgttatttgtatatactgtaaatgatgacatcggtgggcactaaccgagcccggg

SEQ ID NO: 194106 - DNA, 115 bp, Homo sapiens
ccagaccctggagcctcagttggaagcagccgatccagcctgcggagcctgtggggcaggttgaaggtcgaggagctggaaggcgagcggagtcggctggaggaggaaaagagga

SEQ ID NO: 194107 - DNA, 100 bp, Homo sapiens
agccaccaccaccaccagatggtgctcttacagcctgttccaagtgtggcttaatccgtctccaccaccagatctttctccgtggattcctctgctaaga

SEQ ID NO: 194108 - DNA, 99 bp, Homo sapiens
aaagcagctggaggaggctgaggaggagaggacagaggtgcctggggcaacctccaccttgacggttccaggacaccttacaggaaaacatgagagaca

SEQ ID NO: 194109 - DNA, 75 bp, Homo sapiens
gccaggaccggccgaacgcagaggtttacccaaggtccagcctagcccctaggcaccatgtcggacagtgatcta

SEQ ID NO: 194110 - DNA, 75 bp, Homo sapiens
cactgctgggccctgaggctgcaccaagtggcgaaggagccggctccaaggtcgcaatggaagaagagatcgccg

SEQ ID NO: 194111 - DNA, 82 bp, Homo sapiens
tgagtggttgtgtggtcgcgtctcggaaaccggtagcgcttgcagcatggaggctactcacagtcgaactacaactccccgg

SEQ ID NO: 194112 - DNA, 107 bp, Homo sapiens
cttcccctcctcgccgccaccgcccaggaccgccggccgggggacgagctcggagcagcagccaggtgctggagaatctggtaaaagcaccattgtgaagcagatga

SEQ ID NO: 194113 - DNA, 100 bp, Homo sapiens
cgcgcggaggctcgcgagatccgcatgaaggagctggagcggcagcagaaggagttcagagaagccgaactgggattaccatgcagaaatacaagctttt

SEQ ID NO: 194114 - DNA, 100 bp, Homo sapiens
cgccaccgcaggtcgaggacggtcggactcccgcggcgggaggagcctgttcccctgagcaaatccagtttgctgatgacatgcaggagttcaccaaatt

SEQ ID NO: 194115 - DNA, 100 bp, Homo sapiens
aggttatgtgctgctctcctgagcaacatctctgactgtgatgaaacattcaactactgggagccaggaaatgtttcaacgtgcgcaagcgttgcggcgg

SEQ ID NO: 194116 - DNA, 75 bp, Homo sapiens
aagatcattttattgacattgctgaagtggagacaggtactccaaagattcaggtttactcacgtcatccagcag

SEQ ID NO: 194117 - DNA, 75 bp, Homo sapiens
tgctggggtcgcgtgtcaccaacgtgaaggagctggaagctatcaaagctcgagtcagggagatggaggaagaag

SEQ ID NO: 194118 - DNA, 100 bp, Homo sapiens
acggggtcggcgccccgcgcctgccgctgccctacggcttctccgccatgcaaggctggcgcgtctccatggaggaacatgcttgccaactcagccagcg

SEQ ID NO: 194119 - DNA, 100 bp, Homo sapiens
caagaatctcgtgctcaccggtttctcccacatcgacctgcatgccagtgtgaaggaaaagataaccgaattccattactgaaggaagtttttgaggcct

SEQ ID NO: 194120 - DNA, 98 bp, Homo sapiens
ttggatcagattattcacgaagctctagaaaggcactgaacttaccttcaactacaacctagaatgtcttgggaatggaaagactgtttgcaaatgtg

SEQ ID NO: 194121 - DNA, 83 bp, Homo sapiens
cgccagcccgtgccgcgagcgcggcctgcaggaggcaaagttggccaagaattacggcatgacccgcatggacccctactgcc

SEQ ID NO: 194122 - DNA, 100 bp, Homo sapiens
ggcggccccggcctcccacactcctgagccaggaacagatcaagctgctgaccaaggaccttcggggggagatgacgccaccctcggtggaagagcgccg

SEQ ID NO: 194123 - DNA, 74 bp, Homo sapiens
cctgggtgaactttcacggacaacctcagaggacaacgaagtgttcgattgcctggttttctctggaattctgt

SEQ ID NO: 194124 - DNA, 51 bp, Homo sapiens
gctgacatggccaccaacacacgtgatggagtctcgctgtcgcccaggctg

SEQ ID NO: 194125 - DNA, 100 bp, Homo sapiens
ggagttcaagaagaacactccagagacctgtcccggaaccggtttcccgaggtgcccgaggcggcgtgccagctggtgtccctggagggcctgagcctct

SEQ ID NO: 194126 - DNA, 83 bp, Homo sapiens
gccgcgcgcctttgtgcgcgcgccgagggcgaactttctgaccaagtatacaactacccagagggcctaggagaagtgctgta

SEQ ID NO: 194127 - DNA, 75 bp, Homo sapiens
ctcgtcctcatggtggacaagaaactggtggtggttttcggaggcacagggtgaggacgcttgagcggaagttag

SEQ ID NO: 194128 - DNA, 90 bp, Homo sapiens
tcttccggttcttcgaggctcgacccgaggatgtcaaccctccaaaagaattctgcttctcagaagatgcactattatagatactctaac

SEQ ID NO: 194129 - DNA, 50 bp, Homo sapiens
aaccgcgcggccgaaccctccgaccgcgctgagcacgttcttccaagaaa

SEQ ID NO: 194130 - DNA, 98 bp, Homo sapiens
tcaagtcctggctcagcaagactctcgagcccatatatccttggaacagaagatcttattgtggaagtgacttccaatgatgctgtgagattttatcc

SEQ ID NO: 194131 - DNA, 96 bp, Homo sapiens
ctcccaagtggctgggattacagggtcttggctccgtcacccaggctgaagtgcagtggtgtgatcatggctcacagcagccttgaattccttagc

SEQ ID NO: 194132 - DNA, 85 bp, Homo sapiens
agtactttggtggacgagttggagtcatctttcgagaaaatgaaactgaagccgtggtcacgtgacaggacatgtagtatatagc

SEQ ID NO: 194133 - DNA, 88 bp, Homo sapiens
ccccgcctgcatggacaaggggcgggcggccaaggtcatcatcagatttgaaatatttaaagtggatacaaaactatttcagcaatgc

SEQ ID NO: 194134 - DNA, 50 bp, Homo sapiens
caaaatcttcactgcagttcttaacaggggccagtgtcattcaaagatgt

SEQ ID NO: 194135 - DNA, 82 bp, Homo sapiens
caatgatctctaccgatgggaagtccttattattggccctccagatacactttaaggagaatttgcgctttggcttgatgga

SEQ ID NO: 194136 - DNA, 100 bp, Homo sapiens
ttatcctcaagagtcagctggcagaaaataccagagcagagtgttcttcttctgcatgcctgcgcccacaatcccacgggagtggacccgcgtccggaac

SEQ ID NO: 194137 - DNA, 100 bp, Homo sapiens
cttgccccagaaagccccagacggaaagagctacttgctgattcctcagatgttagcaatgatggttgatttggaagaagatgaggactgggcaaatgca

SEQ ID NO: 194138 - DNA, 51 bp, Homo sapiens
cttgaatcagaaattgagaagctgatcccagatgcagtgactggttactac

SEQ ID NO: 194139 - DNA, 99 bp, Homo sapiens
accgctgtgtttcgggcgcctctctgccccagggatccaagatcaaagtgtcggaggaaggcttccagattccagctacaataacagaacgatataaag

SEQ ID NO: 194140 - DNA, 82 bp, Homo sapiens
ttcagagcgcagccatcggtgcgctgcagatactgagccttcataagggttgactacctcagatttgctgcactcattgtgg

SEQ ID NO: 194141 - DNA, 97 bp, Homo sapiens
cctctccagccatgtggaactgaatttataagtatttgaccgtactcaaaatgtgcaaggaagaataatggaagcccctgaataccttgatttggat

SEQ ID NO: 194142 - DNA, 80 bp, Homo sapiens
gcgagcgcagcaaagcgcccagcctgccgcctcgctgtccctgcggcttctggggactcgctctttactgagcgtgtttg

SEQ ID NO: 194143 - DNA, 75 bp, Homo sapiens
cagtttgcagctcgtgccatcatttcagagctggattctagtagcaagatatgtgatttgaatgccaacactgaa

SEQ ID NO: 194144 - DNA, 76 bp, Homo sapiens
ctggaagtgtagaacgtcattcagagtttcagctcaggctccaaactctgccatcacagctcagactggtgttggg

SEQ ID NO: 194145 - DNA, 100 bp, Homo sapiens
ctggaatagcagagactccggaggggcgtcggaccagccggcgcaagcgggcgaaggaagagagaagggcacagttacctaagtatcaacgtaatcttcc

SEQ ID NO: 194146 - DNA, 51 bp, Homo sapiens
tcctgcctttgagcggactcccttttaagacctttccaaagtgaaactgat

SEQ ID NO: 194147 - DNA, 73 bp, Homo sapiens
tttgacgaggtggacatggctcacaggtcaccacctcccacagccctgctgcaccaggggagcaaggcttcgg

SEQ ID NO: 194148 - DNA, 100 bp, Homo sapiens
ggaagccctttctcctcggcactgtattctttacctgcttcccaatcccactgatgaggatcagcccatggaattgaatgatctggcacgggaccctcca

SEQ ID NO: 194149 - DNA, 82 bp, Homo sapiens
atgaaaccggcttgttgtcttcaattaaaaaatttattaaaggaagcacacctaaggtcaaaatgcagatcttcgtgaaaac

SEQ ID NO: 194150 - DNA, 82 bp, Homo sapiens
tctaatttgaaccatgtttggattgaagccgcctctgtattacttaccaggcagtgaaaaagcagtctggctcccgaggtcc

SEQ ID NO: 194151 - DNA, 82 bp, Homo sapiens
gcagagcggagggagccccagacacgattagaagcccaggacccaggaaggagacacaggaaatttattcaaagtccccacg

SEQ ID NO: 194152 - DNA, 83 bp, Homo sapiens
ggaaccattgtgtgtacacttttggccaggggaccaagctggagatcaaacgccagcttcttcaggtggtcagagcagccaat

SEQ ID NO: 194153 - DNA, 74 bp, Homo sapiens
gcagatttgttattggtgggcctcagggcgatgctggatcttttcttgtctgaatgttatgaggcttccattca

SEQ ID NO: 194154 - DNA, 75 bp, Homo sapiens
ggatcgggtggagtgaaggtcacgtcgccatgctaggacttctctcaaacttgtgtgctgaggagactcagatgt

SEQ ID NO: 194155 - DNA, 100 bp, Homo sapiens
ctcatcgccctggccgacaagcacgcaaatctttgtggagttcacctctgtgtttgactgccagaaagccatgcagggcctgacgggccgcaagttcgcc

SEQ ID NO: 194156 - DNA, 75 bp, Homo sapiens
ttatgaccagagtattgccgcggtggaaatggagccgaggcctgcctggagccccagatcaccccttcctactac

SEQ ID NO: 194157 - DNA, 100 bp, Homo sapiens
cacagatcgagaatgtcctttgtttggtctttctggaatcaatgcaagttcggttcccactgatggctcagttcctggtccagaactttacacagaaaag

SEQ ID NO: 194158 - DNA, 100 bp, Homo sapiens
ctaagagatatctgcaatgatgtactggttgacctgacagttcaagaaaaggagaaatatcttaatgtgtctcgctggttttgtcacattcagcattatc

SEQ ID NO: 194159 - DNA, 100 bp, Homo sapiens
gaccagcgaagaccaccagcacttcacctgcaccatctggaggagcctcctcaacaagcccaagagtgagatgaccccagaggagctgcagaagcgagag

SEQ ID NO: 194160 - DNA, 75 bp, Homo sapiens
gacagatgtgaacttccagggcaagaacctggacaccgtgaagccagtggtggcggcgccagtgggtggaggagt

SEQ ID NO: 194161 - DNA, 100 bp, Homo sapiens
cggtgttacccacgactgcctgggacctggccaagggctccacacaccaagaccaagcactctcgagtggaccctgaggagctcttcaccaagctcgacc

SEQ ID NO: 194162 - DNA, 75 bp, Homo sapiens
acggcgcggcagagtccccgtacgcctacagtaacggtcaaaatgcagatcttcgtgaaaacccttaccggcaag

SEQ ID NO: 194163 - DNA, 148 bp, Homo sapiens
cggccttcagcgactgcaccagcaagatcggcaggcgagattgcctgacccaggcctgctcggccctcacagggtaactaggatttctacctcaaccgcgagacctatgcaaggacggtgtggaccaactcgcgcccgcggcatggtg

SEQ ID NO: 194164 - DNA, 75 bp, Homo sapiens
cagcctgccgcctcgctgtccctgcggcttctgggggtcagcccaaggccaaccccactgtcactctgttcccgc

SEQ ID NO: 194165 - DNA, 76 bp, Homo sapiens
gccagcttcctagacttcattacgttagctttatacgtctacgaatatttactgcacgtaggagcacagaaatctg

SEQ ID NO: 194166 - DNA, 100 bp, Homo sapiens
ggcccttcttcagtcaccacaggatgcctgccattcatgaacaggaaggagaggacgggctttgaataaaaaacagagcttttgtgctgccttgcaccag

SEQ ID NO: 194167 - DNA, 83 bp, Homo sapiens
ccgaggtgagcgtgggcgttgccagtggtgctctgtcagtgcctatggtgatgtgtccaatctagatcccaacttctcatttg

SEQ ID NO: 194168 - DNA, 101 bp, Homo sapiens
gatttaaagctgagctgcgaggaaaatggcggcgggagatccagacatttaatgtggatgcaccatgccagaccgtggaagatttaacgaatggggttgtg

SEQ ID NO: 194169 - DNA, 71 bp, Homo sapiens
tgcatgcaccaaaacgaggacagaggacagtccagcttatctgccgaggattccccctggaaaagtacgcc

SEQ ID NO: 194170 - DNA, 75 bp, Homo sapiens
gcagtatgtggccagttatttgcctcagtaaaagagataaaagaatcagagtgtctcaacccttgacaagaggac

SEQ ID NO: 194171 - DNA, 100 bp, Homo sapiens
ctacaaaagattgattgacgtcccagcactattcctgatcagagaactccagttgcttcaacacacagtatcagtagtgcagccaccccagatcgaatcc

SEQ ID NO: 194172 - DNA, 82 bp, Homo sapiens
tccaagctgcctggagtcaaggaagaatatgagttggaagtaaagagggtgcaagacattctttcgggaatagagaaaccac

SEQ ID NO: 194173 - DNA, 100 bp, Homo sapiens
tgatcaagttctcgtggagtcagacaatgagagaacactaaactctacatctcccttcccgagcaaggagctggctgaagccacaaaaacattgctgcat

SEQ ID NO: 194174 - DNA, 100 bp, Homo sapiens
gattatttggtcactgaggaagagatcaatcttaccagagggccctcagtttatttggcaacccaaggagttaatcctaaggaacatccagtaaaacagg

SEQ ID NO: 194175 - DNA, 75 bp, Homo sapiens
aacacttttggaacttagacgctaacgcaaacatgcagatctttgtgaagaccctcactggcaaaaccatcaccc

SEQ ID NO: 194176 - DNA, 83 bp, Homo sapiens
gcgccttgggacagggggatttggaaatgtcatccgatggcacaatcaggaggcaagtgaggcctatctggttggcctttttg

SEQ ID NO: 194177 - DNA, 100 bp, Homo sapiens
ctctgtaggaaggaacttggttccccctccctcagcttccgccccaaaagatactcaggagaaggaagtcagagcgatggtaggcagcgacgtggagctc

SEQ ID NO: 194178 - DNA, 106 bp, Homo sapiens
cggcggcaggccctcaggcagctggacggagagctgggccacctctgccgtggctgggccgagaccctcaccaaagtgaggccgcagcgtttgatgacgagtggcg

SEQ ID NO: 194179 - DNA, 100 bp, Homo sapiens
gagtggttccatgatgggaagtgacatgggccaaggagatctgttgaagaatgccaagaatgaagctatagaaaacatgaagcagatccagctggcatgc

SEQ ID NO: 194180 - DNA, 100 bp, Homo sapiens
ccgcgatgtcaccctgagagtgaccggcgaggtgcacattggaggcgtgatgcttaagctggtggagaaactcgctggtttaggtgaatttcgaattcgt

SEQ ID NO: 194181 - DNA, 75 bp, Homo sapiens
tccagtcactgcataacattggcagtgtggtgcagcacagtgagggggcatgttatttgaaagcaattgagacgc

SEQ ID NO: 194182 - DNA, 82 bp, Homo sapiens
gaaggcagccatggagggcgatggctcagattcgccggttcttgatagtccacaatgggtgaaccacagcaagtgagtgcac

SEQ ID NO: 194183 - DNA, 83 bp, Homo sapiens
tctgagatgttcttggtcacctgatggaagcaaaatagcagctggctcagccgacaggtggacccccaaaagtacaagggcat

SEQ ID NO: 194184 - DNA, 75 bp, Homo sapiens
cgtctcttacgtctgcggaagtgcagctgcctcagttcttagcgcaggacactgggtccccttggagcctcccca

SEQ ID NO: 194185 - DNA, 99 bp, Homo sapiens
caaggacgtggttgaggaattcagcgatttatacaacgaggttatgaagacagtatggagtttccagaccatagtagacatttgctacagtgtctgagc

SEQ ID NO: 194186 - DNA, 100 bp, Homo sapiens
actgaaagaacttctgatatgttctggagatactttgcttttaattgaaggacaacttcctcctctgagcaggtatcttgagaagccaatggagattgcc

SEQ ID NO: 194187 - DNA, 101 bp, Homo sapiens
gcgtttccgttgtcggcctcccactgcaggcctccccatggccacccatggaccagtcggcattcacttcctcccttctgcggcccataaaagccctgggt

SEQ ID NO: 194188 - DNA, 82 bp, Homo sapiens
ttaagtcccccaaagatgagatttacctgtgagatgtttcatcccaacaatggcgattttgctgacagctgccaagaaaatg

SEQ ID NO: 194189 - DNA, 130 bp, Homo sapiens
tcgctgcggcggcgactgagccaggctgggccgcgtccctgagtcccagagtcggcgcggcgcgagccccagtttgagggacagcgggatatccaccatgctgctgtgagactcgggcagttgtgactgg

SEQ ID NO: 194190 - DNA, 75 bp, Homo sapiens
ggaatattggacctcaatacctataacgtcggttgctccttgagggcaggacagttcttatggctttatccgttg

SEQ ID NO: 194191 - DNA, 87 bp, Homo sapiens
gaatctccgtcgtgaggccagaggctccagtccccgcgataccagcgggcaagcagaaaacaagaggctcaagaggggcagcccccg

SEQ ID NO: 194192 - DNA, 100 bp, Homo sapiens
agagcgtgccctacttcaaggataagggtgacagcaacagctcggcgggctggaagcttgaattcggagtgatttaccactgcacagaggagcggctgta

SEQ ID NO: 194193 - DNA, 100 bp, Homo sapiens
gggaggagaaggaaggcatggaaagttccagccggttcgagagctagctcttttaaaggatctgtcttctcaaggagcctagttggctatgcacaaggaa

SEQ ID NO: 194194 - DNA, 74 bp, Homo sapiens
ccagatccgctgatctagtgcttctcgaaaaaaaccttcaggcggcccatggacatatctgaagagatggatta

SEQ ID NO: 194195 - DNA, 74 bp, Homo sapiens
cctttgaaggagtggtttcgactggatatctcttttaacggaggccagaatggtgcaaagcaagccgacagtga

SEQ ID NO: 194196 - DNA, 90 bp, Homo sapiens
agaggaagaactgaccagagctgatcccgagcagcgtcatgtaccccttggtacacctgatactgttctatgagaaccggctgaaggacc

SEQ ID NO: 194197 - DNA, 100 bp, Homo sapiens
gaaagtaattttgtttgccgaagtgacccccacaacgatgcgtctcctggatggtgccggtggtggtgtgcacattgagccccggtatagacagttcccc

SEQ ID NO: 194198 - DNA, 131 bp, Homo sapiens
tgatttcagactcagaagccgacgttcgagaggaagattcttacctctttgatctcgacaataagggagtgcatccgccccaacccttttccccctcgtctcctgtgagaattccccgtcggatacgagca

SEQ ID NO: 194199 - DNA, 83 bp, Homo sapiens
gcccccaacaccacgacaatccagtttcctgctaatttgcagcttcctccagtttggtgccctggttgtcagatgttggaaag

SEQ ID NO: 194200 - DNA, 83 bp, Homo sapiens
gccggcggtgcagcagccggccgacccagagtagtaacagttacccctcaatgagcgacccctacctgtccagctattacccg

SEQ ID NO: 194201 - DNA, 75 bp, Homo sapiens
gccgctctgtctacaacccgagggcgccctgcgtccggcagaggaggcgagcatcccgctcaggtgatgaggaac

SEQ ID NO: 194202 - DNA, 71 bp, Homo sapiens
ggatggcgcggctgcgcttcgggaacccggtgccggactgcgcctgctgccagtggacacgcatgtgcaca

SEQ ID NO: 194203 - DNA, 100 bp, Homo sapiens
ctcttgtttatcgagggttttgggctggtggtctcggcaggaaagtggacacttaagttatgcctgtccgaaaaatatgctcggagaacgtgagcctcca

SEQ ID NO: 194204 - DNA, 100 bp, Homo sapiens
tgagggagaaaggcgggcccgggaacagatgcacccactgggcctatgtaataacaatgacgaagaggacttgtatgaatatggctgggtaggagtggtg

SEQ ID NO: 194205 - DNA, 75 bp, Homo sapiens
cgcaattcttacgatgtcttctctttgctacggaacttgtaatagctggcatcgttgagaatgaatggaaaagaa

SEQ ID NO: 194206 - DNA, 100 bp, Homo sapiens
tctgaccatgtgacacagaatactctagaggatgctattattcatggactatccagtctaacagcttgccagttgagaacgatatacatatgtcagtttt

SEQ ID NO: 194207 - DNA, 74 bp, Homo sapiens
tctggtggtggctggttactaccatgccaatgcagctgtgaacgatcagagtgcctttcttcctgacgtggagt

SEQ ID NO: 194208 - DNA, 75 bp, Homo sapiens
ggagaactcaaggtcttcatagaccagaaccttagtcccgggaaaggattttttatcaagcagaaatgcatcgaa

SEQ ID NO: 194209 - DNA, 100 bp, Homo sapiens
gttcagcaggtcctgttggagatgatagttggcagagtcagcatatatgattccaaaaggcaatccgggaagactaaggagacaagcgtcaactggtgtc

SEQ ID NO: 194210 - DNA, 100 bp, Homo sapiens
gatgaccacagagagtgcaggtcagaaaataaaggagctgctgtctggaattggcaacatctctgagaggttccagaagcggcgactagataaagtccga

SEQ ID NO: 194211 - DNA, 88 bp, Homo sapiens
caaggagtatatcatgaaaattctacttcaaagaacattaaccaggtggtatttgttggaaatttcttgagaattaatacgatcgcca

SEQ ID NO: 194212 - DNA, 75 bp, Homo sapiens
gaaggacaaggacagaatcaccagcactggctgaagctgctgtgacttactcgaagcctcgattggccacatttt

SEQ ID NO: 194213 - DNA, 88 bp, Homo sapiens
ttctccacccatcccgagaacacctctacggcagacacatgcaggccaacccagaaccaccgaagaagaataatgacaaatcgaaaaa

SEQ ID NO: 194214 - DNA, 100 bp, Homo sapiens
gatgatgactcaggctgtgctttggaagagtatgcctgggtcccgccgggtctgaagcctgaacaggaagagagaagggcacagttacctaagtatcaac

SEQ ID NO: 194215 - DNA, 83 bp, Homo sapiens
atcttgacgaggctgcggtgtctgctgctattctccgagcttcgcaatgcaaaatgatgcttcaacacccaggccaggtctct

SEQ ID NO: 194216 - DNA, 83 bp, Homo sapiens
gttcgcgggtgtgtgctgcgttcacaggtgtttctgcggcaggtgatgtgtccaatctagatcccaacttctcatttgaaggc

SEQ ID NO: 194217 - DNA, 88 bp, Homo sapiens
aagaagagaaaaagagaagatgaagaaacccagcttgatatgttggactccagaagacctttccagattcgtggttgagctgcagcag

SEQ ID NO: 194218 - DNA, 98 bp, Homo sapiens
gaaggcaactatggatgctgggaaactgattgttgctagttcccaggcatctgtggaggaggattttgggcgagggccctggctgaccatgaaatcca

SEQ ID NO: 194219 - DNA, 90 bp, Homo sapiens
tgaagagggaatttgatgaagtttttacaaagaaaatgattgagtctattctgatatcctgttgggcattctggacaacttggacccagt

SEQ ID NO: 194220 - DNA, 96 bp, Homo sapiens
cctgcgctggtcctcagcaccagatcactgtgtccactactatgatcttcgtaacactaaacagccaatcatggtattcaaaggacaccgtaaagc

SEQ ID NO: 194221 - DNA, 83 bp, Homo sapiens
ggacacagcctcgctggaggcagtttctggtacaccaggggttggaaaaaccacactaggcaaagaacttgcgtcaaaatcag

SEQ ID NO: 194222 - DNA, 74 bp, Homo sapiens
atgctttttattacaagactacggagcataggaggaaaattcatcatctgctgctacaggccagagcggatggt

SEQ ID NO: 194223 - DNA, 98 bp, Homo sapiens
ctaatttctgaccagaagccctccctctaccctaaggcaacgcggtaaaaatattgcttcggtgggtgacgcggtacagctgcccaagggcgttcgta

SEQ ID NO: 194224 - DNA, 75 bp, Homo sapiens
caagcagtcctcctgcagcaacttcacagcaacactggaatgacaggtgaaatgacaatggatgctctgttggct

SEQ ID NO: 194225 - DNA, 101 bp, Homo sapiens
agcccggaaccactctttgtgccgcagcttcgcagggtcctgtgcttggattgtggggaacagactccccggggggtgctgcaagagcgtttccaagtcct

SEQ ID NO: 194226 - DNA, 80 bp, Homo sapiens
aagttcacgactactagaaggggaggggagtggaaaggctctcagtgaaaaagatgccacctcagtatggacagcaaggt

SEQ ID NO: 194227 - DNA, 98 bp, Homo sapiens
agaagaaggtgacagccctgccccccaaggaagcgtgcaaatgccagaaagaggatttggccagagcgttttgtctgctgcctattcacactctgagg

SEQ ID NO: 194228 - DNA, 74 bp, Homo sapiens
cttgacttagttgctgggagcctggagatctggaagccctcaaaaaggaaaccattgtgttaaaggaaggttct

SEQ ID NO: 194229 - DNA, 51 bp, Homo sapiens
gagctgagactgcctgtatgaggtcctgcaggatgtttcctcaatgagggg

SEQ ID NO: 194230 - DNA, 75 bp, Homo sapiens
gttgtggttgagaaagatcatttcatggatgatttcttccatcagagctaaagttgcagacaagatccagctcat

SEQ ID NO: 194231 - DNA, 101 bp, Homo sapiens
gcggcggcgacgtggtgtgcaccggctggctgaggaaatcgcctcccgagaagaagttgaggcgctataataacctgggtatcttgtggtctgaaagagaa

SEQ ID NO: 194232 - DNA, 100 bp, Homo sapiens
tcagacaagaaaggcaaggaaacatcttttgacaagatgtcacctgaaagtggtcacagccgcatctttgaagcatctggagcataagaacagtaattat

SEQ ID NO: 194233 - DNA, 82 bp, Homo sapiens
tgttaaggattccaagtaactcttatttggcagcaaagcacctgctctgagtggccatggggaagcgatacttctgtgacta

SEQ ID NO: 194234 - DNA, 95 bp, Homo sapiens
cgggccacgcacctcgtcaccaaggccaaggtcaaaatgcagatcttcgtgaaaacccttaccggcaagaccatcacccttgaggtggagcccag

SEQ ID NO: 194235 - DNA, 75 bp, Homo sapiens
tgtgagagcagaggaaaaacacagtttgagagagttttcccaaaataccatgataattgtatggaagagatacag

SEQ ID NO: 194236 - DNA, 50 bp, Homo sapiens
atggagccagcctagagagggtcaggtgcaagcggtcttctctgtcttct

SEQ ID NO: 194237 - DNA, 75 bp, Homo sapiens
agaagctaaggacaatggcagtagagatgagaatagctgaaacctttggacttcaagaaaattatatcaaaattg

SEQ ID NO: 194238 - DNA, 82 bp, Homo sapiens
tgcattggagccttgccttgctgctctacctccaccatgccaagacgcatcttctctccagactgccgatcccagaaagcca

SEQ ID NO: 194239 - DNA, 82 bp, Homo sapiens
gagacaacagcaggggtcagctgggccgcaggggcgcgcagcgcggggagctgccaggatttacaaaaggtgcaggtatgag

SEQ ID NO: 194240 - DNA, 51 bp, Homo sapiens
ggatctcagagtgctttacagacatgtcctcgaggccacacgggttaatcg

SEQ ID NO: 194241 - DNA, 82 bp, Homo sapiens
gttatcatctatgttcggctggacttctccatcaccaaggtgctgccatgcttactgagtcccttctctctccttctctatc

SEQ ID NO: 194242 - DNA, 75 bp, Homo sapiens
cccggctgccctgtggcctcgctcctcggagggagcaccagcgaaagcagccagtctgagatattgacactacag

SEQ ID NO: 194243 - DNA, 75 bp, Homo sapiens
tttggacttcaacttagcatggctagaattgttatgatgtgattgctcaagcccaatctgggactgggaaaacgg

SEQ ID NO: 194244 - DNA, 100 bp, Homo sapiens
gttatgtgatacctactattcccagcccattttgtaggaactttatattgctgttggaatatctggagccatccaacatttagctgggatgaaagacagc

SEQ ID NO: 194245 - DNA, 100 bp, Homo sapiens
gattattaaaagacattcaaaccatctacaatatgtcagcttcaagggtcatctgtcagaagcttggtcccgagtgacaaaaaatgctattgcagaaacc

SEQ ID NO: 194246 - DNA, 75 bp, Homo sapiens
cgctacgtgactcttttctccaggcctgcaggacaagctgaacaagagggacaaagaggtgacagccttgacctc

SEQ ID NO: 194247 - DNA, 98 bp, Homo sapiens
ggcttggaaaacggagagactggggagaaaaccgcatgcacgagtctctcatgctcttcgactccatctgtaacaacaagttcttcatcgatacctcc

SEQ ID NO: 194248 - DNA, 100 bp, Homo sapiens
gcagaagccattccgacaatgataggttggaaagggcaaagaaattacaagaacagcgagaaaaggaaatggttgaaaaacaaaaacaacaagaaatagc

SEQ ID NO: 194249 - DNA, 131 bp, Homo sapiens
caggggttcgccgcccccgccgccgccgccgccgccgccgccgccgccgccgcccgctttcggctcgggcctcagctccatgtgtcctaccagaagtacttcaagctggagcccctccaggcttaccatcg

SEQ ID NO: 194250 - DNA, 100 bp, Homo sapiens
tgcccaactggccatcagagtcaccaaccccaatgccaggctgcgcagtgaagaaaatgagtcttcaacggggcctcttccacctcctggtgcagaaatc

SEQ ID NO: 194251 - DNA, 75 bp, Homo sapiens
cagcctgcggagcctgtggggcaggctgtgagaagacatttatcacagtgagtgccctgttttcccataaccgag

SEQ ID NO: 194252 - DNA, 95 bp, Homo sapiens
caacttctatttagtgatcatgtgaaagtagagcctattcccgccattggccacgccacgctcggcactgccagccggatcattcagacggcaca

SEQ ID NO: 194253 - DNA, 100 bp, Homo sapiens
tgcaagtagactgagagcctccgccaaccagcaaagccaaagctaattgagccactcgactatgaaaatgtcatcgtccagaagaagactcagatcctga

SEQ ID NO: 194254 - DNA, 74 bp, Homo sapiens
gcctcaatttgctggatttaagcactgctgcactttatgaggagcagttggacatcatggagacaacttagtag

SEQ ID NO: 194255 - DNA, 75 bp, Homo sapiens
cgtgtacatcatttacggcatgtacttctgcatgaacatctccagccagggaatggaagttggatacactttgtg

SEQ ID NO: 194256 - DNA, 100 bp, Homo sapiens
gccccggcggggaggacgagaatcggtgtggagacactgtcggacattcgggaaggtgcgccgctaggggtccacctgccttttgtgggctactcctact

SEQ ID NO: 194257 - DNA, 83 bp, Homo sapiens
tacggcttagaggacttccctttggatgtagcaaggaagaaattgttcagttcttctcagatggcagaaacggtggacacaag

SEQ ID NO: 194258 - DNA, 100 bp, Homo sapiens
tatagctgttcagaaaactgaaacccgattagctcgtgtcaatgagcagagaatgaaggctgcagagagactaagggcacttcctgaggttcattaccac

SEQ ID NO: 194259 - DNA, 83 bp, Homo sapiens
ccgcgaggatgcgtgttcgcgggtgtgtgctgcgttcacaggtgtttctgcggcaggtgtcccgacccaggctaagcttgagc

SEQ ID NO: 194260 - DNA, 95 bp, Homo sapiens
gcagtggctcagagatgcccttcacctcccatgatcaatctgatctcggttgggggacaacatcaaggttatcatggctactaataggattgata

SEQ ID NO: 194261 - DNA, 75 bp, Homo sapiens
ccctggatcaccgacagcacagacagaatccctgctaccaatatggaatgtgcagatgtcccactattaactcca

SEQ ID NO: 194262 - DNA, 90 bp, Homo sapiens
ccggcccacagtgggggtgtgcaaacccgagagaactggagtattgggaaagggtcgttgtggtgcatagacccagagtatagacaaaat

SEQ ID NO: 194263 - DNA, 75 bp, Homo sapiens
gaagaaaatttgaagaaagaaatcactaactgtttaaaactattagaggacacatgacggaagtgtgtatttttg

SEQ ID NO: 194264 - DNA, 50 bp, Homo sapiens
gccaagtgccaatggatggcaggaatgtacaagccagctgccatgttgtg

SEQ ID NO: 194265 - DNA, 98 bp, Homo sapiens
tcagcggcgccttgcggagggaccccagatcatgggagaccacctggaccttctcctaggagtggtgctcatggccggtcctgtgtttggaattcctt

SEQ ID NO: 194266 - DNA, 75 bp, Homo sapiens
cacgacgtctggcaggaacctcggcctcagaggcctttgcccagtttgatgctgagggtgatgggacagttgatg

SEQ ID NO: 194267 - DNA, 75 bp, Homo sapiens
tggagaatgaatgctgttctgaatttgtccccagaagaccatgtctgtgttgagctgtatctgtgaagccaggca

SEQ ID NO: 194268 - DNA, 75 bp, Homo sapiens
ctgtgtggagaaggaatatcccaaccggaccgtgagtccatcttcttcaacagccacaacgtgtcaaagccggag

SEQ ID NO: 194269 - DNA, 73 bp, Homo sapiens
ggtggagtgtaggtcatatcgccgcgatcctgacatgcatcctgacggaacagcggatcgtcttcttctcctc

SEQ ID NO: 194270 - DNA, 76 bp, Homo sapiens
cagtggacgatggaaggctatctgtatgtccaggagaaacacttaattcagtgcacaaatgagatgaatgtgaaca

SEQ ID NO: 194271 - DNA, 87 bp, Homo sapiens
gaatgtgactaccctggttacctcatatgtgctggagaatctggtaaaagcaccattgtgaagcagatgaggatcctgcatgttaat

SEQ ID NO: 194272 - DNA, 120 bp, Homo sapiens
cgctccgtggccttagctgtgctcgcgctactctctctttctggcctggaggctatccagccaaattgtggctactaatttgccccctgaagatcaagatggctctggggatgactctga

SEQ ID NO: 194273 - DNA, 76 bp, Homo sapiens
caggaccagcaccctcttctacggaggaaggaacgggcacagcaggtcgagtcccagacaccagaagtctgaattt

SEQ ID NO: 194274 - DNA, 142 bp, Homo sapiens
tgtccctggctccctcattaccgtcgccagcggagcgaacccgagagcgtggagcgggctgggccaggtgtcatggagaaactccagctgggcccagagattctgcagcgggaaaatccaaggcttatttatgccaggctga

SEQ ID NO: 194275 - DNA, 74 bp, Homo sapiens
ctgctgtcttcaatgctgttaactggattgagtccagctcttgggatgcctgctataactgcggtagaggtggc

SEQ ID NO: 194276 - DNA, 76 bp, Homo sapiens
cccccccagagaaccctggccagccatcgatggggatcgacatcgcctcgggagtgcatccgccccaacccttttc

SEQ ID NO: 194277 - DNA, 75 bp, Homo sapiens
tccctcaagaagggagggaggctggtggagaagttgtcaggaggaagaagacctagctttagcacaagcactgtc

SEQ ID NO: 194278 - DNA, 75 bp, Homo sapiens
ctgggacttcccgtccgcggcgtggaggatcatggaagggaagtggttgctgtgtatgttactggtgcttggaac

SEQ ID NO: 194279 - DNA, 83 bp, Homo sapiens
ggatgatatcaacagacgggagactgaacttgagggaaggagcaaaagccccttgccatccctgtgtgacagcaatgaggtga

SEQ ID NO: 194280 - DNA, 98 bp, Homo sapiens
acaacagtgatgaggaaagctgtgaaagttctcaagtggacagtttcataaagcataacatgagtagaagaatctactgccaataactgtttattatc

SEQ ID NO: 194281 - DNA, 100 bp, Homo sapiens
aggatgaagattcaccaaataagctatatactttggttacctatgtacctgttaccactttcaaaattttccagataacagaaagtaacgtgaaggaatt

SEQ ID NO: 194282 - DNA, 101 bp, Homo sapiens
tctcaatatctgtcttcggtggactccttcggcagtccacccaccgccgccgcctcccagggacccagacatggagctgcgggaagaagcctggtctccgg

SEQ ID NO: 194283 - DNA, 75 bp, Homo sapiens
gctgccacgcctggaacaaggaccgcacccagcaggacaggctgctttggtttgtgacctccaggcaggacggcc

SEQ ID NO: 194284 - DNA, 100 bp, Homo sapiens
gggaatcatgacttctgcagccgtgtgctggaattgatgttcgtctgtgtgatgttggtgaggccatccaagaagttatggagtcctatgaagttgaaat

SEQ ID NO: 194285 - DNA, 100 bp, Homo sapiens
atcagtatgttatcactggccggaaccgctccttggaaggtcgctgggaggtggcattcaaagactctggacattaatgtgaaggccccagccctgatga

SEQ ID NO: 194286 - DNA, 74 bp, Homo sapiens
ggatcacctactcttcagaaatttgaagccatgcagtgacacccgctaagacttgttggtagccatgtcggagc

SEQ ID NO: 194287 - DNA, 82 bp, Homo sapiens
ggaacccgaagaagaaaggattcgttacagccagagattgatgcaggccctgacttcctgtgagtgcaccatctgtcctgac

SEQ ID NO: 194288 - DNA, 100 bp, Homo sapiens
accagaatgtggctctggccatagcagggaataatttcaatttgaaaacaagtggaatagtgctgtcttccttggtcttggctgttcaaccgtactttct

SEQ ID NO: 194289 - DNA, 85 bp, Homo sapiens
gatttgattcagcaaatgggatcaatatttcacctgatgataaggattaatgaaaatcaagttccatcctcagacaagaggtaaa

SEQ ID NO: 194290 - DNA, 100 bp, Homo sapiens
gcggagacatggccaacatcgcggtgcagcgaatcaagcgggagttcaaggaggtgctgaagagcgaggagggcgccctgcgtccggcagaggaggcgag

SEQ ID NO: 194291 - DNA, 51 bp, Homo sapiens
tacctgtgccactgtcaccattggaggaatcctgcctagggtagttaaaag

SEQ ID NO: 194292 - DNA, 98 bp, Homo sapiens
ggtgagctgcggcgagcggagcttcgcggggatcctgctggactgcacgaaaaaggaaagcaggcaggatgggagagtcgccgatagaaccacctctt

SEQ ID NO: 194293 - DNA, 75 bp, Homo sapiens
aagaatctcaggatacatatcagaagcatctgattctcttcctggacattctgttgccctctgtttagctgttgc

SEQ ID NO: 194294 - DNA, 98 bp, Homo sapiens
cgcaacccgcgccgcgccgcgccgcgccggtgcaatggatgagcttcatagtctggatccaagaaggcaagagttattggaagctagatttactggag

SEQ ID NO: 194295 - DNA, 98 bp, Homo sapiens
acaggcctgagggccccacgcacgcggtgaggacaccagtgatgaattctgaagcaaaagttctggtgcctgggattcctggtcatcatgcagctatc

SEQ ID NO: 194296 - DNA, 90 bp, Homo sapiens
gagcagtccctgcagatggcccatttggagatcttgacaaagcctcttctgtttccaatgggacaatgcagatcttcgtgaagactctga

SEQ ID NO: 194297 - DNA, 75 bp, Homo sapiens
gtgcatatctggaagctgagcagaaacccagagagtggctacattgaggagaagccctggagttgagcctggcgg

SEQ ID NO: 194298 - DNA, 74 bp, Homo sapiens
ggtctagcagttgagatcagctagtgttccatctatcttctgtcatgtactggatacacgtctgtttaactacg

SEQ ID NO: 194299 - DNA, 96 bp, Homo sapiens
aactaaatgtggcaattgtaaggccatcgattgttggtgccagttggaaagaaccttttccaaatttaattccttttcgaccttcaatccagttcc

SEQ ID NO: 194300 - DNA, 95 bp, Homo sapiens
ggtctggcttcttttctgaagtgttcaaggtcctgggaactccaacaagggagcaaatcagagaaatgaacccaaactacacagaatttaaattc

SEQ ID NO: 194301 - DNA, 75 bp, Homo sapiens
agaagaaatataaatatgtggaagattacgagcagcgggaagcaatcaattgccattgatgactgcaccttccac

SEQ ID NO: 194302 - DNA, 54 bp, Homo sapiens
gtccaggagctctgctctcccctccaggtttggcaggaaataaatgtggaagct

SEQ ID NO: 194303 - DNA, 100 bp, Homo sapiens
aaggacaaaagccaagaggaggacagttcgctacacagcaatgcatcgaggtagacgggaaagtcagtgtgaatggagagacggttcatagagaggagga

SEQ ID NO: 194304 - DNA, 75 bp, Homo sapiens
ggccctttgggacgagtgctgtgactgtgttgacaaaatgttagcacagagcaaaacagagaaggcagaagaaat

SEQ ID NO: 194305 - DNA, 95 bp, Homo sapiens
agctgctgttcaggtaccccttccagagaagccaggagcacccggcgtcccagacaaatggacacttttgtaaatccacttcgcaattcaatgag

SEQ ID NO: 194306 - DNA, 100 bp, Homo sapiens
cctcggtcgagcatgttcaccagggcccagggttgccatagtttctaaatcttttgaaggaaaaactgatcgcacagaagagtggtatggaacccagtac

SEQ ID NO: 194307 - DNA, 82 bp, Homo sapiens
gttcgtcatggggctgtttggaaagacccaggagaagccgcccaaagaactggtagatatagttgtaggtactccgggaaga

SEQ ID NO: 194308 - DNA, 112 bp, Homo sapiens
agttcaaccgcatgaagcagctggctaaccagaccgtgggcaggtactccaaagattcaggtttactcacgtcatccagcagagaatggaaagtcaaatttcctgaattgct

SEQ ID NO: 194309 - DNA, 74 bp, Homo sapiens
tcgggcaagttctatcatactgacaatgtggagctcatactgaaaaccatcaataaccagcacagcgttgagag

SEQ ID NO: 194310 - DNA, 88 bp, Homo sapiens
ctatatgaacaatccgtctggatcacggatgtaggaagtgtgaaagtaatttttctcccaagtttaacgaaaaggatgggcatgttga

SEQ ID NO: 194311 - DNA, 100 bp, Homo sapiens
aaacaagctcggagcgggagtagacagtggccggcagggcagccgggggacagctgtagtgaaggtaaaatcccagaggaatccaaagccctctctttat

SEQ ID NO: 194312 - DNA, 95 bp, Homo sapiens
aagaatgcagtcagcctgctctgatgaagattaagcacgtgagcaactttgtccggaagtgaagctgaatatggtgggcatgatcagatagattt

SEQ ID NO: 194313 - DNA, 99 bp, Homo sapiens
gccagacactgcagcagagggttttccagatcctagacagtaaggtgaactggcacaaaggttaatctcaagatgccgctagtgaaaagaaacatcgat

SEQ ID NO: 194314 - DNA, 100 bp, Homo sapiens
aagtctgtggtttatcattgtaatcagcttcttaccaaatacagaaggctttaaacctggccagcggaaagttttatttacctgtttcaagaggaatgat

SEQ ID NO: 194315 - DNA, 88 bp, Homo sapiens
cgaaaacatgtactacagccagtcttctatgtttccacatcggtcagaaaaagatgtgctggagaatctggtaaaagcaccattgtga

SEQ ID NO: 194316 - DNA, 100 bp, Homo sapiens
gaagagctttcgttgctggtgttttgccatttaaagttttaaaatcaaagatgggaaaatcggagaaaattgcccttccccatggccagcttgttcatgg

SEQ ID NO: 194317 - DNA, 90 bp, Homo sapiens
gagtgcaggtcagaaaataaaggagctgctgtctggaattggcaacatctctgagagatccaagacatcagtgtggagacagaagacaac

SEQ ID NO: 194318 - DNA, 90 bp, Homo sapiens
cgccgccgccggcgcggaaggacgaggctgaggcgagaaacgagaaactagaaaaactgcttttggaattatctctacagtgaagaaacc

SEQ ID NO: 194319 - DNA, 100 bp, Homo sapiens
tctgtagaccttccacactgccacctgattaaaggaattggagagaacggagagccagtgtgctgtgtgtcacggtccctggatgaacgtttgtggaact

SEQ ID NO: 194320 - DNA, 100 bp, Homo sapiens
tgtgcagcgggagaacctctacaagtacttctacgccatctccaacatcgaggtcatcggcaggcaaaagaatggaccccagcaggaaaagcaaagcaag

SEQ ID NO: 194321 - DNA, 75 bp, Homo sapiens
ggatatcgggtggcggctcgggacggaggacgcgctagtccagtaatgttaaagtagagactcagagtgatgaag

SEQ ID NO: 194322 - DNA, 89 bp, Homo sapiens
cactttgaggagctggagactatcatggaccgggagcgagaagcaacggtgaacctgctcctcaacaagggagccagcctgaatgtctg

SEQ ID NO: 194323 - DNA, 75 bp, Homo sapiens
agaagacctcagatgtgaagtccattaaaggctggacagtcttgtgaaattgagactcttactccactcatccat

SEQ ID NO: 194324 - DNA, 51 bp, Homo sapiens
ccacaagcagactgacaacgtttctagaccttgccaccatggaagaaagag

SEQ ID NO: 194325 - DNA, 74 bp, Homo sapiens
cacagaccctcgggcctcatcatggccaggaagaattcagtttgcctgttctgtatgcaagttccgtagctttg

SEQ ID NO: 194326 - DNA, 100 bp, Homo sapiens
agcgaacctcacctttccagggcgcaagttgctctaggtcgtaaccagcctttgaaaaaggagaaaccaaaatggaaaagcgattatcctatgacagatg

SEQ ID NO: 194327 - DNA, 82 bp, Homo sapiens
ggaacttgccctgtctcctcgcagatgaggacccagatgatgtggtaccagttggccaaagaagagcctggtgttggtgcat

SEQ ID NO: 194328 - DNA, 75 bp, Homo sapiens
atgcatctttatgtcagaaacacaaagcagcccaaccaaagggttatcctgaatacatgtctaacaattttcctt

SEQ ID NO: 194329 - DNA, 99 bp, Homo sapiens
cacggaggttgagccgggcacagaaacacagcagcgggagcagcaacaccagcactgccaacagccacaacgcactgaagctgcgcttcccggccgagg

SEQ ID NO: 194330 - DNA, 100 bp, Homo sapiens
cgcagggtctggagagtcaccgcggcggcgccgggtggtggttaaaccatgttaaggaggattttacagaggcaaattcaacacccaacagcttccttaa

SEQ ID NO: 194331 - DNA, 88 bp, Homo sapiens
gaacataattagggaaaataaggatctggcatgtttctacacaacaaaacattcatggagggggaatttaatggatcgagaagtggcg

SEQ ID NO: 194332 - DNA, 98 bp, Homo sapiens
ccaggaactgacaatctgttgatgttaaatgtaattgaaggcctgaaacgcccatgtgccactgactaggaggcttccctgctgcggcacttcatgac

SEQ ID NO: 194333 - DNA, 75 bp, Homo sapiens
tcccggaaactccagcgtgtctccagccgtgtttggtaactctcattcgacatccatctgaactaatgaatgttc

SEQ ID NO: 194334 - DNA, 75 bp, Homo sapiens
ctactgttaaccaggatacaagattagacaacagagtcattgatcttaggttagttgaatccatggacatgaaac

SEQ ID NO: 194335 - DNA, 50 bp, Homo sapiens
gagattatgaccttaacatcagtgacattgcctaagatactgagccatat

SEQ ID NO: 194336 - DNA, 73 bp, Homo sapiens
ggacagcgaagctgctgcggttcctgagccggaggtttgcgccggtttgatctgtggatgaaatgaatcatga

SEQ ID NO: 194337 - DNA, 76 bp, Homo sapiens
cagcgctcattgggaatttagttaagaaattccaacagaatgggtttcctgaaacggatttgcaggaattcctgaa

SEQ ID NO: 194338 - DNA, 75 bp, Homo sapiens
aaaaactctaaacgggattacactgggtaatagcctgcagctggtgttttgagaagccctactgctgaaaactta

SEQ ID NO: 194339 - DNA, 100 bp, Homo sapiens
aaaccaagcactctagatgccctcaactatgctctccgctgtgtccacagcgttcaagccctgaaacatgtatctgatgacatgaagactcacaagaacc

SEQ ID NO: 194340 - DNA, 75 bp, Homo sapiens
cgggtgtgcgtgtgcaccccggagcgtctggtggcgttgttggggcagaggagatgctgaagaagaaacctcggg

SEQ ID NO: 194341 - DNA, 100 bp, Homo sapiens
atgaaggggtctagatgtaaatgtcagtggaaaggagagctaccatcactaagccagatgacgtgtactactgtggaataaagtacatcaaagatgatgt

SEQ ID NO: 194342 - DNA, 87 bp, Homo sapiens
tcatcgatctctcagggtcgtcgggtgaagttgttgacctcctgtactggagagacattaagaagactggagtggtgtttggtgcca

SEQ ID NO: 194343 - DNA, 96 bp, Homo sapiens
ggaatattcactcagcatcagtggcctcatcgactttgccattcaggctctggctggggaccagccctcggtgcagccccctctacggtctcagca

SEQ ID NO: 194344 - DNA, 100 bp, Homo sapiens
cttggatccgcgggacaagaaaattcatgcgttggttgaatctggcgatgtggaacccatggatatggagggctgactatatacaccatgttttttcctg

SEQ ID NO: 194345 - DNA, 100 bp, Homo sapiens
tcaggtggtcctggagctcacccacctgtacgcacgcttccaggtcacacacttctcctggcagctgcattcagcctcagcggaggacacgcctgtggtg

SEQ ID NO: 194346 - DNA, 75 bp, Homo sapiens
tttgctgttttctcagtctcctgagaaattccaggccaagatcaaggctcgagatcttcgcgggaagaagaagga

SEQ ID NO: 194347 - DNA, 100 bp, Homo sapiens
cgagagggggcgacggcggcggcggtggcctgaggaggcccgagcggcggcggtggcggcgaaggccgaggcgattcctgccagctgggctactcggccg

SEQ ID NO: 194348 - DNA, 100 bp, Homo sapiens
gtggaaatagcgcggctgtgcaagtacctgccagagaacgacctgaaggcgcatattaaatttcctattgactacccctattcaccacctaccttcagat

SEQ ID NO: 194349 - DNA, 90 bp, Homo sapiens
gggggacggtaggagcctccgtgcggagaccactgttcaaggccacagctacgactaatagactggggtttggctgagttttatcatcct

SEQ ID NO: 194350 - DNA, 75 bp, Homo sapiens
atgatggaatcccatttgttaatgcagttgtacaatggtagatggagtgatgattcttcctgtgcttatcatgat

SEQ ID NO: 194351 - DNA, 89 bp, Homo sapiens
catagatgttgcaaacattatgaagataattgcatctcttattgcattaaagtcaaaatgcagatcttcgtgaaaacccttaccggcaa

SEQ ID NO: 194352 - DNA, 100 bp, Homo sapiens
attttgtggattttcctgttccattttgtgcctcctggacacctcagtcaggtcaattcagtgaagatatgatacccacagtgggcttcaacatgaggaa

SEQ ID NO: 194353 - DNA, 100 bp, Homo sapiens
tggaataaaaagattcccaggatgtgagcaacacgggaccgatcgccggggagtggcctgtacagcaacctccagcagtacgatctcccgtaccccgagg

SEQ ID NO: 194354 - DNA, 98 bp, Homo sapiens
ccctgcccgcgaccatggcctcctccgaggtggcgcggcacctgggcctattccactagaagcaagatggctgaactcaatactcatgtgaatgtcaa

SEQ ID NO: 194355 - DNA, 82 bp, Homo sapiens
cggagccctcatccctaacggtgaaaggtgtttcccattaaacactaccaggacaaaatcaggccttacatccagctgccat

SEQ ID NO: 194356 - DNA, 73 bp, Homo sapiens
tgaatggctgctagttgatcattgaatctggatggtttacggggtgaaaatagacttttaaaaattctcttac

SEQ ID NO: 194357 - DNA, 98 bp, Homo sapiens
ccacctcgagctgcggtagcagcgactcatgagagcgcggccggaggacagggaggttatattcaaaagaaaaaggaactgtggggaatctgtatctt

SEQ ID NO: 194358 - DNA, 100 bp, Homo sapiens
ggagagttgaatgccagccaccagccatggagcagcccgacggccatggaggctgaagagacgatggaatgccttcaggagttccctgaacatcataaaa

SEQ ID NO: 194359 - DNA, 75 bp, Homo sapiens
tggagacctgtgggcttctggtttcactagggacagcatggacagtgtcaagcagagtgcggccctgtgcctcct

SEQ ID NO: 194360 - DNA, 97 bp, Homo sapiens
actttcacaataagagcagaggatggaacacttcagtgcattcaagaaatacaggtatcaggatgaagatacacctcctcaagagcatatttcccca

SEQ ID NO: 194361 - DNA, 101 bp, Homo sapiens
tgggaatgggcccgtcctgcacctcgagctaggctttcatctgagtggcacagtaactgagctggccactgcctctgaaccagcagtgacttataaagttg

SEQ ID NO: 194362 - DNA, 75 bp, Homo sapiens
gctggccatcgtggcagacctctacgagcaggagcagtacagaagggcgtataccgcatctctaggagagacagc

SEQ ID NO: 194363 - DNA, 115 bp, Homo sapiens
gagagcgagctgagtggttgtgtggtcgcgtctcggaaaccggtagcgcttgcagcatggaagtaccaccaagaacagggaaggacaagccagaggctggaggaagatacctgca

SEQ ID NO: 194364 - DNA, 97 bp, Homo sapiens
tcgccatggccgcggttcccgagttgctgcagcagcaggaggaggaccgcagcaagctttggcagcatgtaagcagctgtttgccaagaacccaggt

SEQ ID NO: 194365 - DNA, 75 bp, Homo sapiens
ggcgagtgcagcattgactacgtggaattaagaaatctggcaaaaagtaagctgttccttgtgcctgaggagatg

SEQ ID NO: 194366 - DNA, 111 bp, Homo sapiens
cggtgaccttcgcttggtgtcctcctggcctcagcaacctgacaattctgtcgtgtcccgattgaaaaggaagatcaggccaaccccaaagaagaagtgaccaaggaggag

SEQ ID NO: 194367 - DNA, 98 bp, Homo sapiens
ctctgccgcaaacatgctccgccagatcatcggtcaggccaagaagcatccgagcacatagggcctgattacattccaacagaggaagaaaggagagt

SEQ ID NO: 194368 - DNA, 75 bp, Homo sapiens
cctcaccacccctatccagacggctgcccttcaagtaccaatttggagcaagaggtggtggtggccttcccccga

SEQ ID NO: 194369 - DNA, 100 bp, Homo sapiens
gaccatagagcgacgttattctgatctcaccaccctggtggcctttccctccagctctgtctatcctaccaaggtgtgatccctcacatccacaaatctc

SEQ ID NO: 194370 - DNA, 95 bp, Homo sapiens
ggtgccagagtttgtagcctattggaggaaaacacaccaagcttccagctgatcttaccaagatgcatctcacagaaaaccctcatccacaggtg

SEQ ID NO: 194371 - DNA, 80 bp, Homo sapiens
ggacccggcgaagacgcgaccgcggcgcgagtcaccatgcttcatcagcaatggaagtggctgatatgtggactctgcag

SEQ ID NO: 194372 - DNA, 100 bp, Homo sapiens
tggcccccggctccgtgaccagccggctgggctcggtattccccttcctgctagtcctggtggatctgcagtacgaaggcctggagctgctgaagactgc

SEQ ID NO: 194373 - DNA, 75 bp, Homo sapiens
ggcttagaactctccacagccatcactcatgtccataaggaggaaatacaaccagagttctaggcctccagttcc

SEQ ID NO: 194374 - DNA, 127 bp, Homo sapiens
aaaggtctgcaggcattttgcaatttacggaaaagtagtccagggacatccaataaacgccttcgtcaggtggagccgccaccaaaatgcagattttcgtgaaaacccttacggggaagaccatcac

SEQ ID NO: 194375 - DNA, 97 bp, Homo sapiens
ggtgccagtttggagctcctggaagaagtgtatgctgacttgtaaagtgaagaagccagtggtgctgcgggtgttcttttggggtagtgtctgggat

SEQ ID NO: 194376 - DNA, 82 bp, Homo sapiens
tggccttctgcgacgcgcagtccacgcaggagatccatgagaaggtggcagtagagaagagcatcacagaagttgctcagga

SEQ ID NO: 194377 - DNA, 100 bp, Homo sapiens
gcagacattgacctcaccaagagggcgggagaactcactgaggatgaggtggtatgcattgggtcagtggcggaacttgaagaactgtcaggagcaaaga

SEQ ID NO: 194378 - DNA, 97 bp, Homo sapiens
ttcccaactgcggacatgctgggtggatccggatcgcatggaagacgcagcctggccgcgctctcccagtgtcctgatggcaaatttcaagggccac

SEQ ID NO: 194379 - DNA, 50 bp, Homo sapiens
tggagctgtgccagcctgacatgggccgagtgaccaagacaaaggacggg

SEQ ID NO: 194380 - DNA, 51 bp, Homo sapiens
ctatgtggacgttggcactgggaagaagatgctcatgaagcagcaggaccg

SEQ ID NO: 194381 - DNA, 90 bp, Homo sapiens
agaataagattaagggttgtacaggctctttgaatatgactctgcaaaggttggctggctgtggcctcacagctgaggactgcaaggacc

SEQ ID NO: 194382 - DNA, 98 bp, Homo sapiens
ggagaggaagcggcggcggcggcgccgggcccgggggtggtgacagcaggtctgagggcaattgaaggaacagactaaaaatcgtgtcctggaaggaa

SEQ ID NO: 194383 - DNA, 90 bp, Homo sapiens
tgaactctcagtggtcctacctggggatattatcaaatctactactgttcatggcaggtgaaggtacaagtaagaagctggcgaaacata

SEQ ID NO: 194384 - DNA, 95 bp, Homo sapiens
accaatcaaatgactgccgatccaggagcaactatgacctacccggagaacggcgtggtccagatgaactccagggacgtccgagcgcgcgcccg

SEQ ID NO: 194385 - DNA, 97 bp, Homo sapiens
tactggaaaaacgaccttcgtgaaacgtcatttgactggtgaatttgagaagaaattctctcgggcctagccgtccttggaacccgatattcgggct

SEQ ID NO: 194386 - DNA, 75 bp, Homo sapiens
gagtagacaagccctcaaggatgcccggtccccatcaccggcacacattgtcggcaccattcccaaactcacagc

SEQ ID NO: 194387 - DNA, 100 bp, Homo sapiens
gctccagaaagagctgaaccacatgctgtcgatcctgactgctgtcatggcgtgccctctggagaaggccctggatgtgatggtgtccaccttccacaag

SEQ ID NO: 194388 - DNA, 100 bp, Homo sapiens
tgcaggaggagatgcttcagagagaggaagccgaaaacaccctgcaatctttcagacaggtgaccttgggaaaggtgttgaaagtgatcgtcgtcatgcg

SEQ ID NO: 194389 - DNA, 75 bp, Homo sapiens
gggtgcagttcctgcagtaccccactctacgatcaggatgaaacaggcgcctatttaatcgacagagaccccacc

SEQ ID NO: 194390 - DNA, 100 bp, Homo sapiens
tatttcattagcctcagaacgatatgataaagacgatgaagccccctctgatggtgtaggagctgcacgatctgggaacctcacgtttatggtgggagga

SEQ ID NO: 194391 - DNA, 100 bp, Homo sapiens
ttggctgtgacatctattccatctgtgagtgactctttgacatggagagaatttcactatattcaggaatgtatcctgtcaggtataatgtcagtgaatg

SEQ ID NO: 194392 - DNA, 83 bp, Homo sapiens
ctttgtggagggtacttcattgatgccacaaccataatagaatgtctacattcctgagtcagacaaaaagctgggtatatcac

SEQ ID NO: 194393 - DNA, 75 bp, Homo sapiens
aggaatttgaagtgaccaaaacagcaggaggccagcaagcgcatctccagccacatccctttgatcatccagttc

SEQ ID NO: 194394 - DNA, 90 bp, Homo sapiens
gcaagatggcggacatctccctggacgaactcatcaggaagcgcggggcggcggcgaaaggacggtgtctgcctgtatcccagtgttcag

SEQ ID NO: 194395 - DNA, 50 bp, Homo sapiens
ctctggccccgcaggccgggagcagagaccctacagcttggggcctgggc

SEQ ID NO: 194396 - DNA, 90 bp, Homo sapiens
tcacgattgagtgtcaaagaagaaaatgatccacagtctatttctcataaactgttccggtgacatatttctagagaagcactggaagag

SEQ ID NO: 194397 - DNA, 90 bp, Homo sapiens
aacgacacatttgacattgatccgatggtggttactggcatggatcgcaatggggtgcccccctctgccagagggggccccctgcccctg

SEQ ID NO: 194398 - DNA, 100 bp, Homo sapiens
agacttggaggaggtatgcctggactgggccaggtttgcgaggagcgatcgcatttgccttagctattcggaacacagaatctcagcccaaacaaatgat

SEQ ID NO: 194399 - DNA, 51 bp, Homo sapiens
cctcatcttcagatacttacaaaatgtggccatcaagtcaatccggaagga

SEQ ID NO: 194400 - DNA, 91 bp, Homo sapiens
ggagcccaagggtgcacagcccctggctacgcaaaaagatggcacctttgcagcagggggctacatgccccctctccggtttaaagcactt

SEQ ID NO: 194401 - DNA, 80 bp, Homo sapiens
gttggaagcagccgatccagcctgcggagcctgtggggcagctccctgtgctgtcaggaatctacaggacttggctcgta

SEQ ID NO: 194402 - DNA, 83 bp, Homo sapiens
ccgcgatggagctgggggagccgggcgcacttgcacctcctgcgccgccgccccccatccaaggatatgccttcaagcctcca

SEQ ID NO: 194403 - DNA, 98 bp, Homo sapiens
gacgccagcctctcgggcatcgggcaggaactgggcgccggcgcttacagcatgagggtacatccccagttacttagacaaggacgagctctgtgtag

SEQ ID NO: 194404 - DNA, 83 bp, Homo sapiens
gtcggtgggtcggggatcggtcgcctgagaggtcatcatcagatttgaaatatttaaagtggatacaaaactatttcagcaat

SEQ ID NO: 194405 - DNA, 100 bp, Homo sapiens
cccgttcgctggactgcaaaccgagctcccgtctgccttgcagttacagctcttttgaggaagcttaagcagcaatccagggaaagtgttgaagaaaaac

SEQ ID NO: 194406 - DNA, 87 bp, Homo sapiens
gagtgagaagcaagaaggccctggacacagcaatatctctgggctttcacagagccttgcttcctgttttacatcacaaatctaaaa

SEQ ID NO: 194407 - DNA, 100 bp, Homo sapiens
cccgggcctgggcaggcggagcagggccttggaccccgcggcgcccctcggcctcggagcaacgagcgcagcgccggttatcaccaatctagtgaaaatg

SEQ ID NO: 194408 - DNA, 137 bp, Homo sapiens
catcgatatttccttggtcaagagagagcatgattttttggacagagatgccattgaggctctatgcaggtatcagtcagagccggatctctcattggctgttgcagcagggatcagacctgagtgaacagaagaaa

SEQ ID NO: 194409 - DNA, 88 bp, Homo sapiens
cagttcgctagtcaaacctgtgagttcaacatgatagagcagagtggaccaccccatgaacctcgggctctctttacctatgaaggca

SEQ ID NO: 194410 - DNA, 100 bp, Homo sapiens
cttgtggcgaatggggctcacgtcgagaattacatgaacgacagccttcgcaccgacgtcttcgtgcggttccagccagagagcatcgcctgtgcctgca

SEQ ID NO: 194411 - DNA, 75 bp, Homo sapiens
gccacagcggcagctccagcccggcccggcagcgacatggaaggatttttgtccctgagtcatggaagacagaag

SEQ ID NO: 194412 - DNA, 80 bp, Homo sapiens
cctccaggtttcagtggcagttctcagaaatgagccgtcagactgctacagcattacctaccggtacctcgaagtgtcca

SEQ ID NO: 194413 - DNA, 90 bp, Homo sapiens
ctcaaaacaagaggactcctgactcactaggttagggctgcaccaccaccgcctgtgctgatgcaccatggagagtcctcccaggtcctg

SEQ ID NO: 194414 - DNA, 96 bp, Homo sapiens
ctggaaaccctgcattttgggaaactcgactttggagaaaccaccgtgctggaccgcttttacaatgcagggtcaacatatttcactggcacctat

SEQ ID NO: 194415 - DNA, 100 bp, Homo sapiens
gagacgctggaggacagcccgcaggatgaccggaaagaagggatgaccgcgtttgtggaaaagagaaaggccaacttcaaagaccagtgagaaccagctg

SEQ ID NO: 194416 - DNA, 93 bp, Homo sapiens
cctggtcatacaccagtactaccaaggacagcttttttcctgcaagaatcgcctaccatttggtgcaagcaaaaagcaatcagcaattggaca

SEQ ID NO: 194417 - DNA, 100 bp, Homo sapiens
gcctttgaagaggctcggagaaggacacgcgaatttgaagatagagacaggtctcatcgggaggaaatggagaccctacagcttggggcctgggctcctc

SEQ ID NO: 194418 - DNA, 75 bp, Homo sapiens
cagcgagcgcttggagctgcacgtggacggaatccctttgcccacgtccagctgaagccgacagtgaccaacgac

SEQ ID NO: 194419 - DNA, 100 bp, Homo sapiens
agcgagctgattcttacagcccagacttcacagagaatgcagttgtcttgacttcaggtctgtctgttctgttggcaagtaaatgcagtactgttctgat

SEQ ID NO: 194420 - DNA, 75 bp, Homo sapiens
gggcctcgggcgccccgcagccccccaacatcctgctcctgctcatggacgacggcaacaggtttgtctatgctg

SEQ ID NO: 194421 - DNA, 100 bp, Homo sapiens
gaagaccagaagtggatggagagtctgtcagtttgtcgtctctgtcaacgggctcaatgtcctgcatgtagactaccggaccgtgagcaatctgattctg

SEQ ID NO: 194422 - DNA, 100 bp, Homo sapiens
ttcgtctcttacgtctgcggaagtgcagctgcctcagttcttagcgcaggttcgaccttgaaactacaagagtgaatctgaaagttagttcaaaaagtca

SEQ ID NO: 194423 - DNA, 85 bp, Homo sapiens
acagctaagacaccgggacctcctggaagccaaaaatggaaactactttgcttcgcactttttcatgggaggagagaaattcgac

SEQ ID NO: 194424 - DNA, 83 bp, Homo sapiens
gagcctgccggaaggctccctcggtcgcgagtatctccgtttcctggatgtgaacgactatggcagccagggacgccacttca

SEQ ID NO: 194425 - DNA, 98 bp, Homo sapiens
aaggagaccgcagaagtaaagaagtggggagtttaggcatatcacacctgaaaaattttatgtggaagcttgtgatgatggagcagatgacgtactta

SEQ ID NO: 194426 - DNA, 74 bp, Homo sapiens
acaggctcctctaacatcaccgtgtacacctggagatgcccaaagatgagctgcccaaccataactgcattaag

SEQ ID NO: 194427 - DNA, 98 bp, Homo sapiens
ggcctatgcccccactaacggggacttcacctttgtctcctcagcagacgcggaagtgtttggtgtataaaacagaccaagctcaagatgtaaagaag

SEQ ID NO: 194428 - DNA, 75 bp, Homo sapiens
tcttctgagtgatggagatttgtctaccatgattggcaaggctattcaggcagctatcagccaggcctttaaaac

SEQ ID NO: 194429 - DNA, 100 bp, Homo sapiens
ctggagatgaggaggatgggagtcccatcggctttcatgagaaggacaagaagccatattgccgaaaggatttcttagccatgttctcacccaagtgtgg

SEQ ID NO: 194430 - DNA, 101 bp, Homo sapiens
cgaggagacggcgacttctgacaacgaatgcccccaagtttatatcaaaccaaacaatttattactcttgggaaggaaatcctatcaatataagttgtgat

SEQ ID NO: 194431 - DNA, 75 bp, Homo sapiens
ctgtgaatggtgttcagatcgtggaggccacacatctaaatcaaggggcaatgttaaatattgttcaagattcag

SEQ ID NO: 194432 - DNA, 98 bp, Homo sapiens
tggtacaggactgtcaacgaaacctggcacggctcttgcttccgggggagtggccacagcaggtcctatctggtggtgagtggctgtcatgatctcta

SEQ ID NO: 194433 - DNA, 49 bp, Homo sapiens
aagtggccgtagcggcttgttggataagacctttccagctcacccccag

SEQ ID NO: 194434 - DNA, 98 bp, Homo sapiens
gcccctcagcaacgccgtgcagctgcccatcgaccaggctctatcaaagaaagcaagagatggaaaattgttgcctgaagaataccaaggaggatctt

SEQ ID NO: 194435 - DNA, 75 bp, Homo sapiens
ttgcagcgtagcccgagtcggtcagcgccggagtgttatagttttgccgctggactcttccctcccttcccccac

SEQ ID NO: 194436 - DNA, 82 bp, Homo sapiens
ctgagaagtattttgctctgcgaaacatcatccagaagatgaagctactgaatctttacatcaaacgtgcacaaacaggttc

SEQ ID NO: 194437 - DNA, 51 bp, Homo sapiens
cctgactttcacagctcagtacctaagacacatttacagctacatattccc

SEQ ID NO: 194438 - DNA, 82 bp, Homo sapiens
acccacttgggcctggacctgtacttggagtgtttggtgctggcaccaactcgggaactggcccaacaggtgcagcaagtag

SEQ ID NO: 194439 - DNA, 90 bp, Homo sapiens
atttctactacgtggaccaccagggccagtgcaagaagaaacacacgctgctgtgccccgactttgcccgcaggggggcgtgtccccgcg

SEQ ID NO: 194440 - DNA, 97 bp, Homo sapiens
tgggtgctcacagctgcccattgcctaaagaaatggaggagatgtataagaaagctcatgctgctatacgagagaatccagtctatgaaaagaagcc

SEQ ID NO: 194441 - DNA, 75 bp, Homo sapiens
taaccttgaatggcgactagatgtacagagctccactggttcaacagcctctcctccagtttcgaccccagtcac

SEQ ID NO: 194442 - DNA, 100 bp, Homo sapiens
ccgtcgatctcaagccgactctcaccatcatcaagacggaaaaagtcgatctggagcttttcccctccccggaacctcattaagcaaatgccagagccag

SEQ ID NO: 194443 - DNA, 80 bp, Homo sapiens
gaatcaactgagagagatgcttaaaaatcaccagttactttaatgaaagtctggaacgttttttcttagagttccagaat

SEQ ID NO: 194444 - DNA, 100 bp, Homo sapiens
gtaatcccaggactttgggaggccgagatacatcagcccacagcaaggcgggctccagcagcccggagccatgggcccggccctcctgcactccccagga

SEQ ID NO: 194445 - DNA, 100 bp, Homo sapiens
tctggggagaccccgacgtggagtgccgagaataactgaagtgaagtgatggactccgatttggagagtagtaagacgtgaaaggaatacacttgtgttt

SEQ ID NO: 194446 - DNA, 97 bp, Homo sapiens
atatttgctgtctttatattcatgacctactggcatttgctgaacggtgtggatgaggtcaccattgtcaacattttgaccaaccgcagcaatgcac

SEQ ID NO: 194447 - DNA, 96 bp, Homo sapiens
ctcgcaaggcgggggaggcggcggcccagccacgatggaccgtgtgtatgtacaacaaaataatgtggagaacgtctacaatttgggattaattat

SEQ ID NO: 194448 - DNA, 88 bp, Homo sapiens
agaagaaacgcctggtgcagagccccaattcctacttcatggatgtgaaatgcccaggagcctcagggaacccagccagcacagcagc

SEQ ID NO: 194449 - DNA, 82 bp, Homo sapiens
ggcgggcggcagcatgtcggtggcggggctgaagaagcagttctacaaggcgagccagcacttctccaccgacccagtggcc

SEQ ID NO: 194450 - DNA, 96 bp, Homo sapiens
ggaatgggcggcggctccacctggggattcctgaggccgtgtttgtgcttcgagagctgtgcccaggagtgaacaaccagccctacctctgtgaga

SEQ ID NO: 194451 - DNA, 75 bp, Homo sapiens
ctgagaagcagcctgcgagggcttgcgggggagattgttggggaggtccggcaaatgaaagctactgacactgcc

SEQ ID NO: 194452 - DNA, 51 bp, Homo sapiens
atgatgcggtggtgataggagcagccgtggtccttcagcatatctctgtgc

SEQ ID NO: 194453 - DNA, 108 bp, Homo sapiens
cgccagcggccgagcgggcggcttcctggcctgggcgctccggtggcggcggaggttgtggcagcactgcctgaaggtatgagaccagattctaatctttatggtttt

SEQ ID NO: 194454 - DNA, 43 bp, Homo sapiens
ggaatatatcctgactgattccatcaaacacagaccacctgtt

SEQ ID NO: 194455 - DNA, 82 bp, Homo sapiens
gaccgcagcactggggaaacgatccgctcccaaaacgcaattctgtggtgttcttggtcacacatttatggagtttctgaag

SEQ ID NO: 194456 - DNA, 100 bp, Homo sapiens
gttcatgccacccaggatgaaaatggatagggacccacttggaggacttgctgatatgtttggacaaatgccaggtattaaactgacactgtcagctctt

SEQ ID NO: 194457 - DNA, 100 bp, Homo sapiens
tggaaaatgccaacgccgtgtctgaaggctgagtcatcactagagagtgggaagggcagcagcagcagagaatccaaaccctaaagctgatatcacaaag

SEQ ID NO: 194458 - DNA, 75 bp, Homo sapiens
tcgtgaagaacctgaaggacacactagttacttcgagagcttaagcatccaaacgtcatttctcttcaaaaggtg

SEQ ID NO: 194459 - DNA, 100 bp, Homo sapiens
tttacgtggagatcaagcgcagcgatggagcccagtttcctccaattgcagcacaagaccttccttttgttctaaaggctggctaccttgaaaaacgcag

SEQ ID NO: 194460 - DNA, 75 bp, Homo sapiens
tggcggctctagggaccccccccgcgcctgcacttagccccgcgcccgagcacatgattaagtaccggtacatcc

SEQ ID NO: 194461 - DNA, 87 bp, Homo sapiens
tcaggatgtcctagctagatggtcagatggcttgttttatcttggcactatcaaaaaggaccgtataatagacgctggccccaaagg

SEQ ID NO: 194462 - DNA, 100 bp, Homo sapiens
cagaaaatcggtgaagagaggttttgaattcacgcttatggtagtggtcctacaagattatcaattttgcccccagtttacttcggattatagtctctga

SEQ ID NO: 194463 - DNA, 100 bp, Homo sapiens
ggaagaaccacatgtactcctgcaggcaacagctggaaacagagaagaaaaggagagaaaccgtggagagagagaaagagcagatgatgcgcgagaagga

SEQ ID NO: 194464 - DNA, 82 bp, Homo sapiens
tttttctcataatgaatcctctcaggacattgtgtagcctatggatggtcttgttaatgtaggatggatggactgtgccacc

SEQ ID NO: 194465 - DNA, 75 bp, Homo sapiens
gtctttccaaaaggtcaaggttcacaagcaaatagaggaagcggggcagccggcagctcccagactggagatgct

SEQ ID NO: 194466 - DNA, 100 bp, Homo sapiens
gaagcccaccgactttgaggatctggaggacggagaggacctgttcaccagcactgtctccaccctagagctccatgatgcgttatctgggtctggaaac

SEQ ID NO: 194467 - DNA, 75 bp, Homo sapiens
ttgaagaaacttctgaagagggaaactctgtacctgcttcacaaagggaaagcaggcaggatgggagagtcgccg

SEQ ID NO: 194468 - DNA, 75 bp, Homo sapiens
gccaggcctgcgccggcatcctccgagactacatttggtcaattttgtggaacctgtgggcctcaattactccat

SEQ ID NO: 194469 - DNA, 74 bp, Homo sapiens
cccgggaagagatgcagcgctatgcggaggatgttggggccgtcaaaaatacatgctacaggatttaactatca

SEQ ID NO: 194470 - DNA, 74 bp, Homo sapiens
caatgaggaacccaacggataaaaaggtatagtttggcagtggggcctccaaaaaaagacccaaaagttaaagg

SEQ ID NO: 194471 - DNA, 101 bp, Homo sapiens
cgccaggacaatggggacccgggacgacgagtacgactacctattcaaaggtactccaaagattcaggtttactcacgtcatccagcagagaatggaaagt

SEQ ID NO: 194472 - DNA, 141 bp, Homo sapiens
gtgatcttggcatcaaggaagggatgcacatcatcacaccatcagcttcagagaatggcagccatttatttgtcccgtgcaccactgccggaactgtggccacatcttctgcaacacctgctccagcaacgagctggccct

SEQ ID NO: 194473 - DNA, 90 bp, Homo sapiens
gagcttagagaaaaccagttaaaaatgttgcctaaggaaaggcgtaggaggaggagcaggagttcttccagatcgccaagaacatcaaaa

SEQ ID NO: 194474 - DNA, 50 bp, Homo sapiens
ccagacacaaggaatgcagcattcatgatgttgctatcaaaagttgagaa

SEQ ID NO: 194475 - DNA, 100 bp, Homo sapiens
acccatccttattgctacagatgtagcctcccgtgggctaggctgggacgcagagaccggcagcgattcggaggacgggctgcggcctgacgtgctggtg

SEQ ID NO: 194476 - DNA, 75 bp, Homo sapiens
tcgaggtggagaagatcctggacatgaagaccgagggggtaggtagccatccaagcttcctgaaggaggttcgag

SEQ ID NO: 194477 - DNA, 90 bp, Homo sapiens
ccctaaccccctgcttcctcaccctctgcacgagaacgaagttcttcgtcaccagctctttgcggagccacactcccttctgcacctgag

SEQ ID NO: 194478 - DNA, 75 bp, Homo sapiens
aagcacaaagagcttgctccctacgatgagaactggttctacacgcgagctgtttgcctgagaatacagatcaac

SEQ ID NO: 194479 - DNA, 100 bp, Homo sapiens
cgcgcgcgaggagttccgccccaccatctacagcaacgtgatcaaagtaacaacatgctgtaccccaaggaagacaaggagaaccgcattctgctctacg

SEQ ID NO: 194480 - DNA, 100 bp, Homo sapiens
gaatattgagaaggctgaggaactcagcaaccagctagctactcgagagcactgccctgggaagaactaggatgaggtattgacttgctgttgccacata

SEQ ID NO: 194481 - DNA, 74 bp, Homo sapiens
tcagggaactggatgtcagcaagaatggcgcggatcaagaagatcatgcagacggacgaagagattgggaaggt

SEQ ID NO: 194482 - DNA, 124 bp, Homo sapiens
ggagctcctcaggcttccaggggggccagatcacactcagcatgcagaaggcagatggctcttcttaaggccaataaggatctcatttccgcaggattgaaggagttcagcgttctgctgaatc

SEQ ID NO: 194483 - DNA, 75 bp, Homo sapiens
atgaacaccgtgaacctcagttattgggtgaagcccttctgtggagctgaccagggtgctgacccaaagggcagg

SEQ ID NO: 194484 - DNA, 100 bp, Homo sapiens
gatggaagcaggtggaattatgccctgttggttccaatgctgggattggctgcttttcgtgcattcatccctggagcgcccgtccagcctgtggttttac

SEQ ID NO: 194485 - DNA, 83 bp, Homo sapiens
atacttcaacaagccagatatagatgcctgggaattgcgtaaagggcagccccgagaaccacaggtgtacaccctgcccccat

SEQ ID NO: 194486 - DNA, 80 bp, Homo sapiens
ggaagctggtggaacagctacgcatagaagccgggattgagcgcatcaaggaaccatcactgttgctggaggcacctgac

SEQ ID NO: 194487 - DNA, 100 bp, Homo sapiens
atgaggtggagttctcagtgattcttaatcagcgcactggcaagtgcagcgcctgtaatgtttggcgagtctggaagagagaagggcacagttacctaag

SEQ ID NO: 194488 - DNA, 75 bp, Homo sapiens
cgttcggcggcgctcccatggcgcacattaccattaaccagtacctgcagcagcaaaatgatgcttcaacaccca

SEQ ID NO: 194489 - DNA, 100 bp, Homo sapiens
gagaacttgtgccccagttgctgtgctccaaggacacacaggatcaattacatctttacaggtgacccacaacacaactctgaatggcaaagatacactt

SEQ ID NO: 194490 - DNA, 96 bp, Homo sapiens
atccctgtataatcctgcccttacacctgtgctcctatacaagattaacattcacgcgttccttcacctcgggcagaataactttgcagaagccca

SEQ ID NO: 194491 - DNA, 100 bp, Homo sapiens
attaggaactgttctgccggaatttgaaaagtgcctgcgccaagcccatctttgtgtgcttgcatccaactgtgatgagcctatgtatgtcaagttggtg

SEQ ID NO: 194492 - DNA, 98 bp, Homo sapiens
ccagcaaaatttcagtggagagcattccatccctacggggctctatcactcagatttccaaatctgaagtctgtccgagaactcattttgaaacgtgg

SEQ ID NO: 194493 - DNA, 100 bp, Homo sapiens
acatcatctgctgaactctctacaagtgcccctgatgagccccttctgaattaaggtgaaaagcactgaagttgagatcctagagaagtctcaaattgaa

SEQ ID NO: 194494 - DNA, 75 bp, Homo sapiens
cactaagtttagatctcatgagttaaacagagctttgacctagaggagtacagcctctcacagtctaccctggag

SEQ ID NO: 194495 - DNA, 71 bp, Homo sapiens
agtaaccctcactggagaatccagagagtaagaaggcagtgctttccatcaccactggtggcagtggctcc

SEQ ID NO: 194496 - DNA, 98 bp, Homo sapiens
ggtgacccagccactccttaaattaagatggcttaatggtacaaataactccagagaccatgaatggcttgcggctagctttacgagaacagaaagac

SEQ ID NO: 194497 - DNA, 100 bp, Homo sapiens
aacacggtcaacgtggacggcttgacagccctgcaccagacaatgcagatcttcgtgaagactctgactggtaagaccatcaccctcgaggttgagccca

SEQ ID NO: 194498 - DNA, 83 bp, Homo sapiens
cctttggcctggagcatatgccttctccaatggcaaagtgaagacatttccacctggacacctgaccatgtgcctgccctgag

SEQ ID NO: 194499 - DNA, 98 bp, Homo sapiens
tgcaatcctcacattcaagctgataggctgcgctaccggaatgtcatccagcgagtgattaggtacatgatgatgagggactgttggcatgcagtgcc

SEQ ID NO: 194500 - DNA, 101 bp, Homo sapiens
ataagcacaagagaaagaaggttaagctggctgtcctgaaatattataaggtggtatgcagatcttcgtgaagaccctgaccggcaagaccatcaccctgg

SEQ ID NO: 194501 - DNA, 83 bp, Homo sapiens
aagagcctcatccacaccgtgttgctgcaaaaggactatcagcagaaaaatatggctcaggagactaaccagaccccggggcc

SEQ ID NO: 194502 - DNA, 100 bp, Homo sapiens
cggcggtagcgtctctgtttccttgtgggcgctcgcgcggccctgggtgtccctggccagtgtccttccacctgtccacaagcatggggaacatcttcgc

SEQ ID NO: 194503 - DNA, 100 bp, Homo sapiens
agctgatgctggcaaggaggggaataaccctgcagaaaatggagatgccaaaacagaccagactgctggaagaggaggaagagaagctgaagcagttgat

SEQ ID NO: 194504 - DNA, 100 bp, Homo sapiens
gtcaggtctggagctcgaccgggccaggagtcggatggtcagggctgccctttctgtcgttgtgaaataaaaggaactgagcccataatcgtggacccct

SEQ ID NO: 194505 - DNA, 75 bp, Homo sapiens
tccgccgtctcttcgagttcttcgtgctgctcaagggtgctgttggcccaaaggttgccctgaagccccccatcc

SEQ ID NO: 194506 - DNA, 90 bp, Homo sapiens
tggaagctcttcatctacaacccgaccaccggagaattcctggggcgcaccgccaagagctgggaattaaagctatagagagtcccaaca

SEQ ID NO: 194507 - DNA, 100 bp, Homo sapiens
cagcgacgccggcgccgagggacaccgcagtatgaggcagagcaaagccttctagacaagctcagtggaatctgaagggcccaccccatggaggaatgct

SEQ ID NO: 194508 - DNA, 101 bp, Homo sapiens
agcagaaaagtatagcgtggcaacccagctgttcattggaggtgtcactggatgttactccacaggatccgctgaacataggatgttgccacaaaatctac

SEQ ID NO: 194509 - DNA, 96 bp, Homo sapiens
cccagcccgcctctgtgccactttgcatcccacgccggaggaggcattaacgagaccgggtaagtccttcagtgaatctacagacctattttctca

SEQ ID NO: 194510 - DNA, 100 bp, Homo sapiens
cccgcctggctgcgagatatggagaggctagtggtaacaggccgagctggatggatgggtatggggagaggggcaggacgttcagccctgggattctggc

SEQ ID NO: 194511 - DNA, 75 bp, Homo sapiens
cctggagctgggccaggccgtggaggcatcaacttctaactcatctcgccaggagaggcctccagtgaaaccctt

SEQ ID NO: 194512 - DNA, 101 bp, Homo sapiens
ggacgcgggagctgatgcggctggaccggccggggaaacagtattttctggaagggaacgtgcagagattgctcgagacggagatgtgggctgaactctgc

SEQ ID NO: 194513 - DNA, 75 bp, Homo sapiens
cagcactttgctgggagagatggatcttctgactcaggaaattcacagtatggccaacagcaagatgcataccag

SEQ ID NO: 194514 - DNA, 75 bp, Homo sapiens
ccgagccgcaggagagacacgctgggccgaccccagagcggcgctggacaggaggagctgacaagcacaagtgtg

SEQ ID NO: 194515 - DNA, 100 bp, Homo sapiens
cgcggcgggaggagcctgttcccctgaggtggctattatcatggaaaactaatttttcccagagaatttcctttcaaacctcccagtatctatatgatca

SEQ ID NO: 194516 - DNA, 75 bp, Homo sapiens
aggcctccagggggatccagggataccaggtcctccgggaataaaagctcagaattctgcaaatgcagattttgc

SEQ ID NO: 194517 - DNA, 100 bp, Homo sapiens
cctggtcgaacagttttttctaatggctattcaagtgtggcttcctgttgtggtgcatggccccgagcccttctaatggggctgaactgctctacaagcg

SEQ ID NO: 194518 - DNA, 119 bp, Homo sapiens
cgcagaaaccccgttgacaaggcactgctttttcatgacggttcgagaacttgtcttggacaattgcaaatcaaatgatggaaaaattgagggcttaacagctgaatttgtgaacttag

SEQ ID NO: 194519 - DNA, 90 bp, Homo sapiens
ggaatagaagagaatgacctagcaaaagttgatgatcttccccctggttgggggccgtcccgctcctaaggcaggaagatggtggccgca

SEQ ID NO: 194520 - DNA, 100 bp, Homo sapiens
gatgcacatgtatgccaagaacttctacgggggcaatggcatcgtgggagcgcaggtctgggaggggctgaacgtggtgaagacaggccgagtgatgctt

SEQ ID NO: 194521 - DNA, 100 bp, Homo sapiens
tggccaagaagatcatcattaaggacggaggcacggttcatcatgcctagtggcgtataagaagaccccgccaccggtccctccacgcaccacttcaaag

SEQ ID NO: 194522 - DNA, 75 bp, Homo sapiens
aatgaagtagacattggtggaaacatttaatgctggcccgcgagagacattgatgcattttgctgtgcggctggg

SEQ ID NO: 194523 - DNA, 100 bp, Homo sapiens
aatccaaagactgtggaacttttaagtggagtggtggatcagaccaaagatgggaggaagaaggcacctacgatcaaactctggagttccgtaggggagg

SEQ ID NO: 194524 - DNA, 50 bp, Homo sapiens
gaaactcactgaagtactaaacagcgggacgaccctgggacagtctccac

SEQ ID NO: 194525 - DNA, 50 bp, Homo sapiens
cttcaactctgttcacctgcttgcagaaatgcactcggtgatggaaagag

SEQ ID NO: 194526 - DNA, 101 bp, Homo sapiens
gtgacatcagaaaatgtgtccagagattacaaggatctttgatgaagtgatgggctgcttctctgactccccaccccagagtcccacattccctgaggcag

SEQ ID NO: 194527 - DNA, 80 bp, Homo sapiens
gcccgaaggacttcggcgcgggactcaagtacaactcccggcacgagggtgatcagcccatgacctaaacctccagacaa

SEQ ID NO: 194528 - DNA, 100 bp, Homo sapiens
ctggaaacaatggcatttacagaaagagtcaacagcagtggcaacaggctaggcagctggaagagaaagaccgagtgctaaagaagcaggatgcattcta

SEQ ID NO: 194529 - DNA, 151 bp, Homo sapiens
gaaataacaggaaacacatgaaaaatgccacgattgtaatgtctgtgaggagagagcaaggcagttcttcaggggaggatacagattataaaccagtgccactgaaaacaggagaaggtgaagaatatatgctggctttgaaacaggagtt

SEQ ID NO: 194530 - DNA, 49 bp, Homo sapiens
ctattggaaaggccttcactgcacaggttgcagatatcaagaaagtcaa

SEQ ID NO: 194531 - DNA, 82 bp, Homo sapiens
attggatgtggcaattttggagaattacgattaggggaatcacttgcaaggtccacacaagtccgcctatgtactctctgga

SEQ ID NO: 194532 - DNA, 110 bp, Homo sapiens
ttttcaatgctgcgaaagctgccaaaagtgacatgcagtcatcagtgagttctgcctcagtcagctcccaagtgaggacgcagtcacctttgaagactccggaggctgag

SEQ ID NO: 194533 - DNA, 96 bp, Homo sapiens
cgcggactgaaggagactgaagagtttactcgaactagaagtagatttggataatttggaattagaagatattgacacaacagatatcaatctgga

SEQ ID NO: 194534 - DNA, 82 bp, Homo sapiens
tttccgtgcataagaagccgaatgttggaatcgaagcctcttaaaatggcagatgacttggacttcgagacaggagatgcag

SEQ ID NO: 194535 - DNA, 97 bp, Homo sapiens
tcttgggtgctgaagaagcaaagacctttgatcagctgacaccagaagagagcaaggaaaggcttggtttttacccacctcttgatgaaccatctat

SEQ ID NO: 194536 - DNA, 75 bp, Homo sapiens
aaatttccaaggtgtgccgaaggctatgcactatacgcccaggcgctgagatgcgtctggagagccagagggcct

SEQ ID NO: 194537 - DNA, 100 bp, Homo sapiens
aagaagtgggggtcctcctcctaagagatctgcaccttcaggaccagttcgcagtagcagtggaatgggaggaagagttccggaaccccaaggcatcctt

SEQ ID NO: 194538 - DNA, 75 bp, Homo sapiens
ccaccattcaggctccattcagtcctttaaacagcaaaaagtggagtggcagggtcccagccagtgagtgagaag

SEQ ID NO: 194539 - DNA, 103 bp, Homo sapiens
tggagaacaagcccatcgtcacctgtactccaaagattcaggtttactcacgtcatccagcagagaatggaaagtcaaatttcctgaattgctatgtgtctgg

SEQ ID NO: 194540 - DNA, 74 bp, Homo sapiens
gagaatgtgtcagccgatgcaccgagtccagcccaggaaaatggagaggagccctctggcacaaatggaagaag

SEQ ID NO: 194541 - DNA, 101 bp, Homo sapiens
cgagaacgtgcgggaagagaagatcatcgagcatttcaaacgagatcatgatgcagccgtccttttggatttctttttaataatgtgtgacccttcacctt

SEQ ID NO: 194542 - DNA, 51 bp, Homo sapiens
actgggctcccagcagcccaggttcagccattccacagattttgaagtaca

SEQ ID NO: 194543 - DNA, 130 bp, Homo sapiens
agggatacagcagtttggtcaatattgtcttaacatgcttcaaataaatcagacatccacgacagcgatggcagttccagcagcagccaccagagcctcaagagcacagccaaatgggcggcatccctgg

SEQ ID NO: 194544 - DNA, 109 bp, Homo sapiens
accgcgctcaagaggctgatggccgagtacaaacgcatctgcagccctggctagaaagaaggggaaaagtttgcataaagacatggctatcttttggcacaggaagaaa

SEQ ID NO: 194545 - DNA, 75 bp, Homo sapiens
ctcaatgttttgctcctggcctggaagattacataccggttacggcacctccttcgtgcaaggtgtgatgcatcc

SEQ ID NO: 194546 - DNA, 76 bp, Homo sapiens
agtaatcagtctttgacaagtgatgagaagctgtcggagcttcccaaggttcagggagcaagtttccgaggttgga

SEQ ID NO: 194547 - DNA, 51 bp, Homo sapiens
gtcctttatatagaagggagagtagacgttttggaataatgggactctaca

SEQ ID NO: 194548 - DNA, 111 bp, Homo sapiens
cccccgcaaagcaacgtctaggagaccacagtggatgccacagcgggcccgaagcggatcagccttgtgggacaatgcagatcttcgtgaagactctgactggtaagacca

SEQ ID NO: 194549 - DNA, 90 bp, Homo sapiens
aaaaagcagggaggttatgaggcttaataaagaagttccttcttggagggaccactcagtagagcctctaagggacccaaatccttcaga

SEQ ID NO: 194550 - DNA, 102 bp, Homo sapiens
cagatttcgggacagctctctagaaactcgctctaaagacggaaccgccacagcactcaagtgtcgtgaaaactacccctaaaagccaaaatgggaaaggaa

SEQ ID NO: 194551 - DNA, 75 bp, Homo sapiens
cattctgccctttcttgggctgtgttcacgaacgtggtgaagctgatgcgaggtcttctccagtgcatgatgaga

SEQ ID NO: 194552 - DNA, 90 bp, Homo sapiens
gttcgtttaaggctttcttctttctcctgtggacaagccagtgctaccccattcacagacatcaaggcttgcacagaaatctggaggcag

SEQ ID NO: 194553 - DNA, 100 bp, Homo sapiens
ggcatcgggcgacagcaggtcacagtggacgaggtgttggcggaaggtgttggtaaatcatgcttattgctacagtttacagacaagaggtttcagccag

SEQ ID NO: 194554 - DNA, 83 bp, Homo sapiens
actttctcccttgatccgggagtctttccactgggtcccgcaggctcccgatggcgagattacggcgccctggccatcatcat

SEQ ID NO: 194555 - DNA, 75 bp, Homo sapiens
ctcacagcaaccagcaccagatgaaggagcattcctcttgggagtgtgagcagctgcagaagatgtacggggggc

SEQ ID NO: 194556 - DNA, 75 bp, Homo sapiens
aaatggaaatatagaaagtgtcccaaagcaaatcccaccaagaccacctgaagggaatgggaatcagaggtgaag

SEQ ID NO: 194557 - DNA, 101 bp, Homo sapiens
ttagcgcactggaggagcggcgggcttcagacagatctttaatctcatgaagtacgacagctacagccgcttcttaaagtctgacttgtttttaaaacaca

SEQ ID NO: 194558 - DNA, 75 bp, Homo sapiens
tggaacctgctgtatctactcaagagtggaagttttcacagggctattgagtggccagacttccccaacaaatgc

SEQ ID NO: 194559 - DNA, 90 bp, Homo sapiens
gcggaaaaaagaaaactctagaagtctggatgtcggtgggcctctgagatatgccgtttacgggccccgcagggtggagcccgtctgctc

SEQ ID NO: 194560 - DNA, 75 bp, Homo sapiens
gtcgcagatcctgagacccggacagtggcagtgaaacagaaccccgagatgcccctgtccttcacaataagccga

SEQ ID NO: 194561 - DNA, 90 bp, Homo sapiens
atatgaaatatgggagacgacagaccgtttgtgtgcaatgccccgggctgtggacaggtcaagagcacctcacagctgctgagccgtccg

SEQ ID NO: 194562 - DNA, 102 bp, Homo sapiens
cgcccgcggttgtagcagctgccgctgcagccatagcagcaggaattgtcgtgtgaaaatgacgcaacaaatgcaaaatttacatctctgtcagtcaaaaaa

SEQ ID NO: 194563 - DNA, 86 bp, Homo sapiens
gactacctggcaagtggttatcagaaacgttcagtgcctgtagccactgtagaactggaagaaaagaggttcagaactctgccttt

SEQ ID NO: 194564 - DNA, 95 bp, Homo sapiens
gattcctccaccacctcactctgctccttccctgttgccaatgtctcgctgactaagggtggacgtgatcggattccttatggcagaaagtatga

SEQ ID NO: 194565 - DNA, 90 bp, Homo sapiens
ggaaactgcctcctgtccatcaagccccaggagaagtcagagggacttcagcttaattttcagcagggacacactcaggacaccaacacc

SEQ ID NO: 194566 - DNA, 83 bp, Homo sapiens
tcctgcgaaaccaggcaatgggtgagaagccctaccactgcaactgggacggctgcggctggaagtttgcgcgctcagacgag

SEQ ID NO: 194567 - DNA, 83 bp, Homo sapiens
gctcttactgcgggccgctccgacggcggtccatcctggtgggctgggggccctgactggacctggcctggccagcttactgg

SEQ ID NO: 194568 - DNA, 100 bp, Homo sapiens
cctcgccttcctcccggcgtggcagatgctccagggttcccagcaccatgagggcctggatcttctttctcctttgcctggccgggagggccttggcagc

SEQ ID NO: 194569 - DNA, 77 bp, Homo sapiens
tctgggcctgctggagaaaaagaaagattacaaacttcgtgcagaatgagaatgaagatttaaggaaacttgcagag

SEQ ID NO: 194570 - DNA, 100 bp, Homo sapiens
gagtctctgcagttgaatctgacaaagatcgaacagttgtgctcaggtggctattatcatggaaaactaatttttcccagagaatttcctttcaaacctc

SEQ ID NO: 194571 - DNA, 75 bp, Homo sapiens
agaagatgaagatgaggatgaggatgaagcctgacttcctcctccacccctccatgagactaggccacatgcagc

SEQ ID NO: 194572 - DNA, 83 bp, Homo sapiens
aagctcgtagcctgccactccgtgcggaaatcctcattgacgattcaatttgttgaaggccaatttgtggactcctacgatcc

SEQ ID NO: 194573 - DNA, 51 bp, Homo sapiens
ggccattttgctgctgtgtgtggagactcacttttccccttcgtctttctc

SEQ ID NO: 194574 - DNA, 101 bp, Homo sapiens
tcggcaagatccagatcgggatttacgtggagatcaagcgcagcgatggagcttgatcctggatagtgtttgtatgatgtgcacacgtctctgcaaatgct

SEQ ID NO: 194575 - DNA, 75 bp, Homo sapiens
cgccgcccacgcagcagggacagcagcagaaacctgctcctccaaagccagagcccaagcctaaaaaggcccctg

SEQ ID NO: 194576 - DNA, 100 bp, Homo sapiens
ccagagacgtgccagctgttcaccaccgagctaggctgggctgggatcagatgggaagcggaagctcatcatgaccagaaactgtttccctatggagagc

SEQ ID NO: 194577 - DNA, 75 bp, Homo sapiens
attgaccccaaagttgcatttcctcgtcgagcgcaacccaaggaatacatgcaccacctgctcgccctggagcat

SEQ ID NO: 194578 - DNA, 75 bp, Homo sapiens
cacaaagcactgggatggattacagattgccacggcagtgaagtttctacagaattcccgggtccgccagagccc

SEQ ID NO: 194579 - DNA, 75 bp, Homo sapiens
caaaacttcaagccaaacatcaagcagaatgtgatttgcttgaagatatgaggtgagaaaactgaggtttcaagt

SEQ ID NO: 194580 - DNA, 98 bp, Homo sapiens
ttgtctgcaaacctggagccagaaacattaccgtcatattccacccattactaagttaatgtccatcagtgtgttggcagtttctgcttggatgaggg

SEQ ID NO: 194581 - DNA, 75 bp, Homo sapiens
cgaaaattggatgtgaaaatgaagccagaccgagatgggccaaggttgctcgggtgattggtttactggcttcgc

SEQ ID NO: 194582 - DNA, 74 bp, Homo sapiens
gatcatgtctggtggctccgcggattataacagggccatgtttatgagtggactaagtgaaagcaaacaaaccc

SEQ ID NO: 194583 - DNA, 50 bp, Homo sapiens
cccacatttctaaatcagatgcttcccagagcccaagagtgttttccgta

SEQ ID NO: 194584 - DNA, 75 bp, Homo sapiens
agcagtagttgttacacatttgtgaacacagtgatggatttggaaggaagtgatcttttggctgagaaagctgat

SEQ ID NO: 194585 - DNA, 101 bp, Homo sapiens
gaaacagcggatgattctggaactgggagaagatggctttaaagaatacacttcaagacttgcaatctcaaaagcaagacaggcatggagaagcagggatt

SEQ ID NO: 194586 - DNA, 100 bp, Homo sapiens
actggtgacctgcccattcagggagcactgcacccaggtgttgcagcgctgtgacctcgagcatcactttcaaaccagtaccttctccaggcaaattccg

SEQ ID NO: 194587 - DNA, 100 bp, Homo sapiens
gttcctattgggccatcttggctccaccaccctggtattccagcgtcttcaggaaacagtttagactctcttcaagatgacaatcctccacactggctaa

SEQ ID NO: 194588 - DNA, 82 bp, Homo sapiens
cgccactgccgcaggaggcgtgaggtgtccctggccagtgtccttccacctgtccacaagcatggggaacatcttcgccaac

SEQ ID NO: 194589 - DNA, 82 bp, Homo sapiens
cacaaatctcatatgcagtccattattgacaagagcaaatttttcagaacataaaacaagaatatagtcgttatcagaggtg

SEQ ID NO: 194590 - DNA, 106 bp, Homo sapiens
cctctccgttgctttctggaagtcaacattttgatgttcctcccaggagacagctatatttgcccatgttattcaagattacaggctgtgccagccctggaaaaac

SEQ ID NO: 194591 - DNA, 100 bp, Homo sapiens
gtgccggcttctcccctacgcgctacacaagtggagctccttttcctccacctaccttcccgaatagttttgaggcagctgtgccatcaaatagccacat

SEQ ID NO: 194592 - DNA, 74 bp, Homo sapiens
cctggctgggctggcggaggccttgctgatgaacctgactgaggggaggagccccagccccgcgacgaggagga

SEQ ID NO: 194593 - DNA, 92 bp, Homo sapiens
ggcgtcttccgctgcatccccatcttcggcatgtccttcgcctgccagtctaagactttgaccccgacgcaggcttcagtgattgccgcgga

SEQ ID NO: 194594 - DNA, 100 bp, Homo sapiens
atgaacctcttggtcttgaggcagatatgtgggcagcctgtgagcagcaagctgtggctctgactctgcaggaggacagagcatccctgacgctttcagg

SEQ ID NO: 194595 - DNA, 74 bp, Homo sapiens
cagcgggggcagtcagagcggagccaagatgcgaatggggggctatcaacagcaggacgcccatgaattcatgc

SEQ ID NO: 194596 - DNA, 100 bp, Homo sapiens
gctgccttgtcaacatcttcgagcatcggcagctccggaggccggggtaactggcagaaagttcaggagccctggaaaggagaaggaataagacggcagg

SEQ ID NO: 194597 - DNA, 98 bp, Homo sapiens
accctggccaagatccgcaaggccgcccgggaactgctgacgcttgatgagaaggacccacggcgtctgttcgaagaggagacacaccttgaagaaac

SEQ ID NO: 194598 - DNA, 82 bp, Homo sapiens
agcgtggatgatctcctgccttccttgccgtcatcttcacggacagagccatgtcaaaatctgccgtgaagatatccttgga

SEQ ID NO: 194599 - DNA, 100 bp, Homo sapiens
tgtctgtcacatatgatgattccgttggagtagaagtgtccagcgacagcttctgggagtgaactttgaggcgctgatcatcaccatgtcggtagtcggg

SEQ ID NO: 194600 - DNA, 82 bp, Homo sapiens
tctaccagtgcctgacggggaaggcgcccttccaggccactgagaatgcaaaggaggaagtgaggcgaattctggggctgct

SEQ ID NO: 194601 - DNA, 83 bp, Homo sapiens
ctcttcatattggcgatcctgttgtatgagcagcaccagcagtaagagggctccgaccacggcaacccagaggctgaagcagg

SEQ ID NO: 194602 - DNA, 75 bp, Homo sapiens
tggagaactacagaaacctggtctccctaggttcaaaccttgtactactcagctgatcacaagctgcttgatggg

SEQ ID NO: 194603 - DNA, 100 bp, Homo sapiens
ttaactacactgaacagttactccgtggcctttcgtatctccatgaaaaccaaatcattcacagagatgtcaaagaaagaaatttcagagcttccaagac

SEQ ID NO: 194604 - DNA, 100 bp, Homo sapiens
agcgccggcctcctcagtgcgaagaagctgcagccgcacctggccaagggaaatgctgacttttaacccacacaagcgaatctctgcctttcgagctctg

SEQ ID NO: 194605 - DNA, 83 bp, Homo sapiens
tagagtcgctggagcgggcggagctgtgcgagagcctcctcacttgggaaacaggtgagcagattgccatcaagcagtgccgg

SEQ ID NO: 194606 - DNA, 98 bp, Homo sapiens
cgatatttgggagcggccccgagacgcgcctggcgcggaggctgggaggcggcagaatgcagccagaggagggcacaggctggctgctggagctgctg

SEQ ID NO: 194607 - DNA, 75 bp, Homo sapiens
cactggctgctggagcttgtcaccaccagcttgatggaccagacaaataggatgatggctgcccccacacaataa

SEQ ID NO: 194608 - DNA, 98 bp, Homo sapiens
ggcagtgcgaatggataaaccagcacatatgaagcatagtggtgattcgcctttgccagtctcatctcgtgtctgctttgttaagttccatgatccag

SEQ ID NO: 194609 - DNA, 75 bp, Homo sapiens
gacgctggctgcagggacccggtgacagcgtgagaggttatgccaaggacgccctgaatctggcacagatgcagg

SEQ ID NO: 194610 - DNA, 106 bp, Homo sapiens
tggcttagagatcactaatccatcttcagcttcaattacaagtgtggatttgctggagaaactggtccaagatgtataattcctagtgtgataaaaagagctggga

SEQ ID NO: 194611 - DNA, 90 bp, Homo sapiens
ctcctcaaggctcccctcacaaaggtcttcaaagcttcacctttctccaaaggcagatgtgaagaacttgatgtcttatgtggtaaccaa

SEQ ID NO: 194612 - DNA, 83 bp, Homo sapiens
gaaatttggagtgtgcgtgcgcgccgagcgatcttcgtgaagactctgactggtaagaccatcaccctcgaggttgagcccag

SEQ ID NO: 194613 - DNA, 111 bp, Homo sapiens
cggcggagtagagcggagcctggcgggcgtgggaacccaggccccgccgaggcggccaggtgccttagctggaccaattattgtggagccacatgtcacagcagtatgggg

SEQ ID NO: 194614 - DNA, 100 bp, Homo sapiens
agtcgtagatacaaatttttggatgatgatggatccatttctcctattgaggagtcaacgttcctgttgacagctgtcgccttgctctccagctactcca

SEQ ID NO: 194615 - DNA, 75 bp, Homo sapiens
aaataaaatgctcttaaaacgaatgcaggccttggaggtggcatttttctgaagttgttcattaagacttcccag

SEQ ID NO: 194616 - DNA, 50 bp, Homo sapiens
ctgaagacaggcttaagcatggtttaccgacaagactgtgaaactttcgg

SEQ ID NO: 194617 - DNA, 97 bp, Homo sapiens
tcaaagataaatccaaatactgcatatcagaaacaacaggttgaaaggattgttgacaaaaggaaaaataaaaaagggaagacagagtatttggttc

SEQ ID NO: 194618 - DNA, 101 bp, Homo sapiens
cagcaactcaccatgccagtgcagattcaaggggaggagaaatagagtccacttcttgatgggaggcgtgacatgaactggatgcatttcagccatacccc

SEQ ID NO: 194619 - DNA, 82 bp, Homo sapiens
ggactcctcgcctggctcggaaggtcgcctgcgaggccgctggccaggcctgagcctctgccaccatggccattgtgcagac

SEQ ID NO: 194620 - DNA, 100 bp, Homo sapiens
taagaaaggaaaatatcccaaggactaatctgatcgggtcttccttcatagaccatcatgcagacatcagagactgggtcggacacaggctcgacagtga

SEQ ID NO: 194621 - DNA, 83 bp, Homo sapiens
atgatgtgcagatcaatgacatttccctgcagcgatgtgcattttgtaagcactttggagccactatcaaatgctgtgaagag

SEQ ID NO: 194622 - DNA, 75 bp, Homo sapiens
tccctgccgtggctgctcaacaaggagctgggctgcatcaactcgcggagctggagtttgttcagatcatcatca

SEQ ID NO: 194623 - DNA, 104 bp, Homo sapiens
gctcggcgatggtaggcgtccctggagcggccgccttccagcattgttgtaggagataaagttgttttgatgcctgtgaatgcagggcagccactacatgccag

SEQ ID NO: 194624 - DNA, 88 bp, Homo sapiens
acggcctgcatcgggcccacgctcagaaagatggatactatgatgctgaatgtgcggaatctgtttgagcagcttgtgcgccgggtgg

SEQ ID NO: 194625 - DNA, 136 bp, Homo sapiens
cccggtctgcgtggggatgaacatcgacatcgccagcatcgacatggtttccgaagtcaacatggaataccaaattgacatattttttgctcagacctggacagatagtcgccttcgattcaacagcacaatgaaa

SEQ ID NO: 194626 - DNA, 82 bp, Homo sapiens
cggagcctcatttactgaacagtggacagatggttatgcttttcagaatcttatcaagccaagtcctgtatctgccatgtct

SEQ ID NO: 194627 - DNA, 82 bp, Homo sapiens
ggtctcctctcaagaaatctcaagatattaaagttactgctgttaaaaaggtgggctggatgacactttgcacacaattatt

SEQ ID NO: 194628 - DNA, 75 bp, Homo sapiens
acggaagcacaggggccactcagagtcgcccgagaacttggatcctagcatgactatacattgtgacatggtcat

SEQ ID NO: 194629 - DNA, 60 bp, Homo sapiens
tgaattctggagaaagttttttggagacaagttcgttggggtgataaaggatctactgag

SEQ ID NO: 194630 - DNA, 100 bp, Homo sapiens
cgaaccagcgcggacaccacaatggaccgggcgtccgagctgctcttctacgtgaacggccgcaagagtctcaagtcaaagtcgtggccctgtgtgctgg

SEQ ID NO: 194631 - DNA, 88 bp, Homo sapiens
taaagtaacagatgatttagttgacgggctctacgagtgcattctctgtgcctgctgtagcaccagctgccccagctactggtggaac

SEQ ID NO: 194632 - DNA, 90 bp, Homo sapiens
catgttctgcagcgtggcttcctttggtgccagctctttgtctagtgccggtggtggtgtgcacattgagccccggtatagacagttccc

SEQ ID NO: 194633 - DNA, 100 bp, Homo sapiens
caactggatcaccttcaatgtgggctaccacgtggagcaccacgacttccccagcatcccgggctacaacctgccgctgttcctgggcttcccgatggac

SEQ ID NO: 194634 - DNA, 76 bp, Homo sapiens
gtagaaaacaggaagaatttgatgttgccaacaacggctcttctcaagttttgatgatgatggttcagaatttcat

SEQ ID NO: 194635 - DNA, 75 bp, Homo sapiens
cctccaccagaggaaaatagtatgggaattcctattatggcatttactgtacatttctcccgagaaaagagtgag

SEQ ID NO: 194636 - DNA, 100 bp, Homo sapiens
cataccattggattttgcttctttatccaagttatcattctgtcttttaattggggtgtgcattcaagttgagtcagcagatactggagttatttgaaac

SEQ ID NO: 194637 - DNA, 100 bp, Homo sapiens
tctcagaagagtgagagagagctattagagattgtgaagaagaatttcgatctccgccctggggtcattgtcagctctggaggctgccatcgagaacctc

SEQ ID NO: 194638 - DNA, 97 bp, Homo sapiens
gcggcggccgacggcgacgactcgctgtaccccatcgcggtgctcatagacgaactccgcaatgaggacgttcagggtctcctatggacagaagtgc

SEQ ID NO: 194639 - DNA, 82 bp, Homo sapiens
ctgaagcgactgagtccgcgatggagatgccaaacgtctgattggacgcagatttgatgatgctgttgtccagtctgatatg

SEQ ID NO: 194640 - DNA, 83 bp, Homo sapiens
tccagatattaggtcacagcagaagcagccaaaatggatccccagtggctgatgggaaccaccctgtagaggtccatctgcgt

SEQ ID NO: 194641 - DNA, 89 bp, Homo sapiens
gcaagcaatttctcagattattacaaaatgaacaatttgagttggatatggaagaggccattcaaaagcacttttcaggattagaagag

SEQ ID NO: 194642 - DNA, 75 bp, Homo sapiens
gtcgcatctgggacaccgcctcaggccagtgcctgaagacgctcatcgcggaagtgaccgtggtggcttcaataa

SEQ ID NO: 194643 - DNA, 90 bp, Homo sapiens
ctctccccctcggaggcggcgggcggaggcggcgggctgctctttggcgtaaattgcaatcgattagggatcgtttctcagaatcaagtt

SEQ ID NO: 194644 - DNA, 83 bp, Homo sapiens
gatatcgacgtcgtgatccagaagtccagagctgaggactgcctgtttgcaggctgaaggtgatgtggccgccctcaaccgac

SEQ ID NO: 194645 - DNA, 74 bp, Homo sapiens
gagcgacagcggcgagcagaactacggcgagcggtttgcctgagaatacagatcaacccacagaacaaagcgga

SEQ ID NO: 194646 - DNA, 90 bp, Homo sapiens
gatgcggccaactccaatgggcctttccagcccgtggtccttctccatattcgaggtctcaagattctgccctccaagaaagtcttgcca

SEQ ID NO: 194647 - DNA, 100 bp, Homo sapiens
tgcatacaagactttttcaagaaacacatacagtacaaattcttagatgaagactctctggtagctgaagaacatctcacagtggacgccagggtctatt

SEQ ID NO: 194648 - DNA, 90 bp, Homo sapiens
cccgccgtagccgcctccgagcccgccgccacatcctctgaggaagttctccagcagctgattgtaatgaatttgcccaatgttttgatg

SEQ ID NO: 194649 - DNA, 100 bp, Homo sapiens
cgctgaaggaacatgagctcttggagcagcagaagcgggtcatggtattcccgggcctgcgtctgagccgtgaagccttcctcaccacggccgaatttgg

SEQ ID NO: 194650 - DNA, 82 bp, Homo sapiens
gcaaactcccaggtgactgcaggtcccaatattgaagcccatggatcttatggtagaagcgagtccacggcgaatttttgca

SEQ ID NO: 194651 - DNA, 75 bp, Homo sapiens
tcagcatttgtttcccttagccagcccgagcaagtaaagattggcccgtgggagtcagcatgccgcgtggctggg

SEQ ID NO: 194652 - DNA, 100 bp, Homo sapiens
acaaacagcggaaaatctactgcgtggcttgtcaggaactcgactcagacgtggataaagataatcccgataaataggatttaccaatccttggatgaag

SEQ ID NO: 194653 - DNA, 82 bp, Homo sapiens
cagccgagcaccctccaagcagagggcgaccattgacgaggtggagacggacgtggtggagattgaggccaaactggacaag

SEQ ID NO: 194654 - DNA, 80 bp, Homo sapiens
gggcagtgaaacaaggcttcttgtatcttcagcagcagcagacgtttggaaagggttccgagtctgaggaagacataacc

SEQ ID NO: 194655 - DNA, 75 bp, Homo sapiens
cccggacggagcgccggccgcaccaccgccctctggccgttgcctcaccgggaatggaagttggatacactttgt

SEQ ID NO: 194656 - DNA, 98 bp, Homo sapiens
ctgtcttacagccgctggagctatgacagcattatgccagtacatacaggcttctaaagccagggatggtgccagccctttcatttcaagtacgactg

SEQ ID NO: 194657 - DNA, 100 bp, Homo sapiens
caaccatcttagggcatcagattggactttcagctgaaacagaaccgcatgagggaaagaggaaagtggaatctctgtggcccatcttcaggatccacca

SEQ ID NO: 194658 - DNA, 101 bp, Homo sapiens
cgaccgctttccgggagactggagtcgaaggccgtgagagcgatatctgaagtggctctgatgcctttgccacactcctcgcatctctgggacatcccttc

SEQ ID NO: 194659 - DNA, 100 bp, Homo sapiens
agaccgcggcgtctccagcctcggtaccatggccgggatcatcaagaaacaaatcttgaagcacctctccagaaactatggaggagtatatgttggccta

SEQ ID NO: 194660 - DNA, 100 bp, Homo sapiens
tgactcagacctgggcacagcaaatgctgaggactcagaccggtctctgcaagagagattagcagaggcatttcatatcagtgaggattctgatcctttc

SEQ ID NO: 194661 - DNA, 96 bp, Homo sapiens
agtttggagcccagaatgaagagatgttacccagtatcttggtgttgctgaagagaaaccagcctggacaccaagtctgtgtcagaaggccacctc

SEQ ID NO: 194662 - DNA, 100 bp, Homo sapiens
gcggcggcggcggccgaggaggaggagggggaagcggcggcggcaaagggatatcaatgagtgtattcttgaaaactatcccgagtgctccaaccccagg

SEQ ID NO: 194663 - DNA, 83 bp, Homo sapiens
agaccgcgcgcagggcctgcagcgggagctggacggcgagcgcgagcggcgcgagaaagacacctgctccacttcaccttttg

SEQ ID NO: 194664 - DNA, 100 bp, Homo sapiens
ttggcccagaggatctcttctaacatccagaagatcacacagtgttgatactgtaacactttgttcctaccctttcatctttgatgcccaagccaagacc

SEQ ID NO: 194665 - DNA, 100 bp, Homo sapiens
tctgggagccttcctgatccgggagagtgagagctccccaggggagttctctgtgtctgtgaatccaagtggtaagaagttcagaagcaagcctcagttg

SEQ ID NO: 194666 - DNA, 100 bp, Homo sapiens
ccctggccacggggactctcttctggatgagcccaatgacgaaagtggagctaacgtggatgcgtccaaaatgtggcgcgatgaccgggagcagttctat

SEQ ID NO: 194667 - DNA, 99 bp, Homo sapiens
gaaaattacccggtatcgttagaggtcttgctatcacagatgaaattttgctgagtaaggcagagtggtccaaactttttgaagctccaaacttctttc

SEQ ID NO: 194668 - DNA, 74 bp, Homo sapiens
tggcgatccatagctaagacgccaggtcccccggaaacctagaaatgatttcaacactacacttgcacaatgtc

SEQ ID NO: 194669 - DNA, 75 bp, Homo sapiens
tcaataatgaaagctcttcagaggtaaaccccagtgataggtaccatcttatgcctataattacaccagcatacc

SEQ ID NO: 194670 - DNA, 90 bp, Homo sapiens
gttggtcttctgatagcaactttaatgtgtatcttaaatagcgaagatggagaaatactcaataatgaagagcatgaatatgcatccaaa

SEQ ID NO: 194671 - DNA, 100 bp, Homo sapiens
tgcccaggctcgcctcgactccaaatggttgaaaacagatatacaggtattatacctgaagaaccttagccctcgggtgactgaaagagatcttgtgtca

SEQ ID NO: 194672 - DNA, 100 bp, Homo sapiens
atacatgagccagtgccttattggaaatgatttgcgtgttttaagaactggtgtatataggtactaggttttgacaagcttgcatcatgcgtgagtataa

SEQ ID NO: 194673 - DNA, 80 bp, Homo sapiens
cgctgcgcatctccaacagcgacctgagcgggagctactttgcccgagatgctgcatattcccaccactacagcaaatcc

SEQ ID NO: 194674 - DNA, 75 bp, Homo sapiens
gctgccgggttgcgctccgtgcacctcttgcggctgcgtcaagagaggcccaggacaccaagagccagctgtggc

SEQ ID NO: 194675 - DNA, 83 bp, Homo sapiens
ggttccccagcaactacgtgcgcgaggtcaaggccagcgggcattttggaagtgtcaaaggccagggacatccctgttgtcat

SEQ ID NO: 194676 - DNA, 74 bp, Homo sapiens
ccttgctccgagagggagtcctcgcggacgtcagccaaggcatctggctattcttggtgcagggctgatgggag

SEQ ID NO: 194677 - DNA, 89 bp, Homo sapiens
tggagaccttgacacttatatcctccctgggaattgtagtcaacggtcagcttgttggtgccaagaagcccaacaatggaaaactaagc

SEQ ID NO: 194678 - DNA, 50 bp, Homo sapiens
ctccttttccttggctaccccctgagaagccaggccccggcagcaaggac

SEQ ID NO: 194679 - DNA, 100 bp, Homo sapiens
aaaagtctgaagctctgaatatcagaggccagcctttcgaccccaccttcctcatcggctgcgcgccctgcaacgtcatagccgacatcctcttccgcaa

SEQ ID NO: 194680 - DNA, 88 bp, Homo sapiens
gggattttggaggccggggccgcgctgagggcgcccagctggtggagattctggacgcaaagacaagggagaagctgtgtttcttgga

SEQ ID NO: 194681 - DNA, 136 bp, Homo sapiens
cagcggctcttccctgggcggacgatggacagccagggcaggaaggtggtggtgtgcgacaacggcaccggggttttctaaatagctttgaggagttacaggctgaggaatgcggcatcctcaatggatgtgaaaa

SEQ ID NO: 194682 - DNA, 50 bp, Homo sapiens
gggacaccccggaagctgggaaatgatgggagcttgcctgattgtcaacc

SEQ ID NO: 194683 - DNA, 118 bp, Homo sapiens
cccggagttccgctcctgcgggcttagcaggaaagggtgcctaagatccagacatttaatgtggatgcaccatgccagaccgtggaagatttaacgaatggggttgtgatggcccagg

SEQ ID NO: 194684 - DNA, 90 bp, Homo sapiens
gatcaacatactttagacaatttggaaaaagaattacaagtgctgagatctcttgcaggacacagagtctgggatctaataattcagtca

SEQ ID NO: 194685 - DNA, 100 bp, Homo sapiens
gatgaccaggcggcttgggagaatgagctgcagaagatgacccgggggcaggtgtagaatgagccaaggagactcaaacccagcagctattccgcatgca

SEQ ID NO: 194686 - DNA, 90 bp, Homo sapiens
atggtggtgatggaagcaggtggaattatgccctgttggttccaatgctgggattggctgcttttcacggccaatgggaacgtggaggcc

SEQ ID NO: 194687 - DNA, 82 bp, Homo sapiens
cccagcaactggagcagcttcatcttccaggatgcgggaagcttcctcacgccctaagcgggagtataagcccaagccccgg

SEQ ID NO: 194688 - DNA, 75 bp, Homo sapiens
aaaaagctcaaaatgaggaaattctgtatgttcttcgccattatattcaggtctctaattaacagaagatggcaa

SEQ ID NO: 194689 - DNA, 76 bp, Homo sapiens
tctgatttgctgtcagccatgaacggatggatgtgatgcctgctagccaaaaggttattcaagcggagaaatgttg

SEQ ID NO: 194690 - DNA, 84 bp, Homo sapiens
gctgggccctgaggctgcaccaagtggcgaaggagccggctccaagggaaatcctcattgacgattcaatttgttgaaggccaa

SEQ ID NO: 194691 - DNA, 100 bp, Homo sapiens
tgaccattgtgtccccaggaaccacagctgctcagaaggccagagaagtatatcagagaattccctggtagcaatggacttctcaggccagaaaagcaga

SEQ ID NO: 194692 - DNA, 75 bp, Homo sapiens
ggaagacccctggctctataagctgaattatggcagcccagtcaaggggctatctgatgggttagagtgcctttg

SEQ ID NO: 194693 - DNA, 74 bp, Homo sapiens
aagcgggcgagcagcagttgagcgagcccgaggacatggagatggaagtcgagcaaaagatgtgataataccag

SEQ ID NO: 194694 - DNA, 90 bp, Homo sapiens
cacagccgcgtcagtgttgcggcgcgggatggcagttttacagtctccgcacagatattgaagatttgcccccaacagtccaagaaaaat

SEQ ID NO: 194695 - DNA, 90 bp, Homo sapiens
ttgggaaatgcaacaatccaaatggccatgggcacaattataaaggaattacatgaatgacagtcttcgaaccaatgtgtttgttcgatt

SEQ ID NO: 194696 - DNA, 87 bp, Homo sapiens
tagaccttgccaagatggcacaggtactgtctgatgagcgtgaaaggttgtttcaccgacttccacatcgactttggaggcacttcc

SEQ ID NO: 194697 - DNA, 101 bp, Homo sapiens
gacccctgtctcccggaggagcgcgcaccatcatggaagggaagtggttgctgtgtatgttactggtgcttggaactgctattgttgaggctcatgatgga

SEQ ID NO: 194698 - DNA, 106 bp, Homo sapiens
ctgcagtttgcaatatgactttggaggaattctcggctggagagcagaagaccgaaagcaattctgtggtgttcttggtcacacatttatggagtttctgaagggc

SEQ ID NO: 194699 - DNA, 75 bp, Homo sapiens
tatatccttcatatgatccatcttagtgaagaattaggatacagcaacacagtcactcctggcggcaaaccaaac

SEQ ID NO: 194700 - DNA, 90 bp, Homo sapiens
ttttgaagctgcccgtagatttcagcaatatccccacataccttctcaaggtggctttctagaagatgaccatagaggaccttccagatt

SEQ ID NO: 194701 - DNA, 89 bp, Homo sapiens
gccgacttcgatgatcgtgtgtcggatgaggagaagggggtggagggcagcggcagacagagcctggccgcctgggaggcgacgactgg

SEQ ID NO: 194702 - DNA, 98 bp, Homo sapiens
agctctctggacccctcccaggagggacccacagggctgaaggaagctgccttgtacccacatctcccgccagatctgaacagaattaagacgaacga

SEQ ID NO: 194703 - DNA, 75 bp, Homo sapiens
atcctctgtacgcccgttcactgcccctggaggaacgcgcatagatgatggtgacaagaccaagatgaccaacca

SEQ ID NO: 194704 - DNA, 74 bp, Homo sapiens
acagagtgaaggggaggtgccagcccgcgaatccggccggaggaatcggtgagtttcaaggatgtggctgtgga

SEQ ID NO: 194705 - DNA, 51 bp, Homo sapiens
ctttagtcaggaaggacgttggtgttgaggaactgaaattaccattcactt

SEQ ID NO: 194706 - DNA, 98 bp, Homo sapiens
tttgcggttcagccctttgatgaccgcagcagggtgtccgcaatgttgccagtgtctgtctgcagattggctacccaactgttgcatcagtaccccat

SEQ ID NO: 194707 - DNA, 95 bp, Homo sapiens
tgaaaacatggtgggtccagactggaaaaagaggtggttatactggaagaatcggacccaagaacaggataaaaactggatatgcatctaaaaca

SEQ ID NO: 194708 - DNA, 96 bp, Homo sapiens
ttgcagcggggacgcgaggacccgggctgggctttcctcacccggagctgcagaaactggagggcagcagtggacctgtgcggacgtctcctcaca

SEQ ID NO: 194709 - DNA, 75 bp, Homo sapiens
ggccaccctactgcctggaggccggggagccgacgcctggtgatcgtgttgccatcgagcctggtgctccccgag

SEQ ID NO: 194710 - DNA, 100 bp, Homo sapiens
gtgggaccagcggctgaggccaggatgccgtccaggcggcgcggcggctcctcactcatcccagcagatccagtttgctgaccagaagcaagaattcaac

SEQ ID NO: 194711 - DNA, 83 bp, Homo sapiens
atgcccatgcgagtacctgaggaaggagaggagttcattacttcggaagtggtacaatttaatgatacaaaataaggatgacc

SEQ ID NO: 194712 - DNA, 80 bp, Homo sapiens
gtttgcagatcgggagcgcaaggtcgccctcaaggccatgatcaaaactgtggacgaatgtggaacctcgctctgtggct

SEQ ID NO: 194713 - DNA, 83 bp, Homo sapiens
ggcaggaccggcacggcgaaaccttcaccttcaggtccagagggggcaaacctctttatttaccaccttccacaggaatttgg

SEQ ID NO: 194714 - DNA, 100 bp, Homo sapiens
actcgagcctagggaggcgaggttcccgcaccggataggttacgaagtgacagtgctggtgcgggactcctccaggctgccatcagaggggccccggccg

SEQ ID NO: 194715 - DNA, 101 bp, Homo sapiens
aggacgcgcaggagaagctggagctcacggagaagaaggcctccgacatgaaggatttgggggcagagcacttggcaggtcatgaaggggtccaacttctc

SEQ ID NO: 194716 - DNA, 98 bp, Homo sapiens
gaataagagatgtgattaatgtattccaccacctccgccagttaagaggaaaaaggtgacaatctccaatagacttgtgtcttcaccttgctgcattg

SEQ ID NO: 194717 - DNA, 100 bp, Homo sapiens
caggcctttttccctggactgcagatccgctgttgtaccaggggtctaatcaggcctgtgtctgcctccttcttgaatagcccagtgaattcatctaaac

SEQ ID NO: 194718 - DNA, 100 bp, Homo sapiens
gaagctgcagcggaggaaggcgagccatctgtgagaaagacacactgcagtggaaggaaacacaaagagaatgtgaaagactattatcagaaatggatgg

SEQ ID NO: 194719 - DNA, 100 bp, Homo sapiens
gcgggggaaagggagacggcgagacgcgcagcgccggcgcccgggagacccaggaggagcccgcagaaaaatggctacaaacttcctagcacatgagaag

SEQ ID NO: 194720 - DNA, 83 bp, Homo sapiens
ggcctcatacaatcatgatggcttcgggctttgtattccatgtatcttcggaaaacaaagagtttgaataaattgctctatca

SEQ ID NO: 194721 - DNA, 75 bp, Homo sapiens
gcagatctggcccaacgatggcgagggcgccttccatggagacgcaggtgggatgtgtgtgggctgaaattccga

SEQ ID NO: 194722 - DNA, 82 bp, Homo sapiens
ttcggcagtccacccaccgccgccgcctcccagtgctgagcttgcaagacctctgctgccgggcggtcgtgtcctgcacgcc

SEQ ID NO: 194723 - DNA, 100 bp, Homo sapiens
agccgccgctgcggagcccgccgggaccccccggagcgcggccacggcgcagaaataccgctaccaagatgaagacacgccccctctggagcacagcccg

SEQ ID NO: 194724 - DNA, 73 bp, Homo sapiens
gcctgctgctcgccgcgtcctgcgcctggtcaggtgctggagaatctggtaaaagcaccattgtgaagcagat

SEQ ID NO: 194725 - DNA, 50 bp, Homo sapiens
cccaggtcaagagcctctgcgagaagtaatctcaggggcgatataatcaa

SEQ ID NO: 194726 - DNA, 90 bp, Homo sapiens
agaattcttcttaagatccaagaagaactagaaaaaaagttgtttgcagtgaaaaaggccatagattttaaatctagaggatttaaattg

SEQ ID NO: 194727 - DNA, 75 bp, Homo sapiens
ggtgagggcgccgagaggctcggtgggcgcgggcggcgagaagagaagctgaatttggacgacagccagtgggag

SEQ ID NO: 194728 - DNA, 100 bp, Homo sapiens
atcaaactgaaaaatgtgctggcaggcagtatgacacctaagtcgccctccactgacatctttgatatgattccattttctccaatatcacaccagtctt

SEQ ID NO: 194729 - DNA, 100 bp, Homo sapiens
ctcctctgcaacctgataggatttggctacccagcctacatctcactatctgttatagtccctgggtcaagacaacaatttttataccttcgtcgtggtt

SEQ ID NO: 194730 - DNA, 90 bp, Homo sapiens
agaatttaattccttttcgaccttcaatccagttccaaggactccacgggggtgactgtcgttcctacagttacgtgtgtggaatctcca

SEQ ID NO: 194731 - DNA, 100 bp, Homo sapiens
gggctttgttgtggaaatcccggttacctgtgcttttttaggaccaaaggatatatttccttactcagaaaataaggaaaagtatggcaaaccaaataaa

SEQ ID NO: 194732 - DNA, 101 bp, Homo sapiens
tgcagttgaatctgacaaagatcgaacagttgtgctcagctgataaaatactgggaagcattcctacctgaagccaaagccattgcctagcaataagattg

SEQ ID NO: 194733 - DNA, 100 bp, Homo sapiens
tcgtggatgccaaactgcagcaaacgacacaactgataaaagaagctgatgaaaaacatcagagagagagagagtttgctgaaaatatttacaatgatga

SEQ ID NO: 194734 - DNA, 58 bp, Homo sapiens
gaggattgtcactccaacctcttttcgctgatttaatccagagactgacttcactata

SEQ ID NO: 194735 - DNA, 101 bp, Homo sapiens
aagcagagcgactcggttaagggaaagcgccgagatgacgggctttctgctgccgcccgcaagcagagcctggtgcctgctgagccgtgccgcaaggctgg

SEQ ID NO: 194736 - DNA, 83 bp, Homo sapiens
gccggagagagccgtaggcaggaccccgggacaccctggaagccaggaaatgtggtgctcatcggggactcaggcgtgggcaa

SEQ ID NO: 194737 - DNA, 100 bp, Homo sapiens
ccaaggcgaggagctcagcatggtcatcctgctgccggatgacattgaggacgagtccacgggcctgaagaagctggaggagagcaggagtgttcagaag

SEQ ID NO: 194738 - DNA, 76 bp, Homo sapiens
cgaggacgacgaggaggaggaggaggaggaaaaagctggtgatcagagtccacatgtctgatgacagttctaaaac

SEQ ID NO: 194739 - DNA, 82 bp, Homo sapiens
gctgtttgcggatgctgatgcaggtctcctccgggctggggctgagcaagccctcggagtgaccgtgggtgacagcggctcc

SEQ ID NO: 194740 - DNA, 90 bp, Homo sapiens
tgcagaagaacatcctggcggcggccagcccgtacatcagaaactgaggcttcttgaagagcttgaagacacttggctcccttatctgac

SEQ ID NO: 194741 - DNA, 75 bp, Homo sapiens
gaacccttgccgctgctgtcctgcgaccccaagcaggtgtggccgacgacgatgccctcgctgaggagcgcatgc

SEQ ID NO: 194742 - DNA, 100 bp, Homo sapiens
gttaatttcatggtacatgagtggctatcatactggctattatatgatgcaccagcaaggaatactgaagaccgatgatctcataacaaggttctttcgt

SEQ ID NO: 194743 - DNA, 75 bp, Homo sapiens
cgaagctggccgagcaggctgagcgatacgacggctttatcctgtggataaacgcagagtgaacgagtttgggga

SEQ ID NO: 194744 - DNA, 90 bp, Homo sapiens
taggaagcctggacgtgccaaggcccaacagcagggtggagatcgtggctgccatgcgccggatacgggccctggagagtgaatttgttt

SEQ ID NO: 194745 - DNA, 89 bp, Homo sapiens
gcagaagaagctgaggatgaagaagatggagcatccatcattggtgtgaactgccactttgaccccaccattagtttaaaaacagtgaa

SEQ ID NO: 194746 - DNA, 82 bp, Homo sapiens
cgccatcgttgctgccttcttcgtcaagaattcctagaggacctgtgcaacaacctcttgaggatcgaatcttcactcccgc

SEQ ID NO: 194747 - DNA, 82 bp, Homo sapiens
ctcctaatccctagccactatggtctcggcgcggaagatggccggcggcgtggacggccccatcgggatcccgttccccgac

SEQ ID NO: 194748 - DNA, 100 bp, Homo sapiens
tggcatccatgaaccttgatatagttgacctgcttaaaaaggccaaggtgtcagcttcctctggtgcaaccagcaagtcttccagtatgaatcccacaga

SEQ ID NO: 194749 - DNA, 75 bp, Homo sapiens
cactgtccagcccaagcctgactatgatggtagcatcgacaaggctccctgtggaccctgccccgccctgcccac

SEQ ID NO: 194750 - DNA, 75 bp, Homo sapiens
aaacagtccagagactcatccccgccctgtgggagaagcacagtccacagaccttcacggcatggtgcaactccc

SEQ ID NO: 194751 - DNA, 90 bp, Homo sapiens
atctgcaggctgacaagaaagggcgcccaactactgccggaagcaaaataaaggcccagattgccttcctgcagggagaaaggaagggcc

SEQ ID NO: 194752 - DNA, 74 bp, Homo sapiens
gctcctacgaaagaaagctcatcgagtgccagatccgctttggagggagaaaggagattgcctcggattccgac

SEQ ID NO: 194753 - DNA, 75 bp, Homo sapiens
ttcagaacgtgctgacatggagccagattttggtttcagtaacctcttcactcctgggcagctgctgaagacctg

SEQ ID NO: 194754 - DNA, 96 bp, Homo sapiens
atatgattatactgggtataactatgggaactatggatatggacagggatatgcagactacagtgacttcacagagaatgcagttgtcttgacttc

SEQ ID NO: 194755 - DNA, 74 bp, Homo sapiens
accgagagcgtgaccgagagcgcgaatatcgtcatcgttagaaggtgaagtagccccagaagagcaggacgccc

SEQ ID NO: 194756 - DNA, 75 bp, Homo sapiens
tcggactccgcggccggcccggcgcggcccagcgccctcagatcagtcgcatcgaatacattcattcaaagaact

SEQ ID NO: 194757 - DNA, 50 bp, Homo sapiens
attgacagctgcattcaatcttttggtcccctgcctgtgcccttcaccaa

SEQ ID NO: 194758 - DNA, 83 bp, Homo sapiens
tacaaaggaagacttgtaacctggagaagagtttctcagcaggttgtgtggcgctgccagctttaattaacatcaaagccgtg

SEQ ID NO: 194759 - DNA, 97 bp, Homo sapiens
ctcaaaggagttgtatttagtgtgacgactgttgacctgaaaagcgggtatttctgtgggacttggatgaaaccatcatcatcttccactcacttct

SEQ ID NO: 194760 - DNA, 75 bp, Homo sapiens
tgaaactgaccacagtgctcaccacccaccaccactgggcagcaggatgggtgtggaagcagtgatggcactttt

SEQ ID NO: 194761 - DNA, 50 bp, Homo sapiens
cgaatagtgactatagaagctaacaaggttgaatttttaggagaagaagg

SEQ ID NO: 194762 - DNA, 100 bp, Homo sapiens
tctcatctttgaactactgccggagcttctgccaggctggacgtaaagaaagaagtgatgcactcaattctgcaatagataaaatgaccaagaagaccag

SEQ ID NO: 194763 - DNA, 100 bp, Homo sapiens
tcaacagcaactggaaagccatcatggacaggatgaacaaggacaacaatgctctccggagcacccatcacccaggggttccttgtggaggctcacccag

SEQ ID NO: 194764 - DNA, 75 bp, Homo sapiens
gtcattccctgccgggttacgtcacctaacatcactgttactttaaaaaagatggctgatcactgggaaactgca

SEQ ID NO: 194765 - DNA, 97 bp, Homo sapiens
cgatggtgcccggcgaggagaaccaactggtcccgaaagaggatcaacactctgtggtaggccagaacacaggccccagtccaagtcctaacccctg

SEQ ID NO: 194766 - DNA, 100 bp, Homo sapiens
tgagagacggcggcggccgaaagcggagagatgctgggcgtggcggccgggatgacccacaggatcttatggttggtgatgaggcaagtgaattacgatc

SEQ ID NO: 194767 - DNA, 98 bp, Homo sapiens
ctgatgacggcactgttagaatctgggactttcttcgttgccatgaggaaagaattctccgaggcgatctgggtgtccatagtggggaagaactccag

SEQ ID NO: 194768 - DNA, 98 bp, Homo sapiens
tgagaagtgtatatcaagccacaatttccatcaaaaagtgattaagcagagaatggagaagaaggttgattccaggttcccgtgtcagtggctatgat

SEQ ID NO: 194769 - DNA, 100 bp, Homo sapiens
cttgtgggatgtgaaaactctgttactgaagggtcgtgtagggataaaaagaactgtaaggtggtcttttcccagcaggaactgaggaagcggctaacac

SEQ ID NO: 194770 - DNA, 75 bp, Homo sapiens
tgcctttatctgatgatgatgaaagttacacagaaatggaaaaggtgttctaaaattcatgtggaactgcaatgg

SEQ ID NO: 194771 - DNA, 98 bp, Homo sapiens
cgccaagagaagaatctaacaaacggcaaagaacttactgattcttgagacatatctgaagagatggattaagaatgctttggattaaggattgtgga

SEQ ID NO: 194772 - DNA, 145 bp, Homo sapiens
aaagtttttcctggctggaagagatgggtgtgcaagataaaattaaaaagccagacatactttctatcaagctctatacacagaatgggattttacatatgctggacagaaataagagaatcaagccccggccagaaagattcca

SEQ ID NO: 194773 - DNA, 98 bp, Homo sapiens
ttgaaacaactgatgagagcctgaggagccattttgagcaatggggaacgctcacggactgtgtggaattacatgaacgacagccttcgcaccgacgt

SEQ ID NO: 194774 - DNA, 100 bp, Homo sapiens
cttagggaaaatagaacctacgctgaaattttgggggcaggttctcttgctagctgacatagcccagagatacaggataagcaaatacccaaccctcaaa

SEQ ID NO: 194775 - DNA, 75 bp, Homo sapiens
ctgtctgggtgcggactcggagaagccctcgagcatccccacaggcaaaaaaggatccacctgcagactctgagg

SEQ ID NO: 194776 - DNA, 90 bp, Homo sapiens
cctacagaaccgtcccaaaatatggcaaagaaacctattctgagcaaatctctagaagatgacggtgttctttaaaacgcttcgaaatca

SEQ ID NO: 194777 - DNA, 100 bp, Homo sapiens
tggagatcgtcccgcgcctgccggttttcgtaacaccccagggcctgtaaggtttggtgtttccctttcaagatgccactttcagactttattctggctc

SEQ ID NO: 194778 - DNA, 100 bp, Homo sapiens
tgccggggaggccagagcgtggagcgctgcgcggcgcggcggccgggccctcgagacggggacggaatcccttggcaccatgtcctgtgtgcattataaa

SEQ ID NO: 194779 - DNA, 100 bp, Homo sapiens
gagtaaaggccatagcgagaaggaggttgccgacgccatcaggctcaacgaggaactcaaagtggatgaggaaaagacccagctgctgctggaggtgccg

SEQ ID NO: 194780 - DNA, 90 bp, Homo sapiens
tggtgactcatggctttcagtagatgacgaaccctttgattctgataccaagatttccatggtgtcagtgattcatattcctgataggac

SEQ ID NO: 194781 - DNA, 100 bp, Homo sapiens
gagaagctgcaccagatgtggctcagctggaaccagaagcagctccagggccccgagaaggagccgcccaagccagagggcagccccgagaaccacaggt

SEQ ID NO: 194782 - DNA, 75 bp, Homo sapiens
agcaacacaggagtctctggagatgcctggaatgatgtcgtcagtaatgcctggaatgatgatgtctcatatgtc

SEQ ID NO: 194783 - DNA, 50 bp, Homo sapiens
gaagacccagcttggggctgtcaaagctgtcccctttcctccaacccaac

SEQ ID NO: 194784 - DNA, 100 bp, Homo sapiens
acggcgacctcaagaagcagctccacgaaaggcagccgcggatcgccgcgctcagcgacaaacaaaatgtggccccgtcccagagcaccacccgagacat

SEQ ID NO: 194785 - DNA, 106 bp, Homo sapiens
ctcagcctcccgagtggctgggattacaggagtggattagaacaagatgacatgagaattttatacaaataccttaccacctcccttttcccaaggcacatcgaac

SEQ ID NO: 194786 - DNA, 98 bp, Homo sapiens
gagcaagtttcatgttcacgagagcaaacctcatgccaatgcagtttctgggtccacttccaaaggggtctccctctgttgtccaaggctggagtgta

SEQ ID NO: 194787 - DNA, 75 bp, Homo sapiens
cttgtcttcctgagagtgattggaggtctccttgccttggctgtcacagttgcagattatatttctagagctgag

SEQ ID NO: 194788 - DNA, 76 bp, Homo sapiens
agcatccgagagcccggactggagagttctaaagttcctgttgcttcagacaatggatgagcaatcacaaggaatg

SEQ ID NO: 194789 - DNA, 50 bp, Homo sapiens
ttctgggacagctctactgacgagctcaggccccggggcctccagcggca

SEQ ID NO: 194790 - DNA, 50 bp, Homo sapiens
ctccttttccctctccctttccctaagcacttaaatatagatccggtggt

SEQ ID NO: 194791 - DNA, 80 bp, Homo sapiens
actattcagccattgggtcacaagcgatgaaaagagcaccttgaagaatgtggccccgtcccagagcaccacccgagaca

SEQ ID NO: 194792 - DNA, 51 bp, Homo sapiens
atatgctagtggaggggaaatatttgaatgtttctccatcccagagagatg

SEQ ID NO: 194793 - DNA, 97 bp, Homo sapiens
ctcgctcctcgatcgaggacgacttcaactatggcagcagcgtggcctccgccaccgtgcacatccgaatgggtgaactactgagttcttcattatg

SEQ ID NO: 194794 - DNA, 117 bp, Homo sapiens
gcataggttatgaagctaatcctggcgttccaccagcaaccatgagtggttccatgatgggaagtgacatgggctggtgaattaccatatctccgtcaagtgcagtaaccagttcaa

SEQ ID NO: 194795 - DNA, 100 bp, Homo sapiens
aggaacttggagttaatggtctaatttatgataggagaacgcctgctccaagccggacgacgacattctagacatcccgctggacgatcccggcgccaac

SEQ ID NO: 194796 - DNA, 98 bp, Homo sapiens
tgatggcagctatgtacacatgtgacatcatggccactggtgatgttctcgatgctgtgagagaagtaaggaaatattcctcagttcataccattgag

SEQ ID NO: 194797 - DNA, 74 bp, Homo sapiens
agcggcaaagccaggctctccccaggtgatctttgcagagctgtttcaacttccagcaccccctcacattgatg

SEQ ID NO: 194798 - DNA, 87 bp, Homo sapiens
acgttctgtactgtccaagtcagttcctgggtacaaggttaatttggagtggcccctggagtcagtttcctacaccatccgaggccc

SEQ ID NO: 194799 - DNA, 101 bp, Homo sapiens
atcctctgcttccaggacaagtcctgcgcttggggatcctctgtacgcccgttcactggctgattcaccccaagagtggccgttcctaccacgaggagttc

SEQ ID NO: 194800 - DNA, 100 bp, Homo sapiens
cagaaggtgtcattttaagacgagtaggcgaagcaaggactgttgtcggggtaccagttgggtctgctttaccttcaacagtgaagcaggctgtggcgat

SEQ ID NO: 194801 - DNA, 75 bp, Homo sapiens
acctgtccaggggcctgagccagcagcaggggatgttcgtctaaccccagaagactttgctagagctcagaagta

SEQ ID NO: 194802 - DNA, 83 bp, Homo sapiens
ctcggagaaacaggcgccgcgggctccgcgcccggccggacccgggcccgagcaaaatgatgcttcaacacccaggccaggtc

SEQ ID NO: 194803 - DNA, 75 bp, Homo sapiens
tgctatatcacaagatgaacaatgagaagcaggcagaagattgcatcacacggaaatttggtgagcggcctccac

SEQ ID NO: 194804 - DNA, 75 bp, Homo sapiens
gtgtctctgaagaggctcgctcactcattcaacaggtcaccacaaatggcatcattgctacgagtgaacccccgg

SEQ ID NO: 194805 - DNA, 95 bp, Homo sapiens
cagctttgcttggacctgaccactacagtccagaaggctgacgttcctcagggagtgattcgagtgcaagctccccatctttcgaaagtttccat

SEQ ID NO: 194806 - DNA, 89 bp, Homo sapiens
gcggagctcccccaagagccggaaagtgaaaatgcctcgtgtaaaagcagctcaagctggaagacagagctctgcaaagagacatcttg

SEQ ID NO: 194807 - DNA, 50 bp, Homo sapiens
ccaatgaccagtaaatcggcatcagatttctctatgaatcatcatcaaga

SEQ ID NO: 194808 - DNA, 75 bp, Homo sapiens
cccaggcggtgacagagtggagccatggctagaggagatggcgtctaccagaaggggatggacttcattttggag

SEQ ID NO: 194809 - DNA, 83 bp, Homo sapiens
ccgcccgggcggcgggatccactgtccggcagagcctcccgcgacgatgcccctcaacgttagcttcaccaacaggaactatg

SEQ ID NO: 194810 - DNA, 83 bp, Homo sapiens
tgcagcttgcgtttggggctttcgacatgacaggtcactagaggcttgaagtagaaaatgccatgatgagaaaaactattaaa

SEQ ID NO: 194811 - DNA, 75 bp, Homo sapiens
ctgcgaggtggccgcagctgtggccggagagatccggaagaccacggccagccaggtgtacgagacattgctcac

SEQ ID NO: 194812 - DNA, 100 bp, Homo sapiens
cgttggcggaatttgcagtattgcctcatcattccgaagacttaattcagtgcacaaatgagatgaatgtgaacatcccacagttggcagacagtttatt

SEQ ID NO: 194813 - DNA, 98 bp, Homo sapiens
agaccctcgaagtgcgcaaacttgacactcaccctgaccggtctcctaaaaacccagaacagaagatcattaagagagtgattgctcttgaaggagat

SEQ ID NO: 194814 - DNA, 83 bp, Homo sapiens
gatccagcctgcggagcctgtggggcaggcaccatcatgactccaagcggaggagatccgatgaatttaggcctcaaaattac

SEQ ID NO: 194815 - DNA, 82 bp, Homo sapiens
agccgatccagcctgcggagcctgtggggcaggttcgtgctggccgtgggcagcgccgtctttgatgccatgttcaacgggg

SEQ ID NO: 194816 - DNA, 75 bp, Homo sapiens
tcttgtcaccgacagggcgattgcagtgcgttccggaatctacttgaaaatggatcggtttatgttggattaaat

SEQ ID NO: 194817 - DNA, 89 bp, Homo sapiens
gccttgatccaggtgcttttaaagaactcttcccagactggaaagagaagggggtgtgatccctcacatccacaaatctctgattggaa

SEQ ID NO: 194818 - DNA, 88 bp, Homo sapiens
tgctctggagtggcccagcctaactgcccagtggcttccagatgtaaccagaccagaatggaaacgaccttcggacccgccttttcag

SEQ ID NO: 194819 - DNA, 100 bp, Homo sapiens
cggctatggagcttaccgtgtctccaatgacaaacgagatgtaaaagtgtcactgttttcagacccaaagtttacgcctatcagacctacacagaaaatc

SEQ ID NO: 194820 - DNA, 100 bp, Homo sapiens
cttccagatcatccatggcaatgaccttccaggaaggatgttacctttgacgatgacagtgttaatcctgctgctgctccccacgggtcaggctgcccca

SEQ ID NO: 194821 - DNA, 100 bp, Homo sapiens
ggtcaccacgcctgccccagggaaccgcacagaaatggtggagtcaatgaagaaagtagcagggatggatgtggagctgacagttgaagaaagaaacctc

SEQ ID NO: 194822 - DNA, 75 bp, Homo sapiens
gaaaggagattccaacctacttcaggccaatggtggcagagtctacatagaactatgcttcgtggtgttctgggg

SEQ ID NO: 194823 - DNA, 75 bp, Homo sapiens
tcatcgagtgtgacgtggtgaaagtggacatcctcatcatggatgatgacgacgtccccagctggcctcccacca

SEQ ID NO: 194824 - DNA, 100 bp, Homo sapiens
cgctgtcaccgccatggctgccccgtgtttgctgcggcaaggacgagccggggcgctgaaggatcccatgacagattctgttgtcacgtctccttacaga

SEQ ID NO: 194825 - DNA, 82 bp, Homo sapiens
ctccgctaccaccaccacaccagaaactagcaccagccccaaatttcgtgggctggatgacactttgcacacaattattgat

SEQ ID NO: 194826 - DNA, 75 bp, Homo sapiens
gacaggaggcagtagccaaacacccagtctccctctgatgccgagcggaagctggactgtactgctgccatctcg

SEQ ID NO: 194827 - DNA, 100 bp, Homo sapiens
tggtatcagtggcaatgaaggcctgcaggcagctaattcctctgactactccatagctcaggacttaaccaccaccatgtcgagcaaaagaacaaagacc

SEQ ID NO: 194828 - DNA, 100 bp, Homo sapiens
cagaaatcaaactgaaaagtgaaagcagagtcaaacttttttatttggacccagatgcccaggtgaagatgccagatgtggagctctttgttaatttggg

SEQ ID NO: 194829 - DNA, 76 bp, Homo sapiens
gaagctcgtgcctgaggaacatggaggccacgctaatgaaggccggggtcagaaagaaaaaagagggtcccggggc

SEQ ID NO: 194830 - DNA, 82 bp, Homo sapiens
gctctgcttcgacaaggacgagttcatgaagagtcatcctttttgaacttccatgactcagactgcgaacccaagggatcat

SEQ ID NO: 194831 - DNA, 82 bp, Homo sapiens
ctgcgccgccgcctcccgccgcgccccgccatgccgctctactccgcatcaagatggtgctcatgtggaccagtggtgacgc

SEQ ID NO: 194832 - DNA, 101 bp, Homo sapiens
gctgaggaacagaaattccatgctcacaaggcagtcctagcagcatgcagtgactatttccgggtttactcctggcttgggggcattaggaagcactggag

SEQ ID NO: 194833 - DNA, 51 bp, Homo sapiens
gctggagcctcaggcggcagcgcttctagttaataacgacatgatagtcac

SEQ ID NO: 194834 - DNA, 82 bp, Homo sapiens
gatgaggactgggcaaatgcagatgaactagaagatgatgattttgacaggtttgttggtggaccaaagtaagatctacagc

SEQ ID NO: 194835 - DNA, 51 bp, Homo sapiens
cggaaaccccgcctcttacagtcacgaggatgaaacaagtgaagatgctaa

SEQ ID NO: 194836 - DNA, 76 bp, Homo sapiens
ctcataacccctactccacagctgtgagtacctcaggtcgacaaagatgctgaattagtggcccaatggaactatt

SEQ ID NO: 194837 - DNA, 96 bp, Homo sapiens
ggattcagtttggaagctggggttccttccagctccctggattgctgaactttggcgagtttaagatttctctatgaatcatcatcaagaactctg

SEQ ID NO: 194838 - DNA, 52 bp, Homo sapiens
gaaaatgccaacgccgtgtctgaagtgagcagcggttccatcgcagtgaacg

SEQ ID NO: 194839 - DNA, 100 bp, Homo sapiens
gacgatattgatattgaagcaatgcttgaggctccttacaagaagagttacactgttagaccttatgatagccaagataacgagtgatgagccactcacc

SEQ ID NO: 194840 - DNA, 98 bp, Homo sapiens
ggacgcgactcgagggtgacgctcgctccgctcgtcccgctcgtcatggcctacccgggatacggaggagggaactctaagaaggagctgatgtggag

SEQ ID NO: 194841 - DNA, 75 bp, Homo sapiens
agttgaagctccaggaggtcaaaagttggatatgtcaagtgaccagatagctgccaatctgcaagcagttattaa

SEQ ID NO: 194842 - DNA, 75 bp, Homo sapiens
atacacttacatctctagataacagtctgcactttcacccgtttcagataacaacgaacttgatgcaagtgatag

SEQ ID NO: 194843 - DNA, 74 bp, Homo sapiens
gggaccataactgatgatgtgcgggttcaggaggtacccaaactgaaggcgtggcacctgcactgttccggggg

SEQ ID NO: 194844 - DNA, 132 bp, Homo sapiens
gtagctccagagaaccggcaccagccccccagcacaaactgctttggtggaagatcccggtcttgagagctgatgacaataacatgggcaatggctgctctcagaagctggcgactgctaacctcctccggt

SEQ ID NO: 194845 - DNA, 50 bp, Homo sapiens
accaggggcagagggaccactctgacagggtttccaggcctgaggtgccc

SEQ ID NO: 194846 - DNA, 75 bp, Homo sapiens
ggaagaaaacacaggagccggagcagaagcaaagagatgccttcaattaagttgcagagttctgatggagagata

SEQ ID NO: 194847 - DNA, 83 bp, Homo sapiens
gatcctttatcctggtcatcttctatttccaaacttttcctccgcaaccatgtctgacaaacccgatatggctgagatcgaga

SEQ ID NO: 194848 - DNA, 75 bp, Homo sapiens
ctgcgtgagtgtggtctacgagctgtttctcatctttatactcttccaggggctaaactgcacggtcaagaatag

SEQ ID NO: 194849 - DNA, 75 bp, Homo sapiens
aaaatgtgcatactcacagagttagagagagggatggtggatggatgagggagatgctgcaatcatgcatcccgg

SEQ ID NO: 194850 - DNA, 97 bp, Homo sapiens
agaaattcgactatggcaacaagtacaagcggcgggtgccccgggtaactgtgacatttgatgatgtggccttatatttttcggaacaagagtggga

SEQ ID NO: 194851 - DNA, 100 bp, Homo sapiens
caggagtgttccttgagaaggactatgagatttaccgggattacagtgcggacggccagcttcttcactacagggggtccactggacggggcctgagcta

SEQ ID NO: 194852 - DNA, 87 bp, Homo sapiens
gagccatgaggcgccagcctgcgaaggtggcggcgctgctgctcgggctgctcttggagacgaacaggaggcattgaactcaatcat

SEQ ID NO: 194853 - DNA, 89 bp, Homo sapiens
ccccatcttcccttcacacctgctctcaaaggtctatggccctgtgttcactctgtattttggcctgaaacccatagtggtgctgcatg

SEQ ID NO: 194854 - DNA, 100 bp, Homo sapiens
taaagggaagcgggtcgttatgagggccaggtgcgcctgtccaagaagatggtggacccggagaagccacagctaggcatgattgaccgctggtaccatc

SEQ ID NO: 194855 - DNA, 75 bp, Homo sapiens
ctgaaagcattaccgggttcgctaggctcacaggacacagcattgttggttttgccatgtactattttacctatg

SEQ ID NO: 194856 - DNA, 96 bp, Homo sapiens
tgttcgaagctattgtgggcatggaatccacaagctttttcatacagctcccaatgtaccccactatgctagatggaagagtgtagaaagtgtccc

SEQ ID NO: 194857 - DNA, 75 bp, Homo sapiens
gtcttctgtgtggattcttcagaaagtgaacttggcattttagatctaattcaatacaacacctcaggtattgag

SEQ ID NO: 194858 - DNA, 74 bp, Homo sapiens
cctgcagtgaccagtaatggcactttacactcgctctttcgacgtgtagcagcagctttgccgggaatggaaag

SEQ ID NO: 194859 - DNA, 78 bp, Homo sapiens
agcctgaggtctccccaacgcaggacatcagttccacttacttacatgatcatttcgagagatgtaatgttgattgct

SEQ ID NO: 194860 - DNA, 88 bp, Homo sapiens
gagctgctgctggattgaactcagagaagccgggagcagcccgacggccatggaggctgaagagacgatggaatgccttcaggagttc

SEQ ID NO: 194861 - DNA, 100 bp, Homo sapiens
cttgtgttttacattgaagctgcatataaaactgcttttgcttcagtgtccccaacagttcctgaattcttgaaaactcctccaactgcagatcagcctc

SEQ ID NO: 194862 - DNA, 82 bp, Homo sapiens
gtgtcaaacatccatatcataagtggaattttggagatattcaaaggtggtgatgatgtccagcaactctgtgaagcaggag

SEQ ID NO: 194863 - DNA, 82 bp, Homo sapiens
ctgccttctaacgaaagggcagtacagactttggcagtttccaatgatcagaaatccaggagaggtttccctgagtgcttct

SEQ ID NO: 194864 - DNA, 83 bp, Homo sapiens
cggagaggagcctcggccccgtacccagtcctattttgtaacggattatgatccaaccattgaagattcttacacaaagcagt

SEQ ID NO: 194865 - DNA, 82 bp, Homo sapiens
tcgaggtggactatgaggctatccgcagcgagatggagcagctcaaggagcggccctccaggcactgaagcgtaagaagagg

SEQ ID NO: 194866 - DNA, 51 bp, Homo sapiens
cccggaaactccagcgtgtctccagccgtgaattgaagatgttcctgctcc

SEQ ID NO: 194867 - DNA, 75 bp, Homo sapiens
gccgcctcagccatggacgcgtccctggagaagttttagaaagagcgttttcgctacgtaaagcacattcgataa

SEQ ID NO: 194868 - DNA, 96 bp, Homo sapiens
ttaaagcaagaaacccctgcagtacttgaagatttgcataaagccaacattcgcaccgtcatggtcacagtgcacagccagagaacaacacatcac

SEQ ID NO: 194869 - DNA, 101 bp, Homo sapiens
caaggaccctttggaaggccgggtgggccgagagtaaagctgctgctaaagctggatcttctaaataccagtggggcattatgaaatcccttggcctgtct

SEQ ID NO: 194870 - DNA, 80 bp, Homo sapiens
tatttcctcccagaagacactccccagggcagaaatagcgaccatggcgagggacttcttgcctcgaggatctggcattg

SEQ ID NO: 194871 - DNA, 101 bp, Homo sapiens
ggagggcggcggtggctgcagcggctggagcggggtagagaccgccgggtctcggcccgcaccaggagcggaacaagttgcagtccatgagctgggaaagg

SEQ ID NO: 194872 - DNA, 74 bp, Homo sapiens
tttgtacaagacatgcgcctcatcttccagaaccacagggcctcttacaaggccaacatagccgaggtagaggt

SEQ ID NO: 194873 - DNA, 50 bp, Homo sapiens
cttgaaggtgttagcaaatttacggtgtttgtggccagtcctcacaaaac

SEQ ID NO: 194874 - DNA, 83 bp, Homo sapiens
aaccaaccctgccagcacctggaccttggacattcagacttcagaatggtgtgatccctcacatccacaaatctctgattgga

SEQ ID NO: 194875 - DNA, 100 bp, Homo sapiens
gcccttccttgataagctgtttaaaccagagccatccaaaactctgtttgtcaaaggcctgtctgaggataccactgaagagacattaaaggagtcattt

SEQ ID NO: 194876 - DNA, 90 bp, Homo sapiens
acaaactggaacaagcccaaaatgaactgagtgcctggaagtttacgcctgataggcttcctgacaatgtcacctttgaggaaggcgccc

SEQ ID NO: 194877 - DNA, 100 bp, Homo sapiens
gccatcaccgagcgcttgatgtgcgcggagagcaatcgccgggacagctgcaaggaactttgtgttaaagcatcatgtattcttggtccgaaactgggag

SEQ ID NO: 194878 - DNA, 100 bp, Homo sapiens
gctcagtctgtccatcatcaaagaccaggttcaagggtctctccagaaaatcttgtggacaaatccaggggaagacccatcggccatgacattaaaagag

SEQ ID NO: 194879 - DNA, 100 bp, Homo sapiens
agcagctacctgagcctgacgcccgagcagtggaagtcccacagaagctacagctgccaggcaagaagcctgtggtaggtaagaaaggaaagaaggctgc

SEQ ID NO: 194880 - DNA, 89 bp, Homo sapiens
tttcagtggaatgggcagaaggaggtgccacaaagggcaaagaggtgttgacagctcttctaccacaagcagtgcttctccaatgccca

SEQ ID NO: 194881 - DNA, 75 bp, Homo sapiens
caacgatcggaactcggacacggaagtattacttaattcacctctacaggaggaacataacttccccccagacca

SEQ ID NO: 194882 - DNA, 83 bp, Homo sapiens
ggaaacatgctagaattacctggaacttcatcatcatctacttcacaggaattgccatttcccacttcgatgtgttgttcttg

SEQ ID NO: 194883 - DNA, 100 bp, Homo sapiens
aatcagctggcttcttctcctggctggtgctacagctcgagagggcagagccacagtccctggacggcgtggactgaggccggttccttcctggaggcct

SEQ ID NO: 194884 - DNA, 75 bp, Homo sapiens
cctggcgcatctggtggtcgtcatcaccttattctggtcccggatttcctcctctgatgctcctcttcagccttt

SEQ ID NO: 194885 - DNA, 75 bp, Homo sapiens
gatggtggtggtgctggtcatcaatgttactcaggtagaggattcagtggtcccaatttaaaggctattttattt

SEQ ID NO: 194886 - DNA, 98 bp, Homo sapiens
ctctgcctccggggacaagaaactagagcaaataaccgttttgaaattaccaagatcactccatggatgaaatgacagctgtggtgaaaattgaaaaa

SEQ ID NO: 194887 - DNA, 100 bp, Homo sapiens
attttgtggctaccgctgttactgcttggagtgcctcaccgagccagctcctcacagccagtgaccttgcagccagtgacctcaaaggatttcagccaca

SEQ ID NO: 194888 - DNA, 75 bp, Homo sapiens
cctaggagagcccgaactggaggtaaagctacttcttcttctaatccaagcagcccagctccagactggtacaaa

SEQ ID NO: 194889 - DNA, 120 bp, Homo sapiens
cacggagcaacaggcagaggcaggaggtctgccagagctacaagtccctctacggcaagagtatctgcggggactgtgtccaggggcagagggcccacccagggtacctcgtggagaagg

SEQ ID NO: 194890 - DNA, 99 bp, Homo sapiens
ggccgcggttcccgagttgctgcagcagcaggaggaggaccgcagcaaggtgaaaggaaagcaagccaggatggatatttacgacactcaaaccttggg

SEQ ID NO: 194891 - DNA, 51 bp, Homo sapiens
gttggcaccactgaagtgaccgaatgagtttgcctgagaatacagatcaac

SEQ ID NO: 194892 - DNA, 129 bp, Homo sapiens
ggagaaactgcgttgggtgaccgtaggctaccattataactgggacagtaaggacaaggagactggctttcacagaggtttgggttgggttcagttttcttcagaagaaggacttcggaatgcactaca

SEQ ID NO: 194893 - DNA, 100 bp, Homo sapiens
cgaagttgatggcctggagaagaaagatgttttgcctactgttgatccggaattgaatgatctggcacgggaccctccagcacagtgttcagcaggtcct

SEQ ID NO: 194894 - DNA, 100 bp, Homo sapiens
cagagtcagtgatttccataaattgaagcaaatatcgcgcttactatggagcatttaaggatgtcaaggagaaaaacaggacctctgaagaagcagaaga

SEQ ID NO: 194895 - DNA, 101 bp, Homo sapiens
caagatttaacattccaacacataaaaattatttatccaacagctcctcccagtcactcaagactgcttgcaactgattgcagacagtgaaacaccaacta

SEQ ID NO: 194896 - DNA, 90 bp, Homo sapiens
cccgcccaccagttcgcccgtccccctgccccgttcacaatagcctggagacacaggccccatccttcccaatggggacacttcagggag

SEQ ID NO: 194897 - DNA, 100 bp, Homo sapiens
aacaaagtcattatcctcctcactctgtaaagtatacgtttcccagcacctgccaccagcaggtcaaaatgcagatcttcgtgaaaacccttaccggcaa

SEQ ID NO: 194898 - DNA, 90 bp, Homo sapiens
ccaggtcacacactgttgcagcgcagtgacaaggtgcagtcgctgtgctaccttcagctcaccaggcagctcgtctcctgttcctcggac

SEQ ID NO: 194899 - DNA, 75 bp, Homo sapiens
tgcctaaagattgccccacacccatgggaaccaaagaggagaaggcagagcccccccaggctatgaatgccctga

SEQ ID NO: 194900 - DNA, 75 bp, Homo sapiens
catccggggatttctgctcacctggagaagggatggaaatacttcaacaaggaatcactatcttctctgttggtg

SEQ ID NO: 194901 - DNA, 75 bp, Homo sapiens
ccccagcaccacctccagcccctgcgcctcgagagcctccaggaggaactcagtaagttaccattcccccagaga

SEQ ID NO: 194902 - DNA, 75 bp, Homo sapiens
cccttgcgcctgcctctccaggatgtctacaaaattggtggttatggaggttttgatgactatggtggctataat

SEQ ID NO: 194903 - DNA, 90 bp, Homo sapiens
tgtgcaaagaacccggcgagagtgattgccatttggctgaagtgtggtgtggctctgggttcgatgaccttcaagtgtgtgctgaccccg

SEQ ID NO: 194904 - DNA, 101 bp, Homo sapiens
ctgagccctagaatgggtgaggaatgtgttagtgtctggagccatgaaggccttgtgctgaccaagctgctcacctcgattggaaacctggaagattacta

SEQ ID NO: 194905 - DNA, 90 bp, Homo sapiens
ttctcttttacagctgggcctacacttcgtcgcacgttatgacccagagctaacagaaagcagtggctctgcatcacacatagactgcag

SEQ ID NO: 194906 - DNA, 75 bp, Homo sapiens
ggagcgcggcggagacgatgcctgagatcagagtcacgcccttggcaaataaagcatgagctgttggaatcccaa

SEQ ID NO: 194907 - DNA, 82 bp, Homo sapiens
ccctgcgactcctggaccaccgggcgctggtctgctcccagccggctggtggtccaggccgtggtgcctgccaggtgatgtg

SEQ ID NO: 194908 - DNA, 75 bp, Homo sapiens
cggggttcggtggcctctagtgagatctggagtaccatggggcgcaagttggaccctacgaaggagaagcggggg

SEQ ID NO: 194909 - DNA, 88 bp, Homo sapiens
aatctgccttctactccatcgtgggactcagcagccttggtgctcaggtgccagatgcaaagatccttcctgggcatcagtaaatagg

SEQ ID NO: 194910 - DNA, 74 bp, Homo sapiens
ctgtggggccgcggccggaccgagcgcctcgacctcggtctgaggtcctcttcctgatggatgggaacaagcca

SEQ ID NO: 194911 - DNA, 50 bp, Homo sapiens
accgactactgtcagcagctgtgccaggtacttgaagaaacagaagctca

SEQ ID NO: 194912 - DNA, 96 bp, Homo sapiens
tttgaaaaacagtattccaaagaactcggagatgcctggaatacagtaaggtgttttattccaaacgtctatgctgctttgttcactgcagctctt

SEQ ID NO: 194913 - DNA, 90 bp, Homo sapiens
tttctttaacatttcctgaagaactgtctcctggaattacattgaatatacagtgcacttacatttcaatcgaccaagttccaaggacct

SEQ ID NO: 194914 - DNA, 100 bp, Homo sapiens
aacgagtcactcctgcgcccctacttcctcgacctgcggctctatgacacggagattcctcttctcctgtaaatgaccacagaggaagacaatgaatgag

SEQ ID NO: 194915 - DNA, 100 bp, Homo sapiens
tgataacagaaagtcaagatctaggtcagcatccaggggccctcctcgccaaagacagcctagagaggacggcaatgaagaagataaagaaaatcaagga

SEQ ID NO: 194916 - DNA, 51 bp, Homo sapiens
ccgggacacccgcgaggccggaaaatgacaactgggcggagttaatggaag

SEQ ID NO: 194917 - DNA, 82 bp, Homo sapiens
attgctggctacagcttcagaagaccgaagcgttcgtatctggaaggttgtggcagcactgcctgaaggtatgagaccagat

SEQ ID NO: 194918 - DNA, 100 bp, Homo sapiens
catgctttttattacaagactacggagcataggaggaaaattcatcatctggttacagagaagatcccagtaaggcatttatatacaaaagatattgaca

SEQ ID NO: 194919 - DNA, 75 bp, Homo sapiens
aacgcagaaggactgcctcactgagcaaccaagaattgagtttgtgacgggcaccaaaaaaggcaccacgaccaa

SEQ ID NO: 194920 - DNA, 101 bp, Homo sapiens
tgaagagttgttgccttccaagatatacccaaattcccagttccagaattttcttaggcggtataaatgcagttctgatcactggattggactgaagatgg

SEQ ID NO: 194921 - DNA, 75 bp, Homo sapiens
aacgtacctgtgccggcgaccggatagcacctggcctttgaaagccaacacatcctcctgagaggggacaagaca

SEQ ID NO: 194922 - DNA, 100 bp, Homo sapiens
ttcggcagtccacccaccgccgccgcctcccagatgcgatatggtagagcgcttcggtgaaagtaaagacagtagtcattgtggagaaacatctagccag

SEQ ID NO: 194923 - DNA, 75 bp, Homo sapiens
gccgggagttcaagaagaacactccagaggtgaaaggtgtagcagtcactcggcctacacccacagcatcgacct

SEQ ID NO: 194924 - DNA, 75 bp, Homo sapiens
tggcatgcctgtaaagaacttgcagttgaaggagtataacacagtattgactcggagacaaaaagaggccaagac

SEQ ID NO: 194925 - DNA, 100 bp, Homo sapiens
gctgcttcctccatcctggtattttttggagcttccatcctggttcttccaaagtgcccggacccaaaacaggaagaactgtggctgcaccatctgtctt

SEQ ID NO: 194926 - DNA, 100 bp, Homo sapiens
gcagatgctgcggaccattggcgtggggaagtatgagttcaccgacccggggcaccccagagaataatccagaatggctactctgatctatgttgataag

SEQ ID NO: 194927 - DNA, 51 bp, Homo sapiens
ggttgtggagaagtttttgaagagatacaggctagttccaaaggtttattt

SEQ ID NO: 194928 - DNA, 75 bp, Homo sapiens
tcctgtgctttactctgaagactcggaaactgaacagccaagactcctataacaattttaccaacaacaaccctg

SEQ ID NO: 194929 - DNA, 82 bp, Homo sapiens
ctgggtcccgccagacacgccgccgccgcagatcgaccttcagaagatgcccttggggaagctgagcaaaaggcagatccag

SEQ ID NO: 194930 - DNA, 83 bp, Homo sapiens
ccctgagtcactgcctgcgcagctccggccgcctggctccccatactagtcgccgcagccattgtttgatgtcctgtgactga

SEQ ID NO: 194931 - DNA, 75 bp, Homo sapiens
gggaggaggaagatggcggcgggggcgaggcacagttggtggatctgaaatctgaactgacagaaacccaagcag

SEQ ID NO: 194932 - DNA, 100 bp, Homo sapiens
acgcaaaccaaggatctggggatcttcgcactatcccaagtgtttcacctgtctcggaaagtaacatctctggtccctgagagctgcctgctgattttgc

SEQ ID NO: 194933 - DNA, 100 bp, Homo sapiens
tatagtctggagctcttccaggagagtatctgcacaaccaccactgcatttttgcactttttcttcctggcttcattctgttgggttttgactgaggcgt

SEQ ID NO: 194934 - DNA, 96 bp, Homo sapiens
tagtcactgcttgtcaggagggatttatttgcacatggggaaggcctggtaaagtgctcctctggtgcaagtgtggtagctattgacaacaaaatc

SEQ ID NO: 194935 - DNA, 100 bp, Homo sapiens
cagaactgtgttcgcaattcttacgatgtcttctctttgctacgggagaccaaattttgaggaaggtggaccaacatcagtagggagaaagcatgaattt

SEQ ID NO: 194936 - DNA, 76 bp, Homo sapiens
aggcacccgaagaagagaccatccatatttccaggtatggacctgtctgccaatcaggacgaggagaccgaccagg

SEQ ID NO: 194937 - DNA, 83 bp, Homo sapiens
ctctgttaaagctggtctgttctaactgagacaccattcgcttttcacccaagatgatttgatgtcttataaaactctgatga

SEQ ID NO: 194938 - DNA, 126 bp, Homo sapiens
ccttttgcctgaagattttgtggtttatacttacaacaaggaagggactttaatcactgaccatcccaatatacaggtgatctttagacagtgactgagtatggatcatttgaacgaggcaactca

SEQ ID NO: 194939 - DNA, 83 bp, Homo sapiens
cgtccgagccggggaagccgggcgcgtgctgccgctcgtggcgggccgagcaaaatgatgcttcaacacccaggccaggtctc

SEQ ID NO: 194940 - DNA, 95 bp, Homo sapiens
agctcaccgagacggcgatccgggcgctcgagacttaccagagccacaaggtttccacttgagcggcacagtgacagaacctgcaatacaatcgg

SEQ ID NO: 194941 - DNA, 98 bp, Homo sapiens
cacaaggatcgcgtgaatgatgtctgcaccaatggacaagacctcattaagaagcttcgtgctctgtctgatgatggagtatctgatcttgaagaccc

SEQ ID NO: 194942 - DNA, 127 bp, Homo sapiens
gatgctggaggacatctgggggccacaaatgctccttctcctggagacgcaactcaagtgtccgagctgcaggaggagggaatgaacgccatcaacctgcccctcagcccaattccctttgagctgg

SEQ ID NO: 194943 - DNA, 74 bp, Homo sapiens
tggctgtggcggaggagcataagaaggttgtaggtcataaagaaggtctggatgttatggagagagctgatcct

SEQ ID NO: 194944 - DNA, 75 bp, Homo sapiens
gatcattttccagggaaagtaccttggagactcctaaaggggaactcccctccagctgcgctgggaccccaggac

SEQ ID NO: 194945 - DNA, 98 bp, Homo sapiens
ctcccggcgctcttcctcccggagtatggaagcagagctgaggctggtaaagttcctgcctgagattttggccttgcaaagggatctagtgaagcagt

SEQ ID NO: 194946 - DNA, 50 bp, Homo sapiens
cactccagtgcctccgacgcctcctgatgccacacccactcgcccgggtc

SEQ ID NO: 194947 - DNA, 90 bp, Homo sapiens
gaaggtcgcgaaggcagtaccgtttcctcagcggcggggtgaaaggttgagccatgcagtaggctgtgcttttgcagcctgtttagagcg

SEQ ID NO: 194948 - DNA, 75 bp, Homo sapiens
tctgccacctcaacgtccctgtcactgtggtgctagatgctgctgtcgggtgactctgacatcattagaagcatg

SEQ ID NO: 194949 - DNA, 89 bp, Homo sapiens
caaacttcaggaaaggattttgcacttgtgcagaccgggcgagcagagtaagaagcagttctcccaggagaaagccatgttcagttcga

SEQ ID NO: 194950 - DNA, 90 bp, Homo sapiens
acctgtatgtggaaccacctgatttaagcgagagcctcactggttcccaggacatcaacctgaactggatcctccccgatacaaatgcac

SEQ ID NO: 194951 - DNA, 90 bp, Homo sapiens
gtcaagtcgtgttctgatcactactgacttgttgtcatccgtccttggctcaggatttggagagcttgcaccaccaaaaatggcaaacat

SEQ ID NO: 194952 - DNA, 75 bp, Homo sapiens
gacggaaatgtgtcatcgaaagccagacttaattcagtgcacaaatgagatgaatgtgaacatcccacagttggc

SEQ ID NO: 194953 - DNA, 74 bp, Homo sapiens
cgcggctgcgcgaggagcaggaaaaggctgggagcctatatgtgagactgaagaattaaccccaaagcaggatt

SEQ ID NO: 194954 - DNA, 74 bp, Homo sapiens
gacaggctacgcctggacaaatactatatggatgaagatttgataaagtggaaggcactgtttgaggaagtccc

SEQ ID NO: 194955 - DNA, 74 bp, Homo sapiens
aaggcgcccaccccacagagcaagttttctgaaacgtgctgttactgaggcggagacacgggtgatgattggct

SEQ ID NO: 194956 - DNA, 75 bp, Homo sapiens
ctatgttaagaaaacataccaatattgttgcacagactaatgtctctgcccacccacgcaacccagactatgaag

SEQ ID NO: 194957 - DNA, 74 bp, Homo sapiens
tgcagagccgcctttccagcatgcaggggctgctcaggctactgcagcactggggtgtcagttgttggtccgac

SEQ ID NO: 194958 - DNA, 107 bp, Homo sapiens
tgctgaagaagaaatcatagacgatgatgatgatgacatcacccttacagattcactttataggaacagcttcagcttcagtgatgaaaaactgaattctccaacag

SEQ ID NO: 194959 - DNA, 51 bp, Homo sapiens
gcaaagctgcagaaaccacagtggtagagccatacttcccattgcctccag

SEQ ID NO: 194960 - DNA, 101 bp, Homo sapiens
cgcctccctgcggcggcccggcccggctccggcccccgctggggcaatgctccccggggccgcgggatgagccaggttcgaccttgaaactacaagagtga

SEQ ID NO: 194961 - DNA, 82 bp, Homo sapiens
gacgggccattttccagacctcatccaggtgatgtgtccaatctagatcccaacttctcatttgaaggcaccaaactggatg

SEQ ID NO: 194962 - DNA, 100 bp, Homo sapiens
ccgcagctgcgatggccgtggccgtggggagaccgtctgtggtatcacggcaacctcacacgccatgctgctgaagctcttctcctctcaaatggatgtg

SEQ ID NO: 194963 - DNA, 75 bp, Homo sapiens
cgagtgacccgggtgccgaggagcgggaagagttgctggggaccatggccaacctggagcgcaccttcatcgcca

SEQ ID NO: 194964 - DNA, 101 bp, Homo sapiens
gaccatgttagataaacttgtggatggacttgctacctcttgggtgaactctagcaattacaagcctaccaggacatcctcggaaagtatttattctaggc

SEQ ID NO: 194965 - DNA, 90 bp, Homo sapiens
atgttgttgccgtgtgtgctggaaacaaaatattcatgctggatattgagacggttgatgatgaagcgccggccgtgtaaatgaagatcg

SEQ ID NO: 194966 - DNA, 100 bp, Homo sapiens
agatgttgtcctgtgctggggctgacagtggctcaaatcaaccttttcctatcaaaccacttagtgaatcaaaaaaccgcttgttggacagtgaatctca

SEQ ID NO: 194967 - DNA, 100 bp, Homo sapiens
accagatcttgccctggtgcagacaagacttaagcaacacctaccaagccatcctctccacggacgggagcaggtcctatgccctgtttctctaccagag

SEQ ID NO: 194968 - DNA, 83 bp, Homo sapiens
tgagcctctgctgaattggatgaaagataaagcccttaaggacaaggttggtcaaagaaaaagtgatgtatgaaaaagaggca

SEQ ID NO: 194969 - DNA, 51 bp, Homo sapiens
ctacaggcatgcgccaccacgcccagctacttgggaggctgaggcaggaga

SEQ ID NO: 194970 - DNA, 74 bp, Homo sapiens
tggcatttacagaaagagtcaacagcagtggcaacagccccattgacaaaccttcagattctctcagtataggg

SEQ ID NO: 194971 - DNA, 75 bp, Homo sapiens
gcggaagtgcagctgcctcagttcttagcgcagattggagcatatgatcaacaaatatgggaaaaatctgttgaa

SEQ ID NO: 194972 - DNA, 80 bp, Homo sapiens
cggcagccggcacagctccgaccgcgaggacgacttctccgcagtctctgctttctatccgtcaagatgataaagtcgtg

SEQ ID NO: 194973 - DNA, 100 bp, Homo sapiens
gttgccattgaaaaccctgctgatgtcagtgttatatcctccaggaatactggccaggacagtcattttgtttactcattcagccctgttgcaggtccca

SEQ ID NO: 194974 - DNA, 100 bp, Homo sapiens
gaagggcccaacatagtttgtaaagcctgtgggctttcattttcagtctttagaaagaaggctgctcccggcagatcggcttctcctttgtacgacccaa

SEQ ID NO: 194975 - DNA, 103 bp, Homo sapiens
ccgggccgtgaacgaaagcagtgacggaggagcttgtaccaccggtgtggggatattcagctttgccaggtatggcagtgatttttatagcatgcactataaa

SEQ ID NO: 194976 - DNA, 101 bp, Homo sapiens
gcccagctcgcgcttcagcgtcccggcgccgtcgcgccactcctccgagacacaacactttttgatctcagtcagtttggatcatcaaatacaagtcatga

SEQ ID NO: 194977 - DNA, 82 bp, Homo sapiens
cgtctcctgtgtggcgatggtcttcctgctggggctcatgtttgagggtgacgagaacaagtcagtgcgcgaccgtttcaac

SEQ ID NO: 194978 - DNA, 100 bp, Homo sapiens
gtttggaggcaaggactgcgttggtgatgtaacagaaaaccagatctgcaacaagcaggactgtccaattgaggaggtggaaaagatgaataagaagatg

SEQ ID NO: 194979 - DNA, 85 bp, Homo sapiens
gagccgcgaggacacgggctgcaacctgcagcacatcagcgaccgggagaacatagacgagctggaagtcgagtgtgctactcaa

SEQ ID NO: 194980 - DNA, 90 bp, Homo sapiens
cgtctgacttcccgtccgtgccgagcccactcgagccgcagccatgtctggggacgagtagtttatgccaacgtgacttcattcatacag

SEQ ID NO: 194981 - DNA, 100 bp, Homo sapiens
tgaagatcagcgtgtgcgatgccgtcctggaccacaaccccccagacctatgaggaccagcacagcagtgaggaggaggaggaagaggaagaggaagagg

SEQ ID NO: 194982 - DNA, 135 bp, Homo sapiens
gaaaatccggcagctgatagatgaggggattgccccggaagagggaggcgtggacgcatgccaattctcggaagcaagaagcagagtggaaagaaaaggcaataaaggagctagaagaatggtatgcaagacagg

SEQ ID NO: 194983 - DNA, 51 bp, Homo sapiens
atctcctggcagctccctcccaggtttgaagatgccgcatttggattggat

SEQ ID NO: 194984 - DNA, 76 bp, Homo sapiens
atttgttaaggattccaagtaactcttatttggactatttaagaaacaactgaggcatcagaccaactttccccac

SEQ ID NO: 194985 - DNA, 100 bp, Homo sapiens
tcctcactcaccgcgtggacacgatcggttgcagagaacacatcttagaagatgaaaaacctgaatctatcagtgacactactgacttggctctaccacc

SEQ ID NO: 194986 - DNA, 100 bp, Homo sapiens
gccgccgaggagccatcagcttcagctccagctccgctctcttcggctgccccaatccccggcagctctctcaggctgaagaaaaagtcccagtcggtgg

SEQ ID NO: 194987 - DNA, 100 bp, Homo sapiens
agcctgatgctaccaaaggtggaaagtcctgaagaaatccagtgggaaacatctttacacagcagccaagttactacagtgacctggatgaaaccctgcc

SEQ ID NO: 194988 - DNA, 100 bp, Homo sapiens
ttgctactcatccataatgaacttctctggaccaacttgaccgtctactggaaatctgaatgctgttatcacttagagatgtttatgattacttccgagc

SEQ ID NO: 194989 - DNA, 97 bp, Homo sapiens
gatcattgaaaacttcgaggcactcaagtcctggctcagcaagactctcgagcccataacctaaatcacagccacagcagcttcatcagggacaata

SEQ ID NO: 194990 - DNA, 98 bp, Homo sapiens
cggacaccattttctgccgctggacgcaagcactgccctgggaagaactaggatgaggtattgacttgctgttgccacataacaaaccctgccagaac

SEQ ID NO: 194991 - DNA, 96 bp, Homo sapiens
cgaagcccaagcccctgtcccctacgtcctacatgaggtggacgacatccttggagaaggcagcgacgacagcgacagcgagaagaggaggcctga

SEQ ID NO: 194992 - DNA, 103 bp, Homo sapiens
gcagcccccggggcaagagcaggagcccggcaccccccgccgacaaggaggcccgcggcgccatggctcacgtcggctcccgcaagcgctcgaggagtcgcag

SEQ ID NO: 194993 - DNA, 90 bp, Homo sapiens
tgacctgtggagacacggccagatctgccctccagatccggagtgttggaacagcagctgttaatatgtgccttgtggcaactggcggag

SEQ ID NO: 194994 - DNA, 75 bp, Homo sapiens
ccacagtccgcagggatgaacctcgagttgctgggtggcgacatgtctaagaatgtgagccagtcacagatggca

SEQ ID NO: 194995 - DNA, 100 bp, Homo sapiens
gcgcatccgcatcgacagcctctctgcccagctcagccagctccagaagcagcttgaggagttcctgaaccagagctcgcccttctacttctggatgaat

SEQ ID NO: 194996 - DNA, 101 bp, Homo sapiens
acgtggtggcggtggaaatttcggaccaggaccaggaagtaactttagaggaggatctgggcacttcaggcaaccggggcctccagggggagaaaggcgag

SEQ ID NO: 194997 - DNA, 75 bp, Homo sapiens
gggtttgatgaaggtggaggcagcgcggctctcagggctgggttacgacccctacaaccctgagctgcccaagcc

SEQ ID NO: 194998 - DNA, 98 bp, Homo sapiens
aacgctgccacaactatctccagaatgtcagcatggaggctgctgggcaggtcatgagtcaccatgagacgaggtcttgctacattgtccaggatgga

SEQ ID NO: 194999 - DNA, 108 bp, Homo sapiens
aagcaagggattgctggctacagcttcagaagaccgaagcgttcgtatctggaaggtgagaagccctaccactgcaactgggacggctgcggctggaagtttgcgcgc

SEQ ID NO: 195000 - DNA, 74 bp, Homo sapiens
gagccgcagtggatggctggaggtgcagggccaggaggaacatgagcaaattgtggctactaatttgccccctg

SEQ ID NO: 195001 - DNA, 100 bp, Homo sapiens
atcactcaatgaatataaactgcacttactggcatgctcaaggaatgggctattaagccaagctagcctttatgggaagcgcagaagtcagaaagaggaa

SEQ ID NO: 195002 - DNA, 75 bp, Homo sapiens
tcatctctaaatcccatcctctttcgaggtgttgggtactacgacgtccccatcgccaccctggacttctcctcg

SEQ ID NO: 195003 - DNA, 74 bp, Homo sapiens
cgcagtggtcgcttcttctccttgatcctaagtatatcactgcagcctgtgagatggtggcagaaatggtggag

SEQ ID NO: 195004 - DNA, 90 bp, Homo sapiens
gacacagtgatgaagaaagtgttagaaacagtagtggagaatcaaggcaggccagaaagcagacccagggaggatagcacatgtcttcgg

SEQ ID NO: 195005 - DNA, 75 bp, Homo sapiens
gatttgttaaggattccaagtaactcttatttggaaatggcagcagtgtctgcttttcttcaaccaggagcacct

SEQ ID NO: 195006 - DNA, 88 bp, Homo sapiens
tcctgggcaggctcggcagggcaggcagctccaggaggggagctcgaggagcagcacggcatccactgcaacatgacgttactcttct

SEQ ID NO: 195007 - DNA, 50 bp, Homo sapiens
gtaatcctgcctgtgtctgtagatgagggcaagtgtccagagaatggctg

SEQ ID NO: 195008 - DNA, 90 bp, Homo sapiens
gttacgaagcctgttcagcagcattggtgaagttgaatctgcaaaacttattcgggataaagtagcagcctgacatttaccccggtaact

SEQ ID NO: 195009 - DNA, 75 bp, Homo sapiens
tgtgaaatcgcgtggactgcaacacccagcagcgcgagtgatcagcagctggactgtgccttggacctaatgagg

SEQ ID NO: 195010 - DNA, 75 bp, Homo sapiens
tgacacgaaggaggcatcattgtcgagcatgtggatatagggatttgttattgcgaatgatgtggacaacaagcg

SEQ ID NO: 195011 - DNA, 100 bp, Homo sapiens
cagcaaatgaagattcagtggatgctaagccagaccggtcctcgtttgtaccgtccctcttcaggcaccaaggctcagagtcagcaggagtgagttcagg

SEQ ID NO: 195012 - DNA, 50 bp, Homo sapiens
gtttgtggatcgctgtgatcgtcacttgactgattcttgctattccaaat

SEQ ID NO: 195013 - DNA, 100 bp, Homo sapiens
gatctctcagctggagcaagaagaggacctgtgcagggcagagcaggaggccccccgagcttacctgttgattcggtggtaattacagaatctgatgcac

SEQ ID NO: 195014 - DNA, 75 bp, Homo sapiens
cagggggtgtggtctcagctcacacagaggtgattgaactgagctctggagaggaggacactctgcacattgtgg

SEQ ID NO: 195015 - DNA, 74 bp, Homo sapiens
ttgaccttctggatgtccttgagttcaaccagaccagtgtgcttttcttggagaaagaagaaaagaagaaagaa

SEQ ID NO: 195016 - DNA, 82 bp, Homo sapiens
aaagaggaacaaagtcatcaagctagtggacatcacggacatccagaagcaaattgtggctactaatttgccccctgaagat

SEQ ID NO: 195017 - DNA, 55 bp, Homo sapiens
ccgccccgcgcccccgccgcgccctcagaaggccgagtcccgaagtccctcctgc

SEQ ID NO: 195018 - DNA, 75 bp, Homo sapiens
gtggaaggaagatgaccccaggtggccaggagcaggtcgagcccagtgacactatcgagaacgtcaaagcaaaga

SEQ ID NO: 195019 - DNA, 100 bp, Homo sapiens
ttgtagtaaaatttttaagctataatagtggtaatgaagaagaattatctggaaatccagttcactttatccaaatgcatagatgccgtgatggtgctgg

SEQ ID NO: 195020 - DNA, 95 bp, Homo sapiens
cgtcgcccgaggcgaggaggagcgctggcgtctgaagatgatgagaaactgaaaaagaggaaggagcgatttgggattgtcacaagttcagctgg

SEQ ID NO: 195021 - DNA, 76 bp, Homo sapiens
cggagctggtggaggccaaagattactacagcatcccatttcccacacccactactccgctgactgggagggatgg

SEQ ID NO: 195022 - DNA, 100 bp, Homo sapiens
agcctttgtacccaatgacggttgcttgaactttattgaggtgctggagaatctggtaaaagcaccattgtgaagcagatgaggatcctgcatgttaatg

SEQ ID NO: 195023 - DNA, 101 bp, Homo sapiens
aatggagacgccattggatgttttgtccagggcagcatctctggtgcatgctgatgacgaaaaacatggacccgattcagaaagctgtaataaaccataca

SEQ ID NO: 195024 - DNA, 80 bp, Homo sapiens
cgacaagccgctggcagccgcggatctcaccgccgctcagggactcctcctattttgaggacttctccaacatctccatc

SEQ ID NO: 195025 - DNA, 48 bp, Homo sapiens
acatgttcgtctggggcggctacaaggacagcctttcctgcctcaggg

SEQ ID NO: 195026 - DNA, 82 bp, Homo sapiens
gcttgtactcctcaggctgcaaaggttatcaatactctggctgaccatcatcatcgtgggactgactttggtggaagtcctt

SEQ ID NO: 195027 - DNA, 101 bp, Homo sapiens
gtcctgagcaggagacctgaacagagtcttgctctgtcgcccaggctggagtgatgaggcgcgatcatcactccacctgggctcactgcacctccgcctcc

SEQ ID NO: 195028 - DNA, 100 bp, Homo sapiens
gcagtggttcaattgaaaggattagaagctgcacttgtttatgttgaaaatgcccatgtagcaggaaagtctatcagccacagtctctgcaagtttccaa

SEQ ID NO: 195029 - DNA, 139 bp, Homo sapiens
gcggcagcccaggctgccgcgcagagcccggattccgcgactgccggggcaccgcaggttttggactcgctgaagcggtctgtgagagccacttcaggaattttttgcttggagttacatgacgaaatttgcatttcag

SEQ ID NO: 195030 - DNA, 83 bp, Homo sapiens
ccccgcgctgcggcctggcggcttccaggcgcactaccgcgtaagactttgaccccgacgcaggcttcagtgattgccgcgga

SEQ ID NO: 195031 - DNA, 50 bp, Homo sapiens
aggcagcacaggacctggaaaaattacatatggagtcccctgtttccaca

SEQ ID NO: 195032 - DNA, 82 bp, Homo sapiens
gctgaaacatctgccttggacacagggttctcgctcaaatgagagtccggagtgttgtcatgtgaagcctgccatccaggaa

SEQ ID NO: 195033 - DNA, 90 bp, Homo sapiens
aggccttccctagccatgcttcctgtatagtctgtggaacgtcgtgcagccaggataccctgcccaccggcgcatcgtagaggtcttcgg

SEQ ID NO: 195034 - DNA, 98 bp, Homo sapiens
ggcggccgagcggggtcagttctctgtagtgtttgccaatgttggagccgtctgcaaagtgtccccggcaagaagattaagcctgatcaagatgacaa

SEQ ID NO: 195035 - DNA, 100 bp, Homo sapiens
tggcatttggctttgcctttctggacacagaagtatttgtgacaggtggactgggtggttatggatcaggagacagtgaagatgagaggagtgacagagg

SEQ ID NO: 195036 - DNA, 98 bp, Homo sapiens
acaaagataagaagcagtatcactgtgaaaactgtggaatttgtagggattcgataaacaagtggatgtgtcatatattgccaaacattacaacatga

SEQ ID NO: 195037 - DNA, 100 bp, Homo sapiens
gattctggaactgggagaagatggctttaaagaatacacttcaagttatgatgtgattgctcaagcccaatctgggactgggaaaacggccacatttgcc

SEQ ID NO: 195038 - DNA, 75 bp, Homo sapiens
ctcccacctgtcctcaggcatatcaaaggaactgcaagcacatgttgaccagataactgaaatggcagcagtaat

SEQ ID NO: 195039 - DNA, 83 bp, Homo sapiens
agaacctctcccagttcttccctgaggccatcagcttcattgggcggcgactggcggcgcgatggacctgaccgggctcctgc

SEQ ID NO: 195040 - DNA, 82 bp, Homo sapiens
cccacacatcattcaaacacgacagtcattttgtttactcattcagccctgttgcaggtcccaataaactcttcataaggtt

SEQ ID NO: 195041 - DNA, 50 bp, Homo sapiens
tggccattaaacctgctgttctgaaagcctttggaggtgagaagtggaaa

SEQ ID NO: 195042 - DNA, 100 bp, Homo sapiens
tgcaccgcgaactcaaagaactataaacaggatgcctgcaaaggctccacctggtgatgaagtataaaagaagcctgtattgttttgaatttgaacgtcg

SEQ ID NO: 195043 - DNA, 51 bp, Homo sapiens
aaacattcactgcacagaaccgcttcctggacaagatcgacgtgatcaagc

SEQ ID NO: 195044 - DNA, 87 bp, Homo sapiens
ctgggctgctcttcctgaggttttcctaagccatcccctggcggaaccgcccccaggaagctgaatatggtgggcatgatcagatag

SEQ ID NO: 195045 - DNA, 96 bp, Homo sapiens
aagaggatacctctgcgatcccgggtcatctccagatgctagggttatggatgctcccataatactctcagatagtgaagaagaagaaatgatcat

SEQ ID NO: 195046 - DNA, 100 bp, Homo sapiens
caccccgagcgaggccaaccttcaggaggaggaggtgagcatctcctggaccaccctcaagcttcaggtgagctgagcttctaacactaccatcaaagca

SEQ ID NO: 195047 - DNA, 83 bp, Homo sapiens
cccgggctccggctccggcttctgctgttgctcttctccgccgcggcactgatccccacagacagccctcagcgcctttttcc

SEQ ID NO: 195048 - DNA, 131 bp, Homo sapiens
cgtcatctctcaggagccctttgttcccaagaaagagaagaaatcagttgctgctagaaagacttgagttagacaagcagcagcacacgcctccctacctcatggcgacagaaaatggagcagttgagctg

SEQ ID NO: 195049 - DNA, 75 bp, Homo sapiens
tttctccccagccaagagcatggctatgggagaaggaaggcaggcagcaggcagtttcatgttagggtcttacag

SEQ ID NO: 195050 - DNA, 100 bp, Homo sapiens
accccgggagcctcttcggcttctcgctggccatgcactggcaactgcagcccgaggacaagcggctgagtgtggggctgattgtgctaagttccagaag

SEQ ID NO: 195051 - DNA, 50 bp, Homo sapiens
cagcagctgtcgccgccgctctcaggagggtgcatctgcccggaagactc

SEQ ID NO: 195052 - DNA, 100 bp, Homo sapiens
tccgaccagtctgggggcgctggcggcctgcgcagccacctcaagtatggcatgcagctgtaccagaattatatgcatccatatcaaggtagaagtggct

SEQ ID NO: 195053 - DNA, 100 bp, Homo sapiens
gcagatggccgtacgtgtgaagatgagaatcccaagcagcacattcccctggaggagtacgctgcgaacctaaagagcatggtgcagtacctgaagtccg

SEQ ID NO: 195054 - DNA, 75 bp, Homo sapiens
gcctaaatgaggaatgtctttcctaccatctaaaatacgaaggtttctggctggacattaccagaaacatcttta

SEQ ID NO: 195055 - DNA, 90 bp, Homo sapiens
cttgacgaggctgcggtgtctgctgctattctccgagcttcgcaatgaggcagagaagaagcgtgaggctaagcagcgagctaaggaagc

SEQ ID NO: 195056 - DNA, 100 bp, Homo sapiens
catcggcaccaacaacttcctgcgcttccagcttaccatgcggctgcgctccataaaggcagacgacaagaagccaagtacaagaagctggagaagcgat

SEQ ID NO: 195057 - DNA, 74 bp, Homo sapiens
atcgtcgccacctggatgctggaggtctgtgcagacttttgcagacaaatcaaaacaagaagctctgaagaatg

SEQ ID NO: 195058 - DNA, 80 bp, Homo sapiens
ggcaggtgtcgctaaccggacggtggtcgccagggcgagaggcgggagccggagagacaatgcagatcttcgtgaagact

SEQ ID NO: 195059 - DNA, 83 bp, Homo sapiens
cttggacccctactatgcagacaaaaagggccaaggagatctgttgaagaatgccaagaatgaagctatagaaaacatgaagc

SEQ ID NO: 195060 - DNA, 75 bp, Homo sapiens
ggtatactacatggcaaaatgggaaagagtttattaaccacttaacctctcagaactgaacaaagacaacattgt

SEQ ID NO: 195061 - DNA, 82 bp, Homo sapiens
ccaggagcgcgtctcggcgggagcctcagaactcaactttggggccatcactctcaacagcatggatgccactagtgagcgg

SEQ ID NO: 195062 - DNA, 50 bp, Homo sapiens
agagtccccgtacgcctacagtaacgattagccgatgaattacatatgcc

SEQ ID NO: 195063 - DNA, 98 bp, Homo sapiens
ttggatgtcactgtacaatcctttggctggtctgacagagctaagaggcatttcatccttcatgaagccattcaggattttgaattgcatatgagtgc

SEQ ID NO: 195064 - DNA, 80 bp, Homo sapiens
caggccttggagaacagcacgtccccgctgagtgctgtccagaccaaaacgaagaagacgttagccaaacccaatataag

SEQ ID NO: 195065 - DNA, 51 bp, Homo sapiens
caccgccatggcaggcatcaaaggcaacaccaacattgcttagaagatttg

SEQ ID NO: 195066 - DNA, 101 bp, Homo sapiens
atgatgaccccaaaaagggtatatggctggaggctgggaaagctttggactactacatgctccgaaatgggatgttccaggtcatccagccagagcgtgcg

SEQ ID NO: 195067 - DNA, 75 bp, Homo sapiens
tcggtgttcccgctggcggcgggcatcttcttcgtgaggctgctcttcgagcgaatgattacggacctgaagcca

SEQ ID NO: 195068 - DNA, 75 bp, Homo sapiens
tacaacgtgctggagcggccgcgcggctgggcgttcatctaccacgcctacgtccactgaggcggctcccagctg

SEQ ID NO: 195069 - DNA, 73 bp, Homo sapiens
gactgcgcacttggaatagtagcaggcggcggcggcggaacgccaggcaggtctttggtttcataagagcctg

SEQ ID NO: 195070 - DNA, 129 bp, Homo sapiens
ctctgtgatgccaagacagatgggagtttccttgtacaccactttctctccttctatctcaaagccaagacaatgcaaactccagtgaacattcccgtgcctgtgctccggctgccccggggccctgat

SEQ ID NO: 195071 - DNA, 75 bp, Homo sapiens
cacagcccaaaccatcatttaccctatggaggctattgagggcacctacattgacaagaaatgccccttcactgg

SEQ ID NO: 195072 - DNA, 100 bp, Homo sapiens
gtttcttatatgtgatgccattccagcactggactcatggaggctgagcatttattcagaacactcgtgaaactgctcaggccatcaagggtatgcatat

SEQ ID NO: 195073 - DNA, 101 bp, Homo sapiens
ggggctgctgcaatgacgagggcctggagtgtgtgcccactgaggagtccaacatcaccatgcaggtataatgggtttgtcctgccatgcttgggtgttca

SEQ ID NO: 195074 - DNA, 74 bp, Homo sapiens
gccaagatcctcaatgatgtgcaggatcgctttgaggtcaatatccaacacagccaacctaccctgtgcagcct

SEQ ID NO: 195075 - DNA, 76 bp, Homo sapiens
gggagagctgctgaagtcaaaggagcaattgctggtcctgagcctgaggttttgacctgtagcagagaaccaattc

SEQ ID NO: 195076 - DNA, 82 bp, Homo sapiens
gacaccaaccccttcgcggacccagtggatgtaaaccccttccagtactacaaagtgatcatttcttacatttactgcaagc

SEQ ID NO: 195077 - DNA, 100 bp, Homo sapiens
agatggatatattctgtgccttaaccgaattcctcatgggaggaagaaccattctgacaaagcattcccatggtttggcatggacatcggtggaacgctg

SEQ ID NO: 195078 - DNA, 99 bp, Homo sapiens
cagtttcctacaagcgaacaggattctttggaaagtggtggaggtggatacagcagtcggagaacatctggcagagacaaatacggaccacctgttcgt

SEQ ID NO: 195079 - DNA, 100 bp, Homo sapiens
tgaccagttgggatggacaaaacccaccaagatccagattgaagctattcctttggccttacaaggaagatgagaatgtgcctactgctcctgatcctcc

SEQ ID NO: 195080 - DNA, 50 bp, Homo sapiens
cggccatctgtgtgtctgggcagtgcaagcaccagccacaacgggaccac

SEQ ID NO: 195081 - DNA, 75 bp, Homo sapiens
gtgaccttgctgcaacagatcctgtatggcaggaactacattaagaggaaaacctcacagcacgggtagctctga

SEQ ID NO: 195082 - DNA, 50 bp, Homo sapiens
ccggatcaacttcgacaaatattatctccagaagaagaagagaaaaggag

SEQ ID NO: 195083 - DNA, 98 bp, Homo sapiens
agtttgccaccgtttacaaggccagagataagaacaccaaccaaattgtcgccattaagaaatgtttacaggcattggagtttttacatgctaatcaa

SEQ ID NO: 195084 - DNA, 51 bp, Homo sapiens
cctcagcggcgccttgcggagggaccccagctctcaaaattagagagatgt

SEQ ID NO: 195085 - DNA, 99 bp, Homo sapiens
cagaactcgaatggccttgttttcttgctctggggctcttatgctcagaagaagggcagtgccattgatagggaccggccagccttgcagctgtatgat

SEQ ID NO: 195086 - DNA, 75 bp, Homo sapiens
ctcggtgattgaggacaagaccatcgagctcatgatctgtgccatcattggcgggaccttcaccgtcgccggcat

SEQ ID NO: 195087 - DNA, 100 bp, Homo sapiens
gagaaaatgctcgtggccagtgactacccctaacgcacaataatatggctccgatgggctcaaagctccagtgtgctgctctgctcgttacaacttagca

SEQ ID NO: 195088 - DNA, 75 bp, Homo sapiens
tcagagatgccaagaagaatctagacagacaggcctttctagggacaagaatccttcaagaaacaggaaaaaact

SEQ ID NO: 195089 - DNA, 75 bp, Homo sapiens
cgggcaaatgcgtgctggttcttaaagaggtggtgaagcagtattttccaatttgaagattcatttgaaggtggc

SEQ ID NO: 195090 - DNA, 50 bp, Homo sapiens
gtggagatatggcgcaactgcggcgcagacaagaggagcagcagcggcac

SEQ ID NO: 195091 - DNA, 97 bp, Homo sapiens
ctcgcccagctcgcccagcgtccgccgcgcctcggccaagatttatgtgatcagtttggctgaaccccgtctgcccctgcagctggatgatgctgtt

SEQ ID NO: 195092 - DNA, 100 bp, Homo sapiens
caactatgtttggatgttggatctacactttctcaagcactgtgatcttcaaatgcattgaatgccccagaggagcccgaaacctcccaggcttggtgca

SEQ ID NO: 195093 - DNA, 75 bp, Homo sapiens
ggcgaccctagcgggtgagaggcccttcagggccgcggcgggcgttacatagccatgtgccgcgagaagcagccc

SEQ ID NO: 195094 - DNA, 75 bp, Homo sapiens
aaggcatattcatgtgctttgaagacctgtgaccgcatcaagcagtcagcagctggcaccaagcgtcgggtgttt

SEQ ID NO: 195095 - DNA, 75 bp, Homo sapiens
tgagcagaacataaacaacctcaatgtctccgaagcagatcggaagtgtgagatggagtctcgctctgttgccca

SEQ ID NO: 195096 - DNA, 98 bp, Homo sapiens
cccgggcagcgcttccattccgcggagctggaatttgctgacacaatatcttccgcctggtgctgggcatatcctaagaacttacaactttcctgtat

SEQ ID NO: 195097 - DNA, 98 bp, Homo sapiens
tggggctcgccttgtatctcaacaccctgagtgcggatttctgctatgatgacaggcttggaagcgtttgtgtctgctgccaagaagctaccacgaga

SEQ ID NO: 195098 - DNA, 80 bp, Homo sapiens
cgcactgggaccccggaatcccgcgcgctgcccacgattcgcttctgagctattcaaagtgtgattagagctgggcttgg

SEQ ID NO: 195099 - DNA, 88 bp, Homo sapiens
tgcttggtgtcgtttttccttgagctgaacgtcttgcaacagtggccgcacgcataggaaattaagtgttaaatccattacgaaccct

SEQ ID NO: 195100 - DNA, 74 bp, Homo sapiens
gccatagtacctacagcagcactccagattggtttatcttggaagctaaagggcattgctcatcctgaagatca

SEQ ID NO: 195101 - DNA, 83 bp, Homo sapiens
cacagactgaccgagagagcctgcggaacctgcgcggctactacaaccagagcgaggccgggaacacagccgcacccgggtct

SEQ ID NO: 195102 - DNA, 97 bp, Homo sapiens
aagatgcaagcggtttgggaccttgaacaaggcaaatatggttttggaaggatctgagtctctccctgcggagacagccctgaagaactcctgtaac

SEQ ID NO: 195103 - DNA, 100 bp, Homo sapiens
gctgcaccagcttctaaccgaagagtttcattctgtcgcccaggctggagtgcaatggcgcgatctcggctcactgcaacctctgtctcccaggttcagg

SEQ ID NO: 195104 - DNA, 87 bp, Homo sapiens
gtcttccatgaagaaatgatgaagatgcgacaggctaagctggattatcagtgttatagttttgccgctggactcttccctcccttc

SEQ ID NO: 195105 - DNA, 121 bp, Homo sapiens
agggctgaggaaccatgtctccatccccgaccgccctcttctgtcttggaacttgcttgctagaaaacaaagtgcaaggcttgacaaacacaatgacttgggatggaagttatttgggaaa

SEQ ID NO: 195106 - DNA, 75 bp, Homo sapiens
ccattcttcctcctctgccgagtggatcgcctgcctggataaaagatgcctggaatgatgtcgtcagtaatgcct

SEQ ID NO: 195107 - DNA, 100 bp, Homo sapiens
ggaccgggaccaggaccgggccccactttccaatgaggaaattgaggcacagagattaactaatctgaaccagataatgccataagtagtagaactgcga

SEQ ID NO: 195108 - DNA, 100 bp, Homo sapiens
agggagttctgttacgccatggaaaccgctctggtcacaccaatactgttgcagattgaccctggaagctgtcctgaatttcaaatactctggaggcccg

SEQ ID NO: 195109 - DNA, 75 bp, Homo sapiens
atacactcaagctgttgaaaatgagcagctgtcctcatgtctctccagcaggtttaagaattgtttaagctgcat

SEQ ID NO: 195110 - DNA, 98 bp, Homo sapiens
ggaagcgtttgctgccaccttctgcatcgtaggatgaaacaggcgcctatttaatcgacagagaccccacctactttgggcctgtgctgaactacctg

SEQ ID NO: 195111 - DNA, 75 bp, Homo sapiens
ctggccagggcagcccttcaggagctccttagtaaagacaagcatgagacgaagctgaagggagtcatctatttc

SEQ ID NO: 195112 - DNA, 80 bp, Homo sapiens
aggcagaggaagggaagggtcagctgccttgaggtccctgcctgctaacctgacgataacgaaggaggcccaacttcatt

SEQ ID NO: 195113 - DNA, 50 bp, Homo sapiens
ctccgtttcctggatgtgaacgttatcaatagtctggctgtctatcgtca

SEQ ID NO: 195114 - DNA, 100 bp, Homo sapiens
agaagctcgagtagtgatcgttccagcagcgaggatgagcacagtgcagggaggagccgggtgtgggctgagccctgcctgattgatgctgccaaggagg

SEQ ID NO: 195115 - DNA, 114 bp, Homo sapiens
tcgaggccaacgacctgtttgagagtgggaacatgacgcaggtgcaggtgtctcttctcgccctggcggggaaggccccttcccagctgcctgcctgccctagccagctcccag

SEQ ID NO: 195116 - DNA, 90 bp, Homo sapiens
cggttcgagatggagcgggcgcactgggaggtggaacgggccgaactgcaggtagattggggtcaactggactacttagttgtagacatg

SEQ ID NO: 195117 - DNA, 90 bp, Homo sapiens
tgggtcaccaagagaggctgagagaccagggtggttctcttcccaaagtggaagccaaattcatcaattatgtgaagaattgcttccgga

SEQ ID NO: 195118 - DNA, 98 bp, Homo sapiens
caatagaaagtgccaaccagcagacagacaaactgaaggagctttatggacaagtggttgtggtggaattagaaaatgtaaagtcagagtcagaccta

SEQ ID NO: 195119 - DNA, 104 bp, Homo sapiens
agtagaccttacagaaatagggggcacggcagacgcggtcctggatatacttcaggcctgttacatgaacagaatatggcaaaaatgagactacttacttttat

SEQ ID NO: 195120 - DNA, 83 bp, Homo sapiens
cctaccacgaggtggtggacgagatctactttaagtttgcctgagaatacagatcaacccacagaacaaagcggatttccaag

SEQ ID NO: 195121 - DNA, 100 bp, Homo sapiens
gcaatcctaccatgtcagccttcccagtagctggaactacagaaaagacagctttgatttctggctgcaaaaaagatatgaggaagagctcctccccttc

SEQ ID NO: 195122 - DNA, 99 bp, Homo sapiens
atcactctgcatggttgaccgttctggaagatcagaagaaggaggaggaggaggaggcggcagcggcagcggcgatggctacagaaggagggaaaacct

SEQ ID NO: 195123 - DNA, 75 bp, Homo sapiens
gtgcgctgctcaaggacacggtctacaccgacttcgacgaccatcatggagcagttcaaccctagcctccggaac

SEQ ID NO: 195124 - DNA, 100 bp, Homo sapiens
caccatccacgccagccgcaccatgccgctcctaagcctgcacagccgcggcggcagcagcagtgagagaaagaaatgaccgcccggatgtgccactgag

SEQ ID NO: 195125 - DNA, 100 bp, Homo sapiens
ctggcgtccgcgcgctgcacaatggcggctctgaagagttggctgtcgcgcagcgtaacttcattcttcagctcggcttattccaggggtgtgtttcgtc

SEQ ID NO: 195126 - DNA, 83 bp, Homo sapiens
ccatgcggaagatcgtcgccacctggatgctggagaacccagtgacttgattgtaaaaatttacagagcggaatcatatgctg

SEQ ID NO: 195127 - DNA, 75 bp, Homo sapiens
tgctgatgaagattcacctgtgcatggcccagctgtggtccctcaccagtattatggagttactccctggggagt

SEQ ID NO: 195128 - DNA, 75 bp, Homo sapiens
gaggtggtgaaactggggaaaagtgcaatgcaggttgttgatgagcgtgaattttttgagatcatgcccaattat

SEQ ID NO: 195129 - DNA, 75 bp, Homo sapiens
attatttatgtcatcaagaagaatgacgatggtgcttttgaagatgatgatatcacgcacgttgaaggaagtgta

SEQ ID NO: 195130 - DNA, 90 bp, Homo sapiens
ctcttcctgaacgaagtggccaagaaggagaagcagctgcggaaaatgctagaaggataaggaagcctgtgtgggtaccaacaatcaaag

SEQ ID NO: 195131 - DNA, 50 bp, Homo sapiens
caggaagggggatgtgggccgagtgcggttttttattggcacctcagtct

SEQ ID NO: 195132 - DNA, 97 bp, Homo sapiens
gacaagagcagttagaaagggaacagctggaatgggagagagagcgcagaatatcaagtgctgaacctgcacttgttgccaagtcttccatcttact

SEQ ID NO: 195133 - DNA, 75 bp, Homo sapiens
tgatgcgctgcgggcagccgtggtggaccggaaaggtgccgtgagcgatgtggagatgcaggaacactatgatga

SEQ ID NO: 195134 - DNA, 100 bp, Homo sapiens
cagcttctttgtcaccataggagacatggacgaagccttcaaatccatcaagctcatcaaaaggaatactcccccagttgcaagaggcgcaggaccgtgg

SEQ ID NO: 195135 - DNA, 90 bp, Homo sapiens
ctcaaatcttaatttcctaaagaaccaactgtgagagcggagctgatggaacaggtgcctcacatcgcactgttttgtcaagaaaaccgg

SEQ ID NO: 195136 - DNA, 87 bp, Homo sapiens
cgccgagtcctagcgcctggcctgcgcgccgctgcccgcgccacagtttgacggtgagaacatgtatatgagcatgacagagccgag

SEQ ID NO: 195137 - DNA, 83 bp, Homo sapiens
aaatggcattaaatgaaagaggacatgaaggggatttcctcattcgtgatagtgaatcttcgcacttaaatatagatccggtg

SEQ ID NO: 195138 - DNA, 100 bp, Homo sapiens
ggcccggcaccgttccgcggacgtgctcggtgctggagaatctggtaaaagcaccattgtgaagcagatgaggatcctgcatgttaatgggtttaatgga

SEQ ID NO: 195139 - DNA, 90 bp, Homo sapiens
gagctgctcaccatgtggtttggggagtctgaggccaatgtcagagaaatctttgacaaggctttcgccaaggtcttcaacacaacccct

SEQ ID NO: 195140 - DNA, 100 bp, Homo sapiens
aagtttagttgaaatcattgaacatggctctcgaacagtgtggcctgatgaaactatgggaccctttggacctcaagatcagaggttccagcttcctggg

SEQ ID NO: 195141 - DNA, 100 bp, Homo sapiens
gcaggttcatgaagaggaccaagatgtggaaaggagccagatgtcagtattgaatatggtggtgaggcgtgaccctggcaacactgaacctgtgaaagcc

SEQ ID NO: 195142 - DNA, 51 bp, Homo sapiens
aaaccatccgaaactatgctcagggtatttctcaagctgccagatacgttt

SEQ ID NO: 195143 - DNA, 87 bp, Homo sapiens
gtggtggccctggagcagtatgccagcaaggatcttttgccagaaatgagggcatactggcctgacgtaattcactcgtttcccaat

SEQ ID NO: 195144 - DNA, 75 bp, Homo sapiens
cctcagatgctcccttctgctcctggaatgtatcctgtcaggtataatgtcagtgaatggcaagaaagttcttca

SEQ ID NO: 195145 - DNA, 82 bp, Homo sapiens
cgaacgggggtcttcctcctccgccgttgacagtagcctctagttcgttagtcaaaacgtgaaaaaaaagacctgctttgcc

SEQ ID NO: 195146 - DNA, 100 bp, Homo sapiens
ttatcattacttcggcttctcgcagccagccaagagtctttgttgctggctatgaaagcctgaaaaagaatgaaattcttcatctgaaattacctctcag

SEQ ID NO: 195147 - DNA, 99 bp, Homo sapiens
cagatggttccagagacgggagtcctgggcccagagccgagatgagcagaacctgctgcagcagaagagaaattccgggtagatatgcctggctcaggc

SEQ ID NO: 195148 - DNA, 82 bp, Homo sapiens
gatcttcgctgtggcatggcggacgaggggaagtcgtacagcgagactctacaggggcaggtaattcactggtccacaagcg

SEQ ID NO: 195149 - DNA, 82 bp, Homo sapiens
cggcgagacgcgcgtgtgtgagcgcgccggaccaagcgggcccagaagcggagttcggaatccagcattaagaagaaatttc

SEQ ID NO: 195150 - DNA, 98 bp, Homo sapiens
agcggggtccgggtccggagcgccacattggaaaggtctttcaagttcatgagagaagctgaggaccaactgaaggccattccccagttctgttttcc

SEQ ID NO: 195151 - DNA, 100 bp, Homo sapiens
gatataattctggatggaagacctcttatttgtattacattgaattagagattgctcgctgtaagcagctcatctgtgaccccagctacgtaaaagatcg

SEQ ID NO: 195152 - DNA, 114 bp, Homo sapiens
acaaaagctgagtttacttctcctccttctttgttcaagactgggcttccaccgagcagggatccttctaaagtaaatattctggtacctggtgctggactaggaagactggcc

SEQ ID NO: 195153 - DNA, 101 bp, Homo sapiens
tgacttggcaggagatcatgtccatcaccgagctgcaggagttgatccctgaattttattatctccctgagatgtttgtcaacttcaataattataatctt

SEQ ID NO: 195154 - DNA, 90 bp, Homo sapiens
gccggcgcgcgctcgcccgcctagtgctgcgcctcaacgcgccgttgtgctctggcaggctgccctgagcacgctcaaccccaaccccac

SEQ ID NO: 195155 - DNA, 75 bp, Homo sapiens
ccgcagatgttgtcaaggtggcctaccaggaggccaggggtgtcgccatggtccaagacaactttgacaagattg

SEQ ID NO: 195156 - DNA, 83 bp, Homo sapiens
caggaaccagctcgggggccaactctgaggagtccactgcagcaggattgtcagtggcttcgccccgaggagagctgactgcc

SEQ ID NO: 195157 - DNA, 90 bp, Homo sapiens
gtcagctcccctttctcgcccagcgcccccaggccgctcccggggctcacgcaaagccttctagacaagctcagtggaatctgaagggcc

SEQ ID NO: 195158 - DNA, 103 bp, Homo sapiens
ccaggattcttgatgtttcttctgagctccagggtcaggcagtatgattgaagtttctaagccaggtgtaccttgaaagacttttaacatacgcagagataga

SEQ ID NO: 195159 - DNA, 100 bp, Homo sapiens
ggcaaggactcaagtgtgatggttactctggccaggacttcgactgggcagattatcacaagcagcatggggcgcaggaagcccctcccttctgcttccg

SEQ ID NO: 195160 - DNA, 75 bp, Homo sapiens
cagttactctgaagggcatcatgcatcttactgaagggcggcgactggcggcgcgatggacctgaccgggctcct

SEQ ID NO: 195161 - DNA, 75 bp, Homo sapiens
cgaaatgttcaagtttaccaaaagagaggcaccgctggaacactaatgaggcagctatcaatggtgtaataccac

SEQ ID NO: 195162 - DNA, 78 bp, Homo sapiens
agaaagagtggggcgatgatgaagaagatgctgtattatgtaaaagacatcccagctaccctgaaattcttccatagt

SEQ ID NO: 195163 - DNA, 74 bp, Homo sapiens
ggccagctctaagaattcctgctacgacactgaattcaaccaggaggtgctggagaatctggtaaaagcaccat

SEQ ID NO: 195164 - DNA, 75 bp, Homo sapiens
aaacagggcaacccgcagcacttgtcccagagggagctcatcacccgtccgcaagcacatcaatgatctttatga

SEQ ID NO: 195165 - DNA, 80 bp, Homo sapiens
ctgactgtgcccctgtggaaggaggaggcagtggagaaggtgacacagcacatccacggcctgtctgggaagaaggatgg

SEQ ID NO: 195166 - DNA, 75 bp, Homo sapiens
aagttaattgaagagtcttgtccacagctggcaaattcagtgcagatcagggaagtgggaatgtccttggcatca

SEQ ID NO: 195167 - DNA, 83 bp, Homo sapiens
gggcttccgctgagacctgccgtgctgggtgggagtgcatccgccccaacccttttccccctcgtctcctgtgagaattcccc

SEQ ID NO: 195168 - DNA, 100 bp, Homo sapiens
tgaacatcctttgactggttagccaggtaatgagaggccctaagatcccagaggatgccataagaggaaaagtcaggggagtgttgaagactctgcctcc

SEQ ID NO: 195169 - DNA, 100 bp, Homo sapiens
tcgcccccacctgtggactctgaccgcaaacaaggagagcctactgagcagcctgagtggagcatcctggccagaacaagccaaggagccaagacgagag

SEQ ID NO: 195170 - DNA, 100 bp, Homo sapiens
ggtgctgaaggctgcagccgcgaatgccgtaggagccgtgccgctcttggccaccgaaagcgtcaagcaagaagaagctggagtacggccttctgcagga

SEQ ID NO: 195171 - DNA, 100 bp, Homo sapiens
attttcttgggcatctcccggaaagtgcgttttaaggcgaagtcatgatgtattctcccatctgtctcactcagttccagggaaacctcggcttgtgatt

SEQ ID NO: 195172 - DNA, 100 bp, Homo sapiens
ggggatcgtgagctccggcccgggcgagcgggtgcgtctgccgcagagtcggcacctgaaggacatggaggaataatgtatttgtggccttggacatgag

SEQ ID NO: 195173 - DNA, 75 bp, Homo sapiens
caaatgtgagcctatggatcaagactcagattgatggacaacttttcttaattaagcaccttttgatacttcgtg

SEQ ID NO: 195174 - DNA, 50 bp, Homo sapiens
ccattgactatgcagcctaatggaccaggactaaaacctccagaggaacg

SEQ ID NO: 195175 - DNA, 83 bp, Homo sapiens
gacaaaatccttcgtcagaaggacaagttgtttgaggaagaggatggagatgaagatgaggaagctgagtcagctacgggcaa

SEQ ID NO: 195176 - DNA, 76 bp, Homo sapiens
cttgggcaatcagcaacttaacaataagtggcagaaaagatcagattctataccagactgttacaggattgaagaa

SEQ ID NO: 195177 - DNA, 100 bp, Homo sapiens
caggatttaactatcagaatgaagatgaaaaagtcaccttgtctttccctagtactctgcaaacagctgtgattgggttattatacccctgcattgacag

SEQ ID NO: 195178 - DNA, 75 bp, Homo sapiens
tcgtcttctccacggaggagagaatccacattcatctcaatggaaggatcctgccttaagtcaacttatttgttt

SEQ ID NO: 195179 - DNA, 83 bp, Homo sapiens
gcgccagcggccgagcgggcggcttcctggcctgggcgctccggtggcggcggaggcaggtgacagcagggacatgtctcggg

SEQ ID NO: 195180 - DNA, 75 bp, Homo sapiens
ctgggagtccaactcggctgcccacaaggagcctgctcaatgtgaagagacaaggatgaagaccttgatgatgat

SEQ ID NO: 195181 - DNA, 83 bp, Homo sapiens
gggagatcgactgtttgagcccggaagcgcagaagctggtcatcatcagatttgaaatatttaaagtggatacaaaactattt

SEQ ID NO: 195182 - DNA, 98 bp, Homo sapiens
atggaatcactgagatccaagactgaccacatccctgctcatctcacctatgggaagctgctagctctaacagtaactataactacccaatattgcag

SEQ ID NO: 195183 - DNA, 98 bp, Homo sapiens
agctgtactgagctcgagggatcttcccgtctccgcctcctaagcagctgggactacagattggtgctgaagacatggacggcttccaggcagacacg

SEQ ID NO: 195184 - DNA, 74 bp, Homo sapiens
ttggacaggggccgcggggctccaggacggcgcccttagcgacaccatggcaaaatggcaatacctgtgctttg

SEQ ID NO: 195185 - DNA, 149 bp, Homo sapiens
tctttcacggtttgataatgtccttcccgtcagcctggcatttgacaaatgtacagcttgttcttccaaacctcggccttcatcatcgtcatgctcctggccagcctcaacagctgctgcaacccctggatctacatgctgttcacggg

SEQ ID NO: 195186 - DNA, 87 bp, Homo sapiens
cttagctgtgctcgcgctactctctctttctggcctggaggctatccagcgaatggtcctcgtccgaagtgagaatgggcagttgtt

SEQ ID NO: 195187 - DNA, 100 bp, Homo sapiens
tcacgggacaggacaccatgctcaaagccatgttcagcggccgcgtggaggtgctgaccgatgccggaggtaaagagagcgttttcccaaagaaaataac

SEQ ID NO: 195188 - DNA, 100 bp, Homo sapiens
tcttggctgcctcgttgagtcttctctgcatcccagccatcacctggatttacctgttttctgggagcttcgaagatttacaagggtcccgactcttcct

SEQ ID NO: 195189 - DNA, 75 bp, Homo sapiens
ctgggtgcgtggggctgcctcgccgcgtctcgccacggtgtttcagtcacctccagtaacacgggcgtgccagat

SEQ ID NO: 195190 - DNA, 100 bp, Homo sapiens
gagcattcctccggaacctggggctggacgacagcagcaggaggcgtgctcccatctccggtacatgtcccagagcaagcacacggaggcccgggagctc

SEQ ID NO: 195191 - DNA, 74 bp, Homo sapiens
gttgattctgatgacctcattagcatgggatccaacgacagtaagtacagatacttcgttgaaagttgccaccc

SEQ ID NO: 195192 - DNA, 74 bp, Homo sapiens
atgcggcagatcttctcatattcgggaaggagctaaggttggatggcaagcatgtggtgtttggcaaagtgaaa

SEQ ID NO: 195193 - DNA, 100 bp, Homo sapiens
ccgtcccacggtctgtggctacggatcccaggaccctcttcgcgggcgattcgcgtagcctcagtgttctaagaacggaagcatctgggctggatggaat

SEQ ID NO: 195194 - DNA, 75 bp, Homo sapiens
cagacaagtccccagggaatgccacagcatcctccagcacctcaggttttccggacagacttgatcacagccatg

SEQ ID NO: 195195 - DNA, 51 bp, Homo sapiens
ccagattccaaaacttatgtcaagaacatcatttacagcgagcaatttcag

SEQ ID NO: 195196 - DNA, 100 bp, Homo sapiens
cgggaagactcatcggagcgtgtggatttgagccgccgcattttttaaccctagatctcgattcaaaaagcggtgaggtcgatgccacgtcagaccagga

SEQ ID NO: 195197 - DNA, 100 bp, Homo sapiens
ctccaagatgcagttttttgatgctgaggagctcctggtcgatgaagaggatgatgtttttggtgaaggaggatttgacagctaaggatattgaagaaat

SEQ ID NO: 195198 - DNA, 96 bp, Homo sapiens
ttctgcgcggctgcagctcgggacttcggcctgacccagcccccatggcttcagaagaggagccatgtggctagaaatcctcctcacttcagtgct

SEQ ID NO: 195199 - DNA, 100 bp, Homo sapiens
tgttcgacgtgcggcccgaatgccagcgcctcttctaccggggcaagcagaagtccaaggcttgcgagaaggtcatttccgtgggtcaaacggtcatcac

SEQ ID NO: 195200 - DNA, 73 bp, Homo sapiens
atcgggctgaagcgactgagtccgcgatggaggttttcctttggaatatggataaatacaccatgatacggaa

SEQ ID NO: 195201 - DNA, 51 bp, Homo sapiens
gcgatttcctccgcctcttccaaagcgaattcagcagctgaatatcaagac

SEQ ID NO: 195202 - DNA, 100 bp, Homo sapiens
aacatggaaaagctcctattctgattgctacagatgtggcctccagagggctagcaggcctttgctggacagatgaagagtgacttgtttctggatgatt

SEQ ID NO: 195203 - DNA, 82 bp, Homo sapiens
gtgggaatatgtggatcctacagttactctagaattattagatggaatggaggggccctttggtggtggtatggaaaacatg

SEQ ID NO: 195204 - DNA, 75 bp, Homo sapiens
tgtggcaggagagacaacaaagcgctattatcctaaggtccttgtggttgacctcgtcaacagccggttcctcag

SEQ ID NO: 195205 - DNA, 98 bp, Homo sapiens
cgccaatcgcaaggcacctctgagaacttcagatgtctttggtggacttgggaaagaggttgctagaagcagcaagaaaaggccaagatgatgaagtg

SEQ ID NO: 195206 - DNA, 100 bp, Homo sapiens
acagattccaattacttcagaaaacagtactgtgggtttgtctaatacagacttaattcagtgcacaaatgagatgaatgtgaacatcccacagttggca

SEQ ID NO: 195207 - DNA, 100 bp, Homo sapiens
aagatgcagaggaagaggaaagcgaactgctgcaccaaagccagctggagcttcaggaggtgcgtctctcctgccgacagctgcaggtgaaggtggaaga

SEQ ID NO: 195208 - DNA, 100 bp, Homo sapiens
tgcttgttaagaacaagtttggctctgatgagcagcaccagcagtaagagggctccgaccacggcaacccagaggctgaagcaggactaccttcgcatta

SEQ ID NO: 195209 - DNA, 51 bp, Homo sapiens
ctgttcaccatgctgcgggaagagggaagtcgagacaacatgagtgtgatt

SEQ ID NO: 195210 - DNA, 100 bp, Homo sapiens
cagaaatctggaaacatgatacaatctgcaaatggtgtgtagaccacactccaaaactgaaactgtggatggcagccatgaaggaagatcccacagtctc

SEQ ID NO: 195211 - DNA, 82 bp, Homo sapiens
gcatctccgacaccatggtggcccagctcgtgcagcggctccagagaacaccttccaccatgaccacctcagcaagttccca

SEQ ID NO: 195212 - DNA, 77 bp, Homo sapiens
ggaagtgcagctgcctcagttcttagcgcagctgaatgcaatatccatacatctccttctccgggaattcaagtaag

SEQ ID NO: 195213 - DNA, 83 bp, Homo sapiens
cggcgagcgtgtgaggacccaccggcgccctgggaagagaagtcccgagtccaggacatatttggagaagactgtgtaagtgt

SEQ ID NO: 195214 - DNA, 100 bp, Homo sapiens
gtcttcagagagcaactatcctccccaggattttcaagaaagacatgtctgacaaaatgtctagcttcctacatattggagacatttgttctctgtacgc

SEQ ID NO: 195215 - DNA, 100 bp, Homo sapiens
ttcttcgtgaggctgctcttcgagcgaaagccttgagccgggccatgcttctcacatcttacctgcctcctcccttgttgagacatcgtttgaagactca

SEQ ID NO: 195216 - DNA, 80 bp, Homo sapiens
ctacgatgtgatcgccaaccagcctgtcgtgatcgacaacacctgcctagagctggaacgttacctccagagcgagccct

SEQ ID NO: 195217 - DNA, 50 bp, Homo sapiens
attggagccaagaaatgagtataggtgagaagaaatttgtttgtccagaa

SEQ ID NO: 195218 - DNA, 50 bp, Homo sapiens
tgtgcagcatcaaagaggcaggaggtttggtgcacctcgatttggaggaa

SEQ ID NO: 195219 - DNA, 82 bp, Homo sapiens
cgctcggagatgatccagcgcaaagctctacgaactcgacggggaccccaagaggaaggaattcctggatgacttgttcagc

SEQ ID NO: 195220 - DNA, 83 bp, Homo sapiens
gataagagatgaagagacaggccaggtcaggctcaccaagcaggagtgtggccatctggggccgtgtggtatttgccactcag

SEQ ID NO: 195221 - DNA, 75 bp, Homo sapiens
gctggacggctgcttcgacagcgtggccatcctcactgaacccagcgggtgccgcttctccacccgaggcttcca

SEQ ID NO: 195222 - DNA, 100 bp, Homo sapiens
tgaagctgtttatagtagactgaatccacatagagaaagtgatgggatttcaaaaatatcactgcatcctatagaagataatcctattgaagagatttcg

SEQ ID NO: 195223 - DNA, 100 bp, Homo sapiens
gtggatccgctggagcggagccggccgtacgcggtgctgcgagggcagaacctggatgaaggtcaccgtgtccaaagggggcgaccgggacagtgacgac

SEQ ID NO: 195224 - DNA, 90 bp, Homo sapiens
ggttgtggtcctggccaagagctacaatgagcagcgcatcagacagaacgtgcagtgactcgcggggatgtgttcactatgccggaggat

SEQ ID NO: 195225 - DNA, 83 bp, Homo sapiens
cattggtctgcaggacatcactttagatgatgggcgaactttctgaccaagtatacaactacccagagggcctaggagaagtg

SEQ ID NO: 195226 - DNA, 75 bp, Homo sapiens
tggcctacatgaagaagaaccacgaggattgacctcctccagccgccaaatccgcaccaaggtcatggatgtgca

SEQ ID NO: 195227 - DNA, 75 bp, Homo sapiens
cctcccaaggtgctggaattacagtgtcttctgtggcttcagcgtcacctagtgcaggctgccattcaacaaacg

SEQ ID NO: 195228 - DNA, 97 bp, Homo sapiens
tgggcccagtcctcggtgcggcgcggccagcatgaagaggaaccacctcagaatatgaaaccacaatcaggaaacgataagccattatcaaaaacag

SEQ ID NO: 195229 - DNA, 98 bp, Homo sapiens
cagatactttgaagtagaagaagctgatggaagcagttcagttctttaatgtgaccacactccagaaggagctgtatgactttgctaaggaaaatata

SEQ ID NO: 195230 - DNA, 95 bp, Homo sapiens
cgtcggggaggcaagatgatccaccagcggttccatcctacacttgggtgaatggaactctggtgactcattcaaatcatctggaggtggtgaag

SEQ ID NO: 195231 - DNA, 100 bp, Homo sapiens
aggatatacaagggtgtgatccaagctatccagaaatcagatgaaggccacccattcagcttcctgcctgacacagctcacttcaagaagtgcacaatgt

SEQ ID NO: 195232 - DNA, 90 bp, Homo sapiens
gcgactactatgtgggcgagtggaaggacaacgtgaaacacgtccggttccagttgttggcaaaggagaggaagaggaagaggaagatgg

SEQ ID NO: 195233 - DNA, 101 bp, Homo sapiens
gcttcggagcggccggtactgttgaaagcgacaagtggaggcgccgctctagcggccgggactctgaactatggcgatacaaaatcttaccctaatcagtg

SEQ ID NO: 195234 - DNA, 100 bp, Homo sapiens
ttttttttgagatggagtctcactctgtcgcccaggctgactgtgctgtcctgattgttgctgctggtgttggtgaatttgaagctggtatctccaagaa

SEQ ID NO: 195235 - DNA, 100 bp, Homo sapiens
tggcctgggccctctacctttcccttggtgtgctctgggtggcccagatgctactggggcccagggatcatcctgatattgttgattcatttatgcaact

SEQ ID NO: 195236 - DNA, 82 bp, Homo sapiens
ctctctttctggcctggaggctatccagcggcgatgccagtccctccactccagaggagaacgaaaccacgacaaccagcgc

SEQ ID NO: 195237 - DNA, 100 bp, Homo sapiens
gagtagcgagtcggcaacccggaggaaaccacccctactcctaatcccccgactacagaagaggagaaaacggaatctaatcaggaggttgctaacccag

SEQ ID NO: 195238 - DNA, 75 bp, Homo sapiens
gatggacgaggtcctgtacagcatcgccgagaagggttcatagtggcgtcatgcacgcagactcctgcaagttcc

SEQ ID NO: 195239 - DNA, 75 bp, Homo sapiens
cagtgatgccgtgcatgtggaattttcacctgatcatggaaaatgctgagattaacaatatcatcaagattgtgg

SEQ ID NO: 195240 - DNA, 100 bp, Homo sapiens
ctcggccggcaaccgagggacccgcgtccaggtcacccgtgtgaacagaaagtgagaggttgtagcacattgccaccgtccagatctcgggtcatctcaa

SEQ ID NO: 195241 - DNA, 50 bp, Homo sapiens
caggaagctgcggctgagtcggattttggcattagagaagctcggtgctg

SEQ ID NO: 195242 - DNA, 80 bp, Homo sapiens
gcccagccgggaactccccatcgcgttttgccagcgataatacgcctcagatatgaaaaacagtagctccgtatcgaata

SEQ ID NO: 195243 - DNA, 100 bp, Homo sapiens
ttccggagcttctcagaagacagagggttttcttttgagccgcccatgccaacttccgttcccatcaaccatgcagcagcacagccccatgtcctcccag

SEQ ID NO: 195244 - DNA, 100 bp, Homo sapiens
acgtgcagacatctacaaccttcgatctcctgacgagaacgtcaaggtcgtgggaaataaaaggcagttctacacagactgcagcaacggttgcatctgc

SEQ ID NO: 195245 - DNA, 75 bp, Homo sapiens
aggtctctggagacatcttcagcagatggtcatcatgggccagtgctactacaacgagaccatcggcttcttcta

SEQ ID NO: 195246 - DNA, 100 bp, Homo sapiens
caccctccccgcccgacctgcgagcgccgcccgggcatgcgaagccgtccctccccggatgatgaaacatgcttggaataattataaaggttatgcctgg

SEQ ID NO: 195247 - DNA, 82 bp, Homo sapiens
ttagctgtgctcgcgctactctctctttctggcctggaggctatccagccacacggaccctgactactcggctgcctatgtc

SEQ ID NO: 195248 - DNA, 87 bp, Homo sapiens
gagttgcttttggaatgaatttggaatcttcccttgaagaggtttgtgggggagagaaaccttatttgtctccagacattctagagg

SEQ ID NO: 195249 - DNA, 100 bp, Homo sapiens
gcccgaggcgaggaggagcgctggcgtgaagctgtggtctaccaatctagacaactcagtggcaagcattgaggcaaaggctaatgtgtgctgtgttaaa

SEQ ID NO: 195250 - DNA, 88 bp, Homo sapiens
ccgacaaaggtcgcctttgctactaccgcgactggctgctgcggcgcgaggctctactgaagaaacacgaagctttgatgtcagatct

SEQ ID NO: 195251 - DNA, 100 bp, Homo sapiens
cccctacacattggcaccagctacatcaatccttgagtatcctattgaacctagtggtgtattagatccaacttagaaataatgtttcattcaagataag

SEQ ID NO: 195252 - DNA, 82 bp, Homo sapiens
gcagacatcagccacgcatctgaccttgttggttatgaaaactacaattactatggcgcccagaacaccagtgtcaccacag

SEQ ID NO: 195253 - DNA, 50 bp, Homo sapiens
atgtgttttgggccacagcacagcagctacaaggctttggccgaccaagt

SEQ ID NO: 195254 - DNA, 90 bp, Homo sapiens
ccctaaaggatcaaccctctgcatacagtaaactctgcttatgataatgtcaacaaagttcgagtagctatcaagaaaatcagccccttt

SEQ ID NO: 195255 - DNA, 75 bp, Homo sapiens
cccggagctgcctggaggcggccgcactcggacccctttgctgatgcaagtaagggtgatgacctgcttcctgct

SEQ ID NO: 195256 - DNA, 110 bp, Homo sapiens
tgtggtcgacctgacttcttttgagcagttggcactacccgtcttgaggaatctcggggacctgcttcacaagttacagttcgtcctgacatatgtggctccttggcaga

SEQ ID NO: 195257 - DNA, 100 bp, Homo sapiens
caggagctggaaggagccctgccaggttcagagctgccaaattttgaacagaaaatgctgaaaaaaggagggtcatggattcaagaaataaatgttgctg

SEQ ID NO: 195258 - DNA, 100 bp, Homo sapiens
atgatcgctcctccctgcggaccctggggtcagggtttccaggcctgaggtgcccgccctggccccaggagaatgaaccagccgcagaggatggcgcctg

SEQ ID NO: 195259 - DNA, 75 bp, Homo sapiens
ttctaccatttgatgatgataatgtaatggctttatacaagaagattatggaggagaacatttgcctgcactggg

SEQ ID NO: 195260 - DNA, 103 bp, Homo sapiens
accgaagttggaagtgtctcttagcagcgcgcggagaagaacggggagccagaataccctctaccatctgctttggtcagggtgccgctcgaggatttaaaag

SEQ ID NO: 195261 - DNA, 98 bp, Homo sapiens
tgcgacagcgggtagcacaggcctttcgggagggagagaatacccagtctgcagatctccaggggagcccaccagcctagtcaacatggcctcggaag

SEQ ID NO: 195262 - DNA, 100 bp, Homo sapiens
gtggaggagctgtgggtggaagagccaacatgccatctcccagcagtatcaaaggtactgccagctttccgagagagccccagtgggagattaatgcggc

SEQ ID NO: 195263 - DNA, 75 bp, Homo sapiens
tcggagtcatcctcggctccctgctgggcgggaccctggtctccgcgtacggatgaaggtcaccgtgtccaaagg

SEQ ID NO: 195264 - DNA, 98 bp, Homo sapiens
aacaaaatgtcaacaaattgatggactgcagaatccgcaacggtgagaatggaatacattttctcctaaacagagatgggaaacgaaggggtgatgcc

SEQ ID NO: 195265 - DNA, 100 bp, Homo sapiens
gacgaagagctgcagctcctcctgtgcgggtgtggatgaggtcaccattgtcaacattttgaccaaccgcagcaatgcacagagacaggatattgccttc

SEQ ID NO: 195266 - DNA, 100 bp, Homo sapiens
aaagaggactggtgatctacgtgtgctttttcaagggagctgataaagaacttcttcccaaaatgggttgggataattcttcactattccacccttgcca

SEQ ID NO: 195267 - DNA, 100 bp, Homo sapiens
cccgaagacgccgaggaggcagagcaccgcggcgccgagcgcagacccgagagagtccagtgtcgtgctgctgcaggagcacccctgcctggtggagctg

SEQ ID NO: 195268 - DNA, 88 bp, Homo sapiens
attgacaagaaatgccccttcactggtaatgtgtccattcgagggcggatcctctctggcgcggatcaagaagatcatgcagacggac

SEQ ID NO: 195269 - DNA, 98 bp, Homo sapiens
tgtttcagacaactcaaggccaacagatcgtcagtatttaaacagatcacatcatgcgtgagtacaagctagtggtccttggttcaggaggcgttggg

SEQ ID NO: 195270 - DNA, 96 bp, Homo sapiens
ggatgcggccaactccaatgggcctttccagcccgtggtccttctccatattcgagacttcccaagtaagaagcggaagaggagccgctggaacca

SEQ ID NO: 195271 - DNA, 96 bp, Homo sapiens
ttgtctacgatctctccacctcagggtctggctcaggaaactttgagggaaattttgagtcactggaccttgcggaatttgctaagaagcagccat

SEQ ID NO: 195272 - DNA, 141 bp, Homo sapiens
ccggccaaccgcagccaggagaaggagttcgtgcaggcgtacgaggatgtgctggagcggtacaaagttttactttgaactcagaaggctgtaatagaagaccaggtggccgtcgccatagcaaaggtaatccagagagtt

SEQ ID NO: 195273 - DNA, 75 bp, Homo sapiens
tggtgccgtaggcatggcttgtgctattagtatcttactgaaggaatgtatcctgtcaggtataatgtcagtgaa

SEQ ID NO: 195274 - DNA, 88 bp, Homo sapiens
gagcactgttaaagaactgtgcagaaactgttcatacttggtgcgctgtggactcttgtgataattaaccaagagtagctctatttgt

SEQ ID NO: 195275 - DNA, 82 bp, Homo sapiens
tcgatggctgccgcggctacgctgaggctctccgctcaggttgttggcatggaggggaagatgaggcagcaccttctaagca

SEQ ID NO: 195276 - DNA, 89 bp, Homo sapiens
ccagttattgaatatcaagaggaggagttgttgccagagtcctggtggaggacgatgagatcatgcagggattcatcagggctttcagg

SEQ ID NO: 195277 - DNA, 72 bp, Homo sapiens
ttttacgtctagatttccatgcccatggaaggttccataccccatgaagtgcctcagatattaattaataga

SEQ ID NO: 195278 - DNA, 75 bp, Homo sapiens
cgggagttgaagagggctgcaaggtggagtataccctgggagaggagtcggaagcccctggccagagggcactcc

SEQ ID NO: 195279 - DNA, 96 bp, Homo sapiens
gacttcacttttgagtgcaactgccttccaggtgctgggactctggtgcccccaaccctgggcatcctcaggctttgaggagaatacacaggattt

SEQ ID NO: 195280 - DNA, 50 bp, Homo sapiens
cttgccccgggagcccgcgagggatgctccagaccttgtatgattacttc

SEQ ID NO: 195281 - DNA, 75 bp, Homo sapiens
gcgatggactattccctggctgcagccctcactcttcatggtcactgatgccagaagtgggtggagaactgtagg

SEQ ID NO: 195282 - DNA, 98 bp, Homo sapiens
tcactgcctgcgcagctccggccgcctggctccccatactagtcgccggagatcatgaatcagacagataaaaatcaacaagaaatcccatcatacct

SEQ ID NO: 195283 - DNA, 98 bp, Homo sapiens
cagcggggacgcgaggacccgggctgggctttcctcacccggagctaatgtcaaaccccgaaattccacaccacctagtttggcaagaaatcctgccc

SEQ ID NO: 195284 - DNA, 74 bp, Homo sapiens
cagacccggacgacccccattgctgagccagcggagctgcttgagaacggagaccaacctgggctgaagaaaga

SEQ ID NO: 195285 - DNA, 90 bp, Homo sapiens
cttgggatctgcctcatcatggagctcattggtggcgtggtggccttgaccttccggaaccaggacgagattgaggagctgcgggccgag

SEQ ID NO: 195286 - DNA, 75 bp, Homo sapiens
agcaactaactgatgctgacaccaaagaggcatttcatccttcatgaagccattcaggattttgaattgcatatg

SEQ ID NO: 195287 - DNA, 100 bp, Homo sapiens
cctcctaagtagctgggaccacaggtgtcagttgtacccgaggcgttctcagcagcagcaagtacctgtggtggatttccaggctgaactgaggcaggca

SEQ ID NO: 195288 - DNA, 86 bp, Homo sapiens
cagaaagaaaaaagaagaagtccccgagttcaccaaaattcagacattgtgcctcattgcattcttgggcgtcttcttaatcacgc

SEQ ID NO: 195289 - DNA, 50 bp, Homo sapiens
aagtccagatctccatctccaaaaagaagtggtctgcaagaagaatctgg

SEQ ID NO: 195290 - DNA, 75 bp, Homo sapiens
tgcagccatgatctccttaacggacacgcagaataactgataccgtgcttccagaagatttttctaacagtgttt

SEQ ID NO: 195291 - DNA, 96 bp, Homo sapiens
ttcagtgcattcatgaagcatctgaaaaagctgtggaaggctctggataaggaccagtacctgcccaggaaactgtaccagtactggaacaccaag

SEQ ID NO: 195292 - DNA, 96 bp, Homo sapiens
cttgggactgggctcgatttgagcatctacacgggcgacagcttcgtcaccccttgatggggcagcctcttcccctcatcacagactatgctgttc

SEQ ID NO: 195293 - DNA, 100 bp, Homo sapiens
gaaggttcctgagagctatgtagagacttcagccagtggaggtacagtatctggagtccatctttcaccatcttctcctgagattgtactggaccgtgac

SEQ ID NO: 195294 - DNA, 82 bp, Homo sapiens
gacagaagcagatggattcgtccttttagcttctttgtgatattggccacagtgaagaaaaactgggctttcactatgagga

SEQ ID NO: 195295 - DNA, 75 bp, Homo sapiens
tgaagacagagggctctgatctgtgcgacagaatcgcctcaggcatggcgtacgtggagcggatgaactacgtcc

SEQ ID NO: 195296 - DNA, 76 bp, Homo sapiens
ggaagttcaagatggccgccgcggagacccagtcgctacgggagcagccagaaaacttcgtgaatactttcattca

SEQ ID NO: 195297 - DNA, 96 bp, Homo sapiens
ttgagatgatccttacggaaaaggaacagattgttcctaaaccagaagaggaggttgcccagaagaaaaaggaactggcgctgaagaccctgggga

SEQ ID NO: 195298 - DNA, 95 bp, Homo sapiens
atcagtttgacttcatgggcctcagaaacaccacagaaatcgtgacaacgtctgcagcttccattgaagattgacatcattaaacatccaaatga

SEQ ID NO: 195299 - DNA, 98 bp, Homo sapiens
atgctgctggcagcgagtaaagtcttggacagacttaaaccagttataggggtaaacactgatccagaacggaacatcatttacagcgagcaatttca

SEQ ID NO: 195300 - DNA, 126 bp, Homo sapiens
agagctaaatgggggcctctccagggagtgctctgttcacggctccatcgctgttaatccaggatgagaagactgataaaagaagaagctagctgaacagctgtaaaatgcccaaatctgggttca

SEQ ID NO: 195301 - DNA, 74 bp, Homo sapiens
aaaatacttgcaaatacgtttataacatacactactcagacagagatggaatttcaccgtgttgcctaggctgg

SEQ ID NO: 195302 - DNA, 97 bp, Homo sapiens
gtggctttggatcagattattcacgaagctctagaaaggtcgatggccaggtggtcttcataaactatactgccttgtgatgcctccctagaaatga

SEQ ID NO: 195303 - DNA, 82 bp, Homo sapiens
atcacacgcataatggatgaaaggaaccgacagatgatagaggtactgacaacaactgactctcagaaactgctacaccagc

SEQ ID NO: 195304 - DNA, 96 bp, Homo sapiens
tccctaccctctgatgcaccaccagatgccaccacctcatccaccccagccagcaaattccggaccccatctgagctccacaatgataacttctcc

SEQ ID NO: 195305 - DNA, 90 bp, Homo sapiens
ccgcgcgcccgcgccctccgcgcgacgccaggctccttcgagagcagtggatccgggccaagtacgagcgacaggagttcatctacccgg

SEQ ID NO: 195306 - DNA, 51 bp, Homo sapiens
aaacgcggcgcggccggctgccggaaaactggattatggacagaacttgga

SEQ ID NO: 195307 - DNA, 82 bp, Homo sapiens
caaccattgacgccatgtcgggttattcgagtgaccgagaccgcggccgggaccgaggatataattggtgattacaactttc

SEQ ID NO: 195308 - DNA, 75 bp, Homo sapiens
cctgaaccagctgtgttttattatgcacagtcgaggggagctgcagcgggagtcagacttcatggccagtgtaga

SEQ ID NO: 195309 - DNA, 98 bp, Homo sapiens
aagtctataaagaacacgctcaggagggagaaatgcctgctgcctctccagttggctttggaatccaagaatgtgaagctggcccaacatgctttggc

SEQ ID NO: 195310 - DNA, 75 bp, Homo sapiens
ctggagtgtacaagtccgcggagcagggggaggtgatgctttgctgactaatgttgaccagattgtccaggaaac

SEQ ID NO: 195311 - DNA, 100 bp, Homo sapiens
ccagagaatcaagctatccaaatgcgattagttgatgtggcctgcaagacttaattcagtgcacaaatgagatgaatgtgaacatcccacagttggcaga

SEQ ID NO: 195312 - DNA, 124 bp, Homo sapiens
ttgagaccaaaggaagatgagaactcttggtttaacttatttgtgattcatcagaacaggtactaggttttgacaagcttgcatcatgcgtgagtataagctagtcgttcttggctcaggaggc

SEQ ID NO: 195313 - DNA, 97 bp, Homo sapiens
gaccttaaaatacccgcaacagccccttcgtcccaattggttaccacagagaagcgcttcctcaaagacagtttgtacaatgaaggaatcctaattg

SEQ ID NO: 195314 - DNA, 82 bp, Homo sapiens
cgcgccatcctgcaaaaccacaccgacttcaaggacaagggacccgagctgatccagaaagccaacggtctccacggcttca

SEQ ID NO: 195315 - DNA, 95 bp, Homo sapiens
aggagttcatctacccggagaagcaggagccctactcggcagccacacccactcgcccgggtctatggccacggtcggagagtggtcctgtgtgc

SEQ ID NO: 195316 - DNA, 101 bp, Homo sapiens
acccggaccctggaggtgcagagcgactactccaggaattacatgaatgacagtcttcgaaccaatgtgtttgttcgatttcaaccagagactatagcatg

SEQ ID NO: 195317 - DNA, 83 bp, Homo sapiens
cccaactcagccttcctgcataccctggaccagcagaaacctagagtggctgcctctaagaatcaaacttcactcttgggaga

SEQ ID NO: 195318 - DNA, 87 bp, Homo sapiens
ctgagcggcgagtttccgatttaaagctgagctgcgaggaaaatggcggcgggagatcctaattatctcatggctaatgaacgcatg

SEQ ID NO: 195319 - DNA, 82 bp, Homo sapiens
tggaatcagaaagcactacgctaaacggtactcacccttcttgcgatgatgtgagatgataaaatgcctacatgatgagatg

SEQ ID NO: 195320 - DNA, 105 bp, Homo sapiens
cagaccaggagcttatcaagatacaattgaataatcaaagggtggagcctggacaaaatgtttacttgtctggcctgtcccctcagttcccaggtgccatgagga

SEQ ID NO: 195321 - DNA, 75 bp, Homo sapiens
cagaaatctggtgactggaatccagcttaaccccaacaaccatctacagttagttgatactactgtggagttggc

SEQ ID NO: 195322 - DNA, 101 bp, Homo sapiens
tcagaacatgggtccgtggtcgtttgtttctccaaggtttgaaaagcagctggcctgcaaggaatgtatcctgtcaggtataatgtcagtgaatggcaaga

SEQ ID NO: 195323 - DNA, 75 bp, Homo sapiens
gcgcaagaagaaccaggccttgctccgcaggtaccagcaaaactggttgaacagcggatgaagatatggaattca

SEQ ID NO: 195324 - DNA, 78 bp, Homo sapiens
ggaagaactggtgagccaagggatcatgccgcgagtatgctgctgctgttccgctttgcgtcctcgctacaaacgcct

SEQ ID NO: 195325 - DNA, 100 bp, Homo sapiens
gaacctcagcaccgagaacatctactctttcaactacaccagccagcccgaccagacctgcctagagctggaacgttacctccagagcgagccctgctat

SEQ ID NO: 195326 - DNA, 90 bp, Homo sapiens
agacctctgtttggggagacgtccgccaagtattctaccttgtaaatactgttatttgtatatactgtaaatgatgacatcggtgggcac

SEQ ID NO: 195327 - DNA, 83 bp, Homo sapiens
ggaaattaattgctatcaatgcgaatgatcctgaagcctcaaagtttcatgttgtcgagatgtccacagaaggaggatttggt

SEQ ID NO: 195328 - DNA, 98 bp, Homo sapiens
tgaaggtttcctggagaaaaacagagacaccgtctatgacatgctggttgaaatcctgagagcaagcaagagtgcttgtgcacagagctcgaaaacta

SEQ ID NO: 195329 - DNA, 90 bp, Homo sapiens
tgcggccagtcgccactgcttgttctcaggcgctgtggtctcaccttccactggggcaacaatgggccatttccagcagggacggcgcag

SEQ ID NO: 195330 - DNA, 100 bp, Homo sapiens
ctgggcctgcagaggctccctgacttgtgtgaagaagaggagaagctttccttggaggaggctgtgctggatgcttttctggatgatggcttccttgtcc

SEQ ID NO: 195331 - DNA, 101 bp, Homo sapiens
tcagtgttaaaggaacctctacaacgaaggtgaagccacggaagataagatggacgggacagaaggcagtgccgggcagcccggccccgctgagcgatccc

SEQ ID NO: 195332 - DNA, 100 bp, Homo sapiens
ggccgtggacacctgtgtcagcatgtgggacctggttctctccatcgccttgtctgtggggtgcactgagaagtgttgggcatttttgcaagaatcttct

SEQ ID NO: 195333 - DNA, 75 bp, Homo sapiens
gggacggtgtttgccatggaccccaggaatggttacatggagccccactaccgacaaggtggagcagacacctcg

SEQ ID NO: 195334 - DNA, 90 bp, Homo sapiens
caagtgctggccagtgagcccatcccgttctctgatttgcagcaggaagagaagttaaacttctagagaaacctaacagacaatatccac

SEQ ID NO: 195335 - DNA, 75 bp, Homo sapiens
ggcatttccgagagaagctgcaggctgccaatgcggaggacatcaaggggaaattgagggctttcgccttagcgc

SEQ ID NO: 195336 - DNA, 100 bp, Homo sapiens
acccaacttttcttagcctcagtcctggaatgccctttctataagctgctacactgaagggaaaaacctgaggaagcccctgaccttcttgaataacctg

SEQ ID NO: 195337 - DNA, 50 bp, Homo sapiens
cgcgccgcccggcagcctcggcaggctggggccgggctggcggggccctc

SEQ ID NO: 195338 - DNA, 49 bp, Homo sapiens
aggattccaagtaactcttatttgagaccccaggggcagggcagaagca

SEQ ID NO: 195339 - DNA, 88 bp, Homo sapiens
tcctggagaggcagagcctgtcggaagaggtggaccggctgcggacccaggacacattcagctaacgtattttagcaggtggagtgag

SEQ ID NO: 195340 - DNA, 95 bp, Homo sapiens
gccactctcctgtgcctgccagaagagacagagcttgaggagagcttgaggagagcaggaaagaacaccttccaccatgaccacctcagcaagtt

SEQ ID NO: 195341 - DNA, 100 bp, Homo sapiens
ctgctgctgctgcccgcgtccgaggctcgcgggcggcgggcccgggttaatacaatctgttggaatgacactggagaatatattttatctggctcagatg

SEQ ID NO: 195342 - DNA, 100 bp, Homo sapiens
aagcatgggattttttaccaaggaagaatggttaaagggaatgacttcattacaatgatttgtcattaattcggaagaacagaatggctctctttcaaca

SEQ ID NO: 195343 - DNA, 74 bp, Homo sapiens
tcgtcaccccagacaacatgtgcatggggaggaccagtcgtggaactgtggctgcaccatctgtcttcatcttc

SEQ ID NO: 195344 - DNA, 90 bp, Homo sapiens
ttcaagtactacagcttcttcgatttggatcccaaggcagccagataagctggtggtggtatggacccgtcggaaccgacgcatctgctc

SEQ ID NO: 195345 - DNA, 90 bp, Homo sapiens
aaaatggcgaagatcgccaagactcacgaaggtgaactcaaggttagtcataagcattttgaagaagctttcaagaaagtaagatcatct

SEQ ID NO: 195346 - DNA, 100 bp, Homo sapiens
attgacccttatttatccagaagattgatcatcatatgggtttttgtgaagtgtggatatgcaggctctaactttccagaacacatcttcccagctttgg

SEQ ID NO: 195347 - DNA, 100 bp, Homo sapiens
cagcccgagattctgctgccagttcatcacctccgttaccgcgctctatgacctgtcatcagccttcaaatgtttatctggtgtgactgtattatgccct

SEQ ID NO: 195348 - DNA, 90 bp, Homo sapiens
atgcagaggttccaagaccaattccccgtgtttgagaagctgcagctgctcaaccctgaaatagaagcagaacaaatattaatgtcgccc

SEQ ID NO: 195349 - DNA, 80 bp, Homo sapiens
tggtgctggtcatcaatgttactcaggtagagcggacaaggcaaaatctcagcaagttcggacctctagtacaataaggc

SEQ ID NO: 195350 - DNA, 82 bp, Homo sapiens
ggcggattgaagagtctgccattgatgaggaatttttcacagacaacctatgggacacactcccttgctcatggcaggaagc

SEQ ID NO: 195351 - DNA, 75 bp, Homo sapiens
tctatgtctgcacagggccactcttcctgcccagaaaaatggctacaaacttcctagcacatgagaagatctggt

SEQ ID NO: 195352 - DNA, 83 bp, Homo sapiens
gtcacgattatgggcccacaccttcctccaggttaaatgggccagggaaaactatcaccataacattggctcaccatattgct

SEQ ID NO: 195353 - DNA, 51 bp, Homo sapiens
ggaagagtgtgactgtggtactccaaagattgaagataaaactttccaagt

SEQ ID NO: 195354 - DNA, 89 bp, Homo sapiens
tacaagctcacaatcaccattacaagcatttaggcctgtctcctccctcctacacatttccagctcctgctgcagttattcctacagaa

SEQ ID NO: 195355 - DNA, 100 bp, Homo sapiens
ggatcctcagggcgctctcccagcaaagcagtggccgcccgggcggcgggatccactgtccggcagaggcatgttatgttacccagagaactttccaaac

SEQ ID NO: 195356 - DNA, 73 bp, Homo sapiens
tcaactatcctggttttaatatatctactcccagaggaattccagacgttctgtacagagtaatgagatgtgt

SEQ ID NO: 195357 - DNA, 75 bp, Homo sapiens
cggggtccgagcggggctctgtggctgctcctggctctgcgcaccgctactgatgcaaatgtgaagaatgaaagt

SEQ ID NO: 195358 - DNA, 75 bp, Homo sapiens
cgggagatcccaggcggtgacagagtggagccatggctagagatgatgattattctccaccgtctaagagaccaa

SEQ ID NO: 195359 - DNA, 100 bp, Homo sapiens
cccgccgcccccgccgccggggacatgtctaaccccggaggccggaggaacgggcccgtcaagctgcgcctgacagattgcagagggaatggcatacatc

SEQ ID NO: 195360 - DNA, 82 bp, Homo sapiens
gtcgactgagatctgatgatatttacaaccaggttactcaaatgagtcgtccagacttgattctctttctgatgaaatacct

SEQ ID NO: 195361 - DNA, 101 bp, Homo sapiens
acatgattgcctaaatcagccaaacacaggctctagaggacaaaatcccagtccttggcacaaactcaggaaatggaagccggagtctgttttttgtgggg

SEQ ID NO: 195362 - DNA, 75 bp, Homo sapiens
ggttgctgcccgtcagtctcgaaagggatgtccaaaagaagatatactggtcacactgaatgacctgattaaaaa

SEQ ID NO: 195363 - DNA, 100 bp, Homo sapiens
ctttgacctccaagctgttttaaatctagtagataagccagttcagaaataccacactattaatgggcataattgtgaagtgaaaaaggccctttctaaa

SEQ ID NO: 195364 - DNA, 82 bp, Homo sapiens
caaaagttcatctccttctgcatccttaactgagaatgagttggaatcaactggactcggccttagtagtagtagactaaga

SEQ ID NO: 195365 - DNA, 75 bp, Homo sapiens
gaaattgaaaagtaccaagaagtggaagaagaccaagacccatcatgccccagcaagaagtctatgtgccccagg

SEQ ID NO: 195366 - DNA, 74 bp, Homo sapiens
tgtactggactgcatcaggccgcgtctcctcagggtgaaagaaaagatgttgtcccggttaagagtagtttcca

SEQ ID NO: 195367 - DNA, 75 bp, Homo sapiens
tcgcagtggtcgcttcttctccttggttccaagggggcaaaaaagaagaacttattggaattgcatacaacagac

SEQ ID NO: 195368 - DNA, 100 bp, Homo sapiens
tgatcctcccaccttagcctcctaagtagctgggaccacagtaatgttgcaggtcagtggaatccagtttttatgcagcctctgccagaggaagagattg

SEQ ID NO: 195369 - DNA, 50 bp, Homo sapiens
attcaataacagttgcatttgaaaacaagcactacctggcagcaccatct

SEQ ID NO: 195370 - DNA, 100 bp, Homo sapiens
tagatggccagctttcccccgagggtcaacgagaaagagatcgagttgccatggagaaaattccagtgtcagcattcttgctccttgtggccctctccta

SEQ ID NO: 195371 - DNA, 87 bp, Homo sapiens
acaagtggaggcgccgctctagcggccgggactctgaactatggcggttctggcctataggaacaagacattttcagtaatggaaga

SEQ ID NO: 195372 - DNA, 113 bp, Homo sapiens
attttcagaggccggaaaatgccctcaaacgcgccaacgatctttaatctcatgaagtacgacagctacagccgcttcttaaagtctgacttgtttttaaaacacaagcgaac

SEQ ID NO: 195373 - DNA, 75 bp, Homo sapiens
tgggactgcgtcctggtcaaccccaggaactcacagagtggattccggtctgcagcccagagggcaccttctgca

SEQ ID NO: 195374 - DNA, 78 bp, Homo sapiens
tttgactttgagacatttgatgtggatgaatatgaacattatgaggttttaaatgcacagagagcaggatacaaggca

SEQ ID NO: 195375 - DNA, 88 bp, Homo sapiens
ctccagaaaaatgcttatttggggcaatgctaaatattgcggcagttttatgtgcaaattgagcatgacccagaattagaaaaagaaa

SEQ ID NO: 195376 - DNA, 83 bp, Homo sapiens
tgaagcgtgaggccggcatcgtctttccgtcctctgaggcgacggccgcggctgcacagttccagggtctccctccactgctg

SEQ ID NO: 195377 - DNA, 75 bp, Homo sapiens
cccagcccccgcccgcagcctggacgacatcgacctgtccgccctgcgggctactgcagcactggggtgtcagtt

SEQ ID NO: 195378 - DNA, 100 bp, Homo sapiens
ttggcctgagggcgtgtgatgggaacgtggatcatgcggccactcatattaccaaccgcagagagggccatgtttatgagtggactaagtgaaagcaaac

SEQ ID NO: 195379 - DNA, 75 bp, Homo sapiens
tgccattttggcagcagcttgtttgctgcagttgggagaaactgcctacatccgggttaaagttgatgggcccag

SEQ ID NO: 195380 - DNA, 100 bp, Homo sapiens
tcttccagacacgggatttgtcggtgaacaacgcagagctgatgcagacatgtggcgacatgtctaagaatgtgagccagtcacagatggcaaaattgaa

SEQ ID NO: 195381 - DNA, 87 bp, Homo sapiens
atctgctctgagcctgtggcagcctcccctgcaccggcaggtgagaggcggatctacagacataggcaaaaagggcagctagctgta

SEQ ID NO: 195382 - DNA, 88 bp, Homo sapiens
gagtgtatgacgaacgaaaggaagaaagcatctccttaatgaaagaaacagctgtccgcaggcttgtccaaaaggaaacatcggaatg

SEQ ID NO: 195383 - DNA, 95 bp, Homo sapiens
tcccttacgtccccgagtgcggcagtaccgcctccttcccagccgcgcggcttcctccagacctctcggcgcggttcaaaaggtgatgacctatc

SEQ ID NO: 195384 - DNA, 100 bp, Homo sapiens
ccagcactttaagggctgccctgcggacctagtggtgtgtgacggggctcctgatgggtaagaaggtggatggctctgtaaatgcctatgccataaatgt

SEQ ID NO: 195385 - DNA, 98 bp, Homo sapiens
gagcggcggcgaacatgcgcttttgacacattggaggctcaggctgcacgaagaaaaggttattaaagatagacgtcatcatctcaagacctacccaa

SEQ ID NO: 195386 - DNA, 98 bp, Homo sapiens
attccaaaccgatacttaggccagcccagcccctttacacacccacacctcctcagaccaggtctacttccccagcaggacagcatcattctcctata

SEQ ID NO: 195387 - DNA, 100 bp, Homo sapiens
tgcagaaataccagtccccagtgagggtgtacaaatacccctttgaattaattatggctgcttctgccaccatttctccacacaggagaagaccccccag

SEQ ID NO: 195388 - DNA, 90 bp, Homo sapiens
ctctgtccccggactgggagtttgaccgcgttgacgacggctcgcagaggagtgcatccgccccaacccttttccccctcgtctcctgtg

SEQ ID NO: 195389 - DNA, 90 bp, Homo sapiens
aaacggcctcgtagagtcaacagaccagcagaagtagacactgtggatgcattccagggtcggcagaaggattgtgttattgttacgtgt

SEQ ID NO: 195390 - DNA, 100 bp, Homo sapiens
ccgcagaacctccacagtcaagaggacgcattgactgtgccggaatcctgaaactcagaaactccgacattgaacttcggaaaggagagacggacatcgg

SEQ ID NO: 195391 - DNA, 88 bp, Homo sapiens
tacttttgaaggtgcaagatactatataaaggtctcgctctgttactcaggctggagtgcagtggcacactgcagcctcaacctcccg

SEQ ID NO: 195392 - DNA, 97 bp, Homo sapiens
agacttctctgtgagctcttcattagggcaccaaagcgaagtgggaagagatcagtggtgtggatgaacattacacacccatcaggacttaccaggt

SEQ ID NO: 195393 - DNA, 98 bp, Homo sapiens
ctcctccgaggtggcgcggcacctgcagtacttcatcctcctcatcatcacggacggggtcatcagtgacatggaggagacacggcatgccgtggtgc

SEQ ID NO: 195394 - DNA, 73 bp, Homo sapiens
gagtgaggaaaaacgagccaaacttcgtgaaattgaggtctccagaaatgctttgggttcatctttcattgct

SEQ ID NO: 195395 - DNA, 95 bp, Homo sapiens
gtgctcagacagtgcaccgctgtcccatctaaagaaacctgtcaggaatacgagcttctgggaagcgcctcttggacgcgtgtgaccgatgccca

SEQ ID NO: 195396 - DNA, 74 bp, Homo sapiens
ctgcctccgaagaaacctgctcctccacggcctaaaccgcccagcggtgaaaggtgtagcagtcactcggccta

SEQ ID NO: 195397 - DNA, 75 bp, Homo sapiens
cgttagcgtgagtgatcactctcaatcccggcatggcggacaccgacctgttcatggaatgtgaggaggaggagt

SEQ ID NO: 195398 - DNA, 75 bp, Homo sapiens
cagaagtgggattgagacattctcacctcctcctccgcctccaaagtcgcggaaaagtgggttgaagttgcctca

SEQ ID NO: 195399 - DNA, 100 bp, Homo sapiens
acttattcatcagtttgttgtgcttgtcaagatcagatacacctgtaagatcggaatggagtgaacttcaaagtcaggaacgatctgaacaaaaaaagtc

SEQ ID NO: 195400 - DNA, 74 bp, Homo sapiens
gccgctgattgctatcacttctgcagaatccagtggtgacaaagcataaatcatggacaccagagaataaggtg

SEQ ID NO: 195401 - DNA, 50 bp, Homo sapiens
ctcagctgctgactgatgaggcactggtgtctgtgacctttgaggatgtg

SEQ ID NO: 195402 - DNA, 82 bp, Homo sapiens
ccgctccttgggctacgcgtatgtgaacttccagcagccggcggacgggcgaactttctgaccaagtatacaactacccaga

SEQ ID NO: 195403 - DNA, 97 bp, Homo sapiens
tttggatatccctagaacgttgagggcacgagtcgggtcctgagaccaggtgtggacatgatcagtaaaatgctgaagatgcagatgttggaggatg

SEQ ID NO: 195404 - DNA, 100 bp, Homo sapiens
ggtccctcagcaaagatggtacaaaagagtctttggaggatgcggctttgatggaaaaaatgcctgtcttaaaggctgaagcgtcacattataactctga

SEQ ID NO: 195405 - DNA, 83 bp, Homo sapiens
caagccctggtgccaggtgtccatccccgtgctgagggttccgagtctgaggaagacataaccttgtgcctgcctgcccacct

SEQ ID NO: 195406 - DNA, 95 bp, Homo sapiens
gtgcacccccagtgggtgctcacagctgcccattgcctaaagaacggttggattgcagccctgtctacactggataatcattccctggccatatc

SEQ ID NO: 195407 - DNA, 100 bp, Homo sapiens
ctcccattcacaaggcagctcgctctgggagcctagaatgcatcagtgcccttgtggcgaatggggctcacgtcgaggaaggccgtgctgctttaataac

SEQ ID NO: 195408 - DNA, 97 bp, Homo sapiens
cggagtcggggacccaggagtttcctgtgtccagcgctgccggagccgcctgaggtttgtgaaatggctgctgacatttctgaatccagcggggctg

SEQ ID NO: 195409 - DNA, 97 bp, Homo sapiens
gctaaagcagcgtgcgttcagccctgggtgtttgagaacaaagataagattgtgatcatcatggaatatgccagcaaaggggagctgtacgattaca

SEQ ID NO: 195410 - DNA, 74 bp, Homo sapiens
gctacctgtgaacagtacgcagtgaatgttggcattcttagcagggttacagaatctgttaagaatattgtgcc

SEQ ID NO: 195411 - DNA, 80 bp, Homo sapiens
attccaagtaactcttatttgctatgcaaaagcagccttttgtttagaggaactaatgatgactaatccacacaaccact

SEQ ID NO: 195412 - DNA, 100 bp, Homo sapiens
gcggagcggacggattcgattcaacggggttccggaccgcgctgcgctatggagcagtctcggaagggtgctgacctggaccgggagaagaaggctgccg

SEQ ID NO: 195413 - DNA, 102 bp, Homo sapiens
cagaagtcgcgtgtctaggtgagtcgcggtgggtcctcgcttgcagttcagcgaccacgcatcaaagctaagccagaagatttatcacattttcatcatcag

SEQ ID NO: 195414 - DNA, 83 bp, Homo sapiens
cttggacaacatgtcccaacattacatcccaatgcggcattccaaaagaactcactgtcctgattgggatagcagagaaagct

SEQ ID NO: 195415 - DNA, 101 bp, Homo sapiens
ggacttcgaaggagggctctcctgtctgccaccatcctgggttgacaattctacacaaggagagactctgacctgtttttgttggacacccgtgtagtatg

SEQ ID NO: 195416 - DNA, 101 bp, Homo sapiens
ggcctcatcagcccggcctacctcttcctctggcccgaagccttcctttatcgctttcagaagctcattcacacagaagacccatttaatgatgaacatca

SEQ ID NO: 195417 - DNA, 100 bp, Homo sapiens
tagtaatggagaagttgatgactctcgtgaacatagctttaatagggtgatccagatcatggttggattgatgcacattggttttggaattgttttgtgt

SEQ ID NO: 195418 - DNA, 100 bp, Homo sapiens
gcccaggggtgggccaaacccgtttcttaggaaaccaggaatccagggaaggcagtgtctttctcgagaagcaggtggaaacatgagcattcagtttctt

SEQ ID NO: 195419 - DNA, 96 bp, Homo sapiens
gtgaatttggaagggatcgtgtggcatgaaacagaagaagcctcccaaagtgaaatgcctgaccaagatctggcaccccaacatcacagagacagg

SEQ ID NO: 195420 - DNA, 46 bp, Homo sapiens
cgatatatacagagacagtaggattgttgatccatttcagatactt

SEQ ID NO: 195421 - DNA, 90 bp, Homo sapiens
tgaagtgcagaggtttttttctgacttcattagaggggtggtagactcggaggatctccctctaaacatatcccgtgagatgttgcaaca

SEQ ID NO: 195422 - DNA, 49 bp, Homo sapiens
tcttccatcaatcatatctcacagagctccaaacgagaatggaagccgc

SEQ ID NO: 195423 - DNA, 115 bp, Homo sapiens
gataagcatgtaatgagtcgtctttctagcacatcatcattagcagatctcaaagatttcatgagacaagctggggaagtaacgtttgcggatgcacaccgacctaaattaaatg

SEQ ID NO: 195424 - DNA, 80 bp, Homo sapiens
cgcgggaggtgttcgagaacgaccccgagacgtcaccttcaggccattcagaggaggaaagagaggggaatatgaagtca

SEQ ID NO: 195425 - DNA, 74 bp, Homo sapiens
aaggagggtcctctcagtgattaagtgtttgccagctctgagcctgtgccaggattccagggggataccctgca

SEQ ID NO: 195426 - DNA, 100 bp, Homo sapiens
agaggcccaccctggagtaaccctcactggagaatccagagggccttctccagaagcaaaaggagttggaaagtagtctcctgcctttagctgaaaatca

SEQ ID NO: 195427 - DNA, 100 bp, Homo sapiens
tggataccaaggacctactctatactctcagtggcttaggctgacttcaaaatttctgaggagtgcatcgcacagtggaagcaaaccaacttcatgacca

SEQ ID NO: 195428 - DNA, 100 bp, Homo sapiens
tactggttgggaatccaaagttaatgccaagaagcagccgccagttgggatcaaatgtgagcctatggatcaaggggtaaaagcatgtctacgaagaaaa

SEQ ID NO: 195429 - DNA, 75 bp, Homo sapiens
ctggtcttctcgtcggattgcccatgcacttgttgcagaaacagccaagaacccttaggagaaatcttgagagtg

SEQ ID NO: 195430 - DNA, 82 bp, Homo sapiens
taaaggagctgctgtctggaattggcaacatctctgagagtgaccaatggggctgaggctgtgtccactgaggctaagatga

SEQ ID NO: 195431 - DNA, 82 bp, Homo sapiens
agacacaaacttcctggcaccttgattttggacttcatagcctctagaactgaattgaatgatctggcacgggaccctccag

SEQ ID NO: 195432 - DNA, 103 bp, Homo sapiens
tttttcgtttttcggatgatgccttcaatactacctttatttccaccataggtttttagaacttcagccataaaaatgggcagaattttccttgatcatatcg

SEQ ID NO: 195433 - DNA, 82 bp, Homo sapiens
gggtctgtcatcatgtcgcgttacgggcggtacggaggagggctggaccccaatggagaacaggtggtgtggcaggcgagcg

SEQ ID NO: 195434 - DNA, 75 bp, Homo sapiens
ctaaatcaggaatggattgaaatctaatgaaccgaaactttgggaaatgccagtcctcgattcatccgttgtaca

SEQ ID NO: 195435 - DNA, 74 bp, Homo sapiens
tgcagacatctacaaccttcgatctcctgacgaaaaacacagcggagttcttcctgcagcacgtagacagtgcc

SEQ ID NO: 195436 - DNA, 50 bp, Homo sapiens
gaagactccatagaaatgtatgacaataccaagtttccaggcccgaagag

SEQ ID NO: 195437 - DNA, 119 bp, Homo sapiens
tctcaatatctgtcttcggtggactccttcggcagtccacccaccgccgccgcctcccaggatttttagactctgaggagcagttggagctaatccacattatggaaatggaaaccacc

SEQ ID NO: 195438 - DNA, 100 bp, Homo sapiens
catggaggagctggtgagcctcatcacacaggatccgcccctggacatggaggagaaggtccgcttcaagtccttgaatgggcaagagggcacatgaagt

SEQ ID NO: 195439 - DNA, 98 bp, Homo sapiens
gggagccccctccgagttacacctccagagccaaaagtatgagccccatgcccgtttctacgcggcccagatcgtcctgacctttgagtatctgcact

SEQ ID NO: 195440 - DNA, 101 bp, Homo sapiens
ggggccccggggcctcctcccactctgcctcctggccttctgcctggcaggcttcagcttcgtcagggggcagctcctgtatgacagccccaaggcccggc

SEQ ID NO: 195441 - DNA, 116 bp, Homo sapiens
cggccgaaagcggagagatgctgggcgtggcggccgggatgacccacaggtacccgcaagatggagtacaagggcagcagctggcatgagacctgcttcatctgccaccgctgcca

SEQ ID NO: 195442 - DNA, 96 bp, Homo sapiens
aggcccaggactcagacaagatctgcgtggtcatcgacctggacgagaccctggtgcacagctccttcaaggtgtctgatgatttgtgagcctcaa

SEQ ID NO: 195443 - DNA, 95 bp, Homo sapiens
gagatggagaaattccaagttcagattctccaggacagagcgggatgccaccagcttgtccaaagggaagttccaggagctcctggtgggcatcg

SEQ ID NO: 195444 - DNA, 75 bp, Homo sapiens
cctgaatccgggtgtggagaaatttgctgcttcaaagtatcagtataaggtctcagatgatgataaagaaaaggg

SEQ ID NO: 195445 - DNA, 100 bp, Homo sapiens
ctctacttagctcagcaattcttaccttgccacttggatgttgtagcattgctcattaaccatggcgcagaagtgacctgtaaggataagaagggttata

SEQ ID NO: 195446 - DNA, 97 bp, Homo sapiens
tgaacgggtcgagatgccgacgtgactctgacatcattagaagcatgccagaacagactggtgaaaagtaaaccttttcacctacaaaatttcacct

SEQ ID NO: 195447 - DNA, 98 bp, Homo sapiens
ctcatgaagagactccagaaaggggtgacagagttagtccttgataattgcctgtgtgtcaatggggaaattgaaggcctgaatgatactttcaaaga

SEQ ID NO: 195448 - DNA, 100 bp, Homo sapiens
taaaaacaatagctcaaggaaacctttccaacacagatgtccaagctgccaaggagcagattaagcgagtaaaagactcggatgatgtacctatggtgct

SEQ ID NO: 195449 - DNA, 100 bp, Homo sapiens
tccagcgtgaactacagtcagggcagcctgaaggatgcagtcccatgatgtgaaaaatggaggtgaacttactcatcccacccatagccccggccagtcc

SEQ ID NO: 195450 - DNA, 100 bp, Homo sapiens
acagagttgcgaccgcgcggcaggatttggaatgccctgacagataattatgggaatgtgatgcctgtagactggaagtcatcgcatactaggaccttgc

SEQ ID NO: 195451 - DNA, 90 bp, Homo sapiens
aaaatgcataactatactgattggatgctgctcaaaatcagcctacatgccatctttggatctagtgaaaagccatttgatgtatgcggt

SEQ ID NO: 195452 - DNA, 75 bp, Homo sapiens
gcagttcagaagagccaaggaataaacatgcaatgaacccaaaagggcagactcagtgggatcctcctacttggg

SEQ ID NO: 195453 - DNA, 75 bp, Homo sapiens
caggcttcagtggtatggactgtgaggaggacattgatgactgccttgccagcattgaagaaaaatttaggcctt

SEQ ID NO: 195454 - DNA, 98 bp, Homo sapiens
aacttcctccttgggccaaaacctcagaagaatttgttcacataaacagattgtattgctgacagacagaacgccttggaggctgagtggaggacggt

SEQ ID NO: 195455 - DNA, 88 bp, Homo sapiens
gctgaggaaccagatatcttgaaaagctgccagaaaggtgtggtggctggaggtggccgaattgacaaacccatcttgaaggctggcc

SEQ ID NO: 195456 - DNA, 110 bp, Homo sapiens
gcgagttgaactttaggagagctgtgttctctgcagattctaaggacagatatggcttttctaaagactgctttggaaatggcaagaacagcagtatattccttacacaa

SEQ ID NO: 195457 - DNA, 82 bp, Homo sapiens
cccgcgggggagccccgggagccgcacgagctcttcagtatccccatcagccagtttccgaggtgctgagaagcacagaaac

SEQ ID NO: 195458 - DNA, 80 bp, Homo sapiens
cctctcgcctcgggtctcgggggccgctctgggatcccggccaccagcaattgtccgatttgaagaccttgcttctcatc

SEQ ID NO: 195459 - DNA, 75 bp, Homo sapiens
tgacacctttacacagagcagttgcatcttgtagtgaggaaatggaagttccagtattaccgaaaatctctctac

SEQ ID NO: 195460 - DNA, 101 bp, Homo sapiens
gagccttcagcagaggcggcagcctggagagtcgaagcagcagctctcgctccagaagcttcactttggtttttgattggtcaaggagcacatgtaggggc

SEQ ID NO: 195461 - DNA, 75 bp, Homo sapiens
ccgcggcgcgcccaccccccgcgccgagactaggcattgaaaagactgaccctaccacactgacagatgaagaga

SEQ ID NO: 195462 - DNA, 82 bp, Homo sapiens
gctgtagctgccctttccgtttccagggttccgaccagccgagcctcttgaagccattcttacagatgatgaaccagaccac

SEQ ID NO: 195463 - DNA, 100 bp, Homo sapiens
ctcaccgactcctcggccacctcctccgcggacgccggggagaacccaggtcactctgtgagactgctgggtcagaaaaaggataatggaaggcggcttg

SEQ ID NO: 195464 - DNA, 100 bp, Homo sapiens
ttaagtttacagtttacatccctgataactatccagatggtgactgtccaatgcaccgtggcctggcggcgagcccccggtcaccttcctccgcacggaa

SEQ ID NO: 195465 - DNA, 100 bp, Homo sapiens
tccgatgcagatttatggctcctgaacagttgcactgtaaaaaacccagctgaagaccactttagaaactcaattaatatacgccatccgagaagctgcc

SEQ ID NO: 195466 - DNA, 82 bp, Homo sapiens
ccaagtccttttaatccacaaggacagagtcagattacaggcaccagcagcatcctggcaggcactgccctggctgccttgc

SEQ ID NO: 195467 - DNA, 75 bp, Homo sapiens
ctaaacagtggactcaacttcaaagacgttctcaaggagaaggcagacctggacagatacattgataactccatt

SEQ ID NO: 195468 - DNA, 98 bp, Homo sapiens
aaaagcatccccgaggaggaagacgaatcgttaaacatctgaaagggtcaggttattcagcttctcaaggctggaaaagcgaaggaagtttcctacaa

SEQ ID NO: 195469 - DNA, 75 bp, Homo sapiens
gaggaatggttcctgaatgaattgaatgcatgtgggtgcctgatagacatcctaggactatacagaaggaaaagg

SEQ ID NO: 195470 - DNA, 100 bp, Homo sapiens
tggactgagaagagaagaatggagaagcccctcttcccattgcactttccacacatgaggagaagaagagcttctgtttagaagacacgtgcccagagtc

SEQ ID NO: 195471 - DNA, 101 bp, Homo sapiens
gagctcatctggaattttgccgatttcatgactaaccagtaaggatgccctgcagtggtctcgccatccagctacagtggagggagaggagccagaggaca

SEQ ID NO: 195472 - DNA, 75 bp, Homo sapiens
ttttgggaggaggcggagctgccggcggagcttgccggtggtggtgtgcacattgagccccggtatagacagttc

SEQ ID NO: 195473 - DNA, 96 bp, Homo sapiens
caaacgttgtcagtatgttacagagaaggtgcagcagctggtgccaaaacgggaccatgccctcctggaggagcagagcaagcagcagtccaacga

SEQ ID NO: 195474 - DNA, 90 bp, Homo sapiens
ttgccatgagcagcatcgatgattataagaaaaatggctacaaacttcctagcacatgagaagatctggttcgacaagttcaaatatgac

SEQ ID NO: 195475 - DNA, 96 bp, Homo sapiens
caaagagacacagcccatttttttaggtgtacacttaaagcgttctgggaatatgaatcccttctgcaccctggaatcaccagtccagccatgcat

SEQ ID NO: 195476 - DNA, 74 bp, Homo sapiens
aagatggtggagaagtgctggaagctcatggacaaggtattaataggggaccctattaccacatgtctttctcc

SEQ ID NO: 195477 - DNA, 97 bp, Homo sapiens
gggccagcaccatggacgtcaccgtggtcctgcctagtgggctggagaagaggagcgtgctcaatgggagacgaagggaacgtcatcgtttggaaag

SEQ ID NO: 195478 - DNA, 100 bp, Homo sapiens
gcggacgcgcccgggacgcgcggcggcaccgggaggccgggccgagcggagaagaaactgaggcctggaatttgattaactcattcaaggttacccagtt

SEQ ID NO: 195479 - DNA, 101 bp, Homo sapiens
ccgctccccgtcctgctcgcggacccaggggcgcccacgccagagaactcagattgcacagagctagactcgggcagccagagcggcgagctgagtaacag

SEQ ID NO: 195480 - DNA, 90 bp, Homo sapiens
ggactggaaccatctcagaagccatgcccctcaggctggaacttgccctgtctcctcgcagatgagtcctgaggctttctaccaatgcag

SEQ ID NO: 195481 - DNA, 83 bp, Homo sapiens
cgcctccattgtttgaccacaacaagggccggattctcacccaggtaaatctcacctggctatcgtgcagcgggtaaacaatg

SEQ ID NO: 195482 - DNA, 100 bp, Homo sapiens
ttggtcagctgtttggagacattgcagaaggctctcaaagtttttcagttatgggacaaaaatattatatcaaaacactgaagctttgcaatctaaattc

SEQ ID NO: 195483 - DNA, 82 bp, Homo sapiens
cttattggaaaaacatttcttacattattttcgaaataccagtatttcgactccagggggatgttcatttctatagtatttt

SEQ ID NO: 195484 - DNA, 100 bp, Homo sapiens
ttggttcaacacagtctggatttttagttgaagagtctcttcccctttcagagctcacagagacttcaaatgaagccctacaggtggcaactactagccc

SEQ ID NO: 195485 - DNA, 83 bp, Homo sapiens
gacagacagctggcaagaggcagcctgggggccacagctgcttcagtacatggtggatgctgctgaccaggagaagattgagg

SEQ ID NO: 195486 - DNA, 101 bp, Homo sapiens
cgtgagctattacactcgtattctgccctctgtgcctaaagattgccccacacccatgggaaccaaaggtggccaaagcattctggatggcaatcggggga

SEQ ID NO: 195487 - DNA, 75 bp, Homo sapiens
cgtgcagctcacggagaagcgaatggacaaagattatcacaaggcagccatgggtctgggggcccggggcttgct

SEQ ID NO: 195488 - DNA, 99 bp, Homo sapiens
accacaagatcctcatcgacagtggaaagaggcaaaacctgatgaattaatggattccaaattgagatgcgtatttgaaatgcccaatgaaaatgataa

SEQ ID NO: 195489 - DNA, 149 bp, Homo sapiens
aaaaattactgcagttgacggaaaagaggaaagaaatgatcgacaagtgggaagaccgatgggaatggttaagactgaatcaacagtacaaattctgaagtttgtaaacttgctgatggtggtggtaagccatggcagatgataaagtt

SEQ ID NO: 195490 - DNA, 73 bp, Homo sapiens
tggctgcagcagtttgacaccgagtactcattcctcaaagaagtccggagccgccgcgcctcggcctagcatg

SEQ ID NO: 195491 - DNA, 100 bp, Homo sapiens
gccgcgggcgccatggagggggtgctgtacaagtggaccaactatctgagcggtatcacctcttctgggctcaagatggacaacaagaagcgcctggcct

SEQ ID NO: 195492 - DNA, 74 bp, Homo sapiens
cctgtcatccgctcagtgatactgaaactgcttttgaagtacaggctaaagaattacctccaaagccattgtca

SEQ ID NO: 195493 - DNA, 101 bp, Homo sapiens
cttgaaaacatggggattggaattcgacttaattcagtgcacaaatgagatgaatgtgaacatcccacagttggcagacagtttatttgaaagaactacta

SEQ ID NO: 195494 - DNA, 82 bp, Homo sapiens
cagaaatctacaggtcattcctggagatcctgcacacgtaccagcttgcttggctcaggaacaacagaagagaataaagaaa

SEQ ID NO: 195495 - DNA, 82 bp, Homo sapiens
aaagttcatggccccgcgatgaagtcgagatctcaaatactgcctgtcctgggagctggagaggatgtcagcgagcctgaca

SEQ ID NO: 195496 - DNA, 100 bp, Homo sapiens
agaacatccacagaatagacctgaagacaaaaatccagaagtacaagcagtctggcataagggccatgtgttctgaaattattttgaggcaagaagtttt

SEQ ID NO: 195497 - DNA, 75 bp, Homo sapiens
accaacctgtttgaagagtttggacagattgaatccattaataactgataaatttcaaacggaagagagtggcag

SEQ ID NO: 195498 - DNA, 120 bp, Homo sapiens
ctgaaggaagccgcccgccccccaccgccgccccctccggcgtgttcatgcccccgggacaatgcagatcttcgtgaagactctgactggtaagaccatcaccctcgaggttgagcccag

SEQ ID NO: 195499 - DNA, 50 bp, Homo sapiens
atcgagcgacggcctgtcaaagacggacaagatcgcagaggaaggtgggc

SEQ ID NO: 195500 - DNA, 98 bp, Homo sapiens
gccctgaggaccagcttcctctggactatgccaaggtgttcttcaacggtgccaacgtccggcaggtggacgtgcccacgctgaccggagccttcggc

SEQ ID NO: 195501 - DNA, 100 bp, Homo sapiens
tggtgtcgccatgggccgccgccccgcccgttgacagcaaggccatcgtggacgggaacctgaagctgatcctgggcctcatctggaccctgatcctgca

SEQ ID NO: 195502 - DNA, 100 bp, Homo sapiens
tggagctcaagttcttaattattcagaatgctgcggttttccaagaccgaagccaggacagcacagccgtagcactctcagactctagctcaacgcagga

SEQ ID NO: 195503 - DNA, 75 bp, Homo sapiens
ctctcctcactctcgctcgccgtttccaggagcacaggctttcagtccagtgtaaagctgttggagcgcgggagc

SEQ ID NO: 195504 - DNA, 75 bp, Homo sapiens
ccccgaactaagcagggcggtcgggggaactttatattgctgttggaatatctggagccatccaacatttagctg

SEQ ID NO: 195505 - DNA, 100 bp, Homo sapiens
caacgaccggggcgtcggcatgctcacccgcctctacaacatcaagaaggccctagaaagtgaatttgtttcttgccaacttcatcagtggatcgacctt

SEQ ID NO: 195506 - DNA, 98 bp, Homo sapiens
tggggcctgggaaatgaaagagcgccttgggacagggggatttggaaatgtcatccgatggcacaatcagaaaagcagcatctgttatagcaaaatac

SEQ ID NO: 195507 - DNA, 100 bp, Homo sapiens
tgcaatttgaagatacatgagacagcagccaaacccccagtgagcaagaagaacccatcaggtgattgtcaggcctctgagcccaagctaagccatcata

SEQ ID NO: 195508 - DNA, 90 bp, Homo sapiens
gctcgggcagcccgcctagcccagatcttcaaagaaatttgtgatggtatcatctcttataaagtggctggatctctgctctggtggtgc

SEQ ID NO: 195509 - DNA, 100 bp, Homo sapiens
agctgatctatctactggaacatggacaggaactgtggacagtgaagagaggcctctcccaaagcacctgcgcaggatgaccatgaaagctgtggttcta

SEQ ID NO: 195510 - DNA, 100 bp, Homo sapiens
tcgtggttcacccgctgccgggcaccgaggaccagctcaatgacagctgtgatgcagatccatccgccctagcaaaatatgttctggctttggtaaagaa

SEQ ID NO: 195511 - DNA, 88 bp, Homo sapiens
cctacgaggtttgcgcctctgggcatgtagtctacacaggacctgagaatctgagaaactgcagtcggtcctgaccgccagcctgtcg

SEQ ID NO: 195512 - DNA, 96 bp, Homo sapiens
gcagatgttctggaaggagacagctcaggtgaccaagaatatggcccaggtgaccaaagccctggacaaggccctgagcaccatggacctgcagaa

SEQ ID NO: 195513 - DNA, 85 bp, Homo sapiens
aacagatgagatgcacactgccttaatggaggcctgcatgccaataatttctgaagatcagacagcagccctgatggcccatctc

SEQ ID NO: 195514 - DNA, 100 bp, Homo sapiens
atgagtcggcctccttcactgtcaccgtcacagggctgacgcgccactatgtagcgggtttcgggcgggccacgcgtgcgggacaggaacccaaccccag

SEQ ID NO: 195515 - DNA, 83 bp, Homo sapiens
agtggaaggagcagaacgtgagggtgtaacttacaaaaaggtgctggagaatctggtaaaagcaccattgtgaagcagatgag

SEQ ID NO: 195516 - DNA, 90 bp, Homo sapiens
tgcgcgcgctctggactcgcgaatacacgccccaactttccgcggagttcaagggtgaagttgaacaaattgctatgatgaaaccaaaag

SEQ ID NO: 195517 - DNA, 75 bp, Homo sapiens
ggctgaggggcgagaactgatcctggacctggagaagaatgattagaaatcctgtgttctgtcaacattctccag

SEQ ID NO: 195518 - DNA, 90 bp, Homo sapiens
caggacgacgaggagcagggcctgactgcgcagcttgtgaacaccttcttcagcttccttcgacgcaaaacagactttttcattggagga

SEQ ID NO: 195519 - DNA, 75 bp, Homo sapiens
gacctgctgctggagacctggatctcgcgccacaaggagatggtactccaaagattcaggtttactcacgtcatc

SEQ ID NO: 195520 - DNA, 100 bp, Homo sapiens
ctactggtgcatgagcaagctgctggatggcattcaggttcaggcgtgaacggcctggaggagcccagcatcgccaagcgactgaggggcaccccagagc

SEQ ID NO: 195521 - DNA, 75 bp, Homo sapiens
aacaaggagacactgctcgccggccgcctggtcgtgggactcggcatcgaagctgcacacatacatgtaagagaa

SEQ ID NO: 195522 - DNA, 100 bp, Homo sapiens
ggaaaagggagcgatgttgatctcaggaagcacaaagggaccttcctagctctgactgaaccacggagggtcctacagtgctagccagggtgtcaactgc

SEQ ID NO: 195523 - DNA, 73 bp, Homo sapiens
ttctcctaccttcgggaatctggtgccagcgagatttcagattcctgtaaacctctaaagaaaaggagtcgcg

SEQ ID NO: 195524 - DNA, 75 bp, Homo sapiens
cagaagcgggcggcgcgggggagatgagccaaggattgtcaccagtgaagaggtcattattcgagacagccctgt

SEQ ID NO: 195525 - DNA, 100 bp, Homo sapiens
aaaggctatgcagctatcgtggacgtcactggccctggtggggattgacagccacgggaagatcagtcgcatcgaatacattcattcaaagaacttcatc

SEQ ID NO: 195526 - DNA, 75 bp, Homo sapiens
ttaaagagtaaagttgtgctcaacggcttgaagaaaatttgcctacacgttgtggattttgtcatataccatatg

SEQ ID NO: 195527 - DNA, 75 bp, Homo sapiens
gcattatctgcataccagaggtactacagtttacagtctgactactggaagtcttatgatgtaatcagcgcgatt

SEQ ID NO: 195528 - DNA, 90 bp, Homo sapiens
gtgaatatcctgacatgtgacaatgaaattgaattgaagaaaattgcacgtaatcacccaaatgccaagcatttgcaagtaaaatcactg

SEQ ID NO: 195529 - DNA, 82 bp, Homo sapiens
gagacaattacaaacatgttttatcaatgcagctaagaatcgagagctccagatcatgagaaagctagatcactgtaacata

SEQ ID NO: 195530 - DNA, 109 bp, Homo sapiens
aaggggacttgattattttaagaaaccacaggttaccaccaaagaatatgattttggtctaggggctccagtttctgaagctgaaaactaccagaatactctccagcta

SEQ ID NO: 195531 - DNA, 75 bp, Homo sapiens
cggagccgaataccaagctcggatccctgaatttgatccagttgtcgccgtgatcctgaaggcgctgacctacga

SEQ ID NO: 195532 - DNA, 83 bp, Homo sapiens
aatgccgcaaccggaggagggagctgactgatacactccaagcggtctcctactccctccctccagtactgcgagaactgtga

SEQ ID NO: 195533 - DNA, 80 bp, Homo sapiens
tctgtgcgcgcctccatctgggccatggatggacctgcctagagctggaacgttacctccagagcgagccctgctatgtt

SEQ ID NO: 195534 - DNA, 50 bp, Homo sapiens
ccggaaccgcgattcggcgtgtcagaaccgccaagacccattgctcctcc

SEQ ID NO: 195535 - DNA, 75 bp, Homo sapiens
ctcgaactttgtgccgatgccgagaaacaacttgccaaatcccagatgcagtgactggttactacctgaaccgtg

SEQ ID NO: 195536 - DNA, 75 bp, Homo sapiens
actttagagaagacgttcatatcattgtcttccacagatgtgtcaccaaaccagaaggtgttggaagtgacagtg

SEQ ID NO: 195537 - DNA, 75 bp, Homo sapiens
cagcccggcctacctcttcctctggcccgaagccttcctttatcgctttcagctccagggtttgagccacaatgt

SEQ ID NO: 195538 - DNA, 50 bp, Homo sapiens
cggcgtggcctctcagcctcggttaatttggagtggcccctggagtcagt

SEQ ID NO: 195539 - DNA, 115 bp, Homo sapiens
gggtcaaaggagagcacaaccatcgcagttggaagcccatggggcaggtatctgtgcctaggtttgctgtggggattgtaataggaagaaacggggaaatgatcaaaaagatcca

SEQ ID NO: 195540 - DNA, 75 bp, Homo sapiens
gaaaaaacaaaaggactgtgggattccattaaaagagaggaacttgatacagatgaatatgaagaaaccaaaaag

SEQ ID NO: 195541 - DNA, 100 bp, Homo sapiens
tcaaggatcgatattttgtcgaagaaactgtggaagtcattaggaacaatggtgcaagagatatgaatcaggttcttgatgcctatgaaaataagaagcc

SEQ ID NO: 195542 - DNA, 98 bp, Homo sapiens
tttgccccattcctatctcgtacacttcttggcagtcatggacaagagctattgatagaaggtttacccaaggtccagcctagcccctaggcaccatg

SEQ ID NO: 195543 - DNA, 100 bp, Homo sapiens
cagcacttgctcaagaggaaaccagctggaaaacctcatgctggacaaagatggccacatcaagatcactgactttggcctctgcaaagagggcatcagt

SEQ ID NO: 195544 - DNA, 75 bp, Homo sapiens
ccgacatgtctctagtggcggaagccttcgtctcccagattgcagtattcttgccatgagaaaaagaatgtgata

SEQ ID NO: 195545 - DNA, 88 bp, Homo sapiens
agtggggcttctgcagacactatctctctgcaagagtagatgcagttaaggaagaaaatctgaagctaaaatcagaaaaccaagttct

SEQ ID NO: 195546 - DNA, 100 bp, Homo sapiens
ggaacccagagatgactccagccccagccccaagggcagagacaacaaaggaggctttgaaaatgttttagaagaaattgctgaacttcgacgtgaagtt

SEQ ID NO: 195547 - DNA, 82 bp, Homo sapiens
ccacttgcttgggatcctttatcctggtcatcttctatttccaaagtatgttgcacccagggcgtgatggtgggcatgggtc

SEQ ID NO: 195548 - DNA, 128 bp, Homo sapiens
taccacctcagccaccctgaccactatcatcaccatggaaaaagtgacttgagcaggcctgatcaaccccgtataaccaaagatgtaatttgttttcatgctgaagatttcttagaagtagttcaacg

SEQ ID NO: 195549 - DNA, 95 bp, Homo sapiens
ttggaatgcatggccacaggaaatcccaaaccaatcatttcttggagccgccttggttgttgaagattggaaattcatagcccaggttcttgatc

SEQ ID NO: 195550 - DNA, 75 bp, Homo sapiens
acttagccctgctccaggaatgggacctcgagtcactgtggtgcccaaatgtgagtctgcaaaagctgccagaac

SEQ ID NO: 195551 - DNA, 100 bp, Homo sapiens
gggctggtgttccttgactggagacaacctgcagcctcctggcaccaaagcccatgactgaagagttgctgaaacaacaaaagctgaattcacatgagac

SEQ ID NO: 195552 - DNA, 100 bp, Homo sapiens
aagcttcaccacaaaagcgaaatgggcacaccacaggtcttccccagggaggtcctgaactacacagctgagaacatctgtaagtgggccttagaaaacc

SEQ ID NO: 195553 - DNA, 51 bp, Homo sapiens
gcttgcagttaggtcaagtggaggtgtcagcacagcgggctactcctaggg

SEQ ID NO: 195554 - DNA, 82 bp, Homo sapiens
cgagaacgtgcgggaagagaagatcatcgagcatttcaaacggctcaggtggccttccttcagggagagaggaaagggcagg

SEQ ID NO: 195555 - DNA, 100 bp, Homo sapiens
agcatgtctttcagagcccggcaccacccatcttgagtatctgcgtcaagggttccacactgttgggagtcgctgcaagaatcggacaggcgctgagcac

SEQ ID NO: 195556 - DNA, 82 bp, Homo sapiens
gcggcataaagcaattgagaattcagtggaaattttgctcagccgacaaaagaaggctgaacttctaaagaagatgactcat

SEQ ID NO: 195557 - DNA, 100 bp, Homo sapiens
aagtgcaggaaaacttcaatatctctcggatgaggagcgggaaggcctcctgcaccctggagaccgtgtgggaagacaagcacaagtatgaggaggccga

SEQ ID NO: 195558 - DNA, 82 bp, Homo sapiens
gagccgccttctgcctcagaacggcgtgactcggagatggtcagtaggacagaaggtaacattgatgactcgctcattggtg

SEQ ID NO: 195559 - DNA, 96 bp, Homo sapiens
ggagtcctgcttatcacaatgggcgaagctgtgctcaggcccgggctggacgcagagccagagctgtccccagaggagcagagggtcctggaaagg

SEQ ID NO: 195560 - DNA, 101 bp, Homo sapiens
ttcggggtctgggttctggtgccgcgcagctttccccgtcttaggaaaagtcctcagtgctgtgggcagtgcccagctactgatgtcccagaaattccagc

SEQ ID NO: 195561 - DNA, 100 bp, Homo sapiens
gtagcaacagctctaggactcaatgcattgaccaaggtctatgttaacaatgaatgggcaaccagtgttggggaaggagggagctttggagaacttgctt

SEQ ID NO: 195562 - DNA, 82 bp, Homo sapiens
ggggcgaacgccgccgggagactccagccggcgggcgagcaggctgtttttggaaggaagaaagatggaaagcggtgcagtt

SEQ ID NO: 195563 - DNA, 83 bp, Homo sapiens
ccggaagacagatgaatacctggagaaggccctggagtacctgcgccagatattccgggttttgggatttgagattgacgcgg

SEQ ID NO: 195564 - DNA, 100 bp, Homo sapiens
agcgccactcagccggctggatcgctgtctgtggtcactactgtgtggggagttggcaacgcgacacagagccaggactgcaagatggaggaaggcggga

SEQ ID NO: 195565 - DNA, 83 bp, Homo sapiens
gttttcgtgatcttcagaccccaggttctttgcaattctgtggtgttcttggtcacacatttatggagtttctgaagggcagt

SEQ ID NO: 195566 - DNA, 100 bp, Homo sapiens
ggaggcacccctgaagctctccaagtggaaatcctgactgctcgtcagaagaaagcagaagaactaaagagactcactgaccttgccagtcagatggcag

SEQ ID NO: 195567 - DNA, 90 bp, Homo sapiens
caggactgaggagtgaagagctccagggatttcactcttctttgtgtgtgtgaaggaaggcagatggagtctcgctctgttgcccaggct

SEQ ID NO: 195568 - DNA, 102 bp, Homo sapiens
cggacgagaactggagagaactgctggaaggagactggatgatagaattacctttccaaagtgaaactgatgagatttgatgatccactgttggggcctcga

SEQ ID NO: 195569 - DNA, 50 bp, Homo sapiens
gccccacctgagcctgccgacttcaccaggagactaaagtccatcaaaaa

SEQ ID NO: 195570 - DNA, 75 bp, Homo sapiens
gccgctatggatctattcgactttttcagagactgggacttggagcagcagtggccctcgggaccaaggatcacg

SEQ ID NO: 195571 - DNA, 78 bp, Homo sapiens
ctgggaaggtggagccaccagcctctccttgctgcagaaccttggcctgaaaatgctacattatatcagcaattgaaa

SEQ ID NO: 195572 - DNA, 112 bp, Homo sapiens
ttcacttccctcggtctgggcttctctgaggcggcgagagatggtcaggtctggagctcgaccgggccagggctgttgataatcaggtgtatgtggccacagcctctcctgc

SEQ ID NO: 195573 - DNA, 98 bp, Homo sapiens
gagcgacccccctttgcccagattgcgctacagctaggccgcatgctggaagccaggaagactcagagcccctgaagtgtttctcccgaacatttgag

SEQ ID NO: 195574 - DNA, 99 bp, Homo sapiens
gggctgaagctagaagagctctggctcgatggaaactccctgtgtgacaccttccgagaccagtccacctacatcagccgcggcccatggagcccgccg

SEQ ID NO: 195575 - DNA, 101 bp, Homo sapiens
tgaggacgcggcagcccgtggagtcggctgagggaaaagcgaggcaaggcaggcgggtagatcatgccactaatcgtacccagtttggggagaaaattcac

SEQ ID NO: 195576 - DNA, 75 bp, Homo sapiens
ggcgagtttccgatttaaagctgagctgcgaggaaaatggcggcgggaggattactacagcatcccatttcccac

SEQ ID NO: 195577 - DNA, 100 bp, Homo sapiens
aatttgttagtgctgtgtgctggagggcactaccagatgggcctcacgattttgatgaatgtcgatttgatattagtgtaaatgatagtgtttggtatct

SEQ ID NO: 195578 - DNA, 96 bp, Homo sapiens
agctgagccagtccctagggctcagggagcaggagcttcaggttgtccgagcatctgggaagtgctggagaatctggtaaaagcaccattgtgaag

SEQ ID NO: 195579 - DNA, 100 bp, Homo sapiens
ttcatcccaaggctggtctgcaaatgagagtccggagtgttgtcatgtgaagcctgccatccaggaacctccaatagttattagtgatgatgacaatgac

SEQ ID NO: 195580 - DNA, 51 bp, Homo sapiens
ctttttccctgcactacgaggaagatgtttactaaaggacaagtcaccaca

SEQ ID NO: 195581 - DNA, 75 bp, Homo sapiens
tttctgattacgttgacacttaccatgctgctgcccttaggcgttacatagccatgtgccgcgagaagcagccca

SEQ ID NO: 195582 - DNA, 75 bp, Homo sapiens
catgcagcagcttcctgtggatatcttgatattgcagacctgcctagggtagttaaaagacgagtgaatgctctc

SEQ ID NO: 195583 - DNA, 74 bp, Homo sapiens
gaaggagccagctgtacttgaactggagggcaagaagtggagagtggtatcctgtggtctgaggccatcttcct

SEQ ID NO: 195584 - DNA, 102 bp, Homo sapiens
gcgtgcactccgcacctcggggacattattgcgcgtggaacggctgcttttggaagatgcctttggtgcttcatgaagaatatttccagatatctcacagac

SEQ ID NO: 195585 - DNA, 75 bp, Homo sapiens
gggccgctctgggatcccggccaccagcaattgtccgggcttaaaagacaaccttcttgcttctgggacatccag

SEQ ID NO: 195586 - DNA, 75 bp, Homo sapiens
tattatagtgatcctcgatttctcaatctctggcttaaattaggttttgactctgggaggagggctgccttattt

SEQ ID NO: 195587 - DNA, 75 bp, Homo sapiens
ttgggcacacgtgtaaggaatgtgaaattatacatactgccatgaaagaaagctcacctttatttgatgatgggc

SEQ ID NO: 195588 - DNA, 115 bp, Homo sapiens
ggcctttccttgaaccagtagaccctaatgatgcaccagattattatggtgttattaaggaacctatgggctcaaccaccggaattatctcttggagtctccgcataggttccgt

SEQ ID NO: 195589 - DNA, 90 bp, Homo sapiens
gggctggttggagagtctgcggacagcccagaagactgcgctgctgcaggacggcacccagattggctgaaaacttctgtgtctgccatt

SEQ ID NO: 195590 - DNA, 100 bp, Homo sapiens
gaggaggaggaggtggactctgccgacaccggagagaggtctcctctgagcctccggcctccataagacccaaaacagatgacacctcttcccagtcccc

SEQ ID NO: 195591 - DNA, 90 bp, Homo sapiens
gggaaccgggcggagcggccaacatggcggaacgcaggagacacaagaagcggatccagggtcactcaggatgtgtcaactgtctggagt

SEQ ID NO: 195592 - DNA, 76 bp, Homo sapiens
gggaatcgtgcagggattcttcggcaagctgtggacaagaagtatgaaggtcgcttacagcattctacacaaatta

SEQ ID NO: 195593 - DNA, 74 bp, Homo sapiens
gagtttgaggggtctgaagactgaaagagtcgaatggtttgttggcagtgctgaagctgctgaaagatggcaga

SEQ ID NO: 195594 - DNA, 91 bp, Homo sapiens
aaacggaagcgcagggagaaggaagaggtgtttgaaaagaatgatatggaacctagcaaagctgttccactgaatgcatctaagcaagatg

SEQ ID NO: 195595 - DNA, 83 bp, Homo sapiens
cccctgcgccggcctcggccaccgagatcctgctgacgccggctagggcaccatgactcctgtgaggatgcagcactccctgg

SEQ ID NO: 195596 - DNA, 75 bp, Homo sapiens
cagtgggcgaggtgggcaggaggatgtctcagtggtacgaacttcagcagcttgactcaaaattcctggagcagg

SEQ ID NO: 195597 - DNA, 100 bp, Homo sapiens
aaagaaatgagcagctttggataatgacgacagcaacccgaagacagggaaatttaggttatccggtgttggctcctgctgcttactatgaccaaactgg

SEQ ID NO: 195598 - DNA, 74 bp, Homo sapiens
aagaggggacaagtacctttatgaaccagtgtatcccaatttgcagctcaccttgtgaagatgaaatatccaag

SEQ ID NO: 195599 - DNA, 100 bp, Homo sapiens
gaggccgtccagcagatggcggatgccctgcagtacctgcagaaggtctctggagacatcttcagcagggtcaaattattatgtgaccaaaaaaagaaac

SEQ ID NO: 195600 - DNA, 102 bp, Homo sapiens
gcccggtgcccgaggaggcagccaagctcgtggcctgcctctgcgtgcgagcatcagatccatgctgctgctgactcggagccccacagcttggcacaggct

SEQ ID NO: 195601 - DNA, 75 bp, Homo sapiens
gtcttcatttgcttccacaagaaccgcgaggacagagcgtgcatcgcttcaaggccgggacagtgtggccgagca

SEQ ID NO: 195602 - DNA, 100 bp, Homo sapiens
agcttctttcttctggcatcattaacggaccttttaccatgaatagttctactccttctacagttacagaatgtctgaaggggacagtgtgggagaatcc

SEQ ID NO: 195603 - DNA, 50 bp, Homo sapiens
acttaagtctgaatttcggcagaatttagagctccacacagaacatcatc

SEQ ID NO: 195604 - DNA, 87 bp, Homo sapiens
gagagaggtacctctccttttccctctccctttccctaagttcccagtgacctgacagcagaggagcgtcaagaactggagaacatc

SEQ ID NO: 195605 - DNA, 100 bp, Homo sapiens
attgcatcgtttgggcaaagtacttgttcaagaatgttagttcggccggagaggaggcccgcagaaggatgagagagtgtgatgggcttacggatgcctt

SEQ ID NO: 195606 - DNA, 110 bp, Homo sapiens
ggctttaccgctgctacttgcaggccagcgcaggagaaaacgaaaccttcgtgatgagattgactgtagccgaggggttcccagcaccatgagggcctggatcttctttc

SEQ ID NO: 195607 - DNA, 151 bp, Homo sapiens
cgaaaacgtagggaccacatcaaagacagctttcacagtttgcgggactcagtcccatcactccaaggagagaagtggatgaggatcgcagtacggaacctgaccgattgcaggtgtttcacaagagagccatcatgccttacggtgttta

SEQ ID NO: 195608 - DNA, 95 bp, Homo sapiens
gccttccaaagtactgggattacagacgatgtggacaacaaagtagagaggatttggggtgattgtacagtcaggaagaagtactctcatgtgga

SEQ ID NO: 195609 - DNA, 73 bp, Homo sapiens
ttacctgcgcctggtggagacctcgctgaaaggagagaaggatattcctggactgactgatactacagtgcct

SEQ ID NO: 195610 - DNA, 117 bp, Homo sapiens
caggacgagaggatgcggagcccgcagaacctccacagtcaagaggacggtgctggagaatctggtaaaagcaccattgtgaagcagatgaggatcctgcatgttaatgggtttaat

SEQ ID NO: 195611 - DNA, 75 bp, Homo sapiens
ctcggcgtgagcgacagcggcaaattagaccaaggaggtgctcctcttgcaggaacaaacaaagaaaccaccatt

SEQ ID NO: 195612 - DNA, 100 bp, Homo sapiens
ggccgagcaggctgagcgatacgacggaatcccagtcagaagttccagcctgccactgttctctgatgccatgccagcaccaactcaactgttttttcct

SEQ ID NO: 195613 - DNA, 100 bp, Homo sapiens
ttcgcttggtgtcctcctggcctcagcaacctgacaattctgtcgtgtcccgaactcagcctcctcccaagctccctgtgggtcctagccacaagctctc

SEQ ID NO: 195614 - DNA, 90 bp, Homo sapiens
caggatgtttcctgaaatgtccatccacttatccagacccaatggaacatcagcaatgcttctggattggattcagcatcaaaatacatc

SEQ ID NO: 195615 - DNA, 75 bp, Homo sapiens
gagcacagaggctcagaagcaagtccagcccgtggaacacagagcattcctaatgacagtcctgcccggggtgag

SEQ ID NO: 195616 - DNA, 76 bp, Homo sapiens
aaggaatatgagcgcttctctaaatacatgcccaatgtcaaggtccatctggttggtattgacatctttactggga

SEQ ID NO: 195617 - DNA, 84 bp, Homo sapiens
gcgtggaacggctgcttttggaagaatccacattcatctcaatggaaggatcctgccttaagtcaacttatttgtttttgccgg

SEQ ID NO: 195618 - DNA, 75 bp, Homo sapiens
atgtttgcagtgtatttgattccgatcattcgagcccttttcactcaagcatgctggaagatggactgccctcca

SEQ ID NO: 195619 - DNA, 90 bp, Homo sapiens
tgcccgccgtggacaagctcctgctagaggaggcgttgcaggacagcccccaggaaatgcttccagactgcacacttttacttagaggac

SEQ ID NO: 195620 - DNA, 83 bp, Homo sapiens
ggcggagccgagagccacactttcaagtaaaccagaaaccaaggtgtatgttggtaacctgggaactggcgctggcaaaggag

SEQ ID NO: 195621 - DNA, 75 bp, Homo sapiens
gctgttgcagaagtagtggccaagtctcgcccaagaacttcaaggtgaaaatgatcatgaagacatcagttctgc

SEQ ID NO: 195622 - DNA, 109 bp, Homo sapiens
aaaaatctggacgtgtaaaaagaactcttaacggccgatgcagctcttccaaagctaaggagggtgtgaagacagagaatgaccacatcaacctgaaggtggccgggca

SEQ ID NO: 195623 - DNA, 101 bp, Homo sapiens
cccaggtggaccccaagaagaccattcagatgggatctttccggatcaatccagatggcagccagtcagtggtggagattagaatatggctacatattccc

SEQ ID NO: 195624 - DNA, 100 bp, Homo sapiens
gctgaggaggggccccagcagcccccgaaggccctatcaggacatggagtatgaaagacgtttgcctgagaatacagatcaacccacagaacaaagcgga

SEQ ID NO: 195625 - DNA, 100 bp, Homo sapiens
cttcaatgattaccaccttcaaaatggagatgttgttgggcagcattcatttcctggcagacttgaaacccacatgacaccagagatgttccgaacacca

SEQ ID NO: 195626 - DNA, 82 bp, Homo sapiens
gcggcccctgtcccctggggccttgcagcttgctggagagaagagcagtgagaaggacttctgcacggacctggccgtctcc

SEQ ID NO: 195627 - DNA, 98 bp, Homo sapiens
tcggcggggcccaggtgagaaaggcccacctgtgtcctggttgagggtctccagggttctttggggcccgagatttccatgaggacaacttacaagga

SEQ ID NO: 195628 - DNA, 95 bp, Homo sapiens
ctgggagaaacctcgtggcctggtctccattatttgagatgagttacatcttggagcctcccgcgacgatgcccctcaacgttagcttcaccaac

SEQ ID NO: 195629 - DNA, 109 bp, Homo sapiens
gtcccagagcttcctgacagagttcatcaactacatcaaggtgtgccagaaggctggcgagatctccctcctgaagcagcagctgaaggactcgcaggcggatgtgtcg

SEQ ID NO: 195630 - DNA, 90 bp, Homo sapiens
aaaagagagagcttgtgaaactgagggaataggtgattgtgaagacaagaacggaatatcagccggaacagaagaacaaagggaagttcc

SEQ ID NO: 195631 - DNA, 100 bp, Homo sapiens
cccgaaggaaaaggaggaattcgccgtgcccgagaatagctccgtccagcaggcaggagtagggctgattggagccattgtacagtgtcgggaacatacc

SEQ ID NO: 195632 - DNA, 100 bp, Homo sapiens
gttttaatcgacgagctccgcaatgaagacgtgcagttcagaatttaggccacccgtattggcttaccttggctccaatgtatatttggtttataatttt

SEQ ID NO: 195633 - DNA, 110 bp, Homo sapiens
gaggacacgaggcggcgggctggagacatggaccgcggcgagcaaggtcagcccaaggccaaccccactgtcactctgttcccgccctcctctgaggagctccaagccaa

SEQ ID NO: 195634 - DNA, 100 bp, Homo sapiens
cgacgtctatctcagatttggaattttcatcagattttaccctgaaaatcacaaggacatccatgtgcacgatgcatagctctcttaggtcccttcgtaa

SEQ ID NO: 195635 - DNA, 74 bp, Homo sapiens
gccatcgccctcctgaaggaggccagcaactatcagttgagggatttgcagttgataaaatggctggagaggtt

SEQ ID NO: 195636 - DNA, 99 bp, Homo sapiens
acgttggagatgagctccgagaagtgaacgggatcgcagtcctgcacaagcggcccgacgagatcagccagattctgaattttgaaaaccaacctggac

SEQ ID NO: 195637 - DNA, 100 bp, Homo sapiens
gagccctgggcgctgcttgctaaagagccgagcacgcgggtctgtcatcatgtcgcgttacgggcggtacggaggagtggcagaaatctgaagctatcat

SEQ ID NO: 195638 - DNA, 91 bp, Homo sapiens
ggcagaagcaagtacgccaaaatctgctttgaggataacctatgaagccaaggaggagttcctggatctgcttgatgtgttgctgccccat

SEQ ID NO: 195639 - DNA, 74 bp, Homo sapiens
cctcccaagtagctggggccacagacggcaactctgtaccctggtgtggtttttggcatctgcttcgtattgaa

SEQ ID NO: 195640 - DNA, 80 bp, Homo sapiens
aattcgatggattcaacatcaacacttgcagggaaatgatcagtctgttggattaatagctcttcaagtctgcaataaaa

SEQ ID NO: 195641 - DNA, 76 bp, Homo sapiens
ttcatcaaagacgtaatcaaagacggcaacgcgcttatcagcgctatgagaagtggcgggacaggcttcattggga

SEQ ID NO: 195642 - DNA, 144 bp, Homo sapiens
ctgtggtggacagtgagggccggacagagactacagtaacccgacacgaagcagatagcagtcctaggggtggccaggtcagagcagcccaccatgggatggggagggggtggaggctgcaccccgcgcccacccatccaccag

SEQ ID NO: 195643 - DNA, 100 bp, Homo sapiens
ggcggacctttgtcgagtacctcaacgctgtgaccgagaggaacaacaacctgaccttcctgcggccgtactaccagacggaggagggcgaggagaaccc

SEQ ID NO: 195644 - DNA, 127 bp, Homo sapiens
tctcaatatctgtcttcggtggactccttcggcagtccacccaccgccgccgcctcccaggattttttatcaagcagaaatgcatcgaacaacgagaatcaagatcactgagctaaatccccacctg

SEQ ID NO: 195645 - DNA, 82 bp, Homo sapiens
gcagctgcgggtccgggattcccagccatggcagattcctccgggcagcagggtactctctgaagatggcagaagctcacca

SEQ ID NO: 195646 - DNA, 100 bp, Homo sapiens
ggacggggaggaggagcaggagctggaggaggagccgccgccgccagcttcgtagatcagaagtcggttgtcggtctcactggactacaatcaaggtgcc

SEQ ID NO: 195647 - DNA, 96 bp, Homo sapiens
aaggaaacatggaaggacctggactggagtcacgccagtacaaggaggatactggcaaagatgagacctaatctgggagcctgcaagtgacaacag

SEQ ID NO: 195648 - DNA, 126 bp, Homo sapiens
gccaaagacaattcaggaactgctgtgcagcccctcagagtaccgcttggagatcctagagtggatgtgtacccgcctcctgacaaggtgatccgggcgggccccgcaggaattttatcccctcac

SEQ ID NO: 195649 - DNA, 80 bp, Homo sapiens
gctcggagtttgaggacttctggaggcccccgtcaccctccgcgtctccagccaagacaatgcaaactccagtgaacatt

SEQ ID NO: 195650 - DNA, 100 bp, Homo sapiens
tcctcctcctctggctccagttctagtgactcagagggctctagccttcctgtgcaacctgaggtggcactgaagagcttccgccctgcgctgccagtct

SEQ ID NO: 195651 - DNA, 100 bp, Homo sapiens
cctgggtctcagccccgcgtacggcctttcacgagtcttcaagccttcagctcttcaccaccaggagtgttccttgagaaggactatgagatttaccggg

SEQ ID NO: 195652 - DNA, 133 bp, Homo sapiens
agtttgaccgggtacacaaatggagtgaagtgaatacagctatcaaaatgatcccagcactattcctgatcagagaactccagttgcttcaacacacagtatcagtagtgcagccaccccagatcgaatccgc

SEQ ID NO: 195653 - DNA, 90 bp, Homo sapiens
cgcagagccaggaggcggaggcgcgcgggccagcctgggccccagcccacaccttcaccagaaactatccaactctggccaatattgaaa

SEQ ID NO: 195654 - DNA, 101 bp, Homo sapiens
tgctcttccatcctcaacaagtacgacgtactccccgctcttgaagaaactctactgccagatcgccaagacatgccccatccagatcaaggtgtccaccc

SEQ ID NO: 195655 - DNA, 100 bp, Homo sapiens
actgggacagcgttctgtcatctcagcaaagaatgcttcttccagaccagctggtcttgcttctggagcatctcttggagcagaagactctgagcccccg

SEQ ID NO: 195656 - DNA, 100 bp, Homo sapiens
atgccatcgagcacaccctgcagtacgacaaagagattattgtcatcaatacagcagtggcctgttccaataattcaagaaatggaatatttgatttgcc

SEQ ID NO: 195657 - DNA, 75 bp, Homo sapiens
aggatctggtgtaccaggcgaagctggccgagcaggctgagcgatacgacgttgctgcagcaaacgagattgcta

SEQ ID NO: 195658 - DNA, 100 bp, Homo sapiens
cccaggagttccaaacagtgctccctttaaggaggctcttcttagggaagctgagctaaggaaacagaggagagacaagagagacacctccaacttcgac

SEQ ID NO: 195659 - DNA, 98 bp, Homo sapiens
ggccaacgtggggtcatcatcaacactgccagtgtggctgccttcgagggtcaggctggacgactgtggcctcacggaagcacggtgcaaggacatca

SEQ ID NO: 195660 - DNA, 80 bp, Homo sapiens
taactgaagatatgcttcgtgggatctttgagccttttggaagaaaattgcatctgatggtctcaagggtcgtgtgtttg

SEQ ID NO: 195661 - DNA, 100 bp, Homo sapiens
caaaatttgaacaggttaatctgttggattctaatgcagttcatcacatcattcatgattttcagtttgcagaaaaaacttcagcatgtgccaggaacac

SEQ ID NO: 195662 - DNA, 105 bp, Homo sapiens
catctccatgaggagtggctcatcaaaggcagccttttccccatggcagcccctgttctgggttccaagcttgaactacccttgtggctggcaaaaggacttttt

SEQ ID NO: 195663 - DNA, 75 bp, Homo sapiens
ctaccagtcctacgaggagctgggccggctggaggcttgcactcgcaagagaagatcactccaagaactgaggcc

SEQ ID NO: 195664 - DNA, 74 bp, Homo sapiens
aatgtcacaaaagcggatgttgaaaaggagctggtcaggctcaccatcgagaagcagggacgtccgtctccgac

SEQ ID NO: 195665 - DNA, 100 bp, Homo sapiens
gccagtatcagaacctacagtctgatttctccaaccgagttgaaatttccaaagcaagtgcttctttaaatggggggtatagaacaggctatgcttacag

SEQ ID NO: 195666 - DNA, 90 bp, Homo sapiens
atttaattttagggtcctttatatagaagggagaggaataggagatacaaatttggcccatcagtgcttcaggctggctctggtcaacaa

SEQ ID NO: 195667 - DNA, 100 bp, Homo sapiens
atcacagactcctatttgaagtatttgacgaaaatagactggcgcatattaaatttcctattgactacccctattcaccacctaccttcagattcttgac

SEQ ID NO: 195668 - DNA, 82 bp, Homo sapiens
tgggattcaaatgaaagtgaaaatgttagaagaactcgtgagccggattgatgcgccatcatgaccgggtcctataacaact

SEQ ID NO: 195669 - DNA, 100 bp, Homo sapiens
gatgtggactgcagtgctgcagtgccagatttagatgtagatgtagatcaacccaaagaagaaaagaaagaatgctactataatctcaatgacgccagtc

SEQ ID NO: 195670 - DNA, 75 bp, Homo sapiens
cggggccggaggaaaaagctcggccaaacgtaccaagaaagtcgggatcgtcggtaaatacgggacccgctatgg

SEQ ID NO: 195671 - DNA, 82 bp, Homo sapiens
gaaaagaggcaaagcaagcgagaagtcgcgggcccagcccacagcaggccgcggcgagtcctttgcacatgttggcaacaca

SEQ ID NO: 195672 - DNA, 80 bp, Homo sapiens
tgtgaccctaaaaaagcagaatggaatgggccttagcattgttgcagcaaagggtgttcctgaaaagaaggtacttccaa

SEQ ID NO: 195673 - DNA, 95 bp, Homo sapiens
cgaggattggcactcacagcggcagcgatcaagcaggcagcgggctttgccagcaaaaccgaaacaggtgtttcagtcacctccagtaacacggg

SEQ ID NO: 195674 - DNA, 50 bp, Homo sapiens
ggaaagtacaggtcctgacagctgggatgaactcttccgacaaagcctgg

SEQ ID NO: 195675 - DNA, 101 bp, Homo sapiens
ggggcctctccagggagtgctctgttcacggctccatcgctgttaaatgaaatgaatgatgtgcctttctttgatatccaactgccttacgaattggcaat

SEQ ID NO: 195676 - DNA, 100 bp, Homo sapiens
tatttttggacctgaaacagaaattctggaacacctatatgcagataatctcagtgataccttgaagaagctgaagataacagctgttgacaagactgag

SEQ ID NO: 195677 - DNA, 75 bp, Homo sapiens
gtgcattctctcctgactcttctatgctgtgttcagtcggagccagtaaagcaactgctgagaaggaagaatttg

SEQ ID NO: 195678 - DNA, 73 bp, Homo sapiens
gcaaccatggctgaagaacaaccgcaggtcgaattgttcgtgaaggctgaattcggtcagaagagaatccatc

SEQ ID NO: 195679 - DNA, 123 bp, Homo sapiens
ccaggtagacatggaggccgtcggggagacgctgtggtgtgactggggcaggaccatcaggatgatcacggacgtgcagctcgccatcttcgccaacatgctgggcgtgtcgctcttcttgct

SEQ ID NO: 195680 - DNA, 100 bp, Homo sapiens
caagtgtccgctgcacacagtcctgaagctgactcctgtggcatatggccaccagcttgggctccccacggagggcagcaagtgggacttggggaacccg

SEQ ID NO: 195681 - DNA, 83 bp, Homo sapiens
ttcatctttacagaggaatagtctacaaaggaagacttgtaacctggagaagagatgagctttgatccaaaccttctccacaa

SEQ ID NO: 195682 - DNA, 78 bp, Homo sapiens
agaaggatagacttggctttgagcttcctgcagatttcacaaaactgcatcttactgacagtctccacccacaggtga

SEQ ID NO: 195683 - DNA, 110 bp, Homo sapiens
cggactggtctgtctgagggagatggtgacaagctcaaggcctgcgaggatttttcaagccacattcaattgataggatgaaaaaatttaagagaaggctatccctcaca

SEQ ID NO: 195684 - DNA, 97 bp, Homo sapiens
gatggaaagctgcgctttcaaggctgcgctggcctgcgtgggagaaatggtggagtcaatgaagaaagtagcagggatggatgtggagctgacagtt

SEQ ID NO: 195685 - DNA, 100 bp, Homo sapiens
catcaacttccggccgcagatgtcccagggcgaagctgtgctcaggcccgggctggacgcagagccagagctgtccccagaggagcagagggtcctggaa

SEQ ID NO: 195686 - DNA, 100 bp, Homo sapiens
cagcattttccaagtactgtaaattcctgtgcagaaggcatcgtcgtcttccggacagactatggtcaggatgccggaccagatctctgtctcggagttc

SEQ ID NO: 195687 - DNA, 100 bp, Homo sapiens
gaaaatagcctttgccatcactgccattaaggtcatgaatgaaaaacttcagcactgcatggaactaacagatctaatgcggaatcacctgaatgagaag

SEQ ID NO: 195688 - DNA, 74 bp, Homo sapiens
ccctgtaggctggagggactgtgaggtaaacagctgagggggaggagacggcctgaccttcataagaagaccca

SEQ ID NO: 195689 - DNA, 73 bp, Homo sapiens
gtggagcagctgcctgggagaatgttgactctactgcagacccagccgatgcccaatcctgtggcgtactacc

SEQ ID NO: 195690 - DNA, 82 bp, Homo sapiens
ccgggacctggcacccgaatccggcctgccgggcttgggcactgtttaaaggaaagttccgagaaggcatcgacaagccgga

SEQ ID NO: 195691 - DNA, 75 bp, Homo sapiens
tgagtcagtgcgccgctctccagcccgcttgaacggtgtcgtgaaaactacccctaaaagccaaaatgggaaagg

SEQ ID NO: 195692 - DNA, 100 bp, Homo sapiens
gaatttactgacaatgtgagcagtgcttttgaacaagaggacaaaagcatgtcttcccttcctgggtgcattggtttggatgcagcaacagctacagtgg

SEQ ID NO: 195693 - DNA, 83 bp, Homo sapiens
agagagtagtgaaagaggaggaagccatagcactcgcagagaaatatgggaatctgtcttgaactatcgtttcgatcctctcg

SEQ ID NO: 195694 - DNA, 95 bp, Homo sapiens
tgagggacgatatgaatatgaaagaattccgagagaacgagcacctcctcgaagtcatcccagtgtacagtctgaaaatacagcctgttgagaaa

SEQ ID NO: 195695 - DNA, 86 bp, Homo sapiens
cttcggcagtccacccaccgccgccgcctcccagaccctcagtgcagacgcaagcgtgaacacccttcctgtagtggtctccagag

SEQ ID NO: 195696 - DNA, 50 bp, Homo sapiens
tgtctttcgtggaagacataaggaagactatgaccgtctgaggcctttat

SEQ ID NO: 195697 - DNA, 98 bp, Homo sapiens
cgtcagccgccaccggcagcagcagcaccaccggacggaactcgaatcatttatgacagaaagtttctgttggatcgtcgcaattctcccatggctca

SEQ ID NO: 195698 - DNA, 95 bp, Homo sapiens
tcctaagacgccaggaggagtttgagcataaggtactgggcctaatcgctacgtgcctctttggctatgatgcctatgtcaccttccccgttcgg

SEQ ID NO: 195699 - DNA, 100 bp, Homo sapiens
cagtggttcttatagccctggagtgacctactcgcccgtcagtggttataataagtgacaatgtcagtgcctactgcctgcatattgctgaggatgatgg

SEQ ID NO: 195700 - DNA, 100 bp, Homo sapiens
ttactaaaacacatcatgaaggcctgttttgaagagaaggggaataagactgcatctgttcatatgagcattagtgaccagaaggatcccaaggatcgaa

SEQ ID NO: 195701 - DNA, 113 bp, Homo sapiens
cccattcattctggattggtggatctgaagtacaaaatattttccaggtgaagaacgaggtggagaagctcccccgacagcagcggaaggaaagcatgaagcagaagatggag

SEQ ID NO: 195702 - DNA, 100 bp, Homo sapiens
ttaccagggaggagcagtgaaagagaagggaatgctaagaactgctgggaggatgacacaatggctgccatccggaagaaactggtgattgttggtgatg

SEQ ID NO: 195703 - DNA, 99 bp, Homo sapiens
cccggagtccgactcgctacgcgggtcttgcgagatatctggccgcctctgccgcagctggaggcgccaagcccatctttgtgtgcttgcatccaactg

SEQ ID NO: 195704 - DNA, 100 bp, Homo sapiens
aatgaccgcaatctctgccagcaccttgggaagagaaagaaaatgccgaaggcactcagacagggtgccaaagcatgctttctgcgggacattcctttct

SEQ ID NO: 195705 - DNA, 100 bp, Homo sapiens
ctgaagatggctactctggagttgagccaatggagatcttcgtggatgatgagacgaagttgacgctgcatgggttgcagcagtactacgtgaaactgaa

SEQ ID NO: 195706 - DNA, 97 bp, Homo sapiens
tggatctgctgctcaagctacacgatgagcgtgtgttggttgctttcggccagcgggacggcatccgagagaatgatgaggagcaggaggcactgcc

SEQ ID NO: 195707 - DNA, 75 bp, Homo sapiens
cgagagcgtggagcgggctgggccagatgccttcaattaagttgcagagttctgatggagagatatttgaagttg

SEQ ID NO: 195708 - DNA, 98 bp, Homo sapiens
cagcggcccgggaggccggagccaagccagcgacccaccatggagacccgctacaacctgaagagtccggacttgtcagcttgtgggaaagtgacatc

SEQ ID NO: 195709 - DNA, 80 bp, Homo sapiens
aaaccaagcgaggccaggccgctctggaccgtctcaaggttacgttatatataggattcgtgttcgccgtggtggccgaa

SEQ ID NO: 195710 - DNA, 101 bp, Homo sapiens
aatgtctgtcacatatgatgattccgttggagtagaagtgtccagcgacagcttctgggaggttgtaaagaagaaagttctaccctttctgtcaaaatgaa

SEQ ID NO: 195711 - DNA, 111 bp, Homo sapiens
agacaagaaaggcaaggaaacatcttttgacaagatgtcacctgaaagtggtcacagccgcatctttgaagggcttatttcaaaacctttgtccctcagttccaggaggca

SEQ ID NO: 195712 - DNA, 127 bp, Homo sapiens
agccgggccgggccatggccgcctcggagcggctgtacgagttgtggctgctctactacgcgcaggtttttcgttggaatatacgttgcacatttatggcgattctgagtgtgagggcagacttctg

SEQ ID NO: 195713 - DNA, 100 bp, Homo sapiens
aagtataatgtctcctgcataatgatcatgccccagcaccaaaggcaaggatttggacggtttctcattgatttcaatgtgtcgtggaggccgaatgttt

SEQ ID NO: 195714 - DNA, 75 bp, Homo sapiens
gctgcttgtgaagaaatagcctaccagggagaatgctggagaaccagactcctggagcagtttatcctatgaaat

SEQ ID NO: 195715 - DNA, 75 bp, Homo sapiens
ctgtccacctgcaaggattcaaagaagtgtgggccaaactgaaattgcagaaggcttcagaacgatggcagcctg

SEQ ID NO: 195716 - DNA, 100 bp, Homo sapiens
ttaccctccgggggtaaaagagatcaccgacaagatcaccacggacgagatgatcaaacgcctgaaggtccggtttatcactaaaatatggcatcctaat

SEQ ID NO: 195717 - DNA, 50 bp, Homo sapiens
agaatgtttgcttgccatttgcaattttaacttctagtcatggcgaatga

SEQ ID NO: 195718 - DNA, 75 bp, Homo sapiens
ggagtatctggtgaaatggagaggctggtcgcccaacgtgctgagctacgtggcgggcatcgcctggttcttggc

SEQ ID NO: 195719 - DNA, 100 bp, Homo sapiens
tttaagggccaggaaaggaagcattcagggaatttaggtgtagccagaagaaaatcagctccggactcaggacttgtcctatttccgagatatgccgcgg

SEQ ID NO: 195720 - DNA, 83 bp, Homo sapiens
gtctgtccaccatcatccttttgggcttgatcatcgcctaccacacacgtgaagtccagaaaatcggcattggagaactcatc

SEQ ID NO: 195721 - DNA, 98 bp, Homo sapiens
cgggaggtgtggaagagccgggttggttcttacttgaaatctccaaaattccctatttggattgttggcagtgagactcacctcaccgtattttttgc

SEQ ID NO: 195722 - DNA, 104 bp, Homo sapiens
tggagagccagaaaaggatccagaactggagtggaaggtgtcatggagaaactccagctgggcccagagattctgcagcgggaaaatccaaggcttatttatgc

SEQ ID NO: 195723 - DNA, 100 bp, Homo sapiens
caagtcgagaggaaactgttgtgcctcttcatattggcgatcctgttgtgtttttcgttggaatatacgttgcacatttatggcgattctgagtgtgagg

SEQ ID NO: 195724 - DNA, 100 bp, Homo sapiens
tttaaaattttacataagaagttacctttttcagacgttatgaagaggacatgtactggaggagaatggaggaagaacaacatcattgggatgatcgccg

SEQ ID NO: 195725 - DNA, 85 bp, Homo sapiens
ccatgccgtccgccttctctgtcagctctttccccgtcagcatcccagccgtgctcacggtttttagaacttcagccataaaaat

SEQ ID NO: 195726 - DNA, 50 bp, Homo sapiens
cagggagacacatgtttgtctttcaggatgggtcatcagttaaggaagtt

SEQ ID NO: 195727 - DNA, 82 bp, Homo sapiens
atcacggctgtgcaggcacgcatgcaggccagctaccgggagcacgtgaaggaggtgccagatgtgacatccagatgaccca

SEQ ID NO: 195728 - DNA, 100 bp, Homo sapiens
tttggtcaacaaaatccacgtcaggaatggtttgcagtgtatgtggaacttaatcagcaaattgcagcactcttgaatgctggcgatgaggaagatcttg

SEQ ID NO: 195729 - DNA, 83 bp, Homo sapiens
aagaagggaaggcgcgagtgaggaaaggaggtactgtagacctgcctagagctggaacgttacctccagagcgagccctgcta

SEQ ID NO: 195730 - DNA, 95 bp, Homo sapiens
agcagtggcgatgacagctgtaaagcacgaacaggaatacatggaagtccgggagagaatacacagagccaatggagtctctctctgttgcccag

SEQ ID NO: 195731 - DNA, 50 bp, Homo sapiens
ttcatagcttcggggatggtcaatcagcatatgtaagtggaactcagaag

SEQ ID NO: 195732 - DNA, 100 bp, Homo sapiens
gaaataatggctgcacagcctgccgagttggaggtaatgcttgaagataatgtttgcttgcccagcaatggcaaattatatacaaaggtaatcaactggg

SEQ ID NO: 195733 - DNA, 100 bp, Homo sapiens
agctggtgcagaacattgcgcggcagaactgtcaagtaatccacctctggctaccatccttattcctcctcatgctcggattcaagcagctgcttcaacc

SEQ ID NO: 195734 - DNA, 74 bp, Homo sapiens
cacttgtgaacattcaagtgaagcaaaagcctttcatgattatatgtgtcttgctgaatcagggctctcttatc

SEQ ID NO: 195735 - DNA, 101 bp, Homo sapiens
aggccccagccggcagcatgctgaggacttcctgggagaggtggccaaggtggaatacgtcaggaagaagccaaaattaaaagaagtccaggtgaggttag

SEQ ID NO: 195736 - DNA, 50 bp, Homo sapiens
ggggccgggctcaggagcagaggcttccagcatagagaacaagcaggact

SEQ ID NO: 195737 - DNA, 83 bp, Homo sapiens
acagcagatgtaccctcagtacgccacctactattacccccagtatctgcaagccaagtagaacttcatggaggaacacggag

SEQ ID NO: 195738 - DNA, 82 bp, Homo sapiens
agatatcaagaatacttcagtcaccaacgtgccaaatatggagttcatgatcaagtgttgcccacaccaaatgcttcatcca

SEQ ID NO: 195739 - DNA, 100 bp, Homo sapiens
gaaaatattccaaggaatttttcaccaaaaaagattggcggcagtaagcacacaatgaatgatcacctgcatgtcggcagccacgctcacggacagatcc

SEQ ID NO: 195740 - DNA, 102 bp, Homo sapiens
ccaaacagaggattttagtctatatgcttgtgcttctccaaaaacacccatccaggcagggggatatggtgaatctggattgggaaagtcgacattaatcaa

SEQ ID NO: 195741 - DNA, 75 bp, Homo sapiens
tcctgggctcctaattcttggtccagcttcttccaggtcctggtgcttgatggtcgaggccatctcctgggccgc

SEQ ID NO: 195742 - DNA, 82 bp, Homo sapiens
cgttcctcaaactccgtgaccagttgagaagctgatgtctcctcgacttccaactggaaccttgaacccccacatttctgga

SEQ ID NO: 195743 - DNA, 82 bp, Homo sapiens
ctccgccgcgctccagcctcgctctccgccgcccgcaccgccgcccgcgccctcaccagtcctcatcaccgggggcatcgtg

SEQ ID NO: 195744 - DNA, 90 bp, Homo sapiens
cgtactggaaaaacccagctttctcataccctctgtgatttggagcaagaggtggtggtggccttcccccgaagaaatttggtaatcctg

SEQ ID NO: 195745 - DNA, 58 bp, Homo sapiens
agcaacccttaatgtgcatgatggttgtgaaagaccggcagagaccaatgccaatgtg

SEQ ID NO: 195746 - DNA, 88 bp, Homo sapiens
ccgttgagagacgcggctttcggcaagaactggattcgtggcgccacaagctcattcactgtgtagggtaaaggcagcagtaatgcta

SEQ ID NO: 195747 - DNA, 95 bp, Homo sapiens
caacaacacaggggaggcaaggacagaagagagtcccttagtggacatttctagttaccaagctgctgaggcgaggaaactgaggctcagagagg

SEQ ID NO: 195748 - DNA, 100 bp, Homo sapiens
tcctcctctccttctacctgctggggttgcttgtcagtagcgggcaaggataagttctgaacgtcgaaaagaaaagtctcgagatgcagccagatctcgg

SEQ ID NO: 195749 - DNA, 75 bp, Homo sapiens
accgcgagggtgacgccgggccgggtaaattcaactggaagggaactattaaagcaattctgaaacaggccccag

SEQ ID NO: 195750 - DNA, 83 bp, Homo sapiens
agagaactgctggaaggagactggatgatagaatttgttcctctgaacaacagggagaatatctctgatcccacctcaccatt

SEQ ID NO: 195751 - DNA, 50 bp, Homo sapiens
ccaaatacaggagaaatggcattggctggttacatgtctgggatgctggt

SEQ ID NO: 195752 - DNA, 88 bp, Homo sapiens
atgacctgacccacaccttcttcaacccggaccgggagggctggctcctgaagctggactggcacagcctccaggttggcgggctcat

SEQ ID NO: 195753 - DNA, 73 bp, Homo sapiens
cgccacagcggcctcggcctccccttggattcagacgccgattcgcccaggtgctactcgtgagcagtagtcg

SEQ ID NO: 195754 - DNA, 100 bp, Homo sapiens
ctgtccgacggcgacggcaccgtggagaaagaaacccaccttgtcccatccacatcaggacatcccagctggagttcaaccttcatcccttctgtggcag

SEQ ID NO: 195755 - DNA, 75 bp, Homo sapiens
cagaaagccttgcgagttttaaagcaaaagaggataactggcatcaaatactcacaacatagctcaggatctgtc

SEQ ID NO: 195756 - DNA, 101 bp, Homo sapiens
ttagctgcagtagaagttcttgttgcagaaatgatggaagaattgcatagcctggacccacgacggcaggaattattggaggccaggtttactggagtagg

SEQ ID NO: 195757 - DNA, 98 bp, Homo sapiens
tttggtcagggtcttgctactggcatgccagggcatggtgctgatgtgaaatgtgtagactggcatccaaccaaagggttagttgtttcaggaagtaa

SEQ ID NO: 195758 - DNA, 95 bp, Homo sapiens
tcaatttctggatatgtgcatggatctgaaagttcatcctgaacaggaaaaggttcagcagactgtacaggatctttttggcagagccccaagta

SEQ ID NO: 195759 - DNA, 100 bp, Homo sapiens
cctgtctgcaggatttacgcgcacgttggaaccgaagagagctctgttgttgcaaagaggactgtcagaaggacgtagaaggcacggttttactgtgagg

SEQ ID NO: 195760 - DNA, 100 bp, Homo sapiens
cggcctgggtgctggcgaagcggaggccggaggtctcctctgagcctccggcctccataagacccaaaacagatgacacctcttcccagtcccccgcgcc

SEQ ID NO: 195761 - DNA, 100 bp, Homo sapiens
atttgacttggaagcaatgtttgaacaaactcgaagaacagctgtggaaagaagttgcaaaacactggaacactctgctccagccaaggtggtgagggca

SEQ ID NO: 195762 - DNA, 76 bp, Homo sapiens
gattctctggtccccctgggaaagagcatctgcaggggctgctgagagtaaatacttggcgcctccagctgctggc

SEQ ID NO: 195763 - DNA, 83 bp, Homo sapiens
cagaatatagcgccatcattcgtgaagaatctccaagatgatctggaaaaacaggaaaggagcttacagaaatttggctctat

SEQ ID NO: 195764 - DNA, 75 bp, Homo sapiens
ccacttgcacgaaagctttcctaggccaaaaagaggaatgggtaccacagaccatgtcatcgtcctggcgtccac

SEQ ID NO: 195765 - DNA, 100 bp, Homo sapiens
attcttacgatgtcttctctttgctacgccatatcagcgggaacaagattggctgggagaagacgggaagccactcagagcctcaggcacgaggagaccc

SEQ ID NO: 195766 - DNA, 100 bp, Homo sapiens
caagaatccaaagaaaacaaaatggtggtatcatgacttcagtgccctgaacggttagagaaattaatgaaggagctccaccaggtgccttcacaactct

SEQ ID NO: 195767 - DNA, 83 bp, Homo sapiens
ctgccaatttaccagagataattgataacaccctgtaacagctgaaggcagtacggcccaaaacgccacccgttgtaatcaaa

SEQ ID NO: 195768 - DNA, 100 bp, Homo sapiens
tcctacctaccgggagctgatagagcagctacgaaacaagccttctgacctgggcacgttcaagggcagcaggaaagacgagatcctgggcatcgccaac

SEQ ID NO: 195769 - DNA, 50 bp, Homo sapiens
gccatacgcgctctccctgtttagagagagcaggagattcggatgggtca

SEQ ID NO: 195770 - DNA, 100 bp, Homo sapiens
cttgcccgtgaccgtcgctagaactcagttgtgcgttgcggccagtcgccactgctatctgtgacttcctccgcggagccacagtccatagaatcctcgg

SEQ ID NO: 195771 - DNA, 76 bp, Homo sapiens
ctggtagccaccggcactcacgctaatggcactgactcagccttccatgtgcttgctaagccagcccatactgctc

SEQ ID NO: 195772 - DNA, 100 bp, Homo sapiens
aacacgttactgttgatgacttggtggctgaaatcactccaaaaggcagaggctcgagaactcttcctaaaagcagtagaagaagaacaaaatggagctc

SEQ ID NO: 195773 - DNA, 100 bp, Homo sapiens
cgccgcggcgaggagcgagcgctgcgaggtggcggcctgagatgccttcaattaagttgcagagttctgatggagagatatttgaagttgatgtggaaat

SEQ ID NO: 195774 - DNA, 100 bp, Homo sapiens
tcgaaatggttatcaaagtgtttgttgctacatcttctgggtccatagcggcgcacggcggccctacaggagggtctgaggcgggcagtctctgtgccgc

SEQ ID NO: 195775 - DNA, 82 bp, Homo sapiens
ccagaccctggagcctcagttggaagcagccgatccagcctgcggagcctgtggggcaggacacatgttcaaagagcataat

SEQ ID NO: 195776 - DNA, 95 bp, Homo sapiens
gagacaacagaaacagaaacgattgtggaaacaggtcaaaaccgctttccgggatgccgctgcaaagcacagtgcaacaccaagcagtgcccgtg

SEQ ID NO: 195777 - DNA, 106 bp, Homo sapiens
gggactgtctgatccctgctcagaggggcctctacaaggatgtgatgatggggacctatgggaacctactctcattagattgtgacaccaggactgaagacaagga

SEQ ID NO: 195778 - DNA, 73 bp, Homo sapiens
ctaacgctggccgacaacagcctggcgtccgccacggttggattcagatgccgaggacacagtacttcctcag

SEQ ID NO: 195779 - DNA, 99 bp, Homo sapiens
gagatggagagagacctagttaggatcaaaatacttgctggatggtggactcagagaccaataaaaataaactgcttgaacatcctttgactggttagc

SEQ ID NO: 195780 - DNA, 100 bp, Homo sapiens
agactgacaaagctgtggttaccttagatgcaagtgatgatggaatcttggccaaaatcgtgctttaccgatttgttacaactcaagcaagggccagcag

SEQ ID NO: 195781 - DNA, 100 bp, Homo sapiens
gcccggaacaatactgggggcagcacgggcttgcccaggcggaaggaggtgacggaggaggaggctgagagcgccgatgtggaagtggccagattctgag

SEQ ID NO: 195782 - DNA, 82 bp, Homo sapiens
gacagagacaagctgagcttgccgcacaaaaagctagagagatcctgggtgtttggctgacctacagatacaggaaccagaa

SEQ ID NO: 195783 - DNA, 101 bp, Homo sapiens
tggggttttactctaaagggtggcctggagcacggagaaccattaatcatctctaagacctaagtcagtgttagtctaccactgtacatctggtaacctca

SEQ ID NO: 195784 - DNA, 110 bp, Homo sapiens
attgatttccgggagtccgcaccaggggccctcagggaagagaccctgcaaagatcctgggagaccaaggcatgatgacctgaaggagatgctggacaccaacaaggatt

SEQ ID NO: 195785 - DNA, 51 bp, Homo sapiens
agtccatctaccctgactccttcacagcactggggataccaccatcacaga

SEQ ID NO: 195786 - DNA, 100 bp, Homo sapiens
attttatataatgatgcagtagaatcctgcattcagatgagacaaaaggacccagtgaaaggaatgacagcagatgactaaagccgcctttcccctctgc

SEQ ID NO: 195787 - DNA, 75 bp, Homo sapiens
gccgggacaccctggaagcctagaaatggtgtggagagagtatgctctgtgtcgtcccagacatttctgcattcc

SEQ ID NO: 195788 - DNA, 83 bp, Homo sapiens
cggagctgcagcgggacctggtgggcatagagaacctcattgctcctggcagggttacagtgtacagcatgtatgtttctata

SEQ ID NO: 195789 - DNA, 100 bp, Homo sapiens
gtccatcatagtcaactgcgtggaagagaagctcgaatatgagactcaaattaagaagatgctatgctcaaaagatagcctgggactaaaagaggaactg

SEQ ID NO: 195790 - DNA, 100 bp, Homo sapiens
aaaggccctgaaacaggagggagcgcgtgtaaacaggaacatcgataagtagtgtaaaaacttgcacaatgaaatccgaagccaaggatggagaggagga

SEQ ID NO: 195791 - DNA, 101 bp, Homo sapiens
catgctggcaagtctgaaggtcaagcctcattgctacgatttcagagtaccctggtaatagctgagcatgcaaatgattccctagcacccattactttaaa

SEQ ID NO: 195792 - DNA, 82 bp, Homo sapiens
ctgtgcgggatcgacgcggacagcgggctggagcctgacgagctggcggctcaccatggatgatgatatcgccgcgctcgtc

SEQ ID NO: 195793 - DNA, 100 bp, Homo sapiens
ggaccacattacccagcttcacgagtacaatgacatcaaggatgtggggcagatgctgatgggcaaactagatgcatggagtcatctcccacatttctct

SEQ ID NO: 195794 - DNA, 100 bp, Homo sapiens
ttctgatagcaactttaatgtgatatgtcttctccgactactatgaagaagcctgaaaagccattgttcagctctgcatctccacaggattcttccccaa

SEQ ID NO: 195795 - DNA, 87 bp, Homo sapiens
cttggtttcgggatctcggtgctgcagacggcgagacctcctgcacaggttttaaaatcaaagatgggaaaatcggagaaaattgcc

SEQ ID NO: 195796 - DNA, 82 bp, Homo sapiens
tggaagttgagcaagagcagcggcgcagaaaggtggaggccgggaggacgaaggtgcgcgcggagccatggttatcatgtcg

SEQ ID NO: 195797 - DNA, 75 bp, Homo sapiens
tttgtgatattgcggcagaactggccaggaatttaatagactcagattgatggacaacttttcttaattaagcac

SEQ ID NO: 195798 - DNA, 90 bp, Homo sapiens
gggagctagtggaagttactgccgcgccaccgagtccggaccggagactttggggcctaactaggagcaggacatcgagactttacatgg

SEQ ID NO: 195799 - DNA, 75 bp, Homo sapiens
acttgtaccttgtccccagcgacgccttgctaacaaagaccctggtgggcagcagtgggaccattctgaccacaa

SEQ ID NO: 195800 - DNA, 74 bp, Homo sapiens
gtctggaccgagctcttggatgttcttggacttgacgtgcaactgcagatagaagacctgactcgtaaactgcg

SEQ ID NO: 195801 - DNA, 100 bp, Homo sapiens
cctcctgctgaagaggatgaagatgactttgatgatacccttgttgctattgacacctcacctgtctctgaaagccaaaagggccaaggtccaggacccg

SEQ ID NO: 195802 - DNA, 82 bp, Homo sapiens
gaaattactgtctcaagtgatacgagccccacagtcttcgttataacctcacggtgctgtcctgggatggatctgtgcagtc

SEQ ID NO: 195803 - DNA, 82 bp, Homo sapiens
ctgaacggagtgtgcgacggattgggagcaaacggggattcagcgtccgatcctttggaacagggactcacgtgaagcttcc

SEQ ID NO: 195804 - DNA, 83 bp, Homo sapiens
gaggcggcggagagcgaggcctgattttcagctgaactctcatctctcaacactggcaaatattcataagatctaccacaccc

SEQ ID NO: 195805 - DNA, 83 bp, Homo sapiens
gcggacccagcacgcctgggccgggggctgcagcatggctgcaagatcaaggccctgcgggccaagacaaacacctacatcaa

SEQ ID NO: 195806 - DNA, 75 bp, Homo sapiens
agcattttgcaacgcagttcggagttattatgagtgcccttgctaccagttccgagccagccgagacctgccgtg

SEQ ID NO: 195807 - DNA, 100 bp, Homo sapiens
gcgacggcggcggtggcggcttggacgactcggagagccgcggagctggagtttgttcagatcatcatcatcgtggtggtgatgatggtgatggtggtgg

SEQ ID NO: 195808 - DNA, 100 bp, Homo sapiens
gacggaagcccaagtggcacaaatgcagaaactccctctggtgatgatttcagatataaagatgaagcgcagctgtataaagaagagcacctgaggaatc

SEQ ID NO: 195809 - DNA, 75 bp, Homo sapiens
tgacatgtctgatcccttgctcccatccctgcagcatgaacaaggatccctctgtgacccagctgaccaacgccc

SEQ ID NO: 195810 - DNA, 80 bp, Homo sapiens
caaaaattgtagggcgcaccaaggatgtgaaagaggctgtcagaaagctggcttatcagctcaacgggacccaggtggag

SEQ ID NO: 195811 - DNA, 100 bp, Homo sapiens
gccttccagaggctcaacttcctgtaccagtttgagttcctgagatctagttggtgagagacatgatgttctaccggttgctgtcgattgttggaagaca

SEQ ID NO: 195812 - DNA, 83 bp, Homo sapiens
ttcagatcttcacagcacagttcctgggaaggtggagccaccagcctctccctgcttgggttgacgatagccattcgctatag

SEQ ID NO: 195813 - DNA, 82 bp, Homo sapiens
cggccaccgtttctgcgatacctgcctgcaggagttcctcagacaatgcagatcttcgtgaagactctgactggtaagacca

SEQ ID NO: 195814 - DNA, 75 bp, Homo sapiens
gaaggtccgcgttaaatgcaactatacacagaatgggattttacatatgctggacagaaataagagaatcaagcc

SEQ ID NO: 195815 - DNA, 100 bp, Homo sapiens
agcgggcggagctgtgcgagagcctcctcacttggtttaagctatgaagaaggacatccctcacactctgaaacagatctccttcagagacagagttttg

SEQ ID NO: 195816 - DNA, 100 bp, Homo sapiens
cccaggacgagctcaaccccatccactgccgcggccgtgggcccgaccgcggggacccgcattttccccaatacatctctgctcatctgactcttatctt

SEQ ID NO: 195817 - DNA, 100 bp, Homo sapiens
tgcccagacggctcacctgtgcgggatggaacaaaaggtgccacacctccctggatgatccaagatgaagaatacattgctgggaaccaagaaataggac

SEQ ID NO: 195818 - DNA, 112 bp, Homo sapiens
agcccggccggagctgggtctggagacgccgtggcagcctgaacggagtgtgcgacggattgggagaaatggtggagtcaatgaagaaagtagcagggatggatgtggagct

SEQ ID NO: 195819 - DNA, 97 bp, Homo sapiens
gctgagtggtttttcggatcatgtctggtggctccgcggattataacagcttaaagtatcagtggttgagaagagcttttcggacctgttactaccc

SEQ ID NO: 195820 - DNA, 100 bp, Homo sapiens
gtggacgaccgttgctgagctggtgtggaacgtctgtgatcaggcttgcttccggcgtcatggctcaaagggccttcccgaatccttatgctgattataa

SEQ ID NO: 195821 - DNA, 83 bp, Homo sapiens
cagtccccgacacgtcgtcttacatcaagacaatgcagatcttcgtgaagactctgactggtaagaccatcaccctcgaggtt

SEQ ID NO: 195822 - DNA, 74 bp, Homo sapiens
gaactcgaagtggagcaaaaggtgacagtcacagcttagtaggtgtagaatgagccaaggagactcaaacccag

SEQ ID NO: 195823 - DNA, 101 bp, Homo sapiens
gaaaaggatagcttcagaaatcagaaaaacatttgggaggtgtctagcccagtggaccttctgaagggacaatgactcattcttcccaggacactggttct

SEQ ID NO: 195824 - DNA, 80 bp, Homo sapiens
gccgctgccgctgccggctccagggagccccgtgtcaagcaagccttacgacagtctgcctacctcacagacctgcttct

SEQ ID NO: 195825 - DNA, 74 bp, Homo sapiens
gatcaatccagatggcagccagtcagtggtggaggctctacacagagaacagagggagctggttgctgtgctga

SEQ ID NO: 195826 - DNA, 98 bp, Homo sapiens
aggcctgcaaattcatgacaggattattgaggctgcagatcaaattacgaagctgtataatctcttcctgaaaattgatgctactcaggtggaagtga

SEQ ID NO: 195827 - DNA, 90 bp, Homo sapiens
acagggagacgctgctgcagctccgggacacctggggccgccgaggcaaagctatgtgttctcatttcacccaagaccattggccagtgc

SEQ ID NO: 195828 - DNA, 100 bp, Homo sapiens
tgtctcccagagcctgagccaccaaagcacaaggcagaaaggagtgtttggcaatgaggagcagcagctggcgtgggccaagcgggagagcgagaaggcg

SEQ ID NO: 195829 - DNA, 74 bp, Homo sapiens
ttgacctcagcgcggatgctccggtctttcagggcctgagcctgactcagatgccactgcatcatcagataaca

SEQ ID NO: 195830 - DNA, 82 bp, Homo sapiens
cttcatccaggcctacgaggaggtgcgcgagaagtacaaagggagagacaaaggcagcgctgccctcgggggagtattggcc

SEQ ID NO: 195831 - DNA, 76 bp, Homo sapiens
gggcgctcgagctcttcctagagtcgctgttgaagaaggcctgccaggtgcttctcagcttcacgggaaagggcct

SEQ ID NO: 195832 - DNA, 75 bp, Homo sapiens
gcaggaactggcaaatcatgtctccttcatcagttcattgagaataagtgattgagttgagcaccttcaatgccg

SEQ ID NO: 195833 - DNA, 80 bp, Homo sapiens
gctcgcgctactctctctttctggcctggaggctatccagcgcctgccttgctctgccaggaaccatgagtgaggcccgc

SEQ ID NO: 195834 - DNA, 98 bp, Homo sapiens
cagccatggagttctacttagaggcctgcgtaagtgaggaaacagctgatcctgctcctgtggcctccagcctcagcgaccgaccagtgacaatgaca

SEQ ID NO: 195835 - DNA, 50 bp, Homo sapiens
gctagagggcttgggcattcacacgggttttggccaaattgggcgagggc

SEQ ID NO: 195836 - DNA, 75 bp, Homo sapiens
gagcagaggaagcttcgggaggaggatgacgtagctttgccaaagacttagaagctaagcagaaaatgagcttaa

SEQ ID NO: 195837 - DNA, 90 bp, Homo sapiens
gaaaacatcaaagaggtctagcaaaggttaaggctacctttccagataatccaacagctaaatcaccagtttccaagggcatttgcatca

SEQ ID NO: 195838 - DNA, 100 bp, Homo sapiens
caccacgcctctgcaatcatgggtcaccaagagaggctgagagaccagaagatggcagtgaacgtatactcaacgtcagtgaccagtgataacctaagtc

SEQ ID NO: 195839 - DNA, 75 bp, Homo sapiens
tgacaaaaaatcatgcaattttctctgaagaccttgaaaatctgaagaccagtcaccattactttaagtactgca

SEQ ID NO: 195840 - DNA, 100 bp, Homo sapiens
ccgcgtcctgcagcagctgccagtggagccgcctggtggttctcttcccaaagtggaagccaaattcatcaattatgtgaagaattgcttccggatgact

SEQ ID NO: 195841 - DNA, 98 bp, Homo sapiens
aacacttccctcaagtttttccttaataagccgatgcttgccgatgttgtcttcgaaattcaagctgctgtaagtaaagatgattccattatttcaag

SEQ ID NO: 195842 - DNA, 51 bp, Homo sapiens
gcctcggccgccatggtcttcagcggtgctggagaatctggtaaaagcacc

SEQ ID NO: 195843 - DNA, 100 bp, Homo sapiens
ttatcaaaatcccaggctgtcggaagcaaggacaaattgatggccaggagatcactgccaccgccgtgctggccccctggcctaggccaccccccaggag

SEQ ID NO: 195844 - DNA, 82 bp, Homo sapiens
aaatagatgcttctaaatctgttgatgaaggggctcgaatggttcgtgaactctttgaaatggccagaacaaaaaaagcctg

SEQ ID NO: 195845 - DNA, 82 bp, Homo sapiens
gcaagagtcctcagaaaacattcagtgtcagagatggctttggattccccgttctgtgtgctgctgtctggctcctgaaccc

SEQ ID NO: 195846 - DNA, 100 bp, Homo sapiens
cattatgtggaccctgaccatgtaaaggatactggtatcgggatgacacaggaagagctggtgtccaacctggggacgattgccagatcggggtcaaagg

SEQ ID NO: 195847 - DNA, 78 bp, Homo sapiens
cttgatcaggtggaacagattcagaaggagcaggattaccaaaggatgaagaactgccagcatgcgaatgctgaacgt

SEQ ID NO: 195848 - DNA, 100 bp, Homo sapiens
caccaggtttcggtcggccgtcagagtatccattgcaatttccagggtggagccagccatcctgagacgtccgtacagcccgtactggtggagtgtcagg

SEQ ID NO: 195849 - DNA, 112 bp, Homo sapiens
aaggggaaggaaacctctctgaaatctgacacctgctctcccggcaaggaaacttcgcaggctgatatgcctcttcatgttcgacgcagtagtgacccagctctaattggcc

SEQ ID NO: 195850 - DNA, 51 bp, Homo sapiens
cccacttcgttcaagacaggtgtttaagctgtgccaaaggcagtaatgcat

SEQ ID NO: 195851 - DNA, 100 bp, Homo sapiens
aagtaccaagtgaagactttgaacgcactcctcagagtccgactctcccacctgctaagactattgggaagaagttacctgcaactacagcaactccaga

SEQ ID NO: 195852 - DNA, 90 bp, Homo sapiens
cgcttgaaggcccttttacacaccgacctgaacccgggacactaaaaattctaccttcatacatgagccaacacagatctatagatttct

SEQ ID NO: 195853 - DNA, 88 bp, Homo sapiens
gggttcatctttcattgctgcaaggaacttccatgcctctaacactcatcttcaaaagactggatcttctgcaggacaactggtcctt

SEQ ID NO: 195854 - DNA, 82 bp, Homo sapiens
ttccaaggaagaatttcctctgaagcaccgctcctgtccaaatatgacccccagaaggaggcagagctccgcacctggatcg

SEQ ID NO: 195855 - DNA, 90 bp, Homo sapiens
ccagaatgggcttacggaaagaaaggacagcctgatgccaatggtcgtttttgatgctcgatgaatgctgggaattcagaggaatgtctt

SEQ ID NO: 195856 - DNA, 101 bp, Homo sapiens
gtccccagaacgcagatcagaggtagtcggacctttcccgctggcgcgcagcctcagctagaggtcagcgctgcttttggggtgaaagaagaccatcagca

SEQ ID NO: 195857 - DNA, 100 bp, Homo sapiens
caccctgaagccccacgtcgggatcgtccactacgaaggccacctacaaatagcagtttaattggttggggtcagataagaagaggagtgacaatcaagc

SEQ ID NO: 195858 - DNA, 100 bp, Homo sapiens
cacggacccatgaaccagccgggcggcgcggcggctccgcagctttgatgtggaaaatggcccttccccaggtcggagtccactggatccccaggccagc

SEQ ID NO: 195859 - DNA, 76 bp, Homo sapiens
ggaaagtgaacctgtctcagggtcattcaccacaggtctttgtctgggttggaaaggattctcaagaagaagaaaa

SEQ ID NO: 195860 - DNA, 85 bp, Homo sapiens
ggggaccgactctggggaccctcgccgaagagtgagtgatagttgcttcaggaatcttgcagaagaccgcagtgggataaatctc

SEQ ID NO: 195861 - DNA, 100 bp, Homo sapiens
ttcatcctcacctgtacgcttggctatgtgacgctgctggaggaaacacctcaggacacggcctacaacaccaagaggggtgcacctgcccaacctggac

SEQ ID NO: 195862 - DNA, 100 bp, Homo sapiens
tgcaacggagataaattcccggaaccgcgattcggcgtgtcagatgcgagccacccctctggctgctcctgcgggttccctgtccaggaagaagcggttg

SEQ ID NO: 195863 - DNA, 75 bp, Homo sapiens
tggtgtggacgcccatcccggtgctcactgttctcaggcgctgtggtctcaccttccactggggcaacaatgggc

SEQ ID NO: 195864 - DNA, 96 bp, Homo sapiens
accgaggagaagtaccaggaggcgttggccaaggcagccacctcagcagagaagtgctcctgacatctctttcaccatcgatgcgaataagcagca

SEQ ID NO: 195865 - DNA, 51 bp, Homo sapiens
tcactgcagccttgactccgtgagctcagatgcaactttccgtaactgaag

SEQ ID NO: 195866 - DNA, 100 bp, Homo sapiens
aaaagaagacggtgggatcaggagatggttatgaagacagtatggagtttccagaccatagtagacatttgctacagtgtctgagcgagcagagacacca

SEQ ID NO: 195867 - DNA, 94 bp, Homo sapiens
atgagtcatgtggtggtgaaaaatgaccctgaactggaccagcaggtgtcgtgaaaactacccctaaaagccaaaatgggaaaggaaaagactc

SEQ ID NO: 195868 - DNA, 75 bp, Homo sapiens
atctcagctgaacaccagtctaccattccttcaaaatttgataatgggctgcattaaaagtaaagaaaacaaaag

SEQ ID NO: 195869 - DNA, 107 bp, Homo sapiens
ggcgtccctggagcggccgccttccagcgttgaaatcacaaagattagacacctttttagataggtgttcttcagcaccactgacaacacggttctgacagtatttc

SEQ ID NO: 195870 - DNA, 100 bp, Homo sapiens
gtcaaggataagtctcatgacaccttccaaagaactactggttcagattttagctcttcccaagttgtgaaaatagtgaaggatgcttagactacttaac

SEQ ID NO: 195871 - DNA, 96 bp, Homo sapiens
ctccatcacccaccaacaacaccacaataatccacagccaaggatactatggggacggtctaaatgccatcattgtgtttgccgcctgttttctgc

SEQ ID NO: 195872 - DNA, 101 bp, Homo sapiens
ttcgtttgatcctgcctcagaagaagtgtatgcaaagagtattctttgtcagtatcctgcttcacttccagggaagaaggagaaagggccaacccctgaag

SEQ ID NO: 195873 - DNA, 100 bp, Homo sapiens
gaccttcaatccctcggatcctgactgtgtggacaggctcttacagtgcactcggcaggcagtacccctcttctcttcctgaagattatatagacacaga

SEQ ID NO: 195874 - DNA, 100 bp, Homo sapiens
tcaactcagatgtccaaacagctctcccttttagcagaagatggctgtgccacccacgtatgccgatcttggcaaatctgccagggatgtcttcaccaag

SEQ ID NO: 195875 - DNA, 82 bp, Homo sapiens
tgagaactgcgactcagcatgcagaagtttgaataggttggtgatgctgtgtatgcagtagattcttggcttatgtaatcag

SEQ ID NO: 195876 - DNA, 82 bp, Homo sapiens
cgccgctgcagctgccgcgcgtatcagtcgcatcgaatacattcattcaaagaacttcatccaccgggatgtgaagccagac

SEQ ID NO: 195877 - DNA, 75 bp, Homo sapiens
cagctggctggcggagcatgagcgccccagatatatcctgattgtttggcacaagccatatatgcaacgttccat

SEQ ID NO: 195878 - DNA, 76 bp, Homo sapiens
caaaaaaggataagcagggcttcacagaagaggtgacagatatgattctataacagactcttccagaaatgatatg

SEQ ID NO: 195879 - DNA, 100 bp, Homo sapiens
cggggctccaatggcgctttctacaaggacacttgggttgaattcagtaagtttcctctgaagcaccctgaagggtgccatccttacagagctaagtgga

SEQ ID NO: 195880 - DNA, 80 bp, Homo sapiens
gggccggcccagagctcccgggtcgtctttcgtgtggccgcgaggagtgcctgtgaagaaaacggggtattgccctgagg

SEQ ID NO: 195881 - DNA, 83 bp, Homo sapiens
ccagaaactagcaccagccccaaatttcctccagatcctgtttgcgggggaagccacacatcgcacgttttactccacgacgc

SEQ ID NO: 195882 - DNA, 95 bp, Homo sapiens
ctggcggccgttgaaaaatggcgactgtggcagagttgaaggctggcgggggcacgaacagcatcaccgtgaggaatgccacattcacctgggcc

SEQ ID NO: 195883 - DNA, 85 bp, Homo sapiens
ggccaagggacaatggtcaccgtctcttcaggtttggtgcacctcgatttggaggaagtagggcagggcccttatctggaaagaa

SEQ ID NO: 195884 - DNA, 75 bp, Homo sapiens
gtgcgatcctgcgcgcgggggaactagctggagggcaaggcgggaacacatcctttgctgaagaatctatcccag

SEQ ID NO: 195885 - DNA, 87 bp, Homo sapiens
tgatcgcctaacttctactgacgaagcttggaagttgcagaagggacaccaatgagttgtgtcttccctctgtccactctcagcacc

SEQ ID NO: 195886 - DNA, 75 bp, Homo sapiens
ctgtgtcactgcaaactcactgttacctggagtagaacagaaaaattattatgtctgtgttcccttgggactcat

SEQ ID NO: 195887 - DNA, 50 bp, Homo sapiens
aaactggcctcccaagccctgataactccagtaataaaccgattcacaag

SEQ ID NO: 195888 - DNA, 97 bp, Homo sapiens
gcttggctattgacaattgcagttgggaatatcatcgtgcttgttgtggcacagttcagtggcctggtacaggcgcttaaattcctagcgaagtgcc

SEQ ID NO: 195889 - DNA, 83 bp, Homo sapiens
gaagatctgggtgcccgtggaccacaggccctcgttgcccagatgcgtcacaatgtagcagggaccccaggcgtcgtgctcag

SEQ ID NO: 195890 - DNA, 100 bp, Homo sapiens
ggacagcctggtctaccagtatctgcagaaggtggacggctgggagcaggacttgtcagtacccgagtttccggaagccagtgttttagaaggagtatgt

SEQ ID NO: 195891 - DNA, 82 bp, Homo sapiens
aggctccaaatccttagctcagagctggaggatgaaggatcgggaattgtcttagaagaaagaaggcaagccaccattttac

SEQ ID NO: 195892 - DNA, 74 bp, Homo sapiens
tatagacttccagctgaaggtttaaagctggatagaacttatactggcttgcagactcttggagcagagacggt

SEQ ID NO: 195893 - DNA, 100 bp, Homo sapiens
tctgttccatcagcgtttgtttgagctgacctgtcctggacgcagcataactaacgaagctgctgcaggatgagaagatggcagcgcggctgcttgcacc

SEQ ID NO: 195894 - DNA, 107 bp, Homo sapiens
cggggaggcgctgcggaccggcggcccaggcacggagaggcggcgagaccgcagatggtgtgggcatcctccaatcggctgggctgtgccatccacacctgtagtag

SEQ ID NO: 195895 - DNA, 76 bp, Homo sapiens
catgtacatgaagacacggcttttccaggtgaccaagaatatggcccaggtgaccaaagccctggacaaggccctg

SEQ ID NO: 195896 - DNA, 100 bp, Homo sapiens
cggccaccctactgcctggaggccggggagccgacgcctgatcttgtagaaaatttcagctgtagcccttggactagaagctgaaataacagaagctgtg

SEQ ID NO: 195897 - DNA, 137 bp, Homo sapiens
ccgtcccccgcttggcttccagcgccgcttgcgctccggagcgctggctctgctggcgctgagataagtcttcctgaagtctctctattaaaaattttaaagttaaacaagcctgaatggccttttgtggttctggg

SEQ ID NO: 195898 - DNA, 75 bp, Homo sapiens
ggaacagggcagacgttagcgtgagtgatcactctcaatcccggtaagactttgaccccgacgcaggcttcagtg

SEQ ID NO: 195899 - DNA, 100 bp, Homo sapiens
tgaggaagacccggaaacttaggggccacgtgagccacggccacggccgcatagcgagttcctggggaaaaccccagggcaaaacgctcagaaatggatt

SEQ ID NO: 195900 - DNA, 98 bp, Homo sapiens
gcaggagcgggactgagagcgcctggaggctcgagcggaggcaatttcctgctgcagagagcattttaagaaaggacagcattcctgtgacctctgcc

SEQ ID NO: 195901 - DNA, 100 bp, Homo sapiens
ataggagaaggggagtcaatacctccggatactcagtttgtaaaaacatggcggatccagaattctggactccctggcactggggaaaacagaggaggag

SEQ ID NO: 195902 - DNA, 51 bp, Homo sapiens
aaaaaaagacctgatttcaagcaacagcagacggagtctcgctctgtcacc

SEQ ID NO: 195903 - DNA, 83 bp, Homo sapiens
accctgttaactacattctgcaggtattggttggaagagaatctgagtacaaacagatgcaggacaagtactccaaaagtggc

SEQ ID NO: 195904 - DNA, 104 bp, Homo sapiens
ctgatttcagactcagaagccgacgttcgagaggaagattcttacctctttgatctcgacaataaggagcggaaagaatgtcggagcgggccgcggatgacgtc

SEQ ID NO: 195905 - DNA, 75 bp, Homo sapiens
gaactcgtcatgctctttgtagcgtggtgcttctgttgctcacagggtgaaggttgccgaactgtccccctggct

SEQ ID NO: 195906 - DNA, 74 bp, Homo sapiens
cttccaaagtgcagcgctgtgcagtggctctgcgaacatcaatagatgcttatgacaactttgacaatatctcg

SEQ ID NO: 195907 - DNA, 100 bp, Homo sapiens
ggacaagttgcatgaagagcatatcaatgcaggacgtacagttcaggtactaggttttgacaagcttgcatcatgcgtgagtataagctagtcgttcttg

SEQ ID NO: 195908 - DNA, 90 bp, Homo sapiens
cttccctggctcttctacatcgtcatcttccgacaacgacgagggcagcggaggggcgacaaaaaattacagaagacatccccgtgaaga

SEQ ID NO: 195909 - DNA, 83 bp, Homo sapiens
ggttctctcctgcccccaagctggacaggccgacggtcgcaaggtcctacggtcaagcatccgggagtttctatgcagcgaag

SEQ ID NO: 195910 - DNA, 100 bp, Homo sapiens
atataaaagaccagtgtcttaagtaccagcacttttcaggattagaagaggctgtgtatagaaacatacaagcttgcaaggagcttgcccaaaccactcg

SEQ ID NO: 195911 - DNA, 75 bp, Homo sapiens
tggaaccaaaggaaatacatttgtacacgatcccaaggtgtgtcgtttggactggtgatgagcgggtcttctttt

SEQ ID NO: 195912 - DNA, 101 bp, Homo sapiens
tacaggccgcttttgagaggacaagcccagattccaaaacttatgtcaagactacaggaatatgtggaagctgtctcttttcaacacttcatcaaaacacg

SEQ ID NO: 195913 - DNA, 75 bp, Homo sapiens
tgaagaactggaacacgtagaaagtgcaagcaaagggacctgatgcccagaaccctggacgggcagatcaccatg

SEQ ID NO: 195914 - DNA, 95 bp, Homo sapiens
ggcaaatggcggacttcgacacctacgacgatcgggcctacagcagcttcggcggcggcagaggtcagcttacccgctggccgcctcctgacaag

SEQ ID NO: 195915 - DNA, 75 bp, Homo sapiens
ccttgagcaaagagatccgtccagtctgccgcaagttcatgcaagatatcctgaacccgccgccctccccggcca

SEQ ID NO: 195916 - DNA, 101 bp, Homo sapiens
gggtcgcctaatcatcgaatttaaggatcctcctttgtatttggaactggaccctcagcaccatctgccagtccagcatttggtgctaaccagaccccaac

SEQ ID NO: 195917 - DNA, 101 bp, Homo sapiens
cgctgctgctgaggagaggagcgtcaacagcagcaccatgggtagtaaacctattgatggcaattttgctgactgtggaagtgactcatccaaactccatg

SEQ ID NO: 195918 - DNA, 51 bp, Homo sapiens
ttcacgcagtcaagaacgacttccagagaggtgtgggaaatggaactggat

SEQ ID NO: 195919 - DNA, 83 bp, Homo sapiens
gagtgcagaagatctgggtgcccgtggaccacaggccctcgttgcccagatgtacggacattgctgcaggagaagaggttgcc

SEQ ID NO: 195920 - DNA, 75 bp, Homo sapiens
ggctgcttggagcgtccgccatgaggagaagatctctggaaacatggctacagaacatgttaatggaaatggtac

SEQ ID NO: 195921 - DNA, 82 bp, Homo sapiens
agccaagaagaagggcggaaaccacatccccgaaagatagcagaccccacgttagctgaaatgggaaaaaacttgaaggagg

SEQ ID NO: 195922 - DNA, 97 bp, Homo sapiens
gaccagcaccccataccccgaagccagatgttccatttaagcagacctcttccatagctgtagctggagcggtaattggagctgttcttgccctttt

SEQ ID NO: 195923 - DNA, 74 bp, Homo sapiens
gtcagataacattaatggatgttccagtatttaaagctattcaaccagatcttcaggggccctgtcaaagttaa

SEQ ID NO: 195924 - DNA, 74 bp, Homo sapiens
ctgctgaccgcgggccctgccctgggctggaacgaccctgatatggctcgtggacagcagaaaattcagtctca

SEQ ID NO: 195925 - DNA, 75 bp, Homo sapiens
gccgcggcggcgtgtgcgcccctcagggcgccctgcgtccggcagaggaggcgagcatcccgctcaggtgatgag

SEQ ID NO: 195926 - DNA, 90 bp, Homo sapiens
gtcatgtggtggtgaaaaatgaccctgaactggaccagcagggatcgcttacacctgagacgaactacagaacagcacgtaccagaggtg

SEQ ID NO: 195927 - DNA, 100 bp, Homo sapiens
agcgagtgtcagccatcgcttcggaggggaaggctgaggaaagtcaccaaaggcttcgtgtacagctctttcctaaagccctacaatcctcgccgcagcc

SEQ ID NO: 195928 - DNA, 83 bp, Homo sapiens
gaccctggagcctcagttggaagcagccgatccagcctgcggagcctgtggggcaggtagttacttttggtgacgctgtccag

SEQ ID NO: 195929 - DNA, 82 bp, Homo sapiens
gctatgtttgtagggggctgtgtggcttttatcctggataacaccatcccagggcttaaaagacaaccttcttgcttctggg

SEQ ID NO: 195930 - DNA, 90 bp, Homo sapiens
cttgaaatattccttccagacaaaagaccgtttgtgttttgtgatggaatatgttaatgggggcgagccatctgttgaatcttcaagtcc

SEQ ID NO: 195931 - DNA, 100 bp, Homo sapiens
atccaagacactgagggtaacactcctctaattggggcttgttgatggacaagaactggcggttgctgatgtcaccaccccacagactgtactattcaaa

SEQ ID NO: 195932 - DNA, 101 bp, Homo sapiens
gggtggacgcggcgcgcgaggacccgagccaggcggggacaggacggcggggcgagccaggcacggatgggcagaagcctttgcaggtatcagaagttcac

SEQ ID NO: 195933 - DNA, 98 bp, Homo sapiens
atgggccagtgcggcatcacctcctccaagaccgtgctggtctttctcaacctcatcttctggggctacagaactggctacccttatcgataccctgc

SEQ ID NO: 195934 - DNA, 100 bp, Homo sapiens
accggaggagcgggagccaagcaggttgcacttcccccagctggccctgaggcggaggctggggcagctgagctgcatgtccagacccgctctgaaactg

SEQ ID NO: 195935 - DNA, 135 bp, Homo sapiens
cgggacgtggtcaagacctacaaatcttttgaattttttctccccgacaatgaagagggcctgaaaatcaggaacgtgcctgccagtgtagagccggtggagcagctgggctcggcgctgaggtttcgccctggc

SEQ ID NO: 195936 - DNA, 132 bp, Homo sapiens
tggcactggacggggaatcaagagacccggtttctaatccctgctctgtcactaacaagctgcgtgatcttcgctcaccatgccttctcctatgcctgagtacctgaatgtgcactacattggggagtctgc

SEQ ID NO: 195937 - DNA, 100 bp, Homo sapiens
ctgggccgggactggcatcccaggatggctcttgctcacccgagcctcacaaagataatcgctcaggaagtgtttcagccaatccggggcggctttacac

SEQ ID NO: 195938 - DNA, 75 bp, Homo sapiens
gacgggctttaggctggaagcgccttagaggagccatttttccagagaaaccctaaagcaggcagcagctcagaa

SEQ ID NO: 195939 - DNA, 100 bp, Homo sapiens
tggcagctctctgtaagaaatatgctgatcttgactgggcacttggagtcctgcatgccaaaatcattgcagctataacattgatgggtcctcagtggtg

SEQ ID NO: 195940 - DNA, 100 bp, Homo sapiens
caggagttcaaaacccacacatgaacagtggagacaactggattccactcaaaaggagcaatactgggatctcatgctggagacctatgggaaaatggtc

SEQ ID NO: 195941 - DNA, 96 bp, Homo sapiens
gttcgcgtctctctgctgcggcgcggggaccgctgtgctctcggtgaacagtggtatagcagccactccagcctctgctgcagcagccaccctgga

SEQ ID NO: 195942 - DNA, 100 bp, Homo sapiens
tgcctgaagcacgtgaggatcccgtgcacgagtgtggcacccagcctggtccgggagatgctggccatcatgaagtccatctatgacatgatgggccgcc

SEQ ID NO: 195943 - DNA, 75 bp, Homo sapiens
aaaattccattcaagccagatgggttggttctggacattacacagcatacgcaactcacgaaggccgctggttcc

SEQ ID NO: 195944 - DNA, 83 bp, Homo sapiens
cttggatccgcgggacaagaaaattcatgcgaatggaaacagactgtaatcccatggagctaagcagtatgtcaggatttgaa

SEQ ID NO: 195945 - DNA, 113 bp, Homo sapiens
ctcctggactgaaacgatcctctcatctcagcctccaaaagtgctggcattacaggttaatttggagtggcccctggagtcagtttcctacaccatccgaggccccacccagc

SEQ ID NO: 195946 - DNA, 100 bp, Homo sapiens
agcattttgaatgaatttggacatcacaaggccgaatacatcaagcaatggtaacatctttaaatgaagataatgaaagtgtaactgttgaatggataga

SEQ ID NO: 195947 - DNA, 106 bp, Homo sapiens
gccagggtgacgatcctcaagttcccaagtagaggagaggaagcggcagagggaggtgagaagccctaccactgcaactgggacggctgcggctggaagtttgcgc

SEQ ID NO: 195948 - DNA, 119 bp, Homo sapiens
gtgaaggtccggggcttgccctggtcttgctcggccgatgaagtgcagaggtttttttctgctcactgcaaatctaacttcatcatggtgaactaatttagagcatcctccagagctga

SEQ ID NO: 195949 - DNA, 50 bp, Homo sapiens
ggagcttcaggctcgctccgtgcggaaaactgtggatttagttactccac

SEQ ID NO: 195950 - DNA, 74 bp, Homo sapiens
cgggatttgggtcgcagttcttgtttgtggatcgctgtgatcgtcacttgggtgtcagatgcctgatacattca

SEQ ID NO: 195951 - DNA, 78 bp, Homo sapiens
atcccacactatcgtgatgctgacggaggtgcaggagagagagcagggatagctgggagtatggccaccctgctccac

SEQ ID NO: 195952 - DNA, 75 bp, Homo sapiens
tgaagactatgagacactgcgtcagatagatgtgcacattttcaatgcagatacaaggcagatccaaccatcccc

SEQ ID NO: 195953 - DNA, 100 bp, Homo sapiens
cctacagagtgccccaattttcaggttgactaaaacatgggcgagtgttttgctactttgggaacagtttgaagatatcagtcatcatagctaccattca

SEQ ID NO: 195954 - DNA, 90 bp, Homo sapiens
gataatttggggggacttcatattcagaagtctatataaagggccgagccacgtgtccatgcagcagacggcgcctaacacgctgcccac

SEQ ID NO: 195955 - DNA, 100 bp, Homo sapiens
cacatgaggatgggacacaggagctcaggtgactctgacatcattagaagcatgccagaacagactggtgaaaagtaaaccttttcacctacaaaatttc

SEQ ID NO: 195956 - DNA, 80 bp, Homo sapiens
tgaaggctgcgagggactaagagcagaattgagaggatccagaatccagatctctggaatagctaccaggcaaagaaaaa

SEQ ID NO: 195957 - DNA, 77 bp, Homo sapiens
gctcgcttcacggaggcaatagctagccggtgctggttgccgaggagaacgtggacttccgcatccacgtggagaac

SEQ ID NO: 195958 - DNA, 96 bp, Homo sapiens
attcacgtcccctctcctgcgctagaagaaaggaagacggactcgtatcggtaccccaggacaggtccctacagttcagtccccccgccttctgct

SEQ ID NO: 195959 - DNA, 83 bp, Homo sapiens
ttttaatacagccatcatcccaagaccagaaggaagggctatctgatgggttagagtgcctttgagaagaaatcagtggatac

SEQ ID NO: 195960 - DNA, 75 bp, Homo sapiens
gtgaatcttgcacttgcactagcagcgaacgattcggattttttatcaagcagaaatgcatcgaacaacgagaat

SEQ ID NO: 195961 - DNA, 76 bp, Homo sapiens
tgtgtggagctcagcggctacgacctgaaactctacgaggataaccagacaatgaggtggaaagtgagaaatggta

SEQ ID NO: 195962 - DNA, 122 bp, Homo sapiens
agcgggagcggccggaggagccatggactgcagcctcgtgcggacgctcgtgcacagatacgctgcagttcatggagctcgtttcaaagggcaagatctaaaactggcatggaataaaccag

SEQ ID NO: 195963 - DNA, 49 bp, Homo sapiens
ggcctgtcgagagatagagaatgggcggccgggtgggcttggactgggc

SEQ ID NO: 195964 - DNA, 100 bp, Homo sapiens
caggacaagtcctgcgcttggggatcctctgtacgcccgttcactggtggagttggcatgaacttaacagcagcagatactgtgatttttgttgacagtg

SEQ ID NO: 195965 - DNA, 97 bp, Homo sapiens
gttccctgacttaagactcatccagtatgattgcgaacagaaactgttcatacttggtgcgctgtggactcttgtgataattaaccaagagtagctc

SEQ ID NO: 195966 - DNA, 92 bp, Homo sapiens
tggctgaccacccctaaaagcacctggccccgctacagcaaaccagttacagaatgtctgaaggggacagtgtgggagaatccgtccatggg

SEQ ID NO: 195967 - DNA, 51 bp, Homo sapiens
tccaatctttctacatcccagaacctcctgacagtgagtgagactgccaat

SEQ ID NO: 195968 - DNA, 78 bp, Homo sapiens
accgtgaccgagagcgtgaccgagagcgcgaatatcgtcatcgttagaagaaccatttgttgggaagagcctgcttct

SEQ ID NO: 195969 - DNA, 100 bp, Homo sapiens
ccatggctcacctccggggatttgccaaccagatgaactgactggaatccttaagaaattatcacttgagaaatatcagcccatttttgaggaacaagag

SEQ ID NO: 195970 - DNA, 82 bp, Homo sapiens
cgcgcgcagggcctgcagcgggagctggacggcgagcgcgagcggcgcgagaaagtgctggagaatctggtaaaagcaccat

SEQ ID NO: 195971 - DNA, 76 bp, Homo sapiens
atatcgacgtcgtgatccagaagtccagagctgaggactgcctgtttgcagtatgaaagttttcaagacgcctaca

SEQ ID NO: 195972 - DNA, 82 bp, Homo sapiens
gtccgtgctgtttgtgtgtctggatcaacagtacaaattctgaagtttgtaaacttgctgatggtggtggtaagccatggca

SEQ ID NO: 195973 - DNA, 72 bp, Homo sapiens
acctggagaatgtcatcaagcagcacattcaagcacaggaagtttgcggagaggacgcttgaactgaataat

SEQ ID NO: 195974 - DNA, 74 bp, Homo sapiens
tgtggaaggctctggataaggaccagtacctgcccaggaaactgagacctacagagttgaaacagtgaaacctg

SEQ ID NO: 195975 - DNA, 98 bp, Homo sapiens
aaagcaccatgacgtccatccatttcgtggttcacccgctgccgggcaccgaggaccagctcaatgacaggaatacggttggacagaatgaactgaag

SEQ ID NO: 195976 - DNA, 82 bp, Homo sapiens
tgcattgtgggctggcgctgccgcgtgggtcagtgggttctcaccctgtggccaaatacttggggtcagtcgacagtaaata

SEQ ID NO: 195977 - DNA, 82 bp, Homo sapiens
cccggccggtccctcgcctcccggccgagctgacgctgagcgggctttggacaccatgaactttgatgtgattaagggaaag

SEQ ID NO: 195978 - DNA, 101 bp, Homo sapiens
ctatattctggcggttgcttacaaaatataatcaagcaaatacacttctatataccagtcaattgagtggtgttaaagctctgaacagcaacatggggtgc

SEQ ID NO: 195979 - DNA, 98 bp, Homo sapiens
cttcagaaagcctccggaatctaaaaagccctcagtaccagagacagaagcagatggattcgtccttttagaggatgtactgagtaaagatgctgggg

SEQ ID NO: 195980 - DNA, 99 bp, Homo sapiens
tttggatttccacccactgagccctctagtactactagacctgcaggctgggacaatgaaaagaaaatagctattttacatgaaaattttacaaccgtg

SEQ ID NO: 195981 - DNA, 80 bp, Homo sapiens
atgaaggaaagcgaggctgacagcgaggacttaaccaccaccatgtcgagcaaaagaacaaagaccaagaccaagaagcg

SEQ ID NO: 195982 - DNA, 101 bp, Homo sapiens
tcatcgtggagcagctcaagagccggggcctttttgacagcttccgccgggactgcctggccgacgtggacaccaagacggagtcttgctctgtctcccag

SEQ ID NO: 195983 - DNA, 82 bp, Homo sapiens
gacggtcaaggtatttcatgccgagaggatgtaggaagaagctggtctgctgactgtcatacttgtgaccagcttgcacagg

SEQ ID NO: 195984 - DNA, 58 bp, Homo sapiens
gacattgcagaactggtggatgcgggaaagtccagagcacaacctccagaagacaaca

SEQ ID NO: 195985 - DNA, 108 bp, Homo sapiens
ggccaacctgagcgaaggcgtctccctggcagagaggggcagttttggagccatggttatggaaacaaaggacatgctttacatcgtcactgaatttgctaaaaatgg

SEQ ID NO: 195986 - DNA, 129 bp, Homo sapiens
tgggagcggatccctgagctcgtcaagcagctgtcggccaagctcatcgccaacggctattttggcattctgctggatatatgttcgtaaataccaaagtcggcgggaaagtgaagttgtctccaccat

SEQ ID NO: 195987 - DNA, 119 bp, Homo sapiens
gggatcggtggaggaagatgctttgctctgtggacccgtgagcaagcataagctgccaaaccaaggtggatgaagctgtagcagttctacaggctcatcatgccaagaaagaagctgcc

SEQ ID NO: 195988 - DNA, 83 bp, Homo sapiens
gcgagcgcgagcggcgcgagaaaggcagtcagggcgacagcaagaatgccaagaagaagaacaacaagaaaaccaacaagaac

SEQ ID NO: 195989 - DNA, 98 bp, Homo sapiens
gggaagttcgtactgggcagaacgcgacgggtctgcggcttaggtaagctgtgctagaacaaaaatgcaatgaaagaaacactggatgaatgaaaagc

SEQ ID NO: 195990 - DNA, 100 bp, Homo sapiens
aacggcattgttaactacctacaggaagtggctgctatccatgtccagggccaaacatgaatcctattgctcttgggagccgctggcttgcttatgcaga

SEQ ID NO: 195991 - DNA, 100 bp, Homo sapiens
ctcaactccttcctggagttaagtgggcgcaagtcccagaagatgtcggagcccatagcaggacttcctcgttctgcccatcttcctaacaaggctatgg

SEQ ID NO: 195992 - DNA, 74 bp, Homo sapiens
gcggggagaccttgggcatcatcggacttggtgtccctggccagtgtccttccacctgtccacaagcatgggga

SEQ ID NO: 195993 - DNA, 100 bp, Homo sapiens
agacccagatgagcccattttagaatttagcttaggttcatcatgcctagtggcgtataagaagaccccgccaccggtccctccacgcaccacttcaaag

SEQ ID NO: 195994 - DNA, 100 bp, Homo sapiens
caactcacaagtgcatgggagattcctgcatcttttgcgctctcaaggatccagacacattagtcaagctgcagccaaagtcgacgttgaatttgattat

SEQ ID NO: 195995 - DNA, 90 bp, Homo sapiens
cgggtcgctggcggcgtggacacctgagtcccggggtaggggtctcccgcgaggtttgaagacatacctgatatcgggtcagagagccaa

SEQ ID NO: 195996 - DNA, 101 bp, Homo sapiens
cagatttgaagggcagcagtcctaaggagacccccaacacttccatccctggtgggatatgatgcctggctcaagctttacaggaagtatggtgctggcat

SEQ ID NO: 195997 - DNA, 88 bp, Homo sapiens
ggggaggaggactctggagctgacagcgcgcacttcacccgcagttggaaggaagcagccaccctcgccatggcctccccgcccgcct

SEQ ID NO: 195998 - DNA, 74 bp, Homo sapiens
aaaagttcatccatctctagtttcaagcttcttggacacttaatgattgttggcaagaaatgtgctgctgatct

SEQ ID NO: 195999 - DNA, 82 bp, Homo sapiens
ctttactgagaattttccacctcctgacacaacaccactcaggctgaagctgccctcgaggacctggtctccaccattcgag

SEQ ID NO: 196000 - DNA, 99 bp, Homo sapiens
ccattaacaagcagctcttccggaagatcaactgcagactgtcctattgcatctcaagccatactgcttctaaactaggacccatagaagctatccaga

SEQ ID NO: 196001 - DNA, 98 bp, Homo sapiens
caggagacccctctgctgcaccacttcatggtcgtccttggtggaaggaaccatgaactggcatctccccctcttcctcttggcctctgtgacgctgc

SEQ ID NO: 196002 - DNA, 89 bp, Homo sapiens
tggaggctgtaatacaaaagctgcgcgtcccttaatttcctcggcgggtggtccgggactacaatcttcagctgtttttgcaagaaaac

SEQ ID NO: 196003 - DNA, 75 bp, Homo sapiens
ctggttgccttggtaggcaataaaagtgtcagaaactatttaaaagaagcactggtgaatataattgccgtgcat

SEQ ID NO: 196004 - DNA, 100 bp, Homo sapiens
gaattccagcaccgcagcaaccactccagaaactttccctccttcaggcaattaagttggaatatgcaaggttggttaagttggcccaagaagacacccc

SEQ ID NO: 196005 - DNA, 75 bp, Homo sapiens
cccaaagccaaggagaagttctcccagctggcagaagcctatgagggtctctcattcatcacttttatctgctat

SEQ ID NO: 196006 - DNA, 88 bp, Homo sapiens
gccatgagcacggtggaccttgctcgcgtgggcgcgtgcatcctgaagcatgcggtgaccggggaggagccggcatcatggattcctt

SEQ ID NO: 196007 - DNA, 100 bp, Homo sapiens
agagtgtttgaagatcatgtgtgaaatcctaagtggattgcagttgggagactttctcattaaggcatttaaatacatcaagccttttgtgcgattgcca

SEQ ID NO: 196008 - DNA, 100 bp, Homo sapiens
ggcggagtagcaagtggccatggggagcctcagcggtctgcgcctggcagcagcgggctgacgcacgaggcacacaggaaggaggtggagcaggtgtatc

SEQ ID NO: 196009 - DNA, 75 bp, Homo sapiens
cttctgcctcagaacggcgtgactcggaggtcagtttaggggctggtgcaaaggatgagttgcacattgttgaag

SEQ ID NO: 196010 - DNA, 51 bp, Homo sapiens
taccaggacagtgcatggcacatgggcgacctatctactgctcttgaggtc

SEQ ID NO: 196011 - DNA, 75 bp, Homo sapiens
ctcaggaattgagaacaatgacgaccaatagctcagatcctttccttaacaggtctcggcgcggaagatggccgg

SEQ ID NO: 196012 - DNA, 97 bp, Homo sapiens
gaagggaggaaatagtggcaggtgacagtctgcatgtgcagttttcaggtgaaaggtgtagcagtcactcggcctacacccacagcatcgaccttgt

SEQ ID NO: 196013 - DNA, 74 bp, Homo sapiens
ctgccggagcccgagtggatcggggacggagagaacacgagcccatcagtatatgactgctgctgctcctatgc

SEQ ID NO: 196014 - DNA, 75 bp, Homo sapiens
aaaaaggctcagaaagatggatttttgcatgagacgcttctggacagaatgaggaaaatggggagcaggaggctg

SEQ ID NO: 196015 - DNA, 90 bp, Homo sapiens
ccccgcccctctcttccctggctggacttgcggagtccccgccgaagaacccgaggacagtcattttgtttactcattcagccctgttgc

SEQ ID NO: 196016 - DNA, 100 bp, Homo sapiens
tgcagtgctgataaggattatcgtagcaaggtgctcttctgggacaacgcgtacgagttcaacctcagcgctctgaactatcaagagctttgtttcccac

SEQ ID NO: 196017 - DNA, 75 bp, Homo sapiens
tgatgttggagaactacaggaacatggtcttgctgggacttcctcgttctgcccatcttcctaacaaggctatgg

SEQ ID NO: 196018 - DNA, 75 bp, Homo sapiens
attcgttgtggtccaaaacagtttacctcttatctaacaggttcttggagtgtcaatgttttaataccagtacac

SEQ ID NO: 196019 - DNA, 83 bp, Homo sapiens
cgtccttcgcacgtgggtctcgtcggcggcgcagaccgaacatggtccaagacaattcctgggaaagttcagttcttctcaag

SEQ ID NO: 196020 - DNA, 98 bp, Homo sapiens
tcaccttcatcgtggtgcagaagaggcaccacacccggctcttctgcactgacaagaacgagcggggcaagtgtccagagaatggctgggatgaaagt

SEQ ID NO: 196021 - DNA, 51 bp, Homo sapiens
cctgagcctcagcacctgcttgtttggaagtgcctccatatgctcgaatgc

SEQ ID NO: 196022 - DNA, 80 bp, Homo sapiens
ggaccctgctgaatagctggggctacaggcgtgtgtcactgcgcccaggaaactttgaaaagcaccccaaagaactgatc

SEQ ID NO: 196023 - DNA, 100 bp, Homo sapiens
ccattatatgctggaatggttccttgcagcctggcatcctcgctacaacctcattgttgtgggccgatacccagatcctaatttcaaaagttgtacccct

SEQ ID NO: 196024 - DNA, 75 bp, Homo sapiens
atctttcagcagttggcacacatggttaaggaacaggaggaaaccattcagaggccctcaggaaagcagagagct

SEQ ID NO: 196025 - DNA, 100 bp, Homo sapiens
gccggcagggctgcggcgcagggcgaggcggaggcgcccaccctctatctgtggaagactggtagtatcttccccagcagatgttgctgaaaaagctgac

SEQ ID NO: 196026 - DNA, 98 bp, Homo sapiens
tagaacctctctctatgaatcggtttaccacagccttaatagcatcttcatgatacagttaagaggaatcttgacagcgccacttcccctcagaatgg

SEQ ID NO: 196027 - DNA, 100 bp, Homo sapiens
tcctgagtagctgtgattacaggtaaagctttccagtttgaatttagatgatcacgcaaagaagaaattaattaaacttgtaggagagcgatactgcaag

SEQ ID NO: 196028 - DNA, 83 bp, Homo sapiens
acccagcccccaaggattctgggggaggcctcaggagccaccttcctcgtcacgtttggaaactcagagaaacctgaaactat

SEQ ID NO: 196029 - DNA, 98 bp, Homo sapiens
gatgaatttgcttttctggaagtttatcatctggacttcaagctgcaggcagttctgtttttccaggccttttgtccctcccgggtatccctgggttt

SEQ ID NO: 196030 - DNA, 100 bp, Homo sapiens
aaacaccacttttaagtatcttacaggagaacagactgaaaaaatgtggcagcgcctgaaaggaatgttctccccaattaccattgatggaatgacaagc

SEQ ID NO: 196031 - DNA, 75 bp, Homo sapiens
cggctggtctgtgcatgcgccctccctgaggacagtcattttgtttactcattcagccctgttgcaggtcccaat

SEQ ID NO: 196032 - DNA, 75 bp, Homo sapiens
aagttggacagacgggaaaaatagtagcaccagtgctggagaatctggtaaaagcaccattgtgaagcagatgag

SEQ ID NO: 196033 - DNA, 88 bp, Homo sapiens
aaattgtcaagaggtgcaaaaatcttagctctctcaatctctgtctgaactggatcataaatgacagcagagagagatcatcattgcc

SEQ ID NO: 196034 - DNA, 75 bp, Homo sapiens
atgaacctttagatgaatttacacacaggagaaaacgacgctccacacctttaacttcttccacacttccttcac

SEQ ID NO: 196035 - DNA, 100 bp, Homo sapiens
agcggctgtaaataatacccgagaggaaataggcccggcaggggaaggtgtggctcattgactttaatccatttggtgaagtcacagattcactgctgtt

SEQ ID NO: 196036 - DNA, 75 bp, Homo sapiens
ctgatccggagaatcgaggagctcaacaagctctagaggacaaaatcccagtccttggcacaaactcaggaaatg

SEQ ID NO: 196037 - DNA, 90 bp, Homo sapiens
gttattcagggagaacggctccaagccaagggccatcgtggtggatcctgttcatggttttttgctccactcaagcctgttagaatcacc

SEQ ID NO: 196038 - DNA, 100 bp, Homo sapiens
gggggtcatgatgggcagcaagatggcgtctgctagtagggtcgttcaggtacaccaggggttggaaaaaccacactaggcaaagaacttgcgtcaaaat

SEQ ID NO: 196039 - DNA, 124 bp, Homo sapiens
aagattcaccaaataagctatatactttggttacctatgtacctgttaccactttcaaaagatttttacctcctataactccaccagaaaagttttttctttcccagctgatgctggcaccccc

SEQ ID NO: 196040 - DNA, 101 bp, Homo sapiens
tggagcagtgaacagcactgacccagcctgtcctcctgttgcctgcaggccaggagagtcgcggttgctgatcgtggtgcttgagtagagccgtggttggt

SEQ ID NO: 196041 - DNA, 83 bp, Homo sapiens
agaggagctgtggataacgggaggtgaatttccatgtcaacatagtcctgatcgtgagaccaggactgaaaatgatcaagaaa

SEQ ID NO: 196042 - DNA, 74 bp, Homo sapiens
gccagatcacgtggagccggggcgccgacaagatcgagggggccagctcctcacacatcctcaccccgacccgc

SEQ ID NO: 196043 - DNA, 98 bp, Homo sapiens
caaagcctcctggaccgtccaagaaaacacccagtgcatcccagaaggcttggagagctactacgcggagcaagactccagtgcccgggagaaatttt

SEQ ID NO: 196044 - DNA, 98 bp, Homo sapiens
tgacatctgacgacgtgaaggagcagatttacaaactggccaagaagggccttactccttcacagatcgtgaatggcattactgaggaagctgatccc

SEQ ID NO: 196045 - DNA, 78 bp, Homo sapiens
tgttatgttttcatcacttctctccagaagagggtgtttgtgagatatggttgaccagtgaagacacgggggcttatg

SEQ ID NO: 196046 - DNA, 91 bp, Homo sapiens
cgaagagctctcctccttcttcctcaactatctcgctgacacgcaggcctccggtgtggctgtctctgatggtgtcatcaaggtgttcaac

SEQ ID NO: 196047 - DNA, 100 bp, Homo sapiens
attatcaacattctcacagacaagcatggagcctggggaaattctgcagtgagttgcagatctgatctcttctgaacacctcatcgtgtctccatccctg

SEQ ID NO: 196048 - DNA, 100 bp, Homo sapiens
aagtcctttgaaatggtgctggatgaaattagaaagtaatctatgccagcaattatgacaatgttagcagaccatgcagctcgtcagctgcttgatttca

SEQ ID NO: 196049 - DNA, 90 bp, Homo sapiens
ctggtgtcggtggttagtttctgcgacttgtgttgggactgccatggactttccccagcacagccagcatgtcttggaacagctgaacca

SEQ ID NO: 196050 - DNA, 97 bp, Homo sapiens
cggggtcggcgccccgcgcctgccgctgccctacggcttctccgccatgcaaggctggcgcgtctccatggagaccattgccctcttgaacatttac

SEQ ID NO: 196051 - DNA, 51 bp, Homo sapiens
tccgccgctacaaccagagcgaggctgaggcatttcatccttcatgaagcc

SEQ ID NO: 196052 - DNA, 96 bp, Homo sapiens
cgtggccttagctgtgctcgcgctactctctctttctggcctggaggctatccagcgattatatctgtccaagatgcgagtctggttttatcgagg

SEQ ID NO: 196053 - DNA, 100 bp, Homo sapiens
gccacatcctagcccctttccttactggatcctcaaaccagaagaaaacctgaatctctgagagagcactgcagttgccctatcacttatcaatctcttg

SEQ ID NO: 196054 - DNA, 75 bp, Homo sapiens
gcgcggaggccccgggcgcggcgcagggggtggcttccaccactgctccagcgaccgtggcgggggcttctgtgc

SEQ ID NO: 196055 - DNA, 97 bp, Homo sapiens
cctatggtcagacgggctcagggaagacatacaccatgggggaggccagtgtggggcgatgagggtggagagcgggtgctacagcagcgctggacct

SEQ ID NO: 196056 - DNA, 98 bp, Homo sapiens
aaccttggtggtggcccagctgctcctggtgcagtggaagcagaggcacccacgctcctacaattgccggatggagtgctgtgatgtgccagccgaga

SEQ ID NO: 196057 - DNA, 76 bp, Homo sapiens
aggggccgaagcccacccagggagttgatggcccagtgacgagcaccatccggaagtgaaggctgatgggtacgtg

SEQ ID NO: 196058 - DNA, 75 bp, Homo sapiens
cagatgtggctggggtgatagaagctgttggagataatgcatctgctttcaagggaccccctggtggtggcggtc

SEQ ID NO: 196059 - DNA, 75 bp, Homo sapiens
atttactgaaatttgatgacctagatggaacacatgctctgatgggcaaaataacatggcagccagacgaattac

SEQ ID NO: 196060 - DNA, 60 bp, Homo sapiens
ttgggatttcaatcttgatcctatagcattaaagggtttttaatgaccacaacaagcaag

SEQ ID NO: 196061 - DNA, 76 bp, Homo sapiens
agttgaaaaactgaatgccaatgtaatgcatggaaagggtttttaatgaccacaacaagcaagcatgcagcttact

SEQ ID NO: 196062 - DNA, 101 bp, Homo sapiens
ctgcatcctcctggccatgttcctcgtccactacgggcatcgcctcgtcacgtgttcaatatgctaaagaagtatgtccgcgcagaacagaaggacagaca

SEQ ID NO: 196063 - DNA, 75 bp, Homo sapiens
cacgtgggaggtttaaatcttcttgcagctggagccatggcaggtcgcatatctgtgcctattgatttgcagaaa

SEQ ID NO: 196064 - DNA, 97 bp, Homo sapiens
gaagtctggagcaggacttctgaggctttctatcctccatgctgctcactagaaaaggggctgtgaactatggagtttcactcttgtctcccaggct

SEQ ID NO: 196065 - DNA, 100 bp, Homo sapiens
cggcccggcgcggcccagcgccctcaggtgacgatgcctggggagcctgtggacgtggcatgtggcgtggaccacatggtgaccctggccaagtcattca

SEQ ID NO: 196066 - DNA, 75 bp, Homo sapiens
gcctgcttcttgtatagtgaaatccatgagcgtggatgagacagataaggcaagataacccctgtgacagaaggc

SEQ ID NO: 196067 - DNA, 101 bp, Homo sapiens
ccgggacagcggcgagacgcgcgtgtgtgagcgcgccggaccaagcgggcccagaagcggcaattctgtggtgttcttggtcacacatttatggagtttct

SEQ ID NO: 196068 - DNA, 50 bp, Homo sapiens
tggcccggcccctcttcctggaacccgtaatcgacaaaactttgaacgag

SEQ ID NO: 196069 - DNA, 80 bp, Homo sapiens
gtaaaatttgtgatctttccaacagatttggagatatataaggtcctgtccctgctatcagtggggcactgaagaaagca

SEQ ID NO: 196070 - DNA, 80 bp, Homo sapiens
aattgaacttagccaactggtcactgacttctctctcctagtgaatgcccctgtaaagatagctgtcattttcaagcagc

SEQ ID NO: 196071 - DNA, 75 bp, Homo sapiens
gcagctgacttcttacgttggaagtgttcgtccgcttgtcactgaattgacgtgaacgatcaagagagagggacc

SEQ ID NO: 196072 - DNA, 75 bp, Homo sapiens
gccaagttgaaaatggacgagtaatcgcctgctttgattcattgaaactgaagaaaaggtgactggtctcatgag

SEQ ID NO: 196073 - DNA, 82 bp, Homo sapiens
ggagtcatgagcgacagcggcgagcagaactacggcgagcggtggccacagatgtctttaattccaaaaacctggccgttca

SEQ ID NO: 196074 - DNA, 82 bp, Homo sapiens
aggaaaaggaatcgtatcgtatgtccgctatccagaacctccactctttcgagtgtgaacatggctacgcctcttcattccc

SEQ ID NO: 196075 - DNA, 101 bp, Homo sapiens
cggggccctgcggtagcctcaggcccctcccctggacccgccgcagagccaggttgtggcagcactgcctgaaggtatgagaccagattctaatctttatg

SEQ ID NO: 196076 - DNA, 100 bp, Homo sapiens
cgtagctgctgctaattgcattaatattccattaatgaggcaaaggcacctcattgtgaacatgctttctgcaacgcctgcatcacccagtggttctctc

SEQ ID NO: 196077 - DNA, 50 bp, Homo sapiens
gaagagaccaccaaacaggctttgtactccctcagcactggacagccgag

SEQ ID NO: 196078 - DNA, 100 bp, Homo sapiens
atttgatcttctcagtgttggaaaatctactaaaactttcaccattaatccagagctgcaaatcagaaggagcccatgaatcttaattttaaagtgaaag

SEQ ID NO: 196079 - DNA, 100 bp, Homo sapiens
gatattcctgcaaacccaacagcaaactgaaaccgtgtcagttcagtcttcggtattggggaagggtgtaaaacatcgacccccaccaatcaaacttccc

SEQ ID NO: 196080 - DNA, 100 bp, Homo sapiens
acaaccttcgatctcctgacgacttcctggagatgatggaggctcgcagccgtggccatgcgtccccactggcggccaacgggcagagcccatccccggg

SEQ ID NO: 196081 - DNA, 96 bp, Homo sapiens
gcagatctctttgggtggtctcagcttatctacaatcatatcacagcccgacaacaagctcaaatacgtcaccaaatggcagaggacagcaaagca

SEQ ID NO: 196082 - DNA, 76 bp, Homo sapiens
ggtcggcgccgagtgggaggatggcggaagagcatcagatccatgctgctgctgactcggagccccacagcttggc

SEQ ID NO: 196083 - DNA, 100 bp, Homo sapiens
ctcgagtcctgccgcctcccgggagtgccgtgcgccgcagcccgggcccaggccccggcagcgcctgggacaaggtattatagctgcaaatgtccttgta

SEQ ID NO: 196084 - DNA, 100 bp, Homo sapiens
catagctatagacaagatatctgctgctgtcctcaacatggaggaatctgtcgaggcttgaagagtggagagaactttaagttgttatatgacttggcag

SEQ ID NO: 196085 - DNA, 75 bp, Homo sapiens
ctggaggaggaagtgtcagcgctactgccgcagaaatcatgttgttgatgtcagtgttgcggtcagtactcctgc

SEQ ID NO: 196086 - DNA, 51 bp, Homo sapiens
aggcgaaatgtgcaaatgtttatggctttcagcttatgtggagaagtcgct

SEQ ID NO: 196087 - DNA, 74 bp, Homo sapiens
ccgggagtcgccccctacccgcttctcgtagtcctgggagcacagcagaagtttcagggcgacagctcagtgaa

SEQ ID NO: 196088 - DNA, 100 bp, Homo sapiens
tgggatcggcccaaggccagttctccgcagaacaactctgctcatggtgattacatgcaaaataacgagagcagcttaatagagcaagctccaatacctc

SEQ ID NO: 196089 - DNA, 89 bp, Homo sapiens
gatggcagccagtcagtggtggaggacctggccatgggcacagatgctgagggagagaagatcaaggaccctatgcgagccatcgtccc

SEQ ID NO: 196090 - DNA, 75 bp, Homo sapiens
catccagcccggggccagagcccacagctttggagtttaacccttctgccaatccagaggcaagcacaatattcc

SEQ ID NO: 196091 - DNA, 100 bp, Homo sapiens
ggaggacatctgggggccacaaatgctccttctcctggagacgcaactcaaggtcacgagaagagaatgccttctagatgcaaaatcacctccaaaccag

SEQ ID NO: 196092 - DNA, 75 bp, Homo sapiens
gcaggtgacagtctgcatgtgcagttttcagacaagagtgagaatggtgaggcatatcagagaaagaaggcggca

SEQ ID NO: 196093 - DNA, 90 bp, Homo sapiens
gtccgctgagcggggcgacccgagacccgagagggactcacttatgggaattcatccgcgacatcctcttgaacccagacaagaacccag

SEQ ID NO: 196094 - DNA, 96 bp, Homo sapiens
ccaatcccccctcacccaggcccctgtcaagaaggtgccggtggtgcgagtcttcggagcgaccccggcagacgcaggaggagggagacgcactga

SEQ ID NO: 196095 - DNA, 100 bp, Homo sapiens
atttaaacaagagatttccacagaaggcagccctggttctacggctggggcttcaacctcccgcgaggccaagccctgctggagaaatggaacctcattc

SEQ ID NO: 196096 - DNA, 100 bp, Homo sapiens
gcgtctcctcccgcccagcagttcctccacgcaggggctccggaatcgcccgaccgcacacgttgccaccctgagctccgctccatcccagtcaaggggg

SEQ ID NO: 196097 - DNA, 80 bp, Homo sapiens
gatctggagaggcagattggtatggccgaggctgaggttgtctgcattcaaaagagcattctattaaagctaccttaatt

SEQ ID NO: 196098 - DNA, 85 bp, Homo sapiens
agtcccagatttttgctcattaacagaaaagaagaggagaatgctaagcagagtccagaggtgtccttctaaagctggtagaggt

SEQ ID NO: 196099 - DNA, 74 bp, Homo sapiens
gctggagcccgaggccaagaagctctgtgcgaagggctccgcactgaacctaccagatgtatttgggttggtcg

SEQ ID NO: 196100 - DNA, 75 bp, Homo sapiens
gcctcggagcgcccggagccggagcattagtgccagcagtagttcccaagggctgtctcagccatccacccagac

SEQ ID NO: 196101 - DNA, 100 bp, Homo sapiens
ctaagagaagtcacaaaacagcagatttcccaagagcagcggaaaatgatccagtcacaggccctgaaaaggagcctttaaaagtcaattctactccatt

SEQ ID NO: 196102 - DNA, 75 bp, Homo sapiens
gctcagcgccctctcaccgcccggtcgccgccctggagaggcaggtgtttgacttcctgggctaccagtgggcgc

SEQ ID NO: 196103 - DNA, 50 bp, Homo sapiens
ccgtcccaggcctcaatgtggatatggctggagtgcaatggcacaatctc

SEQ ID NO: 196104 - DNA, 138 bp, Homo sapiens
cgagcggcgcgcactataaaatggcgcgtgctgcaacccgcgcccgcttcggagagagaaatgctggggtattagtcactgtaccactggctttactacagaaaggtgccattcagtttaatccaccgttgtcagaga

SEQ ID NO: 196105 - DNA, 80 bp, Homo sapiens
ccacaaagtgaccaagaacgtgagcaagcccaggcacagccgacgccgcgggcgcccggcagaatggcgggaaggtgagg

SEQ ID NO: 196106 - DNA, 75 bp, Homo sapiens
ccagaatccaccgtcaggcataaattgattattcctcgcccacatctgtgccagctctgtgcctcagacaaaatt

SEQ ID NO: 196107 - DNA, 83 bp, Homo sapiens
caaagaaccatgaagtacacaacagccacaggagcagcatggacctgtcagcaactaaggaacaaaagtaatgaagatttaca

SEQ ID NO: 196108 - DNA, 100 bp, Homo sapiens
gcaagctcctcgtgttctttagaactgaagccattctcaaagcctcctggccccagagacaggtttttgatgactgccacgaaggtggtgagatttcacc

SEQ ID NO: 196109 - DNA, 73 bp, Homo sapiens
gcctcccagctggaagaggcggtggcggcgggtcggggcgagtatggtttgaagtggtgaacatggatttttc

SEQ ID NO: 196110 - DNA, 75 bp, Homo sapiens
tttccaagtcaggatatgtgcctttcagctttaaagagaattgaaggatagtggccaaagcctccaagaacctca

SEQ ID NO: 196111 - DNA, 75 bp, Homo sapiens
ccaccaggggatttcccaggtccaccacctgctccatttgcaaatgatgtgatgccagccacttactgtgaaatt

SEQ ID NO: 196112 - DNA, 83 bp, Homo sapiens
atcccccgtctgaggactgacctttttcctaatgtgtgtggctggtattggacttgttgtattattcttcagttggatgctct

SEQ ID NO: 196113 - DNA, 98 bp, Homo sapiens
ccgcggatcgccgcgctcagcgacaaacaagttctccagaagctggggaaggcagatgagaccaaggatgagcagtttgagcagtgcgtccagaattt

SEQ ID NO: 196114 - DNA, 100 bp, Homo sapiens
tctgttgttgcctccatgcgccaatccaaaccgaaagccagaaggtggaatacatgttggtatcttttgatcatgaaaataaaaaagtccggttggtcct

SEQ ID NO: 196115 - DNA, 100 bp, Homo sapiens
gtgaccgagaccgcggccgggaccgaggttccagctattcttcagatgctctggattttgagacggagcacaaattggaccctgtatttgattctccacg

SEQ ID NO: 196116 - DNA, 82 bp, Homo sapiens
gagaggagcactttgaggacatggcctccgacgaggacattgcctccggagccagcgtggtggccatagacaacaagatcga

SEQ ID NO: 196117 - DNA, 100 bp, Homo sapiens
gcagagttggctttacagaagaaatacagtgaggagcttaaaagcagtcaggatgatccggccagttattgaacaaacctttcctttttctaaagttcca

SEQ ID NO: 196118 - DNA, 96 bp, Homo sapiens
gcggcgccgccacaagttgcgctgctcgcgacgaggcagatggagttattgccatggtgttaggacaagctgattgtgttaaagcatgtgacacac

SEQ ID NO: 196119 - DNA, 75 bp, Homo sapiens
ctggggcgcaccgccaagagctggggttaatatggctccaaaagggccccctcctttcccaggagtccctctcat

SEQ ID NO: 196120 - DNA, 83 bp, Homo sapiens
cttccccaccaaaaagtggcacacactggagagatatcagaactgtggctgcaccatctgtcttcatcttcccgccatctgat

SEQ ID NO: 196121 - DNA, 96 bp, Homo sapiens
tgccatcaacctgcgtgaggtcaacctgcgcccccagatgtcccaggatagcaaaacctgatctcataaaacctaggtcacaaaggacagccctgc

SEQ ID NO: 196122 - DNA, 75 bp, Homo sapiens
tgtctaaatttcggtagccatggcacaagaatataggaagccctatggggcggatgacttcctgcctgtgctcat

SEQ ID NO: 196123 - DNA, 51 bp, Homo sapiens
ccaggcacagccgacgccgcgggtgccggtggtggtgtgcacattgagccc

SEQ ID NO: 196124 - DNA, 101 bp, Homo sapiens
ctccattggaaagatgttcgtgaactggtggtaggtcctactgctctgttggctcatgaaataggttttggaagtaaagttacaacacaccctcttgctaa

SEQ ID NO: 196125 - DNA, 82 bp, Homo sapiens
ggtcttgggttcagcttggcaggaggagcagatctagaaaacaaggtgattacgacggcgggcgctaacaccaccgacaagg

SEQ ID NO: 196126 - DNA, 73 bp, Homo sapiens
cggaatcccgcgcgctgcccacgattcgcttctgaggccttggacaagattcgctatgagagcctgacagacc

SEQ ID NO: 196127 - DNA, 82 bp, Homo sapiens
ccgaagccacaggatggaggagggggatcccagcaaaggtgtcgtgaaaactacccctaaaagccaaaatgggaaaggaaaa

SEQ ID NO: 196128 - DNA, 74 bp, Homo sapiens
cgtttgttcaggaaccaccagtgacagatttggggatatggattcctgtcagtgacgattattaatctggcatc

SEQ ID NO: 196129 - DNA, 100 bp, Homo sapiens
acatgtcattataccttcacccagcatttcatccctcgtcgaaaggattggattggcatctttagagccgccatggcatcagatgaaggcaaactttttg

SEQ ID NO: 196130 - DNA, 100 bp, Homo sapiens
ttcggcaaccgctgctggcagttttgccaggtgtttgttaccttgtgatcctgccatgaagcagtttctgctgtacttggatgagtccaatgccctgggg

SEQ ID NO: 196131 - DNA, 90 bp, Homo sapiens
caggcagttttacagggctctgttaacacaatctgcacatcgtgctgccacacgaggcttcattcgttatggctggcgctggggttggag

SEQ ID NO: 196132 - DNA, 80 bp, Homo sapiens
ccttttcgtttccggaaacatgggccaattcctgtccccccagcagcatggcatcgtgtgctgaaccctctgagccctct

SEQ ID NO: 196133 - DNA, 97 bp, Homo sapiens
acgggatccacttccgcaaggaccctttggaaggccgggtgggccgagacaatggcgatgaccactcagaaggaggcctggtggagaaccacgtgga

SEQ ID NO: 196134 - DNA, 100 bp, Homo sapiens
aacaatgcagcaaatactcagaaacatccttccagaaggagcgaactgaagaggttctacacaattggtgttggtaaatcatgcttattgctacagttta

SEQ ID NO: 196135 - DNA, 100 bp, Homo sapiens
ggagcagattcggagaattatgagacctactgatgtccctgatacaggactgaccagggccaagtggcgctcggcgggcactacatggcggagggtgaag

SEQ ID NO: 196136 - DNA, 83 bp, Homo sapiens
gctgcgggaaatcgggctgaagcgactgagtccgcgatggaggatattgacggccaagcactcctgcttctgacccttccgac

SEQ ID NO: 196137 - DNA, 100 bp, Homo sapiens
aagcacagagttcagaagactttaacatgggctcttcctctagcagccagtatactttctgtcagccagaaactggaaatgtggctttagataatctaca

SEQ ID NO: 196138 - DNA, 100 bp, Homo sapiens
cacactccaggaatgccagtgcatcttttgcacagctcgatcatctcagtccacattggaacgatctgaacagcagatcagggctgcttctagtttggag

SEQ ID NO: 196139 - DNA, 100 bp, Homo sapiens
cccgttcggagttagttgctgggggggaaaggagattctccagaggctcgagccttggccaaacaggtggccacggccctgcagaacctgcagaccaaaa

SEQ ID NO: 196140 - DNA, 101 bp, Homo sapiens
ggaattggcccaggatgacagctggagaatggagtcaggctacccacctttctgttctgagacccctcaagagacatataagaaggtgatgaactggaaag

SEQ ID NO: 196141 - DNA, 95 bp, Homo sapiens
ggtggcagatggtgttcagtgcgacaggacagttgtaaacggcatcatcgcaaccgtcgtggtcaggcagcctgcttctgcaaagtggtacgatc

SEQ ID NO: 196142 - DNA, 87 bp, Homo sapiens
ccccgttcctggagattctgattgagctgcggttggatttctcacgatgtccagtgttatctccatgtctgcccctttcttcctggg

SEQ ID NO: 196143 - DNA, 120 bp, Homo sapiens
ctgtcaccaggaagtttgtgcatgaagacagcagccacatcattgctttatgtgtcaccaccaagtaagcgaagaaaattagagaaaccgagaaaacccataacattcgtggtgctggcg

SEQ ID NO: 196144 - DNA, 50 bp, Homo sapiens
gaagagtacaagctgatcctgtccacagaatgtccctcttccagtggaaa

SEQ ID NO: 196145 - DNA, 97 bp, Homo sapiens
aacaaatgtttttctggtcttcacttttttgaggcaggaaggtgtcatggagaaactccagctgggcccagagattctgcagcgggaaaatccaagg

SEQ ID NO: 196146 - DNA, 75 bp, Homo sapiens
gcatggtgctcttcttcttcgagaattacaccggggtccaggttgccaggatacatccaggcaacaaagactgcg

SEQ ID NO: 196147 - DNA, 95 bp, Homo sapiens
tgagcgcgtccaggcctgacagctctgcggctcgggccctgagactgggctggcttagatgaagatgaagatgcacatgtctgggaggataattg

SEQ ID NO: 196148 - DNA, 75 bp, Homo sapiens
tctgctgcggcgcggggaccgctgtgctctcgtctctgctttctatccgtcaagatgataaagtcgtgtgcccga

SEQ ID NO: 196149 - DNA, 83 bp, Homo sapiens
cttggtttcgggatctcggtgctgcagacggcgagacctcctgcacagacataaatgagcatattctgatgtactctttggat

SEQ ID NO: 196150 - DNA, 75 bp, Homo sapiens
accaccctccactgagtgcggagcagccaaggcagcgagtatgacgaggaggaggtggactatgaggagtcggac

SEQ ID NO: 196151 - DNA, 100 bp, Homo sapiens
aatgaaatccatgctcagagatgccaagaagaatctagacagacaggcctttctaggtcacgagaagagaatgccttctagatgcaaaatcacctccaaa

SEQ ID NO: 196152 - DNA, 75 bp, Homo sapiens
aggattatacattgtaagaggtgacaacgtgttagctaaccatgcagcaggtgcttgagtttcacctttctccag

SEQ ID NO: 196153 - DNA, 102 bp, Homo sapiens
tatgaccacatgaccagcagggaccttgggtcacatgacaatctctctccaccttttgtcaattccagaatacaaactgccactgcagagccccgccatgga

SEQ ID NO: 196154 - DNA, 100 bp, Homo sapiens
ctcctcgatcgaggacgacttcaactatggcagcagcgtggcctccgccaccgtgcacatccgaatgggccatttcataattctgaatcatgtctgataa

SEQ ID NO: 196155 - DNA, 100 bp, Homo sapiens
ggacaattcatggccaagaggattcacgcagaaggcctgggctatcgagtcaggctgaaaacacagttaaatcactttcaaagttaaaagactattaaga

SEQ ID NO: 196156 - DNA, 82 bp, Homo sapiens
accagaaccggagcatggaggcgcacaacatcctcaggtgacttaagagattaaaattaatttggttgctgttggttctgaa

SEQ ID NO: 196157 - DNA, 75 bp, Homo sapiens
tagcgacttaaggatctggttagagtggcccgaatgcattcttccaggtgatggaatggggagaagatattaaag

SEQ ID NO: 196158 - DNA, 97 bp, Homo sapiens
tcttcaactctcaaagtagaaccctgaagaggactgtcagaaggacgtagaaggcacggttttactgtgaggagcaaagattctttacctacgcatt

SEQ ID NO: 196159 - DNA, 100 bp, Homo sapiens
cagaatcaacgacgggctccccggctcggctctcgctgcggcagacgggctcccccgggatgatctacagattttgcaagaacgaggctcaaggatgtga

SEQ ID NO: 196160 - DNA, 101 bp, Homo sapiens
ctgcccggccaagaggcaaaggggaggttacgcagcaaaccatccagaagattgcagagggaatggcatacatcgagcggaagaactacattcaccgggac

SEQ ID NO: 196161 - DNA, 100 bp, Homo sapiens
tgaagaaggtgaagaaggagaagaggaggcaactttggctttggggattcacgtggtggcggtggaaatttcggaccaggaccaggaagtaactttagag

SEQ ID NO: 196162 - DNA, 100 bp, Homo sapiens
cccctaagatgttactcaggctcccgattctagcttggggcttaagaaatatgaaaaacttccagatggcttctatcacatcccccagtcttgttgtgga

SEQ ID NO: 196163 - DNA, 78 bp, Homo sapiens
gcgatgctgaggatcgaggaacgttgtctgactgcaaaattcaaaatggggctcaaggtattcgtttcatctacacca

SEQ ID NO: 196164 - DNA, 80 bp, Homo sapiens
gtagtcggacctttcccgctggcgcgcagcctcagctagtacttggaccatgagactgtttcagccactttcatcgacag

SEQ ID NO: 196165 - DNA, 89 bp, Homo sapiens
cggacaccaggactccaaaatggcgtcagttggtgagtgtccggccccagattgatgcactgagtaaaagaagcaaggaagctgaagca

SEQ ID NO: 196166 - DNA, 95 bp, Homo sapiens
gtgcaagatgagcctcaagtgcttctgcattacaagagagtctacaaggagattgaacaggtggttggcccacatcgccctccagcgcttgatga

SEQ ID NO: 196167 - DNA, 97 bp, Homo sapiens
gtctcgcctgggtgactcccagcttgtgaaggacccagagttcaacaatacagatcagattgacctgtatgatgatgtgctgacagccacctcacag

SEQ ID NO: 196168 - DNA, 97 bp, Homo sapiens
tatgtcttctgaggaagcagcaaatggaaagaaatcccactgggcagagcttgaaataagtgcgtcgtctcggagatgcagccaagaaagccatcag

SEQ ID NO: 196169 - DNA, 90 bp, Homo sapiens
ggaaactgagaggagaagatcaagaggtggagctggttgtagattatgcatattggcgttcctgtgctatgatgatgggctgtgtgatag

SEQ ID NO: 196170 - DNA, 75 bp, Homo sapiens
ccagaacacagagacagcagcccagtgcaatgggaaggtgtggctcattgactttaatccatttggtgaagtcac

SEQ ID NO: 196171 - DNA, 100 bp, Homo sapiens
cagaaaacctgcatttgattttctcctactcagtgtgggtgctgagagacttcccagaagatggcctgaaggcaaatactgtggtctggggttgcaaatg

SEQ ID NO: 196172 - DNA, 82 bp, Homo sapiens
cgagaacaacggaggcagaggagctgaagactccagtatgcaactgactacaaggagggggatatgagactttctactcgga

SEQ ID NO: 196173 - DNA, 82 bp, Homo sapiens
ctttctggcctggaggctatccagcgccctgtttgtgctcttcgtcctggcctacatccacatcgtcttctcccgctcgccc

SEQ ID NO: 196174 - DNA, 100 bp, Homo sapiens
tctgatgttgaagaaaatcaagaaaaactggctctggatctccgattgtcaagttctcgagcagcttctatgatatgtgaacttttgcaaagcggagcca

SEQ ID NO: 196175 - DNA, 83 bp, Homo sapiens
gagtatttgaagtctgtgtcaaacatccatatcataagtggaattttggagatattcaaagcactgccagtgaaagatgtaga

SEQ ID NO: 196176 - DNA, 49 bp, Homo sapiens
atgtggcgctggatccggcagcagctggcaaatcctgatcctaactgtt

SEQ ID NO: 196177 - DNA, 100 bp, Homo sapiens
acgagagctaatgctgcatgcccgttgctgcctgaatcagaagggcaccatcttggggagagaagtggatgggccctatacctccagccgtgaatgccag

SEQ ID NO: 196178 - DNA, 100 bp, Homo sapiens
cctggtgcgctccctgcgtttcgggtggggccgcgcaggcaaggacaaggccacagagtcggggtcttcacggtactccaaagattcaggtttactcacg

SEQ ID NO: 196179 - DNA, 83 bp, Homo sapiens
aacgaggccattgacttcatagcaaaccagtccagctacgggggcccagccagccagcagctgagtgggggttacggaggcgg

SEQ ID NO: 196180 - DNA, 100 bp, Homo sapiens
tactggacatgcaaaaatcacatgtggctatgaccttcctgcaaaatctcttttaagagcctgtgccgatggaggtgccaaccgcttatatgatatcacc

SEQ ID NO: 196181 - DNA, 75 bp, Homo sapiens
ggaaacatacaaagctgctcatagctaaagctccatggaatagagattcctgaaaggacagattatgaaatggac

SEQ ID NO: 196182 - DNA, 101 bp, Homo sapiens
ctgcgcccggtgcggcaagatcgtgtatcccacggagaaggtgaactgtctggataagaacgacaccgtaactatccgcactagaaagttcatgaccaacc

SEQ ID NO: 196183 - DNA, 100 bp, Homo sapiens
tgggcggcctgaagagctggtgtcctgcgcagactgtggacgctctgttccagggccctgcgaaccagaagacctcatcgacgggatcatctttgctgcc

SEQ ID NO: 196184 - DNA, 83 bp, Homo sapiens
accggttctcagggacagtgcacgcagaccacctcctccaccctgaagggtgccatccagctgggcatcggctacaccgtggg

SEQ ID NO: 196185 - DNA, 131 bp, Homo sapiens
gctggtgtggacgggctgcgcgtgggcatgggctgcggctccatctgcatcacccaggaaggtgctggagaatctggtaaaagcaccattgtgaagcagatgaggatcctgcatgttaatgggtttaatgg

SEQ ID NO: 196186 - DNA, 96 bp, Homo sapiens
cggatgctgcggcgcccgctggccgggctggctgcggccgccctgggccgggccccaccggacggtgctggggagtcagggaagagcaccatcgtc

SEQ ID NO: 196187 - DNA, 100 bp, Homo sapiens
ctaagactcgaaggcagcacaggacctggaaaaattacatgaaatttagaacgtccaacaccaaagtacacaaaagtaggggagcgtttacggcatgtca

SEQ ID NO: 196188 - DNA, 75 bp, Homo sapiens
tctcagtgttctccgctctcataggtcaggagaaaattgctccacaagatcagataaaccgacatttgtcaaggc

SEQ ID NO: 196189 - DNA, 82 bp, Homo sapiens
ccgagacagcagctgagacggcagcggcagcttctcagcagaaaaatatggctcaggagactaaccagaccccggggcccat

SEQ ID NO: 196190 - DNA, 50 bp, Homo sapiens
cttgctcattcttggtgcaaatctccaagaaggagaagcttctctcgcag

SEQ ID NO: 196191 - DNA, 83 bp, Homo sapiens
atggcgtgcagcgcaaccacgagacggccttccaagctctgctgtgtgcgtgcaccagctgcctccaggccaactacacgtgt

SEQ ID NO: 196192 - DNA, 97 bp, Homo sapiens
tgcccatgggctccataaaaaatgtggtcagtgaacctatcgaaggacatgaagactaccacatgatggtggagccgccaccaaaatgcagattttc

SEQ ID NO: 196193 - DNA, 100 bp, Homo sapiens
cttcaagatagacattgaccccgaggagacgccctgccaaggtaaccctgctggggtcagttatcttcacattccagcacacccagcatctggcaatatc

SEQ ID NO: 196194 - DNA, 99 bp, Homo sapiens
cctcaatttaagcctgatctaacccctagaaacaggcttaacagcattgcgcagtgatgaagtgattgatttaatgataaaagaatatccagccaaaca

SEQ ID NO: 196195 - DNA, 100 bp, Homo sapiens
aggacacactttgatcctgatgttcatctggacatgtctcaggaaggctatggaactagatctcaacctcctctggcccccggaaaacctaaccatgaag

SEQ ID NO: 196196 - DNA, 82 bp, Homo sapiens
atttgtggctggctggatctctgtaagcgcaaagcctcagaagacctggaacaagattctgccatctctgtgatcccaagat

SEQ ID NO: 196197 - DNA, 75 bp, Homo sapiens
ccatagagggtttaaagaaacacatggaaaactgcaagcaggtggtggaagatggatatgaattttttgctaaac

SEQ ID NO: 196198 - DNA, 100 bp, Homo sapiens
ttcaagttaatccaggtgagactttcacaataagagcagaggatggaacacttcagtgcattcaaggtttcttgagtacaggcgatcaggctgcaaaggg

SEQ ID NO: 196199 - DNA, 100 bp, Homo sapiens
actgaaaccctctacaaaggcattagtcctatcttgtaagtcgtcattgaattttgagaagcattctgaaaactttgcatggacagagaatcgttatgat

SEQ ID NO: 196200 - DNA, 75 bp, Homo sapiens
ggacaagcaggagctgggagccccagattatccctggcgctggagccgggccgtccccatgaactccgcactcat

SEQ ID NO: 196201 - DNA, 88 bp, Homo sapiens
aagatcgccagtcacctcttcatggcaaccatataacaatcagtcacactcaggatttccatttaaacagggttaatttggaagaatc

SEQ ID NO: 196202 - DNA, 96 bp, Homo sapiens
ccactactacaatggcgactaccacaacccgtaagaatcgctctacagccagcattcaggctgcctggggaggtgggctgctcatgtccaggaagc

SEQ ID NO: 196203 - DNA, 96 bp, Homo sapiens
gctttgactccgtgttggcctctctgccgtggattttaaatgaggaagtttcaccagtgatcattaaagaatgggcagcttacaaaggaaagtctc

SEQ ID NO: 196204 - DNA, 100 bp, Homo sapiens
tgaattaaaactgaatgaactgataacggagaatggaactgtatgccagcagcttgttgtacaatgcctgtcttagatgtcaagctgaaaacaaacaaga

SEQ ID NO: 196205 - DNA, 100 bp, Homo sapiens
ggagaagctcctggactggtttaaaacggtcactgaaggagggctggacatccacttcatccacgtgaagcccccccagctgcccgcaggccataccccg

SEQ ID NO: 196206 - DNA, 103 bp, Homo sapiens
tgcaacaagtgtctttggttataaattatgatctacctaccaatcgtgaaaactatattcacagattccagaattctctgatggtttctggactgggtcccag

SEQ ID NO: 196207 - DNA, 83 bp, Homo sapiens
aaaaaagcccagtggaggaaagagctagagatgaggatgacatcaatgatgtgacttctatggcaggggtcaaccttaatgaa

SEQ ID NO: 196208 - DNA, 82 bp, Homo sapiens
gaagactcccactccctgaaatctggagtgaagaacgccgccatccagccaccattccaagtgccttcgtgcatcgctgcgg

SEQ ID NO: 196209 - DNA, 73 bp, Homo sapiens
tttgggatccggaatgtcacacacattgatcagcttctcaataggtttggcatggacaagatctatgaaggcc

SEQ ID NO: 196210 - DNA, 75 bp, Homo sapiens
cgcagccttgggcctcgcgccggctatggccgtgccctggggctgagccctcagtagccacgatggaggtgatga

SEQ ID NO: 196211 - DNA, 88 bp, Homo sapiens
tggagagtgcgattgcagaagggggtgcttctcgtttcagggacttcagtactagtgctaataacatccagattgataaaaccaagcc

SEQ ID NO: 196212 - DNA, 83 bp, Homo sapiens
cgggaagacgcggggaagaggaggcggaaaaggacgcaaagttctccggcgaggtcatcatcagatttgaaatatttaaagtg

SEQ ID NO: 196213 - DNA, 136 bp, Homo sapiens
caagccgctcttccccacctgcccggtgcccgaggaggcagccaagctcgtggcctgcctctgcgtgccgcacagtgcagaaaaacgccaagtacatctgcctggctaacaaggactgccctgtggacaagaggcg

SEQ ID NO: 196214 - DNA, 75 bp, Homo sapiens
tgagctgctggctaagatcaccaacacagacgtgcccaccttgggacaccttgactccaagcccagcagtaagtc

SEQ ID NO: 196215 - DNA, 87 bp, Homo sapiens
cttggtggacctattattactacacaagtaactattcccaaagattgggtaattccagaattgattggccataccattgtcactgta

SEQ ID NO: 196216 - DNA, 83 bp, Homo sapiens
ctgctgcagaacgggagccgccacttcgaggactggatttattgctaaacatgggtgcatttttggataaacccaaaactgaa

SEQ ID NO: 196217 - DNA, 100 bp, Homo sapiens
tcaatgtccagcactgtgcagggcagcaacatctttgagagaacggaggtcctggcagataaggagggttcctgcccccaggtgaacattaactttcccc

SEQ ID NO: 196218 - DNA, 82 bp, Homo sapiens
tccccagtaccacggcccggcgcctgcactcgtttcctgcaggagagacaatgcagatcttcgtgaagactctgactggtaa

SEQ ID NO: 196219 - DNA, 98 bp, Homo sapiens
tctctgatttgctgtcagccatgaacggatggatgtgatgcctgctagccaaaagggtaaaatctgtaaaaactgggtcagttttttggacaatgtgc

SEQ ID NO: 196220 - DNA, 82 bp, Homo sapiens
ccatcgccgcttctagaccctactgcggtctcggatattgccggttactggctgaccaacaaagttcctatcaaaagaccca

SEQ ID NO: 196221 - DNA, 100 bp, Homo sapiens
ctcaaaatgaagatggcacatggcccaggcagaccttgcagtcaaattataggtgggcatttattccagaagtggacacagagggccctgccttcctgtc

SEQ ID NO: 196222 - DNA, 75 bp, Homo sapiens
ccgaaggctccgctcacgcccgggctgaaagtttagaagagaagaatatggctaaaattcatcgtggtcagctgg

SEQ ID NO: 196223 - DNA, 154 bp, Homo sapiens
tactttgcagcagctggaccatgttcctcattaacatctgtctgtccgcttagtcatcacatcatttcactgtggtgaaaattagttctgctgtgcttaaagctgcggcccatcactatggagctcaatgtgataagcccaacaaggagtttat

SEQ ID NO: 196224 - DNA, 75 bp, Homo sapiens
cttctttgggaatgggccaccagttaactacaagggcccctgcgctttgtcatcatccacaaacgctgcgtctac

SEQ ID NO: 196225 - DNA, 100 bp, Homo sapiens
ggcgattacagccgacccccgaggtgacttcatggtcatgacgattttcttcaatgtgagcaggcggtttggctatgttgcctttcaaaactatgtccct

SEQ ID NO: 196226 - DNA, 98 bp, Homo sapiens
aataccagcagcctgtgggatttattattttgaagtaaaaattgtcagtaagggaagagatggacccttcatgtggcctttataaatatgcgtttgag

SEQ ID NO: 196227 - DNA, 75 bp, Homo sapiens
gctcctgtcgccttcgcctcctaatccctagccactatgggcagagagctccgctaagggcgtccactccttcta

SEQ ID NO: 196228 - DNA, 76 bp, Homo sapiens
agttactgccgcgccaccgagtccggaccggagactttggggcctaactagaaataaactatcaatcttgcccaga

SEQ ID NO: 196229 - DNA, 100 bp, Homo sapiens
gcgggatcccagcctcaggcgtgcgcggacggtgtgcggggaccatggctaaacctcctggatcattagccagaagcagcagcctgtgccgttcacgccg

SEQ ID NO: 196230 - DNA, 100 bp, Homo sapiens
ttgtcagcgagcaagaacaatgccaggaggtctggagaaaacgtgtcatcagtgcatttctaaaatcgccagcaatggtactccaaagattcaggtttac

SEQ ID NO: 196231 - DNA, 123 bp, Homo sapiens
agggccccgggcggacgccgcagagcgccgaggaggctttcctgctggtggcaaccgcctacgagacactcaaggaagatgagaatgtgcctactgctcctgatcctccaagtcaacatttac

SEQ ID NO: 196232 - DNA, 100 bp, Homo sapiens
gttcatttatcctgactccacctcgaaggaaaattccccagtgttcgcagttgcaggaaaatggcattcctatgaagaaagcacgaaatgatgaatatga

SEQ ID NO: 196233 - DNA, 50 bp, Homo sapiens
caaaaatgaagttttctaccaatgtccatcatccctttcaagccctgata

SEQ ID NO: 196234 - DNA, 100 bp, Homo sapiens
cgaattctcaacccctacaacttattcctgtccggagacagcctaagggtaagaagagttcctgggtcaagtggtcaccttcataaaaccgaagacgggg

SEQ ID NO: 196235 - DNA, 76 bp, Homo sapiens
ctaccatctaaaatacgaaggtttctggctggagctcctgaaattattcttgggttaccattttgtgaagctattg

SEQ ID NO: 196236 - DNA, 75 bp, Homo sapiens
tgctcccagtatggacacatctttagaagacctaagaaattgagagtcagattgacagaatctgtgaaatgggag

SEQ ID NO: 196237 - DNA, 100 bp, Homo sapiens
ctttggcaagagtgtacctggtccactgaaaaattcttcagattggaaaataccacaggatggagactacgagtttgtcactgcagccagaggggtccag

SEQ ID NO: 196238 - DNA, 72 bp, Homo sapiens
gattcatttagagctgcggaacaggacgccctctgatgtattgttgcagcatctggcagtgagactgaggat

SEQ ID NO: 196239 - DNA, 100 bp, Homo sapiens
ggatgaagtaaaagaaagtatgattaactgtatcaagcaggaacaagctcgtaaatcccaagagttacagtatgaagtattcagaacagaagaggaagaa

SEQ ID NO: 196240 - DNA, 90 bp, Homo sapiens
agagagtggcagcgggggctgatggaagtgcagtgggggctggagagggcaccctattaacccagtatccactccagttgcacttcccac

SEQ ID NO: 196241 - DNA, 74 bp, Homo sapiens
gaatcaagctatccaaatgcgattagttgatgtggcctgcaagggtgtcaaattgagaaccaggtagatcccca

SEQ ID NO: 196242 - DNA, 75 bp, Homo sapiens
cggagctcgtccagctgcgtgcctagattctgaaggaagatttccattaggtaatttgtttaatcagtgcaagcg

SEQ ID NO: 196243 - DNA, 75 bp, Homo sapiens
ctgtctctgatccgcaagcatgctcagaccttcattgctctgtgtgccaccggtcctctggatgtcagcatggca

SEQ ID NO: 196244 - DNA, 99 bp, Homo sapiens
gagtgatgcaaccatgaaaatcgttcagatcatcatgtgctttgttttccggaaagttcgaagcttgctagggggaaatattcgtctcctgttgtgtgg

SEQ ID NO: 196245 - DNA, 75 bp, Homo sapiens
aaatggcagcattggaaaacagactggttctagaaaagcagccacagtcccattcatggtgccattcaccctcaa

SEQ ID NO: 196246 - DNA, 100 bp, Homo sapiens
gtaacctgcactgtgacctacactagtcgcgggagccacgcagaggacgccggaacaccctggaagccgagaaatgttttcaaagaagaatggaagaaac

SEQ ID NO: 196247 - DNA, 100 bp, Homo sapiens
cagaggttattttagtatagaggtgaccaagaatatggcccaggtgaccaaagccctggacaaggccctgagcaccatggacctgcagaaggtctcctca

SEQ ID NO: 196248 - DNA, 100 bp, Homo sapiens
cactgtatttggagaagaatggaaagagaagactgatagagacttcgttaaggaaactgttaaggcagcaataatagaagagcagaaacgaagtgaaaag

SEQ ID NO: 196249 - DNA, 100 bp, Homo sapiens
cagtggaagggtggacctgtcaagattgaccctctggctttggtacaagccatcgagagataccttgtagttagagctgtctgtgatcctggaaacatac

SEQ ID NO: 196250 - DNA, 74 bp, Homo sapiens
tgggaagatggcaggtgggggcggcgacctgagcaccaggttctaaggcccagcagctactacaaggattgcaa

SEQ ID NO: 196251 - DNA, 100 bp, Homo sapiens
tacctgctctcagacagcctcttcgtgtggatggcaccaaaagcgaaggaagctcctgctcatcctaaagccgaagccaaagcgaaggctttaaaggcca

SEQ ID NO: 196252 - DNA, 83 bp, Homo sapiens
ggcgggcgcagtttctcacgacgggccgagcctgccactggcgaccattgacgaggtggagacggacgtggtggagattgagg

SEQ ID NO: 196253 - DNA, 90 bp, Homo sapiens
agtgtataactacaatcacctaatgcccacaagggtggccgtgaattaagtgattttattagctatctacaaagagaagctacaaacccc

SEQ ID NO: 196254 - DNA, 98 bp, Homo sapiens
ttcagtcaggtggggccggtgaagcagtgcttcgtggtgactgaaaaaggctgagaagaaagccaaggtcattgcaggaatgaatgctgtggaagaaa

SEQ ID NO: 196255 - DNA, 112 bp, Homo sapiens
cgggctccgagagggggcgacttgcaggaggctccccccgggggcggaggcgaaggaggaattttgttgtcagagaataaaaggaggttgtccataattgactttaagcagc

SEQ ID NO: 196256 - DNA, 100 bp, Homo sapiens
gagttccacaagaaggactgcggggacctggtggccatcggtctgggaccattgtacaggatcattaatatacagttcatctgtgttatcaggtaaattt

SEQ ID NO: 196257 - DNA, 90 bp, Homo sapiens
gcgcaagcgcgagatcttcgaccgctacggggaggaagctcggcttgcccttcccctgcttgtgccgtgtaccctgtaacactgtgtttg

SEQ ID NO: 196258 - DNA, 75 bp, Homo sapiens
ggggggtggagcaaggcctgttggatcccaggactggggttcagactttccgcagagaccatgatcgtttctggg

SEQ ID NO: 196259 - DNA, 98 bp, Homo sapiens
ggaccacagctcactttccccaaggaccagcttgacgaggcctggactggaagtttgtctgccatgcgtttcctcaccgccgtgaacttggagcatcc

SEQ ID NO: 196260 - DNA, 100 bp, Homo sapiens
gtgtgccagcgatgtccccatccgccgccgagaggaggcctatgagaatcaggtacgctatttgaagaacaggtttccatgctcttagaggagcatcaga

SEQ ID NO: 196261 - DNA, 92 bp, Homo sapiens
gctaacatgttgtacctggaaaacaatgcccagactcaatttagtgaggcacattgcaagcaacccgtgccttgatggtggttggcatcctc

SEQ ID NO: 196262 - DNA, 97 bp, Homo sapiens
cctcccaaggtgctggaattacaggctttgcagagtttagagcatattctacccaactggccccagatggaaaatactgtcttgaaattggatggct

SEQ ID NO: 196263 - DNA, 82 bp, Homo sapiens
ttaacacttcctagataacggaggctgggaggcggcagaatgcagccagaggagggcacaggctggctgctggagctgctgt

SEQ ID NO: 196264 - DNA, 74 bp, Homo sapiens
agccgcggccgaccatagagatgcggctcccgccggctctgggtctggaggttgaaggggcccggccaggactc

SEQ ID NO: 196265 - DNA, 75 bp, Homo sapiens
gacggagctaagagatatctgcaatgatgtactggagttccatctggaatatgacaaattagaagaacggcctca

SEQ ID NO: 196266 - DNA, 110 bp, Homo sapiens
gtaaagagtggatggaggccattcaccaagccagatgggagacctttaactctgaaggacatatgggaaggagttcatgagtgctataagatgcgactgctacagggacc

SEQ ID NO: 196267 - DNA, 74 bp, Homo sapiens
ttggtgttccccttttactgccaggacactgagatttggagaggtccctttcaatgcagtcgcactccggatta

SEQ ID NO: 196268 - DNA, 89 bp, Homo sapiens
tgggaggcgaggacggtctctgccagtataaatgcagtgacggtccttccatagtgacgccccccaaggacatctggaatgtcactggt

SEQ ID NO: 196269 - DNA, 83 bp, Homo sapiens
atgggaaagatctaccttctggaagctactactacgtggtgcttggaaaggaggctgaacagtacccagggggagattcgtgt

SEQ ID NO: 196270 - DNA, 50 bp, Homo sapiens
cccgatccggacaaagaaacgagcgctcgccgcttacaaacacgcagatg

SEQ ID NO: 196271 - DNA, 75 bp, Homo sapiens
gcctcctacctgaggctctgggcgcttagcctggctcacgcacgaacggcagagtcgaaacaaacaatgagggcg

SEQ ID NO: 196272 - DNA, 100 bp, Homo sapiens
gaaagaactatgtgaatgggaagactttccttgagaaaagggacttaagtcacaacagattatctttcatcaaggcaagttccatgagccaccttcaaag

SEQ ID NO: 196273 - DNA, 98 bp, Homo sapiens
cctaggtgccggccgggagggcggccgcagcaggtgtcatggagaaactccagctgggcccagagattctgcagcgggaaaatccaaggcttatttat

SEQ ID NO: 196274 - DNA, 100 bp, Homo sapiens
gtgaatctgctgagtgatgagagagagagtgggccagtcacttcattgctccagttacaaagagtgttacactgcgcctttaaggaaaactttccttcat

SEQ ID NO: 196275 - DNA, 97 bp, Homo sapiens
actcggctggagcctgtctactcaccccctggcagccccccacctggggacccccgaatctttcaggagcgggctgcagatgacagcaaagaggttg

SEQ ID NO: 196276 - DNA, 100 bp, Homo sapiens
tgtcttcgtgatgaataaaaacatttcaactccctacagttgtgccatgcggaagaaggagaaagggccaacccctgaagaagcaatacagaaactgaag

SEQ ID NO: 196277 - DNA, 98 bp, Homo sapiens
ttgtggcgaatggggctcacgtcgatctgcgctcctcagaccaccggcaggtgaacagcctgatgcagaccgaggagtgcccacctatgctagacgcc

SEQ ID NO: 196278 - DNA, 100 bp, Homo sapiens
cgaccctggagcacccaggactcagattcctcagcccagagcagcacacactcggcaaagaacagtctgaacttgatcaagatttggatgatgttgaaga

SEQ ID NO: 196279 - DNA, 75 bp, Homo sapiens
atctgaagagctatggtgaaacaccactgaagcattgccaaggtattaggttgcagcgtctagggcacaccacag

SEQ ID NO: 196280 - DNA, 90 bp, Homo sapiens
ggcgagcgggccaaggagggcatctccatcaactgtggcctggtggccactaacacggacaccagccgaaatgccggaaatgcggtcctg

SEQ ID NO: 196281 - DNA, 147 bp, Homo sapiens
atatgtctatgacaacctgatcacaccagccatgatctgtgccggcttcctgcaggggaacgtcgattcttgccaggtacccgggctccacattcatggatcatgtgttacgctatcaggacactccaggagtcaaaatgattgtgg

SEQ ID NO: 196282 - DNA, 99 bp, Homo sapiens
aaggaaacagtttggacatcccagtagcagttacaattttctttggggccaatgacagtgcactaaaaggcaggatggggaagcagaatagcaaactgg

SEQ ID NO: 196283 - DNA, 123 bp, Homo sapiens
tgattcccgtgattgcgttacaagctttgtctccttcgacttggagtctttgtccaggacgacaatgcagatcttcgtgaagactctgactggtaagaccatcaccctcgaggttgagcccag

SEQ ID NO: 196284 - DNA, 97 bp, Homo sapiens
tcctcaaatatgcagcaaagattacaccaagatctgtgctgaccacaggaattggatctactagtgcaggcaaagaattggacaacttaaaatgaca

SEQ ID NO: 196285 - DNA, 100 bp, Homo sapiens
ctctgacacatccaacttcgacgtggatgacgacgtgctgagaaacacgtttggggattctcagcagttgcggctggtccgtattctgcgcagcaccgtg

SEQ ID NO: 196286 - DNA, 50 bp, Homo sapiens
tgggatcacctatgaagatagacaaaattttcagcatctttccccaaaca

SEQ ID NO: 196287 - DNA, 100 bp, Homo sapiens
tttcggcgcacaggaaatgcaactcgaagtggacaaaatgggaaccaaacttggagagctgttctctccataaatgaagaagggctaaggcgatgcgaag

SEQ ID NO: 196288 - DNA, 99 bp, Homo sapiens
ctggccagcagttcatctacagtggctgctccactggcaaagtggttggaagggtcgagaggccccgccggccttcaagcagttcttcagcagcgccta

SEQ ID NO: 196289 - DNA, 100 bp, Homo sapiens
caagagccggagggtctcagaggacagacagtgccaggagagagaagctcttcagaaacagctggatgaagcaaatcgagaagcacaaaaatatcgacag

SEQ ID NO: 196290 - DNA, 75 bp, Homo sapiens
ggcctcgaggccgctgctgctggcgctcctgtcgttggagcatgaataatctttcatttagtgagctatgttgcc

SEQ ID NO: 196291 - DNA, 100 bp, Homo sapiens
gggccggggacctgcatgtgtgtgcgcgcgaaggagcggaagaatggcagtgctcaaactcaccgaccagggtatatttacttctggcacatgggaagag

SEQ ID NO: 196292 - DNA, 107 bp, Homo sapiens
gtagagcggagcctggcgggcgtgggaacccaggccccgccgaggcggccaggacagagcgggatgccaccagcttgtccaaagggaagttccaggagctcctggtg

SEQ ID NO: 196293 - DNA, 101 bp, Homo sapiens
gcccaggttcttcaaaagatgtagttcctgaaatgactgagatattgaagaaaaaatgaatcaggatcatgccttaaaaagaaaacttttgttaaagtatt

SEQ ID NO: 196294 - DNA, 100 bp, Homo sapiens
ggcggcggcggcagctgcagtgacatgtccagcatgaatcccgaatagtaatgtttgaaacttaccagttttccggtgtatatgtagccatccaggcagt

SEQ ID NO: 196295 - DNA, 82 bp, Homo sapiens
gcagccgcagcgacggcggcgacagcagttcaaatctgaacatcaatgatgtactagggaactactcattgactcttgttga

SEQ ID NO: 196296 - DNA, 75 bp, Homo sapiens
ttggaccctcctcccaactgtaggttttagaaggctgagcttagacattcagtcccctccaaatattggtctgcg

SEQ ID NO: 196297 - DNA, 51 bp, Homo sapiens
cggctcacctgtgcgggatggaacaaaaggaaggatgccaattctgcgctt

SEQ ID NO: 196298 - DNA, 75 bp, Homo sapiens
gatctggtgtaccaggcgaagctggccgagcaggctgagcgatacgacggtgcggagctctggactgggattaag

SEQ ID NO: 196299 - DNA, 75 bp, Homo sapiens
agtgtatagggaaacctgggggctccctggacaactccgagcagccattgagacccagagcagcagttctgaaga

SEQ ID NO: 196300 - DNA, 75 bp, Homo sapiens
tatcagaatggagggccagttataacagtgcagaagcctccccagctttctgaggatgatatctggctaaaaagc

SEQ ID NO: 196301 - DNA, 100 bp, Homo sapiens
gtttctggaagttataacgctacacgaagaactaagaatattattagcacaagagcaccatactttgaggttgctgtggttggctgataaatatttgtcg

SEQ ID NO: 196302 - DNA, 98 bp, Homo sapiens
gtcgccggccgcccgcacgtccgtccggccacggcagagacaacgtgtgtaccccaagtgcacatggctgaccacccctaaaagcacctggccccgct

SEQ ID NO: 196303 - DNA, 95 bp, Homo sapiens
ggctgaagctgcgcatgatccgttctgaggtgctccgcctggtggacgccgggcgaccattgacgaggtggagacggacgtggtggagattgagg

SEQ ID NO: 196304 - DNA, 87 bp, Homo sapiens
ggctgctgcggaccccgccgagtcctagcgcctggcctgcgcgccgctgcccgcgccacaggctcaaactgctttttctgcaaaccc

SEQ ID NO: 196305 - DNA, 82 bp, Homo sapiens
tctggatccctatttattaaagctcttttgaaacagatggtcaccatgtttagatattagcagtcccgtatgtgcatgtctg

SEQ ID NO: 196306 - DNA, 82 bp, Homo sapiens
gcgtgacgctcctgcctgcgcgcggccaagccatgctcggccccaggtgtccctggccagtgtccttccacctgtccacaag

SEQ ID NO: 196307 - DNA, 100 bp, Homo sapiens
cagaggagtttgaagcagccatcaaggccattatgagaactcaggtcaccatggctgttattggctcccttgctgtccccagctgttccccaggtcacct

SEQ ID NO: 196308 - DNA, 83 bp, Homo sapiens
ctgtttttctggtctgaccgtcgcaaccctcatgaagtacaaccagcatatgctacaagtgctcaacaggaaccttggattat

SEQ ID NO: 196309 - DNA, 82 bp, Homo sapiens
tttaactttcattgtcttttccgcccgcttcgatcgcctcgcgccggctgctctttccgggcagacatctggtccctgggca

SEQ ID NO: 196310 - DNA, 100 bp, Homo sapiens
cacggtggtgtcaaggcagggagaccaggaactcagcgagatgctgtacacagaccggcccgactggcagagtgtgatgcagtacgtggcccaaatctac

SEQ ID NO: 196311 - DNA, 100 bp, Homo sapiens
tcaatcacacgtaccacctggatgttgtggtgttgatgggaaccattttcagcatcctgctggtgactgtcatccttatggcattttgtgtctacaagcc

SEQ ID NO: 196312 - DNA, 75 bp, Homo sapiens
tctctcttcaccctgccgtcatgtctaagtcagaggtgatatccgacatccaaagcacgtccaacagacggatgt

SEQ ID NO: 196313 - DNA, 100 bp, Homo sapiens
ctgggccccactcccaccgcctctactacctgggacacagcttgggctatggctttgtgaactacgtgaccgcgaaggatgcagagagagcgatcaacac

SEQ ID NO: 196314 - DNA, 100 bp, Homo sapiens
cagaagttggcaggagcatgggcttcggaggcctatagcccgcagcagcaagatgaagagcgacgtcggcagctgagagagagagctcgtcagctaatag

SEQ ID NO: 196315 - DNA, 100 bp, Homo sapiens
agatatgtacacagcatcatactgaagctattggaaaggaatattccctgggcttttgaggcaataaagcaagcaagtgaatgggtaagaagaactgaag

SEQ ID NO: 196316 - DNA, 101 bp, Homo sapiens
tggtcagacaaatttttataacactgcccagtcaccaagtgctctccagcaggcaagcctgggacctggctgttgacatctgtctgtctcagctgccgacg

SEQ ID NO: 196317 - DNA, 99 bp, Homo sapiens
agaaaacagctctggaaaatgacagccttcatttctctgaacatactgccttatgggacagatcaataaaatgtttattggaggcttgagctgggatac

SEQ ID NO: 196318 - DNA, 75 bp, Homo sapiens
ccgcccctggtgcacacaccctcgtattctcctgcccttccccagcggtcttgcgagtggctggttccctgcaga

SEQ ID NO: 196319 - DNA, 100 bp, Homo sapiens
atgttgccaaaatgtttcctaaagttcgtgaatctcaacttgttataaacaacttgtgaaatgagtgatttggaagatgatgagacaccccagctttctg

SEQ ID NO: 196320 - DNA, 157 bp, Homo sapiens
aactattttgcaagattaatagatagaataaaaactgtctgtgaggttgtgaatttaacaaatttacattgtatcctgcttcagttgtggagggccaaaagggtatcattcttcgagctattcaagaaatatttcaaagcatctctgaacatcctag

SEQ ID NO: 196321 - DNA, 75 bp, Homo sapiens
cccaacagaagctgaattgcaggatatgatcaatgaagtggatgctgatggtttacaagaagttaggtcaaacgc

SEQ ID NO: 196322 - DNA, 75 bp, Homo sapiens
aagggaccacggtcaccgtctcctcagctttgtgctgatgaacatggtcaccttgaaaggtgtgttgaatatggc

SEQ ID NO: 196323 - DNA, 99 bp, Homo sapiens
ggagaactacaggaacctggagtctgtgggtagatttcgggcagacaacttgaacaagctgaagaacctatgcagcaagacaatcggagagaaaatgaa

SEQ ID NO: 196324 - DNA, 75 bp, Homo sapiens
gggggtctcgctatgttgcccaggctgaacatgaactaaatctggcaagaaaaatgagggaatggaaactatggg

SEQ ID NO: 196325 - DNA, 100 bp, Homo sapiens
gggcccggccgctgctctgcctcccggttctgccgcgcgggccctgcatgtggagctgccgtctcagcagctgtccagaccaaaacgaagaagacgttag

SEQ ID NO: 196326 - DNA, 100 bp, Homo sapiens
tgcccagccagctcctcagcccccacctgccaaagtcagcaagagaggagccttcaggggaagtagaggtggccgaggttggggcacacgaggaaatcgt

SEQ ID NO: 196327 - DNA, 99 bp, Homo sapiens
tgactcccccaaggccgaggtccgcggccaggtgctggcgccgctgcccctccacggagctgctctgttaaaagcgaaaatgaaacaattgcctgcggc

SEQ ID NO: 196328 - DNA, 88 bp, Homo sapiens
agcagttactcgcacaaccccagttaagctgcgctccgggagggtctaaaattcccaggactccacagctttgcaccagataagcctg

SEQ ID NO: 196329 - DNA, 100 bp, Homo sapiens
ggacaaccacgtctccggccacgacaatacaatggtgggtgaagagaagatgtctctaagaaaccggctgtcaaagtccagggaaaatcctgaggaagat

SEQ ID NO: 196330 - DNA, 150 bp, Homo sapiens
gtgacagcgagcatggagatggcacagacggagaagacgagggggcgtctgaggaggaagacctggaagacagatctggactggaaggatcaccagcacatatgcggccagtcagcagctgtcaccgtccaggcagacgaagtccacgtg

SEQ ID NO: 196331 - DNA, 100 bp, Homo sapiens
caggctccggctcatggcatcaagtggcatccatcataagaccatcttgattcaaaacatctatcgtaatccccaaaacagtgcacagacggctgacggc

SEQ ID NO: 196332 - DNA, 50 bp, Homo sapiens
ctagagtggttcagccacaaggaggctttatcctgtggataaacgcagag

SEQ ID NO: 196333 - DNA, 82 bp, Homo sapiens
acctagtgggtgtaatacatcatgaactgcaggatgagactgatcgtggggttgaccaacaagatggaaagaaccacgcagg

SEQ ID NO: 196334 - DNA, 98 bp, Homo sapiens
acgcggagcacggaggacggggccgggcgacctgggcaccagcaggacccgaggccaggagccaggggcccagaagggttgtgagtcccggcccagcc

SEQ ID NO: 196335 - DNA, 100 bp, Homo sapiens
ggctggtcttcaactcttggcctcaagtgatcctcctgccttagcttccaagaatgctgaggttacaggaagcagagaaaggtgtgaaattcctaacatt

SEQ ID NO: 196336 - DNA, 80 bp, Homo sapiens
cgagatgccgggggagcggggccttccacaccccctccgtgggtgtgtggaggcatacacggaatacctgaggagcatcc

SEQ ID NO: 196337 - DNA, 83 bp, Homo sapiens
gcgctcgctcgggtggcgacttcctccccgcgccccctccccctcgccatgaagtgtggacgaatgtggaacctcgctctgtg

SEQ ID NO: 196338 - DNA, 111 bp, Homo sapiens
ggaaaactctgaagatgataagaagaggggacgttccacagacagtgaagtcagccagcgggtcctctgcccgggggaacctgtctgggaagcccgatgactggccccagg

SEQ ID NO: 196339 - DNA, 100 bp, Homo sapiens
ctggactttgggcgtcccattgccatgaataactgaagtgaagtgatggactccgatttggagagtagtaagacgtgaaaggaatacacttgtgtttaag

SEQ ID NO: 196340 - DNA, 75 bp, Homo sapiens
caagatctgggtgccatcattttctggttctgttgatgaccctcttccaggtgaccaagaatatggcccaggtga

SEQ ID NO: 196341 - DNA, 98 bp, Homo sapiens
ttcattggccacctacagaaacaaaatgtcaacaaattgatggttctcctgtgcctcctgttggctctctttgcatctggcctcatccaccgagtctg

SEQ ID NO: 196342 - DNA, 75 bp, Homo sapiens
gcgggagaggcgagctcgcgatgagtggtctcggcaggctcttcgggaaggttccaagatgagatgggattctcc

SEQ ID NO: 196343 - DNA, 75 bp, Homo sapiens
gccaggcctggatgggccccatctgccagctggccttcccgagcaacgacatgccctttgatgagctgcttgcgc

SEQ ID NO: 196344 - DNA, 100 bp, Homo sapiens
aggaatttttccagctcaactacctccaacacctatcactcagtcggtgctatgatataatacctgaaactttactatggagtttcactcttgttgccca

SEQ ID NO: 196345 - DNA, 83 bp, Homo sapiens
ccttggatctcagtgggccggcccgggacttcgccctgagactctggaacaagggccccgtgaagcacgtgtacagagtcctg

SEQ ID NO: 196346 - DNA, 100 bp, Homo sapiens
ttcaacccctacaccgagttcaaggagttctccaggaagcagatcaaggacatggagaagatgttcaagcagtggcgacctgcacatgacccagtttttc

SEQ ID NO: 196347 - DNA, 50 bp, Homo sapiens
gcccaagaataccatcaccaattgacagtgatgtgtgttctgaaattgtg

SEQ ID NO: 196348 - DNA, 90 bp, Homo sapiens
gtgcgccggctccgcggaagatgccggaccaagccctacagcagatgctggacaggttaaggcggctcagaaacaagacagctcaccaga

SEQ ID NO: 196349 - DNA, 100 bp, Homo sapiens
ttcagtctctgcattaacaaatggttttgacactccagaagagaggtatcagaagcttaaaaagattaaaaggagcccaagccccatctcatcctagcac

SEQ ID NO: 196350 - DNA, 83 bp, Homo sapiens
gatgcttcagagagaggaagccgaaaacaccctgcaatctttcagacaggtgtgggcagaagaaaaagctagtgatcaacagt

SEQ ID NO: 196351 - DNA, 101 bp, Homo sapiens
gccgctcccgggggccgtgacgtgaccatgcagcaggtggccaggacagtggctaaagtggagctctcagaccacgtgtgtgatgtggtgtttgcactctt

SEQ ID NO: 196352 - DNA, 118 bp, Homo sapiens
tacacggccagttttgaaatcgacacacaaagaatagagttgagcctgtgggacacttcggacaatgcagatcttcgtgaagactctgactggtaagaccatcaccctcgaggttgag

SEQ ID NO: 196353 - DNA, 82 bp, Homo sapiens
ctcgccacagcggcctcggcctccccttggattcagacgccgattcgcccagctatgaagtcttacactccatatttcattc

SEQ ID NO: 196354 - DNA, 100 bp, Homo sapiens
ttcaaggtgaaggattcatgagtctatataaaggctttttaccatcttggctgagaatgcttgatccaaggattattcgaccatttatagcagaatgccg

SEQ ID NO: 196355 - DNA, 100 bp, Homo sapiens
cctcattcaagccaaactctctgagatggaagaggtcaaaccagccagactgcttttggcttctggatgccctcctccagtacacatcgtatggggtgac

SEQ ID NO: 196356 - DNA, 90 bp, Homo sapiens
ggagaacttcaaccaggcactcaagcctgtcttagaagtgatctgctcccgaatgcgctacatctcctcccagattgagcggcccattcg

SEQ ID NO: 196357 - DNA, 100 bp, Homo sapiens
cgtgaccatgtggaggctgctggctcgcgctagtgcgccgctcctgcgggtgcccttgtcagctctccagtgaagaagccaagtcttctaaaggcccacc

SEQ ID NO: 196358 - DNA, 112 bp, Homo sapiens
aggaatctcactctgttaaagctggtctgttctaactgaggaagtaacagctagcagtcgccactatgttgacaggctatttgaccctgatccccagaaagttctacaaggt

SEQ ID NO: 196359 - DNA, 98 bp, Homo sapiens
gtcaatggcttcatcagcactttggggggtgagcccctccagactccgaataggagatcaagagtttgattcattgcctgctttactggaattctaca

SEQ ID NO: 196360 - DNA, 100 bp, Homo sapiens
atatatcacccataatcggaatgtgatcacagagcctatttacccagaagtagtccatatgcttggcattcattaaacgtactcccgtgattgatgcaga

SEQ ID NO: 196361 - DNA, 127 bp, Homo sapiens
ggcggaggctacagcatcgtggcgctgggcaatgacatctacgtgacggacaatgcagatcttcgtgaagactctgactggtaagaccatcaccctcgaggttgagcccagtgacaccatcgagaat

SEQ ID NO: 196362 - DNA, 83 bp, Homo sapiens
aaaatggagcacgtccaggctgaccacgagcttttcctccaggcctttgagagttatggaaacaaaggacatgctttacatcg

SEQ ID NO: 196363 - DNA, 113 bp, Homo sapiens
catggagccaggtgacgaggacctagactgtgacaacgaccacgtctccaaaatgagtcgcatcttcaacccccatctgagatgttgcagtaaagatcctaaaggttgtcgac

SEQ ID NO: 196364 - DNA, 100 bp, Homo sapiens
ttcatggctatcatctacacatgccgctcctacgaggactgctgtggctccaggtgctgtgtgcgggccctctccatacagaggctgtggtacttctggt

SEQ ID NO: 196365 - DNA, 100 bp, Homo sapiens
agcgccatggccgctgccgcccgagcccgggtcgcgtacttgctgaggcaactgcaacgcgcagcggtgataaaagaaaatgtggctgaagttacccgaa

SEQ ID NO: 196366 - DNA, 75 bp, Homo sapiens
cgctcacccctgttctcggaaaccatccacgaccctatgaccacctaagaaaggaggaacagaaaagtactaaca

SEQ ID NO: 196367 - DNA, 100 bp, Homo sapiens
cagacaattgttcagttgcaaaaagaaactggagccaccatcaagctgtctaagtccaaagatttttacccagatccctctctgggcgcattgttggagg

SEQ ID NO: 196368 - DNA, 75 bp, Homo sapiens
gatcgagacatgtaagcagcatcatggaggtttggagaaaattgaagttttacagcaacatgaaaatgaagacat

SEQ ID NO: 196369 - DNA, 88 bp, Homo sapiens
agccttcggctcatcatatcagagctgaggaatcaatatatccgggatctgcagcaggcagccttgaccaagcgggcggcccaggcag

SEQ ID NO: 196370 - DNA, 96 bp, Homo sapiens
gccgtgcgccgcagcccgggcccaggccccggcagcgcctgggacaaggttcttgatcaatatgaacgagaaggatttaacttcctagccaaggtg

SEQ ID NO: 196371 - DNA, 115 bp, Homo sapiens
cattggcattggcttcacagatcggggagatgccttcgactttaatgtctccttgcaggatcacttcaaagacagcctggagctgttgcccaaagaattggaagtcatttagttc

SEQ ID NO: 196372 - DNA, 82 bp, Homo sapiens
aggggcacttctgttttcctgagggctacaccgttttcttttgaaagaggctgtacatccttttgaaatcccagagatcttc

SEQ ID NO: 196373 - DNA, 72 bp, Homo sapiens
gctaagctaaaaaaagtgagagcacttaaaggccacgaaatccaaatctcctcccaaagtgcccattgtgat

SEQ ID NO: 196374 - DNA, 98 bp, Homo sapiens
cagcatgcttagcattcgagagaacaaaattaaacaactacctgctgaaattgccaaaattgcctggaaaagagcagtgagaggagtccgggagatgt

SEQ ID NO: 196375 - DNA, 83 bp, Homo sapiens
cttcaacagcgaggtggacgagaaagtgcctccaagagggactgtctggagcggttcgggccacagacgctggagcgcatcac

SEQ ID NO: 196376 - DNA, 83 bp, Homo sapiens
tttactggagtaggtgttagtaaggttgattcaggaagaaaaagaaaatacagagcagcgggcagaggagattgaaagtcgag

SEQ ID NO: 196377 - DNA, 100 bp, Homo sapiens
attgctgccaggacctttgtccaggggctgactgtgggcagagaagttgcaaaccgagtttccaagtggttgaaaaatgaaacaccgcctcataactggg

SEQ ID NO: 196378 - DNA, 98 bp, Homo sapiens
ctcacagtttctgagaaggaagtttgtacttctggcaagagaaggcctcctgaagtacttcacaaaggaacagggatttcagacaatcttagcaatcc

SEQ ID NO: 196379 - DNA, 82 bp, Homo sapiens
gcttccacttcgggcttcctttccacaggcagaagctgaggaagattgtcattctgatactgtcagagcagatgatgatgaa

SEQ ID NO: 196380 - DNA, 80 bp, Homo sapiens
atgcctgtaaagaacttgcagttgaaggagtataacacagagcatcctggccagaacaagccaaggagccaagacgagag

SEQ ID NO: 196381 - DNA, 75 bp, Homo sapiens
gagcttcatcaaaaatagtgatagctttgataagtatctagaagagcagaagacagagaatggaaaagataagga

SEQ ID NO: 196382 - DNA, 74 bp, Homo sapiens
atcccaagagttggataatcttcccctccatcgagattgtggtggtgccatgcagcaagaatcagagagatgca

SEQ ID NO: 196383 - DNA, 75 bp, Homo sapiens
aagtccatgtacacgcgagattataagaagcttgggttcattaatcgggaccagtattcacatctgctaagtgat

SEQ ID NO: 196384 - DNA, 87 bp, Homo sapiens
aggactggggacttccagctacacactaatgtatgtggacgagtgctcactagcagaaaaaacctgtgtgaggaaaaacgaaaactg

SEQ ID NO: 196385 - DNA, 97 bp, Homo sapiens
catgcttcaagagccattccttttggaacaatggatggccgggctggtgtggttgcaaatgatgccggtgaccgagttactccagctgttgttgctt

SEQ ID NO: 196386 - DNA, 96 bp, Homo sapiens
tgtgaacccacccgagagcaacaaagcaggcgactacagccacgtgaaggtatgatgccgggcgggacggcttcatcgacctgatggagctaaaac

SEQ ID NO: 196387 - DNA, 49 bp, Homo sapiens
agcaggctgaagaggaacgatatttccgctttgatgaccatgacccagc

SEQ ID NO: 196388 - DNA, 100 bp, Homo sapiens
gcaagaagacggaaatccaaaggcagacagtacgggctcccttcgccaaactcttcattttctctattgtccgtgtggagcccttggtgaccatgggcca

SEQ ID NO: 196389 - DNA, 100 bp, Homo sapiens
cttcagagcgtcacggcgtacgccctcatggggaaaatctccccggtgactttcagaaactgcccttggtgcattagcaagggtcctgagagaagactgg

SEQ ID NO: 196390 - DNA, 100 bp, Homo sapiens
gggaggccaaaaaggccctggaggtggaggagtccaactcagaggacgaggcctccttcaagtccgagctagttcttctggagctcaacttcttgccaac

SEQ ID NO: 196391 - DNA, 75 bp, Homo sapiens
tgacgcttgatgagaaggacccacggcgtctgttcgaaggttaattaccatgctcagcattaccatctcactcca

SEQ ID NO: 196392 - DNA, 98 bp, Homo sapiens
aagaagcattaatactcatcttgtccagaactctgtcaaatgaagaacactttcaagaaccaggtgactctcctattccatctgtttcttcgggatca

SEQ ID NO: 196393 - DNA, 100 bp, Homo sapiens
agccactggcctcaataggaccacagtcacgatgatcacagtctctgtgtggcaaaggagcagagaactttgacaagttcttcacacgaggacagcccgt

SEQ ID NO: 196394 - DNA, 74 bp, Homo sapiens
tttcccacgctctagagttggcagattatgtgtcgtggaggccgaatgtttgcaccaaccaaaacctggcgccg

SEQ ID NO: 196395 - DNA, 76 bp, Homo sapiens
gaaagttatgtggctcaaatgattgtggaggtgcttgaactcgctttctccatcttgtatgactcaaactgccaac

SEQ ID NO: 196396 - DNA, 82 bp, Homo sapiens
tggccgggcccaggtcccttcctccgtgagaagccctaccactgcaactgggacggctgcggctggaagtttgcgcgctcag

SEQ ID NO: 196397 - DNA, 98 bp, Homo sapiens
cccctacggtgtcccaaatcaatgcggagttcgtgacccaggttggggcaaacacaatggataatcctttgttgaaatacagtgcaaaggattacttc

SEQ ID NO: 196398 - DNA, 100 bp, Homo sapiens
ctcccccgagataccggcgccatgtccagcgctcggacccccctacccacgctgaacgagagggacacggagcaggtgtcatggagaaactccagctggg

SEQ ID NO: 196399 - DNA, 101 bp, Homo sapiens
tcggcttccgcggggcgctgggccgccagcctcggcaccgtcctttcctttctccctcgcgttaggctggcgcccatgcggctctacacgctctccaagcg

SEQ ID NO: 196400 - DNA, 90 bp, Homo sapiens
gaagaaatcaaacgacatctcttcttcaaaaatgaccagtgggcttgggaaacgctccgagacagccccttcacagatgtagtcactaca

SEQ ID NO: 196401 - DNA, 83 bp, Homo sapiens
caccacaataatccacagccaagtggccctcagattctcagcttgattctaaggaactttcagctggttctcaatttgtagga

SEQ ID NO: 196402 - DNA, 51 bp, Homo sapiens
cagggcctggtcgagacaactatttttgagacaccattcgcttttcaccca

SEQ ID NO: 196403 - DNA, 50 bp, Homo sapiens
tcagaggaagcagaaagtgaaggagggaactccaggatggcattgggcag

SEQ ID NO: 196404 - DNA, 82 bp, Homo sapiens
gatgcaccttcccctgccttggaaagttactccacaggatccgctgaacataggatgttgccacaaaatctacctcgtgtat

SEQ ID NO: 196405 - DNA, 95 bp, Homo sapiens
ggcgagaaggaggacgggctccgtggctggttcccggcgagctacgtgcagttgctggagaacaagaggaaagtatggggaaggagccaagcagg

SEQ ID NO: 196406 - DNA, 75 bp, Homo sapiens
aatcaaaatattttctggtccattgaaaggaatagaactggaaggcaattctcaagttcaactactcagtgcagg

SEQ ID NO: 196407 - DNA, 50 bp, Homo sapiens
gagataaaggaactcaaagaatttggagacggtctcgccacattgcccag

SEQ ID NO: 196408 - DNA, 82 bp, Homo sapiens
gccgccgcgcgcccgcgccctccgcgcgacgccaggctccccacaggtgcaggaagccgccgcccagccatggacggggagg

SEQ ID NO: 196409 - DNA, 75 bp, Homo sapiens
gacgacgcgtgcttcgtggcccggcaccgttccgcggacgtgctcgaatgtccctcttccagtggaaagcccaac

SEQ ID NO: 196410 - DNA, 100 bp, Homo sapiens
gcaccgagcccttccaggacggctacagcctgtgcccgggccgggagctgggcagggaggagagagcgatggcttttttcacccagaaggccagccccag

SEQ ID NO: 196411 - DNA, 100 bp, Homo sapiens
gggcgatctccgtcttcatcaaagactggattctgtatgcggagcaggacagcaaccactgcttcatctccactgacagtatatccccctgtgtgatgaa

SEQ ID NO: 196412 - DNA, 82 bp, Homo sapiens
ctcctgggagtcctgctgcaaggttttaaaatcaaagatgggaaaatcggagaaaattgcccttccccatggccagcttgtt

SEQ ID NO: 196413 - DNA, 97 bp, Homo sapiens
tcaaggagttggtgaatgatatcaggaagttctcccacatgttactatatttgaaagaagccatattttcaggttggcatcactctcttcactgtgt

SEQ ID NO: 196414 - DNA, 100 bp, Homo sapiens
gtttttccgaagcctgcatttttttgtggagtggtttgaatatcgtaagcgcacgtttaaacatctcaagggacatcatacattatgatccaacgaagca

SEQ ID NO: 196415 - DNA, 100 bp, Homo sapiens
tgatccacttccccttaatgaatactggaacaccctcagatgagacactggccactgaccctctggggctagccaagctgacaggcccaggagacaagga

SEQ ID NO: 196416 - DNA, 99 bp, Homo sapiens
gggcagcactgtgagcggagcctggaggagctgctgcactacgtgggccagctgcgggctgagctggccagcgcaggtttttaagaacctacaactatt

SEQ ID NO: 196417 - DNA, 75 bp, Homo sapiens
gttggtacagggctccagaaattatgttgaattccaagtcagattctgaggaagatgaacccacaaagaagaaaa

SEQ ID NO: 196418 - DNA, 100 bp, Homo sapiens
gggggagggctgggcagtgattcaaatcagatcctggaactttcctgaggcagtgcagtggcatctgtagctgtagatcccagtggtcgtctcttagcca

SEQ ID NO: 196419 - DNA, 75 bp, Homo sapiens
tcttctggataacactgtacaagctttcaaagtcaatgcgaatctttctgcattgaatttgaagatttctgaaca

SEQ ID NO: 196420 - DNA, 100 bp, Homo sapiens
gtgtgctttttcaagggagctgataaagaacttcttcccaaaatgggtttctagagaggaaggatctccccagctgtcttcagcaaggccgtctcctgcc

SEQ ID NO: 196421 - DNA, 83 bp, Homo sapiens
aattggcatccagggtcggactcccggggccatggccggaatgcagtaccctcagcagcagatcaaaggtccatcatcaaaac

SEQ ID NO: 196422 - DNA, 103 bp, Homo sapiens
gaagaagttgcgaaggatccccaacggggaggccaacgtgaagaagctggagtgcagtggcgagatctcgactcactgcaggctccgactccccagttcaagc

SEQ ID NO: 196423 - DNA, 75 bp, Homo sapiens
caacctcacagtcgaggctacagatggaaccaccactatcctcactcaggctgccaacatgaagacactggatgc

SEQ ID NO: 196424 - DNA, 98 bp, Homo sapiens
cttatagccattcttatagttgtaaggaatcccagtcagaagttccagcctgccactgttctctgatgccatgccagcaccaactcaactgttttttc

SEQ ID NO: 196425 - DNA, 75 bp, Homo sapiens
cttccttacagagagagccatttacaattgcacaaggagagggagctggagctgcagaaggaacagcggcggcag

SEQ ID NO: 196426 - DNA, 59 bp, Homo sapiens
gaagaacctcatcgctgcgacgaaaaaacattctagtatgccagtagaaaaaaatatca

SEQ ID NO: 196427 - DNA, 100 bp, Homo sapiens
aaagaatggcccttgtggataagcacaaagtcaagagacagcgattggacagaatttgtgaaggatttggagttccatggagtgatgagattttattttc

SEQ ID NO: 196428 - DNA, 74 bp, Homo sapiens
cataaatgtctggctaatggcatttacaggaggtattccaataactgtaccacctccaggtaaaacttttttca

SEQ ID NO: 196429 - DNA, 99 bp, Homo sapiens
cccaagatggccgacttcgatgatcgtgtgtcggatgaggagaaggtgtagtcgccgccgccagccgccatgggcaaacagaacagcaagctgcggccc

SEQ ID NO: 196430 - DNA, 75 bp, Homo sapiens
gctggatctctggtgagacatttttcttccttctgtcacatcacacccaatgtactatactggcaattgctggag

SEQ ID NO: 196431 - DNA, 75 bp, Homo sapiens
tacggaggtggttatgacaactatggaggaggtcgttccaggggtagaggaggcatgaaggatgaccgtcgggac

SEQ ID NO: 196432 - DNA, 83 bp, Homo sapiens
atcgattgcatcagcaatgtggcgcacgagctggctttatgtgctggggcagaagagatccgatagctatgttctgctggagc

SEQ ID NO: 196433 - DNA, 83 bp, Homo sapiens
gtgctcgcgctactctctctttctggcctggaggctatccagcccccgtgactggctgcagtttccgctgcgtttcagctgag

SEQ ID NO: 196434 - DNA, 100 bp, Homo sapiens
gggacctggccaagggctccacacaccaagaccaaggttgtggcagcactgcctgaaggtatgagaccagattctaatctttatggttttccatgggaat

SEQ ID NO: 196435 - DNA, 83 bp, Homo sapiens
gaaggaatcgccgggggaatacaggccaaactacaattcccgagagtatgaaaacaaagttgcagtacgtgacagagtggcat

SEQ ID NO: 196436 - DNA, 75 bp, Homo sapiens
ctggagagcttcatcaaaaatagtgatagctttgataagaacctacaagcagcaattggcgcctattatgacttt

SEQ ID NO: 196437 - DNA, 80 bp, Homo sapiens
atagacctggaccagccagaggacgcgggctctgaggatgagctggaggaggggggtaaagcccacagcttgaagccaag

SEQ ID NO: 196438 - DNA, 83 bp, Homo sapiens
ctgaacaacatgaataaatatgactacgtgctcacagctgctgatgcaaggaatcccctgggctcccgtccactccactgctg

SEQ ID NO: 196439 - DNA, 101 bp, Homo sapiens
cagacgccattatcctctgtttctctgctgcaccgacctcgacgtcttgcctgtgtcccacttgttcgcggcctatagctatcttaatgacttggaccgcg

SEQ ID NO: 196440 - DNA, 101 bp, Homo sapiens
atgtagaaaatgagcagatactgaatgtaaaccctgcagctcattcttggaatcccagaacaggccttaagtcttctccacatggccatcgagcccatctt

SEQ ID NO: 196441 - DNA, 76 bp, Homo sapiens
gaatcaggagagcaaactataagatccccaaaatggatggaagaatgcgcctaaattgagctgtcaggcacttggc

SEQ ID NO: 196442 - DNA, 75 bp, Homo sapiens
atgaaaacatttatcattggaatcagtggcctaccttatgttcagtattttggaggtgtctctgctctaagtaaa

SEQ ID NO: 196443 - DNA, 50 bp, Homo sapiens
ccggcgccctggggccccggagagagttgtctgctggttctcagcttgaa

SEQ ID NO: 196444 - DNA, 82 bp, Homo sapiens
ggagtggagcttggtttcgggatctcggtgctgcagacggcgagacctcctgcacagtgtactaatggtcacttgatgtgcg

SEQ ID NO: 196445 - DNA, 97 bp, Homo sapiens
atgaggacctggagggttcatcccgagggccggtgtcggagaagagttcggaatccagcattaagaagaaatttctcaagaggaaaggaaagaccga

SEQ ID NO: 196446 - DNA, 98 bp, Homo sapiens
atgaacctgaagattaaaactgaagatttcctctggaagctaccacatgcaaacatacaagcagtctcacctcagtttcgagaggcccgtgccatgag

SEQ ID NO: 196447 - DNA, 78 bp, Homo sapiens
aagatggcggacggggagctgaacgtggacagcctcatcacccggctgctggagggttgacatcatggacatatgtga

SEQ ID NO: 196448 - DNA, 75 bp, Homo sapiens
caagaactggttatacttgaaaccataatgctacaaactctagttggattggatgctgctggcaagacaaccatt

SEQ ID NO: 196449 - DNA, 100 bp, Homo sapiens
tacgacccggagcacccgacccctgagtgtgatgaatgcagactctgctaccattttggctgtttggatcctcctttgaaaaagtctcctaaacagacag

SEQ ID NO: 196450 - DNA, 75 bp, Homo sapiens
gcggatcggggcacatccagtgtcacagggctgctcaggactctgaagacctactgggtgagcaaaggcagtgcc

SEQ ID NO: 196451 - DNA, 100 bp, Homo sapiens
ggcttacgaggaggtgatccgagaggagagcgcggccgactgattttgagaagagggggaaaaaggaagtttgtcctgtcctggatcagtttctttgtca

SEQ ID NO: 196452 - DNA, 98 bp, Homo sapiens
catcagggatgggaaagtgtacattcaccatatgtcacccactggagtggtctgcaagaagaatctggacagtaccactgtggccgtgcatggtgagg

SEQ ID NO: 196453 - DNA, 101 bp, Homo sapiens
cgggcgcggggaagtcatgctcgcttcacggaggcaatagctagccggtacaccagaggatcgcttcctggcagaatttgggagctgtttattgcagcact

SEQ ID NO: 196454 - DNA, 87 bp, Homo sapiens
ccggccagaagcgggcggcgcgggggagatggtgctcaggaacagcccatggaagaatcatatgaagaggtggtgactgaggtcgta

SEQ ID NO: 196455 - DNA, 88 bp, Homo sapiens
atccaggaggaggaggacgagaagcagcggctgcagaatgagctaaaggtggttatttaagtatttttaaaaattacatgaatatcca

SEQ ID NO: 196456 - DNA, 124 bp, Homo sapiens
gaaaacgtagggaccacatcaaagacagctttcacagtttgcgggactcagtcccatcactccaaggagagaaggacccagatgatgtggtaccagttggccaaagaagagcctggtgttggtg

SEQ ID NO: 196457 - DNA, 100 bp, Homo sapiens
caaccagtttgtattgtaccgcataactgaagccactaagacgattgagaggatccagaatccagatctctggaatagctaccaggcaaagaaaaaaact

SEQ ID NO: 196458 - DNA, 109 bp, Homo sapiens
gggaaaatggcggtgtctacagtgttctcgacttcgtcgctggttgttcggaatcctataattgaaaaacagtaaagatggaaaaccagttattgaatatcaagaggag

SEQ ID NO: 196459 - DNA, 80 bp, Homo sapiens
gcaaggtgaacgtggatgaagttggtggtttaaggggctcaagccgactgttatccttctctcccgaggaatttccgacg

SEQ ID NO: 196460 - DNA, 100 bp, Homo sapiens
aaacctttcaagagtcaagtaaaggttgtcctttgtggagggtcttctcgaatcccaaagctacagcaactgattaaagatcttttcccagctgttgagc

SEQ ID NO: 196461 - DNA, 74 bp, Homo sapiens
ggttctctgctgtttaaaaagtatccctgtgatgcatcaaattgcaatttggaggagaggcagcacaagcagaa

SEQ ID NO: 196462 - DNA, 97 bp, Homo sapiens
tgacttctcagcgttcccctctggcgcctttgctgctcctctctctgcacgaagcatcagatggtgaaggagaaggagacacagaagtgatgcagca

SEQ ID NO: 196463 - DNA, 75 bp, Homo sapiens
accaggaagcagctctccaagactagtctcttccaaggaagatcttgcagtttgaaagatgatgacagtggggac

SEQ ID NO: 196464 - DNA, 101 bp, Homo sapiens
tcgcgacgctgctcaaaacctcgctccggaaaggggacacctggatcagttcgacagcttagacaagcatacacaatggggaattgacttcttggaaagat

SEQ ID NO: 196465 - DNA, 130 bp, Homo sapiens
caggataacctgtaatgggcaaggagccacaaagaagaaaacatttcttttaatttttaaacttggtttgaaaggtgctggagaatctggtaaaagcaccattgtgaagcagatgaggatcctgcatgtt

SEQ ID NO: 196466 - DNA, 100 bp, Homo sapiens
cacgctgccaccatgaatgaggtgtctgtcatcaaagaaggctggctccacaagcgtggatcgaagagcagtcataaaaccacaaagtcaacgcaaacac

SEQ ID NO: 196467 - DNA, 50 bp, Homo sapiens
tgaggacttccttagtggtttccaggagccagatgaccaagatgctccag

SEQ ID NO: 196468 - DNA, 51 bp, Homo sapiens
gagcccgccctgtcccagtaccagtcttactactttgaccgcgatgatgtg

SEQ ID NO: 196469 - DNA, 74 bp, Homo sapiens
tacctgcagaaggtctctggagacatcttcagcaggtgaaagaaaatggcccgaaccaagcagactgctcgtaa

SEQ ID NO: 196470 - DNA, 100 bp, Homo sapiens
aaaacaggaaatacagaaaagtttggccgggccgttgctccagggagaactgcaaatatcttcatccacccccacatttaaaaacgcagttggagataaa

SEQ ID NO: 196471 - DNA, 82 bp, Homo sapiens
cttagacctttcatcacttcgaagcccccggtgcagtacaggaaagtggagactgctgcacggactctggaaccatgaacat

SEQ ID NO: 196472 - DNA, 100 bp, Homo sapiens
aaagatcacagcagtgttccaagttctaaagaggcctggcgtttccttgaccatgcaggcattttccgaagaggaaaggaagcagtggttggaagctctg

SEQ ID NO: 196473 - DNA, 82 bp, Homo sapiens
atgcgaggttctgagaattgcggcgagggtcgcctcgagagacggtttctgaggtccctgactatggctccccagagcctgc

SEQ ID NO: 196474 - DNA, 75 bp, Homo sapiens
tgccaacacggaggataaaatggaggtggacctgagtgaacgccctagactggagctggttacagacggaagaag

SEQ ID NO: 196475 - DNA, 100 bp, Homo sapiens
cccaatcccggaaagccgttcactgccagagggtttccccgccagtgctaccttccagacaacgcccagggccgcaagaatgtgaaagatgttgcagaag

SEQ ID NO: 196476 - DNA, 75 bp, Homo sapiens
aaggacagttggctcctaagggagggactaaatcttccaaactacaaaaactttaaaggcacgattcaagaactt

SEQ ID NO: 196477 - DNA, 75 bp, Homo sapiens
acaaacctcatatgcagacttatgaagttgaccttaataagcagcctgcttctgcaaagtggtacgatcgaaggg

SEQ ID NO: 196478 - DNA, 83 bp, Homo sapiens
gtcagacggcgctatgtacgccctcttcctcctggccagcctcctgggcgcggacccggatgcagagtctacagcctgaccca

SEQ ID NO: 196479 - DNA, 100 bp, Homo sapiens
gcctgggtcgccttatgccctggggtcgctgtgatgaaattcaagaaccccccagtgaacagcctgagcctggagtttctgacggagctggtcatcagcc

SEQ ID NO: 196480 - DNA, 100 bp, Homo sapiens
ttgtttagattcatcatccaatcccgagtgctctacttgaggtcctagcttactctgccaccactgcccggcaggaggaagttccccagcagacagtggc

SEQ ID NO: 196481 - DNA, 100 bp, Homo sapiens
agatcccagcccagggtgttcaggacagaagcgatttctgtggtccaagaagcgaatgtctgtgacggagggtggcatcaaatacccagagacgactgag

SEQ ID NO: 196482 - DNA, 96 bp, Homo sapiens
cctcccatgtagctgggactacagcaggtagagcagagccggagccaggtgcaggccattggagagaaggtctccttggcccaggccaagattgag

SEQ ID NO: 196483 - DNA, 95 bp, Homo sapiens
ccaaagcctgcccagacggctcacctgtgcgggatggaacaaaagaacctcaagaaggcatgaagccagcccctgcagtgccgtccacccgcccc

SEQ ID NO: 196484 - DNA, 89 bp, Homo sapiens
gcagcccagacgcggcacagagagggcctgggagcttgctgcagcttcagccatcctggaagacgccggtgccgacgtcctgatggagg

SEQ ID NO: 196485 - DNA, 75 bp, Homo sapiens
aaagtcaggctaaagaacaatacgagcagatccttgcatttgtccaaggtacaggtttgcagattccgccagcag

SEQ ID NO: 196486 - DNA, 75 bp, Homo sapiens
acatttgttgaatcagtctggtggtgctggagaagattgccagagtaaagctgctgctaaagctggatcttctaa

SEQ ID NO: 196487 - DNA, 51 bp, Homo sapiens
ctgctccccgggaccatcgagaaagaatactcccccagttgcaagaggcgc

SEQ ID NO: 196488 - DNA, 96 bp, Homo sapiens
gtttctgggaaaggaaatgaagttatattttgctcagaccctgcagatggagaaggcccagagacattaagctcagcactctctaaaggagcaaca

SEQ ID NO: 196489 - DNA, 100 bp, Homo sapiens
gaagaagctctatgccaatatgtttgagaggctggctgaggaggagaacaagccaatggagatcttcgtggatgatgagacgaagttgacgctgcatggg

SEQ ID NO: 196490 - DNA, 101 bp, Homo sapiens
atttcatgtagatactccagaggaaagatgtgactggagtgatttgcacccggatgcctagactcgccatctgctcaaagactgctcagaaagccctccca

SEQ ID NO: 196491 - DNA, 82 bp, Homo sapiens
cgctttgatttacagcagctgcaggttcaagtgctggggccggcagtggagagttccacgtgtacagacatctgcgccggag

SEQ ID NO: 196492 - DNA, 98 bp, Homo sapiens
ccggaggccatcgaggaagtgaagaaagttgctacgatggaagttaaagggaaaaagcaattcacaggaaagagtacaaagacagcacaagaaaaaaa

SEQ ID NO: 196493 - DNA, 83 bp, Homo sapiens
ttccttataggcgtcagcgggggaacagctagcggcaagtgcctacaccaactaatgttacaattgaatcctataacatgaac

SEQ ID NO: 196494 - DNA, 127 bp, Homo sapiens
gagaggaggccgtccagcagatggcggatgccctgcagtacctgcagaaggtctctggagacatcttcagcagacaatgcagatcttcgtgaagactctgactggtaagaccatcaccctcgaggtt

SEQ ID NO: 196495 - DNA, 78 bp, Homo sapiens
aggattccaagtaactcttatttgggccttgcccgagatggacagccggattccttatgatgactacccggtggtttt

SEQ ID NO: 196496 - DNA, 100 bp, Homo sapiens
accgctgccgcccagcacgtccagttttaacttctagtcatggcgaatgatcgcaggagagcacagactggaccctgctacgatctctcttggagtggat

SEQ ID NO: 196497 - DNA, 98 bp, Homo sapiens
gttggcaatgaatctttgaatcgtgcagtggctaaagctgcagagactatcattgatacgaagggtgtgactgaggagaaggcagagcccccccaggc

SEQ ID NO: 196498 - DNA, 85 bp, Homo sapiens
ctggcgccccttctcccaagaatactgtcagatgctgatcctgacaccacctgtatgccgagattttgctgtcctggaggaccac

SEQ ID NO: 196499 - DNA, 75 bp, Homo sapiens
ggcgctgcctgagagagtttgcgggatttcaagggaatctgaacctgtgatgttaagaaatcagtaaatattaaa

SEQ ID NO: 196500 - DNA, 100 bp, Homo sapiens
ggaaggaactttgggtcctgaatcttctgggagctgaggaaccagatatcttgaaaagctgccagaaaggactcagaattcatgattgaagaaatgcagg

SEQ ID NO: 196501 - DNA, 90 bp, Homo sapiens
cttttaatgattttcagaggccagccatttattacatgatgtcattcagtgattgctaccgcctgtgtgatccttctgagagggaattgt

SEQ ID NO: 196502 - DNA, 100 bp, Homo sapiens
tttgtctcacaagatgaaatgttgacgcccctggggagattggacaagtatgctgcaagtgagaacatatttaacaggatggatgcaaccttgaaagaac

SEQ ID NO: 196503 - DNA, 100 bp, Homo sapiens
agaggctgctcggcttccagctcaatcctgccggttgcgccttcttcctggacatgaccaactgggaagaaatgatttcccttggggatggagacatcag

SEQ ID NO: 196504 - DNA, 75 bp, Homo sapiens
gcgccccggaatgacctgtcgcctgccagctctgattcagcgtttgttggaagcacagtctctgatgccctgttc

SEQ ID NO: 196505 - DNA, 110 bp, Homo sapiens
ctttgtgtcatcctccacagctccagggaaggcactcaaaagtggggggcaggaaaggattctggactctacttataatatccctaactgctggattctcctgttgcagc

SEQ ID NO: 196506 - DNA, 50 bp, Homo sapiens
aacccggagaccaaatccttggtacccactgatggtaatgctggcctgct

SEQ ID NO: 196507 - DNA, 100 bp, Homo sapiens
agaagtggagcgtgtcctgaaggagttccaccaggccgggaagcccatcgggcccagtgacgagcaccatccggaagtgaaggctgatgggtacgtggac

SEQ ID NO: 196508 - DNA, 100 bp, Homo sapiens
caaaaacgtggttggatgtggaatcaatttttcttacttgaagaatatacaggatctgattatcagtacgtaggcaagatatgatgcttcctggtgtgtt

SEQ ID NO: 196509 - DNA, 75 bp, Homo sapiens
ttcgggcagccgcgggcattgcggcccctgtcgattccgcggcttcgaggttcaaaatcaaaggaagcccagaag

SEQ ID NO: 196510 - DNA, 75 bp, Homo sapiens
ataaatgttctggttttaaaaaatacatatctggttttgtcgtcggagttctttgagatgctggagaaaatgcag

SEQ ID NO: 196511 - DNA, 74 bp, Homo sapiens
gaggcctccccagccatgtggaactgaaatccaaatctcctcccaaagtgcccattgtgattcaggacgatagc

SEQ ID NO: 196512 - DNA, 83 bp, Homo sapiens
gtctgtgccgggagctgcagagacacaacaagactctgaagggtgtatgccatgtacaattccgtaaagggatcctgctccga

SEQ ID NO: 196513 - DNA, 100 bp, Homo sapiens
ccctcagattgaaggacccggtggaccttggggactgatcctttgaaatactccagccatgactaaaagagaagcagaggagctgatagaaattgagatt

SEQ ID NO: 196514 - DNA, 101 bp, Homo sapiens
gtcaaccagtctattgttgtcagtggagagagtggtgctggaaaggctctccctgcatgtcctatccaggccacctgtgaggctgcttccaaggaggaaaa

SEQ ID NO: 196515 - DNA, 100 bp, Homo sapiens
accagcagcttcgacaaagggaccatgcggaggatggcgctgtccatgatcgaatgattgtggaaactgagaagtgcagcatttccatgaagatggcgtc

SEQ ID NO: 196516 - DNA, 100 bp, Homo sapiens
tcccgtccctgctcatcggggctgcctggggccggctctttgggatctccctgtcctacctcacgggggcggcggtgctggagaatctggtaaaagcacc

SEQ ID NO: 196517 - DNA, 99 bp, Homo sapiens
tgggcaactgaaagaagtacaagcagacaaggagcaaagtgaggtaatgagagatccaaacaccaagcgctccaggggctttgggtttgtcacatatgc

SEQ ID NO: 196518 - DNA, 50 bp, Homo sapiens
ggaaaacggagagactggggagaaaagcatgttgtggagacattttttgg

SEQ ID NO: 196519 - DNA, 82 bp, Homo sapiens
gcgcgtggaacggctgcttttggaaggtgacagagctgaatgaacctctctccaatgaagatcgaaatctcctctctgtggc

SEQ ID NO: 196520 - DNA, 90 bp, Homo sapiens
ctccacaactttcttcatggtgacgtttgcagccctttacagcactcacaaaggtatggagatggtccacgtcctcccaagatggcccga

SEQ ID NO: 196521 - DNA, 74 bp, Homo sapiens
ctgcctttgacaggagaggctgcttcttgtagaggtgacagagctgaatgaacctctctccaatgaagatcgaa

SEQ ID NO: 196522 - DNA, 97 bp, Homo sapiens
ttgactactggggccagggaaccctggtcaccgtctcctcagcggaaggagagttttacatggaagtggcttacagaaacttggcgctgaggtgcag

SEQ ID NO: 196523 - DNA, 75 bp, Homo sapiens
ctgggtctccgggcctacatccgcaaacagtgcaaccacatcttcctccggtcccgcagcccccggaagccaata

SEQ ID NO: 196524 - DNA, 90 bp, Homo sapiens
caaagatatgtttttggactctaatttcacggacactgaaagcagagaccatggagcttcttgcatgacgacagagatgatggtgtggat

SEQ ID NO: 196525 - DNA, 74 bp, Homo sapiens
cgatttaaactgcacataccatatgctggagagacattaaagttaatctatgccagcaattatgacaatgttag

SEQ ID NO: 196526 - DNA, 98 bp, Homo sapiens
aggaaactgggtcccttgaagaatctacagatgagtctgagatgggcttaggtcacgagcaaggatttggagccccttgtttaaaatgcaaagaaaaa

SEQ ID NO: 196527 - DNA, 74 bp, Homo sapiens
caccactggcaaggcccagcttgtgaaaatgcactattcatggccgaattgatcaagtcaaccaactccttgaa

SEQ ID NO: 196528 - DNA, 99 bp, Homo sapiens
ccaggtggatttagacaagtaacagctgctcagcttcacctgagggatccagtggcaatttttgcctttatgacgacagcttgttatggttgcagtttg

SEQ ID NO: 196529 - DNA, 90 bp, Homo sapiens
gctccagctccgggtgcagggaaaggagaaacaccagacactggaagtctcactgtctcgaggtatctgtgcagatcaagtgaaagtttt

SEQ ID NO: 196530 - DNA, 74 bp, Homo sapiens
agctctacgcctcctacgtttacctgtccatgagtgtgaacatggctacgcctcttcattcccgtccatgccga

SEQ ID NO: 196531 - DNA, 88 bp, Homo sapiens
ggttgacagtgttgagtttgattgaaggtgcacattcaggttcccgagcacaaacatcaagataacgttcactgccctgtccagcgag

SEQ ID NO: 196532 - DNA, 100 bp, Homo sapiens
gcaaaagctcattgacgatcaagatatcaaaaaccgcctgattcccactgagttacgccgagaggctctggccttacaggggtccctggagtttgatgat

SEQ ID NO: 196533 - DNA, 100 bp, Homo sapiens
ctctgcagtggaccacagcattcctgaaatacatccaggaaagacatggagattctcttaaaaaggtggtgatgatgtccagcaactctgtgaagcagga

SEQ ID NO: 196534 - DNA, 97 bp, Homo sapiens
cgaggtgcccaagtctgcggacgaccgcggcgccgaggagcccatttccgtgagtcaggccctgacaagccaattgacagatgaagagctagcccaa

SEQ ID NO: 196535 - DNA, 88 bp, Homo sapiens
gcaaggaggtcactttccagacggatgaggatgcaccgactagatttccttcagctgatgattgactcccagaattcgaaagaaactg

SEQ ID NO: 196536 - DNA, 80 bp, Homo sapiens
gacgaagccttcaaatccatcaagctcatcaaaagccagggtgtcggcgccgagctgatggggctgcaggtggactactg

SEQ ID NO: 196537 - DNA, 75 bp, Homo sapiens
agccgctcggccgcgtggtgctggagactacatgaggaaataattgacttttataacttcatgtccccttgtcct

SEQ ID NO: 196538 - DNA, 50 bp, Homo sapiens
attacagcagatcaagaaatccagctcaacatttgatgaatacagaaata

SEQ ID NO: 196539 - DNA, 82 bp, Homo sapiens
tggaatgtgaagagcaaaaagtctcagatgagctcatgagtgaaagcatggcggacaccgacctgttcatggaatgtgagga

SEQ ID NO: 196540 - DNA, 106 bp, Homo sapiens
cctgacccaggttacggaccggaagtgctccagaactcaagaaaattggcttcttcaaccagcagtatgcagagcagctgcgcatggaggagacgcccactgagta

SEQ ID NO: 196541 - DNA, 96 bp, Homo sapiens
gcagcacctcctcgccagcagccgtccggagccagccaacgagcggtcaatgagctgaaggagaaaggcaacaaggccctgagcgtgggtaacatc

SEQ ID NO: 196542 - DNA, 75 bp, Homo sapiens
cgattaaccagttcacccaggccctggaccgccaaacaggctgggaggtggctggtgatcacatttacacagctg

SEQ ID NO: 196543 - DNA, 75 bp, Homo sapiens
gatgcacttaggcaaactcaagcactgcatcaaaggcttctattagagaaatacactttcgggaaatggcctcta

SEQ ID NO: 196544 - DNA, 75 bp, Homo sapiens
gcagcagtagaatcacttgggttcattctattcaggtaatggaactgctggtccatctgaataaacgtataaaaa

SEQ ID NO: 196545 - DNA, 74 bp, Homo sapiens
caccactgtccaacatggcaatggccatggatcatctgcagtcattcattgcagattgtgatcgtagaacagaa

SEQ ID NO: 196546 - DNA, 109 bp, Homo sapiens
ctgcctggccctgggaagagaagcctagatatctgcctactttggggataaaggattatttggtcttctggatttggaggcaatcagcggacagcatggaagatgtgtg

SEQ ID NO: 196547 - DNA, 124 bp, Homo sapiens
ttgaagaaaatttgccgaaattatttgcgcatttcaagaagaacaacctaactccagatatctacctaattgattggttctgccggagacttccatttggcctcaatgtgaaattaaagtagaa

SEQ ID NO: 196548 - DNA, 90 bp, Homo sapiens
tttcttatatgtgatgccattccagcactggactcatggaggctgagcatttattcagtgtccagctctgaagggcaaagtgcagaagat

SEQ ID NO: 196549 - DNA, 73 bp, Homo sapiens
cgccgcagcccaggcgcgggggcgacgacaggagctatgaagacatgattggtgaggaggtgccatcggatca

SEQ ID NO: 196550 - DNA, 83 bp, Homo sapiens
ccaacttccgcgtcggcaagaagatcggctgcggcaacttcggggagctccgcctagattcttcgctgctgctgccttaccgc

SEQ ID NO: 196551 - DNA, 75 bp, Homo sapiens
ggaagatggcgcctgttgtgacaggttatcttacagactggagagagtgctagtgaatgcttttgtcttcaatgc

SEQ ID NO: 196552 - DNA, 75 bp, Homo sapiens
gcaaccctgtaaaaccagccttagactatttttcaaacagaacttggcattagaattcctcgaccactaggacag

SEQ ID NO: 196553 - DNA, 100 bp, Homo sapiens
ccgctccatccagggccaccatgtctgcctcctggtgaaaaagggctccttcacctaccaaacgcaaagaccgctcagatgagaagtccaaggatcgctc

SEQ ID NO: 196554 - DNA, 75 bp, Homo sapiens
caaactggtcagcgtttccctggagaggaagaggcaaggaagctgcggatctgtcctccctgaaaagcatgttgg

SEQ ID NO: 196555 - DNA, 100 bp, Homo sapiens
ccctgggtgaagtgctccgccgcccttgcctccaggaccaagaatcgccttcagccctgtctggtgcatccttggcagaaagtgaggaggaaaacacccc

SEQ ID NO: 196556 - DNA, 80 bp, Homo sapiens
aggcaaagcgcctggaagaggaggaggcagcggcagagaaggaggaccgcgattcccaggactccggctctctctgcttc

SEQ ID NO: 196557 - DNA, 100 bp, Homo sapiens
tctgatgtggtgcttttgaaccactggaaagtgaggaattttgaagtacaccgtggtgacattgtatcattggtgcaccagaagtcatcagaatgcaaga

SEQ ID NO: 196558 - DNA, 75 bp, Homo sapiens
ccggagcctgaggacacttctctgtcgtcacagttaggcctccccatggccacccatggaccagtcggcattcac

SEQ ID NO: 196559 - DNA, 73 bp, Homo sapiens
cctacagcttattatcgtcatcctgccggggaagacaccagtgtatggcatgatggctcatacctgtaatacc

SEQ ID NO: 196560 - DNA, 83 bp, Homo sapiens
ggaactggtgctgcagcgagagagctggaagtcgagtgtgctactcaactcaggagatttggagacaaactgaacttccggca

SEQ ID NO: 196561 - DNA, 82 bp, Homo sapiens
ctgttacgccatggaaaccgctctggtcacaccaatactgttgcagattgggctgaaatctctttaatgatggagggaagca

SEQ ID NO: 196562 - DNA, 75 bp, Homo sapiens
cgctggggctgccgccacggccgcccggaggtctgccatcatggatgttctcgcagaagcaaatggcacctttgc

SEQ ID NO: 196563 - DNA, 75 bp, Homo sapiens
aaggcgatcaaggccaagtatccgccagtcaataggaagtacgagtacctgcctagagctggaacgttacctcca

SEQ ID NO: 196564 - DNA, 100 bp, Homo sapiens
cagaaactaagatttttttggaaaatcatgttcggcatttgcataagggaaatcgtgatgagaaccagagtataaaccaccaaatggctcaggaagatgc

SEQ ID NO: 196565 - DNA, 50 bp, Homo sapiens
tctgtctctgccacctggtctgtattggtaaaggttttcaaggtgtcatg

SEQ ID NO: 196566 - DNA, 76 bp, Homo sapiens
cgccgctgtccctggaatcgatgtgaccctggcagcaaccccaacaaacgccagaggcagccccctctcctgggag

SEQ ID NO: 196567 - DNA, 76 bp, Homo sapiens
cctacgtcccgctgccgtcgccgccgccaccatgcccaagagaaagtccacaggtcctggctaccctgggaagaga

SEQ ID NO: 196568 - DNA, 90 bp, Homo sapiens
gggagtttcaagctcaaaggagaattcatacctgaagagaaatttggaagccatcaatacattggtttctccaacaactaacagaagaga

SEQ ID NO: 196569 - DNA, 75 bp, Homo sapiens
tcctctgtcagtcatggagcaaaagcgagtaaccagctcataaatcacatcgaacagtttttggatactaatgaa

SEQ ID NO: 196570 - DNA, 115 bp, Homo sapiens
gggacatctccagcaccctcatcgccctggccgacaagcacgcaatgtactaatggtcacttgatgtgcgctggctgttttatccacctactagcagatgcccggctgaaggagg

SEQ ID NO: 196571 - DNA, 101 bp, Homo sapiens
cagaaggctgtgagaaagtgcgtgtgtttgaagaagccacttctcctgtgcctcctgttggctctctttgcatctggcctcatccaccgagtctgtgtcac

SEQ ID NO: 196572 - DNA, 100 bp, Homo sapiens
gcaactttacaggaaaatatgcaaattcgtacaaaggtagcagtataaaagaagcctgtattgttttgaatttgaacgtcggttctgcactactgctgaa

SEQ ID NO: 196573 - DNA, 82 bp, Homo sapiens
tttcatgagtcattcaagcaacatttctaaggttactataacaacagtaccaaggtggctgtgaaaaccctgaagccaggaa

SEQ ID NO: 196574 - DNA, 88 bp, Homo sapiens
aagtctgaaaagaaaagtaagaacaaacaaagaaacactggagatattcagaaagaagaagttcgtgccccaattcctcaaaagcagg

SEQ ID NO: 196575 - DNA, 100 bp, Homo sapiens
tggtagatgagactaacatgtatgaaggtgtaggaagaataaaatgatgcatcctgttgccagcagtaatccagctttctgtgggcctggcaagccttcc

SEQ ID NO: 196576 - DNA, 136 bp, Homo sapiens
atgccattcaaggaattgatgatgatgctacaagccagcttgcaagaaattggggatcggtggataatattaatgcagctgtgatggatttgaaaaaaaagaagatccgcagtctaagtgaagaggtcaaaatagg

SEQ ID NO: 196577 - DNA, 100 bp, Homo sapiens
cgaatgggaagccaagtgccatcttcaaaatttcaggtcttaaatctgaagtctctattatctgggggaatgtatcagaatttgtgagacggcagttaac

SEQ ID NO: 196578 - DNA, 89 bp, Homo sapiens
gagatttcagtgcattgcctcccctgggtgctcttcatcttggggcccttctagcccaatccagagctgtaccatggcagagacaagag

SEQ ID NO: 196579 - DNA, 49 bp, Homo sapiens
ggcggcgactactgccaaccccggtgctggagaatctggtaaaagcacc

SEQ ID NO: 196580 - DNA, 50 bp, Homo sapiens
ctcaacattgttccccgtacaaaggtacatcaggaacgtctctatcaaga

SEQ ID NO: 196581 - DNA, 90 bp, Homo sapiens
cttgcaaaccttgctttggattttatgtgctacagtctgcggaacggagcagtatttcaatgtggaggactatgacttgagccagctgca

SEQ ID NO: 196582 - DNA, 82 bp, Homo sapiens
ctccaccccttccacgtcatccgcatcaacaagatgttgtcctgtgctggggctgacagcgagcagctgatgcagctgtaca

SEQ ID NO: 196583 - DNA, 75 bp, Homo sapiens
acgccgcctggcaggccctgcgcaccagatcattgagaagcagccaggccacattcggagcagggttttcaggga

SEQ ID NO: 196584 - DNA, 88 bp, Homo sapiens
cgccctggaggagtccctgaagatctatgctcctctgtacttgggagatgcagttaaagacttgatgcttcgctttctgggtgaaaaa

SEQ ID NO: 196585 - DNA, 100 bp, Homo sapiens
caacatcaactacgtccctctgaaggtgtcccgacccaggctaagcttgagcatggctgagcaggagcccacagccgagcagctggcccagattgcagcg

SEQ ID NO: 196586 - DNA, 76 bp, Homo sapiens
gcctcgggcgccccgcagccccccaacatcctgctcctgctcatggacgacaattgctggaatccacaaataccaa

SEQ ID NO: 196587 - DNA, 95 bp, Homo sapiens
cctcccgagtggctgggattacaggtgggtcctgaataccatcccaagtgtccttataagagagaggcaaaagaggcaatagagacacagaaaag

SEQ ID NO: 196588 - DNA, 51 bp, Homo sapiens
gaggacccaggagaaattcgccctcaaagggacggcaaaacagaacagaaa

SEQ ID NO: 196589 - DNA, 99 bp, Homo sapiens
ctcttcctacagaggccagatttgattccaactgtatcacaccaggtgaaaaaccatttcaatgtagtcaatgtgacatgcgtttcatacagaagtacc

SEQ ID NO: 196590 - DNA, 75 bp, Homo sapiens
aagtgatgctggagaattacaggaatcttctctcattgggtaagagcttctgttcgtgtgcagggaaagcagctc

SEQ ID NO: 196591 - DNA, 75 bp, Homo sapiens
gcaagacatcctggaggacatgtaccatgccatcaagccttgtacagctccatcaagaatgagaagctgcagtgg

SEQ ID NO: 196592 - DNA, 83 bp, Homo sapiens
gccgagttcaacatcctcctggccaccgactcctacaaggttgtgaccgagattcccgacgagagagactgaggggaagagag

SEQ ID NO: 196593 - DNA, 128 bp, Homo sapiens
tttagaacgatgtgaacatcgaatcatggaatcccttgcatggctctcagctggttttgaactcctggcttcaagagatcctcccgcctcagccccactaagtgttgggattacgggtatgagccact

SEQ ID NO: 196594 - DNA, 100 bp, Homo sapiens
gaactacctgtacaacgtgctggagagaccccgcggctgggcgttcatctaccacgctttcgtgtgatttggattattactggttggatcctgccacgtg

SEQ ID NO: 196595 - DNA, 50 bp, Homo sapiens
tggccgagcaggctgagcgatacgacggcataatcaccagcaacacccgg

SEQ ID NO: 196596 - DNA, 82 bp, Homo sapiens
cgcggctcttcccgcccgccttccgccgtctcttcgagttcttcgtgctgctcaaggccctgggaggagcggggacactgag

SEQ ID NO: 196597 - DNA, 82 bp, Homo sapiens
acgtgcagaccggaagagacacgcggggcttcagatgcagcagcttttttatgagaattacgagcagaacaaaaaggggtac

SEQ ID NO: 196598 - DNA, 83 bp, Homo sapiens
agcgcccaccatgccccggcagctcagcgcggcggccgcgctcttcgcgtccctggccgtaatggcaacgttgcagctaccag

SEQ ID NO: 196599 - DNA, 75 bp, Homo sapiens
atatcagcccaaagttaaatccagcctgtctcgatcagcctttctgtctcagagatattatgaagacttggatga

SEQ ID NO: 196600 - DNA, 99 bp, Homo sapiens
gctgtggaacgggccaagcaggtgaccatggcagaactgaacgccatcattggggaggatacagaccacaattactatatatctcgaatatatggtcca

SEQ ID NO: 196601 - DNA, 74 bp, Homo sapiens
aggtgtatgatcttttggaggaggaggatgaatttgatagagaggttcgtcacaaggcatcgcagaaggtttat

SEQ ID NO: 196602 - DNA, 100 bp, Homo sapiens
ctcagtttgatgcgtcacactacgacagtgagaaaggaggagtacttgattcttcagaaaacctccaaagtagatgtggactcaagtggaaagaaatgca

SEQ ID NO: 196603 - DNA, 75 bp, Homo sapiens
tccgtatctgcctaggcattttgctgtctcctcctaatacggtttaactgaactgaatgacagtccagttcccct

SEQ ID NO: 196604 - DNA, 90 bp, Homo sapiens
acctcgcaagagcagccgcggcgccactgtgcacattcaggttcccgagcacaaacatcaagataacgttcactgccctgtccagcgaga

SEQ ID NO: 196605 - DNA, 100 bp, Homo sapiens
agctccttcccttccccaacaggcttggaaccaagctgcaagtcctgtggggctcactttgcaaacacggccaggaaggcttgtttctggtgcaggtgac

SEQ ID NO: 196606 - DNA, 75 bp, Homo sapiens
ctagaactgaacttgaaacacttcaaagtaaaatatacccaggaccataaacagatgaaaggtagaccaagtctg

SEQ ID NO: 196607 - DNA, 100 bp, Homo sapiens
ccgagatgtctcgctccgtggccttagctgtgctcgcgctactctctctttctggcctggaggctatccagcgtttttctatatgagtggagaagacagc

SEQ ID NO: 196608 - DNA, 51 bp, Homo sapiens
ggtgttcccgaactagagtgggcaccttctaaaaatgaacaagagcagctc

SEQ ID NO: 196609 - DNA, 100 bp, Homo sapiens
gtcctgactgtagctgccttgcccatgctgaagcagagcaatggaagcattgttgtcgtctcctctctggctggagatagtgttttaggtgctggtgcct

SEQ ID NO: 196610 - DNA, 82 bp, Homo sapiens
gctgagctcctggagtgcatcccgggcctcgctgaaggccaagctcctccgcaggcagccagataagctggtggtggtatgg

SEQ ID NO: 196611 - DNA, 100 bp, Homo sapiens
acggagaccagcgagatgctgctgaatgggacgggaccctgcacctataacaaatcgggctccagggagtgtgaggaaggccctaacagtctgattaatg

SEQ ID NO: 196612 - DNA, 75 bp, Homo sapiens
acagagatctacaaccttggagcccagagccacgtcaaactcttgcagaccattttctacggggtcacctgcctg

SEQ ID NO: 196613 - DNA, 83 bp, Homo sapiens
gaacctggatgaatgtagagagaaagtacttcaagatgatgaagaacgagagcttcaaatggatcctgcagactatggaaagc

SEQ ID NO: 196614 - DNA, 83 bp, Homo sapiens
catcgactggaccaagatcgagcccagcgtcaacttcctcaagtcgcccaaagataacgaaggaggcccaacttcattcaata

SEQ ID NO: 196615 - DNA, 99 bp, Homo sapiens
ttttggcattgctttgcagatgttgggatgagagtcggagccgaataccaagctcggatccctgaatttgatccagcgctcctttaccctcatcgtgga

SEQ ID NO: 196616 - DNA, 100 bp, Homo sapiens
tggcgccctgggctcatctgcacagggcaacatggctgacaaggccaagcctgccaaagctgccaacaggacgccccccaagtccccgggggacccctcg

SEQ ID NO: 196617 - DNA, 75 bp, Homo sapiens
cctgctggcgcgcctgcttctctgcgtcctggtcgtgagcgactccaaaatacctgaagagctacaacattccag

SEQ ID NO: 196618 - DNA, 96 bp, Homo sapiens
ggaattttgaagtacaccgtggtgacattgtatcattggtatttgagttctgtgaacctgcatttgttgttggtaattgcctccagatagcttctg

SEQ ID NO: 196619 - DNA, 100 bp, Homo sapiens
caacaccgggaggcaaggagcacctggtctggcaggccgcatctacaagtgcttgtttactggctccgtgagctcactactgacgctgccattagatatg

SEQ ID NO: 196620 - DNA, 82 bp, Homo sapiens
tccacggcctggctttctggtttgacgttgctttcatcggctccatgtagatgatgagctggagatcaaggcctactatgca

SEQ ID NO: 196621 - DNA, 74 bp, Homo sapiens
agatttcatctataaacataggaaagctttggtcatcctgtacagttctacagcatgaataggcctgcctctcg

SEQ ID NO: 196622 - DNA, 96 bp, Homo sapiens
tggaaatggcacctatggacaagtctataaggacttccttcgctgggcatctggctgggattcttgttggactaatgtacactcaagggcctctga

SEQ ID NO: 196623 - DNA, 96 bp, Homo sapiens
ccggtggttgctgttgcttggcctggtgggcccagtcctcggtgcggcgcggccaggctgtattcatcaccaaagaaaaaacttacaccaatgcag

SEQ ID NO: 196624 - DNA, 50 bp, Homo sapiens
gtcattcacaaccccctgaaagcggagaagaaatgggtgaccgttggtga

SEQ ID NO: 196625 - DNA, 87 bp, Homo sapiens
actattttcttcctgcccctcgttgatgagagcattcgaagtgacctcagcagggcatccagggtgtccgcaatgttgccagtgtct

SEQ ID NO: 196626 - DNA, 74 bp, Homo sapiens
gcgggctgtggggcctccgcgccgcggccgttagtcatgtcggtggaagagaaagccaatacccacctcctctt

SEQ ID NO: 196627 - DNA, 116 bp, Homo sapiens
aacaaacttcagctctgaaatagaagatcttgcaaggtttctctgtttgaagaacataaggacatttctcacggcctgttgtgagacgtttggaatgaggaaaagtgaacttttcg

SEQ ID NO: 196628 - DNA, 100 bp, Homo sapiens
cccagagtgttcaaaattacctgaggatttgacagctaaggatattgaagaaattattgatgagctcaaggctggcaaaatcccaaaaccagggccaagg

SEQ ID NO: 196629 - DNA, 83 bp, Homo sapiens
cactctttcccctgccgctcctgccggcagctccaaccatgggaggccgcgtctttctcggaatgtatcctgtcaggtataat

SEQ ID NO: 196630 - DNA, 100 bp, Homo sapiens
gcatgcacttccttccagcagctacacagagttttccgtctgatgaaggttggccatttgcaaagtatcttggagcttgtggaagaatggtggctgtaaa

SEQ ID NO: 196631 - DNA, 50 bp, Homo sapiens
ctggagggcaaggcgggaacacgagaagagagcatgctgcctctcctgac

SEQ ID NO: 196632 - DNA, 96 bp, Homo sapiens
ggtactgggtggccgccatgtcccctcccatcccagaagtcctggagggtatttgggagccaaaaagaaaaagaagaaacagaagagaaaaaagga

SEQ ID NO: 196633 - DNA, 99 bp, Homo sapiens
tgaagacagagggctctgatctgtgcgacagatgtctttggtgcaacactaacaaggcttgtctggactacccagttacaagcgtcttgccaccggctt

SEQ ID NO: 196634 - DNA, 103 bp, Homo sapiens
cgcgccctgctccctctcagcacctgggcggacggttatcttatgatgaggcttttgctatggctaatgatcccttggaaggcttccatgaagtaaaccttgc

SEQ ID NO: 196635 - DNA, 100 bp, Homo sapiens
ccaggaaaagtgtttggggaattggctattctttacaactgtacccggacagcgaccgtcaagatggctgcagctcagacgactccaggagagagatcat

SEQ ID NO: 196636 - DNA, 97 bp, Homo sapiens
ttaagcatgtaccttgtgtagaagatgaggacttcattcaagctctggataaaatgatgctagaaaatctacagggctccagcggggccccacagac

SEQ ID NO: 196637 - DNA, 100 bp, Homo sapiens
ctgtgaccgaactcaacggcgacataatcaccaatgaagaggcagaaatccaggcagaacttgaacgtttggaaagagtcagaaatcttcacatacgtga

SEQ ID NO: 196638 - DNA, 100 bp, Homo sapiens
ctcttcctgactcgcagccggggccgggcggcatcaggtcatcatcagatttgaaatatttaaagtggatacaaaactatttcagcaatgcagacaatta

SEQ ID NO: 196639 - DNA, 75 bp, Homo sapiens
tgctaactcggctacaacatttggcagaggccaagatcaagcaaaagctgcgggaaattgaagagaatcagaagc

SEQ ID NO: 196640 - DNA, 50 bp, Homo sapiens
ggaggttttaaacagtataacagggtgaaggactttagtacgatggtcaa

SEQ ID NO: 196641 - DNA, 75 bp, Homo sapiens
ggaactgatagcttatggttctccattgtgatgaaagcacatggtacaggtgaccattgtgaggtagatattttg

SEQ ID NO: 196642 - DNA, 74 bp, Homo sapiens
tctgacccaaaacaatccaaaaacaaaggatggagtatggcccaagaccagctgatactccccctgctccatca

SEQ ID NO: 196643 - DNA, 75 bp, Homo sapiens
tgctgcaagaaggccgtgtgcgaggagtgcctcaaagtctacctgagcgcccagctatttgaactgctgggacct

SEQ ID NO: 196644 - DNA, 75 bp, Homo sapiens
tcctcaagactacctcattctcactggctcggagactcctgcctgctgaggacttgagagagacaagtttgataa

SEQ ID NO: 196645 - DNA, 100 bp, Homo sapiens
gcgggtgccgcgtggcggccgcagcgctgagggcactccagccccaccccagggtcaatttttgcccccttccatctgagcagtgttaccaggccccagg

SEQ ID NO: 196646 - DNA, 80 bp, Homo sapiens
gctggtggtgcaggaggtctccagcgtgctcaggtcggcggaggagaagtcaaaagagaagatgtgtgagaatacagaac

SEQ ID NO: 196647 - DNA, 100 bp, Homo sapiens
ggaacagtatttgttggccaaacaactagcaaaacccaaagagaaaattcccatcatttggaacatgatctggatcagattgactacatagacagctgca

SEQ ID NO: 196648 - DNA, 90 bp, Homo sapiens
ctcaaactcccaggctcaagcagtcctaccatgtcagccttcccagtagctgggaccacagtaagtcttcagtccagagaccgaataggc

SEQ ID NO: 196649 - DNA, 100 bp, Homo sapiens
gatttgcgcaagcaggtagcgccgctgctgaagagtttccaaggagagattgcttccaagtatgatcatcaggcagaagaagatcttcgcaattggatag

SEQ ID NO: 196650 - DNA, 82 bp, Homo sapiens
ctactaccactgcatctgtgtcagcaacagcagctccaagtgtattgaaaatgtgtcccgacagaattgtccaatatgtttg

SEQ ID NO: 196651 - DNA, 100 bp, Homo sapiens
gtggcgctgtcggtgggcggccgcgagatcctcaaggcagaacgagatcttgtggcgggaggtggtgacacttcggcagagccacggtcagcagcaccgg

SEQ ID NO: 196652 - DNA, 99 bp, Homo sapiens
gcttatggcggcgctggagagggggcgctgagctgttgggctttgggacccccgcccctggcttctcctccatgctgtatggaatgaagattgcaaatc

SEQ ID NO: 196653 - DNA, 100 bp, Homo sapiens
cgggtccgtcgcggagccggagggcgggaggaacatgacatcgcggagaaaaggtactttgtggactatcggagagtgcttgtctgtggaggaaacggag

SEQ ID NO: 196654 - DNA, 112 bp, Homo sapiens
caggcctgagcgaagcccacaaccccgccgggcacatgtgaaaggagagaagaccaagaggtcggagaagaggtagaaaatgtggcagaggccataaaggagaaaggcaaag

SEQ ID NO: 196655 - DNA, 82 bp, Homo sapiens
aaggatgatcatctctggcacaacagctcacttttcttccaaggataagttgcaagaggtagttgatgtcacttggcgatat

SEQ ID NO: 196656 - DNA, 89 bp, Homo sapiens
gcggagtgtaggaagaggcactgctgagggggcgcgaggggaacggaggccagagctgcgggacacggccaacacggtgaaggaaaagt

SEQ ID NO: 196657 - DNA, 78 bp, Homo sapiens
tcacattggccggcaacttgttccagacggtggaaaaatgctgcatctccctgaatggccggagcagccgcctggtgg

SEQ ID NO: 196658 - DNA, 97 bp, Homo sapiens
tgcggggcctgggcctcccggtccgcaagcaggttatcaggacaccccatgggagagacttcgatgactctttagaaaaatgtgaagagtatttgag

SEQ ID NO: 196659 - DNA, 60 bp, Homo sapiens
ttgaagatgactcggacattttacatggatgtgtctagtccgaatgaagcaggaaggccg

SEQ ID NO: 196660 - DNA, 100 bp, Homo sapiens
gctccaggagttcgtctcttacgtctgcggaagtgcagctgcctcagttcttagcgcaggccacgtgcgagcgagggtttgcagcaatggaagaaacgca

SEQ ID NO: 196661 - DNA, 83 bp, Homo sapiens
gtgaaatgtcatgcctctgaaaatgaagtccagttacaacacagggatcacaacaaacacaaccgccacagaagcactatggc

SEQ ID NO: 196662 - DNA, 82 bp, Homo sapiens
cgggcgggggcaccgagggctaccacgttctgcggggccatcgatgcacccctcggagctaatagcggagatgagaaacagt

SEQ ID NO: 196663 - DNA, 98 bp, Homo sapiens
cgagtctccgccgctgcgggcccgctccgacgcggaaggtattaatctctggagaagacacatccacagttagcactttcttcagatgctgacgctcg

SEQ ID NO: 196664 - DNA, 75 bp, Homo sapiens
ggtgaaaaaatcttcaatgccgtggaataaacgtcagccaaagggaagctgccaaagaatgtcgacgtcgaaaga

SEQ ID NO: 196665 - DNA, 82 bp, Homo sapiens
acctccattggatttaaaagacagtcctcgtcagcactgactttcagctatggaatcggagctgatcgacctcaagatgatt

SEQ ID NO: 196666 - DNA, 100 bp, Homo sapiens
tccctcaccgcggcatcaagcagaaagcgtggatacccatcaacgaagttttgatattggaattcagattggctatcagcgacgcaataaggatgtgttg

SEQ ID NO: 196667 - DNA, 50 bp, Homo sapiens
ttatggccagagccagaacaggccaccagatgcctccacccagaaaggtc

SEQ ID NO: 196668 - DNA, 75 bp, Homo sapiens
ggcctcctcattccaggaatcattgagatgcagtcattggagaaatcgatgaagaaacagattctgcgcttgatt

SEQ ID NO: 196669 - DNA, 74 bp, Homo sapiens
aaacgatcctctcatctcagcctccaaaagtgctggcattacaggcccctcaccgttccccaaccaacaaactc

SEQ ID NO: 196670 - DNA, 100 bp, Homo sapiens
gttctgcggcacgggatggcggaggcgcctcctgtctcagatattgatgatgttaagaagttcaaaccgggttacctggaagctactcttaattggttta

SEQ ID NO: 196671 - DNA, 75 bp, Homo sapiens
acagggaggatggaaaccttgaatggcctggcgcaggagtccctggcttgcagtctcgctctgtcgtccaggctg

SEQ ID NO: 196672 - DNA, 100 bp, Homo sapiens
ggctaagaaagtggtgaatcccctgtttgagaaaaggcctaagaattttggcattggtttgtgtcccagacactttaaattcctctcaagagaaattatt

SEQ ID NO: 196673 - DNA, 100 bp, Homo sapiens
aatgtaaagatatcatcaaaacagctcgtagtttattaaatgatgtacaatttggccagtttggagatgacccaaagacccatcctcatgccaacaaact

SEQ ID NO: 196674 - DNA, 83 bp, Homo sapiens
gcctgcgcacccggcagcaccatgacagggacaagaatccttcaagaaacaggaaaaaactcctaaaacaccaaaaggaccta

SEQ ID NO: 196675 - DNA, 100 bp, Homo sapiens
gggatctggtggtcgtgaaactgcttcccgaggagcattggaagccagtcggatgatgattctgggtcagcttcaggctctggatctggttcgagttctg

SEQ ID NO: 196676 - DNA, 100 bp, Homo sapiens
aaacatcaaaagaagacggtgggatcaggagatgatcgttaactgaagacaatatgcaaaattctcacatggatgaatacagaaattctagtaatggcag

SEQ ID NO: 196677 - DNA, 101 bp, Homo sapiens
cttttcctcgctggggtgtacggtgaattatgtaacctcattacgctggatgtagctcacaatcaacttgaacaccttccaaaggagattggaaactgtac

SEQ ID NO: 196678 - DNA, 100 bp, Homo sapiens
ggaggtccagattcaaactgtcactcaagccaaggaagtaatccaaggacacgcaccaggctagcgccttcgatgccttccggcccgagccgaccgccgg

SEQ ID NO: 196679 - DNA, 100 bp, Homo sapiens
tgtggttgtggcagcgacagcgatggagactgcagctcgacaggaatgggaccagttactctccacaagaaaattcacacaaccacagtgctcttcatag

SEQ ID NO: 196680 - DNA, 87 bp, Homo sapiens
tcttgtgtgggcactgaagggggactacaggttcgagaccagtacaggctactctgtcatctttgaagatgttagatgtgggaaagt

SEQ ID NO: 196681 - DNA, 127 bp, Homo sapiens
atcggcaactccatggtcattttggctgtgacgaagaacaagaagctccggaattctggtttggtgcacctcgatttggaggaagtagggcagggcccttatctggaaagaagtttggaaaccctgg

SEQ ID NO: 196682 - DNA, 83 bp, Homo sapiens
gaagagttattctcaagctgtcacaggagccctgaaaaggagcctttaaaagtcaattctactccatttggcaaagagggaac

SEQ ID NO: 196683 - DNA, 100 bp, Homo sapiens
atgggcagacggattcatttagagctgcggaacaggacgccctctgatacctgcctagagctggaacgttacctccagagcgagccctgctatgtttcag

SEQ ID NO: 196684 - DNA, 138 bp, Homo sapiens
tctgctgcattctcttaggccagctgtcttgactggggtagctgaagctgttgtagctgaagaagaagtctctccacagttgtttactttccacgaagctgtttcacaaatggtagaaatggaagaacaagttgtaga

SEQ ID NO: 196685 - DNA, 75 bp, Homo sapiens
ggaaactcaacgcctttggcaacgccttcttgaacagtcctggaaggtgggaatgatctggagaccaggagtaag

SEQ ID NO: 196686 - DNA, 75 bp, Homo sapiens
ctttgacttggtgttgaaagtgaaatgtcatgcctctgaaaatgaagcctcaggtcagcctgtctccctgaagaa

SEQ ID NO: 196687 - DNA, 74 bp, Homo sapiens
cggcagggaccagcagttactgggaagcctcctgctcttcatggatgaagcagacgccttccttcggaagcgag

SEQ ID NO: 196688 - DNA, 90 bp, Homo sapiens
gcggagggagccgcgggatggaccgcagaacctctaaaatgcagacctccagctctagatctgtgcacctgagtgaatggcagaagaatt

SEQ ID NO: 196689 - DNA, 149 bp, Homo sapiens
tgtcacctacgctatgccctgctgtagtcacaggaggtgtagagaggaccccgggacatctgaaagccaggaaatgtttgcagagcagtctctgatgaagaatgccataaaaacatcggaggagtcatggattgaacagcagatgctag

SEQ ID NO: 196690 - DNA, 100 bp, Homo sapiens
caattttctgtacaccaatggaaagtgcgtcatcctaaggaacatcgacgagtgatttggagaacaatgcatgtaagtctgacatcatgatgtccatccg

SEQ ID NO: 196691 - DNA, 82 bp, Homo sapiens
agtaaatatacgctttgttggtggactactctcagcctactatctgtctggagaagaggtatgacgattactactattatgg

SEQ ID NO: 196692 - DNA, 100 bp, Homo sapiens
acagtgtggtaagcatcctgaaaaactcccagagtggaaatgccctcacagcatatgccttgtttaaggctggagtacaatggcacgatctcggctcacc

SEQ ID NO: 196693 - DNA, 90 bp, Homo sapiens
caaggatcttgaagacatagtagggggtggagaatacaaacctgacaagggtaaagtgaaagatgtcatgtatatctgcccatttatggg

SEQ ID NO: 196694 - DNA, 89 bp, Homo sapiens
gcaagattcttctgaattgtgctgccttggccaaaagagcatctgacgacaccaaaaagaagatgtacagctccatcctagtggtggga

SEQ ID NO: 196695 - DNA, 50 bp, Homo sapiens
ggcacactacagaactaaatatgcatgaaaatcaggaaaatgtttccaac

SEQ ID NO: 196696 - DNA, 100 bp, Homo sapiens
cactccccaaacaggctggctcccgtctccaggccccaaggagccacacctggaccagaccccaggaaaggttcctggtagagttacacagttgtgccgc

SEQ ID NO: 196697 - DNA, 75 bp, Homo sapiens
tgcagttttgtttgactgtggaaagtgttgtgaagagcgaagacttttcgctcccagcttatatggatcggcgtg

SEQ ID NO: 196698 - DNA, 83 bp, Homo sapiens
agagaatccctcaacatgctgttggttgaatctggcgatgtggaacccatggatatggagggctgactatatacaccatgttt

SEQ ID NO: 196699 - DNA, 141 bp, Homo sapiens
cgatttgacaggaacatcgcctctttccatcgaacattccgagaatgcgagagaaagagcctccgtcaccacataactggcacagcctccaggttggcgggctcatctgcgctggggttctgtgcgccatgggcatcatca

SEQ ID NO: 196700 - DNA, 87 bp, Homo sapiens
cacctttgaattcagccagtggtcacagctggatgtttgcgacatcccagagagcttccagagtgtgggccatgtttgaggattgcc

SEQ ID NO: 196701 - DNA, 100 bp, Homo sapiens
gcgggttcaggcttcgggggccagcagtctctggtcccagcccaccccatggcccctcccagtcccagcaccaccagcagtaataacaacagtagcagca

SEQ ID NO: 196702 - DNA, 75 bp, Homo sapiens
gggtcatcaaggctgtgctggatggagtgaaggaatggaagttggatacactttgtgacttgtacgagacactga

SEQ ID NO: 196703 - DNA, 50 bp, Homo sapiens
ggtcacctagacagcgacgatgataggtcttgggcgtctttggtactggc

SEQ ID NO: 196704 - DNA, 96 bp, Homo sapiens
taccagggagagcagtgaactgctccgcatcgagcagaaggacttcaaggcactatgggagggaaatgaggcaagttatcctttggaaatgtgctc

SEQ ID NO: 196705 - DNA, 109 bp, Homo sapiens
gaaggacgtacggtcctgctagtagaggaatatgtcgagtttctctagggcgccccagacaatgcagatcttcgtgaagactctgactggtaagaccatcaccctcgag

SEQ ID NO: 196706 - DNA, 75 bp, Homo sapiens
ctggcacagggccttctgctgcatttcctgcccagagccggagcggttgcagggcacacattactcggtgcagtc

SEQ ID NO: 196707 - DNA, 100 bp, Homo sapiens
gcctcctgagagccagccctgacgtgaactcattttatctgccacgacccagaagacacggcatcagcgaggagatacgcatcctctaaccttagatgaa

SEQ ID NO: 196708 - DNA, 100 bp, Homo sapiens
aacacatttttgggaacctcagcatcacatggatctttggacacatcgttcatgtacatgatcgccggactctgcatgctgaagctctaccagaagcggc

SEQ ID NO: 196709 - DNA, 100 bp, Homo sapiens
cgcccattcagtctacggctggggccgtcccagttcgcaatgagaaaggacctgatcccaaccttgaagaaagtcctaaaagaaaaaatattacatatga

SEQ ID NO: 196710 - DNA, 100 bp, Homo sapiens
ggcagtgaagactctgccaacagtcagtacctccgaaatgcttccagactcggaccctgcaccagctgtcactctgcccaactacctgtttcctgcctct

SEQ ID NO: 196711 - DNA, 87 bp, Homo sapiens
gcggaggagggcaaggactacccctttgccaggttcaataaggtctgggaggggctgaacgtggtgaagacaggccgagtgatgctt

SEQ ID NO: 196712 - DNA, 101 bp, Homo sapiens
tcatccaaagcagccgtcccctctgcagcctctctgacaagtgcacccttacccttctgaagaacagaaaaagcagttggcacaagacacgggactcacca

SEQ ID NO: 196713 - DNA, 75 bp, Homo sapiens
cacgtgcatgaaccaaacccacttcgttcaagacaggtgtttaagcgttcaaaatcaaaggaagcccagaaggga

SEQ ID NO: 196714 - DNA, 75 bp, Homo sapiens
tcctacagagatgcactgagatacaaacctgctggccagctaaactatgtggatccagctactggctatgtggtg

SEQ ID NO: 196715 - DNA, 98 bp, Homo sapiens
gccggggtgatggcggtggagactctgtccccggactgggagtttgaccgcgttgacgacggctcgcagactgccaatttgtggtgtctgaagaccaa

SEQ ID NO: 196716 - DNA, 87 bp, Homo sapiens
acccttattccaggcggctgctcaggccatcaccatcgaggctgagccaagagctgatggcagccgccggaccacccgctatgacat

SEQ ID NO: 196717 - DNA, 101 bp, Homo sapiens
ctcgtcgacatgagtgatgtggaggaaaacaacttcgagggcagaagttaaacatgaagtttctggagagacagtggtatttcaagggggagctcttggca

SEQ ID NO: 196718 - DNA, 80 bp, Homo sapiens
ttcaatgacaaaaagtttgtcattaaacccatcgacaagaaggcacctattgtagaaggcatgaaacaaaaaatgtggag

SEQ ID NO: 196719 - DNA, 83 bp, Homo sapiens
gttcgttgtgccagcgactaaaaagaggtatgcactccagaaagctaataatagacttttgaagatcctcttagaagttgtaa

SEQ ID NO: 196720 - DNA, 74 bp, Homo sapiens
accgctactcggagggcgagcggacctccctggagaagactcaccccacacagaccgcgtttctctccagtgtc

SEQ ID NO: 196721 - DNA, 75 bp, Homo sapiens
tgtgactgtgctggaggatttagagaaaggacttgaaccagagccgcagggccaaatccttgtagctgtcttctt

SEQ ID NO: 196722 - DNA, 75 bp, Homo sapiens
tgcttttacacggttttccaacatccagctacgactggtacaagcaagcaaagagacttcctgtaagcggcaaag

SEQ ID NO: 196723 - DNA, 50 bp, Homo sapiens
accggatgctgagtaccctgaatgctttctgtatgagcccaatagccaag

SEQ ID NO: 196724 - DNA, 74 bp, Homo sapiens
tccaactggagcttcctgtatgtcaccgtctcgcttcccctcacctgatggtcccaacacttcatcatccacca

SEQ ID NO: 196725 - DNA, 82 bp, Homo sapiens
ataaagaaccacatccgtttccccaaattcaacttctccaagggtgagcccctccagactccgaataggagatcaagagttt

SEQ ID NO: 196726 - DNA, 76 bp, Homo sapiens
ctcggaacccgtggtcctccgcttcatgctcatttttggacagtacatcacccctcctggcaattgctgcctgcac

SEQ ID NO: 196727 - DNA, 74 bp, Homo sapiens
tatttagtacttttccacagtcagctgccatttgcggcttaaggcatggcatggattccgtgaaggaacaacac

SEQ ID NO: 196728 - DNA, 50 bp, Homo sapiens
gccatctgcctgacttctgcatgctcatgattttaaaaggactggaggag

SEQ ID NO: 196729 - DNA, 74 bp, Homo sapiens
attattcctcgcccacatctgtgccaggtgcagttagagcggatccggcaagctgactccttggagagaatccg

SEQ ID NO: 196730 - DNA, 100 bp, Homo sapiens
accaagtctggggtggcaccccaaaagatggcaggtcctgttccctcttctcccagccaggagcctcccaccaagcgggagtatgaccagtgtcgcatac

SEQ ID NO: 196731 - DNA, 100 bp, Homo sapiens
aatgggccgctgacatgaatatggagtagttttctctagcaaagagagtgattgactgcctggaggatgagaaggcaaccctcaccttggccatggctga

SEQ ID NO: 196732 - DNA, 100 bp, Homo sapiens
gcggtgcacagttttcgaaggaggatgccctggagacacacaggcagacccatactgtgtggtcttcagcatagagtgagcttctagtgacacgagctgg

SEQ ID NO: 196733 - DNA, 82 bp, Homo sapiens
cgcctcacctgcccgctgtgccagtgctggacgtcattgctcctccttatacctctgacttcgtgcaacttttcctccccat

SEQ ID NO: 196734 - DNA, 100 bp, Homo sapiens
tttccctgatgcttactgcaacctagccaatgctctcaaagagaagggcagtgtaacctgtgtatggtgactggaggtgctaacctaggaagaattggtg

SEQ ID NO: 196735 - DNA, 75 bp, Homo sapiens
cgagcctctgactccaggttatcatggattcccagcgcgggacagccaggacctagatgtgaaggctggtggagg

SEQ ID NO: 196736 - DNA, 100 bp, Homo sapiens
agacaactatactctggatcatgacagagctattcacatccaaggcagcgcccggttaccacatggccaagctgatcatcaagttggtcacctccatcgg

SEQ ID NO: 196737 - DNA, 100 bp, Homo sapiens
ctctgagctagaaagaccctctgttaaagttgcaaaagatctacctgtagattcattggaaggagaagattttgagaaggaattctcatttctgaacaac

SEQ ID NO: 196738 - DNA, 100 bp, Homo sapiens
ccacggcacccccgcagcgctgaggacgctccggagcccggcgaccgcggtaccgcgcgccactaacaggctaagtgctatttatggaggtacctatatg

SEQ ID NO: 196739 - DNA, 100 bp, Homo sapiens
ttgtgttgcccgccaccatgagctacacagggccgcgttcgcaccaaaaccgtgaagaaggcggcccgggtcatcatagaaaagtactacacgcgcctgg

SEQ ID NO: 196740 - DNA, 75 bp, Homo sapiens
ggttggggagatcacagtccatgccaagcttactgtcctccgagaggtttttcattagtcaatacagtgaaggct

SEQ ID NO: 196741 - DNA, 83 bp, Homo sapiens
ctgatgacctgctgctcgtgctgatctcaggttcaaggtgtttgcagactatgaagcctacatgcagtgccaggcacaggtgg

SEQ ID NO: 196742 - DNA, 82 bp, Homo sapiens
ccacccaccgccgccgcctcccagtcctgctgccggccacagagatggcatcgctgctgtcgctgcaggaggagaaccagct

SEQ ID NO: 196743 - DNA, 101 bp, Homo sapiens
tactactactgggcagtgaatcctcaggatcgaagtggtatcaccccaaaaggattagaaattgcatctgatggtctcaagggtcgtgtgtttgaagtgag

SEQ ID NO: 196744 - DNA, 96 bp, Homo sapiens
ccagccatgacccataggaatctgacttcctccagtctgaatgacatttctgataaaccggagaaggaccagggtcatgtaggtacaacagcaacc

SEQ ID NO: 196745 - DNA, 100 bp, Homo sapiens
cattccgtatgagatcacactgctgtctccctgtttgcatatgttacctcatcttcactttggcctcaaagacaagcattaacaacagtgtcttcagtgt

SEQ ID NO: 196746 - DNA, 100 bp, Homo sapiens
ccggaaaagcttaataggcaatgggcagtcaccagcattgcctcgaccacactcacctctctctgctcatgcagctggtcacctgacttttgaatgccgc

SEQ ID NO: 196747 - DNA, 50 bp, Homo sapiens
gtcgctggcagccgctgtacttggtggatctcgagccagaggggaaagta

SEQ ID NO: 196748 - DNA, 100 bp, Homo sapiens
gcgtcttcctcaaggtggggttcggggggccaccgaatcgctgtcacgccggcagatgtagccgcctgtcccgggagcctggactgtgccctgaagaggc

SEQ ID NO: 196749 - DNA, 75 bp, Homo sapiens
ggagatggctttacaagaaaaccacctaaatatgaaagattcatcaggccaatgctgaactaccagcagaaagta

SEQ ID NO: 196750 - DNA, 75 bp, Homo sapiens
catggtatgaggttgactcatttacaccatttcgcaaagattgaaaatggaagccctgactgacagggaacatgg

SEQ ID NO: 196751 - DNA, 50 bp, Homo sapiens
taccgcagcctggaggagctggccgatagcaaattgcttcaggagttgag

SEQ ID NO: 196752 - DNA, 90 bp, Homo sapiens
cgctgacaagggtccagcctccgatgcaagacatctgtatagattctgcttcatccgtgagagagaataagcaacctgaaggtttggaat

SEQ ID NO: 196753 - DNA, 97 bp, Homo sapiens
gtcaccgtgatcctgttagatatcgaaggtaccacaaccccgattgctttcgtgaaggtgacttaagagattaaaattaatttggttgctgttggtt

SEQ ID NO: 196754 - DNA, 75 bp, Homo sapiens
aggattccaagtaactcttatttgctaagatatcaacatggactagggactccagacttgcggcaaacccttccc

SEQ ID NO: 196755 - DNA, 50 bp, Homo sapiens
atgcaatcggccccagcctgctcatagtatcatcgagaaaggagaagaac

SEQ ID NO: 196756 - DNA, 75 bp, Homo sapiens
gcaggtggggaaaatggcggtgtctacagtgttctcgacttcgtcgctgaatgtttctccatcccagagagatga

SEQ ID NO: 196757 - DNA, 82 bp, Homo sapiens
aagatggcggacggggagctgaacgtggacagcctcatcacccggctgctggagggtgagaagccctaccactgcaactggg

SEQ ID NO: 196758 - DNA, 98 bp, Homo sapiens
tcccggacctgagcagcccgtacctctccaacggacccctgtctcccggaggagcgcgcacctggtgaactatgacaatgtagtggacacaggttctg

SEQ ID NO: 196759 - DNA, 100 bp, Homo sapiens
ctggcggacatcactttagaccctccacctaattgcaggagcctctgaagctcccaccaggccagctctcctcccacaacagcttcccacagcatgaaga

SEQ ID NO: 196760 - DNA, 73 bp, Homo sapiens
ctcgcagtgaccccagcgcaaagtaccatggcatcctccaggcctctctctggaacgcctacccaactccatc

SEQ ID NO: 196761 - DNA, 108 bp, Homo sapiens
gcaagccctactgagcgtgctcccctctgagactggagtgagagggtcttctgaaatgcactcggtgatggaaagagagccactattctgaagaacacttggccaaag

SEQ ID NO: 196762 - DNA, 100 bp, Homo sapiens
cttccagtggaggcattttggggcagaatacagagatatggaatcagccttacgacagtctgcctacctcacagacctgcttcttccagctgaggctgcc

SEQ ID NO: 196763 - DNA, 95 bp, Homo sapiens
gcactcgcgggacgtggtataccgcgacatcaaggagacactgtcggacattcgggaaggtgcgccgctaggggtccacctgccttttgtgggct

SEQ ID NO: 196764 - DNA, 90 bp, Homo sapiens
cggtggcggaggctgaggagaaggaggagcgggccgtggaggcttcgccgcctaggtgattttacaacgagatgctgctctccataggga

SEQ ID NO: 196765 - DNA, 90 bp, Homo sapiens
cattattattgataataccaacctccacgcctgggaaatgaagccctatgcagtcatggatgaccggaaagaagggatgaccgcgtttgt

SEQ ID NO: 196766 - DNA, 75 bp, Homo sapiens
ctgctgggccctgaggctgcaccaagtggcgaaggagccggctccaaggctccttcgagagcagtggatccgggc

SEQ ID NO: 196767 - DNA, 82 bp, Homo sapiens
atcgactgaatgagatcaaaggtcacctggaaattgccttattggaaaaacatttcttacgggttggctgtgttccggccgc

SEQ ID NO: 196768 - DNA, 101 bp, Homo sapiens
ctttagccatgtggatacctacggagcacgagaaatacggcgtgggccggagcctcaacagaaagctcctttagttcctcctcctccaccgccaccaccac

SEQ ID NO: 196769 - DNA, 100 bp, Homo sapiens
caaagatggggttgtcctctttaagaagctccggggaaccttgtacaacaccggccgacatgtctccttcctgcctgcaccccgacctgtggtcaatgtg

SEQ ID NO: 196770 - DNA, 75 bp, Homo sapiens
atgagcacatgaccagcttagcttctgtcctaaagaatgattacggacctgaagccaaagaacaagatgcgctag

SEQ ID NO: 196771 - DNA, 83 bp, Homo sapiens
ctcatcgctcgcatcgctgccgccaacggggacagagcgggatgccaccagcttgtccaaagggaagttccaggagctcctgg

SEQ ID NO: 196772 - DNA, 100 bp, Homo sapiens
aggtctctggagacatcttcagcagcttccaggaagctcgggatgagctagttgaattccaggaaggaagcagagaattagaagcagagttggaggcaca

SEQ ID NO: 196773 - DNA, 100 bp, Homo sapiens
tacagtctctgcacctcgcgccccagcagtttcatccaggatcgagcagggcgaatggggggggaggcacccgagctggccctggacccggtgcctcagg

SEQ ID NO: 196774 - DNA, 100 bp, Homo sapiens
ttctgacccctggaggagccactgtggaagcagagcaatcgccatggagtttgtgatgaagcaggctctaggaggtcttcaaagcttcacctttctccaa

SEQ ID NO: 196775 - DNA, 98 bp, Homo sapiens
ggcatctgtgtccaacctggtcactgtgtttgagaatagcagaccggccaggcctcatgaacgttccacgggtggaggctatccaggacaccatcctg

SEQ ID NO: 196776 - DNA, 144 bp, Homo sapiens
gacagcggcagcacccccatgcccagggacggcctccggaacccagagactgcatcagagccactgtctgaggtggccccaatgtcagtgtatgcttgtctgggcaatgatgcggctgccattcgtgatgccttcctgacccga

SEQ ID NO: 196777 - DNA, 83 bp, Homo sapiens
atctctggaaaaacttcttgccaaccaaagttggacgtgataagtatgagcctgcagctgtttcagaacaaggtgataaaaag

SEQ ID NO: 196778 - DNA, 82 bp, Homo sapiens
ggaaagataccagctgcatgacagactgtctcagctgctgccaagaatggtacgtcatcgaacaaaaacaaagaggatgaag

SEQ ID NO: 196779 - DNA, 100 bp, Homo sapiens
gaagtctggcagctgctagcaggctgtcataacaatgaccacctggtagagaaataccgcattcttatcacaaaggtatccatcatcccacgtggcaaag

SEQ ID NO: 196780 - DNA, 100 bp, Homo sapiens
aagatggaagatgaggaggtcgctgagagctgggaagaggcggcagacagcggggtctgccatcatggatgttctcgcagaagcaaatggcacctttgcc

SEQ ID NO: 196781 - DNA, 80 bp, Homo sapiens
ggagctaaagcagcgtgcgttcagccctggggaatacggggtgctttgcattcaggaatacagaaaaaacagcaaagtgg

SEQ ID NO: 196782 - DNA, 98 bp, Homo sapiens
ttaaggatggtttagaaatggaaaaatgtgtccggtttatcactaaaatatggcatcctaatattagttccgtcacaggggctatttgtttggatatc

SEQ ID NO: 196783 - DNA, 114 bp, Homo sapiens
aagagcttctgcctgttcagaagcattaccaacttgatgatcaagagggcatttcaaagttcaggagccctggaaaggagaaggaataagacggcaggaggaagagagagagag

SEQ ID NO: 196784 - DNA, 100 bp, Homo sapiens
cctttctcggaaacgcggcgcggccggctgccggaaaaccctgtccccagaggggctggttctgccatgagtactgatgcttacccaaagaacccacacc

SEQ ID NO: 196785 - DNA, 82 bp, Homo sapiens
gcggctctcggtgccctctccttttcgtttccggaaacatggattatatctgtccaagatgcgagtctggttttatcgagga

SEQ ID NO: 196786 - DNA, 100 bp, Homo sapiens
aaggggaaatctccccacaaagagaagtctcaagatcccaggttccaagtctcttcttcggcctctcaaacatggtaccatccctaatgaagtcaacggg

SEQ ID NO: 196787 - DNA, 97 bp, Homo sapiens
cagtacgtcctcctggcgctgggctgcgtcctgctgctggtccctgtcatctgccaaatccggagccaagtctccgatgatgacctcgacccatcct

SEQ ID NO: 196788 - DNA, 98 bp, Homo sapiens
tgacctgcgcgcccgcctcggcccgcacgccaagcacgtggtgggctatggccaccttgggatgatggcgccacttcctcagtttcggcactcaagcg

SEQ ID NO: 196789 - DNA, 88 bp, Homo sapiens
agctgcactgtggcaaggcttttgcttccaaatacaagctgtatagaactcaacagtgacaattgaggaattccactgtaagctccaa

SEQ ID NO: 196790 - DNA, 80 bp, Homo sapiens
gaatggagcgggcgggcggcgctccacagcacctgttgccttcattagcagcttttcctcctcttccctgcacttcccag

SEQ ID NO: 196791 - DNA, 98 bp, Homo sapiens
agaaaatgacctgaatgaactaaagcctttagtgcattctcctcatgctattgtggtatccttctgatgaagagaagaaaggcctaaactcccaggca

SEQ ID NO: 196792 - DNA, 132 bp, Homo sapiens
ctggctatgaaagcctgaaaaagaatgaaattcttcatctgaaattacctctcagactttctgtaaaggaaaacaagcttttcagtttcatagaggttcccagtgccaccttctgtgatgtcattcccaaga

SEQ ID NO: 196793 - DNA, 100 bp, Homo sapiens
attgtacccttgtttcagagcctaacagctctaatggtaccaagtgacaggttggctttactgtgactcggggacgccagagctcctgagaagatgtcag

SEQ ID NO: 196794 - DNA, 51 bp, Homo sapiens
caccagagtgatgtgtggagttatgcctagaatgagtgaacaaacaacaag

SEQ ID NO: 196795 - DNA, 100 bp, Homo sapiens
ttttgttaagaagcacctcatgcaagcgagggacctgggactgctcacagccaggagtcttttagtcctgctatacagctgcaccttgtacatcaagctc

SEQ ID NO: 196796 - DNA, 100 bp, Homo sapiens
gttggaccttccggagcttctcagaagacagagggttttcttttgagatggcgggtgaaaaagttgagaagccagatactaaagagaagaaacccgaagc

SEQ ID NO: 196797 - DNA, 82 bp, Homo sapiens
ctgggtcagtccgccgctcaccccgcggccgcaccttcccgccttctcaggttggaagtactccatgacacacactcggaga

SEQ ID NO: 196798 - DNA, 101 bp, Homo sapiens
gtggagaagcacttcaacgctggacgaatagccggatcgagctgggagatgtgacaccacacaatattaaacagttgaaaagattgaatcaggtcatcttt

SEQ ID NO: 196799 - DNA, 90 bp, Homo sapiens
ctcctgctgcgcggggacggctcggtcggggcgcgggagcccgaggccgcggagctggccatgacggaggaggtatggatgggtacctgg

SEQ ID NO: 196800 - DNA, 101 bp, Homo sapiens
aaggagcagaggaaatggagacggtcatccctgtagatgtcatgaggcgagctggggatgctgaaaacgccattcaacagatgggtggccagtggcttggt

SEQ ID NO: 196801 - DNA, 100 bp, Homo sapiens
agccagctggccaggggggcccgtctgggccagccacctggtgtccgtcacctgtgtgccgcccgcctgtggtcctgggagcccgaggccagcccggctg

SEQ ID NO: 196802 - DNA, 90 bp, Homo sapiens
tgtgggcacaaaaactaccattcgcctgatgaactctcaggagatgagtatgatgtatgtgccatttgtttggatgagtatgaagatgga

SEQ ID NO: 196803 - DNA, 125 bp, Homo sapiens
aactctttcaagatctaagtcaattacaggaaacatggcttgcagaagaaaacgttgtgtgacgtgatcctcatggtccaggaaagaaagatacctgctcatcgtgttgttcttgctgcagccag

SEQ ID NO: 196804 - DNA, 101 bp, Homo sapiens
aagatgaggacagcatggatgggctggagacaacagaaacagaaacgattgtggaaacaggaaggtgtcttgctgcaggtaactaatgaagaagtggtcaa

SEQ ID NO: 196805 - DNA, 122 bp, Homo sapiens
tccgagcccaaggcaattgatcccaagttgtcgacgaccgacagggtggtgaaagattctgaagactactttgaggtcaacattccaacagacctacgagcaaaacattctggggaaataag

SEQ ID NO: 196806 - DNA, 118 bp, Homo sapiens
cccggggtccccgcgggaccgcggccactggacggatacctcggagtggcggaccacaagcctttgcaactggactgtgacctttgtgccatagtgtcaaactcaggtcagatggttg

SEQ ID NO: 196807 - DNA, 73 bp, Homo sapiens
ctggcttcactgaagcacttacctttgccctgtgaagttattgccagtggactgtgagagaaaaacagatgag

SEQ ID NO: 196808 - DNA, 82 bp, Homo sapiens
tcaggaaaaattacaagaaagcgtcacctggaaagaggctcctgaagcacaaatgcagggactgatcctttgaaatactcca

SEQ ID NO: 196809 - DNA, 51 bp, Homo sapiens
ggaagcagctggcttcactgctcaggggggtacatggtatggagtagacat

SEQ ID NO: 196810 - DNA, 100 bp, Homo sapiens
actcttagcaatccattatttaatacaacatcatcaatcattttgacaacctgtatcccaagcagcgcatttcagcaggaacttgatgcaaggcatgaca

SEQ ID NO: 196811 - DNA, 82 bp, Homo sapiens
ggcgggagtcctggcgctctgcagtttaagctatgaagaaggacatccctcacactctgaaacagatctccttcagagacag

SEQ ID NO: 196812 - DNA, 100 bp, Homo sapiens
ttcagctgtttcctgagttgctgtttcttgggactgcgaagctatacaggctaatgaagaaggagccccacaggaaggaattctggaagatatgcctgtg

SEQ ID NO: 196813 - DNA, 96 bp, Homo sapiens
ctattcaccctctggtcgaggtccaaagaaaagatacttctgcaatcctggacatgaaatggcactgtctgaggcctgtggtcaggaaataactac

SEQ ID NO: 196814 - DNA, 100 bp, Homo sapiens
gcagcgcagcccgcaccctccccgcccgacctgcgagcgccgcccgggcatgcgaagccgtccctccccggactcctgaaacagactactctttgccttt

SEQ ID NO: 196815 - DNA, 88 bp, Homo sapiens
cagaggggccactgctgggccctgaggctgcaccaagtggcgaaggagccggctccaagggtgtcaaattgagaaccaggtagatccc

SEQ ID NO: 196816 - DNA, 82 bp, Homo sapiens
aagacttagcttttaaattaaaaaggaagctattcaccattgagtgtgaagcagtattctggaaagtttttctaagactagt

SEQ ID NO: 196817 - DNA, 75 bp, Homo sapiens
cacaccctcgtattctcctgcccttccccagggtggagggtccggggaggagcaactctatgctgactttccaga

SEQ ID NO: 196818 - DNA, 82 bp, Homo sapiens
ccgtcattgacatcaatgccttcccaggatggtactggggaagtatgactgttaatgaagccaaagagaaattaaaagaggc

SEQ ID NO: 196819 - DNA, 83 bp, Homo sapiens
attcgcagtggtcgcttcttctccttgaacccctgaacagtgcccaagtgttgtctctttgttgtcagagagttacaaccctc

SEQ ID NO: 196820 - DNA, 97 bp, Homo sapiens
ctacagtctgtcaagacctctgccttgcagggtgtcctgttcccaaagctgagctgatctgccacctagagcatgggcaggagccatggaccaggaa

SEQ ID NO: 196821 - DNA, 90 bp, Homo sapiens
cagaattaaccagagaaggtgaaacgatcatcgagctaaaatatcgtgttgcacctgtggaatcctctcaagaggaacagtcattgtgtg

SEQ ID NO: 196822 - DNA, 98 bp, Homo sapiens
attgtacaagaaaatgcacttgaatttggacagtgaaaaggcccttaaaaagcaatggctgccatccggaagaaactggtgattgttggtgatggagc

SEQ ID NO: 196823 - DNA, 101 bp, Homo sapiens
ggcgaggctggagaacgctgaaagctggtgggcttgggaagacaaacgacgctctgaaatttggctcccaggttttgaaaacattgaattgactcctcttg

SEQ ID NO: 196824 - DNA, 51 bp, Homo sapiens
ccagtccttcagagaacaagagcaaaagcacctggaaattgaaagaactac

SEQ ID NO: 196825 - DNA, 80 bp, Homo sapiens
gggaaccctggtcaccgtctcctcagtaaaggcatgacttcctggcaccacagggaaaatcgggtgcaagcccagaaact

SEQ ID NO: 196826 - DNA, 82 bp, Homo sapiens
caccgcctcacagatcgactccaggctgcttctgatgcttggaagatatcctctcagccacaaagatggtaataaatctttg

SEQ ID NO: 196827 - DNA, 96 bp, Homo sapiens
gggcatttgctattgattctagtcatccctggcttcatgagtgtatgattcgtctctttaatactggtagttgtcctgggaacccctgcagaagaa

SEQ ID NO: 196828 - DNA, 100 bp, Homo sapiens
atggtgtgaaggaaggcccggtgcgattgcatgaggatgctgaggctgtcctgtcctcgtccgtctcatcaaagcccggaggaaccacccccgccctcct

SEQ ID NO: 196829 - DNA, 99 bp, Homo sapiens
tggcttttgtgaagcacagcacggtactggagaacacggatggcatccgtgtcattctggaccttactcccaactaccggggtgagaactcgtggttct

SEQ ID NO: 196830 - DNA, 97 bp, Homo sapiens
gctccagcccctcacagccaccctcgcctgatgaggagaagccatcctggtcaagtgacgaatctgatgttccagcagaaatccaggtgttaaaaga

SEQ ID NO: 196831 - DNA, 100 bp, Homo sapiens
gggggtggccattcaggagaagctcagggagcaggtggtgaagcgtgaggagctcttcatcgtcagcaagtatgaggttgatgagctacgccgaaagaag

SEQ ID NO: 196832 - DNA, 82 bp, Homo sapiens
agcgttcctgaggctggacattggacctgacgctggaccctgacacggctcacccggccctgatgctgtcccctgaccgccg

SEQ ID NO: 196833 - DNA, 82 bp, Homo sapiens
agaattactagattttctctcaaactacgagaatgtgtgtaagaactgcagcggaaccttctgtgatgcctgttcaacaaat

SEQ ID NO: 196834 - DNA, 99 bp, Homo sapiens
agattcagaaggagcaggattaccaaaggttaagtgggcagaccaacatccacctcagcaaaaacttcttcctgacgaatcgcgccagggagcgctcag

SEQ ID NO: 196835 - DNA, 90 bp, Homo sapiens
gctctacgtgcctgtcaagaccacgggtcaacatatttcactggcacctattcacaagcttgaagaagctctgtatgaataccagccact

SEQ ID NO: 196836 - DNA, 51 bp, Homo sapiens
catcagctttataagcaaacaaggcttttgaacacttgcagcaattagaat

SEQ ID NO: 196837 - DNA, 100 bp, Homo sapiens
gcggcggcaccgggaggccgggccgagcggggccattaagtttaatgatggcctgagcttacaggaaagttgccgccttattgaagctctgtcctcatgc

SEQ ID NO: 196838 - DNA, 83 bp, Homo sapiens
gttcaacatcctcctggccaccgactcctacaagcagcccctgtcaaagggaacaggaagcagtccacggagggtgacgccct

SEQ ID NO: 196839 - DNA, 96 bp, Homo sapiens
atgattcctcaaaaccacgcaagtacgaagtagcagagcggatctcaaatccagatgggcctttgggtccccgaggattagctgaagctacagaga

SEQ ID NO: 196840 - DNA, 75 bp, Homo sapiens
gccatgcaaaggcaggggaggaagccacctcgaggcctcaaggggaaggtatatcaggaacctttgtcccccaat

SEQ ID NO: 196841 - DNA, 90 bp, Homo sapiens
ccgccttggtgaatgcaccggagaacagacccaatcctggtgtcccttaggcctggctctgagctgctgagaccccacccactgcctgca

SEQ ID NO: 196842 - DNA, 101 bp, Homo sapiens
ttccttcaaggtttactgcaacttcacagccggggggtcgacatgcgtcttccctgacaagaagtccgaagggccagcttccagaagaggccttgctggga

SEQ ID NO: 196843 - DNA, 83 bp, Homo sapiens
gacggcgagcgcgagcggcgcgagaaactcagagcccgggcgctgtggaagagattctagaccgggagaacaagcgaatggct

SEQ ID NO: 196844 - DNA, 83 bp, Homo sapiens
tgatggagagctgaacattactcttccagaagagacaatgcagatcttcgtgaagactctgactggtaagaccatcaccctcg

SEQ ID NO: 196845 - DNA, 75 bp, Homo sapiens
ggctggccaagttactggagccgatgtgtggatgaggtcaccattgtcaacattttgaccaaccgcagcaatgca

SEQ ID NO: 196846 - DNA, 50 bp, Homo sapiens
atgccattagcaaggatgtttttaataagctgtcattcttctctacagaa

SEQ ID NO: 196847 - DNA, 95 bp, Homo sapiens
ctcggccgctgccgaggcctcctgcagccatcatgtccgccagcgccgtctacgtgctggacctgaagggcaagccaatggagatcttcgtggat

SEQ ID NO: 196848 - DNA, 50 bp, Homo sapiens
tttctcaacctcatcttctgggtcccgcagcggatggcggcggagggcgc

SEQ ID NO: 196849 - DNA, 50 bp, Homo sapiens
ggagaacctggcacttatgtcctccctggaggagttggtgaacagcagga

SEQ ID NO: 196850 - DNA, 100 bp, Homo sapiens
cccgcacggacccatgaaccagccgggcggcgcggcggctccgcagtattctaccttgtaaatactgttatttgtatatactgtaaatgatgacatcggt

SEQ ID NO: 196851 - DNA, 100 bp, Homo sapiens
tgagccagttggagttgcggcggcgggaacgattgggctgagcagaggacgacatgttgcttttcgtggaggagccaccacccctgaccatgtagatgcc

SEQ ID NO: 196852 - DNA, 75 bp, Homo sapiens
aaggaaaaatcgagcagaaagaatgtctttcaggatcttatggttggtgatgaggcaagtgaattacgatcaatg

SEQ ID NO: 196853 - DNA, 51 bp, Homo sapiens
ccagagaccttgtcatcgaggccctgcggacaagttggatggcttgaggac

SEQ ID NO: 196854 - DNA, 100 bp, Homo sapiens
agagcagcagccgcccgcttcaaccccaggggaccagaggaactcagccctgattgcggtatgtgaggagcagcgctgtgaggaggaagtcttccccctg

SEQ ID NO: 196855 - DNA, 80 bp, Homo sapiens
cctcgtttgtaccgtccctcttcaggtactgagcagtacagtgaatacacaggctatgctgagacatatcgttggtcccg

SEQ ID NO: 196856 - DNA, 100 bp, Homo sapiens
agagaatcaagaagacccaggaccagatcagtaacgctccctggggaagggaatgcagggttgctggggctgggcccagaagcagcagcaccagggaaga

SEQ ID NO: 196857 - DNA, 74 bp, Homo sapiens
cttatgtgccaagaggtagtgatgaaggactcgctgattcttgagaagagtcaaaactggagctctcaaaaaat

SEQ ID NO: 196858 - DNA, 88 bp, Homo sapiens
tgctctgctgtctcctgcaagaactggctcaagaaatttgcctcgaaaaccaagttcgatacaagaggctgttttcctagcgtggctt

SEQ ID NO: 196859 - DNA, 100 bp, Homo sapiens
cggagcgggcggccgccaccgagcgtgctgagcaaccgcagcctccgcggccgagagtgcagcgatgtcccagaagcttttgttgacaattccagtttcc

SEQ ID NO: 196860 - DNA, 100 bp, Homo sapiens
gcagtggccaaggaagctgtacatgcagctcatcccgcagcagctgctggttaacactgacaaagacagatctctccttttggactgggaccgagtaaga

SEQ ID NO: 196861 - DNA, 73 bp, Homo sapiens
gaggtgctgggagcgagttggctgggtcgggtgtgctgacagccggctgttaagccctgcctgccccgcgcca

SEQ ID NO: 196862 - DNA, 100 bp, Homo sapiens
ttcttctgaattgtgctgccttggccaaaagagtaacaaatgtggcaattattttggatctatcacctgtcatcataactggcttctgcttgtcatccac

SEQ ID NO: 196863 - DNA, 74 bp, Homo sapiens
aacaaatgtgatgtgaagagaatagctgaactttctgaagatgatcaggattcaagttcgaaatatggcaactt

SEQ ID NO: 196864 - DNA, 82 bp, Homo sapiens
cggggaccaggacagtcgcgaggttcgagtgttgcagagcctgcggggcaagatctggctccagcggggccccacagacgag

SEQ ID NO: 196865 - DNA, 75 bp, Homo sapiens
agtccttcgaaggccctcagcctgcggatgtgaggctgatgaagaggaaaacagccgaggcctgcctggagcccc

SEQ ID NO: 196866 - DNA, 75 bp, Homo sapiens
caggcactcagctcttcatgaattacacagcgtactatcccagtgcaaacttggatgaggaggcacaggctggta

SEQ ID NO: 196867 - DNA, 100 bp, Homo sapiens
cggagtggaccactggatctccaaacagggccagaagctggagatgatgctggagcagaagttagcgcttctctctcgggattatcttgaacacataacc

SEQ ID NO: 196868 - DNA, 75 bp, Homo sapiens
gcctgggtaccaccagagggaaagctggggcggcaaaatttggtttctctaatattactggaattgattactctc

SEQ ID NO: 196869 - DNA, 100 bp, Homo sapiens
tccaaaaggagaggtcgattctattttcaaatagagctgcagcaaggatgaaacagatgatgattattccccaccttctaagagacaaagaccaacgagc

SEQ ID NO: 196870 - DNA, 95 bp, Homo sapiens
cgacctgctcttcatctccctgctctggatcatcgaactgaatgtgtgccaagtgcaagaccgtcttccaccagagctgccaggctgtggtgaag

SEQ ID NO: 196871 - DNA, 100 bp, Homo sapiens
cttcgaaaagctgccaagttgaaaatggacgagtaatcgcctgctttgattcattgaaagtaatacagacactcaggcagacgaggatgaaagagcccag

SEQ ID NO: 196872 - DNA, 100 bp, Homo sapiens
gggcgcccagcgcaggccctgaccttcgccaagaagcacctgcagatctcccaggaggacagagcgggatgccaccagcttgtccaaagggaagttccag

SEQ ID NO: 196873 - DNA, 82 bp, Homo sapiens
gtgccgcgagcgcggcctgcaggaggatgagacctgcacgcagtggctcacagcagcacgatttgtgacagcccgaggcgga

SEQ ID NO: 196874 - DNA, 100 bp, Homo sapiens
ccagcggccccggggacaccagcagctctgctgcggagcgggaggaggaccgaaagatttgataatgggctgcattaaaagtaaagaaaacaaaagtcca

SEQ ID NO: 196875 - DNA, 75 bp, Homo sapiens
tcggaagcggcagctggtggaggacaggaacctgctggtggttctcaggaatcagatagctcgcagtcggccaag

SEQ ID NO: 196876 - DNA, 108 bp, Homo sapiens
atgagtgaccggggcatctccaacatgctggatgtcaacggcctctgtgacagagctgaatgaacctctctccaatgaagatcgaaatctcctctctgtggcctacaa

SEQ ID NO: 196877 - DNA, 87 bp, Homo sapiens
caaccaggcactactgaccaagatcttgtcaagctgtgtcagccaactgaagagctcagtgtggtaggctggcaagtcacccttccc

SEQ ID NO: 196878 - DNA, 100 bp, Homo sapiens
cccacctccccccggagccaggctggtttcggaaatgcccttacagcagcagattcctgacattcagacaactgacttgtaactgacttataactgactt

SEQ ID NO: 196879 - DNA, 82 bp, Homo sapiens
ggtttcccgggagatcccaggcggtgacagagtggagccatggctagaggtgaggcggaaccaaccctcctggccatgggag

SEQ ID NO: 196880 - DNA, 50 bp, Homo sapiens
ccctgcgatactattatgacaaggtacaccaggggttggaaaaaccacac

SEQ ID NO: 196881 - DNA, 97 bp, Homo sapiens
ctctacttggtcagtttctagaagacatggaagcatatgctgagctgtcggaaaaggtaacagaagatggaactcgaaatcccaatgaaaaacctac

SEQ ID NO: 196882 - DNA, 80 bp, Homo sapiens
tgaatggagcaaaatggcggatcatgtgcagctccttcgagaactcatagaacggaagaccagctccttggatcccaacg

SEQ ID NO: 196883 - DNA, 74 bp, Homo sapiens
tctgtgaaaaggttattgtgcctaacatggaatttagagcaattgacatgtggtctgcaggtgtcatatttctt

SEQ ID NO: 196884 - DNA, 75 bp, Homo sapiens
aattaaaaggaagaacaacttaagagcttcttcaaaggttgtttgatgtgtgcacagtgtcacgaacagacagag

SEQ ID NO: 196885 - DNA, 75 bp, Homo sapiens
agatattgacttggataatctcttcagagaatactgggatcttcagtggcaggaggagtaatcagaagacggaga

SEQ ID NO: 196886 - DNA, 101 bp, Homo sapiens
ggctgcttcccctcccgggtgaggagcgtcctgagactaaggaaagagcctggaaaatggagcagacctggacgaggtattcagagaacgactaccttcag

SEQ ID NO: 196887 - DNA, 100 bp, Homo sapiens
cgtcacatgtcattataccttcacccagcatttcatccctcgtcgaaaggattggattggcatctttagactgaaaaaaggaagggtgggcagactgtgg

SEQ ID NO: 196888 - DNA, 75 bp, Homo sapiens
ggctttgccagcaaaaccgaaacaggttgcacgttttcaaaaaatacctaatggtgaaaatgagacaatgattcc

SEQ ID NO: 196889 - DNA, 50 bp, Homo sapiens
ctcagaattcatgattgaagaaatgcaggaaaatatgagagccacacccg

SEQ ID NO: 196890 - DNA, 99 bp, Homo sapiens
tcaaccagcttctggtagaaatggatgtgtctgagcagcaggagagagccttcacgctggggctagcaggacttctcggcgagggagtttttaactttg

SEQ ID NO: 196891 - DNA, 51 bp, Homo sapiens
cggctttagcggtgtcttttgcggggtgctttccagacaggccaaggacct

SEQ ID NO: 196892 - DNA, 50 bp, Homo sapiens
cagagagctattattccctgtattaaaggaggcagtggagaaggtgacac

SEQ ID NO: 196893 - DNA, 51 bp, Homo sapiens
tcgctcgacttccacctctaagactcccacacggagtcttgctctgtcacc

SEQ ID NO: 196894 - DNA, 75 bp, Homo sapiens
accctctgggagcttctcagccattttccacagatcaggtgaatgaaaactttgccattgatttgatagcagagc

SEQ ID NO: 196895 - DNA, 98 bp, Homo sapiens
gaaataacccttgatcctcctcctaattgcagtggagaagagtttttcccaacatccaatagtcttcttcatggaacacatgtgccttccacagagga

SEQ ID NO: 196896 - DNA, 75 bp, Homo sapiens
cctgagcacgctgctgtgtgagcagcagttggaatcgaagcctcttaaaatggcagatgacttggacttcgagac

SEQ ID NO: 196897 - DNA, 82 bp, Homo sapiens
ctgccgtcatcaccatcaccttcaatccgctctactggaatgtggcaactggtttccggagctgagacactgaatcttgttg

SEQ ID NO: 196898 - DNA, 75 bp, Homo sapiens
gaggactgcgaacatgtgcggatgcaaaggacaacccaggcctagcaagaagatccttataggaagaaaaagctt

SEQ ID NO: 196899 - DNA, 75 bp, Homo sapiens
taccactacatcattgcaaatctggaagctgcagtaaaggaagatgaagaagaagtttcagataagggcagtgat

SEQ ID NO: 196900 - DNA, 50 bp, Homo sapiens
tatgctgacgaggagttcaaccaggtgagacatggaatccattaaaattg

SEQ ID NO: 196901 - DNA, 75 bp, Homo sapiens
aaaggctttgatgaatacatgaaggagctagaagaagctcattcacacagaagacccatttaatgatgaacatca

SEQ ID NO: 196902 - DNA, 90 bp, Homo sapiens
ggcaactagaactaacattggaattcaggatgaaatctgtaagtacagacctgagaattctgttgctaatgacactggcttcacagtggt

SEQ ID NO: 196903 - DNA, 100 bp, Homo sapiens
cgaagcctgcatttttttgtggagtggtttgaatatcgtaagcgcacgtttaaacatctcaagtattctaccttgtaaatactgttatttgtatatactg

SEQ ID NO: 196904 - DNA, 100 bp, Homo sapiens
tgtccatgatgcctaccctgtgaagatctctcaccatccaaaaaagagggtgcatctgcccggaagactcagactcctgcagcccagccagtaccaagac

SEQ ID NO: 196905 - DNA, 100 bp, Homo sapiens
ggatgattctggaactgggagaagatggctttaaagaatacacttcaacaaaagatacagatattgtggatgaagccatctattacttcaaggccaatgt

SEQ ID NO: 196906 - DNA, 75 bp, Homo sapiens
cagacaatgccggtggaggaatttgtggctggctggatctctgagacccacaagcattgaactattttctacatg

SEQ ID NO: 196907 - DNA, 143 bp, Homo sapiens
ccaagcaggacaccatgctgaaggccatgttcagcgggcgcatggaagtgctcaccgacagtgaagagttacactgttagaccttatgatagccaagataacgagtgatgagccactcaccaaggatgacatccctgtgtttt

SEQ ID NO: 196908 - DNA, 75 bp, Homo sapiens
tgtgatgttaaattcaaaaactacctcatccccaaggtgatgagacaaaccatgcttctgccacatcaacacagg

SEQ ID NO: 196909 - DNA, 90 bp, Homo sapiens
catcttgacatttccgtggcaaccaaagacgggcgcctatcagtacacaataaggatggcctctccagaggagaagtgtcaacaagtctt

SEQ ID NO: 196910 - DNA, 100 bp, Homo sapiens
tccccgccagtcagaagttgagatcaaccagatggcaacagcaccagattctcagagattaaagctattaagagaagtagctggtactagagtgtatgac

SEQ ID NO: 196911 - DNA, 100 bp, Homo sapiens
tgaagacttgctagttaggattttattactggcagcatgtatatcttttgtccctatcactgttcagtccatcgtcattcagtctctaaataaaacgctc

SEQ ID NO: 196912 - DNA, 75 bp, Homo sapiens
tactggggccagggaaccctggtcaccgtctcctcaggaggtgcgggagacgcggcggcggcacgagcggcgcct

SEQ ID NO: 196913 - DNA, 83 bp, Homo sapiens
ccgcagtatcatgctggccaagaagatcatcattaaggacggaggcacggcataagggccatgtgttctgaaattattttgag

SEQ ID NO: 196914 - DNA, 96 bp, Homo sapiens
tatatgtcccgactgaggatgcattgacaagatatctaaagtcacctctcctgtgttggtcattcatggtacagaggatgaggtcatcgatttctc

SEQ ID NO: 196915 - DNA, 82 bp, Homo sapiens
cgcccgcgctcccaggctccgggtgctcttacagcctgttccaagtgtggcttaatccgtctccaccaccagatctttctcc

SEQ ID NO: 196916 - DNA, 90 bp, Homo sapiens
cggaaagcatgttgtggctgttccaatcgctcctgtttgtcttctgctttggcccaggatgactttgacaacgatgtggatgctctgctg

SEQ ID NO: 196917 - DNA, 51 bp, Homo sapiens
cagggagggacccaccgtagagactaagatgatgaacaacatgggtggtga

SEQ ID NO: 196918 - DNA, 96 bp, Homo sapiens
caccccacaaccgaggcctcaacaacaaatgcttcgatgactgcatgtgtgtggaaggggctgcattgtattctcaggctcctatgcctgggccaa

SEQ ID NO: 196919 - DNA, 75 bp, Homo sapiens
agttccacagctccctgtccacactccccaaggtcagaatggcggcagtggagcatcgtcattcttcaggattgc

SEQ ID NO: 196920 - DNA, 49 bp, Homo sapiens
gggaatttctcctggggctcagagtggccaagaccagcttcaagtctcc

SEQ ID NO: 196921 - DNA, 96 bp, Homo sapiens
tgctctctggtgatcaagatacaggtaacctggatggagaggaccatgccgcagagcgaacggtggaggatgttttccttcgcaagttcatgtggg

SEQ ID NO: 196922 - DNA, 105 bp, Homo sapiens
gagagcccagtgggaggtggagcgggcggagctgcagacatgaagaccctgttaccagtaagcaagccagaaattcggagttattttccagaaagctggttgtgg

SEQ ID NO: 196923 - DNA, 96 bp, Homo sapiens
gggacatgtcagcaggggacgagaatgcatgacctaaaagatttaatccagagactgacttcactatagaacccacagttgtatcaatggttgggg

SEQ ID NO: 196924 - DNA, 100 bp, Homo sapiens
gcagtacgcggggacccggctgcggtggctgcgggactgacgaaggaccattcttagtggcactggggaaatcttggcacccagaagaattcaactgcgc

SEQ ID NO: 196925 - DNA, 98 bp, Homo sapiens
ttgaagctgagcaatatttctcggagcagtgaggagaatgaataccttccaagaccagagtggcagctccagtaatagagaaccccttttgaggtgta

SEQ ID NO: 196926 - DNA, 80 bp, Homo sapiens
agcggagcgcctcccgggacaggcgacgacgcagtttgcactctataagaagatgacccaggcggccatcctgatccaga

SEQ ID NO: 196927 - DNA, 87 bp, Homo sapiens
gttcaagataaagtgattttttgcctttgttgattaactggacaaattcagacaagttggatggcttgaggactggtactaaaagga

SEQ ID NO: 196928 - DNA, 83 bp, Homo sapiens
cgtcccctgcaccatgagctggggcaccgagctctgggtgccagaaccctgtggagcatcatgaactgggaagagtagctgag

SEQ ID NO: 196929 - DNA, 83 bp, Homo sapiens
aaatgggaaggacaggcagagctaaacaagggagtggagcttggtttcgggatctcggtgctgcagacggcgagacctcctgc

SEQ ID NO: 196930 - DNA, 82 bp, Homo sapiens
cccagagccccgcgtttcagccctagggaaggttatggaaacaaaggacatgctttacatcgtcactgaatttgctaaaaat

SEQ ID NO: 196931 - DNA, 95 bp, Homo sapiens
ctttcagagaagatccttgggctccaggtccagcaggcggagcactgttcatggtcctacggcttctacctaattcaccttcaaggaaagcaggg

SEQ ID NO: 196932 - DNA, 83 bp, Homo sapiens
caagaaccaaccctgccagcacctggaccttggacattcagacttcagaatggcttaactggcatgggctgagccccttgggc

SEQ ID NO: 196933 - DNA, 80 bp, Homo sapiens
agaaaagcgagaccgcgtgcgaggaccggtgacagagttagtccttgataattgcctgtgtgtcaatggggaaattgaag

SEQ ID NO: 196934 - DNA, 73 bp, Homo sapiens
aagacagagggttttcttttgagatgttccaacagtatccgaggatgacatatcctcctctacatggtcccat

SEQ ID NO: 196935 - DNA, 96 bp, Homo sapiens
ccaaacttgtattcatccagaatcatatgacatagcaatgagatccaggatgagaagactgataaaagaagaagctagctgaacagctgtaaaatg

SEQ ID NO: 196936 - DNA, 115 bp, Homo sapiens
atcaacaccaggactacagtaaggctgaaatcattgaagtgcttggagtgcagaactgaaagaggatgcttcatttctaaaccagatgtgatttcctcattggagcaaggaaaag

SEQ ID NO: 196937 - DNA, 100 bp, Homo sapiens
ctgaagaagataacaatcaagatgaatatgaccctatggaagcagaagaagctgaggatgaagaagatgaacaatatgatgcgtttgtgaagtttacgca

SEQ ID NO: 196938 - DNA, 100 bp, Homo sapiens
ctggttctggggctgggattggaactgtgtttgggagcctcatcattggttatgccagaccaagatcactccatggatgaaatgacagctgtggtgaaaa

SEQ ID NO: 196939 - DNA, 100 bp, Homo sapiens
ctcctgtacattctccaggatctcattacccccatggaggtgatgcgggcaagggtctaaaattcccaggactccacagctttgcaccagataagcctgg

SEQ ID NO: 196940 - DNA, 90 bp, Homo sapiens
ccttccagaaacctttgccaaagctgcagcaaaaaattattcctgatcaggaccaactgatggcaatagcactagagtgcatctatacct

SEQ ID NO: 196941 - DNA, 100 bp, Homo sapiens
atcccagcactttgggatgctgaggtggcacaggaggcatggcaaaaccacaaacggcggaacgattctgtgatcgtggacactttccacggcctcttca

SEQ ID NO: 196942 - DNA, 98 bp, Homo sapiens
cgaaaggcagccgcggatcgccgcgctcagcgacaaacaagccctgggcagtgacggggttcgggtgaccatggagagtgcgctcaccgcccgtgacc

SEQ ID NO: 196943 - DNA, 116 bp, Homo sapiens
tggcttcagacagcatatttgagtcatttccttcgtacccacagtgcttcatgagaggaagccttatcagttgtgagtgaggaccagtcgttgtttgagtgtgcctacggaacgcc

SEQ ID NO: 196944 - DNA, 100 bp, Homo sapiens
tgaaggggcccttctcggtggaggccgacccatccaggacaagatcgcagaggaaggtgggcggcgggagtgcccagccgtgtgacagcatcgttgtggc

SEQ ID NO: 196945 - DNA, 76 bp, Homo sapiens
cagcgtggccctgctggaggcctcgctgaggaacgacgccgaggaaggtactaggttttgacaagcttgcatcatg

SEQ ID NO: 196946 - DNA, 50 bp, Homo sapiens
ccggcaggttgggaggagcggccgaagagtgatcagcagctggactgtgc

SEQ ID NO: 196947 - DNA, 97 bp, Homo sapiens
acatggagaatgcacttgcttctattggaggtttctgctgtggcaggtcttttgtaattgaccatcaggcagcagaagatgtcgttttcattggacc

SEQ ID NO: 196948 - DNA, 100 bp, Homo sapiens
cagctctcagagccctttcctgtccttctaattacagcggcgggggcagtgcgcgcttcgggacgcaattggaaacgctgtggaaaatctctgttctcac

SEQ ID NO: 196949 - DNA, 90 bp, Homo sapiens
cgactatgaagctgcttctgatttttataggaagggagttgatttactcctagaaggtgttcaaggtgtcagctgtgatgcatgtttaaa

SEQ ID NO: 196950 - DNA, 76 bp, Homo sapiens
ttcgtctcttacgtctgcggaagtgcagctgcctcagttcttagcgcaggtttctggtcctcataccgtgtggttg

SEQ ID NO: 196951 - DNA, 98 bp, Homo sapiens
tgctgttaactggattgagtccagctcttgggatgttcgcctattgcgggaggagctacagctgctgcaggagcagggctcctatgtgggggaagtag

SEQ ID NO: 196952 - DNA, 100 bp, Homo sapiens
ctcatcgccgagctgggcatcctcatcgcctccctcgacatggtggcccccatcttatccataatcatgcagacatttgttacacagcagtggaaacaga

SEQ ID NO: 196953 - DNA, 75 bp, Homo sapiens
ttataaactgcctggccgaatcagccttttcacgctcaaggtgaggatgcagtgtccaaggcaccatcttgaact

SEQ ID NO: 196954 - DNA, 75 bp, Homo sapiens
tatcaagtcatattatacagtgcgacagctagaattggaaaaccttacaaaagcatgtacctacatcagatctaa

SEQ ID NO: 196955 - DNA, 90 bp, Homo sapiens
gggacagagtcttctgggtctctctgcctgaggccctggagggagagaagggtgttcagacttacatctcttggatatgttgaccccaac

SEQ ID NO: 196956 - DNA, 95 bp, Homo sapiens
aaatgccttgaattctactaattttgatgagatttgtttagtgaatgaccctaggccccagcacaagtacaacaaactttacacagtggaatact

SEQ ID NO: 196957 - DNA, 100 bp, Homo sapiens
gacggcggcagcagcggcattcaggtactggctattctggtcaacatttttggaggaatcatgcgctgtgatgttattgcacagggtatagtcatggcag

SEQ ID NO: 196958 - DNA, 75 bp, Homo sapiens
gttttgaggatgaccccttcttctcagtatgaagatggtgatctgtcatcatggatcaacagggaaaggtttcag

SEQ ID NO: 196959 - DNA, 97 bp, Homo sapiens
gccgggggacccgcccgccatggccaccaaggctccagatggaccctgggaaggacaaagagggggtgccccagccctcagggccgccagcaaggaa

SEQ ID NO: 196960 - DNA, 100 bp, Homo sapiens
ctcggatcctagccctcgtgcctccatggactcgagtgtaccgagtacagagaatcttgacaaaacttttggaagtgtcagatgatccccaagtcttagc

SEQ ID NO: 196961 - DNA, 83 bp, Homo sapiens
caaaaaaatataataaggctgagtgcggagccaagcactcaggttgaatcagaaaataaccaagaagaacagaaacaggtgcg

SEQ ID NO: 196962 - DNA, 83 bp, Homo sapiens
tcaagacatttcttcggcattctgcaacagaactcccccactggaaaggattctgaaagaaatgaagtcagccctcagaaatg

SEQ ID NO: 196963 - DNA, 51 bp, Homo sapiens
gccctggctttttacctagcaaaggccagctaaataaagacatgacctatg

SEQ ID NO: 196964 - DNA, 100 bp, Homo sapiens
cccgtggctatgccttcatcgagtacgaacacgagcgagacatgcacttgttctaagaacggaagcatctgggctggatggaatttagcatcaagcagag

SEQ ID NO: 196965 - DNA, 97 bp, Homo sapiens
ggcggcggaggctgccatggacgacgaggaggagacgtaccggctctggaaaatccgcaagaccatcatgcagccaggatggtctcgatctcctgac

SEQ ID NO: 196966 - DNA, 98 bp, Homo sapiens
gcagatcctgacctctctgatgagatggatcgcccgtggaccgggagcccgtggaccgggagccggtggtgtgccaccccgacctggaggagcggctg

SEQ ID NO: 196967 - DNA, 100 bp, Homo sapiens
gctgcctgccgcctggtggaggctgtgctctcaggagagggctgtgggacagatgatgtctaccatgttctacccactggtcacctttgtcctcctcctc

SEQ ID NO: 196968 - DNA, 123 bp, Homo sapiens
ttcgacacactgagggcggcgcgatgggagacgagatggatgccatgattcccgagcgggagatgaagacaacacaggcagttctacataccggccaccccctcggacccgggaggtgctgat

SEQ ID NO: 196969 - DNA, 90 bp, Homo sapiens
ggaagcaagcagttcagaagagccaaggaataaacatgcaatgaacccaaaagggtgtacaaaggctacatggatgacccgaggaacacg

SEQ ID NO: 196970 - DNA, 82 bp, Homo sapiens
tttatatcgaagatcctttacaaccagaatggaacaaaagtgggacttttaaaatgttgccctgtaagaagagaagaactac

SEQ ID NO: 196971 - DNA, 101 bp, Homo sapiens
aaaggttctatgaaaataaaaaagaattcagctcctttacctggtgaacagcctttacaattgtttgtggctaatccaaaaatgtgattttcccattatga

SEQ ID NO: 196972 - DNA, 100 bp, Homo sapiens
ggttcgtcgcctccttgcccgtgaccgtcgctagaactcagttgtgcgttgcggccagtcgccactgctattgggaaaatgaggtacgttagtgttcgcg

SEQ ID NO: 196973 - DNA, 75 bp, Homo sapiens
ggattccaagtaactcttatttggtggagattctggacgcaaagacaagggagaagctgtgtttcttggacaagg

SEQ ID NO: 196974 - DNA, 82 bp, Homo sapiens
agagctttcacgaaggcaccgacgtcatcatgctgaccaccaatcagatccgtaaggccctgggcagtgacggggttcgggt

SEQ ID NO: 196975 - DNA, 51 bp, Homo sapiens
ggaatatatcctgactgattgagttccttaacctccaggatgaaaatcagc

SEQ ID NO: 196976 - DNA, 83 bp, Homo sapiens
ctcgcccagctcgcccagcgtccgccgcgcctcggccaagcaaaatgatgcttcaacacccaggccaggtctctgcctcggaa

SEQ ID NO: 196977 - DNA, 146 bp, Homo sapiens
acgtagggaccacatcaaagacagctttcacagtttgcgggactcagtcccatcactccaaggagagaagacatggaaggtctttaatgtaactttaaatggttcaccaaaggatgctctaatggatgacagcgatactcctacat

SEQ ID NO: 196978 - DNA, 113 bp, Homo sapiens
gcggcggcagcggcagcggaagatggtgttgctgagagtgttaattctgctcctctcctgggcggcggggatgggaggcctccccatggccacccatggaccagtcggcattc

SEQ ID NO: 196979 - DNA, 100 bp, Homo sapiens
acgggcagttgcagtgttggagctaaaaaaaatatgtcgtaactgcaagtgtggccaagaagagcatgatgtcctcttgagcaatgaagaggatcgaaaa

SEQ ID NO: 196980 - DNA, 75 bp, Homo sapiens
tccacactgcaatgtttttgtggaacatgcaatggatggtgtgccttttatgatttcagagaagttttcttgtgt

SEQ ID NO: 196981 - DNA, 75 bp, Homo sapiens
tgaagagattgatcaattcaatgatgatacatttgggtcaggtgcagttgacggcggagactggctgagtggaaa

SEQ ID NO: 196982 - DNA, 100 bp, Homo sapiens
ttctccgtccctttccagggagggaacaaagcccacagcaccggtctatcatatgcaagtcacacggttggtttcacgccaccaacttcactgactagag

SEQ ID NO: 196983 - DNA, 100 bp, Homo sapiens
ggatttttggcattgagaccttctttcagtgtaaacaggaacatcgataagtagtgtaaaaacttgcacaatgaaatccgaagccaaggatggagaggag

SEQ ID NO: 196984 - DNA, 51 bp, Homo sapiens
cggcttctggttctcacttgtcggggatggtggatccaggagagaagatta

SEQ ID NO: 196985 - DNA, 75 bp, Homo sapiens
tcactgcctgcgcagctccggccgcctggctccccatactagtcgccggagagcgacttgcagttgtggaggtac

SEQ ID NO: 196986 - DNA, 100 bp, Homo sapiens
cgacggggcggccgggggctcagagatccaagtgcgcgccctggcgggtccggaccaaggcgaggccttcttgggcagctttgtggccagcgggatgggg

SEQ ID NO: 196987 - DNA, 80 bp, Homo sapiens
acccggttccccggcccacagtgggggtgtgcaaacccgagagaactgggacgaatgccttagtttccactttccagcct

SEQ ID NO: 196988 - DNA, 100 bp, Homo sapiens
cccgaggcgaggaggagcgctggcgcttgctgcccttgaatttcctccaaagaaactatttggaaataaggatgaacgtgtgattgctgagagacgaagt

SEQ ID NO: 196989 - DNA, 75 bp, Homo sapiens
ccaagttatgcagccttaaacgacttgttctctatcgaacaaaagtagaggtgatggtgtttgtacatgctcgaa

SEQ ID NO: 196990 - DNA, 90 bp, Homo sapiens
gttgcggagactccaggccgcttccagggcggggttggtgccatctacatccgtcgccggccccgtgtgcgtgtggaggccctgcagagt

SEQ ID NO: 196991 - DNA, 75 bp, Homo sapiens
tcactatctcttctatactggcaaacagtcatactattcattaatgcatgaaacaggaagagcgagtacagcaag

SEQ ID NO: 196992 - DNA, 98 bp, Homo sapiens
cgagccggagcgccagctcagcgtgcccatcccggggggcagcaacggcgacatccagcaagtttcctgttttccagcacccaacataacttgtaagg

SEQ ID NO: 196993 - DNA, 74 bp, Homo sapiens
cttacgtctgcggaagtgcagctgcctcagttcttagcgcaggccaaagaatcctgggagatggataccaaaga

SEQ ID NO: 196994 - DNA, 82 bp, Homo sapiens
ggacggtcggactcccgcggcgggaggagcctgttcccctgagacaggggcaagtgtccgagtggtgaatcagctacttaca

SEQ ID NO: 196995 - DNA, 83 bp, Homo sapiens
gacggggttagcggagcaatgcgcaggaataaggaagcgacctgcaaccgacggtcacagaagatgtgaattcaagtatcaag

SEQ ID NO: 196996 - DNA, 126 bp, Homo sapiens
gaagaaaattttccttgacctttaggtgcttttatattcatctcaaaaacaaaattctgaactcaggacttggcaagtgattttctatgatagcgactggaaccccactgtggaccagcaggccat

SEQ ID NO: 196997 - DNA, 97 bp, Homo sapiens
ggatagcctttcacttattcatctgtccagcatgactcatccccgggagtgttgatgtgttttatggaccatgtgctgctatgtatgcctgaagaag

SEQ ID NO: 196998 - DNA, 90 bp, Homo sapiens
cgggcctgtgctggccgtggtcttcataatctgcattgtcattgctatcctgctctacaagaagtggctgccacactcaacaatttggct

SEQ ID NO: 196999 - DNA, 100 bp, Homo sapiens
cccaggcctgcgtccgagtctccgccgctgcgggcccgctccgacgcggaaggagccccgcggcctaagcgcagcgtctccgcccttggctgagactggc

SEQ ID NO: 197000 - DNA, 100 bp, Homo sapiens
tgtcactgcgcctcccgctgccgacgccgcctggacggccgcactctccctgcccgagacccgatcttttatgacctagtgcggcaaattaacagaaaaa

SEQ ID NO: 197001 - DNA, 100 bp, Homo sapiens
gagcactttctgcggaaccccgaattacatcgcccccgaaatcctgcggggagaggagtacgggtggatgtgaacactgaccggaagatcagtgccaagg

SEQ ID NO: 197002 - DNA, 75 bp, Homo sapiens
gcgacgctctctctgaccgtgaattcaggagaccctccgctagaatacagattctgttcatcttgctctgaaatt

SEQ ID NO: 197003 - DNA, 83 bp, Homo sapiens
tcccctgcgtcccgccaccggccgcttctgtcctcggtgtggacactgccagcggctgcagccgacttggaatgacctgggag

SEQ ID NO: 197004 - DNA, 100 bp, Homo sapiens
gcctccataggggagagggaaaagtgcggctcctacctggagaaggattttgacaccctgaaggtggaggaggaactgcaggagcaagacttcttggacc

SEQ ID NO: 197005 - DNA, 90 bp, Homo sapiens
ggaggctcactccgatttaaggtgcccgagtccacgctgatggactgccgtagacgaggaaatagccctgtccaggagttcactgtgcct

SEQ ID NO: 197006 - DNA, 50 bp, Homo sapiens
gtcgcctctctttcagcagttacccaggaatatacagatgttgccacagg

SEQ ID NO: 197007 - DNA, 88 bp, Homo sapiens
cacaagtggattggtaacccagctcctgagagagctgactggtgaggatgtgttggtcagattgttgaacagataaatacgaaactgc

SEQ ID NO: 197008 - DNA, 83 bp, Homo sapiens
cagccgcttcctccagggcaagccccggctgagcctcaaggttatcagtgagctgaatggaaaaaacattgaagacgtcattg

SEQ ID NO: 197009 - DNA, 102 bp, Homo sapiens
gccgtccttctccactttcgccagcccgtgccgcgagcgcggcctgcaggagatctctgttgaggagctggcgcggaatctggtcatcaaggtcaacaggga

SEQ ID NO: 197010 - DNA, 80 bp, Homo sapiens
ccctcggacgtagcccggcttgtattgggaatctgaacctgtgatgttaagaaatcagtaaatattaaaaagaagatgga

SEQ ID NO: 197011 - DNA, 83 bp, Homo sapiens
ccgatttaaagctgagctgcgaggaaaatggcggcgggagactaatagggatgccaaaggaaaaatatgatcctccagatcct

SEQ ID NO: 197012 - DNA, 74 bp, Homo sapiens
tatgtttcacccgtctgaaaagattcctcatttgatgccccctaaaaagggaggtgatggaattaaaccacccc

SEQ ID NO: 197013 - DNA, 100 bp, Homo sapiens
gctttgagtaacattgccagagaggtgactctgacatcattagaagcatgccagaacagactggtgaaaagtaaaccttttcacctacaaaatttcacct

SEQ ID NO: 197014 - DNA, 50 bp, Homo sapiens
cctcccaagtggctgggattacaggtggaggctccaacccattccagcac

SEQ ID NO: 197015 - DNA, 100 bp, Homo sapiens
tggactgttgcgggccccgggacctgggctgggaacccgcggtggagcgggacacgaacgtggagtgtggccatctggggccgtgtggtatttgccactc

SEQ ID NO: 197016 - DNA, 100 bp, Homo sapiens
ggctctggagaaacatgtagatttgagagagaacgacaggcttttacactctgatcgagatcctattccagatgttcctgcagtatactttgtaatgcca

SEQ ID NO: 197017 - DNA, 100 bp, Homo sapiens
cgctccgctcgtcccgctcgtcatggcctacccgggatacggaggagggggagatgcagttaaagacttgatgcttcgctttctgggtgaaaaagctgca

SEQ ID NO: 197018 - DNA, 80 bp, Homo sapiens
gtagatatcagtttgtataacacattggcagctgaaaaagttggatgaagatagtttaaccaaacaaccagaagaagtat

SEQ ID NO: 197019 - DNA, 100 bp, Homo sapiens
gtggatcatcaaatccaactatcaaggcctcccagtacgttgtgtgaagagtatcattcgacagttaatgaaggagttcccccttctgagtatgttcaat

SEQ ID NO: 197020 - DNA, 98 bp, Homo sapiens
cacacaggaggcaccttggataagctggagtctattcctggattcaatgtcatccagagcccagagcagaaaccagcctggacaccaagtctgtgtca

SEQ ID NO: 197021 - DNA, 83 bp, Homo sapiens
cggcgtgcggcctagcgtctcagagctcccagctcctccagcagccgacaggaggcccgtcaagatgcaggcaggcattgcca

SEQ ID NO: 197022 - DNA, 90 bp, Homo sapiens
aaagtaccaagaagtggaagaagaccaagacccatcatgccccaggagtctcccaaagggaagaggaagttggatttgaaccaagaagaa

SEQ ID NO: 197023 - DNA, 51 bp, Homo sapiens
agcagaagttagcgcttctctctcgccccatctgctttgatatgattgaag

SEQ ID NO: 197024 - DNA, 51 bp, Homo sapiens
ggaccatgctgggccggagcctccgagaaattgattataccggaacagagc

SEQ ID NO: 197025 - DNA, 75 bp, Homo sapiens
aagaaaaacattgtttgaggattcctttcaacagcacatctactttccaaaccatttgagagccttaagttggag

SEQ ID NO: 197026 - DNA, 97 bp, Homo sapiens
ggaaaacctggccctcttcaatttctgacaaaaggtttggtgcacctcgatttggaggaagtagggcagggcccttatctggaaagaagtttggaaa

SEQ ID NO: 197027 - DNA, 90 bp, Homo sapiens
ccggcgacgcgttgtcttggttaacaacattctacagaatgctcaggtcttgggctggcacgaagagctgcccggccagagcatcccggc

SEQ ID NO: 197028 - DNA, 50 bp, Homo sapiens
ttagtaagaagaattccagtcttataaaatgtttgagacggaggcagatg

SEQ ID NO: 197029 - DNA, 98 bp, Homo sapiens
cggaggcagaggtggaggcgctttgaaaggtgttgtcaaagtggattatggagatgtgtcagtcagaaaaacactaagagaaaatctgaagtgtaagc

SEQ ID NO: 197030 - DNA, 74 bp, Homo sapiens
gtttgggattacctttttggaaaagaaatgtatcagggtggagagattcaaccagttagcgtgaaagttggaga

SEQ ID NO: 197031 - DNA, 100 bp, Homo sapiens
actgggtgtccaactacaacgccctgcgggctgctgccggcatccagccgccagtttggcctcagccagtttccttccaaaatacttcagttccaagtgg

SEQ ID NO: 197032 - DNA, 75 bp, Homo sapiens
atcattcattacagactattttcaggtgagggagttcaatggtcagcactttattttggaggaagcaattacagg

SEQ ID NO: 197033 - DNA, 50 bp, Homo sapiens
agcgagcgggagaagcggggtcaaggagttctgggaaatcgttcattcat

SEQ ID NO: 197034 - DNA, 83 bp, Homo sapiens
ctggaatgcatccaagagaatccctcaacatgctgaatgaactctggaagcccagccagggacaatgcaccttcacagagatt

SEQ ID NO: 197035 - DNA, 74 bp, Homo sapiens
aagaattcaagaagtgagttgctgtttgctccataggcttacattaggtgctggagaatctggtaaaagcacca

SEQ ID NO: 197036 - DNA, 83 bp, Homo sapiens
gaatggagtcgccttctgcctggtcgggatcccgccccgcccggagccccggcccccacagccggtggctgctggcagcggaa

SEQ ID NO: 197037 - DNA, 82 bp, Homo sapiens
gaaggaggggtatgagccacacatccccgaccacttgcggcctgagtatggagcatcagatccatgctgctgctgactcgga

SEQ ID NO: 197038 - DNA, 100 bp, Homo sapiens
tttaaagaaatggtctatagtctctttaaggtaaaggagatcttcaggaagtcacctttcctggtaccaaagggcagtgttagcatcatggatggatccg

SEQ ID NO: 197039 - DNA, 90 bp, Homo sapiens
accaaatccaagaccagtttaatgaccttgttatcagtgatggctcttctctggaagatcttgtggcatccctgagtgacagcaatgtgg

SEQ ID NO: 197040 - DNA, 75 bp, Homo sapiens
attctcccagacatggggaacagggtcacagctctcacccagtgccgtggaggtcccagcccccgctgcggttct

SEQ ID NO: 197041 - DNA, 100 bp, Homo sapiens
aacatggcgttgctggtgcgagtccttgacacagcattgttggttttgccatgtactattttacctatgacccgtggattggcaagttattgtatcttga

SEQ ID NO: 197042 - DNA, 82 bp, Homo sapiens
cgcagacgcgggcgagctgcggctcggacgccagcggacacgcgggcgagcactgtgctcacctggggtgctgcaaactgtg

SEQ ID NO: 197043 - DNA, 90 bp, Homo sapiens
gcgcaggaccggccgcagtgccacttcgacatcgagatcaaccgggagccgggtgtgatccctcacatccacaaatctctgattggaaag

SEQ ID NO: 197044 - DNA, 106 bp, Homo sapiens
tgctgccgctgccgccctgagtcactgcctgcgcagctccggccgcctggctccccatactagtcgccggtaagaatgattgatgttggctgatattggagtgctc

SEQ ID NO: 197045 - DNA, 101 bp, Homo sapiens
cctatcctcccgactctgcttaaaaccacgtggttcgatggctgccgcggctacgctgaggctctccgctcagcttgatatatggtccaaatccaactatc

SEQ ID NO: 197046 - DNA, 83 bp, Homo sapiens
gtcggcttcttggtgccttggttcatccctaagggtcctaaccggggattgggaaaatgaggtacgttagtgttcgcgatttt

SEQ ID NO: 197047 - DNA, 100 bp, Homo sapiens
aaagacggagtttccagtgaagaacttggcttaacagaacaagctatgggcacctccaggggttccagaaactttagcagttgcagtgcagaggactttg

SEQ ID NO: 197048 - DNA, 50 bp, Homo sapiens
cgcgaagtcatggggctctgtcgggaagtctccctctccctctctttcca

SEQ ID NO: 197049 - DNA, 88 bp, Homo sapiens
ggcgagatatcaagttcaaaaccagcaatttcaaggaagagaaggaacggtggatccgtgccaagtacgagcagaagctcttcctggc

SEQ ID NO: 197050 - DNA, 84 bp, Homo sapiens
aagtggagcgtgtcctgaaggagttccaccaggccgggaagcccatcgggtctcctctgagcctccggcctccataagacccaa

SEQ ID NO: 197051 - DNA, 97 bp, Homo sapiens
caaactcatctggatacatcattcttgtcacattacttacaagactgtcctgattgcctgtaatgttaagcagatgagcaaggatgctcagccctct

SEQ ID NO: 197052 - DNA, 50 bp, Homo sapiens
agacggcgcccggggaggaggaggagctctgtctgatccgcttccacccc

SEQ ID NO: 197053 - DNA, 120 bp, Homo sapiens
gcaggatgatggcccagcaggtccagcagagcgaggaggccatgcagtctctagctgagatgagtgaactgagtgtggcacagaaaccagaaaaacttttggagcgctgcaagtactggc

SEQ ID NO: 197054 - DNA, 100 bp, Homo sapiens
caaagttgtctctgaccaaggaactcatttaatgaaagctgacttcatgagaccgaggatctcgttcgttgatcgatgctacatattcagcatgttagat

SEQ ID NO: 197055 - DNA, 75 bp, Homo sapiens
tctctacaggtccctcctcgttagtatagtgcacattccaccccggtcatcagacaaaggcaccctcagagctac

SEQ ID NO: 197056 - DNA, 100 bp, Homo sapiens
tttatctcaaggcctgagtagccggtaacaaacgagggttcccgggattggaccgacgcagccatggtctggagggtgagcgacctgcgagactcacaag

SEQ ID NO: 197057 - DNA, 100 bp, Homo sapiens
ccatggatgcctgcatcaacctcggcctgttggaggaagccttgttctatggtactcggaccatggagccatacaggttatgaagacagtatggagtttc

SEQ ID NO: 197058 - DNA, 100 bp, Homo sapiens
gccgtgatctccagcgccggcctcctcagtgcgaagaagctgcagccgcacctggccaaggatctccaagaaggagaagcttctctcgcagccggagcag

SEQ ID NO: 197059 - DNA, 50 bp, Homo sapiens
agagagactattttcgttattacaagcggatactctgttttcaaggaagc

SEQ ID NO: 197060 - DNA, 100 bp, Homo sapiens
atcgaagcggatttccgattgaatgctcgaattacatctttacaagaggaggtgaagcatctcaaacataatctcgaaaaagtggaaggagaaagaaaag

SEQ ID NO: 197061 - DNA, 90 bp, Homo sapiens
cgcaggaggaagtgcgccgcgcgggacccggaggaccgtatccccagcccactgggctacgcagttgacaacacttactacaaagaggca

SEQ ID NO: 197062 - DNA, 98 bp, Homo sapiens
cctgcagagcacagtcacaggccacgtagaacgtgcccttgagactcggcacgagcaggaacggcttggcaactcttgtgaaatttcatagatctcgt

SEQ ID NO: 197063 - DNA, 98 bp, Homo sapiens
gaaagggacctgctcaagttcactcaattcacaatgacatcctttcaagaagtcccattgcagacttccaactttgcccatgtcatctttcaaaatgt

SEQ ID NO: 197064 - DNA, 83 bp, Homo sapiens
catctgcaagtttttagtcttgctcatcccactcttccttttactaggtttgtacgaagactactttatttttacaagcccag

SEQ ID NO: 197065 - DNA, 100 bp, Homo sapiens
attcccttgctgatgatattgaactcggttgcctttgaggatgtggctgtgaacttcacccaggaggagtgggctttgttggatccttcccagaagaatc

SEQ ID NO: 197066 - DNA, 108 bp, Homo sapiens
tattttttttttctctctctctctctcttaagaaaggaaaatatcccaaggactaatctgatcgggtcttccttcatgtagtggaggacatgctagaggacgaggaag

SEQ ID NO: 197067 - DNA, 95 bp, Homo sapiens
gcaggaggacttcgagctgattcagcgcatcggcagcggcacctacggcgacgtctacaagattacagtagaatgcacattccttgactatataa

SEQ ID NO: 197068 - DNA, 100 bp, Homo sapiens
tcagaattgcaagggaaattgggaccttgctgcaagaaactgcctggtaggtgaaaataatgttctgaaaatcagtgactttggaatgtctcgtcaagag

SEQ ID NO: 197069 - DNA, 100 bp, Homo sapiens
tgatgaccaagagaatgtgtcagccgatgcaccgagtccagcccaggaaaatggagagcggctagccttgatgtaccgaatgcaggttgcaaatattgac

SEQ ID NO: 197070 - DNA, 113 bp, Homo sapiens
gctgggtgtgccccagctttaccgcaaccaccgccaccagtccacggagggcatgagttgggacccctgattttagcaggatggcccaatggaatcagctacagcagcttgac

SEQ ID NO: 197071 - DNA, 100 bp, Homo sapiens
ctcttatgctcagaagaagggcagtgccattgatagggaagatgagaatgtgcctactgctcctgatcctccaagtcaacatttacgtgggcatgggaca

SEQ ID NO: 197072 - DNA, 74 bp, Homo sapiens
tcaaccatggcacctccatccgcgaagacatcctgatgctgacagacagcaccaagaagtaattgcaatttatc

SEQ ID NO: 197073 - DNA, 83 bp, Homo sapiens
ccaaggacgaccgcgaaccaaggtctcggcgcggaagatggccggcggcgtggacggccccatcgggatcccgttccccgacc

SEQ ID NO: 197074 - DNA, 100 bp, Homo sapiens
ccctattcgacagaactgatattttatattgaaatggatcctccagatgatgattattccccaccttctaagagacaaagaccaacgagccaccacagcc

SEQ ID NO: 197075 - DNA, 100 bp, Homo sapiens
ctcctttggatgacctcctggatgactggctccaggccctggagccctcagaatatggatggagagcccatacatcgtgtacatgcttcaagagatcgac

SEQ ID NO: 197076 - DNA, 51 bp, Homo sapiens
gatgggaaacccggagaccaaatccttggctcggggcccccagttcccgcc

SEQ ID NO: 197077 - DNA, 109 bp, Homo sapiens
acctctgcctccccgcagggcgccttctccctgagtggctataaccgagaatctggacgaggctagagaacagaaagaaaagagtcctccagaccagcctgcggtcccc

SEQ ID NO: 197078 - DNA, 73 bp, Homo sapiens
cacggtgcgcgtcaaggccctcttcgccatctcctatgatacttggaggacagaatatgttccagtgcctatc

SEQ ID NO: 197079 - DNA, 50 bp, Homo sapiens
acagagtcttgctctgttgtccaggctggagtacagtggcgcaatctcgg

SEQ ID NO: 197080 - DNA, 100 bp, Homo sapiens
cgacagtggagagtacaggtgccagacaaacctctccaccctcagtgacccggtgcagctagaagtccatatcggacacagcattgttggttttgccatg

SEQ ID NO: 197081 - DNA, 75 bp, Homo sapiens
gatagatccagcactgataacaggaacttggatacgattggtgttgctgttgatttgattcttctgtttcgtgaa

SEQ ID NO: 197082 - DNA, 98 bp, Homo sapiens
ctcgtccagagtctgcggacagcgcacgtccagatgacagatttgaagatctggaagaggcaaatccattctcttttagagagtttctgaagaccaag

SEQ ID NO: 197083 - DNA, 75 bp, Homo sapiens
cctcgtcgaaaggattggattggcatctttagagaccttaaagaagccaacttcgacatcaatcagctatatgac

SEQ ID NO: 197084 - DNA, 95 bp, Homo sapiens
ttttcacctcgcgtcgcgcccgggaggaaggaacgaggcaaggagctaaagcagcgtgcgttcagccctggggatgcagcagtctcggccctggc

SEQ ID NO: 197085 - DNA, 83 bp, Homo sapiens
cggagcttgtggacacttatacgcctcacttttaactttctggaacgcacccaccactgcctggctctttattgcatcagcgc

SEQ ID NO: 197086 - DNA, 100 bp, Homo sapiens
ctcctatttgaagtatttgacgaaaatagactggatcacagaagaactgcagcttcctggggagcagtttcacctccacaggcatcgcttcatactcctc

SEQ ID NO: 197087 - DNA, 90 bp, Homo sapiens
cttggagcaaagggcagtcggcggagcttcgccaaggctggcgcagtcgggactttgaacatgtcggggatcgccctcagcagactcgcc

SEQ ID NO: 197088 - DNA, 134 bp, Homo sapiens
ccggctgccgctgctgccgccgccgcctcgggtcgtggagccaggagcgacgtcaccgccatggcaggcatcaaaggtgtcccgcgatgggggcgctgcctcccctgccactgagggccgggggggtagtgaag

SEQ ID NO: 197089 - DNA, 75 bp, Homo sapiens
tagttggaataactggactcttttacactcaactaattggcatcatcacagggaaaacatatccatttcggggcg

SEQ ID NO: 197090 - DNA, 100 bp, Homo sapiens
ttggaagcagccgatccagcctgcggagcctgtggggcagcttcctccatacagtggaacagttctgtgtggcacacaggctgtggataaactacctgat

SEQ ID NO: 197091 - DNA, 88 bp, Homo sapiens
aggatcggctccgaagccgacccggcgcccctgctgggcggtcgtctgctgctgggcaaattcattcgcatcaactttgatgtcaatg

SEQ ID NO: 197092 - DNA, 100 bp, Homo sapiens
accagcatccctgcagccttctggtataccatcgtcaccatgacaacactagggagctgaagaagaagctgttcaaacgccggcgggtgttgaatcggga

SEQ ID NO: 197093 - DNA, 90 bp, Homo sapiens
acgccgagagctacacgttcacggtgccccggcgccacctggagagaggccgcgtcctgggcagagcagagcatcctggccagaacaagc

SEQ ID NO: 197094 - DNA, 87 bp, Homo sapiens
cgcccgcgcccgacggccgcagttgcttggtgttctaagaacggaagcatctgggctggatggaatttagcatcaagcagagtcccc

SEQ ID NO: 197095 - DNA, 100 bp, Homo sapiens
gcacaccctgggcacggtccacacccacagcgcccacttcaaggtggatctggatgtagcagcgattattggagccggaattggtggcacttcagcagcc

SEQ ID NO: 197096 - DNA, 75 bp, Homo sapiens
ggagcgggctcacgctgcggaggaagcggagcgccgctgggggccggaggtcattttcttctgaggaagtcattc

SEQ ID NO: 197097 - DNA, 82 bp, Homo sapiens
tctttttcagacaccctcctcaggtttggtgcacctcgatttggaggaagtagggcagggcccttatctggaaagaagtttg

SEQ ID NO: 197098 - DNA, 96 bp, Homo sapiens
acagtggaaaggaaccgttctggatcagatgaaacgactacaaagtgccatgacagaaggtggtgtggttctacgggaacctcagagaatctatga

SEQ ID NO: 197099 - DNA, 83 bp, Homo sapiens
acaatggtcaccgtctcttcagaacctgcacttgttgccaagtcttccatcttactagatgtgaaaccttgggatgatgagac

SEQ ID NO: 197100 - DNA, 75 bp, Homo sapiens
acctgacgctcgtcctcatcctggtcactagcggactcttcttcgccttcgagtcagaagacatgtcttcatcta

SEQ ID NO: 197101 - DNA, 82 bp, Homo sapiens
cagttgcagtgttggagctaaactgtgctccattgaagtgacttgtgaatcagccagtgtgatggctgcgacactggctaat

SEQ ID NO: 197102 - DNA, 100 bp, Homo sapiens
ttctgcccagctggttgtagagacgtagcaggagacatttctgggaatatggtagatggatatagagatcccagaagaatcagtgcggtttctgtggcag

SEQ ID NO: 197103 - DNA, 83 bp, Homo sapiens
gctaatcgagaaaaagtccaagaacagcatccagtggaaattgtcactgctgttccaagggcacacgcagagggatttggaat

SEQ ID NO: 197104 - DNA, 51 bp, Homo sapiens
cccagatgctggagaaggccggctgccagtccccgcccagagaagggagcc

SEQ ID NO: 197105 - DNA, 50 bp, Homo sapiens
cggccgcgctaaggttccccgttcaggaatcagagatcattgatttcttc

SEQ ID NO: 197106 - DNA, 100 bp, Homo sapiens
ggctgagcttcctggagaagaggaagatcaggatcctcatgaccagccaaagagaagaagaattaggaagcataaatcaaagaaaaaatttaaaaatccc

SEQ ID NO: 197107 - DNA, 82 bp, Homo sapiens
actgaatgagcctgaagacaaggatgtgactacaatgattgaagctcacgttgatgtcaagactaccgatggttacttgctt

SEQ ID NO: 197108 - DNA, 98 bp, Homo sapiens
ctaacgcaggtttccccgcaaatgactggtcacgcgggactgaacaccgcacaggcaggaggcatggccaagggccaccactgtacgttacaaagggc

SEQ ID NO: 197109 - DNA, 100 bp, Homo sapiens
caagtttgatactgaatttccctccgttctaacagggaagttgtgtgacttcattgagacacattacctgaatgagcaggtgaaagccatcaaagaattg

SEQ ID NO: 197110 - DNA, 90 bp, Homo sapiens
gcggaactcggccaagggaaaggtgcccaagtcggcactggcgggtcacagaaagtcgagagagccaaatgacgattgaggagaggaagc

SEQ ID NO: 197111 - DNA, 100 bp, Homo sapiens
gcggctttgaccgagaggctgctggagctcgtgtttggacgcgtccagtggtttacgtcttggatcttgcagatagactgatctcaaaagcctgtccatt

SEQ ID NO: 197112 - DNA, 75 bp, Homo sapiens
ggcctgaggcgaaggagcggccgggagcccgccgcgctggtagcggaacttgctactaccagcaccatgccctac

SEQ ID NO: 197113 - DNA, 83 bp, Homo sapiens
atccgatgtggactcagccactttgctgcactgaccagtaattaataatgcttgtgctactcaagccatagtgagtgtgttac

SEQ ID NO: 197114 - DNA, 96 bp, Homo sapiens
acggggcactgggcttcctgccatcaccgatgtgcctaggcgcatttcagttaatcagctgtgttcagcgaatacttatgaacagaaggctccagc

SEQ ID NO: 197115 - DNA, 100 bp, Homo sapiens
tttctcaaacgagagtcagcctttaacggatctaaaatgtccactgaggcacaaagagttgatgacagtccaagcactagtggaggaagttccgatggag

SEQ ID NO: 197116 - DNA, 100 bp, Homo sapiens
atcaggaaaaggatccagcttccttctgaaaaggcgatcttcctgtttgtggataagacagtcccacagtccagggaaatgatcttcattggttagcatg

SEQ ID NO: 197117 - DNA, 100 bp, Homo sapiens
cgctgacagcagccatcgaggcgagccagagcctgcagtcccacacggtagagttggctttgtgggacacagctgggcaggaagattatgatcgcctgag

SEQ ID NO: 197118 - DNA, 100 bp, Homo sapiens
aagaatgcgaatacccacccacacaagatggggtaataattcttgaagatgaacttgaaaagcttgtttgtactaaagaaacacaagaactagtgtcaga

SEQ ID NO: 197119 - DNA, 83 bp, Homo sapiens
cagctgagcccgaggctgacaaggtatgggcactaggaaaagacttcttccatcaagcttaattgttttgttattcatttaat

SEQ ID NO: 197120 - DNA, 75 bp, Homo sapiens
gcggctctagggaccccccccgcgcctgcacttagccccgcgcccgagaattttgtagccaccttggctaatggg

SEQ ID NO: 197121 - DNA, 98 bp, Homo sapiens
cctgaggcacaatgcctatgtcgcggcgtggcggtttgaccagaagctgggtaccacttaatgggcaagtttatgaacttttaactgtcttcatggac

SEQ ID NO: 197122 - DNA, 75 bp, Homo sapiens
tgctggtgctggtggagcgaaggaggactgggaggtgctggtcctagggaagctcaagtgggacctggctgctgt

SEQ ID NO: 197123 - DNA, 97 bp, Homo sapiens
ccgggatcgtgaccgagaccgtgaccgagagcgtgaccgagagcgcgaatatcgtcatcgttagaagaggatggcattccctgtggatatgctggaa

SEQ ID NO: 197124 - DNA, 96 bp, Homo sapiens
tgggcttctctgaggcggcgagagatggtcaggtctggagctcgaccgggccaggaagctatgaagcagataacccagctcctaccagaggacctc

SEQ ID NO: 197125 - DNA, 51 bp, Homo sapiens
gtctcagcgaagtggtgaaagagcatcagatcacaaaatttgtccaggata

SEQ ID NO: 197126 - DNA, 75 bp, Homo sapiens
atgggggctaaccagttagtggtgctcaacgtgtacgacatggatcacctgctgttaccagctaccacccataac

SEQ ID NO: 197127 - DNA, 80 bp, Homo sapiens
cacgagcaaataaagaattactaaaaagtttacaagctactgccctccgaatttatggcaaacaagcatgcatttaggat

SEQ ID NO: 197128 - DNA, 75 bp, Homo sapiens
acttgaaataccggatgattttggagtatccggctgctttgatgaacctgggagccattctgcacctcaatggca

SEQ ID NO: 197129 - DNA, 82 bp, Homo sapiens
tggcggccggcgcgctctgccgcgaggcgcgcgccgcgcaagtcttcttcctcaaaggtgtgagttcttgatacgaatgaaa

SEQ ID NO: 197130 - DNA, 80 bp, Homo sapiens
cggctactacaaccagagcgaggacgaggaagttcagaagcagaaggaactttccaaagctgaaatccagaaagttctaa

SEQ ID NO: 197131 - DNA, 87 bp, Homo sapiens
tgggcaccttcacctgggtctgcacgccctttctggataaaatggaccagttgctacagatgctgcaaagtacagaccccagtgatg

SEQ ID NO: 197132 - DNA, 76 bp, Homo sapiens
ggacttcaatgcccagtccccagctcgccagcgatatgatggatgatatctgtcaggagcaatttctagagctgtc

SEQ ID NO: 197133 - DNA, 90 bp, Homo sapiens
atttaattttagggtcctttatatagaagggagagtagaattcaattcgccacaatctctctctgaatcgttatttcatcaaagtgccgc

SEQ ID NO: 197134 - DNA, 100 bp, Homo sapiens
gacagggctgaggaaccatgtctccatccccgaccgccctcttctgtcttggtgcaaatatatacagagcttcataatcagcccaagaccacatagagca

SEQ ID NO: 197135 - DNA, 109 bp, Homo sapiens
ccgtcaacagcctggtcaatttgtacctgcaggcctcctacacctacctctctctgcttgtattggttggtgatggtggtactggaaaaacgaccttcgtgaaacgtca

SEQ ID NO: 197136 - DNA, 75 bp, Homo sapiens
cttgacttctccatcctcttcgactatgagtatttgaatccgaacgaagatagcagattctgtcaaccacatttc

SEQ ID NO: 197137 - DNA, 100 bp, Homo sapiens
ccgggaggcacggggggcctcctcggatgtcaccaggctgctggagaccctctcccagatggagagataccagactgtgatgactgggagagcgggctga

SEQ ID NO: 197138 - DNA, 90 bp, Homo sapiens
tgaagataggatcaagatggccatgtggcaggaacactggaactattttggggctgatgagaatcttggtccagtggctgtgagcattcg

SEQ ID NO: 197139 - DNA, 75 bp, Homo sapiens
gccgaaggaaaatgtcactgtcccattggccatattttagatagattctgttgctgttaacatttcaaacttggt

SEQ ID NO: 197140 - DNA, 80 bp, Homo sapiens
tgtgtctgtctctctcctagatcctgcccggcctgtacatcggcaacttcaaaggtggagcattttatacccctgaaact

SEQ ID NO: 197141 - DNA, 75 bp, Homo sapiens
ctgcgggcccgggccatggccgccgccgatgccgaggtcagaaagcaacattgaatgcagaagaaatggcggact

SEQ ID NO: 197142 - DNA, 100 bp, Homo sapiens
ccatcacataggggtttctgttaaggaactcgatttatatttggcatactttgtgcatgcagcaggcatgtactggcattgaaaacattgacgaagctat

SEQ ID NO: 197143 - DNA, 100 bp, Homo sapiens
tgtcggcaagaaataacatccttaagaatgaaactgcatcaacaggagagagacatggcagaaatgcaaagtgaatccagacagaaagtgaaagtacagc

SEQ ID NO: 197144 - DNA, 89 bp, Homo sapiens
cgccaggacaatggggacccgggacgacgagtacgactacctattcaaagcccagctcaacattggcaatgtgctccctgtgggcacca

SEQ ID NO: 197145 - DNA, 75 bp, Homo sapiens
gggagaaagagctgtacgatttgaggtagatgacattaatgctgataagaatatctcttctgcacagattgttgg

SEQ ID NO: 197146 - DNA, 103 bp, Homo sapiens
tccagtccgggctccacaaagggcgcggtctccgtgaggccgggtgacgctccagaatgggagacaagccaatttgggagcagattggatccagcttcattca

SEQ ID NO: 197147 - DNA, 100 bp, Homo sapiens
ggattatcttgttaacaacacgcccctcaactggctggttgccagagcagttttatctgattcaccacagctctctgaaggaaaagaaataaaattagag

SEQ ID NO: 197148 - DNA, 95 bp, Homo sapiens
cgacgcgcccggcccggagcccccagcgcagcggccgcgatggcccactgcgtgaccttggttcagctgtccatttcctgtgaccatctcattga

SEQ ID NO: 197149 - DNA, 75 bp, Homo sapiens
ctgggatttggcacctatgcgcctgcagagttagtgattggcaactttggcctcagctggaatcagcaagtaact

SEQ ID NO: 197150 - DNA, 90 bp, Homo sapiens
ccgccagcaccacctgaggatccagaaaccgccccagcgatggaagaggatcaggagctggagaggatttgaccctaaagcatggctgga

SEQ ID NO: 197151 - DNA, 75 bp, Homo sapiens
aagtaaaaattttcagaagcacatgtattataacagattaagtattggagccatgggaataaaggttcaacgtcc

SEQ ID NO: 197152 - DNA, 101 bp, Homo sapiens
cagcaagcacttcaagaaacaccaaccaaagcctgaggttcgaggctatcattgtactcaggctatcttagtttccactgctgcagcctgtggcctggaca

SEQ ID NO: 197153 - DNA, 101 bp, Homo sapiens
tgaagagggtctggaggagccttctcaagaacagaggttcttgctcaagtaccaactctatggacccaggacaggtttgtcccatgacctgctgtgaacag

SEQ ID NO: 197154 - DNA, 118 bp, Homo sapiens
cctagagtagcgacccggggggagcgcggggcgacgctggctgcagggacccggtgacagcgtgagagagacagcctggagctgttgcccaaagaattggaagtcatttagttccaac

SEQ ID NO: 197155 - DNA, 75 bp, Homo sapiens
catccgcagctccaagggcatcctggtgggagacttttcttggtctcctggtggtaacataatcgccttctgggt

SEQ ID NO: 197156 - DNA, 86 bp, Homo sapiens
tggttttgctggtgatcagatccccaaatactgctttccaaactaaagatgctcatgaagcagcaggaccggctggaggagcgaga

SEQ ID NO: 197157 - DNA, 50 bp, Homo sapiens
agacagggcacaccaaactccatctgggagactgccagactcgggaggag

SEQ ID NO: 197158 - DNA, 98 bp, Homo sapiens
tctcctcggcccctggctcctgctcctggtttgacaactttaaacgggtcttcaaggtggtagaggaaatgcggggctccctggtggacaatattcag

SEQ ID NO: 197159 - DNA, 100 bp, Homo sapiens
acaccggcgagccaagttccgcagcctggcatggcttctggggacctttacgaggtggtgattgcgggcttggccatgctttgtgcaagtatctggatga

SEQ ID NO: 197160 - DNA, 97 bp, Homo sapiens
gctgtaccaatggagcctgaagagttcggcgcagttcctggggtctccacagctgaggcagatcccagatgcagtgactggttactacctgaaccgt

SEQ ID NO: 197161 - DNA, 100 bp, Homo sapiens
tggacacttttgcttgcagttaggtcaagtggagggagttctgggaaatcgttcattcatttacagatgaacagaaaagactcttcttgcagtttacaac

SEQ ID NO: 197162 - DNA, 74 bp, Homo sapiens
gcagtgaactctttaaaacacagccacaagtatatggttatgatgacttgcagatgcttcagacaagatttcca

SEQ ID NO: 197163 - DNA, 74 bp, Homo sapiens
tgctgctcaaaatttctcttccagggacagagcagaatgggctgatatagatccggtgccgcagaatgatggcc

SEQ ID NO: 197164 - DNA, 76 bp, Homo sapiens
gggatcatcaagaaacaaatcttgaagcacctctccagacacgatgaggcgagtggtacgacagagcaagtttcgg

SEQ ID NO: 197165 - DNA, 100 bp, Homo sapiens
caggtgtgagccactgcacctggcctccttaaatgtatctttatggcctaattttcacctttgcacccagttgatatttggagttcttacaacatggcag

SEQ ID NO: 197166 - DNA, 82 bp, Homo sapiens
cttcgccttcgttgagttcgaggacccgcgacaccattcgcttttcacccaagatgatttgatgtcttataaaactctgatg

SEQ ID NO: 197167 - DNA, 82 bp, Homo sapiens
tcccctctgaggaccgaagatgagcttcctcttgcgttgacccggacgacacctataatgagaccccctacgagaaaggttt

SEQ ID NO: 197168 - DNA, 50 bp, Homo sapiens
gggatgtgaaaactctgttactgaagacttaattcagtgcacaaatgaga

SEQ ID NO: 197169 - DNA, 90 bp, Homo sapiens
aaagactgttttgcaggcagccctcggagtgaaacatggagttcttctgactgaagaggctgcagtcagttcgggaaggctgtaggaccc

SEQ ID NO: 197170 - DNA, 97 bp, Homo sapiens
cagtttgcaacatccccaggagaacacagtccctcctcctatgtctccatcctccaaatctgtgagcactccaagtgaagctggaagccaagactct

SEQ ID NO: 197171 - DNA, 87 bp, Homo sapiens
gctgcctacagaaccgtcccaaaatatggcaaagaaacctattctgaggccctttcttgctgccttgctaccaggtgggcagccagc

SEQ ID NO: 197172 - DNA, 82 bp, Homo sapiens
atccctcacgcgggcgcggatcgaccggagcagagagctggcgagcaagctatgctaagaaggaatctgatcttaatggcgc

SEQ ID NO: 197173 - DNA, 98 bp, Homo sapiens
tttcccacccagaatctttaggtaaatgaggtaactcgggaccaaatgaagatgtttatacagcaggaatttaagaaagttcagaaagtgattgctga

SEQ ID NO: 197174 - DNA, 100 bp, Homo sapiens
accgttggagtccaacctatgatgtgtcttccattctaacatccatacaggtggaacggcacatgtgtgatggggacattgttatcttcaaccggcagcc

SEQ ID NO: 197175 - DNA, 50 bp, Homo sapiens
tgacattgggactactactgagttgtggacatcggatacccaaggagacg

SEQ ID NO: 197176 - DNA, 75 bp, Homo sapiens
ctaacatgttgtacctggaaaacaatgcccagactcaatttagtgaggaaactaaatatattttgccaactttgg

SEQ ID NO: 197177 - DNA, 100 bp, Homo sapiens
cagggcccggcagctgaagggtctcgagggtctcatgttccggtgcagcgccagctgttgtgaggacagccaggcctccatgaagcaggtgcaccagtgc

SEQ ID NO: 197178 - DNA, 100 bp, Homo sapiens
cagcttatttaataacatttgagaaacacgaagaatggctaaccacctcccctaagacaaggattatatgcgtcaggcaggagaagtgacttatgcagat

SEQ ID NO: 197179 - DNA, 100 bp, Homo sapiens
aactgagtcttcaaaaagctgttcaagagttctgaagaccagctgcttctggatgatggaatgtacagtaagaccagcatccgtgtacaagatttgcaga

SEQ ID NO: 197180 - DNA, 101 bp, Homo sapiens
cggggagcttacccagcttaaagagctccacattcaggggaaccgcctcaccgttctgcccccagaactagatcctttgcacatggcctgctatcaacaat

SEQ ID NO: 197181 - DNA, 74 bp, Homo sapiens
acttggcgaggttcagactcttggagccagaagctacatgacccctaaacggaagaagcaagccatgagtatca

SEQ ID NO: 197182 - DNA, 74 bp, Homo sapiens
ttctacaaacccatttcagaccaatgccagaggagcaacagaaaacactttcctggataaaaaagaaaacattc

SEQ ID NO: 197183 - DNA, 100 bp, Homo sapiens
ctcagccctggactctaccaatgttgagctagcctttgagactgtcctgaaagtacacgggaagctctttgagaacagggattggatctagtctactcct

SEQ ID NO: 197184 - DNA, 82 bp, Homo sapiens
ctcttccagaatgcctttgcgcaggtgtagagttcggtgctcgaatgataactattgatgggaaacagataaaacttcagat

SEQ ID NO: 197185 - DNA, 101 bp, Homo sapiens
gcagcagcggctccggcagcggtagcacgagtgcgggcagcagcagccccggggcccggagagataaaccgagaaaactggtgtacaatagagccatgccc

SEQ ID NO: 197186 - DNA, 100 bp, Homo sapiens
aggccgtccagcagatggcggatgccctgcagtacctgcagaaggtctctggagacatcttcagcaggcagcgacagtgcccagggctctgatgtgtctc

SEQ ID NO: 197187 - DNA, 82 bp, Homo sapiens
agtcaggagaagccgcgggagatcatggacgcggcggaaaaacctgtttccctccaatcttgtggttgcagctttccgtacg

SEQ ID NO: 197188 - DNA, 50 bp, Homo sapiens
cgtgcagcaggatttcacctccgggttctgggccggagaaggggcgacgt

SEQ ID NO: 197189 - DNA, 75 bp, Homo sapiens
ctagtgagcacggaaaggaataagcctgtgctccagtgaaccacccagggaatgacgaggtggcgagtgaggatg

SEQ ID NO: 197190 - DNA, 100 bp, Homo sapiens
tgtttcgccacagttcctaccttatgagctcggttttcttatgcttataagagtggaacagcattccacgcctacgggaaggcaggcaagatgctggtgg

SEQ ID NO: 197191 - DNA, 101 bp, Homo sapiens
cagccagcgacgagcagggttacctggcgattggtgatccccgcagattaagtgggcagaccaacatccacctcagcaaaaacttcttcctgacgaatcgc

SEQ ID NO: 197192 - DNA, 89 bp, Homo sapiens
ggaggtctgttttgatgattctgggagatgagcacaatgcctggactccccacccggccctgtttttatgatattgatttggaccctga

SEQ ID NO: 197193 - DNA, 98 bp, Homo sapiens
ttgggaacctagctgatgataggggggttccatctcccaacttgtccatggacctccatctccgaagcagcatccctcagcttttgaaccacaaagac

SEQ ID NO: 197194 - DNA, 78 bp, Homo sapiens
gctgtggaggaagaacatgcatatttgggtccaactgtgaagccagatgataagatccacctccgacccttaagccag

SEQ ID NO: 197195 - DNA, 75 bp, Homo sapiens
ctgagactctcacagaggaccagaccctcaatatagtaacctggtctccctgtgggcaatatttagctgcaggta

SEQ ID NO: 197196 - DNA, 100 bp, Homo sapiens
aagggagggggcggagccacgtctgattgggcagaaagtggcccatgctctggcagagggactcggagtaatcgcctgcattggggagaagctagatgaa

SEQ ID NO: 197197 - DNA, 75 bp, Homo sapiens
cggggcgcgcccaccgcgccgcatccatgttcgagagaactacgatgacccgcacaaaacccctgcctccccagt

SEQ ID NO: 197198 - DNA, 96 bp, Homo sapiens
ggtgcgagtcttcggagcgaccccggcaggtgctgcgagtggctgagatgctgcggtggaggggaggccaggccccgcactgtctggctggggcac

SEQ ID NO: 197199 - DNA, 100 bp, Homo sapiens
ccaagaagaccattcagatgggatctttccggatcaatccagatggcagccagtcagtggtggagtgattcagggattggatgagtctctatggtttgtt

SEQ ID NO: 197200 - DNA, 83 bp, Homo sapiens
ctcctgcgaggcctcccgggctccgggaaaactacactggccaggtgtctcccagtctgctaaagccctaaggccatcaccat

SEQ ID NO: 197201 - DNA, 119 bp, Homo sapiens
cagcgcagtacgtttctccagagctgctcacggagaagtccgcctgtaagagccctgggcgctgcctatggcacagccaagagcggtaccggcattgcggccatgtctgtcatgcggcc

SEQ ID NO: 197202 - DNA, 83 bp, Homo sapiens
atcccccactctttccgccctaatggaggtctccagtttcgatcacccggaagttcaggctgaattctgaaggcaaacttgag

SEQ ID NO: 197203 - DNA, 90 bp, Homo sapiens
tgttcgatgtcaacaattacaaaggcaggttggctcaaaaacagaagttgctgagtgcaaggagaaattcgccgcctccaaggaccccac

SEQ ID NO: 197204 - DNA, 99 bp, Homo sapiens
gtctataagaagtagcctactgctaggcttcaggagatgcagacagacatgctgaactatctggaagtccactgaaaagcaaaagcactaggaagcctt

SEQ ID NO: 197205 - DNA, 100 bp, Homo sapiens
caggaatgcccggtgctgacggacccccggaatttatgctttctcaagatgttgaacatgagcgtctctttgacctcattcagaaaatgttggagtatga

SEQ ID NO: 197206 - DNA, 75 bp, Homo sapiens
tagaaggttggaaaatcaattcctctttggtcctagagataagataagaatgtgccttttgatgaaagaacttta

SEQ ID NO: 197207 - DNA, 83 bp, Homo sapiens
cccgagcagtggaagtcccacagaagctacagctgccagatggaggagatgtataagaaagctcatgctgctatacgagagaa

SEQ ID NO: 197208 - DNA, 48 bp, Homo sapiens
ctacacttgcgcaaatgtctccggtgtagacggggcactgccttcaga

SEQ ID NO: 197209 - DNA, 100 bp, Homo sapiens
ctaggcagcagcccagacgcggcacagagagggcctgggagcttgctgcagcttcaggtcccgagcagccccgcccaacatggacccagacccccaggcg

SEQ ID NO: 197210 - DNA, 89 bp, Homo sapiens
gcggaacatctggaggctgggaaatggttggtcaaagaaaaagtgatgtatgaaaaagaggcaaaacaacaagaagaaaagattgaaaa

SEQ ID NO: 197211 - DNA, 80 bp, Homo sapiens
tccaagacggcggtagcgcccatcgagcgggtcaagctgctgctgcagctgtccccgccctactccggaccgccccaaag

SEQ ID NO: 197212 - DNA, 75 bp, Homo sapiens
cggatgtggatatcgaaggggacgtggtagcggcggcgggggcacagccaggttgtgattccaaagaatccctat

SEQ ID NO: 197213 - DNA, 90 bp, Homo sapiens
agaccttcgttgccctctgtgccacaggcctccggtgtggctgtctctgatggtgtcatcaaggtgttcaacgacatgaaggtgcgtaag

SEQ ID NO: 197214 - DNA, 116 bp, Homo sapiens
ccaccgcttgcgcctggagctgctgcttgacacgtgggtttccaggaccagggaacagcagcccctgtcaaagggaacaggaagcagtccacggagggtgacgccctagacccacc

SEQ ID NO: 197215 - DNA, 101 bp, Homo sapiens
cacaaagatccttttttggcaagttgttacgggaatttagacttgtagcagctgaccgaaggatgagtgaccgaggaggtggcgttcctttgaggaaaatt

SEQ ID NO: 197216 - DNA, 90 bp, Homo sapiens
gccctcagcccccgcctcctcccgcactggctccaaggtgggcaaactgaccctcaagaccacagagatggagaccatctacgacctggg

SEQ ID NO: 197217 - DNA, 100 bp, Homo sapiens
atcatggcggatggccccaggtgtaagcgcagaaagcaggcgaacccgcggcgcaataacggtttaaatgtgatactggtgtagatctccttgttctaag

SEQ ID NO: 197218 - DNA, 75 bp, Homo sapiens
gttctacccctggggttgccttggcaagagcagtgcctagaaaggaccctgatgcttggtgtgacctgagtaaat

SEQ ID NO: 197219 - DNA, 75 bp, Homo sapiens
acggacaaatatgtctctgggatctttcagtagaactgcaagtatgtcgagagtaccaacgtggcaattgcaacc

SEQ ID NO: 197220 - DNA, 85 bp, Homo sapiens
ttatttgagatgagttacatcttggagacatgacaatggatgaagtccgagaatttgaacgagccactcaggaagccaccaacaa

SEQ ID NO: 197221 - DNA, 103 bp, Homo sapiens
tctacttcacaggaattgccatttttgatattcactgatggactccaaagaatcattaactcctggtagagaagaaaaccccagcagtgtgcttgctcaggag

SEQ ID NO: 197222 - DNA, 98 bp, Homo sapiens
aagctctgcgtgactgtcctgtctctcctcatgctagtagctgccttctgctctccagcgctctcagcaccaactactcccgagcccggagaggaccc

SEQ ID NO: 197223 - DNA, 101 bp, Homo sapiens
gtctacgagggccaggacaagaacccggagatgtgccgtgtgctgctgacccacgagatcatgtgcaggggcccagatcattgatctgatgatgctggtca

SEQ ID NO: 197224 - DNA, 100 bp, Homo sapiens
ttgctcttagcaggaaggacaaaactattcaacatgtggaagtattttgttatgccagggaaatgatgtcactctgaaactcaggctggaatacactggc

SEQ ID NO: 197225 - DNA, 75 bp, Homo sapiens
gcccacacctccaggcgaccggatgagaatgaagatttaaggaaacttgcagagaatgaaatcactttgtgtcaa

SEQ ID NO: 197226 - DNA, 100 bp, Homo sapiens
cccctctctggagccgagagaggccggtttcccccaccgtttggttttcctaaacaaatcctttcacagggaccgacggcacttgataatgtgacaaaaa

SEQ ID NO: 197227 - DNA, 98 bp, Homo sapiens
gaatcctcggcagataaactggactgtcctctacagaaggaagcacaaaaagggacagtcggcaacgtgttggaccttccggagcttctcagaagaca

SEQ ID NO: 197228 - DNA, 51 bp, Homo sapiens
cctcaagctggaccggcccgcgggcggtgcggcggcagcacatggagcgtt

SEQ ID NO: 197229 - DNA, 74 bp, Homo sapiens
cgagatcttcatctgtcacgccaacgtcatccgctacatcgtgtgcagcccagctcaacattggcaatgtgctc

SEQ ID NO: 197230 - DNA, 98 bp, Homo sapiens
ggagcaccatggcggagctaggagctggcggcgacggccacaggggcggcgacggcgcagtgcgaagcgaaacagatattgacggcttagagagcagt

SEQ ID NO: 197231 - DNA, 74 bp, Homo sapiens
ggctctcaacttattcccttcaattcaagtaacaggagctcagtctgaatattcttggagaaagatgctgagtg

SEQ ID NO: 197232 - DNA, 101 bp, Homo sapiens
tgcttaaaaatcaccagttactttaatgaagagacaagagagacacctccaacttcgacaaagagttcaccagacagcctgtggaactgacccccactgat

SEQ ID NO: 197233 - DNA, 144 bp, Homo sapiens
ctgctccctgttcctacatcctgggcgtcttcccaggctgtcatataactcctgagaatagtggttcttaactctgttggatggcaagcatgtggtgtttggcaaagtgaaagaaggcatgaatattgtggaggccatggagcg

SEQ ID NO: 197234 - DNA, 98 bp, Homo sapiens
cagtgagtcatcgctgacagctgaggaagtctgcatccacattgcacataaagttggtacgacccggacagcgggcacgacagcggtgccgaggatgc

SEQ ID NO: 197235 - DNA, 100 bp, Homo sapiens
tggagtatgcagctgtgatcccaagtggacaggatctgactgctcaacagggcggcgactggcggcgcgatggacctgaccgggctcctgctggacgaag

SEQ ID NO: 197236 - DNA, 50 bp, Homo sapiens
gcgggagctgcggcagctgcggcctctggacactcgcctatggggacatg

SEQ ID NO: 197237 - DNA, 71 bp, Homo sapiens
cgactggcggagcaccgccttccggcagaagctggtcagtcaaatgttaaaaatctgtaagagcctgattt

SEQ ID NO: 197238 - DNA, 75 bp, Homo sapiens
agatgatgttgtaacagtgactgggcggcgactggcggcgcgatggacctgaccgggctcctgctggacgaagaa

SEQ ID NO: 197239 - DNA, 100 bp, Homo sapiens
gggtcggccagtcatgtatcaaagactgtttgttcaacatatctacaatctcggtactacaggtactccaaagattcaggtttactcacgtcatccagca

SEQ ID NO: 197240 - DNA, 73 bp, Homo sapiens
agcagctctcgctccagaagcttcactttgggtgtccgcaatgttgccagtgtctgtctgcagattggctacc

SEQ ID NO: 197241 - DNA, 100 bp, Homo sapiens
ctgaagaagggctccctcgtgaagaacctgaaggacacactagaacatgaacgattggatgcccatcgccaaggagtatgatccactcaaagcgggcagc

SEQ ID NO: 197242 - DNA, 82 bp, Homo sapiens
agcagcgcctgttcccggggcagatccaggttcaggcgaagttcttctgtgttgtgcaggcggagctgaaccattgcaacag

SEQ ID NO: 197243 - DNA, 82 bp, Homo sapiens
agaagtcgcgtgtctaggtgagtcgcggtgggtcctcgcttgcagttcagcgaccacgctgccgcccctccctgtgtccttc

SEQ ID NO: 197244 - DNA, 100 bp, Homo sapiens
agtgaaaggcactatcgagattggaaccacagaagggaacagctcctgcccaggtctgtgggcactcagcatggatttcagtctccctgtgagtgatggg

SEQ ID NO: 197245 - DNA, 99 bp, Homo sapiens
ggaagcaccgctgaaaatttgtgaaaataaacagagttgtctttgttggaaactttttacgtgtcaataccctctcaatgaaacttttggcatatgcac

SEQ ID NO: 197246 - DNA, 100 bp, Homo sapiens
ctccagtatgttgccatctctaacctaccagctgccactttccaggagccagcaccgctctttgaccttgccatgcttgccttagatagtccagagagtg

SEQ ID NO: 197247 - DNA, 100 bp, Homo sapiens
atggatggtcaagggtgcacaatgttttgctacttgagaagatagaacatgatgacatctgcaataaaactttgaagattacagattttgggttggcgag

SEQ ID NO: 197248 - DNA, 75 bp, Homo sapiens
ggagcccctggcctgcccggacgagttcgatgacttcgtcacctatgagatcctccaggtcctattgacaatact

SEQ ID NO: 197249 - DNA, 75 bp, Homo sapiens
gcatatcagaaacataactgccatagtgaagcaacttaatcgggatatcgagggtgggctgaaaaacagcaaaca

SEQ ID NO: 197250 - DNA, 98 bp, Homo sapiens
tacatctacatctatggcaacatggatgaggatggcttttttgaaggcctgaagacggaagaagggagtgtcagaggcgccctgccagctgtgtcatc

SEQ ID NO: 197251 - DNA, 99 bp, Homo sapiens
gctcgtgctacctgccctggccctgctcagcgccagcggcactggctccgccgcccaaggttggagttgctgtgggtgagctgctgtggtctgtagcca

SEQ ID NO: 197252 - DNA, 100 bp, Homo sapiens
gccgggtctccttcctgcagatcaccgggggcgccctggaggagtccctgaagatctatgctcctctgtacttgcatggccggactcccctgcatcttgc

SEQ ID NO: 197253 - DNA, 50 bp, Homo sapiens
tgctaaaggatctctgatctgggttttgagcaaaattttggactgtgaag

SEQ ID NO: 197254 - DNA, 75 bp, Homo sapiens
acacggttaaatatacacccacccaacagtgccggtggtggtgtgcacattgagccccggtatagacagttcccc

SEQ ID NO: 197255 - DNA, 88 bp, Homo sapiens
gcccttgttcccccaaatgtctgactctgactctcggactgagaaacgcaagaactgaagcgctgcggcatggcgcgcgcctgcctcc

SEQ ID NO: 197256 - DNA, 101 bp, Homo sapiens
aatgagtgctgtagatgacatgatagcaggctgaagagatcactttaacaattggccaagcatttgacctggcatacaggaaatttctagaatcaggagga

SEQ ID NO: 197257 - DNA, 100 bp, Homo sapiens
ggaggctccgttgcctgctcccggagggagacgcgctgccgaggagaacccagcggctttgctgcaagataacatcgctgatgctgtagcttgtgcaaag

SEQ ID NO: 197258 - DNA, 100 bp, Homo sapiens
tggagggacaggtgcttcagttccatctcagtaacctggagtacgcctgtggcagcaaccttcaccagtgcaaggatgatgctgaaaggaataacaaggc

SEQ ID NO: 197259 - DNA, 75 bp, Homo sapiens
agctgtatgacattgatgtggccaaggtcaacaccctgattcggccatttgatgaccagcctgcaggcacaactg

SEQ ID NO: 197260 - DNA, 98 bp, Homo sapiens
aaatatatgttagtaaaagacatacttggctaccatgtaattcagagagtccacacaccctttgaaaggattactacagcatcccatttcccacaccc

SEQ ID NO: 197261 - DNA, 90 bp, Homo sapiens
ctctgggatccccgccgctctgtctacaacccgaggtacatcaggaacgtctctatcaagaatacaatttcagcaaggctgagggccatc

SEQ ID NO: 197262 - DNA, 82 bp, Homo sapiens
agctggctcccatcacctacccgcagggcctggcactggccaaggagattgacagagggggaagacggtggggcctccccac

SEQ ID NO: 197263 - DNA, 83 bp, Homo sapiens
gctcggagcgcgacacggagactaggtggcaggtgagaagccctaccactgcaactgggacggctgcggctggaagtttgcgc

SEQ ID NO: 197264 - DNA, 96 bp, Homo sapiens
ccaggaccgccatggggacacggcactgcatgctgctgcccgccagggcccagatgccagaagatcagctgccatgttacttgactcacaccaacc

SEQ ID NO: 197265 - DNA, 100 bp, Homo sapiens
ccaagcccgccacgccgcccagcccggccccgcccgcgccggaagagccacgccggtggaagcagggaaaggcctggagatgaggaagctggttctctcg

SEQ ID NO: 197266 - DNA, 109 bp, Homo sapiens
tctccaaagcagcccttctgcgcaggagctgaaagctccactggaataactgaagtgaagtgatggactccgatttggagagtagtaagacgtgaaaggaatacacttg

SEQ ID NO: 197267 - DNA, 101 bp, Homo sapiens
ccggcgccccgaagcgggaaaaaggctgggtgccgccgtcccccagctgcgcaaccctaggaactctcggagtcttgctctcttgcccaggctggagtgca

SEQ ID NO: 197268 - DNA, 60 bp, Homo sapiens
ggcattttggggcagaatacagagatatggaatcagtgtgtcccggcatggatatccgga

SEQ ID NO: 197269 - DNA, 99 bp, Homo sapiens
tgcgtcgtgggcaccagaaacgagactcggccaaatcctgcctcaccagcggagcgtgctttggacaccatgaattttgatgttataaagggcaagcca

SEQ ID NO: 197270 - DNA, 106 bp, Homo sapiens
gaaacatgctagaattacctggaacttcatcatcatctacttcacaggaattgccatttctggaaagggctacccctgcaaaacatgtaagatagtgctgaactcc

SEQ ID NO: 197271 - DNA, 90 bp, Homo sapiens
gtcggcggagcttcgccaaggctggcgcagtcgctgtgatgcagatccatccgccctagcaaaatatgttctggctttggtaaagaaaga

SEQ ID NO: 197272 - DNA, 75 bp, Homo sapiens
cgccactacagttcatcaacatcaactacgtccctctgaagacgaaggggaggaccaggctggcgatgaagatga

SEQ ID NO: 197273 - DNA, 83 bp, Homo sapiens
acgaggaggaggaagagtccagtgaaggggtcgggccccggctcagtggtcccaggcagctcgggtgtcggaacccccagaca

SEQ ID NO: 197274 - DNA, 101 bp, Homo sapiens
ggaacctcgtctttttattgacggtgtcttgtgtgaaaggtgatcagactctgagaatatgggatgtgaaggcagcaggagtaagaatcgtgattcctgca

SEQ ID NO: 197275 - DNA, 91 bp, Homo sapiens
aagtgaagctgtttcgggccagcgacccgctgctcagcgtcctcatgtggggggtaaaccactcggaatgtatcctgtcaggtataatgtc

SEQ ID NO: 197276 - DNA, 100 bp, Homo sapiens
gtggagcatcactgacggctatgtccccattctcggcaacaaggtcttgcagaaacagtccattgtgaccttcagcctgtgggccccgagaggggcgagg

SEQ ID NO: 197277 - DNA, 100 bp, Homo sapiens
acgaggacgagatggacctggagcccaacgatgccatggacaatattaccaggcagaaccaattctacgatacccaagtcatcaaacaagaaaacgagtc

SEQ ID NO: 197278 - DNA, 100 bp, Homo sapiens
tggatgcgtccggactcctgcaggagtagctcggagaggaggaaggagaagtcccgggatgctgcgcggtgccggcggagcaaggagacggaggtgttct

SEQ ID NO: 197279 - DNA, 83 bp, Homo sapiens
gtcaaggtggcctaccaggaggccaggggtgtcgccatgaaccaaaaacttttgctagaaaatcagcttttacgagagaaaac

SEQ ID NO: 197280 - DNA, 82 bp, Homo sapiens
cttcctgagcagagctctccgggttccccggctcgcggggcccggcgaagggcaggacatggatttgattgacatactttgg

SEQ ID NO: 197281 - DNA, 76 bp, Homo sapiens
gcaagtgggatcacctatgaagataatcccagatgcagtgactggttactacctgaaccgtgctggctttgaggcc

SEQ ID NO: 197282 - DNA, 71 bp, Homo sapiens
agaagctggcacggatggttatgctgcagtatgtaactgaggtggaagtgatagagggcaccctgcagtgc

SEQ ID NO: 197283 - DNA, 87 bp, Homo sapiens
tcgacgaacactacgagtaccgtgggtaattccagaattgattggccataccattgtcactgtattactgctcatgtcattgcactg

SEQ ID NO: 197284 - DNA, 124 bp, Homo sapiens
taagcggcgcggtagcgaaggccgccgaacctgcctggctagccggcgacttgagtgacgagtgaccagcgccatgtccagccaggtggtgggcattgagcctctctacatcaaggcagagccg

SEQ ID NO: 197285 - DNA, 90 bp, Homo sapiens
attttgaagtacaccgtggtgacattgtatcattggtgtgtgggccatgtttgaggattgccccagcattcagttctatgagtaataaat

SEQ ID NO: 197286 - DNA, 90 bp, Homo sapiens
gcctccctagtagctgggactacaggtatcactcctccttgcttcaatctctttgccctcttcgatgctcaggcccaagtctggttgccc

SEQ ID NO: 197287 - DNA, 75 bp, Homo sapiens
cagaatgtcagcatggaggctgctgggcaggtcatgagtcaccatgcttgcattggacacacactactggacttg

SEQ ID NO: 197288 - DNA, 90 bp, Homo sapiens
accactatatcagataagcttgacattacagccaagatggtgctgtcccagagacaacgagatgaactgctggagtgcagtggcgccatc

SEQ ID NO: 197289 - DNA, 100 bp, Homo sapiens
ttcacagatgatacctttgatccagaacttgcagcaacaatagggagccggcacagatgaaaaggctcttattgaaatcctggccactcggaccaatgct

SEQ ID NO: 197290 - DNA, 89 bp, Homo sapiens
gcgccgctgggcctgcaggtctctgtcgagcagcggacgccggtctctgttccgcaggatggttccagcaacagatagaaatgctttaa

SEQ ID NO: 197291 - DNA, 50 bp, Homo sapiens
gccctaatggaggtctccagtttaggggcctttacaacaactaaacggac

SEQ ID NO: 197292 - DNA, 75 bp, Homo sapiens
cctgaagaagggctccctcgtgaagaacctgaaggacacactagaacatccagtcatcaagttccaatgtgttgg

SEQ ID NO: 197293 - DNA, 83 bp, Homo sapiens
agatgggcaaagatggattgaagacaaccttgatttcagtgtggctgcctgctgtttcccggggagatcatgaaacgaggtcg

SEQ ID NO: 197294 - DNA, 90 bp, Homo sapiens
aaaatgtggtcagtgaacctatcgaaggacatgaagactaccacatgatgaacaaaatccagtctcatagcagaggagaatataatgttt

SEQ ID NO: 197295 - DNA, 100 bp, Homo sapiens
gcagacgctgcagggggcagaggaggacgaagagcgacagctggccaagctggccatcatcttcagccacatgcacgcagagctgcacgcactcttcccc

SEQ ID NO: 197296 - DNA, 100 bp, Homo sapiens
cgccttcctcaacgacgcggacatggtcatgagctttgtgaacctggataacgaaggaggcccaacttcattcaataaggagcctgacggatttatccca

SEQ ID NO: 197297 - DNA, 83 bp, Homo sapiens
ctacgataacgcgcttttgctcctcctgaagtgtctttggtccaacgttgttccagggctctctaaatacgtacagattctgc

SEQ ID NO: 197298 - DNA, 74 bp, Homo sapiens
tactctgttacagaccgatgcagtcttacagatgcagtggatgattcaacagccacacaaagcagcaacatttt

SEQ ID NO: 197299 - DNA, 82 bp, Homo sapiens
gactacagcatggtggagtcgcctctgatctgcaaagaaggagaaagcgtgcaggtcagcccaaggccaaccccactgtcac

SEQ ID NO: 197300 - DNA, 76 bp, Homo sapiens
tttgggaacaactggtcgtcttcagttaatggcaagacttgcagaggcccttagagatttgtttgattccatggat

SEQ ID NO: 197301 - DNA, 75 bp, Homo sapiens
accgacagcacagacagaatccctgctaccaggaaaagaagatctcccggagcagtgccctgaaagtgctggacc

SEQ ID NO: 197302 - DNA, 80 bp, Homo sapiens
acatgcccgctcacctgcgctgtgatgcctgcagagctgtggcttaccaggcctgtagtggtggagacacgcccagtgga

SEQ ID NO: 197303 - DNA, 74 bp, Homo sapiens
tcgcctgagctccgggggtcgtcgccccgcaggataacaacgaacttgatgcaagtgataggtttgccaaggtc

SEQ ID NO: 197304 - DNA, 100 bp, Homo sapiens
tggtcatcaaaatagctacaaaccatactaaattattccatttgcaacttatccccaacaggtggtggcagcagaggtagttatggaggaggtgatggtg

SEQ ID NO: 197305 - DNA, 51 bp, Homo sapiens
gaccattccgtatggagagccgggagcttctaagtaggacatccttagaaa

SEQ ID NO: 197306 - DNA, 75 bp, Homo sapiens
tttggagttttttgcttggggactattgacagcacccaccttggtgagagtcacaccccaaagcctctttattct

SEQ ID NO: 197307 - DNA, 83 bp, Homo sapiens
gacgggttaagattcggagagagaggtgctagtggctggacttgacctggaaagcaaaaatattttgattctggggattacaa

SEQ ID NO: 197308 - DNA, 99 bp, Homo sapiens
taggagccacctagactggatgcagagcatgatctccacaatggaagttcgaagcaagcaaaagccacgcaaaccacaggccgatctgtctgagcccta

SEQ ID NO: 197309 - DNA, 100 bp, Homo sapiens
cctgtcccatccatcctgacctgttccatctcagccccaggactcagtactgcggttgccaacactgctgccagattcttggtgccaccattgagaactc

SEQ ID NO: 197310 - DNA, 76 bp, Homo sapiens
cccagtgaagagcttcgactccaaggtgacttaagagattaaaattaatttggttgctgttggttctgaacaaata

SEQ ID NO: 197311 - DNA, 75 bp, Homo sapiens
gctctcctgccacttccggggggaggtctgcagcgctgaagacttcaaggtggacctgaaggagaagaaggagaa

SEQ ID NO: 197312 - DNA, 100 bp, Homo sapiens
ccgagaagcacagcgagtcatggccttggacaagattcgctatgagagcctgacagacccttcgaagttggacagtggtaaagagctgaaaattgacatc

SEQ ID NO: 197313 - DNA, 100 bp, Homo sapiens
gagagtgggcgagaacgtccactgcgggccggcgaaagctggcataatcaccagcaacacccgggacaataatacgggggccacctacccccacctgaac

SEQ ID NO: 197314 - DNA, 83 bp, Homo sapiens
acatgaccctcacagaaaatcccatttttcagtgaagaattttactttgagattccaagaactttccagtatttgtctttcta

SEQ ID NO: 197315 - DNA, 99 bp, Homo sapiens
cgagaactgagcctggatgatcctgaggtggagcagacatggctccttactatgaagccttgtgcaaatccctcgactggcagatagacgtggacctac

SEQ ID NO: 197316 - DNA, 75 bp, Homo sapiens
tgaagattttgaacggcttacgaaaatttgtgcaacacatcaagagtactccaaagattcaggtttactcacgtc

SEQ ID NO: 197317 - DNA, 76 bp, Homo sapiens
cccaggtgagccccatgcactgcctggacgaggaaggcgatgactcagatgggaaggcgccatcagcctccgactc

SEQ ID NO: 197318 - DNA, 83 bp, Homo sapiens
cttccccagctctgcagccacatactatccgtttgttcaggaaccaccagtgacagagcctttgaagacctcagcaaactaat

SEQ ID NO: 197319 - DNA, 75 bp, Homo sapiens
actaaacaaattcatcccagaaatctaagagattccagttcttcagacaaacaatggtccaagtctaacaggatt

SEQ ID NO: 197320 - DNA, 100 bp, Homo sapiens
caaagaaaataggaaccaatttgaaggactacaaggtggactgcttgctcagctcagtatcaacacttatggaactttatattgctgttggaatatctgg

SEQ ID NO: 197321 - DNA, 100 bp, Homo sapiens
gggcagcagcaagaaggcgtcggcggcgcagctgcggatccagaagggtgcaaaatttccaatcaaatggacagctcctgaagctgcactgtatggtcgg

SEQ ID NO: 197322 - DNA, 50 bp, Homo sapiens
cttcaacagaatgtggcaaccaggccctggccaacgtcaacattgggagc

SEQ ID NO: 197323 - DNA, 80 bp, Homo sapiens
caggacagcgccttcctcaacgacgcggacatggtcatgagctttgtgaacctgggcatcctgtcggctcacaagataat

SEQ ID NO: 197324 - DNA, 83 bp, Homo sapiens
gtggacgttcggccaagggaccaaggtggaaatcaaacttttacaggcgtttatcagaggaaatgacacaaagaagatgggag

SEQ ID NO: 197325 - DNA, 78 bp, Homo sapiens
gcagccggacatttagccgctcatcttcggtatttgacctgtccaaagacgacttgatacctctataatgtaacagaa

SEQ ID NO: 197326 - DNA, 100 bp, Homo sapiens
cctggcctctgaggactccttctatggctggacgcccgtgcactgggccgcgcatttcggcaaggacatgaccgataatagcaacaatcaactggtagta

SEQ ID NO: 197327 - DNA, 127 bp, Homo sapiens
caacttctaatggatcctcttccaaaaccacaaacttgcctacgtcagtaacagccaccaaggatgaactggagctcaccagacgggctctggagaaggagcggctacacagcccaggtgcaaccag

SEQ ID NO: 197328 - DNA, 100 bp, Homo sapiens
gaggggattcacttgtgtgcggaactcctcggaaccatgagagtttgaggagacaatggatgcactccaggctgacatcgaccagctggaggcagagaag

SEQ ID NO: 197329 - DNA, 75 bp, Homo sapiens
ggcccgaagagggctggctgcggcggtctcgctcgcagcagccgcagccatggcggggatgaagacagcctccgg

SEQ ID NO: 197330 - DNA, 100 bp, Homo sapiens
ggacgggctgtgggagctgccggtggagccggccgagcggaggcctgagtgcacccgctgcaggaattgaatgatctggcacgggaccctccagcacagt

SEQ ID NO: 197331 - DNA, 100 bp, Homo sapiens
ggaatccatgtttctggacgcggatttttggcctcatactctgttatagataaacaaggaaccctaaggactctgcaatatgaataattccctagagaac

SEQ ID NO: 197332 - DNA, 83 bp, Homo sapiens
ccgatgtcatcaagttgcaagagattccaaccttccagccccttttgaaagctgtggccacctgtcgccctgacgaattccag

SEQ ID NO: 197333 - DNA, 87 bp, Homo sapiens
tttatttgcacatggggaaggcctggtaaagtgacaaagaaacagccttggtataatagcacgttagcatcaagacgaaaacgactt

SEQ ID NO: 197334 - DNA, 96 bp, Homo sapiens
ggcgttcacacaaactggtcagcgtttccctggagaggaagaggcaagatggaagtggagaaagaggcgaaaaggatgcaagcaaaatcacaacat

SEQ ID NO: 197335 - DNA, 101 bp, Homo sapiens
ggcccgcgacccccgcacccagctccgcaggaccggcgggcgcgcgcggtgcccaggaccccacgcccaggggtggagtctgctgacagcaggcgtctagc

SEQ ID NO: 197336 - DNA, 100 bp, Homo sapiens
gtgaatcttgtagtcagaaacttgaaagagagaataaccgttgtaacatcagtcacagcatgtgtcatggagaaactccagctgggcccagagattctgc

SEQ ID NO: 197337 - DNA, 90 bp, Homo sapiens
aggtgggggctccgaagtctgcgagtgcagctgtgcacaggacggctctacatttggcctgtgccaatggtcatccagaagtagtaactc

SEQ ID NO: 197338 - DNA, 90 bp, Homo sapiens
cctccctccagcccagcctcgctagctccgcctgcgatgaagaactggtggatgtttctgcatctgtcttaccagaattgaaaagagaaa

SEQ ID NO: 197339 - DNA, 90 bp, Homo sapiens
ccgggctggtggcctcgtgctggagcccggacgggcgccacattctcaacaccacggaattccatataagaaggctgactgcacaatcac

SEQ ID NO: 197340 - DNA, 83 bp, Homo sapiens
gttcgacaagaatctgcaggacttggtccgcggcatccgtaaccacaaggaggacgagcctaagttcgaggcccaggcgcctc

SEQ ID NO: 197341 - DNA, 95 bp, Homo sapiens
agaagatctaggtctggttctataaaaggatcgaggtatttccagtaatgtgaggctacaggagatgatggcaacaatgtgccaggaacgtggag

SEQ ID NO: 197342 - DNA, 51 bp, Homo sapiens
cgtggagatccgaaggaatgaaatccgggtttatttgcaagatgggtttga

SEQ ID NO: 197343 - DNA, 51 bp, Homo sapiens
tcgaaaggattggattggcatctttagatcaagcaccacataccgacagac

SEQ ID NO: 197344 - DNA, 50 bp, Homo sapiens
cctggagctgggccaggccgtggaggtagtagattccatggatgcattag

SEQ ID NO: 197345 - DNA, 75 bp, Homo sapiens
tcacacctgaagagccacccgctggtgcccagaaatactacccgccggactttgacccatcaaagatccccaaac

SEQ ID NO: 197346 - DNA, 100 bp, Homo sapiens
acatggcacaaatccagcagggaggtccagatgaaaaagaaaagactaccgcactgaaagacttaattcagtgcacaaatgagatgaatgtgaacatccc

SEQ ID NO: 197347 - DNA, 98 bp, Homo sapiens
cgcaatctctgccagcaccttgggaagagaaagaaaatgccgaaggcactcagacaggagcccaggcttgtgtgctcgtgttctctaccacagatagg

SEQ ID NO: 197348 - DNA, 75 bp, Homo sapiens
ctggtctgcggcagccatgctgaactcgtatggagaggtgcatggctgcctcctaatcccatagtccagaggagg

SEQ ID NO: 197349 - DNA, 100 bp, Homo sapiens
atttggaagtcagaggaacgaagttcgcttcttccttcgtcatgaacgcccccctggcagggacattggccctcgggaccaaggatcacgtcatgactcc

SEQ ID NO: 197350 - DNA, 75 bp, Homo sapiens
ctggaggccaaaatctgtcatcaaattgagggtggttctcttcccaaagtggaagccaaattcatcaattatgtg

SEQ ID NO: 197351 - DNA, 100 bp, Homo sapiens
ggaagtgcagctgcctcagttcttagcgcaggtgtggccaaacgtggacaactatgagctgtacgaaaagctggagctggtcaagggccagaagcggaag

SEQ ID NO: 197352 - DNA, 110 bp, Homo sapiens
accatccaggggctccccgacatttcctcagttagccagagtcggggggctcagacatctgacgacaggatctgctcgccacccttcatggagctcacgagcctgtgcgg

SEQ ID NO: 197353 - DNA, 100 bp, Homo sapiens
gatcaatccagatggcagccagtcagtggtggagctcgttctccgaaaatggtgtgaattgattcctggggctgagtttcgatgttttgtcaaggaaaac

SEQ ID NO: 197354 - DNA, 74 bp, Homo sapiens
ctacttccatgagtttggccacgtgatgcaccagctctgctcccaggatgataatgaagataattcaaatgatg

SEQ ID NO: 197355 - DNA, 96 bp, Homo sapiens
gcaccaggagtttactagatttgttcctaaatttaagagcatattgatgagagaaggatctgcaatgctgtttctccagacaaggatgttgatggc

SEQ ID NO: 197356 - DNA, 100 bp, Homo sapiens
acaggtcttagcaagaaagaaagttcgagaaattcaagccgccattaagggtgctggtgacagctttgtgggagctctggccttctacctggcttactat

SEQ ID NO: 197357 - DNA, 50 bp, Homo sapiens
ggaccacctggaggaggtgttgaaagggtctcggaagggtgctgacctgg

SEQ ID NO: 197358 - DNA, 82 bp, Homo sapiens
agagctgcacgaagtccgaggcgccgcgagcccagatatatttttgccatcatggatcagtttggagatatattagaaggtg

SEQ ID NO: 197359 - DNA, 114 bp, Homo sapiens
cgcatcgtgaaggaatctggaggaaagctgaccaggcggcttgtgaacagtcaggtccaccttcatccgaagaggctgaatcataaatataacccagtgtcacttcccaaagac

SEQ ID NO: 197360 - DNA, 100 bp, Homo sapiens
ggagaagatggccgtccatttcactatctcttctatactggcaaacagtcatactattcattaatgcatacctgtcatttactccatcctttatagtgat

SEQ ID NO: 197361 - DNA, 75 bp, Homo sapiens
gtgcaagaggcgcaaacaagccaatcccaggaggaaaaacgactttgtgtggacagtaatgacctcacgtttccg

SEQ ID NO: 197362 - DNA, 100 bp, Homo sapiens
cgaggaggagccaagtgtggcagcagttcgtgaagtctgtgaggaggatgttggcaaaggatgaactgatgaccatacttgagaaatgtttcaaggtttt

SEQ ID NO: 197363 - DNA, 75 bp, Homo sapiens
cactccgcccggccccagccctagcgctggccgcgaccccggcgctccagaacctgggtatcaacccagcaaaca

SEQ ID NO: 197364 - DNA, 99 bp, Homo sapiens
catctcgctcggctgcgggaaatcgggctgaagcgactgagtccgcgatggaggtgcaaagttccccatcaagtggacggcccccgaggcagccctgta

SEQ ID NO: 197365 - DNA, 101 bp, Homo sapiens
ctgcagtcagtcttcccgagtgagggatttcgccgcccgctttcaggcccgtgtccaagctgaagatggaagatataaaagaagtgaaccaggcactgaag

SEQ ID NO: 197366 - DNA, 88 bp, Homo sapiens
atgcgtggctctccggcaccgacctgtgaccgcatcaagcagtcagcagctggcaccaagcgtcgggtgtttatcattgagactatgg

SEQ ID NO: 197367 - DNA, 74 bp, Homo sapiens
ttttgcggcaccgagggctcaggccagtacaggtttgcagattccgccagcagcacagcaagctctacagatga

SEQ ID NO: 197368 - DNA, 101 bp, Homo sapiens
ctccgagccttcagcagaggcggcagcctggagagtcgaagcagcagctctcgctccagaagcttcactttgttaccttatcccatatcacacaactggtc

SEQ ID NO: 197369 - DNA, 100 bp, Homo sapiens
ttcctcaatggggaaacccaaattgtagctgacgaagcattttgcaacgcagttcggagttattatgagaggctaagaatattgtacacaaagattcttg

SEQ ID NO: 197370 - DNA, 83 bp, Homo sapiens
ctccctctggaataccttgggcattgctgaatatgaaaagcctctacggcagacacatgcaggccaacccagaaccaccgaag

SEQ ID NO: 197371 - DNA, 100 bp, Homo sapiens
cttcaacactagaagatatttgctgcagcctttagttcgaagcattcagcaaacaatggcaaggcagagccaccagaaacgtacacctgattttcatgac

SEQ ID NO: 197372 - DNA, 82 bp, Homo sapiens
caaccggtcaggctggacgtgcacgcagcccggcgggaggataaagaccaccacggtatcatgatattagctggtttgacat

SEQ ID NO: 197373 - DNA, 75 bp, Homo sapiens
gtgactgagcggagcccggtgacaggatgtggtggacttgctttgtgaagagacagttcatgaacaagagtcttt

SEQ ID NO: 197374 - DNA, 100 bp, Homo sapiens
gtcaagacaagaaaatcaacaggctttcagccttgaggcaacattggatattattgagatcaaagaaatcggctggacagatgtcgggggctggaccggc

SEQ ID NO: 197375 - DNA, 97 bp, Homo sapiens
ggccgtccatcgcccctcgggccgacgccatgaagatcaaagatgccaagaaacccttcttcccaagggattgttgaagaaacttctgaagagggaa

SEQ ID NO: 197376 - DNA, 100 bp, Homo sapiens
tcgcgacgcgcccggcccggagcccccagcgcagcggccgcgaatcaagccagggaggacttcaaccaggacatcggctggtgtgtctccctcatcaccg

SEQ ID NO: 197377 - DNA, 101 bp, Homo sapiens
gcgagacgcgcagcgccggcgcccgggagacccaggaggagcccgcagtggatatgctgctgatgaaatcactcactgcatacggcctcaggacatcaagg

SEQ ID NO: 197378 - DNA, 113 bp, Homo sapiens
attaccatggcgaggagtctctgtccgggggcctggctaaggaaaccctattacctccaggttatgatgtgattgctcaagcccaatctgggactgggaaaacggccacattt

SEQ ID NO: 197379 - DNA, 82 bp, Homo sapiens
tggagcctcagttggaagcagccgatccagcctgcggagcctgtggggcagcatccgcagtgtcatgcagaagtacctggag

SEQ ID NO: 197380 - DNA, 134 bp, Homo sapiens
ctggagtctgcgaaggccgggacccggttccccggcccacagtgggggtgtgcaaacccgagagaactggatggaggagatgtataagaaagctcatgctgctatacgagagaatccagtctatgaaaagaagc

SEQ ID NO: 197381 - DNA, 100 bp, Homo sapiens
taaccagagaaaaaaaggatggagaaatatctaggacagggaacgtgctcagtcactttcaatgggcaccaggagaaaggttttggttcttggatctggc

SEQ ID NO: 197382 - DNA, 85 bp, Homo sapiens
actgacagtgaaaatgtgtgtcaagaacgagatgctgacccagacaccttctttgcgaaaaacagtttgctagatgatgctaagg

SEQ ID NO: 197383 - DNA, 80 bp, Homo sapiens
aacggcttgaggctccagtcaaaaaccattaaggactgatcctttgaaatactccagccatgactaaaagagaagcagag

SEQ ID NO: 197384 - DNA, 101 bp, Homo sapiens
ctgtcgcccgaatgcaggaagaccgtgatgggagctgcagcacagtcgggggtgtaggttatgggggtcctcgaggccacacgggttaatcgaagaaagag

SEQ ID NO: 197385 - DNA, 125 bp, Homo sapiens
tcaatttctgaagaagtggctgtagggagcatagctgctacactgaagatgaagcaaggcccaatgacccaggcgagaaatggtcaatgcatggtttgctgagagagttcacaccatccctgtgt

SEQ ID NO: 197386 - DNA, 76 bp, Homo sapiens
gaaccagggtgctagttaaaccaagtgaatctggattgggaaagtcgacattaatcaactcattattcctcacaga

SEQ ID NO: 197387 - DNA, 98 bp, Homo sapiens
cgaaacctagccccggacgagaagcgcagcaacgtgcggtgggaccacgagagcgatttccatcaccaaggagtaagaagaccttcgggcagagactg

SEQ ID NO: 197388 - DNA, 100 bp, Homo sapiens
cctgcacaaacagtccagcatgacggtgatggaagctcaggagagcccgctcttcaacaacgtcaagctacagcatgcagctggggccttccggtggctg

SEQ ID NO: 197389 - DNA, 98 bp, Homo sapiens
gacatccagagttcagctgccacagacggaacctcagatttgcccctcaaactggaggctctctccgtgaaggaagggagaagaagctgatgatgatg

SEQ ID NO: 197390 - DNA, 90 bp, Homo sapiens
gtcatttgctactatgggaaccgaggggagcctgatcctatcgttttgacgccagcaccggaagcagtactcagaacaagtcatacctaa

SEQ ID NO: 197391 - DNA, 75 bp, Homo sapiens
agcccagagcgacccttcctggccatcctgggcggtttgggcttcctgtagacacccttttcctgcgcaacagag

SEQ ID NO: 197392 - DNA, 83 bp, Homo sapiens
gctgctttccccccacctgaacagaaaactgcatttgacaaggctcaggccacagggtcaccacatacatcgcccacccatgg

SEQ ID NO: 197393 - DNA, 100 bp, Homo sapiens
gtcaccaccgacactctccaggctccggacacgatgcaggccatcaagtgtgtggtggtgggagatgggcaggtgacagcagggacatgtctcgggagat

SEQ ID NO: 197394 - DNA, 85 bp, Homo sapiens
ggtcgcgggagtcgtagggaggacgccgggacacctggaagccgagaaatgacaatgcagatcttcgtgaagactctgactggta

SEQ ID NO: 197395 - DNA, 100 bp, Homo sapiens
aagaagtaccttcgccggtcaccggctcctgcaggttcagaggaatatccttgacttcccccagcatgtttccccctccaaggacatccggacagccagc

SEQ ID NO: 197396 - DNA, 82 bp, Homo sapiens
gtgagcgcgccggaccaagcgggcccagaagcgggtgtcccgacccaggctaagcttgagcatggctgagcaggagcccaca

SEQ ID NO: 197397 - DNA, 100 bp, Homo sapiens
gtcccctcgttcccactttggggatcggcgctctggctgtttcgtgaaggagagagaggcaggatgacgcaaaacacggtgattgtgaatggagttgcta

SEQ ID NO: 197398 - DNA, 100 bp, Homo sapiens
aataagctggcacagatggaagaggctccacttttcccaggagaatcaattaaagccattggtgtgactgaagaaatatcaaatgtttcctagtaagaca

SEQ ID NO: 197399 - DNA, 50 bp, Homo sapiens
aaacactgcctcagtatctgaacacaaggctggagtgcagtgacacaatc

SEQ ID NO: 197400 - DNA, 101 bp, Homo sapiens
gcgagatcccgctgcaccgcggcgaggccgtgaaggtctcggaagggtgctgacctggaccgggagaagaaggctgccgagtgcaaggtggacagcatcgg

SEQ ID NO: 197401 - DNA, 98 bp, Homo sapiens
gccaagatggtgaagcagatcgagagcaaggagtggaagctggacacactatgtgacttgtatgaaaccctgaccatcacccaggcagtcatcttcat

SEQ ID NO: 197402 - DNA, 90 bp, Homo sapiens
ggcggctggccgggcccaggtcccttcctccgacttcgcaggtgagcagtaacggaaatcagccccgtttattcctcccagcacctgcct

SEQ ID NO: 197403 - DNA, 100 bp, Homo sapiens
acctggtgccacatcctagcccctttccttactggatcctcaaaccagaagaaaacctgaatctctgaggtgctttactccatgaactgtctaatgacgg

SEQ ID NO: 197404 - DNA, 100 bp, Homo sapiens
cgcggtgtcattctgacctcggatgaaacaggcgcctatttaatcgacagagaccccacctactttgggcctgtgctgaactacctgagacacggcaagc

SEQ ID NO: 197405 - DNA, 132 bp, Homo sapiens
gagcactccaatatggcaattgacctcacctcaagcacacccaatggacagcatgcctcaccaagtcacatgacaagcaatgaagaggaagatgatgatgtagtggctcctaaaccacctattgaacctgaa

SEQ ID NO: 197406 - DNA, 80 bp, Homo sapiens
aaacttcggatgagaaagaaagtaaaagatgtcattggggtggcctggaggccaagcagatgtggcagttctgcagcaga

SEQ ID NO: 197407 - DNA, 50 bp, Homo sapiens
tggatgtgatgcctgctagccaaaaggttggttgaatctggcgatgtgga

SEQ ID NO: 197408 - DNA, 90 bp, Homo sapiens
atcatttgtgatgggtcagctagtatgcaggctaggcaaactgctcctatggatattccaggtttaaacctgagtcaacaagaatactac

SEQ ID NO: 197409 - DNA, 90 bp, Homo sapiens
gacaatttaaccaagaaaaattaccgagccagccagcaggaaatacagcatgattatcgagattgcagcctgtcactccacacacacgtc

SEQ ID NO: 197410 - DNA, 128 bp, Homo sapiens
gagaagtcatgtacacagccttcagagcactgggacgaagtgtggattatgtacagagctctcagcatggcggctcctctacgtcacttgcgtccaccaaagtctgcagctcgatggatgagaacgat

SEQ ID NO: 197411 - DNA, 83 bp, Homo sapiens
ggtcgcgggagtcgtagggaggacgccgggacacctggaagccgagaaatggcataagggccatgtgttctgaaattattttg

SEQ ID NO: 197412 - DNA, 75 bp, Homo sapiens
ggctcttccctgaccattttctactgtccctgcgcgaggtggtataagttgaaatccaaaccaggaaagaaggac

SEQ ID NO: 197413 - DNA, 75 bp, Homo sapiens
caccattaactaccgtctgggaatactaggttggatggcaagcatgtggtgtttggcaaagtgaaagaaggcatg

SEQ ID NO: 197414 - DNA, 100 bp, Homo sapiens
gccggctggaggcggtgctggcgagccgcagtgaggccaacgccgtgttcgacatcctggccgtgctgcagtgacagagagtcgagggattgtggatagc

SEQ ID NO: 197415 - DNA, 100 bp, Homo sapiens
cgtttactttcccatcagatgttccctaccaagctgcccttggagctttagaaaagaactcaggaatttggaagcaggctataaatctcatgaattccac

SEQ ID NO: 197416 - DNA, 75 bp, Homo sapiens
cagttcatagatactacactgaatttcctacagttcttgatattacaggaaagaagattctatatgatatacttg

SEQ ID NO: 197417 - DNA, 100 bp, Homo sapiens
tgtcgcccctgagatgtgtcccatcagagcaaccggtgaagaagctaagtctcagaaagataactcacccaagaggacacaaggataaacctgataccca

SEQ ID NO: 197418 - DNA, 90 bp, Homo sapiens
cgcccagctcgcccagcgtccgccgcgcctcggccaagctccccgcagccaccgccacccattggaatggccaacaggggacctgcatat

SEQ ID NO: 197419 - DNA, 75 bp, Homo sapiens
ctttggagacaaaactatgccagaatttgagagcgtattttgcggtaaaactggccgaaggctaaagctgaccag

SEQ ID NO: 197420 - DNA, 83 bp, Homo sapiens
actgcatctcgacagcatctcgggtaacaaccgagcccctcctcgcagcatcaatgtccgagttaccaccatggatgcagagc

SEQ ID NO: 197421 - DNA, 80 bp, Homo sapiens
gtttcctgctaatttgcagcttcctccagaatgcaagttctagccggtttttcctacaaggaatccagttgaatacaatt

SEQ ID NO: 197422 - DNA, 84 bp, Homo sapiens
agcctcttcgagcgccgcggacgcgtcatcgagtgtgacgtggtgaaagataagtaatggaacatcatctgtgatcgtctccag

SEQ ID NO: 197423 - DNA, 98 bp, Homo sapiens
attcctgaaaccactcaagagtcataggattagatgatccaagtcaccaagaaattactgtctcaagtgatacgaacaaattggagctctggcagatc

SEQ ID NO: 197424 - DNA, 100 bp, Homo sapiens
cattggcttctttgagactgaaatggcagattctgctcctaagtgtaggagagaacttggtgcctcttccactctggagtgaagttaatgaaagtctttt

SEQ ID NO: 197425 - DNA, 74 bp, Homo sapiens
ttcgaatcttcatcgccctgtggaacatcttcatgatgttctgcatgattgtttgctgccttcactgaagtctt

SEQ ID NO: 197426 - DNA, 82 bp, Homo sapiens
gggactctgaggaaaagctcgcaccaggttgacatcatggacatatgtgagtccatcctggagaggaagcggcatgacagcg

SEQ ID NO: 197427 - DNA, 83 bp, Homo sapiens
cctggagcctcagttggaagcagccgatccagcctgcggagcctgtggggcagtgtggaagccagctctccaggccacggaag

SEQ ID NO: 197428 - DNA, 101 bp, Homo sapiens
aaataatacctaaatatggcagtataaatggagcaacaaggctgactataagaggggaagcatggagccaagttagttttgtatttgtcagagttgataca

SEQ ID NO: 197429 - DNA, 82 bp, Homo sapiens
ccaggtccgacccgcgaacccctctgggatccccgccgctctgtctacaacccgagcaggagcattggtttgaaaaggccct

SEQ ID NO: 197430 - DNA, 89 bp, Homo sapiens
tctgaccagctcggccaggcagtgggccagcagcctggtgcctcccaggtaagactttgaccccgacgcaggcttcagtgattgccgcg

SEQ ID NO: 197431 - DNA, 76 bp, Homo sapiens
gcagaaaatgagaatggagccctaaagtccagaggcggggtttcaccatgttgcccagactggtcttgaactcctg

SEQ ID NO: 197432 - DNA, 82 bp, Homo sapiens
atcaagctagatcagcattctctaacttggctgaccccgcactacatctacccaccagccatcgtgcagcccagcgtggtga

SEQ ID NO: 197433 - DNA, 75 bp, Homo sapiens
aaaaataccacgacaaaaccaccctaccaagacaatgcaaactccagtgaacattcccgtgcctgtgctccggct

SEQ ID NO: 197434 - DNA, 75 bp, Homo sapiens
aacctgactcagccaccatatgtttgctggaaaccatgtctcattatacagatgaacccagatttaccatagagc

SEQ ID NO: 197435 - DNA, 100 bp, Homo sapiens
gaactcgactcttggcgccaccgcctcatgcactgtgtaggtgtggtcactcacctgtctaccactcccgtgaaatggcagctcgtgccttggtcccatt

SEQ ID NO: 197436 - DNA, 90 bp, Homo sapiens
ggcggtgacccgctaccggaaggccatcgccaagctgcccgctcactccagtagtcagcaagtccagcgcgggggctatggaggtgatgg

SEQ ID NO: 197437 - DNA, 74 bp, Homo sapiens
acattgatatatgtaaattacggaagatcatttatatacacatgaacagacccaggaaagcattcagcattttg

SEQ ID NO: 197438 - DNA, 83 bp, Homo sapiens
cgggcccgctccgacgcggaaggtaaagggagaagatgaggaagagaacaatttggaagtacgtgaaaccaaaattaagggta

SEQ ID NO: 197439 - DNA, 100 bp, Homo sapiens
ccgctgctgtgcggagacccccgggtgaagccaccgtcatcatgtctgaccagcttcgcagaatcaagaacggctatgtgcgtttaaagatccgtatcag

SEQ ID NO: 197440 - DNA, 75 bp, Homo sapiens
caagatgtatctactgtatccatgcactcaggcatatcacacctgaaaaattttatgtggaagcttgtgatgatg

SEQ ID NO: 197441 - DNA, 75 bp, Homo sapiens
ggcttctggccaagctgtggatgattttaagagtgaattactggaactgaaacggcagcagcaagagcaagaaag

SEQ ID NO: 197442 - DNA, 75 bp, Homo sapiens
tggcggcggctgcccggggccaacatgaccagtgtcagctgctgctggaagtggcctggcctctatttatcttcc

SEQ ID NO: 197443 - DNA, 90 bp, Homo sapiens
gccaaggcagaacagcataattatcctggtatcaaattacagattggtccaatccctaggctaaagaattacctccaaagccattgtcaa

SEQ ID NO: 197444 - DNA, 100 bp, Homo sapiens
caagggagccatgtccacccaacagatcaagaaggctgaagagattgctaatgagatgattgaggcagccaaggatatcccagaagctcctgagagactg

SEQ ID NO: 197445 - DNA, 100 bp, Homo sapiens
gtcgtggccggagcggcccgcgcctgggctgccggcacttcgcggcagactagacgcttgaagcaaagctgccatcccagaagacgacatgctctcagca

SEQ ID NO: 197446 - DNA, 100 bp, Homo sapiens
attactaagacttcttgctcatttctgagtattgtctttatatcctgacactatgaatgctacttggatgcctcttaagatgccttcaattaagttgcag

SEQ ID NO: 197447 - DNA, 75 bp, Homo sapiens
aagaagattcttacaacatcagagggggacaagggcctgtccgacacgccctacgacagcagcgccagctacgag

SEQ ID NO: 197448 - DNA, 97 bp, Homo sapiens
gggggtagctgaaggaggacctctccggctcacccggagtgcttctttctttgcagcacgaaaggagggcaggtatcgagagcccccgcccacccct

SEQ ID NO: 197449 - DNA, 95 bp, Homo sapiens
cgccccgaactaagcagggcggtcggggaacatggtccaagacaattcctgggaaagttcagttcttctcaagtgagggttctgacacatctgta

SEQ ID NO: 197450 - DNA, 101 bp, Homo sapiens
atggccagtgaggaagtcttgaagaatagagccataaagaaagcaaagcgcagaaatgttggatttgaaaccaagacatttggaggaggtggtggtggtgc

SEQ ID NO: 197451 - DNA, 101 bp, Homo sapiens
agagtttattcctcgttccttcttcagtcctgctcgtcggaggacccggttgccatggtgaaggaaaaagcttttcggagactgggaagcccaactgcgaa

SEQ ID NO: 197452 - DNA, 50 bp, Homo sapiens
agaacccacacaatggacaagtggatcttctccaacacagtgaatatatt

SEQ ID NO: 197453 - DNA, 82 bp, Homo sapiens
gctgaaatggaaaaaaggaagaattaacaagctagtttgtactggttcttaaagatgtgggattgaaaaaagaagatattgc

SEQ ID NO: 197454 - DNA, 75 bp, Homo sapiens
tatgtggccagttatttgcctcagtaaaagagctgagaacatctctaaggacctctacatagaagtatatccagg

SEQ ID NO: 197455 - DNA, 90 bp, Homo sapiens
atctgaaattaggccacaagctatagagcaagtccaaacccagactcatgtagcatctgccccaggtgaatctggattgggaaagtcgac

SEQ ID NO: 197456 - DNA, 80 bp, Homo sapiens
tgagcttggcctcggcgtcctcggttgataagcaatacaaatcggtaacaaaaccaaagccactaagtcaagctgaaatg

SEQ ID NO: 197457 - DNA, 75 bp, Homo sapiens
cccaggtgatgcctgaagctcaagggactgtgtccaccctcagagccaaagccttggctggacagtcagtacgaa

SEQ ID NO: 197458 - DNA, 75 bp, Homo sapiens
tgatgtcttccagactcggtgctgtacccgccgtgcagtacagaaggtttctaaaaaattagaaatgcacgttta

SEQ ID NO: 197459 - DNA, 50 bp, Homo sapiens
cttaaacttggtgcccaactattatggggtcttgctctgtcatccaggct

SEQ ID NO: 197460 - DNA, 100 bp, Homo sapiens
tgcgaaggcaggagggcggcgccgccgaggcccagatgcgccagagggagagacaagctcaacgagaagatgccctcgagctcacggagaagctagacca

SEQ ID NO: 197461 - DNA, 82 bp, Homo sapiens
ctattcggccatctttgctcctccctgcaactaactccattcttaattgggcccactgatgatggtgaagaagagatggaag

SEQ ID NO: 197462 - DNA, 100 bp, Homo sapiens
aatcttctttataggtatgacccccgctgtaaacagtggatcaaggtgaattcacataaaagggcatcagaaaaatacaaagacaacccatcaatatcag

SEQ ID NO: 197463 - DNA, 100 bp, Homo sapiens
cccctctgcgttcctgtcatatgcagactggttcaaggtggtgatctttgtgaagtctgtgcagcggtgcattgccttggcccagctactagtggagcag

SEQ ID NO: 197464 - DNA, 75 bp, Homo sapiens
ttgtggatcgctgtgatcgtcacttggtgcagtctttgcaagccacatttggaacttttgagtccatcttgagaa

SEQ ID NO: 197465 - DNA, 75 bp, Homo sapiens
ccatattgctacaatagctggccacctagagaatgtgacagtgatgataacatgggtgccaaaaatacttcaata

SEQ ID NO: 197466 - DNA, 75 bp, Homo sapiens
aaaatgttggttttggatgaagctgatgaaatgttgaataaaggtcaagaaatccctgaggagggacgggaagta

SEQ ID NO: 197467 - DNA, 97 bp, Homo sapiens
gccgcctcagcagccggctgcaggccagagagggcctcgggaagagatgcgaggatgacaagagcagcggaaagagctcagtgctagaaagcctggt

SEQ ID NO: 197468 - DNA, 100 bp, Homo sapiens
ccacaatccatcattgagtgtgtcaaacagatctgcgtggtcatgttggagggtgtgctggagtatctgtctgccttcgatgaagaaaccacggaagttt

SEQ ID NO: 197469 - DNA, 74 bp, Homo sapiens
cgctccgcagccccgggcacggcggaggcagcggagccctgggccatcggagtgtggccatctggggccgtgtg

SEQ ID NO: 197470 - DNA, 74 bp, Homo sapiens
tgtcaaaagagcttctctccagagtagaaaggctttcttcgagagtcacccagctccttcagctgagcgtacca

SEQ ID NO: 197471 - DNA, 100 bp, Homo sapiens
ccaggaccctgatgggattgagggctcagaaaacgtgactctgtgcagacgggaagctctacgacgcctacgtctcctacagcgactgccccgaggaccg

SEQ ID NO: 197472 - DNA, 90 bp, Homo sapiens
ggctcgcaccttgtcgcttagattgttatgaagtctcttgcatggcaccaagaatgttaccaattcaagcagtttaagattgccaagaca

SEQ ID NO: 197473 - DNA, 98 bp, Homo sapiens
tgaggacttaaatgaagccactgattagcaatttaaagatcctctccaagagacctcataagtccatccaccggcgccgcacagaccctatggtgacg

SEQ ID NO: 197474 - DNA, 83 bp, Homo sapiens
ccggcgggtacctgcggccaattcggtggaacgaggacgcggactgcgaaggcagctttgaaggcttcaccgtctaagaaacg

SEQ ID NO: 197475 - DNA, 90 bp, Homo sapiens
ctgagacgcagagtgtaccaggggatgctggactgcatgggccgcctttttgcctatcctgacactcaccgccatcgcctgggacccaat

SEQ ID NO: 197476 - DNA, 100 bp, Homo sapiens
tgccacacttaacagatgtccaaaaagactcctgactgctgagggaaaaaatgcatttttcaaagacctaacttcaattcagttattacctagtggggaa

SEQ ID NO: 197477 - DNA, 51 bp, Homo sapiens
tgacaaactaaagaaagacttgtgttacgagcagcatttctttctattact

SEQ ID NO: 197478 - DNA, 82 bp, Homo sapiens
tgccagttgattctgaccatttctcatgaacagaaacacctaggaagggagaactgcggagctggagtttgttcagatcatc

SEQ ID NO: 197479 - DNA, 105 bp, Homo sapiens
atctcagaagccatgcccctcaggctggaacttgccctgtctcctcgcagatgaggagaaacccgatgctagccccacgtcacttcagctgcggtcccagatcga

SEQ ID NO: 197480 - DNA, 83 bp, Homo sapiens
gaagaagcgccgcgcacggacttcggcagaggagccattccgtagtgccatcccgagcaacgcactgctgcagcttccctgag

SEQ ID NO: 197481 - DNA, 96 bp, Homo sapiens
acttcagcaaatgcagaatcagcccattgcaggaatgggataccaagtctcccaacaacagagacagggaattccaaatgaaagctggagaataac

SEQ ID NO: 197482 - DNA, 75 bp, Homo sapiens
ggggcctgtgtacttgctgtagatgaaaatgatgcaatgaacctcattttacttttagtcactgaaaaattggaa

SEQ ID NO: 197483 - DNA, 100 bp, Homo sapiens
ccagcacctgggactcttggaactgggcttggtgcaggatttggaacagtctccaacctgtcccagtatttcagcccagcctcggtgtccagcagcccgg

SEQ ID NO: 197484 - DNA, 100 bp, Homo sapiens
cttttcgaccttcaatccagttccaaggactccacggggtaaatctgagacattttcgtagaggtcggaggagatcacttgctcttgtagcacatacggg

SEQ ID NO: 197485 - DNA, 100 bp, Homo sapiens
caccaccgaatggacgagttctcccggggaaatgtaccgtccagcgagttgcagatctacacttggtcaaaatgcagatcttcgtgaaaacccttaccgg

SEQ ID NO: 197486 - DNA, 74 bp, Homo sapiens
ccagcagctgtcgccgccgctctcaggttttgcagacattgggtacagaaacttaccggcctagttctgcctca

SEQ ID NO: 197487 - DNA, 100 bp, Homo sapiens
ggagaaccgggccttcctggggaagccgggatgaagcccagctccatgaccttctccagctgaggcaggagaatgcctacctgaccaccatcaccaagca

SEQ ID NO: 197488 - DNA, 82 bp, Homo sapiens
cggcccacagccagagccatgcaagcgcagttctcttcggacagctcgccctcccctacctgcggaagagtcaagggaatgt

SEQ ID NO: 197489 - DNA, 100 bp, Homo sapiens
ccaaacctcaaagcatggctaagagtgttcagtagaaatggggaggagattggacaggctggactccccattgcttttctaaaaatcttggaaactttgt

SEQ ID NO: 197490 - DNA, 101 bp, Homo sapiens
ttaattttagggtcctttatatagaagggagagtaggcatctctgacacgctgtgggccatcgagatgtgggaccctgcggcccaggcgttccggctgaac

SEQ ID NO: 197491 - DNA, 98 bp, Homo sapiens
atataaagtttgtgatcgttggcggacattttgggagaagatgtcaaccggacactagaaggtggaaggaaacctcttcattatgcagcagattgtgg

SEQ ID NO: 197492 - DNA, 101 bp, Homo sapiens
ctcaactggggtcagaaggacctctaccgagatgtgatgttggagaactacaggaacatggtcttgctggagttggtcaaacgccatgctggggtgctagg

SEQ ID NO: 197493 - DNA, 83 bp, Homo sapiens
atgcgcagtcatgagtcgcttcaagtttatcgtactatactggcaattgctggagaagattttgcaattgttgcttctgatac

SEQ ID NO: 197494 - DNA, 100 bp, Homo sapiens
tcgcataagagcaaagaatactattgttgccacagggtgagatcggactggaactgttcggctgcgaccagaaatttattttcctgagtaaattgccgag

SEQ ID NO: 197495 - DNA, 100 bp, Homo sapiens
ctctgtgcaatcctcacattcaagctgataggctgcgctaccggaatgtcatccagcgagtgattaggacataagcagctctatgaccaatagcacagct

SEQ ID NO: 197496 - DNA, 96 bp, Homo sapiens
ccgaggttgactgtagcagcaccaaatgtggaattattcagtggttgtctactgtatcaatatttcaacccaatttggcttctctgtgggaatgac

SEQ ID NO: 197497 - DNA, 76 bp, Homo sapiens
atgcaccttcccctgccttggaaagagaagaagctggaggagttctccgtggaagaggccgaggtgctacagatcc

SEQ ID NO: 197498 - DNA, 96 bp, Homo sapiens
aaaagaagaagaaaataaaaaatggcagtaaccctgagacaaccacttctggtggttgccactcacctgaggatgattatcgagattgcagcctgt

SEQ ID NO: 197499 - DNA, 90 bp, Homo sapiens
cttcagaacgctggggaggttgggctgaactgcagtgggagaggagaagagatgctggcgtgaagggtagagacagggtttcgccgtgtt

SEQ ID NO: 197500 - DNA, 100 bp, Homo sapiens
ccacccattgtgtcttctcaagaaggtactgagtttgagggtgcagtcatagctctgttccatttgttggccaccaggacggacaaagtccgagctttac

SEQ ID NO: 197501 - DNA, 90 bp, Homo sapiens
atcatcctggcccagaagaacatgacagtcattttgtttactcattcagccctgttgcaggtcccaataaactcttcataaggttgacag

SEQ ID NO: 197502 - DNA, 100 bp, Homo sapiens
ggcggtcgacatgttccaggtcccggatagcgagggcggccgcgccggctccaggactccagaagacctttccagattcgtggttgagctgcagcagagg

SEQ ID NO: 197503 - DNA, 90 bp, Homo sapiens
gccacgaagcaggaagggagatgcagcatcccagtttttggtcttctgtcaaaaacacagggatgaggatttgaagcattcattaccatc

SEQ ID NO: 197504 - DNA, 83 bp, Homo sapiens
gacgcagcgtctagtccctggccatagctccgccgctgcccgtttggtgccctggttgtcagatgttggaaagcagtaggacg

SEQ ID NO: 197505 - DNA, 43 bp, Homo sapiens
acaatgactgcaccaacgcaagatggtcagtaggacagaaggt

SEQ ID NO: 197506 - DNA, 75 bp, Homo sapiens
gccggccgcgagcagaccggcctggaagcctacgccctggggctggacaccacacgttggtcgtcattgcctccg

SEQ ID NO: 197507 - DNA, 100 bp, Homo sapiens
cgagaccgcggcgtctccagcctcggtaccatggccgggatcatcaagaaacaaatcttgaagcacctctccaggttgcacgttttcaaaaaatacctaa

SEQ ID NO: 197508 - DNA, 80 bp, Homo sapiens
tgatggtggccggcctgacaacacagggcgtggggtaaaatccagtacaaggaatatatcattgaaggatttgaaaacat

SEQ ID NO: 197509 - DNA, 90 bp, Homo sapiens
tgacatttttgttccagaggatgatgatgatgatgactaacagatacagaaggtggtcatggcactaggagactacatgggcgcctcctg

SEQ ID NO: 197510 - DNA, 83 bp, Homo sapiens
cggagacaaagatggctgcgactgttaaacgtttaatgaaagaagcggcagaattgaaagatccaacagatcattaccatgcg

SEQ ID NO: 197511 - DNA, 90 bp, Homo sapiens
ctctgtgctgacttccacccgagtggggcagttgtggccgtaggactgaacacggggaggggaagcaagcacttatttggctacttggtg

SEQ ID NO: 197512 - DNA, 75 bp, Homo sapiens
gcaagatggcgtctgctagtagggtcgttcaggttgtccttctattcaggccactcttcgttttccatgtactgc

SEQ ID NO: 197513 - DNA, 98 bp, Homo sapiens
atccttacattacctgctatatctgtaaagggtatctgatcaagccaacaacagtgacggaatgcctccatacatcagagtctccttggaggtgacat

SEQ ID NO: 197514 - DNA, 97 bp, Homo sapiens
agaaaacctctgcgaggaaagggaaggagcaagccgtggaaatccaggatgagtcagctgtgttatggttggatgaaattcaaggtggaatctggca

SEQ ID NO: 197515 - DNA, 111 bp, Homo sapiens
ggtctacgagctgtttctcatctttatactcttccaggccactcttcacctccaccatgagcctggacatccagagcctggacatccagtgtgaggagctgagcgacgcta

SEQ ID NO: 197516 - DNA, 74 bp, Homo sapiens
aacaagggcgccagggtagcggttaccaagatgcttgtgaccacaccagaaaaatgggatgtagtgacaagaaa

SEQ ID NO: 197517 - DNA, 90 bp, Homo sapiens
ttatgaatgatgttgatgtatctggaactatgaatagaggaaccccaaaacgttgcctcgatctttcgaatcttagcagtggggagataa

SEQ ID NO: 197518 - DNA, 75 bp, Homo sapiens
gcggcagccgagcccgcccgcgcgccgaacactctgctccagccaaggtggtgagggcagctgttcctaaacagc

SEQ ID NO: 197519 - DNA, 75 bp, Homo sapiens
cccgaacgacgcgggcgagcggggctttggacgccggtggagacgcaggcgagattcacaatgacatcctttcaa

SEQ ID NO: 197520 - DNA, 100 bp, Homo sapiens
cggggcggcggcgaaaggacgctgccactgcagagccccgccatggaagacacgccgttggtgatatcgaagcagaagacggaggtggtgtgcggggtcc

SEQ ID NO: 197521 - DNA, 100 bp, Homo sapiens
cagtaccagtacattaggaaacatgctagaattacctggaacttcatcatcatctacttcacaggaattgccatttaatggaggaacacctctgctttat

SEQ ID NO: 197522 - DNA, 82 bp, Homo sapiens
ccaagctcgtagcctgccactccgtgcgatgcggtgacggtgctcctggccagaaccacggcacagctgcaggcggtggaga

SEQ ID NO: 197523 - DNA, 83 bp, Homo sapiens
cgcggagtgggcgatgccagcgtgccagacaatgcagatcttcgtgaagactctgactggtaagaccatcaccctcgaggttg

SEQ ID NO: 197524 - DNA, 87 bp, Homo sapiens
cggcacgcgactccccccgggcccaaactttccccagacatggccaacaagggtccttcctatggcatgagccgcgaagtgcagtcc

SEQ ID NO: 197525 - DNA, 146 bp, Homo sapiens
gttcaaagggaccatcatcctgacagctgtgtactttgccctcagcatctcccttcatgtctgggtcatgatcaccggcgtaatcaacccagcgttggacaaatactttccgtcagactctggagtgagaatcatagctgagcccg

SEQ ID NO: 197526 - DNA, 100 bp, Homo sapiens
cgcgccccaccaccgccctcaccatggaagctgtgctgaatggtttggtggccactgaggtgttgatgtggttttatgtcggagagattataggcaagcg

SEQ ID NO: 197527 - DNA, 112 bp, Homo sapiens
cgcttggtcaaggacatgaagatcaagtccctggaggagatctatctcttctccctgcctattaagtctcggtcaagacaagaagatccagaacagttaaggctgaaacaga

SEQ ID NO: 197528 - DNA, 74 bp, Homo sapiens
atggtgcaatgttcaaagtactcaagatgaatttgagtgtcgtgtgggagccaatgggagatgggaagaaaatc

SEQ ID NO: 197529 - DNA, 74 bp, Homo sapiens
aagctttagagcctggctactcacagttgaagcctgattgcaggaaatattctgctgtacgtagagatggctct

SEQ ID NO: 197530 - DNA, 82 bp, Homo sapiens
ctgcgaatgtcgcaagtccggtccctggtcattgggctgcagaacctcctggtgcagatgtatcctccactcctcgctggcc

SEQ ID NO: 197531 - DNA, 100 bp, Homo sapiens
tggaacaagggaaagagccctggatggttgtgagggatgagaaaagaagatggactctagctattgacctgaaaagtggttctggaaaagtgtaccaagg

SEQ ID NO: 197532 - DNA, 100 bp, Homo sapiens
caaaaactcagaaaatacgtggttggagagctcatctggaattttgccgatttcatgactaaccagtggtgacgagaacaagtcagtgcgcgaccgtttc

SEQ ID NO: 197533 - DNA, 100 bp, Homo sapiens
ctgtcacgctggttatggcctgcacagaagccttcttccccttcatctcgagagggaaagaactcctttggggtcattcctgtcccaatcagctgctcta

SEQ ID NO: 197534 - DNA, 105 bp, Homo sapiens
tgggtctggactgatctccatgtcctgttgtggggcttttacagcctttgggatggtgctgctccactggtgcctgctgtggctcctgtttccactcagctcaag

SEQ ID NO: 197535 - DNA, 132 bp, Homo sapiens
ggaagcttcgaggcatgatggtcgactacaagaagagggcggagcggagacgggagtattatgaaaagatctgatcaacaaatacaagcgcagacgatttcagaaaaccaagaacctgctgacaggagagac

SEQ ID NO: 197536 - DNA, 51 bp, Homo sapiens
gaatctctgttccaaatgctttgctgactgccttttcaaggtgtgccctat

SEQ ID NO: 197537 - DNA, 102 bp, Homo sapiens
ggcgggggtgctgcagaggacacgaggcggcgggctggagacatggaccgcggcgagcaaggagtgggaatagctttgcgaaaaatgggcgcaatggccaag

SEQ ID NO: 197538 - DNA, 100 bp, Homo sapiens
gccatttaggagctctgctcaaagccagacgacatatgtagagtgtgtcggtcagaaggaacacctgagaaaccgctttatcatccttgtgtatgtactg

SEQ ID NO: 197539 - DNA, 97 bp, Homo sapiens
tgcgcttcccagggatcttgagagtgaagatctcgaaggatttcataggtgtcatggagaaactccagctgggcccagagattctgcagcgggaaaa

SEQ ID NO: 197540 - DNA, 50 bp, Homo sapiens
cgacttgtacaccgaagaacggccgcgtgtgccatctccctcttctacga

SEQ ID NO: 197541 - DNA, 73 bp, Homo sapiens
gaagttgggcattctcatcaaagctcgtaacttcctcgttttccagggcctggtggcggtaataaccggagga

SEQ ID NO: 197542 - DNA, 75 bp, Homo sapiens
ccagcaacatcttgtccataaggctgaaccggcaaatttttggaagtaccagcacagtgacgcttcctgaaacct

SEQ ID NO: 197543 - DNA, 75 bp, Homo sapiens
tttgggttggcttcgtggctccacgacttactctctacccttggcaggggtggccgtgactggggagagcacaac

SEQ ID NO: 197544 - DNA, 100 bp, Homo sapiens
gctggcctggtttgatactgacctgtaaatcatcctttagtggcctgaagcacgaggacaaacgtggaggtagcggatctcacaactggggaactgtcaa

SEQ ID NO: 197545 - DNA, 74 bp, Homo sapiens
gcaagaataagatgtggcgctttcatgtcgaagttgcatctggaggtggtggggttggagatggtgttcaagaa

SEQ ID NO: 197546 - DNA, 100 bp, Homo sapiens
atgctgggattggctgcttttcgtccttttggtgtgaaccatggggtggaacttcactcagatgtgatagagtatgcaaagcagaaactggacttcttca

SEQ ID NO: 197547 - DNA, 75 bp, Homo sapiens
gtttctggtcactccccaggattatgcgcgcaatctgcagagcgctgtgtaagcacattgcttgatctaatccag

SEQ ID NO: 197548 - DNA, 74 bp, Homo sapiens
tggaacttttaagtggagtggtggatcagaccaaagatggaaaaggttaagaagttcttacaagagttctacca

SEQ ID NO: 197549 - DNA, 100 bp, Homo sapiens
gaaggaatgggacaagacccatctttatgcaaagccagcgttacagtaatgttccagcaaaccagtccagctacgggggcccagccagccagcagctgag

SEQ ID NO: 197550 - DNA, 75 bp, Homo sapiens
ggcgaacgccactcagcttttgcggcacttggagggatcgactacaagaccaccaccatcctgctggacggccgg

SEQ ID NO: 197551 - DNA, 100 bp, Homo sapiens
cctcatccagctgatgcccttcttcgtgctgagtcatcactagagagtgggaagggcagcagcagcagagaatccaaaccctaaagctgatatcacaaag

SEQ ID NO: 197552 - DNA, 99 bp, Homo sapiens
tttattgtggcacttgctggagctggggcagcagtcattgctatggacacaaaaatcgcttcattggaacgaaacataagggatcttgaggatgagatc

SEQ ID NO: 197553 - DNA, 98 bp, Homo sapiens
cttggcatttggctttgcctttctggacacagaagtatttgtgacagacatcgctattgcggttccgaggcagtgggaagagatgcggcccctggaca

SEQ ID NO: 197554 - DNA, 75 bp, Homo sapiens
cgcggtgctcatagacgaactccgcaatgaggacgttcagttggtggagctgaaaaatggggagacgtacaatgg

SEQ ID NO: 197555 - DNA, 88 bp, Homo sapiens
aaagaataagcttcgggcgctgtagtacctgccagctttcgccacaggagggatacctttcgtccctgcatttaaaggctttcactta

SEQ ID NO: 197556 - DNA, 80 bp, Homo sapiens
ctgcaacctctgcctcctgtgttgaagcaagcgattctcatgcctcagcctcctaaatgcctttgagtaatggacagatg

SEQ ID NO: 197557 - DNA, 100 bp, Homo sapiens
ccgcggtgggctgcggagcgcggcgggcggcgccctgcacagcctggcgggcttagagaagaaaacgcaggttctgcagcctgaggagaagaagactgtg

SEQ ID NO: 197558 - DNA, 75 bp, Homo sapiens
cacggaggtagtcatgatctatgacgccgagaagcagaggccccgagatgccgaatataccaactctcctttggt

SEQ ID NO: 197559 - DNA, 100 bp, Homo sapiens
aatgtggtcgacgagaagccccaacagcacggcgtggcctctcagcctcggtgctggagaatctggtaaaagcaccattgtgaagcagatgaggatcctg

SEQ ID NO: 197560 - DNA, 83 bp, Homo sapiens
tgaggcttcctctcctggacaccaacagcaagcaaattgtggctactaatttgccccctgaagatcaagatggctctggggat

SEQ ID NO: 197561 - DNA, 100 bp, Homo sapiens
ccacctagagcattccgtctctcatcctctgccatgtgtgtggcaaagggaagctggaagatggggatggcatcaacctgaatgacatcgagaaggtcct

SEQ ID NO: 197562 - DNA, 90 bp, Homo sapiens
cacccatggagcacatggagatgacttcattagaggggtggtagactcggaggatctccctctaaacatatcccgtgagatgttgcaaca

SEQ ID NO: 197563 - DNA, 51 bp, Homo sapiens
gattatggtgtccagctggttgaggaggcataatcaccagcaacacccggg

SEQ ID NO: 197564 - DNA, 50 bp, Homo sapiens
ggagaaccaactggtcccgaaagaggtgcttttgaagatgatgatatcac

SEQ ID NO: 197565 - DNA, 75 bp, Homo sapiens
gttgcttgatcaggtggaacagattcagaaggagcaggattaccaaagggtggtgttcccactgatgaagagcag

SEQ ID NO: 197566 - DNA, 90 bp, Homo sapiens
aagagaaagacctagccaatacagggaagtggttacagaccgagacatgggtgcccggcaccgcgcccgagcccactccattcagatcat

SEQ ID NO: 197567 - DNA, 74 bp, Homo sapiens
gaaacaccaagatctgaagtatgtcaacccagaaacagagacccccttcccacagaaagccgactcatgaacag

SEQ ID NO: 197568 - DNA, 100 bp, Homo sapiens
ctgggctcggcgctgaggtttcgccctggctacaacgaccccatgtcaggatggagttttaacattgaatgcggagaacactaattatgcctatcaagtt

SEQ ID NO: 197569 - DNA, 50 bp, Homo sapiens
tgcccacggcgtccccggtcgcgtgggagattttgataagatctggcgag

SEQ ID NO: 197570 - DNA, 83 bp, Homo sapiens
aaaactacgggcggcgacggcttctcgatgttttgaacagagataaggatgaggagccaactgtaaaacaagagattgaagaa

SEQ ID NO: 197571 - DNA, 83 bp, Homo sapiens
ccggatctcagctccgacgcccgaggagaaggaggagtggattaagtgcattaactcaacgggacccaggtggagtctgtaca

SEQ ID NO: 197572 - DNA, 75 bp, Homo sapiens
gcaggcaacactgagccccagttcattattccttcatggccagctctcaatgttgcaagaaaaaatagaccattt

SEQ ID NO: 197573 - DNA, 75 bp, Homo sapiens
cctctagtattctctatgctagaaaggtgggatgtgtgtgggctgaaattccgagctgcggttgtgcatgagaat

SEQ ID NO: 197574 - DNA, 74 bp, Homo sapiens
ccaatcccactgatgaggatcagcccatggtggtagctgagcacccagatgcttcaggtgaggagattgaagag

SEQ ID NO: 197575 - DNA, 82 bp, Homo sapiens
ctatggaagtaatggaaggacccctcaacctgcctgcagtggtttctggtgtgcataagaaaatgaacattagcctatggaa

SEQ ID NO: 197576 - DNA, 51 bp, Homo sapiens
ctcaactggagaaacttagcaaggaggcataaagtccatagtcattgtctg

SEQ ID NO: 197577 - DNA, 75 bp, Homo sapiens
ctgatgccccgggggcacatcccatacccactgccccccaactacagctatggtgaagcccaagagccaaaggaa

SEQ ID NO: 197578 - DNA, 76 bp, Homo sapiens
aacaatgagatcgtggacaagatcatgggcaaaggacagatccagtggcatggttgctctctgatatttggcgttg

SEQ ID NO: 197579 - DNA, 100 bp, Homo sapiens
ctatatttaacggagatcctgatgaagttcgagcactaatatttaagaaagaagatgttaactttcaggtgatctttagacagtgactgagtatggatca

SEQ ID NO: 197580 - DNA, 82 bp, Homo sapiens
caacctggatcttcgaacttttgacacggctttggaaacgacgtcatgtgttagaagtgagcttgtagtggacaaaacaaag

SEQ ID NO: 197581 - DNA, 74 bp, Homo sapiens
gtgaaagtggtgattggcattgtactgctagctggaaggccaagattgacagacacctaatattcatgacttga

SEQ ID NO: 197582 - DNA, 92 bp, Homo sapiens
aacgaggcaaggagctaaagcagcgtgcgttcagccctgggattgtcactgctgttccaagggcacacgcagagggatttggaattcctgga

SEQ ID NO: 197583 - DNA, 78 bp, Homo sapiens
gggcccacagactgacgctgctctgcttcctggattcagccctcttcctaaggggcggtggccagtttgaatactccc

SEQ ID NO: 197584 - DNA, 76 bp, Homo sapiens
accgacctcatcagtgagctgtccctgctggaggagcgcttccggatggttccaatccctatacattgaagctttg

SEQ ID NO: 197585 - DNA, 100 bp, Homo sapiens
ccagcgtttccgaggtgaaggcgccgcgccaggccgggcgggcggatgtacagttacccagcacgtgtacctcctcctcctcctattgctcgggctgtag

SEQ ID NO: 197586 - DNA, 90 bp, Homo sapiens
gcgtcccgctcgctgggagagaggtacctctccttttccctctccctttccctaagaaaggaagctgttgaagttattgaagtacctgtt

SEQ ID NO: 197587 - DNA, 75 bp, Homo sapiens
cgggcgccaccccgcggtcatcggtcaccggtcgctctcaggaacagcaggtcctctccacccggatcctggcca

SEQ ID NO: 197588 - DNA, 98 bp, Homo sapiens
cggggccttccacaccccctccgtgggtgtgtggtgagtgtggtaagactttgaccccgacgcaggcttcagtgattgccgcggatcagaagcctgag

SEQ ID NO: 197589 - DNA, 100 bp, Homo sapiens
tcggatcatgtctggtggctccgcggattataacagtgggacacagcaggccaggaaagatttcgaacaatcacctccagttattacagaggagcccatg

SEQ ID NO: 197590 - DNA, 90 bp, Homo sapiens
ccatgctgcagcgggaaagagaacagagagtcctggggacaggtcacgagaagagaatgccttctagatgcaaaatcacctccaaaccag

SEQ ID NO: 197591 - DNA, 50 bp, Homo sapiens
cagcacggtactggagaacacggatggtgctggagaatctggtaaaagca

SEQ ID NO: 197592 - DNA, 80 bp, Homo sapiens
agaaatttggagtgtgcgtgcgcgccgagcgagacgtctcccacaacctgctccgggcgctggacgttgggctcctggcg

SEQ ID NO: 197593 - DNA, 74 bp, Homo sapiens
cttgtcctggctcttgccctcatcctggttctggaatcctcagttcaagttgtgtgacttcattgagacacatt

SEQ ID NO: 197594 - DNA, 75 bp, Homo sapiens
agatcctccaaagacagatctgatatgattctataacagactcttccagaaatgatatgaagaggaaatttgccc

SEQ ID NO: 197595 - DNA, 75 bp, Homo sapiens
tgatgagaatgagaacaatggagtactcaagaagttctgtcctcatcacctggagccagatgaccaagatgctcc

SEQ ID NO: 197596 - DNA, 100 bp, Homo sapiens
cggtccctcagcccagccaccatgagcaccaagcagatcacttgcagatcttactgtgccgagatcgctcacaatgtttcctccaagaaccgcaaagcca

SEQ ID NO: 197597 - DNA, 74 bp, Homo sapiens
tagcaggctccactaactggggctacgactctgatgggcaggcttttgtggccacaggaaccaatctgtctctc

SEQ ID NO: 197598 - DNA, 129 bp, Homo sapiens
ggcacaaagtgtattcctgtagacagtagtggagaccagcagctgtgctttgttttgacaggtactccaaagattcaggtttactcacgtcatccagcagagaatggaaagtcaaatttcctgaattgc

SEQ ID NO: 197599 - DNA, 75 bp, Homo sapiens
ccacctggtttcaagaccctacccgcttcactggcaccatgccgatctgcacaatgcaaccaacctgcggtctcg

SEQ ID NO: 197600 - DNA, 100 bp, Homo sapiens
tcggctcaccgcaagctccgcctcccgggtacaagcaattctcctgcctcagcctcccgagtagttgagaatacagatcctgactgctgtcatggcgtgc

SEQ ID NO: 197601 - DNA, 100 bp, Homo sapiens
cgcggcggctgctggggggcccggggcctcgcgctggggacgttgcgtctgcagctgcggcgcgaacatgagcctttgactgctcctcagctcttggtcc

SEQ ID NO: 197602 - DNA, 100 bp, Homo sapiens
gaagaaggtgaagaagcggatgaggttggcaccccagattttgcaaggcgatttcgagcaacctatgtttcttgggcaattgcttatctcctaggattga

SEQ ID NO: 197603 - DNA, 100 bp, Homo sapiens
taagactccaggaccctctggaagcctagaaatggactatggcagccagggacgccacttcaggcagcctgtcagaggagagcagtgctttggacctgcc

SEQ ID NO: 197604 - DNA, 50 bp, Homo sapiens
cagaactgaacgccatcattgggacaacgactgaaagacctttcattcag

SEQ ID NO: 197605 - DNA, 75 bp, Homo sapiens
atatcaatttaggaaatgtcttgaaagaggcacgcatttttgacagagttcacccagggcatgatcttacctaca

SEQ ID NO: 197606 - DNA, 100 bp, Homo sapiens
ccacaatttccatcaaaaagtgattaagcagagaatggagaagaaggttgattccaggccagaagcggactcctagaagaggggagcagcaaggatggaa

SEQ ID NO: 197607 - DNA, 75 bp, Homo sapiens
agtgaattcggattgtttgctggtgtgggccatgtttgaggattgccccagcattcagttctatgagtaataaat

SEQ ID NO: 197608 - DNA, 50 bp, Homo sapiens
ctggaggattagcagatcgacccgtgctttgaagaagaggagcacttcaa

SEQ ID NO: 197609 - DNA, 93 bp, Homo sapiens
aggagttggtttggaaacaaagactttcaggccctacctatactagctagacgtccttctatggccgcttcaggcacttcttggatatcatcg

SEQ ID NO: 197610 - DNA, 75 bp, Homo sapiens
tgccgacagagatgaagtccggtttttcaaagagcctgtcatagggaactgcatggatagaagttctccaggaca

SEQ ID NO: 197611 - DNA, 75 bp, Homo sapiens
gttccatccaaactcttgccctttgagggaccaggtcaaaatgcagatcttcgtgaaaacccttaccggcaagac

SEQ ID NO: 197612 - DNA, 123 bp, Homo sapiens
caaagttccataaagaatggcccttgtggataagcacaaagtcaagagacagcgattggacagaatttgtgaaggggttgtagaaggtgatttagctgccatagaagcatacaagtcatcagg

SEQ ID NO: 197613 - DNA, 74 bp, Homo sapiens
cctggaacttcatcatcatctacttcacaggaattgccatttgactcagcccaggagagtgttattactcgaga

SEQ ID NO: 197614 - DNA, 80 bp, Homo sapiens
gcggaattccaaaccctcacctgtagacagccaacacatatctctttatggtacaagctcgaggtataatgttgagagaa

SEQ ID NO: 197615 - DNA, 96 bp, Homo sapiens
cgcagacaaagggcggctcgcgcccgggccgccacgctctcgggctctgcctcgctcttgcaatctcaggatgtgaaggaagatgctgtcctttgc

SEQ ID NO: 197616 - DNA, 75 bp, Homo sapiens
tggcatgatcctttgcagaaatgactacattagcaactcttctgacctctgggactactgcaacagtagccctat

SEQ ID NO: 197617 - DNA, 82 bp, Homo sapiens
gccgcgatcgtggggcccgcgaggcgggcagccggggcgtccagcaaattgtggctactaatttgccccctgaagatcaaga

SEQ ID NO: 197618 - DNA, 100 bp, Homo sapiens
tgaaatttgctagccattgtctcatgaaccatcctgatttagcaaaagacttaacagaattcaattcgtcataatctgtccctacacagcaagttcattc

SEQ ID NO: 197619 - DNA, 98 bp, Homo sapiens
gactgcgttcgaatccataacaagttccgatcagaggtgaaaccaacagccagtgatatgctatacatgaaactgccaagttttggaccttatctgga

SEQ ID NO: 197620 - DNA, 100 bp, Homo sapiens
cgcctccactccgtcccccgcgggtctgctctgtgtgccatggacgggttaccacctatttgcaattcaaggagaatataagacagagaagaaagctgtg

SEQ ID NO: 197621 - DNA, 100 bp, Homo sapiens
ctcctctttctcctaccccttgtcatgcagggtgtgagcagggctgagatgggcaccgcggatctggggccgtcctcagaaatcatgaggtccaatggat

SEQ ID NO: 197622 - DNA, 75 bp, Homo sapiens
ttaaggattccaagtaactcttatttgatcaatgtccgagttaccaccatggatgcagagctggagtttgcaatc

SEQ ID NO: 197623 - DNA, 100 bp, Homo sapiens
gcctacgtctctacaggcctcatctggcttcagagaaggtatataccatcatgtacagttgctggcatgaggatgagaacaagttgagcagtgccaacgg

SEQ ID NO: 197624 - DNA, 135 bp, Homo sapiens
ccggacacgccaactcttcgttcgattattagctttagtgaaatgggctaataatgctggcaaagtggaaaaatgtgcgccctaccacttatgtcttggatgaagatgaacctcgattccttgaagaagttgatt

SEQ ID NO: 197625 - DNA, 75 bp, Homo sapiens
gcaaacagtgtttgcctctggttcagctcatacaacagcttcttagctcaagtttatttcacccaggaaagctcc

SEQ ID NO: 197626 - DNA, 100 bp, Homo sapiens
cacagttcctgggaaggtggagccaccagcctctccttgagcgccgccctgtgctgggctgccgggagctcgtcttcaggaacctctccaagatcctccc

SEQ ID NO: 197627 - DNA, 50 bp, Homo sapiens
gtgactgatggagctaaccccttattcaagtcaaacaacgttgaaatgga

SEQ ID NO: 197628 - DNA, 83 bp, Homo sapiens
agaagaacaagaagttgagaccgagaatgtggaaacagagccatccaaaactctgtttgtcaaaggcctgtctgaggatacca

SEQ ID NO: 197629 - DNA, 90 bp, Homo sapiens
gggagatatgttgtgaaagaagcagtagcagtgaatctacagggacgccatcgaatccgatgagcacaatgcctggactccccacccggc

SEQ ID NO: 197630 - DNA, 100 bp, Homo sapiens
agacacagtccagcatgcctgatgtaccatatgaaccagatttggatatcgaaatagattttcccagaggtgcatggctgcctcctaatcccatagtcca

SEQ ID NO: 197631 - DNA, 95 bp, Homo sapiens
tgggacaagatcccgtccatgaatcagatgaagacactgaggctcagagaggttaagtgactcagccaaggtcaaacagctagtaagtggtggag

SEQ ID NO: 197632 - DNA, 100 bp, Homo sapiens
tatactatcagaccttattttcctaaggatgaggtgttggagatgttcattcttgtcctgcagcagtgccacaaggagaatgaagacaagtggaagcgac

SEQ ID NO: 197633 - DNA, 100 bp, Homo sapiens
tgcgtccgagtctccgccgctgcgggcccgctccgacgcggaagatgatccagatcctgatgatggatttaactataaacagatgatggttagagatgag

SEQ ID NO: 197634 - DNA, 100 bp, Homo sapiens
cttctttgacgtggacacctcacagaactccaacgtggagaacctacccccgcacatcatccgcctggtgtacaaggaggtgacgacactgaccgcagac

SEQ ID NO: 197635 - DNA, 100 bp, Homo sapiens
agtctcggtcccgaagccgatctctctctcgttcaaggaagcgcaggctgaggagcgagaacccgagcagcgccatgagcaacactaccgtcgtccccag

SEQ ID NO: 197636 - DNA, 100 bp, Homo sapiens
aaatatttgtaggcgggttatctgcgaacacagtagtggaagatgtaaagcaatatttcgagcagtttggcaaggtgaatggaagagaatccgaagaaga

SEQ ID NO: 197637 - DNA, 83 bp, Homo sapiens
cttccctggctgggctggcggaggccttgctgatgaacctgactgagcactgccagtgaaagatgtagaagataaacctgaac

SEQ ID NO: 197638 - DNA, 99 bp, Homo sapiens
gctaccggaaggccatcgccaaggggaacgcccttttgcttgtgactggcagggctgcgacaagaagttcgcccgctccgacgagctggcccgccacca

SEQ ID NO: 197639 - DNA, 100 bp, Homo sapiens
cacatctctgctttttcccaagaagagcaggaaatggccaaaccccagtcaggatttgcatgaagatgtcgaagaagctggtgcactgcagaaaaatcat

SEQ ID NO: 197640 - DNA, 50 bp, Homo sapiens
gggcagccgccgctcctccgggatgatcatgggaacagcaatagtagtca

SEQ ID NO: 197641 - DNA, 83 bp, Homo sapiens
gcgtcgtcggcctctgggcagcagaatttaagaagaggattacctcaggttccttacttcagtctctatggagaccaagaagg

SEQ ID NO: 197642 - DNA, 83 bp, Homo sapiens
tttctattacatcatgcggcctgatatttgtctttatggaactcagcaacatcacatacaggtgcagtgtgccctgaaccgcc

SEQ ID NO: 197643 - DNA, 75 bp, Homo sapiens
tcttcaagtacatcataatcggcgacacagctctccactgtggtttgaatccacggggtattgatcaccctgccc

SEQ ID NO: 197644 - DNA, 75 bp, Homo sapiens
gcggcgcggtcggtcggcgcctgttctcgggctgtttggcgggtatggcctcacaagtcttggtctacccaccat

SEQ ID NO: 197645 - DNA, 100 bp, Homo sapiens
gtgctgatgaattactacaaaactcccatcgcgtcgtggaggagtactttgtggcccccccagggtgtccgcaatgttgccagtgtctgtctgcagattg

SEQ ID NO: 197646 - DNA, 50 bp, Homo sapiens
attcgttttcaggagcatctccagcaatacgagaattggagacccaacca

SEQ ID NO: 197647 - DNA, 75 bp, Homo sapiens
cggaacgcaggagacacaagaagcggatccagatgacagtcatgtccctttccagggacctcaaggacgactttc

SEQ ID NO: 197648 - DNA, 98 bp, Homo sapiens
ttctacagaatccaactcaaatatcaaggactatgatcagaatgctttcaaggagtttttgggcacatgatggcagggctccaaacgaatcctgcggt

SEQ ID NO: 197649 - DNA, 106 bp, Homo sapiens
cgctggagctgggtcagtccgccgctcaccccgcggccgcaccttcccgccttctcagccgaggtgctcggtggagtcatggcagtgccctttgtggaagactggg

SEQ ID NO: 197650 - DNA, 100 bp, Homo sapiens
tgacaccaagggtcgctttgctgtacatcgtattacacctgaggaggccaagtactatgacgacacctaccccagtgtcaaggagcaaaaggcctttgag

SEQ ID NO: 197651 - DNA, 100 bp, Homo sapiens
tgggcttcgctgctcagccagctcctgcgaccgccctgcgcttcgtgcaccggggcggtccgttgccaaagccagctggacacagagtatagaaaaaaat

SEQ ID NO: 197652 - DNA, 100 bp, Homo sapiens
gaaacctttggagtactggcgaggagagcgaatagattatcaaggaaggccatcaggattctggagtaaaggaagatgaattacaggccattcttaatta

SEQ ID NO: 197653 - DNA, 100 bp, Homo sapiens
gtggtggtcggatttcaccacaagaagggctgccagagctcccagctcctccagcagccgacaggaggcccgtcaagatgcaggcaggcattgccacccc

SEQ ID NO: 197654 - DNA, 100 bp, Homo sapiens
ctcacagaaggcttccctcctggagaatgtatgacaacatgtccacaatggtgtacataaaggaagacaagttggagaagcttacacaggatgaaattat

SEQ ID NO: 197655 - DNA, 75 bp, Homo sapiens
cggacccgtggcagaagatggctgtggagagcccgtccgacagcgctgaggtatgtgacgcattcccagactctt

SEQ ID NO: 197656 - DNA, 100 bp, Homo sapiens
ggaaggtgaaggtgcttggatctggcgcttttggcacagtctacaaggtggcttcccacacttctgactcggacgttccttccggtgtcactgaggtggt

SEQ ID NO: 197657 - DNA, 80 bp, Homo sapiens
cgggactagtggaccagctggtgaaggcagacagcgagtggcgacgatgtcacggtctagatcacattctcgatccagag

SEQ ID NO: 197658 - DNA, 83 bp, Homo sapiens
gtgggatttggatgtgggatccggttccttggtgtcatccagccttagcaaaccagagttgaaaccaagactgaagactgaac

SEQ ID NO: 197659 - DNA, 117 bp, Homo sapiens
caaccaaccctgatttcctgcttctccttttcatgagtgttcctgtggtctctgcacctcctttctcttggatttacactgggcaacgtggttggaatgtatctggctcagaactat

SEQ ID NO: 197660 - DNA, 83 bp, Homo sapiens
agcctgcggagcctgtggggcagatgatgttgaatttgaagtatcatcggaccgacggactgggaaacccattgctgttaaac

SEQ ID NO: 197661 - DNA, 100 bp, Homo sapiens
attggacaccgcttactccagaaacatgggtggaagctgggccagggattgggaaaatctcttcaggcgcttctctgaagtagctttggaaagtagagaa

SEQ ID NO: 197662 - DNA, 101 bp, Homo sapiens
cagctgaaccaagaaaaccttatcagcactatttgaaacttttatctcatctggcttggcgcctgaggttctcccattagtaacagatcaactcctagcaa

SEQ ID NO: 197663 - DNA, 83 bp, Homo sapiens
cctggccgctatggatctattcgactttttcagagactgggacttggagcagcagtggtcacccgtgtgaacagaaagtgaga

SEQ ID NO: 197664 - DNA, 100 bp, Homo sapiens
ctggatcttaccttgcccaccaacttcagagatttgtccaagggttttgactctgggaggagggctgccttatttggagcaccttaatctctctggttgt

SEQ ID NO: 197665 - DNA, 101 bp, Homo sapiens
tgtggtggtctactctgatgtcaatcttgagggctaggttttgcactgattgcaaaaataaagtcctccgagcatacaatatccttattggtgaacttgac

SEQ ID NO: 197666 - DNA, 75 bp, Homo sapiens
gtgcctttcaccttccaccatgattgtgaagccttcccagacatgtgacacaggtttccctagccagcagagctt

SEQ ID NO: 197667 - DNA, 83 bp, Homo sapiens
cctaaccttcccttcttgaacccccagacactggccaaaagaagaccctagacaagaaagatggaagacgaatgtcttttcag

SEQ ID NO: 197668 - DNA, 83 bp, Homo sapiens
tcgggttattcgagtgaccgagaccgcggccgggaccgagggatgaccgagtgggagacagcagcaccagcggtggcagagac

SEQ ID NO: 197669 - DNA, 82 bp, Homo sapiens
tggagatcaagcgcagcgatggagcttctacctggccctctacaagcagatgagcttcctggagaagcgaggctgcccgcgc

SEQ ID NO: 197670 - DNA, 98 bp, Homo sapiens
gtcttaacatgcttcaaataaatcaggggttgtagaaggtgatttagctgccatagaagcatacaagtcatcaggaggagacattgcacgtcagctca

SEQ ID NO: 197671 - DNA, 87 bp, Homo sapiens
tggcaagaaaaccccgaggagccctgttccaaagcctcctggaccgtccaagaagacactcatgaggaccatgatacttccactgag

SEQ ID NO: 197672 - DNA, 83 bp, Homo sapiens
aaagcttttggacattcctgggcaagagtgagccatggagctacgtgtggggaacaagtaccgcctgggacggaagatcggga

SEQ ID NO: 197673 - DNA, 100 bp, Homo sapiens
ctgaggagaagtacatcaaggggccttcgctgagctaccgctgcgccaacggaggaggctactaccactattcctactcggtggtgaggggctgcgaccg

SEQ ID NO: 197674 - DNA, 80 bp, Homo sapiens
cggtgtggtggaagcagaccttgtggaggccttgcaggagtttggacccatcagcagggcatatacttctcttgtcttgg

SEQ ID NO: 197675 - DNA, 101 bp, Homo sapiens
gaacagtggacagatggttatgcttttcagaatcttatcaaagctggaagtcgagtgtgctactcaactcaggagatttggagacaaactgaacttccggc

SEQ ID NO: 197676 - DNA, 98 bp, Homo sapiens
ttgataatccaaatggagatggaagatgtgtgacatgtatatattatcttaataaagactgggatgccaagggtttgaacataatctttcatgtagct

SEQ ID NO: 197677 - DNA, 82 bp, Homo sapiens
tccgggtcttccagagcgtgaagatcaagatcgagacgtctcccacaacctgctccgggcgctggacgttgggctcctggcg

SEQ ID NO: 197678 - DNA, 98 bp, Homo sapiens
aatggcagtaaaactcattttctggggaatagggctttgaagacaagattcccaaaaggagattctctgagatgcaaaatgaaagacgagaacaggca

SEQ ID NO: 197679 - DNA, 90 bp, Homo sapiens
ctgaagaggagcgccagatggtggaggaatacacttatttatgaagtcctgacacacctgcgcatcacctcgcacattgggatcggcctc

SEQ ID NO: 197680 - DNA, 100 bp, Homo sapiens
ggtcaaatgttgggacttgggaatcccagcttttcagatccatttacaggtagagacagattctctggaagtaccttctcaaggccagtgtagagctccc

SEQ ID NO: 197681 - DNA, 75 bp, Homo sapiens
ggaggctgccacccagatgcctcatgctcctcaactctaggagtaatcttatcagccattgtctctactgatccc

SEQ ID NO: 197682 - DNA, 97 bp, Homo sapiens
cagccgcgttctcctccgccgctcctccgggcttgccctggagccctcagaggtcctgctgtactagccaccaaagcagctgctggtactaagaaat

SEQ ID NO: 197683 - DNA, 100 bp, Homo sapiens
ctggttgttccgttgcgagctgcagctgcgatctctgtggtaggcccaggtgtttgaaatgatcattaatcctggagataatgtcctcctagatgaacct

SEQ ID NO: 197684 - DNA, 97 bp, Homo sapiens
agcgccgcgccaaggccatgatgctgcgggcagctgtgctccgcaaccagatccatgtcaagatgcctgaggaaacccagacccaagaccaaccgat

SEQ ID NO: 197685 - DNA, 100 bp, Homo sapiens
tccagtgctggtgttggatgtcaatgatgatttttctgaggaagtaaccaaacaagaagacctcatgagagaggatttccagatgtgacttgcactcaga

SEQ ID NO: 197686 - DNA, 89 bp, Homo sapiens
tagcgtgtttatctgacacggactgttgacatccctgcctgcgctggcggtcccacccccgactcccaccaaagcggcacctcccgcgt

SEQ ID NO: 197687 - DNA, 125 bp, Homo sapiens
gattattgaagaagattttaatattgcactaggagtttttgctttagctggactaacagatttggagacagagctactggatctcagccttgtcaaagatgccagatgtgggagacacgccaaag

SEQ ID NO: 197688 - DNA, 88 bp, Homo sapiens
tggttgtgagcagggtctgcacgaaataaagctcctgggcaaggggacgtctgcagctgaacaacaagggaggtgtcacagttttcca

SEQ ID NO: 197689 - DNA, 50 bp, Homo sapiens
cgccgacccgccgagcaaaatgagacacggggtcttgccatgttgcccag

SEQ ID NO: 197690 - DNA, 75 bp, Homo sapiens
aggcctacgaggaggtgcgcgagaagtacaaagcatcctgaggttagcattacacttctcccagtggagcccatg

SEQ ID NO: 197691 - DNA, 101 bp, Homo sapiens
cttccatcagtattgagccaggagttgaggtggctgttgacatggaatttgctaagaatatgtatgaactgcataaaaaagtttctccaaatgagctcatc

SEQ ID NO: 197692 - DNA, 75 bp, Homo sapiens
tgggcaacagaatattggtcaagttgctgaccttgaagaaagaccacagcaagattctttcattcgtctcctcct

SEQ ID NO: 197693 - DNA, 80 bp, Homo sapiens
ccagaatgtcccaaggaacacctgggcaacagaatattggtcaagttgctgaccttgaaacaagttgctttggcagatgc

SEQ ID NO: 197694 - DNA, 100 bp, Homo sapiens
tttttctctttagctcggcttattccaggggtgtgtttcgtcgagatgcacttgtgtgacttcattgagacacattacctgaatgagcaggtgaaagcca

SEQ ID NO: 197695 - DNA, 96 bp, Homo sapiens
ccgggctcggcggcgcgggtgaacgtgagcggttggggtgactcagtgggaacgccatctgagcggggcatgacctatgacgcactccacgttttt

SEQ ID NO: 197696 - DNA, 100 bp, Homo sapiens
aaccttcttatggattggattgaggttcagatcaacaacgaggaaatatttccaacatgcgtggctctgctggccgtccgctctgactaccactgtgccg

SEQ ID NO: 197697 - DNA, 98 bp, Homo sapiens
cgccgcgcgaggaaatggccgaggggccggagccacaggtgtcgtgaaaactacccctaaaagccaaaatgggaaaggaaaagactcatatcaacatt

SEQ ID NO: 197698 - DNA, 95 bp, Homo sapiens
agaagatggaatcaaggggtgtggaattaccttcactctgggaaaaggcactgaagttgatgagtgtgggtcagagagccaaactgactatatct

SEQ ID NO: 197699 - DNA, 74 bp, Homo sapiens
ggcctaccaggaggccaggggtgtcgccatgtactttaggatggagctgatgcatgctgaaaaactgaggaagg

SEQ ID NO: 197700 - DNA, 75 bp, Homo sapiens
tccatttcatgatattccaatttatgcagataagaatccgtctcttgctcaagtgaaaattgaagaagcaaagcg

SEQ ID NO: 197701 - DNA, 82 bp, Homo sapiens
atgtcacgctcccaccagcagcgcctatgagtttgtcacctggctcgatggcattaaggcccactgatgatggtgaagaaga

SEQ ID NO: 197702 - DNA, 96 bp, Homo sapiens
ggctgcgctgctggcctttgtgagcctcagcctgcagttctgccctgatccttcaccagctaggccgctacagtctggcggagaagatcctccggg

SEQ ID NO: 197703 - DNA, 100 bp, Homo sapiens
agctgagcgagctgtcagagcccggggacggcgaggccctcatgtaccacacgctgatgaacttattagtcctaaagacattgatcctgtccagcgctat

SEQ ID NO: 197704 - DNA, 82 bp, Homo sapiens
ccgcagcctccgcggatccgggcccgctcggcccctcccatgatgccatggacaatattaccaggcagaaccaattctacga

SEQ ID NO: 197705 - DNA, 90 bp, Homo sapiens
caaagtgcagctgactcttcccacgacagccctgcccttcccatgaggcaggctcttcatcagctacggtgaagctatctaaaccggtgg

SEQ ID NO: 197706 - DNA, 80 bp, Homo sapiens
gaaaaacgcaagagtctcttcattaaccatgctttgaagacaagattcccaaaaggagattctctgagatgcaaaatgaa

SEQ ID NO: 197707 - DNA, 100 bp, Homo sapiens
aagtatgacttcataatggagaccaagctcaaacccctccggaagatcacaaggtttacatctggcacaaacgtagtgaactgccaattgcggagctgac

SEQ ID NO: 197708 - DNA, 100 bp, Homo sapiens
aatgatatatgccattggtgggtatggtcctgcccacatgaacagagctcaaagcatgcctgtttttaaggaagtaaaggtacatctgttagaagatgca

SEQ ID NO: 197709 - DNA, 82 bp, Homo sapiens
gccagtcttctatgtttccacatcggtcagaaaaagatgtgaccaagaatatggcccaggtgaccaaagccctggacaaggc

SEQ ID NO: 197710 - DNA, 100 bp, Homo sapiens
acccaaacaacatctcctgctattccttgggctgcctttcctgcaggtttattcttcagtccaaggaagcaattcacagtcagctgttagagaagcagaa

SEQ ID NO: 197711 - DNA, 75 bp, Homo sapiens
ctggcaagaagcgtgcggggaccgatggaagaggactgtcagaaggacgtagaaggcacggttttactgtgagga

SEQ ID NO: 197712 - DNA, 102 bp, Homo sapiens
cctgtgtggggcccaccctccgcttagaccatgctcagcctccaagcagccttgtcatcgacaaagaatctgaagtttacaagatgcttcaggagaaacagg

SEQ ID NO: 197713 - DNA, 90 bp, Homo sapiens
cctcccgagtaactgggactacaggatgctttaatctggatcccaatagagttttggatgtcattttagaagtgtttgaatgcaggccag

SEQ ID NO: 197714 - DNA, 95 bp, Homo sapiens
atgaatttgatgaagaaagtgaggaagggaaagcagcaatttcacaactcaggggttttgtctccacaattatccgtttacttgacagcccctca

SEQ ID NO: 197715 - DNA, 101 bp, Homo sapiens
agttaaatttttatatgatgaaactcaatacggaacagagactctttggtcaaaagatatggcgccatatcaggagactgtcatgcagttccttgaaaaac

SEQ ID NO: 197716 - DNA, 82 bp, Homo sapiens
acctggcacccagagcacttcttctgctctcactgcggagaggtgtttggtgcagaaggatcaaaatacttgctggatggtg

SEQ ID NO: 197717 - DNA, 75 bp, Homo sapiens
ggactctcagaataaaggaaagacctcagagtgttctcagacttcagaaatgggcttgggaaccagctgagttca

SEQ ID NO: 197718 - DNA, 100 bp, Homo sapiens
ccacgataaatttggattaaggaacagcgagctgtttgacccctttgacctcttcgatgtgcgagactttggaaagacctggaatggccaaatatcaagg

SEQ ID NO: 197719 - DNA, 100 bp, Homo sapiens
tgacccatgcattggttaatatcaggaaaatgtttataggaggccttagctgggacactacaaagaaagatctgaaggactacttttccaaatttggtga

SEQ ID NO: 197720 - DNA, 76 bp, Homo sapiens
ttacctgtcaccttggctctcccacccaatggagatggctctaatggatgtgtcagaactaaggaatgaattacag

SEQ ID NO: 197721 - DNA, 82 bp, Homo sapiens
atatggctgtgctgcagcgacttgtggacatcgggctggacctggaggagcagaatgcggcacctgcggaactcgagtcatg

SEQ ID NO: 197722 - DNA, 90 bp, Homo sapiens
cgcctgcctccccagcaaatcgagaaaaacctcagcgacctgatcgacctgattcacagtctgagaatgaggcttcaccagtaaaacggc

SEQ ID NO: 197723 - DNA, 84 bp, Homo sapiens
cgcgccgcgtgcccggccgcgcccagcaggtgagaagccctaccactgcaactgggacggctgcggctggaagtttgcgcgctc

SEQ ID NO: 197724 - DNA, 100 bp, Homo sapiens
tccgcttctcagaggacgccttcaacaccaccttcatctccaccatcggcctcattgctacgatttcagagtaccctggtaatagctgagcatgcaaatg

SEQ ID NO: 197725 - DNA, 101 bp, Homo sapiens
caatctgggcggcgtgcccagcaagagattaaagatgcagtacgccacggggccgctgctcaagttccagatttgagttttccgtctgatgaaggttggcc

SEQ ID NO: 197726 - DNA, 100 bp, Homo sapiens
tgacatagacctggaccagccagaggacgcgggctctgaggatgagctggaggaggggggctgtcttcatcggtggaatacaacataatggagttggaac

SEQ ID NO: 197727 - DNA, 95 bp, Homo sapiens
cgggacccgaaatccttcctgtaccgcttatgccaggccgatcccgacctggactcagacaagacctgcctagagctggaacgttacctccagag

SEQ ID NO: 197728 - DNA, 75 bp, Homo sapiens
cgcttgcaggcaagttgtcaatgttacagaagcacagagaggttaagtaacttgcccagtgctgcacagaaacta

SEQ ID NO: 197729 - DNA, 89 bp, Homo sapiens
ggctgctgttgcttctgggccagaggaagagaatgagatgcctgaaaacttcatgcctcctgttcccatcacatcaccaatcatgaacc

SEQ ID NO: 197730 - DNA, 82 bp, Homo sapiens
ggctgtgggacctgcagcagctgagaaaggagctcggggactcccccaaagacaaggacgactgggtttggattcagaagag

SEQ ID NO: 197731 - DNA, 82 bp, Homo sapiens
tggacctggagactctcagggtcgaaaacggcggcagaccagcatgacagattactgacagccctgtcctaggagcacaacg

SEQ ID NO: 197732 - DNA, 82 bp, Homo sapiens
cacctccgagcgcaaggacagcgcgaggtccgcgcagcccagcgcagccatttctccaaggagaagtacatcctggactcat

SEQ ID NO: 197733 - DNA, 100 bp, Homo sapiens
atggcttcaaccctgagggcaaagccttgctgaagaaaaccaagaactctgaggagtttgctgcagccatgtccagacacaagatggtgaaggagaccca

SEQ ID NO: 197734 - DNA, 83 bp, Homo sapiens
gacggtgccccatagatggccagctttcccccgagggtcaacgagaaagagatcgccgagagggtgacctctctgggcaagga

SEQ ID NO: 197735 - DNA, 91 bp, Homo sapiens
gatctgaagagctatggtgaaacaccactgaagcattgccaagggtgtcaaattgagaaccaggtagatccccaccacctacagtaaaaag

SEQ ID NO: 197736 - DNA, 75 bp, Homo sapiens
gtcctggctaaacttattcaaaatgtatttgaaatcaaactacagaagggcgctatattcctcctcatttaagga

SEQ ID NO: 197737 - DNA, 98 bp, Homo sapiens
ggacccccaggtgagccccatgcactgcctggacgaggaaggcgatgactcagatgggggaatgctggcagactttgtgtcccagacttctccaatga

SEQ ID NO: 197738 - DNA, 51 bp, Homo sapiens
tgggatgtgaaaactctgttactgaagatatttggagttcttacaacatgg

SEQ ID NO: 197739 - DNA, 90 bp, Homo sapiens
ccaacgtgggcaagtcctccctcatcaactccctccggaggcagcacctcaggaaaggagttaagggagcatggagaaaagaagaaacgc

SEQ ID NO: 197740 - DNA, 90 bp, Homo sapiens
cgctcttcctgctcaggggactcacggtgaccccggagccactccccagcccagcctccagtgtccacaggatgaaatgtccgagtcagg

SEQ ID NO: 197741 - DNA, 51 bp, Homo sapiens
gagaaccgggcccagcagcactgggtgaacaagcaacttgcagataaggag

SEQ ID NO: 197742 - DNA, 89 bp, Homo sapiens
gaagatctgggtttgagtccagcagtgctttaggaaagatgaatgggagggctgattttcgagagccgaatgcagaggttccaagacca

SEQ ID NO: 197743 - DNA, 73 bp, Homo sapiens
ttttcagtccttcccccaagaccaggcgccagggcgagatgagaacgggattcccagtagtccccagaaagta

SEQ ID NO: 197744 - DNA, 96 bp, Homo sapiens
ttccttagaatacgcatggttaattgatgtgcaggctggaagtcttacagctaaggtcacagcaccacagttacatcatgctgatgacagcttcct

SEQ ID NO: 197745 - DNA, 98 bp, Homo sapiens
cggggagaaggtgttgttgccggagctgagaccgggcggccacagtccgcagggatgaacctcgagttgctggtcgcccatgtttgatggaaaagtcc

SEQ ID NO: 197746 - DNA, 100 bp, Homo sapiens
gcttggatgaccacctctaccatcaagacctgacacggtgcaaaagggtgaggtggctttgaccccgggttgcccggccagcacgaccgaggaggtggct

SEQ ID NO: 197747 - DNA, 98 bp, Homo sapiens
gagtgggaggtgctgagccgctcaggtatgggctacgtgagttcgtggtgattgcccctgctgcacacagtgacgctgttctcagcgaatctaagtgc

SEQ ID NO: 197748 - DNA, 100 bp, Homo sapiens
aggaaaccagccctagaacttctgcattacctgaaaaacaccagttttgcttatccagctatacgatatcttctgttgctgacttgctcatcagttttgc

SEQ ID NO: 197749 - DNA, 100 bp, Homo sapiens
gggcagccgggcacctgcaagtactggatcctcgacctaggttatcaatactctggctgaccatcatcatcgtgggactgactttggtggaagtccttgg

SEQ ID NO: 197750 - DNA, 74 bp, Homo sapiens
gcggaggcgatcggtgctgattcggcgcgatttgaggagctgctgctgcaggtcattgattacaacggggaacg

SEQ ID NO: 197751 - DNA, 83 bp, Homo sapiens
ccaggactgcgcccccgggagcgggcgcccagagccacataaagaagatccctaatagtcatttctcaacaattatatagtca

SEQ ID NO: 197752 - DNA, 90 bp, Homo sapiens
gtttttttaatgtggttggaacaactgagttgagcgcagaggcacgaaaggaatttcccaagctgaaatccgagtggctatgaatgtggg

SEQ ID NO: 197753 - DNA, 51 bp, Homo sapiens
tcagagtggaggaagtacagccagcactaaggcaggaacggatccaaattc

SEQ ID NO: 197754 - DNA, 71 bp, Homo sapiens
gccacttccgcgagcccatccgtctcaagactgtgaaaccagactcaagaatgaacaatccgtcagaaacc

SEQ ID NO: 197755 - DNA, 82 bp, Homo sapiens
ggaagagattcagccagcacactcctcgcgagcaagggattgtgggactttaccaaatcggtttgtaataacacctagaaga

SEQ ID NO: 197756 - DNA, 100 bp, Homo sapiens
ctgtctcttcgtcaccttcgacctgctcttcatctccctgctctggatcatcgaactgaatgccatcctcttcctgcagcagcttttggacttccaggag

SEQ ID NO: 197757 - DNA, 75 bp, Homo sapiens
gcaactaaggaacaaaagtaatgaagatttacacaaactttggaattggcagcaatgaaacagattctcgttaag

SEQ ID NO: 197758 - DNA, 87 bp, Homo sapiens
ccagcagccgtccggagccagccaacgagcgacatcgctattgcggttccgaggcagtgggaagagatgcggcccctggacatcgtc

SEQ ID NO: 197759 - DNA, 96 bp, Homo sapiens
ctccgtttcctgccttgctctttggaccacattgtcaattcacaccgtttcagctccagaatttgtttttgaacatggctatcaaacttacctgcc

SEQ ID NO: 197760 - DNA, 100 bp, Homo sapiens
gggtatcagccgaaccaagtactgggaggatgatgatgctgaagctatccttgctgcagacttcgaaattggtcactttttacgtgagcgtataatccca

SEQ ID NO: 197761 - DNA, 88 bp, Homo sapiens
aggaataacaaggcttatctctaggatccataagctcacggatgattgatatccagaccaggatggctgggcgagcattggagcttct

SEQ ID NO: 197762 - DNA, 82 bp, Homo sapiens
cattggggtcacggtgtttgccgtggggaacacttgcacctcctgcgccgccgccccccatccaaggatatgccttcaagcc

SEQ ID NO: 197763 - DNA, 100 bp, Homo sapiens
gtgaaatttggctttcattcatgaatgagatcatccaattatgatgggttttgaaccccttgtgaaccagaggctacttccacctaccttccctcgatat

SEQ ID NO: 197764 - DNA, 90 bp, Homo sapiens
ggaacgtcatccctgatatccctgaccacttcctgtgtctgtgggagcactgtgaggtgaacctgccgctgctcaccctgagccagcccc

SEQ ID NO: 197765 - DNA, 99 bp, Homo sapiens
cgtttcccagcgctgcgcaggacttctcctggcggcgctgcggatccagggggtcggctgccagtgaatgccccagccctgcacactttggaaactaaa

SEQ ID NO: 197766 - DNA, 50 bp, Homo sapiens
ccgcttcgtgttcctcgctcgccccacagctgtgagccgtgagctttgag

SEQ ID NO: 197767 - DNA, 82 bp, Homo sapiens
ttaagaaggataattaattacacaaacccttcacagactgctctgccattgagacccagagcagcagttctgaagagatagt

SEQ ID NO: 197768 - DNA, 82 bp, Homo sapiens
agcaaggaaaagatccctggaatatgaagagacacagtatggtagccacacccccagtttggacatcacatttcacagtcag

SEQ ID NO: 197769 - DNA, 100 bp, Homo sapiens
cgtcgtcgtctgccttcgcttcacggcgccgagccgcggtccgagtggtcttcaagctgacagagaagctgacggaacagaaggagtggatgaagatata

SEQ ID NO: 197770 - DNA, 96 bp, Homo sapiens
cagctgctcaaacagcagcttaaagatcagtatttcatgcaaagacatcagctacttaagcgccacgagaagagtcatattaaatctgtagactca

SEQ ID NO: 197771 - DNA, 100 bp, Homo sapiens
cagattggaccctgtaaaagctgtaaaatgataacagagccaggcccacaactcctctttctgtaggcaccattgtcccacctccgaggcctgcttccag

SEQ ID NO: 197772 - DNA, 85 bp, Homo sapiens
gccagggtccctgaagagggaagacacgcggaaacagggtgtccgcaatgttgccagtgtctgtctgcagattggctacccaact

SEQ ID NO: 197773 - DNA, 75 bp, Homo sapiens
cccaccatggagacccgctacaacctgaagagtccggataaacaggggtcacatgacgacagaagccaagagggc

SEQ ID NO: 197774 - DNA, 100 bp, Homo sapiens
tctctgttttggaaaatggaaaagccttgagccgggccatgcttctcacatcttacctgcctcctcccttgttgagacatcgtttgaagactcatacaac

SEQ ID NO: 197775 - DNA, 81 bp, Homo sapiens
accatcaaagtgcgcccacagcagcaaccttggagcaggcagtgtactaatggtcacttgatgtgcgctggctgttttatc

SEQ ID NO: 197776 - DNA, 100 bp, Homo sapiens
ttcaattacaaaaaagaggatttctctgaagcaacgctgaaattcaccaaagattcaagatggaaaaggtgatgtaaccattacaaatgatggtgctacc

SEQ ID NO: 197777 - DNA, 100 bp, Homo sapiens
ttccaagggagatgacccagaggatgccaaggcaaagtttcggagcaacatcccctgtcacctggttgatatctcttgcggattaccctgcagtgccacg

SEQ ID NO: 197778 - DNA, 49 bp, Homo sapiens
caggcatcatccgctatgcaattgggtccatgctgctcctggccccaaa

SEQ ID NO: 197779 - DNA, 98 bp, Homo sapiens
ccagaccggccgctctcccctcctctcacggcacctcccaccatgaaggtgtgcattgtgcagaagcgggacacggagaagatgtacgccatgaagta

SEQ ID NO: 197780 - DNA, 76 bp, Homo sapiens
cgccgctctgtctacaacccgaggtcatcatcagatttgaaatatttaaagtggatacaaaactatttcagcaatg

SEQ ID NO: 197781 - DNA, 80 bp, Homo sapiens
gatgggcagcaagatggcgtctgctagtagggtcgttcagtctttcccagggaactccgatgaagtgttccaacaaaatg

SEQ ID NO: 197782 - DNA, 96 bp, Homo sapiens
ctggtttccagcaccacacctgggccgagctgaagcaggtgtcatggagaaactccagctgggcccagagattctgcagcgggaaaatccaaggct

SEQ ID NO: 197783 - DNA, 100 bp, Homo sapiens
agctgtggagctgttgcatgaagctgacgccctcctcttctggctcagcagagaggaacttgatacagatgaatatgaagaaaccaaaaaggaaactctg

SEQ ID NO: 197784 - DNA, 95 bp, Homo sapiens
cctcccagccacttcacatagtcctcgagtccctgaagagagaaggcaaagaacctctggtgttgaaagaacaccttccaccatgaccacctcag

SEQ ID NO: 197785 - DNA, 75 bp, Homo sapiens
cgaaagcctatcagcatagttaaggattttatgggcagctgcagaagttctgtcccccacactaccccgattccc

SEQ ID NO: 197786 - DNA, 101 bp, Homo sapiens
gtgatggagattttgatgtggatgatgccaaagttttattaggtctatcagccacagtctctgcaagtttccaagagcagcagaaaatgaacacattgcag

SEQ ID NO: 197787 - DNA, 83 bp, Homo sapiens
ggcgactagaccccaaaacatcgagacgctgcagaacgcggcctgacatttaccccggtaactgctgggcatttaaaggctcc

SEQ ID NO: 197788 - DNA, 100 bp, Homo sapiens
ctcctgaggaagcgggagtggaccatcgggcggagacgagaaaggatctatgtttatgaaaataaaaaggaagcattgcaagctgtcaagatgatcaaag

SEQ ID NO: 197789 - DNA, 100 bp, Homo sapiens
gccgcttcctgcaagaaaacaagcagcttctgcacgacgcactggcccaggacctgcacaagagtgagcctcgcagctggtccctgctagagcagctggg

SEQ ID NO: 197790 - DNA, 100 bp, Homo sapiens
cggggctttcgccggggcccaggcccagggaccaggcggaggcgtcgcgggagcctttggggcaccacagagatgcggggggaaatttgcagtggtgaga

SEQ ID NO: 197791 - DNA, 78 bp, Homo sapiens
gaggcccacctgctgacatctacctgccagagacgtctcccacaacctgctccgggcgctggacgttgggctcctggc

SEQ ID NO: 197792 - DNA, 100 bp, Homo sapiens
gtgcttctaaaattggggataaaaccatccatcaattactaccaaagtacaggggctcaggtccaggtggcaggggatatgctacccaactcaactgagc

SEQ ID NO: 197793 - DNA, 82 bp, Homo sapiens
atgttcaagaagtggccggagagttctgcatgttgattcatcagggagctgattttggatggatctttacagttgatccagg

SEQ ID NO: 197794 - DNA, 51 bp, Homo sapiens
gcctgctgaccgagcgcgagagaaattgacattgaacgctgtgtgagagaa

SEQ ID NO: 197795 - DNA, 100 bp, Homo sapiens
ctcaacctgactggctccttctggaatgactcctttgccaggctctgtgtgtactactcggaagaaaactggagtggggtatccacagctcagcgcagtg

SEQ ID NO: 197796 - DNA, 80 bp, Homo sapiens
gctgctcgacgtgctgtgcttactggtcgacaatgcagatcttcgtgaagactctgactggtaagaccatcaccctcgag

SEQ ID NO: 197797 - DNA, 100 bp, Homo sapiens
tctggctttggccactttacttcctgccagagactctacaggggcaggtaattcactggtccacaagcggtctcctttacgtcgaaaccaaaagacccca

SEQ ID NO: 197798 - DNA, 75 bp, Homo sapiens
cgagctagtgctggagatactcgccaggttgaggtgctcaagaagttaccggtattgtaagaacaagccgtaccc

SEQ ID NO: 197799 - DNA, 75 bp, Homo sapiens
gggtgcgggcccggcgccgcaccagcagaacggaccccaggagcaagcacaagttcaaaatccacacttacggaa

SEQ ID NO: 197800 - DNA, 76 bp, Homo sapiens
ggacgttgagagaacgaggaggaaggagagaaaatggcgtccacggagtgcctggtgaagaatgtgatgggatcac

SEQ ID NO: 197801 - DNA, 84 bp, Homo sapiens
tcagctctttccccgtcagcatcccagccgtgctcacgggggatatgagactttctactcggaatatcctgagtgttgcgtgga

SEQ ID NO: 197802 - DNA, 82 bp, Homo sapiens
ctgagcgcgtggtggagttttcctgtggtatgtgcactgcgcgtgaccagccgggcccgcagccgcatcctcagggcagggg

SEQ ID NO: 197803 - DNA, 100 bp, Homo sapiens
accatgttccgggtgaccccgagttcacgcagctgtcccatgccgtgctgctggagctggtcatcgacaggcatgttatttgaaagcaattgagacgcaa

SEQ ID NO: 197804 - DNA, 90 bp, Homo sapiens
cttgcgagtgagacccggctggaggaatgttttaattcttcggaaataccaagtggtctctaaacgggcctgaatttgaagctaggatcc

SEQ ID NO: 197805 - DNA, 83 bp, Homo sapiens
ccaccctcgctccctctgctcttcctcccttcgctcgcaccatggcttcaacggaccacaccaaaatgccatctcaaatggaa

SEQ ID NO: 197806 - DNA, 100 bp, Homo sapiens
gtctgaaggactcgccccgcttcaggtgacagtatgttgactgctgtctctgtggccagagattgtggaatgattctacctcaggataaagtgattattg

SEQ ID NO: 197807 - DNA, 80 bp, Homo sapiens
caagaacaagggccgcgatgtggaagagcagctgatgagccagatccgggagacgcagcagctctgccaccagaccctgt

SEQ ID NO: 197808 - DNA, 100 bp, Homo sapiens
cacctgtgacgatgagccagagacctacgtggcagctgtgaaaaaagccatttccgaagagtatgaagagtgtaaagacctcataaaatttatgctgagg

SEQ ID NO: 197809 - DNA, 82 bp, Homo sapiens
gatggctgcaagactgtcgacctaaagcctgactggggcaaggttctctccataaatgaagaagggctaaggcgatgcgaag

SEQ ID NO: 197810 - DNA, 100 bp, Homo sapiens
caatatgaagtctatgccaccaagaaatttccatcgtgaagcctttaatcatcttacccaaggctctaacaacctgggtaaactaaagatgtgaatagag

SEQ ID NO: 197811 - DNA, 100 bp, Homo sapiens
gaggatgaagattcaccaaataagctatatactttggttacctatgtacctgttaccactttcaaaagtatgatctcgtgaaaccttgagagaaactgaa

SEQ ID NO: 197812 - DNA, 98 bp, Homo sapiens
cagaggattgtttgtggagtcactgaagtcacaacttgccaggaggttgtcatagccttagctcaagcaataggatcaaaatacttgctggatggtgg

SEQ ID NO: 197813 - DNA, 80 bp, Homo sapiens
gatcatcctgctgggcttcgtccagatcgggaagggtgtccctggccagtgtccttccacctgtccacaagcatggggaa

SEQ ID NO: 197814 - DNA, 50 bp, Homo sapiens
aggccatgctgacctacaagcagaagagggagtaccctgacttctaccgg

SEQ ID NO: 197815 - DNA, 75 bp, Homo sapiens
gaaatgtccatccacttatccagacccaatggaacatcagcaatgcttctggtgaacctggtgctgggggacggc

SEQ ID NO: 197816 - DNA, 75 bp, Homo sapiens
gaatggagcaaaatggcggatcatgtgcagtcttcccgaggctgctgtccatgacactgagtccagatcttcaca

SEQ ID NO: 197817 - DNA, 119 bp, Homo sapiens
cccgcccttctcagtacctgtgcagaatggtgcccagccccccagcaaggtccgagtacaaggcccacttctccctccgcaacctgcatgccttctctgtggagccgctgctcatctac

SEQ ID NO: 197818 - DNA, 98 bp, Homo sapiens
cattatcagagcaagagccggatagaggacaagatcaccaaggggaagctccatggctccatcgatgtccggctgtcggtcatgtccatcaacaaaaa

SEQ ID NO: 197819 - DNA, 101 bp, Homo sapiens
tgtttccagtcatgaggctgtggtggatctttctgggtcaatattctctcgagttgaagaagactatctctggaggataaaacaactaggatcacactctc

SEQ ID NO: 197820 - DNA, 98 bp, Homo sapiens
gcgctttggagccggccccaggcagcgtgtgtcggtcgcctagtctggagaactagtcctcgactcacggtggattctccacagttttcctcgtgcgt

SEQ ID NO: 197821 - DNA, 101 bp, Homo sapiens
cttccgccgcacgtggattcagcgcgatgcccaaatccaagcgcgacaagaaagatgaacagtttctgctgcagcggctggcagacggggccatcgacctc

SEQ ID NO: 197822 - DNA, 50 bp, Homo sapiens
gcgccgctctccagcccgcttgaacggattggcagccaccatttgcatgt

SEQ ID NO: 197823 - DNA, 87 bp, Homo sapiens
tgcagactttgacaatatgcctttccgaggaaagtattataactggaaaccctatactggagcaacgcacctcttgctttttcctcc

SEQ ID NO: 197824 - DNA, 90 bp, Homo sapiens
caaagaaggtctttcaaaccagctccgtgtacagacagaggggtggcctatgtatgcacagctactgattgatttattcaaatatttagc

SEQ ID NO: 197825 - DNA, 50 bp, Homo sapiens
caggttttggactcgctgaagcggtgcagagagagctagcagctgttatt

SEQ ID NO: 197826 - DNA, 71 bp, Homo sapiens
ttccgtactgccagtgtcagcatcaaccagacagatcgggcccgggacacccagacagatgagattgtcgc

SEQ ID NO: 197827 - DNA, 96 bp, Homo sapiens
cggcgcgaggacagcgcgtgcccgcgaggagccgccgcgcgcccgcgccctccgcgcgacgccaggacccttgaacatctgtgaagaaatgactat

SEQ ID NO: 197828 - DNA, 100 bp, Homo sapiens
tgacttcataatggagaccaagctcaaacccctccggaagagctggagtggaccagagaaattgcttgctttagatgaactcattgatagttgtgaacca

SEQ ID NO: 197829 - DNA, 75 bp, Homo sapiens
cgggcttggcgcggcggccagaggaaccccgagcgctgtgcttcgccgtgagccgctcgctgctgctgacgtgcc

SEQ ID NO: 197830 - DNA, 100 bp, Homo sapiens
gagactcaaaagaccttcacgcttctggatactctggatgaatattttgaatatgatgcagaggagttcttggtctctttggccttgctgataacagaag

SEQ ID NO: 197831 - DNA, 80 bp, Homo sapiens
attcctcagctacgaggaggcgctgaggagagttcttgaggccaaatctggctcctaaaaaacatcaaaggaagcttgca

SEQ ID NO: 197832 - DNA, 98 bp, Homo sapiens
acctggctaactggatgatacctgtcttgagagctgatgacaataacatgggcaatggctgctctcagaagctggcgactgctaacctcctccggttc

SEQ ID NO: 197833 - DNA, 75 bp, Homo sapiens
ttcggtgctgtgtgccggcgcctctggcagaaggagcttcaagagcagggggagatcagaatcgtccagctgggc

SEQ ID NO: 197834 - DNA, 75 bp, Homo sapiens
gtctcatcatgaccaaatcattggaaaacattttgactttggctgggttcttctcaccactaaatccaatacgag

SEQ ID NO: 197835 - DNA, 100 bp, Homo sapiens
catggtgggaattgacgcagccattgccaatgcttttcgacgaattctgctagctgaggacaacgtctgacatgagccgagtgttctgctcacactgtgg

SEQ ID NO: 197836 - DNA, 100 bp, Homo sapiens
acagatctgaggatcaaggagaagctctttctggaagctttcaaagctttggggggaaaaggtgagcgagtgctgtgctttcatgggcctcttctttatg

SEQ ID NO: 197837 - DNA, 100 bp, Homo sapiens
caccatgacgtccatccatttcgtggttcacccgctgccgggcaccgaggaccagctcaatgacagcatttaaatcaaacggtattgagatggattgggt

SEQ ID NO: 197838 - DNA, 100 bp, Homo sapiens
aagagagctctgaaaaagacaagcttgctattccaaagtgatcctgccatgaagcagtttctgctgtacttggatgagtccaatgccctggggaagaagt

SEQ ID NO: 197839 - DNA, 75 bp, Homo sapiens
gacagttactggaacatagagattttataggaagaagatagtggtgagctggcaaagccaaagattggttttcca

SEQ ID NO: 197840 - DNA, 98 bp, Homo sapiens
gtttctcagagccggcggatgttcatgggcagcaccatcgagccagaagcagtatttgtcctgcaggacccagtgctccataaaggataatagtttcc

SEQ ID NO: 197841 - DNA, 100 bp, Homo sapiens
atggttggaaacaatccatatgcgaccacagaaggaaattcaacagaacttagcataaatgctgaagatttgtccagtcattgtgccacaacattcaaag

SEQ ID NO: 197842 - DNA, 90 bp, Homo sapiens
atgcatgaagcaatgcagaagtggtattacaaagatcctcagggagaaattcaaggtgctgtaaaatacctggagtgctcggcgctcaca

SEQ ID NO: 197843 - DNA, 95 bp, Homo sapiens
gaggtgtatgtgcccacagtgtttgagaactatgtggcagatatcgaggtggatggaaagcagcatggcacattacacttctgtggatttaaagt

SEQ ID NO: 197844 - DNA, 100 bp, Homo sapiens
tggggcttcacccttaaggggggtctggaacactgtgagccgctcacagtgtctaagcaagagtgagccatggagctacgtgtggggaacaagtaccgcc

SEQ ID NO: 197845 - DNA, 100 bp, Homo sapiens
gaagtccacttcagaaggtctgcttggtgacttggatacagaaatttcctgggctaaacatttaaatcaaacggtattgagatggattgggttatgaaac

SEQ ID NO: 197846 - DNA, 75 bp, Homo sapiens
gcgccgcgtgggagccacgcacatcgtgacagttcgatcctttggtacagaagacagaccgacagatcgtccaat

SEQ ID NO: 197847 - DNA, 75 bp, Homo sapiens
ttggagtccggacatctgaaacttggcccctagcagtcttcttgatgctttggaacaacatttagcttccttgga

SEQ ID NO: 197848 - DNA, 75 bp, Homo sapiens
ctggaaaagacaattgatgacctggaagtacactcctgatcatgtagttggacctggagcagacattgatcccac

SEQ ID NO: 197849 - DNA, 75 bp, Homo sapiens
cagttccacaccagtgcctcagaggtccatggcagtatcccagccaaatctcgtatatttaaagttggagttcgt

SEQ ID NO: 197850 - DNA, 102 bp, Homo sapiens
caggaggcagtggaggaagtgggggttatggtgggaggagccgatactgagcttcttcctatttgccatgggtgttggggatgtcctttgcactgaccctga

SEQ ID NO: 197851 - DNA, 98 bp, Homo sapiens
acaaccaggcattaagttcacaatgactctgttagaccaaatatgactttaaaggccatgatcacagatccagaagtggtatttgttgccagcctgac

SEQ ID NO: 197852 - DNA, 100 bp, Homo sapiens
ctgctgtgctagcaatcagcgagactccgtgggcgtaggaccctccgagccaggagacagagctactggatctcagccttgtcaaagatgccagatgtgg

SEQ ID NO: 197853 - DNA, 50 bp, Homo sapiens
cctttgacctttttgaagcctttgcaaaatttcaccagtgatcattaaag

SEQ ID NO: 197854 - DNA, 75 bp, Homo sapiens
cgaaagagaaacccggagggcgccgggcttcggaaccaaaaagaagcttcccagagccggggccaggagccccaa

SEQ ID NO: 197855 - DNA, 75 bp, Homo sapiens
gagcagctgcctgggagaatgttgactctactgcaggttgaaatcacaaagattagacacctttttagataggtg

SEQ ID NO: 197856 - DNA, 98 bp, Homo sapiens
gaactttgacgccctcttccagccccagcagcacccagcccgtgaccagcacgacaccttcttccttcgaggaggcatacacggaatacctgaggagc

SEQ ID NO: 197857 - DNA, 100 bp, Homo sapiens
gaaaaatgaagactatagtatcacaaacacagggaaattgcaaagaagattctttggcaagttatgaattgatatgcagtttacagtccttaatcatttc

SEQ ID NO: 197858 - DNA, 50 bp, Homo sapiens
cacgggcagcattggttgagcaggctctccctgcatgtcctatccaggcc

SEQ ID NO: 197859 - DNA, 82 bp, Homo sapiens
agcagccgatccagcctgcggagcctgtggggcagtgtcggagatgtatgcagtgtgacgccaagtttgactttctcaccag

SEQ ID NO: 197860 - DNA, 90 bp, Homo sapiens
cgctactggagaagtccctgggactgagtaaggggaataaatacagtgctcagggcgagcgacaggtattacaagtggataaataatgtg

SEQ ID NO: 197861 - DNA, 100 bp, Homo sapiens
gcggcggctgcggtcgaagaaggggacgccgacaagtattaaaggtggaagaaggtccatatctttttctgtgggtgcttcaagtgttgttggaagtgga

SEQ ID NO: 197862 - DNA, 100 bp, Homo sapiens
tgatcggggatatggaattgcattacaacatggcagtccttaccgagatgttttttcacaaaggccagaggcattgatgtgcagcaggtttctttagtca

SEQ ID NO: 197863 - DNA, 75 bp, Homo sapiens
cactggttcatcttccttctcaacttacctgttgccacttggaatatatatcgagttgatctctctaatgtatta

SEQ ID NO: 197864 - DNA, 98 bp, Homo sapiens
atgtggacatccaggacaaccacgaggaggccaccctgggggcgtttctcatctgtgagctctgccagtgtccacttccacctggaccactgcggggc

SEQ ID NO: 197865 - DNA, 82 bp, Homo sapiens
cgcgaggccgacaagagccacccggagcagggctcagtgctgtcagagagggactacgagagcctcgtcatgatgcgcatgc

SEQ ID NO: 197866 - DNA, 82 bp, Homo sapiens
ctgtgcagccgcgaggaggcgcgggaggtgttcgagaacgaccccgagacggttgacatcatggacatatgtgagtccatcc

SEQ ID NO: 197867 - DNA, 96 bp, Homo sapiens
gacaaagaaggtgtcccccggttctatatccgcatcctggctgacctagaggactatcttaatgagaaatcctgccagaaacctgtagacaaatat

SEQ ID NO: 197868 - DNA, 98 bp, Homo sapiens
tcgacagggaccctacagtcttcgcccccatcctcaacttcctgcgcaccaaagagttggatcccagttacacattcggcaaagtacagggcaacagc

SEQ ID NO: 197869 - DNA, 90 bp, Homo sapiens
cctccttgcagcctcccccagaaagcaatgataattcccaggacagtcagtctggtactaacaatgcagacccttggcttctgcgttcga

SEQ ID NO: 197870 - DNA, 49 bp, Homo sapiens
gccctggccatctaccatgtgtgtggggctgccttccaggaggatgatg

SEQ ID NO: 197871 - DNA, 75 bp, Homo sapiens
ccggcagtcatctcgcggccgttcagacgcaggaaaaccttttccggtataaagcccaccttcctctaatgttgc

SEQ ID NO: 197872 - DNA, 89 bp, Homo sapiens
catgactaaagtgcaggccgaactagatgagaccaaaatcattctggaggatttgacagctaaggatattgaagaaattattgatgagc

SEQ ID NO: 197873 - DNA, 73 bp, Homo sapiens
cgtggaccacatagacatttacgcggatgtcggcgaagagttcaaccaggtgtgggttgctgaccgaggaaat

SEQ ID NO: 197874 - DNA, 75 bp, Homo sapiens
cccctctgatctgcgccgggtcgccacatactggtgccatgtttcagaacagagtaagacccctggtaaagaaga

SEQ ID NO: 197875 - DNA, 101 bp, Homo sapiens
ccacgccgctccgaggcctcgcgaccgccgagcctgcagcctgccccgcggccaacatgagcttcttgttgtttcatatacactggagaagtcgtacatcg

SEQ ID NO: 197876 - DNA, 75 bp, Homo sapiens
tggaaattggactaaattaccagaatgcagggagtgtgatgtgaaggattatggggacctgccctttgctgacat

SEQ ID NO: 197877 - DNA, 97 bp, Homo sapiens
ccgcctgctgcgaggccgccgggctcccggtcaaaatgcagatcttcgtgaaaacccttaccggcaagaccatcacccttgaggtggagcccagtga

SEQ ID NO: 197878 - DNA, 95 bp, Homo sapiens
ggtcccagcgccttcccacggagcagcactcttcaccctgcacagccttgttaggtgctggatgtgtctggggcagacatgttggccaagtcaat

SEQ ID NO: 197879 - DNA, 100 bp, Homo sapiens
tgcctctgtccgcatcggcctgtatgattctgtcaaacagttctacaccaagggctctgagcaggaaagccagaaattgtgggaagcaatttagacacac

SEQ ID NO: 197880 - DNA, 80 bp, Homo sapiens
actccacagcagttaatagatctccggcataagctcaatcttcggggtaccaacacaccaaacctgatatcatcttcaag

SEQ ID NO: 197881 - DNA, 98 bp, Homo sapiens
gtgaccgagaccgtgaccgagagcgtgaccgagagcgcgaatatcgtcatcgttagaaggtcatccagcagcctccgaagccaggagccctgatccgg

SEQ ID NO: 197882 - DNA, 98 bp, Homo sapiens
ctttgtttggatgatccaccgggtccatttgatagcctagaagaaagcagggttgaaaaagatcatctagcaaagccttttttcccagctacatataa

SEQ ID NO: 197883 - DNA, 100 bp, Homo sapiens
cgtcggtttgctatcgggactcggcgaggacggggttgatatagaagcagctcgaaaggaagaagaacggatcatgcttagagatgccaggcagtggcta

SEQ ID NO: 197884 - DNA, 75 bp, Homo sapiens
gcggaacccggccgggagccgcgcgaggcgagtggagactgctgcacggactctggaaccatgaacatatttgat

SEQ ID NO: 197885 - DNA, 101 bp, Homo sapiens
ctggcggcggcgcttgggctctatgcctgtgaggagccaccaacatttgaagctatggagctcattggtaaaccaaaaccctactatgagattggtgaacg

SEQ ID NO: 197886 - DNA, 105 bp, Homo sapiens
ttttacctcaaacatccagcctatctgcatccctcaggagaatttccaggtggaaggttataaagaggacacaaccaatccaggtaggtagggtgagaccctgct

SEQ ID NO: 197887 - DNA, 76 bp, Homo sapiens
gattccagactcgtgggggaaaggctgtttgtgaagtgtggatatgcaggctctaactttccagaacacatcttcc

SEQ ID NO: 197888 - DNA, 88 bp, Homo sapiens
atttggagaactcactgatgaatccacattcctgtaaatgtggcaggaataagaaaaccccagtttcccgctctcacctttgaggccc

SEQ ID NO: 197889 - DNA, 51 bp, Homo sapiens
ccacctgagaaccatgctcaccgaccctagactttagaagacagctttcca

SEQ ID NO: 197890 - DNA, 100 bp, Homo sapiens
acggcgcagacgcgggcgagctgcggctcggacgccagcggacacgcgggcgaggtgtgagttcttgatacgaatgaaaggccaagagtttgttgatgag

SEQ ID NO: 197891 - DNA, 75 bp, Homo sapiens
actccagaaatccaggagattgttgataaggtagctacagcaagctgggtagcaggcagatccaaaggatatcat

SEQ ID NO: 197892 - DNA, 126 bp, Homo sapiens
gtgattgtcagtttcctgaggcctccccagccacgctttctgtacagcctgcagaactataagtgccatagagttcatttccatttgccgtatcgatggcaattcttggatagaggcaaatgggag

SEQ ID NO: 197893 - DNA, 97 bp, Homo sapiens
gtcccagcggcagcagcagcggcgggaggagcctccgggagtgtgaacatggctacgcctcttcattcccgtccatgccgagcccccgactgcagca

SEQ ID NO: 197894 - DNA, 76 bp, Homo sapiens
ctttggagaacttctggagctggccaacgtgcaggaggtagttaaaccagagagcaatgacaaagaaacagaagct

SEQ ID NO: 197895 - DNA, 90 bp, Homo sapiens
ggcggccttcgaggaggtcatgaaggacctgagcctgacgcgggccgcgcgggaagtcctgacggccacgctggatctggaggacgtccg

SEQ ID NO: 197896 - DNA, 100 bp, Homo sapiens
aggaggaactctccatgcagatgctcagctttattttgaaaagccatggtaaagatgaagaatgtgttttggaagcagaaaataaaaaactagtagaaga

SEQ ID NO: 197897 - DNA, 82 bp, Homo sapiens
ctaccagccgcttcctggcatgtcagagaacccctccgtctatgtgcctggatgaccgagtgggagacagcagcaccagcgg

SEQ ID NO: 197898 - DNA, 100 bp, Homo sapiens
gaaagtatctgaatagtgaagtatttatcactcatcacagtaacttacggagctgaaggatcctcactgtcgggatgagatggcagccgcccgaggggct

SEQ ID NO: 197899 - DNA, 75 bp, Homo sapiens
cagcgccagcagctggactatggcatctatgttatcaaccaggcaacggacagccaagacgtagatccatccaag

SEQ ID NO: 197900 - DNA, 100 bp, Homo sapiens
aagaaactaaagcttgacggcttggacgaagatggggagaaggaagcgagactcatacgcaacctcaatgaaagtttcctacactactgaggtttagggg

SEQ ID NO: 197901 - DNA, 83 bp, Homo sapiens
gtcggcccttgccttggcagagctgagttgtcgagatgtccacagaaggaggatttggtggtactagcagcagtgatgcccag

SEQ ID NO: 197902 - DNA, 98 bp, Homo sapiens
gcgaagcacgagcagatcctggtcctcgatccgcccacagacctcaaattcaaagtttgctaatccagactttacacaacctatctcagaagttgtag

SEQ ID NO: 197903 - DNA, 49 bp, Homo sapiens
actcggagatgcctggaatacagtaagtaactaacatcttgacaaagag

SEQ ID NO: 197904 - DNA, 102 bp, Homo sapiens
cccggtctggcttgttcgggctcagcggccgcgaggccgcagctcccggggggtcctgtggagatccttcccttcctctacctcggcagtgcctaccatgct

SEQ ID NO: 197905 - DNA, 75 bp, Homo sapiens
ggatctcagctccgacgcccgaggagaaggaggagtggattaagtgcattaagctgcaggggacagcgctggacc

SEQ ID NO: 197906 - DNA, 74 bp, Homo sapiens
tcaaatgtcaccaagcaagataattataatgaagaagtggctgacttaaagtatgccttcaagacagtgtgttg

SEQ ID NO: 197907 - DNA, 83 bp, Homo sapiens
cggcgtttctgcgtctgccgtggacagcgaagctgctgcggttcctgagccggaggagcatcagatccatgctgctgctgact

SEQ ID NO: 197908 - DNA, 80 bp, Homo sapiens
ctgcgtaaaacatacaggccggagcttatcaaaggtgctggagaatctggtaaaagcaccattgtgaagcagatgaggat

SEQ ID NO: 197909 - DNA, 74 bp, Homo sapiens
cccagccatgtcatcttatctacgaaatgattcagtgatgactcgtggcactgcctccagcccctcctatagat

SEQ ID NO: 197910 - DNA, 50 bp, Homo sapiens
agactccatctatccatatgagattgcagagggaatggcatacatcgagc

SEQ ID NO: 197911 - DNA, 90 bp, Homo sapiens
tgtagcagagtgtgctcctttctgccaggccaaagaagctaaacgactaaaagaattcttagaagactatgatgatgatagagatgaccc

SEQ ID NO: 197912 - DNA, 75 bp, Homo sapiens
ggcaaaagcacaaggattctcgctgtgacagagacaacaccgagtatgagaagtggagttggcatgaacttaaca

SEQ ID NO: 197913 - DNA, 100 bp, Homo sapiens
accgctcaagcgtgatgaaacagttcctggaaactgccattaacctccagctttttaagcagtataatggaatgtgcttacaagggccagcaggagtgcc

SEQ ID NO: 197914 - DNA, 75 bp, Homo sapiens
acatttctcatattgctcaacaggtgcaagctggcccaggccaatggttggggcgtcatggtgtctcatcgttcg

SEQ ID NO: 197915 - DNA, 124 bp, Homo sapiens
ccgggaggaaggaacgaggcaaggagctaaagcagcgtgcgttcagccctgggctacgagttccagggagctctgtcctggtgaccgtgcccgggttatgacgactaatcccaaaccgaataag

SEQ ID NO: 197916 - DNA, 88 bp, Homo sapiens
ggttataaattatgatctacctaccaatcgtgaaaactatattcacagggcttctggtacagttttcactgctactgacgttgcactg

SEQ ID NO: 197917 - DNA, 75 bp, Homo sapiens
aggcagagtgctgatgtgaaaaataccacgacaaaaccaccctagtgaaatgacaatggatgctctgttggctcg

SEQ ID NO: 197918 - DNA, 101 bp, Homo sapiens
gacaccgacatggaacagggactcactggggttccctgtattgaacactgatatacaaggaatgaatagaagtcaagaaaaacagacctggtgggaaaaag

SEQ ID NO: 197919 - DNA, 83 bp, Homo sapiens
tggaaccaattgttttacagtctgttccacatgatcattgtaataagcctgaagcaggacattctaaatgaaaagactgaatt

SEQ ID NO: 197920 - DNA, 99 bp, Homo sapiens
agccaacatacaatgtggctgtcggcagagctggtagagatcgaaagctgctttgcgtcgcagttggagcagcacccccaccgcaggtggcattgaagg

SEQ ID NO: 197921 - DNA, 100 bp, Homo sapiens
ctttatacagggccgtgatgttggagaactacaggaacctggagtctgtggtgcagtcattggagaaatcgatgaagaaacagattctgcgcttgatttg

SEQ ID NO: 197922 - DNA, 75 bp, Homo sapiens
gacgaggacgacaccgatttcctctcgccgagcggcggtgatgatgatgatgattttgatgatgaggaagctgaa

SEQ ID NO: 197923 - DNA, 98 bp, Homo sapiens
ctgctcatgttttagcggaactggaggtaacgatgcaccatgctctcttacaggctgggcttggagcccacaggaccctagaagtcctttaagaacat

SEQ ID NO: 197924 - DNA, 82 bp, Homo sapiens
cctcaatctccttttccttggctacccgacagtcattttgtttactcattcagccctgttgcaggtcccaataaactcttca

SEQ ID NO: 197925 - DNA, 102 bp, Homo sapiens
gatgcagaaggcatcttggaggacttgcagtcatacagaggagctggccacgaaatacgagagggacttgcaacaaagcattgccagagaacctagtgctcc

SEQ ID NO: 197926 - DNA, 83 bp, Homo sapiens
agctccaggtcaaccgcacctaccaaatgaatcttcagctacttggagcaacagccattgaggataaattacaagatcaagtg

SEQ ID NO: 197927 - DNA, 52 bp, Homo sapiens
cctttttgtcagattatcaggatgagggtgtgtgattccagaaacaagtgcc

SEQ ID NO: 197928 - DNA, 73 bp, Homo sapiens
cgccgtcccaacatcacaaaaagagcttctttgaagggcagtctgcaccatgggactcggctaagaaagatga

SEQ ID NO: 197929 - DNA, 75 bp, Homo sapiens
attctaagaccatccgttccaatagcagtggcttatccattggaactgaatgcagtaatagtggccttgtcttca

SEQ ID NO: 197930 - DNA, 74 bp, Homo sapiens
cgacatcgagatcaaccgggagccggcttttcatgcaacacccaacacttataagcggaagaacacagaaacag

SEQ ID NO: 197931 - DNA, 96 bp, Homo sapiens
attaagcttgtgcgtcaagtcatgccgggtgggcttggactgggcgtgctccatggcagagatcctgcggtcactcaacagtgccccactgtggcg

SEQ ID NO: 197932 - DNA, 100 bp, Homo sapiens
agaccccatggcctgctcagcctcagcgtgatgaagacgacctccctccagacctggccgaggcagtgggagtgaccacatctacaaccacaaacaccac

SEQ ID NO: 197933 - DNA, 75 bp, Homo sapiens
ccagctgtggccggacagggactggaagagaggacgcggtcgagtaggtgactctcctattccatctgtttcttc

SEQ ID NO: 197934 - DNA, 99 bp, Homo sapiens
cggaacccctccttgaagctgatggtgaatgtgtgcggacacactctgtcacccaacctgcctgcagtttaccctgaacatgaccgaggctgtcaagac

SEQ ID NO: 197935 - DNA, 100 bp, Homo sapiens
gacgactaaatacccgtgtctgaagtcttcaggcgagctcaccacatgctacagattttcagacgatgctggttggttttcaagaaggcttctagcaaag

SEQ ID NO: 197936 - DNA, 75 bp, Homo sapiens
gccgccgccaccatgcccaagagaaaggtggacgacatccttggagaaggcagcgacgacagcgacagcgagaag

SEQ ID NO: 197937 - DNA, 98 bp, Homo sapiens
gggcgacccagcccccgcccgcagcctggacgacatcgacctgtccgccctgcgggttaaacccatccagagtaatggctgcggccttacccaggacc

SEQ ID NO: 197938 - DNA, 96 bp, Homo sapiens
caaatgctgtttgtattccagagactaggaagaggtgaaaaacttcatcacccgagagaacctggaggcacgggtggaagcagcattggactcccg

SEQ ID NO: 197939 - DNA, 74 bp, Homo sapiens
tttaccaccctcctcatcgcctgcctgctgctgcgcgtcttcaggattttttatcaagcagaaatgcatcgaac

SEQ ID NO: 197940 - DNA, 90 bp, Homo sapiens
aagcagcaagtgcgcggttggggccactgcgaggccgttttagaccctacagcttggggcctgggctcctctgaccatcctcattgagaa

SEQ ID NO: 197941 - DNA, 76 bp, Homo sapiens
caaattcaccatagagaatgtgacacggacaaggatagttttggctgatgtggaaatgaggcaagttatcctttgg

SEQ ID NO: 197942 - DNA, 75 bp, Homo sapiens
gcggcctctcagctctagggccctctgcacactggcccccccagacagccagctaaaggtgtggatgagcaaata

SEQ ID NO: 197943 - DNA, 95 bp, Homo sapiens
ggttccggctgaccagttgcgtgtgattttcgcagggaaggagctgaggaatgactggactgtgcaggcgtgctggtcaccatgacaacagagac

SEQ ID NO: 197944 - DNA, 83 bp, Homo sapiens
agcttctgaaccatccacacatcataaagctttaccaggccatgaagtacttgtcatacctgctgtaccctctctgtgtcggg

SEQ ID NO: 197945 - DNA, 82 bp, Homo sapiens
cgaggacgcggactgcgaaggcaggtccttggcccttgccagacattagcaccatgagcttcgtggcatacgaggagctgat

SEQ ID NO: 197946 - DNA, 83 bp, Homo sapiens
agcgccgacggcctcacctacaagattatggaatgtgggagcgtggagataagactaatcagggcatcccggaattgaatgca

SEQ ID NO: 197947 - DNA, 147 bp, Homo sapiens
ggccgcctccggccaggacgctgggagctgcctgcgggaaggtgcggggagcggagccatggcctccgtcccatgaagctgaggtcttgaagcagctggctgagaaacgagagcacgagaaagaagtgcttcagaaggcaatagaag

SEQ ID NO: 197948 - DNA, 74 bp, Homo sapiens
cgacaagccgctggcagccgcggatctcaccgccgctcaggctggagcagttcaacatgatggagaacgccatc

SEQ ID NO: 197949 - DNA, 74 bp, Homo sapiens
aactgtggagtatctgcactcacagggggtggacccccaaaagtacaagggcatatttaacggattctcagtta

SEQ ID NO: 197950 - DNA, 100 bp, Homo sapiens
catgggggaggaacagctccgattcttacaaccagtacagaaaatagacatgaatctcacagatcttctgggagaactccagcgagacccttggcctgta

SEQ ID NO: 197951 - DNA, 100 bp, Homo sapiens
tgctgcgctccgtggccggggagcaagcgccagtgagtgagatcattggccgagacctgagtggcttccctgcacctcctggagaagagcctcctgcctg

SEQ ID NO: 197952 - DNA, 80 bp, Homo sapiens
attcaatcccaagacaggattatgatactccaccagctgttgtgtcagctcaaagcttggattctgccgtgccactcacg

SEQ ID NO: 197953 - DNA, 90 bp, Homo sapiens
cggcgcggcccgcgcgcagccggccgctgctcagatggaagataaaaagccctttatcctgtcttccatgaggcttcctctcctggacac

SEQ ID NO: 197954 - DNA, 73 bp, Homo sapiens
tatttttggacctgaaacagaaattctggaacacctatatggtcatcgtattgaggaagttcctgaacttcct

SEQ ID NO: 197955 - DNA, 98 bp, Homo sapiens
ggcggctcaggttgtggtagaggcggaggctcaggcagcttgaggtgtctagtcacattcaggttcttgccagaaggaaatctcgtgattttcattcc

SEQ ID NO: 197956 - DNA, 50 bp, Homo sapiens
gaccgcgacgaggccattgcaaagttgtttttgagcacgttcactctcgc

SEQ ID NO: 197957 - DNA, 75 bp, Homo sapiens
ctgaaggtggcagtgagctgcacgcaacagctgccggctctggggtttggggcggaattccgaaggttctctctg

SEQ ID NO: 197958 - DNA, 90 bp, Homo sapiens
taagtgggttcgttgtatttgtgacatctgtgggtttaatccaacagaagaagctgagatgagtgaactgagtgtggcacagaaaccaga

SEQ ID NO: 197959 - DNA, 75 bp, Homo sapiens
ccgctatcctgccaactctatcgtggtcgtaggaggctgtcctgtctgcaggtaactaggatttctacctcaacc

SEQ ID NO: 197960 - DNA, 100 bp, Homo sapiens
gacagtcatcaccatgggccgggatcacattctgattgaagacaactgttagttttgtggcttactgctgctccacccagtgtctgcagacttttgacct

SEQ ID NO: 197961 - DNA, 115 bp, Homo sapiens
gaagccttgaaaaagctgccctgagacggtgtcccgccgaaagggtgataaaagaaaatgtggctgaagttacccgaagttcagcttgcagtgtaattcagaagagttaagacca

SEQ ID NO: 197962 - DNA, 50 bp, Homo sapiens
ctaaagcagcgtgcgttcagccctggggtgacgcagctggaccagaggct

SEQ ID NO: 197963 - DNA, 85 bp, Homo sapiens
agtgacataggagaagtgattcttgtgggtggcatgactaggatgcccaagggcaaactctttgattctacaatagctgatgagg

SEQ ID NO: 197964 - DNA, 74 bp, Homo sapiens
tccagttttttaagaagggacaaaagaagacagcgacagctgtggcgcactgcaaacgcggcaatggtctcatc

SEQ ID NO: 197965 - DNA, 100 bp, Homo sapiens
ttcaagtccacactgaagagcaacagaagagtcatccctcagaaagtcttgacacagatagtcttcttattgctgttgaggagctcaagcttgggaaaat

SEQ ID NO: 197966 - DNA, 100 bp, Homo sapiens
cgtacgcgagcggccgcaaaggcgcggaggaagcggagcggcgcgcgcgggacaagcaggagctctgtgtgtcgtctgagcagtcgcgagaagatttccc

SEQ ID NO: 197967 - DNA, 82 bp, Homo sapiens
ccgcaaccaggaatgacttctagtagttgatgtcacttggcgatattcctgcaaacatgaagaggtgattgccagaagaact

SEQ ID NO: 197968 - DNA, 75 bp, Homo sapiens
cttctctctcctcgattgttgcgcgctcatcttcctctcggtctacttcgagtgggaatagctttgcgaaaaatg

SEQ ID NO: 197969 - DNA, 95 bp, Homo sapiens
ggtgtccccactgagctcttggaagagagccgctgccatggcccagacactgcagatggagatcccgaacttcggcaacagcatcctggagtgcc

SEQ ID NO: 197970 - DNA, 75 bp, Homo sapiens
catgggattctgtgtttgtgaacctctagaaaagggcctactctaggtgcggtacttcactatagtttataaaag

SEQ ID NO: 197971 - DNA, 119 bp, Homo sapiens
atccccttattttgggccagtggctgtcattacatatgagatgagtctcttgaagactacagatggcaaaagaatggaccccagcaggaaaagcaaagcaagagaattctgctaagaag

SEQ ID NO: 197972 - DNA, 83 bp, Homo sapiens
gaatccgagaagagcagagcggagggagccccagacacggactttagccggttgagaaggatcaagcaggcatttggagcaca

SEQ ID NO: 197973 - DNA, 100 bp, Homo sapiens
acctgagccagaacctgagcctgttaaagaagaaaaactttcgcctgagcctattttgaatccgtctcttgctcaagtgaaaattgaagaagcaaagcga

SEQ ID NO: 197974 - DNA, 90 bp, Homo sapiens
accgtgtgtcagaacaatcttgaatcatgaagctactaaccagagccggctctttctcgggtaagatgataatgcaagataaattggaaa

SEQ ID NO: 197975 - DNA, 101 bp, Homo sapiens
ccgcggccccggccgctctgggcgactgtgctggcgctgggggcgctggcgggcgttggcgtaggaggcgcctccttggcattataacaaaaaaagatatc

SEQ ID NO: 197976 - DNA, 107 bp, Homo sapiens
agagtcccgtattctcagagtaaaagttgtttctggaattgatctcgccaaaaaggacatctttggagccagctggagtcacatcagaagccgcgcagactatcacc

SEQ ID NO: 197977 - DNA, 101 bp, Homo sapiens
aagtgtcgagtcccttgcagattccacgccatcggctgcctcgagacgagacggtgccgagacctcaaggccaagggaattttatttgtggggagcggagt

SEQ ID NO: 197978 - DNA, 75 bp, Homo sapiens
agctgcagcagcagcagcacagcgacaagacggccccggctgaaaaacgtggacaggagcactgcacagcagttg

SEQ ID NO: 197979 - DNA, 75 bp, Homo sapiens
acttcaaaaggacattaaggatctgggaggggtcttgcaagagcaaaatccgtccctagccacacatactccaac

SEQ ID NO: 197980 - DNA, 100 bp, Homo sapiens
cggcagcccgtggagtcggctgagggaaaagcgaggcaaggcaggcgggagatgagtatgatgtatgtgccatttgtttggatgagtatgaagatggaga

SEQ ID NO: 197981 - DNA, 83 bp, Homo sapiens
ctgcgtcggagctctacacaaaggaagaaatgttggctatttggcgatgagaggtggtgaacagtgaccatactggtatacaa

SEQ ID NO: 197982 - DNA, 100 bp, Homo sapiens
cactaaagcaacctttacctataaagaagttctggagcagagccagcccctgggcaacaaagtggaaatggagattgtgagcatgttggaaaaaaacgca

SEQ ID NO: 197983 - DNA, 90 bp, Homo sapiens
cttctgaaccgggttctggagcggcttgctggaggggctaccagggacagcgccgcctcagtacctgggggacagggtgtctgagaaagt

SEQ ID NO: 197984 - DNA, 107 bp, Homo sapiens
ctcaatatctgtcttcggtggactccttcggcagtccacccaccgccgccgcctcccaggccagcatccttcagaaaaagcatccccgaggaggaagacgaatcgtt

SEQ ID NO: 197985 - DNA, 50 bp, Homo sapiens
caagatggcagttgtgcaggggcaggaggagaagatgaggaaggaagagg

SEQ ID NO: 197986 - DNA, 75 bp, Homo sapiens
gggggcagcacgctggccaaggtcttcctcgatttcaaggaaagccgagccattttgcaggaggtgctggacgca

SEQ ID NO: 197987 - DNA, 71 bp, Homo sapiens
gccagctggagagcagcttcgcggagcgactggagagccagaggttgatgctatgaaactgggagtaaagg

SEQ ID NO: 197988 - DNA, 75 bp, Homo sapiens
attgggagatccacagctaagactccaggaccctctggaagcctagaaatgagtgctccaagctcccgaagccga

SEQ ID NO: 197989 - DNA, 75 bp, Homo sapiens
tgaagacggaggacgagctgcgggtgcggcacctggaggaggagaaccgaggtctctcaggcagctgcagagctt

SEQ ID NO: 197990 - DNA, 98 bp, Homo sapiens
tacccaataaccaggtgcttggcaaaatcgagcgggccattggctaccctgtcatgatcaaggcctcagcaggtggtggtgggaaaggcatgcgcatt

SEQ ID NO: 197991 - DNA, 80 bp, Homo sapiens
agaggtcgtggaggtggccgtggaggcagaggtggcatgggccccacaggagacaggatccgaagcaaagttgagctgac

SEQ ID NO: 197992 - DNA, 100 bp, Homo sapiens
aggagttcgtctcttacgtctgcggaagtgcagctgcctcagttcttagcgcagagccccacagtcttcgttacaacctcatggtgctgtcccaggatgg

SEQ ID NO: 197993 - DNA, 119 bp, Homo sapiens
gcgcaggcagcaactgaggcagcggcaggctcaggtgcagccgctggaagaaaacaggcagattttggcgcggcaaaagtcaaactcacagtcggactcccatgatgaggaggtgtcgc

SEQ ID NO: 197994 - DNA, 100 bp, Homo sapiens
ctggtcgtctccgagatcttcgtcagccagacaaccttcgtgggcatcgtccctcttgccatgaggcctcagtgttgtccctgatgaagaagtcattgaa

SEQ ID NO: 197995 - DNA, 80 bp, Homo sapiens
ggcaaagttttgcagatcttcaacaagaggacccaggagaaattcgccctcaaagatgataatgaagataattcaaatga

SEQ ID NO: 197996 - DNA, 75 bp, Homo sapiens
ctcctctggtatatggacaacccccagcggggatctgatgagcttctttcttctggcatcattaacggacctttt

SEQ ID NO: 197997 - DNA, 50 bp, Homo sapiens
atcaccggcaattatgcttctcatcggagttgagttacagacatcctgcc

SEQ ID NO: 197998 - DNA, 75 bp, Homo sapiens
gaagggggtgtcaagcttggcagtggggcctttaatttggtgtggactggaccctgggcacctcacatgaacagt

SEQ ID NO: 197999 - DNA, 75 bp, Homo sapiens
cagttacaaggaattcagattcaggaggctgaaacgagagaccaggccctcagtctccgaggaggatctcaaggt

SEQ ID NO: 198000 - DNA, 96 bp, Homo sapiens
agacggagtttatcatcaccgcggaaatactgagagcaatttgaatcaacccatagaagtgacagcgctgtattcatttgaaggacagcagcctgg

SEQ ID NO: 198001 - DNA, 100 bp, Homo sapiens
gccggccaccgctgccgctgccgctgccggctccagggagccccgtgtcaagcaagattatagatgcccagttcatttttactgggtgcgtggtgaagaa

SEQ ID NO: 198002 - DNA, 100 bp, Homo sapiens
caggttcacgccaacagtacctcattgctctttggcgactcttattggagatgcatcgaaggtttgagaatgctcctgattctgccaaaacaaaagctct

SEQ ID NO: 198003 - DNA, 100 bp, Homo sapiens
gccgaagtcagttccttgtggagccggagctgggcgcggattcgccgaggcaccgaggcactcagaggaggtgtcatggagaaactccagctgggcccag

SEQ ID NO: 198004 - DNA, 82 bp, Homo sapiens
tcatctaaaggaggttttaaacagtataacagaaatacagtccatactgcccggaatctctgcaaagctgacttggacttca

SEQ ID NO: 198005 - DNA, 90 bp, Homo sapiens
agaaactggaggagtcccgctcgaagctaggaattgaatgatctggcacgggaccctccagcacagtgttcagcaggtcctgttggagat

SEQ ID NO: 198006 - DNA, 50 bp, Homo sapiens
ccccgaaactttcaccgcgagcgggtatctgtaccacgttttgaccaaaa

SEQ ID NO: 198007 - DNA, 82 bp, Homo sapiens
ctaaagcagcgtgcgttcagccctgggacactggccaaaagaagaccctagacaagaaagatggaagacgaatgtcttttca

SEQ ID NO: 198008 - DNA, 101 bp, Homo sapiens
gacggtgacacgcttccctggattgggtgaaggctgagctgcggaaatactgggtccgcttcttgctagcccgccactcaggctgcagagcctgtgtcctg

SEQ ID NO: 198009 - DNA, 100 bp, Homo sapiens
ctcgtcttcacgccagcctggttctcacccatcatgtataaggcaaatcctgatcctaactgttgtcttggagtatttgggctgagcttgtacaccacag

SEQ ID NO: 198010 - DNA, 82 bp, Homo sapiens
aagcggcagctgaggagactccggcgctcgccatggccgacgaaaagcccaagttccagggtctccctccactgctgtagta

SEQ ID NO: 198011 - DNA, 95 bp, Homo sapiens
aaccatctgggagccttcctgatccgggagagtgagagctccccaggggagttctctgtgtctgtgaaccctccagaatacccatcatatagccc

SEQ ID NO: 198012 - DNA, 73 bp, Homo sapiens
ctaactccaatggcccaaaagaatccatcaacagcatcaagtccagactaagcaaaagtgggcacatacaaac

SEQ ID NO: 198013 - DNA, 50 bp, Homo sapiens
ccctatgctgtcagtgaattagcaggtaattcagtaccaaactgttcgat

SEQ ID NO: 198014 - DNA, 98 bp, Homo sapiens
cgagtgaggaccatctacgagagcaaaatgattgaatacgatcctgaaagaagattaggttgtatctcccacttcacccttctagaccatcccagaag

SEQ ID NO: 198015 - DNA, 75 bp, Homo sapiens
gtgatttggagtattaagtctttcccgttgaagcatatgtcctgtgagcttaggggtgctacaagttgaccactg

SEQ ID NO: 198016 - DNA, 89 bp, Homo sapiens
cttcgagcgggtgcgctgtggccttgagcacgagcggcagattagcctgaggcctgctcagtcgttcctaatgaataaaaatcaagtgc

SEQ ID NO: 198017 - DNA, 50 bp, Homo sapiens
caagcacagcctcaagcaaacacagctacgagagtacaaggtagtgggtc

SEQ ID NO: 198018 - DNA, 74 bp, Homo sapiens
cctggcggagctccacgacgagctggaaaaggtgattcctggggctgccagctaaggtcccttatgatttctgc

SEQ ID NO: 198019 - DNA, 83 bp, Homo sapiens
ttctagtctggggtcaagaacactgatacagcagaatccaggtctggtagaagaacagatgtaaatccgtttttggctcctcg

SEQ ID NO: 198020 - DNA, 90 bp, Homo sapiens
attggcagctgcagagccagatgatccacaggatgctgtagtagcaaatcagcaactcttctgacctctgggactactgcaacagtagcc

SEQ ID NO: 198021 - DNA, 101 bp, Homo sapiens
gagctgtcagatcaccattcccaaaggtactccaaagattcaggtttactcacgtcatccagcagagaatggaaagtcaaatttcctgaattgctatgtgt

SEQ ID NO: 198022 - DNA, 100 bp, Homo sapiens
gccaggcctcggacgaggaggacgcgcccgccaccgacatctacttttaccatggggcgcaagttggaccctacgaaggagaagcgggggccaggccgaa

SEQ ID NO: 198023 - DNA, 75 bp, Homo sapiens
aaagaagttggcagtagagaaagggattgatcttacacaagtaaaagttcacacaaaagatgttggacaatttct

SEQ ID NO: 198024 - DNA, 90 bp, Homo sapiens
accgttgtcagcacttggaatacaagatggttgccgggtcatgttaattgggaaaaaggtgacttcatggtcatgacgattttcttcaat

SEQ ID NO: 198025 - DNA, 80 bp, Homo sapiens
ggagaaacaatctcttcctctgcccgggttgcgtggatctccagtggaaagctgccagccttgccctggctctgaatggc

SEQ ID NO: 198026 - DNA, 50 bp, Homo sapiens
aggaacacgctgcattactgcgtgatacagaaggtggtcatggcactagg

SEQ ID NO: 198027 - DNA, 101 bp, Homo sapiens
cacaccatcgtgcttagcgtctgcctgtctgcaacaccgggaggcaaggagcacctggtctggcaggctatggagttactagtagagaaagcaatcagcag

SEQ ID NO: 198028 - DNA, 82 bp, Homo sapiens
agacatttcctgctcggaaccttgtttactaattcatgtagagcgcatgaagtacaggacaataaagcttcctacacatatc

SEQ ID NO: 198029 - DNA, 75 bp, Homo sapiens
tgcagatggttgctgtactttgccaacaaggtgctgcttacaactgataacagacagaccccctgccattcaaga

SEQ ID NO: 198030 - DNA, 83 bp, Homo sapiens
cgcgcatgggactacggcatccgcgccggcctcgtccagaacgtggtcagcaaggtgtcgtgaaaactacccctaaaagccaa

SEQ ID NO: 198031 - DNA, 78 bp, Homo sapiens
ccggatgttaccgagagcgagagcgggagccccgagtatcggcagcagtcagcagtgcccctggacggagagacccac

SEQ ID NO: 198032 - DNA, 102 bp, Homo sapiens
attcaagaaatgttgccctggttcacctgatattgacaaactggacgttgccacaatgacagagtatcttcatcataaaagaggagaaacagataaaagaca

SEQ ID NO: 198033 - DNA, 100 bp, Homo sapiens
ctgaatcaagtgcagagatgggatggcaaagagacaaccataaagagaaagctagtgaatgggaaaatggtagcggagtgggctttgccaccaggaaagt

SEQ ID NO: 198034 - DNA, 98 bp, Homo sapiens
cccaaggaagtgactcaaactgtgagaacttcagtactatactggcaattgctggagaagattttgcaattgttgcttctgatactcgattgagtgaa

SEQ ID NO: 198035 - DNA, 100 bp, Homo sapiens
agtgaatcaaaaaaccgcttgttggacagtgaatctcagtggctggagaatggagctgaagaaggcatcgtcaaatcagaatatggctcaagcctggaag

SEQ ID NO: 198036 - DNA, 100 bp, Homo sapiens
ggccgggctggctgcggccgccctgggccgggccccaccggacgtaatctatgccagcaattatgacaatgttagcagaccatgcagctcgtcagctgct

SEQ ID NO: 198037 - DNA, 75 bp, Homo sapiens
cctgactcttctatgctgtgttcagtcggagccagtaaagcagaagatattttcgattcagataaagaagttcct

SEQ ID NO: 198038 - DNA, 83 bp, Homo sapiens
gtccacccaccgccgccgcctcccaggctctgggcgtggggaggctgagacacgggagtgcatctactacaacgccaactggg

SEQ ID NO: 198039 - DNA, 74 bp, Homo sapiens
tgttctaacgctgcctttgctttaaaacagtattacttgcgtgatcgaactgtgagaatttggaaggctcgcaa

SEQ ID NO: 198040 - DNA, 51 bp, Homo sapiens
tcagtgaatcccaactgttatgccaaagtggacgtgatgctgaatccaggc

SEQ ID NO: 198041 - DNA, 101 bp, Homo sapiens
tttccacagagctgtctggccttttgtccttgatccttggttaaggaaatgaccaaccaggctgctggtggtctacccttggacccagaggttctttgagt

SEQ ID NO: 198042 - DNA, 90 bp, Homo sapiens
cggggaaggctgggcagaaaaaggatgcaaccttgttctcaaccacttgctatctcggtgaccaagaatatggcccaggtgaccaaagcc

SEQ ID NO: 198043 - DNA, 100 bp, Homo sapiens
gcagaactgggaagccatggggaaccacttctggatcaagcagtgcattgagcaaattgatggagaagcatttctacttatgactcaaacagacattgtt

SEQ ID NO: 198044 - DNA, 98 bp, Homo sapiens
gagcagcacaggcagaagcactttgagaagaggcggaacccggcagcaggcctgatccagggttggaagcccagcgaggctagaggccagtcccaaag

SEQ ID NO: 198045 - DNA, 82 bp, Homo sapiens
caccccttccacgtcatccgcatcaacaagatgttgtcctgtgctggggctgacaggatccagtggggatattgtgatgact

SEQ ID NO: 198046 - DNA, 100 bp, Homo sapiens
tcaggatgctggtttataccaaggacagcgatctattgggcttcctgatgtccattcaggatatgggtttgctattgggaacatggcagcctttgatatg

SEQ ID NO: 198047 - DNA, 80 bp, Homo sapiens
ctggaaacggccacacggatgccatggttacttttgccacggtgaaatgacaatggatgctctgttggctcgattgaaac

SEQ ID NO: 198048 - DNA, 100 bp, Homo sapiens
agaaggggagaggcagctgaaaagcctccttcagcatcaacttgatacttctgtctccattgaggactcaccttgcagagcgccaagtcccgagtggcct

SEQ ID NO: 198049 - DNA, 89 bp, Homo sapiens
tctgcatcaatgcgccggccataggttgggaatccacgtgttgaacttaccctctcagagctccaagatatggcagctaggcaacagca

SEQ ID NO: 198050 - DNA, 135 bp, Homo sapiens
tctggatctggagaggaagattgagtcgctggaggaggagatccggttcttgaggaagatccacgaggagtgggtgaatttgtaagtgatgtcctgctagttccagaaaagtgccagtttttccacaaagagcgg

SEQ ID NO: 198051 - DNA, 50 bp, Homo sapiens
ctctgctgggcgtcctgttcttccaggtttgcctgagaatacagatcaac

SEQ ID NO: 198052 - DNA, 90 bp, Homo sapiens
gccggctctggtgctcccagaagagggtccccagccccaccccagccccaaaggaggctgttcgagagggacgtcctccggagccaaccc

SEQ ID NO: 198053 - DNA, 74 bp, Homo sapiens
tccgccttctctgtcagctctttccccgtcagcatcccagccgtgctcacgcagttggaattgatcacaccttt

SEQ ID NO: 198054 - DNA, 83 bp, Homo sapiens
ccctgaggccccagaactatcttttcggacttctgcacggacctggccgtctccagtgccaacttcattcccacggtcactgc

SEQ ID NO: 198055 - DNA, 75 bp, Homo sapiens
ggcttcaaagagaaaaggcaacatcctgtcacaggccatgctctggcaaaaacctgtgttggggtggaagaggag

SEQ ID NO: 198056 - DNA, 80 bp, Homo sapiens
tcctacaggagttcaaaacccacacataccatatactccttgacgacagggactaccaccttcaccttcatgcccacaag

SEQ ID NO: 198057 - DNA, 104 bp, Homo sapiens
gaaattgcgctggaccgtcgccttgctcctcgccgcggcggggactgcagggggatatgagactttctactcggaatatcctgagtgttgcgtggatgtaaaac

SEQ ID NO: 198058 - DNA, 100 bp, Homo sapiens
tttttgtcaagtacaaggcaacccttctggatatctacaaaactgcggaagatccatccaaaagctatgtgaaattacgagactttgtgcttgtgaagct

SEQ ID NO: 198059 - DNA, 101 bp, Homo sapiens
tatgcagtcagtgcccaaggcttccacgccacctatgaaggtggaggaactgcaatgtctggtggagaacagaaaccagagaggtactatgtgggtgtgga

SEQ ID NO: 198060 - DNA, 100 bp, Homo sapiens
tggtattttttggagcttccatcctggttcttccaaagtgcccggacccaaaacaggaatccagtgtgaaaaaagccagtattaaaatactgaaaaattt

SEQ ID NO: 198061 - DNA, 100 bp, Homo sapiens
aaccgcttcagggtgtccaagttccggcacaccgaggctcggccgccccgccgcgagatttcacagagatgatgagagccctgggataccctcgacatat

SEQ ID NO: 198062 - DNA, 50 bp, Homo sapiens
gcagccactcaggactgtcaaagatggcccactgcgtgaccttggttcag

SEQ ID NO: 198063 - DNA, 89 bp, Homo sapiens
ggggagatgaacccaacctagtgggtgtaatacatcatgaactgcagggaccgtataatagacgctggccccaaaggaaactactctcg

SEQ ID NO: 198064 - DNA, 83 bp, Homo sapiens
gctatccccaacaagaggaaagacacacctaccaagaagccagtcaagcggccagctgggattctgtccctgaccgtcttcac

SEQ ID NO: 198065 - DNA, 100 bp, Homo sapiens
attaatcccaagttgcttcagttggtcgaagacagaggttcaggagaaagaccatttatctgcgaattatgtggaaattcttacacagatattaaaaatt

SEQ ID NO: 198066 - DNA, 100 bp, Homo sapiens
tgactgaaaaagcgaaggacttttttcaggcagaaaacaagtctcgtctggacgccacctggtttccatcgggcctatagttccccactctacagcaacc

SEQ ID NO: 198067 - DNA, 98 bp, Homo sapiens
tgtattcagagattttttagtctaaatgatgggcagtcatggtcccagaaacgtcactatcaagaagaactgataaatttcaaacggaagagagtggc

SEQ ID NO: 198068 - DNA, 74 bp, Homo sapiens
cggcagccttcaatgggaaggacttaggccctcctccagagttctgcaagtcgaaaaacccagaaaaagaaaaa

SEQ ID NO: 198069 - DNA, 75 bp, Homo sapiens
agaaggcctctctcctgatacagcaggcgctcaccatgttccctggaggtggctgagatctgcgttgaaatggag

SEQ ID NO: 198070 - DNA, 100 bp, Homo sapiens
gcttcccagactggtggtgaatcctccatagtctggttcaagctgaagttcctggatctcccatatttgtgatgagactagccaaacaatctcgtcatct

SEQ ID NO: 198071 - DNA, 82 bp, Homo sapiens
ggtccagctgtgccgcaccgaggcgagcaggagcagggaacaggtcaaaatgcagatcttcgtgaaaacccttaccggcaag

SEQ ID NO: 198072 - DNA, 98 bp, Homo sapiens
tgtaatggaagggcatggcaagactccacctcctggtgaagaaagcaaacaatatcgcaaacggcaccagttcaggggggtaccgcccgcctcccaga

SEQ ID NO: 198073 - DNA, 100 bp, Homo sapiens
tagaattccttgtagataagcaactggattttttaactgaagatagtgcctttcagccctaccaggaagctgccacttttgctagagagcaaggctttga

SEQ ID NO: 198074 - DNA, 149 bp, Homo sapiens
ccatcatcaaccactttaaccccaaaattgagtcctacgctgctgtgaatcacatatcccaactgtcagaggagcagacagcgtggacgatgaatttgaattgtccaccgtgtgtcaccggcctgagggtctggagcagctgcaggagc

SEQ ID NO: 198075 - DNA, 100 bp, Homo sapiens
tttggaactgtcaggtacctcaaagcgtaaaaaggaagctgttgaagttattgaagtacctgttgctatattctaagaaattaaaatgtccagaaatctg

SEQ ID NO: 198076 - DNA, 100 bp, Homo sapiens
caagaacacggagattagtttccagctgggagaagagtttgatgaaaccactgcagatgatagaaactgtaaggttcatggaaatcttaccgctggtcat

SEQ ID NO: 198077 - DNA, 75 bp, Homo sapiens
attggaggaacagtgtgtccagcatgggagagtacatgagacgatgaagcaaagtctggtggaaaggacagagga

SEQ ID NO: 198078 - DNA, 74 bp, Homo sapiens
cagcgggaccccagcgcgggcggcggcggctgggcgggagccccagaggaagcagtgcatcgagctggagcagc

SEQ ID NO: 198079 - DNA, 74 bp, Homo sapiens
ctctcctcacgcagatggtggagagcggcactgatataaccccgttttcacacgaatggccccttcacatattt

SEQ ID NO: 198080 - DNA, 90 bp, Homo sapiens
ccaagacagatgggagtttccttgtacaccactttctctccttctatctcaaagatacttggcatatcgaaattttatgattgacacgta

SEQ ID NO: 198081 - DNA, 100 bp, Homo sapiens
ggatattcagttgcacatccccacatcaatgcactgccaatgcatatgagctatttgcattcatcagtcacatgggaacatccacaatgagtggtcatta

SEQ ID NO: 198082 - DNA, 106 bp, Homo sapiens
gagtggtgcctcatggaaagcgaccccggggtcttcaccgagctcattaaaggattcggaagacagagatgtcaatgaccccatgcccaaccgaggcggcaatgga

SEQ ID NO: 198083 - DNA, 90 bp, Homo sapiens
gtggagagtgataagcttcgaatggacagagccatccctgacacccggcatgaccaatcttactgtgccgagatcgctcacaatgtttcc

SEQ ID NO: 198084 - DNA, 100 bp, Homo sapiens
caattgctcatgaaatgggtcacaagacatatttgacagtgattggtacacttctcgaaatctaattgggggcgctgacatcattgtgatcaaatacaac

SEQ ID NO: 198085 - DNA, 75 bp, Homo sapiens
cttcaagcctttgattttgaagatgaccactttggaaatgatccaggtccagagagcatcgcagacatcgatctc

SEQ ID NO: 198086 - DNA, 100 bp, Homo sapiens
ggacaatatcctctgtggagaacacccccccatggaggcgaggtagagttggggtcgcagggaaattgcaaagaagattctttggcaagttatgaattga

SEQ ID NO: 198087 - DNA, 75 bp, Homo sapiens
tattcctggaagcagagtaaataaagctcatggcccaccagctagaaagaaacgggtatgcaggagattagaagc

SEQ ID NO: 198088 - DNA, 98 bp, Homo sapiens
tgctggccgtgcagaagctcatggtgcacaactggcattttggagatcaaagatgggtagaaaagatgctgctactataaaacttcctgttgatcagt

SEQ ID NO: 198089 - DNA, 96 bp, Homo sapiens
ggacagcgtgcggtctgggccttttgggcagcttttccggcctgacaacttcatctttgagagtacacctatacgtacttctgatgttgattatcg

SEQ ID NO: 198090 - DNA, 51 bp, Homo sapiens
aaacagacgctccctgtgatttatgtcaagagacccagcattgcattacca

SEQ ID NO: 198091 - DNA, 90 bp, Homo sapiens
ggaacaacaagaatatttagaaaaagaaatggaggaagcaaagaaaatgatatcaggactacagtggacagtttcataaagcataacatg

SEQ ID NO: 198092 - DNA, 82 bp, Homo sapiens
tggacacggcgcggcgctggcgctgccggagctgtcgacccggcctggcgccggactagctgtttgcagacaaggtcccaaa

SEQ ID NO: 198093 - DNA, 75 bp, Homo sapiens
ggaggccaggggtgtcgccatgattgaagcactagagtgtgcatatgataatctttgtcaaacagaaggagtcac

SEQ ID NO: 198094 - DNA, 100 bp, Homo sapiens
ttggtgcctgtgcacctcatttagaggagaagcttagcccaccagtaccatcatgctcagttgtggatcttcagcctgttaaacaagaaaacgaaaaacc

SEQ ID NO: 198095 - DNA, 75 bp, Homo sapiens
tcagtcagaagaaggctgctattgaaagagagtatgcacaggcccgatgagagaaagggaaagttaaggatgctg

SEQ ID NO: 198096 - DNA, 75 bp, Homo sapiens
ttgacatttaattttagggtcctttatatagaagggagagtagggacaagaatccttcaagaaacaggaaaaaac

SEQ ID NO: 198097 - DNA, 100 bp, Homo sapiens
gagcgaagccaagccgggcggcagaccatgctcgacagctgaccaaggccatgatgcgaaaggccacggccagccgcctggtcacgcagcgcgatgcgga

SEQ ID NO: 198098 - DNA, 100 bp, Homo sapiens
gacactttgcgttcgggctgggagcgtgctttccacgacggtgacacgcttccctggattgggactgcctccgggcctgccaggagcagatcgaagccct

SEQ ID NO: 198099 - DNA, 75 bp, Homo sapiens
cggcccccacccggggctccgcgcgcgccgcgggctacgacctgtacagtgcccaccagaagtatgtccgacaag

SEQ ID NO: 198100 - DNA, 80 bp, Homo sapiens
tgggccccagccccacagaccagcccagcattcagtgcctacaccaactaatgttacaattgaatcctataacatgaacc

SEQ ID NO: 198101 - DNA, 105 bp, Homo sapiens
aagactccaggacacccctgaagccgagaaatgcaactttcatcctttgaaacgtgtgctgaaaaagaagaatcagcaaatactactgaaagtgcaatatttgag

SEQ ID NO: 198102 - DNA, 95 bp, Homo sapiens
agagtggaggaagtacagccagcaactctgtttgctggctacacggacaacctggtgcgagtgtggcaggtgaccattggcacacgctagaagtt

SEQ ID NO: 198103 - DNA, 75 bp, Homo sapiens
ttcgcagtggtcgcttcttctccttgctgatgactatcagccagttcgtctgctcagtaaacctggggaactgag

SEQ ID NO: 198104 - DNA, 50 bp, Homo sapiens
caagggcctgtaatcccgtccaacaggctggagtgcaatggcgagatctc

SEQ ID NO: 198105 - DNA, 83 bp, Homo sapiens
ggatgtgggatccggttccttggtgtcatccagccttagcaaaccagaggaaataatgcaaaaggtgtcccaaggctcctgac

SEQ ID NO: 198106 - DNA, 74 bp, Homo sapiens
gggcgagaagccctacgagtgcaacatctgcaaggtccgcttcaccagcggagctggagtttgttcagatcatc

SEQ ID NO: 198107 - DNA, 90 bp, Homo sapiens
ggcatgtgcaagaatggaagatgtgcaaaaaagggaggaggaggcatttcacggagaaggaaacgatatatttttgccatcatggatcag

SEQ ID NO: 198108 - DNA, 75 bp, Homo sapiens
gctttggtgggatgtgtatgaccttcacctcattaacaaggctgacccgcggctgattgagtccctctcccagat

SEQ ID NO: 198109 - DNA, 83 bp, Homo sapiens
aaatacaacatagagaaggacattgcggctcatatcaagaagttccagggtctccctccactgctgtagtaacccgggtccgg

SEQ ID NO: 198110 - DNA, 98 bp, Homo sapiens
cggccgagcccttcctcaactcagcgatgacatccctttccgagtcaactggcccggcaccgagttctctctgggatgtgtatggggtgttgcttaca

SEQ ID NO: 198111 - DNA, 51 bp, Homo sapiens
cactggttgccttggtaggcaataaaagaagagaactccagagatttggaa

SEQ ID NO: 198112 - DNA, 95 bp, Homo sapiens
atcacctgtctggagcaaggaaaagatccctggaatatgaagagacacagtatggtagccacacccccagaatttgccatttgcttcaattgggc

SEQ ID NO: 198113 - DNA, 51 bp, Homo sapiens
gaaaaatccagagaccccctgaagattcgcttgttcagattattatcaata

SEQ ID NO: 198114 - DNA, 100 bp, Homo sapiens
aaaaagtgctcctgggactccaggataccagtgggctcccaggacagcttgctggagatcaccttccgctccggagccctgcccgtgctctgtgacccca

SEQ ID NO: 198115 - DNA, 101 bp, Homo sapiens
cggacgcggagcccgacgcgggcgaggccacggaactgcaagcacatgttgaccagataactgaaatggcagcagtaatgaggaaagccattgaaattgac

SEQ ID NO: 198116 - DNA, 75 bp, Homo sapiens
ttcaccaggggagatggcacaggagggatgacaaaagtgaaagttgggaaggaagattcttcttctgcagaattt

SEQ ID NO: 198117 - DNA, 100 bp, Homo sapiens
caggaatgtatcagggacagtggcggatgtgcactgctacaggactctactatggagaatgtgacagtgatgataacatgggtgccaaaaatacttcaat

SEQ ID NO: 198118 - DNA, 75 bp, Homo sapiens
agaaagaagccatattgaaagaagctgagagagagttacgttatgatgatgaagtgaagcgggtggtggcagagc

SEQ ID NO: 198119 - DNA, 100 bp, Homo sapiens
atcgaggcgagccagagcctgcagtcccacacgttccttccaaagaacctgcacttggtctgcgtggacatgccaggacatgagggcaccacccgctcct

SEQ ID NO: 198120 - DNA, 96 bp, Homo sapiens
agctatcggcgccgcggcaagagccaggatcaccacgatgaatgacacggtaactatctggaccaggaagttcatgaccaatcgaccgctccagag

SEQ ID NO: 198121 - DNA, 88 bp, Homo sapiens
gacaagcccagccaggagaccctgaccaggaagcgggtctctgccagttccccaagaagaggagttgtacgcatgtcagagaggttgc

SEQ ID NO: 198122 - DNA, 83 bp, Homo sapiens
tggagctccttttcctccacctaccttcccgaatgatatcatcaagttgaatcgaaaggaagggaagaagcagaattttccaa

SEQ ID NO: 198123 - DNA, 80 bp, Homo sapiens
cgatcagcatcactgctcatgaagacaggcacatcaaattctatgataacaatacaggtgaatcaaaaactctggtttta

SEQ ID NO: 198124 - DNA, 116 bp, Homo sapiens
ccgcggggcgctgggccgccagcctcggcaccgtcctttcctttctccctcgcgttaggtgtggacactgccagcggctgcagccgacttggaatgacctgggagacaaatacaac

SEQ ID NO: 198125 - DNA, 51 bp, Homo sapiens
atcccacggatagcaagagtgtgcaagtggtgggtacgggcacctcgctgg

SEQ ID NO: 198126 - DNA, 80 bp, Homo sapiens
tgtgtcagggaatgctcctggctggtgcggacacaacccaatagatccactccttataccgccgcacaggtgccagcttt

SEQ ID NO: 198127 - DNA, 82 bp, Homo sapiens
acgatcctctcatctcagcctccaaaagtgctggcattacaggtcaaaatgcagatcttcgtgaaaacccttaccggcaaga

SEQ ID NO: 198128 - DNA, 82 bp, Homo sapiens
atggtggagtctgggaaggatttggagatttttcccccacagatgttcatagacaaataacttgtctgcatttcaagaacaa

SEQ ID NO: 198129 - DNA, 88 bp, Homo sapiens
tgcgggtcccattgacgaagatgatggaggtggatgtgcgggcctttgggttcatgacaagagtggccctgcaggctgagaaactgga

SEQ ID NO: 198130 - DNA, 80 bp, Homo sapiens
ccgtaggagcgcgggggcggctcctgctcttcctggactcctgagcagaggtgaaagaacttgtcctggacaacagtcgg

SEQ ID NO: 198131 - DNA, 90 bp, Homo sapiens
tgagcaagaaaagcctctgggagcagaagggaggctccaagacctcatcaacaattaaggtgctgtcatctatatgatctcagtatttta

SEQ ID NO: 198132 - DNA, 90 bp, Homo sapiens
gatttcctgcccggggccctcatggacggttggatcagggccgaaggctgaccggttccctgatgtgttacctgcttctgctactgatcc

SEQ ID NO: 198133 - DNA, 75 bp, Homo sapiens
tggagaatatatggctggacagctagctgcttatggctataaaattacaggacagaatgacttggaagataacgg

SEQ ID NO: 198134 - DNA, 74 bp, Homo sapiens
cccacatggcccacgtacctcaggcgaccatggccttgctgggtaagcgctgtgacgtccccaccaacggctgc

SEQ ID NO: 198135 - DNA, 83 bp, Homo sapiens
gcagattccagaaaaattacagcacatctcagtgaatttgcaagtggttaaaaatctgtaagagcctgattttagaattcacc

SEQ ID NO: 198136 - DNA, 100 bp, Homo sapiens
gaagctcatcatgaccttccagaattacgggcaagcgctgttcaaacccatgaactggagaagaagcaggcgctccctccattccagccacagatcacag

SEQ ID NO: 198137 - DNA, 100 bp, Homo sapiens
gttactccctagcagtgtggtaaggacgagattgaggagctgcgggccgagatgctggagatgcgggacgtctatatggaggaggacgtgtatcagctgc

SEQ ID NO: 198138 - DNA, 75 bp, Homo sapiens
cgggccattttccagacctcatccagccattgagacccagagcagcagttctgaagagatagtgcccagccctcc

SEQ ID NO: 198139 - DNA, 100 bp, Homo sapiens
cggaggactgtgctgtgcctctctcgcccacattttccccaagcactctcaggaacctggcaacagagctaccaatccatcctttaaggaagtattgtca

SEQ ID NO: 198140 - DNA, 100 bp, Homo sapiens
taacctgtcatcaagacctgggattttggtgctttgtgctgatgaacatggtcaccttgaaaggtgtgttgaatatggcagagccagaaaatgcaaggag

SEQ ID NO: 198141 - DNA, 75 bp, Homo sapiens
ctctcattggcttctttgagactgaaatggcagacctattccatctgggctagcagttgtaaaaacaaagcagag

SEQ ID NO: 198142 - DNA, 73 bp, Homo sapiens
ttcataaatacaacttagcagtcacagacaagttgaagatgaccttgtgctgccttaacaatttcaggaaaag

SEQ ID NO: 198143 - DNA, 80 bp, Homo sapiens
cgctcgatccagcaccatggggaagcgggacaatcgggtgacctgcctagagctggaacgttacctccagagcgagccct

SEQ ID NO: 198144 - DNA, 82 bp, Homo sapiens
ctcggatcccgagcgcggggaggcagaccgggtggtgaaggaggagatctttgatgacaatgccaagcttccctgcttcaac

SEQ ID NO: 198145 - DNA, 88 bp, Homo sapiens
atcgcggagtcccaatgaaacgggcagccatggccctccacagcccgcagatattgaaatggattccaggcgtgtgcctcgagacaag

SEQ ID NO: 198146 - DNA, 90 bp, Homo sapiens
cagctgtccagcttgctataatcaagtgaagattcaggttcattaaagaagcggaagcagaatgaggctgccaaggaggcagagactcct

SEQ ID NO: 198147 - DNA, 100 bp, Homo sapiens
caaaaactcagaaaatacgtggttggagagctcatctggaattttgccgatttcatgactaaccagtaggccacaatcagagaatggaattcctaggtga

SEQ ID NO: 198148 - DNA, 88 bp, Homo sapiens
gacaatccaaaggtgcagaaagcactctgacaaggcaaggggacgcgagataaggtcctgatcagaatcatggtctcccgcagtgaag

SEQ ID NO: 198149 - DNA, 100 bp, Homo sapiens
ctttgtctttgacgggtcctccctgcctgccgatgtgcatcggtacatgaagatggccttgggtgtctccgtgactgactacacgttcgaggactgccag

SEQ ID NO: 198150 - DNA, 100 bp, Homo sapiens
cagatcttcaacaagaggacccaggagaaattcgccctcaaagtcgaattgacataaaacagttgatagcaaagaagataaagttgacagcagaggcaga

SEQ ID NO: 198151 - DNA, 108 bp, Homo sapiens
cgctgacgctgaggccttaagtgaaagaagtggaaacacccctaactctcccaggaattacatgaacgacagccttcgcaccgacgtcttcgtgcggttccagccaga

SEQ ID NO: 198152 - DNA, 75 bp, Homo sapiens
cccggcgcggcccagcgccctcagtgttttaactcaaatgggtgatgaaaaggactcttggaaagtgaaaacttt

SEQ ID NO: 198153 - DNA, 101 bp, Homo sapiens
aaaatcaatctaaacatttgtgggaagttgtattcatcaataatgaaatgctgactaaggaacaaggatccagatgaagaaatggccaaaatcgacaggac

SEQ ID NO: 198154 - DNA, 100 bp, Homo sapiens
cccgaatgccagcgcctcttctaccggggcaagcaggtactccaaagattcaggtttactcacgtcatccagcagagaatggaaagtcaaatttcctgaa

SEQ ID NO: 198155 - DNA, 82 bp, Homo sapiens
tggaaggtgcgtgtggggctgggtctcggagtgggagacgtggagtgcagatccgggatcagttgaaggaagaggagatcca

SEQ ID NO: 198156 - DNA, 100 bp, Homo sapiens
ggatcgctgtcctgacagaagagtccggttccagttgttggcaaaggagaggaagaggaagaggaagatggcatgcggctttgtctgccagccaacccga

SEQ ID NO: 198157 - DNA, 90 bp, Homo sapiens
ccctggtcttgctcggccgatgaagtgcagaggtttttttctgaaggtggtggtgttgccatggggatgtataatcaagataagtcaatt

SEQ ID NO: 198158 - DNA, 100 bp, Homo sapiens
atgctcgcaacctggccatcgtgtgggctcccaacctgctgaggtacaggtttgcagattccgccagcagcacagcaagctctacagatgagtggctctt

SEQ ID NO: 198159 - DNA, 100 bp, Homo sapiens
tgtagctcgctcaagatggcggcgcagccaccccgcgggatacgcctcagcgcgatggactagaggcttttaccagatttcttaaaactgaattcagtga

SEQ ID NO: 198160 - DNA, 75 bp, Homo sapiens
catccttggagcgagctgagagctcgagacatatctgaagagatggattaagaatgctttggattaaggattgtg

SEQ ID NO: 198161 - DNA, 89 bp, Homo sapiens
gttttcaggcccgatatctctccctattttggcctattctatgaggtgtatgcaacagcgttattgcaacaggctaacgaaaacagaca

SEQ ID NO: 198162 - DNA, 90 bp, Homo sapiens
atgggcggcaactctttgatgtactactataatgggaaagcgtttatgtgaagaaccagctcagtgggactctacagattaaaccagggg

SEQ ID NO: 198163 - DNA, 101 bp, Homo sapiens
ggatggacttgctacctcttgggtgaactctagcaattacaaggtatacaaaactaggatatgctggaaatacagaaccacagtttatcatcccttcctgt

SEQ ID NO: 198164 - DNA, 101 bp, Homo sapiens
cttcgcggagcggcgccgcgtagcttccatccgccagctgccatgagcgagcgcctccgtcccagaacgacaaatcctccacccctgggctcaagtccaac

SEQ ID NO: 198165 - DNA, 83 bp, Homo sapiens
attatggaaaaattcaatacaattagtgtctccaaatgcaacagttttcaaattaaagctttcacagcactgcgcttcctctc

SEQ ID NO: 198166 - DNA, 139 bp, Homo sapiens
atccatgaccctaatggtctttttgttcaagataaagtgattttttgcctttgttgattaactggacaaattcagggacacagcaggtcaggagagattcaacagcattacctcagcttattacagaagtgccaagggg

SEQ ID NO: 198167 - DNA, 100 bp, Homo sapiens
gttacggccatcacggcggccgcagtggcgtcctggagccctcctcagacagctctggctctggctattgctcaggagctgggtagtaaggtccccttct

SEQ ID NO: 198168 - DNA, 100 bp, Homo sapiens
cgttttgtgaaaggccaatttcatgaatttcaagagagtaccattggggctcgaattacatctttacaagaggaggtgaagcatctcaaacataatctcg

SEQ ID NO: 198169 - DNA, 82 bp, Homo sapiens
cagagcaaggggcttacgcagaaggacctggccacgggtgaggtggctttgaccccgggttgcccggccagcacgaccgagg

SEQ ID NO: 198170 - DNA, 87 bp, Homo sapiens
gggctggttccggctgcagcccgaccagtccaagagccggcagcatgacgattccagtgcgacggcctctcagccgccggagtcgct

SEQ ID NO: 198171 - DNA, 75 bp, Homo sapiens
atcggctacgtcaaacaggccatgttccactatttccagatgaggaaaatgaagctcgggctggttaactgactt

SEQ ID NO: 198172 - DNA, 50 bp, Homo sapiens
ctcccaagtagctaggaccacaggtactctttgagcacatcaaattcttc

SEQ ID NO: 198173 - DNA, 100 bp, Homo sapiens
ggagagtagcatccctcaagcttcagccattcctgtggcaacaatcagtggacaacagcaccttgcagagtgaagtcaagcccatcctagagaagctgac

SEQ ID NO: 198174 - DNA, 74 bp, Homo sapiens
ccgggaggaaggaacgaggcaaggagctaaagcagcgtgcgttcagccctgggattcttctgatgtagagcgac

SEQ ID NO: 198175 - DNA, 74 bp, Homo sapiens
ccagccctgcctcggcggaccaaaggattcttgaagacctggatgaacaaatttatatcattaccttagaggaa

SEQ ID NO: 198176 - DNA, 90 bp, Homo sapiens
cttaatgaagactggctgttgtggcaggttccggaattcagtactgtggttggctttctgccacctcagcgagcagtgctgcgaatacat

SEQ ID NO: 198177 - DNA, 123 bp, Homo sapiens
tctgccaccaagatggctctgcccagccagcattccctgcaggagccctacacagcctccgtgggagaatgccgtgaatggagaacacctgtggctggagaccaacgtctcgggagacctctg

SEQ ID NO: 198178 - DNA, 100 bp, Homo sapiens
cctctacctgcagcagatgccctatccgtgctatgtggacgacgtgtggtgaagcagtattttccaatttgaagattcatttgaaggtggctcctgccac

SEQ ID NO: 198179 - DNA, 96 bp, Homo sapiens
cacacttgagcttggggagccaacttccatgatggaagaagagggagattatggtgacaagctgaacatggagctgagtgagaaatacaagctgga

SEQ ID NO: 198180 - DNA, 100 bp, Homo sapiens
catgttctccttgagcaccatccggggtcaccagcaatgttcacagcatctttaccgggagcagattccatctcaagaaaccacttcctttgctcatcca

SEQ ID NO: 198181 - DNA, 82 bp, Homo sapiens
gggaaccctggtcaccgtctcctcagagaaccatggagtctggcagtaccgccgccagtgaggaggcacgcagccttcgaga

SEQ ID NO: 198182 - DNA, 100 bp, Homo sapiens
gagactttttgtacttacaaagtccatgctaacctactatgagggtcgagcagaggcatggaagaggagatggttcgtgttacgcagtggccgtttaact

SEQ ID NO: 198183 - DNA, 50 bp, Homo sapiens
gccaagggctacattgaggtgatgagatggactcaccctgtcacccaggt

SEQ ID NO: 198184 - DNA, 100 bp, Homo sapiens
taaaccacattatggattgagagcaatcaaggtgaactactgagttcttcattatgtctgatggagattatgattacctcatcaagtttttagctttggg

SEQ ID NO: 198185 - DNA, 100 bp, Homo sapiens
aaagaaccctggctggggaaaagggaagtgaaaagagatctgttttcagctttggagtttaacccttctgccaatccagaggcaagcacaatattccaga

SEQ ID NO: 198186 - DNA, 75 bp, Homo sapiens
gtttttctgttttgcctgaatacatgatttaaacaagagatttccacagaaggaggcacgcggacctccagtggc

SEQ ID NO: 198187 - DNA, 74 bp, Homo sapiens
cctgcttcaccttcccctgacctgagtagtcgccatggcacaggcatcaaacagtgcctcctacatccaggacg

SEQ ID NO: 198188 - DNA, 90 bp, Homo sapiens
gtttgtcacctggctcgatggcattaagtgcagctctgtcatttccactctgctctgctgcacagaaggcagaagccctggccgtcccct

SEQ ID NO: 198189 - DNA, 78 bp, Homo sapiens
taagactacctttttcagaaatgcgcagagcaaacatctttcaaagaacaccttccaccatgaccacctcagcaagtt

SEQ ID NO: 198190 - DNA, 75 bp, Homo sapiens
tgtacagtagtgctacttaaaatatgctggggaccatcaccatcacagggagcagaggaagctgctggaaaagtg

SEQ ID NO: 198191 - DNA, 100 bp, Homo sapiens
tcccagcttgcaaactccagctttgcctgtgagaggaacaagcgtccctgatccagaaggtggtggctacagtttcagaaaagtcacgtataatggaact

SEQ ID NO: 198192 - DNA, 101 bp, Homo sapiens
aaatgatggaatgcctaccgggttataagcgggttaacaacaccttttgccaaggtcaccatatcatcagccaacctcttacaggccacgcttattgctct

SEQ ID NO: 198193 - DNA, 74 bp, Homo sapiens
cttaccttaaaccttttaagcaaggaaattgaactaagaaatggagagccaggtgactttatacacactttggg

SEQ ID NO: 198194 - DNA, 83 bp, Homo sapiens
gggctctgcagcgagcgctcgatggaacctcatcccagtttggtgccctggttgtcagatgttggaaagcagtaggacggaac

SEQ ID NO: 198195 - DNA, 83 bp, Homo sapiens
cttagagcgtctggccaagaatcagaggaagtgggtgaagatgcttttgatgccctccctccatctctcccacctcccccacc

SEQ ID NO: 198196 - DNA, 51 bp, Homo sapiens
atagaacggatcttgtctgtgtccctcaggggcaccaccacgaggcgattt

SEQ ID NO: 198197 - DNA, 75 bp, Homo sapiens
aacgtgtcccggggccgacccggcccgtagtgtggaagcagcttcaggtgaccatagccgatgactactcagatc

SEQ ID NO: 198198 - DNA, 98 bp, Homo sapiens
ccagccatggccttcctctcctgcgtgagaccagaaagctgggagccctgcgtggagatctaccaaaagttttaaaccttcatttattaaattcagga

SEQ ID NO: 198199 - DNA, 74 bp, Homo sapiens
aagctgccaaaagtgacatgcaggtctatcagccacagtctctgcaagtttccaagagcagcagaaaatgaaca

SEQ ID NO: 198200 - DNA, 100 bp, Homo sapiens
ctgacccaggagctgcaaaccacccaagtctgcaatcttaccagggaggccaagcgaccacccaaagaaggaaggaaaatcacctcggcagtgtttgaag

SEQ ID NO: 198201 - DNA, 75 bp, Homo sapiens
agatttttcggctttcattaacctggtggaattttgcaggcttatgtagacatgaggaagattggcagtagccgg

SEQ ID NO: 198202 - DNA, 101 bp, Homo sapiens
cgcagaacccgggagtaggagactcagaatcgaatctcttctccctccccttcttgtccggttccagttgttggcaaaggagaggaagaggaagaggaaga

SEQ ID NO: 198203 - DNA, 100 bp, Homo sapiens
agctgaactactttgcaaaggccttggagagcccagagcgacccttcctggccatcctgggcggaaaatcctgacttccgagaaatccgctcctttgtgg

SEQ ID NO: 198204 - DNA, 71 bp, Homo sapiens
gatacagaagacagccacctcagagactggtgcccctacagacatacaaggagattgttcactgctgcgag

SEQ ID NO: 198205 - DNA, 100 bp, Homo sapiens
cggggaccttccactgaagctacggagtttacagaaggcaattttgcaatcttggtatgtgcactgcgcgtgaccagccgggcccgcagccgcatcctca

SEQ ID NO: 198206 - DNA, 75 bp, Homo sapiens
aagcaagatggctgaactcaatactcatgtgaatgtcaaggaaaaggtcccagtagggatggcacaatcagcgag

SEQ ID NO: 198207 - DNA, 75 bp, Homo sapiens
ttccttgtggacttcgagcagtcgcacctggaggttcagctggaaattggccttgcctctctgggtgcacctgat

SEQ ID NO: 198208 - DNA, 100 bp, Homo sapiens
cttgggcccagtttatggcttccagtggaggcattttggggcagaatacagagatatggaatcagagacggtaaagaacaggtccaagaaaagctcaaag

SEQ ID NO: 198209 - DNA, 98 bp, Homo sapiens
cacaagttcacgaaagcctacaaaagtgtggagaggttccttcaggaggatcagcctgccaggagtgaagaaagctttgggcaaatatggtcctgccg

SEQ ID NO: 198210 - DNA, 101 bp, Homo sapiens
ggtgctgtcagcgcggccgtcggagacatgggagacccggggtcggaggagctagagttaatgccaaagacagcaaatggttgacacctttacacagagca

SEQ ID NO: 198211 - DNA, 100 bp, Homo sapiens
gacctggtggaggtgttaaatgaaaacaagttggatggcttgaggactggtactaaaaggaaacgtgactgggaggccattgccagcagaatggaggatt

SEQ ID NO: 198212 - DNA, 75 bp, Homo sapiens
gctcggagtccgctggccacccagctgagaggagaggcgcccccggggacgaaaccgaccagagggcaaagtgtt

SEQ ID NO: 198213 - DNA, 83 bp, Homo sapiens
cgacaagccgctggcagccgcggatctcaccgccgctcagggacggctgtcctcagcgaggggccgtgcacccgctcctgagc

SEQ ID NO: 198214 - DNA, 100 bp, Homo sapiens
gtcctggacacccaactacaagcagtgttcatggagttcattgaattatggcatagatcttgggaaaattgcggctactccagagcaaataagcatggac

SEQ ID NO: 198215 - DNA, 51 bp, Homo sapiens
tatcagaactacatcttaaggggccccccagggcccgtcagtggcctgagg

SEQ ID NO: 198216 - DNA, 75 bp, Homo sapiens
tcaggtggaacagattcagaaggagcaggattaccaaagggtttctaccatgaatgaaatgaagagttattctca

SEQ ID NO: 198217 - DNA, 109 bp, Homo sapiens
tgaacttcgaaacgtgataagaagcacctggatgagacatttgctacagcatcccacattaagtcaacggcacccgacaggaggatcctttattcgtccgaacaaggta

SEQ ID NO: 198218 - DNA, 50 bp, Homo sapiens
cgaaagagcactggactccggaaggtaagcggaagggtacagccaatgcc

SEQ ID NO: 198219 - DNA, 74 bp, Homo sapiens
ccgctcaatggcgactccctcaccgagtacgaagcgggcgtttgcgaagatgagcgtgaagccgtgcagaagaa

SEQ ID NO: 198220 - DNA, 74 bp, Homo sapiens
tgctcatctcacctatgggaagctgctagctctaacagatgttgagaaagagaaggaaacccacagttacctca

SEQ ID NO: 198221 - DNA, 127 bp, Homo sapiens
caagatgcagaagtcagcaagagtgacataggagaagtgattcttgtgggtggcatgactaggatgcccaagattatatctgggtgttggcacccagccactattctgccaatgaagtacatcctgg

SEQ ID NO: 198222 - DNA, 95 bp, Homo sapiens
cgattgcagcgcagtggaagtcaagagcaaggagtacaagcgcaagctagccagagtttccctggtgcgcaaagaactcaggtcccggatccaga

SEQ ID NO: 198223 - DNA, 83 bp, Homo sapiens
ggctgttagaagaattcatgctcatccggatcaatgtccgagttaccaccatggatgcagagctggagtttgcaatccagcca

SEQ ID NO: 198224 - DNA, 87 bp, Homo sapiens
ccagtacgagttgaatcattgttcaaataaggacatggatttgattgacatactttggaggcaagatatagatcttggagtaagtcg

SEQ ID NO: 198225 - DNA, 73 bp, Homo sapiens
gaagccaccaggattacatcatctgctggttatcagtgagctgaatggaaaaaacattgaagacgtcattgcc

SEQ ID NO: 198226 - DNA, 103 bp, Homo sapiens
cgtggaggagctgtgcagccgcgaggaggcgcgggaggtgttcgagaacgaccccgagacgaaacttgaagggtcaaagtgcaaagggcagcttttgattttt

SEQ ID NO: 198227 - DNA, 50 bp, Homo sapiens
ggaaaacaacttcgagggcagactatacacagaatgggattttacatatg

SEQ ID NO: 198228 - DNA, 82 bp, Homo sapiens
cccccattcaagttcaagttcacaattggcgttcttctgtgtggcagttcagaatgatggatcaagctagatcagcattctc

SEQ ID NO: 198229 - DNA, 95 bp, Homo sapiens
tgatgctgtcatctgccttggaaacagtttcgctcacttgccagactgcaaagttttcagtgaacctcttccggacgctgccaccttcatcgaat

SEQ ID NO: 198230 - DNA, 80 bp, Homo sapiens
ccccaaggcgctgccctgcgcaggttcagagcctagactgggagacctttgagcagtattgtgcctggcagctctttctg

SEQ ID NO: 198231 - DNA, 82 bp, Homo sapiens
agaagatcatcattaaggacggaggcacggagctgagagaagataatatcattttaattgaaaccaaggccatgctggagga

SEQ ID NO: 198232 - DNA, 83 bp, Homo sapiens
ctgaagagcgacaagccgctggcagccgcggatctcaccgccgctcagggtggaaaggagactatggaaccaggatccagcag

SEQ ID NO: 198233 - DNA, 98 bp, Homo sapiens
atcaattggcacacagcaatgggaacatagccctttgggagagttgtgtccaccagactcgggagacctggtgttgattgctattgccaacatgaaag

SEQ ID NO: 198234 - DNA, 87 bp, Homo sapiens
aaggtggttctgtcagagatctcctccgagccatgagaaataaggcagcccttggctggtccctgcgagcccgtggagactgccaga

SEQ ID NO: 198235 - DNA, 114 bp, Homo sapiens
ggaatatgggaataatgacaccctgggttctgtacgcactgaattcatgaacccccacctcatcagcagcagtgttgtactgctacttctataaacggacagccgtaagactag

SEQ ID NO: 198236 - DNA, 75 bp, Homo sapiens
ctccggtaccgctgcagccaccgcggcccccgcgggcagtatttggcagtcgtattcagagataaacccctggag

SEQ ID NO: 198237 - DNA, 74 bp, Homo sapiens
cgagggagtttgacagctattaaaaccagggctccacagttaggagaaaattttcagagaatccacatgtttac

SEQ ID NO: 198238 - DNA, 75 bp, Homo sapiens
tttgtgtaaaacaaaaatattatggtctttgtgcacatttacatcaagaaataaactatcaatcttgcccagact

SEQ ID NO: 198239 - DNA, 100 bp, Homo sapiens
gagccagccatgtttggcactgaatcttcattgcgattgtgccctgatcggatcagtctcatcaaggagtgtatttcccagtcccccacatgctataaac

SEQ ID NO: 198240 - DNA, 80 bp, Homo sapiens
acaaggatgatatgaagacttccctgaagaaagttgtgaaggagtacctggagtagaacagaaaaattattatgtctgtg

SEQ ID NO: 198241 - DNA, 82 bp, Homo sapiens
tcgcattcagaatttgaccatcttggtgagaaacattaagacctactaccagcaaactgtcatcaggagcttaaataggaca

SEQ ID NO: 198242 - DNA, 99 bp, Homo sapiens
gcggcccgcgctcggccgcccgccgggcgccatgttttggaagtttgacctgcacacaagctcgcacctggacacgctgctggagcgggaggacctgag

SEQ ID NO: 198243 - DNA, 98 bp, Homo sapiens
agcaagctccacagcaccctccatgggctcagtcttgctcccgggaagatggttaattccatcaggggtgaagctaagtagtcttcttggtaaaaagg

SEQ ID NO: 198244 - DNA, 100 bp, Homo sapiens
cgagtgtgcgaagctagccaaggtatgatgaaatgagtattctcttcacagttttggttactgaaactactttggagaatggattaatacatctgagaag

SEQ ID NO: 198245 - DNA, 75 bp, Homo sapiens
cagattcgcagtggtcgcttcttctccttggacttaaccaccaccatgtcgagcaaaagaacaaagaccaagacc

SEQ ID NO: 198246 - DNA, 90 bp, Homo sapiens
aagaggagaaatagcaggacctccagacacaccatatgaagcatgcagcagattggaataaatatgatgaccgattgatgaaagcagcag

SEQ ID NO: 198247 - DNA, 100 bp, Homo sapiens
gcactttacagaactgatgagccagcgatctgtacatgagacccaggaattatttccaaagcaagattcatatgctgaaggggtaacagacagaacctca

SEQ ID NO: 198248 - DNA, 100 bp, Homo sapiens
tcaccttgaagaggaagacggggcggaagaccaagatcatcgagatgctaagaaacgggacatctatgacaaatatggcaaagaaggattaaatggtgga

SEQ ID NO: 198249 - DNA, 95 bp, Homo sapiens
actcttcagggatgagtcatgtggcagtggaaaatgcgctcgggctggaccagcaggtttttagaacttcagccataaaaatgggcagaattttc

SEQ ID NO: 198250 - DNA, 100 bp, Homo sapiens
cgtgggtccgcgctgcttccacccaacttcctgttagtttcattcattggctcccatgtactatcgaggctcagctgcagctgttatcgtgtatgatatt

SEQ ID NO: 198251 - DNA, 100 bp, Homo sapiens
aaaatgattttgaagttattggaagataaaaatggagaggtacagaatttagctgtcaaatgcctgtctcgatatagattgaagtttagcgctgataaag

SEQ ID NO: 198252 - DNA, 50 bp, Homo sapiens
cccaggtggagtacacggcagactgcagcagtgaggatgccagagttcat

SEQ ID NO: 198253 - DNA, 98 bp, Homo sapiens
cagccattgaagatgctgtgcggaggattgagactggggcagcacctactccgtgtcagtggtggagaccgactacgaccagtacgcgctgctgtaca

SEQ ID NO: 198254 - DNA, 50 bp, Homo sapiens
gttgaactgtggagtgtgtggtgtgctggagaagagaaacgagttggcac

SEQ ID NO: 198255 - DNA, 83 bp, Homo sapiens
gagtgcagaagatctgggtgcccgtggaccacaggccctcgttgcccagatttatttctcaaactctgaggctgcggagttca

SEQ ID NO: 198256 - DNA, 100 bp, Homo sapiens
ggctgccgaaggcctggcccaccgcaccgagaaggccaccgagggagccaattctgcttctcagaagatgcactattatagatactctaacgccaaggtc

SEQ ID NO: 198257 - DNA, 100 bp, Homo sapiens
atcgccctgccggaccgcgcctcaggctcccccagaaggtagaagatagcaccatgccgattcgtcgaactgtgaattctacccgggaaactcctcccaa

SEQ ID NO: 198258 - DNA, 96 bp, Homo sapiens
tgctgctgctgctgctggtcctcctgatcgccggcagtgctggggccgcgccacttccgcaaacaggtgcaggttctaaatggcttctaagaagtt

SEQ ID NO: 198259 - DNA, 88 bp, Homo sapiens
ccagctatgtgtatccatggagacaagagtcaaccagaaagagattgggtacttaatgaaagctctgggtgtgcggcagtaccatgtg

SEQ ID NO: 198260 - DNA, 100 bp, Homo sapiens
tttttgctcattaacagaaaagaagaggagaatgctaagcagatggaaatttaatggagccaccatttcagaaccaaaagaaatttggaacaaacttcac

SEQ ID NO: 198261 - DNA, 80 bp, Homo sapiens
gaactgcgcagacctggtggaggtgttaaatgaaaggtcagatgacttgtctgcaaagctgtgggatgtgagcacagggc

SEQ ID NO: 198262 - DNA, 82 bp, Homo sapiens
ctgggcacagcaaatgctgaggactcagaccggtctctgcaagaatgagtgccaaaccaaatatggaaatgctaatgcctgg

SEQ ID NO: 198263 - DNA, 82 bp, Homo sapiens
ttcggcgctatggaggagctcgatggcgagccaacagtcactgagccttcacgtaaatgggtccagtcatgcctcccagtaa

SEQ ID NO: 198264 - DNA, 101 bp, Homo sapiens
gactacgaccgttcccgcgagagagatgaaagacgtcgaggggacgattggaatgacaggccagtccctgagacgaataggaccttgtccctggatgaggt

SEQ ID NO: 198265 - DNA, 74 bp, Homo sapiens
attgctatcacttctgcagaatccagtgggtcgaaatgagaaggggcagctgggacatggtgacaccaagagag

SEQ ID NO: 198266 - DNA, 83 bp, Homo sapiens
gtcttccccaaccagcctggaggcaagaggctcctgcagacccctggcttcctgatggcatagtcaatccaacaataagaaaa

SEQ ID NO: 198267 - DNA, 100 bp, Homo sapiens
ctgctgtggtcctcacccccaagagtgtggcgggagtggtggagagcctgaagatcatcaccaaggccaagtccctgcgcattgccgagtatgccttcaa

SEQ ID NO: 198268 - DNA, 75 bp, Homo sapiens
caaagagaaagattatttctccacgatctatagaagatgaggagaaggcagagcccccccaggctatgaatgccc

SEQ ID NO: 198269 - DNA, 75 bp, Homo sapiens
tgggcaccccttcagaagcgattgaaattgcattgaatgccccagaggagcccgaaacctcccaggcttggtgca

SEQ ID NO: 198270 - DNA, 95 bp, Homo sapiens
aaaagaagaaatactacgataaaaatgccatagctattacaaatgaatttgctgattcccttggaattccgtttttggaaaccagtgctaagaat

SEQ ID NO: 198271 - DNA, 100 bp, Homo sapiens
gcttttttggaatcttctgctaaagaaaatcaggccatccatcctgtttaaagttttcccctgaactaacggttcgagtgaaggccttacggtggcagtg

SEQ ID NO: 198272 - DNA, 74 bp, Homo sapiens
cggcgagcagtctcaggcctttagtgatgatgagagcccgagcccagcacattgtgccctgtactatatctcag

SEQ ID NO: 198273 - DNA, 90 bp, Homo sapiens
ttcgtatacgtggattctagaggggtgacagcgaaacaccgattattgaccgacctattcgaggtcgtggtggtcttggaagaggtcgag

SEQ ID NO: 198274 - DNA, 75 bp, Homo sapiens
cagatcttgtgaatgaagaagcaactggacagttccatgtataccctggaaaggagaacatagcaccccagcctc

SEQ ID NO: 198275 - DNA, 49 bp, Homo sapiens
agcaaatcagagactagcaagctgggtgaaaaatgtgaggttttacaat

SEQ ID NO: 198276 - DNA, 100 bp, Homo sapiens
tgcgaggattcatgacagcgcatggacagccagaccagcctcgatctgcgcgctacatcctgaaggactatgtcagtgagatttatggttacaatttgag

SEQ ID NO: 198277 - DNA, 99 bp, Homo sapiens
ggagcctcagttggaagcagccgatccagcctgcggagcctgtggggcaggttacaattcaacaaacatggtgtgttgcgggtagaaggcttcttaaca

SEQ ID NO: 198278 - DNA, 99 bp, Homo sapiens
tcagagagaaggaatccaccttcttacgctatggcagatcccacccatgtgatgggcctgtaccctgacctgctgcccacagactacagaaagcagttg

SEQ ID NO: 198279 - DNA, 50 bp, Homo sapiens
tgaccggcgtcgagaatttcaactgcaactagaagccatttgtgtcaagg

SEQ ID NO: 198280 - DNA, 83 bp, Homo sapiens
tggacctgctggctcagcccctccctgcagacggcgccggcgcccagatacccagtatctccaagataccatgaaccatgtcc

SEQ ID NO: 198281 - DNA, 101 bp, Homo sapiens
tggagaggacgcgaggagccatgaggcgccagcctgcgaaggtggcggcgctgctgctcgggctgctcttggagggctccacgtgttccccacgtttgtgg

SEQ ID NO: 198282 - DNA, 100 bp, Homo sapiens
tagaactggacacctcgggggtttcctgctttatggcgaaggattttgacttcagcgttccaggatccatgaagcttcataatcttatttctaagttgaa

SEQ ID NO: 198283 - DNA, 74 bp, Homo sapiens
gaggggctgggagccgcgcacaccaccatcacatttacctaagagtagacgctcgtccaacagaaataaaaaat

SEQ ID NO: 198284 - DNA, 100 bp, Homo sapiens
gatgaatgcaagaggcgtttctataagaattgggacgtgtggtgtgctactgcggaaggtgaatggcacagccattatccagctgccctctaagaggcag

SEQ ID NO: 198285 - DNA, 131 bp, Homo sapiens
cgagccttatgatatcatgctgaggcgccttgcaaatccgacaattaagatcctcctagaccttgaggaatttatctcactaatatcttgaaaacagaagaaggcaaccctgaggtcctaaaaagacatgg

SEQ ID NO: 198286 - DNA, 100 bp, Homo sapiens
gcaacgtgttggaccttccggagcttctcagaagacagagggttttcttttgagagtttgctctccaaagctcggggaattgattccagctctgttaaac

SEQ ID NO: 198287 - DNA, 118 bp, Homo sapiens
cacagtatagcttctgacagtggagacactggcattggaacttcctgttctgatagcgtggaaggctgctgacttgagtaaaccaatagataaaaggatatacaaaggaacacagcct

SEQ ID NO: 198288 - DNA, 90 bp, Homo sapiens
gtgagttcgccgctggtggctccggttaatggaacccctggtagtcagctctctactccgcgctcaggcaagtcgccaagcccatcaccc

SEQ ID NO: 198289 - DNA, 122 bp, Homo sapiens
agaagatggtgcagaagaaaccagccgaacttcagggtttccaccgttcgttcaaggttcgtgctggccgtgggcagcgccgtctttgatgccatgttcaacgggggaatggccacaacatc

SEQ ID NO: 198290 - DNA, 75 bp, Homo sapiens
agtttgcagatcgggagcgcaaggtcgccctcaaggccatgatcaaaaccgtgttcccgagggagctgaaggagg

SEQ ID NO: 198291 - DNA, 76 bp, Homo sapiens
ggcaagtggacattttactggctcaagatcaagacttcaaatcccaaaagaacttcatcattaacatgacttgcag

SEQ ID NO: 198292 - DNA, 75 bp, Homo sapiens
gtaaaggagctacaggagaagcttggcgaggtaggcctggtgtccgcgctgccccacctggtcatgaccatcatc

SEQ ID NO: 198293 - DNA, 75 bp, Homo sapiens
cgagagcgcgaatatcgtcatcgttagaagctggagcagttcaagaaggacaacgaggaaacaggcttcggctca

SEQ ID NO: 198294 - DNA, 99 bp, Homo sapiens
gagatggcgatgctctacccggagctgtacaaggacctcaccaagaatgtcgtactctcaggaggctccaccatgttcagggatttcggacgccgactg

SEQ ID NO: 198295 - DNA, 100 bp, Homo sapiens
gcaacgtggtaagaccagtgaattccacgaacatgagcccactgctgcacttctatggccgtaaaattactgtggcatgatcctccaccattcacactct

SEQ ID NO: 198296 - DNA, 100 bp, Homo sapiens
cggacgctggtgcagcgcatccaccagctgcaggctgagcgcgcgcagggcttccgccgactggaggagtctcctctgagcctccggcctccataagacc

SEQ ID NO: 198297 - DNA, 100 bp, Homo sapiens
gttcggtggtttcttgtgaggacgcggcagcccgtggagtcggctgagggaaaagcgaggcaaggcaggcggatgaacgggaccgggttcagaagaaaac

SEQ ID NO: 198298 - DNA, 83 bp, Homo sapiens
cagctttcttcccaacagtctgtgatgtctaaacttgcataaatctctgcccctgttagaaaatcaaatcaaggagactcacc

SEQ ID NO: 198299 - DNA, 50 bp, Homo sapiens
caccctgcttggagacggacttgcttccgttcacacaaaagatgttggac

SEQ ID NO: 198300 - DNA, 90 bp, Homo sapiens
gcgatcctgaatgggggcggcgtgcccgccggggggctagtggccacgctgcagagcctcggtaatccacgacttcttattctccttgaa

SEQ ID NO: 198301 - DNA, 83 bp, Homo sapiens
atttccggagtcagtcattttactgtcaagacatttcttcggcattctgcaacagagtgaagacatttccacctggacacctg

SEQ ID NO: 198302 - DNA, 83 bp, Homo sapiens
ttgctgctcttggggttgaagccgttgttattttcttaggagttaagttgctttccaaaaacctttgcaaaatgttagcacag

SEQ ID NO: 198303 - DNA, 82 bp, Homo sapiens
gccctctccttttcgtttccggaaacatgaataccctctaccatctgctttggtcagggtgccgctcgaggatttaaaagca

SEQ ID NO: 198304 - DNA, 74 bp, Homo sapiens
aaagacccaggagaagccgcccaaagaactgaccaagatgaagagacgagctgtggggatctggcactgtggtt

SEQ ID NO: 198305 - DNA, 75 bp, Homo sapiens
atgcaccgagtccagcccaggaaaatggagaggttcgggatgagtatcggcaggactacgatgctgggagaggag

SEQ ID NO: 198306 - DNA, 100 bp, Homo sapiens
tagagtgttacggtgactcttgggtccgaaggggacggacgtcctcccacgtaccatttagaaggtgtccctggccagtgtccttccacctgtccacaag

SEQ ID NO: 198307 - DNA, 75 bp, Homo sapiens
tcctggaggctgcgcggggctgaggcggcctcgatttgggaaattagaagcccaggacccaggaaggagacacag

SEQ ID NO: 198308 - DNA, 97 bp, Homo sapiens
agcgcggaggccccaggcgcgggccgggctctctcccgcctcctcaggcccgggggtgctggagctgccgagctactacccacagatggcatgatcc

SEQ ID NO: 198309 - DNA, 101 bp, Homo sapiens
cttccgtgtactcgggaatccggcacaaggcactgggctacgtgctggacagatctttaatctcatgaagtacgacagctacagccgcttcttaaagtctg

SEQ ID NO: 198310 - DNA, 90 bp, Homo sapiens
gccgggcccagtcaccgaccattgccaacactcctgatagctgaatgtgtgctggtttacatgactccagagcagtccgcaaacctcctg

SEQ ID NO: 198311 - DNA, 100 bp, Homo sapiens
tgaagattgtaaaaatttcttttaagtgcaaacagttttttattcaacttagaaaagaattgatattacaccaccatattgcctcagtagagaaacttgc

SEQ ID NO: 198312 - DNA, 101 bp, Homo sapiens
tcctgaagctccttacacatcccctgataaactaaagcagagagagatcatcattgcctgaatttagctttgtgactgcaagagcaagaccagttcctgtc

SEQ ID NO: 198313 - DNA, 75 bp, Homo sapiens
gcagaagtacgactgtggagaagagatcctgatctcggtgctcagcggcggcaaggccaagtgctcgcagttctg

SEQ ID NO: 198314 - DNA, 101 bp, Homo sapiens
ccagcgcctcggaggccgcccccgcggcggccgcgctcttcgcctgggcgcagcagcttactgatctggaacaaaaattagctgtagccaaaaatgaactg

SEQ ID NO: 198315 - DNA, 82 bp, Homo sapiens
gcatctgccggctgctccgcaccccggggtcccaggaagggcggcccaggtctcggcgcggaagatggccggcggcgtggac

SEQ ID NO: 198316 - DNA, 130 bp, Homo sapiens
tcgggctgcgccagcaagcggggccggtggcgcccgtgtcggagaccccgcgccggaccctgaggcagcgagatgaagcctgctgggagcgtgaatgacatggccctggatgccttcgacttggaccgga

SEQ ID NO: 198317 - DNA, 75 bp, Homo sapiens
cagccatcttcttctactgtgaccgcggcacccagcgggtcagtttaggggctggtgcaaaggatgagttgcaca

SEQ ID NO: 198318 - DNA, 74 bp, Homo sapiens
gcccagtggcggtgtgaactgtgaggagttcgccgagttccagactgtgatagatgccaacattttcccagccc

SEQ ID NO: 198319 - DNA, 90 bp, Homo sapiens
gccagagaagacacgaataatctgttcaggcaagctttgttgcttctgaaaacaggacagatatttctttggatgaccccaacttttggc

SEQ ID NO: 198320 - DNA, 75 bp, Homo sapiens
caaacactcagagtggaaaaagtaccatcatttgaaacaggcattatattgtacttctagcaagtgcaccaacag

SEQ ID NO: 198321 - DNA, 100 bp, Homo sapiens
gggaaatgtaccgtccagcgagttgcagatctacacttgggctctcacctttgtgtatccttttggtgccacattgagtgtcatgaaaccagcagtggcg

SEQ ID NO: 198322 - DNA, 98 bp, Homo sapiens
cgtgatccagaagtccagagctgaggactgcctgtttgcaggtggtggtatcatggatacagaaatgtctgaagatatagaccacaacttaactccta

SEQ ID NO: 198323 - DNA, 100 bp, Homo sapiens
gacaaccaacggctcaagaatttcaagaacaaaggccgcgacttggagaggaatgttacggcatccggagtcatccctcagatttctctgatcatgggcc

SEQ ID NO: 198324 - DNA, 83 bp, Homo sapiens
agaacagccacccagaccagagccccatgaattaggtcccctcaatggggacacagttggccagttctacttcttaatccgga

SEQ ID NO: 198325 - DNA, 101 bp, Homo sapiens
cgacaagccgctggcagccgcggatctcaccgccgctcagggcttgggcactgtttaaaggaaagttccgagaaggcatcgacaagccggaccctcccacc

SEQ ID NO: 198326 - DNA, 100 bp, Homo sapiens
gggaggtggaggttgcagtaagccaacaccgtgccactgcactacagcctgggcgacaggccctcccaggcccaatacttcaaagcatcctacctctgct

SEQ ID NO: 198327 - DNA, 75 bp, Homo sapiens
ctcgacctgctaacagaactggaccttttcgctacatccgatactcccagatctgtgcaaaagcagtgagagatg

SEQ ID NO: 198328 - DNA, 111 bp, Homo sapiens
gcgagctgagtggttgtgtggtcgcgtctcggaaaccggtagcgcttgcagcatgctagaggaagcagagcactttgccatgatggtgatcagcctcggagaggaagccgg

SEQ ID NO: 198329 - DNA, 100 bp, Homo sapiens
tcgttggttcacagggaagtcgcctggaaaaaccaatagtactgctgcctcatatccgggggaatgtgggctttgtgttcaccaaggaggacctcactga

SEQ ID NO: 198330 - DNA, 100 bp, Homo sapiens
ctttgcacaggagagctgctaaaaattactgcggtgaacagacctgtcgcgaaatcgcctttcagaaattcctatagaagcatgtcactttgtttctctg

SEQ ID NO: 198331 - DNA, 100 bp, Homo sapiens
tggctgctttggacccccgtgctcctgcagggacactctgtctacggacccttgtgcaactcttctgacctctgggactactgcaacagtagccctattg

SEQ ID NO: 198332 - DNA, 50 bp, Homo sapiens
ctcagtgttgccctgttcagtctgaggtttgtgctttctggaaatctgca

SEQ ID NO: 198333 - DNA, 76 bp, Homo sapiens
ctaacttcagcggtggcaccgggatcggttgccttgagcctgttcctgcggatggtggatgcctgtgccagcttcc

SEQ ID NO: 198334 - DNA, 98 bp, Homo sapiens
tccttatctgccaagaaatttatctgtggtggaagaagaagccaatgcctttgtgggtcaagtaaaaaagaatgtcttccaagcaagccacctctcca

SEQ ID NO: 198335 - DNA, 100 bp, Homo sapiens
taagatcgacgtgtaccactacgaggtggacatcaagccggataagtgtccccgtagagtcaaccggacctccggctagcctgtttcagccacctcgtcg

SEQ ID NO: 198336 - DNA, 75 bp, Homo sapiens
gaagaatcctgcaaaaatgtctctctatccatctctcgaagacttgaaggtcttgttcagcgttgcgtaatcatc

SEQ ID NO: 198337 - DNA, 82 bp, Homo sapiens
ctgagatttgaaagtgttatccatgagtttgatcctgccggtggtggtgtgcacattgagccccggtatagacagttccccc

SEQ ID NO: 198338 - DNA, 78 bp, Homo sapiens
taccatggtctacaagactctcttcgctctttgcatcttaactgcaggaactctccggagtcctttctgtattgttgt

SEQ ID NO: 198339 - DNA, 75 bp, Homo sapiens
gttcaaggaggccttccagctgtttgaccgaacagtttttccaggggcattgttatttgtgaccacaatgaaaaa

SEQ ID NO: 198340 - DNA, 90 bp, Homo sapiens
gataattatgtgattcggaggacagctgttgatagtggaatccctctcctcactaattttcagattaagatgttctacgaggagcatttg

SEQ ID NO: 198341 - DNA, 101 bp, Homo sapiens
cagctgcaccgtgcggctgctggacgacagcgagtacacctgcaccatccagttcttcgtgccatgaaggaggacagtgaaaaagttccgagcttgttaac

SEQ ID NO: 198342 - DNA, 100 bp, Homo sapiens
cgttaaccttagccacaaagtcaaagccttgttcgggagtctagcagttctcgctcaccaaccccaaagcagaagaagaagaaaaagaagaaagatagag

SEQ ID NO: 198343 - DNA, 90 bp, Homo sapiens
tgttaaaaaacagaatgcatcgaggtttatggcttttatcaaaatacaactcaaacctagctactccaatagcaattaaagcagtgccac

SEQ ID NO: 198344 - DNA, 75 bp, Homo sapiens
cttactaaccacgaccatcaaatccgtgtcggagtccttacaggtctgtcgagttgcttatgaaattatgcaaac

SEQ ID NO: 198345 - DNA, 75 bp, Homo sapiens
ccgcgtggccctcgaatgcaaggaagatatcccagaggcatccttcctggaggaagaggatgaagaccccatccc

SEQ ID NO: 198346 - DNA, 134 bp, Homo sapiens
aattctgggacctccacctccctcatttcatcttgggggaccagcagttggaccaagaggaaatctgggtattctctactgccgctgatggtcaaacgcaagtggaaattaaagtgtgtcagggtgaaagagag

SEQ ID NO: 198347 - DNA, 89 bp, Homo sapiens
tccgagggtgtcctgttacttccaagtcatcaccagaaagatggagatcttataacaatttttgatagttctgacctttcctttgcaat

SEQ ID NO: 198348 - DNA, 95 bp, Homo sapiens
tgatgctgatgagcgagagaagtggatccatgccttagaagaaacaattcttcgacatactctccagcttcaaatgcctgaggaagtgcaccatg

SEQ ID NO: 198349 - DNA, 50 bp, Homo sapiens
cggccgggagcccgccgcgctggtagcgaatgtcgtactctcaggaggct

SEQ ID NO: 198350 - DNA, 99 bp, Homo sapiens
gcaagcggagctcccccaagagccggaaaggcccggcagccatggcggtggaaggaggaatgaaatgtgtgaagttcttgctctacgtcctcctgctgg

SEQ ID NO: 198351 - DNA, 75 bp, Homo sapiens
gccagttagaacagataactggcaaaggtgcttcggggacattccagctatcatggtgaacttacttcagattgt

SEQ ID NO: 198352 - DNA, 100 bp, Homo sapiens
tgaatcaaaagaaaatctctaaatgcagattccagaaaaattacagcacatctcagtgaatttgcaagtggtgtctgatgatttgtgagcctcaagtgac

SEQ ID NO: 198353 - DNA, 90 bp, Homo sapiens
agaacaccttcctgtgtgttatctcatctcatcctcacagcagcccagagagccagtttcaagcgcccggtagtgatcctgggacccgtg

SEQ ID NO: 198354 - DNA, 97 bp, Homo sapiens
cttctgagggctcccagacatatataatgatagcaaagccattgtggatgggaacctgaagctcatcttgggtctggtgtggacgctgatcctccac

SEQ ID NO: 198355 - DNA, 90 bp, Homo sapiens
ggctgatctgcaagacaaagaagttggagatggaactacttcagtgccatttcgtagagtgacgttttctgttgtgagtcagcctcagga

SEQ ID NO: 198356 - DNA, 98 bp, Homo sapiens
gagttggcaacgcgacacagagccagtgtccacaggatgaaatgtccgagtcaggccagtcctcggcggccgccacacccagcaccacaggcaccaag

SEQ ID NO: 198357 - DNA, 50 bp, Homo sapiens
tgaccgagaccgcggccgggaccgagggtagcccctgaagaagatgaaag

SEQ ID NO: 198358 - DNA, 100 bp, Homo sapiens
gcctggaggcgcagtacacctgccccatctgcctggaggtctatcaccggcccgtggccatcggcagctgcggccacacacagccctcagcgcctttttc

SEQ ID NO: 198359 - DNA, 146 bp, Homo sapiens
ctcatagttattttgaaaggaatctatcatcagagcatgtcacagatctatggactcattcatggtgacctgaaagcatccaacggagtggaagcagcatgaaggaagagccgctgggcagcggcatgaacgcggtgcggacgtgg

SEQ ID NO: 198360 - DNA, 99 bp, Homo sapiens
tccttccaaacaactgaaaagctttattttgttctggattttgttaatggaggggaggaaaatggatgtctgtctgatagtgatatgttttctcaagct

SEQ ID NO: 198361 - DNA, 115 bp, Homo sapiens
gtttcccgcaacccgataccatcggacaggatttctccgcctcagcccaacggggaggctccctggggaagggaatgcagggttgctggggctgggcccagaagcagcagcacca

SEQ ID NO: 198362 - DNA, 75 bp, Homo sapiens
cagcaccacttcgaccagcttcatcctcagacaggttacactcctggcacaccttacaaagtgtcctgttccccc

SEQ ID NO: 198363 - DNA, 90 bp, Homo sapiens
aggatatctgttcaaacgagccagcaatgccttcaaaacttggaacaggtttgacatctacaggaaggtgcccaaggaccttacgcagcc

SEQ ID NO: 198364 - DNA, 90 bp, Homo sapiens
tttcgccagcccgtgccgcgagcgcggcctgcaggaggtttacccaaggtccagcctagcccctaggcaccatgtcggacagtgatctag

SEQ ID NO: 198365 - DNA, 100 bp, Homo sapiens
atctgtccagcatgactcatccccgggagtgttgaggcatcattgcagaatacaacaaaatcaatgatgtaaaggaagatgatgacacggagaagtttaa

SEQ ID NO: 198366 - DNA, 76 bp, Homo sapiens
ggagaagggacagacatcaacttttggatccaagctggagtgcctgtggtctggaacctaacctgcagtgtctctg

SEQ ID NO: 198367 - DNA, 83 bp, Homo sapiens
gccgccgctgcagctgccgcgcgtgtttggtgcacctcgatttggaggaagtagggcagggcccttatctggaaagaagtttg

SEQ ID NO: 198368 - DNA, 75 bp, Homo sapiens
aaacgcctggtggtactggatgaggagcttgaggtttgcctgcaatgagatttcattctctacatttaaaggaca

SEQ ID NO: 198369 - DNA, 88 bp, Homo sapiens
tggttccttgcaaagggcacgtatagcattggtaaagaacgatcgtccagtggagggttctgatgactgtcttgtgaaaatatgggca

SEQ ID NO: 198370 - DNA, 75 bp, Homo sapiens
cttcgttcatgaggcaccatctcaggagcagaagaacttggctgccattcaagaacttagtgatttggcccgtga

SEQ ID NO: 198371 - DNA, 50 bp, Homo sapiens
cagcgagccacgggagcgagccaggccaagactaaggggctgcagagcgg

SEQ ID NO: 198372 - DNA, 100 bp, Homo sapiens
ccgatggtagccgaggagctggtttggtgcacctcgatttggaggaagtagggcagggcccttatctggaaagaagtttggaaaccctggggagaaatta

SEQ ID NO: 198373 - DNA, 75 bp, Homo sapiens
atggaattagagatgacatggtcttgccatttgagccggaaagtgactattttaccccacagggagaattccgtg

SEQ ID NO: 198374 - DNA, 126 bp, Homo sapiens
gaaactgtgcacccagaaacatcagttggacactgatctgtttccccatttaggctcagggtttggagcggccaccaaggccatgtgcatcggcctgcggtactggaagcctgagcggctggagac

SEQ ID NO: 198375 - DNA, 75 bp, Homo sapiens
tcgtgatcccggcgacatactacctctggccccgagatcagaatgccggggacggcaaaacagaacagaaaggcg

SEQ ID NO: 198376 - DNA, 75 bp, Homo sapiens
atcaaaccctgagagctttattaccagacatgatctttcaggaaataatgcaaaaggtgtcccaaggctcctgac

SEQ ID NO: 198377 - DNA, 127 bp, Homo sapiens
cgaggtgcatgctaccgtcttctgtcccccgctgcgctttgactaccacccccatgatggggatgaggttctccagagagcgggcatccagagaggagtcctgggagagcgggcggagcgagcgagg

SEQ ID NO: 198378 - DNA, 75 bp, Homo sapiens
gcaccttccccaagcgcggccagacctgcgtggtgcactacaccgaactgagagaagatggtttccagcctcaaa

SEQ ID NO: 198379 - DNA, 100 bp, Homo sapiens
ttgttttctctggggtatgattctaatatgtgccgtattcacctggaccaacctgctggtggtggtggtggagctggatgggctagagcaggatgccctg

SEQ ID NO: 198380 - DNA, 83 bp, Homo sapiens
cgtacgtctgacccctgacgagcgcagcaaagagggctctatctggaaccaccaggaattgaatgatctggcacgggaccctc

SEQ ID NO: 198381 - DNA, 76 bp, Homo sapiens
cagacctgctcacacttcagaatagagaagtcttatgatgtaatcagcgcgatttcacttcctgaatttcgatgaa

SEQ ID NO: 198382 - DNA, 98 bp, Homo sapiens
gagaaaaagaagatatgtatgacgagattattgagttaaagaagcttcctgcctgacacagctcacttcaagaagtgcacaatgtcagaacgtggaat

SEQ ID NO: 198383 - DNA, 50 bp, Homo sapiens
ccatcgtgcgggtcttgcaaagggccgttgctccagggagaactgcaaat

SEQ ID NO: 198384 - DNA, 50 bp, Homo sapiens
cagatgagccagtatggaccacaagctgatgtagaaggccaatccttaag

SEQ ID NO: 198385 - DNA, 78 bp, Homo sapiens
atttggtggacacttttgcttgcagttaggtcaagtggagaacccttaggagaaatcttgagagtggacagcaattgt

SEQ ID NO: 198386 - DNA, 100 bp, Homo sapiens
gccggggtgctcagccaggccgactacctcaacctggtgcagtgcgagacgctagagggtgaccagaagtcagcagcttcccagaagccccgaagccggg

SEQ ID NO: 198387 - DNA, 96 bp, Homo sapiens
ggtgggtttgctgaagcattatcacaagacagtcagaatgactgatgagtgctcttcagagggtgtttgtgagatatggttgaccagtgaagacac

SEQ ID NO: 198388 - DNA, 130 bp, Homo sapiens
tggcatccgaggagctgtggtccagcctgcgcggcgggaagcggcggcggcggctccagcgtcctaagagctacagattctcgttgacactggaagcagtaactttgccgtggcaggaaccccgcactcc

SEQ ID NO: 198389 - DNA, 100 bp, Homo sapiens
caaactcatcggaaacatggcactgttgcctatcagaagtcaattcaaaggacctgcccccagagagagtttcattgaaaacagatcctgcaaaagttcc

SEQ ID NO: 198390 - DNA, 100 bp, Homo sapiens
cagtgcgaagaagctgcagccgcacctggccaaggactcagatgccactgcatcatcagataacagcgagacggaggggacacccaagttgtctgacaca

SEQ ID NO: 198391 - DNA, 73 bp, Homo sapiens
atctgggtcaacaagcttgacatggaggatgaaattgattctgcagtaaagatgttggtgtcattaaaaatga

SEQ ID NO: 198392 - DNA, 50 bp, Homo sapiens
gctcgtcccaaaggcgcggcgctgaggctgctgatactttggctgtgagg

SEQ ID NO: 198393 - DNA, 83 bp, Homo sapiens
agggactccaggtcgatgggaaaagattgcccacgaattgggtcgatctgtgacagatctgagatctgtatctgtggacctga

SEQ ID NO: 198394 - DNA, 100 bp, Homo sapiens
agtggtacaggagagaatttgtgatgatgagctgatcttaatcaaaaagttgaagatgacagcgatgcagagacctatggagaagagaatgatgaacagg

SEQ ID NO: 198395 - DNA, 100 bp, Homo sapiens
gccgtggcggtgaagcgtgaggccggcatcgtctttccgtcctctgaggcgacggccgcggctgcacaggaatgttttaaaggaagttgggctactcaca

SEQ ID NO: 198396 - DNA, 100 bp, Homo sapiens
cttgcatattccgctccagaaattctgcttggtgatgagtatgatgcacctgcagtagatggtatacctcaagtttactatttcggcccttgtggtaaat

SEQ ID NO: 198397 - DNA, 101 bp, Homo sapiens
caaggggccagggcagagggcacctgagcggctggagagcctgttggagaaacacaaagagggaaagcgtcgagaagagacactccagccacccttcacca

SEQ ID NO: 198398 - DNA, 51 bp, Homo sapiens
tggcgctgagccgcacctaccgcacggtgagatcggactggaactgttcgg

SEQ ID NO: 198399 - DNA, 83 bp, Homo sapiens
caaactgccctgatgggcagtcaacagctaaaaccttcctcaccgtgtactatgatgaggagtctgatgaggaagctgtgaag

SEQ ID NO: 198400 - DNA, 75 bp, Homo sapiens
tgcttgtcgcaatattgtcttcttcgctttagacaactcatgtctgcagggctctgagaggaggaagcctggggc

SEQ ID NO: 198401 - DNA, 98 bp, Homo sapiens
cttgactaaaccgacttctgatccatggatgccatcagaacaatcaaccatgacgaccgaatctggatcagactcggaatccaagccggaccaggagg

SEQ ID NO: 198402 - DNA, 74 bp, Homo sapiens
catccgaatagatgggcaggacatttcacaggaagtcagaagctccccggacgactcgggatgagaaacgcagg

SEQ ID NO: 198403 - DNA, 100 bp, Homo sapiens
tcagctggtataattcatagaggaataccttggcaagcagctccagtccgagcagccccagaccgctgccgcccgaagctaagcctgcctctggccttcc

SEQ ID NO: 198404 - DNA, 96 bp, Homo sapiens
ctgggtcctgatgaaagcaaacagaaatttgtgctcaaaacccccaagaaccttctgaggaaaggaggccatacagaaattgaacctcagcacttc

SEQ ID NO: 198405 - DNA, 75 bp, Homo sapiens
aaccgaagatgtcagcctcccctgtcccgaacgcagtgtgtggaaagtgaccatctttccaccgtagaaaaggac

SEQ ID NO: 198406 - DNA, 100 bp, Homo sapiens
caagaagaaagtcaacgacaagaacccacacgtcgccttgtatgccctggaggtgttcaagcagccctggccagggatcatgcgcacagtctatgggaac

SEQ ID NO: 198407 - DNA, 100 bp, Homo sapiens
agagctgaagaggattaaacagcacaaggccattatcactgaggagagccttgaacttaggaattcttcgagatcctggatcagaaatcgaagacagaca

SEQ ID NO: 198408 - DNA, 83 bp, Homo sapiens
catctcttctgaactcaagaccaggttctgcggggagtgtctccagccctgcctgcaggtgccatccccgctgtgcccactct

SEQ ID NO: 198409 - DNA, 110 bp, Homo sapiens
tggtgaagtacatgaactcagggccggttgtggccatggaatcagagatcattgatttcttcctgggggcctctctcaaggatgaggttttgaagattatgccagtgcag

SEQ ID NO: 198410 - DNA, 97 bp, Homo sapiens
atccggctcaatggcacggaccccattgtggctgctgacagcaaacgaggatgctggaggtcagcagattggcttcttgctaggaagctgtggtatt

SEQ ID NO: 198411 - DNA, 74 bp, Homo sapiens
atcgtgaaggacgccagcatcatacaccggctgttcgaggccttgactgtagttttgacaactactctgccaac

SEQ ID NO: 198412 - DNA, 90 bp, Homo sapiens
gtccccgctggcgggcttccctgtcgccgttcgctgcgctgccggaatcattgatcagcgattcgagaaggtttcctactttgtatttgg

SEQ ID NO: 198413 - DNA, 82 bp, Homo sapiens
gaaggaacgaggcaaggagctaaagcagcgtgcgttcagccctgggacagccctcagcgcctttttccaggagaccaacatc

SEQ ID NO: 198414 - DNA, 144 bp, Homo sapiens
cctcattgaagctatgcagtatttctttggcatcactgcagctagtaatttgccttctggattgtttttcgttggaatatacgttgcacatttatggcgattctgagtgtgagggcagacttctgccaggctcagcacagcatt

SEQ ID NO: 198415 - DNA, 74 bp, Homo sapiens
ggcagtaaaagcatctactgggggacatcctgttgtgaagtttttcccaggtcatgagtctcgggctacagaag

SEQ ID NO: 198416 - DNA, 100 bp, Homo sapiens
tagcagtgctgagttcttcctgcaagaagagagactgacacagatgagaaatgaatatgagcggcagtgcagggaatctcccattattcttcgagatgga

SEQ ID NO: 198417 - DNA, 50 bp, Homo sapiens
gaagaggcctgcagtgggagagcaggggcgtgatggtgggcatgggtcag

SEQ ID NO: 198418 - DNA, 100 bp, Homo sapiens
caggcatgttgtataaatgtacagaaacaccacaaccccagacccagacccagcaactggaaggaacggatgggcctctagtgacagatccagagacaca

SEQ ID NO: 198419 - DNA, 106 bp, Homo sapiens
ctacgcagcgaaatcgagcctggccttgagggtccacaccgcgagggaagatgcgtgcgcccattcccgctccaaaagcctagtgatgggggagcagagccggagc

SEQ ID NO: 198420 - DNA, 75 bp, Homo sapiens
agaaaactacaggcggggacggcttctcggtcatcatcagatttgaaatatttaaagtggatacaaaactatttc

SEQ ID NO: 198421 - DNA, 100 bp, Homo sapiens
cagattgtcttggaagttccaaagttgcaacgatttctacaggggcaagtgtccgagtggtgaatcagctacttacagagatggatggtctggaagcacg

SEQ ID NO: 198422 - DNA, 100 bp, Homo sapiens
aattgctgctgccttgctgatgtttggtgatgcaggccatcatctctcagcaaggtgacatatttgtttttgacctggagacctcagctgtcgctccctt

SEQ ID NO: 198423 - DNA, 83 bp, Homo sapiens
cgtgaccgttggcagcaaggaggtgaccctgaacctctacgacacggccgcgaagacaacgtcccggaccccaaggatgtgaa

SEQ ID NO: 198424 - DNA, 98 bp, Homo sapiens
gcccccaacacctgagctcccagggacacgtgatggaccgtaggaagaaggcactgaccgactacaagaagctgcgggccttctttgtggaggaggag

SEQ ID NO: 198425 - DNA, 100 bp, Homo sapiens
ggcggcgggctggagacatggaccgcggcgagcaaggtgacaagtttcggttggtcatagctagtaccttgtatgaagatggtaccctggatgatggtga

SEQ ID NO: 198426 - DNA, 96 bp, Homo sapiens
ctgcttgctaaagagccgagcacgcgggtctgtcatcatgtcgcgttacgggcggtacggaggaggtgtcatggagaaactccagctgggcccaga

SEQ ID NO: 198427 - DNA, 83 bp, Homo sapiens
aaggctcggaagaatgtggagagttttctagaagcctgtcgaaaaatgggggtgcctgaggacagagcgggatgccaccagct

SEQ ID NO: 198428 - DNA, 76 bp, Homo sapiens
cagaagaactgttgaaactagcaacatctataagtgaaaccttggaagagaaggcaacaccaacattgcttagaag

SEQ ID NO: 198429 - DNA, 100 bp, Homo sapiens
tagggctcagggagcaggagcttcaggttgtccgagcatctgggaaattctctcgggcctagccgtccttggaacccgatattcgggctgggcggttccg

SEQ ID NO: 198430 - DNA, 100 bp, Homo sapiens
ttttccctcctcaaactgactttgcagccacggagagagtttatgtggccgaggcagacaagtggaattaggccttgctgcaggggacttcatttccttc

SEQ ID NO: 198431 - DNA, 82 bp, Homo sapiens
cgctgccctcagctccgagtccagggcgagtcatcttggccaagtatggtctggacggaaagaaggacgctcggcaggtgac

SEQ ID NO: 198432 - DNA, 100 bp, Homo sapiens
aggagttgtttcccattgcagcccaggtggataaggaacatctcttcccagcggctcagccctcaaggacgttttgttctgaagactctcatattcagct

SEQ ID NO: 198433 - DNA, 104 bp, Homo sapiens
actggagaaaaacggccaagaggcagacctaggaaatggtgtggtgctcaccttgggcacatttttgatgatgggcctcgtccaactgggaaaagatactgcat

SEQ ID NO: 198434 - DNA, 75 bp, Homo sapiens
atcattccttggggcaaaatgtggacaaggtgagatggaagattttcgaggtatagcagaagaatcatttccaag

SEQ ID NO: 198435 - DNA, 83 bp, Homo sapiens
ctccattcgatttgaagactgcagtagtgcaaaaaccattcttaaggaccttaaaccggaaaacattttgttaaatgaagata

SEQ ID NO: 198436 - DNA, 50 bp, Homo sapiens
tccaacattgatgttcctccagcaaggttcaattcccatgaaagtgcagc

SEQ ID NO: 198437 - DNA, 75 bp, Homo sapiens
cctgcccatggcggtggccgagctgtacacgcagacgaagttatacggaagcgtctcctcattgatggagatggt

SEQ ID NO: 198438 - DNA, 100 bp, Homo sapiens
gtcagcctgatctcggacttcacagccagcagaactgtaaatcaacagactgggaagatgatggttggggagcatgggaagaaaatgaaccacaagaacc

SEQ ID NO: 198439 - DNA, 73 bp, Homo sapiens
attgctgctatgaccgtggggaaggatgttagactcttgtgactttacttcccatggaacactaatcatctgt

SEQ ID NO: 198440 - DNA, 90 bp, Homo sapiens
ctttataagtgtcagctgtgaggtcacagtttgctgtggacatgcagacaacatcctccagaggactggtgtttcacacgggcactaaga

SEQ ID NO: 198441 - DNA, 100 bp, Homo sapiens
agctccaggagttcgtctcttacgtctgcggaagtgcagctgcctcagttcttagcgcagtgatgtcttggcattgcccattttcaagcaggaagattcc

SEQ ID NO: 198442 - DNA, 80 bp, Homo sapiens
ctcggaacccgtggtcctccgcttcataaaccaatagagccatggcgactccctctgctgccttcgaggcccttatgaat

SEQ ID NO: 198443 - DNA, 51 bp, Homo sapiens
gaaacaagagagctacagtcgttagcgtcacgtgaactggaaatttcagtt

SEQ ID NO: 198444 - DNA, 100 bp, Homo sapiens
ctgggagcacatattcttggaccaccatcccaggcctcaggacctgagttctccgacgcccacatgacatggctgaactttgtccggcggccggacgacg

SEQ ID NO: 198445 - DNA, 76 bp, Homo sapiens
ctcaaactttctgatcttttaaaatattacttaagagaatctcaagctgctaagtggatttggcatgataacatgc

SEQ ID NO: 198446 - DNA, 98 bp, Homo sapiens
cagcttcaagcttaggaccacccaccatgcctatccaggtggggtggaagacaacccgtgagtattacaccttcatgtgggttactttgcccattgac

SEQ ID NO: 198447 - DNA, 76 bp, Homo sapiens
gaggacttaaatgaagccactgattagcaatttaaagatcctctccaaggcagaagctcctcctggggtagagaca

SEQ ID NO: 198448 - DNA, 95 bp, Homo sapiens
atggcggaggggacggcagtgctgaggcggaacaggccgggcaccaaggcgcagctgctgatgcaaggaatcccctgggctcccgtccactccac

SEQ ID NO: 198449 - DNA, 100 bp, Homo sapiens
cggcgctggaggagcgaggcagctgtactaggactgggaacggctcctgcccctcctaaagctgaagccaaagcgaaggctttaaaggccaagaaggcag

SEQ ID NO: 198450 - DNA, 100 bp, Homo sapiens
atggacgtactttgtctgactacaatattcaaaaggatggcttgtggttttacatacaatcattagagacggtaaaagaccacaggaatatcagagtgcg

SEQ ID NO: 198451 - DNA, 100 bp, Homo sapiens
ccatcctgccgcagctggcgcagcccacgctcatgatcgacttcctcacccgcgcctgcgacctcgaacctgcaaccatggtcgtgccactagccagctc

SEQ ID NO: 198452 - DNA, 74 bp, Homo sapiens
ttgcctcggtggttgccatggcaccagggacggtgactgtggttaagcaggagcccatgatgctgcccaaacct

SEQ ID NO: 198453 - DNA, 100 bp, Homo sapiens
ggtcttgaagagcagcttagcgaaagaaaccctctctgagttcttgggcacgttcatcttgattgttataggttgagtcctcaaacattaactactattg

SEQ ID NO: 198454 - DNA, 88 bp, Homo sapiens
ttttagtccattgactatgcagcctaatgcattccaggatgccttgaagattttctgtaggataaaaggtggtcgagtttcaactgat

SEQ ID NO: 198455 - DNA, 75 bp, Homo sapiens
ctcttggcgccaccgcctcatgcactgtgtagataatctcagtgataccttgaagaagctgaagataacagctgt

SEQ ID NO: 198456 - DNA, 78 bp, Homo sapiens
agtaccttccttcaatggatcctggaaaccagctcctgggcaacgtgctggtctgtgtgctggcccatcactttggca

SEQ ID NO: 198457 - DNA, 100 bp, Homo sapiens
ccctctttaagacgaattaaagggagattacacagaagcaaaagccttgatagcatggatttctgtgagctcactgccgaccagtgcacgggtctccagg

SEQ ID NO: 198458 - DNA, 100 bp, Homo sapiens
cacctccagactatcctggagaattttttaaagagatgcccgagtggtaaaagacatggcaacaggaaagtctaagggatatggctttgtctcctttttc

SEQ ID NO: 198459 - DNA, 98 bp, Homo sapiens
gtttgccaatgttggagccgtctgcaaagtgtccccggcaagaaggtgggtttggaggatttgggacaacatctacaactgcaggttctgcattcagc

SEQ ID NO: 198460 - DNA, 50 bp, Homo sapiens
aacttgacactcaccctgaccggagtgcgccggtctcggggaaatgcccg

SEQ ID NO: 198461 - DNA, 100 bp, Homo sapiens
ccgggaccacttgcctccaccctcatctgccagggccatgtgtccttcaagcccagcttagaccaacagcgttcatgcccaacctgtacagactccctcc

SEQ ID NO: 198462 - DNA, 74 bp, Homo sapiens
ctggtcttggtagcggaggcacccgaatgctgcccgggtgagagaagcctgtgtctcccaaatcaggaacactg

SEQ ID NO: 198463 - DNA, 82 bp, Homo sapiens
gtggatgcggccaactccaatgggcctttccagcccgtggtccttctccatattcgaggttgtgattgccaccaatatcgca

SEQ ID NO: 198464 - DNA, 80 bp, Homo sapiens
gggaagcagccgccattgtccgcggctgagcttgccttgcgccatggactggcagccagacgagcagggcctgcagcagg

SEQ ID NO: 198465 - DNA, 100 bp, Homo sapiens
cctccttcccctccaaggcatgctggagatgtaatcagtgtagagaaaaccgtgaagagatgccttttggacactttcaagcatactgatgaagagttcc

SEQ ID NO: 198466 - DNA, 90 bp, Homo sapiens
atgacacaggaagagctggtgtccaacctggggacgattgccagatcggggtcaaaggtgcaggtgatggtcctaccagtgtgtctgttg

SEQ ID NO: 198467 - DNA, 74 bp, Homo sapiens
ggctgactgagagcgtctgcttggtagtcgactatgcccaacttgttcagccacgttttgataaagcccgtgaa

SEQ ID NO: 198468 - DNA, 100 bp, Homo sapiens
gttggattctccagtacctggatatcagcatacaattcttacatattcctggtgtagaatctgcaaacaggatcataaaaggattcctctgtactagcac

SEQ ID NO: 198469 - DNA, 76 bp, Homo sapiens
cgtcatccgcatcaacaagatgttgtcctgtgctggggctgacagcctacgaggacaagcagaaactcaagcggac

SEQ ID NO: 198470 - DNA, 75 bp, Homo sapiens
tctcctttccctttgagaccgtgaagagaaagatgcaggctttcagtccagtgtaaagctgttggagcgcgggag

SEQ ID NO: 198471 - DNA, 82 bp, Homo sapiens
tggagcagatcccccagccggctgagacaggttcgatacaagaggctgttttcctagcgtggcttgctgcctttggtaagaa

SEQ ID NO: 198472 - DNA, 75 bp, Homo sapiens
agaggctggactcggattcgttgcctgaggtatctcattcagttgctaaacttatattagttaatttccactggc

SEQ ID NO: 198473 - DNA, 107 bp, Homo sapiens
agaagagccatggacatcatttgcaggtcatacctgcttggatcccccacaggcgctgcctgagacccagctctgtgtctcctcgtcgtacagcttgtggagctccg

SEQ ID NO: 198474 - DNA, 114 bp, Homo sapiens
ggttacaaaactgccccctgcccccggcgcgtcccccaggagccatcctgcccgcggggatcccgtcagccggtcctctgtgtaaataccgccatgtccccagaataatgtgtc

SEQ ID NO: 198475 - DNA, 74 bp, Homo sapiens
cagcaaagcactgtgtggctgaataagcgtgccgcagaatggaattcggcattgttcctacacagcttctcggc

SEQ ID NO: 198476 - DNA, 100 bp, Homo sapiens
aaagaaacaagttcttggcaagagaggcatcctccttgaagtatttggctgaggagttttcaatcccacagttggacaaaaacatgagcaaccttcgcac

SEQ ID NO: 198477 - DNA, 83 bp, Homo sapiens
gtggccggttcttggtgggatctgagcaggtggtctttgggaagaagcttcctgcctttgccaccatccccatccaccagctg

SEQ ID NO: 198478 - DNA, 101 bp, Homo sapiens
gtgatcacctatatacttggagttggagacaggcacctggataaccttttgctaacaaaaacaggtttctacagaagaaggcttgagtcttgcccaagaat

SEQ ID NO: 198479 - DNA, 82 bp, Homo sapiens
gaggaacaaaggcgacccaagacacccagagagggacaggagcggtggtgccccccccgggcacggggccatgtacaacggg

SEQ ID NO: 198480 - DNA, 82 bp, Homo sapiens
ctggatttacctgttttctgggagcttcgaaggttctctacttaaaagacaatgactactgatgaaggtgccaagaacaatg

SEQ ID NO: 198481 - DNA, 115 bp, Homo sapiens
tagccgctactttgtaatccggatccaggatggtactgcccaagttcctctctaaagcagaacgagaggctgaagctctaaagcgacggcagcaggaggtggaagagcggcagag

SEQ ID NO: 198482 - DNA, 50 bp, Homo sapiens
ggtctctggagacatcttcagcaggttgcagtgggacctggggctaggcc

SEQ ID NO: 198483 - DNA, 80 bp, Homo sapiens
cgagcacataacggggttcgggtgtctcgtgtgtgaacatcacaggcattgaatgccccagaggagcccgaaacctccca

SEQ ID NO: 198484 - DNA, 101 bp, Homo sapiens
ggaagcagggattccagtgccaaggacttatggagcaaggatgactgacacaaacacaaaaatcattctgcctgttgaatgaatcataaaatactgtcttt

SEQ ID NO: 198485 - DNA, 83 bp, Homo sapiens
acacggtctgggccgccgaatctccggccgaagagcggcggcggcagcggcgtgtcttgggacaaggtgcgcattcctggtgt

SEQ ID NO: 198486 - DNA, 99 bp, Homo sapiens
ggaaaatcatcctggccgtcatggataggcagaagaaagaagaggagaaggagcagtccgtgctcaaacactggccaaaagaagaccctagacaagaaa

SEQ ID NO: 198487 - DNA, 83 bp, Homo sapiens
cctccttcttcctcaactatctcgctgacacgcagggtggcccagttgaaatccttcccttcctctaccttggaagtgcctac

SEQ ID NO: 198488 - DNA, 87 bp, Homo sapiens
aaggtgtgtccggaggtttgcaggggtgcagtgtgtctggtcttatgagcacacagcaagaaggaggccatcagcaaactgggaaga

SEQ ID NO: 198489 - DNA, 102 bp, Homo sapiens
cccgggccgtggctctagcaggctccactaactggggctacgactctgatgggcaggtgtttgagaagtcccccctgcgggtgaagaacttcgggatctggc

SEQ ID NO: 198490 - DNA, 82 bp, Homo sapiens
tgcaggctgagtatgagacgcaagtcaaagctctacaacgaggagatccttgacctgtttgacagcacccgtgaccctgaca

SEQ ID NO: 198491 - DNA, 75 bp, Homo sapiens
cttaatagaacatcactgttaaccctagagaaaacccgcctagtgccaagcaaccctccaagatgctagttatca

SEQ ID NO: 198492 - DNA, 76 bp, Homo sapiens
agattgaatgccaagcagaaaattacctaaatgcactctttcgaaagaaagatgcctgaaatgtgcagatgccccg

SEQ ID NO: 198493 - DNA, 75 bp, Homo sapiens
gaattacgaaccatgttcaagtcaaaactgcagctgctaccatgggcacctacaaaggcagcacctaagcaaaag

SEQ ID NO: 198494 - DNA, 100 bp, Homo sapiens
tgcatcttcaaatgcagcatcctgtgccaggtgccttgcgctgggtccagaatgtggatggtgtgttcaagaggtggatgacaatattccacttagggta

SEQ ID NO: 198495 - DNA, 75 bp, Homo sapiens
acagctcgccctgttcgctctgggttattcagcgatagttatgacctcccggttacgtgcgttgggtggaagaat

SEQ ID NO: 198496 - DNA, 51 bp, Homo sapiens
ggatttttggcctaccctccaaagaaaagactttgggatcatgctactatg

SEQ ID NO: 198497 - DNA, 74 bp, Homo sapiens
tataactcaagttgtttggctaaattcttcaggatttaagtgccctgtatgctcaaaatttgtatcctcagatg

SEQ ID NO: 198498 - DNA, 100 bp, Homo sapiens
agacatatgtgcctaaaaagagcgttgagctcagagaagagcaactcggagttttgggggtgtgctttgtgaaattgggtgaggatgcccccaattccag

SEQ ID NO: 198499 - DNA, 51 bp, Homo sapiens
gttcttacaacatggcagacattgacaactgtcaataccagcaaatatgca

SEQ ID NO: 198500 - DNA, 100 bp, Homo sapiens
agagaattatcactttggctggacccactaatgccatcttcaaagcctttgctatgatcattgacaaactggaagaggctggagtgcaatggtgcaatct

SEQ ID NO: 198501 - DNA, 125 bp, Homo sapiens
agcgcggggcccactgacccgcggaagccagcggacccacttgtgcggcggtcggcgcggggcgcgaggacggaagctcctgttttcttgtcagccgccagctgagggccattcgcagcttctcc

SEQ ID NO: 198502 - DNA, 100 bp, Homo sapiens
tgaagcgcgagcgcgacgagtataagcggaggtgaaatgacaatggatgctctgttggctcgattgaaacttctgaatccagatgaccttagagaagaaa

SEQ ID NO: 198503 - DNA, 82 bp, Homo sapiens
gctgctgacgctgctgctgcccggcctcggggcttgggcactgtttaaaggaaagttccgagaaggcatcgacaagccggac

SEQ ID NO: 198504 - DNA, 106 bp, Homo sapiens
aaggagatgcagctgtacaacagcatcttcagcctgctcagcttcgagaagattggctacacagccgtcatggaaatgatgagtcagaagattcagcagctcacag

SEQ ID NO: 198505 - DNA, 83 bp, Homo sapiens
gcaaggtcggcagagcaaggggcttacgcagaaggacctggccacgcttttcttgcctggagaagagggaggggagaggacaa

SEQ ID NO: 198506 - DNA, 101 bp, Homo sapiens
ctgctgtgtgggaagaagatttgtaaagaaaactcttaggccataggaaaaggatacagagtagagtttcatgaacctgaaacttggtggaaatttgatcc

SEQ ID NO: 198507 - DNA, 82 bp, Homo sapiens
gaagaccttcaagcagcgccgcaccttcgttctggaggctgggaagttcaagatcaaagtgccagcagattcagtgtcatgt

SEQ ID NO: 198508 - DNA, 78 bp, Homo sapiens
gggtcgaggcggacgcgcggctgcgtcagtacataccgagcatcaaatattaaggcacccggagaacagacagtacca

SEQ ID NO: 198509 - DNA, 101 bp, Homo sapiens
ccctgcaggaactctacaacccaatccaggaatccagcactacgccctgccctctactgactggaggcaggcctctgcctactttagaagttaaaccaccc

SEQ ID NO: 198510 - DNA, 100 bp, Homo sapiens
acagcgctcatcgagtccattgagggcaagcagggcaagccccgcctgaagccccccttccccgcagacgtggcaatcagttctcaacttggacccatcc

SEQ ID NO: 198511 - DNA, 98 bp, Homo sapiens
acgcctccatcactctgcaggagcagctgcgggccctgacgcgcgtcacattgcaggccctggtccccagcagctttgcatcagcctggagccagccc

SEQ ID NO: 198512 - DNA, 75 bp, Homo sapiens
gtgcgaggagaactactccgtgacctggtacatcgccgagttctacttaattcagtgcacaaatgagatgaatgt

SEQ ID NO: 198513 - DNA, 50 bp, Homo sapiens
gaagcgactgagtccgcgatggaggccagaagcggactcctagaagaggg

SEQ ID NO: 198514 - DNA, 82 bp, Homo sapiens
caagtacatcataatcggcgacacagcggatgaccaccaggctctcatctgggacatccagcaaatgccccgagccattgag

SEQ ID NO: 198515 - DNA, 75 bp, Homo sapiens
gaggaaaacaacttcgagggcagaagaatggatcttggagaatgtctgaaagtccatgacctggctttaagagcg

SEQ ID NO: 198516 - DNA, 82 bp, Homo sapiens
aagcagcagtcagaaggggaacggatctgtgtgcccacagctcctggagccccacaggacccatggatgaaggaccagatct

SEQ ID NO: 198517 - DNA, 75 bp, Homo sapiens
gaagcctcccgggtggcttacagacgctgccagcatcgccgccgccaggtgacagagctgaatgaacctctctcc

SEQ ID NO: 198518 - DNA, 101 bp, Homo sapiens
aatcattggaagatttggaacctcactgaaaattggtattgttggattgccaaatgttggggggctagagagctgaaggagagccagtttccccaaaattg

SEQ ID NO: 198519 - DNA, 100 bp, Homo sapiens
cccagtcgtcgtcacacacggtgccccacaggccactgtgcaggatctccactcggccctgacacagaatggacttcgatgatgaagatggtgaaggccc

SEQ ID NO: 198520 - DNA, 75 bp, Homo sapiens
aacgcttagaaagagatcacatctttcgacttgaaaaatcttcccaagggattgttgaagaaacttctgaagagg

SEQ ID NO: 198521 - DNA, 88 bp, Homo sapiens
cagttcagttatgcagccttttccagaatacaaatggagagatttgcatgggatgcagaaatatggaagactaaccaagcagaccagg

SEQ ID NO: 198522 - DNA, 51 bp, Homo sapiens
ggggctgcctcgccgcgtctcgccacgggtgtgggccgaagatatgctcat

SEQ ID NO: 198523 - DNA, 75 bp, Homo sapiens
cctgaagcggaccccgaggaagacaggggcaagtgtccgagtggtgaatcagctacttacagagatggatggtct

SEQ ID NO: 198524 - DNA, 50 bp, Homo sapiens
actactgtgacaacattaacgatgggccatcaactgagaaagaccttgac

SEQ ID NO: 198525 - DNA, 88 bp, Homo sapiens
cgcggcccccagcagagcccgcctgcccggctattgctgctaaaattgattcaattcctcacttgaataattccacacctctagtgga

SEQ ID NO: 198526 - DNA, 75 bp, Homo sapiens
tgaccctcagcgccggtgcatgtcgatatctctggaaacatggctacagaacatgttaatggaaatggtactgaa

SEQ ID NO: 198527 - DNA, 89 bp, Homo sapiens
aaaagcagttcaacgagaatgaagccatccaatggatgcaggaaaactggtgctggagaatctggtaaaagcaccattgtgaagcagat

SEQ ID NO: 198528 - DNA, 83 bp, Homo sapiens
cactgggccgcgcatttcggcaagaacatccagtcatggataaaaatgagctggttcagaaggccaaactggccgagcaggct

SEQ ID NO: 198529 - DNA, 100 bp, Homo sapiens
ttgggctgtgttgacatcaaggatctaccagcggaagatccatccaaaagctatgtgaaattacgagactttgtgcttgtgaagctttgtcaagatttgc

SEQ ID NO: 198530 - DNA, 75 bp, Homo sapiens
aattcgcctggaacaggaccagaccacagctcagcttcaggtacagaaggacctagatgtgaaggctggtggagg

SEQ ID NO: 198531 - DNA, 90 bp, Homo sapiens
caacaccctctacgaaggcggctacttcaagagtgaagatagtccaagtcctaagagacagcgcctctctcattcagtctttgattatac

SEQ ID NO: 198532 - DNA, 89 bp, Homo sapiens
gtcagaatttgaacatatcagggactgcttggatactggaatgattgataacctctgtacttttacagcgggttgatgaactagagaag

SEQ ID NO: 198533 - DNA, 83 bp, Homo sapiens
atggtctttttgttcaagataaagtgattttttgcctttgttgattaactggacaaattcagagaggaattcatagcagtgtg

SEQ ID NO: 198534 - DNA, 100 bp, Homo sapiens
agaaaatccaagtccggctagtacgcgaattggagaaaaagttcagtgggaagcatgtcgtctttatcgctcaggtcccagcatttgagggtgatgatgg

SEQ ID NO: 198535 - DNA, 98 bp, Homo sapiens
tgatgctgtaattgctgaacttaaaaagcagtctaaacctgtgaccacccctgaagaaattgcacagtttttttcaccgctcaaccctgtgagagtac

SEQ ID NO: 198536 - DNA, 100 bp, Homo sapiens
tagtgaaatgggctaataatgctggcaaagtggaaaaatgtgcggtgtggcagagaagacacagcttctgaaattgagtgtacctgctacttttatgctt

SEQ ID NO: 198537 - DNA, 75 bp, Homo sapiens
gccgacttcagccagatgtccaaggaggagccgaggaaggtctgcttcacctacgacctgttcctgaacctggaa

SEQ ID NO: 198538 - DNA, 82 bp, Homo sapiens
gctgaagcaggacaacatagcggtgaaggcgaacgcggtctgcaagctgacgtatgcccgcaccgccgccatgatgtgcgag

SEQ ID NO: 198539 - DNA, 90 bp, Homo sapiens
ctcccgagtagctgggaccacaggaggttcagcaacatcagatgaccatgaatttgatccatcagctgacatgctggttcatgattttga

SEQ ID NO: 198540 - DNA, 90 bp, Homo sapiens
atttataaacgtgatgttggattgaagtctgagcgggaattggacaagataaaggggctgaagctagaagagctctggctcgatggaaac

SEQ ID NO: 198541 - DNA, 74 bp, Homo sapiens
gcgctcctccaggcttggggaagcgctgaagcaaggacacccaggcccattattttcctccagcctccatggac

SEQ ID NO: 198542 - DNA, 100 bp, Homo sapiens
gctgcggcgagacaaccccagattcaacctgatgctgggagagaggaatcggctgcccttcgggagactggagcacaaagttatcattgttgggctggat

SEQ ID NO: 198543 - DNA, 100 bp, Homo sapiens
atgctgccatttccactgcagaccacaggataaaaggaccgcttcaccgtggcccaggatacccttttaagtaggagtgatatcagtatcaagataaaag

SEQ ID NO: 198544 - DNA, 80 bp, Homo sapiens
ggggggagcctcagcaggattgctgtgtgaaaaccgagctgctgggagaaggtttggtgcacctcgatttggaggaagta

SEQ ID NO: 198545 - DNA, 83 bp, Homo sapiens
tctgtgcgcgcctccatctgggccatggatgggtcaaaatgcagatcttcgtgaaaacccttaccggcaagaccatcaccctt

SEQ ID NO: 198546 - DNA, 100 bp, Homo sapiens
agggaattgtcctctgtggaagggactttcttttggccctaggccccttcctgcccctgtcgtcagcagagtcaagaattgaaggttggctttcagtacc

SEQ ID NO: 198547 - DNA, 89 bp, Homo sapiens
ctccagcacagtgttcagcaggtcctgttggagatgatagccctccctatcctgaagacattagctgagagtctggcaccttttaaagg

SEQ ID NO: 198548 - DNA, 90 bp, Homo sapiens
gatgagctgaagactgattacaagaatcctatagaccagtgtaataccctgaatcccgctatcacagagctccagaagaatggaatgaat

SEQ ID NO: 198549 - DNA, 51 bp, Homo sapiens
ctcaggagcgagcagccagggtggcagagggcaggatgtgcgaggacttcc

SEQ ID NO: 198550 - DNA, 82 bp, Homo sapiens
gaggaggaagaggtggccataccgttgaccgctcctccaactaaccaggaaaagagtgcaaattcggaaagcacctcaagct

SEQ ID NO: 198551 - DNA, 75 bp, Homo sapiens
acagattacgccccctatcctatccgcaaacagtgaaaggtgtagcagtcactcggcctacacccacagcatcga

SEQ ID NO: 198552 - DNA, 100 bp, Homo sapiens
aggatcagaccgtagcccttccggaaacctccatggtagatgatgagctggagatcaaggcctactatgcaggccacgtgctgggggcagccatgttcca

SEQ ID NO: 198553 - DNA, 100 bp, Homo sapiens
gccatcgtgactctagggttagcagaaccatccaccaacataagtttcccattggtcactgtacacttggaaaagtggagaccacgtagctttgcaaggc

SEQ ID NO: 198554 - DNA, 95 bp, Homo sapiens
aggacagcgcgaggtccgcgcagcccagcgcagccatgttgacatcatggacatatgtgagtccatcctggagaggaagcggcatgacagcgaaa

SEQ ID NO: 198555 - DNA, 50 bp, Homo sapiens
ctacgcctcctacgtttacctgtccatggacgctgccaaggtctgcagag

SEQ ID NO: 198556 - DNA, 75 bp, Homo sapiens
aacttggttccccctccctcagcttccgccccaaaaggtgacttaagagattaaaattaatttggttgctgttgg

SEQ ID NO: 198557 - DNA, 75 bp, Homo sapiens
gcccaggcacagccgacgccgcgggtttttcagaagaagtgaagtcaagatgaagaaccatttgcttttctgggg

SEQ ID NO: 198558 - DNA, 82 bp, Homo sapiens
agccaccagaggaccttcgtgctggaagtgatgggccggcactgcgggcccagctgagagccagcctggaggttacccagca

SEQ ID NO: 198559 - DNA, 100 bp, Homo sapiens
ggtttaaatcttggccagaggaaccagcagagccacatggaggacagacagagacatggggctgatgaatgccattgggcttcagccccggaaccctgcc

SEQ ID NO: 198560 - DNA, 100 bp, Homo sapiens
ctccgctccgagcccgtccggactcccccgatcccaggacatgggcaagttttgcctcacatacgaggcctccatgacccggctcttccgagaggggagg

SEQ ID NO: 198561 - DNA, 51 bp, Homo sapiens
ggcccgcgggggagccccgggagccgcacgcaaatggttatgagccttaga

SEQ ID NO: 198562 - DNA, 90 bp, Homo sapiens
caggagatgaagacgagactttcaaagatggaatcacaaacggcgcacattggtatgatgtggaagatagttctgccccagagacaagta

SEQ ID NO: 198563 - DNA, 100 bp, Homo sapiens
aggaagccatcgcctggccccggctctctggaccttgtctcgctcgggagcggaaacagcggcagccagagagttttccgtctgatgaaggttggccatt

SEQ ID NO: 198564 - DNA, 82 bp, Homo sapiens
agggagagcaagaccatcatgctgcgcggccttcccatcaccatcacagagagcgatgggcactatggcagacaaagttagg

SEQ ID NO: 198565 - DNA, 75 bp, Homo sapiens
agcaaatcgagaaaaacctcagcgacctgatcgacctgattttggaaataatcagggttattttaaaactatatg

SEQ ID NO: 198566 - DNA, 100 bp, Homo sapiens
tgaagaaaactaatactgaagaaaaaaatactcttccctcaaaggaaatccacaggtcctggctaccctgggaagagacaagaagtaaatgaagaaagag

SEQ ID NO: 198567 - DNA, 83 bp, Homo sapiens
ggccggcctgcggcggagggaaaaaggaagaggagaaggaaattgtcccgaatccctgcagatgatatcatcaagttgaatcg

SEQ ID NO: 198568 - DNA, 100 bp, Homo sapiens
agcttggttggtggtaccctaaaattagggcatgattaagtactcccctagcatgacaatgagcgtgtgatccattaccaagtctcctcatgaaaaccac

SEQ ID NO: 198569 - DNA, 87 bp, Homo sapiens
gaagccgtagtgggagtattgtggaacttatagatctcaggaaacaggctcgacagctggaaaatgaacttgacctgaaactagttt

SEQ ID NO: 198570 - DNA, 74 bp, Homo sapiens
atcccaccaggcacctttgtctgcgaactgctctctacggcccagctgcccactggaggtcgctgctgcaccca

SEQ ID NO: 198571 - DNA, 89 bp, Homo sapiens
ctcaagttcttaattattcagaatgctgcggttttccaagcgggcctccccttcctcatcatcgagacaagcaccatcaagccttacca

SEQ ID NO: 198572 - DNA, 88 bp, Homo sapiens
agttcaaggaggccttccagctgtttgaccgaacagggctacagaactggctacccttatcgataccctgctctgagagagaagtcta

SEQ ID NO: 198573 - DNA, 75 bp, Homo sapiens
agccctgagctgccacggatactgagttacaggtcggttcacccagaagccagggggcatctcagtgaagcgctc

SEQ ID NO: 198574 - DNA, 50 bp, Homo sapiens
ggacgttcgccagtgggttgacacagatggcagttgggtgagaagcagct

SEQ ID NO: 198575 - DNA, 74 bp, Homo sapiens
tctagagagcaggcgagtcgggcggatcgggcgcagacggggaagcggagccaacatgccagtggcccggagct

SEQ ID NO: 198576 - DNA, 100 bp, Homo sapiens
ggaagcgtctccgttgggtccggccgctctgcgggactctgaggaaaagctcgcaccaggagtccaaaactacttacctggaagaccttccaccaccccc

SEQ ID NO: 198577 - DNA, 75 bp, Homo sapiens
ccgcagtatcatgctggccaagaagatcatcattaaggacggaggcacggagtggctgtaaggtgaagaagcatg

SEQ ID NO: 198578 - DNA, 82 bp, Homo sapiens
ggagagccccggagtgagcggagtagcgagtcggcaacccggagacaatgcagatcttcgtgaagactctgactggtaagac

SEQ ID NO: 198579 - DNA, 101 bp, Homo sapiens
cgccggggaggcagcgcgggatcccagcctcaggcgtgcgcggacggtgtgcgggatcacctgctgttaccagctaccacccataacaagaccacaagacc

SEQ ID NO: 198580 - DNA, 97 bp, Homo sapiens
ggagctgtgcagccgcgaggaggcgcgggaggtgttcgagaacgaccccgagacgtgccctctggtggtcagaagatgctgtgctgtctcgttagga

SEQ ID NO: 198581 - DNA, 75 bp, Homo sapiens
gcgagattgtgaagaacagctccaacgatgagaccatcgctgccaagcaggagggatttgttcgtgttgaccgag

SEQ ID NO: 198582 - DNA, 97 bp, Homo sapiens
ctggtgccctggagacccgcagcctcaaggatcacaaaggtgcggccgggaacttcctgtgccccgctggcgccttgtccttcaacgccttcaagac

SEQ ID NO: 198583 - DNA, 80 bp, Homo sapiens
gtggactggagagagaaagggtgtgttactgaagtgaaatatcaaccacaagtatatggttatgatgacttgcagatgct

SEQ ID NO: 198584 - DNA, 74 bp, Homo sapiens
ggacttctggctttggccactttacttcctgccaggcagcacgctggctcttctcctgaacttcctcgcctgcc

SEQ ID NO: 198585 - DNA, 100 bp, Homo sapiens
actccagtgcctccgacgcctcctgatgcccagctccatgaccttctccagctgaggcaggagaatgcctacctgaccaccatcaccaagcagatcacgc

SEQ ID NO: 198586 - DNA, 75 bp, Homo sapiens
aggaactccgaagggagatcagctatgctatcaagaatatccatggcattagtagagacggggttttaccgtgtt

SEQ ID NO: 198587 - DNA, 87 bp, Homo sapiens
tggacatgagcagcggctgccggtcctgggactaggccccgccattttggatccgctgacagtatttatcgagtgctcaatggtgcc

SEQ ID NO: 198588 - DNA, 75 bp, Homo sapiens
tcgctgggcttgctttggcaacagagtgcctgacccaggtcagggaactctaatgatccaggacaaagaagttac

SEQ ID NO: 198589 - DNA, 90 bp, Homo sapiens
ggaatatatcctgactgattagacagagtctggccatgttacccaatctgatcttgaactcctgctgtcatctgatcctcctgcctcagc

SEQ ID NO: 198590 - DNA, 75 bp, Homo sapiens
agacgatgaccaagaaggcggccatcaccgtacaggagcgcctggccatcctggacagtcaggctgggcagatcc

SEQ ID NO: 198591 - DNA, 100 bp, Homo sapiens
gcccctgggcatcaccaacatagccatcgacttcggggagcaggtgcgtatagcagcaaaattcatcattcatgcccctcctggagaatttaatgaggtt

SEQ ID NO: 198592 - DNA, 51 bp, Homo sapiens
ttgccgcttctttcacttcaggagtggctcggagtctttattataccattt

SEQ ID NO: 198593 - DNA, 100 bp, Homo sapiens
atctgctcagcatcactggattatgttataatgtggaacctggatgaatgtagagagaaagtacttcaaggtttttgattggtcaaggagcacatgtagg

SEQ ID NO: 198594 - DNA, 83 bp, Homo sapiens
ctactgcctgcctgcctgcctgctacggacagagcgggatgccaccagcttgtccaaagggaagttccaggagctcctggtgg

SEQ ID NO: 198595 - DNA, 74 bp, Homo sapiens
cttagcgcggtcaggccgccctccttttccagcattactctactgactggcagagacaggagaggtagatgtcc

SEQ ID NO: 198596 - DNA, 83 bp, Homo sapiens
atgttggactcatagtcactgccagaaagatactccatcttctaaaccaacactcctagccaatggtggtcatggagtagaag

SEQ ID NO: 198597 - DNA, 100 bp, Homo sapiens
tgggattccttgggcaatggtgaatttgaaaagggagaatgaagttgaagaggtaaaagaggagggtccaaaagagatgactttggatgagtggaaggct

SEQ ID NO: 198598 - DNA, 100 bp, Homo sapiens
taatgacaagctcatgtacaaaattacaagtggaaatccacaaggattcttttcaatacatcctaaaacagggtatggctctctcggcatgatgaccagc

SEQ ID NO: 198599 - DNA, 75 bp, Homo sapiens
ctgagtggttgtgtggtcgcgtctcggaaaccggtagcgcttgcagcatggtacttcctatttaacagacattgt

SEQ ID NO: 198600 - DNA, 100 bp, Homo sapiens
ctgggacttaggagggcaggaagagctgcagtctttgtgggacaagtgaagatagtgatccggggagacaggaacacgggcaagacagcgctgtggcacc

SEQ ID NO: 198601 - DNA, 100 bp, Homo sapiens
catcctgcagtattgccaagaaggaagaaggagaaagggccaacccctgaagaagcaatacagaaactgaaggagacagagaagatactgatcaagaaac

SEQ ID NO: 198602 - DNA, 100 bp, Homo sapiens
tattagagagtctacagataaatctacagagacaattcctcaagtggacttggccatgattggttcttagcagtgtctgcaaaaacgaatcttttcctac

SEQ ID NO: 198603 - DNA, 100 bp, Homo sapiens
gtgaaggaaaagcagctccgtccacaacgccgcttcggggctcctaggtatccagtagaaaaagcactctccagtgttcatctgtggaactggatggttc

SEQ ID NO: 198604 - DNA, 83 bp, Homo sapiens
cgcgcactggtcggtgccggctcaggagccggggtctggtgagctgtaccttctttctggcagtgaatggtctgtattcctct

SEQ ID NO: 198605 - DNA, 83 bp, Homo sapiens
ggatttgttaaggattccaagtaactcttatttggacttaaccaccaccatgtcgagcaaaagaacaaagaccaagaccaaga

SEQ ID NO: 198606 - DNA, 74 bp, Homo sapiens
gtgcccgcgaggagccgccgcgcgcccgcgccctccgcgcgacgccaggcctgaaacaaccagagagctacggg

SEQ ID NO: 198607 - DNA, 98 bp, Homo sapiens
gaaagtttttttaatgtggttggaacaactgaggggtcctggaggaagccgagttctacaacatcggcccgctgatccgcatcatcaaagaccggatg

SEQ ID NO: 198608 - DNA, 80 bp, Homo sapiens
agccggaggaggacaacgactaccaccgcagcgacgagcaggagtccaaaactacttacctggaagaccttccaccaccc

SEQ ID NO: 198609 - DNA, 96 bp, Homo sapiens
cagctcagcaaccctaagtttggggcccacctgggccagccccactccaccaccatcatcatcagggacccaggtcagccccagttgatgctgaca

SEQ ID NO: 198610 - DNA, 100 bp, Homo sapiens
tcgtttccagcctcaggaatttatggtcgcctttttgaatgaggtgtggatgaggtcaccattgtcaacattttgaccaaccgcagcaatgcacagagac

SEQ ID NO: 198611 - DNA, 97 bp, Homo sapiens
tggaaaagttggcccctgagccagagctccagcagccttgttagggcgtggcctgaggcttggataagtgggatttgaacatggaattcaatccttc

SEQ ID NO: 198612 - DNA, 100 bp, Homo sapiens
cggcggcggagtgtaggaagaggcactgctgagggggcgcgaggggaacggaggccagagctgcgcctggtccgacccccagtggcactaacgtgggatc

SEQ ID NO: 198613 - DNA, 97 bp, Homo sapiens
atggagattagggaagaaaagaaagaagacaaggtggaaaagttgcagtttgaagaggaggactttgtcctttcccataacctgtgcacggtgctga

SEQ ID NO: 198614 - DNA, 75 bp, Homo sapiens
gtttccgatttaaagctgagctgcgaggaaaatggcggcgggaggtaaagtcagtgataaatcttttgtttgctg

SEQ ID NO: 198615 - DNA, 117 bp, Homo sapiens
ccggttataaatttttctccctttcttctgtggataagctggaacagatctatgaatgcattgatattcactgatggactccaaagaatcattaactcctggtagagaagaaaaccc

SEQ ID NO: 198616 - DNA, 83 bp, Homo sapiens
gcagcccgcgcacagctgctcccttcgccttcgccctttccacctcgcggcagttcggccagaagcggactcctagaagaggg

SEQ ID NO: 198617 - DNA, 75 bp, Homo sapiens
cagagctcctgtcaaccagccagggattgcatcaggcagtcaatggcctgggatggtattaccacaaattcaaga

SEQ ID NO: 198618 - DNA, 100 bp, Homo sapiens
atggatggttccttgcaaagggcacgtatagcattggtaaagaacgatcgtccagtggagtactatactggcaattgctggagaagattttgcaattgtt

SEQ ID NO: 198619 - DNA, 100 bp, Homo sapiens
aggacgagccggcgcccgcggccccgctgaggggccgcaaggacgaggacgcctttctgggagaccccgacaccggatgtgtctagtccgaatgaagcag

SEQ ID NO: 198620 - DNA, 51 bp, Homo sapiens
gacgttttccggagggattccatcatagctggtactcctggttaatcaaca

SEQ ID NO: 198621 - DNA, 90 bp, Homo sapiens
gtttgctacaaagaacatcttcagaggcagcaaaatagtggcagaatgagcccaatgggtacaggtgaacaaaggcagagtaaactgtca

SEQ ID NO: 198622 - DNA, 99 bp, Homo sapiens
aagaggatcatccaccgagatctgaaagctggcaacgtgctgatgaccctcgagggagacatcaggctggaggcttcgtgacggagttatcagagacat

SEQ ID NO: 198623 - DNA, 100 bp, Homo sapiens
cagcctcatccatggagacatcaagaggatcagtgaagtggagcccaaatactatgcagatggggaggacgcctatgccatgaagcgggacctcactcag

SEQ ID NO: 198624 - DNA, 100 bp, Homo sapiens
aaaagaacgacatgatgcaatcttcaggaaagtaagaggggtgtccgcaatgttgccagtgtctgtctgcagattggctacccaactgttgcatcagtac

SEQ ID NO: 198625 - DNA, 82 bp, Homo sapiens
tcctacacctacctctctctggagcatcagatccatgctgctgctgactcggagccccacagcttggcacaggctctctcag

SEQ ID NO: 198626 - DNA, 100 bp, Homo sapiens
tggactgcactacaccgtgcacattctctgttctaagtgccttaagagaggatcgcccaatccacatgcttttccaggcataatcaccagcaacacccgg

SEQ ID NO: 198627 - DNA, 100 bp, Homo sapiens
gaaagctgagagagactttgaacatagtgaagatgaagctggatgtagctcagttgatgaagaaagttacaagactctgaagcagcaggaagaagtattt

SEQ ID NO: 198628 - DNA, 95 bp, Homo sapiens
gctgcaatatcgcgttgtgtattctcctgtggatggcacaagaccctcagaatctgcatcctctggtatcacgattccaaaacccccaaagccac

SEQ ID NO: 198629 - DNA, 83 bp, Homo sapiens
ctgaacttccggaaggcggtgatccagctcaccaccaagacgcagggaacggcaggagcagctgatgggatatcggaagagag

SEQ ID NO: 198630 - DNA, 79 bp, Homo sapiens
ggaaacaccatggctgcggcggcccagctctctctgacacagtgccctgcaggagtcattaaatcaaaacttcatgctg

SEQ ID NO: 198631 - DNA, 75 bp, Homo sapiens
ggacaccgacatggaacagggactcactggggacaggtgatttggcttctgcacagttaggaggagcaccaaacc

SEQ ID NO: 198632 - DNA, 75 bp, Homo sapiens
atgagatcactcttagcatgctaaagtttttcagaagaagtgaagtcaagatgaagaaccatttgcttttctggg

SEQ ID NO: 198633 - DNA, 100 bp, Homo sapiens
tcagctccatggtgggcctcattctagctgtcccagagggaggagctgaaatctgaacctctcagctgtgattggatctttcttgcaaaagagaggaaaa

SEQ ID NO: 198634 - DNA, 89 bp, Homo sapiens
catcaaaatacccctccggacgtcccccgtctcaggaattgattcggaaggccatgcagctaactttgtagaaacagaacaaattgtgc

SEQ ID NO: 198635 - DNA, 100 bp, Homo sapiens
atggaacccgaagaagaaaggattcgttacagccagagattgggacagagcagaatgggctgatatagatccggtgccgcagaatgatggccccaatccc

SEQ ID NO: 198636 - DNA, 100 bp, Homo sapiens
agagggggaaccgccgtcccaacatcacaaaaaggcaaatacgccatgcgagacctagtccacaggcttccaggagggaacaacagcaacaacactgcaa

SEQ ID NO: 198637 - DNA, 98 bp, Homo sapiens
aggcggccgccgctgcaccttcaccgcgtacccgggacccgcccgcccgcgggagctatacaaaaagccagatgtcccactatataagaaaattcgtt

SEQ ID NO: 198638 - DNA, 50 bp, Homo sapiens
agtgcctggataccttcgaatagggcggtcaggccgggtccagcactgcc

SEQ ID NO: 198639 - DNA, 82 bp, Homo sapiens
gataataaatcctataacaatgcagtgtataaagggtagaatttcagaacaaattctacgttggtgcaggcaccaaatttgt

SEQ ID NO: 198640 - DNA, 78 bp, Homo sapiens
aacatcggtctgggcttcaagacacccaaggaggctctgtgactggggcaacctgcaaggagctggccagccagcctg

SEQ ID NO: 198641 - DNA, 100 bp, Homo sapiens
agagcaagcccgcacgtgtgaaggcatccactgcagatccagagccagagctctacctcgatcctttctgccctccgggtttctccagtcagaaattccc

SEQ ID NO: 198642 - DNA, 51 bp, Homo sapiens
aaatcacccgtagccctgctgtttagttgaatgatcctaaaatgtctgaaa

SEQ ID NO: 198643 - DNA, 60 bp, Homo sapiens
cacatcaccagtttaaagaatctgattgctgtgagtaccagagtgcccactggttccaac

SEQ ID NO: 198644 - DNA, 50 bp, Homo sapiens
cttcgcgggcgattcgcgtagcctcaggattgacggcgtgagtttactgg

SEQ ID NO: 198645 - DNA, 90 bp, Homo sapiens
cgctgcatagtaatattgcgtgaaatatctgaatctacccccgtggaaggtgatgacaactccgtgagggtggagattatacatctctca

SEQ ID NO: 198646 - DNA, 90 bp, Homo sapiens
attcactatgatagaattacttctctacagatcctggccaatttggagcaaggcttagcagaagacggcggcatgagcagcgtgactcag

SEQ ID NO: 198647 - DNA, 100 bp, Homo sapiens
ggaaagacagacaggatggggaggaggttcttcagtgtatgcctgcttcagctttagctgcagctgcctctgttcagccacttgcaacacaatgtttcca

SEQ ID NO: 198648 - DNA, 101 bp, Homo sapiens
ctggattagaatatttaagtcaggttggcgatagtattgttcacaaagccagagagaccttggaacgagctattaaactggtgaatgataccaagaaatgg

SEQ ID NO: 198649 - DNA, 100 bp, Homo sapiens
ctagaaccgtagccagacatgggactggaggacgagcaaaagatgcttaccgaatccggagatcctgaggaggcaatcttgctgccaatgatctctcccc

SEQ ID NO: 198650 - DNA, 73 bp, Homo sapiens
gaggaagaggagttgccagtctccctggcctgccaggaaaaggtcacgagaagagaatgccttctagatgcaa

SEQ ID NO: 198651 - DNA, 90 bp, Homo sapiens
catggccactccagtcggtgttgagcacggcgagcagtctcaggcctttagtgatgatggttcttgatagtccacaatgggtgaaccaca

SEQ ID NO: 198652 - DNA, 75 bp, Homo sapiens
taataatatgaatcataatatgaacaaaaatgtctttaggaactgggcacctccgggctgtgaaaagttagggaa

SEQ ID NO: 198653 - DNA, 100 bp, Homo sapiens
gtggcttcaggagaacctgctggctgtgggcatctttgggctgtgcacggcgctggtgcagctctttgacctcatctaccgcgaggagacgctgttcaac

SEQ ID NO: 198654 - DNA, 100 bp, Homo sapiens
cgggcacgcgcagccgagaagatgtctccgacgccgccgctcttcagtttgcccgaagcgcggacgcggtttacgggtggtgacttcacacgccataatg

SEQ ID NO: 198655 - DNA, 80 bp, Homo sapiens
atcgatctctccatcccttccgaggcccgacttcgataacacttacttgtgcctggctgtgctggatggtatattctgtg

SEQ ID NO: 198656 - DNA, 74 bp, Homo sapiens
ttatgatgaagatgctagtgcaatgctgaaagaagttcaacctagggaacaggagtacagctgtgtagtaaaga

SEQ ID NO: 198657 - DNA, 82 bp, Homo sapiens
cctgagcctcctgcaacacctgcggcctcactgggacccccaggaggtgaccctgcagcaaaatgaagccaagttggatgag

SEQ ID NO: 198658 - DNA, 51 bp, Homo sapiens
tgctaatggtggaaacccacaacggacagagcgggatgccaccagcttgtc

SEQ ID NO: 198659 - DNA, 82 bp, Homo sapiens
atggcctctgggtccaccaccttcaccaaggtgttggggatgtcctttgcactgaccctgaactgccagattgacaaaacca

SEQ ID NO: 198660 - DNA, 82 bp, Homo sapiens
aagagcaaactgaggctttcttggacagcattgcagccaggagcttaaaagtgagatgaacctggtacctcagatggaaatg

SEQ ID NO: 198661 - DNA, 104 bp, Homo sapiens
tctgggggccacaaatgctccttctcctggagacgcaactcaaggtggagccgccaccaaaatgcagattttcgtgaaaacccttacggggaagaccatcaccc

SEQ ID NO: 198662 - DNA, 51 bp, Homo sapiens
atggggagaaggatatccagacagccctaactccagtgatccacaagctca

SEQ ID NO: 198663 - DNA, 75 bp, Homo sapiens
aaaagcctctgggagcagaagggaggctccaagacctcatcaacaattaagatgggcggaagccatttccaatta

SEQ ID NO: 198664 - DNA, 75 bp, Homo sapiens
agcacatcctcatccgagcctttgatttgagtgggctttcttcgagagtcacccagctccttcagctgagcgtac

SEQ ID NO: 198665 - DNA, 90 bp, Homo sapiens
cacggaggtctgttttgatgattctgggagaattcagtactgtacacaggaaattactgtcttccgtgaagacttagtaaataaaatgtg

SEQ ID NO: 198666 - DNA, 89 bp, Homo sapiens
taatgcctggaatgatgatgtctcatatgtctcaggcttccatgcagcctgccttaccggcaactcatgcagcaattccagaaccccga

SEQ ID NO: 198667 - DNA, 100 bp, Homo sapiens
tttggagaatgatatcaaaccagtgaggcaggcgactaatcagattgtgatgaattgtgctgatattgatattattacagcttcatatgcaccagaagga

SEQ ID NO: 198668 - DNA, 100 bp, Homo sapiens
agttgtgcgttgcggccagtcgccactgcttgattcgcctttgccagtctcatctcgtgtctgctttgttaagttccatgatccagactcagcagttgtg

SEQ ID NO: 198669 - DNA, 74 bp, Homo sapiens
gttcctaccttatgagctcggttttcttatgcttataagagtggaacaggctccgagctctgtccagtggtggg

SEQ ID NO: 198670 - DNA, 80 bp, Homo sapiens
aagagataaagtttgatactgaaatacaaggttctgtatgttcctgatcctgaatatgtctccagtgttgagagctctcc

SEQ ID NO: 198671 - DNA, 99 bp, Homo sapiens
gtggattgcatggtgacaaccagagagcaatctgtctatgatcttctcccaaaggagttacagttacctccatctagagaaacatctgtagcatcaatg

SEQ ID NO: 198672 - DNA, 82 bp, Homo sapiens
cgcggagccggcgctgagaggggctgcggccggagcgggcggctgagacaaaggcgacggcataccagatactcccttcagt

SEQ ID NO: 198673 - DNA, 142 bp, Homo sapiens
gcggattttctgctggccgtctgtaccgcactttaaaaggccatcggtggaagaaaggagccttctgtctgccactgcagagccccgccatggaagacacgccgttggtgatatcgaagcagaagacggaggtggtgtgcgg

SEQ ID NO: 198674 - DNA, 75 bp, Homo sapiens
tgccccagatgcccaccgggatggagaaggaggaggaatcgatggggtcgaggatttggtcttttgggttccatt

SEQ ID NO: 198675 - DNA, 80 bp, Homo sapiens
cgagcactaatatttaagaaagaagatgttaactttcaggtttgcctgcaatgagatttcattctctacatttaaaggac

SEQ ID NO: 198676 - DNA, 83 bp, Homo sapiens
cccaggcacagccgacgccgcggggcaacatgagtgagaatgaggaagaggaaatttctcagcaagaaggcagtggggactat

SEQ ID NO: 198677 - DNA, 122 bp, Homo sapiens
cgcgggccgggccatggggtggcgggcggcgggcgcgctgctgctggcgctgctgctgcacgggcggctgctggcgctgctcctggaacacctggagtgcctggtgtccaggcacgagaggt

SEQ ID NO: 198678 - DNA, 82 bp, Homo sapiens
cggagcagctgcagccccggcggccgaacgcccgcggcgcgggactccatcgtcaggggacggcaaaacagaacagaaaggc

SEQ ID NO: 198679 - DNA, 90 bp, Homo sapiens
cttccaataatataatctattatccacagattcgaatgcaggctcaaggaagcttgttccaagggagcatgattggaagctttatcgata

SEQ ID NO: 198680 - DNA, 100 bp, Homo sapiens
tggacgagcaggaagctgcggctgagtcgctgctgctggacacccactcgctgaagatggtcctgctcgatctcccctccatcagctcgcaggtggtgag

SEQ ID NO: 198681 - DNA, 79 bp, Homo sapiens
cgtgtcaccgccggaacctggcgcagacaatgcagatcttcgtgaagactctgactggtaagaccatcaccctcgaggt

SEQ ID NO: 198682 - DNA, 80 bp, Homo sapiens
cgggagaagcagcgcctgttcccggggcagatccaggttcaggagcatcagatccatgctgctgctgactcggagcccca

SEQ ID NO: 198683 - DNA, 75 bp, Homo sapiens
tggaagcgtggccggcagcgtcccggacgaggagagtacctgtggagaagaaacaatggattccttagaccatat

SEQ ID NO: 198684 - DNA, 100 bp, Homo sapiens
aggtgggcaaggtgatccagcaaggtcggcagagcaaggggcttacgcagaaggacctggccacgtacggcaagaagaagctgaaatacctgccctacaa

SEQ ID NO: 198685 - DNA, 78 bp, Homo sapiens
ttctgctccaggaaattcagcctcaaaaccgtcctgctgcttgctgaccaaatggagcatcagatccatgctgctgct

SEQ ID NO: 198686 - DNA, 75 bp, Homo sapiens
aagagcacttcagaaaacctgtgattgaaggtgcatttattcaaggcatgggactttatacaatagaggaactga

SEQ ID NO: 198687 - DNA, 50 bp, Homo sapiens
tgatcgcctacagcagcagcgagacccctttctcaacatcagcacctcgg

SEQ ID NO: 198688 - DNA, 82 bp, Homo sapiens
tgaggagcgggatctaacccaggagcagacagagaagctgctgcagtttcagggacaagaatccttcaagaaacaggaaaaa

SEQ ID NO: 198689 - DNA, 96 bp, Homo sapiens
agaggatcagaaccggtacctggatggcatgcaacttgtagagacagtttcatgtggaggaaatcttttgatgaatattgggcccacactagatgg

SEQ ID NO: 198690 - DNA, 97 bp, Homo sapiens
gctctcgcggcgcacggcggcgaaggggtcgagcagggagcagcgcagcgcgcgcagagcgtcgtccagccatgaagtcggggggcacgcagctgaa

SEQ ID NO: 198691 - DNA, 100 bp, Homo sapiens
ttggtgatgatgacatttttattgcatgtggaccggagaagttccgttaccaggatgatttcttgctagatgaaagtgcttccgccacctttgaagactt

SEQ ID NO: 198692 - DNA, 100 bp, Homo sapiens
ggacctttttcaacttgacaaatagagctgccaaatgctgttaaatcaactgagagaaatcacaggcattcaggacccttcctttctccatgaagctctg

SEQ ID NO: 198693 - DNA, 103 bp, Homo sapiens
cagcaaagacagccgcccagaacctgtacgagaagacatacctgcccgctgtagatgagaaactcagttacatcttccggcccagctgtactcgcctggggca

SEQ ID NO: 198694 - DNA, 50 bp, Homo sapiens
tagcaagaaagtggaatcaactgcaccctggaggagaagaggttctgctg

SEQ ID NO: 198695 - DNA, 101 bp, Homo sapiens
gcaccattgtattggacactaatgataagaataactgaagtgaagtgatggactccgatttggagagtagtaagacgtgaaaggaatacacttgtgtttaa

SEQ ID NO: 198696 - DNA, 50 bp, Homo sapiens
ggagagttgacagcctcactggaagaagtttctcagcagcaggaaagcgt

SEQ ID NO: 198697 - DNA, 82 bp, Homo sapiens
cctggtctgcggcagccatgctgaactcgtatggagaggtgagaagccctaccactgcaactgggacggctgcggctggaag

SEQ ID NO: 198698 - DNA, 98 bp, Homo sapiens
cagttcccgttaaccttagccacaaagtcaaaggtgctggagaatctggtaaaagcaccattgtgaagcagatgaggatcctgcatgttaatgggttt

SEQ ID NO: 198699 - DNA, 50 bp, Homo sapiens
ggcccaaagagacagctcactggtcaatatccaacacagccaacctaccc

SEQ ID NO: 198700 - DNA, 74 bp, Homo sapiens
ctcaagctcatattttgaagtgtttacgggcaatcttgctgccaatgatctctccccgtcccgaatagccagac

SEQ ID NO: 198701 - DNA, 97 bp, Homo sapiens
tttcaagtcatcccaaatatggttccatccctaaacttatacgtggaaccgtcccaaaatgtcccttgctcagaagaaggatcgggtagctcaaaag

SEQ ID NO: 198702 - DNA, 100 bp, Homo sapiens
actgtacaaaggataataaactagttgagaagcagaacccagctgaaggactgatggagtccattgccttacctgtgcaataatgcttcttaataccgat

SEQ ID NO: 198703 - DNA, 90 bp, Homo sapiens
ggatgctactgctagtgagaagaatgaaccagaagttcaatgatcttagaaaccaaccatacagacgagccgatgcggtgaggagaagcg

SEQ ID NO: 198704 - DNA, 75 bp, Homo sapiens
agaggagcagtggtccgatgactttgagtctactcttcatcttgtgttgagacttcgtggtggtgctaagaaaag

SEQ ID NO: 198705 - DNA, 75 bp, Homo sapiens
cccaggtgtaagcgcagaaagcaggcgaacccgcggcgcaataacggccaccagcttgggctccccacggagggc

SEQ ID NO: 198706 - DNA, 83 bp, Homo sapiens
caggagcagccgcagcgacggcggcgacagcagatctgggcggaccccggcaaatacgccctgatgggagctgctgcccagct

SEQ ID NO: 198707 - DNA, 75 bp, Homo sapiens
ccggtttctaatccctgctctgtcactaacaagctgcgtgatcttcgatgtataagcattccaataataaggcca

SEQ ID NO: 198708 - DNA, 100 bp, Homo sapiens
tttgctggacagatgaagagtgacttgtttctggatgattctaagaggttcttgggtgtctctggggagtccctgggccagaccttcctccagactccag

SEQ ID NO: 198709 - DNA, 95 bp, Homo sapiens
catctctgagacccggaggaggttcgaagctgagtatgtgacaggtgtcatggagaaactccagctgggcccagagattctgcagcgggaaaatc

SEQ ID NO: 198710 - DNA, 82 bp, Homo sapiens
ggcatggcgacttggtctcagccggactcggggcagcagcagctgacagtgcagaatgtttctgggaacaacctgaccatca

SEQ ID NO: 198711 - DNA, 100 bp, Homo sapiens
actggaacagaatcaacccagaacggagagctccctcctagaaaaggtactccaaagattcaggtttactcacgtcatccagcagagaatggaaagtcaa

SEQ ID NO: 198712 - DNA, 75 bp, Homo sapiens
aagcacaggaatctcactctgttaaagctggtctgttctaactgaggtttctgagtcccttcaacatgatcctgg

SEQ ID NO: 198713 - DNA, 101 bp, Homo sapiens
caggcttgcacaatctgatttgaacctcacacatgggaagtaggcaaacagggaaactgaggaccagagaggggcgccctgcgtccggcagaggaggcgag

SEQ ID NO: 198714 - DNA, 100 bp, Homo sapiens
gatcctcaaggtagagcaaggacaagagccatggatggtggagggagcgaatccacacgagagctctccagacatttatggaggagatgactcgcaaaca

SEQ ID NO: 198715 - DNA, 75 bp, Homo sapiens
gcagagtgatcttccagaaggttaaagagtggtctctcatggtctcattcaggaacgtcgcctgataacactgca

SEQ ID NO: 198716 - DNA, 98 bp, Homo sapiens
agaacctgcggcggccggagcggttgaaatcggctcgagatgttgtatctaggactggtcattcattggctcttggttgtttgcatcgttatgttggt

SEQ ID NO: 198717 - DNA, 102 bp, Homo sapiens
cttagctgtgctcgcgctactctctctttctggcctggaggctatccagccagcgtccgtctccaagagagtatgaagagagtgcgtctgtagggcagggaa

SEQ ID NO: 198718 - DNA, 98 bp, Homo sapiens
ggtgctaagcatggaaacatccaagtcagctgtgtggagtgttctaaccaacaaggaagagttgtgggcccacctggtacaggcaaaacagatgtggc

SEQ ID NO: 198719 - DNA, 97 bp, Homo sapiens
acagaatatgtggccacacgttggtacagggctccagaaattatgttgaattccaagtctgatgatttgaagaagagaagagagcctcacatctcca

SEQ ID NO: 198720 - DNA, 100 bp, Homo sapiens
aggtccagcagctgaaggcctcagtgaagaactatgaggggatgattgacaactataagagtcaggagattaacgagaccagaaggaagcatgaaacgcg

SEQ ID NO: 198721 - DNA, 97 bp, Homo sapiens
gctctatggcctgcaggaagcgctggaaatagccagagagatgtacgaggatgtcgtccaggaaagattgtgcagatgactgaagcagaagttcgag

SEQ ID NO: 198722 - DNA, 117 bp, Homo sapiens
tcataccatatcagatgcctcgcagagcaccaggcccaccgtgaaaggattctgcttcaggaaaaaaggaattgtctacttatgcagctggaagaagccacccgcttaacatcctac

SEQ ID NO: 198723 - DNA, 90 bp, Homo sapiens
gagcgaacccgagagcgtggagcgggctgggccaggtgcgagaagatgtactaaattcattgaataacaactttcttcaaacgctaaatc

SEQ ID NO: 198724 - DNA, 76 bp, Homo sapiens
aggagaggtttgttccctgacaactttgtaagaactctgatgccagtatggactggagatgatgggagccagttgg

SEQ ID NO: 198725 - DNA, 75 bp, Homo sapiens
ttctgctcctactacaacactggaactgtgacaaaccaaggctgatcgaggccctgaaaaccaagcgtatccggg

SEQ ID NO: 198726 - DNA, 141 bp, Homo sapiens
ccagcagcgcctagatggctttggtcacggtccagcggtcacctacccccagcaccacctccagcccctgcgcctcgctccttcgagaactcatagaacggaagaccagctccttggatcccaacgatcaggtggccatgg

SEQ ID NO: 198727 - DNA, 109 bp, Homo sapiens
gttgttcattaagacttcccagcattcctacagatataaatagtgaaggaagcccatcccccagaattgagctgctgcataatattgacccgaacttcgtggactcttc

SEQ ID NO: 198728 - DNA, 90 bp, Homo sapiens
aggaagctgcagcccacccgggcagccctcaccctggtgttcccttcccaaagaacttccttcagatctgcaagaagatcctgtgccgcc

SEQ ID NO: 198729 - DNA, 75 bp, Homo sapiens
atcaattcggaaccgaagattaaaaaactggagccagtccttttgccaggctttatcctgtggataaacgcagag

SEQ ID NO: 198730 - DNA, 106 bp, Homo sapiens
aatgacctcgtggagcagatcgagaccatggggaaactggacgagcatcaagttccctggatgaaagtgtgggaacagaggaaggatcagagaaaagagaggcccc

SEQ ID NO: 198731 - DNA, 50 bp, Homo sapiens
gagatggtgacactgaaagttgcagaagaacatgtgatcatccaggccga

SEQ ID NO: 198732 - DNA, 100 bp, Homo sapiens
cggagaccctcccttgaaaccggcactgggacttctcgatctctggaggcacctgttgcaagtgacaggtccagcaagactatgaatctctgttccaaat

SEQ ID NO: 198733 - DNA, 97 bp, Homo sapiens
tggacagacggggtgagcctcttcttgtgtctggagattctgagtggccttgggggacttgcaggtctgagtagcttgggtttgaatactaccaact

SEQ ID NO: 198734 - DNA, 90 bp, Homo sapiens
ccaagacaagagctgctgctgagtgcgcgcgcaggatgaagaagtgcatcaggtgccaggtggtcgtcagcaagaaactgcgcccaggtg

SEQ ID NO: 198735 - DNA, 87 bp, Homo sapiens
ggagaagatgtcttcgcggacggtgctggccccgggcaacgatcggaactcggacacgaggacctgaaaaacgtgttcccacccgag

SEQ ID NO: 198736 - DNA, 87 bp, Homo sapiens
tcattctgggcttttaccagaaggcataggccagaacacaaagcgtgaatccggaagaaaagttcaatctggaaacatcaatgctgc

SEQ ID NO: 198737 - DNA, 100 bp, Homo sapiens
caagagaaagaaggttaagctggctgtcctgaaatattataaggtggatgatgactttacagcccaagattacaggctccagtttcgtaaatgtacttca

SEQ ID NO: 198738 - DNA, 100 bp, Homo sapiens
tcttgtcgcctccgaccgggtggccgccagcaatattgtccagatgaaggacggtatggtttaggaatgatttattacaagcaagaaaaattcagccttg

SEQ ID NO: 198739 - DNA, 51 bp, Homo sapiens
ggaaaacctacctattcttaaggggaaagatgaaactgcggttctccacga

SEQ ID NO: 198740 - DNA, 100 bp, Homo sapiens
ggcatattctctgcagaatttctgaaagttttccttccatctctgctgctctctcatttgctggccatcggattgggaaatgcactcggtgatggaaaga

SEQ ID NO: 198741 - DNA, 128 bp, Homo sapiens
aagaccgaattcagaaggatatcgacgtcgtgatccagaagtccagagctgaggactgcctgtttgcagagttgaaactgtgggacagccagacagaagagatagcataggagtgtgtgcagaaaaac

SEQ ID NO: 198742 - DNA, 82 bp, Homo sapiens
aacccgacgaggaacgaatgggacaagatcccgtccatgaatcagttcaaggagcagggacaagttacaggaatgttctcca

SEQ ID NO: 198743 - DNA, 75 bp, Homo sapiens
cctggagcggctctgctcggtcctcaaaggtaagaatgattgatgttggctgatattggagtgctcattcacatg

SEQ ID NO: 198744 - DNA, 100 bp, Homo sapiens
ggtggccccagcgcttctatgagtccggggccaaccatcccgtctccagcccgggcttacgccccgccgacagaagggtgatgatctggaggagggtgtc

SEQ ID NO: 198745 - DNA, 75 bp, Homo sapiens
agcacctgaagagatgccagcagatctctggaaacatggctacagaacatgttaatggaaatggtactgaagagc

SEQ ID NO: 198746 - DNA, 74 bp, Homo sapiens
cgcctcggaggcgttcagctgcttcaagatgaagtacgagctcaactggaggcagtcctgtgcggaaatctgaa

SEQ ID NO: 198747 - DNA, 100 bp, Homo sapiens
gcagtagatgatgatgtagcagaaggtgatttgatgaaggctgctgcaggagagttcgcagatgatccctgctcttctgtgaagcgaggcaacatggttc

SEQ ID NO: 198748 - DNA, 100 bp, Homo sapiens
catttggagtcctaggagagcatggccgaggagtcactgaacactatggaatcaatccaccagagaaacggcggagaacaattgaggatttcaacaaatt

SEQ ID NO: 198749 - DNA, 100 bp, Homo sapiens
actgaagaaccacctagaaataactcagcagaattctgaaaatgaggtcacgctgggaatctgcaagcagaatatgaccgtctaaagcagcagcacgaac

SEQ ID NO: 198750 - DNA, 101 bp, Homo sapiens
tttggttccaggatatactggtaatatagctaaggacattggctccctggattatcaagagtttgtagttgacattgaatccaggctgaggatggaaggtg

SEQ ID NO: 198751 - DNA, 96 bp, Homo sapiens
gtccagaaagcggcttatcgaacagagccgggagttcaagaagaacactccagaggcacattgcaagcaacccgtgccttgatggtggttggcatc

SEQ ID NO: 198752 - DNA, 100 bp, Homo sapiens
aacttcaagccaaacatcaagcagaatgtgatttgcttgaagatatgagttatccttaaaaagaagaggaagcaaagatttgccaaaatctgaaaaaaag

SEQ ID NO: 198753 - DNA, 100 bp, Homo sapiens
gctcagaaagatggatttttgcatgagacgcttctggacaggcatggagagtagaaaactgatttctgctacagacattcagtactctggcagtctgctg

SEQ ID NO: 198754 - DNA, 75 bp, Homo sapiens
ccatcatgcctgccatctcctcccagccccccacaggagaaaaatccagttacactcttaaaggaattgtcagtg

SEQ ID NO: 198755 - DNA, 82 bp, Homo sapiens
gttcttgtttgtggatcgctgtgatcgtcacttggtgcactttacaggtccccgatgaaccaagagaaccctccaccatatc

SEQ ID NO: 198756 - DNA, 75 bp, Homo sapiens
cacacgcataatggatgaaaggaaccgacagggcaaactctttgattctacaatagctgatgagggaacatggac

SEQ ID NO: 198757 - DNA, 83 bp, Homo sapiens
aagttaagataagaagtaatctggaatcagaaagcactacgctaaaattggcagagggggtcgatttgggaggaaaggtgtgg

SEQ ID NO: 198758 - DNA, 100 bp, Homo sapiens
ggtcgctggcggcgtggacacctgagtcccggggtaggggtctcccgcgaggtgtaatggataggtaacagagaagacctcgtcccttcctagtcagggc

SEQ ID NO: 198759 - DNA, 51 bp, Homo sapiens
ctagcaccagccccaaatttcgtgacactgtcatcccactttacatcccac

SEQ ID NO: 198760 - DNA, 116 bp, Homo sapiens
acttccagctcaggttggaaccataatggactcctcctatagtgccaataggacgctaacaagtgctggtaaagacctacaagataattttctgacggccctggcaatgagagaag

SEQ ID NO: 198761 - DNA, 82 bp, Homo sapiens
ttgcgttcgggctgggagcgtgctttccacgacggtgacacgcttccctggattggatggcgattttgctgacagctgccaa

SEQ ID NO: 198762 - DNA, 75 bp, Homo sapiens
ctcctcccagtgctgaagtcccaaggagccgccctgcagaaggaaggggagttcaccctgcacggccgggccatc

SEQ ID NO: 198763 - DNA, 75 bp, Homo sapiens
gcagttacagcctgtgcaacaaggctttgggacatccggaagaaagcagccatccagacatttcagaacacgtac

SEQ ID NO: 198764 - DNA, 50 bp, Homo sapiens
gtgactgaagagcttctgaccgataatagcaatggccaatgtacatggtg

SEQ ID NO: 198765 - DNA, 101 bp, Homo sapiens
ctaaagagtgggagatgtggtgcgaagaactgaagcaggaatggaaatttgtcagtgaagaatgggcctttggagtgacgctgtgggaactcatgactctg

SEQ ID NO: 198766 - DNA, 130 bp, Homo sapiens
cgagtcacggtcctgcctgcgaagaactcccagggcgaccttggggctgaggagtgggaaaaggctgaggaggtgtatcgtctgtatcagaactcgcccctctcctcccaccccgtggtggccctgtcag

SEQ ID NO: 198767 - DNA, 100 bp, Homo sapiens
accgaggccaggagaaagggaacgtttgcaggagaaataacaaggcattgaagaatggcagatgaacggaaagatgaagcaaaggcacctcactggacct

SEQ ID NO: 198768 - DNA, 100 bp, Homo sapiens
acaccagctccgaaatcaccaccaagacatgcttcagcttatcaacaaccaagacagtgacttccctggcctatttgacccaccctatgctgggagtggg

SEQ ID NO: 198769 - DNA, 100 bp, Homo sapiens
ggctcagcctctgccaggactctgccacggcaagctcattcggacaaacgcctgtggaaggcgcaatggcgaggaagttatctgtaatcttgatcctgac

SEQ ID NO: 198770 - DNA, 75 bp, Homo sapiens
atcacaatggaaagtcttgacttgactggagtcggatggtcagggctgccctttctgtcgttgtgaaataaaagg

SEQ ID NO: 198771 - DNA, 100 bp, Homo sapiens
gcgagtccttcatcagccgtctgctggccatcgtggcagacctctacgagcaggagcagtacagtgaaggtggtgtttttaaggctcatcttactttccc

SEQ ID NO: 198772 - DNA, 78 bp, Homo sapiens
gcggccctgctgaaagtggcgcaaatggtaagccaagatgggtgcatacaagtacatccaggagctatggagaaagaa

SEQ ID NO: 198773 - DNA, 100 bp, Homo sapiens
ggagggtcactatgtcattgggccaaagatagagattccggtacattatgcaggccaagtcctgtatctgccatgtctgtggcgtccacctcaacaggct

SEQ ID NO: 198774 - DNA, 100 bp, Homo sapiens
ggagacccgactgcaactgctggattgctgcaaggctgagggacgagaacgaggccatgtttttggtatactgtgcactggagaaagaacctgtgccaat

SEQ ID NO: 198775 - DNA, 74 bp, Homo sapiens
gggggattctcgacctgctaacagaactggaccttttcgtgatgtcttggttcgtgtccccactgctttctgga

SEQ ID NO: 198776 - DNA, 100 bp, Homo sapiens
tggagttcttacaacatggcagacattgacaacccatggaccaagcttctctcaaaaacagcgatgttcttgttctgacagggcttacccagatccccac

SEQ ID NO: 198777 - DNA, 126 bp, Homo sapiens
cagagaagaacttatcagagattgagaatgtccatggatttgtttctcattctcatatttcaccaataaagatcctgtttgaccaaactcagagatcaattaaggcacagcttcagaactttgtta

SEQ ID NO: 198778 - DNA, 74 bp, Homo sapiens
ggaaaagacaatctctatttggcacgtgcttcctgatgacaaggacgcatggggataaatttccatcatccagg

SEQ ID NO: 198779 - DNA, 100 bp, Homo sapiens
gtcatgctctttgtagcgtggtgcttctgttgctcacaggtcctccaaaagctggggaaagctgatgagacaaaagacgaacagttcgaagaatatgtcc

SEQ ID NO: 198780 - DNA, 51 bp, Homo sapiens
gacgcacacggcaccaaactgatcaccccttctgtgtcattctctgaggaa

SEQ ID NO: 198781 - DNA, 98 bp, Homo sapiens
atgttactttgccacttcttcacggaccagtttcagttcgccgatgggaaacccggagaccaaatccttgagaaatctgacagaatattttgtggctg

SEQ ID NO: 198782 - DNA, 75 bp, Homo sapiens
ccacccggagccagcggagggacaggtatgaagctaaaatgcagcggctaagaacgcggctctggagcttgacag

SEQ ID NO: 198783 - DNA, 75 bp, Homo sapiens
tgatgaaattgtagagaacttttgcagtgttgatgtgggtatttacctatgttggtgccttgtttaatggtctga

SEQ ID NO: 198784 - DNA, 74 bp, Homo sapiens
gctggaatttgcgttttatgtcattgaacagtttctgtagaaaatgtttcctgactgcaatgagggaaagcgga

SEQ ID NO: 198785 - DNA, 100 bp, Homo sapiens
tccgagcccacaaggctggccgagccgtggatgtcgctgaattgcccgtgcccccagttccagggtcacccccgagaggacaacaggcatctggaagtgc

SEQ ID NO: 198786 - DNA, 75 bp, Homo sapiens
tctgaagtggaaatgcaatgtaccttaaggtgtggacactgccagcggctgcagccgacttggaatgacctggga

SEQ ID NO: 198787 - DNA, 98 bp, Homo sapiens
ccggtccgggcggttgcgtccaccccgctgagctggtcgccacctggcgacccttcccctccagtcacctggattgcagagggaatggcatacatcga

SEQ ID NO: 198788 - DNA, 100 bp, Homo sapiens
ttccccccagctccctgtgcagatgcagccagcaggaaaggttctgccattacaggaccagtagcaaaggagtgtgcagacttgtggccccggattgcat

SEQ ID NO: 198789 - DNA, 75 bp, Homo sapiens
ctgcggctctcactgtgcgggctgctgctccagagggcggagattgaagaattagggtctgaaggaaaagtagaa

SEQ ID NO: 198790 - DNA, 80 bp, Homo sapiens
caaggggccagcttggtgtcgccttcgttcttctgccaccccattcgattcttcgctgctgctgccttaccgccgagaac

SEQ ID NO: 198791 - DNA, 100 bp, Homo sapiens
tgggagaagaggaatgttccctgacaatttcgttaaggctcaggctgcacgaagaaaaggttattaaagatagacgtcatcatctcaagacctacccaaa

SEQ ID NO: 198792 - DNA, 78 bp, Homo sapiens
gcctggcactggccaaggagattgctctggcaggctgccctgagcacgctcaaccccaaccccacggacagctgtccc

SEQ ID NO: 198793 - DNA, 100 bp, Homo sapiens
gccccttgcagaagacgccgtacgaggctaatagctcgtcagcttgctaaaatccatgctattcatgcacacaatggctggatccccaaatctaatcttt

SEQ ID NO: 198794 - DNA, 82 bp, Homo sapiens
ctggagatcctttcctgcttttggtttccctggcaggggttgaactgtggagtgtgtggatatttgatcctgatgaccttta

SEQ ID NO: 198795 - DNA, 98 bp, Homo sapiens
gaccaataaaaataaactgcttgaacatcctttgactggttagccaggaatacaaacagaagcttgcacgagtaacccaggtccgcaaggaactgaaa

SEQ ID NO: 198796 - DNA, 100 bp, Homo sapiens
gacggactgacggccagcacagccggctccgggatgagcgcacggacgggctgaagccgacgtagcttctctgaacagacgcatccagctggttgaggaa

SEQ ID NO: 198797 - DNA, 83 bp, Homo sapiens
gcccaagagcctctggtgtccggggtgctttcggagcccgaagttttgctcccgatgaggacggggacttggttgccttttcc

SEQ ID NO: 198798 - DNA, 100 bp, Homo sapiens
ggggtttcggactactattctcagttgatctacaagttggaatgttaaagaaattcatcaggctgctgactatctcaaagtggaagaggtggtcactaaa

SEQ ID NO: 198799 - DNA, 90 bp, Homo sapiens
gagaactccgctcgttctgtgcgttctcctgtcccagattctggacaatcaggaagtccaagccacaatgatcctgccaagaatcctcca

SEQ ID NO: 198800 - DNA, 83 bp, Homo sapiens
cttagctgtgctcgcgctactctctctttctggcctggaggctatccagcagcactgacacggctcccgggacctcggcagga

SEQ ID NO: 198801 - DNA, 90 bp, Homo sapiens
tcagacatttggcgtgctcagagctctgcttatgataatgtcaacaaagttcgagtagctatcaagaaaatcagcccctttgagcaccag

SEQ ID NO: 198802 - DNA, 74 bp, Homo sapiens
cagtggtcgcttcttctccttgacaggaatttgctgttgctggctatgaattctgcatttcaactctagaggaa

SEQ ID NO: 198803 - DNA, 82 bp, Homo sapiens
ccagctttgacgacctcattgcgtgtgtgtcggcgcccgacagtctgcaaggggatatgagactttctactcggaatatcct

SEQ ID NO: 198804 - DNA, 90 bp, Homo sapiens
aaagacaggagtggagtgatatcagacaccgagcttcagcaagctctctccaacgctccaccagcccattggagaaaagttactgttcag

SEQ ID NO: 198805 - DNA, 50 bp, Homo sapiens
atctggagcttttcccctccccggatacagtttatgtaacttgatggaag

SEQ ID NO: 198806 - DNA, 82 bp, Homo sapiens
ggaatttctcctggggctcagagtgttgtacatcctggagacctgaagaattctgttgaagtcgcactgaacaagttgctgg

SEQ ID NO: 198807 - DNA, 50 bp, Homo sapiens
gagcaagagctggatctcgtctttctactggatacacgtctgtttaacta

SEQ ID NO: 198808 - DNA, 73 bp, Homo sapiens
ttggcgcctttaggacatacccaaagggaagaacagtgattattgagcagagttggggaagtcccaaagtaac

SEQ ID NO: 198809 - DNA, 100 bp, Homo sapiens
cctcaatgagcacatgaccagcttagcttctgtcctaaagacagatgtgctggtgctgagctgtgatctgataacagacgttgccttacatgaggttgtg

SEQ ID NO: 198810 - DNA, 74 bp, Homo sapiens
atagaaagcttttaaacaagcatggaattaaaaccgtttctcaggttgaagaagaggatgaacttgaatctgga

SEQ ID NO: 198811 - DNA, 141 bp, Homo sapiens
ctaattgggattccagaggaccagcggttacaaagaactgaggtggtaaagaagcatatcaaggctccaggttatggagatgttaggttgtctttggaggcaataccagataccgtaaaccttgaagaaccttttcatatt

SEQ ID NO: 198812 - DNA, 98 bp, Homo sapiens
acctgaggatccagaaaccgccccagcgatggaagaggatcaggagctggagagctcctcaagagttactgatctatgaaatggcagagaatggaaaa

SEQ ID NO: 198813 - DNA, 98 bp, Homo sapiens
ccaaatggttctgtgcctcctatctatgtgcctcctggatatgccccacaggctccttgaagttcgtggaaggctgtatgagcttctaactcattgta

SEQ ID NO: 198814 - DNA, 88 bp, Homo sapiens
gccccagcagcccccgaaggccctatcaggacatggagtatgaaagacggtctggagtggtctgccgagtcaagtactgcaatagcct

SEQ ID NO: 198815 - DNA, 100 bp, Homo sapiens
ctccgccgcgatggtgacccggttcctgggcccacgctaccgggagctggtcaagaactgcgagcagctgatgcagctgtacagtgcgcgccagcggcgg

SEQ ID NO: 198816 - DNA, 100 bp, Homo sapiens
aagcctcccccatacctgcggaacctgtccagcgatgatgccaatgtcctggtgtggcacgctctcctcctacccatggagtggtttaataattataaaa

SEQ ID NO: 198817 - DNA, 106 bp, Homo sapiens
aaaagttagaattttcagatttgtaactggaaaactcatgagagtctttgatgaatcactaagccagcctgagggaactggcatgatagatgaagagttcactgtt

SEQ ID NO: 198818 - DNA, 82 bp, Homo sapiens
ctggaccaggtgctgggccgcttcttcctctaccacatccacctgtggatcagtgtcgtgaaaactacccctaaaagccaaa

SEQ ID NO: 198819 - DNA, 100 bp, Homo sapiens
cggcgtgggcgcggagcgggcggccgccaccgagcgtgctgagcaaccgcagcctccgcggccgagagtgcagcgaacttaattcagtgcacaaatgaga

SEQ ID NO: 198820 - DNA, 82 bp, Homo sapiens
cggattcgccgaggcaccgaggcactcagaggaggagagaacattgaaagtattctctaagctatttgaagagagtgactaa

SEQ ID NO: 198821 - DNA, 82 bp, Homo sapiens
attgtgtctgcttggtgtggagccatgaagcctcccgcgacgatgcccctcaacgttagcttcaccaacaggaactatgacc

SEQ ID NO: 198822 - DNA, 100 bp, Homo sapiens
ccggatccgatcccgctctgcacattccaaaggcagttttccaagagataacttcaccaagatgtccagtgataggcaaaggtccgatgatgagagcccc

SEQ ID NO: 198823 - DNA, 100 bp, Homo sapiens
ctactggagaccactttaggcgacgtcgtcatcgacttgtacaccgaagaacggccgcgtggaaaaccagtagattcccagacatcgcgaagtgaatctg

SEQ ID NO: 198824 - DNA, 90 bp, Homo sapiens
cagcgcttcctgcggaccggggcggccgtcagtggtggacttgctttgtgaagagacagttcatgaacaagagtctttcaggacctggac

SEQ ID NO: 198825 - DNA, 76 bp, Homo sapiens
gacatatcccagatatgtgtagaggaggacagattctgcctgatcaatgcaggagtcctgtacctctacttcagca

SEQ ID NO: 198826 - DNA, 95 bp, Homo sapiens
gggccccagcagcccccgaaggccctatcaggacatggagtatgaaagacgggataaacgcccaggcccggaggctgcagcggagtcgcgcgaag

SEQ ID NO: 198827 - DNA, 82 bp, Homo sapiens
ctctttgacgctgcctacttcgggcagaaggactctgtgtgtggtactctgtggatatccccttggacaaaactgtcgtcaa

SEQ ID NO: 198828 - DNA, 98 bp, Homo sapiens
catcctgggcaaacctgcggaccaagagtgagccatggagctacgtgtggggaacaagtaccgcctgggacggaagatcgggagcgggtccttcggag

SEQ ID NO: 198829 - DNA, 75 bp, Homo sapiens
tggatcagtttctttgtcatgtagccaagactggagaaacaatggaactctaatgatccaggacaaagaagttac

SEQ ID NO: 198830 - DNA, 100 bp, Homo sapiens
aaggcagatttccctccttcgtcgctgttgctgccgccatacgcgctctccctgtttaggtgccatgtttcagaacagagtaagacccctggtaaagaag

SEQ ID NO: 198831 - DNA, 75 bp, Homo sapiens
gaggagaggagcgtcaacagcagcaccatggtgatttaaagggagtgatagtcactctgagtgatgatggtcact

SEQ ID NO: 198832 - DNA, 83 bp, Homo sapiens
cagggaaccctggtcaccgtctcctcaggctttatcctgtggataaacgcagagtgaacgagtttggggagtcctacgaggag

SEQ ID NO: 198833 - DNA, 99 bp, Homo sapiens
agtaagcgggattttatgctgatcacaaacaaatccttgaaagaagaagatggagaagaaatagttacctatgatcgtcacagtgctgtcgatatcacc

SEQ ID NO: 198834 - DNA, 83 bp, Homo sapiens
ggccccgagtatgcttcgtttttcgccgtcatgggcgcctcggccgccatggtcttcagcgattttgcaagaacgaggctcaa

SEQ ID NO: 198835 - DNA, 82 bp, Homo sapiens
tgatattgaaacaattggagaaattctgaagaaaatcatccctaccttggaagaggtgcccgaaatcaggtggtgataagag

SEQ ID NO: 198836 - DNA, 87 bp, Homo sapiens
cacatccccccgggctacatctcacagggcatatgcctgagcgtttcgatgccttcatctgctattgccccagcgacatccagtttg

SEQ ID NO: 198837 - DNA, 98 bp, Homo sapiens
acagaagaatacaaagttccagatggaatggttggattcaagaccgatcagaaaggatttcttaactggcactgctggcagagacggagaccgcggct

SEQ ID NO: 198838 - DNA, 101 bp, Homo sapiens
cgccaacaacaagaagattgccaaggatgtcttcaagaagggggaccaggcctaccttactgacatcgtgaacacggcccggcccgacgagaaggccataa

SEQ ID NO: 198839 - DNA, 75 bp, Homo sapiens
tcggggtccagcacagatgatggcgacagcggagaagggaagataaacccgggacccacttcactccagtgcctc

SEQ ID NO: 198840 - DNA, 90 bp, Homo sapiens
aaacgtgccaaaacagtggttttgcatatagatggccttgatgatacgattacgggcagggacgacctgtcaaagcgcggagtggaccaa

SEQ ID NO: 198841 - DNA, 82 bp, Homo sapiens
gaggccgcctggggtagcggcggcgggagtcctggcgctctgcaggtactccaaagattcaggtttactcacgtcatccagc

SEQ ID NO: 198842 - DNA, 98 bp, Homo sapiens
cagaagcatgtgtcttccccagctctgcagccacatactatccgtttgttcaggaaccaccagtgacagagtaatttcatctgtgccaaagcctccag

SEQ ID NO: 198843 - DNA, 100 bp, Homo sapiens
gctgggagaggaaacttgatgcttctgggccaccatttgccagggcctcgctcgaggtttccatggatctcaatagtgccagcactgttgttcttcaggt

SEQ ID NO: 198844 - DNA, 75 bp, Homo sapiens
cagatccgcatgtgcaagcccccggacaatgcagatcttcgtgaagactctgactggtaagaccatcaccctcga

SEQ ID NO: 198845 - DNA, 83 bp, Homo sapiens
gccgtgttcgacatcctggccgtgctgcagggtctccctccactgctgtagtaacccgggtccggggcctcggtggtgctcct

SEQ ID NO: 198846 - DNA, 75 bp, Homo sapiens
tgtgtggcgatggtcttcctgctggggctcatgtttgagaaatattgctgacactgctgaagccagttgcttctt

SEQ ID NO: 198847 - DNA, 75 bp, Homo sapiens
tggggctcccggacctggaggtcaaggactggatgcagaagaagcgaaggtcagccatgtcatctgagcctcccc

SEQ ID NO: 198848 - DNA, 100 bp, Homo sapiens
gaacacagcctcagaagggtgacttcacagagaatgcagttgtcttgacttcaggtctgtctgttctgttggcaagtaaatgcagtactgttctgatccc

SEQ ID NO: 198849 - DNA, 90 bp, Homo sapiens
gttggtactcgccatgaaactcaaagatcgagaggttaagtagcctgtcttctctgggagattctgcaccagagcgcaagtccccttccc

SEQ ID NO: 198850 - DNA, 96 bp, Homo sapiens
cttcaatatagatgatcagtacttgcttgggaacttactctcttttggagtaaattacaacaaagagtagaaccatctatacaagtgtaccttgag

SEQ ID NO: 198851 - DNA, 83 bp, Homo sapiens
agtgttgctggaacggttcggatagtctgttctctggggaggcagtaaggggccgtggagctggcctcggcctcggcatcggg

SEQ ID NO: 198852 - DNA, 87 bp, Homo sapiens
gaccgagagcgcgaatatcgtcatcgttagaagtggctgtttggtggccattctccgtccctaggactgcccccctcttccacagtg

SEQ ID NO: 198853 - DNA, 74 bp, Homo sapiens
agcatggccccaacacagacctgcttggcacctcacccaaagcctcactggactcagtggagaaggagttggac

SEQ ID NO: 198854 - DNA, 97 bp, Homo sapiens
tgctcaaagagctgcaccgcttcgagtctattgccattgcccaaggagtatgctgctgctgttccgctttgcgtcctcgctacaaacgcctggtgga

SEQ ID NO: 198855 - DNA, 96 bp, Homo sapiens
gcgagccagataacggaaaggagtgtggtccaggcacgcaagttcaagaggttgtgtgcatcaacagtgatggtgtgatgaatgcagactctgcta

SEQ ID NO: 198856 - DNA, 100 bp, Homo sapiens
ccagcttctgctgtccttctttgtggagagcaaggtactggtgtggcatactcggacagagaagcccaagatgaagcaggaggagcagctgcagcggcag

SEQ ID NO: 198857 - DNA, 100 bp, Homo sapiens
ccgggccgccgacgatgccgcggggccgccccccgaagcccagggagagcaaggcgcgcggcgactccggtgtacgaagccatcgacagcagagatggag

SEQ ID NO: 198858 - DNA, 82 bp, Homo sapiens
ccccgcgcgcccggccggcccggagcaccgagctcgcggcacggtaggagatgatatcatcaagttgaatcgaaaggaaggg

SEQ ID NO: 198859 - DNA, 97 bp, Homo sapiens
cgttggagtccaacctatgatgtgtcttccattctaacatccatacagggttcccttctggagaagagtcaccgggtttggttctgtttcccctttc

SEQ ID NO: 198860 - DNA, 87 bp, Homo sapiens
tcccagtgacgggtctggagtgcgtgggggaccggctgttggcgggacttatcaaactggtttcaaagcacagagctcaagtaattt

SEQ ID NO: 198861 - DNA, 83 bp, Homo sapiens
ccccaagcaacttagaatgcagcttcagcagaggctgcagggccagcagtctcttgcatggcaccaagaatgttaccaattca

SEQ ID NO: 198862 - DNA, 100 bp, Homo sapiens
acccacgttctagtcccgcctctgtcatttcctagagctgtggcctcgggtcacgaaatggattggagtgaaccggagaccccgaaaacggaagcgcagg

SEQ ID NO: 198863 - DNA, 90 bp, Homo sapiens
attatttcggacacatctggtgacttccgcaagctgatggttgccctggcaaaggaactgccactttcaccatacagaaaaaagctggtg

SEQ ID NO: 198864 - DNA, 98 bp, Homo sapiens
ggaggatgatttcatgtgcgatgatgaggaggactacgacctgcaataatgacgatgaggacctgacaccagagcagaaggcagagcgtgagaaggag

SEQ ID NO: 198865 - DNA, 75 bp, Homo sapiens
cggagccggagccgcagaggctcccgggctggactcaggcttctcagccgtgctggtatagaggactctaagaag

SEQ ID NO: 198866 - DNA, 100 bp, Homo sapiens
tcggtattgcatgaagtcatggaacagcagactctgtccattgcaaagattgacttacgcaggattctcagcccttgcctgggagaacagttcaggagac

SEQ ID NO: 198867 - DNA, 82 bp, Homo sapiens
tgctccaggaatgggacctcgagtcactgtggtgaaaggaaagcaagccaggatggatatttacgacactcaaaccttgggg

SEQ ID NO: 198868 - DNA, 83 bp, Homo sapiens
tagaacagctttatgaaacagcttgcttcctacagggtaattttgggagtgtggagatgtgccggtatgaccctctacaggac

SEQ ID NO: 198869 - DNA, 75 bp, Homo sapiens
caagccgtggaataggtgtatcaagtaatggtgcaaagcctgaaatgcctgaagagccaaagctgactttggatg

SEQ ID NO: 198870 - DNA, 83 bp, Homo sapiens
tgcatttttcttcatcatcatttacctgggaccaatggttttgatgataatcgtcagcccaaggctgccccctcggtcactct

SEQ ID NO: 198871 - DNA, 110 bp, Homo sapiens
cagcggccgagcgggcggcttcctggcctgggcgctccggtggcggcggagcccagctcaacattggcaatgtgctccctgtgggcaccatgcctgagggtacaatcgtg

SEQ ID NO: 198872 - DNA, 99 bp, Homo sapiens
cgctccgcctggcggggcttcccacccagcaggtatccgttacagcactgatgtgagtgtagatgaagtaaaagctttggcttctctgatgacatacaa

SEQ ID NO: 198873 - DNA, 100 bp, Homo sapiens
cacagcgcctcgagggccggccagacggccgtgttgagactgagctaaagttaatctgttgtgacattctggatgtactggacaaacacctcattccagc

SEQ ID NO: 198874 - DNA, 74 bp, Homo sapiens
gccagggaaccctggtcaccgtctcctcaggctttcaaggggggctgcaaagctcctcatgctatgatatcttc

SEQ ID NO: 198875 - DNA, 50 bp, Homo sapiens
aacaagtactgatggaactaaaaactgtatgcagtggaactgatgaagac

SEQ ID NO: 198876 - DNA, 95 bp, Homo sapiens
gaaaccacttggatgactgcagttggtctttcagagatggcagcagaagctgcatatcaaactgatacccaggtgttctctctgatgtccaggag

SEQ ID NO: 198877 - DNA, 82 bp, Homo sapiens
gagattattgataattctcaaggattctacgtctgtcaaagctcgaaaaacagcagcagaggaaagaaaagaccagagctaa

SEQ ID NO: 198878 - DNA, 100 bp, Homo sapiens
ccggaagtcaccattggagctcatcagactgaccgtgtcttacatcagttcagagaggtctaggcgttttacactgagattctccactgccaccctttct

SEQ ID NO: 198879 - DNA, 100 bp, Homo sapiens
tcacccgtcttgttcaaagcagcatgcggtctttcaatatcggtgggatgctatggaatatgatgagaagctggcccgtttccggcaggcccacctcaac

SEQ ID NO: 198880 - DNA, 82 bp, Homo sapiens
tgcctttgttgattaactggacaaattcagattatggattggatatgtctacttctggatgcaaattttactgttgttgtaa

SEQ ID NO: 198881 - DNA, 74 bp, Homo sapiens
agcaggagctttttgcttagcactgaaaattctggataatggtgaatggggaacactgactatgccaaatggag

SEQ ID NO: 198882 - DNA, 83 bp, Homo sapiens
aagggccgaagccccgccagcccagctaaagcagacggctcgcactgcgacccgaaggtgatgagctatatttagaagattca

SEQ ID NO: 198883 - DNA, 75 bp, Homo sapiens
gcgccggaacaccattcttcgccaggccaggaatggaaatcgtgatgagaaccagagtataaaccaccaaatggc

SEQ ID NO: 198884 - DNA, 110 bp, Homo sapiens
gccagttatccacggactggaagatcaaaagagggtggttttggaatgtatgcttaaaaaagacctcatttataataaggtcactccaacatttcaccactggaagattg

SEQ ID NO: 198885 - DNA, 74 bp, Homo sapiens
gctgcggcgcggggaccgctgtgctctcgccacccgtgggacacggtcatccaggcggccatgcgcaagtaccc

SEQ ID NO: 198886 - DNA, 75 bp, Homo sapiens
cccctgtgtgccccctccccacgtggcacagcatgtcctctcctcttggaaaccatgcatggtcatggaggctat

SEQ ID NO: 198887 - DNA, 82 bp, Homo sapiens
aatcctggatggaagatagcttgaacagggctgacaacatttttccttttccgcatcttcatgatacagttaagaggaatct

SEQ ID NO: 198888 - DNA, 58 bp, Homo sapiens
gtgaaccactgcacccggcgaggaattgaatgatctggcacgggaccctccagcacag

SEQ ID NO: 198889 - DNA, 50 bp, Homo sapiens
caagaaggggagtgcccgcggcagcaacttccctgggagagggaaagatt

SEQ ID NO: 198890 - DNA, 82 bp, Homo sapiens
gcagacttggccaaatggacgggactattaaggtgacttaagagattaaaattaatttggttgctgttggttctgaacaaat

SEQ ID NO: 198891 - DNA, 74 bp, Homo sapiens
ccggggcaggggcggaggcggaggcagaggtggaggcgctttgaaagaattcagatcaggaaggaggtggaaag

SEQ ID NO: 198892 - DNA, 74 bp, Homo sapiens
cctgcagactcgggccgtggccgcctacagacaatgcagatcttcgtgaagactctgactggtaagaccatcac

SEQ ID NO: 198893 - DNA, 82 bp, Homo sapiens
tttgctcctgcgccgcgttctagagcaaggtcaaaatgcagatcttcgtgaaaacccttaccggcaagaccatcacccttga

SEQ ID NO: 198894 - DNA, 90 bp, Homo sapiens
ctcagggctacggtgccccgccacagttcagaaggtgctcgggtcttcggggcactgggtcccatcggtccctcctcacctgggctcacc

SEQ ID NO: 198895 - DNA, 88 bp, Homo sapiens
gaatatctgctccatgtaggagctcagaaatcagctcaaacatttttatcagaggaccttgaggaattggatccagattttatcatgg

SEQ ID NO: 198896 - DNA, 90 bp, Homo sapiens
ggaaggcagctattctcaggatatgacaggggtaacacccttccagatgatttttgaggtgaccaagaatatggcccaggtgaccaaagc

SEQ ID NO: 198897 - DNA, 90 bp, Homo sapiens
gaagggctctcctgatactaacagttttacgatttaaaacttcgccagaatttatccctggttaattagaaaagaccacaagaaaaacaa

SEQ ID NO: 198898 - DNA, 90 bp, Homo sapiens
gatcaccacacttcccaaaattgacaggaagagagaagggcacagttacctaagtatcaacgtaatcttcctcggccaggacaggccccc

SEQ ID NO: 198899 - DNA, 75 bp, Homo sapiens
gggctgtgctccatggcgagctgggcacagttggtggatctgaaatctgaactgacagaaacccaagcagagaaa

SEQ ID NO: 198900 - DNA, 82 bp, Homo sapiens
tggctctggctgtgcgcgctggcgctgagcctgcagccggccctgccggggcaccaccacgaggcgatttgtgggccatacc

SEQ ID NO: 198901 - DNA, 100 bp, Homo sapiens
cgcattttggcattgacatttaattttagggtcctttatatagaagggagagtagactgaaactgttgaggagcccatggaggaagaagaagcagccaaa

SEQ ID NO: 198902 - DNA, 80 bp, Homo sapiens
aggaggcggcggccgacggtggcggcgggatgcagctccatgatgcgttatctgggtctggaaacccaaaccctcaagga

SEQ ID NO: 198903 - DNA, 114 bp, Homo sapiens
acgagatcttcatctgtcacgccaacgtcatccgctacatcgtgtgcagaaattccgggtagatatgcctggctcaggcagtgcattcatccccaccatcaacgccatcacgac

SEQ ID NO: 198904 - DNA, 97 bp, Homo sapiens
ttttcccaacagacgaacacaaagcagacttcatttccacagttgtttcaggatcactttttctggggctgaggagaggagtcactcacaatttttg

SEQ ID NO: 198905 - DNA, 50 bp, Homo sapiens
tggcagagtaagggtgacttggcaaatggcatcttggacaccacggctct

SEQ ID NO: 198906 - DNA, 100 bp, Homo sapiens
gttcttatacaagtcaacagtctagcagatcagccagtctctttcatcatcaagcagacatactcaaggcatttgacattatcacagactgacatggcag

SEQ ID NO: 198907 - DNA, 75 bp, Homo sapiens
gaagggcggacacctccacatcgccttttgccacctttccctttatttccggagcctgcctagggtagttaaaag

SEQ ID NO: 198908 - DNA, 50 bp, Homo sapiens
tgcataatgctctggcaaatttgttgatgcggatgaaattaaaaggctag

SEQ ID NO: 198909 - DNA, 75 bp, Homo sapiens
agagcggaggccgcactccagcactgcgcagggaccgaggctgggaggcggcagaatgcagccagaggagggcac

SEQ ID NO: 198910 - DNA, 83 bp, Homo sapiens
cgcggagggactgcaccttctccatcaggtgcagaagagagtaatgccttctagctttttcctgctgttgcggtttttcttga

SEQ ID NO: 198911 - DNA, 73 bp, Homo sapiens
cccagaggcgagccctggtggaggaagaggtggagcttctggtgatgaaggccctttcggtggggctggtgaa

SEQ ID NO: 198912 - DNA, 95 bp, Homo sapiens
ggaggacctcactgagatcagggacatgttgctggccaataaggtgccaaattccccatcaagtggacggctccagaagctgccctctatggccg

SEQ ID NO: 198913 - DNA, 100 bp, Homo sapiens
atttacactgggcaacgtggttggaatgtatctggctcagaactatgatggtcagagcacttactctaggcagatcaagcaagttgaagatgacattcag

SEQ ID NO: 198914 - DNA, 83 bp, Homo sapiens
gacgcgcccgcgcccccgcggctggagggtggagggtgtgaagacagagaatgaccacatcaacctgaaggtggccgggcagg

SEQ ID NO: 198915 - DNA, 100 bp, Homo sapiens
ccccaaggttgccaaatgcacagccaagcctagcagctcgggcaaggatggtggaggcgagaacactgaggagacagagtttcactcctgttacccaggc

SEQ ID NO: 198916 - DNA, 100 bp, Homo sapiens
ctcaaacttcactagccccgtcggcgcggacgcttgtcgagaatgcagattcctgggtactgccagatacggtagacagattggaagtcgtcaacaagcg

SEQ ID NO: 198917 - DNA, 83 bp, Homo sapiens
cagagaccggcttcaatatcttcacccagcatggaaccacgtgaatgttgagggggcgacacacaagcaggtggtggacctga

SEQ ID NO: 198918 - DNA, 98 bp, Homo sapiens
aagtaattatttatggaaaacaagttataatcaatctggccggaagctgagaggaaaagccttttattttgtcaacggcaaagtgttttgtgaagaag

SEQ ID NO: 198919 - DNA, 51 bp, Homo sapiens
ttggaagagaaagaagtttgtaggagccgggtgtgggctgagccctgcctg

SEQ ID NO: 198920 - DNA, 101 bp, Homo sapiens
ggacaggggccgcgccgctgccgctgctgctggtgttagcgctcagtcaagccatctcaatcagtgaccacactgcccttgctcaattctgcaaagagaag

SEQ ID NO: 198921 - DNA, 100 bp, Homo sapiens
aggccccctcaccatcctagaggtcaagatcagctctggctaggttgctgttgaagaaatctggttgcagaacaccacggattgaattggaagagatggg

SEQ ID NO: 198922 - DNA, 82 bp, Homo sapiens
cacgcacgggatccagagcgccgcgcacttcgtcatgttcttcgcgccctggatggtgctgctccactggtgcctgctgtgg

SEQ ID NO: 198923 - DNA, 87 bp, Homo sapiens
cggcgagccacgggggccgccgcagcaccatggcgaccaccgtcagcactcagcgcgggccggaagaaaacaggcagattttggcgc

SEQ ID NO: 198924 - DNA, 97 bp, Homo sapiens
tagaactggcgattggacgatttgaaagtgaagatttgacctccatagttatggagtcttgctctcttgcccaggctggaagtgcaatggtgtgatt

SEQ ID NO: 198925 - DNA, 75 bp, Homo sapiens
gcctgggagaagcagcagagaaaggtggcattggtagggtggtcaacggagccttcatggtgctgaaagggcatc

SEQ ID NO: 198926 - DNA, 95 bp, Homo sapiens
acctgggccattggtgaaatctgcatgcagatggggccaggagatggcgaggtccgtgggcgcggtggcctacctcgagtgctcggctcggctcc

SEQ ID NO: 198927 - DNA, 90 bp, Homo sapiens
cccagctgagaggagaggcgcccccggggacgtggcgttttaccttcagccactttgtggttgaccctgaccaggaatatgaggtgaccg

SEQ ID NO: 198928 - DNA, 100 bp, Homo sapiens
tcagttacttcatcgtctccatcctctacctcaagtatgagccaggtttttcttcccccagtccctcagctgctgctgctgctcaggaggtcagatctgc

SEQ ID NO: 198929 - DNA, 75 bp, Homo sapiens
gacctcacatcaacttctaccagctgactctggtggagcaacgttcaggtggttcaggaaagggcagcaataagg

SEQ ID NO: 198930 - DNA, 90 bp, Homo sapiens
ccctgggcggcttgacggagtcgacggccgtggagctgcccgactccttctcccctgaactacgctccctgctggaggggttgctgcaga

SEQ ID NO: 198931 - DNA, 75 bp, Homo sapiens
cgggagacgagaagcctgaaaagtcgcagcgagctggagccgccggagataagtgccatagagttcatttccatt

SEQ ID NO: 198932 - DNA, 121 bp, Homo sapiens
gaatctaccagtgccttgatcttggacttcctagcctccagaaccgtgagaagtaaatttctgtttggcttccgttacaagatgaggtctgtgtatgctcacttccccatcaacgttgtta

SEQ ID NO: 198933 - DNA, 74 bp, Homo sapiens
gttcgaattaactctcccaattcaaagatactgagccttcataagggttgactacctcagatttgctgcactca

SEQ ID NO: 198934 - DNA, 75 bp, Homo sapiens
gctggccccgccgcccgccctaccccccaagcagcggcagctggaaagaccacagcaagattctttcattcgtct

SEQ ID NO: 198935 - DNA, 99 bp, Homo sapiens
aaacgggcaataagactctttaaagaaggcaaggagagaatgtatgaagaacagtcacaggacaggtagacgttacatccaagaggaaataatccaggc

SEQ ID NO: 198936 - DNA, 83 bp, Homo sapiens
atcccatctaccgcaactctcagttcgagagtaaagttgatattcactgatggactccaaagaatcattaactcctggtagag

SEQ ID NO: 198937 - DNA, 76 bp, Homo sapiens
gtcggggtggtggcttctcggaaccgagccccgacaggctatgacgtaatcaaatgatgccgtttggaaaaatttc

SEQ ID NO: 198938 - DNA, 87 bp, Homo sapiens
catggagggagctgctttgctgagagtctctgtcctctgcatctgatattaataaggcagcggaaagaagaaatatgaatacggctc

SEQ ID NO: 198939 - DNA, 50 bp, Homo sapiens
gaaaaggggagtggaaacacattaagtgaaggtacaagtaagaagctggc

SEQ ID NO: 198940 - DNA, 100 bp, Homo sapiens
atctgcagaaagattatttttgctgattaaaaagcagtttccacttattatttcttctgtaagtaaagttctttctacaacttcaacaggctgcactgga

SEQ ID NO: 198941 - DNA, 101 bp, Homo sapiens
gtgaggaggaaccctcgcaagggcagaaggttgaagaacaggagaagcacgagttctctgtggacatgacctgtggaggctgtgctgaagctgtctctcgg

SEQ ID NO: 198942 - DNA, 50 bp, Homo sapiens
gctaaggaaaccctattacctccaggatgacccctccggcgaaggtgtcc

SEQ ID NO: 198943 - DNA, 83 bp, Homo sapiens
ccggaatggagaaggaagaggagtcgctcatgtgctcctcggtgcagaaggccttgtttgaggaggaggaccacgtcaagaaa

SEQ ID NO: 198944 - DNA, 100 bp, Homo sapiens
ctcgtcgacatgagtgatgtggaggaaaacaacttcgagggcagagacagctgggaagtggtggaaggactgaggggggagatgaattacacccaggagc

SEQ ID NO: 198945 - DNA, 75 bp, Homo sapiens
ccaagatccttaagttcgtcgtcttcatcgtcgcggttctgctgccggtgagaagccctaccactgcaactggga

SEQ ID NO: 198946 - DNA, 82 bp, Homo sapiens
gttcaaccgtgacgtgctcgattacagaatgtctgaaggggacagtgtgggagaatccgtccatgggaaaccttcggtggtg

SEQ ID NO: 198947 - DNA, 103 bp, Homo sapiens
ccaagacagtggagtgggactggaaactgctcacctatgtcatggaggaagagtcttcccaagggattgttgaagaaacttctgaagagggaaactctgtacc

SEQ ID NO: 198948 - DNA, 136 bp, Homo sapiens
aagctttctaccctttactccctgcaaagaaacaagagtgcttatcccagctaagctccaggacccttcttcagcatcttccctgggcattgctgtgagtttaggccggcccgttttgagcaggagcagcagcgga

SEQ ID NO: 198949 - DNA, 50 bp, Homo sapiens
cttcaacccatcagcgccccagccataaccagcagaccacagcattcagg

SEQ ID NO: 198950 - DNA, 76 bp, Homo sapiens
ttcgtccccgctctgcctcacccagcgtctgaccaaacacaccaagttcgtgcgggacatgattcgggaggtgtgt

SEQ ID NO: 198951 - DNA, 101 bp, Homo sapiens
tgggagaggagaagagatgctggcgtgaagggctgcagaagaaagatcagcaactggagcctaaaaaaagtaccagccctaaaaaagctgcggagcccact

SEQ ID NO: 198952 - DNA, 50 bp, Homo sapiens
tggccaaggggtccttctactcctaaaatggccacatctgttgctcagtg

SEQ ID NO: 198953 - DNA, 133 bp, Homo sapiens
tctcatattacatgggccagcactgcttcatccgggaagtgcttggggatggagtgcctccaaaggttgctgaggtcaaaatgcagatcttcgtgaaaacccttaccggcaagaccatcacccttgaggtgga

SEQ ID NO: 198954 - DNA, 100 bp, Homo sapiens
gcgctacgggcttgactcccccaaggccgaggtccgcggccaggtgctggcgccgctgcccctccacggagatcatggaagggaagtggttgctgtgtat

SEQ ID NO: 198955 - DNA, 50 bp, Homo sapiens
ctcccgagtagctgggtttacagttactaaaagatgtaactgaactgcag

SEQ ID NO: 198956 - DNA, 100 bp, Homo sapiens
gacggaaatgtgtcatcgaaagccaggatccagagctggtgcggaacatctgccgctgggttaggcaagctgttcagattcctttttttgccaagctgac

SEQ ID NO: 198957 - DNA, 75 bp, Homo sapiens
ccgcttccgacagaactgaatgtaacttcaccgagtaaagaggagtctccttgctcggattgaacgtatggaaag

SEQ ID NO: 198958 - DNA, 50 bp, Homo sapiens
ctggttcaccccgtggtcgaggagtcggctcctggtccccaccccacccc

SEQ ID NO: 198959 - DNA, 75 bp, Homo sapiens
tggatatcttcggggacctgaagaagatgaacaagcgccagatcaaatgtttcctagatttcaaagcgggaggct

SEQ ID NO: 198960 - DNA, 50 bp, Homo sapiens
tgcacgatcagttacatctatggcccgatgagagaaagggaaagttaagg

SEQ ID NO: 198961 - DNA, 98 bp, Homo sapiens
acctcctgacacaacaccactcaccacagacccctttgcttctgtttttgggaatgaatcatttggaggtggatttgctgacttcagcacattgtcaa

SEQ ID NO: 198962 - DNA, 75 bp, Homo sapiens
cgaagtcatggggctctgtcgggaagtacactcctgatcatgtagttggacctggagcagacattgatcccactc

SEQ ID NO: 198963 - DNA, 100 bp, Homo sapiens
ctgagacgtgacactgaaaatcagtagaagaaatacgccacatttattctaccggggaagacagtgggtatcttggaacataatacaccaagaagtcaat

SEQ ID NO: 198964 - DNA, 50 bp, Homo sapiens
gtctaatgagcgcagttgattcgagggagtgcatccgccccaaccctttt

SEQ ID NO: 198965 - DNA, 90 bp, Homo sapiens
aaatatggcaaagaaacctattctgagtctatggggtggagctgttcctgaaggttgccggcctgggccctgtggagtacttgtcttccg

SEQ ID NO: 198966 - DNA, 100 bp, Homo sapiens
agagcggcgaaccgtgggcagtgagaattaccccctctacattcgcagcacccctacggagaacgagctgaagttccactacatggtgcacacatctctg

SEQ ID NO: 198967 - DNA, 75 bp, Homo sapiens
tgggatgaacatgggcaggataaatggaaaaccaattctgtgtcctcggaggaccacagcccagttgggccccag

SEQ ID NO: 198968 - DNA, 100 bp, Homo sapiens
ggacctcgcatcggaagacctggaagccaatgagatcgtgagcctcttgacgtgggtcttaaacacctacacaagaggctgtggccctgagaaagatcac

SEQ ID NO: 198969 - DNA, 128 bp, Homo sapiens
agggcgggcacaccaccctcacactcatcttcatcatcttctatatgacagctgcactgctccagtatcatcgagaaaggagaagaacactgtggacatctaattgaggcccacaaggaatgcatgag

SEQ ID NO: 198970 - DNA, 90 bp, Homo sapiens
tgctttactcagtgattccttcctaggcctccaaccatatggccgacaggaatcactctgcatgatgaacctgtcgactgggcggcagca

SEQ ID NO: 198971 - DNA, 74 bp, Homo sapiens
agaaccgggacccccctgcggggacccggaactgttttcggctttgtgagaaaccttaccatcaaacacgatgg

SEQ ID NO: 198972 - DNA, 100 bp, Homo sapiens
caggaaggtgcatactactcgctgccaagctctgggggtcatcacagagaaggagacccaggtgttgaccactgaaaaacacacatactatctgactgca

SEQ ID NO: 198973 - DNA, 97 bp, Homo sapiens
agcgcggccttcacacatcccagccggtgactgcagtgagtcattgaagactctccggaattcagatttgaaaccatatattatcttcattgcaccc

SEQ ID NO: 198974 - DNA, 126 bp, Homo sapiens
gggttattaccgccgggctgccagcaacatggcactgggcaagttccgggccgcgctgcgagactacgagacggaagaagttgtggaaatagaatacgtggagaagtatactgcaccccagccaga

SEQ ID NO: 198975 - DNA, 60 bp, Homo sapiens
actgagagccgctttcatcaaggctggcatggctctatataagattgtccccaaaaatcc

SEQ ID NO: 198976 - DNA, 50 bp, Homo sapiens
ggctcagctggcttcaatatgcaaatcctgaaggaacccaaagtggctgc

SEQ ID NO: 198977 - DNA, 100 bp, Homo sapiens
tgacatctgatgctgtggaacttgcaaatcgaagggctgatggagttatgagaacaatgaacacagaaaaactcctaaaaactgtaccaattattcagaa

SEQ ID NO: 198978 - DNA, 82 bp, Homo sapiens
atgaagttcgagcactaatatttaagaaagaagatgttaactttcagactattgcccagaagaaaagatgtttggttttcac

SEQ ID NO: 198979 - DNA, 100 bp, Homo sapiens
caagactgtcgacctaaagcctgactggggcaagctctggattaatcgaattacagctgctagccaggaacatggactgaagtatccagcgctcattggg

SEQ ID NO: 198980 - DNA, 50 bp, Homo sapiens
tatccatcctgtcccccaaggaggaagcatacgtgatggctggtgtgggc

SEQ ID NO: 198981 - DNA, 59 bp, Homo sapiens
caaatgataaactgcgaggacagagccactgggacactttcttcatgagcaacaaaccc

SEQ ID NO: 198982 - DNA, 74 bp, Homo sapiens
atcggcgagggaggacagggggttcatcatggctcctacagaagaagggaaaaaagagctgctgttcctaagta

SEQ ID NO: 198983 - DNA, 75 bp, Homo sapiens
ctttaccttagatggagatatcaaattggtgttaagtccaaaagtgctgggcattgccatcgctcggtatgactt

SEQ ID NO: 198984 - DNA, 82 bp, Homo sapiens
caagactaaaaactaaaggcctgggcctgagaactgaatcaggaatacaaacagaagcttgcacgagtaacccaggtccgca

SEQ ID NO: 198985 - DNA, 75 bp, Homo sapiens
caggacctccgccctcctctccggctttgccatgttagaggagtgcttggactcggcgtgatttttggactctgg

SEQ ID NO: 198986 - DNA, 100 bp, Homo sapiens
ggacattcaacaagaaatcacagtgctgagtcagtgtgacagtccatatgtaaccaaatattatggatcctatctgaagaaacactttgtgctactctgt

SEQ ID NO: 198987 - DNA, 75 bp, Homo sapiens
agggcccctgggctcccggaagggctctccaatgtcagatgtggtcagtagggagctccatgcccaagctcaaga

SEQ ID NO: 198988 - DNA, 71 bp, Homo sapiens
agaatggcagtgctcaaactcaccgaccagatactcctgggcatggaagtggatgggctgagactcctcga

SEQ ID NO: 198989 - DNA, 88 bp, Homo sapiens
aaaattcgatttgcaaatcattcagtgaatcccaactgttatgccaaaggtcctaggcctacttacaagcctccagtctcaaattatc

SEQ ID NO: 198990 - DNA, 100 bp, Homo sapiens
tgggtaccctctatgaaaaacagaatggaaaagagtcttctgctaatgggaatgacagcaagaaatttaaacgagatagacctccctgttcgccttcccg

SEQ ID NO: 198991 - DNA, 101 bp, Homo sapiens
gactatgaccccaccattgaagactcctacctgaaacatacggagattgacaatcaatgggccatcttggacgaactggctgcggctttatggctacctgc

SEQ ID NO: 198992 - DNA, 75 bp, Homo sapiens
cccatctatcagcaggctccgggctgaagattgcttctcttctctcctccaaggcaagtagcctgcagtatgaaa

SEQ ID NO: 198993 - DNA, 87 bp, Homo sapiens
cacccgaggagttccgcccctttctggcaaagatgagggggattcttaagcctccttgaagctgcccttgaagacttcccgactcta

SEQ ID NO: 198994 - DNA, 98 bp, Homo sapiens
cttctcaagatgtggagctctccttgcagatcggtgacacagttcacatcctggagatgtacgaggggttctccaaaaaatgtggaatcctttgcatc

SEQ ID NO: 198995 - DNA, 100 bp, Homo sapiens
cacaaaatctgttcccatgcaaaccaatgagggagaagtatcggaagaaagcagttccaagcttccttcaaaatgtctactgttcacgaaatcctgtgca

SEQ ID NO: 198996 - DNA, 82 bp, Homo sapiens
ctgtagtcacaggagctgtagagaggaccccggtacatctgaaagccgggaaatggaagccatcttcgacaagagcacaggg

SEQ ID NO: 198997 - DNA, 100 bp, Homo sapiens
cacacattgaatgggccaaggaaaaatcgagcagaaagaatgtctttcagatttcctcctctgatgctcctcttcagcctttggtatcctctccttctct

SEQ ID NO: 198998 - DNA, 75 bp, Homo sapiens
cgcgctcgctccggcgccggcctcgcctcctcgcagcagcgccatggttgcttatggaaccacagagaacagtcc

SEQ ID NO: 198999 - DNA, 100 bp, Homo sapiens
agatgccttctttagggtctctgccttggggccattttacaggtcgtacctagctcagctgcaaccatcaaacttcatgatcaatcaattggcacacagc

SEQ ID NO: 199000 - DNA, 98 bp, Homo sapiens
gccaatctgggcggcgtgcccagcaagagattaaagatgcagtacgccacggggccgctgctcaagttccagatttgataacgagctgcacggccaag

SEQ ID NO: 199001 - DNA, 96 bp, Homo sapiens
tggagacaagcgcaaaatccagtgcaaatgtagaagagggtctgactgcgtaccatgatatctccctggacaagtgctatgtcatcgaactcaaca

SEQ ID NO: 199002 - DNA, 96 bp, Homo sapiens
tgtttctctgctttggcgtcctgtacgtgaagctcggtaagactttgaccccgacgcaggcttcagtgattgccgcggatcagaagcctgagcact

SEQ ID NO: 199003 - DNA, 89 bp, Homo sapiens
agccatccctgacacccggcatgaccagacctcagcagccatgtcgaagccccatagtgaagccgggactgccttcattcagacccagc

SEQ ID NO: 199004 - DNA, 83 bp, Homo sapiens
taaaagcattcggcagcgtcgtcgcttcactgtggctcatacatggctgccagacaccctacttgaaggatcctgttggaacc

SEQ ID NO: 199005 - DNA, 110 bp, Homo sapiens
ggaggagctgtgcagccgcgaggaggcgcgggaggtgttcgagaacgaccccgagacggatcgaatcatcaatttagttgttggcagcttaacatccttattgattctag

SEQ ID NO: 199006 - DNA, 74 bp, Homo sapiens
agatccggactgctcgggaagctccatccgaatgtgtctgccccccagcttctaagtgccagatgatggaggag

SEQ ID NO: 199007 - DNA, 100 bp, Homo sapiens
aatttttattgtttttctgttcagaaccaggttttgcttttcaaatttttgaggagtcttcttgacccaagggcagctttggaagaagtagaaggtgatg

SEQ ID NO: 199008 - DNA, 83 bp, Homo sapiens
gaaggagaagacttttctgagaccctgactcgggccaaatttgaagagctcaacatgagggtggttttcctgaagcagctggc

SEQ ID NO: 199009 - DNA, 121 bp, Homo sapiens
gtggagccaaggaaacaggatgctgatagtctccagcgggcctggactgtgggctggtgtgtggaactggttggtgttcgaggaagagacattgttgttcttggtgtggagaagaagtcag

SEQ ID NO: 199010 - DNA, 100 bp, Homo sapiens
gctggttactaccatgccaatgcagctgtgaacgatcagaggaatgatgagaagacagcagctgattacaagattttaggtggttcagtccttcacctgg

SEQ ID NO: 199011 - DNA, 100 bp, Homo sapiens
ggcattttgctcactccttgtaccccttagtgaggatgaggatgatgaccttcagtatgccgatcatgattatgaagtaccacaacaaaaaggactgaag

SEQ ID NO: 199012 - DNA, 88 bp, Homo sapiens
cttccggagccctcggggcggcggactggctcgcggtgcagcagcaatgcagcaagtcttggaaaaccttacggagctgccctcgtct

SEQ ID NO: 199013 - DNA, 90 bp, Homo sapiens
tggacttctcagcctccagaatggtggagctgatcagaataatgttcagcatcaaccccctggagaacctgaaggtgtacatcagcagtc

SEQ ID NO: 199014 - DNA, 100 bp, Homo sapiens
tccaagaccagtttaatgaccttgttatcagtgatggctcttctctggaagatcttgtgattttaagtaaccaagaggagtggtttaaggcggagcttgg

SEQ ID NO: 199015 - DNA, 100 bp, Homo sapiens
gatcttaaggagttgctggagaaatctttacatgaaggaatcgtgtctcctagtgacctggaccttgtcatgtcagaagggttgggcatgcggtatgcat

SEQ ID NO: 199016 - DNA, 90 bp, Homo sapiens
cctgaggacaatgacggtgccagctgaacgaggcccagcaaaaagcagagacggtacagggccagaaggatctgagagagtgtggccagc

SEQ ID NO: 199017 - DNA, 100 bp, Homo sapiens
cgtctctctgccgtgaatcattcctgcagatgaaaaagtgtgacttggcagctggtgtggatccggagttgtatgagttaacaacttctaagctggaaat

SEQ ID NO: 199018 - DNA, 95 bp, Homo sapiens
gttttgcccaagaaggagaaaatgaagctgaggcgtgagcaatggttgcagagtgggaacatccagttgcaggaaaacaagcttaacacgcccac

SEQ ID NO: 199019 - DNA, 82 bp, Homo sapiens
gagtatcccatgaaaccaccaagcattattctcctaacggatctggaaatagtatattcctatttacatggtatggaagcct

SEQ ID NO: 199020 - DNA, 50 bp, Homo sapiens
ctgagacggtgtcccgccgaaagtatgagcccagaggacctggtcggccc

SEQ ID NO: 199021 - DNA, 100 bp, Homo sapiens
attgagctggagatggcaaaaattcagcgtctccgggaagtcttggtccgccgggagtctgagctcaggttcatgaacgtcaaggtcgtgggaaataaaa

SEQ ID NO: 199022 - DNA, 50 bp, Homo sapiens
tcctgaggcctccccagctatgctgaactactatggaaatgatgttagac

SEQ ID NO: 199023 - DNA, 89 bp, Homo sapiens
gaggatgtggtggtctactctgatgtcaatcttgagggctagacctccaagaagctggtgaactcggtggctggctgtgctgatgacgc

SEQ ID NO: 199024 - DNA, 82 bp, Homo sapiens
cgagacccaggaggacagggcttcaggattttttatcaagcagaaatgcatcgaacaacgagaatcaagatcactgagctaa

SEQ ID NO: 199025 - DNA, 97 bp, Homo sapiens
gcaaacagccaacccatgagagtcgaattggagaacttgttggagtgctggtgaatcatttcaagaggtcgccttcgtcagacgtcagaatgattcc

SEQ ID NO: 199026 - DNA, 83 bp, Homo sapiens
tgtgtactggagtgagtttgaagaagttcagttaactgcctgtatccatggatcagctgctcttctatacccaatgtattggc

SEQ ID NO: 199027 - DNA, 95 bp, Homo sapiens
caaagagacagaggctgttagctatggctgggtgtttgtgaaccgaagtttagcaatggaaaagataaagtgttttggttttgatatggattata

SEQ ID NO: 199028 - DNA, 100 bp, Homo sapiens
ctttttcccccttgcctggctcctgtggtggcaggctgggcacgaggaccatgctgggccggagcctccgagaatattggatacaaatgaccgatttcta

SEQ ID NO: 199029 - DNA, 83 bp, Homo sapiens
gggaggaaggaacgaggcaaggagctaaagcagcgtgcgttcagccctgggcccagagcatgttccagatcccagagtttgag

SEQ ID NO: 199030 - DNA, 75 bp, Homo sapiens
taaagaattaaaaggaagaacaacttaagagcttcttcaaagaccactggccttgtgggattggctgtgtgcaat

SEQ ID NO: 199031 - DNA, 50 bp, Homo sapiens
acaagagcaccatactttgagggctgacgttcctcagggagtgattcgag

SEQ ID NO: 199032 - DNA, 73 bp, Homo sapiens
agaggatgacttctctaatcagttacgtatgaatctgatgaacaagaaaagagtgcctatcaagagtatgaca

SEQ ID NO: 199033 - DNA, 74 bp, Homo sapiens
aactggcatatttcaaaagggaaaaccaggagctaatgattcaaaaaaggccaatgatgaggccaatcagagtg

SEQ ID NO: 199034 - DNA, 90 bp, Homo sapiens
ggaggatgataaagttgatctgaatttgattgttgccctcatccgatacattgttttggaagaagagccattcagctggttgaatttcac

SEQ ID NO: 199035 - DNA, 98 bp, Homo sapiens
ccatcttcaaagcctttgctatgatcattgacaaactggaagaggacagagcgggatgccaccagcttgtccaaagggaagttccaggagctcctggt

SEQ ID NO: 199036 - DNA, 75 bp, Homo sapiens
gtccacctggcgttgctggatgagatctcctgttgcagtgaccatcgatgcaagtggcttccagcttctatgaac

SEQ ID NO: 199037 - DNA, 75 bp, Homo sapiens
tccttaggagaaactaacaagaggaacacggtagatctagtgccgacgccaccgccgagcccatgatcctggaac

SEQ ID NO: 199038 - DNA, 90 bp, Homo sapiens
ggagattgcagcagcgaaccaatcccaaggaagacctggaagcgctcatagcccatttccagacactcgatgccaagaggactcagactg

SEQ ID NO: 199039 - DNA, 74 bp, Homo sapiens
gggagctgtggccctcagaatttaaacttaaggaaagagtgggaaagtgaggacccaacatgagtgaagtttcc

SEQ ID NO: 199040 - DNA, 100 bp, Homo sapiens
agcctaagagaactatggcaacatcaggtgactgtcccagaagtgaatcgcaggcagaatccagagaccacatttgaagtatatgttgaagtggcctatc

SEQ ID NO: 199041 - DNA, 113 bp, Homo sapiens
gaagacttgtgttgctgtcatgatatgaaagattccagtattgtcactgctgttccaagggcacacgcagagggatttggaattcctggagagttgcctttgtgagaagctgg

SEQ ID NO: 199042 - DNA, 82 bp, Homo sapiens
ctgactggctccttagaagctgtgcaagttcaggtggacaatcttcaggtttgcaagtgacagcataaagacggaacacaac

SEQ ID NO: 199043 - DNA, 100 bp, Homo sapiens
gaggagaagaaccatggacaatggaagatgaaaggcacagtcgaatctgtccaggttctggcctataggaacaagacattttcagtaatggaagaaggag

SEQ ID NO: 199044 - DNA, 75 bp, Homo sapiens
cacaggtgctggatggtacctcggggttctctcctgcccccaagctgggggttatggttttgtgaaattcacaga

SEQ ID NO: 199045 - DNA, 96 bp, Homo sapiens
gaggaggctttggggaccgggaccgggatcgtgaccgtggaggtgaatcagaaatcctgcaccatgagaagcagtacgagccattctactcatctt

SEQ ID NO: 199046 - DNA, 100 bp, Homo sapiens
attctggggcagtatcaacggagtctccggggccggagcctcaacagaaagctcctttagttcctcctcctccaccgccaccaccaccaccaccgccacc

SEQ ID NO: 199047 - DNA, 101 bp, Homo sapiens
tttaaagcgcataagaatgtcctggcagcattcagccagtattttaggccaggtgtggtgtcttacacctgtaatcccagcactgtgggaagccagggcag

SEQ ID NO: 199048 - DNA, 101 bp, Homo sapiens
cctgggcttcgctgctcagccagctcctgcgaccgccctgcgcttcgtgcaccggggcggtccgttgccaaagccagaaagtggagctgttccaaaaagaa

SEQ ID NO: 199049 - DNA, 75 bp, Homo sapiens
tggaggatgatttgggaatatagtgtccttgacagtcattttgtttactcattcagccctgttgcaggtcccaat

SEQ ID NO: 199050 - DNA, 97 bp, Homo sapiens
gctgctgtgaaggagatactgaaggagcaggaaaaccggaagggcctgatagccgccatctgtgcaggcctgtgtcacttgtgaaaatgaagattca

SEQ ID NO: 199051 - DNA, 100 bp, Homo sapiens
agctgtttccatatgacccttatgaacgagctcgccaaaagatgttattggagctattttgtaaggaattaagtagactggctggacagattcgaaggtt

SEQ ID NO: 199052 - DNA, 100 bp, Homo sapiens
aggtcctgcagcttccagacatcgccctggatgtcttcgcgctctggctggtctcccctctgctgggctttatcctgtggataaacgcagagtgaacgag

SEQ ID NO: 199053 - DNA, 100 bp, Homo sapiens
ggaactgtatgaagacagcttgctggatcattgtattactcatcacagatcggaacggaggcctgtggctggagcattggatttgctaaaggagcttaag

SEQ ID NO: 199054 - DNA, 76 bp, Homo sapiens
cagatttgactcaaagaggaaggatgggaaacatctcacacttcatgagatcaacagtacaaattctgaagtttgt

SEQ ID NO: 199055 - DNA, 50 bp, Homo sapiens
ccctgagcaaggaaaatctgaggatcgatgctatagaagacaaacaaggg

SEQ ID NO: 199056 - DNA, 96 bp, Homo sapiens
aggaggtatgcctggactgggccaggtattttcttacactgctgacaaagaaatccgaaccgatgacttgtgcttggatgtttctagactcaatgg

SEQ ID NO: 199057 - DNA, 90 bp, Homo sapiens
gggctccgggtcgctggcggcgtggacacctgagtcccggggtaggggtctcccgcgagggccacactgcgttactgagcatgttctgac

SEQ ID NO: 199058 - DNA, 75 bp, Homo sapiens
ccccaggggcgagagtatggcatgatctaccttggaaaagacctgggagatcttggtgagcaatgagcatgagac

SEQ ID NO: 199059 - DNA, 100 bp, Homo sapiens
gtagcagggtggtgtgatagcggcagcgaggggctcggagaggtgctcggattctcgtagctgtgccggttcccgatgggtcccggctcggacggtccga

SEQ ID NO: 199060 - DNA, 75 bp, Homo sapiens
gcttcagcaccgcgcccatggcagagccagacctgcaccaattccagctggacatcactgtgaaaatgggacggg

SEQ ID NO: 199061 - DNA, 100 bp, Homo sapiens
ttgtcttccacagatgtgtcaccaaaccagggatgatggcgccacttcctcagtttcggcactcaagcgcctggaacggagtcagtggacggataagatg

SEQ ID NO: 199062 - DNA, 75 bp, Homo sapiens
gctgtacgccgagcacccaggcgactgcctcatcttcaaggagcatcagatccatgctgctgctgactcggagcc

SEQ ID NO: 199063 - DNA, 50 bp, Homo sapiens
gttcttgggacaaacttcatttggacaagaggaccctgccttggtgtgag

SEQ ID NO: 199064 - DNA, 100 bp, Homo sapiens
ctacgattcagtgctactcccttagtaactatgcagttttaatggaggaatacgcagttgagggcctggagtggtcattcatcaactaccaggacaacca

SEQ ID NO: 199065 - DNA, 74 bp, Homo sapiens
gattgtccagcaggtgcttcaagaacttcgacagtaccatgggcagctgcattcagcctcagcggaggacacgc

SEQ ID NO: 199066 - DNA, 87 bp, Homo sapiens
cagcaagagtgacataggagaagtgattcttgtgggtggcatgactaggatgcccaaggagtggagtcaacatatcaatggagcaag

SEQ ID NO: 199067 - DNA, 100 bp, Homo sapiens
caggcttctgagccccaagttgccttcacaccaagccaggatccgcgcactcctggtgggtcagagtggagagagagtctggctgccgtcgtcccgccct

SEQ ID NO: 199068 - DNA, 100 bp, Homo sapiens
ctcttggatgttcttggacttgacggtaccaagacagacctgatcataaaaccaataacaaagaatgtcagaagtcttttacatggaagaagaaaaaaat

SEQ ID NO: 199069 - DNA, 100 bp, Homo sapiens
tccgccttctctgtcagctctttccccgtcagcatcccagccgtgctcacggtctgcctcagccacctccctgacgctgtcccactgtgtggatgtggtg

SEQ ID NO: 199070 - DNA, 97 bp, Homo sapiens
ctctccgctcgattttgtcaccgttatgtgggaagcgaatccagttgctatcaagatcatagataagacccagctggatgaagaaaacttgaagaag

SEQ ID NO: 199071 - DNA, 75 bp, Homo sapiens
gcccccaggcggtccttcctggccacccacacagaatatgcctatgggtcctggagggatgaatcagagcggccc

SEQ ID NO: 199072 - DNA, 75 bp, Homo sapiens
gaagttgaatctgcaaaacttattcgggataaagtagcagggcgcaaccatgtcgccatttcttcggattggctt

SEQ ID NO: 199073 - DNA, 98 bp, Homo sapiens
gtctgggatccagtacgagttgaatcattgttcaaataaggtcctagcttactctgccaccactgcccggcaggaggaagttccccagcagacagtgg

SEQ ID NO: 199074 - DNA, 100 bp, Homo sapiens
ctgggattcgcgctgctgggcacccacggagcctccggggctgaggtccagttccggccgtaccgcacagacgacttcatcacgcgcctgtactatgaga

SEQ ID NO: 199075 - DNA, 87 bp, Homo sapiens
gctctgagccagcggcggcttccagcccgactgggcctgccggggctgccccgcgcacggtgctttacaaggccaagtacggtccaa

SEQ ID NO: 199076 - DNA, 100 bp, Homo sapiens
tcagcggtagcaacctcgccccttgcaacaaaggcagactgagcgccagagaggacgtttccaactcaaagtgttgacttcaaaatcaaaactgtagagc

SEQ ID NO: 199077 - DNA, 90 bp, Homo sapiens
gaatgggtctgggaccttaacagggagccatgggattgtcaatgaggcagatcagattccgatttgacgggcaaccaatcaatgaaacag

SEQ ID NO: 199078 - DNA, 100 bp, Homo sapiens
ccagggagttctgacagctctgcgtctcagaatgctgcttctaaattacttgggcaaaattgggtccaaaacgcctttgatggcagctgcaactttttcc

SEQ ID NO: 199079 - DNA, 100 bp, Homo sapiens
atttgctccccctcgtgcagcaacccccacacccagcaccagttagagatgtttatgattacttccgagctgtcctgcagcgtgatgaaagaagtgaacg

SEQ ID NO: 199080 - DNA, 75 bp, Homo sapiens
cggccaagcagccaaccatgctcaacttcggtgcctctctccagcagactgcgatgccatggacaatattaccag

SEQ ID NO: 199081 - DNA, 75 bp, Homo sapiens
agaagggacaccttttgaagatggttttggctggtgattaaggaagatggacacatggtcactgcccgacaggag

SEQ ID NO: 199082 - DNA, 80 bp, Homo sapiens
ggtgcagcagctgcaccccaccttgatccagcggacttacgggagtctgctacaccatttttgatttgggcttccgcttt

SEQ ID NO: 199083 - DNA, 75 bp, Homo sapiens
gccagtaccaggcgctggagaaggacgaagaggaagccttggttgagataagtcgaagagtgactctggaaaaac

SEQ ID NO: 199084 - DNA, 88 bp, Homo sapiens
atctggatatgtctattctgaactcaacttctgaaatttacagaaacaaactacatctcaggaacaaaatccagtctcatagcagagg

SEQ ID NO: 199085 - DNA, 100 bp, Homo sapiens
cgggggtttgagcgtgctgactcggagtacacggacaagctgcaacactacaccagtggccacagcttgcccagtctcggacaaaccctcaggtcctgga

SEQ ID NO: 199086 - DNA, 83 bp, Homo sapiens
gcacggcaagcgcctggagcggctggccatcgcaaattgtggctactaatttgccccctgaagatcaagatggctctggggat

SEQ ID NO: 199087 - DNA, 75 bp, Homo sapiens
ggagtctggacatctgaaacttgtagagacggggtttcaccgtgttagccaggatggtctcgatctcctgacctc

SEQ ID NO: 199088 - DNA, 100 bp, Homo sapiens
caatgcctttgatggaccaattaccataagaagaggagatcccagaactggagattgacgtggatgagctcctggacatggagagtgacgatgcccgggc

SEQ ID NO: 199089 - DNA, 100 bp, Homo sapiens
gtggagttcgggaaccagctggaggagaatggggtactaagagaaaagcacgaagctgtggatcatagttcccagcatgaggaaaatgaagaaagggtgt

SEQ ID NO: 199090 - DNA, 113 bp, Homo sapiens
gcaggagagctgtctggatggctgggagttcagtcaggacgtctacctgtccaccattgtgaccgaggcccaagtctgttttggtggtctgagaggaaaaaagatgagcttct

SEQ ID NO: 199091 - DNA, 98 bp, Homo sapiens
ccattgcagagaggaaaaaaatccagtacttgactcgcagtggtggatgccggataccggaggagctaacatcccagctctgaatgagctgctgtctg

SEQ ID NO: 199092 - DNA, 90 bp, Homo sapiens
tgctgctgcttcggggactcagccagaaagctactgagaccttcacggcatggtgcaactcccacctgcggaaggcaggcacacagatcg

SEQ ID NO: 199093 - DNA, 88 bp, Homo sapiens
cttgctcctctctccttggcctctcctgggatcggcccaaggccagttctccgcaggaagctgaatatggtgggcatgatcagataga

SEQ ID NO: 199094 - DNA, 87 bp, Homo sapiens
gaagcagcgccccaccaagctcaagagcctcatccgcctagtcaagcactggtaccaaaataccccccaaagacacacgtgacccac

SEQ ID NO: 199095 - DNA, 100 bp, Homo sapiens
tggtgggcggcccaccgggactcgccgttgtgccgttggtggttgcctgacgaaaagctgcacttaatagaaatcactgtggatgcaggagatggacggt

SEQ ID NO: 199096 - DNA, 100 bp, Homo sapiens
gccgctgctgaagagtttccaaggagaggtgctggagaatctggtaaaagcaccattgtgaagcagatgaggatcctgcatgttaatgggtttaatggag

SEQ ID NO: 199097 - DNA, 82 bp, Homo sapiens
gagaagctgtctctgatccgcaagcatgctcagaccttcattgctctgtgtgccaccgatctgggtgaggaagacaagtgac

SEQ ID NO: 199098 - DNA, 111 bp, Homo sapiens
tggaactccagcctgcgccaccacgtcacgcacacgctcggcgctgcgatccgcgcatataacgcctgtggacatctctacagcaatgagtgaacgggcacttgctcagaa

SEQ ID NO: 199099 - DNA, 98 bp, Homo sapiens
gtgcgagtcttcggagcgaccccggcagagcattggggagtcagcaatgtccgttgtgttaaatcagctgctgcccatgattaagcctgtaacccaga

SEQ ID NO: 199100 - DNA, 75 bp, Homo sapiens
ccgcgcccggccggacccgggcccgaggccaccagcccctcgggttccaagatgcagctactggagacagagttc

SEQ ID NO: 199101 - DNA, 100 bp, Homo sapiens
tcaagttgtctacgctgcgaatgggcaggcgtatgccgtgccctaccagtacccatatgcaggtattgttgcagcatctggcagtgagactgaggatgag

SEQ ID NO: 199102 - DNA, 100 bp, Homo sapiens
gcttcaatgccactgtctttgcctatggtcagacgggctcagggaagacatacaccatgggggaggccagtgtgggtttctgacgtagaagagcttaccc

SEQ ID NO: 199103 - DNA, 100 bp, Homo sapiens
gatgtcgtccaaatagtatcaggattccaagagaaagcaaccagcgagatgaatactgctgaggactggggcctcattttggatatctgtgataaagttg

SEQ ID NO: 199104 - DNA, 74 bp, Homo sapiens
tgagctctatcagcagaaggagatggctttgcaaaattgttcccatgactttgccgactaaagttctaagtgcc

SEQ ID NO: 199105 - DNA, 101 bp, Homo sapiens
ggggcaggatctgtgtcaaaagagcttctctccagagtagaaaggtatgtcgagagtaccaacgtggcaattgcaaccgaggagaaaatgattgtcggttt

SEQ ID NO: 199106 - DNA, 82 bp, Homo sapiens
caacgcccaggatccgcaagctgcgcgcccacgagctggtcaaaatgtctttggaagtttcctaaagtctgaattcagtgag

SEQ ID NO: 199107 - DNA, 98 bp, Homo sapiens
cgcgatgtggagcgcttctttaagggctacgggaagatcctggaggtggatctgaagaacggtgtcttcaataggccgtgtttaagaggcgtcttaca

SEQ ID NO: 199108 - DNA, 100 bp, Homo sapiens
ttgaaggtcccttgtggggactggaaagaggacggtgtgggcccatcgctggatggatctgtcagaacacggctttgggctggccctgctcaacgactgc

SEQ ID NO: 199109 - DNA, 50 bp, Homo sapiens
ctccaccctgggcaacttccatggtgccgtgagcgatgtggagatgcagg

SEQ ID NO: 199110 - DNA, 90 bp, Homo sapiens
cacctcctcgccagcagccgtccggagccagccaacgagcggagaagaaactgaggcctggaatttgattaactcattcaaggttaccca

SEQ ID NO: 199111 - DNA, 75 bp, Homo sapiens
cctaccaggagctcatggttgagtgtacgaagaaatgctaaggcaggaacggatccaaattcagcagcttgggct

SEQ ID NO: 199112 - DNA, 75 bp, Homo sapiens
tcggaagagcgctcccaggagaaacaagtgtcttcagtgccctgggtttgcctgtgacccaatgcccactgggac

SEQ ID NO: 199113 - DNA, 96 bp, Homo sapiens
attgttgaagagttcaactttcccagaagttgttctaacgctgcctttgctttaaaacagtattacttgcggtgtcatggagaaactccagctggg

SEQ ID NO: 199114 - DNA, 83 bp, Homo sapiens
cactgctgccgtgtacagtgctgcgattctggagtacctcactgcagaggttgaattctcttacccgcccctgattccaggag

SEQ ID NO: 199115 - DNA, 83 bp, Homo sapiens
caagcactatggatggagcaattgctgctgccttgctgatgtttggtgatgcaggtcagaagagatcaattctacagaaattt

SEQ ID NO: 199116 - DNA, 96 bp, Homo sapiens
atgccaccaagtatggcaacatgacagaggaccatgtgatgcacctgctccagatctgtgacttcctccgcggagccacagtccatagaatcctcg

SEQ ID NO: 199117 - DNA, 98 bp, Homo sapiens
caaagctgttgtctcagggagcacagaagaaacccagcgtttgctggcagaaccagttcctggcatcaaagccgaaccagatgagagcaacgcccgtt

SEQ ID NO: 199118 - DNA, 100 bp, Homo sapiens
tcctggggagtctgattcagatgacaactgtacagatgtcactggacttcctccgtcaggcagctggcaggacctgaaggatcacatgcgagaagctggg

SEQ ID NO: 199119 - DNA, 100 bp, Homo sapiens
tgggatccacacagctcagaacagctggatcttgctcacactctttcaagagaagcttccttgagcggcactgcagaggtggagctgaagaagggagcca

SEQ ID NO: 199120 - DNA, 75 bp, Homo sapiens
ccggtctggacacagaaagagaagtggtagctgagcacccagatgcttcaggtgaggagattgaagagctgctca

SEQ ID NO: 199121 - DNA, 80 bp, Homo sapiens
tccgtggagcggagtaacacacagctgggtgggggcacagggggatatgagactttctactcggaatatcctgagtgttg

SEQ ID NO: 199122 - DNA, 100 bp, Homo sapiens
tataatggtaccatctttgcataacatatctgaagagatggattaagaatgctttggattaaggattgtggagcacatttcaatcattttaggattgtca

SEQ ID NO: 199123 - DNA, 115 bp, Homo sapiens
tgtaaaagtcaccccccagaatctaaaaatgctgcgtatagtggaaccttatgtgacctgggggtgtgggcggcacaccctttccttctctggccccaccaatcatgctgctggt

SEQ ID NO: 199124 - DNA, 75 bp, Homo sapiens
aaaaggaagaacaacttaagagcttcttcaaaggatggaggtttgcttctgaataacccttcggcattagctatg

SEQ ID NO: 199125 - DNA, 83 bp, Homo sapiens
gaagaaagaagagaaagaggattgcccggaagttcctcataaggaagtgcacggctgtctataacgtgctgccgggtctcagg

SEQ ID NO: 199126 - DNA, 85 bp, Homo sapiens
cagggaaccctggtcaccgtctcctcaggtttgtttctgcgtcacatgatcttggcctacagtaagctttctttcagccaagtgt

SEQ ID NO: 199127 - DNA, 75 bp, Homo sapiens
tgcggaatggactttaattgctatggtgttgctgtcattagctctcgatgttctgaagtatgaggaagttgacat

SEQ ID NO: 199128 - DNA, 100 bp, Homo sapiens
ctgggactgaagagggacgggtcccgcggcgagcgagctcctgaggtacggcgtcggggttcaagtgaccttgatccttcgatgatattggacactggag

SEQ ID NO: 199129 - DNA, 83 bp, Homo sapiens
ctgacctatcagctctatgtgagcctgatctctgcagaggttcccctgggtagagctacaccaaaattgcattgagccaaact

SEQ ID NO: 199130 - DNA, 51 bp, Homo sapiens
actgtagattgtgtgcaggctagcaagctgcctcgtacccagccagacggc

SEQ ID NO: 199131 - DNA, 51 bp, Homo sapiens
ttatccctcttgtgatttacctggagcactagacaaactgaatggatttca

SEQ ID NO: 199132 - DNA, 75 bp, Homo sapiens
ctaccacattgggggcagccccttcaaggccaaagtcacaggccccagcccacgcagcaggaggacacactgccg

SEQ ID NO: 199133 - DNA, 75 bp, Homo sapiens
caagatggccgggctgccccgcaggatcatcaagctagatgaggaagaggagcgaaggaaaaggcgccgggagaa

SEQ ID NO: 199134 - DNA, 98 bp, Homo sapiens
gatggcgatacgggagctcaaagtgtgccttctcgggtggaaagaggcaaaacctgatgaattaatggattccaaattgagatgcgtatttgaaatgc

SEQ ID NO: 199135 - DNA, 100 bp, Homo sapiens
gatagaagtacagcccaatgtagagtacaaatgcaggttgtacagcagttagagctacagagtcgtccttgtctactccactaccaaatgttgaagttct

SEQ ID NO: 199136 - DNA, 83 bp, Homo sapiens
tccaccgcggatccctcccgcttgtcaggaggcggccagcggggactttgaacatgtcggggatcgccctcagcagactcgcc

SEQ ID NO: 199137 - DNA, 100 bp, Homo sapiens
atggcagcatttgtcttgatattctacgatcacagtggtctccagcactaactatttcaaaaggtgtggacatgatcagtaaaatgctgaagatgcagat

SEQ ID NO: 199138 - DNA, 100 bp, Homo sapiens
cttggaaagagcaagatcggcagccctaaagtgcatctgcagcttctatgttgatttttattcttccttctgccttctatatcaagttggtgaagaaaga

SEQ ID NO: 199139 - DNA, 89 bp, Homo sapiens
cgttcgtttccagcctcaggaatttatggtcgcctttttgaatgagattcatgatgttgctatcaaaagttgagaaattgtcagaagaa

SEQ ID NO: 199140 - DNA, 83 bp, Homo sapiens
ctggggccaagggacaatggtcaccgtctcttcagctgctgatgcaaggaatcccctgggctcccgtccactccactgctgac

SEQ ID NO: 199141 - DNA, 100 bp, Homo sapiens
atgagcctcaggaacaagcggagggctccctgactgtgtacgtgatatctgaacactcctcacttcttccccagttcctattatccttgccgtaaataaa

SEQ ID NO: 199142 - DNA, 97 bp, Homo sapiens
agaagtcaaccagaccaccttataccagcgttatgagatcaagatgaccaagaccccggtgctgctgacacccagctcgctgcctcctagcattcac

SEQ ID NO: 199143 - DNA, 83 bp, Homo sapiens
caggcatcagtcaggcagatgtttgtcgactggaatgggcaggtgacaaacattaccaccccagctgtgcacgatgcagcaga

SEQ ID NO: 199144 - DNA, 100 bp, Homo sapiens
ctccagagggtgaccgggcattcagaattggccaggccagcacgctcggcatccccacgtgggaactctttccaggctttgttgggccaggagatggttt

SEQ ID NO: 199145 - DNA, 101 bp, Homo sapiens
cacctgcagcctggacggggcgctgcccttgggcgcgcagatacccgcggtgcaccgcctgctgggagcgccgctcaaggatccacctctgatgttcagtg

SEQ ID NO: 199146 - DNA, 100 bp, Homo sapiens
gccatggcccgctggatcccgaccaagaggcagaagtacggggttgcagtgcctgatttgagatggggtcccaggtctcggtggaatcgggagctctgca

SEQ ID NO: 199147 - DNA, 98 bp, Homo sapiens
cggctatgagggggtgggcccaccaccgcccagccctccttggtggacgtggggacaggtgggctgtaacaaggtgtacacgagcacgtctgacgtga

SEQ ID NO: 199148 - DNA, 113 bp, Homo sapiens
gtttttccctaatctgatgggtcattatgaccagagtattgccgcggtggaaatggagatcttggcatatacagaagggctgcatggaaaatggctgttcacagagatacgat

SEQ ID NO: 199149 - DNA, 98 bp, Homo sapiens
atggagcttaccgtgtctccaatgacaaacgagatgtaaaagtgtcactgtacgtaccgtgagcccgtgtcagactaccaggtcctgcgggagaaggc

SEQ ID NO: 199150 - DNA, 50 bp, Homo sapiens
ggaaaatgatccagactatgacccaaagaatcatgtcaaccctgccatgg

SEQ ID NO: 199151 - DNA, 100 bp, Homo sapiens
ggcccaggagaagcagttcctgccggcgctgctgagtttcttcatctacaacccgcgcttctggccgcgggaaggagagaggatgttaagcaagtttttg

SEQ ID NO: 199152 - DNA, 97 bp, Homo sapiens
ggaaacagactggggcagtggaaaaggtggaagagcagtgccatccattgaatgggttgaacttttcacagatttgtccaatatgtgcagcgttacc

SEQ ID NO: 199153 - DNA, 75 bp, Homo sapiens
ttgagaccgtgaagagaaagatgcagttttaattcacaggtgttgcaagctgacatgttaagaattaggacaaac

SEQ ID NO: 199154 - DNA, 99 bp, Homo sapiens
ccatgatgagccatctccacttaatgactgtctcacattggccggcaacttgttccagtacataccgagcatcaaatattaaggcacccggagaacaga

SEQ ID NO: 199155 - DNA, 75 bp, Homo sapiens
catcagctcgtgcccgtcttattgatcctggctttggaatatataagggtgtggatgaatggaacatagctcgcc

SEQ ID NO: 199156 - DNA, 99 bp, Homo sapiens
acctttgaacttatcaacgtcatcaaggaagaggccttaacaagggatggtcccaccattgttcatgatgagatcccattgaagataccacgctgcatg

SEQ ID NO: 199157 - DNA, 81 bp, Homo sapiens
gccttcgcctcctaatccctagccactatgtaacctttggaaacatcagaagctactctccattgacctggacaaggtggt

SEQ ID NO: 199158 - DNA, 100 bp, Homo sapiens
caagtcttgagggatgcacctatggattccattgaatgggctgaagtggtgatcaatgtgaacaatattctcaagtgtttacaggcattggagtttttac

SEQ ID NO: 199159 - DNA, 98 bp, Homo sapiens
gggaatgccattattgcttcagaaacagcaagaaatagcatctattacggagcagcttatgactactaggagaaggcagagcccccccaggctatgaa

SEQ ID NO: 199160 - DNA, 100 bp, Homo sapiens
tcaaacttatttttgtgatattctccagcatatcttttctgttgtgacagacacttcacatactgctgatgaagttctcgctggagaagctgcaccaagg

SEQ ID NO: 199161 - DNA, 100 bp, Homo sapiens
atgaagcggctccacgaggaggaccagaaggagatcggtgacctccgtgcccagcagcagcagcatggcctgtatgagaagaaaaagacctcaagaaagc

SEQ ID NO: 199162 - DNA, 100 bp, Homo sapiens
ttctggtgatacccaagaaacatatatcccagatttctgtggcagaagatgatgatgaaagtccattcaacaaagacagttatggacttcgtgaatagca

SEQ ID NO: 199163 - DNA, 96 bp, Homo sapiens
cggctaaggtttgcgctgccatccgcaaaggctttctcgcttgtcaccttgccatgtggaagaaactggcctatcagcttatcactgtggtgatcg

SEQ ID NO: 199164 - DNA, 75 bp, Homo sapiens
ctgaagacatcaagaagatcttcgagttcaaagagaccctcggaactgagacggtttaagcggaagcatcttact

SEQ ID NO: 199165 - DNA, 100 bp, Homo sapiens
atcactgtgcggcacatcgcagacctgtcaccaggagacaagaaatacccgcagcccaaagggcagaagaagaagaagatcgtcaagtacggcatgggtg

SEQ ID NO: 199166 - DNA, 114 bp, Homo sapiens
tccatcagctgcagaaaattttctagttttggggagacaattacaaacatgttttatcaatgcagctaaggcctttttgcaaatgtgtaacttgcctatcaaagtagtttgtag

SEQ ID NO: 199167 - DNA, 74 bp, Homo sapiens
aataaaccagagaaagatgcaagacatgtagtaaaagtgggaagtttggttggcttagtggattatccagatga

SEQ ID NO: 199168 - DNA, 96 bp, Homo sapiens
caaaaattctcagtctcttgcgtttattacgactttcaaggttaattagatacatacatcaatgggaagagaacaaaatccagtctcatagcagag

SEQ ID NO: 199169 - DNA, 75 bp, Homo sapiens
cttcaagtacatcataatcggcgacacaggtgtttcccattaaacactaccaggacaaaatcaggccttacatcc

SEQ ID NO: 199170 - DNA, 90 bp, Homo sapiens
gaccaacaaagtacagagatgccaagaacaggaaacggaccaatgtctgtctctggattaatcgaattacagctgctagccaggaacatg

SEQ ID NO: 199171 - DNA, 75 bp, Homo sapiens
tcgcagacacagtcaccaagtatgacaggaggttcaaggaatccagaaacgttttggaccaccacaggaatgttt

SEQ ID NO: 199172 - DNA, 99 bp, Homo sapiens
gacagaagcagatggattcgtccttttagagactctccaacatgtgccttctgaccatacaaatgaaacttccaacagtactgtgaaaccaccaacttc

SEQ ID NO: 199173 - DNA, 100 bp, Homo sapiens
ggtcttcccaggcgtcgcggagagcagattgtccgaagatacatcaaggattggcttgagagaaagaagcctccttttggtgctatcagcagcagtgtac

SEQ ID NO: 199174 - DNA, 95 bp, Homo sapiens
ttgcaacatccttcttctggataacactgtacaagctttcaaagtcaatccatgctgtgacctacaagcaaactaaatagccaacatttctgaac

SEQ ID NO: 199175 - DNA, 75 bp, Homo sapiens
cgctgctcaaggacacggtctacaccgacttcgacgatcgacgacatcgcggatggcgccgtgaagcccccaccc

SEQ ID NO: 199176 - DNA, 51 bp, Homo sapiens
cagcatctttgtctagccccagtgcaggattctttgcccataaagtggagc

SEQ ID NO: 199177 - DNA, 111 bp, Homo sapiens
gttccaccagagtcattgcaggaagtggatgagttccacctcattttagagtatcaagcagatgcttcaggactgccccaaggcccgcagggaggtggagctgcactggcg

SEQ ID NO: 199178 - DNA, 100 bp, Homo sapiens
gagcaacagtgtagtggcgtattccacatagcaaacagatgtagcgctggctgcagttcttgtccctgtgctggtcatggtcctcactactctcattctc

SEQ ID NO: 199179 - DNA, 75 bp, Homo sapiens
cgcggccaccgcaccacaggccccagggtccaagtgggttccccggggcgactacatcgcctccaacacggacga

SEQ ID NO: 199180 - DNA, 82 bp, Homo sapiens
acaattgtctgtgacagtaacagtacttgggatcccccagttccaaagtgtcttaaagtttagcagccactgctgcatcagg

SEQ ID NO: 199181 - DNA, 100 bp, Homo sapiens
aaggaagcatgttggacgatatctaatattacagctggaaatagggcacagatccaggctgatattatggatattaatgaaatatttaaagatttgggaa

SEQ ID NO: 199182 - DNA, 95 bp, Homo sapiens
cctgcagtacttgaagatttgcataaagccaacattcgcaccgtcatggtcacagttatgagttgcagaaacgaattgctgaaatggaaactcaa

SEQ ID NO: 199183 - DNA, 101 bp, Homo sapiens
taaagagtggatggaggccattcaccaagccaggaagatgagaatgtgcctactgctcctgatcctccaagtcaacatttacgtgggcatgggacaggctt

SEQ ID NO: 199184 - DNA, 95 bp, Homo sapiens
atgaaatccacactgttctcaagaagttcttctcaccactaaatccaatacgagttcatattgatattggagctgatggcagagccacaggagaa

SEQ ID NO: 199185 - DNA, 90 bp, Homo sapiens
attcgtgcttgacagcagtgcttctatggtgggaaccaaactccggcaggggaaggtgtggctcattgactttaatccatttggtgaagt

SEQ ID NO: 199186 - DNA, 90 bp, Homo sapiens
ctgctccagctgttcgaaggtgatccaggccttataatgggactaattttacgatatgctacagcaccaactgatattgaaagtggaact

SEQ ID NO: 199187 - DNA, 99 bp, Homo sapiens
ccgatcttttacatgttccacaagaagtgcagcttataatccaagctattactcagaataattgtgtgcccaagaagatgctgcagctggttggtgtca

SEQ ID NO: 199188 - DNA, 75 bp, Homo sapiens
gtcgtggaagcaggactgcgccgcgtcttcctcaagacacgatgaggcgagtggtacgacagagcaagtttcggc

SEQ ID NO: 199189 - DNA, 75 bp, Homo sapiens
atggccttgtctccggtcgttcccgttcaggagcagctgcggataaccgtctggtccttgtgcacaaaatccgtg

SEQ ID NO: 199190 - DNA, 100 bp, Homo sapiens
tgtcactgggctggtgttctccccacacagaccgattattgaccgacctattcgaggtcgtggtggtcttggaagaggtcgagggggccgtggacgtgga

SEQ ID NO: 199191 - DNA, 87 bp, Homo sapiens
cggtggactgagagatggctattatatccaagccccaggagtctcccaaagggaagaggaagttggatttgaaccaagaagaaaaga

SEQ ID NO: 199192 - DNA, 98 bp, Homo sapiens
ccgccaagctctggagcttcttcatttaccttctgcggaggcagatccgcacgtgtccacaggatgaaatgtccgagtcaggccagtcctcggcggcc

SEQ ID NO: 199193 - DNA, 50 bp, Homo sapiens
ttaaagagtaaagttgtgctcaacgagatgcgacttgctctgttgtccag

SEQ ID NO: 199194 - DNA, 100 bp, Homo sapiens
gggtaggcctttgtaaaattgacagagaggggaaaccccgtaaagtggttggttgcagttgtgtagtagttaaggccatccggctgtccttagagcaagc

SEQ ID NO: 199195 - DNA, 100 bp, Homo sapiens
ctgccttccacgtcagcaaccggaaggacggcttctgcatcagtggcagcatcacagccaagtccaggttttatggcatccgtgtcattctggaccttac

SEQ ID NO: 199196 - DNA, 82 bp, Homo sapiens
tccaacacagatgtccaagctgccaaaggagcccaaggtgggcatcaagaccatcaaggtgtactgccagcgcatgcaggag

SEQ ID NO: 199197 - DNA, 74 bp, Homo sapiens
gtgggtcaacaagcacttaatgaagcctgggccgagccagtggcccccagaggatgagaaggaggtgatccgcc

SEQ ID NO: 199198 - DNA, 75 bp, Homo sapiens
ttctgccactgctgctccgtggagatcgtcccgcgcctgccgatcgaagacctgcaggtgaagctgcagcacgcg

SEQ ID NO: 199199 - DNA, 50 bp, Homo sapiens
caaatctcccaaaaggagaaacagctctacccatttgatgtgactcgtcg

SEQ ID NO: 199200 - DNA, 99 bp, Homo sapiens
gtcaccttgtcccgctgcagccgagatgccgggggagcggggccttccacaccccctccgtgggtgtgtgggtgcttcaaggatgaccgcatcgtcttc

SEQ ID NO: 199201 - DNA, 75 bp, Homo sapiens
agaactcattaaaaaacacctgctccctctctggaatgatgggacccatggatgaaggaccagatcttgatctag

SEQ ID NO: 199202 - DNA, 100 bp, Homo sapiens
gtgaagtttcactaaagtaatgcagctgttgtgctgtgtatggacgtgggctttaccatgagtaactccattcctggtatagaatccccatttgaacaag

SEQ ID NO: 199203 - DNA, 100 bp, Homo sapiens
cgtctttcaagaggtgcagtctttgaagggctgggtaatgttgcatctgtggagctaaaggagagataatgcatgtgagaaaacttcatatatgtttcta

SEQ ID NO: 199204 - DNA, 100 bp, Homo sapiens
aagtgaaactcgatcctccggatattacctgtggagaccctcctgagacgttctgtgcaatggattccagacagcattggaaaagacatagaaaaggctt

SEQ ID NO: 199205 - DNA, 82 bp, Homo sapiens
aagctttggggctcttcctctaatcaggagaaagctggaagttctccagcagctgattgtaatgaatttgcccaatgttttg

SEQ ID NO: 199206 - DNA, 80 bp, Homo sapiens
ctgtcagctctttccccgtcagcatcccagccgtgctcacggtgtggacactgccagcggctgcagccgacttggaatga

SEQ ID NO: 199207 - DNA, 75 bp, Homo sapiens
ggagactcctgaccctcagaatggtttgtactacagaaagtgccagttaatttccaaggaagatgttactcatga

SEQ ID NO: 199208 - DNA, 50 bp, Homo sapiens
tgaaatgctgactaaggaacaaggctctccaatccagtgttgaatagaag

SEQ ID NO: 199209 - DNA, 85 bp, Homo sapiens
tctgtgctgatccccaccgacaattcgaccccacacaaggaggatctaagcagcaaggacgtggccgctttggagagtcagcctt

SEQ ID NO: 199210 - DNA, 100 bp, Homo sapiens
gcctatctgcgagaacagagaagggagctctatagtcggagtggagaactgcaagatgttaagacatcccacctgaaacctgaagcgcatcctacaaagt

SEQ ID NO: 199211 - DNA, 87 bp, Homo sapiens
agaaagtcctctcgggagaagcagcgcctgttcccggggcagatccaggttcagggctgcttccaaccttcaatttgtaaaaaaacc

SEQ ID NO: 199212 - DNA, 98 bp, Homo sapiens
gacaggggtcagtggtggaagtgagaccgaaatagactctgaagtaatatctggactttgaaattcaaattcaacacccaacagcttccttaatagca

SEQ ID NO: 199213 - DNA, 76 bp, Homo sapiens
gatgggcgcgaacaatggcaaacagtacggcagtgaggcttctcacctggggcgggtgggttctgcaccaccctcc

SEQ ID NO: 199214 - DNA, 100 bp, Homo sapiens
cggcgccttcctgctgctcttcctgctcgtgctcactgtcaccgagccgctgcggccagtttgagccccagctacatagatctgactgagtgtccctaca

SEQ ID NO: 199215 - DNA, 82 bp, Homo sapiens
tgaaaaataccacgacaaaaccaccctacgctggccgcgcgccgaacccgagtccggcggcaccgacgacgacctcaacagc

SEQ ID NO: 199216 - DNA, 50 bp, Homo sapiens
gcggcttctggttctcacttgtcgatactgtggcctcatgaataggaatg

SEQ ID NO: 199217 - DNA, 74 bp, Homo sapiens
caacgatgatcttctctccgagttccccgacaagtttggatcctgtgttcccccttccgccctgcgctgccagt

SEQ ID NO: 199218 - DNA, 100 bp, Homo sapiens
tctgctcctttgagacccggcgccacctatgtatggtcatggaatacgtggaagcggcctgcaccaaccacgttcctgtcatcaccacactgctacgagg

SEQ ID NO: 199219 - DNA, 126 bp, Homo sapiens
ccgagtggacagcgcctggagaattcaccaagttcagctcccaggtgtccaagcccaggcgtaccaaggatgattgcttcaatgttaatattcagccacctgttggagaactgcttttacctgtgg

SEQ ID NO: 199220 - DNA, 75 bp, Homo sapiens
caggctgagttcctcttgctcacagagctctgtaaaggtcgcgtggggcaggcagtggcgctgcgggccaaggcc

SEQ ID NO: 199221 - DNA, 83 bp, Homo sapiens
aggaagatagttcgagagaagaaaattttagaagttcatattgacaaagatggggacattggttttggacctttacaacagag

SEQ ID NO: 199222 - DNA, 101 bp, Homo sapiens
ggaggatgtcgggacaccccggaagctgggaaatggttgaaatcacaaagattagacacctttttagataggtgttcttcagcaccactgacaacacggtt

SEQ ID NO: 199223 - DNA, 101 bp, Homo sapiens
agtggcgaggcgagtgtggaaggactcctgaaccagctcgtcctggagcacctgcagctggcgcctctgcagtgggcacacgacggttctgccctttatat

SEQ ID NO: 199224 - DNA, 98 bp, Homo sapiens
gatgaaacagagtatggctgcagaggatccatctgtcttagcaaggctgtcatcacacagatccagtttgctgaccagaagcaagaattcaacaaacg

SEQ ID NO: 199225 - DNA, 100 bp, Homo sapiens
cttatatttccaacagagttccacagatgaagaaataacatttgtatttcaagaaaagttgctgtggttggctgataaatatttgtcgaagaaagaaaga

SEQ ID NO: 199226 - DNA, 89 bp, Homo sapiens
tttgctcagcaacatcctagcggcctattcctttgtctcaggattggaacatcagttaacatctgaccactgccagcccaccccctccc

SEQ ID NO: 199227 - DNA, 82 bp, Homo sapiens
cttcagtggattgaactgttgacgaaacagtttaataatagtcaggcagcttgtgaggttgcaaagcagctgaaggagcagc

SEQ ID NO: 199228 - DNA, 100 bp, Homo sapiens
cccagactggggaagcggatgctatcagtgccggatggagtgctgtgatgtgccagccgagacactctacgacgtcctacacgacattgagtaccgcaag

SEQ ID NO: 199229 - DNA, 97 bp, Homo sapiens
ttcctggtcgtggtcattgttgcttccttcttcatattgaagaacttcaaccccacagtcacatttgaggatgttcgtgatgctgaagacgctttac

SEQ ID NO: 199230 - DNA, 101 bp, Homo sapiens
ctcatggctcacactcttctgaaacgactcgggtagaggctgaggaaggccgtgttgtttgtctacctgggactactggctccaaggctgcatctctccac

SEQ ID NO: 199231 - DNA, 74 bp, Homo sapiens
gcgaaaaccccggatggtgaggagcaggatgtagctgagctgattcgggccagagcctgccagagggtggtggt

SEQ ID NO: 199232 - DNA, 100 bp, Homo sapiens
cccgatgagtactacgcccgctccgaggactacgtggagctggtgcagcggaagcgagtgatcaagcaccccaacattgtagccctggatgacatctatg

SEQ ID NO: 199233 - DNA, 100 bp, Homo sapiens
agactgcaatggggacacgccaaacctgagtttctacagaaatgagatccgcttcctgcccaacgatggtcatccagactcagagctctctctacagaga

SEQ ID NO: 199234 - DNA, 100 bp, Homo sapiens
tctctcttctgccatctgataatagctctatcttaaaggaaccaaccacagaaagccttcaagccctgtgtgctctagggttggcaatgcaggatgctac

SEQ ID NO: 199235 - DNA, 100 bp, Homo sapiens
cttggaagaactccgtgcccagatgctcataaggattgtcctctttctacaaaagtggtttatcagatactatcattttggatataatatcaaactatct

SEQ ID NO: 199236 - DNA, 99 bp, Homo sapiens
ctgcgattggcagaagatgcaccaaactttgatggcccagcagcagagggtcaaccaggacagaagcaaagcaccgtgtcccccgtggagaagaacact

SEQ ID NO: 199237 - DNA, 96 bp, Homo sapiens
gaaaagctctacactggactaagagaagttgttaccgaacatctcataaataagatacagaattcgttgttgggaaggactggggaaacagctgta

SEQ ID NO: 199238 - DNA, 90 bp, Homo sapiens
atatcggaacccctccttgaagctgatggtgaatgtgtgcggacacactctagtgcttatgccttaccaaccatggctttttcatttctc

SEQ ID NO: 199239 - DNA, 90 bp, Homo sapiens
aaaatgtctctctatccatctctcgaagacttgaagttcaattttgtggggaagattcttggaccacaagggaatacaatcaaaagactg

SEQ ID NO: 199240 - DNA, 83 bp, Homo sapiens
aaacctagtgtctataactaaagattctgaactgcccacctgcagctgtcttgaaagacgagaatccaggacttgaatcgtat

SEQ ID NO: 199241 - DNA, 100 bp, Homo sapiens
cagatgcgcgcgatgctggaccagttgatgggcacctcccgggacgcaatgcatctctttggcctcaactggcagctacagcagactgaaaatgacacat

SEQ ID NO: 199242 - DNA, 90 bp, Homo sapiens
gtgaccgagcacccgcctccgggcatcttcaactccaaaccaaacaggaagcttacttttctctacctagccaatgatgtcatacagaac

SEQ ID NO: 199243 - DNA, 50 bp, Homo sapiens
gtacggattcatcaacataggacagcacaaggccaatcagcccccccacg

SEQ ID NO: 199244 - DNA, 75 bp, Homo sapiens
cttcgatgatcgtgtgtcggatgaggagaaggttatcaatactctggctgaccatcatcatcgtgggactgactt

SEQ ID NO: 199245 - DNA, 131 bp, Homo sapiens
ctggaaaaagcaagctgaagacatcaagaagatcttcgagttcaaagagaccctcggaacacctgcctagagctggaacgttacctccagagcgagccctgctatgtttcagcctcagaaatcaaatttga

SEQ ID NO: 199246 - DNA, 90 bp, Homo sapiens
tgaagtttttttggatgtggtcgagagattgtctgtactgatagcatctaatctctggcagtttggccgctggatggacgtcgtggtgga

SEQ ID NO: 199247 - DNA, 98 bp, Homo sapiens
ggttgctaattagcctgcaacaaagagttccttgctcatctaaaagaggcaatcaccgttcaggtgattttcaaagccaagtcaaaatattctccaga

SEQ ID NO: 199248 - DNA, 100 bp, Homo sapiens
gggtataatgttcaccaccttgaagatctgtgggaaaccgctggatctgagcaacctgtccctagaaggcatcgcagtgctaaacatccctagcatgcat

SEQ ID NO: 199249 - DNA, 98 bp, Homo sapiens
cgcgcttcttccccactcccgagacaggtccaggggcaagttcatcctactctcgagtctaatgatgatgctcttcagtatgttgaagaattaatttt

SEQ ID NO: 199250 - DNA, 97 bp, Homo sapiens
ctgagaatgcagccgtgtgacagtaactgaacattggtctaaagtctttccaaaaggtcaaggttcacaagtttccgttactatggcaatgacggca

SEQ ID NO: 199251 - DNA, 75 bp, Homo sapiens
gtctgacatttcttttgtgcaagatgagcctcaagtgcttctgcattacactggtgctcaagaccgaatcggctg

SEQ ID NO: 199252 - DNA, 100 bp, Homo sapiens
cagacccggacgacccccattgctgagccagcggagctgcttgagttcaaggcagcttgcctcgagatttcatgaacagtttatcgtaagagaagatctg

SEQ ID NO: 199253 - DNA, 51 bp, Homo sapiens
ggttgtagagttccgtgactcccagatggaatcttgctctcttgctcagac

SEQ ID NO: 199254 - DNA, 75 bp, Homo sapiens
agctgatgctaaactaggaggggtcataaagtgagaaagatcagtctaaagaaaaggagaagaaagtgaaaaaaa

SEQ ID NO: 199255 - DNA, 100 bp, Homo sapiens
cagagagaaggaaacacttagaggaagttctggagatgaagaaaagaagatttttcagatcccctggatgcatgcggctagacatgggtgggatgtggaa

SEQ ID NO: 199256 - DNA, 100 bp, Homo sapiens
atatgtccaataactagagaacttatgaaagatccggtcatcgcatcaggaacaacttgaaacagccaggaagtttctatattatgaaatgggctataaa

SEQ ID NO: 199257 - DNA, 50 bp, Homo sapiens
gatgaagaaggtgaagaagcggatgaggctatttctgccgggcgctccgc

SEQ ID NO: 199258 - DNA, 75 bp, Homo sapiens
aggcggcgccgctcccaagatgtcgcagacggccatgtccgaaacctacggaacccacttccagcgggtgatccc

SEQ ID NO: 199259 - DNA, 75 bp, Homo sapiens
attgtggctgtcacaggtgccgaggcccagaaggtgggatgctatggaatatgatgagaagctggcccgtttccg

SEQ ID NO: 199260 - DNA, 90 bp, Homo sapiens
catgaatggagcaaaatggcggatcatgtgcagatgaaagcacccccgccaagaagacagacattccctggcggctgaagcagatgctgg

SEQ ID NO: 199261 - DNA, 96 bp, Homo sapiens
gcggaagcccctgcgcccgcgccatgggaaaaattgaggaagcagtgaatgcatttaaagaactagtacgcaaataccctcagagtccacgagcaa

SEQ ID NO: 199262 - DNA, 75 bp, Homo sapiens
attccaagtaactcttatttgacttcctagcatgggctgttgtgctggagagaacgagagctacgaagagactac

SEQ ID NO: 199263 - DNA, 73 bp, Homo sapiens
ggaagctgagggcacgtgtttgcggttcagccctttgatgaccgcagcagagagatcgatgtcttattgtgat

SEQ ID NO: 199264 - DNA, 75 bp, Homo sapiens
gttattctcaagctgtcacaggaggcaagctggcctcattttttctgtctagggtggatgccttgagccctcagc

SEQ ID NO: 199265 - DNA, 88 bp, Homo sapiens
gccacagtccacatgtcccggagaggccacttcatctgtaaaacctttgacctgttcacaccgtttagtgtggggcttgtctacctgc

SEQ ID NO: 199266 - DNA, 75 bp, Homo sapiens
acaacagttatcatatggcaagttgatccgcggaccatgtgtcaacttatgccgcgtttgtacagacgcatagac

SEQ ID NO: 199267 - DNA, 98 bp, Homo sapiens
agccagcggctgctcttccgaatcggatggaagaactggagcaaggcctgttgatgcagccatgggcgtggctacagcttgcagagaactccctcttg

SEQ ID NO: 199268 - DNA, 75 bp, Homo sapiens
ccacctacagaaacaaaatgtcaacaaattgatggctcctggaatgaggccgcccatgggaggccatatgccaat

SEQ ID NO: 199269 - DNA, 89 bp, Homo sapiens
attcgaccagaagagacagcctggaacacaggaacactgaggaatggtcctagcaaagaaaccagggtgacagaggagacaaaggcgcg

SEQ ID NO: 199270 - DNA, 98 bp, Homo sapiens
agatcattcacaatatctgtgtcgttcttggcagaaattatattttccagcccgtgtctgcagtactatactggcaattgctggagaagattttgcaa

SEQ ID NO: 199271 - DNA, 74 bp, Homo sapiens
ccgggacaacatgctgcggggcacagaacactcctatgccaccttcaccagctgtacaagtgcagggccagcct

SEQ ID NO: 199272 - DNA, 75 bp, Homo sapiens
atggctgaggggcgagaactgatcctggacctggagaagaatgactgatgcttttttcaaagccgctataagcct

SEQ ID NO: 199273 - DNA, 74 bp, Homo sapiens
gtgagtgcgctgacttggagcctctcttcctatacctgtgcaaacattgctgtcgaactgctccagaaggcagc

SEQ ID NO: 199274 - DNA, 83 bp, Homo sapiens
ccgatgaggaagtactgagcctgttggaggaactggcccggaaacaggaggacgggaacgcccttttgcttgtgactggcagg

SEQ ID NO: 199275 - DNA, 90 bp, Homo sapiens
caggccgtggaccgggccctggctgagggagtattgctgaggacctcacaggagcccacttcctcggagagcctgaacttggaggaccaa

SEQ ID NO: 199276 - DNA, 80 bp, Homo sapiens
ggagacacggcttcccccaaggaatatacagccgcggcgagtcctttgcacatgttggcaacacacgcatccgcatcggc

SEQ ID NO: 199277 - DNA, 100 bp, Homo sapiens
ctcctgggaggtcatcgaaggctaccgggcccagcacagccagcaccgcacgccctgcaagggaggtgtggatgaggtcaccattgtcaacattttgacc

SEQ ID NO: 199278 - DNA, 88 bp, Homo sapiens
gtctgtctctgtcacccttttaatcctagacatctccagaagtgaatttacaaccctgaagaatctccctatccctattttgtccccc

SEQ ID NO: 199279 - DNA, 88 bp, Homo sapiens
ggatggccccaggtgtaagcgcagaaagcaggcgaacccgcggcgcaataacggtatttataacagcaatgatgtagcagtatcgttt

SEQ ID NO: 199280 - DNA, 101 bp, Homo sapiens
ggctgaatgaactgctagttgtgattccgctcaagctccaccagaataactgaagtgaagtgatggactccgatttggagagtagtaagacgtgaaaggaa

SEQ ID NO: 199281 - DNA, 100 bp, Homo sapiens
agatttgctatttactctgctcgagatgatgaggaattggtccataacttccagaactcgggacaactcagctattaaaggattaacagctggcaaatac

SEQ ID NO: 199282 - DNA, 100 bp, Homo sapiens
actacaggggtgctgacaaactgtgtcgcaaagcttctttagtgaagaccgccgggagagcctgcccacctccccaccctggacgccgggcgcgtcccgg

SEQ ID NO: 199283 - DNA, 75 bp, Homo sapiens
ctccctcctttaaacagcttctccgggtctcagcatggcgccaagcccatctttgtgtgcttgcatccaactgtg

SEQ ID NO: 199284 - DNA, 51 bp, Homo sapiens
gaactcccaaaatgaggtcaacggctggtattgacctgatggacatggctt

SEQ ID NO: 199285 - DNA, 118 bp, Homo sapiens
ctgctgtctgcttgcagtgttgatggtggtggtgctggtcatcaatgttactcaggtagagatgcctgtgaggagccaccaacatttgaagctatggagctcattggtaaaccaaaac

SEQ ID NO: 199286 - DNA, 101 bp, Homo sapiens
tcgccatctatcacgcacacagaaccctggccaggatcatgaagggcgattgaaaaggaaaaccagtagattcccagacatcgcgaagtgaatctgaaatt

SEQ ID NO: 199287 - DNA, 97 bp, Homo sapiens
cgccgaagaggccgccgccaaggccacagaggagccagtggtgcctgtggagccaatggagtccatgctgaggcccttcaacctggtcatccccttc

SEQ ID NO: 199288 - DNA, 82 bp, Homo sapiens
ctgaggcggcgcggcagcggagggacggcagtctcgcgcgccctgggcgctgcctatggcacagccaagagcggtaccggca

SEQ ID NO: 199289 - DNA, 75 bp, Homo sapiens
gagctacatcaggaagagaacagcggaacatgaggcagcacagcaagcggatttcggcctggcccgggcctatgg

SEQ ID NO: 199290 - DNA, 89 bp, Homo sapiens
aagacagtgtgccagataccattgatgaaggaaatgctaaagcgattccaaggtatactctgaaactaatgattgataaagcaagttta

SEQ ID NO: 199291 - DNA, 93 bp, Homo sapiens
ctccattggatttaaaagacagtcctcgtcagcactgactttcagctatggaatcggtcagcccaaggccaaccccactgtcactctgttccc

SEQ ID NO: 199292 - DNA, 100 bp, Homo sapiens
ttccacccttttctgggaacgcaatttttcacagcaaaagtctttgctaaactccttcatacagattcatatggaagaatttccatcatgcagttcttta

SEQ ID NO: 199293 - DNA, 88 bp, Homo sapiens
cggacgcagggcgctgggccgggtttcggcttcggccacaggtaagaatgattgatgttggctgatattggagtgctcattcacatga

SEQ ID NO: 199294 - DNA, 75 bp, Homo sapiens
aagttggagatgctgaaaatgttgcttcatatgattttctggatatgccgcagaaggatccgtgccagaagcaag

SEQ ID NO: 199295 - DNA, 83 bp, Homo sapiens
caccaccagatctttctccgtggattcctctgctaagaccgctgggtgaggtggctttgaccccgggttgcccggccagcacg

SEQ ID NO: 199296 - DNA, 75 bp, Homo sapiens
cgcccggattggggatgagtatgcggaggacagctctgatgaggaggcgatcagtgggtgaccgcggctgcgagg

SEQ ID NO: 199297 - DNA, 75 bp, Homo sapiens
cggcgctaggggaacccgtgcggctggagagagcaatcttcctgagctcttttcgggtgccatatgaggaaatca

SEQ ID NO: 199298 - DNA, 100 bp, Homo sapiens
cggattccttgcttggcggcagggggcggaacaaggagccttggagcggggcaaaggtgggagatgccatcccagcagtggaggtgtttgaaggggagcc

SEQ ID NO: 199299 - DNA, 83 bp, Homo sapiens
agggaaatcgtgcacatccaggctggtcagtgtggcaaccagatcggtgccaaggtgtgtgatcctgtaaaattaaatcttcc

SEQ ID NO: 199300 - DNA, 100 bp, Homo sapiens
ttacactgacagaagcagtggtcgaatccagtagaaaactggtcaaggaagctacatatctgaagagatggattaagaatgctttggattaaggattgtg

SEQ ID NO: 199301 - DNA, 98 bp, Homo sapiens
tgccagtgcttaggctttggaagtggtcatttcagatgtgattcatctagccccctcttctctcctggaggtcagccggccccttgtggctctcaggc

SEQ ID NO: 199302 - DNA, 82 bp, Homo sapiens
gacgccatgtcgggttattcgagtgaccgagaccgcggccgggaccgaggggtcccctggaagtgacgctgactcagccagt

SEQ ID NO: 199303 - DNA, 100 bp, Homo sapiens
gagaaggagcacgattacagggatgagcatttggactttatccagtcacacctgcggaggttctgccttcagtatgtggcccggccagataagatttcag

SEQ ID NO: 199304 - DNA, 74 bp, Homo sapiens
tcctgaactgtaagctggctaccagggccaaggctcagctgtcgcaggccctggaggagctgggaggccagaaa

SEQ ID NO: 199305 - DNA, 98 bp, Homo sapiens
aactaagccgattttccggaaaaagtgagaaagatcagtctaaagaaaaggagaagaaagtgaaaaaaacaattccttcctgggctaccctttctgcc

SEQ ID NO: 199306 - DNA, 100 bp, Homo sapiens
agagatgccccggagcgggatgatcccccagcttcagcagcttggagtccagttcaggctggcctacctcctcatcgaggaggacatccgggaccttgcg

SEQ ID NO: 199307 - DNA, 82 bp, Homo sapiens
aaagataagaagagaaaaagagaagatgaagaaacccagcttgatatgttggtttactcctggcttgggggcattaggaagc

SEQ ID NO: 199308 - DNA, 74 bp, Homo sapiens
ccgagaggccgtgcgggacgcgggcgccaggaccggccgaacgcagagggctctggaggccacgggcatgatgc

SEQ ID NO: 199309 - DNA, 75 bp, Homo sapiens
cagagcacacctggccaatcatgacgagctcatctccaagttgaaaatattcagggagcaggtggcagtcctgtt

SEQ ID NO: 199310 - DNA, 75 bp, Homo sapiens
aaatgccctccgggtcacaggataaggtgaatggaggcattgagaacacattagagaaggaggtgatgcagtatg

SEQ ID NO: 199311 - DNA, 99 bp, Homo sapiens
caagaccatcatgctgcgcggccttcccatcaccatcacagagagcgatgcgaacagctgcttggagaactacaagtgaagaaaagaaagcattagatc

SEQ ID NO: 199312 - DNA, 95 bp, Homo sapiens
tcaataccttctattccaacaaggagattttccttcgggagttgatctctaatgcttctgatatacaggtatccccgtttttacaacagatgttc

SEQ ID NO: 199313 - DNA, 50 bp, Homo sapiens
aataccacatggaaatgaattctaagatgtctttggtggacttgggaaag

SEQ ID NO: 199314 - DNA, 100 bp, Homo sapiens
ttcaatatgcgtggtggaaatttcagaggaggagaagggtcagacaggtattatccccctcgagaagaggaaacaaatgaaatagaacgacagcagtcac

SEQ ID NO: 199315 - DNA, 88 bp, Homo sapiens
cgggggcgccctggaggagtccctgaagatctatgctcctctgtacttgagagttttcaacgtcctttatcccatgcctgccgaccag

SEQ ID NO: 199316 - DNA, 75 bp, Homo sapiens
ctccgagtctgtgaacctgactgctctaaacccttcatgctggagtgcagtggcgcgatctcggctcactgcaag

SEQ ID NO: 199317 - DNA, 75 bp, Homo sapiens
gggggagactctatgcaattgcaggaagctatggagatattttgcatagaatgaaggatctctgcagatacatga

SEQ ID NO: 199318 - DNA, 88 bp, Homo sapiens
tggattggtggtgtggcctgtgagccactgcctgacagatacacggtgtcggaggagagcatcagatccatgctgctgctgactcgga

SEQ ID NO: 199319 - DNA, 76 bp, Homo sapiens
gaaggctgaggtggcagcggcaggagagtccggccgcgacaggacggtaactaaatgaccatggaatctggagccg

SEQ ID NO: 199320 - DNA, 82 bp, Homo sapiens
cgcccccgcacccccgtgccccgctccggccagacaatgcagatcttcgtgaagactctgactggtaagaccatcaccctcg

SEQ ID NO: 199321 - DNA, 126 bp, Homo sapiens
cgcggtttgtcgccagaaggaagatggcggatctggaggagcagttgtctgatgaagagaaggtgctggagaatctggtaaaagcaccattgtgaagcagatgaggatcctgcatgttaatgggtt

SEQ ID NO: 199322 - DNA, 98 bp, Homo sapiens
aacgaggcaaggagctaaagcagcgtgcgttcagccctgggggggaaatttgcagtggtgagaaaatgtataaagaaagattctgggaaagaatttgc

SEQ ID NO: 199323 - DNA, 75 bp, Homo sapiens
gtgagccaccgtgcctggctgaaggaacctacaagcagcaattggcgcctattatgactttgagagcccaaacat

SEQ ID NO: 199324 - DNA, 75 bp, Homo sapiens
cttccttcaagatcctggctggggacaagcctgggagctcccatcgaccatggcagtcctactttgacttgatct

SEQ ID NO: 199325 - DNA, 90 bp, Homo sapiens
cttgtgtcactaacggaccgtttatcatgagcagcaactcggcttctgcagtgagtgagatcattggccgagacctgagtggcttccctg

SEQ ID NO: 199326 - DNA, 155 bp, Homo sapiens
tgagaaaaaacagcagatggctcgagaatacagagagaaaattgagacggagctaagagatatctgcaatgatgtactgccacttccggctcctgcgtcgctccggaagcctgcgagttccggaagccttggtaatccagattcggctaggaaaa

SEQ ID NO: 199327 - DNA, 88 bp, Homo sapiens
ccctattcgacagaactgatattttatattgaaatggatcctccaggcaatcttgctgccaatgatctctccccgtcccgaatagcca

SEQ ID NO: 199328 - DNA, 83 bp, Homo sapiens
caggggcagcgggagccggccggatcatggaagggaagtggttgctgtgtatgttactggtgcttggaactgctattgttgag

SEQ ID NO: 199329 - DNA, 100 bp, Homo sapiens
ccgcgtgcgggcctctttcaggccgctcctagtggacgcagaggcgggccgaggacgttccagaaagctgagtctgatctggattacattcaatacaggc

SEQ ID NO: 199330 - DNA, 80 bp, Homo sapiens
gccggagcggcgccatggaggagggggcgccgcggcagctctccctgtccagccgcctgcagctgaccctgtaccagtac

SEQ ID NO: 199331 - DNA, 82 bp, Homo sapiens
tcagcctcctgattagctgggactacaggaccgagtctcctgccattccgagcaggcctggtatgggtaatggtgtgaagga

SEQ ID NO: 199332 - DNA, 100 bp, Homo sapiens
ggcagcctcttccagtgggcagggtcagcaggcccaaacccccacagaaatgagccgtcagactgctacagcattacctaccggtacctcgaagtgtcca

SEQ ID NO: 199333 - DNA, 100 bp, Homo sapiens
gagctggatgtcatgttcagtgaactggtggtctgctgagaacagacccagtccctgaggaaggagaagatgttgctgccacgatcagtgccacagagac

SEQ ID NO: 199334 - DNA, 88 bp, Homo sapiens
gaacattcatatggtttggaaggtggaaagcaatttcttgaaaagagattacagggcggcgactggcggcgcgatggacctgaccggg

SEQ ID NO: 199335 - DNA, 50 bp, Homo sapiens
aaccctcattgacctctatgaacaggttcagcaagcatttgaaagtccgg

SEQ ID NO: 199336 - DNA, 100 bp, Homo sapiens
gcagcggcacctacggggacgtctataagtatttgactacagtcattccttatgagaaaaaaaacggaccaccgtctgttgaagatcttcaaatattaac

SEQ ID NO: 199337 - DNA, 89 bp, Homo sapiens
gctacacctgtttggctacgaatcccagcggctcagacacaacatctgctgaggtgttcattgaaggaaaatggcaaatgcacgacagc

SEQ ID NO: 199338 - DNA, 96 bp, Homo sapiens
ctcaacctcaaatcagtactgagggtgaaaatgcctcgtgtaaaagcagctcaagctggaagacagagctctgcaaagagacatcttgcagaacaa

SEQ ID NO: 199339 - DNA, 100 bp, Homo sapiens
tgcactgcatggttgctgctggatgtgttgtgttcctggcttccctctggatgctgacagaaacaagggtaacctggatgaggacatcattgcagaagag

SEQ ID NO: 199340 - DNA, 74 bp, Homo sapiens
aagacaactataaacgagtgactgggacaaggtgatgactgaaaaagggaaactgtgccactatttgtaccatc

SEQ ID NO: 199341 - DNA, 83 bp, Homo sapiens
ggcgggtggaggttcgagcgctgttctcgctccggagccgctgcacatttcggggaggtcatcaaggcttgggacattgccat

SEQ ID NO: 199342 - DNA, 100 bp, Homo sapiens
tgcggagcgagttacgagaattcccggccgctgcaaggggtgccaagtcctgccctgccaacttcttggcagctgccgacgacaaactcagtgggttcca

SEQ ID NO: 199343 - DNA, 82 bp, Homo sapiens
caaggaaaaactggagagcttcatcaaaaatagtgatagctttgataagttatggaaacaaaggacatgctttacatcgtca

SEQ ID NO: 199344 - DNA, 101 bp, Homo sapiens
agccgaccttgagctccaggagttcgtctcttacgtctgcggaagtgcagctgcctcagttcttagcgcagagctattctcaagctggaataactgagact

SEQ ID NO: 199345 - DNA, 90 bp, Homo sapiens
ctttgcctcatttgaggagtgggaacaggcttcggcgaacacaaagtgtcactactccatccagaagggagctgcgtttctgggacttgg

SEQ ID NO: 199346 - DNA, 100 bp, Homo sapiens
cggaggaaatctgacttggaaactagtgaaccaaaacctttcctctactatcctgaaatcaaagaattaacactgaatcctccggaaggaattgtagcag

SEQ ID NO: 199347 - DNA, 100 bp, Homo sapiens
ctctcatgttctgcacctcaggagggaattcagcctcagtgatgtccatgagggggaaatttgcagtggtgagaaaatgtataaagaaagattctgggaa

SEQ ID NO: 199348 - DNA, 74 bp, Homo sapiens
ttccgtaacctgcgggagaggtttggaattgatgatcaagatttccagagctggactggccattatggaggagg

SEQ ID NO: 199349 - DNA, 78 bp, Homo sapiens
cgaggagaagtaccaggaggcgttggccaagggcaagtatatcgcgtcaacacagcgacctgacgggacctggcgcaa

SEQ ID NO: 199350 - DNA, 100 bp, Homo sapiens
agggtggcaagcatcaccttggcctggaggagcccaagaagctgcgaccaccccctgccagggtccagaggtgtccttctaaagctggtagaggtttcac

SEQ ID NO: 199351 - DNA, 97 bp, Homo sapiens
actgccctacgtgctcaccgacatcgcggcctccttcaccctgctggttggcatctacttcccttccgtgaccggtctgggataaaagtgaaagtgg

SEQ ID NO: 199352 - DNA, 100 bp, Homo sapiens
cttaaatgaagccactgattagcaatttaaagatcctctccaaggctcgtggtcccaagaagcatctgaagcgggtggcagctccaaagcattggatgct

SEQ ID NO: 199353 - DNA, 100 bp, Homo sapiens
aaatgtcagctcttccgcagtgattgaagctttgataaatgaaatcttcctaagtataggcccgatgagagaaagggaaagttaaggatgctggagcaga

SEQ ID NO: 199354 - DNA, 90 bp, Homo sapiens
gtccaatcagttcagtatggcaaagaaaaggcaaataaagacagggtatttgcaagagagaagaggtactcccttatagggactcgtaaa

SEQ ID NO: 199355 - DNA, 75 bp, Homo sapiens
gaggaaactaacctcaacctctgccatcacaagggtaaactgtcttgagccccaccctcacctgcctgtgctggc

SEQ ID NO: 199356 - DNA, 100 bp, Homo sapiens
aaggcatctccccagtgcccatcaaccttcgagtctactcgccacacggcagtttgaagagaacacatgaagaagaggatgattttggaaccatgcaagt

SEQ ID NO: 199357 - DNA, 90 bp, Homo sapiens
cagaggccaggctttatgggagcatgggttaccagcgacgcaccctggccctcatctttgtgtcccatggagccggagagcacagtggcc

SEQ ID NO: 199358 - DNA, 100 bp, Homo sapiens
cgcgcgcctgtagctcgcgggcctcgcagatccttgccagaatggaggttcctgtatggatggagtgaatactttctcctgcctctgccttccgggtttc

SEQ ID NO: 199359 - DNA, 83 bp, Homo sapiens
gtcccggtgtggctgtgccgttggtcctgtgcggtcacttagccaaggcggcggcggcggcgcccgggagccggagccttcgc

SEQ ID NO: 199360 - DNA, 100 bp, Homo sapiens
tcatgatccaccggcctcggcctcccaaagtgctgggattataggcgtgagccaccgtgcctggctgaagtgtatgggtttcgacagaccatgatgaaat

SEQ ID NO: 199361 - DNA, 100 bp, Homo sapiens
attgtacagtgacatcttctgggatttagtctgactgtcatagagtggtcccaggtgcacttcctcagggagatcatcgaggccatgttgaaagcctatc

SEQ ID NO: 199362 - DNA, 98 bp, Homo sapiens
agcccatcccggtgcacacagttcctctttctgaagatcagtgacctgtgtaattatgcagaagaatggagctggattacacacagcaagttcctgct

SEQ ID NO: 199363 - DNA, 82 bp, Homo sapiens
cgccccctacccgcttctcgtagtcctgggagcacagcagaagtaatgattacggacctgaagccaaagaacaagatgcgct

SEQ ID NO: 199364 - DNA, 83 bp, Homo sapiens
ctcagaagcagtattgggtctgcaactcatccgatgcaagtatttcatacacctactgtggcaccatgactcctgtgaggatg

SEQ ID NO: 199365 - DNA, 75 bp, Homo sapiens
tggacattggagagagtggtattatggtgtaaacaacgattctttggagtgtacttttcccaacactggtgctcg

SEQ ID NO: 199366 - DNA, 98 bp, Homo sapiens
agaaatggtatcaagaaaccccgatcacaaagatacgaatctcttaagggggtccgtcggaagttagagctggaagctgctgtgacccgcctgcgggc

SEQ ID NO: 199367 - DNA, 75 bp, Homo sapiens
ttgtcgtcttcctctcagaatatgtgggcaaaatacatatctcagtgcattgatgagatcaagcaggagctgaag

SEQ ID NO: 199368 - DNA, 91 bp, Homo sapiens
tgcatgtgaacacgaacactctaattgcctcctgatagcacacagaaagctttggggccatttggatcacacgatgttttttcaagatttt

SEQ ID NO: 199369 - DNA, 83 bp, Homo sapiens
tcctgttcttctggctctaagatctgaatgttgtgaccactaatttgttttcggctttgtgagaaaccttaccatcaaacacg

SEQ ID NO: 199370 - DNA, 75 bp, Homo sapiens
cccggctgccggtcgacgaccgccccgcgtcatgcggctcctcggctggtgcaattctgtggtgttcttggtcac

SEQ ID NO: 199371 - DNA, 100 bp, Homo sapiens
ggtgcggagagactccttgggggtcgagcacataacggggttcgggtgtctcgtgtgtgaacatcacaggggagccctggaagcttatgttcaatcagtg

SEQ ID NO: 199372 - DNA, 100 bp, Homo sapiens
caaaattctgaactcaggacttggcaagccaacatagccgaggtagaggtctccatccctgccaagctgcacaactccctcattggcaccaagggccgtc

SEQ ID NO: 199373 - DNA, 100 bp, Homo sapiens
ctggaggaaggagttcaccaccatcaaggacgtgaccacgcagtctgtgatggggtttgatcctctgcctccttcggacacaatctactcctacgtcagg

SEQ ID NO: 199374 - DNA, 90 bp, Homo sapiens
atcgcagtccggaggtgaggcggaactctgagacgcaaacatgcagatctttgtgaagaccctcactggcaaaaccatcacccttgaggt

SEQ ID NO: 199375 - DNA, 140 bp, Homo sapiens
gcctggctgagtttcggacgtggttaagaaccaactggttgaggttcaatgcagacaagacggatgtgatgctggatttttttcccaggaagccatcccgtcagaggggttcaagtgatgaaagttggcaaactgcagct

SEQ ID NO: 199376 - DNA, 75 bp, Homo sapiens
aagaagatgcctcgaactaaacaaattcatcccagaaatctaagagaatcttatggcaagggccttatatgacaa

SEQ ID NO: 199377 - DNA, 100 bp, Homo sapiens
atcctagcaataccaccagcagcaccagcaacagtggcaatgagaccagtggaagcagcaccatcggggagacaagcaaaccagagttggagccacccag

SEQ ID NO: 199378 - DNA, 100 bp, Homo sapiens
atcacctgtcgtgcccccctctgtcaagactccgacacctgaaccagctgaggtggagactcgcaaggtggcgagagaagcatgtccggtcactccgggc

SEQ ID NO: 199379 - DNA, 100 bp, Homo sapiens
gtttgatactgacctgtaaatcatcctttagcgtttgctgccaattgatggggcaaatgatctcttttttcagccacctccactgactcctacctccaaa

SEQ ID NO: 199380 - DNA, 50 bp, Homo sapiens
ggacaagatcccgtccatgaatcaggcttctattgtggctgaggcctacg

SEQ ID NO: 199381 - DNA, 75 bp, Homo sapiens
gcacgttggaaccgaagagagctctgttgttgcattatcttcaggcagagtgagaagctgcagcaatgtctgatt

SEQ ID NO: 199382 - DNA, 74 bp, Homo sapiens
cgccgcgaggccgggaaggtgaaggcacgtgtggttctcaaatataggcattctgatgggaacttgtgtgttaa

SEQ ID NO: 199383 - DNA, 100 bp, Homo sapiens
atgaagtcaaattggccctgaaaaaagacagagaaactatgggacacagatatgttgaagagacagatctcgctttgtcgcctgtcaacggctagagtgc

SEQ ID NO: 199384 - DNA, 100 bp, Homo sapiens
atatgggtacaggtacatttggaccagtgggtctggcaccttccacgctctgtagtttcatttcttcttcgtcgggggtctcaggagttggagccgagcg

SEQ ID NO: 199385 - DNA, 100 bp, Homo sapiens
ctcccagcagcctccgcggtggatacgtcgccatcttggatccgcgggacaagaaaattcatgcggcagcctgcttctgcaaagtggtacgatcgaaggg

SEQ ID NO: 199386 - DNA, 100 bp, Homo sapiens
ggagaatggaaaagaaccattgaagcttgagagaaaagcccccaaaagcagctattcagactctaaaatagagctcaagcttgagaagagagaaccacta

SEQ ID NO: 199387 - DNA, 82 bp, Homo sapiens
tttgagggacccccattcaagttcaagttcacaattggcgtacggacattgctgcaggagaagaggttgccatcaagcttga

SEQ ID NO: 199388 - DNA, 89 bp, Homo sapiens
ttaagtgaagagtcatacaaagacagcacgctaataatgcaattactgagagacaacttgacagagtcccatttcgtggtatgctgttt

SEQ ID NO: 199389 - DNA, 83 bp, Homo sapiens
atcatggacacagttttgacagtaattcttttgggccggatattagaaatggctactccccagtcaattttcatctttgcaat

SEQ ID NO: 199390 - DNA, 90 bp, Homo sapiens
ggaagatatagaatcaccttgggattctgaggccgcaaaagataagtaccgtgaattggctgtggaagggatgcacagagaacttgtgtt

SEQ ID NO: 199391 - DNA, 100 bp, Homo sapiens
gagaagccttttccgttgccggtgccggcctagcgtcctggaattacttcaatcaagtgcttctaaagtaaagaaataccgtaaattaattttagagcag

SEQ ID NO: 199392 - DNA, 90 bp, Homo sapiens
acaaccttcgatctcctgacgatgccaccctgggccgtaacccactccgcttcatcctgcactctgggcgtgtggcccacctgtgtcccc

SEQ ID NO: 199393 - DNA, 75 bp, Homo sapiens
agagttctttgtggatggacttgattctgatgagaggcaatgcggtgtgcagagggtgcttggtggttctctcct

SEQ ID NO: 199394 - DNA, 51 bp, Homo sapiens
ctctgagcaatgttgaggtgtttatgttggtagctggcagtgttgtgatgg

SEQ ID NO: 199395 - DNA, 90 bp, Homo sapiens
gaggaggtggaccagaacttttggaactagtgccggcggctctccaccccccagcatcagaggctccttgaaatgctagatacagagaag

SEQ ID NO: 199396 - DNA, 100 bp, Homo sapiens
gaaaacctacccaagaagcctatcagaatgaattaaagattgaaagtgtagaacgttccttcattctctcagccagaatttctagaaggaggagttggcc

SEQ ID NO: 199397 - DNA, 75 bp, Homo sapiens
attgttgtgtcagtgaattaggagaacttggaaaggttcagtttcgtgacgaatcagagatcattgatttcttcc

SEQ ID NO: 199398 - DNA, 100 bp, Homo sapiens
cctggaccctgcccagcagaatttgtatagagatgtgatgttggagaactacagaaacctggtctccctagttttaacttctagtcatggcgaatgatcg

SEQ ID NO: 199399 - DNA, 100 bp, Homo sapiens
ggttagcctgctggacaacggcctgcgtgtggcctccgagcagtcctctcagcccacttgcacgcaatggctgccatccggaagaaactggtgattgttg

SEQ ID NO: 199400 - DNA, 100 bp, Homo sapiens
gtgttggaccttccggagcttctcagaagacagagggttttcttttgaggcacgtgtggttctcaaatataggcattctgatgggaacttgtgtgttaaa

SEQ ID NO: 199401 - DNA, 100 bp, Homo sapiens
gccacgctcagctcgccaggcggcgcaggccgattcgaagacagtctcttacacctcctcctcagaacactattacatgggaagaatatatatctgctga

SEQ ID NO: 199402 - DNA, 75 bp, Homo sapiens
caacgaacctggacattgaggagctcaagtgattcgcctttgccagtctcatctcgtgtctgctttgttaagttc

SEQ ID NO: 199403 - DNA, 75 bp, Homo sapiens
gtgggctgttggctgtatattagcagagttacttctaagggaagagcaagcagtcagaccaaaatacctactggg

SEQ ID NO: 199404 - DNA, 50 bp, Homo sapiens
tcttcgagtatttgtagaaggccaagacaatgcaaactccagtgaacatt

SEQ ID NO: 199405 - DNA, 75 bp, Homo sapiens
ctcgggtcctcaagcagcacgtgggtgaaagaaacttccacgccttctaccaagagccaaggcaaagagggacca

SEQ ID NO: 199406 - DNA, 100 bp, Homo sapiens
accccctggatcccagctttgtggctgccgtcatcaccatcaccttcaatccgctctactggaatgtgggttctcggaccagcagtgaccttcaaagtga

SEQ ID NO: 199407 - DNA, 114 bp, Homo sapiens
cgggccgcgaaccgcagtatcatgctggccaagaagatcatcattaaggacggaggcacggtcaacaacggttccagcctcagggatgagtgcatcacaaacctactggtgttt

SEQ ID NO: 199408 - DNA, 82 bp, Homo sapiens
aaatatcatgagagcatggctcttccagcatctcacaacttaattcagtgcacaaatgagatgaatgtgaacatcccacagt

SEQ ID NO: 199409 - DNA, 100 bp, Homo sapiens
aggacattgaatacctgaagttcgataaagggccgtggctcaagcaggacaatcgcactttataccacctgcgattactccgcagagagaagaagctgcc

SEQ ID NO: 199410 - DNA, 83 bp, Homo sapiens
ccggctcatttggctgttttcttacaccatgtagtttcacaatttgaccctgcgactttgttgctcaggagaattagaaggct

SEQ ID NO: 199411 - DNA, 95 bp, Homo sapiens
atgcagcgatatgcagtttggtttggaggatcaatgctggcttccacggaaatctggcattttttaaagtttgcgccccacaaagaggaaatatt

SEQ ID NO: 199412 - DNA, 100 bp, Homo sapiens
tagcatttatcacttccttccttactttgtcttggtatactacatggcaaaatgggaaaggtattaatattagaaccaaccaaaatctatcaaccttctt

SEQ ID NO: 199413 - DNA, 90 bp, Homo sapiens
ggccgggcccagtcaccgaccgtgcacattcaggttcccgagcacaaacatcaagataacgttcactgccctgtccagcgagaagagaga

SEQ ID NO: 199414 - DNA, 90 bp, Homo sapiens
cctgcagctgctgctgcggctctcactgtgcgggctgctgctccagagggcggaggatcaggagcgtctgggcaagcagctcaagttacg

SEQ ID NO: 199415 - DNA, 75 bp, Homo sapiens
gcactgcctctggcatccccgacttcagcctggcatcctcgctacaacctcattgttgtgggccgatacccagat

SEQ ID NO: 199416 - DNA, 100 bp, Homo sapiens
gccgggactgattcctttgcagcctaacctggacttcatggacacctttgagcctttccaggaataagtcgcgctttcttcctcaaacttggcgaacttg

SEQ ID NO: 199417 - DNA, 90 bp, Homo sapiens
aacaacttagaatggagtataaaggtcacggtctagatcacattctcgatccagaggaaggcgatactctcgctcacgcagcaggagcag

SEQ ID NO: 199418 - DNA, 95 bp, Homo sapiens
ttctattcactaaaaccatgtgtctgaactgaagaagcttgggctcacttccacaaatcctaatcacacggatgctacagagagatcccaagaga

SEQ ID NO: 199419 - DNA, 82 bp, Homo sapiens
ttggggcggcctggctccctcagatattttggagtgtatacaataatatccctcctgtgactagcctgcctttgagatgtag

SEQ ID NO: 199420 - DNA, 74 bp, Homo sapiens
tttgtgttgatgaagatgaaagagactgcagctctggacttattggacaaaatgttgacattcaacccacacaa

SEQ ID NO: 199421 - DNA, 76 bp, Homo sapiens
cagtggagaggcctcaccatgtagtctcttgcagctgaatggggtaaatatggaatgcgattcaatgtgattcaac

SEQ ID NO: 199422 - DNA, 51 bp, Homo sapiens
gagaattccaagttattagtgaacagggtgaatacgatagtccagaggacg

SEQ ID NO: 199423 - DNA, 90 bp, Homo sapiens
aggaaccagctcgggggccaactctgaggagtccactgcagcagctccagggttccttgaaaagaaaacaggtagttaacctatctcctg

SEQ ID NO: 199424 - DNA, 50 bp, Homo sapiens
cattggatgaagtggctccggagataaatcaccatttgactgcagcaatt

SEQ ID NO: 199425 - DNA, 100 bp, Homo sapiens
atgcgccggaacaccattcttcgccaggccaggaatggtgtccgcaatgttgccagtgtctgtctgcagattggctacccaactgttgcatcagtacccc

SEQ ID NO: 199426 - DNA, 131 bp, Homo sapiens
caccgactcggacgcgccgcccagcgccgccgccccggacagcggccccgaagcgggcggcctgcactcggtaattgacccaggactcattttcaggaaagcctgaaaatgagtaaaatagtgaaatgagg

SEQ ID NO: 199427 - DNA, 98 bp, Homo sapiens
gtcgccttctgcctggtcgggatcccgccccgcccggagccccggcccccacaggattccaaagcctatttccatcttctcaatcaaatcgcaccaaa

SEQ ID NO: 199428 - DNA, 100 bp, Homo sapiens
caagaaccttgacaagctcatccggctggtaaatgcgcaggccctagactacttggccattggcatccatgaacttgctgcaatcagtgagagaagaatc

SEQ ID NO: 199429 - DNA, 100 bp, Homo sapiens
atatgacctatgcagttcgaaaactggataacactaagtttagatctcatgaggactcgtacctgcttgactatttcctctttctgaaccgctacttcga

SEQ ID NO: 199430 - DNA, 100 bp, Homo sapiens
gaggctgcgagcgagccgcgaaccgagcgggcggcgggcgcgcgcaccatgggggagaaacccgggaccaggtgcagaggccaagaccgttttgcccaag

SEQ ID NO: 199431 - DNA, 83 bp, Homo sapiens
cttacagccgctcgtcagactccagcagccaagatggtgaagcagatcgagagcaaggaatactcccccagttgcaagaggcg

SEQ ID NO: 199432 - DNA, 95 bp, Homo sapiens
tggcttgggttccatccttatatgaaccagttcctgatgatgatgagggaccttggtagctaatgtccgaagaaagtgactctctgagaaccagc

SEQ ID NO: 199433 - DNA, 118 bp, Homo sapiens
gccaaaaatgtgcatactcacagagttagagagagggatggtgacagcccacctgaggatattgaccataaggactcatatctcattacaagaagcatcatggccgagccagactaca

SEQ ID NO: 199434 - DNA, 98 bp, Homo sapiens
ctgctggcctccgtgacgcggcctcctccgcgcctcgcggcatggcgtcggaggggccgcgggagcccgaaagcgagctgtcgcctggttgggcccgg

SEQ ID NO: 199435 - DNA, 82 bp, Homo sapiens
gggtggcggctcgggacggaggacgcgctagttcgcaatgtatctgctgagcaaaaagatgaaaacaaagaagcaaagcctc

SEQ ID NO: 199436 - DNA, 100 bp, Homo sapiens
aatatgccaaggaaaaactggagagcttcatcaaaaatagtgatagctttgataaagggaggaagaaggagacttcagagaaagaggccgtgtgatggaa

SEQ ID NO: 199437 - DNA, 100 bp, Homo sapiens
agagaacatgcattaacatcaggcacgataaaagccatgttgagtggcccagtcaccattactttaagtactgcaaaatctcagcattggctctgctgaa

SEQ ID NO: 199438 - DNA, 83 bp, Homo sapiens
aataaccaggtgcttggcaaaatcgagcgggccattgctacaacatcaccacgggtctgtaccccttcgaaggggacaacatc

SEQ ID NO: 199439 - DNA, 76 bp, Homo sapiens
tttggccatctggacatgcatagtggcgcccagtcaggacccatgcacgggctggagtgcaatggcgggatctcgg

SEQ ID NO: 199440 - DNA, 75 bp, Homo sapiens
ttgttttttcctgtatgaagcggttggcaccactgaagtgaccgaatgagactaaatgtgttaaatgggcttgcc

SEQ ID NO: 199441 - DNA, 98 bp, Homo sapiens
cggaaatgtccgaaggccgcagtacttgaccctgtattttgggagtcgaacggagatcaactcactatcctgaaggtccattctcccaagaagagggg

SEQ ID NO: 199442 - DNA, 100 bp, Homo sapiens
aggggctctgggagtggctgccaggccatttccaatccagaggaagaccttctagaagaagtgatgggtgggagagtgctgacatactatgcaaagctac

SEQ ID NO: 199443 - DNA, 100 bp, Homo sapiens
ggctgctgctcgtcctggctgtcttctgccattcaggtgagcatctcctggaccaccctcaagcttcaggtgagctgagcttctaacactaccatcaaag

SEQ ID NO: 199444 - DNA, 51 bp, Homo sapiens
ggagcacaacggacacatcacagagggagcactatgtctgcggaagtcccc

SEQ ID NO: 199445 - DNA, 74 bp, Homo sapiens
gtggcctaccaggaggccaggggtgtcgccatggcacccagattggctgaaaacttctgtgtctgccatttagc

SEQ ID NO: 199446 - DNA, 101 bp, Homo sapiens
gcaaaacactctcttcttcagacacaggttcacccatcatcagaataacaccatcacgctcaagaggagcttaattctctcaagcagacacggcatccggc

SEQ ID NO: 199447 - DNA, 81 bp, Homo sapiens
aatttaacccattaaaactctgtgagcgagtcacaaaggatctgttccggtctactatgaagcccgtccagaaagtgttgg

SEQ ID NO: 199448 - DNA, 82 bp, Homo sapiens
ggggaggcgacgctaagttgctgatcgtggcgatccagacatttaatgtggatgcaccatgccagaccgtggaagatttaac

SEQ ID NO: 199449 - DNA, 75 bp, Homo sapiens
gggctcggccgcgcggactgaaggagactgaagctgggattctgtccctgaccgtcttcacagtccaggtgatct

SEQ ID NO: 199450 - DNA, 90 bp, Homo sapiens
gaattattggaggccaggtttactggagtaggtgttagtaagctgtgctccattgaagtgacttgtgaatcagccagtgtgatggctgcg

SEQ ID NO: 199451 - DNA, 82 bp, Homo sapiens
tcaaatgccaccacctaaaaggcaaccaactctgggagtatgacccagtgatgataagagcacttttgaagaaacgtgtcca

SEQ ID NO: 199452 - DNA, 74 bp, Homo sapiens
agacgatggccgtgtgcaacacgtacatccagacactgaaggaccacaggccccggatggtgtgggacagccag

SEQ ID NO: 199453 - DNA, 82 bp, Homo sapiens
atttcagtgactgaattaaaaggtgtcaagaagctcagaatggtactccaaagattcaggtttactcacgtcatccagcaga

SEQ ID NO: 199454 - DNA, 75 bp, Homo sapiens
gaaagttccagaaaccaaggagccaacctgtggattaaaggcaacttgagttggtggaaccaagtggctggattc

SEQ ID NO: 199455 - DNA, 90 bp, Homo sapiens
cgtgctgcttatggcggcgctggagagggggcgctgagctgttggggctttaatccagtgtgaccagttgaggaaggagctggagaggca

SEQ ID NO: 199456 - DNA, 100 bp, Homo sapiens
gctgggaaacatggcgaccgagggaatgatccttactaaccacgaccatcaaatccgtgtcggagtccttacaggcatcagcaatgcagaagcacggcag

SEQ ID NO: 199457 - DNA, 100 bp, Homo sapiens
agacgatctgcacttcgcattttggcattgacatttaattttagggtcctttatatagaagggagagtaggtgatggttgctgaagccttggatatttcc

SEQ ID NO: 199458 - DNA, 90 bp, Homo sapiens
atttataatggaattggagtcagcagaactgaaatagtgtctcctttcctcttgggccgggcactttgggctgccagtcggttcactgtt

SEQ ID NO: 199459 - DNA, 100 bp, Homo sapiens
gaggaagtactgagcctgttggaggaactggcccggaaacaggaggacgtgccagtcttcccgccagccacgtccagctggcgtcaataagcatctttgg

SEQ ID NO: 199460 - DNA, 75 bp, Homo sapiens
acagaggatgtcaacaattttttggagcattccatggcaatagattctggtttcaggaactctggcataacggtg

SEQ ID NO: 199461 - DNA, 75 bp, Homo sapiens
gatcatgtctgcgagccaggattcccgtcagagcaccataacatggtgtgggaagtgaagacaaatcagatgcct

SEQ ID NO: 199462 - DNA, 100 bp, Homo sapiens
ttcatgatccaagaggaatatgtggaccaggtttctggcctgagcgacaaaaagctcttgttcagcttctggaatttctgagcagccctcgtcagtacaa

SEQ ID NO: 199463 - DNA, 50 bp, Homo sapiens
gaggagactcctgaccctcagaatggtgactctcctattccatctgtttc

SEQ ID NO: 199464 - DNA, 90 bp, Homo sapiens
ccgagccagccgctgttttgccggaggagcccctcaggccgtccctcgtctgagctggctcactcgcccaccaacagcgggaagaagctc

SEQ ID NO: 199465 - DNA, 101 bp, Homo sapiens
atcgcatcctatggctcaaagaaagatgattatttgcatttgctggtctggcctttgcgtccttctacctggcagggaagttacactgcttcacaccacaa

SEQ ID NO: 199466 - DNA, 101 bp, Homo sapiens
ggctggtaaaattgcagtgctgaagacactggacccggtagcggggactcatctctggagaaggagttcctcggggccccagtggggccctcggtgagcac

SEQ ID NO: 199467 - DNA, 100 bp, Homo sapiens
ggctcctttaagacggtctacaaaggtctggacactgaaaccaccgtggaagtcgcctggtgtgaactgcaggatcaactcactatcctgaaggtccatt

SEQ ID NO: 199468 - DNA, 51 bp, Homo sapiens
gaccgcagggacaaccagggtgatatgggctatgtgcgggagtatattctg

SEQ ID NO: 199469 - DNA, 82 bp, Homo sapiens
ccgagcgcaccgacatctgcctgctcaaagagcctggagacacaggccccatccttcccaatggggacacttcagggagcgg

SEQ ID NO: 199470 - DNA, 100 bp, Homo sapiens
aaaagacagtcctcgtcagcactgactttcagctatggaatcgaaatatggctacacacacctttctgcaggagagctgcttcgtgatgaaaggaagaac

SEQ ID NO: 199471 - DNA, 113 bp, Homo sapiens
accctgcccttgccagaatttcctgcgctgttccacctcattcaacttcagggccaattcctgtccccccagcagcatggcatcgtgtgctgaaccctctgagccctctgccc

SEQ ID NO: 199472 - DNA, 82 bp, Homo sapiens
caagccgctggcagccgcggatctcaccgccgctcaggtgcttcaccgatatagacacattttgggattgtggcagccagat

SEQ ID NO: 199473 - DNA, 100 bp, Homo sapiens
ccctgcccagcagaatttgtatagagatgtgatgttggagaactacagaaacctggtctccctaggtgactggtatagtggtcccgcaactgaacttgat

SEQ ID NO: 199474 - DNA, 113 bp, Homo sapiens
cgcgcccgggaggaaggaacgaggcaaggagctaaagcagcgtgcgttcagccctggggctggacggcagtctggaaacgaccaatgagatcttggactctgcctctcacgac

SEQ ID NO: 199475 - DNA, 100 bp, Homo sapiens
ctctcccatcctctcacatgcctggagcattctcagaaagccgtgcttcctcaaagactgggaaatgcacgtccacttcaaagtccacggcacagggaag

SEQ ID NO: 199476 - DNA, 75 bp, Homo sapiens
ggatgcccctttggtgccctgacgcagcgcctcctgcaggccctggtggagggccagccagtgaccttcagtgag

SEQ ID NO: 199477 - DNA, 87 bp, Homo sapiens
aagacttggatcttttcatgaactcctgctggagccacccaaggctcttgtcaggatggtgaagctgttcatcggaaacctgccccg

SEQ ID NO: 199478 - DNA, 74 bp, Homo sapiens
agattttgatgtggatgatgccaaagttttattagctcttctcacagacagttttatcatcttatcatttttgg

SEQ ID NO: 199479 - DNA, 75 bp, Homo sapiens
tcggaccccgcggtcaacgcgcagctggatgggatcatttcggacttcgaagacaatgcagatcttcgtgaagac

SEQ ID NO: 199480 - DNA, 100 bp, Homo sapiens
aatgctggtggtctgcatcaccaccggatcaacttcgacaaatagatttaaaaactggaacggtgaaggtgacagcagtcggttggagcgagcatccccc

SEQ ID NO: 199481 - DNA, 98 bp, Homo sapiens
ctgcatgcacgagccaggaactgcgcagcctcttcgagcgccgcggacgcgtcatcgagtgtgacgtggtgaaaggctgacggagccagtgcagccgg

SEQ ID NO: 199482 - DNA, 100 bp, Homo sapiens
gactcagagtttccattgacactgatatgaatacaaatggagagatttgcatgggatgcagaaatatggaagactaaccaagcagaccaggagagaccag

SEQ ID NO: 199483 - DNA, 73 bp, Homo sapiens
ggcactgaagggggactacaggttcgagaggtaagcttgatgattaccaggaacgaatgaacaaaggggaaag

SEQ ID NO: 199484 - DNA, 100 bp, Homo sapiens
gtgcgctgcgccgcccgccgctgagggaccgcggggttagccactgctggctgcttccagtgttcgccgagagggcagcttgtgcagctggaagagaaag

SEQ ID NO: 199485 - DNA, 74 bp, Homo sapiens
tctctgatcagtgcccagaacaaggaaacaggaaagcagatggtggagctgaatatgccacttaccagactaaa

SEQ ID NO: 199486 - DNA, 96 bp, Homo sapiens
attggacacagtgccagagtgtatgcactttactacaaagatggacttctctgtacaggtttaccattgcttgttcagagaacaattgcgagaact

SEQ ID NO: 199487 - DNA, 126 bp, Homo sapiens
tggcgtcccgcgtagacgcagtggcctccaaggtgcagacagctgtgactatgaagggggattatgatgttgatgaagaggacatgatgaatcaggtgttgcagcgctccatcatcgaccagtgag

SEQ ID NO: 199488 - DNA, 98 bp, Homo sapiens
ggcaggatggcggcggacacgcaggtgctggagaatctggtaaaagcaccattgtgaagcagatgaggatcctgcatgttaatgggtttaatggagag

SEQ ID NO: 199489 - DNA, 100 bp, Homo sapiens
gtcggtcctggtaatctgtaggaaaagcgctgcggcccagggggtaaagagaggtacaatgactcttcttgcttttcacctaagttgaataagcaccctg

SEQ ID NO: 199490 - DNA, 100 bp, Homo sapiens
cggcgcggcgctcgctcctacggttgaaatcacaaagattagacacctttttagataggtgttcttcagcaccactgacaacacggttctgacagtattt

SEQ ID NO: 199491 - DNA, 82 bp, Homo sapiens
ctttgatggtggccctcttgatccccggcttgctgaagtcaaaactatacttgtagcaagcagaaacatcgatctaatacaa

SEQ ID NO: 199492 - DNA, 83 bp, Homo sapiens
cgggaagttgccggtgttgggagtaaaaatctggtttggtgtggtggacacaggcctattcatcaacatggctgagagagtct

SEQ ID NO: 199493 - DNA, 101 bp, Homo sapiens
gctctttcctttccgtctggcggcagccatcaggcagtcgatgatgtgaagaaaggttacatcaaagcagaagaaaagtcctatcaattacagaagctata

SEQ ID NO: 199494 - DNA, 75 bp, Homo sapiens
aatagaatgtaccaaactgggaaactggtctgccatgccaagttgtaaaggttcaactactcaatttcatgctgg

SEQ ID NO: 199495 - DNA, 90 bp, Homo sapiens
tctgtgcgtcctggactcctctgagaaacagtgatagactggagtgatgttagaaaacacaaatatggtcacctatcagagtctgcatcc

SEQ ID NO: 199496 - DNA, 82 bp, Homo sapiens
aggttgtatgtgatcagaagctgcgtcccaacatccccaactggtggcagagttatgagatttccatggagaatgattatct

SEQ ID NO: 199497 - DNA, 98 bp, Homo sapiens
tgggaagcaagtgatcagggtctcctgcggtgatgagtttaccattgctgccactgatgtgtctgcagtaaaacccactgttgccccaccactagctg

SEQ ID NO: 199498 - DNA, 100 bp, Homo sapiens
cctcccaagtaactgggattacaggtggagctgatcagaataatgttcagcatcaaccccctggagaacctgaaggtgtacatcagcagtcggcctcccc

SEQ ID NO: 199499 - DNA, 100 bp, Homo sapiens
ggccaaggaagctgtacatgcagctcatcccgcagcagctgctgtacttcatcctgctcctcatcatctttctgctggagatcatcgctggtatcctcgc

SEQ ID NO: 199500 - DNA, 75 bp, Homo sapiens
agttgggcccgaaattgaattctaacaacgttcccctgcagggagaggtggaagagattgagcagcacaacaagg

SEQ ID NO: 199501 - DNA, 78 bp, Homo sapiens
gaaggcgctgatcccctgcaagagctccagggcccacaacggcagtgtcctacatgtcggtgaaatgtgtggatgccc

SEQ ID NO: 199502 - DNA, 100 bp, Homo sapiens
tttgacttagtggaggaggtgcagctcaacttctaccagttcctcggggtgcagcaggctaccggctctctgaccagttccacgacatcctcattcgaaa

SEQ ID NO: 199503 - DNA, 75 bp, Homo sapiens
gatatcacagaggaaactctgcattctcgcttcctggaggccagtgaagaagcaaaggaagacatgaaaattgac

SEQ ID NO: 199504 - DNA, 50 bp, Homo sapiens
ttggaagctcatggacaaagtggtactccaaagattcaggtttactcacg

SEQ ID NO: 199505 - DNA, 100 bp, Homo sapiens
gagaactataagagcctggtgagacggagctatcggcgccgcggcaagagccagactacgcgtttgttcacatggagaaggaagcagatgccaaagccgc

SEQ ID NO: 199506 - DNA, 76 bp, Homo sapiens
agcagcgccgtcccgtccgacagccaggcccgggagaaggaggttttacataaatggagtcctaaacaaataggag

SEQ ID NO: 199507 - DNA, 100 bp, Homo sapiens
cattgattgtcttatatttcaagttaaggtccaaaaaaactccagctgtgaaagcaacataaatgataacaacgaacttgatgcaagtgataggtttgcc

SEQ ID NO: 199508 - DNA, 100 bp, Homo sapiens
ccactgcccttgcctcggtggttgccatggcaccagggacggtgactgtggttaagcaggggttgatagttcttggggaggtacctcccccagagcatac

SEQ ID NO: 199509 - DNA, 100 bp, Homo sapiens
gaccagcgcccactacgaggaaaataaatctcgattgttagcactgctagagtttgctgaagagaagatgaaagtgaactatgtcttcatctgcttcagg

SEQ ID NO: 199510 - DNA, 75 bp, Homo sapiens
ccagagcttgtgtagcgtcagatccttgagtgataaaggagtagaggatctagtttgaagcactaagaagaataa

SEQ ID NO: 199511 - DNA, 83 bp, Homo sapiens
cgaacgaccaagagggtgttcgactgctagagccgagcgaagcggaaccttctgaccagcctcatgggctcctcagagcagga

SEQ ID NO: 199512 - DNA, 73 bp, Homo sapiens
cacggccactcccgccgcgcaggagtcgggcaccatcccaaagaagcgatatattcgactttatgggagaaaa

SEQ ID NO: 199513 - DNA, 74 bp, Homo sapiens
aacacagccagtcagcaagcagcatcacaagctcagcctggacagcaacagattcaaacgctcaagaaattaag

SEQ ID NO: 199514 - DNA, 100 bp, Homo sapiens
tgatcttccagctcccctcacccaacgtcgtccctgaccctctattctgcaccctgtgagccaccgagactgaaccaaacccaggaagcggcgccaccaa

SEQ ID NO: 199515 - DNA, 98 bp, Homo sapiens
ctagcaccccgagaaccgtcagtttgagccagatggactaatggctgaaggataaatcaacatggcaactatgattccaccagtgaagctgaaatggc

SEQ ID NO: 199516 - DNA, 75 bp, Homo sapiens
tgtaccaggaggtgatgctggaaaactgtgggctcctggtatctctggacaaagatcattccactcagcctggga

SEQ ID NO: 199517 - DNA, 100 bp, Homo sapiens
ggacgagccactgaaggagtcccgcaggaaggaggccttcttcctggagatgcccaaagatgagctgcccaaccataactgcattaagcacctgcgctca

SEQ ID NO: 199518 - DNA, 96 bp, Homo sapiens
cgtcaagcacgtgacggtcatcggcggcgggctgatgggcgccggcattgcccagaatgacatcttcgagtggtccagggaccaccgagcccacca

SEQ ID NO: 199519 - DNA, 71 bp, Homo sapiens
gagcctcacctttattctctcagcacactgcagaacactatgtggctgccgtgtaagagtggaactgtcga

SEQ ID NO: 199520 - DNA, 82 bp, Homo sapiens
caaagaagagggctatattagaagggacaaaggaaggtgtcttgctgcaggtaactaatgaagaagtggtcaaccacagagt

SEQ ID NO: 199521 - DNA, 100 bp, Homo sapiens
agcagcaacagcagcgtcctccccaccccacctgccaccgaggccccctcttcgcctcctccaggttgccaggcaggaggggaggatcattctgacgtcg

SEQ ID NO: 199522 - DNA, 125 bp, Homo sapiens
ccggcgagcctggctacagctgcacctgccccgccgggatctccggcgccaactgccagtactggagagacccagaagtgttccatcctgagcgatttctggacagcagtggatattttgccaag

SEQ ID NO: 199523 - DNA, 90 bp, Homo sapiens
ggaagcgatggctgggcccgcgtggatctctaagtatggtttgaagtggtgaacatggatttttctcggcttcacatgtacagtcctccc

SEQ ID NO: 199524 - DNA, 100 bp, Homo sapiens
ctccccagggatgatggacatgcatgatttaatccagagactgacttcactatagaacccacagttgtatcaatggttggggaaagatagtggcaacagg

SEQ ID NO: 199525 - DNA, 90 bp, Homo sapiens
gtgagggtccggcccatgaatcgcagtccctgccacaggtggaccgacacacagtctacaatatcatcaccaattttatgcgaacccggg

SEQ ID NO: 199526 - DNA, 82 bp, Homo sapiens
gcagatcctgacctctctgatgagatggatcggttttaaaatcaaagatgggaaaatcggagaaaattgcccttccccatgg

SEQ ID NO: 199527 - DNA, 136 bp, Homo sapiens
caagagagtatccagaagacatgccattcttgaggtggcaggtggtcagctgcgaatcaaaccgaataagaagatctacttggacattattcacacatacatggaagtgcatgcaactgtttatggctccagcaca

SEQ ID NO: 199528 - DNA, 82 bp, Homo sapiens
tagcagacacggtggctactctgcctcggggacgaaagcagaaaacgcccactcctggatcttcacattgaactcaatggct

SEQ ID NO: 199529 - DNA, 100 bp, Homo sapiens
gcccgagcctgcacctggcagctccaggaggccagagctctactgaagcggcggcggccccgggggccagggggccggggactactgagaaggaggcccc

SEQ ID NO: 199530 - DNA, 74 bp, Homo sapiens
cttaaagccatcttccaggaagtgcatgtacaggcccatactagagttcatggatatgttatactgaaccaggc

SEQ ID NO: 199531 - DNA, 100 bp, Homo sapiens
cttaaagcaattgagcaggctgatctactgcaggagcatgatgccttcttctgtagagtgggcgctttgcagaatacgtgttgaatgaaatcactgatct

SEQ ID NO: 199532 - DNA, 90 bp, Homo sapiens
acgaagagcgggacccgagccctgactgccagttagagaaattgcccatgaggccccgggaccggtcccgtgtgattgatgctgccaaac

SEQ ID NO: 199533 - DNA, 75 bp, Homo sapiens
gaatggagacagtctggaagagctgatggaagagctgtgctccattgaagtgacttgtgaatcagccagtgtgat

SEQ ID NO: 199534 - DNA, 75 bp, Homo sapiens
gagctattattccctgtattaaagtacggcaagaagaagctgaaatacctgccctacaatcaccagcacgaatac

SEQ ID NO: 199535 - DNA, 75 bp, Homo sapiens
gagtgggaccgcgacctgctcctggacccagcctgggagaagcagcagaggaagatacctttgtctggatatgga

SEQ ID NO: 199536 - DNA, 75 bp, Homo sapiens
gtgtggtgcaggacgggcggctggaggtctgcatccaggacactgaggagtgggctttgctggatatttcccaga

SEQ ID NO: 199537 - DNA, 101 bp, Homo sapiens
ggcggcggtagatttgaagcgcttcaaaggaccggacccagagaagaggaaaactctaccggtgcaggtccggtttatcactaaaatatggcatcctaata

SEQ ID NO: 199538 - DNA, 90 bp, Homo sapiens
gagaaaacctctgcgaggaaagggaaggagcaagccgtgtgtttgtggagaaggtgctgcagagactttttcctcctgttccaagtggcc

SEQ ID NO: 199539 - DNA, 100 bp, Homo sapiens
ttgacagggttctggacatccaggaagaggagccgagcatctgggccgagaccattccgtatggagagccggctttaatgaagcaccagttgagattccc

SEQ ID NO: 199540 - DNA, 75 bp, Homo sapiens
tgaaggcaactaccgcgagctgcgctggttcaccccgtggtcgaggagtcgccagcagcccacacgcttcagtaa

SEQ ID NO: 199541 - DNA, 75 bp, Homo sapiens
caaggagggcaagtttgcttccaaggcccagctgagagccagcctggaggttacccagcagcaggccacccaggc

SEQ ID NO: 199542 - DNA, 90 bp, Homo sapiens
cctggttctgccttctggacaatctttccgggctgaagaagatgcagagcagcctgaagctggtggactgtatcatcgaggtccacgatg

SEQ ID NO: 199543 - DNA, 100 bp, Homo sapiens
gcccagctccttggggtttccggctgcagggcggtaaggatttcaacatgcctctgacaatctctagtgtagctacagcaagctgggtagcaggcagatc

SEQ ID NO: 199544 - DNA, 73 bp, Homo sapiens
ccagcttctgctgtccttctttgtggagagcaaggtctcacactctgaggatgactgtctagctttcaaagtt

SEQ ID NO: 199545 - DNA, 90 bp, Homo sapiens
caactggaaccctcaagaggaccgaggtataatttggcttcctgagattctgccttagcaagaaaggagtgggaaatacccttggaaaga

SEQ ID NO: 199546 - DNA, 49 bp, Homo sapiens
gctcgtcaccaggacccaaggaaccaacttaattcagtgcacaaatgag

SEQ ID NO: 199547 - DNA, 75 bp, Homo sapiens
cgctcggagatgatccagcgcaaagctgccactgcagagccccgccatggaagacacgccgttggtgatatcgaa

SEQ ID NO: 199548 - DNA, 100 bp, Homo sapiens
ggctccgcgggcggcccacggcgagatcatcaatgctgtggtactgttgattttattgagtgccctggctgatccggatcagtataacttttcaagttct

SEQ ID NO: 199549 - DNA, 99 bp, Homo sapiens
ggaatctatttggaatttgcagaagcaagagccaggctttcgaggactgactcctccaattccttgggaacatgcaccgcgtccccatttcccccttgt

SEQ ID NO: 199550 - DNA, 51 bp, Homo sapiens
cgaaggttcaattatgtggtcaaaggttacacatcattttggaatgactgt

SEQ ID NO: 199551 - DNA, 99 bp, Homo sapiens
gggaaaatggctgcgtcttcgagtgaaatcttacaggctggtgttaaaggaacttcggaatcccttaaaggtgtgaaacgcaaaaagatcgtagctgag

SEQ ID NO: 199552 - DNA, 100 bp, Homo sapiens
gctgccgccggcgcccttccccagtaccacggcccggcgcctgcactcgtttcctgcaggagaggaatctagaaaactgtatctgaagttgttcctacct

SEQ ID NO: 199553 - DNA, 50 bp, Homo sapiens
caccggtgttccaactgtttaaagtcacctggattcttcaggacttcagg

SEQ ID NO: 199554 - DNA, 100 bp, Homo sapiens
agcggcgggggaggcggcagcggagagctgctgtgacttactcgaagcctcgattggccacattttggtactacgccaaggttgagctggttcctcccac

SEQ ID NO: 199555 - DNA, 100 bp, Homo sapiens
tgcatggtgtggggttggtgtgattagcttcgcagtctggaaagctttaggagttcacagtgagtttcaatgcactgtgtgagggaagaacattccgctg

SEQ ID NO: 199556 - DNA, 96 bp, Homo sapiens
agtccaggctgaagacagagggctctgatctgtgcgacagacaaattgtggctactaatttgccccctgaagatcaagatggctctggggatgact

SEQ ID NO: 199557 - DNA, 74 bp, Homo sapiens
tgggaagccaagcagatacaagctaacagagaccctgatgctggaattgatgaagctcaagttgaacaagatgc

SEQ ID NO: 199558 - DNA, 74 bp, Homo sapiens
tccgagctggggttggacgctgccagtttgcacagcagcagattaaaattgagcttcccattcacctacatcaa

SEQ ID NO: 199559 - DNA, 80 bp, Homo sapiens
gcttcctggcctctggctgctgctgctggcccggccggcctcgtgcgccccagtcacattaactttgctctagaagacaa

SEQ ID NO: 199560 - DNA, 96 bp, Homo sapiens
tctggaaatgcgaatcctaaagcgtttcctcgcttgcattcagctcctctgtgtttgccgcctggattctggaaaccaaaatggaggaaatgatga

SEQ ID NO: 199561 - DNA, 83 bp, Homo sapiens
ctcttgacaaccaagggcctccgtctggatttccaaggaagaatttcctctgaagcaccggaaacttcctcctggccaaccct

SEQ ID NO: 199562 - DNA, 101 bp, Homo sapiens
ccagctcggagaactctcaggagagaagcttctgaccacggagtacctggggcaagaaaagcctaggcttctcgagcctttggattatgagactgtcattg

SEQ ID NO: 199563 - DNA, 90 bp, Homo sapiens
ctgcagcttccagacatcgccctggatgtcttcgcgctctggctggtctcccctctgctggcattccaaaatatgcccggtgctatccgc

SEQ ID NO: 199564 - DNA, 75 bp, Homo sapiens
ctccattcagtcctttaaacagcaaaaaggttgatgctatgaaactgggagtaaaggaaatgaagaaggcataca

SEQ ID NO: 199565 - DNA, 76 bp, Homo sapiens
attttatagaagtgaagtgattaagaattccttgccttggggctctattttgcggaattggaatttcttagctgtg

SEQ ID NO: 199566 - DNA, 83 bp, Homo sapiens
gcgctgatgagggcccttgaggggaaatggatgctaaagaggctggattacagaatgtctgaaggggacagtgtgggagaatc

SEQ ID NO: 199567 - DNA, 126 bp, Homo sapiens
gctgagtcagtgtgacagtccatatgtaaccaaatattatggatcctatctgaaggtgctgaatgtggagtaaatgcagatgttgagaaacatcttgaattgggcaagaaattacttgcagctgga

SEQ ID NO: 199568 - DNA, 50 bp, Homo sapiens
tgattgttggatatgcataagaggaactgaagaggagtttggaggtcttg

SEQ ID NO: 199569 - DNA, 102 bp, Homo sapiens
ttctttgacgtccagaagaccaagtacctgcagatcctgacctctctgatgagatggatcgggggatatgagactttctactcggaatatcctgagtgttgc

SEQ ID NO: 199570 - DNA, 75 bp, Homo sapiens
agcgcctcacgcacctgagccccgaggagaaggcgctgaggagttcctcagcactttgtttgcccccttaaactt

SEQ ID NO: 199571 - DNA, 100 bp, Homo sapiens
tctggcactccaggccccttcaccaaggaaggagggatgctggcctactatgaactttatgctgaaaaggtggccactagaggtctgtgtgccattgccc

SEQ ID NO: 199572 - DNA, 82 bp, Homo sapiens
cagacatcgccctggatgtcttcgcgctctggctggtctcccctctgctgggtggtctttgggaagaagcttcctgcctttg

SEQ ID NO: 199573 - DNA, 97 bp, Homo sapiens
tcctccaggcgctgcccagccccttgtcagccagggctgaacccccgcaggtggatgaaactcagtttaagaagatcctcggctacatcaacacggg

SEQ ID NO: 199574 - DNA, 50 bp, Homo sapiens
ctaggctggcattttgactttggggtgctggagaatctggtaaaagcacc

SEQ ID NO: 199575 - DNA, 100 bp, Homo sapiens
gaaaatcatcttatcagacgaaggcaaaatgtatgctttcaactgacaaaactgtgaaagtcttaaatatcttggagaagaatattcaggatgggtcaaa

SEQ ID NO: 199576 - DNA, 82 bp, Homo sapiens
ttaagtatctccgctacttcactcgcactatccttgatgctagttacagaatgtctgaaggggacagtgtgggagaatccgt

SEQ ID NO: 199577 - DNA, 129 bp, Homo sapiens
atagaagcatttgaaatgatggagaaggatgagctatgacttgctaaacaatctgttggtctacttccccagcaggacagcatcattctcctatatcttctagacatcactcatcttcctcacaatcag

SEQ ID NO: 199578 - DNA, 101 bp, Homo sapiens
agaagcatgtgtcttccccagctctgcagccacatactatccgtttgttcaggaaccaccagtgacagagtcatggaaaatggaagatttgcaaaatacaa

SEQ ID NO: 199579 - DNA, 82 bp, Homo sapiens
tgcagatcttcaacaagaggacccaggagaaattcgccctcaaaacatgcaagaaagcacttcagccaagcagaagggagcc

SEQ ID NO: 199580 - DNA, 100 bp, Homo sapiens
ctcaggccgagacaccttgcagctgccgccgccgccaccgagccgccgcgaattgaatgatctggcacgggaccctccagcacagtgttcagcaggtcct

SEQ ID NO: 199581 - DNA, 88 bp, Homo sapiens
gacaaaagccaagaggaggacagttcgctacacagcaatgcatcgaggtttctttacctccagaaagaagaatattggccccttgaat

SEQ ID NO: 199582 - DNA, 100 bp, Homo sapiens
gggcagaaattcatggaagatatgatgccaaaggttgtgggactggaaaatatcttaaagtgaacagccaggtacataccgtgggctgtgactactgtgg

SEQ ID NO: 199583 - DNA, 82 bp, Homo sapiens
agcaagcagttcagaagagccaaggaataaacatgcaatgaacccaaaagggtagacgaagagcggcggagtgcagcgggca

SEQ ID NO: 199584 - DNA, 100 bp, Homo sapiens
cgagaccgtgaccgagagcgtgaccgagagcgcgaatatcgtcatcgttagaagcaatacgtatctaaaaacgtcatctccagtgagcatattgttgaga

SEQ ID NO: 199585 - DNA, 100 bp, Homo sapiens
cacaaccaggcgatggtgcactggacgggcgagaacagcagcgacttgatcatcttccctgacgactgtgagttcaagcgggtgccgcagtgccccagcg

SEQ ID NO: 199586 - DNA, 74 bp, Homo sapiens
cggcaagagcagcgggagcggcgcggggaagggggcggtgtccgcagagcagcatccagtcagaagtgtccttt

SEQ ID NO: 199587 - DNA, 82 bp, Homo sapiens
ccaagtctttgaggccacgataaggccaccaggaaaccctccccgaagaatgggtagaatcaatcatctgcgtggccctagt

SEQ ID NO: 199588 - DNA, 96 bp, Homo sapiens
gtacaaatgcggggacctggtgttcgccaagatgaagggctacccacactggccggcccggaaatgagccgtcagactgctacagcattacctacc

SEQ ID NO: 199589 - DNA, 96 bp, Homo sapiens
ttacccccaccacctgcgctccctccaagaccttgtccatcacagacttagaaggttttgactccgtggtatcatctactgagaaactcagtcatc

SEQ ID NO: 199590 - DNA, 74 bp, Homo sapiens
aacagtttccggtcaatgagcactattttggattagtcaatcatgggtggtaaagtaccacctgctactcagaa

SEQ ID NO: 199591 - DNA, 74 bp, Homo sapiens
atatactattgtactatggacttcatcgctttatagggcaatttgaaattcgatatgcaccgtggttccagtgg

SEQ ID NO: 199592 - DNA, 100 bp, Homo sapiens
ggctggtggtcagccggaaggctcgcatccaagctgcaaggtggcagggcctggactgcaccctgccatgtcccagtgggacgtggggcctgaactgcaa

SEQ ID NO: 199593 - DNA, 73 bp, Homo sapiens
cgccgctgagccgtcgcggagccgcgcagccctcggagcacggtttgggaaaagttcttaagttctgaaacgc

SEQ ID NO: 199594 - DNA, 99 bp, Homo sapiens
cttggaacgccgacctgaaaccatctctgagcccaagacctaggaagtgccagacacagcttcagaatgtgactccttaaattcttccattggaaggaa

SEQ ID NO: 199595 - DNA, 95 bp, Homo sapiens
acaggtgctccagctgaaggtgcgagaagaagtcagaaatctacagttactcacacaagatgatacttcaaaagctgacaaaccgaaagtagatg

SEQ ID NO: 199596 - DNA, 50 bp, Homo sapiens
atgtgatttgcttgaagatatgagacggtctggaaaatcccgaagcagaa

SEQ ID NO: 199597 - DNA, 100 bp, Homo sapiens
ctctcacctcgccgtgctctctcgcggcggccggcggggcccgcgctgcagccggagacccggagaaagggaatagccaggccagaagaaggaaggcctg

SEQ ID NO: 199598 - DNA, 75 bp, Homo sapiens
ggaagatcagaccagactcatcgaggcctgaattgctccagcctgatctaggggtgtttattcctgctcctatgg

SEQ ID NO: 199599 - DNA, 90 bp, Homo sapiens
cgttatccccacctctgatgattcctcaggacagagcgggatgccaccagcttgtccaaagggaagttccaggagctcctggtgggcatc

SEQ ID NO: 199600 - DNA, 100 bp, Homo sapiens
ttttgcaagaaaaggggccttctgtggattggggaaaaatccagagaccccctgaagattcgaaccgtattgctgttaataagaattatccttgaatatt

SEQ ID NO: 199601 - DNA, 100 bp, Homo sapiens
aagatggcggcagccgaggccgcgaactgcatcatggagagaggtggagaagagcgagtacttgagaaagaagaggaagaagatgatgatgaagatgaag

SEQ ID NO: 199602 - DNA, 96 bp, Homo sapiens
aaagcctatcagcatagttaagaaacgggtatgcaggagattagaagccagtgggcatgagcgtggctgccaccaggtgaatgcctgtgccctggc

SEQ ID NO: 199603 - DNA, 100 bp, Homo sapiens
caaaggccgaagtacaagatctaaggctcttgtctggtcacgactgctgaatatgagacgatctgcagcaccaagtcagttgcaggggaattccttcaaa

SEQ ID NO: 199604 - DNA, 98 bp, Homo sapiens
cggagcgctgcagggggctgcgcctgcctgctccgccccagacctgtcggcgaaaggggggctgttgtggttccgactataaacagtacgtgtttggc

SEQ ID NO: 199605 - DNA, 50 bp, Homo sapiens
ccgagaccgcggccgggaccgaggacctattcaacgaattgcttgaaaac

SEQ ID NO: 199606 - DNA, 100 bp, Homo sapiens
tgtttggaggagctaaaaggggactttttggtcgagagactcagagagaatatccctgccgtaagacagaaccaagttgtattgttagacacactggaac

SEQ ID NO: 199607 - DNA, 75 bp, Homo sapiens
ttacctgccacccattgtgtcttctcaagaagggctggaccccaatggagaacaggtggtgtggcaggcgagcgg

SEQ ID NO: 199608 - DNA, 115 bp, Homo sapiens
cggccagacaaacagcccgcccgaccccgtcccgaccctggccgccccgagcggagcctggagatgaaggatttgggggcagagcacttggcaggtcatgaaggggtccaacttc

SEQ ID NO: 199609 - DNA, 75 bp, Homo sapiens
cgcgcacgttggaaccgaagagagctctgttgttgcagattttgtgtggatgagggctcggctacagcaagaagt

SEQ ID NO: 199610 - DNA, 51 bp, Homo sapiens
gaggcagagtcgagccttgccggcacaggaaaacgccgcggctgcgatggc

SEQ ID NO: 199611 - DNA, 82 bp, Homo sapiens
ccggaatgtcatccagcgagtgattagcctaaagtggtaaacccactgatcggcctcttgggtgaatatggaggagacagtg

SEQ ID NO: 199612 - DNA, 73 bp, Homo sapiens
tcatggtacttacatttttgtgggctggataataaacaagagcataccagaaattcctgatgacctgaagcaa

SEQ ID NO: 199613 - DNA, 100 bp, Homo sapiens
caggcaatgctggatagataccgaattcttatcacaaaggctaggcagctggaagagaaagaccgagtgctaaagaagcaggatgcattctacaaagaac

SEQ ID NO: 199614 - DNA, 90 bp, Homo sapiens
gaacaattattgaaggcacaagaaggaaactacaagatccccggatcatgaccactctcagcgtcctccttggggtcgatctgggcagta

SEQ ID NO: 199615 - DNA, 100 bp, Homo sapiens
agcggacgtcggcttctccccgcgggagcccccagcatgggtcatcgtattgaggaagttcctgaacttcctttggtagttgaagataaagttgaaggct

SEQ ID NO: 199616 - DNA, 100 bp, Homo sapiens
ctacctgattctggcatacagacatggatttgattgacatactttggaggcaagatatagatcttggagtaagtcgagaagtatttgacttcagtcagcg

SEQ ID NO: 199617 - DNA, 100 bp, Homo sapiens
atataatcgaatagttgatgccctaaatgaattcagactatctgttatagtccctgggtcaagacaacaatttttataccttcgtcgtggttcagaaagg

SEQ ID NO: 199618 - DNA, 83 bp, Homo sapiens
cgggagacaagatccgatctactgagagctgcgaggtgctggagaatctggtaaaagcaccattgtgaagcagatgaggatcc

SEQ ID NO: 199619 - DNA, 100 bp, Homo sapiens
ccgcaggaaaccgggtataggaggaagagataccttgactatgaataatagtttcaataaggaagacagaatgagttctgacacgatggttgggagctgt

SEQ ID NO: 199620 - DNA, 82 bp, Homo sapiens
cggaacctgcgcggctactacaaccagagcgaggacggacttaatgactgacctgaagtctgagatctctggagacctggca

SEQ ID NO: 199621 - DNA, 90 bp, Homo sapiens
gcattctacaaccccagaccaccgttaatccagatcgcatcaaacaaatcttatgccttcattcatccggcatggtccaacaattccaag

SEQ ID NO: 199622 - DNA, 100 bp, Homo sapiens
gctgaatcctgcccgcgtgaaccacatgcccagcacgggtagtaagcattaataatgtctttcatctttgagtggatctacaatggcttcagcagtgtgc

SEQ ID NO: 199623 - DNA, 101 bp, Homo sapiens
tggcggcggcgctagcttcggagtctcccgcgcgcacctcagccgcctcctagcggcgcggcgctcgctcctacggagtggttaatgtgttgctaacaact

SEQ ID NO: 199624 - DNA, 74 bp, Homo sapiens
ttgcggttcagccctttgatgaccgcagcaggtcctatggcagcgtatacaaagctattcataaagagaccggc

SEQ ID NO: 199625 - DNA, 100 bp, Homo sapiens
ctttgactgtgaagagacatgagatggtgaatgaacccccagggactcttgacgtttaggtatgtggccatagaattctctctggaggagtagcagtgcc

SEQ ID NO: 199626 - DNA, 76 bp, Homo sapiens
gtggtggagctgtggcaggcagaagaaggggaactcctgctgcccactcagagtcctgtgtatggaaactcacatg

SEQ ID NO: 199627 - DNA, 96 bp, Homo sapiens
aggctgtggaggagtggaatattgagaaggctgaggaactcagcaaccagctagctactcgagagaggttggaaagaaccatgactgtattcagga

SEQ ID NO: 199628 - DNA, 90 bp, Homo sapiens
ctccaggcatgccccgctacgagctggctttaatcctgaaagccatgcagcggatgggaatgatgaacaaccccaatccttatggttcac

SEQ ID NO: 199629 - DNA, 100 bp, Homo sapiens
ctgaaagattcttcaagaatacaccttggcccgaggctgaagccattgctccacaggttggcaatgtgatacctgcaatatatcagacagaagctgatcc

SEQ ID NO: 199630 - DNA, 82 bp, Homo sapiens
cacgacttcagcatgagacccgccttcggagggggatatgagactttctactcggaatatcctgagtgttgcgtggatgtaa

SEQ ID NO: 199631 - DNA, 100 bp, Homo sapiens
cccgggaaaagaggaactaaggcggaggaactgagacgtttcgaattccagataaccttctgttcggtgatgaaattatcactaatggttttcattcctg

SEQ ID NO: 199632 - DNA, 83 bp, Homo sapiens
ttataatacccattattcaacagcaacatctactttatcctggcttgttcgaatttgagaaacttcctgaagtactaaatatg

SEQ ID NO: 199633 - DNA, 75 bp, Homo sapiens
gctctatcaaggggctggtgtactccagcaacttccaggttaacacagaaatctgcctcctgggccatgccgctt

SEQ ID NO: 199634 - DNA, 82 bp, Homo sapiens
atatgaaactggaagacatcctgaaaatgtcactgaaattcacaaatgcaaaacggattgaaggacttgatagtaatgtgtg

SEQ ID NO: 199635 - DNA, 82 bp, Homo sapiens
caggcggtgacagagtggagccatggctagagttggttaccacagagaagcgcttcctcaaagacagtttgtacaatgaagg

SEQ ID NO: 199636 - DNA, 75 bp, Homo sapiens
ctcgggacggggcgccgcggccgggcgggcagcagtaccagaggtttgaaaaggcatttctcctagctgttgacg

SEQ ID NO: 199637 - DNA, 96 bp, Homo sapiens
aacccccgcctgcaaaccgcagcccaggagctcctggaagatctccgcactctggagcataatgtgcttcctgacaatgtcacctttgaggaaggc

SEQ ID NO: 199638 - DNA, 75 bp, Homo sapiens
cacgggctctacctgaccctgcagatgtggaagatgtgaaatttgtcatcaattatgactaccctaactcctcag

SEQ ID NO: 199639 - DNA, 74 bp, Homo sapiens
tagaattacctggaacttcatcatcatctacttcacaggaattgccatttgtgtgattcccttcagtacggcgg

SEQ ID NO: 199640 - DNA, 100 bp, Homo sapiens
tcagtctaccacttctgattatcagtgggatgttagccgtaatcaaccctatatcgatgatgaatggtctgggttaagatcatgaattttctaaaactga

SEQ ID NO: 199641 - DNA, 82 bp, Homo sapiens
ctgagcacagcatcatcaaggacttcaccaagcagcacatgattaagtaccggtacatcccgttcacacatgggaagagaag

SEQ ID NO: 199642 - DNA, 100 bp, Homo sapiens
cccgcgtccagcacctacgtcccgctgccgtcgccgccgccaccatgcccaagagaaagatacttccgggtcatcctcctcctcctcctggccctgactc

SEQ ID NO: 199643 - DNA, 82 bp, Homo sapiens
atgtctgcgagccaggattcccggttgacatcatggacatatgtgagtccatcctggagaggaagcggcatgacagcgaaag

SEQ ID NO: 199644 - DNA, 100 bp, Homo sapiens
agacagtgaacaaaggcagtctgttgaggcatctggacaccacacacatcatcagtctggaatatgagagcctggagcaagaaaacaccatgctgcggag

SEQ ID NO: 199645 - DNA, 75 bp, Homo sapiens
gccggagcaatggcaagtgggacaggccccaaattgtctgcaccaaacgatcccggctactcaacagaaatgaag

SEQ ID NO: 199646 - DNA, 98 bp, Homo sapiens
gataacagtctgcactttcacccgtttcaggtattaatcaagaagagctatgaccggaccaaacgtcagcgtcgtagaaactggaaattgaaagagct

SEQ ID NO: 199647 - DNA, 100 bp, Homo sapiens
caagagtcacttctttacttggtgcaggaaggcagtctttgctacgtacagcaaaaggatctgtggttgtggttccggagaatctggttgtgctgtgtgt

SEQ ID NO: 199648 - DNA, 83 bp, Homo sapiens
cttggagtctttgtccaggacggctaaaaccagaaaagcttgaaaaagatctggacagatactcagaaagagccaggatgaag

SEQ ID NO: 199649 - DNA, 80 bp, Homo sapiens
tggcggcagcagccgctctgagggcgcctgctcaggtggcaagtgcaggcagctgtcccggttatgccggaatcgttgca

SEQ ID NO: 199650 - DNA, 90 bp, Homo sapiens
aaactcccatctccctcaccagccggaaagtacgagtcggctcagcctggagaacatccagtcatggataaaaatgagctggttcagaag

SEQ ID NO: 199651 - DNA, 100 bp, Homo sapiens
aactattcaacatggaggcggaggtcgataagctggaactgatggtagaacacctgaaggagaagctcattagccaggcccaggaagtgagccgactgcg

SEQ ID NO: 199652 - DNA, 100 bp, Homo sapiens
gaatatacaccagaatgcatagtatttgatcttcttgatattcctttgtaccatgggtggttagtagaccctcaggttggtgaactcttgaaagattggc

SEQ ID NO: 199653 - DNA, 100 bp, Homo sapiens
gccgaaggcgcccaagcagcagctgccggagcccgagtggatcggggacggagagaacacgagcccatcagggtttggaatcacttgctaggagtcttgt

SEQ ID NO: 199654 - DNA, 90 bp, Homo sapiens
acgatcattctgcaagcaggcaacctgaatacaggatcaactcactatcctgaaggtccattctcccaagaagaggggacagaaagacag

SEQ ID NO: 199655 - DNA, 100 bp, Homo sapiens
aacatgtgaacactcaagtgaagcaaaagccttccatgattacattgaccctgctacgggaatggttatgaatctggctgatctcaaaaaatatatggag

SEQ ID NO: 199656 - DNA, 75 bp, Homo sapiens
tgtgggcgcgtcaggccgcgacgagggcgctgagccatcccaggcctcaggacctgagttctccgacgcccacat

SEQ ID NO: 199657 - DNA, 75 bp, Homo sapiens
ggtgaagttgaatctgcaaaacttattcgggataaagtagcaggagaatcttatttatactgctgatccagaatc

SEQ ID NO: 199658 - DNA, 100 bp, Homo sapiens
caggaattgtgtgctgatctgaaagccaaggcttacggagttcctatgctagtcagcatagtcagcttgggcaagaccttcgttctgccgtgtctcccga

SEQ ID NO: 199659 - DNA, 85 bp, Homo sapiens
gacttttctcagatgttggatatttgcttggaaaaacgtgtgggtacgaccttggtaatagcctgcagctggtgttttgagaagc

SEQ ID NO: 199660 - DNA, 50 bp, Homo sapiens
ggagaattataggaacctcgtctccctggaaaggagaatcacttgaaccc

SEQ ID NO: 199661 - DNA, 80 bp, Homo sapiens
cccacctgccgcccttcttcggcatccaggctggagaagcagaacagcacacctgagagtgactacgacaacactcccaa

SEQ ID NO: 199662 - DNA, 83 bp, Homo sapiens
caagtgtgtgcatctggctgttagaagaattcatgctcatccgggttgcaaataaaaatgtggctaaagtaccacctcctgtt

SEQ ID NO: 199663 - DNA, 88 bp, Homo sapiens
atcttctacaaacccatttcagaccaatgccagaggagcaacagtgaacacttgtcctgctccttcacctttttcttgcatggagaca

SEQ ID NO: 199664 - DNA, 98 bp, Homo sapiens
gctacagaagccttctttgcaatgacgcgattgtttcaatctaatgatgaacattttagtggacaaaccaaatgaccaatcttcaagatggtcttcag

SEQ ID NO: 199665 - DNA, 83 bp, Homo sapiens
cggctcacctgtgcgggatggaacaaaaggatcagtttgacaacttagaaaaacacacacagtggggaattgatattcttgag

SEQ ID NO: 199666 - DNA, 107 bp, Homo sapiens
tggaggagctgtgcagccgcgaggaggcgcgggaggtgttcgagaacgaccccgagacgggcgaccattgacgaggtggagacggacgtggtggagattgaggccaa

SEQ ID NO: 199667 - DNA, 100 bp, Homo sapiens
tatgaagttacatcaggatccgggacagcccttgtacattctctggaatgcacacatttctgtagaaaatgtttcctgactgcaatgagggaaagcggag

SEQ ID NO: 199668 - DNA, 50 bp, Homo sapiens
gacgtggatgcatactgccctggttccacttccaaacatgagttccaggc

SEQ ID NO: 199669 - DNA, 75 bp, Homo sapiens
caatgatgtgtgcaataatgaatcattagtatcggacacagaaacagcactagacaaactgaatggatttcagtt

SEQ ID NO: 199670 - DNA, 90 bp, Homo sapiens
gtaggcaccgaacccagcattttcggcaaccgctgctggcagttttgccaggtgtttgttaccttggatttggagttccatggagtgatg

SEQ ID NO: 199671 - DNA, 98 bp, Homo sapiens
tgagggggggcggaggaggggggggtaccacacaacaccccagcaaacctccgggcccccaggcatggctagctcgatctcacattcttgaaggtggc

SEQ ID NO: 199672 - DNA, 75 bp, Homo sapiens
ttgggagaaagacacagtctccatcatcccagttgaacgcatgaggaatgggattgatatcctggttggaacacc

SEQ ID NO: 199673 - DNA, 98 bp, Homo sapiens
ccaaccaaccccgtgggaggcagcctcagactcggtcttattgaagttaaaacagatgagtttcctcgccatgggagcaacatagaagccatgtccaa

SEQ ID NO: 199674 - DNA, 74 bp, Homo sapiens
cattatccactatgccggcaagggaagaaggagaaagggccaacccctgaagaagcaatacagaaactgaagga

SEQ ID NO: 199675 - DNA, 100 bp, Homo sapiens
gaaggaaccgctctcgcttcgtcctacacttgcgcaaatgtctccggtgcagataaaactctagactccagtgcagaggatcatactttgagtgaacagg

SEQ ID NO: 199676 - DNA, 100 bp, Homo sapiens
tggacatccaggaagaggagccgagcatctgggccgagaccattccgtatggagagccggactaacagcggagttgctgcgcctactttgtgcagagccc

SEQ ID NO: 199677 - DNA, 100 bp, Homo sapiens
gtaaccaaatattatggatcctatctgaaggttgactatagtcaatggggccaatggagccaagtgtatggaaacccacaacagtatggacagtatatgg

SEQ ID NO: 199678 - DNA, 51 bp, Homo sapiens
gcggctcgggacggaggacgcgctagtgactggaaggaaaagtatataaac

SEQ ID NO: 199679 - DNA, 87 bp, Homo sapiens
atgacagcttggaccatgggcgcccgcggtctggacaagcgaggaagtttctttaagaaactggcgatggaatatgagaggagccct

SEQ ID NO: 199680 - DNA, 60 bp, Homo sapiens
agctgccagatgtcacgaaggaggtcttgccaagaaatattgctgttccttactgccaac

SEQ ID NO: 199681 - DNA, 74 bp, Homo sapiens
ctcggtggtcgcggcgacctccggcggcgggaggcccggcctgggcaggctgctgtccccaaggcccagcctcc

SEQ ID NO: 199682 - DNA, 95 bp, Homo sapiens
cgctacaacgcctacccctcagagcaggagaagctgagcctttctggacagaccaacctgtcagtgctgcaaccctaggcggcgtcgccgcagcc

SEQ ID NO: 199683 - DNA, 83 bp, Homo sapiens
aatcaacacaaaccccaagtcctccttgccaggccttcaaccactatctcagtgcaatgggacagacatggtggttctgattg

SEQ ID NO: 199684 - DNA, 75 bp, Homo sapiens
ccaaccagtcccagcgctgtcgtgctcctctactcggtgaccttatatccagctgtgaaaagtctgctgcaggag

SEQ ID NO: 199685 - DNA, 98 bp, Homo sapiens
aaggaaacccttgtattcttgtgaaaatgaacagacttcttccagaccagctggtcttgcttctggagcatctcttggagcagaagactctgagcccc

SEQ ID NO: 199686 - DNA, 75 bp, Homo sapiens
gatggcagccagtcagtggtggagaattcccttcttcaagttctgctaccagtgtggccgctccatcggggtccg

SEQ ID NO: 199687 - DNA, 74 bp, Homo sapiens
cggcgagcggttccttgtgggctagtttctccacagacactacccaaagcagtccttcactacagtggcagaca

SEQ ID NO: 199688 - DNA, 74 bp, Homo sapiens
gggctctgcagcgagcgctcgatggaacctcatcccagctctggatgagggggatattgccttgttgaaaactt

SEQ ID NO: 199689 - DNA, 114 bp, Homo sapiens
agcacctttgtgtacaatactgtgaacaaaattgatcagggtgctatcgacctactgcactatgtgactgagctagcagagctaatcagggcaaaatcctgccccagacctgat

SEQ ID NO: 199690 - DNA, 75 bp, Homo sapiens
ccctcaccacccctatccagacggctgcccttcaagtaccagctgcagccttggatatagccatgattaaaatgg

SEQ ID NO: 199691 - DNA, 109 bp, Homo sapiens
gcaaacatagagaattctgggcttccacacaactccagtgctaactcaacagttgtggaagctgatcgaggaagcctaagcaggctctgtgaagtgggaatagtggtat

SEQ ID NO: 199692 - DNA, 100 bp, Homo sapiens
ttgagaacagaatacattgctgattatctcatgcagataaagagttctatctgtcttctacgcgggaaaatctatgatgctctagataaccgaaccctgg

SEQ ID NO: 199693 - DNA, 100 bp, Homo sapiens
ggcatggagccagtcctgagttacagaaacagattcgacaactggagagccacctgagccttggaagaaagcctggactgtgctgctgccatctcggctc

SEQ ID NO: 199694 - DNA, 101 bp, Homo sapiens
atctggaaagcatcatcagacccaagtgccaagttatttactttcccatcaggtttcctgatgtgagcaggcccacagcagcagaacttttaaaatgcaaa

SEQ ID NO: 199695 - DNA, 51 bp, Homo sapiens
gcctggctccccatactagtcgccgatcctggtgtatagcctggaagcagg

SEQ ID NO: 199696 - DNA, 100 bp, Homo sapiens
ggaaagcgccgagatgacgggctttctgctgccgcccgcaagcagaggtttggagacttgaaggaggacaaagtgacgcgtcatgatggagccagctcag

SEQ ID NO: 199697 - DNA, 101 bp, Homo sapiens
gggagggagttgtcggcgccgcggccgctgcggacggacgctcgcctgccggctgaggtcgacatttataactcagaccccctgatctgccgggcagggct

SEQ ID NO: 199698 - DNA, 82 bp, Homo sapiens
ctcgtaaggtccctcaaagcgggaaatgcgtcaaagtcttgaatccagataatagttttgaaatactggttgaccaatctgt

SEQ ID NO: 199699 - DNA, 100 bp, Homo sapiens
gggagcctatctcatccacggggggatggacagcaccagacactccctggcccacacctcccgctcatcgcccgccacgttaataaaggtatccatggag

SEQ ID NO: 199700 - DNA, 95 bp, Homo sapiens
gagcttctcctcatcaactggggatgattacagttcttcctaaaaaaggcttcttgcagtggagatgaatacagatcacttaaggttgactgtgc

SEQ ID NO: 199701 - DNA, 75 bp, Homo sapiens
gcgtgctgatccaccttatactcatactatacagacctgtcatttactccatcctttatagtgatgctacaggac

SEQ ID NO: 199702 - DNA, 90 bp, Homo sapiens
ttcttcttacaggaacaccagctttaggaaggcctgaagaggaaccaccaaactgttttccacagaggctgcatcaattgacattcccac

SEQ ID NO: 199703 - DNA, 90 bp, Homo sapiens
gtgtggcaagcaccaaccccataaagtgacacagtacaagaagggcaaggattctctgtacgcccagggacctaaactgccccttcctcg

SEQ ID NO: 199704 - DNA, 100 bp, Homo sapiens
tccagcctgcggagcctgtggggcagctgaagaaaaggtgactggtctcatgagccctgaagaatgaactcagaggaggttgtttacatgaggttctccc

SEQ ID NO: 199705 - DNA, 51 bp, Homo sapiens
cagcaaggaggagactgtgctggcgaacgtcaaggtcgtgggaaataaaag

SEQ ID NO: 199706 - DNA, 97 bp, Homo sapiens
cagctatatgggaacaacatacagtgacgcttcacaggggcaagtgtccagagaatggctgggatgaaagtacacttgaactctttttacatgaact

SEQ ID NO: 199707 - DNA, 98 bp, Homo sapiens
ctgggccaaaaggaatgaccctagccagactcagggatcaaagagcaaacagattcagtggcctgcattggatccaaactactggatacaggtgcatc

SEQ ID NO: 199708 - DNA, 117 bp, Homo sapiens
gtttgtactatcctcggtgctgtggtgcagagctagttcctctccagctcagccgcgtagagtgaagacatttccacctggacacctgaccatgtgcctgccctgagcagcgaggcc

SEQ ID NO: 199709 - DNA, 108 bp, Homo sapiens
tagagactgcatccccgagacgatggcggagggagataatcgcagcaccaacctgctggtatacaaaactaggatatgctggaaatacagaaccacagtttatcatcc

SEQ ID NO: 199710 - DNA, 90 bp, Homo sapiens
caagtcggtcattgagctcagccgacagggcaaagaggctcttccgccctctctggatgagggaacagaagtggaggaaacaaaagaagc

SEQ ID NO: 199711 - DNA, 75 bp, Homo sapiens
ggttccatgatgggaagtgacatggaatgttttaaaggaagttgggctactcacaagttactacataagaaagca

SEQ ID NO: 199712 - DNA, 50 bp, Homo sapiens
ctcaaggccatgatcaaaaccctcaggcccagagccagcacgagacatcc

SEQ ID NO: 199713 - DNA, 75 bp, Homo sapiens
gaggggcgggggaggcgccgggaagtcgacggcgccggcggctcctgtttgtttcgacgccggaccgcgtaagag

SEQ ID NO: 199714 - DNA, 87 bp, Homo sapiens
tcctagaccttccagcagtactttggtggacgagttggagtcatctttcgagtcggagagcgaggagaaggttgtcacctatgacca

SEQ ID NO: 199715 - DNA, 100 bp, Homo sapiens
tcaccttcaatccgctctactggaatgtgagaaaattcctgttccaagagaaaataaggcaacatcaatgaaggagagaagagccagccagaaattatcc

SEQ ID NO: 199716 - DNA, 98 bp, Homo sapiens
cggagcccaccaagttctgggaacctcgccgctcctgctatttgccaaccgccgggacgtacggctggtggacgccggcggagtcaagctggagtcca

SEQ ID NO: 199717 - DNA, 75 bp, Homo sapiens
gccctgaaaaagtatcgtcgagaagcctatcatcgggaactgtccaggtttattgctgccgggagactacactgc

SEQ ID NO: 199718 - DNA, 99 bp, Homo sapiens
tgaggcccaacagcggaatcatcgatgcaggggcctcaattaatgtatctgcagtcagtcccctcttctgcaggtctgctgcaattcgctgggggtcca

SEQ ID NO: 199719 - DNA, 82 bp, Homo sapiens
gaagctggagctcacggagaagaaggcctccgacgaaggtgctcgggtcttcggggcactgggtcccatcggtccctcctca

SEQ ID NO: 199720 - DNA, 100 bp, Homo sapiens
ctccacgaaaggcagccgcggatcgccgcgctcagcgacaaacaagaggagacatcacagctttcccagatcgggaggaaaaatatggaatgtgttttac

SEQ ID NO: 199721 - DNA, 75 bp, Homo sapiens
cttcctctggcccgaagccttcctttatcgctttcaggtttggtgcacctcgatttggaggaagtagggcagggc

SEQ ID NO: 199722 - DNA, 100 bp, Homo sapiens
ctggccagatggttcttacccaacgtttgatggctcatcaaactgcaatgtcataagcgaattcactccttttcgctttgaaaacaactgtgaatagaag

SEQ ID NO: 199723 - DNA, 99 bp, Homo sapiens
ttctcatttaagctactcaagaaagagtgcccaattccaaatgtacaggttctgtcatatgttgaagaatccatacaccattaagaaacagcctctgca

SEQ ID NO: 199724 - DNA, 100 bp, Homo sapiens
ctctacagtgtggtcattgaggacaagttgacgagagagtcccaagtacgtccacggtcagccttgcgccgctgcctactacctgccccgacacctggcc

SEQ ID NO: 199725 - DNA, 75 bp, Homo sapiens
tcagacttttgtgttgcagttcgggaaatctggcattttttaaagtttgcgccccacaaagaggaaatattccaa

SEQ ID NO: 199726 - DNA, 100 bp, Homo sapiens
cctggacctgccgcagatcgctgtagtgggcggccagagcgccggcaagagctcggtgctggagaacttcgtgggccggatgaccgagtgggagacagca

SEQ ID NO: 199727 - DNA, 100 bp, Homo sapiens
ggacaagttgcatgaagagcatatcaatgcaggacgtacagttcagactgaaatcgccaagagattgaatacgatttgtgcacaagtcatcccatttctg

SEQ ID NO: 199728 - DNA, 96 bp, Homo sapiens
aacgcgcacgccctctccaccgtgacggccatcattgacgggacgggctctgtaggtgaccctggcagcaaccccaacaaacgccagaggcagccc

SEQ ID NO: 199729 - DNA, 87 bp, Homo sapiens
cgtcgactgcccagagtccgcggccggggcgcgggaggtctgccatcatggatgttctcgcagaagcaaatggcacctttgccttaa

SEQ ID NO: 199730 - DNA, 83 bp, Homo sapiens
ctgaagatatgcttcgtgggatctttgagccttttggaagaattgctgaggagctctatactaagggagatcggacaaaagat

SEQ ID NO: 199731 - DNA, 130 bp, Homo sapiens
ttccttcttcagtcctgctcgtcggaggacccggttgccatggtgaaggaaaaaggaatgaatctgaagtctgctgcagtaaaacacagaaggctttaaaatgttttcttgcataaaattcaaaactttt

SEQ ID NO: 199732 - DNA, 75 bp, Homo sapiens
tgccttttcaacatggatggctcctcccgctgccgctgccgctccaggagacaggcattggaatggatacttgtg

SEQ ID NO: 199733 - DNA, 101 bp, Homo sapiens
gctaccttgagaatggagcgaggagccaaggagaagaaccaccagctttacaagccctacaccaacggtcttgggcgtctttggtactggcttttttaggg

SEQ ID NO: 199734 - DNA, 75 bp, Homo sapiens
gagctatggtgaaacaccactgaagcattgccaagctgggatagatgggcagcagaagatcatgtgcttcgtgat

SEQ ID NO: 199735 - DNA, 51 bp, Homo sapiens
gtacatatgatttcagctgcaatggcaggcacaagtgatccttatgtgaaa

SEQ ID NO: 199736 - DNA, 75 bp, Homo sapiens
tcaatgggcgggtgcccctacctcacattcccctggtcagtgagaaggtcggaggggccgaggggaccaagctgg

SEQ ID NO: 199737 - DNA, 51 bp, Homo sapiens
atccattatgaccatcaaaagtgtcaaggagcagaagcttttgaaatccag

SEQ ID NO: 199738 - DNA, 83 bp, Homo sapiens
ctcggggcgggcgccgcgggacctctccgggccatgggatgggagtcccagcttctggagacggggttcctggggatcttcct

SEQ ID NO: 199739 - DNA, 75 bp, Homo sapiens
tgctgtgcgggatcgacgcggacagcgggctggagcctgacgagctggcggggcaaatccagacagaacctttga

SEQ ID NO: 199740 - DNA, 50 bp, Homo sapiens
cagccctggggcttggtcagtaccagggatcccaacggcttcaatgactg

SEQ ID NO: 199741 - DNA, 77 bp, Homo sapiens
caggagcaacagccagaccctgtcagatgccccctttaccacatgcccagagggaagacaccagcggtgactacaag

SEQ ID NO: 199742 - DNA, 49 bp, Homo sapiens
gctgcagacaattccacacacagctccatctcctccgaagggaatgaac

SEQ ID NO: 199743 - DNA, 100 bp, Homo sapiens
ttttaacacctcaaggttgaagcagaagaataaggagaaggataagtcgaaggggaaggcgcctgaagaggacgaaggtcctggcattgatgtgcctgct

SEQ ID NO: 199744 - DNA, 100 bp, Homo sapiens
cttttgcctcagatactattttgaaggtgactctgacatcattagaagcatgccagaacagactggtgaaaagtaaaccttttcacctacaaaatttcac

SEQ ID NO: 199745 - DNA, 75 bp, Homo sapiens
cttacaagcctccagtctcaaattatccagctgttggaaaaattagaggaaagcctcttccattactcttatttt

SEQ ID NO: 199746 - DNA, 82 bp, Homo sapiens
ctattgcacaatgatccgaggaatggtgaaggcacacatccatagttgtgcacaaggatgagttcttcttcggcagtggtgg

SEQ ID NO: 199747 - DNA, 96 bp, Homo sapiens
gaaaaggtggcgtggctggcgattcgtgttcgtgagggccttttctggaaaattgcctaagaattatgacccaaaagttaccccagatccagaaag

SEQ ID NO: 199748 - DNA, 82 bp, Homo sapiens
ataggttattcatgagatttgctacaaaaggagggaaaacccctgatcctaaaatgaatgctaggacttacatggatgtaat

SEQ ID NO: 199749 - DNA, 100 bp, Homo sapiens
ctccggcaaccgctccggcaacgccaaccgctccgctgcgcgcaggctgggctgcaggctctcggctgcagcgctggactgtgaggcatcctgtgtgtgt

SEQ ID NO: 199750 - DNA, 100 bp, Homo sapiens
cagacctctgtggcagcattttttccagaacacaaaagattttactatgagcagcgattactacggaaggtcttcgaagaatggaaagaggagtggtggg

SEQ ID NO: 199751 - DNA, 82 bp, Homo sapiens
ggaaaaattagactcaaaaattggagtccttataggaaaagggttcagaatctcccatgatgattggtgagttgagaagtga

SEQ ID NO: 199752 - DNA, 90 bp, Homo sapiens
gccccatagatggccagctttcccccgagggtcaacgagaaagagatcggttactataacaacagtaccaaggtggctgtgaaaaccctg

SEQ ID NO: 199753 - DNA, 100 bp, Homo sapiens
cttcttcccttagaagaactgctgaaccgactctgagaaatttgaaactggaccaggatcttaatgaagtcaaagctcgagtagaagaactggacagaaa

SEQ ID NO: 199754 - DNA, 90 bp, Homo sapiens
gtatatcagctggacagagcagaactatcctcaaggtggaagaagagcccgaagaagaacctgaagagacagcagaagacacaacagaag

SEQ ID NO: 199755 - DNA, 80 bp, Homo sapiens
agagcgcgaatatcgtcatcgttagaagcgggcagttgcaggagatgcctctgagtcagcactcttaaagtgcatagagc

SEQ ID NO: 199756 - DNA, 101 bp, Homo sapiens
ggaagacatggccactccagtcggtgttgagcacggcgagcagtctcaggcctttagtgatgatggagaataaaggcagccccgttgatgactgaaaatga

SEQ ID NO: 199757 - DNA, 100 bp, Homo sapiens
atcagatgaacttacgcagggttacatatattttcacaagcctcttagcaatgcataccacgagttagcacaagtgtattcaaccaacaacccctcagaa

SEQ ID NO: 199758 - DNA, 98 bp, Homo sapiens
gccctctctatgatatgctaagaaagaatcttgtcactttagccactgctactacagaagaagatagtggtgagctggcaaagccaaagattggtttt

SEQ ID NO: 199759 - DNA, 98 bp, Homo sapiens
ttatttagccggagtgagaagcaagaaggccctggacacagcaatatctctgggctttcacagacctcacgggatagcagcactgaaaaactcctgca

SEQ ID NO: 199760 - DNA, 80 bp, Homo sapiens
cgatccgcccacagacctcaaattcaaaggtccctgtgcgttttattgcgacctgccggtgggaactttgtctccgagtc

SEQ ID NO: 199761 - DNA, 98 bp, Homo sapiens
aggaagtggaaagagagcaaggggaaggatcgggagtacacagacatcatccggattatatctgtccaagatgcgagtctggttttatcgaggagctt

SEQ ID NO: 199762 - DNA, 89 bp, Homo sapiens
agaacatgctcacatcttcaggtgcctcattcacatacgtcaaggaaattgagagcatcctggccagaacaagccaaggagccaagacg

SEQ ID NO: 199763 - DNA, 100 bp, Homo sapiens
ctgctcccagcatctccagcaacaagctgtctctgccggagcgagcgagcccgctggataactgccctgggacacagcagcgggaagccgcctgcagacc

SEQ ID NO: 199764 - DNA, 100 bp, Homo sapiens
cgaagagctttataaaactgaagcaccaacttgggagacacatggaaatctcatgactttgagaagcccgagagcccccgagccgccagcagcagctccc

SEQ ID NO: 199765 - DNA, 75 bp, Homo sapiens
tataatacctgaaactttactcaatgttgagaatgacagaagaccatgtgcttcccgagctgaataaggtagtat

SEQ ID NO: 199766 - DNA, 96 bp, Homo sapiens
gccggaggaggaggggagaggcctggaggacaccaacatgggttttgacccaccacatcagagtgacacaagaaccatctacgtagccaacaggtt

SEQ ID NO: 199767 - DNA, 100 bp, Homo sapiens
ggccatacaagatggaacaatagttttaatgggaacatacgatgatggagcaaccaagtttttgaatctgaaaattcaagaaggtgaagctcacaacatt

SEQ ID NO: 199768 - DNA, 100 bp, Homo sapiens
cccagaccctgcaggcctccttggagggccttccccctagcacctcctcaggccagccacccctgcaggacatgctacattgtggatatcaagcctgcca

SEQ ID NO: 199769 - DNA, 100 bp, Homo sapiens
cgttcgcaccggaaaatgtagcttcccggttaagatcacagattctgctggccatattctctactccaaagaggatgcaaccaaggggaaatttgccttt

SEQ ID NO: 199770 - DNA, 100 bp, Homo sapiens
ggaatcggacagtgaggaggaggcgcctgctcaggtgggcctttgcagaacgggcagccctcagcagagatccaagaagaagtggccttgaccagcttgg

SEQ ID NO: 199771 - DNA, 96 bp, Homo sapiens
ccctcctctatcagctcagcgggggaccccctcgcttcctgctcgacctgcggcagtacttggaaaaggtgtgagcggtactgggcccaggagcag

SEQ ID NO: 199772 - DNA, 100 bp, Homo sapiens
taaaacttgcaaaacagtgtgaagttctttccatcagagggaattacatgaatgacagtcttcgaaccaatgtgtttgttcgatttcaaccagagactat

SEQ ID NO: 199773 - DNA, 96 bp, Homo sapiens
agaatggggtaaatttcttcacaccaaaaataagatttaaggaccatagtacagctatggatactgaaccaaacccgggaacatcttctgtgtcaa

SEQ ID NO: 199774 - DNA, 100 bp, Homo sapiens
gtaattccagctacatgagaggattgcctgaggccaggagtttgagaccagcctgaacaacatagtgccgtgagcgatgtggagatgcaggaacactatg

SEQ ID NO: 199775 - DNA, 101 bp, Homo sapiens
aagaagagaaactgtatatgatgctgccagtgtttaacaggcaattctgacgacaatatgttgaaaaacattgaactgtttgataagctgtctctgcgctt

SEQ ID NO: 199776 - DNA, 90 bp, Homo sapiens
gtccgaccgcctcggcaggaaccgggaccgccagcgcaggaggtgaatacatcaagacctggaggccacggtacttcctgctgaagagcg

SEQ ID NO: 199777 - DNA, 75 bp, Homo sapiens
tagggtcctttatatagaagggagagctgcagtactttgcacggggcctgcaagtttatatcagacaacttcgct

SEQ ID NO: 199778 - DNA, 83 bp, Homo sapiens
ctgtcagtcaatgcccgtgcccgcattgtggctgaagagttccttaagaatgagccttcacgtaaatgggtccagtcatgcct

SEQ ID NO: 199779 - DNA, 129 bp, Homo sapiens
ctcacggtcctgtgggggttaggagtgctgattcggtactgctttctgctgccgctcagaataccctctaccatctgctttggtcagggtgccgctcgaggatttaaaagcaacaagaagaaaaccaaa

SEQ ID NO: 199780 - DNA, 100 bp, Homo sapiens
gagaaactgaaggagaagaagctggctcccatcacctacccgcagggcctggcactggccaaggagattggtttggtgcacctcgatttggaggaagtag

SEQ ID NO: 199781 - DNA, 75 bp, Homo sapiens
gggacagcattaccgacaagcaagggaggtggggaagacagggctccagctaccacaggacgggctctgggtata

SEQ ID NO: 199782 - DNA, 75 bp, Homo sapiens
ggcagcattggcgaccagcgcttcacgtgacaaccatgagtggaaaaaactaattatggttcagcactggcctga

SEQ ID NO: 199783 - DNA, 99 bp, Homo sapiens
tcacctcagcgactgtgagcacaacccgaagcggcctgtgacctgtgaacagggctgtggattccaactccacagagtgaccagagagaggacgtggct

SEQ ID NO: 199784 - DNA, 107 bp, Homo sapiens
tgggactctgcacactcttcggcctgacgcccaccctcaatggcggggggatatgagactttctactcggaatatcctgagtgttgcgtggatgtaaaacccatttc

SEQ ID NO: 199785 - DNA, 83 bp, Homo sapiens
gcggcgggagctgtacaagaaacggcagaaaaagttggcatcctccatcttggccgctacctgtctgaggaacccgagcccta

SEQ ID NO: 199786 - DNA, 97 bp, Homo sapiens
gaagaagcaggtgcttatgatggacctaggactgctgtagctttccacagccccaccaccaggatcaagaaggagccccagagtccccgcacagacc

SEQ ID NO: 199787 - DNA, 100 bp, Homo sapiens
gcgggcaggcgggaggcaacggagctaccagccggacccagatgatgtggtaccagttggccaaagaagagcctggtgttggtgcatgtgctttggacta

SEQ ID NO: 199788 - DNA, 100 bp, Homo sapiens
gacctagaaaagctggtgcggaggcttttgaagcaaacagatgagtgtattcgaggtatcattaatgggattggaaattttaagtgcctttgtggacaga

SEQ ID NO: 199789 - DNA, 110 bp, Homo sapiens
cttttcaaatgctcccaaggtctcagatgaagcggtgaaaaaagattcagagttggataagcacttggaatcacgggttgaaggctggagtgcagtggcgtgatctcggc

SEQ ID NO: 199790 - DNA, 75 bp, Homo sapiens
cgcagctcagcttctgtccccaagccaggctgctcccggcagatcggcttctcctttgtacgacccaagctctgt

SEQ ID NO: 199791 - DNA, 80 bp, Homo sapiens
atgagcccggctttgcggctgggtcctaaactgcggttcagcagctggacatggagaaccaacgctcatcacctctgtcg

SEQ ID NO: 199792 - DNA, 90 bp, Homo sapiens
ctttctgccagttcactcactaccgttgctccaaccacgtctactatgccaagttctgaaacagctggaagaactgctgagtgacatgaa

SEQ ID NO: 199793 - DNA, 90 bp, Homo sapiens
ctcgagagagactacttctggcatcctttaagaatgagggtgccgaaccagatctaatcaggtcatgcttcaccccttcctccatctgct

SEQ ID NO: 199794 - DNA, 100 bp, Homo sapiens
ggaagatgcctttgggaagcatgtcaccaacccggccttcaccaaactccctctgcaagctttcttcctggtggcagatgacatcatggattcatccctt

SEQ ID NO: 199795 - DNA, 74 bp, Homo sapiens
ttttccaagtacatgcccagcgtcaaggttttgggatttgagattgacgcggtgaactctgtccagttttcaaa

SEQ ID NO: 199796 - DNA, 104 bp, Homo sapiens
agaaccaccagcattgccaccaccaccaccaccaccacagagtctgtggaagaggtggttcgaggcactcaaggagttgcccctggtcctgtaattggacttca

SEQ ID NO: 199797 - DNA, 100 bp, Homo sapiens
tcgggtctgaccactctgttccccgggcagaagaggaggatctcccacctttccaagcaaggccaggagggaatgggtactgttcaaaaaggaatgcccc

SEQ ID NO: 199798 - DNA, 100 bp, Homo sapiens
gacttggccgagcggatcctaataaggggaaaatgggatgcccgctgtctgtagccccggcatggtgcccgtggccctgcccccggccgccgtgaacgcc

SEQ ID NO: 199799 - DNA, 100 bp, Homo sapiens
aagagacagaggtcatgattctgagatgattggagaccttcaagctttctctcctttgaaaacactaagaataatgtcactgcatcagtttttactagag

SEQ ID NO: 199800 - DNA, 83 bp, Homo sapiens
atatgaaggactgggttgaagccctgaaccaagccagcaagatcaccgaaattcagttcatgaagataagaagtttcttgaca

SEQ ID NO: 199801 - DNA, 75 bp, Homo sapiens
gacactgacccccggcgggcacgcggagccattttgcagactctgatcacagtgaaacgttccatgggaacttgg

SEQ ID NO: 199802 - DNA, 83 bp, Homo sapiens
ctgagcccgtccgtccgccgccaccacccactccggacacaggttatggaaacaaaggacatgctttacatcgtcactgaatt

SEQ ID NO: 199803 - DNA, 83 bp, Homo sapiens
cgcctcctcggacaaggcttttgaagactggctgaatgatgacctcggctcctatcaaggacctcctgccccccgaggtctgc

SEQ ID NO: 199804 - DNA, 100 bp, Homo sapiens
aaaaatggaacaagttccagcacaagtgaagaaaaagtcagcactttttgaagtgtctgaggttataccagtcatgacaaataattatgaagaaaatatc

SEQ ID NO: 199805 - DNA, 74 bp, Homo sapiens
tgggcctgtggactgcagcctcggcggtcagcaggccatcgaagacggcaatttggaggaaatggaagaggaag

SEQ ID NO: 199806 - DNA, 98 bp, Homo sapiens
aagagtccccccaagtctcctgaagaggaaggagcggtgtcctcttaagaaaatggatgaatttcacccattcatcgaggcacttcttccacatgtcc

SEQ ID NO: 199807 - DNA, 75 bp, Homo sapiens
cgcggggctaccggatcggtcggaaatggattctaacattttcagagaaccttttggaaagaacaagcctacttc

SEQ ID NO: 199808 - DNA, 75 bp, Homo sapiens
gtactgtccaagtcagttcctgggtacaaggtggcacaagaatggctcaactctccaaatagagagaatttctat

SEQ ID NO: 199809 - DNA, 46 bp, Homo sapiens
atggcgataagtcattaccacaggcattctgtgaaactttagaaga

SEQ ID NO: 199810 - DNA, 110 bp, Homo sapiens
acctggggatcgctacggaccttaaaatacccgcaacagccccttcgtcccaacaagagtgagccatggagctacgtgtggggaacaagtaccgcctgggacggaagatc

SEQ ID NO: 199811 - DNA, 75 bp, Homo sapiens
ctatggagaagaccagtccaatggtcatttgattgcccgcctcagaacgatggatctgcatctcttcgactactc

SEQ ID NO: 199812 - DNA, 119 bp, Homo sapiens
acaagcttctggaagctctttgcggtggcgttggtgctgtttgcggatgctgatgcaggttaacacagaaatctgcctcctgggccatgccgcttctaaggcctgtttcttctcatgag

SEQ ID NO: 199813 - DNA, 100 bp, Homo sapiens
gctggacggcgagcgcgagcggcgcgagaaacgatgccctcctagctagccgtcacgggatggagggcttcatggactcagggacacagacggacgccgt

SEQ ID NO: 199814 - DNA, 100 bp, Homo sapiens
ctgagcgcgtccaggcctgacagctctgcggctcgggccctgaggccctagaaagtgaatttgtttcttgccaacttcatcagtggatcgaccttatatt

SEQ ID NO: 199815 - DNA, 100 bp, Homo sapiens
aaccatcgaagaatgaaaccggcttgttgtcttcaattaaaaaatttattaaaggaagcacacctaagcttcttacagtacatttctagtgaagtaaacc

SEQ ID NO: 199816 - DNA, 75 bp, Homo sapiens
tcattgcggcggttccctcctgttttcggctttgtgagaaaccttaccatcaaacacgatggccagcaacgttac

SEQ ID NO: 199817 - DNA, 50 bp, Homo sapiens
aaaaaatcccaaggtctgcaaagggctcaaaatctccttcgccaagacca

SEQ ID NO: 199818 - DNA, 90 bp, Homo sapiens
aaagatctcaacctggctggaacagcggaggtggggcttgcagctaaattttcaggagtgaaaagaaaaagaggaaggaagaaacccctc

SEQ ID NO: 199819 - DNA, 90 bp, Homo sapiens
agcggatcgggtggagtgtaggtcatatcgccgcgtgccctgaggtacggctgaacatcatctctaacctggactgtgtgaacgaggtga

SEQ ID NO: 199820 - DNA, 119 bp, Homo sapiens
gtccttacagccgctcgtcagactccagcagccaagatggtgaagcagatcgagagcaagggggatatgagactttctactcggaatatcctgagtgttgcgtggatgtaaaacccatt

SEQ ID NO: 199821 - DNA, 82 bp, Homo sapiens
cctagtcgtggccggaggagtctcagagctgtcagaaagcttaaagcttttcaagccaggccaagaagctgtgaagtaccag

SEQ ID NO: 199822 - DNA, 74 bp, Homo sapiens
tgtatcttatctatggaagataaagcatggagttggctaatggatgctggtactccaaagattcaggtttactc

SEQ ID NO: 199823 - DNA, 94 bp, Homo sapiens
ctttgcaacatttcaggaaaacagagaaagaagtgataggagggctctgtagaataccctctaccatctgctttggtcagggtgccgctcgagg

SEQ ID NO: 199824 - DNA, 74 bp, Homo sapiens
cagtgatgaggatcaaggctatgtggatcttgtcatcaagtgtctttggtgcaacactaacaaggcttgtctgg

SEQ ID NO: 199825 - DNA, 100 bp, Homo sapiens
ctatacatgatgtctgaagtcttggccaaagaggaggcgcgccgtgcactggagacaccctcatgaccccacacagaacagaaaccggatcgcaagcttc

SEQ ID NO: 199826 - DNA, 96 bp, Homo sapiens
tcattccaaactttcagatctctcaagattcagtagggaacagtgttgtacatcagtacacagaagagacggatgtgaagacaccaagagagcaac

SEQ ID NO: 199827 - DNA, 74 bp, Homo sapiens
ttcaccttcacgatgtttcccttggtcaaaagcgcactaaatcgtctccaagagtcgacttcaatgttcctatg

SEQ ID NO: 199828 - DNA, 90 bp, Homo sapiens
gcgagcggcgcggagctggacgccgcgatcgtggggcccgcgaggcgggcagccggggcgtccaggttatgaagacagtatggagtttcc

SEQ ID NO: 199829 - DNA, 100 bp, Homo sapiens
tcattaccgtcgccagcggagcgaacccgagagcgtggagcgggctgggccaggatatttggccttgacattaaaggcagagactgtggcaatgaggcag

SEQ ID NO: 199830 - DNA, 83 bp, Homo sapiens
cctgctgggcggactcttcatctacgatgtcttctggaaaataagacctactcatctgtgagaacagaagctttatctgtgat

SEQ ID NO: 199831 - DNA, 75 bp, Homo sapiens
ccagggagtggaggggagccaggcggccgcctcaggtggcttgctttggtgaaggtattcatacagccttcctaa

SEQ ID NO: 199832 - DNA, 75 bp, Homo sapiens
acgtgtactgcgacgcctgcctcggcaaagtctgcgctcctcagaccaccggcaggtgaacagcctgatgcagac

SEQ ID NO: 199833 - DNA, 97 bp, Homo sapiens
cagctcggatccatgtcacttgacgagcaacaggctgtggaggaagatgcagagtcagaagatgaagaggaggaggatgtgaaactcttaagtatat

SEQ ID NO: 199834 - DNA, 75 bp, Homo sapiens
cccccatgatccctaagaagacagcttgaacctaggaattgaatgatctggcacgggaccctccagcacagtgtt

SEQ ID NO: 199835 - DNA, 82 bp, Homo sapiens
cgggtcgcgcgcggccgagtcgcggaggcgcctccgctgcagtcgctgcgtctccaaggagcatcagatccatgctgctgct

SEQ ID NO: 199836 - DNA, 75 bp, Homo sapiens
cccgggtgaagccaccgtcatcatgtctgaccagacatggcccatgaacatggacatgagcatggacatcataaa

SEQ ID NO: 199837 - DNA, 77 bp, Homo sapiens
agtgactgaattaaaaggtgtcaagaagctcagaatgtgttggaacaaatcagagctaccaagaaagtcactgtttc

SEQ ID NO: 199838 - DNA, 100 bp, Homo sapiens
tgatggaatgtgctttagaagttaaaaagggaactgctcgcagaaagaagaaggtggttcatagaacagccacagcagatgacaaaaaacttcagttctc

SEQ ID NO: 199839 - DNA, 98 bp, Homo sapiens
cgcctcccgggagtgccgtgcgccgcagcccgggcccaggccccggcagcgcctgggacaaggtgaccaagaatatggcccaggtgaccaaagccctg

SEQ ID NO: 199840 - DNA, 100 bp, Homo sapiens
gacagctgatccccatgactgctctgcttatactggctggacagtaaaagctttgattgatcaagaagtgaagaatggcattccttctaacagaattatt

SEQ ID NO: 199841 - DNA, 90 bp, Homo sapiens
ctcctgagtagttgggactacaggaagtggagcgagaaatctcattcagaacagagtgtggcctgtattactcctactacaagcagatgc

SEQ ID NO: 199842 - DNA, 146 bp, Homo sapiens
catccctctctggccactatggaattctaatttgaaccatgtttggattgaagccgcctctgtattacttaccagacaatgcagatcttcgtgaagactctgactggtaagaccatcaccctcgaggttgagcccagtgacaccat

SEQ ID NO: 199843 - DNA, 95 bp, Homo sapiens
tcagtctgcttcctcatccccccacccaataaggatgccattgagatggccagcaggtatttcgaaaaaagcctggttttggtacagctcttcca

SEQ ID NO: 199844 - DNA, 75 bp, Homo sapiens
gctataaacactggcaatttgaacttctgaattatacaccagcagattatgatgttggagtccggggtgacctgg

SEQ ID NO: 199845 - DNA, 101 bp, Homo sapiens
tccgacagcgtactcatggaaatgaaaagagaatactgtgtggctgacttcaaaagagtagtggattttctgaaagagaatcgtcctcttgagttctggcg

SEQ ID NO: 199846 - DNA, 101 bp, Homo sapiens
aacctggaccaggaggaggttttcaggaccaaaattgtggaaaagtcactctggtggagctgatcagaataatgttcagcatcaaccccctggagaacctg

SEQ ID NO: 199847 - DNA, 82 bp, Homo sapiens
tgttcgcctgctcaacgccactcatcagattggctgccagtcaggggaaatgctgtctgtagctgagcacttcctggagcag

SEQ ID NO: 199848 - DNA, 99 bp, Homo sapiens
tggtctgagctagagggtgaagctggcggagcaggaggatgggcgatgctacaaaacttagagtttctcctaagaatcctcgtatccccaaattgcata

SEQ ID NO: 199849 - DNA, 100 bp, Homo sapiens
ggtggagccaccagcctctccctgagaacagctgatgttccctttccactttgttgaccggctgggaaagcacgacgtgacctgcacagtctcagggggc

SEQ ID NO: 199850 - DNA, 100 bp, Homo sapiens
cgggacccggttccccggcccacagtgggggtgtgcaaacccgagagaactgggtgctttgaagaagagtctcacagccaagcaggtccaggcggatttc

SEQ ID NO: 199851 - DNA, 50 bp, Homo sapiens
cctacccgggatacggaggagggggaaatcgtggaacacatggtccagca

SEQ ID NO: 199852 - DNA, 75 bp, Homo sapiens
gctaaattacattggagctgggctatcagtagtaagtgacaatgtcagtgcctactgcctgcatattgctgagga

SEQ ID NO: 199853 - DNA, 88 bp, Homo sapiens
ccagttcaaccaccatgagcagtcctccgaggacatctgggctgcgtgctgtgttgtcacaaaggctctcaaaattagagagatgtgt

SEQ ID NO: 199854 - DNA, 90 bp, Homo sapiens
ccgcctgatcggcggccgccatgttaggagcgcagtggcggcgcaaccagccttctagggcggcggagataacgaaggaggcccaacttc

SEQ ID NO: 199855 - DNA, 90 bp, Homo sapiens
caaagctgcttccctgttgctggagatcctgggcctcctgtgcaaaagcatggttctgctccagacgagcccttaccacgttgactcact

SEQ ID NO: 199856 - DNA, 100 bp, Homo sapiens
ggctactctgcctcggggacgaaagcagaaatcaatgtggactgaacataaatcacctgatggaaggacttactactacaacactgaaaccaaacagtct

SEQ ID NO: 199857 - DNA, 99 bp, Homo sapiens
tccccagctctgcagccacatactatccgtttgttcaggaaccaccagtgacagagtctggaggcggctggtggaaatccaattccccgcggagcatgg

SEQ ID NO: 199858 - DNA, 75 bp, Homo sapiens
gctggaacacagtgactctgttaagcagctgaagggacagggtgtgggccgaagatatgctcatgtggtgttgag

SEQ ID NO: 199859 - DNA, 101 bp, Homo sapiens
ctgtgatctggcatcggacacaggattaggaatttaggctctgaggtacacctcattgaggatctaatggacccctatcttcagcatggggaacagggtat

SEQ ID NO: 199860 - DNA, 100 bp, Homo sapiens
aagttggctaacaaattgaaagatatcatcaaacgacatcagcaacgaagtaaacgaggaggttggtccaaaggaagaaagaggaagaaacctcttcgag

SEQ ID NO: 199861 - DNA, 100 bp, Homo sapiens
ccagagcccacagaagcatggaaggttatacagtggttgctggaagaaaaattgtgtgcgctgcagtgtgctgtatttgataagactttggcagaattga

SEQ ID NO: 199862 - DNA, 100 bp, Homo sapiens
ggtaatggtgtgaaggaaggcccggtgcgattgcatgaggatgctgaggctgtcctgtcctcgtccgtctcatcaaaggtggggtggaagacaacccgtg

SEQ ID NO: 199863 - DNA, 100 bp, Homo sapiens
cggagcccttgatgacgagggccacagtgggattaaaaagaccactgaggagcaggtgcagcccccctcccaactcccaaatcccccggcgtcggagatg

SEQ ID NO: 199864 - DNA, 73 bp, Homo sapiens
gagaaagactactttggacttttgtttcaggaaagccctgagcagaaaatcatcgagaaacaagcagggcaca

SEQ ID NO: 199865 - DNA, 78 bp, Homo sapiens
tgcagagggtcccacggtggaagcgagagaggaggaaagaatcttcaagagggagacatagggaaaaggaagacataa

SEQ ID NO: 199866 - DNA, 100 bp, Homo sapiens
gaaagttcatctagaaatctcaaagccatgtctcaggtgctgttaagccaagtgcaccggctgagagcattggacttgcttggaagatttttggacctgg

SEQ ID NO: 199867 - DNA, 128 bp, Homo sapiens
gctagccttggagggaaagtagccaccagtccaactcgggtcgcccccaccattatttcggatggcactggatctttaaaacgcagtggttcctttagcaaactccgggcttccattagacgcagcag

SEQ ID NO: 199868 - DNA, 82 bp, Homo sapiens
ataacagttgatgaaaaattgtttatcgatggtcgactggcaaaactaaatgcaggaaggggtttctctgatgtatttgaag

SEQ ID NO: 199869 - DNA, 75 bp, Homo sapiens
gttagaggaagacgacgagtttgaagagttccctgccgaagacttgtggaagaaagcaaactgatcccactcatt

SEQ ID NO: 199870 - DNA, 100 bp, Homo sapiens
cagcccagccaccatgagcaccaagcagatcacttgcagaccgcccaggtttgctgaatgtgaagcccattgaagacattcaagacaacctgctacaagc

SEQ ID NO: 199871 - DNA, 100 bp, Homo sapiens
cctggattcaagcaatcctcccatctcagcctcctgagtagctaaggactacaggtactccaaagattcaggtttactcacgtcatccagcagagaatgg

SEQ ID NO: 199872 - DNA, 80 bp, Homo sapiens
ctggaatcgactggggcatcttcccggaatcagattcaaaggtttctctggaaacccccctggtaagtgtggaggaggcg

SEQ ID NO: 199873 - DNA, 100 bp, Homo sapiens
gggtggccctgtgggaggatgtgactaagatgtttaaagcagaagacagcatcgcacagaattattttaaaaaaaagcagtgatccaagcaattgaattg

SEQ ID NO: 199874 - DNA, 100 bp, Homo sapiens
ttgatgtggatgatgccaaagttttattagaacttacgatttccaacggccccaaaaaccactcggtcaatgaagaagagcaggaagaacaaggtgaagg

SEQ ID NO: 199875 - DNA, 100 bp, Homo sapiens
gaagaaacgtatagtccgttctttagaaacaactcggagaaaatgagtatggaggcagccctgaagcagcttcctaggaacaaggtccccaacatggcgg

SEQ ID NO: 199876 - DNA, 100 bp, Homo sapiens
ccgggagaagcatgggaaggaggccgagccgggatctcaggtcctcgggggcggcggccacgccaaggacggcacccaccaaggctccggatgtgttccc

SEQ ID NO: 199877 - DNA, 100 bp, Homo sapiens
gggtgctggagctatacagcggcgtgggcggcatgcaccacgcgctgagaggcttactgtggatttctccgtcctggagtttcttcagagaatctttctg

SEQ ID NO: 199878 - DNA, 51 bp, Homo sapiens
cttatagtggaaagcagtctactgagaaggtccagcttaaaaaatgtgtcc

SEQ ID NO: 199879 - DNA, 82 bp, Homo sapiens
ggggatagtgtcatcggttcggtaaagtttctgttctctgcttcaaggttactgactttttatgatgtttggtggctatgag

SEQ ID NO: 199880 - DNA, 50 bp, Homo sapiens
tggccttctacgttgtgaaaatgaatcccctactttgaaactagtgctgc

SEQ ID NO: 199881 - DNA, 82 bp, Homo sapiens
ctcaagtcctggctggccaagttactggagccgatgtttatctggcaagactgaggcaaataagactacagaatttcaatga

SEQ ID NO: 199882 - DNA, 75 bp, Homo sapiens
tacagtcgaagctctgtaagaagaaaacactttgtgggccaggtcccacgtacctcggagatttatgtccaccga

SEQ ID NO: 199883 - DNA, 100 bp, Homo sapiens
ccgaaccgtgaagggctggaggccccggcggctaggtctggagcccccaactcccttgacagtgtacgctggagcaggttccagggtggggctgccctgc

SEQ ID NO: 199884 - DNA, 100 bp, Homo sapiens
ttttgatgctgaggagctcctggtcgatgaagaggatgatgtttttggtgaagacaacacaggcagttctacataccggccaccccctcggacccgggag

SEQ ID NO: 199885 - DNA, 101 bp, Homo sapiens
ctctactgtgcagctccagagagacgtgaaacatgtgaacactcaagtgaagcaaaagccttccatgattacgaattgaatgatctggcacgggaccctcc

SEQ ID NO: 199886 - DNA, 100 bp, Homo sapiens
catggacctgcctttctcctcctccccaagtcgcagtgccactgcaagcccacaggcacttgaaaataactatgaagttatattccgagaacctgacact

SEQ ID NO: 199887 - DNA, 82 bp, Homo sapiens
ccagcaccgcagatgttgtcaaggtggcctaccaggaggccaggggtgtcgccatggaccgctcaggaagtggcagcgaaga

SEQ ID NO: 199888 - DNA, 75 bp, Homo sapiens
atcagtgcccttgtggcgaatggggctcacgtcgatagcaggacccagtgctccataaaggataatagtttccag

SEQ ID NO: 199889 - DNA, 51 bp, Homo sapiens
atacaggaaaaactttccagccattggacagaactgtaccgctctcttttt

SEQ ID NO: 199890 - DNA, 74 bp, Homo sapiens
agccattggatttcctcaagctacaggtattgaagcccctgggtgataatttgatggaggaaaacataaggcag

SEQ ID NO: 199891 - DNA, 82 bp, Homo sapiens
caccagatctttctccgtggattcctctgctaagaccgctggtgtccctggccagtgtccttccacctgtccacaagcatgg

SEQ ID NO: 199892 - DNA, 82 bp, Homo sapiens
agggcttctgcagatgctaagaaggaatctgaacctgtgatgttaagaaatcagtaaatattaaaaagaagatggatgcaag

SEQ ID NO: 199893 - DNA, 100 bp, Homo sapiens
gcagccatggccctggtgaccctgcagcgctcgcccacgcccagcgccgcctcctcctcggccagcaacagcgaggggggacacagcgattgccacgcgc

SEQ ID NO: 199894 - DNA, 100 bp, Homo sapiens
gccctctcgcctgcagcccattctcctcctggacccctcaggctctcatgccccgctgctgactgtaagctttcccgccagagcgccacagagatcccgc

SEQ ID NO: 199895 - DNA, 82 bp, Homo sapiens
aaagaatcttgtcactttagccactgctactacaggaggtatttaactgaaaggaatatctgcttcactgttgcaaccaaac

SEQ ID NO: 199896 - DNA, 74 bp, Homo sapiens
cagaacctagcctatcagctggggctggatgagtatggatcctgagcttgaaaaaaaactgaaagagaataaaa

SEQ ID NO: 199897 - DNA, 50 bp, Homo sapiens
ggccggacaacttcgttttcgatgcagaatcctgatacactatcagcaat

SEQ ID NO: 199898 - DNA, 144 bp, Homo sapiens
aacaatgaaaaccaatacctatgagaggggaacatattacttctttgactgtcttaactggaggaaagtagctaagggcaagtgtccagagaatggctgggatgaaagtacacttgaactctttttacatgaacttgcaatcat

SEQ ID NO: 199899 - DNA, 100 bp, Homo sapiens
gacagatgggaaaaatatttgatcaaggtcttatatccagatggccaggctcagatgattcaccccaagcctgcagacttccggaatcctggcccagggc

SEQ ID NO: 199900 - DNA, 100 bp, Homo sapiens
gacaaaaggagcttcatctttcaagataacccgtggaattgaagcagttggtggcaaattaaggtttgaaattgaaattgaacccatttttgcaagtttg

SEQ ID NO: 199901 - DNA, 75 bp, Homo sapiens
tggtgtgcagccgcccaggagggtcttgaatccagataatagttttgaaatactggttgaccaatctgtggtgaa

SEQ ID NO: 199902 - DNA, 98 bp, Homo sapiens
gagattttttaaaaattaaacttcaacacaatgagtcaattgaccctggccagcagttcacttgggaacattcaaacttggaagtaaacaaaccaaag

SEQ ID NO: 199903 - DNA, 100 bp, Homo sapiens
gttcttggtgcccctgggcatcaccaacatagccatcgacttcggggagcagaatctcatctgttctgagtgtggggatgagtttactctgcagagtcag

SEQ ID NO: 199904 - DNA, 50 bp, Homo sapiens
ctgcccccatgacatcctggctgggacggacagagcgggatgccaccagc

SEQ ID NO: 199905 - DNA, 100 bp, Homo sapiens
gctggctacagcttcagaagaccgaagcgttcgtatctggaaggtaaaataccatgaagattttgaaaaaacaaaggggagaggctttactcccgtcgtg

SEQ ID NO: 199906 - DNA, 90 bp, Homo sapiens
gcctcccgctttgcccaggagaatgaggaggtggccaagttggagaagcacttgatgcttctgcggcaggagtatgtcaagctgcagaag

SEQ ID NO: 199907 - DNA, 100 bp, Homo sapiens
tgaaagccatctcaagactcctcagatgccaccaacaaccccatccagcagttccttcaccaagggagttacccagggagattatacacctatggaagac

SEQ ID NO: 199908 - DNA, 75 bp, Homo sapiens
gaggccagcgcgctgcaacacaagatcaagaactccatctggaccaacttggaggccttgcagaagaagctggag

SEQ ID NO: 199909 - DNA, 90 bp, Homo sapiens
cctggcgccgacgtcaaggtccacagggcacgcaagaccatgccgaagtccgtcgtgggcctgaaaacgttgtgtgacgtgatcctcatg

SEQ ID NO: 199910 - DNA, 80 bp, Homo sapiens
aggcggaggcagaggtggaggcgctttgaaaggaatgctgtctctgcaatttgagaggaggtgctcttaagcaaacgaag

SEQ ID NO: 199911 - DNA, 83 bp, Homo sapiens
ttcagccctttgatgaccgcagcaggcaccgttcctgccttgggcgctcatgggcttctcgctgctgctgggcaactccatcc

SEQ ID NO: 199912 - DNA, 101 bp, Homo sapiens
gttgctcctggagatgagcacgccctttacctgcgtttcctggatgctcttaaagatgctgggctcttgcactgtttggtggaaatggtgagacaggattt

SEQ ID NO: 199913 - DNA, 100 bp, Homo sapiens
cagaatgccaccaagtatggcaacatgacagaggaccatgtgatgcacctgctccaggtgttcgaaatccgcaccactgatgacctcactgaggcctggc

SEQ ID NO: 199914 - DNA, 50 bp, Homo sapiens
gggccactcagagtcgcccgagaagtcatcatcagatttgaaatatttaa

SEQ ID NO: 199915 - DNA, 100 bp, Homo sapiens
cgaacccagtcgcgcagcgctgcagtgaattttccccccaaactgcaataagccgccttccaagaccctaccaatgcggccactgctcccagtccttttc

SEQ ID NO: 199916 - DNA, 50 bp, Homo sapiens
ccgtggtccttctccatattcgagatttaagtaagtcttccccaacaccg

SEQ ID NO: 199917 - DNA, 75 bp, Homo sapiens
agcagctgcttcctgcttgtctcagaaggttctaggacaaggaaaatgggtacttacaatttcatcagaaattcc

SEQ ID NO: 199918 - DNA, 82 bp, Homo sapiens
tgaaatccatgcactagataagcaaacatttaaaggactcatatctttggaacatctagagctattgcttaccttttcccaa

SEQ ID NO: 199919 - DNA, 82 bp, Homo sapiens
ggcggggcggagccgagagccacactttcaagtaaaccaggccaggtgcagtggctcacgcctatatttccaggactttgag

SEQ ID NO: 199920 - DNA, 119 bp, Homo sapiens
ccaacatgacacagcttgtttcaaatttatcagcaacagtagcagaattgaaacgggagctcaccatggatgatgatatcgccgcgctcgtcgtcgacaacggctccggcatgtgcaag

SEQ ID NO: 199921 - DNA, 100 bp, Homo sapiens
aaccgaccctgattacgaggatgtatctgtggcccttccaaataagcggcataaagcaattgagaattcaggcagctgtgtcaatgttgaaacaagacta

SEQ ID NO: 199922 - DNA, 80 bp, Homo sapiens
cgcttcccggctctgccctcttggccgaagtgcccgctgccgggcgcgggcctcagacaaagaaacagccttggtataat

SEQ ID NO: 199923 - DNA, 98 bp, Homo sapiens
aggacctggaggaggaccacgcctgcatccccatcaagcctttagaagaagccacactctctgaattaaaaactgtcctcaagagcttcctaagtcaa

SEQ ID NO: 199924 - DNA, 50 bp, Homo sapiens
ttctagcatccgtgaaggagcaggcttgaagctgcaaaagatgattaccg

SEQ ID NO: 199925 - DNA, 78 bp, Homo sapiens
ccgcgatcccagtcatgcatgaaacctctctgaggtctggtcagattccaaccctggacagcagtgaacacaaccttt

SEQ ID NO: 199926 - DNA, 97 bp, Homo sapiens
gccctacatttgaatccacacacaaacatggtgtgcctgctgaaaaaaaattggcagagggggtcgatttgggaggaaaggtgtggctataaacttt

SEQ ID NO: 199927 - DNA, 117 bp, Homo sapiens
actcttcagggatgagtcatgtggcagtggaaaatgcgctcgggctggaccagcaggtgagaagccctaccactgcaactgggacggctgcggctggaagtttgcgcgctcagacga

SEQ ID NO: 199928 - DNA, 80 bp, Homo sapiens
ctatctgcactttctttgacctaataaaagtttcctgaggtcaaggacttccttttccctgccaaaatggtgtccagaac

SEQ ID NO: 199929 - DNA, 76 bp, Homo sapiens
tgcatatccacactggcagcagcaggctcctcctgatccaggtaagaatgattgatgttggctgatattggagtgc

SEQ ID NO: 199930 - DNA, 51 bp, Homo sapiens
cacagtggagacaaacctttcaaggtaactcgggaccaaatgaagatgttt

SEQ ID NO: 199931 - DNA, 96 bp, Homo sapiens
ggctgtagcaggttccggcggacggcgttgcgaagggcaagaatatcacggcatgggcatgagtagcttgaaactgctgaagtatgtcctgttttt

SEQ ID NO: 199932 - DNA, 100 bp, Homo sapiens
ggcggcgggacggagcggccggggcctggggctgcctgccgggcggccgggcgcggcgagcccagaggttggaaagaaccatgactgtattcaggaaggc

SEQ ID NO: 199933 - DNA, 129 bp, Homo sapiens
cttgagggggactggcctggcgtgcactccgcacctcggggacattattgcgcgtggaacggctgcttttggaaggtgtcgtgaaaactacccctaaaagccaaaatgggaaaggaaaagactcatatc

SEQ ID NO: 199934 - DNA, 80 bp, Homo sapiens
aaggattccaagtaactcttatttgggaagatcagttttcctgccatccaggctgctccctccttcagcaactcattccc

SEQ ID NO: 199935 - DNA, 100 bp, Homo sapiens
cgttgatgtatcagccacaaaaaatggacttgactatgcactcaggaatgtttacccttgcggaagttgcatcacttaatgacattcagccaacttaccg

SEQ ID NO: 199936 - DNA, 80 bp, Homo sapiens
ttccggacacataacaagcagcagtgaggacaccaaagccttatgccagcctggaccatcttggaggcagtgtaggatca

SEQ ID NO: 199937 - DNA, 75 bp, Homo sapiens
ttactgatacagagacgatggtcggaatcagatttgaaaatgaaagttgagaaagatcagtctaaagaaaaggag

SEQ ID NO: 199938 - DNA, 101 bp, Homo sapiens
tttgaggacataactctagaatctgaaagaaaacgaatatttaaagattttatgcatgtgcttgagcttcacgtggtcggccgcgcggacggaccggaatg

SEQ ID NO: 199939 - DNA, 75 bp, Homo sapiens
ccttggctctcccacccaatggagatggctctaatggatggggctggtaagtagcaaaaagccggacaaggaaaa

SEQ ID NO: 199940 - DNA, 98 bp, Homo sapiens
caggagaagccgcccaaagaactgtttgtgaagtgtggatatgcaggctctaactttccagaacacatcttcccagctttggttggaagacctattat

SEQ ID NO: 199941 - DNA, 80 bp, Homo sapiens
caagaccatgctggcaagtctgaaggtcaagtagttgatgtcacttggcgatattcctgcaaacatgaagaggtgattgc

SEQ ID NO: 199942 - DNA, 100 bp, Homo sapiens
cgggagttcaagaagaacactccagagcaattaccagctctggctgggtcgccacaacttgtttgacgacgaaaacacagcccagtttgttcatgtcagt

SEQ ID NO: 199943 - DNA, 89 bp, Homo sapiens
gggggacaagtcggcgccccagagcggacgaggcttgggaacaatgggccgaggcattgtcatttcttttgcaagggccaggattcctg

SEQ ID NO: 199944 - DNA, 75 bp, Homo sapiens
gctgcctctgaggaacacgccgcagtttctccttggaccaagatgactgatggaaaactctccacctctacaaat

SEQ ID NO: 199945 - DNA, 74 bp, Homo sapiens
tcagatccgctacctcacccagctgctacaggagctgagagaccctaccctcactttccgtctgcttggctccc

SEQ ID NO: 199946 - DNA, 50 bp, Homo sapiens
tgcactggataactatgttattcgagagacggggtcttgctacattgccc

SEQ ID NO: 199947 - DNA, 96 bp, Homo sapiens
ggacccagagctagactacaccctcatgagggtctgcaagcagatgataaagtgcctcaacctggtgttcctgctggcagacgtgtggttcggctt

SEQ ID NO: 199948 - DNA, 100 bp, Homo sapiens
atttagtcaaaaatgaaaagatgggaacagcagaaaatcaaaacaagctctttatgagaatggcatctaagggtgagcctggtctgcctggatacccagg

SEQ ID NO: 199949 - DNA, 83 bp, Homo sapiens
gacaaaaggaaatgcttcgaaataatgaatccaaaatccttcatttacagggggatatgagactttctactcggaatatcctg

SEQ ID NO: 199950 - DNA, 101 bp, Homo sapiens
ggatggctgagatagaacgtgatgacatcgacatgttgaaagtacgctacttcctgaagaataaggtcagccctgatttgtgcaatgaggacggactcaca

SEQ ID NO: 199951 - DNA, 82 bp, Homo sapiens
gtcggccgcatccgtttccacgactttctgggagactcggtgaggtggctttgaccccgggttgcccggccagcacgaccga

SEQ ID NO: 199952 - DNA, 100 bp, Homo sapiens
ctccgttatctgcaggtattgggagatgcacagctaagatgccaggaccacctggaagcctagaaatgaggctaagaatattgtacacaaagattcttga

SEQ ID NO: 199953 - DNA, 100 bp, Homo sapiens
gctcgggagattcagccgtgaagcaagtgcagatagatggccttgatccatcagttacacaagtgacaagaaatgttccaccaggacttgatgaatataa

SEQ ID NO: 199954 - DNA, 98 bp, Homo sapiens
tttgcactcggggagcagcaatgatctgttcacaaccgagatgagatatggctcttgtcaggatggtgaagctgttcatcggaaacctgccccgggag

SEQ ID NO: 199955 - DNA, 88 bp, Homo sapiens
caaggcgacgaaccttggagagaggagaacgaacatcttctggacctttgtccagttcaggacctcaaggggctcggctatgagaagg

SEQ ID NO: 199956 - DNA, 101 bp, Homo sapiens
gtgagctcctgccagcagtgcctggctgtgagccccatgtgtgcctggtgctctgatgaggtaccaggtcatcagtacaccatctgatattttcatggtga

SEQ ID NO: 199957 - DNA, 50 bp, Homo sapiens
ccagcagccgccatggctctgctccgaggactctggactgtcttcacact

SEQ ID NO: 199958 - DNA, 100 bp, Homo sapiens
cttcctgtgtgcggcgccgctaccgtgagttcgtgtggctgagaaagcagctacagagaaatgctggtttggtgagtataacatgtatggctggtgggtg

SEQ ID NO: 199959 - DNA, 105 bp, Homo sapiens
tgataaactgaaccctaaaacaattaatccgcatgctacaagtgaaaactgatgagaaactgaatgtgtctgatgagaatacagcaagttgccctttgagcccca

SEQ ID NO: 199960 - DNA, 97 bp, Homo sapiens
tggtggaacagctacgcatagaagccgggattgagcgcatcaaggtcaaaatgcagatcttcgtgaaaacccttaccggcaagaccatcacccttga

SEQ ID NO: 199961 - DNA, 100 bp, Homo sapiens
tggatctccaagtgaccccctcagcaactcctgatgaacagcctcgcagtcacctctgtgccctgctggttgtcttcccagcgctgctgtagttgccttc

SEQ ID NO: 199962 - DNA, 90 bp, Homo sapiens
tccaaatatccagattttaagcagcatgttcagataaatctgaatggaagagtgaggcccttctgaaactgatgatgttgatgaaaaaca

SEQ ID NO: 199963 - DNA, 100 bp, Homo sapiens
ctgcatcatggtcttccttctcttcattgccttcaactttggacctgtcagccttcctacagcaacttcccactccaggtggccagacgggagttccaga

SEQ ID NO: 199964 - DNA, 134 bp, Homo sapiens
ttcccagcagatcattcggtcttcaaccttcccacaaactgatgttctttcaagttcacttgaggcagaacacagtcgtgagatggagaataaagaaactctcaaagggttgcacaagatggatgatcgtccag

SEQ ID NO: 199965 - DNA, 78 bp, Homo sapiens
ccccgctggcgggcttccctgtcgccgttcgctgcgctgccgggaaatctggcattttttaaagtttgcgccccacaa

SEQ ID NO: 199966 - DNA, 100 bp, Homo sapiens
aattttatgaagaaaatgggtttctagtaatcaaaaatcttgtacctgatgccgatattcaacgctttcggttggtcaaagaaaaagtgatgtatgaaaa

SEQ ID NO: 199967 - DNA, 75 bp, Homo sapiens
gcgaggcagctgtactaggactgggaacggaggggaggtatggtgtcaagaaaacatagtcaccattattacgaa

SEQ ID NO: 199968 - DNA, 78 bp, Homo sapiens
tcctgctgcttgctgaccaaatgagagcgcctgctcgctgtgcccccgggttatgacgacccccaataaaggaaacaa

SEQ ID NO: 199969 - DNA, 82 bp, Homo sapiens
gattagcttcgcagtctggaaagctttaggagttcacagtgatgagagccactcagagtgggtgtcttgtgtccgcttctcg

SEQ ID NO: 199970 - DNA, 82 bp, Homo sapiens
ctacgctgccctgggtgctgtaggagcccatctgactcaccagaccagtgtgcttttcttggagaaagaagaaaagaagaaa

SEQ ID NO: 199971 - DNA, 87 bp, Homo sapiens
ggctacggggcagatggactcggagcgccccgccggtgttgacttcaaaatcaaaactgtagagctaagaggaaagaaaattagatt

SEQ ID NO: 199972 - DNA, 89 bp, Homo sapiens
agtttgaactgaggaagccattagtgctctggtctctgacccttgcagtcttcagattatcttagaagacctaggactccaaaaatgtt

SEQ ID NO: 199973 - DNA, 99 bp, Homo sapiens
ccgcgctgcgcatccccgcggacgccacagcgctattggtgctgaagacatggacggcttccaggcagacacggaggaggaggaagaggaggagggcga

SEQ ID NO: 199974 - DNA, 51 bp, Homo sapiens
tatgaccacgactcgctgaaactgcaggtcctctccacccggatcctggcc

SEQ ID NO: 199975 - DNA, 80 bp, Homo sapiens
gagcgttctaaaggaaggcgtccgttggccttcgtacccgtcttgattgagatttaaggaacagtgacaccccaccccag

SEQ ID NO: 199976 - DNA, 125 bp, Homo sapiens
tctctgaggagcggcgggcggcggcgcgcggacccaggcgcggatggcgaggccagcaggtggagaggtagtgaaaatagctcagctggcatccatcacaggaccacagagccgcgtggctcagc

SEQ ID NO: 199977 - DNA, 80 bp, Homo sapiens
ggatggtcttgaaacacaaatggtttttgacatgccttgaattggaacgctacctacagacggagccccggaggatctca

SEQ ID NO: 199978 - DNA, 87 bp, Homo sapiens
ctcgcctttgccgatccgccgcccgtccacacccgccgccaggtctaccagccacagtctctgcacgtttccaagagcagcagaaaa

SEQ ID NO: 199979 - DNA, 82 bp, Homo sapiens
cctcggcagggaggatgacggagctgcagtcggcactgctactgcgaagacagctggcagacgcatcttctctccagactgc

SEQ ID NO: 199980 - DNA, 90 bp, Homo sapiens
tggctgtacagctcctcaagtgcaacaagtcccacttccgaaaccacaagtttgccgatctccaacagacagaagcagagctcaggaagg

SEQ ID NO: 199981 - DNA, 101 bp, Homo sapiens
aacgcccccgggacatgcatcgtcccctggactctctcaagtttggtaccatgtatgtagcagccgtggaaaagggtgttataacacaagactcaaggaag

SEQ ID NO: 199982 - DNA, 83 bp, Homo sapiens
ccaagctcgtggcctgcctctgcgtgcggaaggtggccatccagaaggaggacttgcagaagtaccacaacagggacacctgg

SEQ ID NO: 199983 - DNA, 75 bp, Homo sapiens
tttttggtttcttacatgaaaaatcaaaatggtacatttaagctttccagagtgttgaatcttccaccagaaaac

SEQ ID NO: 199984 - DNA, 75 bp, Homo sapiens
atctcaaaaacaaaattctgaactcaggacttggcaagaaagaagcacttgtaaggaaatatagcatccattgtg

SEQ ID NO: 199985 - DNA, 50 bp, Homo sapiens
ctgacggcgactgcgggaggccagagatgtggtcttgctatgttgcccaa

SEQ ID NO: 199986 - DNA, 75 bp, Homo sapiens
catatggaacttgctgcatgccagcaccatgtcctccagcagcctgacctgagtgggttagtgatccagagaaac

SEQ ID NO: 199987 - DNA, 82 bp, Homo sapiens
tgccatgtgatactccaggacaagggttccaatgattcttgttggtaataagtgtgacttggaagatgaaagagttgtaggg

SEQ ID NO: 199988 - DNA, 98 bp, Homo sapiens
aaagacgtagaaagaaatcttagcaggctgaaatgccacagcttcctcaagatttgaaaggagaaactttttctcatgtatttgggaccaacacatct

SEQ ID NO: 199989 - DNA, 98 bp, Homo sapiens
acagtgcatcccgacagcagcaacctgatccccaagctttttcgacctgcagggggagtcggtgaagtacttcctggacaacttggaccggatcggcc

SEQ ID NO: 199990 - DNA, 75 bp, Homo sapiens
cgagaattaaatgccgagaaggccagtacggtattgttgcagcatctggcagtgagactgaggatgaggacagca

SEQ ID NO: 199991 - DNA, 83 bp, Homo sapiens
gttgggcgttaactatgttatccagggaaaatagtttattaaccacttaacctctcagaactgaacaaagacaacattgttcc

SEQ ID NO: 199992 - DNA, 100 bp, Homo sapiens
atgaagactacagatattatgaatacaaccatgatctcttccaaagaatgccacagaatcaggggaggcatgcttcagtgaaaatgcctcgtgtaaaagc

SEQ ID NO: 199993 - DNA, 100 bp, Homo sapiens
gtcagacgcagccgtagacaccagctccgaaatcaccaccaagatctcagcccaggagagccgtcgtaagaagaaggagtatgtggagtgtctagaaaag

SEQ ID NO: 199994 - DNA, 99 bp, Homo sapiens
gacactccagccacaaggcaggtcatggctgagggattcgggttcgtaactttcgagaatagtgctgatgcagacagggccagggagaaattacacggc

SEQ ID NO: 199995 - DNA, 90 bp, Homo sapiens
cagctcgccgctccctagcaccttctccagtcgacactctcgcgcccggaggtatcgtcagatcctggaaaaagccattcagttatctgg

SEQ ID NO: 199996 - DNA, 90 bp, Homo sapiens
atttgtctacaccatcaaggaggaaggcctggttcttcaagctgttgcttttaaaaatgccaaacagtttgagcaagcaaaagatgcctg

SEQ ID NO: 199997 - DNA, 80 bp, Homo sapiens
acggggagctgaacgtggacagcctcatcacccggctgctggaggaaaccaaggtgtatgttggtaacctgggaactggc

SEQ ID NO: 199998 - DNA, 83 bp, Homo sapiens
gtgagtccagctcctctgacagcgaagactccgaaacaggtaactaggatttctacctcaaccgcgagacctatgcaaggacg

SEQ ID NO: 199999 - DNA, 82 bp, Homo sapiens
gggaaggatcgggagtacacagacatcatccgctccggtgtcggcgggtggcgcggcgcccccggagggggccatatctaac

SEQ ID NO: 200000 - DNA, 87 bp, Homo sapiens
taccttttgtgctgagccaactcgagccaggctgcaaaaagacaggggcaagtgtccgagtggtgaatcagctacttacagagatgg

SEQ ID NO: 200001 - DNA, 100 bp, Homo sapiens
gacgtggagaggggccgaaccgtgaagggctggaggccccggcggctagggctctggtatcagttcctcttcagtattgcatggcatggtttttaagaag

SEQ ID NO: 200002 - DNA, 100 bp, Homo sapiens
actttcggatccaggaggtgctgaagcacgccagggcttgttgattggtgctggctgtgccctctaccccttgggctgggacagtgaggaagtccggcag

SEQ ID NO: 200003 - DNA, 98 bp, Homo sapiens
tggtctgcaggacatcactttagatgatggcttttgtggccacaggaaccaatctgtctctccagttttttccggccagctggcagggagaacagcga

SEQ ID NO: 200004 - DNA, 83 bp, Homo sapiens
tcagatggaaatgtgaagggttcatgtccttggtaaggaactgcttcacaagattaaaggagaaacagaaaatgtatctagcg

SEQ ID NO: 200005 - DNA, 75 bp, Homo sapiens
gcgccatggcccagattctgccaattcgttttcaggagcatctccaggcagcaattccatttccgtgagggcgtt

SEQ ID NO: 200006 - DNA, 82 bp, Homo sapiens
ccacctgtattcacttgccgacctgcagcaggttcttcacacacccccattcggcgtagtacccagagagctcaagatgtgt

SEQ ID NO: 200007 - DNA, 83 bp, Homo sapiens
ggagacagaggccaagagcaagctgacaatatccaagggactgagtgaaaagatatttgcaaaacctgaagaacaaagaaaaa

SEQ ID NO: 200008 - DNA, 50 bp, Homo sapiens
tcaaacaaaacaaagtatatactcctggcttctcatcgaatgaaaactcc

SEQ ID NO: 200009 - DNA, 82 bp, Homo sapiens
cttgaatttctctctgtaaaggagtgccggtggtggtgtgcacattgagccccggtatagacagttcccccagctgaccaga

SEQ ID NO: 200010 - DNA, 74 bp, Homo sapiens
cccggctgaggcagcgcggccgcagcagccctttcatcaatggtgctaaggaaatttgctatgctcttcgagct

SEQ ID NO: 200011 - DNA, 75 bp, Homo sapiens
ggaggaagaagcagaaatggaaattgacagaattctctttgaaattacagcaggaaaaccgtcttcagatacagt

SEQ ID NO: 200012 - DNA, 82 bp, Homo sapiens
gcccgacgactgtgacgaggacgaggaggcagccacggggcccctggggtttggacagaggagccaaaggccaaatttccac

SEQ ID NO: 200013 - DNA, 75 bp, Homo sapiens
cgcaaagttctgagaacattacagcagatcaagaaatccagctcaataggtgatttcaaatcggagaagtccaac

SEQ ID NO: 200014 - DNA, 100 bp, Homo sapiens
caagggacgtcttctccacgccgctccgactccaggggagccgtggcctcctctccgccctagcgctgagggggaaatttgcagtggtgagaaaatgtat

SEQ ID NO: 200015 - DNA, 100 bp, Homo sapiens
gcaggtatgagcaggtctgaagactaacattttgtgaagttgtaaaacagttgcagactggtctagaaacaaatagacttatctttgaagataaggcaac

SEQ ID NO: 200016 - DNA, 98 bp, Homo sapiens
ggtcagataacattaatggatgttccagtatttaaagctattcaaccagatctgagatctgtatctgtggacctgaatgttgatccctcgcttcagat

SEQ ID NO: 200017 - DNA, 100 bp, Homo sapiens
tgcagaataaaactcctgtatgttcaggcgaggaaacgagacctctttcgttccttctagaaggtctggaggacgtagagttattgaaaatgcagatggt

SEQ ID NO: 200018 - DNA, 100 bp, Homo sapiens
acctaaacatgtggaatcccaatgccgaggctgatagtatgcctggaggagtccctgtacatccacaacattcgggacatgaaggtgctgcatacgatca

SEQ ID NO: 200019 - DNA, 100 bp, Homo sapiens
atcaagcatgcctgtcaactgaaagtgttgtgaagagcgaagacttttcgctcccagcttatatggatcggcgtgaccaccccttgccggaggtggccca

SEQ ID NO: 200020 - DNA, 49 bp, Homo sapiens
cgtgtgctgggctggtcccccttgcattaccaggagagtgacaagggtg

SEQ ID NO: 200021 - DNA, 79 bp, Homo sapiens
tttgctagtaacgtcatggaggatgaacgacagtgcttttccacataatggtcaaaacctaggcctctcacccttcttg

SEQ ID NO: 200022 - DNA, 88 bp, Homo sapiens
cgcccgccttctgttggctgctgaccctgggggcagcccagctcaacgtcgtcgcaccaggttctgggcttcagtggagccctactgt

SEQ ID NO: 200023 - DNA, 75 bp, Homo sapiens
gagtcagcctctggttcagactgcagtaaccaggtggttctcttcccaaagtggaagccaaattcatcaattatg

SEQ ID NO: 200024 - DNA, 90 bp, Homo sapiens
cctcaggcctgcacggacggtgttggttggggcctgtttaaagaagaaaacccgtatgctagatttgaaaacaactaaagcgctccagca

SEQ ID NO: 200025 - DNA, 100 bp, Homo sapiens
actttgggcgtcccattgccatggaatgtatcctgtcaggtataatgtcagtgaatggcaagaaagttcttcatatggatcgaaacccttactacggagg

SEQ ID NO: 200026 - DNA, 128 bp, Homo sapiens
acagtggctgcttggcgagcctggatctccaagtgaccccctcagcaactcctgatgaacaggagtcaggaatggagagaagggtaatggttttacctcttattgtggaaacctgttgagatcacaga

SEQ ID NO: 200027 - DNA, 100 bp, Homo sapiens
caaggaggccatcaacgtggagcaggcgttccagacgattgcacggaatgcacttaagcagtggactcccgaaaaattgaccaggaagggaaaatcccag

SEQ ID NO: 200028 - DNA, 100 bp, Homo sapiens
ctaaccatgaaattgataacaatacgcttttggaaatgaaatcagagtctcactgtgttgcccaggctgaagcagcctcaaactcctgggctcaagcctt

SEQ ID NO: 200029 - DNA, 100 bp, Homo sapiens
agaccatcgaaggccacaggagaagaaaaaagccaagggtttgggaggagctgatggatcagacatataggaggagatgaaaaggaagcagggcagaggt

SEQ ID NO: 200030 - DNA, 76 bp, Homo sapiens
gaccccgcggccggacgacccaagcccgctgagcaggatgaggagtcactttgtggcatgtatgacagccatctta

SEQ ID NO: 200031 - DNA, 123 bp, Homo sapiens
cccgaagctgctggataattttatcccagggtggctgaatcacggaatgcttattcagctgattctgaatcatcttacactaccagacctgtgtagattagcacagacttgcaaactactgag

SEQ ID NO: 200032 - DNA, 87 bp, Homo sapiens
ggcaccaactattcgcggagctggaatgactggcaacccaggtaaagtcagtgataaatcttttgtttgctgcatatactggagatg

SEQ ID NO: 200033 - DNA, 75 bp, Homo sapiens
cacattgtattggtttgatgctcctacctggaacaggaaaccatttctggacggctaaagacctcaccgaggaga

SEQ ID NO: 200034 - DNA, 82 bp, Homo sapiens
gcttcctatgctatctctcttccgaggttctcacagagttcaggagctgatgctacacacatggatggtgatcagattgttg

SEQ ID NO: 200035 - DNA, 82 bp, Homo sapiens
gtcggagctgggcgcggagcccctcacagtgcaggacctatatccagactttgcctgacactgcagggtccaagagaattaa

SEQ ID NO: 200036 - DNA, 89 bp, Homo sapiens
gccaaagaaacaagccgtggaataggtgtatcaagtaatggtgcaaagcctgaaggaaatgcaataccttatttccagatgactcctat

SEQ ID NO: 200037 - DNA, 100 bp, Homo sapiens
aataccgtgccctgaggttggacgtggggaatttctcctggggctcagagtactgcttttggcttctggatgccctcctccagtacacatcgtatggggt

SEQ ID NO: 200038 - DNA, 83 bp, Homo sapiens
ttttgcttgtgcaagattatttcagagcaaggtcgtgcggtgtgtgtagaagagctcccagctcctccagcagccgacaggag

SEQ ID NO: 200039 - DNA, 74 bp, Homo sapiens
gacgagatgatcaaacgcctgaaggtgtcctgtggccaggcggaaagcagtgagaagcccaacgctgaggacat

SEQ ID NO: 200040 - DNA, 75 bp, Homo sapiens
ctggcaagattactgatttcatcaagttcgacactgtctctgttggatgaacccaatcccaatagtccagcaaac

SEQ ID NO: 200041 - DNA, 75 bp, Homo sapiens
tctcactctgttaaagctggtctgttctaactgaggttattggagtgatgagtaaagaatacataccaaagggca

SEQ ID NO: 200042 - DNA, 124 bp, Homo sapiens
gtgaagctcaccgacagtgccctgagggccttcgagagctaccgcgccagacagtttggcaatgaggagcagcagctggcgtgggccaagcgggagagcgagaaggcggaacaggagaggctgg

SEQ ID NO: 200043 - DNA, 96 bp, Homo sapiens
ttgaatctggtcgcttccggagggactgcaaaagctctcagggatgctggtctggcagtcaggaacggaaaacagttcttccttcaaagcatgcag

SEQ ID NO: 200044 - DNA, 50 bp, Homo sapiens
gtgggcgtaggaccctctgagccagtgagatgaacccagtacctcagatg

SEQ ID NO: 200045 - DNA, 74 bp, Homo sapiens
gcccctggtagcggcgctgttgctgggctcggcgtgctgcgcctcctgacaaggtgatccgggcgggccccgca

SEQ ID NO: 200046 - DNA, 75 bp, Homo sapiens
accgcgacaagccagcccagatccgcttcagcaacatttccgccgccaaagatctttaatctcatgaagtacgac

SEQ ID NO: 200047 - DNA, 76 bp, Homo sapiens
ccgcccaccagttcgcccgtccccctgccccgttcacaatgcttatttgcaacaagttcaagatctggtcatttta

SEQ ID NO: 200048 - DNA, 127 bp, Homo sapiens
cggagcccggctccccacagaagctcatccgcaaggtgtccacgtcgggtcagatccgacagaaggttggatttggtctagggagtcccagaaagaagtagaaaaagagagagaagcctaccgtcgg

SEQ ID NO: 200049 - DNA, 51 bp, Homo sapiens
gtcatttggaagaagcgaagagaacgatgccaacgggactgcaaagccgcc

SEQ ID NO: 200050 - DNA, 75 bp, Homo sapiens
ggcgctggagagggggcgctgagctgttgggggccgcctgggcagaatgtcacgatggacgagggcggcacgccc

SEQ ID NO: 200051 - DNA, 88 bp, Homo sapiens
attttcagacctcaatgccacctatcgtacaattcaaggccatttacaatctgaaaactttaagcaaacggatgtttcagaagacagc

SEQ ID NO: 200052 - DNA, 50 bp, Homo sapiens
cttttggcccaatgaatatcagaatgttctgaaggatctggaaaagagaa

SEQ ID NO: 200053 - DNA, 99 bp, Homo sapiens
ttcctcaaggtggggttcggggggccaccgaatcgctgtcacgccggcagacaaatttacatgtattggagaccagaccagaagcccttctgaattaag

SEQ ID NO: 200054 - DNA, 100 bp, Homo sapiens
tggaggcttgcactcgcaagagaaggattctcagagccggcaaggaggatacagcatgcatcagctccagggcaataaggaatatggcagtgaaaagaag

SEQ ID NO: 200055 - DNA, 97 bp, Homo sapiens
ctgatgttgctagtcctcgagtggaaagctctatgcggagtacgtctgggtcacctaggcctgcaggatgatggtggtgctaccccagtacaggatg

SEQ ID NO: 200056 - DNA, 82 bp, Homo sapiens
ggcagcggcacctacggcgacgtctacaaggaacgtgttcaaaaaagtttccctcatccaattgataaatgggcaatagctg

SEQ ID NO: 200057 - DNA, 74 bp, Homo sapiens
caatcccccactctttccgccctaatggaggtctccagtttcggttatacattggctcttcaaagacgttcacc

SEQ ID NO: 200058 - DNA, 74 bp, Homo sapiens
tacgaccggccctggcagcgcgccacagcccgcgaagccaacgagtgcgtggagcatctgttaagaacatcttc

SEQ ID NO: 200059 - DNA, 51 bp, Homo sapiens
aatgagaagctggctatggttaaagcggctgccctgatgatctcactcatt

SEQ ID NO: 200060 - DNA, 51 bp, Homo sapiens
gcagtggtcgcttcttctccttggcaacagaagcagcagtatactaaccag

SEQ ID NO: 200061 - DNA, 73 bp, Homo sapiens
aataccctgttcccaaccgagcaaatggctctgagagattcctctgcgaatctgtttttagctatcaagtggc

SEQ ID NO: 200062 - DNA, 100 bp, Homo sapiens
caggaggcctctgggtgaaggcagaggctaacatgggtgtatgctgatggtagcatatgtttagatatccttcagaatcgatggagtccaacatatgatg

SEQ ID NO: 200063 - DNA, 90 bp, Homo sapiens
atgaaacaagcaaccacctctggctagtggtggaactctgcacaggaatcctgttcacgatgctggtatttggaccagcctgcgggttta

SEQ ID NO: 200064 - DNA, 83 bp, Homo sapiens
aagacttgtaacctggagaagagggtgtcagtgtggaggcagttgatccagtgttccaagctaaaatgttggatatgttgaag

SEQ ID NO: 200065 - DNA, 75 bp, Homo sapiens
gtccccccaacacgtctctgttcgtcaggaacgtggccgacgacaccaggaatactcccccagttgcaagaggcg

SEQ ID NO: 200066 - DNA, 76 bp, Homo sapiens
tgatttaataagcctgtcactcaacaggtacgacaaggagtacgagacccaatctagtgcagaagccaaatttgtg

SEQ ID NO: 200067 - DNA, 73 bp, Homo sapiens
gtctctctgctgcggcgcggggaccgctgtgctctcgatgctggcatatatgttctattctgttccttacttt

SEQ ID NO: 200068 - DNA, 82 bp, Homo sapiens
gttacgcagcaaaccatccagaagacttcccaagtaagaagcggaagaggagccgctggaaccaagacacaatggaacagaa

SEQ ID NO: 200069 - DNA, 100 bp, Homo sapiens
gaggtggacgtggcggcccagctgggcgagtatctggaggagatgcaagtgctgctggaccaggcgggctgctgtatcgtgggtcagagtgagcagctgg

SEQ ID NO: 200070 - DNA, 75 bp, Homo sapiens
ttacctcaccgacacacagtgcaagcgcgtaggaacacaatgctgggtgtttggcaatcatttggggaagaatct

SEQ ID NO: 200071 - DNA, 100 bp, Homo sapiens
ggaaaatggagcccttcaccaatgatgatcatgacgcagtcctgaggtttaatggggcacccacagccaacttccaacaagatgtgggcacaaaaactac

SEQ ID NO: 200072 - DNA, 100 bp, Homo sapiens
ggctcgccttgtatctcaacaccctgagtgcggatttctgctatgatgacagttttgatgtggacaatggcacatctgcgggacggagtcccttggatcc

SEQ ID NO: 200073 - DNA, 75 bp, Homo sapiens
atgagatccaagtctctacagttaactggcaaagaagaaactccccaacttttaaatcatttgaagaaaaggtcg

SEQ ID NO: 200074 - DNA, 50 bp, Homo sapiens
cgagggggccaaggcttcctccgggggccttgttttaggaatctattcca

SEQ ID NO: 200075 - DNA, 75 bp, Homo sapiens
cttggatccttgtgggcatgatccataatcggtttcaagtgcttactgtggagggctgtggctggcagctgtggc

SEQ ID NO: 200076 - DNA, 99 bp, Homo sapiens
cagctccggagaggggaaaaccacgctcctcggaccaagcctcgggagctaaggccctccctatcctgaagacattagctgagagtctggcacctttta

SEQ ID NO: 200077 - DNA, 75 bp, Homo sapiens
tctttctggttccgtgttcatcaaggaatccatgtttcttccaagaagcaggccgttgatgctcactgccatcag

SEQ ID NO: 200078 - DNA, 100 bp, Homo sapiens
ccccaatcctctcatcttgtcctacctgaagtatgccattagttcccagatttgactgatgaattagctcagaagttatttgatgtttcagaaataactt

SEQ ID NO: 200079 - DNA, 51 bp, Homo sapiens
gaagtgctccgtcgcccttgcctccagagatgagcatcaggattttatgga

SEQ ID NO: 200080 - DNA, 75 bp, Homo sapiens
cttatcttcaggagcgaagagctgcttctgtatcttaagatcatgcatgccccgcggtccagggacaggttcaca

SEQ ID NO: 200081 - DNA, 80 bp, Homo sapiens
tgcctcgaccacactcacctctctctgctcatgcaggttgccaaggaaagtgtactgcagttttacccgaaagctaatat

SEQ ID NO: 200082 - DNA, 82 bp, Homo sapiens
tgcccgcggccggagagctggaggagaggttcaaccgcgccctgggtacctgctcttccgagacttctgcctgaaccacctg

SEQ ID NO: 200083 - DNA, 95 bp, Homo sapiens
ctgcgaggcctcccgggctccgggaaaactacactggccaggtattgttgcagcatctggcagtgagactgaggatgaggacagcatggacattc

SEQ ID NO: 200084 - DNA, 75 bp, Homo sapiens
ggagaaacaccaccgcatctcattggaggcccccacccctctgtggggccatccctgcctcaggagactacgtgg

SEQ ID NO: 200085 - DNA, 100 bp, Homo sapiens
gatgaacttcatgatcatggagtttcaagcctgagtgtgaagattatactgaaacaagaatggcccaaacattggccaacttttatcagtgatattgttg

SEQ ID NO: 200086 - DNA, 100 bp, Homo sapiens
cattactcacctggactggtctgtaaactcacagttcctcgtgtcaaattccggagactacgaaatcctctactacacagggaatatggaggttctgcac

SEQ ID NO: 200087 - DNA, 78 bp, Homo sapiens
tctcactggtggtccaggtttcagaaggaggactatcgccgcaccgtgacagagattgatgagaaagaatatatcagc

SEQ ID NO: 200088 - DNA, 87 bp, Homo sapiens
cagcggcaaggtctccaagtcccagctcaagcagttggaattgatcacaccttttcagttgtacttcaatcctgaattaatctttaa

SEQ ID NO: 200089 - DNA, 80 bp, Homo sapiens
agaccttggtgatgtgctacagtacaagccagctgccatgttgtgagcacataccacatagctccatggagatgcccatg

SEQ ID NO: 200090 - DNA, 83 bp, Homo sapiens
gtggatgcggccaactccaatgggcctttccagcccgtggtccttctccatattcgagatgacttccggatcttctgtgggga

SEQ ID NO: 200091 - DNA, 111 bp, Homo sapiens
gtcattgtcgtggatttgcacagtcggctgggcggtgcaatggcggtctctaattaacagaagatggcaaagcccagccacagcagctatgtccttcagcagctaaacaac

SEQ ID NO: 200092 - DNA, 90 bp, Homo sapiens
agacatatttgatggaacaatcattagttcagtgcagtgtctgacttgtgacaggctaaatgttgccagctacctacaaatgatttgctt

SEQ ID NO: 200093 - DNA, 75 bp, Homo sapiens
gtaacttttgatgatcatgatacagttgataaaattgttggcagtatttggcagtcgtattcagagataaacccc

SEQ ID NO: 200094 - DNA, 100 bp, Homo sapiens
atcagatttgaagagttcatttccgacttgccccccaggttaccactaaaaatgccacactgccagtgaaagatgtagaagataaacctgaacaacaaac

SEQ ID NO: 200095 - DNA, 75 bp, Homo sapiens
tggcattggaacttcctgttctgatagcgtggaagacatagggcctgattacattccaacagaggaagaaaggag

SEQ ID NO: 200096 - DNA, 75 bp, Homo sapiens
ggcgagcagaactacggcgagcggggctcaaaatctccttcgccaagaccaaacatgcctgttcgatacttcata

SEQ ID NO: 200097 - DNA, 100 bp, Homo sapiens
ggccgcggaggctcctcggtccttcagcacccctcggcccgacgcacccacgcccctcaccccccgagagccgggcgtctctggccgagcctctttttgt

SEQ ID NO: 200098 - DNA, 100 bp, Homo sapiens
tggcaggagggccggcggagcgccatggcctgcatcctgaaggacagagtttagggtatggatttgttaactatattgatccaaaggatgcagagaaagc

SEQ ID NO: 200099 - DNA, 95 bp, Homo sapiens
gcatacaagcaggaaaatgagatgttatccaggaagatgatccctatgatcttgaagatgtttctgcacagaaatgagggaaatacaaagaacca

SEQ ID NO: 200100 - DNA, 101 bp, Homo sapiens
cgcaaccagccttctagggcggcggaggagatgttacagcccagatagctcttcagcctgcactgaagttcaatggtggtggtcatatcaatcatagcatt

SEQ ID NO: 200101 - DNA, 75 bp, Homo sapiens
atacttcatagattcatcaaaaaatccagtaaacctggcagtgttaaaactgaacgagcaggggcttttggacaa

SEQ ID NO: 200102 - DNA, 90 bp, Homo sapiens
tgaacttgaagagacatatggacaatgaatctgcaaagattcatgatgttgctatcaaaagttgagaaattgtcagaagaaatcatggag

SEQ ID NO: 200103 - DNA, 51 bp, Homo sapiens
tcatgggcaaaggacagatccaggaagtgctggactccctggtcagcaatg

SEQ ID NO: 200104 - DNA, 98 bp, Homo sapiens
tcggaactcgggcatcatggcctcaggaaaacagttcctcctgaggatttcagagaagagctggacttcctggctgactctcacattctcttcttctg

SEQ ID NO: 200105 - DNA, 100 bp, Homo sapiens
aagattcaaacaaccaaccctgatttcctgcttctccttttcatgagtgttcctgtggtctctgcacctcctttctgaaaattctgtttgaagatttccg

SEQ ID NO: 200106 - DNA, 50 bp, Homo sapiens
cgctctcgcccaccgcccgaacccatttatgacattaacagagaacagga

SEQ ID NO: 200107 - DNA, 82 bp, Homo sapiens
cgatccgggcgctcgagacttaccagagccacaaggttctccttactatgacaatgtccgccccctctcttaccctgattcg

SEQ ID NO: 200108 - DNA, 87 bp, Homo sapiens
aaaggtgatctggacaaaggaacaggtatctcagctctaagcgaaagacatgaggcctcagcctgaaatgaggttgttttgaggtca

SEQ ID NO: 200109 - DNA, 100 bp, Homo sapiens
tgtcccttccgagggtcagtttcccgagtacccaccagagggcgccactaaactggcattgcagtgtcgagatggctatgaaccctgtgtaaatgaagga

SEQ ID NO: 200110 - DNA, 90 bp, Homo sapiens
ggcggaggcgcctcctgtctcagccaaggctaagtcgaaatgtggcccaaccttcttcccctgtgccagcggcatccattgcatcattgg

SEQ ID NO: 200111 - DNA, 100 bp, Homo sapiens
ccaatcttgaggagtgatccctgtcccagcccctggaaaggggcaggaacgacaaactcaaagtccaggtggaggagaatgagattgagtgctgacttta

SEQ ID NO: 200112 - DNA, 75 bp, Homo sapiens
cttggagtcaagggacctgcgcctagaaaagcgcaccttgtttcgtcagaggctaactgttctgccatgtttgga

SEQ ID NO: 200113 - DNA, 75 bp, Homo sapiens
gctggagctcctgaagaaggaggccttgcggaaccaccagacgccccggcgtttcagttgggccccacggaagcc

SEQ ID NO: 200114 - DNA, 50 bp, Homo sapiens
ccagaacccctgacggtattcagctgcgcccttacgacagtctgcctacc

SEQ ID NO: 200115 - DNA, 100 bp, Homo sapiens
gagaattccgcagcccacacgtgcacccactctggacggtcccggtctccgtgccagggggcacccggcagtctcctattaacatccagtggagggacag

SEQ ID NO: 200116 - DNA, 100 bp, Homo sapiens
caacaaagattctgataactggcaaaacaaggcgcatattaaatttcctattgactacccctattcaccacctaccttcagattcttgaccaaaatgtgg

SEQ ID NO: 200117 - DNA, 98 bp, Homo sapiens
ctcgcctgatccatgaagatggcatcattcgtccttatgacagacaggaatctgagggctctgacttacttgagtttgccagggtttggatacctgat

SEQ ID NO: 200118 - DNA, 90 bp, Homo sapiens
gcaagagcaagatcaccgtgacatccgaggtgcctttctccaaaaggtggctggtcattgaccgcaaggtttacaacatcaccaaatggt

SEQ ID NO: 200119 - DNA, 118 bp, Homo sapiens
ctgtgacctggccgatgaggaagtactgagcctgttggaggaactggcccggaaacaggaggacggcgaccattgacgaggtggagacggacgtggtggagattgaggccaaactgga

SEQ ID NO: 200120 - DNA, 75 bp, Homo sapiens
ttttacaggagctattgaaaagcttacttcccaaattagagatcaggaagcaattttggaggtggtggaagctac

SEQ ID NO: 200121 - DNA, 100 bp, Homo sapiens
attgtgggagtctccgcgtcccgctcgctgggagagagatatctcccggggccaattcagcatctctacctggccatcctaacaaggtgatttgtgaaag

SEQ ID NO: 200122 - DNA, 99 bp, Homo sapiens
acaggctcagtctgcggccaagactccgtcctgcaagggagaccaaattttgaggaaggtggaccaacatcagtagggagaaagcatgaatttatacgc

SEQ ID NO: 200123 - DNA, 50 bp, Homo sapiens
aaggccttggaaggaaactccaggacaggacagtcattttgtttactcat

SEQ ID NO: 200124 - DNA, 83 bp, Homo sapiens
ctgacagctggtgcgcctgcccgggaacatcctcctggactcaatcatggcttgtaacacaccacagccatcagcactggaat

SEQ ID NO: 200125 - DNA, 97 bp, Homo sapiens
gcgccggagacgatgccgttacgttccatcctcagagcagcctgaactgttcctaaagaaacttcagcagtgctgtgtcatttttgacttcatggac

SEQ ID NO: 200126 - DNA, 97 bp, Homo sapiens
ccagcagtgatgtggaggtggagacccacaggagccccggacttcacctgagctacctcagcaccacaccccactctggccggagcacgccaagcag

SEQ ID NO: 200127 - DNA, 100 bp, Homo sapiens
gccttgcacctgaagaccccacctttcctgggtcggcactcttcaccctcccgagccctgcccgtctcggccccatgcccccaccagtcagccccgggcc

SEQ ID NO: 200128 - DNA, 100 bp, Homo sapiens
agccacactctgcaccgctaggccgtccccgaccttgcctgaacaaggttggaagtactccatgacacacactcggagaaagtcccttcccatgctgagt

SEQ ID NO: 200129 - DNA, 98 bp, Homo sapiens
aaagatgaagcttccaaaatcaccatttggaaggaacagtacagagttgtacaggaggaaaaccagccacgaaggaagacaggaggtccgaggagaaa

SEQ ID NO: 200130 - DNA, 88 bp, Homo sapiens
gatccttgttgccgtcccttcgcctccttcaccgccgcagaccccttcaagttctagtcatggagatctattgggaaactgattataa

SEQ ID NO: 200131 - DNA, 100 bp, Homo sapiens
agtatcctggacgcccagacatggctgtcccagccttcctacagcaacttcccactccaggtggccagacgggagttccagaccagtgttgtctcccggg

SEQ ID NO: 200132 - DNA, 100 bp, Homo sapiens
gccaagttactggagccgatctcccctcccacccggtcactccgtccagcaagcacgcagacagcaagcccgcgccgctgacgcccgcctaccacacgct

SEQ ID NO: 200133 - DNA, 98 bp, Homo sapiens
ttttccccccttgctcgggatggtgccacaggaggctgtgcgggccccgctccgcttcgaatgggtagaatacagcaggagtggttccaagatgtggg

SEQ ID NO: 200134 - DNA, 89 bp, Homo sapiens
gcggccctgctgagagggaaaaggacgccgcggtcttcccaggcgtcgcggagagcaggtgtttgtaaaatgtatgaagaacatctgaa

SEQ ID NO: 200135 - DNA, 98 bp, Homo sapiens
tcatcacacaggatccgcccctggacatggaggagaaggtccgcttcaagaagcaggtcctggggaccaaggtggacgcggagcgtgacggcgtgaag

SEQ ID NO: 200136 - DNA, 96 bp, Homo sapiens
tggaatggcaggctgtgggaagtctgtattagctgcagaagctgttagagatcattcccttttagaagaaacctctgtagaggagcaggatgcaac

SEQ ID NO: 200137 - DNA, 98 bp, Homo sapiens
catcatccgctatgcaattggggttatggtggagaattcagactttaccccctcacaagtaggatgtctctttaccttccttgctcggcagcttgcaa

SEQ ID NO: 200138 - DNA, 75 bp, Homo sapiens
cacaattatcaccgggtatttagacaatgtggagctcatactgaaaaccatcaataaccagcacagcgttgagag

SEQ ID NO: 200139 - DNA, 100 bp, Homo sapiens
tcgccagcagccgtccggagccagccaacgagcgatcctcagtttgtggtctgccagctaaaggtgaagatatattcctccaattcaggacccacacgac

SEQ ID NO: 200140 - DNA, 98 bp, Homo sapiens
tctgagggagggtccgagccagccgctgttttgccggaggagcccctcaggccagtatctcccatattcatgttgcactttgtagaaggcttaccaca

SEQ ID NO: 200141 - DNA, 90 bp, Homo sapiens
actgtggcaaggcttttgcttccaaatacaagctgtataggacccagccttgatgcccacttgggaggcagaaagcaccggcacctggta

SEQ ID NO: 200142 - DNA, 100 bp, Homo sapiens
ccttgaccttttgagccaaagcaatcctactgcctcagcctcccaaatcattccatcggaaagaggtcgaaaatgtacagtaggcatgcacaaaggatac

SEQ ID NO: 200143 - DNA, 75 bp, Homo sapiens
ctgggatgatacaccttttccacagggaattgagttgatatctgagaaatatgggctgcccgtggagaagatagc

SEQ ID NO: 200144 - DNA, 98 bp, Homo sapiens
ggccgccgccgctgccgcttccaccacagtactatactggcaattgctggagaagattttgcaattgttgcttctgatactcgattgagtgaagggtt

SEQ ID NO: 200145 - DNA, 102 bp, Homo sapiens
actccgaagatgaagaaggaaaaagcggaagaaaacatgaagatggcggtggagataagatctgagggaaaaggccataccaatgctggagatgcaatatat

SEQ ID NO: 200146 - DNA, 82 bp, Homo sapiens
gaggctctcactaaccacaggcatcagttggtactcgccatgaaactcaaagatcgagagttggctggggaacagaccaggg

SEQ ID NO: 200147 - DNA, 75 bp, Homo sapiens
ccgcggcgatgactcggacccagccaacttctctttgcctgaaaaatgcgactatatggatgaggtgacatatgg

SEQ ID NO: 200148 - DNA, 100 bp, Homo sapiens
ttccgtgacatctactatcgaggccataggaaaaggatacagagtagagtttcatgaacctgaaacttggtggaaatttgatcctgaagaattagaaaag

SEQ ID NO: 200149 - DNA, 98 bp, Homo sapiens
tcctgctcctgctgctcgaggacgctggagcccagcaagagtgtgaacatggctacgcctcttcattcccgtccatgccgagcccccgactgcagcat

SEQ ID NO: 200150 - DNA, 83 bp, Homo sapiens
tgaagactgagaattgtgtggccaaagtcgtcgtcccgcagacacacaatccagaagtcactttcctcgagacattggtcagc

SEQ ID NO: 200151 - DNA, 131 bp, Homo sapiens
gcgcagcttcgagggccgggagctcctggtcatcgagctgtccgacaaccctggcgtccatgagcctgagcaacattttgcagatgttgtacttagtgaagaatttctcaatcttggcatcgaacaagtgt

SEQ ID NO: 200152 - DNA, 98 bp, Homo sapiens
agaggccgaactcgggttctgacaagatggccgggctgccccgcaggatcatcaagaaagaatcttcaagagggagacatagggaaaaggaagacata

SEQ ID NO: 200153 - DNA, 100 bp, Homo sapiens
cgaatactggaagagaataaccgaaaaattgcagaagcacaagccaaactgtttgggagagcccatggtgactgcgtgagtggagcccagctgtgtggat

SEQ ID NO: 200154 - DNA, 75 bp, Homo sapiens
tcgagtgaccgagaccgcggccgggaccgagggatgggagtcccagcttctggagacggggttcctggggatctt

SEQ ID NO: 200155 - DNA, 74 bp, Homo sapiens
ctcagttggaagcagccgatccagcctgcggagcctgtggggcagctttgccagcgccgagtaccaggaggccc

SEQ ID NO: 200156 - DNA, 90 bp, Homo sapiens
ccctctgcaagcgttagacttctttgggaatgggccaccagttaactacaaggctgaaggtgatgtggccgccctcaaccgacgcatcca

SEQ ID NO: 200157 - DNA, 82 bp, Homo sapiens
agacactcatattaagcctatttatatgcaatttcatcacctggggcctgctttgcccaggcccagtttgacttctcagccc

SEQ ID NO: 200158 - DNA, 75 bp, Homo sapiens
caaggagctccgctgcctcctgggcctgtctccaaaaaaagttggtgatgacattgccaaggcaacgggtgactg

SEQ ID NO: 200159 - DNA, 100 bp, Homo sapiens
cagctcacctctcaccgcgcatgtttggagatatggctcgtggacagcagaaaattcagtctcagcagaaaaatgccaaaaagcaagctggacaaaagaa

SEQ ID NO: 200160 - DNA, 83 bp, Homo sapiens
gcgcgcgaagcgagcgagaaggcacggagtcgccgcggagcgcaggttgcagatatcaagaaagtcaacaacttcatcagaga

SEQ ID NO: 200161 - DNA, 96 bp, Homo sapiens
ggcagcgctgctgggatggcgcgggccgggccggcgtggctgctgctggcaatctggggtggaggtggtggaagaggacgggccttctgagaagag

SEQ ID NO: 200162 - DNA, 50 bp, Homo sapiens
caaaacaagaccaagtcattcagaagagtacggaggaaagtggaaaatgc

SEQ ID NO: 200163 - DNA, 83 bp, Homo sapiens
ctcaaacaaagaggcaagcagtggctctgatgatatcatcaagttgaatcgaaaggaagggaagaagcagaattttccaagac

SEQ ID NO: 200164 - DNA, 82 bp, Homo sapiens
tcggaactagatctttctgacaacaaactcgaagactggcatgaggtgtgggtacgccacgctgcatcacgtcattgacaag

SEQ ID NO: 200165 - DNA, 75 bp, Homo sapiens
ggcttgcttgagttgacacagggagctccaggactcaccctcagctgctgtgacttactcgaagcctcgattggc

SEQ ID NO: 200166 - DNA, 100 bp, Homo sapiens
ctcacttatggtctccacaagtatctgaagatgggaaagcccatcctttcaaaatcaacttagaatcagaaccacagactttcagcagatatgcaggact

SEQ ID NO: 200167 - DNA, 100 bp, Homo sapiens
cccgccagatggagagtttgagcttatgaggcttgaccactatgctatcatcaagtttccgctgaccactgagtctgccatgaagaagatagaagacaac

SEQ ID NO: 200168 - DNA, 100 bp, Homo sapiens
gttatgttccagttgaaaatgtacctattgaacagattccacttgtgaagaaaccaaatgaccgtgatcataaagtgagactggcactgggaaatggctt

SEQ ID NO: 200169 - DNA, 51 bp, Homo sapiens
acagtctgcctctatcttacatggacggaaagtcccgggattctttgcgag

SEQ ID NO: 200170 - DNA, 100 bp, Homo sapiens
gcagaagctccaggagcagttgctggtgctgctgaagtccctagggaaccaccaattcttcccagggagatcttgtgcgaaaactcaaagaagataaagc

SEQ ID NO: 200171 - DNA, 100 bp, Homo sapiens
tggatccagggataaatcccaaacttcttaacccctagaccggtttttagtccattgactatgcagcctaatggcatttgttgctatcggggactacaat

SEQ ID NO: 200172 - DNA, 90 bp, Homo sapiens
aataaatcctgcacatttgatgtactgctttaaacttaaagacctctttggacccgaaattgtaagagcaggtgttgccaatgctgcggt

SEQ ID NO: 200173 - DNA, 51 bp, Homo sapiens
agaaatcattgaacacggcatcgagctaccattaaaaatctcaagtgacga

SEQ ID NO: 200174 - DNA, 100 bp, Homo sapiens
ctcggagcgcggtccctgtattggtctcctgctcctagaggttattcagcttctcaaggctggaaaagcgaaggaagtttcctacaatgcactagcctca

SEQ ID NO: 200175 - DNA, 100 bp, Homo sapiens
gaagatccattggtaaattgatcaggatttttggcctaccctccaaagaaaagtccctacagatgaagaagatgaaatggaggagtccacaaatcgacca

SEQ ID NO: 200176 - DNA, 100 bp, Homo sapiens
ctcaagtcggacgaggagctgctgccgcctgacggggctcccgagcacggttggtttgttggaccttgaactcaatcggctgacgaaagcgctatttttg

SEQ ID NO: 200177 - DNA, 74 bp, Homo sapiens
aagctttgtatgaacaaaaccagtctgatgtcttcagaatggagccatctgccaccatcctgctgcttttggtc

SEQ ID NO: 200178 - DNA, 89 bp, Homo sapiens
agcaaagttaagagactcatcagattctgagctgcggcgggatattttgcagaagccaagaagtatgatgcgtttttggcctcagagtc

SEQ ID NO: 200179 - DNA, 94 bp, Homo sapiens
cgggagctggacggcgagcgcgagcggcgcgagaaaatctgccttctggagactgcgccgtcctcccgggagagccagaaagaggacatggctg

SEQ ID NO: 200180 - DNA, 75 bp, Homo sapiens
tcaggacggacaagcacagtcttcggaaggtttttgccaatccagaagactgtgtagcatttggcaaaggagaaa

SEQ ID NO: 200181 - DNA, 82 bp, Homo sapiens
aatgaatggaaataatgcagcagcagggaaaagcgtagccctgaccctctattctgcaccctgtgagccaccgagactgaac

SEQ ID NO: 200182 - DNA, 75 bp, Homo sapiens
agatgttccctaccaagctgcccttggactttctgttcaaaatcaggagtttgagataaataaagatggaatccc

SEQ ID NO: 200183 - DNA, 100 bp, Homo sapiens
ggctgcatgggctctatcaaggaaaacaagtgtctgcttatgtcgggggaaggatttgaaagaacagcatgatcagaaagtatgtgagagggagatgcag

SEQ ID NO: 200184 - DNA, 74 bp, Homo sapiens
agaatactggaatctcacaacaataccttagttgacccttgtggcgccctgcgtccggcagaggaggcgagcat

SEQ ID NO: 200185 - DNA, 100 bp, Homo sapiens
catgttcaagaaactgaagcaaaagatcagcgaggagcagcagcagctccagcaggcgctggctcctgctcagcattttgaaagcgaagcagaagccgta

SEQ ID NO: 200186 - DNA, 75 bp, Homo sapiens
gtaaactaccgaagtctgcttctgcttccaaaggagaaccgcagtgaaaggtgtgcacttgtactacgtcggggg

SEQ ID NO: 200187 - DNA, 74 bp, Homo sapiens
taaacagtggactcaacttcaaagacgttctcaaggagaaggcagacctgggtgattttacaacgagatgctgc

SEQ ID NO: 200188 - DNA, 100 bp, Homo sapiens
cggactgcagccgcgagctcctggaggcggcgggatggaggcggcggccgatcatgatgctgccgccaccgccgccaccacggagcgagaagcccagata

SEQ ID NO: 200189 - DNA, 90 bp, Homo sapiens
ggacaagctggaatgcatccaagagaatccctcaacatgctggaggcaggtggaagtcatcataaagtttctgtttcacccgtcgtccat

SEQ ID NO: 200190 - DNA, 83 bp, Homo sapiens
ttctcgcgctgcctggtcgctggtgaagcccgcggcgcgcgcctctcccggaccctgcaggctggaagatctggaagttactg

SEQ ID NO: 200191 - DNA, 74 bp, Homo sapiens
acagcttcttcgatttggatcccaagcttggacagcttttagcagctacatgcaaagaacttccaggccctaaa

SEQ ID NO: 200192 - DNA, 97 bp, Homo sapiens
ggtcatcaaaatagctacaaaccatactaaattattccatttgcaacttatccccaacagtgtgaagcagtatgcagatgttgaaggattctaatgc

SEQ ID NO: 200193 - DNA, 90 bp, Homo sapiens
gtaatcaattgtgctgacaacacaggtgcagtagacattgttgcaatcatgatcggcaatctgaaaggcacaaaaattctgcaatctatt

SEQ ID NO: 200194 - DNA, 92 bp, Homo sapiens
ttaattattattatttgaaagagtacctgaaagtcgtttcagagaccaatgatgcaattagagaggtacagaaagcagtcaacactgcccag

SEQ ID NO: 200195 - DNA, 100 bp, Homo sapiens
cacataatcctatggtaaatgctggagcaattgttgtgacttcactaataaaggatgagttccacccgttcatcgaggccctgctgcctcacgtccgcgc

SEQ ID NO: 200196 - DNA, 89 bp, Homo sapiens
caccatggctctctgcaaccagttctctgcatcacctccttcccgaactcacaaatcctgacgagctcctgtcttatctggaccccccc

SEQ ID NO: 200197 - DNA, 76 bp, Homo sapiens
ggccgacttcgatgatcgtgtgtcggatgaggagaagcttggtgttgtggttgccccacatacattaaagttacca

SEQ ID NO: 200198 - DNA, 98 bp, Homo sapiens
gaagattcaccaaataagctatatactttggttacctatgtacctgttaccactttcaaaaatacctctaacctatttggaaacagtggggccaagac

SEQ ID NO: 200199 - DNA, 100 bp, Homo sapiens
cctggtcacgctcacccgcagggcgatcaaatggtcccggctgctgcagggcgggggcgtccccaggagccggacagggcccgaagttgctcagcctgaa

SEQ ID NO: 200200 - DNA, 100 bp, Homo sapiens
gttacatcagaaggatacagttcatgacaatgactttgagccctaccttactggacagtcaaatcagatttcctcctctgatgctcctcttcagcctttg

SEQ ID NO: 200201 - DNA, 100 bp, Homo sapiens
ggcctagtgctcctggagagggtggctgggttcctctgcagacattcacccagcatcaaggggctgtcaaggcaagtgtcgtggacttcgtactgctagg

SEQ ID NO: 200202 - DNA, 83 bp, Homo sapiens
agtggtctgtcgagatgcttgtgatggtcatgagattggaaggccccattgacaaaccttcagattctctcagtatagggaac

SEQ ID NO: 200203 - DNA, 100 bp, Homo sapiens
tttcacaaatttggaatctgccttctactccatcgtgggactcagcagccttggtgctcaggtgccagatgcaaaggtgctggagaatctggtaaaagca

SEQ ID NO: 200204 - DNA, 73 bp, Homo sapiens
tggtgcggcccatcgggatggcaggtgaccttagagcaagactccagaatgaaattcctaaagcttttaggat

SEQ ID NO: 200205 - DNA, 75 bp, Homo sapiens
ccatcccaccagagcacggcaagcgcctggagcggctggccatcgcgtctgaccaaacacaccaagttcgtgcgg

SEQ ID NO: 200206 - DNA, 100 bp, Homo sapiens
aacttggttccccctccctcagcttccgccccaaaagagggtcctccgcggaagggcagctgaatggactccagagcagccttaaccctgcagcctttgt

SEQ ID NO: 200207 - DNA, 101 bp, Homo sapiens
caacagaagtttatcaaggctgtcacacatcaagttaaatttggtcaacaaaatccacgtcagcctctacaaccccacgtcagagtgtgggattctgttac

SEQ ID NO: 200208 - DNA, 75 bp, Homo sapiens
gtttatttctgcaccattgtccaaggtcaagattgttggtgacgcggttggctggggttttgtggtgcgaggaag

SEQ ID NO: 200209 - DNA, 76 bp, Homo sapiens
aactgtctgatgaacagctacagaagagggaaaaagacctcgatgaagttctgcagacccactcagtgtttgtaaa

SEQ ID NO: 200210 - DNA, 80 bp, Homo sapiens
cactgactttcagctatggaatcggttcaagcgtcctcagtaagccttgttcagtgactgtagccagtgaggcaagcaag

SEQ ID NO: 200211 - DNA, 74 bp, Homo sapiens
tgcaggacctctgtcagagaatgaaacactcatcgcatgcacaggagaaaacgacgctccacacctttaacttc

SEQ ID NO: 200212 - DNA, 100 bp, Homo sapiens
gaccccatccatcagattatatggcgatttagacggtgggaagaccgcaaggaaatgggatgaagacatggatggagaatgggaggctcctcagattgcc

SEQ ID NO: 200213 - DNA, 75 bp, Homo sapiens
gcacaatattaaaactttacctgggcttcttctcagcctgttgataaccatgttagcccatcttccttcttgggc

SEQ ID NO: 200214 - DNA, 75 bp, Homo sapiens
cctttggaatgtctagatgcttttggagccactgattttcgacaatgaagccaaagacgtggagagagaagtttg

SEQ ID NO: 200215 - DNA, 51 bp, Homo sapiens
ggacgggttgagtgctcctgcttagccattatacttgcccacgaatctttg

SEQ ID NO: 200216 - DNA, 88 bp, Homo sapiens
tggagacatcccatgaggatctgcccgcttcccaggaaaggtccgagaccagcatgttttggaaatttgatcttcactcatcatccca

SEQ ID NO: 200217 - DNA, 80 bp, Homo sapiens
gtcagcactgactttcagctatggaatcgaagttgattcaagtcagttgagacgccagttgtgtggaggaagtcaggccg

SEQ ID NO: 200218 - DNA, 100 bp, Homo sapiens
atcagcgaactgggcgatctcgaggatttgcttttgtgtattttgagagaatagatgactcaaaggaggctctgtgactggggcaacctgcaaggagctg

SEQ ID NO: 200219 - DNA, 98 bp, Homo sapiens
agggtttttaatgaccacaacaagcaagcatgcagcttactgcttgaaagaataatccagaatggctactctgatctatgttgataaggaaaatggag

SEQ ID NO: 200220 - DNA, 117 bp, Homo sapiens
cggagcgggctcacgctgcggaggaagcggagcgccgctgggggccggttaatgtccatcagtgtgttggcagtttctgcttggatgagggactacctaaataatgttctcacttta

SEQ ID NO: 200221 - DNA, 100 bp, Homo sapiens
gcacaaatgaatggtaggaaaattactctgaaaagagaacaagagagtgagaaaccaagccaagtgccctaaccatttctaatattcaggctggatctac

SEQ ID NO: 200222 - DNA, 83 bp, Homo sapiens
tttaggaagctgtcctggctcagatggctcggtcatcacgggtaatctgtaagtcagatgctccaacaggggatgttcttctt

SEQ ID NO: 200223 - DNA, 98 bp, Homo sapiens
cactgtacatgctttttattacaagactacggagcataggaggaaaattcatcatctggtagcagcaattgcagagacagatgaatctgcagaatcag

SEQ ID NO: 200224 - DNA, 101 bp, Homo sapiens
gctgcgccgcgtgtcctcggagcgcggtccctgtattggtctcctgctcctagaggtattgaaaaccttccctttgaattacagagaaactttcagctcat

SEQ ID NO: 200225 - DNA, 101 bp, Homo sapiens
cgggaacaaactagccctcaagacgggaatagtagccaagaagcagaagacggaggatgagacagaaagaatttactttcaggttttcttacctaaaggga

SEQ ID NO: 200226 - DNA, 105 bp, Homo sapiens
gcggcggaggctgccatggacgacgaggaggagacgtaccggctctggaaaatccgcaagaccatcatgcagtagagacggggtttcaccttgttagccaggatg

SEQ ID NO: 200227 - DNA, 86 bp, Homo sapiens
cttgaatgttgaagatgtccttaccagctttgacaatacaggaaatgtttggttctccaaaaaatgtggaatcctttgcatctatg

SEQ ID NO: 200228 - DNA, 95 bp, Homo sapiens
ctagtcgcgggagccacgcagaggacgccggaacaccctggaagccgagaaatgatgtcctaaacgatgctatatttgatgaagatcatgatgag

SEQ ID NO: 200229 - DNA, 75 bp, Homo sapiens
gggcagagagacgccacacagccaccagccgcagcaccaggatcatcgtggcattcctggtggctttccatcaga

SEQ ID NO: 200230 - DNA, 100 bp, Homo sapiens
caatgaccacctggtagagaaataccgcattcttatcacaaagtgtgggcgaaatgctgaaaacttcgaccgatttttcacccgccatccaccagtccta

SEQ ID NO: 200231 - DNA, 73 bp, Homo sapiens
cgggcgcggcggcggcggcggtggaggagccggagcataatgttgagtcagcagatactggagttatttgaaa

SEQ ID NO: 200232 - DNA, 98 bp, Homo sapiens
tcagcacccaaggctgctcaagctcaggaacctcagatagatgaggttatgaaaaccaggctggctgtaggcaaaactgggcagtactctggaatata

SEQ ID NO: 200233 - DNA, 98 bp, Homo sapiens
aaagtgagaatttacagagatcatcctcttcagaaacagggctactgttcccgtagacaaagacgtcttcgaaaaacactcaacttcaagatgggtaa

SEQ ID NO: 200234 - DNA, 100 bp, Homo sapiens
ttcagtattgtaagaccaagaagacttctctacatggcaatagatggagtgggctactctcaggattagatataatggaagtgaacccatccctggggaa

SEQ ID NO: 200235 - DNA, 75 bp, Homo sapiens
gatatccttctcaaccttgtgggatgtgaaaactctgttactgaaggaactcgtgtccctgaagccttgtaaagc

SEQ ID NO: 200236 - DNA, 51 bp, Homo sapiens
gcggtggcgcccggagcccgagataacttttaagtggtgaagagtataaat

SEQ ID NO: 200237 - DNA, 83 bp, Homo sapiens
caggctgttgaaaccctcctgaatgaagtactagccggacatcatgagtggctgtcgggtattcatcgggagactaaatccag

SEQ ID NO: 200238 - DNA, 101 bp, Homo sapiens
gggctgcggccggagcgggcggctgagacaaaggcgacgaactgcttcccaagttcatttaatgaaattttcaccagatggagaattttttgccactgctg

SEQ ID NO: 200239 - DNA, 101 bp, Homo sapiens
gcactggagctgtcctgaaggtactctcgcaggaaatgggaattctacttgtgtgggttgctgcagcaactggtcacacagtagtgttggtagaccagaca

SEQ ID NO: 200240 - DNA, 90 bp, Homo sapiens
aagaggaggccatgcgctggttccagcagaagacacagaatgttcagcttaacaaagaaatgacacttgccagcaaccggagcctggcag

SEQ ID NO: 200241 - DNA, 50 bp, Homo sapiens
cggcgctgccgggccgtcagcttcggcctcaggcccaggcccaaggccaa

SEQ ID NO: 200242 - DNA, 75 bp, Homo sapiens
ctcaggccggggcgcacgtcggctcccacgcttagccagctcccggtggatgaaaatactaggaaaagtttattt

SEQ ID NO: 200243 - DNA, 100 bp, Homo sapiens
ctcggcctcggagcaacgagcgcagcgccggtttggtgcacctcgatttggaggaagtagggcagggcccttatctggaaagaagtttggaaaccctggg

SEQ ID NO: 200244 - DNA, 96 bp, Homo sapiens
cttcaccatcttgggagaagaaggaagaaagtgaaagcgatgtggtccttcttagtcccaaggaccctgacagacaaatttacatgtattggagac

SEQ ID NO: 200245 - DNA, 75 bp, Homo sapiens
gccttggatatccaggatccaggggtccccaggctaaagaacatgaagagaaatgtttatcactgcaacaaatgc

SEQ ID NO: 200246 - DNA, 100 bp, Homo sapiens
cttctgtttcgtgaactgcgagtggaacaggaatctctgttgacaggaggctgaaccgtctgagcccagaagtgctgaggtgacgaggaagcccaaggct

SEQ ID NO: 200247 - DNA, 80 bp, Homo sapiens
tagaaaatgtccatggatatgtcttgcagtctcatatttctcctctgaagctatctgctctatgcaagcacttagacaac

SEQ ID NO: 200248 - DNA, 101 bp, Homo sapiens
acctcacaaaagcttgctttcagcatgttaagccttgtatagggatgaagatgcccctgctaagattccagatgaagaggccacaaaacccgaaggctggt

SEQ ID NO: 200249 - DNA, 83 bp, Homo sapiens
ccgcggccggagtgggccgcttcaagaccaaggcgtgatggtgggcatgggtcagaaggattcctatgtgggcgacgaggccc

SEQ ID NO: 200250 - DNA, 83 bp, Homo sapiens
cgttgacaaggcactgctttttcatgacgatgcgagccacccctctggctgctcctgcgggttccctgtccaggaagaagcgg

SEQ ID NO: 200251 - DNA, 75 bp, Homo sapiens
tattattagaattctgccatgcaagagcataaggagaattattttttactcccttataaagcccagtatcaatga

SEQ ID NO: 200252 - DNA, 100 bp, Homo sapiens
ggagatggtgcgtgcccagaacaagaagaagaagaagtctggaggcttccagtccatggaaacctgctcctccaaagccagagcccaagcctaaaaaggc

SEQ ID NO: 200253 - DNA, 121 bp, Homo sapiens
agtgacctctgagaaagtgagccagaaacatgctgagcctttgacaggtactccaaagattcaggtttactcacgtcatccagcagagaatggaaagtcaaatttcctgaattgctatgtg

SEQ ID NO: 200254 - DNA, 78 bp, Homo sapiens
tgcgttcttcatgcccttctagagaacgttctacaggaaattcttggtgcatcactttctgcacctttaacatcatac

SEQ ID NO: 200255 - DNA, 98 bp, Homo sapiens
acacaacccggccatcgaggccctgctgcacgacctcagctcccagaggatcaccagcgtgggttggactccatgaaagaattgcacaaaacaaatcg

SEQ ID NO: 200256 - DNA, 100 bp, Homo sapiens
gttcaactttcccagaagttgttctaacgctgcctttgctttaaaacagtattacttgcggtggtataagttgaaatccaaaccaggaaagaaggacaag

SEQ ID NO: 200257 - DNA, 100 bp, Homo sapiens
agcactcaagcagcaggagcagcccgcggcgaccaagatcaggaacctgccctgaggaaccgctgctgctggccgaactcaagcccgggcgcccccacca

SEQ ID NO: 200258 - DNA, 75 bp, Homo sapiens
ctcgtggcctggtctccattatttgagatgagttacatcttggagcaacccttctgtggggctcaattttggaaa

SEQ ID NO: 200259 - DNA, 74 bp, Homo sapiens
tcatccggcagaataagagactggacgctgtgaggtgtcgtgaaaactacccctaaaagccaaaatgggaaagg

SEQ ID NO: 200260 - DNA, 90 bp, Homo sapiens
tgagaagaccaccatcaacaatgagtacaactaccgctgctggaccacaaaccgctgccagaaaaattgggctaatggatactacagaca

SEQ ID NO: 200261 - DNA, 100 bp, Homo sapiens
gtgccgagcggcaacggggctccgggccctaagggacaatgcagatcttcgtgaagactctgactggtaagaccatcaccctcgaggttgagcccagtga

SEQ ID NO: 200262 - DNA, 90 bp, Homo sapiens
gagaccgtgaccgagagcgtgaccgagagcgcgaatatcgtcatcgttagaaggatgcgctacgtcgcctcctacctgctggctgcccta

SEQ ID NO: 200263 - DNA, 100 bp, Homo sapiens
ggcacctgttccaacaagaaggctttgcttaagttcaaaccagcttttactggaccctgttgatttcaaaactactcatctgatgtttcatactgttaca

SEQ ID NO: 200264 - DNA, 75 bp, Homo sapiens
gtccctcgtccagccacccccagaaagtgttgtgaagagcgaagacttttcgctcccagcttatatggatcggcg

SEQ ID NO: 200265 - DNA, 98 bp, Homo sapiens
attagtttctggaggatctgataatcaagtgattcactgggaaatagaggataatcagctggttatattctgggcactaaatgaaggcgtttctaggc

SEQ ID NO: 200266 - DNA, 82 bp, Homo sapiens
gcgcgggctcgagagctcgccccgaacgggggtcttcctcctccgccgttgacaggttcagcagctggacatggagaaccaa

SEQ ID NO: 200267 - DNA, 96 bp, Homo sapiens
gttttaaaagcagtcagtactcttattgattcacttaagaaaactcagcctgagaatgtcctggagcagaacaatttttccccgaatacaagaacg

SEQ ID NO: 200268 - DNA, 108 bp, Homo sapiens
cacgggatcccgaggctgaagaaatagaagctgaatatgctgcattagacaaacgagagactgcctgcgctgctgacttaaggccccaacaccaaacacagaagcaac

SEQ ID NO: 200269 - DNA, 75 bp, Homo sapiens
tcagaagacagagggttttcttttgaggtcatcatcagatttgaaatatttaaagtggatacaaaactatttcag

SEQ ID NO: 200270 - DNA, 83 bp, Homo sapiens
cgcggggacgccgcgtgctcccaacgtcgccccggtttgacgcacacggcaccaaactgtgcgctttgtaaagaatataactt

SEQ ID NO: 200271 - DNA, 83 bp, Homo sapiens
ctaacccgacccggattggcgctgaggtggcccgtggggcagtgttgctaacaaccacaagcagaatttgatgacggtggcaa

SEQ ID NO: 200272 - DNA, 90 bp, Homo sapiens
caggcgcggatggcgaggccagcaggagaaggagaggaacgcgcggaggaagaagaagaaagcgccggcggcggccagcgaggaggctgc

SEQ ID NO: 200273 - DNA, 101 bp, Homo sapiens
gagcgcgaggaggcggaggctgcggcggggcggacggtcgcgcggcggcaggcacagggaggttcccctgaaggatgctaaggaatacgctgaatccatag

SEQ ID NO: 200274 - DNA, 90 bp, Homo sapiens
actggaagaaatacacatatttgtcctttgcaacatcctcagaaggccaatcattgtcatttcagcacctgtgattacagaggaaaccac

SEQ ID NO: 200275 - DNA, 100 bp, Homo sapiens
cattaaattcccgaactggggagatctgtccgacactggttcagaatttgccatcgtcagtgcagactgtgtgtgagtcctggaacaacatcaataccaa

SEQ ID NO: 200276 - DNA, 78 bp, Homo sapiens
gagcagcggaaaatgatccagtcacagaattgggaagcacgtctactgctggagaggtcacatgctgccaagtgccca

SEQ ID NO: 200277 - DNA, 75 bp, Homo sapiens
agaagaccaaaccatcccacggctccaagggctatggcgtgtgctcggtggggctggagcggctggcttacctcc

SEQ ID NO: 200278 - DNA, 82 bp, Homo sapiens
ccgcgctgctcatccccaaggaggacggcgtgatcacggccagcgaggacaggttttaaaatcaaagatgggaaaatcggag

SEQ ID NO: 200279 - DNA, 75 bp, Homo sapiens
cagacgctctggtcatactaaagaacacatctggaaggacaggcgacactaacaggtgaagatctcgggagacca

SEQ ID NO: 200280 - DNA, 50 bp, Homo sapiens
gtccattcgaagtgttggcagtcacaggttcctggtccagaactttacac

SEQ ID NO: 200281 - DNA, 98 bp, Homo sapiens
tcctggtaacccccctgggcgcccttggagtaccgttcggttccagaaacgccgctggactgcgaggtctccctgtggtcgtcctggggactgtgcgg

SEQ ID NO: 200282 - DNA, 80 bp, Homo sapiens
ggggttcctgggaatgggacccttacccggaaacagggtgtctttgggggaagatcagttttcctgccatccaggctgct

SEQ ID NO: 200283 - DNA, 90 bp, Homo sapiens
agggacagcccaaggtccaccgagcccgcaaaaccatgtccaaaccaggaaatggacagcacagtgccaccctacagccctgggagctca

SEQ ID NO: 200284 - DNA, 100 bp, Homo sapiens
tcccgctgcgctaggggaagcgggcaggaactcaacagaggcaattattatcccgactgcaaatcgacccagtaatggcagaaactctgcagatgagtca

SEQ ID NO: 200285 - DNA, 83 bp, Homo sapiens
gcggacgggccatacccaataaccaggtgcttggcaaaatcgagcgggccattggactgcctccgggcctgccaggagcagat

SEQ ID NO: 200286 - DNA, 100 bp, Homo sapiens
tcctacagcaagctgctgtgcggcctgctggccgagcgcctgcgcatcagcccggacagggtccagaatgccttggagaatctgagaatgctgattaagg

SEQ ID NO: 200287 - DNA, 75 bp, Homo sapiens
gcaccagcttccagttagtggatatagcacaccatccccagccaggactttgaacatgtcggggatcgccctcag

SEQ ID NO: 200288 - DNA, 90 bp, Homo sapiens
cggcaagagggagttaaggacattccaggcagaggcaagtgacatctgccatgagctgttgggacatgtgcccttgttttcagatcgcag

SEQ ID NO: 200289 - DNA, 98 bp, Homo sapiens
tgcgaaaaagtggatcaatattcggaagtcatatggaaatttttacaagacactcttgcactcctgtaatgagcctggcactgtgatgaaacactttt

SEQ ID NO: 200290 - DNA, 100 bp, Homo sapiens
tcagagacattacatcaggaagatactgcagagatattctactccatctcattcattgtacaggattctccaaaagcccagctacgccggacaatagaat

SEQ ID NO: 200291 - DNA, 98 bp, Homo sapiens
ttggattcagtcacaacagatgaagacagcaccaggttccaaatcatcaatgaagcaagtaagcaccttggaacatttcaagaggtggctccagccag

SEQ ID NO: 200292 - DNA, 82 bp, Homo sapiens
tcgccctgccggaccgcgcctcaggctcccccagtcattgcacgtgcagaagagcgacgtggacctgatgagaacgaagctc

SEQ ID NO: 200293 - DNA, 90 bp, Homo sapiens
cagatctacctgcgaagtagcagtggtgaaggaattggcgtcattggggcctccccatggccacccatggaccagtcggcattcacttcc

SEQ ID NO: 200294 - DNA, 82 bp, Homo sapiens
cagaagaccaagtacctgcagatcctgacctctctgatgagatggatcggtcttcagggagcaggggatcgacggggagacc

SEQ ID NO: 200295 - DNA, 83 bp, Homo sapiens
caactctcagttcgagagtaaaggatttttagactctgaggagcagttggagctaatccacattatggaaatggaaaccaccg

SEQ ID NO: 200296 - DNA, 100 bp, Homo sapiens
tctgtggagttaactttggtgatattttgatctgccgtgatcaatatcaggaaaggccccatcttcccttcacacctgaatttacatagtacatgacgaa

SEQ ID NO: 200297 - DNA, 100 bp, Homo sapiens
tggcggggagtcgcgggcgcctccgcctcaggttcgatacaagaggctgttttcctagcgtggcttgctgcctttggtaagaacatgtcgtccatcttgc

SEQ ID NO: 200298 - DNA, 100 bp, Homo sapiens
ggatatcgtgtctggagcagtggagcccaaagacccctggagacatggaagggaaaaggccgaggcatcagcgtgtgaagaccgcaaagacgatcccgag

SEQ ID NO: 200299 - DNA, 82 bp, Homo sapiens
tacccaataaccaggtgcttggcaaaatcgagcgggccattggttacgggcaggacttgagtggcttcggacagggcttctc

SEQ ID NO: 200300 - DNA, 98 bp, Homo sapiens
aactaggaatctatgatgctgatggtgatggagattttgatgtggatgatgccaaagttttattagatgacagcgcttctgctgcaagtagcatggag

SEQ ID NO: 200301 - DNA, 100 bp, Homo sapiens
caaagaaacaaaagacaactctgcttttccagaaactgtgccaggatcacgtggatttggcatgataacatgcagtttcttcaagacaaaaacatttttg

SEQ ID NO: 200302 - DNA, 101 bp, Homo sapiens
agtggtgggataaacggagagcagcagccgcccgcttcaaccccaggggaccagaggaactcagccctgattgcggagaagaatttggattggtttcctcg

SEQ ID NO: 200303 - DNA, 75 bp, Homo sapiens
gggcgtcagataccctggaggcccaggcccatggctggcgggacgatgatgacattaatgatgttgcatcgatgg

SEQ ID NO: 200304 - DNA, 83 bp, Homo sapiens
cgcccaccttgtggccctgggctttaccatctttgtggctgtgcttgccaggcctggctccatacctggagtagaacagaaaa

SEQ ID NO: 200305 - DNA, 100 bp, Homo sapiens
gtccgaactctaatatgagcagcatggtagttacaggtccacaaaaggtggctccgattcctccctttctgagccagggccaggtcggtccggccgcggc

SEQ ID NO: 200306 - DNA, 75 bp, Homo sapiens
tactggaaatctgaatgctgttatcacgcccgatgagagaaagggaaagttaaggatgctggagcagaacaatgg

SEQ ID NO: 200307 - DNA, 90 bp, Homo sapiens
cggttcctcctcctgtcgctgcccgtgtgattactgagactcaggagtccaatgtgctgattgctgctaacagtcagggtacaattaagg

SEQ ID NO: 200308 - DNA, 141 bp, Homo sapiens
aagatctatgttatggccacccacggcatcctgtctgcagaggcccctcgcctgattgaggagtcctccgtagacgagggctcagaaacacttatgggattttctaagcacggagggttcacttccttaacatcacctgaa

SEQ ID NO: 200309 - DNA, 100 bp, Homo sapiens
ccgggccccgcgcgcccaggcgaggtgcccaagcaaggaaagaaataatgaagagacacatgtgttagctgcagccttttgaaacacgcaagaaggaaat

SEQ ID NO: 200310 - DNA, 98 bp, Homo sapiens
atagtcaatagtgctcagactggtagcttcaaacagctcacagttaagatctcaggaaacaggctcgacagctggaaaatgaacttgacctgaaacta

SEQ ID NO: 200311 - DNA, 73 bp, Homo sapiens
gggactactggtgcctgcgctgaaaaaggcagtcttgattgatatggaagaaggggtagtgaatgaaattctg

SEQ ID NO: 200312 - DNA, 100 bp, Homo sapiens
tcgcggccctgcagttcttccggagtcagggcgctgagggagcgttgacagggaagcagccggatgggtcacggagactcaccagttggcagaattaaat

SEQ ID NO: 200313 - DNA, 99 bp, Homo sapiens
cgccggccggagctgacccagtgggccacgggctccggactccagaactttccaagcgggggaaacttggcggcgggtcgcaatggaagaagagatcgc

SEQ ID NO: 200314 - DNA, 82 bp, Homo sapiens
ccggagctgtcgacccggcctggcgccggactagcatcacaggacatggccccctcagccacctagctggggcccatctagg

SEQ ID NO: 200315 - DNA, 80 bp, Homo sapiens
acaatcgcttgtacaaaggagagtttaaacagccaaaacagttcattcatattcagcatgctactatcattcacgatggc

SEQ ID NO: 200316 - DNA, 100 bp, Homo sapiens
cgtcagtccggtcttgtcttccagacccggaggaccgaagcttccggacgacgaggaaccgcccaacatggcctcggagacaaatttacatgtattggag

SEQ ID NO: 200317 - DNA, 88 bp, Homo sapiens
gagaatttaggatcttgttgaatccagtccagagccaaagccttggctggacagtcagtacgaatctgtaaaggccccagggctgtgt

SEQ ID NO: 200318 - DNA, 74 bp, Homo sapiens
caaggaggccttccagctgtttgaccgaacagggagtggacatccgccataacaaggaccgaaaggttcggcgc

SEQ ID NO: 200319 - DNA, 100 bp, Homo sapiens
cagcttcgcagtcactaatgcttctggcagccggtcaagttccccaggaaaattgttgggaagtggttatggtggacttactgggggctcctcacgaggc

SEQ ID NO: 200320 - DNA, 75 bp, Homo sapiens
acctcaccccaccacttaaaactgtcattcgagctatcagatgggacaccaggtccaataccacctccaagccga

SEQ ID NO: 200321 - DNA, 100 bp, Homo sapiens
tgacacccggcggctgatcaccaagccgcagaacctgaatgacgcctacggaccccccagcaacttcctcgagatcgataaacctctgcgccatgagagc

SEQ ID NO: 200322 - DNA, 74 bp, Homo sapiens
gaattgttctcagtttctcggtttatgtgctcttccaggcccttccttctaccatgattatagtagcagtttat

SEQ ID NO: 200323 - DNA, 83 bp, Homo sapiens
agcccggcaccccccgccgacaaggaggccctccagaatacccatcatatagcccctgaggtggcatggtgatgtctccatga

SEQ ID NO: 200324 - DNA, 83 bp, Homo sapiens
cctcatgtaacctcagagatctgggcagttaataaaggtatccatggagaacactgaaaactcagtggattcaaaatccatta

SEQ ID NO: 200325 - DNA, 50 bp, Homo sapiens
cgcgagtgaggaaaggaggtactgtaggccaagtataaggagcgagggac

SEQ ID NO: 200326 - DNA, 90 bp, Homo sapiens
ctgggggtcagcacggaggggactggagctggagagtgactgtagagcctcaggtgccttcaaatctcttgacaaagatggcactggaca

SEQ ID NO: 200327 - DNA, 78 bp, Homo sapiens
tcagtgtgaatttgtgacagctgcagttgctccccgcccccgagcagccgagcaagaagatccttataggaagaaaaa

SEQ ID NO: 200328 - DNA, 100 bp, Homo sapiens
tacagtatgcacttaatgtccctagaccatttgtttgtgactatgaagggtgtggcaaggccttcatcagggactaccatctgagccgccacattctgac

SEQ ID NO: 200329 - DNA, 50 bp, Homo sapiens
ccgccaccgtgcacatccgaatggttcctgcggatggtggatgcctgtgc

SEQ ID NO: 200330 - DNA, 75 bp, Homo sapiens
ccgataacttcgtgaagttacttccaccggactttgaaaaggaagggaatttaaaagcatattggcagaggaaga

SEQ ID NO: 200331 - DNA, 75 bp, Homo sapiens
aggacagtgaggagctgggtggtcccagcctggagctgtgccagcctgacatggagctccatgaacctgcctcca

SEQ ID NO: 200332 - DNA, 49 bp, Homo sapiens
ggcgcagcccggaggccgcgcgggatagagtggtgacttccaagcttca

SEQ ID NO: 200333 - DNA, 100 bp, Homo sapiens
tgcccagctgctgtggagacaggcagcccacaacaaggcctggaattgtctcgccatttaaacgagtattcctaaaaggtgaaaagagtagagataagaa

SEQ ID NO: 200334 - DNA, 98 bp, Homo sapiens
ctatgtggaggagatgtactgtgcttggctggaaaaccccaaaagtgtacataaggtggatattccatctattataaccaagaaactattaaaagcag

SEQ ID NO: 200335 - DNA, 88 bp, Homo sapiens
gagaagggacagacatcaacttttggatccaagctggagtgcctgctgataggaagatgtcttcaggaaatgctaaaattgggcaccc

SEQ ID NO: 200336 - DNA, 75 bp, Homo sapiens
ggcactggccaaatctgaagaagattacctggtcatgatcattgtccgtgctcttttggtacaccagaaggccag

SEQ ID NO: 200337 - DNA, 74 bp, Homo sapiens
gaaattgcaaagaattacaacgtaccctatgaacctgactctgtggtcatgataaccatctcttagagaaggct

SEQ ID NO: 200338 - DNA, 75 bp, Homo sapiens
gagacccgttcagagtcctacagtggcaggtgggatgtgtgtgggctgaaattccgagctgcggttgtgcatgag

SEQ ID NO: 200339 - DNA, 82 bp, Homo sapiens
aatacgtttccattgtgatcccaccttctgggcaaagaatgtagtcaatttaggttctgtacagagtaatgagatgtgtgac

SEQ ID NO: 200340 - DNA, 87 bp, Homo sapiens
ttgcagaatgactcggaggcgattgaccagctggccctggagtcccctgagagatgctgcccccacccccttaggcccgagggatca

SEQ ID NO: 200341 - DNA, 100 bp, Homo sapiens
gctgagatggacctgggaactccaacatatgatgaaaaccccatgaagatatctccggagcatttggataatgtgacagttggaatgcagtgatgtcgac

SEQ ID NO: 200342 - DNA, 96 bp, Homo sapiens
ctgtaccctgcgctggctccgtgaaccttagggacaacaccgggacacccgcgaggccggaaaatggtgggctggtgtgtctgaccaccaggacca

SEQ ID NO: 200343 - DNA, 75 bp, Homo sapiens
gcggccgcggcctcacaggtctgagggttccttcatccattctggacttggtcgatgatcaccatggctcaactg

SEQ ID NO: 200344 - DNA, 90 bp, Homo sapiens
acctgctgatggcccgcagcttcggtgacaaggatgaagtggcacacactctaactgaaagcagagtattaaagaacactagacatccct

SEQ ID NO: 200345 - DNA, 100 bp, Homo sapiens
acaaatggatggattaatccctggggtagaaccacgtgaaatggcagctatgtgtcttggattggctcacaggtgagtcgttcctctttgctaatagaac

SEQ ID NO: 200346 - DNA, 82 bp, Homo sapiens
gaagaaagggatccgcagagtcctgaacgccaaatcttaaaggcagaccacgcaaaaagaaaccatgcccacaaagaagaga

SEQ ID NO: 200347 - DNA, 83 bp, Homo sapiens
cttctggaagctactactacgtggtgcttggaaagttggctggatctattattggcaaaggtggtcagcggattaaacaaatc

SEQ ID NO: 200348 - DNA, 101 bp, Homo sapiens
aaggagggctctcctgtctgccaccatcctgggttgacaattctacacaaggagaatgatatggaacctagcaaagctgttccactgaatgcatctaagca

SEQ ID NO: 200349 - DNA, 75 bp, Homo sapiens
gaatccttggcccaatgtagatgctcacagtggggtgctgctccaggaccccactgcactatgcagctgctaacg

SEQ ID NO: 200350 - DNA, 100 bp, Homo sapiens
cgtacccggcatttcaacaaaaatagcattggggagtcagcaatgtccgttgtgttaaatcagctgctgcccatgattaagcctgtaacccagagaacca

SEQ ID NO: 200351 - DNA, 82 bp, Homo sapiens
gctaacagaactggaccttttcggtttctgctttgggacaaccatacatctaattccttaaagtagttttatatgtaaaact

SEQ ID NO: 200352 - DNA, 98 bp, Homo sapiens
ttccaaggaagccttgaatggaattctccaggggttcagagtcatttactgggccaacctcatggacggaggtaaggagagctgctttgagagaattg

SEQ ID NO: 200353 - DNA, 97 bp, Homo sapiens
cattggaggaacgggaacaagagaagtttaatctgaaagaagaactggaacgttgtaaagtgcagaaagaatcttcaagagggagacatagggaaaa

SEQ ID NO: 200354 - DNA, 100 bp, Homo sapiens
caagactggatttcctgaagatgtttacagtgcagtcttatcgaaggatgtgcatgaaggacagcctcttctcaatggatggggaccagtgaagtacttg

SEQ ID NO: 200355 - DNA, 50 bp, Homo sapiens
cgagcatccgaagactgggttcagacagggtctcgctgtgtcacccaggc

SEQ ID NO: 200356 - DNA, 100 bp, Homo sapiens
aacgaaggtgaagccacggaagataagccctgggcgctgcctatggcacagccaagagcggtaccggcattgcggccatgtctgtcatgcggccggagca

SEQ ID NO: 200357 - DNA, 100 bp, Homo sapiens
ggagtcgtccgcttatagtggaggctgctaggagccggtcagagggactgcaatgtgccgatcttagctgctgcctgagaggatgtctggggtgtccgag

SEQ ID NO: 200358 - DNA, 89 bp, Homo sapiens
tccggaaccacgtgctgagagacagacttggagatcacggtcccaattcggcactcacagcacctgcctgcaaaagtggagtttggagt

SEQ ID NO: 200359 - DNA, 75 bp, Homo sapiens
ccaacttcaccttcaacttgggcttctcgggcaagttctatcatactgggacaagcatgaggagaaccaccggcc

SEQ ID NO: 200360 - DNA, 74 bp, Homo sapiens
gttggaagcagccgatccagcctgcggagcctgtggggcagtgccaaacccaagtctgaaatccacgtgtctat

SEQ ID NO: 200361 - DNA, 83 bp, Homo sapiens
cgctggagctgggtcagtccgccgctcaccccgcggccgcaccttcccgccttctcaggacgtggcccagtggaacatcggga

SEQ ID NO: 200362 - DNA, 75 bp, Homo sapiens
aaaaactggagagcttcatcaaaaatagtgatagctttgataagctccactttgaggctctgatgaacattccag

SEQ ID NO: 200363 - DNA, 128 bp, Homo sapiens
ctgtaccaagatgtgatgctggagaacttcaggaacctgctgtcagtgggtcactctggaatatagacccgtgatcgacaaaactttgaacgaggctgactgtgccaccgtcccgccagccattcgct

SEQ ID NO: 200364 - DNA, 96 bp, Homo sapiens
tggctttcacaaattacagcagtctgaatcgagctcagctaacctttgaatatctgcacacaaattcctgctgcacaggttctggaacctctggcg

SEQ ID NO: 200365 - DNA, 82 bp, Homo sapiens
cggatggccccaggtgtaagcgcagaaagcaggcgaacccgcggcgcaataacggttcgagaacttgtcttggacaattgca

SEQ ID NO: 200366 - DNA, 101 bp, Homo sapiens
ccaaggtgtttccaggaagttcagagagaacagatctttaatctcatgaagtacgacagctacagccgcttcttaaagtctgacttgtttttaaaacacaa

SEQ ID NO: 200367 - DNA, 96 bp, Homo sapiens
ggctcttcagctccctgcaagtgaccgggcctggggaacaggttagcattgaagaacgtctgggagcaatggatatagacacacacaaaaaaggaa

SEQ ID NO: 200368 - DNA, 60 bp, Homo sapiens
gagcccgcaaaaccatgtccaaaccaggaaatggacaggagttgatccccctcatattgt

SEQ ID NO: 200369 - DNA, 101 bp, Homo sapiens
gttagtagtgtgacatcgtctacctccttgtcagtggtgttcccactgatgaagagcaggcgactgggttggagagggagatcatgctggctgcaaagaag

SEQ ID NO: 200370 - DNA, 80 bp, Homo sapiens
caattttggggctccctcgggcacctccggtaccgctgcagccaccgcggcccccgcggtttctggcttgggctttggaa

SEQ ID NO: 200371 - DNA, 83 bp, Homo sapiens
cgaagaagaggcccggactcatacagagattgaaatgttccttagaaaggagcagcaggtggatgaaaatactaggaaaagtt

SEQ ID NO: 200372 - DNA, 100 bp, Homo sapiens
cggtatttgtgagaggagtcggcgtttgaagaggtggaactcctagggcttttttgagagtggtaagaatgattgatgttggctgatattggagtgctca

SEQ ID NO: 200373 - DNA, 75 bp, Homo sapiens
ggcggtaggaagccggagacagcagggtgacaggagaaacatcagatggagtgaggaagtcagttcacaaggtct

SEQ ID NO: 200374 - DNA, 98 bp, Homo sapiens
gccatcccttctgctaatccagcaaagaccatgcagggcagtgagagctgacttttttgaagatgaggcgattgaacagattttgaagtataatcctt

SEQ ID NO: 200375 - DNA, 75 bp, Homo sapiens
cgacgcgcggcgtttacccagcgcagcgttccaccgctcgggtttggctgggtgtttgtggccagtcctcacaaa

SEQ ID NO: 200376 - DNA, 90 bp, Homo sapiens
cagcctcccaagaagctgggattacagttgcaaaagatctacctgtagattcattggaaggagaagattttgagaaggaattctcatttc

SEQ ID NO: 200377 - DNA, 101 bp, Homo sapiens
catgctctccatcctgctcttcttccacaggatgtgatcttcgtggtggaaagctaaattttaaaaccaccccaatggatgcagacagtgatgttgcattg

SEQ ID NO: 200378 - DNA, 90 bp, Homo sapiens
gtctgctcttctgcctcttgatctccgccaccgtcttcaggccaggtatagacacgtgtggccgtttacgctgtaggatcctcattccca

SEQ ID NO: 200379 - DNA, 90 bp, Homo sapiens
ccaagacagagcgctactcctggcagtgcgtcaatcagagcgtcctgtgcggtcaaaatgcagatcttcgtgaaaacccttaccggcaag

SEQ ID NO: 200380 - DNA, 100 bp, Homo sapiens
ttcatgaggtcacacaagtgttatgacatcgttccaaccagttcaaagcttgttgtctttgatactacattacaagaaaatcctgccttgcttcgttggg

SEQ ID NO: 200381 - DNA, 75 bp, Homo sapiens
gaaatgaaaaagttctggaaaggtaacagctatcaggttgtatcagagtaagatggacggtagctttgattgtga

SEQ ID NO: 200382 - DNA, 50 bp, Homo sapiens
ccttcgtacccgtcttgattgaggaattgaatgatctggcacgggaccct

SEQ ID NO: 200383 - DNA, 75 bp, Homo sapiens
cccttggagccatcctctacaggacccgctttctaccattaagtgacctgaccaacggtgcagatgggatgctgg

SEQ ID NO: 200384 - DNA, 75 bp, Homo sapiens
gcggacctctctgggctggctattaagaattcagaaggagctggcggacatcactttagaccctccacctaattg

SEQ ID NO: 200385 - DNA, 90 bp, Homo sapiens
ggcagtgtgggcatcccagcactgagttctgcccggccaggtaccccgcctctctgcaatgcgtgaacatcaacatctccccggatgagg

SEQ ID NO: 200386 - DNA, 95 bp, Homo sapiens
tcccttggcattacttctatagaaatggctgaaggaaaacctccttatgctgatatacatccaatgaggggcgggaagcttcagagtacctttgt

SEQ ID NO: 200387 - DNA, 90 bp, Homo sapiens
gtaaatcaagcacagagttgccccgagcacatcatttatatacaggtccttcgattctatgcaatctgggatgatacagacagcatgtat

SEQ ID NO: 200388 - DNA, 100 bp, Homo sapiens
gcttgacaggctgcacttggatgggagcacctggtgcctcgggactgctccgatgcccgtacttctgaaattcctcagttccggctgccgtatgatgtag

SEQ ID NO: 200389 - DNA, 100 bp, Homo sapiens
ccggctgggttccccgcacctcctgcagggctacttctacaagtccgaacagccagtccagcaaaatgaacagcattgtctaccagaagcagttccagtc

SEQ ID NO: 200390 - DNA, 75 bp, Homo sapiens
ggtcagaggccctttcatcatcaggtcagcccaaggccaaccccactgtcactctgttcccgccctcctctgagg

SEQ ID NO: 200391 - DNA, 90 bp, Homo sapiens
gcattgttggcgccatcatcatgccccacaacatctacctgcactcggccctggtcaaggttctgctccagacgagcccttaccacgttg

SEQ ID NO: 200392 - DNA, 114 bp, Homo sapiens
ctgcaactggcgccgccctgaccccaagattccagatgttcctgtggaccccagtccaggttcaaaccttgtactactcagctgatcacaagctgcttgatgggaacctactag

SEQ ID NO: 200393 - DNA, 97 bp, Homo sapiens
ctctctcatctcgctcggctgcgggaaatcgggctgaagcgactgagtccgcgatggagaggctgggaggcggcagaatgcagccagaggagggcac

SEQ ID NO: 200394 - DNA, 100 bp, Homo sapiens
aagctggtggtgttgatcactcctcaggtgtccagcctgctcagatgtggacgagtgctcactagcagaaaaaacctgtgtgaggaaaaacgaaaactgc

SEQ ID NO: 200395 - DNA, 50 bp, Homo sapiens
ggcggcgtcttttgtgagttcaattgctcgctgtaagcagctcatctgtg

SEQ ID NO: 200396 - DNA, 75 bp, Homo sapiens
ccttgacaagctcatccggctggtaaatgcgcaggttgtatggttcctggagctggtgcaattgaagtggcaatg

SEQ ID NO: 200397 - DNA, 97 bp, Homo sapiens
tttaccagtttacttttaattttgcaaagaatccaggacaaaaaggattagatgagttttgatcatcctgagaaaaatgggccttggcctgcagacc

SEQ ID NO: 200398 - DNA, 95 bp, Homo sapiens
ctccgtgcctgcgaggagtatctgcggcagcatgacaagattgcccccgaggaattagcacttgttcacaacttgaggaaaatgatgaaaaatga

SEQ ID NO: 200399 - DNA, 126 bp, Homo sapiens
agactccttgggggtcgagcacataacggggttcgggtgtctcgtgtgtgaacatcacagggagaagatgtcaaccggacactagaaggtggaaggaaacctcttcattatgcagcagattgtggg

SEQ ID NO: 200400 - DNA, 71 bp, Homo sapiens
cttgcgagatatctggccgcctctgccgcagctggagtccaatggatgggaccccaatgaaatgttcaagt

SEQ ID NO: 200401 - DNA, 82 bp, Homo sapiens
gtcatcacaaaagagttgattgaaattatctctggtgctgcagctctaaagcataacccctactgtagaactaaatgcactg

SEQ ID NO: 200402 - DNA, 101 bp, Homo sapiens
gcggccggagcagacgcgggatggtcgcgcgtcccctgcacagcacagaggggcagccggagagcctgggaaaggtacctaccagggccagtgggccggag

SEQ ID NO: 200403 - DNA, 100 bp, Homo sapiens
tattgatggcttcatctctcttggggctccctggggtggctccatcaagcccatgctggtcttggcctcaggtgtgggcccatcgctggatggatctgtc

SEQ ID NO: 200404 - DNA, 100 bp, Homo sapiens
ttgagcacagcagccgtcctatcaatgtgattaaatggagtctcccaggcgggaatgcaatggtgcgatctcgacttcactgcaatcttcacctcccggg

SEQ ID NO: 200405 - DNA, 82 bp, Homo sapiens
ctggagagaacagttcattgaagctatcactgtcagtgctgatctcacattcttgaaggtggcattgaagagcactaagatc

SEQ ID NO: 200406 - DNA, 100 bp, Homo sapiens
ccagaacaaaaccgagtcaacagggaagcagaggagaaccgggagccattcagaaaagatgtcccctggaagcaggactgcatagtagcagcaaagtcac

SEQ ID NO: 200407 - DNA, 76 bp, Homo sapiens
tagacatttacgcggatgtcggcgaagagttcaaccaggaaactgttaaggcagcaataatagaagagcagaaacg

SEQ ID NO: 200408 - DNA, 96 bp, Homo sapiens
tcaaggcaagcctattgagttaacacctctgccgctgctaaaagagcaatgctaagaagacgtttggtttaaagaattaaaaggaagaacaactta

SEQ ID NO: 200409 - DNA, 50 bp, Homo sapiens
tcgtcttcctcttcagccatccaggctgagcagtccaaagtcctgagcgc

SEQ ID NO: 200410 - DNA, 75 bp, Homo sapiens
cagttgtatgtgtagaaagtgaaatcagaggagatgtaactatcggccataaagaatgctgatgggagaaccatt

SEQ ID NO: 200411 - DNA, 75 bp, Homo sapiens
aaaagagatacggcttatgaatttgaaaggcatttgttgacctcctgtactggagagacattaagaagactggag

SEQ ID NO: 200412 - DNA, 74 bp, Homo sapiens
agtttcatggcactaagtcaagatgccaggagtggtggctcacacctgtaatcccagctctgggaggccaaggc

SEQ ID NO: 200413 - DNA, 83 bp, Homo sapiens
ggagaccaaattttgaacctcctcagggccttggtgtaccttgttgtagtgtttgaaaacatctgaggctgcatccatctcca

SEQ ID NO: 200414 - DNA, 101 bp, Homo sapiens
tgagccaccgggtgagctcaccgcccagcccaaaccaggagattgcgagggagcgatgcggtgcagcgcggctagcttgtcactttctgcaaaggtttccc

SEQ ID NO: 200415 - DNA, 100 bp, Homo sapiens
ggtgtatgttgtcaactatccaaaagatgcttgttgacgctccctgctcagacctggctcaggaactacgtcagagttgtgccaccgtccagcggctgca

SEQ ID NO: 200416 - DNA, 101 bp, Homo sapiens
caaatacagaatccgtgtctgggagaaacctcgtggcctggtctccattatttgagatgagttacatcttggagaaaaagcttgtggtgaaggggggcaaa

SEQ ID NO: 200417 - DNA, 90 bp, Homo sapiens
gtaagatggaagatgaggaggtcgctgagagctgggaagaggcggcagacagcgggttaattggccttggtcctcacagctccaaaaaga

SEQ ID NO: 200418 - DNA, 100 bp, Homo sapiens
tgcagctcacgcccgaggtgcagctggccatcgagcaggttgcacactgggccacagaggatccagcaaggatgaagaaatggagcagcacagacttggg

SEQ ID NO: 200419 - DNA, 90 bp, Homo sapiens
cggctccgcgggcggcccacggcgaggtcggatccgcacaagacggcaaagctctgggagtgccaccaacgtcgcctctacacctgataa

SEQ ID NO: 200420 - DNA, 50 bp, Homo sapiens
tgagcaaactatgtataggaattccaaagatcatagatgtcatagataag

SEQ ID NO: 200421 - DNA, 100 bp, Homo sapiens
agcagattgtcagatatattccgggtggtcccattcatatcagacatccacgacagcgatggcagttccagcagcagccaccagagcctcaagagcacag

SEQ ID NO: 200422 - DNA, 100 bp, Homo sapiens
ctagccagagccaaagaagccttgcaggaatatcctccgaatcctaaatctagagctccaaggatgctggtcattaagaaaggtaatacaaaagacttac

SEQ ID NO: 200423 - DNA, 50 bp, Homo sapiens
gggaggaagaaccattctgacaaagcatctgcaaacatagagaattctgg

SEQ ID NO: 200424 - DNA, 90 bp, Homo sapiens
gccatatattgtacaatgaacagaggttggtccgagaagccaacaatgccccatcacaggtatatggaggagtgacctactataaccccg

SEQ ID NO: 200425 - DNA, 83 bp, Homo sapiens
atgaaggggtctagatgtaaatgtcagtggaaaggagagctaccatcactaagacctgcctagagctggaacgttacctccag

SEQ ID NO: 200426 - DNA, 99 bp, Homo sapiens
gtggatccgggccaagtacgagcgacaggagttcatctacccggagaagcaggagccctactcggcaggcgggcaaaactgttccgatttgcctctgag

SEQ ID NO: 200427 - DNA, 75 bp, Homo sapiens
cctggatctcatcaaaaaggacaccagcaagctgttcaatgaggagatcattgacggatattcaagacctgtcta

SEQ ID NO: 200428 - DNA, 75 bp, Homo sapiens
ttttcttatgaagcttcttctggttggaaacttgtcaaatttcatcagtattctgaagaagccaataatctcatt

SEQ ID NO: 200429 - DNA, 74 bp, Homo sapiens
gccgtagcgtcggtgctggaagacgaggccacagacacttctgatagtgaagtcacattgtcctaatgcttgca

SEQ ID NO: 200430 - DNA, 100 bp, Homo sapiens
ttgagcagaagcacgttaagaagcccgaagggcttttcagaaatcggtttgaagttagaaatggcatctccttggaaacaatgccatctttgaatgtgag

SEQ ID NO: 200431 - DNA, 100 bp, Homo sapiens
attaaacacagaaggaaatacccagactgttactacaacctcgggcgtctgatatgagatcctgactccaaactccattcccaagggtttcatggacggg

SEQ ID NO: 200432 - DNA, 75 bp, Homo sapiens
gaactgccatggagtgaagtgttgaggactatggcaaggagtctcaggccaaggatgtcattgaagagtatttca

SEQ ID NO: 200433 - DNA, 85 bp, Homo sapiens
atgcacatttgttcatctcttgccaaagtttgacccactggttattctaaagatgcgagccacccctctggctgctcctgcgggt

SEQ ID NO: 200434 - DNA, 82 bp, Homo sapiens
gcagtgagttgggcaggttcttggccaagcaggtacactgaggaggggacggctccgtcttcacattgtgcacagatctgag

SEQ ID NO: 200435 - DNA, 83 bp, Homo sapiens
gtttccgttaagctggacaacagcaagagtgagccatggagctacgtgtggggaacaagtaccgcctgggacggaagatcggg

SEQ ID NO: 200436 - DNA, 82 bp, Homo sapiens
gctgccttgtacccacatctcccgccaggctgaaaggttccctgagtcgaggtgactggtacaagacaaaggagatcctgct

SEQ ID NO: 200437 - DNA, 75 bp, Homo sapiens
gcccgccaccctgcgctgccgccgctctgaggagttaaagtcactccatggattcctttgggcaacccagaccag

SEQ ID NO: 200438 - DNA, 87 bp, Homo sapiens
ttagcatctgaacaattgcaagcagctctaagtatgcagtcatctccaaatggccagtttgtagcgccaagtgatattcagttgaaa

SEQ ID NO: 200439 - DNA, 83 bp, Homo sapiens
cacacttctcagagctgcccctggacgaccaggtcatcctgctgcgggcagcaaattgtggctactaatttgccccctgaaga

SEQ ID NO: 200440 - DNA, 75 bp, Homo sapiens
gctattctcaggatatgacaggggtaacacccttccagatgatttttgagatgtttctttctcagcaaaatagag

SEQ ID NO: 200441 - DNA, 83 bp, Homo sapiens
gtcctgggccccgggcggcggtcgccaggtctcagggccgggggtacccgagccgccgccatgtctgcgcatctgcaatggat

SEQ ID NO: 200442 - DNA, 90 bp, Homo sapiens
ctgcccagaaccttatcctcacattccagtttgacgcagatatggagtctggagaacggttaccatcctcagcagcctcctctactacac

SEQ ID NO: 200443 - DNA, 51 bp, Homo sapiens
agtgccaccggtgttccaactgtttaaaaaagaagatgctgatatgctaca

SEQ ID NO: 200444 - DNA, 88 bp, Homo sapiens
agagggggaaaagcgagcgatcgagcgagcgcgcgcgcgaaaactccgggcaggatgtacagttacccagcacgtgtacctcctcctc

SEQ ID NO: 200445 - DNA, 83 bp, Homo sapiens
gccggatggtgctggccacttgcttgggatcctttatcctggtcatcttctatttccaaaatcacggatacacgactctagcc

SEQ ID NO: 200446 - DNA, 82 bp, Homo sapiens
ggggcctgggggacggtaggagcctccgtgcggagaccactgttcaaggccacaggttggtgttcgaggaagagacattgtt

SEQ ID NO: 200447 - DNA, 82 bp, Homo sapiens
acgggcgagaagccctacgagtgcaacatctgcaaggtccgcttcaccagggactggtgattgcagctggaagtgcccatga

SEQ ID NO: 200448 - DNA, 90 bp, Homo sapiens
cagattttggtttaatatctgattgggacaacattcagacccatttccagtcatgagttcttgattattacagacctctttctgaaaagc

SEQ ID NO: 200449 - DNA, 75 bp, Homo sapiens
cagaaacttttatgactctactcttggttataactggacagtcattttgtttactcattcagccctgttgcaggt

SEQ ID NO: 200450 - DNA, 100 bp, Homo sapiens
atttgtttctctctgcctgatttctccaaaatttggaaactatttcttcctgattggagaagacgggctcgtatacgagggccgtggctggaacttcacg

SEQ ID NO: 200451 - DNA, 80 bp, Homo sapiens
tgtgcccggtgcaaaagaaatgcgtggacagcaggttacacatcattttggaatgactgtatatcatctggattacgtgg

SEQ ID NO: 200452 - DNA, 75 bp, Homo sapiens
aaggcctctctcctgatacagcaggcgctcaccatgttccctggagtgcaccaattccagctggacatcactgtg

SEQ ID NO: 200453 - DNA, 144 bp, Homo sapiens
caagatggcaaatttgcttcagtttttgtgtataagagagaaaatgaagacaaggttaataaagctgccaaggaatatgatgaagaatgggctaagaaaattcagagtgaaaagtttcgctggcataactctcagtggctggag

SEQ ID NO: 200454 - DNA, 90 bp, Homo sapiens
ccggcggggcgcaccacagagaccggcttcaatatcttcacccagcatggtaagaatgattgatgttggctgatattggagtgctcattc

SEQ ID NO: 200455 - DNA, 74 bp, Homo sapiens
gcaaatggaaagaaatcccactgggcagagcttgaaataagtgtgtcacatttgaagacgagcactgaggatga

SEQ ID NO: 200456 - DNA, 96 bp, Homo sapiens
ctttgtcatcaccatgatcaagatcgtgctcattaattatgcacagatagccatgatgcagcagcgcattgaccgcctagccctgctgaatgagaa

SEQ ID NO: 200457 - DNA, 120 bp, Homo sapiens
gttggtggtgaccccgcccagttggcccagaggatctcttctaacatccagaagatcacacagtgttgtgctggagaatctggtaaaagcaccattgtgaagcagatgaggatcctgcat

SEQ ID NO: 200458 - DNA, 90 bp, Homo sapiens
tacccaagaaccattggtggagatagaaggatggtgattgctcacaccaaagccttggacccctcccagcctgtgacctttgtgaccaac

SEQ ID NO: 200459 - DNA, 82 bp, Homo sapiens
gggccctttaccaggaattactatgttcgggccgtcctgcatctcctccatcgactacagtgacagcgccatgctccaagct

SEQ ID NO: 200460 - DNA, 100 bp, Homo sapiens
agcgcccacggggacggattggttgttttttcctgtatgaagcggttggcaccactgaagtgaccgaatgagattgcagcaaaaattggaggtgatgcag

SEQ ID NO: 200461 - DNA, 100 bp, Homo sapiens
cagggctcctgcttggtgtaccagaattcggccatgagccgctacatactcatcatggggctcctgtacaagaccggagagcaatggtgtgatctccgca

SEQ ID NO: 200462 - DNA, 90 bp, Homo sapiens
cgtcaaccctaaaggagagctggtacaggaacatgcaaagaccaacatctcttcgatcccctaacaacagtgagagagcaatgcgagcag

SEQ ID NO: 200463 - DNA, 98 bp, Homo sapiens
acagagtgctgttttagagctggcagcagcatctcagcccaagagaagctacctgacttacatcaagctatcaacggcaatcaagcgtaatgagaaca

SEQ ID NO: 200464 - DNA, 107 bp, Homo sapiens
ggcgagatcctggcgagcctgcaggatggcgcggccgagtccccgtacggccacccggcggttccagggtctccctccactgctgtagtaacccgggtccggggcct

SEQ ID NO: 200465 - DNA, 100 bp, Homo sapiens
tttgggtgctgctataggctcagccctcagtggatttggttcatcaggtgagaagaaatttgtttgtccagaatgttcaaaacgctttatgagaagtgac

SEQ ID NO: 200466 - DNA, 51 bp, Homo sapiens
gagtgaatcctggtcctattgtgggctctgtggatagcaactggatcgtgg

SEQ ID NO: 200467 - DNA, 83 bp, Homo sapiens
ccaacgagctcaacgccaggcgccgctcctttacagactagacgcttgaagcaaagctgccatcccagaagacgacatgctct

SEQ ID NO: 200468 - DNA, 80 bp, Homo sapiens
atcttcttcactgcctctggcatggatgagattgtgaagaggtctcttgaagtttggggtagtcaagaagcattagaaga

SEQ ID NO: 200469 - DNA, 74 bp, Homo sapiens
agatctacgtggatgatgggcttatttctctccaggtgaagcagaaaggtgtgcatgtggaagaggaagaagga

SEQ ID NO: 200470 - DNA, 90 bp, Homo sapiens
gtggattttcgtctaaaaataacaagaatgggaggagaagggtaaaacttccttttcctgtagatcaaatcacagatcttccaaggaacg

SEQ ID NO: 200471 - DNA, 97 bp, Homo sapiens
tgttcaggctgccctcaaactcctggactgaaacgatcctctcatctcagcctccaaaagtgctggcattacaggagtctgctacaccatttttgat

SEQ ID NO: 200472 - DNA, 100 bp, Homo sapiens
tactttttctgccatgaatttgcattcaggactcagggagtacacacttaccaggtgcttacactccagagcccctcagcagtttccggtgggctcttct

SEQ ID NO: 200473 - DNA, 75 bp, Homo sapiens
cttttggggggaaactaggtcgatggtcggcggcgcccggatgggcagctgagtttggtgccctggttgtcagat

SEQ ID NO: 200474 - DNA, 107 bp, Homo sapiens
ctggctctggctgtgcgcgctggcgctgagcctgcagccggccctgccggggatcctgctaaagcggagcggcaagtccctgaacaaggagtggaagaagaagtatg

SEQ ID NO: 200475 - DNA, 82 bp, Homo sapiens
gcgtctctggccggccttggtgcggcgagccgagcgaggcagctctgagccgcgcggctggatctccagaactgttctctgg

SEQ ID NO: 200476 - DNA, 75 bp, Homo sapiens
ctttcgtcaacctgtggaccctcagcttttaggaatccctgtttacacagtaaacaatgtgaatgtgatcaccaa

SEQ ID NO: 200477 - DNA, 75 bp, Homo sapiens
gacttggaagctcatggacaaagtgaataactgaagtgaagtgatggactccgatttggagagtagtaagacgtg

SEQ ID NO: 200478 - DNA, 75 bp, Homo sapiens
cgccgtgtggcacgacacaaaaatcaggttatggaggttttgatgactatggtggctataataattacggctatg

SEQ ID NO: 200479 - DNA, 100 bp, Homo sapiens
gattggcgggaaaaagaggccaaagatctgacagaactggttcagcggagaataacatatcttcagagggtgtgttgaagaggaagaaagaagattttat

SEQ ID NO: 200480 - DNA, 119 bp, Homo sapiens
cttggaatgatcatcaaacagctatggtgatgattagagacatactaatgtacatggttcagctgaatccagaacttggtgttaagaatggcatcttgggagctggcatgcttcccctg

SEQ ID NO: 200481 - DNA, 90 bp, Homo sapiens
atgagtctgggagagcctcatgcagaactggatgcaaccggaatacacctggcgtctaccctgtggaggggttcgaaatccaaatcagag

SEQ ID NO: 200482 - DNA, 50 bp, Homo sapiens
acgacatgttgcttttcgtggagatctttgatggaaaacagattccacag

SEQ ID NO: 200483 - DNA, 98 bp, Homo sapiens
ccaggctgtcctggccaacctgctgctggaggaggataacaagttttgtgcagattgccagtctaaagctgctcgactgatccaaaacatggatgcca

SEQ ID NO: 200484 - DNA, 75 bp, Homo sapiens
aacaatgagatcgtggacaagatcatgggcaaaggacagatccagatatggagattaatcaccaacttcttattt

SEQ ID NO: 200485 - DNA, 101 bp, Homo sapiens
atgcggtacttgaaggatggcgaagaggtcgcgcagaaatgacgctcctctcctcccagtcttcatcactggtggccccttctgggtctgtgtctgccgaa

SEQ ID NO: 200486 - DNA, 91 bp, Homo sapiens
ccctggacctggtcagagcgcggatggccgtaaccccgaaggaaataatgtcatacccaggctatcccccaacaggctacccacctttccc

SEQ ID NO: 200487 - DNA, 99 bp, Homo sapiens
taaactgcagaaaattataaaggagactgtgcgattctcaggggttgataagccattctgtagtgaaggtccacaaggcgattacaatttccagtcccc

SEQ ID NO: 200488 - DNA, 82 bp, Homo sapiens
tgaatgcagatccgcccagagcttgtctccagaaaccaaggtgtatgttggtaacctgggaactggcgctggcaaaggagag

SEQ ID NO: 200489 - DNA, 98 bp, Homo sapiens
gctgccgggagttcgtgccctgcaggtattagcaactatccagaaagcaccatagcaaccagtgatgtcatgtctgaaagcatggtggagacccatga

SEQ ID NO: 200490 - DNA, 50 bp, Homo sapiens
ccggcggcagatgagagcatccaacgtaattcgccaaaatgacgaacaca

SEQ ID NO: 200491 - DNA, 82 bp, Homo sapiens
cgtcaccccagaccttgccagagacctggcaaatgacatcatgacactggtgaggaagaggatggagatgaagatgaggaag

SEQ ID NO: 200492 - DNA, 98 bp, Homo sapiens
atggattgtgagctgaagctttctgaatcaggaattcctcctgatcagcagagactgatctttgctggcaagcagctggaagatggacgtactttgtc

SEQ ID NO: 200493 - DNA, 82 bp, Homo sapiens
tgctgcagaggacacgaggcggcgggctggagacatggaccgcggcgagcaagctattattcatggactatccagtctaaca

SEQ ID NO: 200494 - DNA, 100 bp, Homo sapiens
caacatcctacagctggtggatgtgtttgtgacccgcaaggagtactttatcttcctggagcttctcgcccaagaacttcaaggtgaaaatgatcatgaa

SEQ ID NO: 200495 - DNA, 96 bp, Homo sapiens
ctgacctcaccgcgcccgtggccgccgtgcaggcggccgtcagcaacctcgtccggggccacgactgcttcccggtgctgttcacctatgacgccg

SEQ ID NO: 200496 - DNA, 75 bp, Homo sapiens
ctggaaggtgcgtgtggggctgggtctcggagtgggagacgtggagtgcagagagagtctacagggagattgaac

SEQ ID NO: 200497 - DNA, 100 bp, Homo sapiens
ctgttaatcaacacgagaccagtacaagcaaatctgtttttgagcctgaagattcttcaatagtagataatgagggtctaaaattcccaggactccacag

SEQ ID NO: 200498 - DNA, 124 bp, Homo sapiens
tcctttttcgtttttcggatgatgccttcaatactacctttatttccaccatagtacagtgctgtggataccaatccactttctctgtatgtcatgcatccattctggaacactatagtaaagg

SEQ ID NO: 200499 - DNA, 90 bp, Homo sapiens
caggcgaagctggccgagcaggctgagcgatacgacgattctgaggatgacggagagtccgaggcggccaagcagctgattcagccgata

SEQ ID NO: 200500 - DNA, 100 bp, Homo sapiens
ccgctgccgctgcagcaactaattcagctaatcaacagaccaccccacaggctcagcaaggacagcagcaggctgattcaccccaagagtggccgttcct

SEQ ID NO: 200501 - DNA, 100 bp, Homo sapiens
ggagccgtacgtcctctctgagctgcgagaagcccttctcctgtccccactgcagccgtgccttcgctgaccgctccaacctgcgggcccacctccagac

SEQ ID NO: 200502 - DNA, 96 bp, Homo sapiens
cctacactgaactgctagtactgaaggctcatcatgatattgtacgatttctggtacagttagatgactacagggctcccagaaaggaagacccag

SEQ ID NO: 200503 - DNA, 98 bp, Homo sapiens
ctgccccgtgtttgctgcggcaaggacgagccggggcgctgaagatcagacctattgtgaccgcctggtgcaggacacgcctttcctgacaggccatg

SEQ ID NO: 200504 - DNA, 74 bp, Homo sapiens
cggcgggaccataagggcttaactcatatatttaacccccctccaaaaaagcccgtgttctggtactacgtgaa

SEQ ID NO: 200505 - DNA, 51 bp, Homo sapiens
ccgcacgtgtaccctgggcgcagggaaagaacacccaggttaatgcctgat

SEQ ID NO: 200506 - DNA, 90 bp, Homo sapiens
ctgggacctacatctgcttcccctgagacccctgagccccttccagtgctgcctgaggtgccctctacctgtgcctgcctctcgtctgcc

SEQ ID NO: 200507 - DNA, 75 bp, Homo sapiens
tgaatatcaagaggaggagttgttggtccacaaggcgattacaatttccagtcccctaaccacagacctgactgc

SEQ ID NO: 200508 - DNA, 75 bp, Homo sapiens
gtttttttaatgtggttggaacaactgaggaaggatttgatgccctggatccctttattcccatcctggtttcca

SEQ ID NO: 200509 - DNA, 99 bp, Homo sapiens
tggatgaagaaatctttgatgatgatgacttttaccaccaggctattcaagatctctggcagtggaggaagtctctttaagaaaatagtttaaacaatt

SEQ ID NO: 200510 - DNA, 90 bp, Homo sapiens
ctgatgtcccaactagaggagaaggaggctgcagctcggatccgagagggcatggccgccctgcagtctgacccctggcagcaagagctc

SEQ ID NO: 200511 - DNA, 75 bp, Homo sapiens
attatttctgagttgcgagagaggtttccttcacacaggtgggttgttctcagttactgaaggagtctgagaagc

SEQ ID NO: 200512 - DNA, 78 bp, Homo sapiens
gaagatcgaggaggtgtctgctcgtggcttgttgtcagaggccccaaatgaaaaactcttcttcgtggacactggctc

SEQ ID NO: 200513 - DNA, 75 bp, Homo sapiens
ttgatgtcatcacgcagaaggggtgaaagagactcggtgacagatacagtaattcgccaaaatgacgaacacaaa

SEQ ID NO: 200514 - DNA, 78 bp, Homo sapiens
cggatggccccaggtgtaagcgcagaaagcaggcgaacccgcggcgcaataacgaaggacagaataacgggctcccag

SEQ ID NO: 200515 - DNA, 90 bp, Homo sapiens
gtgctacctccaacgacctcacacaaaaagaaatccggaccctggagaactcccccactggaaaggattctgaaagaaatgaagtcagcc

SEQ ID NO: 200516 - DNA, 97 bp, Homo sapiens
ttctgtggtgtgtagtgagtctctacttttatggaatcctgcaaagtgatgcctcaggtgtcatggagaaactccagctgggcccagagattctgca

SEQ ID NO: 200517 - DNA, 98 bp, Homo sapiens
atggagccacaaagtttccagatgttgagaaattagaaaaggggctaaatgatctacagccttggcctgtactactgagcgagtgtgcttgatccagg

SEQ ID NO: 200518 - DNA, 75 bp, Homo sapiens
gtttaaggagctgaaagcgcggctgcgtgagctctgcgtcaagcttatgttcctgcacccagtggactatgggag

SEQ ID NO: 200519 - DNA, 100 bp, Homo sapiens
taaaaaggcctgggatgatctcaagaaatatttggagcccaggtgtcctcggatggttttatctctgaaaggtcacagggattatggacccagaacagat

SEQ ID NO: 200520 - DNA, 83 bp, Homo sapiens
gctgaaccgactctgagaaatttggctcttataatgaatggagcaaatctgacagcccaggatgaccggggatgcactccttt

SEQ ID NO: 200521 - DNA, 83 bp, Homo sapiens
cgagcgtcaatgggctggcatatgctgaatatgtcatctacagaggagaacagggagatgcacttatttacatggaaccagag

SEQ ID NO: 200522 - DNA, 83 bp, Homo sapiens
gggacggggaccagcagctgtcgccgccgctctcagctggtagcagtgtttgatgagcaggatccacatcacggaggtgatgg

SEQ ID NO: 200523 - DNA, 98 bp, Homo sapiens
gcgaattggagaaaaagttcagtgggaagcatgtcgtctttatcgctcagctgctggagccagttctgcttctcggcaaggagcgatttgctggtgta

SEQ ID NO: 200524 - DNA, 98 bp, Homo sapiens
ggcttggagaagtccagggcgacaacaaggaggtgaagattgacaagaacctggagcccgggcttcgggtgactgtgcgactgaaccagcagcagcac

SEQ ID NO: 200525 - DNA, 75 bp, Homo sapiens
gagctgtccctgctggaggagcgcttccgggctttgggggaccagatactatttgtaaatcgtcccgataagaag

SEQ ID NO: 200526 - DNA, 83 bp, Homo sapiens
gtggaataggtgtatcaagtaatggtgcaaagcctgaagtggatgccctaaacccacccaaattattgctggtgataggcctg

SEQ ID NO: 200527 - DNA, 73 bp, Homo sapiens
tgagagaaacccactgaagacgtctgcgtgagaatagagaccaccgagggtatttgtggtgcagcagattccc

SEQ ID NO: 200528 - DNA, 51 bp, Homo sapiens
gacctattatgagaggcttccatatcggacagagaacaccccaatgattgc

SEQ ID NO: 200529 - DNA, 99 bp, Homo sapiens
aaattttacataagaagttacctttttcagggtcagcctgggccagtgggcccccaggggtacaatgggccaccaggattacaaggattcccgggactg

SEQ ID NO: 200530 - DNA, 82 bp, Homo sapiens
ggttcgaataaatgaaataaagagtgaagaagttccagcttttgggaggagaaggcagagcccccccaggctatgaatgccc

SEQ ID NO: 200531 - DNA, 83 bp, Homo sapiens
ctgtaccccaatggggtcccctttaaggtaactaggatttctacctcaaccgcgagacctatgcaaggacggtgtggaccaac

SEQ ID NO: 200532 - DNA, 83 bp, Homo sapiens
ccccctgcctgcccgcgcctagaccccattcagttcgaccttgaaactacaagagtgaatctgaaagttagttcaaaaagtca

SEQ ID NO: 200533 - DNA, 101 bp, Homo sapiens
agagaatactgtgtggctgacttcaaaagagtagtggattttctgaaagagaaatgatcaagttccagatgatcctcagtgagggataccatcctttcaat

SEQ ID NO: 200534 - DNA, 100 bp, Homo sapiens
gaccatcgaaaggagcaagagcaagatcaccgtgacatccgaggtgcctttctccaaaagtaacaacatgctgtaccccaaggaagacaaggagaaccgc

SEQ ID NO: 200535 - DNA, 88 bp, Homo sapiens
ctggaatgcaaacagatctggcaaaatttgggagacatgaggctgagctggttccgggtcctgacagtactgtccatctgcctgagcg

SEQ ID NO: 200536 - DNA, 83 bp, Homo sapiens
tctccgcgtcccgctcgctgggagagaggtacctctccttttccctctccctttccctaagaaatggatgaaaagaggctgct

SEQ ID NO: 200537 - DNA, 100 bp, Homo sapiens
gttttacattggctgttttcctcacattcctcaagcagacaggggcaagtgtccgagtggtgaatcagctacttacagagatggatggtctggaagcacg

SEQ ID NO: 200538 - DNA, 100 bp, Homo sapiens
aggggtaataggctggactcaagcaacggactcgatcctggtgttcgaggtggaggttaggcgggtgttttggggaacgagtttagtatattaaaatcac

SEQ ID NO: 200539 - DNA, 75 bp, Homo sapiens
cgacgtgctgtgcttactggtcggtcaaaatgcagatcttcgtgaaaacccttaccggcaagaccatcacccttg

SEQ ID NO: 200540 - DNA, 75 bp, Homo sapiens
gccccgcagaggaaggaagccggcgggcgggtggtggtcctgctccatgatgtccgtgatgtgagcgtggaggag

SEQ ID NO: 200541 - DNA, 75 bp, Homo sapiens
cacctcctcgccagcagccgtccggagccagccaacgagcgaaagcatccctggagaacagcctggaggagacca

SEQ ID NO: 200542 - DNA, 122 bp, Homo sapiens
actccctttaaccctttagctggcctaaggattgcaggaccctttgcattgatatgaaccatggacaagtatattctgctgccacaaagactgtaaagtgcttcatttcaacagctgaggca

SEQ ID NO: 200543 - DNA, 83 bp, Homo sapiens
aaaccacttctctacatcccatctcaatcagaattactagattttctctcaaactacgagtatcgcgcttactatggagcatt

SEQ ID NO: 200544 - DNA, 98 bp, Homo sapiens
gtcaaggagctggacctctacctggcctacttcgtgcgtgagcgaggttctggcctataggaacaagacattttcagtaatggaagaaggagcttcca

SEQ ID NO: 200545 - DNA, 75 bp, Homo sapiens
caaagtgatcaatttcctaaaaggggttcggtccgagcccggtgggaggctcccggagcgcagcctgggcccagc

SEQ ID NO: 200546 - DNA, 75 bp, Homo sapiens
cttcaagagactgatcaaattgtgagaggaaaacagcctacccgctgatgcagtgaataacgcagctggctttgg

SEQ ID NO: 200547 - DNA, 84 bp, Homo sapiens
cttccattatgggaataggaccaattccagccataaagcaagctggtgcaggttcgcagccctgtcaaccagctccgagccggc

SEQ ID NO: 200548 - DNA, 93 bp, Homo sapiens
cgacccattgaaaacaaggacgatgcatttacagattctctacagaagagtcaagtaccattggccaggatcaaacgcttatggaacgtgata

SEQ ID NO: 200549 - DNA, 96 bp, Homo sapiens
agcatccccctcaccaatttagccattccagttggcaaacatgaattgactgggcataaagtagctgtgaagatactcaatcgacagaagattcgg

SEQ ID NO: 200550 - DNA, 100 bp, Homo sapiens
gcccgggagacccagaagcacaagaaggaccttcacccattgtttgatgagacctttgaattgcccagtcccagggatccatcaccctaaaaatcatccc

SEQ ID NO: 200551 - DNA, 50 bp, Homo sapiens
gaccgttacaaatgcctcatctgcatggtaatgctggaggatggaagaag

SEQ ID NO: 200552 - DNA, 96 bp, Homo sapiens
ctggattggtgaaactgaatcacaggagatatttccagactatagggtatgaccccatcatttccccagaggtctcggcctcctttggtgttcagc

SEQ ID NO: 200553 - DNA, 100 bp, Homo sapiens
ctgacggagtatctggaaagctcgggacaggatgaatgtggcagatcagattgcatttcaagctgctggtggattaacagcccttgaacacatccttcaa

SEQ ID NO: 200554 - DNA, 100 bp, Homo sapiens
aaatctgcaccgtggacccgtgccacaagcctggtggagttgacagaagagatcctgaagctgctgatggaactggtcttccgcctggtgtgcaatgggg

SEQ ID NO: 200555 - DNA, 82 bp, Homo sapiens
cggcagctgaggagactccggcgctcgccatggccgacgaaaagcccaagctggagatggagctgaagatgctgaagtctca

SEQ ID NO: 200556 - DNA, 83 bp, Homo sapiens
tcggtggcagggcctgactgctgcggaggcctcggcaatattgattttagacagcaagagtgagccatggagctacgtgtggg

SEQ ID NO: 200557 - DNA, 75 bp, Homo sapiens
aaaggaggcttatgagagagaaaaaaaagtgtgggaagagcatattgaaaagtatggattcccacctgatcttac

SEQ ID NO: 200558 - DNA, 80 bp, Homo sapiens
agcctacacgtgaaacatgccagggtatagcaggctttgtgactgtggtgtcctgtggtctttacaagctaaagtacaga

SEQ ID NO: 200559 - DNA, 51 bp, Homo sapiens
gccgttgcctccagcaccacttctaatgcttgtactcccagagtacctcat

SEQ ID NO: 200560 - DNA, 83 bp, Homo sapiens
cgtgtttttcgggagagcaaaggctgtgtctacggcagcctggggatatagtcaccgacgatgagggcgcacctgctgtcctg

SEQ ID NO: 200561 - DNA, 75 bp, Homo sapiens
aagctatgtactctagcactgacacgtttacccacttgaaacagaacagcatgatcctctctgctgccatcttca

SEQ ID NO: 200562 - DNA, 100 bp, Homo sapiens
gccagcgagccatcatccaacaccgccatcctttcattgagtgggctcggccaccccaaccttctgagcccatggatttcagaaaattatctacattcag

SEQ ID NO: 200563 - DNA, 82 bp, Homo sapiens
agcccttcgcctgcacctggccaggctgcggctggagaattggcagagggggtcgatttgggaggaaaggtgtggctataaa

SEQ ID NO: 200564 - DNA, 100 bp, Homo sapiens
gaaaatcctcactctgagtacggtctcacagacaacgttgagaattaccaccagccagccattttgaattcatcggctcttcggcaaattgcagaaggca

SEQ ID NO: 200565 - DNA, 76 bp, Homo sapiens
ctctctgctgcggcgcggggaccgctgtgctctcggtatgctatacctccggagcatggaaaacgacttgaaagac

SEQ ID NO: 200566 - DNA, 100 bp, Homo sapiens
tttctctgagtcctgcccttctgtatcctgtgaaagacctgtcttgagaaaaggccagtgttgtccctactgcatagacggagtttcgctcttgttaccc

SEQ ID NO: 200567 - DNA, 100 bp, Homo sapiens
cagcctttgcggggcttagtgaggctcccgatggcgggagctccaggaaagatattaacctggctgcagagccaaaagtgaaccgaggaaaagcaggtgt

SEQ ID NO: 200568 - DNA, 87 bp, Homo sapiens
aagcctgaacaggcagggccagacccaggtcttattagtaggtaagaaacagctgctcctccacctccaccccagccccatggagct

SEQ ID NO: 200569 - DNA, 100 bp, Homo sapiens
gaatgggagcgcgcagggcgcacagatcggattattgcatcgagcttttagtgtcttcttattcaacaccgaaaataagcttctgctacagcaaagatca

SEQ ID NO: 200570 - DNA, 75 bp, Homo sapiens
cgcccatgcactaccacctgcgggagatcatcatctgcacctaccgccagcctttggcctgggagaccttcccaa

SEQ ID NO: 200571 - DNA, 50 bp, Homo sapiens
gagttcttgggcacgttcatcttgattgctcattggtgggcagtattact

SEQ ID NO: 200572 - DNA, 98 bp, Homo sapiens
caaaagaggtccagcccctcagagggattgtgtccacctggtttattcagtcaccatgaagctgctgctgctgcacccggccttccagagctgcctcc

SEQ ID NO: 200573 - DNA, 50 bp, Homo sapiens
ggatatggttaggtgtcagcagcggtctcctacggtagtgtgcagcttat

SEQ ID NO: 200574 - DNA, 75 bp, Homo sapiens
aagtctgcaatcttaccagggaggccaagcgaccacccaaagaagctgcttttctaacccaaactgtatgtcttg

SEQ ID NO: 200575 - DNA, 90 bp, Homo sapiens
gacgaggagcagggcctgactgcgcaggcctcattgctacgatttcagagtaccctggtaatagctgagcatgcaaatgattccctagca

SEQ ID NO: 200576 - DNA, 100 bp, Homo sapiens
catgtcagggaacttgctgagcaactattcaaaaatatcgtactgagaagcactccacaatgccagactcacctgtggatgtgaagacgcaatctaggct

SEQ ID NO: 200577 - DNA, 122 bp, Homo sapiens
agaaggagctggcggacatcactttagaccctccacctaattgcagaattccagtgctgaccatcgagtccgactggacctgggcctctgggacaaattcagtgaactggccaccaagtgca

SEQ ID NO: 200578 - DNA, 98 bp, Homo sapiens
gacaagccttcaaggagcccagggcattggggctttccagctctcacagaaccttcagcatccccagctgccggtcttggcatcttcgaagtaaggag

SEQ ID NO: 200579 - DNA, 100 bp, Homo sapiens
tgacgatgtttttattgcatgtggaccagaaaaatttcgttatgcccaagatgactttgtcctggatcatagtgcaggagtatgtctccaaaccttttaa

SEQ ID NO: 200580 - DNA, 75 bp, Homo sapiens
cctactatctgtctggagaagaggttctggcttcagacaccctgaccaccctgtgtgccagcagcagtggtgatg

SEQ ID NO: 200581 - DNA, 96 bp, Homo sapiens
aagtggcgaaggagccggctccaagtcaccttcaggccattcagaggaggaaagagaggggaatatgaagtcagccaagccccaagtgaaccacag

SEQ ID NO: 200582 - DNA, 76 bp, Homo sapiens
agcacataaattctttggagctgaaaatagcgtgaacttgaaggaattgaatgatctggcacgggaccctccagca

SEQ ID NO: 200583 - DNA, 98 bp, Homo sapiens
ctgcctcagcctcctgaatagctgggattacagcaggaagctaggaaacctggcagtgccagctgatgagaagtggaaagcggtgtttgacgaatgtt

SEQ ID NO: 200584 - DNA, 75 bp, Homo sapiens
gaagagggcggagcggagacgggagtattatgaaaagatcaggcgtcagtggctgcaggaggccatgtcggctgc

SEQ ID NO: 200585 - DNA, 90 bp, Homo sapiens
agtggaagccaagtctatatttgatgatgatatggcatgaacttgctgtgcataaaaagaaaattgaagaagtcgaaacctggttaaaag

SEQ ID NO: 200586 - DNA, 74 bp, Homo sapiens
ggcctctctggcagcagacatcagccacgcatctgaccttgttgattttgcaagaacgaggctcaaggatgtga

SEQ ID NO: 200587 - DNA, 104 bp, Homo sapiens
cctgcgtcctttttcgtttttcggatgatgccttcaatactacctttatttccaccatagacagccgctcaggaagcaatcttgcatgcgtctggaaatggcac

SEQ ID NO: 200588 - DNA, 98 bp, Homo sapiens
cctcctcaacgaatacggcgacgacatgtatgggccagaaaaggtaaatgacctccgaaaagaattagaaagtcgagctcttagttccaaaggattaa

SEQ ID NO: 200589 - DNA, 90 bp, Homo sapiens
ttcctgtttgtggataagacagtcccacagtccaggtgatgatgaacagtctacacagatggctgcaagttgggaagatgataaagttac

SEQ ID NO: 200590 - DNA, 50 bp, Homo sapiens
cttctgatagcaactttaatgtgtaagcctgatactgtgattgcaaatgg

SEQ ID NO: 200591 - DNA, 100 bp, Homo sapiens
gtgcagagattgaaccttgggaagatgctgattaccttgtttacaaagtcacagatagatttggctttttacagctaagtgctatttatggaggtaccta

SEQ ID NO: 200592 - DNA, 100 bp, Homo sapiens
ggcgctgctcccgggggcgacgggaaattatcagttcattgcctagcatagtaaatgacaaatatggaaggaaggtcctattgtacttactaagccccag

SEQ ID NO: 200593 - DNA, 100 bp, Homo sapiens
gaagaataagcacaagagaaagaaggttaagctggctgtcctgaaatattataaggtggaagtgggctaactggagctaaacttcaggactgtatgagcc

SEQ ID NO: 200594 - DNA, 75 bp, Homo sapiens
ggaggagcagtcgcagctgctttccgaggaagccggtgttgccgagctcctgagaaccatgtctatgcccaaagg

SEQ ID NO: 200595 - DNA, 96 bp, Homo sapiens
cagatcatccatgtgagtgaccatgcagcaaaagaaggagggtcctctcagtgattaagcatttggaggctacttaagtgaagtagtagaagaaaa

SEQ ID NO: 200596 - DNA, 100 bp, Homo sapiens
ggcacccctgggggatcgggggcggcggtggcgccggcggcgggacaggaaaccacccctactcctaatcccccgactacagaagaggagaaaacggaat

SEQ ID NO: 200597 - DNA, 90 bp, Homo sapiens
cgagcaaaactttgggcttgcaacttttgttaccaaaggaatcagattgtaaatcctcacttattgaaagatcttaccgagcggggccta

SEQ ID NO: 200598 - DNA, 100 bp, Homo sapiens
aagtcacaaagggaggagctggactccatcctcttcctttttgaagttcttgcatacactgagggacttcacggaaaatggatgttcagcgagatacgag

SEQ ID NO: 200599 - DNA, 74 bp, Homo sapiens
attccctatggggaccagaggctgaagcccaagcacacttggaagttcatgaggctaagcctgtgccagaaaat

SEQ ID NO: 200600 - DNA, 82 bp, Homo sapiens
tccgtccgccgccaccacccactccggacacagtaatagctcttcaagtctgcaataaaaaatggcctccaacaaaactaca

SEQ ID NO: 200601 - DNA, 82 bp, Homo sapiens
ctatgaagactctcagggcgcgatttaagaagacagaggttcgtgctggccgtgggcagcgccgtctttgatgccatgttca

SEQ ID NO: 200602 - DNA, 100 bp, Homo sapiens
gtccagccagcatggaaccaaagcggatcagagagggctaccttgtgaagaaggttctctacttaaaagacaatgactactgatgaaggtgccaagaaca

SEQ ID NO: 200603 - DNA, 82 bp, Homo sapiens
tatccgtttgttcaggaaccaccagtgacagattcctctgtgacgagggtgcaggtatctctggggactacatcgatcgcgt

SEQ ID NO: 200604 - DNA, 90 bp, Homo sapiens
acaagcccatggagtccctggacttgaaggacaagaccaaggtttggtgcacctcgatttggaggaagtagggcagggcccttatctgga

SEQ ID NO: 200605 - DNA, 82 bp, Homo sapiens
ggccccaggtgtaagcgcagaaagcaggcgaacccgcggcgcaataacgatagcctgggctggaagctcttctacgtcacag

SEQ ID NO: 200606 - DNA, 74 bp, Homo sapiens
gaaaatcggtgaagagaggttttgaattcacgcttatggtagtggattacatgcagcaaactggaggtcaagca

SEQ ID NO: 200607 - DNA, 75 bp, Homo sapiens
cggctgcaccctgaccgatgggaccctggctgagaagaaagccaaggtcattgcaggaatgaatgctgtggaaga

SEQ ID NO: 200608 - DNA, 82 bp, Homo sapiens
gggagctggacggcgagcgcgagcggcgcgagaaaaatctccggcctgtgaaactgtgaggggattcggccaagacgtcctc

SEQ ID NO: 200609 - DNA, 76 bp, Homo sapiens
atgggatctgcagagttcgggcgagaggaggcgagaggcgcaaagaaatggtggagtcaatgaagaaagtagcagg

SEQ ID NO: 200610 - DNA, 100 bp, Homo sapiens
ccactattttcttcctgcccctcgttgatgagagcattcgaagtgacctcagcagggcatccaggagttaaagttcctcgtaattttcgcttgttggaag

SEQ ID NO: 200611 - DNA, 74 bp, Homo sapiens
cttcaagaagggggaccaggcctaccttactgcggagctggagtttgttcagatcatcatcatcgtggtggtga

SEQ ID NO: 200612 - DNA, 90 bp, Homo sapiens
cgaggaggaaggcgaaggcgggccagcagaggggagcagagatacccctgggggccgcgtttactgggactatgccctcgtggtgccctt

SEQ ID NO: 200613 - DNA, 75 bp, Homo sapiens
aaggaagaagtgggctgaagaatttaatgatgaaactaatgtgagaacgctgtaaatgtaagcctattagagcta

SEQ ID NO: 200614 - DNA, 90 bp, Homo sapiens
gaggaaaacaacttcgagggcagatgatttaaatctaccacccagctgtagttgaatctacaatctgctcagggatttatactcaatgcc

SEQ ID NO: 200615 - DNA, 96 bp, Homo sapiens
aagagctgcaggccttcaacagccttattaggattaaactgcaaatatctcatgaagctgctgcctgtatcactggtctccgggcagccatggagg

SEQ ID NO: 200616 - DNA, 83 bp, Homo sapiens
gctctacccgcagagtctgatggcagcggccactctgaggacgccaactcagattatttgcaatgtcaggctttgaaaactta

SEQ ID NO: 200617 - DNA, 100 bp, Homo sapiens
ggaaaactcacacccggtctggacacagaaagagaactcccaagtcatggatggtgagggagaagtacatccgccccttgacaactgaggaatgggtaga

SEQ ID NO: 200618 - DNA, 82 bp, Homo sapiens
gtctccgcgttcccagcccgggtccccgcgttcacagccccagcgcaggtgctggagaatctggtaaaagcaccattgtgaa

SEQ ID NO: 200619 - DNA, 74 bp, Homo sapiens
tctcgaggctcaaggagacaagttcgcatgtcccacatgaaatcaataaggctgctttgctggctctgcaagaa

SEQ ID NO: 200620 - DNA, 97 bp, Homo sapiens
gggcgcaggaccggccgcagtgccacttcgacatcgagatcaaccgggagccggagtcctcgaatgccaccttgctgaccaatgcagagaagattgc

SEQ ID NO: 200621 - DNA, 74 bp, Homo sapiens
gaaaagagccctggaatatgaagcaacatgagatggtggatgaacccacagatgaagtggtgaagagagcctgc

SEQ ID NO: 200622 - DNA, 48 bp, Homo sapiens
tgtggatgaatttgcttttctggaagttgatgcggatgaaattaaaag

SEQ ID NO: 200623 - DNA, 100 bp, Homo sapiens
agcaaaactccatgaagaagaacaggaaaggaaacgcatgcaagctaaggcagctgagaacttctttcaaatagttagcaaccttctagatgaagaaaac

SEQ ID NO: 200624 - DNA, 74 bp, Homo sapiens
tgatgatgtgcgggttcaggaggtacccaaactgaagtctctagtgatccctgaaaagttccagcatattttgc

SEQ ID NO: 200625 - DNA, 59 bp, Homo sapiens
gaggcctccccagccacgtgaaactatggtgtcctcagaccgaagccaactttcctttc

SEQ ID NO: 200626 - DNA, 50 bp, Homo sapiens
cggaaaccggtagcgcttgcagcatggtggtccgggactacaatcttcag

SEQ ID NO: 200627 - DNA, 83 bp, Homo sapiens
gtggagcggctgaagggcatgtccctgcttgtcagggctgagagcgacggaggaaaagctgaccagcaagaagaacgtcggag

SEQ ID NO: 200628 - DNA, 82 bp, Homo sapiens
gggagctggacggcgagcgcgagcggcgcgagaaatctgttctctggggaggcagtaaggggccgtggagctggcctcggcc

SEQ ID NO: 200629 - DNA, 78 bp, Homo sapiens
aggcctttgctggacagatgaagagtgacttgtttctggatgattctaagagctggcagagaggctgatgacatcgtg

SEQ ID NO: 200630 - DNA, 83 bp, Homo sapiens
ctggcactggccaaggagattgcgccatcatgaccgggtcctataacaacttcttcaggatgtttgatagagacacgcggagg

SEQ ID NO: 200631 - DNA, 100 bp, Homo sapiens
atcctcggggccccagaggccgcggacaccgacctggaggtgtcatggagaaactccagctgggcccagagattctgcagcgggaaaatccaaggcttat

SEQ ID NO: 200632 - DNA, 100 bp, Homo sapiens
atcaagtgctcgcccagcctgcacgtcgacgacaggtcagagttgcctctgaagctgctgccgctaaatatatcccaagccctggaaatggcattggaac

SEQ ID NO: 200633 - DNA, 100 bp, Homo sapiens
ggaggggactgggcggcctgggaccccgaagttgacctaatctgggagcctgcaagtgacaacagcctttgcggtccttagacagcttggcctggaggag

SEQ ID NO: 200634 - DNA, 100 bp, Homo sapiens
gcgcctcttcttagttgatgatttagttgattctctgaagtatggcatgcagctgtaccagaattatatgcatccatatcaaggtagaagtggctgcagt

SEQ ID NO: 200635 - DNA, 116 bp, Homo sapiens
atgaacgcacaggccgtcgctatgagcgggaccaccctgggcacagcaggcatcggagaaagtactgaaatcccaccttatgtgatgaagtgtccgagcaatggtttgtgtagcag

SEQ ID NO: 200636 - DNA, 101 bp, Homo sapiens
ggcgaaactcctgaaactgaaggcacagctgggtcctgatgaaagcaaacagaaatttgtgctcaaaacccccaaggctggagtgcagtggcgcaatctcg

SEQ ID NO: 200637 - DNA, 95 bp, Homo sapiens
ggagaccgggctggagccggacgagctgtcggtgtcttgggacaaggtgcgcattcctggtgtgctgcagcgattgggagtgacatactttgtgg

SEQ ID NO: 200638 - DNA, 101 bp, Homo sapiens
gacatgtctgagactcctgctcagtgtagcattaaggtgtccctggccagtgtccttccacctgtccacaagcatggggaacatcttcgccaacctcttca

SEQ ID NO: 200639 - DNA, 85 bp, Homo sapiens
cccatcccactgtgggtcagcgatgactttgaggaggccttggacaagattcgctatgagagcctgacagacccttcgaagttgg

SEQ ID NO: 200640 - DNA, 74 bp, Homo sapiens
cgagaacgagctgggagtggtggtagcccacagtgagtcagaggagtttgaaattcttgcttcaggccatatgg

SEQ ID NO: 200641 - DNA, 98 bp, Homo sapiens
gaaagcttgaattacctacatgctctctgaacaacggggcccagagctgatggcagacaatgtcagccactaacaacatagcccaggcccggaagctg

SEQ ID NO: 200642 - DNA, 59 bp, Homo sapiens
agtcctctgaaatgaacagcataactgtggatattcataaggagaaagtggcacgaaga

SEQ ID NO: 200643 - DNA, 75 bp, Homo sapiens
ccagcctctgcctcccagaaactcaggatgcagaaagcctcagtgttgctcttcctggcctgggtctgcttcctc

SEQ ID NO: 200644 - DNA, 83 bp, Homo sapiens
ctttggaaacgacgtcatgtgttaggaggatttgttggtattgaggaaaacggtgaaatcctttttggctgtttgccagcagt

SEQ ID NO: 200645 - DNA, 50 bp, Homo sapiens
caagccagcagctcgctcagtacaagagaaattgcaggtgctgcagtgtc

SEQ ID NO: 200646 - DNA, 75 bp, Homo sapiens
gaggaaagctgatgccacttcttcccaagacagtgaattagaagagaacgcccatataaatgtgaactttgtcct

SEQ ID NO: 200647 - DNA, 90 bp, Homo sapiens
gtgaagacatgcttacttccccttcaccttccttcatgatgcaacatctgaatgaattgatgacgaagaagtggctattagggtcaaacg

SEQ ID NO: 200648 - DNA, 75 bp, Homo sapiens
ttacggcttcacttgaggaagttcgcaaagaaaatgcatcatcccattcagatgaaacctgcagatagtgaaaag

SEQ ID NO: 200649 - DNA, 75 bp, Homo sapiens
gttcgagatcaccttcgagtgcatcgaggacctgtctgaaggctcggggccagcatggcccccacgctgcaacag

SEQ ID NO: 200650 - DNA, 96 bp, Homo sapiens
ggactcagcggtagcaacctcgccccttgcaacaaaggcagactgagcgccagagaggacgtttccaactcaaacttggatttacactgggcaacg

SEQ ID NO: 200651 - DNA, 90 bp, Homo sapiens
ccgtgtcaacgaatcatccacgcacctgcagctctgctgagagagtgcaagccgtggggagataccccggctctgacaggatcatgctgc

SEQ ID NO: 200652 - DNA, 83 bp, Homo sapiens
atggcggcgggctcggatctgctggacgaggtcttcttcaacagcgaggtggacgagaaagtgcagcctcccgcgacgatgcc

SEQ ID NO: 200653 - DNA, 100 bp, Homo sapiens
gtgtgctttttcaagggagctgataaagaacttcttcccaaaatggagtggtggacatgacaacagagtcaactgcatacagtggcatcaagacagtggc

SEQ ID NO: 200654 - DNA, 98 bp, Homo sapiens
tcccgctgtagcaaacgtccgcggcctctcagggctccaaacgaatcctgcggtcccatgagattgtgctgccccccagtggacaagtggagacagac

SEQ ID NO: 200655 - DNA, 90 bp, Homo sapiens
cagattcgcagtggtcgcttcttctccttgattccaactccacagagtgaccagagagaggacgtggctgaagacaccaaagatggggga

SEQ ID NO: 200656 - DNA, 75 bp, Homo sapiens
cttctacgaaaaagccctggtggagctgaaggttgcagcactgccagtgaaagatgtagaagataaacctgaaca

SEQ ID NO: 200657 - DNA, 100 bp, Homo sapiens
ttaacagatgccattccctctcacccaagagtcaagccagcgcctttagaaataaaacctttgccagaatgggaagaattacaagccccagttagatctc

SEQ ID NO: 200658 - DNA, 100 bp, Homo sapiens
ctagaggagttcttccaaaaaggagagaaagttggtgttggcaagatttgcttgtggtgcaacgagaaagggaagtccttctactccacagaagctgtac

SEQ ID NO: 200659 - DNA, 87 bp, Homo sapiens
cattcataactttgtggaagttttagatgagtatttcagccgagtgatacttacaaggagattacgatttcggttggaacgtgcacc

SEQ ID NO: 200660 - DNA, 75 bp, Homo sapiens
cagagatcctgagtgtctaccagaagtgcaaggacaagcaggctgctgctaaagatgtgtccagcgccccctgtg

SEQ ID NO: 200661 - DNA, 98 bp, Homo sapiens
aaccaccaataggccaggactgtcctgtggacagacggggtgagcctcttcttgtgtctggagattctgagttcgatacaagaggctgttttcctagc

SEQ ID NO: 200662 - DNA, 75 bp, Homo sapiens
ctgccgggactggtcagatgaacccatcaaagagtgcgatttggagtccagatacaggaccaatactttatctcc

SEQ ID NO: 200663 - DNA, 75 bp, Homo sapiens
ccggatctcattgccacgcgcccccgacgaccgcccgacgtgcattcccggttctccggaagaaacggcgtttag

SEQ ID NO: 200664 - DNA, 100 bp, Homo sapiens
ggggaggtgggtactacacaaccgtctccagccttggtctgagtggactgtcctgcaggagtttgaccactttctggccaccaagttctcgacagtgaag

SEQ ID NO: 200665 - DNA, 83 bp, Homo sapiens
catcagtttctggaagaagaagaagagcatgatcggcatgtccaccaaggcttgggcactgtttaaaggaaagttccgagaag

SEQ ID NO: 200666 - DNA, 90 bp, Homo sapiens
ccacaaaccgctgccagaaaagcacaagtgatccttatgtgaaatttaagctgaatgggaagacgctgtacaaaagtaaagtcatatata

SEQ ID NO: 200667 - DNA, 75 bp, Homo sapiens
caagctttgatcttggctcccacaagagagttggctgtgcagatccagaagcacccagtcagcttgaagagtttc

SEQ ID NO: 200668 - DNA, 80 bp, Homo sapiens
cctaccacgagaccctggctgaaccggcagatgaagcacatctcagctgagcagaaaaggcgcttcaacatcaagatgtg

SEQ ID NO: 200669 - DNA, 98 bp, Homo sapiens
tcgagttgcagcttacaacaagaaaaagaagcgtatggactactatgactctgaacagtggaaaacgaagctcattcccaacgtgcaaagccaaggca

SEQ ID NO: 200670 - DNA, 48 bp, Homo sapiens
agaggaagaggaggatgacccacttggctggagtgcagtggcgcaatc

SEQ ID NO: 200671 - DNA, 98 bp, Homo sapiens
agccgccagcgcgtttggctgtgacctgacggagtatctggaaagctcgggacaggatggtagtggaggacatgctagaggacgaggaagaagaagat

SEQ ID NO: 200672 - DNA, 100 bp, Homo sapiens
tgggggccacaaatgctccttctcctggagacgcaactcaaggctccatctactctttgaagcttctgcccagcttgcattgtttctaggagaacctgcg

SEQ ID NO: 200673 - DNA, 98 bp, Homo sapiens
agctacttaatcctactcagaagaacttgtacagagatgtgatgttggagaactatagcaatctggttttcttggggagtgaccttcacaatggcatc

SEQ ID NO: 200674 - DNA, 100 bp, Homo sapiens
gtctaatcttcaatacttgcatagatttcatgaacgtctactaccagatacgctccagccagctggaccgctccatcaaaggactgaaggagcatttcca

SEQ ID NO: 200675 - DNA, 100 bp, Homo sapiens
gctggaaaggaatgaggagttacagagggccgagaaggacaggatcagatcggggtactgtgcaaaaagtggttgttcttcctactaacaactctgtcag

SEQ ID NO: 200676 - DNA, 100 bp, Homo sapiens
cagcccttatacaaagacctttcggacttacagattccagtctgctgttagatgattattcatccaagttgagccccaaaccaaagagagccaagcacag

SEQ ID NO: 200677 - DNA, 98 bp, Homo sapiens
cgggcgtctccgccggctactgccgcttcagttctcccggtgtggccacgagtcgggcagccatgttgttcagttctggagtcttttggatgggcttg

SEQ ID NO: 200678 - DNA, 97 bp, Homo sapiens
gcccacgtaccaggggctgtcttgctggaaggggtctgtgtacatcagcaactttcaaacccattttatttggagaaaatgtactctctggatgcct

SEQ ID NO: 200679 - DNA, 100 bp, Homo sapiens
ctgggttctattttccctcctcaaactgactttgcagccacggagagctcagcaaaacccagcagctcagattcctgccaggcagcgggagattgaaatg

SEQ ID NO: 200680 - DNA, 90 bp, Homo sapiens
cgcagccccccaacatcctgctcctgctcatggacgacaatttcgctaaggagtttgtgatcagtgatcggaaggagctggaggaagatt

SEQ ID NO: 200681 - DNA, 100 bp, Homo sapiens
atgggatgtgtatggtcccggaaaagcagtgcctgtaggaggaacaacggtttcgctctttggaaaatacggtgaacacttgtcctgctccttcaccttt

SEQ ID NO: 200682 - DNA, 83 bp, Homo sapiens
gtcgggcctgtggaagaagcgccgcgcacggacttcggcagaggtgactgtctctgtacaaccagcttcaaagtgataatcgt

SEQ ID NO: 200683 - DNA, 100 bp, Homo sapiens
gtcgacatgttccaggtcccggatagcgagggcggccgcgccggctccagttacagaatgtctgaaggggacagtgtgggagaatccgtccatgggaaac

SEQ ID NO: 200684 - DNA, 75 bp, Homo sapiens
cagccagatccaggagacaatgcgtaaattcacagagaaacacgaatgggtaacaacagaaaatggcattggaac

SEQ ID NO: 200685 - DNA, 74 bp, Homo sapiens
gagagacctccatggtccatgaactcaaccggttgctacaagatcaccacggttttcagccatgctcagacagt

SEQ ID NO: 200686 - DNA, 134 bp, Homo sapiens
gcggatcaggatcggaagcctgcgtaactttctcccttgatccgggagtctttccactggacagaatgttgctgcgggatgtaaaagctcttaccctccactatgaccgctataccacctcccgcaggctggat

SEQ ID NO: 200687 - DNA, 100 bp, Homo sapiens
atggctggagccagtgtcaaccgagtagtgtctcccggacctcttcattgcctaaaaggactactgagcccagccaggctgtatgccattgctgccaaag

SEQ ID NO: 200688 - DNA, 75 bp, Homo sapiens
ccaccatgtcagacgcagccgtagacaccagctccgaaatcaccaccaagatatgcacccaatgtccagggagcg

SEQ ID NO: 200689 - DNA, 100 bp, Homo sapiens
agccgactacatgacagccaagaacaacgtcgtcatcaactataagagcaagccatgggccacagccaggaccggctcaccaccttccaggagaaccaag

SEQ ID NO: 200690 - DNA, 100 bp, Homo sapiens
aggagatgtactgtgcttggctggaaaaccccaaaagtgtacataagatcctatagcaatggaactcagcgatgcaaatctgcaaacactaacagaatat

SEQ ID NO: 200691 - DNA, 98 bp, Homo sapiens
ggacaacgcgtacgagttcaacctcagcgctctgaattcatagccctgatgaagcaagttactctgctctcctaataaatgcaagaaaatgaccttgg

SEQ ID NO: 200692 - DNA, 96 bp, Homo sapiens
ttggtagcagcgggtgacatggaaggggcagtacaagcttacgtctctgctcttcagtacaatcctggtttggattcaggatttgttcctagtgtc

SEQ ID NO: 200693 - DNA, 90 bp, Homo sapiens
gaaaaactccaacagcttcatatggacagatggacttcaaatgctgtttgtattccagagactaggctgcgaagttgtgcccgatgtaaa

SEQ ID NO: 200694 - DNA, 75 bp, Homo sapiens
ggaggagcgccggaacgccgaggcccaggtggattctccacagttttcctcgtgcgtactcacggtggaatccga

SEQ ID NO: 200695 - DNA, 100 bp, Homo sapiens
gccctcaatgagcacatgaccagcttagcttctgtcctaaagctgctcatgtttcccacctggagaatgtgtcagaggaagaaatgaacagactcctggg

SEQ ID NO: 200696 - DNA, 82 bp, Homo sapiens
caggatctttaaaccaacacacagcagaacaactgagttcaagaatacagagttcaaatacaaggcagatccaaccatcccc

SEQ ID NO: 200697 - DNA, 100 bp, Homo sapiens
ataattcagtacgacctttagccacattgtcatatgctagtgatctctataatggttccagtatagtctctagtgattccagcagtctcagcagcactga

SEQ ID NO: 200698 - DNA, 75 bp, Homo sapiens
gaaactgaaacatacagtcagatctcaggaatggaaggctaaagaacgtgccaatggaatggagcttgatgggcg

SEQ ID NO: 200699 - DNA, 100 bp, Homo sapiens
gtgtccgaccgagagtcctggtgactttgaacatgctggtgccgctagccaagctgtcctgcctggggtgtgggccgaagatatgctcatgtggtgttga

SEQ ID NO: 200700 - DNA, 78 bp, Homo sapiens
agaacactttctcatgtccagggtcagattacaagatttatccaataatggacaagtcaagccgcacacgtcttgctc

SEQ ID NO: 200701 - DNA, 97 bp, Homo sapiens
atggaggaggagacagagttccttgagctcggaaccaggatatcaagaccaaatgggagttggaggagctttagaaaatgatgatccttccaaaatg

SEQ ID NO: 200702 - DNA, 76 bp, Homo sapiens
cacagagcagctgttgagcaccttcctaactgtaggacttttccagatttctcagaataaagtagcagttcttctt

SEQ ID NO: 200703 - DNA, 50 bp, Homo sapiens
cattggaccctcctcccaactgtagtagccggatcgagctgggagatgtg

SEQ ID NO: 200704 - DNA, 100 bp, Homo sapiens
ggcctactcaaatcctttctgagggttattattgcagcagaactcctaaaaaatgcagatgaattagtcaaacagaaaattcatcccacatcagttatta

SEQ ID NO: 200705 - DNA, 96 bp, Homo sapiens
ggcagcaaatatggaatatatgactgtgtacagtgccctgggcctgagggatgcctgccgctccctgccgcagtccatccagctctttcgggacat

SEQ ID NO: 200706 - DNA, 82 bp, Homo sapiens
ggacattattgcgcgtggaacggctgcttttggaagaccatggtgaatccgggcagcagctcgcagccgcccccggtgacgg

SEQ ID NO: 200707 - DNA, 80 bp, Homo sapiens
gctgcttagacgctggatttttttcgggtagtggaaaaccaggttttaaaatcaaagatgggaaaatcggagaaaattgc

SEQ ID NO: 200708 - DNA, 90 bp, Homo sapiens
ggagacggcggccttcgaggaggtcatgaaggacctgagcctgacgcgggccgcgcgggcagaggtggaggagacactgaagcgactgca

SEQ ID NO: 200709 - DNA, 74 bp, Homo sapiens
gcctttgacaacgcttccaagcattgctattacaactgtaagccaggagtggtacagtctgaaaatacagcctg

SEQ ID NO: 200710 - DNA, 50 bp, Homo sapiens
gtgaccccctggacatcctgatcgcagcagagcccacacgatgaagaccc

SEQ ID NO: 200711 - DNA, 50 bp, Homo sapiens
agacttcagctcagccagagtgggccaattcctgtccccccagcagcatg

SEQ ID NO: 200712 - DNA, 100 bp, Homo sapiens
ctccatcgcgcgcacggcagcctagcgcaatgaggcgggcagcactgcgtggcagggccgagctgctagcttcgacagtgagagctcgtgcccatctccg

SEQ ID NO: 200713 - DNA, 100 bp, Homo sapiens
agctggttggccctgtgatccctcaagactggtccacggagtgtatgaccacaaacagccatcaaggttgtgaactaaaggccgacaaagattatcactt

SEQ ID NO: 200714 - DNA, 85 bp, Homo sapiens
ttgttcaaagtggaccccaggggagaagtcggagcaaagaacttaccaccaagcagagtcacctaaggtcctgcgagtacaaggg

SEQ ID NO: 200715 - DNA, 90 bp, Homo sapiens
cagatttacaaactggccaagaagggccttactccttcacagatcgatatatttttgccatcatggatcagtttggagatatattagaag

SEQ ID NO: 200716 - DNA, 100 bp, Homo sapiens
ctcggccacctcaaggataatcactaaattctgccgaaaggactgaggaacggtgcctggaaaaggtagtcagatgcctccgcagccacccgggagccag

SEQ ID NO: 200717 - DNA, 74 bp, Homo sapiens
cagggttttttgaagaatcaaatattcagtgggatacaaatgttttttgctccactcaagcctgttagaatcac

SEQ ID NO: 200718 - DNA, 80 bp, Homo sapiens
cgcgaacgtgggcgtggggatggccaccagtttccggacagcttcgtgctggaaagggctattgcaagacacgaagtccg

SEQ ID NO: 200719 - DNA, 100 bp, Homo sapiens
tctttcccccctctggagacgggccggaacctcaagaaggaggtcagccgggtgctgtgcaagcggtgcgatcagattgatgaaaatctcaaactggctt

SEQ ID NO: 200720 - DNA, 75 bp, Homo sapiens
aaagagttgattgaaattatctctggtgctgcagctctgttggtcaaagaaaaagtgatgtatgaaaaagaggca

SEQ ID NO: 200721 - DNA, 96 bp, Homo sapiens
ttggatatagaacttaaagtaaaacaaggtgcagagaatatgatacagatgtattcaaatggatcttcaaagcgttttaccaacgaggatcatttg

SEQ ID NO: 200722 - DNA, 80 bp, Homo sapiens
ccatggccgccgccgatgccgaggacccgtgcatctcttccgactctcgggcaagtgcttcagcctggtggagtccacgt

SEQ ID NO: 200723 - DNA, 88 bp, Homo sapiens
ttaagagaatctcaagctgctaaggcatcatctctttcaacgtataaaatagcagaacaagatttttcttatttcttccctgatgatc

SEQ ID NO: 200724 - DNA, 78 bp, Homo sapiens
caagctcgtggcctgcctctgcgtgcgttttgaacgaagaatgtgatcagaactggtacaaggcagagcttaatggaa

SEQ ID NO: 200725 - DNA, 80 bp, Homo sapiens
tgtccatgagaaaaagcttggagataaagttgctttttactgcaccatcaaacaggatgactttaccgctcgtctctttg

SEQ ID NO: 200726 - DNA, 96 bp, Homo sapiens
gccccaccagcccagtccctcaaccctttcctggcaccagctacgtggtcctggacctgatggaaagcgacctgcaccagatcatccactcctcac

SEQ ID NO: 200727 - DNA, 50 bp, Homo sapiens
ggcagaggcacttatgcttgtcagaatgttatggaacagttcaatcctgg

SEQ ID NO: 200728 - DNA, 100 bp, Homo sapiens
ttgttaaggattccaagtaactcttatttgaagaactggacggggctggaggagaagagtatcccatggatatttggctattgctggcctcctatatccg

SEQ ID NO: 200729 - DNA, 98 bp, Homo sapiens
atttctccaaggatctgctgaaaaaaaggcaacagatggctccctgcaaagtgaggattggacgttgaatatggagatctgtgacatcatcaatgaga

SEQ ID NO: 200730 - DNA, 100 bp, Homo sapiens
agcagctcagcctggacctgtaccaaggcaccgggtccctcgcccaggtccccttggacaaatgggaacgggaggatgaaattgctactatggagtgcat

SEQ ID NO: 200731 - DNA, 75 bp, Homo sapiens
gtccagaaaccagagcaagttatcaaagagcttagcagtgtctgcaaaaacgaatcttttcctacaacctgttaa

SEQ ID NO: 200732 - DNA, 95 bp, Homo sapiens
gatccagcaaggtcggcagagcaaggggcttacgcagaaggacctggccacgccgccaccggcacggccaggccagcatggtggaccacttactt

SEQ ID NO: 200733 - DNA, 87 bp, Homo sapiens
cggccgccgaggggcccgcagtagctgcgctcccggggaaggagccccacagtccccaggtcgagcctcttaggcagagtttaacac

SEQ ID NO: 200734 - DNA, 98 bp, Homo sapiens
ccagtgatctcatgaggacaaagcaggtttgtaaagtcgatcttgcagtacacggagaacctggtggcttacaccagttacgaaaagaacaagtggaa

SEQ ID NO: 200735 - DNA, 100 bp, Homo sapiens
ccttccggcagcacaagaccaaagacaagcatgagatcgaccgcatgacgctgacgatggtacatccagacactgaaggaccacaggccccggatggtgt

SEQ ID NO: 200736 - DNA, 95 bp, Homo sapiens
cagtactaacttggcatgccgcaatggacatctccagtcaggctccatggtccccttctcgatgcgcatcttgcacgcggagcttcagcagtacc

SEQ ID NO: 200737 - DNA, 75 bp, Homo sapiens
cagcagcagtagtaccagcagtgacaggaggcctgtgcaacctgtgcccagacagggccaacaaggagcacatcc

SEQ ID NO: 200738 - DNA, 100 bp, Homo sapiens
ggaggccacctatgaagaagactgggaagtatttgaccctgagaatgcagatgctcttgctcaacttttgaccctggcacggtggatacagactgttctg

SEQ ID NO: 200739 - DNA, 100 bp, Homo sapiens
gactatccttatgcctctaactttttacagcctttgcctgcttggcctatcaagtcttgtgaaaatgccattgtgtgctggaaacctggcaagatggaag

SEQ ID NO: 200740 - DNA, 135 bp, Homo sapiens
gaagctgggagacactaacgaacgagccatgcgcatggctgacttctggctcacagtcagggagcctgagctggagccagggccccagtgggacctgacccaaagtctgaggtcaagctgggcccagagcctggc

SEQ ID NO: 200741 - DNA, 100 bp, Homo sapiens
cagatggcacttacacccgtggtggtggtggtgctgcagcaggtcttccagcttatccagaaggtgctgagcaaatggttgaatgatgcccaggttgtgg

SEQ ID NO: 200742 - DNA, 87 bp, Homo sapiens
gattcttaaccgctgacacaattaaacactgcagtggctactgcagcactggggtgtcagttgttggtccgacccagaacgcttcag

SEQ ID NO: 200743 - DNA, 100 bp, Homo sapiens
atatgcaatatgatgaggatgatgatgaaatcaccccggatttgtggcaagaagcatgctggattgtaatcaggagtgtgcactcacctagttaggccta

SEQ ID NO: 200744 - DNA, 75 bp, Homo sapiens
agatcttccaggacgagacgggcaagaaccggtgaaatgacaatggatgctctgttggctcgattgaaacttctg

SEQ ID NO: 200745 - DNA, 100 bp, Homo sapiens
gttacagaatgtgacacaaagatgcatgttttgcatgtcctttcttgtgtgatcgaaagagtcaacatgcaggtagtcaaaccacacactccattaataa

SEQ ID NO: 200746 - DNA, 74 bp, Homo sapiens
gcagtggtcgcttcttctccttggaaccaaatggcgagacaccatcatctttatacagagttgcagcagtactt

SEQ ID NO: 200747 - DNA, 104 bp, Homo sapiens
atgtatacaggtccggagtctcggggaagatcagagctgggagctggcacttggaactcaacaaatatcactgtgtgcccagtattctgcagacaaacgagaag

SEQ ID NO: 200748 - DNA, 99 bp, Homo sapiens
gcggaggcgttggagcgcggaaatctggaaccgggatggcgacgtctacactgagtcggaggcgaaggtcacagggattatggacccagaacagatgct

SEQ ID NO: 200749 - DNA, 75 bp, Homo sapiens
cagtggtggtggtgggggtagcaggtggataatattaatgcagctgtgatggatttgaaaaaaaagaagatccgc

SEQ ID NO: 200750 - DNA, 100 bp, Homo sapiens
tttttaaagtaggagagcctacatattcttgcaggcgagaaccactgtctctgatcaacgtgcggaagaggaacgtggaatctggggaagaagagctggc

SEQ ID NO: 200751 - DNA, 75 bp, Homo sapiens
gaggagagacagaagaagctggaggccggcaaagccaaggggccagtgtcattcaaagatgtggctgtggatttc

SEQ ID NO: 200752 - DNA, 75 bp, Homo sapiens
cctcccagtgacgggtctggagtgcgtgggggaccggctgttggcggaggactaccccaatggcacctggctggg

SEQ ID NO: 200753 - DNA, 100 bp, Homo sapiens
gctcctcaggttcagacccgaccgttatccagtcggttcgtggagaggagagggctttgttcgcgggggtcacagctctcatggctgcagctagcgtgac

SEQ ID NO: 200754 - DNA, 82 bp, Homo sapiens
cctacttccagaaaaagtgctcctgggactccaggataccaggtgagaagccctaccactgcaactgggacggctgcggctg

SEQ ID NO: 200755 - DNA, 101 bp, Homo sapiens
ggcggcggcaccagcagtaacaacagcgaggaagaagaggacgacgacgacgaggaagaggaggtttctgagatggagtttcactcttgtctcccaggctg

SEQ ID NO: 200756 - DNA, 95 bp, Homo sapiens
ctgatcttcgatgagctctcggattccttatgcagagtggccgacttgtgacattctgaaagttcccaaacctgaacctataccagagcctaaag

SEQ ID NO: 200757 - DNA, 83 bp, Homo sapiens
ccccccccgcccagagtcatggcggcagcagccgctctgagggcgcctgctcagcacttgcacctcctgcgccgccgcccccc

SEQ ID NO: 200758 - DNA, 101 bp, Homo sapiens
caaaagtagataatggacgccttatgacatctttgagattcctctcaacaggatttcctaagagagctgtgccgcagaatggaattcggcattgttcctac

SEQ ID NO: 200759 - DNA, 90 bp, Homo sapiens
tacgagctggctttaatcctgaaagccatgcagcggaattaaacaaccaccatgtcgagcaaaaaggcaaagaccaagaccaccaagaag

SEQ ID NO: 200760 - DNA, 100 bp, Homo sapiens
tgaagcagaaaggagtgatgaatcagcccatggcttacgctgcacttccatcccacggtcagaggcggccttagcaacatgctgttccagtgctccctac

SEQ ID NO: 200761 - DNA, 100 bp, Homo sapiens
agacttgctagttaggattttattactggcagcatgtatatcttttttgtgcatgcctaaagggctatctttcaggacacaaacggacaataaagacccc

SEQ ID NO: 200762 - DNA, 101 bp, Homo sapiens
caacactggacggtcaagagggtttgggtttatcctgttcaaagatgcagccagtgtggagaaggcttgtctggagcgggaaagactactgtgagcatggc

SEQ ID NO: 200763 - DNA, 83 bp, Homo sapiens
ggaggcctacttgcagcatattacctatcaggagaggaggattttttatcaagcagaaatgcatcgaacaacgagaatcaaga

SEQ ID NO: 200764 - DNA, 90 bp, Homo sapiens
ggagtagcaagtggccatggggagcctcagcggtctgcgcctggcagcaggttaaaccacagcttgaagaaaaaacaaatgagacttacg

SEQ ID NO: 200765 - DNA, 75 bp, Homo sapiens
caaataatgaaaaagttgttgttaaaattctcaagtggacgtgatgctgaatccaggcagtgccacttcgaatgt

SEQ ID NO: 200766 - DNA, 83 bp, Homo sapiens
gagcgcgcaggcctgccggggcggatgatatcatcaagttgaatcgaaaggaagggaagaagcagaattttccaagactaaat

SEQ ID NO: 200767 - DNA, 75 bp, Homo sapiens
cagttggaagcagccgatccagcctgcggagcctgtggggcagatacgacgacatattccacagagcgatccgag

SEQ ID NO: 200768 - DNA, 100 bp, Homo sapiens
tagagggtttgagtccgcatcgccacagctgaaggctgcgagggactaagagcagagacttgagagagacaagtttgataataaaacggtttcatttgag

SEQ ID NO: 200769 - DNA, 74 bp, Homo sapiens
aggattccaagtaactcttatttgaatctccggcctgtgaaactgtgaggggattcggccaagacgtcctcttc

SEQ ID NO: 200770 - DNA, 83 bp, Homo sapiens
ctggccacttgcttgggatcctttatcctggtcatcttctatttccaaactgctctgttaaaagcgaaaatgaaacaattgcc

SEQ ID NO: 200771 - DNA, 73 bp, Homo sapiens
agcttaccgtgtctccaatgacaaacgagatgtaaaagtgtcactgttatgctattgcggcagcacctcccga

SEQ ID NO: 200772 - DNA, 74 bp, Homo sapiens
cagtgacgaggacgaagtgtccgaggttcgttaccgtgaacgcatcaccattcttcgagggaatcatgagagca

SEQ ID NO: 200773 - DNA, 89 bp, Homo sapiens
ggaacaaccaagagcctgcccaggtggtctgccatgccccagggagctcccagcccgaaaatggcacagaaatggtatcaagaaacccc

SEQ ID NO: 200774 - DNA, 97 bp, Homo sapiens
ttcaaaatcagacctctgtggcagcattttttccagaacacaaaaggcgtggtgtccctcgtggccgttcacccctccaccgtcaacccgctcggga

SEQ ID NO: 200775 - DNA, 100 bp, Homo sapiens
aagaaaccacttatccaaatacttacatttttgacttgtttggaggtgttgatgaagaggagttgtacgcatgtcagagaggttgcaggctgttttcaat

SEQ ID NO: 200776 - DNA, 83 bp, Homo sapiens
ctgggccggagcaggcgaggtggccggagccgtgtggaccaggaggagcgctgcacccgagtgtacagccccccggagtggat

SEQ ID NO: 200777 - DNA, 75 bp, Homo sapiens
acataaagctacaaacatggagtttgcagtgaagacttagaaggttttgactccgtggtatcatctactgagaaa

SEQ ID NO: 200778 - DNA, 100 bp, Homo sapiens
ggtcagtcagggctctccgggctacatctggaaagaggccctccaacatgaagagggccagagtggagccgggaataactgggccaagggccactacaca

SEQ ID NO: 200779 - DNA, 51 bp, Homo sapiens
cctcactgtgctggctacagagctcgctgtccagaccaaaacgaagaagac

SEQ ID NO: 200780 - DNA, 96 bp, Homo sapiens
tgcggatttgcgaggcgcgccctggagctgctagagatccggaagcacagccccgaggtgtgcgaagccaccaatttaaggaagaaatctctaaac

SEQ ID NO: 200781 - DNA, 73 bp, Homo sapiens
aacaaatacttggcaaaaggaggctcggaaccttcaacaactagtactgcttcaaattatccagatgtgttaa

SEQ ID NO: 200782 - DNA, 98 bp, Homo sapiens
ggagctgccaggctctggagggcgccccggaaaccatgggaaggatcgagatcgagaccgggatcgtgaagatcggtctaaagatcgagaccgagaac

SEQ ID NO: 200783 - DNA, 102 bp, Homo sapiens
aatggtctttttgttcaagataaagtgattttttgcctttgttgattaactggacaaattcagtatatcctttcgggctctgatgacttcaacctgtacatg

SEQ ID NO: 200784 - DNA, 90 bp, Homo sapiens
gtggggaggaagaggaggaggaagaagaaggtgatggtgaggaaactggagttagatattttacccttacaagaagcaaatgctgagctg

SEQ ID NO: 200785 - DNA, 82 bp, Homo sapiens
gcggattcgccgaggcaccgaggcactcagaggaggtgatccgcaggggctggctgaccatcaacaacatcagcctgatgaa

SEQ ID NO: 200786 - DNA, 50 bp, Homo sapiens
gctcgccctccgacgctgctcagaagaggatgtggagaactttgacgtga

SEQ ID NO: 200787 - DNA, 100 bp, Homo sapiens
agcgagcgctgcgaggtggcggcctgagatattgtactccaagatacttggattacgaagatttggagcgcaagtactggaagaacttaacttttgtggc

SEQ ID NO: 200788 - DNA, 75 bp, Homo sapiens
gtgggacacaggcaagacgtcgaggctactgcagcactggggtgtcagttgttggtccgacccagaacgcttcag

SEQ ID NO: 200789 - DNA, 98 bp, Homo sapiens
acatgaatatgcagctcctgctgatactatactggcaattgctggagaagattttgcaattgttgcttctgatactcgattgagtgaagggttttcaa

SEQ ID NO: 200790 - DNA, 50 bp, Homo sapiens
cacaagattattccaagcaacagaatgtgatctgtgaaaatggttcgcta

SEQ ID NO: 200791 - DNA, 100 bp, Homo sapiens
gaagagaaagaaaatttgcccagtgactacatggtacccattttctcaggacgatttgataatgggctgcattaaaagtaaagaaaacaaaagtccagcc

SEQ ID NO: 200792 - DNA, 90 bp, Homo sapiens
cgagggctaccacgttctgcggcttggagaacagccatctctggaagaagccatcagaatagcgtctagaatccaacaaggagaaacgcc

SEQ ID NO: 200793 - DNA, 83 bp, Homo sapiens
cagattcgcagtggtcgcttcttctccttgctaatgatgctggctactttaatgatgaaatggcaccaattgaagtgaagaca

SEQ ID NO: 200794 - DNA, 50 bp, Homo sapiens
tcgcatcttcaacccccatctgtctcagcggcggtggcagccgaggtgca

SEQ ID NO: 200795 - DNA, 75 bp, Homo sapiens
gagccgcatgagagccggacaaactcagacatcgtggagagcctggagaaagttcttgtggaattcagtcacaag

SEQ ID NO: 200796 - DNA, 75 bp, Homo sapiens
acttagaccatcagcagcactaggttataaagaggccttcactattctgtgtgatattttgatgatcttcagcca

SEQ ID NO: 200797 - DNA, 107 bp, Homo sapiens
gagctgtgcagccgcgaggaggcgcgggaggtgttcgagaacgaccccgagacggtgtggacactgccagcggctgcagccgacttggaatgacctgggagacaaat

SEQ ID NO: 200798 - DNA, 90 bp, Homo sapiens
actagcaggtggcagagctggggttcatctgtctccatgtgctcagagtggagccgccaccaaaatgcagattttcgtgaaaacccttac

SEQ ID NO: 200799 - DNA, 100 bp, Homo sapiens
cgaggacttcgaggctcgcatcgcgctgttgccactgttacaggcagaaaccgaccggaggcagcagctaccaagaaaccagcccctgaaaagaagcctg

SEQ ID NO: 200800 - DNA, 110 bp, Homo sapiens
agaggtggagaaagtggtggagattgtccgctcgagcctgaaggaccctgagaaagctttaccactcctgaaggccctaaaccccgttccagatgctctgactgggcaag

SEQ ID NO: 200801 - DNA, 82 bp, Homo sapiens
ggtcattctcgctaacaactgcccagctttgagtgctctacggaaacgtattcgagaggacagaaaggccaccacagctcag

SEQ ID NO: 200802 - DNA, 98 bp, Homo sapiens
cgaagagaggagtacgatgttttggacaagagacgtggccgggaccctgagatggggggaaagccgtatgtccgtggttcagaccctgtattaaagct

SEQ ID NO: 200803 - DNA, 100 bp, Homo sapiens
ggcgtatacaggaacaatattgatgatgtagtaagggaaagaatcatgtgatgtacagctttatataaagagacaatctgaacactccatcttagcagga

SEQ ID NO: 200804 - DNA, 75 bp, Homo sapiens
attgttaaagaaattgtcaatatttcttcagatgttttactgtgcctggctaactatagtcgagggggtgatggt

SEQ ID NO: 200805 - DNA, 101 bp, Homo sapiens
tgggattggagattccacccaaacttgctggtcactgggagcgaaaccttgaaagccatttgatgtcccctgctgagattccaggccagcctgtccctaag

SEQ ID NO: 200806 - DNA, 96 bp, Homo sapiens
ggagattatagctctgtatgagaaggacaacacctacttagagcagcaagatgggcatggaggcggtgatggcgctgctggaagccacgcctgaca

SEQ ID NO: 200807 - DNA, 110 bp, Homo sapiens
gggcatccttgactccatcgggcgcttctttggcggtgacaggggtgcgcccaagcggggctctggcaagaaatgcactcggtgatggaaagagagccactattctgaag

SEQ ID NO: 200808 - DNA, 150 bp, Homo sapiens
tcttgcagacagagtggccatgtatgtgcatgcatatacactctacagtgctgttagaccttttggctgcagtgtaatgtctgtggctaaggatgaagaaccagagagtatggatttccctgctcagcctccacctccagagccagttcc

SEQ ID NO: 200809 - DNA, 90 bp, Homo sapiens
tggccgcggtgttcattgcgcaactcaacaacgtagagctcaacgcaggacagattttcaccattctcccctgtccctgccttacccagc

SEQ ID NO: 200810 - DNA, 75 bp, Homo sapiens
ggcatcctgcacgtgcgcgacagcttgatccctccacagagccgagacggtgctgagataggatcatgaaggaag

SEQ ID NO: 200811 - DNA, 100 bp, Homo sapiens
atctacgctttttagaattgcacttggaggacaagccaagctacatcagtgatgtgggaccccctggtcgaagctctctggataacatcgagatggccta

SEQ ID NO: 200812 - DNA, 75 bp, Homo sapiens
cctaaaacaggatcagtaaagaaggaaaaagcagtaaagccagaggaagttacagaatgtctgaaggggacagtg

SEQ ID NO: 200813 - DNA, 75 bp, Homo sapiens
ggcctgtgccatcagtatcttaatgaagaaaaagcttgtggtgaaggggggcaaaaaaaagaagcaagttctgaa

SEQ ID NO: 200814 - DNA, 75 bp, Homo sapiens
ctccagtcgacactctcgcgcccggagggggattcccgaagtcttccgttttctgagaatgtgagtgctgttcaa

SEQ ID NO: 200815 - DNA, 75 bp, Homo sapiens
aatctgcccacccctcctgtaacccagcctgtttcacttcttgtgatgtcttggcattgcccattttcaagcagg

SEQ ID NO: 200816 - DNA, 98 bp, Homo sapiens
gctccccaggacctgagcaggaacctggagttttcagatcatggaagggaagtggttgctgtgtatgttactggtgcttggaactgctattgttgagg

SEQ ID NO: 200817 - DNA, 75 bp, Homo sapiens
ttttcaggcatcctcatataattaaactgttatggatgatgaatcagatgaaaaagaagcaaactcaccttaaaa

SEQ ID NO: 200818 - DNA, 127 bp, Homo sapiens
gaaaatactttgctgaagcaagaaaaagaagccctcaatcaccgcatcgtgcagcaggctaaggagatgacagaatcgcatggaagagagcaaagccttatttaaaaccatcatcacctacccctgg

SEQ ID NO: 200819 - DNA, 100 bp, Homo sapiens
ccatcctgctggtcagcactgcggctggtaaaagagtggctctgtttgaactgtcaaatgaaaagagctctaggcggggatctggctccagttccgtcat

SEQ ID NO: 200820 - DNA, 75 bp, Homo sapiens
ccctgccctcgtgtgcctcagtcagctgctcaccaaggtctcggcgcggaagatggccggcggcgtggacggccc

SEQ ID NO: 200821 - DNA, 98 bp, Homo sapiens
aagaaatctgccccaaagtcttagaactgcattaaagggcagtatttaaagtcagttggcaagcagtggaataagatttttgtaaagaaaccttgtgc

SEQ ID NO: 200822 - DNA, 83 bp, Homo sapiens
gcggccccgcgcagcccccggccgcagcgcaggcagcccagcagatgaggacggggacttggttgccttttccagtgacgagg

SEQ ID NO: 200823 - DNA, 100 bp, Homo sapiens
gaaaaaggaagagagcactgcagccagtgaaaccactgaggggtgagcccctccagactccgaataggagatcaagagtttgattcattgcctgctttac

SEQ ID NO: 200824 - DNA, 90 bp, Homo sapiens
ctacaacactggtgataacacaacatttcctgatgctgaagataaagatttgttcccgacaaggagttttctggttcagaccgtagacag

SEQ ID NO: 200825 - DNA, 82 bp, Homo sapiens
tacacagttccaggctacatgcaggacttggaggtggagcaggccctgactccagcaccaatgttgttatgaattattcaga

SEQ ID NO: 200826 - DNA, 100 bp, Homo sapiens
ttccaccagctcatgaaagacacgactttgaactggaagtatggcctctactctgccttcatgggctgcttcgtgtatttcttcctgggcacctcccggg

SEQ ID NO: 200827 - DNA, 82 bp, Homo sapiens
cagacatgcacggagactcagaatacaacatcatgtttgggaagggaggagcactggctgctgacattgacattgacactgt

SEQ ID NO: 200828 - DNA, 83 bp, Homo sapiens
atcagtagaccagagaccctggacagtgtcctcaaaaagagagacaagagagacacctccaacttcgacaaagagttcaccag

SEQ ID NO: 200829 - DNA, 132 bp, Homo sapiens
ttgcaatcgttggagggggctatactccatccaaatatgcagtggaaggtttcaatgacagcttaagaccatagtcttgagtttacttatgaggtcaattggaaataagaacaccattttactgggtctagg

SEQ ID NO: 200830 - DNA, 75 bp, Homo sapiens
agaaacctgttttttttctggagctgatcttagaaacctctgcacagaagtcgacactcaaagggggtggcaaag

SEQ ID NO: 200831 - DNA, 100 bp, Homo sapiens
cttagctgtgctcgcgctactctctctttctggcctggaggctatccagccttctccaggcagccaccaactaccacaacgggcacacaggccagctctc

SEQ ID NO: 200832 - DNA, 111 bp, Homo sapiens
ggagcttacccagcttaaagagctccacattcagaggaaccgcctcactgttctacgcccagaactagaggtctcaaaaagctgtcaaaaagccctatacttaacggagac

SEQ ID NO: 200833 - DNA, 100 bp, Homo sapiens
gaggagggacgtgaacggagtgaccaagagcaggtttgagaaagtgactgagaccgaagatgatagtgatagtgacagcgatgatgatgaagatgatgtt

SEQ ID NO: 200834 - DNA, 90 bp, Homo sapiens
cacctcctcgccagcagccgtccggagccagccaacgagcggtctctgaaggtcggcctgcagatctccctggactactggtggtgcacc

SEQ ID NO: 200835 - DNA, 83 bp, Homo sapiens
agaatttaattccttttcgaccttcaatccagttccaaggactccacgggtcatccgtccttggctcaggatttggagagctt

SEQ ID NO: 200836 - DNA, 88 bp, Homo sapiens
gattcgcagtggtcgcttcttctccttggaacttagtgatttggcccgtgaccctccagcacaatgttctgcaggtccagttggggat

SEQ ID NO: 200837 - DNA, 82 bp, Homo sapiens
tggactacagcgactcactgacggagaagcagtggctcaaggtgacgatgcctggggagcctgtggacgtggcatgtggcgt

SEQ ID NO: 200838 - DNA, 100 bp, Homo sapiens
gtcggcccctgcgccggcctcggccaccgagatcctgctgacgccggctaggacaatgcagatcttcgtgaagactctgactggtaagaccatcaccctc

SEQ ID NO: 200839 - DNA, 97 bp, Homo sapiens
ctgtccgccaggccctgcaggacctgctttcggagtacatgggcaatgtaccgattattcctactatcatgcaatattggaggctgcatttcagttt

SEQ ID NO: 200840 - DNA, 51 bp, Homo sapiens
ggagccaccagcctctccctgggaaatcctcattgacgattcaatttgttg

SEQ ID NO: 200841 - DNA, 100 bp, Homo sapiens
cggagatgcctgacgcatctgtctgaggagcggtcagtgacgcgatggagcgggcaaggtggtcctgccatcatggctgtcctctgcaaaggtctcctcg

SEQ ID NO: 200842 - DNA, 76 bp, Homo sapiens
ttccggatcaatccagatggcagccagtcagtggtggaggctttaaaggagatagatgaagttggggacctattgc

SEQ ID NO: 200843 - DNA, 83 bp, Homo sapiens
gaacgaggcaaggagctaaagcagcgtgcgttcagccctgggctcgactttctcaggatactgtccctctcccacagaggagc

SEQ ID NO: 200844 - DNA, 100 bp, Homo sapiens
ggcgatgggactaatgtgcggacgccgggagcttctgcgcttgctacagtccgggcgtcggggggatgcaggagggtggctgcgggaccactgccttcag

SEQ ID NO: 200845 - DNA, 100 bp, Homo sapiens
agacaagaaacattggaaaagaaatcctgataagaactgctttatcggtcgcttggttatcggacagaatggaatcctctccacccctgctgtatcctgc

SEQ ID NO: 200846 - DNA, 100 bp, Homo sapiens
gttgaagaaacttctttactggaagattcgtcagtgacttttcctgtggtaataataggcctttgaggattggaataagacagagctagactcattcctg

SEQ ID NO: 200847 - DNA, 81 bp, Homo sapiens
ggacggagcagcgcgtcgtggggcgagcggcagtgcctccggagccagcgtggtggccatagacaacaagatcgaacaggc

SEQ ID NO: 200848 - DNA, 90 bp, Homo sapiens
gaaagagtcaacagcagtggcaacaggcagctcctttgggacccagatcatcgggggccgggaggtgatcccccactcgcgcccgtacat

SEQ ID NO: 200849 - DNA, 100 bp, Homo sapiens
tcgaaggagggctctcctgtctgccaccatcctgggttgacaattctacacaaggaggtcatggaaaatggaagatttgcaaaatacaaatattttaccc

SEQ ID NO: 200850 - DNA, 98 bp, Homo sapiens
gcgaggcgcgccctggagctgctagagatccggaagcacagccccgaggtgtgcgaagccaccaacaggagcgagaacccgagcagcgccatgagcaa

SEQ ID NO: 200851 - DNA, 95 bp, Homo sapiens
tggctggtacacctattacacctcttaaagatgggtttacagagtggcctgaagcacgaggacaaacgtggaggtagcggatctcacaactgggg

SEQ ID NO: 200852 - DNA, 82 bp, Homo sapiens
cgggactcgggtttgggcgaccaggaggtgccggtggccgcgctcggacccggtgagcgagtgctgtgctttcatgggcctc

SEQ ID NO: 200853 - DNA, 96 bp, Homo sapiens
tttgatttcagaggaatgagattagattggtttaggttacaggacatggatttgattgacatactttggaggcaagatatagatcttggagtaagt

SEQ ID NO: 200854 - DNA, 124 bp, Homo sapiens
gaccgcgcgcagggcctgcagcgggagctggacggcgagcgcgagcggcgcgagaaagtttggtgcacctcgatttggaggaagtagggcagggcccttatctggaaagaagtttggaaaccct

SEQ ID NO: 200855 - DNA, 98 bp, Homo sapiens
gactaatctccttcagaatcaagcagtgaaaggaaaagttgctggagcactcctgagagccatcttcaaagccgattccacgactcttctttgcggga

SEQ ID NO: 200856 - DNA, 100 bp, Homo sapiens
aaagcaccatgacgtccatccatttcgtggttcacccgctgccgggcaccgaggaccagctcaatgacagatatgatgcttcctggtgtgtttagtggtt

SEQ ID NO: 200857 - DNA, 75 bp, Homo sapiens
gctgctgaagaataattctgagctgcttaacaacctgggcaacttcatcaacagccaagaagtatgatgcgtttt

SEQ ID NO: 200858 - DNA, 51 bp, Homo sapiens
gttgccctcaaagccctgcattccagaggtcacagaagatgtgaattcaag

SEQ ID NO: 200859 - DNA, 82 bp, Homo sapiens
atccaggcctcattggacagcattcgaggatgcctaaatcaaaggaacttgtttcttcaagctcttctggcagtgattctga

SEQ ID NO: 200860 - DNA, 73 bp, Homo sapiens
gttgccggtgccggcctagcgtcctggaattacttcaatcaagtatgttgagtcgatgggatgatagccagag

SEQ ID NO: 200861 - DNA, 75 bp, Homo sapiens
gtcgaatgattgacatgttagccgctaacagtgaccctgtgtgagcagcttcggaaggagaacgaggctctgaag

SEQ ID NO: 200862 - DNA, 98 bp, Homo sapiens
gcagatgagagtgaggatgacatgtcatcccaggcctccaagagcaaagccactgagattgaagatctcaaacagacaaatcatggcttggaagaata

SEQ ID NO: 200863 - DNA, 112 bp, Homo sapiens
gcagcgcccgcgccccgccgctgagccgtcgcggagccgcgcagccctcggagcacgacggccgaagccctgcagcccacgctacagccggagatgcagctcgagcacgggg

SEQ ID NO: 200864 - DNA, 51 bp, Homo sapiens
gttcgcggctctaacggggctttctacaagtgacaccacagccaaagccct

SEQ ID NO: 200865 - DNA, 97 bp, Homo sapiens
ctctcatctagcacactctttcttggggtggtaagttttcttcatacagttcttttgtgtgacaaactggatttcagcacggcgttagtggtttgtc

SEQ ID NO: 200866 - DNA, 119 bp, Homo sapiens
ccctgagtcactgcctgcgcagctccggccgcctggctccccatactagtcgccggaaacccagcgtttgctggcagaaccagttcctggcatcaaagccgaaccagatgagagcaacg

SEQ ID NO: 200867 - DNA, 101 bp, Homo sapiens
tggacccctactattgcaacaaggattcaaaggcaaatccaagcccaaccttctgaagcaggagaccagcagcctggcctgtgggctgcgcattctcttcc

SEQ ID NO: 200868 - DNA, 75 bp, Homo sapiens
tcctctgggagctcattaggaccatggtggatcgggcagaggcggcccctgggtagacagacacagcttgatttc

SEQ ID NO: 200869 - DNA, 100 bp, Homo sapiens
gagaattatggaaacctggtctcactggaaagatcaactgaaatcggcaaacttctgagttcctacttgcaaaagaaaagtgacgtggaggatcactcgg

SEQ ID NO: 200870 - DNA, 90 bp, Homo sapiens
acaagctgcggtacaactgtcctcaccagccctcgcctcccgagtcactgcagccaacccttcagcaagccacacccactcgcccgggtc

SEQ ID NO: 200871 - DNA, 90 bp, Homo sapiens
aaaaccagttggtggtgacaagaacggcggtacccgggtggttaaacttcgcaaaatgacaagctgtaacccttcacgtgccttaccttc

SEQ ID NO: 200872 - DNA, 75 bp, Homo sapiens
agctgtgctcgcgctactctctctttctggcctggaggctatccagcaaagtttcctacactactgaggtttagg

SEQ ID NO: 200873 - DNA, 89 bp, Homo sapiens
gaaaacagaaccgacttctccccttgtggaattacaagagatttcgactgtggaagatgccaacgtccggcggtacctccagctgacac

SEQ ID NO: 200874 - DNA, 100 bp, Homo sapiens
gaaagaagctacctgcaagctctatttttaccagatgctcttggctgtgcaggacttcctcaagtattccaaaaaggccagcctggatacatcagaatta

SEQ ID NO: 200875 - DNA, 101 bp, Homo sapiens
ccaactgtgaggtggaaaaaggatgatgcagacttgccaagaggaagtacttcgggatgacttcagacaaaacccttcggatgtcatggttgcagtaggag

SEQ ID NO: 200876 - DNA, 82 bp, Homo sapiens
caatacctccaagcagagatactcggggaaggtccacctctgtgttgcccgctatagacaatgcagatcttcgtgaagactc

SEQ ID NO: 200877 - DNA, 100 bp, Homo sapiens
taggcacgggcggctccgcagtgaccggactcgggggagggtgctggaaatgtaaacaagaatagactgttcattcctgatggcttttagtctatactaa

SEQ ID NO: 200878 - DNA, 100 bp, Homo sapiens
agctgatgataggggggttccatctcccaacttgtccatcacaaccagtgtctctgaagaagatgtctcaagtagatattctcgaacagatagaagtggg

SEQ ID NO: 200879 - DNA, 98 bp, Homo sapiens
cagactggtgacttcacttttgagtgcaactgccttccagattgcccaaggactccagatactccaaataatgaccctcgttgttctactagcaacaa

SEQ ID NO: 200880 - DNA, 74 bp, Homo sapiens
tattatgcaggtggtctgtgaagccacacagtgtccagatacgagggctggcatggctctatataagattgtcc

SEQ ID NO: 200881 - DNA, 117 bp, Homo sapiens
ccccggtctctcggacaccattttctgccgctggacgcaagagaaaaaatgatccctatgctcttgcatccctggtgtcctttgaagttaagaagatgccttatacagatcagccag

SEQ ID NO: 200882 - DNA, 87 bp, Homo sapiens
gcgcgccaaaaccgggacggacaagaccctggtgaaggaggtcgtacaggaaatcacattctgcctgatgaagatctggcttccttt

SEQ ID NO: 200883 - DNA, 97 bp, Homo sapiens
tgggctgcaacagcgtcctcatccagttcgccacacccaacggtcctggaccggatcaaaggctcactgctgccccggcctggccacaactttgtgc

SEQ ID NO: 200884 - DNA, 83 bp, Homo sapiens
cattaatgacaatcagccatcctggattggacagagatgttacagcccagatagctcttcagcctgcactgaagttcaatggt

SEQ ID NO: 200885 - DNA, 80 bp, Homo sapiens
agcttgccaccaaagacctgcgactttgctcagctggtaggtgagtgctgtcctcggctcactttcctcaagctctccgg

SEQ ID NO: 200886 - DNA, 73 bp, Homo sapiens
gaaaggaagaatgggttcctcacttgttattgaaatctctgaagaagaggttacccatgcagttgttactgta

SEQ ID NO: 200887 - DNA, 101 bp, Homo sapiens
atctgggtgccatcattttctggttctgttgatgaccctcttccaggttgtccttctattcaggccactcttcgttttccatgtactgcatgctgtttgtg

SEQ ID NO: 200888 - DNA, 75 bp, Homo sapiens
ctgcgtctggaagagcttcctcctcgatgcctacaaacagcccgccggggtcagcttggtcagcgtccattccag

SEQ ID NO: 200889 - DNA, 75 bp, Homo sapiens
aattggcaaaggaagagcaggagcacctcaggaagctggagggacagagcagaatgggctgatatagatccggtg

SEQ ID NO: 200890 - DNA, 116 bp, Homo sapiens
ccccatcattgggagaaatccccactcctccaagaaccaacccccaaattggctgggacaggtgactctgacatcattagaagcatgccagaacagactggtgaaaagtaaacctt

SEQ ID NO: 200891 - DNA, 97 bp, Homo sapiens
gggaaaaggaggataagcaagtcgaatttttgtcttacggtgtcatggagaaactccagctgggcccagagattctgcagcgggaaaatccaaggct

SEQ ID NO: 200892 - DNA, 83 bp, Homo sapiens
gtcgacagtcctcttcttctgacacagatttgagtttgacacccaaaactggaccatcaaatgttttcaaaattgtgaagatg

SEQ ID NO: 200893 - DNA, 75 bp, Homo sapiens
ctcgattaaagaggaaggggcagtgctcacatttctgggcagacatgcgtcgggatgtccaggaaatttttcgca

SEQ ID NO: 200894 - DNA, 100 bp, Homo sapiens
gagagacctgcgtacattcggggtgccagaaggaaagcataggtgatctttagacagtgactgagtatggatcatttgaacgaggcaactcaggggaaag

SEQ ID NO: 200895 - DNA, 98 bp, Homo sapiens
caacctggatgctcctgagggcggcttcgatgccatcctgcagacagctgtgtgcacgactggcacagcctccaggttggcgggctcatctgcgctgg

SEQ ID NO: 200896 - DNA, 75 bp, Homo sapiens
cggcggaagcggagagcaacagcgcgccggtctgtgtatgatgaccaaccaaatgcgcacaagaagtttatggaa

SEQ ID NO: 200897 - DNA, 100 bp, Homo sapiens
gcgggcccatgaggaggcctggggaccatgggctccaggatcaagaggctggcaggatgtacagtttttatcacaggtgcaagccgtggcattggcaaag

SEQ ID NO: 200898 - DNA, 82 bp, Homo sapiens
gggagctggacggcgagcgcgagcggcgcgagaaatgtgccatgcggagctgaatgccatcatgaacaaaaattcgaccgat

SEQ ID NO: 200899 - DNA, 50 bp, Homo sapiens
cttttacctacgttggcggccccagaagaaggacagaataacgggctccc

SEQ ID NO: 200900 - DNA, 74 bp, Homo sapiens
tcaagttgtgtttggagctgacgtgagcgaggttggtcatgtgctcggttcaaaaggtgatgacctatcaacag

SEQ ID NO: 200901 - DNA, 118 bp, Homo sapiens
ggagcagggcgaagtggttacaagtacagactctggagccagactgcctgggtttgaattgtgcggtttcagcctaaattatacagatctgtgattgaagatgtcattaatgatgtga

SEQ ID NO: 200902 - DNA, 96 bp, Homo sapiens
ccgggcccaggccccggcagcgcctgggacaagttcaaatctgaacatcaatgatgtactagggaactactcattgactcttgttgatgcattgga

SEQ ID NO: 200903 - DNA, 103 bp, Homo sapiens
gattccactcgtggtatgagagtggataatataatcaactcctctgcctgatcagtcgcatcgaatacattcattcaaagaacttcatccaccgggatgtgaa

SEQ ID NO: 200904 - DNA, 96 bp, Homo sapiens
cgaacaccgggtggctggtgcagccgaggtcttcgggaattccagcgagggaggcagccatgcataaagacgagtttcatctgaaatttttcatgt

SEQ ID NO: 200905 - DNA, 100 bp, Homo sapiens
gaaggatcaaggacggatgatgaagtagtacagagctgtaaaaaatgtgatcctacagaagtggagctggataatcagatagttactgctacccagagca

SEQ ID NO: 200906 - DNA, 82 bp, Homo sapiens
caggagactgaccgcaacggcagggatttttagactctgaggagcagttggagctaatccacattatggaaatggaaaccac

SEQ ID NO: 200907 - DNA, 75 bp, Homo sapiens
aagcctttaaatgcagcatctgcgatgtgaggaaaggcacctccaccagggaactctaatgatccaggacaaaga

SEQ ID NO: 200908 - DNA, 73 bp, Homo sapiens
ttgcagtgtcctaaatgtgataaaacatttgaccgaatagtggtctgatgatgagaacacagccacgcttacg

SEQ ID NO: 200909 - DNA, 80 bp, Homo sapiens
tgctgaagtaatgcaatggtctcaatctctggaaaaacttcttgccaaccaaacaaaccagtccagctacgggggcccag

SEQ ID NO: 200910 - DNA, 78 bp, Homo sapiens
gagagcttcaaggacgcagccacagagagaatggatcttggagaatgtctgaaagtccatgacctggctttaagagcg

SEQ ID NO: 200911 - DNA, 89 bp, Homo sapiens
atattcatctcaaaaacaaaattctgaactcaggacttggcaatccaagtggtaagaagttcagaagcaagcctcagttggcaaggtac

SEQ ID NO: 200912 - DNA, 74 bp, Homo sapiens
gtgcgcaaacttgacactcaccctgaccgaaactggcgatggaatatgagaggagccctctggaaagaaaagga

SEQ ID NO: 200913 - DNA, 100 bp, Homo sapiens
aaatgctccacctgtaagaacagaaaatcgtcttatagttgagaatttatcctcaagagtcagctggcaggggcctttatcatctgctggactcctggat

SEQ ID NO: 200914 - DNA, 100 bp, Homo sapiens
ctcaacatgaacaactacaaaggctatgaaaagaagccctattgtaatgcgaaatgcttccagactgcacacttttacttagaggacagtacatccccta

SEQ ID NO: 200915 - DNA, 82 bp, Homo sapiens
gcagatggcggatgccctgcagtacctgcagaaggtctctggagacatcttcagcaggatgataatgaagataattcaaatg

SEQ ID NO: 200916 - DNA, 99 bp, Homo sapiens
cttagctgtgctcgcgctactctctctttctggcctggaggctatccagcccaaaactggacaagccaaggcatctgtagccaaagtaaacaaatctac

SEQ ID NO: 200917 - DNA, 96 bp, Homo sapiens
caccatcaagggaccgcagggccggctgggagtgtccactcgccttccaccagcatggcaacgtcttcacagtaccgccagctgctcagtgactac

SEQ ID NO: 200918 - DNA, 74 bp, Homo sapiens
acttggcaagatttgatgctcttgtgctcagtgacatcattcagctgcgccaggaggtggtggtgtgcatgcgg

SEQ ID NO: 200919 - DNA, 75 bp, Homo sapiens
tgcggtgcctgagctgagtgaggccgaggccgggaggccgtgcccggagggggaacacacctgaaactagaggaa

SEQ ID NO: 200920 - DNA, 75 bp, Homo sapiens
ctccgccgcccgcaccgccgcccgcgccctcaccagatccagagacaatggccccgatgggatggagcccgaagg

SEQ ID NO: 200921 - DNA, 74 bp, Homo sapiens
taaattatgtgaaacctccaaatgtggtcaggatttgcatgaagatgtcgaagaagctggtgcactgcagaaaa

SEQ ID NO: 200922 - DNA, 85 bp, Homo sapiens
agacgggctgtacaccactggtccatatttctttgccaaggtggtgaaggcatttgtggtcctggcctcgcagttcctgtcccat

SEQ ID NO: 200923 - DNA, 98 bp, Homo sapiens
cagaatatggcccttatcctattgaaggaggactctttggatgtttctacgataaagacagttcagggtggagttctagcaaagataaggatgcgtat

SEQ ID NO: 200924 - DNA, 50 bp, Homo sapiens
aggcatcatccgctatgcaattggggttcagattttgcttaaactgtgga

SEQ ID NO: 200925 - DNA, 98 bp, Homo sapiens
tcattccagaagctgctaagcagaattgcaagggacaagtggccacactccctcaggacgcacaagaccagccactgctaccgcatcacgtaccgcca

SEQ ID NO: 200926 - DNA, 100 bp, Homo sapiens
cgagggcggggaccggcggcgctggaggagcgaggcagctgtactaggactgggaacggggaacaagggaaactctcagtcgtcactgtactacccttgg

SEQ ID NO: 200927 - DNA, 75 bp, Homo sapiens
gggccttccacaccccctccgtgggtgtgtggataccatacttgcagagctccttcagatacataaagaacacat

SEQ ID NO: 200928 - DNA, 90 bp, Homo sapiens
ccctcgcgacgcgcccggcccggagcccccagcgcagcggccgcggatgacccctccggcgaaggtgtcctgccctcggcccgcggccca

SEQ ID NO: 200929 - DNA, 90 bp, Homo sapiens
gatgatgaagatattgatgacgttccttgtggagaagcactggtataagcagtgggaggcatacgtgcagggaggggaccaggactccag

SEQ ID NO: 200930 - DNA, 100 bp, Homo sapiens
ctttatcaaaatcccaggctgtcggaagcaaggtatccatgtttctaaaggacaaagttcagaataataacggtcgctttgtgttgccggtgtccgggcc

SEQ ID NO: 200931 - DNA, 76 bp, Homo sapiens
aagaggaaaagaacagagccatcattcaagaagtttgcttcatgccaaaagttttggaaggtctccatcaagaaaa

SEQ ID NO: 200932 - DNA, 100 bp, Homo sapiens
gttggaattgacagaggtgatataccagacctttcacagctctttcgacgtgtagcagcagctttgccgggaatggaaagcacacaggacagaagcagag

SEQ ID NO: 200933 - DNA, 100 bp, Homo sapiens
aaggaactgaatgacatgcaagcggtaggagtcaatcccaccagcattgactcagtcgtaattgggaaggaccaagaggtgaagctgcagcctggccagg

SEQ ID NO: 200934 - DNA, 96 bp, Homo sapiens
agactggacagaatttctcatacgtgacttgactggttcgaggacagcacccgccaacctcctggaaggtgctgcctgctgtttcccggggagatc

SEQ ID NO: 200935 - DNA, 100 bp, Homo sapiens
gttccatcatggcgtcaatgcaggtttgggatgaaaatcttgcaaaatcggcagaggcttgggcggctacttgcatttgggaccatggaccttcttactt

SEQ ID NO: 200936 - DNA, 100 bp, Homo sapiens
ctaacggctattcatacaccatgcaaaacagaaccttccaaatttccttttccaactaagatggagctggaggagacagaaccgcccctggagcctgagg

SEQ ID NO: 200937 - DNA, 101 bp, Homo sapiens
ttgatacccttggaagaattatgaatttaacagtaatgctgaaatatggctacacacacctttctgcaggagagctgcttcgtgatgaaaggaagaaccca

SEQ ID NO: 200938 - DNA, 75 bp, Homo sapiens
ctggagcctcagttggaagcagccgatccagcctgcggagcctgtggggcagattattcagagctgggagagctt

SEQ ID NO: 200939 - DNA, 100 bp, Homo sapiens
tctgaagttatgaagatgcaaagcctgagagatggaaactactatgcatgtaaacaaatgaagcagcgctttgaaaggattaatgcagtatcgaatggac

SEQ ID NO: 200940 - DNA, 80 bp, Homo sapiens
aaaatcaccagttactttaatgacgccggcatcggccgcacaggcaccatcattgtcatcgacatgctcatggagaacat

SEQ ID NO: 200941 - DNA, 75 bp, Homo sapiens
caggagagcgcagtcacgcctgggacccccgaccccacttgtgctggaaggctggatctccagaactgttctctg

SEQ ID NO: 200942 - DNA, 75 bp, Homo sapiens
tcagagccacaccgagaaccgccgcggagccctcatccctaacggtgaaaggtaatgcacaggtgacacaaacaa

SEQ ID NO: 200943 - DNA, 88 bp, Homo sapiens
caattactgatgggagcaagttgactaccaccagtggagtccaggatgaggtattagaagataatctaagtcattcagactgggctag

SEQ ID NO: 200944 - DNA, 90 bp, Homo sapiens
aaacctggacagaacttcatgtgtctgtggcagtcttgtaaaaacctgcctagggtagttaaaagacgagtgaatgctctcaaaaacctg

SEQ ID NO: 200945 - DNA, 75 bp, Homo sapiens
ggaagcaggactgcgccgcgtcttcctcaagggaccagttactctccacaagaaaattcacacaaccacagtgct

SEQ ID NO: 200946 - DNA, 75 bp, Homo sapiens
ctgtaggtgcccaccaagcccatgacgacgctgctggccagggtccaggcgaggccttcttgggcagctttgtgg

SEQ ID NO: 200947 - DNA, 101 bp, Homo sapiens
gcaacttaagaaccagattcgagagaaccagcagaaatccaccaatgtagtctatcaggcccaccatgtgagcaggaataagagagggcaagtggttggaa

SEQ ID NO: 200948 - DNA, 100 bp, Homo sapiens
atcactcatcacagtaacttacgaggaagaacttgtcgcttttcctaagcattagtttgttaattttctggggttcctcccttttgggtgcccggttata

SEQ ID NO: 200949 - DNA, 95 bp, Homo sapiens
gtcaacaagaacaagtcatcggctattgtggaaatattctccaagtacaaatctattgtcaagtacaagacagctttctactccttctaccttcc

SEQ ID NO: 200950 - DNA, 83 bp, Homo sapiens
cgggagtgtcctggacccagctgagcgggcggtcattcgcatcgcagggtcttactgaagtaacacaaagcttaaaaatggaa

SEQ ID NO: 200951 - DNA, 75 bp, Homo sapiens
aaacaagtgtctgcttatgtcggccaatgagtgccaggagcgccctgttgagtgtaagttctgcaaactggacat

SEQ ID NO: 200952 - DNA, 140 bp, Homo sapiens
cccgagtggagggcaaacctgtgaacccacccgagagcaacaaagcaggcgactacagccacgtgaagatgttctcagtgcagctgagtcttggtgagcagacatgggaatccgaaggcagcagtataaagaaggctcag

SEQ ID NO: 200953 - DNA, 100 bp, Homo sapiens
accttggacacctccatgttatggacacggtctttcttattcaggagcgaatccgtttagctcgacagattgagaaatctgagtatcggaacttccaggc

SEQ ID NO: 200954 - DNA, 80 bp, Homo sapiens
gggtggtggttccaatgagacagggcacaccaaactccatctggctcacagaacatttcctgcctgttgctcacactctg

SEQ ID NO: 200955 - DNA, 50 bp, Homo sapiens
cgctacgggaagcaggcctcgccacagtgataaatgctgctcattctttc

SEQ ID NO: 200956 - DNA, 75 bp, Homo sapiens
ttctggcttgtcaagatttacgaacagtgacaataccctcccctcccttgggctggacccctctctacagctagg

SEQ ID NO: 200957 - DNA, 83 bp, Homo sapiens
gcccaaactgctgaagcagctcccgcgaggaccacccggacttcaggatgcatttgacagtgactgggaaaccgggaaaatca

SEQ ID NO: 200958 - DNA, 74 bp, Homo sapiens
ccctgtggtggcttattactgccctgagacgggagttaaaggagaaagaatattctgtcctgaatgctgtcgac

SEQ ID NO: 200959 - DNA, 95 bp, Homo sapiens
cggtgacgggcatgtgggaccatctgcaggagcaggcctccctgctgcagcgactccggctcctgcagcggcaggaggaggacgccaaggagctg

SEQ ID NO: 200960 - DNA, 75 bp, Homo sapiens
ctctccaatgggagccgtgaggaatgctactggggccacgtcttctgggaccagccccgagcctggagatgaggg

SEQ ID NO: 200961 - DNA, 100 bp, Homo sapiens
gaagccgactgctgcctggtctgcaaagaagtcctttcaagtctctaggactggactcttcctaagcaagtccgcctcttcgagcactactgctactccc

SEQ ID NO: 200962 - DNA, 124 bp, Homo sapiens
attattgtggctgaaggagcaattgatacccaaaataaacccatcacctctgagaaaatcaaagaggccctggccaacgtcaacattgggagcctcatctgcaatgtaggggccggtggacctg

SEQ ID NO: 200963 - DNA, 95 bp, Homo sapiens
actattcagtgtcagatttcggaagccattgtttggagagacggggcataccatcatgaatcttcttgcaagcacaacatatgtttcgccaagcc

SEQ ID NO: 200964 - DNA, 98 bp, Homo sapiens
ccacgctgcgggcccgggccatggccgccgccgatgccgagaaatttaaaagcctgttgattcaagaactttctaaagtatttccggaagacatggct

SEQ ID NO: 200965 - DNA, 83 bp, Homo sapiens
gtgcccgcgggacctgacagccgggtcagagagtgaagacatttccacctggacacctgaccatgtgcctgccctgagcagcg

SEQ ID NO: 200966 - DNA, 97 bp, Homo sapiens
tgcagatttgccatcagaatattggcaaattcagaagctggtgaaatatttaaagaaaacaaccctttttgctgcacatgtaagtggagctgtgctt

SEQ ID NO: 200967 - DNA, 90 bp, Homo sapiens
gaggagaagcttgcagagcagctgaagcaagctgaggagctcagggagaagacagttctgcagtctaccaatcgaaaactggagcggaaa

SEQ ID NO: 200968 - DNA, 100 bp, Homo sapiens
tgttgctcccggccggcctgcacgatgcacacgccggacttcgcaggcccagacgacgcgcgcgcagtgtagtcgccgccgccagccgccatgggcaaac

SEQ ID NO: 200969 - DNA, 113 bp, Homo sapiens
ctggaccaagatcgagcccagcgtcaacttcctcaagtcgcccaaagagagtgaagaagtttatcaaaggcaggtgctgtcaatttcatgtatcatctttggaattgtcatcg

SEQ ID NO: 200970 - DNA, 50 bp, Homo sapiens
cccagctccgtctcggcggcggcgggtgtacgaagccatcgacagcagag

SEQ ID NO: 200971 - DNA, 100 bp, Homo sapiens
ctgccgagcgcggcggggcctccgcggtctgctcatggcgcacagccagcggctgctcttccgaatcggagttgtggaaagtaaaaatgtagccctacca

SEQ ID NO: 200972 - DNA, 99 bp, Homo sapiens
tccacttgtgcaaccaagtaagaatgataatggcaaaccagattctgtgggactccgagtgatggaaactctccagttcagatccagtagcttttaggg

SEQ ID NO: 200973 - DNA, 90 bp, Homo sapiens
gtggttctcaaatataggcattctgatgggaacttgtgtgttaaagtaacagatgatttagttgatatgggcactgtggtcctgggaaag

SEQ ID NO: 200974 - DNA, 90 bp, Homo sapiens
aggccgccatcaaccgccagatcaacctggagctctacgcctcctacgtttacctgtccatgctgccactgcagagccccgccatggaag

SEQ ID NO: 200975 - DNA, 50 bp, Homo sapiens
gagacgaagagacagctggatgaagacccagatgatgtggtaccagttgg

SEQ ID NO: 200976 - DNA, 75 bp, Homo sapiens
agccttcttattgactcctaggaatcaaggttccactctggtgcaccctttcagagcgcttgggaagaactcgga

SEQ ID NO: 200977 - DNA, 100 bp, Homo sapiens
gtgagggtgtacaaatacccctttgaattaattatggctgtcagttcaccgggacctggaggcccagattgcgatcgtgacggagaaccaggccctgcag

SEQ ID NO: 200978 - DNA, 82 bp, Homo sapiens
gaacatcgtagcgaacacggtgctactcaaggcccgggaagggtttccaggcctgaggtgcccgccctggccccaggagaat

SEQ ID NO: 200979 - DNA, 78 bp, Homo sapiens
gaggacaccgagtactcttatgcagtccccatgacaacagtgcaggaggaaagcacagtagactcccagccagtgcca

SEQ ID NO: 200980 - DNA, 51 bp, Homo sapiens
ggaagctggtggagggccagctagacttgtgcaccatggacaattttgctg

SEQ ID NO: 200981 - DNA, 82 bp, Homo sapiens
aagtcctacaacagtttggcgtgcaacatggggcttgagaaagggctgtcacccttgacccaaactttctggatgcttatat

SEQ ID NO: 200982 - DNA, 83 bp, Homo sapiens
cgcaaccccagatccatttacactttacagttaaataggattgcgaatcaggtggccattcagcggaagaagcagtttgtgga

SEQ ID NO: 200983 - DNA, 90 bp, Homo sapiens
aggacgctgggagctgcctgcgggaaggtgcggggagcggagccatggcctccgaatgatatggaacctagcaaagctgttccactgaat

SEQ ID NO: 200984 - DNA, 100 bp, Homo sapiens
atatcatcgaccctcgcacactctttgtcactgaggaaattccattcttcttctgacagccagacggttagagcttctccagattcatggctcacccaga

SEQ ID NO: 200985 - DNA, 100 bp, Homo sapiens
ggaggcgccccgcgcagctggctggcggagcatgagcgccccagagcaagtgcaccggcacctggaccaacacgaagtgagatacctgcagtttgccttc

SEQ ID NO: 200986 - DNA, 90 bp, Homo sapiens
cgacagtagaggagctttaccgcaattatggcatcctggccgatgccacggagcaagtgggccagaccattaaaaatctcaagtgacgac

SEQ ID NO: 200987 - DNA, 100 bp, Homo sapiens
tggagagcttcatcaaaaatagtgatagctttgataaccatgctgtgacctacaagcaaactaaatagccaacatttctgaacccctaagtctcctgtgc

SEQ ID NO: 200988 - DNA, 75 bp, Homo sapiens
ctgcggtgcctgagctgagtgaggccgaggccgggaggccgtgcccggaggatgactttgacaacgatgtggatg

SEQ ID NO: 200989 - DNA, 102 bp, Homo sapiens
acatgatcagaaaacagctctggaaaatgacagccttcatttctctgaacatactgccttatgggacagatcaactgagtcagtgctgattctctcaaatag

SEQ ID NO: 200990 - DNA, 78 bp, Homo sapiens
tttgcttcaccgacatagtcattatgccgaagagaaaggcattatccaattggtttgctatttgatcttcttgcatca

SEQ ID NO: 200991 - DNA, 89 bp, Homo sapiens
gctattggaaggaggagattctgaagataaggaggtgctgctagctgaggaggggatagctcctctttcttctgcaggaccagggaaag

SEQ ID NO: 200992 - DNA, 75 bp, Homo sapiens
cggcgccttcggcaaggtttacaagccccaggccatttactgcaaggatgttctggacattgaacagttctctac

SEQ ID NO: 200993 - DNA, 98 bp, Homo sapiens
caggatggctccaccatccacatccgctacagggagccacggcgcatgctggcgaagtgcatcagcagaggggagctccaggtgtctctgtcatatca

SEQ ID NO: 200994 - DNA, 101 bp, Homo sapiens
ggacaccagaagtcaaccagaccaccttataccagcgttatgagatcaagatgaccaagatgttcaaagggcctgagaaggatatagagtttatctacacg

SEQ ID NO: 200995 - DNA, 75 bp, Homo sapiens
aaagtttacaccaaaagctcccacttgaaagcacaccagcggacgcacacagattggtttatcttggaagctaaa

SEQ ID NO: 200996 - DNA, 100 bp, Homo sapiens
ctgggatcaaactagaacctgttccaggattgccaggaggtacatcaggaacgtctctatcaagaatacaatttcagcaaggctgagggccatctgaaac

SEQ ID NO: 200997 - DNA, 100 bp, Homo sapiens
ctgcccaacatccaggctgtactgctccccaagaagactgagagtcaccacaaggccaagggactcagtggcctctgaggatgtggctgtgaacttcaca

SEQ ID NO: 200998 - DNA, 100 bp, Homo sapiens
aagatacccgctggccggctgaggcgcgctgccaggccccaccggcggctcgggcccacgggcaaggaggtgcacgacggggtttcaccgtgttgcccag

SEQ ID NO: 200999 - DNA, 74 bp, Homo sapiens
ctcagcgcagcgctgcggcctttcggcagccgaacggccgcggcaggtggatccataaagaacccagccaaccc

SEQ ID NO: 201000 - DNA, 82 bp, Homo sapiens
ggaccacaggccctcgttgcccagatgtgtggacactgccagcggctgcagccgacttggaatgacctgggagacaaataca

SEQ ID NO: 201001 - DNA, 100 bp, Homo sapiens
catgaagatgttccagattcagttccacacggggtttgtgcctcggaacgccaccactgtgaaatttgccaagtacgggaaaaacactcttggcacgagc

SEQ ID NO: 201002 - DNA, 75 bp, Homo sapiens
gatgatgctggcacagggccttctgctgcatttcctgcccagaggttacttcttgctgcagattctgcgcaggat

SEQ ID NO: 201003 - DNA, 82 bp, Homo sapiens
tcggggacattaccggacaggccttgtccggcaataccaagaattcagaaggagctggcggacatcactttagaccctccac

SEQ ID NO: 201004 - DNA, 96 bp, Homo sapiens
gaaaggaatgaggagttacagagggccgagaaggacaggatcaggtgtgagttcttgatacgaatgaaaggccaagagtttgttgatgagattcaa

SEQ ID NO: 201005 - DNA, 50 bp, Homo sapiens
gaacctggcacttatgtcctccctgggcatctgtggctcttgtgcaatga

SEQ ID NO: 201006 - DNA, 51 bp, Homo sapiens
cttgaacccattgtcacccctccggatgaagatttgataaagtggaaggca

SEQ ID NO: 201007 - DNA, 75 bp, Homo sapiens
agaactttcattctttggacatgacatgtctcaggaaggctatggaactagatctcaacctcctctggcccccgg

SEQ ID NO: 201008 - DNA, 98 bp, Homo sapiens
ggatatcgacgtcgtgatccagaagtccagagctgaggactgcctgtttgcagcttgctcacttccgacagagaaaaacaaaaggtgacagttcgcat

SEQ ID NO: 201009 - DNA, 75 bp, Homo sapiens
aggacatcttgaccatcttcaagcgcctccgctcggtgcccactaacaagggtgctttcttctgcgacctggtac

SEQ ID NO: 201010 - DNA, 100 bp, Homo sapiens
gtgggcgatgccagcgtgccaggaaactaccggacgcagctgtatgacaagcagcgggaggagtaccagccggccaccccggggcttggcatgtttgtgg

SEQ ID NO: 201011 - DNA, 75 bp, Homo sapiens
agagcacatggttgccgcccaggtgccaaaagaacatcttttagtctcgattcctctcttgattaatcatcttca

SEQ ID NO: 201012 - DNA, 100 bp, Homo sapiens
tctcaaggaccctgtgcgctggccctcaaccatcagtccctgctttaaggtttggacttctcccactgagcatgacaagcactcgaaaggctaaatcaac

SEQ ID NO: 201013 - DNA, 49 bp, Homo sapiens
gatgaagacagatgcaccaacgaggtatggcctcacaagtcttggtcta

SEQ ID NO: 201014 - DNA, 75 bp, Homo sapiens
gatacaaatttttggatgatgatggatccatttctcctattgaggagtcaactttgagattacgggaaatgatga

SEQ ID NO: 201015 - DNA, 104 bp, Homo sapiens
gtgaaaaatgtactctgacctgaatcctgaattttccttgatggtcaaaagattaaggcaacgtgttggaccttccggagcttctcagaagacagagggttttc

SEQ ID NO: 201016 - DNA, 75 bp, Homo sapiens
cctacccccatcactgcttccctcagccataacaggactcagcccaaaaccatgtttgcccaagttgaatctgat

SEQ ID NO: 201017 - DNA, 100 bp, Homo sapiens
tcacctgtctggagcaaggaaaagatccctggaatatgaagggacacagtacggtagtcaaacccccagatttggagcaagaggtggtggtggccttccc

SEQ ID NO: 201018 - DNA, 82 bp, Homo sapiens
cgcaccttcccccacgagcgaggcaactgggccacccacgtctatgtaccatattcagctactagtgactcaacaaaatcta

SEQ ID NO: 201019 - DNA, 100 bp, Homo sapiens
cggccatctcgctgcccgacgatgtccgcaggcgatgcgacctaaagtcatgtggcacctccttcgaaggtacatggcatcccggctccattccctgcgg

SEQ ID NO: 201020 - DNA, 50 bp, Homo sapiens
gaagagggtgctccgttccttacaggctctgaagagtgttgtactctatg

SEQ ID NO: 201021 - DNA, 100 bp, Homo sapiens
cggaaatctggaaccgggatggcgacgtctacactgagtcggaggcgaagagtaacagttacccctcaatgagcgacccctacctgtccagctattaccc

SEQ ID NO: 201022 - DNA, 102 bp, Homo sapiens
gcggacatcactttagaccctccacctaattgcaggagatacaactcgtcaacgaatcaaattcagtgatgacagagtatgcaagagtcaccttctcaactg

SEQ ID NO: 201023 - DNA, 80 bp, Homo sapiens
ccactttctcggcgccgcggctcttttctaaaagttggtcccaatcgaggccattatattgcaatagttaagagtcatga

SEQ ID NO: 201024 - DNA, 100 bp, Homo sapiens
cggaggctggaccagagtcgagttccctcctcctgcaccaaagggagccgccaccgtctggtgtctaaaccgcctcggacccgaccgcatgtctgtcatg

SEQ ID NO: 201025 - DNA, 75 bp, Homo sapiens
tgggtgctggtgcctatagcatgagattggctcacagtggttgattgatcaaccccattggacgttggttctgtg

SEQ ID NO: 201026 - DNA, 74 bp, Homo sapiens
gctgcaactgtctgatgaacagctacagaagaggatatgtgacgcagccacaattcactgtcttttggagcaag

SEQ ID NO: 201027 - DNA, 90 bp, Homo sapiens
gatctcggtgctgcagacggcgagacctcctgcacaggggaacgcccttttgcttgtgactggcagggctgcgacaagaagttcgcccgc

SEQ ID NO: 201028 - DNA, 89 bp, Homo sapiens
cttggaggaaacaatgccattattgcagaaaccaatgatagctatcatatcatactgaagtaggagtgcggcgtttcgtgcccagtggc

SEQ ID NO: 201029 - DNA, 83 bp, Homo sapiens
aaatcggataaagtcatcaataaccgagagtgcctcatctacagcagatttttggaagtaccagcacagtgacgcttcctgaa

SEQ ID NO: 201030 - DNA, 110 bp, Homo sapiens
tcagcctgagcgacgtgccccaggcggagatctcggtaacttaggggtaccgccaggccggggaagctgcccgctcaccatgcccctgcccttcgacctcatctacaccg

SEQ ID NO: 201031 - DNA, 99 bp, Homo sapiens
atcgcgttgggtgaaggtgacggcgtcgagcgtcctggctccccagaagcaagagagttcaaatgaaggaaggaggaggttcctggatgtggatgtcat

SEQ ID NO: 201032 - DNA, 75 bp, Homo sapiens
ctagaagcactgagagatgcggccccctcgcaggaaactagaaaaactgcttttggaattatctctacagtgaag

SEQ ID NO: 201033 - DNA, 89 bp, Homo sapiens
aaaacaagaacccaaacattgtgaattacttggacaggacctaccagatagtattcaagtaggtggcaggatatcacctcagacagttt

SEQ ID NO: 201034 - DNA, 100 bp, Homo sapiens
tcttacctttcaaagtggtgggatattatagatattcagaagaaggatgctgttaaaagatatgtgctgattagaaggctcacttgtgcagtgtggagga

SEQ ID NO: 201035 - DNA, 75 bp, Homo sapiens
ccggctgccggtcgacgaccgccccgcgtcatgcggctcctcggctggtggtgtgtgcagtggcctcagggatcc

SEQ ID NO: 201036 - DNA, 85 bp, Homo sapiens
agagatccgtgcaggcacagccttttacattgatcagcttttgttaggagtgataaacccaaactgttcagaggactgcaaatca

SEQ ID NO: 201037 - DNA, 100 bp, Homo sapiens
tgaccaacatgctgtgatgtgtgccgagggaggaattgggcgaacgctgttggagaagctgttcagccagcaggagaacgggcctccagaagaagcagag

SEQ ID NO: 201038 - DNA, 50 bp, Homo sapiens
cctcccccgcatgacccccttggaatcatattgacaggtcatgaaaatga

SEQ ID NO: 201039 - DNA, 100 bp, Homo sapiens
gggctgcagccaagtctacgtggccctcagcagcttccagtctctggcatctctatcccctatgaggcaccacgtaagacctcctgcccttagctctctt

SEQ ID NO: 201040 - DNA, 100 bp, Homo sapiens
gaagtgtacacaaagtagaaccaattaccaagcatataggtttggtgtacagtggcatgggccccgattacagcggagtttaagagagctgtgaaagtag

SEQ ID NO: 201041 - DNA, 96 bp, Homo sapiens
ctccatcaaccgggccgtgccccagatgcccaccgggatggagaaggaggaggaatcggtatcagaagcatgtgcacacgtatcgcattctgcctg

SEQ ID NO: 201042 - DNA, 100 bp, Homo sapiens
cagcatcagcatcatcgacacccccgggatcctgtctggagagaagcagcggatcagcagaggaaaaccaattctgtgtcctcggaggaccacagcccag

SEQ ID NO: 201043 - DNA, 83 bp, Homo sapiens
cgctgggataacaggcgtgagccgctgcccgggccatccctcgaggaagtttcatcaggctgaacctcctcagaagagcaact

SEQ ID NO: 201044 - DNA, 76 bp, Homo sapiens
ccctgtgagttcatcagagtcagctccaggaaccatcatggctcaggcaaagcaacgagctggcagagctgggaga

SEQ ID NO: 201045 - DNA, 50 bp, Homo sapiens
gtccacccaccgccgccgcctcccaggcacattcaggaccccgcgagcca

SEQ ID NO: 201046 - DNA, 82 bp, Homo sapiens
cgttgccagcctggattccattctctcactgaagcaggatgcagctcggcttgcccttcccctgcttgtgccgtgtaccctg

SEQ ID NO: 201047 - DNA, 82 bp, Homo sapiens
cgccatcgagccttggcggcggacgtgcagcgtttgcctcagcatggagggcggggccgcggcagccacccccacagcactg

SEQ ID NO: 201048 - DNA, 100 bp, Homo sapiens
tggtttcattgatctagaagagtatattgatggcttgttcaatcagtatatcagtcaacaggaatataagccacgatggagtcaaatcattcccaaaagt

SEQ ID NO: 201049 - DNA, 82 bp, Homo sapiens
gtcggcggcgccctgcaccgcgcctcgcaaagcctcgtgggctgtgcggctatcctggagacagatgacagctctcccttgg

SEQ ID NO: 201050 - DNA, 100 bp, Homo sapiens
cgaagacaggagtcaatggagattctcgatacttcctgtggccactccagctcatgggcctcctgagtgacccagaattaggtccagcagcagctgatgg

SEQ ID NO: 201051 - DNA, 75 bp, Homo sapiens
caagccgagggcaactttggaggccccctggaaggctttaggatccaggtcatcatcagatttgaaatatttaaa

SEQ ID NO: 201052 - DNA, 74 bp, Homo sapiens
gcctcaccaagtcacatgacaagcatgaaatgtctcaagaataccccagccttctttgcggagaggctcaacaa

SEQ ID NO: 201053 - DNA, 82 bp, Homo sapiens
cgcgcggttcccggcggcgtgtgacccagtcttcgccggccgctgcccgctgcgtgtgaaagtcgtggaaggcgctgacgct

SEQ ID NO: 201054 - DNA, 75 bp, Homo sapiens
tccctaaggcccaaccaaacagaagagagtacccaagtggccttggaccatctggagtctgtgcctgagaaactg

SEQ ID NO: 201055 - DNA, 80 bp, Homo sapiens
gacagatgggaaaaatatttgatcaagcattttcttcctctcgcaaatctggaatgttcaccaaacattgaaactttcct

SEQ ID NO: 201056 - DNA, 113 bp, Homo sapiens
cctgcataccatccgcgaccgagtctggcagatccagtcttgctcagctctcacaggagagggcgttcaggaattgaatgatctggcacgggaccctccagcacagtgttcag

SEQ ID NO: 201057 - DNA, 96 bp, Homo sapiens
ctcaagcccagtcgggactcgagcctagggaggcgaggttcccgcaccggataggtgaatggaagagaatccgaagaagaaaatctcaataaatct

SEQ ID NO: 201058 - DNA, 100 bp, Homo sapiens
aggacatacctttggttaaaggagctgccgtcagctggttcgatgcccagaactgaatgctgtgctccagctgtggcctcaccggtgctgaatagagagg

SEQ ID NO: 201059 - DNA, 101 bp, Homo sapiens
tgcaacttcttgttaaatggggttgtagcatagaagatgtggactacaatggaaaccttccagaacctcaagaaggcatgaagccagcccctgcagtgccg

SEQ ID NO: 201060 - DNA, 83 bp, Homo sapiens
cagcttctgataatcaaccaactgttacaatcaaggtctatgaagcccgatatcagaatgaattagctggcgtagataccgag

SEQ ID NO: 201061 - DNA, 75 bp, Homo sapiens
ggcgcctgtcctgatcatggccaccaaccgtggcatcacgcgaattctgcttggtcagaatcgtgatggcattgt

SEQ ID NO: 201062 - DNA, 100 bp, Homo sapiens
ggactggctgaggggcaaggcggaagtcaatcaagagactatccagcggccagtgagctcctccgacagcgaggcccccgaggccaaccccgccgacggc

SEQ ID NO: 201063 - DNA, 100 bp, Homo sapiens
ctgcgtctgggcgcggaggagggcgagccgcacgtcctcctgaggaagcgggagtggaccatcgggcggagacgagtatggaagctccaaaaggaaagat

SEQ ID NO: 201064 - DNA, 100 bp, Homo sapiens
ggaagcgctgctggactacaaggacgagttctcgggcagaggcgacctccccgcgttccatgcgcacagggacagggccctggtacctgacagtgtaaag

SEQ ID NO: 201065 - DNA, 75 bp, Homo sapiens
cacagtatggtagccacacccccaggagtacttgattcttcagaaaacctccaaagtagatgtggactcaagtgg

SEQ ID NO: 201066 - DNA, 50 bp, Homo sapiens
ggataaactctctcctcaaggcttcccagtgatcctgtccatcgaggagc

SEQ ID NO: 201067 - DNA, 100 bp, Homo sapiens
gaccaagaactgtgaagagaggagttgagaacatctctgttgacattcattgtgcatgcttttcacttccactgcatctctcgctggctcaaaacacgac

SEQ ID NO: 201068 - DNA, 98 bp, Homo sapiens
gggttgtacaggctctttgaatatgactctgcaaaggccatcatctctcagcaaggtgacatatttgtttttgacctggagacctcagctgtcgctcc

SEQ ID NO: 201069 - DNA, 82 bp, Homo sapiens
tttgaggcggtcctcctagcggcctggaccaagaatcgccttcagccctgtctggtgcatccttggcagaaagtgaggagga

SEQ ID NO: 201070 - DNA, 100 bp, Homo sapiens
gacaggaagattcgtactacttaaggacggggatttctcgtctccgagatcatcactgctcagcacgcaggcatgtgaggaagctgggcttaaaggagac

SEQ ID NO: 201071 - DNA, 75 bp, Homo sapiens
gctagccgggagttacaccgccaccgccagggttacattccgaaaagcaaatgggagatggacacatctgaggca

SEQ ID NO: 201072 - DNA, 75 bp, Homo sapiens
gtggctgcctccccagaagacataaagctgtgtagagaagcgatgtggcaaaatctggcaaaggcagagaccaaa

SEQ ID NO: 201073 - DNA, 88 bp, Homo sapiens
ccggcgcgaagaggctggactcggattcgttgcctgagacaagttggatggcttgaggactggtactaaaaggaaacgtgactgggag

SEQ ID NO: 201074 - DNA, 100 bp, Homo sapiens
gggagaaacaaggcgccttggagttcaggtgaccagaagtcagcagcttcccagaagccccgaagccggggcatcctccactcactcttctgctgtgtct

SEQ ID NO: 201075 - DNA, 75 bp, Homo sapiens
cgctagggtcgccgttgcatcggtgcagggcaaggaaagatgaatgggagggctgattttcgagagccgaatgca

SEQ ID NO: 201076 - DNA, 83 bp, Homo sapiens
agttccgtgaactcagtactgatgcccagtggggcattcgtcttggtaaacttggtagctccaaacgagaatggaagccgctg

SEQ ID NO: 201077 - DNA, 100 bp, Homo sapiens
agatcgccggggaggcagcgcgggatcccagcctcaggcgtgcgcggacggtgtgcggatgaactctttgccagcagagaggatccaggaaatacagaag

SEQ ID NO: 201078 - DNA, 100 bp, Homo sapiens
attctgcaaccaagcacctgaaacagcagtgtagtgctggactggattcaaatgagatgtctctgcaggagaaaaaagatcagaacagaaattctattga

SEQ ID NO: 201079 - DNA, 82 bp, Homo sapiens
cccatcgggcagctacacatcttgaaagagaagctcttcctgtgagtcaccttcaggccattcagaggaggaaagagagggg

SEQ ID NO: 201080 - DNA, 98 bp, Homo sapiens
tgttttcttcaatcaccccaaaggtcgcgataatattattgacctcttcctttatcagccacatgtgaagcagtatgcagatgttgaaggattctaat

SEQ ID NO: 201081 - DNA, 50 bp, Homo sapiens
caaacaactggcagaatttgctagctgtttgcagacaaggtcccaaagac

SEQ ID NO: 201082 - DNA, 100 bp, Homo sapiens
gaggactttcccgcgcaagggggacaggctggactgaaagaggacacgggaagaacaaagacttagactcggtaccattgttggatactggtgacatcat

SEQ ID NO: 201083 - DNA, 50 bp, Homo sapiens
cagatatcttgaaaagctgccagaaagccattcgatgaggactatctaaa

SEQ ID NO: 201084 - DNA, 98 bp, Homo sapiens
agttaaagaggactcagtccccacaggtgcggaggagaataggcatttcatccttcatgaagccattcaggattttgaattgcatatgagtgcttggc

SEQ ID NO: 201085 - DNA, 98 bp, Homo sapiens
ccgggacctgcagtgccccaagaaggtgtgttaccgagtggaatgggccaaattccaggaacgtgagaggaagaaggaagaagaggagaaggagaagg

SEQ ID NO: 201086 - DNA, 104 bp, Homo sapiens
cacctgtctggagcaagaaaaagagcctttgactgtgaagagacatgagatggtgaatgaacccccagtttgcctgagaatacagatcaacccacagaacaaag

SEQ ID NO: 201087 - DNA, 50 bp, Homo sapiens
gctgaagctttacttcgagctcatgggaaaaagaccttgatgaagttctg

SEQ ID NO: 201088 - DNA, 100 bp, Homo sapiens
aattgttgagttgggctccatctttcagcagttggcacacatggttaaggaacaggaggaaaccattcagaggtactatgcaatttacgactctggagac

SEQ ID NO: 201089 - DNA, 100 bp, Homo sapiens
agaaagaaaacgagcgcgagagggggaaaagcgagcgatcgagcgagcgcgcgcgcgaaaactccgggcaggtcaccctgctgattgccttcatctgtgt

SEQ ID NO: 201090 - DNA, 75 bp, Homo sapiens
ggcacagccccgcaggatcccaagccctgcagactaccgcagccagcgatacatcgagatatttccaagcagaag

SEQ ID NO: 201091 - DNA, 82 bp, Homo sapiens
ccgccgaaggcgccgccaaggaagagttttcggctttgtgagaaaccttaccatcaaacacgatggccagcaacgttaccaa

SEQ ID NO: 201092 - DNA, 90 bp, Homo sapiens
gttaaggattccaagtaactcttatttggatcctgattgagtcaatgctttgcattctcagtcctctgcataaagctgagagatgcctac

SEQ ID NO: 201093 - DNA, 100 bp, Homo sapiens
aataatatcaaacaataaacttcagtcacttacagatgacctgcgactcttgcctgcactgactgttcttgatgtttcccaggcagctgcagacttgaaa

SEQ ID NO: 201094 - DNA, 83 bp, Homo sapiens
tttacattaactatgagaattaagcagaaggaagaggcccagcagaagggactcgctgagccaccccccgccccactccatgt

SEQ ID NO: 201095 - DNA, 82 bp, Homo sapiens
ttgggttttttgtggcttccttcgttattggagccaggcctacaccccagacctgatggccaaaagaaaggaagaaaatttt

SEQ ID NO: 201096 - DNA, 75 bp, Homo sapiens
gcgccgagacccctcagggcggccggtctgctgagaacagacccagtccctgaggaaggagaagatgttgctgcc

SEQ ID NO: 201097 - DNA, 88 bp, Homo sapiens
tttcattccgcggcgggggctccgcgagcggaattccggcggctgccgtgactccagtgcaagattcaagccaaaactcgagaattta

SEQ ID NO: 201098 - DNA, 99 bp, Homo sapiens
ggatatgggatttgctgatcaagtggaagagattttaagtgtggcatacaagaaagagtgacagaaggaagtcaaggcaccattatgactcggatgaga

SEQ ID NO: 201099 - DNA, 100 bp, Homo sapiens
caggaccccgggacaccctggaagccaggaaatgcaaattgcccaggaagtctctgagcagcatctgtcccaggggagactctacccaccactcagcacc

SEQ ID NO: 201100 - DNA, 98 bp, Homo sapiens
ggcgcgcgcggctgcggggctccagggccgccccgcccgcaggtgctatgctgtgggccccgctcagctgatggtgagaccattctaaaaggcctcca

SEQ ID NO: 201101 - DNA, 83 bp, Homo sapiens
caagaagatggtaccgtgcatcgcacctatttaagagaaagatcatcttcaagctctgagattcttttcttggcctattctgc

SEQ ID NO: 201102 - DNA, 99 bp, Homo sapiens
cccaagatgtcgcagacggccatgtccgaaacctacgagttgtctgctggttctcagcttgaagaagattctgcagtccttattgatcctttttcttgg

SEQ ID NO: 201103 - DNA, 101 bp, Homo sapiens
cccaagaagcaggaatgaaagtggcgctttctccgccccagtggaatgcagtagccctctgggcctgggatattgtggttgataactgtgccatctgcagg

SEQ ID NO: 201104 - DNA, 97 bp, Homo sapiens
cccgctggcgtcctcttgttctcttccagttggcttcctgaggctcaggtagtccaaagagccctgaattctgcggctaacaacgtgtatcagtatg

SEQ ID NO: 201105 - DNA, 50 bp, Homo sapiens
ctccgcaccgcaccctccacctcaggtgccatcgcctgcaggattcttta

SEQ ID NO: 201106 - DNA, 97 bp, Homo sapiens
tcagttctcaatgcatggccagaagatgtcatcaagcggacgcccgtggtttactgtgtgaggttagccaaggcccttgtagatgactactgctgtt

SEQ ID NO: 201107 - DNA, 83 bp, Homo sapiens
aacacttcgtgccaagtccagagcctccaggctgagacagaatccttacgtgccctgatcatccagacttgaaacatatcgac

SEQ ID NO: 201108 - DNA, 100 bp, Homo sapiens
aaatgtagatgatgccaaggaagcagccaacatgcctgactctgagctattcgagctcatctctgagaaccgttccatgtctcggaagctggaagattac

SEQ ID NO: 201109 - DNA, 51 bp, Homo sapiens
agttctctagcgctagtgatgtggaatcccgttctgcttccagaagtggaa

SEQ ID NO: 201110 - DNA, 98 bp, Homo sapiens
gatgatagatacaatcagtttcacataagaggcggggtttcaccatgttgcccagactggtcttgaactcctgagcttaagcaatccacctgcctcgg

SEQ ID NO: 201111 - DNA, 50 bp, Homo sapiens
ctggcacctacgtctgcactactaggtatacaaaactaggatatgctgga

SEQ ID NO: 201112 - DNA, 95 bp, Homo sapiens
ggaaatcatgtcaagcgaagccttgaaaaagctgccctgagacggtgtcccgccgaaagagaaccatggagtctggcagtaccgccgccagtgag

SEQ ID NO: 201113 - DNA, 100 bp, Homo sapiens
cgcgggcctacggggcgggggcggggcggcagtgagctcggccggcaaccgagggacccgcgtccagggtgtgggccgaagatatgctcatgtggtgttg

SEQ ID NO: 201114 - DNA, 90 bp, Homo sapiens
agattccgtgaagtgtctgcgctgcctgctctacgccctcaatctgctcttttgggcacttcagacaccacctccaacaacacagcaacc

SEQ ID NO: 201115 - DNA, 100 bp, Homo sapiens
tggactacgtctgtgcggctgcgtggggctcggccgcgcggactgaaggagactgaagaacatccagtcatggataaaaatgagctggttcagaaggcca

SEQ ID NO: 201116 - DNA, 75 bp, Homo sapiens
gctcctcggcgcttcctcggtggcttccccgggtcgagcaaacaggtcgcgtctccttcttcacctcggggtccg

SEQ ID NO: 201117 - DNA, 101 bp, Homo sapiens
agcaggcgaggaggaagatggcgggacggctgccggcctgtgtggtggactgtggcacgggtatttaggtcagttaacgtccataccaggatacctgaatc

SEQ ID NO: 201118 - DNA, 74 bp, Homo sapiens
ttccctggaactggaaggactgatcaagaaacacagctagatgtcaagccctccaacatcctagtcaactcccg

SEQ ID NO: 201119 - DNA, 89 bp, Homo sapiens
ctctgcggagttagcagtcacgacctccagcacagcctgattacatcaaccccagagccgtgcagctgggctcccttctcgtccgcggc

SEQ ID NO: 201120 - DNA, 100 bp, Homo sapiens
cgccattttgaagttgggcagaaagtgactccagtggtggaacccggagccaaccatttttagttactctgcgctcctcagaccaccggcaggtgaacag

SEQ ID NO: 201121 - DNA, 100 bp, Homo sapiens
ctggacactctctgaggacatctctgcaaaggccccagcggcccaggagtgatttgggccccgatgttggctatgaagctattggtcttgtggacagtag

SEQ ID NO: 201122 - DNA, 48 bp, Homo sapiens
agggacctcaaggaagcttatgacagtagctgctgcaagaagggacag

SEQ ID NO: 201123 - DNA, 100 bp, Homo sapiens
cagattcaacaaattccagtgacaacatctacacaatgattaatccagtgccgcctggaggcagccggtccaacgcagtttgaagagaacacatgaagaa

SEQ ID NO: 201124 - DNA, 82 bp, Homo sapiens
ggcggagctgtgcgagagcctcctcacttggaccatggtgaatccgggcagcagctcgcagccgcccccggtgacggccggc

SEQ ID NO: 201125 - DNA, 90 bp, Homo sapiens
aattgcgctggaccgtcgccttgctcctcgccgcggcggggactgcaggctcgattccttttgtccaaagtgaacccatctcagacacac

SEQ ID NO: 201126 - DNA, 97 bp, Homo sapiens
cagaaggtgtatgagatccaggacatctatgagaacaggtggtcgttctcgttaccggaccacttcttcagccaacaatcccaatctgatgtatcag

SEQ ID NO: 201127 - DNA, 100 bp, Homo sapiens
cgctgggccgggtttcggcttcggccacagacactttctgctgaaccatttgaaagcaagctgtagggccctcgacatggcagcacccaggagaataagg

SEQ ID NO: 201128 - DNA, 85 bp, Homo sapiens
tgatgaggcccctcaggagaggctcagggagactgaggtggggaagctgaggcaggaagccctttagtcacttgccgaaggccac

SEQ ID NO: 201129 - DNA, 90 bp, Homo sapiens
cacagggctgcccaaggccgccatcgtggtgcacagcaggtatcttgatgtcagccctgagcttgttgcttttgtcttccctggggaatg

SEQ ID NO: 201130 - DNA, 88 bp, Homo sapiens
tccagcatgggctcgcctgtcaacgcgcaggcaaccactgagaaaacggaaccgaatagtcaagaggacaagaatgatggtggaaaat

SEQ ID NO: 201131 - DNA, 90 bp, Homo sapiens
cttacaggagacctccctgtacacacaggaagagagaagggcacagttacctaagtatcaacgtaatcttcctcggccaggacaggcccc

SEQ ID NO: 201132 - DNA, 82 bp, Homo sapiens
ggagaataacttcttgctacagcataacataaggaaaagcaagcgtaatcttcagatgaaatcgtggacactttgggtgaag

SEQ ID NO: 201133 - DNA, 83 bp, Homo sapiens
tgctgtttctcttcgccgacgattcatgatgagatttcagtgtcaagcatggatgcttctagacaactaatgttgaatgaaga

SEQ ID NO: 201134 - DNA, 82 bp, Homo sapiens
actccacctcctggtgaagaaagcaaacagatttaagtgccctgtatgctcaaaatttgtatcctcagatgaaatggatttg

SEQ ID NO: 201135 - DNA, 90 bp, Homo sapiens
gttgtctccagagaactaaataattctaccaatggcatcgtcatagagccgagcgaaaaggcgaagattcctggtcgggtggcttccagt

SEQ ID NO: 201136 - DNA, 75 bp, Homo sapiens
tcactgagaagtattttgctctgcgaaacatcatccagaagcacccttacatctatcgggttacctttgccacag

SEQ ID NO: 201137 - DNA, 100 bp, Homo sapiens
gagaatgaagaggccagcgctagcatcattgttaaaatgacagactcgttcactgagcaggctgaccagctcatttcctccaaggtgcccaaggctgagt

SEQ ID NO: 201138 - DNA, 87 bp, Homo sapiens
tcgaagtctcggtcccgaagccgatctctctctcgttcaaggaagcgcaggctgagtgcatcgtccatgccaaagtgtgcggccctt

SEQ ID NO: 201139 - DNA, 75 bp, Homo sapiens
tccccctcgtgcagcaacccccacacccagcaccagcaaagtctggtggataaagtatctcgaagacagagacct

SEQ ID NO: 201140 - DNA, 74 bp, Homo sapiens
ctggtacatcgccgagttctcagcctcccgcgacgatgcccctcaacgttagcttcaccaacaggaactatgac

SEQ ID NO: 201141 - DNA, 82 bp, Homo sapiens
ggacccccacaatggggctgacgatggtgcagatcccaagtctgtagtatgtgcattcttcaagcaaggacagtgtactaaa

SEQ ID NO: 201142 - DNA, 98 bp, Homo sapiens
tatggcagcctcactcccagtagtttctgcatttagtgagataaggaacattccatacttatgatagatgaaatcaatgatatccgaattattggagc

SEQ ID NO: 201143 - DNA, 75 bp, Homo sapiens
gctgcagtgctgctgctgtttggaggtctgtgcatgcatgttcagccctcagcagggagagcacctatcagcaat

SEQ ID NO: 201144 - DNA, 100 bp, Homo sapiens
ccccagttgctgtgctccaaggacacacaggatcaattacatctttacaggaccctgatgctcccataagacagaaaatgccccttgatgatctggatag

SEQ ID NO: 201145 - DNA, 83 bp, Homo sapiens
cggctgattcatctcttgggtgagaagatcctgggcagcctccagcagggacctgtgacagggtttagaagtgtacctgcaag

SEQ ID NO: 201146 - DNA, 100 bp, Homo sapiens
ctggacttcatgcttagatacatgtataacaaggttctgaagcaaaaacacctggatgattgcctgcgacatgtatctgtaagaagatttgaatcattta

SEQ ID NO: 201147 - DNA, 90 bp, Homo sapiens
gttggctttcacaagtacagtctacaaaaagacctgctagagccattattgccccgtggctttctagaagatgaccatagaggaccttcc

SEQ ID NO: 201148 - DNA, 74 bp, Homo sapiens
acattgtaagaggtgacaacgtgagcatattaatgaaaagtgccataaactgaaaaaccaaacatgagggtagc

SEQ ID NO: 201149 - DNA, 90 bp, Homo sapiens
tctccctggaccgctgtgtaggcacctgagttaacggacgctaagcggggtaggggaaggattgttaaaatgagtcttcggaagcaaacc

SEQ ID NO: 201150 - DNA, 100 bp, Homo sapiens
ggcggcggagcggccggtccacggaggaggtttgcccgacttgctgcaaccacatttatcagtcaggggattcctgtgtacctcttttctgatataacgc

SEQ ID NO: 201151 - DNA, 83 bp, Homo sapiens
ctgaaaggagagacacttgtgaacattcaagtgaagcaaaagcctttcatgattatggttcagaatctcccatgatgattggt

SEQ ID NO: 201152 - DNA, 98 bp, Homo sapiens
caattcctgtgtttcatcataagaccaaggatgaatacttgatcaacaggatggagagcaatacatcatcatctttggagaatttagcgacggcgcct

SEQ ID NO: 201153 - DNA, 51 bp, Homo sapiens
gtagttacaaggattgtggagaatattgaactcttttatcttcctgccaag

SEQ ID NO: 201154 - DNA, 101 bp, Homo sapiens
cgctgcgcagcgtgcccaggaatatcccccgcaacaccgagagactgtgtggacactgccagcggctgcagccgacttggaatgacctgggagacaaatac

SEQ ID NO: 201155 - DNA, 56 bp, Homo sapiens
agttgagctgcagcgaagcacctctttacatggagtctcgccctgtcacccaggct

SEQ ID NO: 201156 - DNA, 74 bp, Homo sapiens
tggcatccagtggtggccagtagaggaggaggtgaacaaggaggagatgccttggttcaagggatggaaagtca

SEQ ID NO: 201157 - DNA, 100 bp, Homo sapiens
ccgccctgaagaaggagaaacgaaagaaacgtcggcaggaacttgctcgactgagagactcagtgcatccactctgggagagcgtggacctggttcctgg

SEQ ID NO: 201158 - DNA, 83 bp, Homo sapiens
agaagctccttccattcagatccaggttcaaaccttgtactactcagctgatcacaagctgcttgatgggaacctactagatg

SEQ ID NO: 201159 - DNA, 75 bp, Homo sapiens
tgaaagctttgtatgaacaaaaccagtctgatgtaatttacatagtacatgacgaagttaaggataaagcttttg

SEQ ID NO: 201160 - DNA, 83 bp, Homo sapiens
aaggtcgtccgtccttgaggttcatgttcctacctaagtcctgatccccaagtaagcccttggcacggaaattaatggattgg

SEQ ID NO: 201161 - DNA, 100 bp, Homo sapiens
cagaacctgcgggccatctaccagtgcttcgtgtggagcggcacggctgaggcccgcaagcgcaagggcaaatttattcggatcaactttgatgtaactg

SEQ ID NO: 201162 - DNA, 97 bp, Homo sapiens
aggccattagatccaaagccattcccaaattatagagctaattacaactttcggggcatgtacaatcagagaactgttttaatcatggacaaacaaa

SEQ ID NO: 201163 - DNA, 100 bp, Homo sapiens
tgcaggaacctggagtattcccacaggaggtggctgatcgactgcttcggaccatggcttttcatggcatataaaacctttgctaaccgagtaaacaatt

SEQ ID NO: 201164 - DNA, 90 bp, Homo sapiens
cttcatgacatcatccataccaaggagacgctgacacttgtgtttgaatatgtggaccatggccaacctggagcgcaccttcatcgccat

SEQ ID NO: 201165 - DNA, 100 bp, Homo sapiens
tgtgatgtcacatctaggagcatctacccatggacagacatgtcttcccatggaggttagcactctacgtatatgaatatctgctccatgtaggagctca

SEQ ID NO: 201166 - DNA, 51 bp, Homo sapiens
ctagagtggttcagccacaaggaggccctagactggagctggttacagacg

SEQ ID NO: 201167 - DNA, 100 bp, Homo sapiens
gagcaggagaagttcctccgccaccactttgagacactgactgagtccccctgcagaggcatctctgacacgctgtgggccatcgagatgtgggaccctg

SEQ ID NO: 201168 - DNA, 100 bp, Homo sapiens
taaggattccaagtaactcttatttggatttgatcaaagatctgaaatctgaactgtcaggaaactttgagaagacaatcttggctctgatgaagacccc

SEQ ID NO: 201169 - DNA, 98 bp, Homo sapiens
ggtgggctttcgcccgcggctcctgagggatcggtctcagccgcgcggacaaccttggagtgtacactgaagccaggcttggtttacaacaaggtgaa

SEQ ID NO: 201170 - DNA, 98 bp, Homo sapiens
agaaacttttgcccttatcagtaacacctgaggacctggtggcaaatggggcccttgtcagcatctgtaacaagtatggagagatgcctgtggacaaa

SEQ ID NO: 201171 - DNA, 73 bp, Homo sapiens
gacggacccacctggccgccctgcctcccttccaggttgaaatcacaaagattagacacctttttagataggt

SEQ ID NO: 201172 - DNA, 101 bp, Homo sapiens
tgagaagcaagaaggccctggacacagcaatatctctgggctttcacaggtttatcaggtagaagatgtgtgtgaagaagaaatgccagaagagtcagatg

SEQ ID NO: 201173 - DNA, 76 bp, Homo sapiens
cggcaacataattgtggcacaccactgcctgtttcatctgagtatgctggtatcctcctgggcatcacaaatacat

SEQ ID NO: 201174 - DNA, 80 bp, Homo sapiens
aggatcgtctggtacagcagcttaagcagcaggtgtacacttaaagcgttctgggaatatgaatcccttctgcaccctgg

SEQ ID NO: 201175 - DNA, 100 bp, Homo sapiens
ctggaagctaaagagctcttcagatcacctctgcagcctgcacagccgggcctttggactcctggatgctagagtgacctgggcgctgaggagggccccc

SEQ ID NO: 201176 - DNA, 50 bp, Homo sapiens
ggagtgaagctgcagaccttcgtggaaaatggctttgtaaagaagtttga

SEQ ID NO: 201177 - DNA, 50 bp, Homo sapiens
agagaacagggtggccgcttggtccagattgcttccaagtatgatcatca

SEQ ID NO: 201178 - DNA, 75 bp, Homo sapiens
cctggttcctcttacttcaatttgaacccatttgagagctcacaatgtctctctgcaccaagctccatgactcag

SEQ ID NO: 201179 - DNA, 99 bp, Homo sapiens
ccctctccctcttcgggccacctgggacggtacttctgggcctcttctgcctacattacttccacagaaattccgggtagatatgcctggctcaggcag

SEQ ID NO: 201180 - DNA, 83 bp, Homo sapiens
tccacctttacttttacctacgttggcggccccagaagggacttaagtcacaacagattatctttcatcaaggcaagttccat

SEQ ID NO: 201181 - DNA, 89 bp, Homo sapiens
ctcctccaacagctacttcctgggcggggtcctgatcgttctctacagcctctgcaaggaagagatgtcaggagaaagtgtggtgagct

SEQ ID NO: 201182 - DNA, 80 bp, Homo sapiens
ggaagagccggggccgtggctgacatggagcaggctactgcagcactggggtgtcagttgttggtccgacccagaacgct

SEQ ID NO: 201183 - DNA, 82 bp, Homo sapiens
ctccgtggccttagctgtgctcgcgctactctctctttctggcctggaggctatccagcacagccctcagcgcctttttcca

SEQ ID NO: 201184 - DNA, 97 bp, Homo sapiens
ccaagagcagagagggctcagatgcacagcctctgccttcgtggagtgggcattttcaggtgctgctagctgaggaggggatagctcctctttcttc

SEQ ID NO: 201185 - DNA, 89 bp, Homo sapiens
aaaggccaatttcatgaatttcaagagagtaccattggggggacttgcaacaaagcattgccagagaacctagtgctccttcaattcct

SEQ ID NO: 201186 - DNA, 74 bp, Homo sapiens
gagacgacgctgctgggtccgctgagcggggcgacccgaggtcctgggaactccaacaagggagcaaatcagag

SEQ ID NO: 201187 - DNA, 75 bp, Homo sapiens
ttcaacagcagcaagcatttccacctctatggcagcaacgcctccctggcccagattgactggggcgactttggg

SEQ ID NO: 201188 - DNA, 88 bp, Homo sapiens
gccctggccatctaccatgtgggtaaaggagctggaagtgcgaaaattgatgcatgtgagaggagatggaccctggtattactatgag

SEQ ID NO: 201189 - DNA, 83 bp, Homo sapiens
gtcggattgcacaccctgttgtgaagtgcacctactgcaggactgagtaccagcaggagagtatttagtgtctctgatccggg

SEQ ID NO: 201190 - DNA, 89 bp, Homo sapiens
tggcaggtgacagtctgcatgtgcagttttcagtttgtggggacattcatggacaattctttgatttgatgaagctctttgaagtcggg

SEQ ID NO: 201191 - DNA, 137 bp, Homo sapiens
gcggctgctgcagcccgggcggctgccgagaaggagggaggggaaacacaaagccggctacgcgctgcgagcttagaccatgctcagcctccaagcagccttgtcatcgacaaagaatctgaagtttacaagatgct

SEQ ID NO: 201192 - DNA, 133 bp, Homo sapiens
gctgccgaagtcagttccttgtggagccggagctgggcgcggattcgccgaggcaccgaggcactcagaggaggtgttggagagcacaatggctgaacaagtccttcctcaggctttgtatttgagcaatatg

SEQ ID NO: 201193 - DNA, 50 bp, Homo sapiens
tcagaaggagcaggattaccaaaggatggggtcgaggatttggtcttttg

SEQ ID NO: 201194 - DNA, 100 bp, Homo sapiens
gctttgcaacagaattacagagtatgatgactaccgaccagactcccggaaatcatgttggtaggatcccagtctttttcgcctggagggcccaatggga

SEQ ID NO: 201195 - DNA, 88 bp, Homo sapiens
tctgcatggccctggggcgcatgaattcaagctggatcctcatacagtgagaagcgccaccttcaagtgaacgtcaccaacccagtac

SEQ ID NO: 201196 - DNA, 100 bp, Homo sapiens
cttccgccgccgggctcggggcctccgcagcgacaacatggaggccgtgaagaccttcaatagcgagatgccttcaattaagttgcagagttctgatgga

SEQ ID NO: 201197 - DNA, 100 bp, Homo sapiens
aagtgagaatgctcagttacgaaggtttcgacacagccccaactgctggtacctgagaaactggactatccacacctggattaggcagtgtctaaaatat

SEQ ID NO: 201198 - DNA, 115 bp, Homo sapiens
gacaacggagaccagacctactgcagccacgcgggcgagcggctgtgtggatgtcggcgaagccgcgggcgaggagatggggaagaagatgaaggtgatgaagacaggttggaca

SEQ ID NO: 201199 - DNA, 100 bp, Homo sapiens
aggaacctgctttctctcgatgaggataacatccctccagaagatgaattacctctggactacaaatttacaagattctcttcaagcaattcaaaaacag

SEQ ID NO: 201200 - DNA, 115 bp, Homo sapiens
gtggaagagcgagctttttggaactgtgcacgggacagattggacgcacacccctcgggaggcgcgaagatcttgcaggagagagagttactgcctgtgaagaaatttgaaagtg

SEQ ID NO: 201201 - DNA, 97 bp, Homo sapiens
tactgcacggccttggctggactctgcgggactatgtccgaggatacatccttcaggtcagagatcagatctcgctgtcatggtctgcggcaagtag

SEQ ID NO: 201202 - DNA, 75 bp, Homo sapiens
cgcgaatatcgtcatcgttagaaggcagctaagaaagagcatgcagctatcattctttggaacactacatcttgg

SEQ ID NO: 201203 - DNA, 100 bp, Homo sapiens
gcggagagcaacagcgcgccgtcaggatctggtgattttgaagagaaaccacaacaacaaagatgaaaacccctgcttcctttacctgaggtgtggccct

SEQ ID NO: 201204 - DNA, 80 bp, Homo sapiens
atgccctgcagtacctgcagaaggtctctggagacatcttcagcagagcccaactcagagccatgcccccggggagcccc

SEQ ID NO: 201205 - DNA, 82 bp, Homo sapiens
tgaatcctgcggcagaagccgagttcaacatcctcctggccaccgactcctacaaggatcgaatcatcaatttagttgttgg

SEQ ID NO: 201206 - DNA, 75 bp, Homo sapiens
gcgcgccgccctctcgtcccactttccaggtggtcgtgtgatggtaacagatgctgacaggtcaatactatctcc

SEQ ID NO: 201207 - DNA, 104 bp, Homo sapiens
gtggctggctgcggccagaatcggagccccaaccgcgctgccgcttggtgatccagctatttttcctgccgtaattgtggaacatgttcctggtgctgatattc

SEQ ID NO: 201208 - DNA, 82 bp, Homo sapiens
gcaaaacaggcagaaatggaagtcaagagggaatcttatgcaagagaaagaagcaactggatgatgctcgcaacaaagctga

SEQ ID NO: 201209 - DNA, 75 bp, Homo sapiens
ccacggagcctcttccagaaaagacacaggagagccttttaatgacagaatggcgtttttctcgaggagtacaag

SEQ ID NO: 201210 - DNA, 100 bp, Homo sapiens
gcctcgtccagcctaggttccacccttttctgggaactgttttaactcaaatgggtgatgaaaaggactcttggaaagtgaaaactttagatgaaattct

SEQ ID NO: 201211 - DNA, 100 bp, Homo sapiens
cctacctgctcaagccgctcttccccacctgcccggtgcccgaggaggcagccaagctcgtagcctgccactccgtgcaggaacagctgccccctgggtt

SEQ ID NO: 201212 - DNA, 100 bp, Homo sapiens
ggagcatctacccatggacagacatgtcttcccatggaggtcgttgaggacttccacatggagattggcacaggaccagactcaagacacacaactcata

SEQ ID NO: 201213 - DNA, 98 bp, Homo sapiens
atatctagcgtggtccggaatggaaaagtgggactggatgctacaaactgtttgaggataactgacttaaaatctggtactatactggcaattgctgg

SEQ ID NO: 201214 - DNA, 100 bp, Homo sapiens
aaactccttattagagagtctacagataaatctacagagacaattcctcaagtggacttggccatgattggttctgagcctgtccggcagtgcggcggat

SEQ ID NO: 201215 - DNA, 75 bp, Homo sapiens
cacggatgagcccggcctcccttttcatcaggacgggaaggatcacagaagaactgcagcttcctggggagcagt

SEQ ID NO: 201216 - DNA, 90 bp, Homo sapiens
ccttgttgccgtcccttcgcctccttcaccgccgcagaccccttcaagttctagtcatgagacctcacctctgaggaccagatcgtactg

SEQ ID NO: 201217 - DNA, 90 bp, Homo sapiens
ttgcaacagtggccgcacgcatagatggcatccacagcgtcacggccttctgcaccctgcgtgtcaccatcatcacggacgacatgctga

SEQ ID NO: 201218 - DNA, 82 bp, Homo sapiens
tgtcttgttgcgggcaccgcagtcgccgtgaagatggcgtctaccagccgcctatgtgcttcccaagctgtatgtgaagcta

SEQ ID NO: 201219 - DNA, 100 bp, Homo sapiens
gaaacttcaatgtctaccttagcgatttgatcccagtggatagagccattgaagacaccagacctgctggaaatcaatgtggactgaacataaatcacct

SEQ ID NO: 201220 - DNA, 100 bp, Homo sapiens
cgggatccccagcaggagcaggagcgggagcgggttgactatagtcaatggggccaatggagccaagtgtatggaaacccacaacagtatggacagtata

SEQ ID NO: 201221 - DNA, 82 bp, Homo sapiens
cccagctagccatcttctaattttcattccttcaaaggtatttatttgaactgaaggaagatgatgatgcatgtaaaaaagc

SEQ ID NO: 201222 - DNA, 74 bp, Homo sapiens
cacgctgggtaatgaggatttgactgtgaagggttgttacaagttgagttgaaaacaagaaaaacttgcttttg

SEQ ID NO: 201223 - DNA, 100 bp, Homo sapiens
ttctgtcaccttcctcacggaccttggtcacggccgcaggtgaccccttagcccagctccagtgggcgggtggcagaccctggaagctgtcctgaatttc

SEQ ID NO: 201224 - DNA, 98 bp, Homo sapiens
ggaaacattgaagagattgcatataatgctgtttcctttacctgggacgtgaatgaagaggcgaaggtacactgaggaggggacggctccgtcttcac

SEQ ID NO: 201225 - DNA, 100 bp, Homo sapiens
gcttatctttttaaacaaggactcttcaggtttgaagactgcttcattctgcctctagtaccagcggtttctctgttctgtgatcaatgtgattcacagg

SEQ ID NO: 201226 - DNA, 90 bp, Homo sapiens
gcgagatcctggagagcctgcaggacggcgcggcagagtccccgtacgcctacagtaacgccttgaaaagatcttttgaggtcgaggagg

SEQ ID NO: 201227 - DNA, 90 bp, Homo sapiens
catcgagtgggctgcacgcatttcggaagaatatttttctcagattttgaacacagcacgaaaacattttggagctggtggaaatcagcg

SEQ ID NO: 201228 - DNA, 82 bp, Homo sapiens
agacgaagtcttttggaatacaaggattgtaccgattttgcgtgaattagaaaaggctaatgtatgtgttgtgaagttagaa

SEQ ID NO: 201229 - DNA, 100 bp, Homo sapiens
ggaggcgcgcggaacagtcgccgaggcgattcccgcccaggataaaagaatcagagtgtctcaacccttgacaagaggaccaagtgcctttattccagag

SEQ ID NO: 201230 - DNA, 101 bp, Homo sapiens
cgggcgtccgctcctcagcggatgtggcagccccgagccatggctctcgccgtccgagtcgtttattggacagtcattttgtttactcattcagccctgtt

SEQ ID NO: 201231 - DNA, 100 bp, Homo sapiens
ccgctctgtggagtttgaggagatggacattttggaccagggagccctacagcgtctcttcaaaaaggtgcttttgaagatgatgatatcacgcacgttg

SEQ ID NO: 201232 - DNA, 75 bp, Homo sapiens
tattcagcagagagctattattccctgtattaaaggactggagtccagagttgccaccagatgggatattcaaaa

SEQ ID NO: 201233 - DNA, 101 bp, Homo sapiens
tgttaatgcttgatgggatgccggcagtcagagtcaaaacagagcttttggaatctgaacaagggatttctacctggacaaggactggtactatacccaca

SEQ ID NO: 201234 - DNA, 100 bp, Homo sapiens
cagtacctgcagaaggtctctggagacatcttcagcaggtaaactttcctgagaatggctttctctctcctgataaactgtctttgctggaaaaactcct

SEQ ID NO: 201235 - DNA, 98 bp, Homo sapiens
aaattcttatgccggtctagatccaagcaaccagacctatgaggaccagcacagcagtgaggaggaggaggaagaggaagaggaagaggaaagcgagg

SEQ ID NO: 201236 - DNA, 100 bp, Homo sapiens
gccgcgatggtgacccggttcctgggcccacgctaccgggagctggtcaagaactgtggtgtccatgggctctggagaccatcagttcaacctcgcagag

SEQ ID NO: 201237 - DNA, 75 bp, Homo sapiens
ctgggaactcttagctgagcaggcgagaggacatggatttgattgacatactttggaggcaagatatagatcttg

SEQ ID NO: 201238 - DNA, 101 bp, Homo sapiens
actccaagtatgtactctcaggaactattccagctttctcagtatctacaggtttttcgttggaatatacgttgcacatttatggcgattctgagtgtgag

SEQ ID NO: 201239 - DNA, 100 bp, Homo sapiens
cccgcgccgacgcggccccgcaagccagacctgcaggtgtacctgccgcgacaccgaggatcacagtcaccttctatatagcaccatccccaggatgcag

SEQ ID NO: 201240 - DNA, 100 bp, Homo sapiens
acaaatacgcctacaccaagcagaaagcgacagggattcaattagcagagcctcacagacaatggccaaatgtgtcaaagctgtcacagagggtgcccag

SEQ ID NO: 201241 - DNA, 98 bp, Homo sapiens
gatatcgacgtcgtgatccagaagtccagagctgaggactgcctgtttgcagtcttccgtgtgtgctaagatcgtgcagctcctggggcagaatgagg

SEQ ID NO: 201242 - DNA, 100 bp, Homo sapiens
tgccttgaagaataatcgcccagctgagggactcctgcagacatggctgttggagatgaaccttgttcatgcaccccagccctactgccaataaagggaa

SEQ ID NO: 201243 - DNA, 82 bp, Homo sapiens
gtggacagcgaagctgctgcggttcctgagccggagactagacgcttgaagcaaagctgccatcccagaagacgacatgctc

SEQ ID NO: 201244 - DNA, 74 bp, Homo sapiens
agcagctggactatggcatctatgttatcaaccaggttcatatccagctttcagagtggcaccgtgcaattttt

SEQ ID NO: 201245 - DNA, 74 bp, Homo sapiens
gtggccataccgttgaccgctcctccaactaaccaagctcatctcctgtcctgggtgtgaacgagtatatctta

SEQ ID NO: 201246 - DNA, 100 bp, Homo sapiens
tgacaggtccacagatcgcctgccttcagctcacacatgtggccacagatgtctttaattccaaaaacctggccgttcaggcacaaaagaagatcttggg

SEQ ID NO: 201247 - DNA, 83 bp, Homo sapiens
ctgtcccacatataggtggattaactgtctggcaaaggcaggtgtggacactgccagcggctgcagccgacttggaatgacct

SEQ ID NO: 201248 - DNA, 100 bp, Homo sapiens
actggagttattccatcaactacttgcactgatgatatcatcaagttgaatcgaaaggaagggaagaagcagaattttccaagactaaatagaagactcc

SEQ ID NO: 201249 - DNA, 83 bp, Homo sapiens
cggcaggacgcacttgtcttagcagttctcgctgaccgcgctagctgacaaatttacatgtattggagaccagaccagaagcc

SEQ ID NO: 201250 - DNA, 75 bp, Homo sapiens
ctctgggatccccgccgctctgtctacaacccgagggagtgcatccgccccaacccttttccccctcgtctcctg

SEQ ID NO: 201251 - DNA, 100 bp, Homo sapiens
attggcctttgggtttcagtgcaaaatctcccacaatgggagggggctggaggagaactatgagattgcagagggggtctgcatccctcgcagtgccctc

SEQ ID NO: 201252 - DNA, 75 bp, Homo sapiens
gctgaatccagtaccaaaaacgtcaacaacagttttacggaggttgtgcccagacatttccttcttccagagggc

SEQ ID NO: 201253 - DNA, 100 bp, Homo sapiens
tctattcatgttgctttttgatggccatggcataaggaactctatcccaggaatacagctttgcattagcataagctgtggccatgactactgaagtagg

SEQ ID NO: 201254 - DNA, 90 bp, Homo sapiens
gtagtgctacttaaaatatgctggggaccatcaccatcacagatgagcaccatgccaggactgcccacccggccctgcttttatgacata

SEQ ID NO: 201255 - DNA, 75 bp, Homo sapiens
tgcgaccgtatccgctagcgcggcctgggatgcgcttgggctccctgggaccgacgtcatggttcggtgcctcaa

SEQ ID NO: 201256 - DNA, 98 bp, Homo sapiens
gtcactcgtgtccagatacggaggcggtgtaccagcaccgcaggaatgtatcctgtcaggtataatgtcagtgaatggcaagaaagttcttcatatgg

SEQ ID NO: 201257 - DNA, 50 bp, Homo sapiens
gaagagggcattctgcacagattggacacttcacggccatggtatggaag

SEQ ID NO: 201258 - DNA, 117 bp, Homo sapiens
ggagatgtccgagcccaaggcaattgatcccaagttgtcgacgaccgacagggtggtgaaaggtatttatgagcctccatttcttatactactgcagtgaaccaacattggatgtga

SEQ ID NO: 201259 - DNA, 74 bp, Homo sapiens
gaccggcaaattaaagcaattatgaaagaagtcattccttttttgaagagaggagtctgcaatgccgagtggag

SEQ ID NO: 201260 - DNA, 100 bp, Homo sapiens
ctggacttcatggacacctttgagcctttccagggggacgtgaccttggacccggacaccgccaaccctgagctgatcctgtctgaagacaggcggagcg

SEQ ID NO: 201261 - DNA, 123 bp, Homo sapiens
gttggcggtccctgtgacctgtggagacacggccagatctgccctccagaactgtggctgcaccatctgtcttcatcttcccgccatctgatgagcagttgaaatctggaactgcctctgttg

SEQ ID NO: 201262 - DNA, 74 bp, Homo sapiens
ggccgagcggaggcctgagtgcacccgctgcagtattggtaaaggttttcaaggtgtcatgaaaagatggggat

SEQ ID NO: 201263 - DNA, 80 bp, Homo sapiens
ttcgccagcccgtgccgcgagcgcggcctgcaggagggtggtgaaggaggagatctttgatgacaatgccaagcttccct

SEQ ID NO: 201264 - DNA, 75 bp, Homo sapiens
catggatgttcttcttcgagtatttgtagaagggagttggtggtgaccccgcccagttggcccagaggatctctt

SEQ ID NO: 201265 - DNA, 50 bp, Homo sapiens
tgaggacagaagcctacaggcagagccagttaaaaactcaccacttaaac

SEQ ID NO: 201266 - DNA, 90 bp, Homo sapiens
agaggatgccctgatggcagttagcacactggtggaagcttcataaacaagcagatatgcaagaagagaaaaaccgaatcgaaagagtcc

SEQ ID NO: 201267 - DNA, 82 bp, Homo sapiens
ccgcctgcccaaccgcgtgaccttgattgagttaatgaacttcacgcctcagcgtccagccagaagatacctgaaattcctg

SEQ ID NO: 201268 - DNA, 100 bp, Homo sapiens
aaaaacccccatcctgggaaaaatggggaagctggacccagatgatgtggtaccagttggccaaagaagagcctggtgttggtgcatgtgctttggacta

SEQ ID NO: 201269 - DNA, 75 bp, Homo sapiens
ccgcgtcccgctcgctgggagagaggtgagaagccctaccactgcaactgggacggctgcggctggaagtttgcg

SEQ ID NO: 201270 - DNA, 100 bp, Homo sapiens
cttacttctgttgggacaggccttgcatcctgtgctgccaactccatcaatcagggacctgatgcccagaaccctggacgggcagatcaccatggagaag

SEQ ID NO: 201271 - DNA, 74 bp, Homo sapiens
ttttgaggaagatgtgacaactaccggagacccaacatgagtgaagtttcctgcaagaaacgggacgactattt

SEQ ID NO: 201272 - DNA, 100 bp, Homo sapiens
ctttggagtctgccgtgatggcatcaaccgctacgactgtgtctgccaacctggcttcacaggtctcctctgagcctccggcctccataagacccaaaac

SEQ ID NO: 201273 - DNA, 98 bp, Homo sapiens
gcagtcactgtacttagagtggatcagaacactgatatttgcatttaatggggaacaaaagatgaagaaggaaaaggaatatattcactaaggattct

SEQ ID NO: 201274 - DNA, 96 bp, Homo sapiens
ctctcgctcacgcagcaggagcaggggacgaagggcatgccattgcaagagaatgctcagccatgttcatctggggacctgctcctggtagagcaa

SEQ ID NO: 201275 - DNA, 100 bp, Homo sapiens
gcgactccctctttggccctcggagcgcagcacccggcggacaagcggcgggacgccaggacgcggcgagcaaggtgacaaaggtgacacttgcttcaac

SEQ ID NO: 201276 - DNA, 74 bp, Homo sapiens
gctccgggcacccccgagggccccgagcccgagcgccccagcccggggcagagcggcttgggtaaatccacctt

SEQ ID NO: 201277 - DNA, 82 bp, Homo sapiens
cgtgtcgttctgcaccagcgccttgatcgagtacttgaggtttacccaaggtccagcctagcccctaggcaccatgtcggac

SEQ ID NO: 201278 - DNA, 98 bp, Homo sapiens
ctctcctgggcacgcccccgcccgggctgccctcgggaccgccagcggccaccgcgcaggcccagctactccagacttctatgctttggtggcccagc

SEQ ID NO: 201279 - DNA, 50 bp, Homo sapiens
tgtattcagtggaggaagctgccctactgccaataaagggaaaataagag

SEQ ID NO: 201280 - DNA, 100 bp, Homo sapiens
atacattgacaagtggtttttgtataagatgcgtgatattttaaacatggaaaagacactgaaaggcctcaacagagaagcaggagcatgtgaagctcca

SEQ ID NO: 201281 - DNA, 98 bp, Homo sapiens
gaaagatcgccagcaacgtgcagaagaagctcacccgcgcgcaggagaagtcccgacgaagattcaaaagggacccgacaacactaaggcgcgcaaag

SEQ ID NO: 201282 - DNA, 100 bp, Homo sapiens
aataactcaagtcacctgtactggaaatcagtttgctgaaattaatcaacgattcttgaagttgaagaaaagcttgtagattttcagtggaaactgggta

SEQ ID NO: 201283 - DNA, 97 bp, Homo sapiens
tggactccaataaatacattgagcatctgctgactcagcttgaggagcaacacaggagtctctggaggcatggaggagtgacggcaggaactttctg

SEQ ID NO: 201284 - DNA, 100 bp, Homo sapiens
agcagtatttaaaggacaaggaaccaaagaatatgaaattcatcatgataacatccctgaggacctcagagaccctttctacgttgaccagtatgagcag

SEQ ID NO: 201285 - DNA, 93 bp, Homo sapiens
cccaggcccacggaggaagagccgggcagtccctggagcgggccagctggagcagatccgcagggacatccgagacttccggtctagcgcggg

SEQ ID NO: 201286 - DNA, 75 bp, Homo sapiens
atcccagcctcaggcgtgcgcggacggtgtgcgggaccatcagcacgtgcccatcgacatccagaccagcaagct

SEQ ID NO: 201287 - DNA, 50 bp, Homo sapiens
ttcgagttcttcgtgctgctcaagatgggcaccaacaaatgcgccagcca

SEQ ID NO: 201288 - DNA, 75 bp, Homo sapiens
cattgtgcaactggtgaatgagcgacagccccaggcccgggttgtggtgctgacagaccccgtgcggctgacaca

SEQ ID NO: 201289 - DNA, 74 bp, Homo sapiens
ggccagacgccgacgtcgaccagcagagactgcttggttctacagccattgggatccagacatcagagggtgtg

SEQ ID NO: 201290 - DNA, 51 bp, Homo sapiens
cgcggctctaacggggctttctacaagatgaaagttttagacaaagccgat

SEQ ID NO: 201291 - DNA, 100 bp, Homo sapiens
cgggaccctgagatggggggaaagccggcggctatgagaggttttcctccgagtacccagaattctgttctaaaaccaaggccctggcagccatcccacc

SEQ ID NO: 201292 - DNA, 75 bp, Homo sapiens
gaagaactggtgagccaagggatcatgccgcgtgtttcagtcacctccagtaacacgggcgtgccagatatctcg

SEQ ID NO: 201293 - DNA, 98 bp, Homo sapiens
gtctcgtgcagacttgaccgagtacctcagcacacattacaaggcccctcgaatggtgctggcagcagctggagactatgtgaaagggtttggaggaa

SEQ ID NO: 201294 - DNA, 73 bp, Homo sapiens
tggacctcttggaaggtataactggctttgaagactctgtccgaaagtcatcaattccaaagaatgtcttttt

SEQ ID NO: 201295 - DNA, 83 bp, Homo sapiens
ccggggtttggtaccgagcggagaggagatgcacacggcactcgagtgtgaggtgagaagccctaccactgcaactgggacgg

SEQ ID NO: 201296 - DNA, 74 bp, Homo sapiens
acccgggtggttaaacttcgcaaaatggaccctgatgctcccataagacagaaaatgccccttgatgatctgga

SEQ ID NO: 201297 - DNA, 95 bp, Homo sapiens
ctgactgtggagatggcggctcagaagataaacgaggggctggaacacctcgccaaagcagagaaataataatcacagctggcttatcaatattg

SEQ ID NO: 201298 - DNA, 100 bp, Homo sapiens
ggtgcagatgcagtgtggctctggatagcaccttatggacaggtatgatctcgtgaaatcttgagagaaactgaatgacgaatgaaactattgttcctgt

SEQ ID NO: 201299 - DNA, 83 bp, Homo sapiens
gtgtactgctccaagtacaacgaagccaccggcgtgtgccccgacggcgacgaggtcggcactcttcaccctcccgagccctg

SEQ ID NO: 201300 - DNA, 100 bp, Homo sapiens
gtggcggcggcctcggctgaactgctcatcatcggctggtacatcttccgcgtgctgctgcagttgattgaatcaacaagcactatggatggagcaattg

SEQ ID NO: 201301 - DNA, 100 bp, Homo sapiens
catacagaaccttgtgttttacattgaagctgcatataaaactgctccctcaggcgaaccgcaaattgaggatgacatgttaaaagaagaaatgaatgga

SEQ ID NO: 201302 - DNA, 82 bp, Homo sapiens
ttgggaggattaagtgaggggacatgagcatcttcatgatacagttaagaggaatcttgacagcgccacttcccctcagaat

SEQ ID NO: 201303 - DNA, 90 bp, Homo sapiens
tacgacctcaggtcctcagaccgaccagcccaagaaacatctcaccaatttcaaatctggaattgaatgatctggcacgggaccctccag

SEQ ID NO: 201304 - DNA, 100 bp, Homo sapiens
ccagccctttgcacctcgcagctaaaaacggccacatcgacatcatcagaactcagcctcctcccaagctccctgtgggtcctagccacaagctctccaa

SEQ ID NO: 201305 - DNA, 75 bp, Homo sapiens
agataacctgtctggatgggtttgaagttgtggagggacgtgatcaccatcgacaaggcgacgggcaagatctcc

SEQ ID NO: 201306 - DNA, 134 bp, Homo sapiens
aaaaagtgcctgggttagccaagagagacagagaacactggatagacttcgaacatttaaacagaattatatccagatcgagagacagaagattctgaaagggttcaatgaaatgagagtcatcttggacaatg

SEQ ID NO: 201307 - DNA, 100 bp, Homo sapiens
taatgttccaggacacctgccatcatggagggttatccagcacctggaggatacctgctacctcatcaacaaagagagcattgtggatgtagaaggtgtt

SEQ ID NO: 201308 - DNA, 74 bp, Homo sapiens
tcttctctaaaaatgatggtggtggtttttccccatcatcggccacatgggcatctgcacatccacaggagtca

SEQ ID NO: 201309 - DNA, 97 bp, Homo sapiens
acgacaagcacacactatggcgctgaaacggattaataaggcttgtccagccggaagccctgagggcagctgttcccactggctctgctgaccttgt

SEQ ID NO: 201310 - DNA, 76 bp, Homo sapiens
aagaggaatgacaaacaaccagctcttcaggttatcaatactctggctgaccatcatcatcgtgggactgactttg

SEQ ID NO: 201311 - DNA, 74 bp, Homo sapiens
gaggccccagggcgtcgcagcgccgcgtgcggcccactcacgggccgggagatgaactcaatgacctctactgc

SEQ ID NO: 201312 - DNA, 100 bp, Homo sapiens
gccggcagccggcccgcagcgcgttctcccgggagaggaatcatcggaatccttcaccatggcatccagcccggcccagcgtcggcgaggcaatgatcct

SEQ ID NO: 201313 - DNA, 139 bp, Homo sapiens
agggaagcaccatcggcgtcgacttcaccatgaagacgctggagatccagggcaagcgggtcaagatagcctgggctggaagctcttctacgtcacaggctgcctgtttgtggctgtgcagaacttggaggactgggag

SEQ ID NO: 201314 - DNA, 82 bp, Homo sapiens
ctggcggtgcccgaggagtagtcgctggagtccgcgcctccctggaattcagaaggagctggcggacatcactttagaccct

SEQ ID NO: 201315 - DNA, 75 bp, Homo sapiens
cgtcggcaagttctgtagagaaactcgggcaacctttggatacaattatccatcagttgcagaaacgttatgcag

SEQ ID NO: 201316 - DNA, 97 bp, Homo sapiens
gagcctagaatgcatcagtgcccttgtggcgaatggggctcacgtcgaatcgttcctgcaatcccaacctgatgagctttattacacgcataactgc

SEQ ID NO: 201317 - DNA, 74 bp, Homo sapiens
ccaggtggcctccttggtatgccagaccaagatcactccatggatgaaatgacagctgtggtgaaaattgaaaa

SEQ ID NO: 201318 - DNA, 88 bp, Homo sapiens
ctcaatttgctggatttaagcactgctgcactttatgaggtcctggcattgatgtgcctgctccagacatgagcacaggtgagcggga

SEQ ID NO: 201319 - DNA, 50 bp, Homo sapiens
aagctggcttttatcattgtcatggagatggagtctcgctctgttgccca

SEQ ID NO: 201320 - DNA, 88 bp, Homo sapiens
cgagacacctactcagagaagtccctccaccggctctgtggaaggagatggataaagcagatgtttattggggcattccttatcccag

SEQ ID NO: 201321 - DNA, 96 bp, Homo sapiens
tcctccgcggggtaatggggggtcagagtgccggaccccagcacacagaagccgagacggcccctggatcctcctggaatccccgatccctcttgc

SEQ ID NO: 201322 - DNA, 119 bp, Homo sapiens
ttcaagatcaaaacagttgaattacaaggaaagaagatcaagctacagatatgatgatgattattctccaccgtctaagagaccaaaggccaatgagctaccgcagccaccagtcccgg

SEQ ID NO: 201323 - DNA, 100 bp, Homo sapiens
caccgcctccagcttgccaccaaagacctgcgactttgctcagaaaggacccaggagcgataacagtaaatcaaataagatatttgtcggtggaattcct

SEQ ID NO: 201324 - DNA, 80 bp, Homo sapiens
gtcggcgggaaccccctgaaccggagtacggacattgctgcaggagaagaggttgccatcaagcttgaatgtgtcaaaac

SEQ ID NO: 201325 - DNA, 100 bp, Homo sapiens
cgcagtcatcctgcgacctccagaatccaccggggtgcagcgaggctgtggaaagtcccacccagaacgtgaggggccagcagcctcccccgatgggtcg

SEQ ID NO: 201326 - DNA, 100 bp, Homo sapiens
ctgcactgtggcaaggcttttgcttccaaatacaagctgtatagatggatctgtggatgctgaacgcagtattgttacagacttggtcagtcaaatggac

SEQ ID NO: 201327 - DNA, 132 bp, Homo sapiens
agcaccgcagccttgggcctcgcgccggctatggccgtgccctggggctgagccctcaggattttttatcaagcagaaatgcatcgaacaacgagaatcaagatcactgagctaaatccccacctgatgtgt

SEQ ID NO: 201328 - DNA, 75 bp, Homo sapiens
ggaagatgtaaagcaatatttcgagcagtttggcaagggtcctggtcctggacaaaggagtagtagctgaatttg

SEQ ID NO: 201329 - DNA, 100 bp, Homo sapiens
taaggctaaacttgcaatatggtggaatttcccgttggttatgctcatttggaagatagggcctgcactgagctgtggaaacacagtggttgtcaaacca

SEQ ID NO: 201330 - DNA, 80 bp, Homo sapiens
aagccggagacagcagggtgacagaagagaagctgaatttggacgacagccagtgggaggacatccacgttgtcaccgga

SEQ ID NO: 201331 - DNA, 75 bp, Homo sapiens
tccaactttgcgacggaaatgtgtcatcgaaagccaggtttgatgagaagagggcagtgcagcagctgagagcat

SEQ ID NO: 201332 - DNA, 88 bp, Homo sapiens
acaacagcctggcgtccgccacgatcttgagccagatgattgtgcatccatttacatctttaatgtagatccacctccatctacttta

SEQ ID NO: 201333 - DNA, 95 bp, Homo sapiens
tgaccctggaacgagaccaggccgtgcaggccctgaggatgcatgggctccccagaccaggggcacagggacagtgatccccccacaggcctcgc

SEQ ID NO: 201334 - DNA, 98 bp, Homo sapiens
cacactccaggaatgccagtgcatcttttgcacagctgagtgtacctcacagccttctaggatctccagagtggacaggaatctcacttggagggacc

SEQ ID NO: 201335 - DNA, 50 bp, Homo sapiens
agctccagggcaaggcgctcaaggttgttggcaaggattctgcagaaaaa

SEQ ID NO: 201336 - DNA, 100 bp, Homo sapiens
agcctcggaaagtgctcctgcggctgtatggagcgattttgcagatggtctctaattaacagaagatggcaaagcccagccacagcagctatgtccttca

SEQ ID NO: 201337 - DNA, 49 bp, Homo sapiens
acatgagacagcagccaaacccccagtgtgtgctgacttgataagaggc

SEQ ID NO: 201338 - DNA, 100 bp, Homo sapiens
gtgccctttaaggaggcagaattacgattatgcagtgtatctactaacagtgttataccatgagtcttggggtcctaacctgattataaaacaaccagat

SEQ ID NO: 201339 - DNA, 101 bp, Homo sapiens
taatagaatccttcaatgttgttgcaaaggaagtttttagaagtattgttttgaatgaatacaaaagactgctagatttggttgttcagcctgtcccccgg

SEQ ID NO: 201340 - DNA, 80 bp, Homo sapiens
aagacccaaggagaacaaggggaacagaaccaaccaggctttacagaacatcatcaagaaggtgatcgggcagaagtttg

SEQ ID NO: 201341 - DNA, 50 bp, Homo sapiens
cgagaagaagcggatccgcaaggtcaaaatgcagatcttcgtgaaaaccc

SEQ ID NO: 201342 - DNA, 75 bp, Homo sapiens
caagctcatccggctggtaaatgcgcaggaatcagagatcattgatttcttcctgggggcctctctcaaggatga

SEQ ID NO: 201343 - DNA, 100 bp, Homo sapiens
ggaccacatagacatttacgcggatgtcggcgaagagttcaaccaggaggtgtgattgcctatatcagttcttccagctcagcctcaagccctgcctctt

SEQ ID NO: 201344 - DNA, 100 bp, Homo sapiens
cttgagccacgtgcatgaaccaaacccacttcgttcaagacaggtgtttaagcactggatctcgctcttatctcccaggttggagtgcagtggtgccatc

SEQ ID NO: 201345 - DNA, 100 bp, Homo sapiens
gccccgcgcacggcgtcagcgtctagacgcagggccctccagaatttccacagcatacacctggacctgttcccaacagtttcagccagcccccacgact

SEQ ID NO: 201346 - DNA, 90 bp, Homo sapiens
gttcgatgttatgacacctatcaattatccttgaagtttgaaaggtgtttagattcagaagcaaacttcaaggcttttgagattcttaaa

SEQ ID NO: 201347 - DNA, 100 bp, Homo sapiens
gagaaactgcagccagttactatggcagttgcaaaatattcaggagaccgtcgttgccttgtatttccagagaacaggttgtgaagatgagaaaagaagt

SEQ ID NO: 201348 - DNA, 80 bp, Homo sapiens
aggaaggtagcagccgtctgtctccgccccacagtccacgaggtcagcccaaggccaaccccactgtcactctgttcccg

SEQ ID NO: 201349 - DNA, 74 bp, Homo sapiens
tcggacatgatcctcatcttttatacactcttagtgctgtccagggcttcgtgctgtgtcactccatcgctggg

SEQ ID NO: 201350 - DNA, 75 bp, Homo sapiens
ctcatcccctggatgggggaccacaagatcctcatcgacaggtgcccccttgtttctctcccatcctcacttcct

SEQ ID NO: 201351 - DNA, 99 bp, Homo sapiens
ccgcgccgctcgcgcagccatgtccgaggagaagcccaaggacatgctgggcctgcgccccccactgctcgccctggtggggctgctctccctcgggtg

SEQ ID NO: 201352 - DNA, 101 bp, Homo sapiens
gacaagcaaaatattaaacttttagacctgaagccatacaaagtaagctggaaagcagatggtactcgcatggccggactcccctgcatcttgctgccaat

SEQ ID NO: 201353 - DNA, 82 bp, Homo sapiens
cctgctgacccgggcagagaaggaccttgctaagcagtactctgacagactagaatgctgtgaaaatgaagtagaaaaggta

SEQ ID NO: 201354 - DNA, 87 bp, Homo sapiens
gagcatcagtttaatattgacagcatggttcataaacatggattttaagcttgactttggcaattcccaaggcaaaacaagtcaaac

SEQ ID NO: 201355 - DNA, 75 bp, Homo sapiens
ggaagcacgatctccggcagcggcctgggaactcttagctgagcaggcgagagtagagacagggtttcaccgtgt

SEQ ID NO: 201356 - DNA, 75 bp, Homo sapiens
attcgccgtgcccgagaatagctccgtccagcagaattaaatgtgagggagtctgacgtaagagtttgtgatgag

SEQ ID NO: 201357 - DNA, 107 bp, Homo sapiens
cagcctgcgccaccacgtcacgcacacgctcggcgctgcgatccgcgcatataacggaatatattaaaggaatctgtgaacctgaactagaagaaagagaatgttac

SEQ ID NO: 201358 - DNA, 83 bp, Homo sapiens
ctggttcttccaaagtgcccggacccaaaacaggaatgacaaccatgagtggaaaaaactaattatggttcagcactggcctg

SEQ ID NO: 201359 - DNA, 100 bp, Homo sapiens
tgtgacctgctggcattgaatgatttatagctaagactccaggacacccctgaagccgagaaatgtattggtaaaggttttcaaggtgtcatgaaaagat

SEQ ID NO: 201360 - DNA, 99 bp, Homo sapiens
ctggaccacgatggggccatcctggatgtggatgaggatgacgttgagaagtttctttgttggaacgaagctcaactcatataaggagtttggaacccc

SEQ ID NO: 201361 - DNA, 97 bp, Homo sapiens
gtttcagttggagttggaatttgtgcaatgtttagccaacccaaattaccttaattgagagaaatatgagttggagggaaggaaaagtggttctact

SEQ ID NO: 201362 - DNA, 90 bp, Homo sapiens
agccctgcctcggcggaccaaaggtccttggatagctggggcacctctgaagatgctgacgctccttctaagcgacactcaacctctgac

SEQ ID NO: 201363 - DNA, 136 bp, Homo sapiens
ctgtggtgaagaaagtgagcgaggagtcagaaactcagccactggttgccttggtaggcaataaaactttctaaaaccaatttttccaacaacaacgatttccgtgctcttctgcagtctttgtatgctactttca

SEQ ID NO: 201364 - DNA, 75 bp, Homo sapiens
aggtgcccagacctcgggatgaccctgggaaggtggacccaagtggagagattgtggaactggcgaaaggtgcat

SEQ ID NO: 201365 - DNA, 74 bp, Homo sapiens
ggccggctgcgaagacgcggtgggccgcccctccggactatctgctgccaaactcttgactgaatatggcgtta

SEQ ID NO: 201366 - DNA, 90 bp, Homo sapiens
ggtatggcaacactccatttttgtttcctttatatggccaaggagaactcccccagtgtttctgcagtgccttgtctttgaagatgctcc

SEQ ID NO: 201367 - DNA, 136 bp, Homo sapiens
cgcacacgggccgcggcatcctcagcatggccaactccgggcccaacagcaacaggtctcaattatctcagtcatagtggattggcagatcattatgaaaattcccactggggacagcagcctacttacagaagcg

SEQ ID NO: 201368 - DNA, 101 bp, Homo sapiens
gagatctgctatttctttgtggagacatcaatgtatttcttaccaaaagacactttcagctgtttcctctgcctctcctctacgttggaaaccacataagt

SEQ ID NO: 201369 - DNA, 100 bp, Homo sapiens
tcgcttcccctactgcgtggtgtggacgcccatcccggtgctcactttctgatgaagaattgaaaagaagagtagctgaggagctggcattggagcaagc

SEQ ID NO: 201370 - DNA, 75 bp, Homo sapiens
caaagccacccagccaatgaagataccccagaatcttccatgctccgtcacactgcagccaggcccagaggatac

SEQ ID NO: 201371 - DNA, 75 bp, Homo sapiens
ggggtgtgcaaacccgagagaactggaccgagtgtgtcagcagccaggactttctctctgggtccccttccaaaa

SEQ ID NO: 201372 - DNA, 49 bp, Homo sapiens
attttcacaaccttcaagaaattcggtttatagaaggatcatttgaaga

SEQ ID NO: 201373 - DNA, 100 bp, Homo sapiens
tgatgaatataatccattctcggattctagaacatgcccactgttgatgtctttcagatttccacaaaagagcgatttggattgggacatcagctgaaaa

SEQ ID NO: 201374 - DNA, 100 bp, Homo sapiens
tgtgaggcctccccagccatgtggaactcacaacattctgaaattttttggttattgtaatgatgttgatcgggagttgagaaaatgcctgaagaatgag

SEQ ID NO: 201375 - DNA, 75 bp, Homo sapiens
tgccgtcgctgcagagaccccgctatggctggcgtgatggtgggcatgggtcagaaggattcctatgtgggcgac

SEQ ID NO: 201376 - DNA, 100 bp, Homo sapiens
atgaacccagaggtcgtggaggtggccgtggaggcagaggtggcatggggattgtcaccagacctgcaatctatggagcagattcggagaattatgagac

SEQ ID NO: 201377 - DNA, 96 bp, Homo sapiens
aagatggcggccgcgaccccggccccggcctcggccgtggcgagcgggtctcctctgagcctccggcctccataagacccaaaacagatgacacct

SEQ ID NO: 201378 - DNA, 75 bp, Homo sapiens
cagagtcactactttaggcggattcgcgaaggtaaagagaaatgtgtatgaccttacaagtatccccgttcgcca

SEQ ID NO: 201379 - DNA, 82 bp, Homo sapiens
ctcctgctgccgccgctgctgctgggggccttcccgccggccgccgccgcccgagatgtgaagttcatttccaatccgccct

SEQ ID NO: 201380 - DNA, 80 bp, Homo sapiens
tcggcctcactaaactgttggaccccgaaggcctatgagagctacaagaagaaggactacacccaggtggactacttaat

SEQ ID NO: 201381 - DNA, 100 bp, Homo sapiens
aaaattcttaaaaaggctcagaaagatggatttttgcatgagacgcttctggacagagacggtaaagaacaggtccaagaaaagctcaaagaaagcaaat

SEQ ID NO: 201382 - DNA, 76 bp, Homo sapiens
actcagtccccacaggtgcggaggagaatgatgaacgtgaagccagagaaaatgtgaagagagagcaagatgaggc

SEQ ID NO: 201383 - DNA, 97 bp, Homo sapiens
aaaatgtaaaggccaagatccaggataaggaagaggagaaggcagagcccccccaggctatgaatgccctgatgcggttgaaccagctgaagccagg

SEQ ID NO: 201384 - DNA, 80 bp, Homo sapiens
aggcatggaagtatgaaaatgggagttctgggaaatcgttcattcatttacagatgaacagaaaagactcttcttgcagt

SEQ ID NO: 201385 - DNA, 80 bp, Homo sapiens
ctctctttctggcctggaggctatccagcaaaaagatgttgctggtccatttgacgaagaagtccagagcggcttgtgac

SEQ ID NO: 201386 - DNA, 100 bp, Homo sapiens
gtcactcacaactgggatgaagttgatcctgatcctaaccaggcagaggtggaggagacactgaagcgactgcagagccagaagggagtgcagggaatca

SEQ ID NO: 201387 - DNA, 100 bp, Homo sapiens
cagtaccaccaccaccacgcccagcagtcagctgcagcctctcccaacctgactgcttcacagcaccccgagcagaaggcagaccggtattttgtgttat

SEQ ID NO: 201388 - DNA, 100 bp, Homo sapiens
gaccgagagcgtgaccgagagcgcgaatatcgtcatcgttagaaggttgactatagtcaatggggccaatggagccaagtgtatggaaacccacaacagt

SEQ ID NO: 201389 - DNA, 88 bp, Homo sapiens
cagggctcctgtggctcctgctggagacgagttgtactgctgtcacaggaaatggacgctggattacaagcatggcagctcaggcagc

SEQ ID NO: 201390 - DNA, 83 bp, Homo sapiens
atttagccgggcgaaagtatcatatcaggtaaacactcgataatctggataactgactagcaccattatgatcaccagtattg

SEQ ID NO: 201391 - DNA, 80 bp, Homo sapiens
gatcatcattaaggacggaggcacgcatttgaagacacttcgtcacccttgcttgctaagatttttatcttgtactgtgg

SEQ ID NO: 201392 - DNA, 87 bp, Homo sapiens
gccgacctcagcgcgcacctatgggctcgctaccaggacatgcggagactggtgcacgatgcctgaggaaacccagacccaagacca

SEQ ID NO: 201393 - DNA, 75 bp, Homo sapiens
ggatgagttcctggtggtgctgcgctgtgtggggtctctggacaccagctcttccatcaccagccagcctgaggc

SEQ ID NO: 201394 - DNA, 100 bp, Homo sapiens
cgaatatctcatggcctacagggactttctgcagtgcctctgagaacttacgcagatcagccgatgttatgtgccaagaaccttgcaaagaaagacttct

SEQ ID NO: 201395 - DNA, 82 bp, Homo sapiens
cgacccttcctgtcgctgacggcgactgcgggaggccaggtcttccccagggaggtcctgaactacacagctgagaacatct

SEQ ID NO: 201396 - DNA, 82 bp, Homo sapiens
caaaggcatctccccagtgcccatcaaccttcgagtctactcgccacacgaactggtcatgctgctggagtggtggtcctgc

SEQ ID NO: 201397 - DNA, 75 bp, Homo sapiens
taatttgtgggattttagtaaggtcagtttaggggctggtgcaaaggatgagttgcacattgttgaagcagaggc

SEQ ID NO: 201398 - DNA, 100 bp, Homo sapiens
tgtgtgcaaagttcctattgatggtccccccataaaccgagctgaagctgccatggaattcttacaagaattaaatagcgatgtctctggaagttttgtg

SEQ ID NO: 201399 - DNA, 100 bp, Homo sapiens
cgaagaactaagaatattattagcacaagagcaccatactttgaggattttggatttagtaaaggggacacattaccaggtagcctgtcaaaaatacttt

SEQ ID NO: 201400 - DNA, 100 bp, Homo sapiens
caatttttacgtctagatttccatgcccatggaagatcctgaggaggatgaaggggctggccctggaggccgagagtgagctggagagacaagacgaagc

SEQ ID NO: 201401 - DNA, 90 bp, Homo sapiens
ccagttgatgggcacctcccgggacgatggggtcgaggatttggtcttttgggttccatttttggaaaggatggtgtattaaaccagcca

SEQ ID NO: 201402 - DNA, 98 bp, Homo sapiens
ccgagttaaaagagtggtggataagaaaagattgaacctagaaagattgtacaatgaatggtgattctcgtgctgcggtggtgacctcaccacccccg

SEQ ID NO: 201403 - DNA, 100 bp, Homo sapiens
gctgctggcagcgccatggagacggtacagctgaggaacccgccgcgccggtgtgcaactgaggaacatggctcaagaaactaatcacagccaagtgcct

SEQ ID NO: 201404 - DNA, 100 bp, Homo sapiens
cccagcatttcatccctcgtcgaaaggattggattggcatctttagaggtggagagattcaaccagttagcgtgaaagttggagataaagttcttctccc

SEQ ID NO: 201405 - DNA, 100 bp, Homo sapiens
cggagccgcgccccaccccgccagctccagagccacgtacggattttcaagaaagacatgtctgacaaaatgtctagcttcctacatattggagacattt

SEQ ID NO: 201406 - DNA, 100 bp, Homo sapiens
catggccaaggtgctggcgtccctcagggatccatcagtgagccaggcctgggccttctctcctggtggaccagcaactagccctggggctggacagtgg

SEQ ID NO: 201407 - DNA, 75 bp, Homo sapiens
ccagtccacatgggacactgttgccttcattgttttcctcaccttcatgggtctcggcgcggaagatggccggcg

SEQ ID NO: 201408 - DNA, 96 bp, Homo sapiens
cgtgagatggttgtccagtatatttctgccactgccaaatctccaaatttgtatcctactgtggggcttcaaacaccaggagaagtggtcgatgcc

SEQ ID NO: 201409 - DNA, 75 bp, Homo sapiens
cattcattttaattttgccggaatatttcaagacaccgaaaggaaattgatgaagcctgtaagagaataaagcgt

SEQ ID NO: 201410 - DNA, 83 bp, Homo sapiens
ggccctgtgggtgctgggcctctgctgcgtcctgctgaccttcgggagtctgaagatacagtattgctcgtcctcaaagagat

SEQ ID NO: 201411 - DNA, 98 bp, Homo sapiens
gtgacccacggccgcctccggagcccgacgcggtgacagagctgaatgaacctctctccaatgaagatcgaaatctcctctctgtggcctacaagaat

SEQ ID NO: 201412 - DNA, 80 bp, Homo sapiens
gtcatgatgggatatagcagaagcagcagcagcaactcctgatttaggggcaatcgatttggttaccacagagaagcgct

SEQ ID NO: 201413 - DNA, 83 bp, Homo sapiens
acttgcaagaaacctcaggacttgagtaacagcaacatggtatttgactggaatggttgacaaaaggacgcttgaaaagtatg

SEQ ID NO: 201414 - DNA, 100 bp, Homo sapiens
gtggacgccgtgtacgagcgcaccagcgaccacaagatcgtcttctttaaagcctcagcagtgccagcgcccccctgcaacctggaggagttccagtgtg

SEQ ID NO: 201415 - DNA, 74 bp, Homo sapiens
ttccagactcggtgctgtacccgccgccaggagtggtggctcacacctgtaatcccagctctgggaggccaagg

SEQ ID NO: 201416 - DNA, 75 bp, Homo sapiens
tgagaatcctgaaacagatttgaaggaacccagccagccggcggaatgcaagcagcagtaggaagcggaggcggg

SEQ ID NO: 201417 - DNA, 98 bp, Homo sapiens
gggaagaagctgccacgcaccttctgccagctgatcctggaccccatcttcaaggggaagttcacgactgcgagtgacgtgtgggcctttggtgtgac

SEQ ID NO: 201418 - DNA, 101 bp, Homo sapiens
caggagctattcagttgtgccttgaatgtcaaaaagctgccagcacttttaaacattacagttgtataagaaaaatatgtcgtaactgcaagtgtggccaa

SEQ ID NO: 201419 - DNA, 88 bp, Homo sapiens
taaagcctacataatggagatgtatgatatttgagagtcctgggtatagacacgtgtggccgtttacgctgtaggatcctcattccca

SEQ ID NO: 201420 - DNA, 87 bp, Homo sapiens
agaagaagggaaggcgcgagtgaggaaaggaggtactgtaggttattcagcttctcaaggctggaaaagcgaaggaagtttcctaca

SEQ ID NO: 201421 - DNA, 100 bp, Homo sapiens
ttccctgcagactggcaggagcagattccaaaggcacaggaagaagcttgcagctctcgtggcattatccttcagtggggctattggactgacttttctt

SEQ ID NO: 201422 - DNA, 83 bp, Homo sapiens
atccgggcccccaccagaaggtggacttaggaccccaagactgcttctgagacagaaacagatatctgtgctgaatgggagat

SEQ ID NO: 201423 - DNA, 98 bp, Homo sapiens
tcgagatcaccctttggatcctgctggcctccctggccaagattgatattaatgaatgtcagctacaaggtgtatgccctaatggtgagtgtttgaat

SEQ ID NO: 201424 - DNA, 80 bp, Homo sapiens
cacaaggcagacatcagctcctggttcaacgaggccattgacttcatagagcaaacgccctggaggagcagctgaaggag

SEQ ID NO: 201425 - DNA, 90 bp, Homo sapiens
ggccaaagtaccctccaggtgtgaagagttgcaggtcctccgaggagccgggagctgcaagtgtaaaacctgttctgagccaaaaaagat

SEQ ID NO: 201426 - DNA, 50 bp, Homo sapiens
aaaatggctggtaagcaggccggaaaagctcaagactgttattttatgaa

SEQ ID NO: 201427 - DNA, 124 bp, Homo sapiens
agcaatcataaagtcatccctgtgtatgtaggagtgaatataaaaggacttcatctcctcaacatggaaactaaggaatgtatcctgtcaggtataatgtcagtgaatggcaagaaagttcttc

SEQ ID NO: 201428 - DNA, 96 bp, Homo sapiens
gcctggctaaggaaaccctattacctccaggatgctgaaaacgccattcaacagatgggtggccagtggcttggtggaagacaaatcagaactaac

SEQ ID NO: 201429 - DNA, 100 bp, Homo sapiens
gattttatccaccggcactgccaagatcagggttattatattatgcaggacatggttatgaaaattttgggaacagcttcatggtccccgttgatgctcc

SEQ ID NO: 201430 - DNA, 140 bp, Homo sapiens
ccccagccccctgctcctttggactctacttctgtttgcagccccatttggcctgctgggggagaagacccgccaggtcaaaatgcagatcttcgtgaaaacccttaccggcaagaccatcacccttgaggtggagccca

SEQ ID NO: 201431 - DNA, 88 bp, Homo sapiens
cggagagcggctgatcgcagtccggaggtgaggcggaactctgaggggccctcctcgccaaagacagcctagagaggacggcaatgaa

SEQ ID NO: 201432 - DNA, 75 bp, Homo sapiens
cggagttcgagcggcagcgaaaaatgtgaaatgacaatggatgctctgttggctcgattgaaacttctgaatcca

SEQ ID NO: 201433 - DNA, 75 bp, Homo sapiens
cgccaaccccttcgagcaagacgtgggttgctcgtgggggccccgcgggcagaagcgcttccactgcagagagcc

SEQ ID NO: 201434 - DNA, 100 bp, Homo sapiens
tctgaccgagagggaagcgatgccacgggagatggaaccaaggagaaaccatttaaaacaggtctaaagatatttgttcagtcgaatcaaggtgaagagg

SEQ ID NO: 201435 - DNA, 75 bp, Homo sapiens
ttgaccatggcagttggaacaaccacagggcagatggatcctgagcttgaaaaaaaactgaaagagaataaaata

SEQ ID NO: 201436 - DNA, 100 bp, Homo sapiens
ccagctgtcaaagccatcatatatcagtatatggaagaggtgatttgaagatattaaagctagaaattggaactagaaaatcaaaagaattcaaggcatc

SEQ ID NO: 201437 - DNA, 110 bp, Homo sapiens
agatcccgggcggtggcttcctttccgccactgcccaaactgctgaagcagctcccgcgaggaccacccggtttgtgtgctggagaggcaaatatttgacttccttggat

SEQ ID NO: 201438 - DNA, 74 bp, Homo sapiens
agcacttggtctctaccagtgggactttgccagttatgatattctcagaactgataaatttcaaacggaagaga

SEQ ID NO: 201439 - DNA, 100 bp, Homo sapiens
aagagtagaaggagcatcgatgcaggcttcccagctggcgtgtatgttgtaaagagagttcttcagcttcagcgtcatcatattactctcaagatgacaa

SEQ ID NO: 201440 - DNA, 100 bp, Homo sapiens
tctgtaatggcggagcgtggcggggacgggggcgagagtgaacgattcaacccgggggagctcagagtaaagctgctgctaaagctggatcttctaaata

SEQ ID NO: 201441 - DNA, 100 bp, Homo sapiens
tggagaccatggagaccctcacggagctgggcgacgagctgaccctgggagacatcgacggtctcctctgagcctccggcctccataagacccaaaacag

SEQ ID NO: 201442 - DNA, 101 bp, Homo sapiens
cttgggcgtcgttgtcaccatcgtctccgccttccagttcggagaggtgtggcagtgtggagggaaggtcgagattttgccctgttcccggattgcccacc

SEQ ID NO: 201443 - DNA, 90 bp, Homo sapiens
cctcggccccggccctggccccgggggcagtcgcgcctgtgaacggcccaccgtggtgcacgcaaaccacttcctggccatgcgctccct

SEQ ID NO: 201444 - DNA, 75 bp, Homo sapiens
acacggctcaagtcaccaccgtgaacaagggaactgtggctgcaccatctgtcttcatcttcccgccatctgatg

SEQ ID NO: 201445 - DNA, 82 bp, Homo sapiens
aatgaggagtcagagcacaatcaaggtagttgatgtcacttggcgatattcctgcaaacatgaagaggtgattgccagaaga

SEQ ID NO: 201446 - DNA, 88 bp, Homo sapiens
ctggataccactacatgcagcagcttcctgtggatatcttgatattgcagagtgtgcaactgaggaacatggctcaagaaactaatca

SEQ ID NO: 201447 - DNA, 75 bp, Homo sapiens
gggaaatcgtgcacttgcaggccgggcagtgcggcaaccaaatcggcgccaaggagaactacgatgacccgcaca

SEQ ID NO: 201448 - DNA, 75 bp, Homo sapiens
cgcgcctgccgcgcggagagataagcttatcacacagactttcagccaccacaatcagctggcacagaagacccg

SEQ ID NO: 201449 - DNA, 90 bp, Homo sapiens
aggacctgcttttgaagctggattatgtacaggtcctgagaagtatttctcgttttcattggagatcacagcatacaaaagccaatcgac

SEQ ID NO: 201450 - DNA, 88 bp, Homo sapiens
agctgctgacctactgccaccgactgcgctctctcccgtgggtcggctttttgctcggtaaccatgtctgagtctggacacagtcagc

SEQ ID NO: 201451 - DNA, 75 bp, Homo sapiens
cacttccgtgtgcagtactatgtggaaaatggcagattgatcaggttggtcaaagaaaaagtgatgtatgaaaaa

SEQ ID NO: 201452 - DNA, 73 bp, Homo sapiens
gcatgaagttgtcccacaccaaggtcagcgactggcaggttctctacaaggaagccttggaagatcgtttgga

SEQ ID NO: 201453 - DNA, 100 bp, Homo sapiens
aggaggacagttcgctacacagcaatgcatcgagaaaaatggctacaaacttcctagcacatgagaagatctggttcgacaagttcaaatatgacgacgc

SEQ ID NO: 201454 - DNA, 90 bp, Homo sapiens
gggagaagaggaatgttccctgacaatttcgttaaggtatgtgatagtggaatgtgaagatcaagatactcagcagagagatccaaagac

SEQ ID NO: 201455 - DNA, 101 bp, Homo sapiens
tgcaccgacctcgacgtcttgcctgtgtcccacttgttcgcggcctatagatacacaatcatcatcttactagttctctgtgttgctcgctaaccagtccc

SEQ ID NO: 201456 - DNA, 90 bp, Homo sapiens
agcgctggaattatgggcgtgagccactgtgcccagaaatcaatgtggactgaacataaatcacctgatggaaggacttactactacaac

SEQ ID NO: 201457 - DNA, 100 bp, Homo sapiens
cccagccgaggtaccgctgaagaggaatcaattttggcatgtcagagcgggagcgacaggtgatgaagaagctgaaggaggtggtggacaaacaacgcga

SEQ ID NO: 201458 - DNA, 100 bp, Homo sapiens
tcggcatcactagacagtcctgtcctattggtcatcaaagatatggataatcagagatcctgagtcatgtgttccagtggcttgggttcacagtgcatat

SEQ ID NO: 201459 - DNA, 98 bp, Homo sapiens
cgccatcttcttcgtgccgggcttcctgttgttggtgcctggagaggccgggatccggagccgcccgaagccggtgccgcagccccctgcgcccccgg

SEQ ID NO: 201460 - DNA, 75 bp, Homo sapiens
taaatcatcatggaaaagagtttcttttgggagcttggaatccacgaagactccactaaccgccgccgcctgtct

SEQ ID NO: 201461 - DNA, 90 bp, Homo sapiens
gctcgctgggagagaggtacctctccttttccctctccctttccctaagcgggctgacgcacgaggcacacaggaaggaggtggagcagg

SEQ ID NO: 201462 - DNA, 114 bp, Homo sapiens
cctaggctcatggacgagatgggaaggcacagggagaagggataaccctacacccagaccccaggctggagtacagtcgtgtgatcttggctcattgcaacctctacctcctgg

SEQ ID NO: 201463 - DNA, 90 bp, Homo sapiens
ggccactccagtcggtgttgagcacggcgagcagtctcaggcctttagtgatgatgattttcagctgaactctcatctctcaacactggc

SEQ ID NO: 201464 - DNA, 90 bp, Homo sapiens
tgtcaatcttagatagattcttcaatgataagagccaagattttcttcttcactcctcgcttggtggctcccagccagaggccggcagtg

SEQ ID NO: 201465 - DNA, 100 bp, Homo sapiens
gggtgaacacgaggacagccgagattcgactctgcccacaggaatgtttacccttgcggaagttgcatcacttaatgacattcagccaacttaccgaatc

SEQ ID NO: 201466 - DNA, 75 bp, Homo sapiens
ccctcttccggcagttggccaaatgtgtctccagcccacacttccaggtacatcaggaacgtctctatcaagaat

SEQ ID NO: 201467 - DNA, 100 bp, Homo sapiens
tggctctgccgtgccacctgctgcacccacgaatctgcccacccctcctgtaacccagcctgtttcacttcttggttgctccttgagggcaggacagttc

SEQ ID NO: 201468 - DNA, 100 bp, Homo sapiens
tcctgctccaaccatgacaagtctgatgcctggtgcaggattgcttccaataccgaccccaaatcctttgactactagttggtggttccaggattttact

SEQ ID NO: 201469 - DNA, 100 bp, Homo sapiens
agctgaactgaatgagtttcttactcgggagctggctgaagatggctactctggagttgagaacaaatttctgccagaaccaccaagcacaagaaaaaag

SEQ ID NO: 201470 - DNA, 100 bp, Homo sapiens
ataggtactttttctgccatgaatttgcattcaggactcagggagtacacacttaccaggagacggaggcaattgtcattaaaacaagccgatttcaagg

SEQ ID NO: 201471 - DNA, 100 bp, Homo sapiens
cagcgcctcgggggacccctggccgcgcatcctctggaggctgccgtccaagaggatgatcgacgcgctcttcagaacttccaacactatgttgaatagg

SEQ ID NO: 201472 - DNA, 75 bp, Homo sapiens
cggaggagtctcagagctgtcagaaaggtggagggagctgttcatcctctgggggctgctgggcaagaaacattt

SEQ ID NO: 201473 - DNA, 101 bp, Homo sapiens
ccgtcttctgctgagtgctgccgccccttcccaggacagcggaggtggaacttcgtcgcgctgcaacccccggctcgggaggaacgtctgcgggggacagt

SEQ ID NO: 201474 - DNA, 51 bp, Homo sapiens
gttatcacccatgtggtatgcaccaagtgccatttcaaaattaaaaagtca

SEQ ID NO: 201475 - DNA, 100 bp, Homo sapiens
cagactcctcttgccacgcatcagtctgaagttgcagagctattttgctgcatgtgaggatgagatccctgccatccggaaccatgacaaggtcctacag

SEQ ID NO: 201476 - DNA, 52 bp, Homo sapiens
gtgggactcccccagcagatacattctcagatttggaatgccctgacagata

SEQ ID NO: 201477 - DNA, 74 bp, Homo sapiens
cagcagcccagacgcggcacagagagggcctgggagcttgctgcagcttcagatgaaatcatgcaccaggacat

SEQ ID NO: 201478 - DNA, 98 bp, Homo sapiens
gggagtccttggaactgtggtccatggtaaagttttacaggctggtgggccaccaaaaaaggggaaaccagctgcaccaggaggcgcagggaatactg

SEQ ID NO: 201479 - DNA, 74 bp, Homo sapiens
gcggcagtatccttggggcactgtgcagggatactgtcatgaagcagacacatgctgacacacctgttgatcat

SEQ ID NO: 201480 - DNA, 98 bp, Homo sapiens
caaagactcaggtggactgaaggccgctatgatcgaattggtggaaaggttgaagttcaagagctcagaccctaaagcgcggatcaagaagatcatgc

SEQ ID NO: 201481 - DNA, 75 bp, Homo sapiens
aggagcagagaacgatccaagaggaggccctgggaggagcggggacactgaggacctctctccaaattggcctct

SEQ ID NO: 201482 - DNA, 89 bp, Homo sapiens
cctgaccttagtgccagggtcaccatctaccagtggcggcctggtcctcctgaaggtgaaggcaaaggtgcgacagtgcctgcaggagc

SEQ ID NO: 201483 - DNA, 100 bp, Homo sapiens
agaggtagtcggacctttcccgctggcgcgcagcctcagctagagagtgattgactgcctggaggatgagaaggcaaccctcaccttggccatggctgac

SEQ ID NO: 201484 - DNA, 101 bp, Homo sapiens
ctacgagctgctggagcgcgtggaggagccggtgctgcagaaccagatccgggagcacgtcatcgccatcgaaggaaataatgaagatgtttcattttcaa

SEQ ID NO: 201485 - DNA, 75 bp, Homo sapiens
caatagaacctgtcaatattgatcattgagttacagctacaagaactaggccctgtcattcgcagtggtgtctac

SEQ ID NO: 201486 - DNA, 75 bp, Homo sapiens
caaatatggaaacaaatactatgaagacaacaagcaattttttggggaggcgccacctgctgcagaagtttcctc

SEQ ID NO: 201487 - DNA, 145 bp, Homo sapiens
gctctgccggcgggcgggcgagcgcggcgcggtccgggccggggggatgtctcggcggacgcgctggtactgaagaagacctggaattttatgtcaggaagtgtggtgatattcttggagtaaccagtaaactaccaaaggacca

SEQ ID NO: 201488 - DNA, 100 bp, Homo sapiens
cactacatccgcaagtacaaccgcttcgagaagcgccacaagaacatgtctgtacacctgtccccctgcttcaggttcatgcagcatcccaagaactttg

SEQ ID NO: 201489 - DNA, 97 bp, Homo sapiens
ttgtcaacaaacccattaaccaggtgaccctgtggaaggagtcagttgatgggcagtgggtgtgcatcagtgatgtcaacaagggccagggctccgt

SEQ ID NO: 201490 - DNA, 76 bp, Homo sapiens
tggcaggcatctgtgggatctgtaatagaaataaactggcgatggaatatgagaggagccctctggaaagaaaagg

SEQ ID NO: 201491 - DNA, 100 bp, Homo sapiens
agaccattccttgatgcttctaggccccttcacagatgtagtcactacaaatcttaaattgcgaaatccatcggatagaaaagtgtgtttcaaagtgaag

SEQ ID NO: 201492 - DNA, 85 bp, Homo sapiens
ccgcggcggcgcgggtgctccgggccgaggccgcgctccagaaacatgacaaggaggactttcctgcctcttggagatcagagga

SEQ ID NO: 201493 - DNA, 74 bp, Homo sapiens
gtgaccggatattcagttgcacatccccacatcaatgcactgccaatggtgaaggagtacctcctggcaactat

SEQ ID NO: 201494 - DNA, 98 bp, Homo sapiens
ataccttggtcccagagtcatcatgaaggtgccaatgggtcatgtttggttagaaggtgacaatctacagaattctacagattccaggtgctatggac

SEQ ID NO: 201495 - DNA, 82 bp, Homo sapiens
ctccattggatttaaaagacagtcctcgtcagcactgactttcagctatggaatcggaaaaaagtaatcctcttggaaagct

SEQ ID NO: 201496 - DNA, 100 bp, Homo sapiens
cattggcaagctacaataatggggccatcaacgcaaaatcatgctgccgtgttccgtgtgggaagcttgttgcaagaaggttgtgggaaaatcagcaagc

SEQ ID NO: 201497 - DNA, 98 bp, Homo sapiens
gagatcgagctcaagaaccggcacggcctcgtgcccttcgccttcgtgcgcttcgaggacccccgaccatcatggagcagttcaaccctagcctccgg

SEQ ID NO: 201498 - DNA, 136 bp, Homo sapiens
atccggggatcaaagagcagtgggggttgctgacccagaggagagttctccaaacatgatcgtttactgcaaagctacagatgcacatgttgaatggagctcttctggcattgctgtttcctgtggtaaacactcg

SEQ ID NO: 201499 - DNA, 90 bp, Homo sapiens
aaagaaaacgatcaaaccccactggccatctataactctatcagggtggatgcgtagactcgaccaaccaaagcctggcgctactactca

SEQ ID NO: 201500 - DNA, 98 bp, Homo sapiens
tcaccagctgataatcagaaggtggatcaagtgcattcctgggagatggtcgggaagaagaagggagtctcaggccagaaggatggtggccagacgga

SEQ ID NO: 201501 - DNA, 100 bp, Homo sapiens
tggaacgggtggccgattactgcgagaacaactacatacagcaatatgttaaggatacctgtaagaaaggccttagtaggcctttctaagtctcctaaag

SEQ ID NO: 201502 - DNA, 100 bp, Homo sapiens
ggaatcttctggagtactcttattttgaaaaggacttggatgttgtgggtgatggtatgcagtgtcctccttcacctttgctttttgatccttcactaac

SEQ ID NO: 201503 - DNA, 75 bp, Homo sapiens
aaaaagaaatgggactcttaagtcaaaacggtcatattccaaagatagaaaatgctgctgaagaacctagagtct

SEQ ID NO: 201504 - DNA, 83 bp, Homo sapiens
ttcaagtttactgcgaagtccacccagcgttccggaggttatgaagacagtatggagtttccagaccatagtagacatttgct

SEQ ID NO: 201505 - DNA, 99 bp, Homo sapiens
ggccaacctcagtgcagccaaccatgatgctgccatctttccaggaggctttggagcggctaaaaacctgtatgaggatgagatcaataagcgtacaga

SEQ ID NO: 201506 - DNA, 75 bp, Homo sapiens
gcctaactgacctgtcaagcctcatccaagcctagtgtcagcagtgggatacctgcgcttgaaggacatcatcca

SEQ ID NO: 201507 - DNA, 74 bp, Homo sapiens
acaaagacagcacgctaataatgcaattactgagagacaacttgacagtcctacaacgtgactttaaaaagaca

SEQ ID NO: 201508 - DNA, 100 bp, Homo sapiens
cttcagtggactgagaggggctgccgacaggctgaaactgccgccaaccggatctgtaaggtgctggctgtcaaccaagagaacgagcacctgatggagg

SEQ ID NO: 201509 - DNA, 100 bp, Homo sapiens
gtgcagcaaaccatcctgtgttaccagaagagaagaaggagagtggccacgttgattcagccaagcacctccaggaggtcccctctggatgtcccatgag

SEQ ID NO: 201510 - DNA, 75 bp, Homo sapiens
tttgtacctgttataaaatttgaatttgatggtattgaaacaaaagcaagccgggaggctggctgcctctcctcc

SEQ ID NO: 201511 - DNA, 83 bp, Homo sapiens
gtcatttctcccttgttggtttgggatttgaagaacacattcgccatgaagtcagcgtaaataatgtaacacataaactgtgc

SEQ ID NO: 201512 - DNA, 100 bp, Homo sapiens
aaataaggagcgactcttacatgatgaacaaagtactgatgacaggaagggagtgaacaggcaccactaatgagtgaagatgaactgattaacataatag

SEQ ID NO: 201513 - DNA, 100 bp, Homo sapiens
taaatggatgtagccgactcattattgcggctgggaaagggtttcttctgtccataaaagctactccaatggctgtgggagacttaattccaattccagg

SEQ ID NO: 201514 - DNA, 100 bp, Homo sapiens
tctgcaggggggcaaggacttcaacatgcccctcactatctcccgggagctgcttcaagaagaaacccggcagaagctcaacgtgtctacgaagctgcgc

SEQ ID NO: 201515 - DNA, 100 bp, Homo sapiens
aggggaaatggcttcagcgcagtatattactgcaggggctgggaaccgacgaggactctctcattgagatcatctgctccagaaccaaccaggagctgca

SEQ ID NO: 201516 - DNA, 75 bp, Homo sapiens
gaccaggcttgttctggatccctatttattaaagaagtatgatgggcatcttccaatagaaataaaagctgttcc

SEQ ID NO: 201517 - DNA, 98 bp, Homo sapiens
ttgatattacaaccagtgacactgcagaataactgaagtgaagtgatggactccgatttggagagtagtaagacgtgaaaggaatacacttgtgttta

SEQ ID NO: 201518 - DNA, 90 bp, Homo sapiens
gagaggggtgcggagcgggcggaagaggcgtctgtgtcgcagcttggtctcagaggagcatcgctgggaaactgttttggctgggcctac

SEQ ID NO: 201519 - DNA, 80 bp, Homo sapiens
gcgtggggctgcctcgccgcgtctcgccacggtcctcagaatggttggaatgaccctccagctttgaacagagtacccaa

SEQ ID NO: 201520 - DNA, 50 bp, Homo sapiens
cgggagctcaccagcattgtgaatagaaagatcaactgaaatcggcaaac

SEQ ID NO: 201521 - DNA, 82 bp, Homo sapiens
actgtcgctctgcctttgacaggagaggctgcttcttgtagaggtcagcccaaggccaaccccactgtcactctgttcccgc

SEQ ID NO: 201522 - DNA, 100 bp, Homo sapiens
ctggcattgcatgttatgctaaaacttccagtctaacaaaggttatcaatactctggctgaccatcatcatcgtgggactgactttggtggaagtccttg

SEQ ID NO: 201523 - DNA, 90 bp, Homo sapiens
acgcagatcagaggtagtcggacctttcccgctggcgcgcagcctcagctaggtttttcccactcggctttcacgtttgggattgagagc

SEQ ID NO: 201524 - DNA, 99 bp, Homo sapiens
atttacagtcggaggagtactcggtgaaatcctgtcctgaagactgtaagggatcgcttacacctgagacgaactacagaacagcacgtaccagaggtg

SEQ ID NO: 201525 - DNA, 82 bp, Homo sapiens
gtgtaaacaacgattctttggagatcgttaactgaagacaatatgcaaaattctcacatggatgaatacagaaattctagta

SEQ ID NO: 201526 - DNA, 50 bp, Homo sapiens
accacacacatcatcagtctggtagctacagcaagctgggtagcaggcag

SEQ ID NO: 201527 - DNA, 100 bp, Homo sapiens
ccgagacgttgttgagtcccctgtgtcctcttctgggatgaatttttagatgtgatctactggttccgacagatcattgctgtggtcctgggtgtcattt

SEQ ID NO: 201528 - DNA, 98 bp, Homo sapiens
cgggcccccaggcatggctagctcgggctggaccccaatggagaacaggtggtgtggcaggcgagcgggtgggcagcccgcatcatccagcacgagat

SEQ ID NO: 201529 - DNA, 75 bp, Homo sapiens
ctctgcagccacatactatccgtttgttcaggaaccaccagtgacagagtacagtgaaggtgaaattcgatttaa

SEQ ID NO: 201530 - DNA, 75 bp, Homo sapiens
aagcaggcgactacagccacgtgaagggcgatgccagtccctccactccagaggagaacgaaaccacgacaacca

SEQ ID NO: 201531 - DNA, 82 bp, Homo sapiens
agtccacccaccgccgccgcctcccaggatatggaatattatcttgtaaaatggaaaggatggccagattctacaaatactt

SEQ ID NO: 201532 - DNA, 89 bp, Homo sapiens
caggcccagtccccagcacagatcaaagctgtgggcaagctgacgccgacaatgcagatcttcgtgaagactctgactggtaagaccat

SEQ ID NO: 201533 - DNA, 75 bp, Homo sapiens
ggcactgaggagaaggaggaggagatgagttggaagtgccaggtggagctcaacaggaaagtcctagcggatctg

SEQ ID NO: 201534 - DNA, 74 bp, Homo sapiens
ggatcatgtctgcgagccaggattcccggcaagccggtatattcggggcccaggagcaaggaaaagtggccttt

SEQ ID NO: 201535 - DNA, 100 bp, Homo sapiens
ctgagagatctccaagaattacagtggcagcatggaacctgcatttcatagaggagatcttctctttctaacaaatcgagttgaagatcccatacgagtg

SEQ ID NO: 201536 - DNA, 100 bp, Homo sapiens
ggagtttccccggggagcggccaaccacgacctgacggacaccacccgggcggattgggtggatcacaagaactaatctttcatgatttggaaaccggaa

SEQ ID NO: 201537 - DNA, 100 bp, Homo sapiens
ctaaatgggggcctctccagggagtgctctgttcacggctccatcgctgttagacctcagcagccatgtcgaagccccatagtgaagccgggactgcctt

SEQ ID NO: 201538 - DNA, 100 bp, Homo sapiens
cgttgacaaggcactgctttttcatgacgtgaatgagttcacggtgatcaggaagaagttcaagtgtccgtactgcagcttctcggccatgcaccagtgc

SEQ ID NO: 201539 - DNA, 100 bp, Homo sapiens
aaacatgcagattatatcgcatcctatggctcaaagaaagatgattatgctttatcctgtggataaacgcagagtgaacgagtttggggagtcctacgag

SEQ ID NO: 201540 - DNA, 90 bp, Homo sapiens
tgaagatgtccttaccagctttgacaatacaggaaatgtttggggtcctgatgacaacttaattgaaggtggaggaacaaaatttgtctg

SEQ ID NO: 201541 - DNA, 118 bp, Homo sapiens
gagccgcgagcgcccggccgaacccgcgatggaataatgcccagcggcccgccaggtcccggtaccttaacatggggaatcttcttaaagttttgacatgcacagaccttgagcaggg

SEQ ID NO: 201542 - DNA, 90 bp, Homo sapiens
aagctgcccatcgaggagacgctggaggacagcccgcagataccctgcagtgcactgtagaacagaagataagaacttttctctgaattt

SEQ ID NO: 201543 - DNA, 80 bp, Homo sapiens
gtccatggatgaagcaccgaacaaactggagcccgcaaggagcgccatggattactacagaaaatatgcagctatctttc

SEQ ID NO: 201544 - DNA, 100 bp, Homo sapiens
tgtctcggacgtgcggggcctgggcctcccggtccgcaagcaggcgggaggcagcaccgggctcttgatggacttggcagccaatgaaaaggccgttcat

SEQ ID NO: 201545 - DNA, 98 bp, Homo sapiens
cagacattgagctcctccctgtgaactcagcattgctgcagctcgtgggtgctcagaattatatccagatcgagagacagaagattctgaaagggttc

SEQ ID NO: 201546 - DNA, 100 bp, Homo sapiens
ttcatccggtcaccatctacctattcttcaaatggaccgccgggagagcctgcccacctccccaccctggacgccgggcgcgtcccggccccccagcagc

SEQ ID NO: 201547 - DNA, 98 bp, Homo sapiens
aggacagaggagagcaaagcagacagtccacccccatcctacccaacacagcaggatctctctcaacacactgaccctcaatgtcaagagtgaaaagg

SEQ ID NO: 201548 - DNA, 100 bp, Homo sapiens
cacttttcaccaaggaactggtgctgcagcgagaggtgttatttggaagatggagcttcaaagggtgcctggctgaaccggtcaagtattatttttgcgg

SEQ ID NO: 201549 - DNA, 100 bp, Homo sapiens
ctttctgagaacttgctgcagcctagcttggagtcctggcctggaaagcttgaatatgaaaagtcagggatatcagtatgaacaacattactcagttgcc

SEQ ID NO: 201550 - DNA, 74 bp, Homo sapiens
ccatggacctgaaggagaagcacctgaaaatgtggacacagacttgccaggcagcctggggcagagtgaagaga

SEQ ID NO: 201551 - DNA, 82 bp, Homo sapiens
agtgaacgtggacaaagctgttgtctcagggagcacagaagttatccggtgttggctcctgctgcttactatgaccaaactg

SEQ ID NO: 201552 - DNA, 98 bp, Homo sapiens
cgcaacagccccttcgtcccaaccttatgatctcctcattgcgtccccctctgcccactggacttggacttcagatctgaccccagacctgccggcta

SEQ ID NO: 201553 - DNA, 100 bp, Homo sapiens
ccggggagacgtcttagacagtcgtggttcctgtgatctgtgtcctctttgcagaagacctgcgaccgcatcaagcagtccgccagcggaaccaagcggc

SEQ ID NO: 201554 - DNA, 75 bp, Homo sapiens
ctgattctggacaatgatggagatcgactttttgccaagactgcttttcaggaagccttggacgctgcaggtgat

SEQ ID NO: 201555 - DNA, 131 bp, Homo sapiens
ctggacctgatcttccttcgaggcattatggaaagtcccatagtaagatccctggccaagttagcagacttgaagaaagagaagcagaactgaagaaggaatataatgcattacatcaaagacacactgag

SEQ ID NO: 201556 - DNA, 132 bp, Homo sapiens
gttagacttgtttcttatatgtgatgccattccagcactggactcatggaggctgagcatttattcagaccgtggctgagcatggagctgtccccccgcagtcctccggagatgctggaggagtcggattgc

SEQ ID NO: 201557 - DNA, 74 bp, Homo sapiens
gcagccttgggcctcgcgccggctatggccgtgccctggggctgagccctcagaagctccaccatgaggcgagg

SEQ ID NO: 201558 - DNA, 98 bp, Homo sapiens
gcaggatgggatccggctcctccagctaccggcccaaggccatctacctggacatcgatggacgcattcagaaggaggagctagaaaccctacagagc

SEQ ID NO: 201559 - DNA, 86 bp, Homo sapiens
tctctgaatgatgaatacttttactactgtgacaacattaacgaaacctccacagctgttgagaaaaaggagaaacctcttccaag

SEQ ID NO: 201560 - DNA, 99 bp, Homo sapiens
gtgattcaaggtgggaaatagccgcttcaggtcacagcaacagcccagcaggcagtgtggcccactctaccacctccgacatcaggcccagtcactcag

SEQ ID NO: 201561 - DNA, 111 bp, Homo sapiens
aaaacctgttactgaaggaactggtgatattattaagggttacacatcattttggaatgactgtatatcatctggattacgtggctgtatgttaattgaattagcattgag

SEQ ID NO: 201562 - DNA, 100 bp, Homo sapiens
cacggcaggagcggcggcccagcactcggcactggccacttgcaggttgcccccaagtttcctggcagtgtgtgatactgaggaggtgagcttgtttctg

SEQ ID NO: 201563 - DNA, 76 bp, Homo sapiens
ttattgaagagataggaactcttggttgggataagtggtttgttctggatgcagaaaccagagatctagtttctat

SEQ ID NO: 201564 - DNA, 100 bp, Homo sapiens
ccacgacggcgccatcaccgagcgcttgatgtgcgcggagagcaatcgccgggacagctgcaaggtttttgccaatccagaagactgtgtagcatttggc

SEQ ID NO: 201565 - DNA, 77 bp, Homo sapiens
acctgcctttgacctttttgaagcctttgcaaaagattgacttggcctctacttcttgttaaggaaattcatctctt

SEQ ID NO: 201566 - DNA, 75 bp, Homo sapiens
cacagttcctaccttatgagctcggttttcttatgcttataagagtggaacagtttttgaaatcatgaatcctgt

SEQ ID NO: 201567 - DNA, 82 bp, Homo sapiens
cgctgctcaagttccagatttggaacaagatcactcaaggtgaaggataatctactaataccagcactttgaatgaaaattt

SEQ ID NO: 201568 - DNA, 71 bp, Homo sapiens
gctgcgccaccttcaaggagcgtcggaacctgctgcgcctggtccagggtggcgcgtggctgctgagcccc

SEQ ID NO: 201569 - DNA, 100 bp, Homo sapiens
aaaagagttcggcgaggaactccagaatacaagaatgctgaccccctgaaggtgtacccgccactgaaggggagcttcccggagaacctgagacacctta

SEQ ID NO: 201570 - DNA, 100 bp, Homo sapiens
gacagatcaacggcaggagaggtttgttccctgacaactttgtaagacaatcagaaacggagactgttcatctgtttatcccagctctatcagtcggtgc

SEQ ID NO: 201571 - DNA, 75 bp, Homo sapiens
ccctaactcctgaccccacgccctgggaacccccgcaacatgggcacgcagcccctgtcaaagggaacaggaagc

SEQ ID NO: 201572 - DNA, 90 bp, Homo sapiens
aaacttccagccatcaagcccaagactgaatttcaattggtttgcccagtatgcggagatcgtccacttcaccctcccagatgggactca

SEQ ID NO: 201573 - DNA, 88 bp, Homo sapiens
ggagaagcgcagcgacggcgtcgggagagcgcgcctagccggctcgcgagctggcagtgatggtgaaagcataggaaactgccccttt

SEQ ID NO: 201574 - DNA, 83 bp, Homo sapiens
cgcgtcgaagacatggaccagggctacggaggtgcacgacgccagctcccttctggggggccggggcctgggggttgccatgg

SEQ ID NO: 201575 - DNA, 100 bp, Homo sapiens
gtcacacaacactgggtcttatgtgactggcttctatcaaagtttgcaaggttcatttatgttcatggttcgttaccgtgaacgcatcaccattcttcga

SEQ ID NO: 201576 - DNA, 97 bp, Homo sapiens
agttcaagttcgtcttcaattcttgacttgtgtattttcaactctgggatcacctgatcatttcagagtctactcttcatcttgtgttgagacttcg

SEQ ID NO: 201577 - DNA, 83 bp, Homo sapiens
ctccactgtcggtagcaacaaggtcccaaaccagttgtcttcctgcaacatggcttgctggcagattctagtaactgggtcac

SEQ ID NO: 201578 - DNA, 83 bp, Homo sapiens
ttgaacagtaccgcctgcagagggagaaagaattcaaggccaaggaagctgcggtttactcctggcttgggggcattaggaag

SEQ ID NO: 201579 - DNA, 100 bp, Homo sapiens
agaaatggagcacaggcggtgagccaaggacacccgagacgcccactattgcttggttctacttcctttatcccgattggccgtcggacttatgccagtg

SEQ ID NO: 201580 - DNA, 89 bp, Homo sapiens
cgcagatctccgggccacctgccttgaagaacatccagtcatggataaaaatgagctggttcagaaggccaaactggccgagcaggctg

SEQ ID NO: 201581 - DNA, 100 bp, Homo sapiens
gtcgccctcaaccagctgtcactgcaggagctgcagaccatcagactgtgccctgtccacggtgcctcctgcatgtcctgctgccctgagctgtcccgag

SEQ ID NO: 201582 - DNA, 93 bp, Homo sapiens
cctcagcctcccgagtggctgggattacaggctgacgttcctcagggagtgattcgagtgcaagctccccatctttcgaaagtttccatggca

SEQ ID NO: 201583 - DNA, 74 bp, Homo sapiens
cgtctcggaaaccggtagcgcttgcagcatgtttcacgctatggatacattgtatagacacagctatgatttga

SEQ ID NO: 201584 - DNA, 83 bp, Homo sapiens
ccctggagccttccctcctcttcccagcaggccagctcctggaatgaggccgcccatgggaggccatatgccaatgatgcctg

SEQ ID NO: 201585 - DNA, 75 bp, Homo sapiens
gcgagaactgcaagaccactttgggctggaaatatgaacttgctactaccagcaccatgccctaccaatatccag

SEQ ID NO: 201586 - DNA, 96 bp, Homo sapiens
gcgtggttaagggacaagtggaatatctactgaagtggaaaggcttttctgagacggccagtcccgaacagtaaggcagttccagttcactgactg

SEQ ID NO: 201587 - DNA, 82 bp, Homo sapiens
ggatttcccaccagagtgtggaacccgtggtcatgatgcacatgaacattcaaggccctgggaggagcggggacactgagga

SEQ ID NO: 201588 - DNA, 96 bp, Homo sapiens
cagctatcccctgaggcccgacccaggacagtggtgattatcctcttaccatgcctggacctcagtggaaaaaatttcgttcaaacttttgtgaat

SEQ ID NO: 201589 - DNA, 75 bp, Homo sapiens
gacaacagtgatgaggaaagctgtgaaagttctcaagatttgaatataacctgccgctttgcaggtgtattccac

SEQ ID NO: 201590 - DNA, 91 bp, Homo sapiens
caccacaccagaaactagcaccagccccaaatttcgttcgaggtgaattgctgcgggagagagtgcagcggatggaggcacaggagggagg

SEQ ID NO: 201591 - DNA, 82 bp, Homo sapiens
gaggaagtgctcctgctgggcctcaaggaccgcgagggtgtgtttgaccatcgaatgaagtgctggcagaaatgggaagatg

SEQ ID NO: 201592 - DNA, 97 bp, Homo sapiens
gctgcccttcaccgcgggcgccaatggggagcagaaggactcggacacaggaccgcagctgaatgcacagctagaaggttggctttcacaagtacag

SEQ ID NO: 201593 - DNA, 129 bp, Homo sapiens
gcaaacggcaggctgagctgaaggcacttagtgcccacaaccgcaccaagaagcacgacctgctgaggtacaccaggggttggaaaaaccacactaggcaaagaacttgcgtcaaaatcaggactgaaa

SEQ ID NO: 201594 - DNA, 126 bp, Homo sapiens
gaacagtttttgctgaactacctcaaagagaaggatgtggcagatggaaatgtctcggattttgataatgaagaaggattcactttaagagatttggaaactcttccctttggaattgctcttccc

SEQ ID NO: 201595 - DNA, 95 bp, Homo sapiens
cggctccgcagtgaccggactcgggggaggttatccggtgttggctcctgctgcttactatgaccaaactggtgcccttgtagtgaatgcaggcg

SEQ ID NO: 201596 - DNA, 75 bp, Homo sapiens
gaagatcgccaacaagctcttcggagaaaagacgtatcaatttttacagggtttttaatgaccacaacaagcaag

SEQ ID NO: 201597 - DNA, 75 bp, Homo sapiens
aaaaagggctggaaacttcgctatcatggagatcccatcatctgccctccaccatccatacctacgtttgcaaca

SEQ ID NO: 201598 - DNA, 82 bp, Homo sapiens
tgagctcagacctgccaatttaccagagataattgataacaccctgtaacagctgagtattcctccacctcgtcctggcatg

SEQ ID NO: 201599 - DNA, 50 bp, Homo sapiens
caggcttctcctttccccgctgaccctgaaggaagattgggaatctgaaa

SEQ ID NO: 201600 - DNA, 100 bp, Homo sapiens
ggagccggtgccgcagctgcgatggccgtggccgtggggagaccgtctaatgatatggaacctagcaaagctgttccactgaatgcatctaagcaagatg

SEQ ID NO: 201601 - DNA, 100 bp, Homo sapiens
gtgaagtttcccttttgcaaggagaaaattttggtggagaattatccaacaagaaaaagacctgtggctattaagatagttccaaagaactactggttca

SEQ ID NO: 201602 - DNA, 98 bp, Homo sapiens
gtggagaaagacattacaccatctgaattgcctgcaaacccagaatgcctaccgcaggaatgggatggcttttctagcctgctgatgtgacaactgtg

SEQ ID NO: 201603 - DNA, 100 bp, Homo sapiens
cagctcaacacggcacttccacagcggggatctgatgagcttctttcttctggcatcattaacggaccttttaccatgaatagttctactccttctacag

SEQ ID NO: 201604 - DNA, 75 bp, Homo sapiens
tccagcgggcctggactgtgggctggtgtgtggaactgttctcctgtgcctcctgttggctctctttgcatctgg

SEQ ID NO: 201605 - DNA, 82 bp, Homo sapiens
aaacagaatggactaggactcagttttttcagaagaagtgaagtcaagatgaagaaccatttgcttttctggggagtcctgg

SEQ ID NO: 201606 - DNA, 74 bp, Homo sapiens
gtgctggtcatcaatgttactcaggtagagacgaaatctcacaaaactgtcccttatcttcagtcacatgctgg

SEQ ID NO: 201607 - DNA, 76 bp, Homo sapiens
ggatcatgtctggtggctccgcggattataacaggcctgcactgcccaaagtcttggaaacttgctggatatgatg

SEQ ID NO: 201608 - DNA, 100 bp, Homo sapiens
cctgggcctccagtcttgtccctggaggcctctgaggaagtggagcttgaccaccctagtgccgctgttccggaactcgcgcctggtccagttccacttc

SEQ ID NO: 201609 - DNA, 80 bp, Homo sapiens
gaccacggtcaccgtctcctcaggaacgaatgatcacacactttgaaaggtccaaaatggagtaaggaatgggaagattt

SEQ ID NO: 201610 - DNA, 90 bp, Homo sapiens
caaggatggcaaagactgggctgcccgagaagatgcctgctctgtgcctgtatctgagatcatcgccgttgaggaaacagacgttcacgg

SEQ ID NO: 201611 - DNA, 90 bp, Homo sapiens
gacgtgcctcgtggtctaaagcttcggcacaagggcccaactggaattccacttacgggctctgctgccatgaaggtgaagattaagtgc

SEQ ID NO: 201612 - DNA, 87 bp, Homo sapiens
aagacatcccagaagtgtctgatacggtgttgaaggcaatcacagtccacagacaaacgaatttaaaggagcaaccgaggaggcacc

SEQ ID NO: 201613 - DNA, 98 bp, Homo sapiens
agacagaggtgtgctgacgacctgctacaacagaagagcaaagaatctgcagagtgttgtgcttagtaaaatgaattttgaatcttttgtaaaagatc

SEQ ID NO: 201614 - DNA, 100 bp, Homo sapiens
cagcaactgtgtcaccaaaggaaatcttgaacctgaccagtgagctgctgcagaggatttgagagcacctccagaacaaggaaagatttttattgcaagg

SEQ ID NO: 201615 - DNA, 96 bp, Homo sapiens
cattcgcttaaattttgcagagaaagggttctgatgactgtcttgtgaaaatatgggcaacagatgatgggaggttgttagctaccttaagaggac

SEQ ID NO: 201616 - DNA, 87 bp, Homo sapiens
gagctgagtggttgtgtggtcgcgtctcggaaaccggtagcgcttgcagcatgagacggggtctccctgtgatgcccaggttgttct

SEQ ID NO: 201617 - DNA, 100 bp, Homo sapiens
gaaagtcatgtacaaccagtctacagccacgaccctctttcacagtctgccattgctcagctaccaagatgaatgaactaatggagaaatagaaagtctt

SEQ ID NO: 201618 - DNA, 50 bp, Homo sapiens
ctcctgaggagctgggactacagggacccagcctccaacactgccccgct

SEQ ID NO: 201619 - DNA, 96 bp, Homo sapiens
gacctggaccagccagaggacgcgggctctgaggatgagctggaggagggggcatgcatgtagggaataccggattcataaagagctggatcatcc

SEQ ID NO: 201620 - DNA, 100 bp, Homo sapiens
cgctgcaggcttccagtgggcacatgtggcttgaccactatgctatcatcaagtttccgctgaccactgagtctgccatgaagaagatagaagacaacaa

SEQ ID NO: 201621 - DNA, 82 bp, Homo sapiens
ctagcttcatgttcctggtgtttgacctgaaacactgcgctaacttatgcatgtgctggaggatttgttgacattgttaaag

SEQ ID NO: 201622 - DNA, 100 bp, Homo sapiens
cgggccgcgcgcgggtctccgtggaagtccgtttcgtgagcagcgccaagtgggtaattccagaattgattggccataccattgtcactgtattactgct

SEQ ID NO: 201623 - DNA, 98 bp, Homo sapiens
gacggcagaccctgcaaagtggtcccgcggcagtgctggtggccatggttcccgtagccagaaggagttgcccacagagcccccctacacagcatacg

SEQ ID NO: 201624 - DNA, 83 bp, Homo sapiens
ctgcaagctctttgacacacagcagttcttgtcaggaccagtccatgggcaattggcagatcaagcgccagaatggagatgat

SEQ ID NO: 201625 - DNA, 98 bp, Homo sapiens
cgaagtgatttccagaggatttacactgtttttgccaatccagaagactgtgtagcatttggcaaaggagaaaatgccaagaagtatcttcgaacaga

SEQ ID NO: 201626 - DNA, 98 bp, Homo sapiens
gttaggaaaatgtgatgcatgtctcagtggtcacggtctagatcacattctcgatccagaggaaggcgatactctcgctcacgcagcaggagcagggg

SEQ ID NO: 201627 - DNA, 51 bp, Homo sapiens
aaaaaaattgccttcttcaaacaagaagagaagccagattgctccaaggcc

SEQ ID NO: 201628 - DNA, 100 bp, Homo sapiens
gttcctcatgggcagtgctcggggtgacaaagaagagaggtggagaagagcgagtacttgagaaagaagaggaagaagatgatgatgaagatgaagatga

SEQ ID NO: 201629 - DNA, 100 bp, Homo sapiens
tacaggtataatgttaatcaacttggtgatgcccatgactggaaccagaacagagattgactgttcaagtactattatgctggacaatattgtgaggaaa

SEQ ID NO: 201630 - DNA, 50 bp, Homo sapiens
gccccggaggcagagcggctgccatggaaggatttgatgccctggatccc

SEQ ID NO: 201631 - DNA, 82 bp, Homo sapiens
gactctgtggtgggtccctcagcccttctgagctctgtgctgaacaaggagcttcagaaatacgagcagttcatctttgcag

SEQ ID NO: 201632 - DNA, 100 bp, Homo sapiens
tacgcctacttctataaagtcatccaggcagcagtgaggatgccagagttcatgggtttctagaagacaagttttcaactgcagatacaaacatcaggac

SEQ ID NO: 201633 - DNA, 100 bp, Homo sapiens
agcacttaaaagtggaaagatgacggatgaaaagaatgaacactgtccttcaaaacgagtacgaggcagagctggccatgcggcagctggtggaggccga

SEQ ID NO: 201634 - DNA, 100 bp, Homo sapiens
aaaagatcttcacacttccaggagactgtctgatctaccctgctcacgattaccatgaggtcctgggcctatgtcaagaagtgcaaaaacaacatgtgtc

SEQ ID NO: 201635 - DNA, 98 bp, Homo sapiens
ctcctccgaaccccttcatgcccaaatcccggaaactccagcgtgtctccagccgtggttgaaatcacaaagattagacacctttttagataggtgtt

SEQ ID NO: 201636 - DNA, 100 bp, Homo sapiens
agaaactgaatactccttccttcctccccacccattcctttaaatccggagggggaaaaaatcccaaggtctgcaaagatttctccacccaggtgaactc

SEQ ID NO: 201637 - DNA, 98 bp, Homo sapiens
gagggagcggcgccccctcccccctccggcgcggaccccgcgtgcgccttgctcgcccgcagccccgagaccgcagaaccccatgcatcccagctcaa

SEQ ID NO: 201638 - DNA, 83 bp, Homo sapiens
ctgtcagtcgcgagcgaacgaccaagagggtgttcgactgctagagccgagcgaagcgtgagacatggaatccattaaaattg

SEQ ID NO: 201639 - DNA, 96 bp, Homo sapiens
agccaggacttgttaaaaagatcaatagattgcctacccccattgcaggactgggtatgttagagcccaccaaggaaccactgaaaccactttctg

SEQ ID NO: 201640 - DNA, 100 bp, Homo sapiens
atcgaccccaccgtgctgctgggcgcgctgccgttgcggagcttgacgcgccagttttaacagtgtatgccagggaacacacattctctttcgagaattc

SEQ ID NO: 201641 - DNA, 75 bp, Homo sapiens
ggattttattactggcagcatgtatatcttttcctagatattatcctactgaagatgtgcctcgaaagctgttga

SEQ ID NO: 201642 - DNA, 83 bp, Homo sapiens
ccaaggaggagtacaaggacatcctgcgcaaggccgtgcagaagggaaagcaggcaggatgggagagtcgccgatagaaccac

SEQ ID NO: 201643 - DNA, 75 bp, Homo sapiens
tatcaagaatacttcagtcaccaacgtgccaaatatggatcacctgctgttaccagctaccacccataacaagac

SEQ ID NO: 201644 - DNA, 100 bp, Homo sapiens
cggccccaaactggcagggtctttatcccaccattagagagaggatcccattgaagataccacgctgcatgtgtccttagtagtcatgtctccttaggct

SEQ ID NO: 201645 - DNA, 75 bp, Homo sapiens
gcggccctggcgcggggaagcagtgggaaaatcgcaaggaagccggaggttggaaagaaccatgactgtattcag

SEQ ID NO: 201646 - DNA, 100 bp, Homo sapiens
ggtcatgctgcgccatgaaaacatccttggatttattgctgctgacaataaaggatgaccggaaagaagggatgaccgcgtttgtggaaaagagaaaggc

SEQ ID NO: 201647 - DNA, 95 bp, Homo sapiens
aaataatagctgtttgtattttggctgctgcaggagccattttagaccattcccggagtaataaatccagttggagcagcagtgatgagaagagg

SEQ ID NO: 201648 - DNA, 83 bp, Homo sapiens
cagcactggggaaacgatccgctcccaaaacggcctgttgattgcatactgtagaagatttgatgttcagactggttcttctt

SEQ ID NO: 201649 - DNA, 75 bp, Homo sapiens
catgttcagcggccgcgtggaggtgctgaccgatgccggagtccaatggatgggaccccaatgaaatgttcaagt

SEQ ID NO: 201650 - DNA, 100 bp, Homo sapiens
caggaggagctcaaggggatgcagctgctgcgggagagtccgtgtgagaaccgggacacctgtcctgttgaaaagggggacgcaaaagctgaaaatgccc

SEQ ID NO: 201651 - DNA, 98 bp, Homo sapiens
cccgccgcagaggaaagcgggctggcaggcgagggagcccgcgtcggctgagagcccacaggcccccacaggtttacccaaggtccagcctagcccct

SEQ ID NO: 201652 - DNA, 75 bp, Homo sapiens
aattcatcccagaaatctaagagagaaatatggccgagctctctaaggattctgccagccagggcactggccaag

SEQ ID NO: 201653 - DNA, 82 bp, Homo sapiens
ggggcgggcgccgcgggacctctccgggccatggaaagtttcctacactactgaggtttaggggcactgtgaagcaaaagcc

SEQ ID NO: 201654 - DNA, 100 bp, Homo sapiens
ccacagtcttcaagagcccacggacaccacctcaacgtcctaccctggtccaagcctggaaagtgaagacttcaacattccaccaattactcctccttcc

SEQ ID NO: 201655 - DNA, 90 bp, Homo sapiens
gccggagatgcctgacgcatctgtctgaggagcggtcagtgacgcgatggagcgggcaagcttttgtctggtcctctgagccccagtgag

SEQ ID NO: 201656 - DNA, 75 bp, Homo sapiens
cacagtgtttgagaactatgtggcagatatcgaggtggatggaaagcaggcagcacagcattctcagaagcagtc

SEQ ID NO: 201657 - DNA, 75 bp, Homo sapiens
aaggccacaaaggagagctccgtggagagaagcattagtgccagcagtagttcccaagggctgtctcagccatcc

SEQ ID NO: 201658 - DNA, 50 bp, Homo sapiens
atttctggagtgtccacagtcctgctgaacatctgttgggccacttagaa

SEQ ID NO: 201659 - DNA, 96 bp, Homo sapiens
cggtgaaatcctgtcctgaagactgtaaggttgctttcagctatgtaacgtttttcgatcccatgagatggaaatcgaccagtgcttgctagagtc

SEQ ID NO: 201660 - DNA, 118 bp, Homo sapiens
taggcgccaccactagtaccatgagtccctgcactggttaaagccatcgccacaacctggacaggcagcaaggttttagctaaagaagatactgaggcagctattcaatcaatattat

SEQ ID NO: 201661 - DNA, 74 bp, Homo sapiens
gcctgacttggccaccttcgggttccccatctcatgctgagctctgcgtgcctcttgctgtgccctacctggac

SEQ ID NO: 201662 - DNA, 100 bp, Homo sapiens
cgagcaaccgccctctcctgcatccaccagcagccaggaatccaaggctgcctctaagaatcaaacttcactcttgggagaaccaccaaaagaaattcgg

SEQ ID NO: 201663 - DNA, 82 bp, Homo sapiens
tggaatctgaagagacatgagatggtagacaaaaccccagatcgaaaagtatcctccttgcacacctcccgagttcagaggc

SEQ ID NO: 201664 - DNA, 100 bp, Homo sapiens
attttgatgtggatgatgccaaagttttattaggctggacgtaaagaaagaagtgatgcactcaattctgcaatagataaaatgaccaagaagaccaggg

SEQ ID NO: 201665 - DNA, 75 bp, Homo sapiens
atccagcctgcggagcctgtggggcagcatgttggcagataaattgaacatgactccagaagaagctgaaaggtg

SEQ ID NO: 201666 - DNA, 100 bp, Homo sapiens
gttgcctaagaaaggcttccctctcatcttccatggtgtgcggggtggacgctcttctctggctcctgggattggctgtgaggacaaaacataagtaaat

SEQ ID NO: 201667 - DNA, 100 bp, Homo sapiens
cgttggtgctgtttgcggatgctgatgcaggtgaaggtggagcaggtcgccatggagctgcggctgaccccgctgacggtgctgctgcgctcagtgctgg

SEQ ID NO: 201668 - DNA, 100 bp, Homo sapiens
agcaagaagtggaaagaaatcctgaagttccctcacattagccagtgtgaagacctccgaaggaccatagtgtatttgcatgcccgagtctttgagccgt

SEQ ID NO: 201669 - DNA, 100 bp, Homo sapiens
tttggcgttatcggcagccaaaaagatcctccccggcgtgaaggtcatcatcgcacacaccgagaccaaaggacccttgggagactcacacctgggagag

SEQ ID NO: 201670 - DNA, 100 bp, Homo sapiens
ttcaacatgcctctgacaatctctagtgaagttggtgaaccatctaaagaagagaaggctgtggccaagtatcttcgattcaactgtccaacaaagtcca

SEQ ID NO: 201671 - DNA, 75 bp, Homo sapiens
tcccgcgtccgccgattcctcctccttggtcgccgcgtccttggctggcgtactccgccgtggtcatggaggagg

SEQ ID NO: 201672 - DNA, 127 bp, Homo sapiens
gaattctgcctaagccaactcgaaaaagccgtacaaaaaataagcaaaagcgtcccaggagaattggcagagggggtcgatttgggaggaaaggtgtggctataaactttgttactgaagaagacaa

SEQ ID NO: 201673 - DNA, 82 bp, Homo sapiens
tccaccaagtctggggataccttactgctcctgcaccacggggacttctcagcagagcaaaaccagaaatcctgacttacga

SEQ ID NO: 201674 - DNA, 50 bp, Homo sapiens
ttcctctccagctcagccgcgtaggaagctcttcgtgggcggtcttgact

SEQ ID NO: 201675 - DNA, 118 bp, Homo sapiens
ttcatcctgtcccactgggaaaagtataacacagggattcttttcctgccatggggatatgacattagccaggtgggaagcacttggagaatatttagatgggaagaaggagagtgag

SEQ ID NO: 201676 - DNA, 100 bp, Homo sapiens
gacaacacgttgtttgatgccaatcatcctcgaagattaattggaggatctgacaacaaactgatttatagacattatgcaacgttatattttgtcttct

SEQ ID NO: 201677 - DNA, 87 bp, Homo sapiens
atccataccaaggagacgctgacacttgtgtttgaatatgtggcagttacaattcatgatacagaaaaatgccaagcatgggatcta

SEQ ID NO: 201678 - DNA, 114 bp, Homo sapiens
ggagagtccgacgagcgctgcactaacgcaggatccggctgccgaaggtcctcgccagaaaacaaccctttttgctgcacatgtaagtggagctgtgcttacctttggtatggg

SEQ ID NO: 201679 - DNA, 100 bp, Homo sapiens
ctgaaattaaaaagggaaggataaccccatcacaggcctcgaaaaagcccaagacagcagaagcagacacctccagtgaactagcaaagaaaagcaaaga

SEQ ID NO: 201680 - DNA, 101 bp, Homo sapiens
tcaggccagacaggagcacctgaccaaaggcttcacagatttgtgacacagactatatccagtacccaaactactgttccttcaaaagccagcagtgtctg

SEQ ID NO: 201681 - DNA, 82 bp, Homo sapiens
tgaactggttgtgcaggaaccaggatccgaacccgcctccccagcagaaaaatatggctcaggagactaaccagaccccggg

SEQ ID NO: 201682 - DNA, 74 bp, Homo sapiens
gacggcgtgttccagaggcgcggggcgccgccgctgcagctgccgcgcgtaaaaatggctacaaacttcctagc

SEQ ID NO: 201683 - DNA, 75 bp, Homo sapiens
ggaagatgtaaagcaatatttcgagcagtttggcaaggaagccagttgagggaagttctccatgaatgtacgtca

SEQ ID NO: 201684 - DNA, 90 bp, Homo sapiens
gaagatgattacacggcattaatctcccaaaatattctagaaggggaaaagctacttcaagatattaataaggcagcggaaagaagaaat

SEQ ID NO: 201685 - DNA, 74 bp, Homo sapiens
ctagcaactggttcctatgatgggtttgccagaatatggactaaagatgatttgttcccgacaaggagttttct

SEQ ID NO: 201686 - DNA, 100 bp, Homo sapiens
ccgctacgagctggctttaatcctgaaagccatgcagcggacttaattcagtgcacaaatgagatgaatgtgaacatcccacagttggcagacagtttat

SEQ ID NO: 201687 - DNA, 100 bp, Homo sapiens
tcattttgggtatcactggagtctgatggaaagagataggcgcatctctggagttgatcgttactatgtgtcaaagatggagtctcgctctgttgcccag

SEQ ID NO: 201688 - DNA, 74 bp, Homo sapiens
aagcacattaaagctgtcttgagtaacaagaggtccagagcgccatggatgagagtcatatcctggagaagatg

SEQ ID NO: 201689 - DNA, 90 bp, Homo sapiens
ggcggatggccccaggtgtaagcgcagaaagcaggcgaacccgcggcgcaataacggctgaccggttccctgatgtgttacctgcttctg

SEQ ID NO: 201690 - DNA, 100 bp, Homo sapiens
acttcttaacccctagaccggtttttagtccattgactatgcagcctaatggaatccaaggcattgtagaggcgtatcggtcttgtcttcctcagataaa

SEQ ID NO: 201691 - DNA, 100 bp, Homo sapiens
ggaccacactccaacgcggggcgcagtggagccggtgaaacctgaagaaggcagagatatggcaaacaggattggcgcttttgggtacatggagtgttca

SEQ ID NO: 201692 - DNA, 100 bp, Homo sapiens
tggcgcagcccacgctcatgatcgacttcctcacccgcgcctgcgacctcgaccctgtattcagtggatcagctggcaccacccaaatagataaattggc

SEQ ID NO: 201693 - DNA, 75 bp, Homo sapiens
ccgcaatgagataaaaaatggcactatccttcgattaaccacatctccaatatggccgcgtggaaagtgtcaaaa

SEQ ID NO: 201694 - DNA, 100 bp, Homo sapiens
gacgggaaggcgggagacgagaagcctgaaaagtcgcagcgagctggagccgccggaggagcatggggaagtgattgactgtgtgcaggagctgagccac

SEQ ID NO: 201695 - DNA, 101 bp, Homo sapiens
cagtaccagttcagcaagtgtctctactgtcagaccacacacagaaatgtctacacaaggaagtacaggatttggcttttctagatgtcgtatccaaactt

SEQ ID NO: 201696 - DNA, 75 bp, Homo sapiens
cccggaagatcgcgatcctgggctaccggtctgtgggtttgtctacagattttgagcgttcgaagttgacccctg

SEQ ID NO: 201697 - DNA, 100 bp, Homo sapiens
agttatttaaatctctgtgtgttccttattttgtgcttgaacttgatcaaacagggataggatgggatctgcactgatgattgaaacagcaagaaacccc

SEQ ID NO: 201698 - DNA, 75 bp, Homo sapiens
tgtcccagatatagccgttggtacaaagtaagactttgaccccgacgcaggcttcagtgattgccgcggatcaga

SEQ ID NO: 201699 - DNA, 74 bp, Homo sapiens
catacctgtgcagaagtgcagaggtcaatctttatgtacaggaagatttcgatgtcgatcattttgtgtctgac

SEQ ID NO: 201700 - DNA, 96 bp, Homo sapiens
ttcattttgactgaaaaagcgaaggacttttttcaggcagaaaacaagtctcgtctggacgaggtccagttccggccgtaccgcacagacgacttc

SEQ ID NO: 201701 - DNA, 75 bp, Homo sapiens
agagcctcagtttgtgcaggacaccgacatggaacagggactcactggggttgacttcaagcctcgagccagcat

SEQ ID NO: 201702 - DNA, 100 bp, Homo sapiens
gaggaggaaggagggacttcttggcttctcccagcatagccccagggaactcaaaactgtatgatctaccagatgagccttttacaagacagttttactt

SEQ ID NO: 201703 - DNA, 90 bp, Homo sapiens
gagtgtctgtccccagagcctcagtttgtgcaggacaccgacatggaacagggactcactggggggacagtatggaaattaccagcagtg

SEQ ID NO: 201704 - DNA, 100 bp, Homo sapiens
tgtgtcagtctggtgcctggcgtcacactggatttgatagaaaactgcagatctgggacacggccggccaggagcggttccgcaccatcacccagagcta

SEQ ID NO: 201705 - DNA, 83 bp, Homo sapiens
gttggctgccgtccccgctgctgtgcattgggagctcgaggccatgagcagatataccagcccagtgaacccagctgtcttcc

SEQ ID NO: 201706 - DNA, 82 bp, Homo sapiens
taaaagacctttaaatcctttggcttctggtcaaggcattgggatcccgtggcagttgcagcactgaagtggagaaggagac

SEQ ID NO: 201707 - DNA, 90 bp, Homo sapiens
ctatgtcataccgtgacagcccgcaggatcagaactcaacagtgacaattgaggaattccactgtaagctccaagaagccacaaactttc

SEQ ID NO: 201708 - DNA, 99 bp, Homo sapiens
gaaattgttaggcgtggagagggagtgatgtcttccagactcggtgctgtacccgcctgtgctggaattgatgttcgtctgtgtgatgttggtgaggcc

SEQ ID NO: 201709 - DNA, 100 bp, Homo sapiens
agagccttggatccaggagaacggcggctgggaagcgttgttgacgaccatggacatcatccacgatggatttggattcatgctggcttttggagacttg

SEQ ID NO: 201710 - DNA, 100 bp, Homo sapiens
gaccggagcagagagctggcgagcaagggcagcgggtggcatgagacgtgggaacatgggccacctcacacggatcgccaacgcggtggtgcagaacctg

SEQ ID NO: 201711 - DNA, 82 bp, Homo sapiens
atgaccgacgacgacctgtttgtggacttggggagcggacgtggcccagtggaacatcgggagcctccggaccatcctggac

SEQ ID NO: 201712 - DNA, 75 bp, Homo sapiens
agaccaagtcatggcttccttcaagatcctggctggggacaagatggcccactgcgtgaccttggttcagctgtc

SEQ ID NO: 201713 - DNA, 100 bp, Homo sapiens
gctccagtcagcagcagcccccagtcgctccagccataaccactgaggccacagcacagtgcataccaggtgcttttcactccagcaacgcaggccgcac

SEQ ID NO: 201714 - DNA, 100 bp, Homo sapiens
caagattctggcaaagcttgaacgcttaaaacaacagaatgaagacttgaggcgaatggccgaatctctccgtggaagatagatgataagcctgtaaaaa

SEQ ID NO: 201715 - DNA, 100 bp, Homo sapiens
ctttgttagatgattcgaagtttcctatagaggataccccattggttccaagctgtaggtaaaacttgcctactgatcagttacacaaccaatgcatttc

SEQ ID NO: 201716 - DNA, 99 bp, Homo sapiens
gaagagcgacaagccgctggcagccgcggatctcaccgccgctcaggagtgaagacatttccacctggacacctgaccatgtgcctgccctgagcagcg

SEQ ID NO: 201717 - DNA, 98 bp, Homo sapiens
cgtctggccaagaatcagaggaagtggacctgtcgcgaaatcgcctttcagaaattcctatagaagcatgtcactttgtttctctggaaaatctcaac

SEQ ID NO: 201718 - DNA, 98 bp, Homo sapiens
acggctcacctgtgcgggatggaacaaaagatgccatggacaatattaccaggcagaaccaattctacgatacccaagtcatcaaacaagaaaacgag

SEQ ID NO: 201719 - DNA, 75 bp, Homo sapiens
ccacacctggctttggcaatgtggaagagattcctgagaatgacagcctacaacacagcagtcccctcaggatga

SEQ ID NO: 201720 - DNA, 50 bp, Homo sapiens
aaaaaatatggacctcttaaaattgtggacaaccctccatatgataaggg

SEQ ID NO: 201721 - DNA, 87 bp, Homo sapiens
gccccctgcatgtctttgttggcaaacagttctgggggtcgtccgatcctgcagcaccagaaagtttgatgcaggcattggaagact

SEQ ID NO: 201722 - DNA, 75 bp, Homo sapiens
cccagacctaagtttgaagattggctttgtaacaagggtgtgggccgaagatatgctcatgtggtgttgaggaaa

SEQ ID NO: 201723 - DNA, 75 bp, Homo sapiens
tgcattatgtggaccctgaccatgtaaagaatgtgaaagatgttgcagaagtgttccagaagtggctgaagatag

SEQ ID NO: 201724 - DNA, 74 bp, Homo sapiens
attccaagtaactcttatttgaggcaccaaataatgtcatctgaaatgttgccagcatttattgaaacttctaa

SEQ ID NO: 201725 - DNA, 82 bp, Homo sapiens
cttacagccgctcgtcagactccagcagccaagatggtgaagcagatcgagagcaagctccatctggctcctgctgaagaac

SEQ ID NO: 201726 - DNA, 74 bp, Homo sapiens
atgagccacacatccccgaccacttgcggcctgagtatgggactggtgattgcagctggaagtgcccatgaccg

SEQ ID NO: 201727 - DNA, 83 bp, Homo sapiens
gcttgaagcaaagctgcaggttttaaagtggttggaataaaaacagggttgaatgagttccagaaagcagggttctcaacctc

SEQ ID NO: 201728 - DNA, 75 bp, Homo sapiens
caggcgcagacccacccgccatgaagccccccgcagcacatccgggcaacgtttgatcctgacacagggctgttg

SEQ ID NO: 201729 - DNA, 95 bp, Homo sapiens
aggaggcgtcgcgcgcgcctgtagctcgcgggcctcgcagagtgcagcagctgccccgagccccgtgcttggcaacattccccccaacgatggga

SEQ ID NO: 201730 - DNA, 74 bp, Homo sapiens
cagcgtgctcaggtcggcggaggagaaggtggtggaagctacaatgattttgggaattacaacaatcagtcttc

SEQ ID NO: 201731 - DNA, 51 bp, Homo sapiens
ggctgtttgaagaaagggagaagtctcacagaaagttctccgctcccagac

SEQ ID NO: 201732 - DNA, 100 bp, Homo sapiens
accgatggtctggttgacagcgctggcactggggacctctcttacggttaccaggaacttggcaacaccatttccagcctgtttggaggcggtaccacac

SEQ ID NO: 201733 - DNA, 96 bp, Homo sapiens
acaaatgtgcaatcttaaaagaaactgtgaagcaaattcgtcagatcaaagaacaagggacagagcagaatgggctgatatagatccggtgccgca

SEQ ID NO: 201734 - DNA, 100 bp, Homo sapiens
tcggggcagatcttcatctgtagccaagaagagagcattaaacccaagaacattgtggagaagattgactttgacaagctgaagaaggcagtggcccagc

SEQ ID NO: 201735 - DNA, 76 bp, Homo sapiens
gccaaacatcaagcagaatgtgatttgcttgaagatatgagggagatgaagaagcaaatcttggtctgcccatcag

SEQ ID NO: 201736 - DNA, 100 bp, Homo sapiens
cgctctcttcatgggccatgcccggtgaccacttttggaccaaaggcctgtgtgctgcagaacccccagaccatcatgaaactcccagtacagccagcag

SEQ ID NO: 201737 - DNA, 80 bp, Homo sapiens
taaagcagcgtgcgttcagccctgggtctccttaaccaaaactgccaagaaaggcttggaattgaaacaaaacctgatag

SEQ ID NO: 201738 - DNA, 80 bp, Homo sapiens
taatcctggtgcagggggcgagcatggccgctccgcgagacaatgcagatcttcgtgaagactctgactggtaagaccat

SEQ ID NO: 201739 - DNA, 96 bp, Homo sapiens
gccctgctggaccagctcatgggcacggctcgggacggttgctgcttttgctcagaggacatccatgaccctaatggtctttttgttcaagataaa

SEQ ID NO: 201740 - DNA, 75 bp, Homo sapiens
gcgttacaagctttgtctccttcgacttggagtctttgtccaggacgggttcaggataagtttgaggtgctgaat

SEQ ID NO: 201741 - DNA, 75 bp, Homo sapiens
gctgaagccgctgcccctgctacagagagcccgagcccagcacattgtgccctgtactatatctcagctgctttc

SEQ ID NO: 201742 - DNA, 107 bp, Homo sapiens
ccaaggctaaggcagtatctcgctcacagagagctgggctacaggtatactaaatcacatggtttgcttgttcagcaagctttaccaaaagctaaacttaaagaaat

SEQ ID NO: 201743 - DNA, 50 bp, Homo sapiens
ttgaagtggtgtctacacttataaaaatgaaagccttgagggaattagac

SEQ ID NO: 201744 - DNA, 101 bp, Homo sapiens
aattattagaaattccgcgggcggtgtagaggcggcggacgggccggagggaggatgttaaagccccgcgggtcatcgagcagctcggtgggaagcagctg

SEQ ID NO: 201745 - DNA, 100 bp, Homo sapiens
ggcttcttaacttgcaccctaacagctcgacagaaccttggcgtccacaaaaaggaggagacatcacagctttcccagatcgggaggaaaaatatggaat

SEQ ID NO: 201746 - DNA, 80 bp, Homo sapiens
ccagaaacggtccagaactggattgaattacttagtgcatccggtgaaagacagagatcacatttcaactagattcttag

SEQ ID NO: 201747 - DNA, 50 bp, Homo sapiens
aaagaagtgctatctggaaagagagggaaactgaacagccaagactccta

SEQ ID NO: 201748 - DNA, 75 bp, Homo sapiens
agatgggaaaacaattagtctttgtgcagaaagcacagatgattgcttagcccgcggttcccttcaaaaagcggc

SEQ ID NO: 201749 - DNA, 74 bp, Homo sapiens
gcgctactctctctttctggcctggaggctatccagcatggcccctgagttctgcagcctcgaggaaggcctgc

SEQ ID NO: 201750 - DNA, 101 bp, Homo sapiens
gctgattctcacgggcccggctgccggcccccgctctgccctgattgctgtcgtggctgtgatgtgcaaaccccacagatgtccacacatcagttttacag

SEQ ID NO: 201751 - DNA, 100 bp, Homo sapiens
ttctctgccacaagaaccaccaaagatgcctgtgaggagccaccaacatttgaagctatggagctcattggtaaaccaaaaccctactatgagattggtg

SEQ ID NO: 201752 - DNA, 53 bp, Homo sapiens
ggagtccagacatctgaaacttgatattttctgttaccaacaacacagaatgt

SEQ ID NO: 201753 - DNA, 80 bp, Homo sapiens
gagccgccttctgcctcagaacggcgtgactcggagcggggatctgatgagcttctttcttctggcatcattaacggacc

SEQ ID NO: 201754 - DNA, 95 bp, Homo sapiens
tctggaaagcaacagattttgatgtcctttcttataagaagacaatgttgcacttaactgatattcagatttcaactattgcagaaagtgaagat

SEQ ID NO: 201755 - DNA, 75 bp, Homo sapiens
ctgaaccagtcctgaaagctcaccagtctcactctgcatgttttctaaagatcaaacccgtgtctctcacatttt

SEQ ID NO: 201756 - DNA, 99 bp, Homo sapiens
gccccagccacccatcaaatcagagagaaggaatccaccttcttacgctatggcaggaattcggcgttggaactactttttcccagaagaattactggt

SEQ ID NO: 201757 - DNA, 82 bp, Homo sapiens
gacgaggaggcagccacggggcccctggaggctgaggggatctggcggtggagcgctaggatcagacgcccccgcgatgacc

SEQ ID NO: 201758 - DNA, 50 bp, Homo sapiens
aataaccagcggagctgacacagccaaagagcgacagaccagaaggtgca

SEQ ID NO: 201759 - DNA, 75 bp, Homo sapiens
ggacgggctttaggctggaagcgccttagaggagccatttttccaggctggagcattggatttgctaaaggagct

SEQ ID NO: 201760 - DNA, 95 bp, Homo sapiens
cgcctcgcccgcccggaccagcctgccccggcgccgaggctccagcccccttttggacatcgttggcggccggaaggcgaggccccgccagttcc

SEQ ID NO: 201761 - DNA, 100 bp, Homo sapiens
agagtatgcaagagtcaccttctcaactgttgtcctcatgatgtcctttctggaactgttatcaatactctggctgaccatcatcatcgtgggactgact

SEQ ID NO: 201762 - DNA, 100 bp, Homo sapiens
acccaatcaaggaatgctgatcaagtggattttcggaaaagacatatgaatggagctcagaagaggaggagccagtgaaaaaggcaggaccagtccaagt

SEQ ID NO: 201763 - DNA, 82 bp, Homo sapiens
gccgtgttgctgatcgcctgggtggttgttggcgtgtccctgcagcgaaggatcctggttgttcctccgtgtcacaaagcag

SEQ ID NO: 201764 - DNA, 75 bp, Homo sapiens
gatcgacctcaacctggatatcagcccccagcggcccaggcccagtgctggagaatctggtaaaagcaccattgt

SEQ ID NO: 201765 - DNA, 51 bp, Homo sapiens
tggcggacagtgcggaactaaaggtgtggatgaggtcaccattgtcaacat

SEQ ID NO: 201766 - DNA, 82 bp, Homo sapiens
gaaaagatgaaacggaccctaaatgagccgtcagactgctacagcattacctaccggtacctcgaagtgtccaccatcccag

SEQ ID NO: 201767 - DNA, 75 bp, Homo sapiens
aggccaccaccggccgcctcagccatggacgcgtccctggagaagacctgcaggctgggacaatgaaaagaaaat

SEQ ID NO: 201768 - DNA, 74 bp, Homo sapiens
aaggggtcccgaagccccctgcaggaactctacaacccaatccagtcatacaggagtggcagaagagaggcgga

SEQ ID NO: 201769 - DNA, 97 bp, Homo sapiens
ttcctcgcccagagcgtcttggcggttttgaaactaacatgaacataagtagccgagatgaccctagtacgtcagaaattacttccgagactcaaga

SEQ ID NO: 201770 - DNA, 52 bp, Homo sapiens
gggagggcctcgggggactgactgacagagtttcgctcctgttacccaggct

SEQ ID NO: 201771 - DNA, 102 bp, Homo sapiens
tttggctccagcgtggatctgggcaacctcgggcagtaggtatcctgctgtccatcggcccgcagctagtctatccacccaaccgcccgtcagacctccggc

SEQ ID NO: 201772 - DNA, 98 bp, Homo sapiens
catctccatcacccaccaacaacaccacaataatccacagccaaggtacacggctgccccacaccccctgctatctcttgatccccacttcagccacg

SEQ ID NO: 201773 - DNA, 82 bp, Homo sapiens
ccccacctgcccggtgcccgaggaggcagccaagctcgtggcctgcctctgcgtgcgtatcatgatattagctggtttgaca

SEQ ID NO: 201774 - DNA, 100 bp, Homo sapiens
ggagacccagctcttccaggactttgagccagtccagaccctgctgctgtcttcaaagaaggcatgttatgttacccagagaactttccaaacaagtacc

SEQ ID NO: 201775 - DNA, 99 bp, Homo sapiens
ccccagggacacctaaggccaagggtctccgtctctccaccgggggcttcatccttccagggaggagaagagggactccagaatggctgaggagaagaa

SEQ ID NO: 201776 - DNA, 50 bp, Homo sapiens
ccaccgtgcagcggggcatcatcaagatgatccagtttgctgaccagaag

SEQ ID NO: 201777 - DNA, 83 bp, Homo sapiens
gcgacctacccactacaatacctcttgggactgggctcgatttgaggacaaattgatggccaggagatcactgccaccgccgt

SEQ ID NO: 201778 - DNA, 96 bp, Homo sapiens
ccagcagcctggtgggcatgaagcaccgcgacgaggcgcacagggcggtgctggaggcgctcagacacctggatttcattagcatcatgacctacg

SEQ ID NO: 201779 - DNA, 100 bp, Homo sapiens
aatgcggtgcgggagaccatggacggaattggcagcaatgaaacagattctcgttaagatgcatagtaaacattctgagaacagcttacttctcactaaa

SEQ ID NO: 201780 - DNA, 100 bp, Homo sapiens
aaccaagggcctccgtctggatttccaaggaagaatttcctctgaagcaccggaatcaaccctgcctaccggactgaggatgccaatgaggacaccattg

SEQ ID NO: 201781 - DNA, 123 bp, Homo sapiens
ggattcccaggtcattttggtacagcagggacaggtggtgaagctgatggagccacacagaccagaacggcaggtgcccagctaagacctgaatgccatcaccctccccagggctctgcagtt

SEQ ID NO: 201782 - DNA, 83 bp, Homo sapiens
gcccggctccctaggcgtcccatctcgcctgtcaggattggagctgctttccgagcacctggaccccaaactcctgtgccgcc

SEQ ID NO: 201783 - DNA, 107 bp, Homo sapiens
cctgaaccagctcgtcctggagcacctgcagctggcgcctctgcagtgggcacttgcacctcctgcgccgccgccccccatccaaggatatgccttcaagcctccac

SEQ ID NO: 201784 - DNA, 100 bp, Homo sapiens
caagagtgtacctggtccactgaaaaattcttcagattggaaaataccacaggatggagactacgagtttcggagcgggcactggacacaatgaactttg

SEQ ID NO: 201785 - DNA, 51 bp, Homo sapiens
gtagcattcaagacttcaaactgactccaagaactttcccctcagagcaca

SEQ ID NO: 201786 - DNA, 100 bp, Homo sapiens
cgggattcggggtggcccattcccaggcaggctgctaccgcccctccgcttccagacattctcagctgtcaggtttccgccagctgtggatgcctttgac

SEQ ID NO: 201787 - DNA, 100 bp, Homo sapiens
tcttcgtctgcttcttcctcttcagtcaaggctcttgcagccaatgccggaacaggatttgctgttgctgagcctcaaatcgcaatgttttgtgggaagt

SEQ ID NO: 201788 - DNA, 49 bp, Homo sapiens
ctcccacctcagcttcctgagtagggccatccaggagagcctcctcacc

SEQ ID NO: 201789 - DNA, 100 bp, Homo sapiens
caagaaggccctggacacagcaatatctctgggctttcacagaataggagctctgcagtggatccagaaccacaagtaaaattggaggatgtcctcccac

SEQ ID NO: 201790 - DNA, 98 bp, Homo sapiens
cttgatatagttgacctgcttaaaaaggccaaggtaccagctggaggatgagtctgcgcatttggatgaaatgccactaatgatgtctgaagaaggct

SEQ ID NO: 201791 - DNA, 75 bp, Homo sapiens
gagaactaccctcccaacacggaggtcaacctcactctgatctggtcccaggtgtgacaccttcagcaggtctca

SEQ ID NO: 201792 - DNA, 100 bp, Homo sapiens
cctcctgctgctactgtgtccagcgcaggatcgcttcatatctctaaatatagaagatggcaagctcatggtgagatacaaactgaattcagagctacca

SEQ ID NO: 201793 - DNA, 98 bp, Homo sapiens
cgacgcagttccacagtctgatggagttcgaggaatttataactggccactggctggaggtttaagaagcgcccaggcatcgagaccttgttccagca

SEQ ID NO: 201794 - DNA, 100 bp, Homo sapiens
cacgcctacaataaagggcaggagtttctgcacaggacacagcattgttggttttgccatgtactattttacctatgacccgtggattggcaagttattg

SEQ ID NO: 201795 - DNA, 100 bp, Homo sapiens
cccttccgtatctgcctaggcattttgctgtctcctcctaatacggttgtcctttgtggagggtcttctcgaatcccaaagctacagcaactgattaaag

SEQ ID NO: 201796 - DNA, 100 bp, Homo sapiens
agcagcagccaggtgtggcagtgacagggagacttcccaagtaagaagcggaagaggagccgctggaaccaagacacaatggaacagaagacagtgattc

SEQ ID NO: 201797 - DNA, 100 bp, Homo sapiens
ggggaagatctggaggtccaagtgctgcaagggccctccacgcccttcaggaggagcaggccagactcaagatgaggctgtgggacctgcagcagctgag

SEQ ID NO: 201798 - DNA, 98 bp, Homo sapiens
gctgaggatcgaggaacgttgtctggttgagaacttgttgcttagtaaccaagggaccattaagctgtgtgactttggcagtgccacgaccatctcgc

SEQ ID NO: 201799 - DNA, 100 bp, Homo sapiens
aacgaattaggtggtctgactaccagtggctctgcagagatactgaagtactctttcccagtgggactaagaaccagcagaacagatatactttctctca

SEQ ID NO: 201800 - DNA, 50 bp, Homo sapiens
agatgaaatgctgtcccaaccttactggatgtctttggtggacttgggaa

SEQ ID NO: 201801 - DNA, 100 bp, Homo sapiens
atcgcgcagaacaaagggatcagatctacgcagaccccaccaagaggctggagctgtacttccggcccaaggacccatactgccacccagtgtgcgccaa

SEQ ID NO: 201802 - DNA, 76 bp, Homo sapiens
gtttgacagctattaaaaccagggctccacagttaggagcggatgtgatgctggtacaacccagagtagaatttat

SEQ ID NO: 201803 - DNA, 100 bp, Homo sapiens
tgggctgcagtgacagccggcggcggagcggccggtccacggaggaggtactccaaagattcaggtttactcacgtcatccagcagagaatggaaagtca

SEQ ID NO: 201804 - DNA, 75 bp, Homo sapiens
gtttgcattgttggtgacccaagtacagctaagagccaatttctcaaatgatgaggagtctgatgaggaagctgt

SEQ ID NO: 201805 - DNA, 82 bp, Homo sapiens
caaatacccctttgaattaattatggctattttaacattatggcagggaggcatcagaatcgtagttttcctcttccaggag

SEQ ID NO: 201806 - DNA, 90 bp, Homo sapiens
cctcctttacacagtatcagaacaactagacagtacggatggtgccaaagtttttagtaaacaaccaggaagaatccaaagagtagcaag

SEQ ID NO: 201807 - DNA, 74 bp, Homo sapiens
tgcatcccaggctcacggttgtacgcaaggttgatgacaacaagaaactaggagaatgggtaggcctttgtaaa

SEQ ID NO: 201808 - DNA, 75 bp, Homo sapiens
aaatacagatccaagacaaagacaggatgggcactgctggaaaagtcctcagaatggttggaatgaccctccagc

SEQ ID NO: 201809 - DNA, 95 bp, Homo sapiens
agcagaatttgtatagagatgtgatgttggagaactacagaaacctggtctccctagcttgcaggagggttcctacttgttatctcatgcagcag

SEQ ID NO: 201810 - DNA, 75 bp, Homo sapiens
gatgatgttttctcacccagtcatggcatattggcgttcctgtgctatgatgatgggctgtgtgatagagagggc

SEQ ID NO: 201811 - DNA, 76 bp, Homo sapiens
ttcgaggacttcacggagctctggagaaacatgaagttcgggactatcttctgcaaagctcatcgtggagacggac

SEQ ID NO: 201812 - DNA, 90 bp, Homo sapiens
gtcaaaggatgctgagtccggagcgcctagccctaccggactacgagtatctggagttgtctgctggttctcagcttgaagaagattctg

SEQ ID NO: 201813 - DNA, 98 bp, Homo sapiens
tccgaggcgaccactcctgtgatcgttgcggctggggctggaggggaggaagttggttgaatctggcgatgtggaacccatggatatggagggctgac

SEQ ID NO: 201814 - DNA, 100 bp, Homo sapiens
cctggatcttcacacagctgcttccattggccagtatgaagtggtgaaggagtgtgtgcagcgatgatgaaactgaggcacaaactgcttaatgaacttg

SEQ ID NO: 201815 - DNA, 83 bp, Homo sapiens
gcgaggagaagcgagaaaagatgaaacggaccctgttcttgctggtgtgaaatgactgagtacaaactggtggtggttggagc

SEQ ID NO: 201816 - DNA, 100 bp, Homo sapiens
gcatctccaacactgcctcctacttgcggctctgggccctcagcctcgctcatgcgcgacctggaggaacttgctttgtaccagatccagctgctgaagg

SEQ ID NO: 201817 - DNA, 75 bp, Homo sapiens
ggcccgagaccccgctgctgctggaggcaaggacctcagcagccatgtcgaagccccatagtgaagccgggactg

SEQ ID NO: 201818 - DNA, 83 bp, Homo sapiens
tgcgaaggtggcggcgctgctgctcgggctgctcttggagaaggatatggccctgaagccacatgagcggaaggagaagtggg

SEQ ID NO: 201819 - DNA, 101 bp, Homo sapiens
gttgccatcaacatggattacagataccattccccgaagatgtccatttgtgccacagatgggtgatgagcggaagaagtccctatagaaccatacaacat

SEQ ID NO: 201820 - DNA, 74 bp, Homo sapiens
cgcccccgggagcgggcgcccagaggtgaccattgtgaggtagatattttgttctaattttccagatgaggaag

SEQ ID NO: 201821 - DNA, 74 bp, Homo sapiens
acaagatgttgtttgcattgacttggatacgaacatgttatatgtcacttttcaggattagaagaggctgtgta

SEQ ID NO: 201822 - DNA, 51 bp, Homo sapiens
ccacgacggggcgcctctgcaactcacacaccagcaggcagctggctccgg

SEQ ID NO: 201823 - DNA, 100 bp, Homo sapiens
attcaactcaatcagtcaaaatcgtcttttcctgctggtaaataacactgaaatatgcagaaactgaggcccagcagagattgagtaacttatgcgagtt

SEQ ID NO: 201824 - DNA, 101 bp, Homo sapiens
ctccatgcttgaaaacatggggattggaattcgagggaatctggaaaaattgcaatcaaaacatcatttctctaagaaaattttgggtaaccgaagttctg

SEQ ID NO: 201825 - DNA, 82 bp, Homo sapiens
cagcgcaggagaaggtgctccagagatcttctgttcttcaggaattgaatgatctggcacgggaccctccagcacagtgttc

SEQ ID NO: 201826 - DNA, 101 bp, Homo sapiens
gcggttgcggcggcctgggctgctgactgcgcacttggaatagtagcaggcggcggcggcggaacgccaggcagctctcaggagaagtgattttgcaaatt

SEQ ID NO: 201827 - DNA, 90 bp, Homo sapiens
aagcagatgaagcttcgagtgatgaattcccaggagcagcacttgcacctcctgcgccgccgccccccatccaaggatatgccttcaagc

SEQ ID NO: 201828 - DNA, 100 bp, Homo sapiens
ggggtactcctgagctcctgacagcccagcttcagtgttctggacttggtgcctctttctgttatatgctttcctatttagttgggagaccagttgtata

SEQ ID NO: 201829 - DNA, 100 bp, Homo sapiens
ggatttagatgttgaacaacttggaattccagcatttataagacgctgtttggcatatcgaaaagaagatcgatttgatgtgcaccagctggcaaatgac

SEQ ID NO: 201830 - DNA, 75 bp, Homo sapiens
gcggcggccagaggaaccccgagaaatgcatcttctgcagacaccgggttaagagggtctctggagcctgcatcc

SEQ ID NO: 201831 - DNA, 96 bp, Homo sapiens
ccgggaggaaggaacgaggcaaggagctaaagcagcgtgcgttcagccctgggagtcatcttagtgggatttggggaagcaacagggctgtgtggg

SEQ ID NO: 201832 - DNA, 100 bp, Homo sapiens
ggaactggcccggaaacaggaggacatgttcgagcctgtgagctgcaccttcacgtacctgctgggtgacagagagtcccgggaggccgttctgatcgac

SEQ ID NO: 201833 - DNA, 100 bp, Homo sapiens
atgcatcattgaagccgtgagctcagcctgccaggggctgcttgctctcggtgactacatgaatgtccagtgccatgcctgcattggaggcaccaatgtt

SEQ ID NO: 201834 - DNA, 100 bp, Homo sapiens
acttcaactgaccttcctcagactgagaactgtttccagtatatacatcaagtcactgagggttgaaaggaggagcaggaggtactgatggacaaggagg

SEQ ID NO: 201835 - DNA, 100 bp, Homo sapiens
cagtgtgcagctccctaatgatgatgctcagtttgatgcgtcacactacgacagtgagaaaggagtgagaagattgctcacgtctggcatcgtgattcag

SEQ ID NO: 201836 - DNA, 98 bp, Homo sapiens
acagagttcatgttgtgtgctgggctctggacaggtggtaaagacacttgtggggcctacccgccgggtccctacgctacacctccggggtacggggc

SEQ ID NO: 201837 - DNA, 82 bp, Homo sapiens
ctgcctcattagacttcgccagtggctccaggagacccacaagggcaaagtgggcttggtgcttgcatttcctgcgttgcag

SEQ ID NO: 201838 - DNA, 83 bp, Homo sapiens
ctcgccgccgccgccgccatattcccgccctgggcgctgcctatggcacagccaagagcggtaccggcattgcggccatgtct

SEQ ID NO: 201839 - DNA, 74 bp, Homo sapiens
cgctgctgaacggggctgggcctggggctgcgcgccaggtttaagaattgtttaagctgcatcaatggagcaca

SEQ ID NO: 201840 - DNA, 75 bp, Homo sapiens
aggaggggcgagagggagccgcagctgatgtcaggacactgccttaggaaaaccacgagaggtgtttcgacttcc

SEQ ID NO: 201841 - DNA, 100 bp, Homo sapiens
cggcagccttcgacgcgatgttccgccggagcttgaatcgttttatgacgtccggttgtttgccttcgtgcgcttcaccaccggggatgccatgagcaag

SEQ ID NO: 201842 - DNA, 100 bp, Homo sapiens
acagaaatacgaaaggattagcgagaagaaaatgtccacccccatcgaagtgttgtgtaaaggctacccttgtggaagagatcatgcagctggtgaatgc

SEQ ID NO: 201843 - DNA, 113 bp, Homo sapiens
tgagctacattgcgaaaattaaactcccgaagaagaggtcagccatgtcatctgagcctcccccaccaccacagccccccacccatcaagcttcagtcgggctgctggacacc

SEQ ID NO: 201844 - DNA, 75 bp, Homo sapiens
agaacagctctttgcatccggagagtggacaagaaaaatctccctggggtgccctccccaggcagcaatgccagg

SEQ ID NO: 201845 - DNA, 82 bp, Homo sapiens
tctctccctgtcctagctctgtaactgtttacaggcctggagtccctcggctgcatccggaagcgctggctgagaaagccaa

SEQ ID NO: 201846 - DNA, 97 bp, Homo sapiens
tttgatgatggcccaggaatttataccagctgtagcaaaagtgggaagccaagcctttcctcccgaaaagttgccagacggccagcattgccactgc

SEQ ID NO: 201847 - DNA, 100 bp, Homo sapiens
ggagatcctgatgtttctcagtgccattgtgatgatgaagaaccgcagatccagtaatgcatgtccatggtacacaaattcacaaggtttgtaaatgaga

SEQ ID NO: 201848 - DNA, 101 bp, Homo sapiens
gctttgcagcggggacttcggcggcggcgcctcaggcacctcggcccggtttgatgccatcctggacgtcctgtcatcggcgattgtcctgtggcgttaca

SEQ ID NO: 201849 - DNA, 100 bp, Homo sapiens
aagagccatggacatcatttgcaggtcatacctgcttggagtctgaagaagaagtagaggaacctgaagaaagacagcaaacacctgaggtggtacctga

SEQ ID NO: 201850 - DNA, 74 bp, Homo sapiens
acaccattggcaaaactgtggagtatctgcactcacaggggcagcagtgttgtactgctacttctataaacgga

SEQ ID NO: 201851 - DNA, 75 bp, Homo sapiens
atgcatcctgtgaaaacactctttaagattccaaggtttccaatacttatctacaggaatcgccatgaccccagc

SEQ ID NO: 201852 - DNA, 100 bp, Homo sapiens
gctccacttcagcttctttgtcaccataggagacatggacgaagccttcaaatccatcaagctcatcaaaaggctgcgggcctctcgggtgcttcttgtc

SEQ ID NO: 201853 - DNA, 90 bp, Homo sapiens
gtgttcctgaaggaatggtaactagtcttgatcagcttaaggtagagttggctttgtgggacacagctgggcaggaagattatgatcgcc

SEQ ID NO: 201854 - DNA, 100 bp, Homo sapiens
ggatgtgacctattttgtggcctatcagaggtcctctcagggtgcgccatcattgtccgaggtcagcctcgtggtgggcctcctcctgagcggcagatca

SEQ ID NO: 201855 - DNA, 75 bp, Homo sapiens
tgaagaatgtgacatgaaaaaaatgcattatgtggaccctgaccatgtaaaggtggattcaccaatgaacttgaa

SEQ ID NO: 201856 - DNA, 75 bp, Homo sapiens
tgcagctttcagcaggggccaaggacaggaagcagggtttggattttgaggccaaaaaccagcacaccctgtacg

SEQ ID NO: 201857 - DNA, 100 bp, Homo sapiens
tggacaacccccctaagaagttccgtgacttcccaagtaagaagcggaagaggagccgctggaaccaagacacaatggaacagaagacagtgattccagg

SEQ ID NO: 201858 - DNA, 74 bp, Homo sapiens
aacgcctttcccggagagtacatccccaccgtgcaaactaggcgtggcaactgctggctgcgtgaatgaagtta

SEQ ID NO: 201859 - DNA, 100 bp, Homo sapiens
tgccgaggcaggcgcccaccgccggcggtgatgcggctgtgaagccctagtcggtgacagagctgaatgaacctctctccaatgaagatcgaaatctcct

SEQ ID NO: 201860 - DNA, 100 bp, Homo sapiens
cagatggcatcaaacagtgaaatacaggcctggctttcagacttgatacgatgaatggattaaagcagataaaatagtaagacctgctgataaaaatgtg

SEQ ID NO: 201861 - DNA, 90 bp, Homo sapiens
tgaacagacaaggttcaaaaactaagcatccagaggccctgagcagctttcagcactggaggtctcctctgagcctccggcctccataag

SEQ ID NO: 201862 - DNA, 100 bp, Homo sapiens
gccgattactgcgagaacaactacatacaggccatttcataattctgaatcatgtctgataacggagaactggaagataagcctccagcacctcctgtgc

SEQ ID NO: 201863 - DNA, 73 bp, Homo sapiens
gattgctttggaaggagcaaatgtaatttataaacgtgatgttggagacctgatcccaaccttgaagaaagtc

SEQ ID NO: 201864 - DNA, 99 bp, Homo sapiens
attagcaccattgcaagtaactaccaccttgaagttaatcctagactgggaagaagagcaggtcagcagtccaaatattctacgacttatttatcaagg

SEQ ID NO: 201865 - DNA, 98 bp, Homo sapiens
ccagcccctgatgtcccagcaggacagtcattttgtttactcattcagccctgttgcaggtcccaataaactcttcataaggttgacagaagcaccct

SEQ ID NO: 201866 - DNA, 75 bp, Homo sapiens
aagtacctttatgaaccagtgtatcccaagttgaagttcatgagttcgcccagcctcagtgacctgggcaagaga

SEQ ID NO: 201867 - DNA, 98 bp, Homo sapiens
tgccttatttaaacaggttcattttggaaaagtacttcctcgcgtattgctaaaggaggagttgaccacaccaaaatgagtctacatggtgctagtgg

SEQ ID NO: 201868 - DNA, 50 bp, Homo sapiens
gcggagctggaatgactggcaacccaggtaaaatgtcggttccaggacct

SEQ ID NO: 201869 - DNA, 92 bp, Homo sapiens
tccttttcatgagtgttcctgtggtctctgcacctcctttctgaactgtggctgcaccatctgtcttcatcttcccgccatctgatgagcag

SEQ ID NO: 201870 - DNA, 75 bp, Homo sapiens
gtgcgccgctctccagcccgcttgaacgataacagcgacttgattgcatgtacagtgatcaccaaggatggcggc

SEQ ID NO: 201871 - DNA, 135 bp, Homo sapiens
cgaagaggcatttcggcacaaacaaagaaatccaatggatgtgtggcacaactctgcaaataaatgtgcatgctgagaagaaagccaaggtcattgcaggaatgaatgctgtggaagaaaaccaggggcccgggg

SEQ ID NO: 201872 - DNA, 75 bp, Homo sapiens
tctaggaattgtcatctccaccttaggtactccaaagattcaggtttactcacgtcatccagcagagaatggaaa

SEQ ID NO: 201873 - DNA, 90 bp, Homo sapiens
actgttcagaaaattggaaaggaaattgaagaaaaactaagactcacatctacaagcaatgaactgaaatgcactcggtgatggaaagag

SEQ ID NO: 201874 - DNA, 74 bp, Homo sapiens
acaggagtcagagagggggaaccgccgtcccaacatcacaaaaagcaaagccttctagacaagctcagtggaat

SEQ ID NO: 201875 - DNA, 82 bp, Homo sapiens
gaatcatccacgcacctgcagctctgctgagagagtgcaagccgtgggcgagtaaccagctcataaatcacatcgaacagtt

SEQ ID NO: 201876 - DNA, 74 bp, Homo sapiens
tttaattttagggtcctttatatagaagggagagtagtattaagggacatcagcgagagaggcagggatcttga

SEQ ID NO: 201877 - DNA, 98 bp, Homo sapiens
cgtgaccaagtggagccccaaacaagtggtggactggactagagatgaacacaatgacgtacagaagaaaacctttaccaaatggataaatgctcgat

SEQ ID NO: 201878 - DNA, 51 bp, Homo sapiens
gatgaaacacttactgctctccaggctttcctcggagacgggtggcatggg

SEQ ID NO: 201879 - DNA, 51 bp, Homo sapiens
gcccattctcaggaagagcttgaaaaattgtccccttggggcggaaagaag

SEQ ID NO: 201880 - DNA, 101 bp, Homo sapiens
cctacagctcatgctggatgtagaagaagacagacttgcttcccagggccgagggcctgtggttgtccactgcagccatgcctttcttggacatccagaaa

SEQ ID NO: 201881 - DNA, 83 bp, Homo sapiens
cccctgcacagcacagaggggcagccggagagcctgggaaagcgtccagcctgcatgccgtgcggactgcacccaccagcaag

SEQ ID NO: 201882 - DNA, 75 bp, Homo sapiens
tcagaagaaaatcggcacctgagaatttatgtgatcagtttggctgaaccccgtctgcccctgcagctggatgat

SEQ ID NO: 201883 - DNA, 107 bp, Homo sapiens
ctgcaacgggaagagaaagcgaagccagtaccagcgtttcacctaccttcccgccaacgcatcaagatggtgctcatgtggaccagtggtgacgccttcaagacggc

SEQ ID NO: 201884 - DNA, 82 bp, Homo sapiens
agaaaagtgagtttattctgaagagcatccagctcagaggatgaaacaggaaactgagtcataaaacactactacaaacaag

SEQ ID NO: 201885 - DNA, 75 bp, Homo sapiens
gcgtcgtcggcctctgggcagcagaggagaaggcagagcccccccaggctatgaatgccctgatgcggttgaacc

SEQ ID NO: 201886 - DNA, 50 bp, Homo sapiens
ttaatcctgaaagccatgcagcgggaagcaatgaggctccccaagaacac

SEQ ID NO: 201887 - DNA, 100 bp, Homo sapiens
tgagacatgtctgagactcctgctcagtgtagcattaagaacggccggtttgtgggcgatgctgaccttgaaagacagaaattttcagatttgaaactca

SEQ ID NO: 201888 - DNA, 80 bp, Homo sapiens
tatgaagaaattgagggttcttgccatgtatctggagtccatctttcaccatcttctcctgagattgtactggaccgtga

SEQ ID NO: 201889 - DNA, 74 bp, Homo sapiens
gggaagccccagcccgcagccctcggggggagtaactattcccagtcagaggcgctatgtgtattattatagct

SEQ ID NO: 201890 - DNA, 51 bp, Homo sapiens
cctcaaggaggaggagtgtccagcaggatcaactcactatcctgaaggtcc

SEQ ID NO: 201891 - DNA, 98 bp, Homo sapiens
aggcagtggcagtgtgaccaagaaccatgcctggtggatccagacatgatcaaagccatcaaccagggcaactatggtgctgctccttcgaatgccag

SEQ ID NO: 201892 - DNA, 100 bp, Homo sapiens
tcccgccgagacatccgctccttgcccgagaacatccagtttgatgtttactacaagggtatcggtacagcaatcggagagctgcctccatatttcatgg

SEQ ID NO: 201893 - DNA, 100 bp, Homo sapiens
ccagatccatttacactttacaaactgtcaagtaatccacctctggctaccatccttattcctcctcatgctcggattcaagcagctgcttcaaccccca

SEQ ID NO: 201894 - DNA, 90 bp, Homo sapiens
gcaaggtcggcagagcaaggggcttacgcagaaggacctggccacggcaagcctgggacctggctgttgacatctgtctgtctcagctgc

SEQ ID NO: 201895 - DNA, 50 bp, Homo sapiens
cacgtgccacatttgcttggggaaggtcctcagaatggttggaatgaccc

SEQ ID NO: 201896 - DNA, 82 bp, Homo sapiens
tgcaggaggagatgcttcagagagaggaagccgaaaacaccctgcaatctttcagacagcttgcattgaaaggctctagtta

SEQ ID NO: 201897 - DNA, 75 bp, Homo sapiens
tatgttgaagtggcctatcccaggacaggtggcactctttcagccccgtgctgatcccattccaatatgtagctt

SEQ ID NO: 201898 - DNA, 75 bp, Homo sapiens
cgctgtgaccctgggagattactaccagggccggaggattaccatcaccggaactgcaccaccaccgcctgtgct

SEQ ID NO: 201899 - DNA, 98 bp, Homo sapiens
gctttctgcccagagctcctggaccaatgcatcttcccaccaccttaaaccactgattattaagttcctgcaacttaactgggaactgatcaagattt

SEQ ID NO: 201900 - DNA, 75 bp, Homo sapiens
cttgctcagtcaccaggctgctcagctcactgcaaacttggcctcccagctcaccatggatgatgatatcgccgc

SEQ ID NO: 201901 - DNA, 74 bp, Homo sapiens
agaagtcaaggcagtcaagctgcggcgagatagagttgatctctctaatgtattagatcttcatgcctttgata

SEQ ID NO: 201902 - DNA, 150 bp, Homo sapiens
ggtttgttcttctgccagatttgtcaaaagaacctctcagccatgaacgtgacccgaagggaacagcatgtgaacaggaagtttgtggtatatgaagtattgcgagaagatgagttttccccactaaagaatgctgatagtcagaatggg

SEQ ID NO: 201903 - DNA, 96 bp, Homo sapiens
aaagagattgcattccaacttcatgaggatttaatgaaggttcttaatgagctttatacggaacttttcacacctgagtgcaaattcaaagaatca

SEQ ID NO: 201904 - DNA, 87 bp, Homo sapiens
ttgctacagattattgaagactggaattgaacatggagccatgccagaacagtttttcccaaatggatatgccttcgccactggctc

SEQ ID NO: 201905 - DNA, 80 bp, Homo sapiens
cctcgtcgacatgagtgatgtggaggaaaacaacttcgagggcagagattttttatcaagcagaaatgcatcgaacaacg

SEQ ID NO: 201906 - DNA, 100 bp, Homo sapiens
gggctggcatagcagcgaaagggccttggagagagtgccaagcatgggtccccagccccaccccagccccaaaggaggctgttcgagagggacgtcctcc

SEQ ID NO: 201907 - DNA, 95 bp, Homo sapiens
atttgccatttatttgtaataaggttgccaacttggcctgttccatctcaaataatgaagaaggtgtaaagcttgttcgaatgtctgcaagccag

SEQ ID NO: 201908 - DNA, 85 bp, Homo sapiens
cccagtgacgggtctggagtgcgtgggggaccggctgttggcggctgcgctgagcacagacccaagtgtgctggggaagtaccga

SEQ ID NO: 201909 - DNA, 96 bp, Homo sapiens
tggtgaaggcagagctggaaaaataccaacagtataaagacatctacaccgccttgaaaaaaggaaagcaactagaagccatttgtgtcaaggtaa

SEQ ID NO: 201910 - DNA, 75 bp, Homo sapiens
tacaacatctacatccgcagatatgtgttcaagcttggtgtgctaggctggggactccctggaggaaaagcggaa

SEQ ID NO: 201911 - DNA, 82 bp, Homo sapiens
caagaacaaaggccgcgacttggagatgaaggatttgggggcagagcacttggcaggtcatgaaggggtccaacttctcggg

SEQ ID NO: 201912 - DNA, 75 bp, Homo sapiens
acagactataccaaccagctgctccaggcaatgcagcgcgtctatggagcccagttctggacatggcaagacatg

SEQ ID NO: 201913 - DNA, 71 bp, Homo sapiens
atggtcaaaaatgctactgtgcacccaggcctggagttgccatatgaccgtcgtgatgtgagtaggtatgg

SEQ ID NO: 201914 - DNA, 98 bp, Homo sapiens
gctgtccagaagatgtccaaggatttttatatccatttcttcaacatgtgaacaaagaactgaaagaaaaagcaattcaggctgttgccacaaatccc

SEQ ID NO: 201915 - DNA, 97 bp, Homo sapiens
ggggatccctgctcttcgctctcttcctggctgcgtccctaggtgctggagaatctggtaaaagcaccattgtgaagcagatgaggatcctgcatgt

SEQ ID NO: 201916 - DNA, 100 bp, Homo sapiens
gacggggggcggaaaggaagtttacttatctgggtccttcaacaactggagtaaacttcccctcaccagaagtgaccatctttccaccgtagaaaaggac

SEQ ID NO: 201917 - DNA, 75 bp, Homo sapiens
ttgatccggaggaggattcgcagttcaacatcaagatacacaatcatcatcttactagttctctgtgttgctcgc

SEQ ID NO: 201918 - DNA, 75 bp, Homo sapiens
cttctttccaacattgtcaaaccagtggaacaggagtacagctgtgtagtaaagatgccttctggtgaatttgca

SEQ ID NO: 201919 - DNA, 96 bp, Homo sapiens
cagaaggattcacgagaagaaaattggcaagagtggagacaaagagatgagcaggctttgacaccagcacctctctatgaagaaaagagtgtgttg

SEQ ID NO: 201920 - DNA, 74 bp, Homo sapiens
tcagaagagagaatatagtaaaaatacgcagtacagtcccaggccatgaaattattcactgcgatccgggatgc

SEQ ID NO: 201921 - DNA, 75 bp, Homo sapiens
gtcagagcccggggacggcgaggccctcatgtaccacacggattttttatcaagcagaaatgcatcgaacaacga

SEQ ID NO: 201922 - DNA, 82 bp, Homo sapiens
cagagtcgcggggacacaggagtcttcctacagtacacacacgcccgcctccacagacatatctgaagagatggattaagaa

SEQ ID NO: 201923 - DNA, 75 bp, Homo sapiens
aaatcatcagaaaaatgactgaagaatttgatgaggaaaactaggtgtctgtgttcactccaggctgaagttaca

SEQ ID NO: 201924 - DNA, 138 bp, Homo sapiens
gaccaggagctggccgaggtctttgctgactcggacgacgagaacctcaacaccgagtccccagcagccgagaaggtgagctccctggggaaggactggcacaagttctgcctcaagtgcgagcgctgcagcaagacg

SEQ ID NO: 201925 - DNA, 75 bp, Homo sapiens
agaggcaccaaatctggcctgggggcccgagaagcttcctctcaggctattcagcttgaccctgaagaaactcgt

SEQ ID NO: 201926 - DNA, 100 bp, Homo sapiens
ccacacaactccagtgctaactcaacaggccccttcacagatgtagtcactacaaatcttaaattgcgaaatccatcggatagaaaagtgtgtttcaaag

SEQ ID NO: 201927 - DNA, 100 bp, Homo sapiens
tgtgtggaggcttccaccaggagccgcctgtcttggttagatggctctggattaggattctcactggaataccccaccattagtttacatgcattatcca

SEQ ID NO: 201928 - DNA, 100 bp, Homo sapiens
gactcactgggtattagtcctgacctgcttcctgaggactttgtcaggtacttcgactccgtggacatctgtaaggtgcactcggactggcaggaggcgc

SEQ ID NO: 201929 - DNA, 100 bp, Homo sapiens
gctgaactggatgctaaacttgaggccataggaaaaggatacagagtagagtttcatgaacctgaaacttggtggaaatttgatcctgaagaattagaaa

SEQ ID NO: 201930 - DNA, 80 bp, Homo sapiens
gcactcgcgtgtggtggccaactcggaggagatcgccttctatgggggccatgaggatatcacgcagcagcacctctgtg

SEQ ID NO: 201931 - DNA, 75 bp, Homo sapiens
ggcagtttcaataacaggtcattgccgagaaaagattagtgggatggtttggccatgaactcagcaccagattta

SEQ ID NO: 201932 - DNA, 75 bp, Homo sapiens
ctctgcagagcctggacggctccctccacgtcccgtggagctcatgaaggacttcagcatttgggtccttttggc

SEQ ID NO: 201933 - DNA, 75 bp, Homo sapiens
cgacatggaacagggactcactggggcttggtgctaacagtggtttgcacatcatcatctttgatgaaattgatg

SEQ ID NO: 201934 - DNA, 98 bp, Homo sapiens
gatcgtgaccgagaccgtgaccgagagcgtgaccgagagcgcgaatatcgtcatcgttagaagatggcggcagctatgccatccacgactcccaggcc

SEQ ID NO: 201935 - DNA, 90 bp, Homo sapiens
aagagttggatactcagcgtcgctggcagccgctgtacttgaaggacagaataacgggctcccagattcacaagccccaccaagaggatc

SEQ ID NO: 201936 - DNA, 75 bp, Homo sapiens
aaaggttactcccagcagtgccatcagcagcatagcaagatccagctccaggtcccacaggggctcttcttcccc

SEQ ID NO: 201937 - DNA, 100 bp, Homo sapiens
ccggcgagtcgggctctggaggaaaagaaagtctgtgaatttctggtacgtgctggtgatgaatgatgagcacacagagaggcgatatctgctgtttttc

SEQ ID NO: 201938 - DNA, 82 bp, Homo sapiens
ggcggatgaagcagctggtggggctctactgcgacaagttatcatgtgatgtaaaacttgatcctcgtccagaataccatcg

SEQ ID NO: 201939 - DNA, 100 bp, Homo sapiens
tggctaaggaaaccctattacctccagaacatccagtcatggataaaaatgagctggttcagaaggccaaactggccgagcaggctgagcgatatgatga

SEQ ID NO: 201940 - DNA, 75 bp, Homo sapiens
gggacttcgcctctgctctcttcttcgccagcacgctgatcaccaccgtgggttcagaagggttcttgaaaggcc

SEQ ID NO: 201941 - DNA, 73 bp, Homo sapiens
tggtcttagatatagaggatctagataatattcaaactcctgagagtgcaatcgactgttaaagtggtgtcct

SEQ ID NO: 201942 - DNA, 49 bp, Homo sapiens
catgtgcatcaaatatgctgaaaggaatttggagtagtttcaaatacaa

SEQ ID NO: 201943 - DNA, 50 bp, Homo sapiens
cgggtctgctctgtgtgccatggacggatggtcatcatgggccagtgcta

SEQ ID NO: 201944 - DNA, 75 bp, Homo sapiens
cagcggttctccagccatcagtggaaccaacccagccgaccccccaggtctctaaagagcaacagaataattgca

SEQ ID NO: 201945 - DNA, 80 bp, Homo sapiens
gacccccttctgtcttccttcttgtggtccagcctccagtcccaggcgccatgtcagaaccggctggggatgtccgtcag

SEQ ID NO: 201946 - DNA, 97 bp, Homo sapiens
gagcagctgcggctcggggacccacagacacagccggggtcgggagccgcccggggcagggctcgggagagcgggtcatactccctgtcacaaactc

SEQ ID NO: 201947 - DNA, 101 bp, Homo sapiens
tcctgtgctgcgaccactgcccggctgccttccacctccagtgctgctcctgcccctcctaaagctgaagccaaagcgaaggctttaaaggccaagaaggc

SEQ ID NO: 201948 - DNA, 89 bp, Homo sapiens
tccagctgttagtcgggtaggcataggtcctggatgcctcatcccttagtttcaacaccagattgaaatggtttgccatctgcttcgta

SEQ ID NO: 201949 - DNA, 80 bp, Homo sapiens
ccaaattatttgaaccccagaacagggcgctggggtcagtatgccatggacaatattaccaggcagaaccaattctacga

SEQ ID NO: 201950 - DNA, 87 bp, Homo sapiens
tatgaatttatacaaggagaagcactggatccaaagcatgtctgcaacccagccattttcaggcttgaagaaaatttgcctacacgt

SEQ ID NO: 201951 - DNA, 87 bp, Homo sapiens
cttggagtccggacatctgaaacttggacgcagagggctctacgtgtttgcacctggctgccaagaaaggccactacgaagtggtcc

SEQ ID NO: 201952 - DNA, 99 bp, Homo sapiens
cagattggaggcgagcgttgggtgtggaacatcattctcaccaccagtctcttctctgctcctgacccctgaggattaccagcgatttctagacctggg

SEQ ID NO: 201953 - DNA, 99 bp, Homo sapiens
atctggcaatcattttggtagtggtatttacaactctgtctgatctggagctcatggcccaatcaattatctttatttttgctggctatgaaaccacga

SEQ ID NO: 201954 - DNA, 101 bp, Homo sapiens
tgcccctgaagatgtgcacctagggggcggctaccccgtggggtactaggttttgacaagcttgcatcatgcgtgagtataagctagtcgttcttggctca

SEQ ID NO: 201955 - DNA, 100 bp, Homo sapiens
ctatcatcattggccacagttctggggccatcgcggccatgaggaggaggagaacggggctgaggaggaagaagaagaaactgccgaggatggagaggag

SEQ ID NO: 201956 - DNA, 50 bp, Homo sapiens
catatgcaccagcacgcctggctaatggaggtgaagccggtgctgccaag

SEQ ID NO: 201957 - DNA, 100 bp, Homo sapiens
tgagaagctgtcggagcttcccaaggtctctaattaacagaagatggcaaagcccagccacagcagctatgtccttcagcagctaaacaaccaaagagaa

SEQ ID NO: 201958 - DNA, 100 bp, Homo sapiens
aagcctggaggttcctgagatatatcagcaccacccagctcaaatctaatccaagtgaaaatgaagaaaaggaagcacagtctcaacttataaaatctga

SEQ ID NO: 201959 - DNA, 82 bp, Homo sapiens
ccagaagcggcccctgtggctgtgtaagatctgcagtgagcaaagagagggagtaccctgacttctaccggaagctctacgg

SEQ ID NO: 201960 - DNA, 83 bp, Homo sapiens
gagaccatggctgactacctgctgtacaccctcaacaaacaccagcgctttggccttatgccagcctggaccatcttggaggc

SEQ ID NO: 201961 - DNA, 75 bp, Homo sapiens
gcactcggagccggcacggctcggcgaataccctctaccatctgctttggtcagggtgccgctcgaggatttaaa

SEQ ID NO: 201962 - DNA, 75 bp, Homo sapiens
actaattccaacaagcacctctgaagaacgagatgctggaggagggccaagaatatgctgtcatgctgtacacct

SEQ ID NO: 201963 - DNA, 83 bp, Homo sapiens
atcgtgccctgtgtgctcatctcgggcctggtgctgctcgcctacttcctgccggcgcaggccctgggcgctgcctatggcac

SEQ ID NO: 201964 - DNA, 98 bp, Homo sapiens
tctggaaccgcacggaactcctgacccttgacccccacaatgtggactacctattgggcgctgagatgcgtctggagagccagagggcctgcctgaag

SEQ ID NO: 201965 - DNA, 75 bp, Homo sapiens
gtcgacggcgagcccttgggccgcgtctcctttgaggttcctggagagccactggtttgtgtgggtcacacagat

SEQ ID NO: 201966 - DNA, 100 bp, Homo sapiens
gcagctggagagtttggagccctgcagactgtccgcctggagcgttacaaggccttctacattaccggatggagagcaatacatcatcatctttggagaa

SEQ ID NO: 201967 - DNA, 100 bp, Homo sapiens
cctgagcactgccttgtcagtggagaagaccagcaagcgtggcggcaagatcatcgtgggcgacgccacagagaaaggccatgttggggccccgatgccg

SEQ ID NO: 201968 - DNA, 82 bp, Homo sapiens
gcgggacctgacagccgggtcagagggcaccgcgtccgtgctgcagcgccggtcccccaatgaggagtacgtggaggtgggg

SEQ ID NO: 201969 - DNA, 78 bp, Homo sapiens
gggactacaatcttcgcatgaaatggaagagagggtggtgcggatagcttgaggaagctgccactgcagagccccgcc

SEQ ID NO: 201970 - DNA, 75 bp, Homo sapiens
taagaaacattaccctaatgagatacagatccacgggttttagaaaaacaagaattacagcagccaacctatgtt

SEQ ID NO: 201971 - DNA, 100 bp, Homo sapiens
ttttggaactgactccgagggttgggagagcgcgttggtggcgacggccgagtcaggcatgtactggcattgaaaacattgacgaagctattacattgct

SEQ ID NO: 201972 - DNA, 74 bp, Homo sapiens
tgctggaaatacagaaccacagtttatcatcccttcctagaagatggcgaattagaagatggtgaaatagacga

SEQ ID NO: 201973 - DNA, 83 bp, Homo sapiens
agctcggatccctgaatttgatccagcctcctgacaaggtgatccgggcgggccccgcaggaattttatcccctcaccggcct

SEQ ID NO: 201974 - DNA, 100 bp, Homo sapiens
tctgtgctgaccacaggaattggatctactagtgcagggtctcttgcaacgtgtgagctgcctcttgccaagagtgagtggcaaaagaaactaaccccgg

SEQ ID NO: 201975 - DNA, 99 bp, Homo sapiens
agacaaagagaagaaaggcctggagagtcgtgcggacagcattgggagcggccgagccatcccaattaaacaggtcaaaatgcagatcttcgtgaaaac

SEQ ID NO: 201976 - DNA, 98 bp, Homo sapiens
aggaaactgccgccgctctgccacggtctgcccacccaacgcgaagacggtaacccgtgtgactttgactggatatctcttccaaatgcatgatgaag

SEQ ID NO: 201977 - DNA, 100 bp, Homo sapiens
ctctgtcagtcatggagcaaaagtggttgaaaaatgaaacaccgcctcataactgggaaaggagcactttcatccaaagacgcgaactcagagcaaaatg

SEQ ID NO: 201978 - DNA, 100 bp, Homo sapiens
cggatggtgctggccacttgcttgggatcctttatcctggtcatcttctatttccaaactacgagttccagggagctctgtcctggtgaccgtgcccggg

SEQ ID NO: 201979 - DNA, 100 bp, Homo sapiens
aatccatagaattggaggctgattatgggaatgaagagctgcacagttggggatcttcaaaccaagatagatggcttggaaaagactaactcaaagcttc

SEQ ID NO: 201980 - DNA, 100 bp, Homo sapiens
gagctgtaaagccacccacaaacaaactacccattttcttttttggaactcatgagacgttctcctgaaaagaaagctgaacattcatctataaatcaag

SEQ ID NO: 201981 - DNA, 97 bp, Homo sapiens
aaatttttcaagaattggtagaaggtgtgttttacatacataacatgggaattgtgcaccgagatctgaaggccagcttggagaacagcctgaggga

SEQ ID NO: 201982 - DNA, 90 bp, Homo sapiens
acctatcgccagtcctgctcgggacatttgccctcagtggtggggttactgctgtttcggagcctctactcaatagtccccccagctttg

SEQ ID NO: 201983 - DNA, 82 bp, Homo sapiens
atcttgggacggccagctctaagaattcctgctacgacactgaattcaaccaggagacaatgcagatcttcgtgaagactct

SEQ ID NO: 201984 - DNA, 71 bp, Homo sapiens
gagctgtctctttgcacacgaggagcctgaaatatggaaaagtacactgaggaggggacggctccgtcttc

SEQ ID NO: 201985 - DNA, 49 bp, Homo sapiens
ggaagacggagctggtcggcccgaagggactttgaacatgtcggggatc

SEQ ID NO: 201986 - DNA, 83 bp, Homo sapiens
cttcatttgcttccacaagaaccgcgaggacagagttaccggtattgtaagaacaagccgtacccaaagtctcgcttctgccg

SEQ ID NO: 201987 - DNA, 97 bp, Homo sapiens
ctgttgtttttgagaaggtgaaaatggattataatgatgagatcaggcaagcacagctccaggagttaacatatttgaatggtggttcagaaaatgc

SEQ ID NO: 201988 - DNA, 97 bp, Homo sapiens
gccgaatgccagaagactgtcaccatctccaagccctgtggcaaactgaccaagcccaaacctcaaggtcagctccgccgaaggcgccgccaaggaa

SEQ ID NO: 201989 - DNA, 83 bp, Homo sapiens
cagaatggaatgacgcctttaatgtgggcagcatatagaacacataggtcacggtctagatcacattctcgatccagaggaag

SEQ ID NO: 201990 - DNA, 50 bp, Homo sapiens
ttccaatcccagttcatttttgtgattgaattactcagatatgaagatca

SEQ ID NO: 201991 - DNA, 100 bp, Homo sapiens
caacaacatgaagaatgtatttgcagaacctcagttacccggctgtatgtgaattcttacagcacaataacttgttatctatactccgagcccacgaagc

SEQ ID NO: 201992 - DNA, 82 bp, Homo sapiens
gctgcccttgctgtcctcctctgcaccatggctctctgcaaccagttctctgcatcacgtacgaactatggctcgagattta

SEQ ID NO: 201993 - DNA, 75 bp, Homo sapiens
tgcacccacgaatctgcccacccctcctgtaacccagcctgtttcacttcttgccagaagaaacagccttggagg

SEQ ID NO: 201994 - DNA, 90 bp, Homo sapiens
gaagtgcagaggtttttttctggtcagtcttccacctccactaccggtgccaaaaaaagggctgccccaaaaggaactaaaagggatcca

SEQ ID NO: 201995 - DNA, 100 bp, Homo sapiens
caaaatgatccgagacctccagaatgaggaatttgaagcctacattaatgcttctggagaacatggaattgtggttttctctttgggatcaatggtctca

SEQ ID NO: 201996 - DNA, 100 bp, Homo sapiens
cagccagttctcccaaattctcagagcttgttatgaagccaggtctaaactgcagtaatccatttactcagctggagaggagacatcaagaacatgccag

SEQ ID NO: 201997 - DNA, 90 bp, Homo sapiens
agagaagtcacaaaacagcagatttcccaagagcagcggaaaatgatccagtcacaggcctgagacctgggaggaagctggagaaaagat

SEQ ID NO: 201998 - DNA, 90 bp, Homo sapiens
cacaagttccaaggttacgtttcagtttgatattaaactgctctcagaattttcctcttgcctagcagatcagcatttgtattttagtcc

SEQ ID NO: 201999 - DNA, 100 bp, Homo sapiens
tgaattaattggtcctgctgaagctcactcagattccctcattgatacctttcctgagtgtagtacggaagtgttaaaagatcactgaagttggatggtc

SEQ ID NO: 202000 - DNA, 87 bp, Homo sapiens
gagattcagccgtgaagcaagtgcagatagatggccttgtccagtggtttacgtcttggatcttgcagatagactgatctcaaaagc

SEQ ID NO: 202001 - DNA, 100 bp, Homo sapiens
ctacaagacacaaagcattctttgtatgccaattaagaatcatagggaagaggagagtgggcgctccctttctcttcctggaagatcagtcccacccccc

SEQ ID NO: 202002 - DNA, 80 bp, Homo sapiens
gtcctttcaggaaggagccattatttatgtcatcaagaagaatgacgatggtgaacaaatagaagctgagggtgaaggac

SEQ ID NO: 202003 - DNA, 98 bp, Homo sapiens
gagcctgccccgccctggggacgaagagctgcagctcctcctgtgcggaaacgatggaaagaactttctaaggaagacttatctcctgcctttgatca

SEQ ID NO: 202004 - DNA, 75 bp, Homo sapiens
agcagatgaggatcctgcatgttaatgggtttaatggagactagatgaggaagaggagcgaaggaaaaggcgccg

SEQ ID NO: 202005 - DNA, 100 bp, Homo sapiens
ctcaggtggaaaccaagatagatgtgtcctatgaataccgcttcctggagttcacgactctgagtgctggctgtattcatcaccaaagaaaaaacttaca

SEQ ID NO: 202006 - DNA, 100 bp, Homo sapiens
aggccgaagccgagcagaggatctaaatacaagagtggcctattggtatacccgaaatcttgtggatcaaggaaatggaaaatttaatctgatgattctc

SEQ ID NO: 202007 - DNA, 100 bp, Homo sapiens
ggagcgagagtgcgtggaggagacgtgcagctacgaggaggccttcgaggctctggagtcctccacggctacggttgaaggggcccggccaggactcggg

SEQ ID NO: 202008 - DNA, 76 bp, Homo sapiens
ccctggagtaaccctcactggagaatccagagatgactcctgaggactacgaaaagcttggctttcccggtgcccg

SEQ ID NO: 202009 - DNA, 75 bp, Homo sapiens
tgggcagacggattcatttagagctgcggaacaggacgccctctgatagagtttcattctgtcgcccaggctgga

SEQ ID NO: 202010 - DNA, 88 bp, Homo sapiens
tgggggttcggggagcgcttggaccccggcttctgggacgcgtcaggtagatatagttgtaggtactccgggaagactagatgacttg

SEQ ID NO: 202011 - DNA, 100 bp, Homo sapiens
cgcccggatcgtggcctctcgagagcaagcggagattctggagctggctggcaatgcagcgagagacaacaagaagggacgggtcacaccccggcacatc

SEQ ID NO: 202012 - DNA, 87 bp, Homo sapiens
gcagccggagcccgggaggggccgcgccgccaccgtctgaactaggatgtcccgacatgaaggtagaaaatctttatcctcaaattg

SEQ ID NO: 202013 - DNA, 73 bp, Homo sapiens
gggcagaggcttgggccgccgagctggacccggaccggttttggcattcacagctctgatggagggcaaaatc

SEQ ID NO: 202014 - DNA, 90 bp, Homo sapiens
gatcgatgtttcaatattggaagcgctttgatttacagcagctgcagactgtcagcatcaataaggccattaatacgcaggaagtggctg

SEQ ID NO: 202015 - DNA, 50 bp, Homo sapiens
gtttgtaagagcattggatcttctggccctttctaaggcacaaaatgatg

SEQ ID NO: 202016 - DNA, 76 bp, Homo sapiens
ggccaagatccacgctgacgcagagcggaaggagctttgggacccccgcccctggcttctcctccatgctgtatgg

SEQ ID NO: 202017 - DNA, 82 bp, Homo sapiens
cgcgtacgagatctccgaccagtctgggggcgctggcggcctgcgcagccacctcaaggatattagaaatggctactcccca

SEQ ID NO: 202018 - DNA, 73 bp, Homo sapiens
gctgattctcacgggcccggctgccggcccccgctctgccctggaacttagtgatttggcccgtgaccctcca

SEQ ID NO: 202019 - DNA, 100 bp, Homo sapiens
ctttgtctccccgatctacggggctgacatcagcggctctttgtatgatgactaaaagcagtctgggcgcaggctggggacccagatggaattcaaactt

SEQ ID NO: 202020 - DNA, 75 bp, Homo sapiens
cattggagcagttgtcgctggtgtgcagaggattctacatctgtgccagcctgccaggagtgaagaaagctttgg

SEQ ID NO: 202021 - DNA, 100 bp, Homo sapiens
cgctgaggccgaggcggagaaggggcttcctgagcgtcccagtacactgacagagccagagactgctgctactttgaaacgtacgatagaggccctgatg

SEQ ID NO: 202022 - DNA, 100 bp, Homo sapiens
ggctgggctcgccagtcttggggacagtgtcagcgcacagatgaggagagcatcctgactctgttgacatcccgaagtaatgctcagcgccaggaaatct

SEQ ID NO: 202023 - DNA, 50 bp, Homo sapiens
ggaggatcagaatcaagtcctatagcagctgtttgcagacaaggtcccaa

SEQ ID NO: 202024 - DNA, 100 bp, Homo sapiens
atggcggagagagaggtggagtccggcccccgaaagaggtgctgcttttgacacaaaaacggggttacgtgtggcagtgaagaagctctccagaccattt

SEQ ID NO: 202025 - DNA, 100 bp, Homo sapiens
cagccgccctcagccccggcgcagacatggacccctcgcgagccatccagaacgagatcagctccctcaaagctacgagttccagggagctctgtcctgg

SEQ ID NO: 202026 - DNA, 75 bp, Homo sapiens
cagaaatgatcttagttctggaatatacgtagagaaatcgacactcttaatgaacgtttagctgctgaaggacaa

SEQ ID NO: 202027 - DNA, 88 bp, Homo sapiens
gttacggcgacagctcctcgcgcagcagatcaagagactgaaatctcatccttctatcatcatatggagtggcaataatgaaaatgag

SEQ ID NO: 202028 - DNA, 100 bp, Homo sapiens
gcctggacccagcacggagggacttctgcagagagagtgcgcagaaggattccgggagcacagttccgccgaatgctgagtttgtgtgtgaacggacact

SEQ ID NO: 202029 - DNA, 98 bp, Homo sapiens
ctgcctgcgccgccggccgggcatgagttagtcgcagacatggacaccaaacatttcctgccgctcggtcatattgaacattccagatacctatcatt

SEQ ID NO: 202030 - DNA, 85 bp, Homo sapiens
tccaagtacattctcaggtggagacctgcgggatgtagctcattttgggatacgagtctccatcgtggagcctggcttcttccga

SEQ ID NO: 202031 - DNA, 100 bp, Homo sapiens
gaaagaatatatcagccttcggctcatcatatcagagctgaggaatcaatatgaatttttcacagacaacctatgggacacactcccttgctcatggcag

SEQ ID NO: 202032 - DNA, 104 bp, Homo sapiens
tgtttgggctgtgtttcgaaatgaagacagagtggaacagatgtgcattcagattaaagaagttggagatcgtgtcaactacataaaaagatcattacaatcat

SEQ ID NO: 202033 - DNA, 51 bp, Homo sapiens
tcagttccatcgagccattactacaggcaggatgtagccaatcaaatgtgc

SEQ ID NO: 202034 - DNA, 90 bp, Homo sapiens
cacggaaccgttgggacggaggacctgaaggtggagtgaggtcatacttacctggttgcttgcgcatctagtaatgttggatcatattct

SEQ ID NO: 202035 - DNA, 98 bp, Homo sapiens
ctgcgagaccctagaggcctgcggcctgcggttatgaagacagtatggagtttccagaccatagtagacatttgctacagtgtctgagcgagcagaga

SEQ ID NO: 202036 - DNA, 83 bp, Homo sapiens
gctcgctggcaccccgaacgggttgcttcccccgctgcgagcaaattgtggctactaatttgccccctgaagatcaagatggc

SEQ ID NO: 202037 - DNA, 75 bp, Homo sapiens
tgtggaggggaatagactccatctatccatatgaggagtatgcgaccagtggttggaacctgaatgtgatgccag

SEQ ID NO: 202038 - DNA, 90 bp, Homo sapiens
tcttgattgtgacctctgtggaaaatgagccatgaaccaaccaatgccttctgctgtgatcgcgttctccacagttgcctctgggtagga

SEQ ID NO: 202039 - DNA, 74 bp, Homo sapiens
aggacagaaccttggaccacaggccattcctcaggaacgccacagaagtatgatcccactttcaaaggacccat

SEQ ID NO: 202040 - DNA, 75 bp, Homo sapiens
cggatttcaccacaagaagggctgccaggctgccagagctgctgagggggagagcagacagaagttcttcaccca

SEQ ID NO: 202041 - DNA, 82 bp, Homo sapiens
tcggcggcgaaggtcagcgccgacggcagccggcacctgacggcgtgaccgacccgagccgcagaaaaatatggctcaggag

SEQ ID NO: 202042 - DNA, 50 bp, Homo sapiens
ctcgaattccagaatgatgaaattgttgacatgaagtccgagaggagacc

SEQ ID NO: 202043 - DNA, 95 bp, Homo sapiens
tggaatgcgaggagacagaagacagtagccaaacacccagaaccctgttgtcagaggtacacccagagcaactccacaccgggtgcatgccacag

SEQ ID NO: 202044 - DNA, 75 bp, Homo sapiens
tccctttggatgtagcaaggaagaaattgttcagttcttctcagggcattttgtcagtgatgctgatctttgcct

SEQ ID NO: 202045 - DNA, 100 bp, Homo sapiens
gcaaagcggggacccagaccctggagcctcagttggaagcagccgatccagcctgcggagcctgtggggcagacatttctcttgggaagttgtgcatctg

SEQ ID NO: 202046 - DNA, 82 bp, Homo sapiens
ctgggccacccctcctttcaggtcaagggggatatgagactttctactcggaatatcctgagtgttgcgtggatgtaaaacc

SEQ ID NO: 202047 - DNA, 85 bp, Homo sapiens
acacgtcagcgaaacccatctgatcgacatgttattttctgttccgaaacaccaatgtggaagatgtccttaatgcccgaaaact

SEQ ID NO: 202048 - DNA, 90 bp, Homo sapiens
ctgcgacacctcaagcagaccaagcctgagtttgaccaggtgctccaggaacttgctactaccagcaccatgccctaccaatatccagca

SEQ ID NO: 202049 - DNA, 90 bp, Homo sapiens
cctacagctgcattcactgcagagctcacttggccaatcatgatgaactaatttccaaggtttgaattttgggaagattttgaagaagac

SEQ ID NO: 202050 - DNA, 100 bp, Homo sapiens
aaggagctgtcctttgttttggattacataaaccagtcacccaagtgcattgcctttggaaacgaggttctgctccagacgagcccttaccacgttgact

SEQ ID NO: 202051 - DNA, 75 bp, Homo sapiens
acgaatctgcccacccctcctgtaacccagcctgtttcacttcttggccggattcagaagccagccagagcccac

SEQ ID NO: 202052 - DNA, 80 bp, Homo sapiens
tccacgtgaatctggggaaggagtcgagagcgcagaccctgcagaatgacggttgatgatgaagcgccggccgtgtaaat

SEQ ID NO: 202053 - DNA, 75 bp, Homo sapiens
cctcaggctggagttatacaagaacacatatcggatttggagagacactgccaactggctggagattaatccgga

SEQ ID NO: 202054 - DNA, 75 bp, Homo sapiens
ccatgaagagaagtttacaggccctctattgccaactgttaaaggtttttcattagtcaatacagtgaaggctgg

SEQ ID NO: 202055 - DNA, 75 bp, Homo sapiens
aagaaggggagtgcccgcggcaggttttgatgatgatggttcagaatttcatgaacatatatttctggagaaaca

SEQ ID NO: 202056 - DNA, 88 bp, Homo sapiens
ttgatgagaagaacaagttgggagccaagattatcaaagcagagatgatggggaatatggacagctccagaaggaaacgtgatagaga

SEQ ID NO: 202057 - DNA, 52 bp, Homo sapiens
ccgggagactggagtcgaaggccgtgagggattaaagcctgtggtttccaca

SEQ ID NO: 202058 - DNA, 75 bp, Homo sapiens
ctgtctatgatgtcatgtttgtcagcacagaccgcatggaggtgctatgctgccgagaaccccgactcctccacc

SEQ ID NO: 202059 - DNA, 83 bp, Homo sapiens
cctcagcctgtcagccatcatcgatggcaagtgaagtacctggctttcctccgcaagcggatgaacaccaacccttcccgagg

SEQ ID NO: 202060 - DNA, 101 bp, Homo sapiens
gagcgcaaggacagcgcgaggtccgcgcagcccagcgcagccatagagcgcctgctcgctgtgcccccgggttatgacgacccccaataaaggaaacaagg

SEQ ID NO: 202061 - DNA, 50 bp, Homo sapiens
caacaccgttcccccagccgggctgcacctgggctgtcccccatgcagac

SEQ ID NO: 202062 - DNA, 74 bp, Homo sapiens
caaggacaaacccaccttcatcaaaggggctgtctcagcactgattcagcccttaggagtgtgtgcagagtacc

SEQ ID NO: 202063 - DNA, 82 bp, Homo sapiens
gtgcatccacactggacgcgagctgcgctgcaagccgagcccaggaagtgcgtcccctccgtggtcgtgggcgtcgtgggca

SEQ ID NO: 202064 - DNA, 100 bp, Homo sapiens
tattttaatgtatgacattacaaatgaagaatccttcaatgcagtacaagattgacgttgagaaagaagggccttaatggctgtgacagcccagaccccg

SEQ ID NO: 202065 - DNA, 100 bp, Homo sapiens
ctccaagttagctgacttctgggggaacaacaacgagatcctcagtggttgacatcatggacatatgtgagtccatcctggagaggaagcggcatgacag

SEQ ID NO: 202066 - DNA, 73 bp, Homo sapiens
tgggattacaggcatgcaccaccatgcccaggactcagtggcctttgaggatgtggctgtgaacttcacccag

SEQ ID NO: 202067 - DNA, 125 bp, Homo sapiens
gaactgggtggcgaacggggcgagcctggaggattgtcactccaacctcttttcgctggaatccagcactacgccctgccctctactgactggaggcaggcctctgcctactttagaagttaaac

SEQ ID NO: 202068 - DNA, 50 bp, Homo sapiens
cgcggatgggatccagctgttagtcggtgaggatgaggatgatgaccttc

SEQ ID NO: 202069 - DNA, 51 bp, Homo sapiens
gcaactcccagctcaatgcaatgtgggctcgggatgagtttgaaggcctct

SEQ ID NO: 202070 - DNA, 100 bp, Homo sapiens
actcggcgccttgggaaccgctcgagcctaccagctgtacgattctgtgaccggtgtcatctgatcaagccagaccgctgccaccactgctctgtctgtg

SEQ ID NO: 202071 - DNA, 107 bp, Homo sapiens
tcttaacattgttaagtttcacaaatattgggctgacattaaagagaacaaggccaggacattgctgtcgaactgctccagaaggcagcccccagccctattcgccg

SEQ ID NO: 202072 - DNA, 50 bp, Homo sapiens
gacagtcaagtggaaacaactgtctggttgttcctactgaaggattggtc

SEQ ID NO: 202073 - DNA, 50 bp, Homo sapiens
ctggcagccccgctctctgcaaatgtccctcttccagtggaaagcccaac

SEQ ID NO: 202074 - DNA, 80 bp, Homo sapiens
ccgctctgcctatgacagcaccatggagaccatgaactatgcccaggtcttgggtggtgcctatgatgagttcatctttg

SEQ ID NO: 202075 - DNA, 75 bp, Homo sapiens
agtacatggatgcttgttggatgaattaatgaaccttgacccacaccaaggtgatctttgcagagctgtttcaac

SEQ ID NO: 202076 - DNA, 100 bp, Homo sapiens
aagaaggcgaatcccgacctacccatcctaatccgcgaatgctccgatgtgcagcccaagctctgggcccgctacggcctgagacctgggaggaagctgg

SEQ ID NO: 202077 - DNA, 51 bp, Homo sapiens
agcgcctcgacctcggtctgagttgaggaaacgtgtgaagcttgaagggaa

SEQ ID NO: 202078 - DNA, 80 bp, Homo sapiens
tgcaccagcaggagtccacatcgaggacgtcctccgggcactcccacgaccaggttatcaatactctggctgaccatcat

SEQ ID NO: 202079 - DNA, 75 bp, Homo sapiens
gccactggttgccttggtaggcaataaaaatgaacagactagccactttgcattgactggaaacaatggcattta

SEQ ID NO: 202080 - DNA, 90 bp, Homo sapiens
ttcaaacaaggtcatcatcacgggacagatggtttcttgcagaacataaattattaggaaacattaaaaatgtggccaagacagctaaca

SEQ ID NO: 202081 - DNA, 74 bp, Homo sapiens
gttgggatcctcggctgcttagatctcgtgcaggtcagctctgcggacgctcggctcatggtctttgacaagac

SEQ ID NO: 202082 - DNA, 98 bp, Homo sapiens
gcagccgcgaggaggcgcgggaggtgttcgagaacgaccccgagacggtggtctttgggaagaagcttcctgcctttgccaccatccccatccaccag

SEQ ID NO: 202083 - DNA, 50 bp, Homo sapiens
gcaagacatatccttacaggcagagagagatggagtttcgccatgttgcc

SEQ ID NO: 202084 - DNA, 75 bp, Homo sapiens
gaagaggggtccagtgggtctgagcaaaagattaatcctaccatatgaaagatttattaaaggagaagaagataa

SEQ ID NO: 202085 - DNA, 100 bp, Homo sapiens
agcagtggatccgggccaagtacgagcgacaggagttcatctacccggagaagcaggagccctactcggcagggaaagcaggcaggatgggagagtcgcc

SEQ ID NO: 202086 - DNA, 100 bp, Homo sapiens
ggctgtcttccgggacctgagggacttgtcgggcctcaatgatctgctcaacgtgctgcagagcctgctgggaaggacaccactggtaccagctgcgcca

SEQ ID NO: 202087 - DNA, 100 bp, Homo sapiens
cctggttcagcccagttcacacataccctcttcttgccaccagaatcgcctaccagaggaatgacgatgatgaagaggaggcagcccgggaacggcgccg

SEQ ID NO: 202088 - DNA, 80 bp, Homo sapiens
cagccccacagaccagcccagcattcagccttatgccagcctggaccatcttggaggcagtgtaggatcatggaagaact

SEQ ID NO: 202089 - DNA, 75 bp, Homo sapiens
gaggaggagacgtaccggctctggaaaatccgcaagaccatcatgcagctggtaggtgagtgctgtcctcggctc

SEQ ID NO: 202090 - DNA, 74 bp, Homo sapiens
ggggacggcagtgctgaggcggaacaggccgggcaccaaggcgcagtgtgccacatttatgttcacgatctcat

SEQ ID NO: 202091 - DNA, 100 bp, Homo sapiens
caccaagtgacggaacccaaaaggtgacatacctggtacataactttgaaggaggtggtgagaaagcccgagcacttcacatatcaagaggaaaactatt

SEQ ID NO: 202092 - DNA, 98 bp, Homo sapiens
tttaatcactgaccatcccaatatacagggtgagcagggcagcatttccttctcccactgctgctgagatggcagaaattagtcgaattcagtacgaa

SEQ ID NO: 202093 - DNA, 100 bp, Homo sapiens
ggattggaaaagaactgcatgagcagctggttgctctggacaaacagaataaacatacaagctacatttcgggacaaggtgcaacgctggttgatagagg

SEQ ID NO: 202094 - DNA, 51 bp, Homo sapiens
cagagagatgctgtcccgtggatccagagacaatggccccgatgggatgga

SEQ ID NO: 202095 - DNA, 75 bp, Homo sapiens
agatatagccgttggtacaaagtagagacggggtttcaccatgttagccaggatggtctcaatctcctgacctcg

SEQ ID NO: 202096 - DNA, 101 bp, Homo sapiens
ccaagggttgtatcgaggctataaaagcacagttttaagagaggtggtggacataatgcgagttaacgtggacaaggttctggaaagagaccagaagctct

SEQ ID NO: 202097 - DNA, 75 bp, Homo sapiens
cctgggaatcggtcgcctggaggaccagtatttcccatggagggcctccgtttctggaatccaagcagaattgct

SEQ ID NO: 202098 - DNA, 95 bp, Homo sapiens
agggagtgaaaacagggttgtatatagccatgaatggagaaggttacctctacccatcagaactagtatattcaccgtctatgaggccgcctcac

SEQ ID NO: 202099 - DNA, 100 bp, Homo sapiens
ctggcatcctctgacatcactccagcagaagaaagggaaggaacacgctgcattactgcgtggagcatccccttagtgcaggtgctgcggactacggccc

SEQ ID NO: 202100 - DNA, 73 bp, Homo sapiens
attgacctcaccaagagggcgggagaactcactgaggatgaggtggcccacatgaagagcaaagacaatcgga

SEQ ID NO: 202101 - DNA, 106 bp, Homo sapiens
gaaatcctaatgacagtctccaaattcgcctccatctgtaccatggaaggaatcgtgtctcctagtgacctggaccttgtcatgtcagaagggttgggcatgcggt

SEQ ID NO: 202102 - DNA, 80 bp, Homo sapiens
aagacattcacaacatggatggcaacagcattattgagaaaagcccttacagaagagtgtggccgtaggtcagctattca

SEQ ID NO: 202103 - DNA, 82 bp, Homo sapiens
aagaaattgagggttcttgccatggtccttttggaataaatcatgggattgagcttcattcagatgtggtggaatatgccaa

SEQ ID NO: 202104 - DNA, 115 bp, Homo sapiens
gagcggcgcagcggcggcagcggagagcgagagaggggagcaggtaaagtgttgagagaggagaaccagtgcattgctcctgtggtttccagccgcgtgagtccagggacaagac

SEQ ID NO: 202105 - DNA, 101 bp, Homo sapiens
gagcgggaacgcgagaaagagcgcgagcgcgagaaggagcgcgagcttgaacgcagcgtggtgtcccgcatgagatgtctgcagaatgagacttacagtgc

SEQ ID NO: 202106 - DNA, 82 bp, Homo sapiens
cagctgcctcagttcttagcgcaggagctgggaatcccaagtgcaaaattgcaattgttttgggaagaactcaaaatacttc

SEQ ID NO: 202107 - DNA, 100 bp, Homo sapiens
ttccatggctattcacttttaatgtgaagttttatcctcctgatccttctcaattgactgaagatatcaccagggttggggcagacataaccgttcttcg

SEQ ID NO: 202108 - DNA, 90 bp, Homo sapiens
cctacttgcagcatattacctatcaggagaggagaggagcaggatgcaaccgacaggctgtggccggacagctgctgcccagcacatgga

SEQ ID NO: 202109 - DNA, 99 bp, Homo sapiens
agcctcacgagtcgaggtcctgcaggtggagctccggcagccgccctgactctatcaagaagaatatctaatccgtaccttgaacatacgccttcccag

SEQ ID NO: 202110 - DNA, 117 bp, Homo sapiens
caaggaaaaactggagagcttcatcaaaaatagtgatagctttgataatgacctgaaaaaaatgtctggatttctagagggcttgagatgctcagaatgcattgactggggggaaaa

SEQ ID NO: 202111 - DNA, 74 bp, Homo sapiens
accatctggacggtgtgtggggtcctgtcactatttggtgcaacagctgcagcccggaaagaggtgataaggaa

SEQ ID NO: 202112 - DNA, 90 bp, Homo sapiens
caacggggtcctgaggcaccccctggagccagacagcagtgcctcctgtttccagcagctgagagcggaaagaacacccggaaatgaaag

SEQ ID NO: 202113 - DNA, 100 bp, Homo sapiens
tttggcaggaaggcgaggcttccgcccggcacaggggatcagtgtgcgtgtgaccaccatggatgcagagctggagtttgccatccagcccaacaccacc

SEQ ID NO: 202114 - DNA, 100 bp, Homo sapiens
tcctccccggctttctcctcctcctccagttaccaccctcctccctagcataaagcactcctctttatgctgctcactttcgtccaggacagtatgtgga

SEQ ID NO: 202115 - DNA, 82 bp, Homo sapiens
ctgaatgctggggcgtactccaaagttgttcaggaacggctcaggctgcacgaagaaaaggttattaaagatagacgtcatc

SEQ ID NO: 202116 - DNA, 100 bp, Homo sapiens
agcggacccagtggcctcggcgattatggacccggccgaggcggtgctgcaagagaaggcactcaagtttatgagattatggagaagtctggcgaggaag

SEQ ID NO: 202117 - DNA, 83 bp, Homo sapiens
caggccatgcctttcaagtgcatgcagctcactgatttcatcctcaagtttccgcacagctctttcaccatgcctggatcact

SEQ ID NO: 202118 - DNA, 88 bp, Homo sapiens
aagtcctggctggccaagttactggagccgatggtgttggacctcaggaatatactttactcaaattgaaggtgcttgagccataccc

SEQ ID NO: 202119 - DNA, 100 bp, Homo sapiens
ccgactctcatagaaaacgagagtatatgcgatgagtttggatatggctttagttgcccctgaagctccttcagaacaagccagaagagtttttcaaacc

SEQ ID NO: 202120 - DNA, 50 bp, Homo sapiens
aacagacaagacacttttcagaaagacagtcccttccagatatgcagcat

SEQ ID NO: 202121 - DNA, 100 bp, Homo sapiens
aaaagatccagaagcatgttagttcgacatcatcatcttttcttgaatgactcgggccagtgtagaggtcctcaggccgccggcaggagcagctgggcca

SEQ ID NO: 202122 - DNA, 82 bp, Homo sapiens
gaacagccccgcgggaatgtcgacgaggagctgaggtcaaaatgcagatcttcgtgaaaacccttaccggcaagaccatcac

SEQ ID NO: 202123 - DNA, 75 bp, Homo sapiens
gtgggccagcaatcctcagacgcctcacttaggacaaccactgaggcggctcccagctgcgttggcgacatggcc

SEQ ID NO: 202124 - DNA, 100 bp, Homo sapiens
tgtcactcacttacacagtattgggaaatctgtgaaagtttgctgctttgtggtgcacaagcggtgccatgaatttgtcacattctcctgccctggcgct

SEQ ID NO: 202125 - DNA, 75 bp, Homo sapiens
gtgggcaacgtggccgacagcacaggttactcactataaacaatatccacccaacacaagcaaagtttattccta

SEQ ID NO: 202126 - DNA, 51 bp, Homo sapiens
gcagtccatcaagcaactgaagggtcaaaactttgccagggttaaaatgca

SEQ ID NO: 202127 - DNA, 101 bp, Homo sapiens
aattcccggaggactacagtgaccagcccaggagttaaagtcactgtttgaaaaaaaatctctcaaagagaagcctccaatttctgggaagcagtcgatat

SEQ ID NO: 202128 - DNA, 75 bp, Homo sapiens
gatggccccgaccgcgtgctggagctcttcgacccacccaaggaatcctgggcattcccttgccccggaaacgcc

SEQ ID NO: 202129 - DNA, 82 bp, Homo sapiens
ccatgacctccgctcccctgtctacgacatcagtgcctgatgttgcacatttgccacttgagaagctgggaccctgtctccc

SEQ ID NO: 202130 - DNA, 96 bp, Homo sapiens
gacaccaggacagaaaagacagtgttctgctttcatggagttcacagaagagtcgaggagggtctcattctgtcgcacaggttggcgtgcagtggt

SEQ ID NO: 202131 - DNA, 102 bp, Homo sapiens
gcggcaggagggaagatggcggacgaggagaagctgccgcccggctgggagaagcgcatgagccgcagctcaggatagcgaggctgcggcaggaggagcggg

SEQ ID NO: 202132 - DNA, 100 bp, Homo sapiens
caggagtcggcggctcagttgtccatgaccctgaaggtccaggagtacccgaccctcaagcaattctgtggtgttcttggtcacacatttatggagtttc

SEQ ID NO: 202133 - DNA, 74 bp, Homo sapiens
gcatggatatctctactcgctccaaagttaatgacagttcggactatcacaggaaatatctactatgcaaggtc

SEQ ID NO: 202134 - DNA, 83 bp, Homo sapiens
gaggagctgggtggtcccagcctggagctgtgccagcctgacatggggcgtctctggccgagcctctttttgtggaaaacgac

SEQ ID NO: 202135 - DNA, 99 bp, Homo sapiens
gatgcccaagcaaaaactactctgttacagaccgatgcagtcttacagatgcagggcactccacagaaggatgttattatcaagtcagatgcaccggac

SEQ ID NO: 202136 - DNA, 90 bp, Homo sapiens
tgggagtctccgcgtcccgctcgctgggagagaggtacctctccttttccctctccctttccctaagcaacgcacctcttgctttttcct

SEQ ID NO: 202137 - DNA, 90 bp, Homo sapiens
ccactggcacattcttgctgacagaaactagaaaaactgcttttggaattatctctacagtgaagaaacctcggccatcagaaggagatg

SEQ ID NO: 202138 - DNA, 100 bp, Homo sapiens
ctgtttgatatcaccaaactggaggatgcctatgtattccctggggatggcgcatcacacaccaaagatctcaggaaacaggctcgacagctggaaaatg

SEQ ID NO: 202139 - DNA, 80 bp, Homo sapiens
cacctgcctggcctggtgccatgacaacaagtcccggctccggaagatgaaggtgaaatgacaatggatgctctgttggc

SEQ ID NO: 202140 - DNA, 90 bp, Homo sapiens
agaaattctggaacacctatatgcattttccatgtgctgattcttaatctaattattgtgggagctggagtgatcatggcctgtttctac

SEQ ID NO: 202141 - DNA, 74 bp, Homo sapiens
cgcaccccgactgccgaggaacgagagcgcgaagctaaggggtcggcaccaggaattattatagaaagatcggc

SEQ ID NO: 202142 - DNA, 74 bp, Homo sapiens
cgcgagtttgtggattatctgaaggacctggtgtcaaagatgcttcatgtagaccctcatcagagactgactgc

SEQ ID NO: 202143 - DNA, 98 bp, Homo sapiens
gcattttggcattgacatttaattttagggtcctttatatagaagggagagtagctgcgccagggccccgcggggctggggcccaaaaagcgtgcgga

SEQ ID NO: 202144 - DNA, 75 bp, Homo sapiens
ctgcaggcctcctacacctacctctctctggaacagatggagtcggataactgttcaggaggagatgatgactgg

SEQ ID NO: 202145 - DNA, 82 bp, Homo sapiens
gtacttcaggatcctaatacttggccatctccacacaaatatggtttggagtgcctttttcgatactacagttatggcctgg

SEQ ID NO: 202146 - DNA, 90 bp, Homo sapiens
tggaggaggctggaggcccaggtgggcatggcaactcgagatacactctgtggagactgctggcctggggagtgggtcctgaagagcagc

SEQ ID NO: 202147 - DNA, 90 bp, Homo sapiens
ccgcccccccagtctcggagatctcagaggcaccgactgggagatgggccatcaactgagaaagaccttgacgaaaagaagaaagaacct

SEQ ID NO: 202148 - DNA, 75 bp, Homo sapiens
aggcgttcaagcgaaaacatgaccgctgagcccatgagatggactcaccctgtcacccaggttggactgcactgg

SEQ ID NO: 202149 - DNA, 74 bp, Homo sapiens
tgctgaagacccaccccggagacccccgcttccagtgcagatcccagatgcagtgactggttactacctgaacc

SEQ ID NO: 202150 - DNA, 100 bp, Homo sapiens
atctgtatcctctgcagcatccttgatgataaaccagtaaatgtagtatagatcaatcagtgttaaaagaattaccccctgaactcctggcagaaattga

SEQ ID NO: 202151 - DNA, 83 bp, Homo sapiens
ctactgctgcctctgtcactcctggtgaccagcattcaagcctctggaataaccccattccctgcgacatggcccagcacctg

SEQ ID NO: 202152 - DNA, 88 bp, Homo sapiens
aaaagaagaattcagatgatgctccatggagtcctaaagacagggtcagatgtgttactgggctggagtgtggtggcacaatcacgct

SEQ ID NO: 202153 - DNA, 75 bp, Homo sapiens
gaaagtcattgccattaatgtggatgatcctgatgcagccaattataatggattccatgataaagacagttcagg

SEQ ID NO: 202154 - DNA, 96 bp, Homo sapiens
aagttgatgactctcgtgaacatagctttaataggttcttccctgtggaacagtagagacctagtctgccttctttcacaagataatccttcaatt

SEQ ID NO: 202155 - DNA, 82 bp, Homo sapiens
tgttatgacgtagttttggatagcaaacttgatgagtggatgccaacaaaatgaggagaaggaggaagtgaccatggacaca

SEQ ID NO: 202156 - DNA, 120 bp, Homo sapiens
ggcctggggaatgcttttttatctcatattagtgcctgtgatggcatctttcatctaacacaaatatcgacagtatatggcaggacttctggctcctccttatggtgttatggaaacggg

SEQ ID NO: 202157 - DNA, 90 bp, Homo sapiens
cgagtgggcaccgaccgcacgggcttcaccttcaaatacagttatgtgtctcggtaccacgtgaaagactcctcacgccacgtcatccta

SEQ ID NO: 202158 - DNA, 100 bp, Homo sapiens
tgagacctggtgctcttgcagttctttctcacatgctgcttagctttcagcattctccagaggcgttccatttgctggaacagattatgttggtatcagc

SEQ ID NO: 202159 - DNA, 96 bp, Homo sapiens
ccctgacttacctgaatgcactgcagcattcaattcgtctttctggagtggaagaccacgtgaaaaactttagctgttgctgtattggacacttgc

SEQ ID NO: 202160 - DNA, 98 bp, Homo sapiens
gtcaagcaagctgggatctatgagtggaaaggtgaccaagcccaaagaggagaaagatgcttctaagggggtctaaattatggataataatggaatac

SEQ ID NO: 202161 - DNA, 75 bp, Homo sapiens
agatggcgaaggtctcagagctttacgatgtcacttgggaaggaagattttcagtcaatgacttatggatttaaa

SEQ ID NO: 202162 - DNA, 98 bp, Homo sapiens
tgaacttaatacagcaagaaagaccatcaagtttaccagtgcagtgctacccctggcgctgggtttggctatcactgctctgctgcttctcatggttg

SEQ ID NO: 202163 - DNA, 87 bp, Homo sapiens
cgcgagggaggacccgacgcgcggcgtttacccagcgcagcgttccaccgctcgggtttggctggtgtcagagatggctttggattc

SEQ ID NO: 202164 - DNA, 100 bp, Homo sapiens
tggtccccatccggctggacatggagatcgatgggcagaagctgcgagacgccttcacctggaacatgaatgggcggcgactggcggcgcgatggacctg

SEQ ID NO: 202165 - DNA, 111 bp, Homo sapiens
tatgtcgagggaatgcagaaagagttaaggaaggcaggtgtcatggagaaactccagctgggcccagagattctgcagcgggaaaatccaaggcttatttatgccaggctg

SEQ ID NO: 202166 - DNA, 82 bp, Homo sapiens
cttattcccttcaattcaagtaacagccaagtatcttcaagaccttctcatggagagtgtgaatttttcccccgccaatctc

SEQ ID NO: 202167 - DNA, 83 bp, Homo sapiens
gaaaagagatggtgatttgctctgaagcatctagtacttatcaaagagaacatggcggcccagagggaatggaccccgatggt

SEQ ID NO: 202168 - DNA, 96 bp, Homo sapiens
ctaccaggtgttctgtaaagagtatcgcgtgaccattgtggctgaccatccaggtataggcttttgaacacttgcagcaattagaattaataaagc

SEQ ID NO: 202169 - DNA, 51 bp, Homo sapiens
gaaaaggatcggaaaagaattttggatgaagatgagctggattcccacacc

SEQ ID NO: 202170 - DNA, 100 bp, Homo sapiens
cataaaggagatccagagatgccggcgtttgattcttattgcttgtggaacaagttaccatgctggtgtagcagcagatgatgttgagggcaaaattaga

SEQ ID NO: 202171 - DNA, 90 bp, Homo sapiens
ggtcaaccccaccgtgttcttcgacattgccgtcgacggcgagcccttgggccgcgtctcctttgagagtgctgatggcagagattggtg

SEQ ID NO: 202172 - DNA, 100 bp, Homo sapiens
gggactgcggcggcgccggcctccggggagaaacgggaacaggcacggtctcctggtacccaacaataccaccgaccaggagctgcaacacattcgcaac

SEQ ID NO: 202173 - DNA, 51 bp, Homo sapiens
gtgaatatgctatctatgtccaagagacggaacctcactatgttgcccagg

SEQ ID NO: 202174 - DNA, 101 bp, Homo sapiens
gaccaagtcctcgctggactgctcagggtgccagacctcatcggcttttttccagacttcaagctcccattccaacagtaagagcttcttccacatcacag

SEQ ID NO: 202175 - DNA, 82 bp, Homo sapiens
gatgagagctgcaccgcgcgggacaagtcgccggcggcgcccgacggagcagctcgggttcatgacgctctcgatattcctg

SEQ ID NO: 202176 - DNA, 75 bp, Homo sapiens
tctacaaccttcgatctcctgacgagatcgcaaaagtggccgcacagccctgcatttggcagctgaagaagcaaa

SEQ ID NO: 202177 - DNA, 113 bp, Homo sapiens
taaaaacagaacaggaggtggtagagggcatggatatctctactcgctccaaagtggaatgcagtagccctctgggcctgggatattgtggttgataactgtgccatctgcag

SEQ ID NO: 202178 - DNA, 74 bp, Homo sapiens
caagatcgagcccagcgtcaacttcctcaagtcgcccaaaggggagacaatccagggtctgagggcgaatctca

SEQ ID NO: 202179 - DNA, 102 bp, Homo sapiens
ctcgctgggagagaggtacctctccttttccctctccctttccctaaggtgtggacactgccagcggctgcagccgacttggaatgacctgggagacaaata

SEQ ID NO: 202180 - DNA, 100 bp, Homo sapiens
tcagacacggggcaggctgagttcctcttgctcacagagctctgtaaagagttgctggagaatgtaaccctaatccataaaccagtgtcgttgcaacccc

SEQ ID NO: 202181 - DNA, 89 bp, Homo sapiens
ctggaagacactcagatgtatggcaatattattcgtggctgggatcggtatctgaccaaccaaaactgtttgagctcttctctggcttc

SEQ ID NO: 202182 - DNA, 100 bp, Homo sapiens
gattgacgcagagtgggcggcggtggtgggggacttgatctcatcttcatgccaggccttgggtttgacaaacatggcaaccgactggggaggggcaagg

SEQ ID NO: 202183 - DNA, 100 bp, Homo sapiens
tatattattaatggtcagaagatgtggataaccaacggaggaaaagctaattgagttcctatcagactgagattgggcagaccctggacctcctcacagc

SEQ ID NO: 202184 - DNA, 89 bp, Homo sapiens
agaagaccttgaaatgcatccgctggtcgctgccggaaatggccaggaagtcctgacggccacgctggatctggaggacgtccggagct

SEQ ID NO: 202185 - DNA, 90 bp, Homo sapiens
ggatggtcaacaggcagcacagccgagactccgtgggaaggaggcttgtttaaactacggatgcttttcaaagatgattatccatcttcg

SEQ ID NO: 202186 - DNA, 82 bp, Homo sapiens
tggcacttcattggccacctacagaaacaaaatgtcaacaaattgatggttccaatgacaggatttacacagagagcaacta

SEQ ID NO: 202187 - DNA, 100 bp, Homo sapiens
cagacgttagcgtgagtgatcactctcaatcccggctatacctgctggaatggataaagtgagctttaaaagttgatcagaccgaagagattgaagtgag

SEQ ID NO: 202188 - DNA, 98 bp, Homo sapiens
cacagaggacagcaggacttccaaggagagcatgtcggaggctgatcgcgcccagaaggcctcccagtagcattggatgcaggaaaaaatacattgac

SEQ ID NO: 202189 - DNA, 90 bp, Homo sapiens
ctgacatggaggatgatttcatgtgcgatgatgaggaggactacgacctggttcaaaccttgtactactcagctgatcacaagctgcttg

SEQ ID NO: 202190 - DNA, 100 bp, Homo sapiens
tggaggggacgtacctggacaagcacatggaggctcagcgggccgaggaggacctgaaggagaagaaggagaaggtggaggagaaggcaagccggaaaga

SEQ ID NO: 202191 - DNA, 101 bp, Homo sapiens
tgccaacagtaccgcaaggaccccaaagagtgctgcaagttcatgtgtctggacccaggcagatcttgtctggactaccagactcaagagaccaaatcaag

SEQ ID NO: 202192 - DNA, 100 bp, Homo sapiens
aacttcaagctgaaagaagccttagcagcaaaagactttgttaacctcagagccataagtgtgatccttggtgacaggtggaagaaaatgaagaatgaag

SEQ ID NO: 202193 - DNA, 83 bp, Homo sapiens
gcaaagagtcacctaaagttaggcggcactccagccccagctcgcaagttgccttatgatgtgaccacagaacaagctctaac

SEQ ID NO: 202194 - DNA, 74 bp, Homo sapiens
cttcgaaaaatgatcaactattgaccatatagggaggagatatcaccaaacatgatggaacaggcggacagtcc

SEQ ID NO: 202195 - DNA, 100 bp, Homo sapiens
cggcttcttcatgctttttcttctcaccatttctggccaaaactacaaacaagacttcgcaggttaatttggagtggcccctggagtcagtttcctacac

SEQ ID NO: 202196 - DNA, 100 bp, Homo sapiens
ctaccactataagagagtagaaagccctggtgcctgcagaactacattcctgcccacagtttaaccctctcctgcccagtgtgccgccagacctccatcc

SEQ ID NO: 202197 - DNA, 99 bp, Homo sapiens
gagccttcctgatccgggagagtgagagctccccaggggagttctctgtgtctgtgaagttggtcagcacattgtctcaagtagccttttgatgtcact

SEQ ID NO: 202198 - DNA, 80 bp, Homo sapiens
cgcggcggcagcagcagtgagaggatattgatctgggggctgggcgtgaggtttttgactatagtcaccgccagaaggag

SEQ ID NO: 202199 - DNA, 50 bp, Homo sapiens
aaggacgcaaagttctccggcgaggaaaaacgtggtcttcgagaaatgcg

SEQ ID NO: 202200 - DNA, 89 bp, Homo sapiens
gtcatgagtcgcttcaagtttatcggacactcatgaggaccatgatacttccactgagaatacagacgagtccaaccatgaccctcagt

SEQ ID NO: 202201 - DNA, 101 bp, Homo sapiens
ggtcgcgaggaggaggaggatgtggcgcgcggaggggaaatggctgccgaaaacaagccggaagcttagaccatgctcagcctccaagcagccttgtcatc

SEQ ID NO: 202202 - DNA, 98 bp, Homo sapiens
cgactgagcaggagtcgtccgcttatagtggaggctgctaggagccggtcagaggagaatggatcttggagaatgtctgaaagtccatgacctggctt

SEQ ID NO: 202203 - DNA, 89 bp, Homo sapiens
atcagcggctctttgtatgatgactggaatgcagtagccctctgggcctgggatattgtggttgataactgtgccatctgcaggaacca

SEQ ID NO: 202204 - DNA, 75 bp, Homo sapiens
ccaggaagcaattctggaagcgcagcaacagcaagctcccgggcaggtaatcattaccaaatgaggaggaaagga

SEQ ID NO: 202205 - DNA, 100 bp, Homo sapiens
ctgcgtctgcgtggctacgactacggccctcatttccagggcatcctggaggccagcctggaaggtgacactaagctgaaaactgtacggggtgtcgtga

SEQ ID NO: 202206 - DNA, 75 bp, Homo sapiens
agagtccttggggtgattgacaaggtgggaagaagagcgctatcctgaaggcatcaagtggaaattcctagaaca

SEQ ID NO: 202207 - DNA, 73 bp, Homo sapiens
tatctactcaagagtggaagttttcacaggtgtttactcgagaatgtatgagccactacctaagagtatttaa

SEQ ID NO: 202208 - DNA, 100 bp, Homo sapiens
tggagagccgggagtcgctgggtgcgtggggctgcctcgccgcgtctcgccacggatggtgccatgacaatggtgtgaactacaagattggagagaagtg

SEQ ID NO: 202209 - DNA, 82 bp, Homo sapiens
cctaagcctgcacagccgcggcggcagcagcagtgagagctctgtgggcaccttcgcacgggccctggactgcagcagctcc

SEQ ID NO: 202210 - DNA, 100 bp, Homo sapiens
ctcagcttttcacatgcctgagtggatgttttcggctttgtgagaaaccttaccatcaaacacgatggccagcaacgttaccaacaagacagatcctcgc

SEQ ID NO: 202211 - DNA, 96 bp, Homo sapiens
ctttctcctcggcactgtattctttacctgcttcccaatcccactgatgaggatcagcccatgggatggagccccccaaacagaaattatcaatgc

SEQ ID NO: 202212 - DNA, 101 bp, Homo sapiens
ggcgactgaggccggacggggcggacggcgacgcagcccgcggcagaagagtgtgaacatggctacgcctcttcattcccgtccatgccgagcccccgact

SEQ ID NO: 202213 - DNA, 90 bp, Homo sapiens
gcgctgggagctgtagaccggagctgttcctattcggccatcttggctcctccacaagtcctctcagggtgcgccatcattgtccgaggt

SEQ ID NO: 202214 - DNA, 90 bp, Homo sapiens
ccagaagcaaacattcatatcccaacattcctgtgtcaattcgacggagctggatgaactcattcagttccatgatccagactcagcagt

SEQ ID NO: 202215 - DNA, 82 bp, Homo sapiens
gctggccaaagcctgcccagacggctcacctgtgcgggatggaacaaaaggtcagcccaaggccaaccccactgtcactctg

SEQ ID NO: 202216 - DNA, 83 bp, Homo sapiens
caacttacccgagaacgtgcgggaagagaagatcatcgagcatttcaaacgaagaaaaagtcagcactttttgaagtgtctga

SEQ ID NO: 202217 - DNA, 75 bp, Homo sapiens
aaattgaagaggattttccacacatcagatccaaaacaagctatcgatcagggaagatctccagttataatagat

SEQ ID NO: 202218 - DNA, 80 bp, Homo sapiens
cacatgcccgctcacctgcgctgtgatgcctgcagagctgtggcttaccaggtactggtgtggcatactcggacagagaa

SEQ ID NO: 202219 - DNA, 75 bp, Homo sapiens
actcaagactaaaaactaaaggcctgggcctgagaactgaatcaggtttacccaaggtccagcctagcccctagg

SEQ ID NO: 202220 - DNA, 76 bp, Homo sapiens
ataaaactctgtatccacaattcatggaatcagtctggaaacatgttcaaccaaatggcaaagtgggtgaaacagg

SEQ ID NO: 202221 - DNA, 98 bp, Homo sapiens
ccgagatgtacacgaagacaggagtcaatggagattctcgatacttcctgtggccactccaggccataggaaaaggatacagagtagagtttcatgaa

SEQ ID NO: 202222 - DNA, 82 bp, Homo sapiens
gggcttcagtctggagccgcccagaggagcaggccgggctctcgccatgggtcactgtcgcctctgccacgggaagttttcc

SEQ ID NO: 202223 - DNA, 83 bp, Homo sapiens
cgcatttgtgggcgcgcggcacgcagccgggaggccgaggactcggagttcacctgcagatagcctgggctggaagctcttct

SEQ ID NO: 202224 - DNA, 71 bp, Homo sapiens
tgtcggccagcagcctcttggagcaggacctgaaggagaagaaggagaaggtggaggagaaggcaagccgg

SEQ ID NO: 202225 - DNA, 71 bp, Homo sapiens
gtcctcaattgcgtaggaccaacttaattcagtgcacaaatgagatgaatgtgaacatcccacagttggca

SEQ ID NO: 202226 - DNA, 80 bp, Homo sapiens
gagcgggcgacccggtgtgtgggccagcggagctccggtaagtaaggaggtctctgtaccatggctcgtacaaagcagac

SEQ ID NO: 202227 - DNA, 77 bp, Homo sapiens
cggcaccaccgctgcaagagccggatcatcaatgctgtggtactgttgattttattgagtgccctggctgatccgga

SEQ ID NO: 202228 - DNA, 51 bp, Homo sapiens
tgagaaccatgctcaccgaccctgtggcattggtagggtggtcaacggagc

SEQ ID NO: 202229 - DNA, 100 bp, Homo sapiens
catggaaggacctggactggagtcacgccagtacaaggaggatactggcaaagatgagctgccactgcagagccccgccatggaagacacgccgttggtg

SEQ ID NO: 202230 - DNA, 100 bp, Homo sapiens
acagagtatgaaccaagggttataaatcaaatgttggaatttgctttccgaaatgctgtctatgatttcttcattggccgtgaattaaaccctcgaattg

SEQ ID NO: 202231 - DNA, 113 bp, Homo sapiens
tgacgctttaaagagagataaagatgccatttatggagatgcccgagtggtaaaagacatggcaacaggaaagtctaagggatatggctttgtctcctttttcaacaaatggg

SEQ ID NO: 202232 - DNA, 82 bp, Homo sapiens
aaaacacaataccaggcatacatttggcagaataaatgaaccagccaaaactggacaagccaaggcatctgtagccaaagta

SEQ ID NO: 202233 - DNA, 90 bp, Homo sapiens
cttagagacagcagtagtccctggcagtgcccagtttgcagggggagatcatcgggggcacagaatgcaagccacattcccgcccctaca

SEQ ID NO: 202234 - DNA, 96 bp, Homo sapiens
attatcctctgtttctctgctgcaccgacctcgacgtcttgcctgtgtcccacttgttcgcggcctataggtctcaccaacggctttgggggtgcg

SEQ ID NO: 202235 - DNA, 82 bp, Homo sapiens
cgcggtcctggatatacttcagggtacagccaaagaccggagctttggagagatgaagtttaaacagtgtcctacagagaac

SEQ ID NO: 202236 - DNA, 100 bp, Homo sapiens
gcacctggactctgcccagagggccttgtaccgggaggtgatgctggagaactacagcagcctggtctcactgggtaaagatgatgattcttttgatcgg

SEQ ID NO: 202237 - DNA, 83 bp, Homo sapiens
agacaggccatgcctttcaagtgcatgcagctcactgatttcatcctcaagtttccgcacagacctgagaaattagatgttga

SEQ ID NO: 202238 - DNA, 100 bp, Homo sapiens
ggcccctacatcggccacgtcatggaagggtcacccacagctgactgtgatgccccactggcctctgccttgcctaggtcatccttcagcagctcctcag

SEQ ID NO: 202239 - DNA, 100 bp, Homo sapiens
atgtgcgacaaggagttcatgtgggccctgaaaaacggagacttggatgaggtgaaagactatgtggccaaggtgcctcatctccagacatggagcccag

SEQ ID NO: 202240 - DNA, 100 bp, Homo sapiens
cactgggcaagttccgggccgcgctgcgagactacgagacgtctcaggggccagccaagcccccacccccaaggaagccactgcctgccgacccccaggg

SEQ ID NO: 202241 - DNA, 51 bp, Homo sapiens
gcggcggccgcagctgccacaaaccaggatgctgaaaacgccattcaacag

SEQ ID NO: 202242 - DNA, 50 bp, Homo sapiens
gaaggagaagacggagtgcctgcagaaaacaatgcagatcttcgtgaaga

SEQ ID NO: 202243 - DNA, 50 bp, Homo sapiens
ccacctatgagacttcatctgtgtggtatataatctgtctcagaatattc

SEQ ID NO: 202244 - DNA, 82 bp, Homo sapiens
acgacaagatggtcatctccctcaagggcggcgagatatacagggaagactcaggatgagggtgcccgggctggacggctaa

SEQ ID NO: 202245 - DNA, 83 bp, Homo sapiens
gaaaaaggcgctggaaaaagtgaatttcgtaaccagaagccgaagccggagaaccaagacaatgcagatcttcgtgaagactc

SEQ ID NO: 202246 - DNA, 75 bp, Homo sapiens
cgccacttgtccgcttcacactccgccgccatcatggtgaagctcgcgaaggtctctaattaacagaagatggca

SEQ ID NO: 202247 - DNA, 82 bp, Homo sapiens
ctttcggcaagaactggattcgtggcgccacaagctcattcactgtgtaggtcaaaatgcagatcttcgtgaaaacccttac

SEQ ID NO: 202248 - DNA, 91 bp, Homo sapiens
atgagtcaatatgtattgtggcattcaaatcctagcactctgggagaggctaaagaacgtgccaatggaatggagcttgatgggcgtagga

SEQ ID NO: 202249 - DNA, 100 bp, Homo sapiens
ccagaagcagattgccaacattgaccgtattacaaagggagagaccattctaacacaggtaccgtccagacagtgcctctgagaaagggaacctaaaggc

SEQ ID NO: 202250 - DNA, 88 bp, Homo sapiens
agttactgtggaatcaataagccatggcatctaagaaatttgctgttaaagtgaaatccttaaccctgtttgtcacccattatccgcc

SEQ ID NO: 202251 - DNA, 98 bp, Homo sapiens
gaaacacaaagcagcccaaccaaaggccatcagtggcctatgtacataccacgccgggtctgccttcaggctgggaagaaagaaaagatgctaagggg

SEQ ID NO: 202252 - DNA, 75 bp, Homo sapiens
tggcgccctccgctccgggcccagggccttgatgttttagaaattatgagaaacattcatatatttgtgtcccga

SEQ ID NO: 202253 - DNA, 96 bp, Homo sapiens
aatttcccatttggaagctcggttgcctggtggcgcatgccctagatggaggtgctggagaatctggtaaaagcaccattgtgaagcagatgagga

SEQ ID NO: 202254 - DNA, 75 bp, Homo sapiens
gaccgatctgctctgctctcggcggtaaccagcgtgagctcgcccgccagaagaatatgaaaaagcagagcgact

SEQ ID NO: 202255 - DNA, 75 bp, Homo sapiens
ggaagatggcggccggcgaaaggagctggtgcctgtgcaagttgttgaggtgtacagccttggcctcaaaggagc

SEQ ID NO: 202256 - DNA, 100 bp, Homo sapiens
cgcgcacttccaggtgcacagcgcgggagccgtcacggtgctcaaggctgaagccgacgtagcttctctgaacagacgcatccagctggttgaggaagag

SEQ ID NO: 202257 - DNA, 80 bp, Homo sapiens
tgacgctggagaacctggcacttatgtcctccctgggttaatgaaaagtagcctgaatggagataacttccgaacacaga

SEQ ID NO: 202258 - DNA, 98 bp, Homo sapiens
acaccaggctcaacaaagctgtctgggccaaaggaataaggtatgtgcactgcgcgtgaccagccgggcccgcagccgcatcctcagggcagggggca

SEQ ID NO: 202259 - DNA, 75 bp, Homo sapiens
caggtgagactttcacaataagagcagaggatggaacacttcagtgcattcaagcatggcttctcgctgtttctg

SEQ ID NO: 202260 - DNA, 101 bp, Homo sapiens
gggccgagtcctcgccatgccggcccggcggctgctgctgctgctgacgctgctgctgcccggcctcgggcctctgaagagccaatccattcaggatggga

SEQ ID NO: 202261 - DNA, 100 bp, Homo sapiens
agctgaaagaacactttgcacagttcggccatgtcagaaggtgcattttaccttttttctgggaggtgatcagtgatgaacatggcatcgaccccaccgg

SEQ ID NO: 202262 - DNA, 90 bp, Homo sapiens
ggcaccaccgtcctgctcttccagttcgggatggcacgtgtggttctcaaatataggcattctgatgggaacttgtgtgttaaagtaaca

SEQ ID NO: 202263 - DNA, 90 bp, Homo sapiens
cagccatctttctcttgccgcgtgctggtgttggaggaccctccctgcttcagctcagcgacatgtcctcacctacatggaggatgcagt

SEQ ID NO: 202264 - DNA, 89 bp, Homo sapiens
gaagatttggataatacagtatttggagcagagaggaaaaaacggctatctataataggtgatgatgaacagtctacacagatggctgc

SEQ ID NO: 202265 - DNA, 73 bp, Homo sapiens
ccgcgatgcgctccatggcatctggaggtggtcttccgggatccgtatcggtttaagaagcggacggagctgt

SEQ ID NO: 202266 - DNA, 142 bp, Homo sapiens
gcgggacgccacccacgacgaggcggtgcaggcgttgaagcgcgcgggcaaggaagtgctgctggaaggtgactgtggggatcatgttgttataatgaacacaagacacattgcattttctggaaacaaatgggaacaaaaa

SEQ ID NO: 202267 - DNA, 75 bp, Homo sapiens
gacagcacctcatcccctggatgggggaccacaagatcctcatcgacagacggagccggtgggagaggagagcat

SEQ ID NO: 202268 - DNA, 99 bp, Homo sapiens
ctcaatatgtgccgccagtgtttccgtcagtacgcgaaggatatcggtttcattaaggaaaggttatttgtcaatgaagaaaatgttaatgagtttctt

SEQ ID NO: 202269 - DNA, 90 bp, Homo sapiens
agctgatagcagatgcatgagtgagcccagctgagagcaggcaattaagttggaatatgcaaggttggttaagttggcccaagaagacac

SEQ ID NO: 202270 - DNA, 100 bp, Homo sapiens
gaaagattgcaaggtgaataaagaagtggagcgtgtcctgaaggagttccaccaggccgggaagcccatcggaacccagcgggtgccgcttctccacccg

SEQ ID NO: 202271 - DNA, 75 bp, Homo sapiens
caaaatcagtgattctacatctcaagctcatattttgaagtgtttacgggttatgaagacagtatggagtttcca

SEQ ID NO: 202272 - DNA, 96 bp, Homo sapiens
gcagcccctatacaaggacagttggctcctaagggagggactaaattataaaagaagcctgtattgttttgaatttgaacgtcggttctgcactac

SEQ ID NO: 202273 - DNA, 98 bp, Homo sapiens
gcctggagtgtgtgcccactgaggagtccaacatcaccatgcaggttgtgggattcaagaacttagcattaatggactcatcttctagtctttctaga

SEQ ID NO: 202274 - DNA, 75 bp, Homo sapiens
gtggtccctgatccctacggtggtggtggtaactcacacttgtttcagggttttggccaaattgggcgagggcac

SEQ ID NO: 202275 - DNA, 75 bp, Homo sapiens
ccagtatggaccgagatgataaccagctgggagaaccaccacagacgacgagctagaagagatgctggagagcgg

SEQ ID NO: 202276 - DNA, 96 bp, Homo sapiens
cttcactgctctgctgtctcctgcaagaactggctcaagaaatttgcctcgaaaaccaagtgctggagaatctggtaaaagcaccattgtgaagca

SEQ ID NO: 202277 - DNA, 124 bp, Homo sapiens
ctccctttcatcagtcttcccgcgtccgccgattcctcctccttggtcgccgcgtccttggctggcgtgaaggaagcagccaccctcgccatggcctccccgcccgcctgcccctcggaggagg

SEQ ID NO: 202278 - DNA, 97 bp, Homo sapiens
tccccagttgctgtacgagagcaagctctataagattcttcaaggtggggttggcatcccccacatacgcaggaacgaatgcaggaatttgggaact

SEQ ID NO: 202279 - DNA, 83 bp, Homo sapiens
agtcaggcagatgtttgtcgactggaatgggtgctggagaatctggtaaaagcaccattgtgaagcagatgaggatcctgcat

SEQ ID NO: 202280 - DNA, 75 bp, Homo sapiens
gatggcggctgctgtaggacggttgctccgagcgtcggtgtgactgcacagaaaagttacaaaacaaatttgact

SEQ ID NO: 202281 - DNA, 100 bp, Homo sapiens
ctaaatttcggtagccatggcacaagaatatagaagagtttgaagtttgaaatcccagaatgaggaaattcatccagcttggagacttccaatcccttca

SEQ ID NO: 202282 - DNA, 83 bp, Homo sapiens
gggaagatggcggcgccgctcatccccctctcccagcagacgagccaaactcaggctgtaccttgagcagctcaagcaactgg

SEQ ID NO: 202283 - DNA, 90 bp, Homo sapiens
accttcccattggataatgaagtgaaggcctttatgagaggacagaggctatatgaaaagtatgattatcgggaaatgctgcacaatgcc

SEQ ID NO: 202284 - DNA, 75 bp, Homo sapiens
ctgggacagccatggtttcagacggtggctacagtttcagaaaagtcacgtataatggaactggagaaagaccta

SEQ ID NO: 202285 - DNA, 50 bp, Homo sapiens
gcagaatgcactgcttgaaaagaaactccacttggagatgttggcagacc

SEQ ID NO: 202286 - DNA, 83 bp, Homo sapiens
cttggctatgtgacgctgctggaggaaacacctcaggacacggcctacaacaccaagagtctctgctttctatccgtcaagat

SEQ ID NO: 202287 - DNA, 80 bp, Homo sapiens
caagtgggatggatcagctgtgaaaaactctttggatgattctgccaaaaaggttgatgccgccttacctttggacatcc

SEQ ID NO: 202288 - DNA, 97 bp, Homo sapiens
gtgaagcagctactcctccagtagcaaggaccagtccctcggggggaacgtggtcatcagtggtcagtggggagaggacatgtactcccaggattcc

SEQ ID NO: 202289 - DNA, 75 bp, Homo sapiens
atgatgtcaaggataagtctcatgacaccgcatcaagcatgatggaaccatgtgtgatacctgccgccagcaacc

SEQ ID NO: 202290 - DNA, 75 bp, Homo sapiens
gcggacgccaggagcctcctcgggcagcgagattgctttttttccgggtctcttgcaacgtgtgagctgcctctt

SEQ ID NO: 202291 - DNA, 82 bp, Homo sapiens
ggaaggcgtccgttggccttcgtacccgtcttgattgagacctgcctagagctggaacgttacctccagagcgagccctgct

SEQ ID NO: 202292 - DNA, 102 bp, Homo sapiens
cagacactatttcattagcctcagaacgatatgataaagacgatgaagccccctctgatgtttggatttaggtggcgagtagaaaaagaagtaatttcagga

SEQ ID NO: 202293 - DNA, 75 bp, Homo sapiens
ctggacacggagaccgggctggagccggacgagctgtcggtctcttcaccctctgaaaacaagaggatgtgtagc

SEQ ID NO: 202294 - DNA, 75 bp, Homo sapiens
ccatcatcagctcggtccagaagctggttctgtatgagactagagctctcctgcccctcctaaagctgaagccaa

SEQ ID NO: 202295 - DNA, 75 bp, Homo sapiens
tgcctggataccttcgaataggagacgagttgtactgctgtcacaggaaatggacgctggattacaagcatggca

SEQ ID NO: 202296 - DNA, 82 bp, Homo sapiens
gggagttctctgtgtctgtgaaaacactggagatgatcagacttcctgaatagagaaagcttatgtgctttgttacattggg

SEQ ID NO: 202297 - DNA, 87 bp, Homo sapiens
gccaccctgcggtggattgactacggcaaagtggccactcaggtatcacctcttctgggctcaagatggacaacaagaagcgcctgg

SEQ ID NO: 202298 - DNA, 100 bp, Homo sapiens
ctcgcgatgagtggtctcggcaggctcttcgggaaggtggaatgcagtagccctctgggcctgggatattgtggttgataactgtgccatctgcaggaac

SEQ ID NO: 202299 - DNA, 97 bp, Homo sapiens
cagttcagaaagaggaaactggattcaggttccagcaacagatagaaatgctttaagttcactctggggaaagctggcctctgaaatcttaatgcag

SEQ ID NO: 202300 - DNA, 100 bp, Homo sapiens
gagaatgtgtgacattttactttcagaacacctttctagatacacaacttgaaagtacctacagggaactctaatgatccaggacaaagaagttaccctg

SEQ ID NO: 202301 - DNA, 100 bp, Homo sapiens
cctcccgtatgaacttctcttcgcatcggcggcggcttccgtcacctccgctcccccgatcctattcccagtcgtgtttggaattcacccagttgcaggc

SEQ ID NO: 202302 - DNA, 89 bp, Homo sapiens
cttgtgggtggcatgactaggatgcccaaggaaatactacaagtacatcctcactcgaaattttgaagcactcaatgcccgaggtggtg

SEQ ID NO: 202303 - DNA, 100 bp, Homo sapiens
ggactactttggtttaatgagaaagcaggtatatgactgcctcagttctcgaggctggacagtccaagatcaaggtgcctgcatctggcgtctagtgtgg

SEQ ID NO: 202304 - DNA, 82 bp, Homo sapiens
acaggcgccgcgggctccgcgcccggccggacccgggcccgaggaatcaaagatcaactcccactgaggacaaatggacctg

SEQ ID NO: 202305 - DNA, 100 bp, Homo sapiens
cagattctcctctgcgctatgtggacattgccatcccatgcaacaacaagattcaattagcagagcctcacagacaatggccaaatgtgtcaaagctgtc

SEQ ID NO: 202306 - DNA, 100 bp, Homo sapiens
ggacggggatggggacggtttcgtccgcatcgaggacttcatccagtttgctacggtctacggggcagagcagcgcacgtaccgggtgccgaaggaggtc

SEQ ID NO: 202307 - DNA, 98 bp, Homo sapiens
ttcggcgaggagaggcgacgaagtagaacttcatggaggaacacggagtgacccaaaccgaacatatggctaccatagaagcacatgcagtggcccag

SEQ ID NO: 202308 - DNA, 82 bp, Homo sapiens
tttacctgtgagatgtttcatcccaacagaaaaaagaaggggcatggctggagcagaatgggaacgagaacgcagaaaaaca

SEQ ID NO: 202309 - DNA, 74 bp, Homo sapiens
cagccgtcaccctcaactttcccttcaggtaccgggaagccagtgttgaagtgatggagataatgtctcgtttt

SEQ ID NO: 202310 - DNA, 51 bp, Homo sapiens
tggcaagtggacattttactggctcaaatgctcagcctacagaaggagaga

SEQ ID NO: 202311 - DNA, 96 bp, Homo sapiens
caacaatgagtacaactaccgctgctggaccacaaaccgctgccagaaaaatacatccagaaagtgcccagaagaaacttcctgctggaaaaaatg

SEQ ID NO: 202312 - DNA, 75 bp, Homo sapiens
gtgatgttggagaactacagaaacctggtctccctaggtcccgctccccgaggcgcaggtcccccgtgcgccgga

SEQ ID NO: 202313 - DNA, 75 bp, Homo sapiens
gaagaggagggctcccacccctgcccctgcatccaggtggagaccaaggaggcccccaagaagctgatccgatac

SEQ ID NO: 202314 - DNA, 88 bp, Homo sapiens
gacgaagacagtccctggatcaccgacagcacagacagaatccctgctaccagagacctgttctgatgatgtgtgtggtcctcaccac

SEQ ID NO: 202315 - DNA, 100 bp, Homo sapiens
atccagtaccaaaaacgtcaacaacagttttacggaggtggtccaggccacgctggtggtcctggccttggccatggtgcccatcctgctgcttggcaca

SEQ ID NO: 202316 - DNA, 97 bp, Homo sapiens
ggttgtctgtggccggaggctgatcagcactgtgacttctgccgtgttcaccgtgggagacaacgtggtttcaggcagcgatgaccgcacggtgaaa

SEQ ID NO: 202317 - DNA, 83 bp, Homo sapiens
ccccatctggctggaacacacatcagtcacgtttgtccagaggggttgcgtttatccggtttgacaaacggtcggaggcagaa

SEQ ID NO: 202318 - DNA, 100 bp, Homo sapiens
gctgaatgaggacatcatgctcaggaccctcaaggtcacattccagaaggctacaagtgacgacaaagattctgtttcaaatatagccacagaaataaag

SEQ ID NO: 202319 - DNA, 90 bp, Homo sapiens
ttgactactttttatggagcatttggaccagaaaaattcagtgagaaagatcagtctaaagaaaaggagaagaaagtgaaaaaaacaatt

SEQ ID NO: 202320 - DNA, 82 bp, Homo sapiens
tagtgaacgtggacaaagctgttgtctcagggagcacagaagtggacccccaaaagtacaagggcatatttaacggattctc

SEQ ID NO: 202321 - DNA, 51 bp, Homo sapiens
agtaccaggaggcgttggccaaggaggaaatatcattctgcaaaagaagct

SEQ ID NO: 202322 - DNA, 74 bp, Homo sapiens
ttggactgagtcctgcaggacacagaactgataaatttcaaacggaagagagtggcagcatttagaaagaatct

SEQ ID NO: 202323 - DNA, 100 bp, Homo sapiens
gccaagtatgcgcccagcggattctacattgcctccggagatgtgtcttgctgaatcagggctctcttatccctgccatcgacttacagtgggaagaaga

SEQ ID NO: 202324 - DNA, 98 bp, Homo sapiens
ctgaagtgtggtgtggctctgctcttcctgctgcccacattcctgcaccccctcatgagggtagtcccagagaccaggcgatggcatctgcactattc

SEQ ID NO: 202325 - DNA, 74 bp, Homo sapiens
ccggttccccggcccacagtgggggtgtgcaaacccgagagaactggaagatcacccttagttcttcctcggaa

SEQ ID NO: 202326 - DNA, 90 bp, Homo sapiens
ctccaacgtaacctcggcgccggtgacgtccctcccgctggtcaccactccggcaccaggggtggcgtacacatcagaatgttttccttg

SEQ ID NO: 202327 - DNA, 100 bp, Homo sapiens
gggtactacacaaccgtctccagccttggtctgagtggactgtcctgcagatcttgatgtggaagaaatggaggactcagaaccaaggatttccaagtga

SEQ ID NO: 202328 - DNA, 75 bp, Homo sapiens
ttgttttaggcacttttgtggtacaggttcaatgaaagatcacccacagcagcagccaggcatgttgtcccgtgt

SEQ ID NO: 202329 - DNA, 75 bp, Homo sapiens
cttagagcgtggactgtgaacccccaagcagacggtaagaatgattgatgttggctgatattggagtgctcattc

SEQ ID NO: 202330 - DNA, 82 bp, Homo sapiens
aagggaccttctccggcccctccagctgccccctgtgtggcaaacctttcttgagctcaggagaagatggggagccccgagg

SEQ ID NO: 202331 - DNA, 99 bp, Homo sapiens
ggagtccctcgccacctgcaagagcctgcagcagtcgcttctccgcagcgtcatcggttatctcgcaaagaactcaacagacctccagtcagatgccag

SEQ ID NO: 202332 - DNA, 100 bp, Homo sapiens
cgccatggctgccccgtgtttgctgcggcaaggacgagccggggcgctgaagacggccgaagccctgcagcccacgctacagccggagatgcagctcgag

SEQ ID NO: 202333 - DNA, 100 bp, Homo sapiens
cggcttcctcaacttcacgctggcgcgagccccgtcctccttcgccgccgcgcacaaccgcacgtgcagagcctggcccaactagagaatctgtgcaaac

SEQ ID NO: 202334 - DNA, 83 bp, Homo sapiens
cgacgagcgctgcactaacgcaggatccggctgccgaaggtcctcgccagctcctgtccaaatatgacccccagaaggaggca

SEQ ID NO: 202335 - DNA, 146 bp, Homo sapiens
caacgacagcgacggctacgccgaagcactcgttccgggggtgaagcctcctgcgccggccttgcctcggcggagctggagtttgttcagatcatcatcatcgtggtggtgatgatggtgatggtggtggtgatcacgtgcctgct

SEQ ID NO: 202336 - DNA, 100 bp, Homo sapiens
ctgttttctagaactttctatgatgcaaaatctgttgatatgagggaaggcaccattggagatatggctatcctgggtataacagaaagttttcaagtga

SEQ ID NO: 202337 - DNA, 75 bp, Homo sapiens
agcacaggaatctcactctgttaaagctggtctgttctaactgaggttttaaatgcacagagagcaggatacaag

SEQ ID NO: 202338 - DNA, 108 bp, Homo sapiens
taatcacatcacaaggctatgaacaaatatgcaaaacagaaactgttcatacttggtgcgctgtggactcttgtgataattaaccaagagtagctctatttgtccaac

SEQ ID NO: 202339 - DNA, 139 bp, Homo sapiens
gaggtgtttcacaagtagcaaatgagatgaaccatcttcctgcacacagccaaagtctgcaaaggaatctggtggacagtaacaaactttggtgaaatttcaggaaccatagccattgaaatggataagggaacctata

SEQ ID NO: 202340 - DNA, 101 bp, Homo sapiens
ccagatcgccgctggcctctatggtgcttgtgaatgacttcttcttggtggcttgtcttgaggatttcattgaaaatgcccgtctcttcatatttgagact

SEQ ID NO: 202341 - DNA, 90 bp, Homo sapiens
gcgagagggagccgcagctgatgtcaggtgaatctggattgggaaagtcgacattaatcaactcattattcctcacagatttgtattctc

SEQ ID NO: 202342 - DNA, 107 bp, Homo sapiens
ctggagcttagccattggcaacgagttaaatatcacccacgagcctggcagagagcaggtgtgtgatacacgtcgtcaggtgactgaccgaggaattcagggcaaac

SEQ ID NO: 202343 - DNA, 98 bp, Homo sapiens
cgaagatggcgacggccttgagcgaggaggagctggacaatgaagactattactcgttgctgaacgtgcgcagggagcagtgattccagcagtagttc

SEQ ID NO: 202344 - DNA, 100 bp, Homo sapiens
gatcagagcactctgcatgcagaagatcctctttccatcaccttcatggaccaacataactttagtccaagatatcgtctggggaatatttttcatctta

SEQ ID NO: 202345 - DNA, 74 bp, Homo sapiens
atgaggggatgcagttatgggctctgtcgccgtggggttaccttcccgccaatgtagaccggagaccagccact

SEQ ID NO: 202346 - DNA, 90 bp, Homo sapiens
agatcgggagcgcaaggtcgccctcaaggccatgatcaaaacggtgtgtccgcagccggccaggtggtatccctgaaggtgtggctgatt

SEQ ID NO: 202347 - DNA, 83 bp, Homo sapiens
caccgcggaagtcgggaaatgacaatgcagatcttcgtgaagactctgactggtaagaccatcaccctcgaggttgagcccag

SEQ ID NO: 202348 - DNA, 82 bp, Homo sapiens
gtgcagggcagagcaggaggccccccgaggatcttcatcatctgggccatcagcagttggttccgccgagggccggcccctc

SEQ ID NO: 202349 - DNA, 74 bp, Homo sapiens
ggagatatggcgcaactgcggcgcgggagaagcccgaggaagattgaccaattttgtaattctagaaacatggt

SEQ ID NO: 202350 - DNA, 100 bp, Homo sapiens
tcttacaggattgtctgactcacaagtcagagcatttcgacatacaagcaccctggcagtttgcatttatgtcggatcctcagtgaaaataaaagccatg

SEQ ID NO: 202351 - DNA, 75 bp, Homo sapiens
tccttctcaaccttgtgggatgtgaaaactctgttactgaagggaaacagtgcttcttagtcctacgtcagcagc

SEQ ID NO: 202352 - DNA, 80 bp, Homo sapiens
ccaggatgggctgggaatgaagcgatgtagccttttaagtatttcagttactaactgatctgaaagagcagcgtaaagaa

SEQ ID NO: 202353 - DNA, 48 bp, Homo sapiens
ggagaaactgaagcgggacgttgagttcactgagacttttttgacgga

SEQ ID NO: 202354 - DNA, 100 bp, Homo sapiens
tttccttcgtacccacagtgcttcatgagagcatctctgcgccggatgtcatctaacagattccctggatcatctggatcaaatatgatttattatctgg

SEQ ID NO: 202355 - DNA, 75 bp, Homo sapiens
caacagccaccaccaccaccagatgatgcctgaggaaacccagacccaagaccaaccgatggaggaggaggaggt

SEQ ID NO: 202356 - DNA, 88 bp, Homo sapiens
attccaatcatcttacaaaactggaaactgaggcatctaatatgaaggttctaatagaagactgtatcccggtactgaagaggtacgc

SEQ ID NO: 202357 - DNA, 89 bp, Homo sapiens
agctgggaaacccacaggaggcaaccacactagtttagggtgaggtggctttgaccccgggttgcccggccagcacgaccgaggaggtg

SEQ ID NO: 202358 - DNA, 83 bp, Homo sapiens
tagagcaaataaccgttttgaaattccgcggcgagtcctttgcacatgttggcaacacacgcatccgcatcggcctccctgcc

SEQ ID NO: 202359 - DNA, 90 bp, Homo sapiens
cacctcctcgccagcagccgtccggagccagccaacgagcggtactgggcctaatcgctacgtgcctctttggctatgatgcctatgtca

SEQ ID NO: 202360 - DNA, 90 bp, Homo sapiens
ggacgaggagtcggaggagccgcgggcggcgcggcccagctcgttccaggtggttctacccaggcaataacccctacactgggacccccg

SEQ ID NO: 202361 - DNA, 82 bp, Homo sapiens
cctggagtacaacgaggtcaacgtcaccctggacctgggccagagaggtggagaagagcgagtacttgagaaagaagaggaa

SEQ ID NO: 202362 - DNA, 99 bp, Homo sapiens
agtccaagctgcctggagtcaaggaagctggtaagcgggcccctcagtgctaccccagttccgtcaactctgccaggactgtgatgctgttcaaccttg

SEQ ID NO: 202363 - DNA, 89 bp, Homo sapiens
agctgaggcggaggctgacgaggaggcggatcccccggcgtcaggccaccagcccctcgggttccaagatgcagctactggagacagag

SEQ ID NO: 202364 - DNA, 83 bp, Homo sapiens
cttcaaacctcaggtcacgtccgaggtcgacacaagaacgtcctgactgccatcctgctgctgctgcgggagctggatgcaga

SEQ ID NO: 202365 - DNA, 75 bp, Homo sapiens
ccctaccaggagcatgtggccttacacgcccccatcagtgtgtcaaggatgccacaatgccatcgacccagaagt

SEQ ID NO: 202366 - DNA, 78 bp, Homo sapiens
ttgcaaagtcatcagccggtgccaaaggtgttgagagagaaaagaattcctccctggatggaagtggtccttataccc

SEQ ID NO: 202367 - DNA, 75 bp, Homo sapiens
tctacctcagtctaatcctgctgcagaactatcagggccttcatcctagaataatcactgaaggatttgaagctg

SEQ ID NO: 202368 - DNA, 82 bp, Homo sapiens
aagaactgaggagcaccaggagacgcaactcatcggggcaccggcagaagctggaggaccagaccaagccgttccctgaccg

SEQ ID NO: 202369 - DNA, 100 bp, Homo sapiens
caagcttaggtttgttcagaagaaatgcaattatgggaagtgatggaattttacgcctcagtacttcagctctaaataatgaattctttgcatatgcagc

SEQ ID NO: 202370 - DNA, 73 bp, Homo sapiens
gcgacagtacaaagaagactcttgtcacactaattgccaacaacaatggtgagacctggaaccccttcaaatt

SEQ ID NO: 202371 - DNA, 90 bp, Homo sapiens
ggaatccctacgcgtccctttgggtttagcacgatgagctcaatcggcactgggtgggtaattccagaattgattggccataccattgtc

SEQ ID NO: 202372 - DNA, 101 bp, Homo sapiens
tggctggcctcaagtacagggtcatcaagggcaagcgacgagctggggctgcagaagaagctacgcacagaggtcattcagctggaggacacgctggccca

SEQ ID NO: 202373 - DNA, 82 bp, Homo sapiens
gcttattgacttctcaccttgtgaaaggaattacatgaatgacagtcttcgaaccaatgtgtttgttcgatttcaaccagag

SEQ ID NO: 202374 - DNA, 100 bp, Homo sapiens
acgaatgccaagacagagcatgggtggtgctcgcacacagcaggatttaagagatctttccagaaatcgttttacagaaattccttctgatgtctggtta

SEQ ID NO: 202375 - DNA, 82 bp, Homo sapiens
caaagaatagagttgagcctgtgggacacttcggtttgagttcctgagatctagttggtgagagacatgatgttctaccggt

SEQ ID NO: 202376 - DNA, 100 bp, Homo sapiens
tgccgatcctgctctgctcctgggtttgctgtgtggcccttgactcctgggagagttggctctcaaggttctgatttagattcatcagcaactcctataa

SEQ ID NO: 202377 - DNA, 100 bp, Homo sapiens
accaacacaagtccaactccatcaagcggcaggacaagaccagcgctctgagcctgagcaatgtggcaggcgttttctatatacttgtcggaggtctggg

SEQ ID NO: 202378 - DNA, 100 bp, Homo sapiens
agacggctcacctgtgcgggatggaacaaaaggtggaatgaatcttacttgttgaatatcttctggttactagttggattcatttgtgaaagaatcattt

SEQ ID NO: 202379 - DNA, 82 bp, Homo sapiens
tccactctggccactcccgcaactccagctatgccagccagcagtccaagatctccggagtgcacagtctgcgggtggaccg

SEQ ID NO: 202380 - DNA, 74 bp, Homo sapiens
gcaaaaatcccatctaccgcaactctcagttcgagagtaaaggtgaagatcatgacggagaaggaactcctggc

SEQ ID NO: 202381 - DNA, 100 bp, Homo sapiens
ggagattcttctcaaatctgatggactcaggacgttgcaatctgtgtggggaagagagctttggcactggctgattcaccccaagagtggccgttcctac

SEQ ID NO: 202382 - DNA, 75 bp, Homo sapiens
ccaacggctccccgtcgtcctggtgctgcagcggtgcagctgaacctggtgttttagaggataccttggtcccag

SEQ ID NO: 202383 - DNA, 75 bp, Homo sapiens
tggcagagtaagggtgacttggatcagaattcaggctataaatgaaattggagctggaccatttagtcagttcat

SEQ ID NO: 202384 - DNA, 75 bp, Homo sapiens
tcgtggccgcccagctgtctcttctgcaagaggctgccccccggattatgttcctccagagatcttccatttcca

SEQ ID NO: 202385 - DNA, 100 bp, Homo sapiens
gtatttctttggcatcactgcagctagtaatttgccttctggattgaggcaggtggaagtcatcataaagtttctgtttcacccgtcgtccatgttcgag

SEQ ID NO: 202386 - DNA, 100 bp, Homo sapiens
gacttacagacccgagtggaatctttagaatctcaaacaagacaacttgagctgaaagcgaaaaactatgctgaccagaaataccgtagcagtaggcagg

SEQ ID NO: 202387 - DNA, 51 bp, Homo sapiens
gttggccccgatatccgctcagggacccgtgcatctcttccgactctcggg

SEQ ID NO: 202388 - DNA, 75 bp, Homo sapiens
taggaactcttggttgggataagattccatatggctctcatatcattccattccatctctgccaagatttggata

SEQ ID NO: 202389 - DNA, 51 bp, Homo sapiens
ctgggcctaggtctgcgccctgaataccctctaccatctgctttggtcagg

SEQ ID NO: 202390 - DNA, 74 bp, Homo sapiens
gaagagagcggcggccgctcacaacatgcacagcctggcgacggctgcggcacgtgtggttctcaaatataggc

SEQ ID NO: 202391 - DNA, 88 bp, Homo sapiens
gcaaagccagcgttacagtaatgttccagtacaaggcgagtggataattccaacacaagactggcagtccaaattgaaagagatccag

SEQ ID NO: 202392 - DNA, 100 bp, Homo sapiens
ctcaacaccagcaccgcagatgttgtcaaggtggcctaccaggaggccaggggtgtcgccatggtggagttctacttcctttcccagtacgtgtcgccag

SEQ ID NO: 202393 - DNA, 100 bp, Homo sapiens
cagcaggcccagctgaccacctcctgctgcagctctactctggacgcctgcaggtgtacccacccagctcaggtgaggactacggcagggatgccaccgc

SEQ ID NO: 202394 - DNA, 100 bp, Homo sapiens
ccccgagggtcaacgagaaagagatcgggccctcatctttgtgtcccatggagccggagagcacagtggccgctatgaagagctggctcggatgctgatg

SEQ ID NO: 202395 - DNA, 100 bp, Homo sapiens
gtccaaccccatcacataggggtttctgttaaggaactcgatttatatttggcatactttgtgcatgcagcaggaaaatgtttataggaggccttagctg

SEQ ID NO: 202396 - DNA, 100 bp, Homo sapiens
cagaatcacgcggacatcgtctcctgtgtggcgatggtcttcctgctggggctcatgtttgaggttactcactataaacaatatccacccaacacaagca

SEQ ID NO: 202397 - DNA, 90 bp, Homo sapiens
acaacatggcagacattgacaacggaacggaagccgccccttttcaacatgaatgcaatgagtgccttatatcacattgcccagaatgac

SEQ ID NO: 202398 - DNA, 82 bp, Homo sapiens
gtggatgctaagccagaccggtcctcgtttgtaccgtccctcttcagaatgcatacttggaatgaatccttctagagacgtc

SEQ ID NO: 202399 - DNA, 75 bp, Homo sapiens
gcgagtttctactagtccagttgaagggcgtataccgcatctctaggagagacagcagttgcatttgactttggg

SEQ ID NO: 202400 - DNA, 60 bp, Homo sapiens
tctcaggtggacaccagagcatggaacctgcccaaactccaaaatgatggtagagaattg

SEQ ID NO: 202401 - DNA, 100 bp, Homo sapiens
acgtacctgtggtccctggatccagtgctactgctacaaataagatttgcttgtaaatgcatcacgaagaggcagcccagaatgaagaaagcaagcagga

SEQ ID NO: 202402 - DNA, 83 bp, Homo sapiens
cggccgaagagcggcggcggcagcggcggtctctaattaacagaagatggcaaagcccagccacagcagctatgtccttcagc

SEQ ID NO: 202403 - DNA, 101 bp, Homo sapiens
cccgcctccctgagccacatgcagctccaccacctcgaccccaagactttcaagtgcagagccataggactatggtgcagccctgcggggcctgtgcgaag

SEQ ID NO: 202404 - DNA, 97 bp, Homo sapiens
gcttccattggccagtatgaagtggtgaaggagtgtgtgcagcggaaactactttgcttcgcactttttcatgggaggagagaaattcgacaccccc

SEQ ID NO: 202405 - DNA, 100 bp, Homo sapiens
gtgattcaccaactggacaaggctttggcaaagctggggattggccagctgactgctcaggaagtaaaatcggtcatctcgatgcactcctgaggggctt

SEQ ID NO: 202406 - DNA, 106 bp, Homo sapiens
tataatttaacttctgatatcattgagtccatatttaggacctatccagcagttgtgattccaaagaatccctatcctgcctccgatgtgaatactgagaagccca

SEQ ID NO: 202407 - DNA, 97 bp, Homo sapiens
gtcctaccaagatgacaaaagaagagttaaatgccctcaagtcgacaggggatgggaccctagctgtcaccactgactaaagaagagaaaactgcgg

SEQ ID NO: 202408 - DNA, 103 bp, Homo sapiens
ggcggcgctcggcgatggtaggcgtccctggagcggccgccttccagcgaatcctatccatcttcttcaccgatatggtttgtggattctgaagacccaaatc

SEQ ID NO: 202409 - DNA, 82 bp, Homo sapiens
cggagcctggcgcagcctccctctattaccaggtgaaagacccctgacaaaagacaatcatcttctgggtacatttgatctg

SEQ ID NO: 202410 - DNA, 98 bp, Homo sapiens
tagaagctatataaagtcaagtgtccattttctttcaactatatttgagcatacccagaattttgattcagctaaagttccatcagatgagtattgcc

SEQ ID NO: 202411 - DNA, 50 bp, Homo sapiens
ccagtggatctgcgcacacgccaggtactgtctgatgagcgtgaaaggtt

SEQ ID NO: 202412 - DNA, 90 bp, Homo sapiens
cacagaaatagactcatcaaagcttatgaaaaagttggatgtcagttaagggtcttgtccaataagcatgtggctcctgatcatcttttg

SEQ ID NO: 202413 - DNA, 88 bp, Homo sapiens
atgggtgctgttttcatgaggagagtctgggaaggcggcgtccgcttttctgacaagggaagagatacatactgccatgaaagaaagc

SEQ ID NO: 202414 - DNA, 82 bp, Homo sapiens
aagaaacttaataagctgattgagtcagctgaagagctcatcagagatggcaggtgctccatacttgcttgcagtgcctacg

SEQ ID NO: 202415 - DNA, 100 bp, Homo sapiens
cctgatatccctgaccacttcctgtgtctgtgggagcactgtgagataaagagttctatctgtcttctacgcgggaaaatctatgatgctctagataacc

SEQ ID NO: 202416 - DNA, 100 bp, Homo sapiens
tgacatggatcagattgtgaactcaaagaactatttaattggaaagatcaaaggaagaagcattgcatgcatttattcagccagagattctggatggccc

SEQ ID NO: 202417 - DNA, 81 bp, Homo sapiens
gatcttgctcagtctctgtcagaggaagatcccttgcaaaccagtccagctacgggggcccagccagccagcagctgagtg

SEQ ID NO: 202418 - DNA, 75 bp, Homo sapiens
gctggacaggcagagtgctgatgtgaaaaataccacgacaaaaccaccctagtctcagccttagatccaaggaca

SEQ ID NO: 202419 - DNA, 75 bp, Homo sapiens
gcggtttcccgaggagcttgggccgccgcagcttcttccagaccagctggtcttgcttctggagcatctcttgga

SEQ ID NO: 202420 - DNA, 75 bp, Homo sapiens
gtggatttcagcctgcacggatggtcttgaaacacaaatggtttttggtcactctgtgagactgctgggtcagaa

SEQ ID NO: 202421 - DNA, 90 bp, Homo sapiens
ttgccaaaaggatagagattgcagagggctgggcttcaacatcgtcggtgggacagatcagcagtatgtctccaacgacagtggcatcta

SEQ ID NO: 202422 - DNA, 85 bp, Homo sapiens
gacagcaccatactggaacttcaaaaagttctgaaaacatgttgattatatctgggtgttggcacccagccactattctgccaat

SEQ ID NO: 202423 - DNA, 102 bp, Homo sapiens
gcccggagcggcccaggagcacgccgcggggagcgcgggcgtccggggctggagtcgcgcagaaacatgattcccgtgacagaattccggcagttctctgag

SEQ ID NO: 202424 - DNA, 90 bp, Homo sapiens
agaggactgccctgtggaaagcaggagagaagatgactgaggaggaggtggagaccgttctggcaggacacgaggacagcaacggctgca

SEQ ID NO: 202425 - DNA, 76 bp, Homo sapiens
aaaccactgtaatcacagggactaccagaatatttcaagaaatgaggatgttaagcaagtttttggacagaccaca

SEQ ID NO: 202426 - DNA, 100 bp, Homo sapiens
cttgtcactttagccactgctactacagaatatgcttttaaggctattaaccagggtggccttacatcagtagctgtcagagggaaagactgtgcagtaa

SEQ ID NO: 202427 - DNA, 75 bp, Homo sapiens
cgtgaagaacctgaaggacacactagtccagttacaacacagggatcacaacaaacacaaccgccacagaagcac

SEQ ID NO: 202428 - DNA, 74 bp, Homo sapiens
catagcaccaaccccggaacaggttggtgttcgaggaagagacattgttgttcttggtgtggagaagaagtcag

SEQ ID NO: 202429 - DNA, 100 bp, Homo sapiens
gttacaaccgcagcagtggtggctatgaacccagaggtcgtggaggtggccgtggaggcagaggtggcatggggcattttgttcccaacatcacctttgg

SEQ ID NO: 202430 - DNA, 101 bp, Homo sapiens
tagtactgaaggctcatcatgatattgtacgatttctggtacagttagatgactacagtactatactggcaattgctggagaagattttgcaattgttgct

SEQ ID NO: 202431 - DNA, 97 bp, Homo sapiens
cagtactctatatgaacaatccgtctggatcacggatgtaggaagtggattatcattggcaatggcgttcattccttacgagtggctttactgcagt

SEQ ID NO: 202432 - DNA, 83 bp, Homo sapiens
gccatgccggcccggcggctgctgctgctgctgacgctgctgctgcccggcctcgggttaattggccttggtcctcacagctc

SEQ ID NO: 202433 - DNA, 90 bp, Homo sapiens
cggtgattgaggacaagaccatcgagctcatgcaggaacgaatgcaggaatttgggaactgagctgtgcaagtgctgaagaaggagattt

SEQ ID NO: 202434 - DNA, 90 bp, Homo sapiens
gaaagaaaccatgtgctgaaatgtttgacgacactgatggtttggacgaagttccggaaatggaattaccgagtcagatgagaaacacaa

SEQ ID NO: 202435 - DNA, 97 bp, Homo sapiens
cccccagaacgatctcaccttccttcgaattcgctccaagaaaaatgaaattatggttgcaccagcgagtgatagacagccaagcagagaaactgaa

SEQ ID NO: 202436 - DNA, 96 bp, Homo sapiens
gagcattcgaagtgacctcagcagggcatccagatatgaagagaaggctactaaagacttggaacgatacaatagtcaaatgaagagagccattga

SEQ ID NO: 202437 - DNA, 98 bp, Homo sapiens
cggcaaggtgctgctggacgacacggtgccgctgacagcagccatcgaggcgagccagagcctgcagtcccacacgacttaaaccattggatattgag

SEQ ID NO: 202438 - DNA, 51 bp, Homo sapiens
cccctggctcccagaggtgcaccaaacgttatcaatactctggctgaccat

SEQ ID NO: 202439 - DNA, 83 bp, Homo sapiens
ggacctgggaacctactgtggggccgcggccggaccgagcgcctcgacctcggtctgagggagtgcatccgccccaacccttt

SEQ ID NO: 202440 - DNA, 83 bp, Homo sapiens
cgattgggctgagcagaggacgacatgttgcttttcgtggagctgcagcaaaaaattattcctgatcaggaccaactgatggc

SEQ ID NO: 202441 - DNA, 75 bp, Homo sapiens
gccaagagtgcctgcgatggaaagtgccaagaccctctcagatgtccaacatcacagtcacatacagagatggcc

SEQ ID NO: 202442 - DNA, 80 bp, Homo sapiens
caaagaataaaaatagaagcaaattgggatctcttctattatagggccgtctacctggtgcggcaccgtgacacacggca

SEQ ID NO: 202443 - DNA, 117 bp, Homo sapiens
cgtcgctgtcgctgagagcctcacgagtcgaggtcctgcaggtggagctccggcagccgccctgcaggaacgaatgcaggaatttgggaactgagctgtgcaagtgctgaagaagga

SEQ ID NO: 202444 - DNA, 90 bp, Homo sapiens
tggaccttctggattacaggccaaattagcaagaccgcagctgaatgcacagctagaaggttggctttcacaagtacagtctacaaaaag

SEQ ID NO: 202445 - DNA, 100 bp, Homo sapiens
atcagttctacgagaccctccctgctgagatgcgcaaattcactccccagtacaaagattatccctggcgctggagccgggccgtccccatgaactccgc

SEQ ID NO: 202446 - DNA, 97 bp, Homo sapiens
taaagggacatcagtatatctggatcatcagatataagagttcggaccgcccagcacacaaggtcagcatgctgctcctctgtcacgctctcgctat

SEQ ID NO: 202447 - DNA, 99 bp, Homo sapiens
acaattctaagccaaggcagctgcggcaacgttgaggcagaatcaaaacctggggaaagaccttaggtattcagtgaagtacatgcgagaagccacgcc

SEQ ID NO: 202448 - DNA, 96 bp, Homo sapiens
cgggaggcggaggcgagggtgcgatggcgcggagcccgggacgcgcgtacgccctgctgcttctcctgctcggcttaggccataccaaccatgttc

SEQ ID NO: 202449 - DNA, 100 bp, Homo sapiens
ctccagagaagccgatccccatttttattgaaagatgtattgagtacattgaagccacagattttgttagtggagcactaaataaatttaaacctaacag

SEQ ID NO: 202450 - DNA, 100 bp, Homo sapiens
atgacccaagcattggtatctacggcctggacttctatgtggtgctgcagaagatgatcttgttttagaagtggttataatgattggaactgtatccatg

SEQ ID NO: 202451 - DNA, 90 bp, Homo sapiens
cagtactgtgggtttgtctaatacagattggaaaactgcacagtgaattggatatggtgaaaatgaatgtgcgagtgatgtccgccatat

SEQ ID NO: 202452 - DNA, 100 bp, Homo sapiens
gcataaggaactctatcccaggaatacagctttgcattaggttcagccctatgtagctacaacctaaagccttctgaatacactacatctccaaaatctt

SEQ ID NO: 202453 - DNA, 50 bp, Homo sapiens
ggcgttcgctgcgcgtgcacattccgagtctcactgtcgcccaggctgca

SEQ ID NO: 202454 - DNA, 82 bp, Homo sapiens
tggcggagaaggatgacaccggagtttgacgaagaggtggtttttgagaactgttgggaatcaaagagctttccaaacctgc

SEQ ID NO: 202455 - DNA, 50 bp, Homo sapiens
aattactgtctcaagtgatacggtgtttaagatagaagtgctaatgaatg

SEQ ID NO: 202456 - DNA, 74 bp, Homo sapiens
aggtggtcaactttgggcctggtcccgccaagctgccgcactcaagggaaaccaaagggcagtttctcattgac

SEQ ID NO: 202457 - DNA, 90 bp, Homo sapiens
atttcaagatgatatttattcaccaaacaagcaaagccttctagacaagctcagtggaatctgaagggcccaccccatggaggaatgctg

SEQ ID NO: 202458 - DNA, 100 bp, Homo sapiens
aggagcggcgtcttctcgcgcggatggtgaagctgaatttggtacgctggaccctcggacagactttggcctgagcaaagaggccattgaccacgagaag

SEQ ID NO: 202459 - DNA, 83 bp, Homo sapiens
tgccctggagacccgcagcctcaaggatcacaaagcggatgcagtggtgcagtatgacgtggagctgattgcactaatccgag

SEQ ID NO: 202460 - DNA, 80 bp, Homo sapiens
actccgtccactaacaaaagatggctacgagggtaacatgttcggtgctggagaatctggtaaaagcaccattgtgaagc

SEQ ID NO: 202461 - DNA, 74 bp, Homo sapiens
cgaagatccggactctgggtgttttgctaccgtgaccgtttagcattatgatcctggacttgttgtggtgatgg

SEQ ID NO: 202462 - DNA, 102 bp, Homo sapiens
agcccgggaagagatgcagcgctatgcggaggatgttggggccgtcaatacatccagcagtggtcattcgacaacgaaagtcataccgtagaaaagatggcg

SEQ ID NO: 202463 - DNA, 98 bp, Homo sapiens
tgggtgctcgccctggtcttcgggctgtcgctcgtctacttcctcagcagcaccttcaagcaggccccagaggtgatccgaatgcaggataacaaccc

SEQ ID NO: 202464 - DNA, 100 bp, Homo sapiens
gggatgcctgtaccatgatgtgatgctggagaccttgacacttatatcctccctggaaatctcctgcaaagaagctgagccatgcaattagtaaatcttt

SEQ ID NO: 202465 - DNA, 100 bp, Homo sapiens
ggctgctcatctctgtgatcaggataagttctgaacgtcgaaaagaaaagtctcgagatgcagccagatctcggcgaagtaaagaatctgaagtttttta

SEQ ID NO: 202466 - DNA, 100 bp, Homo sapiens
gtggccttttctaccctggaaggaaggcccagcgcctataactttgacaatagccctgtgctgcagcttcctctgaagacgggccagttccttgctgtct

SEQ ID NO: 202467 - DNA, 51 bp, Homo sapiens
gcaatacattaaaaactactcatgtgatatgcacccaatgtccagggagcg

SEQ ID NO: 202468 - DNA, 90 bp, Homo sapiens
ctttccggatcaatccagatggcagccagtcagtggtggagaacaatatgatgcgtttgtgaagtttacgcatgatcaaataatgcgacg

SEQ ID NO: 202469 - DNA, 51 bp, Homo sapiens
tcacttttgagtgcaactgccttccagcacacagagaccggtgaggaggtg

SEQ ID NO: 202470 - DNA, 98 bp, Homo sapiens
tttgaacatgctggtgccgctagccaagctgtcctgcctggttggttgaatctggcgatgtggaacccatggatatggagggctgactatatacacca

SEQ ID NO: 202471 - DNA, 100 bp, Homo sapiens
ggtggctgagtctgcggaggaggagctgcagcaagcgggagaccaggagctcctccaccaggccaaagacttcggcagtacaaaatgaggccaagacacc

SEQ ID NO: 202472 - DNA, 100 bp, Homo sapiens
cagaaacctgttttttttctggagctgatcttagaaacctctgcacagaatgttttggagagccatttccagtctcagaaggattgctatgaaaaggaga

SEQ ID NO: 202473 - DNA, 100 bp, Homo sapiens
gagatgatggacccagagctagactacaccctcatgagggtctgcaagcagatgataaaggtggacctgggctcctcgaaggaggtgacaggcatcatca

SEQ ID NO: 202474 - DNA, 100 bp, Homo sapiens
cagagttcaaggaggccttccagctgtttgaccgaacaggagtattttatacagaaatcttgtgaaaccactgcccaaccagagcaatgattgttcaaag

SEQ ID NO: 202475 - DNA, 74 bp, Homo sapiens
gggcttggagttcgcctcagacgcggtggagccgccggagtctgagaaggtacagcctgtacacccgcacctgg

SEQ ID NO: 202476 - DNA, 75 bp, Homo sapiens
ttacagcagccaacctatgttgccctgagttacataaatagacattcagtcccctgaagctgaatatgtagattt

SEQ ID NO: 202477 - DNA, 98 bp, Homo sapiens
ctgctctgtgcgcgcctccatctgggccatggatggggtgcaacaccggaggatttcagcaacctcccacctgaacaaagaaggaaaaagctgcagca

SEQ ID NO: 202478 - DNA, 75 bp, Homo sapiens
cgcatccgtggggagacgctgggcctcattggctttgcagattattcctgcggaggcttcctatcccaaccatca

SEQ ID NO: 202479 - DNA, 75 bp, Homo sapiens
tccagaagaggatgaacccacgcttgaggcctcttggcctcacatacaggccctggagagtgaatttgtttcctg

SEQ ID NO: 202480 - DNA, 116 bp, Homo sapiens
ccagccgcaccatgccgctcctaagcctgcacagccgcggcggcagcagcagtgagagctggtcagtgagaaggtcggaggggccgaggggaccaagctggatgatgacttcaaag

SEQ ID NO: 202481 - DNA, 75 bp, Homo sapiens
cgtctatgagggcgtggccattggtggggacaggtgctggaaacgtgcgtagcaacagtaggccgagtatccaac

SEQ ID NO: 202482 - DNA, 109 bp, Homo sapiens
aggccctcgaggaccagtgggaattggagtacaaggtccaaaggtgaccaagaatatggcccaggtgaccaaagccctggacaaggccctgagcaccatggacctgcag

SEQ ID NO: 202483 - DNA, 100 bp, Homo sapiens
gcgctgagtcctgtgcaacatggaaagtgcagaaagaggagaaactgattggattgatgaacaatgaagcagctcaggccctgaagaggaaagtgaggat

SEQ ID NO: 202484 - DNA, 100 bp, Homo sapiens
cgtgggtgaagataggatcaagatggccatgtggcaggatggcagctgaatggaagtgatattgatatgagtatggaacatcgttataagttgaatggag

SEQ ID NO: 202485 - DNA, 96 bp, Homo sapiens
tggatcctctggccagctgactgcacttcttttttgagaaaggaaggaatatatcctgactgattcagaaaaatatggctcaggagactaaccaga

SEQ ID NO: 202486 - DNA, 80 bp, Homo sapiens
acatggcccggaggcagcagaagatggcccctgagttctgcagcctcgaggaaggcctgccctatctggacatggtgatt

SEQ ID NO: 202487 - DNA, 51 bp, Homo sapiens
gtgatcgcagaagcctacgctaccaaagagtacccaagtggccttggacca

SEQ ID NO: 202488 - DNA, 82 bp, Homo sapiens
caacgacgttccatctgtggaaggacctaccaaccagagaagcgtctgcaccgtttgaacctgctgcagtctcatccccagg

SEQ ID NO: 202489 - DNA, 100 bp, Homo sapiens
ttcggcaccgtccgcgactgctatgagggatgatcctttcaaaaataaagccttgttatttagcaacaacacgcaagagttgcatccggatcctttccag

SEQ ID NO: 202490 - DNA, 127 bp, Homo sapiens
cagcaaggtgtcggtgttccacgtgaagctcaccgacagtgccctgagggccttcgagagctaccgcgccagacaggaaggagtcaagactgagaacaacgatcatattaatttgaaggtggcgggg

SEQ ID NO: 202491 - DNA, 103 bp, Homo sapiens
ttcaaaatgaactatatgcctggcaccgccagcctcatcgaggacattgacagtaccaggatcatctatgaccggaaattcctgatggagtgtcggaactcac

SEQ ID NO: 202492 - DNA, 50 bp, Homo sapiens
actggaccaccagaggctcagttcaaggttacagagaagatcccagtaag

SEQ ID NO: 202493 - DNA, 101 bp, Homo sapiens
ccggccgtacgcggtgctgcgagggcagaacctggtgcagtcattggagaaatcgatgaagaaacagattctgcgcttgatttggggaatattcgagcaga

SEQ ID NO: 202494 - DNA, 100 bp, Homo sapiens
gtcatcgagtactcgttggccctggtcaccgtgctgaacgagggtgaccatcgggatgaggaggaagagacccacatgaagaagtcagagtcggaggtgg

SEQ ID NO: 202495 - DNA, 100 bp, Homo sapiens
aaagaattagcagattggccgatgattcagggtaaaccagacttgaatacaacattgccaattagacaaacagcatcaattttcaaacaaccggtaacca

SEQ ID NO: 202496 - DNA, 83 bp, Homo sapiens
gggtgactcagagagggaagagattcagccagcacactcctcgcgagcaagaccctgtattcagtggatcagctggcaccacc

SEQ ID NO: 202497 - DNA, 100 bp, Homo sapiens
tcggtgcagctgccagatccgctgatctagtgcttctcgaaaaaaaccttcaggcggcccatgggctgatttggagcaatataaaaaagctttaactgat

SEQ ID NO: 202498 - DNA, 82 bp, Homo sapiens
gccaaacatcaagcagaatgtgatttgcttgaagatatgagagccatcatcaaccactttaaccccaaaattgagtcctacg

SEQ ID NO: 202499 - DNA, 75 bp, Homo sapiens
ggagggttctgctgcttcgaaagctgtgcaaagagccgtctcactcttctctctgaacgacccggccctgagccc

SEQ ID NO: 202500 - DNA, 100 bp, Homo sapiens
tggtcaaatttcgcgaaggtgaacgcccgtctctgagactgcagttgaagattgttgatcgaatcgacaatgatggggatggctttgtcactactgagga

SEQ ID NO: 202501 - DNA, 106 bp, Homo sapiens
caacaagaatacctgccctccttgcaagtagctccagaaataattcagtataacaagaggattgcctgatccagccaagatgcagagcacttctaatcatctgtgg

SEQ ID NO: 202502 - DNA, 50 bp, Homo sapiens
ccgagagcgtggagcgggctgggccagtagagatggggtttcgccgtgtt

SEQ ID NO: 202503 - DNA, 83 bp, Homo sapiens
gcctgcacagccgcggcggcagcagcagtgagaggtggccatggtggaggtgcagctggagagtgaccacgagtacccaccag

SEQ ID NO: 202504 - DNA, 50 bp, Homo sapiens
aagaaaatcttcgaagacttttcacttcgcaaacctgggtatacttcatg

SEQ ID NO: 202505 - DNA, 95 bp, Homo sapiens
agaagtccgcctggtgaagctgccgttctttaatatgctggatgagctgctgaagcccaccgaattaggcataagatgcacatttttctgctctg

SEQ ID NO: 202506 - DNA, 100 bp, Homo sapiens
tccttctcccggcgcctcaagcggaagatggaacttgctaaggaagaaaagtgtgaatttctgccattcctgtccccacggaaggttatagtaaaaggtg

SEQ ID NO: 202507 - DNA, 83 bp, Homo sapiens
ccgacaagaggctgagtgaaggccgggggctgccccctccccccaggagcggtggtgccccccccgggcacggggccatgtac

SEQ ID NO: 202508 - DNA, 75 bp, Homo sapiens
gagaaggatcgccaggtgctggaggacttcccaacggcaaatcctgatcctaactgttgtcttggagtatttggg

SEQ ID NO: 202509 - DNA, 100 bp, Homo sapiens
cgatgaagtgcagaggtttttttctgcgcatttgtagccatgaagtgccatcttgcccaatatgcctctatccacctactgcagccaagataacccgttg

SEQ ID NO: 202510 - DNA, 99 bp, Homo sapiens
ttacatcagattattgggagcctatttgttcatcatttctcgtgttcaagcaaaccactagtgatggaggggaagaagaggcatctccatcgttttacc

SEQ ID NO: 202511 - DNA, 98 bp, Homo sapiens
aaatcgcagaaagtaccaggcactaggtcggcgctgccgggagatcgagcaggacctgaaggagaagaaggagaaggtggaggagaaggcaagccgga

SEQ ID NO: 202512 - DNA, 74 bp, Homo sapiens
caagctttagagcctggctactcacagttgaagcctgattgcaggcaattcttcagttagatagtcctgaatct

SEQ ID NO: 202513 - DNA, 100 bp, Homo sapiens
cacctacatcaaaccctggatcttttcttgcagcctggcatcctcgctacaacctcattgttgtgggccgatacccagatcctaatttcaaaagttgtac

SEQ ID NO: 202514 - DNA, 100 bp, Homo sapiens
gggcaggccagctgtacctggcctggagctccaggtctagatgttgatggaatatatcgagttagtggcaatctggcaacaatacagaagttaagattta

SEQ ID NO: 202515 - DNA, 100 bp, Homo sapiens
ccaaatcacaagcttctttgcagcttccagtcaggtcaattcagtgaagatatgatacccacagtgggcttcaacatgaggaaggtaactaaaggtaacg

SEQ ID NO: 202516 - DNA, 83 bp, Homo sapiens
catgaccgaggagagctctgacgttcccagggagttgataggtgttggagagcacaatggctgaacaagtccttcctcaggct

SEQ ID NO: 202517 - DNA, 50 bp, Homo sapiens
ggaacgcctagctcttgtcacaggatatgaattgtctcccacggcagcag

SEQ ID NO: 202518 - DNA, 101 bp, Homo sapiens
ggccggctgaccaggaacctgggcgagcagcggcgggggcccgagggggggatatgagactttctactcggaatatcctgagtgttgcgtggatgtaaaac

SEQ ID NO: 202519 - DNA, 74 bp, Homo sapiens
tgagctgcagctgaatcacacaggttaaaaataagaagttggttgagctgctgagaaggaaagttcgtctcgcc

SEQ ID NO: 202520 - DNA, 75 bp, Homo sapiens
accgccggggacgaaacaataaagaccggaagctgagtttttatccgactttttttatgaagacatggagtcctt

SEQ ID NO: 202521 - DNA, 100 bp, Homo sapiens
cggagaccccgaaaacggaagcgcagggagaaggaagaggtgtttgaaaagttcatctccgcaatacctacccgatccctgaagttcctgaaggaggctg

SEQ ID NO: 202522 - DNA, 100 bp, Homo sapiens
gccggcagggcagccgggggacagctgtagtgaagcactattcctgatcagagaactccagttgcttcaacacacagtatcagtagtgcagccaccccag

SEQ ID NO: 202523 - DNA, 83 bp, Homo sapiens
cacagaggcaacaaatggcaactttctgagtgttgacagctcttctaccacaagcagtgcttctccaatgcccaacagttatg

SEQ ID NO: 202524 - DNA, 78 bp, Homo sapiens
gagcaccgtctcccagtacgaccgggacaagtactggaaccgctttcgagacgaattgaaagatgttggccatcgtga

SEQ ID NO: 202525 - DNA, 96 bp, Homo sapiens
atgcgtgcccctcacctggcgctgcgacagggacttggactgcagcgatggcagcgatgaggaggagtgcaaattctagcaaattggttaaaagtc

SEQ ID NO: 202526 - DNA, 83 bp, Homo sapiens
gtgggtgcttcccaaaattactataaagctctttgctccagatcctgaaaataaaggcacagtgacagacatcacacctccag

SEQ ID NO: 202527 - DNA, 88 bp, Homo sapiens
tctgtccacagattctgaattgcgagaaaattccagtacgaagatgactcaagaccggcctctgcttgccgtgcaggaggcgctgaag

SEQ ID NO: 202528 - DNA, 75 bp, Homo sapiens
cgcacgagcgaggacccccaccagccagcgctcccgtgggtggaaagatctcggctcaccaaattccacaacctg

SEQ ID NO: 202529 - DNA, 83 bp, Homo sapiens
cctggcacccgaatccggcctgccggggggatatgagactttctactcggaatatcctgagtgttgcgtggatgtaaaaccca

SEQ ID NO: 202530 - DNA, 75 bp, Homo sapiens
cccagatatctttagtggatgaagcatcaggagaggtttcatatacactggagaagtcgtacatcgaatgctaac

SEQ ID NO: 202531 - DNA, 100 bp, Homo sapiens
cggtgctgcagaaccagatccgggagcacgtcatcgccatcgaagatgccatggacaatattaccaggcagaaccaattctacgatacccaagtcatcaa

SEQ ID NO: 202532 - DNA, 101 bp, Homo sapiens
cctcagatgaacagaaacggagccaacaagtcccaaatttggaaaagctgactcatatgaaaagctggaaaaactaggggaaggatcttatgctacagtat

SEQ ID NO: 202533 - DNA, 74 bp, Homo sapiens
catccaggagagcccatggcaggaccggcacggcgaaaccttcaccttcagaatcctcactatggatgggctca

SEQ ID NO: 202534 - DNA, 97 bp, Homo sapiens
cattaacagcctgttacgagaatggaaaggcatatagcactttctacattgtgggtttaatattatcaatgcagataccttttgtgggattccagcc

SEQ ID NO: 202535 - DNA, 50 bp, Homo sapiens
cgccgagctggacccggaccggttttgggaattgcgcagtacctggccac

SEQ ID NO: 202536 - DNA, 100 bp, Homo sapiens
aaagaattactgatgtccttgatcaaaaaaattatgtggaagaacttaaccggcacttgaggaactttatattgctgttggaatatctggagccatccaa

SEQ ID NO: 202537 - DNA, 74 bp, Homo sapiens
tataaatcccagtagcagtctgctggccagccaagatgagacaaagttaaacacagtgggaatatcacttttga

SEQ ID NO: 202538 - DNA, 90 bp, Homo sapiens
catgttcctcgtccactacgggcatcgttgtgggatccaacgaagaataaaaagttgcaagaacttttcttgcaagaggtacggatggga

SEQ ID NO: 202539 - DNA, 100 bp, Homo sapiens
ctgagttcctgcgtacctatgccagcacagagcaggagcaggatgcagaggagaacggctgagcacagggttgctccaggtgggcccaaatgctgaagag

SEQ ID NO: 202540 - DNA, 75 bp, Homo sapiens
gcaacgcggaggaaacgggagtgaacggagagcgtagtgaccatcataaagatccccagcaggccctcaaggagc

SEQ ID NO: 202541 - DNA, 50 bp, Homo sapiens
ctttgaactactgccggagcttctgccagtattctaccttgtaaatactg

SEQ ID NO: 202542 - DNA, 95 bp, Homo sapiens
ttatcgaacagagccgggagttcaagaagaacactccagaggattcttgggatgagcttcttattggtgacgtggaactgaaaagggtgatggct

SEQ ID NO: 202543 - DNA, 100 bp, Homo sapiens
ctgccgcctggcacgggccgccgcatccacagctaccgaggggtatgatatcagctttctgatcaccaacttccacacagagcagatgtacaaacacaag

SEQ ID NO: 202544 - DNA, 90 bp, Homo sapiens
ctgaaggcaacctgtatgccagcctggaagcacgaatggttggaaaggagaaataggcgagggcctgtgttccccctgcagtggtttgga

SEQ ID NO: 202545 - DNA, 80 bp, Homo sapiens
cccctcggcctcgcggcgacggcggcggtggcggcttggacgactcggagagccgagacaagaggagcagcagcggcacc

SEQ ID NO: 202546 - DNA, 75 bp, Homo sapiens
ccgccagcagcactgtggaggccgtcctcgggagtgcatccgccccaacccttttccccctcgtctcctgtgaga

SEQ ID NO: 202547 - DNA, 101 bp, Homo sapiens
ttcaagatcatccatatcagcaagaagcaccgcacgtggttcttctcggcctcctccgaggaggagcgcaagagaggcgtttccatcaaccagttttgcaa

SEQ ID NO: 202548 - DNA, 96 bp, Homo sapiens
cctggttgatgatcgttgtgttgtacagccagaaaccggggaccttaacaatccacctaagaaattcagaggtgtagaagacatcgtggccataat

SEQ ID NO: 202549 - DNA, 80 bp, Homo sapiens
gtatgtgtagaaagtgaaatcagaggagatgtaactatcggtatatgtctcgagtccacggtatgcaccctaaagagacc

SEQ ID NO: 202550 - DNA, 83 bp, Homo sapiens
cgtcgacatgagtgatgtggaggaaaacaacttcgagggcagagacaggtcccagaagaggaggccagtcacaatggacagcg

SEQ ID NO: 202551 - DNA, 95 bp, Homo sapiens
cttccgcatgtttcccacccagggcttcacggagattgtcttctgtgctgtcacctcgaatgagcaggtcaagaatcatgtccctaaggaggaag

SEQ ID NO: 202552 - DNA, 51 bp, Homo sapiens
caaaattatccgaaaccgcctcactgggatgatgatgctgaagctatcctt

SEQ ID NO: 202553 - DNA, 76 bp, Homo sapiens
tgtcccaagcaggagaacattgcaggtgtcaggcccttgaaaggaaaaattctgcaattccatcagagttgaatga

SEQ ID NO: 202554 - DNA, 50 bp, Homo sapiens
ggctgtaaaacctggcactctgcttggtagagacggggtttcgccgtgtt

SEQ ID NO: 202555 - DNA, 80 bp, Homo sapiens
acctgtcaaggccccaggaacattccacatggtacatgtccagggccgccgggtccccttccccattgccagcccctgac

SEQ ID NO: 202556 - DNA, 98 bp, Homo sapiens
tgctgctgggattcgcgctgctgggcacccacggagcctccggggctgagctcccagctcctccagcagccgacaggaggcccgtcaagatgcaggca

SEQ ID NO: 202557 - DNA, 75 bp, Homo sapiens
ctaacatgtcagcgttattgtaatgcaagtctgaactccatactctttgcgattaacatcgacaacaaggatttg

SEQ ID NO: 202558 - DNA, 98 bp, Homo sapiens
ggggagccagaagatggaggaagctgtaccgtgccaacggccacctcttccaagccaagcgctttaacagggtccctcaaagttctggaaccctggct

SEQ ID NO: 202559 - DNA, 100 bp, Homo sapiens
gacgtggggccgcgctacaccaacctctcgtacatcggcgagggcgcctacggcatggtgtgtgcctgatttgagatggggtcccaggtctcggtggaat

SEQ ID NO: 202560 - DNA, 75 bp, Homo sapiens
cgctgggcaggggtaccttcgggaatctgacacagcattgttggttttgccatgtactattttacctatgacccg

SEQ ID NO: 202561 - DNA, 75 bp, Homo sapiens
aaaacgagaggctcaccgcagtcgtgcaggatctgaaggaggcactactgcagtcttcagttaagcaacaagtag

SEQ ID NO: 202562 - DNA, 98 bp, Homo sapiens
ctaccccctggactccctggagaagcagatggaaaagaaaccagcctggacaccaagtctgtgtcagaaggccacctcaagaggaacatcgtggtgaa

SEQ ID NO: 202563 - DNA, 74 bp, Homo sapiens
ggatttttgcatgagacgcttctggacagatctcgaggaatttcgaagctacctggagaagcgttttgactttg

SEQ ID NO: 202564 - DNA, 104 bp, Homo sapiens
cagagttcaaggaggccttccagctgtttgaccgaacagaatgccagctgatgaagaccgagaggccgcgacccaacacctttgtcatacgctgcctgcagtgg

SEQ ID NO: 202565 - DNA, 50 bp, Homo sapiens
gtcagaacttcaccacacttgaagctgccaaaactggacaagccaaggca

SEQ ID NO: 202566 - DNA, 74 bp, Homo sapiens
atccaaagcatgtctgcaacccagccattttcagagctccttaataagcatttatagtcagtttttggcagcaa

SEQ ID NO: 202567 - DNA, 75 bp, Homo sapiens
ggggctggagaagagtaaggggaccctggactttggtgctgacgcaggtgaacaacatgcccatgatggccctgg

SEQ ID NO: 202568 - DNA, 100 bp, Homo sapiens
caaatatgtggaagcacaatataaagtttcatcaacttccataccgggagatggagcatttgagacaggttctgtacagagtaatgagatgtgtgacggc

SEQ ID NO: 202569 - DNA, 100 bp, Homo sapiens
acagttcctaccttatgagctcggttttcttatgcttataagagtggaacagtcccggacatgatggcacatggaatgacaatcagctacaagaaatggc

SEQ ID NO: 202570 - DNA, 75 bp, Homo sapiens
ttggtttaatatctgattgggacaacattcagacccatttccagtcatgatggaacatgacaaggaattcttcca

SEQ ID NO: 202571 - DNA, 75 bp, Homo sapiens
cgcagctccggccgcctggctccccatactagtcgccggtatggagagtgcaatcacgctgtggcagttcctgtt

SEQ ID NO: 202572 - DNA, 74 bp, Homo sapiens
ataacgcggccttgggctctgaaagtcctacctccatctccgtgggccccagcaccagccgacggcccgcagcc

SEQ ID NO: 202573 - DNA, 100 bp, Homo sapiens
taaaaacagaacaggaggtggtagagggcatggatatctctactcgctccaaagaaactggcgatggaatatgagaggagccctctggaaagaaaaggac

SEQ ID NO: 202574 - DNA, 75 bp, Homo sapiens
gaagaagctaactattggaaagatctggcgatgacctacaaacagaggtcaagagcaatctgaatccaaatgcaa

SEQ ID NO: 202575 - DNA, 75 bp, Homo sapiens
ctgtgacctgtgaacagggctgtggaaaatgtggacacagacttgccaggcagcctggggcagagtgaagagaag

SEQ ID NO: 202576 - DNA, 101 bp, Homo sapiens
gtccttgttcctatggcctaatgaacaacttccagggctatgtttgaagtaaacatgaaagaaagagatgatggaagtgttaccattactaatttgtcctc

SEQ ID NO: 202577 - DNA, 82 bp, Homo sapiens
gtttgctgcggcaaggacgagccggggcgctgaagctaaaagatggcggcaaggcagcccaggcaaatgtaagaataggcga

SEQ ID NO: 202578 - DNA, 83 bp, Homo sapiens
caagagggtgttcgactgctagagccgagcgaagcaaggatatggccctgaagccacatgagcggaaggagaagtgggagcgt

SEQ ID NO: 202579 - DNA, 100 bp, Homo sapiens
aaaaggcaaactcttcacctgtctcctgggctacctgaccaagtacgactgctccagtgcggacatcaaccccataggcgggatcagcaagacggacctc

SEQ ID NO: 202580 - DNA, 80 bp, Homo sapiens
agactatcgctaatgagtatagcgaccgctgcacgcctttggtgccctggttgtcagatgttggaaagcagtaggacgga

SEQ ID NO: 202581 - DNA, 78 bp, Homo sapiens
aatgcagaaacgtaaagaaatgcaattgagaaatccaggataaattggatcaaatggtattcttctgggaggacatca

SEQ ID NO: 202582 - DNA, 100 bp, Homo sapiens
gcgcccaaactgatggaggaaacctctgtctttgagtgccctgggacacctgaggcagccataacatcattgacatattctacaggagagagttaaaaag

SEQ ID NO: 202583 - DNA, 100 bp, Homo sapiens
tgttactccattgctgaggagtgaaaacttctgtgaagctatcagtaaacttcaagaaaattacattgcagcagaagaacttcagtctattttgccttca

SEQ ID NO: 202584 - DNA, 82 bp, Homo sapiens
ctccgccgccaagagtgagcgagcggacccgcgatgggcttccagctggtctttttaccctttgctgatgataaaaggaaga

SEQ ID NO: 202585 - DNA, 74 bp, Homo sapiens
ggcatgcctgcagtactcttggcccatggacctgaaggagaagcacctgtctcagatgcaaacatcagtgggaa

SEQ ID NO: 202586 - DNA, 83 bp, Homo sapiens
ctccgcaagtcccccccggagaaaaagttgaagcgttatatccaagagttgaagattggctcctcatgtcctcgcctctgcca

SEQ ID NO: 202587 - DNA, 121 bp, Homo sapiens
cccggtcctgcgcctcgggagtcggcgtccaggctcggagcgcgacacggagactaggtggcaggaagtggagagactgattttggacctcagctcaagaacctcaataagaagctcttca

SEQ ID NO: 202588 - DNA, 98 bp, Homo sapiens
atcaaccaccaggccctggagcagctgcaaaatggtgatttctttgctaacatggtagtagatgctgtacttgctattaaatacacagacataagagg

SEQ ID NO: 202589 - DNA, 75 bp, Homo sapiens
caccctgcagagactcaacgctggccagtggttcctgaagctggagcaggctctgcggctggagcctggggagct

SEQ ID NO: 202590 - DNA, 90 bp, Homo sapiens
gaatatactcatcatcagtctatttagaagaggtggtgaagtgggctctggagaagctggagctgaccaagtacgcagacaagccggctg

SEQ ID NO: 202591 - DNA, 100 bp, Homo sapiens
acttggatatgctgacgactgtgcaggaagaaaacgagccagtgatttacaatagagcaagaatgcagaggctgtgcattttttctgcaattacgaagag

SEQ ID NO: 202592 - DNA, 75 bp, Homo sapiens
ccaagatgaggaggacggaagtgtggtgaaggtggacacagaagccgcagcattgttggaaactgttactacatt

SEQ ID NO: 202593 - DNA, 82 bp, Homo sapiens
ggcaactgcagcccgaggacaagcggctataacgaaggaggcccaacttcattcaataaggagcctgacggatttatcccag

SEQ ID NO: 202594 - DNA, 124 bp, Homo sapiens
accaagtcctctccatctgatcccatgaccacctccagagctaatcaggtgaccaagaatatggcccaggtgaccaaagccctggacaaggccctgagcaccatggacctgcagaaggtctcct

SEQ ID NO: 202595 - DNA, 100 bp, Homo sapiens
ccgctcagaagaaaatgcaaaaaaactaatggaattagcctgcaacatgaagattgctaagaagcctcgaacgccaacctctggtccagtaatcacgaag

SEQ ID NO: 202596 - DNA, 75 bp, Homo sapiens
cgatgatgaaattgccaaatatgatggcattgaagttgatatcgatgtggagcacggagggaaaagaagccgcct

SEQ ID NO: 202597 - DNA, 75 bp, Homo sapiens
aagaaaagcctctgggagcagaagggaggctccaagacctcatcaacaattaagaaacgagaaggaatcctccag

SEQ ID NO: 202598 - DNA, 101 bp, Homo sapiens
caggtattggttcgtttacaattattgatggaaatcaggtcagcggagaagatgctggaaacaattcacagaaggctccttattggatgggctgtactgga

SEQ ID NO: 202599 - DNA, 104 bp, Homo sapiens
caaaattgaaaaaatggttgacctcacccagattagtgatgatgaaccaggttatgaccttgatttattttgcatacctaatcattatgctgaggatttggaaa

SEQ ID NO: 202600 - DNA, 83 bp, Homo sapiens
cgccccgcgagcacagagcctcgcctttgccgatccgccgcccgtccacacccgccgccagtgagacggtttaagcggaagca

SEQ ID NO: 202601 - DNA, 117 bp, Homo sapiens
atggctcacaacaagatcccgccgcggtggctgaactgtccccggcgcggccagccggtggcagatttggagcaagaggtggtggtggccttcccccgaagaaatttggtaatcctg

SEQ ID NO: 202602 - DNA, 100 bp, Homo sapiens
cgccttgtcactggagtgcaagaagaaattcccacctgtcaaagagaccaagatcactccatggatgaaatgacagctgtggtgaaaattgaaaaaggag

SEQ ID NO: 202603 - DNA, 100 bp, Homo sapiens
ttgtggccctgggctttaccatctttgtggctgtgcttgccaggcctggctccagtcatactccctgtcacaaactccagctgaactaacttggaggagg

SEQ ID NO: 202604 - DNA, 105 bp, Homo sapiens
atacagattctataagcagttaggatctggagagttgtctctgtgggaagtttgtcctccgtccattgcgaccatgccgcagatactctacttcaggcagctctg

SEQ ID NO: 202605 - DNA, 100 bp, Homo sapiens
tgaagatgaacccccagcactgccaccaaagatcggaactccaacaagaccctgccctctaccacctggagtgtatatgacaggaaaagaacttcgccag

SEQ ID NO: 202606 - DNA, 90 bp, Homo sapiens
aaccagtaagttgatccatccagatgaggatatatccctgggcaattgaaggaacagactaaaaatcgtgtcctggaaggaaactacagg

SEQ ID NO: 202607 - DNA, 100 bp, Homo sapiens
cgggcagctgggctgcagtgaccccgctttcctcacgcccaggacaagatcgcagaggaaggtgggcggcgggagtgcccagccgtgtgacagcatcgtt

SEQ ID NO: 202608 - DNA, 75 bp, Homo sapiens
gcggcggcgcgcagcgtgtcaggcggagagacccgccgccaggaatgacgggacagagtttggcggctccattta

SEQ ID NO: 202609 - DNA, 98 bp, Homo sapiens
gagaacacgctgcttcacctcttcgccggcggttaacaagcacaagccctggctggagcccacctaccacggcatagtcacagagaacgacaacaccg

SEQ ID NO: 202610 - DNA, 83 bp, Homo sapiens
agagaggaaagcgactcaagttccgggcccacgacgcctgctccggccgagctgtttttggaaggaagaaagatggaaagcgg

SEQ ID NO: 202611 - DNA, 100 bp, Homo sapiens
tcaccggcccgtggccatcggcagctgcggccacactgtactaatggtcacttgatgtgcgctggctgttttatccacctactagcagatgcccggctga

SEQ ID NO: 202612 - DNA, 75 bp, Homo sapiens
cgctgccagcatcgccgccgccagcaaaatgatgcttcaacacccaggccaggtctctgcctcggaagtgagtgc

SEQ ID NO: 202613 - DNA, 100 bp, Homo sapiens
gctgcaacagggcacggcgtggaggaggaaccagaccgcggccagagcgttcaggagcttgtgcagtggaggggtcaaagaaaactgatgttgaggagag

SEQ ID NO: 202614 - DNA, 100 bp, Homo sapiens
gttggtgacttcagaggcttctataggcagctcacaagtgatgggcagctcagatggagacattttaaatccaaaggatgtgattagtgtccagctggaa

SEQ ID NO: 202615 - DNA, 98 bp, Homo sapiens
agctaatcctggcgttccaccagcaaccatgagtggttccatgatgggaagtgacatggtttcaagacaacagatgaattgtgaaagagagcagctaa

SEQ ID NO: 202616 - DNA, 100 bp, Homo sapiens
cgctggcgcgcagcctcagctagattcccagaaaatctaagctggcagttcataggaatatcagagacgacgaaggcttcattatcaggcattttgcggg

SEQ ID NO: 202617 - DNA, 100 bp, Homo sapiens
gggtgcagctccaacaccacagcaagcaacaaaggagagagcgggaagctagaaggcagcaggaacgtgaacagcgaaggagagaacaagaagaaaagag

SEQ ID NO: 202618 - DNA, 101 bp, Homo sapiens
cctgctgggcgggaaggcggcgccccggccgaggtggcggcggctcctcagtgcaagaagaaacacacgctgctgtgccccgactttgcccgcaggggggc

SEQ ID NO: 202619 - DNA, 83 bp, Homo sapiens
agtatctatgcctatgataactttggcgtgctgggcctggacctctggcaggtgcaggtgatggtcctaccagtgtgtctgtt

SEQ ID NO: 202620 - DNA, 98 bp, Homo sapiens
tctacgctactgccatgataataacataattcacagggatgtgaagcccaaagagtcgattgatccaattaaagaaagagaagctggagtatactcca

SEQ ID NO: 202621 - DNA, 101 bp, Homo sapiens
ggggggagcgcggggcgacgctggctgcagggacccggtgacagcgtgagaggttatagaaacattatcacgactttctcgaacacctatagcattggcca

SEQ ID NO: 202622 - DNA, 126 bp, Homo sapiens
ggagaaggacttcagcagcatgaagaagtactgccaagtcatccgtgtcattgcccacacccaggtgtgcctaccgcatgttgccgctgctgtttctgctgggacgtctgactccagttccttctc

SEQ ID NO: 202623 - DNA, 89 bp, Homo sapiens
ggaaagtcggccaagaaagacaaagacccagtgaacaaatccgggggcaaggccaaaaagaaggaaagaccacagcaagattctttcat

SEQ ID NO: 202624 - DNA, 76 bp, Homo sapiens
taggaagacccacgtccacacctactcctcctcaggatttctctctgatcaaacggacagttcaggactcagaatc

SEQ ID NO: 202625 - DNA, 75 bp, Homo sapiens
tcaccgccatcattggacccaatggctctgggggtgatcgctgagctgaaggtgcgcagggacccccaggtgagc

SEQ ID NO: 202626 - DNA, 75 bp, Homo sapiens
ggaagcagccgatccagcctgcggagcctgtggggcagatcaggaaacagagctcagtgcagcccactaaattgc

SEQ ID NO: 202627 - DNA, 101 bp, Homo sapiens
tcttaatgcttttcggactcctgatggcatgcctgtaaagaacttgcagttgaaggagtataacacagaattcctagaggacctgtgcaacaacctcttga

SEQ ID NO: 202628 - DNA, 82 bp, Homo sapiens
agacctggcaaatgacatcatgacactggtggcctgtgagtacggcatggtgcacgtggtctcccaggccgggggccccgaa

SEQ ID NO: 202629 - DNA, 145 bp, Homo sapiens
aaagctcaaagaactaatttttgaagagactgctagattccagccaggatacagatcttaaatttgtcaggccaagaataaaatctttatgaactaacaagatgaattaaagatggaatgattcatttctatggttaggttttaa

SEQ ID NO: 202630 - DNA, 100 bp, Homo sapiens
gcagaaaatgcagaaggacagacgcctgccattgggccggatggcgaggttgattcttcaccacactgaaaccattaggaaaaatccttgtggttaacag

SEQ ID NO: 202631 - DNA, 96 bp, Homo sapiens
ccgtcaaacaacctctcacactccctgtgggagcagctctgtgcccaaggtggggaagctgaggcaggaagccctttagtcacttgccgaaggcca

SEQ ID NO: 202632 - DNA, 50 bp, Homo sapiens
aaacgatcctctcaatcaaaataaggggctggcaaggtttaattgcttat

SEQ ID NO: 202633 - DNA, 98 bp, Homo sapiens
aaccattgaaaaatttgagaaggaggctgctgaggtttgtaagtggcagtcgtgatgggacagcacgtatttggcaatttaaacgaagagagtggaag

SEQ ID NO: 202634 - DNA, 96 bp, Homo sapiens
ttaattcttccactgatatctcaaaaggtgatctggacaaaggaacaggtatctcaggttaaaaatctgtaagagcctgattttagaattcaccag

SEQ ID NO: 202635 - DNA, 74 bp, Homo sapiens
gtgtctcaatttggctacaaaagattcctcagttccttttagatgattgctttaaaaatggtatcccctgccgt

SEQ ID NO: 202636 - DNA, 98 bp, Homo sapiens
actactgtgacaacattaacggacccagatgatgtggtaccagttggccaaagaagagcctggtgttggtgcatgtgctttggactagcatttatgct

SEQ ID NO: 202637 - DNA, 100 bp, Homo sapiens
gcccacagtgggggtgtgcaaacccgagagaactggaacaccgaaaatctctcccagcactttagaaaggggaccctgactgtgttaaagaagaagtggg

SEQ ID NO: 202638 - DNA, 82 bp, Homo sapiens
tttgttccctgcagccctcccacggtatcatgatattagctggtttgacatcaagtcatttgtgagtcatcagatcttctcc

SEQ ID NO: 202639 - DNA, 90 bp, Homo sapiens
catgctatggaaaaaatggaagaatttgtttgtaagtttgaaggatgacctctaggaagaaagtgttgctgaaggttatcatcctgggag

SEQ ID NO: 202640 - DNA, 74 bp, Homo sapiens
cccaagttgaccctgggtctgatctggaccattattttgcatttccaggttaggaattttagacccagttctgc

SEQ ID NO: 202641 - DNA, 47 bp, Homo sapiens
ggcttatgctgcacaattggcaggacctttcttggccaggactcgca

SEQ ID NO: 202642 - DNA, 75 bp, Homo sapiens
ttggaaaaaatcttctgtggattaactcagtggctcaacaggctgaagggagaatgcagccaatcggggcttaaa

SEQ ID NO: 202643 - DNA, 75 bp, Homo sapiens
gagaagccaagcacgctgacgaggttctgtgagagcatgtgacttaagagattaaaattaatttggttgctgttg

SEQ ID NO: 202644 - DNA, 49 bp, Homo sapiens
gattgtagaacttctctctctgagtatgccaaaatggtccaggtcttac

SEQ ID NO: 202645 - DNA, 83 bp, Homo sapiens
gtcctttggtacatgcagtccgagcaattctgtggtgttcttggtcacacatttatggagtttctgaagggcagtggagatta

SEQ ID NO: 202646 - DNA, 100 bp, Homo sapiens
ggcaccaacggcaccaactattcgcggagctggaatgactggcaacccaggaatcattgtagtcaatcattttccagttctcagccgctcagttgtgatc

SEQ ID NO: 202647 - DNA, 90 bp, Homo sapiens
gctgctgctgggaacacctggagtctccgcgggcaggattcactccttctccagttgcacagccacacccttcagctggccttaatgttg

SEQ ID NO: 202648 - DNA, 101 bp, Homo sapiens
acgacaagcacacactatggcgctgaaacggattaataagatctgcaactatgtgggaccagcaaaggttattgttcagttggtcacaaatggaaaaaata

SEQ ID NO: 202649 - DNA, 78 bp, Homo sapiens
tgggctctaatctcctaaagatagacagctcaaatgaattgggtggcatggagaaatcgttgtcaaaacagagatgtc

SEQ ID NO: 202650 - DNA, 75 bp, Homo sapiens
aagaggatcgtcctgccggagcccagatatcattctctgctggaactgggtgagaagcgtaaaggcatgttggag

SEQ ID NO: 202651 - DNA, 75 bp, Homo sapiens
tgcaccagaatgaaggagaaccagaaacatatctattatatcacaggaaaaagaccacatcagtgtcagatttgt

SEQ ID NO: 202652 - DNA, 116 bp, Homo sapiens
cctgaagaggcagtgaaatggggtgaatcatttgacaaactgctttcccatagaggtactaggttttgacaagcttgcatcatgcgtgagtataagctagtcgttcttggctcagg

SEQ ID NO: 202653 - DNA, 74 bp, Homo sapiens
agattatgaagaaaatggaacagatttatccggggctggtgatccacccgtaatcgacaaaactttgaacgagg

SEQ ID NO: 202654 - DNA, 75 bp, Homo sapiens
ctgcacaccattggcaaaactgtggagtatctgcactcacaggggatacaaactggactctcaggacaaaacgac

SEQ ID NO: 202655 - DNA, 113 bp, Homo sapiens
gttggagttttggcgagagtttgtggaagatggcgcctgttgtgacaggtactatactggcaattgctggagaagattttgcaattgttgcttctgatactcgattgagtgaa

SEQ ID NO: 202656 - DNA, 90 bp, Homo sapiens
cagtaggagaatgactccgattcgtgaccctcagcgccggtgcatgtcgatgtctctaattaacagaagatggcaaagcccagccacagc

SEQ ID NO: 202657 - DNA, 83 bp, Homo sapiens
tatactcctcccagtgacgggtctggagtgcgtgggggaccggctgttggcggaaatggtggagtcaatgaagaaagtagcag

SEQ ID NO: 202658 - DNA, 83 bp, Homo sapiens
gaacgtcaaaaaacactccaacgattgagatcatttaaagatggaacctcagggcatcatagcttgctgcaacccagtaccgc

SEQ ID NO: 202659 - DNA, 100 bp, Homo sapiens
ctccagtacaaccttcaaaacaactggaatatttagcaaggattcaaggctttcagctgttcgggggtcttgtctggattttggttgcctcctccaatgt

SEQ ID NO: 202660 - DNA, 96 bp, Homo sapiens
ggagaagctggagctcacggagaagaaggcctccgacgcaacatgagtgagaatgaggaagaggaaatttctcagcaagaaggcagtggggactat

SEQ ID NO: 202661 - DNA, 100 bp, Homo sapiens
ctgtaagctacggaagatcttcaccttaaaatcaaagccacaagacactgctgataaggatggtgactattatatggttaaaaagattttggaggaaaac

SEQ ID NO: 202662 - DNA, 74 bp, Homo sapiens
ctccaggatttctgaagactattgtggaagaagcatccattaaggataatgttgtctgtctgtctccaaaactg

SEQ ID NO: 202663 - DNA, 100 bp, Homo sapiens
ctgaaccccaaacccaaattcttcgttctgtgcggcgacctcatccacgccatgccagctctaaaacctgaaaaagtgaaattagctgcctgtggaagga

SEQ ID NO: 202664 - DNA, 100 bp, Homo sapiens
ggccggctgccaccttctgggctcctggggccctgcccaccacaaacgcctgactttagaagacctagaagattcatgggatcgtggcattcctcgaatc

SEQ ID NO: 202665 - DNA, 83 bp, Homo sapiens
cagattcgcagtggtcgcttcttctccttgggacggaagaagtctatagtggctgtggagcccaggagtcttattcaaggagc

SEQ ID NO: 202666 - DNA, 60 bp, Homo sapiens
cttcgatgatcgtgtgtcggatgaggagaaggatgaagtggcacacactctaactgaaag

SEQ ID NO: 202667 - DNA, 75 bp, Homo sapiens
gcggcaaatctaagaaattttgccgtggaggtcccagcccccgctgcggttctcggaggtccggagcccctgatg

SEQ ID NO: 202668 - DNA, 100 bp, Homo sapiens
aggagggcggcgggactgcactcgagtgtccagacctgctcgatgagcctggcccaactagagaatctgtgcaaacagctgtatgaaaccacagacacaa

SEQ ID NO: 202669 - DNA, 100 bp, Homo sapiens
actaagaagaatgagaactataagagcctggtgagacggagctatcggcgccgcggcaagagccagatatggccgcgtggaaagtgtcaaaattcttccc

SEQ ID NO: 202670 - DNA, 101 bp, Homo sapiens
ggggacagcatcgcccaggcccctgagtctctggacaagtgggaacgtcttacggtagctgatgcattggaaccagtgcagtttgaagatgggcagaagat

SEQ ID NO: 202671 - DNA, 100 bp, Homo sapiens
ctggtgggcttctcagcgggtcaagtgcagtacctggatctcatcaaaaaggacaccagcaagctgttcaatgaggaggatgtgtctagtccgaatgaag

SEQ ID NO: 202672 - DNA, 83 bp, Homo sapiens
gctgggagggcgtcttccgctgcatccccatcttcggcatgtccttcgcctgccagtcgaggccactgtctgcagctcccgtg

SEQ ID NO: 202673 - DNA, 82 bp, Homo sapiens
gagaggcgagctcgcgatgagtggtctcggcaggctcttcgggaaggacatggcccatgaacatggacatgagcatggacat

SEQ ID NO: 202674 - DNA, 76 bp, Homo sapiens
tccttctccactttcgccagcccgtgccgcgagcgcggcctgcaggagcattgtcccagatatagccgttggtaca

SEQ ID NO: 202675 - DNA, 88 bp, Homo sapiens
cagcctcctgaggagctgggattacagctagaaaccagtgcctgaaagaaactccaattaaaataccagtaaattcaacaggaacaga

SEQ ID NO: 202676 - DNA, 88 bp, Homo sapiens
agagagctctattggaaaccaaatcaaaaataacacatcctgtgtatagcctttactttcctgagaaacacccgccgggcagcagagg

SEQ ID NO: 202677 - DNA, 90 bp, Homo sapiens
ggcttcctaaacacctcttatcaccggcaagagcaagatggaattggggaggaggtgctcaagatgtccacggaggagatcatccagcgc

SEQ ID NO: 202678 - DNA, 83 bp, Homo sapiens
cacacccacacgtgttcaatacacctcccacctgtcctcaggcatatcaaagtataattaatggatttgccttaccactaaaa

SEQ ID NO: 202679 - DNA, 100 bp, Homo sapiens
ctgggcgcggattcgccgaggcaccgaggcactcagaggagctgcctgtggaggaaccgattgtgtccacagatgaggtcatcttcccactcaccgtttc

SEQ ID NO: 202680 - DNA, 99 bp, Homo sapiens
cttgctcgggcaaaagttgtgcattggcccgatcaagcctgacttctagccaaggacttaaccaccaccatgtcgagcaaaagaacaaagaccaagacc

SEQ ID NO: 202681 - DNA, 106 bp, Homo sapiens
acagtttgatttacatggatcctcattactgccaatcttttgtagatgtcagcataaaggatttccctcttgaggccatggttgcttgttatccgggcaatggaac

SEQ ID NO: 202682 - DNA, 99 bp, Homo sapiens
gggaccagtgtgaatttggaagggatcgtgtggcatgaaacagaagaagtacctgccatcctggctggacttgaccccagggacattgtggctgtgctg

SEQ ID NO: 202683 - DNA, 101 bp, Homo sapiens
cagagatgtgatgttggagaactatagcaatctggttttcttgggaagcccttagtgtatacaaggaagcaattcagaaaatgccaaggcagtttgcccca

SEQ ID NO: 202684 - DNA, 87 bp, Homo sapiens
gggagccggagcgagagcgcgcgggcgcggccgacagcctgccacagtgactcaggtcactcaaggaactatccgaccagctgccaa

SEQ ID NO: 202685 - DNA, 100 bp, Homo sapiens
tgggaaaacatgcatccaagttccagtttgtggcctcctaccaggagctcatggttgagtgtacgaagaaatgacccgtttgatggagctgcaccgccag

SEQ ID NO: 202686 - DNA, 77 bp, Homo sapiens
ctcagtggttgaatcataggcaagtggtgtgtggcacaaaatgcaacacggcaacagctgaacagatgcgtctcgct

SEQ ID NO: 202687 - DNA, 101 bp, Homo sapiens
catggatccaacgtgctcttctgagtgcatttataacctcatacccagtgacttgaaggagcctccccagcctcctagttgctgatagtccaactccaccg

SEQ ID NO: 202688 - DNA, 100 bp, Homo sapiens
atctgtgacataattaacactacccaggatggcactattcctgatcagagaactccagttgcttcaacacacagtatcagtagtgcagccaccccagatc

SEQ ID NO: 202689 - DNA, 50 bp, Homo sapiens
ggggaacacccagccccagaaacagtagagacggggtttcgccatgttgg

SEQ ID NO: 202690 - DNA, 82 bp, Homo sapiens
gagactcctgaccctcagaatggcttacctatttctactccatgtaccaccataaacaaagtttgtgcttcaggaatgaaag

SEQ ID NO: 202691 - DNA, 75 bp, Homo sapiens
aaatcacgagaggaagcttaaatctgtcgtttgaatttaggaccacctcgcaggaacgaatgcaggaatttggga

SEQ ID NO: 202692 - DNA, 100 bp, Homo sapiens
gctcttgatgtaggatctggaagtggaatccttactgcatgttttgcacgtatggtggtgctgtgggtcggcctgggcgtcctggtggtgagcactgtca

SEQ ID NO: 202693 - DNA, 75 bp, Homo sapiens
ttccagcttctgctgtccttctttgtggagagcaagagacgaggtctcacctatgttgcccagactggtctccaa

SEQ ID NO: 202694 - DNA, 100 bp, Homo sapiens
gcagacatctacaaccttcgatctcctgacgactcatgctcgcctgatgtttcgtgatactgtaactctggaagacgctattacggtggtgtcagtcatg

SEQ ID NO: 202695 - DNA, 90 bp, Homo sapiens
ccacggccgccgcgctgctggtcggctccagcaccctcttcttcgtgttcacgtccccaggatcggctgagagccctggtggtgatcccc

SEQ ID NO: 202696 - DNA, 75 bp, Homo sapiens
agtcatttctgttccgcacaggcctgctgaactgggtgctttatataggaacattaaccaggtggtatttgttgg

SEQ ID NO: 202697 - DNA, 131 bp, Homo sapiens
tgcattgactggaaacaatggcatttacagaaagagtcaacagcagtggcaacagtgcatacatagagacgtgaagccagaaaatatcctcatcacgaaacattccgtgattaagctttgtgactttggat

SEQ ID NO: 202698 - DNA, 100 bp, Homo sapiens
tgacagttgtgattcagcacctgctgtctgaggagttttgggatggtggttgataactaagacaaagtgctgaagaaatgatagaagttgcaaagagacg

SEQ ID NO: 202699 - DNA, 75 bp, Homo sapiens
catcagtgtttgggaatgattctgatgatgatgatgaggaaaacatttaaagttgatgatatgttatcaaaagta

SEQ ID NO: 202700 - DNA, 100 bp, Homo sapiens
cgctaacctatcgggttctctctccgcgcgttcagaacgcatgctgattctgcaaaatccacctcttctgaaacagactgcaatgataacgtcccttctc

SEQ ID NO: 202701 - DNA, 51 bp, Homo sapiens
ctattatccaccgggacctgaagcagtgtttggccagcgcttggatgagac

SEQ ID NO: 202702 - DNA, 75 bp, Homo sapiens
gttttctgccggctgtaaagtcatcacctcctgggatcagatgtgcattgaggatgacgactcatttaatttaca

SEQ ID NO: 202703 - DNA, 100 bp, Homo sapiens
tatccctgccccgactaccccttcactcagacccaggggcagcttcatgacttctgggtaccagattcttaataggagttgcagcagcaaaaatatgaac

SEQ ID NO: 202704 - DNA, 89 bp, Homo sapiens
gttccatcatggcgtcaatgcagcatgttggcagataaattgaacatgactccagaagaagctgaaaggtggattgtaaatttgattag

SEQ ID NO: 202705 - DNA, 118 bp, Homo sapiens
cacagctgctcgaggacggggaaaatctgcagccctgggattggcgattgctggggcggtggcatttggtgtgaagagtgccagtgctggcagcatggggtctgcatgggattactgg

SEQ ID NO: 202706 - DNA, 83 bp, Homo sapiens
caccaacgcgcacgggcgccacgcgcggcgcatcacggtgcgcgtggccgatcagtcgcatcgaatacattcattcaaagaac

SEQ ID NO: 202707 - DNA, 51 bp, Homo sapiens
attcaatgtcatccagagcccagagcaggttggattagcttttcaaaacag

SEQ ID NO: 202708 - DNA, 74 bp, Homo sapiens
cccctgttgtcagagaagaaatggagaaagtattagctggagatcccttggccaagcaggagggaaccattagc

SEQ ID NO: 202709 - DNA, 75 bp, Homo sapiens
cagaggatcctggaggcctgggaagccaacgaccacacgcagatttttagactctgaggagcagttggagctaat

SEQ ID NO: 202710 - DNA, 75 bp, Homo sapiens
tgctccgggccattgtcgactgtggctttgagcatccgtcagaaggaaggcactgatcctgaaactgaagacccc

SEQ ID NO: 202711 - DNA, 100 bp, Homo sapiens
ggcccagcacagccagcaccgcacgccctgcaagggagggtcctcactgagcagcgagtcgtcccccgtgtcctctccggccaccaaccacagctccccc

SEQ ID NO: 202712 - DNA, 100 bp, Homo sapiens
tcgccgccaagatgatgtgcggggcgccctccgccacgcagccggccaccgccgagacccagcacatcgccgaccaggcgggctgcatgctgttccccca

SEQ ID NO: 202713 - DNA, 90 bp, Homo sapiens
cttctcagggaaggagcagcccaggctcagagagaacagattgagaaggagcggctggaggaggagaaaaaggccacagggcgcttacag

SEQ ID NO: 202714 - DNA, 88 bp, Homo sapiens
tgacacggaaccctcacctcaacaagggattttatattggaagacatggatcttgctgccaacgagatcagcatttatgacaaacttt

SEQ ID NO: 202715 - DNA, 90 bp, Homo sapiens
tatggcagcagcgtggcctccgccaccgtgcacatccgaatgggtttaccgacaagactgtgaaactttcgggatggtggtgaaaatgct

SEQ ID NO: 202716 - DNA, 101 bp, Homo sapiens
ttagaatctgggactttcttcgttgccatgaggaaagaattctccgagttttctggatatgccgcagaaggatccgtgccagaagcaagcctgtgagatac

SEQ ID NO: 202717 - DNA, 83 bp, Homo sapiens
gtgctcgcgctactctctctttctggcctggaggctatccagcgctaactatatgtcagaaagcatcagcttttctcgatgga

SEQ ID NO: 202718 - DNA, 51 bp, Homo sapiens
gtccatggtctctagcagcctgaatccagtgatgactcgtggcactgcctc

SEQ ID NO: 202719 - DNA, 75 bp, Homo sapiens
gtgtccacgtcgggtcagatccgacagaagctgaaccttagccggccgatcgaggagcagggccccctggacgtc

SEQ ID NO: 202720 - DNA, 100 bp, Homo sapiens
tttaatattgcactaggagtttttgctttagctggactaacagatttggatgggtttgtggagttcttccatgtagaggacctagaaggtggcatcagga

SEQ ID NO: 202721 - DNA, 75 bp, Homo sapiens
cagcaacagtggcaatgagaccagtggaagcagcaccatcggggagacaagcaaccaagacaatgcaaactccag

SEQ ID NO: 202722 - DNA, 100 bp, Homo sapiens
ctaaaccatctgaattggctcaatgatgaggaaaatgctgctatttgtgatgaaattgctcgtcttgaggaaaaatttcttaaagcaaaagaagaaagaa

SEQ ID NO: 202723 - DNA, 90 bp, Homo sapiens
agtttcacttcaagtcatggatgtctaaggtgctggaaacatgcatgaagagctgcggcaagcggttccacgacgaagtgggcaagttcc

SEQ ID NO: 202724 - DNA, 50 bp, Homo sapiens
ggttacattgtcaaatcacagcactcagtttaagtgctgtggggctgcta

SEQ ID NO: 202725 - DNA, 75 bp, Homo sapiens
tcgaaagcctatcagcatagttaaggtctctaattaacagaagatggcaaagcccagccacagcagctatgtcct

SEQ ID NO: 202726 - DNA, 95 bp, Homo sapiens
cctcagcctcccgagtatctgggattacagtgtttgataagcactacatcaaccgcaactttgaccgaactgggcagatgtcagtggtgatcacg

SEQ ID NO: 202727 - DNA, 75 bp, Homo sapiens
gccacatactatccgtttgttcaggaaccaccagtgacagattttttgctccactcaagcctgttagaatcacca

SEQ ID NO: 202728 - DNA, 50 bp, Homo sapiens
aagtggacattttactggctcaacttttctgggagaagaggctacaagga

SEQ ID NO: 202729 - DNA, 100 bp, Homo sapiens
gaccccatcaacatccagttcacctcggaagccaaattggcagagaatgcttgtaccctggctgacctgacagagggtcaggttggcaagctactcatcc

SEQ ID NO: 202730 - DNA, 106 bp, Homo sapiens
tgcacccacgaatctgcccacccctcctgtaacccagcctgtttcacttcttgatgccatggacaatattaccaggcagaaccaattctacgatacccaagtcatc

SEQ ID NO: 202731 - DNA, 73 bp, Homo sapiens
agtgaagcactgcctgcagaccgtttggaacaagccaacagtgtgcctgtccattggggtcctggacatcttc

SEQ ID NO: 202732 - DNA, 83 bp, Homo sapiens
aggaagtgtcagcgctactgccgcagatttgaatataacctgccgctttgcaggtgtattccacgtggagaaaaatggtcgct

SEQ ID NO: 202733 - DNA, 97 bp, Homo sapiens
cctcatcatctacctggacaagcctccttctgaagaaataaaaacaggtgaggatgaagatgaggaagataatgatgctctactgaaggaaaatgaa

SEQ ID NO: 202734 - DNA, 71 bp, Homo sapiens
ttgcgccttcttcctggacatgaccaactgatgacacctttgaggccctgtgcatcgagccgttttccagc

SEQ ID NO: 202735 - DNA, 83 bp, Homo sapiens
cttcgctgtggtgaagctggggcggcaccggatcaccaagacggaggcttcaacggaccacaccaaaatgccatctcaaatgg

SEQ ID NO: 202736 - DNA, 82 bp, Homo sapiens
tcgtacgtgggacaggccacgctgtccgtccgcagtaccgacgcctgcaggagcaggccgggctctcgccatgggtcactgt

SEQ ID NO: 202737 - DNA, 75 bp, Homo sapiens
taattttagggtcctttatatagaagggagagtggtgttcccactgatgaagagcaggcgactgggttggagagg

SEQ ID NO: 202738 - DNA, 98 bp, Homo sapiens
acatctgtacgttgcaatctgtggatcagctacgaggtatcgagtgaacttcagacctagatatgtcactaggtataagacagtgacacagttggaat

SEQ ID NO: 202739 - DNA, 75 bp, Homo sapiens
gaaagttgaacagaacgcggctcccagccacaccaagttcagatagttttgaggcagctgtgccatcaaatagcc

SEQ ID NO: 202740 - DNA, 98 bp, Homo sapiens
agtgggagtattgtggaacttatagtggctgccaattctcttaaatgaacgtcttcaaactggatcctactgtctcccagttgccttggaaaaattgc

SEQ ID NO: 202741 - DNA, 97 bp, Homo sapiens
ggagaactacaggaacctgctttctctcgatgaggataacatccctccagaagatggctgtgggtgagcgtggaggatgctcagatgcacaccgtca

SEQ ID NO: 202742 - DNA, 100 bp, Homo sapiens
ccggctttttcggagccggcggagcaggttactcgcacgcggatttggctggcgtcccgcgtatctagaagagcagaagacagagaatggaaaagataag

SEQ ID NO: 202743 - DNA, 50 bp, Homo sapiens
agaaaatttactggttaaggagttgctgccaaacaaggtgaatccgaccc

SEQ ID NO: 202744 - DNA, 100 bp, Homo sapiens
cgcgcgcgaagcgagcgagaaggcacggagtcgccgcggagcgcaggcatcaagcatgatggaaccatgtgtgatacctgccgccagcaaccaatcattg

SEQ ID NO: 202745 - DNA, 98 bp, Homo sapiens
cctggacatgatggcacctcgactcaggccggagctgctgttttgaggattcctattctgtatggggaagttgaaaagctcgaagaaagtgctgtgac

SEQ ID NO: 202746 - DNA, 73 bp, Homo sapiens
gcgaatggggctcacgtcgagttcgttccaccagtcataaaccagatgaaatctatggcatgattgaaagact

SEQ ID NO: 202747 - DNA, 107 bp, Homo sapiens
tgaacttaaaaagcagtctaaacctgtgaccacccctgaagaaattgcacagggcttccgttacaagatgaggtctgtgtatgctcacttccccatcaacgttgtta

SEQ ID NO: 202748 - DNA, 101 bp, Homo sapiens
aacaaatataagtatacagcatctgtcctcatagcaggatcaggtctcctgggcatggctaacattgacctggaaaagagcaggactggtgatgaaattat

SEQ ID NO: 202749 - DNA, 50 bp, Homo sapiens
cgaaaaggagaacttcttaagaagagtggagcgcctgccaacggtaccgc

SEQ ID NO: 202750 - DNA, 100 bp, Homo sapiens
ccaacagtgacgtgttctccaaataccagctcgacaaagatggggttgtcctctttaagaaggctatagaaagcgcaattggtggtaacgcttatcaaca

SEQ ID NO: 202751 - DNA, 97 bp, Homo sapiens
cgagagcgtgaccgagagcgcgaatatcgtcatcgttagaagatctacaactcttgaaaaagaagttcctgtcatcttcatccaccctttaaacact

SEQ ID NO: 202752 - DNA, 100 bp, Homo sapiens
gagccgccgagcggagacccgggagcaggagctgggcctaggtctgcgccctgggatcgcttacacctgagacgaactacagaacagcacgtaccagagg

SEQ ID NO: 202753 - DNA, 75 bp, Homo sapiens
gtcggcactgctactgcgaagacagctggcagccactgaggcggctcccagctgcgttggcgacatggccgacac

SEQ ID NO: 202754 - DNA, 75 bp, Homo sapiens
gaggaaggtggcaagatggtgttggaaagcactatggtgtgcatctggaatcaagagacccatggcatctgaggt

SEQ ID NO: 202755 - DNA, 83 bp, Homo sapiens
agaagaccgaagcgttcgtatctggaagggcgtgatggtgggcatgggtcagaaggattcctatgtgggcgacgaggcccaga

SEQ ID NO: 202756 - DNA, 78 bp, Homo sapiens
gccatgtggatgccagcttcttcttggggaaggtgtgtttcctcgccacaggtgtgcaccaattccagctggacatca

SEQ ID NO: 202757 - DNA, 76 bp, Homo sapiens
tctacatctgcccgaccaacaagaggaagctcttcagtgggtcatctgtgtgtcacagcctcagaagaccagcgag

SEQ ID NO: 202758 - DNA, 75 bp, Homo sapiens
ccattgctgagagctcctgctgttgattgtggaaaaggacacctcttctgctggctggagtgcaatggcgcgatc

SEQ ID NO: 202759 - DNA, 75 bp, Homo sapiens
tgcatgcgtcgtcggcctctgggcagcagagtcctgtgtatggaaactcacatgagtcagctcagtctagaaggg

SEQ ID NO: 202760 - DNA, 114 bp, Homo sapiens
tcaagctgcagctgaaagagaaggatgaactcatttcccaacttcaggaagagctggaatggaagttggatacactttgtgacttgtacgagacactgaccattacacaggctg

SEQ ID NO: 202761 - DNA, 76 bp, Homo sapiens
tcacttgaacaactttcactgccatcggggacaagttcgatgaagaattcacagctcgacaggaagctcaagcaga

SEQ ID NO: 202762 - DNA, 100 bp, Homo sapiens
aggaaatcaagaaggtgctgctgctggtgctgggctgtgctgtccaggatgcagactcttcttattttaaaatctttaagacaaaacatgactgaaaaga

SEQ ID NO: 202763 - DNA, 104 bp, Homo sapiens
gggcattgttggcgccatcatcatgccccacaacatctacctgcactcggccctggtcaagataccccagaatcttccatgctccgtcacactgcagccaggcc

SEQ ID NO: 202764 - DNA, 83 bp, Homo sapiens
gcagaaaagaggtcacatcagcgttctgcgtcatgggggagtgctgatcaactaaaagagtggcttttcatggcctgccactg

SEQ ID NO: 202765 - DNA, 128 bp, Homo sapiens
gagaaatccctccaccatctcaagccccggccactgtgcgagcctgtcgagaagcacagagattgctgatttgctccttaagcaagagattcactgctgctcagcatggctcagaccaactcatgctt

SEQ ID NO: 202766 - DNA, 100 bp, Homo sapiens
tccttttccatcaacaggggcaaatcgaagtagagagcgaaaccatcttcaagttagcagcgtttattttacagatcctgtttgaccaaactcagagatc

SEQ ID NO: 202767 - DNA, 99 bp, Homo sapiens
ctctcggagttggcaggaagccaggttgcagggtgtccgcttcctcaggtttgggccccatggtatccctgtgacagtatttcccaaaagggaatataa

SEQ ID NO: 202768 - DNA, 75 bp, Homo sapiens
agaaacaggacatacctttcgtagagatcaaagacacagctctccccttctatcaagcgcaagagagaagtcagc

SEQ ID NO: 202769 - DNA, 98 bp, Homo sapiens
gcacacaggaggcaccttggataagctggagtctattcctggattcaatgtcatccagagcccagagcaggacataagcagctctatgaccaatagca

SEQ ID NO: 202770 - DNA, 101 bp, Homo sapiens
tttacgagtgtctcgcagcctgcgagggttccagggagatcaaggacttcaaggatttctacctttccatagcagttaataacgacatgatagtcactgac

SEQ ID NO: 202771 - DNA, 135 bp, Homo sapiens
tagattttggtggaaagtttcattgtgtatgtagaagaccagaagtggatggagattgtggacatcggatacccaaggagacgaagctgaagcaggagaaggaggggaaaattaaccggccttccaacttttgtc

SEQ ID NO: 202772 - DNA, 76 bp, Homo sapiens
tcacaatctgtaatagatggtgtgactgttctaggaggtcaattccatgttgttgacctcctgtactggagagaca

SEQ ID NO: 202773 - DNA, 75 bp, Homo sapiens
cccgactctttgggccgttatctcaccgggctgacgcacgaggcacacaggaaggaggtggagcaggtgtatctg

SEQ ID NO: 202774 - DNA, 88 bp, Homo sapiens
ttagagaagaattttccaaatgaatttgcaaaacttactgtaggtacaggtgaacaaaggcagagtaaactgtcaccccagatgcagg

SEQ ID NO: 202775 - DNA, 75 bp, Homo sapiens
gtcctgagatcctgcgaaggctggacgtgcggctgctggaggtcgatgagcagatgcttaacgtgcagaacaaga

SEQ ID NO: 202776 - DNA, 82 bp, Homo sapiens
tccgagcgcaaggacagcgcgaggtccgcgcagcccagcgcagccatatcaatgtccgagttaccaccatggatgcagagct

SEQ ID NO: 202777 - DNA, 100 bp, Homo sapiens
gtttgatcaaggtgggagctgaggctgatcagaactatcagaactacatcttaaggggtctgccatcatggatgttctcgcagaagcaaatggcaccttt

SEQ ID NO: 202778 - DNA, 82 bp, Homo sapiens
cgggttattcgagtgaccgagaccgcggccgggaccgagggcgatcttcactctcctcctcggaccgttcaccttctttgac

SEQ ID NO: 202779 - DNA, 100 bp, Homo sapiens
gccgcgcgggccctgcatgtggagctgccgtctcagcaggcactggatccagcatcctctccgccctccaggacctcttctctgtcacctggctcaatag

SEQ ID NO: 202780 - DNA, 100 bp, Homo sapiens
cggggccccggaacccgagctggagctgaagcgcaggctgcggggcgcggagtcgggaggctttccttaaagtttcccatgtctcaatggactcctgaat

SEQ ID NO: 202781 - DNA, 76 bp, Homo sapiens
tgcacaagggaggcgacagagacagcagcagttttttgtagcatcagatccaacagttaaaacagatcgactgtgg

SEQ ID NO: 202782 - DNA, 75 bp, Homo sapiens
cttcttaatcccatatctggacatctggaacatccatggacaaggaagatggggagccaaagaccaagcatctca

SEQ ID NO: 202783 - DNA, 123 bp, Homo sapiens
gcaaaccccagcaagatgcggaggctgcctcggcggagcagaggaaccacacgctgatcatggcctgctgaattagccaccaagtacgcaaacttttcagagggagcttgcaagcctggctat

SEQ ID NO: 202784 - DNA, 89 bp, Homo sapiens
gccggccccaacacggaccttggtctcaccaacggctttgggggtgcgaggagcgagcaggagccgggcggcggcctggggaggaaggc

SEQ ID NO: 202785 - DNA, 75 bp, Homo sapiens
tgaatactgagtggagtgagttggagaatctggtccttaaggatatgtcagatgacaaatgaatggcctttggaa

SEQ ID NO: 202786 - DNA, 90 bp, Homo sapiens
cgaaggggagtttccacagtgattgatgctgcctcaggagtaccgggcgtcaaagcagaacgctttgaagaaggaatgacggtaaagcac

SEQ ID NO: 202787 - DNA, 100 bp, Homo sapiens
ggaaattacaaagaggccaagaagatcattgagctggtggagctgtctaaggctcaagatatagaagcaggagatggcaccacatcagtagtcatcattg

SEQ ID NO: 202788 - DNA, 51 bp, Homo sapiens
caccattgtgaagcagatgaagtaccctcttaccaattatacttttggtac

SEQ ID NO: 202789 - DNA, 75 bp, Homo sapiens
ctgcgctgaacctctcggctctccacagccccgcgcacaggcctccggaaccgcatgcacgagtctctcatgctc

SEQ ID NO: 202790 - DNA, 50 bp, Homo sapiens
ccaaggtctttgtcaagaacccagagtcgacggagtctcgctctgtcacc

SEQ ID NO: 202791 - DNA, 83 bp, Homo sapiens
agctcacgcagatggtgtccaccatgtccgacggctggaagttcgagcaggcttcttccccgggagctcgcagggctgcgacg

SEQ ID NO: 202792 - DNA, 82 bp, Homo sapiens
agtcgaaggccgtgaggtatttttctaagattgccttgggtccccagtgtttactcccatcaaggcagacataagcggcaac

SEQ ID NO: 202793 - DNA, 98 bp, Homo sapiens
agagtgtgccctttgacttgcatcgtctacctacctctgccatcctctaccagccgcaactgcgagggctggagggctgcatcgtaatccgatacaca

SEQ ID NO: 202794 - DNA, 100 bp, Homo sapiens
ggcggtaccagagcggcaagtgggtgcagtgtggaaaggccgagggcagcatgccagatgtcatcgcaacagataaagaagacgttgccttcaaagacct

SEQ ID NO: 202795 - DNA, 97 bp, Homo sapiens
ttcgtcttgctcagcagatatctgatgagctctcaaatcgactggaagtggtgaaggaatttctgagaaacaatgaggatcttagaaatggccttac

SEQ ID NO: 202796 - DNA, 80 bp, Homo sapiens
cgagaacgccgtggagaaggtgaacatcaagccgcagtggaagaagttgttccgaatgtaattgaaccttccttcggcct

SEQ ID NO: 202797 - DNA, 83 bp, Homo sapiens
cggaggaggaggaggtggagttgctgcccttccggagtccgccccgtgaggagaatggagtggacgcttctcttgtgagccag

SEQ ID NO: 202798 - DNA, 75 bp, Homo sapiens
cgaagatcgccaagactcacgaaggtcttcaaagcttcacctttctccaaaggcagatgtgaagaacttgatgtc

SEQ ID NO: 202799 - DNA, 101 bp, Homo sapiens
aacaattctgaccggagaatgctgttacctgaaccccttacttcgaaggatcataagattcacagtccgagaaatgtggtttgtggtaggaaggaatggtg

SEQ ID NO: 202800 - DNA, 100 bp, Homo sapiens
gcgcgtgctacggggacgacgcgtgcttcgtggcccggcaccgttccgcggacgtgctcgggatcatggcccaagttgcaatgtccaccctccccgttga

SEQ ID NO: 202801 - DNA, 73 bp, Homo sapiens
aaaattacggtggtgccgtccgccaagggtatacagggagctaccctgtgtttctgagaccctttgtgacatc

SEQ ID NO: 202802 - DNA, 82 bp, Homo sapiens
cccagtcccacttcaaacattcgtctcggaaaccccgcctcttacagtcacgaggtatccagctcacatagaagacattgac

SEQ ID NO: 202803 - DNA, 98 bp, Homo sapiens
ggaagcccaccgactttgaggatctggaggacggagaggacctgttcaccagcactgtctccaccctagagcaccctggaggagaagaggttctgctg

SEQ ID NO: 202804 - DNA, 96 bp, Homo sapiens
ctctgatatcttcctgtcatggttccccttctactacatgctgaaggatccctccccgcggcggcgatggcccgagccatgagagtgaggactttc

SEQ ID NO: 202805 - DNA, 75 bp, Homo sapiens
ttgggacccaccgctgccctcagctccgagtccagggcgaggcgcatattaaatttcctattgactacccctatt

SEQ ID NO: 202806 - DNA, 73 bp, Homo sapiens
atctctctaatcttgttcttcacggtgatattccacaaggtttctaagcatgaattgaggaacagaagaagca

SEQ ID NO: 202807 - DNA, 100 bp, Homo sapiens
gtcagatccgagctcgccatccagtttcctctccactagtccccccagttggagatctgtggccttgtgcacatttgccgtctacgtgaccattgacgag

SEQ ID NO: 202808 - DNA, 98 bp, Homo sapiens
cagatgttcaaggaattcattctgagaatggaccagttttggttgaagaactgggaaagaagttggatggcaagcatgtggtgtttggcaaagtgaaa

SEQ ID NO: 202809 - DNA, 90 bp, Homo sapiens
tgcagcctgcagccctggaggacggctgggacagcgagcccttcaccctggtggagcgagacggcaagcacgaggagcggcaggacgagc

SEQ ID NO: 202810 - DNA, 118 bp, Homo sapiens
ccgggatttgggtcgcagttcttgtttgtggatcgctgtgatcgtcacttggggattgcagtggcaaagctaggctaggtcttggaggctggtgtaaggcgatgtgggtgaaggcagg

SEQ ID NO: 202811 - DNA, 82 bp, Homo sapiens
atttgaagaaatgaagaaaaagcatgaaaatcaccctaaagttaatcacccaggatcatagacggtatttctatgtaaacga

SEQ ID NO: 202812 - DNA, 100 bp, Homo sapiens
ccgcctgagatggctggacacagcctagccagctcccacagaaactccaggggggccctcagcctcttggccttgaacgggctgttcatcttgattcaca

SEQ ID NO: 202813 - DNA, 75 bp, Homo sapiens
tcccggaggcggcggcggcggggggagccggagccgcctgggatgttcacctcaagctcgaatgtgacaagttgg

SEQ ID NO: 202814 - DNA, 75 bp, Homo sapiens
atgccgaactgggaggcccctttgaccagatgaacggagtggccggagacctgcctagagctggaacgttacctc

SEQ ID NO: 202815 - DNA, 98 bp, Homo sapiens
tctgcagctcccagcgtgatcgacgcagaagacaggtgatttctgcatttccgactgagattggcatggtagcttggaaaatgacctttaaaagtcct

SEQ ID NO: 202816 - DNA, 90 bp, Homo sapiens
gtgtccattgatctcttggagcagctggggatcatggtacggttcctggagcagcagaacaagatgctggagaccaagtggagcctcctg

SEQ ID NO: 202817 - DNA, 74 bp, Homo sapiens
agctgctgggagcagcactgctcagttctcgtcaaggacggcgtgggcgtggcggagtttaagagagctgtgaa

SEQ ID NO: 202818 - DNA, 118 bp, Homo sapiens
cagccccggtctctcggacaccattttctgccgctggacgcaaggtggatccataaagaacccagccaacccgcagagggaggggaggggctgagctgtgaggagagcggggcccaag

SEQ ID NO: 202819 - DNA, 108 bp, Homo sapiens
tgtttgtaaatgtgagtggaagccatgaggccaaaggcagttgtattgtaggtcccattagtccaccacagccaccttcagtcagtgcatggaataagcccttaacat

SEQ ID NO: 202820 - DNA, 100 bp, Homo sapiens
gctgccgaacgacgtggtcctacagaaagcataacccctactgtagaactaaatgcactgtgcatgaaacttggaaaaaaaccaatgtataagcctgttg

SEQ ID NO: 202821 - DNA, 75 bp, Homo sapiens
ctgtgcttggcagaactggtgaagacctattgcagcagatgaaggttattctttcagcagtgtcctgtattatgg

SEQ ID NO: 202822 - DNA, 100 bp, Homo sapiens
cgcccgtccccctgccccgttcacaatgtctgagtgtacggtttgcagatatgcctggaaaatcaaggaagaaaaagaagaacatgaaggaactgactcc

SEQ ID NO: 202823 - DNA, 100 bp, Homo sapiens
tggaagcacaatataaagtttcatcaacttccataccgggagatggagcatttgagacaggggactcagaagaagatccttgacattgccaacatgctgg

SEQ ID NO: 202824 - DNA, 96 bp, Homo sapiens
ttgagaccgagaatgtggaaacaggtgtcatggagaaactccagctgggcccagagattctgcagcgggaaaatccaaggcttatttatgccaggc

SEQ ID NO: 202825 - DNA, 51 bp, Homo sapiens
tcttaggcgtttcagaccacataaacctctacttgaaaatggagaaaaaac

SEQ ID NO: 202826 - DNA, 90 bp, Homo sapiens
ggtgaacaacccgttcttgcctcaggccagtcgcctccaggccaagagggatccttcacccgtgtctgattatacccaacaagcaaccca

SEQ ID NO: 202827 - DNA, 83 bp, Homo sapiens
cccgctgctaccgccggcgccggtggtgctgtcgctcttgatactcggctcaggtgcatttcctgatgcccagcttccttcta

SEQ ID NO: 202828 - DNA, 92 bp, Homo sapiens
cttagctgtgctcgcgctactctctctttctggcctggaggctatccagcgggaacgcccttttgcttgtgactggcagggctgcgacaaga

SEQ ID NO: 202829 - DNA, 101 bp, Homo sapiens
gaactgagaccaatgctggcacagaatttaatgctaaagaggaattaattggcctgataaaacatactaaaattcccattatttgtatgtgcaatgataga

SEQ ID NO: 202830 - DNA, 75 bp, Homo sapiens
aaaatctcaagaaagaggtgggcaagatcctgtgcactgactgcggagaagagatcaactttgggaaacttatca

SEQ ID NO: 202831 - DNA, 75 bp, Homo sapiens
ttttcccctggccttctgtatcttcatggtgcggctcatcttcgagagggcctattccactagaagcaagatggc

SEQ ID NO: 202832 - DNA, 75 bp, Homo sapiens
gcggcttccaggcgcactaccgcgggtgtcttttatgaataatcaaaagcagcaaaagccaacgctatcaggcca

SEQ ID NO: 202833 - DNA, 75 bp, Homo sapiens
gcagttcagaagagccaaggaataaacatgcaatgaacccaaaaggtgaggagatttctagtgaagatgatgagc

SEQ ID NO: 202834 - DNA, 75 bp, Homo sapiens
cagacgctgccagcatcgccgccgccagatccggaagaccacggccagccaggtgtacgagacattgctcaccta

SEQ ID NO: 202835 - DNA, 100 bp, Homo sapiens
tcaaccaggcttccttgtacccacaggtgaaaaataattcaattcgtcataatctgtccctacacagcaagttcattcgtgtgcagaatgaaggaactgg

SEQ ID NO: 202836 - DNA, 83 bp, Homo sapiens
caggcctgacagctctgcggctcgggccctgagctcctgcccctcctaaagctgaagccaaagcgaaggctttaaaggccaag

SEQ ID NO: 202837 - DNA, 98 bp, Homo sapiens
accaacctctcgtacatcggcgagggcgcctacggcatggtgtggtgaggtttatacatggggcgacaatgatgagggacaactgggagacggaacca

SEQ ID NO: 202838 - DNA, 89 bp, Homo sapiens
cgtgacaaaatgtgttccatggtcaaaaaatggcaggcagtgtcatcattaggctgtctttgtgccttaacagtattgatcaggtattg

SEQ ID NO: 202839 - DNA, 50 bp, Homo sapiens
gggggctaaagagcgtcgtgtggcagaatctccagcaccctgccggtggc

SEQ ID NO: 202840 - DNA, 100 bp, Homo sapiens
ttgaaaagtccgagagaatcaggatggaggccgtggcgacggcgacggcggcgaaggaacccgataaggtgaacagcctgggcatcagtgaagagctgaa

SEQ ID NO: 202841 - DNA, 74 bp, Homo sapiens
ccgtggccccgagggcggatccgagcaaacagtgacgaatctcagcttctgacaccaggaaagatgagtcagcg

SEQ ID NO: 202842 - DNA, 100 bp, Homo sapiens
gcgagatatctggccgcctctgccgcagctggaggatatgggccctcacattttccaaacctgtccatctgctaactattttgactgcagagccatgtcc

SEQ ID NO: 202843 - DNA, 100 bp, Homo sapiens
cccaactcccaccccatccagtggaatgcaccacagccatctcacatttccaagtacattctcaggtggagacctggccctcctggtcctcctggaactg

SEQ ID NO: 202844 - DNA, 101 bp, Homo sapiens
cctccattctgagcgaagtgtccacccgcgccaggtccaagctgccgtccggcaagaacatcctggtcttcggtatatttgaaggctcccatgattctgaa

SEQ ID NO: 202845 - DNA, 104 bp, Homo sapiens
ggaagccggatcccgagccgggcaggatggatcaccaccagccggggactgggcgctaccaggtgtactgtaagattgatgttaaaggcatggtgttcacccca

SEQ ID NO: 202846 - DNA, 98 bp, Homo sapiens
ttccatcatggcgtcaatgcagatccaaaggggctattctgaacatttcatctggcagtggcatgctccctgtcccactcttgaccatctattctgca

SEQ ID NO: 202847 - DNA, 99 bp, Homo sapiens
tggcgtgcaacatggggcttgagaaagggtcttctcgtgggcaccctggacgtggtgctggactccagtgcccgcgtggccccttaccgcatcctgcac

SEQ ID NO: 202848 - DNA, 87 bp, Homo sapiens
agggttctggttcccgccggcgaggagttgatccctgaattttattatctccctgagatgtttgtcaacttcaataattataatctt

SEQ ID NO: 202849 - DNA, 76 bp, Homo sapiens
attgaaaaaatgaatggaatgctcctaaatgatcgcaaagtatcttcaggatttattccgcaagactggccaggac

SEQ ID NO: 202850 - DNA, 78 bp, Homo sapiens
gctcctgtacgtagtcacggtcttgtgctctaagaatgtgactgcacagaatcctggggtggctgcatcatggaggaa

SEQ ID NO: 202851 - DNA, 100 bp, Homo sapiens
agaagaggacgacgacgacgaggaagaggaggtttctgagtcttccgtgtgtgctaagatcgtgcagctcctggggcagaatgaggtggactatcgccag

SEQ ID NO: 202852 - DNA, 126 bp, Homo sapiens
acaggctgtggggtttctcagataactgggcccctgcgctcaggaggccttcaccctctgctctgggaccgtggcaaggaggtgtacagccctgactttcatagcctcggaggagaaggtcttggt

SEQ ID NO: 202853 - DNA, 83 bp, Homo sapiens
gaggtggtccacacccgtcccagcagccacagaccaagtatccttttgagacaataaaggaaataatgtataaccaggctgtg

SEQ ID NO: 202854 - DNA, 96 bp, Homo sapiens
gtctgtgcggcccgctgttgtctgcccgcacccgggcccgcaggccagtgcctgtagtagaagaacatccatctcatgagcagatcattttgcttc

SEQ ID NO: 202855 - DNA, 75 bp, Homo sapiens
ataagactcagctccaagatgtccctttaggaggttcggctttccagtttggcagcagcactacaaatttcaact

SEQ ID NO: 202856 - DNA, 50 bp, Homo sapiens
gcgcggaggcggaggcttgggatatgaaaaacagtagctccgtatcgaat

SEQ ID NO: 202857 - DNA, 75 bp, Homo sapiens
tcagcaacgtcctcaagctctacctgcgtcaggctattgagggcacctacattgacaagaaatgccccttcactg

SEQ ID NO: 202858 - DNA, 90 bp, Homo sapiens
agtgcttcgtgtggagcggcacggctgaggcccgcaagcgcaaggtcacccgtgtgaacagaaagtgagaggttgtagcacattgccacc

SEQ ID NO: 202859 - DNA, 48 bp, Homo sapiens
ccggatctcaacaatcccttcaaggaactggcccaaataaggaaggag

SEQ ID NO: 202860 - DNA, 90 bp, Homo sapiens
aaaatagcaaacgatccagacggcagggagtgcatcaaaggtgtgaacacaggcccttcataacacaaggcttttatctgcttattccgc

SEQ ID NO: 202861 - DNA, 74 bp, Homo sapiens
ttccattccgagcatccgaagactgggttcaggtgagcggagaattagagtacatacactttgtttgccagtgg

SEQ ID NO: 202862 - DNA, 97 bp, Homo sapiens
tggccaaagtggatgaggtgaagtccacaatcaagttccaaatgaagaaggtccctcacaacatcaacttccgtgagaagaagccaaagccatccaa

SEQ ID NO: 202863 - DNA, 82 bp, Homo sapiens
gtctgtcagtgagatggcttctaacaaggaaattgagacacgccggttgtgaaacctactgaagtgagcggcggcgccagga

SEQ ID NO: 202864 - DNA, 100 bp, Homo sapiens
ccgatgtgcagcgagcagttccctcctgactatgaccagcaggtgtttgaaaggtataagtgtgctagcggagtgtctagattgtcctgaattgaaagca

SEQ ID NO: 202865 - DNA, 51 bp, Homo sapiens
aggcggttgaaggagcagtctatctttatggactctcactctgtcgcccag

SEQ ID NO: 202866 - DNA, 74 bp, Homo sapiens
cctttgccatcgacatatttcctgtcaccaacaaagatttcagggatgccaagtccccacttaaaagtggacca

SEQ ID NO: 202867 - DNA, 74 bp, Homo sapiens
agggctcgtacttctgctcgcagcagagaccacgcagaggctgcctttggatcaagtccaggaagtgcttcccc

SEQ ID NO: 202868 - DNA, 82 bp, Homo sapiens
cttagctgtgctcgcgctactctctctttctggcctggaggctatccagccacttctcagaacttctggatgagttttccca

SEQ ID NO: 202869 - DNA, 100 bp, Homo sapiens
ggagagtaaagtcagcatgagcaaaaactccaaactcctctccaccagcgccaagaggatttttagactctgaggagcagttggagctaatccacattat

SEQ ID NO: 202870 - DNA, 90 bp, Homo sapiens
atggctatgcaccacctgatatcaccaactatgatgattattctccaccgtctaagagaccaaaggccaatgagctaccgcagccaccag

SEQ ID NO: 202871 - DNA, 98 bp, Homo sapiens
ttgattgtgacctctagcacatcacctacactaccacggccacactcaccactccatggccacacagcatgtacagaagcatattcccaatctgatga

SEQ ID NO: 202872 - DNA, 87 bp, Homo sapiens
cactgcgggaaacctgtgcctccagacactgctccctgtgaaattctgaagccactgaagatcctggtgtcgccatgggccgccgcc

SEQ ID NO: 202873 - DNA, 90 bp, Homo sapiens
ctgatttgctgtcagccatgaacggatggatgtgatgcctgctagccaaaagggaaggtggacttttaaatattctccactgaagcaaat

SEQ ID NO: 202874 - DNA, 98 bp, Homo sapiens
agaaagtgagattaatgaaagaagtcatggaacactatgctgatcaagatgatctggttgtcatgtttactgaatggccaccaccacctatcatgaca

SEQ ID NO: 202875 - DNA, 100 bp, Homo sapiens
gtaacccggtatattctggattccagcagtatcctcaagatgccggaccagatctctgtctcggagttcatcgccgagaccaccgaggactacaactcgc

SEQ ID NO: 202876 - DNA, 49 bp, Homo sapiens
aaggagggggtcatgtatgtgggaacctgcgcaagggacccagtggcct

SEQ ID NO: 202877 - DNA, 99 bp, Homo sapiens
gatcagagtatagggaggacgtgggcccattcattgcaggtgtgaacccacatccctgcccccagggccacctgcaggacgccgacacctacccctcag

SEQ ID NO: 202878 - DNA, 82 bp, Homo sapiens
gggaggtggccatcttcgggccccccaacacctactacgagggcggctacttcaagcgccgtgccgtccctgcagtgacacc

SEQ ID NO: 202879 - DNA, 75 bp, Homo sapiens
agtgacctcaaaggatttcagccacaggtgaaaatggcattacggacatcaggacatctcttactgggagtagtt

SEQ ID NO: 202880 - DNA, 90 bp, Homo sapiens
cagcttttggactccctattgtatttgccagagcacatctgggtgaagttgaacaaattgctatgatgaaaccaaaaggccagactgaac

SEQ ID NO: 202881 - DNA, 100 bp, Homo sapiens
gctggaccagtgggtcgagcagctgaacgagtgtaagcagctgaacgagaaccaagtgcggacgctgtgcgagaaggctggagcattggatttgctaaag

SEQ ID NO: 202882 - DNA, 78 bp, Homo sapiens
acgacctcagctcccagaggatcaccagcgtggccgctgccatggcccagacactgcagatggagatcccgaacttcg

SEQ ID NO: 202883 - DNA, 101 bp, Homo sapiens
cactgtcaaaactttacaagttaattgaagagtcttgtccacagctggcaaattcagtgcagatcagatcgccacatcacagaatcgtatctatctcacag

SEQ ID NO: 202884 - DNA, 100 bp, Homo sapiens
gccccgccaacgctgccgccggaaaatgaaactgaagccgtggtcacgtgacaggacatgtagtatatagcaggctgccagcgactcctgctcttgcttc

SEQ ID NO: 202885 - DNA, 89 bp, Homo sapiens
gcatggagccccgggcggcggacggctgcttcctgggcgacgtggcatctacacgggcgacagcttcgtcaccccttgatggggcagcc

SEQ ID NO: 202886 - DNA, 100 bp, Homo sapiens
gacggatccagagaaactcatcaggatttatcctggattcatacctgtgtgtagccttggagtggctcaagtgggtaggatgaactttggaaaggatgtc

SEQ ID NO: 202887 - DNA, 80 bp, Homo sapiens
acaagcactatcagatcaatgacatctacagctgcaggaagcggtacctccggcggcgggcagctttgggacagctgaac

SEQ ID NO: 202888 - DNA, 101 bp, Homo sapiens
gggcggagagaactcagcgaggattctgaggtaaaataccatgaagattttgaaaaaacaaaggggagaggctttactcccgtcgtggacgatcctgtgac

SEQ ID NO: 202889 - DNA, 100 bp, Homo sapiens
ggaacggatagtgaaagccaatgaccgtgaatataatgaaaagttccagtatgcgctgatggtgagaccattctaaaaggcctccagtccattttccagg

SEQ ID NO: 202890 - DNA, 75 bp, Homo sapiens
ggcgttgctggtgcgagtccttgactacgagaaagccctgttcttcccctgcaaggcggcagagcttgtcaacaa

SEQ ID NO: 202891 - DNA, 75 bp, Homo sapiens
gggctcgcggcgtctccggggaaagccgtggccccgagggcggatccgagataaacaggggtcacatgacgacag

SEQ ID NO: 202892 - DNA, 49 bp, Homo sapiens
ctcatggaggctgagcatttattcagtcctacaagattatcaattttgc

SEQ ID NO: 202893 - DNA, 97 bp, Homo sapiens
cgcgtggttcagacagacgccgcagccaggatggttgaggtaggcgaaaaccaagagtacatcggcctcgttctcctatattggaagaaaaagacat

SEQ ID NO: 202894 - DNA, 83 bp, Homo sapiens
ctcaagtcctggctcagcaagactctcgagcccattgattcgcctttgccagtctcatctcgtgtctgctttgttaagttcca

SEQ ID NO: 202895 - DNA, 96 bp, Homo sapiens
ctcagttggaagcagccgatccagcctgcggagcctgtggggcaggccagctgcgggccgtccagcggctgtgccacttctacagcgccgtcatgc

SEQ ID NO: 202896 - DNA, 120 bp, Homo sapiens
acccatcctgccgtccttctccactttcgccagcccgtgccgcgagcgcggcctgcaggagagacaagaggagcagcagcggcaccgcccctcaccctggagggtcctgtacaatctcat

SEQ ID NO: 202897 - DNA, 82 bp, Homo sapiens
ggccgtctccttaacaccgaacaccgcccggcctgcatgcctacgaaaaggaggacagtgatgaagtccacctggaggagtt

SEQ ID NO: 202898 - DNA, 74 bp, Homo sapiens
tgaaaagtcgcagcgagctggagccgccggagaccctggtgggcagcagtgggaccattctgaccacaatgcct

SEQ ID NO: 202899 - DNA, 96 bp, Homo sapiens
gttgctgccgccatacgcgctctccctgtttagccttgttcgggagtctagcagttctcgctcaccaaccccaaagcagaagaagaagaaaaagaa

SEQ ID NO: 202900 - DNA, 51 bp, Homo sapiens
aagaagaatctcaaccgatctggttttgcactgattgcaaaaataaagtcc

SEQ ID NO: 202901 - DNA, 82 bp, Homo sapiens
ttgccacggttttgacttacatctgcaactccaaggctacaggcaggaacaatctgcacatcgtgctgccacacgaggcttc

SEQ ID NO: 202902 - DNA, 51 bp, Homo sapiens
atggtggaagattcagatggagctggctacctccgggatgtgacaggcaac

SEQ ID NO: 202903 - DNA, 100 bp, Homo sapiens
ggaaagcttgcctcaatcctgcatcccccatagttaagaaaatcatcgaaaagatgctgaacagcaaagggattctcttcgtgaaggagtacgtgaatgc

SEQ ID NO: 202904 - DNA, 90 bp, Homo sapiens
cggcggtcgacatgttccaggtcccggatagcgagggcggccgcgccggctccaggctccctgactggcagtcctcacctttccgagctg

SEQ ID NO: 202905 - DNA, 100 bp, Homo sapiens
accggggtcctgctgtgcgcgctgctcagctgtctgcttctcacaggaggaagaaggcacctacgatcaaactctggagttccgtaggggaggtgatggc

SEQ ID NO: 202906 - DNA, 82 bp, Homo sapiens
ccatcacctacccgcagggcctggcactggccaaggagattgcacatgattaagtaccggtacatcccgttcacacatggga

SEQ ID NO: 202907 - DNA, 83 bp, Homo sapiens
aacccgcaccttgtgttccggaagttccagattttgcaagaacgaggctcaaggatgtgagggacacagtattgacagctgaa

SEQ ID NO: 202908 - DNA, 100 bp, Homo sapiens
ccccggaggaggatgggctgcagacacagcaggctgagcagctgcaaacccccgaaaaagaatccgaaagtcatctgagttggctatctgcacgttctct

SEQ ID NO: 202909 - DNA, 101 bp, Homo sapiens
taaatgtagcatatatcctaaaggagatggaagtgatgtaccatcatgggtagcctttgataaacaggatctagtgaaaagccatttgatgtatgcggtca

SEQ ID NO: 202910 - DNA, 51 bp, Homo sapiens
ctctactggccttgcccagcgcctaggtgctggagaatctggtaaaagcac

SEQ ID NO: 202911 - DNA, 90 bp, Homo sapiens
ccgagcaggaggcgccatcatgacctgcgaccgcatcaagcagtccgccagcggaaccaagcggcgcgtgttcatcatcgagaccatggg

SEQ ID NO: 202912 - DNA, 74 bp, Homo sapiens
ggtcctgcagcttataatgttccattgccaaagaaatcgtgcccaacttttcgacgggaagcagatggcagtga

SEQ ID NO: 202913 - DNA, 90 bp, Homo sapiens
ctgtctcctgttttctaggtggaaagaatctgatgagccttttaggcctgttcaggacaccaaccatgccctttgcttcctatggcctcc

SEQ ID NO: 202914 - DNA, 80 bp, Homo sapiens
tcacccaaacaatcggctgagaatgagaagaggtcttgttgcagtaggagaaagagcacaaaagaggtctgggaacttct

SEQ ID NO: 202915 - DNA, 100 bp, Homo sapiens
agcccagcccccagaaaggattgtgacatatcgttggacccagaattgagcactgccctgggaagaactaggatgaggtattgacttgctgttgccacat

SEQ ID NO: 202916 - DNA, 75 bp, Homo sapiens
gcctgacaacacagggcgtgggcaccgtataaacttgagttcagacttcctgattactcctgatttctactggga

SEQ ID NO: 202917 - DNA, 90 bp, Homo sapiens
ctggagttcctgcttagttcttcctgaggtctgagcaccctccaaactgagtccagatctgcaatggctgccatccggaagaaactggtg

SEQ ID NO: 202918 - DNA, 100 bp, Homo sapiens
gtcaagcgaagccttgaaaaagctgccctgagacggtgtcccgccgaaagctgtggacgtggctggaggagctgcagaaggagctgctggacgacgtgta

SEQ ID NO: 202919 - DNA, 83 bp, Homo sapiens
tccacttccacttaatgaatggttgctgcttttgctcagaggacatccatgaccctaatggtctttttgttcaagataaagtg

SEQ ID NO: 202920 - DNA, 100 bp, Homo sapiens
tggaagctgctctgtggtgtcagaaagacaaggaatgtggtgacctcacctatccatctccctcaaggcagcttttgtctttaggcccagtgggatttat

SEQ ID NO: 202921 - DNA, 100 bp, Homo sapiens
ggagtcggacctctatgccatgaacttcaatcccatcatttccagaaaggacatcacagcccggggagtcccaggcagtgctgtgctgctgtttgaggtg

SEQ ID NO: 202922 - DNA, 75 bp, Homo sapiens
aagccttcagtgggactcccccagcagatacattctcaaaggccaatgatgaggccaatcagagtgatacaagtg

SEQ ID NO: 202923 - DNA, 74 bp, Homo sapiens
gaaagttgacctgagcccgaaggacaaaaaggttgaattattccattaccaccttaactcagccccaactccag

SEQ ID NO: 202924 - DNA, 83 bp, Homo sapiens
caagggcgcagattctttctgtacgttacagaatgtctgaaggggacagtgtgggagaatccgtccatgggaaaccttcggtg

SEQ ID NO: 202925 - DNA, 88 bp, Homo sapiens
catgcccatgcgagtacctgaggaaggaagtggttacctggaaggaaaggagctgcagaacttgatccaggagctccagcaggcgcga

SEQ ID NO: 202926 - DNA, 51 bp, Homo sapiens
aaggattccaagtaactcttatttggactggaaaaggacacagcaacacag

SEQ ID NO: 202927 - DNA, 83 bp, Homo sapiens
acgatgagccagagacctacgtggcagctgtgaaaaaagccatttccgaaggtcatcatcagatttgaaatatttaaagtgga

SEQ ID NO: 202928 - DNA, 83 bp, Homo sapiens
tttaaacttaaagacctctttggacccgaaattgtaaggccttgtttgtatgaagtccagcacatctgtggttgagcttgtta

SEQ ID NO: 202929 - DNA, 100 bp, Homo sapiens
cccatgaagagatggtggattctcactgagttttgactagcggaagaaaaggagcagtgaggagaatgaataccttccaagaccagagtggcagctccag

SEQ ID NO: 202930 - DNA, 90 bp, Homo sapiens
cctggtggccagcgaagattatggcgacactcttgccgccatccaggtgacgtgcagctgtttgatctccagaaaagctcccagaaaccc

SEQ ID NO: 202931 - DNA, 75 bp, Homo sapiens
agaatgggattctgaccatctcacatgccacaagtcaacctatttgatttcttgacaagaccacaatctgatccc

SEQ ID NO: 202932 - DNA, 82 bp, Homo sapiens
agtcttcccgcgtccgccgattcctcctccttggtcgccgcgtccttggctggcgtagctccacgcaggagatcggtgagga

SEQ ID NO: 202933 - DNA, 75 bp, Homo sapiens
caacagccacacctcttcctcgacaatcacaaattacagaagccttggctcaagctttctggattgacatcaagc

SEQ ID NO: 202934 - DNA, 110 bp, Homo sapiens
ccctggagcctcagttggaagcagccgatccagcctgcggagcctgtggggcaggtgtgccagaaggctggcgagatctccctcctgaagcagcagctgaaggactcgca

SEQ ID NO: 202935 - DNA, 90 bp, Homo sapiens
cttggattcagacgccgattcgcccaggtgatttgatgaaggctgctgcaggagagttcgcagatgatccctgctcttctgtgaagcgag

SEQ ID NO: 202936 - DNA, 101 bp, Homo sapiens
acaagaaaggcaaggaaacatcttttgacaagatgtcacctgaaagtggtcacagccgcatctttgaagggtccaaattccaagcctgtagtgtccttcat

SEQ ID NO: 202937 - DNA, 75 bp, Homo sapiens
tgtggatttcagtggcgatggtaaaagcagtggcaaagatttccatcaggaccctgatgctcccataagacagaa

SEQ ID NO: 202938 - DNA, 100 bp, Homo sapiens
gcccacgagaggcagcgccatggcggagcagacctactcgtggatcatgtattcataagggatgaggcgggccacggcgatcccaggcctgagccgcggc

SEQ ID NO: 202939 - DNA, 87 bp, Homo sapiens
gaggtggagaaggagctgtttgccctgaaacccatgaactgcccaggacactgttgttgcgaagctctttggtgaataatagaactc

SEQ ID NO: 202940 - DNA, 100 bp, Homo sapiens
actgaccaagcccaaacctcaagcggtcagatagcatcagacctgcattgaacagtcctgtggaaaggccaagcagtgaccaggaagagggagaaacttc

SEQ ID NO: 202941 - DNA, 50 bp, Homo sapiens
ctcatcaccggtatcacaggccagggtggtgattccactgaagcaactgc

SEQ ID NO: 202942 - DNA, 80 bp, Homo sapiens
atcccagccacgccgggcataggagatacttctgggaaccccaggcgtcagtctcctcatctgtaaaggagagagaaccg

SEQ ID NO: 202943 - DNA, 50 bp, Homo sapiens
ctcgggagccctggagtccactaaagcggccgtggaacaccggatccgtg

SEQ ID NO: 202944 - DNA, 100 bp, Homo sapiens
gcgcaggagagctggagtcaggcggagaccgcaggctgaccccgcagcggccgggctgtcgcggcccccacctcagagtgatgacagacctaatgctcta

SEQ ID NO: 202945 - DNA, 90 bp, Homo sapiens
gagcgctggagcttcatccgggcacttcataagggatccgcagctgctcccgctctccaggactgtgaaggccttattgttcgctctgcc

SEQ ID NO: 202946 - DNA, 80 bp, Homo sapiens
gggaagaacttcttcagaattagaaaggagctgcttcccaataaggaaacaatcgtcagtatttaaacagatcacatcat

SEQ ID NO: 202947 - DNA, 75 bp, Homo sapiens
tgagactctccctaccctgcaggcaatattttatccagttcaggtacctcagccagcatggcagcctctttccca

SEQ ID NO: 202948 - DNA, 153 bp, Homo sapiens
tacctggagcagcctggaggtgaggcgatgatcgagtacatcgtgcagcagtgcgcgctgccccccgagcaggagctccagagacacaagatcaagtgctgcttcctatcagctggagtcactgccctgcttgtcatcatcatcatcatcgcc

SEQ ID NO: 202949 - DNA, 98 bp, Homo sapiens
ggaagaagatgaagatgcttacaagaaacagttctctcaatacataaagaacagcgtaactccagacatgttttgtgtgagaatagaaaagaatcctg

SEQ ID NO: 202950 - DNA, 90 bp, Homo sapiens
ccgatgggttgtccgactgggagcagaggaagccttgaggacctactcacagataggaattgaaggaactgcaagcacatgttgaccaga

SEQ ID NO: 202951 - DNA, 82 bp, Homo sapiens
ccagctgtgcggagctaggacgcggaacatcccagaggccagcatcaacatacaatgcagatcttcgtgaagactctgactg

SEQ ID NO: 202952 - DNA, 100 bp, Homo sapiens
gctgggaagtgcaggcaaagccggctgttaccctgcacagccgtcaccctcaactttcccttcagattataagcgccatggctatggctagtgttaaatt

SEQ ID NO: 202953 - DNA, 50 bp, Homo sapiens
ggcaacttcagtactgacatcaaggtgcgtctaatgctagtgttggcacc

SEQ ID NO: 202954 - DNA, 74 bp, Homo sapiens
taaaaacatggttaaatcagcagatggagtaatcgtttcaggagtaaagctctattaccaggttttaaacttcg

SEQ ID NO: 202955 - DNA, 80 bp, Homo sapiens
gagaaatgttacttaaggcagccaagacagaagcattaaaatgcgtggctcaggctagcaagaacagatcactggcagat

SEQ ID NO: 202956 - DNA, 100 bp, Homo sapiens
caaaaacatcaaaacggcgatccaaaaattcagtggaagacaagttggatggcttgaggactggtactaaaaggaaacgtgactgggaggccattgccag

SEQ ID NO: 202957 - DNA, 100 bp, Homo sapiens
ccagtagaagccaacacggctgcgtgttaggagaggacatgacagtgcttccgtctttctcccctgggggacacgtgaaacgggagacattagaaccatg

SEQ ID NO: 202958 - DNA, 82 bp, Homo sapiens
gaccgagcgcctcgacctcggtctgagcatctgggctgatgggccgtaccctgcaccgtgagccacccgcaggagaccagga

SEQ ID NO: 202959 - DNA, 100 bp, Homo sapiens
gtgaggggggtgagttcaggaagcggagaccccgaggaacccagcagggtcaccatttgcagcgcaacatggcagccgccagagcagccaccctacccgc

SEQ ID NO: 202960 - DNA, 88 bp, Homo sapiens
tgccatgtccgcaccggcaccatcctgctcggcgtctggtatctggtcaccgaggaggagcccagctccaaccacacggtcatgatcc

SEQ ID NO: 202961 - DNA, 90 bp, Homo sapiens
gtaattgcctgctttgattccctaaaggttaatggtgcaatgtaagaaacctttaaaagtttctgatgaattagtgcagcaatatcaaat

SEQ ID NO: 202962 - DNA, 89 bp, Homo sapiens
tcatttaccaaccctggaaccgcagacctctgggcttcctgagttcacccagggcatgatcttacctacaatgaatggagagtcagtag

SEQ ID NO: 202963 - DNA, 100 bp, Homo sapiens
gagaatggcgtcccgcggccggcgtccggagcatggcggacccccagagctgggtctggaacagaatctgacagtgatgaatcagtaccagagcttgaag

SEQ ID NO: 202964 - DNA, 88 bp, Homo sapiens
atatttaatggaaaatcgcttggttaaaacctgacacttttaacaggcacttctggatccagctgtgtgatagccgcactaggaaata

SEQ ID NO: 202965 - DNA, 75 bp, Homo sapiens
atttacgcggatgtcggcgaagagttcaaccagatcatacctcactcctgttagggatgaagagtctgaatccca

SEQ ID NO: 202966 - DNA, 75 bp, Homo sapiens
ttttacctcagttttctagcattgaatatgtagttctgctttatttgaaggtagacgcatcgaatttgcagaaca

SEQ ID NO: 202967 - DNA, 82 bp, Homo sapiens
gcgaggctttcagttctttggaattccattcttttccttattcttctgatgtggatccaggggacccccggagaccctaccc

SEQ ID NO: 202968 - DNA, 50 bp, Homo sapiens
aaaacatcaaagaggtctagcaaaggcagctcctttgggacccagatcat

SEQ ID NO: 202969 - DNA, 97 bp, Homo sapiens
gcagctgtcactcatcagtggttgtcccaatatccaagaagcagtagagggtgccatgcacattcagcactattcctgatcagagaactccagttgc

SEQ ID NO: 202970 - DNA, 75 bp, Homo sapiens
ggaactgaagaccacaaaacgtaaaatgaaccttaaaattcaagagacaggggcaagtgtccgagtggtgaatca

SEQ ID NO: 202971 - DNA, 98 bp, Homo sapiens
tatggatgatcgagaggatctggtgtaccaggcgaagctggccgagcaggctgagcgatacgacgggcgccctgcgtccggcagaggaggcgagcatc

SEQ ID NO: 202972 - DNA, 60 bp, Homo sapiens
aataccaggagcagcctcatctgttggacccgcaccttgtttggcctcagccagtttcct

SEQ ID NO: 202973 - DNA, 75 bp, Homo sapiens
ccataaacgcccccaatttcccagctgctaaaggaagaggaagggacgcactctctgagatattttcgcctgggc

SEQ ID NO: 202974 - DNA, 100 bp, Homo sapiens
gaaggtgccctctttgcaacatttcaggaaaacagagaaagaagtgataggagggctctgtagagagaagaagaaggaggttcctgctgtgccagaaacc

SEQ ID NO: 202975 - DNA, 75 bp, Homo sapiens
caggcctgcgtccgagtctccgccgctgcgggcccgctccgacgcggaagaaggaaggggagttcaccctgcacg

SEQ ID NO: 202976 - DNA, 101 bp, Homo sapiens
cacatttccaagtacattctcaggtggagacctgaagagaaaactggccagaggccatctgaagccaaagagataaaactttatgcccagattccccctat

SEQ ID NO: 202977 - DNA, 100 bp, Homo sapiens
tggacttccagtgtgagcactggccagagtgaccaggctgaccagcaccagccctgatccaggtgactttgacactgaggctggagctgtgtcctcctca

SEQ ID NO: 202978 - DNA, 98 bp, Homo sapiens
gaaaatcaatctaaacatttgtgggaagttgtattcatcaataatgaaatgctgactaaggaacaagtcctggtacctgggctagcttggttcctttc

SEQ ID NO: 202979 - DNA, 100 bp, Homo sapiens
ccgtcggggagacgctgtggtgtgactggggcaggaccatcaggtgaaaggtgtagcagtcactcggcctacacccacagcatcgaccttgtgaacccag

SEQ ID NO: 202980 - DNA, 82 bp, Homo sapiens
ggagaactacagaaacctggtctccctagcccaagaagatgaaaggattgttcttgttgacaacaaatgtaagtgtgcccgg

SEQ ID NO: 202981 - DNA, 100 bp, Homo sapiens
gggtcagaccctttgggttggcttcgtggctccacgacttactctctacccttggcaggtggtatggcaggacttcagtcaatgatgaggcagtttcaac

SEQ ID NO: 202982 - DNA, 75 bp, Homo sapiens
ctgcacttagccccgcgcccgaggtcgccactgggacactgtgaaccaggagtgagtcggagctgccgcgctgcc

SEQ ID NO: 202983 - DNA, 100 bp, Homo sapiens
gagaagcgcgcgggcgcgcaggccgcggggagcacctggacaatgcagatcttcgtgaagactctgactggtaagaccatcaccctcgaggttgagccca

SEQ ID NO: 202984 - DNA, 99 bp, Homo sapiens
ggacagtttctggaagttataacgctacacgaagaactaagaatattattagcacaagagcaccatactttgagggttcaaaccttgtactactcagct

SEQ ID NO: 202985 - DNA, 99 bp, Homo sapiens
cttcaccgaagcagtggacctttattttgaccacctgatgtccagggtggtgccactccagagagcatcagtgatgtcacgtttggagcaggggtcagt

SEQ ID NO: 202986 - DNA, 83 bp, Homo sapiens
gaagaggcggtggaggacacgacgcgcttaaaggtttggtgccctggttgtcagatgttggaaagcagtaggacggaacatac

SEQ ID NO: 202987 - DNA, 100 bp, Homo sapiens
ctcatgggcccaagctcccttcctgcctcaggctcccaagtagctgagattactggtagcccacctgggaggaattttccagagatcactgtctgatgac

SEQ ID NO: 202988 - DNA, 90 bp, Homo sapiens
gcgggaaaaggctaatggcacaactgtccacgtaggcattcaccccagcaagggcctctgaaaaatggaaccaaattctctgaggactaa

SEQ ID NO: 202989 - DNA, 87 bp, Homo sapiens
atttaggagctctgctcaaagccagacgtgatgtcttggcattgcccattttcaagcaggaagattccagccttccattggatggtg

SEQ ID NO: 202990 - DNA, 100 bp, Homo sapiens
acctgaacaagtcccagctgaagctgggcatctggggcgtgttccttgcctgtatctccccttggttcaatagctaccagatttttggaagaggaggaac

SEQ ID NO: 202991 - DNA, 100 bp, Homo sapiens
ctctataagaacatgtttttctaagccctttttgtgccaggtgtcccgttaacgtctctgttagttcagaggatgctggaggtcagcagattggcttctt

SEQ ID NO: 202992 - DNA, 100 bp, Homo sapiens
cctacagtcgggaacatgaagggagactgcgatacccgtcccgaagggagcctcccccacgaagatctcggtccagaagagcgcatgaagaggccaacgc

SEQ ID NO: 202993 - DNA, 101 bp, Homo sapiens
tgacagactatggggcctttatcaaaatcccaggctgtcggaagcaagttacatgggaattggtctttctgctcaaggtgtgaacatgaatagactaccag

SEQ ID NO: 202994 - DNA, 82 bp, Homo sapiens
cggggccgggcgacctgggcaccagcaggacccgaggccaggagccaggggcccagaagaccatggtgaatccgggcagcag

SEQ ID NO: 202995 - DNA, 100 bp, Homo sapiens
ctggaagctctttgcggtggcgttggtgctgtttgcggatgctgatgcaggaccatggccaacctggagcgcaccttcatcgccatcaagccggacggcg

SEQ ID NO: 202996 - DNA, 114 bp, Homo sapiens
ctcgacggggaggagatcccggtgcagaagaacatcctggcggcggccagcccgtacatcaggaaaatgtttataggaggccttagctgggacactacaaagaaagatctgaag

SEQ ID NO: 202997 - DNA, 83 bp, Homo sapiens
gtgttcgttgtgccagcgactaaaaagagggcgtgatggtgggcatgggtcagaaggattcctatgtgggcgacgaggcccag

SEQ ID NO: 202998 - DNA, 59 bp, Homo sapiens
gtcaagtcgtgttctgatcactactgacttgttgctcatgtgctcctcggtgcagaagg

SEQ ID NO: 202999 - DNA, 100 bp, Homo sapiens
tcaacccctactttcctggccaggccattgccatggcccctcccatctacacagatgtcttagagtttgacgatggccctcggtcagcgactggatgctc

SEQ ID NO: 203000 - DNA, 50 bp, Homo sapiens
ctctagaccttgccaagatggcacaggtacatgtcccagagcaagcacac

SEQ ID NO: 203001 - DNA, 90 bp, Homo sapiens
acaacctttaagcagcagaggagcacgaggatcgtgggagctaagaaccgagagacacacaagattgcagtattttatgttgctgaagga

SEQ ID NO: 203002 - DNA, 83 bp, Homo sapiens
atttaaccgctctctgcctcccaggcatcaagcatgatggaaccatgtgtgatacctgccgccagcaaccaatcattggcatt

SEQ ID NO: 203003 - DNA, 89 bp, Homo sapiens
ttgtccctggggcggcagcgcggacccgcccggagatgagctgctcagataaagaatttgatgagccagctaggaactaagcaggactc

SEQ ID NO: 203004 - DNA, 101 bp, Homo sapiens
gcggcggcggatcccggagagccccggagtgagcggagtagcgagtcggcaacccggagcttggtgatccagctatttttcctgccgtaattgtggaacat

SEQ ID NO: 203005 - DNA, 74 bp, Homo sapiens
ggagtgcttcattaccacgagataggcaatacgaaaggatggtccagcagtttggggtggattttgagaagagg

SEQ ID NO: 203006 - DNA, 99 bp, Homo sapiens
gtacgagcgacaggagttcatctacccggagaagcaggagccctactcggcagttcttcccgtccttccctcctgccatcccgggactgcccaccctgc

SEQ ID NO: 203007 - DNA, 75 bp, Homo sapiens
tccataagcgtggcaagaaaaatgggaagttctcggttcatacgttttatgaagctgtggggtacatgattggtg

SEQ ID NO: 203008 - DNA, 98 bp, Homo sapiens
tcagcgtgctgtccaccatcgagcagtatgccgccctggccacggggactctcttctggatgtgtactaatggtcacttgatgtgcgctggctgtttt

SEQ ID NO: 203009 - DNA, 98 bp, Homo sapiens
gctacaaagagggcaaaccgtgcattattataaagctcaaccgagttctaggcttcaaacctaaggtcttcaatgaaatttatccagtatggacttac

SEQ ID NO: 203010 - DNA, 98 bp, Homo sapiens
gaccttctatgaagtcaactttgatgatggctccttcagcgacaatctttatcctgaggacatagtgcctgtttgcaaggtttcaccagagacaacac

SEQ ID NO: 203011 - DNA, 100 bp, Homo sapiens
atggctgctgttgcttctgggccagaggaagagaatgagttgaccatgttgttcctgaacctgggtccagcctactgacctctttcgagaagtggcacga

SEQ ID NO: 203012 - DNA, 90 bp, Homo sapiens
cggctctgagccagcggcggcttccagcccgactgggcctgccggggctgccccgcgcacggtttctgggtgtctctggggagcccctgg

SEQ ID NO: 203013 - DNA, 100 bp, Homo sapiens
caggacccagcgggggcagcgcgatgaggcgggtgaccctgttcctgaacggcagccccaagaacggaaaggttgaaaggattgttgacaaaaggaaaaa

SEQ ID NO: 203014 - DNA, 146 bp, Homo sapiens
atttgcgacagcaagggggttgtccacgaggaacaaattgtacatttgcccattctcaggaagagcttgaaaaaaggcagagtgcttattcactttggaagcgcactcgcaggagcagaagaagagagtgtgctggtgcctgtcgg

SEQ ID NO: 203015 - DNA, 88 bp, Homo sapiens
cccagattggaggaggctggctctggtcttcgatgcacaggagtggccgttatggaacgcagaattcggttccctcaaaattataaag

SEQ ID NO: 203016 - DNA, 89 bp, Homo sapiens
agaagaagctgaggatgaagaagatggatgttttagaagaatgtatgtctcttcccaagctatcttcttattctggatgggtggtagag

SEQ ID NO: 203017 - DNA, 82 bp, Homo sapiens
caccatgtctcgccgcaagcaaggcaaaccccagcacttaagcaaacgggaattctcgccttcggaaccaaaaagaagcttc

SEQ ID NO: 203018 - DNA, 98 bp, Homo sapiens
gtctgcgatgcagggcggcggcctgtaatcccagcgaccgccaggtgtgccatgcggagctgaatgccatcatgaacaaaaattcgaccgatgtgaaa

SEQ ID NO: 203019 - DNA, 75 bp, Homo sapiens
gaaaaaagaaacattttgaagaacacaattccatgaatgaactgaaggtgaagtgtcagactctgacagcaacag

SEQ ID NO: 203020 - DNA, 90 bp, Homo sapiens
gtggagcaagataatttctgcattatcacggagtactgtgaggaacattaatcctgatgttctttttgaagtacacaactataatataac

SEQ ID NO: 203021 - DNA, 51 bp, Homo sapiens
aagatcatcattaaggacggaggcacgaaatcttacaggctggtgttaaag

SEQ ID NO: 203022 - DNA, 98 bp, Homo sapiens
agaagttcaagctctacctgaccatcatcctgctcctgggtgccgtggcatgtcgatttgtccttcactacaggctcaaggatgtccaatcaatggat

SEQ ID NO: 203023 - DNA, 57 bp, Homo sapiens
cctgtcaggccttgcctcccgtggagttgttgcctgaccacagactgggtacatctc

SEQ ID NO: 203024 - DNA, 80 bp, Homo sapiens
aaggactcagaagatgcagccaaagtggaaggtacaggtttgcagattccgccagcagcacagcaagctctacagatgag

SEQ ID NO: 203025 - DNA, 88 bp, Homo sapiens
gagcacgcgggtctgtcatcatgtcgcgttacgggcggtacggaggaggtcatcatcagatttgaaatatttaaagtggatacaaaac

SEQ ID NO: 203026 - DNA, 86 bp, Homo sapiens
gagcgacaagccgctggcagccgcggatctcaccgccgctcaggctggcccgagataacttcttccgctgtggtgtgctgtatgag

SEQ ID NO: 203027 - DNA, 98 bp, Homo sapiens
cctcagaccaaccagcccaaggaacatcttgccaatttcaaatcgggtgacaaagttgttgtcacgtactccaaaggttatccgtgtggtggaaataa

SEQ ID NO: 203028 - DNA, 50 bp, Homo sapiens
cataagtggaattttggagatattcaaagattgtgttcaattagaccttc

SEQ ID NO: 203029 - DNA, 101 bp, Homo sapiens
tgggcctgctggtgggcatggatgtcctcactctcgccatctggcagatcgtggaccctctgcaccggaccattgaggttaacacagaaatctgcctcctg

SEQ ID NO: 203030 - DNA, 76 bp, Homo sapiens
ccccctgaaccccaaggccaaccgcgagaagatgacccagcgctggccgcgcgccgaacccgagtccggcggcacc

SEQ ID NO: 203031 - DNA, 74 bp, Homo sapiens
ggagtgtgtgccttgtggagaccctcctcctccttacgaaccgcactattatggtgacaagctgaacatggagc

SEQ ID NO: 203032 - DNA, 100 bp, Homo sapiens
caggaagaagcaccatggattggtgaggcagcatgcccgggctgccactgttgggctcatcccactgatgacaccacgacgctctctgagagaccatccc

SEQ ID NO: 203033 - DNA, 75 bp, Homo sapiens
tccttccagcagtcgagcaccgccaagtcggccacctggacggatagaccactggaacaatgagaaggagagaat

SEQ ID NO: 203034 - DNA, 76 bp, Homo sapiens
atgaactgtcagtggatgaagccgcatggtatcagctctgtgataacagcgtgggggtgctcttcaatgactcaac

SEQ ID NO: 203035 - DNA, 90 bp, Homo sapiens
gagtacctgaaccggcacctgcacacctggatccaggataacggaggctggggagtgcatccgccccaacccttttccccctcgtctcct

SEQ ID NO: 203036 - DNA, 51 bp, Homo sapiens
acaagcgcgggacccgctatgagaccattcctcaagaattttgtatccaag

SEQ ID NO: 203037 - DNA, 75 bp, Homo sapiens
gtgttggtgatattatcaagctagaaaataaccagtttgtggcggagcttcatgaacaactgggaggtgtacaag

SEQ ID NO: 203038 - DNA, 75 bp, Homo sapiens
cagggacacctggttccagctgcagcacgtggacgctgactcggaagtgcagccaacacaagccatcagccccat

SEQ ID NO: 203039 - DNA, 98 bp, Homo sapiens
gttacttcttcctcaacaccagcaccgcagatgttgtcaaggtggcctaccaggaggccaggggtgtcgccatgttgactggtctgagtgtctccaat

SEQ ID NO: 203040 - DNA, 90 bp, Homo sapiens
cagttgccctctggcgccatgtcgcagaacggagcgcccgggatgcaggaggagagcctgcaggtgaacttcgaccacttccagatcctt

SEQ ID NO: 203041 - DNA, 100 bp, Homo sapiens
actgttcggttaaaggagcctcctgtggatatctgtctaagtaaggtggaaccgtcccaaaatgtcccttgctcagaagaaggatcgggtagctcaaaag

SEQ ID NO: 203042 - DNA, 97 bp, Homo sapiens
gcttcatcaaaaatagtgatagctttgataaatggttcaggaatgatgggcgtacagcctgcagcttatgttagtgctcctgtcacccaccaactag

SEQ ID NO: 203043 - DNA, 87 bp, Homo sapiens
ctgagtgatgttcagaagtttgcagagataaatggcctatatgaacccaatagcaatggcgagatcaaggggtccaatccagtcttc

SEQ ID NO: 203044 - DNA, 74 bp, Homo sapiens
cgggcttccttgccctgtccgggattgtctttggctatagagtttttttttttaaagattactaaacatacagg

SEQ ID NO: 203045 - DNA, 98 bp, Homo sapiens
ccgccatgagccccccgctctgagggccccggcccctggatgcacagccccggcgctgggcggcaccttcctacttctgcccagccacagccctcccc

SEQ ID NO: 203046 - DNA, 75 bp, Homo sapiens
gatgacagtgaggaggaacaagaggagagctatgccaagaccaagacgagagccgaggtgcggggcggtggccgg

SEQ ID NO: 203047 - DNA, 100 bp, Homo sapiens
cttcaggcacactacagaactaaatatgcatctccagtggctgttggacaattatgagacagcagaaggagtgagccttcccagaagcactctgtacaac

SEQ ID NO: 203048 - DNA, 100 bp, Homo sapiens
ccagaactgaggcttggctggactgtcccccgactccagtgctgcctgaggggcgccggagccactcggcctatgtgacaagccgaggcggtgagccggg

SEQ ID NO: 203049 - DNA, 151 bp, Homo sapiens
gattgggacaaaaatgcaaaagactgctaaagtgagagtgaccaggcttgttctggatccctatttattaaagggagaagagaagtttacctttattgagaaatgtaacaaccctcgttctgtcacattattgatcaaaggaccaaataag

SEQ ID NO: 203050 - DNA, 100 bp, Homo sapiens
gtatgagtggtgtggacagaagcggatacgggccaccactctcctggaaggtggcttccgagacgcaaacatgcagatctttgtgaagaccctcactggc

SEQ ID NO: 203051 - DNA, 75 bp, Homo sapiens
gtagctgagctgcagctgaatcacacaggaagcttgctgtcttcgatacgtggagctccttggcggtccacattg

SEQ ID NO: 203052 - DNA, 90 bp, Homo sapiens
ctcgccgcagggcctgggcgccttcacccccgtggtgcggcagcgcacgctgcagtccaatggattaattgcctctgaaggagccataag

SEQ ID NO: 203053 - DNA, 82 bp, Homo sapiens
ggccctgatcatcctgctgggcttcgtccagatcgggaaggatgctgtgtgctgtggacccacctggggttcatggagtggg

SEQ ID NO: 203054 - DNA, 75 bp, Homo sapiens
ttcttctttgagaaaaacctgaaagatgtctcaggcaaactctttgattctacaatagctgatgagggaacatgg

SEQ ID NO: 203055 - DNA, 46 bp, Homo sapiens
catcctggaagctgggaaaggctgcagaaccttggcctgaaaatgc

SEQ ID NO: 203056 - DNA, 106 bp, Homo sapiens
gataattatccaaataaattgcaagcattctatccaaatgcgcttctctgaagtagctttggaaagtagagaagaaaatccagtttgcttcttggagaacactgga

SEQ ID NO: 203057 - DNA, 74 bp, Homo sapiens
acaggagctggagccctcaacaaagttcaagaacatgaagactcgggtgactcagaagtggagaatgaagcaaa

SEQ ID NO: 203058 - DNA, 100 bp, Homo sapiens
aggaggaagagctgaatgactcaagtctggacctgggacccactgcaggtcgacatttataactcagaccccctgatctgccgggcagggctgaaggtgt

SEQ ID NO: 203059 - DNA, 75 bp, Homo sapiens
acagtgtgtaccattccgacgttacaatggtggagttggcaggtgtgcgcagctccatcaagtatgatggtgaag

SEQ ID NO: 203060 - DNA, 90 bp, Homo sapiens
gacagattgcagtatccgggatccagttaggaaccttcacccccccaaggatgaaggacccaaggtttcagagactcctccactctctgg

SEQ ID NO: 203061 - DNA, 74 bp, Homo sapiens
ggtgcccactcctcggcccagggacgatggaggagatgtataagaaagctcatgctgctatacgagagaatcca

SEQ ID NO: 203062 - DNA, 76 bp, Homo sapiens
tcagaattagaaaggagctgcttcccaataaggaaacaatcgatgggctagaggagaagctgtcccagtgtcggag

SEQ ID NO: 203063 - DNA, 83 bp, Homo sapiens
aacatccaggctgtactgctccccaagaagactgagagtcaccacaaggccaaggttggattggatgctgctggcaagacaac

SEQ ID NO: 203064 - DNA, 90 bp, Homo sapiens
ggaagatggcgcctgttgtgacaggagccctatgagtttgtctctctggaatggctgcaaaagtggttggatgaatcaacacctaccaaa

SEQ ID NO: 203065 - DNA, 83 bp, Homo sapiens
gctgaagaagcagttctacaaggcgagccagagcacgtgcccccggagctgtgggagcccttctataccgaccagtacgcgca

SEQ ID NO: 203066 - DNA, 100 bp, Homo sapiens
tgggcttctctgaggcggcgagagatggtcaggtctggagctcgaccgggccaggtctccggataactgtgctcctgacatccttccttatggttttggg

SEQ ID NO: 203067 - DNA, 90 bp, Homo sapiens
cactttgaggattccaaagagctccggctaatagggctgtatttctggtgcggcacaagtccacccggcagcgctttgccatgaagaaga

SEQ ID NO: 203068 - DNA, 75 bp, Homo sapiens
tccgtcagccggtagatctccttgaatatccagatcagtgaatgcttgtgaaaagacctcatttatgtttctgcg

SEQ ID NO: 203069 - DNA, 75 bp, Homo sapiens
gctcagtctgcggccaagactccgtcctgcaaggtaaatgagctggatggtatcccgttgatcctggacaactgc

SEQ ID NO: 203070 - DNA, 129 bp, Homo sapiens
ccacacacaggtgaatttaaaggagcagccctggtgtcacctatcagtaaaagatttggagcaagaggtggtggtggccttcccccgaagaaatttggtaatcctggggagcgtttgcgtaaaaaaaag

SEQ ID NO: 203071 - DNA, 98 bp, Homo sapiens
acatgcagctggtccaggtgcctagagtacatcatctggctgccagtccataatctacataccccaggatgttgtcagagccaaggagatcatcgccc

SEQ ID NO: 203072 - DNA, 75 bp, Homo sapiens
caagctgataggctgcgctaccggaatgtcatccagcgagtgattaggtgctggaggtggtgagagccaactatg

SEQ ID NO: 203073 - DNA, 75 bp, Homo sapiens
aaagagcaagcctaactcaagccattggcacacaggttgactatagtcaatggggccaatggagccaagtgtatg

SEQ ID NO: 203074 - DNA, 98 bp, Homo sapiens
cagatttgaaaattcacccttgtagagtcattcctgcctttgagcggactcccttttaagttcatggcctcccacgggaacgacgccgcgagagccag

SEQ ID NO: 203075 - DNA, 74 bp, Homo sapiens
gccgggacacctggaagccgagaaatgctcatgatggagcagtccaagaagtcctccctcatggtggcccgcag

SEQ ID NO: 203076 - DNA, 101 bp, Homo sapiens
cagcagcccagacgcggcacagagagggcctgggagcttgctgcagcttcagatgtggacgagtgtgcccaggccctgcacgactgtcgccccagccagga

SEQ ID NO: 203077 - DNA, 89 bp, Homo sapiens
caagcattggtcttccaggtcttcctggtccaaagagtcacctaaggtcctgcgagtacaagggtcgacccccaaaggcaggggcagag

SEQ ID NO: 203078 - DNA, 74 bp, Homo sapiens
gaacagttaatcctcaatttaagcctgatctaacccctagaaacaggaagatattttcgattcagataaagaag

SEQ ID NO: 203079 - DNA, 100 bp, Homo sapiens
agcggggcaaccactgcgagtactgcttcaccagtctgcatgaagaaatcagtgatttttatgaatacatgtctccaagacctgaggaggagaagatgcg

SEQ ID NO: 203080 - DNA, 123 bp, Homo sapiens
aagaactctacagcagtggcctgctagtgacactgatagctgacctgcagctgatagactttgaggacccagatgatgtggtaccagttggccaaagaagagcctggtgttggtgcatgtgct

SEQ ID NO: 203081 - DNA, 75 bp, Homo sapiens
gcggaatttcaagatggatcgggaacttgcttgctagaaaacaaagtgcaaggcttgacaaacacaatgacttgg

SEQ ID NO: 203082 - DNA, 73 bp, Homo sapiens
aggacactgaaattcagagaggggaagtgatttgcctcagcttgtactgactcctaaatgcaaagtccctgga

SEQ ID NO: 203083 - DNA, 75 bp, Homo sapiens
attccattgatgggaacttaccacatactcaggcattagtatcatttgaagacgtggttgtgaccttcactggag

SEQ ID NO: 203084 - DNA, 101 bp, Homo sapiens
cttgcattcagctcctctgtgtttgccgcctggggattttgcttatgtagcaagagataaagatacaagaattttgaaatgtcatgtatttcgatgtgaca

SEQ ID NO: 203085 - DNA, 98 bp, Homo sapiens
tactataagcaccaggagtttgacaatcacattaattcatatgaccatgctcacaagcaggttctccccatgacaccacctgaacgtctcttcctccc

SEQ ID NO: 203086 - DNA, 107 bp, Homo sapiens
atcctctcggtgttcccgctggcggcgggcatcttcttcgtgaggctgctcttcgagcggtacactgaggaggggacggctccgtcttcacattgtgcacagatctg

SEQ ID NO: 203087 - DNA, 75 bp, Homo sapiens
cagacggattcatttagagctgcggaacaggacgccctctgatgttatggaaacaaaggacatgctttacatcgt

SEQ ID NO: 203088 - DNA, 100 bp, Homo sapiens
tttgattccagtgtgaactgtcaatcataagttctttatagctccaagctctacagattcttcaaatatattgagaatagggatgttgcaaaaacagtgt

SEQ ID NO: 203089 - DNA, 75 bp, Homo sapiens
aatactactacatcccgcagtacaagaactggagaggcaattaagttggaatatgcaaggttggttaagttggcc

SEQ ID NO: 203090 - DNA, 83 bp, Homo sapiens
gacaatatgttcaagagaatggccgaatttgggcctgactccggcgggagagtaaaggtacatacctatgtcaacactacagg

SEQ ID NO: 203091 - DNA, 82 bp, Homo sapiens
gccgggatagccccggcggagcccgcagcttccctgccggagggtgtgaagacagagaatgaccacatcaacctgaaggtgg

SEQ ID NO: 203092 - DNA, 80 bp, Homo sapiens
cttgcagatcggtgacacagttcacatcctggagatgtacgagggcccagaggcagagctacacaaccatggaatccaaa

SEQ ID NO: 203093 - DNA, 74 bp, Homo sapiens
gatattaaaattgaagtcttctgtgagaggacacccaaaacatgtgagtactaaggctcgtacgtctgcatcga

SEQ ID NO: 203094 - DNA, 99 bp, Homo sapiens
gccctcgggcctcacgctgaagtccgaggcccttcgcaactggcaagaaaagtacatctgctatgctgagcagacccgcgcagtgttggccaaactggc

SEQ ID NO: 203095 - DNA, 80 bp, Homo sapiens
aggtcacctggaaattgccttattggaaaaacatttcttaccaaccatgtccaagggacctgcagttggtattgatcttg

SEQ ID NO: 203096 - DNA, 100 bp, Homo sapiens
tgaaaaattcaagaagttgaaaaacgcttttcacgtcacctggagagatgcacaggtactccaaagattcaggtttactcacgtcatccagcagagaatg

SEQ ID NO: 203097 - DNA, 74 bp, Homo sapiens
tcaaatacattttcgagtctggcactaaaggagtctactcttcatcttgtgttgagacttcgtggtggtgctaa

SEQ ID NO: 203098 - DNA, 82 bp, Homo sapiens
gtcagacgcagccgtagacaccagctccgaaatcaccaccaaggactgaatgtgggcccagttggcgtcattctgctttgac

SEQ ID NO: 203099 - DNA, 100 bp, Homo sapiens
cgataccgaagcgggctgtgtgccccttctccacccagagcctgaggaaatgacaagattgagaagcatgaacagacaactccagataaatgttgactgt

SEQ ID NO: 203100 - DNA, 100 bp, Homo sapiens
agagattcaggccagagttgtgggccgccgtcggcagcaagaacagagagagaggtggacagatctgagagatactgagcaacaagtggcccccacggat

SEQ ID NO: 203101 - DNA, 105 bp, Homo sapiens
ggagacatgggagacccggggtcggaggcataatcaccagcaacacccgggacaataatacgggggccacctacccccacctgaacttcagcattcccatcacgg

SEQ ID NO: 203102 - DNA, 98 bp, Homo sapiens
gcgagctgaggaaagagtacggaatgacctacaatgacttcttcatggtgctaacagatgtggatctgagagtcaagatgattttcagactgcccaac

SEQ ID NO: 203103 - DNA, 100 bp, Homo sapiens
aagaagtcgtagggggtgagggtggaagctgggaaacccacaggaggcaaccacactagtttagtctatacagtaacccaagtgggatgtctccttatgc

SEQ ID NO: 203104 - DNA, 90 bp, Homo sapiens
ccgatatcttcgccatcgccagcatcgccaacccggactggatcaacaccggggagtctgcgggtccccttcccctgagcccatctacaa

SEQ ID NO: 203105 - DNA, 75 bp, Homo sapiens
cagaccggccgctctcccctcctctcacggcacctcccaccatgaaggaatcttttgggtgagttgtgaggctgg

SEQ ID NO: 203106 - DNA, 82 bp, Homo sapiens
tgtcccggactagcgagatggcaaggctgaggacgggaggctgattgagaggcgaagaacatccagtcatggataaaaatga

SEQ ID NO: 203107 - DNA, 82 bp, Homo sapiens
cagacctgcaagctctttgacacacagcagttcttgtcagatatatttttgccatcatggatcagtttggagatatattaga

SEQ ID NO: 203108 - DNA, 83 bp, Homo sapiens
cggacagattgaccttcagagcgagagtcaatgcatgtgttgatgtggtgctctcaggggtgaagctcttgcaggcacttggc

SEQ ID NO: 203109 - DNA, 107 bp, Homo sapiens
gaggccgaggggcccaggcagagcccggagaaaagccacatgggccaattcctgtccccccagcagcatggcatcgtgtgctgaaccctctgagccctctgccccac

SEQ ID NO: 203110 - DNA, 75 bp, Homo sapiens
tggggctgtttggaaagacccaggagaagccgcccaaagaactggctcttgatggaaatgtgtatgatcatctca

SEQ ID NO: 203111 - DNA, 100 bp, Homo sapiens
gctgcgggtgcggcacctggaggaggagaaccgaggtgctgtacttctttgcagtatacaaggactagcagttaatattgacccaatcttatatacgtgg

SEQ ID NO: 203112 - DNA, 80 bp, Homo sapiens
ccgagaccgcggccgggaccgagggttttggctacgggcctccacctccaccgccagatcagtttgcccctccgggggtt

SEQ ID NO: 203113 - DNA, 100 bp, Homo sapiens
cgtatggccacagaagttgctgctgacgctctgggtgaagaatggaaggtaaacactacacgtgaagagtggtgaaagggaacattgattactgaagtgc

SEQ ID NO: 203114 - DNA, 100 bp, Homo sapiens
agcggtgatgtatgggaagtgctcattctgatggacttttgtagagatcctgataacttaagtgactctctcttttccggtgatgaagaaaatgctggga

SEQ ID NO: 203115 - DNA, 100 bp, Homo sapiens
tataccaggagacttacatcgatgaccttggacacctccatgttatggacacggtctttcttattcaggatatgttgggcctgaccaagccagccatgcc

SEQ ID NO: 203116 - DNA, 98 bp, Homo sapiens
ttggtgattttgatgatagccacaaagcaagcagggtgttgactttaaggtgaaaacaatttcagtggatggaaataaggctaaacttgcaatatggg

SEQ ID NO: 203117 - DNA, 82 bp, Homo sapiens
catcctgccgtccttctccactttcgccagcccgtgccgcgagcgcggcctgcaggaggattcctaccggaagcaggtggtc

SEQ ID NO: 203118 - DNA, 100 bp, Homo sapiens
agctgctgcttccttcggccttgtccgagcaaacagaggcgctcatccacagagccacatctgttagatgccggtggccgtgggtccctacggacagtcc

SEQ ID NO: 203119 - DNA, 100 bp, Homo sapiens
acagcggccccctggagggggcagtcccgggagaacctgcggcggccggagcggaagaggaggctgcaaaatgggcccgggaagaagaagaagcccagcg

SEQ ID NO: 203120 - DNA, 74 bp, Homo sapiens
atggttcctacctggctgagttcctgctggagaaaggctatgagaaatgaaagctcattagcatctacactgaa

SEQ ID NO: 203121 - DNA, 100 bp, Homo sapiens
taaggattccaagtaactcttatttgattagccgatgaattacatatgccatctctccctgaaatgatgtttggagacaacgttttaagaatccagcatg

SEQ ID NO: 203122 - DNA, 74 bp, Homo sapiens
ctggaggctcgcaagaaagccaagaacaagcagctgggccatgaggaaggttatgatgtgattgctcaagccca

SEQ ID NO: 203123 - DNA, 75 bp, Homo sapiens
atcaagtgtcctacgtaaaggagtattggaatgatgtgttcagagttacactgttagaccttatgatagccaaga

SEQ ID NO: 203124 - DNA, 83 bp, Homo sapiens
ctgctccccaagaagactgagagtcaccacaaggccaaggcctcactaagcagtcttttgatcacacctttcccatctccaag

SEQ ID NO: 203125 - DNA, 100 bp, Homo sapiens
cgccgggcgtggacggtgtggggcggtcccggccccgcagttacacagaatataagttgctgatttcccaggtttcggatcgttctgtctcccccttctc

SEQ ID NO: 203126 - DNA, 75 bp, Homo sapiens
gagcagcagccctgtccggcatctgtcttgagctcccagcaagccaagaaggatcaagaaggtggagaagaaaag

SEQ ID NO: 203127 - DNA, 75 bp, Homo sapiens
gcctgaggtgcggagtttcgtgagtttttactgactcgagcatcaacaaagagagcattgtggatgtagaaggtg

SEQ ID NO: 203128 - DNA, 101 bp, Homo sapiens
cgagaatgaagccatccaatggatgcaggaaaactgtcagtcaagaacaatacccaagtgctcatcaactgccgcaacaataagaaactcctgggccgcgt

SEQ ID NO: 203129 - DNA, 75 bp, Homo sapiens
tggaagcaagaatttatcaaaggaaagatggatccagacaagcctgattacatcaaccccagagccgtgcagctg

SEQ ID NO: 203130 - DNA, 98 bp, Homo sapiens
ctcctgagtacctgggactacagcaccctcatcacatgtgtggattctgggattctcagagtctggcatgacaaggacaaggacacatcctctgaccc

SEQ ID NO: 203131 - DNA, 75 bp, Homo sapiens
cttggtcaaaaagcatgcccagacctttttggccctctgtgctacagtgaaactggaacgccaagctgaagaaga

SEQ ID NO: 203132 - DNA, 98 bp, Homo sapiens
ccacacgctgatggtgcagcaccgcatgatggtacccaaagtcaggaatcactagatttgatctacttggcgactttggaaggtttaattggctggga

SEQ ID NO: 203133 - DNA, 82 bp, Homo sapiens
accctggagtgaaaccattaagcttgtgcgtcaagtcatgaagggagaattccacaagttggctgatgccaagatatttttg

SEQ ID NO: 203134 - DNA, 82 bp, Homo sapiens
gaagcacggcaccaaaaacaagcgcggtggcagtagagaagagcatcacagaagttgctcaggagctgacagagctggtgga

SEQ ID NO: 203135 - DNA, 73 bp, Homo sapiens
acccaccaatggaagcagctggcttcactgctcaggtggccgacatgaaaaagaagatggaggacagtgtggg

SEQ ID NO: 203136 - DNA, 50 bp, Homo sapiens
gaaactggggaaaagtgcaatgcagatctccagcaccctgccggtggcac

SEQ ID NO: 203137 - DNA, 75 bp, Homo sapiens
tggcagtgccccttctgtcagcaggacaatttccctgaactaagcgagatatgtgcagcgggggctacagcgagt

SEQ ID NO: 203138 - DNA, 50 bp, Homo sapiens
cgaaagctgccaaaagtgacatgcaggacaaagagaaatccctgtcggat

SEQ ID NO: 203139 - DNA, 80 bp, Homo sapiens
tgctgttgccgggtgatagttggagcggagactgtgctgactgggttacttttttaaacactaggaatggtaatttctac

SEQ ID NO: 203140 - DNA, 75 bp, Homo sapiens
gaagttagtgaatctatggattttagatatctgccagatgaaaaagaagttgactctacagtaaaaactgtatca

SEQ ID NO: 203141 - DNA, 76 bp, Homo sapiens
cagcacaagtgctacagcgatgcagccgccaagaagcaggaatccctttgcccacgtccagctgaagccgacagtg

SEQ ID NO: 203142 - DNA, 75 bp, Homo sapiens
caaagattctgataactggcaaaacaagaaaaccgtgaggacatactgaatgccggtgacaaattaacagaggtc

SEQ ID NO: 203143 - DNA, 58 bp, Homo sapiens
ctgatattgcaccttcacagcaacaaggtagtgggcagcagtcagtgacaggtgtaac

SEQ ID NO: 203144 - DNA, 100 bp, Homo sapiens
gtattctcctccgaaccccttcatgcccaaatcccggaaactccagcgtgtctccagccgtgtgtactaatggtcacttgatgtgcgctggctgttttat

SEQ ID NO: 203145 - DNA, 74 bp, Homo sapiens
cggtggtgcgagtcttcggagcgaccccggcaggtactccaaagattcaggtttactcacgtcatccagcagag

SEQ ID NO: 203146 - DNA, 97 bp, Homo sapiens
cagaccctggagcctcagttggaagcagccgatccagcctgcggagcctgtggggcagaagctgcacacatacatgtaagagaagcaaaaatgtcag

SEQ ID NO: 203147 - DNA, 48 bp, Homo sapiens
ctagccaagctgtcctgcctggctaaacctattcgtcccgggcaacat

SEQ ID NO: 203148 - DNA, 101 bp, Homo sapiens
cagacggcgagacctcctgcacagaaatggtggagtcaatgaagaaagtagcagggatggatgtggagctgacagttgaagaaagaaacctcctatctgtt

SEQ ID NO: 203149 - DNA, 88 bp, Homo sapiens
ctgaaaaagtatcgtcgagaagcctatcatcgaatcttcagctagatgaagaaacccaataccaaactgctgttgaagaatcttttca

SEQ ID NO: 203150 - DNA, 75 bp, Homo sapiens
ttacaagtctcaagtcttctctgcagctttaccggggtgaagactgtctccttctgttgaagtctttgcctcctg

SEQ ID NO: 203151 - DNA, 75 bp, Homo sapiens
agatttacaaactggccaagaagggccttactccttcacagatcgggaagtgttcgccagttactacatgaaaag

SEQ ID NO: 203152 - DNA, 74 bp, Homo sapiens
tccactcggaagaagttggcagacaagttcatccacgcagatgggtcatcttactctggaagactatcagatct

SEQ ID NO: 203153 - DNA, 85 bp, Homo sapiens
cacgtgtgccgcgctctgggcacagccttggaaagtcaggaccgcgacggcagcagagcacagccatggcaatgacaggctcaac

SEQ ID NO: 203154 - DNA, 75 bp, Homo sapiens
ggtgcacaaaaagacacttatactatgaaagaggcaggaataccaatgggaccaatgccagcagcgggaatgcct

SEQ ID NO: 203155 - DNA, 100 bp, Homo sapiens
ggcggcggcgccgccggctttgaaccaattcaggcattggaaaccctaattgttgatctcgtgagctgcgggaaggagcactccctggctgtgtgccaca

SEQ ID NO: 203156 - DNA, 90 bp, Homo sapiens
gccactgacatgggtactatgcaggaaagaattaccactaccaagaagggatctatcacctctgtacagtggtggacttgctttgtgaag

SEQ ID NO: 203157 - DNA, 83 bp, Homo sapiens
cagagacattacatcaggaagatactgcagagatattctactccatctcattcattgtacagatggtctgtcttctgctgatc

SEQ ID NO: 203158 - DNA, 75 bp, Homo sapiens
atctctgttccaaatgctttgctgctgtgttccagatcatctccctggtaatttaccccgtgaagtacacccaga

SEQ ID NO: 203159 - DNA, 100 bp, Homo sapiens
cgacttcgatgatcgtgtgtcggatgaggagaaggtcagttcaccgggacctggaggcccagattgcgatcgtgacggagaaccaggccctgcagcagca

SEQ ID NO: 203160 - DNA, 100 bp, Homo sapiens
aaggttcaaaagctggtattgaacaagaaggatattggttgccaggagatgagattagatgtgaactttgtccccataaggatggagctttaaaaagaac

SEQ ID NO: 203161 - DNA, 75 bp, Homo sapiens
tttgaaccatgtttggattgaagccgcctctgtattacttaccagacgagctggagccggtggtgcaggatgggc

SEQ ID NO: 203162 - DNA, 100 bp, Homo sapiens
gctgaccacgctcggaccatcactgtggcactggctgatggtggccggcctgacaacacagggcgtggggacacggccaacacggtgaaggaaaagttcg

SEQ ID NO: 203163 - DNA, 82 bp, Homo sapiens
ccgggctttagctatggcagcggcagcaccgggagtcagcagagtgaaggtgctgccttcacctgcctggagactgccttcc

SEQ ID NO: 203164 - DNA, 83 bp, Homo sapiens
catcaaccgggccgtgccccagatgcccaccgggatggagaaggaggaggaatcgccgagcctcttgaagccattcttacaga

SEQ ID NO: 203165 - DNA, 100 bp, Homo sapiens
caacaaggggaatggggtcaaaatgagcagattaagatgttctacgaggagcatttgcacttggacgatgagatccgctacatcctggatggcagtgggt

SEQ ID NO: 203166 - DNA, 100 bp, Homo sapiens
tccttttgctcctggtggaacagttgttgcagcaagcgattcaggtaactcaactggacccaaataaatcattattggaggtaaagttgttccctcaaga

SEQ ID NO: 203167 - DNA, 109 bp, Homo sapiens
caaggctgacgtggagcggtacatcgcctcggtgcagggctccaccccgtcgcctcgacagccttatgccagcctggaccatcttggaggcagtgtaggatcatggaag

SEQ ID NO: 203168 - DNA, 75 bp, Homo sapiens
cccgggccgtccatcctcgcattgctgttgaatgctttacccagaaatacccaccagtaaagtttttatcagaaa

SEQ ID NO: 203169 - DNA, 100 bp, Homo sapiens
cgtcctgtccaccatgccctcagactcagaaagcagcagctccctcagcagtgtggaaggagaggacttgggtgaggagctgctgccacccgggctgggc

SEQ ID NO: 203170 - DNA, 90 bp, Homo sapiens
tgatttctgcatttccaactgagatcggattcaaccgcacatcatgacagatgttccggctacatttacccaggctgagtgtaatgggga

SEQ ID NO: 203171 - DNA, 82 bp, Homo sapiens
gtactcagcccacatgcccgctcacctgcgctgtgatgcctgcagagctgtggcttaccagaaacctgctcctccaaagcca

SEQ ID NO: 203172 - DNA, 83 bp, Homo sapiens
ggtgatttctgcatttccatctgaggtcttctgggaactggcttccagctgtttggctatgaggaaaaactgcagtccaatcc

SEQ ID NO: 203173 - DNA, 83 bp, Homo sapiens
ggcagaagccgagttcaacatcctcctggccaccgactcctacaaggcgtgtgctcgcccactgatatcggtgtactccgaaa

SEQ ID NO: 203174 - DNA, 83 bp, Homo sapiens
gtccaaacaatcatgggaatttccaaggggattcaaacttcaacagaatgtggcaaccaggcattccaaccctagggaagaat

SEQ ID NO: 203175 - DNA, 100 bp, Homo sapiens
gccgccggcgaaggaggaggcgttgccgggcccggtacaagcagagccttgacccaactgtggatgaagtcaagaagctctgcacgtccttacgtcgcaa

SEQ ID NO: 203176 - DNA, 87 bp, Homo sapiens
gccgtggctgtgctgagggtggcggccggatagctgagtccacctcaggacgaggccagtgcctgaaacgcatccgctaccatggca

SEQ ID NO: 203177 - DNA, 90 bp, Homo sapiens
ctcagcctcctgagtagcttggattacaggtggaagagatcatgcagctggtgaatgcctacttggccaacccctcccccgagaggccct

SEQ ID NO: 203178 - DNA, 83 bp, Homo sapiens
ccttggagagaggagaacgaacatcttctggacctttgtccagggagaagatagcattcttcacaaggccaaggatcaacata

SEQ ID NO: 203179 - DNA, 100 bp, Homo sapiens
aatagccagatctcagaggagcctggctaagcaaaaccctgcagaacggctgcctaatttacagcaaccatgaggagagtgaagatggcattgaaggtga

SEQ ID NO: 203180 - DNA, 100 bp, Homo sapiens
ctcgtcttgaaaccctgaatctcaaagatcgccacatcacagaatcgtatctatctcacagctgacaaccttgtgctgaacctacaggatgaaagtttca

SEQ ID NO: 203181 - DNA, 75 bp, Homo sapiens
agcatccattgcaaaccttattaatctcagggaactggatgtcagcaagaatgatgaagaggaagatgatgatgt

SEQ ID NO: 203182 - DNA, 100 bp, Homo sapiens
atcatccgatcggaaaacttcgaggaattgctcaaagtgctggtctgcgctcctcagaccaccggcaggtgaacagcctgatgcagaccgaggagtgccc

SEQ ID NO: 203183 - DNA, 76 bp, Homo sapiens
ttgacgggcggacctttgtcgagtacctcaacgctgtgaccgagaggtattgtccgaattgtaaagaacatcagca

SEQ ID NO: 203184 - DNA, 100 bp, Homo sapiens
gcttcctccagacctctcggcgcgggaccttttttctatcagtgcttatgtttatgctcagaaaccacaaatggacattcacagtttcgaaggcacattt

SEQ ID NO: 203185 - DNA, 75 bp, Homo sapiens
aggcctctcatttttagttaatcacgatttctctcctcttgagaaacccaaggacttggacttcgcccagcagaa

SEQ ID NO: 203186 - DNA, 74 bp, Homo sapiens
gtgaaacagagaaagataggcggccatggtccaaccttgaaggtttatttcaaaaacaagctgaagttggcact

SEQ ID NO: 203187 - DNA, 90 bp, Homo sapiens
ggcctcaccatacaggaacagggcagacgttagcgtgagtgatcactctcaatcccggccaactgggtacatggaaaactcagtctccta

SEQ ID NO: 203188 - DNA, 107 bp, Homo sapiens
aaagtcctctcgggagaagcagcgcctgttcccggggcagatccaggttcagactcggtgaaatacctggagtgctcagctctcacccagagaggcctgaaaaccgt

SEQ ID NO: 203189 - DNA, 88 bp, Homo sapiens
tggacactccaggaagagcggccccgcggggggcgatgaccgtgcgctgaccctgactcactccagtggtaagcatccgtggcattca

SEQ ID NO: 203190 - DNA, 113 bp, Homo sapiens
gaagaaccgggcagccgcccagcgaagccggcagaagcacacagacaaggcagacgccctgcaccagagacgaccttaagtggacagagattctagaacaggagaaataaaac

SEQ ID NO: 203191 - DNA, 90 bp, Homo sapiens
tcgttcacaattgaccccgtcaggggagaagtcaaagtgaccaaacttctcgaccgagaaacggttttcctttggaatatggataaatac

SEQ ID NO: 203192 - DNA, 82 bp, Homo sapiens
ctcagcctcctgggtagctgggactacaggcagagtggctcctcacagcctgaagctcatccttctgcacgggccagccagg

SEQ ID NO: 203193 - DNA, 78 bp, Homo sapiens
tgagatgttaatgatggcagtacagtcaggccttggacaagattcgctatgagagcctgacagacccttcgaagttgg

SEQ ID NO: 203194 - DNA, 51 bp, Homo sapiens
ccctggaaaacttcccttccctttcgaccaagatcactccatggatgaaat

SEQ ID NO: 203195 - DNA, 75 bp, Homo sapiens
cttctgtgaggaatctggattgtcacctttgctgcaaaaaattacggtggacattcctctggttatgatagtcgt

SEQ ID NO: 203196 - DNA, 75 bp, Homo sapiens
ggcaccaagccttcccagttatcataaccttgaatggcgactagatgtacagggttatgtaccgaaggactctac

SEQ ID NO: 203197 - DNA, 104 bp, Homo sapiens
taaggaactctatcccaggaatacagctttgcattagaccaagatcactccatggatgaaatgacagctgtggtgaaaattgaaaaaggagttggtggcaataa

SEQ ID NO: 203198 - DNA, 109 bp, Homo sapiens
ggacattattgcgcgtggaacggctgcttttggaaggtgtggacactgccagcggctgcagccgacttggaatgacctgggagacaaatacaacagcatggaagatgcc

SEQ ID NO: 203199 - DNA, 73 bp, Homo sapiens
gggaactggagacaatgaaaatcttgtcagcttacctgttgattcggtggtaattacagaatctgatgcacag

SEQ ID NO: 203200 - DNA, 75 bp, Homo sapiens
aagggaaaatggggtgaggaagattttgaagacaatcgtcacttatacagttctctcctgcgctatggtggaaac

SEQ ID NO: 203201 - DNA, 90 bp, Homo sapiens
tgcagaagctcagggccagtcgccgccgcttccagaggcgcatgcagcggctgatagagaaggccaaacgtaccaagaaagtcgggatcg

SEQ ID NO: 203202 - DNA, 82 bp, Homo sapiens
ggtattacagatgtagatgataaaatcatcaaaagagccaatgaggaaataatgcaaaaggtgtcccaaggctcctgaccag

SEQ ID NO: 203203 - DNA, 100 bp, Homo sapiens
ttctgttggttttatgcatctttatccaatcaagtgcccttggacaaagcctgaaaccaggtgcctgattattacaaaataattaaaaatccaatggatt

SEQ ID NO: 203204 - DNA, 100 bp, Homo sapiens
ctcaatgagaaaatctccctgctccgcagcgacatcaccaagctggaggtggacgccatcgtcaacgccgttaaccagcgcagtcctccgtgcgtcccgc

SEQ ID NO: 203205 - DNA, 100 bp, Homo sapiens
aaggagcaggatctgaaagctgaaattgagaagctttgtgagaagggcagaagactagatgagacaatacaggccattgccaatggaaccttgaaccagc

SEQ ID NO: 203206 - DNA, 100 bp, Homo sapiens
gcccggagtcttcgggggacacttcagaaagatcggaacccagcgggtgccgcttctccacccgaggcttccacctccaacgagccatgttccaggctgc

SEQ ID NO: 203207 - DNA, 50 bp, Homo sapiens
aggaagagtcaactttgatgactatactgtcggatcctgacctcccagcc

SEQ ID NO: 203208 - DNA, 96 bp, Homo sapiens
cgtcggctgctgggaagatctggattctcgtttcaggattcctgccagctcccaggggctttggttatagaagtgaagtggactaaatacggatcc

SEQ ID NO: 203209 - DNA, 75 bp, Homo sapiens
ccctcgccacctgcaagagcctgcagcagtcgcttctccgcagcagaaaaatatggctcaggagactaaccagac

SEQ ID NO: 203210 - DNA, 89 bp, Homo sapiens
gcaagttgactaccaccagtggagtccaggatgagcttaagagttggacagtggaggaccttcagaagaggctcttggccctggacccc

SEQ ID NO: 203211 - DNA, 82 bp, Homo sapiens
gaagaccaagtacctgcagatcctgacctctctgatgagatggatcgggtttccaggcctgaggtgcccgccctggccccag

SEQ ID NO: 203212 - DNA, 100 bp, Homo sapiens
atcctcagcgaggtctccacccgctcgcgctccaagctccctgcggggaagaacgtgctactgctgggggcttccatcgttggcgtgaactgccgctttg

SEQ ID NO: 203213 - DNA, 90 bp, Homo sapiens
ttgcactgaatgcaagaatcaagtgtgtaatctctgtggatttaaccctacaccacatttgactgaggaaagaccacagcaagattcttt

SEQ ID NO: 203214 - DNA, 100 bp, Homo sapiens
accatgtttggattgaagccgcctctgtattacttaccagtgcgcgtcccgggacgactggcgctgtgcgcgctccatgcacgagttttccgccaaggac

SEQ ID NO: 203215 - DNA, 97 bp, Homo sapiens
gagatccgggagcggcagaagttacggcgacagctcctcgcgcagcagatatatttttgccatcatggatcagtttggagatatattagaaggtgaa

SEQ ID NO: 203216 - DNA, 75 bp, Homo sapiens
gatgaccgtgcgctgaccctgactcactccagacggagtctcagtggcgtgatcctggttcactgcaacctctgg

SEQ ID NO: 203217 - DNA, 75 bp, Homo sapiens
agagctccgggacaatgataagactcgctatatggggaaggtgggacctgatgcagaacatcatgaatgacatgc

SEQ ID NO: 203218 - DNA, 82 bp, Homo sapiens
tccaaccatgggaggccgcgtctttctcggcacggacacttgctagtatgttgagagaagttgagagaaaaaatgaagagct

SEQ ID NO: 203219 - DNA, 100 bp, Homo sapiens
ctacccaattagaaatgcaacttgagaaacccaaacctgtaaaaccagtgacgttttccacaggcatcaaaatgactcagcccgcctgcacccaggtgaa

SEQ ID NO: 203220 - DNA, 75 bp, Homo sapiens
ttcctacagagattcatatgagagttatgagcaccagaagtgtctggacaaactcctcaataactgccttttgag

SEQ ID NO: 203221 - DNA, 75 bp, Homo sapiens
tgagcttgccgcacaaaaagctagagagatatatagtcaacatgtggcactgtgcagaatggagggactgccgta

SEQ ID NO: 203222 - DNA, 97 bp, Homo sapiens
gactgggaggcagaaaagaccactgaatctagaaatgaggaaattatggaagtggaaattacaatgattttggaaattataaccagcaaccttctaa

SEQ ID NO: 203223 - DNA, 75 bp, Homo sapiens
ctcaacgctgtcatctggcttaataagcaggccagctttccgcgtggtggacaccgagttctaagccacagaccg

SEQ ID NO: 203224 - DNA, 100 bp, Homo sapiens
ccagcccaaacaggcgtgtcacagctgcggctcagccccactgaccttggctcctgcccgccctgcggcccctgccccatcccgaagccggcagccagag

SEQ ID NO: 203225 - DNA, 100 bp, Homo sapiens
ctgtcgccgtcaccgccgcggctccggccctggccccgatggctctgtgcaacggagactccaagcaaccctgatctccggagaactgagcccatcttgg

SEQ ID NO: 203226 - DNA, 75 bp, Homo sapiens
tagcgaatttttggagcatctccacccaggaacctcgccatccagaaacgagatgatgcctattggccagaagga

SEQ ID NO: 203227 - DNA, 100 bp, Homo sapiens
ggtgtaaatgttgagcctttttggcctggcttgtttgcaaagcctcagccaaacagcaaatacaagactagcatgtgccgagatttgcgacagcaagggg

SEQ ID NO: 203228 - DNA, 99 bp, Homo sapiens
agtcgacttcccatcctgagttgatggagtctcgctctatcacccaggctggagtgcaatggcgcgatcttggctcaccgcaacctccatctcccaggt

SEQ ID NO: 203229 - DNA, 98 bp, Homo sapiens
cagtttggggcatctccgcggtccggcccggggccccgggatctcggctgtccttcctcccggacctgaaggagaagaaggagaaggtggaggagaag

SEQ ID NO: 203230 - DNA, 75 bp, Homo sapiens
gccaaaggaaacttgccttatcaccttcttgcttgcaggtcagcccaaggccaaccccactgtcactctgttccc

SEQ ID NO: 203231 - DNA, 51 bp, Homo sapiens
gattcgcagtggtcgcttcttctccttgtgatgatgatgtagaagaaacac

SEQ ID NO: 203232 - DNA, 75 bp, Homo sapiens
aaacagtccagatccccgtgtatgactttgtctcccattcccgatttgtcccatcagatgaaaagaagaaacaag

SEQ ID NO: 203233 - DNA, 100 bp, Homo sapiens
cctcgacatgtttctccagtgacacctcccagagaagttgaatgtgttccagaagatctagaactgaagaagaagatttttgctcagttagattccatca

SEQ ID NO: 203234 - DNA, 95 bp, Homo sapiens
aagttttccttccatctctgctgctctctcatttgctggccatcggattgggaatatgtgggcctcgctatggtgaaaccaaagaaaaagatatt

SEQ ID NO: 203235 - DNA, 82 bp, Homo sapiens
gcaacgacgttccatctgtggaaggacctaccaaccagatctttgtggagttcacctctgtgtttgactgccagaaagccat

SEQ ID NO: 203236 - DNA, 82 bp, Homo sapiens
gggccatctaccagtgcttcgtgtggagcggcacggctgaggcccgcaagcgcaaggtgagaagccctaccactgcaactgg

SEQ ID NO: 203237 - DNA, 83 bp, Homo sapiens
cagtggtgttaaggattccaacaacaattccgatggcaaagccgttgccaagggtaaatgggaagttggtagctctgaaggtg

SEQ ID NO: 203238 - DNA, 100 bp, Homo sapiens
tttcctgttccattttgtgcctcctggacacctcaggttggcagtggcaatgacccctggtcagcctggagtgcctccaaatctgggaactgggaaagct

SEQ ID NO: 203239 - DNA, 82 bp, Homo sapiens
cttcaagctgctcatcatcggcgacagcgtgcagggctcgcggcctggcaagaatgtacagctgacagagaacgagatccgc

SEQ ID NO: 203240 - DNA, 74 bp, Homo sapiens
gatgatggatccatttctcctattgaggagtcaacgtagatgaacacctggctgtatgtcctgaagctgagcaa

SEQ ID NO: 203241 - DNA, 100 bp, Homo sapiens
tcgcctgttcacagccaacggagggttcaacagagtttggaaaagatttctaaactggagcaggaaaaagaacattggatgttggaagcacaattagcca

SEQ ID NO: 203242 - DNA, 100 bp, Homo sapiens
ctcgatgcagccagtagcttggatccttgtgggcatgatccataatcggtttcaagcgttctgccctaggtccaaatgttaccaaaatcactctagaatc

SEQ ID NO: 203243 - DNA, 75 bp, Homo sapiens
gacgatgatgatgatgacatcacccttacagaaaaaggtccacttaccatttctgcacaggaaaatgtaaaagtg

SEQ ID NO: 203244 - DNA, 75 bp, Homo sapiens
ctatcacaagctgcaccagcttctaaccgagactccatccccgtgtctacctccctccttggagacacttccgac

SEQ ID NO: 203245 - DNA, 82 bp, Homo sapiens
ctgtcttcggtggactccttcggcagtccacccaccgccgccgcctcccaggctcttgtcaggatggtgaagctgttcatcg

SEQ ID NO: 203246 - DNA, 100 bp, Homo sapiens
atttgggagagacgctctgaactgactgccccgcatcaccggagcgtcccagctgcgaggaggcaatctttggcagccagacactacctaactccaattt

SEQ ID NO: 203247 - DNA, 100 bp, Homo sapiens
catggaacagggactcactgggggttatgagtccagggacaatatggagctcatagtgaagcagatttctgatgactctgaatcacactgggtggcgcca

SEQ ID NO: 203248 - DNA, 100 bp, Homo sapiens
actgaaaaatatgtggatactccatttggcaagattgtaaaccatggctgtgtggatacaagctcagcagctccaaggagaagcccttcatcagatgcaa

SEQ ID NO: 203249 - DNA, 100 bp, Homo sapiens
caaattaaaaacaggatgaaaaagactgattggctcttcctcaatgcttgtgtgggtttacaggaacagatggacctagtggttttggctttgagttgac

SEQ ID NO: 203250 - DNA, 96 bp, Homo sapiens
gcgtccggggctcctgcgcactcacttggcggccgcgcccgctggcgtcctcttgttctcttccaggagcttctacctggccctctacaagcagat

SEQ ID NO: 203251 - DNA, 90 bp, Homo sapiens
cgagcgaaggcagcgccgaggccgcggtttccccctgggcctccccagcagcagccatgggcagtggtaaattcactccagcagcaacct

SEQ ID NO: 203252 - DNA, 75 bp, Homo sapiens
cgtggacatcggaggggagcgagctttgtgtccctggtgatgttggaacattaatgatggaacatggccaaactt

SEQ ID NO: 203253 - DNA, 90 bp, Homo sapiens
agacaaagaagttggagatggaactacttcagtgggtggagagattcaaccagttagcgtgaaagttggagataaagttcttctcccaga

SEQ ID NO: 203254 - DNA, 100 bp, Homo sapiens
cgcctggctccccatactagtcgccgggttctcatgtatcagccatcttctgtaagggtgcccagtgtgacttcggttgatcctgctgctattccgcctt

SEQ ID NO: 203255 - DNA, 75 bp, Homo sapiens
tgcgcgccggacccgctgcccctgccggcccggccgggtcgggcggcccagagccagtcttggtgctctgtgttc

SEQ ID NO: 203256 - DNA, 74 bp, Homo sapiens
aactccgtgcccagatgctcataaggattgtcctctttctacaaaagacagggtctcgctctgttgtccaggct

SEQ ID NO: 203257 - DNA, 75 bp, Homo sapiens
gcacattaggttgcagtatgtggccagttatttgcctcagtaaaagaactaatagggatgccaaaggaaaaatat

SEQ ID NO: 203258 - DNA, 75 bp, Homo sapiens
cgcacttcgtcatgttcttcgcgccctgcgtttgcctcagcatggagggcggggccgcggcagccacccccacag

SEQ ID NO: 203259 - DNA, 50 bp, Homo sapiens
tccaccagactactactgccgaaaagtgcacttgttgagctcgtgaaaca

SEQ ID NO: 203260 - DNA, 100 bp, Homo sapiens
cagaagacggtttactttgccgaagaggttcagtgcgaaggcaacagcttccataaatcctgcttcctgtgcagtttccgttcagccgcccggagctgct

SEQ ID NO: 203261 - DNA, 100 bp, Homo sapiens
cctagatggaacacatgctctgatgatggaagaactggagcaaggcctgttgatgcagccatgggcgtggctacagcttgcagagaactccctcttggcc

SEQ ID NO: 203262 - DNA, 75 bp, Homo sapiens
aggaaaaactggagagcttcatcaaaaatagtgatagctttgataaattatttgcatgggtgcaaaagaaaatgg

SEQ ID NO: 203263 - DNA, 49 bp, Homo sapiens
aataaacatgcaatgaacccaaaagggttccttttgaggatggccacac

SEQ ID NO: 203264 - DNA, 83 bp, Homo sapiens
gtgggatttggatgtgggatccggttccttggtgtcatccagccttagcaaaccagagatattacagtgacagagagaaacac

SEQ ID NO: 203265 - DNA, 75 bp, Homo sapiens
tcctgaacaagacatggaaggaaatgagggcaacttctgaagacttcaacaagaatgaagaagcagtacgacgtc

SEQ ID NO: 203266 - DNA, 101 bp, Homo sapiens
cgaggacgagagcgacatcctggaggaaagcccgtgtggtcgctggcaaaagcgacgggagcagcctgccaggagtgaagaaagctttgggcaaatatggt

SEQ ID NO: 203267 - DNA, 83 bp, Homo sapiens
aggccaagtatccgccagtcaataggaagtacgagtgtcaccttccgcaaccctgtcattgagaggattcctcggctccgacg

SEQ ID NO: 203268 - DNA, 97 bp, Homo sapiens
gattctccggggacccttccgtatctgcctaggcattttgctgtctcctcctaatacgctgtatgacaaaattaacacaaagtcttcaccacaaatc

SEQ ID NO: 203269 - DNA, 90 bp, Homo sapiens
actcgcccctggcctcgcgggccgtgtctccggcatcatgtgtgttccttcctgtgtacagcccttctgaggaggagaagaggaaccccg

SEQ ID NO: 203270 - DNA, 100 bp, Homo sapiens
cttggagtgctgtcccttggaacaggaggagtaagattgaggatcagctcagctactatttaataaaacaaaatctgtagaattcacgttttgtaatgac

SEQ ID NO: 203271 - DNA, 96 bp, Homo sapiens
gaaaaaaagagttgcgggaggctgtcggctaataacgtggggtgccgaggctcaggcagcatgacgacggagacctttgtgaaggatatcaagcct

SEQ ID NO: 203272 - DNA, 110 bp, Homo sapiens
acaagctaggcacaaccaatgcgagcctgcctcttaaccatatgaaaactgcttcatcaacctcatccagaagtcacccttattctagtgacagtgaggatgaatctgca

SEQ ID NO: 203273 - DNA, 100 bp, Homo sapiens
atttctctgaacatactgccttatgggacagatcaaatatgattctataacagactcttccagaaatgatatgaagaggaaatttgccctgacaatggaa

SEQ ID NO: 203274 - DNA, 101 bp, Homo sapiens
ggagagacggccaagcagcaccagcgtgcctttgggtgataagggggccatgaagcccccaggaggagaatcgagcaatctttttggaagtccagaagaag

SEQ ID NO: 203275 - DNA, 75 bp, Homo sapiens
gaactgctttggagataatgatcctattgatgtttgcgaaataggctcaaagactccagagcatgagggccgtta

SEQ ID NO: 203276 - DNA, 100 bp, Homo sapiens
aaagcttgacggcttggacgaagatggggagaaggaagcgagactcatacgcaacctcaatgttactccacaggatccgctgaacataggatgttgccac

SEQ ID NO: 203277 - DNA, 50 bp, Homo sapiens
cacagatggggccgaatataacatagagcttaatgcagataccgaaagag

SEQ ID NO: 203278 - DNA, 101 bp, Homo sapiens
cttgcagaacattctgaaaatgtgcatatttcaggagtgtcaactgacctgtggatgaagagccagagtcctctgaggtcgatgctgctggtcggtggcct

SEQ ID NO: 203279 - DNA, 74 bp, Homo sapiens
cccagcctttgcggggcttagtgaggctcccgatggcgggagctccaggaaagctacaccaaaattgcattgag

SEQ ID NO: 203280 - DNA, 99 bp, Homo sapiens
ttccttgtgcctccattcccgggaggggggagcggcgttggaggccaccgtttccagatgagattgtggggaacctgggtgaaggcacctttggcaagg

SEQ ID NO: 203281 - DNA, 75 bp, Homo sapiens
acgtatgcggaggttgggaaggagggcaaggaatggaagttggatacactttgtgacttgtacgagacactgacc

SEQ ID NO: 203282 - DNA, 80 bp, Homo sapiens
gcgctaccgctcctgggacgtgccacagatcccatcagaggcaccccagacacaatggactcaccctgtcacccaggttg

SEQ ID NO: 203283 - DNA, 75 bp, Homo sapiens
ggacagcgaggggaacacagccctaatcacagctgcacaggcagggaagacaaaggcgctttggctaagctggtg

SEQ ID NO: 203284 - DNA, 75 bp, Homo sapiens
cgccatcattggacccaatggctctgcccccaggctccgctcttgccagagggacaggagccatggctcagaaaa

SEQ ID NO: 203285 - DNA, 80 bp, Homo sapiens
acgtgttggaccttccggagcttctcagaagacagagggttttcttttgaggttggaactcagtttatccgtggtgtgtc

SEQ ID NO: 203286 - DNA, 82 bp, Homo sapiens
tattgtcatcttccttgaattctttgcgtggggccttttgacaactccaatgttgactgattcaagatgaccaacgaagaac

SEQ ID NO: 203287 - DNA, 98 bp, Homo sapiens
gaactgggttctggactttgggcgtcccattgccatgctctttcgacgtgtagcagcagctttgccgggaatggaaagcacacaggacagaagcagag

SEQ ID NO: 203288 - DNA, 75 bp, Homo sapiens
tgatgtaaatgaccacttgccaacatttactcgtacttctggcaagtgtccagagaatggctgggatgaaagtac

SEQ ID NO: 203289 - DNA, 100 bp, Homo sapiens
cgaggagctcaagaaccatggtgcatacctgggtaatatgtctcatcctcggccttggctagggctcgaccacttcaacaaagccccaaagaggagtcgc

SEQ ID NO: 203290 - DNA, 100 bp, Homo sapiens
aagaccgcgcgcagggcctgcagcgggagctggacggcgagcgcgagcggcgcgagaaagcattttttactgtctacagaaacttattgtaattcatttt

SEQ ID NO: 203291 - DNA, 100 bp, Homo sapiens
ctttcttcggtagctaccgaaacgctctgaaaatcgagccgttcccatttggccggcgcttgccttgtgacatctactggcatggagtttcatttcacga

SEQ ID NO: 203292 - DNA, 83 bp, Homo sapiens
ttaaaggcccccaaggctgtgcaacgcggagcgtgagaggaaggcgccatgtcagaaccggctggggatgtccgtcagaaccc

SEQ ID NO: 203293 - DNA, 75 bp, Homo sapiens
gctgccagggtccttagcacagacattttgacgctgtgatgcagatccatccgccctagcaaaatatgttctggc

SEQ ID NO: 203294 - DNA, 96 bp, Homo sapiens
ttgatgaagcagatcgaatgtttgacatgggatttgaaatgatgatgcacgtgcaacagctgtctcttgcgtctttatgtgtgaaaaaacaacagc

SEQ ID NO: 203295 - DNA, 100 bp, Homo sapiens
ggaatagttactgaatacatgccaaatggatcattaaatgaactcctacataggatggcagtggcagcaccatgatgcaaaccaagaccttctcctcttc

SEQ ID NO: 203296 - DNA, 75 bp, Homo sapiens
gccccggcgccggcaaggggacccagtgcgcccgcatcgtcgaggtatagacacgtgtggccgtttacgctgtag

SEQ ID NO: 203297 - DNA, 100 bp, Homo sapiens
taaagtcatctctctagaccataaaaataaaaaacatatccgagggtgtcctgttacttccaagtcatcaccagaaagtataaggatgcatttatgaaag

SEQ ID NO: 203298 - DNA, 83 bp, Homo sapiens
cggaaggcgcgggcaggagcctggcgaggatgcaccttcccctgccttggaaaggtggcggcgggaaggccaaggtctctggc

SEQ ID NO: 203299 - DNA, 100 bp, Homo sapiens
aagctttctgcccagagctcctggaccaatgcatcttcccaccaccttaaaccactggaagcgttgttgacgaccatggacatcatccacgatggatttg

SEQ ID NO: 203300 - DNA, 75 bp, Homo sapiens
cagacgacaagcacacactatggcgctgaaacggattaataagtggaagcatcagttcacagcagtaatgcacac

SEQ ID NO: 203301 - DNA, 100 bp, Homo sapiens
tgtacttaaatgcagacacaagacactcttgcactcctgtaatgagcctggcactgtgatgaaacacttttcccgtgtcgtttgagtgcatcttctcaac

SEQ ID NO: 203302 - DNA, 83 bp, Homo sapiens
agggaattcagcctcagtgatgtccatgagagccataagtgtgatccttggtgacaggtggaagaaaatgaagaatgaagaga

SEQ ID NO: 203303 - DNA, 111 bp, Homo sapiens
gggagggggcggcggcagcgggcggacggccggcgggggcggcgtgcggcctagcgtctcaggtggagattctggacgcaaagacaagggagaagctgtgtttcttggaca

SEQ ID NO: 203304 - DNA, 74 bp, Homo sapiens
cgcagccgccccgaaggagccaggcagtggagctactgctgtggttcaggcagccctatgcaaacccaggcaag

SEQ ID NO: 203305 - DNA, 101 bp, Homo sapiens
cggatgagaaagaaagtaaaagatgtcattggtattattctcactaaggttggttactatactattccatctatggatgaccttgctaaaattaccaatga

SEQ ID NO: 203306 - DNA, 101 bp, Homo sapiens
attgtgtatgtaactgaaattgaccccatctgtgccctgcaagcctgggtctaaaattcccaggactccacagctttgcaccagataagcctggaggaata

SEQ ID NO: 203307 - DNA, 100 bp, Homo sapiens
accactcacccgcagactccttctccagcatgggctcgcctgtcaacgcgcagggccctacggaaggctctgacccatctggaaatgcggcgagctgctc

SEQ ID NO: 203308 - DNA, 75 bp, Homo sapiens
gagcgaggctgcgggaccccaggatgggggacaggaggctgcggggcctcagggtcccctggcgatggcagaaat

SEQ ID NO: 203309 - DNA, 50 bp, Homo sapiens
cagaagtgtaccactgtggatgaagcagctggacctaccatgaaagactt

SEQ ID NO: 203310 - DNA, 142 bp, Homo sapiens
cagttttgaggggcgaagtgtgcctgccacccctgtcctcacccggggcgctggcccccagctctgcaaatgacacctttgaggccctgtgcatcgagccgttttccagcccgccagagctgcccgatgtgatgaagcccca

SEQ ID NO: 203311 - DNA, 75 bp, Homo sapiens
ggcatcttattgatcctccagtcgagttaccggtattgtaagaacaagccgtacccaaagtctcgcttctgccga

SEQ ID NO: 203312 - DNA, 101 bp, Homo sapiens
agatggccagctttcccccgagggtcaacgagaaagagatcgccaatgttttcagttgcaccaagcttagccaccaatgcatcagcagccgcctttaatcc

SEQ ID NO: 203313 - DNA, 100 bp, Homo sapiens
aacacatcgccactgccaggcatcgcaggggtttggtgcacctcgatttggaggaagtagggcagggcccttatctggaaagaagtttggaaaccctggg

SEQ ID NO: 203314 - DNA, 82 bp, Homo sapiens
ccatccaggaccaaccttccagttctgtctgtgaacgaggacgcccaccacctccatgccgagaggagggggccacagccct

SEQ ID NO: 203315 - DNA, 83 bp, Homo sapiens
ctccttttccctctccctttccctaaggttgaaatcacaaagattagacacctttttagataggtgttcttcagcaccactga

SEQ ID NO: 203316 - DNA, 83 bp, Homo sapiens
gggcagcggaagcggcgcggcggtcggagaagtggcctaaaacttcggcgttggccggagtcagagtggtggctacagtgacc

SEQ ID NO: 203317 - DNA, 90 bp, Homo sapiens
ctcaagggggatcagctctattatttcaaagatgaagatgaaaccaagcccttgcatgccaatgaagatgtggaaagaatgttactagga

SEQ ID NO: 203318 - DNA, 100 bp, Homo sapiens
ttatttggagaaaatgtactctctggatgcctgttagaagtcgggattaatgaaaattgtactcagctcaggaagtgactttggtccagagacttctcca

SEQ ID NO: 203319 - DNA, 100 bp, Homo sapiens
ggaaatgttctccttatgtttggtctactattgcatttagaagctgctcaaaagccaaaagtctctgagaacgactttgaagatctgttgtccaatcaag

SEQ ID NO: 203320 - DNA, 100 bp, Homo sapiens
atgctgatggcgataagtcattaccacagatgttctcagtgcagctgagtcttggtgagcagacatgggaatccgaaggcagcagtataaagaaggctca

SEQ ID NO: 203321 - DNA, 90 bp, Homo sapiens
tcttgaaccaggtcatgctccaaataatgccgggtctaagttgtagattttatcaacacaaatttcctgaggtggaagatgtagtgatgg

SEQ ID NO: 203322 - DNA, 114 bp, Homo sapiens
cgcctccctgcgactcctggaccaccgggcgctggtctgctcccagccggtcaaaatgcagatcttcgtgaaaacccttaccggcaagaccatcacccttgaggtggagcccag

SEQ ID NO: 203323 - DNA, 97 bp, Homo sapiens
tcccaaagttctgggattacaagtgtgagccactgccactggctgaaaaagtcttattgtggcataattggggaaaagccttatgaatgttatattt

SEQ ID NO: 203324 - DNA, 90 bp, Homo sapiens
accatggcacctgctggacgcccgggggccaagaaggatcagttacagttgtggattcgaggcaacgtgagtgcctgtgcgaggtccatc

SEQ ID NO: 203325 - DNA, 82 bp, Homo sapiens
gctctgggatcccggccaccagcaattgtccggaatacaaacagaagcttgcacgagtaacccaggtccgcaaggaactgaa

SEQ ID NO: 203326 - DNA, 100 bp, Homo sapiens
cgccccgcgcggcccgcccggatcgtggcctctcgagagcaaggtcaaaatgcagatcttcgtgaaaacccttaccggcaagaccatcacccttgaggtg

SEQ ID NO: 203327 - DNA, 75 bp, Homo sapiens
ctggttctggaatcctcagttcaaggccctagcaacagaccacctatcagagccgaaggcagaaacttccccttg

SEQ ID NO: 203328 - DNA, 50 bp, Homo sapiens
gtgaagtcccagggatattctgtgctggtttttcttcccccagtccctca

SEQ ID NO: 203329 - DNA, 78 bp, Homo sapiens
gatggacaagagacgatcattctgcaagcaggcaacctgaatacagggaggcatgcatctccccatgtgctatgatgc

SEQ ID NO: 203330 - DNA, 89 bp, Homo sapiens
ggattctaaggcaacacttccttgaagaaacaagcttacaggtaatgcaggtggtgaaggagcaggttatgagagcacttacaaccaag

SEQ ID NO: 203331 - DNA, 90 bp, Homo sapiens
ggatgacatcttccgaatctacattaaaggccgctttgtagttcagaatgtttctgcacagaaagatggagaaaaatctagagtaaaagt

SEQ ID NO: 203332 - DNA, 93 bp, Homo sapiens
gccgtccttctccactttcgccagcccgtgccgcgagcgcggcctgcaggagttctgggaagtcatcagtgatgagcatggcatcgaccccag

SEQ ID NO: 203333 - DNA, 74 bp, Homo sapiens
cgcgggtccgtgcgcccagcgtcccagggcccaggccgagcagatatttggagttcttacaacatggcagacat

SEQ ID NO: 203334 - DNA, 96 bp, Homo sapiens
cggatctggaggagcagttgtctgatgaagagaaggttcagtgtatctttgcctgcctacatcaatctgcaagggagttgcagaaagcctcatgtt

SEQ ID NO: 203335 - DNA, 115 bp, Homo sapiens
cggcagcaagcgtgggaacgcgggcggcgagacggcggcaggacggcggcaggagctggaagctatcaaagctcgagtcagggagatggaggaagaagctgagaagctaaaggag

SEQ ID NO: 203336 - DNA, 100 bp, Homo sapiens
acccaggaaaagactcaggacggacaagcacagtcttcggaagtgggacttctcctcttgcatgcctgaatgcaatgcttcacacaaactccagaggtga

SEQ ID NO: 203337 - DNA, 113 bp, Homo sapiens
ctcagaggggagtcatcatgagcgatgttaccattgtgaaagaaggttgggttcagaagagggttccggtgtctcgcccggtcctcaccctcagggctcccgggacccatgct

SEQ ID NO: 203338 - DNA, 101 bp, Homo sapiens
acagagtatgcaagagtcaccttctcaactgttgtcctcatgatgtcctttctggaactgatttcaaatatgcgtgcattagagaatgattttttcaattc

SEQ ID NO: 203339 - DNA, 106 bp, Homo sapiens
ggccttagctgtgctcgcgctactctctctttctggcctggaggctatccagcatggaaatcatattatgtagaatacttgggtgacatctgcctgagagatctcc

SEQ ID NO: 203340 - DNA, 100 bp, Homo sapiens
gtgaggggtttgtactatcctcggtgctgtggtgcagagctagttcctctccagctcagccgcgtaggcataagatgcacatttttctgctctggagccg

SEQ ID NO: 203341 - DNA, 75 bp, Homo sapiens
aacttctgtttacatggaactcagacatctgcaaatcatgactgtgccctgtccacggtgcctcctgcatgtcct

SEQ ID NO: 203342 - DNA, 50 bp, Homo sapiens
atttcaacatgcctctgacaatctctagtcaacgtggaaggaaccagagg

SEQ ID NO: 203343 - DNA, 74 bp, Homo sapiens
aggataaaagaaggtatttcatcaaaatgggaagctctgtagaaaatggttatggaggttttgatgactatggt

SEQ ID NO: 203344 - DNA, 75 bp, Homo sapiens
tagcctttgccatcactgccattaagggtgtgttcgtgtagttcgaggtgaagggatgccgcagtatcgtaatcc

SEQ ID NO: 203345 - DNA, 100 bp, Homo sapiens
acaccagcactgactatcacgagcttgggcgctccattgccacccttatgtctgacaagaaatatgaacagggattcatcacagaccctgtggtcctcag

SEQ ID NO: 203346 - DNA, 100 bp, Homo sapiens
ttataccagctgtagcaaaagtgggaagccaagcctttcctcccgggtgttttgaatgctgtatcaaatgcctggggggcattccctatgcctctctgat

SEQ ID NO: 203347 - DNA, 75 bp, Homo sapiens
aactcatatatttaacccccctccaaaaacctccattgtgttccctcctccaggggcttctgaggagaatggcct

SEQ ID NO: 203348 - DNA, 115 bp, Homo sapiens
ctgcaaaccacccaagtctgcaatcttaccagggaggccaagcgaccacccaaagaaggtcatggcaaaaccccaaaagatgccgcgtcagttcgagccacgcatccaataccag

SEQ ID NO: 203349 - DNA, 98 bp, Homo sapiens
ttcttcctcaacaccagcaccgcagatgttgtcaaggtggcctaccaggaggccaggggtgtcgccatgatctatgggagtcgtcagattatactgga

SEQ ID NO: 203350 - DNA, 90 bp, Homo sapiens
gtggcttccgggcaggtaccgggcagctggagacgccagagccggcgggagcggacaggggtgaagatggtcatgatccaggatggccca

SEQ ID NO: 203351 - DNA, 75 bp, Homo sapiens
agaacagaaaaatgaagatggaacatggccaaggggtccttctactcctaatccagttacaacacagggatcaca

SEQ ID NO: 203352 - DNA, 80 bp, Homo sapiens
caggatgggggactccaaagtgaaagtggcggtgcggatacgacccatgaaccggcgagaagctccaccatgaggcgagg

SEQ ID NO: 203353 - DNA, 100 bp, Homo sapiens
ccgggtcaatgtgtggaatattggggggctcggctgcagacttggccaaatggacgggactattaagaaacatgccaagggacaagtgttatttgacaaa

SEQ ID NO: 203354 - DNA, 100 bp, Homo sapiens
cctgtcagcactatggcctgactttccgcaggccccgttcacacaaaagatgttggacaatttctacaattttgcttcatcatttgctgtctctcaggcc

SEQ ID NO: 203355 - DNA, 100 bp, Homo sapiens
taacccaggggaagttacacgaggttggtcatgaaagagattccttgcagagacagctcaacacggcacttccacagctacaatggttgtctggcaagtg

SEQ ID NO: 203356 - DNA, 99 bp, Homo sapiens
ccaaagagtcaactaatccagagaaggcccatgagattttatttggagagaagcaagcatctttgcctctttggagtaggaaattcagacttgaaaaag

SEQ ID NO: 203357 - DNA, 50 bp, Homo sapiens
gccaatggcacggaggcctgcgtgctgaccccgcactacatctacccacc

SEQ ID NO: 203358 - DNA, 82 bp, Homo sapiens
cttaagaatattcctatgaccctggaattactgcagaatcttgacaaaacttttggaagtgtcagatgatccccaagtctta

SEQ ID NO: 203359 - DNA, 127 bp, Homo sapiens
aaatcaagatttaacattccaacacataaaaattatttatccaacagctcctcccagggaggtggggaagacagggctccagctaccacaggacgggctctgggtatagccgttccagtcagggaca

SEQ ID NO: 203360 - DNA, 75 bp, Homo sapiens
tcaggacatggagtatgaaagacggggttatggttttgtgaaattcacagatgaactggaacagaagcgagccct

SEQ ID NO: 203361 - DNA, 82 bp, Homo sapiens
gttcaaccaggccttggaggacaagagcggccagccatgtgactgccttcctcccctgcgggcagcagccgagcagctacgg

SEQ ID NO: 203362 - DNA, 100 bp, Homo sapiens
aacctggaccaggaggaggttttcaggaccaaaattgtggaaaagtcactctgctatgtgatgatgatgccatttaaacgacaggctctagtggaatttg

SEQ ID NO: 203363 - DNA, 83 bp, Homo sapiens
tgacaaccttggaacagaacaagaggacaggaggtgtcgttccaggtgattgaattactcagatatgaagatcatcatctagg

SEQ ID NO: 203364 - DNA, 100 bp, Homo sapiens
cgagacccggacagaggcaagcaggggcgccgtgggtgccagagaggcggaagaggaggcctgatgggtctgcgctcctcagaccaccggcaggtgaaca

SEQ ID NO: 203365 - DNA, 100 bp, Homo sapiens
gaagcaagcagttcagaagagccaaggaataaacatgcaatgaacccaaaaggctgcttgtcagacattgctgtctcttcctgtggattttaatttagaa

SEQ ID NO: 203366 - DNA, 82 bp, Homo sapiens
agtatctcaggcggcaccctgtccccgaggaggggaccatgacacagtcttaaccatgaacttctctggaggagggaggcag

SEQ ID NO: 203367 - DNA, 83 bp, Homo sapiens
tctctgctgcggcgcggggaccgctgtgctctcgtaagcaagctgtgtgggaagtgcagccccactgacgtggacatcctgca

SEQ ID NO: 203368 - DNA, 75 bp, Homo sapiens
ttgtgcggcagtggttgagccgtggagaaatcgagctatagcagattatcttcgttcaaatggctatgaagaggc

SEQ ID NO: 203369 - DNA, 60 bp, Homo sapiens
gcaaatagtacttcaagagcacagtcttatgtaagggggattcccgaagtcttccgtttt

SEQ ID NO: 203370 - DNA, 146 bp, Homo sapiens
cgtcatcattaagttggagcagggagaggagctgtggataacgggaggtgaatttccatgtcaacatagtcctgatccagacctctctgatatgaagaataatgagccttatgactataagtttgtgaaatggatgactaaacata

SEQ ID NO: 203371 - DNA, 100 bp, Homo sapiens
gacggcctatgacagcagtgccgactggttctccctgggctgcatgcttttcaaacttctgagagggaacaggcctttgagagcagccagaagtacaaag

SEQ ID NO: 203372 - DNA, 75 bp, Homo sapiens
taagctacaaacccttgcaactaacctcttggcttctgaggcatctgacaaggtggatgaagacctgatcattga

SEQ ID NO: 203373 - DNA, 75 bp, Homo sapiens
tacccttctgctcctttcctggcagcaggggtttcaatgggaggggtcaccgaagtccccacacgctggctctcc

SEQ ID NO: 203374 - DNA, 77 bp, Homo sapiens
ttacatctcctggataaataatagtgacagaaggaagtcaaggcaccattatgactcggatgagaaatcagaaacaa

SEQ ID NO: 203375 - DNA, 90 bp, Homo sapiens
aaaaagatgacagactacgccaagaaggttacagaaattatctcagagattcgggcgcccattgttactgttggtgttaataacgatcca

SEQ ID NO: 203376 - DNA, 98 bp, Homo sapiens
cagagccacgtcatccgcggctacgtgggcaaccgggcggccacgttcccgctgcaggtttacccaaggtccagcctagcccctaggcaccatgtcgg

SEQ ID NO: 203377 - DNA, 83 bp, Homo sapiens
ccgcaagtcccccccggagaaaaagttgaagcgttatccattcaaactcctccccacgacactctgaagcagcgacggcacag

SEQ ID NO: 203378 - DNA, 75 bp, Homo sapiens
tggtgggcatagtggctgccctgctggtgcacttggaggctcctcagctcttcatatcccagcttttccaggagg

SEQ ID NO: 203379 - DNA, 100 bp, Homo sapiens
gatgataaagatgatgatatccttctcaaccttgtgggatgtgaaaactctgttactgaagaattggagcgttattcagtatattaatgtcttattgata

SEQ ID NO: 203380 - DNA, 50 bp, Homo sapiens
gaagaaggggccctgtgaccggtgctcaatggtgcccaggctggagtgca

SEQ ID NO: 203381 - DNA, 100 bp, Homo sapiens
gttcttgccaggctgtgtgagcaggagcccgctgctcttccccactcaggtcgtaatctgaaggagtggctgagggagcaattttgtgatcatccgctgg

SEQ ID NO: 203382 - DNA, 50 bp, Homo sapiens
cagtgatgagcaactatgtggcacacttacccacttcgatgtgttgttct

SEQ ID NO: 203383 - DNA, 74 bp, Homo sapiens
ttcaagcgattctcccacctcagccccttgaatagctgggattacaggattcttacagaagcagagattgatgc

SEQ ID NO: 203384 - DNA, 100 bp, Homo sapiens
gaaaggcccacctgtgtcctggttgagggtctccagggttctttggggcccgaggagcatttcctccctctgctatttatacacggaaagacttactaca

SEQ ID NO: 203385 - DNA, 75 bp, Homo sapiens
tcctattccactggattgggaaagaccatggcaggattttcaaaatggctgcagctcctcaagcaccggggcggg

SEQ ID NO: 203386 - DNA, 102 bp, Homo sapiens
cctcgtggtgggcagcgagttcgggagcccggggctcctcacctacgtcctggaggagctcgaaagagttgaatgcaatgataacagaaagcaagagaagtg

SEQ ID NO: 203387 - DNA, 100 bp, Homo sapiens
tgctgagttagctgaggaggtcaatttaaatggttctggcaaactgctcaagggaagaaggagaaagggccaacccctgaagaagcaatacagaaactga

SEQ ID NO: 203388 - DNA, 100 bp, Homo sapiens
ctggaatctaaagcctcctcagccttctgagtcagcctgaaaggaacaggccgaactgctgtatgggctctgccctggtatgcgtccaccactaggctta

SEQ ID NO: 203389 - DNA, 90 bp, Homo sapiens
atcgaaggacatgaagactaccacatgatggctgagtatgagtttatcagctctggtctctacctagtggtgttattgcacttgtgcgaa

SEQ ID NO: 203390 - DNA, 101 bp, Homo sapiens
cccaccatggacagcttcgacttagccctgctccaggaatgggacctcgagtcactgtgattgccccagtggaaaatgacaatagctacgatgaactgaaa

SEQ ID NO: 203391 - DNA, 90 bp, Homo sapiens
gtgaataaaactgaccatagccagagaacagccctccatcttgcagcccagaagcaactccgatccaatatccgagaaattgagaaactt

SEQ ID NO: 203392 - DNA, 100 bp, Homo sapiens
gcggccggtactgttgaaagcgacaagtggaggcgccgctctagcggccgggactctgaactatggcggtgacaaacagcatgtttggtgcttcaagaaa

SEQ ID NO: 203393 - DNA, 100 bp, Homo sapiens
tcccgcccgcggttccaccgctctgaaaccgatttctaacagagagtgtgttaacagggcacaaccattatgtgatgtgtgctcagttccaccccacaga

SEQ ID NO: 203394 - DNA, 74 bp, Homo sapiens
gttcacataagaagttcttcgatgtatctaaacttggcaccaagtatgattttggtgaccaatttggatttcca

SEQ ID NO: 203395 - DNA, 80 bp, Homo sapiens
atcgcatcctatggctcaaagaaagatgattatgtctctagaagaaactgtcagtgccagtgaagaagaaaacgtgggac

SEQ ID NO: 203396 - DNA, 101 bp, Homo sapiens
caaccccgaccttggcaccgcgtttgtcaagttttctactcttacaaaggaactgtccacactgctgaaaaatctggccaacagagattttgagaaacaca

SEQ ID NO: 203397 - DNA, 75 bp, Homo sapiens
gatgttcttcttcgagtatttgtagaaggaatgtatgacaacatgtccacaatggtgtacataaaggaagacaag

SEQ ID NO: 203398 - DNA, 75 bp, Homo sapiens
ctccagcacagtgttcagcaggtcctgttggagatgataatagggccagatttgagtgtgtgaatttttgagtga

SEQ ID NO: 203399 - DNA, 96 bp, Homo sapiens
gccagcgggaggcggcggcgagtcgggcggcgactggcggcgcgatggacctgaccgggctcctgctggacgaagaaggcaccttctccctcgccg

SEQ ID NO: 203400 - DNA, 75 bp, Homo sapiens
cgctagccaagctgtcctgcctggcttcctgcagatttcacaaaactgcatcttactgacagtctccacccacag

SEQ ID NO: 203401 - DNA, 96 bp, Homo sapiens
tgcagacatgatggtgataaggagcctgagtctgcgctcctcagaccaccggcaggtgaacagcctgatgcagaccgaggagtgcccacctatgct

SEQ ID NO: 203402 - DNA, 88 bp, Homo sapiens
ccagacagcgagcacattcttgctacctccagtcaagacaattctgtgaagaggttctgtccggaagcagattctaaaaccatgttgc

SEQ ID NO: 203403 - DNA, 75 bp, Homo sapiens
gaaatccattctcatgaagcagctgcagcagcagcagcacagcgacaagacgggcgccctgcgtccggcagagga

SEQ ID NO: 203404 - DNA, 100 bp, Homo sapiens
aaacattttcagagactgtaacaagatcgcattttacagagctctcaaatctgtacttctgtactgcctacagtagagaaaagtggagaagagaaagaag

SEQ ID NO: 203405 - DNA, 135 bp, Homo sapiens
gcccttcggccggcctgagccccagagtcagctcccctttctcgcccagcgcccccaggccgctcccggggctcacggaggtgttcacagaactgcaggagaagtatggggagattgaagagatgaatgtgtgcg

SEQ ID NO: 203406 - DNA, 100 bp, Homo sapiens
ctacaaaactcccatcgcgtcgtggaggagtactttgtggcccccccagatgagagtccggagtgttgtcatgtgaagcctgccatccaggaacctccaa

SEQ ID NO: 203407 - DNA, 100 bp, Homo sapiens
agaaccctggctgaccactttgaaggaggatgctccagcagttaccggtattgtaagaacaagccgtacccaaagtctcgcttctgccgaggtgtccctg

SEQ ID NO: 203408 - DNA, 80 bp, Homo sapiens
atggtggagtcgcctctgatctgcaaagaaggagaaagcgtgcaggtgtcgtgaaaactacccctaaaagccaaaatggg

SEQ ID NO: 203409 - DNA, 98 bp, Homo sapiens
taaaactgaccatagccagagaacagccctccatcttgcagcccagaaggtactttgactgctgtggaaagtttcctgactatacattcaggacctga

SEQ ID NO: 203410 - DNA, 120 bp, Homo sapiens
gcctgagctcctgctttgcacagctttgccacaaagcccagtctgtgtctcaaatcaaccacaagctggagagctggactggccattatggaggaggagctgcagcattcccattgtgtg

SEQ ID NO: 203411 - DNA, 75 bp, Homo sapiens
gttgggctcgcggcgagcggacggggtcgagtcagtgcgttcgcgcgagactatgttaggtcttaatggtgggag

SEQ ID NO: 203412 - DNA, 89 bp, Homo sapiens
caagaccgccctgaaagaggctgtgttcgatgacgacatggagcagcttcgagacgaacccagcgggtgccgcttctccacccgaggct

SEQ ID NO: 203413 - DNA, 100 bp, Homo sapiens
gcagaagccagacagcttccacagcctgacgccgaccttcgcagaaaccagcctggacaccaagtctgtgtcagaaggccacctcaagaggaacatcgtg

SEQ ID NO: 203414 - DNA, 100 bp, Homo sapiens
tggaagcagaccttgtggaggccttgcaggagtttggacccatcagacagccagctaaaggtgtggatgagcaaatacggctggagtgccgacgagtcgg

SEQ ID NO: 203415 - DNA, 80 bp, Homo sapiens
ccccagatgggtgagagatgtgatcactggtttcgtggcctgaccaaggacctccaagatcatgacaagatgtttaagat

SEQ ID NO: 203416 - DNA, 99 bp, Homo sapiens
ttaccagtcttccctggcaagattcttctgaattgtgctgccttggccaaaagaggtttgaggagttcctacagcggaagtggtcctctgagaagcgct

SEQ ID NO: 203417 - DNA, 90 bp, Homo sapiens
ttacgccgtctccaagatgtagctaatgaccgtggttcccactgagcaaatctccttggaccggctgttgggggaaaaaagtgttagccg

SEQ ID NO: 203418 - DNA, 100 bp, Homo sapiens
gccacgtgcagacatctacaaccttcgatctcctgacgacacctggctgcagtggaagaaagaaagatcaagtccctggtagctctcttggttgagacac

SEQ ID NO: 203419 - DNA, 100 bp, Homo sapiens
gagcgcaagagcctcccggcgcccgtcgctcagcggcccgatagccccgggggcggcctgcaggcgccgggacagctgcccagcctccaggcccactgat

SEQ ID NO: 203420 - DNA, 98 bp, Homo sapiens
aggggtctgacttcaagttctacgccaagccatactttctcaggtgaagcaaaaaatttattgccatatcttggaccccacaaaatgagagattgttt

SEQ ID NO: 203421 - DNA, 101 bp, Homo sapiens
gggcgcttctttggcggtgacaggggtgcgcccaagcggggctctggcaagaaatgagccgtcagactgctacagcattacctaccggtacctcgaagtgt

SEQ ID NO: 203422 - DNA, 75 bp, Homo sapiens
ggtgacttcacttttgagtgcaactgccttccaggcccaacacagagatactttcattgaagaacgctatggaaa

SEQ ID NO: 203423 - DNA, 50 bp, Homo sapiens
gtcggggatgtccccttcacgtatgaaatgcttcatgtcacacctccaat

SEQ ID NO: 203424 - DNA, 100 bp, Homo sapiens
gaggaataaccggaccgacccccgacggtgcgtgataacaacgaacttgatgcaagtgataggtttgccaaggtcagacctctcatcatccggatgaact

SEQ ID NO: 203425 - DNA, 74 bp, Homo sapiens
tgaacatcgaatcatggaatcccttgcatggctctcatgtttctaagacctcagagaaatttggaatctataga

SEQ ID NO: 203426 - DNA, 97 bp, Homo sapiens
gcgagagggaggctgccccaaatgaggaaggggcagaccgggccgttccagtgctgatcattggcattctggtgttcctacccggattttaccacct

SEQ ID NO: 203427 - DNA, 82 bp, Homo sapiens
agataacagcttccgccaggcggtgatgaagaatccccccgaaaggaccccccagctgttgcagctaattgcaaaatcccag

SEQ ID NO: 203428 - DNA, 75 bp, Homo sapiens
cagccaccgccgtcaccaatctctacaaaggtaagaatgattgatgttggctgatattggagtgctcattcacat

SEQ ID NO: 203429 - DNA, 138 bp, Homo sapiens
cagtttgaagatggagagaaaattgtggtccagggagagcctggggacgacttttacatcatcacggagtgctgctttcaaaatggaagaagatgacgcgcccatcaagcgctgccccaagtgcaaagtctacatcga

SEQ ID NO: 203430 - DNA, 76 bp, Homo sapiens
cttctgtggaagatgatgcttttatcaaggggaaaaaagttgttccatgtagacatgactggcatcagactggagg

SEQ ID NO: 203431 - DNA, 99 bp, Homo sapiens
tccttttgtggcggatctagcttctcctcgccttcaggatgaaagctcagggggaaaccgaggatggccttggtggtattggcatggggttaggaccag

SEQ ID NO: 203432 - DNA, 76 bp, Homo sapiens
ctgctcttgaggttcacagatgatacctttgatccagaacttgcagcaacaatagtgggaagtcgccagaagggag

SEQ ID NO: 203433 - DNA, 75 bp, Homo sapiens
cgacgcgcctggctaggagcgccgaccgcagggcctctacggatgtaaaaaaagattggtctgaccatgctctct

SEQ ID NO: 203434 - DNA, 90 bp, Homo sapiens
gggtccaacagcaggcctatggaatgtcccagttgtgacatgatggaactaaggcgccgttatcaaaatttgtatatacctagtgacttt

SEQ ID NO: 203435 - DNA, 83 bp, Homo sapiens
caccctggtcaccgccacgtgggtgctgacggcaggccactgcatttccagtttgtggtgagccctggtggtcggaggatttg

SEQ ID NO: 203436 - DNA, 99 bp, Homo sapiens
cccttccccacgcaaccccagatccatttacactttacaggggatatgagactttctactcggaatatcctgagtgttgcgtggatgtaaaacccattt

SEQ ID NO: 203437 - DNA, 101 bp, Homo sapiens
gcaccatcggggagacaagcaaatttagcatgtagactgctggggcaatcaatggatgaaagtggattaccacagctgaccagttatgattgtgaagttaa

SEQ ID NO: 203438 - DNA, 101 bp, Homo sapiens
ttcttcctcaactatctcgctgacacgcagattgacttacgcaggattctcagcccttgcctgggagaacagttcaggagacagatggccccaagagccca

SEQ ID NO: 203439 - DNA, 100 bp, Homo sapiens
cacccaggagcctcatctgcacctggacctaatatggtgataaaattttaggcttggagctgatactgtaatgagatggagtttcactcttattgcccag

SEQ ID NO: 203440 - DNA, 121 bp, Homo sapiens
tctccagtcccaggacacagcagcggccaccatggccacgcctgggctccagcagcatcagatcgtcagtatttaaacagatcacatcatgcgtgagtacaagctagtggtccttggttca

SEQ ID NO: 203441 - DNA, 90 bp, Homo sapiens
ggagaatgaagatttggaaatgagggacttgcaacaaagcattgccagagaacctagtgctccttcaattcctacacctgcgtatcagtc

SEQ ID NO: 203442 - DNA, 75 bp, Homo sapiens
aatgacaccaagcaaagcctacttagtttagatctccagaaaacatcggagcagtgtgggtccgagcaaacctgt

SEQ ID NO: 203443 - DNA, 88 bp, Homo sapiens
gaggaatcggcaaactccctggtctctgttggtgtagaagccaaaatcagcttgcaggagggttcctacttgttatctcatgcagcag

SEQ ID NO: 203444 - DNA, 75 bp, Homo sapiens
tgtttgtaactacctggcattgccttttgttgaggcaaagcataattgatttgaaggagaaggaaataccagaat

SEQ ID NO: 203445 - DNA, 100 bp, Homo sapiens
tgctctacttgaggaacatgacatttttgttccagaggatgatgatgatgatgactaacagatccctactctgttaaaagaaatgtggcaagaaccctaa

SEQ ID NO: 203446 - DNA, 83 bp, Homo sapiens
agccgatccagcctgcggagcctgtggggcagattaccagttgaccagtgcagagctctcctccttaccagcctttagttcac

SEQ ID NO: 203447 - DNA, 115 bp, Homo sapiens
aggccggcaggctgagaaaagcgagaccgcgtgcgaggaccgcacggggtcactctggtgcccattgaggagttcagcccggagttcgtggagccccgggtcagctgcatcagca

SEQ ID NO: 203448 - DNA, 100 bp, Homo sapiens
caagaaagtgagagaacagaatgagacggatatcaagcatttgaggaagttgaagcaccctaacatcatcgcattcaaatctggagcccatacaagcagc

SEQ ID NO: 203449 - DNA, 83 bp, Homo sapiens
cctggaccgggtctgagcgcggctgcccaggttgacctttctgcgggaggtcagcccaaggccaaccccactgtcactctgtt

SEQ ID NO: 203450 - DNA, 100 bp, Homo sapiens
cttgcctcctaaacgtgtaccatttccacttgatgtcatcacgcagaaggggtgaaagagactcggtgacagatacaggactatgacttgagccagctgc

SEQ ID NO: 203451 - DNA, 123 bp, Homo sapiens
gagccagagggagttgagccgcggcgtgtgcgccgagcgctactcgcaggaggtcttcggaaaatcctgccttgcttcgttgggcctatgcaagaacaataaatgtctatcctaatttcagac

SEQ ID NO: 203452 - DNA, 100 bp, Homo sapiens
caacagttcaaggaccagcaaaacaacaaaccagaaatccgtctacagtctgaaataaatcttctcaccttggaaaagctcagaggctgagaatggtgtg

SEQ ID NO: 203453 - DNA, 100 bp, Homo sapiens
tccatgggcaccatgatctgtggctgggataagagaggccctggtgccctacgagacgctgaacaaacgctttcgcgccgctcagaagaacattgaccgg

SEQ ID NO: 203454 - DNA, 82 bp, Homo sapiens
ggagaaggaaggcatggaaagttccagccggttcgagagctagaccctctttcccagctgcccgctcctcagcacccgaaga

SEQ ID NO: 203455 - DNA, 90 bp, Homo sapiens
tgaaggaaaacctccttatgctgatatacatccaatgagggttcgttaccgtgaacgcatcaccattcttcgagggaatcatgagagcag

SEQ ID NO: 203456 - DNA, 99 bp, Homo sapiens
gagacttctactggctgcgctcctttctggccggaggtcccaggtgtgtgatggcggctgcaatctgtcttgtgggtattaatgcaatcttcagtggtg

SEQ ID NO: 203457 - DNA, 82 bp, Homo sapiens
cgacaagccagcccagatccgcttcagcaacatttccgccgccaaagtctattgcgtctgcagacatggatttcaaccagct

SEQ ID NO: 203458 - DNA, 103 bp, Homo sapiens
cgacaagccgctggcagccgcggatctcaccgccgctcagggaaataatgcaaaaggtgtcccaaggctcctgaccagtgaacaaagatttgagaaagacagc

SEQ ID NO: 203459 - DNA, 98 bp, Homo sapiens
cagttgatgccacttgctattggagttgtggaatctggtcaacctgtagttccgttggacagacagtttctcatccatgaactaaatgcatttgaaga

SEQ ID NO: 203460 - DNA, 80 bp, Homo sapiens
agttggcaacctcactgagttagaatcagagccatccgcagagccatcctgtgcaaaggaaggagctaggctgtgcgccc

SEQ ID NO: 203461 - DNA, 90 bp, Homo sapiens
cagagccggactgattctctcaatttgcttcacacaaaagatgttggacaatttctacaattttgcttcatcatttgctgtctctcaggc

SEQ ID NO: 203462 - DNA, 96 bp, Homo sapiens
gtgatgccatttattgatgaaattttgaacaacattaacactattatttgtgatcttcagcctcaacagtgaacttcaaagggcagaggggaaact

SEQ ID NO: 203463 - DNA, 89 bp, Homo sapiens
cggcgttgggttgagcgggctttttggaagtttgtggcggaggtgaggccgagggtccctgatgggcctgggtgacattatctcacagc

SEQ ID NO: 203464 - DNA, 100 bp, Homo sapiens
gatggccgagaggaagctgttcaacaaaggcattgccatctacaagaaggatttcttcctggtgcagaagctgcactattcctgatcagagaactccagt

SEQ ID NO: 203465 - DNA, 100 bp, Homo sapiens
gagagcttcatcaaaaatagtgatagctttgataagtatgggctacgtgagttcgtggtgattgcccctgctgcacacagtgacgctgttctcagcgaat

SEQ ID NO: 203466 - DNA, 98 bp, Homo sapiens
tggggccggcgggagcgcgaacgagcgacggcggaacccgtgggcctgtggactgcagcctcggcggtcagcaggtccctgactatggctccccagag

SEQ ID NO: 203467 - DNA, 100 bp, Homo sapiens
agaagctccaggatattatgaagttataaggttccccatggtgggggcccctgaagccactgatggaagccacactaccggggcatcggaccatgaaccc

SEQ ID NO: 203468 - DNA, 50 bp, Homo sapiens
cagtatttcgcatggcaactgttgaaatcacaaagattagacaccttttt

SEQ ID NO: 203469 - DNA, 74 bp, Homo sapiens
agctgctcgcctgtctccgtcggaagggagcccaagctttgcagaggtgcaggagaacccggggaggaggccca

SEQ ID NO: 203470 - DNA, 82 bp, Homo sapiens
ctgtatgagaaggacaacacctacttaggcgcctgtgtctggcagagctggtgtgagacgagacaatcctgccccgccgccg

SEQ ID NO: 203471 - DNA, 100 bp, Homo sapiens
tgtgttcgcagtgacctggggaacctgctcaaagccctgggtcgcttggaagaagccaaggttttctgtctcaactggtctctgacaagcctctgactga

SEQ ID NO: 203472 - DNA, 100 bp, Homo sapiens
tgagaagatggatttaagacatattttggagactctaaaatagagctcaagcttgagaagagagaaccactaaagggcagagcaaagactccagtaacac

SEQ ID NO: 203473 - DNA, 103 bp, Homo sapiens
gtcgagccggcctgcggcagccggtaccagcagcacccttacccttctgaagaacagaaaaagcagttggcacaagacacgggactcaccatccttcaagtga

SEQ ID NO: 203474 - DNA, 100 bp, Homo sapiens
cccgccagctgctccggagatacggatctagtgaaaagccatttgatgtatgcggtcagagaagaagtggaggtcctcaaagagcaaatcaaagaactaa

SEQ ID NO: 203475 - DNA, 82 bp, Homo sapiens
tccacctgccagcagggggaggatccacttgactggacagggggggccctcagcctcttggccttgaacgggctgttcatct

SEQ ID NO: 203476 - DNA, 100 bp, Homo sapiens
gttgcaaatccttaaaagagtcttaacggatcacagaagaactgcagcttcctggggagcagtttcacctccacaggcatcgcttcatactcctcactgt

SEQ ID NO: 203477 - DNA, 100 bp, Homo sapiens
gtggcactgagccggctcaggcagagacgcggcaccatggctagcaagaaagtctgcattgtaggctccgggaactggccggctgcgtgcacttttccta

SEQ ID NO: 203478 - DNA, 75 bp, Homo sapiens
ttcttgtgtatctggagaaaatagaggtgtcagttgtacccgaggcgttctcagcagcagcaagtacctgtggtg

SEQ ID NO: 203479 - DNA, 100 bp, Homo sapiens
tttgttaaggattccaagtaactcttatttggcttactgtggatttctccgtcctggagtttcttcagagaatctttctgcagtggccacaggaaactgg

SEQ ID NO: 203480 - DNA, 101 bp, Homo sapiens
cctacttggactcttgattggaatgttctccctgcagcagtcagcccaaaggaaggtgttgacagctcttctaccacaagcagtgcttctccaatgcccaa

SEQ ID NO: 203481 - DNA, 90 bp, Homo sapiens
tcatcaacgagacggaggaagggccaaaggatgccattcgagccctgaagaagcggctcaacgggaaccggaactacagagaggtgatgc

SEQ ID NO: 203482 - DNA, 100 bp, Homo sapiens
attatccagtgcaagttgcacctttgagcaatggtctttgctgtgccttctctactgatggcagtgttttagctgctggccttatatgacttggctgtcc

SEQ ID NO: 203483 - DNA, 75 bp, Homo sapiens
ctccctctgcccccccttccccacgcaaccccagatccatttacactttacaacagtgggagtagctcaccgtta

SEQ ID NO: 203484 - DNA, 98 bp, Homo sapiens
gcggccgtgtcagtttggggcatctccgcggtccggcccggggccccgggatctcggctgtccttcctcccggtgcagcagtaccgcgtcgccatgac

SEQ ID NO: 203485 - DNA, 100 bp, Homo sapiens
atttgattacaaaaggtgaccttatagaaatagagagatgtgagcctgtgaggtccaaggtggtgattattccttgtggcattaccaatgcactttctga

SEQ ID NO: 203486 - DNA, 83 bp, Homo sapiens
catcacagtccccagagcccacagagccgcacctgaactcctggggggaccgtcagtcttcctcttccccccaaaacccaagg

SEQ ID NO: 203487 - DNA, 83 bp, Homo sapiens
cggctctcggtgccctctccttttcgtttccggaaacatgagggaagtcttgccggaccatcacctttgagcagttccaggag

SEQ ID NO: 203488 - DNA, 80 bp, Homo sapiens
cttcatccccatgaactaaataatctcctgtctaaaagctggagtggaccagagaaattgcttgctttagatgaactcat

SEQ ID NO: 203489 - DNA, 106 bp, Homo sapiens
ctgcagcggaaccggacccagtccctgagccgcccctacacccacaggcctaaaggggagtggccccagtggcggtagcggcggtggtgccaatggtacctctttc

SEQ ID NO: 203490 - DNA, 50 bp, Homo sapiens
cccaaactgcaataagccgccttccaagttgatattcactgatggactcc

SEQ ID NO: 203491 - DNA, 90 bp, Homo sapiens
cgaggaggagcggccaaagcagtacagctgggatcagcgcgagaaggttttctcacgatgagtcggaggaggatatcgtgtaaagatctg

SEQ ID NO: 203492 - DNA, 100 bp, Homo sapiens
ggcggcatcgagactatcgctaatgagtatagcgaccgctgcacgccgcatttggctttatgtcccgagttgccctacaagcagagaagatgaatcatca

SEQ ID NO: 203493 - DNA, 88 bp, Homo sapiens
acgggatacaaagtctacatttgctggatacagtttatgtaacttgatggaagaaaatggaattactccaaaaagacaagtgctcaag

SEQ ID NO: 203494 - DNA, 75 bp, Homo sapiens
cgtcaagtacactgaaattcatcctgagatgagctttggaatcgtcctctgggaaatcgccactggagatatccc

SEQ ID NO: 203495 - DNA, 100 bp, Homo sapiens
agtgtctccagcatcctgcaagtggttgtagacactcctgggatcctggaccaccctctggaggataggaacaccatcgagatgcaggccatcactgccc

SEQ ID NO: 203496 - DNA, 100 bp, Homo sapiens
aaagacttccagaagccactccagtgaccataagataaatgtcagaatcgcataacccccaggatcaggtatagctgtggaccaactgtatatgatcatg

SEQ ID NO: 203497 - DNA, 74 bp, Homo sapiens
atctctgttgcttcatcccaggaaagccaccattggttcaggcaatcttcagcggtgatccagaggagatccgg

SEQ ID NO: 203498 - DNA, 83 bp, Homo sapiens
gcggaagtgcagctgcctcagttcttagcgcagactgcttcagctgccataacaaaatatcacagactggatggattaaacaa

SEQ ID NO: 203499 - DNA, 96 bp, Homo sapiens
gtggacctaataggatttgtcgtttctgttgtgaaaaaaacagattcgagaaatgatggagtccttcgaaggccctcagcctgcggatgtgaggct

SEQ ID NO: 203500 - DNA, 100 bp, Homo sapiens
gcatctaactaacacggtttttattgacagagctctgatagttgttccttgtgcagaaggatgtgacctccacaaaaggaaatgagtttgaagattactg

SEQ ID NO: 203501 - DNA, 98 bp, Homo sapiens
gtccggagagcgggggcgagcttgaaagttccagaacgctgcgcccaccttgggacaccttgactccaagcccagcagtaagtccaacatgattcggg

SEQ ID NO: 203502 - DNA, 87 bp, Homo sapiens
cctttatatagaagggagagtagaattaaacatgtggacatgaaccaaaagagcatattatggagtgcactgaaacagaaagctgaa

SEQ ID NO: 203503 - DNA, 87 bp, Homo sapiens
gacgttacaatggtggagttggcaggtgtgcgcagctcaggtgcctaaaaggccagaggggcttctcaggccaacctccttttgatg

SEQ ID NO: 203504 - DNA, 75 bp, Homo sapiens
gttcatctcctccgtcaccagccacatctaccagctattactataacaagcgcattctgcacaagaccaagggga

SEQ ID NO: 203505 - DNA, 82 bp, Homo sapiens
ttacgcgccgcacggatcatggccgcagccgctctggggcaggtgcccgtggttgacacgagctgtgtccccagctgttccc

SEQ ID NO: 203506 - DNA, 75 bp, Homo sapiens
gccgcctgcctgcctgccactgagccgccgccatgatcctgctggaggtgaacaaccgcatcatcgaggagacgc

SEQ ID NO: 203507 - DNA, 101 bp, Homo sapiens
caaccccttcgagcaagacgtggggcagtgatcacaaccagattcaacgtatgcacaaagcagcggataccatggtagcggccgtcgctgattgcttttac

SEQ ID NO: 203508 - DNA, 100 bp, Homo sapiens
gggatcgtgaccgagaccgtgaccgagagcgtgaccgagagcgcgaatatcgtcatcgttagaaggtattccagcgtcttcaggaaacagtttagactct

SEQ ID NO: 203509 - DNA, 100 bp, Homo sapiens
cctggccgtctccagagccatcgacttccaccgctgtcagaaggcaatgaccgctaaaggaggcgatatctctgtgtgcgaatggtaccagcgtgtgtac

SEQ ID NO: 203510 - DNA, 96 bp, Homo sapiens
gcacctttcggcttctgagacggcggcagcagcggcattcaggcatcctagaatacgtttccacacgggtcttgtggatgcccacctctactgttt

SEQ ID NO: 203511 - DNA, 100 bp, Homo sapiens
tcaaagagcagagcatcctggaactgggatctctcctggcaaagactggacaagctgcaggtctcaaacagcttagatgggaggctgaacgtgatgactg

SEQ ID NO: 203512 - DNA, 80 bp, Homo sapiens
gtgcattgcctttggaaacgagggtgaagaaggtgaatacagtgaagaggaaaactccaaagtggagctgaaatcagaag

SEQ ID NO: 203513 - DNA, 83 bp, Homo sapiens
tgatgatcctgccatgcaggcaggccctgagcacgctgctgtgtgagcagcagatgatatcatcaagttgaatcgaaaggaag

SEQ ID NO: 203514 - DNA, 99 bp, Homo sapiens
ttcatgtgggccctgaaaaacggagacttggatgaggtgaaagactatgtggccaagaagtgactggacaaccccaaaatgcatcttttgtcaagagga

SEQ ID NO: 203515 - DNA, 85 bp, Homo sapiens
aggacgtgcctcgtggtctaaagcttcggcacaagggcccaactggaattccacttacgggggtcctgtcccaggtgcagctaca

SEQ ID NO: 203516 - DNA, 82 bp, Homo sapiens
tgggctcgctcttcgacgacccctgggcgctgcctatggcacagccaagagcggtaccggcattgcggccatgtctgtcatg

SEQ ID NO: 203517 - DNA, 50 bp, Homo sapiens
gagccttccggggccacactgatccgtttcacagattccttggtgtcttt

SEQ ID NO: 203518 - DNA, 75 bp, Homo sapiens
cttcagtattcacaacatcccaaggtgatgatgaacagtctacacagatggctgcaagttgggaagatgataaag

SEQ ID NO: 203519 - DNA, 101 bp, Homo sapiens
accataagggcttaactcatatatttaacccccctccaaaaaaaaagaggcacagttagatgaagaaggacagtttcttgtcagaataatatatgatgact

SEQ ID NO: 203520 - DNA, 82 bp, Homo sapiens
agactcctatatgggtttggatcagattaaaccattgaagggtggtgacttcacacgccataatggcactggtggcaagtcc

SEQ ID NO: 203521 - DNA, 83 bp, Homo sapiens
ctttgcctgatcatgcagacatctccaactgtgggaactctttccagcttgtgtctggtttccagccatagttcccaggccac

SEQ ID NO: 203522 - DNA, 75 bp, Homo sapiens
gcggtgtctacagtgttctcgacttcgtcgctgggtgcaacaccggaggatttcagcaacctcccacctgaacaa

SEQ ID NO: 203523 - DNA, 98 bp, Homo sapiens
ctgaacatgagcctcctcctctccttctacctgctggggttgcttgtcagtagcgggcaagctttggcgctgaccacaatgctgagcaggaagcagca

SEQ ID NO: 203524 - DNA, 89 bp, Homo sapiens
aacttatgaacaccctaaggaaattgagacgtcagatggacatcattgtgtctgaagtgtgatccctcacatccacaaatctctgattg

SEQ ID NO: 203525 - DNA, 98 bp, Homo sapiens
ctgttcgacttcgatgatttactgaaatttgatgacctagatggaacacatgctctgatgcaatctgcacatcgtgctgccacacgaggcttcattcg

SEQ ID NO: 203526 - DNA, 82 bp, Homo sapiens
atcttggatccgcgggacaagaaaattcatgcgatctgactgcagccatgagcagcaatgagtgcttcaagtgtggacgatc

SEQ ID NO: 203527 - DNA, 97 bp, Homo sapiens
ttggcagccttcctgatttctgcagctctgtgtgaagggattaaagcctgtggtttccacagaagcaccacctatcatatttgccacaccaactaaa

SEQ ID NO: 203528 - DNA, 100 bp, Homo sapiens
tccgcgctcaccactcagtacggcgccgccttctgggtcacgctggcaaccgaacctcaagaaggcatgaagccagcccctgcagtgccgtccacccgcc

SEQ ID NO: 203529 - DNA, 75 bp, Homo sapiens
cctggacacagcaatatctctgggctttcacaggtcccaaaggcaagcagttagaaggaactgaatgtccactcc

SEQ ID NO: 203530 - DNA, 73 bp, Homo sapiens
tggttccgtccgctaggagtctgcgtgcgagggagtggacatccgccataacaaggaccgaaaggttcggcgc

SEQ ID NO: 203531 - DNA, 100 bp, Homo sapiens
ctggcccacgccgctccgaggcctcgcgaccgccgagcctgcagcctgccccgcggccaacatgagcttcttgttgtggagtcttgctctgtcgcccagg

SEQ ID NO: 203532 - DNA, 75 bp, Homo sapiens
tgggtccagagaagcaggatggatcttgcgaggcgaggattaaatccaccacacagggtgaaatctatctccatg

SEQ ID NO: 203533 - DNA, 76 bp, Homo sapiens
tcacgttcagccggcgtataccaacccaccccacatggcccacgtacctcaggatagatcactgcgaccagaggaa

SEQ ID NO: 203534 - DNA, 100 bp, Homo sapiens
agtgggacgtctgagactttctccttcaagtacttggcagatcactctcttagcaggattcactccttctccagttgcacagccacacccttcagctggc

SEQ ID NO: 203535 - DNA, 75 bp, Homo sapiens
gaaatcagggagctcttaacccagtttgaaacgtaactggttccctgaccaggttttaaaatcaaagatgggaaa

SEQ ID NO: 203536 - DNA, 88 bp, Homo sapiens
aaggatttcatctggatgtagaagattatctctcaggagttctaattcttgccagtgaactgctgtttggggcaacttcgttaatatg

SEQ ID NO: 203537 - DNA, 100 bp, Homo sapiens
gccagatggaagcatcctgcctcgtcatccagttggttaaggtgagctcatcgattcagcacccagaaacacctctgcacatttctggtttccatctgcc

SEQ ID NO: 203538 - DNA, 74 bp, Homo sapiens
gcgagacagccagagacacaaacaacttccggtggacctgtggaaaagccactggcagtgattcaagtggtgtc

SEQ ID NO: 203539 - DNA, 100 bp, Homo sapiens
tccgagactataaggatgaacagggcagacttctctgtgagctcttcattagggcaccaaagcgaagcacgttcacgtccatgttcttcccaggaaggct

SEQ ID NO: 203540 - DNA, 106 bp, Homo sapiens
tcctaccttatgagctcggttttcttatgcttataagagtggaacagggggggccctcagcctcttggccttgaacgggctgttcatcttgattcacaaacacaac

SEQ ID NO: 203541 - DNA, 75 bp, Homo sapiens
ggagatcatagcagagtacgatactcaggtcaaagcattgcagtgtcgagatggctatgaaccctgtgtaaatga

SEQ ID NO: 203542 - DNA, 76 bp, Homo sapiens
cttggtgtcatccagccttagcaaaccagagatgaggaaaatgaggcccaaagaagtgatgccacttggttaaggt

SEQ ID NO: 203543 - DNA, 75 bp, Homo sapiens
gcttgatatcacagaggaaactctgcattctcgcttcctggagggtgtcaaattgagaaccaggtagatccccac

SEQ ID NO: 203544 - DNA, 95 bp, Homo sapiens
gaaggccccgagatcccaggcactgagtgactgcatacttaataaaagactagtggccttagtgcccatgcccagtgaccctccattcaataccc

SEQ ID NO: 203545 - DNA, 100 bp, Homo sapiens
tgcagggccccctagccacataataggcgatgaggagataccagcaggaactcctggatgtggtagataagaatgagtcagcagtgattgttgccccaac

SEQ ID NO: 203546 - DNA, 75 bp, Homo sapiens
tgagatgaggaggcgtcgcgcgcgcctgtagctcgcgggcctcgcagccaagaagacctgtgcagacagtgactt

SEQ ID NO: 203547 - DNA, 100 bp, Homo sapiens
gaaaagatccctggaatatgaagagacacagtatggtagccacacccccagggtacaggcatccttcacctgctattgttgcaagaacagtcagaatttt

SEQ ID NO: 203548 - DNA, 82 bp, Homo sapiens
aatatatggctggacagctagctgcttatggctataaaattacaggaactgtggctgcaccatctgtcttcatcttcccgcc

SEQ ID NO: 203549 - DNA, 98 bp, Homo sapiens
cggctgctgtctgcgcttgaggacttggaggtcctgtctaggggccacctacagatgctcctgcagtggacacagcagaacaagtctatatctcttcc

SEQ ID NO: 203550 - DNA, 96 bp, Homo sapiens
tctttcgcttttttacctgccaatcaaactgctacaagacaacaccctgatctggcatggacattaattcgccaaaatgacgaacacaaagggaaa

SEQ ID NO: 203551 - DNA, 102 bp, Homo sapiens
gtcttcccgcgtccgccgattcctcctccttggtcgccgcgtccttggctggcgtcacaggaagtcctggagaacctgaaggaccgctggtaccaggcggac

SEQ ID NO: 203552 - DNA, 98 bp, Homo sapiens
ttgggagcaggaagatgtcgaatgaacttgagcaggtgacagcagggacatgtctcgggagatgcaggatgtagacctcgctgaggtgaagcctttgg

SEQ ID NO: 203553 - DNA, 82 bp, Homo sapiens
tctaccacctgtagttcagccaagtccaagtcaggatggctaaaggtgaccccaagaaaccaaagggcaagatgtccgctta

SEQ ID NO: 203554 - DNA, 100 bp, Homo sapiens
gtttaaagcccgagtggattcatttttctacatattaggatataaccctgagacaagatatggccgcgtggaaagtgtcaaaattcttcccaagagggga

SEQ ID NO: 203555 - DNA, 100 bp, Homo sapiens
gaggctggaaaagagggtggaaaaagcagggaggttatgaggcttaataaagaagctgcctgccttgtgcttggctgtatgattttccctgatggctggg

SEQ ID NO: 203556 - DNA, 82 bp, Homo sapiens
cagtccgccgctcaccccgcggccgcaccttcccgccttctcaggaagcaattttggaggtggtggaagctacaatgatttt

SEQ ID NO: 203557 - DNA, 75 bp, Homo sapiens
tactacctttatttccaccataggaagtggttacctggaaggaaaggagctgcagaacttgatccaggagctcca

SEQ ID NO: 203558 - DNA, 75 bp, Homo sapiens
tgttaccaagaggggattgatctgctcctgcaggttctgaaaggtccaggggcaagttcatcctactctcgagtc

SEQ ID NO: 203559 - DNA, 75 bp, Homo sapiens
gctatggaagatgaccagaggactagacctgaagtttcaaaggccaatggtggcagagtctacatagaactatgc

SEQ ID NO: 203560 - DNA, 100 bp, Homo sapiens
ccaagatgcagttttttgatgctgaggagctcctggtcgatgaagaggatgatgtttttggtgaagggaggttcccctgaaggatgctaaggaatacgct

SEQ ID NO: 203561 - DNA, 80 bp, Homo sapiens
cccccgaaggccctatcaggacatggagtatgaaagacgagttcccgattttgaaatgctgggctcactcagaagtggca

SEQ ID NO: 203562 - DNA, 100 bp, Homo sapiens
tgagaccaagaaccaaccaattccggacacacttggactcgacagactctaaggaagagagagaaaatccttcaaaacggagtagaattgaacgtgatat

SEQ ID NO: 203563 - DNA, 76 bp, Homo sapiens
cctgccccacaatacccaccgcgtcggcgtgttcaagaacggccgcgtggagatcatcgccaacgatcagggcaac

SEQ ID NO: 203564 - DNA, 100 bp, Homo sapiens
cgacttcaacaagaacctgaacgaggacacgaccttcctgcccttcacgctccaggagctaggtggctttcctgggggaatgcctggtaattttcccgga

SEQ ID NO: 203565 - DNA, 116 bp, Homo sapiens
tgggcagaagatgcctctgattggtctgggtacctggaagagtgagcctggtcaggtatccagctcacatagaagacattgactacgaggaaggaaaagtactcatccatttcaag

SEQ ID NO: 203566 - DNA, 74 bp, Homo sapiens
cataccacactcttcagcgaccacgcaggcactttcccggtccccagatggaatcttgctctcttgctcagact

SEQ ID NO: 203567 - DNA, 75 bp, Homo sapiens
gcaagagtgccatggagaggctgaagcgcgctcaccagaacaagctagaagaaatgatcaatgagctagcagtgg

SEQ ID NO: 203568 - DNA, 75 bp, Homo sapiens
agcgccaccctgtggacatcagcgccatccccgagcagcggtggaagctgattctctaggaggtaatagccatac

SEQ ID NO: 203569 - DNA, 82 bp, Homo sapiens
agatgcctggcagccccgctctctgcagtatatgggacaggttgctcatcaactcccaacctaagtccagaaagacctccac

SEQ ID NO: 203570 - DNA, 74 bp, Homo sapiens
aacaatatcggcattctgtgctacgaagatggttggaatccattttcgtacccatacaaaaaactggattatgg

SEQ ID NO: 203571 - DNA, 90 bp, Homo sapiens
tgccaaagttacacatagtacagaacattgatgatggcacctcagatcgcccctacagccatgctctggtggctggaattgaccgctacc

SEQ ID NO: 203572 - DNA, 75 bp, Homo sapiens
ggtaaaatgtgggcgataattcctttcttacaaggtcatcttttcttgagtcccttctgcaaccagagtctttaa

SEQ ID NO: 203573 - DNA, 74 bp, Homo sapiens
aaacaacattatgttgggggataaggacaaagtaaccgttaaataatcatgggccagactgggaagaaatctga

SEQ ID NO: 203574 - DNA, 90 bp, Homo sapiens
ttttcttcgctacttgaaacaatccaagcccaacagcatggtggtggaacaccccgagttcctcaaggcagggaaggagcctggcctgca

SEQ ID NO: 203575 - DNA, 94 bp, Homo sapiens
cgcatgtgatcactctgggactcgtggggctgcagcaccggtacagcagggaagaactggaaactcagagaaagaaactgcccttccatctaca

SEQ ID NO: 203576 - DNA, 99 bp, Homo sapiens
ggagatcatttgggagatccaagagattcagtatcactcgctcccttgatgatcttgaggctaagtgctatttatggaggtacctatatgctgaataaa

SEQ ID NO: 203577 - DNA, 100 bp, Homo sapiens
gagaggagctgggaggagcactgcaaatttcactttggacacgtgagtcagagagaaaatgatgtggctggtattgatgtcaacatgggctgtccaaaac

SEQ ID NO: 203578 - DNA, 129 bp, Homo sapiens
ctcctcctcctcttcctcctcatcctcctcatcttcttcatcctcctcctcctcagagttcgttttctagccaaggaaaatgtaacccaggacgctgaggacaacacagtctctttcctgcagcccaat

SEQ ID NO: 203579 - DNA, 82 bp, Homo sapiens
ctcaatatctgtcttcggtggactccttcggcagtccacccaccgccgccgcctcccaggacctcctctgtcagagagagca

SEQ ID NO: 203580 - DNA, 75 bp, Homo sapiens
gaggaggccgccctggcgctggccgaggggctgaggacgaggaggagaccacgttcagaatggagtccaacctat

SEQ ID NO: 203581 - DNA, 100 bp, Homo sapiens
agatcatgtttgatgtggaaatgcacaccagcagggaccatagctctcaggtttccattaactttggaccatgcttcaagtatcctccgaaggatctcac

SEQ ID NO: 203582 - DNA, 100 bp, Homo sapiens
ttgcacacctggacgcagtcacctgcctagccgtggaccccaacggcgcattcctgatgtcaggaagaatcatgttcgttcaggaggaggccctggccag

SEQ ID NO: 203583 - DNA, 100 bp, Homo sapiens
cagaagactgcgttccagccccagttccccggcagcgggacccggcgaagacgcgaccgcggcgcgagtcaccatggtacccctgagcagaaggctctgg

SEQ ID NO: 203584 - DNA, 98 bp, Homo sapiens
tcggcggccgccatggcgtccaacatggaccgggagatgatcctggcggattttcaggtactccaaagattcaggtttactcacgtcatccagcagag

SEQ ID NO: 203585 - DNA, 100 bp, Homo sapiens
tgggaaccagcgcttctccaccaggatcacgtttgagtgtgctcagatatcggcagaagtcaattcatctggaaagactatctctgagtcagacttaaac

SEQ ID NO: 203586 - DNA, 113 bp, Homo sapiens
gctgtctctgatccgcaagcatgctcagaccttcattgctctgtgtgccaccgacaatgcagatcttcgtgaagactctgactggtaagaccatcaccctcgaggttgagccc

SEQ ID NO: 203587 - DNA, 82 bp, Homo sapiens
ctgatagtcgatcaaaaattgtgcttctggtagatgcttcacagcaaactgaccattaaaaatctcaagtgacgactttggg

SEQ ID NO: 203588 - DNA, 98 bp, Homo sapiens
aagttactgccgcgccaccgagtccggaccggagactttggggcctaactagtgtggccagactccactgatgatagctgccgaacaaggcaatctgg

SEQ ID NO: 203589 - DNA, 83 bp, Homo sapiens
gtggcaggggctctcggacatgctgccaacgacgcgaggtacatgtcccagagcaagcacacggaggcccgggagctcatgta

SEQ ID NO: 203590 - DNA, 100 bp, Homo sapiens
tgctggcctgtgccggggtggaagctgagcgcgtggtggagttttcctgtgggtcacggagactcaccagttggcagaattaaatgagaagaagaatgaa

SEQ ID NO: 203591 - DNA, 100 bp, Homo sapiens
ggaagcccaactcctatgagctcctctctggcagcaggaggccactgtctgcagctcccgtgaagatgtccactccagacccacccctgggcggaactcc

SEQ ID NO: 203592 - DNA, 83 bp, Homo sapiens
cccaggcccacggaggaagagccgggcagtccctggagcgggccagccgccaccggcacggccaggccagcatggtggaccac

SEQ ID NO: 203593 - DNA, 50 bp, Homo sapiens
ccatattgccttcggaggatacatggttactcactataaacaatatccac

SEQ ID NO: 203594 - DNA, 74 bp, Homo sapiens
agtgaatgaggttgagcgtctgatccaccatgtaaaggggaaaacatatccatttcggggcgcctttccaccag

SEQ ID NO: 203595 - DNA, 101 bp, Homo sapiens
ggccgtgggggtcgtgggccggagcgcctccttcgcaggcttcagcagtgcacagagccggaggatcgctctccatgcagtaaacagacccagcagaacct

SEQ ID NO: 203596 - DNA, 98 bp, Homo sapiens
agcatatttgagtcatttccttcgtacccacagtgcttcatgagaggtgtggatgaggtcaccattgtcaacattttgaccaaccgcagcaatgcaca

SEQ ID NO: 203597 - DNA, 100 bp, Homo sapiens
cgaggaggagaagcggcgcggcctggacaagcggaccccggcccaggcggccttcgagaaaatgcaggagaagcgggtgtgatccctcacatccacaaat

SEQ ID NO: 203598 - DNA, 90 bp, Homo sapiens
aaaagaattacctgaatggagtgaaaaagtggctcacaacattttgtcaggtcctggcattgatgtgcctgctccagacatgagcacagg

SEQ ID NO: 203599 - DNA, 100 bp, Homo sapiens
cagcttactctgcaagttctccccggacggcaagtacctggtggtcgagatatccagtctgacggagcacttgctgacggaatgtgacaaaaaagacggg

SEQ ID NO: 203600 - DNA, 100 bp, Homo sapiens
gtgagagtgacacaggtcaggaagcagaatattccttatatgtctgcgctcctcagaccaccggcaggtgaacagcctgatgcagaccgaggagtgccca

SEQ ID NO: 203601 - DNA, 83 bp, Homo sapiens
ggaaaagcgagcgatcgagcgagcgcgcgcgcgaaaactccgggcagtccaaaattgaagacattagagcagaacaagagaga

SEQ ID NO: 203602 - DNA, 89 bp, Homo sapiens
ggcggaacaggctaccaagtccgtgctgtttgtgtgtctgggcaagatgatgatgaatgaagtcctggcagcttcctgtgtcccaggcc

SEQ ID NO: 203603 - DNA, 75 bp, Homo sapiens
attgtctttgtgttgtctgcatttggaggagcaacaatgtgggactatacggcaaaagagatttcactagcagac

SEQ ID NO: 203604 - DNA, 75 bp, Homo sapiens
tgcacttcgtgcccgaaacgccgaatataatcccaagcttcataaacaagcagatatgcaagaagagaaaaaccg

SEQ ID NO: 203605 - DNA, 100 bp, Homo sapiens
gaagccgacaaggcgttcaagcgaaaacatgaccgctgagcccatgaggtgatgccacactcaatcagaaactatgctactgctgaagaggtatattgag

SEQ ID NO: 203606 - DNA, 101 bp, Homo sapiens
gcccgagtggatcggggacggagagaacacgagcccatcagtacgagctcaactggaggcagtcctgtgcggaaatctgaagaaaaaacagatacaaagcg

SEQ ID NO: 203607 - DNA, 96 bp, Homo sapiens
tgaccacgtcgttccgcgacggcctggctttctgcgccatcctgcaccgccaccggcccgacctcatggtttcaaagacaacctccacgctgtgtt

SEQ ID NO: 203608 - DNA, 101 bp, Homo sapiens
tagcccttgaagtcaaccatctcacacctttccaaaggacgcgaccataactctaaaagggttttggaaatttgcccatctgcatggcaaagaccgatctt

SEQ ID NO: 203609 - DNA, 73 bp, Homo sapiens
cagagatccaagtgcgcgccctggcgggtccggaccaagaaatcagggtgaaatggcccacacgtgccgtgga

SEQ ID NO: 203610 - DNA, 97 bp, Homo sapiens
tccagatggcgtcttccgtgggcaacgtggccgacagcacagatatgtgaaagaggccaaagaagcaactaagaatggagacctggaagaagcattt

SEQ ID NO: 203611 - DNA, 95 bp, Homo sapiens
cgagttggctgcagatttgtggtgcgttctgagccgtctgtcctgcgccaagaaaacaaccctttttgctgcacatgtaagtggagctgtgctta

SEQ ID NO: 203612 - DNA, 100 bp, Homo sapiens
ttctgttccacccagcattgtttgaagtgccctcgctcaaactccttgcggcccactgcattgtgggacaccaacgcggggagacaaccccttccccaag

SEQ ID NO: 203613 - DNA, 50 bp, Homo sapiens
cttcgacgaacactacgagtaccgcagaagatggctgtgccacccacgta

SEQ ID NO: 203614 - DNA, 101 bp, Homo sapiens
aaatgagcctttgtgcgtctctgttgattccaagtttcctatagaagacacccctttggttccgacttaattcagtgcacaaatgagatgaatgtgaacat

SEQ ID NO: 203615 - DNA, 100 bp, Homo sapiens
gccccatggcctgggtagaaccttgtttctgctccaggtggaaactaattctaagccagactgctggagatcaccctgttctagtgtgtggaggcttcca

SEQ ID NO: 203616 - DNA, 100 bp, Homo sapiens
ggacggggagctgaacgtggacagcctcatcacccggctgctggaggtgccgcagaatggaattcggcattgttcctacacagcttctcggcaacatctc

SEQ ID NO: 203617 - DNA, 74 bp, Homo sapiens
cccacaaacatgttcacaacgggcatggagatacaactcgtcaacgaatcaaattcagtgatgacagagtatgc

SEQ ID NO: 203618 - DNA, 75 bp, Homo sapiens
ccccggcccacagtgggggtgtgcaaacccgagagaactggataacaacgaacttgatgcaagtgataggtttgc

SEQ ID NO: 203619 - DNA, 83 bp, Homo sapiens
cagcccccggagtgcggagccgaccaggtaaggctggcctctctgcagtcagaggtctgagctctgccatggggataggggtg

SEQ ID NO: 203620 - DNA, 75 bp, Homo sapiens
tgggaacgggacttctaaaaggaactatgtctggaagttacaaggagaacatcatgcgcctctccagccttcaca

SEQ ID NO: 203621 - DNA, 74 bp, Homo sapiens
tctctgccgtgaatcattcctgcagatgaaaaagtgtgacttggcagctgggaagaaccccacagacgaatacc

SEQ ID NO: 203622 - DNA, 76 bp, Homo sapiens
tttcgggccagcgacccgctgctcagcgtcctcatgtggggggtaaaccactcgaatgcctaccgcaggaatggga

SEQ ID NO: 203623 - DNA, 83 bp, Homo sapiens
acccgccggcccgcgggtctacttcctcaaaggttctgcggggagtgtctccagccctgcctgcaggtgccatccccgctgtg

SEQ ID NO: 203624 - DNA, 101 bp, Homo sapiens
ttctaccctggaaaatgtatttgccctccaggactagagggagagcagtgtgaaatcaactgttgggcgggagctgctgctccatctgattgactatctcg

SEQ ID NO: 203625 - DNA, 97 bp, Homo sapiens
gcagacaaaggcgggcgcagcccagcagccgtgcgggcaccgggcgaggcaggcccactcctcccgggaaggccgctcaaatgcccaaatcagagat

SEQ ID NO: 203626 - DNA, 101 bp, Homo sapiens
tctgcagctcatcaatgctgaggagcagacgagtggccaggcttctggggctgactcaactggtctctaattaacagaagatggcaaagcccagccacagc

SEQ ID NO: 203627 - DNA, 50 bp, Homo sapiens
tggggctgcagacaagcatggtgccaagcccagcacaacaatggcacaca

SEQ ID NO: 203628 - DNA, 90 bp, Homo sapiens
ctcccctcacccaacgtcgtaaagtatgctgaggccttggattaccaccgtcaggcactggtgttgattcctcagaacgcatccacctac

SEQ ID NO: 203629 - DNA, 98 bp, Homo sapiens
atggatatggtcgtgatcgtgactattcagatcatccaagtggaggttcctacagagattcatatgagagttatgattactccaaaggtttcggcggc

SEQ ID NO: 203630 - DNA, 100 bp, Homo sapiens
tggccatgtgagatacaaggctacacagagacagatcaaagcagctcttccttcagtgatccttaaagagtggtctgcctataaagggaagtcacctcaa

SEQ ID NO: 203631 - DNA, 80 bp, Homo sapiens
gggctgtccatgggcaccatgatctgtggctgggataagagaggccctgcccaccttgggacaccttgactccaagccca

SEQ ID NO: 203632 - DNA, 100 bp, Homo sapiens
ttcttttaagagatctgctttcatctgaggagcttgctcaagtcttcagtcagtctgtggctactgtggagccgatatcaaggccctgtgcactgaagcc

SEQ ID NO: 203633 - DNA, 118 bp, Homo sapiens
ttctcgaatcattctttgtacagaaattgaaaggcttcaaagctagcaggtcttgggcgtctttggtactggcttttttaggggtctgcctggggattacccttgctgtggatagaag

SEQ ID NO: 203634 - DNA, 90 bp, Homo sapiens
ccacatcctcccctgagtccggagctaccaaaaccatcctcctggatttcagatgcatgccaggtttccactgattgccagaactcgaga

SEQ ID NO: 203635 - DNA, 100 bp, Homo sapiens
ccacctcagccgcttcgtgtggttcttttctggcatcgtaggaggtggcctgctgcatgcagcagattggaataaatatgatgaccgattgatgaaagca

SEQ ID NO: 203636 - DNA, 51 bp, Homo sapiens
cttcatcgtttataaaatccgggctgctgattcgtaaccaacttaaccagg

SEQ ID NO: 203637 - DNA, 88 bp, Homo sapiens
aagctggaacaggagttccgatcgacccggtaccaagaaggggagtgcccgcggcagagcacaatcattgtggagaagacagttcaag

SEQ ID NO: 203638 - DNA, 115 bp, Homo sapiens
gcaggaaacggagaagcacaaacgaaactgatgcctccaatatcgaggcagaagaagtagagttgtatttggaaaaacttaaggaaaaaagaggcttgtctgggaaatatcaaac

SEQ ID NO: 203639 - DNA, 75 bp, Homo sapiens
gtgatccttcttctgaaaattcagtggctgggatgtaattaaaaccattgtgcagagtggtggcatcaagcatct

SEQ ID NO: 203640 - DNA, 75 bp, Homo sapiens
ggaatatcagtcccttatccgggtacaggtttgcagattccgccagcagcacagcaagctctacagatgagtggc

SEQ ID NO: 203641 - DNA, 51 bp, Homo sapiens
ggaggtgccgccggggtcgcaggtggaacggccgccttctccattctccat

SEQ ID NO: 203642 - DNA, 75 bp, Homo sapiens
cggaaactgagtatgggatctgatgatgctgcctacacacaaggcatgttatttgaaagcaattgagacgcaacc

SEQ ID NO: 203643 - DNA, 101 bp, Homo sapiens
gctgctagccaggaacatggactgaagtatccagcgctcattgggaatttagttaagcaatgaggtcttactgtgtagcccaggctgctctggaactcctg

SEQ ID NO: 203644 - DNA, 87 bp, Homo sapiens
tcaaccgtatttggggctgctcctggaggagctacgcagggaaaacggacgatgtattactaagctggaaaacatggggtttcgagt

SEQ ID NO: 203645 - DNA, 100 bp, Homo sapiens
gctggcccagctctccgtgttccggtgtggaaacaaaggtgaccctgccagtcactttggtccacctggtccaaagggtgagccaggtagccctggatgt

SEQ ID NO: 203646 - DNA, 100 bp, Homo sapiens
gtggattccgagcgttggtgtctggcggtttccgaccgttggtgtctggcacgcgccaccccgatgtaccaggccagacaccttcccaaggaggctttgc

SEQ ID NO: 203647 - DNA, 100 bp, Homo sapiens
agatgggtcaccagcagctgtactggagccacccgcgaaaattcggccagggttctcgctcttgggtggttctcttcccaaagtggaagccaaattcatc

SEQ ID NO: 203648 - DNA, 100 bp, Homo sapiens
tcatgattttcaagcacttgctctggagggaagagcgatgggagaggtcatataaaagtgggtctggagtaaacaacagaagaactgagctatttttgaa

SEQ ID NO: 203649 - DNA, 100 bp, Homo sapiens
tttccttccactggccagcattctcctctattagactagaactgtggataaacctcaggttggtaacaaggaagatgctgagaaggaagtagctatttct

SEQ ID NO: 203650 - DNA, 97 bp, Homo sapiens
cacggtctgggccgccgaatctccggccgaagagcggcggcggcagcggcggttactataacaacagtaccaaggtggctgtgaaaaccctgaagcc

SEQ ID NO: 203651 - DNA, 90 bp, Homo sapiens
ccaagttggtttatagagtcaattcctattggtttatcacagatacttctagaattactggctcccataaaacagaacagcggaatgctg

SEQ ID NO: 203652 - DNA, 98 bp, Homo sapiens
ttatctgggctttgctgttagcattagcctttggatttgtgtccagattgtcatcgagatgcaggcagggaagcccacgaggagataaacatcacctt

SEQ ID NO: 203653 - DNA, 83 bp, Homo sapiens
tctgccactgctgctccgtggagatcgtcccgcgcctgccgacttcccaagtaagaagcggaagaggagccgctggaaccaag

SEQ ID NO: 203654 - DNA, 51 bp, Homo sapiens
gagaagaagttgaggcgctatgagaccaagacacattccaccccagtgggg

SEQ ID NO: 203655 - DNA, 100 bp, Homo sapiens
aaaacaatcggcaaggggaattttgcaaaagtaaaattggcaagacatatccttacaggcagagagggctttgttcgcgggggtcacagctctcatggct

SEQ ID NO: 203656 - DNA, 75 bp, Homo sapiens
gcgggatcccagcctcaggcgtgcgcggacggtgtgcggggtagatatccatagaaaagagaactctggagctgc

SEQ ID NO: 203657 - DNA, 100 bp, Homo sapiens
acatggtgaaataattattgttttggatgacagggaagcagctcgagagtgtcgtagaaagaagaaagaatatgtgaaatgtttagaaaacagagtggca

SEQ ID NO: 203658 - DNA, 100 bp, Homo sapiens
acagggtcgggggacacgcaggatgagccccgcgaccactggcacattcttgctgacagcaataatgacgatgaggacctgacaccagagcagaaggcag

SEQ ID NO: 203659 - DNA, 101 bp, Homo sapiens
ctcgggtcgtggagccaggagcgacgtcaccgccatggcaggcatcaaaggagagcaagccctggaggttcactctttcaagaagtcgtgtgctgaggtgt

SEQ ID NO: 203660 - DNA, 100 bp, Homo sapiens
aggggtctcggaaaccatgggttattgcagtggcaggtgcacgcttatctttatctgtggcatgcaactgtctttagatgacctttcaaatgtttcttct

SEQ ID NO: 203661 - DNA, 96 bp, Homo sapiens
tagtctttccgcttcttgaatttctctctgtaaaggagatcagtgtactgttacccggacatacctattccttcacaagttctggttcttcagtgc

SEQ ID NO: 203662 - DNA, 82 bp, Homo sapiens
ctcgcctttgccgatccgccgcccgtccacacccgccgccagtccagaatgacagggtccagaaactggcgagccacgaggg

SEQ ID NO: 203663 - DNA, 101 bp, Homo sapiens
ccgggttttcgcagtggctcggtggcctaccccgatcgaaaccgactggacctacagagacatctgggattttctgcgtcagctgtttgtcccatactgta

SEQ ID NO: 203664 - DNA, 75 bp, Homo sapiens
ctgccttccacctccagtgctggtgttcttccgggcgggcaccttggcacggctggaggagcagcgggatgaaca

SEQ ID NO: 203665 - DNA, 100 bp, Homo sapiens
agcacatcagcgaccgggagaacatagacgagtctaacgtgaagacattttgctccaagaatatcctagccatccttggcttctcctctatcatagctgt

SEQ ID NO: 203666 - DNA, 74 bp, Homo sapiens
tctaattttgagtacttgatgtttctcaacacgatagcaggaaggatcgagatcgagaccgggatcgtgaagat

SEQ ID NO: 203667 - DNA, 98 bp, Homo sapiens
agtaaagttggaacacagcagagggtgtgtaataaaatacaggccttcatggtgaaacacctcttggagtatacccaggcaacagagtctaacctgca

SEQ ID NO: 203668 - DNA, 100 bp, Homo sapiens
tggcccagctccttggggtttccggctgcagggcggtaaggatttcaacatgcctctgacaatctctagtattactgaagatttcattgctacatatcag

SEQ ID NO: 203669 - DNA, 75 bp, Homo sapiens
ggtggagcctcatctttcgctgtgtattctctttggaaaaccgatgtgatattttgctaaacatgttgactttct

SEQ ID NO: 203670 - DNA, 100 bp, Homo sapiens
tggatgttcggttcctgctgccactgctgccgccgcccccggagctgctggtttcattcgaggtttcgggccggtgatcctgaaggacctggaggtgctg

SEQ ID NO: 203671 - DNA, 96 bp, Homo sapiens
cgggttccggtccgctactgcatgctgggcagccgcgacttggccaggaattgactttaaaattaggaccatagagctcgatggcaagagaattaa

SEQ ID NO: 203672 - DNA, 82 bp, Homo sapiens
acctcctaggactctatgacacggccggacagatgaacagactagccactttgcattgactggaaacaatggcatttacaga

SEQ ID NO: 203673 - DNA, 100 bp, Homo sapiens
ctcctgcctcagccttccgagtagctgggattacaggtgctcaaccatgtctattagagaaactgaatgaggaggcaaagcatgacaagtgccacaagag

SEQ ID NO: 203674 - DNA, 51 bp, Homo sapiens
ggccgagcaggctgagcgatacgacggatatcaatgcttacaattgtgaag

SEQ ID NO: 203675 - DNA, 76 bp, Homo sapiens
tccggccgcggccagcggagccctgggctggggcaggagccggtctgccatcatggatgttctcgcagaagcaaat

SEQ ID NO: 203676 - DNA, 82 bp, Homo sapiens
ggaggagacatcggcctctgcaggcttgccgaagaagggagtcaggatggctaaaggtgaccccaagaaaccaaagggcaag

SEQ ID NO: 203677 - DNA, 75 bp, Homo sapiens
tcttcagttctctggagccccagattcaacccgtgtacgtgcctgtgcctaaagaggagctattgaaagccattg

SEQ ID NO: 203678 - DNA, 75 bp, Homo sapiens
cctgtgtttccgcagcgagagcgaggaggaggttgcagagcctgaggcctgtgatcagatgtacgagagcttagc

SEQ ID NO: 203679 - DNA, 50 bp, Homo sapiens
cagaagattgcagaggagctgggggacaaaggccatgatggggtcaagga

SEQ ID NO: 203680 - DNA, 75 bp, Homo sapiens
atttaatggaaaatcgcttggttaaaacctgacacttttaacagctagtaactgcacagacccatctgaaagccc

SEQ ID NO: 203681 - DNA, 65 bp, Homo sapiens
cgaggaggcagccaagctcgtagcctgccactccgtgcgacgctgtgcagagctgcaagtccgta

SEQ ID NO: 203682 - DNA, 135 bp, Homo sapiens
cttaactctggctactatgtatctgggagctcctcaggcttccaggggggccagatcacactcagcatgcagaagaatggcattgtgcccatcgtggagcctgagatcctccctgatggggaccatgacttgaag

SEQ ID NO: 203683 - DNA, 127 bp, Homo sapiens
gagcactgagagtaatcgctatagtctcgatcatatttcttcactgttcacttctcagcttttccagaagcctgttaaaagcaaggtctccccacaagcaacttctctgccacatcgccaccccgtg

SEQ ID NO: 203684 - DNA, 100 bp, Homo sapiens
ccaagaaacatctcaccaatttcaaatctgtgtcacatttgaagacgagcactgaggatgaggaaccaactgaagaatatgaaaatgttggaaatgcagc

SEQ ID NO: 203685 - DNA, 100 bp, Homo sapiens
cttcgaacttagacttccggaaggactttggcgaggccaagtatcttcaagaccttctcatggagagtgtgaatttttcccccgccaatctctctagcac

SEQ ID NO: 203686 - DNA, 50 bp, Homo sapiens
aagagcgctcccaggagaaacaagttcctccccgggcagaagaaatcacc

SEQ ID NO: 203687 - DNA, 100 bp, Homo sapiens
gctgcaactgcagctggcctacaactggtcccaggtgtgacaccttcagcaggtctcagggaagatggcagccctaggggacattcaggagtccccttct

SEQ ID NO: 203688 - DNA, 51 bp, Homo sapiens
atactgcttccatatttacatggacacgtcgatctgacaatgctaggagcg

SEQ ID NO: 203689 - DNA, 75 bp, Homo sapiens
aagctgcctggagtcaaggaaggagtcagtggatcggtggggaaaatgctgcttaccctgggccctgggctgtag

SEQ ID NO: 203690 - DNA, 83 bp, Homo sapiens
tggcgctgattggatttccctctgtgggtaaggttcaagcactgtcttcctgttggccctgacaatcatagccagcacctggg

SEQ ID NO: 203691 - DNA, 83 bp, Homo sapiens
cccgctacgagctggctttaatcctgaaagccatgcagcgggtgtggacactgccagcggctgcagccgacttggaatgacct

SEQ ID NO: 203692 - DNA, 74 bp, Homo sapiens
ccaccttcaaaatggagatgttgttgggcagcattcatttcctggcagtcactctgagaggagtgataccaatg

SEQ ID NO: 203693 - DNA, 83 bp, Homo sapiens
gggaccttcagcaagaagcagagacttacagaactatggtcttgctgcattcagggcttttttaaagtcggaattctgtgaag

SEQ ID NO: 203694 - DNA, 95 bp, Homo sapiens
agtagtagttgttgagcagagggaaagggataggagaaggatgtggactgcagtgctgcagtgccaggatttgcatgaagatgtcgaagaagctg

SEQ ID NO: 203695 - DNA, 100 bp, Homo sapiens
ccagacggacacctttttcaagttgaatatgcccaggaagcggtgaagaaaggatccaccgcgaggaatacccacacaccgaagttgggtgaggaagatt

SEQ ID NO: 203696 - DNA, 75 bp, Homo sapiens
cgacgtcgtgatccagaagtccagagctgaggactgcctgtttgcagagctccacgcaggagatcggtgaggagc

SEQ ID NO: 203697 - DNA, 100 bp, Homo sapiens
gcccttatggagcccttgattcaggcttcaatagtgtggacagtggtgataagagatggtcagggaatgaagtaactaggatttctacctcaaccgcgag

SEQ ID NO: 203698 - DNA, 51 bp, Homo sapiens
agaaccaggagctcaatgcccacaaccagtcaccaggagactaaagtccat

SEQ ID NO: 203699 - DNA, 100 bp, Homo sapiens
ctgcgggttagggggccggcgcccgcggttcagccctggcaggtgcccggcccgccccccaccctccggctcccagggcctgctggaggagatgctggca

SEQ ID NO: 203700 - DNA, 75 bp, Homo sapiens
gggaaccctggtcaccgtctcctcaggtggctattatcatggaaaactaatttttcccagagaatttcctttcaa

SEQ ID NO: 203701 - DNA, 100 bp, Homo sapiens
gtgattttcagaggggaatgctaagagatgtatgtccctgggaagctgcatgatgtggaacacgtgctcatcgatgtgggaactgggtactatgtagaga

SEQ ID NO: 203702 - DNA, 90 bp, Homo sapiens
atccatgtcttccaaaatcattggaattggtcgtttttgatgctcgatgaatgctgggaattcagaggaatgtcttcacttatacttgga

SEQ ID NO: 203703 - DNA, 100 bp, Homo sapiens
gacaaaactcctctctatagtcaactccttcaagcatataagtggtcaaacaaggcaaccattgggattgacttcttgtcaaaaaccatgtacttggagg

SEQ ID NO: 203704 - DNA, 75 bp, Homo sapiens
atgctgcaggaactggtgaacgcaggatgcgaccagtgcttgtgtgcagccaggaaggcagcagccgcaggtgtg

SEQ ID NO: 203705 - DNA, 50 bp, Homo sapiens
tattgaagctcacctttgtctaaataaacattaggtatgcatcagttaac

SEQ ID NO: 203706 - DNA, 100 bp, Homo sapiens
aaggactataccgagtatcaggatttagtgacctaattgaagatgtcaagatggctttcgacagagaaccacaatggacactgccagccatagccttgtt

SEQ ID NO: 203707 - DNA, 75 bp, Homo sapiens
ggccgggctgccccgcaggatcatcaagtgttatccaagataaattctgtgggattataaacatttcagtagaag

SEQ ID NO: 203708 - DNA, 102 bp, Homo sapiens
cgctcaatgacagggaccaggggggcggcagcgctggacacccagcctccagtttaagcggctgcagggcaagaggaaccgagggagagaagaaatcaactt

SEQ ID NO: 203709 - DNA, 75 bp, Homo sapiens
gttccccggcccacagtgggggtgtgcaaacccgagagaactgggaacaagcacaagccatttgcaaggttttat

SEQ ID NO: 203710 - DNA, 83 bp, Homo sapiens
agaccctggagcctcagttggaagcagccgatccagcctgcggagcctgtggggcagtggttagcaggaagaagatgagcctt

SEQ ID NO: 203711 - DNA, 82 bp, Homo sapiens
ttctgacctgacttgtttgcagaaagggcataaggaaatggtggcaggcacttcctcctaacaagaaggaagtagttaaaga

SEQ ID NO: 203712 - DNA, 50 bp, Homo sapiens
ttgaagatgcaacgagtgcacttgcccacctgcacccaggtgaaataaac

SEQ ID NO: 203713 - DNA, 91 bp, Homo sapiens
gccgggcccgggcatggtggtctggggcaacgcggaaggattttttatcaagcagaaatgcatcgaacaacgagaatcaagatcactgagc

SEQ ID NO: 203714 - DNA, 97 bp, Homo sapiens
gtggttcacccgctgccgggcaccgaggaccagctcaatgacaggcaggtgacagcagggacatgtctcgggagatgcaggatgtagacctcgctga

SEQ ID NO: 203715 - DNA, 97 bp, Homo sapiens
cagcgcaccgagtggacattttggtctttgtccgcggaaataagaatgtctaagcccctggaggccgagaagcaaggtctggactccccatcagagc

SEQ ID NO: 203716 - DNA, 75 bp, Homo sapiens
ttaacctcatccactccctgaggctgttttggagtcagcggaagatcaccaaggccagggagtggttccaccgca

SEQ ID NO: 203717 - DNA, 75 bp, Homo sapiens
gagaagtctggtgtaatacaagatgctttaaagaagaagcttgaacccattgacttgccacgagtaattacttca

SEQ ID NO: 203718 - DNA, 100 bp, Homo sapiens
tgttccctgacaatttcgttaagaccacggtgtgaacacatgaacagaagacgaaaatttcttctagcctcagtacttgctctccagaattcaagtttta

SEQ ID NO: 203719 - DNA, 141 bp, Homo sapiens
atgagaaaatctccctgctccgcagcgacatcaccaagctggaggtggacgccatcgtcaacgccggtgtcatggagaaactccagctgggcccagagattctgcagcgggaaaatccaaggcttatttatgccaggctga

SEQ ID NO: 203720 - DNA, 100 bp, Homo sapiens
gccggcctgaagtcgcaccctcctcctccggagaagtagagaaataaatttctcccaccctaaaccaggttcattgtctgagatcagttgataacttatt

SEQ ID NO: 203721 - DNA, 100 bp, Homo sapiens
gcctgttcttggaatttgctatggtatgcagaaatgggacgtcggtcatcagatactgaagaagaaagcagaagcaagagaaaaaagaaacaccgtagac

SEQ ID NO: 203722 - DNA, 98 bp, Homo sapiens
tgacatcacagatggcaaccccaagttgaccctgggtctgatctggaccattattttgcatttccaggctgaccggttccctgatgtgttacctgctt

SEQ ID NO: 203723 - DNA, 98 bp, Homo sapiens
gtcgtgagtgacgatgacagtgaggaggaacaagaggagtttacaagtccttccactttctctctgaggcagaaagagcaagggtttttctctccatt

SEQ ID NO: 203724 - DNA, 98 bp, Homo sapiens
ggaaatcgggctgaagcgactgagtccgcgatggaggttgtgcccacgtgcctcagggccttggtagaaatggcccgggtagggggtgcctcctccct

SEQ ID NO: 203725 - DNA, 113 bp, Homo sapiens
ctgaaagattgggcaagagaagaattcagaagaaacaaaagtgccaccgaagagttaaacacagtgggaatatcacttttgatgagattgtcaacattgctcgacagatgcgg

SEQ ID NO: 203726 - DNA, 74 bp, Homo sapiens
tgcagactgtccgcctggagcgttacaaggccttctacattaccgtctgaagatgatgagaaactgaaaaagag

SEQ ID NO: 203727 - DNA, 100 bp, Homo sapiens
gtttgagaaccccgatcagaatgccaaatgtgtttgcatgctgggttcatctgcagaagccagcggacgcctctgttcaacttgtgggttacctggctca

SEQ ID NO: 203728 - DNA, 75 bp, Homo sapiens
gatatcctaaaatttcctgaagaactggaacacgtagaaagtgcaagcaaagatggcagaaacggtggacacaag

SEQ ID NO: 203729 - DNA, 100 bp, Homo sapiens
gcatgtttctacacaacaaaacattcatggagggggaagcaatttctcagcaagacctggtacacatggctattcagattgcctgtggaatgagctacct

SEQ ID NO: 203730 - DNA, 84 bp, Homo sapiens
tgctgtgtacaaaagatttcccacaatggaccacgtggttgaagcaggtataaagactaccgagagccgccgtggtcggaaaac

SEQ ID NO: 203731 - DNA, 100 bp, Homo sapiens
aggttctgtcctcagccgcagtccctggctgcaagatcaaggccctgcgggccaagacaaacacctacatcaagaccccagtgcggggcgaggagccggt

SEQ ID NO: 203732 - DNA, 90 bp, Homo sapiens
ctaccactcacccgcagactccttctccagcatgggctcgcctgtcaacgcgcagttcctctccgacgtcctgcagaggcacacgctccc

SEQ ID NO: 203733 - DNA, 131 bp, Homo sapiens
tttgagccaggctgccctcctgctgctgcggcagcctggggctcggggactggctagatctgtgaaagaacttgtcctggacaacagtcggtcgaatgaaggcaaactcgaaggcctcacagatgaatttg

SEQ ID NO: 203734 - DNA, 75 bp, Homo sapiens
cgacagctcagccagacttcccctatgccctgggcgctgcctatggcacagccaagagcggtaccggcattgcgg

SEQ ID NO: 203735 - DNA, 75 bp, Homo sapiens
gtggaacacatgtccagaaccaagctgagtcccttccagagcacatatagaactggatgcccttgtggtacatct

SEQ ID NO: 203736 - DNA, 96 bp, Homo sapiens
aaacaaaatgtcaacaaattgatggctgtcaataccagcaaatatgcagaaagctatcggatccaaacctatgctgaatatatggggagaaaacag

SEQ ID NO: 203737 - DNA, 76 bp, Homo sapiens
ccagtagcttggatccttgtgggcatgatccataatcggtttcaaggtgactctgacatcattagaagcatgccag

SEQ ID NO: 203738 - DNA, 100 bp, Homo sapiens
tggggcagtgattggaaaaggaggcaagaatattaaggctctccgtacagacagtatgccaagatggaaggaagcctcatacagtgagattaataatccg

SEQ ID NO: 203739 - DNA, 75 bp, Homo sapiens
atgaccacctccagagctaatcaggccaaagcttacttgaggattgctgtggaagtggtaagaagattgccatca

SEQ ID NO: 203740 - DNA, 80 bp, Homo sapiens
ctctccagagtgatcaagtgtgacccgggacccgagctgatccagaaagccaacggtctccacggcttcatgaattggcc

SEQ ID NO: 203741 - DNA, 78 bp, Homo sapiens
taaggattccaagtaactcttatttggtggcaagtgggatgatactggtcatggctttctttctcatcacctacacct

SEQ ID NO: 203742 - DNA, 83 bp, Homo sapiens
cacctgtgcgggatggaacaaaagaaaaggagaacaacttcccgccactgcccaagttcatccctgtgaagccctgcttctac

SEQ ID NO: 203743 - DNA, 82 bp, Homo sapiens
ctgggtgctggccctgtgctggaggcctccggtgtggctgtctctgatggtgtcatcaaggtgttcaacgacatgaaggtgc

SEQ ID NO: 203744 - DNA, 74 bp, Homo sapiens
gacagttcgctacacagcaatgcatcgagaacagatctcggcccctttccaaacactcctgatgcctcatttgc

SEQ ID NO: 203745 - DNA, 87 bp, Homo sapiens
atgaaaaaacaggctgctgtccagtgtcttcgatctgcttctgatgaagaagacagagatgtcaatgaccccatgcccaaccgaggc

SEQ ID NO: 203746 - DNA, 101 bp, Homo sapiens
atggtgcagaaataccagtccccagtgagggtgtacaaatacccctttgaattaattatggctggttgaagctttgagagaagcagcaactgctgttgagc

SEQ ID NO: 203747 - DNA, 113 bp, Homo sapiens
gtcgccaaaaacaaatggggcaggaaattgggaatgaattggatgaacaaaatgtctgatcatcggatatcatggagtctggcaagacggcttctcccaagagcatgccgaaa

SEQ ID NO: 203748 - DNA, 98 bp, Homo sapiens
acgtgcgtgtcacccacgcagacatcttcagccgctgccaggaacttgctactaccagcaccatgccctaccaatatccagcactgaccccggagcag

SEQ ID NO: 203749 - DNA, 83 bp, Homo sapiens
cgcgtgttcccaggcccgtggagagccctagtgggtggagagggcactcggctcgaccagctgcagtacgacgtgaggaaggg

SEQ ID NO: 203750 - DNA, 75 bp, Homo sapiens
cctcatgtggagggcaaagttgcgccggggaacttgtgagcctgcggtgaaaggaaatagccctcaagatagtcc

SEQ ID NO: 203751 - DNA, 100 bp, Homo sapiens
catgggtattgtgcaggacacactcacagcagtgcgcaaattcaccaagagagacgtcttcctggagcggggtgaatctgtaaaatatttcctggataac

SEQ ID NO: 203752 - DNA, 98 bp, Homo sapiens
aaaaactccaaactcctctccaccagcgccaagagtgctggacccaaaggagacaacatttatgaatggaggtcaactatattgggacccccaggatc

SEQ ID NO: 203753 - DNA, 100 bp, Homo sapiens
aaggccaccaagggatccaagccagtgaggccacctgcccctggacacggctttccactcatcaaacgcaagatccaggtctgtgtgtacatccaccagt

SEQ ID NO: 203754 - DNA, 80 bp, Homo sapiens
ctcgcgccggctgctctttccggacagtaagctcttccagaaagaaggggatttggatcctaattgtctcttatctggag

SEQ ID NO: 203755 - DNA, 98 bp, Homo sapiens
cccaccatgtcagacgcagccgtagacaccagctccgaaatcaccaccaaggtgtcatggagaaactccagctgggcccagagattctgcagcgggaa

SEQ ID NO: 203756 - DNA, 75 bp, Homo sapiens
ctgaagagacctccagcaagcagagaacatccagtcatggataaaaatgagctggttcagaaggccaaactggcc

SEQ ID NO: 203757 - DNA, 129 bp, Homo sapiens
tatcacgtgatccggcacgccatgaacctggaggccgtgaacacctacgaagcactgtgacttctgccgtgttcaccgtgggagacaacgtggtttcaggcagcgatgaccgcacggtgaaagtctggg

SEQ ID NO: 203758 - DNA, 90 bp, Homo sapiens
tcgaagccattcagtcctcaatctccttttccttggctacccattcatgatgttgctatcaaaagttgagaaattgtcagaagaaatcat

SEQ ID NO: 203759 - DNA, 88 bp, Homo sapiens
cgaagaagcatcgttaaagtctctcttcaccctgccgtcatgtctaagtcagagaatatgcttttaaggctattaaccagggtggcct

SEQ ID NO: 203760 - DNA, 82 bp, Homo sapiens
tggaggagctgtgcagccgcgaggaggcgcgggaggtgttcgagaacgaccccgagacgcgctgataaagcagtttgtgtcc

SEQ ID NO: 203761 - DNA, 100 bp, Homo sapiens
ctgggccttggcaagcggcccttcgccacggagaccgcccagcagttgaagcggagcgccggggtgcccttccacgccaagggccgggggctgctgcgga

SEQ ID NO: 203762 - DNA, 83 bp, Homo sapiens
gatacagcaggcgctcaccatgttccctggaggtagtgaagcgcgcagtggcgagccagccagactctgtggatgcagccgag

SEQ ID NO: 203763 - DNA, 90 bp, Homo sapiens
gtgggggtgtgcaaacccgagagaactgggaagttccaggttaaaggcagcctcagctcacggggcagttgatggtggtagagaacagcc

SEQ ID NO: 203764 - DNA, 50 bp, Homo sapiens
gcccgtggaacaattcatcttaccagagatgatgaataaggtatttggag

SEQ ID NO: 203765 - DNA, 75 bp, Homo sapiens
cgtctccttaacaccgaacaccgtttttcgttggaatatacgttgcacatttatggcgattctgagtgtgagggc

SEQ ID NO: 203766 - DNA, 83 bp, Homo sapiens
ccagggaagactgggggacccactaggccagggggcgacgcttcagagactgacaacctctgggctgatggggaagatggagt

SEQ ID NO: 203767 - DNA, 101 bp, Homo sapiens
cggagcttcctggagcggctggaagcgcggggcggccgggagggggcagtcctcgccggcgagttcagcgagaaggccatcagcatttgggagtcaaagaa

SEQ ID NO: 203768 - DNA, 84 bp, Homo sapiens
cccaggtgtaagcgcagaaagcaggcgaacccgcggcgcaataacgggtggcccagttgaaatccttcccttcctctaccttgg

SEQ ID NO: 203769 - DNA, 120 bp, Homo sapiens
cccagtgtaaccaccatcaaaaccattgaagaaaattcttttgggagccaaacccacggttaagagagaagagagtcagcaacagcaagttttactcatagaagctggggtatgtgtgta

SEQ ID NO: 203770 - DNA, 80 bp, Homo sapiens
gccgcaacctcagctacacctgccgggcaacaggtttgtctatgctggctctaactcgggcgtggtccaggccccgctgg

SEQ ID NO: 203771 - DNA, 94 bp, Homo sapiens
ctccactttcgccagcccgtgccgcgagcgcggcctgcaggagtgcgcgtcccgggacgactggcgctgtgcgcgctccatgcacgagttttcc

SEQ ID NO: 203772 - DNA, 83 bp, Homo sapiens
ggccgggaggagccgcagcgccgggcgaccccgcccgggcctcggaagctccaccatgaggcgaggtggatggaggaagcgag

SEQ ID NO: 203773 - DNA, 112 bp, Homo sapiens
ccgccatcttgtgggagcaaaaccaacgcctggctcggagcagcagcctctgaggtctggccgtgggcctgggcttcggggcactggcagaggtcgccaagaagagcctgcg

SEQ ID NO: 203774 - DNA, 80 bp, Homo sapiens
tcgcttcccaaaactgaaatggtatgtgacgcattcccagactcttcagccaactgagcatcagcttcttcacagcaatt

SEQ ID NO: 203775 - DNA, 99 bp, Homo sapiens
cttattttttctcatggatgttcttcttcgagtatttgtagaagggtgctggagaatctggtaaaagcaccattgtgaagcagatgaggatcctgcatg

SEQ ID NO: 203776 - DNA, 50 bp, Homo sapiens
gtccactcctggaattgttccagatgatgaagattatggaagagattcgg

SEQ ID NO: 203777 - DNA, 75 bp, Homo sapiens
cggaggagtgggccgacctcttccaggccgcgggcgccaagccccttcatggctgtgctctttgccaaactcgag

SEQ ID NO: 203778 - DNA, 82 bp, Homo sapiens
attatgcatcttgctgtatccaggccttattcttatagactatggacattttcagtatactatcccatgccacacaaaggca

SEQ ID NO: 203779 - DNA, 76 bp, Homo sapiens
tccggagacagcccaaatatcctcggaagagcgctcccaggagaaacaagtctctagaagaaactgtcagtgccag

SEQ ID NO: 203780 - DNA, 102 bp, Homo sapiens
tggagcctcagttggaagcagccgatccagcctgcggagcctgtggggcagtctatccttcactggagtctgatgatgatgaccctgctttgaaatctcgac

SEQ ID NO: 203781 - DNA, 100 bp, Homo sapiens
aagagctaccagaagctggtctctgaggtctggcataagaaacgggcggcgactggcggcgcgatggacctgaccgggctcctgctggacgaagaaggca

SEQ ID NO: 203782 - DNA, 90 bp, Homo sapiens
gaagcatgtctttcagagcccggcaccacccatcttgagtatctggcccttctgcgatgttttacctggctgcggctgtgtcagatttct

SEQ ID NO: 203783 - DNA, 74 bp, Homo sapiens
cgacttccaggatatagccctggaggtgattgaagcctccgatgttgtcctagaggtgttggatgccagagatc

SEQ ID NO: 203784 - DNA, 100 bp, Homo sapiens
gagatcatagcagagtacgatactcaggtcaaaggactacagcatgaaggaattttccgggtgtcaggatcccaggtggaagtgaatgacatcaaaaatg

SEQ ID NO: 203785 - DNA, 100 bp, Homo sapiens
agccgggtaccggccgtggaagcggccaccgactactgtcagcagctgtgccaggctttccttaaagtttcccatgtctcaatggactcctgaatataac

SEQ ID NO: 203786 - DNA, 76 bp, Homo sapiens
ttccccagacatttggatttccatgtaaagaatgaagcaaagtcaggtggacgaagtgatttgataccaactatca

SEQ ID NO: 203787 - DNA, 80 bp, Homo sapiens
tagctgggactacagacatgcgccagcacgcctggcgctaaagcagcaacagcagaagaagcagcagcagcaatgcaggc

SEQ ID NO: 203788 - DNA, 101 bp, Homo sapiens
cctacgcgggccccaaagctgtcgccttcatccacacggacctcccagagccaccgccctcgctgaccgtgcagagtacgcccgtttggtggagatcgtgg

SEQ ID NO: 203789 - DNA, 90 bp, Homo sapiens
tcctgtgccaggacagactgtcctccacatttagctgtgggagactggtcgaaggtcaaaatgcagatcttcgtgaaaacccttaccggc

SEQ ID NO: 203790 - DNA, 75 bp, Homo sapiens
agacttccggaaggactttggcgaggcagcccctgtcaaagggaacaggaagcagtccacggagggtgacgccct

SEQ ID NO: 203791 - DNA, 101 bp, Homo sapiens
ccggcctctcggcctctgccggagaaacagacttaattcagtgcacaaatgagatgaatgtgaacatcccacagttggcagacagtttatttgaaagaact

SEQ ID NO: 203792 - DNA, 50 bp, Homo sapiens
gaattttaagtcatcgttctaggatagattgcaaatgcacaagattcgag

SEQ ID NO: 203793 - DNA, 100 bp, Homo sapiens
gcctagaggtccgggcttggagttcgcctcagacgcggtggagccgccggagtctgagaagcagagcatcctggccagaacaagccaaggagccaagacg

SEQ ID NO: 203794 - DNA, 98 bp, Homo sapiens
gctccaaatcgtggggattctgtaagagcttgctacctgttgactgaggaggcccacgagttgagtccttatgtcgtcagaagatcgagaagctcagg

SEQ ID NO: 203795 - DNA, 83 bp, Homo sapiens
cgttgacaaggcactgctttttcatgacgaaactagatgatggccatttaaacaactctttgagctctccagttcaagcggac

SEQ ID NO: 203796 - DNA, 100 bp, Homo sapiens
gcctggctccgtgtccgacccctggaagctgatgctgctggacgccactttccggggtgcacagcaagtgaatatgagttggaagtaaagagggtgcaag

SEQ ID NO: 203797 - DNA, 98 bp, Homo sapiens
ggcaagctgtgcgacctcttctgcggccggcctgggcaggtgtcttcctcgagaggcaggcaggggatcccggacgcaaggggagagccagttgcgca

SEQ ID NO: 203798 - DNA, 100 bp, Homo sapiens
ttcaaactatactaaaacacctacagaatctttttgtaccaagaaacagcacttcttctcagtctcagacaagtactgcctccagaaaagccaattcaag

SEQ ID NO: 203799 - DNA, 75 bp, Homo sapiens
gatccagtacgagttgaatcattgttcaaataaggcgagtgttgtgtataaaggaagttgaaatcctgggcctta

SEQ ID NO: 203800 - DNA, 90 bp, Homo sapiens
ggcagaacatgctagtcatggagatcgagaggaaataatgaggaagttgccttaaagaatagacaagagctgtatgcactacctcctcct

SEQ ID NO: 203801 - DNA, 82 bp, Homo sapiens
aagaatttatacaaggatgtgatgttggagaactatagcagcctagtgtcactggatgtggaagatgtcaagtttgtgatca

SEQ ID NO: 203802 - DNA, 75 bp, Homo sapiens
gggggagcggcgttggaggccaccgtttccagtaagacctatacccaccggcgcctgaagttcctctcctccaag

SEQ ID NO: 203803 - DNA, 96 bp, Homo sapiens
agtgggtcgagcagctgaacgagtgtaagcagctgaacgagaaccaagtgcggacgctgtgcgagaagtctattgaagacaatgaagtatatttgc

SEQ ID NO: 203804 - DNA, 48 bp, Homo sapiens
gacggtttcgccggcagtctcgctggggtatggccgtcaatgtgtact

SEQ ID NO: 203805 - DNA, 83 bp, Homo sapiens
gagaaacaagaaaatggactccctggctgctggagagttgaatgccagccaccagccatggccctcccgcctcctgcccacaa

SEQ ID NO: 203806 - DNA, 100 bp, Homo sapiens
ggcggcggcgcttgggctctgttgttgaggcatcttcattaagctggagtaccaggataaaaggcttcattgcgtgttttgctataggaattctctgctc

SEQ ID NO: 203807 - DNA, 50 bp, Homo sapiens
gatgcttctcacagcttcaaagagaacactgcttggattctggaagaaaa

SEQ ID NO: 203808 - DNA, 75 bp, Homo sapiens
ggagaaagtcgtcttccacttgcacgaaagctttcctaggccaaaaagagggtgctttcttctgcgacctggtac

SEQ ID NO: 203809 - DNA, 82 bp, Homo sapiens
gtttcgccggcgcgggcgccatcccggaagcgcgagcaaggccgccagatgtgcaggttatgccaaggacgccctgaatctg

SEQ ID NO: 203810 - DNA, 90 bp, Homo sapiens
caagtcattcaaagtcagcatgatccacagactgcgattcacaaccgacgtacagctaggtctcagcatcagaggagcccaggaggagga

SEQ ID NO: 203811 - DNA, 83 bp, Homo sapiens
ccaagcttatgcaaagcatgaatgcaacctgattttcagattaaagggcctccccaaagccagtcctgtgtcaccaatcaaag

SEQ ID NO: 203812 - DNA, 101 bp, Homo sapiens
ctggccacttgcttgggatcctttatcctggtcatcttctatttccaaatcaccttcaggccattcagaggaggaaagagaggggaatatgaagtcagcca

SEQ ID NO: 203813 - DNA, 75 bp, Homo sapiens
gtcacggagcaggacaaggccatcctggtgtcccgacccaggctaagcttgagcatggctgagcaggagcccaca

SEQ ID NO: 203814 - DNA, 100 bp, Homo sapiens
atatgacaaagcccgaaagtgtctccaccaggtgctgcacctgtactgtgacacttgctctgtacccatctgtcgtgagtgcacaatgggccggcatggg

SEQ ID NO: 203815 - DNA, 75 bp, Homo sapiens
acaatgagccttcaaacatatttgagctatccaacttgataaagtcaatcttcaagtatattgtgcatggtctct

SEQ ID NO: 203816 - DNA, 98 bp, Homo sapiens
gtcttttgatgaaatcaacaaagcctttgaactgatgcattctggaaagagggttccagctgagccatcttccctcctgtcactatcagcaagtcaca

SEQ ID NO: 203817 - DNA, 100 bp, Homo sapiens
gtctctctgctgcggcgcggggaccgctgtgctctcgtcctcatcaccgggggcatcgtggccacagctgggcgcttcacccagtggtactttggtgcct

SEQ ID NO: 203818 - DNA, 100 bp, Homo sapiens
tgtgcatcctacaacaacaagccattcatgggccggttttatgagtgggaaccatttgcagaagcaatggcagattgtccttctagcatacagctgcttt

SEQ ID NO: 203819 - DNA, 95 bp, Homo sapiens
gttgggagagacggagcggacctcagcgctgaagcagaagtccccggagctgcggtctccccgccgcggctggcaggaaaaatactattgtatta

SEQ ID NO: 203820 - DNA, 75 bp, Homo sapiens
ctcctcggcgtgagcgacagcggcaaaggtctcactgtgttgtctaggctgagtgcattggcactatcatggctc

SEQ ID NO: 203821 - DNA, 74 bp, Homo sapiens
caggagtcatcggacgccagaatctggttgtgaccgagattcccgacgagagagactgaggggaagagaggaag

SEQ ID NO: 203822 - DNA, 100 bp, Homo sapiens
ggctgctgtcgccgctgctgggagatgggcctactcgcccgccaccctgcgctgccgccgctctgaggagttaaagcaaacaggactttgagtctacaga

SEQ ID NO: 203823 - DNA, 97 bp, Homo sapiens
ggccactggcggccgaggtagaggcagtggcgcttgagttggtcgggggcagcggcagacatggaaggtctttaatgtaactttaaatggttcacca

SEQ ID NO: 203824 - DNA, 99 bp, Homo sapiens
ctttgacctttttgaagcctttgcaaaaggaggaaataatgctggccatacagttgttgtggattctgtggaatatgattttcatctcttacccagtgg

SEQ ID NO: 203825 - DNA, 145 bp, Homo sapiens
ttggaattagattgctgttcctccttagaccacccgacagaccagaaactcatcccagagttcattaagaagctgtgagtaccagagtgcccactggttccaacagttcttctcagaccacagagtgtcttacacctgaatcctg

SEQ ID NO: 203826 - DNA, 90 bp, Homo sapiens
aaatacttaagagaagaagttaaaacatttcagggcaagccaattatggggatggagaagtttatgtttgggatgtgaactcaaggaagt

SEQ ID NO: 203827 - DNA, 75 bp, Homo sapiens
cgccaccacccactccggacacagtggaatgcagtagccctctgggcctgggatattgtggttgataactgtgcc

SEQ ID NO: 203828 - DNA, 89 bp, Homo sapiens
tgtgctttactctgaagactccctaccgtatgtgaacgggagctgtgtgtgtttgcttttcaaaccctgggagtaatgaatgaagctgc

SEQ ID NO: 203829 - DNA, 75 bp, Homo sapiens
tggaagtgatacctccctgcaagttcaggtggttctcttcccaaagtggaagccaaattcatcaattatgtgaag

SEQ ID NO: 203830 - DNA, 75 bp, Homo sapiens
ccttctcatggcaatcgagttgagtacttggatagacttatacctcagaacgaaaagggtcttggtcagagagga

SEQ ID NO: 203831 - DNA, 98 bp, Homo sapiens
tgtcccacaggaagctacgttgactatttctcctcgtccctttatcaaaggacagaataacgggctcccagattcacaagccccaccaagaggatcac

SEQ ID NO: 203832 - DNA, 82 bp, Homo sapiens
cgaagagttggatactcagcgtcgctggcagccgctgtacttgatcaggatcctcatgaccagccaaagagaagaagaatta

SEQ ID NO: 203833 - DNA, 96 bp, Homo sapiens
tttaagcactgctgcactttatgagatttctgcgccaggagatgaggggcggtagagccctggaatggagatgtccttgacgcctgggcagaggct

SEQ ID NO: 203834 - DNA, 75 bp, Homo sapiens
ggagctgaggaaccggaccccggcagctgtctggcggcttctctgttgacaactcagctggttccacaccctggc

SEQ ID NO: 203835 - DNA, 75 bp, Homo sapiens
gtcatcaagttgcaagagattccaaccttccagccccttttgaaagggtttttggagtctctggatgatttttac

SEQ ID NO: 203836 - DNA, 83 bp, Homo sapiens
ctgccgctcccgggcggccgcgggcgggtgagaagccctaccactgcaactgggacggctgcggctggaagtttgcgcgctca

SEQ ID NO: 203837 - DNA, 100 bp, Homo sapiens
actttttgcttcaccgacatagtcattatgccgaagagaaagggagtctccggtggactgcagcgttagcaaatgcagcaagctggtgggcggaggcgag

SEQ ID NO: 203838 - DNA, 99 bp, Homo sapiens
agctcatcttaggctgtgctgtgaactgtgaacagaagcaagttacggacgagtttatgctgccgacccctaccaccacgcacttgctccagcccccac

SEQ ID NO: 203839 - DNA, 100 bp, Homo sapiens
gtccgtttcctgaggcctccccagccatgcttcctgtacggcctgcagaactctctctgatgtaaaggatggagtaaatcaagcagcacctgcatttgga

SEQ ID NO: 203840 - DNA, 79 bp, Homo sapiens
gaggcacagcgtttcttgcaagaatgggaggtggctttaaccaagagagcagatccagctgagcttagaacaatatttt

SEQ ID NO: 203841 - DNA, 75 bp, Homo sapiens
tgatgtgcttcttggttcctcggagtactcaacacagattgacatgtgctcctgaaattcttagttatgatccta

SEQ ID NO: 203842 - DNA, 75 bp, Homo sapiens
cagacaactaagcgaggggatcctcatgagttaagaaacatatttctacagtggacgtgatgctgaatccaggca

SEQ ID NO: 203843 - DNA, 82 bp, Homo sapiens
tccagctgccccctgtgtggcaaacctttcttgagctcaggtgagaagccctaccactgcaactgggacggctgcggctgga

SEQ ID NO: 203844 - DNA, 100 bp, Homo sapiens
tgccctttagtcccaggactaaccggaagcttctgcaacaggaggacattgaaaataagatggaacccatccacataagcattttgaaagcgaagcagaa

SEQ ID NO: 203845 - DNA, 100 bp, Homo sapiens
cgggtggcagcgatccgcgggctggcgacgtagaggaggacgcctcacagctcatctttcctaaagatgatggtggtgctaccccagtacaggatgaacg

SEQ ID NO: 203846 - DNA, 100 bp, Homo sapiens
ccaacatccccgctcaccaggagccccttgccaggagtgttcaagatgctctctctggaccgatcccactgcgtcgacattccagatggctatcctgctt

SEQ ID NO: 203847 - DNA, 97 bp, Homo sapiens
tgataactgactctgatctcaacattttggctgaaatagcagaccccacgttagctgaaatgggaaaaaacttgaaggaggcagtgaagatgctgga

SEQ ID NO: 203848 - DNA, 76 bp, Homo sapiens
ccgattcctcctccttggtcgccgcgtccttggctggcgtgtggccaccttccactgtggaagctcatggactcca

SEQ ID NO: 203849 - DNA, 51 bp, Homo sapiens
tgatacaaagtcagatactgcaacagtatccatatattcctgcacatatta

SEQ ID NO: 203850 - DNA, 82 bp, Homo sapiens
gtttgtggatcgctgtgatcgtcacttggccctggccaacgtcaacattgggagcctcatctgcaatgtaggggccggtgga

SEQ ID NO: 203851 - DNA, 116 bp, Homo sapiens
gcttgcttgcctgtgcgcgcgtgcgcggacatggcctcaaacggtgatgtgtccaatctagatcccaacttctcatttgaaggcaccaaactggatgtggggaacattgtgctggc

SEQ ID NO: 203852 - DNA, 98 bp, Homo sapiens
caccagggcggcggcaggaagaggagcgggagcaggagcgcggagcggagcgtcccgacccgccgtctcagccaatttcttctccagtcatcctccag

SEQ ID NO: 203853 - DNA, 98 bp, Homo sapiens
ctggagaggagccccgagaagatctcagcaactgtggtggagattgctggctactccatgtctgaggtatatctatgttgctgacatattggctcatg

SEQ ID NO: 203854 - DNA, 82 bp, Homo sapiens
gcagggatgcctggaatagaagagaatgacctagcaaaagttgatgatcttccccctggtgtctgacttccagcaactgctg

SEQ ID NO: 203855 - DNA, 100 bp, Homo sapiens
tcatagtcaactgcgtggaagagaagaaactcattttaaccagcagtgccagtgtcatctttgagggcgtcgatatcaagaatggaactgaagaccttcc

SEQ ID NO: 203856 - DNA, 100 bp, Homo sapiens
cggcacgatggtcatggcgtatttcgtcgagaatttttggatctttaaatggatgagatggctaccactcagatttccaaagatgagcttgatgaactca

SEQ ID NO: 203857 - DNA, 90 bp, Homo sapiens
ggcaaatccagacagaacctttgacttggtgttgaaagtgaaatgtcatgcctctgaaaatgaagaggttggagcaatcactgaagaaac

SEQ ID NO: 203858 - DNA, 82 bp, Homo sapiens
aaacttcaaagagccggatcgcaggctccctgcctactcccccaccggggatttcagccctcccaggcccaatacttcaaag

SEQ ID NO: 203859 - DNA, 100 bp, Homo sapiens
cgccggggggctatgggcccatcgactacaaacggaacttgccgcgtcgaggactgtcgggtatgatctcgtgaaatcttgagagaaactgaatgacgaa

SEQ ID NO: 203860 - DNA, 82 bp, Homo sapiens
agaagctccagatggcgtcttccgtgggcaacgtggccgacagcacaggctctacagattctcccctgcccctggagaagga

SEQ ID NO: 203861 - DNA, 101 bp, Homo sapiens
tcccgcggcgagcgagctcctgagggtttggaaatcccttgtctccaggttgctgggattgacttcttgctcaattgaaacactcattcaatggagacaaa

SEQ ID NO: 203862 - DNA, 75 bp, Homo sapiens
ggcaaatattacacttctctccttatcactgtgtccactactatgatcttcgtaacactaaacagccaatcatgg

SEQ ID NO: 203863 - DNA, 111 bp, Homo sapiens
aggtgtttcacaagtagcaaatgagatgaaccatcttcctgcacacagccaaagtctgcaaagaacccctgaacagtgcccaagtgttgtctctttgttgtcagagagtta

SEQ ID NO: 203864 - DNA, 100 bp, Homo sapiens
gaaaagttgtggcaatagaaacgaaacgccctcagaccctgtaatcattgacaggtggctccgctgccggatgggagtgccccagtgtgctggatgaagc

SEQ ID NO: 203865 - DNA, 50 bp, Homo sapiens
ctgaatcctggctgtgtgaccccaattttgcgtttggctccctaatatct

SEQ ID NO: 203866 - DNA, 82 bp, Homo sapiens
tttccagagagccagaaagaaatacagatcacttggattcagtcgagtttgctttgctccgtgggaactgcaccagagctgg

SEQ ID NO: 203867 - DNA, 100 bp, Homo sapiens
acagcaagaatatgacgctggtagcagaagtcagagcacagctgagggacatctgcttaaaggtgtgatccctcacatccacaaatctctgattggaaag

SEQ ID NO: 203868 - DNA, 100 bp, Homo sapiens
agcgcaagcacaccctaccgaattacaagatcagaaaataatgttgagtttccatgaagaacaggaagtactgccagaaactttccttgctaatttccct

SEQ ID NO: 203869 - DNA, 82 bp, Homo sapiens
ccagggtttccaggaggaagaggagctcttggcccaggaggccccctaccaaatgatttctcagtatcactaaaagcacaag

SEQ ID NO: 203870 - DNA, 80 bp, Homo sapiens
gatacatggcttgcaaaaagtaaaccacgatcgttatgctgaggtgatcagcccatgacctaaacctccagacaaaataa

SEQ ID NO: 203871 - DNA, 146 bp, Homo sapiens
gacagcctggattataaggatgtcatccccatggctgatgcagcaggcatcatccgctatgcaattgggaatgaagaagcagtacgacgtctcatctgggaaaagaatctaaagtttgtgatgcttcacaacctggagcattcaat

SEQ ID NO: 203872 - DNA, 75 bp, Homo sapiens
ctggaaggaaccgctctcgcttcgtcctacacttgcgcaaatgtctccggtcaccatcagaaaagctaagtttgc

SEQ ID NO: 203873 - DNA, 75 bp, Homo sapiens
cgccatcgttgctgccttcttcgtcaagattactgatctctcattacccaactatctgatggcatcttcggttgg

SEQ ID NO: 203874 - DNA, 82 bp, Homo sapiens
caataatgaaatgctgactaaggaacaagaatcagcatgattcttcagaggctcttcaggttctcctctgtcattcggtcag

SEQ ID NO: 203875 - DNA, 135 bp, Homo sapiens
tcggggtcttccccagttttctcagccaggcggcggcggcgactggcaatgtttggcctcaaaagaaacgcgcttcggaaccaaaaagaagcttcccagagccggggccaggagccccaagcgccctctagcagc

SEQ ID NO: 203876 - DNA, 82 bp, Homo sapiens
ccgcagccttgggcctcgcgccggctatggccgtgccctggggctgagccctcaggaccaagaatcgccttcagccctgtct

SEQ ID NO: 203877 - DNA, 74 bp, Homo sapiens
tgggctggggcgactgtgtctggctgccttatctttacacgctgcaggtcattcaagacacagatatgcactta

SEQ ID NO: 203878 - DNA, 75 bp, Homo sapiens
cgcaagttaggcgggattatttgaaaggagaaaatgctgagaagcttctgcagttcaagcgttggttctggtcaa

SEQ ID NO: 203879 - DNA, 76 bp, Homo sapiens
tgatggtggcctcccacaatgaggacacagtgcgctttgcactgcgcagtatggaatgctcctttaccagaattac

SEQ ID NO: 203880 - DNA, 128 bp, Homo sapiens
gtgcttttgaaccactggaaagtgaggaattttgaagtacaccgtggtgacattgtatcattggtccaacaaatggaattttcttgagcatgtttctaatcgttttgccattggaatccatggctcat

SEQ ID NO: 203881 - DNA, 101 bp, Homo sapiens
aataacacaacaagtttagggagtccatggccagaaaacttttgggatggagtccgcctgcgtgaccatccatgaggctctgaaaacggtgattgactccc

SEQ ID NO: 203882 - DNA, 99 bp, Homo sapiens
tggagcatgtcgtcatggagacaggtgctctcggttgcacaataaaccgacgtttagccagaaccagacgtcctgggtcctctccagcatggcagccct

SEQ ID NO: 203883 - DNA, 100 bp, Homo sapiens
tgcatctctgcaaactcaacttgctgggccggtgcaactattcgcagtccgagcggggctatcaacagcaggacgcccatgaattcatgcgctacctttt

SEQ ID NO: 203884 - DNA, 98 bp, Homo sapiens
ggagagactgacctcatgctggcggctctgcgtacgctggttggcatttgctctgagcatcagtcacggggcaattgaaggaacagactaaaaatcgt

SEQ ID NO: 203885 - DNA, 90 bp, Homo sapiens
gtacctctgccagcaggttgggagatggcaaagacatcttctggtcagagatacttcttaaaatttggagcaagaggtggtggtggcctt

SEQ ID NO: 203886 - DNA, 83 bp, Homo sapiens
aaaaattccgccgaaaaagagaagacgctttacccgactctttgggccgttatctcacgccctgggctgcatcttgtacctgc

SEQ ID NO: 203887 - DNA, 90 bp, Homo sapiens
cgtctgccttcgcttcacggcgccgagccgcggtccgagtgaaagaacttgtcctggacaacagtcggtcgaatgaaggcaaactcgaag

SEQ ID NO: 203888 - DNA, 80 bp, Homo sapiens
ggcggccgctcccttccccgcgcagccccgcacggcccgggcccacgatggccgtataagaaaataaacaacttgctaaa

SEQ ID NO: 203889 - DNA, 75 bp, Homo sapiens
cactggattgggaaagaccatggcagatgtcagtattgaatatggtggtgaggcgtgaccctggcaacactgaac

SEQ ID NO: 203890 - DNA, 100 bp, Homo sapiens
ctttcattttgtttggaagatggaccaaagcgatacagtatcatgaactgatcactaaatatgggaagttggagcctttggcagaagtggacctaagacc

SEQ ID NO: 203891 - DNA, 100 bp, Homo sapiens
tgctcgataaatcagacagaacagttaatcctcaatttaagcctgatctaacccctagaaacaggagctgccactccgaaaccagtcccagaacccgaga

SEQ ID NO: 203892 - DNA, 100 bp, Homo sapiens
aaggttccgttacagttactatgatgaatcccagggggagatttatagatccattgaacatctagataaaatggcagatggctcggtgagctgcaagagg

SEQ ID NO: 203893 - DNA, 100 bp, Homo sapiens
gttttcaaggcttaatcgaagagatgaaagatcaactgaaatcggcaaacttctgagttcctacttgcaaaagaaaagtgacgtggaggatcactcggtg

SEQ ID NO: 203894 - DNA, 107 bp, Homo sapiens
aaagaacaagagaagacctcagatgtgaagtccattaaagggcagagcggcttgggtaaatccaccttaatcaacaccctcttcaaatccaaaatcagccggaagtc

SEQ ID NO: 203895 - DNA, 76 bp, Homo sapiens
ggagcctgtggtgaccaccgaaggcagttcgggtgcagcagggaatgttcgcatcttaccacatacagttctttac

SEQ ID NO: 203896 - DNA, 98 bp, Homo sapiens
ctcaccgacgccgacatggtcatgagcttcgtcaacctcggtgttgagccagtgcaggttcaggaaactgtggaaaatcacttgaagagtttgctgat

SEQ ID NO: 203897 - DNA, 51 bp, Homo sapiens
attccaagtaactcttatttggtcaagctgggaactgcctgacttgaggga

SEQ ID NO: 203898 - DNA, 132 bp, Homo sapiens
atctcagaaggcaatgagaccgtggaagacattgctgcccgcctcaacatcccagtcagccaggtgaaccccaggggcataaggaaatggtggcaggcacttcctcctaacaagaaggaagtagttaaagaa

SEQ ID NO: 203899 - DNA, 100 bp, Homo sapiens
aattaggcaaagtgggttttctaaactaccgtctcttcctcaccggatgggacagcaatattacatttctcttgggaagttgtgcatctgacaggaatat

SEQ ID NO: 203900 - DNA, 74 bp, Homo sapiens
ttacaatagcaacttctgttgataagttggcgactgcatttgcctccagacttgtcagacacagtgagccgctc

SEQ ID NO: 203901 - DNA, 100 bp, Homo sapiens
ttcattgcaaggctttgttatagtcatggtccactgcattcttcggagagaggctattttggcattctgctggatatatgttcgtaaataccaaagtcgg

SEQ ID NO: 203902 - DNA, 100 bp, Homo sapiens
ggaacgggaggagcgtctgagcaggagccccctacagaagctaagcagcatggacccggccatgctggagcgcctcctcagcttggaccgtctgcttgcc

SEQ ID NO: 203903 - DNA, 75 bp, Homo sapiens
gatgccattccagcactggactcatggaggctgagcatttattcagatgagattgtggggaacctgggtgaaggc

SEQ ID NO: 203904 - DNA, 101 bp, Homo sapiens
atgacgaagacatgacacttacaagatggacagggatgataattgggcctccaagagacatccataaaaattcatcagagagcattttactactgagctgc

SEQ ID NO: 203905 - DNA, 75 bp, Homo sapiens
actcagccactggttgccttggtaggcaataaaaatcaaagacacagctctccccttctatcaagcgcaagagag

SEQ ID NO: 203906 - DNA, 51 bp, Homo sapiens
aaggattccaagtaactcttatttgggctctccggccacccggctggctcc

SEQ ID NO: 203907 - DNA, 75 bp, Homo sapiens
gttaaggattccaagtaactcttatttggttttgacaaacttgtgttaataattccctgggtcgttatgcaagag

SEQ ID NO: 203908 - DNA, 100 bp, Homo sapiens
tttgggagatccaagagattcagtatcactcgctcccttgatgatcttgaggttttgcaaaaggcatcaaattaaatcaagttcaaatattccctgtgtc

SEQ ID NO: 203909 - DNA, 94 bp, Homo sapiens
ctgagtggttgtgtggtcgcgtctcggaaaccggtagcgcttgcagcatggttgtggcagcactgcctgaaggtatgagaccagattctaatct

SEQ ID NO: 203910 - DNA, 100 bp, Homo sapiens
gacaccatccagctggctttcaaggatctcgaggacctggaagaagcagaggagccagacatggaggaagacgatgatcagaaagctgtgaaagatgaac

SEQ ID NO: 203911 - DNA, 87 bp, Homo sapiens
accgcaactgaaagtcacgattaggactgacaataagagctggaagtcgagtgtgctactcaactcaggagatttggagacaaactg

SEQ ID NO: 203912 - DNA, 83 bp, Homo sapiens
ccacaacctttaagcagcagaggagcacgaggatcgtgggagctaagaagtttttagaacttcagccataaaaatgggcagaa

SEQ ID NO: 203913 - DNA, 100 bp, Homo sapiens
ttcgactctacctttgggagaccattgtattcttcaggtgctggagaatctggtaaaagcaccattgtgaagcagatgaggatcctgcatgttaatgggt

SEQ ID NO: 203914 - DNA, 74 bp, Homo sapiens
cagttagttacttcctgtctagagttgtagcttccacctgaaggacagaataacgggctcccagattcacaagc

SEQ ID NO: 203915 - DNA, 82 bp, Homo sapiens
gcggatctcaccgccgctcaggacacatgcctcactcctgtcagcagttccaccttttcatggttgaggagcacatgtggtc

SEQ ID NO: 203916 - DNA, 97 bp, Homo sapiens
gtccgtggcttcggaggcaagtttggtgtccagatggacagagttgatcagggcttgtcaatgaggcagatcagattcaggttcgacgggcagccaa

SEQ ID NO: 203917 - DNA, 90 bp, Homo sapiens
gcaggatttggtttcagcatgtccttctctgaatgatgaatacttttactactgtgacaacattaacgaaataaactatcaatcttgccc

SEQ ID NO: 203918 - DNA, 51 bp, Homo sapiens
cacagatcggaacggaggcctgtggggcagtctgcagcaaaacgacaagga

SEQ ID NO: 203919 - DNA, 90 bp, Homo sapiens
gctgccttcttggacgcctttcagaaagtggctgacatggccaccaacacacgtgaaggacagaataacgggctcccagattcacaagcc

SEQ ID NO: 203920 - DNA, 73 bp, Homo sapiens
tggtcagtgaacctatcgaaggacatgaagactaccacatgatgaactggaagaagttcgggaactcagagtt

SEQ ID NO: 203921 - DNA, 74 bp, Homo sapiens
cagctgcagcagccgcaccagcgccgggacgggggtggccgtgcagactgcttctcggaggagtgccgctctgt

SEQ ID NO: 203922 - DNA, 75 bp, Homo sapiens
gttctccattgtgatgaaagcacatggtacagcgtcatcacgtagacataaccaagaaacttcacccaaatcaag

SEQ ID NO: 203923 - DNA, 83 bp, Homo sapiens
ctgggagcatcttagcagccagctccggacaccattcgcttttcacccaagatgatttgatgtcttataaaactctgatgaac

SEQ ID NO: 203924 - DNA, 100 bp, Homo sapiens
ctaaaacccagtgcgtacgcattgctacaaaaggatggctggctgtggtgaaattgatcattcaataaacatgcttcctacaaacaggaaagcgaacgag

SEQ ID NO: 203925 - DNA, 100 bp, Homo sapiens
ctgcctcctgggttcaagctattcttctgcctcagcctcccaaaagaagagccgtaacgagacatatggcgaaggcagcggcgtggagatcctggagaac

SEQ ID NO: 203926 - DNA, 100 bp, Homo sapiens
agacgggctcagggaagacatacaccatgggggaggccagtgtgggaagcagaacatcagagagccatgcagagacgtgctatccgtgatgccaaaacac

SEQ ID NO: 203927 - DNA, 50 bp, Homo sapiens
cgagaggagctgagcgagcgcggaaggtaaaacttccttttcctgtagat

SEQ ID NO: 203928 - DNA, 82 bp, Homo sapiens
tgaagtaatgcaatggtctcaatctctggaaaaacttcttgccaaccaaattgttgacctcctgtactggagagacattaag

SEQ ID NO: 203929 - DNA, 95 bp, Homo sapiens
aggacttcgagcagcctctcgccatttcccggaactcccccactggaaaggattctgaaagaaatgaagtcagccctcagaaatgaagttgactg

SEQ ID NO: 203930 - DNA, 100 bp, Homo sapiens
ccaccaccaccagcgcccgggcgggcctcgcgcgcctcgggcgcggctccgcagtgagcccaccaagaaggaagcgtccaaaccaggttgcagagaaggt

SEQ ID NO: 203931 - DNA, 90 bp, Homo sapiens
gagaagcttggattttcacctggcccaatactacattaccgagtatatgcggcaggcgggatgggcctggacctacgtccacacaaccac

SEQ ID NO: 203932 - DNA, 96 bp, Homo sapiens
tcacgaagaaatccagaggatgtccaggagactgtgggctgtttagtgccatgcaccctttacagtgtgtcctccaagtgcagaggtctctggggt

SEQ ID NO: 203933 - DNA, 98 bp, Homo sapiens
ggaaaagccatcgtgaaggagctcctggagctgggctgtttttcttcaaataaagaacatggtgaaactgattcacacattagctgatcatggtgacg

SEQ ID NO: 203934 - DNA, 73 bp, Homo sapiens
taagactgaacaggatattcagagaagttctcggaatagaagatgaactcaactgaattcaccgaagatgtag

SEQ ID NO: 203935 - DNA, 98 bp, Homo sapiens
ttgaggctgcggtcatggagggagcaggagctggatccggcttccggaagacagatgtcatcaatgcttcttggtgggtcatgagcaacaagactcgg

SEQ ID NO: 203936 - DNA, 82 bp, Homo sapiens
atagatgccagtcataatagatttcgagacaacagtggccttctgatgaatactttaaaagctgcacacatacatgtaagag

SEQ ID NO: 203937 - DNA, 100 bp, Homo sapiens
aaaaggtggagaaagagtacggcgtccgaatcatgatcctggatgaagtggagaagagacatcagatctccatggctgtcatctacccgttcatgcaggg

SEQ ID NO: 203938 - DNA, 90 bp, Homo sapiens
gccctgcagtacctgcagaaggtctctggagacatcttcagcagcgaaggcagcaacctcacccccgcccaccacttccaggacttccgc

SEQ ID NO: 203939 - DNA, 74 bp, Homo sapiens
tgagaatttttacattaaagcctgtgaggacaaccccagcaatgtggagaagcctggggcttgccctggctctc

SEQ ID NO: 203940 - DNA, 97 bp, Homo sapiens
agccatattgaaagaagctgagagagagtctgcgctcctcagaccaccggcaggtgaacagcctgatgcagaccgaggagtgcccacctatgctaga

SEQ ID NO: 203941 - DNA, 100 bp, Homo sapiens
agtgaggaagggaaagcagcaatttcacaactcagggcaattgttctcttaactgaattaattagggaaaacttcaggaacagcaaattaaaacagtgcc

SEQ ID NO: 203942 - DNA, 75 bp, Homo sapiens
cactccctttcctctgctgccgctcggtcacgcttgtactatactggcaattgctggagaagattttgcaattgt

SEQ ID NO: 203943 - DNA, 75 bp, Homo sapiens
gtcatccgctcagtgatactgaaactgcttttgaagtacagcaaaccagtccagctacgggggcccagccagcca

SEQ ID NO: 203944 - DNA, 75 bp, Homo sapiens
cgaaactgaggtctcatggagaagccccggagtattgagtgtatccaaagtgtgtacatcagtaagatcataagc

SEQ ID NO: 203945 - DNA, 95 bp, Homo sapiens
gcgtttcccgcaacccgataccatcggacaggatttctccgcctcagcccaacggggagggtaagcaggaagagaacgacgtggtggagaagctg

SEQ ID NO: 203946 - DNA, 75 bp, Homo sapiens
tttgaagctggcagtctggttccagatgcctgaggaagtgcaccatggagaggaggaggtggagacttttgcctt

SEQ ID NO: 203947 - DNA, 100 bp, Homo sapiens
gtccgtgccgcggcggccgcgcagggagctctcgaggcaacgccggggcgcccgaggtctggaaggcgcaggaagatgagaatgtgcctactgctcctga

SEQ ID NO: 203948 - DNA, 75 bp, Homo sapiens
ccggagcttctcagaagacagagggttttcttttgagccaaatttgtatcctactgtggggcttcaaacaccagg

SEQ ID NO: 203949 - DNA, 90 bp, Homo sapiens
agcaggtggaattatgccctgttggttccaatgctgggattggctgcttttcgtgaagctcgtgtgtggagtgccacggtacaatcagac

SEQ ID NO: 203950 - DNA, 98 bp, Homo sapiens
cttggtgcacctgtggccgccatgtttgagcgagagagcgcgccagccttggaaggaatccacggcattccagtgtgtcctcaagtggctggacggac

SEQ ID NO: 203951 - DNA, 100 bp, Homo sapiens
cacttggagaagaagggaccccaggtcctcgatgatcttgaagtaatggctccagtctctgacctggggtcccttcttctccaagtgctcccggattttg

SEQ ID NO: 203952 - DNA, 100 bp, Homo sapiens
agggaaggcagcatggcacgctgcatggagccaaaatcgggtctgaggaattgaatgatctggcacgggaccctccagcacagtgttcagcaggtcctgt

SEQ ID NO: 203953 - DNA, 82 bp, Homo sapiens
ttgttgcgggcaccgcagtcgccgtgaagatggcgtctaccagccgggttacacatcattttggaatgactgtatatcatct

SEQ ID NO: 203954 - DNA, 75 bp, Homo sapiens
ctccgagccagcgagccagcgagccgccgacccgccgagcaaaatgcgtgagtgcatctccatccacgttggcca

SEQ ID NO: 203955 - DNA, 83 bp, Homo sapiens
ctcagccacgaagtacagccggaggttgacatcatggacatatgtgagtccatcctggagaggaagcggcatgacagcgaaag

SEQ ID NO: 203956 - DNA, 100 bp, Homo sapiens
ttgtccacgaggacttccaggtcacggaggaggtgaaactgaccacagtggccgagaagtcgcgcgtgctgcagctggaggaggagctcaccctgcgccg

SEQ ID NO: 203957 - DNA, 50 bp, Homo sapiens
aagaaggttgggttcagaagaggggattgatctgaagttaaacaaaaaac

SEQ ID NO: 203958 - DNA, 82 bp, Homo sapiens
gggtaacgggtcccggctgtggaagctcccgcggcgccgcgatggacctcgaggaggcggtcagcccaaggccaaccccact

SEQ ID NO: 203959 - DNA, 126 bp, Homo sapiens
cgacctgcagggagcagaggggacagaggcaccaaggacctccaagacaggttctgcacttttaaaagaaaagcaaaggcatcgattacataagttcttgtgtctcagagttggaaaaccaatgag

SEQ ID NO: 203960 - DNA, 97 bp, Homo sapiens
agctatgtactctagcactgacacgtttacccacttgaaacagtgaagaagaagctaaatttggtgccagacgcttagcccgtagtctgcagaaact

SEQ ID NO: 203961 - DNA, 82 bp, Homo sapiens
tattcaggattatgaagtttttcgatgcgaaggccataaagaatgctgatgggagaaccattttcctaattttcaaattgtt

SEQ ID NO: 203962 - DNA, 76 bp, Homo sapiens
ggtcctttatatagaagggagagtagcaacacgctagaagggtttatgaaattcttcgactactggtaactgacat

SEQ ID NO: 203963 - DNA, 100 bp, Homo sapiens
gggaggaagaggacaaggaggaagaggacgtggaggaggcttcaaaggtgcgggagtatgagttaagaaaaaacaacttctcagatactggaaactttgg

SEQ ID NO: 203964 - DNA, 100 bp, Homo sapiens
cttccataagcagcagccactgttcgtctctggaggagatgactataagattaagacagagaaacggaggcacagagaaggaagcggcagttaaagctgc

SEQ ID NO: 203965 - DNA, 75 bp, Homo sapiens
gtctccttcgacttggagtctttgtccaggacgttttcggctttgtgagaaaccttaccatcaaacacgatggcc

SEQ ID NO: 203966 - DNA, 100 bp, Homo sapiens
ggccagtgcgggtggctggctttgccattagcgggggcctttcctgaggacggcgtacggagtgtgggaatgaatctgaagtctgctgcagtaaaacaca

SEQ ID NO: 203967 - DNA, 96 bp, Homo sapiens
cagagtgtgaagtcaaatgcatgccaacattccagttttttaagaagggacaaaagcttgctgatgaccgtatggcactggtgtcaggcatcagct

SEQ ID NO: 203968 - DNA, 75 bp, Homo sapiens
aaattcgcctccatctgtaccatggtaagaagtttgatagctgtaggactgggtgttgcagctcttgcatttgca

SEQ ID NO: 203969 - DNA, 50 bp, Homo sapiens
tggaagatggcgcctgttgtgacaggatgggtgagtcaagtgaagacata

SEQ ID NO: 203970 - DNA, 100 bp, Homo sapiens
actgtcgggtcggcgagccacgggggccgccgcagcaccatggcgaccaccgtcagcactcagcgcgggccggtctcctctgagcctccggcctccataa

SEQ ID NO: 203971 - DNA, 100 bp, Homo sapiens
ctctcgttctgcgacttataaaggaccagacaaatcaaattagtggttttgaacctgcacttgttgccaagtcttccatcttactagatgtgaaaccttg

SEQ ID NO: 203972 - DNA, 98 bp, Homo sapiens
gagaatgacaagagcttccgcggtgtcattctgacctcggctttggaggagaagatacggaccacggagacacaggtgcttgtggcatctgcacagaa

SEQ ID NO: 203973 - DNA, 97 bp, Homo sapiens
gagggaacaaacacttctggatgcatccaccctgtattcagtggatcagctggcaccacccaaatagataaattggcccatctggtcttgtggcccc

SEQ ID NO: 203974 - DNA, 75 bp, Homo sapiens
gttatgacaaaacaccagacttcattttacaagtaccagttggtttagatcctgataagcatcttgggaaaaccc

SEQ ID NO: 203975 - DNA, 74 bp, Homo sapiens
ccagactgttatgtctttcagaatacggaggatggtttgtttatcagcagagaaatgaagttcacaataactgt

SEQ ID NO: 203976 - DNA, 82 bp, Homo sapiens
acaaccagctggaaggcagattcaagcagctgcaagatatggaggtaccacatggttctcagagcagcgaaagttttcagtt

SEQ ID NO: 203977 - DNA, 75 bp, Homo sapiens
ctcgccagcagccgtccggagccagccaacgagcggtaaagtcagtgataaatcttttgtttgctgcatatactg

SEQ ID NO: 203978 - DNA, 51 bp, Homo sapiens
cgcagtggtcgcttcttctccttggtgaatggatatgttgactgccacacc

SEQ ID NO: 203979 - DNA, 74 bp, Homo sapiens
tgcgacagaaggaagtagacttctgcatctcactgcttcgggaacggggaactgctcgcagaaagaagaaggtg

SEQ ID NO: 203980 - DNA, 82 bp, Homo sapiens
ccggcagctccaaccatgggaggccgcgtctttctcggtgtgatattcctgccatgtataataatctggatgtttcccaaga

SEQ ID NO: 203981 - DNA, 100 bp, Homo sapiens
aatttttggactgtgctctcaaactttactttgcctcatttgaggagtgggaacaggcttcggcgaacacaaaggcatttaaacttccctcttagaactg

SEQ ID NO: 203982 - DNA, 82 bp, Homo sapiens
ggcaggagattatagctctgtatgagaaggacaacacctacttagagcccacaggcggttttgtgagctgcttccccaggag

SEQ ID NO: 203983 - DNA, 90 bp, Homo sapiens
cccagggcccgcccaggacccccaagccgccgcggacgcagggtcggcactcttcaccctcccgagccctgcccgtctcggccccatgcc

SEQ ID NO: 203984 - DNA, 82 bp, Homo sapiens
cagaccctggagcctcagttggaagcagccgatccagcctgcggagcctgtggggcaggccccagttgtgacagcgttgagg

SEQ ID NO: 203985 - DNA, 82 bp, Homo sapiens
tggagtgagggttctggttcccgccggcgaggcttgcagatgggtcaagggttgtggagagtggtcagaaaccagcagctgc

SEQ ID NO: 203986 - DNA, 51 bp, Homo sapiens
cttgatcctcctcctaattgcagatggagttcgctcttgttgcccaggctg

SEQ ID NO: 203987 - DNA, 75 bp, Homo sapiens
cccagtcggtgctccggggaggtcacctgacgaggaggtctcctctgagcctccggcctccataagacccaaaac

SEQ ID NO: 203988 - DNA, 50 bp, Homo sapiens
cagaaattctggaacacctatatggactttgccattgatattattaaaag

SEQ ID NO: 203989 - DNA, 99 bp, Homo sapiens
gaaaaatggaacttgctgtattgctgacctgggcctggctgttaaatttattagtcgttgcttagcaaatctaaggcctcttttagattctggaacaat

SEQ ID NO: 203990 - DNA, 82 bp, Homo sapiens
ggtggtacatgaactcttttccagtgtccttcaggagatctgtgatgaggaaagccgggttagtaaagcagttgaagtgatg

SEQ ID NO: 203991 - DNA, 96 bp, Homo sapiens
ggaccacatagtccatcgaagaagagtccttggaacaagcaactggctattgaaaagatattgatgatgttaagaagttcaaaccgggttacctgg

SEQ ID NO: 203992 - DNA, 90 bp, Homo sapiens
aggacacatccaatttccattcgcatccaaaatggaatccgagacagaaagaggaccttaggtgtgctgggcatcaaggtgaagatcatg

SEQ ID NO: 203993 - DNA, 83 bp, Homo sapiens
gccagttatttgcctcagtaaaagagttgttgatcattatgaaaatcctagaaacgtggggtcccttgacaagacatctaaaa

SEQ ID NO: 203994 - DNA, 82 bp, Homo sapiens
cctcgcgccggctatggccgtgccctggggctgagccctcagtcaccttcaggccattcagaggaggaaagagaggggaata

SEQ ID NO: 203995 - DNA, 100 bp, Homo sapiens
aaagtcaagaagatatggaggttttcctcaaagagtcctgataaacctgtgagtgtgaaaataagttttgaagatgaaccaagaaagaaatacgtggatg

SEQ ID NO: 203996 - DNA, 75 bp, Homo sapiens
acaggcatgaggccagaccagagctgagttttcaagataactccagccagagacccaacatgagtgaagtttcct

SEQ ID NO: 203997 - DNA, 74 bp, Homo sapiens
gtggatgccctcaagtcctggctggccaagttactggagccgatgaatgagaagtgttacctctgtaaatccct

SEQ ID NO: 203998 - DNA, 82 bp, Homo sapiens
cgaccctggccgccccgagcggagcctggagggtacagctcgcagaaagaagaaggtggtacatagaacagccacagctgat

SEQ ID NO: 203999 - DNA, 100 bp, Homo sapiens
gcagcaggtttctttagtcatcaactatgaccttcccaccaacagggaaaactatatccacagaccagaatccgtagaagctagccctgtggtagttgag

SEQ ID NO: 204000 - DNA, 50 bp, Homo sapiens
caagcatctgggccatcttcaatcttttcctccgcaaccatgtctgacaa

SEQ ID NO: 204001 - DNA, 75 bp, Homo sapiens
gcagacgaggttgacgggctgggcgtggcccggccgcactatggctggactggtgattgcagctggaagtgccca

SEQ ID NO: 204002 - DNA, 83 bp, Homo sapiens
ttccccgcgctgcggcctggcggcttccaggcgcactaccgcggaagctcttcgtgggcggtcttgactggagcacgacccaa

SEQ ID NO: 204003 - DNA, 100 bp, Homo sapiens
ccgggggtcgctggctctgctgctgccgccggcgaaggaggaggcgttgccggagactggagcacaaggaggttttagtcggcttgttgttcctggtgtt

SEQ ID NO: 204004 - DNA, 100 bp, Homo sapiens
cgcgttctcctccgccgctcctccgggcttgccctggagccctcagaatggaagcttcttgcctagagctggccttggaaggggaacgtctatgtaaatc

SEQ ID NO: 204005 - DNA, 80 bp, Homo sapiens
acaacatccactattctttctccatcaccaggaatccggtcaataatgagaggatggcattccctgtggatatgctggaa

SEQ ID NO: 204006 - DNA, 101 bp, Homo sapiens
gagagatgaggacactgaaattcagagaggggaagtgatttgcctcagcttgtactcaaatgcagccctgaggatttggctactgcatataacaacagggg

SEQ ID NO: 204007 - DNA, 100 bp, Homo sapiens
tggtgatgagcctcggaaagtgctcctgcggctgtatggagcgattttgcagatgtgattcgcctttgccagtctcatctcgtgtctgctttgttaagtt

SEQ ID NO: 204008 - DNA, 128 bp, Homo sapiens
accagcaacggggtggccgatgaatcacccaacatgctggtgtacagaaaggatgacgtagctttgccaaagacttagaagctaagcagaaaatgagcttaacatcctggtttttggtgagcagtgga

SEQ ID NO: 204009 - DNA, 83 bp, Homo sapiens
cctggaggtggggccgggcctgcgtagtgaaactgcgtaggaacctgggaagaaggctctgtgtgctccgggatggagcaggt

SEQ ID NO: 204010 - DNA, 100 bp, Homo sapiens
gtggagagagcgagctgagtggttgtgtggtcgcgtctcggaaaccggtagcgcttgcagcatgacaaactgggaagattgagcctgtggtcctgccgct

SEQ ID NO: 204011 - DNA, 100 bp, Homo sapiens
atcacatactgccggaggaactttcttaatagaacatcactgttaaccctagaggttatcaatactctggctgaccatcatcatcgtgggactgactttg

SEQ ID NO: 204012 - DNA, 82 bp, Homo sapiens
accgccaacctgccctcctacaacatggaccgggccgcggtccagaccaacatgagagaccaaccttggccatggaccagcc

SEQ ID NO: 204013 - DNA, 100 bp, Homo sapiens
cgaacatcttctggacctttgtccaggcaggtggacacgaacaccaaaaatgtctttgggcaaccgaggttgagggcatccctccgagacctccggtcac

SEQ ID NO: 204014 - DNA, 82 bp, Homo sapiens
gtcacttttgactgtgcagtgaaaccatctgttacctgtgttccttatgccagcctggaccatcttggaggcagtgtaggat

SEQ ID NO: 204015 - DNA, 75 bp, Homo sapiens
ccctcaaggacaacctcggcctgagacaccggaggaccgggaagaattcctttggctaccggaagaaaagggagg

SEQ ID NO: 204016 - DNA, 82 bp, Homo sapiens
catgggctcctgcctgcctgccaggcataatcaccagcaacacccgggacaataatacgggggccacctacccccacctgaa

SEQ ID NO: 204017 - DNA, 74 bp, Homo sapiens
cgcagtggtcgcttcttctccttgtggacatttgggagcaataaaaataagaagaaaggaaaagccagaaaaat

SEQ ID NO: 204018 - DNA, 83 bp, Homo sapiens
ggcgaacgcggagagcacgccatgaaggcctcgggcacggtttactcctggcttgggggcattaggaagcactggaggctctt

SEQ ID NO: 204019 - DNA, 75 bp, Homo sapiens
cccggggcgggggcgatggcggcggcggcggccggagcttctctcagccggataccttcttctactcattggtct

SEQ ID NO: 204020 - DNA, 100 bp, Homo sapiens
gcttcattgttttcagctaacagtaaccccaggtgtgtagctgggacggtgctggtctgagctggaccttgtctgatggcttcctccaaccctcctccac

SEQ ID NO: 204021 - DNA, 90 bp, Homo sapiens
ccgaggagaacctgcccttcgccaaggagatcgtctctctcatcgaggcccaaaccgccaaggaagctcttcgtgggcggtcttgactgg

SEQ ID NO: 204022 - DNA, 90 bp, Homo sapiens
cgacaaccgcctgctcagagaggatgtggagtaccgtcccctgagcatcctggccagaacaagccaaggagccaagacgagagggacaca

SEQ ID NO: 204023 - DNA, 100 bp, Homo sapiens
agaggaccccggtacatctgaaagccgggaaatgggattatcttgaacacataacctccattggccccaggactacaggaagtccagaaaatgaaattct

SEQ ID NO: 204024 - DNA, 75 bp, Homo sapiens
gtttgtgaggaacaacatctatgaagtcatggtcttggccatggacaatgaaatggagaaggtagaggagatgcc

SEQ ID NO: 204025 - DNA, 80 bp, Homo sapiens
gcgccgccgaggtgaggtcgtctcgcctcccgcgcgccggtaggatatgacagcgcgtgatctgctacagcagagataca

SEQ ID NO: 204026 - DNA, 104 bp, Homo sapiens
gcggtggaggacgaggggctccgggtcttccagagcgtgaagatcaagatcgcacaggaagtcctggagaacctgaaggaccgctggtaccaggcggacagccc

SEQ ID NO: 204027 - DNA, 100 bp, Homo sapiens
ctaaattaaaagaagaagaaaaacgagcactacgttatttagaaacaagacgagaatgtaactccgttgaagcactcttgttcagcttctggaatttctg

SEQ ID NO: 204028 - DNA, 75 bp, Homo sapiens
ccccaggagaaaagccagtattgcttgtgctcctaacaacctgtctcttgtgtttcctgaggttataggcgggtg

SEQ ID NO: 204029 - DNA, 73 bp, Homo sapiens
gactttgagccctaccttactggacagtcaaatcagtattggtaaaggttttcaaggtgtcatgaaaagatgg

SEQ ID NO: 204030 - DNA, 100 bp, Homo sapiens
cggactatgggcgaatagctctgaccacccggcgaagatgagtaacctggtggcctcccagataatgaactatgctgatgtcagctcccgtgccaacgcc

SEQ ID NO: 204031 - DNA, 100 bp, Homo sapiens
attggctacggcctgtccctcgccacccttctggtcgccacagctatcctgagcctgttcagccaaagcctacaaagggccgcatgcggatccactgcct

SEQ ID NO: 204032 - DNA, 90 bp, Homo sapiens
gtcaagttcctccactgagctcgctgcgtataaggaggaagcaaacaccattgctaaggaccctgatgctcccataagacagaaaatgcc

SEQ ID NO: 204033 - DNA, 97 bp, Homo sapiens
cctgcacctgtctggcctgggcgccagcgcggctgcaggccaaggttgatgataattagaagcatgctttccactgaacttcccgacaacatttgtt

SEQ ID NO: 204034 - DNA, 74 bp, Homo sapiens
ccaaagcgttgaataaacggttgtacaaagaggacttaaccaccaccatgtcgagcaaaagaacaaagaccaag

SEQ ID NO: 204035 - DNA, 83 bp, Homo sapiens
tccaggttgttatctgcaggtgtggcaggttgcagaggacagtgggtggagtccatgtccctggctgacagagggaaccctgg

SEQ ID NO: 204036 - DNA, 100 bp, Homo sapiens
cctggttataagaaagttattaagaagcctatggatttttccacaattagagagaaactaagtagtggacagtcagggccccagcaagaaggcagccaag

SEQ ID NO: 204037 - DNA, 103 bp, Homo sapiens
tgaagttgaaaatggtgcaggtcgtgtttcgacacggggctcggagtcctctcaagccgctcccgctggaggagcaggtttctggcatttgaagtcaaagagt

SEQ ID NO: 204038 - DNA, 75 bp, Homo sapiens
tggatgatcctgatgcagccaattataatgagacgagttgtactgctgtcacaggaaatggacgctggattacaa

SEQ ID NO: 204039 - DNA, 100 bp, Homo sapiens
acacctttgctcttcagacatttctgtcaagaaccaagaaagcttgatcttattctacatcattttttacctgtaggcacgacttcagcctggagaggac

SEQ ID NO: 204040 - DNA, 96 bp, Homo sapiens
cttgcgaaccagttcagcagtgcctcagtctttcccagggaactccgatgaagtgttccaacaaaatgagcgagtgaaccaagaagaggatgacat

SEQ ID NO: 204041 - DNA, 74 bp, Homo sapiens
tattgcgcgtggaacggctgcttttggaaggtacaatgactcttcttgcttttcacctaagttgaataagcacc

SEQ ID NO: 204042 - DNA, 75 bp, Homo sapiens
tttattgacctcgactcccatgcggagatgcgctctgtgctgcggaaggcgggctccccgcgcaaggcccgccgc

SEQ ID NO: 204043 - DNA, 96 bp, Homo sapiens
agccccctgtggctgaggctacaccccggagccaggagggagcctcacagtctactcagagaaaaataaaagaaggcaaaatgagtcctccccatt

SEQ ID NO: 204044 - DNA, 88 bp, Homo sapiens
tgcaattgtgggtgtatggcaggatgcggaagggagagctgtttgactatctcacagagaaggtggccctctctgaaaaggaaaccag

SEQ ID NO: 204045 - DNA, 100 bp, Homo sapiens
ggccagggaaccctggtcaccgtctcctcagggaaatcctcattgacgattcaatttgttgaaggccaatttgtggactcctacgatccaaccatagaaa

SEQ ID NO: 204046 - DNA, 75 bp, Homo sapiens
gaaaaggtgtacttgcaagaaacctcaggacttgagtaacagcaacatgtacaagccagctgccatgttgtgagc

SEQ ID NO: 204047 - DNA, 89 bp, Homo sapiens
ttcctgtacagcctgcagaactatttggacacctcccacactgagtccccaaccccccatgactcaaattcacaccgccctcaactgca

SEQ ID NO: 204048 - DNA, 73 bp, Homo sapiens
tggaataaatttttggagaataaatccccttggaggaaaatgggttatgtggtccgaatcagtggtgggaacg

SEQ ID NO: 204049 - DNA, 101 bp, Homo sapiens
ccgatagctatgttctgctggagcattctgtgaagaaggcagtacattttgggttaccgctcagaggccctatggacagcgatgacagccatggatctgtg

SEQ ID NO: 204050 - DNA, 100 bp, Homo sapiens
gtgaagcagtgtcacgcattttagaagaatggtgctcaacaggaaccttggattatattttacaacgctgtcagttggctctgcagaatgtctgtgacga

SEQ ID NO: 204051 - DNA, 100 bp, Homo sapiens
agatctaccaaacccagggtatcttccttgatcagcctttacagtaaaaatgacccatctatggctgcttaatctgcatagatgaatggtttgaagtaaa

SEQ ID NO: 204052 - DNA, 100 bp, Homo sapiens
atgcactacaacaggaaaatcatattatagatggagtaaaggagcatttctggagtattgaccaaacggaatttcgaatcccacccaggctgatcattca

SEQ ID NO: 204053 - DNA, 98 bp, Homo sapiens
aaagcgcctgaggaccggcaacatggtgcggtcggggaataaggtttccaatacttatctacaggaatcgccatgaccccagctctgagggaggcaac

SEQ ID NO: 204054 - DNA, 89 bp, Homo sapiens
tctactagtggaaattctaatctttcacagacacaggaacggcagagtcgaaacaaacaatgagggcgaaccagtttcttacatgttct

SEQ ID NO: 204055 - DNA, 75 bp, Homo sapiens
gaagaagttgggcaagcccggtttatacagaagcagatggaacattttcaagagaccagaacctggaaaatttaa

SEQ ID NO: 204056 - DNA, 100 bp, Homo sapiens
gggacttaggtgccagtccttctaggcagaagggccctcttgggggcataaggaaatggtggcaggcacttcctcctaacaagaaggaagtagttaaaga

SEQ ID NO: 204057 - DNA, 82 bp, Homo sapiens
aagacagcgccgcccgcgcaccgccagcgacctccgccgcagagtcccaccgccacagagacaagaggagcagcagcggcac

SEQ ID NO: 204058 - DNA, 50 bp, Homo sapiens
ccgaaagagcactggactccggaaggaagtgttttagatcacagtttgga

SEQ ID NO: 204059 - DNA, 74 bp, Homo sapiens
gaaaagtggatggaggaggcgatgcacatggaaacttggatttaactggccagaagcaggtattcaaagcagag

SEQ ID NO: 204060 - DNA, 100 bp, Homo sapiens
gcgctacgctgagtacttgcagccctcggccaaacggccagacgccgacgtcgaccagcagagactggggcttcataaaagtcagagttcatgtttgtca

SEQ ID NO: 204061 - DNA, 90 bp, Homo sapiens
gggccgtgtctccggcatcatgtgtgggcggcgactggcggcgcgatggacctgaccgggctcctgctggacgaagaaggcaccttctcc

SEQ ID NO: 204062 - DNA, 101 bp, Homo sapiens
ctaagaaagagaatgtaagacaggaaaataattaaatattcttaccgagctgagatctgtatctgtggacctgaatgttgatccctcgcttcagattgaca

SEQ ID NO: 204063 - DNA, 100 bp, Homo sapiens
agaagctggaaaagaatgatgttgtccttaaacaacctacagaatatcatctataacccggtgcggccgcgggcactgccgagctgctgccatccccgag

SEQ ID NO: 204064 - DNA, 75 bp, Homo sapiens
gttttctcaggtcctgcagctgggagacggcacaggacactaaaccagggtttccaaggcaagaccggccctcca

SEQ ID NO: 204065 - DNA, 88 bp, Homo sapiens
aacatgcagattatatcgcatcctatggctcaaagaaagatgattatatgtccggtctgtgctacgacagcaaaatgttccaggtgca

SEQ ID NO: 204066 - DNA, 100 bp, Homo sapiens
ggaaggtctatgtcagcacgcagaaggtttgaggagcattgcttctcatacagtaagaaaaagcttgtggtgaaggggggcaaaaaaaagaagcaagttc

SEQ ID NO: 204067 - DNA, 90 bp, Homo sapiens
cctgacttcttgaagaaagacagatcctgtgtcacccggcaactcagaaacatcaggtccaaggatggtccagcggctgagaaggagggc

SEQ ID NO: 204068 - DNA, 73 bp, Homo sapiens
aaagaaatccgtagaagaaggaaaaatagatggcatcattgacaagctttagcgtcacctccctcactgggca

SEQ ID NO: 204069 - DNA, 98 bp, Homo sapiens
tccaggaagctgaccagctactgagtactcgcacagaagcattagaagccttacagagtgaaaaatcacgagttgatctctctaatgtattagatctt

SEQ ID NO: 204070 - DNA, 107 bp, Homo sapiens
tcgcgcccgggaggaaggaacgaggcaaggagctaaagcagcgtgcgttcagccctgggggccgagaactactggtggcgtggccagaacacacggacgctgtgtgt

SEQ ID NO: 204071 - DNA, 74 bp, Homo sapiens
ctcaccaacagatgaagacagatgcaccaacgagcagcagtggacgtcagctcagcgaggtcttcatccagctg

SEQ ID NO: 204072 - DNA, 100 bp, Homo sapiens
ccgtagggtgaacaacccgttcttgcctcaggccagtcgcctccaggccaagagggatccttcacccgtgtctgattttgcaagaacgaggctcaaggat

SEQ ID NO: 204073 - DNA, 100 bp, Homo sapiens
aagacctcagagtgttctcaacaattgtggcaattaataaagacccagaagctccaattttccaagtggcagattatggaatagttgcagatttatttaa

SEQ ID NO: 204074 - DNA, 100 bp, Homo sapiens
gttccaccagcaaccatgagtggttccatgatgggaagtgacatgatgggcaccagttgcgtcttgaagtgccatcagctgtaaccaaagttccacatcc

SEQ ID NO: 204075 - DNA, 75 bp, Homo sapiens
ctgccgtctactcggccactccggtcccgacacctagcctgcgcgaaaattttgaccagagtcctttgagaagaa

SEQ ID NO: 204076 - DNA, 100 bp, Homo sapiens
tctgttagacagtgaatgtggaaaggagattgacagtcacaattttgtaataagacccaacatgagtgaagtttcctgcaagaaacgggacgactatttg

SEQ ID NO: 204077 - DNA, 75 bp, Homo sapiens
caaccgcagccggacagaagccgagtcctggtatcagaccaagggggaaatgcagtgtgaccctcttgaatgaga

SEQ ID NO: 204078 - DNA, 105 bp, Homo sapiens
gcagggagaaggaagaggtgtttgaaaagagccccagtttgagggacagcgggatatccaccatgctgctgtgagactcgggcagttgtgactggtttagaagtg

SEQ ID NO: 204079 - DNA, 74 bp, Homo sapiens
gcctcctctcctaggtgccggccgggagggcggccgcagcaggtaagaatgattgatgttggctgatattggag

SEQ ID NO: 204080 - DNA, 75 bp, Homo sapiens
gcaagcctgccataagtgagaagaggaccattcttagtggcactggggaaatcttggcacccagaagaattcaac

SEQ ID NO: 204081 - DNA, 74 bp, Homo sapiens
tgctgccagggtccctgaagagggaagacacgcggaaacagaaatcttcccaaggctgcagacaccgacggatt

SEQ ID NO: 204082 - DNA, 75 bp, Homo sapiens
ggctctcccaagggacagactcaaaagcggcgccaggaaattgaacaaaaacttgaagttcaggcagaagaagag

SEQ ID NO: 204083 - DNA, 75 bp, Homo sapiens
ccagccccaccactccctgccgaagcccagcccctgatgtcccagcaggacagagcgggatgccaccagcttgtc

SEQ ID NO: 204084 - DNA, 51 bp, Homo sapiens
cctggaattacattgaatatacagtgaaggagaacgacctgctcagaatga

SEQ ID NO: 204085 - DNA, 90 bp, Homo sapiens
gattctgcgcgtcaacgacaaatccctggcccgggtgacccacgcggaggccgtcaagagctcttcagtatccccatcagccagtttccg

SEQ ID NO: 204086 - DNA, 90 bp, Homo sapiens
gaaaagaagagatgaaggatgaggaccgtgggagtggggcctttagcctgcattctgtgtctggctgactctgccgggagctgaaaccca

SEQ ID NO: 204087 - DNA, 100 bp, Homo sapiens
caggacgggcgctttggagccggccccaggcagcgtgtgtcggtcgcctagtctggagaactagtcctcgactcacggtctgtagcatctctgtctgttg

SEQ ID NO: 204088 - DNA, 100 bp, Homo sapiens
cgaacatgtcgcggcctgtcagatcttacagactctttcagcacctacgaaaaatttagaacagcaggtgaatcacagccagcagggacatacaaatgcc

SEQ ID NO: 204089 - DNA, 100 bp, Homo sapiens
cgcgccgggcctcaggctccttcctactgtccgagggccaccaggccgccgggggcctgctgcgcccggcttcctttgctccaataagctttgcaatcaa

SEQ ID NO: 204090 - DNA, 100 bp, Homo sapiens
ctccgggcggccgcacctgccaggtgttggaaatcaatagctcttctagcctttgcattgtttaaatataatagtgtcattggactaagatgttcctgat

SEQ ID NO: 204091 - DNA, 100 bp, Homo sapiens
tttctcttctaagagaagtagtaaaaccagctgcagtgttatcaaaggacaaagttgctttaggagctaagccatataaagaagaaattgaagatctcaa

SEQ ID NO: 204092 - DNA, 100 bp, Homo sapiens
tggagatattgggaaagaaagatatagagacaacgactatgtccaattttcatgctcagatacacctgtaagatcggaatggagtgaacttcaaagtcag

SEQ ID NO: 204093 - DNA, 90 bp, Homo sapiens
tggaacccctagtctcaagagatcctccagcctcagcctccctgatcctgacattgatgctgccagtgccatgatgcttttgaatactcc

SEQ ID NO: 204094 - DNA, 100 bp, Homo sapiens
ggatgagcctgcagagcgcgcagtacctccgaggcacagagctttggcctgctggatcccaaactctgctacctgctggatggaatcctcttcatctatg

SEQ ID NO: 204095 - DNA, 75 bp, Homo sapiens
gaagctcctgggagcctactatcacgacgggaagctgtggctgtgctccattgaagtgacttgtgaatcagccag

SEQ ID NO: 204096 - DNA, 75 bp, Homo sapiens
ggagaaggagtacttacaggttatgcactttgacaccctgctagatggctatgaactctccaaagtggaagggaa

SEQ ID NO: 204097 - DNA, 75 bp, Homo sapiens
gggacctgctggaagggaaggaaaaacctgtatgtggaaccacctgtaccatctccagggagagcaaggttggag

SEQ ID NO: 204098 - DNA, 90 bp, Homo sapiens
gtcgcgtctcggaaaccggtagcgcttgcagcatggtgatgtgtccaatctagatcccaacttctcatttgaaggcaccaaactggatgt

SEQ ID NO: 204099 - DNA, 108 bp, Homo sapiens
cccgccaaccgcaaccattgacgccatgtcgggttattcgagtgaccgagaccgcggccgggaccgagggtcatcatcagatttgaaatatttaaagtggatacaaaa

SEQ ID NO: 204100 - DNA, 100 bp, Homo sapiens
gatcagcagcagcagaaaatcattgccctgcagagtggtttacaagctgataagtggtccccagcactgcagatccgcacagttctgctatcgatccagg

SEQ ID NO: 204101 - DNA, 50 bp, Homo sapiens
aaacagaagggactactggacaagtatgaaaatgaaagtcttcagaatgg

SEQ ID NO: 204102 - DNA, 99 bp, Homo sapiens
ggcccacctgctgatacccagccaagcgcttcacaccctggtggccagagtctgaaactggttgttccagtgactctgacatcattagaagcatgccag

SEQ ID NO: 204103 - DNA, 82 bp, Homo sapiens
tgtattttgtgatcgcagcgatgaaagtttggtgccctggttgtcagatgttggaaagcagtaggacggaacatactcttcg

SEQ ID NO: 204104 - DNA, 100 bp, Homo sapiens
gattacctgaaggtgaaacagattgagccagaaggaagacaatgctgacagatctgagaacaattggcaagaaattcctccccagtgacatcaatagtgg

SEQ ID NO: 204105 - DNA, 80 bp, Homo sapiens
atcgactggaccaagatcgagcccagcgtcaacttcctcaagtcgcccaaaggtgtcgtgaaaactacccctaaaagcca

SEQ ID NO: 204106 - DNA, 100 bp, Homo sapiens
ctgtgatttacctgggtgagacagcttgagccccatcgtggattccaagacatccctgctgagagagccaagcaagagtgagccatggagctacgtgtgg

SEQ ID NO: 204107 - DNA, 100 bp, Homo sapiens
ttccgagaggaacctctatgccgacatcgacgccgcctggcaggccctgcgcaccagtctctgctttctatccgtcaagatgataaagtcgtgtgcccga

SEQ ID NO: 204108 - DNA, 100 bp, Homo sapiens
tgttctgcccaacatccaggctgtactgctccccaagaagactgagagtcaccacaaggccaaggatctcctttctgtgaagaaataatctgttgccgtg

SEQ ID NO: 204109 - DNA, 88 bp, Homo sapiens
gccgccttccccaggcagtggaaccttcgggctcctagttaaacatgaagtttctggagagacagtggtatttcaagggggagctctt

SEQ ID NO: 204110 - DNA, 50 bp, Homo sapiens
gctatgggactgtggtggcgatgctaatagagacggggtttcgccgtgtt

SEQ ID NO: 204111 - DNA, 83 bp, Homo sapiens
ggtgagtcgcggtgggtcctcgcttgcagttcagcgaccacgactagacgcttgaagcaaagctgccatcccagaagacgaca

SEQ ID NO: 204112 - DNA, 51 bp, Homo sapiens
ctggatgaagtgccccttggacaggctttatgctgaaaaggtggccactag

SEQ ID NO: 204113 - DNA, 98 bp, Homo sapiens
ggacgcggaactggtgtaccctggtggacgtgcacccagaggaccaggcggcggctttatcctgtggataaacgcagagtgaacgagtttggggagtc

SEQ ID NO: 204114 - DNA, 100 bp, Homo sapiens
gcacctggtgctggacaagctcttccagctgtccgtgcagcccatggtcatcgctggccagacagggtttttaatgaccacaacaagcaagcatgcagct

SEQ ID NO: 204115 - DNA, 119 bp, Homo sapiens
gggaagggccacccaggggtcccccacttcccgcttgggcgcccggacggcgaatggagcaggggcgcgcagaaggaaggggagttcaccctgcacggccgggccatcctggagatgga

SEQ ID NO: 204116 - DNA, 75 bp, Homo sapiens
cacaccgtcttctggaacagttcaaatcccaactccccgcagccaccgccacccattggaatggccaacagggga

SEQ ID NO: 204117 - DNA, 108 bp, Homo sapiens
ctatggatgatcgagaggatctggtgtaccaggcgaagctggccgagcaggctgagcgatacgacgttccagggtctccctccactgctgtagtaacccgggtccggg

SEQ ID NO: 204118 - DNA, 83 bp, Homo sapiens
caccggcccagctactgcgacgccgccttcgctctggagcagatttccaaggaaatctggcattttttaaagtttgcgcccca

SEQ ID NO: 204119 - DNA, 50 bp, Homo sapiens
acaagccaatcccaggaggaaaaacgatataagagttcggaccgcccagc

SEQ ID NO: 204120 - DNA, 73 bp, Homo sapiens
ggaaagtccttggacgagttgtctgcttgcggagaggtgtctgcggctcagtcttccaggatctcaaccagtt

SEQ ID NO: 204121 - DNA, 75 bp, Homo sapiens
tcgtcgtcggcatcctcctggcctacctggcagtgaacttgctgactgagaaggcaccttggaactctctggcct

SEQ ID NO: 204122 - DNA, 85 bp, Homo sapiens
tgcacaaaagaagtaggaaaggctgctttggaaaaacagttacaaggagaacatcatgcgcctctccagccttcacaaggaccgc

SEQ ID NO: 204123 - DNA, 82 bp, Homo sapiens
gtgcgcgctggcgctgagcctgcagccggccctgccgagttgcatgctgagaatttgaaaaatgaagatgatgtagacactg

SEQ ID NO: 204124 - DNA, 82 bp, Homo sapiens
gtggtgttgtcgtggccggagcggcccgcgcctgggctgccggcacttcgcggcaggcttgggcactgtttaaaggaaagtt

SEQ ID NO: 204125 - DNA, 75 bp, Homo sapiens
ctctgaaccccagtgacttactcagggatctggacaactctcctctgtccccaccttcaccaaggaccaaaagca

SEQ ID NO: 204126 - DNA, 75 bp, Homo sapiens
gctgccgtgtacagtgctgcgattctggagtacctcactgcagaggtatatgagtagaccagtgatgagtggccc

SEQ ID NO: 204127 - DNA, 100 bp, Homo sapiens
ccaaggagtccctggagcggcagctcagcgacatcgaggagcgccacaaccacgacctcagcagctaccaggccatcaaggtgctggagaacatcgaact

SEQ ID NO: 204128 - DNA, 50 bp, Homo sapiens
cacaactatttaatggcatgacggatgatgatgctgaagctatccttgct

SEQ ID NO: 204129 - DNA, 80 bp, Homo sapiens
gggtctgtgctggactgcttcaggctcttgtcaggatggtgaagctgttcatcggaaacctgccccgggaggctacagag

SEQ ID NO: 204130 - DNA, 111 bp, Homo sapiens
cacattctttggttgggactcccaattatattgcacctgaagtgttgctacgaacaggtgttggagcgggccggagagaagtagagtgggctgcgaggagaaggaaacagg

SEQ ID NO: 204131 - DNA, 82 bp, Homo sapiens
cgtcatgctctttgtagcgtggtgcttctgttgctcacaggggtgagcccctccagactccgaataggagatcaagagtttg

SEQ ID NO: 204132 - DNA, 98 bp, Homo sapiens
gtggacctggaacaatttaaccagcaactttccaccaccattcaagaggagttctatagtgagtttttagcagaagacagtcaagagaaattttggaa

SEQ ID NO: 204133 - DNA, 115 bp, Homo sapiens
tgagtgaatatgatcagatttctccaccaaattctcagcctgataaggggaaacttcgtggcttgcatgacagctattttacgacaaatggaagattaccattatgcccacttga

SEQ ID NO: 204134 - DNA, 75 bp, Homo sapiens
tcaccattaactaccgtctgggaatactagggcagatcttgaaccttctggatgagctgagattggctaatgata

SEQ ID NO: 204135 - DNA, 87 bp, Homo sapiens
aggccaggagccaggggcccagaaggtgatccatgctctagggcaatcatggcatcctgagcattttgtctgtactcattgcaaaga

SEQ ID NO: 204136 - DNA, 73 bp, Homo sapiens
gctcggctgcgggaaatcgggctgaagcgactgagtccgcgatggaggtgctaaagagattgatatcgcagcg

SEQ ID NO: 204137 - DNA, 75 bp, Homo sapiens
acagcaagcacatgcagaagaatcccccagggcccagaggaaatgctgtctatgatttcttcattggccgtgaat

SEQ ID NO: 204138 - DNA, 75 bp, Homo sapiens
cagattcgcagtggtcgcttcttctccttggcttgcctttcagcagaagacagcctgggtgcccaggctctgcac

SEQ ID NO: 204139 - DNA, 89 bp, Homo sapiens
tggtgctgaccgatgtctgcgggaataggacctatggcgtggtggcccagtactaccggcccctgcatctgccaaggggccaagggatg

SEQ ID NO: 204140 - DNA, 100 bp, Homo sapiens
gtccaggcctgacagctctgcggctcgggccctgaggactatctcagcaaaaactcatcatcaggctgttaacttcaacattttcgagggcatggtttgc

SEQ ID NO: 204141 - DNA, 135 bp, Homo sapiens
gcccgttgggcactgggggacgcgggcgcgtcaggtgaagactgggggccgcaggcgcgctagatcaggatcctcatgaccagccaaagagaagaagaattaggaagcataaatcaaagaaaaaatttaaaaatc

SEQ ID NO: 204142 - DNA, 73 bp, Homo sapiens
ttgcctggaccagcttaatggttctggtatgtgcactgcgcgtgaccagccgggcccgcagccgcatcctcag

SEQ ID NO: 204143 - DNA, 83 bp, Homo sapiens
cacaattatgcgtgttttgacaacggtggcgacatgtctaagaatgtgagccagtcacagatggcaaaattgaaccaacaaat

SEQ ID NO: 204144 - DNA, 74 bp, Homo sapiens
ctatgtgaaactgctttctaaaacaccagaactcaacctgcttcttggacacttaatgattgttggcaagaaat

SEQ ID NO: 204145 - DNA, 90 bp, Homo sapiens
tgcatgcccagcaccattcctaggctgggagcaaaacggatcccaggagggcactcatggtggtttatgggactctggactcctgagaag

SEQ ID NO: 204146 - DNA, 74 bp, Homo sapiens
gcgcggggaccgctgtgctctcgatcctcgttgcctgctaaccaacggcaagctgccactgtgggcaaagcggc

SEQ ID NO: 204147 - DNA, 75 bp, Homo sapiens
tccgtttaaacatctccctctttcagaaactggcagacctttcacttcgtatccaacaaattgaaacaactctca

SEQ ID NO: 204148 - DNA, 100 bp, Homo sapiens
atgttccaccccacctgggccccagaccgtgctgatcttcgatgagctctcggattccttatgcagagtggccgacttgatctggcaccactccttctac

SEQ ID NO: 204149 - DNA, 80 bp, Homo sapiens
ccgaggggtctggaagccagagaccaacgagatcctgcacatgtctttcggcctcccagccaacatccagctggacattg

SEQ ID NO: 204150 - DNA, 98 bp, Homo sapiens
gtcatattcttgggttcaaattcaagttttaccagctcggctttggatcgttccttggaatcattggatcaaaccttattgagaacaaaaggcagatg

SEQ ID NO: 204151 - DNA, 75 bp, Homo sapiens
gaagttggagaagtatccaatagggatattgtagaaactgtctttaacctgctcccagggttgctagagctcctt

SEQ ID NO: 204152 - DNA, 111 bp, Homo sapiens
aagatggcgtcctcggagcaggcagagcagccgagccagaggctaaaggcagcagttcactatactgtgggttgtctttgcgaggaagttgcattggacaaagagatgcag

SEQ ID NO: 204153 - DNA, 109 bp, Homo sapiens
ggggaaagatgctgttccaggcgcacactagtctacaaggccagagctttctggaagggggcatgaatccctgttgttactatccatgccagcaccagggcatctgtgt

SEQ ID NO: 204154 - DNA, 100 bp, Homo sapiens
aagaggatttatagatcagaatctcagtccaacaaaagatttcaatgggacagatgttacaagattttggaaaatttcttgggatgtttcttcttgtttt

SEQ ID NO: 204155 - DNA, 74 bp, Homo sapiens
tcagaacccgaccaacatccagaacttccagctgcccccagcccccaccttctggccctttcacctcctccttg

SEQ ID NO: 204156 - DNA, 83 bp, Homo sapiens
caacgcctggctcggagcagcagcctctgaggtgcagaccatgaattacgtggggcagttagccggccaggtgtttgtcaccg

SEQ ID NO: 204157 - DNA, 97 bp, Homo sapiens
gaccgccgccgcctggccctggagaactacatcaccgctctgcaggctgttcctcctcgggtcagcacctcatctatgggcactttaccaaagcggg

SEQ ID NO: 204158 - DNA, 74 bp, Homo sapiens
ataatcgaatagttgatgccctaaatgaattcagggaattagaatcatggagatgctgctaaaggaacagtgtg

SEQ ID NO: 204159 - DNA, 100 bp, Homo sapiens
atcaccttctgtggaaaggaagctgcacaggaagccgtgaaactggttttcaagatggcagcatctatgcatggtcagcccagtccttctctagaagatg

SEQ ID NO: 204160 - DNA, 100 bp, Homo sapiens
agggcgatggacggccgaaccccgcgcccgcaggacgccccagccagttttcggctttgtgagaaaccttaccatcaaacacgatggccagcaacgttac

SEQ ID NO: 204161 - DNA, 90 bp, Homo sapiens
tggagatatggcgcaactgcggcgcgtgaatacatcaagacctggaggccacggtacttcctgctgaagagcgacggctccttcattggg

SEQ ID NO: 204162 - DNA, 74 bp, Homo sapiens
gtacttcctgaagcagctgctctagtgaagactaatgtttcaagccagactccctctgccaaaagaagtttggg

SEQ ID NO: 204163 - DNA, 75 bp, Homo sapiens
agtgactcaaactgtgagaacttcagcatcgccctgagcaactggtggtttgtggcccacctgacagacctgctg

SEQ ID NO: 204164 - DNA, 98 bp, Homo sapiens
cttatgcaagaaactgttgaattagacccgtttcctatagatgagaaaccatacaagctgtgctcctctggtgcaagtgtggtagctattgacaacaa

SEQ ID NO: 204165 - DNA, 98 bp, Homo sapiens
ccggaccccagacaagccccggagcgcggccgagcaccgcaaggtgtgttccagagaacaagccttcagacatttgctatattgacgctgagctgtca

SEQ ID NO: 204166 - DNA, 82 bp, Homo sapiens
ccgggagcggcagtggaaccgactcccagaactccggacgtgtgcggcggagccttcacgtaaatgggtccagtcatgcctc

SEQ ID NO: 204167 - DNA, 75 bp, Homo sapiens
gtgattggcattgtactgctagctggaagctttaccgatttgttacaactcaagcaagggccagcagaaattctc

SEQ ID NO: 204168 - DNA, 75 bp, Homo sapiens
gtaaaattttgacaccaataattttcaaggaagaaaatcttaggtccctggctatcttcttcagtgactgctcca

SEQ ID NO: 204169 - DNA, 75 bp, Homo sapiens
taaggacattttctataagaactccttgttccgacatcccaaacaggttaatttggagtggcccctggagtcagt

SEQ ID NO: 204170 - DNA, 100 bp, Homo sapiens
actttgcacatttcaacagtcatgcagggaactctaatgatccaggacaaagaagttaccctggagtatgtatcaagcctggatttttggtactgcaaac

SEQ ID NO: 204171 - DNA, 125 bp, Homo sapiens
acccggcgagagtgattgccatttggctgaagtgtggtgtggctctgttaattggccttggtcctcacagctccaaaaagaaacaggatctcgataagctctatgagctgaagtccaaagctcgg

SEQ ID NO: 204172 - DNA, 100 bp, Homo sapiens
gagacaacgccttaacccaaggaagtgactcaaactgtgagaacttcagagtgaattcaatgtgtacagtcaggaagtcattactgtccttggggaaatt

SEQ ID NO: 204173 - DNA, 100 bp, Homo sapiens
agtcgggcctgcccggcatgcaggttttgaaactaacatgaacataagtagccgagatgaccctagtacgtcagaaattacttccgagactcaagacaga

SEQ ID NO: 204174 - DNA, 74 bp, Homo sapiens
ggagctggccagcgagagccagggctccaaagaactcgatggtgcagaacttccaagatgaatcctgttttgtc

SEQ ID NO: 204175 - DNA, 107 bp, Homo sapiens
cccattgcccccctcctcccctggctggagtgccctgcctggagggagccctcctggctgggggcaaggtgtcatggagaaactccagctgggcccagagattctgc

SEQ ID NO: 204176 - DNA, 51 bp, Homo sapiens
tttactcatatttcagctctgttacagatgaggagcgggaaggcctcctgc

SEQ ID NO: 204177 - DNA, 87 bp, Homo sapiens
cagggacaccgccttcgccattgcaacgctcagtatatcgtcagtggctctgacgatggctccttcttcatctgggaaaaggagacc

SEQ ID NO: 204178 - DNA, 90 bp, Homo sapiens
tgcgattctacgattgcagcgcagtggaagtcaagagcaagcatcaagatggtgctcatgtggaccagtggtgacgccttcaagacggcc

SEQ ID NO: 204179 - DNA, 90 bp, Homo sapiens
tacaaaagactcagagactatataagtagcttaaagatgacaccttgcattccctatttagaattggcagagggggtcgatttgggagga

SEQ ID NO: 204180 - DNA, 100 bp, Homo sapiens
gacttggatcaacacctttaacttcaagaagacaggtgatgtttgcagacagaaaaagtaaactgtcaaggaattcagagcattgggtacttgttatttg

SEQ ID NO: 204181 - DNA, 101 bp, Homo sapiens
aacaacatggagcagagaccaagccgaaatactggaagggtgttcctgatccaagcagaaccctgttatttgaagagcctgagaaatcttatcccgtttac

SEQ ID NO: 204182 - DNA, 50 bp, Homo sapiens
cagctgccatccactgactcgtaaactgcccaacatgttcggcgaccttc

SEQ ID NO: 204183 - DNA, 75 bp, Homo sapiens
agtgcaagcagctgtccgagtcccaggtcaagagcctctgcgagaagagaaccatggagtctggcagtaccgccg

SEQ ID NO: 204184 - DNA, 82 bp, Homo sapiens
atagctggggctacaggcgtgtgtcactgcgcccagggtgtcaaattgagaaccaggtagatccccaccacctacagtaaaa

SEQ ID NO: 204185 - DNA, 73 bp, Homo sapiens
tttgaagctggcagtctggttccagtgacaaaaatgctgagtttcttccgtagaacactagggcgtcggtcta

SEQ ID NO: 204186 - DNA, 49 bp, Homo sapiens
cccgggacgactgcagagcgcgcagggagagcaacaagccccggccctc

SEQ ID NO: 204187 - DNA, 90 bp, Homo sapiens
tgtcgcagccctgaagttgcctcttctggtgtcaaagcttttggacattcctgggactcctcagacccctgcacaattgagagaaaagcc

SEQ ID NO: 204188 - DNA, 90 bp, Homo sapiens
ccggtttctcccacatcgacctggttttacgtaccctgggaagcaagtgtggtgactttcttcgcagccggttctgcaaagatgtcctgc

SEQ ID NO: 204189 - DNA, 96 bp, Homo sapiens
cttatggctgttctgaactgtctcttcgactcattgagccagatgctgagagacgagttgtactgctgtcacaggaaatggacgctggattacaag

SEQ ID NO: 204190 - DNA, 100 bp, Homo sapiens
cgcggcgttagtattggccgtgtacccgaaaaactgattgactgggctggcgttaactgtgcggaggcaggcctgatcacttgaacggacatatcaagca

SEQ ID NO: 204191 - DNA, 85 bp, Homo sapiens
acagtgatgatgaaattcctatcagatgaaatggtgatgactggagtgacctcggaagctacttatcaaaggcagaagagccacc

SEQ ID NO: 204192 - DNA, 101 bp, Homo sapiens
ctacaaagaattctccttccacaattttaatcagggatttagtgcaagaagaagaacagttgatggaagaaaagaaaaagaaaaaagacgacaagaaaaag

SEQ ID NO: 204193 - DNA, 100 bp, Homo sapiens
agctaagcttgtagcgataatggatagcttatttgacaagctgttatctaaggtggtattggaatgctatgtaagaaaggacttggtctacaccaaagcc

SEQ ID NO: 204194 - DNA, 95 bp, Homo sapiens
taattactgcgtccccatgggagtacagacaggcgacaggtcaagagcaatctgaatccaaatgcaaaggagtttgttcctggggtgaagtacgg

SEQ ID NO: 204195 - DNA, 75 bp, Homo sapiens
tcgcctcggatttgggggcttcctcactcgtggctttccgaaggctgctggaagttggtgaaccatctaaagaag

SEQ ID NO: 204196 - DNA, 100 bp, Homo sapiens
ggacaagacctcctatcgctggcagcttctgcaccggcctcaagttggctacattcggcctggcatgcgtgggcagtgatgaacttcgaagctgtgctac

SEQ ID NO: 204197 - DNA, 75 bp, Homo sapiens
aattactaaggcagccatcaaagctattaagttttatccctgcagtgaatgatttgacctctgatctctttcgta

SEQ ID NO: 204198 - DNA, 50 bp, Homo sapiens
caatattgtgtttggatatgccacaaaaatggctacaaacttcctagcac

SEQ ID NO: 204199 - DNA, 100 bp, Homo sapiens
gagaagttcaagctctacctgaccatcatcctgctcctgggtgccgtggcatgtcgatttgtccttcactacaggataacaaagccattgacctttgccg

SEQ ID NO: 204200 - DNA, 99 bp, Homo sapiens
ttatacactcctgtgaatggatctatagtgattgtcagagcagggaaaatcacctttgcagaaaagttgctctaggtcgtaaccagcctttgaaaaagg

SEQ ID NO: 204201 - DNA, 116 bp, Homo sapiens
tggagacagagctgagggagcaagaggtgtcggaggtctcatctttgaactactgccggagcttctgccagttgtcgagatgtccacagaaggaggatttggtggtactagcagca

SEQ ID NO: 204202 - DNA, 75 bp, Homo sapiens
tcccagcccgggtccccgcgttcacagccccagcgcaggagaaggccatcagcatttgggagtcaaagaatttct

SEQ ID NO: 204203 - DNA, 100 bp, Homo sapiens
ctcccctgcagcgactcggaagattcgaggcggcgggggacaagtcggcgccccagagcggacgagagaagtatatcagagaattccctggtagcaatgg

SEQ ID NO: 204204 - DNA, 90 bp, Homo sapiens
gctggctgaggaaatcgcctcccgagaagaagttgaggcgctatacttcccaagtaagaagcggaagaggagccgctggaaccaagacac

SEQ ID NO: 204205 - DNA, 49 bp, Homo sapiens
tttgccatcttcaagtttgttcaggatcggaaaatagaagatcttcgac

SEQ ID NO: 204206 - DNA, 75 bp, Homo sapiens
ctccgaagggtttctgctctgggagtgcctctaatgtctcggcgcggaagatggccggcggcgtggacggcccca

SEQ ID NO: 204207 - DNA, 100 bp, Homo sapiens
gaagaataagcacaagagaaagaaggttaagctggctgtcctgaaatattataaggtctatgcctctcagcgaatgagagctggcaaaggcaaaatgaga

SEQ ID NO: 204208 - DNA, 74 bp, Homo sapiens
aaggaatagaacggtcaaggagattatgtctacgtttacagctggcaaacgcccttctggaaaaggaagtgata

SEQ ID NO: 204209 - DNA, 101 bp, Homo sapiens
agacttgggcaggaagatgttggcccgtcaccacttccccagcctccacaccaaggcccagctgccttctccccatgtactccgacaccagggccaggtcc

SEQ ID NO: 204210 - DNA, 103 bp, Homo sapiens
aagaaatgcagtaaccagcatgtcaataaggggtcataggtggaaaagacatgacatatctgaagagatggattaagaatgctttggattaaggattgtggag

SEQ ID NO: 204211 - DNA, 111 bp, Homo sapiens
ttgtatttgactgagagaaacccactgaagacgtctgcgtgagaatagagaccaccgagacctgcctagagctggaacgttacctccagagcgagccctgctatgtttcag

SEQ ID NO: 204212 - DNA, 100 bp, Homo sapiens
cagtatttcagttattcctttctcagaagctcagccctgtgtacggaggagtgtgtgcacggccgctgcgtttccccggacacctgccactgcgagcctg

SEQ ID NO: 204213 - DNA, 74 bp, Homo sapiens
taaaaacatccccgtcatcgagtatgagcagttcatcgcaggattgtcagtggcttcgccccgaggagagctga

SEQ ID NO: 204214 - DNA, 58 bp, Homo sapiens
gaagcgcagggagaaggaagaggtgtttgaaaaggcacctgaatggacagaagaggac

SEQ ID NO: 204215 - DNA, 103 bp, Homo sapiens
gtggcgcctcaggaactgaaccctcgcggccgcaacgtgtgccgtgctcccggaaataacatctgctttgctgccgagctcagaggagaccccagacccctcc

SEQ ID NO: 204216 - DNA, 80 bp, Homo sapiens
acctttgtccaggggctgactgtgggcagagaagttgcaaaccgagtttccaaggctggagtgagacagctctacgtaca

SEQ ID NO: 204217 - DNA, 50 bp, Homo sapiens
ctggaggtgtacgtggccatctgcagggtcgggtgtgctgacagccggct

SEQ ID NO: 204218 - DNA, 100 bp, Homo sapiens
ctttcggcatttagtgggggattctctgatcaaggttgatgtggtgaataagacactgaagaccattaaaaatctcaagtgacgactttgggaaactctg

SEQ ID NO: 204219 - DNA, 88 bp, Homo sapiens
gcggagggagaggctgcagagcgagggcaggaggtgctggagaatctggtaaaagcaccattgtgaagcagatgaggatcctgcatgt

SEQ ID NO: 204220 - DNA, 100 bp, Homo sapiens
ggaactgctataaatacatcaacaaccgaaacgtgccggagattgctgtgtaccctgcctttgaagcacctcctcaggtgtttgcaagagcagacccttg

SEQ ID NO: 204221 - DNA, 51 bp, Homo sapiens
catcaccttgatttttaatcccacgttgaggagctcaagcttgggaaaatg

SEQ ID NO: 204222 - DNA, 88 bp, Homo sapiens
cggccgccggggctgcggctacacacctagggtccccagccccaccccagccccaaaggaggctgttcgagagggacgtcctccggag

SEQ ID NO: 204223 - DNA, 75 bp, Homo sapiens
aagataggcggccatggtccaaccttgaaggtgtggatgaggtcaccattgtcaacattttgaccaaccgcagca

SEQ ID NO: 204224 - DNA, 100 bp, Homo sapiens
catccttgactccatcgggcgcttctttggcggtgacaggggtgcgcccaagcggggctctggcaagtaattccagatacgcttactgacatggtgaatc

SEQ ID NO: 204225 - DNA, 75 bp, Homo sapiens
ttatcaacttaaaagatgccacctctaaggtggcagaactggtgaagccattgtagatgctgcgctgagtgctct

SEQ ID NO: 204226 - DNA, 75 bp, Homo sapiens
atgtctgtggggccgccggcggcccggcttcaggctgtgtataagatggcagacgtagcctgcaaatgccacggc

SEQ ID NO: 204227 - DNA, 100 bp, Homo sapiens
ggtgagacctgcctgaatggcgggaagtgtgaagcggccaatggcacggaggcctgcgtggctctctttacctatgaaggcaacagcaatgacatccgcg

SEQ ID NO: 204228 - DNA, 90 bp, Homo sapiens
ggaggggctgctggacctcagctacccccgcacccacgcggccctgctgaaagtggcgcaaatggccctggccaacgtcaacattgggag

SEQ ID NO: 204229 - DNA, 88 bp, Homo sapiens
agttttctgtcctccttgtttgcacggagcagcaaacgcagagacaaaagaaacgggccccgactgacctctgctcttccaggcaagt

SEQ ID NO: 204230 - DNA, 98 bp, Homo sapiens
ccaaccagcagcagccatcatggagggctattcacgaaaagcagcagctctagagttcttaaaccgctttgaagaagccaagcgaacctatgaggagg

SEQ ID NO: 204231 - DNA, 90 bp, Homo sapiens
atctgctccgatgaccaaaccagtgacagtggtggcaccacaatctcctaccttccaaggtgaaatgacaatggatgctctgttggctcg

SEQ ID NO: 204232 - DNA, 50 bp, Homo sapiens
cgcttcggggaggcagattaagaactgtggattctcaatatcctcctgtt

SEQ ID NO: 204233 - DNA, 132 bp, Homo sapiens
tacaaggaagggcaggatgtacccctgaaaccggatgctgagtaccctgaatggaaagccatcaccaagtcgggcctccagcacctggccccccctccgcccacccctggggccccgtgcagcgagtcagag

SEQ ID NO: 204234 - DNA, 50 bp, Homo sapiens
ggccttactccttcacagatcgcaaaagatacagatattgtggatgaagc

SEQ ID NO: 204235 - DNA, 90 bp, Homo sapiens
gaagaatattataatgtcacagttcaggcccagtcatatatgcacagttagaccactccggcggacatcacagtgacaagattaacaagt

SEQ ID NO: 204236 - DNA, 50 bp, Homo sapiens
caaagctgttgtctcagggagcacagaagcagatcgggagcggtgccgag

SEQ ID NO: 204237 - DNA, 90 bp, Homo sapiens
gctaaagcagcgtgcgttcagccctggggcctccccatggccacccatggaccagtcggcattcacttcctcccttctgcggcccataaa

SEQ ID NO: 204238 - DNA, 100 bp, Homo sapiens
tggatgtccttgagttcaaccagagttttgctgctaatgggattcaagcgcatccagaaagtagtactggatctgatgcccgaactactgctgaatcaca

SEQ ID NO: 204239 - DNA, 75 bp, Homo sapiens
ttgactatacaaaacaccctgctaaaccaggtacagtagcagagggagctcccattattccaatttcagctcagc

SEQ ID NO: 204240 - DNA, 75 bp, Homo sapiens
ggatacacacatattcatcatcatgggtgcatcggtatatgaagacctgaggtataagctctcgctagagttccc

SEQ ID NO: 204241 - DNA, 88 bp, Homo sapiens
cttgtgacgttgtggagatggggagcgtcctggggctgtgctccatggcgagctggagcactgcagcctgtggtgttgaggctcacag

SEQ ID NO: 204242 - DNA, 100 bp, Homo sapiens
tgtggaacaggaccttaaggagaaggaagatactattaaacagaggacaagtgaggttcaggtttttcgttggaatatacgttgcacatttatggcgatt

SEQ ID NO: 204243 - DNA, 89 bp, Homo sapiens
tggagacggcctgggtgctggcgaagcggaggccggagactttgagaatcactacaagaaaaactccttgtggtgaaggttctaagacg

SEQ ID NO: 204244 - DNA, 100 bp, Homo sapiens
gggcactacgctggagaagatgcaacggtgccgacgccaccgccgagcccatgatcctggaacagtacgtggtggtgtccaactataagaagcaggagaa

SEQ ID NO: 204245 - DNA, 106 bp, Homo sapiens
cgccgggtgcctcgagggcgcgaggccagcccgcctgcccagcccgggaccagcctccccgcgcagcctggcaggtactccaaagattcaggtttactcacgtcat

SEQ ID NO: 204246 - DNA, 75 bp, Homo sapiens
cccacctgtgtcctggttgagggtctccagggttctttggggcccgaggcaattgctggctactttgatatatat

SEQ ID NO: 204247 - DNA, 83 bp, Homo sapiens
cagtcttcccgcgtccgccgattcctcctccttggtcgccgcgtccttggctggcgtgaattcatgatttgttcctgtagctg

SEQ ID NO: 204248 - DNA, 75 bp, Homo sapiens
tacagaggagaaagaagaagaagatatttatgaagtcttgccagggtctcactgtgccacccagctggagtatag

SEQ ID NO: 204249 - DNA, 96 bp, Homo sapiens
gagctgcagcgaagcacctctttacgtgatttgatgaaggctgctgcaggagagttcgcagatgatccctgctcttctgtgaagcgaggcaacatg

SEQ ID NO: 204250 - DNA, 75 bp, Homo sapiens
taccagggccggaggattaccatcaccggaaggctgacaaagaagagaaccaaagtccagaagaagtcactgctt

SEQ ID NO: 204251 - DNA, 100 bp, Homo sapiens
tagaaggcaaaagagggaggagatgcgactcgaagcagaaaggaaagatgaatgggagggctgattttcgagagccgaatgcagaggttccaagaccaat

SEQ ID NO: 204252 - DNA, 90 bp, Homo sapiens
gtgattttgatagaagactttcgagagtgtatacaaatgacaggtccttttggaataaatcatgggattgagcttcattcagatgtggtg

SEQ ID NO: 204253 - DNA, 75 bp, Homo sapiens
gcgcctgtagctcgcgggcctcgcagattccaagaaaggtggtgtatgaccagctcaatcagatcctggtgtcag

SEQ ID NO: 204254 - DNA, 100 bp, Homo sapiens
aagaaatcaagtacttcagtaagagatggggaatgtttacccttgcggaagttgcatcacttaatgacattcagccaacttaccgaatcctgaaaccatg

SEQ ID NO: 204255 - DNA, 90 bp, Homo sapiens
gataatgaaggaagaaaacacaggagccggagcagaagcaaagagggatcatagacggtatttctatgtaaacgaacagtcgggcgagtc

SEQ ID NO: 204256 - DNA, 75 bp, Homo sapiens
ttgattatgagcaactcagcgaattgctgattgtggtggtgccatgcagcaagaatcagagagatgcagagttag

SEQ ID NO: 204257 - DNA, 100 bp, Homo sapiens
tggagcctctgattgggtttcggagtccggtactggagccaatcagcgcgggcagcgaaccgggggagcgaggcacgggctacaatagaagtatctcccg

SEQ ID NO: 204258 - DNA, 85 bp, Homo sapiens
cagaaggagcaggctctgcgggaggtggagcacctgaagagatgccagcagattgaaaatattgaacttcccatggatacaaaaa

SEQ ID NO: 204259 - DNA, 75 bp, Homo sapiens
cctcggccgaccagggacctgcccgcctgcggctgctccgggtgaatgtaagacctttacttccttccaccaaac

SEQ ID NO: 204260 - DNA, 92 bp, Homo sapiens
tgaagagcgacaagccgctggcagccgcggatctcaccgccgctcaggatcttcgtgaagactctgactggtaagaccatcaccctcgaggt

SEQ ID NO: 204261 - DNA, 100 bp, Homo sapiens
acaacgaagccaccggcgtgtgccccgacggcgacgatgccggtggtggtgtgcacattgagccccggtatagacagttcccccagctgaccagatccca

SEQ ID NO: 204262 - DNA, 80 bp, Homo sapiens
atccagcaaggtcggcagagcaaggggcttacgcagaaggacctggccacgttcaaatctgaacatcaatgatgtactag

SEQ ID NO: 204263 - DNA, 82 bp, Homo sapiens
ccagacccggacgacccccattgctgagccagcggagctgcttggatacaatgtctctttgctatatgaccttgaaaatctt

SEQ ID NO: 204264 - DNA, 90 bp, Homo sapiens
atggcggcaggggagagcatggctcagcggatggtctgggtggacctggagctgagttacgcagcgtgacaaatggtcagtctaaccaac

SEQ ID NO: 204265 - DNA, 88 bp, Homo sapiens
tctgagctcagacctgccaatttaccagagataattgataacaccctgtaacagctgaaactgataaatttcaaacggaagagagtgg

SEQ ID NO: 204266 - DNA, 100 bp, Homo sapiens
gttttctctctcctttttggagacagattcgcagtggtcgcttcttctccttgaaccaaaaacttttgctagaaaatcagcttttacgagagaaaactca

SEQ ID NO: 204267 - DNA, 75 bp, Homo sapiens
tcagaagacagagggttttcttttgaggtgtacaagggagaagaagccacattccaaatctcaggcctccagacc

SEQ ID NO: 204268 - DNA, 98 bp, Homo sapiens
gccgcgtgcagggcacccgctggcgccacggccaggacacttgccttgcgccatggactggcagccagacgagcagggcctgcagcaggtcctgcagc

SEQ ID NO: 204269 - DNA, 96 bp, Homo sapiens
cgggcagaggatgcagtggaggccatcaggggccttgataacacagagtttcaaggttttaaaatcaaagatgggaaaatcggagaaaattgccct

SEQ ID NO: 204270 - DNA, 75 bp, Homo sapiens
aaaaatccagaagtacaagcagtctgccacataaagaagatccctaatagtcatttctcaacaattatatagtca

SEQ ID NO: 204271 - DNA, 75 bp, Homo sapiens
tccgtgaaccttagggacaacaccgggacacccgcgaggccggaaaatggtagctcgtaagctggtcatcctgga

SEQ ID NO: 204272 - DNA, 118 bp, Homo sapiens
gcaaccattgacgccatgtcgggttattcgagtgaccgagaccgcggccgggaccgagggtcgcgtggggcaggcagtggcgctgcgggccaaggccttcggcttcaacgtgctcttc

SEQ ID NO: 204273 - DNA, 119 bp, Homo sapiens
gtgggatgtcagtactggcatgtgccttatgaccctcttccgatgaagttaaattccgtcaagatttaatgaatattgcgggcacaacattatcctcaaaacttcttactcatcacaaa

SEQ ID NO: 204274 - DNA, 74 bp, Homo sapiens
gagaaaggtgcccccgaagtgaaagagatggcctggtggaaagcctgggtgctaaagagattgatatcgcagcg

SEQ ID NO: 204275 - DNA, 83 bp, Homo sapiens
ccggggacacagggcagcccgcagaggacagcgaccacgatggagtttcactatgttgcccaggctgatctggaactcctgac

SEQ ID NO: 204276 - DNA, 83 bp, Homo sapiens
ttcgtcttggtaaacttggtaggacgggaggggcaagctgcggccaaccaaggccaagagcgagcggaagaagaagagcttcg

SEQ ID NO: 204277 - DNA, 90 bp, Homo sapiens
ccagcttcagtggcctgtcgttggaagagtacaagctgatcctgtccacagtgaagaatgcaaattgcacatcagattttgaggaatact

SEQ ID NO: 204278 - DNA, 98 bp, Homo sapiens
gacagttttggggtggtctttctcagagcttacaagaccctatgaaaaaattagttgagaaagaagagaagaagaaaatcaaccagcaggaaagtaca

SEQ ID NO: 204279 - DNA, 101 bp, Homo sapiens
ggtaatccaagcctcggcaggtacagttcctccctcagggtttggaaatcccttgtctccaggttgctgggattgacttcttgctcaattgaaacactcat

SEQ ID NO: 204280 - DNA, 100 bp, Homo sapiens
ggcaattgacctcacctcaagcacacccaatggacagcatgcctcaccaagtcacatgacaagcaggtcccgggattcttgagctgtgcccagctgacga

SEQ ID NO: 204281 - DNA, 75 bp, Homo sapiens
gagccactcccgtcctgggtcgctcggctacttgtgtgcgagacagagccactctttctatcctggctgttagga

SEQ ID NO: 204282 - DNA, 74 bp, Homo sapiens
aagaaccaaccctgccagcacctggaccttggacattcagacttcagaatgcttagcagtgtctgcaaaaacga

SEQ ID NO: 204283 - DNA, 83 bp, Homo sapiens
cggcgccgaggcggccacccgagacgcggcgcgcacgctccggcctgcgggactggtgattgcagctggaagtgcccatgacc

SEQ ID NO: 204284 - DNA, 75 bp, Homo sapiens
gaagtcatttctactggacttcatgcttagatacatgtataacaagggtcatgtaggtacaacagcaaccaagaa

SEQ ID NO: 204285 - DNA, 98 bp, Homo sapiens
gcgccgcctcctgccacaccatgggcagcgcagaggacgcagtcaaagagaaactgctgtggaacgtgaagaaggagagacacctatggctgccgatg

SEQ ID NO: 204286 - DNA, 100 bp, Homo sapiens
aatgcagtcagtctgttgatgaaactataacccccagtcggatcttcaggcccaggatagatgtcatagaattggtcagacaaagccagttgttgtttat

SEQ ID NO: 204287 - DNA, 100 bp, Homo sapiens
cagacagtgttggaggattcagatacaacgtgctatgggaagagggcaaggcagccttggagcagctgcttaagttcatggtgcaccctgccatctcctc

SEQ ID NO: 204288 - DNA, 100 bp, Homo sapiens
ctggatatccccctgctgtttgagaccaagaagttgctcaagtacatgaagcacaccgtggtagtatactgtggtttgagtccagccaatgacactggag

SEQ ID NO: 204289 - DNA, 100 bp, Homo sapiens
gggcggcgcggcccagctcgttccagatttatcagcaagactgttgaacgcataactgcccaagatgcctgtccctccccctccagcacccccgccgccc

SEQ ID NO: 204290 - DNA, 100 bp, Homo sapiens
cacctgcaaccccaatctcaatccggaggccagtagcaccaggatatgtcttgtgaagacattcagtgaagcttgcctgatggtaaggaaaccagcccta

SEQ ID NO: 204291 - DNA, 74 bp, Homo sapiens
aagagagtcaccgaccatgacgggaatactcccccagttgcaagaggcgcaggaccgtggaagacttcaacaaa

SEQ ID NO: 204292 - DNA, 50 bp, Homo sapiens
gtggtgaggcttcccgtcatattccagaaactggcaagatgtttacctgg

SEQ ID NO: 204293 - DNA, 98 bp, Homo sapiens
ctgagcctgacgcgggccgcgcggggcttgctctcaattttgcgcaagttgaaaagtgcaccagaccaggaggtgagaatacttctcctgggcttgga

SEQ ID NO: 204294 - DNA, 100 bp, Homo sapiens
cagaaggcgtctcatggcgttggaataccggctctcagcggctcccaccttgggacaccttgactccaagcccagcagtaagtccaacatgattcggggc

SEQ ID NO: 204295 - DNA, 75 bp, Homo sapiens
ctgaacttccctggtcgaacagttttttctaatggctattcaaggtaattgatcaccctagacccagggacaccc

SEQ ID NO: 204296 - DNA, 100 bp, Homo sapiens
ccctgcgttgtaccatccgcctgtgggacacctaccagcggctatgtgactacgtttgtgacctcctcttagaagagtcaaatgttcagccagtatcaac

SEQ ID NO: 204297 - DNA, 75 bp, Homo sapiens
gtgatgaggaaagctgtgaaagttctcaagaagtgcctagctgccactccatttatatgaggcaagaaggcttcc

SEQ ID NO: 204298 - DNA, 83 bp, Homo sapiens
cttagctgtgctcgcgctactctctctttctggcctggaggctatccagccgagggcggcactgctcacaggacggctaccca

SEQ ID NO: 204299 - DNA, 100 bp, Homo sapiens
tcctatgagctcctctctggcaggtgtcccgacccaggctaagcttgagcatggctgagcaggagcccacagccgagcagctggcccagattgcagcgga

SEQ ID NO: 204300 - DNA, 90 bp, Homo sapiens
gtcccactcctcaggccggggcgcacgtcggctcccacgcttagccagctcccggtggaagttgatgggtcgaaactaaatgtgaccagc

SEQ ID NO: 204301 - DNA, 100 bp, Homo sapiens
cttgtatctacggtggtgctcctaagggaccacaaatacgtgatttggagagaggtgtggatgaggtcaccattgtcaacattttgaccaaccgcagcaa

SEQ ID NO: 204302 - DNA, 98 bp, Homo sapiens
aagtagctgatgaagataacagtgaaatatcagattcagaggatgacagttgcaaacatatggcatccaggagaaagatgtcttgccccttctccaga

SEQ ID NO: 204303 - DNA, 82 bp, Homo sapiens
gcctgcagcgggagctggacggcgagcgcgagcggcgcgagaaagaggagcagcccccacaacatcgatccaagaggggggg

SEQ ID NO: 204304 - DNA, 114 bp, Homo sapiens
ggatgtgttgtgttcctggcttccctctggatgctgacagaaacaaggctatcatggtgaacttacttcagattgtgcgggaccactgggttcatgttcttgtccctatgggat

SEQ ID NO: 204305 - DNA, 75 bp, Homo sapiens
cgcagatcggagacggggcctggagatgtcggtgcagatctcttgtccatgtgccagcgaaacattgccctcaac

SEQ ID NO: 204306 - DNA, 100 bp, Homo sapiens
agattgctgttcctccttagaccacccgacagaccagaaactcatcccagagttcattaagaaggactcatctgatgatgtgagaagagttcagaggagg

SEQ ID NO: 204307 - DNA, 74 bp, Homo sapiens
atccccagcaaaaagctccgcaacaagatagcaggtgcttcttcgggcggaggaggaagtaggggtgcacctca

SEQ ID NO: 204308 - DNA, 75 bp, Homo sapiens
tcgagagctaccgcgccagacaggagcttactccacgggaacagcctctagataatctgagttgttgaaaatacg

SEQ ID NO: 204309 - DNA, 100 bp, Homo sapiens
attgtgtcttccccggccggtccctcgcctcccggccgagctgacgctccatctgatccactggaactccactctgtttggcagcattgatgaggctgtg

SEQ ID NO: 204310 - DNA, 98 bp, Homo sapiens
caaggaagatgagctgtcctttcaggaaggagccattatttatgtcatcaagaagaatgacgatgagtcaagggtccagagaaggaggagaagttgag

SEQ ID NO: 204311 - DNA, 100 bp, Homo sapiens
gctcgtctacttcctcagcagcaccttcaagcagtggcagaaatctgaagctatcatggaacaattgaagtcttttcaaataattgctcatctaaagcgt

SEQ ID NO: 204312 - DNA, 75 bp, Homo sapiens
gaagctacaaaatatgctcgatggatagcattcactggaaagatgaatgtgaaggtgctggactttgagcacttt

SEQ ID NO: 204313 - DNA, 74 bp, Homo sapiens
ccggacgagctgtgcaaacactccagatggaactccagcagatcatgaaggggggcagtacccaaaggaaacgc

SEQ ID NO: 204314 - DNA, 100 bp, Homo sapiens
acgaagggacggacgcagcccgggccgccatcgccttctcctttttctccatcttcacctggtgtcacaccatgtctgaccggaaggcagtgatcaagaa

SEQ ID NO: 204315 - DNA, 101 bp, Homo sapiens
catcagagctacttttcaacagccttctcaattttctttctcagaaagcagaggctcagagcttggagacagacgatagaatgagtccatttaagtcccag

SEQ ID NO: 204316 - DNA, 100 bp, Homo sapiens
atcacttcagtgcctcagagtgcagttcccaaggaggcttcaagacaaagggccccttacacaccagacaggttatacattggctcttcaaagacgttca

SEQ ID NO: 204317 - DNA, 98 bp, Homo sapiens
ggaactcagcagcggaggctggacgcttgcatggcgcttgagaaaacatcctgggatggcacgggtccaagtcacattccacagagcagctgaaaaat

SEQ ID NO: 204318 - DNA, 75 bp, Homo sapiens
cttagctgctcacatatggatactttcacagttcagtttctcttcagcaacgggtagcagaattggaaaaaatta

SEQ ID NO: 204319 - DNA, 99 bp, Homo sapiens
tcaaagaagtcttgaagagggccactgtggctccggaagatgtgtctgaggtcatctttggacatgtcttggcagcagatgtttttatacctatgccag

SEQ ID NO: 204320 - DNA, 105 bp, Homo sapiens
gcattttgctgtctcctcctaatacgggtcataatcgtatcattgcctacagtagaccagtttatttctgcatatgttgcggtcttatttggctcttggattatg

SEQ ID NO: 204321 - DNA, 100 bp, Homo sapiens
ctgctccggcgcggagcccagagccggttcggcgcgtcgactgcccagagtccgcggccggggcgcgggagatttatgtgatcagtttggctgaaccccg

SEQ ID NO: 204322 - DNA, 101 bp, Homo sapiens
ttgctgctgatgaagatgatgacgatgatgatgaagaggatgatgatgaagaagagtggtcacggctgaacaatttcaagaagcgagtcgatgtctcatct

SEQ ID NO: 204323 - DNA, 100 bp, Homo sapiens
tctttcctttccgtctggcggcagccatcagaactgaagcgctgcggcatggcgcgcgcctgcctccaggccgtcaagtacctcatgttcgccttcaacc

SEQ ID NO: 204324 - DNA, 134 bp, Homo sapiens
gatgggggcccacagccaccgcccggcgcccgagaggccacctgcgtgctagaggcaaacttttgtctctctcgaaacatgatcaggggcaagtcttgttggatgtcgtcttcaagcatctagatttgactgag

SEQ ID NO: 204325 - DNA, 82 bp, Homo sapiens
cgccgctgcccatggagggagtggacatcagccccaaacaggacgaaggcgtgctgaagacctgcctagagctggaacgtta

SEQ ID NO: 204326 - DNA, 100 bp, Homo sapiens
gctgaccgcgggccctgccctgggctggaacgaccctggcacaattctgctttcccaggaactgcatcactcaggactctgcaagtttccagaagtaaga

SEQ ID NO: 204327 - DNA, 100 bp, Homo sapiens
ggaagtaatgttggagaactacatcaacctagtatcaataggttacttcaatgatgtggaccgtgatgacggacgctacccgcccaggcccaggccacgg

SEQ ID NO: 204328 - DNA, 75 bp, Homo sapiens
gggcactcagagagaaggcatgtctttggggagtcagatgaggcccgggaccgtggcgcttcgagagattcgtcg

SEQ ID NO: 204329 - DNA, 98 bp, Homo sapiens
tgcagagcgtgtccaagctgctgctggttatcagctgtgtgacaaggctcatcccaggaggatccatgatgctttatgaagacagtcccaacagccca

SEQ ID NO: 204330 - DNA, 100 bp, Homo sapiens
atgaaggcacaccactgaaatgaacacccatctcggctttctcgcaagataacatctatgaagttcagcccccaagagtagacagaaaatctacagagat

SEQ ID NO: 204331 - DNA, 75 bp, Homo sapiens
tttctatccgtccgcgtcagcgccttgccaccctcatctccaatatgagagacttgataaatcggcctgagaaaa

SEQ ID NO: 204332 - DNA, 100 bp, Homo sapiens
gggagcacgtcatctccatcgagggtcgcctgcgaggccgctggccaggcctgagcctctgccaccatggccattgtgcagactctgccagtgccactgg

SEQ ID NO: 204333 - DNA, 95 bp, Homo sapiens
gaggaagatgcctagcacagaccttctgatgttggtaaacctagcctttaagcaacctggaaagaggctagaacaccaaggaattagaattgaat

SEQ ID NO: 204334 - DNA, 95 bp, Homo sapiens
taactggggctacgactctgatgggcagctgataccccaatgtccttctttgactttgtggttgatcctcattctttcccccgtacagtggaaaa

SEQ ID NO: 204335 - DNA, 82 bp, Homo sapiens
ttgaagtttgtggatgaaaattgggaaggttccctcaagtccaagtttaaaattggtggtgaatggtggacatggatcgatt

SEQ ID NO: 204336 - DNA, 100 bp, Homo sapiens
tgacggaggagcttgtaccaccgtgaggtgctggcggaggagtccatagtatgtctgcagaaagccctaaatcaccttcgggaaatatgggagctaattg

SEQ ID NO: 204337 - DNA, 100 bp, Homo sapiens
cgccgccactgccgcaggaggcgtgaggtcactgcagccagaggggtccagaagagagaggaggcactgcctccactacagcaactgcacccacgatgca

SEQ ID NO: 204338 - DNA, 98 bp, Homo sapiens
agtgatcgctcagctggagaacgcggctaaagttctgatgattcgccatgaagtcagcgtaaataatgtaacacataaactgtgcagtaaccattgct

SEQ ID NO: 204339 - DNA, 100 bp, Homo sapiens
ggagggggccctgagcctcctgcaacacctgcggcctcactgggacccccaggaggtgaccctgcaggaatctaaggccgctgctccagctcctgtgtcg

SEQ ID NO: 204340 - DNA, 100 bp, Homo sapiens
agaaactagagcaaataaccgttttgaaattgtttctgggtgtctctggggagcccctgggccagattttcctctagactccagcccatctcttcagagc

SEQ ID NO: 204341 - DNA, 101 bp, Homo sapiens
caagcccaggagttgacatttctctgcccagccatgggcctcaccctgctcttgctgctgctcctgggactagaagaaatatggctacacacacctttctg

SEQ ID NO: 204342 - DNA, 71 bp, Homo sapiens
tgtactatctccacagaatgggcatcgtccacagagacctcaaggccttttcagatattaatggcaaagtt

SEQ ID NO: 204343 - DNA, 75 bp, Homo sapiens
gaactccaagccaaaatcacagctttgagtgagaaacagggaagcccgtcagcctgagctacagatgcccatgcc

SEQ ID NO: 204344 - DNA, 100 bp, Homo sapiens
tgcctaccaagaagtctcagatcttttctacagcttctgataatcaaccaactgttacaatcaaggtctatgaaggagcgagcccagggcgtggtgctga

SEQ ID NO: 204345 - DNA, 82 bp, Homo sapiens
ggagagaagaagcgcaggcacaggaagctggtgacggcgatgaacgtgtactaatggtcacttgatgtgcgctggctgtttt

SEQ ID NO: 204346 - DNA, 100 bp, Homo sapiens
cgtgggcgtaggaccctccaagccagagaagaagctggaggagttctccgtggaagaggccgaggtgctacagatcctcacacaggtcaacgtggtgcga

SEQ ID NO: 204347 - DNA, 100 bp, Homo sapiens
ctgatgaagacattcgagagacatatggctacgacatgaaggcaacagttaatgcccgggcaaaccaggatcttgcccttctgtgtgaggtccgtgacag

SEQ ID NO: 204348 - DNA, 90 bp, Homo sapiens
ggtgtatggccgtgggcatctcctacattagcgtctacgaccaccaaggtcttcgccaactatagttagtaacaaaagagtcagtaagag

SEQ ID NO: 204349 - DNA, 83 bp, Homo sapiens
ggccttcggcaagtaccgggatggggactttgaagacgagttgtactgctgtcacaggaaatggacgctggattacaagcatg

SEQ ID NO: 204350 - DNA, 101 bp, Homo sapiens
gcagatgctgggggaggaggcccaggaggccctgcaggagtgatgtggagggactgggaagagtcacggcagatggtgggagctctactggaagatcgggc

SEQ ID NO: 204351 - DNA, 80 bp, Homo sapiens
ctgcaacacctgcggcctcactgggacccccaggaggtgaccctgcaggtcaagtacaaaagagattttgaagaaagcaa

SEQ ID NO: 204352 - DNA, 74 bp, Homo sapiens
gggagtggacatcagccccaaacaggacgaaggcgtgctgaaggccaggtcagagcagcccaccatgggatggg

SEQ ID NO: 204353 - DNA, 75 bp, Homo sapiens
gatgaatgcaagaggcgtttctataagaattgaaatggtggtgaatctacagaaacaatttagcacactggtcga

SEQ ID NO: 204354 - DNA, 101 bp, Homo sapiens
atttccaaacaaggacatggagggaaggcttcctaaggtctgggaccaagtaaaggcttccaaccctgacctaaagttgtgggagattggcaagattattg

SEQ ID NO: 204355 - DNA, 100 bp, Homo sapiens
agaaggacatgcaaaacttgcagattttggggtagcaggtcaacttacactttactgtctttcacaagcgccttttatatcctgtcaatcatctgtgtcg

SEQ ID NO: 204356 - DNA, 100 bp, Homo sapiens
tggttcctgctgtggttttgatcatgttgttaccctcggacgtagcccggcttgtattggatcacagttgaaaactttggtgcaacagaagtgaaagagc

SEQ ID NO: 204357 - DNA, 80 bp, Homo sapiens
tgccgtctgctcttctgcctcttgatctccgccaccgtcttcaggccagctcctgactacaggtccattctgagcattag

SEQ ID NO: 204358 - DNA, 82 bp, Homo sapiens
ccgaaactttcaccgcgagcgggggcagaaccccttcgagctggccttctccctagaccagcccgaccacggagactctgac

SEQ ID NO: 204359 - DNA, 75 bp, Homo sapiens
gcaggacttccaaggagagcatgtcggaggctgatcgcgcccagaaggaatgctgtctctgcaatttgagaggag

SEQ ID NO: 204360 - DNA, 100 bp, Homo sapiens
tgggaagtgtgttgctggaaaagaccccttatccctctggacagaatgcaggtccaaccacgctggtataccctcaaacccctcagacaatgaattcaca

SEQ ID NO: 204361 - DNA, 101 bp, Homo sapiens
cggaccttcagctgccgcggtcgctccgagcggcgggccgcagagggctgccaggcgcccagctgtgcccagatggatgggacagagacccggcagcggag

SEQ ID NO: 204362 - DNA, 75 bp, Homo sapiens
ggaagatggaccaaagcgatacaggccctccagaatttccacagcatacacctggacctgttcccaacagtttca

SEQ ID NO: 204363 - DNA, 50 bp, Homo sapiens
tcattgccttgaaccctctctacagcctgaagactaagaagtgggtgaat

SEQ ID NO: 204364 - DNA, 50 bp, Homo sapiens
tgcctccttcccgccgccccctgggaaatcttctctacatataccctcag

SEQ ID NO: 204365 - DNA, 83 bp, Homo sapiens
attctacaagagcctcactaatgactgggaagaccacttggcagtcaagcagcgctggagagcgaggtggcttcaataagcct

SEQ ID NO: 204366 - DNA, 100 bp, Homo sapiens
tagttctaagcaaaaaattccagcagatggagtccacaggatcagagtggactttaaggtcccacgtcctgatggaaagcctgacaaccttggcctattg

SEQ ID NO: 204367 - DNA, 50 bp, Homo sapiens
cacaacctcaaacccgttctccgacattagaccagctcccactcaccaac

SEQ ID NO: 204368 - DNA, 98 bp, Homo sapiens
cctgttcacggtgaccttcgcttggtgtcctcctggcctcagcaacctgacaattctgtcgtgtcccggtggagtaactaatacggcacaatatcaga

SEQ ID NO: 204369 - DNA, 82 bp, Homo sapiens
gtggactccttcggcagtccacccaccgccgccgcctcccagttcgtgtttagtaggagcacagtagctgtttggggaacga

SEQ ID NO: 204370 - DNA, 83 bp, Homo sapiens
aggtctctggagacatcttcagcaggtgatgtgtccaatctagatcccaacttctcatttgaaggcaccaaactggatgtggg

SEQ ID NO: 204371 - DNA, 100 bp, Homo sapiens
gaacgtgctcttcgctcacctggatgacaacgagaggagccgtgcaggaggagcggcagcgtggcaaggaccggaacgagaatgaggtggagtcgaccag

SEQ ID NO: 204372 - DNA, 75 bp, Homo sapiens
cccatgagtgcctggtcatcggagcgcttgaaagtgcattcaaggaaatggatgtctccccgttcaatgttgtgg

SEQ ID NO: 204373 - DNA, 89 bp, Homo sapiens
ggagcacgtccaggctgaccacgagcttttcctccaggcctttgagaccacccaggctactttgggaaagttggtatgaagcattacca

SEQ ID NO: 204374 - DNA, 75 bp, Homo sapiens
cttgtgaccctgcagctcctcaaaggcctgatcaagatccggggggaccggtgctggcgagacctcacctgcatg

SEQ ID NO: 204375 - DNA, 51 bp, Homo sapiens
gaagctggagttcgaggacgaagttcacacaaaagatgttggacaatttct

SEQ ID NO: 204376 - DNA, 90 bp, Homo sapiens
cacccgccttgagcccacctggagcatcatcaaaatcattgcccagaagagagcctgtgacactgccacctgtgtgactcatcggctggc

SEQ ID NO: 204377 - DNA, 74 bp, Homo sapiens
ctggtgtcacctatcagtaaaagaatgaactctggaagcccagccagggacaatgcaccttcacagagattctg

SEQ ID NO: 204378 - DNA, 82 bp, Homo sapiens
cccgtccgtccgccgccaccacccactccggacacaggcccagctgagagccagcctggaggttacccagcagcaggccacc

SEQ ID NO: 204379 - DNA, 51 bp, Homo sapiens
tgctgtttgtattccagagactagctatcagttgagggatttgcagttgat

SEQ ID NO: 204380 - DNA, 51 bp, Homo sapiens
ggtcctcgtggatcagactacagacttacagccagctggcccaccccatcc

SEQ ID NO: 204381 - DNA, 73 bp, Homo sapiens
tgctcttccggatgagaagtgcttagattctggatacattttgaaggacggcgggacccggaggctggagaag

SEQ ID NO: 204382 - DNA, 75 bp, Homo sapiens
cgctggagcgggcggagctgtgcgagagcctcctcacttggtgccggatggagtgctgtgatgtgccagccgaga

SEQ ID NO: 204383 - DNA, 83 bp, Homo sapiens
gtggactactctcagcctactatctgtctggagaagaggattatattccatcacaacaagatattctgcttgccagaagaccc

SEQ ID NO: 204384 - DNA, 83 bp, Homo sapiens
cctgatgccaacagtgtaccagcagggcgttggctatgtgcccatcacagatgatatcatcaagttgaatcgaaaggaaggga

SEQ ID NO: 204385 - DNA, 83 bp, Homo sapiens
cgagagctcgccccgaacgggggtcttcctcctccgccgttgacagttggttgaatctggcgatgtggaacccatggatatgg

SEQ ID NO: 204386 - DNA, 100 bp, Homo sapiens
catctccatcaagggtcctgagctgctcaccatgtggtttggggagtctgaggccaatgtcagagaaatctttgacaagatgcaagtgctgctggaccag

SEQ ID NO: 204387 - DNA, 100 bp, Homo sapiens
caagaagttgagaccgagaatgtggaaacaggcaagccaaattagagctgagagttgctgtagcaaaagtggaagagttaactaatgtgactgaagatct

SEQ ID NO: 204388 - DNA, 100 bp, Homo sapiens
cttggttatgacagtggaaccggggtttggagggcagaaattcatggaagatatgatgccaaaggtgtttgatgcgatcatgaatttcaagaaagaggag

SEQ ID NO: 204389 - DNA, 50 bp, Homo sapiens
ggactgcagcctcggcggtcagcaggtctgtgtatgatgaccaaccaaat

SEQ ID NO: 204390 - DNA, 98 bp, Homo sapiens
ggaaagtgaggaattttgaagtacaccgtggtgacattgtatcattggtgtccttccatagtgacgccccccaaggacatctggaatgtcactggtgc

SEQ ID NO: 204391 - DNA, 98 bp, Homo sapiens
taggcagtgctacaagggatcaagatcagctccaggcctgggaaagtgaaggttttgcaaaccgtttttcaaaacccaaaggaccaaggaatccacca

SEQ ID NO: 204392 - DNA, 90 bp, Homo sapiens
ctggcgctgtcgccggctgcagtggccgccgctggagaccgcgggacctggcgctgcagcgagatgagctcacagtgcctgcactttacc

SEQ ID NO: 204393 - DNA, 100 bp, Homo sapiens
ccgtgccaccctgagtgtcagccccagaatggctcagtgacctgttttggaccgtactcccctgccctcaacaagatgttttgccaactggccaagacct

SEQ ID NO: 204394 - DNA, 126 bp, Homo sapiens
cacacagctgcttccattggccagtatgaagtggtgaaggagtgtgtgcagcgtcaccattactttaagtactgcaaaatctcagcattggctctgctgaagatggtgatgcatgccagatcggga

SEQ ID NO: 204395 - DNA, 90 bp, Homo sapiens
ctccagctagcaaatgacagtgttaacaggctggagcagccctacttcagcgccaacgcccagttcttccaggcgctgagccagtgcccc

SEQ ID NO: 204396 - DNA, 90 bp, Homo sapiens
gatacaaggctacacagagacagatcaaagcagctcagatgagagtcctgccaaagcagaattttttcagcatttgattgaagaccggac

SEQ ID NO: 204397 - DNA, 101 bp, Homo sapiens
cctttctacaacccgttccagttcgagatcaccttcgagtgcatcgaggacctgtctgaaggtactccaaagattcaggtttactcacgtcatccagcaga

SEQ ID NO: 204398 - DNA, 87 bp, Homo sapiens
gctgtggatgaatttgcttttctggaagtgccgcagaatggaattcggcattgttcctacacagcttctcggcaacatctctatgtt

SEQ ID NO: 204399 - DNA, 90 bp, Homo sapiens
cagaagtggcccagcattaccaagacacgctgattagagcgaagagagagaaagcccaggtcggattattgtccttatgaaatagttaaa

SEQ ID NO: 204400 - DNA, 144 bp, Homo sapiens
ggccaaggctgtgctcaagcatttcaacgtgcgtgtcacccacgcagacatcttcagccgctgccagagacaaaagctgggtatggtggctcacgcctataatcccagcattctgggaggctaaggctggcagatcacctgagg

SEQ ID NO: 204401 - DNA, 100 bp, Homo sapiens
tggggaaacatcacccactccatgacttcattttagagctgtaccagacaggttccacagaggagagcgggaagctatccagaagtctgtgacaagaagc

SEQ ID NO: 204402 - DNA, 100 bp, Homo sapiens
aagaaactacctcgtctagcatttccaggcattatgggatcacagtcaccttctatatagcaccatccccaggatgcaggagccggggcagattgtggag

SEQ ID NO: 204403 - DNA, 111 bp, Homo sapiens
acccgtctgacttcccgtccgtgccgagcccactcgagccgcagccatgtctggggacgaggcagaggtggaggagacactgaagcgactgcagagccagaagggagtgca

SEQ ID NO: 204404 - DNA, 90 bp, Homo sapiens
gaaggcagacaagcagcttttcagatgcaaatgcccaaagcagtgtccacaccagcaccagctacaactcagcagtcagctcctgccagc

SEQ ID NO: 204405 - DNA, 75 bp, Homo sapiens
aggaggttcacatctcccacgtgggccagcccatgctgaacttctcgtctccattttgtcagcaatggagctcat

SEQ ID NO: 204406 - DNA, 82 bp, Homo sapiens
ggaagtttgtcctgtcctggatcagtttctttgtcatgtagccaagactggagaaacaatgagaccaagacacattccaccc

SEQ ID NO: 204407 - DNA, 82 bp, Homo sapiens
ccatccactgccgcggccgtgggcccgaccgcggggaccccagtgactcttcgagaagacagtgccaagaggttggagagga

SEQ ID NO: 204408 - DNA, 101 bp, Homo sapiens
acaaagaagagcctgaaagagccaaatcttaccttctggaccatggtgctggtgattgggtgtggcaactcagaactgagtgagcaactgtatgatgtggg

SEQ ID NO: 204409 - DNA, 100 bp, Homo sapiens
tgccgcgcgcccaagctcggcggacggcagtgccccagtgttatccaagataaattctgtgggattataaacatttcagtagaaggcctgcatgatgtca

SEQ ID NO: 204410 - DNA, 50 bp, Homo sapiens
ggatacgctgcaagagattttccagagccccccgggaccctccaggtcag

SEQ ID NO: 204411 - DNA, 75 bp, Homo sapiens
ggcggcgggagcttccgggagggcggctcgcaggccaggtcagagcagcccaccatgggatggggagggggtgga

SEQ ID NO: 204412 - DNA, 74 bp, Homo sapiens
cgaggaatcgccgtggcgtcttggtgttctccacgctggttcgcagggctgattgttgtgacattggccgtatg

SEQ ID NO: 204413 - DNA, 90 bp, Homo sapiens
tggggacagagatgctgaaccagacggacccatcatttaagaggagctgacatggacccaaatcctcgggccgccctggagcgccagcag

SEQ ID NO: 204414 - DNA, 82 bp, Homo sapiens
ggagccgcaaatatgggaactccaatgatgccagataatggagcagtggccttcactattctgtgtgatattttgatgatct

SEQ ID NO: 204415 - DNA, 48 bp, Homo sapiens
gagtatgctccatgtagatcacgaacatcatttacagcgagcaatttc

SEQ ID NO: 204416 - DNA, 71 bp, Homo sapiens
cagaggggagacccctcgggtggaagaagtggggccatacacctacaggatatccgacatgaagccagtga

SEQ ID NO: 204417 - DNA, 98 bp, Homo sapiens
agagtcagcagagcaaccagagttctactacgatgagtttggtttccgtgtgtacaaggaaggacagtcattttgtttactcattcagccctgttgca

SEQ ID NO: 204418 - DNA, 98 bp, Homo sapiens
taggacttgtgcattcaaacatagcaactgagtgcacctggagcagagaggggccctcccgaggaccgcgacgccgagcctcagcctggcagccccgc

SEQ ID NO: 204419 - DNA, 80 bp, Homo sapiens
ccaggagaagttagcttcagagttctttgtggatggacttgattctgatgagaggggcggcgaagaggacccgcaggctg

SEQ ID NO: 204420 - DNA, 90 bp, Homo sapiens
agccccgacgaacatttctgggtgacactcaacaggattcccggaagtatatattcaagcccaggactgtatagtaaaacaatgaccccc

SEQ ID NO: 204421 - DNA, 85 bp, Homo sapiens
atgggttgacctctctctagtagatagacgtgcaatggacacataaaacctctgtagaggagcaggatgcaaccgacaggctgtg

SEQ ID NO: 204422 - DNA, 101 bp, Homo sapiens
cagaaaggggctcatactcatcttatgggagagaatcaaacttacagggttgccaccaggccgccagatcccacccttggacccccatgaaaatggaaaca

SEQ ID NO: 204423 - DNA, 100 bp, Homo sapiens
actatccgtttgttcaggaaccaccagtgacagaaatgtgaaagatgttgcagaagtgttccagaagtggctgaagatagaaggaaaaaagtgccactgc

SEQ ID NO: 204424 - DNA, 100 bp, Homo sapiens
tggagcagaaccccaggactgcgcccccgggagcgggcgcccagagatccagaggaagcaatttacgatgacgttccaagggaaaactcagactctgaac

SEQ ID NO: 204425 - DNA, 80 bp, Homo sapiens
ttgctcctcgccgcggcggggactgcagcagcctcccgcgacgatgcccctcaacgttagcttcaccaacaggaactatg

SEQ ID NO: 204426 - DNA, 100 bp, Homo sapiens
gcccaaaggcccatgaggggatgcagttatgggctctgtcgccgtgggttatttccgatgttgaagaagatgccggggaactaagcagagagagtatgtg

SEQ ID NO: 204427 - DNA, 100 bp, Homo sapiens
ggtgaagctggagagaatccagtttgttggggcttgtaatccccccacagaccctggaagaaagcccctctcacacagtgagaaagatcagtctaaagaa

SEQ ID NO: 204428 - DNA, 98 bp, Homo sapiens
gaccttcgcttggtgtcctcctggcctcagcaacctgacaattctgtcgtgtcccgtccaaacccctgatacctcttcaaaaagaaactgattcagag

SEQ ID NO: 204429 - DNA, 75 bp, Homo sapiens
gcgagcccttcaccctggtggagcgagacgatagttttgaggcagctgtgccatcaaatagccacattgtttcgg

SEQ ID NO: 204430 - DNA, 75 bp, Homo sapiens
cggagctcccccaagagccggaaagatcccagattacaggaatgcagtaatcgtggccaagtctccagcctcggc

SEQ ID NO: 204431 - DNA, 90 bp, Homo sapiens
cggggctccaggacggcgcccttagcgacaccatgaatagctattcttccagacgggagtctacggatcctaaatgcttccaaatcagac

SEQ ID NO: 204432 - DNA, 59 bp, Homo sapiens
tttggagaacttctggagctggccaacgtgcaggagggctcagaaacacttatgggatt

SEQ ID NO: 204433 - DNA, 75 bp, Homo sapiens
agcagagaggaaaaaacggctatctataataggttttgctgttactgctcagtgtagtcacaccttgaataagaa

SEQ ID NO: 204434 - DNA, 49 bp, Homo sapiens
gcacagaggttgtctgcaagcagcttaaagaaagtggttattgtacagg

SEQ ID NO: 204435 - DNA, 85 bp, Homo sapiens
acagctgggccggagcagccgcgggcgcccgaggggccgagcgagattaaaattgagcttcccattcacctacatcaaaaacatc

SEQ ID NO: 204436 - DNA, 90 bp, Homo sapiens
tgatgctccacagaatgctaagaaagctaggcttctaccagaaggggaggagacgttggaatcagaaagacagcacactggatgctgctg

SEQ ID NO: 204437 - DNA, 100 bp, Homo sapiens
ctgtgtggtctttgtgggaggaataacccagactaggaatgccagcatctgccaagcagctgctgatactttggctgtgaggcaaaaaaggagaatttat

SEQ ID NO: 204438 - DNA, 95 bp, Homo sapiens
aagaggtctacaacccaggtggcagacagtggctatcagcggggggagaacgttactgtggagaaccaaccaagtcttctgtgcttcaccatcta

SEQ ID NO: 204439 - DNA, 100 bp, Homo sapiens
tatggaagtggaatctatcttagtccaatgtcaagcatatcatttggttactcaggcaatgcattagcaggaattcaaattaggacaaacagttgtccaa

SEQ ID NO: 204440 - DNA, 74 bp, Homo sapiens
ttcagtggtgccaagttcatatcctgctggtttaacaggtggcgacatgtctaagaatgtgagccagtcacaga

SEQ ID NO: 204441 - DNA, 100 bp, Homo sapiens
gaaacccaaaatcttggcaaatggtgcaaggtggaaatatatgacgctgcttaatctggagacctgttctgatgatgtgtgtggtcctcaccacactgcc

SEQ ID NO: 204442 - DNA, 95 bp, Homo sapiens
agacgcggcacagagagggcctgggagcttgctgcagcttcagggctgggttacgacccctacaaccctgagctgcccaagccccccgcgcagag

SEQ ID NO: 204443 - DNA, 48 bp, Homo sapiens
aatacctgaaactggagtttatcaaggagccaaggcaaagagggacca

SEQ ID NO: 204444 - DNA, 100 bp, Homo sapiens
ctttgtgaaggtggtgcccactgtgtacatgaaggtggacggagagtctcggaagggtgctgacctggaccgggagaagaaggctgccgagtgcaaggtg

SEQ ID NO: 204445 - DNA, 75 bp, Homo sapiens
aaacgtgtctggctctggatggtcatcagctgttggcaggttcgtgctgtaagacctaaagttcttatgagattg

SEQ ID NO: 204446 - DNA, 82 bp, Homo sapiens
tggccaaagcctgcccagacggctcacctgtgcgggatggaacaaaagtcacccttctagacttcagaccacagacaacctg

SEQ ID NO: 204447 - DNA, 50 bp, Homo sapiens
caaggagatgaccgatggatgtctcaggcaacaattggcattgacttttt

SEQ ID NO: 204448 - DNA, 90 bp, Homo sapiens
agcttcggaagaaggtagaggttctagagaacactaataggaaagcaatctcccgggcaggcctccagcatctggctcctgcacatcccc

SEQ ID NO: 204449 - DNA, 74 bp, Homo sapiens
actacggaaaacctgatcccaaaattattgaaaacactcgaaggaccctttgcagaaatctgcaatgatgccaa

SEQ ID NO: 204450 - DNA, 48 bp, Homo sapiens
accaggctactgtttccccaaacgaatgtgcccgtggagaagctggcc

SEQ ID NO: 204451 - DNA, 91 bp, Homo sapiens
gttgcacagtcgccttttccagtttggagagacgttacaatgcagatcttcgtgaagactctgactggtaagaccatcaccctcgaggttg

SEQ ID NO: 204452 - DNA, 75 bp, Homo sapiens
caacactctggaagtgcaggatgacaatgcttctgtgcttgacgtctatttaggatccttctaaagtaaatattc

SEQ ID NO: 204453 - DNA, 90 bp, Homo sapiens
ggagcccccagcgcagcggccgcgataccggggagaccacgacgctgcctcctgggcgccatgagttcctgttcagcttccagctgcccc

SEQ ID NO: 204454 - DNA, 101 bp, Homo sapiens
cttcgtctttcactgcgccttacagaagaaggtagcaatgtacagataaagagtactttaacgcccatgcgtgttcaagactgttcaagactggtgatttg

SEQ ID NO: 204455 - DNA, 75 bp, Homo sapiens
acggaggctccctttggatgccagtgtcagttgtcagtgatgggcccccgacatgaaactggcactcagaatgaa

SEQ ID NO: 204456 - DNA, 82 bp, Homo sapiens
gggagttcgaggccctgcggagctgcttcgccgctgcgggggatatgagactttctactcggaatatcctgagtgttgcgtg

SEQ ID NO: 204457 - DNA, 90 bp, Homo sapiens
cgcgcctctcgatgggcagctcgcacttgctcaacaagggcctgccgcttgacccaacatgagtgaagtttcctgcaagaaacgggacga

SEQ ID NO: 204458 - DNA, 75 bp, Homo sapiens
tgacggagatggtgcagaagatggaggaggtatgttcaagatcagtaaatttagaaaaagcttcagagtctttga

SEQ ID NO: 204459 - DNA, 100 bp, Homo sapiens
ccacctttaaaacagatgtgtaccttaagtcactcaaccctcagtggaactcggagtggtttaaatttgagctcttcacagatggaatcacaaataaact

SEQ ID NO: 204460 - DNA, 100 bp, Homo sapiens
gcaaaataaagtccctttgctcgaaacattattccatcatttgtgttgatggatatccaggcttctacagtggtcacctatgtgtatcagctaattggag

SEQ ID NO: 204461 - DNA, 74 bp, Homo sapiens
tgccatcatcgtggtagttattgtaaggaattgtggtggacgtgccatttgcatccttcttcctgagccaactg

SEQ ID NO: 204462 - DNA, 75 bp, Homo sapiens
gccatgacagcgagcgaggcggaggtgcctatggttcatgcttgaagttttaatgacaaagaatgaaaacaatag

SEQ ID NO: 204463 - DNA, 50 bp, Homo sapiens
attaaggaattctttcgaggattaaatagtacaggggctcaggtccaggt

SEQ ID NO: 204464 - DNA, 75 bp, Homo sapiens
ccccgagctctcagccactccctagcactcacaggttcaagcaattctcctgcctcagcctcctgagtagctggg

SEQ ID NO: 204465 - DNA, 90 bp, Homo sapiens
gtgatgaatcagcccatggcttacgctgcacttccatcccacggtcaggcaggtccacgagatccagtcttgcatgggacgcctggagac

SEQ ID NO: 204466 - DNA, 74 bp, Homo sapiens
aggcgggcctcccgtttctggctccgggctgagcttcctggagaagaggaagatggcctgatatgaaggagtca

SEQ ID NO: 204467 - DNA, 73 bp, Homo sapiens
caactggattttttaactgaagatagtgcctttcagccctaccaggaagaagaggaaaggctatgaagatgat

SEQ ID NO: 204468 - DNA, 100 bp, Homo sapiens
aaaaattaaataaaaaaaataaaattggagctgcctttactgatgatggctttgccatggtcctaacttaaactggattgtttttcaactctgatctgtc

SEQ ID NO: 204469 - DNA, 83 bp, Homo sapiens
gtttcggacgatcacaacggcctactacaggggtgcaatggctggcctgccactcctcctgctatgatgcctgggcagatccc

SEQ ID NO: 204470 - DNA, 100 bp, Homo sapiens
ctcaggcgtgcgcggacggtgtgcgggaccatggccaacctggagcgcaccttcatcgccatcaagccggacggcgtgcagcgcggcctggtgggcgaga

SEQ ID NO: 204471 - DNA, 75 bp, Homo sapiens
aagcagattgccaacattgaccgtattacaaaaattccctgaccaggagcgcacccctccccaacgactcccagg

SEQ ID NO: 204472 - DNA, 74 bp, Homo sapiens
gggctgctcccatcattgatgtggtgcgatcggtatctgatggtataattgccccaggatatgaagaagaagcc

SEQ ID NO: 204473 - DNA, 100 bp, Homo sapiens
gcctcccaaagagctgggattacaggaaactggagaggcgtggctggaccaagacctccccccatgtgagcaggcttcctcctcccccaacaaccgttgc

SEQ ID NO: 204474 - DNA, 91 bp, Homo sapiens
ctgtcgctcttgtgccctagcaccccgagaaccgtcagtttgagccagatgggccttaaactctggtgttgagtactactgggaccagctg

SEQ ID NO: 204475 - DNA, 89 bp, Homo sapiens
agcaaacatcgatggcctactggggataacattcatgcagaacatcagctttgggacatccggaagaaagcagccatccagacatttca

SEQ ID NO: 204476 - DNA, 75 bp, Homo sapiens
tcgccaaactgcaggcacaagtgcgcattggtgggaaactgtgggaatcactttaaccctgatggagcatctcat

SEQ ID NO: 204477 - DNA, 100 bp, Homo sapiens
ccatgtttgacaagacgcggctgccgtacgtggccctcgatgtgctctgcgtgttgctggattgcggaagcatgagaagattctgtaactgagaggcatt

SEQ ID NO: 204478 - DNA, 88 bp, Homo sapiens
caaggataagggcgacagcaacagctctgccggctggaagtattgctgacagacagaacgccttggaggctgagtggaggacggtgca

SEQ ID NO: 204479 - DNA, 90 bp, Homo sapiens
ccaaccgagtggtctgccgagaagccagtcacgccgggagctggtacacagcctcagaatcagcagaatctgccaaaataggaggaataa

SEQ ID NO: 204480 - DNA, 74 bp, Homo sapiens
agaaagacaaagacccagtgaacaaatccgggggcaaggccaaaaagaaggtcacggtctagatcacattctcg

SEQ ID NO: 204481 - DNA, 75 bp, Homo sapiens
aagagtaagacagctggaggaagaaaatcgcatgctgccccagatatgtgttgattgacacacctggacagattg

SEQ ID NO: 204482 - DNA, 101 bp, Homo sapiens
tttgggatataggagggcagacaataggaggcaaaatgttggataaatatatctatggagcacagacatcacttagtgctcttacccagctgatgaaaaag

SEQ ID NO: 204483 - DNA, 74 bp, Homo sapiens
gacaaagttgaaaacaaagtgctgaatgctatcttctttgagaagtcaaattgtcaggatcaggaatgtatgtt

SEQ ID NO: 204484 - DNA, 78 bp, Homo sapiens
tcctttgcaggagcacaacaagatggccatgtcccaggtgccacacctccctggatgatccaagatgaagaatacatt

SEQ ID NO: 204485 - DNA, 100 bp, Homo sapiens
ccaagagaccgtttttgaaaacattgccaaaccagttgctgggaggttctcttattcaagtaccttccgttgagagggggaaacttagtaaagttcgcct

SEQ ID NO: 204486 - DNA, 75 bp, Homo sapiens
gataatgttttcagcagcaatttgccctcagagctacaagccagcccccttcttcgtcctggatgagattgatgc

SEQ ID NO: 204487 - DNA, 100 bp, Homo sapiens
ctacacatggcctacagacacttctggatgttggttctctttgtcattttcaacagtctgcaggaaagcatccaacggagtggaagcagcatgaaggaag

SEQ ID NO: 204488 - DNA, 75 bp, Homo sapiens
gcgacagagcgagcgcggcgcggggccaccatgggggcccagctcagcacggtcctcctcgactggattaatgac

SEQ ID NO: 204489 - DNA, 88 bp, Homo sapiens
aactaaggaccttctttgccaggtggggacttaaaggactgaaagaggtgtccccactgcctctaaatctcaaacgtttatacaaaga

SEQ ID NO: 204490 - DNA, 83 bp, Homo sapiens
ggacaagatgaccacactccaggaatgccagtgcatcttttgcacagctgttcacagcatgtccgcctcggcccctgctgcgg

SEQ ID NO: 204491 - DNA, 90 bp, Homo sapiens
ccgatctcgggcgggaaccgagcgcagagccgccccacagagcaggtgttgccaatgctgcggttcgtgcagaagcggggaaactcaacg

SEQ ID NO: 204492 - DNA, 82 bp, Homo sapiens
agcatttaaccagcatggctacttcatattttggaaagcagtttttaagacaaagggagcactatgtctgcggaagtccccg

SEQ ID NO: 204493 - DNA, 75 bp, Homo sapiens
caagactggagtccctgatggaattatgcagtttattaagagctgatgttcctggagaccagcgctctcacaggc

SEQ ID NO: 204494 - DNA, 75 bp, Homo sapiens
cgggtattgagtccatggagcgagctgagagctagagtccacctctggaggtatgaaggaggctatccagccctc

SEQ ID NO: 204495 - DNA, 100 bp, Homo sapiens
tgcttcctcctccgatacttcccgcagtcggcgggcagggctgggcagcggcctgagtctcagcggacttgtccacccggagttgagtcggagtggcgag

SEQ ID NO: 204496 - DNA, 90 bp, Homo sapiens
ttgagagcttcaggggaaatggcttcagcgcagtatattactgcaggttggatggcaagcatgtggtgtttggcaaagtgaaagaaggca

SEQ ID NO: 204497 - DNA, 75 bp, Homo sapiens
atccggtcctggtccctgctggttgacaatgcagatcttcgtgaagactctgactggtaagaccatcaccctcga

SEQ ID NO: 204498 - DNA, 100 bp, Homo sapiens
gtggttggagagctcatctggaattttgccgatttcatgactaaccagtctgatttgaataggatgcacagacaaaatatagatgcctaccataacccag

SEQ ID NO: 204499 - DNA, 100 bp, Homo sapiens
ttcgggccgtcaccctgcctcccctgcgtcccgccaccggccgcttctgtcctcgccttggtcatctataatttcctgagcctgtgctatgagtacctag

SEQ ID NO: 204500 - DNA, 74 bp, Homo sapiens
ttctccttcaagtacttggcagatcactctcttagcagctatccagtcagttcgctgctattcccatgggtcac

SEQ ID NO: 204501 - DNA, 100 bp, Homo sapiens
cgcggacggaaagtttatgccgacggaaagtttatgccgacggactgtgtccggcgatgggcacgggtgcatattgggtacttccagaagtatgaattca

SEQ ID NO: 204502 - DNA, 83 bp, Homo sapiens
ctcccagtgacgggtctggagtgcgtgggggaccggctgttggcggccatgccagtgacggtaacccgcaccaccatcacaac

SEQ ID NO: 204503 - DNA, 76 bp, Homo sapiens
gaatgatccttactaaccacgaccatcaaatccgtgtcggagtccttacagggaaagccaccagggtgggtggcga

SEQ ID NO: 204504 - DNA, 100 bp, Homo sapiens
ttgaagagaagattgtcagcagttcgaaacaggaccttgccctgtcactcaggatggagttcagtggtcctatcatggctcattatagcctcaaactccc

SEQ ID NO: 204505 - DNA, 82 bp, Homo sapiens
gagaggtccgtctaatgaagaacaggatgaccagtgtcccagtgaaggaacgagtgaaggtgtctcagaactggagactggg

SEQ ID NO: 204506 - DNA, 83 bp, Homo sapiens
tcaagacaccaagtgagaggccaaccaggcgacctgggagacccagccagtaccgcccagacggacttcggagtggtgatggg

SEQ ID NO: 204507 - DNA, 100 bp, Homo sapiens
tcagtggctgctcttaaaatacaatggtgaaagtggtgctggaaaaacagtggctgccaaatatatcatgagctacatctccagagtgtctggaggaggg

SEQ ID NO: 204508 - DNA, 76 bp, Homo sapiens
gcagatgttacagctgctcatgaaccacttggcaaaaactcccccactggaaaggattctgaaagaaatgaagtca

SEQ ID NO: 204509 - DNA, 100 bp, Homo sapiens
cgcgacggtcgccgcccacggcgagatatttggatttgacctgcattttggaatttatctacacttaaaatgccaccagcagttggaggtccagttggat

SEQ ID NO: 204510 - DNA, 82 bp, Homo sapiens
caatcagctggcctggtttgatactgacctgtaaatcatcctttaggggtctgttattagcagtccacgccctcaccagagg

SEQ ID NO: 204511 - DNA, 97 bp, Homo sapiens
ggtgggggcttagcgcactggaggagcggcgggcttcagacagattacttctctaacaggatcaccagtttgctccacaaagcacaatgtctcgatc

SEQ ID NO: 204512 - DNA, 98 bp, Homo sapiens
atttttatgtggaacatccggaagtagcaaggctgacaccagaaaaccatccccttggttatccgttgatactgccttgtatattctcaaggaaaatg

SEQ ID NO: 204513 - DNA, 80 bp, Homo sapiens
ctttacgttcatgtaaacagcatgacgtgaggccgtggatgcaggcattaagtgagaacaatccctgtataaagcattat

SEQ ID NO: 204514 - DNA, 46 bp, Homo sapiens
gaactctttccagcttgtgtctggtggcttcttctcaacctgtatc

SEQ ID NO: 204515 - DNA, 100 bp, Homo sapiens
gctgctgtgcacaggaatatggatgttcagcctgttgcctatgaagagcctaaacattggtgttcaatagtctactatgaattaaacaatcgtgttggag

SEQ ID NO: 204516 - DNA, 82 bp, Homo sapiens
cccactttctcggcgccgcggctcttttctaaaagtgaatggaagttggatacactttgtgacttgtacgagacactgacca

SEQ ID NO: 204517 - DNA, 135 bp, Homo sapiens
atagggaaagtgaggcagctgcaaggagggcggcgggactgcactcgagtgtccagacctgctcgatgagctgtaggtaaaacttgcctactgatcagttacacaaccaatgcatttcctggagaatatatccct

SEQ ID NO: 204518 - DNA, 100 bp, Homo sapiens
gtaatcccagcacttggggaggctgagtttgcagatggcgtgtacctggttctgctcatgggccttctggaagactactttgttcctctccaccacttct

SEQ ID NO: 204519 - DNA, 100 bp, Homo sapiens
aaataaacatggagtccatcttccacgagaaagttatcaatactctggctgaccatcatcatcgtgggactgactttggtggaagtccttggttacatgt

SEQ ID NO: 204520 - DNA, 74 bp, Homo sapiens
gacttctggctttggccactttacttcctgccaggtaaaaatgcatttgcaaagggagaaaatgaaggccaaac

SEQ ID NO: 204521 - DNA, 75 bp, Homo sapiens
tgttgccatctctaacctaccagctgccactttccaggtgtgctgtttgcccagaagcctgtggtccacctcatc

SEQ ID NO: 204522 - DNA, 75 bp, Homo sapiens
aggattccaagtaactcttatttggagttggtccaggtagcaatgatgagacccttttatctgctgttgccagtg

SEQ ID NO: 204523 - DNA, 100 bp, Homo sapiens
cacatatggctcatctcagaaggaggagagtgctgcttcaggaggagcagcctatacaaagaggacctcctctgtcagagagagcagctttgtggaaaag

SEQ ID NO: 204524 - DNA, 100 bp, Homo sapiens
ctgtcaggagttcattgcaaatctgcaaggggtaaatgagggtgttgatttctccaaggatctgctgaaagacccttcaaagttgtacaagaaagcagat

SEQ ID NO: 204525 - DNA, 83 bp, Homo sapiens
aaggagcggaagaatggcagtgctcaaactcaccgaccaggtaaagtcagtgataaatcttttgtttgctgcatatactggag

SEQ ID NO: 204526 - DNA, 80 bp, Homo sapiens
cggagacacggtggaaacgcttatggtgtgggtacgccacgctgcatcacgtcattgacaagtccacagaagaccggatg

SEQ ID NO: 204527 - DNA, 82 bp, Homo sapiens
ttccatccggcgctcagctgggcttgagggaggaggtacaggagaactgtgtgcggtggcgaaagaggttcaccttcgtgtg

SEQ ID NO: 204528 - DNA, 101 bp, Homo sapiens
cgccagatcaacctggagctctacgcctcctacgtttacctgtccatggtggatgcccagctgacgggaagaatcagccagaaggcagaaaggggagcaaa

SEQ ID NO: 204529 - DNA, 82 bp, Homo sapiens
gcagttcctgcagtaccccactctacgatcaggtcttgccccagaagctgcgggcacatccacgcctgaaatgcggcgctca

SEQ ID NO: 204530 - DNA, 75 bp, Homo sapiens
agaagctaaaaggagaacttgaaagttcggaccaggctttcttgatcatggatggtgaagatataccagattttt

SEQ ID NO: 204531 - DNA, 83 bp, Homo sapiens
atttattgatctccacctcatccccattgttgctgaacagaagacttttgagagtcagcagaaatcttccactttgcatggtt

SEQ ID NO: 204532 - DNA, 100 bp, Homo sapiens
ctggaaggaaaaagatctaaagtcacccggcggccaaaggccagtgactaccaacgtttggaccagaagatttatttctgggaagcccagcgggggaacc

SEQ ID NO: 204533 - DNA, 101 bp, Homo sapiens
ggtggccgcctccttggtcagggagttcctcagcagaaagtctatcaatattatggaactgactttacagaaatatggaagttatgaaaaatttgaacaag

SEQ ID NO: 204534 - DNA, 83 bp, Homo sapiens
ctccttcaatgaggccaccatggttctggtctcctggatcatgtggcaaccacgagacagacaacatgaaccagatctacggt

SEQ ID NO: 204535 - DNA, 99 bp, Homo sapiens
gcggggatctgatgagcttctttcttctggcatcattaacggaccttttaccatgaatagttctactccttctacaggacaggacatccagcccaaaag

SEQ ID NO: 204536 - DNA, 99 bp, Homo sapiens
agcgatgtgtgcataaagccacagacaccgagtatgccgtgaagaagctggctctgaagatattgacatacttcccaatggtctggctttttttagtgt

SEQ ID NO: 204537 - DNA, 98 bp, Homo sapiens
ggacccctgggcagacctcttcagaaatagcagagctgcatgcttctgggaggccggaagaccacggacatccctttggaaggctacctgttgtctcc

SEQ ID NO: 204538 - DNA, 100 bp, Homo sapiens
tgggcttcagttagccttggccgagcatagcggcctgaccacaggggtggccttcgggcatcacgccaagttcatcgcttcaacaggcatggacagaagc

SEQ ID NO: 204539 - DNA, 100 bp, Homo sapiens
cgagtccgagaactggctgaagccgatgaacagcgccgggatccaggacccttgaacatctgtgaagaaatgactattctgcatggaggcttcttgctgg

SEQ ID NO: 204540 - DNA, 98 bp, Homo sapiens
gttcacatagattacaatgtttgctttgaaaaaggagcagacgcctccgcctagacctgaagcctaccccatccccactcagacgtacaccagagagt

SEQ ID NO: 204541 - DNA, 78 bp, Homo sapiens
ctgctctgtctgccggttcttgagccgcagattcttatacatcgtcaatctagatgcccctttcgaaggtcaccgaaa

SEQ ID NO: 204542 - DNA, 117 bp, Homo sapiens
ttctatttcttgtggatattatggctaataacacaacaagtttagggagtccatggccagaaaacttttggggtccatgaaagacctcctcctccttctccacctccctctacaata

SEQ ID NO: 204543 - DNA, 104 bp, Homo sapiens
agctatgtgaaaatggaaacatgaataatgttgtaactcgaagatttagcaaagctgacacaatagaataactgaagtgaagtgatggactccgatttggagag

SEQ ID NO: 204544 - DNA, 51 bp, Homo sapiens
gaagaacctcatcgctgcgacgaaaatctgttctctggggaggcagtaagg

SEQ ID NO: 204545 - DNA, 83 bp, Homo sapiens
gggcccgccgccgctcaccgcagccccctcctggcgacccgcaaataatcttgtgccgtggaaatcagaagggcaaaacgaag

SEQ ID NO: 204546 - DNA, 82 bp, Homo sapiens
gaaaaggcattgaggaactcaatcaaaccagtattcttttcacacaggcttgttttcctgctcagaacaaagtgacttccct

SEQ ID NO: 204547 - DNA, 98 bp, Homo sapiens
aaaagagttgattgaaattatctctggtgctgcagctctgtgtgagttcttgatacgaatgaaaggccaagagtttgttgatgagattcaaggtagat

SEQ ID NO: 204548 - DNA, 90 bp, Homo sapiens
gactgaggacccagagactgaccttgaagtttgaccttgtctgtgtcaatgcgtggatgctggacctcacccaagccatcctgaacctcg

SEQ ID NO: 204549 - DNA, 100 bp, Homo sapiens
gcagttcagaagagccaaggaataaacatgcaatgaacccaaaagggttttaatgtggaaacagtagaatataagaacatttgtttcacagtatgggatg

SEQ ID NO: 204550 - DNA, 88 bp, Homo sapiens
gtcttcggtctcctggggtcggcgccgagtgggaggatggcggaacgtctgcttctgcgctttgcctgggagaggccctggtggcctc

SEQ ID NO: 204551 - DNA, 99 bp, Homo sapiens
aaagaaatccaacttaccttgtcaggcacaagagactatagtccccggcagatggcagttcgcgagaaggtgtttgacgtaatcatccgttgcttcaag

SEQ ID NO: 204552 - DNA, 90 bp, Homo sapiens
aaggaaggcttcgagaagattagcaaaggtgctaatccagtggaaatcaggagaggtgtgatgatgatcagatgtctaacgataaggagc

SEQ ID NO: 204553 - DNA, 75 bp, Homo sapiens
gcctagaatgcatcagtgcccttgtggcgaatggggctcacgtcgagaagatgttaccgagtacttcagtgaatt

SEQ ID NO: 204554 - DNA, 98 bp, Homo sapiens
gacaatcagtgaccaggaatcctttagggaagttattacaggggcaagtgtccgagtggtgaatcagctacttacagagatggatggtctggaagcac

SEQ ID NO: 204555 - DNA, 97 bp, Homo sapiens
gtctgagtgattcccagggcccagcaaagggaccaagtttccagttgacttttgtgccctggtaattctgtatcctgtttaccgtttacctacttcc

SEQ ID NO: 204556 - DNA, 100 bp, Homo sapiens
cggaacttgccgcgtcgaggactgtcgggttaaagctgaagctcaacaaagatatagtgatctctgtgggcatttataatctggtccagaaggctctcaa

SEQ ID NO: 204557 - DNA, 83 bp, Homo sapiens
ttcaggtcctactccaggggcgctcaggtgagaagccctaccactgcaactgggacggctgcggctggaagtttgcgcgctca

SEQ ID NO: 204558 - DNA, 97 bp, Homo sapiens
ggaatgagagggacaggagtatctgaggatggagaactcagcagtgtcatggagaaactccagctgggcccagagattctgcagcgggaaaatccaa

SEQ ID NO: 204559 - DNA, 100 bp, Homo sapiens
cctggcgccaaggggttcgtgcgctgtggagacgcggagggtcgaggcggcgcggcctgaggctcttacactgttcctaagctggctggtgcatgggagg

SEQ ID NO: 204560 - DNA, 82 bp, Homo sapiens
ggctggtacccatcctcaagggaggccgtttctaccagggtcctgcagttctgagcttgggttccctttgcctggacaccaa

SEQ ID NO: 204561 - DNA, 90 bp, Homo sapiens
gggacgaaagtgtcaaggcattacggctcccattgagccaccccacgtcatgctgcagcgccgcagagatcatggctgtcctctttttcc

SEQ ID NO: 204562 - DNA, 100 bp, Homo sapiens
gggctgctgcggacgctggtgcggcgcggggtgagcgtcgaggaggcgcaggagactgaccgcaacggcaggcccaccttgggacaccttgactccaagc

SEQ ID NO: 204563 - DNA, 75 bp, Homo sapiens
acctggaaggggccaaagccgccgccggtgacctcggcggaactcattatacaatgacaaatggaggcagcatta

SEQ ID NO: 204564 - DNA, 98 bp, Homo sapiens
caattattcccatcattcaacagatgaacggtgtgctggaattgatgttcgtctgtgtgatgttggtgaggccatccaagaagttatggagtcctatg

SEQ ID NO: 204565 - DNA, 76 bp, Homo sapiens
taaagaacttgcagttgaaggagtataacacagcgtgtgaaggcaaagaagaatgctgctccattcagaagtgaag

SEQ ID NO: 204566 - DNA, 94 bp, Homo sapiens
agatcttcacattctggatctcagctgctcttgaagcttctttaaaagtgaatggaccttcccagcccatcctcgtcagagtgggagaagatat

SEQ ID NO: 204567 - DNA, 75 bp, Homo sapiens
gctaagatcaccaacacagacgtgtttcgatacaagaagcgggtgtataaacaagccagtctcgatgagaaacag

SEQ ID NO: 204568 - DNA, 126 bp, Homo sapiens
aagaggtcaaatacatgaaaaatggggcagaagaagagcagaaaatagcagccaggaaccaagaaaacttggaaggtgcttttgcacttgtgtttaaaagtgttcattttcccgggcaagcagttg

SEQ ID NO: 204569 - DNA, 75 bp, Homo sapiens
ctacctcttcaccttcctcaaccaagcaccagcctccctacatcattgcagtgttgcctcgatatgttgagatcc

SEQ ID NO: 204570 - DNA, 100 bp, Homo sapiens
ttagtgggatggtttggccatgaactcagcaccagatttaagatggataacagaaaaccagtagattcccagacatcgcgaagtgaatctgaaattgtgc

SEQ ID NO: 204571 - DNA, 74 bp, Homo sapiens
catgcggcccgaagtgtacaggctgataaatgaagaagccatggcgctgagatgcgtctggagagccagagggc

SEQ ID NO: 204572 - DNA, 80 bp, Homo sapiens
gaggccgggcgtcttctgagagtcagtattctaccttgtaaatactgttatttgtatatactgtaaatgatgacatcggt

SEQ ID NO: 204573 - DNA, 90 bp, Homo sapiens
ggacgagcaggaagctgcggctgagtcggcagaagctcctcctggggtagagacagatcttattgatgttggattcacagatgatgtgaa

SEQ ID NO: 204574 - DNA, 90 bp, Homo sapiens
gagaagcagctgggggccttggctgtaaggacccctaagggtggagccgccaccaaaatgcagattttcgtgaaaacccttacggggaag

SEQ ID NO: 204575 - DNA, 75 bp, Homo sapiens
aaaagagacctctacttagctcagcaattcttaccttgaatggaagttggatacactttgtgacttgtacgagac

SEQ ID NO: 204576 - DNA, 100 bp, Homo sapiens
tggaccgcaactgtgacacaggagcctttgagctcatctataagcagctgcctgtggaggaaccgattgtgtccacagatgaggtcatcttcccactcac

SEQ ID NO: 204577 - DNA, 95 bp, Homo sapiens
cagtggtcgcttcttctccttgggtccacacttgtgattctcaatggagagtgaaaacgcagattcataatgaaaactagcccccgtcggccact

SEQ ID NO: 204578 - DNA, 89 bp, Homo sapiens
ctttcctggtcaaaagatgatcactacatccttacttcatcatctgatggcactgccagaactgataatgctatcaagaaccactggaa

SEQ ID NO: 204579 - DNA, 75 bp, Homo sapiens
ggcaggcgccgacttccgaaggccgccgtccgggcgagatatttggagtctgggagtgatccttttcatgttggt

SEQ ID NO: 204580 - DNA, 100 bp, Homo sapiens
tgtggatgagacaccgctatcacagctgctgcaatcgcttgggagagctcctgggccacccctcctttcaggtcaagaaacctgtgaaggtcgaaacagc

SEQ ID NO: 204581 - DNA, 100 bp, Homo sapiens
caacagattccagtgtctgtgtcccactggtttctctggaaacctctgtcaggatgcttatagaattttatgagtcaccagatccagaaagaagaaaaag

SEQ ID NO: 204582 - DNA, 100 bp, Homo sapiens
gatggcgaccgagacggtggagctccataagctaaaggtggcctctgtcagcctcttgcagctgggccaggagactgacaagcttaaaaccagaaatcga

SEQ ID NO: 204583 - DNA, 90 bp, Homo sapiens
gaaagcgtggcagcgcaggcgcaagcgcagagagcggaggcggtggtggtggcggccgctggccagtctgagtcagtgctgattctctca

SEQ ID NO: 204584 - DNA, 50 bp, Homo sapiens
cccaaagctttgaccagcaaagatatggccctggccaacgtcaacattgg

SEQ ID NO: 204585 - DNA, 75 bp, Homo sapiens
agatattcggccctcggaggacaatgatatcatcaagttgaatcgaaaggaagggaagaagcagaattttccaag

SEQ ID NO: 204586 - DNA, 82 bp, Homo sapiens
aaccctggaaagtttgcagaagtggaaggagcagaacgtgagggtgtaacttacaaaaaggccaccagcttgggctccccac

SEQ ID NO: 204587 - DNA, 90 bp, Homo sapiens
cagaggttccccacacatgtcaaagatgtggccactgtgtgccggcagctagcagagaagagaatgctgaagctgagctgtctctcttgc

SEQ ID NO: 204588 - DNA, 82 bp, Homo sapiens
cttttggatcctgattcagccatccatcgttattaggtttattcttcagtccaaggaagcaattcacagtcagctgttagag

SEQ ID NO: 204589 - DNA, 82 bp, Homo sapiens
ggagagtacatccccaccgtgtttggtgcacctcgatttggaggaagtagggcagggcccttatctggaaagaagtttggaa

SEQ ID NO: 204590 - DNA, 82 bp, Homo sapiens
ctggctcttgccctcatcctggttctggaatcctcagttcaaggtgcctacctttgcccgtcgttccaatgtcctgaccggc

SEQ ID NO: 204591 - DNA, 100 bp, Homo sapiens
tggagttcttacaacatggcagacattgacaagcaatggtggcttgctatccgggaaatggaacaggttatgttcgccacgtggacaaccccaacggtga

SEQ ID NO: 204592 - DNA, 100 bp, Homo sapiens
cctcattccagtcttgctctgccctccggagatgacaagtgagaaagaagtgtccggccgggccatccccttcaggcattgaacctggccacatcccagg

SEQ ID NO: 204593 - DNA, 83 bp, Homo sapiens
atcacttaaaggagtggacattgctagcaatgagctcccaaagccatccagggtttggaaatcccttgtctccaggttgctgg

SEQ ID NO: 204594 - DNA, 73 bp, Homo sapiens
tctgcgactctgggaggcaaagaggaggagacagaggaggacagtgacctgtcagattatggtgatgatgtgg

SEQ ID NO: 204595 - DNA, 75 bp, Homo sapiens
ctttggataatgacgacagcaacccgaagacagggaaatttagatggagaggagaaaacctatggtggctgtgaa

SEQ ID NO: 204596 - DNA, 100 bp, Homo sapiens
ggccgcgggagccgcacgcggcgatatggaagaggagggcaagaagggcaagaagatgatgattattctccaccgtctaagagaccaaaggccaatgagc

SEQ ID NO: 204597 - DNA, 81 bp, Homo sapiens
cgccatcagcttcacaggggccttgaaaattccagtcaaggagatactgacagcgctgggcttgctgtcttgcgccaacac

SEQ ID NO: 204598 - DNA, 83 bp, Homo sapiens
ggaaccctccatcttcaacactctgaagaggcaactcatgcagcaattccagaaccccgacttcccacccgaagtagaggaac

SEQ ID NO: 204599 - DNA, 75 bp, Homo sapiens
ctttggataatgacgacagcaacccgaagacagggaaatttaggatttaagaggggtgcagatcccggaatgcct

SEQ ID NO: 204600 - DNA, 75 bp, Homo sapiens
agaatgaaagaagaagctataaaaccccctttgaaagttactccacaggatccgctgaacataggatgttgccac

SEQ ID NO: 204601 - DNA, 90 bp, Homo sapiens
acaaactcgaagaacagctgtggaaagaagttgcaaaacactgggtacagccaaccatgtcccagttcgaaatggacacgtatgctaaga

SEQ ID NO: 204602 - DNA, 82 bp, Homo sapiens
cccaaggcctgagtgcagctctgtgctaagccaacaacaacgacgggaaaaagaccttgatgaagttctgcagacccactca

SEQ ID NO: 204603 - DNA, 100 bp, Homo sapiens
catgaaggtccatgtaccctgtgaaaccctcgaatacattgaagccaactatggaacctggcttctgtatttaccatgtacctggagcattggtttggca

SEQ ID NO: 204604 - DNA, 90 bp, Homo sapiens
attttttctcatggatgttcttcttcgagtatttgtagaaggcaaattcaacacccaacagcttccttaatagcaaaggtagcaacagcc

SEQ ID NO: 204605 - DNA, 83 bp, Homo sapiens
tcttccagctgtccgtgcagcccatggtcatcgctggccagacagttcgatatctcaatgcctatactggaatagtgctactt

SEQ ID NO: 204606 - DNA, 100 bp, Homo sapiens
gttcagggtcccaccgtcctcgccagcctgcgtcccagggcaggcgggacagcacagaggcagcgccacctcgcttgcttgaaatccatggcccaaaatg

SEQ ID NO: 204607 - DNA, 98 bp, Homo sapiens
ctttttacttgaagtacacagagaaagcttggagtcttttatgacatcaagagaaatgatcccagaaagaaaaaatcaagaaaaagaatctgatgatg

SEQ ID NO: 204608 - DNA, 101 bp, Homo sapiens
acatgcagagtattttggaccttcataataaattacgaagtcaggtgtatccaacagcctctaatatggagtatatgctaggcaagttcactggcctcaag

SEQ ID NO: 204609 - DNA, 100 bp, Homo sapiens
cgacacaattgtctgtgacagtaacagtacttgggatcccccagttccaaagtgtcttaaagcactattcctgatcagagaactccagttgcttcaacac

SEQ ID NO: 204610 - DNA, 89 bp, Homo sapiens
gagctctggagaaacatgaagttcgggactatcttctggttttagatggagcaggattagatattgatttccatcttgcctctccagaa

SEQ ID NO: 204611 - DNA, 90 bp, Homo sapiens
cgggagccgcgctacacgctgctggtggccgcctgcctctgcctggcggagggtggagccagccatcctgagacgtccgtacagcccgta

SEQ ID NO: 204612 - DNA, 80 bp, Homo sapiens
agaccttgccagagacctggcaaatgacatcatgacactgatgtgaagttcatttccaatccgccctccatggtggcagc

SEQ ID NO: 204613 - DNA, 51 bp, Homo sapiens
ggaacgggcccgtcaagctgcgcctgacagacaatgcagatcttcgtgaag

SEQ ID NO: 204614 - DNA, 74 bp, Homo sapiens
tacagtgatttcttccaaggtcaaaggacgaagatggagaaggccaacgctcggatgaagcagcttaaacgcca

SEQ ID NO: 204615 - DNA, 90 bp, Homo sapiens
cgctgcgcggcgcggcggccgggccctcgagacggggacgagatccagagcttcgcgggcgccgagaaggacgcgcgcgtggtgggcgag

SEQ ID NO: 204616 - DNA, 100 bp, Homo sapiens
gtatggtacagtagagaactgtgagcaagaggaggaagaaggtgggaaaggtgaaaagaggaagagagaaacagatgatgaaggagaagatgattaagac

SEQ ID NO: 204617 - DNA, 90 bp, Homo sapiens
caatgtatctaacgacctctcacagaaactatatgccaccatggagaagcataaagaggatgggtttgtggagttcttccatgtagagga

SEQ ID NO: 204618 - DNA, 98 bp, Homo sapiens
ggcccttccctatcgtcgcccccttcaccttggatcatgttcaagaagagcgggatcgttacgcctacaagattcatcttccagaaacagtagagcag

SEQ ID NO: 204619 - DNA, 90 bp, Homo sapiens
cgcggcggcggcacgatggtcatggcgtatttcgtcgagaatttttggagtacccaaaggcaagtggaacagctctaatggggttgaaga

SEQ ID NO: 204620 - DNA, 100 bp, Homo sapiens
gtacaaatacccctttgaattaattatggctaatatgacagatacctagcatctagcaaaataatggcagctgcttaccttgaccccaacttgaatcaca

SEQ ID NO: 204621 - DNA, 83 bp, Homo sapiens
atcaccgacaagatcaccacggacgagatgatcaaacgcctgaagtttgctggcctagacctgaactcttcagataatcagag

SEQ ID NO: 204622 - DNA, 100 bp, Homo sapiens
cgtgaccgagagcgcgaatatcgtcatcgttagaagatggagtctgcacgcaaagcatgggagaattctccaaatgtaagggaaaaggggtctccagtaa

SEQ ID NO: 204623 - DNA, 89 bp, Homo sapiens
acaatcggcaaggggaattttgcaaaagtaaaattggcaagacatatccttacaggcagagaggaaatctggcattttttaaagtttgc

SEQ ID NO: 204624 - DNA, 50 bp, Homo sapiens
gtggagaacacccccccatggaggcgagataacaggcccctggcgcagcc

SEQ ID NO: 204625 - DNA, 75 bp, Homo sapiens
accgagagcgcgaatatcgtcatcgttagaaggttctaggcgcccacgaggtcccctcgaggaacatcttttcag

SEQ ID NO: 204626 - DNA, 83 bp, Homo sapiens
ccttttgccacctttccctttatttccggagacctgcctagagctggaacgttacctccagagcgagccctgctatgtttcag

SEQ ID NO: 204627 - DNA, 51 bp, Homo sapiens
acctggaccagaccccaggaaagctttccccagacatggccaacaagggtc

SEQ ID NO: 204628 - DNA, 90 bp, Homo sapiens
attgctttctgctcccattcatacccagatgcaacagaaggagggtcgtcgggctgttaaagcgggagcttatgctgcttgccaggaagc

SEQ ID NO: 204629 - DNA, 100 bp, Homo sapiens
aagagatatctgcaatgatgtactggttgggtatctacagccattggttgctgttcaggtcagctttgctcctaacaacactgggaaagaagtaacagtt

SEQ ID NO: 204630 - DNA, 80 bp, Homo sapiens
tattccagcaatctacagtcctggcctgaggaagattctttgtgggaaagagattcctcgctggatcaatcgacttgcct

SEQ ID NO: 204631 - DNA, 96 bp, Homo sapiens
ttgggcaagagaagaattcagaagaaacaaaagtgccaccgaagaggtgagaacaaaatcatggtaagcagaattttgtacagtttctgtacagca

SEQ ID NO: 204632 - DNA, 76 bp, Homo sapiens
cacggacaacctcagaggacaacgaagtgttcggtgatctgtgaaaatggttcgctattcacttgacccggagaac

SEQ ID NO: 204633 - DNA, 50 bp, Homo sapiens
gggacaatggtcaccgtctcttcaggacacattcagctaacgtattttag

SEQ ID NO: 204634 - DNA, 75 bp, Homo sapiens
agcagcggagacgcggtgctcctcgggcgccaagcgctcaatgtcaattgctgcaagcttagtgagtgaagatac

SEQ ID NO: 204635 - DNA, 90 bp, Homo sapiens
cgagcaaggagcgcggaatcggggagcgtccggagctagctggatcctctaggcagctctggtagctgaagaacatctcacagtggacgc

SEQ ID NO: 204636 - DNA, 96 bp, Homo sapiens
gtggctgaacaggaggagcggcagggcatgaaggtccaggcgctggccaggtggtacaagctgcactccaagccaggcaagaaggagaaggaacgc

SEQ ID NO: 204637 - DNA, 50 bp, Homo sapiens
ctcgaggatgccagtttttagggccagcttagcagtgtctgcaaaaacga

SEQ ID NO: 204638 - DNA, 73 bp, Homo sapiens
aaagttagcaatgatggaaagtggggtgagagactatagcaagcagtctctgctggatgaaccgaatcctaac

SEQ ID NO: 204639 - DNA, 89 bp, Homo sapiens
aaaaccagataccactgctcctccttcatctcccaagaatgacatctctgaaaaggagcaacgatggggagccaagaccatcgaggggt

SEQ ID NO: 204640 - DNA, 111 bp, Homo sapiens
ggcttccttagtccgggcaactgtccgggctgtgagcaagaggaagctgcagcccacccgggcagccctcaccctgcggaaagtgaccagaagaggtgtgcagtttccagg

SEQ ID NO: 204641 - DNA, 97 bp, Homo sapiens
cccatcgtcaccgtgtgggagcgggagctgcggaaagaatgattgaagatagtgggaaaagaggaaataccatggcagaaagaagacagctgtttgc

SEQ ID NO: 204642 - DNA, 83 bp, Homo sapiens
gacaggattcgttggctgccgtccccgctgctgtgcattggcgccatcatgaccgggtcctataacaacttcttcaggatgtt

SEQ ID NO: 204643 - DNA, 100 bp, Homo sapiens
cggcaggctgagaaaagcgagaccgcgtgcgaggaccggttcggagcgaccttggccgttggcctgaccatctttgtgctgtctgtcgtcactatcatca

SEQ ID NO: 204644 - DNA, 80 bp, Homo sapiens
attctttgatgtttctgagcaaaatgccccggctcccttcctggccccagaggtgatccgaatgcaggataacaacccat

SEQ ID NO: 204645 - DNA, 99 bp, Homo sapiens
gggaccttgaagacgacttcgaccctgcccagcacgaccagctcatgcaggtcgcagaacttgaaaagcgcctgacagagctggagacagctgtacgtt

SEQ ID NO: 204646 - DNA, 100 bp, Homo sapiens
catgatttacactcggtatgtcctcagtcttctgctgcatgacagctatgactacgacctgcaggaacagcggacaaggcaaaatctcagcaagttcgga

SEQ ID NO: 204647 - DNA, 90 bp, Homo sapiens
ccagcaatgcctccatgaacaatctcacccaattactctgctcaggaaccagcattgcttggaattctcctaaaccagaatatttccttg

SEQ ID NO: 204648 - DNA, 100 bp, Homo sapiens
atggagaaaatacatggagcagaccagcagttatttgcagctatcatgtgagcggttaagaagattgtctaccaaatatagaacagaaaagatatatccc

SEQ ID NO: 204649 - DNA, 74 bp, Homo sapiens
aaccaggttatccctcgaactcctagctcatttcgacagccttgtgctggaaatggaaacctgcaaggacctag

SEQ ID NO: 204650 - DNA, 83 bp, Homo sapiens
gattgtgggagtctccgcgtcccgctcgctgggagagagatcggatcaacatcaagaggaagggagcgtggccctccaccctc

SEQ ID NO: 204651 - DNA, 88 bp, Homo sapiens
acactgacagaagcagtggtcgaatccagtagaaaactggtcaaggaagctgttacattgattacccacctagtacaacatcttacgg

SEQ ID NO: 204652 - DNA, 100 bp, Homo sapiens
agcaatgtgtcaaccgcattattactgaaaagggtccaatgtgtgacttgctgtggtcagatccagatgaccgtggtggttggggtatatctcctcgagg

SEQ ID NO: 204653 - DNA, 98 bp, Homo sapiens
tgagcctgttggaggaactggcccggaaacaggaggacgcggccggcgcggggcgcaggcggcgcggccatgggctcgcagggcagtccggtgaagag

SEQ ID NO: 204654 - DNA, 98 bp, Homo sapiens
ggaaagtgtacattcaccatatgtcacccactggagttcttctcaccactaaatccaatacgagttcatattgatattggagctgatggcagagccac

SEQ ID NO: 204655 - DNA, 101 bp, Homo sapiens
gccgggttttctcccaacgtcaggcccgatggctcggcttccccaggaatgtatacaaagactatcgcttccttgagctggcatgtgattcccaggaggat

SEQ ID NO: 204656 - DNA, 90 bp, Homo sapiens
gcaagtggcaagcctatggactcaaaggctatcctgatatgcaaagcctagagaagctattgaaagatgccattgtttatggtcagcctc

SEQ ID NO: 204657 - DNA, 100 bp, Homo sapiens
aatcatttttgcatgaacaagaagagaatgtggtcaaaatacaggtagcggaattggtactggtccaggagttatccaggatagattttcacccaccatg

SEQ ID NO: 204658 - DNA, 76 bp, Homo sapiens
ccagccacctacaggcctccaggaatggctaaaaatgtttcaggtcagcttttgccaactgttttcaaatcacatg

SEQ ID NO: 204659 - DNA, 82 bp, Homo sapiens
tggaaatcaaagtccaccatgtgcttttgcacatccatctgatctgaaatgtgtccaggatgccaagggaggttctttctac

SEQ ID NO: 204660 - DNA, 82 bp, Homo sapiens
atgcccatctgggtggtcctcctgtcccggatcattatgaaggagaagcagagcaccaagagctcccccatccaggaatcca

SEQ ID NO: 204661 - DNA, 142 bp, Homo sapiens
aagaccgaattcagaaggatatcgacgtcgtgatccagaagtccagagctgaggactgcctgtttgcaggtactccaaagattcaggtttactcacgtcatccagcagagaatggaaagtcaaatttcctgaattgctatgt

SEQ ID NO: 204662 - DNA, 119 bp, Homo sapiens
tggaagaaaaatggtggatcaatacttttctacactggtaatgaaggggacattatctggttttgtaataacacgggagaagatgtcaaccggacactagaaggtggaaggaaacctct

SEQ ID NO: 204663 - DNA, 74 bp, Homo sapiens
tttagagctgcggaacaggacgccctctgatactctggacattaatgtgaaggccccagccctgatgacaaagg

SEQ ID NO: 204664 - DNA, 96 bp, Homo sapiens
ccctgggctctgccaacctgcccctggctaagcggcagcagtgtgaaatggcctttccccgggtcaagccagcacctgatgaaacttccttcagtg

SEQ ID NO: 204665 - DNA, 50 bp, Homo sapiens
ggaatgattgagattgtggaggaggattttgatcttggctcctacaagag

SEQ ID NO: 204666 - DNA, 75 bp, Homo sapiens
aatggtacagattcattctattcttgcaaagattggaccaaaaggtactgtgctaaaccctggggagacggcgaa

SEQ ID NO: 204667 - DNA, 90 bp, Homo sapiens
tgggttcactctaggaggaacaaatacaggcgacattgactacagcaccgtgctcctcggcatgctggtgacgcaggacgtgcagctcgg

SEQ ID NO: 204668 - DNA, 82 bp, Homo sapiens
aaaagggccatgtttcaagaaaatggatttaaacatatttccctgtggagacacacgatagtaaggagcatttagcaatgat

SEQ ID NO: 204669 - DNA, 100 bp, Homo sapiens
atgagtcttctcaacttgaaggtcatttaaccaacctcagctttacaaaccctgaatttataactgagaactgtggctgcaccatctgtcttcatcttcc

SEQ ID NO: 204670 - DNA, 100 bp, Homo sapiens
gatgaacccaacctagtgggtgtaatacatcatgaactgcaggggcaccaatgcctctgctctggaaaaagacattggtccagagcagtttccaatcaat

SEQ ID NO: 204671 - DNA, 90 bp, Homo sapiens
caaagtagcaacaaatatcatgagagcatggctcttccagcatctcacagatttcaaatatgcgtgcattagagaatgattttttcaatt

SEQ ID NO: 204672 - DNA, 99 bp, Homo sapiens
cggagagcgggagctggtgccgagcagcggcgccaggagcccgtgcgcggcccgggcagccgcgctttcccaaaatgtagacaaccaatttcctgggca

SEQ ID NO: 204673 - DNA, 73 bp, Homo sapiens
ttcagcccaggatcagcctgtgaagatcttcgcaaatactgtggacaatgcccgcatcgttctgcagattgac

SEQ ID NO: 204674 - DNA, 100 bp, Homo sapiens
ctaaaacgggactgatggacgtgtccgaactctgcatcccggaccccctcggctaccacaaccagttccagcgccagaacaagttgaaaaaggtggtgtg

SEQ ID NO: 204675 - DNA, 88 bp, Homo sapiens
ttcagataattttattggactgtttgtctttgttctctgcctcttgtattctagttgccctcaaattggctgtagccacacggatata

SEQ ID NO: 204676 - DNA, 100 bp, Homo sapiens
tcagaagcacaaccacagcaagagcacctggctgatcctgcaccacaaggtgtacgatttgaccaaatttctggaagagattatgtttgagaccttcaac

SEQ ID NO: 204677 - DNA, 75 bp, Homo sapiens
cacattttgcctctggttggtggaaagcaacagctgcgaatgcggatcaagcttacatataatcacaagggctca

SEQ ID NO: 204678 - DNA, 73 bp, Homo sapiens
ggacgacgcccggcgccagcacatcgcagttccagatgttgaagtgaaaggagagtgttctagctattatctc

SEQ ID NO: 204679 - DNA, 76 bp, Homo sapiens
cagattatggctttgtccccacccagcactgatgatattataaaatgtgttcagagcaacattgttttgttgacac

SEQ ID NO: 204680 - DNA, 100 bp, Homo sapiens
acaccaccttcatctccaccatcgattccacagtggtgtgtggagtacatgcgatcattaccaggacccaagagaggagttgcctgtacccaacccagga

SEQ ID NO: 204681 - DNA, 100 bp, Homo sapiens
ttatgacgcgccgtggtttttgattctggcggaagccttcccgagtcgagagaacgtgcagcctcctctcaagtcctcactgccatctcttccaaacact

SEQ ID NO: 204682 - DNA, 83 bp, Homo sapiens
accgtgttcaggcaggaaaacgtggatgattactacgacaccggcgaggaacttggcaggggggacacagcgattgccacgcg

SEQ ID NO: 204683 - DNA, 83 bp, Homo sapiens
aagcttgggctcacttccacaaatgtttaagaattgtttaagctgcatcaatggagcacatacagggagcttggaagacgatc

SEQ ID NO: 204684 - DNA, 101 bp, Homo sapiens
ggcggacgttcttgttctgtggagaataacggctgcacctggagattgacgcagagtgggcggcggtggtgtgtttcagaaatacaccaagtacagtaagc

SEQ ID NO: 204685 - DNA, 100 bp, Homo sapiens
gctaaatgttcttccattagcattgcagatcactaacatcgctgggaacattatggagctgtgactgatgagaattaaaggccatggatgaagatgggct

SEQ ID NO: 204686 - DNA, 114 bp, Homo sapiens
agcgagctgagtggttgtgtggtcgcgtctcggaaaccggtagcgcttgcagcatggtgagaagccctaccactgcaactgggacggctgcggctggaagtttgcgcgctcaga

SEQ ID NO: 204687 - DNA, 100 bp, Homo sapiens
ttttcttgttggagaggtggaaacagcggatgattctggaactgggagaagatggctttaaagaatacacttcaagaacagaggcggctgagccaggaac

SEQ ID NO: 204688 - DNA, 51 bp, Homo sapiens
gctgtatggagcgattttgcagatgctgactacacagacttagtcttctcc

SEQ ID NO: 204689 - DNA, 75 bp, Homo sapiens
tctatgaacatggcgatggctgcgtgtcctgccccacagctccagacctgcaggaaagtgacggccagaggaaag

SEQ ID NO: 204690 - DNA, 74 bp, Homo sapiens
ggaaggcgcgcccccctcccctgacgatgtcaccgtcagcaacgcagtcctggatcagtgacattcgagcagga

SEQ ID NO: 204691 - DNA, 117 bp, Homo sapiens
tcatgtcaagcgaagccttgaaaaagctgccctgagacggtgtcccgccgaaaggaacgaatgcaggaatttgggaactgagctgtgcaagtgctgaagaaggagatttgtttggag

SEQ ID NO: 204692 - DNA, 75 bp, Homo sapiens
cctgatgatcacgcagctggctggcttcagtggaccagttgggataattcttcactattccacccttgccacagt

SEQ ID NO: 204693 - DNA, 100 bp, Homo sapiens
cttcttagaagccaaagaaggagatttgcacagaggagatagagaggaagctgaacgtctaccacaagggagccaagatctggaaaatgctgattttctg

SEQ ID NO: 204694 - DNA, 101 bp, Homo sapiens
ctggcccccgaggaggagcagaggatcaatgcggttcaagaatcgattccagcggtaaacactacacgtgaagagtggtgaaagggaacattgattactga

SEQ ID NO: 204695 - DNA, 100 bp, Homo sapiens
accttccttgctttcagaatttcacccaggttctgacaggccattgaacacccagttcgaaccaatcagattccacgtcagattcctgaacagtcgttct

SEQ ID NO: 204696 - DNA, 50 bp, Homo sapiens
aggaagacttgtaacctggagaagagccacataactcatcagaatggttt

SEQ ID NO: 204697 - DNA, 82 bp, Homo sapiens
gaacaacaatatcggcattctgtgctacgaaggtactccaaagattcaggtttactcacgtcatccagcagagaatggaaag

SEQ ID NO: 204698 - DNA, 83 bp, Homo sapiens
cccacgctggccggacagggccgcctgtcgccggggtttggacagaggagccaaaggccaaatttccactttcagcagtttta

SEQ ID NO: 204699 - DNA, 108 bp, Homo sapiens
ctgggattggagattccacccaaacttgctggtcactgggagttagggcctagtcaaaattttgaagctgagtcaattcaagataatgcgcatatggcagagggcaca

SEQ ID NO: 204700 - DNA, 50 bp, Homo sapiens
gcgcaacgccaacctcaggcgagatgaaacgggtatgcaggagattagaa

SEQ ID NO: 204701 - DNA, 100 bp, Homo sapiens
agttcgggccggctgtcctggcgcgtgtgtggacaatatacgatgtaatggtttaatgactatagtgtttgaagagaattccaaagtcactgtgccacat

SEQ ID NO: 204702 - DNA, 91 bp, Homo sapiens
gataagaaaacacatctttacacactaacatcagaagagctaacaattgctggaatgacctttacaacttttgatcttggtgggcacgagc

SEQ ID NO: 204703 - DNA, 75 bp, Homo sapiens
caacattcttctgcctccaattatttttcatgctggatacagcttaaagaaggtcctgttattgccttggagttt

SEQ ID NO: 204704 - DNA, 83 bp, Homo sapiens
cgcaccgactatgtcgcctgccaccgagccgggcccacctccccaccaaggaaggccaaatagttgcatcacatgtatctaat

SEQ ID NO: 204705 - DNA, 98 bp, Homo sapiens
agctttgccgcggcagacgcctgaggatgatgccccagctgcagttcaaagatgccttttggagggtcaccatgaagttcaatcccttcgttacctcg

SEQ ID NO: 204706 - DNA, 74 bp, Homo sapiens
cggactgcacaactagcaagacttcaggtttctgacgtagaagagcttacccctccagagcatctttctgatct

SEQ ID NO: 204707 - DNA, 110 bp, Homo sapiens
cggcgctctggctctggctgtgcgcgctggcgctgagcctgcagccggccctgccgtgtactaatggtcacttgatgtgcgctggctgttttatccacctactagcagat

SEQ ID NO: 204708 - DNA, 48 bp, Homo sapiens
actatcaagttgggatcaggcagagatgtttcagaaagaacaagtgga

SEQ ID NO: 204709 - DNA, 90 bp, Homo sapiens
cgcttcagataaagaaaatgtcaccgtggctgcagagatctcctgggatcactctgaggaggtaaatattgcagattttcaagagaatca

SEQ ID NO: 204710 - DNA, 100 bp, Homo sapiens
gggaaacccacaggaggcaaccacactagtttaggtggccatggtggaggtgcagctggagagtgaccacgagtacccaccaggcctgctggtggccttc

SEQ ID NO: 204711 - DNA, 98 bp, Homo sapiens
aagtcttcgctgccatgggggccgtcatgggcaccttctcatctctgcaaaccaaacaaaggcgaccctcgaaaggtgaccatccacggcaagatagc

SEQ ID NO: 204712 - DNA, 100 bp, Homo sapiens
catgccaagatgtatctactgtatccatgcactcaggatgaagagactcggcacagccttgagtgcatccaggccaatcagatctttcccaggaagcagc

SEQ ID NO: 204713 - DNA, 50 bp, Homo sapiens
ggacgcgaccataactctaaaaggacacattggcgtgagacctgggagta

SEQ ID NO: 204714 - DNA, 82 bp, Homo sapiens
ctcaggctggaacttgccctgtctcctcgcagatgagatggggcattctcttctcccaccctcgggactttaccccagtgtg

SEQ ID NO: 204715 - DNA, 75 bp, Homo sapiens
cgtttgttcaggaaccaccagtgacagagactgatcctttgaaatactccagccatgactaaaagagaagcagag

SEQ ID NO: 204716 - DNA, 100 bp, Homo sapiens
agcagagggcaactctcactggaaaccaaatctcctggcaccttgatcttggattttacagcctccagaactcacgaaagcaagagattatcaaagtcac

SEQ ID NO: 204717 - DNA, 75 bp, Homo sapiens
aaggacggcgttctggatctcaaagcgatttgcctgaagacctggataatctccatttttgtcatggactgttaa

SEQ ID NO: 204718 - DNA, 51 bp, Homo sapiens
caggattcttctttgcagcaagtgacggcctctctcttaggtgcaccttct

SEQ ID NO: 204719 - DNA, 100 bp, Homo sapiens
ggggacaaatccgcgatcccagtcatgcatgttctggcctataggaacaagacattttcagtaatggaagaaggagcttccaggctggggaagatcatca

SEQ ID NO: 204720 - DNA, 76 bp, Homo sapiens
acaacatgtcccaacattacatcccaatattgatgatgttaagaagttcaaaccgggttacctggaagctactctt

SEQ ID NO: 204721 - DNA, 82 bp, Homo sapiens
ggttattcgagtgaccgagaccgcggccgggaccgagggtggcagtagagaagagcatcacagaagttgctcaggagctgac

SEQ ID NO: 204722 - DNA, 98 bp, Homo sapiens
ctcgggaggcgcctggggcggccgaggggcggctgcgggcactgctgagccaactgaggatccgggctgaggaggagatgttaaagtaacccatcttg

SEQ ID NO: 204723 - DNA, 100 bp, Homo sapiens
ggatgcaccttcccctgccttggaaaggtcacagtgctgtcgatatcaccaaggtggctagaagacatcgcatgtctccttttcctctgacatctatgga

SEQ ID NO: 204724 - DNA, 100 bp, Homo sapiens
gactctgactacgatgaggtcccagaggaggggccgggggccccagccagagtgatgaccaagaagggggccgaaggccagagaccaggatttggctacg

SEQ ID NO: 204725 - DNA, 74 bp, Homo sapiens
ttcagccctgaagacatccagatcattgcctgtccatctatggaacagaggggcacagccgaacccttcccgag

SEQ ID NO: 204726 - DNA, 89 bp, Homo sapiens
agtggacgctgacaccgtcactgagctggcccagaatgatggtcgactgaggttgagccgtcagggcatcatcttcaagaatagcaaga

SEQ ID NO: 204727 - DNA, 90 bp, Homo sapiens
cgatatttggatatctaacatcgtaaccagagaagaaaggagactcacttatgtgcacaatgaaaagaatggtttgtcattcattgaaac

SEQ ID NO: 204728 - DNA, 100 bp, Homo sapiens
cgagctgagtggttgtgtggtcgcgtctcggaaaccggtagcgcttgcagcatggtgtgggcaagagcagtttactgttgcgttttgcagacaacacttt

SEQ ID NO: 204729 - DNA, 97 bp, Homo sapiens
cctgtgggacgctccgtggatgaggctctgcggctggtccaggccttccagtacacagacgagcatggggaaggtgttaagccccacctacaagcag

SEQ ID NO: 204730 - DNA, 74 bp, Homo sapiens
gaaaccttcgtgatgagattgactgtagccgaggatttggactgagcaacaaatttgaatctgaattcccttct

SEQ ID NO: 204731 - DNA, 100 bp, Homo sapiens
cagagcacctaggattaaattggtttcctaaatacaaggtctcgctgttctacctaggctgttctagaactcctaatgtcaagctatcctcctgcctcgg

SEQ ID NO: 204732 - DNA, 88 bp, Homo sapiens
ggactcccgcggcgggaggagcctgttcccctgaggagtcacatgccataggaaaaaagcctgaaaattcagcagacatgattgaaga

SEQ ID NO: 204733 - DNA, 100 bp, Homo sapiens
tggctaaaagtgcggaggtcaaactggcaatatttgggagagcaggcgtgggcaagtcagcaaagtgtgggatgctgtctcaggagatgaattgatgacc

SEQ ID NO: 204734 - DNA, 90 bp, Homo sapiens
caaactttaaacttatttacagatatgcgtttgactttgcacggttcaatctcatccctcccagcagctccccttccaccccccggggaa

SEQ ID NO: 204735 - DNA, 101 bp, Homo sapiens
gtcgtcatccccttccagttcgcctggccgaggctgtggccaggccagctgggctcggggagcgccagcctgagaggagcgcgtgagcgtcgcgggagcct

SEQ ID NO: 204736 - DNA, 75 bp, Homo sapiens
gcatgtccctgcttgtcagggctgagagcgacgatgagtttgatgcctacatcattgtgtctttcgtgaatgcca

SEQ ID NO: 204737 - DNA, 109 bp, Homo sapiens
gtgccaagtaccgaggtgccttctgtgaggcaaagattaagactgtgaaaaggctggtgaaagttaagggtgtgtttgaccatcgaatgaagtgctggcagaaatggga

SEQ ID NO: 204738 - DNA, 74 bp, Homo sapiens
ttggagaactacaagaatctcattatactagggagactcacattgggacttgtcctcctcctcctggacatttt

SEQ ID NO: 204739 - DNA, 83 bp, Homo sapiens
ctctcatctccggccctctcggcgtccgccagcgatggcacagtttggtgccctggttgtcagatgttggaaagcagtaggac

SEQ ID NO: 204740 - DNA, 76 bp, Homo sapiens
agaatatgaagacatagctgtgaagctgggaactgatctagaatagttccttcaatggtgccttagctgctgttcc

SEQ ID NO: 204741 - DNA, 100 bp, Homo sapiens
ctcaacagtttgtggcaagacaagctcagaactgagaagctgtcaccacaggctgttggagagccgcccctcttcctggctgcttctatcttctttgcca

SEQ ID NO: 204742 - DNA, 71 bp, Homo sapiens
aaaaatgaatggaatgctcctaaatgatcgcaaagtctctttcctctcaggatcctgctctttccctgaaa

SEQ ID NO: 204743 - DNA, 100 bp, Homo sapiens
ctcccctacgcgctacacaagtggagctccttttcctccacctaccttcccgagtgcaatggatgagcttcatagtctggatccaagaaggcaagagtta

SEQ ID NO: 204744 - DNA, 80 bp, Homo sapiens
aggtgaagaggtgtgaagagctagagcgaatattggctagccatccaagaaaacaccatgaaagataacgatatcaagag

SEQ ID NO: 204745 - DNA, 75 bp, Homo sapiens
actgtttgaggataactgacttaaaatctgggagcatgcaagttgtccccttggacaaacagatcacaatcatag

SEQ ID NO: 204746 - DNA, 80 bp, Homo sapiens
aagatccagtctccgcaagagaaggaagctctttatgccttaacggtctcgaatttatttggaagggaaaatagactatg

SEQ ID NO: 204747 - DNA, 83 bp, Homo sapiens
ggaggatagtgacctctcacctgaagaacgagctcagagtcaagatctccactgaagttggcatcacaaatgttgatctttcc

SEQ ID NO: 204748 - DNA, 74 bp, Homo sapiens
gccccccagtcttgctgtccctggagcagcatcgaggcccgggaggacaataacggtgtgattggactgttgga

SEQ ID NO: 204749 - DNA, 134 bp, Homo sapiens
tctcagcaccttggcgaagccttgggtttctttcttaaaggactgatttttagaactccacatttgagtgtctaaaaagcacggcaagctcattacgttcttacgaacattcatgaagtctcgtccaacaaaac

SEQ ID NO: 204750 - DNA, 100 bp, Homo sapiens
gttgaggcatctggacaccacacacatcatcagtctggtatgagcagcagcgggacaatcttgcccaacagtcattcaacatggaacaagccaattatac

SEQ ID NO: 204751 - DNA, 100 bp, Homo sapiens
ggaacctgttgataaatgcaaaacagtggctgttgcaggtgccactgattaatgaacttgaatcagcaatacatcagctgtacaaacagcgagcttcccg

SEQ ID NO: 204752 - DNA, 105 bp, Homo sapiens
gagatcaaatggcacttcattggccacctacagaaacaaaatgtcaacaaattgatgggcacgttgcccctggcctcgcaggagtcggccgtggtggaggacctg

SEQ ID NO: 204753 - DNA, 82 bp, Homo sapiens
gggggactccaggaaaagccgttgagaggaccatcacaacctgagcagcacaggtggagccatcgaagcccccacccacagg

SEQ ID NO: 204754 - DNA, 75 bp, Homo sapiens
caatatttgccaataagaatggttatgtcatttgatccttcaaaaatcacaaggaagaaaagtgttataacttat

SEQ ID NO: 204755 - DNA, 76 bp, Homo sapiens
gagctgtcaggttggctccgcgtagctacagcaagctgggtagcaggcagatccaaaggatatcatgaagtttcca

SEQ ID NO: 204756 - DNA, 100 bp, Homo sapiens
ccccgccaactctgacctggccaattctgacgccctcaaggtcgccaaggaggtggacccccaggtctattatcctcccagtccacaacgctgaaccgtg

SEQ ID NO: 204757 - DNA, 102 bp, Homo sapiens
gagcgagctgagtggttgtgtggtcgcgtctcggaaaccggtagcgcttgcagcatggctaactatatgtcagaaagcatcagcttttctcgatggacccat

SEQ ID NO: 204758 - DNA, 83 bp, Homo sapiens
cgccgcacggatcatggccgcagccgctctggggcagggcgccctgcgtccggcagaggaggcgagcatcccgctcaggtgat

SEQ ID NO: 204759 - DNA, 100 bp, Homo sapiens
ccagggaccgggggaaccgccgccccggccggacctcgaccctgagctctatctcagtgtacacgatggcggtgggaccccccgactgccctgtgggagg

SEQ ID NO: 204760 - DNA, 90 bp, Homo sapiens
gtggaagtcccgagttgaggaggtggatggcagcctagtcaggatcctcttcctggatgatccactcacaaatctgaatacggcttttga

SEQ ID NO: 204761 - DNA, 75 bp, Homo sapiens
gtgcctccattcccgggaggggggagcggcgttggaggccaccgtttccaggttttgagcaaaattttggactgt

SEQ ID NO: 204762 - DNA, 100 bp, Homo sapiens
gaaaagaatcactggtgcaatgtgtgaagagttgagcgttatgatgaagctgctcagctcggaggatgaggttctggtgggcaacgctgccctctgcctt

SEQ ID NO: 204763 - DNA, 119 bp, Homo sapiens
tttcttctcaccatttctggccaaaactacaaacaagacttcgcagacaatgcagatcttcgtgaagactctgactggtaagaccatcaccctcgaggttgagcccagtgacaccatcg

SEQ ID NO: 204764 - DNA, 75 bp, Homo sapiens
caaaaggtgatctggacaaaggaacaggtatctcaggtagtgtcagtggctgagtatcaccgcaggatcgatgct

SEQ ID NO: 204765 - DNA, 100 bp, Homo sapiens
acagacatgctgtgggagtctggcttatgcagcacctgagttaatacaaggcaaatcatatcttggatcagaggccttcccttcttcttggtggtgttct

SEQ ID NO: 204766 - DNA, 98 bp, Homo sapiens
catgtatttaaccaagttccaacaaaagaatgctgccgcaggaacagcatatgccatatatgagctggctgtggcttcatttcccaagaagcaggagt

SEQ ID NO: 204767 - DNA, 100 bp, Homo sapiens
cgttcatgtaaacagcatgacgtgaggccgtggatgcaggcattaagtgccaaatctttggagtgttgatggagaagttacagtagctgaacagaagccg

SEQ ID NO: 204768 - DNA, 75 bp, Homo sapiens
gctgatctacaagaaaatccacaagaacgcactttcctcccagtgatccccccaggggtgcccgatgcccacccc

SEQ ID NO: 204769 - DNA, 100 bp, Homo sapiens
ctcgaccttcacaggactcttcattgctggttggcaatgatgtatcgcttgacaaaagtaagctgaagccaggaacaagagttgctttggatatgactac

SEQ ID NO: 204770 - DNA, 99 bp, Homo sapiens
cgaacgcttcgctggccatttaggagctctgctcaaagccagacggttctaaatgagaagaaacttcaagaggttgatagtttatggaaagaatttgaa

SEQ ID NO: 204771 - DNA, 100 bp, Homo sapiens
ccaggaggtaatctgggcgcacagaatttatctgaggatgccggaccagatctctgtctcggagttcatcgccgagaccaccgaggactacaactcgccc

SEQ ID NO: 204772 - DNA, 97 bp, Homo sapiens
cctttaactctccttatgctgggtgaaaacaaaggtggaagaagctgggcaggtgttcctgttaatgaaaaaggattatcgaatctcccgaaatgtt

SEQ ID NO: 204773 - DNA, 98 bp, Homo sapiens
gcgggccaccgactatgtgttccggatcatctaccccggccacaggcacgagcacaagaatgtcaccaatggcacagtgggcggcacagcagagccgg

SEQ ID NO: 204774 - DNA, 96 bp, Homo sapiens
gaaattatgaagcggacaagaaagacagatgtgaatgcctcaaaggatgagcagcagcaagagatggccgcttctgccgccttcatagaccggcat

SEQ ID NO: 204775 - DNA, 88 bp, Homo sapiens
tagttctgtgacttcatcttctgatataaaagaccagtgtcttaagtaccagggacccgagctgatccagaaagccaacggtctccac

SEQ ID NO: 204776 - DNA, 51 bp, Homo sapiens
ctatttgcttccaaaggatcaggggcaatgtgtatgtgaagtgcccatcaa

SEQ ID NO: 204777 - DNA, 98 bp, Homo sapiens
aaatttaaggaatgccaaaggctccaaaaacaaataaacaaactttcagatcaatcagtaactataactacccaatattgcagccatggagtccatgc

SEQ ID NO: 204778 - DNA, 71 bp, Homo sapiens
ggattcagacctctctgcggccccaagtgttcgtggtgaccttgggaaaggtgttgaaagtgatcgtcgtc

SEQ ID NO: 204779 - DNA, 100 bp, Homo sapiens
ctgtgacctgtggagacacggccagatctgccctccagctttaaacctggccagcggaaagttttatttacctgtttcaagaggaatgataaacgtgaag

SEQ ID NO: 204780 - DNA, 75 bp, Homo sapiens
agcgggatctaacccaggagcagacagagaagctgctgcagtttcagatttggtgcttccagatgtgagttatca

SEQ ID NO: 204781 - DNA, 74 bp, Homo sapiens
atggatgttcttcttcgagtatttgtagaaggatgaggtttatataactttccaagacaaggaagttgtgcaaa

SEQ ID NO: 204782 - DNA, 100 bp, Homo sapiens
cgtgctcaagagggactggacggctgagctgggcatccgacacgtactgctgatgggaaagggctccttcaagtatgcctgggtcttggataaactgaaa

SEQ ID NO: 204783 - DNA, 88 bp, Homo sapiens
gctggcgcgcagcctcagctaggacatagctcgccttttgcaagaaaaggagttacaggaagagaaaaagagaaagaaacactttcca

SEQ ID NO: 204784 - DNA, 100 bp, Homo sapiens
ttaatgttagcgttgttaatactacctgcttttggatagaatgtaaagaaacctccacagctgttgagaaaaaggagaaacctcttccaagacttaatat

SEQ ID NO: 204785 - DNA, 89 bp, Homo sapiens
tcttgcaacagtggccgcacgcatagctgattggggccctggtcctgtctgtgggcatctatgcagaggttgagcggcagaaatataaa

SEQ ID NO: 204786 - DNA, 100 bp, Homo sapiens
gaaatgcccgggtgattctgcctggaatgactgcttgtatcgaatgcacgctggaactttatccaccacagcttggatttacactgggcaacgtggttgg

SEQ ID NO: 204787 - DNA, 144 bp, Homo sapiens
tggtctgctggtgggactcaatgttctcgatgccaatctctgcttgaaaggagaagacttggattctcagaaatatggctacacacacctttctgcaggagagctgcttcgtgatgaaaggaagaacccagattcacagtatgg

SEQ ID NO: 204788 - DNA, 90 bp, Homo sapiens
cccaaatacaacaagaattagaaactccaatgagagaacgttttaggaatctagatgaaggaactcttttctggaggcaacactgggatt

SEQ ID NO: 204789 - DNA, 75 bp, Homo sapiens
cctggccatgagcctggctcaggcctgcatgatccccgtcgaggtcaagatcaagatccaggtctatttcacgac

SEQ ID NO: 204790 - DNA, 75 bp, Homo sapiens
tggaggcagaggtggcatggggtcccagctagtccacagggaccagcagtgccatggaaggatttaacatgtctc

SEQ ID NO: 204791 - DNA, 130 bp, Homo sapiens
cggccaagaaagacaaagacccagtgaacaaatccgggggcaaggccaaaaagaagatttaatccagagactgacttcactatagaacccacagttgtatcaatggttggggaaagatagtggcaacagg

SEQ ID NO: 204792 - DNA, 106 bp, Homo sapiens
gatcgccgagcccgacctcgggcgccccgccggtcacctccgcgcggacaccagcttccacagcgcggcacctgtacctccggggtggcgctggggttggctccat

SEQ ID NO: 204793 - DNA, 96 bp, Homo sapiens
ggcgtctcatggcgttggaataccggctctcagcggcttgtttgattgcatcgaggtctatgcccctggcttcaaggactctgtggttggcagaga

SEQ ID NO: 204794 - DNA, 100 bp, Homo sapiens
gctgtagaccggagctgttcctattcggccatctttgctcctccctgcaactaactccattcttaattggatcctttaggaaaaagacccaatcctcccc

SEQ ID NO: 204795 - DNA, 100 bp, Homo sapiens
tactgctctagtccaggaccagagacccccaactatatagcaggtgctggagaatctggtaaaagcaccattgtgaagcagatgaggatcctgcatgtta

SEQ ID NO: 204796 - DNA, 83 bp, Homo sapiens
cccgcctccatctgaagagggctccaggcatccggtcctggtccctgctggttggattctgtttcactgaggccatctatccg

SEQ ID NO: 204797 - DNA, 98 bp, Homo sapiens
gcgaatatcgtcatcgttagaaggtgacaaccagggcatccccatcatgtccagcatcaagctgaaagaggagcagcgcataaccaccacctccccct

SEQ ID NO: 204798 - DNA, 83 bp, Homo sapiens
cttctggaagctactactacgtggtgcttggaaaggtttgcctgcaatgagatttcattctctacatttaaaggacatccttt

SEQ ID NO: 204799 - DNA, 72 bp, Homo sapiens
taagaagaaaaaggagcggaagtcattgccagaagaagatgtagccgtacacattcgagtagcttcaccacc

SEQ ID NO: 204800 - DNA, 98 bp, Homo sapiens
gtgatccctcaagactggtccacggagtgtatgaccacaaacagccatcaagatgtcaccgggtgcgcatcaatgtacctccacacagagggcttctc

SEQ ID NO: 204801 - DNA, 83 bp, Homo sapiens
ctctgggcgaaaattggatgtgaaaatgaagccagaccgaggtgatgtccttgcaaatatcaatggtgtgagcacagaaggtt

SEQ ID NO: 204802 - DNA, 100 bp, Homo sapiens
tcggtggccgtgccgctcgacctcctggtcagcacttaccggctgccccagatcgcgcgcctggacaacgaaaaagcatgctttacgctgttattgtcaa

SEQ ID NO: 204803 - DNA, 104 bp, Homo sapiens
gtcctgagcggccaggacgacgaggagcagggcctgactgcgcagtgacaaccatgagtggaaaaaactaattatggttcagcactggcctgagacagtatgcg

SEQ ID NO: 204804 - DNA, 75 bp, Homo sapiens
cctaataaggagccatggagaaaaatggatcttaggaattcttccatctctatgacaacaagcccattttagctt

SEQ ID NO: 204805 - DNA, 100 bp, Homo sapiens
caaaagatacatcatcaagactattaccagtgaagacgtggccgaaatgcacaacatcctgaagaaataccaccagcgctgctgctgaagctgatggtat

SEQ ID NO: 204806 - DNA, 78 bp, Homo sapiens
gatgtttctgacgaatatcaatattttctctcttctttggtcagcaatgtcaggttagagccacagctgaaacaacta

SEQ ID NO: 204807 - DNA, 82 bp, Homo sapiens
cccatttgctgaccttggcgacctcagctccggcctccaaggtggacgacatccttggagaaggcagcgacgacagcgacag

SEQ ID NO: 204808 - DNA, 83 bp, Homo sapiens
cccatcctgccgtccttctccactttcgccagcccgtgccgcgagcgcggcctgcaggagtacctggagtagaacagaaaaat

SEQ ID NO: 204809 - DNA, 75 bp, Homo sapiens
cgcatgagaattgagagcctttcatcccagctttctaatctacagaaagagagctgttcctttgggtaccatgct

SEQ ID NO: 204810 - DNA, 80 bp, Homo sapiens
ccccctccctcagcttccgccccaaaaggatggaaaggcagatgtaaagtccctcatggcgaaatataacacggggggca

SEQ ID NO: 204811 - DNA, 100 bp, Homo sapiens
cccagcccccagaaaggattgtgacatatcgttggacccagaattgagtattctaccttgtaaatactgttatttgtatatactgtaaatgatgacatcg

SEQ ID NO: 204812 - DNA, 75 bp, Homo sapiens
ccagacctgcaagctctttgacacacagcagttcttgtcaggtctgatacgtggcgcctggtgaacccaccagca

SEQ ID NO: 204813 - DNA, 83 bp, Homo sapiens
cctctgcctgctggctgcacccgcctccgcgctcgtcagggtggatgtgaacactgaccggaagatcagtgccaaggagatgc

SEQ ID NO: 204814 - DNA, 75 bp, Homo sapiens
tgtgactgcaaacttcctaattctaagttgagcagctttgatctccggagccgcctgtgccgcatcatagctgag

SEQ ID NO: 204815 - DNA, 75 bp, Homo sapiens
cttacgtctctgctcttcagtacaatccttcactgtgtgcccagtattctgcagacaaacgagaagatgagaaga

SEQ ID NO: 204816 - DNA, 50 bp, Homo sapiens
atggagtccatcttccacgagaaaatttcatttacaaacatggtttcagt

SEQ ID NO: 204817 - DNA, 90 bp, Homo sapiens
ccatgaccgaggagagctctgacgttcccagggagttgatagactggattatggacagaacttggaaatattgagaataatttcttaaag

SEQ ID NO: 204818 - DNA, 82 bp, Homo sapiens
agaaaacggcgagagtgggcgagaacgtccactgcgggccggcgaaagctggacttcgcaggtgagcagtaacggaaatcag

SEQ ID NO: 204819 - DNA, 59 bp, Homo sapiens
tgaaagaaagattagagaaattcttccatcgggtttcagcaaccaaggagcacacaccc

SEQ ID NO: 204820 - DNA, 83 bp, Homo sapiens
cgacttcggcggcgccacgagagcgggcagcggaggagatcgatcctgtcctcggtaccgtgggctttgggtctggcctccac

SEQ ID NO: 204821 - DNA, 100 bp, Homo sapiens
ggaaggactgcgaaccttagatgacctccgagagcagccccagaaactaacccaacagcagaaagcgggtttctctactcggacgaggtgcagattggcc

SEQ ID NO: 204822 - DNA, 74 bp, Homo sapiens
tgtcagaaggtgcattttaccttttcatggcatcgtgtgctgaaccctctgagccctctgccccactgcccgcc

SEQ ID NO: 204823 - DNA, 118 bp, Homo sapiens
aattgttcagttgcaaaaagaaactggagccaccatcaagctgtctaagtccaaagatttttacccaggtgaccaagaatatggcccaggtgaccaaagccctggacaaggccctgag

SEQ ID NO: 204824 - DNA, 75 bp, Homo sapiens
cttgttagcagcttacatccttcaagatgttttactgtgcctggctaactatagtcgagggggtgatggtcctat

SEQ ID NO: 204825 - DNA, 90 bp, Homo sapiens
cacagtgttaacaatgcatccacagagaatatcctccgaatcctaaatctagagctccaaggatgctggtcattaagaaaggtaatacaa

SEQ ID NO: 204826 - DNA, 83 bp, Homo sapiens
cttctgcgggatcttcaaccacctcgagcggctgctggacgaagtgtactaatggtcacttgatgtgcgctggctgttttatc

SEQ ID NO: 204827 - DNA, 100 bp, Homo sapiens
gggcttcgctgctcagccagctcctgcgaccgccctgcgcttcgtgcaccggggcggtccgttgccaaagccaggtactgaagaagacctggaattttat

SEQ ID NO: 204828 - DNA, 95 bp, Homo sapiens
acccgggacccgcccgcccgcgggaggtgtggaagatttccttacaagggccgtgttacatgacactgttaatgattgcatttggcttgctgtgg

SEQ ID NO: 204829 - DNA, 85 bp, Homo sapiens
cccatgcagtgaccactgatactaagttcagaaactacctcatccccaagggcacagtcgtagtgccaactctggactctgtttt

SEQ ID NO: 204830 - DNA, 100 bp, Homo sapiens
ggaagaactgaccagagctgatcccgagcagcgtcatgtacccctgtgcggctggaagtatttcgggcagaggagctgatggcatgtgcaggattgacct

SEQ ID NO: 204831 - DNA, 101 bp, Homo sapiens
gcctctggcgtgcctgccatgacgtcatagctctgcggaggtggaagttggggagctttgaggccggaaggtggtggtcgtacgctgtgaaggcatcaaca

SEQ ID NO: 204832 - DNA, 100 bp, Homo sapiens
gtgtgtgtagcagcagtgacactgggctctttaccaatgatgaagggcgacaaggtggcgctcaggcacgaggatggcgatgagaccacggagccacccc

SEQ ID NO: 204833 - DNA, 100 bp, Homo sapiens
cctgcataccatccgcgaccgagtctggcagatccagtcttgctcagctctcacaggagagggcgttcagctgagatctgtatctgtggacctgaatgtt

SEQ ID NO: 204834 - DNA, 100 bp, Homo sapiens
ctgctttcaggaacattgctgtggattcccaggggccacctacagatgctcctgcagtggacacagcagaacaagtctatatctcttccctggcactgtt

SEQ ID NO: 204835 - DNA, 100 bp, Homo sapiens
tacagatatctatgatcgaaagaacatgccaagatgtatctactgtatccatgcactcagttcctggaagttcatctaaatgggaggaagtacagtccaa

SEQ ID NO: 204836 - DNA, 50 bp, Homo sapiens
accgagtcagtgctcttacccaggtatttgtggaaacattagacaaatgt

SEQ ID NO: 204837 - DNA, 113 bp, Homo sapiens
gatcgccacctaccgcagcctgctcgagggccaggacgccaagtcgggcctctctggccttgggagctgcttgcctggctcctacctgtcttctgagtgccacacctctggct

SEQ ID NO: 204838 - DNA, 100 bp, Homo sapiens
tgctgatgtcagttaactctgagaagtcgtcctcttcagaaaggtatttctgggaaaagccagcttctgtttgcactggtcttcacaactcgttacctgg

SEQ ID NO: 204839 - DNA, 100 bp, Homo sapiens
cgagcagcaccagggcgccgggttagggcagacgctgtgctcgctggcaccccgaacgggttgcttcccccgctgcgagataaactcatcctgaaagtcg

SEQ ID NO: 204840 - DNA, 100 bp, Homo sapiens
cacaatgatccaatccacgaactgctggacgacctcggcgaggtgcccaccatcgagtccctgatagcaggttcaggagaagtggcacctggtggaggac

SEQ ID NO: 204841 - DNA, 100 bp, Homo sapiens
gctggaagaggcggtggcggcgggtcggggcgagccaacacaagccatcagccccatgctcagctcccagcaggcagagcgttcagaagcgccagcgcca

SEQ ID NO: 204842 - DNA, 82 bp, Homo sapiens
cccccctgcaagccccagcatcatcccccggctgagggccattcgccggtggcccagttgaaatccttcccttcctctacct

SEQ ID NO: 204843 - DNA, 75 bp, Homo sapiens
actgggtcgagcagatgaacttaacaataagcataccatctttggaaagcagagagagatcatcattgcctgaat

SEQ ID NO: 204844 - DNA, 98 bp, Homo sapiens
gcgctgccacgaaactcgtacctgcggctaagagcaggtgctggagaatctggtaaaagcaccattgtgaagcagatgaggatcctgcatgttaatgg

SEQ ID NO: 204845 - DNA, 50 bp, Homo sapiens
ctgcccttcaggactacatcgagttctggagaccagaaggccaaaatcaa

SEQ ID NO: 204846 - DNA, 99 bp, Homo sapiens
ggggtaacctagacctgaatgggcttgaccatctcacaactgctcgcgtgacgaccgcattcgtggcagtgcttagatgagtacgaagatgatgaagca

SEQ ID NO: 204847 - DNA, 75 bp, Homo sapiens
cgaggctgaagccattgctccacaggttggcaatggtttctgcataaagaccaactcctcggaagggaaggtttt

SEQ ID NO: 204848 - DNA, 75 bp, Homo sapiens
tgcctgttcagaagcattaccaacttgatgatcaagagggcatttcgttatacaatcaactagctgaagtgaaac

SEQ ID NO: 204849 - DNA, 90 bp, Homo sapiens
caagaacacacctgtctatgtgtcctcaccaacctgggtgccttttgccagattgagaatgttcctcgtttggatcatttttttaacttg

SEQ ID NO: 204850 - DNA, 90 bp, Homo sapiens
tgaggatggtgtgaccccatatatgattttctttaaggatggtttagaaatggaaaaatgtcttagcagtgtctgcaaaaacgaatcttt

SEQ ID NO: 204851 - DNA, 83 bp, Homo sapiens
ctggagacatggaccgcggcgagcaagagagtgattgactgcctggaggatgagaaggcaaccctcaccttggccatggctga

SEQ ID NO: 204852 - DNA, 82 bp, Homo sapiens
tacaaggaaaagcaccaggcaaaccaccatcacatctcattttgcaaagggaaaagtccaacctgatcgtggtccagagagg

SEQ ID NO: 204853 - DNA, 50 bp, Homo sapiens
caagaatgaagccgcggaccctcgcgctccagtaataaaccgattcacaa

SEQ ID NO: 204854 - DNA, 100 bp, Homo sapiens
gaggcgaaaggaagcaagcagttcagaagagccaaggaataaacatgcaatgaacccaaaaggttggttaccaaggaagaccccaaagcactggctgttg

SEQ ID NO: 204855 - DNA, 100 bp, Homo sapiens
tttgtctctgatgagctgagaaacaaagccacccagccaatgaagctctggattaatcgaattacagctgctagccaggaacatggactgaagtatccag

SEQ ID NO: 204856 - DNA, 100 bp, Homo sapiens
gccgaggctgaaggaagatggcggacggcgtggaccacatagacatttacgcggatgtcggcgaagagttcaaccaggttatcaatactctggctgacca

SEQ ID NO: 204857 - DNA, 100 bp, Homo sapiens
agctgcagatcgatgacaatgagtatgcctacctcaaagccatcatcttctttgacccagtgcccgtccgtgatgatgggaacatgcccgacgtgcccag

SEQ ID NO: 204858 - DNA, 75 bp, Homo sapiens
gccggaccgagcgcctcgacctcggtctgaggatgaatctggttatagatggacaagagacgatcattctgcaag

SEQ ID NO: 204859 - DNA, 100 bp, Homo sapiens
gagctggagcggcagcagaaggagggttcaggataagtttgaggtgctgaattacacaagcattcctatctttctcccggaagtcaccattggagctcat

SEQ ID NO: 204860 - DNA, 98 bp, Homo sapiens
atcccccactctttccgccctaatggaggtctccagtttcgaagaaaaagtcagcactttttgaagtgtctgaggttataccagtcatgacaaataat

SEQ ID NO: 204861 - DNA, 83 bp, Homo sapiens
cagcgccagcggccgagcgggcggcttcctggcctgggcgctccggtggcggcggaggactggttgccataaaggaagcccac

SEQ ID NO: 204862 - DNA, 51 bp, Homo sapiens
aaatcctgtcctgaagactgtaaggtgatttgatgaaggctgctgcaggag

SEQ ID NO: 204863 - DNA, 82 bp, Homo sapiens
tgaagaccatgacaggaggccgagcgcagagcattggcaggaggggcaaggtggaacaggttcgagaacatcatcgaaaatt

SEQ ID NO: 204864 - DNA, 100 bp, Homo sapiens
agctaccatgccagagccagtttattttcactgtgcagctgttacaccagtttctgacgtagaagagcttacccctccagagcatctttctgatcttcca

SEQ ID NO: 204865 - DNA, 83 bp, Homo sapiens
gtgcgagccctgcccgagggctccctcgccttccccggagtccctggtgctgaaccgcctgcgtccagttgccagcgggggtg

SEQ ID NO: 204866 - DNA, 82 bp, Homo sapiens
gttgcaaaaggacccgggttttcgaaattcttcttatccagagacaggtgaaaggtgtagcagtcactcggcctacacccac

SEQ ID NO: 204867 - DNA, 83 bp, Homo sapiens
gtcggctccagcaccctcttcttcgtgttcacgacactcatgaggaccatgatacttccactgagaatacagacgagtccaac

SEQ ID NO: 204868 - DNA, 75 bp, Homo sapiens
gctgctgctgcccgccggctgccgggcgctggaagtattctaccttgtaaatactgttatttgtatatactgtaa

SEQ ID NO: 204869 - DNA, 75 bp, Homo sapiens
ggagattaagactcttcctgctaaagcgaaggtacatcaggaacgtctctatcaagaatacaatttcagcaaggc

SEQ ID NO: 204870 - DNA, 83 bp, Homo sapiens
ctgcactgggagcgcttcatgtgcaaccttgactgccaggaagagccagattcctgcatcagatgtgctggtggacggacagc

SEQ ID NO: 204871 - DNA, 60 bp, Homo sapiens
aaagctgccaaaagtgacatgcagtacagaacctgctaaggccatcaaacctattgatcg

SEQ ID NO: 204872 - DNA, 79 bp, Homo sapiens
agaggtcccaatcccccactctttccgccctaatggaggtctccagtttcgtcttatgattgacctcattgaagttgaa

SEQ ID NO: 204873 - DNA, 75 bp, Homo sapiens
gggccacccaacttccccacattcctgtagcagtaagagtgggctgtttgcaattatttgcatgggtgcaaaaga

SEQ ID NO: 204874 - DNA, 50 bp, Homo sapiens
agcccccttataagccaaaagctactctatcaagaagaatatctaatccg

SEQ ID NO: 204875 - DNA, 100 bp, Homo sapiens
tggaaaggagacttcaaagcttccatcactgggacagaaagggtacaaagaggatggtgaagctttgctaattttgctaccctcagaaaaagctatggtg

SEQ ID NO: 204876 - DNA, 100 bp, Homo sapiens
accacactatttatatcaacaacctcaatgagaagatcaagaaggatgacctgcctagagctggaacgttacctccagagcgagccctgctatgtttcag

SEQ ID NO: 204877 - DNA, 100 bp, Homo sapiens
gaaggtctctggagacatcttcagcaggactggacctacagagacatctgggattttctgcgtcagctgtttgtcccatactgtatcctgtatgaccgag

SEQ ID NO: 204878 - DNA, 97 bp, Homo sapiens
tttgtctgactacaatattcaaaagttgccagtagtcatcagagtaccaaaactgatctatttctcagtaatgagtgtgtgcctcatgcctgtttca

SEQ ID NO: 204879 - DNA, 89 bp, Homo sapiens
aaagaattttgagagggagagacgaagctttacagaagccgctattcgcctgggattggagatcatgcaacagatgagtgaccaccgct

SEQ ID NO: 204880 - DNA, 51 bp, Homo sapiens
gcggctgtatggagcgattttgcagatgggtgaagaaggtgaatacagtga

SEQ ID NO: 204881 - DNA, 100 bp, Homo sapiens
gacaaacccaccttcatcaaagggagcttgcatcgagagccactgcgagtagctgctgttatgacatggccatttcattctccacaacaagagaagcagc

SEQ ID NO: 204882 - DNA, 82 bp, Homo sapiens
caccccctgacctgcctgggtccaaagttgcttctgcaggaagcctttttggtggcatggtcctcaagaagttcctaaaagg

SEQ ID NO: 204883 - DNA, 98 bp, Homo sapiens
gaaaatcgaatccagagagaaatcgccctggccaagaagcacggcacgcagaataagcgaggttccagcaacagatagaaatgctttaagttcactct

SEQ ID NO: 204884 - DNA, 74 bp, Homo sapiens
tcaaaatggagttgccggagagacagcccaggagaactacgatgacccgcacaaaacccctgcctccccagttg

SEQ ID NO: 204885 - DNA, 83 bp, Homo sapiens
cattacaaagcatggtgaaataggagtccagctacttgctcttttagttcccactttgatatcttacctgctggatgaaaatt

SEQ ID NO: 204886 - DNA, 75 bp, Homo sapiens
gcgcttccacctctccaccaccgaccgcgtcatcaaagttttcggctttgtgagaaaccttaccatcaaacacga

SEQ ID NO: 204887 - DNA, 75 bp, Homo sapiens
gttcctcgctctgctcctggggagcccggcggcagcgctggagcgaggccagccctccagatctctatattgaaa

SEQ ID NO: 204888 - DNA, 82 bp, Homo sapiens
ccttagctgtgctcgcgctactctctctttctggcctggaggctatccagcgtttaagaattgtttaagctgcatcaatgga

SEQ ID NO: 204889 - DNA, 100 bp, Homo sapiens
gagacaggcaaaatgaaagttatctcaattttgctcgaaagagaataaaggtggttatcactaggctaaaactggacaaagaccgcaaaaagatcctcga

SEQ ID NO: 204890 - DNA, 123 bp, Homo sapiens
aagtaccagtttttatccctcacccttggcgatgtactcatagaagaccaatttccgagtccaggttgcacctgtctaactatgacagggatcatagcaggttgcttaatgatacagcaggat

SEQ ID NO: 204891 - DNA, 75 bp, Homo sapiens
aatctgtgagcccaacagtcaatccaatgtctactgctatgcagaatgaacggaaaattgcctaagaattatgac

SEQ ID NO: 204892 - DNA, 100 bp, Homo sapiens
ccaggtgcctaggaatgctaacagtctgggaccacatagaccaccaggcgtgagccactgcatccagcctaaactcactagggagattttttgaatagcc

SEQ ID NO: 204893 - DNA, 88 bp, Homo sapiens
accgtcactctcaaggatctccgtgtagaactccttggagagctgccccagagcacatcagctatgtgccccagctctcaaacgacac

SEQ ID NO: 204894 - DNA, 101 bp, Homo sapiens
tgaatgggccaaggaaaaatcgagcagaaagaatgtctttcaggcatcctattttcattggtggtgatgctgtatgtcatctgggtccaggcagtggctga

SEQ ID NO: 204895 - DNA, 75 bp, Homo sapiens
tcagatatgtattttggaagacaatcccaggctgatgtagttatgcttgtcctagcttggaaattggatgcacaa

SEQ ID NO: 204896 - DNA, 75 bp, Homo sapiens
aacaaaattgtatctgtttttctcagaagagaattccacaaggcagcagataatggcagctttaaactcccagac

SEQ ID NO: 204897 - DNA, 90 bp, Homo sapiens
atgtctttccagcttcctggcggcatgatcatcacgggcttcatgctccagttctacaggataaggaagcctgtgtgggtaccaacaatc

SEQ ID NO: 204898 - DNA, 120 bp, Homo sapiens
cacaacaggggagcagttcctcacttatcgctatgatgaccagcttcagtatcagacacagcacagcagccatctgaagagcaaagcaagtctcttgaaaaaccgaaacaaaaaaagaat

SEQ ID NO: 204899 - DNA, 100 bp, Homo sapiens
tggtggtggttttcggaggcacagacagccagctaaaggtgtggatgagcaaatacggctggagtgccgacgagtcggggcagatcttcatctgtagcca

SEQ ID NO: 204900 - DNA, 75 bp, Homo sapiens
aaggattccaagtaactcttatttggtgtcatcaatcttacagaagaagtgctgtgggtcaaagtgaatataaac

SEQ ID NO: 204901 - DNA, 101 bp, Homo sapiens
cgacgcgaggagctgttcatcgaacagaaggtggcttcccacacttctgactcggacgttccttccggtgtcactgaggtggtcgtgaagctctttgactc

SEQ ID NO: 204902 - DNA, 100 bp, Homo sapiens
tgacggctgtctctggactggacagcagtggcgtccgcttttctctaaggaacccgcctcaaggagctggagtcccaggtgtcgggtctggagaaggagg

SEQ ID NO: 204903 - DNA, 98 bp, Homo sapiens
cttctgtccaatcaggctttgcatcccgggacgcttccggttatggcgtcattatgcagccaggttgttgacctcctgtactggagagacattaagaa

SEQ ID NO: 204904 - DNA, 98 bp, Homo sapiens
ccatctctttagtgtgttacatatgcaaaattacaaaaatgtcatcagctaatgtctacctcgaatcaaaggccagaaatgtacacacaggagagctg

SEQ ID NO: 204905 - DNA, 75 bp, Homo sapiens
gcccaccagaggactcacacaggcgaggattaaatccaccacacagggtgaaatctatctccatgacaacattca

SEQ ID NO: 204906 - DNA, 82 bp, Homo sapiens
ggaccaggggcgagggctacccgctctttgccgtgacaacaccgttcccccagccgggctgacccctttgctgatgcaacta

SEQ ID NO: 204907 - DNA, 96 bp, Homo sapiens
ctaatccacccagagctgaatttaactacagtgtggggtttaaagatttaaatgagtatgctcaggtaatcaaaatgttgggaaatggacgattgg

SEQ ID NO: 204908 - DNA, 90 bp, Homo sapiens
gaagaagaaaacaaaggtagaacatggaggatcgtcaggctctaaacaaaattctggctggtccattcaggtccaggaaagggatcaccc

SEQ ID NO: 204909 - DNA, 112 bp, Homo sapiens
cagccactgagtccagcagagagatcccaatgtccacactccctcctttggacatcagacagtgcaggagaagaatgtgatgcggcagaaggggctgaaaactaaatccata

SEQ ID NO: 204910 - DNA, 98 bp, Homo sapiens
gaaggggcccttctcggtggaggccgacccatccaggatatgtttgccttcatgggcagcctggataccaagggtaccagctacaagtatgaggtggc

SEQ ID NO: 204911 - DNA, 51 bp, Homo sapiens
ctttagtaaatttttatgctgactggtcagagaagaatgccggctcctgaa

SEQ ID NO: 204912 - DNA, 75 bp, Homo sapiens
aattgctaatccagtatttgcggatagctccaaactgggatatgaacgccacagaagtatgatcccactttcaaa

SEQ ID NO: 204913 - DNA, 100 bp, Homo sapiens
ctaaggtcttagatggtacgcgttgctatacagaatctttggatatgtgcatcagtggtttatgccaagtgtcatggagaaactccagctgggcccagag

SEQ ID NO: 204914 - DNA, 82 bp, Homo sapiens
ctcctacattagcgtctacgaccaccaagttgactagataacgaaggacaatgcatatatacaaaattgctgtattgcctgg

SEQ ID NO: 204915 - DNA, 100 bp, Homo sapiens
ccaggcttggtgcaggaaggagagcccttcagcgaggaagctacacttttcaccaaggaactggtgctgcagcgagaggacttccaatagtagtcagaca

SEQ ID NO: 204916 - DNA, 72 bp, Homo sapiens
ggccagccttcggtcttcgtcgatgcctgactcagggcggctgcatcaccaagttggagaccttcatccagg

SEQ ID NO: 204917 - DNA, 100 bp, Homo sapiens
ccaatgcgatgctttgcatcctaaatcagagaaggtgttcgccagcctcccgcaggtggagaggggcgtctccaagatcatcggcggcgaccctaagggc

SEQ ID NO: 204918 - DNA, 90 bp, Homo sapiens
cctcagcacctgcttgtttggaaggttgactatagtcaatggggccaatggagccaagtgtatggaaacccacaacagtatggacagtat

SEQ ID NO: 204919 - DNA, 97 bp, Homo sapiens
ctacccattggtctaaacttgatccaaagacaatgaagagaagacggggtctccctatgttgcccaggctggtaacacagtgtaacctgatgtgctt

SEQ ID NO: 204920 - DNA, 75 bp, Homo sapiens
gccgcggtgaggagagccatgggacgggcagtcaaggaattaaggataacctagacgacataaagaggataatta

SEQ ID NO: 204921 - DNA, 82 bp, Homo sapiens
ccagaatgagaacacgatgccacgccccgtgtccaggagccccgccaggtgcccgcgccaggccctcagtcttcctgccggt

SEQ ID NO: 204922 - DNA, 75 bp, Homo sapiens
gctctattataggaccccagcagcacttcctggaagaggatcagcagtgagtcacagaagtgcatctaaaaaaac

SEQ ID NO: 204923 - DNA, 100 bp, Homo sapiens
tctccactttcgccagcccgtgccgcgagcgcggcctgcaggagcagttggaattgatcacaccttttcagttgtacttcaatcctgaattaatctttaa

SEQ ID NO: 204924 - DNA, 50 bp, Homo sapiens
atctcctcaacatggaaactaagattactgatctctcattacccaactat

SEQ ID NO: 204925 - DNA, 100 bp, Homo sapiens
tcactttatatctgtgacccttttagtggcgttgtctttgatcacctcaaaaagctgcaggaatacagatgaatcaaattgttggtcttggcatttcaac

SEQ ID NO: 204926 - DNA, 98 bp, Homo sapiens
ctgatgacctccacggccagcgaggcagcgtcctatgagttcaccactctgacgtgtattcctggggtcattgaaatgactttcacacgacctgccaa

SEQ ID NO: 204927 - DNA, 50 bp, Homo sapiens
cggcgcgcacacacacctgctgtccagacccggcgacaggaggcatgagg

SEQ ID NO: 204928 - DNA, 115 bp, Homo sapiens
ccgtggccttagctgtgctcgcgctactctctctttctggcctggaggctatccagcggatccatatggctttggagacagtcgagattcaaggcgtgatcgatccccaattcga

SEQ ID NO: 204929 - DNA, 100 bp, Homo sapiens
cgggcggctccgcagtgaccggactcgggggaggtgaatgattccaattgtgaccaagaacttctttccctgctcctggatgccaagctgctggtgaagt

SEQ ID NO: 204930 - DNA, 115 bp, Homo sapiens
aaagaataagattcctcaatcctgagagagagaattaaagtctaactctccaaatattactcttgtctctgctgctcctgggaaagtgatttgtgaaatgaaagtagaagaagag

SEQ ID NO: 204931 - DNA, 90 bp, Homo sapiens
gcatgccctgaaaaagtatcgtcgagaagcctatcatcggcgttgacccggacgacacctataatgagaccccctacgagaaaggtttct

SEQ ID NO: 204932 - DNA, 100 bp, Homo sapiens
aatgctccacttgccgagcctgatgatggggacgtgccgcccctttgcgggttggtgaactcttgaaagattggcgacgtcttaatgttgctataaccag

SEQ ID NO: 204933 - DNA, 96 bp, Homo sapiens
aatccatggaatgacaacaagaaagtgcagataagcagggatgggcagggaggttttacataaatggagtcctaaacaaataggagaacaccttct

SEQ ID NO: 204934 - DNA, 50 bp, Homo sapiens
atctctacacgttgaacgatggagaatggccaccagtccttactgagcag

SEQ ID NO: 204935 - DNA, 100 bp, Homo sapiens
cctgcccctcgttgatgagagcattcgaagtgacctcagcagggcatccagtcactcaagactgcttgcaactgattgcagacagtgaaacaccaactat

SEQ ID NO: 204936 - DNA, 101 bp, Homo sapiens
agacgatgaatttcttgacatggaaaggctcaggcatttgaaaggatgatgagtccaactggttctaatcttaagtctaatcattctgatgaatgtactac

SEQ ID NO: 204937 - DNA, 80 bp, Homo sapiens
ctctgcaacctgataggatttggctacccagcctacatctccatgaagaaagcagtgtcactgataaatgcaatagatac

SEQ ID NO: 204938 - DNA, 75 bp, Homo sapiens
gcggctcctgttgacccggtccgcccgtcggtctgcagcgcggctgagtgccggtggtggtgtgcacattgagcc

SEQ ID NO: 204939 - DNA, 75 bp, Homo sapiens
acatgatccaggaagagcagtaagggactgagctgctgattttcagctgaactctcatctctcaacactggcaaa

SEQ ID NO: 204940 - DNA, 71 bp, Homo sapiens
taatctgcagatgctgacttacctgaacttgaggaagcgctatagaaatgaagggagtcccagccctagac

SEQ ID NO: 204941 - DNA, 100 bp, Homo sapiens
agataatcagagtggaggaagtacagccagcaaactgttcgtcaggtggcacaggagcagttctttttaatgtgcaccagatgttgcatgggacaccggc

SEQ ID NO: 204942 - DNA, 96 bp, Homo sapiens
acaataaaggtgctaagaaagagaatgtaagacaggaaaataattaaatattcttaccgagttattttaccaagaaaatggtttgcacgactttga

SEQ ID NO: 204943 - DNA, 100 bp, Homo sapiens
tctgtatgaccttcgtattgaccaaaagaacaggggcaagtgtccgagtggtgaatcagctacttacagagatggatggtctggaagcacgccagcaggt

SEQ ID NO: 204944 - DNA, 100 bp, Homo sapiens
aagataccagatcatgtcagagagagagcttggttaacttgggagaaagtttcatctgtggatggagtattggtaagaatgattgatgttggctgatatt

SEQ ID NO: 204945 - DNA, 51 bp, Homo sapiens
accccttggaaatagtcagcatacctgctgagatgagtgaactgagtgtgg

SEQ ID NO: 204946 - DNA, 73 bp, Homo sapiens
ctccagtagacggtacagcgaaggcagagagttcagaggtacttggaaggctccatcgcccctgaagacaaag

SEQ ID NO: 204947 - DNA, 100 bp, Homo sapiens
cgccccagagacaccagcttcagtggcctgtcgttggaagagtacaagctgatcctgtccacaggggcccatcctgatggagctgcagacttaccgttac

SEQ ID NO: 204948 - DNA, 90 bp, Homo sapiens
cgcctcctctctcctctcccagttccgcagtccttcctggcaaacagggcgccctgcgtccggcagaggaggcgagcatcccgctcaggt

SEQ ID NO: 204949 - DNA, 100 bp, Homo sapiens
atgttggccagtcaagttcctccactgagctcgctgcgtataaggaggaagcaaacaccattgctaagcttcgcttttttgcaaatgcattcactttgac

SEQ ID NO: 204950 - DNA, 127 bp, Homo sapiens
cgcagatccaagtcgccggacccggtgtggagagcggtgctgaggctacgcgggctggagactcagggcatatgatagatttgtcccacataaatgtggccctgatcgtggagtgagtcctaacaag

SEQ ID NO: 204951 - DNA, 75 bp, Homo sapiens
tgctaggccacttcatagcttcggggatggtcaatcagattgagaggatccagaatccagatctctggaatagct

SEQ ID NO: 204952 - DNA, 100 bp, Homo sapiens
agaacggagcgcccgggatgcaggaggagagcctgcaggatcacccggaagttcaggctgaattctgaaggcaaacttgagcagacggtctccatggcaa

SEQ ID NO: 204953 - DNA, 100 bp, Homo sapiens
aagaaaaaggaagagaggagaccaaaggaaggaaaatgacacaacagagcttcggctatgggactggtttaatccaaaatctttaatctcatgaagtacg

SEQ ID NO: 204954 - DNA, 82 bp, Homo sapiens
ccagatggcagccagtcagtggtggagtgtatccaaagtgtgtacatcagtaagatcataagcagtgatcgagatctcttgg

SEQ ID NO: 204955 - DNA, 90 bp, Homo sapiens
agagtaaccaccactcccaaaaatggaccaggaccaacaaaaactaaaactgcaggtccagacttgaaagagggctccagaaaaagtaga

SEQ ID NO: 204956 - DNA, 75 bp, Homo sapiens
gaggaatgagattagattggtttaggttacagatgaacacagtatagagcatgaatttttttcatcttctctggc

SEQ ID NO: 204957 - DNA, 100 bp, Homo sapiens
gaagatgagctgtcctttcaggaaggagccattatttatgtcatcaagaagaatgacgatgatccagacatttaatgtggatgcaccatgccagaccgtg

SEQ ID NO: 204958 - DNA, 83 bp, Homo sapiens
attttactgtcaagacatttcttcggcattctgcaacaggatttgcctcaaagggcactgcaaaaattgaacagaggaatccc

SEQ ID NO: 204959 - DNA, 88 bp, Homo sapiens
gaaccttcttttgtttgtcagcagccaaggtgtttccaggaagttcagagagaacaggaggaaggctgaacaaggacctgcgacattt

SEQ ID NO: 204960 - DNA, 76 bp, Homo sapiens
gacatctggaccagttattaatgtgtgccatttatgtgatggcaaaggacaccagcagtgaaaacactgtggttcc

SEQ ID NO: 204961 - DNA, 100 bp, Homo sapiens
accaggacagaaaagacagtgttctgctttcatggagttcacagaagagtcgaggaggtcacacttcacctgaatcccatctcctcagtccacatccacc

SEQ ID NO: 204962 - DNA, 101 bp, Homo sapiens
ggtcttacattgctgcatcaagaaacccaagctgctgaggaaaactcaatgtgagtagtgacactgtccagcatggtgtggaaggattaacgtatctcctc

SEQ ID NO: 204963 - DNA, 100 bp, Homo sapiens
ttacctcagccaccgagaaggctacggcaccatgtacatgaagacacggcttttccagatgagggttactaccagggtggaaaatttcagtttgaaactg

SEQ ID NO: 204964 - DNA, 113 bp, Homo sapiens
tggaacgcgccggaatctgaggtgtgagtagagcctgggggagagtggatccaggtgaagggggcagagacgactgcaagaacattgccaacatcatgaagacactcgcctat

SEQ ID NO: 204965 - DNA, 100 bp, Homo sapiens
ctgggaaatgccgtgtcagtggggttgttttggctggagctgtgaagttaaaccgacaacagactgatatggctgttaattgggctggaggattacatca

SEQ ID NO: 204966 - DNA, 101 bp, Homo sapiens
gtgttgcagcacatcctcatccgagcctttgatttgagtgggtactaggttttgacaagcttgcatcatgcgtgagtataagctagtcgttcttggctcag

SEQ ID NO: 204967 - DNA, 100 bp, Homo sapiens
gccagcctgtcatgagacctccaaacccctttggccctgtatcaggagcacagaataatcatgggccagactgggaagaaatctgagaagggaccagttt

SEQ ID NO: 204968 - DNA, 100 bp, Homo sapiens
ctcaccccccaagcggatactggtcttctcgtcggattgcccatgcacttgttgcagaaacagccaagggtcgacaagtgcccccaatgatttatggtac

SEQ ID NO: 204969 - DNA, 83 bp, Homo sapiens
agccgatccagcctgcggagcctgtggggcaggcagcagagaccacactggctgtgcgcagacgcccctccgcagcgtccctc

SEQ ID NO: 204970 - DNA, 90 bp, Homo sapiens
gcaagactgtggaatgaggatattttttgaatcagttttctgtctcaactggtctctgacaagcctctgactgaatgtatccgtgctggc

SEQ ID NO: 204971 - DNA, 75 bp, Homo sapiens
tcgcttcgtcctacacttgcgcaaatgtctccgagaagatggcgaattagaagatggtgaaatagacgatgcagg

SEQ ID NO: 204972 - DNA, 75 bp, Homo sapiens
gagaccgcggccgggaccgaggtgagagggtccaagcctggtaagaatgtccagcttcaggagaatgaaatcaga

SEQ ID NO: 204973 - DNA, 87 bp, Homo sapiens
aggattgagacccggaaggcttcaaaggctgtcgcaaggaggaagtttaagtgctgtggggctgctaactacacagattgggagaaa

SEQ ID NO: 204974 - DNA, 100 bp, Homo sapiens
cagtgacacctcccagagaagttactcaatgctactatcaaggaaatattgaaggatatccagattccatggtcacactcagcacgtgctctggactaag

SEQ ID NO: 204975 - DNA, 100 bp, Homo sapiens
gacggcgactgcgggaggccaggcaatggatcacttggagtcctttattgctgaatgtgatcggagaactgagctcgccaagaagcggctggcagaaaca

SEQ ID NO: 204976 - DNA, 74 bp, Homo sapiens
aaatcacccggtgggctgcaagcggaaactggccatgtcaaggttgacatgatgaaagaagcattagaaaaact

SEQ ID NO: 204977 - DNA, 100 bp, Homo sapiens
aggacaggtggcactctttcagcttgcttggctcaggaacaacagaagagaataaagaaaatgacctcagaccttccttacctcagtcttatgcagcgac

SEQ ID NO: 204978 - DNA, 80 bp, Homo sapiens
tccgggaatccggtgcttcggatctactacacctcgagggcccctacaaaggcttcagagtagatatctctgccaacatg

SEQ ID NO: 204979 - DNA, 90 bp, Homo sapiens
ggcggctttggagcaggcgctgggcgagccgtgcgatctggacgcggcgctgctgaccgacatcgaagattgagaggatccagaatccag

SEQ ID NO: 204980 - DNA, 83 bp, Homo sapiens
agaatcccaacgttcaggatattttgggagaacttagagaaaaggttctttggggtgactttcaagatggactctactctaac

SEQ ID NO: 204981 - DNA, 50 bp, Homo sapiens
ctcttattcttcaactcagcatgttcctcggaaatccgaacgccagcaga

SEQ ID NO: 204982 - DNA, 82 bp, Homo sapiens
tttgaccttctggatgtccttgagttcaaccagggcccttggaagaaaatcctcgctgtgtccaggctgaggcggggggcta

SEQ ID NO: 204983 - DNA, 73 bp, Homo sapiens
gacaagcgggcagaaggctggtgacaagagccagccccagtgcctgctgagccgtttgacaacactacctaca

SEQ ID NO: 204984 - DNA, 98 bp, Homo sapiens
ctcctgagaagctgggattacagagatgggcttttgccatgttgcacagactggttttgaactcctgaccaagtgatctgcactccttggcttcccaa

SEQ ID NO: 204985 - DNA, 50 bp, Homo sapiens
caaagacctcggctgcaggcggcctggtggacatcttcaataaggagcta

SEQ ID NO: 204986 - DNA, 101 bp, Homo sapiens
agaccgcgcgcagggcctgcagcgggagctggacggcgagcgcgagcggcgcgagaaacagagcatcctggccagaacaagccaaggagccaagacgagag

SEQ ID NO: 204987 - DNA, 97 bp, Homo sapiens
tttgagcatacaccgagagagtgaggagccagacgacaagcacacactatggcgctgaaacggattaataagatctcttccctgaagaacaggctga

SEQ ID NO: 204988 - DNA, 100 bp, Homo sapiens
cggtgccccatagatggccagctttcccccgagggtcaacgagaaagagatcgcaaaacccgagaaagggtcctcaggacccaggtctgtgctggcatca

SEQ ID NO: 204989 - DNA, 83 bp, Homo sapiens
acaccagctcgggtcctcgcacaccatcctgggggatatgagactttctactcggaatatcctgagtgttgcgtggatgtaaa

SEQ ID NO: 204990 - DNA, 75 bp, Homo sapiens
ttttttgacatctgtacttcaagaaaggttgttggaagaggagcctttggagttgtttgcaaagctaagtggaga

SEQ ID NO: 204991 - DNA, 75 bp, Homo sapiens
cctaaccatgaagacttgaacttaatacagcaagaaagaccatcaagtttaccaacctcacctccacccgcgaca

SEQ ID NO: 204992 - DNA, 98 bp, Homo sapiens
ccgagcgcgcggccgtaagaccgcggggcttttttccagacttcaagctcccattccaacagtaagagcttcttccacatcacagcccttggatcaag

SEQ ID NO: 204993 - DNA, 100 bp, Homo sapiens
agcaccgggccctctgcgacctggggccctgggtgaagtgctccgccgcccttgcctccagccagagactgctgctactttgaaacgtacgatagaggcc

SEQ ID NO: 204994 - DNA, 75 bp, Homo sapiens
aaatacttttcaaatctattaatggtgtggcaaaggagcagagaactttgacaagttcttcacacgaggacagcc

SEQ ID NO: 204995 - DNA, 75 bp, Homo sapiens
tatcctttttcccctgaagctcgtagagaaatgtgcctgccacagtgactcaggtcactcaaggaactatccgac

SEQ ID NO: 204996 - DNA, 90 bp, Homo sapiens
taaatacctttgatctaagggttcagcctttcaatgtgacacaaggaaagtattctacaggtgccgtgagcgatgtggagatgcaggaac

SEQ ID NO: 204997 - DNA, 100 bp, Homo sapiens
cttccagctgaacaaccctgacaaagttgtatcacggactgattcaccgagcccaaccgtactcaactcacatatttctaccccaaatgtgaatgcttta

SEQ ID NO: 204998 - DNA, 82 bp, Homo sapiens
aggctctccttgcagctgcttagacgctggatttttttcgggtagtggaaaaccaggcatagaatgtcaagctaaccaggcg

SEQ ID NO: 204999 - DNA, 75 bp, Homo sapiens
accacgcctgcatccccatcaagccacctggtttccatcgggcctatagttccccactctacagcaaccagcagt

SEQ ID NO: 205000 - DNA, 75 bp, Homo sapiens
tgaagttgttgtatccaggtgcatgttacagctcatgtctgcagggctctgagaggaggaagcctggggcaggac

SEQ ID NO: 205001 - DNA, 100 bp, Homo sapiens
ctcattactccaaagggtggtggtggtggaggtccaggagaaggtgacagagctgaatgaacctctctccaatgaagatcgaaatctcctctctgtggcc

SEQ ID NO: 205002 - DNA, 82 bp, Homo sapiens
ggcggaggcagaggtggaggcgctttgaaagatctctggaaacatggctacagaacatgttaatggaaatggtactgaagag

SEQ ID NO: 205003 - DNA, 100 bp, Homo sapiens
cctgtgtttgggaagggagttgcatacgatgtgcctaatccagaatctctgaaggaagaagatgaatcagatgatgataatatgtaacatttactccagc

SEQ ID NO: 205004 - DNA, 90 bp, Homo sapiens
ctcccaaaatctccagagctagcaaatcacccaaactcccaaggttgaatacgaaggcttaaagcatgagattaagcgatttgaggagga

SEQ ID NO: 205005 - DNA, 75 bp, Homo sapiens
ctgaagagggaagacacgcggaaacagatggaggacggccataccctcttcgactacgaggtccgcctgaatgac

SEQ ID NO: 205006 - DNA, 100 bp, Homo sapiens
caacttactaccaaacagcacttcctggcaatgatagatacatcagtgtgggaagccaagcagatacaagatgaatttcatcctttcatcgaagcacttc

SEQ ID NO: 205007 - DNA, 49 bp, Homo sapiens
aaagggatagcagcccctcatgcagggtttgttggcatccaaagctgtt

SEQ ID NO: 205008 - DNA, 75 bp, Homo sapiens
cctggccgcggctctgggaagtgcgcagtccggcctcatgcattgtgcgtcagcagcaatgtttatggtgaaaaa

SEQ ID NO: 205009 - DNA, 98 bp, Homo sapiens
gcagacatggcccatgctgtgcatcccaactacctgagaattcatccgtgctctgtatgaatctgaggaaaactgcgaggtagaccctatcaagtgca

SEQ ID NO: 205010 - DNA, 75 bp, Homo sapiens
cgcgaatatcgtcatcgttagaaggtggaagaagagcccgaagaagaacctgaagagacagcagaagacacaaca

SEQ ID NO: 205011 - DNA, 75 bp, Homo sapiens
cggctcccctctcaggacaacccagatgtgcaacaaagtgcgatggaaaaaagaaggggcatggctggagcagaa

SEQ ID NO: 205012 - DNA, 88 bp, Homo sapiens
tgcgcactacgacccaatggccaatatccacaccttttctgcctgcctagacttaattcagtgcacaaatgagatgaatgtgaacatc

SEQ ID NO: 205013 - DNA, 96 bp, Homo sapiens
ccgggatcctggagcactcggtcatgtacccggtggactcggtgaaggacaaccctccatatgataagggagccttcagaatcgaaatcaactttc

SEQ ID NO: 205014 - DNA, 82 bp, Homo sapiens
aacgaggcaaggagctaaagcagcgtgcgttcagccctggggtggcagaactggtgaagccattgtagatgctgcgctgagt

SEQ ID NO: 205015 - DNA, 51 bp, Homo sapiens
gatcgagttcatcgggcagatcgggagttctgggaaatcgttcattcattt

SEQ ID NO: 205016 - DNA, 89 bp, Homo sapiens
ccttcattgatgctgaactcaaggccccagggcgttacctactgcagagaaagttcagcaagcagtcttaccatggcccatgtgccctg

SEQ ID NO: 205017 - DNA, 100 bp, Homo sapiens
gtgcgtcgctatcgccagcacagtgaggaggaacgcaccctgcccatgctgacctctgcctgtcctgcaacctttcccctggatctcacaaaaactcgac

SEQ ID NO: 205018 - DNA, 96 bp, Homo sapiens
ttcacctgggtctgcacgccctttctgtctacgccttctccgtcggcagacctgctgggtctcggggctgccccccctgcccccgcgggcccccca

SEQ ID NO: 205019 - DNA, 75 bp, Homo sapiens
attccttgtatcgacatacacactgggtacgctgtgccaagccgtcaccgatgggttgtatatactactgaaatg

SEQ ID NO: 205020 - DNA, 74 bp, Homo sapiens
gtggaatatctactgaagtggaaaggcttttctgagtgatcatggagctcagcttggtctccatggggctggtg

SEQ ID NO: 205021 - DNA, 83 bp, Homo sapiens
cgtggatccaagatggcgacggcgatgaattctgcttggtcagaatcgtgatggcattgtgttcagcactgatgactattttc

SEQ ID NO: 205022 - DNA, 75 bp, Homo sapiens
gataactggccagaaaatcatgttaagggtggttctcttcccaaagtggaagccaaattcatcaattatgtgaag

SEQ ID NO: 205023 - DNA, 100 bp, Homo sapiens
tccagcttcacctcagcctttctatggaaacaactttgaggatgagccacctttattagaagtatctactgtggattatgaagactatcagagtgtaacc

SEQ ID NO: 205024 - DNA, 100 bp, Homo sapiens
atatcatggacttcaacgtgaagaagctggcggccgacgcaggcaccttcctcagtcgcgccgtgcaggaagaagattccctccttaatatctgcaagga

SEQ ID NO: 205025 - DNA, 100 bp, Homo sapiens
aacatggagatgtaataactattattgatcgttccttcagggtcagtatagaccttctgatttgctgtgccctgagacatatgtttgggtacccattgag

SEQ ID NO: 205026 - DNA, 100 bp, Homo sapiens
cccgcgtccaccaccgcagcgtcaaggtgacacttaactccgccatctgcgttttgagcactgttctcataatggagtttcctgatttggggaagcattg

SEQ ID NO: 205027 - DNA, 83 bp, Homo sapiens
gccgccgccgccgcccggggtctccaggctgaggaaaaaatggctacaaacttcctagcacatgagaagatctggttcgacaa

SEQ ID NO: 205028 - DNA, 89 bp, Homo sapiens
gtgtcctgagatcaaatggcacttcattggccacctacagaaacaaaatgtcaacaaattgatggttggcaaacatgaattgactgggc

SEQ ID NO: 205029 - DNA, 98 bp, Homo sapiens
gaagacttgtaacctggagaagaggtatattgaagcaagtcaaagattacattaaacagtgtagcaaatgccaggagaaactagatcgatcccgtcca

SEQ ID NO: 205030 - DNA, 98 bp, Homo sapiens
ctgccgtccccgctgctgtgcattgggttgtctgcattcaaaagagcattctattaaagctaccttaatttggcgcttatttttcttaatcatgtttc

SEQ ID NO: 205031 - DNA, 100 bp, Homo sapiens
ccgggccagcctggggcggccggccaggaaccacccgttaagctttggcgctgaccacaatgctgagcaggaagcagcagctgcaggcccagtgactggt

SEQ ID NO: 205032 - DNA, 100 bp, Homo sapiens
tgcggcgcgggatggcagttttacagtctccgcacagtctgttcggcacttgaagtactccttgtttaagaaatcactactgggcagtgtttcggataat

SEQ ID NO: 205033 - DNA, 100 bp, Homo sapiens
ttttcacttactgcaggattttcagcttcagcaagcagcttaattgactggaataatcctgccatcattaataagatgtacaaggtgtaccttggagata

SEQ ID NO: 205034 - DNA, 83 bp, Homo sapiens
ggagcgccccttcgcgtcccctgcaccatgagctggggcaccgagctctgggcggtgcgtctttctacgtgaataggattttg

SEQ ID NO: 205035 - DNA, 74 bp, Homo sapiens
ggggccatgtgcaggaccctaacgacaggcgcctccggcccatttacggtcattcccaaaagcaagttcgtctt

SEQ ID NO: 205036 - DNA, 71 bp, Homo sapiens
tgggcaggtgtcttcctcgagaggcaggcaggggatcccggactgccggtggtggtgtgcacattgagccc

SEQ ID NO: 205037 - DNA, 83 bp, Homo sapiens
gactgggatgatacaccttttccacagggaattgagttggaactgtggctgcaccatctgtcttcatcttcccgccatctgat

SEQ ID NO: 205038 - DNA, 96 bp, Homo sapiens
cttggggtcatcgtttctgcctacatgcactacagcaagatctctgcaggaggggaaactgaggcctgagccgagaagggatggggaggctcagga

SEQ ID NO: 205039 - DNA, 75 bp, Homo sapiens
gagtttgaagagttccctgccgaagatattgatgatgttaagaagttcaaaccgggttacctggaagctactctt

SEQ ID NO: 205040 - DNA, 74 bp, Homo sapiens
aaccacgcagaagcaggagctgaagacctcagaccggcaccagaacactcgtgaaactgctcaggccatcaagg

SEQ ID NO: 205041 - DNA, 90 bp, Homo sapiens
ggccttcggcgttggtggacggacggctttcggcggtggtgaacggttaaataggattgcgaatcaggtggccattcagcggaagaagca

SEQ ID NO: 205042 - DNA, 75 bp, Homo sapiens
gtcttgatccttttgcagatggtgtgatgttagctgttgatgctgtaattgctgaacttaaaaagcagtctaaac

SEQ ID NO: 205043 - DNA, 75 bp, Homo sapiens
gacgatgtgcggcggatgaacaagcggcagattcacggcccttccacagtaccttccacaataccagtgctaatc

SEQ ID NO: 205044 - DNA, 83 bp, Homo sapiens
cgcccctggtgcacacaccctcgtattctcctgcccttccccagcttcctgcctgacacagctcacttcaagaagtgcacaat

SEQ ID NO: 205045 - DNA, 100 bp, Homo sapiens
ctctgacacccaggcagggcctagggtgggacgatggcaggtgggggcagcgacctgagcaccagagccccccaagatgaacccagtggtggagccactg

SEQ ID NO: 205046 - DNA, 50 bp, Homo sapiens
cgaatatcgtcatcgttagaaggaaatggagcgagaacgtcttcttggat

SEQ ID NO: 205047 - DNA, 100 bp, Homo sapiens
ggactcagtcccatcactccaaggagagaaggtggaatccatagagctccccatggacaacaagaccaataagaggcgtgggttctgctttattaccttt

SEQ ID NO: 205048 - DNA, 83 bp, Homo sapiens
ggaagaactgaccagagctgatcccgagcagcgtcatgtacccctgtcagcccaaggccaaccccactgtcactctgttcccg

SEQ ID NO: 205049 - DNA, 74 bp, Homo sapiens
attgccagaaaatctttcctctaaagtcaaactggattatgtatatcacgtagtgagtgcgatctgtgaatgga

SEQ ID NO: 205050 - DNA, 74 bp, Homo sapiens
caaggaccgcttacaacttctagtacgaggatgtcgtccaggaaagattgtgcagatgactgaagcagaagttc

SEQ ID NO: 205051 - DNA, 100 bp, Homo sapiens
agtatctcgctcacagagagctgggctacaggtattcaaaacctttgaccacatggcccgtcaggatgatgagaagagaaggcaggaacttgaagagaaa

SEQ ID NO: 205052 - DNA, 82 bp, Homo sapiens
tctacaggggcctcccgcgccccccgggacccccacgccgccgccaggtcaaggagctgggcgtggtcatgtacaactgcag

SEQ ID NO: 205053 - DNA, 50 bp, Homo sapiens
acacatttcctgaggatatcgtggatgaccagtgtcccagtgaaggaacg

SEQ ID NO: 205054 - DNA, 75 bp, Homo sapiens
ggcttacgcagaaggacctggccacggttacgggcaggacttgagtggcttcggacagggcttctcagaccccag

SEQ ID NO: 205055 - DNA, 50 bp, Homo sapiens
acgagctcggagcagcagccagatgttatgcacttacaagaaaggaaagg

SEQ ID NO: 205056 - DNA, 98 bp, Homo sapiens
gaaaagcctctgggagcagaagggaggctccaagacctcatcaacaattaaggaaatgggtcctgatgaatatgaagagatggaagaagaggaggagg

SEQ ID NO: 205057 - DNA, 128 bp, Homo sapiens
cggcccccccctcgccggggaccgagcgcgctcgctccggcgccggcctcgcctcctcgcagcagcgccatggtatcacctcttctgggctcaagatggacaacaagaagcgcctggcctacgccatc

SEQ ID NO: 205058 - DNA, 106 bp, Homo sapiens
tcaatttcaactctaactttaactttgcattggttggacaccttttaaaagggcttcgtgggacacatatgcaacatgcctatgatttttacaagcctgatatgct

SEQ ID NO: 205059 - DNA, 100 bp, Homo sapiens
gtaccttggatgccccctggaaaatcatctgcccggcctgtgggatgcaagtgggaggtaatggtaactcgggatttgaaggacagagtcgctatgtacc

SEQ ID NO: 205060 - DNA, 100 bp, Homo sapiens
atttcagcgtaaactgcagcatgatgttctgaagcttgaggtttcccttgggggctttgaaataacaccaccagtggtcttaaggttgaagtgtggttca

SEQ ID NO: 205061 - DNA, 74 bp, Homo sapiens
gctctcctttctcatctcctggagttgctgtttacactggaatggaaaccaaaatggctttgaactaccaaggg

SEQ ID NO: 205062 - DNA, 100 bp, Homo sapiens
gcgggcatcttgctgttcgtgattatatttcttggagttgtgttggtaatgaagaaaagacatgacaatggatgaagtccgagaatttgaacgagccact

SEQ ID NO: 205063 - DNA, 82 bp, Homo sapiens
gactatgagaggtttggactgccaggctgggctgtggcttcaagcttctgcagaaagccgtcattacacctgattttgaaaa

SEQ ID NO: 205064 - DNA, 75 bp, Homo sapiens
ttccagctgcagcacgtggacgctgactcggaagtgcagatgaaggatttgggggcagagcacttggcaggtcat

SEQ ID NO: 205065 - DNA, 89 bp, Homo sapiens
gcgctcactgtcctctcggggcattggtctgtgcacgcgcattgcgcgctcacctgcaccccggacatcctctttgatgcgaatacaca

SEQ ID NO: 205066 - DNA, 74 bp, Homo sapiens
ccaccgactactgtcagcagctgtgccaggatgaaattgattctgcagtaaagatgttggtgtcattaaaaatg

SEQ ID NO: 205067 - DNA, 75 bp, Homo sapiens
ggaacacttcagtgcattcaaggacttttccagatttctcagaataaagtagcagttcttcttctagctggtggg

SEQ ID NO: 205068 - DNA, 100 bp, Homo sapiens
caacttccggcagcagatggagaattacccgaaaaacaaccacactgcttcgatcctggacaggatgcaggcagatgtgtttggagaagagggattgacc

SEQ ID NO: 205069 - DNA, 100 bp, Homo sapiens
gctgttgctgccgccatacgcgctctccctgtttaggaagaaacgctgcacaagtcgaccagcagcagcagcgtgtctccctctttccctgaagagccag

SEQ ID NO: 205070 - DNA, 82 bp, Homo sapiens
agccgcccgccccccaccgccgccccctccggcgtgttcatgcccccgggctattactataacaagcgcattctgcacaaga

SEQ ID NO: 205071 - DNA, 90 bp, Homo sapiens
cccaggagaagccgcccaaagaactggaaaggagaaagtcagtccgggtagaacttcagaccctaatcctgcagcccccgacagcgagtc

SEQ ID NO: 205072 - DNA, 100 bp, Homo sapiens
cagttggattcaagagcacttcccctttgccttcatcagtgcatacatagagacgtgaagccagaaaatatcctcatcacgaaacattccgtgattaagc

SEQ ID NO: 205073 - DNA, 100 bp, Homo sapiens
gacaaaccccacaagcactgcatacgttctcaacatcagcacctcggttcagctggcagcctccatgccttcaggattccagcctgcacagactccagac

SEQ ID NO: 205074 - DNA, 87 bp, Homo sapiens
gtttgcctggagatgtagacagagctcgacagtatgtactacagcgtggtgatggtggatgaggcacacgaaaggaccctacacaca

SEQ ID NO: 205075 - DNA, 73 bp, Homo sapiens
agaattgaaccttcaccatataagatcatgatcagaagcatcttcctgttcttggaccgcacctatgtgctgc

SEQ ID NO: 205076 - DNA, 99 bp, Homo sapiens
ggatggggcggcgccgagaatggccgttatgaggaccctaagagtgtgatgagaatagcacgtttaataaccatgctctgtacctgggcctgccctgct

SEQ ID NO: 205077 - DNA, 76 bp, Homo sapiens
gaagtctcagcggtattctggtgcttatggtgcctcaggtggagagtatagtgaagatgatgtaaatgaattagtg

SEQ ID NO: 205078 - DNA, 75 bp, Homo sapiens
ctgctgcccagaaagaaagcacttttagcagtgaatgccaatactggggctcagagctccagctacccactttgg

SEQ ID NO: 205079 - DNA, 90 bp, Homo sapiens
gaggaactgttgatatagccagagcccgaaaagaagattactctgcaacagctaaaggcctcgatgagtgttaaatcgccatttaatgtg

SEQ ID NO: 205080 - DNA, 101 bp, Homo sapiens
agatgaggaacaagtacattagagccgaggttcatggtccgtggcactcaggtagttggttctgacatgactgtgacagttgagtttaccaatcctttaaa

SEQ ID NO: 205081 - DNA, 75 bp, Homo sapiens
ttaaaaagcagtctaaacctgtgaccacccctgaagaaattgcacagttccagtctcatcagattttccatgtcc

SEQ ID NO: 205082 - DNA, 82 bp, Homo sapiens
cccgaactccaggacagcatccaggcctcattggacagcattcgagacaccattcgcttttcacccaagatgatttgatgtc

SEQ ID NO: 205083 - DNA, 75 bp, Homo sapiens
cttgcattttcccgcgtgcgtgtgtattgatgtcaagctgaaccatcgtaggaagttgaaagccttagaaagagg

SEQ ID NO: 205084 - DNA, 100 bp, Homo sapiens
gaaaggatggtggaggactacctggcaagtggttatcaggtgaccacccgccggcggaagaaggaaggagaatacaacgtccagcaacagtgcccaggct

SEQ ID NO: 205085 - DNA, 50 bp, Homo sapiens
atgcgctcgggctggaccagcagatatggctcgtggacagcagaaaattc

SEQ ID NO: 205086 - DNA, 90 bp, Homo sapiens
aagagacatgagatgattgccaaacccccaggcgcattctacattctaaaggggagctcagtgaagatagacataaacagtatgaggaat

SEQ ID NO: 205087 - DNA, 82 bp, Homo sapiens
ccaggtcccggcctccgtaatgagagcccggaaccactctttgtgccgcagcttcgcaggagatgacaagtatgggcggaag

SEQ ID NO: 205088 - DNA, 98 bp, Homo sapiens
tagcagcctctgcttctcttttcccgttgaaggtgctaccgctgacgacacccctggtggatggcgaggatgagagcttccaattgaagacttgtgca

SEQ ID NO: 205089 - DNA, 100 bp, Homo sapiens
agctcatgttttctcctgatcaagaaaatcatccatctaaagcaccagtaaaatatggtgaactcattgtcttagggtgggaacatccagttgcaggaaa

SEQ ID NO: 205090 - DNA, 100 bp, Homo sapiens
gaaaaataaaaagaaattgctgcagattttactttatgtgagaaaatctacaatttcttcgagacactcatataaaggcgcttaaattcctagcgaagtg

SEQ ID NO: 205091 - DNA, 101 bp, Homo sapiens
tctccaaagcctgcgcgagaggagccgggacacgcctagcgcgggctccagatgacgtccggttgtttgccttcgtgcgcttcaccaccggggatgccatg

SEQ ID NO: 205092 - DNA, 98 bp, Homo sapiens
gcccgggccatggccgccgccgatgccgaggaagaaaacaggcagattttggcgcggcaaaagtcaaactcacagtcggactcccatgatgaggaggt

SEQ ID NO: 205093 - DNA, 74 bp, Homo sapiens
gccgcgcacgccatgggagccgtgactgacgggcattcttagcagggttacagaatctgttaagaatattgtgc

SEQ ID NO: 205094 - DNA, 100 bp, Homo sapiens
gggctgctcttcctgaggttttcctaagccatcccctggcggaaccgcccccaggcacagaagctgaaatccaatgtgtcgggcaatacacacctctgta

SEQ ID NO: 205095 - DNA, 100 bp, Homo sapiens
aggacggaagcacaggggccactcagagtcgcccgagaatttcatccaggatcgagcagggcgaatggggggggaggcacccgagctggccctggacccg

SEQ ID NO: 205096 - DNA, 100 bp, Homo sapiens
gggccggttctgcaccatcttcaggtcctactccaggggcgctcagaggtggtagcccagtggtgcacacagggggacttgctggcagtcgctgggatgg

SEQ ID NO: 205097 - DNA, 100 bp, Homo sapiens
ttggggcttgatgaaggcgtggatagcctgaaggcagccattcagggctgtaatccccttgcacaaaccggccggagtaaattgcagaatcaaagagctg

SEQ ID NO: 205098 - DNA, 100 bp, Homo sapiens
gggtggccgattactgcgagaacaactacatacaggcatctccttggaaacaatgccatctttgaatgtgagagataaacctagtttcagcatgtctgca

SEQ ID NO: 205099 - DNA, 100 bp, Homo sapiens
accaagctcaaactaatggcacgctatgggcggctggcggaccctgctgtcactgactttccaggatgactcactggttgtgtggaaggaagtcgatttg

SEQ ID NO: 205100 - DNA, 98 bp, Homo sapiens
cgattcatcaaaaagatgctgtaaatgatgatgattttgagccatacttaagtagccagacaaatcaggtcaatgagtggtcattgaagataagaaag

SEQ ID NO: 205101 - DNA, 100 bp, Homo sapiens
aaaagctgccctgagacggtgtcccgccgaaagactacatgaggaaataattgacttttataacttcatgtccccttgtcctgaagaagcagctatgaga

SEQ ID NO: 205102 - DNA, 49 bp, Homo sapiens
tacaggagaccagaggggagccagagccgaagagattcctctgaaaatc

SEQ ID NO: 205103 - DNA, 100 bp, Homo sapiens
aagagccatggaaacaggaggaagaattcccaagccaaagctttccagattcctagaggggagtgcctgcgagcctcgggtgagccttcctggaggagcc

SEQ ID NO: 205104 - DNA, 98 bp, Homo sapiens
gaggactctctgcgtctctggagacaagggcactacacgcacttcagaatgaagagttaattttgtagccaccttggctaatgggatgagcctccagc

SEQ ID NO: 205105 - DNA, 100 bp, Homo sapiens
gaaaagggaagtgaaaagagatctgttttcagacctccttgaggcccgccgcccgcgggcccacgagtgcctgggtgaggctctgcgtgtcatgcatcag

SEQ ID NO: 205106 - DNA, 100 bp, Homo sapiens
tgggataggggctgtggcagtacgcggggacccggctgcggtggctgcgggactgacgaggttctccaaaaaatgtggaatcctttgcatctatgctgag

SEQ ID NO: 205107 - DNA, 98 bp, Homo sapiens
attaccccgacattctccacctcctgggaggccagccattcccaaatgccccaaggatgaagaacggagacgggcctgctttcttccccgggcgatgt

SEQ ID NO: 205108 - DNA, 100 bp, Homo sapiens
cataagggaaaggccataaaaatagcagatatatctggcctaccatccttctgctgctgaaccaatgccaacagggaatgggtactgttcaaaaaggaat

SEQ ID NO: 205109 - DNA, 100 bp, Homo sapiens
aaatccaaaccagtcacctccccacccccaccgccaagcagccacgagaaagaccaccgctcttgataaggagaggcaggttttccgacgaagacgcaac

SEQ ID NO: 205110 - DNA, 75 bp, Homo sapiens
tgaaactcaccaacaacatttcagacaaacatggatttatacctcggatctgcattttcaagtgagcaaagaccg

SEQ ID NO: 205111 - DNA, 101 bp, Homo sapiens
gcctgcgtcccacctagaatctgctggctactacttgaaatgccattccgccaggcccacgaggcctccgggaaagctgtgttcatggccgagaccaaggg

SEQ ID NO: 205112 - DNA, 90 bp, Homo sapiens
aagaaaatgctttatttttgtggcaggcatctgtgggatctgtaatagaaatgctacccacctttctgttctgagacccctcaagagaca

SEQ ID NO: 205113 - DNA, 98 bp, Homo sapiens
agcatccggcctatttcagaaagagggctctgaactcctacttcgagcctccggtggaggagagcgccttggaacgccgacctgaaaccatctctgag

SEQ ID NO: 205114 - DNA, 90 bp, Homo sapiens
aagttaagaacattatccctgcaatttgtgcatcatatttgtataacagtgcacggcctggagatagagggcagggactgtggcgaggcc

SEQ ID NO: 205115 - DNA, 100 bp, Homo sapiens
cgtccgcactcctgttcctggtcctgacgcccccctcccgcccggaaagctgcccagccaccagcaaccccccaggtcccatctgatgccgaggctgaag

SEQ ID NO: 205116 - DNA, 51 bp, Homo sapiens
ctgatgcgctcactggtgacacacagtattctccaagcatgacgatgagtg

SEQ ID NO: 205117 - DNA, 100 bp, Homo sapiens
attgatttatgcctggggcaccatcaccaaaagaagaggaaatggatgcaagccttcccagaacaacaggttatgatgtgattgctcaagcccaatctgg

SEQ ID NO: 205118 - DNA, 83 bp, Homo sapiens
ttggaaaggggagatggcccaatcgacagtcattttgtttactcattcagccctgttgcaggtcccaataaactcttcataag

SEQ ID NO: 205119 - DNA, 90 bp, Homo sapiens
ctgagggcacgtgtttgcggttcagccctttgatgaccgcagcagtatgaggttgatgagctacgccgaaagaaggagattacagtgagg

SEQ ID NO: 205120 - DNA, 90 bp, Homo sapiens
attttaggtttctcttgcagatatgagagatagcacagatggaccaaaggttatgcacaggtgggaatggctttgctaaagtttcttcaa

SEQ ID NO: 205121 - DNA, 74 bp, Homo sapiens
tcctggtgatgatctaccatcgggaattgaagacataaccgatcctgcaaagcaaaagcggcgccaggaaattg

SEQ ID NO: 205122 - DNA, 100 bp, Homo sapiens
gaaggacccagcaccaggcagcgggctgattgttgtgacattggccgtatgctggatgcccaaccagattcggaggatcatggctgcggccaaacccaag

SEQ ID NO: 205123 - DNA, 88 bp, Homo sapiens
gccgctacatactcatcatggggctcctgtacaagggtgactatgaccagagcaggaccaaagtgctgcacatgagcctgaaccccac

SEQ ID NO: 205124 - DNA, 100 bp, Homo sapiens
atttaccctttggtcggaacgaagtctggacagctgatcacctgaaagagaggagccaagaaaaccaatctaaacatttgtgggaagttgtattcatcaa

SEQ ID NO: 205125 - DNA, 133 bp, Homo sapiens
cttgaaagaaattgttaagaaatttcatcctgtaaactatgatgtattcagatacgtgataacacatctaaacagctttatttgaaggtagacgcatcgaatttgcagaacaaataaataaaatggaggctag

SEQ ID NO: 205126 - DNA, 102 bp, Homo sapiens
caaatatacaacaaggccattttctcaaacgagagtcagcctttaacgagcggaacacttaaggatccggactcaagcaagaccccacctcagcggccaccc

SEQ ID NO: 205127 - DNA, 100 bp, Homo sapiens
cagccccatccgaggagtcctcttcccaggtgctgccctccagctcacaggcagatcgggagcggtgccgagaaaaatttccttactagatgacatttca

SEQ ID NO: 205128 - DNA, 100 bp, Homo sapiens
gatttgtccctggggcggcagcgcggacccgcccggagatgaggtcactctgtgagactgctgggtcagaaaaaggataatggaaggcggcttgggggag

SEQ ID NO: 205129 - DNA, 100 bp, Homo sapiens
aagcgcgagtctgagtggaaccctggacgacttgcagagcggctggcgcagtcatgtgctaaaatgatgtattttctggacaagtcaaggcaggagaaag

SEQ ID NO: 205130 - DNA, 100 bp, Homo sapiens
ccggattactggatcgacggctccaacagggatgcgctgagcgatttcttcgaggtggagtcggagctgggacgataagattgaagatgagctggagatg

SEQ ID NO: 205131 - DNA, 74 bp, Homo sapiens
aggttccaagaccaattccccttggaaatggaggatgaagatacaattgatgtgttccaacagcagacgggagg

SEQ ID NO: 205132 - DNA, 101 bp, Homo sapiens
aaagttccggcagagaattctggctccctgtaaggtaatactgcattgcatgattgtgcagaatctggaagtttggacatcatgaagatgcttcttatgta

SEQ ID NO: 205133 - DNA, 82 bp, Homo sapiens
acctcatcccctggatgggggaccacaagatcctcatcgacaggtccttttggtgtgaaccatggggtggaacttcactcag

SEQ ID NO: 205134 - DNA, 101 bp, Homo sapiens
tggaagctctacgctactgccatgataataacataattcacagggatgtgaagcctggaattgtctcgccatttaaacgagtattcctaaaaggtgaaaag

SEQ ID NO: 205135 - DNA, 96 bp, Homo sapiens
agagttttcagaggtttgacgcaatcctgaaggcagcgcagtcagccaatatttctgtgcggggatcctgaggaggatgaaggggctggccctgga

SEQ ID NO: 205136 - DNA, 100 bp, Homo sapiens
ctacgtgtgctttttcaagggagctgataaagaacttcttcccaaaatggacaaggcgcctctgtcgaagagccttctgctggtccccagtgccctctcc

SEQ ID NO: 205137 - DNA, 100 bp, Homo sapiens
gcccgtctgggccagccacctggtgtccgaatgacagggagagagtttttctctcgtttcccagaactctatccttttcttctcaaacagttggaaactg

SEQ ID NO: 205138 - DNA, 98 bp, Homo sapiens
cgagggcaaagagctggtggcctcaggtgaaaagggcaccaccacgaggcgatttgtgggccataccaaggatgtgctgagtgtggccttctcctctg

SEQ ID NO: 205139 - DNA, 100 bp, Homo sapiens
cctgtcaccaacctgaacaatgccttcgaagtggctgagaaatacctcgacatccccaagatgctggatgcagaggaccgagacatgggtgcccggcacc

SEQ ID NO: 205140 - DNA, 90 bp, Homo sapiens
gccggcagaggatccagtgttcaccatcctggccccggaaggctccagcccccttttggacatcgttggcggccggaaggcgaggccccg

SEQ ID NO: 205141 - DNA, 98 bp, Homo sapiens
cataacaagcagcagtgaggacaccaaagggtgaggtggctttgaccccgggttgcccggccagcacgaccgaggaggtggctggacagctggaggat

SEQ ID NO: 205142 - DNA, 100 bp, Homo sapiens
gacttcaagaaccacgtgatcaagtaccttgagacactcctttactcacagcagcagaacaaaatccagtctcatagcagaggagaatataatgtttaca

SEQ ID NO: 205143 - DNA, 75 bp, Homo sapiens
ctgcttcccctgccgatcctaaatcaacatcagaaagaaatcgtggtgcttggagtaagtctgaaacccggaaac

SEQ ID NO: 205144 - DNA, 100 bp, Homo sapiens
caaggctttttgcatttgggggaacatgatggcagtcttggttgaaatcacaaagattagacacctttttagataggtgttcttcagcaccactgacaac

SEQ ID NO: 205145 - DNA, 74 bp, Homo sapiens
ttagaccccaatgagaccaatgaaatcgccaatgccaactcccaaggaggccccaaccctgagcacaacagcaa

SEQ ID NO: 205146 - DNA, 101 bp, Homo sapiens
aagggaggagaagacaagctaaaaatgattcgggaatatcggcaaatggtattatcgggggacccacggggtcattgtggtttacgacgtcaccagtgccg

SEQ ID NO: 205147 - DNA, 80 bp, Homo sapiens
cttggactgagtcctgcaggacacaggaaatgggtcctgatgaatatgaagagatggaagaagaggaggaggaggaagag

SEQ ID NO: 205148 - DNA, 75 bp, Homo sapiens
gcgctgagtacgtcgtggagtccactggcgtcttcaccaccatggagaagggtatcacagaggctgagcgagagg

SEQ ID NO: 205149 - DNA, 100 bp, Homo sapiens
acggtctgcatactcgctgcccgccggctccctcccccgcgtccctgcgaccgccgcggcgaagatgttccagatgttgaagtgaaaggagagtgttcta

SEQ ID NO: 205150 - DNA, 78 bp, Homo sapiens
aactatagcaatctggttttcttggacacgatgaggcgagtggtacgacagagcaagtttcggcatgtatttgggcaa

SEQ ID NO: 205151 - DNA, 100 bp, Homo sapiens
caagaccgggcagatctggcccaacgatggcgagggcgccttccatggagacgcaggaacgaatgatcacacactttgaaaggtccaaaatggagtaagg

SEQ ID NO: 205152 - DNA, 103 bp, Homo sapiens
ctgggatgtctggttaattttccatgaggatgatctagagaacctcaaaagtgtccccacaccctcctctgagacgccatgttcaactcgatgaccccaccac

SEQ ID NO: 205153 - DNA, 100 bp, Homo sapiens
gcggggcccgccatggctgcgtcggagctctacacaaaggtgtgcaactgaggaacatggctcaagaaactaatcacagccaagtgcctatgctttgttc

SEQ ID NO: 205154 - DNA, 87 bp, Homo sapiens
tgaaaccaaacatgttatccagtaatggagcctctaaggatgtaatccctgttcattactacttaatacctccaccaacaaagacta

SEQ ID NO: 205155 - DNA, 51 bp, Homo sapiens
gctgagctggagctggagctgtcggaaggaaccctaaggactctgcaatat

SEQ ID NO: 205156 - DNA, 73 bp, Homo sapiens
cgcgaatatcgtcatcgttagaaggacatggttttaaactttaaaatgaaaatgtgaaactaggaatgttgct

SEQ ID NO: 205157 - DNA, 82 bp, Homo sapiens
acacagtgctgaggcagaacgcaggtgtggacactgccagcggctgcagccgacttggaatgacctgggagacaaatacaac

SEQ ID NO: 205158 - DNA, 83 bp, Homo sapiens
taatatcaaggacatcaggacaccgggagtgggagagattggactgggagactcagcagatatttggagttcttacaacatgg

SEQ ID NO: 205159 - DNA, 96 bp, Homo sapiens
ttcgtccttgggcccagccacacaggtggttcctgtccagccccctcacctcatatctcagccatacagtgggctgtaacaaggtgtacacgagca

SEQ ID NO: 205160 - DNA, 98 bp, Homo sapiens
cgagcccaaggcaattgatcccaagttgtcgacgaccgacagggtggtgaaagaattcaactagagggcagccttgtggatggccccgaagcaagcct

SEQ ID NO: 205161 - DNA, 76 bp, Homo sapiens
caagaggagcctgtctccctggggctacagatattcgcatggagcagtgttacttgaagtgggatgaagatgaatg

SEQ ID NO: 205162 - DNA, 98 bp, Homo sapiens
ggagactggagtcgaaggccgtgaggtatttttctaagaaaccaatagagccatggcgactccctctgctgccttcgaggcccttatgaatggtgtga

SEQ ID NO: 205163 - DNA, 74 bp, Homo sapiens
ggctgagcagctgcaaacccccgaaaaagaatgttgtaccatctttgggtaggcagacttccctgacgacatca

SEQ ID NO: 205164 - DNA, 88 bp, Homo sapiens
ccaaatatcctcggaagagcgctcccaggagaaacaagttggtcaaagaaaaagtgatgtatgaaaaagaggcaaaacaacaagaaga

SEQ ID NO: 205165 - DNA, 50 bp, Homo sapiens
ccatcgacccccagagcaacgtgtttgagaagtcccccctgcgggtgaag

SEQ ID NO: 205166 - DNA, 50 bp, Homo sapiens
gtgaggatccggagcagacgcctcgggattctgcttctcagaagatgcac

SEQ ID NO: 205167 - DNA, 100 bp, Homo sapiens
tacgtcattcacaacaacaagtgcatccctgagtgtccctccgggtacacgatgaattccagcaaattgatgctgaattgaagaatatcctgtagtcctg

SEQ ID NO: 205168 - DNA, 83 bp, Homo sapiens
gtctgtgcaggtggtcaactgcagccgtgtattcagccttaggtcagcccaaggccaaccccactgtcactctgttcccgccc

SEQ ID NO: 205169 - DNA, 100 bp, Homo sapiens
aagtcaaacgcagaaggactgcctcactgagcaaccaagaaggtggtgggacacacgcaggggccactagatgggagcctgtatgctaaggtgaagaaga

SEQ ID NO: 205170 - DNA, 73 bp, Homo sapiens
ttttggtagagaagaatgaacattgtattgagaacaatatagatttgcagctccccaggtgtgtcctggtaga

SEQ ID NO: 205171 - DNA, 75 bp, Homo sapiens
ggaattcaagcaatggaaatagtggctctaacagcaaatcgcagtcttctccaggctgacaaggcgaagggcatg

SEQ ID NO: 205172 - DNA, 100 bp, Homo sapiens
cgcgcccatcctccagaaggtggtggagcagctggagaaagccaaggccacctcaagaggaacatcgtggtgaagaccgtggagatgcgggatggagagg

SEQ ID NO: 205173 - DNA, 101 bp, Homo sapiens
ctgaacagtagcctgcgctaccttgatgtcagctgctgcggggtattgaatttgaggctgctctcagcattactgctcatctcaaagaggaacaaatggtc

SEQ ID NO: 205174 - DNA, 50 bp, Homo sapiens
cttcctcatcgtggcagctctgggacacaactcagatgggaagttcatcg

SEQ ID NO: 205175 - DNA, 83 bp, Homo sapiens
agattttggtggaaagtttcattgtgtatgtagaagaccagaagtggatggagaaactgaaggcagaagctagtctaatggac

SEQ ID NO: 205176 - DNA, 85 bp, Homo sapiens
taaagctgttttggaactgtcaggtacctcaaagcgaagtggagccgtcagttcctgctttcattctggtgtactgtatgttctg

SEQ ID NO: 205177 - DNA, 99 bp, Homo sapiens
tccgacgctggctccgctctatccggctttgctaggggaggtgtcatcgctcaggaggtgaaggagatcttgcctgaggctgtgaaagacaccggagac

SEQ ID NO: 205178 - DNA, 82 bp, Homo sapiens
gcttggacgactcggagagccggaatactcccccagttgcaagaggcgcaggaccgtggaagacttcaacaaattctgcacc

SEQ ID NO: 205179 - DNA, 103 bp, Homo sapiens
aaagcgcccagcctgccgcctcgctgtccctgcggcttctgggggtactaggttttgacaagcttgcatcatgcgtgagtataagctagtcgttcttggctca

SEQ ID NO: 205180 - DNA, 100 bp, Homo sapiens
ctgccctggttccccggccccacccgatgcggcctccaagttacagaatgtctgaaggggacagtgtgggagaatccgtccatgggaaaccttcggtggt

SEQ ID NO: 205181 - DNA, 82 bp, Homo sapiens
aaaggagtggacattgctagcaatgagctcccaaagccatccaggtcaaaatgcagatcttcgtgaaaacccttaccggcaa

SEQ ID NO: 205182 - DNA, 90 bp, Homo sapiens
agttgaggataccacattagagccagaaggtgtggatgaggtcaccattgtcaacattttgaccaaccgcagcaatgcacagagacagga

SEQ ID NO: 205183 - DNA, 101 bp, Homo sapiens
cgcgcgccgctgcatcccgcgtccagcacctacgtcccgctgccgtcgccgccgccaccatgcccaagagaaaggtcccccccgcctccagccagcctgtg

SEQ ID NO: 205184 - DNA, 76 bp, Homo sapiens
atgtgatgttggagaactacagaaacctcgtctccctgggaatctttgtctgaagtggaagaaaaatacaagaaag

SEQ ID NO: 205185 - DNA, 50 bp, Homo sapiens
ggggagacgctgggcctcattggctttgctcagccagcagatctcctgaa

SEQ ID NO: 205186 - DNA, 82 bp, Homo sapiens
tcagaccctgagcctgaaggggaggcggaggacaggaattacatgaacgacagccttcgcaccgacgtcttcgtgcggttcc

SEQ ID NO: 205187 - DNA, 101 bp, Homo sapiens
cagctcaccttctatgcaggccccaatggcagccagtttggattttcactggacttccacaaggacagccatgggaggactgaccactgagcagatgctga

SEQ ID NO: 205188 - DNA, 83 bp, Homo sapiens
aactgccgcaacaataagaaactcctgggccgcgtgaaggccttcgataggcttcgaacctaatgaacaatccccagattcag

SEQ ID NO: 205189 - DNA, 82 bp, Homo sapiens
tttacctgcttcccaatcccactgatgaggatcagcccatggtaccttgtggtctataatcctttagaacaagaccgaatct

SEQ ID NO: 205190 - DNA, 90 bp, Homo sapiens
attcgccgtgcccgagaatagctccgtccagcaggagcgggacggtatgcgggccatcctggggtcctacgacagcgagctgaccccggc

SEQ ID NO: 205191 - DNA, 51 bp, Homo sapiens
cacaaaggcaacggtgactttcaaatgtgctggaattgatgttcgtctgtg

SEQ ID NO: 205192 - DNA, 75 bp, Homo sapiens
agaagaatattatcccttctcagagagcgatcgtcttctgatcaaaggaggtaaaattgttaatgatgaccagtc

SEQ ID NO: 205193 - DNA, 75 bp, Homo sapiens
gctgttagaagaattcatgctcatccgggcttgcccagtctcggacaaaccctcaggtcctggacactggcctga

SEQ ID NO: 205194 - DNA, 100 bp, Homo sapiens
tgtgagggagagaaccagcacttctgggacgcacagagaccgtgaagattccaagttcaggagaactcgaccggtctgggaggggctgaacgtggtgaag

SEQ ID NO: 205195 - DNA, 75 bp, Homo sapiens
gctgagtggttgtgtggtcgcgtctcggaaaccggtagcgcttgcagcatgtctctgctttctatccgtcaagat

SEQ ID NO: 205196 - DNA, 100 bp, Homo sapiens
ccagcctcaggaatttatggtcgcctttttgaatgagggaaaagagtgcaaattcggaaagcacctcaagctgtttcagatacagttcctgagaggaaaa

SEQ ID NO: 205197 - DNA, 90 bp, Homo sapiens
cgctgccttagagcgttagacagccacctgaagaggagactttgtcccaagcccctgagagtgaggaggaacagaagaagaaggctctgg

SEQ ID NO: 205198 - DNA, 74 bp, Homo sapiens
gaagatggcgaccgccatgtacttggagcactatctggacaattttcagctgaactctcatctctcaacactgg

SEQ ID NO: 205199 - DNA, 51 bp, Homo sapiens
cacgtcacctggagagatgcacagatggttggcaatggctgataaatgaca

SEQ ID NO: 205200 - DNA, 100 bp, Homo sapiens
atggaatccaatcctctgcttccaggacaagtcctgcgcttggggatcctctgtacgcccgttcactgcctgaagagttgagagaaatcattgagaagac

SEQ ID NO: 205201 - DNA, 100 bp, Homo sapiens
ctggaaaacaatgtctgtcttgaagctccgggaaccaggaaaatgagctggaaatgttttaaatgcacagagagcaggatacaaggcagccatagttcac

SEQ ID NO: 205202 - DNA, 100 bp, Homo sapiens
acatccaggaagaggagccgagcatctgggccgagaccattccgtatggagagccgggtaagaagcgcaattccacactctacataaccatgttactcat

SEQ ID NO: 205203 - DNA, 75 bp, Homo sapiens
tgtggatcgctgtgatcgtcacttgttctttgacccctggctacacaaagctgcttcagtttatccagaacatca

SEQ ID NO: 205204 - DNA, 74 bp, Homo sapiens
gcgcacttcgtcatgttcttcgcgccctggttcgtgctggccgtgggcagcgccgtctttgatgccatgttcaa

SEQ ID NO: 205205 - DNA, 75 bp, Homo sapiens
tccgatttaaagctgagctgcgaggaaaatggcggcgggagagtccgaaattgaagttcagaggaagaattgcct

SEQ ID NO: 205206 - DNA, 106 bp, Homo sapiens
ccaaacgtcatcattaagttggagcagggagaggagctgtggataacgggaggtgaatttccatgtcaacatagtcctgcgatgtcaccatttctacctgccacgc

SEQ ID NO: 205207 - DNA, 98 bp, Homo sapiens
gaggctttgttgtgagaagaactactgaattaactgttacaggaatatacagatgttgccacaggaatctaatctgaaatcgtacaaatggaaatgac

SEQ ID NO: 205208 - DNA, 100 bp, Homo sapiens
gcctgacagagaaggctcactcaaggatcagttggctttagcaattgaacaagaaactcctttacgagaagatgaagggaggagagagacgaaagcggag

SEQ ID NO: 205209 - DNA, 90 bp, Homo sapiens
agaagcggaaggagcggcaggaagcccatctctatatgcaagtgcagatagtcaatggctacttcgtgcacttctttgcacctcaaggcc

SEQ ID NO: 205210 - DNA, 100 bp, Homo sapiens
gggagctagtggaagttactgccgcgccaccgagtccggaccggagactttggggcctaactaggtggtgatctttgtgaagtctgtgcagcggtgcatt

SEQ ID NO: 205211 - DNA, 50 bp, Homo sapiens
cgctgagcaggtcatctttgtccgaggcagacctgttatcctaaactagg

SEQ ID NO: 205212 - DNA, 96 bp, Homo sapiens
tgccaaccagaaaagtgtgctggggcggaatttcaagatggatcggtggactccaacgacagcctctacgggggagactccaagttcctggcagaa

SEQ ID NO: 205213 - DNA, 100 bp, Homo sapiens
gcagggctccctctggatgtggaattctccgtccctttccagggagggaacaaagcccacaagcaccgcttcttccagaccagctggtcttgcttctgga

SEQ ID NO: 205214 - DNA, 82 bp, Homo sapiens
atgatggacactcagctcaccaagcgggagaactgcgacacatcaccaagctgaagccctggagcctctttgatgtacttgt

SEQ ID NO: 205215 - DNA, 90 bp, Homo sapiens
ccgagaccgtgaccgagagcgtgaccgagagcgcgaatatcgtcatcgttagaagaccaagaaattcaacgtctgaaaatggggatggaa

SEQ ID NO: 205216 - DNA, 83 bp, Homo sapiens
gagcgcaggcctggtgcaaacagactcaagaggctcggagaaccagcttggcttggagatttccttgattaagaagaatgaag

SEQ ID NO: 205217 - DNA, 75 bp, Homo sapiens
gcaaaggcagcatgaacttagtgagcacaatcctggaggaagagaaggctcagcaagaagagcgcatgaggatgg

SEQ ID NO: 205218 - DNA, 75 bp, Homo sapiens
gatcttggacgagcctggagagaggagaggagacgccgtgagcgggacgaccagatgtaccgagagcggctgcgc

SEQ ID NO: 205219 - DNA, 100 bp, Homo sapiens
gccaggaccccctagaagtctagaaatgactctggacattaatgtgaaggccccagccctgatgacaaaggcagtggtgccagaaatggagaaacgaggg

SEQ ID NO: 205220 - DNA, 83 bp, Homo sapiens
tagaaattccccccgaagaagactcccccacatctggtcaggatggctaaaggtgaccccaagaaaccaaagggcaagatgtc

SEQ ID NO: 205221 - DNA, 131 bp, Homo sapiens
ttcgggccgagatgtctcgctccgtggccttagctgtgctcgcgctactctctctttctggcctggaggctatccagcactcggtgaaatacctggagtgctcagctctcacccagagaggcctgaaaacc

SEQ ID NO: 205222 - DNA, 101 bp, Homo sapiens
cagatgtgagcctctgtgctcagtccatccttggctgttcaagtgtagagatacatctacctcggattgccggcagcactaagaggatcaagctttgttcc

SEQ ID NO: 205223 - DNA, 75 bp, Homo sapiens
ttggagagaacacgaccatctcagtgactgtgaaagggctgtgcttaagagtaaaacttcagcgatgtttaccat

SEQ ID NO: 205224 - DNA, 100 bp, Homo sapiens
gctgctggggacggcggggaccggtgacctggaactcccctcggtactgacatgatgacagtgtgcaggccggccaagggcagccacagccagactgaaa

SEQ ID NO: 205225 - DNA, 96 bp, Homo sapiens
ggaccagcaggatgatgacaaaggcaactgtgaggactaccttatgatttcctgttattcagcttctcaaggctggaaaagcgaaggaagtttcct

SEQ ID NO: 205226 - DNA, 82 bp, Homo sapiens
agaaaaccagctgagacagggcgccacttactaggagcatcagatccatgctgctgctgactcggagccccacagcttggca

SEQ ID NO: 205227 - DNA, 100 bp, Homo sapiens
cgcggagattgctgggcggttcttgccggaagcggagagcggctgatcgcagtccggagatccgcaaggatgctctccgggcgctcaactttgcgtacac

SEQ ID NO: 205228 - DNA, 100 bp, Homo sapiens
ggacgcgatgaggaccttggcttgcctgctgctcctcggctgcggatacctcgcccatgttctggccgagtgacatattcgatgccatgttccctgtcac

SEQ ID NO: 205229 - DNA, 100 bp, Homo sapiens
ctcctatcagggtcgggcttccagggcaatgaaacgcttggaagaggcccgactccataaggagattcctgagacaacaaggacctcccagatgcaagag

SEQ ID NO: 205230 - DNA, 100 bp, Homo sapiens
cacagccattctggcgttcctggtcaatcatgacttcacccctctggagaaaatgtggacacagacttgccaggcagcctggggcagagtgaagagaagc

SEQ ID NO: 205231 - DNA, 82 bp, Homo sapiens
ggactcttctaaaaggatatgtgttgctaatacccatctttactggcatcctaaagggacagaatgatgctgctgaaattgg

SEQ ID NO: 205232 - DNA, 75 bp, Homo sapiens
cagttgtggtcagtttcgctttgattgctaccctggtatatgcacttttcagctggccatgactcatccaagtca

SEQ ID NO: 205233 - DNA, 74 bp, Homo sapiens
cttacctgtcaccttggctctcccacccaatggagatggctctaatggaaagtaatggaccagtgaaggtgtgg

SEQ ID NO: 205234 - DNA, 83 bp, Homo sapiens
gacctgaggttgaaaactatcttaaggaaggctttatgaataaggagggtggcccagttgaaatccttcccttcctctacctt

SEQ ID NO: 205235 - DNA, 100 bp, Homo sapiens
ctactctgaagatccctgtggtagagagaaaaatcctggatctgtatgctttgagcaagcccgacggccatggaggctgaagagacgatggaatgccttc

SEQ ID NO: 205236 - DNA, 100 bp, Homo sapiens
ccgcatgctgcagcttatgaccatcaatatgtttgcagtacacaactcccagctgaaagaaatggtggagtcaatgaagaaagtagcagggatggatgtg

SEQ ID NO: 205237 - DNA, 99 bp, Homo sapiens
ggtcctcgatcttgctctgctgtttctgatggggattctagaagcagttcggttatacctgggatttgctcgaatatttgggtacccagtaggtatcgt

SEQ ID NO: 205238 - DNA, 50 bp, Homo sapiens
accgcaacctctgcctcccgggttcaagttgcagtgagccgagatcgtgc

SEQ ID NO: 205239 - DNA, 82 bp, Homo sapiens
tgacttcctggagtagagtcttttttcactgagggaagcagttcaggtacttttgaagcattctgcagatgttaatgctcga

SEQ ID NO: 205240 - DNA, 90 bp, Homo sapiens
attattgaaaaggcagctgagattgcaagcagtgatagtgctaatgtgtcagtgtctgcattattgggccgaatcccttctgctgtgggc

SEQ ID NO: 205241 - DNA, 83 bp, Homo sapiens
tccagatccatcacgtggggcaggacggtcaggagcaggccgggctctcgccatgggtcactgtcgcctctgccacgggaagt

SEQ ID NO: 205242 - DNA, 101 bp, Homo sapiens
ctttgcaacatttcaggaaaacagagaaagaagtgataggagggctctgtagatgatgatgtgcctgcagatatggttgcagaagaatcaggtcctggtgc

SEQ ID NO: 205243 - DNA, 100 bp, Homo sapiens
gggactggaaccatctcagaagccatgcccctcaggctggaacttgccctgtctcctcgcagatgaggaactggagatcagccagatcacttgtatgcac

SEQ ID NO: 205244 - DNA, 100 bp, Homo sapiens
ctcttctccgccgcggcactgatccccacagcaatggctgccatccggaagaaactggtgattgttggtgatggagcctgtggaaagacatgcttgctca

SEQ ID NO: 205245 - DNA, 107 bp, Homo sapiens
ataggaatcatggcggctgcgctgttcgtgctgctgggattcgcgctgctgggcacccacggagcctccggggctggacgagcctgtggagtgggagacacctgacc

SEQ ID NO: 205246 - DNA, 75 bp, Homo sapiens
tcaaggccaactatgacgtgctggaaagcgtccaggccatcaacgtgtccagccgcttcgaggaggagatcaagg

SEQ ID NO: 205247 - DNA, 100 bp, Homo sapiens
gagttctatactaaacaagatgtaattattacagcattagataatgtggaagccaggagatacgtagacaggtcttggctgttcaaccgtactttctcca

SEQ ID NO: 205248 - DNA, 75 bp, Homo sapiens
aggacccacggcgtctgttcgaaggaccaagaatcgccttcagccctgtctggtgcatccttggcagaaagtgag

SEQ ID NO: 205249 - DNA, 80 bp, Homo sapiens
ggccgaacgatgtgcgagaactgcgcagacctggtggaggtgttaaatgaaaaccaagatgaagagacgagctgtgggga

SEQ ID NO: 205250 - DNA, 99 bp, Homo sapiens
atgtactcaacttccatgggcgcgtcacacaggcctccgtgaagaacttccagatcatccatggcaatgaccagtggcggaggcagtgtaccacccatg

SEQ ID NO: 205251 - DNA, 75 bp, Homo sapiens
ggctccggactccagaactttccaagcgggggaaacttggcggcgggtggtcttcaagctgacagagaagctgac

SEQ ID NO: 205252 - DNA, 96 bp, Homo sapiens
tgtcggtggttagtttctgcgacttgtgttgggactgacagtacctgtaatgagaaacagtaaagaaaacagactaagaggaaacaaagcgttctg

SEQ ID NO: 205253 - DNA, 100 bp, Homo sapiens
gtagggcatccttcacccatctgaagggaggaaatagtggcaggtgacagtctgcatgtgcagttttcaggaagaggagcaggacttggatggtgagaag

SEQ ID NO: 205254 - DNA, 90 bp, Homo sapiens
tgtttttctggtctgaccgtcgcaaccctcatgaagtacaaccagcatatgctacaagtctttccagtgtcagcctgcctttagctaaga

SEQ ID NO: 205255 - DNA, 100 bp, Homo sapiens
atcccacacctccggaccgagggacgcgggaagaggaggctgcaaaatgggcccgggaagaagaagaagcccagcgtcgattagaggagaaccggctgcg

SEQ ID NO: 205256 - DNA, 90 bp, Homo sapiens
gcggcggcgggaacgattgggctgagcagaggacgacatgttgcttttcgtggagatccctttgttgatctagcaagtggccaagttcct

SEQ ID NO: 205257 - DNA, 74 bp, Homo sapiens
tcctaatccctagccactatggcggctgataaaggaagcaggaagcgctatgaaccatcagacaaggacaggca

SEQ ID NO: 205258 - DNA, 75 bp, Homo sapiens
cccaatctcatgcagacactggagaatgatgcattggagctatgcaacaggataagcaatgccattgaccgcgtg

SEQ ID NO: 205259 - DNA, 75 bp, Homo sapiens
ggcggcgcggcgcaggcaccggcccggggagaggcaccatgagcgagagaacgaggtgctcaaagtccaactgaa

SEQ ID NO: 205260 - DNA, 74 bp, Homo sapiens
gagccgctgccgcgttagttccgagcttgaagtcaagcatcactttgggtcctcaggaatgacattacatgaac

SEQ ID NO: 205261 - DNA, 100 bp, Homo sapiens
gttgtgcaatctgaagaagctctggtggggtggaagacaacccgtgagtattacaccttcatgtgggttactttgcccattgacctaaacaacaaatcag

SEQ ID NO: 205262 - DNA, 75 bp, Homo sapiens
tccagtctctaacgttttagaaaatcataacaagcggttctctaccctgtaaagttgatgcgatgaagagagttg

SEQ ID NO: 205263 - DNA, 85 bp, Homo sapiens
gaatcctgtcggagttgtagccatgccctagcagagcatcctggccagaacaagccaaggagccaagacgagagggacacacgga

SEQ ID NO: 205264 - DNA, 100 bp, Homo sapiens
ctgccccggcgcaccgactggaccgggaaggagcatcccaggacctaccagaatctgactaatagggatgccaaaggaaaaatatgatcctccagatcct

SEQ ID NO: 205265 - DNA, 100 bp, Homo sapiens
atgatagaatgattttaaagttatgggactacaacagcagccacaggaaccttgagcaaagagtatgtggggattgtccggctgcacaatgctattgaag

SEQ ID NO: 205266 - DNA, 100 bp, Homo sapiens
ccgactttatcaggctgggctctcgcttcagattcagtatcctgtggagcacccagacaaattcctgaagtttggcatgacaccttccaagggagttctg

SEQ ID NO: 205267 - DNA, 74 bp, Homo sapiens
gccccgtaaattggaaggatgcacaagttccaaggttacgtttcagtcaaaatgcagatcttcgtgaaaaccct

SEQ ID NO: 205268 - DNA, 74 bp, Homo sapiens
gcaacagctcggcacccattacactgatgctcgatcccgcccaatgacccccgcatcaagaaccaagccgactg

SEQ ID NO: 205269 - DNA, 99 bp, Homo sapiens
cggactcatacagagattgaaatgttccttagaaaggagcagcagacaatgcagatcttcgtgaagactctgactggtaagaccatcaccctcgaggtt

SEQ ID NO: 205270 - DNA, 75 bp, Homo sapiens
cgtcctctcccgagtttttcatctggccatgggcaagatgatggagcaggggccggtgctgatcatcaccttcca

SEQ ID NO: 205271 - DNA, 75 bp, Homo sapiens
cgcagggttcggatgagaccaggttgatgttctcaatcaagttgattggaatgcctggctctactctcctggact

SEQ ID NO: 205272 - DNA, 100 bp, Homo sapiens
catgtgttggctgttgacccagaaaaggcggcccagatgaaatcccagggtaagggactgttctgaagaacctttccatttagtgatcaagatatggaag

SEQ ID NO: 205273 - DNA, 75 bp, Homo sapiens
gccgatatgcctacagaatcatcttgttcggtgaccagtgacttggattttccaacacaagtcatcccattaaag

SEQ ID NO: 205274 - DNA, 100 bp, Homo sapiens
gacgagtttcctgctgtcttcagccattttcaaaaccttgttctataatactttgtgctgggcaagagggatctaaggatgtacagttacccagcacgtg

SEQ ID NO: 205275 - DNA, 83 bp, Homo sapiens
aaagctcaatgcctcagaaattcattggataaatgtgcatcctcactaggaaaaaaaagtttgtgtgaaaagctggatccaac

SEQ ID NO: 205276 - DNA, 50 bp, Homo sapiens
cagcgcggcaacgtcgccaagacctcggacaatacatggcttgatataca

SEQ ID NO: 205277 - DNA, 50 bp, Homo sapiens
ggttctctgggatataaataaggcgtgccgccgccagacggattactggc

SEQ ID NO: 205278 - DNA, 96 bp, Homo sapiens
gggagacacgccaaagctcccaaggaatcctttgtgtttgaacccaactgcctcttcaaagtggatgagtttggcttctttctgacatggagaagt

SEQ ID NO: 205279 - DNA, 87 bp, Homo sapiens
cgaagcctgttcagcagcattggtgaagttgaatctgcaaaacttattcgggataaagtagcaggccatttcataattctgaatcat

SEQ ID NO: 205280 - DNA, 74 bp, Homo sapiens
accaagctacctgtggagccgaggaaaagaagcaaccgtgacaagtggtgcccgaccagggacctgaacgagga

SEQ ID NO: 205281 - DNA, 128 bp, Homo sapiens
gcacaagatcgccggagtcatattatcgacgtagttaaagcccactagcctaaagccgggcggactgcgactcgtttgtgaacagccaggagtggacgctgagccgctccgtaccggagcttaaagtg

SEQ ID NO: 205282 - DNA, 82 bp, Homo sapiens
cagatggcagccagtcagtggtggagattgaagtggtgcctgattgtcaggagaagagaagttctggtccatcctccagttt

SEQ ID NO: 205283 - DNA, 74 bp, Homo sapiens
tgcctataagaccctcctggcccccctgagcagaggactgtaccttgtaagtgtttctgttcactgtaaaaaga

SEQ ID NO: 205284 - DNA, 80 bp, Homo sapiens
aatccacccctgcgcctgccgagaggcccctgcccaacccggaggatggaacttgctaaggaagaaaagtgtgaatttct

SEQ ID NO: 205285 - DNA, 75 bp, Homo sapiens
ccaaggctggaatctggtgcaggaatatcagaagctctttcctgacattcccatagggtattctgggcatgaaac

SEQ ID NO: 205286 - DNA, 100 bp, Homo sapiens
ccatcgggaagccattgtgaacagctgtgtgtttgttcatcagactcttcaccaggttacccatgcagttgttactgtaccagcctattttaatgatgcc

SEQ ID NO: 205287 - DNA, 75 bp, Homo sapiens
agccatggcatctaagaaatttgctgttaaatgatttaaagggagtgatagtcactctgagtgatgatggtcact

SEQ ID NO: 205288 - DNA, 125 bp, Homo sapiens
gattattcaaaaaaaaagaagcctctcactttcagtccaagctaattacacctcctcctccaccaccctcaccagaaagtatttgtgtggaagtaatcgaaaagacaacatatttattgatcctg

SEQ ID NO: 205289 - DNA, 82 bp, Homo sapiens
aagatgaagaggaactttttaaaatgctttatcctgtggataaacgcagagtgaacgagtttggggagtcctacgaggagaa

SEQ ID NO: 205290 - DNA, 100 bp, Homo sapiens
cgcgacctggccagctgccgcgactgggaggagcgccggaacgccgaggcccaggatatgctgcaggctgctagtcattatcgccaaaatagaaactctt

SEQ ID NO: 205291 - DNA, 100 bp, Homo sapiens
tgtgtgccccttctccacccagagggtgaaaatcctatttataagagtgccgtaacaactgtggtcaatccgaagtatgagggaaaatgagtactgcccg

SEQ ID NO: 205292 - DNA, 100 bp, Homo sapiens
gctccaagagcttgctcaacgagatcgagagcgtctacgacgaggcctcgctcgccatgggggaggtggagatctcggccctggcctacgtgaagatgtg

SEQ ID NO: 205293 - DNA, 100 bp, Homo sapiens
gtgcaggtcctcactttaatcctctatccagaaaacacggtgggccaaaggatgaagagaggcatcagagcggagacttcagggagaccagagcccagct

SEQ ID NO: 205294 - DNA, 75 bp, Homo sapiens
tggtaaatgacgaaggggcttcttccagagccaaggaggaagggttgtccgggaaatcctaggagtgcctcatgc

SEQ ID NO: 205295 - DNA, 90 bp, Homo sapiens
atttaacattccaacacataaaaattatttatccaacagctcctcccagaataatcatgggccagactgggaagaaatctgagaagggac

SEQ ID NO: 205296 - DNA, 88 bp, Homo sapiens
cgcttttcccctggccttctgtatcttcatggtgcggctcatcttcgagaggtatctctgcattagccagattggacatatgtaaagg

SEQ ID NO: 205297 - DNA, 98 bp, Homo sapiens
ggaaaccggagtgaccagaggagggacacggctgcctgctgtttcccggggagatcatgaaacgaggtcgccttcccagcagcagtgaggattctgac

SEQ ID NO: 205298 - DNA, 96 bp, Homo sapiens
cggaagctgggctcacgtgggagctcagtgccctcctgctacagatctgtctcttccttacaatgggcgccctgcgtccggcagaggaggcgagca

SEQ ID NO: 205299 - DNA, 75 bp, Homo sapiens
tggtgatccgtgtatatattgcatcttcctctggctctacagcggtgaggggaagtggcttcgaaacattgacta

SEQ ID NO: 205300 - DNA, 75 bp, Homo sapiens
gaattgtcttgaacagcagtcaaaatggagctgatgaccaaaggtaatctatttaaagaagacaccagaagaagc

SEQ ID NO: 205301 - DNA, 75 bp, Homo sapiens
ccggaggcagagcggctgccatggagttttgagagcaaaatgacaacacccagaaattcagtaaatgggactttc

SEQ ID NO: 205302 - DNA, 97 bp, Homo sapiens
ctccgagtttgcgactcgcggaccggcgtccccggcgcgaagaggctggactcggattcgttgcctgagccgcctgtgatgctgccgtcccccgtcg

SEQ ID NO: 205303 - DNA, 100 bp, Homo sapiens
gttccagcatattttgcgagtactcaacaccaacatcgatgggcggcggaaaatagcctttgccatcactgccattaagaaggccaatgatgaggccaat

SEQ ID NO: 205304 - DNA, 74 bp, Homo sapiens
ggcggccgaggtagaggcagtggcgcttgagttggtcgggggcagcggcagaatgccgggtctaagttgtagat

SEQ ID NO: 205305 - DNA, 82 bp, Homo sapiens
gtgggggaccggctgttggcggggacgactggagtgagcactggcctgggagtctgaagattgtgccttcagacctacttcg

SEQ ID NO: 205306 - DNA, 101 bp, Homo sapiens
ggacttcttcttcaccgccaggacctccttcttcaggagagcgccccagggcaagccccgctccggccaacaaatgagcaatggcaggcgctggtgagcgc

SEQ ID NO: 205307 - DNA, 75 bp, Homo sapiens
gtctccttaacaccgaacaccatcactgtgtccactactatgatcttcgtaacactaaacagccaatcatggtat

SEQ ID NO: 205308 - DNA, 96 bp, Homo sapiens
gatggtcaggtctggagctcgaccgggccagtgtcgagttatagcagtgctggattgggagctgtcaaccattggtcatcctttgtcagacttagc

SEQ ID NO: 205309 - DNA, 90 bp, Homo sapiens
gatgaaaagaaatacctgtgatttgctttctcggagcaaaagtaagagctggatattctttcgcccagttatggcagacaagttaacgag

SEQ ID NO: 205310 - DNA, 50 bp, Homo sapiens
gggaaccctggtcaccgtctcctcagttacatggacacagaacagtatga

SEQ ID NO: 205311 - DNA, 100 bp, Homo sapiens
tcgtgatcgactcggacacagaggacagcggcagcgacgagaacctggatcagctcatgatggagcagtccaagaagtcctccctcatggtggcccgcag

SEQ ID NO: 205312 - DNA, 90 bp, Homo sapiens
tggggccggacaagaacctgaccgagagggagatttttatacgactgtaaacaactattggattctaaatgctcgacacataaatttaac

SEQ ID NO: 205313 - DNA, 100 bp, Homo sapiens
gaattatacctagaagtctactaatggacagttagtcacccacctacatgttgaggtgcccaggccccacaagtggccccagcccaggaacgaatctctc

SEQ ID NO: 205314 - DNA, 100 bp, Homo sapiens
ggcgacggcatttaacaaggcggtgtggtttactccatgcagttgtcaggaggcttcaacggaccacaccaaaatgccatctcaaatggaacacgccatg

SEQ ID NO: 205315 - DNA, 51 bp, Homo sapiens
tggttgcagttgtgtagtagttaaggatttggagttccatggagtgatgag

SEQ ID NO: 205316 - DNA, 93 bp, Homo sapiens
aggatctggtgtaccaggcgaagctggccgagcaggctgagcgatacgacgaaagtcctacctccatctccgtgggccccagcaccagccgac

SEQ ID NO: 205317 - DNA, 100 bp, Homo sapiens
aactgagtgaaaatacagccaagatcttggcaaagcttctccctcagtatttagaccaggtttggtgcacctcgatttggaggaagtagggcagggccct

SEQ ID NO: 205318 - DNA, 75 bp, Homo sapiens
agcaaaggagtcagggatggctcttcctcagggaatatccctgcgctccagacgccaaaataagactgaggcaga

SEQ ID NO: 205319 - DNA, 97 bp, Homo sapiens
tgtatgttcttcgccattatattcagtttcttaaacaattaggtctacatcctaactggcaattcgttgatgtatatggaatggatcctgaactcct

SEQ ID NO: 205320 - DNA, 100 bp, Homo sapiens
tctcttccccgaggaaagggtatccgcctcaccattgctgaagagagagacaaaagactggcggccaaacagagcatttatctgcagggctgttgtttcc

SEQ ID NO: 205321 - DNA, 130 bp, Homo sapiens
gtgaccgagaccgtgaccgagagcgtgaccgagagcgcgaatatcgtcatcgttagaagttgcgagaaagaatcaaagctggcaaaggtgtgacttcagctattgacctgtgtcgttaccatggaaacaa

SEQ ID NO: 205322 - DNA, 146 bp, Homo sapiens
gccgtgttgaccggtttggttgaagttggagaagtatccaatagggatattgtagaaactgtctttaacctggtactaggttttgacaagcttgcatcatgcgtgagtataagctagtcgttcttggctcaggaggcgttggaaag

SEQ ID NO: 205323 - DNA, 80 bp, Homo sapiens
gtgagctgggccctgggccagaggcagaaaacggacggaagaaaaggtctggccgcctcctgacaaggtgatccgggcgg

SEQ ID NO: 205324 - DNA, 100 bp, Homo sapiens
gacaacttcttttacagcagcaaacaagtggattgaaatctcctaagagcagtgataaacagagaccactgcagttaagggaagaaagtcggaggctggc

SEQ ID NO: 205325 - DNA, 71 bp, Homo sapiens
ccgctgggcagaggcttgggccgccgagctggacccggaccggttttggtcggagagcgaggagaaggttg

SEQ ID NO: 205326 - DNA, 75 bp, Homo sapiens
ggtcctttatatagaagggagagtagtacttacagatcatcagtatttggagaggacaccactatgtgccatttt

SEQ ID NO: 205327 - DNA, 75 bp, Homo sapiens
aagtcagacctcaaacagctaagacaggactttgaagaatatcctgaacatagaacgaactttttcttactactt

SEQ ID NO: 205328 - DNA, 100 bp, Homo sapiens
tcaaaaaggagctggatgtggaatcagttctttctcctggaggaatacacaggatccgattatcagtatgtgggcaaggaaacattggcaaatttggagc

SEQ ID NO: 205329 - DNA, 75 bp, Homo sapiens
ccctagaacgttgagggcacgagtcgggtcctgagaccaggttatcaatactctggctgaccatcatcatcgtgg

SEQ ID NO: 205330 - DNA, 82 bp, Homo sapiens
aatctttttgccataaattctaaaatgattacggacctgaagccaaagaacaagatgcgctagtggacagattgctgaccag

SEQ ID NO: 205331 - DNA, 100 bp, Homo sapiens
atcagtccaagttgacggacaggaggcgaaatgtgcaaatgtttatgggatgacatctgaactggagagcagcctaacgtctatggactggttaccacag

SEQ ID NO: 205332 - DNA, 152 bp, Homo sapiens
gacaaatacagaatccgtgtctgggagaaacctcgtggcctggtctccattatttgagatgagttacatcttggaggttgcaagaaagctcaagtagcctatggagaggatgcaaggcttccagctgatgccctcagccaggctcagtagca

SEQ ID NO: 205333 - DNA, 97 bp, Homo sapiens
tcatcattgctgggtcctcaatgcagggggccatttcatagatgaaaatggctctcgccttccagcaattccccgacggagtctcgctctgtcaccc

SEQ ID NO: 205334 - DNA, 89 bp, Homo sapiens
ttgaatttgaagatccccgagatgcagctgatgcagtccgagagctagatggaagtggaaattgcaacactaacaagagagaatggaaa

SEQ ID NO: 205335 - DNA, 100 bp, Homo sapiens
gaagctatctgtgataatgctttgtggtgtatggattcatctcactgactgaaacctgagttttgattcaccagctatatcgtgtggacacccaggggtc

SEQ ID NO: 205336 - DNA, 102 bp, Homo sapiens
gtcacctgaagacagcaagtacttcctgccctaccatccgccccagcgcaggatgaacctgaagggcatccagggttccaaaaggtcccaggtgtcctctcc

SEQ ID NO: 205337 - DNA, 83 bp, Homo sapiens
gtgtgagcagggctgagatgggcaccgcggatctggggccgtcctcaggagaagaaggaagttgtggaagaggcagaaaatgg

SEQ ID NO: 205338 - DNA, 80 bp, Homo sapiens
gctagcgcggcctgggatgcgcttgggctccctgtaaccctccactgagtgaagaaatgttgcctcctggagagtggatg

SEQ ID NO: 205339 - DNA, 100 bp, Homo sapiens
agcttcctttgcagggaaaattgatgccagccaaacctgtaaacaactttatgagtctcatgccaatgaagatgtggaaagaatgttactaggaaacaag

SEQ ID NO: 205340 - DNA, 90 bp, Homo sapiens
cctggagttcatcaaatacgtgtgcaagcccttgaaggtagtggacccagatcatcccctcgcagcacttgttcgtaaggcacaggctga

SEQ ID NO: 205341 - DNA, 51 bp, Homo sapiens
tgctggcactggtccttgtcccctcaggccatgtttttggtatactgtgca

SEQ ID NO: 205342 - DNA, 100 bp, Homo sapiens
cgacaagccgctggcagccgcggatctcaccgccgctcaggcaggaggagcaatctcagaactgttatgaagaccttcgaagttcttcattctttctcac

SEQ ID NO: 205343 - DNA, 75 bp, Homo sapiens
cctgcatagccttcacagagagtccagttgccaaggatattaatgcacacgcctgtgttactggtaaacccatca

SEQ ID NO: 205344 - DNA, 100 bp, Homo sapiens
agtggaatccttactgcatgttttgcacgtatgaacggccggtttgtgggcgatgctgaccttgaaagacagaaattttcagatttgaaactcaacggac

SEQ ID NO: 205345 - DNA, 74 bp, Homo sapiens
tgatttgcgccatcatcctcatcatcatcatagacattactggttatagaattaccacaacccctacaaacggc

SEQ ID NO: 205346 - DNA, 51 bp, Homo sapiens
gcgggcggctgagacaaaggcgacggttttacagctctttaaaacactgca

SEQ ID NO: 205347 - DNA, 51 bp, Homo sapiens
attgtgccgtggctagaactgttgcaggaggccagagaactggaaaaacca

SEQ ID NO: 205348 - DNA, 101 bp, Homo sapiens
gaggcacaggtggcccccaccacccggaggagcagctcctgcccctgtccgggggatgactgattctcctccgccaggtatcgagaaccttccctgcgaac

SEQ ID NO: 205349 - DNA, 83 bp, Homo sapiens
aggacgacatgttgcttttcgtggagagggagacgtggtgggcggtccttcctgtgacacgacccttgagtgacagttctatt

SEQ ID NO: 205350 - DNA, 83 bp, Homo sapiens
cgcgagctatatctgcgcgtggagctgagtgacgtacagttcccatggacacctcggcccaagacttccgggtgctgtacgtc

SEQ ID NO: 205351 - DNA, 76 bp, Homo sapiens
caattgtgaagatcgccagagagttctgtgtttcatcaccgccgaaagatgcctgtgaggagccaccaacatttga

SEQ ID NO: 205352 - DNA, 82 bp, Homo sapiens
catggcgaagcacgagcagatcctggtcctcgatccgcccacagacctcaaattcaaaggagtacttcttgcaagcagagct

SEQ ID NO: 205353 - DNA, 90 bp, Homo sapiens
ggggcccgcacggaccctctacttcagttatgaagacagtatggagtttccagaccatagtagacatttgctacagtgtctgagcgagca

SEQ ID NO: 205354 - DNA, 95 bp, Homo sapiens
cagggaggagaccggcacccagacaggtggcgacggcagaggagcctcattgctacgatttcagagtaccctggtaatagctgagcatgcaaatg

SEQ ID NO: 205355 - DNA, 82 bp, Homo sapiens
ccccaacgccaccgagagggcgcctggaatgtaccacatggaatgcttggacccccctctccaggaggtgccggtggacgag

SEQ ID NO: 205356 - DNA, 85 bp, Homo sapiens
tacaacagcacgttgtactcattggaggatcagctcacctgctttgctctcgatgtagcctgtctaaagacattgccctcacaga

SEQ ID NO: 205357 - DNA, 87 bp, Homo sapiens
ccaacccgcggccccggcgccaagccgccgtcatcttcttcctgtgccaggcctacccgccgggtccctacgctacacctccggggt

SEQ ID NO: 205358 - DNA, 100 bp, Homo sapiens
cagcattagggacaggaatggaacacacttggatgcagacctcgaagtagggggaaaactgcagtggaagatgaggacagcatggatgggctggagacaa

SEQ ID NO: 205359 - DNA, 98 bp, Homo sapiens
attggctaccacctgctctactacctgagggccagaggagaaggcagagcccccccaggctatgaatgccctgatgcggttgaaccagctgaagccag

SEQ ID NO: 205360 - DNA, 90 bp, Homo sapiens
tgaaatttgtaagtgaagatcttcatcggtgtgcacttttaacaggatgtggagagcatcttgtgcgcaccatactggctagagaatgtt

SEQ ID NO: 205361 - DNA, 98 bp, Homo sapiens
cagggaaggcactcaaaagtggggggcaggaaaggtttgtcctggttgtggtcaagactggatgatgtaactggctctctaggaagcctcacttggcc

SEQ ID NO: 205362 - DNA, 82 bp, Homo sapiens
ccgaggatctggaggcacagctgcagtctgacgagaggggcttgggcactgtttaaaggaaagttccgagaaggcatcgaca

SEQ ID NO: 205363 - DNA, 100 bp, Homo sapiens
gcgggacctcaagctgcggaaattcatctttaaggacgaagagagggatctgaaacttgcccacccttcgggatattgcaggacgctgcatcatgagcga

SEQ ID NO: 205364 - DNA, 100 bp, Homo sapiens
cagcaaccagctagctactcgagagatacgtaggtaacctttccagagatgtgacagaagtccttatacttcagttgttcagtcagattggaccctgtaa

SEQ ID NO: 205365 - DNA, 80 bp, Homo sapiens
ctgctccccaagctccagcagctggacaatgcagatcttcgtgaagactctgactggtaagaccatcaccctcgaggttg

SEQ ID NO: 205366 - DNA, 50 bp, Homo sapiens
ctgaacatcatgaattcccaagaaggaggaccaggcctcctcttcccacc

SEQ ID NO: 205367 - DNA, 90 bp, Homo sapiens
aacagagtgctgttttagagctggcagcagcatctcagcccaagagaagtgtcttccaaggtccatgaggatgcacacttatttatccag

SEQ ID NO: 205368 - DNA, 87 bp, Homo sapiens
agccatgcccatcgcagccgccccgaaggagccagcaggaggatgcattagcacaacaggcctttgaagaggctcggagaaggacac

SEQ ID NO: 205369 - DNA, 82 bp, Homo sapiens
aggtcactgccatctggagtggatggacacacctggttgctcagacagtttcagttcttgccggagagtttccagatttctc

SEQ ID NO: 205370 - DNA, 97 bp, Homo sapiens
acgtcatacttggaaatggctgcaggttcagagttggtcatcattttatccaagcttgactgtggtacagcatggcattccatgttgtgaagttcat

SEQ ID NO: 205371 - DNA, 71 bp, Homo sapiens
cctgccctacttgtcagggaacaggaagaattcctagggcaatttgcaacccaaaatgtctttatggaggc

SEQ ID NO: 205372 - DNA, 82 bp, Homo sapiens
ctccctctgctcttcctcccttcgctcgcaccatgggtgaaaatgggatggaggattgtgtcatggccctagaaaccttgtt

SEQ ID NO: 205373 - DNA, 50 bp, Homo sapiens
aaaaaggcgaaagccttgaggttgaagacattaggtatgcatcagttaac

SEQ ID NO: 205374 - DNA, 75 bp, Homo sapiens
ccgtggtctactacagcctcttgctgtgcctcggtttaccaggtgctggagaatctggtaaaagcaccattgtga

SEQ ID NO: 205375 - DNA, 82 bp, Homo sapiens
tctggggatcttcgcactatcccaaggatttttagactctgaggagcagttggagctaatccacattatggaaatggaaacc

SEQ ID NO: 205376 - DNA, 75 bp, Homo sapiens
tttccctcctggaaccaaaggaaatacatttgtacacgatcccaagttcacagtgagtacattggatgatgtgaa

SEQ ID NO: 205377 - DNA, 75 bp, Homo sapiens
ccggggaggcagcgcgggatcccagcctcaggcgtgcgcggacggtgtgcggcccgagcgggaagaagttccgca

SEQ ID NO: 205378 - DNA, 100 bp, Homo sapiens
gtgcgttagtcaccagctgctcctccgtcttctcaggagaccagctggtccaacgccctggccaacgtcaacattgggagcctcatctgcaatgtagggg

SEQ ID NO: 205379 - DNA, 100 bp, Homo sapiens
cggcagggcaagcagcgcggcctcggcctatgcgaccggtggcgccggcgcggcttctgcctggagagatgtgtcttgctgaatcagggctctcttatcc

SEQ ID NO: 205380 - DNA, 90 bp, Homo sapiens
gtagagcttgatgtgtcagatgaagagatggctagaagatggcgggtgaaaaagttgagaagccagatactaaagagaagaaacccgaag

SEQ ID NO: 205381 - DNA, 50 bp, Homo sapiens
ccctgagacggtgtcccgccgaaaggcctatgaaaggaggttccctacat

SEQ ID NO: 205382 - DNA, 82 bp, Homo sapiens
agaatatcagcgacaggactacatggatgccatggctgagaaggtgaaatgacaatggatgctctgttggctcgattgaaac

SEQ ID NO: 205383 - DNA, 97 bp, Homo sapiens
atggatctcagctacatcacagccctgttaaaggatggctttggctttgcagacagcacagtcttacagataacaacgaacttgatgcaagtgatag

SEQ ID NO: 205384 - DNA, 100 bp, Homo sapiens
gctcagccggtcgagctgcgcgggagaggcggggtttcaccatgttgcccagactggtcttgaactcctgagcttaagcaatccacctgcctcggcctcc

SEQ ID NO: 205385 - DNA, 80 bp, Homo sapiens
aaaactggacattataacattaaaactgaaggcagaagctagtctaatggaccagatgagtagttgtgatagttcatcag

SEQ ID NO: 205386 - DNA, 100 bp, Homo sapiens
tggtggctgaaatcactccaaaaggcagaggtttttctcaagcaaaccagtttaactatggagttgataacgctgagttgggaaacagtgtgcaattaat

SEQ ID NO: 205387 - DNA, 75 bp, Homo sapiens
gggaggacgagaatcggtgtggtattcagaaacgtgaagccagcaattgtttcgcaattcggcattttgaaaaca

SEQ ID NO: 205388 - DNA, 82 bp, Homo sapiens
tccatttttagttttcctcacaagtttgaaatttcctttgtcatctggtgcatagaacagcatatgccatatatgagctggc

SEQ ID NO: 205389 - DNA, 100 bp, Homo sapiens
ggccttttgaatataactccacaagatgcctggagctgaggcacgaaatattggaagtgaaggtgctgtccatgctggagtgcggtggtgtgatctcggc

SEQ ID NO: 205390 - DNA, 102 bp, Homo sapiens
gcaggcccccccgcgccgaccgcgttcctatggacagacgcacagacacctgcaggaacaagcacatcatgattgacttggggactggcaacaacaacaaga

SEQ ID NO: 205391 - DNA, 100 bp, Homo sapiens
tgcccccaagggtcctgaggaggatcataaggcctgagctcaggccttacctcgtgcacatacctagaaagttggagtgactggtccccctgatccacaa

SEQ ID NO: 205392 - DNA, 51 bp, Homo sapiens
cgagttcaaagagaccctcggaacgagtgagctgttgccgcagaatgggct

SEQ ID NO: 205393 - DNA, 50 bp, Homo sapiens
agtgccatctaccacaaaagggttgtactcgtaaaacaaggatcatcgat

SEQ ID NO: 205394 - DNA, 98 bp, Homo sapiens
gtggctgagctgtgggctcacgaccccgaccccggcccggggcaatggcagatgagtctggggaccagcgaagaccaccagcacttcacctgcaccat

SEQ ID NO: 205395 - DNA, 100 bp, Homo sapiens
aaagatgcaggatctgagaaatccactggagtggtccggttaaataccgtgaggcaaattattgaacaggacagtcattttgtttactcattcagccctg

SEQ ID NO: 205396 - DNA, 75 bp, Homo sapiens
ctttaccgtttgttggagaaaaagaatctgaattatccagaacagaaagttgtgactgttggacagttcaaaatt

SEQ ID NO: 205397 - DNA, 113 bp, Homo sapiens
taatcggatctggctataatacccctgctgacatttggagcacggcatgcatgggaggcaaatacatgcaggcggtgattcagtatgggaagatagtgtcctggttagagatg

SEQ ID NO: 205398 - DNA, 50 bp, Homo sapiens
tttctccacccatcccgagaacaagaatgtaactggtcactacatttccc

SEQ ID NO: 205399 - DNA, 98 bp, Homo sapiens
cttccaaactgatctaacagggcaaaaaaagggctggaaacttcgctatcatggagatcaaaatccgttaacacaggcagtgcctaaatgtcagcgct

SEQ ID NO: 205400 - DNA, 90 bp, Homo sapiens
tctccttgacggagcccatgaaggttgttgatcattatgaaaatcctagaaacgtggggtcccttgacaagacatctaaaaatgttggaa

SEQ ID NO: 205401 - DNA, 83 bp, Homo sapiens
gcggcctcctggcatctgccggctgctccgcaccccggggtcccaggaagggcggcccagctttgccagcgccgagtaccagg

SEQ ID NO: 205402 - DNA, 50 bp, Homo sapiens
gcactgttacttaaaggaacctaagactgtgatagatgccaacattttcc

SEQ ID NO: 205403 - DNA, 98 bp, Homo sapiens
gctcttcttcttcgagaattacaccggggtccaggtgatgatgaaggaatccaggagacagcagaatcagatggggacacacagtcagagaaaccggg

SEQ ID NO: 205404 - DNA, 100 bp, Homo sapiens
gccatcctctggctgtggaagaagcataatatggtgaacggccgcctggcaggtgctggagaatctggtaaaagcaccattgtgaagcagatgaggatcc

SEQ ID NO: 205405 - DNA, 100 bp, Homo sapiens
ctcgacctcctatgactctgcagttacccagcgacttctccgtgtcccttaaagcgtcagggaagaacaaacacttcaaggtgcagctcgtggacaatgt

SEQ ID NO: 205406 - DNA, 97 bp, Homo sapiens
cggcggtgtgggcgcgtcaggccgcgacgagggcgctgaggataaaggctcactgatggctcagttgggagcagttgtggctgtggcttccagtttc

SEQ ID NO: 205407 - DNA, 115 bp, Homo sapiens
gttccttgtggagccggagctgggcgcggattcgccgaggcaccgaggcactcagaggaggtattatcgggggacccacggggtcattgtggtttacgacgtcaccagtgccgag

SEQ ID NO: 205408 - DNA, 100 bp, Homo sapiens
cgggacaagaaaattcatgcgttgttcctgaaaatgataggcccaacccatggccagatgacagtcacaagacttgtgaatacgttaaaagaaggaaaac

SEQ ID NO: 205409 - DNA, 74 bp, Homo sapiens
tactctctcagatgacttcgtctcccaccgactgcctgtttaagattgatctggatactattgatgtaagcaac

SEQ ID NO: 205410 - DNA, 86 bp, Homo sapiens
caccgccgcggttgatactactttgaccttccgagtgcagtggtactaggttttgacaagcttgcatcatgcgtgagtataagcta

SEQ ID NO: 205411 - DNA, 80 bp, Homo sapiens
ttttccccaagcactctcaggaacctggcaacagaccagcatctcagacatgtcgaaaaagatgttttgatccctaaaat

SEQ ID NO: 205412 - DNA, 75 bp, Homo sapiens
ctcctcctttagaaaactgatcttaatacaggcttgtttctggtgcaggtgacatcaaactcaccaaagatggca

SEQ ID NO: 205413 - DNA, 97 bp, Homo sapiens
ggacagggaaccctgcgtttctactgtgtgattctgccaccttcctggcccgacgccatgggagtgacttgaggtacttggaaggctccatcgcccc

SEQ ID NO: 205414 - DNA, 96 bp, Homo sapiens
gtgcagaggggattcaacttcaatttttctgcagtggctctgggtccagccccttacttaaaggttaacagaaccttctggatatttaacagatgg

SEQ ID NO: 205415 - DNA, 96 bp, Homo sapiens
agacccagaagcacaagaaggaccttcacccattgtttgatgagacctttgaattgtcattgattacaacggggaacgcacgctggatggttttaa

SEQ ID NO: 205416 - DNA, 51 bp, Homo sapiens
gtctccaaattcgcctccatctgtaccatgcattactctactgactggcag

SEQ ID NO: 205417 - DNA, 82 bp, Homo sapiens
tcggatgtccttccagaatcttctggcgaagatctgttttcaccaccatttttccgtgcggctcggcggagtacatggcccc

SEQ ID NO: 205418 - DNA, 90 bp, Homo sapiens
ctccaagagcactagtgtctagaaggcactaagggaaatggcaactgctgacaggaagtttggcatccacctcccccagcctcctgagtg

SEQ ID NO: 205419 - DNA, 50 bp, Homo sapiens
agccttcccagtagctggaactacagcgagacggtcatctgttccagccg

SEQ ID NO: 205420 - DNA, 75 bp, Homo sapiens
gggccgcgggacccgccagagcgcaggcggagtgggctggcgcacgtgggggatatgagactttctactcggaat

SEQ ID NO: 205421 - DNA, 50 bp, Homo sapiens
atgtatcaaaacccactttgaagaagatgggtgtgaacctgacacgcagc

SEQ ID NO: 205422 - DNA, 96 bp, Homo sapiens
cttgcggagcactttgggtttcatttgtaaaggagccggagccccaggttgatgctatgaaactgggagtaaaggaaatgaagaaggcatacaagc

SEQ ID NO: 205423 - DNA, 91 bp, Homo sapiens
gcccggagcaagcggagctcccccaagagccggaaagaacaccttccaccatgaccacctcagcaagttcccacttaaataaaggcatcaa

SEQ ID NO: 205424 - DNA, 100 bp, Homo sapiens
ctgcttcctctgctcgcggttagcccgtcagtccctgctctgtgcgcgcctccatctgggccatggatgggttcatatttggtgcttagacaaattcaaa

SEQ ID NO: 205425 - DNA, 74 bp, Homo sapiens
ctgccggctgctccgcaccccggggtcccaggaagggcggcccaggtgttaacggagcctgtgtccaagtggag

SEQ ID NO: 205426 - DNA, 82 bp, Homo sapiens
atgatcatgttgttgccgtgtgtgctggaaacaaaatattcatgctggatattgagctccataatgggagaagtaaagaaca

SEQ ID NO: 205427 - DNA, 92 bp, Homo sapiens
cagagcgtcggggaggcaagatgatccaccagcggttccatcctacacttgggaactgtggctgcaccatctgtcttcatcttcccgccatc

SEQ ID NO: 205428 - DNA, 147 bp, Homo sapiens
gccgaggggaggcggaaatagccgaaaggagctgagcaggagcgaggaggcgacgggggagagccagaaagagctgaagttctccgcgcgcaggtgctagcgtccgaggcggcgggcccggcatggcagcggctggccgtgcgcgtg

SEQ ID NO: 205429 - DNA, 100 bp, Homo sapiens
ctcaatatctgtcttcggtggactccttcggcagtccacccaccgccgccgcctcccaggatgcagcaccgaggcttcctcctcctcaccctcctcgccc

SEQ ID NO: 205430 - DNA, 100 bp, Homo sapiens
gggggtcatcacagagaaggagacccaggtggactcaggtacttctgccctccctttggtctccctgttcttctatgtggtgacagatggcaaggaagtc

SEQ ID NO: 205431 - DNA, 82 bp, Homo sapiens
ctgcttccctgggctgggcgtcagccgccaccggcagcagcagcaccaccggacggattccccagctttccgttgcacaaac

SEQ ID NO: 205432 - DNA, 75 bp, Homo sapiens
tggcatctattttgaagttgtcaatcaggttccagcaacagatagaaatgctttaagttcactctggggaaagct

SEQ ID NO: 205433 - DNA, 100 bp, Homo sapiens
gccggagccagggacagccgcctcaggtcctggtgaagagcaagttatctaataactgaagaggactctgccctttggcctgttcctgactttctaactc

SEQ ID NO: 205434 - DNA, 82 bp, Homo sapiens
cgaccttctcggcctgcagtggcgcgactgtgtacgccgccagctggacaatgcagatcttcgtgaagactctgactggtaa

SEQ ID NO: 205435 - DNA, 78 bp, Homo sapiens
ttaacatgatgagtacctctccactcgactccatccatacaatcacaggatgctgatcctcccgctggcttccagaca

SEQ ID NO: 205436 - DNA, 60 bp, Homo sapiens
caaaacttaactcctggatacaggcatgttggtgtttgcagtcacatggaatacccctgc

SEQ ID NO: 205437 - DNA, 90 bp, Homo sapiens
gggcagccggcgggaggaacgctcactgtcagcgcctggaaacttgctcacctgccaatttgtggtgtctgaagaccaagactacacagc

SEQ ID NO: 205438 - DNA, 90 bp, Homo sapiens
cctcaagcccagtcgggactcgagcctagggaggcgaggttcccgcaccggatagtgactgagatgctggtaaatgtcctcaacatctgc

SEQ ID NO: 205439 - DNA, 75 bp, Homo sapiens
ccaggccaacaggcatttttaaacaaggtacatggtaggatcaacttcctgaccttgtgacagatcctgccagta

SEQ ID NO: 205440 - DNA, 101 bp, Homo sapiens
aaatcatcgcctttctggtgggaggcttgattggtctggagcccccaactcccttgacagtgtacgctggagcaggttccagggtggggctgccctgccgc

SEQ ID NO: 205441 - DNA, 100 bp, Homo sapiens
tgtcagcgcggccgtcggagacatgggagacccggggtcggaggaaaattctcagtctcccttgaagaagtgaagcctccttctttatgcactggccact

SEQ ID NO: 205442 - DNA, 80 bp, Homo sapiens
tatctgtcttcggtggactccttcggcagtccacccaccgccgccgcctcccaggtgaggaagaggatggagatgaagat

SEQ ID NO: 205443 - DNA, 83 bp, Homo sapiens
caacgacaaatccctggcccgggtgacccacgcggaggccgtcaaggtcatgatgatgggcagcgcccgagtggcggagctgc

SEQ ID NO: 205444 - DNA, 83 bp, Homo sapiens
tcttctgcggctctcggtgccctctccttttcgtttccggaaacatgttccagggtctccctccactgctgtagtaacccggg

SEQ ID NO: 205445 - DNA, 75 bp, Homo sapiens
cagcaaatccaacattggcttttggtcagggtcttgctactggcatgccagtgccgcagaatggaattcggcatt

SEQ ID NO: 205446 - DNA, 100 bp, Homo sapiens
atcagcaatgctgtgagagagatggcctggggggtggagcaaggcctgttggatcccaggccattctcaagcacaacctgggtgaggctctgtcattgct

SEQ ID NO: 205447 - DNA, 112 bp, Homo sapiens
aagctgtttccatatgacccttatgaacgagctcgccaaaagatgttattggagctattttgtaaggctaatacactgcgagagttggtagaacctctccatgccaaatcgg

SEQ ID NO: 205448 - DNA, 51 bp, Homo sapiens
caaaaaggtgcatataccactggacttggatgttgtgggtgatggtatgca

SEQ ID NO: 205449 - DNA, 131 bp, Homo sapiens
atcattttcacctcgcgtcgcgcccgggaggaaggaacgaggcaaggagctaaagcagcgtgcgttcagccctgggcccgcggcgccatggctcacgtcggctcccgcaagcgctcgaggagtcgcagccg

SEQ ID NO: 205450 - DNA, 101 bp, Homo sapiens
atgtctgctcccgtgatctttgatagatccagggaagaggtaatactgcattgcatgattgtgcagaatctggaagtttggacatcatgaagatgcttctt

SEQ ID NO: 205451 - DNA, 97 bp, Homo sapiens
ctgctgaccttctggagttattggctagtaagaaaggcattgaacctggccacatcccaggtaccgtgaacatccccttcacagacttcctgagcca

SEQ ID NO: 205452 - DNA, 104 bp, Homo sapiens
gtgcgggtccccgccccaccggcccccggcgccgtccagcccggagggacctggcccacccttcctccattctgagcacataaaaaccccacactcagccagac

SEQ ID NO: 205453 - DNA, 98 bp, Homo sapiens
gaaggccctggacacagcaatatctctgggctttcacagctgatgagtaaagaatctcctgtctctgctggaaatgatgcctatgttgaccttgatcg

SEQ ID NO: 205454 - DNA, 74 bp, Homo sapiens
ccaagattaaaggagtcatacctgatcacactgggcatccaggagaagtacctggcaccctcgaaccagtcagt

SEQ ID NO: 205455 - DNA, 100 bp, Homo sapiens
cgggcagcccgcgcgactttcgattccctgtctcctctggaagaaaagcaggggctctcccctcacggaaatgtggcattcagcaaagctggtcggagcc

SEQ ID NO: 205456 - DNA, 51 bp, Homo sapiens
actgtgtgtgctgcacagaggatgaggaggcctaccagaaactggccagcg

SEQ ID NO: 205457 - DNA, 88 bp, Homo sapiens
ataatcatagcagcacttttcacagcatcagcagtcatctcactagttatgttcaaaaaaatcaagaagttggtatatgtttacctgg

SEQ ID NO: 205458 - DNA, 122 bp, Homo sapiens
aaacacagaaatagtccagaatgtcacaggtccagggcagaggaccaacatgggcattttgtttatgagcaaggtgggctgtgatcggctgctgagtgaggcccagaggatcacggggctgc

SEQ ID NO: 205459 - DNA, 100 bp, Homo sapiens
gatgagtggctttatctatcagctctctctccagatcggattcaaccgcacatcatgacagatgttccggctacatttacccaggctgagtgtaatgggg

SEQ ID NO: 205460 - DNA, 100 bp, Homo sapiens
gatttgttaaggattccaagtaactcttatttgatggcggcagctatgccatccacgactcccaggcccccagtctcagctctgggggtgagagttcccc

SEQ ID NO: 205461 - DNA, 75 bp, Homo sapiens
caacctgacaattctgtcgtgtcccggtggattgtctcattgttagtgctgaatcttcttgcctacttgtatctg

SEQ ID NO: 205462 - DNA, 74 bp, Homo sapiens
tacgccgaggaggttgggatcttcttcactgcctctggcatggatgagctctggaggctgccatcgagaacctc

SEQ ID NO: 205463 - DNA, 100 bp, Homo sapiens
gttggcatcgaattcgcactgatgaaaatgggctttgtcctgcatgtagaaaggtggaaagttaccgaggctggacagtgtagtgagactgcagtttaaa

SEQ ID NO: 205464 - DNA, 75 bp, Homo sapiens
acgccctcacgcccggcgagcccgcgaggtggtctttgggaagaagcttcctgcctttgccaccatccccatcca

SEQ ID NO: 205465 - DNA, 82 bp, Homo sapiens
catcgctcttcggcaacccgaagccacaggatggaggagggggatcccagcaaaggctgctgatactttggctgtgaggcaa

SEQ ID NO: 205466 - DNA, 130 bp, Homo sapiens
gagacccagctgagcagaaccaaaacggaattgagccagctgcggcggagccgtgatgatgttgaaccatgattccggtgacagagctccgctactttgcggacacgcagccagcataccggatcctgaa

SEQ ID NO: 205467 - DNA, 82 bp, Homo sapiens
ctttggaaacgacgtcatgtgttaggatgaggatgggacagaagaggataacagtcgtgttgaacctgttggacatgctgac

SEQ ID NO: 205468 - DNA, 75 bp, Homo sapiens
ctgactatggccttgaacacttgaagaaacattcatggtgtctcaagagaaaaaatccaccgaatgaaagaacgg

SEQ ID NO: 205469 - DNA, 52 bp, Homo sapiens
gacagcggcgagcagaactacggcgagcgggccgctgtgctcgctgtggaga

SEQ ID NO: 205470 - DNA, 96 bp, Homo sapiens
gataactggagacacaaaaccaactgctggacaagctgttgaagctcaaatccgaagttttggacagactccttctcaactactcatagagcccca

SEQ ID NO: 205471 - DNA, 100 bp, Homo sapiens
tgggccggggcctcttgacccggaggccaggcacgcgcagaggaggcttttctctgggtgattgtcgggatgatcatgtcttttccctctacttcatgat

SEQ ID NO: 205472 - DNA, 100 bp, Homo sapiens
attgactgctgctggggctgggctcgccagtcttggggacagtgtcagcgcagtggagctactgctgtggttcaggcagccctatgcaaacccaggcaag

SEQ ID NO: 205473 - DNA, 123 bp, Homo sapiens
gcgcctcgctgcctggaccgggtctgagcgcggctgcccaggttgacctttctgcgggagtctatccagaagttaaaggagagattgctcgtaaagatgaaaagctgctgtcgtttctaaaag

SEQ ID NO: 205474 - DNA, 100 bp, Homo sapiens
ggcggccgggggctcagagatccaagtgcgcgccctggcgggtccggaccaaggccccgccagcaggcgaagcagggagatgtcagactgctacacggag

SEQ ID NO: 205475 - DNA, 82 bp, Homo sapiens
ctacaaacgcttctccctgttgaaaaggctttagaaaagaactcaggaatttggaagcaggctataaatctcatgaattcca

SEQ ID NO: 205476 - DNA, 80 bp, Homo sapiens
atttcaacttcacctcggcaacaattacttacctggcccaggaggatgggcccgttgtgacggagtctcactctgtcacc

SEQ ID NO: 205477 - DNA, 89 bp, Homo sapiens
ccactcatttaactgcacgccaatagaaggtgaagagaaacggattcgggaattctaccagtcccgaggtttggaccgggtcacccagc

SEQ ID NO: 205478 - DNA, 83 bp, Homo sapiens
ccgaggccaagatggcggtgctgtcagacaatgcagatcttcgtgaagactctgactggtaagaccatcaccctcgaggttga

SEQ ID NO: 205479 - DNA, 75 bp, Homo sapiens
ggttctttccctttaagatatgtgcaggatcaagttgcggcaccttttcagcgatttctctctgatcaaacggac

SEQ ID NO: 205480 - DNA, 100 bp, Homo sapiens
gcctccggagggctgcggggcgcagaggtgtctcccagtctgctaaagccctaaggccatcaccatggacttccagcatcgccccgggggcaagaccggg

SEQ ID NO: 205481 - DNA, 74 bp, Homo sapiens
caggtgctggcgccgctgcccctccacggaggaaatccccttacccaggatatattgaacctttatcaggaacc

SEQ ID NO: 205482 - DNA, 100 bp, Homo sapiens
aataaagtttctgagcatccctgcaatgaagagaacccagggaagttcctttttgaagtagttccagatcacccttgaaggcagacattgtcctctcaag

SEQ ID NO: 205483 - DNA, 75 bp, Homo sapiens
cccggtgctgagctgtctggctgtgctgggaatacaggagtttccagaaaatataaaaaattgtaaagttttgac

SEQ ID NO: 205484 - DNA, 100 bp, Homo sapiens
gaggccgtccagcagatggcggatgccctgcagtacctgcagaaggtctctggagacatcttcagcaggaacaagctgaaagctggatacctaatgtcag

SEQ ID NO: 205485 - DNA, 74 bp, Homo sapiens
ttttcacatgtcaaccggatttgtggaccagtaaagttctcccacaagtgctggacccaaaggagacaacattt

SEQ ID NO: 205486 - DNA, 96 bp, Homo sapiens
gagcacagtccgccgagcacaagctccagcatcccgtcaggggttgcaggtgtgtgggagggtgataaaagaaaatgtggctgaagttacccgaag

SEQ ID NO: 205487 - DNA, 100 bp, Homo sapiens
gtcttggcagatgttgttgaagataaagacaaggttggtcaaagaaaaagtgatgtatgaaaaagaggcaaaacaacaagaagaaaagattgaaaaaatg

SEQ ID NO: 205488 - DNA, 75 bp, Homo sapiens
agagcttctcctcatcaactggggatgattacagttcttcctaaaaaaggaggtagatgacttctttgagcaaga

SEQ ID NO: 205489 - DNA, 98 bp, Homo sapiens
cgcagcccgggcccaggccccggcagcgcctgggacaagcctgtgacattctggccattgataagtccctgacaccagtcaccctggtcctggcagag

SEQ ID NO: 205490 - DNA, 77 bp, Homo sapiens
ccccagcagcccccgaaggccctatcaggacatggagtatgaaagacgtgatgcagccaacacgaacggttgtcatg

SEQ ID NO: 205491 - DNA, 100 bp, Homo sapiens
aggggtgtcgtcatgctcaacagagtgatggagaaaggttcgaaaaagcttgtggtgaaggggggcaaaaaaaagaagcaagttctgaagttcactcttg

SEQ ID NO: 205492 - DNA, 50 bp, Homo sapiens
tgccagggagccaagcgtcctgcccggccaattcaattcgtcataatctg

SEQ ID NO: 205493 - DNA, 75 bp, Homo sapiens
ccgccaaccccttcgagcaagacgtggatcccaccaaatattttggttgtgagctgggagcacagacccagtttg

SEQ ID NO: 205494 - DNA, 60 bp, Homo sapiens
gccgatactgagcttcttcctatttgccatggaccagaacttctgactcacagtaccact

SEQ ID NO: 205495 - DNA, 90 bp, Homo sapiens
atttaaacaagagatttccacagaagagtcacctctactttcctgctaccgctgcctgtgagctgaaggggctgaaccatacactccttt

SEQ ID NO: 205496 - DNA, 106 bp, Homo sapiens
ctactcggataccttagagagcacgcccatgctggagaaggagaagtttccgcaggactacttccccgagcgccatcatgaccgggtcctataacaacttcttcag

SEQ ID NO: 205497 - DNA, 100 bp, Homo sapiens
agactccagtttagaccacagacataaacagaaagtcttacatgacacaatggatctgaatcatctcttgaaagagatgtggtcttgctatgttgcccaa

SEQ ID NO: 205498 - DNA, 100 bp, Homo sapiens
cggttcgcgtctctctgctgcggcgcggggaccgctgtgctctcgttaaacaggtgttcaaggagctggagtttctgggttggtataccacaggggggcc

SEQ ID NO: 205499 - DNA, 74 bp, Homo sapiens
cgtgtcctcggtgagcaggcccgaagcaggcacgacctttgaaatggtggagtcaatgaagaaagtagcaggga

SEQ ID NO: 205500 - DNA, 87 bp, Homo sapiens
gcggagaagatgctggaaacaatgttgccatcccccctgggggtcctgagtgggacctcacggcctcccacgccaaccttgtcccta

SEQ ID NO: 205501 - DNA, 74 bp, Homo sapiens
gcgggagttcgaagagttggatactcagcgtcgctggcagccgctgtacttggatcccatgacagattctgttg

SEQ ID NO: 205502 - DNA, 98 bp, Homo sapiens
agaaattacagtgcctacttggaaagaagaagagatagcgacttgccccagtccaaccccagagcggatgagctcacagtgcctgcactttaccccag

SEQ ID NO: 205503 - DNA, 98 bp, Homo sapiens
aaaataatccagagatttccacagaaggactgggatgatacaccttttccacagggaattgagttggtaagaatgattgatgttggctgatattggag

SEQ ID NO: 205504 - DNA, 132 bp, Homo sapiens
gtaacttttgcagacagtcactcggctctcagtgtcctggacgtggacggtatgaagccacatgaaatgaagatcacctctgcctatctacaggacattgagaatgcctataagaaaacctttctccctgag

SEQ ID NO: 205505 - DNA, 100 bp, Homo sapiens
tgaagctaaaactctacgcgctatataagcaggcatctccttggaaacaatgccatctttgaatgtgagagataaacctagtttcagcatgtctgcagca

SEQ ID NO: 205506 - DNA, 73 bp, Homo sapiens
atgctggccaggctgtcacaattgttgcacaatatcgacctgaaggtgaaattcgatgctactgtgatgctgc

SEQ ID NO: 205507 - DNA, 101 bp, Homo sapiens
gtcgcagcgagctggagccgccggaggatgttgccttatggctgtttagcaacaggagatcgctctggcctcattgaagttgtgagcacctctgaaacaat

SEQ ID NO: 205508 - DNA, 115 bp, Homo sapiens
cttattgtatctggggcagatgatcgtcaagtgaagatctggcgcatgaatgttgaagactgggatagtttccaagctattttggatcatacctacaaaatgcatgtcaaatcag

SEQ ID NO: 205509 - DNA, 83 bp, Homo sapiens
ctttccaaaaggtcaaggttcacaagcagaaagatgaaggtcttagaatcattgattggaatgatccagaaattcccttatga

SEQ ID NO: 205510 - DNA, 101 bp, Homo sapiens
gcagagcgccaggcattagcgcagctcgagaaggccaagttctctgtggacattgactcggagctggtggaggagctgccggccgaaatcgagctgtggct

SEQ ID NO: 205511 - DNA, 75 bp, Homo sapiens
cccaatgttccgaggctatgcccagcagacacctagctcccctgtttgacaaccctaagttggataaggagctgc

SEQ ID NO: 205512 - DNA, 51 bp, Homo sapiens
atctcaccaattttaaatcgggtgtagacggggcactgccttcagagcagg

SEQ ID NO: 205513 - DNA, 98 bp, Homo sapiens
tgcagggaagtggagtatttgctgggccgggtaccatggacgtgggcgaacttctgagctaccaggtgtgatcccctgggcccgtttgttgtcggggg

SEQ ID NO: 205514 - DNA, 75 bp, Homo sapiens
ttctattatatcgatccacccaaaaattcagctgagatctgtatctgtggacctgaatgttgatccctcgcttca

SEQ ID NO: 205515 - DNA, 50 bp, Homo sapiens
tggagggcatcttcaaccacaaagtttattgagagaacattcaattgatg

SEQ ID NO: 205516 - DNA, 100 bp, Homo sapiens
caggggccaattaagccttaccagcaggggcgacaacagcatcaggtcatcatcaagaatatgggctggaatctcgttggtcctgttgttcgatgccttt

SEQ ID NO: 205517 - DNA, 100 bp, Homo sapiens
ccctggcaaatccccttcccgggagcaagtgccttcagctgggagtgtctggagccctggccaccagcgggtgaaaaattagacgatttcaagaattgga

SEQ ID NO: 205518 - DNA, 74 bp, Homo sapiens
gtgaagatggatcgagacatgaccaagtgagttattctccccacctcagaagtaccagcttttggtgtatcatg

SEQ ID NO: 205519 - DNA, 97 bp, Homo sapiens
taacagttgcatttgaaaacaagtattctctactgccgctgatggtcaaacgcaagtggaaattaaagtgtgtcagggtgaaagagagatggctgga

SEQ ID NO: 205520 - DNA, 100 bp, Homo sapiens
gtttgtacacatggtccgacagcaagctaccaagagcaaaggtcccatgatcattcactgcaggtcacaatcattggttacaccctggggattcctgacg

SEQ ID NO: 205521 - DNA, 100 bp, Homo sapiens
ccacaagttctccagtgccattggcctggtgctgctgatggaggcggtggccgtgctcgtcgggcccccttcgggagaccgttggtcccaggaagacatg

SEQ ID NO: 205522 - DNA, 96 bp, Homo sapiens
gtcggactggtctgtctgagggagatggtgacaagctcaaggcctgcgaggctgtcatcaaccggccattcaatgacacctcaaagtgatttggac

SEQ ID NO: 205523 - DNA, 50 bp, Homo sapiens
ctgctcactggtctctttgccgtctcccgtgtggtccccggaccagcagc

SEQ ID NO: 205524 - DNA, 74 bp, Homo sapiens
ccatgtacaagaggaagtactcagccgctaaatccaaggtgtcctgggaagaggtgaagaatgagatggtggga

SEQ ID NO: 205525 - DNA, 51 bp, Homo sapiens
caaaggagtcagggatggctcttcctcagctgccactgcagagccccgcca

SEQ ID NO: 205526 - DNA, 100 bp, Homo sapiens
agccatctgggctcattcagcaggaaataatggaaaaagctgcaatatccaggtaaaaatgcatttgcaaagggagaaaatgaaggccaaacagaagcag

SEQ ID NO: 205527 - DNA, 96 bp, Homo sapiens
ggttgaagcagaagaataaggagaaggataagtcgaaggggaaggcgcctgaagaggacgaaggccctcgggaccaaggatcacgtcatgactccg

SEQ ID NO: 205528 - DNA, 74 bp, Homo sapiens
tcctccttgaagtatttggctgaggagttttcaatcccacagaattacctgattctaggacaaaggaaattgaa

SEQ ID NO: 205529 - DNA, 83 bp, Homo sapiens
ctgcaggacttggtccgcggcatccgtaaccacaaggaggacgaggatggctgcagctcctccaagttactgttttgttgcct

SEQ ID NO: 205530 - DNA, 96 bp, Homo sapiens
ccaattcatggacacaggataatggctgcactctttgtgaattcgatacagtcgacttgtctgcagtagatgatgaggagaacaatccccttgaga

SEQ ID NO: 205531 - DNA, 50 bp, Homo sapiens
gggaactcaaacagcagatgcagatttaaggaccatagtacagctatgga

SEQ ID NO: 205532 - DNA, 75 bp, Homo sapiens
agtataacaatcagtgccgagcaattgtgatgagatattctgctgagtggaaggagtctcaggagcaggggctgc

SEQ ID NO: 205533 - DNA, 87 bp, Homo sapiens
ctcaacaccagcaccgcagatgttgtcaaggtggcctaccaggaggccaggggtgtcgccatgacatggagcccaaacctgcaacca

SEQ ID NO: 205534 - DNA, 97 bp, Homo sapiens
gctgcgtgcggtccagcggaaggcccgctttgccaagctcaaggctcttgtcaggatggtgaagctgttcatcggaaacctgccccgggaggctaca

SEQ ID NO: 205535 - DNA, 110 bp, Homo sapiens
cccgcatcctgtttttcctgagcaaccagagaaaccacttgaccttgcacatatagtgtggtttgttctggatgcagaaaccagagatctagtttctatccacacagacg

SEQ ID NO: 205536 - DNA, 98 bp, Homo sapiens
aaaggaagaaaagcctcccacaaaagagatgagacaagaggaatggttacacagtctgaaccggacggcttttctcatttccacttgtacgtgtgcgc

SEQ ID NO: 205537 - DNA, 87 bp, Homo sapiens
cgccgctgccctccggctccgcgggcggcccacggcgaggaactctaatgaatcattgattgaccagcactattttaccagttggaa

SEQ ID NO: 205538 - DNA, 100 bp, Homo sapiens
ggccaccccagagtcagaagccgctatgcttcctggacagcttgcagaaccgtcaaaatgcagatcttcgtgaaaacccttaccggcaagaccatcaccc

SEQ ID NO: 205539 - DNA, 100 bp, Homo sapiens
gaccccctgaaagcctagacatgatcagtaacttgattgcttcagaaatcatccgcaatgaggacatcaacgccagggtgagcgccatcgagaagtgggt

SEQ ID NO: 205540 - DNA, 80 bp, Homo sapiens
aactcagaggacgaggcctccttcaagtccgaggtgtggacactgccagcggctgcagccgacttggaatgacctgggag

SEQ ID NO: 205541 - DNA, 76 bp, Homo sapiens
ccatgatagaaaaacttctttcacatggtacaaatattgaagaatgcagcaagcaacacggagtacacctgtttcc

SEQ ID NO: 205542 - DNA, 100 bp, Homo sapiens
cccacactggcggccacggagcagagtccctcacccccaccagctgtagctgaacgtctggatggtggagaagagcaggagcttcctcagtcccccagga

SEQ ID NO: 205543 - DNA, 100 bp, Homo sapiens
tccatgattgttatgttcactgctcttcagcctcagcggcagtgttctgtgtgcaggcaagctctttttggagaccatgttaagaaaccccagagcctgg

SEQ ID NO: 205544 - DNA, 90 bp, Homo sapiens
cacgcccgcgccgacgcggccccgcaagccagacctgcaggtgtacctgccgcgacaccgaggaacaccagcctcgctccggcctcttgc

SEQ ID NO: 205545 - DNA, 82 bp, Homo sapiens
tgattaggccacaatcttcaatgagtaaacatattcctgcactgccgccctgcactgtagcagatgcctaaataaagtgtgg

SEQ ID NO: 205546 - DNA, 98 bp, Homo sapiens
gaagagttgtcccagctcggcccgcgggggagccccgggagccgcacggtctgaaggggcgtctcgattacctgagctctctgaaggtgaagggcctt

SEQ ID NO: 205547 - DNA, 100 bp, Homo sapiens
ccccttcgtccgtcccccgcggccggcagctcccggggcgtctggggatcgactacaagaccaccaccatcctgctggacggccggcgcgtgaagctgga

SEQ ID NO: 205548 - DNA, 83 bp, Homo sapiens
aaattggaactttgtagaagaactgctgaaaaagtccatcagtgttcagggaaaagagtgcaaattcggaaagcacctcaagc

SEQ ID NO: 205549 - DNA, 98 bp, Homo sapiens
taggctgagatatagtgactgtaagctgtgatctcagtatacaaagtctgcgggccaggcatcgacatccgcaacgactatcagcagctgaagcgcct

SEQ ID NO: 205550 - DNA, 51 bp, Homo sapiens
ttccacctcctgacacaacaccactcaccttgttagatgacttggataaag

SEQ ID NO: 205551 - DNA, 100 bp, Homo sapiens
gcagcgccagcggccgagcgggcggcttcctggcctgggcgctccggtggcggcggaggtcatcatcagatttgaaatatttaaagtggatacaaaacta

SEQ ID NO: 205552 - DNA, 82 bp, Homo sapiens
tcaacgtgagacgcaccgcccggactcaccatggagttagaagccgctcttcacagagatgacgtggagtttatcagtgacc

SEQ ID NO: 205553 - DNA, 80 bp, Homo sapiens
ctatgagcctcaggagctgaagccctttgtgactgcaatctcgaggtgaaaggtgtagcagtcactcggcctacacccac

SEQ ID NO: 205554 - DNA, 82 bp, Homo sapiens
gatcgcctaacttctactgacgaagcttggaagttgcagaaggttcacgcctacatcatcagctccctcaagaaagagatgc

SEQ ID NO: 205555 - DNA, 83 bp, Homo sapiens
agaagctggcatctgtgtccaacctggtcactgtgtttgagaatagcagcaaaatgatgcttcaacacccaggccaggtctct

SEQ ID NO: 205556 - DNA, 100 bp, Homo sapiens
cacagatgtatctgagggcacagatggtgaactgtcacccctacaactcagcttgcaaccagccctggccaccagtttccccacactgagctgaatatcg

SEQ ID NO: 205557 - DNA, 100 bp, Homo sapiens
gggttatttccgagctgaaaaagacccaccttctatggcatgtaccagtgggaaagcagtgccactctccgcttcacagatgccccctgccaagatgtca

SEQ ID NO: 205558 - DNA, 74 bp, Homo sapiens
cggatctggtaacatggcaaaagattattaaaggtggaagaaggtccatatctttttctgtgggtgcttcaagt

SEQ ID NO: 205559 - DNA, 100 bp, Homo sapiens
gaggcaatggtgttggtgacgacctgtactcctatggctttgatggacttcacctttggtcagagagctgcttttgcacattttcctgaactctatgatt

SEQ ID NO: 205560 - DNA, 100 bp, Homo sapiens
ccttgcttctttggagaatgatatcaaaccacgcggggtgtcctgtcctcgccatgaggccgcagcaggcgccggtgtccggaaaggtgttcattcagcg

SEQ ID NO: 205561 - DNA, 101 bp, Homo sapiens
ctttttaaatttatgaactcgaaatgaagcggaaagcagatatgcgcgtcagcatactttggcgggttatggaaacaaaggacatgctttacatcgtcact

SEQ ID NO: 205562 - DNA, 87 bp, Homo sapiens
ctccaatgggatccaacctacgtgaagagagacaagagagacacctccaacttcgacaaagagttcaccagacagcctgtggaactg

SEQ ID NO: 205563 - DNA, 90 bp, Homo sapiens
catctatcagcaggctccgggctgaagattgcttctcttctctcctccaagttcctgagactggcccagacgctgcggcactatggctac

SEQ ID NO: 205564 - DNA, 50 bp, Homo sapiens
gagagcgtggagcgggctgggccaggtcgccactgggacactgtgaacca

SEQ ID NO: 205565 - DNA, 104 bp, Homo sapiens
gtggaatctgttcttcttttgcatcctacgtaaccagaccaagctgtggggctggatctccagaactgttctctggaggaccctggtccaaactttcatcaggc

SEQ ID NO: 205566 - DNA, 82 bp, Homo sapiens
ttgtcacgtcacagattgacgcacagcggaggcctgcacagaggtgaaatgacaatggatgctctgttggctcgattgaaac

SEQ ID NO: 205567 - DNA, 98 bp, Homo sapiens
aagacatggcaacaggaaagtctaagggatatggctttgtctcctttttcaacaaatggtctcttcaagaaaatgaggaggaggagattgggaaccta

SEQ ID NO: 205568 - DNA, 124 bp, Homo sapiens
gcccgacctgctgaatttcaagaaaggctggctgactaagcagtatgaggacggccagatacattccaccgttgatctgggggaaaagtggacacatccagacagccttgtatgggaagatggg

SEQ ID NO: 205569 - DNA, 97 bp, Homo sapiens
cctactccaccatcatcaacaaagaaaacattgagagccatgctggtatatactccttgccacagtttagcggaaagaatcaaacttcagagacttc

SEQ ID NO: 205570 - DNA, 78 bp, Homo sapiens
aagtttgtgccccatagctgcacagaatcgagagctccagatcatgagaaagctagatcactgtaacatagtccgatt

SEQ ID NO: 205571 - DNA, 75 bp, Homo sapiens
ctgacttcaagaatgaagccacggacccttgcggacactcatgaggaccatgatacttccactgagaatacagac

SEQ ID NO: 205572 - DNA, 75 bp, Homo sapiens
gtaccctccaggtgtgaagagttgcaggtcctccgaggagccgggagctgcaagatcaacctctccacttctcct

SEQ ID NO: 205573 - DNA, 100 bp, Homo sapiens
atttaattccttttcgaccttcaatccagttccaaggactccacggggtttctactttccaggtccactggtgtttggtgtacccatgtgactaatttgt

SEQ ID NO: 205574 - DNA, 82 bp, Homo sapiens
cggggctgacatcagcggctctttgtatgatgacggtttccaggcctgaggtgcccgccctggccccaggagaatgaaccag

SEQ ID NO: 205575 - DNA, 48 bp, Homo sapiens
gatgaaacttcgagctcctctggttcaaaccttgtactactcagctga

SEQ ID NO: 205576 - DNA, 74 bp, Homo sapiens
ttccctctcccaacatggcggcctcaggaagcagacagtatgagcatgaccagtggagaaggtactagtcaacc

SEQ ID NO: 205577 - DNA, 50 bp, Homo sapiens
gggcgcgggcggcggcgccggcaggaaggcacacattctggcagttccgc

SEQ ID NO: 205578 - DNA, 100 bp, Homo sapiens
aaggaggactcttctaggagacgagagagcgaacgccagggaccctgtgcaggcctgctcctccgtttgcaagaggcttcgtgacggagttatcagagac

SEQ ID NO: 205579 - DNA, 74 bp, Homo sapiens
gagatcaaccctctgctgttcagctacgtggaggagctggtggagattcgcgagacacagcaggtccccacaga

SEQ ID NO: 205580 - DNA, 75 bp, Homo sapiens
agacaaaagaaacgggccccgactgtggccataaaatgcagtaaaaacaaatccagttcccaagaagctgtacaa

SEQ ID NO: 205581 - DNA, 100 bp, Homo sapiens
cgtgctgttgcaactcgaggggatctccctaggtcctggggcctctctcaagaatcaaaacgcagctgcaagctcagacagtggccgcagtggccgtggg

SEQ ID NO: 205582 - DNA, 82 bp, Homo sapiens
cccttttcagggcccccaaactgtcacagaaagagctgttaacacttcctagataacggaaacctctgtagaggagcaggat

SEQ ID NO: 205583 - DNA, 97 bp, Homo sapiens
tgttgacgttgcagacttggctagtgcaagccttgtttattttcctcaccactgaatctacaggttgtccttctattcaggccactcttcgttttcc

SEQ ID NO: 205584 - DNA, 90 bp, Homo sapiens
ggaggagtactttgtggcccccccaggacttggtggggaaacttaaagatgcttcgaaaagcctggaaagagcaactcagttgtaacttg

SEQ ID NO: 205585 - DNA, 82 bp, Homo sapiens
atacccgcaacagccccttcgtcccaaaataccctctaccatctgctttggtcagggtgccgctcgaggatttaaaagcaac

SEQ ID NO: 205586 - DNA, 97 bp, Homo sapiens
tgcgaccttaatgggaggccccgggaggccgaggttcggagatggagcagaaggaagggaagctctctgaggatgggaccaccgtctccccagctgc

SEQ ID NO: 205587 - DNA, 82 bp, Homo sapiens
gctgcggcgagcggagcttcgcggggatcctgctggactgcacgaaaaactgtgagccgtgagctttgaggcggtgggatgt

SEQ ID NO: 205588 - DNA, 100 bp, Homo sapiens
ccgcgccctggcggctctagggaccccccccgcgcctgcacttagccccgcgcccgaggccactcttcacctccaccatgagcctggacatccagagcct

SEQ ID NO: 205589 - DNA, 74 bp, Homo sapiens
agaaatcgagaatccatttctctgctcatgcgcttggttcctaggagaatgttaacagtccagacctttttcac

SEQ ID NO: 205590 - DNA, 100 bp, Homo sapiens
aagcagaaaattacctaaatgcactctttcgaaagaaaggctccagcaaaccttcaccaatttacatcagttcctattcctcaccagcaagagaacaaaa

SEQ ID NO: 205591 - DNA, 100 bp, Homo sapiens
gcggaggcttgttcgacccaacagcatcgttcctctttccaagaagagtctctggtaagaagagtgaaagcaaagaagccaagaagtctgaagaaccaag

SEQ ID NO: 205592 - DNA, 90 bp, Homo sapiens
agatgatcttcaggggaacaggagcattgatatacgtcattgacgcacagatgaagtctggcaaactgatgacctaatagagagaatcca

SEQ ID NO: 205593 - DNA, 82 bp, Homo sapiens
ggagactgaaccatctccacatctagttgccccaggaaaactacagactgtggctgaaaaggaagtgaaaggggccgtgtac

SEQ ID NO: 205594 - DNA, 100 bp, Homo sapiens
ggccaactccaatgggcctttccagcccgtggtccttctccatattcgaggtgaccattgtgaggtagatattttgttctaattttccagatgaggaagc

SEQ ID NO: 205595 - DNA, 76 bp, Homo sapiens
cagagctagttcctctccagctcagccgcgtaggacacaatgtttgcacgaggactgaagaggaaatgtgttggcc

SEQ ID NO: 205596 - DNA, 75 bp, Homo sapiens
aaccaggaatgtttcctcctactcctctttcacctgccaggttcaaggcctgctttcttccccgggcgatgtgca

SEQ ID NO: 205597 - DNA, 82 bp, Homo sapiens
cagttggaagcagccgatccagcctgcggagcctgtggggcaggagcctgtgtgaaatgcagcaaaggggtgtttggggctg

SEQ ID NO: 205598 - DNA, 100 bp, Homo sapiens
gtgaaggagcacgtgggcacggaccaattcgggaacaaatactactacatcccgcagtacaagaactggagaggaacatccaatacttgggcaacccttt

SEQ ID NO: 205599 - DNA, 74 bp, Homo sapiens
aggaaaacaagtgtctgcttatgtcgattctactctgctactcaagtagtggtcactatgattctgtgtactca

SEQ ID NO: 205600 - DNA, 100 bp, Homo sapiens
cagagatagagcgtttggaagatctggatacctgtatgaaaaacacaccttgactttagtcagatacatcactgtctgttaaaggaaaccaagcgtgaag

SEQ ID NO: 205601 - DNA, 88 bp, Homo sapiens
cgcaatggcagcctttgcagtggaacctcaggggcccgcgttaggtaagaagagttcctgggtcaagtggtcaccttcataaaaccga

SEQ ID NO: 205602 - DNA, 97 bp, Homo sapiens
cgagggagtttgacagctattaaaaccagggctccacagttaggagtaccttccactggaagaatctcaaacagcgctacttactcaggatcagtgg

SEQ ID NO: 205603 - DNA, 83 bp, Homo sapiens
cgtagacaccagctccgaaatcaccaccaagagcaccaagctatggatcatcatggagtacctgggcggcggctcagcactgg

SEQ ID NO: 205604 - DNA, 100 bp, Homo sapiens
cctcactgtggagaaatatgaggctacttcaacatcgtggcagatagtgtgtaatgatgcctcctgggagactcgacggagttttgctcttgttgcccag

SEQ ID NO: 205605 - DNA, 74 bp, Homo sapiens
ggaaacatggcggcggcgggtgttgtgagcgggaagatggtcagtaggacagaaggtaacattgatgactcgct

SEQ ID NO: 205606 - DNA, 75 bp, Homo sapiens
cctacgtcccgctgccgtcgccgccgccaccatgcccaagagaaagcggggtcgcggccgtcaggggcactcagc

SEQ ID NO: 205607 - DNA, 100 bp, Homo sapiens
cagcactgactttcagctatggaatcggttaaaaagatcaagtggcatgagcagccttttggggaaaattggtgccaagaagcagaaaatgagcaccctt

SEQ ID NO: 205608 - DNA, 80 bp, Homo sapiens
ggcggctctgcgctggccgggggcgcgggcggcggcgccggcaggaaggtcagcgcattgtgaataggctgagaacttca

SEQ ID NO: 205609 - DNA, 87 bp, Homo sapiens
ggaaactctgtttacgttattatcaacacaggaccaggatttgtacacacagatatgacgaaagacttgaaagaagaacatttaaag

SEQ ID NO: 205610 - DNA, 83 bp, Homo sapiens
gtaaatatacgctttgttggtggactactctcagcctactatctgtctggagaagaggtccatggaattgtacggcggtccag

SEQ ID NO: 205611 - DNA, 80 bp, Homo sapiens
gtcggtgggtcggggatcggtcgcctgagaggaagcaggtcctggggaccaaggtggacgcggagcgtgacggcgtgaag

SEQ ID NO: 205612 - DNA, 100 bp, Homo sapiens
aacaaaggaaggggagcccgggacccccgggggcgcaggaaagaccacagcaagattctttcattcgtctcctcctagcctgggggaccaggctcgaact

SEQ ID NO: 205613 - DNA, 90 bp, Homo sapiens
gaaagcctgcagagagcagaacatggaaggagacttctcggtgtgcaggaactgaggctgaggggatctggcggtggagcgctaggatca

SEQ ID NO: 205614 - DNA, 150 bp, Homo sapiens
cctgatcacctgtctggagcaaggaaaagagccctggaatataaagagacatgagatggtagccaaacccccagggcgacctgaggtctggagtgtatcctctcaagggagcaagtggatccctggggcagagaggaagcttctagtgta

SEQ ID NO: 205615 - DNA, 100 bp, Homo sapiens
gttgaagtcttggcctcggaggatgcagcctttggactcaagttacagggatgaagagtcctccagtccagccaggcatggggagcagatgccatctttc

SEQ ID NO: 205616 - DNA, 83 bp, Homo sapiens
cctcggccgaacccctccgcagcagctgcatcttcctcccgtgaggctggccgagctccacgctgatctgaagatacaggaga

SEQ ID NO: 205617 - DNA, 96 bp, Homo sapiens
agaagggtatctgaaaaggaaaaggagagtattgccagagcaagagctggatctcgtctttctatattaataaggcagcggaaagaagaaatatga

SEQ ID NO: 205618 - DNA, 83 bp, Homo sapiens
ctccactttcgccagcccgtgccgcgagcgcggcctgcaggaggcggctatgagaggttttcctccgagtacccagaattctg

SEQ ID NO: 205619 - DNA, 74 bp, Homo sapiens
tcgactcagacgcttcctatccctacaaagccatggtggctacccaggctactgctaagactcgtacttcccag

SEQ ID NO: 205620 - DNA, 90 bp, Homo sapiens
tttaccagtcttccctggcaagattcttctgaattgtgctgccttggccaaaagaggtatcgtgatttccgatacccacctggacacccc

SEQ ID NO: 205621 - DNA, 82 bp, Homo sapiens
cagggaaggagggcgtccgagtcaacaaccgcttcgagctggagaaccgcctggcccagcacaccctccaggccctgcagag

SEQ ID NO: 205622 - DNA, 82 bp, Homo sapiens
cgttagctaattaaaacatttttcagggacgtagccatccagagttgtcgagatgtccacagaaggaggatttggtggtact

SEQ ID NO: 205623 - DNA, 75 bp, Homo sapiens
cttggactgagtcctgcaggacacaggagcagtatgtgtttatccacgatgcgatcctggaagcctgtctttgtg

SEQ ID NO: 205624 - DNA, 98 bp, Homo sapiens
tgaataaagctgttttggaactgtcaggtacctcaaagcaaaagtcctccatacattttctccccaattccattccttgggcatgccatagcatttgg

SEQ ID NO: 205625 - DNA, 100 bp, Homo sapiens
ccggcctccccgggcctcccattgcagcatctgtgacaactgtgtgggttctcagctgctgcgggagttgaaaaagatggacgacaaagctcttttggtg

SEQ ID NO: 205626 - DNA, 100 bp, Homo sapiens
tggaatcccttgcatggctctcaattgggaaaatgaggtacgttagtgttcgcgattttaaaggcaaagtgctaattgatattagagaatattggatgga

SEQ ID NO: 205627 - DNA, 99 bp, Homo sapiens
gaccagcgctaacgttgtcaaggacccgccctccaagtacgtgctgaagaatgttctgctgactctgacctcaactttcttattcctgttgcagtgggt

SEQ ID NO: 205628 - DNA, 100 bp, Homo sapiens
gcgctcttgctcctctctccttggcctctcctgggatcggcccaaggccagttctccgcagtttaatgagtggtgttaagaataatgttggaagagggat

SEQ ID NO: 205629 - DNA, 121 bp, Homo sapiens
gcggctttgaccgagaggctgctggagctcgtgtttggacgctgcctggctctctggctatgaaaatcctgtggtgtctcgaattaatatgagaatacaagatctaacaggactagatgtt

SEQ ID NO: 205630 - DNA, 99 bp, Homo sapiens
cgacggccgctccgaggacttccgcaggacccgcaacagcgcagagggtgttggtaaatcatgcttattgctacagtttacagacaagaggtttcagcc

SEQ ID NO: 205631 - DNA, 75 bp, Homo sapiens
atgggccccctccacggcaccatcaccgttctgggagaaaactggttgtcctggatgtttgaaaagttggtcgtt

SEQ ID NO: 205632 - DNA, 75 bp, Homo sapiens
ggagttggcggaagcacttggaactcctttataagtgtcagctgtgaggtaaacgccctgcagaagatatggaag

SEQ ID NO: 205633 - DNA, 74 bp, Homo sapiens
tatagagatgtgatgttggagaactacagaaacctggtctccctagcgggaaagagacatgcgaatgggtggcg

SEQ ID NO: 205634 - DNA, 100 bp, Homo sapiens
gcggctccgggaacatggctcgcttcgctctgactgttgtccggcagagatttgctctgacccatctgaagtccatatggctctgtatgatgaagacctc

SEQ ID NO: 205635 - DNA, 83 bp, Homo sapiens
tgtcattaccaagacaacccctcaatctgagatgggaggctgagcttcagtcattgtctattcctggaacttaccaagagaag

SEQ ID NO: 205636 - DNA, 100 bp, Homo sapiens
caagtaattggtatctgggagatttgggattcaaacccagctctgcttgacttggtgtaaacgtcctacttcggggcaacttgccagagatagaagagag

SEQ ID NO: 205637 - DNA, 82 bp, Homo sapiens
atccccatgcgcttctcggtgctgggggatatgagactttctactcggaatatcctgagtgttgcgtggatgtaaaacccat

SEQ ID NO: 205638 - DNA, 75 bp, Homo sapiens
ctgggattacaggagtgagccactgcgccctgcctggctaaatttattgtgaagaaatcagaagatgaagaagac

SEQ ID NO: 205639 - DNA, 82 bp, Homo sapiens
gaacagaaaatcgtcttatagttgagaatttatcctcaagagtcagctggcagctgcatcttcctcccgtgaggctggccga

SEQ ID NO: 205640 - DNA, 51 bp, Homo sapiens
gccaagtccaagtgtcctcgattaagaacattagatcagcaacagttcttc

SEQ ID NO: 205641 - DNA, 101 bp, Homo sapiens
cagcatccgagtctactgtctggatgacacccaggatgccctgaaggatttgaagcattcattaccatctggacttggtctctcagaaacccaaattacat

SEQ ID NO: 205642 - DNA, 83 bp, Homo sapiens
ccagaatgcagagaaaaatgggaaggtttccccaaactgcattaatactacattgtcaaagacaaagacgaacatgagacatg

SEQ ID NO: 205643 - DNA, 82 bp, Homo sapiens
agctcgtaaggtccctcaaagcgggaaatgcgtcaaagctggtgccgacaagaaagccgaggctggggctgggtcagcaacc

SEQ ID NO: 205644 - DNA, 100 bp, Homo sapiens
cacccgttctccccggcacccgggagtcatcttcaaagccctgaagaaagccttgagccgggccatgcttctcacatcttacctgcctcctcccttgttg

SEQ ID NO: 205645 - DNA, 97 bp, Homo sapiens
caacagagtgggacctaatggtgagagtattagaaaggaagatatccacacgacaaagtagagaggagctgataagaaggggagtgcttaaggaatt

SEQ ID NO: 205646 - DNA, 90 bp, Homo sapiens
agccaagagactgcttttgagtgacatttatttagcagctagtaacttcacttatttcaggatggttacagtagttcagactcttttact

SEQ ID NO: 205647 - DNA, 100 bp, Homo sapiens
ggagctgttgcggggtccgcggggaagtcttggcggtggagccatggtcggccaactgagcgagggggccattgcgacgtgtcttaaagacattaacaga

SEQ ID NO: 205648 - DNA, 75 bp, Homo sapiens
tcctctctcacctttgcaatcgagctcaggccccggggcctccagcggcaccagcggagaccacggtgagctcgt

SEQ ID NO: 205649 - DNA, 50 bp, Homo sapiens
cgacaggcgcctccggcccatttacgtattgcctaagtgtaatcttgaac

SEQ ID NO: 205650 - DNA, 75 bp, Homo sapiens
gtggaaggcatggaagtcatcagaagacatgaagagtatttctggagaagaatcatcccatggagtgattatgac

SEQ ID NO: 205651 - DNA, 80 bp, Homo sapiens
agaacgctctcatccggaggcaggaccagctgcagctgctggactatgcagccatcgtcttctttgctaacaaccgcttt

SEQ ID NO: 205652 - DNA, 98 bp, Homo sapiens
tatcgctaccctccgaagtccggttttacacatccataagtagacctttttggagcctcaccagccaattcaatggcgtcctcttctactgtgcctct

SEQ ID NO: 205653 - DNA, 75 bp, Homo sapiens
cgggttcctctgaggattggaattctaggccctagactggagctggttacagacggaagaagaagagcacagctg

SEQ ID NO: 205654 - DNA, 75 bp, Homo sapiens
ggattgcaaagtcatcagccggtgccaaagagcctccattatggcatgctgaatttaccaaagaagaattggttc

SEQ ID NO: 205655 - DNA, 100 bp, Homo sapiens
gtgcttggtgtcgtttttccttgagctgaacgtcttgcaacagtggccgcacgcatagggactttgaacatgtcggggatcgccctcagcagactcgccc

SEQ ID NO: 205656 - DNA, 75 bp, Homo sapiens
atgcaagttcggttcccactgatggctcaggtgatgatgaacagtctacacagatggctgcaagttgggaagatg

SEQ ID NO: 205657 - DNA, 100 bp, Homo sapiens
cggtgtggcagctgctctgaaccaggacctggacccggacccaaagtgccatgtctttaatgaattgaatgatctggcacgggaccctccagcacagtgt

SEQ ID NO: 205658 - DNA, 97 bp, Homo sapiens
aggatcccttaggcatccagggacgcaggattcacaaggagtgggccgaacccaacagcttccacgtctgcatcacgtcctacactcagttcttccg

SEQ ID NO: 205659 - DNA, 75 bp, Homo sapiens
gtttcccttggtcaaaagcgcactaaatcgtctccaagattcgggaactggagcctctcctctgtcacagtgaca

SEQ ID NO: 205660 - DNA, 85 bp, Homo sapiens
ctgatcggctgtatgactccatgaagggcagccccgagaaccacaggtgtacaccctgcccccatcccgggatgagctgaccaag

SEQ ID NO: 205661 - DNA, 80 bp, Homo sapiens
ggagagtgagagctccccaggggagttctctgtgtctgtgaaaactgatagtgcatcagctgacccaggtaatttaaaat

SEQ ID NO: 205662 - DNA, 100 bp, Homo sapiens
tttgaacttggctaatgacccaactggagaagatgaggctgcagatgaaaacccagagtctcaagagatgctggaggagcaactggtgaggatgttaacc

SEQ ID NO: 205663 - DNA, 99 bp, Homo sapiens
cagctcgacagtacgcctacttctataaagtcatccaggaacttagtgatttggcccgtgaccctccagcacaatgttctgcaggtccagttggggatg

SEQ ID NO: 205664 - DNA, 98 bp, Homo sapiens
gctgccgcgccgccgctacgggaccgcctgagctttctacaccgggaccccacagccgcccagcatggcccagcggcactcagacagctccttggagg

SEQ ID NO: 205665 - DNA, 100 bp, Homo sapiens
tgctggcattgaatgatttatagctaagactccaggacacccctgaagccgagaaatggctcacagaacatttcctgcctgttgctcacactctgttgtc

SEQ ID NO: 205666 - DNA, 100 bp, Homo sapiens
agaggatgatgaagggcccgcgctgaagagagctgccgaagaggaggtagagctgaagtttcctgcaccaggcaagcctggaaattatcagtatactgtg

SEQ ID NO: 205667 - DNA, 77 bp, Homo sapiens
gggagatcgactgtttgagcccggaagcgcagaagctggtcatttgattgcccgcctcagaacgatggatctgcatc

SEQ ID NO: 205668 - DNA, 99 bp, Homo sapiens
gcaacagtgacaaaagtacttaaagatgtggtcaaaatgcagatcttcgtgaaaacccttaccggcaagaccatcacccttgaggtggagcccagtgac

SEQ ID NO: 205669 - DNA, 98 bp, Homo sapiens
tacaagatccactacctggacaccaccaccctcatcgagcctgcgcccagggctacaccaagtccattgatatttggtctgtaggctgcattctggca

SEQ ID NO: 205670 - DNA, 74 bp, Homo sapiens
aggattccaagtaactcttatttggaggtagaaaagtatagagctgtatataataagcttcgctatgaacatac

SEQ ID NO: 205671 - DNA, 116 bp, Homo sapiens
acacccgttctctcggctggatgttctcatcgtccctgccaactttccaagtctggggatggccaggttgagaaagtggcgacttctataagacatggatagatgcaaacatgtag

SEQ ID NO: 205672 - DNA, 110 bp, Homo sapiens
aggggttcgtgcgctgtggagacgcggagggtcgaggcggcgcggcctgaggagtttcagaagactcttggtggcaagcagcctgtgtatgataccacaattagaactgg

SEQ ID NO: 205673 - DNA, 98 bp, Homo sapiens
tttaaatgacctgctatgcccacagagcttgatccagaagtgcacagcatagttgttgcccaaatctcttggtacagaatgtttttgtagaaacacac

SEQ ID NO: 205674 - DNA, 75 bp, Homo sapiens
ccagatccgggagcacgtcatctccatcgagggcaagccggtatattcggggcccaggagcaaggaaaagtggcc

SEQ ID NO: 205675 - DNA, 51 bp, Homo sapiens
gaggacactgaagatcacagactgaaatccagttatcaaaattgactcaag

SEQ ID NO: 205676 - DNA, 50 bp, Homo sapiens
ctggctccccatactagtcgccggttatgaagacagtatggagtttccag

SEQ ID NO: 205677 - DNA, 90 bp, Homo sapiens
agagagggcctgggagcttgctgcagcttcaggccagcactccttgcccgaggacagagatggcgagcgcccggattggggatgagtatg

SEQ ID NO: 205678 - DNA, 50 bp, Homo sapiens
tacctgttaccactttcaaaaacattgatggtttaattactcaggctttg

SEQ ID NO: 205679 - DNA, 100 bp, Homo sapiens
gaaattgttgaagagttcaactttcccagaagttgttctaacgctgcctttgctttaaaacagtattacttgcgggtgataagtctgtcagagttatgcg

SEQ ID NO: 205680 - DNA, 82 bp, Homo sapiens
ggccccgagatcagaatgccgtcctcctgcatatgcccaagaggattgggagtggaatggacaccagcagaagcaccacagt

SEQ ID NO: 205681 - DNA, 96 bp, Homo sapiens
agtctgagtgtctgtccccagagcctcagtttgtgcaggacaccgacatggaacagggactcactggggacatgggagtggtgagccggaactgca

SEQ ID NO: 205682 - DNA, 51 bp, Homo sapiens
aggaattggatctactagtgcagtattgaaatggctgatggcaagtgcagg

SEQ ID NO: 205683 - DNA, 75 bp, Homo sapiens
ccggaccctgctggctatcctgcgcctttccactgctctggccgccatggcatcagatgaaggcaaactttttgt

SEQ ID NO: 205684 - DNA, 82 bp, Homo sapiens
agcatcgtggcgctgggcaatgacatctacgtgacggcaagagtgagccatggagctacgtgtggggaacaagtaccgcctg

SEQ ID NO: 205685 - DNA, 99 bp, Homo sapiens
cctgggaggtggacggctccagccccagctgcgtgcccagggcccggcctgccccgcacctgagctgccctcgcccccctctgctggctacagccctgc

SEQ ID NO: 205686 - DNA, 100 bp, Homo sapiens
cccacgtccacacctactcctcctcaggacaatcctccaaacacagactgtttgacttagaatcttcccttttttactccattcaagagcagcattcata

SEQ ID NO: 205687 - DNA, 100 bp, Homo sapiens
gaacatgcctccattcacctgtgggacctgctggaagggaaggaaaaacctgtatgtggaaccacctattttggactcagcaaggagtcagtagatcaag

SEQ ID NO: 205688 - DNA, 50 bp, Homo sapiens
aggaatcacaccgttttgcaagaaaacaaccctttttgctgcacatgtaa

SEQ ID NO: 205689 - DNA, 51 bp, Homo sapiens
gaggcatgccagaggtagagcaggtggtggtatcatggatacagaaatgtc

SEQ ID NO: 205690 - DNA, 80 bp, Homo sapiens
tgctgatgaagatgatgacgatgatgatgaagaggatgatgatgaagagtaaagggagaagatgaggaagagaacaattt

SEQ ID NO: 205691 - DNA, 100 bp, Homo sapiens
ggcctgcaggtctctgtcgagcagcggacgccggtctctgttccgcaggatggtgacttaagagattaaaattaatttggttgctgttggttctgaacaa

SEQ ID NO: 205692 - DNA, 101 bp, Homo sapiens
acccgcggtgcaccgcctgctgggagcgccgctcaaggtaaatgagctggatggtatcccgttgatcctggacaactgcaacatcagtgacagtaacccct

SEQ ID NO: 205693 - DNA, 100 bp, Homo sapiens
tgctggtctgcagagctgccgccagctgcaccctcctcgccagagccagaaaacttcggctccatgttggaactgtcgtggaagggaacgaagcccatag

SEQ ID NO: 205694 - DNA, 83 bp, Homo sapiens
cacgaggatcggattagagcgcatcaagcatgatggaaccatgtgtgatacctgccgccagcaaccaatcattggcattcgat

SEQ ID NO: 205695 - DNA, 106 bp, Homo sapiens
aaactggatgttggtagaaaaagcaagagtttgttatatagcagttggaaaagagactgttcaaaccactgaggatcagattttgaagagagatatgccaccagca

SEQ ID NO: 205696 - DNA, 101 bp, Homo sapiens
ccaggactgatgcagatgcccctcctccaccagaggactgggaggagcatgtcaacaggtactaggttttgacaagcttgcatcatgcgtgagtataagct

SEQ ID NO: 205697 - DNA, 100 bp, Homo sapiens
aacttctgcaaggcggtttctagtgcaaatcccctgctcagggtcttcatccagaaacgaggcgtctgtagaggcttctggtgaaatcgcattatgcaag

SEQ ID NO: 205698 - DNA, 75 bp, Homo sapiens
agcgcagtacgtttctccagagctgctcacggagaagtccgcctgtaagaggtcccgctccccgaggcgcaggtc

SEQ ID NO: 205699 - DNA, 83 bp, Homo sapiens
cgagatcttccgccactacgagtttttagaacttcagccataaaaatgggcagaattttccttgatcatatcggtggtacccg

SEQ ID NO: 205700 - DNA, 75 bp, Homo sapiens
gctgatcctgcaccacaaggtgtacgatttgaccaaatttctggaagagaacatccagtcatggataaaaatgag

SEQ ID NO: 205701 - DNA, 74 bp, Homo sapiens
ggaggcccatcctgaatgcaggggtcaccactgaaggttggactcttcacagaaattgggcccatgtcttgctt

SEQ ID NO: 205702 - DNA, 75 bp, Homo sapiens
acggggtctcccggagggccagagtcgactattgcccagaagaaaagatgtttggttttcacaagccaaagatgt

SEQ ID NO: 205703 - DNA, 90 bp, Homo sapiens
tgatgatcacgcagctggctggcttcagtggaccatgctcccaaatgtgtcagaagaaacagtgtctcccaccagagcacggaacatgaa

SEQ ID NO: 205704 - DNA, 101 bp, Homo sapiens
agccttacagaagctttggagcaaattaagataattagctcatcttcaatttggagcaagaggtggtggtggccttcccccgaagaaatttggtaatcctg

SEQ ID NO: 205705 - DNA, 100 bp, Homo sapiens
gccggcttcgcgggcgacgatgccccccgggccgtcttcccctccatcgtggggcgccccaggcaccaggtgcccatcgtccccgtggtgtactcttcct

SEQ ID NO: 205706 - DNA, 102 bp, Homo sapiens
tttcaatgctgttgagtatatcaataccctgttcccaaccgagcaaaggagaattctgcctaagccaactcgaaaaagccgtacaaaaaataagcaaaagcg

SEQ ID NO: 205707 - DNA, 104 bp, Homo sapiens
agagcgccttgggacagggggatttggaaatgtcatccgatggcacaatcagtcaagccagcgcctttagaaataaaacctttgccagaatgggaagaattaca

SEQ ID NO: 205708 - DNA, 100 bp, Homo sapiens
gaggaggagacgcggagccgaagtgccattgtcatcaaggctggaggccgctacctgggacggggacaagttctggcggatgcccgagtgctacatccgc

SEQ ID NO: 205709 - DNA, 75 bp, Homo sapiens
gcaggaaacatggcggcggcgggtgttgtgagcgggaaggtcctctcagggtgcgccatcattgtccgaggtcag

SEQ ID NO: 205710 - DNA, 82 bp, Homo sapiens
gtctgcgagccaggattcccgaagtcccgggcccagagcccggccagcaggagcagttggtcttcggcagcggggatgctgt

SEQ ID NO: 205711 - DNA, 88 bp, Homo sapiens
caaggaggccagatctatgacgaaggctacctggtgaaggtggatgacagcagtgaagatgcatagaatgtcaagctaaccaggcgtc

SEQ ID NO: 205712 - DNA, 75 bp, Homo sapiens
ttctggtaggcgctggtttccggagggctccgagtgctttaattcctagaggacctgtgcaacaacctcttgagg

SEQ ID NO: 205713 - DNA, 100 bp, Homo sapiens
ttttcttcattggcagtaaaaatggggtaaaatttatgaagaccattcctggtacagcactggtagaaatgggtgatgagtatgctgtagaaagagctgt

SEQ ID NO: 205714 - DNA, 100 bp, Homo sapiens
cgaggaggccttcgaggctctggagtcctccacggctacggtcagaatggcggcagtggagcatcgtcattcttcaggattgccctactggccctacctc

SEQ ID NO: 205715 - DNA, 126 bp, Homo sapiens
ggattacagagtataacaatcagtgccgagcaattgtgatgagatattctgctgagtggaaggttgatggaaatcacaatcttctgacaaagctttctctggaagaggaaaactgtcttattcagc

SEQ ID NO: 205716 - DNA, 100 bp, Homo sapiens
ggacttcaatgcccagtccccagctcgccagcagcaccccaagatctggctacctcgggccctgaggcagacctacatccggaaggttggggacacagtg

SEQ ID NO: 205717 - DNA, 89 bp, Homo sapiens
cattttggcattgacatttaattttagggtcctttatatagaagggagagtaggagctggatggcctgttggaaatcaaccgcatgacc

SEQ ID NO: 205718 - DNA, 113 bp, Homo sapiens
gctgaggccgggccggccgcccagacgctgcccgcgggcccggccacggcggagccaaggatataagcttgaccacgagttgagaccctgagcacaggcctccaggagccgct

SEQ ID NO: 205719 - DNA, 100 bp, Homo sapiens
aagtttctggtcactccccaggattatgcgcggaatttttgagagatatcttcaatctcctgtttttgttgccaagtctaaaggaccgacaacagccaaa

SEQ ID NO: 205720 - DNA, 89 bp, Homo sapiens
tcatgagcgatgttaccattgtgaaagaaggttgggttcagaagaggggaaagaccacagcaagattctttcattcgtctcctcctagc

SEQ ID NO: 205721 - DNA, 75 bp, Homo sapiens
ttaaaaaatctggagggactccaacttcaatgaccctacagcttggggcctgggctcctctgaccatcctcattg

SEQ ID NO: 205722 - DNA, 100 bp, Homo sapiens
ctccccagccatgtggaactgtttattgttggccaaaaccaggctttgattgaaccaggatgaatgcgggtgttggaagtagaatatatatatacatata

SEQ ID NO: 205723 - DNA, 100 bp, Homo sapiens
agacaattgttcagttgcaaaaagaaactggagccaccatcaagctgtctaagtccaaagatttttacccaggcattatattgtacttctagcaagtgca

SEQ ID NO: 205724 - DNA, 75 bp, Homo sapiens
gacaaaaagtttgtcattaaacccatcgacaagaaggcacctgtgtctgaacacacacaattaagttggatcctt

SEQ ID NO: 205725 - DNA, 83 bp, Homo sapiens
gttattcgagtgaccgagaccgcggccgggaccgaggctggagaagaagcaggcgctccctccattccagccacagatcacag

SEQ ID NO: 205726 - DNA, 101 bp, Homo sapiens
gtccggccggggacccggcccgggaccggcggcgcgcggcggccgaggccagctacgagagtacaaggtagtgggtcgctgcctgcccacccccaaatgcc

SEQ ID NO: 205727 - DNA, 50 bp, Homo sapiens
ggaggatgttggggccgtcaactcccccacagtttgtggttcggccaaga

SEQ ID NO: 205728 - DNA, 83 bp, Homo sapiens
tcggctgcgggaaatcgggctgaagcgactgagtccgcgatggaggtgatcgaggaaacatctcaacatcttctaaaccagcc

SEQ ID NO: 205729 - DNA, 54 bp, Homo sapiens
ccgctatccagaacctccactctttcgacccctttgctgatgcaactaagggtg

SEQ ID NO: 205730 - DNA, 98 bp, Homo sapiens
tggccctcgatgtgctctgcgtgttgctggggctaccctgagaggaatctacatgcagagaagttcaggagactgaactaacggaacgtcaggaagcg

SEQ ID NO: 205731 - DNA, 75 bp, Homo sapiens
gcaaaagctgcttgaaaacattccaggtcgtctacagctgcaagcagatcgccatcaagaacatatccgagctag

SEQ ID NO: 205732 - DNA, 96 bp, Homo sapiens
tcagttagaggaggcagaagatttctggccagtggagagaggaattcctcaagacaccattccagaaagctgcttggattaacttgtgataaacat

SEQ ID NO: 205733 - DNA, 49 bp, Homo sapiens
ctgggagcctgaaaactgtgaatggtgtgcaactgaggaacatggctca

SEQ ID NO: 205734 - DNA, 50 bp, Homo sapiens
cgcacgcggggctgctgcccaagggttctccaaaaaatgtggaatccttt

SEQ ID NO: 205735 - DNA, 50 bp, Homo sapiens
cttcattggtattgaaagcaacaaggccctgaagaggaaagtgaggatga

SEQ ID NO: 205736 - DNA, 101 bp, Homo sapiens
ctgggggaatgttggaactgttgaatgggctgatcctatagaagatcctgatcctgaggttatggcaaaggtaaaaccacctcagctaattgattatctgc

SEQ ID NO: 205737 - DNA, 100 bp, Homo sapiens
acagcttgaccaacagcctcaggagctggtggctggtctccacttgtgtctaacaaataccagtggttgcagattgaccttggagagagaatggaggtca

SEQ ID NO: 205738 - DNA, 82 bp, Homo sapiens
acaggaatatcgagagcgtcatgaacccgagctatagagaaaggagatgagtcattttttgagaccagtactgttataatcc

SEQ ID NO: 205739 - DNA, 100 bp, Homo sapiens
cgccgcccccgtgcccgaccgccgcccgactgccatcgcccggcccggccgcgcccgcggaaccagaccagaactgccattggatgtccagaatcccctg

SEQ ID NO: 205740 - DNA, 100 bp, Homo sapiens
aacttaaaagatgccacctctaaggttgttgatcattatgaaaatcctagaaacgtggggtcccttgacaagacatctaaaaatgttggaactggactgg

SEQ ID NO: 205741 - DNA, 51 bp, Homo sapiens
aagaacctggtgaaagtcccatattctggttttactgcaatcacagcaacc

SEQ ID NO: 205742 - DNA, 100 bp, Homo sapiens
ggggcaggcacccgggcgccgggcctcccagccgacatgtctctagtggcggaagccttcgtctcccagattgcaggcaccatggctgaggaaacagctc

SEQ ID NO: 205743 - DNA, 96 bp, Homo sapiens
gacgcgtggcccacctgggctgccattcaggacacattcagctaacgtattttagcaggtggagtgaggttgaagattcctgtgacagcgatgcca

SEQ ID NO: 205744 - DNA, 98 bp, Homo sapiens
aagcgaggctgtggaagatgctcccagctacagagggtaccgggatgcctgcaccattactgccccatggcctttctgtggtgctcacgtccccagcg

SEQ ID NO: 205745 - DNA, 75 bp, Homo sapiens
tgatgaagagaaaggcccggagactgagtgtctggaccacccaacctgcttgctgtctaggttggttcctttccc

SEQ ID NO: 205746 - DNA, 98 bp, Homo sapiens
caggtgacagcaatcagctggcctggtttgatactgacctgtaaatcatcctttaggaagaggatcacctagcccgggtagaagaggcaatcacccgt

SEQ ID NO: 205747 - DNA, 98 bp, Homo sapiens
cccagtgtgtgccggagaacacgggctacacgtatgcgctcagaacgacaccgtaactatccgcactagaaagttcatgaccaaccgactacttcaga

SEQ ID NO: 205748 - DNA, 74 bp, Homo sapiens
cggagacctacctgcggcgtcggcagctgctgctccgaggatgatcacggacgtgcagctcgccatcttcgcca

SEQ ID NO: 205749 - DNA, 75 bp, Homo sapiens
tgctggccgaagcgaagggcgacgccaagccggagggaagtgcacggctgtctataacgtgctgccgggtctcag

SEQ ID NO: 205750 - DNA, 96 bp, Homo sapiens
ataccgccgctacgtggacaaggcccgcatgaaccacatccctgtgtttagtcccgcacttacagacggctcgctgggcgacatgatcttcttcca

SEQ ID NO: 205751 - DNA, 75 bp, Homo sapiens
gagacgtgtcgtcactatgtggcccatgtgaagactctttttgatcagaacaatgctgcaaaaaaagaagagtca

SEQ ID NO: 205752 - DNA, 90 bp, Homo sapiens
gacggctgctcaaacatcaggtattctaccttgtaaatactgttatttgtatatactgtaaatgatgacatcggtgggcactaaccgagc

SEQ ID NO: 205753 - DNA, 82 bp, Homo sapiens
taaatcaggaatggattgaaatctaatgaaccgaaactttggcatttagcagaagagaaacctgatggccttatcaatgaag

SEQ ID NO: 205754 - DNA, 100 bp, Homo sapiens
attggagatggggaccgccctggacatcaagattaaaagagcgaataaagtttatcacgccggggataacaaagctgatgtaattttaaagtacaatgca

SEQ ID NO: 205755 - DNA, 100 bp, Homo sapiens
ctggacatcaagtcagaggttttgtgactcacaagatgctgatcttgctcaggttgaaagcttccaggaactgaatacagattctgttcatcttgctctg

SEQ ID NO: 205756 - DNA, 83 bp, Homo sapiens
cgcggattcgccgaggcaccgaggcactcagaggagacttccttgtgaaacctcctagtagaaaaagttcttgggacaaactt

SEQ ID NO: 205757 - DNA, 98 bp, Homo sapiens
ctgaaacagaaaccacctctgccatcctcgcctcagtcaaagaacagcacatcaaccccgtggccgcctccctcatccagaagatgcttcagacagat

SEQ ID NO: 205758 - DNA, 96 bp, Homo sapiens
agattgcaaatgacctgctttctttctgttcccgggctgcgttcggacccctgtcggagagtaaatccgaagtggtataagttgaaatccaaacca

SEQ ID NO: 205759 - DNA, 88 bp, Homo sapiens
gggttggtgtgattagcttcgcagtctggaaagctttaggagttcacagtgaactgtggctgcaccatctgtcttcatcttcccgcca

SEQ ID NO: 205760 - DNA, 75 bp, Homo sapiens
aagaggaagaaggaggaggaagatcctctggaccttctccatctacctggagtcagtggccatcttgccgcagct

SEQ ID NO: 205761 - DNA, 74 bp, Homo sapiens
cctttgccatcactgccattaagacctgtgaccgcatcaagcagtcagcagctggcaccaagcgtcgggtgttt

SEQ ID NO: 205762 - DNA, 83 bp, Homo sapiens
cggagacccttcgagaaatctcgtctcgaccaagagctgaagctgatcgccatgccagtgacggtaacccgcaccaccatcac

SEQ ID NO: 205763 - DNA, 75 bp, Homo sapiens
agtcaagagacctgtgaaaatcttcagtgaagcagccgacacgagtcgttgttcataaaacagcttttgaaagtt

SEQ ID NO: 205764 - DNA, 95 bp, Homo sapiens
agataaaggccactgtgaaacgcaagattccacctgctcctacgaagcccgactttgatggtcctcgagagaagatgcagaaactgggagaaggt

SEQ ID NO: 205765 - DNA, 97 bp, Homo sapiens
tttgcaacagcatcttgcctgatttgtaaatacaaagttgactgtgaagctgtacgaggagatatttttaatcagggtctggctctgtcacccaggc

SEQ ID NO: 205766 - DNA, 117 bp, Homo sapiens
aaggaaggctgctggtgatcatgctaagggtcttcatataccacgattaacagagatagatggggtctcactatgttgtccaggctgacctggaactcctgggctgaagcgatcctc

SEQ ID NO: 205767 - DNA, 80 bp, Homo sapiens
aaaatgatgagaggctctcgcagaggatgtgttagactcagagttgggggccgtcccgctcctaaggcaggaagatggtg

SEQ ID NO: 205768 - DNA, 75 bp, Homo sapiens
ggagctcggaggcggcgaggagcgcctgcctgaggagagcaggatgaaattgattctgcagtaaagatgttggtg

SEQ ID NO: 205769 - DNA, 88 bp, Homo sapiens
tcctcttccaccatcaggaggctgagaatccagagaaagatctctgaccactaaatctgtgtgcagatggagttttaacattgaatgc

SEQ ID NO: 205770 - DNA, 82 bp, Homo sapiens
acctggccatgcacatgaacggggagctcgttctccggaagctctacccatcaagttcacagagggtctgaggaacgaagag

SEQ ID NO: 205771 - DNA, 75 bp, Homo sapiens
cttcaggttacagcttgaggatctgtctcttatccagggccagatattcgaagcttacaacatggcagctttgtg

SEQ ID NO: 205772 - DNA, 75 bp, Homo sapiens
cagggtcaaaggagagcacaaccatcgcagttggaagcccatggggcagaaagagcgcttcgtgaaactcctgga

SEQ ID NO: 205773 - DNA, 75 bp, Homo sapiens
cagggactaccagaatatttcaagaaatgtgccggtggcagatatcaaagccgtggtgacgggaaaggactgccc

SEQ ID NO: 205774 - DNA, 100 bp, Homo sapiens
agctgatccccagccacagcacacaggaccaggctgcgagaacagtaccaaaagaattggtggagctccatttgaagctgatgaggaaaattggcaaatc

SEQ ID NO: 205775 - DNA, 75 bp, Homo sapiens
cggccacggcggcggctggggccgagtcgtcctcttgagttctggcgccttgactactgggaagatgacttgcgg

SEQ ID NO: 205776 - DNA, 80 bp, Homo sapiens
tgagaaacattaagacctactaccaggtcatgtccaaagtaatggagatgttccagcctagtgcggtggtcttacagtgt

SEQ ID NO: 205777 - DNA, 98 bp, Homo sapiens
gcccctcgggccgacgccatgaagatcaaagatgccaagaaaccctgaccgtataatagacgctggccccaaaggaaactactctcgatttatgaatc

SEQ ID NO: 205778 - DNA, 90 bp, Homo sapiens
ctggaaccttcactaaccagatccaggcagcagacccgacaccgtcacactgagatctgccaagagcgaggagtctctgtcatcgcaggc

SEQ ID NO: 205779 - DNA, 75 bp, Homo sapiens
tttccgccctaatggaggtctccagtttcggtgaaggtgctaaaggagaagatagaagctgagaagggtcgtgat

SEQ ID NO: 205780 - DNA, 98 bp, Homo sapiens
ttgaattacctttgaagcagaagggttcacacaaaagatgttggacaatttctacaattttgcttcatcatttgctgtctctcaggcccagatgacac

SEQ ID NO: 205781 - DNA, 73 bp, Homo sapiens
ggagctagccctgggccaggaccgagctgctgcccaaagggagcaaggaggaacagcgggattacgtcttcta

SEQ ID NO: 205782 - DNA, 90 bp, Homo sapiens
ggcgaatatcttcccttacaagggttatatatggaattatggtaccctccctcagccacaagtatatggttatgatgacttgcagatgct

SEQ ID NO: 205783 - DNA, 101 bp, Homo sapiens
aagaaatagacgatagcttggatcaagtttctggaactaatgcaactgaagtatcatgagaaagctgcagacaaaggggtttatatcattggaagcagcgg

SEQ ID NO: 205784 - DNA, 80 bp, Homo sapiens
aggggcttacgcagaaggacctggccacgctattactataacaagcgcattctgcacaagaccaaggggaaacggttcac

SEQ ID NO: 205785 - DNA, 100 bp, Homo sapiens
acatctttctccatccttttactgtcaatctaatggttcgagcatacgggccaggtttggagaaatctggatgcattgtcaacaacctggccgagttcac

SEQ ID NO: 205786 - DNA, 100 bp, Homo sapiens
ggcggccctgcggagtggctggtgccgctgtccacggggtttgagaaatactttaagaggagtggaaggaacacaaactgagaaacatcaacagcaccaa

SEQ ID NO: 205787 - DNA, 82 bp, Homo sapiens
agggcttcgagttcaacatcatggtggtcgatttaagtaagtcttccccaacaccgaatgggattccatcttcagacccagc

SEQ ID NO: 205788 - DNA, 100 bp, Homo sapiens
ttgatgggagtaaccaaaatcacatgtttggagtctggagaatggaatcatctaataccatattgtaaaggtgtacaagttcagtgtaacagttgtaaaa

SEQ ID NO: 205789 - DNA, 83 bp, Homo sapiens
atggccgtgccctggggctgagccctcagctgtggcggggccttcgtgggcccgcgatgccaggaccccaacccgtgcctcag

SEQ ID NO: 205790 - DNA, 74 bp, Homo sapiens
atcatgaagatttagtagccattggtgttttacctcaatcatatatccacacaagtgcttctcttgacatttct

SEQ ID NO: 205791 - DNA, 51 bp, Homo sapiens
cagattcgcagtggtcgcttcttctccttgattataagaagaccagtctag

SEQ ID NO: 205792 - DNA, 82 bp, Homo sapiens
tgtccctgtacgcggagggctcggtcaacggcttcatcagcaccttgggtatgtttttacccagtacaacaaaccattcttc

SEQ ID NO: 205793 - DNA, 51 bp, Homo sapiens
gctgaggagttttcaatcccaagtgaaccagaggaaatgcctccagaagca

SEQ ID NO: 205794 - DNA, 89 bp, Homo sapiens
aaaattcacccttgtagagtcattcctgcctttgagcggactcccttttaaggatatgtgatggcgtccagtttggagctgggataagg

SEQ ID NO: 205795 - DNA, 100 bp, Homo sapiens
tggagccaccagcctctccctgattttaggtgatgggcaagtcagaaagtcagatggatataactgatatcaacactccaaagccaaagaagaaacagcg

SEQ ID NO: 205796 - DNA, 76 bp, Homo sapiens
ccaggggatgctgaggcagatgatgggtttccagcaaaatctggtggaaagaagtctctagaagccaaaaagactg

SEQ ID NO: 205797 - DNA, 100 bp, Homo sapiens
gttggatgctgccttgtccggtaccctgtcagtgataatatgcagcatgcatactgggaactgaagagagaaatgtctaatttacatctggtgactcaag

SEQ ID NO: 205798 - DNA, 82 bp, Homo sapiens
gggctgaagaagcagttctacaaggcgagccaggagcatcagatccatgctgctgctgactcggagccccacagcttggcac

SEQ ID NO: 205799 - DNA, 110 bp, Homo sapiens
taatgtgtgctgtgttaaattcagcccctcttccagataccatttggctttcggctgtgcaggattggatagctttagtcaaagcagctgctgcagctgcagccaagaac

SEQ ID NO: 205800 - DNA, 98 bp, Homo sapiens
tgaagggtccctatgaatacctcacacttgaagactatcccttgatgattgatggatcttctcctgaactcccaagtcttgagagaaaaaataaaaga

SEQ ID NO: 205801 - DNA, 50 bp, Homo sapiens
cccatcaggtttcctgatgtgagcaggctgtggatgagatgaacggaaag

SEQ ID NO: 205802 - DNA, 98 bp, Homo sapiens
ttcaagttctgatccagcagatgaagagggaggcctgagaggctgctgttctaactcgctcccagaaaagccaggactctatttgaaaaaaatgctgc

SEQ ID NO: 205803 - DNA, 101 bp, Homo sapiens
cgcaagggggacaggctggactgaaagaggacacgggaagaacaaagacttagactcggttgactatagtcaatggggccaatggagccaagtgtatggaa

SEQ ID NO: 205804 - DNA, 99 bp, Homo sapiens
ggaaagcatggacccttaggagataatgaagagaggaccagagtatctactgacaaaagacagcaactctaccagatcctgacagactttgatatccgg

SEQ ID NO: 205805 - DNA, 78 bp, Homo sapiens
tctcattgaagcttggaattacatagctggaaaggatcttacagaacctctaaaatgcagacctccagctctagatct

SEQ ID NO: 205806 - DNA, 89 bp, Homo sapiens
aggtcgtggaggtggccgtggaggcagaggtggcatggggtaactaggatttctacctcaaccgcgagacctatgcaaggacggtgtgg

SEQ ID NO: 205807 - DNA, 88 bp, Homo sapiens
gcctggcatctacagaatttggaaactagttactgctctggcccatttagagtctcttgcagtggatgttgaggtggccaatccacca

SEQ ID NO: 205808 - DNA, 90 bp, Homo sapiens
ccaaaccgttcgaagatacagggtagtgcacagtggagatggaccttataaatgtcaaaatgcagatcttcgtgaaaacccttaccggca

SEQ ID NO: 205809 - DNA, 82 bp, Homo sapiens
cggcagcgcccggcccccggctcagcccccggagtgcggagccgaccaggcggctatgagaggttttcctccgagtacccag

SEQ ID NO: 205810 - DNA, 100 bp, Homo sapiens
actgtgaggcacacagaattctctacatttgtgaaagtcagtttctgaggaatttcatcaggtactccaaagattcaggtttactcacgtcatccagcag

SEQ ID NO: 205811 - DNA, 90 bp, Homo sapiens
gctccatcgacctcaaggacatcaacttccggccgcagatgtcccagatgaccgcacctcgagcaggagtggggatgccacgtctgcccc

SEQ ID NO: 205812 - DNA, 100 bp, Homo sapiens
gtacatttcaagttggtcgcggcttgggctccgctttggggaggggcagcagtccctcagggccgggagaccgagtggctctttggcatggatgagggcc

SEQ ID NO: 205813 - DNA, 90 bp, Homo sapiens
gcaaaagtccaccgtgctaaccatccctgagatcatcatcaaggatttgtacacacagatatgacgaaagacttgaaagaagaacattta

SEQ ID NO: 205814 - DNA, 74 bp, Homo sapiens
tttggttacctatgtacctgttaccactttcaaaaaactggagaaccaggagtctcgggtctctgaaatccaca

SEQ ID NO: 205815 - DNA, 50 bp, Homo sapiens
ctgaaatctaccacttttggaagccaagtaacaacatgctgtaccccaag

SEQ ID NO: 205816 - DNA, 52 bp, Homo sapiens
atgttcgccttcaacctgctcttctgggcggaattctccacgagttttgagc

SEQ ID NO: 205817 - DNA, 75 bp, Homo sapiens
acagacgctgccagcatcgccgccgccaggtacaccaggggttggaaaaaccacactaggcaaagaacttgcgtc

SEQ ID NO: 205818 - DNA, 100 bp, Homo sapiens
ctggcttccagatggtgacatgagccacccacagccggagctgttcctctttcccaaagctcaggttatacattggctcttcaaagacgttcacctcatc

SEQ ID NO: 205819 - DNA, 122 bp, Homo sapiens
cagcgatgacgaggacgacgacgaggacgagcacggtggcgtcttctcccagtccttcctctgaatatggacatcgatgttctcccttgtttttcctgaaatcctgtttttggtttcaacac

SEQ ID NO: 205820 - DNA, 100 bp, Homo sapiens
accctagccttccagctgccagggggcttaatgaactgcaaagtccaagtggtaagaagttcagaagcaagcctcagttggcaaggtacctgggaaatac

SEQ ID NO: 205821 - DNA, 83 bp, Homo sapiens
gaaaagactgggccgttactgattgagctacgaggaccaaggcttcacaggctgctcaagaagccgagatcaatgccagaaaa

SEQ ID NO: 205822 - DNA, 75 bp, Homo sapiens
gactccttcggcagtccacccaccgccgccgcctcccaggctggtgtgtgacagctctgtgctgctgtgcctcaa

SEQ ID NO: 205823 - DNA, 82 bp, Homo sapiens
tgcaaagtgtccccggcaagaagggcgtgatggtgggcatgggtcagaaggattcctatgtgggcgacgaggcccagagcaa

SEQ ID NO: 205824 - DNA, 101 bp, Homo sapiens
cgcaagtgctggcgagccagatgcggaggctggcggccgaggagctgggggtcgtcaccatgcagccgttcttggaacacctcacagcttgccacatctga

SEQ ID NO: 205825 - DNA, 126 bp, Homo sapiens
ataaaatcacagagggtgatggtgggtgaccttgaggatatcaacgagatgatcatcaagcagaaggaaactttgatccaaaagccatgaataatttttatgacaacatagaacctggcccagttg

SEQ ID NO: 205826 - DNA, 100 bp, Homo sapiens
aagactggaattgagcaagggagtgatgccggttatctctgtgaatctcagaccaccaaatcccattgaatttctagcatcttatcttttaaaaaacaag

SEQ ID NO: 205827 - DNA, 75 bp, Homo sapiens
ctcccaacgtcgccccggtttgacgcacacggcaccaaactagaatggatcttggagaatgtctgaaagtccatg

SEQ ID NO: 205828 - DNA, 100 bp, Homo sapiens
aacaagcttcattgttttcagctaacagtaaccccaggctgaccggttccctgatgtgttacctgcttctgctactgatccaaactgcagaacttctcat

SEQ ID NO: 205829 - DNA, 100 bp, Homo sapiens
gtcacttccgactagtggagtttttagccttttaacattcaaggattagattgccacggcagtgaagtttctacagaattcccgggtccgccagagccca

SEQ ID NO: 205830 - DNA, 83 bp, Homo sapiens
ccctgatcatcctgctgggcttcgtccagatcgggaaggctgctgatgcaaggaatcccctgggctcccgtccactccactgc

SEQ ID NO: 205831 - DNA, 131 bp, Homo sapiens
ggagaagcccacaaccgccctcctggacaaggtggccgacaacctggccatccagcttgctgggccctcctcgccaaagacagcctagagaggacggcaatgaagaagataaagaaaatcaaggagatgag

SEQ ID NO: 205832 - DNA, 87 bp, Homo sapiens
acctgcggcccgacgaggaagttttctactgtaaagtcaccaacgagatcttccgccactacgaggtgcggggggcaatggcactgc

SEQ ID NO: 205833 - DNA, 78 bp, Homo sapiens
cccaacagagatctcttctgttctccactgctagttgttgacctcctgtactggagagacattaagaagactggagtg

SEQ ID NO: 205834 - DNA, 90 bp, Homo sapiens
gagccagcgcccggagcaagcggagctcccccaagagccggaaagatcagccaaatggccgatgacacagtggcagaactggacaggcat

SEQ ID NO: 205835 - DNA, 75 bp, Homo sapiens
aacaggaaagtctaagggatatggctttgtctcctttttcaacaaatgggtggttctaactttgatggtttgaga

SEQ ID NO: 205836 - DNA, 81 bp, Homo sapiens
gccaggacacaacaccgcggagccctgcaggcggaccaagaatcgccttcagccctgtctggtgcatccttggcagaaagt

SEQ ID NO: 205837 - DNA, 50 bp, Homo sapiens
gttgattactcagtctctaaaaagctaagttccaggttcctgtaatactt

SEQ ID NO: 205838 - DNA, 100 bp, Homo sapiens
ctctgatgtcaatcttgagggctaggaaggagactctaattttggattccttggtggaggaaaataaaacactctggtcttgccgccaacgatgcaagtg

SEQ ID NO: 205839 - DNA, 96 bp, Homo sapiens
aggaacaaactgctcatcactgtctggtacctgagctgcagagagaagtcagagtttctcgatctttgggcatgaatgcatcagtgacaattgaag

SEQ ID NO: 205840 - DNA, 100 bp, Homo sapiens
tgggagtaggaaagccagccgtaacatatttttagaggatgatttggcctggcaaagctatgatttaggcatagagaatcgtgatgccaccaacgaccaa

SEQ ID NO: 205841 - DNA, 75 bp, Homo sapiens
cgcagtggtcgcttcttctccttggcgccaagcccatctttgtgtgcttgcatccaactgtgatgagcctatgta

SEQ ID NO: 205842 - DNA, 50 bp, Homo sapiens
aaggtgtgctgtgcctgaggccaggtgcggtggctactaaagttcgaagg

SEQ ID NO: 205843 - DNA, 50 bp, Homo sapiens
caacagagtgcctgacccaggtcaggttcagattcagaacaagaaagtgg

SEQ ID NO: 205844 - DNA, 100 bp, Homo sapiens
caagatggcagccaccacgggctcggattcttctaacagagaaaatgccattgaggatgaagaggaggaggaggaggaagatgatgatgaggaagaagac

SEQ ID NO: 205845 - DNA, 121 bp, Homo sapiens
agcgggtcctacgaggagggctgtcagagcctcatggagtacgcttggcagcagcatgatgtacaagaactatgcagagtcatgtttgatgctttggaacagaaatggaagcaaacagaac

SEQ ID NO: 205846 - DNA, 76 bp, Homo sapiens
gccatggccggaatgcagtaccctcagcagcagagcacaggaagcttggaaacatgactgtgacggtgaagaagac

SEQ ID NO: 205847 - DNA, 99 bp, Homo sapiens
caaggaggaagatggtccaggctgggagcatccccttagcagcagcctctggtgccacacctccctggatgatccaagatgaagaatacattgctggga

SEQ ID NO: 205848 - DNA, 82 bp, Homo sapiens
gcctcaggcggcagcgcttctagcgaagctgccgcccatgctgtcgccaccctggctgaggccaccttacaaggtgggggac

SEQ ID NO: 205849 - DNA, 82 bp, Homo sapiens
ccatccgcgacttcctggccatcgttttcttcgcctccatagagatcctgaaggagctagacgagtgctacgagcgcttcag

SEQ ID NO: 205850 - DNA, 83 bp, Homo sapiens
cgccgtcccggctcacctggcggtgcccgaggagtagtcgctggagtccgcgcctccctggttgttgcagaaactgcaggtag

SEQ ID NO: 205851 - DNA, 78 bp, Homo sapiens
accacgctgaggggctgggagccgcgcacaccaccatcacctatggtgcacctggcgtggagttcacaggcctgcacc

SEQ ID NO: 205852 - DNA, 88 bp, Homo sapiens
atagagttgagcctgtgggacacttcgggtttacccaaggtccagcctagcccctaggcaccatgtcggacagtgatctaggtgagga

SEQ ID NO: 205853 - DNA, 98 bp, Homo sapiens
caattacaatgcagtaaagccagaaaagactgctgctccctcgccgtcactgttgtataaatgggcggcgaagaggacccgcaggctgcaaggagcaa

SEQ ID NO: 205854 - DNA, 90 bp, Homo sapiens
cgaacggggccagcctggaagattgtcactgtaacctcttctgcctgggaccacttaatagtgagtcttccaaccagagcttgtgcagcg

SEQ ID NO: 205855 - DNA, 99 bp, Homo sapiens
acggagcggacccgagtgatacccgggagactagcttggccacaggagacaacgttgaggtacagacagatggaggagatgtataagaaagctcatgct

SEQ ID NO: 205856 - DNA, 76 bp, Homo sapiens
cggggcgccacgggggccatgtaagcagcttgcacgagccaccgttcgtgatcccaagacaggagtcctcactgtc

SEQ ID NO: 205857 - DNA, 82 bp, Homo sapiens
acctgtctgggtctcagccgccaaagaccccgtccgattttgcaagaacgaggctcaaggatgtgagggacacagtattgac

SEQ ID NO: 205858 - DNA, 90 bp, Homo sapiens
atccaaacaatatcttcaaggcattctttggcggtcctggcggcttcagctttgaaggtagagcaggtctctctgcagccatgtcggcca

SEQ ID NO: 205859 - DNA, 100 bp, Homo sapiens
aggatcagtgctgtagtgcccggttcaagctgaaaatgttacacaggaagacataccatgtaaagggacaggccttcagtatttggcatcacctttacat

SEQ ID NO: 205860 - DNA, 97 bp, Homo sapiens
ggcagcattttttccagaacacaaaaggtgtcatggagaaactccagctgggcccagagattctgcagcgggaaaatccaaggcttatttatgccag

SEQ ID NO: 205861 - DNA, 101 bp, Homo sapiens
gaagagcaaagctgtcctaggccaaccagagattcatctttcatgcagtgacatgttgataaaaaatgatggatgataatgaagataattcaaatgatggg

SEQ ID NO: 205862 - DNA, 80 bp, Homo sapiens
atggtctcaatctctggaaaaacttcttgccaaccaaaataacgaaggaggcccaacttcattcaataaggagcctgacg

SEQ ID NO: 205863 - DNA, 98 bp, Homo sapiens
atgcgtcctagcagcgggacccgcggctcgggatggagggtacttatatactctggatttcccagagagtcgggtaatcagtcagccagatcaaacct

SEQ ID NO: 205864 - DNA, 74 bp, Homo sapiens
tatggctttgtctcctttttcaacaaatggatgttatacatccaggctctaccagggcctttcctttctatgga

SEQ ID NO: 205865 - DNA, 82 bp, Homo sapiens
cgacgaggatatcgtgtctggagcagtggagcccaaagacccctggagacatggatgaccgagtgggagacagcagcaccag

SEQ ID NO: 205866 - DNA, 51 bp, Homo sapiens
aacctttcaagagtcaagtaaagctttcaagatgttagaaagttcaagcca

SEQ ID NO: 205867 - DNA, 98 bp, Homo sapiens
cgaagtgattttagctacatcaagtgatgaaaaacacccacctgaaaatatcattgatgggttcgatacaagaggctgttttcctagcgtggcttgct

SEQ ID NO: 205868 - DNA, 98 bp, Homo sapiens
cagttcaattatgaatctcaggaacaccaccttctgtcagcttctccatatacaacctcaactccaaacatcaacagtgtgagaaatgctgattcgag

SEQ ID NO: 205869 - DNA, 90 bp, Homo sapiens
cccaaggacagggggacagggctctgtctcgcacttcccagatgaccgaggtcccgtggtcaggaagcagaggtacgtgtttgacattag

SEQ ID NO: 205870 - DNA, 75 bp, Homo sapiens
gcccaagacagtggaaaattttgttgctctagcaacaggagaggtggatagatacttctcaagacatcacacagc

SEQ ID NO: 205871 - DNA, 100 bp, Homo sapiens
cttcaatcgaccctccaagatacaagagaacgcattacccatgatgcttgctgaaccgaacagacaacgcaagctggggacgaaactgcagtgaccagtg

SEQ ID NO: 205872 - DNA, 85 bp, Homo sapiens
atgaagcaaccgcccattcagtctacggctggggccgtcccagttcgcaatgagaaagacagggaaaaatgcattttttgtggga

SEQ ID NO: 205873 - DNA, 74 bp, Homo sapiens
gccgagggtctcagcgggatctggagtcaggggtcgcaatggaagaagagatcgccgcgctggtcattgacaat

SEQ ID NO: 205874 - DNA, 82 bp, Homo sapiens
cctggttctggaatcctcagttcaaggacatggatttgattgacatactttggaggcaagatatagatcttggagtaagtcg

SEQ ID NO: 205875 - DNA, 75 bp, Homo sapiens
tgctgtgtatgaagaggcagtgaagactctgccaacagattactgacagccctgtcctaggagcacaacgtccga

SEQ ID NO: 205876 - DNA, 90 bp, Homo sapiens
atggaattagcctgcaacatgaagaatttcagcttaataaacgaaaaccagtctcttaagaagaatatttcagcacttatcaaaactgcc

SEQ ID NO: 205877 - DNA, 82 bp, Homo sapiens
cgcggaggcgaccgccatggcgttcctcaaactccgtgaccaggcaaaagagatttcactagcagacctccaggagaattat

SEQ ID NO: 205878 - DNA, 51 bp, Homo sapiens
cttcagagacatgagaagattcatactgaacatccatgatagcagtcttct

SEQ ID NO: 205879 - DNA, 90 bp, Homo sapiens
acctctgagctgttcctcccagctacgagctgccccagctgaccatgccactgcctcggtacggctccgggcagcagccactgatcctgc

SEQ ID NO: 205880 - DNA, 100 bp, Homo sapiens
ctcttccggatgtcccggagcaagtatcctagaaggaaaacatcaccatggctacagaaattggttctcctcctcgttttttccatatgccaaggttcca

SEQ ID NO: 205881 - DNA, 96 bp, Homo sapiens
gctgtccaggctggtgtgctctctggtgatcaagatacagcctcgaagcggaggatccctgtgtcccagccgggcatggccgacccccaccagctt

SEQ ID NO: 205882 - DNA, 83 bp, Homo sapiens
tactgcagaagtagttcttgcattggatgcaatccattccatgggttttattcacagggggattttggcaattgcttggagca

SEQ ID NO: 205883 - DNA, 80 bp, Homo sapiens
cggtgagcgcgtttcccgcctgagcgcaactagcggcgggtcgtgggcacctccagcgtttagtgggctacagatggcat

SEQ ID NO: 205884 - DNA, 101 bp, Homo sapiens
gtacgactcagtgccagagaaccgagcatccagtcatctcctataaaggtggacccaagagccatatcagtgctagcaaaatggcagaattcatatagcat

SEQ ID NO: 205885 - DNA, 75 bp, Homo sapiens
ttctcagatgttggatatttgcttggaaaaacgtgtgggtacgaccttggactgaaagacctcctcctagcaggc

SEQ ID NO: 205886 - DNA, 51 bp, Homo sapiens
attaaacccatcgacaagaaggcacctaacactcgtgaaactgctcaggcc

SEQ ID NO: 205887 - DNA, 100 bp, Homo sapiens
cctggccgagctgcccagcgagatcctcggggccccagaggccgcggacaccgacctggagattctttcagtgacctgtatagttcctatgtaatctttt

SEQ ID NO: 205888 - DNA, 73 bp, Homo sapiens
gaagcgcggaagaaggcctccgtggaggccagattgaagtctattatcctcccagtccacaacgctgaaccgt

SEQ ID NO: 205889 - DNA, 100 bp, Homo sapiens
gttgacggacaggaggcgaaatgtgcaaatgtttatggtgccgcagtgtgtctggagaataaatgtggatatccctgaggaagctaatcagaatctttcg

SEQ ID NO: 205890 - DNA, 89 bp, Homo sapiens
tcgctgcccgacgatgtccgcaggcgaacttgaaggtgcacattcttgatactgaaagttttgaaactacatttggccctaagtcacag

SEQ ID NO: 205891 - DNA, 74 bp, Homo sapiens
ctcgaagaacagctgtggaaagaagttgcaaaacactgggtgacacttggacagaaacactggcctatgtgctc

SEQ ID NO: 205892 - DNA, 96 bp, Homo sapiens
tggggctcctgctctttctccttcctgggagcctgggcgcagagcagctgctggtcgggctgaaggacaaggacacggtcgtgcggtggtctgcag

SEQ ID NO: 205893 - DNA, 100 bp, Homo sapiens
cagagagttaacttctgtttacatggaactcagacatctgcaaatcatggataccatacttgcagagctccttcagatacataaagaacacattgtagga

SEQ ID NO: 205894 - DNA, 95 bp, Homo sapiens
ccctctgggatccccgccgctctgtctacaacccgaggaccaagaatcgccttcagccctgtctggtgcatccttggcagaaagtgaggaggaaa

SEQ ID NO: 205895 - DNA, 75 bp, Homo sapiens
ctggctctggcaccatgaacctcggaggcagccttaccagacagatgcagacagcgacctggtgggggatgtctg

SEQ ID NO: 205896 - DNA, 50 bp, Homo sapiens
gcagaaagcaatggatcatattgagaaagtgactgagaccgaagatgata

SEQ ID NO: 205897 - DNA, 90 bp, Homo sapiens
gagacatggaccgcggcgagcaagggttcatagtggcgtcatgcacgcagactcctgcaagttcccctaagttcttagaggactgctttg

SEQ ID NO: 205898 - DNA, 138 bp, Homo sapiens
atcttcaagttggagcaaggagaggggccatggacattggaaggggaagccccacatcagagctgttcaggagccagtctacttgatgacttatacaagtatttcttcttccatcactcccacggagacaccatgact

SEQ ID NO: 205899 - DNA, 89 bp, Homo sapiens
ccggcgtcgtcggatgttgtgttgcccgccaccatgagctacacaggttaaacccatccagagtaatggctgcggccttacccaggacc

SEQ ID NO: 205900 - DNA, 100 bp, Homo sapiens
agttcaccttcgtctgcatggctctgtcactcacgggccaattcctgtccccccagcagcatggcatcgtgtgctgaaccctctgagccctctgccccac

SEQ ID NO: 205901 - DNA, 102 bp, Homo sapiens
ttcctgagccccgccaggaccatgcccactgctgtgttgaaatgggtctcagcatgatcaaaaccatcaggtgcccagtcccctggaaggcagtgaagggga

SEQ ID NO: 205902 - DNA, 50 bp, Homo sapiens
gaggacaagaccatcgagctcatggctttgaattgtattccatggtgcca

SEQ ID NO: 205903 - DNA, 82 bp, Homo sapiens
ttccccatgatgatcctgccatgcaggcaggccctgagcacgctgctgtgtgagcagcagatataacacgtgggaaccggag

SEQ ID NO: 205904 - DNA, 90 bp, Homo sapiens
ttcgaagagcagcattggaaactctgtttacgttattatcaacacaggaccagatccatccttttacaatccctgctattattcgtccat

SEQ ID NO: 205905 - DNA, 82 bp, Homo sapiens
cacagggcggcacccttctgggctgtccacctctacctcgaggctgatgctagtatgggagacaacaaccggatcccagtca

SEQ ID NO: 205906 - DNA, 100 bp, Homo sapiens
gtggtcctgggcctggatcctaagtcctgacctttcatgagatccaaggattaatgtcgtgcttgctggtggccacgttgtgccccgagatgagatccgg

SEQ ID NO: 205907 - DNA, 50 bp, Homo sapiens
tcagcctggtgctcctctatctagtgttttctgcctacattaaagaagtg

SEQ ID NO: 205908 - DNA, 90 bp, Homo sapiens
acagcatctcagacttctttcccagatgtttataatgagggcacacaggttgagcaatgtttaaagcgtttgaaaaacatgaatttggag

SEQ ID NO: 205909 - DNA, 100 bp, Homo sapiens
ccgacagttcggtgactccttgcgtccccgcggtgtccatgaacagagggccgagatggacgaaaaaatgtggttccttgtgttctctctgtaaatgggg

SEQ ID NO: 205910 - DNA, 51 bp, Homo sapiens
gcggaatttcaagatggatcgggatcgaatcatcaatttagttgttggcag

SEQ ID NO: 205911 - DNA, 85 bp, Homo sapiens
gatgacgaagacatgacacttacaagatggacagggatgataattgggcctccaagagaggaggaagccaagaatctggtgagcg

SEQ ID NO: 205912 - DNA, 100 bp, Homo sapiens
cagggccggcggggggcctctgggagcatcttcagcaagttcacctccaagtttgtacgcagacccagattgatcactatgttggcatcgcccgagatca

SEQ ID NO: 205913 - DNA, 100 bp, Homo sapiens
cgacaaacaccacgagaattccgcagcccacacggagaactacgatgacccgcacaaaacccctgcctccccagttgtccacatcaggggcctgattgac

SEQ ID NO: 205914 - DNA, 100 bp, Homo sapiens
ctcgggagccgtggccctgatccagacctgggcaggttcactattatgaagatggcaatgttcagttggttagtcataaagatgtacaggattcactaac

SEQ ID NO: 205915 - DNA, 73 bp, Homo sapiens
aggggcgaaggcgggcggcagaggcgatcagatcttagcaaagcaatgtctcaagatggtgcttctcagttcc

SEQ ID NO: 205916 - DNA, 101 bp, Homo sapiens
ctccatcctctacctcaagtatgagccagatgagctccttcaggagcagcgtgcagatatggaccagttcactgcctcaatctcagagacccctgtggacg

SEQ ID NO: 205917 - DNA, 101 bp, Homo sapiens
caagaacagagagagaggtggacagatctgagagatactgaggtccctgtccttcgaatggtggaaggtgataccatctatgattactgctggtattctct

SEQ ID NO: 205918 - DNA, 95 bp, Homo sapiens
atgtgggcagtagaacactctctccccagaaatccaacttctcaaggcctgtctcctccctcctacacatttccagctcctgctgcagttattcc

SEQ ID NO: 205919 - DNA, 144 bp, Homo sapiens
cggacccagtggcctcggcgattatggacccggccgaggcggtgctgcaagagaaggcactcaagtttatgagccggggccatccagtcttggcagcatgctcatgcctgtccaggagactgcctgggaagagctcatccgcac

SEQ ID NO: 205920 - DNA, 100 bp, Homo sapiens
ctcttccgagacgcactgggggccggatgaacattaaccaggtggtatttgttggaaatttcttgagaattaatacgatcgccatgcggcttttggcata

SEQ ID NO: 205921 - DNA, 88 bp, Homo sapiens
taaaggaaggcgtccgttggccttcgtacccgtcttgattgaggtgtggacactgccagcggctgcagccgacttggaatgacctggg

SEQ ID NO: 205922 - DNA, 100 bp, Homo sapiens
aaggaggccgagccgggatctcaggtcctcgggggcggcggccacgccaaggacgggtagtgggcagcagtcagtgacaggtgtaacctctgtggatgac

SEQ ID NO: 205923 - DNA, 101 bp, Homo sapiens
attcaatacaggctggaatatgaaatcaagactaatcatcctgattcagcaagtgagggctaatgctaaaggaggtcatctggaaggactgcagatgactg

SEQ ID NO: 205924 - DNA, 100 bp, Homo sapiens
gaccagccggctgggctcggtattccccttcctgctagtcctggtggatctgcagtacgaagttctacttgtccaattctgaaaaggaacgttatgaaaa

SEQ ID NO: 205925 - DNA, 100 bp, Homo sapiens
tttatcactaaaatatggcatcctaatattagttccgtcacaggggctatttgtttggatatcctgaaagatcaatgtaacaaatgtggcaattattttg

SEQ ID NO: 205926 - DNA, 122 bp, Homo sapiens
gaggaaggaacgaggcaaggagctaaagcagcgtgcgttcagccctgggcggagctggagtttgttcagatcatcatcatcgtggtggtgatgatggtgatggtggtggtgatcacgtgcct

SEQ ID NO: 205927 - DNA, 75 bp, Homo sapiens
aaaatgactttctgccggtagaaaagcacaacattctgaaattttttggttattgtaatgatgttgatcgggagt

SEQ ID NO: 205928 - DNA, 87 bp, Homo sapiens
gaccttttggccatcttctcgcagagtgctccctgctaacggggacaggttgatgataattagaagcatgctttccactgaacttcc

SEQ ID NO: 205929 - DNA, 100 bp, Homo sapiens
tctcccagcagtcacgcaaacaacttatcagtagtgacttacagtaaggaagcccagaacctcatggccctcaccaatgtggacaccccattgaaaggtg

SEQ ID NO: 205930 - DNA, 83 bp, Homo sapiens
ggctatccgcagcgagatggagcagctcaaggaggctgcctgctgtttcccggggagatcatgaaacgaggtcgccttcccag

SEQ ID NO: 205931 - DNA, 74 bp, Homo sapiens
catatcagcccaatgttcctgttggtcaagagcaatctgaatccaaatgcaaaggagtttgttcctggggtgaa

SEQ ID NO: 205932 - DNA, 83 bp, Homo sapiens
gatcctgctggtgggagaacggggatatgagactttctactcggaatatcctgagtgttgcgtggatgtaaaacccatttcac

SEQ ID NO: 205933 - DNA, 75 bp, Homo sapiens
ggctgaactacgacaacacattgctgagcttgaaatccagggttgaaaggaggagcaggaggtactgatggacaa

SEQ ID NO: 205934 - DNA, 99 bp, Homo sapiens
gtaatcagaaggcacagattagaggaaggaagaggtacatgtcactgtggcaggtgtaagtgtgataattcagatggaagtggacttgtgtatggtaaa

SEQ ID NO: 205935 - DNA, 90 bp, Homo sapiens
tgctgccgctcctgctcatctgcttctgctatgccaagatggagttttaacattgaatgcggagaacactaattatgcctatcaagttcc

SEQ ID NO: 205936 - DNA, 100 bp, Homo sapiens
gagaatcaaagggccgggagcgatggcttctagtgaggacgttgccagctccccggagcgccactacacgcccttgccttctgcttccagggaactcacc

SEQ ID NO: 205937 - DNA, 50 bp, Homo sapiens
ctggtgcagacagcagagctcacaaagatacaaactggactctcaggaca

SEQ ID NO: 205938 - DNA, 75 bp, Homo sapiens
caactggctgagggactcacagctgatgacctgctgctcgtgctgatctcagaagggagagaaggtacccaaagg

SEQ ID NO: 205939 - DNA, 101 bp, Homo sapiens
atacaacacgattcttctaatggatgggaacatggggtaatatatgctttaaacactaaaaatgatgagcatgaatctgcaattcaagccctcaaagatgc

SEQ ID NO: 205940 - DNA, 83 bp, Homo sapiens
ggagacgctcctggcactgcaggttagcatggcctcattgaaagaactagatcaaagactctttgaaaattacatcgagttga

SEQ ID NO: 205941 - DNA, 100 bp, Homo sapiens
atgtctcgctccgtggccttagctgtgctcgcgctactctctctttctggcctggaggctatccagcccgcggcccatggagcccgccggcccggccccc

SEQ ID NO: 205942 - DNA, 100 bp, Homo sapiens
tggagcccattttagaggcatctgttctatcttcccatcataaaaaactggtagccggtctgggtctccaggaagagttctgaccacaacagccctgtcc

SEQ ID NO: 205943 - DNA, 83 bp, Homo sapiens
cagcgaccggtgcagctggaaggggagctcaccatggatgatgatatcgccgcgctcgtcgtcgacaacggctccggcatgtg

SEQ ID NO: 205944 - DNA, 75 bp, Homo sapiens
agctggcggccgggctggggctgctgggcggaggatgaagatttgataaagtggaaggcactgtttgaggaagtc

SEQ ID NO: 205945 - DNA, 100 bp, Homo sapiens
ccggatgttcggtgcagctgccagatccgctgatctagtgcttctcgaaaaaaaccttcaggcggcccatggatgctgggctcttgcactgtttggtgga

SEQ ID NO: 205946 - DNA, 83 bp, Homo sapiens
agctggctctgggccttgaacattccgaaactgtcaagattggcaaggttatcaatactctggctgaccatcatcatcgtggg

SEQ ID NO: 205947 - DNA, 100 bp, Homo sapiens
cgctcctggcgcatctggtggtcgtcatcaccttattctggtcccggatagactgtcttcaagctcactgatattttcctctgcttgatccattgtgctg

SEQ ID NO: 205948 - DNA, 100 bp, Homo sapiens
caaggggtgtttttccgtaagcatactcagaccagcatctcagacatgtcgaaaaagatgttttgatccctaaaataatgagagaaaaggccaaagagag

SEQ ID NO: 205949 - DNA, 75 bp, Homo sapiens
gtccggccggggacccggcccgggaccggcggcgcgcggcggccgaggccagttggaggacgagtaagtcgtgaa

SEQ ID NO: 205950 - DNA, 90 bp, Homo sapiens
acaggaccagaggaccacgttctcccagatcctggacttcggtacagaatagctctccagacccccagctggccatgtggtgagttcagg

SEQ ID NO: 205951 - DNA, 75 bp, Homo sapiens
gaacccctctgggatccccgccgctctgtctacaacccgagtaattcgccaaaatgacgaacacaaagggaaaga

SEQ ID NO: 205952 - DNA, 121 bp, Homo sapiens
gagagggattcgtggtgaaggtccggggcttgccctggtcttgctcggccgatgaagtgcagaggtttttttctgagcagtcaagagaccagcccctgcaaaaagcagtgatcattctgag

SEQ ID NO: 205953 - DNA, 83 bp, Homo sapiens
gtttccgttaagctggacaacagaaaccgaccagagggcaaagtgttggagacagttggtgtgtttgaggtgccaaaacagaa

SEQ ID NO: 205954 - DNA, 100 bp, Homo sapiens
ggaaaaccagatccagaaactggaggagtcccgctcgaagctagaaggttactaccagaagcctgagaagaaatgtgtggacaagttctgctccgattcc

SEQ ID NO: 205955 - DNA, 88 bp, Homo sapiens
tgcaggacatctgcaatgatgttctggtgggagctgctatttctatgacgtacatcacaagcaaacccatcgtctttgtgggcaccgg

SEQ ID NO: 205956 - DNA, 75 bp, Homo sapiens
gaaatagtggcaggtgacagtctgcatgtgcagttttcaggtatataccctctcagtgtctggagaccggctgat

SEQ ID NO: 205957 - DNA, 100 bp, Homo sapiens
gaatctaatgaatgggacactgaaccccttcaagtctttgtggtgcctcattcccataacgacccaggagaactgcgacacatcaccaagctgaagccct

SEQ ID NO: 205958 - DNA, 123 bp, Homo sapiens
ctatccagcagctgcatttagttgcgctttcctgcctgcttctagcaaacatttgaagacagtgatttgttccatttgattggtgttatctgtggcttagcaatttataattgtaccattgtg

SEQ ID NO: 205959 - DNA, 74 bp, Homo sapiens
aggagctggagacggtcgtagctgcggtcgcgccgagaaagagggagaaccgaagattacaggaggccagcatg

SEQ ID NO: 205960 - DNA, 98 bp, Homo sapiens
ccgactcgctacgcgggtcttgcgagatatctggccgcctctgccgcagctggaggacagtcattttgtttactcattcagccctgttgcaggtccca

SEQ ID NO: 205961 - DNA, 75 bp, Homo sapiens
cggatatttaagtacaatggtgggcttaattttagatgggccatcaactgagaaagaccttgacgaaaagaagaa

SEQ ID NO: 205962 - DNA, 100 bp, Homo sapiens
atcagacctgctcacacttcagaatagagaagtccagagacaacaagttcagcaagaaagattgtctttcaatcaggaatgttgtagcttcaatccaaac

SEQ ID NO: 205963 - DNA, 75 bp, Homo sapiens
aaagaagtgataggagggctctgtagggatacccacccaccatcccagggtctacaacatccacagccggaccgt

SEQ ID NO: 205964 - DNA, 50 bp, Homo sapiens
cagcaactcccagctcaatgcaatggaaattatcagttcattgcctagca

SEQ ID NO: 205965 - DNA, 78 bp, Homo sapiens
aagttcatgtcacgctgggtaatgaggatttgactgtgaagaataacaagcctttgtattcatttgaagataatgcag

SEQ ID NO: 205966 - DNA, 51 bp, Homo sapiens
tccaaaagctcaacagcaacacccagttcggcggtcaggcctacagcgacg

SEQ ID NO: 205967 - DNA, 90 bp, Homo sapiens
cgcgtccgccgattcctcctccttggtcgccgcgtccttggctggcgtcccttctgcagaggccgggctggaggagaagatggcggccaa

SEQ ID NO: 205968 - DNA, 83 bp, Homo sapiens
caaacagctatggtgatgattagagacatactaatgtacatgccatcactggtgcaagctatatttaacggagatcctgatga

SEQ ID NO: 205969 - DNA, 88 bp, Homo sapiens
ttttatattaatgttgagagagagggctttgtgctgtgtcactccattgctggggggacaggctctggactgggttcctacctcttag

SEQ ID NO: 205970 - DNA, 100 bp, Homo sapiens
cgactccggagacagcccaaatatcctcggaagagcgctcccaggagaaacaaaacccacaatacattatatgcaccagaaatgctagccaaaatggcag

SEQ ID NO: 205971 - DNA, 96 bp, Homo sapiens
tcagaagcaggcggaggagacggcggccttcgaggaggtcatgaaggacctgagcctgacgcgggccgcgcgggctatgactttgcagccgtcctg

SEQ ID NO: 205972 - DNA, 100 bp, Homo sapiens
ccggccggtgccagcacctttcggcttctgagacggcggcagcagcggcattcagactgctgagaaggaagaatttgaacatcaacagaaagagctggag

SEQ ID NO: 205973 - DNA, 82 bp, Homo sapiens
gcccgctcacctgcgctgtgatgcctgcagagctgtggcttaccagtctcctacggtagtgtgcagcttatgcaaacgagag

SEQ ID NO: 205974 - DNA, 82 bp, Homo sapiens
aattatgacttttggacagtccaagctatatcgaagtccctgcactaggtcagacaatcccctttggggtacaggaaacaaa

SEQ ID NO: 205975 - DNA, 100 bp, Homo sapiens
ttgtgtcttcagtttgaggtacctcccataattttaaggggggcttgcttctgacatgtctgatgagcgcattcctgctgttgctcctggctattacaag

SEQ ID NO: 205976 - DNA, 100 bp, Homo sapiens
ccccgggtacggctggtgatggctcagcacatgatcagggatatacagaccttactatcccggatggaggttttcctttggaatatggataaatacacca

SEQ ID NO: 205977 - DNA, 82 bp, Homo sapiens
tctgataaagccactatcatggcctttgatgccctggtgaccttctgtgaagaactggggcataatcaccagcaacacccgg

SEQ ID NO: 205978 - DNA, 97 bp, Homo sapiens
ggcggcctcacggacgaggccgccctcagttgctgctccgacgcggaccccagtaccaaggctcgtggtcccaagaagcatctgaagcgggtggcag

SEQ ID NO: 205979 - DNA, 74 bp, Homo sapiens
ctgagttagctgaggaggtcaatttaaatggttctggcaaactgctcaagctactcagcatagagcgactaaac

SEQ ID NO: 205980 - DNA, 90 bp, Homo sapiens
tgcagttatcgtcatctttttggagttttttgcttggggactattgacagcacccaccttggtggtgctggagaatctggtaaaagcacc

SEQ ID NO: 205981 - DNA, 83 bp, Homo sapiens
ccaggagtcatcggacgccagaatctgcaattctgtggtgttcttggtcacacatttatggagtttctgaagggcagtggaga

SEQ ID NO: 205982 - DNA, 100 bp, Homo sapiens
gagaagcagcagacagccaataaggtggaaattgagaaaattcgggatcttcagcctgttaaacaagaaaacgaaaaaccccttccagaaaacatggatg

SEQ ID NO: 205983 - DNA, 75 bp, Homo sapiens
cctgctggactgcacgaaaaagctttatcctgtggataaacgcagagtgaacgagtttggggagtcctacgagga

SEQ ID NO: 205984 - DNA, 100 bp, Homo sapiens
cgaatggcttgtacccattggcaagtgttcctgcaatgctggctatgaagaaagaggttttatgtgccaagtctttaaaccagaggagttacgccaggcc

SEQ ID NO: 205985 - DNA, 101 bp, Homo sapiens
agctggccagcgagagccagggctccaaagaactcggtcaaaatgcagatcttcgtgaaaacccttaccggcaagaccatcacccttgaggtggagcccag

SEQ ID NO: 205986 - DNA, 100 bp, Homo sapiens
gtcaaccctctggtagggagcactctggggaccagtgagcagatctgggacaaggtggttatggaggaggcggccctggttactctggaggaagcagagg

SEQ ID NO: 205987 - DNA, 75 bp, Homo sapiens
ctgacggtggccgtgaagaccttgaagacctactgaacgtgaacgaacagaaaggctaattaaaaccaaattaag

SEQ ID NO: 205988 - DNA, 82 bp, Homo sapiens
ccggagccgtggccgctgggggttgcggcggcgctgagccagcggggccggaatcccagtcagaagttccagcctgccactg

SEQ ID NO: 205989 - DNA, 75 bp, Homo sapiens
gctcatagacgaactccgcaatgaggacgttcaggacctgaaggagaagaaggagaaggtggaggagaaggcaag

SEQ ID NO: 205990 - DNA, 74 bp, Homo sapiens
cagcttccagttagtggatatagcacaccatccccagccagtgaaagaaaatggcccgaaccaagcagactgct

SEQ ID NO: 205991 - DNA, 75 bp, Homo sapiens
caccctgagcagagccgccgaggatgataaacacccaggacaggctctccccggaggctcagccccctctgctcc

SEQ ID NO: 205992 - DNA, 100 bp, Homo sapiens
cacagctgctcccttcgccttcgccctttccacctcgcggcagttcgggtttacagagtccacggggaatgggatgcaagccagaagctgtatgtagtca

SEQ ID NO: 205993 - DNA, 98 bp, Homo sapiens
cttaaagccccttcgtctccccagcacccactctctgggggcaggtgggcccggtgacagaaagttcaggagccctggaaaggagaaggaataagacg

SEQ ID NO: 205994 - DNA, 100 bp, Homo sapiens
caagacccgcgagaacccggtggtacccataggcgcctactactgcagctggaagcaacaaagaacagcaaagggggatcagggggaaaaaccactggga

SEQ ID NO: 205995 - DNA, 83 bp, Homo sapiens
caaggatcttgtgtgctccatagtttatcaaaagggtttggaaatcccttgtctccaggttgctgggattgacttcttgctca

SEQ ID NO: 205996 - DNA, 83 bp, Homo sapiens
acccctgatgaggcccgtgtggaaggacttctgcacggacctggccgtctccagtgccaacttcattcccacggtcactgcca

SEQ ID NO: 205997 - DNA, 98 bp, Homo sapiens
gaaatctcccaggaagatcaagaaagtgggaaccactgagaaggaacatgaaggatacttttgtggaactctatgggaacaatgcagcagccgagagc

SEQ ID NO: 205998 - DNA, 75 bp, Homo sapiens
ggagcgggcggctgagacaaaggcgacgtcatctggggacctggagaatgatgagcaggcagccagtgccatctc

SEQ ID NO: 205999 - DNA, 83 bp, Homo sapiens
ccagtccgggcaggggcagcgggagccggccgggatgcactgcgcaactctggtggcgatgggctggggcagatgtccttgga

SEQ ID NO: 206000 - DNA, 100 bp, Homo sapiens
ctcggtcccagtgccccacaccaccgcactgtcgctgcccgcctgccctgaggagtccccgctgcttggaaactttgagggaaattttgagtcactggac

SEQ ID NO: 206001 - DNA, 100 bp, Homo sapiens
cctggtctgcctggctcacacctgctttggatgcttcaagcacctcagccctctgaactacaaagcgttcccgttgcccgctctctcccggaagcagagg

SEQ ID NO: 206002 - DNA, 75 bp, Homo sapiens
aaggaaggattcaccacctccaggaaaagccccggtttctctggattctgtgcttctccatggaggaaactcaag

SEQ ID NO: 206003 - DNA, 87 bp, Homo sapiens
ccccgaactccaggacagcatccaggcctcattggacagcattcgagatggtcatcatgggccagtgctactacaacgagaccatcg

SEQ ID NO: 206004 - DNA, 125 bp, Homo sapiens
cggccgcgcaatgggcacccgcgacgacgagtacgactacctctttaaaggtactccaaagattcaggtttactcacgtcatccagcagagaatggaaagtcaaatttcctgaattgctatgtgt

SEQ ID NO: 206005 - DNA, 80 bp, Homo sapiens
cgatgctcttcttggaaaaccagatccagaaactggaggagtcccgctcgaagctagtactatactggcaattgctggag

SEQ ID NO: 206006 - DNA, 100 bp, Homo sapiens
caaagaaagaaacaagttcttggcaagagaggcatcctccttgaagtatttggctgaggagttttcaatcccaaacacaaatggaatcctggccatgctg

SEQ ID NO: 206007 - DNA, 74 bp, Homo sapiens
tctttcttcactcctcttcacttcttcagttcacagcagatgaggctcgggacctgattcaacgttacctgaca

SEQ ID NO: 206008 - DNA, 75 bp, Homo sapiens
aactgtttaccaaccacagacatctcactgcagagacacccaggcctggctcttgagatctgtcaacagagaaac

SEQ ID NO: 206009 - DNA, 82 bp, Homo sapiens
accgcggcttaaatgatgtattttgtgatcgcagcgatgaaaggagtcctaagcagacttaaagccaagaaaataagaagag

SEQ ID NO: 206010 - DNA, 90 bp, Homo sapiens
accaattattacattgaatctctgctctggaaagttcttgtcaataccaaggatgactacatggaggctttaacaagacttcacattact

SEQ ID NO: 206011 - DNA, 75 bp, Homo sapiens
cctgaaggggttccagtacttctctaccctggaagaagcaggctctgctgccatgaaggtgaagattaagtgctg

SEQ ID NO: 206012 - DNA, 100 bp, Homo sapiens
ctgaagcctgagtatgatgcggtggtgataggagcagcacccagaggcctccattcaggctgttttttcagatgcccaaatgcatatttgggcattagaa

SEQ ID NO: 206013 - DNA, 83 bp, Homo sapiens
ctgcaccgacctcgacgtcttgcctgtgtcccacttgttcgcggcctataggaacctgtgaaatttgtagatttgcttggtga

SEQ ID NO: 206014 - DNA, 95 bp, Homo sapiens
cggcccctgccctggttccgttgcgcgccccggatgtggcgcggctgcgcgaggagcaggaaaagggaccattgcaatttagagatgtggccata

SEQ ID NO: 206015 - DNA, 100 bp, Homo sapiens
gcagttcctgcagcttccttgagactcggtgaaatacctggagtgctcagctctcacccagagaggcctgaaaaccgtgttcgacgaggccatccgggcc

SEQ ID NO: 206016 - DNA, 96 bp, Homo sapiens
accagtccatttggggaaatccttcggatggtgaactcattagaaattacctctctagtgacccttcagctgttaaccctggttggccatgacgat

SEQ ID NO: 206017 - DNA, 100 bp, Homo sapiens
ttcgatcccttctctgatttgctgtcagccatgaacggatggatgtgatgcctgctagccaaaagggcgagtgttgtgtataaaggaagttgaaatcctg

SEQ ID NO: 206018 - DNA, 101 bp, Homo sapiens
aaacgtagggaccacatcaaagacagctttcacagtttgcgggactcagtcccatcactccaaggagagaagttcttctcaccactaaatccaatacgagt

SEQ ID NO: 206019 - DNA, 75 bp, Homo sapiens
aggcacagcgtttcttgcaagaatgggagacaagttggatggcttgaggactggtactaaaaggaaacgtgactg

SEQ ID NO: 206020 - DNA, 75 bp, Homo sapiens
tgacaaactctggagtaattggagccaagaaatgagtataggtgtgatgaatgcagactctgctaccattttggc

SEQ ID NO: 206021 - DNA, 100 bp, Homo sapiens
tcttttaatttttaaacttggtttgaaagttggaaatgcagaaatcacctgtcttctgcgtcgatcaggctgggagctgcagaccggagctgttcctatt

SEQ ID NO: 206022 - DNA, 96 bp, Homo sapiens
cggtagcgtcccgggtcccctagcagggctctagagaccacgtgaagtctcctcggaacttagtgatttggcccgtgaccctccagcacaatgttc

SEQ ID NO: 206023 - DNA, 82 bp, Homo sapiens
ttttctctcgggcttcatctcttgtgtggggagtttcatcctagcggacctgcctagagctggaacgttacctccagagcga

SEQ ID NO: 206024 - DNA, 80 bp, Homo sapiens
gctactctctctttctggcctggaggctatccagcgaaactgtggagatataaatttagtacgactgggtccagaaaagt

SEQ ID NO: 206025 - DNA, 80 bp, Homo sapiens
cagaggtggaggcgctttgaaagatgactttgggaaattgctgctggctgaggccctcctggagcagtgtttgaaggaga

SEQ ID NO: 206026 - DNA, 100 bp, Homo sapiens
ttccattatgcctcgaacagacaaatatggatgagctgagtgtcaccttagactacctactcagcattccaaggtctgccatcatggatgttctcgcaga

SEQ ID NO: 206027 - DNA, 80 bp, Homo sapiens
cgccactggctccctgcactgtgtgtgctgcacagaggatgcttttgtgtggtcctctgagccccagtgagagtttcctg

SEQ ID NO: 206028 - DNA, 100 bp, Homo sapiens
cgggacgccaagcacttcctgccgcgggcggcgcgccgcagctgcccaggccggaccgggccgggcgcccgcagtattctaccttgtaaatactgttatt

SEQ ID NO: 206029 - DNA, 95 bp, Homo sapiens
ctgaagttcaggcagcgggagcgaggaggctctgggtgaaccaggaggatgaggtggaggaggggcccagcgatgtgcagaacggacacctggac

SEQ ID NO: 206030 - DNA, 75 bp, Homo sapiens
gtccagccggatccagcatctctccaccatcgactacgtggaggacgtaagactttgaccccgacgcaggcttca

SEQ ID NO: 206031 - DNA, 76 bp, Homo sapiens
tcagaaagtggctgacatggccaccaacacacgtgatgagattgtggggaacctgggtgaaggcacctttggcaag

SEQ ID NO: 206032 - DNA, 125 bp, Homo sapiens
ctgggtgtttcctgcctctctcagtccgggtttggagactcctgcgtcctccgacttttcatgggaccccaggaggaagcagaccgggtcctgggccagcaggacgctttccagatcagaagcca

SEQ ID NO: 206033 - DNA, 83 bp, Homo sapiens
gagaaggtgaactgtctggataagaacccagtgacttgattgtaaaaatttacagagcggaatcatatgctggtctccaagag

SEQ ID NO: 206034 - DNA, 74 bp, Homo sapiens
cttggacacgtcccagctctctctgggcatctggaaagtggtgccagtgaagaagaggacacatgaaggcttgc

SEQ ID NO: 206035 - DNA, 98 bp, Homo sapiens
tccggcagtaactggctctccggggtgaatgtcgtgctggtgatggcctacgggagcctgtatccctctgaagaagatatgatcgaatgggccaagag

SEQ ID NO: 206036 - DNA, 87 bp, Homo sapiens
ccagtagcagttgggaaagaaggctgtgctctttgaagagttcgtaatgttcttaatgatgcagtggatttactggaattccgtgat

SEQ ID NO: 206037 - DNA, 90 bp, Homo sapiens
ctcatgggccctggcggtggacgagcaggaagctgcggctgagtcgaaagccattgatctggtgacgaaagccacagaggaggacaaagc

SEQ ID NO: 206038 - DNA, 98 bp, Homo sapiens
ctagaagccatggacgccttcacccgcttcaccaaccagacccagggccgggaccgactcttcaggcaacagcattattgagaaaagcccttacagaa

SEQ ID NO: 206039 - DNA, 50 bp, Homo sapiens
gtcactcataagcgcgctcaagaacacgatgaggcgagtggtacgacaga

SEQ ID NO: 206040 - DNA, 83 bp, Homo sapiens
agaagatcatctcttgtaaacagtcagacaatagtgagctggttagtgaaggaccatctaaagcaccaagtttctggtataaa

SEQ ID NO: 206041 - DNA, 98 bp, Homo sapiens
tcctggagtacaatgccattggagggatctgaaacttgcccacccttcgggatattgcaggacgctgcatcatgagcgacagtaaatgtgacagtcag

SEQ ID NO: 206042 - DNA, 102 bp, Homo sapiens
ggtggtcattacagaccctgaaaaactggaccaaattagacagaggtgttcttccagagagcaaagccctgaggactggatttccctgtgcctacttcatga

SEQ ID NO: 206043 - DNA, 111 bp, Homo sapiens
cccgagcacgccggccccgcgcgcgcctcgaggccgagtcaaggcgaaggaggtggaggagaccatcgagggcatgctcctcaggctggaagagttttgcagcctggctga

SEQ ID NO: 206044 - DNA, 75 bp, Homo sapiens
ttgatgatcatgatacagttgataaaattgttggtcagaatggcggcagtggagcatcgtcattcttcaggattg

SEQ ID NO: 206045 - DNA, 98 bp, Homo sapiens
tctccagggaaaggatgacatatttttggacctgaaacagaaattctggaacacctatatggctgtggaaaatctctgttctcacaaagtctccccaa

SEQ ID NO: 206046 - DNA, 74 bp, Homo sapiens
tgctgggatgatggatgtccattatagtgaattttcagcattgcaaataacaatctcagctactgggatgcccc

SEQ ID NO: 206047 - DNA, 75 bp, Homo sapiens
cggaacccgtggtcctccgcttcatgatggaggatgaagctgtcctggacagaggggcttccttcctcaagcatg

SEQ ID NO: 206048 - DNA, 50 bp, Homo sapiens
taaagcaggactctaaaagctttggcgacatctcgaatcagcgatgcaca

SEQ ID NO: 206049 - DNA, 75 bp, Homo sapiens
caaggaaaaactggagagcttcatcaaaaatagtgatagctttgataagttggaagctgtgtactgtgggtgtta

SEQ ID NO: 206050 - DNA, 82 bp, Homo sapiens
ctttgatatgttttttggaggaggaggaaggatgcagagagaaaggagaggtgacagagctgaatgaacctctctccaatga

SEQ ID NO: 206051 - DNA, 51 bp, Homo sapiens
gcctagaactccaaggagaaaggcggcggattctaggactcttcatccgag

SEQ ID NO: 206052 - DNA, 95 bp, Homo sapiens
acagcccaaaccatcatttaccctatggagggcaattgaaggaacagactaaaaatcgtgtcctggaaggaaactacaggtactaccagggattt

SEQ ID NO: 206053 - DNA, 114 bp, Homo sapiens
catgggtcaggtcacagagaagctgcagctgacttacatggaggagacgtgtcgtcactatgtggcccatgtgaagaccatggcaaaagttataaccaccgtactgaagttccc

SEQ ID NO: 206054 - DNA, 83 bp, Homo sapiens
aaggaatccgggcagcctccgcggaggcattgaagttgatatcgatgtggagcacggagggaaaagaagccgcctgacccccg

SEQ ID NO: 206055 - DNA, 90 bp, Homo sapiens
caaatgaagattcagtggatgctaagccagaccggtcctcgtttgtaccgtccctcttcagattgtgccggctgcggaagagatatcaag

SEQ ID NO: 206056 - DNA, 90 bp, Homo sapiens
ctaaaaacaagactggggctgctcccatcattgatgtggtgcgatcgtcatggctccgatcttcatcttgaagaagagtgacattgggtg

SEQ ID NO: 206057 - DNA, 78 bp, Homo sapiens
gggctggtgctgccattaatcctgtgggccgacagaagtgcagacaatgcctgtggaagacaagtcagaccccccaga

SEQ ID NO: 206058 - DNA, 75 bp, Homo sapiens
cacacatctatgctatatctgaatctgcttacagatgcatgcttcaaggagcgagaacccgagcagcgccatgag

SEQ ID NO: 206059 - DNA, 75 bp, Homo sapiens
cttgtatacatgctagaaagcaaacatctctctgtagtcctacaagctactggtcagaagttatatgtaaggctc

SEQ ID NO: 206060 - DNA, 98 bp, Homo sapiens
ctcaagttttctctcacccatccatgggaagccctgctactgctggattagcgccagattggcggcagtaagcacacaatgaatgatcacctgcatgt

SEQ ID NO: 206061 - DNA, 73 bp, Homo sapiens
cccagaagttgttctaacgctgcctttgctttaaaacagtattacttgcgtccccaaagctccagagatagat

SEQ ID NO: 206062 - DNA, 50 bp, Homo sapiens
aaaaaactagccttcctttcaggacttccttcgctgggcatctggctggg

SEQ ID NO: 206063 - DNA, 108 bp, Homo sapiens
ctccgggtccacaagaccttcaagtttgtcgtcgtcggggtcctgctgcagacctaatctgggagcctgcaagtgacaacagcctttgcggtccttagacagcttggc

SEQ ID NO: 206064 - DNA, 75 bp, Homo sapiens
gggacggatcaccgtacggccgaacgcgacccgaggaggcggaagagcggcgccgagtctcattctgttgcccag

SEQ ID NO: 206065 - DNA, 98 bp, Homo sapiens
tgcccaaggaaaaacgtgagcttcagtttcggcgaaaggtcttagcagtcacagactcacctgccaggaagttgcagagcttgaagtgaaaaccagag

SEQ ID NO: 206066 - DNA, 82 bp, Homo sapiens
agcttataatccaagctattactcagagattaatgattcatcaagggatagttgtacttgtctcgtgggaatcacttcatca

SEQ ID NO: 206067 - DNA, 101 bp, Homo sapiens
tccagatccatcacgtggggcaggacggtcagcattaaagggcagtatttaaagtcagttggcaagcagtggaataagatttttgtaaagaaaccttgtgc

SEQ ID NO: 206068 - DNA, 75 bp, Homo sapiens
cggaaaggccggaagcggccgggctggatcaggatgagattgcagagggaatggcatacatcgagcggaagaact

SEQ ID NO: 206069 - DNA, 96 bp, Homo sapiens
ctcaccgggcagcgtgggtgagcggcgcagcggcggcagcggagagcgagagaggggagcagttttgtaccaatggctagaagcagatcgtcatgg

SEQ ID NO: 206070 - DNA, 50 bp, Homo sapiens
ccacacaagtcatcatctctggactttgacaggtacaaagataagcagca

SEQ ID NO: 206071 - DNA, 75 bp, Homo sapiens
tggaggagcagcagtagtcggagggtgcaggttatggaaacaaaggacatgctttacatcgtcactgaatttgct

SEQ ID NO: 206072 - DNA, 100 bp, Homo sapiens
agccaacaccacatctaaagacacggcagcgtagaaaggtcctgacttccagtccttgttctcaccacagacttatctcagacagaggagaaacttcgtg

SEQ ID NO: 206073 - DNA, 74 bp, Homo sapiens
ttcaagcttaggaccacccaccatgcctatccagcccctggcaaccactaatctgctttctatctatggatttg

SEQ ID NO: 206074 - DNA, 71 bp, Homo sapiens
ccacctggaccaggaataccacctctgatgcctggaatgccaccaggccccttcccagctgcctgcctgcc

SEQ ID NO: 206075 - DNA, 100 bp, Homo sapiens
cagagggaatttaagaaacatccacagcagcgactggcccaagttctttgaaaaggatgctgacctgttggatgttgaaagcaaacactttgaagacctg

SEQ ID NO: 206076 - DNA, 122 bp, Homo sapiens
ccctcacggagctgggcgacgagctgaccctgggagacatcgacggctctgacgcccgctctgcggcttcggtgtttgaacaggccacagtccaggagcgcttacattcaggagctccgcgt

SEQ ID NO: 206077 - DNA, 100 bp, Homo sapiens
ttagacaaatctatctctctggacttcattcctggaaaaagaagttcatcagattcaaggctttatgtacagaccgagatcttcaggaaataggaattcc

SEQ ID NO: 206078 - DNA, 76 bp, Homo sapiens
gtgggggtgtgcaaacccgagagaactgggtcaagtctggcaccatctttgacaacttcctcatcaccaacgatga

SEQ ID NO: 206079 - DNA, 75 bp, Homo sapiens
aaaaactaaaatagaaaaatctccagctcctcaaaaggttgaaatgttccttcttgcctatgctgtgcgccacac

SEQ ID NO: 206080 - DNA, 75 bp, Homo sapiens
tgtgctcgcgctactctctctttctggcctggaggctatccagcgtggtcctgccatcatggctgtcctctgcaa

SEQ ID NO: 206081 - DNA, 82 bp, Homo sapiens
acaaagaatagagttgagcctgtgggacacttcgggactggagactgatgcatgagggggctacggaggcgcaggagcggtg

SEQ ID NO: 206082 - DNA, 90 bp, Homo sapiens
gcttctcagccattttccacagatcagggagtgtttcaagagccagtgacaaggaccaggggcccaagtcccaccagccatgcagacctg

SEQ ID NO: 206083 - DNA, 90 bp, Homo sapiens
gtacatggcccttcacctcgtggtaaaggttatagcagcaattatagaagttcgatcctttggtacagaagacagaccgacagatcgtcc

SEQ ID NO: 206084 - DNA, 90 bp, Homo sapiens
gtccagatgggcacatgcagcatgctgtgctcacagcccgccggcacggcagcggcggagacactagcactatgtcggaggagcagttcg

SEQ ID NO: 206085 - DNA, 97 bp, Homo sapiens
agaagagttcagggctcaatttgtgtactggaacaggatcaaaggcctggaggttcgtaaagtgaatgaaagcatcaagtataatcacccattgaga

SEQ ID NO: 206086 - DNA, 100 bp, Homo sapiens
cggaaatgaggaggagatggtggaggaggctgaaggtccagccctgctgggagttttctgccacacagatttgcggaagaacctgaccgtggacgagggc

SEQ ID NO: 206087 - DNA, 80 bp, Homo sapiens
cggcagagcagggcggcggcgactcggtcgcaatggaagaagagatcgccgcgctggtcattgacaatggctccggcatg

SEQ ID NO: 206088 - DNA, 82 bp, Homo sapiens
gtatggccacagaagttgctgctgacgctctgggtgaagaatggaaggacaggaagatgtcacccaagcgcatagctaaaag

SEQ ID NO: 206089 - DNA, 95 bp, Homo sapiens
gcggatgtgggcagtagaacactctctccccagaaatccaacttctcaagggcagttgggtgagaagcagcttccatcttcaacctcggatgatc

SEQ ID NO: 206090 - DNA, 90 bp, Homo sapiens
gtaattctaatctcacggatatcctctgttgggggagaaggttaaaaagatcaagtggcatgagcagccttttggggaaaattggtgcca

SEQ ID NO: 206091 - DNA, 50 bp, Homo sapiens
ctcgcgtagccatggcggagccgtcggtcaccgttgaggaggacagctat

SEQ ID NO: 206092 - DNA, 75 bp, Homo sapiens
acatttttgaaaagacaagccatcaaaactgccttcagaagcaaaagacttcacagagaatgcagttgtcttgac

SEQ ID NO: 206093 - DNA, 122 bp, Homo sapiens
ctcagttcctcaaatatgcagcaaagattacaccaagatctgtgctgaccacaggaattggatctactagtgcaggtttcctgtacgctcagaacagcaccaagcgcagcattaaagagcgg

SEQ ID NO: 206094 - DNA, 80 bp, Homo sapiens
acgggaagaagcagctggacccgctcaccatctacggcatccggtgtactccaaagattcaggtttactcacgtcatcca

SEQ ID NO: 206095 - DNA, 100 bp, Homo sapiens
ggggattctcgacctgctaacagaactggaccttttcggattgtcaccagacctgcaatctatggagcagattcggagaattatgagacctactgatgtc

SEQ ID NO: 206096 - DNA, 75 bp, Homo sapiens
cagcggcgccttgcggagggaccccagtaagaatgattgatgttggctgatattggagtgctcattcacatgaag

SEQ ID NO: 206097 - DNA, 98 bp, Homo sapiens
gcgaagcgctggtggcgggcccgggctgcggcgtgtgcgcgcccgccagctgctccggagatacgtatttgactacagtcattccttatgagaaaaaa

SEQ ID NO: 206098 - DNA, 50 bp, Homo sapiens
cccgggacaccgcacagccgggaaatggcttgaaactgttacaatatggc

SEQ ID NO: 206099 - DNA, 75 bp, Homo sapiens
tgcggaagtgcagctgcctcagttcttagcgcagatttgcctgaagacctggataatctccatttttgtcatgga

SEQ ID NO: 206100 - DNA, 100 bp, Homo sapiens
ggagacccccctgacaacatgaaggaaacctgtaggaagtgtcagggactctggaaagaacataatggcctcacctgtgaagagctggctgaaaaagacg

SEQ ID NO: 206101 - DNA, 73 bp, Homo sapiens
tggtttttcggatcatgtctggtggctccgcggattataacaggagaagaaataccacttgcaggagagggtt

SEQ ID NO: 206102 - DNA, 82 bp, Homo sapiens
tggaggtggacaacgtcaagtactgcggctactgcaaataccacttcagcaagatggcttagagtgggacctgaatgtgcgg

SEQ ID NO: 206103 - DNA, 101 bp, Homo sapiens
cccaggtgtaagcgcagaaagcaggcgaacccgcggcgcaataacggtggatccataaagaacccagccaacccgcagagggaggggaggggctgagctgt

SEQ ID NO: 206104 - DNA, 100 bp, Homo sapiens
cccggttccccggcccacagtgggggtgtgcaaacccgagagaactggaagctgccagtaactcagattctagccatgaaggtcaagaggaatcttcaaa

SEQ ID NO: 206105 - DNA, 51 bp, Homo sapiens
agcgaaaccgagatccctcaaagtttcatgaacaggcgtgttatatctgct

SEQ ID NO: 206106 - DNA, 83 bp, Homo sapiens
ccgagagcgcgaatatcgtcatcgttagaagtttaatcccatggaatcaatcaaattaaatcatcatgactacattgattccc

SEQ ID NO: 206107 - DNA, 98 bp, Homo sapiens
cctggcgctgctggctgcgctctgcccggcgagtcgggctctggaggaaaagaaagcaaaatttaccgagtttccgcggaacgtgacggcgaccgagg

SEQ ID NO: 206108 - DNA, 110 bp, Homo sapiens
cagaccctggagcctcagttggaagcagccgatccagcctgcggagcctgtggggcaggatgccaagtttgtggaggaacggagaaagcagctccagaattacctgcgca

SEQ ID NO: 206109 - DNA, 82 bp, Homo sapiens
cctggagcttaaaaagctgcacgcaagtgttaaacttctggtttttctatatgagtggagaagacagctgttaccagggagg

SEQ ID NO: 206110 - DNA, 100 bp, Homo sapiens
cagtcacccagaacccccaccccgagtcaaagcgctgaaatgagccccgcggcagataatctcagtgataccttgaagaagctgaagataacagctgttg

SEQ ID NO: 206111 - DNA, 82 bp, Homo sapiens
gaagagacgagtgcggtaacaccgttcacagagctagccggacgtcctccgactcaaggagtcagaaataccatcagaggag

SEQ ID NO: 206112 - DNA, 83 bp, Homo sapiens
cagaaataccagtccccagtgagggtgtacaaatacccctttgaattaattatggctgcctggtactgtggcgctccgtgaaa

SEQ ID NO: 206113 - DNA, 76 bp, Homo sapiens
cagctggcgagggggtcaccctagagtttgctcagattttcatgttccagctgctccggggcctcgcctactgtca

SEQ ID NO: 206114 - DNA, 75 bp, Homo sapiens
cttcttcagtgtaccagaaatatcttacctgatgaaggagagccaacagaaatatttctcttagaagatgacatc

SEQ ID NO: 206115 - DNA, 75 bp, Homo sapiens
ttgcacttgagaaaattaatgtggcaggaaatgattgaagccatccgcgaagcggtggtctacctggcacacaca

SEQ ID NO: 206116 - DNA, 88 bp, Homo sapiens
tcagagactgaggacttaaatgaagccactgattagcaatttaaagatcctctccaagagcagcccgacggccatggaggctgaagag

SEQ ID NO: 206117 - DNA, 75 bp, Homo sapiens
cgtcaacttctgcgacgaagaaaaaaagagcgacgagtgcaaggaaacctatgagaatatcccaggccagtcaaa

SEQ ID NO: 206118 - DNA, 75 bp, Homo sapiens
gcatctgcttgcctacttcttcacggagctcaaccatgaccaagtgcagaaggaacgaatgcaggaatttgggaa

SEQ ID NO: 206119 - DNA, 83 bp, Homo sapiens
acagaggaatagtctacaaaggaagacttgtaacctggagaagagccttatgccagcctggaccatcttggaggcagtgtagg

SEQ ID NO: 206120 - DNA, 83 bp, Homo sapiens
caagcatggagcaacaggatcagagcatgaaggaagggatgtgtcttgctgaatcagggctctcttatccctgccatcgactt

SEQ ID NO: 206121 - DNA, 90 bp, Homo sapiens
gggaccaggggggcggcagcgctggacacccagcctccaggtggcgacagacaaagttgcagaaaagctgagctctactctctcatgggt

SEQ ID NO: 206122 - DNA, 100 bp, Homo sapiens
agttcctctccagctcagccgcgtagggacttgccatgaggtgttgaagccttgtttcactgagttggagagactggacctaaatggcgcagcatgactt

SEQ ID NO: 206123 - DNA, 88 bp, Homo sapiens
tcaagcagcaggagcagcccgcggcgaccaagatcaggaacctgccctggcagtgctcggaatgtgaccaggcagggagcagtgacat

SEQ ID NO: 206124 - DNA, 91 bp, Homo sapiens
cgagagacagaccccccccggaattctgagcaccaaaagccgcggcgagtcctttgcacatgttggcaacacacgcatccgcatcggcctc

SEQ ID NO: 206125 - DNA, 75 bp, Homo sapiens
catggtcacaaagaactcaagaaaatcttcgaagacttttcaacagtgggagtagctcaccgttacccaagtatg

SEQ ID NO: 206126 - DNA, 122 bp, Homo sapiens
cggacgcgactcgagggtgacgctcgctccgctcgtcccgctcgtcatggcctacccgggatacggaggagggcctctcaacattgcctacagccacatctacagctcctacaggaatttcg

SEQ ID NO: 206127 - DNA, 75 bp, Homo sapiens
acgtgttggaccttccggagcttctcagaagacagagggttttcttttgaggtaggaaatgcagatgtacctgac

SEQ ID NO: 206128 - DNA, 87 bp, Homo sapiens
gtaagttaagatcttcctgaggacaatggcgcaagatcgtcttcagctgttcatagcaagtgggtggacggaggcctcaccaacgct

SEQ ID NO: 206129 - DNA, 100 bp, Homo sapiens
ctaaagaggatcctgccaacattttacagcactttcagaccatgctgaagtctaaattgaatgtcttaacactgaaaaaggaacctctcccagcggtcat

SEQ ID NO: 206130 - DNA, 98 bp, Homo sapiens
agcaaccactattttcttcctgcccctcgttgatgagagcattcgaagtgacctcagcagggcatccaggggaacgcccttttgcttgtgactggcag

SEQ ID NO: 206131 - DNA, 97 bp, Homo sapiens
ggcgacccggtgtgtggcgcgcccagagccccgcgtttcagccctagggaagtgccggtggtggtgtgcacattgagccccggtatagacagttccc

SEQ ID NO: 206132 - DNA, 98 bp, Homo sapiens
cgggagcaggagctgggcctaggtctgcgccctgctgttccaggagctctgagtcctttggccattccaaatgctgctgcagcagctgctgcagctgc

SEQ ID NO: 206133 - DNA, 74 bp, Homo sapiens
ttgagcacggcgagcagtctcaggcctttagtgatgatgaaatcaatgtggactgaacataaatcacctgatgg

SEQ ID NO: 206134 - DNA, 83 bp, Homo sapiens
gcgagagatggagatgggcagacggattcatttagagctgcggaacaggacgccctctgatgctgatcagctgaccgaagaac

SEQ ID NO: 206135 - DNA, 74 bp, Homo sapiens
gggcaacttcgcggtggtcaagcgggccacgcacctcgtcaccaaggccaagaaggctgaggagaatgcagagg

SEQ ID NO: 206136 - DNA, 95 bp, Homo sapiens
gtcgcccgcccagcctccgcccgactgcttctcggaggagtgccgctctgtgatccaggaacaagccgcagctctgggcttggccatgttttctc

SEQ ID NO: 206137 - DNA, 80 bp, Homo sapiens
cctgaggatgaggattcagatgactacgatggagaagaatatgatgtggaagcacatggaaaaatgccagctgtgggaca

SEQ ID NO: 206138 - DNA, 90 bp, Homo sapiens
agtttggcgagtcagtgactgaagcgcccgtccattccaaggtcccacccgaaagatgccccccagcgccagtgccgtggacttcttcca

SEQ ID NO: 206139 - DNA, 100 bp, Homo sapiens
taaacatcacagaaaaacaacgatttatggatggagataagatgcaaccttaaaatcagtgacaagaaacattccaaacaagcaacagtcttcaagaaat

SEQ ID NO: 206140 - DNA, 75 bp, Homo sapiens
cgacattgacaatgatggctttgaagctttaaggaagcctcctatttcagtttctcaacatgaaagtcatcaagc

SEQ ID NO: 206141 - DNA, 74 bp, Homo sapiens
gctcgagctgctgctggattgaactcagagaagccgggattcagtgctcaagagtgaagaaaattctactgtct

SEQ ID NO: 206142 - DNA, 100 bp, Homo sapiens
tccaccttccgccgtccgcgaggatcatgcggccagatgatgccaacgtggccggcaatgtccacggggggaccatcctgaagatgatcgaggaggcagg

SEQ ID NO: 206143 - DNA, 50 bp, Homo sapiens
atttccatgtcaacatagtcctgggtggagccagccatcctgagacgtcc

SEQ ID NO: 206144 - DNA, 51 bp, Homo sapiens
tatgtacctgttaccactttcaaaattaatatgatcctctgttgaagcaag

SEQ ID NO: 206145 - DNA, 118 bp, Homo sapiens
aaagccctaccacaagaagcggaagtatgagttggggcgcccagctgccaacaccaaggcgaccgtgctgtgtgacatcatagtcctctactgcatgaagaaaagactctactatcgg

SEQ ID NO: 206146 - DNA, 82 bp, Homo sapiens
ctgctgcctctgtcactcctggtgaccagcattcaagattcttgaagacctggatgaacaaatttatatcattaccttagag

SEQ ID NO: 206147 - DNA, 100 bp, Homo sapiens
gtggggatctggcactgtggttcctgcatgaagacagtggctggcggtgcctggacgtacaaatacagatccacgggttttagaaaaacaagaattacag

SEQ ID NO: 206148 - DNA, 100 bp, Homo sapiens
ccgggggttcggtgcgtgccccgacggggcgcgcgcgaagcgagcgagaaggcacggagtcgccgcggagcgcaggcttctgcttcagtttacccaacct

SEQ ID NO: 206149 - DNA, 100 bp, Homo sapiens
ttgttatgcagtcgtagataaccagaaaacatcggatttacattttaaggatgtgggctctcttgatgagaagatgaagagcttggatgtgaatcaggac

SEQ ID NO: 206150 - DNA, 75 bp, Homo sapiens
ctcaggtgctagtgcaggagctcgaggagcatcagcgacttttgctcaaaggtgaagaacaccatctactgcaac

SEQ ID NO: 206151 - DNA, 100 bp, Homo sapiens
ctgatgccaacagtgtaccagcagggcgttggctatgtgcccatcacagggctggtgaattaccatatctccgtcaagtgcagtaaccagttcaagttgg

SEQ ID NO: 206152 - DNA, 75 bp, Homo sapiens
gccgctggcagccgcggatctcaccgccgctcagggggccacctacagatgctcctgcagtggacacagcagaac

SEQ ID NO: 206153 - DNA, 98 bp, Homo sapiens
tgagaagctacaaacaagaaatgggaaaactcgaaacagatttttctcatataatggcagcaaaggctgtagcaaatacaatgagaacatcacttgga

SEQ ID NO: 206154 - DNA, 51 bp, Homo sapiens
cttcacctgccgcttggaataaagaaggggcttctttcctgtcgttgttgg

SEQ ID NO: 206155 - DNA, 82 bp, Homo sapiens
gcgccgacgcggggcccatggccaggaccaccagccagctgccaaaacagagtggagtacgagaaaagggtccgagcacaag

SEQ ID NO: 206156 - DNA, 101 bp, Homo sapiens
caggcgtacggtgccaagggattcagcctggcggacatcccctaccaggagatcgcaggattcaagccaaaactcgagaatttagggaacgacaagctcga

SEQ ID NO: 206157 - DNA, 100 bp, Homo sapiens
aacagagatctcttctgttctccactgctaggacttttccagatttctcagaataaagtagcagttcttcttctagctggtgggcaggggacaagactcg

SEQ ID NO: 206158 - DNA, 90 bp, Homo sapiens
gctgggacccccaaaagctgggaaatggaggcaagtgaggcctatctggttggcctttttgaagacaccaacctgtgtgctatccatgcc

SEQ ID NO: 206159 - DNA, 98 bp, Homo sapiens
aggaccttagttcccaacttcaccttcaacttgggcttctcgggcaagttctatcatactgggatgcccgggtagttaaagacatggcaactggaaaa

SEQ ID NO: 206160 - DNA, 100 bp, Homo sapiens
atcacagcaggtccttggaccaaccagctcctccgtcccctgggcattgagatgcctctccagattttcgacaatgaagccaaagacgtggagagagaag

SEQ ID NO: 206161 - DNA, 82 bp, Homo sapiens
ttgacgccatgtcgggttattcgagtgaccgagaccgcggccgggaccgaggaaggcgtccagctcagcgcatgaaggtcgc

SEQ ID NO: 206162 - DNA, 101 bp, Homo sapiens
tgttggccgcagcttctatatccatggactcagtattatcaagcatggcggacaccgacctgttcatggaatgtgaggaggaggagttggagccatggcag

SEQ ID NO: 206163 - DNA, 75 bp, Homo sapiens
ctaactaaaagaatactccttttggaaaagctccagcagtacccgcggctacgggaggagatggagcgcatcgtg

SEQ ID NO: 206164 - DNA, 101 bp, Homo sapiens
tcgtgcactttacacacatgagggaccagttactctccacaagaaaattcacacaaccacagtgctcttcatagttcaaattcacattcttctaatccaag

SEQ ID NO: 206165 - DNA, 99 bp, Homo sapiens
gcctggagagtcgtgcggacagcattgggagcggccgagccatcccaattaaacagctgcagaaccttggcctgaaaatgctacattatatcagcaatt

SEQ ID NO: 206166 - DNA, 74 bp, Homo sapiens
tgcaccctccttccacctggccaggaatcaggtcagcctagcaacaaagaagatgtggatgatcttgtgagtca

SEQ ID NO: 206167 - DNA, 87 bp, Homo sapiens
catcatccataccaaggagacgctgacacttgtgtttgaatatgtggttaatttggagtggcccctggagtcagtttcctacaccat

SEQ ID NO: 206168 - DNA, 100 bp, Homo sapiens
gtgtttcactgtgaggcacacagaattctctacatttgtgaaagtcagtttctgaggaatttcatcaggtttgtccagaggggttgcgtttatccggttt

SEQ ID NO: 206169 - DNA, 98 bp, Homo sapiens
taagatgccaggaccccctgaaagcctagacatggctgaacaagctccaaacacttgtgaatgtcatgtttgtaagcaggaagcttctggactgacac

SEQ ID NO: 206170 - DNA, 82 bp, Homo sapiens
cccgaagccacacagaagtgaaggcagaggtggaggagacactgaagcgactgcagagccagaagggagtgcagggaatcat

SEQ ID NO: 206171 - DNA, 74 bp, Homo sapiens
tgggattactggaacaagcagctgcttccttctctatgttttttgctccactcaagcctgttagaatcaccatg

SEQ ID NO: 206172 - DNA, 98 bp, Homo sapiens
tgggatcgaggcctcccctggccagaagcggcccctgtggctgtgtaagatctgcagtgagcaaagagaggttgccaggcaggaggggaggatcattc

SEQ ID NO: 206173 - DNA, 100 bp, Homo sapiens
gctcaagcaatcctaccatgtcagccttcccagtagctggaactacaggttgtcctggtgacagacggctgtcttggcattggtagagggtcactgcgac

SEQ ID NO: 206174 - DNA, 75 bp, Homo sapiens
ctcttgatggtttctatagagcctggcaccaagtggaatattacagtttttggtgttgagccagacttgaccagg

SEQ ID NO: 206175 - DNA, 82 bp, Homo sapiens
gcctgcacagccgcggcggcagcagcagtgagagccctctggaccccgaggttggaccctactgtgacacacctaccatgcg

SEQ ID NO: 206176 - DNA, 83 bp, Homo sapiens
gacttgactcttcaaacacaaagaggagaaggcagagcccccccaggctatgaatgccctgatgcggttgaaccagctgaagc

SEQ ID NO: 206177 - DNA, 100 bp, Homo sapiens
tcgacccccaggaaaggaaaaacccacaaacatgttcacaacgggcatggtagtcagatgcctccgcagccacccgggagccagtcagaatccagttccc

SEQ ID NO: 206178 - DNA, 75 bp, Homo sapiens
ggtggaggtggtgtccccactgagctcttggaagagaggtaactaggatttctacctcaaccgcgagacctatgc

SEQ ID NO: 206179 - DNA, 96 bp, Homo sapiens
cagcgagtaaagtcttggacagacttaaaccagttataggggtaaacactgatccagaacgattccaagaaggtctaaagaagaccaaagaacttc

SEQ ID NO: 206180 - DNA, 101 bp, Homo sapiens
gcgcgccccggatgtggcgcggctgcgcgaggagcaggaaaagggtgataaaagaaaatgtggctgaagttacccgaagttcagcttgcagtgtaattcag

SEQ ID NO: 206181 - DNA, 75 bp, Homo sapiens
aaggcctaagaattttggcattgctctggcagaattcacagaggcagatgaagcaatggcagaactcgcaattgc

SEQ ID NO: 206182 - DNA, 110 bp, Homo sapiens
gggacaagtactggaaccgctttcgagaccataaagccaaggtagaagcaatgaccctggacctcgctctgctccgtagcgtgcagcattttgctgaagcattcaaggcc

SEQ ID NO: 206183 - DNA, 82 bp, Homo sapiens
ccggcattcgagaacagcttgatgcggagctccttcgctattctgagaggactatcggacaaaacctttctgctgcagcgct

SEQ ID NO: 206184 - DNA, 50 bp, Homo sapiens
gcgctgccgaggagaacccagcggatgcaaataatacggcactccgaaca

SEQ ID NO: 206185 - DNA, 100 bp, Homo sapiens
ttgctggtaaaacaggaaatgggttctgggaggtgatcagtgatgaacatggcatcgaccccaccggcacctaccacggggacagcgacctgcagctgga

SEQ ID NO: 206186 - DNA, 75 bp, Homo sapiens
gggcatgaccggaaaggccaaggaattgaaagatgttggccatcgtgatcagatggctgcagctagaggaatcct

SEQ ID NO: 206187 - DNA, 100 bp, Homo sapiens
gtttggggctttcgacatgacaggtcactagaggtcctgggaactccaacaagggagcaaatcagagaaatgaacccaaactacacagaatttaaattcc

SEQ ID NO: 206188 - DNA, 100 bp, Homo sapiens
gaatgatcctgaagcctcaaagtttcatgtataaggatgcatttatgaaagcaaatcctggctacaaatggtgtcctaccacaaacaagcctgtgaaatc

SEQ ID NO: 206189 - DNA, 98 bp, Homo sapiens
gacaactctcacacagattcggctgcagatactcacagatgcctaccttaatgcctctgaaacaaccactctgagcccttctggaagcgctgtcattt

SEQ ID NO: 206190 - DNA, 100 bp, Homo sapiens
agaatggcatccagagagaggctctttgaactttggatgctttattgtacaaagtcactccatggattcctttgggcaacccagaccagaagataatcag

SEQ ID NO: 206191 - DNA, 80 bp, Homo sapiens
gagatggagatgggcagacggattcatttagagctgcggaacaggacgccctctgatgcaccgcatcagcctgctcaacc

SEQ ID NO: 206192 - DNA, 74 bp, Homo sapiens
gcgatatggaagaggagggcaagaagggcaagaaggtcattatccagctcaggaaaacctgatgttccttgttc

SEQ ID NO: 206193 - DNA, 75 bp, Homo sapiens
attcgttacagccagagattgatgctgaagttccgaacagtccatgggggcctgaggctcctgggaatccgccga

SEQ ID NO: 206194 - DNA, 98 bp, Homo sapiens
cgcggggtccgcggcgcgcccggcccgggtggagccccctgagctgcccgctgatctgcagcactggatctcctacaacgaggccagcagccagctgc

SEQ ID NO: 206195 - DNA, 100 bp, Homo sapiens
cccagaggagagttctccaaacatgatcgtttactgcaaaatgccttgaacctccgaaaccgacaggtcatctgtgtcactctcaaggtcctccagcatc

SEQ ID NO: 206196 - DNA, 75 bp, Homo sapiens
aatggttagagaagaattttccaaatgaatttgcaaaacttactgtagcatgcatgagtgaagagaccagtaacc

SEQ ID NO: 206197 - DNA, 85 bp, Homo sapiens
gggtggagacaaccacgcatccgatgacttctttcggaagctgagagacatcgccaggaaggtggtgaaggcatttgtgatcctg

SEQ ID NO: 206198 - DNA, 99 bp, Homo sapiens
gacatactccctgaagctgaagaaagcgttggtaacggaaagcgacctgtaaaacaagaaccaagtacgctggaagccgccttgcagggggcaacactg

SEQ ID NO: 206199 - DNA, 74 bp, Homo sapiens
tctaacgctgcctttgctttaaaacagtattacttgcggcctccccatggccacccatggaccagtcggcattc

SEQ ID NO: 206200 - DNA, 87 bp, Homo sapiens
gtgagaaaaagatctcgatacttgaggaaccttcaaaggcacttcgtggggtcacaggacgtggtgggtcctctggtgcgaaattcc

SEQ ID NO: 206201 - DNA, 75 bp, Homo sapiens
tcttggcttctgaggcatctgacaaggtgtcttcaaaaacaaacatatttaaaagattttacttctcatctccag

SEQ ID NO: 206202 - DNA, 97 bp, Homo sapiens
ccggccagaagcgggcggcgcgggggagatggcttcctgtttgggctgaaaggagcaaaaggaagagcaggcttccctgggcttcccggctcccctg

SEQ ID NO: 206203 - DNA, 103 bp, Homo sapiens
gacgacttcaactatggcagcagcgtggcctccgccaccgtgcacatccgaatggaaagcagaagccactggagaaaaacggccaagaggcagacctaggaaa

SEQ ID NO: 206204 - DNA, 100 bp, Homo sapiens
ctgtgccttgcttatgtttgttaggaccaaacctcaaagcatggctaagagtgttcagtagaaatgggagtagctcggagaggaggaaggagaagtcccg

SEQ ID NO: 206205 - DNA, 50 bp, Homo sapiens
tgagtcgcatcttcaacccccatctcttagaccatgctcagcctccaagc

SEQ ID NO: 206206 - DNA, 100 bp, Homo sapiens
gctacctcgggctcgggctgatgtcggcacgcctggcgatcctgggcggcgtggaggggcagcctgttacacaacagccaatgcggagtctgacaatgag

SEQ ID NO: 206207 - DNA, 100 bp, Homo sapiens
tcatcctccacagctccagggaaggcactcaaaagtggggggcaggaaaggtattgctattaaggagtcagcaaaagtgggtgatcaagctcaaaggagg

SEQ ID NO: 206208 - DNA, 86 bp, Homo sapiens
ggatccagagcgccgcgcacttcgtcatgttcttcgcgccctgtttggtgccctggttgtcagatgttggaaagcagtaggacgga

SEQ ID NO: 206209 - DNA, 100 bp, Homo sapiens
ccgtgtggttcttcatcgtgctattcctggtctacatcctgcgggtgcctttgaaaatcaacgacaacttgagcacagtgcttaaaacaatacttcaaga

SEQ ID NO: 206210 - DNA, 83 bp, Homo sapiens
cccgcctgcgatggggcgagaaaggtcccactgcagccctccaagcagagctcaggccccggggcctccagcggcaccagcgg

SEQ ID NO: 206211 - DNA, 75 bp, Homo sapiens
atcctcagctttatgtcctacgacgaaattagccagctccgcctgatataattgaccctgcaatcctgcgcccgg

SEQ ID NO: 206212 - DNA, 74 bp, Homo sapiens
cgtctgcggaagtgcagctgcctcagttcttagcgcaggtgcaatggatgagcttcatagtctggatccaagaa

SEQ ID NO: 206213 - DNA, 100 bp, Homo sapiens
caatccagtacttcaacaacaaggtcgtctgtgacctcatcgaaaacaagctggtatcactaccattaaagttaacattcgtaatgccaattccctggga

SEQ ID NO: 206214 - DNA, 74 bp, Homo sapiens
tgacccctgccctcgtgtgcctcagtcagctgctcaccaagctctgaccacaaagccgagctctctgtcctggc

SEQ ID NO: 206215 - DNA, 98 bp, Homo sapiens
tgaactctcagtggtcctacctggggatattatcaaatctactactgttcatggcaggtggtaatcactcaaggaaaaggaattatcagagtaacaat

SEQ ID NO: 206216 - DNA, 74 bp, Homo sapiens
ccgaagccccctgcaggaactctacaacccaatccaggccgactcgcgggccgctgcacccaccgccaaggaca

SEQ ID NO: 206217 - DNA, 100 bp, Homo sapiens
ctggggaagaaggtccgcgttaaatgtgtcctgtggccaggcggaaagcagtgagaagcccaacgctgaggacatgacatccaaagattactactttgac

SEQ ID NO: 206218 - DNA, 75 bp, Homo sapiens
attgacagctatgtggctctcagataatcagagcaaatttttcagaacataaaacaagaatatagtcgttatcag

SEQ ID NO: 206219 - DNA, 75 bp, Homo sapiens
ctgagaagagaagtggagcaccaggagactgcctatgcttcagaggatgattccgaagaagacggagaccataac

SEQ ID NO: 206220 - DNA, 100 bp, Homo sapiens
atttacttaacacatcatgaaggctagtttggatgtggaggggaatagactccatctatccatatgaggtagacgttacatccaagaggaaataatccag

SEQ ID NO: 206221 - DNA, 131 bp, Homo sapiens
gcctcctggacgcgtcggcggaggtggcttcgtcccgcggagtccaggcttcagggcaggatggcagcagatgaaagctcacagaacactttgcggctccagttcaaggcaatgcaggagatgcagcacaa

SEQ ID NO: 206222 - DNA, 74 bp, Homo sapiens
cctgaatcttggtgtttggacataggagatgagttttgatcatcctgagaaaaatgggccttggcctgcagacc

SEQ ID NO: 206223 - DNA, 93 bp, Homo sapiens
cgccagcctctcgggcatcgggcaggaactgggcgccggcgcttacagcatgaggtttttctatatgagtggagaagacagctgttaccaggg

SEQ ID NO: 206224 - DNA, 98 bp, Homo sapiens
tgaatacatgatttaaacaagagatttccacagaagattcctacgagaagcaacaggcacaaggctctggtcggaaaaaattactgtcttctactcta

SEQ ID NO: 206225 - DNA, 100 bp, Homo sapiens
gctcatcgtgatcccggcgacatactacctctggccccgagatcagaatgccgagttcacccagggcatgatcttacctacaatgaatggagagtcagta

SEQ ID NO: 206226 - DNA, 75 bp, Homo sapiens
cggatctcttcgtctttgcagcgtagcccgagtcggtcagcgccggaggacaatgaggagcccccagctctgccc

SEQ ID NO: 206227 - DNA, 71 bp, Homo sapiens
gcgccttgcggagggaccccagtgattgatgagatttatcgtgtgttgagatatgtcaattctaccagagc

SEQ ID NO: 206228 - DNA, 98 bp, Homo sapiens
caaggacagggggacagggctctgtctcgcacttcccagttggaatcaactggactcggccttagtagtagtagactaagaacaactctaaacagaat

SEQ ID NO: 206229 - DNA, 91 bp, Homo sapiens
ctggtgcagaggatcctggaggcctgggaagccaacgaccacacgcaacaatgcagatcttcgtgaagactctgactggtaagaccatcac

SEQ ID NO: 206230 - DNA, 89 bp, Homo sapiens
taaagaaggaaaaagcagtaaagccagaggaaggttcttctgtgtggcagttcagaatgatggatcaagctagatcagcattctctaac

SEQ ID NO: 206231 - DNA, 51 bp, Homo sapiens
cttcttcgagtatttgtagaagggaaagattctgaagcttggcggagaggg

SEQ ID NO: 206232 - DNA, 80 bp, Homo sapiens
gagctcagacctgccaatttaccagagataattgataacaccctgtaacagctgaacgtgaacttatgaattcaacaggt

SEQ ID NO: 206233 - DNA, 90 bp, Homo sapiens
gtcagtaactaaattggagaaaagcattgatgacttagaagggaaagaatatggcaaagctgatgcaagatgggtttattttgatccaac

SEQ ID NO: 206234 - DNA, 75 bp, Homo sapiens
aaactccagcgtgtctccagccgtgttacagcaattggaacttgcacagatacagcatagagacgctaatctcac

SEQ ID NO: 206235 - DNA, 75 bp, Homo sapiens
ccaaatctgtgtccttcactgtgaagtcaggagtattgctatgcagaaccaaatcaacacaaacccagagagtcc

SEQ ID NO: 206236 - DNA, 89 bp, Homo sapiens
gtgggggttatggtgggaggagccgatactgagcttcttcctatttgccatggacggcaccgaaagcgaaggaagctcctgctcctcct

SEQ ID NO: 206237 - DNA, 74 bp, Homo sapiens
agaagacagcggaactaagaaaagaagaggcctgtggacagaacaatcatggtagatggacttctcttctacca

SEQ ID NO: 206238 - DNA, 83 bp, Homo sapiens
cttctaccagcccatgcccctgaaggcctcgctggagatcgagtaccaagagcaggccgggctctcgccatgggtcactgtcg

SEQ ID NO: 206239 - DNA, 74 bp, Homo sapiens
cggccctatgccgggggtgccgctcaggcccagctactccagacttctatgctttggtggcccagcggctggaa

SEQ ID NO: 206240 - DNA, 148 bp, Homo sapiens
ttccctgatgaaaaagaagataacttgctgggtaccacatgcctgattgccacagctgtcatcacgttatttaatctttttaaacggagaaatgtggagctgattaatgaagaagctgccatgttcgatagtcttctcatggactctt

SEQ ID NO: 206241 - DNA, 95 bp, Homo sapiens
gtctgagtcggagctcggcaggaagtgggaccggtgtctggcggatgcggtcgtgaagataggtaagaatgattgatgttggctgatattggagt

SEQ ID NO: 206242 - DNA, 75 bp, Homo sapiens
cagatcgaagccaagtgctcagcaaggccatcatgcagaagggggatacaaacataaagcccatcctccaagtca

SEQ ID NO: 206243 - DNA, 100 bp, Homo sapiens
attgaccaggtgaatccagagctccatgacttcatgcagaggcaactcatgcagcaattccagaaccccgacttcccacccgaagtagaggaacaggatg

SEQ ID NO: 206244 - DNA, 100 bp, Homo sapiens
cgacgtcttgcctgtgtcccacttgttcgcggcctatagaacccagcgggtgccgcttctccacccgaggcttccacctccaacgagccatgttccaggc

SEQ ID NO: 206245 - DNA, 88 bp, Homo sapiens
caaactcccaggctcaagcagtcctaccatgtcagccttcccagtagctgggaccacagacgataacagcaaccagagctccatcgca

SEQ ID NO: 206246 - DNA, 88 bp, Homo sapiens
tggcgggaaaaagaggccaaagatctgacagaactggttcagcggagaataacatatcttcagatgaaatacctgtcacaaagagaac

SEQ ID NO: 206247 - DNA, 100 bp, Homo sapiens
aggggagtcatcatgagcgatgttaccattgtgaaagaaggttgggttcagaagagggaaataagcgggttttgaaaacaaaaaaaagaaggagtggaag

SEQ ID NO: 206248 - DNA, 100 bp, Homo sapiens
tgccagctctggaaaacctgcaagcagcttttggagacagccgaacggcgtttgaatagtagccttgaaaggcgggcaatgccctgccctaaggaagaca

SEQ ID NO: 206249 - DNA, 75 bp, Homo sapiens
cttcactccagtgcctccgacgcctcctgatggccctgggaggagcggggacactgaggacctctctccaaattg

SEQ ID NO: 206250 - DNA, 100 bp, Homo sapiens
cgaggctcgttcttagcttcgacgaggagaagaggcggtaaagaagcagattttagatgaaaagatctactgccctcctgaggcttctgtgctcctggct

SEQ ID NO: 206251 - DNA, 74 bp, Homo sapiens
cacgctactactttgggtgctgtgaaatgcaagctcctgaaactctgatgagagccctggaacttttgaattac

SEQ ID NO: 206252 - DNA, 82 bp, Homo sapiens
ggcggcagccgaggccgcgaactgcatcatggaggtactccaaagattcaggtttactcacgtcatccagcagagaatggaa

SEQ ID NO: 206253 - DNA, 75 bp, Homo sapiens
tggcaatgtggcagccctgcctggaattgttcatgcctgcacagctgaccacagttgggaaacgttgctgtcttt

SEQ ID NO: 206254 - DNA, 90 bp, Homo sapiens
caagcaccagctccacgtgtcgccttacgttgccaggtgtgggaaatgctactgcctgtgtcttacatgatgttatctacgtcattggtg

SEQ ID NO: 206255 - DNA, 95 bp, Homo sapiens
cagaaaaagaagaagcggaaacaacgttctcccgcaaaaccaagggaagagatggtgttgagtggaaaatacaaatctggggaacaaattcttcg

SEQ ID NO: 206256 - DNA, 75 bp, Homo sapiens
ctgctcctggctacatagctccaggtctgccaaaatgtctgaaagatcagatctccttcacttcaagtttgaaaa

SEQ ID NO: 206257 - DNA, 100 bp, Homo sapiens
ccgcggggaggaggagcgggcgagaagctgccgccgaacgacaggacgttggggcggcctggctccctcagaaagcaaggagatggccaccaaggagaag

SEQ ID NO: 206258 - DNA, 100 bp, Homo sapiens
cgatctatgcacgcagatgctggagaagtccccttatgaccaggactcaggtacttctgccctccctttggtctccctgttcttctatgtggtgacagat

SEQ ID NO: 206259 - DNA, 100 bp, Homo sapiens
aaaataattctgaaactggagagttacagcctgtactacctgaaggagcttcagctgcccctgaagaaggaccgagatctcactcagcagacagcagcag

SEQ ID NO: 206260 - DNA, 100 bp, Homo sapiens
cgccaactccgctgcctttgccgccaccatgcccaaaacgtgtactaaaggaagtataccaagcctttaatcccaaagcagtggtcttacagctgggagc

SEQ ID NO: 206261 - DNA, 74 bp, Homo sapiens
agaaaaactggatgttggtagaaaaagcaagagtttgttatatagcagtcctggatgcctcatcccttagtttc

SEQ ID NO: 206262 - DNA, 80 bp, Homo sapiens
ggattctcgacctgctaacagaactggaccttttcggctgcaggccaacttcaccatccgggaagatgccaaccccagct

SEQ ID NO: 206263 - DNA, 100 bp, Homo sapiens
gaaaaagttggaaattggaattttgatatctttctatttgatagactaacaaatggcagaatccagagaccacatttgaagtatatgttgaagtggccta

SEQ ID NO: 206264 - DNA, 75 bp, Homo sapiens
agtgggctaccataaacacatcaccttgatttttaatcccacggagtagctatccagatcacaaggaaggggagg

SEQ ID NO: 206265 - DNA, 75 bp, Homo sapiens
cattgcaggaagtggatgagttccacctcattttagagtatcaagcagtattgaaatggctgatggcaagtgcag

SEQ ID NO: 206266 - DNA, 90 bp, Homo sapiens
tgaagattcaccaaataagctatatactttggttacctatgtacctgttaccactttcaaaagttttttgcatgtctgacacccatgact

SEQ ID NO: 206267 - DNA, 87 bp, Homo sapiens
cgcgagtgaggaaaggaggtactgtagacccctcttcagtgaatgaaaagaagaggagggagcgggaagaaaggcagaatattgtcc

SEQ ID NO: 206268 - DNA, 74 bp, Homo sapiens
gcgaatatcgtcatcgttagaaggaaacttcctcctggccaaccctgtgtctggcagccccatcgtgacgggtg

SEQ ID NO: 206269 - DNA, 83 bp, Homo sapiens
ctggcttacaaattggattgagaatgaagagttgagtatcttatatccagctgccattgtgactattgatggatttagccttt

SEQ ID NO: 206270 - DNA, 51 bp, Homo sapiens
cagccgagaacgagctcaaccagatcagccaaatggccgatgacacagtgg

SEQ ID NO: 206271 - DNA, 124 bp, Homo sapiens
cggacactttgttattggagaaacatgcagattatatcgcatcctatggctcaaagaaagatgattattgttattaaggaaaagcgggatgcctatgtgagccgcctgaatgccatctatcaaa

SEQ ID NO: 206272 - DNA, 100 bp, Homo sapiens
tgcatttttacactggacagcactttaatattcctgccatcacaaaagctggacaagcgaaggatatgggccctcacattttccaaacctgtccatctgc

SEQ ID NO: 206273 - DNA, 75 bp, Homo sapiens
gtgattctgttggactggcaaaacagatagctttgcatgctgaactgatgcttgctctgtcaaggcacagcctat

SEQ ID NO: 206274 - DNA, 100 bp, Homo sapiens
caacagtcagctcaagccagacacatgactatgatttaatctccaaagaaccaaagccttttgtatttgagggaaaagtacgtggtcctattgttgttcc

SEQ ID NO: 206275 - DNA, 89 bp, Homo sapiens
cttccggctccgtcgtggaagcaggactgcgccgcgtcttcctcaagatgccatggacaatattaccaggcagaaccaattctacgata

SEQ ID NO: 206276 - DNA, 90 bp, Homo sapiens
cgcggccgcggagacctacctgcggcgtcggcagctgctgctccgagatgttctcaaatagtgatgaagctgtaatcaataaaaaacttc

SEQ ID NO: 206277 - DNA, 74 bp, Homo sapiens
cctcgctgcatccccattgtgcaactgccagtctaaaaattgatatagctccttgacctgtttatggtttggga

SEQ ID NO: 206278 - DNA, 75 bp, Homo sapiens
tgagtgtccagtctccagcttcgtgggtgcctggaggcaggtgcggaggttatgaagacagtatggagtttccag

SEQ ID NO: 206279 - DNA, 74 bp, Homo sapiens
tcctcaaagagtacaaagatgtgttacaagacaagtggctcagtgcaaatgtgcaaaaaggtttcaggtggagc

SEQ ID NO: 206280 - DNA, 100 bp, Homo sapiens
tcctcacatgcataatatagttgaggtattgaagcccctgggtgataatttgatggaggaaaacataaggcagtctgtaacaaactctatcaaagcaggc

SEQ ID NO: 206281 - DNA, 71 bp, Homo sapiens
aagcctcctgccgagataaagccaccacgtctgcttctcaataggtttggcatggacaagatctatgaagg

SEQ ID NO: 206282 - DNA, 87 bp, Homo sapiens
caccaaggcggtcaccaagtacaccagctcgaagttaagacatcagaattttatagatactcccgacagctccgttacgaagttgac

SEQ ID NO: 206283 - DNA, 90 bp, Homo sapiens
gtgactatttgtttgaacctcattcaggggaagagtacactcgagatgaaggattggtggtgatcctcaggaaatgggggaagaggcaga

SEQ ID NO: 206284 - DNA, 75 bp, Homo sapiens
gacaactaagcgaggggatcctcatgagttaagaaacatatttctacagattcaattagcagagcctcacagaca

SEQ ID NO: 206285 - DNA, 100 bp, Homo sapiens
ccgcgcggggacgacggcggccatgagctcgcggaagctgagcgggccgaaaggcaggaggctcagagctgtaggtaaaacttgcctactgatcagttac

SEQ ID NO: 206286 - DNA, 74 bp, Homo sapiens
gttgggaactcagaccgtaccttgcaacaaggttagcatggcctcattgaaagaactagatcaaagactctttg

SEQ ID NO: 206287 - DNA, 83 bp, Homo sapiens
gcagcccccggccgcagcgcaggcagcccagcaggttgatgccggcccaggatggatcagacctgtgaactacccagaagaaa

SEQ ID NO: 206288 - DNA, 50 bp, Homo sapiens
gacatcctggaagctgggaaatggtgatactatcaaccaaagcaccctgc

SEQ ID NO: 206289 - DNA, 100 bp, Homo sapiens
cccaactctacttccctctgctccttcccaggttgcactgctgtgatccatcctcatctcctaaagatgcatcctgacttatctccacacttgcacactg

SEQ ID NO: 206290 - DNA, 49 bp, Homo sapiens
ccagccccagccccaagggcagagaataacctccatctcctgggtccca

SEQ ID NO: 206291 - DNA, 50 bp, Homo sapiens
aagagcagtaagggactgagctgctgacttagaaggttttgactccgtgg

SEQ ID NO: 206292 - DNA, 83 bp, Homo sapiens
cctgggcgctccggtggcggcggaggagaagaaggaagttgtggaagaggcagaaaatggaagagacgcccctgctaacggga

SEQ ID NO: 206293 - DNA, 75 bp, Homo sapiens
cggaattcactgtaccagcatattaaagtccacacagtaagtggaaaaggcaagactccacttcgaaagaggtac

SEQ ID NO: 206294 - DNA, 90 bp, Homo sapiens
tctcggagccggcgcgaatccggcccccgcagcgggacccggctctcatttcactcttcagtgttcctgttatttatgaacggcatcagg

SEQ ID NO: 206295 - DNA, 100 bp, Homo sapiens
ccatcaggggccttgataacacagagtttcaagtgatgagccctcctcttcagctaggaaaatgacggtgttcagaaagttaaaacttcttcgctggaag

SEQ ID NO: 206296 - DNA, 100 bp, Homo sapiens
agagacctaactgtacgtgaaactgtcaatgttattactctatacaaagatctcaaacctgttttggattcatatgtggatatcttgacctacgtggctt

SEQ ID NO: 206297 - DNA, 100 bp, Homo sapiens
tgaccggatattcagttgcacatccccacatcaatgcactgccaatggagtcagaaataccatcagaggaggggtactgtgactttaatagtaggccaaa

SEQ ID NO: 206298 - DNA, 96 bp, Homo sapiens
acccctcctggttcaacgaggcatggctccagggcatctcggaagatccaggtcccaactggaagctgaagaaaccagcctggacaccaagtctgt

SEQ ID NO: 206299 - DNA, 75 bp, Homo sapiens
gtcaatgtcaccttcaccagcactcctgcaaaatcttccttattctgaaaagatgacagttttgtttgtctacaa

SEQ ID NO: 206300 - DNA, 100 bp, Homo sapiens
aggatgtttccaagaggaggcaataaagtgcatggtcagctggttaagatgctgctttatacagaggtaactcgctatctggattttaaagtgactgaag

SEQ ID NO: 206301 - DNA, 75 bp, Homo sapiens
cagacaggtggcgacggcagaggaacctgcctagagctggaacgttacctccagagcgagccctgctatgtttca

SEQ ID NO: 206302 - DNA, 98 bp, Homo sapiens
tccgttatctgcaggtattgggagatgcacagctaagatgccaggaccacctggaagcctagaaatgctacctggcctatcgaaactttatgattgac

SEQ ID NO: 206303 - DNA, 50 bp, Homo sapiens
tgagtgcggatttctgctatgatgacagccaactgtcaagtctgttcggc

SEQ ID NO: 206304 - DNA, 82 bp, Homo sapiens
tggaatattgcaggtgcctttagagctagagatgatcgctatggaaaatcctgcagacttgaagaagcagttgtatgtggaa

SEQ ID NO: 206305 - DNA, 96 bp, Homo sapiens
ggaagcttagcccgccgctgccgcctccgagcagcccgccaggaattgaatgatctggcacgggaccctccagcacagtgttcagcaggtcctgtt

SEQ ID NO: 206306 - DNA, 50 bp, Homo sapiens
ggcccgcagtcctaccccattgtgacagttgggccggtgcacaaacagcg

SEQ ID NO: 206307 - DNA, 75 bp, Homo sapiens
ggttccatcatggcgtcaatgcaggaccaagaatcgccttcagccctgtctggtgcatccttggcagaaagtgag

SEQ ID NO: 206308 - DNA, 75 bp, Homo sapiens
ggaggaagagtgggagtttgccgcccgagggggcttgaagggtggtctgtttttctggggggccaccaacacctc

SEQ ID NO: 206309 - DNA, 75 bp, Homo sapiens
agtcggcgccccagagcggacgaggtaattgctctagcagatgcagtggaggaaaaccaaggcaatctgttccag

SEQ ID NO: 206310 - DNA, 100 bp, Homo sapiens
ccaaataagttcagatcttcttcaagatacttttgtggaactctatgggaacaatgcagcagccgagagccgaaagggccaggaacgcttcaaccgctgg

SEQ ID NO: 206311 - DNA, 101 bp, Homo sapiens
actgagagccctggtttggtcaacagttgggctccaaggaatcaaaggatgaacagtggaaacgagctatggattatttaaacgttgtcaatgagctcaac

SEQ ID NO: 206312 - DNA, 88 bp, Homo sapiens
ggcccaggcgccgcggcgaggagcgagcgctgcgaggtggcggcctgagctctgaagagactgagggactcggccaatgccaatgatg

SEQ ID NO: 206313 - DNA, 75 bp, Homo sapiens
tcaactccgatacacaggagaaggccatcaggactggaagggctccgtaggcaccaactgcaaggacccctcccc

SEQ ID NO: 206314 - DNA, 75 bp, Homo sapiens
cttcgatgagctctcggattccttatgcagagtggccgacttggagctgcttggagatgctgctgtggccactgc

SEQ ID NO: 206315 - DNA, 90 bp, Homo sapiens
gccggcgtggagagccgccagggctctatcaaggggctggtgtactccagcaacttccagaaggaacccagccagccggcggaatgcaag

SEQ ID NO: 206316 - DNA, 75 bp, Homo sapiens
gtagggaggcattgcaaaagctcattgacgatcaagatatcagtgagatttcaatggaaaaagtgaaggtaaagc

SEQ ID NO: 206317 - DNA, 98 bp, Homo sapiens
cgcttttttacctgccaatcaaactgctacaagacaacaccctgatctggcatggacatagccactccatccccaaattcaagattagaaagatccct

SEQ ID NO: 206318 - DNA, 82 bp, Homo sapiens
atggatgcttgttggatgaattaatgaaccttgacccacaccaaggtgtggacactgccagcggctgcagccgacttggaat

SEQ ID NO: 206319 - DNA, 75 bp, Homo sapiens
gattctgaggcctcaccagccatgtggaactagctgccaaatgctgttaaatcaactgagagaaatcacaggcat

SEQ ID NO: 206320 - DNA, 121 bp, Homo sapiens
agtggttacaagtacagactctggagccagactgcctgggtttgaattgtgcggtttcaggtttttcgttggaatatacgttgcacatttatggcgattctgagtgtgagggcagacttct

SEQ ID NO: 206321 - DNA, 113 bp, Homo sapiens
gcgggagcccaggagcctgccccgccctggggacgaagagctgcagctcctcctgtgcgggctcttgtcaggatggtgaagctgttcatcggaaacctgccccgggaggctac

SEQ ID NO: 206322 - DNA, 80 bp, Homo sapiens
cggggtctgggttctggtgccgcgcagctttccccgagcagtcattatggcgaaccttggctgctggatgctggttctct

SEQ ID NO: 206323 - DNA, 96 bp, Homo sapiens
tgtaaacagcatgacgtgaggccgtggatgcaggcattaaggtgtcatggagaaactccagctgggcccagagattctgcagcgggaaaatccaag

SEQ ID NO: 206324 - DNA, 50 bp, Homo sapiens
ggaggtggcggcggcgggaagatatctctggaaacatggctacagaacat

SEQ ID NO: 206325 - DNA, 100 bp, Homo sapiens
tgcaagattgtggtgcacacgccctgcatcgagcagctggagaaggtctctggacctctgactgacactgtgcctgcccaggtccctgtatgcactgcca

SEQ ID NO: 206326 - DNA, 100 bp, Homo sapiens
ggatgagcaatcacaaggaatgcaagggccacctgttcctcagttccaaccacaggcttgcagccaatttactggagcagggatgacgtagcccagtggc

SEQ ID NO: 206327 - DNA, 100 bp, Homo sapiens
gcaaccccaagtcaccacaaaaacctatcgttagagtcttcctgcccaacaaacagaggacagtgggttcacctttagatgttcttaaagatgaaagggt

SEQ ID NO: 206328 - DNA, 50 bp, Homo sapiens
gatgaagaagaaccaacttcagcaggtggtatcacggaaaacttgacaga

SEQ ID NO: 206329 - DNA, 100 bp, Homo sapiens
aggagaggagcactttgaggacatggcctccgacgaggacatatgtgaagttcatttccaatccgccctccatggtggcagcggggagcgtggtggccgc

SEQ ID NO: 206330 - DNA, 75 bp, Homo sapiens
ccatcttcctggagaagggctttgagcgcgagaacatgctgtttgagagcatccaggagggcaagtacgagttcc

SEQ ID NO: 206331 - DNA, 99 bp, Homo sapiens
gtgttcactctgggtgactgtgacgtcatccaggcctttagccgggctcatcggattggccaggccaacaaagtgatgatttaccggtttgtgactcgc

SEQ ID NO: 206332 - DNA, 90 bp, Homo sapiens
tctaaacggactcatgtactttgtcaggttaagcaaccttttccacgggatggataagaatactcctgtaagatacacagtgtattgcag

SEQ ID NO: 206333 - DNA, 74 bp, Homo sapiens
gtagcagacactgcaaatgaagctctcgaggctgctaagagactaagcttgcagccaatttactggagcaggga

SEQ ID NO: 206334 - DNA, 100 bp, Homo sapiens
gagacagcccaaatatcctcggaagagcgctcccaggagaaacaagaccgtataatagacgctggccccaaaggaaactactctcgatttatgaatcaca

SEQ ID NO: 206335 - DNA, 100 bp, Homo sapiens
cagcagtcctgggcagtggggagtggtgagctccattgtgtacacttggaagcagcccagaaaggttaaacactttaagatgagaaaaattgatctctgt

SEQ ID NO: 206336 - DNA, 100 bp, Homo sapiens
ggataagcctcgacttagaagctaccgagttaccctaagaaagcagttgatgctgaaaatcaagtggaactggaggaaaaaacaagacttattaatcaag

SEQ ID NO: 206337 - DNA, 74 bp, Homo sapiens
ggggacccgggacgacgagtacgactacctattcaaaggcgcccacggcctgcgagaggagcccgagtttgtga

SEQ ID NO: 206338 - DNA, 83 bp, Homo sapiens
cctcctccttggtcgccgcgtccttggctggcgtgtgagcacctgcggatctgtccccagggctacacctgctgcaccagcga

SEQ ID NO: 206339 - DNA, 74 bp, Homo sapiens
ccgggagccccagggcagccgccccgccgagtcgcaggtcatcatcagatttgaaatatttaaagtggatacaa

SEQ ID NO: 206340 - DNA, 82 bp, Homo sapiens
gaccgagtgctttaggccgcttgaaagaaagttgctccgtcgtcattgaattttgagaagcattctgaaaactttgcatgga

SEQ ID NO: 206341 - DNA, 88 bp, Homo sapiens
tcgcagtggtcgcttcttctccttggttcttttgaagtaaccagtgatcttttttgcttaccctcatcaacagaatggatgaagatag

SEQ ID NO: 206342 - DNA, 90 bp, Homo sapiens
ctcatatgcagctttatccactgaagtttcaatggattggccaagcagtgacacttattttcaaaattacaggctgtgccagccctggaa

SEQ ID NO: 206343 - DNA, 75 bp, Homo sapiens
ggactatcctctggaggctgtgcgcatgcagcacctggttggcaggtttgactgttcctctgcaccagacatctg

SEQ ID NO: 206344 - DNA, 97 bp, Homo sapiens
gcccagcatcaacgaggagatccagactgtcttcaacaagtacatgaaggtattagaaaactactcggatgctccaatgacaccaaaacagattctg

SEQ ID NO: 206345 - DNA, 83 bp, Homo sapiens
aggacagttcgctacacagcaatgcatcgaggtataatgggtctctcccaaatggcgatagaggaaggaggaaaagtaggttt

SEQ ID NO: 206346 - DNA, 50 bp, Homo sapiens
cgagtcatatggggacctttcggaggagattcaaccaactctggtgataa

SEQ ID NO: 206347 - DNA, 49 bp, Homo sapiens
gagttccacgcgctgcacaagcggttacaccaaacccaaaggccagtta

SEQ ID NO: 206348 - DNA, 49 bp, Homo sapiens
cacggatgtccatcccctccaggcctgggcaatatttaagggaaagtat

SEQ ID NO: 206349 - DNA, 75 bp, Homo sapiens
tcatttacggcatgtacttctgcatgaacatctccagccagggcactgcctccttacctgtgaggaatgcaaaat

SEQ ID NO: 206350 - DNA, 101 bp, Homo sapiens
cacggctgaaccctccttctcaatcttggaacagcacccccttctttaagcgcccccctcgcgggcccagctgcaactgcacttgcccgccaaccggttgc

SEQ ID NO: 206351 - DNA, 51 bp, Homo sapiens
gatggaggaaagagcgccagagagtttgaagaaaacaggtctgaaacaagg

SEQ ID NO: 206352 - DNA, 90 bp, Homo sapiens
gagtactggccgagatggctaagaagtccatgccaggaggtcgtctgcagtcagggattggagtttggaatcctgccttcgatgtcaccc

SEQ ID NO: 206353 - DNA, 75 bp, Homo sapiens
agacagttgccatccacagtgatgttgatgctagttctgccctggccaacgtcaacattgggagcctcatctgca

SEQ ID NO: 206354 - DNA, 75 bp, Homo sapiens
cggccacactcaccactccatggccacacagcttcccatcgacggtcagtgcgcacgttgtaatcagctgaggcc

SEQ ID NO: 206355 - DNA, 59 bp, Homo sapiens
gaaaatgttcatagtccctatgaatctactaagaaggatatgagaatttctttgataag

SEQ ID NO: 206356 - DNA, 106 bp, Homo sapiens
ggaaccatatccgtggacctccatatgctcataagaacccacacaatggacaagtggccagagatcctcagcaggagcctatggaagagatagaaaatttgaagaa

SEQ ID NO: 206357 - DNA, 131 bp, Homo sapiens
cgcactccagccctgagcccagagcctgcaaagcccaaagcaaggcccataaacggaggctacggaggaaggggtctttgaaggtcaggaagtggaggtctatcttcaatttaggtcgctctggccatgag

SEQ ID NO: 206358 - DNA, 101 bp, Homo sapiens
ggaagatttaacgaatggggttgtgatggcccaggttcttcaaaagatagctacattcatgggagcagccaggctcagtttgtggcagaatcacacattat

SEQ ID NO: 206359 - DNA, 75 bp, Homo sapiens
ctgaagtcaaaggagcaattgctggtcctgagcctgaggattgttaaaatgagtcttcggaagcaaacccctagt

SEQ ID NO: 206360 - DNA, 50 bp, Homo sapiens
ccgccgtcagagccgccctatcaggtggattctccacagttttcctcgtg

SEQ ID NO: 206361 - DNA, 101 bp, Homo sapiens
ccatgtggactgacgggcgctactttctccaggctgccaagcaaatggacagcaactggacacttatgaagatggagatgcccgagtggtaaaagacatgg

SEQ ID NO: 206362 - DNA, 90 bp, Homo sapiens
ggaggacgagctccgggatgctgtactccttgtctttgcaaacaaacagaatgagctgaaagccagtggtggcgaaatcaaaattcataa

SEQ ID NO: 206363 - DNA, 75 bp, Homo sapiens
actatccgtttgttcaggaaccaccagtgacagacaaaacaagggttcctccagttttggtggtggaaatgtcac

SEQ ID NO: 206364 - DNA, 80 bp, Homo sapiens
gaatttagatgcccctgaagacaaggacagccctttcggtgggtgtttctctatgagaagggctaccagacctcgagcgg

SEQ ID NO: 206365 - DNA, 80 bp, Homo sapiens
tgaactgacaggttctggatcctggaacaacatgctgaaactggttaccaccaccctgtgaatctgcctgcacagtacca

SEQ ID NO: 206366 - DNA, 101 bp, Homo sapiens
ctctgaggctgatatgcaatgtcacttacaacattaatcagatactgcatttaagtatttgattttcatcaagcagctgatggtatccaggaacaacagag

SEQ ID NO: 206367 - DNA, 100 bp, Homo sapiens
aaggtacccaatgcctgtttattcaccatcaacaaagaagaccacacactgggaaacatcattaaatctctgatatcctgttgggcattctggacaactt

SEQ ID NO: 206368 - DNA, 82 bp, Homo sapiens
ggagctggacgccgcgatcgtggggcccgcgaggcgggcagccggggcgtccagatctatgggagtcgtcagattatactgg

SEQ ID NO: 206369 - DNA, 75 bp, Homo sapiens
gaagtggtgaaggagtgtgtgcagcgcttcagcgagaacccagacctttcccaaagctcaggattcttcgaaaag

SEQ ID NO: 206370 - DNA, 100 bp, Homo sapiens
agttacttcatcgtctccatcctctacctcaagtatgagccagaggagaaggcagagcccccccaggctatgaatgccctgatgcggttgaaccagctga

SEQ ID NO: 206371 - DNA, 90 bp, Homo sapiens
actcgcctcggatttgggggcttcctcactcgtggctttccgaaggctgctgctttttgctaggcttcctgccatctttaccaagttgag

SEQ ID NO: 206372 - DNA, 133 bp, Homo sapiens
gagagagagcgcgagagatggagatgggcagacggattcatttagagctgcggaacaggacgccctctgatctgccactgcagagccccgccatggaagacacgccgttggtgatatcgaagcagaagacgga

SEQ ID NO: 206373 - DNA, 98 bp, Homo sapiens
ggagaagctggagctggcagagaaaaaggccaccgatcaagcggatgagaccctggactttgaggaacagatcttggaagctgctaaatccattgctg

SEQ ID NO: 206374 - DNA, 74 bp, Homo sapiens
ggggaagccccacatcagagctgttcagttatttctcaaactctgaggctgcggagttcacacattgaaatctg

SEQ ID NO: 206375 - DNA, 123 bp, Homo sapiens
gcggtggtgatcaagctatcattcttgatggtataaaaatggacactggagtagaagtctctgatattggaagccaagattttgaagatgtaactgagtttctggaagaggtcattgaagcct

SEQ ID NO: 206376 - DNA, 80 bp, Homo sapiens
aactggttctacacgcgagctgatggactcaccctgtcacccaggttggactgcactggcctcaacctcctgagttcaag

SEQ ID NO: 206377 - DNA, 95 bp, Homo sapiens
tgtgagtccctgcaggccgtcttcgacccagcctcgtgcccccacatgctccgcgccccagcacgtgtccaactgaaaccaaagcaacatttggg

SEQ ID NO: 206378 - DNA, 75 bp, Homo sapiens
gttgatctcatagacaagtttgtacatccaaaaacatatgctgtcaggaggataagagatgccttcagagaaaat

SEQ ID NO: 206379 - DNA, 100 bp, Homo sapiens
agaaaaccctgtgccagggacaggaaagataggagacagttttggcatgtgactgacttacacttagaccctacttaccacatcacagatgaccacacaa

SEQ ID NO: 206380 - DNA, 98 bp, Homo sapiens
gccaacgggccaggtaggatttccgggagaggctgctgtggaggctgaggaggcggcggcggagatctgggaatctcctgcaagaggaccctctggct

SEQ ID NO: 206381 - DNA, 50 bp, Homo sapiens
ggcctcccaaagtgctggggttacaggatcaactcactatcctgaaggtc

SEQ ID NO: 206382 - DNA, 75 bp, Homo sapiens
agctggcccaggctctgcaggagttctgtggctcctgatggatctgagaagatggacgtggaggatgaaaatctg

SEQ ID NO: 206383 - DNA, 75 bp, Homo sapiens
cggcggtacccgggtggttaaacttcgcaaaatggaggagatgttaaagtaacccatcttgcaggacgacattga

SEQ ID NO: 206384 - DNA, 101 bp, Homo sapiens
cgcggacgccgcaggaggcagtgcctggaccccagctgcccaggagagctcatgatggagcagtccaagaagtcctccctcatggtggcccgcagtattct

SEQ ID NO: 206385 - DNA, 50 bp, Homo sapiens
ctcatactctgttatagataaacaagtttccacagtgcctacacaacctg

SEQ ID NO: 206386 - DNA, 100 bp, Homo sapiens
aggggggagcggcgttggaggccaccgtttccagctgagatctgtatctgtggacctgaatgttgatccctcgcttcagattgacatacctgatgcgctc

SEQ ID NO: 206387 - DNA, 74 bp, Homo sapiens
aacagaacaccaggacatcccagagtctgggaaatggccccgtgcgctgcccctgacgccgcccgtctccctcc

SEQ ID NO: 206388 - DNA, 113 bp, Homo sapiens
gccagttcctgccgtctgctcttctgcctcttgatctccgccaccgtcttcaggccagttgagccccatatgggggttggcaggcagcagagaggcccctttcaaggtgttcg

SEQ ID NO: 206389 - DNA, 73 bp, Homo sapiens
tcaacgtggacgtggtcaagtacgagagtggccctgacggaggggaggaagtctcggacagcccgggagacga

SEQ ID NO: 206390 - DNA, 100 bp, Homo sapiens
gtggggtcactggtgtatgtcatggaagatctgggacatgagcgatgatgagaccatctgagatggccccgctgtggggctgacttctccccggccgcct

SEQ ID NO: 206391 - DNA, 82 bp, Homo sapiens
ctggccggagcagtgaaccagcacgggggccctgaccctctattctgcaccctgtgagccaccgagactgaaccaaacccag

SEQ ID NO: 206392 - DNA, 75 bp, Homo sapiens
gaaggcttcgagaagattagcaaaggtgctaatccagtggaaatcaggagagtggatatcaaagtattgcagagt

SEQ ID NO: 206393 - DNA, 82 bp, Homo sapiens
gaatctcgatgctggcctggagcagaaactgagctggaccactggagcctcggagtgcctgtgaagaaaacggggtattgcc

SEQ ID NO: 206394 - DNA, 141 bp, Homo sapiens
ttccttctgtacttctcgagcttctcagtcagtcctgcctcatcccagccatgtcatcttatctacgaaatgattcaggattctcaaagttggattggtggaaacaatgaaccattgacaggctttacatggcgaggtggc

SEQ ID NO: 206395 - DNA, 100 bp, Homo sapiens
cactgagttcaaagccttttatggagacacattagttacagatttaaggaccatagtacagctatggatactgaaccaaacccgggaacatcttctgtgt

SEQ ID NO: 206396 - DNA, 76 bp, Homo sapiens
cgcccctccgtccctccgccccgcggcgcagctgagggcacccggtgcacggacccgcctgcaggcaagcccgcca

SEQ ID NO: 206397 - DNA, 76 bp, Homo sapiens
ccgccccggagagcggcgaggcggcagccacagcccgtggaccgggagcccgtggaccgggagccggtggtgtgcc

SEQ ID NO: 206398 - DNA, 74 bp, Homo sapiens
ggaattggcaacatctctgagaggttgacatcatggacatatgtgagtccatcctggagaggaagcggcatgac

SEQ ID NO: 206399 - DNA, 92 bp, Homo sapiens
gcggagggaagacgccctggtgctcaccaagcaaggtgctggagaatctggtaaaagcaccattgtgaagcagatgaggatcctgcatgtta

SEQ ID NO: 206400 - DNA, 101 bp, Homo sapiens
cacttccagatcccagaggagacagacatcggatggctggtgtcccgcatgagatgtctgcagaatgagacttacagtgcgctgagccctggcaaaagtga

SEQ ID NO: 206401 - DNA, 75 bp, Homo sapiens
ccggccgcgacgcccgggacccagattgcgggttcagctgatgttctaatcatgtcagataaagatgatattgag

SEQ ID NO: 206402 - DNA, 82 bp, Homo sapiens
ttggatgatgatggatccatttctcctattgaggagtcaacgggaaaaaagttgttccatgtagacatgactggcatcagac

SEQ ID NO: 206403 - DNA, 100 bp, Homo sapiens
gctccttctcctggagacgcaactcaagattctacaagggggttgctcctctctggatgagacagataccatacaccatgatgaagttcgcctgctttga

SEQ ID NO: 206404 - DNA, 100 bp, Homo sapiens
aaaagaaagaaggataaaaaatccagaacaccacccaggagttacaatgcatcgcgaagatctcgtagttccagcaggcaccactgagagaaaacatgaa

SEQ ID NO: 206405 - DNA, 82 bp, Homo sapiens
ggctgggcgagctgggcctcgtggagttcagagacaaccacgttcgtttgaagtaggaatgctagtctggcataaacataaa

SEQ ID NO: 206406 - DNA, 50 bp, Homo sapiens
caaatcttgaagcacctctccagctcctcaagagttactgatctatgaaa

SEQ ID NO: 206407 - DNA, 100 bp, Homo sapiens
tgcacttcgcattttggcattgacatttaattttagggtcctttatatagaagggagagccgaatccgggtgcatggtattggcgggggccacaagcaac

SEQ ID NO: 206408 - DNA, 101 bp, Homo sapiens
ttgatgtgcaacaagtgtctttggttataaattatgatctacctaccaatcgtgaaaactatattcacagatacttggcatatcgaaattttatgattgac

SEQ ID NO: 206409 - DNA, 75 bp, Homo sapiens
cccgcgggggagccccgggagccgcacgccatatcagcgggaacaagattggctgggagaagacgggaagccact

SEQ ID NO: 206410 - DNA, 75 bp, Homo sapiens
gctttgctgtacatcgtattacacctgaggaggccaagactatgaagaaatcgggagtgcactttttgactgtag

SEQ ID NO: 206411 - DNA, 83 bp, Homo sapiens
ccgaccctggccgccccgagcggagcctggagattgtcctgggtcacataatgccagctgagcgtaaaaagccagcaagtatg

SEQ ID NO: 206412 - DNA, 75 bp, Homo sapiens
ttgaaagaactgattgagaagcatgctggtgccattcgcgccctctggcctcaaggtgcgctacttgaaggtgtt

SEQ ID NO: 206413 - DNA, 75 bp, Homo sapiens
tgaagatcgaggtgaacgagagtggcacggtggcctcctcatccacagagaatgccacgggtgacctggccacca

SEQ ID NO: 206414 - DNA, 100 bp, Homo sapiens
gtaaggtgcgcagcagaaagcatttaaccagcatggctacttcatattttggaaagcagtttttaagacaaatggaggagatgtataagaaagctcatgc

SEQ ID NO: 206415 - DNA, 132 bp, Homo sapiens
gggatggtgccatccagggaagctctgctgggaccaggcacaactgccattaggtgccccaagaaattacaggatggggtgcatgaagtccaagttcctccaggtcggaggcaatacattctcaaaaactga

SEQ ID NO: 206416 - DNA, 80 bp, Homo sapiens
tgctgatccgaagaatcacaggaagatcctgaccaagatgaagcagcagggtcatgagacagccgcctgtccggagactg

SEQ ID NO: 206417 - DNA, 82 bp, Homo sapiens
tctcttggactgaacttaaatactgatagggtacactctcctacaaaaccagccagttactcagtaaagtggacgatagaag

SEQ ID NO: 206418 - DNA, 76 bp, Homo sapiens
tccccaccacaatcaatacgattggaaccagcacaagtacaagagtggacctaccctatgagacgagagatgcagg

SEQ ID NO: 206419 - DNA, 80 bp, Homo sapiens
ttattgagaagaatctcaaaagtgctagtagtaaaaccgaggtccatatcaggttgttatcgtcaggagctgtgcaaact

SEQ ID NO: 206420 - DNA, 82 bp, Homo sapiens
ggtgagtcgcggtgggtcctcgcttgcagttcagcgaccacggtatgttcatattggaggatgaccggtttggcagcagctc

SEQ ID NO: 206421 - DNA, 50 bp, Homo sapiens
gcacctggccccgctacagcaaaccagagatcctgaaggagctagacgag

SEQ ID NO: 206422 - DNA, 75 bp, Homo sapiens
ggaattttggagatattcaaagaggaattcagaaaagcagctcagcaacaggaagaacaagaagaaaaggaggaa

SEQ ID NO: 206423 - DNA, 83 bp, Homo sapiens
ccgggacacccgcgaggccggaaaatgggttacacatcattttggaatgactgtatatcatctggattacgtggctgtatgtt

SEQ ID NO: 206424 - DNA, 75 bp, Homo sapiens
cgggaggaaggaacgaggcaaggagctaaagcagcgtgcgttcagccctgggatggaaatcatattatgtagaat

SEQ ID NO: 206425 - DNA, 100 bp, Homo sapiens
ggagaactggtcgccatcaagaaagtattgcaggacaagagatttaaggtgagcactgtgggctatgggatggatgaggtggagcaggaccagcatgagg

SEQ ID NO: 206426 - DNA, 101 bp, Homo sapiens
cccgctttgttcagctgcagcatggagagatagataaacggctaaaccaggtggacaggtgaaatgtcagtatatctctgctgtggataaagttatatttg

SEQ ID NO: 206427 - DNA, 50 bp, Homo sapiens
ccggaccgcagtgccccaagagagttctaatacccgatttacaattacat

SEQ ID NO: 206428 - DNA, 150 bp, Homo sapiens
aagctgccgcggcacatgaggacccataccggggagaagccatacatgtgcaccatctgcgaggtccgcttcaccagctggggtgaagaatggggcatgggtggctacgtaaagatggccaaagaccggagaaaccattgtggaattgcc

SEQ ID NO: 206429 - DNA, 100 bp, Homo sapiens
cgggacgcgagcggcgagccggagcgcggagcccggctcccgcaccatggaggaggacgacagctacggaatgaattcttccaaaacaaaactagaactg

SEQ ID NO: 206430 - DNA, 75 bp, Homo sapiens
ggcaaagaacagatccagggatggcacaaaggacagctgcccgctgttgaatttgggaaggaaggaacacgcaaa

SEQ ID NO: 206431 - DNA, 75 bp, Homo sapiens
catgagctcagtggcctcctctgtgagcagcaggcccagtcggacaggactacactgctccgtgtggagatggcg

SEQ ID NO: 206432 - DNA, 100 bp, Homo sapiens
ccttctaactatgtggaaaggaaaaacagtgctcggaaagcatctattgtgaaaaacctaaaggataccttagaaaggtgactcttttgatggtgggact

SEQ ID NO: 206433 - DNA, 101 bp, Homo sapiens
gaagctgttgttcttccaatgtggatgcctgactttttcaaagggattagaaggccatggaaggtggtttgtgatgaaaatggttccaagggctatggatt

SEQ ID NO: 206434 - DNA, 73 bp, Homo sapiens
tcgcatcctatggctcaaagaaagatgattatgaaaaaccacctccggtcaataagcaggagaatgcaggcac

SEQ ID NO: 206435 - DNA, 100 bp, Homo sapiens
aagctgcaagagcaacatctttcctcaccccaaggtaaccatgtctgagtctggacacagtcagcctggactctatgggatagagcggcggcgacggtgg

SEQ ID NO: 206436 - DNA, 75 bp, Homo sapiens
caacaacacaaacagtcccaagtggaagcaaccccttacagtgttcctccagaagaaattaattatttaacacga

SEQ ID NO: 206437 - DNA, 98 bp, Homo sapiens
cgaaagcgttggagaggtgttaccggaacggcggcgacaagggtgttcccgaactagagtggcacccgacagctacaaagtgcaagataagaaaaatg

SEQ ID NO: 206438 - DNA, 75 bp, Homo sapiens
ggcgtgggtctgtgcaacaatggcttcatgcaccacgtttatgcaactactgctgccaaccccagagagtcgtcc

SEQ ID NO: 206439 - DNA, 97 bp, Homo sapiens
gactccccttcccgacagtcccgccgctatgactggtgagggccccgggccctcagcctctcttagggagacgctgttgcggcagctggagacgaac

SEQ ID NO: 206440 - DNA, 50 bp, Homo sapiens
aggaccatgcaccacctgctgctggaggttgcaaagcagctgaaggagca

SEQ ID NO: 206441 - DNA, 75 bp, Homo sapiens
tgaatacatgatttaaacaagagatttccacagaagattgctcgctgtaagcagctcatctgtgaccccagctac

SEQ ID NO: 206442 - DNA, 90 bp, Homo sapiens
tcaaaggctctacagagaagaacaagctcagactgcaaagagagtacgaccccagcaaagcgacctttgtgaaggtggtgccaaccccca

SEQ ID NO: 206443 - DNA, 74 bp, Homo sapiens
ggcctttctccgcgcgctcggctgcgctgggcgggccccaggggccattaagtttaatgatggcctgagcttac

SEQ ID NO: 206444 - DNA, 75 bp, Homo sapiens
cgggcttcatgctccagttctacaggtgtgatgaatgcagactctgctaccattttggctgtttggatcctcctt

SEQ ID NO: 206445 - DNA, 100 bp, Homo sapiens
caccgtgactgtcacccacaatcagcttgaacgggtctttttacgacttggccatgctgaaacagatgaacaattacagaatattatatctaaattcctt

SEQ ID NO: 206446 - DNA, 100 bp, Homo sapiens
ggtgcagccaccctcgctccctctgctcttcctcccttcgctcgcaccatgctcaccatggatgatgatatcgccgcgctcgtcgtcgacaacggctccg

SEQ ID NO: 206447 - DNA, 98 bp, Homo sapiens
ggtgcaggcccggcgccgccactgccgcagccaggagatggttcgggcctagcggagccgggactggagacgcaaacatgcagatctttgtgaagacc

SEQ ID NO: 206448 - DNA, 82 bp, Homo sapiens
agatgctgtacctgcggcagaaaggtctcttaaccttcattaactgtgcctatgtcaaatggggaaccctggtacaagatat

SEQ ID NO: 206449 - DNA, 100 bp, Homo sapiens
atttggagatcttgacaaagcctcttctgtttccaatgggcgtccttgagactttgtgctgcgcggggtgctcactcaatcttggctacgtgtacagatg

SEQ ID NO: 206450 - DNA, 74 bp, Homo sapiens
aatgtttcttgcccttcctggagcagaggagccattatttatgcaggacaaagtattttggacagatatcatca

SEQ ID NO: 206451 - DNA, 107 bp, Homo sapiens
gatccttgctcagagcaacaaccagcagcttcgggatttagggattctctccgttcagattgaagtggttgaaggcctttcactgttggacttgggagtatctccgt

SEQ ID NO: 206452 - DNA, 100 bp, Homo sapiens
ctggtttcagctcgctggcggaaggctacatgcggttagatgacagtgggattgcgtggggatgtacttgtgatgctgaagcagacggaaaataattact

SEQ ID NO: 206453 - DNA, 98 bp, Homo sapiens
gaagagaagtttacaggccctctattgccaactgttaaaaccatggccaactgtgagcgtaccttcattgcgatcaaaccagatggggtccagcgggg

SEQ ID NO: 206454 - DNA, 100 bp, Homo sapiens
gaagagttgtcccagctcggcccgcgggggagccccgggagccgcacggttttcgaaaggccttacactctgaccgtcctccttctgcatctcagcccag

SEQ ID NO: 206455 - DNA, 100 bp, Homo sapiens
gagctaaagcagcgtgcgttcagccctggggattctgagaaacgaacccctcttcatgtggccgcatttctgggagatgcagagatcattgaactcctga

SEQ ID NO: 206456 - DNA, 100 bp, Homo sapiens
cttgaagcagaggagcagcaggaccaggaaggatttgatgccctggatccctttattcccatcctggtttccaactataacccaaaggaatttgaaagtt

SEQ ID NO: 206457 - DNA, 76 bp, Homo sapiens
tcttccattgtttttcacagcaaaggaaccaagcagagtgacagggaacaagctaccctctgagtcagcactggac

SEQ ID NO: 206458 - DNA, 98 bp, Homo sapiens
tgctttctctcgatgaggataacatccctccagaagatgctctggattaatcgaattacagctgctagccaggaacatggactgaagtatccagcgct

SEQ ID NO: 206459 - DNA, 98 bp, Homo sapiens
cgataagcaaccagcatttagagctgtttatgaagcactgagaaatgtatatggcgccattttcaacataaaagataaaaaccctttcaacatggagg

SEQ ID NO: 206460 - DNA, 50 bp, Homo sapiens
cttcatcatctagtcatgctgggcagtcgacaagtactttaagcttcctc

SEQ ID NO: 206461 - DNA, 76 bp, Homo sapiens
acacgttctgcaaagtcgacaagaatctcaataacagtatggttcaaaccttgtactactcagctgatcacaagct

SEQ ID NO: 206462 - DNA, 100 bp, Homo sapiens
aggaatccgtttcataggaaatgggtattgtaaatttcccagctccactcacccagtcaatacagacttcactgctatcttccagagggccacactgggc

SEQ ID NO: 206463 - DNA, 75 bp, Homo sapiens
tgacagccttcatttctctgaacatactgccttatgggacagatcaaggtgaatcatttgatgtaaaagacttga

SEQ ID NO: 206464 - DNA, 96 bp, Homo sapiens
attgaggacaagttgacgagagagtcccaagtacgtccacggtcagccttgcgaagtctcaggggatccagaactgcagccagtccttgctgggct

SEQ ID NO: 206465 - DNA, 98 bp, Homo sapiens
agctggtgaagaagcacaagaaaaagagggttgtccccaaaaagcctcccccatcaccccaacctacaggctctgggaatgtgctgaaggtgcagcag

SEQ ID NO: 206466 - DNA, 76 bp, Homo sapiens
ctggcctggtttgatactgacctgtaaatcatcctttagatttatcatagaatccccgactcagacccatcttcta

SEQ ID NO: 206467 - DNA, 149 bp, Homo sapiens
ctaggggcgcgtcatgtggccgctcacggtcccgccgccgctgctgctgctgctgtgctcaggcctggccggacagggtccccctggaaacccaggaattccaggcctcccaggatccgatggccctctggtgagaaccatgagctggg

SEQ ID NO: 206468 - DNA, 83 bp, Homo sapiens
gaaacagagcaacccccggcagatcaagcgcctccggtgtggctgtctctgatggtgtcatcaaggtgttcaacgacatgaag

SEQ ID NO: 206469 - DNA, 75 bp, Homo sapiens
ctgagcccgccgtctacccgtggccgctgccggtctacaaatcttcccaaggctgcagacaccgacggatttgct

SEQ ID NO: 206470 - DNA, 82 bp, Homo sapiens
accgccaccggaacccgagaccgagtcagaacccgagtgctgcttggcggcgaggtgactctgttttgagaagtgcaaccag

SEQ ID NO: 206471 - DNA, 96 bp, Homo sapiens
gctggtggcaaccgcctacgagacactcaagacaaggcgcctctgtcgaagagccttctgctggtccccagtgccctctccctcctgctcgccctc

SEQ ID NO: 206472 - DNA, 98 bp, Homo sapiens
gggagccctgtgaggcggacacttaactccagtttcacaggagtctggagcacctattcttacagatgatgttagtttacaagtgtttatggatcact

SEQ ID NO: 206473 - DNA, 100 bp, Homo sapiens
gcccacgaagaggtacgattccggagaatcgcgaggcagagcgggagcgcgcagccaggatggacaaccggaaattttctacacattttggaattcagtt

SEQ ID NO: 206474 - DNA, 100 bp, Homo sapiens
ctgaaacaggagatggtgcggacagatgtcaacctggaaaatggcctggaacccgctgaaacccacaggaatctggtggacagtaacaaactttggtgaa

SEQ ID NO: 206475 - DNA, 82 bp, Homo sapiens
acttaatcaacacaagtgatccatccaacatattctttacaatggatgatgtggtcaaggttggagactttgggttagtgac

SEQ ID NO: 206476 - DNA, 75 bp, Homo sapiens
gcgagcagaactacggcgagcgggttcgatacaagaggctgttttcctagcgtggcttgctgcctttggtaagaa

SEQ ID NO: 206477 - DNA, 95 bp, Homo sapiens
cttggggccctttgggacgagtgctgtgactgtgttggtcttgggcgtctttggtactggcttttttaggggtctgcctggggattacccttgct

SEQ ID NO: 206478 - DNA, 74 bp, Homo sapiens
ggagagaagccgcaaccagagccgccgccacggtataagcagtttagccaaattttgaagaacattggagaaaa

SEQ ID NO: 206479 - DNA, 100 bp, Homo sapiens
ctttgcatctggcttacccctggttactgaggaaacaccttcaggagaagcaggacacgcaggagaaagaaggtattctgcctgagagagctgaagaggc

SEQ ID NO: 206480 - DNA, 110 bp, Homo sapiens
catctggagaaccttttggccaggtcttactttgatcctcgtgagtttcggagcaacatcccctgtcacctggttgatatctcttgcggattaccctgcagtgccacgct

SEQ ID NO: 206481 - DNA, 147 bp, Homo sapiens
tgctgggggtgctgggcgacctgcaggcagcaccggaggcccaggtctccgtgcagcccaacttccagcaggacaagggggccgaaggccagagaccaggatttggctacggaggcagagcgtccgactataaatcggctcacaagg

SEQ ID NO: 206482 - DNA, 88 bp, Homo sapiens
gtcctgacactgtccataaatgtgcagagggtggagagattcaaccagttagcgtgaaagttggagataaagttcttctcccagaata

SEQ ID NO: 206483 - DNA, 75 bp, Homo sapiens
cgggtccgtggagctggagcagatcccccagccggctgagacagctagtgagacctgcaacgacttccacccgat

SEQ ID NO: 206484 - DNA, 88 bp, Homo sapiens
gaggtgtttaccatgacgataagcaaccagcatttagagctgtttatgaagcactgagaaatgtttgcaacacaactacagacaggaa

SEQ ID NO: 206485 - DNA, 74 bp, Homo sapiens
tcattaaggaaggcgatgtagatgtttcagattctgatgatgaagatgataaggagaaggcagagcccccccag

SEQ ID NO: 206486 - DNA, 89 bp, Homo sapiens
cccctggagggaaataccatgaggaagacagaagcaaaggcgttccttcatgtcccgatttgccaacattacaacaaaggagatggacc

SEQ ID NO: 206487 - DNA, 101 bp, Homo sapiens
tggcgggtggtaacagcacacgagagcggctgctgtctgcgcttgaggacttggaggtcctgtctagccctttggagtgaatcaacctggaccttatatca

SEQ ID NO: 206488 - DNA, 50 bp, Homo sapiens
ctcccgggtagctgggactacaggcccgcaccgccgccatgatgtgcgag

SEQ ID NO: 206489 - DNA, 73 bp, Homo sapiens
cgctggggtcccttttgcctcagatactattttgaagatgatgtcagttcatacagactgtattgtgtcagtg

SEQ ID NO: 206490 - DNA, 98 bp, Homo sapiens
gcggcggccacggcatcctgtgctgtgggggctacgaggaaagagatcagagagctgggaagatcagtgaaagacttgtgattacctcagaaatgatt

SEQ ID NO: 206491 - DNA, 50 bp, Homo sapiens
ggctggcccagcagctgagatcacagaggagaaggcagagcccccccagg

SEQ ID NO: 206492 - DNA, 100 bp, Homo sapiens
ccttcaaggaccgcgtgcctgagtaccctgcggagaggagcggaagaccttctggtgtgggctgggcagcaattcacttgaaggagaaacagccccggtg

SEQ ID NO: 206493 - DNA, 83 bp, Homo sapiens
gggaccgggggaaccgccgccccggccggacctcgaccctgagctctatctcagtgtacacgcacctgaactcctggggggac

SEQ ID NO: 206494 - DNA, 75 bp, Homo sapiens
gatgaccttcagtgtgctgctcaaaaacaggtggtatcacggaaaacttgacagaacgatagcagaagaacgcct

SEQ ID NO: 206495 - DNA, 126 bp, Homo sapiens
atccatagattggaatattggtgggccagcaatcctcagacgcctcacttaggacaaccagagagatgacacgggggaaattcctcaatattctagagaagcccaagaagtagcagctgcttgcgg

SEQ ID NO: 206496 - DNA, 110 bp, Homo sapiens
aggagctgtgcagccgcgaggaggcgcgggaggtgttcgagaacgaccccgagacggagcatcagatccatgctgctgctgactcggagccccacagcttggcacaggct

SEQ ID NO: 206497 - DNA, 100 bp, Homo sapiens
ccgaggaagaactatgaacataaagtctgcaacatggaaggtatgtgcactgcgcgtgaccagccgggcccgcagccgcatcctcagggcagggggcaag

SEQ ID NO: 206498 - DNA, 90 bp, Homo sapiens
aggatttatcaaatcgagtcactgtcaaggtaaagttctttacaaagttcgctggaaaggctatacatcggatgatgatacctgggagcc

SEQ ID NO: 206499 - DNA, 83 bp, Homo sapiens
tcagctcatctttggcaggaaggcgaggcttccgcccggcacaggggacaatgcagatcttcgtgaagactctgactggtaag

SEQ ID NO: 206500 - DNA, 90 bp, Homo sapiens
ggagcggcactcggcgagtccgggactgcgctggaacaatggataacttcttcaccgaggaatagccaggccagaagaaggaaggcctgt

SEQ ID NO: 206501 - DNA, 127 bp, Homo sapiens
aggaccgccatggggacacggcactgcatgctgctgcccgccagggcccagatgaaatatggctacacacacctttctgcaggagagctgcttcgtgatgaaaggaagaacccagattcacagtatg

SEQ ID NO: 206502 - DNA, 75 bp, Homo sapiens
ccgctcccgccgcctacccgaccgctgtgcggtcagagaagaaacgccttaggaagccaagcaagtggcttttgg

SEQ ID NO: 206503 - DNA, 90 bp, Homo sapiens
cgagcccccgccatcctcgctgctctaccagatccacatctcaaagaagtggggcttcaccaagttcaatgctgatgaatttgaagacat

SEQ ID NO: 206504 - DNA, 75 bp, Homo sapiens
actagcaaggaaatactcttcaaatagatcaacaataaggctgcaactggagaggaggttccccgtaccattatt

SEQ ID NO: 206505 - DNA, 98 bp, Homo sapiens
accagccatttcggtgtagaagtggcagcacggcagagtacccaaaggcaagtggaacagctctaatggggttgaagaaaaggagacttgggtggaag

SEQ ID NO: 206506 - DNA, 100 bp, Homo sapiens
cttatgatgaacagagttatgattcctatgataacagctatagcaccccagcccaaagggtgataaaagaaaatgtggctgaagttacccgaagttcagc

SEQ ID NO: 206507 - DNA, 98 bp, Homo sapiens
cagcatggatgggcttttggcaggacccacaatgccacaagctcctccgcaacagtttccatatcaaccaaattatgagacagggtttcaccgtgtta

SEQ ID NO: 206508 - DNA, 75 bp, Homo sapiens
gcgctcgcgcccggatccctcagagaggtggagaagagcgagtacttgagaaagaagaggaagaagatgatgatg

SEQ ID NO: 206509 - DNA, 75 bp, Homo sapiens
caaagagcaaacagattcagtggcctgcattggtaacaacatccattttatacaccgcgataggaataggttgga

SEQ ID NO: 206510 - DNA, 90 bp, Homo sapiens
ggagcgctccatctcttatcctggataaagccctacaaaaacggcctactaccaggaaatgcttccagactgcacacttttacttagagg

SEQ ID NO: 206511 - DNA, 82 bp, Homo sapiens
gcgacatccgagtgcagaacctgcaaggtcagcccaaggccaaccccactgtcactctgttcccgccctcctctgaggagct

SEQ ID NO: 206512 - DNA, 82 bp, Homo sapiens
tgggacactgccatcctcttcaccaggcagtcacagttgcagattatatttctagagctgagtctcagagcagacaaagaaa

SEQ ID NO: 206513 - DNA, 100 bp, Homo sapiens
ttcgcaccggaaaatgtagcttcccggttaagctcaaagcttggattctgccgtgccactcacgaatggcgacacagaagacgatgctgacaaaatgcac

SEQ ID NO: 206514 - DNA, 100 bp, Homo sapiens
ccaaagaactcggagatgcctggaatacagtaagtgggatgccatcactgaaatggatgaacataataggcccattcacacataccaggtatgtaatgta

SEQ ID NO: 206515 - DNA, 101 bp, Homo sapiens
acccccagacctcctcagctccaggccgccagatcccacccttggacccccatgaaaatggaaacaatggaacaatcaaagttgagaagccaaccatgcaa

SEQ ID NO: 206516 - DNA, 100 bp, Homo sapiens
gacaaactggtaggagcaattgtctactatgacgatttctaccactccaaacgccggctgatcttctccaagaggaagccctaatccgcccacaggaagc

SEQ ID NO: 206517 - DNA, 73 bp, Homo sapiens
tttgttgtaggagcaatgactgttggaccatctgaatctgataatttttctcataacctgagaggagtaatcc

SEQ ID NO: 206518 - DNA, 90 bp, Homo sapiens
ctttgtctctgatgagctgagaaacaaagccacccagccaatgaaggtttctctactcggacgaggtgcagattggcccggagacggtga

SEQ ID NO: 206519 - DNA, 90 bp, Homo sapiens
ctggaaacagtttgtgctctaccggagattttcatgagaaaatgtgatcagtactggcctgccgatgggagtgaggagtacgggaacttt

SEQ ID NO: 206520 - DNA, 50 bp, Homo sapiens
actggattgctgacggcagccctctcagagacggaacctcactatgttgc

SEQ ID NO: 206521 - DNA, 50 bp, Homo sapiens
acatccccacatcaatgcactgccaatggagataccccggctctgacagg

SEQ ID NO: 206522 - DNA, 75 bp, Homo sapiens
gtgtggctgccatccaccccagcctggagatccccacaaaaaatcccagaagtgggatgaaatgaacatcttggc

SEQ ID NO: 206523 - DNA, 90 bp, Homo sapiens
tgggccgagaacccgctggtttattgcgacgggcacggctgcagcgtcgcggtgcatcaaggtgattgcccccaccaatgcagaagtgct

SEQ ID NO: 206524 - DNA, 101 bp, Homo sapiens
tagaaagactcaactgagcaggtgatgcagctagagtggttaagaaagtagctcaatacatggctgatgtattggaagatagcaaagacaaagttcaagag

SEQ ID NO: 206525 - DNA, 100 bp, Homo sapiens
ttctaggagagcccttttgggtcttggcacaagcacatatgtttgtgaagctcaagtttcaggaaaatgccagtgaagggaaggcccctgcagaagacgt

SEQ ID NO: 206526 - DNA, 101 bp, Homo sapiens
tcatgttctgtttacttgaaccagtgagaagatggccgagcaagcaaggataagttgctgcttttgacacaaaaacggggttacgtgtggcagtgaagaag

SEQ ID NO: 206527 - DNA, 74 bp, Homo sapiens
cttcaggtagagaaggactccagatattttatgacctggtcagacagataaataggaaaacaccagtggaaaag

SEQ ID NO: 206528 - DNA, 100 bp, Homo sapiens
cagaaagatggcatatcagatatgcaagtctgtgaattgcaactcatgcagcaattccagaaccccgacttcccacccgaagtagaggaacaggatgcca

SEQ ID NO: 206529 - DNA, 96 bp, Homo sapiens
tggtagcccccacccctctccgtccatggccccagatgacacttcaggtggcccacaaactctttaacaacttgaaataaatgtgtggacttaatt

SEQ ID NO: 206530 - DNA, 100 bp, Homo sapiens
gcggagttcacacattgaaatctgtcatctttttcagagagaaactttcggtaatgtaaatttgcccttggccattgggatttctatgccaattgtgacg

SEQ ID NO: 206531 - DNA, 90 bp, Homo sapiens
atcctcagtgaaaataaaagccatgatagttcaacatacagagtggaggagctgaaggcggcgctggagcgcgggcagctggaggcggcg

SEQ ID NO: 206532 - DNA, 98 bp, Homo sapiens
gatgggtcattatgaccagagtattgccgcggtggaaatggagagtggttaagaaagtagctcaatacatggctgatgtattggaagatagcaaagac

SEQ ID NO: 206533 - DNA, 90 bp, Homo sapiens
tcaacgccaggcgccgctcctttacagggacacagcaggtcaggagagattcaacagcattacctcagcttattacagaagtgccaaggg

SEQ ID NO: 206534 - DNA, 100 bp, Homo sapiens
tgctgaaggacagccttggaggcaactctaaaaccatcatggttgccagtctctcacctgagctggctagaaaaaaaaactgctacagccttgcttgaaa

SEQ ID NO: 206535 - DNA, 87 bp, Homo sapiens
gccataaaagttgatggagattacctttggtgactggccatgtcattgtcccacttataccgggatggggaaggccgcattgatgat

SEQ ID NO: 206536 - DNA, 98 bp, Homo sapiens
tcaccagaggacagcttcatgctcttggacttcccagcctcaagaactgggactttctcattgttgaccccattgaagagggagaaaaggtgaaggct

SEQ ID NO: 206537 - DNA, 83 bp, Homo sapiens
gtgaaggaaaagcagctccgtccacaacgccgcttcggggctcctagggaaagcaggcaggatgggagagtcgccgatagaac

SEQ ID NO: 206538 - DNA, 75 bp, Homo sapiens
ggagaatgtcaagtacgaagatatctatgaggtcaaaatgcagatcttcgtgaaaacccttaccggcaagaccat

SEQ ID NO: 206539 - DNA, 88 bp, Homo sapiens
gatttgttaaggattccaagtaactcttatttgaattagaggagacagcactgattgcagtgacagaagcggtgccagctaactcccc

SEQ ID NO: 206540 - DNA, 51 bp, Homo sapiens
gtctgcggctggtgttggcgcatctctagacaccattcgcttttcacccaa

SEQ ID NO: 206541 - DNA, 75 bp, Homo sapiens
atcaccttgatttttaatcccacgggtctctcattcatcacttttatctgctatgtggcgtcctcagcatctgcc

SEQ ID NO: 206542 - DNA, 100 bp, Homo sapiens
taagcaccgttggtatcctcatggacgggtattcctagttcttctcatgtaagtaataacatgagtacaccagttttgcctgctccgacagcagccccag

SEQ ID NO: 206543 - DNA, 90 bp, Homo sapiens
ggggagacacattttatgttgtgtcatttcgaaggattgtcctgggtcacataatgccagctgagcgtaaaaagccagcaagtatggaag

SEQ ID NO: 206544 - DNA, 50 bp, Homo sapiens
cagacggccatgtccgaaacctacggaaataagatatgtggaacggagtt

SEQ ID NO: 206545 - DNA, 90 bp, Homo sapiens
ggcctgagggggcctggcggagcccgagcgcggcccggcccgcagcgtggggccccgagcgcgggcagagcatcaaccccaagttggcgg

SEQ ID NO: 206546 - DNA, 51 bp, Homo sapiens
cgagtctgccatcgtccaaggaggtggcagtacacctccagcatgagagcc

SEQ ID NO: 206547 - DNA, 82 bp, Homo sapiens
aagcggcaagcagagaaaacctgccaatcaagatgagtatggccacagacccctttgcttctgtttttgggaatgaatcatt

SEQ ID NO: 206548 - DNA, 51 bp, Homo sapiens
ctacatcgtggtggatgaaaggcgggagcttactccacgggaacagcctct

SEQ ID NO: 206549 - DNA, 96 bp, Homo sapiens
aatgggcctattggtcagtatggagctgcagaagaatccattgggatatctggagagggctccaacaaaagaatcctctgaagaggagtatgactc

SEQ ID NO: 206550 - DNA, 82 bp, Homo sapiens
gattgttacccccaccacctgcgctccctccaagaccttgtccatcacaggtgaccaagaatatggcccaggtgaccaaagc

SEQ ID NO: 206551 - DNA, 100 bp, Homo sapiens
ggaaagcagatccgtggttccctgcagactggcaggagcagattccaaaggcacaggaagaagcttgcagcaaatgccagatgttaatgtaagctgggat

SEQ ID NO: 206552 - DNA, 98 bp, Homo sapiens
ccaactgcatcgtgctggccctggagcagcacctccctgatggggacaaaacgcccatgtccgagcggctgatgctgtgggccctgagggaaaggatc

SEQ ID NO: 206553 - DNA, 100 bp, Homo sapiens
tcagtcaacagctacagccaattttgctaactttgcacatttcaacagtcatgcaggatgggtttgtggagttcttccatgtagaggacctagaaggtgg

SEQ ID NO: 206554 - DNA, 100 bp, Homo sapiens
cttgccggctgtctgatgaagagcagcgagaatggcgcggtggccacgtcttttattagaacaatagagcttggagggaaaggatatgcaccaccaccat

SEQ ID NO: 206555 - DNA, 97 bp, Homo sapiens
ggattgttagatggaacacggctccatcatcacccaggcgcggagggaagacgccctggtgctcaccaagcaagagtggagactgctgcacggactc

SEQ ID NO: 206556 - DNA, 50 bp, Homo sapiens
ctgatggtttcatttgccgttgtcccccgaataatccagaatggctactc

SEQ ID NO: 206557 - DNA, 90 bp, Homo sapiens
tttggcgagtcagtgactgaagcgcccgtccattccaagaccattgtggccgccatgagcaacctggtgccccccgtggagctggccaac

SEQ ID NO: 206558 - DNA, 74 bp, Homo sapiens
tctggctgtgctgcgcgacccccgcgcatgaaattccgggtagatatgcctggctcaggcagtgcattcatccc

SEQ ID NO: 206559 - DNA, 50 bp, Homo sapiens
ggtgaccgtgaatgtgctctcagaatctggtagcccagagaccaagaaac

SEQ ID NO: 206560 - DNA, 80 bp, Homo sapiens
tgaagatttacaacttgataaatcagcttcatgagctatcagttgagggatttgcagttgataaaatggctggagaggtt

SEQ ID NO: 206561 - DNA, 100 bp, Homo sapiens
aatattcctgtcactcctcagaaatgtcccagctccacgggtttccacattcaggagaatgaagaaagccattacgagctcggggacctgcttcacaagt

SEQ ID NO: 206562 - DNA, 99 bp, Homo sapiens
gaagctgtgagcgcccccatcccggaggtctccgccggctcccggaacagcatgatcctctctgctgccatcttcatcaccctcttaggtctgcttggt

SEQ ID NO: 206563 - DNA, 90 bp, Homo sapiens
gcgccgctgggcctgcaggtctctgtcgagcagcggacgccggtctctgttccgcaggatgatggcgggtgaaaaagttgagaagccaga

SEQ ID NO: 206564 - DNA, 96 bp, Homo sapiens
ttctggttccagtcaagcaaaattattcagcaccaggagcaatggaccacagaaattctgcattgaaaaagttgggaaagaaaattggctacccag

SEQ ID NO: 206565 - DNA, 83 bp, Homo sapiens
gagtcatcctgggcagaaggactgaggccatgcggaccctcagttggaagcacaccctgggcctggtgaccatggacgtggag

SEQ ID NO: 206566 - DNA, 100 bp, Homo sapiens
gttcgggtgtctcgtgtgtgaacatcacagggtctgaaaagccctcaagaaagcctcagtgatcttggtgccatagagagtctccgggtccctggaaagg

SEQ ID NO: 206567 - DNA, 83 bp, Homo sapiens
ctactctctctttctggcctggaggctatccagcgtggaagttaaacgagctgagcctcgggacagcaagagccaagcgccgg

SEQ ID NO: 206568 - DNA, 75 bp, Homo sapiens
gtgaacccacgctgagccagcatactcatgaggtgcccacgagtgtattcggggagaagcttcgagaacaagttg

SEQ ID NO: 206569 - DNA, 100 bp, Homo sapiens
gatcaatgccctcattaaagcagccggtgtaaatgttgagcctttttggcctggcttgtttgcaaaggtgccttatgcctctggcatgcccatcaagaaa

SEQ ID NO: 206570 - DNA, 75 bp, Homo sapiens
cagctctgtctatcctaccaaggatgaagattctgaattcacattagcctctgattttgaaattggacacttttt

SEQ ID NO: 206571 - DNA, 100 bp, Homo sapiens
tcaattctgttgcagtcatatgcggtggaatctgttcttcttttgcatcctacgtaaccagaccaagctgtgggattcagaatggacagtttagaagaac

SEQ ID NO: 206572 - DNA, 99 bp, Homo sapiens
aaatcatggaagttgattactcagtctctaaaaagctaagctgacggcccagagggtgggtgccaattccaccagcagctgcaactgaaaagcaaggtt

SEQ ID NO: 206573 - DNA, 100 bp, Homo sapiens
ttcttacagcttggaagcaaaagtagaacttccaaccaagagactcaagctggaatgggttaatagctcttcaagtctgcaataaaaaatggcctccaac

SEQ ID NO: 206574 - DNA, 74 bp, Homo sapiens
taaagacggacttattgtatatgaagactcacctttggtgtgggttgctgaccgaggaaataaaagaatccaag

SEQ ID NO: 206575 - DNA, 75 bp, Homo sapiens
cctgggcatgctgtctgacctgcagagacagcctggagctgttgcccaaagaattggaagtcatttagttccaac

SEQ ID NO: 206576 - DNA, 95 bp, Homo sapiens
acggtccccactttcccctgagcctcagcacctgcttgtttggaaggctcagtagatgaaggcgtttctgagggcttgcctacacttcaaagcac

SEQ ID NO: 206577 - DNA, 100 bp, Homo sapiens
gaatgctgctaaaaacaagactggggctgctcccatcattgatgtggtgcgatcggtccggacactgtttgtcagcggcctccctgtggacattaaaccc

SEQ ID NO: 206578 - DNA, 74 bp, Homo sapiens
ccaggaaggacccaggacacccggaagccggaaatgacgcaaacatgcagatctttgtgaagaccctcactggc

SEQ ID NO: 206579 - DNA, 100 bp, Homo sapiens
agacagtgagcgttgccaacctgggtgctgcaggtgttcaagtgcagggagttcccgttacaatcactagtgttgcagcggttaagaagattgtctacca

SEQ ID NO: 206580 - DNA, 98 bp, Homo sapiens
tggacctcatgtggaacataaacacaaacctggatttttagaagtaaacatcagtctccaaagataactacatcccttcttcccatcaacaatggctc

SEQ ID NO: 206581 - DNA, 83 bp, Homo sapiens
ggcgctgagtggtttttcggatcatgtctggtggctccgcggattataacagatgcttgtttgctactgatgggtgtgagcaa

SEQ ID NO: 206582 - DNA, 82 bp, Homo sapiens
tagaccatattgcccgtctgacaaattatacgcttacatcctgcttcagcatgtagagcgcatgaagtacaggacaataaag

SEQ ID NO: 206583 - DNA, 98 bp, Homo sapiens
tgatgctcttagctccaataattcatgagcccccctccatgcgcctgaaggcccgacccagcagccctggcttttccgtgcttacctgcagcgccttc

SEQ ID NO: 206584 - DNA, 100 bp, Homo sapiens
tgtcatgattgtttatcctaatcccaatgctgaagtaagattgtcttggaaatactaagttgggtgtctgtgggaggttatgtttatttgagacttctcc

SEQ ID NO: 206585 - DNA, 100 bp, Homo sapiens
ctggtgttgagcaggaacttcgtgcagtacgcctgcttcgggctctttggaatcatagctctgcagaaaccatcatagcctttgcctgggaaccaaatgg

SEQ ID NO: 206586 - DNA, 87 bp, Homo sapiens
ggcattgacctctcagatcccaaacaactggcagaatttgctaggtcaataagcatgcgttttctggagggagagacaccatcgagg

SEQ ID NO: 206587 - DNA, 98 bp, Homo sapiens
accggggccgccttcagccaagcggcctaaactctcatctccggccctctcggcgtccgccagcgatggcacagctgaactagatgcagagcacgccc

SEQ ID NO: 206588 - DNA, 75 bp, Homo sapiens
cgggagctggacggcgagcgcgagcggcgcgagaaaagatcctgaaggagctagacgagtgctacgagcgcttca

SEQ ID NO: 206589 - DNA, 100 bp, Homo sapiens
cggccgcctcttgagtgctttggacgatcttcagctggccaacagcaccatcattgcatttacctcggatcatggacatggatttgattgacatactttg

SEQ ID NO: 206590 - DNA, 98 bp, Homo sapiens
tcgtggtgtgttcttgactccgctgctcgccatggtatcctccatgaaatgtgggatccttccaatttctcaagagtctcttcttctgggagatgttg

SEQ ID NO: 206591 - DNA, 100 bp, Homo sapiens
ctgcctccctgccccagcccatcctctctaaccaagatcctatagcaatggaactcagcgatgcaaatctgcaaacactaacagaatatttaaagaaaac

SEQ ID NO: 206592 - DNA, 51 bp, Homo sapiens
tggaggacgagatgcccaagactctgaagccaccattcttcagagggcaat

SEQ ID NO: 206593 - DNA, 75 bp, Homo sapiens
tagctggttttggaacagtttcagctggcatggtactggatatagtacagagctaatgtcaaaccccgaaattcc

SEQ ID NO: 206594 - DNA, 82 bp, Homo sapiens
gctacagcttcagaagaccgaagcgttcgtatctggaaggaactcttaacattcagggatgtggccatagaattctctccag

SEQ ID NO: 206595 - DNA, 100 bp, Homo sapiens
gccgcgccggaggagggcggggagaggaccatgtgagtgggctccggagcctcagcgccgcgcaggttcctatatgatagtggactcttcagatcacgac

SEQ ID NO: 206596 - DNA, 100 bp, Homo sapiens
tggaggggtcccaggaggtggtgaatatggccgtgatcgtgcccaaagaggagggcgtcatcagcgtctccgaggacagcaccagggaaaaattggagtt

SEQ ID NO: 206597 - DNA, 74 bp, Homo sapiens
tctttcctaccatctaaaatacgaaggtttctggctggggttgaaaaatataggccagtaaagctgaatgaaat

SEQ ID NO: 206598 - DNA, 75 bp, Homo sapiens
caccggagtcctgccagctgtccggcgctgggcggggatctgatgagcttctttcttctggcatcattaacggac

SEQ ID NO: 206599 - DNA, 88 bp, Homo sapiens
gcgcgcctttgtgcgcgcgccgaggagacgttgatccagcagcacgtgtcatttcattaggtcctgtatctgatgttgtggttagtgg

SEQ ID NO: 206600 - DNA, 83 bp, Homo sapiens
agcacatcttcacactggacactctcgtgcagcattcttcaggtcatctgaaccttctgagaaaacatggtcaacgtcttgaa

SEQ ID NO: 206601 - DNA, 82 bp, Homo sapiens
ctccacctgaaggaccagtgtctgatcagctgctgcgtgctcagccccagagcagttgcagagtgggcaggatcttaagacc

SEQ ID NO: 206602 - DNA, 99 bp, Homo sapiens
taaacgcccccaatttcccagctgctaaaggaagaggaaggctgaagccgacgtagcttctctgaacagacgcatccagctggttgaggaagagttgga

SEQ ID NO: 206603 - DNA, 100 bp, Homo sapiens
gggcggccacccggagccagcggagggacagacagcaaggccatcgtggacgggaacctgaagctgatcctgggcctcatctggaccctgatcctgcact

SEQ ID NO: 206604 - DNA, 100 bp, Homo sapiens
ccactgtccgccagacctgctgctgcttcaatgtccgcatcgcaaccaccgccctggccatctaccatgtgctcatatgttagatttgatatcattcgaa

SEQ ID NO: 206605 - DNA, 83 bp, Homo sapiens
cttggactgagtcctgcaggacacagagaaatgttctttactaccatggaaagccaccttctgcgctgcaaagtgttagaaat

SEQ ID NO: 206606 - DNA, 101 bp, Homo sapiens
ggaagatgcaagcggtttgggaccttgaacaaggcaaatatggttttgtgatgcagaagaccacaagcctttgaaaaaaggaagtcgaactccttcagaca

SEQ ID NO: 206607 - DNA, 82 bp, Homo sapiens
atttaacagaagataatccaaatctttcgactgcatcaaaacatgtaaacaaggacctcggtaatatggaagaaaacaaaaa

SEQ ID NO: 206608 - DNA, 75 bp, Homo sapiens
ctgccccgctacctcatgggggagacgcagctgtgcaccacaaggctcagccggagatgggccctgacgtgctgg

SEQ ID NO: 206609 - DNA, 103 bp, Homo sapiens
ttgtataaaaaaaatctaaaattggagtcctccacacatgcttgtaaaataaagttgccttagaagtggtgagatgggaagctgcagttggaagaccctggag

SEQ ID NO: 206610 - DNA, 101 bp, Homo sapiens
gtgagaacccgcccatgaagccagatttctcccaggttcctaaaagtaaagctttagaggccaccaaattggcaattgaagctggcttccgccatattgat

SEQ ID NO: 206611 - DNA, 100 bp, Homo sapiens
accggatgagagagctatgtttctgaagcctgtcttagaagtgatctgctcccgaatgcgctacatctcctcccagattgagcggcccattcgcattgtg

SEQ ID NO: 206612 - DNA, 135 bp, Homo sapiens
cctggtctccggggccgctggattctgaggaccagcagatggccagtcacgagaacccagcgtccgtctccaagagagtatgaagagagtgcgtctgtagggcagggaagatggcggacaagcgcaaactccaag

SEQ ID NO: 206613 - DNA, 101 bp, Homo sapiens
ctgcccgcccaggcgtcggccacgagagagcgggagcctcgctggtccccatttcagattgactggatggttcctgaggctcacagacagaactgtaggaa

SEQ ID NO: 206614 - DNA, 82 bp, Homo sapiens
cagagtggctgtgtcagaagggcctcgtgtatgacagaaagcactacaaacaccactggtttcccgaaaagccgtccaaggg

SEQ ID NO: 206615 - DNA, 88 bp, Homo sapiens
gttttctgccttcctgcttctagaaccacctcaggttttgggatttgagattgacgcggtgaactctgtccagttttcaaaccacaca

SEQ ID NO: 206616 - DNA, 74 bp, Homo sapiens
ctgatgtctgctttcagtcctgaaaagctgaacgagtcactcaagactgcttgcaactgattgcagacagtgaa

SEQ ID NO: 206617 - DNA, 75 bp, Homo sapiens
gctctgctcctgggtttgctgtgtggcccttgattgctcgctgtaagcagctcatctgtgaccccagctacgtaa

SEQ ID NO: 206618 - DNA, 88 bp, Homo sapiens
gaggaagatgcaagcggtttgggaccttgaacaaggcaaatatggttttgggatcatagacggtatttctatgtaaacgaacagtcgg

SEQ ID NO: 206619 - DNA, 83 bp, Homo sapiens
aacgaggtcaccccgcggatctacgtgggcaacgccaagagtgagccatggagctacgtgtggggaacaagtaccgcctggga

SEQ ID NO: 206620 - DNA, 75 bp, Homo sapiens
tccacagcagcgactggcccaagttctttgaaaaggttgatgataattagaagcatgctttccactgaacttccc

SEQ ID NO: 206621 - DNA, 133 bp, Homo sapiens
cacggaaatggatgaactgtgttacagagatggagaagaatatgaatggaaagaaactgctagctttatcttcaagccaggatgaagggagactgggcaagactcttacgccccacactgcaatttggtcttg

SEQ ID NO: 206622 - DNA, 83 bp, Homo sapiens
agcctctgatcatgatgggaacattgtggagctggccttccagaccacttgccacattgtcaagccagccccagtgcctgctg

SEQ ID NO: 206623 - DNA, 122 bp, Homo sapiens
caattacaatggcacttcaatatggctcagaaagtgaagaagatgctgctttagctgggctgaaaaactgggtggtagctgaagacgtggtgtttaaacctgtggctgccccctggaacccg

SEQ ID NO: 206624 - DNA, 82 bp, Homo sapiens
cctacagagattcatatgagagttatgatattggtacagaaacttttaaacaagtttattgtcgaaagtctcacaccttcat

SEQ ID NO: 206625 - DNA, 90 bp, Homo sapiens
gagctgcggctcggacgccagcggacacgcgggcgagatgtggacgaatgtgccgcagggctggcccagtgtgcccatggctgcctcaac

SEQ ID NO: 206626 - DNA, 75 bp, Homo sapiens
cggaagtgcagctgcctcagttcttagcgcaggtactccaaagattcaggtttactcacgtcatccagcagagaa

SEQ ID NO: 206627 - DNA, 98 bp, Homo sapiens
gttgcctgcagcggcccggacccgagaggccagtcttcagagacctgagattaaacttgaatcactgaaagaagatattaaggaattctttaaaatat

SEQ ID NO: 206628 - DNA, 100 bp, Homo sapiens
ccggccgcggggaggacatggccgcgcacaggccggtggaatgggtccaggccgtggtcagccgcttcgacgagcagtagagacggggcttcatcaggtt

SEQ ID NO: 206629 - DNA, 75 bp, Homo sapiens
cgctgcctttgctttaaaacagtattacttgcgaatttcgctaaggagtttgtgatcagtgatcggaaggagctg

SEQ ID NO: 206630 - DNA, 98 bp, Homo sapiens
gtatgcaccagctgtcatcgtttgtcagaagaaagcagctggctcagaaaacagctttatcttcaagccaggatgaagggagactgggcaagactctt

SEQ ID NO: 206631 - DNA, 90 bp, Homo sapiens
gctggctttgccattagcgggggcctttcctgaggacggcgtacggagtgtgggttccagcaacagatagaaatgctttaagttcactct

SEQ ID NO: 206632 - DNA, 101 bp, Homo sapiens
tggatttaccagaaagatgatcagcttataattcagagaggtactccaaagattcaggtttactcacgtcatccagcagagaatggaaagtcaaatttcct

SEQ ID NO: 206633 - DNA, 100 bp, Homo sapiens
gcagcaagcggggcgctgtgtccccaagctccccgtcctcggaagcagctgacacaggatgatgatactgatgcggttgagattgctatcgacaacacgg

SEQ ID NO: 206634 - DNA, 75 bp, Homo sapiens
gatgctatgtgagatcttgaaagtgggcgagttgcgcattgtgtccagatctggcaccctgacttatgaagcagt

SEQ ID NO: 206635 - DNA, 78 bp, Homo sapiens
gggaagcagggattccagtgccaagttcagaatctataacgtgacctacctagaaccctccctccgcatcgcagccag

SEQ ID NO: 206636 - DNA, 100 bp, Homo sapiens
ctcccggctgtgggggccccactgagtatgtcggaggagagcgacatggacaaagccatcaagcctcagcctcaccatgtgtgtcaggagctgtttccag

SEQ ID NO: 206637 - DNA, 75 bp, Homo sapiens
gaaaaataggccactacatgaaagactgccctaaaaggaaaagggtcttgttttgccacccaggctggagtgcag

SEQ ID NO: 206638 - DNA, 51 bp, Homo sapiens
ggaagtgtcagcgctactgccgcaggtttgattactcaggagttggaagtt

SEQ ID NO: 206639 - DNA, 90 bp, Homo sapiens
ctgaaaatggggcggaagaaaatacaaatcacacgcataatggatgaaaggaaccgacagaaacctcctgcaaaagtggaagcgaagccg

SEQ ID NO: 206640 - DNA, 83 bp, Homo sapiens
ccacagacccgcgccgccgacgacccagcagccgccatggctctgctccgagttggctggggaacagaccagggaattggtgg

SEQ ID NO: 206641 - DNA, 100 bp, Homo sapiens
gccaccatcaagctgtctaagtccaaagatttttacccaggcatcaagcatgatggaaccatgtgtgatacctgccgccagcaaccaatcattggcattc

SEQ ID NO: 206642 - DNA, 75 bp, Homo sapiens
ctgccctcagcaagttgctgagtgcctgccctgagcagccggtacgtgccctggaggaggccaatgctgacctgg

SEQ ID NO: 206643 - DNA, 100 bp, Homo sapiens
tcatttgatgaagaggataccaaagggattaagggtagctggcttgcttgacccaagcatggacaagtgagaacagatgaaagaggccagcagacccagg

SEQ ID NO: 206644 - DNA, 108 bp, Homo sapiens
tcggaaggcgcgggcaggagcctggcgaggatgcaccttcccctgccttggaaagctgttacaagccagaggcacccggatgtgaggccccagatcacctccagggac

SEQ ID NO: 206645 - DNA, 82 bp, Homo sapiens
gaaagagtcaacagcagtggcaacaggtgttctttgacctaatgagagaaatcagaacaaagaagatgtcagaaaacaaaga

SEQ ID NO: 206646 - DNA, 82 bp, Homo sapiens
aggtgcttctgcggctgtacggagccatcttgcagaggcagccttccaagttttccacccctgagtacacagtggagctgag

SEQ ID NO: 206647 - DNA, 82 bp, Homo sapiens
gtgggatccggttccttggtgtcatccagccttagcaaaccagaggcactactgcagtcttcagttaagcaacaagtagaag

SEQ ID NO: 206648 - DNA, 75 bp, Homo sapiens
atgaaacaacctggcccatgagatgatagctgtggaaggaagatttggagactggagttcaccttgaccctgccg

SEQ ID NO: 206649 - DNA, 100 bp, Homo sapiens
cgacttactggggagagaaagaaaaggaacgggagctgagaggatagtggccaaagcctccaagaacctcatgtccacgcaaagcttggggattgtattt

SEQ ID NO: 206650 - DNA, 100 bp, Homo sapiens
agctgatcaagtatatgactgaagaagctggagctgtgaagttaaaccgacaacagactgatatggctgttaattgggctggaggattacatcatgctaa

SEQ ID NO: 206651 - DNA, 51 bp, Homo sapiens
ctgccgtgtggacccgtaaaataaaatggaattaaacaaccaccatgtcga

SEQ ID NO: 206652 - DNA, 100 bp, Homo sapiens
caacctcgtcatgtcctacgcgacggccaatgggaacgtggaggccaaagtggtgtgcttctaccggaggcgggacatctccagcaccctcatcgccctg

SEQ ID NO: 206653 - DNA, 98 bp, Homo sapiens
cccatcccctatatttatggcaggtacctggactatgccagagtccccaatagcaatccccctgaatatgagttcttctggggcctgcgctcttacta

SEQ ID NO: 206654 - DNA, 87 bp, Homo sapiens
ttcctaccaggtcacacactgttgcagcgcaggaaaatgagcgtaccaaggatctaatcattgagcaaagatttcatcgcacaatca

SEQ ID NO: 206655 - DNA, 83 bp, Homo sapiens
caagacacggactctctccggaccccgcagcgttccgacatccagaatgcacagcgtccgtctccaagagagtatgaagagag

SEQ ID NO: 206656 - DNA, 80 bp, Homo sapiens
cagctgtgcccgggcggcacggccagagtgatcagcagctggactgtgccttggacctaatgaggcgcctgcctccccag

SEQ ID NO: 206657 - DNA, 100 bp, Homo sapiens
ccccccgcccggccagccgccccgtccgggagggaaggatggagacgctgaaggataagaccctgcaggagctggaggagttgcagaatgactcggaggc

SEQ ID NO: 206658 - DNA, 80 bp, Homo sapiens
aatgagaggcccctcaggaccagggtgaaggttgccgaactgtccccctggctggacatgtggggtttgacagcttgcct

SEQ ID NO: 206659 - DNA, 96 bp, Homo sapiens
aaatagaagggaaatgggtaaatgaaaagaaagcacaagaagataaacttcagacagctgtcctaaagaaacaggaagaggctctgcgtcgccagc

SEQ ID NO: 206660 - DNA, 90 bp, Homo sapiens
cttgtttcttatatgtgatgccattccagcactggactcatggaggctgagcatttattcaggaaagtggagaatgaggacatgaataaa

SEQ ID NO: 206661 - DNA, 48 bp, Homo sapiens
gacagatctgagagatactgaggtggtccacaattagtgaaaatctgt

SEQ ID NO: 206662 - DNA, 97 bp, Homo sapiens
cccgaacggccggcgccacacggtgaaggtgacgccgagcaccgtgctgcttcagtttgatgaaggccggaacaactttgaaggggaggtcaccaag

SEQ ID NO: 206663 - DNA, 80 bp, Homo sapiens
gccgctgtgtggttgcaacggagataaattcccggaaccgcgattcggcgtgtcagggggatatgagactttctactcgg

SEQ ID NO: 206664 - DNA, 101 bp, Homo sapiens
aggaacctcttaaagggcgagagcggcgcggagccagaacgcggtcggcccggtccccgccgcacccagcccaggtgctggagaatctggtaaaagcacca

SEQ ID NO: 206665 - DNA, 75 bp, Homo sapiens
gagcaagatcatctggtagaagagggttatgtggtccgaatcagtggtgggaacgacaaacaaggtttccccatg

SEQ ID NO: 206666 - DNA, 100 bp, Homo sapiens
cggccgcggacctgggcttcagtgtgtcgcagcgctgtttcgtgttgcagtgttctaagaacggaagcatctgggctggatggaatttagcatcaagcag

SEQ ID NO: 206667 - DNA, 98 bp, Homo sapiens
aagcgacggcgccatgagtctgacttccagttccagcgtacgagtgcaaagaaaggaggtacaggcccgagctgtgttctaccccctcttagggttgg

SEQ ID NO: 206668 - DNA, 75 bp, Homo sapiens
cttgaatcatgaagctactaaccagagccggctctttctcggacacaactcagatgggaagttcatcgcccgggc

SEQ ID NO: 206669 - DNA, 98 bp, Homo sapiens
gacagactgaaggacagcggcaccgccagacggccagaaagttccgccatgagctggggcacggagctgtgggtgtctgcttttggggcagagttttc

SEQ ID NO: 206670 - DNA, 82 bp, Homo sapiens
cggcagatcctcaggggcaagtacagttactctggggaggtatatttgaaggctcccatgattctgaatggagtctgtgtta

SEQ ID NO: 206671 - DNA, 82 bp, Homo sapiens
cgggaccctcgcgcgcgaccgccgaatcgctcctgcagcagaggtgtccctggccagtgtccttccacctgtccacaagcat

SEQ ID NO: 206672 - DNA, 87 bp, Homo sapiens
cacagagaacttcttatgaatcaaaaaaggtatgctttactcagaataattatattcaagtcagagtacacagtgaagtggcctccc

SEQ ID NO: 206673 - DNA, 98 bp, Homo sapiens
tcgtgcacatccaggcgggccagtgcggcaaccagatcggcgccaaggggtctaatgtgatggaagagcaggacctgcgggacatcggcatcagcgac

SEQ ID NO: 206674 - DNA, 80 bp, Homo sapiens
ggtacctctccttttccctctccctttccctaagggtgcaaatagctatgggcaacttggcctcggccataaggaagatg

SEQ ID NO: 206675 - DNA, 75 bp, Homo sapiens
ctcacactggccttgatttggcagctaatgagaagatgaacgcctcacagctgaggagatggatgagcagaggcg

SEQ ID NO: 206676 - DNA, 82 bp, Homo sapiens
ctggacaagatgaccacactccaggaatgccagtgcatcttttgcacagctgccactcctcaggatagtcaggaaggaacct

SEQ ID NO: 206677 - DNA, 75 bp, Homo sapiens
cggcaccaacggcaccaactattcgcggagctggaatgactggcaacccagggatcgcttacacctgagacgaac

SEQ ID NO: 206678 - DNA, 101 bp, Homo sapiens
tagaaaggagacccgactgcaactgctggattgctgcaaggctgagggacgagaacgagcaaattcaacacccaacagcttccttaatagcaaaggtagca

SEQ ID NO: 206679 - DNA, 96 bp, Homo sapiens
ctggcccagccaatcctggagctgctgttgcagcacttgttccccaaacaagtgctcctacattctgctggccagctcagcgtccctggaagggaa

SEQ ID NO: 206680 - DNA, 135 bp, Homo sapiens
acgagggccagctcagccaggctgctggcctgggtgcctcccagatgttggactcccagctcccacaggatgaagcctgctgggagcgtgaatgacatggccctggatgccttcgacttggaccggatgaagcag

SEQ ID NO: 206681 - DNA, 83 bp, Homo sapiens
attcattattacatgaagtatcatgtttcttattaagggacatcagcgagagaggcagggatcttgagcagattttatctcag

SEQ ID NO: 206682 - DNA, 119 bp, Homo sapiens
tcccggctctcgtcagcctcccgccggccgtctccttaacaccgaacaccgactcctccgtcttgctcatgactgggtcccctgggcagagccaggtcctggcagagagcagatatcca

SEQ ID NO: 206683 - DNA, 88 bp, Homo sapiens
gccatctggcgccgactctgggatgaactgatgaagacaaggccttccagtttggaaagtacaggggctcaggtccaggtggcagggg

SEQ ID NO: 206684 - DNA, 83 bp, Homo sapiens
cgagcgggccgccgccgccgccatgaaccccgaatacaaattgtggctactaatttgccccctgaagatcaagatggctctgg

SEQ ID NO: 206685 - DNA, 102 bp, Homo sapiens
caacgtggatcgttgttttgaaacgctgcagaagatgtcaatgttactttcgaagatcaacaaaagataaacaaatttgcacggaatacaagtagaatcaca

SEQ ID NO: 206686 - DNA, 82 bp, Homo sapiens
gtggcggctgcgctggcgcggcttttggcggcctttctgctcctcgcggcccaggtggccgtctgcccggcccagcaccatg

SEQ ID NO: 206687 - DNA, 74 bp, Homo sapiens
taactgtcctccacatattgagaatgagccagatgaccaggatgccccagatgagcatgagccctctccatcag

SEQ ID NO: 206688 - DNA, 83 bp, Homo sapiens
ttgctagtaacgtcatggaggatgaacgacagatatgtgtcacaaagatgtctacacggaactgccagggaatggactcagtg

SEQ ID NO: 206689 - DNA, 50 bp, Homo sapiens
cattttgctgtctcctcctaatacgagaaatatggccgagctctctaagg

SEQ ID NO: 206690 - DNA, 100 bp, Homo sapiens
aggaatatgcagtgggaccattgcacttccgtcaggattgcctacagcgctcctttaaggcacaggttttctcctgccctgcttgccggcatgatcttgg

SEQ ID NO: 206691 - DNA, 88 bp, Homo sapiens
gcaggtcctgagcctcgagccgcagcacgagctcaaattccgaggattctgaaaccttccttgtatccctcctgagacatctttgctg

SEQ ID NO: 206692 - DNA, 82 bp, Homo sapiens
ggggagcggtctccagccgcttcgaagccgccttcttccccctccgccttcctggatgctctgcagaaccaggctgaggcca

SEQ ID NO: 206693 - DNA, 75 bp, Homo sapiens
ctgccagggacagaggccagcgcgctgcaacacaagatcaagaactccatctgacaagttggatggcttgaggac

SEQ ID NO: 206694 - DNA, 100 bp, Homo sapiens
gaaggtgcaaggggtgtttttccgtaagcatactcaggtccaggtgcaggtacagcagtctccgcaacaggtctcggctcagctctccccacaactcacc

SEQ ID NO: 206695 - DNA, 97 bp, Homo sapiens
caagagggtcgccgcaccccaggatggatcccccagagacagcaaggccatcgtggacgggaacctgaagctgatcctgggcctcatctggaccctg

SEQ ID NO: 206696 - DNA, 75 bp, Homo sapiens
gcggagcccggtgacaggatggtatgatctcgtgaaaccttgagagaaactgaatgacgaatgaaactattgttc

SEQ ID NO: 206697 - DNA, 75 bp, Homo sapiens
ggcacgtggactccctttaatccagtgactgtcaggtcgatcatatatcagctggacatcatctccatggcggag

SEQ ID NO: 206698 - DNA, 51 bp, Homo sapiens
gaaaaatgcagtgtatttcagtgccttatgtttgatcatcggccaaggtcc

SEQ ID NO: 206699 - DNA, 73 bp, Homo sapiens
tgaaatcagaggagatgtaactatcgaaaaagtcattactgtgcttgctgcctgtctggaaagtgagaatcaa

SEQ ID NO: 206700 - DNA, 82 bp, Homo sapiens
tttaagaaaaggcattgaggaactcaatcaaaccagtattcttttcacacaggggcctttacaacaactaaacggacaggca

SEQ ID NO: 206701 - DNA, 82 bp, Homo sapiens
cctgcaacctgtccggggatcccagggagctggagcagttcaacatgatggagaacgccatcagctccagcagcctgtacag

SEQ ID NO: 206702 - DNA, 83 bp, Homo sapiens
gaggaatccgtgctccaaactctacactcaaggttcaggaacaagtgcatcccactctctcagctaatgaagagtctctctat

SEQ ID NO: 206703 - DNA, 75 bp, Homo sapiens
ggtgggtgggtggggcagcctttcaggcagacccagattgatcactatgttggcatcgcccgagatcagaccaag

SEQ ID NO: 206704 - DNA, 100 bp, Homo sapiens
gttcagaagctgactctgcaggcaagaccgacgttattttcctggtggctgtgttcaaaaccacccaaaggttgatactgcctctccaagcccaatggaa

SEQ ID NO: 206705 - DNA, 51 bp, Homo sapiens
ataacctaccctgctggattcatgggtgtgaggacttctgcatcttacagt

SEQ ID NO: 206706 - DNA, 74 bp, Homo sapiens
cacgcccaggaggagcaagtccgatggagaggctaagcgtgccaagtcctgccctgccaacttcttggcagctg

SEQ ID NO: 206707 - DNA, 74 bp, Homo sapiens
gatttgtggacggcagattgaaatacagtttgcccagggggatcgaaagagtctggtccatcgaactcatatgt

SEQ ID NO: 206708 - DNA, 100 bp, Homo sapiens
tcgggctgtcgctcgtctacttcctcagcagcaccttcaagcaggttaagaatagacccaccagcatttcgtgggatggtcttgattcagggaagctcta

SEQ ID NO: 206709 - DNA, 100 bp, Homo sapiens
gtccctgaccttagatgtactgggaacatctgagctgctggatcctaagcacttcaagtcagagaagacaggacggggacagttgagggaaggctggaga

SEQ ID NO: 206710 - DNA, 100 bp, Homo sapiens
ctacgttagagagactgaaaagacatctaatttcattgctcggcagaaatcctggctgacattgacttctccactgcaaccatcgagttcattgtctcct

SEQ ID NO: 206711 - DNA, 74 bp, Homo sapiens
tattcaaggggatggagtagatattaataccttacaagaggtatcctggtcagatataggaggactggaaagta

SEQ ID NO: 206712 - DNA, 100 bp, Homo sapiens
gagtcctcgccatgccggcccggcggctgctgctgctgctgacgctgctgctgcccggcctcgggacttaattcagtgcacaaatgagatgaatgtgaac

SEQ ID NO: 206713 - DNA, 76 bp, Homo sapiens
ctcacctgaaaatgaattcaacataccattaggatcttaccgcttcgctgatcctgcaagctccactttctgtgtt

SEQ ID NO: 206714 - DNA, 97 bp, Homo sapiens
cggctgtctgccaagacccggagcatccgcatcattaacacgctcacgtcgcaggagcacacactggaggaaatacaactggagcacgcaaagcaag

SEQ ID NO: 206715 - DNA, 111 bp, Homo sapiens
cgggcttcccaacaccatgccgtccgccttctctgtcagctctttccccgtcagcatcccagccgtgctcacgtgatgatgacagcctcttcatctatgactgcagtgctg

SEQ ID NO: 206716 - DNA, 82 bp, Homo sapiens
cttgctaatgagaagctgtcccagttacaaaagcagctgaacacggagctcaaggagaacctgaaggacaccatgaccaagc

SEQ ID NO: 206717 - DNA, 96 bp, Homo sapiens
gcctagcggagccgggactggaggccgcggagctggtgacccagaactgcgaggcttatgaggcccacatgagggacgtccgcgactacctggaag

SEQ ID NO: 206718 - DNA, 50 bp, Homo sapiens
ggatcgtggcctctcgagagcaaggcacagtaaccttggtgcacgaccga

SEQ ID NO: 206719 - DNA, 100 bp, Homo sapiens
tgaggctctggaacttctgcccagctctccttggaacaagctgaaagctggatacctaatgtcagtggagtcttctgagtgtttcctggaagaagtcggg

SEQ ID NO: 206720 - DNA, 100 bp, Homo sapiens
gatctcatctggaataaagaccctgaggccactgagaagctcttacgttatgcccagatcctgagactccagcaggatgtcttatcaacagcagcagtgc

SEQ ID NO: 206721 - DNA, 74 bp, Homo sapiens
cgtcacactacgacagtgagaaaggaggcctgtctccactaactctggaccctaaaacagctcacccaaatctg

SEQ ID NO: 206722 - DNA, 75 bp, Homo sapiens
caggaattataggagcaggtctgatggttgtggcagcactgcctgaaggtatgagaccagattctaatctttatg

SEQ ID NO: 206723 - DNA, 87 bp, Homo sapiens
gagagcgcgaatatcgtcatcgttagaagtgataatatgcagcatgcatactgggaactgaagagagaaatgtctaatttacatctg

SEQ ID NO: 206724 - DNA, 130 bp, Homo sapiens
gattctctgaagttacacccatcacagaattttcatagagctggactattggaagatgaggcccacagcgacaaggccaaggagagcattcgagccaagtgcgtgcagtacctagaccgggccgagaagc

SEQ ID NO: 206725 - DNA, 83 bp, Homo sapiens
gtagaggcggaggctcaggcagcttgagcctactttggggataaaggattatttggtcttctggatttggaggcaatcagcgg

SEQ ID NO: 206726 - DNA, 100 bp, Homo sapiens
aggcatagcgcctctctgatcttcctgcatggctcaggaattgaatgatctggcacgggaccctccagcacagtgttcagcaggtcctgttggagatgat

SEQ ID NO: 206727 - DNA, 75 bp, Homo sapiens
tcaagacaacagtgatgaggaaagctgtgaaagttctcaagggtaagcttgatgattaccaggaacgaatgaaca

SEQ ID NO: 206728 - DNA, 100 bp, Homo sapiens
ccggcccctcagggccacggctttagcggtgtcttttgcgagcagtcattatggcgaaccttggctgctggatgctggttctctttgtggccacatggag

SEQ ID NO: 206729 - DNA, 100 bp, Homo sapiens
tcacccgcactgagtcaacagactgagcgcgtccaggcctgacagctctgcggctcgggccctgagaatacagattctgttcatcttgctctgaaattaa

SEQ ID NO: 206730 - DNA, 100 bp, Homo sapiens
gggcagaggtgatgtctgggagcccttccttgacagcccgggccgagaagactagacgcttgaagcaaagctgccatcccagaagacgacatgctctcag

SEQ ID NO: 206731 - DNA, 75 bp, Homo sapiens
cgccaactgtcagtgggtggcggtcacctagggttccccactgaaggacttggtccagctgtctggcagggagga

SEQ ID NO: 206732 - DNA, 100 bp, Homo sapiens
aaaggagagcccgtcattagcgtgaaaaccacaagcaggtccaaagagagatgatgaattgactctggaaggcatcaagcaatttttcgtggcagtggag

SEQ ID NO: 206733 - DNA, 83 bp, Homo sapiens
cgactctaaacggactcatgtactttgtcaggtgtggacactgccagcggctgcagccgacttggaatgacctgggagacaaa

SEQ ID NO: 206734 - DNA, 50 bp, Homo sapiens
ccgccctggccatctaccatgtggagtgcgccggtctcggggaaatgccc

SEQ ID NO: 206735 - DNA, 100 bp, Homo sapiens
tgaatttctctgatagagtcttcaaagctgtttctgacatctgtaagacttttattgttgacctcctgtactggagagacattaagaagactggagtggt

SEQ ID NO: 206736 - DNA, 90 bp, Homo sapiens
aacacggcctccgtgagcggcaccaagggcatggtacagtttcatccaggatcgagcagggcgaatggggggggaggcacccgagctggc

SEQ ID NO: 206737 - DNA, 82 bp, Homo sapiens
ccacgatcgcagactccaaccagaacatgcagtccctgcttcctgccaataccctctaccatctgctttggtcagggtgccg

SEQ ID NO: 206738 - DNA, 90 bp, Homo sapiens
ctcagttgtgcgttgcggccagtcgccactgctgctgtgggtgagcgtggaggatgctcagatgcacaccgtcaccatctggctcacagt

SEQ ID NO: 206739 - DNA, 101 bp, Homo sapiens
tgccgcttggaagaaattgcagttctctaccaggttcctgttgctagagcaagtattctttggctaattggagaaaactgtgaacgagttcctaaaattgc

SEQ ID NO: 206740 - DNA, 74 bp, Homo sapiens
tccaaaaaaactccagctgtgaaagcaacataaatgaaacattattccatcatttgtgttgatggatatccagg

SEQ ID NO: 206741 - DNA, 100 bp, Homo sapiens
catgtggcgctgtcggtgggcggccgcgagatcctcaagaattcataatgcactgaaaggaattccagatgaccgagatgggctgtttgacacaatccag

SEQ ID NO: 206742 - DNA, 82 bp, Homo sapiens
gtcgggcttgctgccccccgacaccgctatcctgatgctggaggtcagcagattggcttcttgctaggaagctgtggtattg

SEQ ID NO: 206743 - DNA, 100 bp, Homo sapiens
gcatcgaaagcgttggagaggtgttaccggaacggcggcgacaagggtgttcccgaactagagtggatacgatgaatggattaaagcagataaaatagta

SEQ ID NO: 206744 - DNA, 100 bp, Homo sapiens
tttcctcgtcgagcgcaacccaagatgtttgagacggaggcagatgagaagagggagatggccttggaggaagggaaggggcctggtgccgaggattccc

SEQ ID NO: 206745 - DNA, 100 bp, Homo sapiens
tggaaatatgctacagatagatgttaaggacatctgcaaatctttcaccaatgtaagtgctcatctccagatggaggtagaaagacttatagtccaaagc

SEQ ID NO: 206746 - DNA, 100 bp, Homo sapiens
cgccggcgccgagggacaccgcagtatgaggcagagtggaatgcagtagccctctgggcctgggatattgtggttgataactgtgccatctgcaggaacc

SEQ ID NO: 206747 - DNA, 75 bp, Homo sapiens
cgccctgggccgggccccaccggacggcgccatgtcagaaccggctggggatgtccgtcagaacccatgcggcag

SEQ ID NO: 206748 - DNA, 82 bp, Homo sapiens
ctctccgggcacgtcaaccccttcctcccgtatatcagacaatgcagatcttcgtgaagactctgactggtaagaccatcac

SEQ ID NO: 206749 - DNA, 75 bp, Homo sapiens
ggtcatctgcctgctcaaggagcagatcagcaatgcctccggtgtggctgtctctgatggtgtcatcaaggtgtt

SEQ ID NO: 206750 - DNA, 50 bp, Homo sapiens
gtttttatccatggatgacttgcttgggttcttgatagtccacaatgggt

SEQ ID NO: 206751 - DNA, 90 bp, Homo sapiens
ggtttgggactgccccggcaactccagggtgtctggtccacgacctatcctaggcgccatgatatttggatttgacctgcattttggaat

SEQ ID NO: 206752 - DNA, 75 bp, Homo sapiens
gcctcctgagtagccgggattacaggactcacttgagataccctctccttgctgaagtttttcttgacttctcca

SEQ ID NO: 206753 - DNA, 100 bp, Homo sapiens
ggcagactggtgacttcacttttgagtgcaactgccttccagatacaaggcagatccaaccatccccaccgtggtcctacgatcagtcctaccaatacct

SEQ ID NO: 206754 - DNA, 82 bp, Homo sapiens
gctgactacctgctgtacaccctcaacaaacaccagcgctttggggcttcccacggcacgacatggagacctgtggttgcga

SEQ ID NO: 206755 - DNA, 75 bp, Homo sapiens
actttgggcgtcccattgccatgattgttcagattccattctgtggggaaattgactgtgaggactggatcaaaa

SEQ ID NO: 206756 - DNA, 100 bp, Homo sapiens
cagcgcgggatcccagcctcaggcgtgcgcggacggtgtgcgggttttgcacactagggaccaagaagccctcggggacactgctgagaaaagactgccg

SEQ ID NO: 206757 - DNA, 76 bp, Homo sapiens
atttcaggaattaagtcaaccacgttctcataccagcctgaagtgacaacactgcagctgaaggaggagttgctgg

SEQ ID NO: 206758 - DNA, 75 bp, Homo sapiens
ccaccctgtgatccagcccaactacttgtcaacagaccaaagagaaccctgtacagtaagaaatatggtgtggac

SEQ ID NO: 206759 - DNA, 100 bp, Homo sapiens
ctggtacaggtcaccacgcaccgactatgtcgcctgccaccgagccgggcccacctccccaccaaggaagatgtagccgcctgtcccgggagcctggact

SEQ ID NO: 206760 - DNA, 100 bp, Homo sapiens
atcacgaccacatttgtcatgatgacagtgacaagatggccgccctgctcccccaatgaaaggccagcttcgaagaaaagctgaaagggagacgtttgca

SEQ ID NO: 206761 - DNA, 100 bp, Homo sapiens
gatgtttccagccctgcctcggcggaccaaaggatcgttctgtacttgcgcatgtgccttgcgcacagtgcgggggtggtgcccacctctcagagtttgg

SEQ ID NO: 206762 - DNA, 100 bp, Homo sapiens
ggaactgttgatatagccagagcccgaaaagaagattactctgcaacagctaaaggtgtcgtgaaaactacccctaaaagccaaaatgggaaaggaaaag

SEQ ID NO: 206763 - DNA, 100 bp, Homo sapiens
cagacctggtcacctgtctggagcaaataaaagagccctgcaatttgaagatacatgagacagcagccaaacccccaggcaacgcggtaaaaatattgct

SEQ ID NO: 206764 - DNA, 90 bp, Homo sapiens
aacaaaaaagaggacgttttcacggagggcagatcgggagcggtgccgagaaaaatttccttactagatgacatttcatcgcaatgtccg

SEQ ID NO: 206765 - DNA, 60 bp, Homo sapiens
cagcctcaggcgtgcgcggacggtgtgcggagaatggaggtgttgtccaagttggagaat

SEQ ID NO: 206766 - DNA, 90 bp, Homo sapiens
gaaacgggccgcgaaccgcagtatcatgctggccaagaagatcatcattaaggacggaggcacggtttatgatgataaagactacaggag

SEQ ID NO: 206767 - DNA, 74 bp, Homo sapiens
ccatctgtggaaggacctaccaaccagcttaccacagtgcggagactcctttctgaaaaggccactcacgtgaa

SEQ ID NO: 206768 - DNA, 82 bp, Homo sapiens
attctggacagctggtaaaagtctgtgccccaatggttcgatattcaaagtgctgctctccctgcgcattttgctactgatg

SEQ ID NO: 206769 - DNA, 101 bp, Homo sapiens
ggcggccccgcgcagcccccggccgcagcgcaggcagcccagcaggctggcgcccatgcggctctacacgctctccaagcgccactttgtcctcgtgtttg

SEQ ID NO: 206770 - DNA, 100 bp, Homo sapiens
ttttcgaactcttcatcttgtgaactgacaggttctggatcctggaacaacatgctgaaactgggttgcaccattactcagacttctaaagagactattt

SEQ ID NO: 206771 - DNA, 83 bp, Homo sapiens
cgcccgctgagcttggcgcacgggccgaccaggttacgggcaggacttgagtggcttcggacagggcttctcagaccccagcc

SEQ ID NO: 206772 - DNA, 74 bp, Homo sapiens
aaccgctattgagcacttccagcccaacgccgatctgctgttcaggagccgcccaggaggctcctcaggccgac

SEQ ID NO: 206773 - DNA, 100 bp, Homo sapiens
caccgcaggacacaggaccacaagatcgggatctgcggccgcaccggcagtgggaagtcctccttctctcttgccttcttccgcatggtggacacgttcg

SEQ ID NO: 206774 - DNA, 75 bp, Homo sapiens
gtgtatcaagtaatggtgcaaagcctgaatgccttcccagaccttccaccttaggttctgctgcaaaaagcacca

SEQ ID NO: 206775 - DNA, 75 bp, Homo sapiens
tgattgttctgcgcaggttggagattccaactccacagagtgaccagagagaggacgtggctgaagacaccaaag

SEQ ID NO: 206776 - DNA, 75 bp, Homo sapiens
aaaagaggccatattcaatgaaggaacactgcctcatggggatcaaaggaactgtgaagcgtagcacagacgggg

SEQ ID NO: 206777 - DNA, 74 bp, Homo sapiens
ctgcccagccaccagcaaccccccagatcagccaaatggccgatgacacagtggcagaactggacaggcatctg

SEQ ID NO: 206778 - DNA, 82 bp, Homo sapiens
aaaacggcgagagtgggcgagaacgtccactgcgggccggcgaaagctgccattgagacccagagcagcagttctgaagaga

SEQ ID NO: 206779 - DNA, 75 bp, Homo sapiens
gacatttgacccagagaaggagacattgacaatgacacaccagttactctgggagtatatcttaccaagaaggaa

SEQ ID NO: 206780 - DNA, 103 bp, Homo sapiens
ggaagatgcaatgctgatgtttgataaaactaccaacaggcacagaggtatttctgggaaaagccagcttctgtttgcactggtcttcacaactcgttacctg

SEQ ID NO: 206781 - DNA, 90 bp, Homo sapiens
ggcgaatgctgggagagtccgacgagcgctgcactaacgcaggatccggctgccgaaggtcctcgccagacagtacaatgtagattataa

SEQ ID NO: 206782 - DNA, 82 bp, Homo sapiens
aaaattaaaagaggagcagcatggcatttcagtcactggtttgcagagtccagaaatggtggagtcaatgaagaaagtagca

SEQ ID NO: 206783 - DNA, 100 bp, Homo sapiens
tcggccgcccgggaccgccagctctgtccgctgcccacagcctagcagtcgggaccgtactgagcactgtgacttctgccgtgttcaccgtgggagacaa

SEQ ID NO: 206784 - DNA, 100 bp, Homo sapiens
gatgatgtcttggcagatgttgttgaagataaagacaaggtcaccatcgtggtccttggcaacaagtgtgacttacaggagcagcggcgtgtagacccag

SEQ ID NO: 206785 - DNA, 100 bp, Homo sapiens
cgaccttccttgctttcagaatttcacccaggttctgacagaatggatgatgaacttgttgttggacatagtgcaagatcagacatctccagcttccctt

SEQ ID NO: 206786 - DNA, 88 bp, Homo sapiens
atggagacagatcgcgagcggctgcggaccatttataaccgcgacttcaagatcaggcccaacacagagatactttcattgaagaacg

SEQ ID NO: 206787 - DNA, 102 bp, Homo sapiens
caagactggtccacggagtgtatgaccacaaacagccatcaagatggagtctcccaggcgggaatgcaatggtgcgatctcgacttcactgcaatcttcacc

SEQ ID NO: 206788 - DNA, 100 bp, Homo sapiens
agcgatgaaatccaaaggtgaatcttttggttggtgattttgatgatagccacaaagcaagcaggagaatggatcttggagaatgtctgaaagtccatga

SEQ ID NO: 206789 - DNA, 100 bp, Homo sapiens
ttgaagcacagggccctgagcctccaggtgcaggcatccgtgtacaagatttgcagagaaatgtatgacgatggagtgggtttaccctttcaaagtcagc

SEQ ID NO: 206790 - DNA, 82 bp, Homo sapiens
ctgggacccaccctgagtcgcatgaaggacttcaccaagggtttcagccctgaggtagagaatggagccgaatacatcttgg

SEQ ID NO: 206791 - DNA, 88 bp, Homo sapiens
caggctaatgttccttcagctctgccatcactccctgccgggtcagggattttggcattagagaagctcggtgctgtcttcaatcaag

SEQ ID NO: 206792 - DNA, 51 bp, Homo sapiens
tcgcagtggtcgcttcttctccttgccactgccaaaaaatatggtgtctcg

SEQ ID NO: 206793 - DNA, 100 bp, Homo sapiens
gctggttatgatgctgttgcctcggctgtttctggtctgatgcacatcacagggcctgaggtcctccaaaagctggggaaagctgatgagacaaaagacg

SEQ ID NO: 206794 - DNA, 100 bp, Homo sapiens
cttccggagtccgccccgtgaggagaatgtagtggccacagaagaagtagttactgcagaatctgtggatggtgccattcagcaagtagttagttcaggg

SEQ ID NO: 206795 - DNA, 75 bp, Homo sapiens
ccggcatctgtcttgagctcccagcaagggttgtccttggctatcttgatgacccaagtgaggacattcaggatc

SEQ ID NO: 206796 - DNA, 74 bp, Homo sapiens
tcaaggaaacctttccaacacagatgtccaagctgccaacacgtcatctactctgtgaaatttttcatttcata

SEQ ID NO: 206797 - DNA, 107 bp, Homo sapiens
agcgagctgagtggttgtgtggtcgcgtctcggaaaccggtagcgcttgcagcatggttttaaaatcaaagatgggaaaatcggagaaaattgcccttccccatggc

SEQ ID NO: 206798 - DNA, 75 bp, Homo sapiens
gtcgcgcagcgtaacttcattcttcagcaagtgaattcatggtattttacttttttgggaaatactggaaatgaa

SEQ ID NO: 206799 - DNA, 100 bp, Homo sapiens
cagagattgagaatgtccatggatttgtttctcattctcatatttcaccaataaagcctctactcaatagtccccccagctttgtgtgctggtctcgggg

SEQ ID NO: 206800 - DNA, 129 bp, Homo sapiens
gcttgaggaagcaggcagggaaatgtctgccgccgccggctctcgggagcgcaacactgcaggtgctggagaatctggtaaaagcaccattgtgaagcagatgaggatcctgcatgttaatgggtttaa

SEQ ID NO: 206801 - DNA, 98 bp, Homo sapiens
tgacagtagcccagcccgccggccagggtgcaactggaaactgacttgaagattgagaaggaatggaggcagactttgcaggaagatcttcaaaagga

SEQ ID NO: 206802 - DNA, 75 bp, Homo sapiens
atagctccagttttcttcagagaagaatatatgctgaataatgctgttgctggaagatctggaagttactgtagc

SEQ ID NO: 206803 - DNA, 97 bp, Homo sapiens
agggcaacttcgcggtggtcaagcgggccacgcacctcgtcaccaaggccaaggatggtgattgctcacaccaaagccttggacccctcccagcctg

SEQ ID NO: 206804 - DNA, 83 bp, Homo sapiens
tgtctctgatccgcaagcatgctcagaccttcattgctctgtgtgccaccgcccagctcaacattggcaatgtgctccctgtg

SEQ ID NO: 206805 - DNA, 74 bp, Homo sapiens
tcatccagaaggccctgaggaagcaattaccagctctggctgggtcgccacaacttgtttgacgacgaaaacac

SEQ ID NO: 206806 - DNA, 101 bp, Homo sapiens
aggattgagaattgtggctggaggttcggtcgctgccgggaggaggactctgtcgctggagctgaggctggaaaagggctccatgggccttaccccttcgg

SEQ ID NO: 206807 - DNA, 100 bp, Homo sapiens
cacctttggatccgcagaaatcgaggtatggcatgaattgccttattcagtttgaagattttgccaatgtgaatgcatttcgtctcctgaacaagtatcg

SEQ ID NO: 206808 - DNA, 96 bp, Homo sapiens
tctgtttgatatcaccaaactggaggatgcctatgtattccctggggatggcgcatcacacaccaaaggagctgaagaagaagctgttcaaacgcc

SEQ ID NO: 206809 - DNA, 90 bp, Homo sapiens
aatccttgctgtgctgaatcctggctgtgtgaccccaaaatttgcaccatcctgggattgtaaacctggaatgtatgtttgaaaccccag

SEQ ID NO: 206810 - DNA, 101 bp, Homo sapiens
tgatcgagaggatctggtgtaccaggcgaagctggccgagcaggctgagcgatacgacggctgaaggtgatgtggccgccctcaaccgacgcatccagctc

SEQ ID NO: 206811 - DNA, 74 bp, Homo sapiens
ctgggggtcctcagcgtggtctgcctgctgcactgctttgtgcatttgcccagtataacatggatcagttcacg

SEQ ID NO: 206812 - DNA, 96 bp, Homo sapiens
acacgtcttatttaatccacatcatagatgtctttggtggacttgggaaagaggttgctagaagcagcaagaaaaggccaagatgatgaagtgaga

SEQ ID NO: 206813 - DNA, 100 bp, Homo sapiens
tgagccaccccttctctgctgtctccttctcttcctcagggctcccgtgtctgctcgccctccgacgctgctcaggtatttaccttgctgtggattgctg

SEQ ID NO: 206814 - DNA, 83 bp, Homo sapiens
caacaggggacaaaaccagccgctccgactccagggctcctgtctacgaccagggaaaaagaaatagtggtttcagacagtgc

SEQ ID NO: 206815 - DNA, 100 bp, Homo sapiens
catgcaaggtgcttctaggttacccaacagcactatctacgtggtcgaacctggatacctagatgtggacgagtgctcactagcagaaaaaacctgtgtg

SEQ ID NO: 206816 - DNA, 100 bp, Homo sapiens
gctgaggacccacaagaacttcgagatggattccaacatcctgctagacttgttaaggaattgaatgatctggcacgggaccctccagcacagtgttcag

SEQ ID NO: 206817 - DNA, 100 bp, Homo sapiens
aacgtggtggatgtcaactctgctggggagagaagcagaaccttcaagttccattgcacccagtttcatgcctcttgtcttgagagaaaactaagtaaag

SEQ ID NO: 206818 - DNA, 100 bp, Homo sapiens
gtggatggactgcgtcacgcagagcacggggatgatgagctgcaaaatggccgggatgccactgaccagcacatcgtggatgtggcgctgaagatgctgc

SEQ ID NO: 206819 - DNA, 100 bp, Homo sapiens
cgctggccctctgtctgcctgtgtccctgaccatggctccctgcagtaccctttaacgatttgcagagaggtgcctaccaccctgaaggaatgcatccag

SEQ ID NO: 206820 - DNA, 97 bp, Homo sapiens
gtttcagaattgcaattccaaaatgtgtaagacgggatattctcttctgtgctgtcaagggaagccattaatttgctagaaccaatgacaaacgacc

SEQ ID NO: 206821 - DNA, 75 bp, Homo sapiens
cctgaagtgtctttggtccaacgttgttccaggctttcaaggatatgctgtattcagctcaggaccaggcacctt

SEQ ID NO: 206822 - DNA, 75 bp, Homo sapiens
gacctaaagcctgactggggcaagatctttagataagcactctttcaaccaaatgccaatcagaaaatctttgaa

SEQ ID NO: 206823 - DNA, 82 bp, Homo sapiens
agagctgcggaacaggacgccctctgatagtgcagcagctgccccgagccccgtgcttggcaacattccccccaacgatggg

SEQ ID NO: 206824 - DNA, 90 bp, Homo sapiens
tgggctggctctggctcttatcttcggcgctttaattttcaaatgagaatgacatcttcctgggctgggaaaaaggagcttataagaaat

SEQ ID NO: 206825 - DNA, 75 bp, Homo sapiens
gagctcaaaatcggagacagagtattgatgtggccaattagatagtgctttgcatgaagctactagtcgcgtgag

SEQ ID NO: 206826 - DNA, 114 bp, Homo sapiens
cgcgtctgcgggaataggtgcagcgggcccttggcgggggactctgagggaggagctggggacggcgaccctaggagagagcctctgttgagttcccttctgaggaggatgcca

SEQ ID NO: 206827 - DNA, 75 bp, Homo sapiens
atgaagactattactcgttgctgaacgtgcgcagggagaaagtgaagtcactgcttttgctgtcttggatcaaga

SEQ ID NO: 206828 - DNA, 89 bp, Homo sapiens
ccgtccgaagtcggcgacagcggccggggcgcaggcgcccgtgcggaatggcagaatgattacggacctgaagccaaagaacaagatgc

SEQ ID NO: 206829 - DNA, 97 bp, Homo sapiens
cagagagctcccacgactgatgactcctgaaggaaaaccctggaggttcagctttagcttgaggtttcaggccaaatttgagtccctctttaggacg

SEQ ID NO: 206830 - DNA, 117 bp, Homo sapiens
gacatccaggttcagtacgtgcagctggcgccagtgagtgaccacacggccggggcacagagtcctccggaggctgagagcaaacggctgcactaggaacccagcagtcagaccggc

SEQ ID NO: 206831 - DNA, 50 bp, Homo sapiens
gcgtggcagccgtgcgccgccaagaacagcgatttcttgcgggagctcgt

SEQ ID NO: 206832 - DNA, 51 bp, Homo sapiens
gtgtggcggagcgcgcggtgcatgcctgacatttaccccggtaactgctgg

SEQ ID NO: 206833 - DNA, 100 bp, Homo sapiens
ttcacaatcagtgaccacccagcagaacagcgtgggatgttcacaaaggatggtgccatgacaatggtgtgaactacaagattggagagaagtgggaccg

SEQ ID NO: 206834 - DNA, 74 bp, Homo sapiens
ggcggcgggagaggcgccggggccgcacagacatttgaagacagtgatttgttccatttgattggtgttatctg

SEQ ID NO: 206835 - DNA, 87 bp, Homo sapiens
ccatcgaggtgcacttcaaaaacaagaaaatggacccaagtggggtcaaagtgctggaaacagcagaggacatccaggagaggcggc

SEQ ID NO: 206836 - DNA, 100 bp, Homo sapiens
tgctcaaggccggcgagatcgagctcgagctgcagcggggttaaagcacgaattgggagctctcagcgacatcaccagtcagcagccaaagacctaactc

SEQ ID NO: 206837 - DNA, 98 bp, Homo sapiens
gcagccggtaacgttgctggaccgggacgcacgctcagctgaggaggacccccaaaggatgtacagttacccagcacgtgtacctcctcctcctccta

SEQ ID NO: 206838 - DNA, 107 bp, Homo sapiens
ccagctcggcccgcgggggagccccgggagccgcacggtgtggatgaggtcaccattgtcaacattttgaccaaccgcagcaatgcacagagacaggatattgcctt

SEQ ID NO: 206839 - DNA, 49 bp, Homo sapiens
aatgcctcaacaaagttatcaaattggcagcccctttaccagaaatacc

SEQ ID NO: 206840 - DNA, 75 bp, Homo sapiens
ctggcttcagtcccagtgcagggacctcaagggtgtccgcaatgttgccagtgtctgtctgcagattggctaccc

SEQ ID NO: 206841 - DNA, 82 bp, Homo sapiens
gtgtgcaaacccgagagaactgggacccggtcagcccaaggagcaggggtccagcagctctgcggaggcatctggaacagag

SEQ ID NO: 206842 - DNA, 100 bp, Homo sapiens
agtctagccctggggtgaggatgccacggctacccggctccacaattacaagttcatccgaaaatgatgaccggagtggctccagtttggaatggaataa

SEQ ID NO: 206843 - DNA, 100 bp, Homo sapiens
gttcagcaggctgatgaataagatctaagaggaacaataccagttcatctataaagcaatgcttagcttggtcagcactaaagaaaatggaaatggtccc

SEQ ID NO: 206844 - DNA, 50 bp, Homo sapiens
cttgaaaccattagtgagctggttgaggaacaggttagcaccactgagag

SEQ ID NO: 206845 - DNA, 75 bp, Homo sapiens
ggcgtggaccacatagacatttacgcggatgtcggcgaagagttcaaccaggtgctggcaaaaccccgactctgg

SEQ ID NO: 206846 - DNA, 100 bp, Homo sapiens
cttcttcgtgaggctgctcttcgagcggtgatgcaggttctgaatgctgatgccattgttgtgaagctgaactcaggcgattacaagacgattcacctgt

SEQ ID NO: 206847 - DNA, 51 bp, Homo sapiens
cagctgatgcccttcttcgtaatctgggcccttccgtcctggctggagtgg

SEQ ID NO: 206848 - DNA, 80 bp, Homo sapiens
gaaggagacgtggggtcactggtgtatgtcatggaagggtcttactgaagtaacacaaagcttaaaaatggaaaatgaag

SEQ ID NO: 206849 - DNA, 100 bp, Homo sapiens
aaacacaaatcgcctaagaaaaagactggaaaggattctgttggtttcagtgctgatgaaacttgggactctgcaatagatacatggagcccatcagaat

SEQ ID NO: 206850 - DNA, 100 bp, Homo sapiens
tggagatcaagcgcagcgatggttctgggccggagaaggggcgacgttcgggcaccccccgaatggacaatctttccttctgtcaacggcaggggcaggc

SEQ ID NO: 206851 - DNA, 97 bp, Homo sapiens
tggagatggaaaaggagttcgagcagatcgacaagtccgggagctgggcggccatttaccaggaacagcttgagaactatgacttcaccaaattcca

SEQ ID NO: 206852 - DNA, 50 bp, Homo sapiens
tgaaattcatcccaaggctggtctgcaagacattggggacacattgagca

SEQ ID NO: 206853 - DNA, 75 bp, Homo sapiens
catggaatcggtcctggaggacagagagaagggccgtaaggagagagagtccctgcagcagatggccgaggtcac

SEQ ID NO: 206854 - DNA, 76 bp, Homo sapiens
acaaccaatgcatttcctggagaatatatccctactgtcctctacactctgtcaagttgaacctgtgggaagatgg

SEQ ID NO: 206855 - DNA, 99 bp, Homo sapiens
ataagaatgagcattgaactacaatcagtttctaatccagttcacagaaagaacattactactggatggaaatccattccgagttcctcgagcagccat

SEQ ID NO: 206856 - DNA, 83 bp, Homo sapiens
gcggcatgagccggtgaccaagctcggggccgagcgggaggcagccgtggccgagagcttggggcttccttggtcgcacccac

SEQ ID NO: 206857 - DNA, 100 bp, Homo sapiens
ataacgctacacgaagaactaagaatattattagcacaagagcaccatactttgagggttcatgcatgggagatctcagaccagttgttacagatccggc

SEQ ID NO: 206858 - DNA, 98 bp, Homo sapiens
ttaaattaaaaaggaagctattcaccattgaggccaatggtggcagagtctacatagaactatgcttcgtggtgttctggggaaaacctttcgacttg

SEQ ID NO: 206859 - DNA, 100 bp, Homo sapiens
ttggattcagacgccgattcgcccaggattccagacagcattggaaaagacatagaaaaggcttgccaatctatttatcctctccatgatgtcttcgtta

SEQ ID NO: 206860 - DNA, 97 bp, Homo sapiens
ttgctgatctgagctcagacctgccaatttaccagagataattgataacaccctgtaacagctgacatttgacattgtgcagcaaagaaatggttat

SEQ ID NO: 206861 - DNA, 83 bp, Homo sapiens
ctctgctgtgggcgctgctggcgctctggctgtgctgcgcggcccccgcgcatgcccgcggcgccatggctcacgtcggctcc

SEQ ID NO: 206862 - DNA, 83 bp, Homo sapiens
ggatcatgtctgcgagccaggattcccgccggtggctgctggcagcggaatcccccagatcaagtgcttcctcaacggggtga

SEQ ID NO: 206863 - DNA, 100 bp, Homo sapiens
cctgttcctacatcctgggcgtcttcccaggctgtcatataactcctgagaatagtggttcttaactctgacaggcgacactaacaggtgaagatctcgg

SEQ ID NO: 206864 - DNA, 90 bp, Homo sapiens
gaggatgggggctaaccagttagtggtgctcaacgtgtacgacatgcattactctactgactggcagagacaggagaggtagatgtccac

SEQ ID NO: 206865 - DNA, 100 bp, Homo sapiens
tggaaatctccagtgagattgaacaggctactccagagcaaataagcatggacctcaagaatgaattgatgtaccagttggaacaggatcatgatttgca

SEQ ID NO: 206866 - DNA, 82 bp, Homo sapiens
ggatattatcaaatctactactgttcatggcagaccttgcatcgaagtgggagtttcatcaattctctcttgcaactagaag

SEQ ID NO: 206867 - DNA, 75 bp, Homo sapiens
ttttgtgatcgcagcgatgaaagttgcagagtgggcaggatcttaagacccgataggtgcagaacccatctggac

SEQ ID NO: 206868 - DNA, 121 bp, Homo sapiens
tttataccctgggccacctccacgactcataccccacagaccactatcacctcgatcaggttttgggatttgagattgacgcggtgaactctgtccagttttcaaaccacacaggtaaggc

SEQ ID NO: 206869 - DNA, 57 bp, Homo sapiens
cttcccagcattcctacagatataaatagataacggagggcagactttggcaggggg

SEQ ID NO: 206870 - DNA, 82 bp, Homo sapiens
cccccctgagcagaggactgtaccttgtaagactcttccagctggagttggaggctgacgccctagtgaatttccatcagta

SEQ ID NO: 206871 - DNA, 83 bp, Homo sapiens
ccggagcccaaacccggggcaggcgggcagctgtgcccgggcggcacggccagggaacggcaggagcagctgatgggatatcg

SEQ ID NO: 206872 - DNA, 90 bp, Homo sapiens
ggtctggtagaaacaccaacaggatacattgaaaggagcccatgaaatcaagagcaccacagctacatttggaatacagattctataagc

SEQ ID NO: 206873 - DNA, 90 bp, Homo sapiens
gggaagtcaacgatgctagaagaattggaaagtattgtggtgatagtccacctgcggaacagaaagaacagcttcaaaagatgaaagact

SEQ ID NO: 206874 - DNA, 95 bp, Homo sapiens
aaaattctccagaagagatttatggcagcctcactcccagtagtttctgcatttagtgagataaggccacagtgtcttgttatgacaggtgctcc

SEQ ID NO: 206875 - DNA, 83 bp, Homo sapiens
gcagaggtgccgacatggggcttaagatgtcctgcctgaaagggctttgttcgcgggggtcacagctctcatggctgcagcta

SEQ ID NO: 206876 - DNA, 75 bp, Homo sapiens
ccaacgcccttcgcaaggcccctcagcacacagctgtcggcttcaaacagacgctggtgaaaacagcagagctgc

SEQ ID NO: 206877 - DNA, 100 bp, Homo sapiens
gatttcaaaccttcagaaatagaagttggagtagtgacagttgaaaatcctaaattcaggcatggattccgtgaaggaacaacacctaaacccaagaggg

SEQ ID NO: 206878 - DNA, 107 bp, Homo sapiens
ggccaatgtgggatcgatgtttcaatattggaagcgctttgatttacagcagctgcaggccaccagcccctcgggttccaagatgcagctactggagacagagttct

SEQ ID NO: 206879 - DNA, 96 bp, Homo sapiens
aaattctggtgggagaacaaagctgaggtccagatgaaagagaagtttctggtcactccccaggattatgcgcggaaattgacaatggcccttcag

SEQ ID NO: 206880 - DNA, 82 bp, Homo sapiens
ccggattgcacgtggagggccgcccgaagggcactctcggacattaacccgcattctgcttccgccctgcgctgccagtctc

SEQ ID NO: 206881 - DNA, 101 bp, Homo sapiens
aactcagcgatgacatccctttccgagtcaactggcccggcaccgagttctctctggtatggacgacaaaggcgacccgagcaatgaggaggcacctaagg

SEQ ID NO: 206882 - DNA, 46 bp, Homo sapiens
agattgcaaatcagactggaagatgacatggaaggtctttaatgta

SEQ ID NO: 206883 - DNA, 83 bp, Homo sapiens
cttggactgagtcctgcaggacacagaacaagttgaaatcatcgcagaaggataaagttcgtcagtttatgatcttcacacaa

SEQ ID NO: 206884 - DNA, 50 bp, Homo sapiens
accgggatgtgcaggccgggagcccaatgatgatcattactcagaagatc

SEQ ID NO: 206885 - DNA, 98 bp, Homo sapiens
gagattggcacaggaccagactcaagacacacaactcataacagttgatgaaaaattggcgtaacattcatggggtaagcaaagaaaaaataacaaga

SEQ ID NO: 206886 - DNA, 100 bp, Homo sapiens
ctgagaactaccgccgctccgcagccacggctgaacccatcagaaccactgtcttccagtaccccgtgggctggccaccagttcaggagctgcctccatc

SEQ ID NO: 206887 - DNA, 90 bp, Homo sapiens
ttatattcatctcaaaaacaaaattctgaactcaggacttggcaagacctgccagattctgtgcatgatgctgcgcaaattcagcttccc

SEQ ID NO: 206888 - DNA, 74 bp, Homo sapiens
tctccgccatgaacctgaggggcctcttccaggacttcaacccgaggtgatggccggtacggcagcaatgacga

SEQ ID NO: 206889 - DNA, 100 bp, Homo sapiens
ggaaatggctgctgttgcttctgggccagaggaagagaatgaggattttttatcaagcagaaatgcatcgaacaacgagaatcaagatcactgagctaaa

SEQ ID NO: 206890 - DNA, 100 bp, Homo sapiens
ggttcagcagttcagggagctcacatttctcatattgctcaacagatatccacacagaagcagttcaggctgcactggcaaagcataaagaacagaagat

SEQ ID NO: 206891 - DNA, 89 bp, Homo sapiens
aggagctgcacgcccacgtggtgcttcccgacccggcggccacccacgcattctgtgtctggctgactctgccgggagctgaaacccag

SEQ ID NO: 206892 - DNA, 82 bp, Homo sapiens
ctcatgttcactacccttcatgcatgaaagacaaagctactcagtgcattcccttattcgtggaagcagccttagaaagact

SEQ ID NO: 206893 - DNA, 74 bp, Homo sapiens
cagattcgcagtggtcgcttcttctccttgaagtctcaggggatccagaactgcagccagtccttgctgggctg

SEQ ID NO: 206894 - DNA, 83 bp, Homo sapiens
aagtgctgcgcacctacttggagctggtgctttgcgtgctggtcagcatccggaacaacagttgtggacatcggatacccaag

SEQ ID NO: 206895 - DNA, 75 bp, Homo sapiens
ttttcttatgctgggatgtgccttagaggattatgggagtacaagcgcaagctagccagagtttccctggtgcgc

SEQ ID NO: 206896 - DNA, 98 bp, Homo sapiens
catcagccatctcttagtccagcaagtcctcatagccaggaaatggagatcttcacccttttcaacaaaccgaagagccatcagaagtgccggcaata

SEQ ID NO: 206897 - DNA, 100 bp, Homo sapiens
caaaaagactcctgactgctgagggtgtgtttgaccatcgaatgaagtgctggcagaaatgggaagatgctcaaattactttgctcaaaaaacgtgaagc

SEQ ID NO: 206898 - DNA, 51 bp, Homo sapiens
aaaagcacagaaatggactatcaaatgatatttggagttcttacaacatgg

SEQ ID NO: 206899 - DNA, 80 bp, Homo sapiens
agcaatctcctcctccactgccactacagggaagtgcatcacatgtcaggttttgagcaaaattttggactgtgaagcaa

SEQ ID NO: 206900 - DNA, 100 bp, Homo sapiens
tttgcctgtgggacgctccgtggatgaggctctgcggctggtccaggccttccagtacacagacgagcatggggaagcaaaccagtccagctacgggggc

SEQ ID NO: 206901 - DNA, 75 bp, Homo sapiens
gacgccgcccgaacatggactccgccggccaagatctcgaggaatttcgaagctacctggagaagcgttttgact

SEQ ID NO: 206902 - DNA, 75 bp, Homo sapiens
ggggtcatcagccatgctccagacagtgtggttccagttgctgggcatattggattttacccatcataggcgctg

SEQ ID NO: 206903 - DNA, 91 bp, Homo sapiens
ccagagcgtcggggaggcaagatgatccaccagcggttccatcctacacttgggtgcctggaatacttattaagaaacgatgcaaatccag

SEQ ID NO: 206904 - DNA, 90 bp, Homo sapiens
gggctatagctatagcctcctgtattttgttaacaacatgaactatcttccatttcccatcatacagttacttgctggacagaagaaaag

SEQ ID NO: 206905 - DNA, 100 bp, Homo sapiens
tgacgctctgggtgaagaatggaagatacagtggaaggtcttgatgcccaggttgtaaatggttacatgattcatgatcaggaaagcaaatcagaggttc

SEQ ID NO: 206906 - DNA, 100 bp, Homo sapiens
cagctgtgcagcgccgtggagcacatgcattcacgccgggtgatgcaccgaggctggaatgagctgctcatcgcctccttctcccaccgctccatcgccg

SEQ ID NO: 206907 - DNA, 100 bp, Homo sapiens
atctccgccctggggtcattgtcagccacccacacagaatatgcctatgggtcctggagggatgaatcagagcggccctcccccacctccacgctctcac

SEQ ID NO: 206908 - DNA, 100 bp, Homo sapiens
gcgaggcacttgctaactcttgggtgggtcatgataactgggtacgtggagttctgttccattctggggggaagtttattttgagttgtgctgatgacaa

SEQ ID NO: 206909 - DNA, 97 bp, Homo sapiens
cggacactttgttattggagaaacatgcagattatatcgcatcctatggctcaaagaaagatgattatgtttggcagttctctaccagtggaccaat

SEQ ID NO: 206910 - DNA, 100 bp, Homo sapiens
ctgcatgcggcgcagctccatccaaagcaccttcagcatcaacccagattgggatgcttggaaggtgtgtctacgacttcgagataatggacttctggcc

SEQ ID NO: 206911 - DNA, 83 bp, Homo sapiens
gggcgagcggtggtttggacgccggcggagacgcgggcgagtgcctccggagccagcgtggtggccatagacaacaagatcga

SEQ ID NO: 206912 - DNA, 100 bp, Homo sapiens
cccaagtcttccactgcagcccaggaggtaaagactctggatggcattttctcagagcagtgggctcgggatgagtttgaaggcctcttcaagcagccag

SEQ ID NO: 206913 - DNA, 100 bp, Homo sapiens
gggatggtgccacaggaggctgtgcgggccccgctccgcttcgaatggaatcctacaagggacactttggtcctattcactgtgtgagatttagtcctga

SEQ ID NO: 206914 - DNA, 100 bp, Homo sapiens
aatacagagagaaaattgagacggagctaagagatatctgcaatgatgtactgtacgagctcaactggaggcagtcctgtgcggaaatctgaagaaaaaa

SEQ ID NO: 206915 - DNA, 98 bp, Homo sapiens
agtggagctcggacgcacggaccaggcccatttccctttcatctgaaccaaatggcgagacaccatcatctttatacagagttgcagcagtacttcta

SEQ ID NO: 206916 - DNA, 51 bp, Homo sapiens
ggatgtgacagcccaagatactaccggtgctggagaatctggtaaaagcac

SEQ ID NO: 206917 - DNA, 75 bp, Homo sapiens
tcttctgtgggctgtgattttcagaggggaatgctaagagttatgtgtctcggtaccacgtgaaagactcctcac

SEQ ID NO: 206918 - DNA, 82 bp, Homo sapiens
ggcgtggcctgaggcttggataagtggggtcatttgattgcccgcctcagaacgatggatctgcatctcttcgactactcag

SEQ ID NO: 206919 - DNA, 100 bp, Homo sapiens
ctctggccgacgagtggagaaagtactaggttttgacaagcttgcatcatgcgtgagtataagctagtcgttcttggctcaggaggcgttggaaagtctg

SEQ ID NO: 206920 - DNA, 98 bp, Homo sapiens
ggacatgtgtgcaaccattggcgtggatccgctggcctcgcctggccggagcaaccctcctcatctttgctaataagcaggacctgcctggagcactg

SEQ ID NO: 206921 - DNA, 100 bp, Homo sapiens
caccctaaggggggagaaatggtgggcgccatcaggaacgccgccttcttggcaaagggcacacgtgtttcacgttgacaggtttgcttgggacgctagt

SEQ ID NO: 206922 - DNA, 75 bp, Homo sapiens
agcccccaaagagtgcagagacctcactgtatctgtaattcttgcccaccaaacaagcctgcagaatctgttcag

SEQ ID NO: 206923 - DNA, 100 bp, Homo sapiens
gaacattcaacgaccaaccagcctccccctgaagattctgccgctgattgctatcacttctgcagaatccagtgggtcccctcttgctgttggctgcaca

SEQ ID NO: 206924 - DNA, 100 bp, Homo sapiens
cccgggcgctgagcccccagcccggagcagccattgagacccagagcagcagttctgaagagatagtgcccagccctccctcgccaccccctctaccccg

SEQ ID NO: 206925 - DNA, 83 bp, Homo sapiens
gacctttgtgtgaagggctggaactgggggacagtgaaatttggtgtgcacaaagcaactgttatcagaacgatttggtcgag

SEQ ID NO: 206926 - DNA, 83 bp, Homo sapiens
gaagaatcccccagggcccagaggccggctgttcggacggaagcatcaggctgcaccagctgagctccgcgtttccgctcctg

SEQ ID NO: 206927 - DNA, 50 bp, Homo sapiens
ctccaacaacatccgcgagatcgagaaagcatcatcattcaccagttacg

SEQ ID NO: 206928 - DNA, 82 bp, Homo sapiens
cgttgcgtgccctacttcaaggataagggcgacagcaacagctctgccggctggaaggtccacattggccaactgtattcaa

SEQ ID NO: 206929 - DNA, 126 bp, Homo sapiens
gcagatggcggatgccctgcagtacctgcagaaggtctctggagacatcttcagcaggtactccaaagattcaggtttactcacgtcatccagcagagaatggaaagtcaaatttcctgaattgct

SEQ ID NO: 206930 - DNA, 98 bp, Homo sapiens
aggagggacttcttggcttctcccagcatagccccaggtgtcatggagaaactccagctgggcccagagattctgcagcgggaaaatccaaggcttat

SEQ ID NO: 206931 - DNA, 99 bp, Homo sapiens
tgagctggggcaccgagctctggatgccttcaattaagttgcagagttctgatggagagatatttgaagttgatgtggaaattgccaaacaatctgtga

SEQ ID NO: 206932 - DNA, 75 bp, Homo sapiens
cattgaattatggcatagatcttgggaaaattgcgtttggaaattttagcattcaggtgccaggaatgcagatgg

SEQ ID NO: 206933 - DNA, 100 bp, Homo sapiens
ccaggagtcatcggacgccagaatctggatttttagactctgaggagcagttggagctaatccacattatggaaatggaaaccaccgaacctgagccaga

SEQ ID NO: 206934 - DNA, 74 bp, Homo sapiens
tttgatgaaagtacttcagggagtcaacggtgagacctaacccagaccatctccccccgccgggctacgatgac

SEQ ID NO: 206935 - DNA, 100 bp, Homo sapiens
ggggaagtcctgaacattccagatgcctatgcagacccacgctttaacaggcagtcttgattgatatggaagaaggggtagtgaatgaaattctgcaggg

SEQ ID NO: 206936 - DNA, 75 bp, Homo sapiens
cgaaattcgccccgattaaagactgtgttgcattatcaggtgtgtgatcctgtaaaattaaatcttccaagatga

SEQ ID NO: 206937 - DNA, 75 bp, Homo sapiens
ggaggaggcacgacacccatgttgtcatggcttaacatcagtgaaattggagcgatttgaaattccaatcaaggt

SEQ ID NO: 206938 - DNA, 83 bp, Homo sapiens
aagcagttttgtaaaacctgcaacactcaatatctagtcctcagactattgtggagttattcttccaagaagttgcaagaaaa

SEQ ID NO: 206939 - DNA, 90 bp, Homo sapiens
cacattaggttgcagtatgtggccagttatttgcctcagtaaaagaaccccctggttgtggaatacgaggcattgctggtacaactaccc

SEQ ID NO: 206940 - DNA, 100 bp, Homo sapiens
ctgtttgagaaaaggcctaagaattttggcattggtctggagcccggcactgtggtcataacagagcaggcagtggatacctgcttcaaggcagagtttg

SEQ ID NO: 206941 - DNA, 98 bp, Homo sapiens
tgagggtgtacaaatacccctttgaattaattatggctgaaccagggaaaatgtgtagagggcatggtggagatcttcgacatgctgctggctacatc

SEQ ID NO: 206942 - DNA, 50 bp, Homo sapiens
cctacttcatggatgtgaaatgcccagacaatgcagatcttcgtgaagac

SEQ ID NO: 206943 - DNA, 75 bp, Homo sapiens
atttgcctctgcacagtttcccaatggtggcagggactcagctcggaattctgtatagaaaaagcacctggatcc

SEQ ID NO: 206944 - DNA, 111 bp, Homo sapiens
tgaagagtgtgcccaggaggagcctgaggtcaccaccccagccagcaccatcagcagctccaccctgtcaggtagagctgagtaaagaagaagtaaaacgcctcattgctg

SEQ ID NO: 206945 - DNA, 98 bp, Homo sapiens
agggcaccgctggctgaaggggggcgtggtgctgaaggaggacgcgctgcccggccagaaaacggagttcaagatcatccagcagctcgtcaacggca

SEQ ID NO: 206946 - DNA, 100 bp, Homo sapiens
gggggacaccttcatccgtcacatcgccctgctgggctttgagaagcgcttcgtacccagccagcactataatcagctgaaccaagccagttggaagttc

SEQ ID NO: 206947 - DNA, 51 bp, Homo sapiens
tcagatgagacacttcttccatgagagtcgagagaaagaacttatgggttt

SEQ ID NO: 206948 - DNA, 90 bp, Homo sapiens
gctgcggcgtgtgcgcgcccgccagctgctccggagatacgattttcagacgatgctggttggttttcaagaaggcttctagcaaaggac

SEQ ID NO: 206949 - DNA, 100 bp, Homo sapiens
ggcaaatttgctcctcaacctaacgagaattatatccagatcgagagacagaagattctgaaagggttcaatgaaatgagagtcatcttggacaatgagg

SEQ ID NO: 206950 - DNA, 75 bp, Homo sapiens
taggactttctattgtggcaaacttccagatgattcctccccggggctgtgcttatgtctgcatggttcatcgac

SEQ ID NO: 206951 - DNA, 100 bp, Homo sapiens
tttacactgggcaacgtggttggaatgtatctggctcagaactatgatggttatatcctgtgttgtgacctcatggtttaagtgggaataaagatgagta

SEQ ID NO: 206952 - DNA, 100 bp, Homo sapiens
ctgggatgtgaagtagatgataaagatgatgatatccttctcaaccttgtgggatgtgaaaactctgttactgaagcccagtggagcaaaatgagagcgc

SEQ ID NO: 206953 - DNA, 100 bp, Homo sapiens
gaatttaattacctaaacacagcacgtaccttagaactctatggagttgaattccactatgcaagggcctttttgcaaatgtgtaacttgcctatcaaag

SEQ ID NO: 206954 - DNA, 100 bp, Homo sapiens
tcagaaagcctccggaatctaaaaagccctcagtaccagagacagaagcagatggattcgtccttttagacggtctggaaaatcccgaagcagaagcccg

SEQ ID NO: 206955 - DNA, 100 bp, Homo sapiens
gaacggcgtagagaggaagagagaagacttggcgatagttccctttctagaaagagtataagactacctcccaaactgaaacagaatgaagtagctaatg

SEQ ID NO: 206956 - DNA, 90 bp, Homo sapiens
gtttgtctggattttcctgtagaactgagggcagcttgccagcaaagcacggacagagaaggaggagaagctgagccaggcctatgcaat

SEQ ID NO: 206957 - DNA, 75 bp, Homo sapiens
ccggtcagggtcaagtcgtgttctgatcactactgacttgttggcacctacaaaggcagcacctaagcaaaagat

SEQ ID NO: 206958 - DNA, 75 bp, Homo sapiens
tgcctttgaccttctgccatgattgtgaggcctccccagccacgtgaaactttcgatcctttggtacagaagaca

SEQ ID NO: 206959 - DNA, 90 bp, Homo sapiens
gaacatgcaacagtacgttttgctggtgttgtccctcccgtggcaggggggacacagcgattgccacgcgccattggaatgtccctggcc

SEQ ID NO: 206960 - DNA, 86 bp, Homo sapiens
tggaacttcgtcgcgctgcaacccccggctcgggatgactcactggttgtgtggaaggaagtcgatttgacccggctgtctgagaa

SEQ ID NO: 206961 - DNA, 98 bp, Homo sapiens
atcttggaagcggccgccggcgcctaggcatcaactgtgaaatctgtgttagaattgattcctgaattaaatgaaaaggaagaagcatacaattccct

SEQ ID NO: 206962 - DNA, 99 bp, Homo sapiens
ggagcgtgtcctgaaggagttccaccaggccgggaagcccatcggttacagaatgtctgaaggggacagtgtgggagaatccgtccatgggaaaccttc

SEQ ID NO: 206963 - DNA, 100 bp, Homo sapiens
tgggcctggtgcagaacatgcgtgcgtttggcgggatcctggtggtggaggcaatgcccagagctgtggcagccaccttgcagccgtgaagcaccagtgg

SEQ ID NO: 206964 - DNA, 75 bp, Homo sapiens
ttttagaaacactagaaacatatctgcgaaaacacaggggacgcttataagaatatttgatacttcatcagggca

SEQ ID NO: 206965 - DNA, 50 bp, Homo sapiens
ctcagtttcaatccagaatgatcaggagaaatggcatgattcacgacgct

SEQ ID NO: 206966 - DNA, 100 bp, Homo sapiens
agcagcatgaagaagaggacctggatgatgatgtcatcctgacagaagaagggaaaaggccgaggcatcagcgtgtgaagaccgcaaagacgatcccgag

SEQ ID NO: 206967 - DNA, 83 bp, Homo sapiens
aagtgatcgctcagctggagaacgcggctaaagttctgatgatggagttttaacattgaatgcggagaacactaattatgcct

SEQ ID NO: 206968 - DNA, 90 bp, Homo sapiens
gggctctgaaagctagaagaaaaggtgtacttgcaagaaacctcaggacttgagtaacagcaacatgctcatgatggagcagtccaagaa

SEQ ID NO: 206969 - DNA, 100 bp, Homo sapiens
agtgctcctgcggctgtatggagcgattttgcagatgatgtacattgaagatgtcagtttctacatgtgggaagtagacattgaaggctttatggtttac

SEQ ID NO: 206970 - DNA, 75 bp, Homo sapiens
agtcattgcaggaagtggatgagttccacctcattttagagtatcaagcaggtacgggaaaaacactcttggcac

SEQ ID NO: 206971 - DNA, 100 bp, Homo sapiens
gttttcacttcctgaccgtgggctggaggaacagaagcggaacagccacagcagcctcccaaggagtctgcaagttgatccacacaacttaaagatctgc

SEQ ID NO: 206972 - DNA, 98 bp, Homo sapiens
aggatgggcgcgaacaatggcaaacagtacggcagtgaggggctaagttctaaaaacatcagttcatctccaagcgttgagagtttgcctggaggaag

SEQ ID NO: 206973 - DNA, 98 bp, Homo sapiens
aaaacacgaggtgcagaagatgaccttaacacagtagcagctggaaccatgacaggcatgttgtataaatgtacagggagccaagagaaaggctgtat

SEQ ID NO: 206974 - DNA, 83 bp, Homo sapiens
ctgggatcccggccaccagcaattgtccgagctgtacttccttatcgcccggtacctatcggcgggcccgtgtcggagagcgg

SEQ ID NO: 206975 - DNA, 51 bp, Homo sapiens
actgaaaatgatttatgcaagtttaagggtcgagctgtgcagttttagcgg

SEQ ID NO: 206976 - DNA, 85 bp, Homo sapiens
acgttcttccaagaaaccaacattcccaacagccaccaccaccaccagatggaagctcttcgtgggcggtcttgactggagcacg

SEQ ID NO: 206977 - DNA, 82 bp, Homo sapiens
tcgcactttataccacctgcgattactgtgctgactgggttacttttttaaacactaggaatggtaatttctactcttctgg

SEQ ID NO: 206978 - DNA, 100 bp, Homo sapiens
gggtagtcaaggactataggaaccgctttctaagaaacgcaggataaaagaatcagagtgtctcaacccttgacaagaggaccaagtgcctttattccag

SEQ ID NO: 206979 - DNA, 80 bp, Homo sapiens
cctggatattcctgcaaacccaacagaattagtaagctgtgtgggctggactactgctgaagagctgtattcatgtagtg

SEQ ID NO: 206980 - DNA, 87 bp, Homo sapiens
cagctgttgcatcttgcttctgagcaaggtagttttgatgggtcgagctgtgcagttttagcgggtacaagatctaccccggacacg

SEQ ID NO: 206981 - DNA, 101 bp, Homo sapiens
ggcgttgtcccaggcgggttgatgtccggtctgtgctacgacagcaaaatgttccaggtgcatcaggtgctctgcatccccagctggatggcaaaattctt

SEQ ID NO: 206982 - DNA, 83 bp, Homo sapiens
agatcacaggcgtgtcttgtcgggacgtctatgcgaagcaagaaagatctgtcagatcctttcaatgacgaagaaaaggaaag

SEQ ID NO: 206983 - DNA, 51 bp, Homo sapiens
acaggaacccagcaacaattcttctgccagaaatggctgcaagcaactgac

SEQ ID NO: 206984 - DNA, 74 bp, Homo sapiens
cccaccggaggtttatcacaagttccctgacatcgtggagttctgcgaggccatggccaacgccgggaagaccg

SEQ ID NO: 206985 - DNA, 50 bp, Homo sapiens
caagctgctagtacttccaaacaacaggagctgtgccgccagcgtatggc

SEQ ID NO: 206986 - DNA, 75 bp, Homo sapiens
gtgaagtcaatgttccgggaagttcttccaaagcaagtttggatttaggtggcgagtagaaaaagaagtaatttc

SEQ ID NO: 206987 - DNA, 75 bp, Homo sapiens
cagtcctaccatgtcagccttcccagtagctgggaccacagataatgagcttcagtccccaagatctgcgaagac

SEQ ID NO: 206988 - DNA, 82 bp, Homo sapiens
aagcggatcccacacttctcagagctgcccctggacgaccaggtcatcctgctgcgggcagcagcccctgtcaaagggaaca

SEQ ID NO: 206989 - DNA, 75 bp, Homo sapiens
ctgctcagtgcctccctggctggcctcctgctgctcggggaaagtctgcaccaattccagctggacatcactgtg

SEQ ID NO: 206990 - DNA, 99 bp, Homo sapiens
ggcgcgggaggcctcggaggaggacctgctggtggtgcacacgaggcgctatcttaatgagctcaaggtgatcaatgttgatgggacgaagaggcggac

SEQ ID NO: 206991 - DNA, 82 bp, Homo sapiens
ccaaggagctgagatgtgatggctggagactcaacaccattctggacggaggtgtttgacaagcgagcagccaccaaattga

SEQ ID NO: 206992 - DNA, 50 bp, Homo sapiens
cacgccctgcatcgagcagctggagaagaaagcttatagcttcattgcac

SEQ ID NO: 206993 - DNA, 99 bp, Homo sapiens
gtggaaatggcatccagtgcacagatgttgatgagggcctcatctttgtggtggacagtaatgaccgggagcgggtccaagaatctgctgatgaactcc

SEQ ID NO: 206994 - DNA, 100 bp, Homo sapiens
catgccccggccccctgagcagatgcctgaggaagtgcaccatggagaggaggaggtggagacttttgcctttcaggcagaaattgcccaactcatgtcc

SEQ ID NO: 206995 - DNA, 97 bp, Homo sapiens
cgccttcccggcgtctaggggagcgaaggctgaggtggcagcggcaggagagtccggccgcgacaggacgggtgtattgagaattaatccaaagaag

SEQ ID NO: 206996 - DNA, 51 bp, Homo sapiens
aaacatgatcgtttactgcaaacatttgcaagtgaggaagcagcacaaccc

SEQ ID NO: 206997 - DNA, 97 bp, Homo sapiens
cggggtggaggccctgactaccctggaagtagcaggccgcatgcttggaggtatcatctttatcagaaagtgaggagtcccaggactcatccgacag

SEQ ID NO: 206998 - DNA, 90 bp, Homo sapiens
gtgacagtctgcatgtgcagttttcaggattcaagccaaaactcgagaatttagggaacgacaagctcgagagcgtgactatgctgaaat

SEQ ID NO: 206999 - DNA, 80 bp, Homo sapiens
agatcatcattaaggacggaggcacgcttcgagagctgtgcccaggagtgaacaaccagccctacctctgtgagagtggt

SEQ ID NO: 207000 - DNA, 76 bp, Homo sapiens
aacgaaagcaagcagcaggagctggaggccgtgcggaagtttctcctgaactgctcttggtctccatgaaggctac

SEQ ID NO: 207001 - DNA, 50 bp, Homo sapiens
caagatcttaaggcttctttgtacagtagctcctccaagttccccctgat

SEQ ID NO: 207002 - DNA, 83 bp, Homo sapiens
gaagagcagacccgtttgggttctccacgcattctagactcccgaagaggaaatacaactggagcacgcaaagcaagcctttg

SEQ ID NO: 207003 - DNA, 101 bp, Homo sapiens
cccagctattcatgatgtcccagcaacaaggccggcggtttaaacgggccaccaccctgggaagctacactgtgcaggaaatgggtcctgatgaatatgaa

SEQ ID NO: 207004 - DNA, 86 bp, Homo sapiens
gcccgggagctgtcggccccggcccgactctatcacaagaagtgcctccggagccagcgtggtggccatagacaacaagatcgaac

SEQ ID NO: 207005 - DNA, 100 bp, Homo sapiens
tgtgcagtaattgtcacacagaagaaagtacctatgactttttggtactgcatcttgctgacttaattcgcatggcttttatggctgccacagatcacag

SEQ ID NO: 207006 - DNA, 85 bp, Homo sapiens
aagccatggagggtcaaagaaactcctggttgagctcaaagttattttacattctaatgatgctggctactttaatgatgaaatg

SEQ ID NO: 207007 - DNA, 51 bp, Homo sapiens
attgtggatggaatcttccttcagcctggctattcccaacagaagagcttg

SEQ ID NO: 207008 - DNA, 97 bp, Homo sapiens
gagctggagcccgcgcagcgccccgcagggcgatggacggccgaaccccgcgcccgcaggacgccccagccaggacactgtcttcagccttttcttc

SEQ ID NO: 207009 - DNA, 148 bp, Homo sapiens
attaacaacagcatcccaccaacatttgatggtgaggaggaaccctcgcaagggcagaaggttgaagaacaggagaaatcaatgtggactgaacataaatcacctgatggaaggacttactactacaacactgaaaccaaacagtcta

SEQ ID NO: 207010 - DNA, 75 bp, Homo sapiens
cgccaccctctcttgctttggttccgccatgccgatgtaccagccatccttcccctgcggagtatgtcgaggtgc

SEQ ID NO: 207011 - DNA, 83 bp, Homo sapiens
ataggtgtatcaagtaatggtgcaaagcctgaagtgacagtcatggcgtctctgcgaaggcccaagcgcatcatcatccgtgg

SEQ ID NO: 207012 - DNA, 98 bp, Homo sapiens
tcgccttgtatctcaacaccctgagtgcggatttctgctatgatgacagtttgcaatggattttggataaacaagatctgttgaaggagcgccaaaag

SEQ ID NO: 207013 - DNA, 83 bp, Homo sapiens
tggacggcgcacttcgtttggatcagactacatgaggaaataattgacttttataacttcatgtccccttgtcctgaagaagc

SEQ ID NO: 207014 - DNA, 100 bp, Homo sapiens
gggaagcagagccccacggaggacatagtggacctgaactccagcgaactggaagaattcaacagtcatgagcagagctgaaaattttaaacaagttgag

SEQ ID NO: 207015 - DNA, 100 bp, Homo sapiens
gcgagcccagcgagaaggccaagcctaacaggacgtattatctgatggaccccagcgggaacgcacacaagtggtgcaggaagatccaggaggtttggag

SEQ ID NO: 207016 - DNA, 100 bp, Homo sapiens
gaacccttcgctggcgggagcgcggttcggggccgcagaggaaggggccctggaccttctgaagaagctgcacagctgccagatgtccatccagctacta

SEQ ID NO: 207017 - DNA, 51 bp, Homo sapiens
ctgcgctgccgccgctctgaggagttaaagaggccagcagaaatagtagac

SEQ ID NO: 207018 - DNA, 75 bp, Homo sapiens
gtgcctggggctgaacgcggctttctggcactccaggaataggaactacaaagctgaatttgcatcatgccgact

SEQ ID NO: 207019 - DNA, 90 bp, Homo sapiens
gtggtgctggaatccagagccctgacgagacctgtcggccatggagcctaatgatagtaccagtaccgctgtggaggagcctgacagctt

SEQ ID NO: 207020 - DNA, 75 bp, Homo sapiens
cagaggctgttagctatggctggtgtgagttcttgatacgaatgaaaggccaagagtttgttgatgagattcaag

SEQ ID NO: 207021 - DNA, 98 bp, Homo sapiens
gaagaccatgttgcaggcccacagctgcctacagaaccgtcccaaaatatggcaaagaaacctattctgaggtttgcagtacccgaagccctgagcac

SEQ ID NO: 207022 - DNA, 83 bp, Homo sapiens
ctgctgtacaccctcaacaaacaccagcgctttggactacatgaggaaataattgacttttataacttcatgtccccttgtcc

SEQ ID NO: 207023 - DNA, 100 bp, Homo sapiens
agcccaatgtgcacctggtgattgtgggtcctgaagttaattatagaaaatgccaagtaggaaatttgccgatggtgaagtggtaagaggtcgatggcct

SEQ ID NO: 207024 - DNA, 100 bp, Homo sapiens
cgcgcccaagcgcaggggctcctcgggctcagtgggggacatcacccagaagggctatgaaaagaaaaggtccaaactcctatctccttacagcccgcag

SEQ ID NO: 207025 - DNA, 101 bp, Homo sapiens
agctaaagctgtttctgaatgagacccaaacgcaggatcaaggatctggattttgcataactggtaaaatagaagctggttatatccaaactggtgaccga

SEQ ID NO: 207026 - DNA, 90 bp, Homo sapiens
ccacattcaaattgcatccactgccataaagtaaattcaagatggaggcgctttcctactgattatgcttccacctcagaagatgaattt

SEQ ID NO: 207027 - DNA, 100 bp, Homo sapiens
ggacaccgtgggctgcgtgtgggacgggtttagcggcagcctcttcggctcatgagcgctcagagagctcagaagtggcttttgtgatgcagctggtgaa

SEQ ID NO: 207028 - DNA, 88 bp, Homo sapiens
cgggccgctggtgatctccggtagcactcgggccggcggacagtgagggcgcggcaccagaatttcctgagtttgccactaaagtcca

SEQ ID NO: 207029 - DNA, 82 bp, Homo sapiens
gttcaccagcacactgctctgccagatcttatgccttcattcatccggcatggtccaacaattccaagacgaactgatatct

SEQ ID NO: 207030 - DNA, 88 bp, Homo sapiens
gctccagaagtggagaccagcagaactccaccagagaatagtgacagtggtacaggaaagaaagaaaaagaaaagaaaaacagaaagg

SEQ ID NO: 207031 - DNA, 100 bp, Homo sapiens
gccgccgcagctcccgacgccgccgcccccgccgggtgcctaagcaggcccggcgcggccccagttacatgggaataggactctcggctcaaggcgtcaa

SEQ ID NO: 207032 - DNA, 75 bp, Homo sapiens
aaagacgagatcccccaaatgtcaggtagcattggtgctgcagatagtcctgagaactgggagaaagtctgggac

SEQ ID NO: 207033 - DNA, 74 bp, Homo sapiens
tggagccagaagctacatgacccctaaacgctgttaaaaaacccgctccagcacccccgaaaccgggcaaccca

SEQ ID NO: 207034 - DNA, 100 bp, Homo sapiens
taatgctcagttcttagaagaccgagctgagctgcccctcctggacctgatgaagctgtacgaaggcgccttcctgccgagttctcagtggccccggccg

SEQ ID NO: 207035 - DNA, 83 bp, Homo sapiens
cgggaaagggcgtcgccgctcatgtaggccctgtttgtgctcttcgtcctggcctacatccacatcgtcttctcccgctcgcc

SEQ ID NO: 207036 - DNA, 100 bp, Homo sapiens
gccccgctccgcttcgaatggactacacttgctgctttgaaggatgaagttgtatctgttgaaaatgaactctcagaattgcaagaagtagaaaaaaaac

SEQ ID NO: 207037 - DNA, 100 bp, Homo sapiens
acggcacagctgccaactaccgctgctccggggcttacgacctccgcatcctggacagcgcgcccaccgttggggaatggcggtcaatgtgtattctacc

SEQ ID NO: 207038 - DNA, 102 bp, Homo sapiens
gaggagcctcctggcctgcagcttctgtgtgctcctgagaggtgccactatgcacgtgaagaagtacctgctgaagggcctgcatcggctgcagaagggccc

SEQ ID NO: 207039 - DNA, 97 bp, Homo sapiens
ggggctcggctgcagacttggccaaatggacgggactattaagacttaattcagtgcacaaatgagatgaatgtgaacatcccacagttggcagaca

SEQ ID NO: 207040 - DNA, 74 bp, Homo sapiens
agtatcttatatgttagcttgacctatgcagatcttattccagaggtggtagcccagtggtgcacacaggggga

SEQ ID NO: 207041 - DNA, 125 bp, Homo sapiens
tggggacagtttctggaagttataacgctacacgaagaactaagaatattattagcacaagagcaccatactttgaggagagtcccacgaactggctgggtatacagaaatgtccagaggccgga

SEQ ID NO: 207042 - DNA, 100 bp, Homo sapiens
ccaaggccatggccctgctgacagccttgctgcagggggccagccctgtggaacgcaaggtgttcaagcagccctggccagggatcatgcgcacagtcta

SEQ ID NO: 207043 - DNA, 97 bp, Homo sapiens
cagcgatgctgaggatcgaggaacgttgtctggtcgcgtggggcaggcagtggcgctgcgggccaaggccttcggcttcaacgtgctcttctacgac

SEQ ID NO: 207044 - DNA, 97 bp, Homo sapiens
cgccctgttccccgcgctgcggcctggcggcttccaggcgcactaccgcggattgtcagtggcttcgccccgaggagagctgactgccctgggctgc

SEQ ID NO: 207045 - DNA, 75 bp, Homo sapiens
gaaaggaagagggagcagagcaagaaaaaaaggaagacgatgacttcaggcacagaccccacaggctcctcggac

SEQ ID NO: 207046 - DNA, 100 bp, Homo sapiens
gcctcggttcgccctcagccgccccggtactccaaagattcaggtttactcacgtcatccagcagagaatggaaagtcaaatttcctgaattgctatgtg

SEQ ID NO: 207047 - DNA, 73 bp, Homo sapiens
cccgtcccagaaattcggagggtggccctggactcgttggtgctgcaggcagtctgggctcttggcaacattg

SEQ ID NO: 207048 - DNA, 100 bp, Homo sapiens
aggccctgtgccctggcagcacccggaactttgtcatccatcgcttgggtgatctgctcatcagccagaacatctctattctgcaagacccctctgccat

SEQ ID NO: 207049 - DNA, 119 bp, Homo sapiens
aaactcacagaccaacgggatagccgatgacaggcagtccttgtcgtcagcagataatctgataccgtcatgaatttaagtcaaacgagttatggactgaaattaagcttgttctggat

SEQ ID NO: 207050 - DNA, 97 bp, Homo sapiens
gctgcgacagggacttggactgcagcgatggcagcgatgaggaggagtgcagttgtccggcccagaccttcaggtgttccaatgggaagtgcctctc

SEQ ID NO: 207051 - DNA, 83 bp, Homo sapiens
agaactgaaacaactggaaactgttttggatgatcttgaccccgaggcattatattgtacttctagcaagtgcaccaacagaa

SEQ ID NO: 207052 - DNA, 71 bp, Homo sapiens
ccggatgatccagaggctgagagccgagattgacaatgtcaagaaacaggctgcatggtgtatgaaaagct

SEQ ID NO: 207053 - DNA, 73 bp, Homo sapiens
gcaccgccatcagctgttcgcgcgtcttctcctccaggcttccagctggtctttttaccctttgctgatgata

SEQ ID NO: 207054 - DNA, 98 bp, Homo sapiens
ttcgccatcgccagcatcgccaacccggactggatcaacaccggggagtctgcgggaaagaccacagcaagattctttcattcgtctcctcctagcct

SEQ ID NO: 207055 - DNA, 75 bp, Homo sapiens
taccatcgtcaccatgacaacactagggcactgaaagtattgaggacatcagagtttatgccctatgtggtattt

SEQ ID NO: 207056 - DNA, 75 bp, Homo sapiens
gaagatcatcattaaggacggaggcacggcagctatcaatggtgtaataccacaggaaaatggcattctacaaag

SEQ ID NO: 207057 - DNA, 100 bp, Homo sapiens
tctctgtgtggctgtaacttacgtgtactttaccaacgagctgaagcagggcccacccaatgctaatgaagactacagagaagcttcttcttgtgccgtg

SEQ ID NO: 207058 - DNA, 106 bp, Homo sapiens
ccgttcaccgcctccagctgctgctctcctcgacatggaccctgagacctgcccctgcccttctggtggcctgccatgggtatccatggtgacaagagtcaacaag

SEQ ID NO: 207059 - DNA, 50 bp, Homo sapiens
gctccagaaattatgttgaattccaagactgcttttggcttctggatgcc

SEQ ID NO: 207060 - DNA, 100 bp, Homo sapiens
tgtgactgtagtccacatggagctctcagcataccgtgcaacagatgcaagatgttgcccccaacccagatgacccggaagatttccctgcgctgtcttg

SEQ ID NO: 207061 - DNA, 75 bp, Homo sapiens
gtcggggaggattgatgtcccttcagcatcatgcagccgccgccgaggaagggggatatgagactttctactcgg

SEQ ID NO: 207062 - DNA, 51 bp, Homo sapiens
caaggatcagttggctttagcaattgggattaatgaaaatcaagttccatc

SEQ ID NO: 207063 - DNA, 50 bp, Homo sapiens
gggaatacaagtgtcatgtctgtggattgatcgtgtcctgtgctgaagat

SEQ ID NO: 207064 - DNA, 128 bp, Homo sapiens
ccaccccgctgtcttccacacggggcactgggcttcctgccatcaccgatgtgcctaggcgcatttcagaacccagtgacttgattgtaaaaatttacagagcggaatcatatgctggtctccaagag

SEQ ID NO: 207065 - DNA, 100 bp, Homo sapiens
caagcttccaggtgtcccagaaacccaggaaatcgagactcatgactcccagagaggatggcatctagaagcttatcaccaggactgccatgttcccagg

SEQ ID NO: 207066 - DNA, 89 bp, Homo sapiens
gtggcctctctgctaatcatcatttttatactatctaagtttatgcctaagttactccacaggatccgctgaacataggatgttgccac

SEQ ID NO: 207067 - DNA, 75 bp, Homo sapiens
cgaccttctggactggaaatacctaggccggagcgggaagctgagccgagagctggactttgtcagccaccacgt

SEQ ID NO: 207068 - DNA, 100 bp, Homo sapiens
ttggggatgatgaatggagagagactgcatggggagcttctctaggtgatttcaaatcggagaagtccaacggggagctaagtgaatctcctggagctgg

SEQ ID NO: 207069 - DNA, 100 bp, Homo sapiens
ctagaactcagttgtgcgttgcggccagtcgccactgctgtttgttacagaaggagaaagtggcagttgaagcatttcagatttgctgccttctcctacc

SEQ ID NO: 207070 - DNA, 100 bp, Homo sapiens
tgaacgtttggatggatttggacaggaaatcttccctgtaaagattgcttatgcccgtatagagggggatatgatagtctgcgcagcgtatgcacacgaa

SEQ ID NO: 207071 - DNA, 90 bp, Homo sapiens
gccctgtggacatgacttttgtagaggatgttgggagtctgcagtcattggagaaatcgatgaagaaacagattctgcgcttgatttggg

SEQ ID NO: 207072 - DNA, 97 bp, Homo sapiens
gttttggtggcacgcagcctggggactctgcctcgtgccgctgagcctggcgcagatcgacaatgcagatcttcgtgaagactctgactggtaagac

SEQ ID NO: 207073 - DNA, 82 bp, Homo sapiens
ccacaacttcctgcaggactccaaggtcattttcgtggagaaagccccaggagtgcctgtgaagaaaacggggtattgccct

SEQ ID NO: 207074 - DNA, 89 bp, Homo sapiens
aacagaaagacctccaggagaagatcagtgggaagttccctgtattgaacactgatatacaaggaatgaatagaagtcaagaaaaacag

SEQ ID NO: 207075 - DNA, 90 bp, Homo sapiens
aactgccctctagggagacgttccctgcctggggccattaagtttaatgatggcctgagcttacaggaaagttgccgccttattgaagct

SEQ ID NO: 207076 - DNA, 95 bp, Homo sapiens
ccagccagcgccagctgcagccctggccgcgcactcgcctcagctgagcctgggtctccatccaatcccaccccaaggaggaaaactggagattg

SEQ ID NO: 207077 - DNA, 100 bp, Homo sapiens
ttctgatagcaactttaatgtgctctcctcccaaggacagtgaagtagagcagaacaaactgctggctagggctgctccagcttttctgaagggcaaagg

SEQ ID NO: 207078 - DNA, 75 bp, Homo sapiens
aaaacaagaatgctatcaataatggtgttcgaatatctggaagaggttttttgtgacatcgtaaacatgagcccc

SEQ ID NO: 207079 - DNA, 100 bp, Homo sapiens
tgaaacccggggcaaaatccaacagcatcattgtgagccctcggcagttgtgtgctgctcatctccctactgaatcagatgcaccaaatcattatcaggc

SEQ ID NO: 207080 - DNA, 100 bp, Homo sapiens
cagtgtgccccaggtgaaggccagtgctctcaagcatttgacattgtgcagcaaagaaatggttatggagaagcccagtccgctgcttgtagggcgggag

SEQ ID NO: 207081 - DNA, 83 bp, Homo sapiens
gtccgtgctgtttgtgtgtctgggccagcctgaaagctgactctataaataagccctttgcacagcagtgccaagacttgatt

SEQ ID NO: 207082 - DNA, 98 bp, Homo sapiens
tgcctgaatacatgatttaaacaagagatttccacagaagaaattcattgagtttgaagatgctctggaacaagagaagaaagagctgcaaatccagg

SEQ ID NO: 207083 - DNA, 75 bp, Homo sapiens
acaatctaagaaggatttcagcaaatttggagcaggaggtcctgctgtactagccaccaaagcagctgctggtac

SEQ ID NO: 207084 - DNA, 75 bp, Homo sapiens
cgaagtggcagaggaacttactattgacctgaaaagtggttctggaaaagtgtaccaaggccctgcaaaaggtgc

SEQ ID NO: 207085 - DNA, 100 bp, Homo sapiens
gacctgaaagaccgaccattcttccctgggctggtgaagtacatgaactcagggccggttgtggccatgatgctgcacttaaaaggatgcttgttttgat

SEQ ID NO: 207086 - DNA, 98 bp, Homo sapiens
ccgagcctgaggggtcctgcgctccgcctggcggggcttcccacccagcagttgtttttgaagaacttacatccaaacagacaagaaaaggataaaag

SEQ ID NO: 207087 - DNA, 100 bp, Homo sapiens
cagagggatttgttctagctgaggacggaagacggtgcaagagtaattgtcatgagaaaaccctggacaacagccatgacaaacagaaatattttgacaa

SEQ ID NO: 207088 - DNA, 76 bp, Homo sapiens
cttgtcggatggcagttcctgatctatgtgatatttggtttccaggcaggactgacgtctttggattgcagtggat

SEQ ID NO: 207089 - DNA, 90 bp, Homo sapiens
tcctgatcgacatggttctcaacaagatggccaaaggggtccttggtgaattttgtcatggttatttaaggaaccttgcctagaagtccc

SEQ ID NO: 207090 - DNA, 101 bp, Homo sapiens
aaggcaggcggcgcggccggcctcttcgccaagcaggtgcagaagaagtttagcagggcccaggagaagatggactagaggcttttaccagatttcttaaa

SEQ ID NO: 207091 - DNA, 50 bp, Homo sapiens
gaagaggaggcggggagaccgaccaagaatcgccttcagccctgtctggt

SEQ ID NO: 207092 - DNA, 97 bp, Homo sapiens
gcactgccctttttgcaccccagggagctgctgctgggatgcaagtattggaatggaatggaattcccttgacttctaaaacatatgaagaagttca

SEQ ID NO: 207093 - DNA, 83 bp, Homo sapiens
ttcaaagcctacagcaagatcaaggtggacaatcatctcttcaataagtatggacgacaaaggcgacccgagcaatgaggagg

SEQ ID NO: 207094 - DNA, 100 bp, Homo sapiens
gttatggtttgcactggacatttcctgaatccccatttacctttggaagcctttcctgttgatcataccagggttgtcctacacgatggtgatcccaatg

SEQ ID NO: 207095 - DNA, 100 bp, Homo sapiens
gagcaagaagaggacctgtgcagggcagagcaggaggccccccgaggccaggagtggtggctcacacctgtaatcccagctctgggaggccaaggccagt

SEQ ID NO: 207096 - DNA, 96 bp, Homo sapiens
cccaatggagatcatatagtgtctgcctcaagggataaaactataaaaatgtgggaagtgcaaactggttttgcacagtaataagttgactcacac

SEQ ID NO: 207097 - DNA, 100 bp, Homo sapiens
gagcagcgagggcgagagcttcgcgggctcggtgcaaatttggaaattttagcattcaggtgccaggaatgcagatgggacagccagtgccagaaacagg

SEQ ID NO: 207098 - DNA, 50 bp, Homo sapiens
catttgccatgaagtactcacaggcaaatatggatgctccaccactctct

SEQ ID NO: 207099 - DNA, 75 bp, Homo sapiens
agtgcagctgcctcagttcttagcgcaggcatgttggagacttgggcaatgtgactgctgacaaagatggtgtgg

SEQ ID NO: 207100 - DNA, 73 bp, Homo sapiens
ttgaacttaatacagcaagaaagaccatcaagtttaccaatggacacccgctccgggagccagtgttccgtca

SEQ ID NO: 207101 - DNA, 82 bp, Homo sapiens
catcaccaacaacattggctcaatagcaagaatgtgtgcccttaatgaaatggcattggagtcaagagagattataaacagg

SEQ ID NO: 207102 - DNA, 49 bp, Homo sapiens
gcgcctggcctacagcgaggctgggccgttgctccagggagaactgcaa

SEQ ID NO: 207103 - DNA, 75 bp, Homo sapiens
tgaaggaaagtggttggaaaggaagaggaggagcaggagatgtatgccctggagcgcttaaaggtcatgtgtgag

SEQ ID NO: 207104 - DNA, 90 bp, Homo sapiens
aaatgagtatgcaggagctgaatccagaaaccagcacagactgtgacggcagagaacatttataatgatgaagaccctgaaggaagcgtg

SEQ ID NO: 207105 - DNA, 88 bp, Homo sapiens
aaactgattggaaactctttgggaaagccactcgaaaagactctttttgatcagaacaatgctgcaaaaaaagaagagtcagaaactg

SEQ ID NO: 207106 - DNA, 87 bp, Homo sapiens
agccttgggtttctttcttaaaggactgatttttagaactccacatttgaggcaagacatctgtatagattctgcttcatccgtgag

SEQ ID NO: 207107 - DNA, 100 bp, Homo sapiens
cagagcctctcatgacctatgagttacatggagatttcattgttccagccaatatgaggccccaggattcctggcgaggtcctcctccccttttccagca

SEQ ID NO: 207108 - DNA, 100 bp, Homo sapiens
aaatgcatcttctaagtttttggcaccatatactactttttccagaattcatacaaagagtattctacttcaaagaaatcctgccacccgatgattaaac

SEQ ID NO: 207109 - DNA, 83 bp, Homo sapiens
tatgccttctccaatggcaagaatatgatgaagaatgggctaagaaaattcagagtgaaaagtttcgctggcataactctcag

SEQ ID NO: 207110 - DNA, 75 bp, Homo sapiens
ccaagtcagacttcgtaagagaaaggaaaatcctgccttgcttcgttgggcctatgcaagaacaataaatgtcta

SEQ ID NO: 207111 - DNA, 76 bp, Homo sapiens
acaggccgacaagatacctctcgcatgtccacctcacaggtttggtgcacctcgatttggaggaagtagggcaggg

SEQ ID NO: 207112 - DNA, 100 bp, Homo sapiens
gaaacttttatctcatctggcttggcgcctgaggttctcccattaggtgatttccatggtgatggtggctgtgggtgtctacgctcggctaatgaagcat

SEQ ID NO: 207113 - DNA, 90 bp, Homo sapiens
gcaagtggatgccctggggctgagaggagtcttctggtgcagtcttattttgaaaaggtgttcaagcagccctggccagggatcatgcgc

SEQ ID NO: 207114 - DNA, 75 bp, Homo sapiens
gcatcctgctcctcttctacttggcctacatccatgaagacagcctgtcctgggggaacagagaggccctgcggt

SEQ ID NO: 207115 - DNA, 100 bp, Homo sapiens
ctccagcccaaattagtaaagaaatgagagatgagctacatgtccgaggtgctttatcttcaagccaggatgaagggagactgggcaagactcttacgcc

SEQ ID NO: 207116 - DNA, 75 bp, Homo sapiens
cagaagtgaaattcagaaggccgcgtgtgagcacgtggaccaaaggctgtagtcactggaaacatggacttgttt

SEQ ID NO: 207117 - DNA, 76 bp, Homo sapiens
ggcaaatacctctccattatgcccctcgcagcgtccgtctccaagagagtatgaagagagtgcgtctgtagggcag

SEQ ID NO: 207118 - DNA, 75 bp, Homo sapiens
agggacaggatccggaggcgccagctcaaccatcgatgggctagaggagaagctgtcccagtgtcggagagacct

SEQ ID NO: 207119 - DNA, 90 bp, Homo sapiens
gatgagacgctcaagtttgtggcccgcaactacctggaacctgtcagtgccacttagtgcattagaactaggtttggagaccgaagcagc

SEQ ID NO: 207120 - DNA, 100 bp, Homo sapiens
ctcctgaccgagaaccaccagctgaaagttcctcagtttgaaactacatgtaattacgtagaagctacactcgaagagtttctgacctggaactgtgacc

SEQ ID NO: 207121 - DNA, 76 bp, Homo sapiens
gaatcaaagataaatccaaatactgcatatcagaaacaacaggaatgaatctgaagtctgctgcagtaaaacacag

SEQ ID NO: 207122 - DNA, 101 bp, Homo sapiens
gtttcataaagacctaacaagcctagaaaccacgtcagaaatggaagcaggaagtcctggtaagaatgattgatgttggctgatattggagtgctcattca

SEQ ID NO: 207123 - DNA, 100 bp, Homo sapiens
tgcccgctcggtcttcggcaacattaagacttaattcagtgcacaaatgagatgaatgtgaacatcccacagttggcagacagtttatttgaaagaacta

SEQ ID NO: 207124 - DNA, 80 bp, Homo sapiens
aggctctccttgcagctgcttagacgctggatttttttcgggtagtggaaaaccaggggtcgggccccggctcagtggtc

SEQ ID NO: 207125 - DNA, 80 bp, Homo sapiens
aggccaaagatctgacagaactggttcagcggagaataacatatcttcagggaggttatattcaaaagaaaaaggaactg

SEQ ID NO: 207126 - DNA, 100 bp, Homo sapiens
tgactacaacatattgctgcaatcaggaccattgcaataaaatagaacttccaactactggaagtggttacctggaaggaaaggagctgcagaacttgat

SEQ ID NO: 207127 - DNA, 100 bp, Homo sapiens
aggtagaggacgatactctgaccgttttagtagtcgcagacctcgaaatgatagacgcaaaccagtccagctacgggggcccagccagccagcagctgag

SEQ ID NO: 207128 - DNA, 74 bp, Homo sapiens
cgcggatttggctggcgtcccgcggttcccagttttccagacctgaagtgttttccaatcaaagcgaagagacg

SEQ ID NO: 207129 - DNA, 100 bp, Homo sapiens
caggccactccctagacctactgaatcagaaaccctggggttggagctcagcaattaccctgcagtgatgcagaagaccacaagcctttgaaaaaaggaa

SEQ ID NO: 207130 - DNA, 100 bp, Homo sapiens
atatcacagtatcccagatgccaaatatgcggaaaacgccatgcggtacataaatgggacgcgtctggatgaccgaatcattcgcacagactgggacgca

SEQ ID NO: 207131 - DNA, 75 bp, Homo sapiens
ctttactgagaattttccacctcctgacacaacaccactcaaccaagatcactccatggatgaaatgacagctgt

SEQ ID NO: 207132 - DNA, 100 bp, Homo sapiens
ggacgcggagcccggagctggggcgacgaggcgattgcgggggcctgggctaggaagctcataaaatggtgagagaagcaaatatcaagcaggcaacagc

SEQ ID NO: 207133 - DNA, 50 bp, Homo sapiens
aagaagaagtgttagaccagggagtcagtggatcggtggggaaaatgctg

SEQ ID NO: 207134 - DNA, 83 bp, Homo sapiens
ctggtggtgcaggcgctgcgccgcaacgccgagcgcaccgacatctgcctgctcaaagatattaataaggcagcggaaagaag

SEQ ID NO: 207135 - DNA, 100 bp, Homo sapiens
gtgttcagcctccctgactccaagaatcctcactatggatgggctcattgaggacattaagcatcggcggtattatgagaagccatgccgccggcgacag

SEQ ID NO: 207136 - DNA, 105 bp, Homo sapiens
tgataaccatatcctgctgtgggatttacaggaaagctcgagccaggctgtggaggagatgaccgccgggttctgctatggcacatggaacaagccatccactcc

SEQ ID NO: 207137 - DNA, 82 bp, Homo sapiens
gaagaataagactaaagaaaacattttggaagaattcagtaaagtcacaggttgttgtcgggataccagatttcctactccg

SEQ ID NO: 207138 - DNA, 100 bp, Homo sapiens
ctcctacgtcacctctccccagggattccagttccgacgcctgggcacaggaatagcgggttttgcagcaattgttgcatatggattatataaactgaag

SEQ ID NO: 207139 - DNA, 100 bp, Homo sapiens
taaggctatttgtgggtcctgggggaagtacaacctttggcagtcatcatcttccaaataggttagctgtgcgctatcattctttttattttctttccaa

SEQ ID NO: 207140 - DNA, 104 bp, Homo sapiens
tcagggatgagtcatgtggcagtggaaaatgcgctcgggctggaccagcaggctgaaggtgatgtggccgccctcaaccgacgcatccagctcgttgaggagga

SEQ ID NO: 207141 - DNA, 74 bp, Homo sapiens
caaaaggaaattaaaagaggcacgaagctggaagaaggcctggatatggtgaacagagaaactgcacatgaaag

SEQ ID NO: 207142 - DNA, 97 bp, Homo sapiens
tggaggaagaagcgaatgcgcaggctgattccaacaaaaccagaattgatgaggccaaccaacgtgcaacaaagatgctgggaagtggttaagtgtg

SEQ ID NO: 207143 - DNA, 100 bp, Homo sapiens
gttaaagaaagagactgctgctaagagatgcctggagagaatgagaaacagccgggacaggctcctaaacaggtaccgccaggctggaagcagtgggcca

SEQ ID NO: 207144 - DNA, 87 bp, Homo sapiens
gaccaagctcggggccgagcgggaggcagccgtggccgagcctcctgacaaggtgatccgggcgggccccgcaggaattttatcccc

SEQ ID NO: 207145 - DNA, 75 bp, Homo sapiens
tgtttgtggatcgctgtgatcgtcacttgtgagaagctcttcatggagatggcagagctcatggtctcagaaggc

SEQ ID NO: 207146 - DNA, 100 bp, Homo sapiens
tgaacactcagctttctgaaatggtgtcccaccgcaaggactggagaagggtatctctgcattagccagattggacatatgtaaagggacatcagtatat

SEQ ID NO: 207147 - DNA, 100 bp, Homo sapiens
ggagcactggaggaagcacaccctgtcctatgtggacgttggcactgggaaggaagaaatgttggctatttggcgatgagaggtggtgaacagtgaccat

SEQ ID NO: 207148 - DNA, 101 bp, Homo sapiens
agacggcggcagcagcggcattcaggacccagatgatgtggtaccagttggccaaagaagagcctggtgttggtgcatgtgctttggactagcatttatgc

SEQ ID NO: 207149 - DNA, 82 bp, Homo sapiens
tcggcgcgactcgcttctttcggttctacctgggagaatccaccgccatccgccaccatgccgcttacaaacacgcagatgg

SEQ ID NO: 207150 - DNA, 82 bp, Homo sapiens
ggtggacgttcggccaagggaccaaggtggaaatcaaacattcgagtggtgaatgcatttcgtagttctttatatgaagggt

SEQ ID NO: 207151 - DNA, 50 bp, Homo sapiens
ctctccttttcgtttccggaaacatggaaagaccacagcaagattctttc

SEQ ID NO: 207152 - DNA, 82 bp, Homo sapiens
cccgcgtccgccgattcctcctccttggtcgccgcgtccttggctggcgtcggccagcctcccaactacgagatgctcaagg

SEQ ID NO: 207153 - DNA, 100 bp, Homo sapiens
agcctcccagtgccttagtaagctggtccagattgcttcccggacaaagaggaactttattcttgatcagtgataaaaagttgattgcagaaggacctgg

SEQ ID NO: 207154 - DNA, 75 bp, Homo sapiens
gaggcggaaaaggacgcaaagttctccggcgaggatctatcttgggatcccatggctttctttactgggctctgg

SEQ ID NO: 207155 - DNA, 75 bp, Homo sapiens
ccgacatcgtgtgccgctgccagcacttttccagccattaactccaggctctcgagaatttgaagatgttgtaaa

SEQ ID NO: 207156 - DNA, 73 bp, Homo sapiens
agccaggcactgctgtggtggagtttgcaaccgtcaaggcagcgggctctggaggccacgggcatgatgcttc

SEQ ID NO: 207157 - DNA, 100 bp, Homo sapiens
tcacggacaacctcagaggacaacgaagtgttcgggtcttgctgtctcacccaggctggagtgcagtggcacgatcacagctcactgcagccttgagctc

SEQ ID NO: 207158 - DNA, 75 bp, Homo sapiens
cagatacttctcaaaatacttgtaaaagtcctccaaaaatgagcaaggtgtcttctctttagggatggtgaggtt

SEQ ID NO: 207159 - DNA, 97 bp, Homo sapiens
atttctcaagtatttgaaataaaaatggatgcaagtttaggaaatctatttggtatccagtcggaattctttattaacaccacccgagcaggtccag

SEQ ID NO: 207160 - DNA, 100 bp, Homo sapiens
agccgcctgccccggtgcgcagacagagctattccagcaccagcagagtgtgccggtccaacaaaagcccttgggtctgtttgacttgttcaagtgtcca

SEQ ID NO: 207161 - DNA, 88 bp, Homo sapiens
agattcgcagtggtcgcttcttctccttggaaggaagcagccaccctcgccatggcctccccgcccgcctgcccctcggaggaggacg

SEQ ID NO: 207162 - DNA, 83 bp, Homo sapiens
tcccgagggccaccccctcccgtgggccccgctggcagtggctacagtggaggtcgcgtggggcaggcagtggcgctgcgggc

SEQ ID NO: 207163 - DNA, 76 bp, Homo sapiens
gtgagaaccgagtcagtgctcttacccagctagagaccgttggatggcagcttaaccttcagatggctcactctgc

SEQ ID NO: 207164 - DNA, 100 bp, Homo sapiens
ctgcctcagaacagactgtcacagtggaggaaggtttccaatacttatctacaggaatcgccatgaccccagctctgagggaggcaacagcaaagggtat

SEQ ID NO: 207165 - DNA, 101 bp, Homo sapiens
aatgctctacaatctctaagagacagagaattctctacattttatgaaagtctcaaatatgccaggaggagatgttaaagtaacccatcttgcaggacgac

SEQ ID NO: 207166 - DNA, 134 bp, Homo sapiens
agcacaccactgaagatgaggttgaaaaacctgacttttatcatcatattgataatctcaggagaactctatgcagaagattctacgggaaaatgtgggccccctccacctattgacaatggggacattacttc

SEQ ID NO: 207167 - DNA, 74 bp, Homo sapiens
tggttggattattggagaacatggtgattctagtgggtttgagtgatgaacttgtccttgtggatgttgatgaa

SEQ ID NO: 207168 - DNA, 100 bp, Homo sapiens
agccgctacaagacggagctgtgccgcccctttgaggaaaacggtgcctgtttttgccaatccagaagactgtgtagcatttggcaaaggagaaaatgcc

SEQ ID NO: 207169 - DNA, 97 bp, Homo sapiens
ggagcaagcctaaacgtcagaaatccagtactaaactttctgagcttcatgacaatcaggacggtcttgtggagacgttgacatttagggatgtggc

SEQ ID NO: 207170 - DNA, 89 bp, Homo sapiens
ctctcacctgggttttcttagccctctacttttcaagacaccaagtgagaggccaaccagatgtcatgtggcctgtgttttggaccgtg

SEQ ID NO: 207171 - DNA, 100 bp, Homo sapiens
gaagatagccatcagccgctacgtgactcttttctccagagagatggaaaacttgatgactagctccaccctaccgcccctttttgcagatgaagacggt

SEQ ID NO: 207172 - DNA, 75 bp, Homo sapiens
cgcaagatggcggacagtgcggaactaaaggatgtgataggccaggttctgcctgaagcaacaactacagcattt

SEQ ID NO: 207173 - DNA, 75 bp, Homo sapiens
cacaaactggtcagcgtttccctggagaggaagaggcaaggataatggattccagaatcccagcactgctccggc

SEQ ID NO: 207174 - DNA, 100 bp, Homo sapiens
ccagacctcaagtgacttggtttagagaagggcacaagattattccaagcaacagaatgttatacattggctcttcaaagacgttcacctcatcagagaa

SEQ ID NO: 207175 - DNA, 100 bp, Homo sapiens
tattttacacccttggagaatgtgggctcatatccttttcagactacattttcctcacaactgttctttccaggctcaaaatttgggcggggaactggac

SEQ ID NO: 207176 - DNA, 100 bp, Homo sapiens
ccgaggagcagcaaaagcagtacaaggtgcacctggacctctgggttaaggtgctggacgtcattgctcctccttatacctctgacttcgtgcaactttt

SEQ ID NO: 207177 - DNA, 74 bp, Homo sapiens
gagaacagctattccacgagaggatccgcgagtgtattatctctggaaacatggctacagaacatgttaatgga

SEQ ID NO: 207178 - DNA, 83 bp, Homo sapiens
agccgatccagcctgcggagcctgtggggcagtggacatttgggagcaataaaaataagaagaaaggaaaagccagaaaaata

SEQ ID NO: 207179 - DNA, 50 bp, Homo sapiens
ccgtgatccacaaggcattagagcatgacagggtttcgccgtgttggcca

SEQ ID NO: 207180 - DNA, 74 bp, Homo sapiens
tcactgtggtggacgttcggccaagggaccaaggtggaaatcaaactgagaaagatcagtctaaagaaaaggag

SEQ ID NO: 207181 - DNA, 101 bp, Homo sapiens
ggttctgcggcacgggatggcggaggcgcctcctgtctcagcactgacccaggtggaaatcgttaggtcatttactgctaagcagccagatgaactctccc

SEQ ID NO: 207182 - DNA, 74 bp, Homo sapiens
atggacgagggatgcggagagaccatatatgtcattgggcagggatcagggatgataccggggactctccagag

SEQ ID NO: 207183 - DNA, 75 bp, Homo sapiens
actccaaatggttgaaaacagatatacaggctctcccggctgtgatagaccttcagttacagagagagggagcag

SEQ ID NO: 207184 - DNA, 87 bp, Homo sapiens
aacttttagaatatgaaaataagagccctgaggatccacaggtcttggataaggattttatattggaagacatggatcttgctgcca

SEQ ID NO: 207185 - DNA, 114 bp, Homo sapiens
agcccagagcgacccttcctggccatcctgggcggcctgatctagttgaatctgaagatgtggacctgctgatgaagagggctgactgtatctaacttagggtcttgcatgcag

SEQ ID NO: 207186 - DNA, 75 bp, Homo sapiens
ttctactgacgaagcttggaagttgcagaagagaaagcttcttgctatctacctccaccatgatgaaagtgtgtt

SEQ ID NO: 207187 - DNA, 95 bp, Homo sapiens
ctactcgcatcgcgcactttttggatcggcatctagtctttccgcttcttgaatttctctctgtaaaggagatctttaatctcatgaagtacgac

SEQ ID NO: 207188 - DNA, 75 bp, Homo sapiens
tacgggagaagcaggaggaggtccggagactgcagcaggagatcaaagacgctggccttcagacctgatcagact

SEQ ID NO: 207189 - DNA, 100 bp, Homo sapiens
gtccctggagcggccgccttccagcgctctgacgcccgctctgcggcttcggtgtttgaacaggccacagtccaggagcgcttacattcaggagctccgc

SEQ ID NO: 207190 - DNA, 100 bp, Homo sapiens
ggtactttgtgctgagggcgcagcagctctactactacaaggatgaagaggacacgaagccccaggtagagttggctttgtgggacacagctgggcagga

SEQ ID NO: 207191 - DNA, 74 bp, Homo sapiens
aggcgagccagagcctgcagtcccacacgactctttttgatcagaacaatgctgcaaaaaaagaagagtcagaa

SEQ ID NO: 207192 - DNA, 100 bp, Homo sapiens
ggccctgcctggagtacctgctgcagcacaagatcctggagactctctgcacgctgggcaaggccgagcgtatctggtgcaggccgtgagagcagcgggc

SEQ ID NO: 207193 - DNA, 100 bp, Homo sapiens
tgatgctgaaccaagagagaggttacagcttagcttccaggatgatgagccaagatagccaggttaaccaaacgctttgaagcagccaaagaagatctta

SEQ ID NO: 207194 - DNA, 75 bp, Homo sapiens
cacacttataatgctcgcagataagcatgctagccagaatatcattgtcatagtggctggagcaaatttactttt

SEQ ID NO: 207195 - DNA, 75 bp, Homo sapiens
aggtgaaaggagcagtagatgatgatgtagcagaagggtgttttgaatgctgtatcaaatgcctggggggcattc

SEQ ID NO: 207196 - DNA, 75 bp, Homo sapiens
tcctcctggcctcagcaacctgacaattctgtcgtgtcccgttagagatgtttatgattacttccgagctgtcct

SEQ ID NO: 207197 - DNA, 100 bp, Homo sapiens
aaggattccaagtaactcttatttgagccagagcccagaggtggagcagttagggagggttgtggaactggacagtgacatggtagatatcacccaggag

SEQ ID NO: 207198 - DNA, 100 bp, Homo sapiens
caagtgtgtactaaatgaaggcatgccaatttatcgtagaccatatgaaaagggtcgcctaatcatcgaatttaaggcgcagtggctcacgcctgtaatc

SEQ ID NO: 207199 - DNA, 100 bp, Homo sapiens
catctccttctctaagagatgcctgcagcctgccatgggacgtggggtccaccggtacagatggagggggagtctcactgtgttaccccagctagtcttg

SEQ ID NO: 207200 - DNA, 100 bp, Homo sapiens
ccactactctcaagatacgccaatgcgctcaaaggcaaaaaggtctctagtgatccctgaaaagttccagcatattttgcgagtactcaacaccaacatc

SEQ ID NO: 207201 - DNA, 100 bp, Homo sapiens
ggatggcggaggcgcctcctgtctcagtatgacttctctttggaaaagaaaaccattgagtgggctgaagagattaagaaaatcgaagaagccgagcggg

SEQ ID NO: 207202 - DNA, 80 bp, Homo sapiens
ttttgatgagtccatgcaggtctttgctaaacttggcacagcccaagaagatgaaaggattgttcttgttgacaacaaat

SEQ ID NO: 207203 - DNA, 100 bp, Homo sapiens
ccatcattgtggcgcagtgggaccggtttgccactcctaagcaccggcagacaagagcaggcatgctgaggtgatgaagaaaatcattgagactgttgca

SEQ ID NO: 207204 - DNA, 51 bp, Homo sapiens
ggattatgaaagtgcagaagactcggaagggatcatggaagctgataaaga

SEQ ID NO: 207205 - DNA, 83 bp, Homo sapiens
ctggagctgagcaaagtgcgtgaggagtttaaggagctgaaagcgcgaacatgggcctggaattgatatattcacacctggta

SEQ ID NO: 207206 - DNA, 100 bp, Homo sapiens
ccccgttagaactcgcgtttccacttcagagatctggttgactatagtcaatggggccaatggagccaagtgtatggaaacccacaacagtatggacagt

SEQ ID NO: 207207 - DNA, 90 bp, Homo sapiens
ccttaggatacaacatagaacctattatgctctatcagctaaaagatggcggcaaggcagcccaggcaaatgtaagaataggcgatgtgg

SEQ ID NO: 207208 - DNA, 75 bp, Homo sapiens
tttaattttagggtcctttatatagaagggagagtagggatgtgcggaagttcaaggagacaaagaagcagtttg

SEQ ID NO: 207209 - DNA, 83 bp, Homo sapiens
gttcagttggcaaaccagatatatgacttggaaataaacatgatgatggtacgcaaagtgattcagagaacgctggggctcac

SEQ ID NO: 207210 - DNA, 100 bp, Homo sapiens
ctcgccggccgagggtggccctaggggcagcgagcaagacagcaagcagatcatggaagggaagtggttgctgtgtatgttactggtgcttggaactgct

SEQ ID NO: 207211 - DNA, 82 bp, Homo sapiens
cagctagcaaggtgacccatgcattggttaatatcagcttggcttgtggagatgttgaaggaaagtttgatattttattcaa

SEQ ID NO: 207212 - DNA, 99 bp, Homo sapiens
ggtggtggacattgtgcaggagctgaagcagcagaaccccaggctggtgtacggttggcttatttggacgtctaggcagttttccagttagagggacac

SEQ ID NO: 207213 - DNA, 75 bp, Homo sapiens
agccgatccagcctgcggagcctgtggggcagtctggccatgtttctgtagggctgctgtactttgctgggcttc

SEQ ID NO: 207214 - DNA, 100 bp, Homo sapiens
ttttggggtagtgtctgggatccagtacgagttgaatcattgttcaaataagggaggtggttgactcaatggttcagcattttaaagtaactatatttgg

SEQ ID NO: 207215 - DNA, 118 bp, Homo sapiens
ctggaaattaactgcctccattacactgctgagtcacacacaacgcttgttatgttttcatcacttctctccagaagcttgtaacacttcaagaagcaaaactgctgctaaacgaaga

SEQ ID NO: 207216 - DNA, 50 bp, Homo sapiens
ctcccctgcccagagatcttgggtgtccacggttccagcctcctccatga

SEQ ID NO: 207217 - DNA, 100 bp, Homo sapiens
gagatatggcgcaactgcggcgcgttcttgggtgtctctggggagtccctgggccagaccttcctccagactccagcccacctcttcggagcagctctgc

SEQ ID NO: 207218 - DNA, 100 bp, Homo sapiens
ggagaccaccccagctacgaacagattcaggctgagggtaaaaagctgggattggtaggctgggtccagaacactgaccggggcacagtgcaaggacaat

SEQ ID NO: 207219 - DNA, 90 bp, Homo sapiens
cggctgagctgggcatggagcaccaggcggtggtgggcgccgtgaagagccttcaggcgctgggcgagggcgacatggagtccaatggga

SEQ ID NO: 207220 - DNA, 98 bp, Homo sapiens
gtatctttggacaaataggaattcaatgaaaacgtattcttaaaggcgaaaaaggtggatttgctaggtgttgttgaagtgtacagggtaaccaagcg

SEQ ID NO: 207221 - DNA, 96 bp, Homo sapiens
tgtatctttaactagaatcctgaaatgttcagagcagagatctaaagcatgtattccttatttgaaaaagagcaaagttgctcatatcctcaatat

SEQ ID NO: 207222 - DNA, 97 bp, Homo sapiens
gagcactgcgctgtcagcgatagcccagtggatggccattccaggttctgcggcatgaggaatttgaagaaggctgcaaagctgcctgtaatgggta

SEQ ID NO: 207223 - DNA, 100 bp, Homo sapiens
ctcaacttgggcagaaggcataagattggctggaattttcaacacatgatgatgttttcaggagcacggtctgaatctgcacagagcaagatgctgagtg

SEQ ID NO: 207224 - DNA, 100 bp, Homo sapiens
gaggaacggctgggtgtgggacaccgtgggctgcgtgtgggacgggtttagcggcagcctcttcgatgtgtcttgctgaatcagggctctcttatccctg

SEQ ID NO: 207225 - DNA, 50 bp, Homo sapiens
agatccgcagaggacagtcatcagaagccaagtacaagaagctggagaag

SEQ ID NO: 207226 - DNA, 96 bp, Homo sapiens
ttgacgcggtgaactctgtccagttttcaaaccacacagccgcttacaaacacgcagatggcaagaagattgatggcaggagggtccttgtggacg

SEQ ID NO: 207227 - DNA, 121 bp, Homo sapiens
acatcagcagctgaaaatccatcagtgccagcataccaatgaacctctattcaaggaaggtggagttgcagcaagggctacgggctgtgtaccacaacatgcctctgatatggaaaccagg

SEQ ID NO: 207228 - DNA, 74 bp, Homo sapiens
attaatgtgtgccatttatgtgatggcaaaggttgctgctaaatgggaaaaacttagcttagtactgatagatg

SEQ ID NO: 207229 - DNA, 100 bp, Homo sapiens
gagagatggaactgacttggcaggagatcatgtccatcaccgagctgcaggtggagccgccaccaaaatgcagattttcgtgaaaacccttacggggaag

SEQ ID NO: 207230 - DNA, 89 bp, Homo sapiens
ccgggacccacttcactccagtgcctccgacgcctcctgatgatgtcgacgactgtgcagacagcccgtgctgccagcaggtgtgcacc

SEQ ID NO: 207231 - DNA, 75 bp, Homo sapiens
cgctgttttcgtgatcttcagaccccaggttctttggctcttgtcaggatggtgaagctgttcatcggaaacctg

SEQ ID NO: 207232 - DNA, 100 bp, Homo sapiens
ggaacatcgcctctttccatcgaacattccgagaatgcgagagaaagagcctccgtcaccacatagaatcagagatcattgatttcttcctgggggcctc

SEQ ID NO: 207233 - DNA, 100 bp, Homo sapiens
gcgcgccatggcttctggagccgagttgcttatggaaccacagagaacagtcccgtgacattcgcgcacttccctgaggacactgtggagcagaaggcag

SEQ ID NO: 207234 - DNA, 100 bp, Homo sapiens
atttttctacatattaggatataaccctgagacaagtattaaaggtggaagaaggtccatatctttttctgtgggtgcttcaagtgttgttggaagtgga

SEQ ID NO: 207235 - DNA, 100 bp, Homo sapiens
agatttcggcgaggagcatcccttctatgacagtgatggaatggggagaagatattaaagcagtttcaaaagatgaagcagtgatgttggtgaatcatca

SEQ ID NO: 207236 - DNA, 100 bp, Homo sapiens
tctggtgacaggacagcattgtgaccagtgcctggtccttgaatgggcaagagggcacatgaagtacggcgtcctccacattcacggcctctacacggac

SEQ ID NO: 207237 - DNA, 74 bp, Homo sapiens
gtggactgcagcctcggcggtcagcaggttgtggcagcactgcctgaaggtatgagaccagattctaatcttta

SEQ ID NO: 207238 - DNA, 50 bp, Homo sapiens
cgatatgttgtcaaccaccttggtgaaagaccttttatgtgtgaaacatg

SEQ ID NO: 207239 - DNA, 74 bp, Homo sapiens
gagggcagtcttaacttgtgttaaggcctgtgtgtagcattgaagtttaattcccgtaaaccaattacacctga

SEQ ID NO: 207240 - DNA, 90 bp, Homo sapiens
tgactgagtacctgaaccggcacctgcacacctggatccaggataacggaggctggttggtaggaggacagtttgatctggaaatgaatt

SEQ ID NO: 207241 - DNA, 88 bp, Homo sapiens
gttcgcaaacagcacaggccatcaaatgcagaattcacaagatccaatcccttgtccttaaaaggtaagaatgattgatgttggctga

SEQ ID NO: 207242 - DNA, 51 bp, Homo sapiens
ctcccgcaggatcccgccattgttcaggatgaagatttgataaagtggaag

SEQ ID NO: 207243 - DNA, 100 bp, Homo sapiens
tatacatggagagtctggccttagcacatgcagatgagaagtccttaggtcctggcattgatgtgcctgctccagacatgagcacaggtgagcgggagat

SEQ ID NO: 207244 - DNA, 75 bp, Homo sapiens
tggaaaacgcccagagatttaatcaggtacgtagagaatacaggaaattcttcagagccaatgctggaaagaaaa

SEQ ID NO: 207245 - DNA, 70 bp, Homo sapiens
tgcatcgcgtcgccatgatgggccatcgtccagtgctcgtgctcattccagccaaagaggaagctaatgc

SEQ ID NO: 207246 - DNA, 75 bp, Homo sapiens
cagattctagccgctactttgtaatccggatccaggatggtactgctttacctgctgttcctgagccttacgctg

SEQ ID NO: 207247 - DNA, 78 bp, Homo sapiens
ttagaggaagttctggagatgaagcccctttgtgtgactaaatttggcaagaatatggatctgagccagtctttccac

SEQ ID NO: 207248 - DNA, 75 bp, Homo sapiens
tctagtctttccgcttcttgaatttctctctgtaaaggagaaccttcatcaccctggtgttgtaaatttggagtg

SEQ ID NO: 207249 - DNA, 71 bp, Homo sapiens
ctccaggaaattcagcctcaaaaccgtcctgctgcttgctgaccaaatggacgccaagagtgccgaggatg

SEQ ID NO: 207250 - DNA, 100 bp, Homo sapiens
tgaatttggaatcttcccttgaagagaaacctcaaatatttgttgttaagtgatcttcctggagtaagagaaaaagaaaatcttgtccaagcctttaaga

SEQ ID NO: 207251 - DNA, 100 bp, Homo sapiens
ttcactcaacatcatcctcagtgtctttgccattattctcggggctttcatagcagctgggctaactgccaggcggccaaaggacagtatgttcacacgg

SEQ ID NO: 207252 - DNA, 98 bp, Homo sapiens
cttttttgtcctaaataaaagtaccacaattggaaggcatgaaaattcagaccttgttttacagaagtgcctagctgccactccatttatatgaggca

SEQ ID NO: 207253 - DNA, 82 bp, Homo sapiens
atcgtcgccacctggatgctggagcacatgattaagtaccggtacatcccgttcacacatgggaagagaaggtacagaggca

SEQ ID NO: 207254 - DNA, 100 bp, Homo sapiens
gcccccaacccagaccacacccttgagcctgagcccgacattattcctgagttcctggccattttctatccaagatgtggtacaacctcttaccctgcaa

SEQ ID NO: 207255 - DNA, 82 bp, Homo sapiens
ggtgctactgagcaatatcaagcccattcaaacagaggcatgggttccagcaacagatagaaatgctttaagttcactctgg

SEQ ID NO: 207256 - DNA, 83 bp, Homo sapiens
gcgccttttcgaaagccagaggctcgagttacccctcttaccaccgtcatggcagtcccaggatggagaagatgaaagtgcag

SEQ ID NO: 207257 - DNA, 98 bp, Homo sapiens
gccatcacggttggaacgagaacttaaacagctttacttagaacgagttttgaagggtgatgtggaaaaactttctgctggagtgcaatggcacgatc

SEQ ID NO: 207258 - DNA, 83 bp, Homo sapiens
aaaagttaaagatgctcattttacttacaggttaactgaagtccaaaagatgtctaggagggaaaacccctgatcctaaaatg

SEQ ID NO: 207259 - DNA, 75 bp, Homo sapiens
gatgttggagaactacagaaacctcgtctccctggacatcgctattgcggttccgaggcagtgggaagagatgcg

SEQ ID NO: 207260 - DNA, 100 bp, Homo sapiens
cttcgggtccagaccaaacatttccacatcaagtgtttcacctgcaaagaatgatatggaacctagcaaagctgttccactgaatgcatctaagcaagat

SEQ ID NO: 207261 - DNA, 95 bp, Homo sapiens
atggtggctgcccccaaggtggtgggaacagagctaagtatggccataaaattttgagtagaaaaatccagaaatttgaaaatcagtatcgtggt

SEQ ID NO: 207262 - DNA, 100 bp, Homo sapiens
caagaccctgtgcacctctcagcaggcctttgctggacagatgaagagtgacttgtttctggatgattctaagaggccctcgggaccaaggatcacgtca

SEQ ID NO: 207263 - DNA, 80 bp, Homo sapiens
tcatattttctcacatatacaacacgattcttctaatggatgggaacatggggtccagtggtttacgtcttggatcttgc

SEQ ID NO: 207264 - DNA, 76 bp, Homo sapiens
ccaccccgaaattcgccccgattaaagactgtgttgcattatcagtatactttgccattactatgtactactgctg

SEQ ID NO: 207265 - DNA, 75 bp, Homo sapiens
ctggagatcgacccgtacttgaagccctacgccgtggacttccagcgcagggtaagacgtgaccttttgaggtga

SEQ ID NO: 207266 - DNA, 83 bp, Homo sapiens
aagagggtggaaaaagcagggaggttatgaggcttaataaagaagagtgtggaggtatcctgactggtccttacggttctatt

SEQ ID NO: 207267 - DNA, 99 bp, Homo sapiens
gaaactttgtctgcgaacactctttaatggaccagatcaggatttgagcggaagaacgaatgtaactttaaggcaggagaattgcttgaacccaggagg

SEQ ID NO: 207268 - DNA, 100 bp, Homo sapiens
tgactactggggccagggaaccctggtcaccgtctcctcaggataacaaagccattgacctttgccgattgtgttggggacgaacttcctttaggatggg

SEQ ID NO: 207269 - DNA, 100 bp, Homo sapiens
catcttgaaacaatatgtggagactcactggtgtgcccaatcagagaaatttaggcctcctgaaactacagaaaggactcagtgttcctgaaagtacacc

SEQ ID NO: 207270 - DNA, 98 bp, Homo sapiens
ggaagtccgtttcgtgagcagcgccaaggattctcagctggtagctggtgttgcattcaagaagactttctcttacgctgggtttgaaatgcaaccca

SEQ ID NO: 207271 - DNA, 75 bp, Homo sapiens
cccttcagtcgcagcctcactctaggcggaaagccaggacctccggcatgtcatcattcccttgctgcacactgt

SEQ ID NO: 207272 - DNA, 100 bp, Homo sapiens
tggacgccttctaagatgatcgcccggctgggcaaggagatcaacaacccagagtccgtgtattactgggcccagaagatggggagaggagacgctgcca

SEQ ID NO: 207273 - DNA, 102 bp, Homo sapiens
agataaacgaggggctggaacacctcgccaaagcagagaaatacttccacagcgcggcacctgtacctccggggtggcgctggggttggctccatgaccaag

SEQ ID NO: 207274 - DNA, 90 bp, Homo sapiens
aacgagcggcggcggcggcagcgggtcttgggtcctccgagagcagcagcggagccatgtggctagaaatcctcctcacttcagtgctgg

SEQ ID NO: 207275 - DNA, 51 bp, Homo sapiens
gggactatgtgtgcacctggcaaggttcttcccgcaaagagatcacaaaac

SEQ ID NO: 207276 - DNA, 100 bp, Homo sapiens
agaggttatgcgtttgtcactttttgtacaaaagaagcagctcaggaggctgttaaactggagtgagctgttgccgcagaatgggctgctggctcctgcc

SEQ ID NO: 207277 - DNA, 90 bp, Homo sapiens
gcattttgcaacgtagtgttgccaatccagcatttttgaaagcaaaatatgctgtgaattccatcaagaagaaagtcaacgacaagaacc

SEQ ID NO: 207278 - DNA, 73 bp, Homo sapiens
gtgaatcccctgtttgagaaaaggcctaagaattttggcattggaatcgggcgcctgattgctgagtgtcatc

SEQ ID NO: 207279 - DNA, 100 bp, Homo sapiens
cctgtggatgactgagtacctgaaccggcacctgcacacctggatccaggataacggaggctggatatggaatgtgcagatgtcccactattaactccaa

SEQ ID NO: 207280 - DNA, 101 bp, Homo sapiens
atttgagcctctgctgaattggatgaaagataaagcccttaaggacaaggatctctatgacgctggagtgaagaggaaaggaactgatgttcccaagtgga

SEQ ID NO: 207281 - DNA, 102 bp, Homo sapiens
tttaagcctatactttctaccagaagcttgaagggtttggttaaggtcctagaccagaaggagcacaggctggatggccgtgtcattgaccctaaaaaggcc

SEQ ID NO: 207282 - DNA, 73 bp, Homo sapiens
agcctcccaagaagctgggattacagaagaagctgtgaataaggtgaaaattcaggccatgtcagaagtacag

SEQ ID NO: 207283 - DNA, 82 bp, Homo sapiens
tgaatatctacacggaaatgggccgacgatttacaaccctgaagaatctccctatccctattttgtccccctgcagtaataa

SEQ ID NO: 207284 - DNA, 100 bp, Homo sapiens
agcgaggaggcccgggagcgccgagcgtcgccgccgccgccgccatgaacaactcgggcgccgacgagatcggaacctgcaaccatggtcgtgccactag

SEQ ID NO: 207285 - DNA, 50 bp, Homo sapiens
agctaggcttcaagattgtctccaagtgcacgagcatagctgtgtctcgg

SEQ ID NO: 207286 - DNA, 76 bp, Homo sapiens
ctgccatcagcatcactgaaaacgtgctgcatttcaaaggtctgtctcgttggaaaatccagaacatacccttcct

SEQ ID NO: 207287 - DNA, 100 bp, Homo sapiens
gtcaataaagagagtgccgtatttcgcagattggagctgagctgtggctgccagaagatagcgaacccctgcagagcccagggagatggaagacttcgcc

SEQ ID NO: 207288 - DNA, 87 bp, Homo sapiens
cgagcgcggccctgcaggcgatgtcgccgaaaccgggctgcaggcgggtactccaaagattcaggtttactcacgtcatccagcaga

SEQ ID NO: 207289 - DNA, 98 bp, Homo sapiens
cccgtggtccttctccatattcgagtgaggacccttggagggctgctaaaatgatcaagggttacatgcagcaacacaacatcccccagagggaggtg

SEQ ID NO: 207290 - DNA, 98 bp, Homo sapiens
tgtcaccataggagacatggacgaagccttcaaatccatcaagctcatcaaaagctacaaaagaccccacagctgtagagagagcaaacttgttaaac

SEQ ID NO: 207291 - DNA, 87 bp, Homo sapiens
taaacagaacaccaggacatcccagagtctgggaaatgatggaggaattggttgagggcgttcgctgggcctttattgacatgctag

SEQ ID NO: 207292 - DNA, 82 bp, Homo sapiens
acgtggccactgtggccttctgcgacgcgcagtccacgcaggagatccatgagaagaggagcaggagcggcttcgcttggag

SEQ ID NO: 207293 - DNA, 95 bp, Homo sapiens
atcacagctcagttccccaacaacaggatcacaagctggagatgcctttaagatactgaacggctgtattcagtggtgtttcaagaaatatgtaa

SEQ ID NO: 207294 - DNA, 100 bp, Homo sapiens
atggaggagacagaaagcatcctcagcacgccaaagcccaagctcaatccaagaggccagcgtgcagcccccatgcagggccagccaccctgagcctcac

SEQ ID NO: 207295 - DNA, 90 bp, Homo sapiens
gttgcacacactaggagatctcctcaaagaagtttgtccttctgctattgatcctgaagatctgagtgggacatacttttgaaggatgtg

SEQ ID NO: 207296 - DNA, 80 bp, Homo sapiens
tgccaaggaaaaactggagagcttcatcaaaaatagtgatagctttgataagagttcatgatcaagtgttgcccacacca

SEQ ID NO: 207297 - DNA, 84 bp, Homo sapiens
ggactgattccaagacaaggcgcccaccccacagagcaagttttctgaaacgtggccgagaactactggtggcgtggccagaac

SEQ ID NO: 207298 - DNA, 73 bp, Homo sapiens
taacatcagcattacgctcgttgagcaatgccaccattatcaatgaagagaataactgaagtgaagtgatgga

SEQ ID NO: 207299 - DNA, 102 bp, Homo sapiens
gggagatgggcctactcgcccgccaccctgcgctgccgccgctctgaggagttaaagttttcggctttgtgagaaaccttaccatcaaacacgatggccagc

SEQ ID NO: 207300 - DNA, 50 bp, Homo sapiens
gggaaaagcaccaagaatccaccacagggttccgagtctgaggaagacat

SEQ ID NO: 207301 - DNA, 96 bp, Homo sapiens
ccggagacaacaaatgcttccgacaccccatcagcaaagtcagggtctatgttaacaatgaatgggcaaccagtgttggggaaggagggagctttg

SEQ ID NO: 207302 - DNA, 96 bp, Homo sapiens
cgctgcgggcccgggccatggccgccgccgatgccgaggctccaccgaggacaccgcgtccagcttgtgtggcgaggaggacacagaggacgagga

SEQ ID NO: 207303 - DNA, 82 bp, Homo sapiens
tctggcagattctggaaactgtacattgaagcagaggccaagaataaaatctttatgaactaacaagatgaattaaagatgg

SEQ ID NO: 207304 - DNA, 115 bp, Homo sapiens
ctgccccgcggagccgccggtatgagcgcccctcgccaccccgtgtcccaggcccggcctttctgacaagagaggcatttcatccttcatgaagccattcaggattttgaattgc

SEQ ID NO: 207305 - DNA, 75 bp, Homo sapiens
ttgcaggaaaacaagttcagggctcccactgattctacattatgggtcctgtggtgacagataatgggaatttta

SEQ ID NO: 207306 - DNA, 119 bp, Homo sapiens
agctttttgtccctgtgtgtcatcctgcctgtcaacctctcaggggacttgctgggatctagtgaaaagccatttgatgtatgcggtcagagaagaagtggaggtcctcaaagagcaaa

SEQ ID NO: 207307 - DNA, 97 bp, Homo sapiens
gaaaggaggagatcaagaagtcggtcttttgattacaactatagaagatcgtatagtcctagaaagaaacatgccctgaactgtcacagaatgaaac

SEQ ID NO: 207308 - DNA, 80 bp, Homo sapiens
ctcttcgccatcttcatgggcctgcgggcctccaaggtcagttctacagcaacggagggcattctgggaatgccagtggc

SEQ ID NO: 207309 - DNA, 90 bp, Homo sapiens
gctttttgatggccatggcataaggaactctatcccaggaatacagctttgcattagttgctgatcatctgggctgtgatccacaaaccc

SEQ ID NO: 207310 - DNA, 75 bp, Homo sapiens
gacgctgcggcccggcccggcgggggaccaggggaagagacatgcgagggcctcatcatgccccagtagctcaga

SEQ ID NO: 207311 - DNA, 75 bp, Homo sapiens
aaaagcagcaaatctacttttgggttacaaaaatccagaccagattgctcttaaacttggtgtgactgctaatga

SEQ ID NO: 207312 - DNA, 82 bp, Homo sapiens
tatgaccattaaactatgggattttcagggctttgaatgcatcagaaccatgcacggttttgcggctagttggctattcaag

SEQ ID NO: 207313 - DNA, 100 bp, Homo sapiens
ctggaagctgcagccacaatgtgcctttgcaggggagcctgagagccacagcaccagtggcagttcgcagcctccaggacttggctcgcatcgccatccg

SEQ ID NO: 207314 - DNA, 75 bp, Homo sapiens
ccaaggagaccaggaagcgagcactcagcaggcgggcaaaactgttccgatttgcctctgagaacgatctcccag

SEQ ID NO: 207315 - DNA, 90 bp, Homo sapiens
cttgcaaaccttgctttggattttatgtgctacagtctgcggaacggagcagtatttcaatgtggagaaatgagccgtcagactgctaca

SEQ ID NO: 207316 - DNA, 98 bp, Homo sapiens
tggagtctgcgaaggccgggacccggttccccggcccacagtgggggtgtgcaaacccgagagaactggggtctccgtctctccaccgggggcttcat

SEQ ID NO: 207317 - DNA, 100 bp, Homo sapiens
aatcccctgtttgagaaaaggcctaagaattttggcattggtgattacttcgggatcctcaaggaggcgagagtgaccgtgttccccttcaacatcctgg

SEQ ID NO: 207318 - DNA, 75 bp, Homo sapiens
ctctctcctctggcaggatgaggcgtgcaggcctgggtttaaccaccaaggactctgagagctggcaggtctgag

SEQ ID NO: 207319 - DNA, 100 bp, Homo sapiens
cgcaaacaagccaatcccaggaggaaaaacggtaaagatgagcccagcagctacacatgtacaacttgcaaacagccattcaccagtgcatggtttctct

SEQ ID NO: 207320 - DNA, 96 bp, Homo sapiens
atcgagaggaccttccacgtggattctccagacgagaggctttcagttctgaaatggcaaagaggtccaagatgctgagtttgaacaattacagtg

SEQ ID NO: 207321 - DNA, 75 bp, Homo sapiens
gaggctgcgcggggccgaggccgcctccgagcgccaggtcaaaatgcagatcttcgtgaaaacccttaccggcaa

SEQ ID NO: 207322 - DNA, 88 bp, Homo sapiens
tctccgcacgactgttacagaggtctccagagccttctctctcctgatggagtttcactcttgctgccaaggctggagtgcaatggtg

SEQ ID NO: 207323 - DNA, 100 bp, Homo sapiens
catatgcactgaagaaaatatcctatcaacttaagaagagttaccttgtacatgcccactatgtacctcagacagagggagctgtgttagtacaactgaa

SEQ ID NO: 207324 - DNA, 101 bp, Homo sapiens
gcagctagcagggcgcttcggttaccgaagtgcatgtttgggattttgttgaagaaagctggatacagtaaacggaaagaatcttggaagatgcttgactg

SEQ ID NO: 207325 - DNA, 75 bp, Homo sapiens
tctgaagagtaactttgccctcctcctaaagtcagcagataagcagagagccctagaagaaaccaaagcctacac

SEQ ID NO: 207326 - DNA, 83 bp, Homo sapiens
tgaaagatttactgcctgaacatctgaaattgacacccgtgctttgaagaagaggagcacttcaaggtgctggtgaagatgac

SEQ ID NO: 207327 - DNA, 100 bp, Homo sapiens
agagcttgctccctacgatgagaactggttctacacgcgagctggaaccctcagtgctgcgtctagattctgcaggggaggtttgctgggaccttggctc

SEQ ID NO: 207328 - DNA, 97 bp, Homo sapiens
tcacctcttcagaacgaattgacaaacaaattcggtacatcctcgacggcatctcagccctgagaaaggaggaactgcaagcacatgttgaccagat

SEQ ID NO: 207329 - DNA, 100 bp, Homo sapiens
cttcaccgccgcagaccccttcaagttctagtcatggatctatctggttcaatagatgacctccccatggggacagaaggagctctgagtcctggagtga

SEQ ID NO: 207330 - DNA, 51 bp, Homo sapiens
gctggcagagagagaagaggctctggcttcacgttacagcatggaagctgt

SEQ ID NO: 207331 - DNA, 74 bp, Homo sapiens
tgtggaccagtaaagttctcccacaaggtgtcatggagaaactccagctgggcccagagattctgcagcgggaa

SEQ ID NO: 207332 - DNA, 137 bp, Homo sapiens
cagttgtgagattcccttgcaaatttacatacgagaatggcttgtgaaatcatgcctctgcaaaggttacttttcacatagaaccatatagcaatcgagatgatcaaaacatgtacaaaaatgtcaagtatattata

SEQ ID NO: 207333 - DNA, 100 bp, Homo sapiens
atggaggccagcctaggtcttgtatgaaacctgtgagggcctgtaattcagtgtttacagcattagatcactgtcatgaagccatagaaataacaagcga

SEQ ID NO: 207334 - DNA, 100 bp, Homo sapiens
gagtttgtggaagatggcgcctgttgtgacagggggaggctcagaagcaagaagaagatgaaagttgtgccgctgctgaggcgttgacagcgcctgagga

SEQ ID NO: 207335 - DNA, 74 bp, Homo sapiens
ccttcgacttggagtctttgtccaggacgctttccgggccctcctgcagatccgggcggtgcggaagaagccag

SEQ ID NO: 207336 - DNA, 83 bp, Homo sapiens
atcgacgcggacagcgggctggagcctgacgagctggcggcagccattgtttgatgtcctgtgactgagaaaccaggctttaa

SEQ ID NO: 207337 - DNA, 100 bp, Homo sapiens
ctggggcagtgattggaaaaggaggcaagaatattaaggctctccgtacagactggtggacttgctttgtgaagagacagttcatgaacaagagtctttc

SEQ ID NO: 207338 - DNA, 100 bp, Homo sapiens
gggggttgctgacccagaggagagttctccaaacatgatcgtttactgcaaaggtaattcaatattcccagctcctgttcgacacagtggagaccatggg

SEQ ID NO: 207339 - DNA, 83 bp, Homo sapiens
cgccttcggggccccagcggcggcggcgaagagcccgccctgtcccagtaccaggtgggtcttcaaacaactctatgataaag

SEQ ID NO: 207340 - DNA, 100 bp, Homo sapiens
aagtggtggcgctggccagactgacacccataccttttgggcttcagaatgcagtgttttcgaatatggaaggctccatgttgacaatcagctttggaag

SEQ ID NO: 207341 - DNA, 75 bp, Homo sapiens
gactatgccattgtgctattcaagagtaaacatcagtctccaaagataactacatcccttcttcccatcaacaat

SEQ ID NO: 207342 - DNA, 82 bp, Homo sapiens
ctgggtggttgttggcgtgtccctgcagcgaaggatcctggagcaggccgggctctcgccatgggtcactgtcgcctctgcc

SEQ ID NO: 207343 - DNA, 100 bp, Homo sapiens
gtcgaagcgagggtctgaagttcacgactactagaaggggaggggagtggaaaggctctcagtgaaaaaggtacaaatctattgtcaagtacaagacagc

SEQ ID NO: 207344 - DNA, 100 bp, Homo sapiens
acttcctgtatgtccttcacctgccaagcaggttgagtatctggtcaatgaaaagcacatctacctgctgccaagtggtcgaatcaacgtgagtggctta

SEQ ID NO: 207345 - DNA, 74 bp, Homo sapiens
aggggggagcaccatctactctatgatccagtcccagatgaaaagttggaagcaagtccagcctcaagtcccct

SEQ ID NO: 207346 - DNA, 98 bp, Homo sapiens
agagactctataagaacatgtttttctaagccctttttgtgccaggtgtcccgttaacgtctctgttagttcagagtgaagttattgccagtggactg

SEQ ID NO: 207347 - DNA, 80 bp, Homo sapiens
gttcgcggtgacggtggcgccgcccggggcgaggcagggccagcagcaggcgggaggtgtggaaacaggaagagaactag

SEQ ID NO: 207348 - DNA, 50 bp, Homo sapiens
tggccttcaacccatcagcgccccaggttcctatatgatagtggactctt

SEQ ID NO: 207349 - DNA, 90 bp, Homo sapiens
acttgtaaaatcttggaataattctcttcttatgaagaatctgaattatccagaacagaaagttgtgactgttggacagttcaaaattgg

SEQ ID NO: 207350 - DNA, 82 bp, Homo sapiens
gaagggaggagactcctgaccctcagaatggtaacagcttgcctgattgctgtggccaaaacagatggtgaagttcaagtac

SEQ ID NO: 207351 - DNA, 100 bp, Homo sapiens
gaaaatacaaatcacacgcataatggatgaaaggaaccgacaggctagacagcaacaagcagaattggcccaacaggaatggcttcaaatgcagcaagct

SEQ ID NO: 207352 - DNA, 90 bp, Homo sapiens
gaccttctgccatgattgtgaggcctccccagccacgtgaaactgacccgctggggcccagcccctactcatggtgcccagaagacctgg

SEQ ID NO: 207353 - DNA, 100 bp, Homo sapiens
tggcttggaataagctataagggaattggccaatatgatatacaagacaaggtgaagcctcggaaggaggctctgtcggtggtgagcgacgaccagtccc

SEQ ID NO: 207354 - DNA, 125 bp, Homo sapiens
aaaagacggacagcccatcgtgtgaactatagagtttgtggacagatttatattgcaattaatggatgcctcgaagttgacgtacatatatattcagaaatgttttgccacctgagacctatgag

SEQ ID NO: 207355 - DNA, 83 bp, Homo sapiens
cttcaacaagaggacccaggagaaattcgccctcaaaggtgtcttttatgaataatcaaaagcagcaaaagccaacgctatca

SEQ ID NO: 207356 - DNA, 100 bp, Homo sapiens
cgcaaagcggggacccagaccctggagcctcagttggaagcagccgatccagcctgcggagcctgtggggcaggtgggcagaaccgaggtggtccggagc

SEQ ID NO: 207357 - DNA, 82 bp, Homo sapiens
gccgtgacaactttcgtttccctctgagggaattgggaggtcggcggccccaaaagtcttgccccagaagctgcgggcacat

SEQ ID NO: 207358 - DNA, 100 bp, Homo sapiens
ggattttattcaggttcctaggaatctcgttgtcaggatctggtgattttgaagagaaaccacaacaacaaagatgaaaacccctgcttcctttacctga

SEQ ID NO: 207359 - DNA, 50 bp, Homo sapiens
ccaggggccagttttgctagtccacatgtactctttccattccttacccc

SEQ ID NO: 207360 - DNA, 100 bp, Homo sapiens
aagatgtaatacaagttccaaggaacttagtaggcctacaatgggcaccatcaagccttggaagtccttctgcagtcgttggtggacctggacatcaggg

SEQ ID NO: 207361 - DNA, 75 bp, Homo sapiens
ccgctccgctcacaatccgatggcggcggccgtgcttagggattcgacttcggcattgatctggagaacattgtg

SEQ ID NO: 207362 - DNA, 88 bp, Homo sapiens
tccatgtgacatggtttctccctatgttacgtggatgtttgtaacgttcaggaagatttgactgaagagaaaaaaagggaactggagc

SEQ ID NO: 207363 - DNA, 100 bp, Homo sapiens
ccactgtaacggtgccaactccaatttaccaaactagcagtggacagtatagtgagaagccttataagtgctcatgggagggatgtgagtggcgttttgc

SEQ ID NO: 207364 - DNA, 50 bp, Homo sapiens
atcatgtatgagatgctcatcgtatggaagctccaaaaggaaagatacca

SEQ ID NO: 207365 - DNA, 100 bp, Homo sapiens
ttaggatttgttagaaaggagacccgactgcaactgctggattgctgcaaggctgagggacgagaacgaggtcctcagaatggttggaatgaccctccag

SEQ ID NO: 207366 - DNA, 50 bp, Homo sapiens
tctctacattccagtaacccagggcatccgcttcgatcctgaaattccgc

SEQ ID NO: 207367 - DNA, 100 bp, Homo sapiens
aggaaatgtcttgaaagaggcacgcatttttgacagacatatctgaagagatggattaagaatgctttggattaaggattgtggagcacatttcaatcat

SEQ ID NO: 207368 - DNA, 100 bp, Homo sapiens
tattggttcagcccctgaaagtttccaacaggaaatcattgtccccattccattctgtggtgactacattgggctgcaagggaaccccaagctgcagaag

SEQ ID NO: 207369 - DNA, 83 bp, Homo sapiens
taagtacaactgaagtcacctttgacaccccagatctggatattaatctgaagttagaaacatgagtgaccgaggaggtggcg

SEQ ID NO: 207370 - DNA, 100 bp, Homo sapiens
ccgaagaagcttcgaggatctgttgatgcggatgaaattaaaaggctaggaaagagatttaagaagcttgatttggacaattctggttctttgagtgtgg

SEQ ID NO: 207371 - DNA, 100 bp, Homo sapiens
ctttgtcattgatgcctgttgtcttctccctcaggaccttctgagcttctcactcaaggatgattgccacggcagtgaagtttctacagaattcccgggt

SEQ ID NO: 207372 - DNA, 75 bp, Homo sapiens
ctctagccagctaggttcctggtgctttggggaagtttcaggcacctgcaagagagacctgcgtggaatgtcaga

SEQ ID NO: 207373 - DNA, 100 bp, Homo sapiens
ctggccgcctcgatgcaggaggacgaacagaaccaaaaacttttgctagaaaatcagcttttacgagagaaaactcatggccttgtagttgagaaccagg

SEQ ID NO: 207374 - DNA, 75 bp, Homo sapiens
tggcgctctggctgtgctgcgcgacccccgcgcatgggttcagcaccacccccttctccaacacctaacaaagag

SEQ ID NO: 207375 - DNA, 82 bp, Homo sapiens
aggacctgccactgcgtctgaagtgtactaatggtcacttgatgtgcgctggctgttttatccacctactagcagatgcccg

SEQ ID NO: 207376 - DNA, 100 bp, Homo sapiens
ccttagagagcacgcccatgctggagaaggagaagtttccgcaggactacttccccgagatccagacatttaatgtggatgcaccatgccagaccgtgga

SEQ ID NO: 207377 - DNA, 100 bp, Homo sapiens
aggacttccaggtcacggaggaggtgaaagccatcaccatcgaggctgagccaagagctgatggcagccgccggaccacccgctatgacatcgacatgac

SEQ ID NO: 207378 - DNA, 75 bp, Homo sapiens
agatgccgggggagcggggccttccacaccccctccgtgggtgtgtgctccagtgatccacaagctcagaaatac

SEQ ID NO: 207379 - DNA, 100 bp, Homo sapiens
ccgacagcacagacagaatccctgctaccacttggctgaagaggaaataaaaacagaacaggaggtggtagagggcatggatatctctactcgctccaaa

SEQ ID NO: 207380 - DNA, 100 bp, Homo sapiens
cgcgtttccacttcagagatctggctcagtagatgaaggcgtttctgagggcttgcctacacttcaaagcacgtctagcactaatgctcctccggatgat

SEQ ID NO: 207381 - DNA, 100 bp, Homo sapiens
tgacttaatcgtctttttggcagaccagaatgcaccctattttaaacccaaagtaaaggtatctttcaacttagcagtgtctgcaaaaacgaatcttttc

SEQ ID NO: 207382 - DNA, 75 bp, Homo sapiens
aaggcaagagtaacagcagcgccgtcccgtccgacagccaggcccgggagaaagcatcctggccagaacaagcca

SEQ ID NO: 207383 - DNA, 75 bp, Homo sapiens
tcttcctgggacacaacgacgacattatcaggttcttgagcaggccagagtggaaatccccctgtttcccttcag

SEQ ID NO: 207384 - DNA, 75 bp, Homo sapiens
ccgcaactccagccagctcactgtccacctgcgatcccacacgggtggagccgccaccaaaatgcagattttcgt

SEQ ID NO: 207385 - DNA, 100 bp, Homo sapiens
atatactattgtactatggacttcatcgctttatagtatgtcgagagtaccaacgtggcaattgcaaccgaggagaaaatgattgtcggtttgctcatcc

SEQ ID NO: 207386 - DNA, 100 bp, Homo sapiens
aggcccaccctggagtaaccctcactggagaatccagagttaagtgggcagaccaacatccacctcagcaaaaacttcttcctgacgaatcgcgccaggg

SEQ ID NO: 207387 - DNA, 106 bp, Homo sapiens
aggaaattcaacagaacttagcataaatgctgaagatgtttcatgaatcacgtatcctgcatttgtgggctgccttgttccttgttgagttgttgcaagaggtccc

SEQ ID NO: 207388 - DNA, 125 bp, Homo sapiens
gctcaagggggatcagctctattatttcaaagatgaagatgaaaccaagcccttggtatttatgagcctccatttcttatactactgcagtgaaccaacattggatgtgaaaattgccttttgtc

SEQ ID NO: 207389 - DNA, 97 bp, Homo sapiens
acccccggcggcacgctcttcagcaccaccccgggaggtggtataagttgaaatccaaaccaggaaagaaggacaaggagcgaggagaaattgaggt

SEQ ID NO: 207390 - DNA, 74 bp, Homo sapiens
acaacagtgatgaggaaagctgtgaaagttctcaagattgtggacaagaacaaccgctataagtccatagatgg

SEQ ID NO: 207391 - DNA, 75 bp, Homo sapiens
caagatggcgaccgagacggtggagctccataagctaaagaatgttgtaccatctttgggtaggcagacttccct

SEQ ID NO: 207392 - DNA, 51 bp, Homo sapiens
ccggcctggagctcccagggccgagatattaataaggcagcggaaagaaga

SEQ ID NO: 207393 - DNA, 83 bp, Homo sapiens
ctgaggatgagctggaggaggggaaacagaagcctatcagttgctgaagaaggccacccttcaggataatacaaatcaaactg

SEQ ID NO: 207394 - DNA, 78 bp, Homo sapiens
ctaaggcagaggcccaggagaatggagaccacagggaagtcaaaggcctggtcccgtgctactccacccagccccaga

SEQ ID NO: 207395 - DNA, 50 bp, Homo sapiens
tgagcgcgcgcgcctccatcccgccgggtttgtcactcaagccctatcag

SEQ ID NO: 207396 - DNA, 102 bp, Homo sapiens
agaaagacgtgcggatcctgctggtgggagaacgttctcagctgctgcgggagttgaaaaagatggacgacaaagctcttttggtggaagtacagcttttag

SEQ ID NO: 207397 - DNA, 74 bp, Homo sapiens
ccattgagaagagagaagaacattctcgaatacctagaatgggagataattgacgaccttgccaacctagtgga

SEQ ID NO: 207398 - DNA, 83 bp, Homo sapiens
tgaaagaatgatgagaaacttaaaagatctggctcaccgaatagccagtggcgaagagatgatgtgatgccagccacttactg

SEQ ID NO: 207399 - DNA, 50 bp, Homo sapiens
gaagaagcactccagagacgactaaatgataatccaggcacatggcggca

SEQ ID NO: 207400 - DNA, 100 bp, Homo sapiens
aagcgactttggtgagactctgagccacctgagctgaagattcccttgagaacaagtactgtcctgtggtttcatggcctttcttccatttgtggttctt

SEQ ID NO: 207401 - DNA, 74 bp, Homo sapiens
ctattgcttacggcttagacaaaaagttctcccaggagaaagccatgttcagttcgagcgccaagatcgtgaag

SEQ ID NO: 207402 - DNA, 83 bp, Homo sapiens
atgaaacccgtgtcactgaaggagagaagaatggtaaaccagacttgaatacaacattgccaattagacaaacagcatcaatt

SEQ ID NO: 207403 - DNA, 100 bp, Homo sapiens
gaaacatttatttccagtccaaaattccagatgacctgaggaagagactaaatatagaaatgcatgccgtagtcaggataactccagtggaagttacccc

SEQ ID NO: 207404 - DNA, 100 bp, Homo sapiens
gacagcacacccaccacaaaaccccagtggagtttggaacttgcacggaagggaacagtttgagttcctgagatctagttggtgagagacatgatgttct

SEQ ID NO: 207405 - DNA, 87 bp, Homo sapiens
gcgtctaccagagcatggtgctcttcttcttcgagaattacaccggggtccagggctcattgtcatccccaagccaggccagttctc

SEQ ID NO: 207406 - DNA, 75 bp, Homo sapiens
ccgagtcctagcgcctggcctgcgcgccgctgcccgcgccacaggcagcacaacaagattcgcagcgtggagggg

SEQ ID NO: 207407 - DNA, 111 bp, Homo sapiens
ctccggagaagacaagggcatcgccgcctcagccgccgccgccgccgttttcgcctgcagctgctcaccggacatgcggaagcacgtggccatgaccctgctggacacaga

SEQ ID NO: 207408 - DNA, 100 bp, Homo sapiens
gaagagagttggctactggctgagcgagaagaaaatcaagaagctgaatttccaggccttcgccgagctgtgcaggctccccacaggtgcaggaagccgc

SEQ ID NO: 207409 - DNA, 100 bp, Homo sapiens
aggagttcgagcagatcgacaagtccgggagctgggcggccatttaccaggctggtgctcaggaagcccctatcaagaagaagcgcccccctgtgaagga

SEQ ID NO: 207410 - DNA, 75 bp, Homo sapiens
gttcctgtggtctctgcacctcctttctttttcggctttgtgagaaaccttaccatcaaacacgatggccagcaa

SEQ ID NO: 207411 - DNA, 96 bp, Homo sapiens
tacagtgaccggagctcgggcgggtcctacagagacagttatgacagttacgtaaccgggccgccctgcacctctattccaacaccctcaactttc

SEQ ID NO: 207412 - DNA, 100 bp, Homo sapiens
ctggtatcggcccacagaccaagtcctccacagagggcgagccagggtggagaagagccagcccaggctattcagcttgaccctgaagaaactcgtcatg

SEQ ID NO: 207413 - DNA, 90 bp, Homo sapiens
aaaagctctgaaggacttgctgaaatgggtcttagagaaatctcctgcaaagaagctgagccatgcaattagtaaatctttggggtgtgt

SEQ ID NO: 207414 - DNA, 98 bp, Homo sapiens
acatattgatgaggatgaaaagtcaggctattgagggcacctacattgacaagaaatgccccttcactggtaatgtgtccattcgagggcggatcctc

SEQ ID NO: 207415 - DNA, 100 bp, Homo sapiens
gactagcggcggcgggagcggcgccgagaggccgtgcgggacgcgggcgccaggaccggccgaacgcagagggctggaccccaatggagaacaggtggtg

SEQ ID NO: 207416 - DNA, 82 bp, Homo sapiens
gtttaagaaggataattaattacacaaacccttcacagactgctctgattttgcaagaacgaggctcaaggatgtgagggac

SEQ ID NO: 207417 - DNA, 100 bp, Homo sapiens
gctgcaggctctggggagtcgccatggtcttattagtaggtaagaaacagctgctcctccacctccaccccagccccatggagcttgctttttccaggcc

SEQ ID NO: 207418 - DNA, 74 bp, Homo sapiens
taggggcagcgagcaagacagcaagcaggtcgtcttcccgtgacgcccagatctgtcctgcaggatggagccag

SEQ ID NO: 207419 - DNA, 74 bp, Homo sapiens
tgcagtacctgcagaaggtctctggagacatcttcagcagggtcgagctgtgcagttttagcgggtacaagatc

SEQ ID NO: 207420 - DNA, 75 bp, Homo sapiens
agccgggtgtgagctgcctgaaaatgcactcggatgccgccgctgtcattttcggctttgtgagaaaccttacca

SEQ ID NO: 207421 - DNA, 118 bp, Homo sapiens
gcgactactacgaggcgcaccagatgtaccggaccctgttcttcagacaatgcagatcttcgtgaagactctgactggtaagaccatcaccctcgaggttgagcccagtgacaccatc

SEQ ID NO: 207422 - DNA, 74 bp, Homo sapiens
gcagctggctggctttgataagtacaagatacttgccagaactaatacagctgatgaaatacctgaccttttct

SEQ ID NO: 207423 - DNA, 75 bp, Homo sapiens
gtcctgcgcctcagtgtcagttacctccgggtgaagagcttcttccaagtgcctgagattgtgagggagacccag

SEQ ID NO: 207424 - DNA, 75 bp, Homo sapiens
ctcggcccgcgggggagccccgggagccgcacgttgacgaaggatcagagattggtgtattcgggcagactgctt

SEQ ID NO: 207425 - DNA, 100 bp, Homo sapiens
atacctccaaaagaggaaactacaccttacatagctcaagttacccggctgtatgtgaattcttacagcacaataacttgttatctatactccgagccca

SEQ ID NO: 207426 - DNA, 71 bp, Homo sapiens
tctggggctgtccctgctgcagcagcccaggagggagtttgaggacatcaccaatgcgagctttcatctgg

SEQ ID NO: 207427 - DNA, 83 bp, Homo sapiens
ccagcgacccaccatggagacccgctacaacctgaagagtccggtgccctctggtggtcagaagatgctgtgctgtctcgtta

SEQ ID NO: 207428 - DNA, 82 bp, Homo sapiens
agttccgtgaactcagtactgatgcccagtggggcattcgtcttggtaaacttggtaacatccagtcatggataaaaatgag

SEQ ID NO: 207429 - DNA, 82 bp, Homo sapiens
gcctcgggccctgcccctacatttggagcctggacacgcagtacagcaagatcaggcctttgtgacactaaccacaaacgat

SEQ ID NO: 207430 - DNA, 90 bp, Homo sapiens
tttcttttcctcagaactactatattcagtggctaaatggctccctgattcatggctgctcccggcagatcggcttctcctttgtacgac

SEQ ID NO: 207431 - DNA, 50 bp, Homo sapiens
ttcaggatcatgcttggagcaactccgtgggaaggaggcttgtttaaact

SEQ ID NO: 207432 - DNA, 75 bp, Homo sapiens
ggggacacactccgcagcagacgaggaagtgaagaacatcatgtcttcaaaggccctggccaacgtcaacattgg

SEQ ID NO: 207433 - DNA, 100 bp, Homo sapiens
cccattatctatgacattcgggccagacctcgaaaaatctcctcccctacaggctccaaagcaggatcaaggtgaaaaggagaaccccatgcgggaactt

SEQ ID NO: 207434 - DNA, 75 bp, Homo sapiens
acagatgcccctgataaaggatacgttgttgatttatgaagactctatggatctaatcgcaaagctaccttgtgt

SEQ ID NO: 207435 - DNA, 153 bp, Homo sapiens
ttgcccagaatgcaagagaagcacctgcacctcagagtaaagctgctggacaacaccatggaaatatttgacattgagactcgtcctcccactgacttgagctttaactttgatgccaacaaacaacaaagacagcttattgcagaactggaa

SEQ ID NO: 207436 - DNA, 90 bp, Homo sapiens
cggctctccgccgtccccagccctgcctctccctgggctctggtgttggagcgggccggagagaagtagagtgggctgcgaggagaagga

SEQ ID NO: 207437 - DNA, 100 bp, Homo sapiens
ggcttgtgaacggcgtttctgcgtctgccgtggacagcgaagctgctgcggttcctgagccggaggagtacaagcgcaagctagccagagtttccctggt

SEQ ID NO: 207438 - DNA, 51 bp, Homo sapiens
gggtgctcttcttcctgaagcagcagattgaaggacaaggacatggagctg

SEQ ID NO: 207439 - DNA, 75 bp, Homo sapiens
aaagagcagcagaaacgctactttccagctcttggtgctggacaggcatctttgtttgggaacaaccaacctaag

SEQ ID NO: 207440 - DNA, 90 bp, Homo sapiens
atgctcttcaattcggtgctccgccagccccagcttggcgtcctgagaaatggatgaagcagcagcacagcctctgaatctctcatcccg

SEQ ID NO: 207441 - DNA, 87 bp, Homo sapiens
cgaagatgataggggggaaacctcaagatataatcttcacttccgggggcactgagggagatgcatttcctgagctgaagaaggacc

SEQ ID NO: 207442 - DNA, 133 bp, Homo sapiens
gagaagacgatctgcacttcgcattttggcattgacatttaattttagggtcctttatatagaagggagagtagggaggagatatcaccaaacatgatggaacaggcggacagtccatttatggagacaaatt

SEQ ID NO: 207443 - DNA, 97 bp, Homo sapiens
gcggtgcgcgctgtgggctgcctccccgtgctgtgtagcgggacggcagtaattacaagtagtggctacagccccagatcagcacatcagtattccc

SEQ ID NO: 207444 - DNA, 74 bp, Homo sapiens
caggaacctgggcgagcagcggcgggggcccgagggtaccatggggcgcaagttggaccctacgaaggagaagc

SEQ ID NO: 207445 - DNA, 100 bp, Homo sapiens
tactgaggcagacgttgtggcggagaagggcagtggctgtagctgccctttccgtttccagggttccgaccaggtgaaaagccatacaagtgtacctggg

SEQ ID NO: 207446 - DNA, 96 bp, Homo sapiens
attcgacagcgggtctactcactcttactggaggactgtcaagatatttggtttccaggcaggactgacgtctttggattgcagtggatcttactg

SEQ ID NO: 207447 - DNA, 82 bp, Homo sapiens
ccgcccggagccccggcccccacaggaaaacaacagcatggtgttacggttggataactcaggacatcacaaaaatgttaac

SEQ ID NO: 207448 - DNA, 108 bp, Homo sapiens
cagctgaagagcgacaagccgctggcagccgcggatctcaccgccgctcagggtgcgcgcggagccatggttatcatgtcggagttcagcgcggaccccgcgggccag

SEQ ID NO: 207449 - DNA, 90 bp, Homo sapiens
aagccatgatttaaatatcggcgttaagaagaatcctgcaaaaatgtctctctatccatctctcgaagacttgaaggtagacaaagtaat

SEQ ID NO: 207450 - DNA, 75 bp, Homo sapiens
tggaggcattttggggcagaatacagagatatggaatcagcaattctggacatgtacacactgatgagtaacaag

SEQ ID NO: 207451 - DNA, 101 bp, Homo sapiens
agtttgctctgctcttccaacaccagtggaagatgatcacatcccagcctctacggcagacacatgcaggccaacccagaaccaccgaagaagaataatga

SEQ ID NO: 207452 - DNA, 100 bp, Homo sapiens
gaaggccgtgtgcgccggctccgcggaagatgccggaccaagccctacagcagatgctggacagctcatgtgctcctcggtgcagaaggccttgtttgag

SEQ ID NO: 207453 - DNA, 49 bp, Homo sapiens
ccaagtagctgggactacaaagaatactggaatctcacaacaatacctt

SEQ ID NO: 207454 - DNA, 80 bp, Homo sapiens
cgtggagctccgccgccccgaaactttcaccgcgagcgggcgacctgggagacccagccagtaccgcccagacggacttc

SEQ ID NO: 207455 - DNA, 75 bp, Homo sapiens
tcctgcagaaagacttgaaggcgtatacaggaacaatattgatgatgtagtaagactgggcatttagctatggag

SEQ ID NO: 207456 - DNA, 83 bp, Homo sapiens
gttagtagacagagaaccacctgaaggctgtgaataagttggctgagatcatgaatcgaaaagaacctgtcaagcgtggtaat

SEQ ID NO: 207457 - DNA, 100 bp, Homo sapiens
agagctgcctgaacctggagctccagttcactccgttccagctgtgccatgcggagtcccgggtggattctaagaccctgacccgtaacacgaggatcat

SEQ ID NO: 207458 - DNA, 74 bp, Homo sapiens
caggatgactactgtgtcaagatgccggaccagatctctgtctcggagttcatcgccgagaccaccgaggacta

SEQ ID NO: 207459 - DNA, 124 bp, Homo sapiens
ggcgagggggcagaggaggcggccaaggacctggccgacatcgcggccttcttccgatccgacaatgcagatcttcgtgaagactctgactggtaagaccatcaccctcgaggttgagcccagt

SEQ ID NO: 207460 - DNA, 83 bp, Homo sapiens
catctgtttttagcctgtttatgtctagaacatctatcaatgggatcactactcttggaatcaaagataaatccaaatactgc

SEQ ID NO: 207461 - DNA, 100 bp, Homo sapiens
cgttgtttgtcgggagatgcggccgcttcgtcctctgcagtcaagacgctgggcgcgtcgaggactgggccatggagagcaagctcctcatcgggggcag

SEQ ID NO: 207462 - DNA, 131 bp, Homo sapiens
ttgaagtagctcctgaagcttctacgtctagtgccagccaagtgattgctcctactcaagtgacaggtgataactaccccgtacagttcattccatcaacaatggcagctgctgctgcttctggactcagc

SEQ ID NO: 207463 - DNA, 100 bp, Homo sapiens
gatggcggctgggccgagtgggtgtctggtgccggcgtttgggctacggttgttgttggcgactgtgcttcaagcgacttaattcagtgcacaaatgaga

SEQ ID NO: 207464 - DNA, 75 bp, Homo sapiens
agcagcatggcatttcagtcactggtttgcagagtccagcatatgctactttgattgaaaatgattcaaatccag

SEQ ID NO: 207465 - DNA, 98 bp, Homo sapiens
ttggctgctctcagcccccaagctggttcccgctgtagcaaacgtccgcggcctctcaggcgtttcagttgggccccacggaagcctcttactactgg

SEQ ID NO: 207466 - DNA, 75 bp, Homo sapiens
gagaaaggcctggtccagttccgagacgtggggtggaatggctgcaaataaaggataatgatttctcctatcgac

SEQ ID NO: 207467 - DNA, 50 bp, Homo sapiens
ctcatggaggctgagcatttattcaggaccctaaagtaaattggttgaag

SEQ ID NO: 207468 - DNA, 90 bp, Homo sapiens
gtggtttcccagactttccttgttttggatgaccttgacagtttggaggaatcctggtgagtaacaacatgctgtaccccaaggaagaca

SEQ ID NO: 207469 - DNA, 82 bp, Homo sapiens
gggaagagattcagccagcacactcctcgcgagcaaggtgatctttagacagtgactgagtatggatcatttgaacgaggca

SEQ ID NO: 207470 - DNA, 82 bp, Homo sapiens
gctccagaacaactcttcttcatagttacgttatactgcccctgcattgttggtattgaaaacggagtcttgctctgtcacc

SEQ ID NO: 207471 - DNA, 96 bp, Homo sapiens
cttcccctccgtggtgacagcctctgggtcctcggtcggtacagtctctgcacctcgcgccccagcagaccccagagggtataagtgaagaacaga

SEQ ID NO: 207472 - DNA, 76 bp, Homo sapiens
cgctccagcctcgctctccgccgcccgcaccgccgcccgcgccctcaccaggagcaggccgggctctcgccatggg

SEQ ID NO: 207473 - DNA, 96 bp, Homo sapiens
gcagctgctgcactaaagggggctggacagacagtgacgattatagcacaatatcaacctgaaggtgagtggcagtgtgatgagtgtttatagtgg

SEQ ID NO: 207474 - DNA, 83 bp, Homo sapiens
ccggaggatcagaatcaagtcctatagcagacaggtgatttggcttctgcacagttaggaggagcaccaaaccgatgggaggt

SEQ ID NO: 207475 - DNA, 74 bp, Homo sapiens
cgcgccctgcgccggcggcaatgaagatctggagctcggagcacgtgtttggagtcttgctctgtcacccaggc

SEQ ID NO: 207476 - DNA, 82 bp, Homo sapiens
tacttcatattttggaaagcagtttttaagacaagcacgcttaaaaaggcctcttaagagccttgatggtgctctatatgat

SEQ ID NO: 207477 - DNA, 99 bp, Homo sapiens
cagcgagcggccctgatgcaggccatcaagtgtgtggtggtgggagacggcccgtctggtaaacttgtccagattgaatatgctttggctgctgtagct

SEQ ID NO: 207478 - DNA, 82 bp, Homo sapiens
cggagctgtgcgagagcctcctcacttggcagcctcccgcgacgatgcccctcaacgttagcttcaccaacaggaactatga

SEQ ID NO: 207479 - DNA, 100 bp, Homo sapiens
atcacacgcataatggatgaaaggaaccgacagctgttccaaagacctaatgcgcttgctgtccagcagttgacagctgctcagcagcagcagtatgcac

SEQ ID NO: 207480 - DNA, 100 bp, Homo sapiens
aatactacctttatttccaccataggattcactccttctccagttgcacagccacacccttcagctggccttaatgttgactttgaatctgtgtttggaa

SEQ ID NO: 207481 - DNA, 98 bp, Homo sapiens
gttggggccaaatttgggcaagttggactttgtgatttgcatttgacattgtgcagcaaagaaatggttatggagaagcccagtccgctgcttgtagg

SEQ ID NO: 207482 - DNA, 87 bp, Homo sapiens
actggccagtgattcacgaaaacgcaaattgccatgtgatactccaggacaagggtgttatgaagcggagattgaggagatagatga

SEQ ID NO: 207483 - DNA, 51 bp, Homo sapiens
ctccagatgctagggttatgggttgtaaacccatattatttgcgtgtacga

SEQ ID NO: 207484 - DNA, 74 bp, Homo sapiens
agggcagcctcgccaaggcaaccacagccccagccaccacccgtaacacagatattgatgatgttaagaagttc

SEQ ID NO: 207485 - DNA, 75 bp, Homo sapiens
ccacgaagtgacgttggtctcccgaaagcccgggcccggccggatcacgtggcccaagctgacgcctcaggagaa

SEQ ID NO: 207486 - DNA, 92 bp, Homo sapiens
aatatataccatgatctacaggaacttggtagtagtcaatcagcaggtcttggtcctttagtgagtaaagtgaaagaataccaagtagagac

SEQ ID NO: 207487 - DNA, 100 bp, Homo sapiens
agcagtggtggctatgaacccagaggtcgtggaggtggccgtggaggcagaggtggcatgggatatatttttgccatcatggatcagtttggagatatat

SEQ ID NO: 207488 - DNA, 121 bp, Homo sapiens
tgacagcactctgtagggaggctgccatgcatgccctccttcatagtgagaaggaaatactcttaattctaaggaaaacctggaagcacaatgggagatgacagtgagtggttgaaactgc

SEQ ID NO: 207489 - DNA, 100 bp, Homo sapiens
ggtcatttccttaggtacaggtccccagcttactccagggatgatgtcagaaaatgagagcaagatgagacaggccttaggatttgccaaggaagccaga

SEQ ID NO: 207490 - DNA, 119 bp, Homo sapiens
aagactttgagaaatcccttagtgcccaggaggaaaagattacagtactgaacgacacctgggtctccttcccttcctggtctgaggactccacgttcgtcagctccaagaagacaccg

SEQ ID NO: 207491 - DNA, 100 bp, Homo sapiens
tggccctctgcttgcttgtccggcgcaccagatcatgactgagagattgttaataaaagcattgagtggtggtaaaaatacgaagatcattactttgaat

SEQ ID NO: 207492 - DNA, 75 bp, Homo sapiens
tgtgcgaatccaggagccacagaaggattttttatcaagcagaaatgcatcgaacaacgagaatcaagatcactg

SEQ ID NO: 207493 - DNA, 98 bp, Homo sapiens
ccctcggacccggccacgcagtccccaggggcccggcccggggcgcgttgaaggaattaaatcaaatgctcgcagaaacaccaccagtttggaaaggc

SEQ ID NO: 207494 - DNA, 83 bp, Homo sapiens
actgttacaatcaaggtctatgaagattcctgggcactcctccccgccagtgctggcgtaaagacactgctcccagtaccaag

SEQ ID NO: 207495 - DNA, 98 bp, Homo sapiens
gttcacccgctgccgggcaccgaggaccagctcaatgacaggctaaaagagatgctaagagaatgcctgcaaaagaagtcaccattaatgtaacagat

SEQ ID NO: 207496 - DNA, 75 bp, Homo sapiens
taagactgaattccagtgatccaagtctcatagaattggcagagggggtcgatttgggaggaaaggtgtggctat

SEQ ID NO: 207497 - DNA, 100 bp, Homo sapiens
ccggctgctctggactcctgcctgagaattacattaccaaggctgatgaatgcagcacctggatatttcatgggtggctggtcattgaccgcaaggttta

SEQ ID NO: 207498 - DNA, 100 bp, Homo sapiens
cagaagcgggcggcgcgggggagatgatgttcctcctgctgatcaagagaagctttttatccagaagttacgtcagtgttgcgtcctctttgactttgtt

SEQ ID NO: 207499 - DNA, 98 bp, Homo sapiens
ggctggaggtgcagggccaggaggaacatgagcaaaacctgtgataagtcctcttgaacttcggatggaagaattaaggcatcattttaggatagagt

SEQ ID NO: 207500 - DNA, 98 bp, Homo sapiens
tggataccacagtatcataaaattcctctaaatgcattttacagctcccagcacagtaggaaagagaaatttgagtcctagtcaagaggaagctggcc

SEQ ID NO: 207501 - DNA, 100 bp, Homo sapiens
ctttttcgacgcctccgccgccgcctgaggaggcgagctagccgggagttacaccgccaccgccaggcagagaagaggcgatggcggcgatggcatctct

SEQ ID NO: 207502 - DNA, 82 bp, Homo sapiens
taagcttcaagctgaagactataagttcgactttcctgtctcctacctgcctgctggcggtaaggctggaaaggactccgga

SEQ ID NO: 207503 - DNA, 98 bp, Homo sapiens
cccaagcgccagattcgtagcaggttccagctgaatcttgacaagaccatagagagttgcaaagcacaattagattttgaagatgtaactgagtttct

SEQ ID NO: 207504 - DNA, 96 bp, Homo sapiens
aactgcagtgctgcatcgactggacccatgtcactgaccccctcataggccagaacacaaagcgtgaatccggaagaaaagttcaatctggaaaca

SEQ ID NO: 207505 - DNA, 75 bp, Homo sapiens
cccgatgtggccaaagtctccttcactggaagtgtgcccactggcatgaagattcgggaactggagcctctcctc

SEQ ID NO: 207506 - DNA, 75 bp, Homo sapiens
aacccctagtagctcttggtcttgtgcacttttcaggattagaagaggctgtgtatagaaacatacaagcttgca

SEQ ID NO: 207507 - DNA, 100 bp, Homo sapiens
ctctttgaaaaatttggagaacttctaaatcatgtttcagtgtagctcagaagccatttggagccacgtatgtatggagcagcatcataaacactcttca

SEQ ID NO: 207508 - DNA, 75 bp, Homo sapiens
gtaaaatcaatcagcttcctcttttccttggagagcctgctatgtctattatcctcccagtccacaacgctgaac

SEQ ID NO: 207509 - DNA, 83 bp, Homo sapiens
ttatgaccaagtacctcaccccaaaggtgtccctggccagtgtccttccacctgtccacaagcatggggaacatcttcgccaa

SEQ ID NO: 207510 - DNA, 74 bp, Homo sapiens
ccatgattctgcaaagccctttggcagagccatggaactacagaaggcgcgccaccctaagcacttatccacac

SEQ ID NO: 207511 - DNA, 100 bp, Homo sapiens
gactcgtcggcgaatgcaattaggaactgttctgccggaatttgaaaagtgcctaaacaaggtccaactaatccaatgctgtttcatcttgttcgagacg

SEQ ID NO: 207512 - DNA, 100 bp, Homo sapiens
cagctgactgcacttcttttttgagaaaggaaggaatatatcctgactgattgcctcattgaatttgaagaatgtgacactgctagtgcagttgaaggta

SEQ ID NO: 207513 - DNA, 75 bp, Homo sapiens
cctgtgatttgctttctcggagcaaaagtgggtctcgggaacagcttgcgattgcagagtttgcaagatcacttc

SEQ ID NO: 207514 - DNA, 83 bp, Homo sapiens
gttgaaagccagatcaccaccttctgttttcggctttgtgagaaaccttaccatcaaacacgatggccagcaacgttaccaac

SEQ ID NO: 207515 - DNA, 83 bp, Homo sapiens
gcgctccttcccgctccctcacacaccggcctcagcccgcaccggcttctcaaccagatgagttgaccattgaggaacatgag

SEQ ID NO: 207516 - DNA, 100 bp, Homo sapiens
ccaacagctctggcaagaaacttgagcagtaatctgaatatttctcaagttcaagggacttataaatatggaccaagcggagcagccagctggcagtagc

SEQ ID NO: 207517 - DNA, 95 bp, Homo sapiens
gttcccgcagagtggataaagaactgggagaaatcagggagaggcgaattggtgatgatgatgcttatctgtgtattcatgaagatcagactgtg

SEQ ID NO: 207518 - DNA, 100 bp, Homo sapiens
agaaaccttggacagcagattttggtttaatatctgattgggacaacattcagacccatttccagtcatgatctaacaaagtgccagtggtgcagcaccc

SEQ ID NO: 207519 - DNA, 98 bp, Homo sapiens
ccccaccaagtgctggccagtgagcccatcccgttctctgatttgcagcagtgatcatgtccgacgaggccgtggaggagaggcgggccttgatcaag

SEQ ID NO: 207520 - DNA, 75 bp, Homo sapiens
tgaaaggatgcagttaccatgaaggctgcagatgaggtcattcccaaaagcaagttcgtcttggtgaagttcgac

SEQ ID NO: 207521 - DNA, 100 bp, Homo sapiens
tgcctccaaaccaatgcaccatcaccaaccaagtctcctctcggaagaacctaaaggcagacccagaagagctttttacaaaactagagaaaattgggaa

SEQ ID NO: 207522 - DNA, 50 bp, Homo sapiens
ttcaccatcctccaaacaagtgaaatctgttacctaaagcaataaaaaat

SEQ ID NO: 207523 - DNA, 100 bp, Homo sapiens
cagcggcagcggaagatggtgttgctgagagtgttaattctgctcctctcctgggcggcggggatgggagaatgtcgaggtcttggcgagcaggagcaac

SEQ ID NO: 207524 - DNA, 100 bp, Homo sapiens
gaggcgttggagcgcggaaatctggaaccgggatggcgacgtctacactgagtcggaggcgaagatctttaatctcatgaagtacgacagctacagccgc

SEQ ID NO: 207525 - DNA, 100 bp, Homo sapiens
gcgaacctgagccggaacgggccagcgctgcaagaggcctacgtgcgggtggtcaccgagaagtccccgaccgactgcggacaaggcaaaatctcagcaa

SEQ ID NO: 207526 - DNA, 100 bp, Homo sapiens
aattgagactgacaaagctgtggttaccttagatgcaagtgatgatggaatcttggccaaaatcgtgtggcaccctgtgctgcgcacactaaagaaccgc

SEQ ID NO: 207527 - DNA, 100 bp, Homo sapiens
acctgctggtgttcgcccacgaccatggtgcaaagttccccatcaagtggacggcccccgaggcagccctgtacgggaggttcacaatcaagtctgacgt

SEQ ID NO: 207528 - DNA, 100 bp, Homo sapiens
ctgtatgagaaggacaacacctacttagagttttccgtctgatgaaggttggccatttgcaaagtatcttggagcttgtggaagaatggtggctgtaaat

SEQ ID NO: 207529 - DNA, 82 bp, Homo sapiens
tgcagccacgcgggcgagcggctgtgtggatgtcggcgaagccgcgggcgagtgcctacaccaactaatgttacaattgaat

SEQ ID NO: 207530 - DNA, 90 bp, Homo sapiens
aaggagctgcttcccaataaggaaacagtggatgtgaaattggaccccaaggatttgcgaatagatacatttcgagccaaaggagcagga

SEQ ID NO: 207531 - DNA, 100 bp, Homo sapiens
tggggctgctgtttctcttcgccgacggttatctaccttgcctgctcctatgccacagtgtacctgatctacctgaaatttaaggcaacctacgatggaa

SEQ ID NO: 207532 - DNA, 83 bp, Homo sapiens
gtgcagcaggactatttccccaaggcccttgcacccctgctgctggcgttcgtgaccaagcagaggtgtccaggacctgcctg

SEQ ID NO: 207533 - DNA, 84 bp, Homo sapiens
cgcgccccgccgctgagccgtcgcggagccgcgcagccctcggagcacggagttcatgatcaagtgttgcccacaccaaatgct

SEQ ID NO: 207534 - DNA, 100 bp, Homo sapiens
gctgagctgggtggccagccaggaggacaccaactgcatcctgcttcgctatgagctgcttcagaaagagcaaaactattcagatgacgtcttggccaac

SEQ ID NO: 207535 - DNA, 97 bp, Homo sapiens
cgacatactcggataccagcgctcagcccacctgtgattatgtgtggccgtggctgacactaaagactttgtagccatcaacccgagtgcagtttcg

SEQ ID NO: 207536 - DNA, 50 bp, Homo sapiens
cacttgttggcagcagtgtgctggcgagaattcagaaggagctggcggac

SEQ ID NO: 207537 - DNA, 83 bp, Homo sapiens
aaggattccaagtaactcttatttgttagtacagaagaaactccaagcctcccagcccagcgagagtctcattcagctaatga

SEQ ID NO: 207538 - DNA, 86 bp, Homo sapiens
ccaatgtcaccccaggatgatgaagcagaagagggctgaccggttccctgatgtgttacctgcttctgctactgatccaaactgca

SEQ ID NO: 207539 - DNA, 82 bp, Homo sapiens
agcgagccacgggagcgagccagggctgggttacgacccctacaaccctgagctgcccaagccccccgcgcagagggagaat

SEQ ID NO: 207540 - DNA, 100 bp, Homo sapiens
tgctcgtcgggagtgatcacctaccctacaggtatgatctcgtgaaaccttgagagaaactgaatgacgaatgaaactattgttcctgtttcacacagaa

SEQ ID NO: 207541 - DNA, 100 bp, Homo sapiens
cccatcgatgtgcggcgtccgctgtataaggacgtagacaagtttggcaacgagatcacccagctggcccggcccctgcctgtggagtatctcatcatag

SEQ ID NO: 207542 - DNA, 50 bp, Homo sapiens
gaacagagggaggagatcagagatctgccagttcctgaaaggagccaaga

SEQ ID NO: 207543 - DNA, 98 bp, Homo sapiens
cgcaggatgggatccggctcctccagctaccggcccaaggccatctacctggacatcgatggacgcattcagaaggtgaaatatcacctacggttcag

SEQ ID NO: 207544 - DNA, 90 bp, Homo sapiens
gtattaaacatctgcattcagctggtataattcatagaattatataaatggtggtgaactttttactcatctttctcaaagagagcgttt

SEQ ID NO: 207545 - DNA, 80 bp, Homo sapiens
gcgctcgtgccaccaagggcaggatcctcaccgtggaggaccattattatgaagacctcctgccccccgaggtctgcagt

SEQ ID NO: 207546 - DNA, 75 bp, Homo sapiens
aagtccagatatatggagctctacacgtatcctcctgcctagcgcaggtggtgcggttgtgtcagaacccaaagc

SEQ ID NO: 207547 - DNA, 100 bp, Homo sapiens
taccagtccccagtgagggtgtacaaatacccctttgaattaattatggctacaaatttacatgtattggagaccagaccagaagcccttctgaattaag

SEQ ID NO: 207548 - DNA, 100 bp, Homo sapiens
tgctgccatcatgatcagtgtcattgttgtcatgactatcctcctggtggttctgtataaatacaggtgctataaggaaggatctgagtctctccctgcg

SEQ ID NO: 207549 - DNA, 83 bp, Homo sapiens
cctggttctggaatcctcagttcaagtccaaaagaaactcttccttcaaaacctgtgaagaaagagaaggaacagaggacacg

SEQ ID NO: 207550 - DNA, 83 bp, Homo sapiens
acagagggccgagaaggacaggatcagatgatgctgaataatcccctatttgctggaaatcctcagcttcaagaacaaatgag

SEQ ID NO: 207551 - DNA, 100 bp, Homo sapiens
gtccgggaactgcttatcctccagggaggaccaccccagatgtgaatgaatgtgagactcctggaatctgtggtccagggacatgttacaacaccgttgg

SEQ ID NO: 207552 - DNA, 75 bp, Homo sapiens
tctgctggacgcccaggcggacgaggccgtgttagctggagatatccctgttcagtactgcgcccagcccaccaa

SEQ ID NO: 207553 - DNA, 97 bp, Homo sapiens
ttccgcatgcagcagaagatattcaaggagatgaccgatggatgtctcagaacccctgaacagtgcccaagtgttgtctctttgttgtcagagagtt

SEQ ID NO: 207554 - DNA, 76 bp, Homo sapiens
tctgctttatatttctctcagaccattcccatcagtgagcattacagggtgagcccatcactttctgtgaggagag

SEQ ID NO: 207555 - DNA, 74 bp, Homo sapiens
cgaccccgaactccaggacagcatccaggcctcattggacagcattcgaggtgagaagccctaccactgcaact

SEQ ID NO: 207556 - DNA, 75 bp, Homo sapiens
gcacgggctgtctgattctccttcgctgtggcgggaagatggccggatttgaagtgtactaatggtcacttgatg

SEQ ID NO: 207557 - DNA, 75 bp, Homo sapiens
cagaaatgttacacacggagtatcaaactctgctgccaagggtgtgaaggagctgtgtctgctgctgcttaacca

SEQ ID NO: 207558 - DNA, 100 bp, Homo sapiens
ttctcaccaataatagtctcgtggaactgcaaatggttatgagccttagagtttctgaactccaagtactgttgggctacgccgggagaaacaagcacgg

SEQ ID NO: 207559 - DNA, 118 bp, Homo sapiens
gtggtggtgtcttcctgtctcaacgatacctattttctagtgctgagatcctgagacaatgacggatgtttccagtcctaaagattagtgtcacagggttggaccccaatgccatgta

SEQ ID NO: 207560 - DNA, 74 bp, Homo sapiens
cctcggccatccaagggtctcccagggggccgtctgccctgcccagagctgtgtcctgatgccgtgttcaggct

SEQ ID NO: 207561 - DNA, 99 bp, Homo sapiens
aattagtaaaacagaattctctttgctgaactccagtgcacccagttagacttggagcggaaactcaagttgaatgaaaatgccatctccaggctccag

SEQ ID NO: 207562 - DNA, 90 bp, Homo sapiens
ggattgctaacgaaaagtacctaaggacccacaaagaagtagagtggctcataagtggtttcttcaggtggtttttccccatcatcggcc

SEQ ID NO: 207563 - DNA, 131 bp, Homo sapiens
acccgggccccgggctagcagagcggaggcgctgccacgaaactcgtacctgcggctaagagcaggtgtcatggagaaactccagctgggcccagagattctgcagcgggaaaatccaaggcttatttatg

SEQ ID NO: 207564 - DNA, 100 bp, Homo sapiens
ggagtgattctggaaaagtaagcacagaaaatggagacgcacccagagaaagaggctcatcactgtcaggcattcctgcatcgcatccggcagaacgtgg

SEQ ID NO: 207565 - DNA, 87 bp, Homo sapiens
gcttgtacaaaggagagtttaaacagccaaaacagttcattcatattcagcacctgtcatttactccatcctttatagtgatgctac

SEQ ID NO: 207566 - DNA, 97 bp, Homo sapiens
gtggatcgacccccgcgaccgacaagcagatgcccagtgtcgggaaggcagcccaggatcacagcagcacccaccgagtcagaaggcaccgaaccca

SEQ ID NO: 207567 - DNA, 75 bp, Homo sapiens
ttagcaaggagtgtttcatttgaacaggtaatgagagatccaaacaccaagcgctccaggggctttgggtttgtc

SEQ ID NO: 207568 - DNA, 49 bp, Homo sapiens
ctccaggctcctcactctgtccagagacaaggtctcactatgttgccca

SEQ ID NO: 207569 - DNA, 82 bp, Homo sapiens
gttcgcgggtgtgtgctgcgttcacaggtgtttctgcggcagatccagagacaatggccccgatgggatggagcccgaaggc

SEQ ID NO: 207570 - DNA, 99 bp, Homo sapiens
gagtgagatacccagctgtgcggagctaggacgcggaacatcccagaggccagcatcaacatacttcacagagaatgcagttgtcttgacttcaggtct

SEQ ID NO: 207571 - DNA, 140 bp, Homo sapiens
cgaagacaacgacagcgacggctacgccgaagcactcgttccgggggtgaagcctcctgcgccggccttgcctcgggtgtaatggataggtaacagagaagacctcgtcccttcctagtcagggcatcagcatgactgag

SEQ ID NO: 207572 - DNA, 115 bp, Homo sapiens
tgccgctatggatgatcgagaggatctggtgtaccaggcgaagctggccgagcaggctgagcgatacgacgtgcctccggagccagcgtggtggccatagacaacaagatcgaac

SEQ ID NO: 207573 - DNA, 100 bp, Homo sapiens
gcgtcccccgggggcccgtactgcacatcgtggtggtcggatttcaccacaagaagggctgccagctctttcgacgtgtagcagcagctttgccgggaat

SEQ ID NO: 207574 - DNA, 90 bp, Homo sapiens
gaccgaaaggatcatgaactagtgacctggaaaggagtctatggtgatgtacatcgagtgaagattatgtttaataagaaagaaaatgcc

SEQ ID NO: 207575 - DNA, 98 bp, Homo sapiens
gggaatgccaacacagaaaccttgccatcagggtgtgatgaatgcagactctgctaccattttggctgtttggatcctcctttgaaaaagtctcctaa

SEQ ID NO: 207576 - DNA, 100 bp, Homo sapiens
ccgagaaccgtcagtttgagccagatgagcacaatcattgtggagaagacagttcaagacctcctgaacctgatgcatgacttgagtgcatattcagatc

SEQ ID NO: 207577 - DNA, 75 bp, Homo sapiens
tctgcagttgaatctgacaaagatcgaacagttgtgctcaggggcaagattcttgccaagagaattaatgtgcgt

SEQ ID NO: 207578 - DNA, 117 bp, Homo sapiens
tgaagttagattaccaccaccacctgatataaaaaaagaaattagtgaaggagatgaagtagagccctactgccaataaagggaaaataagagatgctcatcgacgaattatgcttt

SEQ ID NO: 207579 - DNA, 82 bp, Homo sapiens
tcgggaccatcgccggagcctgaggacacttctctgtcgtcacagttaggttcccccgcctgcacagcgcggtgatcaggac

SEQ ID NO: 207580 - DNA, 101 bp, Homo sapiens
ctcgtgctgcccatgcctgtgcaactgtcggaaatagaggcttcgtgtttggaggcagatatcgacctacgaggacaagcagaaactcaagcggaccgaga

SEQ ID NO: 207581 - DNA, 83 bp, Homo sapiens
tgttcgttgtgccagcgactaaaaagagccgcggcgagtcctttgcacatgttggcaacacacgcatccgcatcggcctccct

SEQ ID NO: 207582 - DNA, 82 bp, Homo sapiens
agccggagtgtaggcggcagaggattcgctcccagagcagctgcggccaggcatcctctggtatcacgattccaaaaccccc

SEQ ID NO: 207583 - DNA, 80 bp, Homo sapiens
ctccaccaaacacttcagatatggaagctgtggaaaatcctgccttgcttcgttgggcctatgcaagaacaataaatgtc

SEQ ID NO: 207584 - DNA, 80 bp, Homo sapiens
ggccgtgaacgaaagcagtgacggaggagcttgtaccaccgatggaaagaatcacctgaggcatttgttaaaatgctaat

SEQ ID NO: 207585 - DNA, 85 bp, Homo sapiens
ctggaacagtgtacagtggggaggagaagctcactgagctccttgtgaaggtgtggaaccactttgacagcggttcgtgcccagg

SEQ ID NO: 207586 - DNA, 98 bp, Homo sapiens
cgagctcacagagctatgaacagaatatcaaacagattggcacctttgcctctgctccgagctctgtccagtggtgggagtattacatcccctcctct

SEQ ID NO: 207587 - DNA, 100 bp, Homo sapiens
gaagagattgacacactaaagatgtccagtaagcctaaactctacagatctgtaattgaagatgtaattgaaggagttcggaatctatttgctgaagaag

SEQ ID NO: 207588 - DNA, 100 bp, Homo sapiens
gtgacttcgtggggcagacggtggaactgggcgagctgcggctgcgggtgcggcgggtcctggccgaaggtgtccctggccagtgtccttccacctgtcc

SEQ ID NO: 207589 - DNA, 75 bp, Homo sapiens
aaaaaaaggagatgcctggcagccccgctctctgcagctgttttggagtcagcggaagatcaccaaggccaggga

SEQ ID NO: 207590 - DNA, 100 bp, Homo sapiens
ggggccttgtgtcctaccatggtatttgctaacgtttagagagtgcttccccttgccgagcactgggggacccccggagaccctacccaactgatttaga

SEQ ID NO: 207591 - DNA, 75 bp, Homo sapiens
gcggggtccgggtccggagcgccacagaacgagctagagcgacagtttcttgaattgctgcagttcaacatcaat

SEQ ID NO: 207592 - DNA, 83 bp, Homo sapiens
ctggcgtgcactccgcacctcggggacattattgcgcgtggaacggctgcttttggaaggtaatctgtaagtcagatgctcca

SEQ ID NO: 207593 - DNA, 90 bp, Homo sapiens
ctcatcatggagctcattggtggcgtggtggccttgaccttccggaaccaggtggagtttgtccatatgctcaatgctaccatgtgcgcc

SEQ ID NO: 207594 - DNA, 83 bp, Homo sapiens
aggccttttggctgagcgttcacgggccccgagcaggattgctgtggaaactgcagcgacagcgaggaagagctccccacccg

SEQ ID NO: 207595 - DNA, 114 bp, Homo sapiens
agagcacagtgatgagcaagcagtaataaagtctcccttaaaatgcaccctccttccacctggccaggaatcaggccaaaatgaatctggagttgctgtccataatgggagaat

SEQ ID NO: 207596 - DNA, 100 bp, Homo sapiens
ggagcaccgggtccgcgcgggcgacacgctgcagggcatcgcgctcaagtacggtgtcacggttgtatcagagtaagatggacggtagctttgattgtga

SEQ ID NO: 207597 - DNA, 100 bp, Homo sapiens
agaaaagtctgtaaagaccaagggacccctcaaacaaaaacagccaagcttttctgccaaaaagatgacctgagaaccttgtgctccaggctgccccata

SEQ ID NO: 207598 - DNA, 96 bp, Homo sapiens
tccctggaagcactcatccagcacttagtacctaatgtggattactatccagatgccataaagaatgctgatgggagaaccattttcctaattttc

SEQ ID NO: 207599 - DNA, 139 bp, Homo sapiens
agatggtccccgagttcgctgccagccccaagaaggagaccctcatccagctgatgcccttcttcgtgccgccagatcccacccttggacccccatgaaaatggaaacaatggaacaatcaaagttgagaagccaacca

SEQ ID NO: 207600 - DNA, 80 bp, Homo sapiens
ggctggcgcagctgcagagcaggatggcactggtgaagaggttcatccaggcccgcagccaaggccacctttgatgccat

SEQ ID NO: 207601 - DNA, 95 bp, Homo sapiens
tgctttctctcgatgaggataacatccctccagaagatgttaacaagcacaagccctggctggagcccacctaccacggcatagtcacagagaac

SEQ ID NO: 207602 - DNA, 74 bp, Homo sapiens
ttcttgtttgtggatcgctgtgatcgtcacttgccggttgttatgacaatggaaaacactatcagataaatcaa

SEQ ID NO: 207603 - DNA, 100 bp, Homo sapiens
gtggaacgcaagggaaaacaaatttgtaaatattttcttgaaaggaaatgtattaaggcagctgaggaagttggatatccagtaatgatcaaggcctcag

SEQ ID NO: 207604 - DNA, 75 bp, Homo sapiens
ccggaagcgcgagcaaggccgccagatgtgcagacaaagatcattccactcagcctgggacgatggggaggaaaa

SEQ ID NO: 207605 - DNA, 74 bp, Homo sapiens
aatcagaaggcacagattagaggaaggaagaggatgaggaagatggagagaatgcccacccatatagaaacagt

SEQ ID NO: 207606 - DNA, 75 bp, Homo sapiens
gcttccgccaggcggtgatgaagaatccccccgaaaggaccccccagcacgaaagcaagagattatcaaagtcac

SEQ ID NO: 207607 - DNA, 100 bp, Homo sapiens
tcaaatacttcatatttggcttcaatgtcatattttggtcgtcctcttgagttctggcgccttgactactgggaagatgacttgcggcgccggcgacgat

SEQ ID NO: 207608 - DNA, 88 bp, Homo sapiens
cggccatggcgtacgcctatctcttcaagtacatcataatcggcgacacaggaaactactaaagttcctggggaagcaaagtagaatt

SEQ ID NO: 207609 - DNA, 100 bp, Homo sapiens
attaattcatatgaccatgctcacaagcagacttttggaacagaatccggcaagagcaaaccgaggattgccctccctccagccctagtagaggttggca

SEQ ID NO: 207610 - DNA, 49 bp, Homo sapiens
gcagagcagggcggcggcgactcggttacctacctgggcaaagtctcca

SEQ ID NO: 207611 - DNA, 100 bp, Homo sapiens
gggacgtggtggagctggtgcaggagggcgacgagggcctctggaagtgtggaactggtctcaatcggttgaccaccttaaggaaataggatttacactg

SEQ ID NO: 207612 - DNA, 90 bp, Homo sapiens
aggctgagcgagagcaggaagaggagccgcctcaggtgtggacagttccgatgaagttaaattccgtcaagatttaatgaatattgcggg

SEQ ID NO: 207613 - DNA, 74 bp, Homo sapiens
gcggtaaacgcggttagtgcaagcatctgggccatcttcaatatgtcgaactctctcaggttcacccagaccaa

SEQ ID NO: 207614 - DNA, 100 bp, Homo sapiens
cgcgggagcagcacttccacagccaagtgcgggagtccacgaggcctaacatcgtgtcccagctcagccaagcctgcgatggagccataacgagtcgtcc

SEQ ID NO: 207615 - DNA, 100 bp, Homo sapiens
tgattttggaaggcagacacctggtggaagaggcgtacctcactattcctgatcagagaactccagttgcttcaacacacagtatcagtagtgcagccac

SEQ ID NO: 207616 - DNA, 71 bp, Homo sapiens
agcttctagaccacctatccaaaatgcatgtgttgcagataagcacagatgaaagcacccccgccaagaag

SEQ ID NO: 207617 - DNA, 102 bp, Homo sapiens
gtcgacttgtgtggattctagtagaacggagctgaccctatccgaacaggcaattttaaagttcaagtcctcagcttcctctggactcatactcaaaacaag

SEQ ID NO: 207618 - DNA, 83 bp, Homo sapiens
cttggcccttgttcccccaaatgtctgactctgactctcggactgagaaacgcaaggcctcaacaccctcccccagcctccca

SEQ ID NO: 207619 - DNA, 100 bp, Homo sapiens
ccaacagcggggcagctggagagtttggagccctgcagactgtccgcctggagcgttacaaggccttctacattaccgtctacgagaacgaagaccagct

SEQ ID NO: 207620 - DNA, 96 bp, Homo sapiens
cttgcgattaatgaatgaaaccactgcagagtttgaaacagctgagacacttctaaattcagaagttcatatgcttctggaacatcgaaagcagca

SEQ ID NO: 207621 - DNA, 137 bp, Homo sapiens
ctcacagaacttcctgtccagcatcaatgaggagatcacaccccgacggcagtccatgacggtgaagaagggagaggtctactttgaggatgaggacagggcagaactataccgggtgcctgccaagagcaccttgc

SEQ ID NO: 207622 - DNA, 74 bp, Homo sapiens
cgagagttgcatgagatgttcatggacatggctatgtttgtggagactcaggcgcagtcatgcaggaaaacctc

SEQ ID NO: 207623 - DNA, 96 bp, Homo sapiens
gcaagtttgtgccccatagctgcacagtccaatatcagatggaaatgatgcggagccttcgccatgtaaacattgatcatcttcacgtgggctggt

SEQ ID NO: 207624 - DNA, 100 bp, Homo sapiens
tgctgctatacaacacaattataaaatgtcagcttttaagggtgaagatcctcatgtatgaaaatgaagtcccaggcaaccatgatttgctgcttagtgt

SEQ ID NO: 207625 - DNA, 96 bp, Homo sapiens
atgccaagaacttctacgggggcaatggcatcgtgggagcgcaggaacaggcctttgagagcagccagaagtacaaagaggggaagtacatcattg

SEQ ID NO: 207626 - DNA, 96 bp, Homo sapiens
ctcgcctcgactccaaatggttgaaaacagatatacaggtatgatctcgtgaaatcttgagagaaactgaatgacgaatgaaactattgttcctgt

SEQ ID NO: 207627 - DNA, 117 bp, Homo sapiens
atatggcgctttaagagctgtgcgtgttttgggggagcagacggttgacagtgttgagtttgattgaaggatctagtgaaaagccatttgatgtatgcggtcagagaagaagtggag

SEQ ID NO: 207628 - DNA, 98 bp, Homo sapiens
tttgcacctgtggcttatctacgctttttagaattgcacttggaggacaaggttcagcagactgtacaggatctttttggcagagccccaagtaaagc

SEQ ID NO: 207629 - DNA, 100 bp, Homo sapiens
cttatctggacacgtgcaggctggatgttaaagtctttagtgaagatgggacaagcaaagtggtggagattctagcagacatgacagccagagacctgtg

SEQ ID NO: 207630 - DNA, 80 bp, Homo sapiens
caagcggaggtgctgggagcgagttggctggtggtaccatggccacatgtctggcgggcaggcagagacgctgctgcagg

SEQ ID NO: 207631 - DNA, 74 bp, Homo sapiens
aagccagagccgcctgccatgccccagccagtccccacagcataacaggcctggaagaaacgctggtttatcct

SEQ ID NO: 207632 - DNA, 100 bp, Homo sapiens
cctctacttttcaagacaccaagtgagaggccaaccaggttatgaagacagtatggagtttccagaccatagtagacatttgctacagtgtctgagcgag

SEQ ID NO: 207633 - DNA, 100 bp, Homo sapiens
ggcatttggctttgcctttctggacacagaagtatttgtgacagaaatatggctacacacacctttctgcaggagagctgcttcgtgatgaaaggaagaa

SEQ ID NO: 207634 - DNA, 98 bp, Homo sapiens
gggacgccagtcaccagcaggagcagccaaccagcagcagccatcatggaggtgaaatgacaatggatgctctgttggctcgattgaaacttctgaat

SEQ ID NO: 207635 - DNA, 87 bp, Homo sapiens
aaaaacaggtccctggcgagccccttgcaggtcttgagtcagacagagcaccagccttggggaccctggaccactatcatggagact

SEQ ID NO: 207636 - DNA, 101 bp, Homo sapiens
gcaaatatacctcctgagattcagaaaagttgtcttaatatgttgattcagtccttaaatgtccctcttccagtggaaagcccaaccatgcagacatcttg

SEQ ID NO: 207637 - DNA, 99 bp, Homo sapiens
atgcctctgacaatctctagtataacaacgaacttgatgcaagtgataggtttgccaaggtcagacctctcatcatccggatgaactgcaatttccaga

SEQ ID NO: 207638 - DNA, 75 bp, Homo sapiens
aggaaaaactggagagcttcatcaaaaatagtgatagctttgataaaggagaggagacgccgtgagcgggacgac

SEQ ID NO: 207639 - DNA, 100 bp, Homo sapiens
cgctgcctcaggaggcgggaggcatgagtgagctacagtgggaacaggctcaggaccctctatgctgccctgctggtgctgaccagcccggcagccacgc

SEQ ID NO: 207640 - DNA, 100 bp, Homo sapiens
aagtgcagctgcctcagttcttagcgcaggagatgattattgacagagtaaatggacaggctgttcctagatatttgatatatgacataattaaattcaa

SEQ ID NO: 207641 - DNA, 82 bp, Homo sapiens
cgttctttaatatgctggatgagctgctgaagcccaccgaattagttgggccggtgcacaaacagcgtggtcaagtatgagc

SEQ ID NO: 207642 - DNA, 82 bp, Homo sapiens
cttggactgagtcctgcaggacacagccaagacaatgcaaactccagtgaacattcccgtgcctgtgctccggctgccccgg

SEQ ID NO: 207643 - DNA, 100 bp, Homo sapiens
aacttgccctgtctcctcgcagatgagccatgaacatatagaaatccttacagtaaatggagaattactcttttttagacaaagagaagggcctttttat

SEQ ID NO: 207644 - DNA, 97 bp, Homo sapiens
aagactcaagctaacctacaaagaattaaatatgggtgatgttgagaaaggcaagaagatttttattatgaagtgttcccagtgccacaccgttgaa

SEQ ID NO: 207645 - DNA, 88 bp, Homo sapiens
caagtgaagactttgaacgcactcctcagagtccgactctcccacctgctaaggtggcagcacgcactggtgaaactggagtgagaag

SEQ ID NO: 207646 - DNA, 48 bp, Homo sapiens
gcatggatatctctactcgctccaaagcattagtgccagcagtagttc

SEQ ID NO: 207647 - DNA, 74 bp, Homo sapiens
ctcaagacccggtgtggaggcaagctgggcttcctggcctggtctaccatcacggcaacagtgcgacgggcggc

SEQ ID NO: 207648 - DNA, 95 bp, Homo sapiens
agtactccttttggccatggtagtaaccaggcacaacccgatctcccagagaaggagaagtgcctggcgtggactataactttctgactgtgaag

SEQ ID NO: 207649 - DNA, 100 bp, Homo sapiens
tttgtttttctcagcagaccagagaagtgtttggattgtgagctatttcagaactgttctcaggactcattattttaacatttgggagaaacacagccag

SEQ ID NO: 207650 - DNA, 100 bp, Homo sapiens
cgaagtcatcgctgggagtactggttgccctttcctcaggtatctccatacagccaagaataaagaaagaaagggatagatggaatgagtttcatcgtga

SEQ ID NO: 207651 - DNA, 74 bp, Homo sapiens
atccaaagaaaacaaaatggtggtatcatggcatgtgggcacattccatgacagtacaggattatcaggatctc

SEQ ID NO: 207652 - DNA, 83 bp, Homo sapiens
agaaattacaggaagagtcagacctcgaattagcaaaggaaacttttggccgcattgacaggaagattgagttccccctgcct

SEQ ID NO: 207653 - DNA, 98 bp, Homo sapiens
gccacagccgccggccgggagaggcgcgcgccatggcttctggagccgaaaactggcgatggaatatgagaggagccctctggaaagaaaaggacaga

SEQ ID NO: 207654 - DNA, 100 bp, Homo sapiens
gcgagcactatggagtagcgcagggtctcgagctgtggccgtggacttaggcaacagtaatcctaaattggagagtcagagagtaaataaaaaagtcaat

SEQ ID NO: 207655 - DNA, 74 bp, Homo sapiens
tagtgacagtagaaactactccatcactattcggcaggagatagaccagaagatcagctgccatgttacttgac

SEQ ID NO: 207656 - DNA, 90 bp, Homo sapiens
gtcgcagggcggcctgcagctgggccgcggccgaggaggcagcgcgacctccgcacgatgcatggtcatggaggctatgattctgatttt

SEQ ID NO: 207657 - DNA, 100 bp, Homo sapiens
aacgccgtgcagctgcccatcgaccaggtcttatttgactggatgacgagaattgggtaccacatatctctatacagcctttctacttcctttcccagac

SEQ ID NO: 207658 - DNA, 90 bp, Homo sapiens
acgcagaggacgccggaacaccctggaagccgagaaatggaaccacgaaggcggaggaccggggcatgctgctgaaaaccttcaacgagc

SEQ ID NO: 207659 - DNA, 100 bp, Homo sapiens
ctcagtggtacctgcacctgtctggcctgggcgccagcgcggctgcaggccaaggagctgtggctaaaggaagtggaggggccgtgggatgcggagagcc

SEQ ID NO: 207660 - DNA, 100 bp, Homo sapiens
agctccccaggggagttctctgtgtctgtgaaaaaatgaaactgaagccgtggtcacgtgacaggacatgtagtatatagcaggctgccagcgactcctg

SEQ ID NO: 207661 - DNA, 101 bp, Homo sapiens
gacgattcagagactgaaaaacctgaggctgatgacccaaagcctttagaagaagccacactctctgaattaaaaactgtcctcaagagcttcctaagtca

SEQ ID NO: 207662 - DNA, 90 bp, Homo sapiens
ctatttcgccgctggcgtcaggactattttcacgttttaatgccgagaggctactgcagcactggggtgtcagttgttggtccgacccag

SEQ ID NO: 207663 - DNA, 82 bp, Homo sapiens
tatgcaacatgctcagcaggagcttcatcaacgatatatgtcagatctaaagcttccctctgtgtgaggaaaggatagaaat

SEQ ID NO: 207664 - DNA, 101 bp, Homo sapiens
aagatttgtaaagaaaactcttagagttttccgtctgatgaaggttggccatttgcaaagtatcttggagcttgtggaagaatggtggctgtaaattatgt

SEQ ID NO: 207665 - DNA, 100 bp, Homo sapiens
ccccgctgcggccccagcagaatccagtttctctgtggacattgactcggagctggtggaggagctgccggccgaaatcgagctgtggctggtgctggtg

SEQ ID NO: 207666 - DNA, 76 bp, Homo sapiens
tcatggaatatatgctggcgttccttctgctgctattggatcctttcctaatgtagagacgggggttcaccatgtt

SEQ ID NO: 207667 - DNA, 100 bp, Homo sapiens
tttcagttggaactcatgcgattactacatataatcccaataccttagaagtaacaaatcagtgctcccggattttgctctccagcctccggttctcggt

SEQ ID NO: 207668 - DNA, 90 bp, Homo sapiens
ttcagaagctggtcgccgccggcaggtgcaacaacgagagtgagtggtcccagatccacgagaacatcatccgaaagtccagtgccaagt

SEQ ID NO: 207669 - DNA, 100 bp, Homo sapiens
gaagcggccccagcactcccagctgcgcagggcctgccaggtggcgctcgtcttaggaaaagtcctcagtgctgtgggcagtgcccagctactgatgtcc

SEQ ID NO: 207670 - DNA, 104 bp, Homo sapiens
cagcaactcccagctcaatgcaatggaccctgatgcttggtgtgacctgagtaaatttgacctccctgaggaaccatctgcagaggacagtatcaacaacagcc

SEQ ID NO: 207671 - DNA, 90 bp, Homo sapiens
aattgggtggagctaccctgcgtatctggacacctttaaggattctcgcctcagaggccggtgccctcgaccgcctcctggatctccccg

SEQ ID NO: 207672 - DNA, 82 bp, Homo sapiens
ccaaatcaaaaaatacatggtacattgatgaagcttcagctttagctgcagctgcctctgttcagccacttgcaacacaatg

SEQ ID NO: 207673 - DNA, 100 bp, Homo sapiens
ttggtactattctctctcccagaaagaatcttcaagagggagacatagggaaaaggaagacataaaaatcactaaggaaagaactccagaaagtgaagaa

SEQ ID NO: 207674 - DNA, 51 bp, Homo sapiens
cgcgtttccacttcagagatctgtgttgcactagaatggtgacagggaaga

SEQ ID NO: 207675 - DNA, 90 bp, Homo sapiens
gctctggaacttctgcccagctctccttggtgcttgaagtttctgggaagtcggcatccaaccctggtgcttcccttggtgccagagctt

SEQ ID NO: 207676 - DNA, 50 bp, Homo sapiens
ctgccgtggaatggtttgatggtacaggtttgcagattccgccagcagca

SEQ ID NO: 207677 - DNA, 96 bp, Homo sapiens
gtgggattgagacattctcacctcctcctccgcctccaaagtcgcgccgggaagatttccagaggattccagaacttgccatcaacccactggggg

SEQ ID NO: 207678 - DNA, 100 bp, Homo sapiens
tctttgtgttcttgcgcaaactgtaaaggactctagaacagtttatggaggagctgaagaggaggcaaatgaagaagatgtactgggagatgaaacagag

SEQ ID NO: 207679 - DNA, 100 bp, Homo sapiens
cgaccccagagcggcgctggacagattgcaaacatcctagatagccatgcagctacattgaaccggaaatctgaacgggaagtcttctttatgaatactc

SEQ ID NO: 207680 - DNA, 98 bp, Homo sapiens
aaccacaaatgtttttctgttttgcctgaatacatgatttaaacaagagatttccacagaaggatgtgagctgcaatgaaattcaaactataccttcc

SEQ ID NO: 207681 - DNA, 90 bp, Homo sapiens
aagcagcaccatcggggagacaagcaaccaggtctaaactgcagtaatccatttactcagctggagaggagacatcaagaacatgccaga

SEQ ID NO: 207682 - DNA, 73 bp, Homo sapiens
agtcccttgtgtatggcaaagtggatagcttctggaagagcagcccgacggccatggaggctgaagagacgat

SEQ ID NO: 207683 - DNA, 95 bp, Homo sapiens
gcaaatgagatgaaccatcttcctgcacacagccacgatttgcaaaggtggtggctaatgccgtagcggcattatctgaaatcagtgagtctcac

SEQ ID NO: 207684 - DNA, 75 bp, Homo sapiens
gtgcccgaggagtagtcgctggagtccgcgcctccctggctggtgggcacggaggatgctcttctgcagcagctg

SEQ ID NO: 207685 - DNA, 50 bp, Homo sapiens
acttcgagtcctttattgtggagaaatggtggagtcaatgaagaaagtag

SEQ ID NO: 207686 - DNA, 100 bp, Homo sapiens
gggagatcatattgtacttgcgagtgagacccggctggaggaatgttttaattcttcggaaataccaagtggtctctttcgtgtctgggatgtccggcca

SEQ ID NO: 207687 - DNA, 89 bp, Homo sapiens
aatacgcagtgcctgtgctcaggacaaagaagaagtttctcgagtggatgcaaaacatcgccctgagcaactggtggtttgtggcccac

SEQ ID NO: 207688 - DNA, 100 bp, Homo sapiens
ctttgtgtcccgacactctgccaccttctccagcattgtgaaagtggcagatgcctggagagccctcaagaatcccagcattggggaaagcagcattgaa

SEQ ID NO: 207689 - DNA, 101 bp, Homo sapiens
atccagcagcgtggctgtcggaaacgactttggcttttcctctcctgtcccagttaagtgggcagaccaacatccacctcagcaaaaacttcttcctgacg

SEQ ID NO: 207690 - DNA, 100 bp, Homo sapiens
cacatgcgctggctggtctggattatggcttccgtgggcaccatctatgtcttcttcttccatgagcggtctaccagccacagtctctgcacgtttccaa

SEQ ID NO: 207691 - DNA, 82 bp, Homo sapiens
tgttttaaatgacgaaactcagcggaaatatattcagggaccagttactctccacaagaaaattcacacaaccacagtgctc

SEQ ID NO: 207692 - DNA, 101 bp, Homo sapiens
cttctcccgggaacacgggccaggagtggcggagccagaaggtggccccctgctgtatgaaggcatcagtctcaccatgaactccaaactcctgaatggtt

SEQ ID NO: 207693 - DNA, 75 bp, Homo sapiens
acagtggccggcagggcagccgggggacagctgtagtgaaggtgaatgaaaactttgccattgatttgatagcag

SEQ ID NO: 207694 - DNA, 100 bp, Homo sapiens
tttaaacaaagcagttgttcctacagagtcgctgaaaattttgttccccctctgttggatgcagttctcattgattatcagagaaatgtcccagctgcta

SEQ ID NO: 207695 - DNA, 75 bp, Homo sapiens
ttcttagacttggaggaggtatgcctggactgggccaggtctgaatttcctgctgctgttcacaaagatgctttt

SEQ ID NO: 207696 - DNA, 96 bp, Homo sapiens
ctcggtgttcccgctggcggcgggcatcttcttcgtgaggctgctcttcgagcgccccatgcaatcattcgtcataccattagatctacaaacagg

SEQ ID NO: 207697 - DNA, 87 bp, Homo sapiens
ttcctacaccttgcatcatgccagctttgtcaacgggatctgggagtgacactgccctgtatgatgagattcgtcagtttcgcaagg

SEQ ID NO: 207698 - DNA, 83 bp, Homo sapiens
ccgagcgggcggcttcctggcctgggcgctccggtggcggcggaggtgacttaagagattaaaattaatttggttgctgttgg

SEQ ID NO: 207699 - DNA, 98 bp, Homo sapiens
gctgcagacccatcccggaagccggccgggagtaatctatgccagcaattatgacaatgttagcagaccatgcagctcgtcagctgcttgatttcagc

SEQ ID NO: 207700 - DNA, 75 bp, Homo sapiens
gaggcgttgcagaaggccctggagcctacaggccagatgaaggatttgggggcagagcacttggcaggtcatgaa

SEQ ID NO: 207701 - DNA, 91 bp, Homo sapiens
cgtcatccttgaagccgaccagaatgatagccagtccctggagctggtgcacaggttccaggctgatcagctgaccgaagaacagattgct

SEQ ID NO: 207702 - DNA, 51 bp, Homo sapiens
gtaccaggaggcgttggccaaggccgccgccgcgccgccgtcgctctccaa

SEQ ID NO: 207703 - DNA, 75 bp, Homo sapiens
ctagcggccgggactctgaactatggcgagatcctgaaggagctagacgagtgctacgagcgcttcagtcgcgag

SEQ ID NO: 207704 - DNA, 100 bp, Homo sapiens
catgttaggagcgcagtggcggcgcaaccagccttctagggcggcggagaaatgactgctgtccatgcaggcaacataaacttcaagtgggatcctaaaa

SEQ ID NO: 207705 - DNA, 50 bp, Homo sapiens
ccaaagtggaatgaagtctatgaggaagaaaggcgaaggttgaaaaatgc

SEQ ID NO: 207706 - DNA, 95 bp, Homo sapiens
atggaagaagcttcgtgtccaacctgttcagtcaatgaagcctgtgagtggacacccttttctcaaaaagagagagtctacaaggagattgaaca

SEQ ID NO: 207707 - DNA, 101 bp, Homo sapiens
acgagtatttgggcagaaggtcctggtgctgcaattcagatggggctctgctgcgattctatacctgcaatgcttcttttgccacccgagaccgtctgcgc

SEQ ID NO: 207708 - DNA, 75 bp, Homo sapiens
agaaggagtggacttgattgatatatatgctgacgaggagttcaaccaggtgcagtcagcctcagtttccaaagc

SEQ ID NO: 207709 - DNA, 75 bp, Homo sapiens
cttgcagctgcctacaaattcaagagtgaccagggatgaggagaggagacgccgtgagcgggacgaccagatgta

SEQ ID NO: 207710 - DNA, 75 bp, Homo sapiens
taccaacaagactaaaagattacttggaagaatataaattccaggttcaaaccttgtactactcagctgatcaca

SEQ ID NO: 207711 - DNA, 83 bp, Homo sapiens
ggcaaaatggcggaccgcttctcccgcttcaacgaagaccgagactttcaggtactaggttttgacaagcttgcatcatgcgt

SEQ ID NO: 207712 - DNA, 100 bp, Homo sapiens
ggagattttccgcctgtctcgtcaccacatccaggcctgcgtaagtgaggaaacagctgatcctgctcctgtggcctccagcctcagcgaccgaccagtg

SEQ ID NO: 207713 - DNA, 90 bp, Homo sapiens
ctggtgtaccctggtggacgtgcacccagaggaccaggcggcgatcccctgacccccacgccgcccccacccgttgccaagacgcccagc

SEQ ID NO: 207714 - DNA, 82 bp, Homo sapiens
cgcggggcacaggatccggagctggagcccccaggtctcctctgagcctccggcctccataagacccaaaacagatgacacc

SEQ ID NO: 207715 - DNA, 95 bp, Homo sapiens
attcgaacaccgacctcgtcccggcccctgcagtccggatactcacgccagaaggatccacctcagaaaaagatggaatgcaccatactgtcacc

SEQ ID NO: 207716 - DNA, 100 bp, Homo sapiens
ccctgaagagggaagacacgcggaaacagattatcctcttgacttgaaccacagtgaaaccttcctgcaaactacaacatttcttcctgaagacttcacc

SEQ ID NO: 207717 - DNA, 83 bp, Homo sapiens
gccagttgcttgatcaggtggaacagattcagaaggagcaggattaccaaaggtgtctttctcgagaagcaggtggaaacatg

SEQ ID NO: 207718 - DNA, 75 bp, Homo sapiens
aagctgcccttcagccgcctgtacgctggggaggaggaggaggaagggagcggcagcagtgaaggatttgacccc

SEQ ID NO: 207719 - DNA, 83 bp, Homo sapiens
atggatggactgcagatctccagatggaagcggggcatggccaggccaggtcatcatcagatttgaaatatttaaagtggata

SEQ ID NO: 207720 - DNA, 82 bp, Homo sapiens
cggagcgcggtccctgtattggtctcctgctcctagaggcttgggcactgtttaaaggaaagttccgagaaggcatcgacaa

SEQ ID NO: 207721 - DNA, 75 bp, Homo sapiens
aggactccccagccaaggggtcccccaaaggctcccccagcaagcacagctgactggcacagcctccaggttggc

SEQ ID NO: 207722 - DNA, 100 bp, Homo sapiens
cggggactggccacggcgctgctaggtcctgtgtgacagacatgtgtgaatgtccagtccataaaaactgttattgcgagtcatttttggcatatacccg

SEQ ID NO: 207723 - DNA, 109 bp, Homo sapiens
tggaagcggctcaatgaccatggcaagaactggcgtcacgtttacaagtggacatcctcatcatggatgatgacgacgtccccagctggcctcccaccaagctgtcccc

SEQ ID NO: 207724 - DNA, 90 bp, Homo sapiens
gttgtgttggtaatgaagaaaagaatgatatggaacctagcaaagctgttccactgaatgcatctaagcaagatggacctatgccaaaac

SEQ ID NO: 207725 - DNA, 80 bp, Homo sapiens
aggtgaagtccacaatcaagttccaaatgaagaagagaggcggatttggtcgtggacgtggtcagccacctcagtaaaat

SEQ ID NO: 207726 - DNA, 98 bp, Homo sapiens
ctactcaggcgctggagaaatacaacatagagaaggacattgcggctcatatcaagaaggagaaataactttatttggactgagagctggagaatgag

SEQ ID NO: 207727 - DNA, 50 bp, Homo sapiens
cttgaagaggtccttcacatcccttttgcagaggaaagtggtcgcttatg

SEQ ID NO: 207728 - DNA, 80 bp, Homo sapiens
agtgggtgtgaccaaaagtgccatttgttaaaggtgttgcagcatccctggaagtgtcagagagccctgggagtatccag

SEQ ID NO: 207729 - DNA, 87 bp, Homo sapiens
gcggtcccagcggcagcagcagcggcgggaggagcctccggggtgctggagaatctggtaaaagcaccattgtgaagcagatgagga

SEQ ID NO: 207730 - DNA, 75 bp, Homo sapiens
gacgtctggggcaaagggaccacggtcaccgtctcctcaggattggaggctgttgtcattggagaagttcatgag

SEQ ID NO: 207731 - DNA, 105 bp, Homo sapiens
tgacagagaatttggtggcattaaaagagatccgattggaacatgaagaaggtgcaccctgcacagctataagagaagcaaaagttcaaacagaccctccctcag

SEQ ID NO: 207732 - DNA, 75 bp, Homo sapiens
cgccgacggctgctcaaacatcagggtcaatgagctgaaggagaaaggcaacaaggccctgagcgtgggtaacat

SEQ ID NO: 207733 - DNA, 83 bp, Homo sapiens
ccgcgaacccctctgggatccccgccgctctgtctacaacccgagggcgtgatggtgggcatgggtcagaaggattcctatgt

SEQ ID NO: 207734 - DNA, 90 bp, Homo sapiens
gtcgcctccaggccaagagggatccttcacccgtgtctgctggagaagaagcaggcgctccctccattccagccacagatcacagacgac

SEQ ID NO: 207735 - DNA, 76 bp, Homo sapiens
catgaaacagtagctgcagaatacaagaaactttgtggtgaaaatgataggtaaaatttatgaagaccattcctgg

SEQ ID NO: 207736 - DNA, 95 bp, Homo sapiens
caccgcctctctggtgctaagggccacggatgtccatcccctccagggacagagcagaatgggctgatatagatccggtgccgcagaatgatggc

SEQ ID NO: 207737 - DNA, 75 bp, Homo sapiens
ccaacgagtaccagctgattgactgtgcccagtaaccaagccaccctggtagaacaagtaaaaagagtaaaagaa

SEQ ID NO: 207738 - DNA, 100 bp, Homo sapiens
ccgcagccaggagcagcagccgcgcctgcagaccggcctcgcggagcccgcgcgccgagccccactgccctaaccatttctaatattcaggctggatcta

SEQ ID NO: 207739 - DNA, 100 bp, Homo sapiens
cgggggcgtacaggcgcagcggccgcagcagcagcggcagtcacaggcacatcagcaaagaggtgccagcgagatttcagattcctgtaaacctctaaag

SEQ ID NO: 207740 - DNA, 76 bp, Homo sapiens
gatcaccgtgacatccgaggtgcctttctccaaaagtaatagctcttcaagtctgcaataaaaaatggcctccaac

SEQ ID NO: 207741 - DNA, 100 bp, Homo sapiens
gctcttccccagctgcccggtgcccgaggaggcagccaagctcatggcctgccactgcgtgcatgccatggacaatattaccaggcagaaccaattctac

SEQ ID NO: 207742 - DNA, 101 bp, Homo sapiens
tgtgcgggatcgacgcggacagcgggctggagcctgacgagctggcgggcatttgggcagtccttctccatccaccggaaggttgctgaagatggagagac

SEQ ID NO: 207743 - DNA, 82 bp, Homo sapiens
caggagctggctgcggagcggcgagggacctcgcagggagccatccgatccgcttacaaacacgcagatggcaagaagattg

SEQ ID NO: 207744 - DNA, 85 bp, Homo sapiens
cacccacttcgacctggagctctcccacctctgcgagtacgacttcgtcaagccaaggccacctttgatgccatttctaagacct

SEQ ID NO: 207745 - DNA, 75 bp, Homo sapiens
cgtggaagcgctggaaaaatttgggacaatatgaacctaatccaccaatagatcaagttatacagaaaccaggag

SEQ ID NO: 207746 - DNA, 100 bp, Homo sapiens
gtcaggagaggtgaggcaggctcgagtgcacggagcgtcccttccatcaggagaggcctccggtgtggctgtctctgatggtgtcatcaaggtgttcaac

SEQ ID NO: 207747 - DNA, 101 bp, Homo sapiens
ctgcccccttcccccacccccgactcgggcttggcgcggcggccagaggaaccccgaggtttaatttaacctgagaaggctgcagatcctcggggttggtg

SEQ ID NO: 207748 - DNA, 98 bp, Homo sapiens
cattcctttgattatgactggtacaatgtatcagaccagccagtgaaaggcacatggtggtgatatttttgagaaagtagagaagaaaagaatgaatc

SEQ ID NO: 207749 - DNA, 75 bp, Homo sapiens
tgtaaccattttaaacaaagccgtctgtagaggatcctttccccattaacaggggtccttatgtgttgttccagc

SEQ ID NO: 207750 - DNA, 100 bp, Homo sapiens
gcaaagtggattttgcacaactgcatcatttataatggggattcacaatgacatcctttcaagaagtcccattgcagacttccaactttgcccatgtcat

SEQ ID NO: 207751 - DNA, 100 bp, Homo sapiens
gtcctcgggggcggcggccacgccaaggacgggtgtgatgaatgcagactctgctaccattttggctgtttggatcctcctttgaaaaagtctcctaaac

SEQ ID NO: 207752 - DNA, 73 bp, Homo sapiens
ggagccgccgcaagccacacggcgccaagcccatctttgtgtgcttgcatccaactgtgatgagcctatgtat

SEQ ID NO: 207753 - DNA, 98 bp, Homo sapiens
ggcgagtgcttaacctacctcccaacaccattatggaatacaaaactcacaccgacagcatcaacgaatgacaacagagctgctcaaggcgggaactc

SEQ ID NO: 207754 - DNA, 100 bp, Homo sapiens
gggacccatttctcctcctttgacagggacatcagtggagccttctcagacccacaggtcagcccaaggccaaccccactgtcactctgttcccgccctc

SEQ ID NO: 207755 - DNA, 101 bp, Homo sapiens
agctcaggaccaggcaccttctgtggaaggaacaagttccagttccagtctaccacccaacacctagccagactcggctagcaactcagctgactgaagag

SEQ ID NO: 207756 - DNA, 100 bp, Homo sapiens
ggaggaagcgcggctgctgtcgcccagcgccgccccgtcgtcgtctgccttcgcttcacggcgccgagccgcggtccgatatctcaagattccaaaaccc

SEQ ID NO: 207757 - DNA, 76 bp, Homo sapiens
cagagaagaaggactctgatttcttcacagaacacactcaagctttatcctgtggataaacgcagagtgaacgagt

SEQ ID NO: 207758 - DNA, 75 bp, Homo sapiens
cagccgaggggccttagtcactgtgggccagatcgtgtctcagaaggacgagcactgctgggtgggggagctcaa

SEQ ID NO: 207759 - DNA, 74 bp, Homo sapiens
ccctgagacaaccacttctggtggttgccactcacctgaggatccacacctgcatgctgtggcgggcgctggcg

SEQ ID NO: 207760 - DNA, 100 bp, Homo sapiens
actgcaccttaaaaacaaaagattgagctgcactgtattcctgccttggatggtatactgtaaattcagcatatggagataccattatcataccttgccg

SEQ ID NO: 207761 - DNA, 96 bp, Homo sapiens
ctctgagaggcccctcttctcctccaacccagaactggacaatctgtgggctcgggatgagtttgaaggcctcttcaagcagccagcagaaaatgt

SEQ ID NO: 207762 - DNA, 83 bp, Homo sapiens
tcgacaagaatctgcaggacttggtccgcggcatccgtaaccacaaggaggacgaggtcgcaatggaagaagagatcgccgcg

SEQ ID NO: 207763 - DNA, 101 bp, Homo sapiens
cgtgtcggagatccgctcgcgcgccgaagttggggaatggcggtcaatgtgtattctacctcgataacccaagagactatgagcagacatgacatcattgc

SEQ ID NO: 207764 - DNA, 82 bp, Homo sapiens
tgcctaatttacagcaaccatgagcttcctgcctgacacagctcacttcaagaagtgcacaatgtcagaacgtggaattaag

SEQ ID NO: 207765 - DNA, 106 bp, Homo sapiens
gcacgagttcaccgtgtaccgcatgcagcagtacgacctgcagggccagccctacggtgagaagccctaccactgcaactgggacggctgcggctggaagtttgcg

SEQ ID NO: 207766 - DNA, 100 bp, Homo sapiens
cttttggctgccctgagctggcagtacctgaccactctctcccagaatggacagcaaattatggatgaacctatgggagaggaggagattaacccacaaa

SEQ ID NO: 207767 - DNA, 101 bp, Homo sapiens
gggagggcaacgagcacaacaggagctacgaggagttggtcaagctgggctccgcgctagggggcccctacctgggagtccacctgagaagaaaagatttc

SEQ ID NO: 207768 - DNA, 98 bp, Homo sapiens
ctctgggacagcccctgccttctaccagcaaacagtgattgctgaccactcgctgagcgccagccacatggagaccaccatgaaacttctgaagacca

SEQ ID NO: 207769 - DNA, 90 bp, Homo sapiens
ggaggaaagaagacaagagagaacgcaaacagtttgaagctgaggattttgtgacttatgtcagaaacacatcttctgagcaagaagaag

SEQ ID NO: 207770 - DNA, 100 bp, Homo sapiens
gaacactattcacaaagattgcctgcagtttattgaagcctaaagaaactgttccaactcttgctccaaaaactctttcagtagcagcagcttttaatga

SEQ ID NO: 207771 - DNA, 100 bp, Homo sapiens
cgctgaggcggccaccgcgactccggctctgcgctcggctgcctgacttcttcctgctgctgcttttcaggggagtgcccgtgcgcagcggagatgccac

SEQ ID NO: 207772 - DNA, 90 bp, Homo sapiens
ccggcctcgagcgccccggcgggaggaatagccaggccagaagaaggaaggcctgtggtgagtgggacaggaaatgacatcaccacccca

SEQ ID NO: 207773 - DNA, 74 bp, Homo sapiens
caagatgctctctctggaccgatcccactgaggaattttgttgtcagagaataaaaggaggttgtccataattg

SEQ ID NO: 207774 - DNA, 100 bp, Homo sapiens
gtcaccatggacgccgagatggagttcaattgcgaggttggacttgttgaaataatcctgatacattcctacaatggccactgctcagctttctcactgc

SEQ ID NO: 207775 - DNA, 75 bp, Homo sapiens
ataggacccagcagagtaaacctcagcccccgcagccaagcacagggaggaatgatcaattggaatcgtcttttt

SEQ ID NO: 207776 - DNA, 50 bp, Homo sapiens
gtaacagggtgaagccctatgtccatggcagggtgccatttgccgtgcct

SEQ ID NO: 207777 - DNA, 87 bp, Homo sapiens
gcctgctgctgagcagcgccgcgggtgaaagaacttgtcctggacaacagtcggtcgaatgaaggcaaactcgaaggcctcacagat

SEQ ID NO: 207778 - DNA, 100 bp, Homo sapiens
catgatcacgtcctccctctgcaggaattggctatgagagggctgtatcatacctaccacagcttgctgaaagcaagagtgagccatggagctacgtgtg

SEQ ID NO: 207779 - DNA, 75 bp, Homo sapiens
ccttgatcttcgctgtggcatggcggacgaggggaagtcgtacagcgaggctgggaggcggcagaatgcagccag

SEQ ID NO: 207780 - DNA, 75 bp, Homo sapiens
catctttgtggctgtgcttgccaggcctggctccacttggtgttgtggttgccccacatacattaaagttaccag

SEQ ID NO: 207781 - DNA, 83 bp, Homo sapiens
tatggctgtaactggagatgacacagatcctttcccggagttcagttatgggtgtgagaggtttgcaaggatttgtgggaagt

SEQ ID NO: 207782 - DNA, 83 bp, Homo sapiens
cccagagaagaatgaggcctttctgacgagctggagccggtggtgcaggatgggcagaggcgcatacgggcccgactcagcct

SEQ ID NO: 207783 - DNA, 100 bp, Homo sapiens
tgccctgtggcctcgctcctcggagggattaaagcaaggagagccaatcatgactggcaaaacacagaccagcaacgtcaccaataagaatgaccccaag

SEQ ID NO: 207784 - DNA, 75 bp, Homo sapiens
tgcgcggcattctttgagggacccccattcaagttcaagttcacaattggcgttgggcccgaaggcatcctgcag

SEQ ID NO: 207785 - DNA, 80 bp, Homo sapiens
aacattatcacaaagctatcatcctgccaaactccaggctcagatgtcacagggtacagaatagtctattcgccatcagt

SEQ ID NO: 207786 - DNA, 50 bp, Homo sapiens
cgacgagcctacttcaagagaaataagaatacttcagagagtcagagttg

SEQ ID NO: 207787 - DNA, 100 bp, Homo sapiens
tctacagcttttctatgatcatgcaggagattttaacaggtcctactgctctgttggctcatgaaataggttttggaagtaaagttacaacacaccctct

SEQ ID NO: 207788 - DNA, 100 bp, Homo sapiens
gcactatcccaagactgctggcaacagatccaaggattaatgtcgtgcttgctggtggccacgttgtgccccgagatgagatccggaagctgatggaaag

SEQ ID NO: 207789 - DNA, 100 bp, Homo sapiens
gagtggacttctggaatggcacgaattcctagaggacctgtgcaacaacctcttgaggatcgaatcttcactcccgctgtctcagcagtctacagcacgg

SEQ ID NO: 207790 - DNA, 75 bp, Homo sapiens
ggatactgattatggctcaggctaccccaatgccctctgcctttgaagagaaggccattgagaaggtggatgacc

SEQ ID NO: 207791 - DNA, 75 bp, Homo sapiens
atgttcctccatgataaaggaatcatctatagtacttcctcgcgtattgctaaaggaggagttgaccacaccaaa

SEQ ID NO: 207792 - DNA, 100 bp, Homo sapiens
aggaaagcatgatgggagccacgaagggactgtgtattttaaatgcaggtcagaagagatcaattctacagaaatttccagtggttctgttgaggcttta

SEQ ID NO: 207793 - DNA, 111 bp, Homo sapiens
tacagctggagcgcccagaggcgagccctggtggaggaagaggatgaagatttgataaagtggaaggcactgtttgaggaagtccctgagttactcactgaggcagagaag

SEQ ID NO: 207794 - DNA, 50 bp, Homo sapiens
caggagacacaagaagcggatccagggcttccgagtggacctgccaatca

SEQ ID NO: 207795 - DNA, 76 bp, Homo sapiens
atcctgcatagccttcacagagagtccagttgccaaggtcgaaacagtggggcctgggaaaccaagtcacctccac

SEQ ID NO: 207796 - DNA, 134 bp, Homo sapiens
tttgccaatgttctcattcaccggctctcgatcctccttcaggggagacaccaatttctatggcaaacaggatgttttagaagaatgtatgtctcttcccaagctatcttcttattctggatgggtggtagagc

SEQ ID NO: 207797 - DNA, 90 bp, Homo sapiens
cacgacctccacgctggactggtgcgaggagaactactccgtgacctggtacatcgccgagttctgtggagccccctgagctgcccgctg

SEQ ID NO: 207798 - DNA, 82 bp, Homo sapiens
ctgtcagagcctcatggagtacgacttaattcagtgcacaaatgagatgaatgtgaacatcccacagttggcagacagttta

SEQ ID NO: 207799 - DNA, 71 bp, Homo sapiens
cattttgattgtagtagcagtggagattctgtttctggcgtctgcatacgcaagtccccaactcgctgagg

SEQ ID NO: 207800 - DNA, 75 bp, Homo sapiens
tatttctccacgatctataaaagatgtgtttgagcaacactgcaccactgactgactactttctcaaagatgagt

SEQ ID NO: 207801 - DNA, 50 bp, Homo sapiens
cgcgtcaggccgcgacgagggcgctgagcttcggaaccaaaaagaagctt

SEQ ID NO: 207802 - DNA, 83 bp, Homo sapiens
gaacgaggcaaggagctaaagcagcgtgcgttcagccctgggggccaattcctgtccccccagcagcatggcatcgtgtgctg

SEQ ID NO: 207803 - DNA, 74 bp, Homo sapiens
gccgagggtagggtcgcgctcgcccgggcggcagatttacaagtccttccactttctctctgaggcagaaagag

SEQ ID NO: 207804 - DNA, 80 bp, Homo sapiens
gagcttcccagcgccgcctcacctcgcttttcgaactccgcgacccgagcgcaaggtagctacagcaagctgggtagcag

SEQ ID NO: 207805 - DNA, 89 bp, Homo sapiens
cgtagatacaaatttttggatgatgatggatccatttctcctattgaggagtcaacgttcagctctatgaagattttgctaagtctcgt

SEQ ID NO: 207806 - DNA, 100 bp, Homo sapiens
tgtcgcttgtcttctattcaccatggcttcttctgctgcaagctttcttcctggtggcagatgacatcatggattcatcccttacccgccggggacagat

SEQ ID NO: 207807 - DNA, 83 bp, Homo sapiens
gacgtcgtgatccagaagtccagagctgaggactgcctgtttgcaggacttgaaagaggagattgatattcgactctccaggg

SEQ ID NO: 207808 - DNA, 100 bp, Homo sapiens
ttaccggtgaagaagtcgaaaatggagcacgtccaggctgaccacgagcttttcctccaggcctttgagagtctcctcctcggcttcctcttcctcccac

SEQ ID NO: 207809 - DNA, 78 bp, Homo sapiens
agaagctgagcagtgacgagaacagcaatccagacctctctggagacgagaatgagcatttcatactactgaagctga

SEQ ID NO: 207810 - DNA, 100 bp, Homo sapiens
ggatgggcacactgtgggggtgtcctggtgcacccccagtgggtgctcacagctgcccattgcctaaagaagcgcagacggggaagcggagccaacatgc

SEQ ID NO: 207811 - DNA, 80 bp, Homo sapiens
cgcagctagaccccgacctgccgcgcccggaggcataatggttatgaaagcttctgtagatgatgacgattcaggatggg

SEQ ID NO: 207812 - DNA, 90 bp, Homo sapiens
aggataaacagctcgttggcagtagcagcttatgaggatgggttctccaaaaaatgtggaatcctttgcatctatgctgagacattctcc

SEQ ID NO: 207813 - DNA, 90 bp, Homo sapiens
ccaaaaccgtgaatggtgtctggaggagtgagagccggcagtgtactaatggtcacttgatgtgcgctggctgttttatccacctactag

SEQ ID NO: 207814 - DNA, 134 bp, Homo sapiens
gtgcagaaataccagtccccagtgagggtgtacaaatacccctttgaattaattatggctgtctccttccgctaccactgccagctgtactccgagtggagaaagaccaaccagaaagttcgcctgaagatccg

SEQ ID NO: 207815 - DNA, 75 bp, Homo sapiens
ctcttcctggactcctgagcagaggccaagaagcttgagagaagaaaaatttcagaaaaattgtctcaatttgac

SEQ ID NO: 207816 - DNA, 100 bp, Homo sapiens
gaataaagccaagctcatctctgagacccggaggaggttcgaagctgagtatgtgacaggaagaaatgttggctatttggcgatgagaggtggtgaacag

SEQ ID NO: 207817 - DNA, 116 bp, Homo sapiens
aggaggttttcaggaccaaaattgtggaaaagtcactctggtttttcgttggaatatacgttgcacatttatggcgattctgagtgtgagggcagacttctgccaggctcagcaca

SEQ ID NO: 207818 - DNA, 97 bp, Homo sapiens
aaggattcccatgaagtgtcagggagtcttcaggccacacttcagtcagttgaagatgccaataacagcggcatgaatctattggaccagtctgtca

SEQ ID NO: 207819 - DNA, 100 bp, Homo sapiens
cctgcccagaggggcccactcgctgtcccccatcccaggcctcaggacctgagttctccgacgcccacatgacatggctgaactttgtccggcggccgga

SEQ ID NO: 207820 - DNA, 75 bp, Homo sapiens
cggcgcccggatgggcagctgagggcaattgaaggaacagactaaaaatcgtgtcctggaaggaaactacaggta

SEQ ID NO: 207821 - DNA, 90 bp, Homo sapiens
gaccttgagctccaggagttcgtctcttacgtctgcggaagtgcagctgcctcagttcttagcgcaggctgaagaactgaaactggccac

SEQ ID NO: 207822 - DNA, 75 bp, Homo sapiens
cacgagataggcaatacgaaagttccagtgtctcgccccatcctcaccctcagggttcccagggcccaggctgtg

SEQ ID NO: 207823 - DNA, 75 bp, Homo sapiens
cttaccttaacatgttcttgaagtaccatggcgtggattaaaaggtatatgactgatgggatgttacttcgtgaa

SEQ ID NO: 207824 - DNA, 75 bp, Homo sapiens
gtttgacagctattaaaaccagggctccacagttaggaggttggatggcaagcatgtggtgtttggcaaagtgaa

SEQ ID NO: 207825 - DNA, 100 bp, Homo sapiens
gcctccccgacttttccatttcccctttctctccgtaaacagaaagagactgcccggttgcaggagagagttcaagtggatggccttgaggacttgaaaa

SEQ ID NO: 207826 - DNA, 96 bp, Homo sapiens
gatgactcattgaatacaacggcgaatttaattcggcataaacttaaagagtcttacctccagtattagtgcctcgtcataatgaattcaatccac

SEQ ID NO: 207827 - DNA, 115 bp, Homo sapiens
aaggaaggccaacgtggaggcctcacgcagctccacagacagccccagctcggtgttcctcagatgccttcaattaagttgcagagttctgatggagagatatttgaagttgatg

SEQ ID NO: 207828 - DNA, 74 bp, Homo sapiens
aagataaagtgattttttgcctttgttgattaactggacaaattcagtatcctaagaaatccggtaaccaataa

SEQ ID NO: 207829 - DNA, 97 bp, Homo sapiens
tgcagagaccccgctatggctgtgtgttccagagaacaagccttcagacatttgctatattgacgctgagctgtcaggggactcaggcttatgagga

SEQ ID NO: 207830 - DNA, 50 bp, Homo sapiens
gcgccgctctccagcccgcttgaacgctgctgatgcaaggaatcccctgg

SEQ ID NO: 207831 - DNA, 141 bp, Homo sapiens
ttcaaatgggatcttgtccccctttctgagctaggacgagcggagggagccactgcaccaataaaattcgagtggtgaatgcatttcgtagttctttatatgaagggttagaaaaaccggaatcaagaagttcgattcaca

SEQ ID NO: 207832 - DNA, 75 bp, Homo sapiens
ggagcatcggttaacagcctatgggtgaaatttggctttcattcatgaatgagctgtacaggaagaggcacatac

SEQ ID NO: 207833 - DNA, 48 bp, Homo sapiens
ggatgtcacattaacttgttatgcagagaccacgcagaggctgccttt

SEQ ID NO: 207834 - DNA, 97 bp, Homo sapiens
agctccatgaaccatttcttctgtatagaaatgcaagcttgctacagttgaaactccagcagcgccggacccgggaagaactggtgagccaagggat

SEQ ID NO: 207835 - DNA, 73 bp, Homo sapiens
ctttctatgatcaggcagttgtcagagccatgtccattggagcccgttcccaatcagctcgtacttacttgga

SEQ ID NO: 207836 - DNA, 75 bp, Homo sapiens
gagacggcggcagcagcggcattcaggggctggcaaggtttaattgcttatggatgtcattcacttgtggtagtg

SEQ ID NO: 207837 - DNA, 100 bp, Homo sapiens
ccggatgtggaagagattttgtctaaagggcagcatttgtacaaggaaaaaccagccactcagccagtgaagaatggccaaagttttctggtcttggatg

SEQ ID NO: 207838 - DNA, 100 bp, Homo sapiens
tggaaaaagagaagtcaagggaacagatgagctcccaacccaagtcagcttgtggaaacggaaatgtttcaacgtgcgcaagcgttgcggcggcgggcag

SEQ ID NO: 207839 - DNA, 73 bp, Homo sapiens
gccgacgccaaaggggacagcgagtcggaggaggacgaggacttggaaggaagcagtcaattatagatttctt

SEQ ID NO: 207840 - DNA, 75 bp, Homo sapiens
gaaggggcagtacaagcttacgtctctgctcttcagtacaatcctattttaacctttgagaccaagaacccgtcg

SEQ ID NO: 207841 - DNA, 90 bp, Homo sapiens
gctgccctcgcccagccagctgcgggagaagatcatcatcaaggtactccaaagattcaggtttactcacgtcatccagcagagaatgga

SEQ ID NO: 207842 - DNA, 100 bp, Homo sapiens
tctgcggctggtccaggccttccagtacacagacgagcatggggaaggtcctcagaatggttggaatgaccctccagctttgaacagagtacccaaaaag

SEQ ID NO: 207843 - DNA, 74 bp, Homo sapiens
atgccagctctgcttggcccggatgtatgagcagcagcgggacaatcttgcccaacagtcattcaacatggaac

SEQ ID NO: 207844 - DNA, 50 bp, Homo sapiens
cattttctactgtccctgcgcgagatgcggttcatgctattattcagccg

SEQ ID NO: 207845 - DNA, 51 bp, Homo sapiens
gctctgaagatcctgccctgccctggctgtgccctcctggctgaagaagcc

SEQ ID NO: 207846 - DNA, 87 bp, Homo sapiens
ccggcttggagaggccgagggtttgatgaaggtggaggcagcgcggctctcagatgtgaagttcatttccaatccgccctccatggt

SEQ ID NO: 207847 - DNA, 82 bp, Homo sapiens
cttgaatttggacagtgaaaaggcccttaaaaagaaagaagcttccggttctgaggtcctggaggtgccatttccctctctg

SEQ ID NO: 207848 - DNA, 100 bp, Homo sapiens
aatgaagtatacaagtataattttcctcacacacagttacttgccaagacgattgaatgggtgactgatcgtacccgccagctggctaatgtcataatta

SEQ ID NO: 207849 - DNA, 100 bp, Homo sapiens
atcgagaccgggcccttcctcgaggcggtgtcccacctgccgcccttcttcgataatatcgtctactgcattatttttggctgcaaaagtggaagaacag

SEQ ID NO: 207850 - DNA, 89 bp, Homo sapiens
gagggggaaaaaatcccaaggtctgcaaaggagcttactccacgggaacagcctctagataatctgagttgttgaaaatacgaagcctg

SEQ ID NO: 207851 - DNA, 74 bp, Homo sapiens
cgtgatgttggagaactacaggaacctggagtctgtggtgcagtgtgccctgaaccgccctgccttctttgctg

SEQ ID NO: 207852 - DNA, 75 bp, Homo sapiens
gcaatatggaatattttgtgccacacacaaaaagggttgaaaaataccggccacagaccctgaatgatctcattt

SEQ ID NO: 207853 - DNA, 75 bp, Homo sapiens
ctcagttggaagcagccgatccagcctgcggagcctgtggggcagagctgatagacacacaccttagctggatac

SEQ ID NO: 207854 - DNA, 75 bp, Homo sapiens
cgcaaccccagatccatttacactttacagtttgatcactatgatcatctcacccacagacagaggatgcagggc

SEQ ID NO: 207855 - DNA, 149 bp, Homo sapiens
gagcatccaaacgtgggacggggtgctgcaaggggagcggctgctcaccatgtcctgcagtgacaagattgcacggtcggtaggctccacgacaaaagtcaacccttctgtaaatcacctgctgtggttatgatgctctgagttcaata

SEQ ID NO: 207856 - DNA, 97 bp, Homo sapiens
ggtcgccatcaagaaagtattgcaggacaagagatttaaggtaaagggagaagatgaggaagagaacaatttggaagtacgtgaaaccaaaattaag

SEQ ID NO: 207857 - DNA, 100 bp, Homo sapiens
tctgctgcaccgacctcgacgtcttgcctgtgtcccacttgttcgcggcctatagaacatccagtcatggataaaaatgagctggttcagaaggccaaac

SEQ ID NO: 207858 - DNA, 75 bp, Homo sapiens
gagattttgatgtggatgatgccaaagttttattagacagcccacctgaggatattgaccataaggactcatatc

SEQ ID NO: 207859 - DNA, 90 bp, Homo sapiens
cagcaactgtgggactttttgactacaattctcaacaacaggtggatatggttatagaagaagtggccgagataaatatggccctcctac

SEQ ID NO: 207860 - DNA, 95 bp, Homo sapiens
acatttctaaaagtggttcttgcaggtgccttgtccacattttgcgagagacaacagtaaaatactccaaaatacgttcttttcatggtcagtgt

SEQ ID NO: 207861 - DNA, 100 bp, Homo sapiens
agatggggaagtatttgatttcagaggaatgagattagattggtttaggttacagaatttcacggtccctcatggtgtctcactccagcagacagaggat

SEQ ID NO: 207862 - DNA, 80 bp, Homo sapiens
cgacggcgttgatatcggtggtaacgacggcctcagcaggcggggaagatgaaaggagttttccgtctgatgaaggttgg

SEQ ID NO: 207863 - DNA, 100 bp, Homo sapiens
ctgcttattaccagcctattttgcagtcactgagatcaggaaactgtatcctgaaggcaaacttccacactggcgggaacttcattgcaggccgtgtgtc

SEQ ID NO: 207864 - DNA, 100 bp, Homo sapiens
acagtgccctcagaagttcttcttccagaccgagctgcagaaagaactggttgtcttcttgggcggtgttgcagggttcatctttactttttaccaaaac

SEQ ID NO: 207865 - DNA, 83 bp, Homo sapiens
tgaagagcgacaagccgctggcagccgcggatctcaccgccgctcagggacactgggtccccttggagcctccccaggcttaa

SEQ ID NO: 207866 - DNA, 87 bp, Homo sapiens
ccagcgaaagtgcattcagtccatcctgaaagaggagaaccaaccggtgagccctctcctaagagacccaggggaagacccaaaggc

SEQ ID NO: 207867 - DNA, 101 bp, Homo sapiens
gcttatactcctcccagtgacgggtctggagtgcgtgggggaccggctgttggcgggtggtctttgggaagaagcttcctgcctttgccaccatccccatc

SEQ ID NO: 207868 - DNA, 90 bp, Homo sapiens
cctccacctgaagatgccccattgtacccccattcacctggatctcagtatcaacagaatgccagctgatgaagaccgagaggccgcgac

SEQ ID NO: 207869 - DNA, 75 bp, Homo sapiens
cgagcccgaggacatggagatggaagggcgaactttctgaccaagtatacaactacccagagggcctaggagaag

SEQ ID NO: 207870 - DNA, 100 bp, Homo sapiens
gctatttggaggactgcaccggatcgctgtcattaaaaattaagcgtggcttttgaggaagatgtgacaactaccggagaaataagagtcgtcagcatgc

SEQ ID NO: 207871 - DNA, 83 bp, Homo sapiens
tgagggtttgacagcgatgtagaggattttttatcaagcagaaatgcatcgaacaacgagaatcaagatcactgagctaaatc

SEQ ID NO: 207872 - DNA, 103 bp, Homo sapiens
atttatttggactagaaactaagacctgctggaatgtcaccagaatagaacctcttaatgaagttcaaagctgtgaaggattgggagatcctgcttgctttta

SEQ ID NO: 207873 - DNA, 75 bp, Homo sapiens
caaggccagcggagtcttcagcacccccacaagcatgcaggtctcttaaccttcattaactgtgcctatgtcaaa

SEQ ID NO: 207874 - DNA, 75 bp, Homo sapiens
gcggcatgagatgaagctgtgacagggatcgcttacacctgagacgaactacagaacagcacgtaccagaggtgg

SEQ ID NO: 207875 - DNA, 50 bp, Homo sapiens
ctccgccccagacctgtcggcgaaaggacagggtcttactctgtcaccca

SEQ ID NO: 207876 - DNA, 74 bp, Homo sapiens
attagctgagaccacagataaagtcaaacaaggcttttgggaagaatttgagggtggctcctatggacggaaaa

SEQ ID NO: 207877 - DNA, 90 bp, Homo sapiens
ccacgacctccacagctggcacgccgagagctgctacgagaagtcttcatttctgtgtaaaagaaaccgaagccaggacagcacagccgt

SEQ ID NO: 207878 - DNA, 74 bp, Homo sapiens
ccttccagcagtactttggtggacgagttggagtcatctttcgagccagagagatgacacgggggaaattcctc

SEQ ID NO: 207879 - DNA, 75 bp, Homo sapiens
atataccttcttagcagcgtcttttaaggtgatgcctggacttactgcatcagtaaaaatgaatggatacaattt

SEQ ID NO: 207880 - DNA, 50 bp, Homo sapiens
aacagatacagagatgtaagcccataatctccctggggtgccctccccag

SEQ ID NO: 207881 - DNA, 82 bp, Homo sapiens
ctggaccccacgtggcaggagatgctgaaccatgctacctgcaagattcatgatgagatttcagtgtcaagcatggatgctt

SEQ ID NO: 207882 - DNA, 100 bp, Homo sapiens
ggctcccgatggcgagattacggcgccctggccatcatcatggcaggcattgcatttggctttcaccagctctacaagaagttcaccatgtctattctca

SEQ ID NO: 207883 - DNA, 63 bp, Homo sapiens
gcagtggccgaggagattcaggatgaagttggttggtctccgccagctggacatgtccttgct

SEQ ID NO: 207884 - DNA, 83 bp, Homo sapiens
cgagctcaacggcggcctgcctccgggcacacccggctccccggacgcctcggtgagaagccctaccactgcaactgggacgg

SEQ ID NO: 207885 - DNA, 90 bp, Homo sapiens
gtaaaagccccgcctctgccttcggatagacgatcgtcaccggattgaggagaaacgtaaaaggacatatgagaccttcaagagcatcat

SEQ ID NO: 207886 - DNA, 90 bp, Homo sapiens
ccgcatctggctggagccctgcattcgcggcgtgtgcagagtgatcagcagctggactgtgccttggacctaatgaggcgcctgcctccc

SEQ ID NO: 207887 - DNA, 90 bp, Homo sapiens
gtttggttccacatcactgcaataaagttcgatacaagaggctgttttcctagcgtggcttgctgcctttggtaagaacatgtcgtccat

SEQ ID NO: 207888 - DNA, 100 bp, Homo sapiens
tgaagaggaaagacaagagccgccctgcccagaaacgtccacatgtgggtactgcattcctaccggtgtgacagatgtcacacaccaagccctacatcag

SEQ ID NO: 207889 - DNA, 100 bp, Homo sapiens
ttcctgactatacattcaggacctgagaccacagaatggctcaatgatactctacaacaggaagaaagtgaaatacaggaaagatgggtattgctggaaa

SEQ ID NO: 207890 - DNA, 149 bp, Homo sapiens
ctggatgccacaggcaacgagggttcctggctcttcatccagcccttctggaagctgcggagcaacggggacaacatcgggctggtggtcatcctggcttccacggtggtggccatgtcggccgtggcccagctgtgggaggacgagtg

SEQ ID NO: 207891 - DNA, 82 bp, Homo sapiens
cgcgagcacagagcctcgcctttgccgatccgccgcccgtccacacccgccgccagctggcccgagataacttcttccgctg

SEQ ID NO: 207892 - DNA, 82 bp, Homo sapiens
gctgcagccggagacccggagaaagggaaagtgatgaagcattgggcccaacaatgatgagttggaatgcagttgaaaagtt

SEQ ID NO: 207893 - DNA, 83 bp, Homo sapiens
gtgtcttgttgcgggcaccgcagtcgccgtgaagatggcgtctaccagccggtgcccgtggttgacacgagctgtgtccccag

SEQ ID NO: 207894 - DNA, 116 bp, Homo sapiens
gcgagctgagtggttgtgtggtcgcgtctcggaaaccggtagcgcttgcagcatggccaggtcagagcagcccaccatgggatggggagggggtggaggctgcaccccgcgcccac

SEQ ID NO: 207895 - DNA, 100 bp, Homo sapiens
ctcgaagctggggccacaggcgagctcacaggtcgtcatgcccccactcgtcaggggggctcagcccctcaagaccctctcccgagaacggcccctgccc

SEQ ID NO: 207896 - DNA, 75 bp, Homo sapiens
cgcgcgtcgctgtctctatggccccggatccgagcgcaaaggtggaggtcctgattgccataagcagcctcacgt

SEQ ID NO: 207897 - DNA, 50 bp, Homo sapiens
cgcggatcgagtttgataacgatggatcagtgaatgcttgtgaaaagacc

SEQ ID NO: 207898 - DNA, 100 bp, Homo sapiens
ggcaacgtgttggaccttccggagcttctcagaagacagagggttttcttttgagggtggcccagttgaaatccttcccttcctctaccttggaagtgcc

SEQ ID NO: 207899 - DNA, 100 bp, Homo sapiens
ctgctgcaggcctccatcctggcgtacctggtcgtatcactgtcgtcttcctgaaagatgagaagtaccattctttgcctatcatcattaaaggcagcgt

SEQ ID NO: 207900 - DNA, 100 bp, Homo sapiens
ggagtcagcagaactgaaatagtaatggaggggaaagttccagtcgcagcgctgagaagcgatcagctgaagaagaagctgccgacctcccaacaaagcc

SEQ ID NO: 207901 - DNA, 90 bp, Homo sapiens
ggctatctatccaccatgtgggaggaggaaaatcatcttatcagacgaaggcaaaatgtatgttattaccccattcaagttgacaactga

SEQ ID NO: 207902 - DNA, 100 bp, Homo sapiens
gcttacttcgcctcagtgctcaccaccatcgggaactggctgcgagtagtgtcccgccgcactcgggcagagacaaccttttagtcctcacggtggccac

SEQ ID NO: 207903 - DNA, 100 bp, Homo sapiens
tctaggactggactcttcctaagcaagtccggtgtcatggagaaactccagctgggcccagagattctgcagcgggaaaatccaaggcttatttatgcca

SEQ ID NO: 207904 - DNA, 83 bp, Homo sapiens
cgaggagaagcgcagcgacggcgtcgggagagcgcgcctagccggctcgcgagattatattccatcacaacaagatattctgc

SEQ ID NO: 207905 - DNA, 75 bp, Homo sapiens
atttcatccaccacattacttaggtgaagtcttcgtcttaaatgatggtggagaagttgatttagaccttggaaa

SEQ ID NO: 207906 - DNA, 101 bp, Homo sapiens
aagactacaagagatcagtcattacaatagcaacttctgttgataagttggccaattttggaatcaggagccgtagagctactttgtggattaactcagag

SEQ ID NO: 207907 - DNA, 100 bp, Homo sapiens
tttttaatgaccacaacaagcaagcatgcagcttactgcttgaaaggacgtgctgagaagcaacctggtgcaggtgaaggtggagaaagaggcttcctgt

SEQ ID NO: 207908 - DNA, 123 bp, Homo sapiens
cctgcccaacttctgcgggatcttcaaccacctcgagcggctgctggacgaagggttgggggatccagctatctgtaattgtgaagtgaagaggatgtgactgccaggtaatgctaaccccga

SEQ ID NO: 207909 - DNA, 100 bp, Homo sapiens
cggtggtgaggcaggctcgcctcctccagctgttgttgctgctgaattgtctatttcacagcaatattaccagtgacttgaaagcatttacagacaagtt

SEQ ID NO: 207910 - DNA, 82 bp, Homo sapiens
aggcacagccgacgccgcggggctggagtgcagtggcgagatctcgactcactgcaggctccgactccccagttcaagcgat

SEQ ID NO: 207911 - DNA, 75 bp, Homo sapiens
cccgaagccccctgcaggaactctacaacccaatccaggtctaacttcaaacttgtggctgttaattcaaaactc

SEQ ID NO: 207912 - DNA, 95 bp, Homo sapiens
catggcctacccgggatacggaggagggcaatcagccatgactgcctttgcactgtccatgctctcagcccaccacctcctccccctgccattgc

SEQ ID NO: 207913 - DNA, 100 bp, Homo sapiens
atgatgctgatggtgatggagattttgatgtggatgatgccaaagttttattaggcatttattaatacagcaaaagaaatttatgaaaaaattcaagaag

SEQ ID NO: 207914 - DNA, 50 bp, Homo sapiens
gcctccagagtagctgggattacagaaatggggtttcaccatgttgccca

SEQ ID NO: 207915 - DNA, 100 bp, Homo sapiens
tttgggctgcctccggagtcacagtgtcttgggccgccggaagtgtaccacatgaaggaagatggttgggtgaaagtagaaagtacagatgtcagtgacc

SEQ ID NO: 207916 - DNA, 157 bp, Homo sapiens
tggagcagtgcctgatcctgcaacacgagcatggcatggccccgcaggtcttcacccaggccctggagtgcatgcgcagaggagagaacacgtcttacaggatggaagagaaaagtgatttcatgctagaaaaattggaaactaaaagtgtgtagct

SEQ ID NO: 207917 - DNA, 101 bp, Homo sapiens
cccgggccatggccgccgccgatgccgagctccaattaaggaacagctatatcctgcttccttctgtaagcagcatcgacttgtgcaagggttcagtcatg

SEQ ID NO: 207918 - DNA, 75 bp, Homo sapiens
ggccttcgtacccgtcttgattgagtccaatggatgggaccccaatgaaatgttcaagttcaatgaggagaacta

SEQ ID NO: 207919 - DNA, 100 bp, Homo sapiens
cccacagcccctgccacatccatgctcactgtctctttgaacgcaatggtgcagtgtcctgccaggaagtactgtgagagtcttgcctgttgccgcccac

SEQ ID NO: 207920 - DNA, 101 bp, Homo sapiens
atacccaggctcagaccactgcaacctatgggcagaccgcctatgcaacttcttatggacagcctcccactgcggagtttaagagagctgtgaaagtagca

SEQ ID NO: 207921 - DNA, 100 bp, Homo sapiens
agatctctgagacgctgaagacccggggcatctttgagaccaagtttctctctcagatcgagagggaaagcaggcaggatgggagagtcgccgatagaac

SEQ ID NO: 207922 - DNA, 98 bp, Homo sapiens
tctgacctccagcgggcatcaggagcaggacacagaactgggcagtacccacacagcagcacaatcctggaggaagagaaggctcagcaagaagagcg

SEQ ID NO: 207923 - DNA, 86 bp, Homo sapiens
ctgcaggttacaagcagcagatcccaccttcagtcctggctctgacaagccctccaggctgcctgctgtttcccggggagatcatg

SEQ ID NO: 207924 - DNA, 100 bp, Homo sapiens
aggcattgtgggtgtcctggttctccatcattgtcaccctggccctcgcggtggctgcctttagcaccttggaagttgttttcaaccatatccagccttt

SEQ ID NO: 207925 - DNA, 100 bp, Homo sapiens
ctctgggagcctagaatgcatcagtgcccttgtggcgaatggggctcacgtcgagaggtgcttgaactcgctttctccatcttgtatgactcaaactgcc

SEQ ID NO: 207926 - DNA, 75 bp, Homo sapiens
aaacagacatttacaaacagatacgtgctaataagcaatgaatcctccaatgtacctgactctcccttcgcgaag

SEQ ID NO: 207927 - DNA, 50 bp, Homo sapiens
ctcctgagtagctggggctacagacttttggaaaagaatttgataaacat

SEQ ID NO: 207928 - DNA, 50 bp, Homo sapiens
agcctgtcgtgatcgacaactccatgatggcagtgaagaagaagacgatg

SEQ ID NO: 207929 - DNA, 100 bp, Homo sapiens
agccaccacgagcccagagggacagcccaaggtccaccgagcccgcaaaaccatgtccaaaccaggaaatggacaggctcgagaactcttcctaaaagca

SEQ ID NO: 207930 - DNA, 74 bp, Homo sapiens
gaagcggccaccgactactgtcagcagctgtgccagcgtctgggagtatattttgatgaatattcaggagaatc

SEQ ID NO: 207931 - DNA, 51 bp, Homo sapiens
ccagactcgtgggggaaaggctgttctggacatggcaagacatgtgccact

SEQ ID NO: 207932 - DNA, 83 bp, Homo sapiens
gttttggctctgcgtgagtgtggtctacgagctgtttctcatctttatactcttccaggctgaccccgcactacatctaccca

SEQ ID NO: 207933 - DNA, 95 bp, Homo sapiens
cagctaccaatcatgtgactccagaagagaaagagcaggtatattgagatcttcagaagtagcaggagtgaaatcaaaggattttatgatccacc

SEQ ID NO: 207934 - DNA, 46 bp, Homo sapiens
taacgagttcatcacctggagccagatgatgaaacatgcttggaat

SEQ ID NO: 207935 - DNA, 74 bp, Homo sapiens
cttcagatggaggataagaatggacggctatcatggcagaaggaaaacagcatgctctatgtgttggagtcatg

SEQ ID NO: 207936 - DNA, 100 bp, Homo sapiens
gctgttctttcccaaacccatactaatgttcatatgcagaccatcgaaagactggttaagttatgaagacagtatggagtttccagaccatagtagacat

SEQ ID NO: 207937 - DNA, 100 bp, Homo sapiens
atccaaaagagtctcaaggatccttcaaataacttcagggttggatggcaagcatgtggtgtttggcaaagtgaaagaaggcatgaatattgtggaggcc

SEQ ID NO: 207938 - DNA, 100 bp, Homo sapiens
caaatctgaagatgaaacagagtatggctgcagaggatccatctgtcttagcaaggctgtcatcacaagaaatggtcaatgcatggtttgctgagagagt

SEQ ID NO: 207939 - DNA, 100 bp, Homo sapiens
agcgcgagagatggagatgggcagacggattcatttagagctgcggaacaggacgccctctgatgatcagttcgacagcttagacaagcatacacaatgg

SEQ ID NO: 207940 - DNA, 86 bp, Homo sapiens
cacagcttctcaaggtgcatcactgtgcatgggacaaatggcttgctaatgagctgaagcacattattggggctgagacaacacgg

SEQ ID NO: 207941 - DNA, 75 bp, Homo sapiens
cagagccatactgcgttatagcggccgtgagaggagctcaagcacttcgaagccaaaatcgagaagcacaaccac

SEQ ID NO: 207942 - DNA, 83 bp, Homo sapiens
gtgcttactcacggcgttagttacacaggtgatttccttaagaaaaaataaagcttcaccaagaaggttgcccaggaaacggg

SEQ ID NO: 207943 - DNA, 75 bp, Homo sapiens
tctccagtgtaatgattattgacaacaggctgacaagacctacatgttacgagaatatacgtcacgagaaagcaa

SEQ ID NO: 207944 - DNA, 112 bp, Homo sapiens
gaaaattagccattgaacgagctaagccttatcatctgtcaacatcatcagtttttcgattaggtatctggccaggaacagtcttcacggggacaaagaattttatctattc

SEQ ID NO: 207945 - DNA, 90 bp, Homo sapiens
cggcaagtgagcgatttggtgaacagacactcccttctgtagctgacctcaagagaatttgcaagacaatagttgaggctgcaagtgatg

SEQ ID NO: 207946 - DNA, 82 bp, Homo sapiens
agaagggcaaggtccctgtcacctacttggaactgctcagctagggggtccactggacggggcctgagctacaacttcaccc

SEQ ID NO: 207947 - DNA, 99 bp, Homo sapiens
gacagccagtgagaagaatgagtataaaggatgggttttaactacagacccagtctctgccaaagagaaacaggcggccaccaagtcgctgaagcagaa

SEQ ID NO: 207948 - DNA, 100 bp, Homo sapiens
gcgtaggggccgttgcccgcgatggaccgcaccggagacgctccggactcgtcgccgcagcctggaagctccgaccccaggagccagcccatcaacctga

SEQ ID NO: 207949 - DNA, 101 bp, Homo sapiens
aatgtgccgtgatgtatgtgaacaggatgatcctttcaaaaataaagccttgttatttagcaacaacacgcaagagttgcatccggatcctttccagacag

SEQ ID NO: 207950 - DNA, 90 bp, Homo sapiens
aatcacttgggttcattctattcagattggttgtgatcgtagccaaaaccttgtggacatttgtagagagaggcaatttcaggcttttgt

SEQ ID NO: 207951 - DNA, 82 bp, Homo sapiens
gagaatcgcacctaccaggcttccagcccggatgagatggccaccatgtctgggagatggaagcgaaaactgaccgggacct

SEQ ID NO: 207952 - DNA, 90 bp, Homo sapiens
agaaccaactggttgaggttcaatgcagacaagacggatgtgatgctgacccaagaggtataggtcctattattttccatatcttacaaa

SEQ ID NO: 207953 - DNA, 50 bp, Homo sapiens
gctgaacggacagcttcagaaataaattattccttcgcctcagaaaccaa

SEQ ID NO: 207954 - DNA, 100 bp, Homo sapiens
tcttgacttagttgctgggagcctgccctgtatgatgagattcgtcagtttcgcaaggcctgtggggaggctcatcttaaaactatattagcgacaggag

SEQ ID NO: 207955 - DNA, 74 bp, Homo sapiens
agaagaaggtgtactcctttctattttaaagagccaagcctcagagaaagaagctcattcacacagaagaccca

SEQ ID NO: 207956 - DNA, 75 bp, Homo sapiens
aagccagtggagttctccctgtttcacagattgtccagaacatcgtgggcacagctctgatgattttagtggcca

SEQ ID NO: 207957 - DNA, 104 bp, Homo sapiens
agaccctggagcctcagttggaagcagccgatccagcctgcggagcctgtggggcagcagtcctgcgttaactgcggccgggaggctatgagcgagtgcaccgg

SEQ ID NO: 207958 - DNA, 97 bp, Homo sapiens
ggagactgcaaggataggcccaggaaagtaatggtccaacagacagttatgcagctatttcacaagtggatcgattgcagtcagagcctgaaagtat

SEQ ID NO: 207959 - DNA, 75 bp, Homo sapiens
cagaagttcacctgcacatcttgttttccctaacatcaagaatggaaaaccagtagattcccagacatcgcgaag

SEQ ID NO: 207960 - DNA, 75 bp, Homo sapiens
ggtgagcactggcaccagtaatggtgtgaaatggcctttccccgggtcaagccagcacctgatgaaacttccttc

SEQ ID NO: 207961 - DNA, 101 bp, Homo sapiens
gggattttatgctgatcacaaacaaatccttgaaagaagaagatggagaagaaatagttacctatgatcgtgtctgacttccagcaactgctggcctgtgc

SEQ ID NO: 207962 - DNA, 98 bp, Homo sapiens
cgggagcccgccggcggtggcgcggcggagacccggctgggttcgatacaagaggctgttttcctagcgtggcttgctgcctttggtaagaacatgtc

SEQ ID NO: 207963 - DNA, 100 bp, Homo sapiens
ccggccacgaggttgaggccgaaaggcgcaccgaatcgcccaggagatgaagaggggatattggccctttggccaggagaaactggcgatggaatatgag

SEQ ID NO: 207964 - DNA, 100 bp, Homo sapiens
gctcactgcagcctcaacttcttgtcctcaagtgatcctcccaccttagcctcctaagtagctgggaccacaggtttggacttctcccactgagcatgac

SEQ ID NO: 207965 - DNA, 95 bp, Homo sapiens
ctctggccactatggaattctaatttgaaccatgtttggattgaagccgcctctgtattacttaccagctatgacatggtgcattacggccactc

SEQ ID NO: 207966 - DNA, 97 bp, Homo sapiens
cagaagctacagactcttgtttctgaacagcataagcagtactataatggatgtagacagcacaatttccagtgggcgttcaactccagcaatgatg

SEQ ID NO: 207967 - DNA, 75 bp, Homo sapiens
cgagaagccagtcacgccgggagctggtacacagcctcaggtttccacttgagcggcacagtgacagaacctgca

SEQ ID NO: 207968 - DNA, 118 bp, Homo sapiens
cgcagaccgtctggaaatgcgaatcctaaagcgtttcctcgcttgcattcagctcctctgtgtttgccgcctgggaagctgcactgcaccaggaattacatccacctgaacctgttcc

SEQ ID NO: 207969 - DNA, 101 bp, Homo sapiens
gagctgctagagatccggaagcacagccccgaggtgtgcgaagccaccaagagttgatccctgaattttattatctccctgagatgtttgtcaacttcaat

SEQ ID NO: 207970 - DNA, 97 bp, Homo sapiens
atcaataagctcttctttgatcttgcccaggaggaggagaatgtcttggatgcagaattcttaaagtggtttgctaagaaggccattttcaactctc

SEQ ID NO: 207971 - DNA, 100 bp, Homo sapiens
tgaccacaacaagcaagcatgcagcttactgcttgaaaggaagaaaaaatgctgggcatcttggtgcagcacaaagtccggagtggcgtctcgggcatcg

SEQ ID NO: 207972 - DNA, 101 bp, Homo sapiens
acccggttccccggcccacagtgggggtgtgcaaacccgagagaactggattagaagcccaggacccaggaaggagacacaggaaatttattcaaagtccc

SEQ ID NO: 207973 - DNA, 90 bp, Homo sapiens
tctgcagtccctcgtccagccacccccagcccttagtgggacataatatgatgatggacctgctgcacctccatgagaagttcttcagac

SEQ ID NO: 207974 - DNA, 89 bp, Homo sapiens
aggggagtaaattgaaaatattggggccatttagtaacttctttgcaaggaagctcttcgtgggcggtcttgactggagcacgacccaa

SEQ ID NO: 207975 - DNA, 74 bp, Homo sapiens
atcattctgcaagcaggcaacctgaatacagaggtgtgttgcagtcactcattgaaaaacattttcctgctcca

SEQ ID NO: 207976 - DNA, 100 bp, Homo sapiens
agctccacgaaaggcagccgcggatcgccgcgctcagcgacaaacaagttctggcctataggaacaagacattttcagtaatggaagaaggagcttccag

SEQ ID NO: 207977 - DNA, 75 bp, Homo sapiens
atcccccactctttccgccctaatggaggtctccagtttcgatggactcaccctgtcacccaggttggactgcac

SEQ ID NO: 207978 - DNA, 74 bp, Homo sapiens
caggatacctacaatttggatacagataccatctcaaagggtaatcttccaggctggctacagcaaacatcatt

SEQ ID NO: 207979 - DNA, 97 bp, Homo sapiens
cctggttaatcaagaattctctatttctgctccgtcatccatgccactgaaaatgtttataggaggccttagctgggacactacaaagaaagatctg

SEQ ID NO: 207980 - DNA, 100 bp, Homo sapiens
ctgaagaagaagggcaaggagaaggcggaagcacagcaggtggcaagttatggtgtgaagccaagatatggtctagtgacatatgccacataccccaaaa

SEQ ID NO: 207981 - DNA, 100 bp, Homo sapiens
ctaaacaacaggatgaaacccataaattggtgtctgcctgtatcccagtgttcaggctggctagacggcggaagaagatcctattttactgtcacttccc

SEQ ID NO: 207982 - DNA, 98 bp, Homo sapiens
ggatcagaccgtagcccttccggaaacctccatggtaccagcctccgaacctcgccatctctaccctctactggaaggcctggcccctcctgctggtc

SEQ ID NO: 207983 - DNA, 83 bp, Homo sapiens
ggacgctctcagctctcggcgcacggcccagcaattctgtggtgttcttggtcacacatttatggagtttctgaagggcagtg

SEQ ID NO: 207984 - DNA, 83 bp, Homo sapiens
gccacacagtgtgcctgcaacctgtccggggatcccagggagatgaaggatttgggggcagagcacttggcaggtcatgaagg

SEQ ID NO: 207985 - DNA, 100 bp, Homo sapiens
ggggtgcgcccaagcggggctctggcaagagactaaggtgtcagtatgttcttcaagctgctctgctcctgggcccaagctattctcctgcctcagcctt

SEQ ID NO: 207986 - DNA, 90 bp, Homo sapiens
tgttgagtatgctccatgtagatcacgtgctggagaatctggtaaaagcaccattgtgaagcagatgaggatcctgcatgttaatgggtt

SEQ ID NO: 207987 - DNA, 50 bp, Homo sapiens
agcaacagctcggcgggctggaagtcaggatggctaaaggtgaccccaag

SEQ ID NO: 207988 - DNA, 100 bp, Homo sapiens
gcagcggccaccatggccacgcctgggctccagcagcatcaggtccaacccagatcaaccaagtggtgagtcatccaaaccagcctctcaccatcaccgc

SEQ ID NO: 207989 - DNA, 97 bp, Homo sapiens
ccgtgtccaagggggacgggatgcggggcctggcggtcttcatctcggatatccgcaactgtgtacatcggtgagctcccgcaggacttcctccgca

SEQ ID NO: 207990 - DNA, 51 bp, Homo sapiens
gatctccttaacggacacgcagagtcacagtaatgaaaggcagtaatagaa

SEQ ID NO: 207991 - DNA, 75 bp, Homo sapiens
ccctgacgcacgagctcctggcactggacgtgcccaacaccatgctggctgaaaaagcttctgatcctgcaagtt

SEQ ID NO: 207992 - DNA, 50 bp, Homo sapiens
tgataagatggcttcggagggaatgagtttgcgcgataacaatatctcag

SEQ ID NO: 207993 - DNA, 100 bp, Homo sapiens
agcagccgtccggagccagccaacgagcggaattcattgaagagttgctgtctcccccttttgggggtttagtggcatttgtgaaggaggctgaggcttt

SEQ ID NO: 207994 - DNA, 96 bp, Homo sapiens
ggctaatggatactacagacaacagagaaaacttgttgaagagattggctggtcctatacaggagcatattaatgaaaagtgccataaactgaaaa

SEQ ID NO: 207995 - DNA, 100 bp, Homo sapiens
cattaacagggtctacagagaggcatagttgttgcccaaatctcttggtacagaatgtttttgtagaaacacacaacaggaattttccattggtggcatt

SEQ ID NO: 207996 - DNA, 100 bp, Homo sapiens
gacgtcgtgatccagaagtccagagctgaggactgcctgtttgcaggtgcacaatgcccaccttcacagcaggaaggactcaaattggaacacagtagta

SEQ ID NO: 207997 - DNA, 95 bp, Homo sapiens
acctgcagaaggtctctggagacatcttcagcagggtatgcggccccctacctgacagtgttcagcgagaactccatcgatgtgtttgacgtgag

SEQ ID NO: 207998 - DNA, 83 bp, Homo sapiens
gacatgttcacgcacgggatccagagcgccgcgcacttcgtcatgttcttcgcgccctggcgtcacaatgtagcagggacccc

SEQ ID NO: 207999 - DNA, 50 bp, Homo sapiens
cctactccaccatcatcaacaaagtttcagagtggcagaatcacaccacc

SEQ ID NO: 208000 - DNA, 90 bp, Homo sapiens
cggcagaggatccagtgttcaccatcctggccccggaaggccgccatggcatcagatgaaggcaaactttttgttggagggctgagtttt

SEQ ID NO: 208001 - DNA, 98 bp, Homo sapiens
ttgttatgacggagactgccatgatctcgatgcacgttgtgagagtgtatttggaaaagtttggacaaatcactgtggagacatttgcttccattgtt

SEQ ID NO: 208002 - DNA, 82 bp, Homo sapiens
caaggagctaaagcagcgtgcgttcagccctgggccacaatggtgcgcatgaatgtcctggcagatgctctcaagagtatca

SEQ ID NO: 208003 - DNA, 115 bp, Homo sapiens
gtgggagcaagtgtgctacagtgcttggctactggaaactggaattctgttcctccagaatgccaagttctttatagctccaagctctacagattcttcaaatatattgagaata

SEQ ID NO: 208004 - DNA, 99 bp, Homo sapiens
atttggcctggttgtgaaatccgatacttagaagggggtcatattagtgcttatctttttaaacaaggactcttcagatcactacagatctgaggcagc

SEQ ID NO: 208005 - DNA, 100 bp, Homo sapiens
gttgatgatcctcgaaacactgataatgcatggatggagacagaagctgtgaactaccatgacgaaacagctcggcttattccaggggtgtgtttcgtcg

SEQ ID NO: 208006 - DNA, 101 bp, Homo sapiens
ccaagatggaagaattcaaggaccaattacctgctgatgaggaccttcgagagattgaaaatgaagatatgagagtgcaactaaatgtgtttgatgaacaa

SEQ ID NO: 208007 - DNA, 90 bp, Homo sapiens
cagtatttaaccagaataactatagttgggcatcgatgggctgattgttacgaacaccaccgtgagtcgccctgcgggcctccagggtgc

SEQ ID NO: 208008 - DNA, 90 bp, Homo sapiens
gaaggtttttcttttcattagaaaccgcacagaaacagagcaaatgcagcgttacaatcaaagacttattgaggaattgaaaaacagaca

SEQ ID NO: 208009 - DNA, 100 bp, Homo sapiens
aagcgccaagacgtggacactgagccccagaaacgaaatacagaggagtcatcctcacctgttaggctcctctggtgcaagtgtggtagctattgacaac

SEQ ID NO: 208010 - DNA, 74 bp, Homo sapiens
gatgatgttttgtttgtttgtgaaggagagccatttattgctacatctacatccaccactgggacaagccatct

SEQ ID NO: 208011 - DNA, 51 bp, Homo sapiens
agatacagctgaaggacagctcaagtgaagagcgattatatgttagagata

SEQ ID NO: 208012 - DNA, 83 bp, Homo sapiens
tgtggacagtgacagcgatgctgaggatcgaggaacgttgtctgctcaccatggatgatgatatcgccgcgctcgtcgtcgac

SEQ ID NO: 208013 - DNA, 83 bp, Homo sapiens
cgccgcccgaggccgtcggccgccgtcagcgagggcgccgagcaacttcgggaaatcctcattgacgattcaatttgttgaag

SEQ ID NO: 208014 - DNA, 50 bp, Homo sapiens
ctcttgcactttacagaactgatgatctattatcctcccagtccacaacg

SEQ ID NO: 208015 - DNA, 90 bp, Homo sapiens
ccgccggcgccgaacttgggctcgggaagccggcggaccgcgtcctgcgccggagcagggctcacccacctcattggatctcctttcctc

SEQ ID NO: 208016 - DNA, 75 bp, Homo sapiens
ttggggttggtgctgttggcatggcctgtgccatcagtatcttaatgaaggactgctgcagatcaatgacaaaat

SEQ ID NO: 208017 - DNA, 87 bp, Homo sapiens
gcaagaagaagctgtatcttatctatggaagataaagcatggagttggctaatggatgctggccaagtcctgtatctgccatgtctg

SEQ ID NO: 208018 - DNA, 100 bp, Homo sapiens
cccggagcccctttagccatgtggatacctacggagcacgagaaatacggcgtggattcctcagttccttttagatgattgctttaaaaatggtatcccc

SEQ ID NO: 208019 - DNA, 75 bp, Homo sapiens
ccaggagtgagtcggagctgccgcgctgcccaggccatggactgtgagcctgtctctcttgctgatcgagaggtg

SEQ ID NO: 208020 - DNA, 98 bp, Homo sapiens
atataatggccaagaggaatcagaaacctgaagttagaaaggctcaacgagaacaagctatcagtgacctactgatagagaatacttcactcactgtc

SEQ ID NO: 208021 - DNA, 82 bp, Homo sapiens
cgcgtgtctaggtgagtcgcggtgggtcctcgcttgcagttcagcgaccacgattggcggcagtaagcacacaatgaatgat

SEQ ID NO: 208022 - DNA, 99 bp, Homo sapiens
gagaagttgctctgtgtgctgagcgttctaaaggaaggcgtccgttggccttcgtacccgtcttgattgagggtgttttgaatgctgtatcaaatgcct

SEQ ID NO: 208023 - DNA, 50 bp, Homo sapiens
ccgggaccggccgaaaggcgaggaaccggctgaccccgcactacatctac

SEQ ID NO: 208024 - DNA, 100 bp, Homo sapiens
caaactctggagtaattggagccaagaaatgagtataggttgatgaaaagcccagaaccttgatgacagattgtctggttataaagcattttttacgtaa

SEQ ID NO: 208025 - DNA, 74 bp, Homo sapiens
tttggatgtagcaaggaagaaattgttcagttcttctcagagccgtcttcccagtccaccgtccccatcgtggg

SEQ ID NO: 208026 - DNA, 89 bp, Homo sapiens
acagttcctgggaaggtggagccaccagcctctccttggttcgagaacttgtcttggacaattgcaaatcaaatgatggaaaaattgag

SEQ ID NO: 208027 - DNA, 82 bp, Homo sapiens
ttctttgacgtccagaagaccaagtacctgcagatcctgacctctctgatgagatggatcgatgatgataattccgaagaag

SEQ ID NO: 208028 - DNA, 86 bp, Homo sapiens
gtagtagaaaccaccaaaccaatttctcctgcaaaccagggtatcagagttatcaggaactgttgccgttattacatcagatggga

SEQ ID NO: 208029 - DNA, 100 bp, Homo sapiens
gtgtgcccgcatgcctggcctaaagggcttcgtggatgagcacaccatcaacatctccctcagtctgcaccgtgcagacaaccatgcgtgaaaacctggc

SEQ ID NO: 208030 - DNA, 51 bp, Homo sapiens
ttgcaaggagaagacgcagccgtcagccttgttgtcctcctggtgcgaaga

SEQ ID NO: 208031 - DNA, 80 bp, Homo sapiens
agaaaatggactccctggctgctggagagttgaatgccagccaccagccatgggcatcaagcatgatggaaccatgtgtg

SEQ ID NO: 208032 - DNA, 154 bp, Homo sapiens
ttacttgagagtaaaattctgctgcattctcttaggccagctgtcttgactggggtagctgaagctgttgtagctgcttgcattgatgacaatgttgatatggtgaagtttctggtagaaaatggagcaaatattaatcaacctgataatgaag

SEQ ID NO: 208033 - DNA, 82 bp, Homo sapiens
cttttgttgtatttaatttttggaacaatttgatgagctaggagatatgagggaaggcaccattggagatatggctatcctg

SEQ ID NO: 208034 - DNA, 82 bp, Homo sapiens
ctatagatattttgatcccaaaatgctgcggggcaatgacagagtcctgccaaatatcacaaaacctagatattatgaagga

SEQ ID NO: 208035 - DNA, 74 bp, Homo sapiens
caatttgtccgtaaccttgtggagaagaccccggcgctggtgaacggtatcatgaactgatcactaaatatggg

SEQ ID NO: 208036 - DNA, 87 bp, Homo sapiens
accatgacaggctcagccaaagtaaatccatgatcctcaccgatgtcgggaaggtcactgaacctgctggacgtaaagaaagaagtg

SEQ ID NO: 208037 - DNA, 80 bp, Homo sapiens
gaggctgaggacacaggtgtggacacagagtccggcagcgtcttctcttgagggagcaatttggagaagagctggaaccc

SEQ ID NO: 208038 - DNA, 98 bp, Homo sapiens
gagaaggcagctgtgactgaggcagtgcgggccctgctgtgtgtgaatgagcttaaccagtggctgtctgcgctgcggaaggtgagcatcaacaacac

SEQ ID NO: 208039 - DNA, 83 bp, Homo sapiens
cttagactaccccaggaacccgcgccgcgagggctccttccctcagtaggagctgtggcgcggggccttccaggagtctgagc

SEQ ID NO: 208040 - DNA, 100 bp, Homo sapiens
ttcctcagaatgtgaaggattatttactcgatgatggaactctggtggtttcaggaagattcacctggtaactgaagaggagggatcagctaatatgtat

SEQ ID NO: 208041 - DNA, 51 bp, Homo sapiens
tctctgtgtcgttcattcgtactatacagaactgataaatttcaaacggaa

SEQ ID NO: 208042 - DNA, 106 bp, Homo sapiens
cgcgtgtcctcggagcgcggtccctgtattggtctcctgctcctagaggctctacagattctcccctgcccctggagaaggaggagcaggtccgacttcaggctcg

SEQ ID NO: 208043 - DNA, 96 bp, Homo sapiens
tggaatcttggccaaaatcgtgatttctagaagctctcaatcactttgagaaagcaagaaccttgatttatcgtcttcctggagtgttaacttggc

SEQ ID NO: 208044 - DNA, 100 bp, Homo sapiens
gaccattcagatgggatctttccggatcaatccagatggcagccagtcagtggtggagagtactcctgattgtgacatcacattcatcccctgggcgatg

SEQ ID NO: 208045 - DNA, 74 bp, Homo sapiens
aaagaagacaatcaagtcgacgttcgcttctttggccaccaccaccagagcttattgcaggagtgaccaggaca

SEQ ID NO: 208046 - DNA, 101 bp, Homo sapiens
tcagtgagttctcccgccctcttggtgaggtgatgacgccaaggattgaactggtggtggctccagcaggtgtgacgttgaaagaggcaaatgagatcctg

SEQ ID NO: 208047 - DNA, 75 bp, Homo sapiens
caaagatggtacaaaagagtctttggaggatgcggctttgatgggccaccaggaaaccctccccgaagaatgggt

SEQ ID NO: 208048 - DNA, 82 bp, Homo sapiens
cgacttcctcacccgcgcctgcgacctcgcgagcagctgatgcagctgtacagtgcgcgccagcggcggcggctgaaccggg

SEQ ID NO: 208049 - DNA, 82 bp, Homo sapiens
gatcagagaaaacaagcaaatgctgccttccttgttggatgctacatggtgaccaagaatatggcccaggtgaccaaagccc

SEQ ID NO: 208050 - DNA, 90 bp, Homo sapiens
cagggagccaagcgtcctgcccggccgttgaaaggattgttgacaaaaggaaaaataaaaaagggaagacagagtatttggttcggtgga

SEQ ID NO: 208051 - DNA, 51 bp, Homo sapiens
cagacaaccgccctgtgagcttctacaaatattctctaagccgctttcatc

SEQ ID NO: 208052 - DNA, 115 bp, Homo sapiens
agtgaggctcagagatgcctgtaccgtgatgtgacgctggagaacctggcacttatgtcctccctgggttacaggaaatacaggaggcagaggaacaaataaaagacaccacgag

SEQ ID NO: 208053 - DNA, 75 bp, Homo sapiens
cgtccaccggcggctccgcaagaagtaccgagaagttccacttacttacatgatcatttcgagagatgtaatgtt

SEQ ID NO: 208054 - DNA, 88 bp, Homo sapiens
actggcctgctgctggcccgcagggtggtagagaaaacgaaccctacagaaccagttggagtggtttgccgagtggatggagtttacc

SEQ ID NO: 208055 - DNA, 100 bp, Homo sapiens
atgggccagtgcggcatcacctcctccaagaccgtgctggtctttctcaacctcatcttctggttggtgcttcccgtgctgctgttgatgctggctttgt

SEQ ID NO: 208056 - DNA, 75 bp, Homo sapiens
gagtaagaggggttggctgtgaatgtgccactgattaatgaacttgaatcagcaatacatcagctgtacaaacag

SEQ ID NO: 208057 - DNA, 81 bp, Homo sapiens
ccaggcctcagcagtgaccctattgctcttggaggaggcctcggtggtaccagaagaggaggggctgatgtgaacatccgg

SEQ ID NO: 208058 - DNA, 75 bp, Homo sapiens
agaagaacggaaacgaaggcggaaaggatccaaggagggcccgacaacaagctcaaatacgtcaccaaatggcag

SEQ ID NO: 208059 - DNA, 100 bp, Homo sapiens
ttttgcaatacctctacagatttattcagcaccaaccaagaatgacagcccatatcaaggcggtgtattctttttgacaattcattttcctacagactac

SEQ ID NO: 208060 - DNA, 100 bp, Homo sapiens
ggagatctctctcatctcgctcggctgcgggaaatcgggctgaagcgactgagtccgcgatggagatgaacaagtgcttcctcacaacttgaagcttcta

SEQ ID NO: 208061 - DNA, 75 bp, Homo sapiens
cccggagaggagcctcggccccgtacccagagccagtcttggtgctctgtgttcacctggttcatctgaggagct

SEQ ID NO: 208062 - DNA, 101 bp, Homo sapiens
gagagtttctgcaagacatgacacaaagctgctagcagaaaatcaaaacgctgattaaaagaagcacgatgtgttcagagcaacattgttttgttgacaca

SEQ ID NO: 208063 - DNA, 101 bp, Homo sapiens
ctcggctgccgccaaggtgttcggtccttccgaggaagctaaggccgcgttggggtgagaccctcacttcatccgggtcctggtcctggacaaaggagtag

SEQ ID NO: 208064 - DNA, 100 bp, Homo sapiens
tgacttccctggatttgatgagcgggctgatgcagaaactcttcggaaggctatgaaaggcttggacgccctcctgcaaaacggcccaactacgttaagc

SEQ ID NO: 208065 - DNA, 75 bp, Homo sapiens
ctcgggcgccttcgtctgcctggagattatttctcagctgaatacactgattacacttttgctgggagaacttcc

SEQ ID NO: 208066 - DNA, 50 bp, Homo sapiens
cgcaggttttggactcgctgaagcggagtagctcggagaggaggaaggag

SEQ ID NO: 208067 - DNA, 90 bp, Homo sapiens
gggtacctgtacatgtacaacctggacccccaggagggcggcgagtgtgccctgatgaagcagcaccgtgattacagtggcgagatcttg

SEQ ID NO: 208068 - DNA, 75 bp, Homo sapiens
agcacctttcggcttctgagacggcggcagcagcggcattcagatttaatccagagactgacttcactatagaac

SEQ ID NO: 208069 - DNA, 100 bp, Homo sapiens
ccagtcattttggcctccattgtggacagctacgagagacgcaacgagggtgctgcccgagttatcgggaccctgttggatgatgaggagtctgatgagg

SEQ ID NO: 208070 - DNA, 74 bp, Homo sapiens
ctgagggcaaaacccagagcagacaccgcagccaccgcggatgcaaactgagcttcagtcattgtctattcctg

SEQ ID NO: 208071 - DNA, 80 bp, Homo sapiens
cgcggacatcgtctcctgtgtggcgatggtcttcctgctggggctcatgtttgaggctgaaactgccgccaaccggatct

SEQ ID NO: 208072 - DNA, 83 bp, Homo sapiens
aaggaacgaggcaaggagctaaagcagcgtgcgttcagccctgggcactttcatttggacccgtggatacccattgaacagat

SEQ ID NO: 208073 - DNA, 90 bp, Homo sapiens
accagccagtggagctgctgaatcctgcccgcgtgaaccacatgcccagcacgggtgagcacctgcggatctgtccccagggctacacct

SEQ ID NO: 208074 - DNA, 82 bp, Homo sapiens
gcggacctaactagctccaggttaggccgagctttgcgggaaagcagcgataacgaaggaggcccaacttcattcaataagg

SEQ ID NO: 208075 - DNA, 50 bp, Homo sapiens
ggtggtgaatcctccatagtctgactcagcccacctgcacccaggtgaaa

SEQ ID NO: 208076 - DNA, 80 bp, Homo sapiens
tcactgtgttatgtcttcggaactgggaccaaggtcaccgtcctaggttatcaatactctggctgaccatcatcatcgtg

SEQ ID NO: 208077 - DNA, 83 bp, Homo sapiens
tgagtattggagccaggagcctgccatgaggtcaaaatgcagatcttcgtgaaaacccttaccggcaagaccatcacccttga

SEQ ID NO: 208078 - DNA, 82 bp, Homo sapiens
aggcggtgacagagtggagccatggctagagggaaagcaggcaggatgggagagtcgccgatagaaccacctcttccctgcc

SEQ ID NO: 208079 - DNA, 100 bp, Homo sapiens
gcggaaggtgatgcccaagatggaccagatgccacctgggacagcaagaccaggttctcgtggttgtcccatagggactggtggagttctgtcttctcaa

SEQ ID NO: 208080 - DNA, 114 bp, Homo sapiens
cagcccccggcccgcgctgcccgcactcctggtcctgctcggggctctgttcccagcaatggctgccatccggaagaaactggtgattgttggtgatggagcctgtggaaagac

SEQ ID NO: 208081 - DNA, 101 bp, Homo sapiens
gcaccaaatccaagatggcggccagcaggaggctgatgaaggtacatgtactgggcagattggggtgagacgccctggatcgagcaggtggggatggacga

SEQ ID NO: 208082 - DNA, 75 bp, Homo sapiens
cccggcgagcagggagcggagtaccagcacttcatccagcagtgcacagtttgagccccagctacatagatctga

SEQ ID NO: 208083 - DNA, 76 bp, Homo sapiens
ttccaaaggagcagttgctagtggccatttacaggaatcagccacttcagttcagattccaaatcctttatttgat

SEQ ID NO: 208084 - DNA, 100 bp, Homo sapiens
ccggggtctccctcccaggacacaggagtcaagtattctaccttgtaaatactgttatttgtatatactgtaaatgatgacatcggtgggcactaaccga

SEQ ID NO: 208085 - DNA, 83 bp, Homo sapiens
tctgggaagatggcgaaggtctcagagctttacgatgtcacttgggaaggcagctggctaagagtcttgggcaggctggtgaa

SEQ ID NO: 208086 - DNA, 100 bp, Homo sapiens
ggaacggttgagttttcggtagagctacataaattttataatgtggatctctttcagagaggagttgacgggcgccgacctgaaggactgcgtcagcaac

SEQ ID NO: 208087 - DNA, 75 bp, Homo sapiens
cggttccttggtgtcatccagccttagcaaaccagagaaacttcagcgttcccaattatggcttctctcagatcc

SEQ ID NO: 208088 - DNA, 100 bp, Homo sapiens
tagaactcagttgtgcgttgcggccagtcgccactgctcattgcagtgtcgagatggctatgaaccctgtgtaaatgaaggaatgtgtgttacctaccac

SEQ ID NO: 208089 - DNA, 106 bp, Homo sapiens
tacagaaacaaaatgtcaacaaattgatgggccaggagtggtggctcacacctgtaatcccagctctgggaggccaaggccagtggattgcttgagcccaggagtt

SEQ ID NO: 208090 - DNA, 100 bp, Homo sapiens
gacccttaataaagtgtttgcatctcagtggttgaatcataggcaagtggtgtgtggcacaaaatgcaacacggtgggcttggtgcttgcatttcctgcg

SEQ ID NO: 208091 - DNA, 75 bp, Homo sapiens
gccgttttcgcctgcagctgctcaccgtttgcgcgataacaatatctcagaccgaggcatctgcaagctcattga

SEQ ID NO: 208092 - DNA, 99 bp, Homo sapiens
attacggacgcactgaaccgcggctgggacagacacttcgggaacccgaggcggaccgggcgacgagactcatcatattcagagcccccagatgttcag

SEQ ID NO: 208093 - DNA, 98 bp, Homo sapiens
cgtgaccgagagcgcgaatatcgtcatcgttagaagggttttggccaaattgggcgagggcacaaaataaccacttaccccttctcaccgaggaagag

SEQ ID NO: 208094 - DNA, 83 bp, Homo sapiens
gcagctggtggggctctactgcgacaagaataccctctaccatctgctttggtcagggtgccgctcgaggatttaaaagcaac

SEQ ID NO: 208095 - DNA, 98 bp, Homo sapiens
ttgctcagagcaacaaccagcagcttcgggatttagggattctctccgttcagattgaaggtgttgggatggccaccaactgggggagcctcttgcag

SEQ ID NO: 208096 - DNA, 83 bp, Homo sapiens
ccagagaagaatgaggcctttctgatatgtaactggttcatcaatgcccggcggcggcttctcccagacatgcttcggaagga

SEQ ID NO: 208097 - DNA, 50 bp, Homo sapiens
tgggcgtaggaccctccgacccaggattttggccccaaacagtaattatc

SEQ ID NO: 208098 - DNA, 51 bp, Homo sapiens
gcgccggcgatgtggcgtctgtgaggtatcacaaagtcgtgaagaaaggaa

SEQ ID NO: 208099 - DNA, 74 bp, Homo sapiens
aaccaggttcaagaagaaaatgaagttctgcgtcagaaggaagagagaagggcacagttacctaagtatcaacg

SEQ ID NO: 208100 - DNA, 90 bp, Homo sapiens
tcaaagtgggacaatatcctctgtggagaacacccccccatggaggcgaggatgaatttcatcctttcatcgaagcacttctgccccacg

SEQ ID NO: 208101 - DNA, 90 bp, Homo sapiens
tgccgatttaaaattgcaactgaagcaaactcagacaggtcatagtgaaagtcaataatggcatcagagatttttccacctcagttacac

SEQ ID NO: 208102 - DNA, 100 bp, Homo sapiens
ggaaaagaaaacttggccatcctagagaaaattaaaaagaaccagaggcaagattacttaaatcacatggattaattgatgtatgttgagtttatggagc

SEQ ID NO: 208103 - DNA, 83 bp, Homo sapiens
gggttattcgagtgaccgagaccgcggccgggaccgaggttctgggaggtgatcagtgatgaacatggcatcgaccccaccgg

SEQ ID NO: 208104 - DNA, 100 bp, Homo sapiens
gatccgcaaggccgcccgggaactgctgacgcttgatgagaaggacccacggcgtctgttcgaagtgaaggagaacgacctgctcagaatgagaagagga

SEQ ID NO: 208105 - DNA, 88 bp, Homo sapiens
tgcagcgcagtggaagtcaagagcaaggactcacaccacccggcaagaactgctcactacggctccctgccccagaagtcacacggcc

SEQ ID NO: 208106 - DNA, 100 bp, Homo sapiens
ctctccttgcttggaattctgcccactctgcggagttagcagtcacgacctccagcacagaaactggcagacctttcacttcgtatccaacaaattgaaa

SEQ ID NO: 208107 - DNA, 100 bp, Homo sapiens
aaaatttcaggtcttaaatctggcctataatgaggaaatttctgtctgaccaatatcaggggcacatcagctgctgtactaagtttcttcaaatatcctg

SEQ ID NO: 208108 - DNA, 98 bp, Homo sapiens
cagcctcccgagtaggtgggattacaggtcaggaataaattagatggtcagtattatgcaataaaaaaaatcctgattaagggtgcaactaaaacagt

SEQ ID NO: 208109 - DNA, 75 bp, Homo sapiens
ttgttaaagaagagaataagatttttggaagaaaaggttgcccgaagctcagcagagagtcggaggctgcttttt

SEQ ID NO: 208110 - DNA, 83 bp, Homo sapiens
ccgagaccgtgaccgagagcgtgaccgagagcgcgaatatcgtcatcgttagaaggtgatttcaaaaggtgtaatcattcttc

SEQ ID NO: 208111 - DNA, 100 bp, Homo sapiens
ctattgggatatcctttcactctgcatggttgacagttctgccagctgtcacgggaagtctttttaggataaacgtaggcctgcgtggcctggtggctgg

SEQ ID NO: 208112 - DNA, 88 bp, Homo sapiens
catggcttccgaggagctgtacgaggtcactctgtgagactgctgggtcagaaaaaggataatggaaggcggcttgggggagcacgat

SEQ ID NO: 208113 - DNA, 50 bp, Homo sapiens
ggtgtctcttctcgccctggcggggaaggcgttggagaccagggccagcc

SEQ ID NO: 208114 - DNA, 94 bp, Homo sapiens
cggcaaagttttgcagatcttcaacaagaggacccaggagaaattcgccctcaaagtactccaaagattcaggtttactcacgtcatccagcag

SEQ ID NO: 208115 - DNA, 100 bp, Homo sapiens
tggggagtggggaatgaggcgggggtcggcccggggctcggagaatgggcagttcacacaaaagatgttggacaatttctacaattttgcttcatcattt

SEQ ID NO: 208116 - DNA, 82 bp, Homo sapiens
ctgtcttcatctttacagaggaatagtctacaaaggaagacttgtaacctggagaagagaagcaaggtctcgctgtgttacc

SEQ ID NO: 208117 - DNA, 50 bp, Homo sapiens
ttgacctagagtcatggccatgtaaaatgtttatcggtggactgagctgg

SEQ ID NO: 208118 - DNA, 100 bp, Homo sapiens
aaaaactacctgtggtaggaattggaaagcatctgtgtggtatggcaacagactctaaaatagagctcaagcttgagaagagagaaccactaaagggcag

SEQ ID NO: 208119 - DNA, 100 bp, Homo sapiens
cgacccgagttatgcccaccctccaactttgcgacggaaatgtgtcatcgaaagccagggattgttgtctgagattctgcgtaaggaagaagaccctcgg

SEQ ID NO: 208120 - DNA, 100 bp, Homo sapiens
cgagaagctgatcccatgactaaagtgcaggccgaactagatgagaccaaaatcattctgccccttgtttctgggtaatctctgggatgtgactgaccgc

SEQ ID NO: 208121 - DNA, 100 bp, Homo sapiens
aacctgaagggccttgacgatctggacgccgatgccgatgatggctgggcagattcgggaactggagcctctcctctgtcacagtgacaatccatctcag

SEQ ID NO: 208122 - DNA, 83 bp, Homo sapiens
gtgggctacacactctcctacaagcttctcacggcattcagcagcagcgttgctgtaaccgacaaagacaccttcgaattaag

SEQ ID NO: 208123 - DNA, 75 bp, Homo sapiens
cagcctgcggagcctgtggggcaggcaatactgaacactgcgcagcttgcagaggtctcctggcagccctcatta

SEQ ID NO: 208124 - DNA, 75 bp, Homo sapiens
cgccaaacctgagtttctacagaaatgagatccgcttcctgcccaacgatctggcagtgtggtggggttctggaa

SEQ ID NO: 208125 - DNA, 100 bp, Homo sapiens
gaactgttcagtcaggtggggccggtgaagcagtgcttcgtggtgactgaaaaaggtctggctctgggagaggagtggacagcagctggttgagatacat

SEQ ID NO: 208126 - DNA, 82 bp, Homo sapiens
tagtgcaagccttgtttattttcctcaccactgaatctacaggtcagcccaagactaccccgtcggtcattctgttcctgcc

SEQ ID NO: 208127 - DNA, 101 bp, Homo sapiens
cagcatgatcgccgcgcagctcctggcctattacttcacggagctgaaggatgaccaggtcaaaaagagacatattgatgtctttgactgttggaaacctt

SEQ ID NO: 208128 - DNA, 95 bp, Homo sapiens
catctttatggagaccctgaacaacatcatggagtattacaacgacggtaacggcaagatcctcatcattggaggcagcatcgcaaacttcacca

SEQ ID NO: 208129 - DNA, 82 bp, Homo sapiens
caaaggtcacctggaaattgccttattggaaaaacatttcttacgtgatgtgtccaatctagatcccaacttctcatttgaa

SEQ ID NO: 208130 - DNA, 90 bp, Homo sapiens
tcttatcagacgaaggcaaaatgtatggatgacgctgtcagtatagaaagtggtacaaacactgaacgccctgatacacctacaaacacg

SEQ ID NO: 208131 - DNA, 82 bp, Homo sapiens
gcggcgcggcccagctcgttccaggtatagtcgtctccccctccaccacggcaagtcctgcagagggaaccagctctgacag

SEQ ID NO: 208132 - DNA, 95 bp, Homo sapiens
cagaattcagcacggatggaaagatggagatgaacctctaacacagtggaaaggaaccgttctggatcaggtttactcctggcttgggggcatta

SEQ ID NO: 208133 - DNA, 75 bp, Homo sapiens
ataatgaggaagatcttcaaatgggcattcacaaggttcttttcaatgtaacagttacaatgaaaaaatgtgatg

SEQ ID NO: 208134 - DNA, 101 bp, Homo sapiens
tttgggtatcagcaccccaaagtaccaatatgccattgatgaatattatcggatgaagaaggagctatacagaaatggatcctgtcatcattgcttctgaa

SEQ ID NO: 208135 - DNA, 96 bp, Homo sapiens
cgggcgggtgaagatcggacactacgtgctgggcgacacgctgggcgtcggcaccttcggcaaagtgaagaggaggtggggaagacagggctccag

SEQ ID NO: 208136 - DNA, 101 bp, Homo sapiens
ctctccagggagtgctctgttcacggctccatcgctgttagtactaggttttgacaagcttgcatcatgcgtgagtataagctagtcgttcttggctcagg

SEQ ID NO: 208137 - DNA, 97 bp, Homo sapiens
tgaacaacccgttcttgcctcaggccagtcgcctccaggccaagagggatccttcacccgtgtctgatcagcttgaacgggtctttttacgacttgg

SEQ ID NO: 208138 - DNA, 100 bp, Homo sapiens
gaaaccaccatttattcagcactcagaatgctccaggcagtgtaatctcattccatcttcattcatgactccagacaggaatactttcaagtcatcccaa

SEQ ID NO: 208139 - DNA, 100 bp, Homo sapiens
ctcccctgcgcactcccctcgctgcccgggcccggagcgcagcgcggccgcacagatgacacacaataatttttggttgaagaagatagaaatcagtgtt

SEQ ID NO: 208140 - DNA, 96 bp, Homo sapiens
ccattcgacagcgggtctactcactcttactggaggactgtcaaggaggagtcatctaaggctttgggaaagaacaaaaaagtaagaaaagacaag

SEQ ID NO: 208141 - DNA, 100 bp, Homo sapiens
ccagcggtatctcagccctggatggtgaatttcagtcagcctcagaggttgacttctacattgataaggacacagatctggaggacgtggactggggtag

SEQ ID NO: 208142 - DNA, 89 bp, Homo sapiens
tagcaaatggaatccttctcctcctgcttgtgagcccaaaccatatttatttagagtcagaatggagcgatttgtagtaacagcaccac

SEQ ID NO: 208143 - DNA, 83 bp, Homo sapiens
tctgaacggggcgcacttcgacccggaagtttacctagacaagagccttgcttcctgttttacatcacaaatctaaaaaagga

SEQ ID NO: 208144 - DNA, 98 bp, Homo sapiens
cagaaagtgaagctgtttcgggccagcgacccgctgctcagcgtcctcatgtggggggtaaaccactcgactgtgaaagcactaaaccacttaaaaga

SEQ ID NO: 208145 - DNA, 76 bp, Homo sapiens
ggttggcaccactgaagtgaccgaatgaggtgacttaagagattaaaattaatttggttgctgttggttctgaaca

SEQ ID NO: 208146 - DNA, 101 bp, Homo sapiens
aagaaattcaacatggatcccaaaaaggagctgaggacagggactggcggcaacagcggaatattccgattcattcctgccccaagtgtggagaggttctg

SEQ ID NO: 208147 - DNA, 75 bp, Homo sapiens
ccaatcctctacagcatctctttgaagtatgcagtggaactgatgaagaccctgatgataaaaacgcaccctttc

SEQ ID NO: 208148 - DNA, 100 bp, Homo sapiens
tacacagatgcttccaaatccttcttccaaagcaatagctgatggaagaggagctccagcagcagcagagtaccaggtggatgcccagccccttcgtccc

SEQ ID NO: 208149 - DNA, 75 bp, Homo sapiens
gaaaattccacatgtggagaggaagatcttggacttatttcagcttaataagggtttttaatgaccacaacaagc

SEQ ID NO: 208150 - DNA, 74 bp, Homo sapiens
ggcgtctgtctctgcggcttctggttctcacttgtcggtgctggtgtttgtccactcccggaaggagactggaa

SEQ ID NO: 208151 - DNA, 82 bp, Homo sapiens
cacaaagttctctcgatcagggcatacatctttcttcgacaaagggctgcctgctgtttcccggggagatcatgaaacgagg

SEQ ID NO: 208152 - DNA, 96 bp, Homo sapiens
gggggaaagggagacggcgagacgcgcagcgccggcgcccgggagacccaggaggagcccgcagggcgtctctggccgagcctctttttgtggaaa

SEQ ID NO: 208153 - DNA, 80 bp, Homo sapiens
gttagtcacccacctacatgttgaggtatggcagatcccagaaaatggactcaccctttccctgactgaacctgtggtga

SEQ ID NO: 208154 - DNA, 50 bp, Homo sapiens
tcaacagacctatagtgaatgagattttccggagtctgaaaaattaactt

SEQ ID NO: 208155 - DNA, 87 bp, Homo sapiens
gacatgcgggagagagaatgagccagagggacacgctggtgcatctgtttgccggagggaaggatggcttcctggccttccaaacta

SEQ ID NO: 208156 - DNA, 73 bp, Homo sapiens
gaaggttcaacggggagagtgtcagactactatccaagggcaggttaatttggagtggcccctggagtcagtt

SEQ ID NO: 208157 - DNA, 100 bp, Homo sapiens
gcctccgcagcgacaacatggaggccgtgaagaccttcaatagcgaggttgctagaacacatcacgtccaagcagaaagctacctggtgtacaacatcat

SEQ ID NO: 208158 - DNA, 100 bp, Homo sapiens
caggcgaacaccatcttctggagcccccaaggacagttcgtggtgttggcgggcctgaggaggcaacgcggtaaaaatattgcttcggtgggtgacgcgg

SEQ ID NO: 208159 - DNA, 100 bp, Homo sapiens
agaagaatcgagtcttactcccagttccctgtggtggagtttttgacacttttgttcaagtacacatttcatcagcttgacaaaagtaagctgaagccag

SEQ ID NO: 208160 - DNA, 100 bp, Homo sapiens
aggagcaattctccaatacttacagtaatctcatattaacaggattgtggttatggagagggtggagatgcctactgcacagcctgccctcctcgcaggt

SEQ ID NO: 208161 - DNA, 100 bp, Homo sapiens
atgaatatgaaagaattccgagagaacgagcacctcctcgaagtcatcccagtaatccagcaagctaaagtgcaaattcttcccgaatgtgtgttgcctt

SEQ ID NO: 208162 - DNA, 100 bp, Homo sapiens
cacacctccattggatttaaaagacagtcctcgtcagcactgactttcagctatggaatcgctcaaatagctataactgtaccaaagacatggaagaaac

SEQ ID NO: 208163 - DNA, 100 bp, Homo sapiens
gtattcgttgacagagctttgatagtcgtaccatatgcagaaggcaatgatagtaagaaatgctaaagatacagctcatacaaaagcagaacggaatatt

SEQ ID NO: 208164 - DNA, 74 bp, Homo sapiens
cgcgaatatcgtcatcgttagaagggtgtgctgatctgcaaaccctggacacaatgcagccaattgagaggaaa

SEQ ID NO: 208165 - DNA, 101 bp, Homo sapiens
cactggcacttgtcctcctgtttctatagaaactgggttggaagtcagagctgcacaaagggaaaggaaacaggaagattggaatctgcctggaacaaaga

SEQ ID NO: 208166 - DNA, 100 bp, Homo sapiens
cttacgacagcccggtcggatcatggggttgcccagggggccggagggccagggtctcccggagtggccaatccgccatggtatagttgaagattgggac

SEQ ID NO: 208167 - DNA, 76 bp, Homo sapiens
ccccctgaatgagttgctaaccccccagggtcccaggggcgacgtcgtaaaccaggacgacctgtaccaggccttg

SEQ ID NO: 208168 - DNA, 100 bp, Homo sapiens
ctccaaagtagctgagactacagtttgaaaaagagtttaccgaccaccaagaaactcaggctgaattgcagaaaaaagaggcaaagattaatgagcttca

SEQ ID NO: 208169 - DNA, 100 bp, Homo sapiens
agatatggacacacccagccgctgtgccatcctggaagacgccggtgccgacgtcctgatggaggccctggaggccctgggctgcgagtgccgcatcgag

SEQ ID NO: 208170 - DNA, 75 bp, Homo sapiens
gatcctctcatctcagcctccaaaagtgctggcattacagcaatgactcagatgcatataaagatcaaatatcag

SEQ ID NO: 208171 - DNA, 99 bp, Homo sapiens
agtggatccatgccttagaagaaacaattcttcgacatactctccagcttcaaagaaagcttcttgctatctacctccaccatgatgaaagtgtgttaa

SEQ ID NO: 208172 - DNA, 83 bp, Homo sapiens
tctacacagaactccagcccacctctccaaccccaacctggcctgctgatgttcttccttgagacactagaagcttgccaaag

SEQ ID NO: 208173 - DNA, 100 bp, Homo sapiens
gttgtccaaagttcttccagtcctcctaggcatcttattgatcctccagtcgaggtgtcaagctagggatgcggtccattcccattgccactgcttgcac

SEQ ID NO: 208174 - DNA, 98 bp, Homo sapiens
agctctcgtctggggcaactcagaagaacacgggctcatcttcgcttgtgcctggagaagttgaaggggctggtgccacttggacccgaatcaagtcg

SEQ ID NO: 208175 - DNA, 111 bp, Homo sapiens
gcgggaaggcggcgccccggccgaggtggcggcggctcctcagggatctgaaacttgcccacccttcgggatattgcaggacgctgcatcatgagcgacagtaaatgtgac

SEQ ID NO: 208176 - DNA, 75 bp, Homo sapiens
caggacgaaggccctactgggcaaggcacatctccctaacacttcctgccaccttccgaggcaggaacagcaccc

SEQ ID NO: 208177 - DNA, 74 bp, Homo sapiens
tgacctgtggagacacggccagatctgccctccaattttcagctgaactctcatctctcaacactggcaaatat

SEQ ID NO: 208178 - DNA, 104 bp, Homo sapiens
gggatcctacgtgcatgaagatggacgaggtcctgtacagcatcgccgagaagacttcgacccccaccacttctggcagtggagcagcttctcggactacgtgc

SEQ ID NO: 208179 - DNA, 51 bp, Homo sapiens
agccgcgggcgcccgaggggccgagcgagagtgatcagcagctggactgtg

SEQ ID NO: 208180 - DNA, 82 bp, Homo sapiens
gacgacaaggagggcatgatcaacctcgtcatgtcctacgcggaagctcttcgtgggcggtcttgactggagcacgacccaa

SEQ ID NO: 208181 - DNA, 100 bp, Homo sapiens
aatttgacaacttacggttttcgtggagaagccttggggtcaatttgttgtatagctgaggcaaggagatgagacaccatctacaaataatggaagtgat

SEQ ID NO: 208182 - DNA, 100 bp, Homo sapiens
ccccgagaccccgtcggacccatggtttccagtgcagcgcggagtgggcgatgccagcgtgccagtgcttcaccgatatagacacattttgggattgtgg

SEQ ID NO: 208183 - DNA, 50 bp, Homo sapiens
attgacctcgactcccatgcgattcaattagcagagcctcacagacaatg

SEQ ID NO: 208184 - DNA, 82 bp, Homo sapiens
cgatccagcctgcggagcctgtggggcaggaaacccctcctggagtttccccaaagccatggacagccctagtcttcgtgag

SEQ ID NO: 208185 - DNA, 75 bp, Homo sapiens
ttagcttcaaaaatgacaagttcgataaaagtgtgcagaccaaggttcctggatgcctatgctgagcacaagtta

SEQ ID NO: 208186 - DNA, 99 bp, Homo sapiens
actgtaagaagacctttaagaaacatcagcagctgaaaatccatcagtgccagcataccaatgaacctctattcaattacttcgagagcttaagcatcc

SEQ ID NO: 208187 - DNA, 75 bp, Homo sapiens
agagtcctcaatccaacagcccagtgcttctgtctcgactgcactttgagaagtttagcagccactgctgcatca

SEQ ID NO: 208188 - DNA, 54 bp, Homo sapiens
tgcccgaactcccggcccgaactccagaggaaaggagcagtggcttccggttga

SEQ ID NO: 208189 - DNA, 100 bp, Homo sapiens
gttccacatcattgacttactgctttgtgagattgtgaagatggaaagggtccaacccctggaagagaatgtgggaaatgcagccaggccaagattcgag

SEQ ID NO: 208190 - DNA, 98 bp, Homo sapiens
tcccccaaagatgagatttacctgtgagatgtttcatcccaacagtgtctttaagagtgattgaagagaataattcaaaatgcctgaaaatcctgcta

SEQ ID NO: 208191 - DNA, 82 bp, Homo sapiens
ctgcttctggcctctgggcatcgcagccttctacttgtcccatgaggatttttagactctgaggagcagttggagctaatcc

SEQ ID NO: 208192 - DNA, 75 bp, Homo sapiens
cctcaagtttcacctatcctcactgatccgtggacttctgtatgatcagaagaaggacccagcccagttcctgca

SEQ ID NO: 208193 - DNA, 80 bp, Homo sapiens
ctcctgtcgccttcgcctcctaatccctagccactatggtacactgaggaggggacggctccgtcttcacattgtgcaca

SEQ ID NO: 208194 - DNA, 50 bp, Homo sapiens
atcatcctgggctccaaggagaggtcatcttatcccatgcgtgtgaacag

SEQ ID NO: 208195 - DNA, 100 bp, Homo sapiens
ttgggcaaagtcatttcagccttggccgaggtggacataagaagcgtgggccttcaaagaagaaacccggtgcagcaaaagttgaaaaacgcaagactag

SEQ ID NO: 208196 - DNA, 75 bp, Homo sapiens
atgaacccagaggtcgtggaggtggccgtggaggcagaggtggcatggggtgtacaaaagagccaaggcgctgga

SEQ ID NO: 208197 - DNA, 90 bp, Homo sapiens
agccaatcccaggaggaaaaacgatcggattcaaccgcacatcatgacagatgttccggctacatttacccaggctgagtgtaatgggga

SEQ ID NO: 208198 - DNA, 82 bp, Homo sapiens
tccagaagtccagagctgaggactgcctgtttgcagctgcttccagctgccatggtgatgccaccccagcccgtggtcctga

SEQ ID NO: 208199 - DNA, 100 bp, Homo sapiens
gggacccagggcccgggatcgccgagcccgacctcgggcgccccgccggtcacctccgcgcggacaccaggtttacccaaggtccagcctagcccctagg

SEQ ID NO: 208200 - DNA, 106 bp, Homo sapiens
aacatgggatgcagggtaaaagcttcaagtcagatgagcaactcaagcatcccaaccttgttaacctcctggaagtcttcaggaggaaacggaggcttcacctggt

SEQ ID NO: 208201 - DNA, 96 bp, Homo sapiens
ggccggaatgcagtaccctcagcagcagatttcctttgacctcgctgagtacactgcggacgttgacggagttggcactctacgacttctagatgc

SEQ ID NO: 208202 - DNA, 125 bp, Homo sapiens
tgagaagcctcctacttttgcttcacctgagactgctccagaagtggagaccagcagaactccaccagattgcccccgaggaattagcacttgttcacaacttgaggaaaatgatgaaaaatgat

SEQ ID NO: 208203 - DNA, 75 bp, Homo sapiens
attcgggcatcttggctcctccttgagttggtacgggggcaacagtagccacattggctgatgcttcagaattgc

SEQ ID NO: 208204 - DNA, 75 bp, Homo sapiens
cagacagaacagttaatcctcaatttaagcctgatctaacccctagaaacagaagtccccacgagaagaagaaga

SEQ ID NO: 208205 - DNA, 80 bp, Homo sapiens
aaagggataggagaaggatgtggactgcagtgctgcagtgccaggagattgcatcaacagtttgaaagctataaggaaca

SEQ ID NO: 208206 - DNA, 82 bp, Homo sapiens
cgaccggctcctgctcaagatctcagagaaggaggaggtgaccacgcgcgaggtacctgccgtgggcagatctgagctttct

SEQ ID NO: 208207 - DNA, 100 bp, Homo sapiens
gctaatctcagggaccggagacacctgcagcggccgcgagcccggcagcggcgacatcctcgagtccagccgctgttgtgacaagaaaagctgtggcaac

SEQ ID NO: 208208 - DNA, 100 bp, Homo sapiens
gggctaagtgctggcaagagcgatgtctactacttcaggtggctggcctacgtcctcctgctgctcctggagctgctggtctgcctcttcaccctcctgg

SEQ ID NO: 208209 - DNA, 100 bp, Homo sapiens
ggctcctacgagagtgctcgcatcctcatgaacctgcacaacaacgaggccggccgcaggggcaatgggcatgagcgagacttcatggacgacaagcgtg

SEQ ID NO: 208210 - DNA, 75 bp, Homo sapiens
cttccctgtatgtgatgatgaccgtcaccaactggttcaactgtatgcaggagctattcttgaagtttgtggatg

SEQ ID NO: 208211 - DNA, 75 bp, Homo sapiens
gaggcctggaatttgattaactcattcaaggttacccagttgctttccccacaaataaaccagagaaagatgcaa

SEQ ID NO: 208212 - DNA, 74 bp, Homo sapiens
ctgctgcagcttcccgagacatcaccttgaaaggagaagatgagtatgccaacgttgatgccattgttgtatca

SEQ ID NO: 208213 - DNA, 100 bp, Homo sapiens
gagagagagctattagagattgtgaagaagaatttcgatctccgccctggggtcattgtcagttgttacattatatgccactctaggaggtccagccatt

SEQ ID NO: 208214 - DNA, 90 bp, Homo sapiens
caacaaggaagggactttaatcactgaccatcccaatatacagatcatgaatcggttcagtggtgttatgacaacttcattaactacagg

SEQ ID NO: 208215 - DNA, 96 bp, Homo sapiens
tttgcgggggcttcgcgtgttccaagaactgcctgtgcgccctcaacctgctttacaccgtacctcaataataatgagttgacagcggtaccatcc

SEQ ID NO: 208216 - DNA, 100 bp, Homo sapiens
aaattgacagagaggggaaaccccgtaaagtggttggttgcagttgtgtagtagttaagtgataatatgcagcatgcatactgggaactgaagagagaaa

SEQ ID NO: 208217 - DNA, 80 bp, Homo sapiens
cctgtacagcctgcagaactgtctcagcggcggtggcagccgaggtgcaggatgcaagaaggcgccccccggccgggctc

SEQ ID NO: 208218 - DNA, 100 bp, Homo sapiens
tcaaatgtcacagcatctcccacagcccctgcatgccccagtgacaagccagcaccagtccagaagcctccatccagtgaccaagacccctggacctggg

SEQ ID NO: 208219 - DNA, 100 bp, Homo sapiens
cgggagaaaacaagtccaaggatgaatcccagtccctgttacggttaaagccttccatctgaagtatgatgaagttcgtctggatccaaatgttcagaaa

SEQ ID NO: 208220 - DNA, 75 bp, Homo sapiens
gcctggacgacatcgacctgtccgccctgcggggctctctaaatacgtacagattctgcgataatgtgtggactt

SEQ ID NO: 208221 - DNA, 100 bp, Homo sapiens
tttcagaagctaacagaaggctatggatggaagccatggatgggaaagaacctgtgtgaatgaggcaggatgaactggacaggtttgtacaccttgctca

SEQ ID NO: 208222 - DNA, 50 bp, Homo sapiens
cttgaaaggagaagacttggattctcagtaaccccaagaaaggcatcagg

SEQ ID NO: 208223 - DNA, 87 bp, Homo sapiens
taaacaagagatttccacagaagaattcaaagaagctttttcactatttgacaaagatggtgatggaactataacaacaaaggaatt

SEQ ID NO: 208224 - DNA, 111 bp, Homo sapiens
cttcccggcgtctaggggagcgaaggctgaggtggcagcggcaggagagtccggccgcgacaggacggtgtcgtgaaaactacccctaaaagccaaaatgggaaaggaaaa

SEQ ID NO: 208225 - DNA, 83 bp, Homo sapiens
gttcagccctttgatgaccgcagcaggtatatctttgcaaagaatctttttgaaaatggttccctcagtgacatcgagtggca

SEQ ID NO: 208226 - DNA, 90 bp, Homo sapiens
caattaatggaatgtaagaaacagtgctttctgaaacaacaaagccaaacttccattggtcaggtgctggagagtcatgcctgtgagccc

SEQ ID NO: 208227 - DNA, 83 bp, Homo sapiens
gctgacgccgtgtttcctctttcggccgcgctggtgaacaggtttggtgcacctcgatttggaggaagtagggcagggccctt

SEQ ID NO: 208228 - DNA, 100 bp, Homo sapiens
tcgggttcgtcctcttcttggtgctgtggctgatgcatttcatggctatcatctacacaagcctccccagctttctgaggatgatatctggctaaaaagc

SEQ ID NO: 208229 - DNA, 73 bp, Homo sapiens
ctcaaagctgtgaatgtggccaaggtcgtcggttgaaatcaaggaagcaggtggtactactacaagtaataat

SEQ ID NO: 208230 - DNA, 96 bp, Homo sapiens
cttcggcaagatccagatcgggatttacgtggagatcaagcgcagcgatggggacggcaaaacagaacagaaaggcggagataaaaagaggggtgt

SEQ ID NO: 208231 - DNA, 100 bp, Homo sapiens
ggaaggatcgtccagtggctgaggctggacagagcacagcaagagtgagccatggagctacgtgtggggaacaagtaccgcctgggacggaagatcggga

SEQ ID NO: 208232 - DNA, 75 bp, Homo sapiens
cgcggcgcttgttggcggcgctgcgaggccagagcctagggctagcggccatgggacaagaatccttcaagaaac

SEQ ID NO: 208233 - DNA, 100 bp, Homo sapiens
agagcttggggccagggaagaccacagctgagccccagcaccagtcacctccaggctttccttaaagtttcccatgtctcaatggactcctgaatataac

SEQ ID NO: 208234 - DNA, 100 bp, Homo sapiens
cgcgaatatcgtcatcgttagaagatttttcctgaagaacacatcgtcaataaatcacctgcacccaaatctccatctcaggcgctacttctggcaaggc

SEQ ID NO: 208235 - DNA, 50 bp, Homo sapiens
tgcccgggaccctgcgactggcaggtgttgacagctcttctaccacaagc

SEQ ID NO: 208236 - DNA, 100 bp, Homo sapiens
gtggatttgggggccctgggctccctagccggctgcggtgtgagaatggagtgggcaggaaagcagcgggactttcaggacccagatgatgtggtaccag

SEQ ID NO: 208237 - DNA, 101 bp, Homo sapiens
tcctgccgtccttctccactttcgccagcccgtgccgcgagcgcggcctgcaggagccggtggctgctggcagcggaatcccccagatcaagtgcttcctc

SEQ ID NO: 208238 - DNA, 97 bp, Homo sapiens
ctcggctcctcccaggtggcctcccgcgtgctggccatgaaggtgcggcggcagcacatggagcgttgtaccagcttcctggtggatgagctgggcg

SEQ ID NO: 208239 - DNA, 100 bp, Homo sapiens
catgacgccatcctgccgcagctggcgcagcccacgctcatgatcgacttcctcacccgcgcctgcgacctcgcctgccgagtgcctgcgattgcaggcg

SEQ ID NO: 208240 - DNA, 98 bp, Homo sapiens
ttcatacagtttggagcaagagtcgaatggcgagattgagcacgtgaccaagcgggccatcagcacccccgagagtatcccacgttcatcgatgccct

SEQ ID NO: 208241 - DNA, 83 bp, Homo sapiens
ttgggaattgcttcgtttgccattttcttatggagaactgtccttgttgtgaccaagtcagccatcggggtgctctaactggg

SEQ ID NO: 208242 - DNA, 150 bp, Homo sapiens
ccaggactcagaggccgccatcaaccgccagatcaacctggagctctacgcctcctacgtttacctgtccatgccccagtgaccttgattcaccaacatccagcctgcgtcgcagcccatcattgcaatcaagtggagacagagtcggtg

SEQ ID NO: 208243 - DNA, 74 bp, Homo sapiens
cggaggacgcgcccggcgcccctgagccggccgagcggcgacggaccgcgaggaagctcttcgtgggcggtctt

SEQ ID NO: 208244 - DNA, 100 bp, Homo sapiens
agaacagaaggatctctccttaacgcctttcaccattaagaggaaagcgatggaggagctgagcgctgatgagatatttggagttcttacaacatggcag

SEQ ID NO: 208245 - DNA, 100 bp, Homo sapiens
ggcacactcctcgcagacccggcgctctccaaggagaaaagaaagttagtgggcttggggctacattattggaattttgaagtcatgaaaacatcagatg

SEQ ID NO: 208246 - DNA, 100 bp, Homo sapiens
caagtggaagagatgggctcccgggtcctcctggttcccctgggccccctgggcagcctggctacacaaaggccacaagaggaagctgaatgaagaggac

SEQ ID NO: 208247 - DNA, 82 bp, Homo sapiens
gcttcgcctcagtttgaacattgaccctgatgcaaaggtggaggcagagcggcggaaacgggccacagttctagagtctgag

SEQ ID NO: 208248 - DNA, 105 bp, Homo sapiens
atcagagtcaatcctagacattataatgcatgccacgatggaggtgatgaacctgatggagcagcctatcaaggtgactgagtggcagcagacatacacctacga

SEQ ID NO: 208249 - DNA, 74 bp, Homo sapiens
ctccggccgcctggctccccatactagtcgccgatccagaagcagcaaggtctagcaattccaaaatcaccacc

SEQ ID NO: 208250 - DNA, 90 bp, Homo sapiens
cctggacacagcaatatctctgggctttcacagatcctgaaggacacagccctgcagaaagtgaagcgtggccagagctgcctggagccc

SEQ ID NO: 208251 - DNA, 75 bp, Homo sapiens
gtccctggagctggtgcacaggttccagcctcccaaagtgaaatgcctgaccaagatctggcaccccaacatcac

SEQ ID NO: 208252 - DNA, 97 bp, Homo sapiens
gctgactggaggctggcggacaggcgacagcgacctgcggcagctgaactttgacctggaccggggcgtgtttccagtagtcatccaggctgtggtg

SEQ ID NO: 208253 - DNA, 75 bp, Homo sapiens
ctgcgggcgcaggagctggggtccgcggtctggggccggtgaaatgacaatggatgctctgttggctcgattgaa

SEQ ID NO: 208254 - DNA, 51 bp, Homo sapiens
cttcattctactactgagagaggcttttatcttgagaacatggtgtctgga

SEQ ID NO: 208255 - DNA, 100 bp, Homo sapiens
cgattacagaaatgccttgccgtagggatgtctcgagatgattgggaaaatgaggtacgttagtgttcgcgattttaaaggcaaagtgctaattgatatt

SEQ ID NO: 208256 - DNA, 100 bp, Homo sapiens
ctcggtctggcctgtccgtgtccagcctgagacccaagtcttcagagagctggaacctgcggtgctgtcctgcctccgaggctacagcgtctgcatcttc

SEQ ID NO: 208257 - DNA, 98 bp, Homo sapiens
ttacacatgtggtttgaacaccaaggggcaactgggccatgagagggaaggaaacaagccagtgtgccacctgggcttgaaggcatgaaggaacagga

SEQ ID NO: 208258 - DNA, 98 bp, Homo sapiens
aatgtccttcacctgggctaggctgagaccagcaccaaggggctccagcggggccccacagacgagcaggatgcctgtccccatgagtgccaagaaca

SEQ ID NO: 208259 - DNA, 100 bp, Homo sapiens
cctgtctggagcaaggaaaagaaccttggaatgtgaagagacatgagatggtagctgaacccccagctgtcggcagtactcagtggaagggtgatattat

SEQ ID NO: 208260 - DNA, 100 bp, Homo sapiens
ggctgccagtgctaccctgagaaaggtggacgtgtgtgcaactgaggaacatggctcaagaaactaatcacagccaagtgcctatgctttgttccactgg

SEQ ID NO: 208261 - DNA, 98 bp, Homo sapiens
acgagaaggatgaaaatattcccaagatgctttgccagatggacaatcacttagaagacccttttgaggacttctttgggaatcgaaggggtccccga

SEQ ID NO: 208262 - DNA, 100 bp, Homo sapiens
tgctggctgcgctctgcccggcgagtcgggctctggaggaaaagaaaggtaatcttcagcaagtactgcaactccagcgacatcatggacctgttctgca

SEQ ID NO: 208263 - DNA, 75 bp, Homo sapiens
gtgtggctgcgatcctcggggaaaccgagggtgctggcacagatgagaagactctgaccaggatcatggtatccc

SEQ ID NO: 208264 - DNA, 98 bp, Homo sapiens
tgccgccgcccccagctcccccgcctcggggagggcaccaggaagtgctggactccctggtcagcaatgtcaacattgagctgctcaatgccctccgc

SEQ ID NO: 208265 - DNA, 90 bp, Homo sapiens
ccgggacccgcaggagccagaaccactcggcgccgcctggtgcatgggaggggagccgggccaggacctgcccacccggcagctttgggg

SEQ ID NO: 208266 - DNA, 100 bp, Homo sapiens
ctcagttggaagcagccgatccagcctgcggagcctgtggggcagtaagactttgaccccgacgcaggcttcagtgattgccgcggatcagaagcctgag

SEQ ID NO: 208267 - DNA, 98 bp, Homo sapiens
gcttctagtgttgctttggatcttgtggaaagtcagaggcaagaggattatgacagattacgaccgctgagttatccacaaacagatgtatttctagt

SEQ ID NO: 208268 - DNA, 98 bp, Homo sapiens
attgtcatgctgccagacaaccagagcttgtcatccgtccttggctcaggatttggagagcttgcaccaccaaaaatggcaaacatcaccagctccca

SEQ ID NO: 208269 - DNA, 74 bp, Homo sapiens
ctaaacttagcttttaagcactttaaacataaggaaggaggagaaggcagagcccccccaggctatgaatgccc

SEQ ID NO: 208270 - DNA, 107 bp, Homo sapiens
agggccagctgacggagatggtgcagaagatggaggagtgcaccaattccagctggacatcactgtgaaaatgggacgggataaagtccgagaaatgtttatgaaga

SEQ ID NO: 208271 - DNA, 50 bp, Homo sapiens
aaggctctaggctgaccgtactggataaacaacttgatgcagatgtttcc

SEQ ID NO: 208272 - DNA, 75 bp, Homo sapiens
aaaccctagtgaataaagccaagagagaccttggagtaattcgtcgacagacctgcctagagctggaacgttacc

SEQ ID NO: 208273 - DNA, 75 bp, Homo sapiens
agatcttgtgaatgaagaagcaactggacagttccatgtataccgtaatagcctgcagctggtgttttgagaagc

SEQ ID NO: 208274 - DNA, 90 bp, Homo sapiens
accctgcaggagatctacagcagcgagtgggacggtcatgaggagctgaaggccatcgtatgggtaaagcagctgagcagccattttcag

SEQ ID NO: 208275 - DNA, 75 bp, Homo sapiens
ggggcatcgtgtctcgaccgcgtcttctgagtcaggagttaagccatttgagtgcttaacatgtggagtagcttg

SEQ ID NO: 208276 - DNA, 83 bp, Homo sapiens
cgagcagcgacaacccgtcctctcccgagtttttcatctggtctcttgtggctcagcgccgtgcggaggttgaagcgtacctg

SEQ ID NO: 208277 - DNA, 75 bp, Homo sapiens
cgaagttggaagtgtctcttagcagcgcgcggagaagaacggggagccaggtactccaaagattcaggtttactc

SEQ ID NO: 208278 - DNA, 100 bp, Homo sapiens
ccgtgccgcgctggtggagaagcgccttcgctatctcatggacacagccatgcctgatggagctctggacacagctgtctgcgctgacgaagtggggagc

SEQ ID NO: 208279 - DNA, 98 bp, Homo sapiens
atcaccacaacctccgtctcccaggttcaagcgattctcccgcctcagcctcctgagtagcaattacagccatccgggtgacctgcataggttcctgc

SEQ ID NO: 208280 - DNA, 138 bp, Homo sapiens
ggcgtgcccagcaagagattaaagatgcagtacgccacggggccgctgctcaagttccagatttgggctgttgataatcaggtgtatgtggccacagcctctcctgcccgggatgacaaagcctcctatgttgcctgg

SEQ ID NO: 208281 - DNA, 75 bp, Homo sapiens
atacttcctgcaaggcatgggctacagcacctgcggaactcgagtcatgcaggagcttttgtgatcgtgacggaa

SEQ ID NO: 208282 - DNA, 97 bp, Homo sapiens
gaagatgttgatcggaaacactggctatgctaagaaggaatctgatcttaatggcgcccagatcaagcttcgagaatatgaagcagcactgaattcg

SEQ ID NO: 208283 - DNA, 102 bp, Homo sapiens
ccgctgtgctagcggcgcgcagcgcgcggggcctcagccttccgagtttacttctggagctggcagggtgcagaccatgaattacgtggggcagttagccgg

SEQ ID NO: 208284 - DNA, 100 bp, Homo sapiens
tcaggggaatataatcctgaggtgtttgacaaaacataccaattcttgaatgacatccgagcgaaagagaaagagtgtcagagatggctttggattcccc

SEQ ID NO: 208285 - DNA, 142 bp, Homo sapiens
agacacttctctatggagcttcagtagcaaataaggacatcatctgctataacctacaagcagttggacaggtcctgtccctgctatcagtggggcactgaagaaagcaggactgagtcttaaggacatggatttggtagag

SEQ ID NO: 208286 - DNA, 83 bp, Homo sapiens
ttgaggaagctagagtcgtggctgtatcagatggagaaactaaatgatgatgtgcctgcagatatggttgcagaagaatcagg

SEQ ID NO: 208287 - DNA, 90 bp, Homo sapiens
caaggaattacataacatcaaacgtggcgctggataaaacaagccttagaagaagggatgactcaaacatcatctgtaccccaagagact

SEQ ID NO: 208288 - DNA, 132 bp, Homo sapiens
ccgcccccgtgcccgaccgccgcccgactgccatcgcccggcccggccgcgcccgcggaaccagaccagagctggcggccttcaaggtggtggtgcaggaggagggcggcagtggcctcagcctcatcaagg

SEQ ID NO: 208289 - DNA, 98 bp, Homo sapiens
ggaggccagagaccttgtcatcgaggccctgcggatgggcttaggtcacgagcaaggatttggagccccttgtttaaaatgcaaagaaaaatgtgaag

SEQ ID NO: 208290 - DNA, 96 bp, Homo sapiens
gaggaaaacaacttcgagggcagagagctgatgcagcagaatgggattggttatgtgttaaatgccagcaatacctgtccaaagcctgactttatc

SEQ ID NO: 208291 - DNA, 100 bp, Homo sapiens
cacggggctggtgggcatagtggctgccctgctggcaatgtctcaggctgtgcagacaaacggaactcaaccattaagcaaaacatgggaactcagttta

SEQ ID NO: 208292 - DNA, 75 bp, Homo sapiens
ataagggatccgcagctgctcccgctctccagacaatgcagatcttcgtgaagactctgactggtaagaccatca

SEQ ID NO: 208293 - DNA, 75 bp, Homo sapiens
agatgtctgacagccctgtgtgacaccaagataagtaaccaatggattaaactgcttctttaaatttcttgcctg

SEQ ID NO: 208294 - DNA, 101 bp, Homo sapiens
cagaagtcaattcaaaggacctgcccccagagagagccataaaattttgagtagaaaaatccagaaatttgaaaatcagtatcgtggtagagagctgccag

SEQ ID NO: 208295 - DNA, 75 bp, Homo sapiens
agattcttctcaacatttctgcagactgcctcaacagagtgataggtcccgatcacacagcaagaatccaaaaag

SEQ ID NO: 208296 - DNA, 82 bp, Homo sapiens
cttcggcacaagggcccaactggaattccacttacggcttcgagagctgtgcccaggagtgaacaaccagccctacctctgt

SEQ ID NO: 208297 - DNA, 75 bp, Homo sapiens
aaaaaagaaaaaggaagactctacacccttctcgttattcagatcatggaagggaagtggttgctgtgtatgtta

SEQ ID NO: 208298 - DNA, 75 bp, Homo sapiens
cgccgggactcccgtcccagcaggttcttcattagaagctgtaaccacctgtgaactatgtaaagagaagttgga

SEQ ID NO: 208299 - DNA, 100 bp, Homo sapiens
tggtgttcggttatggagcctctctcctctgcaacctgataggatttggctacccagcctacatctcgagctgctaagccgcacatctcttgagacccag

SEQ ID NO: 208300 - DNA, 98 bp, Homo sapiens
aacaacaagggcagcccctatacaaggacagttggctcctaagggagggactaaatgaacaggatctggacttggcacatttcttttaaaggtgcttg

SEQ ID NO: 208301 - DNA, 100 bp, Homo sapiens
cacggtgtggcagctgctctgaaccaggacctggacccggacccaaagtgccatgtctttaattttggtgccctggttgtcagatgttggaaagcagtag

SEQ ID NO: 208302 - DNA, 71 bp, Homo sapiens
ggcattgtctgatgttacagaagaatctgaaatcatttcggatgatgactttgagttcactggcagccacc

SEQ ID NO: 208303 - DNA, 100 bp, Homo sapiens
agaattcaagtatggtgcaaaactcggcacagttattcgcaagtggaatggagagaagatgtcttacctaaagtacgtcagcctgtcatatgcatcaaca

SEQ ID NO: 208304 - DNA, 97 bp, Homo sapiens
gttttcttatgcttataagagtggaacaggtaatcttcagcaagtactgcaactccagcgacatcatggacctgttctgcatcgccaccggcctgcc

SEQ ID NO: 208305 - DNA, 98 bp, Homo sapiens
gaacctgctcaaagccctgggtcgcttggaagaagccaagtatttatggcagtgggagcttcaattgccgctcgcttaggaacttatcctgactggtt

SEQ ID NO: 208306 - DNA, 87 bp, Homo sapiens
tgcctccggactgcacttgcgaagggagcttggggaggaaacatgaagaggagcatcggcggcgtgaggaagaaatgatccgacaca

SEQ ID NO: 208307 - DNA, 100 bp, Homo sapiens
ggacgccagttactgcacggaaagcagcgtcaggagccatagtacctacagcagcactccagttggtcctgagaaaagggtgccagcgatgcctggatcg

SEQ ID NO: 208308 - DNA, 51 bp, Homo sapiens
ccccggtcttctctacatcctcagcacaatggcaccagcatgatatcattg

SEQ ID NO: 208309 - DNA, 100 bp, Homo sapiens
gccctcagtctacctgcctacccgcgagtacccgtctgaacagagctaccacatactgttgattgtgatgaaatgccagttgaagcacctgtcctgcgag

SEQ ID NO: 208310 - DNA, 96 bp, Homo sapiens
ttcctgcccaaggacatggacggggtggagatggatgagactgaccgagaggtggagtactttaagagtgcacagccagagaacaacacatcacac

SEQ ID NO: 208311 - DNA, 101 bp, Homo sapiens
gactggggttggagttcttcgaccagccggcagtccccctggcccgggcatttctgggacaggcacttccgttccggcgcccctccggtcatcaacccgct

SEQ ID NO: 208312 - DNA, 100 bp, Homo sapiens
cgtgaggacagtgagactcgaacagagctgtggttgggtcggccgtagccccgggatgtggtttaagtggattactgcctagctgagccaaaatgtttgc

SEQ ID NO: 208313 - DNA, 100 bp, Homo sapiens
ccatttggggaccagagatggacggtcactcagcctatggaggtaacgagtctgaccttgaactagaaaagaagtgtaaggaagatgatcgggaaaaagc

SEQ ID NO: 208314 - DNA, 100 bp, Homo sapiens
tgcttattagaacatttgcagagaattggaggaagtgccagccatttttggagtctcctttggtatccgcaaactctacatgaaaagtctgttaaaaatc

SEQ ID NO: 208315 - DNA, 50 bp, Homo sapiens
tgtggttgaacaatggacagtcctggaatgcattgtaacagaagatggca

SEQ ID NO: 208316 - DNA, 99 bp, Homo sapiens
gcagaacaggcccacccggcccggcccactgttcaatcccagcccagcctgcaggtgctggagaatctggtaaaagcaccattgtgaagcagatgagga

SEQ ID NO: 208317 - DNA, 75 bp, Homo sapiens
tgacaagtgatgagaagctgtcggagcttcccaagtatcttaaatagtgaagatggagaaatattcaataatgaa

SEQ ID NO: 208318 - DNA, 83 bp, Homo sapiens
atgttaatgaatggtgctatacttgaattttctaaggtgtcattagaaacctgtttccctccaatcttgtggttgcagctttc

SEQ ID NO: 208319 - DNA, 88 bp, Homo sapiens
cctgccccactcacaggtgggccaaaccgaggcttctgggcgccgcggatacacattctagatattgaagcagccgacacgagtcgtt

SEQ ID NO: 208320 - DNA, 100 bp, Homo sapiens
acggcgtgccctccctggaggagctggcccttagagatttgtttgattccatggataaaacttcttccagtattccacctattattctactgcagttttt

SEQ ID NO: 208321 - DNA, 50 bp, Homo sapiens
ctgggtcatgtggctggaattaccacgaaagtgactgagaccgaagatga

SEQ ID NO: 208322 - DNA, 83 bp, Homo sapiens
cgccttgctcctcgccgcggcggggactgcaggatctgtgccagttcagaagcaggcgagcctcttccctgatgaaaaagaag

SEQ ID NO: 208323 - DNA, 75 bp, Homo sapiens
gacatctacaaccttcgatctcctgacgagtgtggttccgaagaggcgtcaactctcacaatccctgcggcacca

SEQ ID NO: 208324 - DNA, 98 bp, Homo sapiens
cttggcggccggaggaggagtaggtgcgggtgaagatggcggcagccgaggccgcgaactgcatcatggagttccagaaacgccgctggactgcgagg

SEQ ID NO: 208325 - DNA, 100 bp, Homo sapiens
tacaacttccaaggcagcggagccccccagctctccctgcagatcggcgatgtggtgcgaatacaggagacgtgtggagcttatgtccctgatgccaaaa

SEQ ID NO: 208326 - DNA, 75 bp, Homo sapiens
gtggctgcgtcaccgccgcccccccagacaagatggacaccgcggaggaagtttgaaggatgacctctaggaaga

SEQ ID NO: 208327 - DNA, 95 bp, Homo sapiens
gcagcgtctccttcccgttctccaggctcttcttcgtggggtcccgggaaggccacctgccctccatcctctccatgatccacccacagctcctc

SEQ ID NO: 208328 - DNA, 82 bp, Homo sapiens
ttctcctccatgtcagccagctcaaggcaggaggagaccaagaaggactacagagagtgatgcagccaacacgaacggttgt

SEQ ID NO: 208329 - DNA, 100 bp, Homo sapiens
tgctgaaggatttcatgcaagattacaggaatttcagaattttgaacaaatctttgaggttatagttatgagcgctactctagatgcaggaaaattccag

SEQ ID NO: 208330 - DNA, 100 bp, Homo sapiens
ccgactttgaggatctggaggacggagaggacctgttcaccagcactgtctccaccctagagtttggcaatgaggagcagcagctggcgtgggccaagcg

SEQ ID NO: 208331 - DNA, 83 bp, Homo sapiens
agcccatgatcctgctggtgggccagtacagcaccggcaagaccaccttcatcaggtattagaaaactactcggatgctccaa

SEQ ID NO: 208332 - DNA, 51 bp, Homo sapiens
gtggccagttatttgcctcagtaaaagatatcaccttttgccatgatagca

SEQ ID NO: 208333 - DNA, 83 bp, Homo sapiens
gagccctgctacgcgtcgggtccaggtggcagaacatcctaggatggacactccacagctgaccttgactgaactccgggtcc

SEQ ID NO: 208334 - DNA, 96 bp, Homo sapiens
ggaaaattttagaaagagagagacagcagggctgagactatcttctgctcaggaaccaaaacgagctgggaggttgggggccgtcccgctcctaag

SEQ ID NO: 208335 - DNA, 90 bp, Homo sapiens
aattagcccaagaaacattatattcatagttctccggggtgctgcaccagtgtcacattttggcctctgagatggtccatttcattcatc

SEQ ID NO: 208336 - DNA, 73 bp, Homo sapiens
ggaatcgccgtggcgtcttggtgttctccacgctggttcgcaggtgctggagaatctggtaaaagcaccattg

SEQ ID NO: 208337 - DNA, 101 bp, Homo sapiens
cactcccaagaagaataagcacaagagaaagaaggttaagctggctgtcctgaaatattataagagttctgaggttggaggttggaaatgggttccgcagg

SEQ ID NO: 208338 - DNA, 80 bp, Homo sapiens
ctccgcccagcacgccgcggtcaacttcggccaggtcggagctcttaggcctgctgaaaacctacaactgctaccatgag

SEQ ID NO: 208339 - DNA, 119 bp, Homo sapiens
ctccctgctgctgctgctcttcgccatcttcatgggcctgcgggcctccaaggagccccaccctgtttggccaggatgcctttgggacgcttggcagggagcgcccgctccgaggaggg

SEQ ID NO: 208340 - DNA, 76 bp, Homo sapiens
cagccgtgcttgaaaatatacaaagcaactgtcatggcccaatttcagatgtggtgcaattgctgaacaaaccccg

SEQ ID NO: 208341 - DNA, 99 bp, Homo sapiens
gtggcaattgtaaggccatcgattgttggtgccagttggaaagaaccttttccagtacatcaggaacgtctctatcaagaatacaatttcagcaaggct

SEQ ID NO: 208342 - DNA, 101 bp, Homo sapiens
gaacggcatgtcatctttgccaggactgatgcagatgcccctcctccaccagaggactgggaggagcatgtcaacaggggcctttacaacaactaaacgga

SEQ ID NO: 208343 - DNA, 103 bp, Homo sapiens
cctggctggacttgcggagtccccgccgaagaacccgaggctagagtaccgtggcacaatctcagctcattgcaacctctgcttcctgggctcaagcactctg

SEQ ID NO: 208344 - DNA, 75 bp, Homo sapiens
tatttgtcctcctaaagataccttcgaaaggactcttttacatactcatggtggtattggaatgctatgtaagaa

SEQ ID NO: 208345 - DNA, 100 bp, Homo sapiens
cgtcgccatgaaccgcttcagggtgtccaagttccggcacaccgaggctcggccgccccgccgcgaggcttcagggatgacttcttagggggcaggggag

SEQ ID NO: 208346 - DNA, 97 bp, Homo sapiens
ggcccgcgggccgggccggggtgacctgggctgcagccatggaagaacagagggcgccgcggctctgctactgctgctgcccgccaccatgttccac

SEQ ID NO: 208347 - DNA, 98 bp, Homo sapiens
tgaagctcaagggactgtgtccaccctcaggaggacttaaatgcattggacagtggacaaagaccatttaaatggattacaaaaagcagacttcacca

SEQ ID NO: 208348 - DNA, 100 bp, Homo sapiens
ccaaagcggctccccgcgcggacgaaggctcaggaaactttgagggaaattttgagtcactggaccttgcggaatttgctaagaagcagccatggtggcg

SEQ ID NO: 208349 - DNA, 99 bp, Homo sapiens
gtctaccttacagggtataactttacattagcagatatactattgtactatggacttcatcgctttataaagaatggctacgtgactgtcagtgagatc

SEQ ID NO: 208350 - DNA, 100 bp, Homo sapiens
gcggaaccgccatggccgagccggcttcggtatcacagcctgtacctgaaggtgaaggggaatgtgttcaaaaacaagcggattctcatggaacacatcc

SEQ ID NO: 208351 - DNA, 97 bp, Homo sapiens
aaaagttcaaatggcctgtttcaagtttctgatataaaacgatgacattttcaggaaaatcctggtgtgatgaatgcagactctgctaccattttgg

SEQ ID NO: 208352 - DNA, 75 bp, Homo sapiens
atcaaggactgcttgattggaagtggccagaggattgaagccaaagaggaacagctgccccctgggttcccttcc

SEQ ID NO: 208353 - DNA, 95 bp, Homo sapiens
tggaccctgcccagcagaatttgtatagagatgtgatgttggagaactacagaaacctggtctccctagggctttttggtggtgctggagttggc

SEQ ID NO: 208354 - DNA, 50 bp, Homo sapiens
caggtgaacactgaccccaatggcctgatctagttgaatctgaagatgtg

SEQ ID NO: 208355 - DNA, 98 bp, Homo sapiens
ttgaatatcgtaagcgcacgtttaaacatctcaagcttcttccagaccagctggtcttgcttctggagcatctcttggagcagaagactctgagcccc

SEQ ID NO: 208356 - DNA, 135 bp, Homo sapiens
ctctgtgtgctgagcgttctaaaggaaggcgtccgttggccttcgtacccgtcttgattgaggtactccaaagattcaggtttactcacgtcatccagcagagaatggaaagtcaaatttcctgaattgctatgt

SEQ ID NO: 208357 - DNA, 100 bp, Homo sapiens
cggcgtgggaggaggaagatggcggccggcaagagcggcggtagcgcaggggagattacttttctggaagatgcttgtgaccacaccagaaaaatgggat

SEQ ID NO: 208358 - DNA, 75 bp, Homo sapiens
gcgcggagtgggcgatgccagcgtgccaggttcacaataaaggtgctaagaaagagaatgtaagacaggaaaata

SEQ ID NO: 208359 - DNA, 96 bp, Homo sapiens
cgcagatcagaggtagtcggacctttcccgctggcgcgcagcctcagctagctgatggtgagaccattctaaaaggcctccagtccattttccagg

SEQ ID NO: 208360 - DNA, 103 bp, Homo sapiens
ccgggtccagacccacgcggcgccagttctccggcgggaaggaaaaccgcgcagagaggtcaaaatgcagatcttcgtgaaaacccttaccggcaagaccatc

SEQ ID NO: 208361 - DNA, 100 bp, Homo sapiens
ccaagcccgagaccgcggctcctggttggggtgctggaggactgcttcaccttcctgggcatcttcctggccatcatcctcttcccctttgggttcattt

SEQ ID NO: 208362 - DNA, 98 bp, Homo sapiens
gcaactgaggcagcggcaggctcaggtgcagccgctgggctattcacgaaaagcagcagctctagagttcttaaaccgctttgaagaagccaagcgaa

SEQ ID NO: 208363 - DNA, 98 bp, Homo sapiens
cgtgaccccacccatcaccccctcctcttcattccgcagcagcactccgacaggcggcaaagatctgcaacaacatgctgttagctattagtatgatt

SEQ ID NO: 208364 - DNA, 75 bp, Homo sapiens
cgtcaccttcaaggccgtcagacaaggttgaagccatccttgtcaatatatttggtggtatcgtcaactgtgcca

SEQ ID NO: 208365 - DNA, 83 bp, Homo sapiens
atcacatggagagaactgcaagtgtccttcgacgggaggaaataatgcaaaaggtgtcccaaggctcctgaccagtgaacaaa

SEQ ID NO: 208366 - DNA, 97 bp, Homo sapiens
caagaagctcattaagagcttggaggcggcccgcggtctttcccagggaactccgatgaagtgttccaacaaaatgagcgagtgaaccaagaagagg

SEQ ID NO: 208367 - DNA, 90 bp, Homo sapiens
aggttgttggccacagccaattcaaaggaaggagtgggactctgggacattcgaaaacctcagagtcattgaagactctccggaattcag

SEQ ID NO: 208368 - DNA, 100 bp, Homo sapiens
taaacacagaaatagtccagaatgtcacaggtccagggcagaggaccaacatgggcattttgtttatgagcaaggttctggggctgctggtatggacgct

SEQ ID NO: 208369 - DNA, 100 bp, Homo sapiens
gatcttttctacagcttctgataatcaaccaactgttacaatcaaggtctatgaaggagacagtgtttcacaaaatgattttccttctgaagctcccatc

SEQ ID NO: 208370 - DNA, 75 bp, Homo sapiens
tcttccagtcaactggcacagtcctttgcattctactggtgtggatgtaggctgacccgcggctgattgagtccc

SEQ ID NO: 208371 - DNA, 75 bp, Homo sapiens
ccagaggagccttcatttataatacgcttacagatttcatacgagatttccgggaaaaaaatacagatcatatgc

SEQ ID NO: 208372 - DNA, 74 bp, Homo sapiens
agaggtgggacgtccaaggatgatgggcactggatcgacgagaacgtgctaggagcccagctggacgttgaggc

SEQ ID NO: 208373 - DNA, 74 bp, Homo sapiens
tggattgaagccgcctctgtattacttaccaggttgatgataattagaagcatgctttccactgaacttcccga

SEQ ID NO: 208374 - DNA, 87 bp, Homo sapiens
gaaggtctcacctgaggtgaaccttcgaccttggacttctcagcctccagaatggtgccagaaccctgtggagcatcatgaactggg

SEQ ID NO: 208375 - DNA, 99 bp, Homo sapiens
tcgtgatccagaagtccagagctgaggactgcctgtttgcagcacttctcagaacttctggatgagttttcccagaacgtcttgggtcagctcctgaat

SEQ ID NO: 208376 - DNA, 100 bp, Homo sapiens
taaggattccaagtaactcttatttgattgactttgaagatgtgattgcagaaccagaagggacacacagttttgacggcatttggaaggccagcttcac

SEQ ID NO: 208377 - DNA, 75 bp, Homo sapiens
actgggcatccatcaatctctgtgttgtcatctgtaagaagtgtgcaggagactacctaggtggagaagcgtact

SEQ ID NO: 208378 - DNA, 50 bp, Homo sapiens
tgaacactgtccttcaaaacgacaaacggggattcagcgtccgatccttt

SEQ ID NO: 208379 - DNA, 100 bp, Homo sapiens
tcgagaagcagccgcgctgcgccttccacactgtgcgctggccgttgctccagggagaactgcaaatatcttcatccacccccacatttaaaaacgcagt

SEQ ID NO: 208380 - DNA, 100 bp, Homo sapiens
gcaagtggagctggtacccaccggggagatcatccgcgtggttcatccccacaggccctgcaagcttaaggaagaggcccagcagaagggactcgctgag

SEQ ID NO: 208381 - DNA, 75 bp, Homo sapiens
cgatccgcctgcctgcgcacctgccggacaaggcaaaatctcagcaagttcggacctctagtacaataaggcgaa

SEQ ID NO: 208382 - DNA, 50 bp, Homo sapiens
ctttgaccagatgaacggagtggccggagacgccttctggcaagagggga

SEQ ID NO: 208383 - DNA, 101 bp, Homo sapiens
ttgtatctccacctacacacggcaggccagaacccagtgacttgattgtaaaaatttacagagcggaatcatatgctggtctccaagagtttaaagcagcc

SEQ ID NO: 208384 - DNA, 100 bp, Homo sapiens
ggagcttgacgccttagataacagccatcctattgaatatatcccagttcctgatattaacaaaccccagtcaacccatgcctttgcaatgacctgtatt

SEQ ID NO: 208385 - DNA, 51 bp, Homo sapiens
tcgagatgtgtgtatttcatgactcctagaagtaccccaccccacccctgc

SEQ ID NO: 208386 - DNA, 100 bp, Homo sapiens
aggcagcaggtgtaggagggaaagaacttgtattccaaacagataacttctttgtggatgattatgctagatttactatcttggattcccaaggcaagac

SEQ ID NO: 208387 - DNA, 98 bp, Homo sapiens
ctcggtgaaatcctgtcctgaagactgtaaggtaattaataatgcttgtgctactcaagccatagtgagtgtgttactgaactgtacccaccaggatg

SEQ ID NO: 208388 - DNA, 100 bp, Homo sapiens
aggaatatgcattgaagcaaattgaaggcacaggaatatccatgtcggcttgtagagagattgcagtaaaacaggtttggagaaggagcaagaatttatt

SEQ ID NO: 208389 - DNA, 100 bp, Homo sapiens
gctttacatgcacttgaacagactagaaattgcaccacagatatatgggttaagctccaccatgaggcgaggtggatggaggaagcgagctgaaaatgat

SEQ ID NO: 208390 - DNA, 98 bp, Homo sapiens
cagggaggagaccggcacccagacaggtggcgaaggcagaggagaacgtggctgaagagcggtctgggtcttgtgcaccaggaaggcagccagctgac

SEQ ID NO: 208391 - DNA, 83 bp, Homo sapiens
attcagagaaggaaggatcttctcatgcacagaggcaacaaatggcaactttctgagttatggaaacaaaggacatgctttac

SEQ ID NO: 208392 - DNA, 88 bp, Homo sapiens
gggaacactggagacctgatttctaactgacgctaccgtcgcggccgccggccggaaggtggtggtcgtacgctgtgaaggcatcaac

SEQ ID NO: 208393 - DNA, 101 bp, Homo sapiens
cgcgaagagccgttagtcatgccggtgtggtggcggcggcggagactgcgggcccgtagctgggctctgcgaggaaccacgtgaatgttgagggggcgaca

SEQ ID NO: 208394 - DNA, 100 bp, Homo sapiens
gcgaatctgaagcccgtggacaggagaagcccagctgagaggccaccagcccctcgggttccaagatgcagctactggagacagagttctcacacaccgt

SEQ ID NO: 208395 - DNA, 74 bp, Homo sapiens
cccagaccttcagcccgtggcccggatgcaggacagacccctcaggtgaaagacccctgacaaaagacaatcat

SEQ ID NO: 208396 - DNA, 113 bp, Homo sapiens
attgaccaaggtgacttgatgacaccccagttcaccccttattatgtagcaccccagggtcaactgctatgatgtgtttggagcccagtcaccctttggtggctacaagatgt

SEQ ID NO: 208397 - DNA, 95 bp, Homo sapiens
cttctgagacggcggcagcagcggcattcaggtatcgagaaccttccctgcgaacttcagaggaacttccagctgatgcgagagctggaccagag

SEQ ID NO: 208398 - DNA, 83 bp, Homo sapiens
ggcggacagtgcggaactaaagacagacagtctagcagtgcttccttggagaccctgttagcacttcttcaggcagaaggggc

SEQ ID NO: 208399 - DNA, 76 bp, Homo sapiens
cagggcagaggaccaacatgggcattttgtttatgagcaaggtgggtgagcaagcacattaaaaagccgattcgct

SEQ ID NO: 208400 - DNA, 83 bp, Homo sapiens
caccaagcagaatgtccagcgggtcctggaggctgctaacctcttccagctggatagaacttatactggcttgcagactcttg

SEQ ID NO: 208401 - DNA, 107 bp, Homo sapiens
agccaagaaaaattaaagaagatgatgctccaagaacaatagcttgccctcataaagaacccagctatttagtggtcgaagtgactttagaatcactaccttgaaat

SEQ ID NO: 208402 - DNA, 98 bp, Homo sapiens
gtggaaagaaaccatgtgctgaaatgtttgacgacactgatggtttggtggacgacatccttggagaaggcagcgacgacagcgacagcgagaagagg

SEQ ID NO: 208403 - DNA, 75 bp, Homo sapiens
gcccagaacgtgtactgcttgagaacagaatacattgctgattatctcatgcagttttctggatatgccgcagaa

SEQ ID NO: 208404 - DNA, 100 bp, Homo sapiens
tccccagctctgcagccacatactatccgtttgttcaggaaccaccagtgacagagatgggtcatcagttaaggaagttgaaacctaccaccggacacgt

SEQ ID NO: 208405 - DNA, 73 bp, Homo sapiens
cggtgttgagcacggcgagcagtctcaggcctttagtgatgatgtccgtggtggatgactggattgaatcata

SEQ ID NO: 208406 - DNA, 90 bp, Homo sapiens
gtcaaatagtgtgtgttccatattgagctgttgccgctgttgctgatgtggctttatgaaaggcatacaagaattaaattctgaataagt

SEQ ID NO: 208407 - DNA, 90 bp, Homo sapiens
cggtttgctcggttaaagcatcaagaaaagttccatctggctccgacagttagttaatatgtgcatcaacccagatccagagaagcgacc

SEQ ID NO: 208408 - DNA, 82 bp, Homo sapiens
tagtgttcgcagctgcttccaacagattcttgaagtgaaaagtccaataaagcaaagcaaatcagataagcaaataaagaat

SEQ ID NO: 208409 - DNA, 83 bp, Homo sapiens
tagctgtgctcgcgctactctctctttctggcctggaggctatccagccccgcggcgccatggctcacgtcggctcccgcaag

SEQ ID NO: 208410 - DNA, 75 bp, Homo sapiens
cactgataaaatccactcattgctgttacagctcttttgaggaagcttaagcagcaatccagggaaagtgttgaa

SEQ ID NO: 208411 - DNA, 75 bp, Homo sapiens
accttctgaattcaggaggatagaatctccactgaaacatcaggatggatcaaacctcactgcaagtcagagggc

SEQ ID NO: 208412 - DNA, 58 bp, Homo sapiens
agaaaactggtcaaggaagctgaaagaccacagcaagattctttcattcgtctcctcc

SEQ ID NO: 208413 - DNA, 100 bp, Homo sapiens
ctccagcaacctgggtgcgttcagcggcattcaacaaatggcagggcttctcaaatttaataactatggaatcttatcagaaagtccattaacatctcaa

SEQ ID NO: 208414 - DNA, 100 bp, Homo sapiens
cttttctccgcgggcgccgaccaggcctggctcgcgcctctcccaggacccgcctggctgcgagatattggtatgtgtgcaacagagagaaattatgcga

SEQ ID NO: 208415 - DNA, 75 bp, Homo sapiens
gatgtggaggagaatatatcctctaaatctgatgtgaattatgtaacctcattacgctggatgtagctcacaatc

SEQ ID NO: 208416 - DNA, 100 bp, Homo sapiens
tgctacacatgttgggtctgtagagatttgataatgggctgcattaaaagtaaagaaaacaaaagtccagccattaaatacagacctgaaaatactccag

SEQ ID NO: 208417 - DNA, 100 bp, Homo sapiens
cttggttctgccagatgttcctggggttactgtaaatgggaaggacaggcagagctaaacaagaaagtatgctgaggccttggattaccaccgtcaggca

SEQ ID NO: 208418 - DNA, 90 bp, Homo sapiens
gaaaaagttcttgggacaaacttcatttggacgaaaggaccgtggcagcaccaccagccttggcagcgacttctccctggtcatggagag

SEQ ID NO: 208419 - DNA, 75 bp, Homo sapiens
atacaaagaagtgatgctggaaaatctcaggaatctggtctcattggattcaggcttcttcaggagaaagcaagt

SEQ ID NO: 208420 - DNA, 88 bp, Homo sapiens
ctgggatatagatgaggctttaagacgacgccttgagaaacgaatctatattcctttgccgtcagctgactggaaataccggcatgca

SEQ ID NO: 208421 - DNA, 90 bp, Homo sapiens
ctaaccatgaagacttgaacttaatacagcaagaaagaccatcaagtttaccacatgattccacctttccactgatagactcaagttccc

SEQ ID NO: 208422 - DNA, 101 bp, Homo sapiens
gaaattcctaaagcttttaggatacagtaaagatgagcttcagaagaaggcactactcctgtgtgtgaggacatcggacgcagcctcctgacctatggccg

SEQ ID NO: 208423 - DNA, 100 bp, Homo sapiens
catcaacctgaatgacatcgagaaggtccttccagcctggcaggactcacaccacccggcaagaactgctcactacggctccctgccccagaagtcacac

SEQ ID NO: 208424 - DNA, 83 bp, Homo sapiens
ctcatatgtctcaggcttccatgcagcctgccttaccgaaaatggtgtgaatggaacattaacttcaaatgtagcagactctc

SEQ ID NO: 208425 - DNA, 75 bp, Homo sapiens
cggatgatgccttcaatactacctttatttccaccataggatggagtctcactctgttacccaggccggagtgca

SEQ ID NO: 208426 - DNA, 98 bp, Homo sapiens
ggaggcgggctgccggctgtgcgggcgctccggagagaccgacagaaggtggagttggcatgaacttaacagcagcagatactgtgatttttgttgac

SEQ ID NO: 208427 - DNA, 97 bp, Homo sapiens
gagcctcttctgataactcaggatttacttgaaatgaaaggagattccaacctacttcagggagttcctaggctcaaattacagtgaaacattctac

SEQ ID NO: 208428 - DNA, 101 bp, Homo sapiens
aaaaaacttcccaaagaactcctgttacgatgtggaagatgtcaagtttgtgatcaactatgactatccaaacagctcagaggattatgtgcaccgtattg

SEQ ID NO: 208429 - DNA, 75 bp, Homo sapiens
ggtgcgcctgtgcagccctcccaggtggagtacacggcagactgaactgatgaggagtttcaacagagacaggcg

SEQ ID NO: 208430 - DNA, 75 bp, Homo sapiens
ctacatcatcgacctgcagtccatgcaccagtttcgccaggacacaggggacggcaaaacagaacagaaaggcgg

SEQ ID NO: 208431 - DNA, 100 bp, Homo sapiens
ctcggctccctgcctccgcgtcgcagcccccgccgtagccgcctccgagcccgccgccacatcctctgagacagaccttccagaacttgatacaccagaa

SEQ ID NO: 208432 - DNA, 82 bp, Homo sapiens
gcagctcttgagcaggcagcttacaagttggatgcatattcaaaaaaactggcaccacaccccactctggccggagcacgcc

SEQ ID NO: 208433 - DNA, 96 bp, Homo sapiens
gtcgtggtgaagcctgccgaagacacgcccttctccgccctggccctggctgaggtcatgaagaaggatatttcacagctataatgttgaagaaat

SEQ ID NO: 208434 - DNA, 114 bp, Homo sapiens
ccatgtcagacgcagccgtagacaccagctccgaaatcaccaccaaggacctgaaggagaagaaggagaaggtggaggagaaggcaagccggaaagagcgaaagaaagaagtgg

SEQ ID NO: 208435 - DNA, 82 bp, Homo sapiens
cgcccgggaggaaggaacgaggcaaggagctaaagcagcgtgcgttcagccctgggatcccgactgggcctcctacactctg

SEQ ID NO: 208436 - DNA, 96 bp, Homo sapiens
gaaaagagagaaacagtgttgatagagactcagctgaaagcatgtgcctcttttatacgaaccagagtcttgctgcgacacccaggctggagtgca

SEQ ID NO: 208437 - DNA, 76 bp, Homo sapiens
ccctgagcagcctggcctgccatgtccgggagaagacaccatggccatgcagaaaatctttgcccgggaaatcttg

SEQ ID NO: 208438 - DNA, 83 bp, Homo sapiens
cgctgagcctgcagccggccctgccggttgaaaggattgttgacaaaaggaaaaataaaaaagggaagacagagtatttggtt

SEQ ID NO: 208439 - DNA, 90 bp, Homo sapiens
caaggacatcaacttccggccgcagatgtcccagagcgtcagaagccatgatgcatgtagtgtgtgtgtactgcagctggagtgggcccc

SEQ ID NO: 208440 - DNA, 96 bp, Homo sapiens
atctgactcgtgatctgcccatcttgttactccctagcagtgtggtaaggtccaagacaagctgctgctatctgcgtgccacttactggtctcact

SEQ ID NO: 208441 - DNA, 100 bp, Homo sapiens
tgtgacagtgatgataacatgggtgccaaaaatacttcaataggagaagaatttatatccacagaaggcttcgtgagcttcgacaacccggccagcgcgc

SEQ ID NO: 208442 - DNA, 106 bp, Homo sapiens
ctggaactaatgtcacagcatggatgtaatgcctggaaagtatacaatgaggcactgcacttggctgtgattcatcagcatgaacccttcctggattttcttctag

SEQ ID NO: 208443 - DNA, 80 bp, Homo sapiens
gctccggagccgctgcacatttcggccctgtttgtgctcttcgtcctggcctacatccacatcgtcttctcccgctcgcc

SEQ ID NO: 208444 - DNA, 100 bp, Homo sapiens
gtgcgtgggggaccggctgttggcgggcagacctcaacaccaacatcgaggatgaaggcagctccttctatggggtctccagccagtatgagagccccga

SEQ ID NO: 208445 - DNA, 80 bp, Homo sapiens
taggataatcagtttagatggctcaaagagcatgggcatgtgtttcatcgggaagaggaattttgaacatttccttcttc

SEQ ID NO: 208446 - DNA, 74 bp, Homo sapiens
tcttttgatagatgtcataacagtatttggagaactcactgatgaactgtttgcagacaaggtcccaaagacag

SEQ ID NO: 208447 - DNA, 82 bp, Homo sapiens
catgagggccctgtgggtgctgggcctctgctgcgtcctgctgaccttcggtcctcagaatggttggaatgaccctccagct

SEQ ID NO: 208448 - DNA, 89 bp, Homo sapiens
cgccgctgggcctgcaggtctctgtcgagcagcggacgccggtctctgttccgcaggatggaccctgatgcttggtgtgacctgagtaa

SEQ ID NO: 208449 - DNA, 52 bp, Homo sapiens
aaagaccatcaagtttaccagaccccaggagcaagcacaagttcaaaatcca

SEQ ID NO: 208450 - DNA, 90 bp, Homo sapiens
atctgtacatcctatgtcaactgcttctcaggtagcaagtacatggggagggtgatcagcccatgacctaaacctccagacaaaataaaa

SEQ ID NO: 208451 - DNA, 100 bp, Homo sapiens
cacacagcaagttcctgcttctgggacagctctactgacgacattgggtttgcctatcacagatgaacaaatccaggagatgaaatcaaacctggagaac

SEQ ID NO: 208452 - DNA, 75 bp, Homo sapiens
accgagtccagcccaggaaaatggagagacttaattcagtgcacaaatgagatgaatgtgaacatcccacagttg

SEQ ID NO: 208453 - DNA, 100 bp, Homo sapiens
cagacaccagccccccaccatgatcttgctgacgtcttgactgtgaacccggactcaccggcgtcggaccctacggttttccacaagcgctatttgaaaa

SEQ ID NO: 208454 - DNA, 90 bp, Homo sapiens
cggcgacggtggtggtgactgagcggagcccggtgacaggatgcgcgagcttcggcctcggctctgtaccatgaagaagggccccagtgg

SEQ ID NO: 208455 - DNA, 89 bp, Homo sapiens
atcccagacgaagacagtccctggatcaccgacagcacagacagaatccctgctaccacatcagaggctccttgaaatgctagatacag

SEQ ID NO: 208456 - DNA, 96 bp, Homo sapiens
ccctggtcttgctcggccgatgaagtgcagaggtttttttctgcacctgaactcctggggggaccgtcagtcttcctcttccccccaaaacccaag

SEQ ID NO: 208457 - DNA, 100 bp, Homo sapiens
ccaaatccaacatttcctgcatgtccaaaatgggagacaggcgcctgagtaacccggggcaaggtggtatcacggaaaacttgacagaacgatagcagaa

SEQ ID NO: 208458 - DNA, 75 bp, Homo sapiens
ctcagttactcaaactgaaacgtctcctgcatcaggagcatttcctccctctgctatttatacacggaaagactt

SEQ ID NO: 208459 - DNA, 74 bp, Homo sapiens
ggacaacccagatgtgcaacaaagtgcgatggacggggaggtttactgcatcgacgcgcggttctacgggaacg

SEQ ID NO: 208460 - DNA, 101 bp, Homo sapiens
caagaagaggcacgagatgccccctcacatctatgccatcacagacaccgcctacaggagtatgatgcaaggactcatctgatgatgtgagaagagttcag

SEQ ID NO: 208461 - DNA, 74 bp, Homo sapiens
ctgaaggacttggggagcccagaagctgccaccgaaccaaggcctgcactgcccaaagtcttggaaacttgctg

SEQ ID NO: 208462 - DNA, 71 bp, Homo sapiens
cggaacaccctggaagccgagaaatgctgtcgcctggttgggcccggaaatgggacgtcgcgctttctcag

SEQ ID NO: 208463 - DNA, 100 bp, Homo sapiens
gctccggcttggattgtagccttgacgaggtctgagcgaccatggaccggccggggttcgtggcagcgctggtggagcaatttacagcaatgagggattt

SEQ ID NO: 208464 - DNA, 96 bp, Homo sapiens
ttagcacagcgcctggcgcaaggtgaccaaagccacgtaatgtccgtagttcgctcatccgtccatgccagatggattgtggggaaggtgattggg

SEQ ID NO: 208465 - DNA, 74 bp, Homo sapiens
tttcttctgttcgtcagaaatttgatgtagaacctctgctagccagacaactatattattttgctcaacaaaac

SEQ ID NO: 208466 - DNA, 100 bp, Homo sapiens
ttttaatctcgtccccaatagtgcaaaagtcatggcaacttctggatgtgcagcaatcagatttatcattcgggttcaaaccttgtactactcagctgat

SEQ ID NO: 208467 - DNA, 98 bp, Homo sapiens
cgatttcctctcgccgagcggcggattcttcagaggaggcccctccagccactcagaacttcatcattccaaaaaaggagatccacacagttccagac

SEQ ID NO: 208468 - DNA, 75 bp, Homo sapiens
ctgaggacttgcgagccgctcagctcccgggacgtttggcatggtggttttctggaaccttcccactaactcacc

SEQ ID NO: 208469 - DNA, 82 bp, Homo sapiens
gagctcgtggcgtgcgacaacgcggcgcagaaaaatgcttcggttacccacagtctttcgccagatgagaccggtgtccagg

SEQ ID NO: 208470 - DNA, 101 bp, Homo sapiens
ttcagcccggcgatattgtcattattgatcagttcattgacagtgctcctgatatggaagatatattgactgaatcagaaattaaattggatggtgtcaga

SEQ ID NO: 208471 - DNA, 83 bp, Homo sapiens
gccgaagaagctcatcgcaccgccgggccgggcgggtctcgacaatgcagatcttcgtgaagactctgactggtaagaccatc

SEQ ID NO: 208472 - DNA, 100 bp, Homo sapiens
catgctcctactatccatttcaactacagatactttgaagtagaagaagctgatgaggagcccaaggtgggcatcaagaccatcaaggtgtactgccagc

SEQ ID NO: 208473 - DNA, 80 bp, Homo sapiens
tggatggaagccatggatggccgggaacctgtagtgtgccagtatttgaaaaatcccaatgtatctgattcactgctgct

SEQ ID NO: 208474 - DNA, 75 bp, Homo sapiens
agcgggattgatctccttaggacctgaattacatgaatgacagtcttcgaaccaatgtgtttgttcgatttcaac

SEQ ID NO: 208475 - DNA, 100 bp, Homo sapiens
cctggacggggcgctgcccttgggcgcgcagatacccgcggtgcaccgcctgctgggagcgccgctcaaggttacaggaggttccagtggcatcgggaag

SEQ ID NO: 208476 - DNA, 100 bp, Homo sapiens
gaaaactgaccgggacctgtgcaagccggtggacgacatccttggagaaggcagcgacgacagcgacagcgagaagaggaggcctgaggagcaggaggag

SEQ ID NO: 208477 - DNA, 100 bp, Homo sapiens
tgcacttgaggcccagaatgcactgcacaatattaaaactttacctggggataacaaagccattgacctttgccgattgtgttggggacgaacttccttt

SEQ ID NO: 208478 - DNA, 98 bp, Homo sapiens
aagaaagctaccaatcttcaaagagtctcttaccttgtgtttgatgaagcagatcgaatgtttgacatgggatttgctggcagagaggctgatgacat

SEQ ID NO: 208479 - DNA, 90 bp, Homo sapiens
ccacagctaagacgccaggacccactggaagcctagaaatgctggcagagatggaggaggagctacgttatgcacccctgtctttccgaa

SEQ ID NO: 208480 - DNA, 95 bp, Homo sapiens
cctgcactctcatcgctctcggcctcggcctcggcctccgacacgagtgatcagcagctggactgtgccttggacctaatgaggcgcctgcctcc

SEQ ID NO: 208481 - DNA, 100 bp, Homo sapiens
gagctgtcagagcccggggacggcgaggccctcatgtaccacacggtatgtacaagctgtgaggacaacgcagaagccaatgggttttgtgtagagtgtg

SEQ ID NO: 208482 - DNA, 90 bp, Homo sapiens
ttcaaatgggaggccaatcaatgcagcattaggaaggcttcattcagctcagcaccaccttggttggtctcttcccatggcgatgtccat

SEQ ID NO: 208483 - DNA, 100 bp, Homo sapiens
gagctgaggtccggggcccagttttccggagttgcgggtatgttagagcccaccaaggaaccactgaaaccactttctgctgcagaaaaaatagcttcca

SEQ ID NO: 208484 - DNA, 87 bp, Homo sapiens
ccctgggcaggctgaaagatggcggcggcgtctgtctctgcggcttctggttctcacttgtcgattctctcgggcctagccgtcctt

SEQ ID NO: 208485 - DNA, 51 bp, Homo sapiens
gaaagtcccaggatgactactgtgtcaagcctatcatggtcaccatcaagc

SEQ ID NO: 208486 - DNA, 50 bp, Homo sapiens
tcgtgttcctcgctcgccccacagactgattcttgctattccaaatcctc

SEQ ID NO: 208487 - DNA, 100 bp, Homo sapiens
tcacccctcaatggagtccacgatcgagcatatgttgctgtggatgggctgtcggaaaaggtaacagaagatggaactcgaaatcccaatgaaaaaccta

SEQ ID NO: 208488 - DNA, 71 bp, Homo sapiens
gggatccacgtcccacgggccggacccgcggccgcgttcgggctgattcaccccaagagtggccgttccta

SEQ ID NO: 208489 - DNA, 99 bp, Homo sapiens
gtttcttggagacccagttgagaaagctgcccaactaagacctatctccctaccaggagtttctagcactgaagatgaacaagtgcttcctcacaactt

SEQ ID NO: 208490 - DNA, 100 bp, Homo sapiens
cacggacaacctcagaggacaacgaagtgttcggtgtcatggagaaactccagctgggcccagagattctgcagcgggaaaatccaaggcttatttatgc

SEQ ID NO: 208491 - DNA, 87 bp, Homo sapiens
cccccggcgcgatgcccttcaggaaaggattttttatcaagcagaaatgcatcgaacaacgagaatcaagatcactgagctaaatcc

SEQ ID NO: 208492 - DNA, 100 bp, Homo sapiens
atccaccccatttggcgtggcggccatctggatcctggactccgtcgggctccgtgcggcggagccacactcaaggggtcatttatccagacctgaagct

SEQ ID NO: 208493 - DNA, 100 bp, Homo sapiens
gcagtggtgaaacagttggatctggaggtgtcatggagaaactccagctgggcccagagattctgcagcgggaaaatccaaggcttatttatgccaggct

SEQ ID NO: 208494 - DNA, 96 bp, Homo sapiens
tcaagacaacagtgatgaggaaagctgtgaaagttctcaaggatgtggccaggttctgcgagccccaaagggtcagattttgttggaaagctatcc

SEQ ID NO: 208495 - DNA, 126 bp, Homo sapiens
gtgcctttcaccttctgccatgattgtgaagcctccccaccacatggaacggctaccaagcagtttctcgaagagattaacaagtggacagttcagtacaatgtttccccgctgtcttggaatgtg

SEQ ID NO: 208496 - DNA, 96 bp, Homo sapiens
ctacaaaatcagtttatcaaaaaatatttacaccagcagctccagttcataccaataaagaagatcctgctacccaaactaatttgggatttatcc

SEQ ID NO: 208497 - DNA, 83 bp, Homo sapiens
gtgctggccaaggtgaagcgcgagcgcgacgagtataagcggagattctgaaagtcaagaagacatcatccggaatattgcca

SEQ ID NO: 208498 - DNA, 82 bp, Homo sapiens
caagactgtctttgctgagcacatcagtgatgaatgcaagaggcgtttctataagaattgcttcctaaccaagcgaagccgg

SEQ ID NO: 208499 - DNA, 75 bp, Homo sapiens
tggccccgtccttacctcacagtgatgtaaattggagtcaaccaggtgaaaagaagttaactgggggatctaact

SEQ ID NO: 208500 - DNA, 100 bp, Homo sapiens
ctgagccagagtccaagtctgaaccgagacctccaatttcctctccgagggctccccagaccagagctgtcaagccccgatggtttgtgaagaaggtgac

SEQ ID NO: 208501 - DNA, 76 bp, Homo sapiens
gaattatggtaccctccctcaggcttttaaaaccaaggatggctatattgtagttggagcaggaaataaccagcag

SEQ ID NO: 208502 - DNA, 101 bp, Homo sapiens
atattattgtagatctagaagtcactttggaagaagtatatgcaggaaattttgtggaaagagaaaaggaacagttccgtaagctctttattggtggctta

SEQ ID NO: 208503 - DNA, 51 bp, Homo sapiens
gagtgttgagaagtttattcagaaagccactcgaccggatatgatcaggat

SEQ ID NO: 208504 - DNA, 83 bp, Homo sapiens
tgccgtctctggaggagtactggcaacagtttgggatatgagattgaaaatgacgactcggaattttcctgagagagaagtac

SEQ ID NO: 208505 - DNA, 96 bp, Homo sapiens
ctatcccaggacaggtggcactctttcaggccagaagcggactcctagaagaggggagcagcaaggatggaatgacagccgtgggccggaggggat

SEQ ID NO: 208506 - DNA, 99 bp, Homo sapiens
gaagatggtggagaagtgctggaagctcatggacaagggctccacgtgttccccacgtttgtggcgtacgagctcacggtgctggtgttcctcaccttg

SEQ ID NO: 208507 - DNA, 71 bp, Homo sapiens
tgggaagaaactcttagcgcaatggagtacttcttgcaagcagagctgacaagcaacgtcttaaaaacagg

SEQ ID NO: 208508 - DNA, 100 bp, Homo sapiens
gactcttacaccacaaaagaatatacaagtatattcataaagttcatcatgagtttcagtttgtcagaggaatggctgtgaatggatgcctggaaggacc

SEQ ID NO: 208509 - DNA, 82 bp, Homo sapiens
aaagaattcagaaggaacttgcagaaatcacattggaccctcctcccaactgtaggcacagtttgaacttcgggcatttcat

SEQ ID NO: 208510 - DNA, 51 bp, Homo sapiens
gaaattctggaacacctatatggcctcctttgggagcacacgaggctacca

SEQ ID NO: 208511 - DNA, 100 bp, Homo sapiens
atttgaggaagcaccagtacagggataagagatgaagagacaggccaggtcaggctcaccaagcaggttcaggttcttcggaatgctggagaagaagtga

SEQ ID NO: 208512 - DNA, 83 bp, Homo sapiens
agcaaggggcttacgcagaaggacctggccacgcgcgagcccagcattgacctgctgcaggccttcgtggagcactggaaggg

SEQ ID NO: 208513 - DNA, 80 bp, Homo sapiens
gcccagggcaggcgcggagccgggccggcagaataccctctaccatctgctttggtcagggtgccgctcgaggatttaaa

SEQ ID NO: 208514 - DNA, 100 bp, Homo sapiens
ggcgaagcacgagcagatcctggtcctcgatccgcccacagacctcaaattcaaagagctgaagccatttattggtatcttggatggttaacatctaaat

SEQ ID NO: 208515 - DNA, 100 bp, Homo sapiens
atgcaatttatgaacctacggaagaagaatgtgaatggaaaccagatgaagaagatgagatttcgaagaagcctgagaagatgatgcacagatagagagg

SEQ ID NO: 208516 - DNA, 51 bp, Homo sapiens
ttcacttgctcttgtacatgagtgtgcaaagatccaccttacaaagtagaa

SEQ ID NO: 208517 - DNA, 82 bp, Homo sapiens
ataagactctttaaagaaggcaaggagagaatgtatgaagaacagtcacaggacaggtcaaaatgcagatcttcgtgaaaac

SEQ ID NO: 208518 - DNA, 75 bp, Homo sapiens
gctgggtgcagatgcagtgtggctctggatagcaccttatggacaggttgtcttttggaaatgcaggtttaagga

SEQ ID NO: 208519 - DNA, 97 bp, Homo sapiens
gcagatttgttaatcttcggacagagatcaaacctgtcgccacagagcagctgttgagcaccttcctaactgtagtaatctcaggggcgatataatc

SEQ ID NO: 208520 - DNA, 75 bp, Homo sapiens
ccagaagcagggacagggagctggttggggaggaccagaaatcagacagggtctcactctgtcgcccaggctgga

SEQ ID NO: 208521 - DNA, 100 bp, Homo sapiens
caaacatgaggataacagaagaagttgggcaagcccggtttatacagaagcagatggaacattttcaaggttatggaggttttgatgactatggtggcta

SEQ ID NO: 208522 - DNA, 50 bp, Homo sapiens
ggccggcagtcatctcgcggccgttcagatggaggagatgtataagaaag

SEQ ID NO: 208523 - DNA, 82 bp, Homo sapiens
aaagaaaccgctgaggcttatttgggaaagaagtgcatttgcccagtataacatggatcagttcacgcctgtgaagatagaa

SEQ ID NO: 208524 - DNA, 85 bp, Homo sapiens
gacgcgcgggaacaacgcgagtcggcgcgcgggacgaagatgaggtggaaagtgagaaatggtacctgtctacagacttcccttc

SEQ ID NO: 208525 - DNA, 100 bp, Homo sapiens
acgccttaacccaaggaagtgactcaaactgtgagaacttcaggacacattcagctaacgtattttagcaggtggagtgaggttgaagattcctgtgaca

SEQ ID NO: 208526 - DNA, 83 bp, Homo sapiens
ctgggcttcgtccagatcgggaaggttggaatcgaagcctcttaaaatggcagatgacttggacttcgagacaggagatgcag

SEQ ID NO: 208527 - DNA, 98 bp, Homo sapiens
gaaggattgtggtcccgcctcacctggggtatggagaggaaggaagagtgacacaccgactccccctcccttccaccatgactaaaagcttcctggac

SEQ ID NO: 208528 - DNA, 90 bp, Homo sapiens
tgatgtggctaagatgctgccgactctgggcggcgaggaaggcgtctcccgggttcaaatggtgaaagacgatgacccctcctggaagcc

SEQ ID NO: 208529 - DNA, 100 bp, Homo sapiens
agcagctctcgctccagaagcttcactttggacacattcagctaacgtattttagcaggtggagtgaggttgaagattcctgtgacagcgatgccataga

SEQ ID NO: 208530 - DNA, 73 bp, Homo sapiens
tcgagagctcgccccgaacgggggtcttcctcctccgccgttgacagggttacgactcactgattaaaaagag

SEQ ID NO: 208531 - DNA, 100 bp, Homo sapiens
ctcattctcatattagtgtgtgcttggcactggagaaacaggtatatgtctcgagtccacggtatgcaccctaaagagaccacccgtcagctgagcttag

SEQ ID NO: 208532 - DNA, 100 bp, Homo sapiens
tggaagtaaagatgcagaggaaagaaaagaatacattcctgattacctgccacccattgtgtcttctcaagaagtgccctctggtggtcagaagatgctg

SEQ ID NO: 208533 - DNA, 100 bp, Homo sapiens
ccaagcatgatgattcttcagataacttctgtgaagctgatgggcactgaccatccgtgcactgccaataacccagagagctgctccgtttcactttcac

SEQ ID NO: 208534 - DNA, 75 bp, Homo sapiens
tgagacttcggagatcctttctattcaggataacacaagtcccttgccgctttgtgtccctggtgatgttggaac

SEQ ID NO: 208535 - DNA, 113 bp, Homo sapiens
cttgtgaatctttagagcctgtggtggttgatctgactcacaatgactctgttgtggtctcctttacagaaaggggcttggataaggaggaaagaccatcagaagaaaagata

SEQ ID NO: 208536 - DNA, 100 bp, Homo sapiens
gggagaagcatgggaaggaggccgagccgggatctcaggtcctcgggggcggcggccacgccaaggacggtattctgacaagtccctgtacacccagctg

SEQ ID NO: 208537 - DNA, 90 bp, Homo sapiens
ctttaatcggttagacttctcaagtgcaattcaagatatccgaaggttcaattatgtggtcaaatgcatttgattatgacacagaaaata

SEQ ID NO: 208538 - DNA, 83 bp, Homo sapiens
ggcgccgagggacaccgcagtatgaggcagagcttcctccatacagtggaacagttctgtgtggcacacaggctgtggataaa

SEQ ID NO: 208539 - DNA, 100 bp, Homo sapiens
cgccgccgccatgaacaactcgggcgccgacgagatcggtgctcttaaagttccgtacagataaaggaagagatcccagttctgatacatatgaggaaga

SEQ ID NO: 208540 - DNA, 75 bp, Homo sapiens
cataccaagtctatgaggaacaagcaatggccaatgtacatggtggactatgccggcctgaacgtgcagctcccg

SEQ ID NO: 208541 - DNA, 100 bp, Homo sapiens
gagaagagccatggaaacaggaggaagaattcccaagccaaagctttccaggtgtattacctgactgcttaaccgatggctctgatgtggtcagtgacct

SEQ ID NO: 208542 - DNA, 75 bp, Homo sapiens
tcacggacgaggccgccctcagttgctgctccgacgcggaccccagtaccaagtctttcccagggaactccgatg

SEQ ID NO: 208543 - DNA, 98 bp, Homo sapiens
aaaaattcaggttctaacagacaaaattgatgtacttctgcaacaggcttccgaagatcttctcaaggaacactacgttgacctgaaggaccgtccat

SEQ ID NO: 208544 - DNA, 100 bp, Homo sapiens
cgtctccaacttgctaaaaatgggtcacacagtgactgtctggaaccgcactgcagagaaactcggcttgcccttcccctgcttgtgccgtgtaccctgt

SEQ ID NO: 208545 - DNA, 98 bp, Homo sapiens
acaagtgttatctctgtaccgggcgatgctgagagagagcaagcgtttcagcgcctacaattacagtactatactggcaattgctggagaagattttg

SEQ ID NO: 208546 - DNA, 88 bp, Homo sapiens
ggtttttagtccattgactatgcagcctaatgaagctgacgggtcgcctcatgctggccgtgggaggagcagtgcttggctccctgca

SEQ ID NO: 208547 - DNA, 100 bp, Homo sapiens
aataggatttaaccgctctctgcctcccaggctctgcggctaccctcctttttatgatgaaaatgactccaagctctttgagcagatcctcaaggcggaa

SEQ ID NO: 208548 - DNA, 100 bp, Homo sapiens
gaatttcattccagaccttgccctactaagattttggaagatgttgtggatggaagttccagctctgatagtgacctaagtctgtcttcaatggtctttc

SEQ ID NO: 208549 - DNA, 80 bp, Homo sapiens
ggtcaggtctggagctcgaccgggccagacctgtgttgcgtggtgggtctgctgccgccacttctaatcctcatcatgac

SEQ ID NO: 208550 - DNA, 83 bp, Homo sapiens
ccagcggaaaggagcgcgcctctttttggcttggggagctgcagcgttcgatccagtttgctgaccagaagcaagaattcaac

SEQ ID NO: 208551 - DNA, 83 bp, Homo sapiens
cagagaggcccgcccaccagttcgcccgtccccctgccccgttcacaatgaatctgtcttgaactatcgtttcgatcctctcg

SEQ ID NO: 208552 - DNA, 75 bp, Homo sapiens
aggtggccgaggcgctgaccaaggtggccctgctgcagttgatggagacgccagagctggcggggcaggaggacg

SEQ ID NO: 208553 - DNA, 100 bp, Homo sapiens
ctggccgtcatggataggcagaagaaagaagaggagaaggagcagtccgtgctcaagcgccaagcccatctttgtgtgcttgcatccaactgtgatgagc

SEQ ID NO: 208554 - DNA, 50 bp, Homo sapiens
ctgccatccccaaggagccaggactgaggcccaggatggcggcccaggtg

SEQ ID NO: 208555 - DNA, 74 bp, Homo sapiens
cggcacactgacactacctattttcaagagccctgtggacaaaagcaagccgggaggctggctgcctctcctcc

SEQ ID NO: 208556 - DNA, 100 bp, Homo sapiens
tcagcggccccctcaacgccagaccaggtggttacagctattcaatttggtggaaaaacaatgccaagaacagatagttgcccagcaggagcagttccac

SEQ ID NO: 208557 - DNA, 90 bp, Homo sapiens
gagattccggacaaggagttccagaatgtcatgacctacctcaccagcatccccaggtatagctgtggaccaactgtatatgatcatgcg

SEQ ID NO: 208558 - DNA, 100 bp, Homo sapiens
gccggattccagcccggccggggcctgcgggcgcccagagccgcgccgtccgcgccgcccgttctggaccaagaatcgccttcagccctgtctggtgcat

SEQ ID NO: 208559 - DNA, 75 bp, Homo sapiens
ccgcaccatgccgctcctaagcctgcacagccgcggcggcagcagcagtgagagaatattgaaggatgtttgttc

SEQ ID NO: 208560 - DNA, 76 bp, Homo sapiens
gtgccacattcttgcagctgcctacaaattcaagagtgaccagggatgtcgttccccatcaggaagtcctcgcaga

SEQ ID NO: 208561 - DNA, 90 bp, Homo sapiens
tgtggtctctgcacctcctttctccacagctccggagcaagccccagccccggcccggccataccagggcgtccgtgtgaaggagccagt

SEQ ID NO: 208562 - DNA, 98 bp, Homo sapiens
cagaactgccagataacctgaaggattggctaaaagatgtgtgtgaaaagaataagtggagtcacaagaattcccctatcatctggagagagctgttg

SEQ ID NO: 208563 - DNA, 100 bp, Homo sapiens
tcacaaacaaatccttgaaagaagaagatggagaagaaatagttacctatgatcaatcttgctgcatcacccaggcaggagtacagtggtgctatcacag

SEQ ID NO: 208564 - DNA, 100 bp, Homo sapiens
agattttaatttcagtgactgaattaaaaggtgtcaagaagctcagaatggtgtcatggagaaactccagctgggcccagagattctgcagcgggaaaat

SEQ ID NO: 208565 - DNA, 73 bp, Homo sapiens
gacggaggagtgaggggggcgaggaaacgcagtagaggaccgaaaacactttggagctgtagaagctaaacca

SEQ ID NO: 208566 - DNA, 96 bp, Homo sapiens
aaaaagaccaagaagaaccacaaggccatgaacgcccggggtgtccacccaattgtggttgtgcagccagatgcctggacagaggacaatggcttc

SEQ ID NO: 208567 - DNA, 74 bp, Homo sapiens
tggaagcgcagcaacagcaagctcccgggcaggtaagagcaaagaggcggaaattaagagaatcaacaaggaac

SEQ ID NO: 208568 - DNA, 89 bp, Homo sapiens
ccaggggagccgtggcctcctctccgccctagcgctgaggtcatcatcagatttgaaatatttaaagtggatacaaaactatttcagca

SEQ ID NO: 208569 - DNA, 116 bp, Homo sapiens
gcaagctccattggcagaagaacggagactacttgtgtgtgaaagtagataggactccgaaaggcacccagatttttacataccgttgctcaaaagagggctgcaagaagaaagag

SEQ ID NO: 208570 - DNA, 83 bp, Homo sapiens
atcacatgtttatgttctatgctccctaatgaagatgctattaaggagggccgcgatgggcctcttggaacattggtgtgttc

SEQ ID NO: 208571 - DNA, 100 bp, Homo sapiens
gaaaaatgcacaacagagggacaacaaaagcctcctacaagagtcctaccaaaagcctccccatggccacccatggaccagtcggcattcacttcctccc

SEQ ID NO: 208572 - DNA, 75 bp, Homo sapiens
ttggcaaaccagatatatgacttggtattttggcctctccccagtctgctcctggaaacttggacaatagtaaaa

SEQ ID NO: 208573 - DNA, 100 bp, Homo sapiens
ctgcaattgagaaacaggcacacaagtgtgaggagttgctaaatgctcagacagtctcgtgctgttgccaggctggaatgctggaatgcagtggcgcaat

SEQ ID NO: 208574 - DNA, 98 bp, Homo sapiens
ctgcggagaattggagatggggaccgccctggacatcaagattaaaagagcgaataaagtttatcacgccggggccggtctaattgaagccaacggag

SEQ ID NO: 208575 - DNA, 75 bp, Homo sapiens
gcggggctgaagaagcagttctacaaggcgagccaggagagtaacaacatggtggtgcctgccatgcagctcgcc

SEQ ID NO: 208576 - DNA, 73 bp, Homo sapiens
gcctcggaggcgttcagctgcttcaagatgaagaagtggtccaaaggcaaagttcgggacaagctcaataact

SEQ ID NO: 208577 - DNA, 83 bp, Homo sapiens
attcatcccagaaatctaagaggattttttatcaagcagaaatgcatcgaacaacgagaatcaagatcactgagctaaatccc

SEQ ID NO: 208578 - DNA, 100 bp, Homo sapiens
aagccaacagcgaggctttcagttctttggaattccattcttttccttattcttctgatgtggatccagatggagtctcgctctatcacccaggctggag

SEQ ID NO: 208579 - DNA, 90 bp, Homo sapiens
ggaattctgaagatcactcacttaggaaacaaacaccttctagccaccatggcaacctcatctgaagaagttttgctgattgtaaagaaa

SEQ ID NO: 208580 - DNA, 88 bp, Homo sapiens
ccaaactctttcttgttttccttcttggacttatgctatttttttgtggagacttgctgagcagggctctctttacctatgaaggcaa

SEQ ID NO: 208581 - DNA, 100 bp, Homo sapiens
ggcctcgctggagatcgagtaccaaattgtcactgctgttccaagggcacacgcagagggatttggaattcctggagagttgcctttgtgagaagctgga

SEQ ID NO: 208582 - DNA, 116 bp, Homo sapiens
caagacagacagaatgttttttcttacaaaaaagattgcagttatctgtccagaaaccagagcaagttatcaaagagccttgcatcccagggatgaagcccacttgatcatggtgg

SEQ ID NO: 208583 - DNA, 76 bp, Homo sapiens
ctacaaagctgggggaggctcatatattgctgcaggacatggatttgattgacatactttggaggcaagatataga

SEQ ID NO: 208584 - DNA, 86 bp, Homo sapiens
cgcagggaggatgtcgggacaccccggaagctgggaaatgattgtcctgggtcacataatgccagctgagcgtaaaaagccagcaa

SEQ ID NO: 208585 - DNA, 89 bp, Homo sapiens
atgagccggtccagaggccctccttccgagccgtcattcgtgacctcaatagcctcatctcttcagtaccccccaggcatgcggcagca

SEQ ID NO: 208586 - DNA, 87 bp, Homo sapiens
gtccttccagcgctgcgcccggacagacaagccaggtgactttatacacactttgggagatgcacatatttacctgaatcacatcga

SEQ ID NO: 208587 - DNA, 100 bp, Homo sapiens
agtaactcaaggatggtgatgtacccagtcatgctttcaactgatttgggaagcctacaccattcaccttagattgttgatccatttcagatacttgtgg

SEQ ID NO: 208588 - DNA, 86 bp, Homo sapiens
gtcgggttattcgagtgaccgagaccgcggccgggaccgagggtgtcctgtggccaggcggaaagcagtgagaagcccaacgctga

SEQ ID NO: 208589 - DNA, 100 bp, Homo sapiens
cacctctgcagctgcagaagtgaaccggcaaatgctgcaggaactggtgaacgcaggatgcgaccagctgaacatctccttcccagccactggctgccag

SEQ ID NO: 208590 - DNA, 74 bp, Homo sapiens
gcttccattggccagtatgaagtggtgaaggagtgtgtgcagcgagcactgcagtttcctcctgaaggctggct

SEQ ID NO: 208591 - DNA, 83 bp, Homo sapiens
cttcggcagtccacccaccgccgccgcctcccaggaagactatgaccgtctgaggcctttatcttacccaatgaccgatgtct

SEQ ID NO: 208592 - DNA, 82 bp, Homo sapiens
ctgctgaaaacagcctcaagaaaccagtaacagattgtgttatttcaactttcaagatattccatattctgattggtgtgag

SEQ ID NO: 208593 - DNA, 51 bp, Homo sapiens
gggaagtcgacggcgccggcggctcctgacatgtccttcgataactccctg

SEQ ID NO: 208594 - DNA, 102 bp, Homo sapiens
gcgctgtgctcttctctgccagcttcacacttggccccggcaaactccccatccagctccagctctggattaatcgaattacagctgctagccaggaacatg

SEQ ID NO: 208595 - DNA, 75 bp, Homo sapiens
gttcggccaagggaccaaggtggaaatcaaacatcttgattttgccagccttgctcgaggttttgccctgctgag

SEQ ID NO: 208596 - DNA, 97 bp, Homo sapiens
cttaaggtcttcagcggggcgctccaggaggcactcacagcccagctcaacattggcaatgtgctccctgtgggcaccatgcctgagggtacaatcg

SEQ ID NO: 208597 - DNA, 100 bp, Homo sapiens
catggagttcacagaagagtcgaggaggtctgtcatgctaatccatcagaaagagctcgttttattcgctgcatctataacttattacagtcatccagcc

SEQ ID NO: 208598 - DNA, 100 bp, Homo sapiens
atatcagttgggaatatgagggaccagagcatgtgaacttttatgttgaatatggtgtagcaggcattcaaagtgtcaagaacaagcctctcttctttgc

SEQ ID NO: 208599 - DNA, 51 bp, Homo sapiens
cggccgcagctgccacaaaccagtatcaagtggggcagctgtattctgtgg

SEQ ID NO: 208600 - DNA, 100 bp, Homo sapiens
gcgccctgcaccgcgcctcgcaaatactaaggctcgtacgtctgcatcgattatcttacgtggggcaaatgatttcatgtgtgatgagatggagcgctct

SEQ ID NO: 208601 - DNA, 82 bp, Homo sapiens
ggcgagtttccgatttaaagctgagctgcgaggaaaatggcggcgggagataacgaaggaggcccaacttcattcaataagg

SEQ ID NO: 208602 - DNA, 100 bp, Homo sapiens
ggaggagaaggcggcggctctctggtccgcagcggcaacagtaacgaaaaacagggctctcattgctatggacagtgctatcaccctgtggcagttcctt

SEQ ID NO: 208603 - DNA, 75 bp, Homo sapiens
aaatcacacgcataatggatgaaaggaaccgacagcagctgaagaacaatgggaactctactagcctgcctttgt

SEQ ID NO: 208604 - DNA, 97 bp, Homo sapiens
ctcctcggtggtcgcggcgacctccggcggcgggaggcccggcctgggcagacaatgcagatcttcgtgaagactctgactggtaagaccatcaccc

SEQ ID NO: 208605 - DNA, 96 bp, Homo sapiens
tcgataaggccaagctgaagaaaacggagacgcaggagaagaacaccctgccgaccaaagagaggcagagcggcttgggtaaatccaccttaatca

SEQ ID NO: 208606 - DNA, 75 bp, Homo sapiens
agaagaatgctgagcaagcagctactcagttgaagtgaaatcaaatacattgcccatctcgctgcagtctataag

SEQ ID NO: 208607 - DNA, 75 bp, Homo sapiens
agctggacggcgagcgcgagcggcgcgagaaagcccacaatgccccgctgagccggtgcagcagctgagtggatc

SEQ ID NO: 208608 - DNA, 75 bp, Homo sapiens
gcctcattcccataacgacccagctattgtggacgatgaaaggctctctgcagaggagatggatgagaggaggcg

SEQ ID NO: 208609 - DNA, 98 bp, Homo sapiens
gaacagcgacagtacaaagaagactcttgtcacactaattgccaacaacaatgaagcggcagaagctagagccatcccaagttgggctggagcggcag

SEQ ID NO: 208610 - DNA, 98 bp, Homo sapiens
aatgctgttacctgaaccccttacttcgaaggatcataagattcacaggccagaagcggactcctagaagaggggagcagcaaggatggaatgacagc

SEQ ID NO: 208611 - DNA, 82 bp, Homo sapiens
atgacacagccctcagcgagagtgccaaccaggccttcctgttcaaggagcagggacaagttacaggaatgttctccaagca

SEQ ID NO: 208612 - DNA, 97 bp, Homo sapiens
ggaagaacagaataaagattatcaagactgtagcaaaaccacttcattgtgcgcaggaccctcagctggaaggggtctgtgtacatcagcaactttc

SEQ ID NO: 208613 - DNA, 100 bp, Homo sapiens
cacggcggacgttcttgttctgtggagaataacggctgcacctggagattgacgcagagtgggcggcggtggtgttagtacagaagaaactccaagcctc

SEQ ID NO: 208614 - DNA, 82 bp, Homo sapiens
gaggcttactgcaagaagtatgagcagctcaagaggagctgatcacgcagtacctggctgagcttcggaaccccgaggagat

SEQ ID NO: 208615 - DNA, 75 bp, Homo sapiens
aaaagccaagaggaggacagttcgctacacagcaatgcatcgagaatttaagaagtgcaacatggccaggggctg

SEQ ID NO: 208616 - DNA, 101 bp, Homo sapiens
ccaacattcaaggaaacaaatcaactaaaaacaaaattgccagaaaatctttcctctaaagtcaaactgagtatggaagagttggagaagaatcatgataa

SEQ ID NO: 208617 - DNA, 98 bp, Homo sapiens
cttggcactcgcctcggatttgggggcttcctcactcgtggctttccgaaggctgctgggcatttgacactcttgcaaaagcattgaatcctggagag

SEQ ID NO: 208618 - DNA, 88 bp, Homo sapiens
aaagtggatcaattaagagatcgcccgggaccgtggcgcttcgagagattcgtcgttatcagaagtcgaccgagctgctcatccggaa

SEQ ID NO: 208619 - DNA, 100 bp, Homo sapiens
tcggcggctcagttgtccatgaccctgaaggtccaggagtacccgaccctcaaggtgactccccggacagctcaacaccaaagctttcgcgggcacagcg

SEQ ID NO: 208620 - DNA, 74 bp, Homo sapiens
cccaaatcacctgtacttggtcatgcagctgctgaccggttccctgatgtgttacctgcttctgctactgatcc

SEQ ID NO: 208621 - DNA, 74 bp, Homo sapiens
ccgcgagctgcatcgcgcgcccgaagggcaactgcctgccttcaacgcatatcacacctgaaaaattttatgtg

SEQ ID NO: 208622 - DNA, 100 bp, Homo sapiens
ctgaagtccctggaggaggagctggagaggaaggcgaggatcatccagcagctcgtcaacggcatcatcacgcccgccaccatccccagcctgggcccct

SEQ ID NO: 208623 - DNA, 82 bp, Homo sapiens
ggagacaagatagcaacgttaattagcagtttccttaaagagctcctggtggagatcatgtatcagttggaggacttggaga

SEQ ID NO: 208624 - DNA, 127 bp, Homo sapiens
ttagaatcccaagaaaatcaaatggcatccggggatttctgctcacctggagaagggatggaaatacttcaacaaggatgtacagttacccagcacgtgtacctcctcctcctcctattgctcgggc

SEQ ID NO: 208625 - DNA, 90 bp, Homo sapiens
cggcggagtagcaagtggccatggggagcctcagcggtctgcgcctggcagcagattcttggtgccaccattgagaactccaggattgtc

SEQ ID NO: 208626 - DNA, 96 bp, Homo sapiens
ccctgaggtccttcacagcctgcaggcttccaaaagccaggatcgcaaatcagccagcagagagaagcggtccgtcgtgtcctttgataaggtcaa

SEQ ID NO: 208627 - DNA, 51 bp, Homo sapiens
ttcgcagtggtcgcttcttctccttgagaattcgagaagagaagcgagaag

SEQ ID NO: 208628 - DNA, 100 bp, Homo sapiens
catcatcagtctatttagaagagcaaataatttcccgcatcttcactcttcatcttcccaccctcttctggacaactcctgacattctgtgatattcagc

SEQ ID NO: 208629 - DNA, 75 bp, Homo sapiens
aacgatctacctatgttacagaagtcagagaggtttcagtgttgactggtgggctcttggagtgctcatgtttga

SEQ ID NO: 208630 - DNA, 100 bp, Homo sapiens
tgggtatggaggaggacctggaggtgacaaagaagctgaagatgggtggtggagagaggtataacattccagcccctcaatctagaaatgttagtaagaa

SEQ ID NO: 208631 - DNA, 83 bp, Homo sapiens
cttacctatgaggccagcaagcggaggtgctgggagcgagttggctggctgaccccgcactacatctacccaccagccatcgt

SEQ ID NO: 208632 - DNA, 100 bp, Homo sapiens
gcgaaatggggggaaatttcttaaatccttttcagagtgagagtaacattcctgatgtagatgaagaaggctacagtattaaaccagaaacaaatcagaa

SEQ ID NO: 208633 - DNA, 88 bp, Homo sapiens
catcctggaagctgggaaatgattgtctacatgggctggtgtgaagcccgggagcaagaccccctccaggacagagtgtactccccga

SEQ ID NO: 208634 - DNA, 96 bp, Homo sapiens
tctatcccaggaatacagctttgcattaggtcacgcaatatttaaactcacgtatctaagcaatcacgactataaacacctctactttgaatcgga

SEQ ID NO: 208635 - DNA, 90 bp, Homo sapiens
tgaagtctacagaacccaaagccgcccctcagcccatcatatctgaagatattagtgagctacaaaagaatcaaactacatctgtagcca

SEQ ID NO: 208636 - DNA, 99 bp, Homo sapiens
gtgaatttccatgtcaacatagtccagctatatgtgagacagagcctgaacagcctgttcgacattacccattatgggtaaaagtagaaggtgaagtag

SEQ ID NO: 208637 - DNA, 75 bp, Homo sapiens
gggcggagtgtgctcacggctcctgctgccaccagtgtaagcccatgcagaatgccaccaagtatggcaacatga

SEQ ID NO: 208638 - DNA, 88 bp, Homo sapiens
ttcaagtttaccaaaagagaggcaccgctggaacactaatgagcttgtactcccagagtacctcatccacgctttcttctgtgtcatg

SEQ ID NO: 208639 - DNA, 100 bp, Homo sapiens
ggagcgacgcggggcgggccctgggggtcctcagcgtggtctgcctgctgcactgctttggtgctggagaatctggtaaaagcaccattgtgaagcagat

SEQ ID NO: 208640 - DNA, 100 bp, Homo sapiens
accaaccacggaggctccccctctgcctcctaggaacgccgggaaagaggactgctgtccaggtctgttttgcaagcacagagtgcttctccaatcttca

SEQ ID NO: 208641 - DNA, 50 bp, Homo sapiens
tggcagtgtgggacacctgcttggagcaggttcaggagaagtggcacctg

SEQ ID NO: 208642 - DNA, 90 bp, Homo sapiens
cccagctgcagctgtggctgcagtttgaggctctgaacaaggttgagataagtcgaagagtgactctggaaaaactccctcctgtcctcg

SEQ ID NO: 208643 - DNA, 100 bp, Homo sapiens
ggtaaagaaagtgcctacatgttgttttatcggaaatcccagttgcagagaccccctgaagttacaaggagaacatcatgcgcctctccagccttcacaa

SEQ ID NO: 208644 - DNA, 76 bp, Homo sapiens
gaaacatcgagtcactttgcctggacaggaggaaccctgaattactctgcttaatgtaagcaagctgaacattttg

SEQ ID NO: 208645 - DNA, 82 bp, Homo sapiens
cttcaacaagaggacccaggagaaattcgccctcaaaagttgcatgctgagaatttgaaaaatgaagatgatgtagacactg

SEQ ID NO: 208646 - DNA, 83 bp, Homo sapiens
gtttgtactatcctcggtgctgtggtgcagagctagttcctctccagctcagccgcaaagccagacagaggaagtgaccagag

SEQ ID NO: 208647 - DNA, 75 bp, Homo sapiens
cctggcagggtttctgctccaagtgctggagggaagagtaccacaaagccaggaaccgggaagagcagaatttgg

SEQ ID NO: 208648 - DNA, 88 bp, Homo sapiens
gggggctccctggacaactccgagcaggttaatttggagtggcccctggagtcagtttcctacaccatccgaggccccacccagcacg

SEQ ID NO: 208649 - DNA, 100 bp, Homo sapiens
gttgaagagttcaactttcccagaagttgttctaacgctgcctttgctttaaaacagtattacttgcgatacctcttccaaatgcatgatgaagatgttc

SEQ ID NO: 208650 - DNA, 100 bp, Homo sapiens
aaaaaaaagacctgctttgccctgggaaatagtaaccctgccaaatacatcagcttgtaggagacagaggtatgtgaaagcaagaacagagctaacatgg

SEQ ID NO: 208651 - DNA, 96 bp, Homo sapiens
ggagcagagattaaaagagttcggcgaggaactccagaatacaagctccataatgggagaagtaaagaacaaagacttaaggaacagcttggcgct

SEQ ID NO: 208652 - DNA, 83 bp, Homo sapiens
cttgcagactgtggcgcaactggtcttggtagcggaggcacccgaatgctgcccgggtgagcctggtccgacccccagtggca

SEQ ID NO: 208653 - DNA, 75 bp, Homo sapiens
aaaaagtgctcctgggactccaggataccagtcttactgttaacagtcccaggaatggaagagaccacatcagag

SEQ ID NO: 208654 - DNA, 75 bp, Homo sapiens
gaggagtacgacgtgatcgtgctgggcaccggcctgacggggatggagaagtttatgtttgggatgtgaactcaa

SEQ ID NO: 208655 - DNA, 50 bp, Homo sapiens
catcctggaagctgggaaatgacttcctctgctaaattacctcgctgccg

SEQ ID NO: 208656 - DNA, 100 bp, Homo sapiens
tacagaatgcacagtatttgctgcagaacagtcggcgtggcacaagcctaatggaagatgatgaagagccaattgtggaagatgttatgatgtcctcaga

SEQ ID NO: 208657 - DNA, 74 bp, Homo sapiens
gagaccgtgaccgagagcgtgaccgagagcgcgaatatcgtcatcgttagaagaactaaagatgactcagagcc

SEQ ID NO: 208658 - DNA, 103 bp, Homo sapiens
gagcctcagttggaagcagccgatccagcctgcggagcctgtggggcaggccctgggaggagcggggacactgaggacctctctccaaattggcctctcaact

SEQ ID NO: 208659 - DNA, 83 bp, Homo sapiens
gccgccgccgccgccgccgcgccgagcggaggaggaggaggaggcgaggaggagagactgaaccacgtgaatgttgagggggc

SEQ ID NO: 208660 - DNA, 101 bp, Homo sapiens
aagatggcggaagcggaggagtctccaggagacccggggacagcatcgcccaggcccctggatgctcacaactgtattcctgagctggacagtgagacagc

SEQ ID NO: 208661 - DNA, 50 bp, Homo sapiens
ggccttactccttcacagatcggatctgtgccagttcagaagcaggcgag

SEQ ID NO: 208662 - DNA, 51 bp, Homo sapiens
cagattcgcagtggtcgcttcttctccttgcagaagaagatctttacaatc

SEQ ID NO: 208663 - DNA, 50 bp, Homo sapiens
ggtacctgtgtatatttctggggctacagtattcaagtcaaacaacgttg

SEQ ID NO: 208664 - DNA, 100 bp, Homo sapiens
ttaccacttctttatacttgcacagaggcagctctatgagggatgtgtggacactgcactgaagacaggaccgcagctgaatgcacagctagaaggttgg

SEQ ID NO: 208665 - DNA, 100 bp, Homo sapiens
ttggattgatccagaggtttcttgtacttcagatttacgtacccctgggacaagacttctccactgaattgctcagtcctatgcaccagctccccacccc

SEQ ID NO: 208666 - DNA, 99 bp, Homo sapiens
tccacggagtgtatgaccacaaacagccatcaaggtataagaacagcactcctggaatcagatgagcacacatgtccgacgtgtcatcaaaatgatgtt

SEQ ID NO: 208667 - DNA, 100 bp, Homo sapiens
tgggtcaccatcctgtgcatggcacggctcaagacagtcctgaaatactagctttccacagccccaccaccaggatcaagaaggagccccagagtccccg

SEQ ID NO: 208668 - DNA, 50 bp, Homo sapiens
gggaagatggcggctgggttcaagtatgttaagctactgcgacagataca

SEQ ID NO: 208669 - DNA, 83 bp, Homo sapiens
cgaccgtccgccagtcgtcccgaggtgaccccagggtttgaagaaaaggagggggagctgctggtgaggggaccctccgtgtt

SEQ ID NO: 208670 - DNA, 90 bp, Homo sapiens
gtatttacctacggagtcagattcctgaaaaagatagaatgagtccatttaagtcccaggacggtggaaactagctagtagattgcagcc

SEQ ID NO: 208671 - DNA, 99 bp, Homo sapiens
ctcctcccagtgacgggtctggagtgcgtgggggaccggctgttggcggacgcaaacatgcagatctttgtgaagaccctcactggcaaaaccatcacc

SEQ ID NO: 208672 - DNA, 102 bp, Homo sapiens
ctgcgggaagcgggcggccccggccgcctccgcgagggcaccatggaggtgaatgcagacaatgcagatcttcgtgaagactctgactggtaagaccatcac

SEQ ID NO: 208673 - DNA, 83 bp, Homo sapiens
gttcggccaagggaccaaggtggaaatcaaaccaggggaaatgctgtctgtagctgagcacttcctggagcagcagatgcacc

SEQ ID NO: 208674 - DNA, 83 bp, Homo sapiens
ctggcatctgtgtccaacctggtcactgtgtttgagaatagcagaatattatccagcaatgcaaatgaacaaactataactac

SEQ ID NO: 208675 - DNA, 83 bp, Homo sapiens
cttgcagaaaaattggtgtacctcagttgatcatggccttgccaggttggtgacagtatattgtgagcatggtcataaagctg

SEQ ID NO: 208676 - DNA, 96 bp, Homo sapiens
aagaaacccagcttgatatgttgaacatacatatgatagttgagaaagacacatattctgatcatgaagaaataaacacaagttaaatatgactaa

SEQ ID NO: 208677 - DNA, 100 bp, Homo sapiens
gcggacctgaagatgctcacagagcgctatagttatgtctgcccagatttagtaaaagaatttaacaagtatgatacagatgggtcaaaatggattaaac

SEQ ID NO: 208678 - DNA, 74 bp, Homo sapiens
agcgggagacagcggtgacaggagcagcggccgggagcccttagggaggcagctggttatattctgggcactaa

SEQ ID NO: 208679 - DNA, 82 bp, Homo sapiens
accagatctgtcttcactccaattccaccaagttctccctctttgctggaggcatgctgaaactaatctggattcactccct

SEQ ID NO: 208680 - DNA, 96 bp, Homo sapiens
ggaagaggaagaagagtctcactcagatgagatccagcacacggaagacatggagaacgagatcgacgagctgctgcaggagttcgaggagaagag

SEQ ID NO: 208681 - DNA, 82 bp, Homo sapiens
ctccgccctagtttctaaggatcatgtctgcgagccaggattcccggtaactaggatttctacctcaaccgcgagacctatg

SEQ ID NO: 208682 - DNA, 89 bp, Homo sapiens
gggggagcggggccttccacaccccctccgtgggtgtgtggagtgtggccatctggggccgtgtggtatttgccactcaggagacatgt

SEQ ID NO: 208683 - DNA, 87 bp, Homo sapiens
gtctttatatcctgacactatgaatgctacttggatgcctcttaaggacagaactgtaccgctctctttttggccagctccaccctc

SEQ ID NO: 208684 - DNA, 82 bp, Homo sapiens
ttgcagatcgggagcgcaaggtcgccctcaaggccatgatcaaaacgcctactcccaggatgcctacctgaaagggaacgag

SEQ ID NO: 208685 - DNA, 75 bp, Homo sapiens
gtcatgtgattcagcctaatatctcaataccatgctgtgaagtccaggccacatggaggtgtcctgtgtagatgc

SEQ ID NO: 208686 - DNA, 75 bp, Homo sapiens
gccgccgctggcgcatggcgggacaatgcagatcttcgtgaagactctgactggtaagaccatcaccctcgaggt

SEQ ID NO: 208687 - DNA, 112 bp, Homo sapiens
atgaattggaatgctttagaatgggaccgagctgctgaagagcttacatgggaaagaactagaagcagccaaagatgattatcgaatacgttgtgaagagttagaaaaggag

SEQ ID NO: 208688 - DNA, 100 bp, Homo sapiens
gtgagaccgaaatagactctgaagtaatatctggactttgaaattgtggtataagttgaaatccaaaccaggaaagaaggacaaggagcgaggagaaatt

SEQ ID NO: 208689 - DNA, 123 bp, Homo sapiens
ctgccggatggtgctggccacttgcttgggatcctttatcctggtcatcttctatttccaaagaggcagaaatcctgaacacagccatcctcacggggaagacggtggccgtcccggtgaaag

SEQ ID NO: 208690 - DNA, 75 bp, Homo sapiens
tgggcacccgcgacgacgagtacgactacctctttaaaggtcacagatgtgacattgatgtgtccactgaagcca

SEQ ID NO: 208691 - DNA, 50 bp, Homo sapiens
agcgagcggaggagcaggcgccggaggtatctcagatgaagacatcatca

SEQ ID NO: 208692 - DNA, 100 bp, Homo sapiens
ctctgcaaactcaacttgctgggccggtgcaactattcgcagtccgagcgcatcgagagtaaacatgaggttacgatcctgggaggacttaatgaatttg

SEQ ID NO: 208693 - DNA, 82 bp, Homo sapiens
cgagtgggagcaccaggatctcgggctcggaacgagactgcacgctctcttcaatctaattcccgtgggcctgcgtgtagtg

SEQ ID NO: 208694 - DNA, 82 bp, Homo sapiens
gggccagtacagcaccggcaagaccaccttcatcaggtcaatggccagcaaggaggggggtccgagccggcggcggcggcgg

SEQ ID NO: 208695 - DNA, 101 bp, Homo sapiens
tggggtccccatctcagtcactggcattgcccaggactacaaatccctccaggatatcattgccatcctgggtatggatgaactttctgaggaagacaagt

SEQ ID NO: 208696 - DNA, 75 bp, Homo sapiens
ggagaagttagcttcagagttctttgtggatggacttgattctgatgagaggagcaggggagagaagacagaaga

SEQ ID NO: 208697 - DNA, 75 bp, Homo sapiens
aaacttcaacagaatgtggcaaccagaaggaggcaatgtatatgcaactggtggaaataatgaaggacagttggg

SEQ ID NO: 208698 - DNA, 95 bp, Homo sapiens
gcttcaggtctcctagcaacaagttgtaccatatgaggacggccgctgaggtatatgaatgacctaaaggtacaaataaagacggagagagaaca

SEQ ID NO: 208699 - DNA, 75 bp, Homo sapiens
aacgtggtcccttcacccgggctccgctcttgccttctccacacttgtttggtgattggagttgtgcttcaaaaa

SEQ ID NO: 208700 - DNA, 100 bp, Homo sapiens
caccgagcatgagctgaccgtcagcaccaggagcagcgaggcactcatcctgcacgccggcgagtgccagcggtacacccccgtgggccgctccttcttc

SEQ ID NO: 208701 - DNA, 51 bp, Homo sapiens
cagataacttctgtgaagctgatggaatcattaaccaatggcaacaggaat

SEQ ID NO: 208702 - DNA, 96 bp, Homo sapiens
aaaggagggatgaacagaggcctgtgcccagatgttcagcctgttgcctatgaagagcctaaacattggtgttcaatagtctactatgaattaaac

SEQ ID NO: 208703 - DNA, 50 bp, Homo sapiens
agcagccttagccctagtgtagagagaaaagaaaccttgtttattccctg

SEQ ID NO: 208704 - DNA, 98 bp, Homo sapiens
gggagactgtgaacatgtcattgtcattactgacataagttttcggctttgtgagaaaccttaccatcaaacacgatggccagcaacgttaccaacaa

SEQ ID NO: 208705 - DNA, 100 bp, Homo sapiens
agttcctgggaaggtggagccaccagcctctccttggttctcagaggcactgtgactgacttccctggatttgatgagcgggctgatgcagaaactcttc

SEQ ID NO: 208706 - DNA, 50 bp, Homo sapiens
ctggtgaagagggcccggctggtgcgagcagaggaccctgcggccttccg

SEQ ID NO: 208707 - DNA, 75 bp, Homo sapiens
gggtgaggtacaggctcagtctgcggccaagactccgtcctgcaaggtttgggccccatggtatccctgtgacag

SEQ ID NO: 208708 - DNA, 100 bp, Homo sapiens
gtcgctgggtgcgtggggctgcctcgccgcgtctcgccacgaatctccctggaaaaggagacatgaatgtctgcaatgatacttcctgacaagaagttga

SEQ ID NO: 208709 - DNA, 83 bp, Homo sapiens
cgagctggttaggaggcacagggcgtcggacctgcacgagctgtctgatgccttcaattaagttgcagagttctgatggagag

SEQ ID NO: 208710 - DNA, 100 bp, Homo sapiens
tgtgtaacaagaaattctccagagtggctagtctcaaagcgcatattatgctacatgaaaaggaagagtatgaagtgtaacagaacagactttaccacct

SEQ ID NO: 208711 - DNA, 100 bp, Homo sapiens
ccgaggctggggctgggtcagcaaccgaattccagtttatctcctgttgcagtgaccatcgatgcaagtggcttccagcttctatgaacaccgtctccac

SEQ ID NO: 208712 - DNA, 118 bp, Homo sapiens
tggccaacctcagtgcagccaaccatgatgctgccatctttccaggaggctttggagcggctaaaaacctatgccatggacaatattaccaggcagaaccaattctacgatacccaag

SEQ ID NO: 208713 - DNA, 83 bp, Homo sapiens
ccctgcgccgcctcctcccaccctgagcagagccgccgaggatgataaacacccaggacagtctgggttctgcccgcacacat

SEQ ID NO: 208714 - DNA, 83 bp, Homo sapiens
ctgagaggggctgcggccggagcgggcggctgagacaaaggcgacgggccaattcctgtccccccagcagcatggcatcgtgt

SEQ ID NO: 208715 - DNA, 100 bp, Homo sapiens
atcattttccacatcacgttggtgagccttgaagctcaacatcgtattgcacctggctacaactgatgaaggtttaaggctcagaaaggtagcacattcg

SEQ ID NO: 208716 - DNA, 83 bp, Homo sapiens
cagacgccaaggcccctccggccagggccgggagccgggccggcctagccaggcaaatgttctgaaaaagactctgcatggga

SEQ ID NO: 208717 - DNA, 75 bp, Homo sapiens
agcgaagccgaaaaaggcagcagcgaagggatcttgcctcggagctggtcccactacacggtgcctgccggcatg

SEQ ID NO: 208718 - DNA, 90 bp, Homo sapiens
agaagacattgcattgcctcttatgaagtgctgaggaatgtaaacaagtttgctgggccttgcgagacttcaccaggttgtttcgatagc

SEQ ID NO: 208719 - DNA, 50 bp, Homo sapiens
attaaagagtaaagttgtgctcaacggtcccctcttgctgttggctgcac

SEQ ID NO: 208720 - DNA, 99 bp, Homo sapiens
cgcaggaggacttcgagctgattcagcgcatcggcagcggcacctacggcgacgtctacaaggctggagcattggatttgctaaaggagcttaagaata

SEQ ID NO: 208721 - DNA, 90 bp, Homo sapiens
gctgggcgggaaggcggcgccccggccgaggtggcggcggctcctcaggctctgacgcccgctctgcggcttcggtgtttgaacaggcca

SEQ ID NO: 208722 - DNA, 83 bp, Homo sapiens
tccctgagaaccgtttacttccagaagattggtggagcttgatctgaaggttccggaatgaggactacaccatacatgtgcag

SEQ ID NO: 208723 - DNA, 99 bp, Homo sapiens
ttcagaatgctgtttatagtgaactgagtgtccagttgtttggggaagaagatgctgatcaagaagtatctcctgacagagctgaccctgaagctgcct

SEQ ID NO: 208724 - DNA, 83 bp, Homo sapiens
tcgtgcacgagaccggctacttctcggcgctgccgtctctggaggagtactggcaacagtgcagagcagagcgggcggaggac

SEQ ID NO: 208725 - DNA, 83 bp, Homo sapiens
atggaagtccgggagagaatacacagagccagtggagtccacagctgtggtgagcttcttggaggaggcagggtcccgaatgc

SEQ ID NO: 208726 - DNA, 83 bp, Homo sapiens
catgttgatttagctcaaattattgaagcctgtgatgtgtgtctgaaggaggatgataaagacgtgaagccctccaatatgct

SEQ ID NO: 208727 - DNA, 115 bp, Homo sapiens
agctgcgctgtcctaaatgtggcgacttgtgcacacatgtagagacctttgtatgttgtcctggtgacagacggctgtcttggcattggtagagggtcactgcgacattccctag

SEQ ID NO: 208728 - DNA, 99 bp, Homo sapiens
gggaggaaggaacgaggcaaggagctaaagcagcgtgcgttcagccctggggtgtttcccattaaacactaccaggacaaaatcaggccttacatccag

SEQ ID NO: 208729 - DNA, 74 bp, Homo sapiens
cgagcccaaaccccgccaccatcatagcttgcattggtgacttggagagactgtctgttcaggccactgaataa

SEQ ID NO: 208730 - DNA, 75 bp, Homo sapiens
gcaaaatgagctcttcagaagaggccctggccaacgtcaacattgggagcctcatctgcaatgtaggggccggtg

SEQ ID NO: 208731 - DNA, 99 bp, Homo sapiens
ggctggttgttccgttgcgagctgcagctgcgatctctgtggtaggcccaggagtgtatctcgcagtcagcagtgaaaacaaagttcgaacagcacact

SEQ ID NO: 208732 - DNA, 82 bp, Homo sapiens
ctgggacacccgggagtcaggaaatggacgagattgaggagctgcgggccgagatgctggagatgcgggacgtctatatgga

SEQ ID NO: 208733 - DNA, 90 bp, Homo sapiens
gttgtggataagactcctgtcatccgctcagtgatactgaaactgcttttgaagtacagccttttgactcggatgaagagacacggaagg

SEQ ID NO: 208734 - DNA, 100 bp, Homo sapiens
gccgccgccgccgcccagagactgctgagcccgtccgtccgccgccaccacccactccggacacaggaacaagatcactcaaggtgaaggataatctact

SEQ ID NO: 208735 - DNA, 100 bp, Homo sapiens
gtgatgccagaggtcaacaaggttctggacaagatgaagtctttctgccagaggagaaatgtctgaagtaagacccctctccagagacatcttgatggag

SEQ ID NO: 208736 - DNA, 100 bp, Homo sapiens
gccaaaaatggagaaatttttggaaattcagttcatgaagataagaagtttcttgacaaatacatgccccagttcatgaaacatcttcattatagaataa

SEQ ID NO: 208737 - DNA, 100 bp, Homo sapiens
cccaaatccaacaacttctccaggacaagcagtttgaattggctctgcagctcgcagacagtcattttgtttactcattcagccctgttgcaggtcccaa

SEQ ID NO: 208738 - DNA, 75 bp, Homo sapiens
cgggaagtcgacggcgccggcggctcctggattgaaagaaggtggcaagaggaagaagcagaagcagagagagga

SEQ ID NO: 208739 - DNA, 74 bp, Homo sapiens
acataaagaaaaatataaatgcatacttccccttgtgacaagtggggatgaggctttggaggagaagatacgga

SEQ ID NO: 208740 - DNA, 110 bp, Homo sapiens
cggctgccatcttagtctagggactgaggagtcgccgccgccccgagtcccggcattcccatcaagagcaccatggacaaccccaccaccacccagtatgccagcctcat

SEQ ID NO: 208741 - DNA, 94 bp, Homo sapiens
gtcagtgcgccgctctccagcccgcttgaacggtacaatgactcttcttgcttttcacctaagttgaataagcaccctgtgcactttaatctcc

SEQ ID NO: 208742 - DNA, 75 bp, Homo sapiens
agcctcctgaatagctaggaccacagttacatgggaataggactctcggctcaaggcgtcaacatgaacagactt

SEQ ID NO: 208743 - DNA, 75 bp, Homo sapiens
taacacagtacctgttaacaacgtgtgattgtgacacatacctctgctcagaatgtgagcgatttgactctcctg

SEQ ID NO: 208744 - DNA, 82 bp, Homo sapiens
tggaagcaggactgcgccgcgtcttcctcaaggtaagaatgattgatgttggctgatattggagtgctcattcacatgaagt

SEQ ID NO: 208745 - DNA, 75 bp, Homo sapiens
taccaccagaagagcagtgacttctcagtttcccaccagcctccctacagaagatccacatctcaaagaagtggg

SEQ ID NO: 208746 - DNA, 50 bp, Homo sapiens
ctccggagacttcttagatctgaaggaacattttagtggacaaaccaaat

SEQ ID NO: 208747 - DNA, 50 bp, Homo sapiens
cctggatccaggataacggaggctggcacaagtggaagtgctgtccgctg

SEQ ID NO: 208748 - DNA, 102 bp, Homo sapiens
caacttctgcaaggcggtttctagtgcaaatcccctgctcagggtcttcatccagaaacgaggtacaattacattttctactacaagaagatgtactacaag

SEQ ID NO: 208749 - DNA, 100 bp, Homo sapiens
cctgctgctctaccacctgcaccccttcttgcagcgccagcagcttgcttatggcatctatgtcatccaccagattggagctggagtgagccttccagga

SEQ ID NO: 208750 - DNA, 84 bp, Homo sapiens
ggggcgaagattgacgccagtaagaacgaggaggatgaaggtttgtacaatgacgacagaaacctgcttcgaattagagagaag

SEQ ID NO: 208751 - DNA, 78 bp, Homo sapiens
cggccgtggaagcggccaccgactactgtcagcagctgtgccaggtttggtgcacctcgatttggaggaagtagggca

SEQ ID NO: 208752 - DNA, 90 bp, Homo sapiens
tatggcaacatgacagaggaccatgtgatgcacctgctccagtggccctcatggagcacagcaactgctcgtcggagcccggcttctggg

SEQ ID NO: 208753 - DNA, 101 bp, Homo sapiens
cggctgcggagccgggcgctctccgccttcaagttgcggggcttgctgctccgtggcacaagctccgggtggataaggcagctgctgcagcagcggcacta

SEQ ID NO: 208754 - DNA, 82 bp, Homo sapiens
cctgcgtggccagcgagacttccacaggcacatcggtggccgcctccttctttgcacggaacaagatcactcaaggtgaagg

SEQ ID NO: 208755 - DNA, 75 bp, Homo sapiens
gagactccagccggcgggcgagcaggggtgctttcttctgcgacctggtactcatctacctcatcaaaaagagag

SEQ ID NO: 208756 - DNA, 101 bp, Homo sapiens
cgctgccgccctgagtcactgcctgcgcagctccggccgcctggctccccatactagtcgccgtgttggaaaaccttggacagacaattgtccccgatttg

SEQ ID NO: 208757 - DNA, 82 bp, Homo sapiens
tacgacaccggcgaggaacttggcagctaatcttccagtaccaacaattgcagcaatagatggactcgctttaggtggtggt

SEQ ID NO: 208758 - DNA, 126 bp, Homo sapiens
aagcagaagccactggagaaaaacggccaagaggcagacctaggaaatggctcttgcccctgttctttgcttctcgttttgttggtgaagatatcacagtgatgtctgcattcaacctgctgcatt

SEQ ID NO: 208759 - DNA, 98 bp, Homo sapiens
agcaggcagatgatgcagaggagcgagctgagcgcctccagcgagaagttgagggagaaaggcgggcccgggaacagacactctgacctggtcacagc

SEQ ID NO: 208760 - DNA, 50 bp, Homo sapiens
tggaaggagtgacagatactaagccaggtctgatgaaagtgactcctctc

SEQ ID NO: 208761 - DNA, 90 bp, Homo sapiens
ggaagatgcaagcggtttgggaccttgaacaaggcaaatatggttttggaaaaccaattctgtgtcctcggaggaccacagcccagttgg

SEQ ID NO: 208762 - DNA, 100 bp, Homo sapiens
ctttggacttcgctactgtgatgccaaacggagctccttaataagcatttatagtcagtttttggcagcaatagaatcactaaaggcattctgggatgtt

SEQ ID NO: 208763 - DNA, 100 bp, Homo sapiens
ttaaagacttaggactcaatttccacgtgtctgtacttggagaaaccttcacagatgtcccaggatagtggccaaagcctccaagaacctcatgtccacg

SEQ ID NO: 208764 - DNA, 88 bp, Homo sapiens
ggaagatggcgaaggtctcagagctttacgatgtcacttgggaaggtctattattagcagaagatttttctgcatagttggcacgctg

SEQ ID NO: 208765 - DNA, 100 bp, Homo sapiens
cactatttagtattcttgaaggagagcttgaagcaagggaccttgttatagaagccttaaaggaggctgaggatggcattattgcttatgatgactgtgg

SEQ ID NO: 208766 - DNA, 90 bp, Homo sapiens
ccggaatgtccagctcaatgacgtggcccacctggtacagccgagccaagcagatgcccggactctgaagacctactgggtgagcaaagg

SEQ ID NO: 208767 - DNA, 83 bp, Homo sapiens
gtcggaacagaaccaaaggctattggatcagctcagcaggggaaatcctcattgacgattcaatttgttgaaggccaatttgt

SEQ ID NO: 208768 - DNA, 82 bp, Homo sapiens
ccgattcctcctccttggtcgccgcgtccttggctggcgttccctgaagaggaaggagaaggaatatgagcatgaaatggag

SEQ ID NO: 208769 - DNA, 74 bp, Homo sapiens
ctgctttccactcggctcctgtcgtccgttctctcaggctcccgttcagacagagtttcactcctgttacccag

SEQ ID NO: 208770 - DNA, 96 bp, Homo sapiens
gacacggacgtggtcaagcttgctgtccccggcataggtccatctctgcagaagccatttcaggagtacctggaggctcaacggcagaagcttcac

SEQ ID NO: 208771 - DNA, 100 bp, Homo sapiens
gggaagaagtagaggactgttgtggataatattaatgcagctgtgatggatttgaaaaaaaagaagatccgcagtctaagtgaagaggtcaaaataggag

SEQ ID NO: 208772 - DNA, 82 bp, Homo sapiens
gctgcagcagcagcagcacagcgacaagacgtgtactaatggtcacttgatgtgcgctggctgttttatccacctactagca

SEQ ID NO: 208773 - DNA, 100 bp, Homo sapiens
aaccaccttctggcagatggagggagctttggagactgggcatccactatagagaagatgcatcagtctgccatgtatgaactatgccaggggatgcacc

SEQ ID NO: 208774 - DNA, 83 bp, Homo sapiens
cagtcggacaggatgagcaagtcaaaggaacttttaacccagggcacagtggacgaccttccaaatcaaagcaagtaactagg

SEQ ID NO: 208775 - DNA, 106 bp, Homo sapiens
ccagagttttatacttcacttttccaggagctctggcccctcctcaggccgaatggatcagcttccccagaagaatctcctgcgactacaccctgctggctctgct

SEQ ID NO: 208776 - DNA, 75 bp, Homo sapiens
aaaaaatttaccctactgtcaactgtcaaccactgggaatggtggggtggaagacaacccgtgagtattacacct

SEQ ID NO: 208777 - DNA, 101 bp, Homo sapiens
tgatgagcagcatgtcagaccagaccgtccgggtgaagttggaagctgaaggtgttcctgaagtatctgaaaaatatgaaattagctctgttcccactttt

SEQ ID NO: 208778 - DNA, 75 bp, Homo sapiens
gctcaggatggggcggccgtggtgaggaaccctggactctcagaatatcctccgaatcctaaatctagagctcca

SEQ ID NO: 208779 - DNA, 100 bp, Homo sapiens
ggagagccccacagagctattccagcagcactgtgtgtcttggcttcggagcattcagcaggtgttacaggcctgtgatacttgggctgtgatcctctag

SEQ ID NO: 208780 - DNA, 100 bp, Homo sapiens
cgggaagacgcggcggcggcggcggaggatgagcctgcagagcgcgcagtacctccggctccaccaaggacctgatcgagacttgctgcgcagccggaca

SEQ ID NO: 208781 - DNA, 75 bp, Homo sapiens
aagcgcagaaagcaggcgaacccgcggcgcaataacgacagccctcagcgcctttttccaggagaccaacatccc

SEQ ID NO: 208782 - DNA, 75 bp, Homo sapiens
tcatcaaggcagcatcatcatcgttattgattctatagatcaagttcagaccccaccaacaactgaacgctttgg

SEQ ID NO: 208783 - DNA, 74 bp, Homo sapiens
cggccgtggtgaggaaccctggactctcagccgggtgggcttggactgggcgtgctccatggcagagatcctgc

SEQ ID NO: 208784 - DNA, 75 bp, Homo sapiens
gtttttcgccgtcatgggcgcctcggccgccatggtcttcagcgagacacctatggctgccgatgaaggctcagc

SEQ ID NO: 208785 - DNA, 82 bp, Homo sapiens
ggtgatccagcaaggtcggcagagcaaggggcttacgcagaaggacctggccacgccatcactggtgcaagctatatttaac

SEQ ID NO: 208786 - DNA, 95 bp, Homo sapiens
cagattcgcagtggtcgcttcttctccttgggctccaaggtgggcaaactgaccctcaagaccacagagatggagaccatctacgacctgggcac

SEQ ID NO: 208787 - DNA, 100 bp, Homo sapiens
ccgccgctgtggccctcgtgctgatgctactgaggagccagcgtctagggcagcagccgcttcctagaagaccaggaaaaaccatatggcatagttgaaa

SEQ ID NO: 208788 - DNA, 101 bp, Homo sapiens
tggcgcaccatctgaaaacaacatcatgcagtggaatgcagttatatttgggggagtatatctctgaaagaactgaatgcccgacccttagaagttttcat

SEQ ID NO: 208789 - DNA, 100 bp, Homo sapiens
agtaggaattccagtattgtgtctaaattctgtggatgatgttttctcacccagtcatgacaaatggaatcctgtgctgaacccgaatcttccaaaaaac

SEQ ID NO: 208790 - DNA, 100 bp, Homo sapiens
ccccgccgccggggacatgtctaaccccggaggccggaggaacgggcccgtcaagctgcgcctgacaggtgccttggaacactatgttaattgcctggat

SEQ ID NO: 208791 - DNA, 75 bp, Homo sapiens
ctccgaccggctgaggcggcgcggcagcggagggacggcagtctcgcgcgctatatcgagaagtttactgacttt

SEQ ID NO: 208792 - DNA, 75 bp, Homo sapiens
aagaaaatgagcccctagaaaccccagctccggaggaccataattatggtgctcgtcctcctccgacacctccgg

SEQ ID NO: 208793 - DNA, 95 bp, Homo sapiens
tccgaaggcgaaactactttgataaatctaagtgttatgaatgtgggaggacaagaattttgggcagatttgaatgccatgaacgtgtatgaaac

SEQ ID NO: 208794 - DNA, 83 bp, Homo sapiens
ccagcggccgagcgggcggcttcctggcctgggcgctccggtggcggcggagggctggaccccaatggagaacaggtggtgtg

SEQ ID NO: 208795 - DNA, 97 bp, Homo sapiens
ggcagaagctgagacggctaaggagcctcacagtctactcagagaaaaataaaagaaggcaaaatgagtcctccccatttccatgcaagccagaaca

SEQ ID NO: 208796 - DNA, 75 bp, Homo sapiens
tgtcagtcggacctgcagcaggttctgttcttgcttgagtcttgcacaggcaacaccctgggagaagaaggctgt

SEQ ID NO: 208797 - DNA, 123 bp, Homo sapiens
accaccctcgtgtctgccaccatcttcgacttgagcgaagttttatgcaagatgcacacttgactgaaggaggacagggaatctgaagactccggatgacatcagagctacttttcaacagcc

SEQ ID NO: 208798 - DNA, 75 bp, Homo sapiens
gcggcaggctgaggagaaagcggcgcgcggaggttgaaaactaagcatggggaagagctgcaaggtggtcgtgtg

SEQ ID NO: 208799 - DNA, 75 bp, Homo sapiens
agttacttcatcgtctccatcctctacctcaagtatgagccagtgtactaatggtcacttgatgtgcgctggctg

SEQ ID NO: 208800 - DNA, 100 bp, Homo sapiens
agcggcggtagcgcaggggagattacttttctggaaggtgtgaaatctaagaatcccctgccaactcttgagggctcaatccagaatgttgaattgaagt

SEQ ID NO: 208801 - DNA, 83 bp, Homo sapiens
agttgagcaagagcagcggcgcagaaaggtggaggccgggaggacgaagggaacggcaggagcagctgatgggatatcggaag

SEQ ID NO: 208802 - DNA, 75 bp, Homo sapiens
tatctccagaatgtcagcatggaggctgctgggcaggtcatgagtcaccatgggaaagaatatggcaaagctgat

SEQ ID NO: 208803 - DNA, 75 bp, Homo sapiens
ctggcggcgggcatcttcttcgtgaggctgctcttcgagcggaagaggagcaggacttggatggtgagaaggggc

SEQ ID NO: 208804 - DNA, 80 bp, Homo sapiens
gatgtgatgaaatttgggagaaaatatgtcaggtgaacctatgggtcgtggaacaaaagttatcctacacctgaaagaag

SEQ ID NO: 208805 - DNA, 90 bp, Homo sapiens
ctctgcctcgtgccgctgagcctggcgcagatcgataattcatcaccttcgactgagcattcacaaggccttgagaagcaaggagtgcac

SEQ ID NO: 208806 - DNA, 113 bp, Homo sapiens
aagataattgaagttggtgacaccccaaaagaccgagctctcttcaacggagcccaaaagttctctgctggatgaaccgaatcctaacagtccagccaatagccaggcagcac

SEQ ID NO: 208807 - DNA, 90 bp, Homo sapiens
gccttggaccaacaaacggggagaaatccttgcccggtacaccactaccgaaaagctgtctattgcaatttgaatcaacccatagaagtg

SEQ ID NO: 208808 - DNA, 50 bp, Homo sapiens
gtggtgcgaagagagtgtgagatcggtgtccgcaatgttgccagtgtctg

SEQ ID NO: 208809 - DNA, 98 bp, Homo sapiens
ggccatggagaagagcaaggccacgccggccgcgcgcgccagcaagaagatcctgctgcccgagcccaggcatgagccatgagcccaagtccccttcg

SEQ ID NO: 208810 - DNA, 100 bp, Homo sapiens
ctcaaatctcctgctgtgaaccagcagaatttttgaacaggaattgaatgatctggcacgggaccctccagcacagtgttcagcaggtcctgttggagat

SEQ ID NO: 208811 - DNA, 74 bp, Homo sapiens
tgaccgctcaagagattctacatcagtttggtttcactcagaccggtgttggagcgggccggagagaagtagag

SEQ ID NO: 208812 - DNA, 100 bp, Homo sapiens
tggaggtggccgtggaggcagaggtggcatgggcggggatctgatgagcttctttcttctggcatcattaacggaccttttaccatgaatagttctactc

SEQ ID NO: 208813 - DNA, 111 bp, Homo sapiens
ctgggctgctgtgtggtagagaaaccccagccgatcctttcaatatacacttccagaaaaagggaagccccgtggtggcccttgaaaagtaaaaggaagttgggaagtgaa

SEQ ID NO: 208814 - DNA, 75 bp, Homo sapiens
ggacaagtggcagtcggcgtgatcgcagatcaagacacagccatccgggtcttcgccatccccccatcctttgcc

SEQ ID NO: 208815 - DNA, 84 bp, Homo sapiens
catttagcgtcagaaataagccgttttttgacatctgtacttcaagaaagccagagactgctgctactttgaaacgtacgatag

SEQ ID NO: 208816 - DNA, 75 bp, Homo sapiens
ggcggcgctgcggatccagggggtcggctgccaggtacagatacatccagaaagtgcccagaagaaacttcctgc

SEQ ID NO: 208817 - DNA, 89 bp, Homo sapiens
gcgactacgcggccgcggagacctacctgcggcgtcggcagctgctgctccgagggtgatagcacactcagataagaatcgcatgacac

SEQ ID NO: 208818 - DNA, 75 bp, Homo sapiens
gtcctgttacaccaaaagtggcatgatcctttgcagaaatgactacattagcatgatgccttcttctgtagagtg

SEQ ID NO: 208819 - DNA, 51 bp, Homo sapiens
agatcatcattaaggacggaggcacggaaatggagttgttttttccttcaa

SEQ ID NO: 208820 - DNA, 83 bp, Homo sapiens
gatttgttaaggattccaagtaactcttatttggtgtggtggacacaggcctattcatcaacatggctgagagagtctacttt

SEQ ID NO: 208821 - DNA, 83 bp, Homo sapiens
agtttatgcaaacctttgttctggctcctgaatcataaacaggaagctgatgacattgttcgagtggcaaagacagccaatga

SEQ ID NO: 208822 - DNA, 101 bp, Homo sapiens
cttgggaaggagctggaaaatttggattatttagccttcaaacgtcagcaggtggcccgaggcagccgggatgacagctctccccaggaatcctgctgcct

SEQ ID NO: 208823 - DNA, 110 bp, Homo sapiens
ttaacacagtagcagctggaaccatgacaggcatgttgtataaatgtacaggtatctgctgtgcgtttcagtcaacaatacagcttgtgttcgacaatattccttgatga

SEQ ID NO: 208824 - DNA, 100 bp, Homo sapiens
ttttatctttgcaatggcaagaggaaaaaaagccagtctcaacgttttacttatacaccaggacatggcaaccacagagagagcagcccttttctttccc

SEQ ID NO: 208825 - DNA, 83 bp, Homo sapiens
tgtaagcgcagaaagcaggcgaacccgcggcgcaataacgaacatgaaaggctcccggagcagcgctgactcctccaggaaac

SEQ ID NO: 208826 - DNA, 100 bp, Homo sapiens
ctgtttttggactatctgacaagtaaaattaaaagtcgtcttggagacaaggaagcagttctcaacaggaaacctaacgaagcatatgaaatctaaagca

SEQ ID NO: 208827 - DNA, 75 bp, Homo sapiens
ttgccctcatcctggttctggaatcctcagttcaagtacgagctcaactggaggcagtcctgtgcggaaatctga

SEQ ID NO: 208828 - DNA, 98 bp, Homo sapiens
ccaacgtgggcagccgggagatgggcgaggcctttgccgctgacatcccccgcatcctggtggccgggtcaaaatgcagatcttcgtgaaaaccctta

SEQ ID NO: 208829 - DNA, 100 bp, Homo sapiens
ctctcgccaagggccccaatgagtggcacacagtctactatcaccgacagttggagtcattcgttgcccagtttgcagccaagaatgtgcagagagacac

SEQ ID NO: 208830 - DNA, 100 bp, Homo sapiens
cgccgctgtccggagccccacagggtaaagcccacagcttgaagccaagcataaaggagaagctggcaggcagccccattcgtacttctgaagatgtgag

SEQ ID NO: 208831 - DNA, 75 bp, Homo sapiens
tcttcaagactggtttgatgctattaacttcgtagacgaggtctttgcaaaaacagaagcacagaagggagccta

SEQ ID NO: 208832 - DNA, 100 bp, Homo sapiens
gaaattggggaaagctgtagaaaccaaagatgaacgatttgaacaaagcgctagcaacttctaccaacaacaggccgcccattgtgtccttgcccaggac

SEQ ID NO: 208833 - DNA, 50 bp, Homo sapiens
gcccagcagctgcgggccgagaggactcaaatggatgctaaaaagccaag

SEQ ID NO: 208834 - DNA, 98 bp, Homo sapiens
aaacaatttctcctgctctgcagcttctgttcagataacgaaggaggcccaacttcattcaataaggagcctgacggatttatcccagacggtagaac

SEQ ID NO: 208835 - DNA, 75 bp, Homo sapiens
ttgaagaccttaagaagtttctaaaacgtctgcaattaaggccttacgtcctggagggatacttgtatactctac

SEQ ID NO: 208836 - DNA, 97 bp, Homo sapiens
ggagaagagccatggaaacaggaggaagaattcccaagccaaagctttccagcagaaatgatggaagaattgcatagcctggacccacgacggcagg

SEQ ID NO: 208837 - DNA, 100 bp, Homo sapiens
gaggacacgggctgcaacctgcagcacatcagcgaccgggagaacatagacgatctgggttggaatttgcccctgacaaataataaaatgatgagtgatg

SEQ ID NO: 208838 - DNA, 98 bp, Homo sapiens
ccaagacctcgctggcccccatcattgtttacatcaagatcacctctcccaaggtgtgcgatgactgtgtggtgttgcgtagtaacatcggaacagtg

SEQ ID NO: 208839 - DNA, 74 bp, Homo sapiens
gtcctgcatggagtcttgtgaaatcgcgtggactgcaacacccagcagcgcgggtttggaatcacttgctagga

SEQ ID NO: 208840 - DNA, 101 bp, Homo sapiens
gagcgcgaatatcgtcatcgttagaaggaagaggcagaaatccaggcagaacttgaacgtttggaaagagtcagaaatcttcacatacgtgagctgaaaag

SEQ ID NO: 208841 - DNA, 100 bp, Homo sapiens
agtaggaagctcgggcgctccggctgtaaggagccgcggcggggggaaaatggagcccttcaccaatggtagccaatctgaattctaaggacctctcata

SEQ ID NO: 208842 - DNA, 83 bp, Homo sapiens
ccgggtcccgccctggggccggcgatgtgccaccgaggctgaggatgatggtagattgccagacgagccaaactcaggctgta

SEQ ID NO: 208843 - DNA, 102 bp, Homo sapiens
ggcgcgggcactgctttccactcggctcctgtcgtccgttctctcaggctcccgttcaggtgacttaagagattaaaattaatttggttgctgttggttctg

SEQ ID NO: 208844 - DNA, 100 bp, Homo sapiens
agacaaggatgaccaggaatgggaaagccccagcacctgttcttcccggagcctatcagcaaagccattcccaaggctatggctacatgcaccagaccag

SEQ ID NO: 208845 - DNA, 90 bp, Homo sapiens
cctcttccaagccaagcgctttaacagggtttggtgcacctcgatttggaggaagtagggcagggcccttatctggaaagaagtttggaa

SEQ ID NO: 208846 - DNA, 96 bp, Homo sapiens
gtgaatccagagttggctcctgtaatgaaaacagtggacaccgggagagccagtttctgagtgccccagaggagaatgctgtagtgaacacagccc

SEQ ID NO: 208847 - DNA, 51 bp, Homo sapiens
cggcacgatgccctttgacttcaggagggtgtgtgcgctcagcaggggcca

SEQ ID NO: 208848 - DNA, 51 bp, Homo sapiens
aagagctggagctatgccacatccagcttccttcaagtgctatccctttgg

SEQ ID NO: 208849 - DNA, 104 bp, Homo sapiens
ctgccgggcaccgaggaccagctcaatgacagttttagaaagagcgttttcgctacgtaaagcacattcgataaaggatatggaaaatactttgcagctggtga

SEQ ID NO: 208850 - DNA, 100 bp, Homo sapiens
accaccctgggcacagcaggcatcggagcaccacaccccactctggccggagcacgccaagcagctccccatcgctccggaaacggctgcagctcctgcc

SEQ ID NO: 208851 - DNA, 49 bp, Homo sapiens
tttttggggaactggtgtggaggcctcccccagggaagaacttcactat

SEQ ID NO: 208852 - DNA, 80 bp, Homo sapiens
ggggtgaagaccccagttttgctgaccttattcaccatgacttatcaggagattgctgcgatgattgacactgagtttgc

SEQ ID NO: 208853 - DNA, 83 bp, Homo sapiens
gacctgctgctcgtgctgatctcagcatcccagccatcactcttccacctgctccttagagaagggaagatgagtgagtcgag

SEQ ID NO: 208854 - DNA, 90 bp, Homo sapiens
ggagtttgcaaacaaattattgacggtcaaggtatttcatgccgaggtctccatcatcaccagttccagtagtgaaaaacagaacccaac

SEQ ID NO: 208855 - DNA, 100 bp, Homo sapiens
ctggcctttgtgagcctcagcctgcagttctctatgtgttctcatttcacccaagaccattggccagtgcagggcatagaagattcattccacaaactta

SEQ ID NO: 208856 - DNA, 100 bp, Homo sapiens
agtcctgtggggctcactttgcaaacacggccaggaagtttgcccagtatgcggagatcgtccacttcaccctcccagatgggactcagaggagcgggca

SEQ ID NO: 208857 - DNA, 51 bp, Homo sapiens
gcaagatcgtcttcagctgttcatagctgtaaacaggaacatcgataagta

SEQ ID NO: 208858 - DNA, 80 bp, Homo sapiens
acaagaagaggcagaacctcgatgagatcttgcagcagcacaagctgaagatggtcaaaatgcagatcttcgtgaaaacc

SEQ ID NO: 208859 - DNA, 83 bp, Homo sapiens
gtttgaacaaactcgaagaacagctgtggaaagaagttgcaaaacactggatccacagaccagcatggctgccactgctgctg

SEQ ID NO: 208860 - DNA, 99 bp, Homo sapiens
ctccacatgtggcctgacacagaggctctgtgacttcctggagactcacttcctagatgaggaagtgaagcttatcaagaagatgggtgaccacctgac

SEQ ID NO: 208861 - DNA, 75 bp, Homo sapiens
caactactcgctggccagacatacttgtggaatggatccaacagcaagtggtaaaaaagcggacaaagagggatt

SEQ ID NO: 208862 - DNA, 83 bp, Homo sapiens
agtgattgtcaagtggggaacacgacagacttctgttccggaatcactctgcatgatgaacctgtcgactgggcggcagcagg

SEQ ID NO: 208863 - DNA, 83 bp, Homo sapiens
ggtagctctggccccagccccggccccagtgtgccccgcctgcggctctcctaccgagttaagtgggcagaccaacatccacc

SEQ ID NO: 208864 - DNA, 104 bp, Homo sapiens
tcactggcctacctcgtcaatacctatgcactggacagtgggtctctgctggatgaaccgaatcctaacagtccagccaatagccaggcagcacagctttatca

SEQ ID NO: 208865 - DNA, 90 bp, Homo sapiens
agtccctcggacccatcgccgcttctagaccctactgcggtctcggatattgccggatttaatccagagactgacttcactatagaaccc

SEQ ID NO: 208866 - DNA, 88 bp, Homo sapiens
cagattcgcagtggtcgcttcttctccttggtagaagaagcagatgattggctcagatatggaaacccttgggagaagtcccgcccag

SEQ ID NO: 208867 - DNA, 75 bp, Homo sapiens
acagagaaggctcactcaaggatcagttggctttagcaattggtcagccagagcagcctccccatgctgtcctcg

SEQ ID NO: 208868 - DNA, 74 bp, Homo sapiens
atcaggagccgccgccgccatatcagaatattccaacccgggaccggctagagggcatggcagccttcagggag

SEQ ID NO: 208869 - DNA, 90 bp, Homo sapiens
gcttgctggatcagacaaacctctgcaggctcaggtggcttctggcacagcagcttaattgaccggaacctcattgattattttgttccc

SEQ ID NO: 208870 - DNA, 100 bp, Homo sapiens
ctccaacctcgtaaccaaatgggaagctgcagccaggcttcctggagattctacacgccaggtggtggtgcgctcagttctatagactggactcacctag

SEQ ID NO: 208871 - DNA, 82 bp, Homo sapiens
cagatgggcaatgaagcagtgcagcagattctgagtgaggctgacccgcggctgattgagtccctctcccagatgctgtcca

SEQ ID NO: 208872 - DNA, 100 bp, Homo sapiens
aaagacaatatcaatgacaaactgacggaaaaggagagagaccctggaagaaagcgggacttttcccctgttccttggagtcagtattttgagtccatgg

SEQ ID NO: 208873 - DNA, 100 bp, Homo sapiens
agaatacagagagaaaattgagacggagctaagagatatctgcaatgatgtactgggtggtgattccactgaagcaactgccaaaccaaagagaagtttt

SEQ ID NO: 208874 - DNA, 51 bp, Homo sapiens
ctattcacgctctgtgcttgtgccaaggtgttggagcgggccggagagaag

SEQ ID NO: 208875 - DNA, 121 bp, Homo sapiens
ggactccgaaaaaacaaaacaaatatgaactatgataagctgagcagagccctgcgatactattatgacaagactctaaaatagagctcaagcttgagaagagagaaccactaaagggcag

SEQ ID NO: 208876 - DNA, 75 bp, Homo sapiens
aaattgtatcgaaatggctgcagaaatcgactttctgagagagcaaacaaaatgatgcttcaacacccaggccag

SEQ ID NO: 208877 - DNA, 75 bp, Homo sapiens
gccgcccccacagcaccccgggctggcgtgagctggagaagcgactggaggagtggttggggaggacattgcctg

SEQ ID NO: 208878 - DNA, 100 bp, Homo sapiens
cgtcaccggcggggccacgggcatcggaaaagccatcgtgaaggagctcctggagctgggggacaagatgccaactggcaagcagctagctgacattggc

SEQ ID NO: 208879 - DNA, 100 bp, Homo sapiens
aacgaagatgacgtgtatggaaactcatcaggacggaagcacaggggccactcagagtcgcccgagaagggctgcacggatatcatatgctgtgtgttcc

SEQ ID NO: 208880 - DNA, 51 bp, Homo sapiens
accttcgccctctccagccaggtaccttggtctctcccgacatcacttctg

SEQ ID NO: 208881 - DNA, 122 bp, Homo sapiens
cctgtctttaaagctgtccctgaagtgacagcggagagaaccaggcagcccagaaaccccagcaatggctgccatccggaagaaactggtgattgttggtgatggagcctgtggaaagacat

SEQ ID NO: 208882 - DNA, 100 bp, Homo sapiens
aaaacaggatggatatgactctctgcagcgggatcaagctgtgtgcattagtacaaatgacacatcaccttcactttgggatatggaatttgataagcag

SEQ ID NO: 208883 - DNA, 82 bp, Homo sapiens
agcggagggagccccagacacggagctctccttgtgtacatcatcatggttccccaggagtggatttaccagttaccatacc

SEQ ID NO: 208884 - DNA, 83 bp, Homo sapiens
atttaagaaagaagatgttaactttcagatgaagaaactgaggttcagagaggttaagagactccactgaggtcacacagccg

SEQ ID NO: 208885 - DNA, 100 bp, Homo sapiens
gaagtcgggaccatcgtcgtgaggatcgtgtgcattacaggagtcctccacttgccactggaacctagaagtcggaatccggaagaagatcgaacatgac

SEQ ID NO: 208886 - DNA, 100 bp, Homo sapiens
tctcaatgaatggattgctgtgaacagtgaaatgacaatggatgctctgttggctcgattgaaacttctgaatccagatgaccttagagaagaaatcgtc

SEQ ID NO: 208887 - DNA, 101 bp, Homo sapiens
cgggagaaagagctctctatacactttgttcccgggagctgtcggctggtggaggtggtggcagcagaggtagttatggaggaggtgatggtggatataat

SEQ ID NO: 208888 - DNA, 96 bp, Homo sapiens
tgaagatgcagagcccatttcagaacctgagaaagtagagactggctctttgccatcggctcccagctgtctcctgaacagggaagctcaggcatt

SEQ ID NO: 208889 - DNA, 71 bp, Homo sapiens
atgaacccagaggtcgtggaggtggccgtggaggcagaggtggcatggggaatggtcgttggaggtcagaa

SEQ ID NO: 208890 - DNA, 100 bp, Homo sapiens
caggtattcccgatctgccatgtattccagaaaggccatgtacaagaggaagtactcagccgctaaatccaaggtggagccgccaccaaaatgcagattt

SEQ ID NO: 208891 - DNA, 75 bp, Homo sapiens
agatccggcgcggggcacaggatccggagctggagcccccaggcgtccgagctgggccacagcctgaacgagaac

SEQ ID NO: 208892 - DNA, 75 bp, Homo sapiens
gtaagaaaagtggaaaaccaccattacagaacaatgagcatgattccacctttccactgatagactcaagttccc

SEQ ID NO: 208893 - DNA, 75 bp, Homo sapiens
ctcccaaggtgctgggattacagagcccagctcagagtctgatccagcgtaaatatttattactacgattaaggg

SEQ ID NO: 208894 - DNA, 100 bp, Homo sapiens
acgatgcaaccatgatagaaataaatccaatggtggaagattcagatggagctgggaacttatagaaatgctggcaatttcaagaaaccaaaagttgtta

SEQ ID NO: 208895 - DNA, 100 bp, Homo sapiens
cggtgaagttctccgccatgaacctgaggggcctcttccaggacttcaacccgagttgttgacctcctgtactggagagacattaagaagactggagtgg

SEQ ID NO: 208896 - DNA, 90 bp, Homo sapiens
agattcgcagtggtcgcttcttctccttggcctcagagaaccatggctactgccaagggaatcgccataggcatcgacctgggcaccacc

SEQ ID NO: 208897 - DNA, 75 bp, Homo sapiens
tatgcacatgtgggtagaggacgtgttagacaagttcatgagcaaatgcagccctgaggatttggctactgcata

SEQ ID NO: 208898 - DNA, 51 bp, Homo sapiens
caggctggtcttgaacttctgacctcaggtgatctgcccgccttggcctcc

SEQ ID NO: 208899 - DNA, 100 bp, Homo sapiens
agctgggggccttggctgtaaggacccctaaggggcgaactttctgaccaagtatacaactacccagagggcctaggagaagtgctgtatagagagcagt

SEQ ID NO: 208900 - DNA, 100 bp, Homo sapiens
ccccagacctggagaggatccgcacacttctggagggcaccgaagtgttccctatgctgggctccgtgctgagagaccccagcttcttctccaaccctca

SEQ ID NO: 208901 - DNA, 75 bp, Homo sapiens
tgacattaacagacaagacacttttcagaaagacagatgcggaaaacgccatgcggtacataaatgggacgcgtc

SEQ ID NO: 208902 - DNA, 75 bp, Homo sapiens
cggcagaagcttcaccacaaaagcgaaatgggcacaccacagagcctggctagccgtctcaaggaaaacatggag

SEQ ID NO: 208903 - DNA, 98 bp, Homo sapiens
caagatccagattgaagctattcctttggccttacaaggtggttggaggcaaagtaaagaagcccggtaaacgtggtcggaagccagccaaaattgac

SEQ ID NO: 208904 - DNA, 100 bp, Homo sapiens
tcagtgtctatctggaaatttctacgtgagaggtgatggaaccagagtttacttcttcacacaaggtggagccgccaccaaaatgcagattttcgtgaaa

SEQ ID NO: 208905 - DNA, 82 bp, Homo sapiens
caagccgcaggtggcggcgagcgcggggctcggcccgagctcaggaggacatggatttgattgacatactttggaggcaaga

SEQ ID NO: 208906 - DNA, 90 bp, Homo sapiens
cgcagtggtcgcttcttctccttgcatcaacttcaatcaggatgcgtccctcatctgcgtatccagcgaccacggcacagtgcatatttt

SEQ ID NO: 208907 - DNA, 100 bp, Homo sapiens
agcttgtttgggagtgggggcagacggcgttttgcgcccaactgacccaacatgagtgaagtttcctgcaagaaacgggacgactatttggaatggccag

SEQ ID NO: 208908 - DNA, 50 bp, Homo sapiens
caatgaatacaagaagtgtgccactggtgatctcttaatgagggacaacc

SEQ ID NO: 208909 - DNA, 99 bp, Homo sapiens
accgcagtgggataaatctcaaagatctcgtacaagatccttctttcttctggagctatttgacagcgaagaccctcgggaacgggactacttaaaaac

SEQ ID NO: 208910 - DNA, 100 bp, Homo sapiens
tttggagtctgccgtgatggcatcaaccgctacgactgtgtctgccaacctggcttcacagctgctgctacagctgaggcctggatcccggcctttccct

SEQ ID NO: 208911 - DNA, 87 bp, Homo sapiens
gtaatggtgcaaagcctgaagtcaaaatgtgggtacagctcctgattcccaggatagaagatggaaacaactttggggtgtccattc

SEQ ID NO: 208912 - DNA, 100 bp, Homo sapiens
catttgaagcggctgaaagtgtaggcatcaaacccagcctggctccgtgtgtttgacagtggcgtcatggtaattgagcttcagtctcacaaggaagagg

SEQ ID NO: 208913 - DNA, 98 bp, Homo sapiens
aagcacacccctcgtgtccaggttcctcatgggcagtgctcggggtgacaaagaagttttagaaagagcgttttcgctacgtaaagcacattcgataa

SEQ ID NO: 208914 - DNA, 82 bp, Homo sapiens
tggtaccgtgcatcgcacctatttaagaggatcagttccatgacaagaccccttatacgattatgtttggtccagataaatg

SEQ ID NO: 208915 - DNA, 82 bp, Homo sapiens
tctttgtgttaaccaaagccagcctggcatactttgaagatcgtcatggggtccaccatctgctcccctgaacttgatttca

SEQ ID NO: 208916 - DNA, 74 bp, Homo sapiens
tgtgaccttgctgaagagaaaagccccagtcggatccgcacaagacggcaaagctctgggagtgccaccaacgt

SEQ ID NO: 208917 - DNA, 100 bp, Homo sapiens
gattccaaggtctgcttctcatgctgcagcgacggcaacatcgctgtgtgggatctgcacaaccagacactagtgaggttgaatgcctttgagaacttga

SEQ ID NO: 208918 - DNA, 75 bp, Homo sapiens
ggcggatctcatatcttcacttggcaaactcaacaagatcatggaagggaagtggttgctgtgtatgttactggt

SEQ ID NO: 208919 - DNA, 100 bp, Homo sapiens
aatatggtgcttatgttgtctaattaacaaagaaccacagaattctggacaatcaaaacttaactcctggatacagaattgcggcgagcagtaagaagca

SEQ ID NO: 208920 - DNA, 75 bp, Homo sapiens
ggaactcaaacagcagatgcaggcatgtggagaccccaaggcaaaaccatcctatcttatcgacaaaaacctgga

SEQ ID NO: 208921 - DNA, 80 bp, Homo sapiens
cctccgagcgcaaggacagcgcgaggtccgcgcagcccagcgcagccattgcctccggagccagcgtggtggccatagac

SEQ ID NO: 208922 - DNA, 96 bp, Homo sapiens
ccgccaccgccaccgccactaccaccgtctgagtctgcagtcccgaggtgctggcatcggccccaccattcagattggggaggagacggtgatcac

SEQ ID NO: 208923 - DNA, 75 bp, Homo sapiens
ccgagcaaattgaagagacgttaaaatacttccggctgaaaacacagttaaatcactttcaaagttaaaagacta

SEQ ID NO: 208924 - DNA, 82 bp, Homo sapiens
ctaagtgatgtccaggaaggaggaggaataatatttatggagcatatattatggaacacaaaactgttttggctgggcctac

SEQ ID NO: 208925 - DNA, 90 bp, Homo sapiens
cttgggctacgcgtatgtgaacttccagcagccggcggacggccgactcgcgggccgctgcacccaccgccaaggacaaaaggagcccag

SEQ ID NO: 208926 - DNA, 100 bp, Homo sapiens
tcctcatccctgactttgttaaacagacctctgaagagaagcccaaagacagtgaagaactcgagaggctgggaggcggcagaatgcagccagaggaggg

SEQ ID NO: 208927 - DNA, 100 bp, Homo sapiens
cccaagcgactgcaggcagaagctgagacggctaaggatgaccatgaaagctgtggttctaattctaccaaccgtagtactgctgagagcacaaaatcat

SEQ ID NO: 208928 - DNA, 75 bp, Homo sapiens
aatcgctcctgtttgtcttctgctttggcccaggtcacggtctagatcacattctcgatccagaggaaggcgata

SEQ ID NO: 208929 - DNA, 90 bp, Homo sapiens
tgaaattcaagcatacagggccttaaaccaggcccttggtaggatggtctgcttgtccttcattatggtcttgtggtttctcctctgaag

SEQ ID NO: 208930 - DNA, 98 bp, Homo sapiens
gttttcttccttatcaaccccaccaaaactttctactataaatcccggttttggctgcttaaactgctggagtgctcgccctacgcagcccacctcta

SEQ ID NO: 208931 - DNA, 74 bp, Homo sapiens
tttctgggcaggaccggtggcagttggtattggaaagagtcaacctaaagcccagaaccctgctcgattgagcc

SEQ ID NO: 208932 - DNA, 90 bp, Homo sapiens
gcgtcgctcacgctgggagctgtagaccggagctgttcctattgggccatcttggctccaccaccctggctgtgatgcgccgctggctgc

SEQ ID NO: 208933 - DNA, 89 bp, Homo sapiens
tagcaagcgagtccgcattgcccccaaggaactgttgaaaaaatgtcatcaatgtgtcgaaaccattgtgaaggctaaagaccagcaag

SEQ ID NO: 208934 - DNA, 74 bp, Homo sapiens
tggcaccctctggcccaggacacagggactgggactgcctacattgagcaactattggatgattatccgaaatg

SEQ ID NO: 208935 - DNA, 80 bp, Homo sapiens
aggcttgaagtgtggggagaacttggtccgactccctggaccctgagaagctattgcaatgcccctatgacaaaaaccat

SEQ ID NO: 208936 - DNA, 98 bp, Homo sapiens
tgaccttggacaaatcaatttacgtttctgtgctccagtttcttggtttataaacccccggtccctgagaagcggccccctgaaatacagcatttccg

SEQ ID NO: 208937 - DNA, 75 bp, Homo sapiens
atccccctcccggagtcgaaatttcccgggattatgtttcggaaagttccactcttgtcctggggacccagcttt

SEQ ID NO: 208938 - DNA, 101 bp, Homo sapiens
ggcacgcgactccccccgggcccaaatgtactaatggtcacttgatgtgcgctggctgttttatccacctactagcagatgcccggctgaaggaggagcag

SEQ ID NO: 208939 - DNA, 101 bp, Homo sapiens
ccaacatggaccgcctgggggactcggaactggcactgttcatggagcccacactgctgatgctggatgagcccaccaaccacctggacctcaacgctgtc

SEQ ID NO: 208940 - DNA, 100 bp, Homo sapiens
cggccgcctccggagcccgacgcggtgactattatatggttaaaaagattttggaggaaaacagttcaggtgacttgaacataaattgcgtagatgtgct

SEQ ID NO: 208941 - DNA, 51 bp, Homo sapiens
tgaagcgactgagtccgcgatggagagtactattaatcccgtagatgcaat

SEQ ID NO: 208942 - DNA, 73 bp, Homo sapiens
atgccgccaagaccgtctttgaggacctgacttctgctctgaccaagaaaatcactcttaagaccccactggt

SEQ ID NO: 208943 - DNA, 75 bp, Homo sapiens
actacaagtccagacccaggagagcaaggcccagaaagagctaatgggaatgacagcaagaaatttaaacgagat

SEQ ID NO: 208944 - DNA, 100 bp, Homo sapiens
acttatgtttgtaaatgtgagtggaagccatgaggccaaaggcagttgtattgagtccctggagaagtgggagcgtctgaccgtggcggatgcgctggag

SEQ ID NO: 208945 - DNA, 122 bp, Homo sapiens
acagagctcaggacagggctgaggaaccatgtctccatccccgaccgccctcttctgtcttggtctgggacctcagtgacattgacaaggatgggcacttggatcgagatgagttcgctgtg

SEQ ID NO: 208946 - DNA, 83 bp, Homo sapiens
ccttcggcagtccacccaccgccgccgcctcccagctctcttggcctcctagtttctacctaatcatgtccctggtggaggcc

SEQ ID NO: 208947 - DNA, 100 bp, Homo sapiens
ctgcctcttagacctagagtatgcgttgggccggagcactagcctcacggagaaggatctgaaagaagccaaggcgcggagccagcagattgcagcccag

SEQ ID NO: 208948 - DNA, 100 bp, Homo sapiens
cttccagatcctcaagcgatgtttgatattgaatatttcagaaaagatccaagaccattcttcaagtttgcaaagtgacagctatattgtgcgtgtcaag

SEQ ID NO: 208949 - DNA, 90 bp, Homo sapiens
ccttctaagagtttggcgagtcagtgactgaagcgcccgtccattccaagggcagccgatgaagtgcaaccttcacatgaatgggaatgt

SEQ ID NO: 208950 - DNA, 75 bp, Homo sapiens
gtggagccaccagcctctccttgaactctaagaaggagctgatgtggaggagcagctgagacagttcaagatgac

SEQ ID NO: 208951 - DNA, 75 bp, Homo sapiens
ggggggattctcgacctgctaacagaactggaccttttcggtggatccataaagaacccagccaacccgcagagg

SEQ ID NO: 208952 - DNA, 80 bp, Homo sapiens
gaatcaaagggccgggagcgatgaatgtgaaaacctttgcatcttctgatagtctagccaaggtccaagaagtagcaagc

SEQ ID NO: 208953 - DNA, 74 bp, Homo sapiens
ccgagccagccgctgttttgccggaggagcccctcaggccgaagcaatgaggctccccaagaacacacctgagg

SEQ ID NO: 208954 - DNA, 75 bp, Homo sapiens
aaggcagcttctgatgatggcagcttaaagagttccaggcagactggattactgctgctgggaatgaaagagaat

SEQ ID NO: 208955 - DNA, 50 bp, Homo sapiens
aggactgttcttgaggtattcaggttgtgggctgcacactgcagaaagat

SEQ ID NO: 208956 - DNA, 100 bp, Homo sapiens
ggaagaccactacggcatggaggacgtcaagaaacgcatcctgagacaggatctcactgtgttgtgcaggctggtctcaaactcctggcctcgagcagtc

SEQ ID NO: 208957 - DNA, 75 bp, Homo sapiens
ggcgagaacgagagaggcagacaaacccatcagccatggtctgggaggggctgaacgtggtgaagacaggccgag

SEQ ID NO: 208958 - DNA, 99 bp, Homo sapiens
gccatgcaaaagatgcctgtgttattagtgacatgaacaagctgagtggaggcggcgggcgcaggactcgggtggaagggggccagcttgggggcgagg

SEQ ID NO: 208959 - DNA, 100 bp, Homo sapiens
gaccctgggtctgatctggaccattattttgcatttccagttgccaccttccagagaagaggtacgagatgacaagacaaccataaagtgtgaaacctcc

SEQ ID NO: 208960 - DNA, 101 bp, Homo sapiens
atgtgccacgccgcccaggagacccctctgctgcaccacttcatgcatcttcctcacggcaattctgggcctgcccgaagccctgatccctgtgcagctgc

SEQ ID NO: 208961 - DNA, 100 bp, Homo sapiens
gcggaggcggaggcagaggtggaggcgctttgaaaggtcggtaggctccacgacaaaagtcaacccttctgtaaatcacctgctgtggttatgatgctct

SEQ ID NO: 208962 - DNA, 89 bp, Homo sapiens
acgccctggtgctcaccaagcaaggctcgtggtcccaagaagcatctgaagcgggtggcagctccaaagcattggatgctggataaatt

SEQ ID NO: 208963 - DNA, 96 bp, Homo sapiens
caaaattctgaactcaggacttggcaagcatccgtgtcattctggaccttactcccaactaccggggtgagaactcgtggttctccactcaggttg

SEQ ID NO: 208964 - DNA, 80 bp, Homo sapiens
gtgccttgaatgtcaaaaagctgccagcacttttaaacattacagttgtataagatggagtctccctctgttgcccaggc

SEQ ID NO: 208965 - DNA, 73 bp, Homo sapiens
tgtaatcctgaagttctgcctattgtctcagaattattagagcaaacatgtactgaatgactgctgtgtgtca

SEQ ID NO: 208966 - DNA, 75 bp, Homo sapiens
ccgagcccgacctcgggcgccccgccggtcacctccgcgcggacaccagatgtccagctcgccgctgtccaagaa

SEQ ID NO: 208967 - DNA, 83 bp, Homo sapiens
cccagatgcccaccgggatggagaaggaggaggaatcgccttatgccagcctggaccatcttggaggcagtgtaggatcatgg

SEQ ID NO: 208968 - DNA, 75 bp, Homo sapiens
ctcccaggcgaccggctccgcagcaagatggcggacgagaaggacagggaaggccaagtcctgtatctgccatgt

SEQ ID NO: 208969 - DNA, 74 bp, Homo sapiens
aggaattgatggagaaagaaaccgcaaaaccaaaaccagatcctttcaaaggatccctccccgcggcggcgatg

SEQ ID NO: 208970 - DNA, 101 bp, Homo sapiens
cagtgccccgcaatccaacaaggagaggctgaagaacatggcactctccattgccgaacggcaccacactgtaactcgaggcatcaccaaaggcgtgaagg

SEQ ID NO: 208971 - DNA, 100 bp, Homo sapiens
ttctgctacatcatcccctccaacctccaggccaaaggcaggacgctgatcccttgctatgaagcctcccagtgcaacgtcagcttaaagaagcagagga

SEQ ID NO: 208972 - DNA, 75 bp, Homo sapiens
tggcgctgtcaataaagaacggcagtttgaatcggtgctgaacaggttcctaaagagaaagatgaaatggtagag

SEQ ID NO: 208973 - DNA, 100 bp, Homo sapiens
gatgaacacccagcccatggaggagatcggcctcagcccccgcaaggatggcctttcctaccaggtaagaaccttgatgctgtccatgatatcactgtgg

SEQ ID NO: 208974 - DNA, 82 bp, Homo sapiens
cgggaggaaggaacgaggcaaggagctaaagcagcgtgcgttcagccctggggactttctgcagggcgactgcaccaaagcg

SEQ ID NO: 208975 - DNA, 100 bp, Homo sapiens
caactcgtcgacttatacgtgtaatttacaacttttgtaattcggtcagagtcatgatgacagcacagctagaaacattgaatgaggaggataaagcaaa

SEQ ID NO: 208976 - DNA, 74 bp, Homo sapiens
aggaggttcaggctacggtgagccgaagtgccggatggagtgctgtgatgtgccagccgagacactctacgacg

SEQ ID NO: 208977 - DNA, 101 bp, Homo sapiens
cttaagcacttttaccgaaaaccttctccccaggatgctttcattggatttggaggaaatgtgatcaggcaacaagtcaaggataacgccaaatggtatat

SEQ ID NO: 208978 - DNA, 75 bp, Homo sapiens
tctgtcttcggtggactccttcggcagtccacccaccgccgccgcctcccagatccagtccttctgtggaacttc

SEQ ID NO: 208979 - DNA, 100 bp, Homo sapiens
gaaacgccaggctctctggaggccaggagatggtgtctgcaattgaactccaaggtgcagaatggtttggaaagtagctgtattcctcagtgtggccctg

SEQ ID NO: 208980 - DNA, 100 bp, Homo sapiens
acttgagttaagcagtagtgtttgggaagaaaaacagaggagttctattaagacgggcataagcaaggggttcactttgtccagcaagactgtcatcctt

SEQ ID NO: 208981 - DNA, 75 bp, Homo sapiens
aaattggcgtttgtcatcagaatcagaggcctgcctagggtagttaaaagacgagtgaatgctctcaaaaacctg

SEQ ID NO: 208982 - DNA, 99 bp, Homo sapiens
atggaagatgaggaggtcgctgagagctgggaagaggcggcagacagcggggccttcatgccccgaggactagcagacaaacaaggacctgaggaatgt

SEQ ID NO: 208983 - DNA, 142 bp, Homo sapiens
ccgggacccggagaagatgtcttcgcggacggtgctggccccgggcaacgatcggaactcggacacgaccaagatcactccatggatgaaatgacagctgtggtgaaaattgaaaaaggagttggtggcaataatgggggca

SEQ ID NO: 208984 - DNA, 100 bp, Homo sapiens
ccacaatggagacgccgccgctgcctcccgcggaatcctgcaaaacctggcagctatgtatggaggcaggcccagctcttcaagaggagggaagccaaga

SEQ ID NO: 208985 - DNA, 75 bp, Homo sapiens
ccggttcgcgtctctctgctgcggcgcggggaccgctgtgctctcgtctattgcgtctgcagacatggatttcaa

SEQ ID NO: 208986 - DNA, 75 bp, Homo sapiens
tggcaaacagggactgagctgtaaccgtagacaagggcgtggtccccctggcagggacaaatggcgagactacca

SEQ ID NO: 208987 - DNA, 82 bp, Homo sapiens
gccgggggaagggacccgcacgccgggctttgttgtggaaatcccggttacctggaaaaggggaagatagtgatgtactcag

SEQ ID NO: 208988 - DNA, 101 bp, Homo sapiens
ttacctatttgatgaagatgtcttttgaaaggtgtactgcaaggaacaaaatgtttgtaaattctccttttaccaaggtatgtttctataaaacctgataa

SEQ ID NO: 208989 - DNA, 100 bp, Homo sapiens
cgaaatgtgacaacacggccagggcccacccagccaaagcccgggacctgtacaagggccgccagctacaaggctcttgattgcggggactaactcctcc

SEQ ID NO: 208990 - DNA, 83 bp, Homo sapiens
ggcagcagaatctgcccacagagttcggggtggcccagttgaaatccttcccttcctctaccttggaagtgcctaccatgcat

SEQ ID NO: 208991 - DNA, 113 bp, Homo sapiens
cgtctacagcctcgtcaaccagcagagcttccaggacatcaagcccatgcgggaccagatcatccgcgtgaagcgataattctgaaataatcagcagaaacggaatggaatgc

SEQ ID NO: 208992 - DNA, 101 bp, Homo sapiens
gcacggtgaacctggaccaggaggaggttttcaggaccaaaattgtggaaaagtcactctggatttacagctgttggaggatggtgatctgactgtgatag

SEQ ID NO: 208993 - DNA, 100 bp, Homo sapiens
accacgatgaaaagaaatacctgtgatttgctttctcggagcaaaagtggagatgaagaagcaaatcttggtctgcccatcagtccattcatggatcgtt

SEQ ID NO: 208994 - DNA, 83 bp, Homo sapiens
aagaagttaaaacatttcagggcaagccaattatggggacaagatgccaactggcaagcagctagctgacattggctataaga

SEQ ID NO: 208995 - DNA, 106 bp, Homo sapiens
gtttgcagatcgggagcgcaaggtcgccctcaaggccatgatcaaaacgtgctttgcaagatatcaccttgtcacagcagaccccctccacttggaaggacacgca

SEQ ID NO: 208996 - DNA, 75 bp, Homo sapiens
gacggttataagaccatttatttctttggagacaaaactatgccacatgattccacctttccactgatagactca

SEQ ID NO: 208997 - DNA, 99 bp, Homo sapiens
gttggtgtcagaaaccacaggcgaatccataactctgataagccgtacagagtggagcctttcaggctggcatggagagcttaaggggcaactgaagga

SEQ ID NO: 208998 - DNA, 100 bp, Homo sapiens
aagattaagggttgtacaggctctttgaatatgactctgcaaaggtagctacagcaagctgggtagcaggcagatccaaaggatatcatgaagtttccag

SEQ ID NO: 208999 - DNA, 116 bp, Homo sapiens
ggagattgaggtgtcggttcgtgctgctgagctgcccaggcttcacggagcggagtatgctgctgctgttccgctttgcgtcctcgctacaaacgcctggtggacaacatattccc

SEQ ID NO: 209000 - DNA, 89 bp, Homo sapiens
acagcccgagaaaccgcagcactacacgagcaggacatcgagactttacatggctctgttcacgtcacgctgtgtgggactcccaaggg

SEQ ID NO: 209001 - DNA, 87 bp, Homo sapiens
aggaccctaacgacaggcgcctccggcccatttacggcaacctggcggttcattgaatgccaacacctccaacaccatagcatccac

SEQ ID NO: 209002 - DNA, 100 bp, Homo sapiens
ctgtctgaactctgctcagagggacctgtactgggacgtgatgctggagaactacagtaacttggtctcactggccatgccagtgacggtaacccgcacc

SEQ ID NO: 209003 - DNA, 100 bp, Homo sapiens
atattaatcggcttagggcagttgttttcagagacatatattctgataccctaaaaaagatggatcctgatcacttggtagcattggtgacagaagttat

SEQ ID NO: 209004 - DNA, 75 bp, Homo sapiens
agggctaccaggagaccatctcaggtacctttgacaggagcgtgaccctgctggaggtgtgcgggagctggcctg

SEQ ID NO: 209005 - DNA, 101 bp, Homo sapiens
agcctcggcgctcacctaagccgcagggagatacacccaactgggagtattgcctaagtgtaatcttgaacatgggcggtgctgtgagtgctggtgaagac

SEQ ID NO: 209006 - DNA, 90 bp, Homo sapiens
cgcctccttgcccgtgaccgtcgctagaactcagttgtgcgttgcggccagtcgccactgctttgagacgggagaagattgaccttgaaa

SEQ ID NO: 209007 - DNA, 75 bp, Homo sapiens
gtctgagagagggaagtcgcctctgtgctcgtgagtgcatggggtataagatgtccagaccaagatagaacctgt

SEQ ID NO: 209008 - DNA, 75 bp, Homo sapiens
agaacatcagcaggatccacctcgtggacaagtggaacgggctgagcaaggttacgttatatataggattcgtgt

SEQ ID NO: 209009 - DNA, 80 bp, Homo sapiens
gttttacttcaagcaggggctgatttagtcgtctaaactattcatatccaggatccgatagctctctgcttattaatggt

SEQ ID NO: 209010 - DNA, 98 bp, Homo sapiens
gcgccgctgccgctgcgtgggggtgaggggatcagaaatgacctccaccttcaacccccgagaatgtaaactgtccaagcaagaagggcaaaactatg

SEQ ID NO: 209011 - DNA, 82 bp, Homo sapiens
cggccgtcgcccaggagtcatcggacgccagaatctgtgcgcgtcccgggacgactggcgctgtgcgcgctccatgcacgag

SEQ ID NO: 209012 - DNA, 82 bp, Homo sapiens
ttcctggtcaatcatgacttcacccctctggaggtgtatttcgggcgctggctgatcgagggaggccctctggtggtgctcc

SEQ ID NO: 209013 - DNA, 50 bp, Homo sapiens
tacaggcatgtgccaccacgcccagatcatggagctttgtggtgcaacaa

SEQ ID NO: 209014 - DNA, 121 bp, Homo sapiens
atcctgtttgaccaggcccagaggtccgtgcggcagcagctccagagctttgtcaaagaagacagggtctcgatatgttgcccaggctggtcttgaacctctggcctcaggtgatccttct

SEQ ID NO: 209015 - DNA, 75 bp, Homo sapiens
tttaccccctcccccctgagcccgaggtgctgacgtcgcaaaaaaattggataaactgataaatttcaaacggaa

SEQ ID NO: 209016 - DNA, 74 bp, Homo sapiens
tgctgctaaaaacaagactggggctgctcccatcattgatgtggtgcgatcgcttgatgaagaaatctctggaa

SEQ ID NO: 209017 - DNA, 108 bp, Homo sapiens
aaaaggaggaattcgccgtgcccgagaatagctccgtccagcaggaaccacgtgaatgttgagggggcgacacacaagcaggtggtggacctgattcgagcaggcgag

SEQ ID NO: 209018 - DNA, 90 bp, Homo sapiens
gcgagtccatagctgaagaggagcgccagatggtggaggaatacacttatttatgaagtctacgacgttcctccatcggtgagcaaggat

SEQ ID NO: 209019 - DNA, 98 bp, Homo sapiens
ttccaggatcttaaagaactagagagactgtgtaaactgtgaattggaaattgacgaatgttggtcccagccttgtttaaatggtgcaacttgtcagg

SEQ ID NO: 209020 - DNA, 100 bp, Homo sapiens
aaaggccaatgttggtgctggcaaaaaggaacacatataactgtggtttcccattcaagacctgtgggccactgcttagaagctgcagcagtgctatcta

SEQ ID NO: 209021 - DNA, 90 bp, Homo sapiens
atggccctgactgcttaggcgggagctgcgtgcagctcagcttctccggggcatttttttctacacgaaaaagcttgtggtgaagggggg

SEQ ID NO: 209022 - DNA, 75 bp, Homo sapiens
ctgatgtgaaaaataccacgacaaaaccaccctaccttatgccagcctggaccatcttggaggcagtgtaggatc

SEQ ID NO: 209023 - DNA, 76 bp, Homo sapiens
accgagagtttgaaagtgcgattgtggaagctgctcgggacgagtctcgaattaaggccactgtgatggacgtgaa

SEQ ID NO: 209024 - DNA, 75 bp, Homo sapiens
cttagcagcgcgcggagaagaacggggagccagatggtcatcatgggccagtgctactacaacgagaccatcggc

SEQ ID NO: 209025 - DNA, 75 bp, Homo sapiens
gcgtccgcgccggccccacagctctgcgtccggcggagattctggagctggctggcaatgcagcgagagacaaca

SEQ ID NO: 209026 - DNA, 100 bp, Homo sapiens
ggtggcctatgaccccgagggcatcctgggcaccatcaactccatcgtgatggcctttttaggagttcaggctgaagtttctctttggctcatcagccac

SEQ ID NO: 209027 - DNA, 82 bp, Homo sapiens
gccggaagcagatgcagctggcctttgccgccgttaacgtgtggcggaagaacctgcagactcggtgaaatacctggagtgc

SEQ ID NO: 209028 - DNA, 75 bp, Homo sapiens
gttttctcatttattttatatctgcactctttgggtacctcactttttatggtggatctcgagccagaggggaaa

SEQ ID NO: 209029 - DNA, 100 bp, Homo sapiens
agagaactgctggaaggagactggatgatagaatttaccatgagctcccgacactctgccagcccagtggttttcaccagtgcccggagttcacctaaag

SEQ ID NO: 209030 - DNA, 50 bp, Homo sapiens
tgaggagccgggggaagctggccttgggcaagtgcagccgcggagccctg

SEQ ID NO: 209031 - DNA, 90 bp, Homo sapiens
ctctatctcgcttttcccctggccttctgtatcttcatggtgcggctcatcttcgagagacagaaacagtctccgccagtcaagaaaccc

SEQ ID NO: 209032 - DNA, 100 bp, Homo sapiens
tgccatgacaaccaggcaatgctggatagataccgaattcttatcacaaagacattgcaaagacagcagtacccactgaggcatccagcccagctcaggc

SEQ ID NO: 209033 - DNA, 75 bp, Homo sapiens
cacccacgcagacatcttcagccgctgccagaggctgtgcccaggtgggcgttctcaaggccttggcggagtgcg

SEQ ID NO: 209034 - DNA, 100 bp, Homo sapiens
atgcggaggctgcctcggcggagcagaggaaccacacgctgatcatgtgcctgatcaactttctagcgggagaacgatcatggaggtggtgccagctgag

SEQ ID NO: 209035 - DNA, 88 bp, Homo sapiens
taaagaaggaggacctgcttttgaagctggattatgtacaggaaagagccagacttctcagaggtcagtctgttcaacaagtgggacc

SEQ ID NO: 209036 - DNA, 75 bp, Homo sapiens
tctactacatgtacagcgaccacactgagctcttccgccctctctggatgagggaacagaagtggaggaaacaaa

SEQ ID NO: 209037 - DNA, 80 bp, Homo sapiens
aatattgtccagtatagagaatcatttgaagttccatgccattgcagtgtcaactaggcctcagttacttttcagtttgc

SEQ ID NO: 209038 - DNA, 75 bp, Homo sapiens
ccagcaactcccagctcaatgcaatgctatccgtggtcctgaaccagttatgtgtgttgcatgagaaaacgccag

SEQ ID NO: 209039 - DNA, 100 bp, Homo sapiens
ggaagtactcagccgctaaatccaaggttgtgtccaagtacatcgaaagtcccgtgttgttccttcgagaagacgtgggaaaggtcaagttcgacatccg

SEQ ID NO: 209040 - DNA, 74 bp, Homo sapiens
gcccccctcccgcccggaaagctgcccagccaccagcaaccccccaggatcctgaaggatcagaagttgacatg

SEQ ID NO: 209041 - DNA, 98 bp, Homo sapiens
agaaggggaataagactgcatctgttcatatgaggtgaattatgtaacctcattacgctggatgtagctcacaatcaacttgaacaccttccaaagga

SEQ ID NO: 209042 - DNA, 90 bp, Homo sapiens
cttgaagaccccaacataagtgcttcactgatcttaagtattatcggtttgctgtctcaactaggagctgttggacaaatatcttattcc

SEQ ID NO: 209043 - DNA, 100 bp, Homo sapiens
tccagactggagtgatcctcctcaggggagagaccattctaacacaggtaccgtccagacagtgcctctgagaaagggaacctaaaggcgtgtttccgac

SEQ ID NO: 209044 - DNA, 100 bp, Homo sapiens
ggattccaagtaactcttatttgtgtctacccctgagctggctgcccaatctgatttcatcgtcgtggcctgctccttaacacctgcaaccgagggactc

SEQ ID NO: 209045 - DNA, 100 bp, Homo sapiens
taccatttaatcattgagctctatgatagggttggtatcatacgtgatcgtttgattcagttcatctctaaattgcagtttgccgtgactgtgcttttga

SEQ ID NO: 209046 - DNA, 100 bp, Homo sapiens
atttgctttaccctcttcttcttctgcaacacggccactgtgtacaagatatgtgcctggatgcagctcacctccgaaggcagacggtaacaagtactcc

SEQ ID NO: 209047 - DNA, 90 bp, Homo sapiens
cttggctcactgaggaggtttggaccgtataatagacgctggccccaaaggaaactactctcgatttatgaatcacagctgccagcccaa

SEQ ID NO: 209048 - DNA, 100 bp, Homo sapiens
ctggtcgtcgtctaccgtctcgctatagccgtttgagggaagaaggaggaaaattacccggtatcgttagagtttggcaatgaggagcagcagctggcgt

SEQ ID NO: 209049 - DNA, 75 bp, Homo sapiens
cagacttatgctggaactgggttttagcaagaaggtagaagatagcaccatgccgattcgtcgaactgtgaattc

SEQ ID NO: 209050 - DNA, 50 bp, Homo sapiens
ctcacaggcgtgagcatctcccagaatttacatagtacatgacgaagtta

SEQ ID NO: 209051 - DNA, 88 bp, Homo sapiens
atcagctccggagaggggaaaaccacgctcctcggaccaagcctcgggagctaaggtgagcactgtgggctatgggatggatgaggtg

SEQ ID NO: 209052 - DNA, 98 bp, Homo sapiens
tcaagaagcaacagagaaagaagtagaaagaatcttgggattgttgcagacatattttcgagaagatcgatcgcctgaaggacctgaacagccaggca

SEQ ID NO: 209053 - DNA, 100 bp, Homo sapiens
gatggttattatggaagagaatgtgactggtggtcggttggggtatttttatacgaaatgcttgtaggtgtgcatgtggaagaggaagaaggagaaaaaa

SEQ ID NO: 209054 - DNA, 49 bp, Homo sapiens
tggacccctactattgcaacaaggcgtgaattacccttcactaagtcgg

SEQ ID NO: 209055 - DNA, 75 bp, Homo sapiens
acagaccttcactacctattctgacaaccagcctggtgtgcttattcaggctttcgggtcacctccagcagctcc

SEQ ID NO: 209056 - DNA, 100 bp, Homo sapiens
gtttagcaaaagttcatctccttctgcatccttaactgagaatgagatcaatatgcttctcaattttaaggatgacaaaagtgaatgtccatgtccagaa

SEQ ID NO: 209057 - DNA, 74 bp, Homo sapiens
gtcctcaccatgcccttctgcttcaaacagcccgtggaccgggagcccgtggaccgggagccggtggtgtgcca

SEQ ID NO: 209058 - DNA, 80 bp, Homo sapiens
agagccgggagtcgctgggtgcgtggggctgcctcgccgcgtctcgccacggctccctggggaagggaatgcagggttgc

SEQ ID NO: 209059 - DNA, 83 bp, Homo sapiens
agccggctgcaggccagagagggcctcgggaagagatgcgaggatgacaagacgccaaattccagcgaaacagctgatgccag

SEQ ID NO: 209060 - DNA, 75 bp, Homo sapiens
ctgcggaacaggacgccctctgataggttgacggatatattcagacgttacgacacggatcaggacggctggatt

SEQ ID NO: 209061 - DNA, 50 bp, Homo sapiens
tctccttccacaattttaatcagaaaatgatgcatcctgttgccagcagt

SEQ ID NO: 209062 - DNA, 100 bp, Homo sapiens
gccccaggacacagagactttatcaaaaacatgattacagggacatctcaggcttcctggacgtgtcgggaatttctctcttggacaacagcaatgccag

SEQ ID NO: 209063 - DNA, 83 bp, Homo sapiens
cagtgaatatggttccattattgctttttttgatgttcgcacattctcaaatgaggtggtctgtttttctggggggccaccaa

SEQ ID NO: 209064 - DNA, 100 bp, Homo sapiens
gccagaacgcttgttgcctttggctgagaacactatcctggatctgaatgtcttgggagcaagggagcccccggtcctgctggtgctcgtggggagagcg

SEQ ID NO: 209065 - DNA, 139 bp, Homo sapiens
gcagaagtcagcaagagtgacataggagaagtgattcttgtgggtggcatgactaggatgcccaagcaatggcaccagcatgatatcattgatcattcctcccaaagaccagatttcacgagtggcaaaaatgttagcg

SEQ ID NO: 209066 - DNA, 90 bp, Homo sapiens
ggagggggcccgaaggacttcggcgcgggactcaagtacaactcccggcacgagtcttgtgaaaatgccattgtgtgctggaaacctggc

SEQ ID NO: 209067 - DNA, 100 bp, Homo sapiens
gagacgcggcctcggaccagccatttcggtgtagaagtggcagcacggcaggtgatgtttgcagacagaaaaagtaaactgtcaaggaattcagagcatt

SEQ ID NO: 209068 - DNA, 82 bp, Homo sapiens
gtctgctcctgtcgccttcgcctcctaatccctagccactatggtctgcgaggaacagaagtgcgaggaggaggtcttcccg

SEQ ID NO: 209069 - DNA, 75 bp, Homo sapiens
cttttatattcatctcaaaaacaaaattctgaactcaggacttggcaagaagagagaagggcacagttacctaag

SEQ ID NO: 209070 - DNA, 100 bp, Homo sapiens
cctcacctccttcgtggggctcatcgtgatcccggcgacatactacctctggccccgagatcagaatgccgagcagccagacacagtctccaacgccacc

SEQ ID NO: 209071 - DNA, 126 bp, Homo sapiens
ttggaggtgtcagtgttaaaggaacctctacaacgaaggtgaagccacggaagataaggtcccccggcagagggcagtagagatggccggcccaaggcctcggtggcgcgaccagctgctgttcat

SEQ ID NO: 209072 - DNA, 80 bp, Homo sapiens
accggcaagaccaccttcatcaggctccctggggaagggaatgcagggttgctggggctgggcccagaagcagcagcacc

SEQ ID NO: 209073 - DNA, 100 bp, Homo sapiens
gaaatgattgaaaagttacagaaggtctgtgtatgatgaccaaccaaatgcgcacaagaagtttatggaaaagttagatgcttgtatccgtaatcatgac

SEQ ID NO: 209074 - DNA, 73 bp, Homo sapiens
cccaccttaccctcccaaagtggtgagattacaggtccggcaggttcggctattccaggacgaggagatctac

SEQ ID NO: 209075 - DNA, 90 bp, Homo sapiens
aaatttcccacttcctctcctgagaccaggaactcagcagagaaactttgtgcatttcagatctgctcggtagacctggtgcaccaccac

SEQ ID NO: 209076 - DNA, 83 bp, Homo sapiens
taaatgccgactcagtggaacaatcttttgttggattgaaacagctaatcgagtccaatgtgctgattgctgctaacagtcag

SEQ ID NO: 209077 - DNA, 50 bp, Homo sapiens
agcaggtgaacactgaccccaatgggttacccatgcagttgttactgtac

SEQ ID NO: 209078 - DNA, 50 bp, Homo sapiens
ccgaggcgggtggattacttgagagggcagaggtggctcagagagaggcg

SEQ ID NO: 209079 - DNA, 51 bp, Homo sapiens
agctgggtttgctgttgctagggagtgatgatgcgggtgtgctggttggtg

SEQ ID NO: 209080 - DNA, 83 bp, Homo sapiens
cgtggaggagctgtgcagccgcgaggaggcgcgggaggtgttcgagaacgaccccgagacggaactgtggctgcaccatctgt

SEQ ID NO: 209081 - DNA, 100 bp, Homo sapiens
ttccttcactgtgcgtgctgaccatgactgttaccaatgctgtggtcacagtgccagcttactttaatgactctcagcgtcaggctaccaaagatgctgg

SEQ ID NO: 209082 - DNA, 80 bp, Homo sapiens
cccgaatgcatctaggtaccaatggagccaactgtggtggagccgctcccgaggccccggcgcggcgcgagggcgcgggg

SEQ ID NO: 209083 - DNA, 74 bp, Homo sapiens
cgtggaccatgacctcaaccgcaccttcaccagcagcttcctcaaggacacggccaacacggtgaaggaaaagt

SEQ ID NO: 209084 - DNA, 82 bp, Homo sapiens
gagcacaaccatcgcagttggaagcccatggggcaggcccccccaggatgcaatggcgcagcccccccggctgagccgctct

SEQ ID NO: 209085 - DNA, 83 bp, Homo sapiens
ggactggttccttctggaggtgctgagggtggtgcagagccggagccggagccggagccgcgccgcgccgcaccatggcgccc

SEQ ID NO: 209086 - DNA, 75 bp, Homo sapiens
aaaaattgcagaagcacaagccaaactggtacctgttcgcgctgcaggtgaagcaggacttggctcaaggcaggt

SEQ ID NO: 209087 - DNA, 100 bp, Homo sapiens
tctccagcggggacctgctccgggacaacatgctgcggggcacaggttggactccatgaaagaattgcacaaaacaaatcgacagcagcatgagaaacat

SEQ ID NO: 209088 - DNA, 100 bp, Homo sapiens
gtgcatcttcgacagttttggaaccctggtctttgcagtatttatgggagtatggggagcttctggaagaggtgaagaaggaattgcagaaagtgaaaga

SEQ ID NO: 209089 - DNA, 100 bp, Homo sapiens
ttggaccccggcttctgggacgcgtcagaatagcctaacatggcagaccagagacagcgctcactgtctacctctggggagtcattgtaccacgtccttg

SEQ ID NO: 209090 - DNA, 90 bp, Homo sapiens
atttaaaggatttgatgctctgcaatatcagaggaatgcagtagcatggatagttgatggtgaatttggagcagacgacttctgtttaac

SEQ ID NO: 209091 - DNA, 74 bp, Homo sapiens
tactctatatgaacaatccgtctggatcacggatgtaggaagtgttggtgaggtaacatacgtggagctcttaa

SEQ ID NO: 209092 - DNA, 75 bp, Homo sapiens
ctgtatgatatggcagatgtatgggtgaagatccaagatgttctacagcaaacattgaggagaatgtgctacctt

SEQ ID NO: 209093 - DNA, 96 bp, Homo sapiens
acgtggtcaagcgctgggtgaatgaggctcaggaggcagcatccagtgataacatcatggtccaggcgctgagatgcgtctggagagccagagggc

SEQ ID NO: 209094 - DNA, 100 bp, Homo sapiens
gagggcctacgctgtgtcttgatctttggcgtccccagcagagttcccaaggaggaacatatgcagcagaaaaaagaggaggaagaagttcttaaagaag

SEQ ID NO: 209095 - DNA, 100 bp, Homo sapiens
gagactccctgtcccggaccgcaggaaatttctcaggataccatgtatctccagtattgtaaagtctgccaagcatacaaggcaccacgttcacatcact

SEQ ID NO: 209096 - DNA, 100 bp, Homo sapiens
cgcttaagaaaatccgcctggacacaacctgcacttgttgccaagtcttccatcttactagatgtgaaaccttgggatgatgagacagatatggcgaaat

SEQ ID NO: 209097 - DNA, 107 bp, Homo sapiens
gtggaagtttgagagaagtttaagagaagaaatggacatgattgcctaaatcagccaaacacagggtttttagaacttcagccataaaaatgggcagaattttcctt

SEQ ID NO: 209098 - DNA, 75 bp, Homo sapiens
cggtgtggtcctggacaggagctatccaagctgatcactggagattccatcgttagtgctgaggcagtatgggat

SEQ ID NO: 209099 - DNA, 128 bp, Homo sapiens
cgttgcgtgccctacttcaaggataagggcgacagcaacagctctgccggctggaaggtcaaaatgcagatcttcgtgaaaacccttaccggcaagaccatcacccttgaggtggagcccagtgacac

SEQ ID NO: 209100 - DNA, 98 bp, Homo sapiens
tggggcgatgcttgtgaccctgcagctcctcaaagatgagctgacaactaccaagaggagttacgaggatcagttaagtatgatgagtgaccacctgt

SEQ ID NO: 209101 - DNA, 82 bp, Homo sapiens
gaaggaacgaggcaaggagctaaagcagcgtgcgttcagccctggggagttgatccccctcatattgtgtacagcatgtcta

SEQ ID NO: 209102 - DNA, 50 bp, Homo sapiens
gaggctcatgcgggatttcaagcggtatgatctcgtgaaaccttgagaga

SEQ ID NO: 209103 - DNA, 75 bp, Homo sapiens
gaaaagaagattactctgcaacagctaaaggcccgatgagagaaagggaaagttaaggatgctggagcagaacaa

SEQ ID NO: 209104 - DNA, 80 bp, Homo sapiens
acatggttaaggaacaggaggaaaccattcagaggtttactcctggcttgggggcattaggaagcactggaggctcttcg

SEQ ID NO: 209105 - DNA, 82 bp, Homo sapiens
acccagaaatccaggtttcccgcatccgatgtggactcagccactttgctgcactgaccaaacccagcgggtgccgcttctc

SEQ ID NO: 209106 - DNA, 82 bp, Homo sapiens
gcaggaccaacctctcctctggatgctctagacatatctgaagagatggattaagaatgctttggattaaggattgtggagc

SEQ ID NO: 209107 - DNA, 95 bp, Homo sapiens
ggactttgcagaaatgtgtgcagactacatggcatctaccatagggtggaagatagatgataagcctgtaaaaattgacaagtgggatggatcag

SEQ ID NO: 209108 - DNA, 75 bp, Homo sapiens
ggatctttgctcttccatccgcctttgatcgtcttcctcttcagccatccaggtgctcctgacctctgataaagc

SEQ ID NO: 209109 - DNA, 100 bp, Homo sapiens
caggtcttgtagcagcgcctcctcggcccatgaagcttcccatcaccaacagcaggcagcacagaacagcttgctgcccctcctgagctctgccgtggag

SEQ ID NO: 209110 - DNA, 88 bp, Homo sapiens
agctgcaaccgcctccgcctattacagaggtcagtttaggggctggtgcaaaggatgagttgcacattgttgaagcagaggcaatgaa

SEQ ID NO: 209111 - DNA, 75 bp, Homo sapiens
gcggattagggggtctcggcgagctttctgaaacaaaggtcttcactgcctcatctgctccagcagagaatcaca

SEQ ID NO: 209112 - DNA, 95 bp, Homo sapiens
aacccctcaaggagtttgtggaggcctgtttgaataaggagccgagctttgaaacctatgagaatatcccaggccagtcaaagatcacattcctc

SEQ ID NO: 209113 - DNA, 96 bp, Homo sapiens
cactaatctctttagtaaattaacttcaaaactcacaaggagcactggatgtgtgtgagaagtggggagaaatgccaccactacaacccaaacata

SEQ ID NO: 209114 - DNA, 83 bp, Homo sapiens
ccgtgccgcgagcgcggcctgcaggagctgctgcggactctggagcgtgagaaccagcgcctggaggctgtcctggcgtggcg

SEQ ID NO: 209115 - DNA, 100 bp, Homo sapiens
cagagttctagggttctaagtgatgtccaggaaggaggaggaataatatttatggagcatatattatggaacacatctggtagaagtggaaagacaatcc

SEQ ID NO: 209116 - DNA, 100 bp, Homo sapiens
gataagcatgtaatgagtcgtctttctagcacatcatcattagcagaaagaccacagcaagattctttcattcgtctcctcctagcctgggggaccaggc

SEQ ID NO: 209117 - DNA, 96 bp, Homo sapiens
cagtcgctgctcctgcttctcgggctgctggtgctgtgcgcgaggctcctcactgcagcgaaggtgtggacgaatgtggaacctcgctctgtggct

SEQ ID NO: 209118 - DNA, 75 bp, Homo sapiens
ccgtgccgcgagcgcggcctgcaggaggtgttcaggcgcttcgtggaggttggccgggtggcctatgtctccttt

SEQ ID NO: 209119 - DNA, 50 bp, Homo sapiens
cgggagtacacagacatcatccggctttatcctgtggataaacgcagagt

SEQ ID NO: 209120 - DNA, 98 bp, Homo sapiens
cgagatccaggagaaccacgacgagacctacggcgtgccctccctggaggagctggtctgcagaactactgaattccaagctgcctcggtggcaggag

SEQ ID NO: 209121 - DNA, 82 bp, Homo sapiens
ggagtaggtgcgggtgaagatggcggcagccgaggccgcgaactgcatcatggagggcgtctctggccgagcctctttttgt

SEQ ID NO: 209122 - DNA, 89 bp, Homo sapiens
agctggccgagcaggctgagcgatacgacggtgcccttgctcgtgtgaatgaacagaggccagagaattgcagaaacccacctgtaata

SEQ ID NO: 209123 - DNA, 75 bp, Homo sapiens
tccctggattgctgaactttggcgagtttaagatcaccggggaacccttgatccgtcgatcagatgataatgaaa

SEQ ID NO: 209124 - DNA, 89 bp, Homo sapiens
acaggtcacagtaaggccaaaaatgtgcatactcacagagttagagagagggatggtgggtcctgatgaagaagctgttgtggatcttg

SEQ ID NO: 209125 - DNA, 100 bp, Homo sapiens
cgcgcccggactcggcggccaggcttgcgcgcggttcccctcccggtgagcgcatcagcgaggaggtggggctgctgcagctccttggggaccccccgcc

SEQ ID NO: 209126 - DNA, 96 bp, Homo sapiens
ctcccagtgacgggtctggagtgcgtgggggaccggctgttggcggggactggtgattgcagctggaagtgcccatgaccgagctggcgtcctccg

SEQ ID NO: 209127 - DNA, 100 bp, Homo sapiens
agggaagaactgatggaaagccgcatgagaattgagagcctttcatcccagctttctaatctacagaaagagtccctaaaagataagttagtacaagaga

SEQ ID NO: 209128 - DNA, 102 bp, Homo sapiens
cgaagaaacagacattcaacatgattgcatttgaagttcttcacacacccccattcggcgtagtacccagagagctcaagatgtgtggcagttttcggatgg

SEQ ID NO: 209129 - DNA, 90 bp, Homo sapiens
ttccgatttaaagctgagctgcgaggaaaatggcggcgggaggaaattcgaaatgagtcccatgactatcctcatagagtggccaagttt

SEQ ID NO: 209130 - DNA, 100 bp, Homo sapiens
cctcagtggaactcggagtggtttaaatttgaggatcttcagcctgttaaacaagaaaacgaaaaaccccttccagaaaacatggatgcatttgaaaaag

SEQ ID NO: 209131 - DNA, 95 bp, Homo sapiens
gcgcggcagcgctccagctcgctctccaccttcaggtaaggtactcaactgtgtggggtactacataaatcctgaaagactacaataaagtggtg

SEQ ID NO: 209132 - DNA, 97 bp, Homo sapiens
tcggggatggacctccagatttccttactgggagatgcacttatttacatggaaccagagaaacaagtgatgtccaggtcgtcagatgaatgtgttg

SEQ ID NO: 209133 - DNA, 75 bp, Homo sapiens
acaaatattttgcacttcaagagggagcaaaggagtttgctgctgctctcaccgctgagcggataaagaccccac

SEQ ID NO: 209134 - DNA, 101 bp, Homo sapiens
ccgctgcctcaggagcggaacaacgtcggcgagcggggtggtttttccccatcatcggccacatgggcatctgcacatccacaggagtcattcgggacttc

SEQ ID NO: 209135 - DNA, 100 bp, Homo sapiens
atcaaagacagctttcacagtttgcgggactcagtcccatcactccaaggagagaagggttgtgagtcccggcccagcccctccacccccctgccccccc

SEQ ID NO: 209136 - DNA, 97 bp, Homo sapiens
ccagtgacgggtctggagtgcgtgggggaccggctgttggcgggccgccatggcatcagatgaaggcaaactttttgttggagggctgagttttgac

SEQ ID NO: 209137 - DNA, 96 bp, Homo sapiens
ttaatgtggatgatcctgatgcagccaattataatgaaactagaaaaactgcttttggaattatctctacagtgaagaaacctcggccatcagaag

SEQ ID NO: 209138 - DNA, 100 bp, Homo sapiens
aacaacccattccaggctgtgcaggaagagccctatgagtttgtctctctggaatggctgcaaaagtggttggatgaatcaacacctaccaaacctattg

SEQ ID NO: 209139 - DNA, 82 bp, Homo sapiens
gctgcggaccctgctgccgctgctggcggccctgcttcagctctattaccaggttttaaacttcgccatgatcgtgtcttct

SEQ ID NO: 209140 - DNA, 138 bp, Homo sapiens
cccaacagaagctcgccaagcataatatgtatgccaaagcagcagccttctcgacagccttttactgtgaacaggccagctgcgggccgtccagcggctgtgccacttctacagcgccgtcatgcccagcgaggccca

SEQ ID NO: 209141 - DNA, 50 bp, Homo sapiens
tagggaaacctggagcggtcagagcaggtttaaatgtgatactggtgtag

SEQ ID NO: 209142 - DNA, 97 bp, Homo sapiens
aaaacttgtgagggcgaaggtcgtattgaatggtgttgtagtgagagatttttcttgaggctgaatagaaacgggcttcccaaagcccctgataaac

SEQ ID NO: 209143 - DNA, 98 bp, Homo sapiens
aaaaaggacatctttggagccaggattttctattgcagcagaccatgctacgagtgaaggatcctaagaagtcactggatttttatactagagttctt

SEQ ID NO: 209144 - DNA, 82 bp, Homo sapiens
ccgcgcccttctccctggagtaccgagtcttcctcaggctgaaatctctttaatgatggagggaagcaggcagacgcgagtg

SEQ ID NO: 209145 - DNA, 100 bp, Homo sapiens
gcgggagtcaggctgagccttcggcccccaatgagctggaacgtctgagcaatctggtaggcaagccatctgagaaccatcctcttcataacagtgggct

SEQ ID NO: 209146 - DNA, 83 bp, Homo sapiens
cgagaaggctggcgttagtgaagcgcgcccggcgtcacgaaggccagaaatgctcacatcaggatccgattgagagctctgac

SEQ ID NO: 209147 - DNA, 100 bp, Homo sapiens
gacctggtcctcatgctgccgaggctgttgctgttgatctgtgggcatccagagggcaggacttcagctggctgccttgattcatcccatcctacagatt

SEQ ID NO: 209148 - DNA, 100 bp, Homo sapiens
caccgcccggcgcccgagaggccacctgcgtgctagaggcaaacttttgtctctctcggtggttctgctgggcatggacatcctgtccgccctggtgacc

SEQ ID NO: 209149 - DNA, 99 bp, Homo sapiens
ttagacagaagctcactccagagagagaaggctgctggaaagtacagacaacaaggcagaaattatattgttgaagatggagatattatcttcttcaaa

SEQ ID NO: 209150 - DNA, 82 bp, Homo sapiens
ggcgagcgcgagcggcgcgagaaagtttgtttgtaaaaacaatggtgtgttgtttgaaaaccagctgcttcaaattggactt

SEQ ID NO: 209151 - DNA, 82 bp, Homo sapiens
ccaaaaacagtggataattttgtggccttagctacaggagagatggcccactgcgtgaccttggttcagctgtccatttcct

SEQ ID NO: 209152 - DNA, 100 bp, Homo sapiens
acctacctctggaccgatgtctacaggttggattagcttttcaaaacagaaattcttggaaagaattaaatgacattgcatcgaagccctcccaggaaca

SEQ ID NO: 209153 - DNA, 82 bp, Homo sapiens
aagaagcaggtgcttatgatggacctaggactgctggctgctttgctggctctgcaagaaaatggactagacgcaactacag

SEQ ID NO: 209154 - DNA, 100 bp, Homo sapiens
agactttgtcatggagctcactctcctgtccctggacctcatgcaccatattcacatgttgcatgagattttgtatgattggatcaaccctacttatctg

SEQ ID NO: 209155 - DNA, 73 bp, Homo sapiens
cttgggggagccctggagggcgggcttccagtggggggagagcccctggcagaccagcattctcgaaattgga

SEQ ID NO: 209156 - DNA, 100 bp, Homo sapiens
ctgtatatcttattggacttatccagatgatgagaaacgcaagtttgaaagtctctcaagcatattgaaacttcctggaaaaaagacttttaataatatg

SEQ ID NO: 209157 - DNA, 100 bp, Homo sapiens
ggcctcccgagaacagctttccatccagtggtctttcttccataagaaggagatggagccaatttctagctaaagttgcagacaagatccagctcatcaa

SEQ ID NO: 209158 - DNA, 100 bp, Homo sapiens
cagcgacggcaggtactttagcaggacggccatcgagatcgtggtgcagatggccgcggccaacgggggtgcgaagtaccacattactgtcatctccctg

SEQ ID NO: 209159 - DNA, 49 bp, Homo sapiens
actgggtcccaatgatcaatacaaggaaatctgaaatagagtactatgc

SEQ ID NO: 209160 - DNA, 100 bp, Homo sapiens
tgcattgctgatcttgtacttggattcagcaaggaaccttccgatgatagtgaaatgtttcgagggtgaaggaggacattcagcattccagagaatcctg

SEQ ID NO: 209161 - DNA, 83 bp, Homo sapiens
atggcggcccatcaccggcagaacacagcagggcggaggaaagtgcaggaacggagctttgactgtaagatctgtgggaagag

SEQ ID NO: 209162 - DNA, 100 bp, Homo sapiens
ctgggggtcggcaccttcggcaaagtgaagggcatgggcaagaaggacgaccccaagctgatgcaggagtggttcaagctagtgcaggagaagaacgcca

SEQ ID NO: 209163 - DNA, 90 bp, Homo sapiens
gttgaaagcgacaagtggaggcgccgctctagcggccgggactctgaactatggcgctgggagtgtccactcgccttccaccagcatggc

SEQ ID NO: 209164 - DNA, 100 bp, Homo sapiens
tccattttggaacgcccgtgccgcgtctccgcgttcccagcccgggtccccgcgttcacagccccagcgcaggcaggaataccaatgggaccaatgccag

SEQ ID NO: 209165 - DNA, 74 bp, Homo sapiens
cacggtactggagaacacggatggatgccagcgaagagacaagcacttccgtcatgcagaaaacccccatcatc

SEQ ID NO: 209166 - DNA, 75 bp, Homo sapiens
ggcagaggagctggcggagagcggcctgcgggcgatcgggccgaggacatgatccacatcgcggacaccaaggtc

SEQ ID NO: 209167 - DNA, 83 bp, Homo sapiens
cgccgcgggcgccgggagcgagctgggagggagccgcgcgcctttgtgcgcgcgccgaggttgtgaccgagattcccgacgag

SEQ ID NO: 209168 - DNA, 99 bp, Homo sapiens
cctggcagtccttgatagaggcagcacccgagtcccagatgatgccagcaagcgtcttaactaatgttgcaggtcagtggaatccagtttttatgcagc

SEQ ID NO: 209169 - DNA, 98 bp, Homo sapiens
caacagaattacagagtatgataaatcatgaggtccaatggattttgtttagcaaataccgaaacaatagttattgaccacagtataccaaatggaag

SEQ ID NO: 209170 - DNA, 80 bp, Homo sapiens
ctgcagaggggtccatacggcgttgttctgggaagaagaaattgtcgagacgaataacatgaggtcatatagaatcccac

SEQ ID NO: 209171 - DNA, 90 bp, Homo sapiens
cgagtccgcgggaagatggcggcgccgctcatccccctctcccagcagaatctccctggaaaaggagacatgaatgtctgcaatgatact

SEQ ID NO: 209172 - DNA, 82 bp, Homo sapiens
tggaatgcaaacagatctggcaaaatttgggttatgtgtctcggtaccacgtgaaagactcctcacgccacgtcatcctagg

SEQ ID NO: 209173 - DNA, 75 bp, Homo sapiens
ccaggccatgaatcttgtgggcccccagagcattgaagccatcagagggttctcgcttcagcacaagatccggag

SEQ ID NO: 209174 - DNA, 100 bp, Homo sapiens
gttccagccaatggccagactccaatccagagaaccatcaagccagatgtcagaagctacaccatcacaggtttttaccagctatattgatctcctgtac

SEQ ID NO: 209175 - DNA, 100 bp, Homo sapiens
gtcatgagtcgcttcaagtttatcggtggtcttcaagctgacagagaagctgacggaacagaaggagtggatgaagatataattgtgacccaaagtcaga

SEQ ID NO: 209176 - DNA, 75 bp, Homo sapiens
cgagaagagcagagcggagggagccccagacacggtcaaaatgcagatcttcgtgaaaacccttaccggcaagac

SEQ ID NO: 209177 - DNA, 75 bp, Homo sapiens
caccgtcaggcataaattgattattcctcgcccacatctgtgccaggaccgggactttgtagccaagcagaagga

SEQ ID NO: 209178 - DNA, 100 bp, Homo sapiens
tgcgagggcgagagaaatttaatcatagatggtggggaggtcaaccgaaatacaggtatcaggatgaagatacacctcctcaagagcatatttccccaca

SEQ ID NO: 209179 - DNA, 75 bp, Homo sapiens
gaaagtttttccaaatattcatctgtacagtttcagaatggcttcggttattgcctttccttggtgtactcgcac

SEQ ID NO: 209180 - DNA, 100 bp, Homo sapiens
ctgaacgccgccttggacctcctgggaggcgaggacggtctctgccagtataaatgcagtgacgctgttcaacggttttgtgtatagcatttgaggttct

SEQ ID NO: 209181 - DNA, 100 bp, Homo sapiens
ggaacaccaccactctcattagtgagaatggtcatgctgccgacaccctgacggccacgaacttccgagtgggttctggcttcagtgatcctctcactgg

SEQ ID NO: 209182 - DNA, 82 bp, Homo sapiens
cttccccacctgcccggtgcccgaggaggcagccaagctcgtggcctgcctctgcgtgcggtttccaggcctgaggtgcccg

SEQ ID NO: 209183 - DNA, 75 bp, Homo sapiens
cgcctgtgtcctcattgctccaaactgtgttgtttcagctgtattagggcaattaagttggaatatgcaaggttg

SEQ ID NO: 209184 - DNA, 76 bp, Homo sapiens
cggcgggaaccccctgaaccggagaagtttgtgtttttcaacatacctcagattcaatacaaaaacccttgggtgc

SEQ ID NO: 209185 - DNA, 75 bp, Homo sapiens
aaagagccctggactgtgaagagtgaggagaccatagctgcacagccaggtgctggagaatctggtaaaagcacc

SEQ ID NO: 209186 - DNA, 50 bp, Homo sapiens
gtccagctgcccgcaggggtggctgaccccgcactacatctacccaccag

SEQ ID NO: 209187 - DNA, 75 bp, Homo sapiens
aagccttccccctctcaccatcagcaaccatgagggctgcttgctctcggtgactacatgaatgtccagtgccat

SEQ ID NO: 209188 - DNA, 83 bp, Homo sapiens
tacatctgaaagccgggaaatggaagatgagaatgtgcctactgctcctgatcctccaagtcaacatttacgtgggcatggga

SEQ ID NO: 209189 - DNA, 100 bp, Homo sapiens
tgttttagagctggcagcagcatctcagcccaagagaagaggaggagcttggctcccagccagctggccaagagaaaacctgaaggcaggtcctgtgatg

SEQ ID NO: 209190 - DNA, 75 bp, Homo sapiens
ctgctgggtcctacctgtcagagccccaaggtgtctcgtgcctctgctggaccctgactctgggctcctggtcct

SEQ ID NO: 209191 - DNA, 75 bp, Homo sapiens
actaagtgaagagacctcatggcctgcttttgaaagcagagagagatcatcattgcctgaatttagctttgtgac

SEQ ID NO: 209192 - DNA, 100 bp, Homo sapiens
gagatccccaatttgtctgatgaaaacagcgtggatgaagtggagaacaatgtctcccttttgcagagctgtattgacttgttcaagaataactgatatg

SEQ ID NO: 209193 - DNA, 99 bp, Homo sapiens
cgtgcctcgtggtctaaagcttcggcacaagggcccaactggaattccacttacggctgctcagatggaagataaaaagccctttatcctgtcttccat

SEQ ID NO: 209194 - DNA, 90 bp, Homo sapiens
cactggagtggtggcgcagctgtttcctccgaaatttgcctgaaagggttatacgaaactgagaatgggtcaaaacaaaacaaaacggaa

SEQ ID NO: 209195 - DNA, 95 bp, Homo sapiens
gggatcctacgtgcatgaagatggacgaggtcctgtacagcatcgccgagaagagatcctgaaggagctagacgagtgctacgagcgcttcagtc

SEQ ID NO: 209196 - DNA, 82 bp, Homo sapiens
agcagcgtgcgttcagccctggggggtctaatgtgatggaagagcaggacctgcgggacatcggcatcagcgacccacagca

SEQ ID NO: 209197 - DNA, 101 bp, Homo sapiens
taccgggctgtcaaatttacattaactatgagaattaagcagagaatttggatggagagacccggaactgccggaagtgattcagatgttgcagcaccagt

SEQ ID NO: 209198 - DNA, 83 bp, Homo sapiens
gggaggtgttcgagaacgaccccgagacgaactggtcatgctgctggagtggtggtcctgcacggagtgtacactgttcacgg

SEQ ID NO: 209199 - DNA, 50 bp, Homo sapiens
gtttcagtaggcagttggatcagggaatggttgtatctcttgtcacatga

SEQ ID NO: 209200 - DNA, 82 bp, Homo sapiens
aacccaccagaaggaaccaattccggacacataacaagcagcagtgaggacaccaaaggctgaagggtatgtgattggcagc

SEQ ID NO: 209201 - DNA, 100 bp, Homo sapiens
gccaacagcgtctgggaagagagcagccaggggcggacgaaaccatcggtagactccacaagggtcgagctgtgcagttttagcgggtacaagatctacc

SEQ ID NO: 209202 - DNA, 87 bp, Homo sapiens
cccgagccggagcgccagctcagcgtgcccatcccggggggcagcaacggcgacatccagcaagcctgattacatcaaccccagagc

SEQ ID NO: 209203 - DNA, 75 bp, Homo sapiens
gaggcttccccagccacgtggaactgtgctggatataccaggctgaacgatatcaccattgtcttcctactctgg

SEQ ID NO: 209204 - DNA, 111 bp, Homo sapiens
accatcttggtgagaaacattaagacctactaccaggttggacgtgataagtatgagcctgcagctgtttcagaacaaggtgataaaaagggcaaaaagggcaaaaaagac

SEQ ID NO: 209205 - DNA, 106 bp, Homo sapiens
cggaggtgaaggctggcatggagcgggaactggaaaacatcatccaggagatatgagggaaggcaccattggagatatggctatcctgggtataacagaaagtttt

SEQ ID NO: 209206 - DNA, 75 bp, Homo sapiens
acaggcggattggaagagcgggaaggtcctggcccagagcagtgtgctggaatagtcaaatgatttcagttcgtg

SEQ ID NO: 209207 - DNA, 74 bp, Homo sapiens
aagtttatactatcagaccttattttcctaaggatgaggtggtagatctactagtatccatgtgtaggtctgcg

SEQ ID NO: 209208 - DNA, 98 bp, Homo sapiens
ggctatcccaccatcaagttcttcaggaatggagacacggcttcccccaaggaatatacagatccaattctggtacagcagttgcgccggacatacaa

SEQ ID NO: 209209 - DNA, 100 bp, Homo sapiens
tgcacgaccacaccgctgatgaagacaaggactcacagtggctgcaaggttattcagcttctcaaggctggaaaagcgaaggaagtttcctacaatgcac

SEQ ID NO: 209210 - DNA, 96 bp, Homo sapiens
cagactgtgactcttcagcacccaaggctgctcaagctcaggaacctcagatagatgagaattggcagagggggtcgatttgggaggaaaggtgtg

SEQ ID NO: 209211 - DNA, 75 bp, Homo sapiens
cagggattttgaaaatgctgcacatcccttaatagtcatctacataggtgcatgtgagggaaccctggcttgttc

SEQ ID NO: 209212 - DNA, 100 bp, Homo sapiens
ctctaaaaaaactggctgtgaataatatagctggtattgaagagtcctgacacagctctccctgaggagcagccacattccagctcccagtgcgcccctc

SEQ ID NO: 209213 - DNA, 75 bp, Homo sapiens
cgagctggaaatcgtgcctgtgcggcgctcgctcaaggaactgatcccgggtcaaagaaggctcttccaagaaac

SEQ ID NO: 209214 - DNA, 75 bp, Homo sapiens
tgactctggagatccgagaaggaagagcactgcagtttcctcctgaaggctggctccggctctccctcaataatg

SEQ ID NO: 209215 - DNA, 98 bp, Homo sapiens
gcttatgaggatggctgcaagactgtcgacctaaagcctgactggggcaagtctttcccagggaactccgatgaagtgttccaacaaaatgagcgagt

SEQ ID NO: 209216 - DNA, 51 bp, Homo sapiens
caaacaaggcttttgggaagaatttgaggcctaatgggattgtttgaaaaa

SEQ ID NO: 209217 - DNA, 83 bp, Homo sapiens
attgacgccatgtcgggttattcgagtgaccgagaccgcggccgggaccgaggttgtatcacggactgattcaccgagcccaa

SEQ ID NO: 209218 - DNA, 75 bp, Homo sapiens
gcgacccggtgtgtggcgcgcccagagccccgcgtttcagccctagggaagggccgagaactactggtggcgtgg

SEQ ID NO: 209219 - DNA, 75 bp, Homo sapiens
gatttgttaaggattccaagtaactcttatttgaccattcctcaagaattttgtatccaaggcccaaaagtttgt

SEQ ID NO: 209220 - DNA, 50 bp, Homo sapiens
ggctggtcctgccactgggacaggatccagtttgtgtgttctctgtgcaa

SEQ ID NO: 209221 - DNA, 83 bp, Homo sapiens
ggagggggcagtcctcgccggcgagttcagccccgcggcgccatggctcacgtcggctcccgcaagcgctcgaggagtcgcag

SEQ ID NO: 209222 - DNA, 82 bp, Homo sapiens
ggactgtctagttgcaggaaaacaagctcagggcttccactgattctacattatggttgatggacggatggctacatggatg

SEQ ID NO: 209223 - DNA, 100 bp, Homo sapiens
gcttgtgtgagagcaatcgcgtggatgccaagaccaaattagaggctcagaaaaagcttgtggtgaaggggggcaaaaaaaagaagcaagttctgaagtt

SEQ ID NO: 209224 - DNA, 90 bp, Homo sapiens
gtgaaagaaatgaatgatgccgccatgttttatacaaaccgagtcctcaaagagtacaaagatgtttgcatttgctggtctggcctttgc

SEQ ID NO: 209225 - DNA, 85 bp, Homo sapiens
cgtacggagcccgcaagtcccggcccgagacaatgcagatcttcgtgaagactctgactggtaagaccatcaccctcgaggttga

SEQ ID NO: 209226 - DNA, 90 bp, Homo sapiens
agatcctaaaatcatcactttactacttgctaatgccggggtgtttgacgacactctgaagggaacgtggcagagcggattctttgacca

SEQ ID NO: 209227 - DNA, 82 bp, Homo sapiens
ctgggacttaggagggcaggaagagctgcagtctttgtgggacaaggtgactgggaagttccgcgggggtgtgaaccctttc

SEQ ID NO: 209228 - DNA, 75 bp, Homo sapiens
ctcctaaccaagaagttgcccagaaaattggcaacttctccatcgtgcggcggcttggcgtgcaggagtgcattc

SEQ ID NO: 209229 - DNA, 75 bp, Homo sapiens
tggagcgggcggagctgtgcgagagcctcctcacttgggttcctgcacttggccatcatccatgaagaaaaggca

SEQ ID NO: 209230 - DNA, 75 bp, Homo sapiens
tacaccgagtacaaagtaaccgcgcaggttatgcaatggtctctgcaagatggtttattcttgaattggaccttt

SEQ ID NO: 209231 - DNA, 150 bp, Homo sapiens
ggaccccgcagactatcaatcccagtctcttcccctcactccctgtgaagctctccagcatcatcgaggtcccatcaggtactccaaagattcaggtttactcacgtcatccagcagagaatggaaagtcaaatttcctgaattgctatg

SEQ ID NO: 209232 - DNA, 98 bp, Homo sapiens
tttgtcaagttttctactcttacaaaggaactgtccacactgctgaaaaatctggaggtagaggtggaggcggagccggatgtcagaggtcctgaaat

SEQ ID NO: 209233 - DNA, 49 bp, Homo sapiens
gttatttgcagctatcatgtgagatgtgccgtttgggggtgctaaagct

SEQ ID NO: 209234 - DNA, 121 bp, Homo sapiens
cacagcctgcagcggagcccacgagaggcagcgccatggcggagcagacctactcgtgatgtctatacctgagatccgacaatgtggtagaaggcaactgtgctgatgaattactacaaaa

SEQ ID NO: 209235 - DNA, 95 bp, Homo sapiens
gccagaaggctttatctgcaaaggaaggtgagagtgattttccagtgattgctttggcctgtacaaccagagaacaggattcttcccttcttttt

SEQ ID NO: 209236 - DNA, 75 bp, Homo sapiens
gacctttttatagccagaatccaggtggccagcatcgaaatgttcagccttttagtgatgaagatgcatcaattg

SEQ ID NO: 209237 - DNA, 120 bp, Homo sapiens
attttagcatggaagacactaaactgtactgtcgtagttcccccgctccctgggaaagcgtttttgcgtcagcttccttttagaggagatgatggaatatttgatgacaattttattgag

SEQ ID NO: 209238 - DNA, 74 bp, Homo sapiens
cggaggcagccatggtgcggttcaagcacagatgcgtctgttactagagtggagagtctaccttcgtctcacat

SEQ ID NO: 209239 - DNA, 75 bp, Homo sapiens
caaagccacccagccaatgaagcagaagatggctgtgccacccacgtatgccgatcttggcaaatctgccaggga

SEQ ID NO: 209240 - DNA, 75 bp, Homo sapiens
tggaaccagggtgcaacccctgcctatggcgcctggtcccccagtgttggaactgaatccccagacagaagaaag

SEQ ID NO: 209241 - DNA, 100 bp, Homo sapiens
cgcgaagagccgttagtcatgccggtgtggtggcggcggcggagactgcgggcccgtagctgggctctgcgaggtactttgactgctgtggaaagtttcc

SEQ ID NO: 209242 - DNA, 90 bp, Homo sapiens
gcccttgctgatgaatggaataccctagatcaggaagtgacaaccacacggcttcctgctgggtcccagctgaaaatgagagccggaggc

SEQ ID NO: 209243 - DNA, 100 bp, Homo sapiens
caggagcggccacctggttcctgcgtgctacggccctgtgggcctgggagctgcctctgaggaacacgccgcaggctcttatcacgcgatggcatccact

SEQ ID NO: 209244 - DNA, 75 bp, Homo sapiens
aaggcatccaaacctatatctgattcaaggacctctttgtttttagacatgaattggccataatgagactagcag

SEQ ID NO: 209245 - DNA, 75 bp, Homo sapiens
gtgtaatacatcatgaactgcagggtctagaattacggagtcaacaaagcaaacctcaagatgcctcttgtctgc

SEQ ID NO: 209246 - DNA, 80 bp, Homo sapiens
cctacacatgatgatgtacagcagagcttttttcttgctgaaacattaaactaaagtctccagtgaatattgaattgctg

SEQ ID NO: 209247 - DNA, 100 bp, Homo sapiens
gcccagctccttggggtttccggctgcagggcggtaaggatttcaacatgcctctgacaatctctagtgaaagaccacagcaagattctttcattcgtct

SEQ ID NO: 209248 - DNA, 89 bp, Homo sapiens
cctcagctcccagaggatcaccagcgtggagctgaagaagcaggtggagagtgccgagctgaagaaccagcggctcaaggaggttttcc

SEQ ID NO: 209249 - DNA, 100 bp, Homo sapiens
gtcctttttcgtttttcggatgatgccttcaatactacctttatttccaccatagccccaaggaggcccgcctgacgactgaccagttgccatggcatcc

SEQ ID NO: 209250 - DNA, 98 bp, Homo sapiens
caggcagaagaggacagacagatggacactgagctcctggcggaggagaagaccatctctgccaagtatgcagaggagcgcgaccgggctgaggcgga

SEQ ID NO: 209251 - DNA, 88 bp, Homo sapiens
caggtgctatactcagccagtttgagaaagtctctacagaccttggttcactggttgaggacccagttcccatctttggatatagagg

SEQ ID NO: 209252 - DNA, 83 bp, Homo sapiens
agccctctctatgatatgctaagaaagaatcttgtcactttagccactgctactacagcttgtgagaagaatgagttgatgac

SEQ ID NO: 209253 - DNA, 100 bp, Homo sapiens
ggattttgaaaatgctgcacatcccttaatagtcatctacataggagtcttttagtcctgctatacagctgcaccttgtacatcaagctccatgtaatgt

SEQ ID NO: 209254 - DNA, 100 bp, Homo sapiens
ctttttgtcacgccagtatgaatctctgcccgcaacacatatcagacttgtgtatgcggatacctgcttcagtaccatcaagttaaaagcagaagatgct

SEQ ID NO: 209255 - DNA, 50 bp, Homo sapiens
tcttcgacatactctccagcttcaaccggcccgctggggctggaggcacg

SEQ ID NO: 209256 - DNA, 100 bp, Homo sapiens
tgtggcaaccgaaatgagactccctcagatccagtgataattgacaggaagaattttaaatcgtttctccaaagacattggacacttggatgatttgctg

SEQ ID NO: 209257 - DNA, 75 bp, Homo sapiens
aagagggaagacacgcggaaacaggctgcaggctcgcatcgcacaccgaattcaggaacttgaaaaccttcccgg

SEQ ID NO: 209258 - DNA, 99 bp, Homo sapiens
cttggagcagaaggcataattagtgaatttacacctttgccaagtgagaaaaaacgcaagcctgcatggaccgatcgcatcctgtggaggctgaagcgg

SEQ ID NO: 209259 - DNA, 83 bp, Homo sapiens
gcaagaggcaaagagaatcggttgttatgagttgcagaaacgaattgctgaaatggaaactcaaaaggaaaaaattcatgaag

SEQ ID NO: 209260 - DNA, 74 bp, Homo sapiens
aaagagccctgcaatttgaagatacatgagacagcagccaaacccccagaaacctctgtagaggagcaggatgc

SEQ ID NO: 209261 - DNA, 97 bp, Homo sapiens
gtttctttgctggagcacttgagccacgtgcatgaaccaaacccacttcgttcaagacaggtgtttaagcgccccatcacaggtatatggaggagtg

SEQ ID NO: 209262 - DNA, 97 bp, Homo sapiens
cgccaccacccactccggacacaggcacgtctgagaatggtggatgtggtggagaaagaagatgtgaatgaagccatcaggctaatggagatgtcaa

SEQ ID NO: 209263 - DNA, 75 bp, Homo sapiens
atggagagagccctttgcaggatgcagaagaagccaaaaacattctggtgggaggccaagagcatttcgctcact

SEQ ID NO: 209264 - DNA, 109 bp, Homo sapiens
ccgagacagacagcatactgaagtggtttgcaacatccttcttctggataacactgtacaagctttcaaagtcaatatgccttcaattaagttgcagagttctgatgga

SEQ ID NO: 209265 - DNA, 97 bp, Homo sapiens
tgtcagacgcgagcatgtgcagtttgcagcgcatccgtactatgggtcaaaatgcagatcttcgtgaaaacccttaccggcaagaccatcacccttg

SEQ ID NO: 209266 - DNA, 76 bp, Homo sapiens
gcccgctgccagcacacgactacttcgagttcttcgccgccgacctgaggtgccgctcagtggaattggatctcaa

SEQ ID NO: 209267 - DNA, 82 bp, Homo sapiens
agacatgtctgagactcctgctcagtgtagcattaaggtgcagcctgatcttcctcttctcccttgccagccagcactctgc

SEQ ID NO: 209268 - DNA, 100 bp, Homo sapiens
gcggatcgcgtggactggaagtcacactgcggcgatgtctggcgataaagggatttctgccttccctgaatcagacaaccttttcaaatgggtagggacc

SEQ ID NO: 209269 - DNA, 90 bp, Homo sapiens
catgccggtcaaaggaggcaccaagtgcatcaaatacctgctgttcggatttaacttcatcttctgggtcggaacgagctgattgcccgc

SEQ ID NO: 209270 - DNA, 74 bp, Homo sapiens
tcctatggctcaaagaaagatgattatggccttcatcctagaataatcactgaaggatttgaagctgcaaagga

SEQ ID NO: 209271 - DNA, 107 bp, Homo sapiens
tttattctttactggatcggcacttacacctgtcttcaaaaaagaaagaatctcagttacaagagcccggaagctgaagaaacttggtaatctgaaactacaggagg

SEQ ID NO: 209272 - DNA, 83 bp, Homo sapiens
agattatatcgcatcctatggctcaaagaaagatgattattgtttctaagacctcagagaaatttggaatctatagacccgca

SEQ ID NO: 209273 - DNA, 99 bp, Homo sapiens
ctcaaccagatgaggaagtacaactttgagggcggcgactggcggcgcgatggacctgaccgggctcctgctggacgaagaaggcaccttctccctcgc

SEQ ID NO: 209274 - DNA, 50 bp, Homo sapiens
acttgcctaaacctcagcagataggtgattccttcaacacccagaatgag

SEQ ID NO: 209275 - DNA, 50 bp, Homo sapiens
cgcggaccatgggcgacaaagggacccgcctcacttgcctgccgataagg

SEQ ID NO: 209276 - DNA, 75 bp, Homo sapiens
ggaccaatggactgcgaagaactcctaaacaggtggatccagaccgcaaaccaagggccaaaatttaaagaccgt

SEQ ID NO: 209277 - DNA, 82 bp, Homo sapiens
cccatcgcaaacccaaagatccccgttcctggagattctgattgagatcagtcgcatcgaatacattcattcaaagaacttc

SEQ ID NO: 209278 - DNA, 75 bp, Homo sapiens
cagcctggcaacggcggtggcgcccggagcccgaggaggaggaagccaagaatctggtgagcgaagccatcgcag

SEQ ID NO: 209279 - DNA, 51 bp, Homo sapiens
tggagccagctgttgggcttcgcagcggaaggagagttttacatggaagtg

SEQ ID NO: 209280 - DNA, 92 bp, Homo sapiens
ctcaagtatatcaagcattcaaattgctcacagctgatcctaaggtagatggacctgtaggaattgctgcctgttccctgcctaggcgccag

SEQ ID NO: 209281 - DNA, 101 bp, Homo sapiens
aattaggccacaagctatagagcaagtccaaacccagactcatgtagcatctgccccaggaaacccttttccaaagagaaatgaagaagaaaactgtatgt

SEQ ID NO: 209282 - DNA, 96 bp, Homo sapiens
catcgcctggccccggctctctggaccttgtctcgctcgggagcggaaacagcggcagccagagggggcagctggcattttatgctatgtgggagc

SEQ ID NO: 209283 - DNA, 100 bp, Homo sapiens
ctcggcgccggtaggaagagtcagaggggtgaccagagagcccaacgcctggtgctcaagactttctccgaggatcggcttcgccatcgcccggcgtttg

SEQ ID NO: 209284 - DNA, 75 bp, Homo sapiens
cgagccctggaggtggggagaaaaggtcccgggtggattctaagaccctgacccgtaacacgaggatcattgcag

SEQ ID NO: 209285 - DNA, 98 bp, Homo sapiens
gggacaccttctggagtatggggaaaatatgttgtgttcttcttttaccctcttgacttcacctttgtgtgccccacggagatcattgctttcagtga

SEQ ID NO: 209286 - DNA, 90 bp, Homo sapiens
tggctccttcatggcaatgcccagaaatggaagcagattaggtatcacagatgtcgtaagaatctgaatcctccaaaagacagatgatgc

SEQ ID NO: 209287 - DNA, 95 bp, Homo sapiens
gactagccctttccccagcgccacagactccactccacttggctgtgatcaccaaccagccagaaattgctgaggcacttctgggagctggctgt

SEQ ID NO: 209288 - DNA, 112 bp, Homo sapiens
cctgtatttatcactgccttcttgggaattgcttcgtttgccattttcttatggagaactgtccttgttgtccacgtgaacttgctgctcctggaggcgcgcatgcaagccg

SEQ ID NO: 209289 - DNA, 100 bp, Homo sapiens
aggatgcagccagagacatgaatggaaaggatgatccgttggtgctgaatgagatcagagaagaccttcgagtagagtgttcgaagtttggacaaattag

SEQ ID NO: 209290 - DNA, 100 bp, Homo sapiens
atccgcccctggacatggaggagaaggtccgcttcaaccctcgagcatgttccaaactcggttcgcttgtggaaagcagccgttgagctggaagaacctg

SEQ ID NO: 209291 - DNA, 82 bp, Homo sapiens
gaaattgcacgtcagctgacacttttggagtctgatctttacagttggaaatctacatttctgaaggaacccactcaacaga

SEQ ID NO: 209292 - DNA, 100 bp, Homo sapiens
gctcctggaactttctcatcttttcagcatctcaaccctgtggaatcttttaactcccaagattggaggtggacacaaaggaagaggcagccagacagct

SEQ ID NO: 209293 - DNA, 120 bp, Homo sapiens
cgagatgtctcgctccgtggccttagctgtgctcgcgctactctctctttctggcctggaggctatccagcatgcctgaggaaacccagacccaagaccaaccgatggaggaggaggagg

SEQ ID NO: 209294 - DNA, 97 bp, Homo sapiens
acacctctgccgctgctaaaaggcccagtttgatatctctgtggccagtgaaattatggctgtcctggctctcaccacttctctagaagacatgaga

SEQ ID NO: 209295 - DNA, 74 bp, Homo sapiens
tacactctgaaggacattcacgatgaccaggccatgacttgcttctggcagtcaaacagcaacagcagcgattc

SEQ ID NO: 209296 - DNA, 83 bp, Homo sapiens
accggctctggaaaatccgcaagaccatcatgcagtgtctttggtgcaacactaacaaggcttgtctggactacccagttaca

SEQ ID NO: 209297 - DNA, 90 bp, Homo sapiens
ctggattgtcacctttgctgcaaaaaattacggagcagcccgacggccatggaggctgaagagacgatggaatgccttcaggagttccct

SEQ ID NO: 209298 - DNA, 100 bp, Homo sapiens
cggagccatggaggacgaagtggtccgctttgccaagaagatggacaagatggtgcagaagaagaacgcggagccttttgtggcagatgaatatattgaa

SEQ ID NO: 209299 - DNA, 90 bp, Homo sapiens
gtgggtgagcggcggccacggcatcctgtgctgtgggggctacgaggaaaggacctgacctcagccctgacccggaagatcacgctgaag

SEQ ID NO: 209300 - DNA, 100 bp, Homo sapiens
tcacattagctgtgtcaaaaaatgtggcaaagaccatccagttatacagtgtaaaatcagagcagctttatacgctcaacggcaagaaagtggaagttgc

SEQ ID NO: 209301 - DNA, 80 bp, Homo sapiens
tggggatcttcgcactatcccaagaccaggtgataggtttgatcgagacagaccgttgagaggacgtggaggcccgagag

SEQ ID NO: 209302 - DNA, 75 bp, Homo sapiens
ccccgtccccagccccacaagttggtgttcgaggaagagacattgttgttcttggtgtggagaagaagtcagtgg

SEQ ID NO: 209303 - DNA, 51 bp, Homo sapiens
cggggttctctcctgcccccaagctggttatgtgtctcggtaccacgtgaa

SEQ ID NO: 209304 - DNA, 100 bp, Homo sapiens
gggatccttcacccgtgtctgaggtggggctggtgtccgagcacttctcgcaggccccgcagaggctgtccttctacagctggtacggcagtgccaggct

SEQ ID NO: 209305 - DNA, 50 bp, Homo sapiens
ggaaaatggcctaactggatgcgcgttccttcacctcgggcagaataact

SEQ ID NO: 209306 - DNA, 83 bp, Homo sapiens
cggagcttatactcctcccagtgacgggtctggagtgcgtgggggaccggctgttggcgggaaacattggcaaatttggagcg

SEQ ID NO: 209307 - DNA, 101 bp, Homo sapiens
gccatggtcaaccccaccgtgttcttcgacattgccgtcgacggcgagcccttgggccgcgtctcctttgagtttgtgtttaaggagaaactaacaatgaa

SEQ ID NO: 209308 - DNA, 88 bp, Homo sapiens
ggtgcacactgtggagcagggagaaattttgaccctgagtgagtcggaaaacttcgaagcagctgttggcaagttggccaagactccc

SEQ ID NO: 209309 - DNA, 83 bp, Homo sapiens
tgatggagcaggcttgcaatattaaaattctgaaggaagatttccattaggtaatttgtttaatcagtgcaagcgaaattaag

SEQ ID NO: 209310 - DNA, 100 bp, Homo sapiens
caaagctagagtgactgagttgaacccagacaagaactgcattcacacagatgacgacgagaaggtccagtggcattgcagagcacggatggttgcagga

SEQ ID NO: 209311 - DNA, 100 bp, Homo sapiens
cactaggagtatgccagatggaagaaccattgttagtgaacgtggacaaagctgttgtctcagggagcacagaagtattgccatcagagagtcagcaaag

SEQ ID NO: 209312 - DNA, 75 bp, Homo sapiens
aggggctctgggagactccttcatgagctgctgtgggggatatgagactttctactcggaatatcctgagtgttg

SEQ ID NO: 209313 - DNA, 87 bp, Homo sapiens
ggaagtgactgggcggtgccggcgccggagacgatgccgttgctttatcctgtggataaacgcagagtgaacgagtttggggagtcc

SEQ ID NO: 209314 - DNA, 100 bp, Homo sapiens
gtctccgagtttgcgactcgcggaccggcgtccccggcgcgaagaggctggactcggattcgttgcctgagaatatgcttttaaggctattaaccagggt

SEQ ID NO: 209315 - DNA, 80 bp, Homo sapiens
caaagagctggtggcctcaggtgaaaagtttctaagcatgaattgaggaacagaagaagcagagcagatgatcggagcag

SEQ ID NO: 209316 - DNA, 100 bp, Homo sapiens
ggcgcgagcccacgaagaggtacgattccggagaatcgcgaggcagagcgggagcgcgcagccagcaaagaacagtctgaacttgatcaagatttggatg

SEQ ID NO: 209317 - DNA, 100 bp, Homo sapiens
actcatgatgatcctggccatgaatgaaaaggactgccttaaggaagtactggagattgtggaactgggtatctcaggaagtaagtccaagaacaatgag

SEQ ID NO: 209318 - DNA, 96 bp, Homo sapiens
ccgtgcagaccttctccaacctgcagattcgagaaactatggaggagtatatgttggcctaccatctgaagctgtcaatatggtgtccagtcaaac

SEQ ID NO: 209319 - DNA, 82 bp, Homo sapiens
ggaggcttcgagtgacccgggtgccgaggagcgggaagagttgctggggtcctgaacgaggctgtgggggccctgatgtacc

SEQ ID NO: 209320 - DNA, 50 bp, Homo sapiens
gaaggtggagccaccagcctctccctggagccctctggcacaaatggaag

SEQ ID NO: 209321 - DNA, 83 bp, Homo sapiens
gggggcctctcgtccgatgctcaggagagcttggaagaaatctcccaagcctaagaagaagaagcacaggaaggagaaggagg

SEQ ID NO: 209322 - DNA, 97 bp, Homo sapiens
taaaatggcggacctggcgaacgaagtactatactggcaattgctggagaagattttgcaattgttgcttctgatactcgattgagtgaagggtttt

SEQ ID NO: 209323 - DNA, 90 bp, Homo sapiens
cttgcttaaataacaaatactctgaggggtacccgggccagagatcctggtgaagtccatgctgaggaagcgttcctttgggaacccgtt

SEQ ID NO: 209324 - DNA, 83 bp, Homo sapiens
tacaagatgatgcagggaggagcaaattgtggctactaatttgccccctgaagatcaagatggctctggggatgactctgaca

SEQ ID NO: 209325 - DNA, 118 bp, Homo sapiens
ggggcgggccctgggggtcctcagcgtggtctgcctgctgcactgctttgggaggttcccctgaaggatgctaaggaatacgctgaatccataggtgccatcgtggttgagacaagtg

SEQ ID NO: 209326 - DNA, 92 bp, Homo sapiens
aaataaccaacaacctcttccagtttgaattcaaggacaagacagcagtcaagagaccagcccctgcaaaaagcagtgatcattctgaggag

SEQ ID NO: 209327 - DNA, 75 bp, Homo sapiens
caaggtcacaagaagaaatgaaaggaacaatcagcagccctgttcagaagacagccacaaccaaagtcccggaga

SEQ ID NO: 209328 - DNA, 75 bp, Homo sapiens
cctctcctcccagcttgcaggcttaggttggaggcatcaagcctgggtgctttaagattggcaacacaggtggga

SEQ ID NO: 209329 - DNA, 100 bp, Homo sapiens
gccaccgccggggccgctgccgttgaggaggagacggaggagaccgacgttgttagttttcggctttgtgagaaaccttaccatcaaacacgatggccag

SEQ ID NO: 209330 - DNA, 97 bp, Homo sapiens
gctcgccgcgttgaccgcgctcctcgccgccgccgctgctggcggagatgccccgccgggcaaaatcgactgtgccgggtgcaaggaggagatcaag

SEQ ID NO: 209331 - DNA, 100 bp, Homo sapiens
tatttctcttttgtctgcccctattgtaagtgcagatggaacacaacagtaacaaatgtggcaattattttggatctatcacctgtcatcataactggct

SEQ ID NO: 209332 - DNA, 83 bp, Homo sapiens
gggccggccccgctgccgctgctgctgggcctcttcctccccgcgctctggcgtagagtgagacggtttaagcggaagcatct

SEQ ID NO: 209333 - DNA, 98 bp, Homo sapiens
catccccaaggccctggaagtgacagagagcagagcccaggcagccaggcctcactggccacgatgccggaggcacctgatgtgctggaggagaccgt

SEQ ID NO: 209334 - DNA, 100 bp, Homo sapiens
aactacaaggccatcgaaatgccctcacaccagacctacggagggagctggaaattcctgacgttcattgatctggtggccaagcaagaggagttcttca

SEQ ID NO: 209335 - DNA, 100 bp, Homo sapiens
acctgttcaccagcactgtctccaccctagagctagagaccgttggatggcagcttaaccttcagatggctcactctgctcaagcaaaactaaaatctcc

SEQ ID NO: 209336 - DNA, 100 bp, Homo sapiens
ttttcaggattccatttttgagtatttcaacactgctcctcttgcacatgacctgacatttagaacttcacatgtatcattctccgagcctgatattccg

SEQ ID NO: 209337 - DNA, 100 bp, Homo sapiens
gaaactaggagaaataagaatggctgtagaggaacttcagtctataataaagagatgtgtatctagaagagcagaagacagagaatggaaaagataagga

SEQ ID NO: 209338 - DNA, 83 bp, Homo sapiens
gaaggagagaaccaactggaccaacgagcgaacgctggacgatgatgagagtccggagtgttgtcatgtgaagcctgccatcc

SEQ ID NO: 209339 - DNA, 102 bp, Homo sapiens
caagctaacccgtatccccagtgccaagaagtacaaaggcctggagctgctgaagactgctattgggaaagctggctacactgataaggtggtcatcggcat

SEQ ID NO: 209340 - DNA, 97 bp, Homo sapiens
gttgtacagaagggaagaaaataggttgatactcctgttgcaggaccatttgaagtctgagagtttccagcaggacccagtgctccataaaggataa

SEQ ID NO: 209341 - DNA, 100 bp, Homo sapiens
agctcccttaggaatgacagcagtagcagtaatatatggactccaattgccttgacagtgtttttagtggctgttgcaacattatgtaaagaacaaggaa

SEQ ID NO: 209342 - DNA, 133 bp, Homo sapiens
cgcgggccgaccgggcgcaccgaccatggcctccaaatgccccaagtgcgacaagaccgtgtacttcgatgaaggatttgggggcagagcacttggcaggtcatgaaggggtccaacttctcgggttgttgaa

SEQ ID NO: 209343 - DNA, 101 bp, Homo sapiens
caatcccccactctttccgccctaatggaggtctccagtttcggtttggtgcacctcgatttggaggaagtagggcagggcccttatctggaaagaagttt

SEQ ID NO: 209344 - DNA, 90 bp, Homo sapiens
ccgaaacacatgacaaagttgctgcactggtcaagaaaaggatgtgtatgtactgaacctccaaaccccagcaatgaaactctagcacaa

SEQ ID NO: 209345 - DNA, 98 bp, Homo sapiens
gcctcactgtagatgccaagacagagactgcggtcttcaaaaggagcgagaacccgagcagcgccatgagcaacactaccgtcgtccccagcactgca

SEQ ID NO: 209346 - DNA, 90 bp, Homo sapiens
ggtgagaaacaaaacttctttccattgtcctgcccgtttctgcggacttgttctgaggccgagggtctaaaattcccaggactccacagc

SEQ ID NO: 209347 - DNA, 100 bp, Homo sapiens
caagcttcattgttttcagctaacagtaaccccagctgatgactatcagccagttcgtctgctcagtaaacctggggaactgagaagagaatatgaagag

SEQ ID NO: 209348 - DNA, 100 bp, Homo sapiens
ttaaggaactcgatttatatttggcatactttgtgcatgcagcaggtttgccagaacccaataaagatgccatcttccaaggcctgacgcaggaccaggg

SEQ ID NO: 209349 - DNA, 83 bp, Homo sapiens
cacagctgctcccttcgccttcgccctttccacctcgcggcagttcggacacctgctccacttcaccttttgccatgagtaaa

SEQ ID NO: 209350 - DNA, 82 bp, Homo sapiens
tgggccagtacagcaccggcaagaccaccttcatcaggattttttatcaagcagaaatgcatcgaacaacgagaatcaagat

SEQ ID NO: 209351 - DNA, 50 bp, Homo sapiens
tccctgacacccggcatgaccagttgcccctctacctggcctccctcttc

SEQ ID NO: 209352 - DNA, 82 bp, Homo sapiens
tcaagacaccaagtgagaggccaaccagataacgaaggaggcccaacttcattcaataaggagcctgacggatttatcccag

SEQ ID NO: 209353 - DNA, 90 bp, Homo sapiens
tggatgttcaagtcaaacacatttttgctggaacatatgccaactttgtgacaactcatcaggacattatcccctttggcaacaacccca

SEQ ID NO: 209354 - DNA, 82 bp, Homo sapiens
agcaagtcttccagtatgaatcccacagaaaccaaggccacactggtgtgtctcataagtgacttctacccgggagccgtga

SEQ ID NO: 209355 - DNA, 75 bp, Homo sapiens
taggggttccacagtcttttcagaaactcatatttaagggtacttcttgcaagggatatgcattagcacatactc

SEQ ID NO: 209356 - DNA, 83 bp, Homo sapiens
tgtggcagtggaaaatgcgctcgggctggaccagcagggaacaacctatcttcagcactcgagctcatgtcttccaaattgac

SEQ ID NO: 209357 - DNA, 100 bp, Homo sapiens
cccagtgctgccgacaggaacgtggagatctggaagatcaagaagctcattaagagcttggaggcggcccgcggagccatttcctgcttttaagtcttgg

SEQ ID NO: 209358 - DNA, 100 bp, Homo sapiens
tcactaagcagttggaggctgtgtctgatgaaaaacacagactcttgagccaagttgtacgacctcaagaatctcgttctcttagtccctcgcacctcac

SEQ ID NO: 209359 - DNA, 100 bp, Homo sapiens
gtcattgagctcagccgacagggcaaagaggtgattctacaaatcaacaatccgtgggtaaaatggaaaaaggcacagttgacctgaaaccagaaactgc

SEQ ID NO: 209360 - DNA, 83 bp, Homo sapiens
cccgaaactggggtgtccaggcggaacagcagagcccaggtgagaagccctaccactgcaactgggacggctgcggctggaag

SEQ ID NO: 209361 - DNA, 100 bp, Homo sapiens
gatcctgccatagcacagcttctgaagaagttgctctcacagatttgctatgggatcatttatggaatgggagctaaatctttgggagagcagatgggca

SEQ ID NO: 209362 - DNA, 101 bp, Homo sapiens
agagggtcggcagcggcacctacggggacgtctataaggaggagatgaccgccgggttctgctatggcacatggaacaagccatccactccagggtcaagc

SEQ ID NO: 209363 - DNA, 90 bp, Homo sapiens
tgtcgtcgccctggaagacgatcccgagttcaacgcagagctatttatgaagaaattgatgctcaccagcacaaaggagctcaaaatgat

SEQ ID NO: 209364 - DNA, 100 bp, Homo sapiens
tggagaattacaggaatcttctctcattggataacaacgaacttgatgcaagtgataggtttgccaaggtcagacctctcatcatccggatgaactgcaa

SEQ ID NO: 209365 - DNA, 74 bp, Homo sapiens
caggatttcctggaagcagagaaatggataaaatggaccagttgctacagatgctgcaaagtacagaccccagt

SEQ ID NO: 209366 - DNA, 75 bp, Homo sapiens
ggcaagagtaagacagctggaggaagaaaatcgcatgctgccccaggagcaagatcttgtgcaaaccctgagttg

SEQ ID NO: 209367 - DNA, 112 bp, Homo sapiens
aatgtttgaacaaactcgaagaacagctgtggaaagaagttgcaaaacactgggtgctggagaatctggtaaaagcaccattgtgaagcagatgaggatcctgcatgttaat

SEQ ID NO: 209368 - DNA, 100 bp, Homo sapiens
ctgtgataaaaaaaaaattcatctgggcggtatctggaacttgacctctgtgagtgaaagccttcagagggaagctgctaagaagcaggccatgaaacag

SEQ ID NO: 209369 - DNA, 82 bp, Homo sapiens
aggaggtcctgccgtccatgcggaagatcgtcgccacctggatgctggaggtgctgggcgtcctcttctttgccatagcctg

SEQ ID NO: 209370 - DNA, 82 bp, Homo sapiens
ctgtctttatctgctgtcaaggatcttgtgtgctccatagtttatcaaaagcacatcatgcagcgaattcagaggcttcagg

SEQ ID NO: 209371 - DNA, 100 bp, Homo sapiens
ctgtttgaaacgtctgtgggttacgccatctttaagcattcttcagcatccaaatattcttcagtgtgttggacagtgcgtagaagcgattccctacctc

SEQ ID NO: 209372 - DNA, 75 bp, Homo sapiens
gtgtgtggagatatccatggacaggtggagccgccaccaaaatgcagattttcgtgaaaacccttacggggaaga

SEQ ID NO: 209373 - DNA, 105 bp, Homo sapiens
agaagaaagtgaacatcatggatcagaacaacagcctgccaccttacgctcagggcttggcctcccctcaggttggttttaagaacatgcagaatgtggagcatg

SEQ ID NO: 209374 - DNA, 100 bp, Homo sapiens
cgacaaggacgagttcatgaagaccagattatcaaaaattctcatgattaaaaaggaacatatcaagaaattaagggaaatgaacacagaagcagaaaaa

SEQ ID NO: 209375 - DNA, 76 bp, Homo sapiens
cagcactggactcatggaggctgagcatttattcagaaaaaaccactgtctgcaataataaaggaagtctgtgatg

SEQ ID NO: 209376 - DNA, 75 bp, Homo sapiens
tcttccggagctgccgtgcatacctgtgtgaaagcaaccttccaccttagcagtgtctgcaaaaacgaatctttt

SEQ ID NO: 209377 - DNA, 83 bp, Homo sapiens
ctttccaccgaatgccacctggtttataacaaaagtacctggagtagaacagaaaaattattatgtctgtgttcccttgggac

SEQ ID NO: 209378 - DNA, 100 bp, Homo sapiens
ggaaaggctcggctcatgttctgggacttaggagggcaggaagagctgcagtctttgtgggacaagagctcaggccccggggcctccagcggcaccagcg

SEQ ID NO: 209379 - DNA, 90 bp, Homo sapiens
ccggctccgtcgtggaagcaggactgcgccgcgtcttcctcaaggacctcagcagccatgtcgaagccccatagtgaagccgggactgcc

SEQ ID NO: 209380 - DNA, 50 bp, Homo sapiens
catccccgaccgccctcttctgtcttgtttttacagagtcaagaggatcc

SEQ ID NO: 209381 - DNA, 100 bp, Homo sapiens
ttactttaccagattcttgatggtatccattacctccatgcaaattgggtgcttcacagagacttgaacaagaaactcctttacgagaagatgaagggag

SEQ ID NO: 209382 - DNA, 100 bp, Homo sapiens
ggtgcctggggctgaacgcggctttctggtgccggggacacgggcggcaagccgtccacgcggggcggtgaccctgcagcgcggtcccgcaggacggaag

SEQ ID NO: 209383 - DNA, 100 bp, Homo sapiens
atgagatcagcccccgagtgctgcaggccttgggctctgagcccattcagtggcaacagcgttctgagtcttcctgctccttcctgctcggaacctgaag

SEQ ID NO: 209384 - DNA, 100 bp, Homo sapiens
tggaccgcatcgagaaggagcgcaagcaccagaagggaagatggctttatgctttattggcttgtcttgaaaagcctttgttacctgaggctcattcact

SEQ ID NO: 209385 - DNA, 100 bp, Homo sapiens
caaacttgacactcaccctgaccgatgagcagcaccagcagtaagagggctccgaccacggcaacccagaggctgaagcaggactaccttcgcattaaga

SEQ ID NO: 209386 - DNA, 100 bp, Homo sapiens
gccacccagtggtttactggcataattactcatcatgatctcttcacccgcaccatgatcgttatgaatgatcaggagcgagaacccgagcagcgccatg

SEQ ID NO: 209387 - DNA, 51 bp, Homo sapiens
tcagtcctccagtgtttggatattcaggtgtcccgacccaggctaagcttg

SEQ ID NO: 209388 - DNA, 98 bp, Homo sapiens
gcctccagcaggacaatattcgcacccggctgaagctctggcaggctgccctgagcacgctcaaccccaaccccacggacagctgtcccctctacctg

SEQ ID NO: 209389 - DNA, 82 bp, Homo sapiens
gatatttgacaattttgtgccagtcactcctagaaaatctagacaaataacgaggaaatattctgaaatggatcccaaatat

SEQ ID NO: 209390 - DNA, 107 bp, Homo sapiens
attctggctgaataccctgatggcaggataataatggttcttcctgaagacccaaagtatgccctgaaaaagatatttgttcagtcgaatcaaggtgaagaggaaac

SEQ ID NO: 209391 - DNA, 83 bp, Homo sapiens
ctgagcctgcagccggccctgccgacatctgaatgggactccgagtgccttacatccctgcagccccttcctcttcctacacc

SEQ ID NO: 209392 - DNA, 88 bp, Homo sapiens
cccatgcgagtacctgaggaaggtgtctttcctgaagactatcttcccgtctcaaaatggacatgatggatccacggatgtacagcag

SEQ ID NO: 209393 - DNA, 90 bp, Homo sapiens
taggagcaaccctgtaaaaccagccttagactatttttcaaacaaattaaacaaccaccatgtcgagcaaaaaggcaaagaccaagacca

SEQ ID NO: 209394 - DNA, 82 bp, Homo sapiens
gcagcttcatgatattactgtaccgttagaagtttttgagtatgggcagctgagcggcatggtggagcccctggccggggtc

SEQ ID NO: 209395 - DNA, 74 bp, Homo sapiens
ttttggcattgacatttaattttagggtcctttatatagaagggagagtagtttaattggttggggtcagataa

SEQ ID NO: 209396 - DNA, 87 bp, Homo sapiens
caaattcttgaccaatctagggatcgtagggcatcagaaaaacaaaaagaaatagagagagtaaaagagaagcaacagaaagaactc

SEQ ID NO: 209397 - DNA, 50 bp, Homo sapiens
caaaatgaacacagtcactgggctgccttgaggtgcagtgttggggatcc

SEQ ID NO: 209398 - DNA, 75 bp, Homo sapiens
acctggtgcagtgcgagacgctagagggaacaagatcactcaaggtgaaggataatctactaataccagcacttt

SEQ ID NO: 209399 - DNA, 104 bp, Homo sapiens
gccgcccgcaccgccgcccgcgccctcaccaggtgaggcggaaccaaccctcctggccatgggaggggccgtggtggacgagggccccacaggcgtcaaggccc

SEQ ID NO: 209400 - DNA, 100 bp, Homo sapiens
tactgtgcttggctggaaaaccccaaaagtgtacataagtgtgtctctatgcatggagtaagaaagaaaccatcctacaatagcaccaaatccagcatgg

SEQ ID NO: 209401 - DNA, 75 bp, Homo sapiens
ccgctgacgacacccctggtggatggcgaggatgagagtcccagaaatcctggatagaaagcactttgaccaaga

SEQ ID NO: 209402 - DNA, 83 bp, Homo sapiens
ctcgcaacaagatcccctatgagagtcccatcttcagcagagttcaaatctgaacatcaatgatgtactagggaactactcat

SEQ ID NO: 209403 - DNA, 75 bp, Homo sapiens
ctggcctggaggctatccagctcctcaggtcctggctcccagaagcaaaataactcaagtgaagcaatgaaggaa

SEQ ID NO: 209404 - DNA, 97 bp, Homo sapiens
gccgggctgtggtcactaatgtacaggcagaaaacgagaggctcaccgcagtcgtgcaggatctgaaggagagtcagcgtgggagaaattgtaacga

SEQ ID NO: 209405 - DNA, 100 bp, Homo sapiens
cacgcctgccccagggaaccgcacaggcaatgccaccgtagataagttggaggacttcatcaacaacattaacagtgtcttggagtccttgtatattgag

SEQ ID NO: 209406 - DNA, 100 bp, Homo sapiens
ttcctgtacagcctgcagaactgtgattgaagtgggaaaaaatgatgacctggaggactctaagtccttaagtgatgataccgatgtagaggttacctct

SEQ ID NO: 209407 - DNA, 108 bp, Homo sapiens
aggggcctatgtccatatggtcactcatttcattcagctggtggagctgtctaaggctcaagatatagaagcaggagatggcaccacatcagtagtcatcattgctgg

SEQ ID NO: 209408 - DNA, 82 bp, Homo sapiens
tagtctacaaaggaagacttgtaacctggagaagaggtttactcctggcttgggggcattaggaagcactggaggctcttcg

SEQ ID NO: 209409 - DNA, 75 bp, Homo sapiens
ctccgttagctaattaaaacatttttcagggacgtagccatccagagaaatcctaagtaatgcactgaagagagg

SEQ ID NO: 209410 - DNA, 96 bp, Homo sapiens
ggtagaggcagtggcgcttgagttggtcgggggcagcggcaggagcacatctacaagctgatgaagagtgacagctatgcccgcttcctccggtca

SEQ ID NO: 209411 - DNA, 100 bp, Homo sapiens
gcttgtacagtggaaaccagcccaagctacaaaagtggtgggttttttgattaactcaaaaccagagaatgcctgtgaacccatagtgcctccaccagta

SEQ ID NO: 209412 - DNA, 100 bp, Homo sapiens
aagcccaagatcgtcaaaaagagaaccaagaagttcatccggcaccagtcagaccgatatgtcaaaattaaggatctcattgactcagatgagctgctgg

SEQ ID NO: 209413 - DNA, 88 bp, Homo sapiens
tagaagcagcctggcctcatctacaggccaggagtggtggctcacacctgtaatcccagctctgggaggccaaggccagtggattgct

SEQ ID NO: 209414 - DNA, 100 bp, Homo sapiens
aagtgggtggatggcataagacagtttaaacatctcccagatgcccccaaatacatcaagatgtttgtactggatgaagctgacgaaatgttaagccgtg

SEQ ID NO: 209415 - DNA, 73 bp, Homo sapiens
acgttcatatcattgtcttccacagatgtgtcaccaaaccaggttagaaaatggatttctgactggaatctca

SEQ ID NO: 209416 - DNA, 100 bp, Homo sapiens
gccgtcttctttgcctgcactaatgggatccaagtgctaagagatcagctgggttggttccttcctggcgtcatatcccaaagtcgcacagcagtagcat

SEQ ID NO: 209417 - DNA, 96 bp, Homo sapiens
ggacgtcatcctgatcttggaactatgccacaccacatgaagcccttgccatattacagctatgaccagcctgtgatcgggtactgccaggcccac

SEQ ID NO: 209418 - DNA, 100 bp, Homo sapiens
taatggacagttagtcacccacctacatgttgagtgctcttaaagttccgtacagataaaggaagagatcccagttctgatacatatgaggaagattctg

SEQ ID NO: 209419 - DNA, 100 bp, Homo sapiens
gctgatcaaggctgtctccacctcggacacagttgtgtgacttcattgagacacattacctgaatgagcaggtgaaagccatcaaagaattgggtgacca

SEQ ID NO: 209420 - DNA, 100 bp, Homo sapiens
aaaagccatcgtgaaggagctcctggagctggtgctgttccctcgtcacaccaatgccagtgctcgagacaacaccatcaacctgatccacacgttccgg

SEQ ID NO: 209421 - DNA, 100 bp, Homo sapiens
tcaagtacccactggaccgtggttttgcaggaaatgtgaatctcaggagagagcagccagagtgatcaatgaactgagccatgttcaaatccctgttatg

SEQ ID NO: 209422 - DNA, 100 bp, Homo sapiens
caagcagttcagaagagccaaggaataaacatgcaatgaacccaaaagggccttcccttcttcttggtggtgttcttgagtaagataatctggactggcc

SEQ ID NO: 209423 - DNA, 100 bp, Homo sapiens
cagcagtgccatccagcttctagaagacccattacagagggaattttcaacgtccggttcatctaatacagacactggtaaagttactgggaccttggag

SEQ ID NO: 209424 - DNA, 96 bp, Homo sapiens
cgcagcgatttgttgtaagaaccgccggggacgaaacaataaagaccggaagctgagtttttatccgagcagatgtctcaagtattagatgccatg

SEQ ID NO: 209425 - DNA, 100 bp, Homo sapiens
aaaattcaaagtcgaatatcatgctggtggctctacccagaattcaattaaagtggctcaggtcccaggtgtgtgatggcggctgcaatctgtcttgtgg

SEQ ID NO: 209426 - DNA, 88 bp, Homo sapiens
ggagtatacaccatgagcaaagctcaccctcccgagttgaaaaaagcaacaagatatggatttggatatagaatttgatgtacacctt

SEQ ID NO: 209427 - DNA, 100 bp, Homo sapiens
ttgcggcaacgcccccgggacatgcatcgtcccctggactctctcaagggtcaaaccttggtcaaatatcatggaaatcctggaggaaaaagatggagtt

SEQ ID NO: 209428 - DNA, 50 bp, Homo sapiens
gcagttgttgcagctgctggccttggaaatgtctccaaaactatatccct

SEQ ID NO: 209429 - DNA, 104 bp, Homo sapiens
agggacagcacctcatcccctggatgggggaccacaagatcctcatcgacagggatcgcttacacctgagacgaactacagaacagcacgtaccagaggtggaa

SEQ ID NO: 209430 - DNA, 75 bp, Homo sapiens
attgttcctaaaccagaagaggaggttgcccagaagaaaaagcaatcacagaggtggtaaaatgtgagcatgagc

SEQ ID NO: 209431 - DNA, 116 bp, Homo sapiens
gtgcagaaataccagtccccagtgagggtgtacaaatacccctttgaattaattatggctacatatctgaagagatggattaagaatgctttggattaaggattgtggagcacatt

SEQ ID NO: 209432 - DNA, 101 bp, Homo sapiens
cccgggggcccccagcccgcctctgtgccactttgcatcccacgccggaggaggcattaacgagaccgggtaaggattcctacaggaagcaagtagtaatt

SEQ ID NO: 209433 - DNA, 74 bp, Homo sapiens
ctgtggtgatggatgaggtggtgctgacaatcgagcaaggaaacctggattctggaagttacggtcagtctggg

SEQ ID NO: 209434 - DNA, 83 bp, Homo sapiens
cagcaactgccggacgccctatcgcaagcagttttctggatatgccgcagaaggatccgtgccagaagcaagcctgtgagata

SEQ ID NO: 209435 - DNA, 90 bp, Homo sapiens
cacttggcatctattttgaagttgtcaatcaggcagcgcccggttaccacatggccaagctgatcatcaagttggtcacctccatcggcg

SEQ ID NO: 209436 - DNA, 90 bp, Homo sapiens
tggcctacccgggatacggaggaggggattacagtttaaagacaatttctgtgatcaagttgtcatttggaagattaaacccatttcacg

SEQ ID NO: 209437 - DNA, 100 bp, Homo sapiens
aggcgcagcgccccccagagagagccctcaacaggaaggcatgcatgtgacacctcaggtgcaacacgcaggactacatctggcacaaggggatgcgctg

SEQ ID NO: 209438 - DNA, 50 bp, Homo sapiens
ccgccattttggatccgctgacagggaccccgacaatgtgaccttctgtg

SEQ ID NO: 209439 - DNA, 100 bp, Homo sapiens
cagaaggcgtctcatggcgttggaataccggctctcagcggcttgtgggaattttgctgtcctcgtggatcttcatatcttgccacaaggttcaaacaaa

SEQ ID NO: 209440 - DNA, 82 bp, Homo sapiens
tggcccggaaacaggaggaccaggttacgggcaggacttgagtggcttcggacagggcttctcagaccccagccagcagcct

SEQ ID NO: 209441 - DNA, 97 bp, Homo sapiens
gctatgctttcttattgtgcatactatgaaatgtttttcttcaaaaagtgtttataagtgaaatgactgctgtccatgcaggcaacataaacttcaa

SEQ ID NO: 209442 - DNA, 98 bp, Homo sapiens
tcagacagcatatttgagtcatttccttcgtacccacagtgcttcatgagagtttgtacaatgacgacagaaacctgcttcgaattagagagaaggaa

SEQ ID NO: 209443 - DNA, 82 bp, Homo sapiens
gtggctcagtctccctatattttgaaagaaggtggtcttctgccctgttaaagaagccctggaggtggactggagcagtgag

SEQ ID NO: 209444 - DNA, 90 bp, Homo sapiens
aatttatcatgtccacatggcatgggagaaagaggaatgggcctggcctgtgggcagattgcccaaggactccagatactccaaataatg

SEQ ID NO: 209445 - DNA, 75 bp, Homo sapiens
cccggctagggcacggaccgcctaggccgagtgtcctggtgaagacctagttcttgccggagacaattccactgc

SEQ ID NO: 209446 - DNA, 99 bp, Homo sapiens
caggacacccctgaagccgagaaatgattctctcgggcctagccgtccttggaacccgatattcgggctgggcggttccgcggcctgggcctaggggct

SEQ ID NO: 209447 - DNA, 75 bp, Homo sapiens
tatgctttctgccacatgtaaaccgtgctggagaatctggtaaaagcaccattgtgaagcagatgaggatcctgc

SEQ ID NO: 209448 - DNA, 101 bp, Homo sapiens
cgcctcaggggccatggcgaagcacgagcagatcctggtcctcgatccgcccacagacctcaaattcaaagcggttaagaagattgtctaccaaatataga

SEQ ID NO: 209449 - DNA, 50 bp, Homo sapiens
gttaaggattccaagtaactcttatttgttgggatgaatgggttccggag

SEQ ID NO: 209450 - DNA, 87 bp, Homo sapiens
gacctcgacgtcttgcctgtgtcccacttgttcgcggcctatagagacactatggacagcgtgaagcagagcgcggccctgtgcttg

SEQ ID NO: 209451 - DNA, 77 bp, Homo sapiens
attctacagcacactcagactcaagatctgcaagttttcctaaaaagtaacagactagctagagacaatgaattaag

SEQ ID NO: 209452 - DNA, 96 bp, Homo sapiens
cgagaagctccagatggcgtcttccgtgggcaacgtggccgacagcacagcactgccagtgaaagatgtagaagataaacctgaacaacaaaccag

SEQ ID NO: 209453 - DNA, 90 bp, Homo sapiens
atcgcataagagcaaagaatactattgttgccacaggatgccccttggtgtggccactgcaaggctctggcccctgagtatgccaaagcc

SEQ ID NO: 209454 - DNA, 98 bp, Homo sapiens
ttgcatccttcaatgacacttttgtccatgtcactgatctttctggcaattggtagctggcagtgttgtgatggcttttgaagaagtatgcccggaca

SEQ ID NO: 209455 - DNA, 100 bp, Homo sapiens
tccatagggaggacggcggaacatctggaggctgggaaatgaatcatgtcaaccctgccatggacttcacgcagactccacctgggatgttggctctgga

SEQ ID NO: 209456 - DNA, 122 bp, Homo sapiens
cggcggctgaggaaagcaggaggaggtggcggcggcgggaagatgccaccagcttgggctccccacggagggcagcaagtgggacttggggaacccggctgtcaacctgtccacggtggcag

SEQ ID NO: 209457 - DNA, 50 bp, Homo sapiens
ggcggctggcctcaccgcccactggtcaccttcaggccattcagaggagg

SEQ ID NO: 209458 - DNA, 75 bp, Homo sapiens
atgtgcgaacatgtaacaagaatccaaagaaaacaaaatggtggtatcatggtggatgcccggagcataccagtg

SEQ ID NO: 209459 - DNA, 49 bp, Homo sapiens
gaagccccgggcctcatcccagggtgtggtacagcctgacaagtataag

SEQ ID NO: 209460 - DNA, 82 bp, Homo sapiens
ctgccatctggagtggatggacacacctggttgctcagacagtgctgcaggtggagaaattttcagcctgtgtttacctgag

SEQ ID NO: 209461 - DNA, 98 bp, Homo sapiens
gctccctactcttctaaggatcgctgtcctgacagaagagtgtttgatgatggtgatgagcgaacattgagacgtacctcactttgtctgaaaggaga

SEQ ID NO: 209462 - DNA, 77 bp, Homo sapiens
gctagcgcggcctgggatgcgcttgggctccctgagttttgccgaattgacaagcccctgtgtcacagtgaggatga

SEQ ID NO: 209463 - DNA, 100 bp, Homo sapiens
ggttttataatgacccagctggctatgcaatgaatagatatgcatattatgtgtgctacaaatgcagaaagtatgtccgtggttcagaccctgtattaaa

SEQ ID NO: 209464 - DNA, 76 bp, Homo sapiens
ggactcttctggaagtcggcacctatgaagactcctcagacccctgcacaattgagagaaaagcccgaagaattag

SEQ ID NO: 209465 - DNA, 90 bp, Homo sapiens
agcctccgtggaactcagcgctccgctcctcccagttcctaagagactatcctattaagtgtaatctcactgcttaatgagcccaacacc

SEQ ID NO: 209466 - DNA, 75 bp, Homo sapiens
ccggcggatgttcatgggcagcaccatcgagccagaagcagtatttgtcctgattgggctaatggatactacaga

SEQ ID NO: 209467 - DNA, 87 bp, Homo sapiens
aaaggctggcacgaacatgtcactcaggacctgcggagccatctagtgcataaactgacgacgccaggcagctatttgcactgtcct

SEQ ID NO: 209468 - DNA, 83 bp, Homo sapiens
ctcgcgcagccatgtccgaggagaagcccaaggtccagctgggagctccccgacctccaggagggcaagatccaagccatcag

SEQ ID NO: 209469 - DNA, 100 bp, Homo sapiens
gatacgctgggactcgtacgagaacctcagtgcagatggagaagatcaccagaagctggagagagaggctcggatctgccgccttctgaagcattccaac

SEQ ID NO: 209470 - DNA, 75 bp, Homo sapiens
ggaaaacggggatttccaccatctgtcccaggaatccccatctctaatgtaagcttggagatccgggcccccggg

SEQ ID NO: 209471 - DNA, 51 bp, Homo sapiens
gctgcttcgactacgacagggcgtgcccagttggattggatgctgctggca

SEQ ID NO: 209472 - DNA, 100 bp, Homo sapiens
ctgtcacctccatttcattgagatgatatattgagcccatgcgtagccttttatttgagcatcagcgagagctttctaactgtcaaaggtgctgcccttt

SEQ ID NO: 209473 - DNA, 100 bp, Homo sapiens
tggagcggcacggctgaggcccgcaagcgcaaggccctccacgcccttcaggaggagcaggccagactcaagatgaggctgtgggacctgcagcagctga

SEQ ID NO: 209474 - DNA, 100 bp, Homo sapiens
ccctagactctacaaatgtagaagctgcttttcagacaattttaacaggagcccaagaagaggccgaaaccgagaccatgccagggaagctgaaggtgaa

SEQ ID NO: 209475 - DNA, 75 bp, Homo sapiens
aagagagaggtccgtctaatgaagaacagaatcatattctaagaactcagccactcaggtatccaccatggtgct

SEQ ID NO: 209476 - DNA, 90 bp, Homo sapiens
ggaggcggctgcgagagtggcagaggagctggcggagagcggcctgcgggcgatcgggccgaggacccactcttctgtttgtaaaggtga

SEQ ID NO: 209477 - DNA, 101 bp, Homo sapiens
accgaacagagtcaagtggaatcaaaggcaagtgtcaattgaggagggagagaggaaagccaaagagctgaatgttatgtttattgaaactagtgcaaaag

SEQ ID NO: 209478 - DNA, 50 bp, Homo sapiens
ccgagaccgcggccgggaccgagggtggtcttcaagctgacagagaagct

SEQ ID NO: 209479 - DNA, 75 bp, Homo sapiens
ttcacgcagaagttggcaggagcatgggcttcggaggcctatagcccgcagtttcacgctatggatacattgtat

SEQ ID NO: 209480 - DNA, 99 bp, Homo sapiens
cagcggaagaccaaagaggatgagaaggacgacaagcccatccgaggtggcgctcgtgtttccgaatagtgaccctgtgatgttcatggttgcatttta

SEQ ID NO: 209481 - DNA, 82 bp, Homo sapiens
aggaccctctcccatcacggacaccggagccggtgagaagccctaccactgcaactgggacggctgcggctggaagtttgcg

SEQ ID NO: 209482 - DNA, 108 bp, Homo sapiens
acagatatattggatatgaaactggaagacatcctggtggtctcggctgctcgtatcttacttaggaaccctggaaatcaagctgcttatgaacattttgagaccatg

SEQ ID NO: 209483 - DNA, 82 bp, Homo sapiens
gtttcacactccaccaagcatcccattacagatagaagaggcaggggaaatggaaggtgatgcagtcgaagccattgtggag

SEQ ID NO: 209484 - DNA, 50 bp, Homo sapiens
aatattggacctcaatacctataacgtcgatgtgtatgtactgaacctcc

SEQ ID NO: 209485 - DNA, 101 bp, Homo sapiens
cgtgcagcctggcagtgcagtggtttgtcctggttgtggtcaagactggatgatgtaactggctctctaggaagcctcacttggccgtaacctcaggaagg

SEQ ID NO: 209486 - DNA, 75 bp, Homo sapiens
ccgacgaacatttctgggtgacactcaacaggattcccgatgtgagtatgcagtgctcacaggatatacttcgaa

SEQ ID NO: 209487 - DNA, 98 bp, Homo sapiens
gatgaggaacaaatgaaatataaatcggaggggaagtgcttctctgttttgggattttgtaaatcttctcagaagctgcacacatacatgtaagagaa

SEQ ID NO: 209488 - DNA, 74 bp, Homo sapiens
catctccattgagggccagaaggaagaggaaagacttaagccagattgggttttgagaagagataacatggaag

SEQ ID NO: 209489 - DNA, 100 bp, Homo sapiens
cgcgacttcaacctcctgcaggtctcggagccctcgttcatcagagaagatatgaaatataaagatgctactaataaacacagccatctgcacagagaag

SEQ ID NO: 209490 - DNA, 75 bp, Homo sapiens
tgttagaagaattcatgctcatccgggttaaacccatccagagtaatggctgcggccttacccaggaccctgggg

SEQ ID NO: 209491 - DNA, 82 bp, Homo sapiens
acccagggagaaacaggggggcgagaagagaaacaggacaatgaaaagcgaaccccattgcacgccgcagcttaccttggag

SEQ ID NO: 209492 - DNA, 100 bp, Homo sapiens
taagggataacctttaccgccatgctgtgccttagctgcagagagacaaggcggcggcggctgctgtgctgggtgcagtgaggaagaggccctcggtggt

SEQ ID NO: 209493 - DNA, 100 bp, Homo sapiens
ccttgacatactccaagaataagggtatacctcagttaccatgtgccaaagcattatacaactatgaaggaaaagagcctggagaccttaaattcagcaa

SEQ ID NO: 209494 - DNA, 87 bp, Homo sapiens
taacatgaaggcccactttattatggatgatccagcaggaaacagttacttgcaggtggcagagtttgtggatgagcggccagaaga

SEQ ID NO: 209495 - DNA, 74 bp, Homo sapiens
acaaggcactgggctacgtgctggacaggtacgtgcagcactacggcctgggcagtgcctgtgacaacgtagag

SEQ ID NO: 209496 - DNA, 100 bp, Homo sapiens
ccccgactcgggcttggcgcggcggccagaggaaccccgagttccagggtctccctccactgctgtagtaacccgggtccggggcctcggtggtgctcct

SEQ ID NO: 209497 - DNA, 99 bp, Homo sapiens
cttttgtccctttgcctcatcccaggttgccttggaaaatgccaacgccgtgtctgaagcactgctcagcacgcaggcatgtgaggaagctgggcttaa

SEQ ID NO: 209498 - DNA, 100 bp, Homo sapiens
gggcgccgggagcgagctgggagggagccgcgcgcctttgtgcgcgcgccgaggcagaggtggaggagacactgaagcgactgcagagccagaagggagt

SEQ ID NO: 209499 - DNA, 100 bp, Homo sapiens
caagaatcgccttcagccctgtctggtgcatccttggcagaaagtgaggaggaaaacacccccattcaaactctggcctgttctattctgactgcgctat

SEQ ID NO: 209500 - DNA, 83 bp, Homo sapiens
tgctgccgtgcccttctccctcatgcaggtgacctgacctcccacctcctgccccccatgaggcagctgcggacctggtgggg

SEQ ID NO: 209501 - DNA, 74 bp, Homo sapiens
gatcactgtcctctctcggcagcagtatacaattggaccgtggatgaggtggtacagtggctgatcacatatgt

SEQ ID NO: 209502 - DNA, 98 bp, Homo sapiens
cagattcctttgaaaagcatattagaagcattttgcaacgtagtgttgccaatccagcatttttgaaatctcaggaaacaggctcgacagctggaaaa

SEQ ID NO: 209503 - DNA, 90 bp, Homo sapiens
cagaagccatgcccctcaggctggaacttgccctgtctcctcgcagatgagggcatggtgctgatgtgaaatgtgtagactggcatccaa

SEQ ID NO: 209504 - DNA, 98 bp, Homo sapiens
actgaagacacatccatcggtggttccagggagcattgcattcagtttacctcaggtcccattttcagtgcccaagatccccctggtattccgaggac

SEQ ID NO: 209505 - DNA, 50 bp, Homo sapiens
tctgtgtacgctgaggggggaggtaaagaagctaagtggaagagtgtttc

SEQ ID NO: 209506 - DNA, 75 bp, Homo sapiens
cgggcgcctatcagtacacaataaggaattttgcaagagtaaagatgcaagtaaccatgtccctggcatctttgg

SEQ ID NO: 209507 - DNA, 100 bp, Homo sapiens
tgaggcctccccagccatgtggaactgatctcccagccatccagccccggctagtggcggtcagcaaaaccaaacctgcagacatggtgatcgaggccta

SEQ ID NO: 209508 - DNA, 83 bp, Homo sapiens
aagcgggagaccaggagctcctccaccaggccaaagacttcggcaatgccatggacaatattaccaggcagaaccaattctac

SEQ ID NO: 209509 - DNA, 100 bp, Homo sapiens
gcgcgcctacctgctgccagcgccgccagctccaggtaacctggatggagaggaccatgccgcagagcgaacggtggaggatgttttccttcgcaagttc

SEQ ID NO: 209510 - DNA, 100 bp, Homo sapiens
ctgatgatggcagcttaaagagttccagcttcttcacactccagcccatgtcctgccatctgctgctttcctgtgctccatgtttgtaaattcattgctg

SEQ ID NO: 209511 - DNA, 97 bp, Homo sapiens
atgaattcacctttgattccagtgtgaactgtcaatcataagaagccacagaagaagtttctttggacagccctgaaagggaacctatcctatcctc

SEQ ID NO: 209512 - DNA, 76 bp, Homo sapiens
cttaacttacatgcccagtgtttctcttcagtcactgtgtcaaatttgttcaagtactatactggcaattgctgga

SEQ ID NO: 209513 - DNA, 75 bp, Homo sapiens
gccgcgaggaggcgcgggaggtgttcgagaacgaccccgagacggctggacaaatcaggacgcaaaccctcgtca

SEQ ID NO: 209514 - DNA, 82 bp, Homo sapiens
caagtactaccggccaactgaagtggcttgggcactgtttaaaggaaagttccgagaaggcatcgacaagccggaccctccc

SEQ ID NO: 209515 - DNA, 100 bp, Homo sapiens
ccacatggtacctggattcagatgactcatcccccttaggatctccttccacacccccagcactcaatgtgtcttgggacaaggtgcgcattcctggtgt

SEQ ID NO: 209516 - DNA, 74 bp, Homo sapiens
ccgcccgcaggctccggcttccgtcccggacagagcccgtggtcgcgcagattttaccaaatgttgcaagaact

SEQ ID NO: 209517 - DNA, 90 bp, Homo sapiens
gcggtccggacgccgcccgaacatggactccgccggccaagattgtgttcagtgtggacccctccgagggcagccctggttccccagcag

SEQ ID NO: 209518 - DNA, 99 bp, Homo sapiens
ctttgggcacaagtcatgaagccgacaagcccgggagacacagtgtcagaattacaaggctcatatctggtgttagtcggccagatgaggtgctcgagt

SEQ ID NO: 209519 - DNA, 82 bp, Homo sapiens
gtgctcctctccatggggttccccagagcccgcgcgtactccaaagattcaggtttactcacgtcatccagcagagaatgga

SEQ ID NO: 209520 - DNA, 97 bp, Homo sapiens
gcacgtacacagccctaatcatagctacagacaatggtgaaagacccctgacaaaagacaatcatcttctgggtacatttgatctgactggaattcc

SEQ ID NO: 209521 - DNA, 50 bp, Homo sapiens
caggcgactgcctcatcttcaaggttaaagatcgaggtccggaagccact

SEQ ID NO: 209522 - DNA, 99 bp, Homo sapiens
ggagaactacagaaacctggtctccctaggaaaggatccagtaagtcatgagcatgaggaaagaaaacctgttacagagacaaaggagggagatgtaac

SEQ ID NO: 209523 - DNA, 90 bp, Homo sapiens
gaaagatgagggactgcagtacttggagagactctatatgaaaaggaactccctgacatccttggtactccaaagattcaggtttactca

SEQ ID NO: 209524 - DNA, 87 bp, Homo sapiens
ttgaaatctcgacccaagaaaaagaagaattcagatgatgctccatggagtcctaaaggatgaaatctttgacatggtaaaaccaaa

SEQ ID NO: 209525 - DNA, 50 bp, Homo sapiens
catggatatctctactcgctccaaagcggccctccaggcactgaagcgta

SEQ ID NO: 209526 - DNA, 100 bp, Homo sapiens
agaaagacttgaaggcgtatacaggaacaatattgatgatgtagtaaggtcgcagcagttgtggtagaaatttctgggttagtggactctcttctacaac

SEQ ID NO: 209527 - DNA, 100 bp, Homo sapiens
ccagcgatggcagacagaccacatataccacgaggatccatctcgtctgctccaggggcaggctggcacagttggtggatctgaaatctgaactgacaga

SEQ ID NO: 209528 - DNA, 83 bp, Homo sapiens
cacagagcctcgcctttgccgatccgccgcccgtccacacccgccgccagagcctggagacacaggccccatccttcccaatg

SEQ ID NO: 209529 - DNA, 49 bp, Homo sapiens
gtcagcgttattgtaatgcaagactcagaattcatgattgaagaaatgc

SEQ ID NO: 209530 - DNA, 83 bp, Homo sapiens
cctgtacgcggagggctcggtcaacggcttcatcagcaccttggggctccttcctcagagaagcttcctgttatgtaccttat

SEQ ID NO: 209531 - DNA, 100 bp, Homo sapiens
actgttattgaaatagaattttctacagaagtcaaggcagtcaagctgcggcgagatagctcccgattctcctgaaggggacgtccgatgatgatgtccc

SEQ ID NO: 209532 - DNA, 76 bp, Homo sapiens
caccatgttcctgggcaccggggagccggccttggacacgactatctgttatagtccctgggtcaagacaacaatt

SEQ ID NO: 209533 - DNA, 83 bp, Homo sapiens
ctaaattctgccgaaaggactgaggaacggtgcctggaaaaggagtccaatgtgctgattgctgctaacagtcagggtacaat

SEQ ID NO: 209534 - DNA, 76 bp, Homo sapiens
agccctgaccacagagacgcgtccagcttagaccatgctcagcctccaagcagccttgtcatcgacaaagaatctg

SEQ ID NO: 209535 - DNA, 75 bp, Homo sapiens
attcttatcatttctaagcaggttcatgccagcccagaacagagaatcagtgagaagaagctcattacagatgcc

SEQ ID NO: 209536 - DNA, 96 bp, Homo sapiens
cagtgggtgctcacagctgcccattgcctaaagaagtacttccggaacctgtgctcagatgacacccccatggtgcggcgggccgcagcctccaag

SEQ ID NO: 209537 - DNA, 74 bp, Homo sapiens
cgcggagagcacgccatgaaggcctcgggcacgacccaacatgagtgaagtttcctgcaagaaacgggacgact

SEQ ID NO: 209538 - DNA, 97 bp, Homo sapiens
tttgaagtctgtgtcaaacatccatatcataagtggaattttggagatattcaaaggtgtcgtgaaaactacccctaaaagccaaaatgggaaagga

SEQ ID NO: 209539 - DNA, 90 bp, Homo sapiens
cctctgcgatcccgggtcatctccagatgctagggttatggcctcctttggaaaatctggcaactgtggaagagactgttgttcgtgaca

SEQ ID NO: 209540 - DNA, 83 bp, Homo sapiens
accttacgacgggttggggatggcgtgcagcgcaaccacgagacggccttccaagcatttgacattgtgcagcaaagaaatgg

SEQ ID NO: 209541 - DNA, 90 bp, Homo sapiens
tcacctcctgtgagcagtgggaaaaatggaccaacttctttggcaagtggacattttactggctcaaggcaaagcccaacaccttccccc

SEQ ID NO: 209542 - DNA, 87 bp, Homo sapiens
accgcgcgctctgcgacgtgggcaccgccatcagctgttcgcgcgtcttctcctccaggaccacggaggggtgatcgtgaacatcac

SEQ ID NO: 209543 - DNA, 83 bp, Homo sapiens
ccagctttcccccgagggtcaacgagaaagagatcgttatttctcaaactctgaggctgcggagttcacacattgaaatctgt

SEQ ID NO: 209544 - DNA, 87 bp, Homo sapiens
gatgacctgtcagagctgtgtggacgcggtgcgcaaatccctgcaaggggtggcagttgcttctgcaggaagcctttttggtggcat

SEQ ID NO: 209545 - DNA, 75 bp, Homo sapiens
gcctaggccatggcagcctcactgacatcagccagaaatgcactcggtgatggaaagagagccactattctgaag

SEQ ID NO: 209546 - DNA, 100 bp, Homo sapiens
ctaaaatatggcatcctaatattagttccgtcacaggggctatttgtttggatatcctgaaagatcaatggcgagtgttgtgtataaaggaagttgaaat

SEQ ID NO: 209547 - DNA, 75 bp, Homo sapiens
ctgcaggctgagatcgacaacatcaagaaccagataaggagggttcctgcccccaggtgaacattaactttcccc

SEQ ID NO: 209548 - DNA, 76 bp, Homo sapiens
gccttcccaaacctgaaggacttcatctcccgatttgagtctgaagttgcagccggagtgaagaagagcggaccgc

SEQ ID NO: 209549 - DNA, 90 bp, Homo sapiens
gtgactgggaagatggccgtctttccttgatcttagcaaagcaatgtctcaagatggtgcttctcagttccaagaagtcattcggcaaga

SEQ ID NO: 209550 - DNA, 88 bp, Homo sapiens
gcttcccaatcccactgatgaggatcagcccatggtacaccaggggttggaaaaaccacactaggcaaagaacttgcgtcaaaatcag

SEQ ID NO: 209551 - DNA, 100 bp, Homo sapiens
gtgagttgggcaggttcttggccaagcagaatggatagcttgtgtcaggtccaacttcttggtcttatgctacctccatgacgtcaagaacattctgcag

SEQ ID NO: 209552 - DNA, 82 bp, Homo sapiens
tgtttggcttcaacattgtcttctgggggccaaaccagtgctcctgccacctctctggctgccccctagagcctgcccatcc

SEQ ID NO: 209553 - DNA, 90 bp, Homo sapiens
ctgataagaaagtacggaccataataatcaggagtgaagtcccagggatattctgtgctgctaatgggaatgacagcaagaaatttaaac

SEQ ID NO: 209554 - DNA, 96 bp, Homo sapiens
cagcgctgtatcgtgtcgccggcagggaggcatagcgcctctctgatcttcctgcatggctcaggtgaccattgtgaggtagatattttgttctaa

SEQ ID NO: 209555 - DNA, 99 bp, Homo sapiens
gtggactctgaccgcaaacaaggagagcctactgagcagcctgagtgggatgtggaaccatcttcacctgctgcccttgccggcctgcgcccctacaca

SEQ ID NO: 209556 - DNA, 101 bp, Homo sapiens
gaagcagagacaccaggacagaaaagacagtgttctgctttcatggagttcacagaagagtcgaggagggcaacgggcatgaggaggtagttgcatgcgcc

SEQ ID NO: 209557 - DNA, 75 bp, Homo sapiens
cagagcccgaaaagaagattactctgcaacagctaaagattagcctgaggcctgctcagtcgttcctaatgaata

SEQ ID NO: 209558 - DNA, 75 bp, Homo sapiens
gctttggaaaagacctattatgagaggcttccatatcgatgtggaagatgtgaaatttgtcatcaattatgacta

SEQ ID NO: 209559 - DNA, 75 bp, Homo sapiens
gcaggctacagtccactccagcatggctcattggtgggcagtattacttatgggaattgctctgatcatgctaat

SEQ ID NO: 209560 - DNA, 51 bp, Homo sapiens
aagacagaaccctgggattttctactgtgccagcgagatttcagattcctg

SEQ ID NO: 209561 - DNA, 100 bp, Homo sapiens
tttgctgcaagataacatcgctgatgctgtagcttgtgcaaagagggttgtccgtgatccacaaggcattagagcatggcagcctgcttctgcaaagtgg

SEQ ID NO: 209562 - DNA, 83 bp, Homo sapiens
ccaggatgtctacaaaattggtggcattgcactgatgatgtggaatacgttcttagttaaaagattttctgctgctacatact

SEQ ID NO: 209563 - DNA, 51 bp, Homo sapiens
ttcaagaatgaagccacggaccctcgcgagagcgcctgctcgctgtgcccc

SEQ ID NO: 209564 - DNA, 100 bp, Homo sapiens
caaagatttatttctcttgacaaccaagggcctccgtctggatttccaaggaagaatttcctctgaagcaccggtgagcacctgcggatctgtccccagg

SEQ ID NO: 209565 - DNA, 100 bp, Homo sapiens
ctttccttacctgtttttccagctcacccactgccagcagaggctcctggaaccatgggcctcaggccctgaggatacggggctcccggtggccatgacg

SEQ ID NO: 209566 - DNA, 75 bp, Homo sapiens
ccctaacgccctttccaccagtgcggactgcaggacagagcgggatgccaccagcttgtccaaagggaagttcca

SEQ ID NO: 209567 - DNA, 82 bp, Homo sapiens
gtcgaggaggcgcaggagactgaccgcaacggcaggaataactctgtgtcaccctcggaaagcctccgggccagtgagaagc

SEQ ID NO: 209568 - DNA, 100 bp, Homo sapiens
cctggctgcgtgcacagcgccttgttccagcagggcctgatccaggtgggcaccatgtccttgaagcttcaggcaagcaatgtaaccaacaagaatgacc

SEQ ID NO: 209569 - DNA, 75 bp, Homo sapiens
cgaagagaagaaaagtaggccagagccggaacactgcctcatggggatcaaaggaactgtgaagcgtagcacaga

SEQ ID NO: 209570 - DNA, 90 bp, Homo sapiens
atgctgccatctcctatgaagaatggaatgaccctcctgctgtggaatgttttaaaggaagttgggctactcacaagttactacataaga

SEQ ID NO: 209571 - DNA, 100 bp, Homo sapiens
ggaggagcagaatttactacagcatgtgatttcagtactatactggcaattgctggagaagattttgcaattgttgcttctgatactcgattgagtgaag

SEQ ID NO: 209572 - DNA, 101 bp, Homo sapiens
gaactgataaaacccaccagtctaggcctgaagaagtcagtgatttatagttcactaaaactgcacaaaatgtggaaagggtggctgaggaaaacatcctg

SEQ ID NO: 209573 - DNA, 83 bp, Homo sapiens
tggtcactgagaactggctggttctggagcccaggggcttgtgagaaatggaaaaggtgttctaaaattcatgtggaactgca

SEQ ID NO: 209574 - DNA, 75 bp, Homo sapiens
tggaatcaataagccatggcatctaagaaatttgctgttaaagcaacagcattattgagaaaagcccttacagaa

SEQ ID NO: 209575 - DNA, 100 bp, Homo sapiens
ttccaagagaagagcacagaagagggagaagtggctgctctgcgcctcacggccagatcccagctcctggtccatacgcagacatagcagcacttgcggc

SEQ ID NO: 209576 - DNA, 97 bp, Homo sapiens
cggcgtaactatcgcctgacaggtgttgctaacaaccacaagcagaatttgatgacggtggcaaaccttggtgtggtgtttggacccactctgctga

SEQ ID NO: 209577 - DNA, 75 bp, Homo sapiens
gggaggatcgcaagctggatgagcttctaggcaaggaccacacgcaggtgagtgatcagcagctggactgtgcct

SEQ ID NO: 209578 - DNA, 83 bp, Homo sapiens
gattcatttagagctgcggaacaggacgccctctgatcagaagatggctgtgccacccacgtatgccgatcttggcaaatctg

SEQ ID NO: 209579 - DNA, 89 bp, Homo sapiens
gccagcgcagcgacggggcgctgcctggcccaggcgcacacggaagtgaatcagtcggatttgtcagatgaagagctaaatgatgatct

SEQ ID NO: 209580 - DNA, 100 bp, Homo sapiens
ggcgcccagcccacctcatggccctcctgcagcacgtggccctgcagtttgagccaggacccctggagtctcaggagcaggggctgcggcagaggctgct

SEQ ID NO: 209581 - DNA, 75 bp, Homo sapiens
tttaaccagcatggctacttcatattttggaaagcagtttttaagacaagcacacattctggcagttccgccatg

SEQ ID NO: 209582 - DNA, 90 bp, Homo sapiens
gttcagcagatagatcgtgtggtagaagttgtggaggagacaattaaagctatggggtgctactttgggagttgctgactggtgaggtgc

SEQ ID NO: 209583 - DNA, 73 bp, Homo sapiens
tggccttggcagtttcggtgcatagaaaatcaggcagcctgcttctgcaaagtggtacgatcgaagggactat

SEQ ID NO: 209584 - DNA, 50 bp, Homo sapiens
attgcaggacaagagatttaagatcaacctctccacttctcctacacctg

SEQ ID NO: 209585 - DNA, 100 bp, Homo sapiens
agaccaccgaagactgcatcgccaagatcatgcttgagatcttcttagcccagagagcagtggagttgagtgaggaggcagatgtcctgtctgtgagcca

SEQ ID NO: 209586 - DNA, 82 bp, Homo sapiens
cgcccatctccgcctcgcttccagcccagtttggtgccctggttgtcagatgttggaaagcagtaggacggaacatactctt

SEQ ID NO: 209587 - DNA, 83 bp, Homo sapiens
ccgtgttccgtgtctctggattcaagtcccaggagtcctgaccagagagcagcaatggattaaactgcttctttaaatttctt

SEQ ID NO: 209588 - DNA, 90 bp, Homo sapiens
gtggctttcgcggccccgaggcagcgaggcaagggggagatcactcccgctgcgattcagaagagatcatgatgcagccgtccttttgga

SEQ ID NO: 209589 - DNA, 82 bp, Homo sapiens
ggagctccggcgcatcatggcggctggccgggcccaggtcccttcctcccgccatcatgaccgggtcctataacaacttctt

SEQ ID NO: 209590 - DNA, 100 bp, Homo sapiens
aaaagacagtgttctgctttcatggagttcacagaagagtcgaggaggttatttggaaatagcggtgcttgcagcgcttgcggacagtcgattcctgcga

SEQ ID NO: 209591 - DNA, 102 bp, Homo sapiens
agaaggcgctgctggagttccgcgacaccatcttcgacaacatcctcaaggggagagaatgtagaagatgccttccttgaggctgccaagaaaatctatcag

SEQ ID NO: 209592 - DNA, 100 bp, Homo sapiens
ccatctctgctgctctctcatttgctggccatcggattggggaccaaactcttacccaggatctactggagcagctgttggagcccatgacgcctgtcgg

SEQ ID NO: 209593 - DNA, 100 bp, Homo sapiens
aaggactcttctaaaaggatatgtgttgctaatacccatctttactggcatcctaaaggccacttggatgttgtagcattgctcattaaccatggcgcag

SEQ ID NO: 209594 - DNA, 100 bp, Homo sapiens
taaacgaggggctggaacacctcgccaaagcagagaaatagcgttggagaccagggccagccctggccacaccccaggctgtgtcaccttcgtcctgaat

SEQ ID NO: 209595 - DNA, 90 bp, Homo sapiens
ccgaggggccggagctcctggcggtgccggatcctgacggcggccttcccccgggatgctttcattggatttggaggaaatgtgatcagg

SEQ ID NO: 209596 - DNA, 97 bp, Homo sapiens
tggaaacttgctaaagagctgtgctgaagaaacacttaaattctggaaatagcgactcagtatcatggccagcagccttaatgaagatccagaagga

SEQ ID NO: 209597 - DNA, 87 bp, Homo sapiens
atacttgttttctctggggtatgattctaatatgggtgaaatcaaaattgctgtttctattgaagatgaagccaacaaggacctgcc

SEQ ID NO: 209598 - DNA, 100 bp, Homo sapiens
tctttctgacagctggaggcgccggcggccttcacctctggaagtagagacattcaactccttgaaaatgaacaatccggccaggcgcggtggctcacgc

SEQ ID NO: 209599 - DNA, 82 bp, Homo sapiens
taggtcgatggtcggcggcgcccggatgggcagctgagtcaggatggctaaaggtgaccccaagaaaccaaagggcaagatg

SEQ ID NO: 209600 - DNA, 97 bp, Homo sapiens
gtggattttgtcgctggacgtctagagatgtgggcatggcagacaaatctgtaggtgatttgatgaaggctgctgcaggagagttcgcagatgatcc

SEQ ID NO: 209601 - DNA, 50 bp, Homo sapiens
ctagggtcgccggggaagcggcttggtgatccagctatttttcctgccgt

SEQ ID NO: 209602 - DNA, 75 bp, Homo sapiens
gggcagagcgcggcggcgcgggttctggctccttggcagcaatggctgtatttgaagataagtttaggccagaca

SEQ ID NO: 209603 - DNA, 75 bp, Homo sapiens
cggagaaggatgacaccggagtttgacgaagaggtggtttttgaggccaccgaatcccttttggagtcatctttg

SEQ ID NO: 209604 - DNA, 83 bp, Homo sapiens
caaagttaagagactcatcagattctgagctgcggcgggatattttgcagaaggaatgtttacccttgcggaagttgcatcac

SEQ ID NO: 209605 - DNA, 50 bp, Homo sapiens
cgattgcatcagcaatgtggcgcacgtgtgaccttggagatacatcatca

SEQ ID NO: 209606 - DNA, 98 bp, Homo sapiens
cctgaagactggtgagggtggcctgctgcaggtgaccctggaagggatcaacctcaaattcatgcacaatcaggtgaccatagccgatgactactcag

SEQ ID NO: 209607 - DNA, 82 bp, Homo sapiens
ctcaactttctgggcgttcatgatcctggccagcctgctcatcgcctactgcacggaaggagagttttacatggaagtggct

SEQ ID NO: 209608 - DNA, 74 bp, Homo sapiens
ggaagagttgtggaaccaaagagagctgtctccagagaagttgcagactggacaggagccacataccaagataa

SEQ ID NO: 209609 - DNA, 100 bp, Homo sapiens
gggccgggaacccgccggggagaggcacccgagacccacggagaccgcgttctgaagaaagtctccaaatacattcaagagcagaatgagaagatctatg

SEQ ID NO: 209610 - DNA, 90 bp, Homo sapiens
ggcggctggccgggcccaggtcccttcctccagaatgccacgggtgacctggccaccagcaggaatgcagcggattcctctgtcccaagt

SEQ ID NO: 209611 - DNA, 74 bp, Homo sapiens
ccccgggcaacgatcggaactcggacacggcgtcctgcctctgcggctctgccccctgcatcctgtgcagctgc

SEQ ID NO: 209612 - DNA, 100 bp, Homo sapiens
gcggcagcgagttgaactttaggagagctgtgttctctgcagattctaagtgctatacttggtagatcagaaactcaggagtgtcttttctttaatgcta

SEQ ID NO: 209613 - DNA, 100 bp, Homo sapiens
ctgatgtcagtgttatatcctccaggaatactggccagctggacacagagtatagaaaaaaatgggatgccctggtaatcaagctggaggtgattgagag

SEQ ID NO: 209614 - DNA, 80 bp, Homo sapiens
cttggttccccctccctcagcttccgccccaaaaggttgacaatggtctccaggatggtctctaccatgctatctggcct

SEQ ID NO: 209615 - DNA, 120 bp, Homo sapiens
ccgccgccagggtctgcagggcctgggccgccgctgctacctgcagcgccgtgtggcacgacacaaaaatcaggtggggaagctgaggcaggaagccctttagtcacttgccgaaggcca

SEQ ID NO: 209616 - DNA, 90 bp, Homo sapiens
ttcccgacgtcctcaagaaagtcctgtgccggcagctgtggccaacagcaacagagagagtccagtacgtttcaggagacggcagcgagg

SEQ ID NO: 209617 - DNA, 73 bp, Homo sapiens
aactattcaacatggaggcggaggtcgataagctggaactgatgcctttggctatgggctgctttgtctagga

SEQ ID NO: 209618 - DNA, 90 bp, Homo sapiens
ctttgaccctaatattgatgaagatcgcttgcaagaaattgcaggtgtcgtttcagtcagatgttgcatccaatttttgaggaagcttcc

SEQ ID NO: 209619 - DNA, 50 bp, Homo sapiens
gtcaccaggacccaaggaaccaggtggagatctctttgatgcaattactt

SEQ ID NO: 209620 - DNA, 74 bp, Homo sapiens
ctgtgtctcgtcttgtatctctaattggaagcaacgtcaacagtaatgaaggcaagcagaaaaagcgaggaggt

SEQ ID NO: 209621 - DNA, 75 bp, Homo sapiens
acccaccaatggaagcagctggcttcactgctcagattcgaactcgagccatctctgctaaaggcatgactttag

SEQ ID NO: 209622 - DNA, 74 bp, Homo sapiens
aagaattcccaagccagagctttccaggtcatttaggaaatcgtaaatcatgtgaagatgggactcttggtatt

SEQ ID NO: 209623 - DNA, 101 bp, Homo sapiens
cgaggccaggagccaggggcccagaaggaaagaccacagcaagattctttcattcgtctcctcctagcctgggggaccaggctcgaactgaccctggacat

SEQ ID NO: 209624 - DNA, 75 bp, Homo sapiens
gagcgttgcgagcgcgaatggcacgagctggagggagaatttcaagaactgcagacaaatttacatgtattggag

SEQ ID NO: 209625 - DNA, 100 bp, Homo sapiens
ttttactgaaagtgaaagattcccagactccaactcccaggaagatgagaatgtgcctactgctcctgatcctccaagtcaacatttacgtgggcatggg

SEQ ID NO: 209626 - DNA, 75 bp, Homo sapiens
taaacaagagatgcagtctgctggatcacagagaggtcattgaatctttgggaattattatttataaagcactgg

SEQ ID NO: 209627 - DNA, 97 bp, Homo sapiens
ctaaaggaggttttaaacagtataacagggagctcaggagggggaattgcactgaagatttgtcccatcgtgaagcaagagcactggaacttacact

SEQ ID NO: 209628 - DNA, 100 bp, Homo sapiens
gtttccatgatgaaatcaaaggcagcataactttaaatcttccccaagatgtatggtgactattatatggttaaaaagattttggaggaaaacagttcag

SEQ ID NO: 209629 - DNA, 100 bp, Homo sapiens
tgttgaactaccccaatatgagaagaattttagagacaacaatgtcaaaggaacgacacttcccaggcatcagcttctggtgatgtgagctgtgtggatg

SEQ ID NO: 209630 - DNA, 90 bp, Homo sapiens
ccctgctgccgctgctggcggccctgcttcagggacgtccagatcggtgacatcgtcacagtgggcgagtgccggcctctgagcaagaca

SEQ ID NO: 209631 - DNA, 90 bp, Homo sapiens
ctcggattccttatgcagagtggccgacttgcaagacactaagggcgactaccagaaagcgctgctgtacctgtgtggtggagatgactg

SEQ ID NO: 209632 - DNA, 100 bp, Homo sapiens
atttgctgttggatcgtttcatactttacgcttgtgtgataaaactggggcagactgccagattcacttacagccccagctaattccaccaaacatggag

SEQ ID NO: 209633 - DNA, 100 bp, Homo sapiens
ttttcctggagggaccaagctgtgctgcggcaggacgggtccaagtgtgcctgccatcaactaactatccaggctacagcctgtaccccaggaggccaaa

SEQ ID NO: 209634 - DNA, 107 bp, Homo sapiens
gcgttcccctccatccttctggatctggccaacaccaccggcacagtgacggcttcagaggggctgttgataatcaggtgtatgtggccacagcctctcctgcccgg

SEQ ID NO: 209635 - DNA, 100 bp, Homo sapiens
ctggtttgtggcagcctgctcgtcacttgcctcccgggagtcgctgtggcaaaaggtatgaaaatgaaagtcttcagaatggaaggaagtcaactgaatt

SEQ ID NO: 209636 - DNA, 100 bp, Homo sapiens
aatgtgggatcgatgtttcaatattggaagcgctttgatttacagcagctgcaggtgaaatgacaatggatgctctgttggctcgattgaaacttctgaa

SEQ ID NO: 209637 - DNA, 100 bp, Homo sapiens
ccagaatcgaatccaatgtgccatcaagtcactaagtcgttagagcctggcaatgccgtttgggtgtgtgactctgggcgacaagaagaactataaccag

SEQ ID NO: 209638 - DNA, 100 bp, Homo sapiens
tgtttgaaataataacaagctccaggaccttctacgtacaggactcaactaaagaagtttcttggaaaatcagtaaagagagcaaagcaccttgctgagg

SEQ ID NO: 209639 - DNA, 87 bp, Homo sapiens
ataagtagctttagcgatcgggagacagccgggcgctgcaaggacatagctcgccttttgcaagaaaaggagttacaggaagagaaa

SEQ ID NO: 209640 - DNA, 80 bp, Homo sapiens
cctgctgttgtgaagaatgtggccagtaaaaatattgagcaattctgtggtgttcttggtcacacatttatggagtttct

SEQ ID NO: 209641 - DNA, 100 bp, Homo sapiens
gacatgagtgatgtggaggaaaacaacttcgagggcagaaaatggtggagtcaatgaagaaagtagcagggatggatgtggagctgacagttgaagaaag

SEQ ID NO: 209642 - DNA, 100 bp, Homo sapiens
cctttatgatgaatgcaataattctccattgagaagagagaagaacattctcgaatacctagaatgggggcacacgtgtttcacgttgacaggtttgctt

SEQ ID NO: 209643 - DNA, 80 bp, Homo sapiens
cgtcccgagccctccacccgtcgtgccggcgccgcccggaccgccagatgatatcatcaagttgaatcgaaaggaaggga

SEQ ID NO: 209644 - DNA, 90 bp, Homo sapiens
tgtgcaaaattaaaacgactcctgaagggtggtggctaatgccgtagcggcattatctgaaatcagtgagtctcacccaaacagcaactt

SEQ ID NO: 209645 - DNA, 100 bp, Homo sapiens
ttgagaacaatatagatttgcagtattgaagctgcttctggtggtaaagctgaagttatcacttgtgatgtactcttggtttgcattggccgacgaccct

SEQ ID NO: 209646 - DNA, 74 bp, Homo sapiens
cgcgaatatcgtcatcgttagaaggatctggaactcctaagccatctactcctacaccaaccccttcatcgacc

SEQ ID NO: 209647 - DNA, 82 bp, Homo sapiens
tggataatgaagtgaaggcctttatgagaggacagaggctatatgaaaagaacagcttgagaactatgacttcaccaaattc

SEQ ID NO: 209648 - DNA, 100 bp, Homo sapiens
accctgacactgcgatgttctgcaggacaattgcaccgctttagagcttccaggaggccaagcattatggcagtgagcatgtttttgaacacattaacac

SEQ ID NO: 209649 - DNA, 100 bp, Homo sapiens
ctattctgaactcaacttctgaaatttacagaaacaaactacatctcaggagactaaggtgtcagtatgttcttcaagctgctctgctcctgggcccaag

SEQ ID NO: 209650 - DNA, 100 bp, Homo sapiens
ggcagcggcgcgggaggccgtgcgggaggaacatatgcagcagaaaaaagaggaggaagaagttcttaaagaagtaactgcacatttccaaattacttta

SEQ ID NO: 209651 - DNA, 98 bp, Homo sapiens
cgggcccaggccccggcagcgcctgggacaaggctcatcagattcaagagatgtttccccaggttccataccatctggtactgcaggacctccagctg

SEQ ID NO: 209652 - DNA, 101 bp, Homo sapiens
ccgggtggcttacagacgctgccagcatcgccgccgccaggccggaaggtggtggtcgtacgctgtgaaggcatcaacatttctggcaatttctacagaaa

SEQ ID NO: 209653 - DNA, 50 bp, Homo sapiens
ctgcgattctcaagatctctggacctggaaaaggcgacggcggattgaca

SEQ ID NO: 209654 - DNA, 100 bp, Homo sapiens
cggcgccatgggccagtgcggcatcacctcctccaagaccgtgctggtctttctcaacctcatcttctggctccttcgagaactcatagaacggaagacc

SEQ ID NO: 209655 - DNA, 87 bp, Homo sapiens
catgcggccactcatattaccaaccgcagagaggtcctgtatcacctctttgaggagtttgccaactacgaacacgtgggcatcgtg

SEQ ID NO: 209656 - DNA, 75 bp, Homo sapiens
tctacactgggatgcatacggtcctgagaaccatggagtctggcagtaccgccgccagtgaggaggcacgcagcc

SEQ ID NO: 209657 - DNA, 75 bp, Homo sapiens
gctgagaacgaggtgtccacccccatgcagccctggtacctgacagtgtaaagaaggagctcctacaaagaataa

SEQ ID NO: 209658 - DNA, 75 bp, Homo sapiens
actggagagagttggttatacattctaggaatctcaaaggaaagaccacagcaagattctttcattcgtctcctc

SEQ ID NO: 209659 - DNA, 100 bp, Homo sapiens
cgcatctaccagggctccagcggaagctacttcgtcaaggaccctcagggggtggccgtttgttgcatctgtttttttgttattcttcctctaaatcttg

SEQ ID NO: 209660 - DNA, 102 bp, Homo sapiens
ataaggaagaatgtctcatgttcgagtctggggctgtcgctgtgctctatctttaatctcatgaagtacgacagctacagccgcttcttaaagtctgacttg

SEQ ID NO: 209661 - DNA, 100 bp, Homo sapiens
gttcagtttacagttcattttttgcttggtttggaaaaatttcattagagagaatggactctctctgattttgtttggtttgactcaagaagagttttta

SEQ ID NO: 209662 - DNA, 82 bp, Homo sapiens
cgccggaccaagcgggcccagaagcggatgaagactggcccatttgcagagcactccaaccagctgtggaacatcagcgccg

SEQ ID NO: 209663 - DNA, 74 bp, Homo sapiens
gagaacaccatcaccatgacaaccagtcaccagcctcaggacaggctggtccacctggcagtgattcatgaggc

SEQ ID NO: 209664 - DNA, 97 bp, Homo sapiens
gttctcaagttaggggagagtttcgagaagcagccgcgctgcgccttccacactgtgcgctatgccttcaattaagttgcagagttctgatggagag

SEQ ID NO: 209665 - DNA, 75 bp, Homo sapiens
ttatctcgaaactctcgggatgccatagctgctcttggattgctccaaaagggtggagagattcaaccagttagc

SEQ ID NO: 209666 - DNA, 75 bp, Homo sapiens
ttagaaaggagctgcttcccaataaggaaacacctggtgtgtccgtttctctggtgaatccccagccatccaatg

SEQ ID NO: 209667 - DNA, 50 bp, Homo sapiens
ctgctttgttgggagtgatggatggacagatagaaaagatgaggatgttt

SEQ ID NO: 209668 - DNA, 95 bp, Homo sapiens
gaacgcccttcggccggatcgaaggcaaacaaagaatttggggatagcctgagtttggagaccagaagctgcacctggccgagaacgccgagcct

SEQ ID NO: 209669 - DNA, 74 bp, Homo sapiens
aaaagttcacgttgattgatggcatccgcgtggcaacaggctcctacagccatggtctgaaaaagttcttttct

SEQ ID NO: 209670 - DNA, 97 bp, Homo sapiens
gccgctgagggctagctacacacacgccctcacgcccggcgagcccgcgagcaattctgtggtgttcttggtcacacatttatggagtttctgaagg

SEQ ID NO: 209671 - DNA, 83 bp, Homo sapiens
cctcagagtaaagctgctggacaacaccatggaaatatttgacattgaggaatgtatcctgtcaggtataatgtcagtgaatg

SEQ ID NO: 209672 - DNA, 98 bp, Homo sapiens
tcccttggaggctgtagtggggacctgctgtgtgttggacctttatacgtattgtaaaggtcctggagtacaatgccattggaggcaagtataaccgg

SEQ ID NO: 209673 - DNA, 50 bp, Homo sapiens
gcgcagagcaaacatctttcaaagagttctaaagttcctgttgcttcaga

SEQ ID NO: 209674 - DNA, 100 bp, Homo sapiens
cacagatgtgcttggaaagctcactaatcttcaagatgagttacaggagtcgatagcagcagttggtgacgagatggcactcagaaacggcgttgacgta

SEQ ID NO: 209675 - DNA, 98 bp, Homo sapiens
gcggagctgaaccgcggcccccggtggtgggctcagccggtcgagctgcgcgggagatggcaagattattttatcataaaccccagtttgccattttg

SEQ ID NO: 209676 - DNA, 139 bp, Homo sapiens
tgagagagagctattagagattgtgaagaagaatttcgatctccgccctggggtcattgtcagggcaactccaacaacattgccaccgtggacatctccgcaggcttcgtgggcttagacacctacgtggaaatcccag

SEQ ID NO: 209677 - DNA, 98 bp, Homo sapiens
accagctctcccgaagccgcgggtctccggccggcggcggcggcggcggcggcggcggcgcagtttgcagaagctgcctgtgatgtggtccatgtgat

SEQ ID NO: 209678 - DNA, 50 bp, Homo sapiens
aaaatgttcaactctatatgatacacgagcaagaagccattaactctgac

SEQ ID NO: 209679 - DNA, 75 bp, Homo sapiens
ctcaggaggcgtcacggtggggaacataggacgacagttagctatgatacgaaaaccggtgaggtccaaacattg

SEQ ID NO: 209680 - DNA, 146 bp, Homo sapiens
tccaaatgcgcacgaggaggacactgcgggggcacctggccaagatctacgccatgcactggggcacagactccagccgggccagcacatggctcccagcccccatctgaccgtgtacaccgggacctgcatgcccccgtctcctt

SEQ ID NO: 209681 - DNA, 100 bp, Homo sapiens
tcgatgtcaagtatccacacacctggcctgaatggatccctctgcctttcagagggtcctggcggcagagaccacgtcccagcaggagcggctgcaggcc

SEQ ID NO: 209682 - DNA, 97 bp, Homo sapiens
ctgcaggcgggggtgctgcagaggacacgaggcggcgggctggagacatggaccgcggcgagcaaggccctcgggaccaaggatcacgtcatgactc

SEQ ID NO: 209683 - DNA, 100 bp, Homo sapiens
caccgtcaggcataaattgattattcctcgcccacatctgtgccaggcttctccagggaaagtgaccgaggcagtgaaagaggccattgacgcagggtac

SEQ ID NO: 209684 - DNA, 75 bp, Homo sapiens
ccaccccaatgtggtgaagctggtggaggccataaaattttgagtagaaaaatccagaaatttgaaaatcagtat

SEQ ID NO: 209685 - DNA, 108 bp, Homo sapiens
gagaaattctcatgatagcttccaagggacaaggtgtcaacaatgtgccggtacgttcttcagatgtgtcatggtctgatactcgtaggaccctccgaaaagatcacc

SEQ ID NO: 209686 - DNA, 50 bp, Homo sapiens
ggacactgaagatcacagactgtaatttcatctgtgccaaagcctccaga

SEQ ID NO: 209687 - DNA, 85 bp, Homo sapiens
aggctttcctgctggtggcaaccgcctacgagacactcaagcattaacacccttgtgaagatcagcaaaagtgcaggagccatgt

SEQ ID NO: 209688 - DNA, 100 bp, Homo sapiens
caccgacatggaacagggactcactggggttctccaaatgacaagaagtctttttgctcaattgaaggggaatggaatggtgtgatgtatgcaaaatatg

SEQ ID NO: 209689 - DNA, 100 bp, Homo sapiens
tcagcagaagattcagaagtttcagatagcccaggtggttagagagtccaatgcaatgctcaggttgcctaagtactcttgccagttcattgagatgtgt

SEQ ID NO: 209690 - DNA, 99 bp, Homo sapiens
gacaagaagattatgacagattacgccccctatcctatccgcaaacaatgtcatctgggtgattctcagtgtggaggtgggtggacttttaggagtaac

SEQ ID NO: 209691 - DNA, 100 bp, Homo sapiens
aaagaacccattttctactcaggtttgtggtaaatatgccagctctagaacacatgaatcagattttacacatcttgtttgtatttttaccctttctgtg

SEQ ID NO: 209692 - DNA, 82 bp, Homo sapiens
atattgaatacgctgcagaacatttctgaaggattggtcgtgtaccccaaaggggcagctggcattttatgctatgtgggag

SEQ ID NO: 209693 - DNA, 75 bp, Homo sapiens
tcgactggggcatcttcccggaatcagattcaaagatgtttccttccaatgggcttttggtgtaggatgtcggag

SEQ ID NO: 209694 - DNA, 75 bp, Homo sapiens
cgaggaggcagccaagctcgtagcctgccactccgtgcatatttagcttcctgtggtatactgatgagcagaact

SEQ ID NO: 209695 - DNA, 101 bp, Homo sapiens
attgatttcattcttatttcaatgcagcctccagggtcgtatagacctccccctcctatgggcaaaccaccaggttcaattgtaagaccctctgctccacc

SEQ ID NO: 209696 - DNA, 115 bp, Homo sapiens
caggagacttatttcagaatggagaatttgcaactcatcatagtcctgatctaatgaggcgtcaagaagaactcagacgcttggaagaactcagaaaccaagagttgcaaaaacg

SEQ ID NO: 209697 - DNA, 75 bp, Homo sapiens
taaagatatcagcctgtctgactacaaagattagcctgaggcctgctcagtcgttcctaatgaataaaaatcaag

SEQ ID NO: 209698 - DNA, 75 bp, Homo sapiens
gtcattgaagaataaactcaaggatcttggtcatccagattttggtgaatttatgagggaaaacagattaactcc

SEQ ID NO: 209699 - DNA, 100 bp, Homo sapiens
cgccccccaggaggggcgagagggagccgcagctgatgtcaggtctgagaaagaaccccagtttaagtttatctacttcaaccacatgaatctcgccgag

SEQ ID NO: 209700 - DNA, 50 bp, Homo sapiens
gtcactcataagcgcgctcaagagtatcttcaaagaacagtaaaacatcc

SEQ ID NO: 209701 - DNA, 142 bp, Homo sapiens
gggctgctgctggccatccacctgtgcctcttcaccatgttcggaatgctgctgttcgctggtgggaaggatgaggaagtacagacaattggtcagatagaactgtgcctcactaagcaagaccagcagctgcaaaactgca

SEQ ID NO: 209702 - DNA, 100 bp, Homo sapiens
gaggcgccggcctgctgcagtcaggttgacgagattagagagatggttgacaatgatttaggttttcaacaggctccactaatgtgctattccagaacta

SEQ ID NO: 209703 - DNA, 75 bp, Homo sapiens
ggaacatggcgttgctggtgcgagtccttggaaaagaagatctcccggagcagtgccctgaaagtgctggaccat

SEQ ID NO: 209704 - DNA, 100 bp, Homo sapiens
ccccatcccggggcccaccattaccagcagggagagggaggcaggagaagatggggagccccgaggatgacctgattgggattccattcccggaccacag

SEQ ID NO: 209705 - DNA, 50 bp, Homo sapiens
ccatgatctccttaacggacacgcagaaggatgaggaagatgaggaaatg

SEQ ID NO: 209706 - DNA, 100 bp, Homo sapiens
aactagtagagagtcaaaatgaattacagaatcaattggataaatgtcgtaatgaaatgatgaccatgactgaggtgatgctgaacaggagcttggcccc

SEQ ID NO: 209707 - DNA, 103 bp, Homo sapiens
acgggctcccgctggccgcctcgatgcaggaggacgaacagttggctatcagctcttgaaagcacaaaatggctccatcacttgtctgtgcttctgaaatcag

SEQ ID NO: 209708 - DNA, 100 bp, Homo sapiens
cggaaacagagcacccaagatgaagatgctgttagcctttgcagtctcgacataagtgtatctcattcagttgctaaacttatattagttaatttccact

SEQ ID NO: 209709 - DNA, 100 bp, Homo sapiens
tttgtcatgtcttacctctttgctcagcttttgcctaccaaaaagttttgggaacctgatgattcaacaaaagatggacaaaaaggcatatttcttgggg

SEQ ID NO: 209710 - DNA, 100 bp, Homo sapiens
ataggggaggagagccacgcaggatctcacagctgcagtctaatagtaacacagagattagaagcccaggacccaggaaggagacacaggaaatttattc

SEQ ID NO: 209711 - DNA, 75 bp, Homo sapiens
tgcagcgccagcagctggactatggcatctatgttatcaaccaggtgcaggtggtaccattataacgaattttga

SEQ ID NO: 209712 - DNA, 100 bp, Homo sapiens
aggcgctgcagcgcttcttcgaagaaaaagcttgagtctccacccccatctaccaatcccttcctggaagatgagccaacaccagagatggaggaactgg

SEQ ID NO: 209713 - DNA, 98 bp, Homo sapiens
cggtcctggagctgctgcagcggccggggaacgcgcgctgcgcggactgcggcgccccgggtgtcatggagaaactccagctgggcccagagattctg

SEQ ID NO: 209714 - DNA, 74 bp, Homo sapiens
atcagactgaccgtgtcttacatcagttcagagaggtgtttgaggaactgtggaagagggaaggcaagactcca

SEQ ID NO: 209715 - DNA, 75 bp, Homo sapiens
cggctcccgcaccatggaggaggacgacagctacgagaggtggagaagagcgagtacttgagaaagaagaggaag

SEQ ID NO: 209716 - DNA, 75 bp, Homo sapiens
caccttttgtcaattccagaatacaaactatcccaagctccagtgtcctcccttcggctcccagagatgtggtcc

SEQ ID NO: 209717 - DNA, 75 bp, Homo sapiens
agtgaattcggattgtttgctgtgatccgtatgtgaaactttcattgtacgtagcggatgagaatagagaacttg

SEQ ID NO: 209718 - DNA, 96 bp, Homo sapiens
gcgaccgtgctgtccagggcgctcaagctgccggaactctctttgctcacaagttaccaaaaaaaaaagagccaacatgttggtattgctggctgg

SEQ ID NO: 209719 - DNA, 75 bp, Homo sapiens
ctggaactcaagatgccagcatcccagttgagaaacttccccggtaacacaagtggcaagacagccgggaacccc

SEQ ID NO: 209720 - DNA, 82 bp, Homo sapiens
tcggtgctggagaacttcgtgggccgatgccatggacaatattaccaggcagaaccaattctacgatacccaagtcatcaaa

SEQ ID NO: 209721 - DNA, 75 bp, Homo sapiens
gtgcatgcgtcgtcggcctctgggcagcagccacccatgtggagcatccgttatgtcccccgaagccaggttttg

SEQ ID NO: 209722 - DNA, 82 bp, Homo sapiens
gggcgaggcctttgccgctgacatcccccgcatcctggtggccgggattttttatcaagcagaaatgcatcgaacaacgaga

SEQ ID NO: 209723 - DNA, 83 bp, Homo sapiens
cacgccagcaccagcgctatggcggattataagcgccatggctatggctagtgttaaattgcttgccggtgttttaagaaagc

SEQ ID NO: 209724 - DNA, 50 bp, Homo sapiens
aaataattaaatattcttaccgaggtctccaagctggctggtgtcttggt

SEQ ID NO: 209725 - DNA, 111 bp, Homo sapiens
gctgatggagagctgaacattactcttccagaagaggaagatattgcatggtctgctcttgtgaagttgtttgatcccgtgaaatctcccagatgttatgctgttattgcc

SEQ ID NO: 209726 - DNA, 50 bp, Homo sapiens
ggatagctccctcctggaaaagtgatccgtatgtgaaactttcattgtac

SEQ ID NO: 209727 - DNA, 96 bp, Homo sapiens
ctcagacctgctacaccagcgtgaaggaaaacacagatcctggtgccgaacatgaggacagggcaggccgaaggagaaagtggaaggaggggagct

SEQ ID NO: 209728 - DNA, 82 bp, Homo sapiens
gcccttgccagaatttcctgcgctgttccacctcattcaacttcagccgagcctcttgaagccattcttacagatgatgaac

SEQ ID NO: 209729 - DNA, 80 bp, Homo sapiens
ccgcagccattgctggctatgtgtttagagataaggtgggcaagttcctgagcgctgaggagtatcagcagaagatcatc

SEQ ID NO: 209730 - DNA, 83 bp, Homo sapiens
cccaggtgggcaagttgccgtgcctggagatctcacagaccacagcaccgggaagtccagtcagcggcagatggtgttcgggg

SEQ ID NO: 209731 - DNA, 100 bp, Homo sapiens
tggattgaagccgcctctgtattacttaccagggacgcggagcttgcagtggtgagagagcagcgcaaccgtctgtgtgaccttctgggcgtacccaggc

SEQ ID NO: 209732 - DNA, 82 bp, Homo sapiens
cgcgtgtctaggtgagtcgcggtgggtcctcgcttgcagttcagcgaccacgcttaaagcttttcaagccaggccaagaagc

SEQ ID NO: 209733 - DNA, 100 bp, Homo sapiens
ggactatgtggagaacctgaacaagtcccagctgaagctgggcatctggggcggcttctggctgtgatgggtcggagattcctgatgaagtgaagctgat

SEQ ID NO: 209734 - DNA, 76 bp, Homo sapiens
tacgccccctatcctatccgcaaacagacaggaagatgtcacccaagcgcatagctaaaagaaggtcccccccagc

SEQ ID NO: 209735 - DNA, 98 bp, Homo sapiens
cggcggcgcgcagcgtgtcaggcggagagacccgccgccagattctctaaccatggcacaggtagagaaacgtggaggtttgctccggaaatcttcag

SEQ ID NO: 209736 - DNA, 96 bp, Homo sapiens
ggtcttctaagtcagagacatcaaaacctggaccttctggattacaggccaaattagcaagatgtggagagcatcttgtgcgcaccatactggcta

SEQ ID NO: 209737 - DNA, 75 bp, Homo sapiens
cccaaggaggggacccagggatccgagaaaggaagacttggggaagacctccgtgtggatggccgtggctgtgag

SEQ ID NO: 209738 - DNA, 113 bp, Homo sapiens
gggaaaccttcggtggtgtacagatttttcacaagacttggacagccctccagaatacccatcatatagcccctgaggtggcatggtgatgtctccatgagggaaccccttcc

SEQ ID NO: 209739 - DNA, 75 bp, Homo sapiens
gataaatggctctctcttgatttggagcagatggactctgtgactacatgactaataaaatatggcagaaatgac

SEQ ID NO: 209740 - DNA, 78 bp, Homo sapiens
ccaagccaatgcccaagacattataaacggtcttactgaagtaacacaaagcttaaaaatggaaaatgaagagtttaa

SEQ ID NO: 209741 - DNA, 112 bp, Homo sapiens
ctcctgcttcccatcgaagctctagaaatgaatgtttccatctcttcagagatgaaccagacaatgcagatcttcgtgaagactctgactggtaagaccatcaccctcgagg

SEQ ID NO: 209742 - DNA, 90 bp, Homo sapiens
gaaaaatcctggatctgtatgctttgagcaaggtcaaaacattttgtgggaaatatcctgttcgtgacctaggagaaacaagacagaaaa

SEQ ID NO: 209743 - DNA, 51 bp, Homo sapiens
ggccgcgcctggcctggccgggaccatggagtgcctgtgaagaaaacgggg

SEQ ID NO: 209744 - DNA, 87 bp, Homo sapiens
cttgatggggacatgccccacactgcaggagcagtgcacagagctgtggggaccaggaaggatttgatgccctggatccctttattc

SEQ ID NO: 209745 - DNA, 76 bp, Homo sapiens
cgcgcccggcgcccctgagccggccgagcggcgacggaccgcgagggaaaagaagatctcccggagcagtgccctg

SEQ ID NO: 209746 - DNA, 74 bp, Homo sapiens
ggagtgtctcaaggactcaccccgtttccggaattgaatgatctggcacgggaccctccagcacagtgttcagc

SEQ ID NO: 209747 - DNA, 100 bp, Homo sapiens
agcatctgcagaggatggtcagtgtgccccaggtgaaggccagtgctctcaagaatggagatgtatgcatttcgattcttcatccgcctgtagatgaccc

SEQ ID NO: 209748 - DNA, 75 bp, Homo sapiens
gcacgtggattcagcgcgatgcccaaatccaagcgcgacaagaaagatgatcagtgcagaagcgcctgtactctt

SEQ ID NO: 209749 - DNA, 75 bp, Homo sapiens
aaaagagcgaataaagtttatcacgccgggttgatgcggatgaaattaaaaggctaggaaagagatttaagaagc

SEQ ID NO: 209750 - DNA, 76 bp, Homo sapiens
gtggcgccgcccggggcgaggcagggccagcagcaggcgggagagacacctatggctgccgatgaaggctcagcag

SEQ ID NO: 209751 - DNA, 75 bp, Homo sapiens
ggtgtatctgtacagcagtttcctcatccctgcagctgtgtttgaacaggacaatcatatcctgattcagccctt

SEQ ID NO: 209752 - DNA, 100 bp, Homo sapiens
ccagctggtggctggagcgaccccttgttctttggtggcgctggtaaagatggctttgcagcaggaaggatttgaccgaaaaaagcgaggttacagagac

SEQ ID NO: 209753 - DNA, 139 bp, Homo sapiens
gtcatcaacaacgacgccgagctctggggcgtcttgcagccctatgagcatctcatctgcggcaagaacgccaatggattttttatcaagcagaaatgcatcgaacaacgagaatcaagatcactgagctaaatcccca

SEQ ID NO: 209754 - DNA, 101 bp, Homo sapiens
ccgggctgagcttcctggagaagaggaagaacccttaggagaaatcttgagagtggacagcaattgtgaagatcgccagagagttctgtgtttcatcaccg

SEQ ID NO: 209755 - DNA, 76 bp, Homo sapiens
ggcggggccgacgagtccggaggggctgccgcgggaggtttcaagtgccccatttgctccaagtctgtggcttctg

SEQ ID NO: 209756 - DNA, 82 bp, Homo sapiens
catgtctcgccgcaagcaaggcaaaccccagcacttaagcaaacgggaattctcgcgtgacttaagagattaaaattaattt

SEQ ID NO: 209757 - DNA, 75 bp, Homo sapiens
agcagctcctttatggaaatcatactattgtgatgtcttggcattgcccattttcaagcaggaagattccagcct

SEQ ID NO: 209758 - DNA, 75 bp, Homo sapiens
gaggaggtgatgatggacatcggctccacccgggtgagaagccctaccactgcaactgggacggctgcggctgga

SEQ ID NO: 209759 - DNA, 101 bp, Homo sapiens
ccagaaggagtgcttctaccagcccatgcccctgaaggcctcgctggagatcgagtaccaagaaacttggatttaactggccagaagcaggtattcaaagc

SEQ ID NO: 209760 - DNA, 83 bp, Homo sapiens
gaaggcggcacgcagcggaggcggctgggaaggagcagttgacatcatggacatatgtgagtccatcctggagaggaagcggc

SEQ ID NO: 209761 - DNA, 100 bp, Homo sapiens
cgggaagggcctcggcactggtaccctttacatcgctgagaggtttgggatgtacattccgttcctgcagctgaattgcgacctccgcaagacaagcctc

SEQ ID NO: 209762 - DNA, 101 bp, Homo sapiens
atccagaagactgtgatcgagcccttaaaaaagaatactcccccagttgcaagaggcgcaggaccgtggaagacttcaacaaattctgcacctttgtcttg

SEQ ID NO: 209763 - DNA, 83 bp, Homo sapiens
aggagcagaacgtgagggtgtaacttacaaaaagccatcactggtgcaagctatatttaacggagatcctgatgaagttcgag

SEQ ID NO: 209764 - DNA, 100 bp, Homo sapiens
ctgaagaaaagtagaaggaaaaacagaacgttgcaaactctggaaaaaaacttgggatttcagatgcatgccaggtttccactgattgccagaactcgag

SEQ ID NO: 209765 - DNA, 101 bp, Homo sapiens
ctgctctcccgcgtccctgagccaggccagcgccgacctggagcttacgaggaaatatttcagtaaaagcagttaaaaaagaagtagaaaagaaactccga

SEQ ID NO: 209766 - DNA, 88 bp, Homo sapiens
gtgtaattcccttctcccgctggacgacatagtgagggtggtgacccatgacgactgcatccctgagccttgtcttaaaagaagaagc

SEQ ID NO: 209767 - DNA, 100 bp, Homo sapiens
gccatcgttgctgccttcttcgtcaaggtcagtcaccacgaacaggggcactcggcatgctgccccagcactggagaagcagcgctgtgggggcaatctg

SEQ ID NO: 209768 - DNA, 101 bp, Homo sapiens
aaagaagttgcaaaacactggtctataggatcgggtgaaccaccaaccggcaattgaaagctgcacagcctgaaattacctttattcaattaatgcaaaaa

SEQ ID NO: 209769 - DNA, 90 bp, Homo sapiens
cggcgcgcgctcccggccaccccaagcgcgaggtgaaagaaaagatgttgtcccggttaagagtagtttccaccacttgtactttggcat

SEQ ID NO: 209770 - DNA, 96 bp, Homo sapiens
cgatccgtggcctccttctccatctacagggaagtctgttagaactgctgtgctgatcaacgggacgctccgtctttgaagaaagaagagatggtc

SEQ ID NO: 209771 - DNA, 73 bp, Homo sapiens
cagagttcaaggaggccttccagctgtttgaccgaacaggtatcaacttgaactgaaggatgactacatcatt

SEQ ID NO: 209772 - DNA, 100 bp, Homo sapiens
tcagagtttgcattgttaacaaggaactcgaatcatttatgacagaaagtttctgttggatcgtcgcaattctcccatggctcagaccccaccctgccac

SEQ ID NO: 209773 - DNA, 99 bp, Homo sapiens
ggcggaggagacggcggccttcgaggaggtcatgaaggacctgagcctgacgcgggccgcgcggattgacgagatgcctgaggctgccgtgaaatcaac

SEQ ID NO: 209774 - DNA, 98 bp, Homo sapiens
ttcatcacagcaatggagaagagaaagcacaaagcatggagaccctccctccaggcttcaacggaccacaccaaaatgccatctcaaatggaacacgc

SEQ ID NO: 209775 - DNA, 75 bp, Homo sapiens
caattttgaacaagctatcaagcctcttagcaatgcataccacgagttagcacaagtgtattcaaccaacaaccc

SEQ ID NO: 209776 - DNA, 75 bp, Homo sapiens
caacaccaccggcacagtgacggcttcagaggacactggctctgagaccccgactgcccgacggctctacactgc

SEQ ID NO: 209777 - DNA, 82 bp, Homo sapiens
tggaggaccagtatttcccatggaggggatacccacccaccatcccagggtctacaacatccacagccggaccgtcacccgc

SEQ ID NO: 209778 - DNA, 100 bp, Homo sapiens
cctatgactcagacctgggcacagcaaatgctgaggactcagaccagtctctgcaagaatacttggcatatcgaaattttatgattgacacgtatcgtct

SEQ ID NO: 209779 - DNA, 100 bp, Homo sapiens
tggtgtcggtgagcgcgtttcccgcctgagcgcaactagcggcgggtcgtgggcacctccaggtgattgaattactcagatatgaagatcatcatctagg

SEQ ID NO: 209780 - DNA, 73 bp, Homo sapiens
caggtgtactccatgggcggccccaaccgcttctacttcctcgagggccctcctcaggacctgtctgttcatc

SEQ ID NO: 209781 - DNA, 98 bp, Homo sapiens
gaagcccgcaaggaccgaacacccccaccccgatttagacctgcgtgtgtcctgggactctgaatggcctgagtgtgaccggcgatgctgagaaccaa

SEQ ID NO: 209782 - DNA, 74 bp, Homo sapiens
cagaaaccccgttgacaaggcactgctttttcatgacgacaaatttacatgtattggagaccagaccagaagcc

SEQ ID NO: 209783 - DNA, 75 bp, Homo sapiens
gaggtacctctccttttccctctccctttccctaagcatcagacaacagtcagcgctttcgagaaacctgttttg

SEQ ID NO: 209784 - DNA, 100 bp, Homo sapiens
cagtggtgcaaagggcgccagccctccccgcctctgcgtctttgctcccggagcgcttgaaggagctgcggaatcttttagctgaaaaagtagagcagct

SEQ ID NO: 209785 - DNA, 100 bp, Homo sapiens
gcccgcagtcagatccacagcatccgggacctccagcgactcctggagatagactccgtaggggacggcaaaacagaacagaaaggcggagataaaaaga

SEQ ID NO: 209786 - DNA, 75 bp, Homo sapiens
atttacgcggatgtcggcgaagagttcaaccagttagtaacaggagtatgggaaggcaaatacaacttcttctgt

SEQ ID NO: 209787 - DNA, 100 bp, Homo sapiens
tacctcctgcaagatgatgttgacagagccaaatattacattcaaaatggcattcagagttttatgcagatcagcctctgtggactcggtgcttctcctg

SEQ ID NO: 209788 - DNA, 100 bp, Homo sapiens
aggcacggcattcccatgagccacgttgcccggcagcaacacagtcactcctggcggcaaaccaaacaaaaccagagtcatctggggaaaagtaactcgg

SEQ ID NO: 209789 - DNA, 90 bp, Homo sapiens
atgtttctggaatatcaaaatcgcagtggagctactgctgtggttcaggcagccctatgcaaacccaggcaagaacgtgtagcaataaaa

SEQ ID NO: 209790 - DNA, 75 bp, Homo sapiens
ataaggaagccaagttggaccgttctgatgtgactgagagagaagaattcactcgtgaagtaacagacacacaga

SEQ ID NO: 209791 - DNA, 75 bp, Homo sapiens
aaggactgaggaacggtgcctggaaaagggcggcgactggcggcgcgatggacctgaccgggctcctgctggacg

SEQ ID NO: 209792 - DNA, 75 bp, Homo sapiens
ctctgtatgagaaggacaacacctacttagggtccctctctgtcctgctcgatgacctgcaggacctgagtgaag

SEQ ID NO: 209793 - DNA, 74 bp, Homo sapiens
cagacaagttccatcccacctttgagtcaggtatcggatatttggattagggatgctcaacctctacagttttt

SEQ ID NO: 209794 - DNA, 100 bp, Homo sapiens
tgaggagtttgacgaggtgtctcggatagtgggctctgtagaattcgacagtatggtcagttcaccgggacctggaggcccagattgcgatcgtgacgga

SEQ ID NO: 209795 - DNA, 100 bp, Homo sapiens
catcgccccagacatggggaacgcggcgaccgccaagaaaggcagcgaggtggagagcggagtgtgaaaccaagattgcacaagagatagccagtctttc

SEQ ID NO: 209796 - DNA, 49 bp, Homo sapiens
actttaccaacgagctgaagcagtggtcatatgcattagaaaaacccaa

SEQ ID NO: 209797 - DNA, 88 bp, Homo sapiens
gcagcagcaaccgggcccggccaggttcggcgttccgtgagtgaacgagtgatggtgatgattttaattacatcattgcatttttcct

SEQ ID NO: 209798 - DNA, 87 bp, Homo sapiens
tgaataaagctgttttggaactgtcaggtacctcaaagccctgccacagtgactcaggtcactcaaggaactatccgaccagctgcc

SEQ ID NO: 209799 - DNA, 100 bp, Homo sapiens
cttctggcaagaggtgctgatatcaacacggtcaacgtggacggcttgacagccctgcaccagacatggctggattccgccaaagaaataaaaaagcagg

SEQ ID NO: 209800 - DNA, 82 bp, Homo sapiens
ggggactctgaacttccctggtcgaacagttttttctaatggctattcaaggtttattcttcagtccaaggaagcaattcac

SEQ ID NO: 209801 - DNA, 80 bp, Homo sapiens
ctctttctatctcgagatcttcgatgaggtttggtgcacctcgatttggaggaagtagggcagggcccttatctggaaag

SEQ ID NO: 209802 - DNA, 88 bp, Homo sapiens
ggagacggcctgggtgctggcgaagcggaggccggaggtggaaacttcagaacattttcgtatagatggtccagtaatttcagagagt

SEQ ID NO: 209803 - DNA, 80 bp, Homo sapiens
gagaacgcctccagcggggatgacacagaaggataccatgacaatcatattgtaattcggtggttctgggctgcagtgga

SEQ ID NO: 209804 - DNA, 100 bp, Homo sapiens
ggacgggaaagattgcaaggtgaataaagaagtggagcgtgtcctgaaggagttccaccaggccgggaagcccatcgggcaagtgaaccggagcaaacga

SEQ ID NO: 209805 - DNA, 82 bp, Homo sapiens
acatcagtttctggaagaagaagaagagcatgatcggcatgtccaccaaggcagcgccgtgccgtccctgcagtgacaccga

SEQ ID NO: 209806 - DNA, 107 bp, Homo sapiens
tcaaaaaggaaatcaccctgcttgagcaaaggaatagagttggggtttcaccatgttcccagctggtcttgaactcttgaggtgaagcaatccgcccacctcagcct

SEQ ID NO: 209807 - DNA, 75 bp, Homo sapiens
tggaaatgaaaatggagagttctacctacgaactacacttgctgctttgaaggatgaagttgtatctgttgaaaa

SEQ ID NO: 209808 - DNA, 98 bp, Homo sapiens
cccatccccccaccgtttccccctgttgcagggttttgtttatataactcaagttgtttggctaaattcttcagatggcttgttcaatcagtatatca

SEQ ID NO: 209809 - DNA, 90 bp, Homo sapiens
agcatgagcgaaagctacacgctggagaacctaaaggcagacccagaagagctttttacaaaactagagaaaattgggaagggctccttt

SEQ ID NO: 209810 - DNA, 76 bp, Homo sapiens
cttgggagttataatagcagccacttgcatgggccttacttctataacaggaaaatgtttataggaggccttagct

SEQ ID NO: 209811 - DNA, 74 bp, Homo sapiens
ctggtcatacaccagtactaccaaggacagcttttttcctgcaagtaattcgccaaaatgacgaacacaaaggg

SEQ ID NO: 209812 - DNA, 82 bp, Homo sapiens
ccaaactaaaggatttaattcgcctggtgaagcactggtacaaagaggtggggacccatcgtgaagatggcgtggccctgag

SEQ ID NO: 209813 - DNA, 82 bp, Homo sapiens
aagaagaggagaggaaaaaggaagagagcactgcagccagtgaaaccactgagtgtgtagcccacaatgccctggagtgtgc

SEQ ID NO: 209814 - DNA, 74 bp, Homo sapiens
atatttcatatgttttagctacaaacatttatctaaggatgagagagacctagagaaagatgatgaactggaac

SEQ ID NO: 209815 - DNA, 99 bp, Homo sapiens
cgccaagcaagtgctctacgtgcctgtcaagaccacggatggattggatgctttggtatatgatttggattttcctgccttaagaaaaaacaaaaatat

SEQ ID NO: 209816 - DNA, 95 bp, Homo sapiens
ccggggtgtctcgcgcacgggccctcaggaaggattctgatcttcgaagtgcacttcttttggaacaggcagcacattgctttataaacatgaaa

SEQ ID NO: 209817 - DNA, 98 bp, Homo sapiens
ccgggcccggccacagcctgcagcggagcccacgagaggcagcgccatggcggagcagacctactcgtgtacggcaagaagaagctgaaatacctgcc

SEQ ID NO: 209818 - DNA, 85 bp, Homo sapiens
gagacctgcaggctgcgtgtaccattcttgtcaacgcactgatggatttccaccaaaggaggatttgatgaagatgttaaagcga

SEQ ID NO: 209819 - DNA, 100 bp, Homo sapiens
ttaagtcccccaaagatgagatttacctgtgagatgtttcatcccaacagtttattcactggatctctgaatacccaggccccctccaccatggccagcc

SEQ ID NO: 209820 - DNA, 101 bp, Homo sapiens
catcaagctgtctaagtccaaagatttttacccagggacattcataccaccaccgggaagatcaagagagctgttctgcagttcactcctgctagctggac

SEQ ID NO: 209821 - DNA, 75 bp, Homo sapiens
catttttacgggccttctggagatgcttccgaactgtgggcaaaaatggcgagagaagtggagatcctgatgttt

SEQ ID NO: 209822 - DNA, 75 bp, Homo sapiens
gcaggtgcctgccggggcagaggccatcccagagcccgtggtgaggtggccctggtacagtggacggaaagtgtg

SEQ ID NO: 209823 - DNA, 80 bp, Homo sapiens
tgggcgatacactatcaaagttctctttgcatctcagagcccagcattacatcaacatgcccgtgcagttcaaaccgaag

SEQ ID NO: 209824 - DNA, 90 bp, Homo sapiens
ggccaacatggcggaacgcaggagacacaagaagcggatccagttggtaatcagtggataaattacatatcattctgtggtcttagaaca

SEQ ID NO: 209825 - DNA, 100 bp, Homo sapiens
ctcgaggacgctggagcccagcaaggatgtacgaagtaggtccaaagttgttgaccgtatttacagtctctacaaacttacagctcataaacataaaatg

SEQ ID NO: 209826 - DNA, 75 bp, Homo sapiens
aaagcgtaggcctcacaaacatcctggccgtgaagattgtgaaaactgctgagagagacttgcaatccagtcaca

SEQ ID NO: 209827 - DNA, 50 bp, Homo sapiens
tgaagggggactacaggttcgagaattatctcctgctgcatactacgccc

SEQ ID NO: 209828 - DNA, 88 bp, Homo sapiens
agatgcttccaaatccttcttccaaagcaatagctgatggaagaggagctccagcagcagcaggagaggagagccagagaagtgacag

SEQ ID NO: 209829 - DNA, 83 bp, Homo sapiens
cttatgttttggagtcacacaagctaaagacgggccattttccagacctcatccagcacttgcacctcctgcgccgccgcccc

SEQ ID NO: 209830 - DNA, 100 bp, Homo sapiens
tttgcttggtttggaaaaatttcattagagattacctctctagtgacccttcagctgttaaccctggttggccatgacgatcagcttgatggaccaaaat

SEQ ID NO: 209831 - DNA, 51 bp, Homo sapiens
ctcctgagtagctgggattgcagctgctgtggcaccgcgcccagtatgagc

SEQ ID NO: 209832 - DNA, 98 bp, Homo sapiens
gaatatacaaagacaaaaggagattctgatgaagaagttattcaagatggttccttgcattgactccatggagagtatatcacctgatttccgtcatg

SEQ ID NO: 209833 - DNA, 100 bp, Homo sapiens
caaaccgggaaaggagaggatcccggagccggcctcagatgagggcactctgggaggatcccccaccaagaaggcagtaaccttcgacctcagtgacatg

SEQ ID NO: 209834 - DNA, 100 bp, Homo sapiens
gtccaacctgctgctgagccacgccggcatcctcaaggataaagtggccagtgtgtacgaagccccgggctttttcctggacctggagcccatcccggga

SEQ ID NO: 209835 - DNA, 90 bp, Homo sapiens
gttggtggacttctggtgttgatcgtgattctggtcatcctgttcaagattgtgaataagtggaatacagctctcattggccttatgaca

SEQ ID NO: 209836 - DNA, 50 bp, Homo sapiens
tggaggagtcccgctcgaagctaggctggttggaaggaaaatcatgcaac

SEQ ID NO: 209837 - DNA, 101 bp, Homo sapiens
gcccagacaagtccccagggaatgccacagcatcctccagcacctcagcgtgaaataactaagaagttgggcaaccccaaacagcctacaaatcctttcct

SEQ ID NO: 209838 - DNA, 100 bp, Homo sapiens
atgtgactagttcccctgtggcctcacaaccaatatttatcactacgcagcatgagatactttgatagagcagccttatttgtggaagcttgcctcaagt

SEQ ID NO: 209839 - DNA, 75 bp, Homo sapiens
gtcggctttgattataaaggagaagtggagaagcacacatctcagaaagtgcccaccagaagtatgtccgacaag

SEQ ID NO: 209840 - DNA, 96 bp, Homo sapiens
ccagcacctccttcaggttacttcatggcagctatcccacagacactcttgcttgctcctgcttccagcatgtcatgtgcctgctcccccttcacc

SEQ ID NO: 209841 - DNA, 75 bp, Homo sapiens
cctgcagcccagccagtaccaagaccagtaaaagaatgtgtggatcatttaagtagagatgaggatgaagagaaa

SEQ ID NO: 209842 - DNA, 82 bp, Homo sapiens
atcgcccaagtccctctactcgcgaggtggattgtctcattgttagtgctgaatcttcttgcctacttgtatctgggaattt

SEQ ID NO: 209843 - DNA, 75 bp, Homo sapiens
tgagaaaggagctcggggactcccccaaagacaaggaaggagatggataaagcagatgtttattggggcattcct

SEQ ID NO: 209844 - DNA, 90 bp, Homo sapiens
gcaggtgacagtctgcatgtgcagttttcagcaggactctggactgtcttcacactaggtggtgtgggcagcaaagcggctgcctctcca

SEQ ID NO: 209845 - DNA, 75 bp, Homo sapiens
cccggatctggtaacatggcaaaagatccggagaattttcatccttgggccttctcatcatgtgcccctctctcg

SEQ ID NO: 209846 - DNA, 100 bp, Homo sapiens
atgaagataaaattcgggaggagtatgagcaaatcctcaataccaaactagcagggcccagattttggctacgtgacccgggagcccctctttgagtctg

SEQ ID NO: 209847 - DNA, 75 bp, Homo sapiens
ccgcccgcagagcaagcgcggggaaccaaggagacgctcctggcactgcagtccacaggtcctggctaccctggg

SEQ ID NO: 209848 - DNA, 75 bp, Homo sapiens
tgttagatatcgaaggtaccacaaccccgattgctttcgtgaaggacttggcagatgaacttgctcttgttgatg

SEQ ID NO: 209849 - DNA, 98 bp, Homo sapiens
cccgggaggagaaggaaggcatggaaagttccagccggttcgagagctaggtatcctggtcagatataggaggactggaaagtatcaaactgaagttg

SEQ ID NO: 209850 - DNA, 82 bp, Homo sapiens
gcggatctcaccgccgctcaggggagaatgcgaggccggtccctgaaccctgcaaccatttacccagtgttgccaaagctcc

SEQ ID NO: 209851 - DNA, 75 bp, Homo sapiens
gatccttacagcctgctttgggtcattcgcccatggtggcaatgacgtaaggatttttgtcaaccgcagcctggc

SEQ ID NO: 209852 - DNA, 100 bp, Homo sapiens
tttagttcagcgcagcgactcggggacctggagctgacgcctaggcaggtaagccccctcccggtttacatctggatgtagtcaaaggagacaaactaat

SEQ ID NO: 209853 - DNA, 105 bp, Homo sapiens
ggaaccgtgtccagccagggtcctgggccgcgacctggttctcccggagtctacagtcgcaatggaagaagagatcgccgcgctggtcattgacaatggctccgg

SEQ ID NO: 209854 - DNA, 83 bp, Homo sapiens
tgagcattgctgcatttggagagtcagatgccattttgccatccttacccgacctgggatggagatcaccaaagatggcttcc

SEQ ID NO: 209855 - DNA, 74 bp, Homo sapiens
atcttcatgccctgggttctgcccgcacggacccccatgtatttgaaatatctcaccaaaaaatatttgaagaa

SEQ ID NO: 209856 - DNA, 98 bp, Homo sapiens
tatgttgtctcaagacctcaaccaagggacgggggcaccgccctgttggctgccagtcagtacgggcacatgcaggtggtggagaccttgctgaagca

SEQ ID NO: 209857 - DNA, 95 bp, Homo sapiens
aagaaaccagccgaacttcagggtttccaccgttcgttcaaggggaacgcccttttgcttgtgactggcagggctgcgacaagaagttcgcccgc

SEQ ID NO: 209858 - DNA, 82 bp, Homo sapiens
aggctcccgggctggactcaggcttctcagggggggccctcagcctcttggccttgaacgggctgttcatcttgattcacaa

SEQ ID NO: 209859 - DNA, 97 bp, Homo sapiens
cggtacatggttgtacaagtatcaatggacaaaaagacttggcatgaatcatacaaaactcaatatagagcaatgtttgtaatgaattgttctatta

SEQ ID NO: 209860 - DNA, 90 bp, Homo sapiens
tgaggggctgggagccgcgcacaccaccatcacgtaccatcaagtcttcagccacattgtttctctagaagggcaagaaatacaagtaaa

SEQ ID NO: 209861 - DNA, 74 bp, Homo sapiens
cagttatcacatctgtgggagacgaagaaggcagaaggagccacgccttatttgccacggagacctttgctatg

SEQ ID NO: 209862 - DNA, 83 bp, Homo sapiens
catagcgagaccctatctctaccataaaaaagggctcattgtcatccccaagccaggccagttctccaggtggaactgtagtg

SEQ ID NO: 209863 - DNA, 100 bp, Homo sapiens
agagtgagagagagctattagagattgtgaagaagaatttcgatctccgccctggggtcattgtcagttcttcgtgccatgaaggaggacagtgaaaaag

SEQ ID NO: 209864 - DNA, 90 bp, Homo sapiens
cgcgctctccatccgctcggagatgatccagcgcaaaggtatctcgggggagctttgtgccttgatggatcaagttcatcatatgcagca

SEQ ID NO: 209865 - DNA, 98 bp, Homo sapiens
gccggatcccgaagacgagggcctggaggaaacaggttattcagcttctcaaggctggaaaagcgaaggaagtttcctacaatgcactagcctcacac

SEQ ID NO: 209866 - DNA, 75 bp, Homo sapiens
agctcacagccaccggtaccttcttccaggtgctggagaatctggtaaaagcaccattgtgaagcagatgaggat

SEQ ID NO: 209867 - DNA, 96 bp, Homo sapiens
cagcgaggcgcagcgagcctagcctccccgcgccctgggcagtgtggccatggagaatcaggtgcgctacttgaaggtgtttgaaccgaagctgaa

SEQ ID NO: 209868 - DNA, 101 bp, Homo sapiens
gtgctctccgggcacgtcaaccccttcctcccgtatatcaggtttttcgttggaatatacgttgcacatttatggcgattctgagtgtgagggcagacttc

SEQ ID NO: 209869 - DNA, 98 bp, Homo sapiens
gcctgcagcccggctcacctggagaaagggtgaccaagaactccacgaaaccagcctggacaccaagtctgtgtcagaaggccacctcaagaggaaca

SEQ ID NO: 209870 - DNA, 75 bp, Homo sapiens
tggtctgcataccatgtggaacgagcattttgggattggtcatttggatccaggattcctagcaagtgacaaaac

SEQ ID NO: 209871 - DNA, 88 bp, Homo sapiens
ccagctttgtcaacgggatctgggagtgacactgacaagttggatggcttgaggactggtactaaaaggaaacgtgactgggaggcca

SEQ ID NO: 209872 - DNA, 98 bp, Homo sapiens
ccaaagactaaactgacaagccttcaaggagcccaggggtcatggaaaatggaagatttgcaaaatacaaatattttacccatgtcatgatcaataag

SEQ ID NO: 209873 - DNA, 75 bp, Homo sapiens
taagattcttcaaggtggggttggcatcccccacatacgtgatttgctgtcctctgaatacatagagagacacat

SEQ ID NO: 209874 - DNA, 137 bp, Homo sapiens
aggaggtggaggagtacaagaactttcggcccgacgaccccacccgcaaaaccaaagccctgctgcaagttgaagtattgataacaccaaggaactctatcacaatttgaaaagataagcaaaagtttgatttccag

SEQ ID NO: 209875 - DNA, 95 bp, Homo sapiens
attctttggtttctttttttgatgcatctctacctggaactttgccgttgtctgagggaagtcaaaagcatgcaagcctacagaaaagcattgag

SEQ ID NO: 209876 - DNA, 83 bp, Homo sapiens
cctgtgtccagccagggatacatgccctacctcaacaagtacatcctggacaaggttctatgaatttgaatgctgtgtgtgtc

SEQ ID NO: 209877 - DNA, 100 bp, Homo sapiens
gccatgagccgatgtgttttggagcctcgccccccggggaagcggtggatgaatgccgggtctaagttgtagattttatcaacacaaatttcctgaggtg

SEQ ID NO: 209878 - DNA, 75 bp, Homo sapiens
gcagggaatcaccctgcgcgggagcgccgaaatcgtggccgagttcttctgtccagtggcattgcagagcacgga

SEQ ID NO: 209879 - DNA, 74 bp, Homo sapiens
tttgatgaagaaagtgaggaagggaaagcagcaatttcacaactcaggatggaaagaactccagtggatccaag

SEQ ID NO: 209880 - DNA, 82 bp, Homo sapiens
ggcgcgcagcgtgtcaggcggagagacccgccgccagatatcagttttagagaatgtggcgtggagaaattctcaaggaaag

SEQ ID NO: 209881 - DNA, 100 bp, Homo sapiens
acctccattggatttaaaagacagtcctcgtcagcactgactttcagctatggaatcggggacaccgtggtgtttaaggatggccagtactggatccgag

SEQ ID NO: 209882 - DNA, 71 bp, Homo sapiens
ataaccacagtggaaggttgcagttacaggtaactgattacagtagaatgcacattccttgactatataat

SEQ ID NO: 209883 - DNA, 100 bp, Homo sapiens
attacttcaagcagtggattaatctgaaaaagtttctctgtttgaagaacataaggacatttctcacggcctgttgtgagacgtttggaatgaggaaaag

SEQ ID NO: 209884 - DNA, 75 bp, Homo sapiens
tacagattggcggtcgtgccttatgaaatctgacttctacttccaggacacaatgtttgcacgaggactgaagag

SEQ ID NO: 209885 - DNA, 75 bp, Homo sapiens
caaaggtaaagacactcaaggacagacatttttggcagagcaggtttggatgcatctgctcagactacttctcat

SEQ ID NO: 209886 - DNA, 88 bp, Homo sapiens
tgtcgtcatggagacaggtgctctcggttgcacaataaaccgacgtttagccaggtattctttaggtgatgctagaaggcctcttcat

SEQ ID NO: 209887 - DNA, 88 bp, Homo sapiens
gaagcccgctgccttgtggaggagttgagaaaaaccaatggactgaagtgtgtatgtcttttgtgtgattcttcaaacttcacctgcc

SEQ ID NO: 209888 - DNA, 82 bp, Homo sapiens
agggacacctttcacagctatcagggaaggttttgggccacacatgttccacccaatgggaccaccccctcctttcatgcgg

SEQ ID NO: 209889 - DNA, 87 bp, Homo sapiens
cgctccgtggccttagctgtgctcgcgctactctctctttctggcctggaggctatccagccgattattggagccggaattggtggc

SEQ ID NO: 209890 - DNA, 100 bp, Homo sapiens
cagccgcccgcttcaaccccaggggaccagaggaactcagccctgattgcgatattggctccaataattgtggatactatgacttacaagcagtactaac

SEQ ID NO: 209891 - DNA, 100 bp, Homo sapiens
tatgatgaactggaggctgagtacgacagcctcaaacaggagctggagcagctcaaagagattgcttccaagtatgatcatcaggcagaagaagatcttc

SEQ ID NO: 209892 - DNA, 100 bp, Homo sapiens
ggaatcctctgaagcaggagactgccctatccaggtgaaaggtgtagcagtcactcggcctacacccacagcatcgaccttgtgaacccagcgacctgac

SEQ ID NO: 209893 - DNA, 74 bp, Homo sapiens
catcaatactatggaatgcattttgaaacttaaggatgggatacaggttgggggccgtcccgctcctaaggcag

SEQ ID NO: 209894 - DNA, 98 bp, Homo sapiens
tgacccgaccccggcactacctcgaggctccgcccccacctgctggaccccaggtaagactttgaccccgacgcaggcttcagtgattgccgcggatc

SEQ ID NO: 209895 - DNA, 96 bp, Homo sapiens
catttgccaaggagacatccctcttaggatcagttcgacagcttagacaagcatacacaatggggaattgacttcttggaaagatatgccaaattt

SEQ ID NO: 209896 - DNA, 50 bp, Homo sapiens
gaaagctttaggagttcacagtgtcccatctggagggtggtggagaacct

SEQ ID NO: 209897 - DNA, 75 bp, Homo sapiens
ttcttttgtcaattaggtcacttcaacctcttattggaagattatccaaaagacccaacatgagtgaagtttcct

SEQ ID NO: 209898 - DNA, 82 bp, Homo sapiens
ctttggaagaagtatatgcaggaaattttgtggaactcattcttggaatcccagaacaggccttaagtcttctccacatggc

SEQ ID NO: 209899 - DNA, 90 bp, Homo sapiens
tgcagcctttgtgataactgcgtaggtaactactccagacccccagcgtatagtggggtgcccagtgcaagctacagcggcccagggccc

SEQ ID NO: 209900 - DNA, 75 bp, Homo sapiens
ggaggagccgcagtgggtcccggacaaggaggctccccacaggtgcaggaagccgccgcccagccatggacgggg

SEQ ID NO: 209901 - DNA, 100 bp, Homo sapiens
ctccattcccgggaggggggagcggcgttggaggccaccgtttccaggatattccccgagtccctccggtggctaatggccacccagcagtttgagtctg

SEQ ID NO: 209902 - DNA, 98 bp, Homo sapiens
ctgtgccacctcctcctttagaaaactgatcttaatacaggaacaggaaatatagtggtcattatgattagctatccaaaaggaagagaaattttgga

SEQ ID NO: 209903 - DNA, 100 bp, Homo sapiens
gtcacgagggacgggcggcggcctggtcggcagagagtagcctgcaacattcggccgtggttacgatgaaatgcactcggtgatggaaagagagccacta

SEQ ID NO: 209904 - DNA, 98 bp, Homo sapiens
tgacccgcgtgtgccctaagcacacctggagcaacaacctggcggtgctcgagtgcctgcaggatgtgagggagggatcagtttcattcacggatgtg

SEQ ID NO: 209905 - DNA, 100 bp, Homo sapiens
cggatatttacttacagctggactgtgctcggttcgcgaaagccattgctgacgaccaggctcatgctgaagattcggttatggaccatcatttccggaa

SEQ ID NO: 209906 - DNA, 98 bp, Homo sapiens
gcgtcctgttcttcctgggggactggcaggagattacctggggcaattgatgttatcggtcagactataactatcagccgagtagaaggcaggcgacg

SEQ ID NO: 209907 - DNA, 90 bp, Homo sapiens
acatcatcaacagcagcggcccgcgcccgccggtgccaccgtcgcccgcccagcctccgcccggtgagcgagtgctgtgctttcatgggc

SEQ ID NO: 209908 - DNA, 74 bp, Homo sapiens
aacagtgttaaaggaacggggcctaaaaaacattcgcattggaattgaaggaaactggaggcgaccagtgccca

SEQ ID NO: 209909 - DNA, 99 bp, Homo sapiens
gcgaatatcgtcatcgttagaagtttgtcagaggaatggctgtgaatggatgcctggaaggaccatcctctaattttctcagttgcctgttcattgtgg

SEQ ID NO: 209910 - DNA, 101 bp, Homo sapiens
cacacaatgagctggaaaagaatcggtgcaatgaagggcgtgttggtagacattgtgaatgcagcacagatgaagttaacagtgaagacatggatgcttac

SEQ ID NO: 209911 - DNA, 83 bp, Homo sapiens
atgacagcccgcagagagttaacttctgtttacatggaactcagacatctgcaaatcatggtgtggtcattgtaagactctgg

SEQ ID NO: 209912 - DNA, 80 bp, Homo sapiens
ctcggcggccccggcgccggcaaggggacccagtgcgcccgcatcgtcgagggccatgaagcccccaggaggagaatcga

SEQ ID NO: 209913 - DNA, 99 bp, Homo sapiens
agaaacgtgttcgctgcccagaagaagggaaggcgcgagtgaggaaaggaggtactgtagttacagatgtagagctaaaacgactgaaggatgctttca

SEQ ID NO: 209914 - DNA, 100 bp, Homo sapiens
tgacgttaggccgacccgggccccgggctagcagagcggaggcgctgccacgaaactcgtacctgcggctaagagcagcctgtctcgatatagattgaag

SEQ ID NO: 209915 - DNA, 73 bp, Homo sapiens
tctcgtcccgaggccgtggctgaggtgaagagcttctttcaccaacaatcaccagtggtttacacaacattgc

SEQ ID NO: 209916 - DNA, 91 bp, Homo sapiens
ctgccggaaggggtcccgaagccccctgcaggaactctacaacccaatccagaaactggcagacctttcacttcgtatccaacaaattgaa

SEQ ID NO: 209917 - DNA, 75 bp, Homo sapiens
cagcagccgccggcggcgccgcgctgaacaaagggtgttcaggggctacgcggagaggaagcgccggaaacggga

SEQ ID NO: 209918 - DNA, 98 bp, Homo sapiens
tggcaggctgccatgacaaccaggcaatgctggatagataccgaattcttatcacaaagcttcccttgtcactgctgaagacggctcagaatcacccc

SEQ ID NO: 209919 - DNA, 100 bp, Homo sapiens
ggaacctgtcttttgatttggggttcaacatacagaggccggaaggtggtggtcgtacgctgtgaaggcatcaacatttctggcaatttctacagaaaca

SEQ ID NO: 209920 - DNA, 100 bp, Homo sapiens
acactccaggaatgccagtgcatcttttgcacagctgttgttgtcgggataccagatttcctactccgagaggccccgggtccctctgccacaacttctg

SEQ ID NO: 209921 - DNA, 75 bp, Homo sapiens
tcgacccgtacttgaagccctacgccgtggacttccagcgcagaatggcctgtccagaagacagccaaatacatc

SEQ ID NO: 209922 - DNA, 83 bp, Homo sapiens
ccccagcatgaagaccccggcggacacagtgtctccagaacgctatagctatggcacctccagctcttcaaagaggacagagg

SEQ ID NO: 209923 - DNA, 73 bp, Homo sapiens
ggagattgagactttaaatgaaatgtctcacaagctaggtgatccagccttatttagtgtctctgacaaaacc

SEQ ID NO: 209924 - DNA, 75 bp, Homo sapiens
agcatgagctcagacaccgccagggatattggtgctggaaaaggcaaatactatgctgtcaattttccaatgaga

SEQ ID NO: 209925 - DNA, 100 bp, Homo sapiens
tgccgcaccaggctcatcctgtccatcgtgtgcctgatgatcacgcagctggctggcttcagtggaccaatataattgatcctgttgctttagaaattcc

SEQ ID NO: 209926 - DNA, 100 bp, Homo sapiens
ggtgggctacagccttcaggcccaccccagttccctccctaccgcggaatgatgccgcctttcaagcggatgcagcagatcatggcccactgctttctgg

SEQ ID NO: 209927 - DNA, 100 bp, Homo sapiens
tatgaccgcttcccctggttccggctggtgggcaggagaggcctcctcgctgcgggactacgcggcctccaccatgaccgagttcctcggcatgtttggc

SEQ ID NO: 209928 - DNA, 100 bp, Homo sapiens
agggtgcgcgagctctaccgcgcctggtatcgggaggtgccgaacactgtgcttcaccgatatagacacattttgggattgtggcagccagatatcgggc

SEQ ID NO: 209929 - DNA, 101 bp, Homo sapiens
ggcttccaccgcttcttagtgctagaacaacagaggcagcagttgcttactgaacgccaaaacttccacatggaacagctgaagtatgctgaattacgagc

SEQ ID NO: 209930 - DNA, 100 bp, Homo sapiens
cagacagagagaggaacattgatgcgtgtgaaatgttggcagccgggtaacagatcttgtaaaccaacaacaaaccctggaggagaagatgcgggaagac

SEQ ID NO: 209931 - DNA, 60 bp, Homo sapiens
tgaagaggcagtgaagactctgccaacaggtgttcactcaacttggatctgtgctgaaaa

SEQ ID NO: 209932 - DNA, 100 bp, Homo sapiens
atgaagagcccaaaacctattacgaactcaaaagtcaaccgctgaagagcagggccaattcctgtccccccagcagcatggcatcgtgtgctgaaccctc

SEQ ID NO: 209933 - DNA, 75 bp, Homo sapiens
gctgctgaacacctgagtgcccgggcaggcttcactgcagaggtgatcatgaactaccatgtcggggagacggtg

SEQ ID NO: 209934 - DNA, 50 bp, Homo sapiens
agctacccctgggaccgggaaatctaagagagttggaaactcaactattg

SEQ ID NO: 209935 - DNA, 100 bp, Homo sapiens
ctgtcctcatccactgctcgctgcctctccagatgactgtccaagtgcctccaaagtgtacaaagcatcagattcagcagaagcaattgaggcttttcaa

SEQ ID NO: 209936 - DNA, 73 bp, Homo sapiens
catgtctctctcagaacttggtgctgctagaatgcaggaacagcaggattacaagggccagaagctagctgaa

SEQ ID NO: 209937 - DNA, 100 bp, Homo sapiens
aaccaccatttattcagcactcagaatgctccaggcagtgtaatctcattccatcttcattcatgactccagacagacggtctggaaaatcccgaagcag

SEQ ID NO: 209938 - DNA, 74 bp, Homo sapiens
tcggagcaacgagcgcagcgccggactgagcagggggaggaacatttaagctgatggaagtggaagtggaagtt

SEQ ID NO: 209939 - DNA, 75 bp, Homo sapiens
cctttcctgcttttggtttccctggcaggggttgaactgtggagtgtgtgggaatctgcaagcagaatatgaccg

SEQ ID NO: 209940 - DNA, 50 bp, Homo sapiens
ttgtcagaagtgtattgataaatggtcagtactcctgcatttgtaccaac

SEQ ID NO: 209941 - DNA, 83 bp, Homo sapiens
acgtgatcctggcctgcagttgggtggctgcgggcgatgccagtccctccactccagaggagaacgaaaccacgacaaccagc

SEQ ID NO: 209942 - DNA, 150 bp, Homo sapiens
cacagttaccaagaagacttatgagatctggcatcgacggcatgactactggctgctagccggcattataaacttcctgtccacttccaacgaagcggtctataagatctttgatgacagcccctgcccatttactgcgaaaacctgcaa

SEQ ID NO: 209943 - DNA, 75 bp, Homo sapiens
tggcgagcgcccggattggggatgagtatgcggaggacagctctgatgaggaggaattcctggtgactggaaggg

SEQ ID NO: 209944 - DNA, 137 bp, Homo sapiens
gaagaaaatcattgagactgttgcagaaggagggggagaacttggagttcatatgtatccttccctggaaagaatcatgtgatgtacagctttatataaagagacaatctgaacactccatcttagcaggagatccc

SEQ ID NO: 209945 - DNA, 74 bp, Homo sapiens
accaagttggcaaagtcatctacaagcagttcaaacaggctgtgaacaaccggtccatccaactccccaccacc

SEQ ID NO: 209946 - DNA, 100 bp, Homo sapiens
gccctccagaaaagatttatatgatatacgtccatatgaaaatacttatttactcaagcttcataccaattttgagaactttatgaaatcttcctctcaa

SEQ ID NO: 209947 - DNA, 100 bp, Homo sapiens
cgcgaacgagcgacggcggaacccgtgggcctgtggactgcagcctcggcggtcagcaggtctgggtagatgctggaacgcagatctttttctcctatgc

SEQ ID NO: 209948 - DNA, 74 bp, Homo sapiens
accttcaggaaatgccacagatatgttggatggcaagcatgtggtgtttggcaaagtgaaagaaggcatgaata

SEQ ID NO: 209949 - DNA, 87 bp, Homo sapiens
tgtctcatatacttgatgtaaatcttcccaaaaagctctgcaacagtgcccagtgccgagaggagcccttacttccaaggccagcag

SEQ ID NO: 209950 - DNA, 100 bp, Homo sapiens
gcctgctcaaagagctgcaccgcttcgagtctattgccattgcccaagaagcatcagatggtgaaggagaaggagacacagaagtgatgcagcaggagac

SEQ ID NO: 209951 - DNA, 82 bp, Homo sapiens
cggcaccagtggcctggacaacagacctctgtttggggagacgtccgccaaggattttttatcaagcagaaatgcatcgaac

SEQ ID NO: 209952 - DNA, 76 bp, Homo sapiens
gaggagctgtggataacgggaggtgaatttccatgtcaacatagtcctgttgctctaggtcgtaaccagcctttga

SEQ ID NO: 209953 - DNA, 100 bp, Homo sapiens
ttaccatctctaccatcatccggatgagctttgatccaaaccttctccacaacaatggacataatgggtaccctaatggtacttcagcagcactgcgtga

SEQ ID NO: 209954 - DNA, 75 bp, Homo sapiens
atgttaacaaatgtgagattgccagggtggttctcttcccaaagtggaagccaaattcatcaattatgtgaagaa

SEQ ID NO: 209955 - DNA, 75 bp, Homo sapiens
ctcagtggaacaatcttttgttggattgaaacagctaatcgtggactgtgcattgtcacttattcgacttgggat

SEQ ID NO: 209956 - DNA, 75 bp, Homo sapiens
ggaagccgtgatcctgggaatatctccatccagttcctggtgtacaggcgcagcaccgccgcctcggagcttgag

SEQ ID NO: 209957 - DNA, 97 bp, Homo sapiens
atctggtgtaccaggcgaagctggccgagcaggctgagcgatacgacggtgacttaagagattaaaattaatttggttgctgttggttctgaacaaa

SEQ ID NO: 209958 - DNA, 100 bp, Homo sapiens
cttcggcggctcaggttgtggtagaggcggaggctcaggcagcttgagggtagtcagcagagtgcacacagcagctgtcatccctccttcgctcctgtca

SEQ ID NO: 209959 - DNA, 101 bp, Homo sapiens
ggcattgccaacctttacagacctatccaaatgaaaaagagaggtttgaccctactcagtttcaagactgtattattcaaggcttaactgaaaccggtact

SEQ ID NO: 209960 - DNA, 101 bp, Homo sapiens
cagcagccagcacctgcgatgaaatctcatctgatcgtcacttctccaccccgggcccagagtggtgccaggaaaggaaacagattcattgtctgtctgag

SEQ ID NO: 209961 - DNA, 50 bp, Homo sapiens
caagaatccactgttgctactgaaaggaccctcaatatagtaacctggtc

SEQ ID NO: 209962 - DNA, 98 bp, Homo sapiens
taggaattgccttcttggcaactgtggtcactcaactgctagtatataatggtgtttaccactggacacctgttctgctgttgtgtcctgccattctc

SEQ ID NO: 209963 - DNA, 90 bp, Homo sapiens
gaggagccagttaccatgactcatccaggtttattcttcagtccaaggaagcaattcacagtcagctgttagagaagcagaaaatagcag

SEQ ID NO: 209964 - DNA, 145 bp, Homo sapiens
taagcttatctatctggtacctgagaagcaattattaaatgaaagaattaaaaacatgcagttcagtaacacacctgcaactcggagcagaagccgcaccaatatgctaatggacctacatatggaccatgaaggatcatctcaa

SEQ ID NO: 209965 - DNA, 75 bp, Homo sapiens
gtggaagtccaagtcaaacgcagaaggactgcctcactgagcaaccaagaaacttcgatatgacctgccagcatc

SEQ ID NO: 209966 - DNA, 100 bp, Homo sapiens
gtgagaggaagctgagttacccagactggggaagcggatgctatcagataacaacgaacttgatgcaagtgataggtttgccaaggtcagacctctcatc

SEQ ID NO: 209967 - DNA, 95 bp, Homo sapiens
gaactgatggcgttcctgttacctctcatcattgtgttaatggtgaagcacagcgattcccgtcacgagaagagaatgccttctagatgcaaaat

SEQ ID NO: 209968 - DNA, 100 bp, Homo sapiens
caagcagcctattatgcccagacaagtccccagggaatgccacagcatcctccagcacctcaggaagggaaaaggccgaggcatcagcgtgtgaagaccg

SEQ ID NO: 209969 - DNA, 100 bp, Homo sapiens
aatttgaaaaggagaaaatgaatgccaaatgggacacgggtggagagattcaaccagttagcgtgaaagttggagataaagttcttctcccagaatatgg

SEQ ID NO: 209970 - DNA, 100 bp, Homo sapiens
cagtccatcaagtaacagaagcatttaagcttatcacttcagataaaaagacctcaaaggaagaccttctgcaggctgattttgaaggtgctttaaagtt

SEQ ID NO: 209971 - DNA, 75 bp, Homo sapiens
tgaacagcattctatcatggaaggaggagatgaagggcaagggccaaaatgatgccaaaagaatgcaatggtgta

SEQ ID NO: 209972 - DNA, 74 bp, Homo sapiens
aggaaaaaaagccagtctcaacgttttacttatacaccaggatttgatggaacaacttgaaaaacaggataaga

SEQ ID NO: 209973 - DNA, 74 bp, Homo sapiens
cgaaaaactgattgactgggctggcgttaactgtgcggaggcagacacattccttaacccagcgcagggctgtc

SEQ ID NO: 209974 - DNA, 74 bp, Homo sapiens
gtgggggaccggctgttggcggcggagctggagtttgttcagatcatcatcatcgtggtggtgatgatggtgat

SEQ ID NO: 209975 - DNA, 100 bp, Homo sapiens
attcaggagaaggaccctacagatggagggaatgcaggaaagctaagaagaatcacacctcattgcaggcttctccagggaaagtgaccgaggcagtgaa

SEQ ID NO: 209976 - DNA, 74 bp, Homo sapiens
gggaaccctggtcaccgtctcctcagaggagctgatcacgcagtacctggctgagcttcggaaccccgaggaga

SEQ ID NO: 209977 - DNA, 90 bp, Homo sapiens
ggagacccttctacgcctggttacccaagtgtcggactgtcatgtgctcacctttagtagctcaggctctgtttcggatcacttggtttt

SEQ ID NO: 209978 - DNA, 90 bp, Homo sapiens
cgtgaccgagagcgtgaccgagagcgcgaatatcgtcatcgttagaagaatttgaaagacatattggctgacctgatacctaaggagcag

SEQ ID NO: 209979 - DNA, 100 bp, Homo sapiens
ccaccctccaactttgcgacggaaatgtgtcatcgaaagccaggcatccggagactctggcagcgggctcggggacgcccgggagcttctcagggaggag

SEQ ID NO: 209980 - DNA, 100 bp, Homo sapiens
tcagagcgtcacggcgtacgccctcatggggaaaatctccccggtgactttcaggaagtgatcaacgtgtcacctggctatcaacttgttcggaatcggg

SEQ ID NO: 209981 - DNA, 99 bp, Homo sapiens
ctgctttgcacagctttgccacaaagcccagtctgtgtctcaaatcaaccacaagctggagtttgtgaagtgtggatatgcaggctctaactttccaga

SEQ ID NO: 209982 - DNA, 75 bp, Homo sapiens
cgccgcgagggctccttccctcaggcccgatgagagaaagggaaagttaaggatgctggagcagaacaatggatt

SEQ ID NO: 209983 - DNA, 101 bp, Homo sapiens
cccggtcgcgaccccgtctgggagcgctttgaacttcaagattcaggaagctctctacttcctaaagagattgtaaaagtagagaagatgatggaaaacca

SEQ ID NO: 209984 - DNA, 87 bp, Homo sapiens
atgataaacctgccgcagagagcaaaggccaaagatgaagaggaagcctttctggattggagtgatgatgatgatgatgatgatgat

SEQ ID NO: 209985 - DNA, 74 bp, Homo sapiens
aaaaacaagactggggctgctcccatcattgatgtggtgcgatcggagataggcctcatcaggcttctccgccg

SEQ ID NO: 209986 - DNA, 100 bp, Homo sapiens
cccagagtcgccgcgcggccgccggtgagccgcatggagccccgggcggcggacggctgcttcctgggcgacgtgggcatcacgtgccctccccccatgt

SEQ ID NO: 209987 - DNA, 100 bp, Homo sapiens
ctcttcttttagccctactcctgactgcaaagactgcttttcaggaagccttggacgctgcaggtgataaacttgtagtagttgacttctcagccacgtg

SEQ ID NO: 209988 - DNA, 82 bp, Homo sapiens
agacgaatcgttaaacatctgaaagggtcaggtatttatcagtggcattaaatcagagtgcagaaaagtacttgaaaccatt

SEQ ID NO: 209989 - DNA, 75 bp, Homo sapiens
ccggaagcccccaggatggtgaggttgaaaggattgttgacaaaaggaaaaataaaaaagggaagacagagtatt

SEQ ID NO: 209990 - DNA, 100 bp, Homo sapiens
ggccgccgccgccgcgatgggcaacgccgccgccgccaagaagggcagcgagcaggagagcgggattgggggggtggggcggggccccccacctttctga

SEQ ID NO: 209991 - DNA, 100 bp, Homo sapiens
ttgataagtttctgctctaccagcatttttcctgcaacataagaaacattcaccatcatcaggtgaaagcatgtattgccaatgtagaacccaaccaaac

SEQ ID NO: 209992 - DNA, 74 bp, Homo sapiens
cggctgcccctacggctctttctgatcattgccaacacaatggcattccaggtttctttttggagacaggccct

SEQ ID NO: 209993 - DNA, 83 bp, Homo sapiens
gcaagaagggcgctgttttcgacaggtgtgcaggtttcggcacatggagattgatacaggggcaagtgtccgagtggtgaatc

SEQ ID NO: 209994 - DNA, 75 bp, Homo sapiens
gagaactcaaggtcttcatagaccagaaccttagtcccgggaaaggatcgaatcatcaatttagttgttggcagc

SEQ ID NO: 209995 - DNA, 82 bp, Homo sapiens
ttcagggtttccaccgttcgttcaagcttgatcctctcccagaaaaggttttacagcaaagacccaatgcaaacgctgtccg

SEQ ID NO: 209996 - DNA, 75 bp, Homo sapiens
ggcaagttccgggccgcgctgcgagactacgagacggctggaagattatatctggatcaccaccagagcaagccc

SEQ ID NO: 209997 - DNA, 90 bp, Homo sapiens
aaaagtgggactgaagtacactgaagcagtcactcagcctctgaagaagcttcgggttcagactcaggcagtcagtcggaaagtgagcag

SEQ ID NO: 209998 - DNA, 90 bp, Homo sapiens
ggtggatctgaagtacaaaatattttccaggttttaaagacgctagagtgccaaagaagactttgaagtgtgaaaacatttcctgtaatt

SEQ ID NO: 209999 - DNA, 97 bp, Homo sapiens
aaacaagacaacttgagctgaaagcgaaaaactatgctgaccagagtggcgcctggactctcgccctcagagggaggcccgtcccacggtctgtggc

SEQ ID NO: 210000 - DNA, 100 bp, Homo sapiens
ttagaagctaccgagttaccctaagaaagtgttacctggaatgtcagagagctgaaagcagtcatattttgggatcatgcacctactgcggcagtatata

SEQ ID NO: 210001 - DNA, 100 bp, Homo sapiens
taagaggcgcaaaagaaaagaatctcaaagtgaaaggaccagttcgaatgcctaccaagctccatggctacatggaaaacaagcctctgggacttcagat

SEQ ID NO: 210002 - DNA, 101 bp, Homo sapiens
gtgagatacaaggctacacagagacagatcaaagcagctcgacagaactgtaccgctctctttttggccagctccaccctcccgacgaaggccacggggat

SEQ ID NO: 210003 - DNA, 73 bp, Homo sapiens
tcccttcgcctccttcaccgccgcagaccccttcaagttctagtcatgggagtaactattcccagtcagaggc

SEQ ID NO: 210004 - DNA, 75 bp, Homo sapiens
ctcaaagcgcatattatgctacatgaaaaggaagaggttgcaaattcagaggctatgattttggataagaatctt

SEQ ID NO: 210005 - DNA, 99 bp, Homo sapiens
ctgagatcgtcaagtctcccagcgaccccaagcaataccgagtactattaatcccgtagatgcaatatatcaacctagtcctttggaacctgtgatcag

SEQ ID NO: 210006 - DNA, 100 bp, Homo sapiens
tcaggctgactattttggctgccgcacctccaaaaagccatccagagggagaaggaaactgacagccactgaggggcccgggagcccaagggacgccgag

SEQ ID NO: 210007 - DNA, 100 bp, Homo sapiens
aggggcaggagcttctgggagccaccgtctgaaggttgtggcagcactgcctgaaggtatgagaccagattctaatctttatggttttccatgggaattg

SEQ ID NO: 210008 - DNA, 75 bp, Homo sapiens
gcacaaaattatcaccacaacgaatcttcatcctgtcaaggaactctttccagttaacagacagagtgtggatca

SEQ ID NO: 210009 - DNA, 50 bp, Homo sapiens
taaaatacgaaggtttctggctgggtaaatcacttatcgaagagacaccc

SEQ ID NO: 210010 - DNA, 75 bp, Homo sapiens
cagctgctcgcccgtctacattggcagaagctcctcctggggtagagacagatcttattgatgttggattcacag

SEQ ID NO: 210011 - DNA, 98 bp, Homo sapiens
gcgagcgatcacaattacaatgcagtaaagccagaaaagactgctgctccctcgccgtcactgttgtataaatgacacattcagctaacgtattttag

SEQ ID NO: 210012 - DNA, 87 bp, Homo sapiens
gaaatcattgaacacggcatcgagctgccaatggaagcactgttgtgaagaacttatgaaaattgagattatgtcaccacggaaacc

SEQ ID NO: 210013 - DNA, 100 bp, Homo sapiens
gagcactctttcgcccggcctccggttctcgccggctctcggacccgcctccgaagacgtggagcgctgcggcggctgtgataatatgcagcatgcatac

SEQ ID NO: 210014 - DNA, 101 bp, Homo sapiens
acagtctccaaattcgcctccatctgtaccatggtttggtgcacctcgatttggaggaagtagggcagggcccttatctggaaagaagtttggaaaccctg

SEQ ID NO: 210015 - DNA, 100 bp, Homo sapiens
ctgaccttttagaagaaaataagataaattcatcggtgaaattcgcttctggtaatactgtaggtcagaaatcacagagaccttcaacagcaaattttcc

SEQ ID NO: 210016 - DNA, 82 bp, Homo sapiens
tggaagccaaggcagctgccttcgagaagcaggtcctgcagctgcagcaattctgtggtgttcttggtcacacatttatgga

SEQ ID NO: 210017 - DNA, 76 bp, Homo sapiens
ccggagccgccgcaagccacacgcagggaagaactggaaactcagagaaagaaactgcccttccatctacaaaagc

SEQ ID NO: 210018 - DNA, 98 bp, Homo sapiens
ttttttggaactcatgagaccagtccagagcgtgagtccattcacatcctgagtgttgatgagaagaacaagttgggagccaagattatcaaagcaga

SEQ ID NO: 210019 - DNA, 50 bp, Homo sapiens
ctcggatgaacaagaaagtttggaagatacaatgctcctgagaagacagc

SEQ ID NO: 210020 - DNA, 75 bp, Homo sapiens
ctttgactgtgtcctgctgctgctgctgctactacttacaagttcgttaccgtgaacgcatcaccattcttcgag

SEQ ID NO: 210021 - DNA, 75 bp, Homo sapiens
gctgcagtgagaatacacaggcatcttcaagaactgataaatttcaaacggaagagagtggcagcatttagaaag

SEQ ID NO: 210022 - DNA, 100 bp, Homo sapiens
gctcatcagatgaacctcaggggtcctggacccaagccagaagcctctgcaaagcttccttccagacctgcagataactatgacaactttgtcctaccag

SEQ ID NO: 210023 - DNA, 75 bp, Homo sapiens
cgctttccgggagactggagtcgaaggccgtgagtctgacggttccatcctggccatcgccctgctgatcctgtt

SEQ ID NO: 210024 - DNA, 74 bp, Homo sapiens
cagcaggacacatccgccagcatgcccaagctcttcctgcacctggaaaagatttgttggcatgggatggagga

SEQ ID NO: 210025 - DNA, 74 bp, Homo sapiens
aagagaggttttgaattcacgcttatggtagtggctgttggaaaaattagaggaaagcctcttccattactctt

SEQ ID NO: 210026 - DNA, 99 bp, Homo sapiens
ggattgcgaagcaacagagaatcaatttggatcggcttatcataaccaggtatggctagccatcctccaatacccatcttggaacttgcagaccacatt

SEQ ID NO: 210027 - DNA, 98 bp, Homo sapiens
tggctgggaagaagcatatacttttgaaggtgcaagatactatataaattgagaaaccaaggcagtatcatgagcaggaagaaacacctgagatgatg

SEQ ID NO: 210028 - DNA, 82 bp, Homo sapiens
cctccgcgcgacgtacccgccgccgccgttggctggaggtcttgccccagaagctgcgggcacatccacgcctgaaatgcgg

SEQ ID NO: 210029 - DNA, 50 bp, Homo sapiens
cacctctgtccctacagacacaaggggttatcaatactctggctgaccat

SEQ ID NO: 210030 - DNA, 83 bp, Homo sapiens
gaaatgactaatcaagagtctgccgtacatgtgaaaatggcagaagctcctcctggggtagagacagatcttattgatgttgg

SEQ ID NO: 210031 - DNA, 97 bp, Homo sapiens
tgtggtccaaggaagaaattgatattttgatgaacaatattgaacgctatcttaaggagcctgattccccacgtgtcacattggtccgtgacgtttc

SEQ ID NO: 210032 - DNA, 75 bp, Homo sapiens
acagttcctaccttatgagctcggttttcttatgcttataagagtggaacaggctgttactgaggcggagacacg

SEQ ID NO: 210033 - DNA, 50 bp, Homo sapiens
ggaagatggtgctgatcaaggaattatggcccactgcgtgaccttggttc

SEQ ID NO: 210034 - DNA, 100 bp, Homo sapiens
cgacatggagctgttcctcgcgggccgccgggtgctggtcaccggggcaggcaaagcagcccactcacccagtgtacaacattggaccagacaaggtgat

SEQ ID NO: 210035 - DNA, 76 bp, Homo sapiens
gaagtaaagcccacagagatctacaaccttggagcccagagccacgtcaaaggagttaaatacctgtgcatcccag

SEQ ID NO: 210036 - DNA, 101 bp, Homo sapiens
ccaagccctggtgccaggtgtccatccccgtgctgaggtgaaaggtgtagcagtcactcggcctacacccacagcatcgaccttgtgaacccagcgacctg

SEQ ID NO: 210037 - DNA, 75 bp, Homo sapiens
aaaaaccttcgactatgcagagacatgagatggtagccaacccctcaggtgactctgacatcattagaagcatgc

SEQ ID NO: 210038 - DNA, 153 bp, Homo sapiens
tcaacatggaggagagctactactgccgctgccaccgtggctacactctggaccccaatggcaaaacctgcagccatattgatgatgttaagaagttcaaaccgggttacctggaagctactcttaattggtttagattatataaggtaccag

SEQ ID NO: 210039 - DNA, 98 bp, Homo sapiens
gctactacaaccagagcgaggccggaatttgctgattcccttggaattccgtttttggaaaccagtgctaagaatgcaacgaatgtagaacagtcttt

SEQ ID NO: 210040 - DNA, 100 bp, Homo sapiens
gcgcaatgagtacccagaggaggagagcagtgatggagatgaggattccagagagagaactcgatgccaccgcaacggtattggcgaaccggcaggatga

SEQ ID NO: 210041 - DNA, 100 bp, Homo sapiens
agtgcgcttctgcagcggccgcaagaggccggtgaggcggagaccagtatgccgagattttgctgtcctggaggaccacaccctggctcacagcctgcag

SEQ ID NO: 210042 - DNA, 100 bp, Homo sapiens
aagaaggagcctttggattccggactgggatggaaagagagctgttccatttcctccaagtcaccggcttacagcaaaagaagtgtttgataatgatgga

SEQ ID NO: 210043 - DNA, 51 bp, Homo sapiens
ggaggcagaggtaaacttggagagggttaccacaggtcaaaccacttcata

SEQ ID NO: 210044 - DNA, 74 bp, Homo sapiens
gcaaaattgactactttttatggagcatttggaccagaaaaattcagtttaattggttggggtcagataagaag

SEQ ID NO: 210045 - DNA, 100 bp, Homo sapiens
tggaaatgcccagccctcttcactcgctgccaagggctacagaagtgtgcatcccaaccttccttctgacaagtcccagaatggctgcagtctgtccagg

SEQ ID NO: 210046 - DNA, 49 bp, Homo sapiens
cacaatattaaaactttacctgggagattaaccaaagtgctgataattt

SEQ ID NO: 210047 - DNA, 98 bp, Homo sapiens
attgctacatccgggcccccaccagaaggtggacttagggtccctatgttaactacttgagacaaaaataaatatggccttctacagttataattcag

SEQ ID NO: 210048 - DNA, 100 bp, Homo sapiens
ttagaactcgcgtttccacttcagagatctggtgatgatgaacagtctacacagatggctgcaagttgggaagatgataaagttacagaagcatcttcaa

SEQ ID NO: 210049 - DNA, 82 bp, Homo sapiens
cctaagcctgcacagccgcggcggcagcagcagtgagaggctggatggaaagaaaaccatgcaacgtttatgaatgaattga

SEQ ID NO: 210050 - DNA, 50 bp, Homo sapiens
ggagaatggagacctttcctttaaggctgggctgagggcaaccttgcccc

SEQ ID NO: 210051 - DNA, 100 bp, Homo sapiens
cgaaggaaaaggaggaattcgccgtgcccgagaatagctccgtccagcagagccataagtgtgatccttggtgacaggtggaagaaaatgaagaatgaag

SEQ ID NO: 210052 - DNA, 100 bp, Homo sapiens
aaagacgttgaactctcagtggtcctacctggggatattatcaaatctactactgttcatggcaggatttgaatttgttgaaatgagcagtcgtaaatca

SEQ ID NO: 210053 - DNA, 100 bp, Homo sapiens
atttgttacaagttggcttatgagtggaacatggctagcaggaatgcttactgttgcgtggttcgttattaacagagaatccatcggtctgctgcaaggt

SEQ ID NO: 210054 - DNA, 75 bp, Homo sapiens
cttgcaaaagcagatggaacatgctaaccagcagactggcttctccgactcaaatgaagtgtttgcatcgcgaca

SEQ ID NO: 210055 - DNA, 75 bp, Homo sapiens
gcactggagaagaagcaaggacagctcaggacacgtccaaatatgggtacttccccattatcctggtttcggggc

SEQ ID NO: 210056 - DNA, 97 bp, Homo sapiens
ttgctcctctctccttggcctctcctgggatcggcccaaggccagttctccgcaggtatctcagatgaagacatcatcaacattactcttcctactg

SEQ ID NO: 210057 - DNA, 83 bp, Homo sapiens
ctgtgaacccacccgagagcaacaaagcaggcgactacagccacgtgaagacaatgcagatcttcgtgaagactctgactggt

SEQ ID NO: 210058 - DNA, 98 bp, Homo sapiens
ttcttgacggagaagaggtgtcgcactgccctgggaagaactaggatgaggtattgacttgctgttgccacataacaaaccctgccagaactccctgg

SEQ ID NO: 210059 - DNA, 75 bp, Homo sapiens
ggggtagcggcggcgggagtcctggcgctctgcagatgaaggatttgggggcagagcacttggcaggtcatgaag

SEQ ID NO: 210060 - DNA, 51 bp, Homo sapiens
gcggaagccttcgtctcccagattgcagcttaaagaaagtggttattgtac

SEQ ID NO: 210061 - DNA, 96 bp, Homo sapiens
tggaagttataacgctacacgaagaactaagaatattattagcacaagagcaccatactttgagggagaactatcctatccctgaaccaggcccaa

SEQ ID NO: 210062 - DNA, 100 bp, Homo sapiens
gggtgctatgcgtggcactctggtgatcacctctgcagcctgcacagccgggcctttggactcctggatgctagagtgacctgggcgctgaggagggccc

SEQ ID NO: 210063 - DNA, 116 bp, Homo sapiens
caagaagaagcagcctcatttgttttctggtgtcatcgtaggtggccacctatggcttttggggacctgaaggagaagaaggagaaggtggaggagaaggcaagccggaaagagcg

SEQ ID NO: 210064 - DNA, 75 bp, Homo sapiens
acagcggggcggcggcggcggcggctgcggcccaatataggaggaggtgcgccagtctgtaactcctgccgagcc

SEQ ID NO: 210065 - DNA, 50 bp, Homo sapiens
catcccccgcatcctggtggccgggagtggctgtaaggtgaagaagcatg

SEQ ID NO: 210066 - DNA, 80 bp, Homo sapiens
gaacccaagatggctgcgctgttgctgagcgagtaaccagctcataaatcacatcgaacagtttttggatactaatgaaa

SEQ ID NO: 210067 - DNA, 90 bp, Homo sapiens
gtggagacacggccagatctgccctccaaacattaaccaggtggtatttgttggaaatttcttgagaattaatacgatcgccatgcggct

SEQ ID NO: 210068 - DNA, 74 bp, Homo sapiens
tgtgctgatgacatcagataagcaagtgaagatgttaaagagatctttgccagagccagaaatggaaagtacag

SEQ ID NO: 210069 - DNA, 100 bp, Homo sapiens
ggagaagatgaagatggaggttggcgactagctggatcaaggagggatggagagaggtggcgacctcacagtcctggtgtaccagctggacacagggcat

SEQ ID NO: 210070 - DNA, 82 bp, Homo sapiens
cagctctttccccgtcagcatcccagccgtgctcacggaaagcggagggaaaggccacttccaccactgagctgccccccga

SEQ ID NO: 210071 - DNA, 90 bp, Homo sapiens
cgccgctggagatcctttcctgcttttggtttccctggcaggggttgaactgtggagtgtgtgggaagatgcaatcacacccaatgataa

SEQ ID NO: 210072 - DNA, 98 bp, Homo sapiens
gcgcccgctccggccggccctgcgcctcccgccgcgcccgggatgtattcgtccccgctctgcctcacccaggggaacgcccttttgcttgtgactgg

SEQ ID NO: 210073 - DNA, 99 bp, Homo sapiens
acagtatttcctggacttagctttgtcatgcaaagctgtcatttgctgtcgaaaatatatcgctatcgtctcctatgagcaacgccagaattataagga

SEQ ID NO: 210074 - DNA, 80 bp, Homo sapiens
gaacaagaagctccggaattctgacggtctggaaaatcccgaagcagaagcccgtattcatctaggcattcaagatctcg

SEQ ID NO: 210075 - DNA, 75 bp, Homo sapiens
cacagagacagctcaggaagcaactttgaccccgccagcaggctaagatggctgagtattgccggacgatctttg

SEQ ID NO: 210076 - DNA, 50 bp, Homo sapiens
tctacaagggaaagtggcatggagccaggtgagaatttcaaggattatcg

SEQ ID NO: 210077 - DNA, 75 bp, Homo sapiens
ctgtggttaccttagatgcaagtgatgatggaatcttggccaaaatcgtgtactaaggctcgtacgtctgcatcg

SEQ ID NO: 210078 - DNA, 72 bp, Homo sapiens
acttggcgtgacttcactacttttaagcaaaagagtatatgccattccgccctctgcttgccgggatgaagc

SEQ ID NO: 210079 - DNA, 75 bp, Homo sapiens
gcgcgccttgtcactggagtgcaagaagaaattcccacctgtcaaagagaacactcctatgccaccttcaccagc

SEQ ID NO: 210080 - DNA, 75 bp, Homo sapiens
ggaaagcagatatgcgcgtcagcatactttggcgggtaactcaactggacccaaataaatcattattggaggtaa

SEQ ID NO: 210081 - DNA, 83 bp, Homo sapiens
gtcgtccgttctctcaggctcccgttcaggtgtacgaagccatcgacagcagagatggagcatcttgtgcagagttggtgtct

SEQ ID NO: 210082 - DNA, 74 bp, Homo sapiens
accacttcgaccagcttcatcctcagacaggatagcactataatatgcagaaatctacaaattctgatacttcc

SEQ ID NO: 210083 - DNA, 95 bp, Homo sapiens
tcagcagaagtccaggttcccatgcagagagcacgttttcaatatcataggagcatttgatattccacgctttgtgtacaattcagaaagaaaaa

SEQ ID NO: 210084 - DNA, 90 bp, Homo sapiens
ctgagcgaggcggagaaggtgtacatcgtgcatggcgtccaggggatcccaacaagccctcaggattcagaagtgttaaagctcctgtca

SEQ ID NO: 210085 - DNA, 101 bp, Homo sapiens
tccaacactgataagattgaatgccaagcagaaaattacctaaatgcactctttcgaaagaaagcatatgctactttgattgaaaatgattcaaatccaga

SEQ ID NO: 210086 - DNA, 107 bp, Homo sapiens
caggagacccctctgctgcaccacttcatgatgggcactgtgccccgactgcggcctcgcctcaatgccattctcttcaagctacaattcagcgagcaagtggagaa

SEQ ID NO: 210087 - DNA, 75 bp, Homo sapiens
cggatcctaataaggggaaaatgttcccgatgggtcccggctcggacggtccgatgggcggcatgggtggcatgg

SEQ ID NO: 210088 - DNA, 50 bp, Homo sapiens
cccgggcccggccggatcacgtgggttcatggtgaagctggctgaagaga

SEQ ID NO: 210089 - DNA, 83 bp, Homo sapiens
ggggaccttgccaaccctcccaagaagttcagaggtgacttaagagattaaaattaatttggttgctgttggttctgaacaaa

SEQ ID NO: 210090 - DNA, 75 bp, Homo sapiens
aacgccgtctatttctgcaacagtgagaaagatcagtctaaagaaaaggagaagaaagtgaaaaaaacaattcct

SEQ ID NO: 210091 - DNA, 95 bp, Homo sapiens
ccaaggagctcttacagatggacctgtacgcgctgctaggcattgaggagaaggcagcggacaaagagctgccactgcagagccccgccatggaa

SEQ ID NO: 210092 - DNA, 90 bp, Homo sapiens
ggctccagggcatctcggaagatccaggtcccaactggaagctgaaggtatccagatggttcccatcagctggtgtgagatgcagtgccc

SEQ ID NO: 210093 - DNA, 100 bp, Homo sapiens
acactcggtgtgcgacgtggagatccgaaggaatgaaatccggcttccccacaggcaacgtgaggagagcctgtgcccagaagcaggatgagaagatggc

SEQ ID NO: 210094 - DNA, 75 bp, Homo sapiens
cattggagggggcttccccggaatggagggctccgggcccaagtttgaggaggccctggccaacgtcaacattgg

SEQ ID NO: 210095 - DNA, 100 bp, Homo sapiens
ggaaatcagccctggacctggcagatccttcagcaaaagctgtccttacagtaagagatgctaaaaaccttgtacctatggaccccaatggcctgtcaga

SEQ ID NO: 210096 - DNA, 83 bp, Homo sapiens
ccaaaagagtattcttggatcttgcacaggaaggaattaaaggttccaagagtccaggacatatggtaatactagaccaaact

SEQ ID NO: 210097 - DNA, 90 bp, Homo sapiens
aagcagtggattaatctgaaaaaggttgctccttgagggcaggacagttcttatggctttatccgttgcgtaagcacagagaggtctgcg

SEQ ID NO: 210098 - DNA, 82 bp, Homo sapiens
gtcgctggtctcagctgtcagtgcctgccgtgtactaatggtcacttgatgtgcgctggctgttttatccacctactagcag

SEQ ID NO: 210099 - DNA, 100 bp, Homo sapiens
agacttgtggcaagtgtcgagtcccttgcagattccacgccatcggctgcctcgagacgatcactgtcgtcttcctgaaagatgagaagtaccattcttt

SEQ ID NO: 210100 - DNA, 80 bp, Homo sapiens
tagatgaatgtgtggagatggcgactagtggacaacagaacaatattggaatggtggctggagtgcagtggcgtgatctc

SEQ ID NO: 210101 - DNA, 75 bp, Homo sapiens
gctggagacggcctgggtgctggcgaagcggaggccggaggtcatcatcagatttgaaatatttaaagtggatac

SEQ ID NO: 210102 - DNA, 75 bp, Homo sapiens
ccaggagcctcagcctgcaggaaggctccagggagcagtgtcagggccagggagacgatggtctccgtgactatg

SEQ ID NO: 210103 - DNA, 99 bp, Homo sapiens
gtgatttgctagacttcgggacccacaacctttaagcagcagaggagcacgaggatcgtgggagctaagaagtaaaatcccagaggaatccaaagccct

SEQ ID NO: 210104 - DNA, 83 bp, Homo sapiens
acgcgggcgccaggaccggccgaacgcagagattgacgagatgcctgaggctgccgtgaaatcaacagccaacaaataccaag

SEQ ID NO: 210105 - DNA, 51 bp, Homo sapiens
aacaaggccaacacctatgcaggtaagttctcttctacgctgtatgagact

SEQ ID NO: 210106 - DNA, 96 bp, Homo sapiens
aaagggcctccttcgacttgccaggaaaggctctatgagagcagagttaaacatgaagtttctggagagacagtggtatttcaagggggagctctt

SEQ ID NO: 210107 - DNA, 50 bp, Homo sapiens
gtttagccaacccaaattaccttaattgctgaccaactgactgaagagca

SEQ ID NO: 210108 - DNA, 90 bp, Homo sapiens
cgggctttttggaagtttgtggcggaggtgaggccgaggtgactgcagagcggctcgcgagatgagggaatctcgctgggaagctgacac

SEQ ID NO: 210109 - DNA, 50 bp, Homo sapiens
ccggggtgtaataatgttaactgaggtattacatgaaacctttcctaaac

SEQ ID NO: 210110 - DNA, 50 bp, Homo sapiens
aatttgttcacataaacagattgaatgccgggtctaagttgtagatttta

SEQ ID NO: 210111 - DNA, 98 bp, Homo sapiens
cagagccgcccagccctgccagctgcgccgggacggtctcctctgagcctccggcctccataagacccaaaacagatgacacctcttcccagtccccc

SEQ ID NO: 210112 - DNA, 91 bp, Homo sapiens
ggggccagggaaccctggtcaccgtctcctcagtgcatccacagggacctggctgcccgcaatgtgctggtgaccgaggacaacgtgatga

SEQ ID NO: 210113 - DNA, 100 bp, Homo sapiens
ctgcgccaagctctgcgagccgcagacaccattcgcttttcacccaagatgatttgatgtcttataaaactctgatgaaccatgatggctacacagacat

SEQ ID NO: 210114 - DNA, 75 bp, Homo sapiens
caaagatgagatttacctgtgagatgtttcatcccaacagtgttatgtctggctgtagctgttggtcacgtgaag

SEQ ID NO: 210115 - DNA, 75 bp, Homo sapiens
gagctggacccggaccggttttggtgtcccttttgatgagaagaataagcctcattctgattcaacagcagagat

SEQ ID NO: 210116 - DNA, 76 bp, Homo sapiens
gaggctgcggaggcgacgccggagagaacgaagcctcggctgggagcgattgctcgctgtaagcagctcatctgtg

SEQ ID NO: 210117 - DNA, 83 bp, Homo sapiens
catgtctgcgagccaggattcccgtaatttctatgcagcccccgacccagagccgagctccacttctgctccggctgcccccg

SEQ ID NO: 210118 - DNA, 97 bp, Homo sapiens
tatagcacaatatcaacctgaagtggaagatagatgataagcctgtaaaaattgacaagtgggatggatcagctgtgaaaaactctttggatgattc

SEQ ID NO: 210119 - DNA, 100 bp, Homo sapiens
tcattctgccttattacgccgtctccaagatgtagctaatgaccgtggttcccactgaggttttgctgttactgctcagtgtagtcacaccttgaataag

SEQ ID NO: 210120 - DNA, 75 bp, Homo sapiens
cgccgcccgactgccatcgcccggcccggccgcgcccgcggaaccagaccaggcccgacaacaagctcaaatacg

SEQ ID NO: 210121 - DNA, 97 bp, Homo sapiens
gtgtgccaggccgggtgctgggcacggtcccgcgagttttcggctttgtgagaaaccttaccatcaaacacgatggccagcaacgttaccaacaaga

SEQ ID NO: 210122 - DNA, 100 bp, Homo sapiens
ggcagtaccgtttcctcagcggcggacattcacggcatggtgtaactcccacctccggaaggcggggacacagatcgagaacatcgaagaggacttccgg

SEQ ID NO: 210123 - DNA, 75 bp, Homo sapiens
gccaagtgggacaactttctggcttttgaaaggctccttcttcagagcacagcaatggaggaaacagctatatgg

SEQ ID NO: 210124 - DNA, 98 bp, Homo sapiens
ttatagatcttctgcactgtttacaggcacaggagttgatccccctcatattgtgtacagcatgtctacatcctgagcctaaagagcgagatcagctt

SEQ ID NO: 210125 - DNA, 82 bp, Homo sapiens
gagcattcgaagtgacctcagcagggcatccaggtgtggaatatcaaacaaatgattaagttgacacaggaacatatagagg

SEQ ID NO: 210126 - DNA, 95 bp, Homo sapiens
gcgtccgccgattcctcctccttggtcgccgcgtccttggctggcgtgcggctgcaggcttcagcctgcgctggttggtgaaacagagatgtcag

SEQ ID NO: 210127 - DNA, 82 bp, Homo sapiens
tcgggagcaagggggctctgctgcatcttccaatcttccagggctgcaataggatctgtggctttggacacagcaaggtcac

SEQ ID NO: 210128 - DNA, 75 bp, Homo sapiens
agctgctgcggttcctgagccggagaattaaacaaccaccatgtcgagcaaaaaggcaaagaccaagaccaccaa

SEQ ID NO: 210129 - DNA, 100 bp, Homo sapiens
ctccttaagaaacttaaagcctggaatgatatcaaaaagcaagcaggcagctggtgtggaagaatggcggtgagccattcagtgaaggagcggaccatct

SEQ ID NO: 210130 - DNA, 51 bp, Homo sapiens
atcccttggtgctctccacgctgttcagttcctcagcactttgtttgcccc

SEQ ID NO: 210131 - DNA, 90 bp, Homo sapiens
ggttagtgtgctctgagggagggtccgagccagccgctgttttgccggaggagcccctcaggccgtgctccatctcgaaaagcgagaaag

SEQ ID NO: 210132 - DNA, 74 bp, Homo sapiens
agagagggaagtcgcctctgtgctcgtgagtgcatggggtataaggtgtctgcaattgaactccaaggtgcaga

SEQ ID NO: 210133 - DNA, 90 bp, Homo sapiens
tcttccggacagactatggtcagtttgagttcctgagatctagttggtgagagacatgatgttctaccggttgctgtcgattgttggaag

SEQ ID NO: 210134 - DNA, 100 bp, Homo sapiens
tgctgtccgtgcgcgttgctgcggccgtggtccgcgcccttcctcggcgggccggactggctgtgaatggacagagggagggattaccccggtgttcgag

SEQ ID NO: 210135 - DNA, 50 bp, Homo sapiens
ctgcttacctggacaatctgcagagcaaaatatgctgtgaattccatcaa

SEQ ID NO: 210136 - DNA, 50 bp, Homo sapiens
gtgaggagttgctaaatgctcaggagagaagccttataaatgcacctggg

SEQ ID NO: 210137 - DNA, 96 bp, Homo sapiens
agcagtagctatggcagtggcagaagattttaattagaaaactgtcgctgaaaagcaggagaagagaaatcaggatcgcttgaggaggagagagga

SEQ ID NO: 210138 - DNA, 98 bp, Homo sapiens
agcaggtctcctatatgttgatgaccctaactggtctggaataggggttgtcagcattagtgccagcagtagttcccaagggctgtctcagccatcca

SEQ ID NO: 210139 - DNA, 98 bp, Homo sapiens
aagcaagtggaaaagcagctcagatggctcgcgagcaaaaccaccatacctgggaccagggcgccaataacaggtttatcaggtagaagatgtgtgtg

SEQ ID NO: 210140 - DNA, 101 bp, Homo sapiens
cacggccagatctgccctccaagaagcagggccctgagcggaagaggattaagaaggagcctgtcacccggaaggccgggctgctgtttggcatggggctg

SEQ ID NO: 210141 - DNA, 85 bp, Homo sapiens
aagatgttccaggcacataaggaggcgattagagaggccagggactaccgcgccatcccagagctggacgcctatgaggccgagg

SEQ ID NO: 210142 - DNA, 99 bp, Homo sapiens
aagagaagcatttagagagcatcagcaataggcaaacttgaagataaatcttttgactccagctctttagaggatctaaagtgaccttgatggacagtg

SEQ ID NO: 210143 - DNA, 100 bp, Homo sapiens
aggaggaaaacagttccgttcattctttcacaggaaggagggagccccaggaacaggagtcccaccgaagaactgctctctgacagaacagagacctcct

SEQ ID NO: 210144 - DNA, 74 bp, Homo sapiens
cgccatgaacaactcgggcgccgacgagatcgggactttccttatcccagttgattgtgcagaatacactgcct

SEQ ID NO: 210145 - DNA, 74 bp, Homo sapiens
tttctctctcgtcctcgctgctgtacttcgtctatgtggcgcccggcatagagtactattaatcccgtagatgc

SEQ ID NO: 210146 - DNA, 50 bp, Homo sapiens
tttgggtctatgacgttggagagactgggctggcttagatgaagatgaag

SEQ ID NO: 210147 - DNA, 97 bp, Homo sapiens
agtgtccgatagatggtgcagtggcaaatgaaatggcgtaatcgagtgtgttctaggtcagtggcttcaaagactccagttggattcattggactgg

SEQ ID NO: 210148 - DNA, 98 bp, Homo sapiens
tgaccactgcggcagcctgctctggggactggtgaagcagggattaaagtgtgaagtcaccaggagactaaagtccatcaaaaacatccagaaaatta

SEQ ID NO: 210149 - DNA, 75 bp, Homo sapiens
aggacacttggaaattgaacaagcgtcacttgacaagcctatagaatcgacactcttgcactcctgtaatgagcc

SEQ ID NO: 210150 - DNA, 75 bp, Homo sapiens
tgcaggacaccgacatggaacagggactcactggggtgatcgaactgtgagaatttggaaggctcgcaatttgca

SEQ ID NO: 210151 - DNA, 82 bp, Homo sapiens
aagtttctctggactccctggatctccgagtcaaaggaattctgtcttcacaagcagaagtggtacaggagctgcagcaggc

SEQ ID NO: 210152 - DNA, 74 bp, Homo sapiens
ctttccctggtggtgcacggaccgggggacttgcgcctgttagaagaacccgaagaacctaaagtgctaacacc

SEQ ID NO: 210153 - DNA, 98 bp, Homo sapiens
ctggcgtggtgtcaagtttaataaccctgtctttcgcagcacggtggatgctgtgcaggaagccatcggtatcagattctacccctgcattctcagat

SEQ ID NO: 210154 - DNA, 83 bp, Homo sapiens
tgaacatcagagatcagccctttggtattcagctacaccatttccaaatagcttcaagtgctttacttgtgaaaacgcagggg

SEQ ID NO: 210155 - DNA, 75 bp, Homo sapiens
ccgtgtggcacgacacaaaaatcagatggtggtggcctggggcaccggccaggtgggcctcggtggcgaggtggt

SEQ ID NO: 210156 - DNA, 75 bp, Homo sapiens
attacagaggagtttcatggcactaagtcaagatgaacgtcaaggtcgtgggaaataaaaggcagttctacacag

SEQ ID NO: 210157 - DNA, 100 bp, Homo sapiens
ttttgcggaacctgaaaaattcaagaagttgaaaaacgcttttcacgtcacctggagagatgcacagttgtcgagatgtccacagaaggaggatttggtg

SEQ ID NO: 210158 - DNA, 100 bp, Homo sapiens
cttatcaaggacggcaagctgatcaagaacaatgcctccactgactatgacctatctgacaagagcatcaaccctctgggaaccagcggggaaactgagg

SEQ ID NO: 210159 - DNA, 82 bp, Homo sapiens
cagagtccttgctgggggttcggggagcgcttggaccccggcttctgggacgcgtcagcaattctgtggtgttcttggtcac

SEQ ID NO: 210160 - DNA, 75 bp, Homo sapiens
caaggtgtgggctaatatcaggcttcaggaaaaggatgcacaggaacaaacgagggaatatgcctcctatggaac

SEQ ID NO: 210161 - DNA, 98 bp, Homo sapiens
tcaggacgtggacttggtgtgcattaacctgccgccgcccctcaccagacagatcgctgtcaaaaccctaggaccaagaatcgccttcagccctgtct

SEQ ID NO: 210162 - DNA, 82 bp, Homo sapiens
agggagaaaacaaaggcggccggcctggtgcgcaaggccccgaacaacaggtgaccctggcaaagatgagagtgcacatttc

SEQ ID NO: 210163 - DNA, 100 bp, Homo sapiens
agggcgtcaggtccactgggaaggtaacacgtacacagacctctcggccggaatctccagggatgaccagcccctccccacgcatccagataatctccac

SEQ ID NO: 210164 - DNA, 80 bp, Homo sapiens
ctgccaccgagccgggcccacctccccaccaaggaagatctctgttgaggagctggcgcggaatctggtcatcaaggtca

SEQ ID NO: 210165 - DNA, 100 bp, Homo sapiens
ggtcgtgcggcaagtgagcgatttggtgaacagacactcccttctgtagaaggcaacagactactgcaacagaaactatccttagatgggaaccccaaac

SEQ ID NO: 210166 - DNA, 100 bp, Homo sapiens
gacctgcagcgcccggctgcctcgcactccgcctcccccggctcagcccccggccgcggcgggacccgaggtaagaatgattgatgttggctgatattgg

SEQ ID NO: 210167 - DNA, 51 bp, Homo sapiens
gttccttagaaaggagcagcaggtccaagacaactttgacaagattgaatt

SEQ ID NO: 210168 - DNA, 101 bp, Homo sapiens
gaagatggtgcagaagaaaccagccgaacttcagggtttccaccgttcgttcaaggtgtctcccagtctgctaaagccctaaggccatcaccatggacttc

SEQ ID NO: 210169 - DNA, 100 bp, Homo sapiens
tgaatgtgactgtgggagtggacgggacactctacaagcttcatccacagggagttgctgagtcagcccagaccggaaggagtggcagagatcatttgcc

SEQ ID NO: 210170 - DNA, 95 bp, Homo sapiens
cctcctgagtagctgtgattacagtacttggaccatgagactgtttcagccactttcatcgacagcagtggacagtttgtttcctcccaggtgac

SEQ ID NO: 210171 - DNA, 75 bp, Homo sapiens
cctcctccacctcccacatttcatcagagattaatgattcatcaagggatagttgtacttgtctcgtgggaatca

SEQ ID NO: 210172 - DNA, 100 bp, Homo sapiens
agaagaggatgaatggagaagtgacagaaaaagtgagagttacagcgaaagttcaagaaataaactatcaatcttgcccagactggagaaaggactgcag

SEQ ID NO: 210173 - DNA, 100 bp, Homo sapiens
ggatgggaagttaatgtttacggcgaagtctactcaacgtttccaagcctcctgacaaggtgatccgggcgggccccgcaggaattttatcccctcaccg

SEQ ID NO: 210174 - DNA, 98 bp, Homo sapiens
cgggactgtgagacgacaggctgtggatgtgtcccccctgcgccgtgtgaaccagatgcggttcatgctattattcagccggcagggaaaactgcggc

SEQ ID NO: 210175 - DNA, 49 bp, Homo sapiens
ccagaagctagagccgcaaaggaagaaggagaaagggccaacccctgaa

SEQ ID NO: 210176 - DNA, 51 bp, Homo sapiens
gaacaatcagtgatgaagatgaatcgattgatgtacagctatatattttgt

SEQ ID NO: 210177 - DNA, 98 bp, Homo sapiens
tcattatgaccagagtattgccgcggtggaaatggagatcatcaatgctgtggtactgttgattttattgagtgccctggctgatccggatcagtata

SEQ ID NO: 210178 - DNA, 50 bp, Homo sapiens
tgccctcaacatctctcagagacgaaaggctcattggtgggcagtattac

SEQ ID NO: 210179 - DNA, 75 bp, Homo sapiens
atttaattttagggtcctttatatagaagggagagtagatctccagtctatgtgctgaagaagcagcagcccaag

SEQ ID NO: 210180 - DNA, 76 bp, Homo sapiens
tggacctcagactcctgcccgaggcctggcgtggtcttggagacgagacagcacaggctgttctgtgccgacccga

SEQ ID NO: 210181 - DNA, 100 bp, Homo sapiens
gctcagatggagaatatccgatgttatctgccagatgcctataagattatgtctcaaagggcgaacgctgttggagaagctgttcagccagcaggagaac

SEQ ID NO: 210182 - DNA, 78 bp, Homo sapiens
ttgaataagtgttttaagaaagtggacaaagagaggagtcaggacagttcgtgtttggttaaagagagacagtggaca

SEQ ID NO: 210183 - DNA, 75 bp, Homo sapiens
gaaaaacctgtatgtggaaccacctgtgaatcagtggctaacctggttagaaactgctgaagaagaagaatcaga

SEQ ID NO: 210184 - DNA, 100 bp, Homo sapiens
acctagttgagacagaagatggatatattctgtgccttaaccgaattcctcatgggaggaagaaccattctgacaaagtaattagtgaatgccaaaggca

SEQ ID NO: 210185 - DNA, 98 bp, Homo sapiens
acccttggaaaagtgtctcggctcagctaatggaaatggagaccttgattctgatcccactgtttggaatcatgtcatcagattctgcagatcctttc

SEQ ID NO: 210186 - DNA, 98 bp, Homo sapiens
ggctgcgccgagggtgtggcggcggcgcttacccccgagcggctcctggagtggcagggtaaagtcagtgataaatcttttgtttgctgcatatactg

SEQ ID NO: 210187 - DNA, 83 bp, Homo sapiens
gtttctggaagaagaagaagagcatgatcggcatgtccaccaagagaggaggttcagatgagcccctgctgacttgagagaga

SEQ ID NO: 210188 - DNA, 83 bp, Homo sapiens
gccgtgtccgagggcaccaaggcggtcaccaagtacaccagctcgaaggtcctggttactgggtgaagattcatcacttagaa

SEQ ID NO: 210189 - DNA, 98 bp, Homo sapiens
cgccacacaaggggagctcgtaaggtccctcaaagcgggaaatgcgtcaaaggagtctggttggaagcaaatgtttttttaatggacttgcatctcct

SEQ ID NO: 210190 - DNA, 83 bp, Homo sapiens
cgctgcgccgcaacgccgagcgcaccgacatctgcctgctcaaagcgggagatacagatgacccaccaagaattactcagaac

SEQ ID NO: 210191 - DNA, 102 bp, Homo sapiens
ttttgcctgacagactaagagcaaagctacttccattccagaaagatggcatcatttttgccctcaaaagaaatggcagtttgcagttaacatgtttcgaac

SEQ ID NO: 210192 - DNA, 100 bp, Homo sapiens
acagcgtccatgccaccgctttcatcatcgtccagggctatgtatgtcaaaaaggatgttcctttgtggcaaaaacatggacggaacttctgaaacatgt

SEQ ID NO: 210193 - DNA, 80 bp, Homo sapiens
tatgcggtgttgagagaaaacctgagtcccacaacaattgaaactgcactacaacagatgaggatgaggaagggaaatta

SEQ ID NO: 210194 - DNA, 82 bp, Homo sapiens
cgcctcacacgcttcctctccagagtgatcaagtgtgacccgtgtccacaggatgaaatgtccgagtcaggccagtcctcgg

SEQ ID NO: 210195 - DNA, 50 bp, Homo sapiens
acgtgatccatctggctcctccaagcttcttctcatatcggtaattccac

SEQ ID NO: 210196 - DNA, 83 bp, Homo sapiens
ctcagaacgagtgacacttcacatttgtgcttctacaaaaaaaaactcatcactgctatatatgcagattatgcccggagttt

SEQ ID NO: 210197 - DNA, 86 bp, Homo sapiens
gaacagacaaagaaacactctccttctgccacatttgttttgagctaaatattgagggggaacgcccttttgcttgtgactggcag

SEQ ID NO: 210198 - DNA, 100 bp, Homo sapiens
ggaaggactcctggaatgccacaaatgcaaatacttgtgcactgggagaggtgccgtgagcgatgtggagatgcaggaacactatgatgagttttttgag

SEQ ID NO: 210199 - DNA, 82 bp, Homo sapiens
ctcttgagcaccacactgccagtttgtagtctatcatctggaaaatttgggacattacttagtggttcatgggacaccactg

SEQ ID NO: 210200 - DNA, 74 bp, Homo sapiens
cgttgctttgcctgggcggtgcggacaagcgcctgcgggccaattcctgtccccccagcagcatggcatcgtgt

SEQ ID NO: 210201 - DNA, 90 bp, Homo sapiens
gaggctggctgcatcatgggagaagaggcccgatgagagaaagggaaagttaaggatgctggagcagaacaatggatttctctttctctt

SEQ ID NO: 210202 - DNA, 98 bp, Homo sapiens
gaagaccaaagaggatgagaaggacgacaagcccatccgagctccgggaagcagtttgttcgctatataaacatgttgataaacgacacgacgttttt

SEQ ID NO: 210203 - DNA, 50 bp, Homo sapiens
gacagctgcattcaatcttttgattttggggtaagtgcgttcctagcaac

SEQ ID NO: 210204 - DNA, 49 bp, Homo sapiens
gctgttacttcagggccatcagtttgatttggccaactgtaacttaaat

SEQ ID NO: 210205 - DNA, 50 bp, Homo sapiens
cgaggagctctccgagaagcaatgaggtcactgagtcaaggaagcacaaa

SEQ ID NO: 210206 - DNA, 98 bp, Homo sapiens
gaaggttggcctgacaaattatgctgcagcatattgtactggcctgctgctggcccgcagggagcatttcatactactgaagctgaagctagttctca

SEQ ID NO: 210207 - DNA, 88 bp, Homo sapiens
caatggcctatccaaggacatgagcagtttacacatctcacccaattcaggaactgcaagcacatgttgaccagataactgaaatggc

SEQ ID NO: 210208 - DNA, 50 bp, Homo sapiens
cccccattggaccagtgtttgcttagatggtggatgcttccaaaagcatc

SEQ ID NO: 210209 - DNA, 100 bp, Homo sapiens
agagcagcctccgtcgctgtcgctgagagcctcacgagtcgaggtcctgcaggtggagctccggcagccgccctgaaatgttttagcaagtgcatcagct

SEQ ID NO: 210210 - DNA, 88 bp, Homo sapiens
tataaacacaatagaacctgtcaatattgatggtcactttccgtatcctgatccttcccagtggacagatgaagaattaggtatccct

SEQ ID NO: 210211 - DNA, 100 bp, Homo sapiens
atgttggctgtggtgaatcacaagtagatcacagcaccatacattctcaggcacgtgtggttctcaaatataggcattctgatgggaacttgtgtgttaa

SEQ ID NO: 210212 - DNA, 101 bp, Homo sapiens
ggcccaaaggggaagcctagcggagctcagtgtggcagctgctggcctctgggccggtttcacaagaagtactgtggctgtatacagtacctgtatgctgg

SEQ ID NO: 210213 - DNA, 117 bp, Homo sapiens
ctccagagccatgactagatccaatggattctgcgatgctgtctggactttgctgtctctgaacagaacatgcttgccaactcagccagcgtgaggatcctcatcaagggaggcaag

SEQ ID NO: 210214 - DNA, 98 bp, Homo sapiens
tgctcctcgaccccccactgatcgcgctggataaagatgcgcctctgcgatttgcagggtctctggacaccagctcttccatcaccagccagcctgag

SEQ ID NO: 210215 - DNA, 75 bp, Homo sapiens
cttggcatgttggtctggtcacccaatcaaaatctgtcagaagcaaagttgaagttattcgaagtcattgaaact

SEQ ID NO: 210216 - DNA, 97 bp, Homo sapiens
gtccgcttgaccgagatgctgcgggcctgtcagttatcgggtgtgaccgccgccgcccaggctgctctttggcgtaaattgcaatcgattagggatc

SEQ ID NO: 210217 - DNA, 100 bp, Homo sapiens
catgcgactctgtatccaagccattagtgtgactctggatccagatacagctcatcacgaactaattctctctgaggatcggagacaagtgactcgtgga

SEQ ID NO: 210218 - DNA, 100 bp, Homo sapiens
ctaaggggtatgcggtgcccacatgccactgggtcctcagcagtaccacctgggggtgctcaaaggatttaaaggagaactaattcatgtatttaacaaa

SEQ ID NO: 210219 - DNA, 74 bp, Homo sapiens
ctcctgagtagctgctgggtcctcacagcagcacactgtttcaagagatggtgtcctcagaccgaagccaactt

SEQ ID NO: 210220 - DNA, 83 bp, Homo sapiens
caagagatgatcaggataatgtaacgattgcactttgtttactcctggcttgggggcattaggaagcactggaggctcttcgg

SEQ ID NO: 210221 - DNA, 90 bp, Homo sapiens
tgttggacaagttggtatggcgtgtgctatcagcattctgggaaagttgcagagcttgaagtgaaaaccagagaaaaattagaagctgct

SEQ ID NO: 210222 - DNA, 82 bp, Homo sapiens
gggaacatggacatgaagaggaggatccacctggagctgaggaaccggaccccggcagctctgtgttggggtggaagaggag

SEQ ID NO: 210223 - DNA, 82 bp, Homo sapiens
aaacgctttatgctgaagccctatgaatcatttgaagaacttacagctgctgaggagcttgatatggaaaatgaatttttat

SEQ ID NO: 210224 - DNA, 75 bp, Homo sapiens
ccctgaaagcattaccgggttcgctaggctcacagataagagtgcccaggagtggaatctggaaatagagtctac

SEQ ID NO: 210225 - DNA, 100 bp, Homo sapiens
cgagaagcataatgacattgtggacagtgacagcgatgctgaggatcgaggaacgttgtctgtccaagtggtaagaagttcagaagcaagcctcagttgg

SEQ ID NO: 210226 - DNA, 83 bp, Homo sapiens
ccggagcttctcagaagacagagggttttcttttgagaaatacactttcgggaaatggcctctaaatcctggctgaatttttt

SEQ ID NO: 210227 - DNA, 100 bp, Homo sapiens
cttgagccagggagttgaaggctgcagtgagccctgtttttgccaccacactccagcttggtgtgaccgcaacaagggaaaacatggcttatactgtgga

SEQ ID NO: 210228 - DNA, 98 bp, Homo sapiens
cagcagccaaggtgtttccaggaagttcagagagaacagccaacaagcacaagccatggattgaggcagagtaccagggcatcgtcatggagaatgac

SEQ ID NO: 210229 - DNA, 74 bp, Homo sapiens
ccgtctcagacaccagaggctcccacttgaccaggtgttggtgaaaatttgactgacccatctgtgataaaagc

SEQ ID NO: 210230 - DNA, 88 bp, Homo sapiens
ctcgcgtccggagtccccgtggccagccctggaacagctgctgacagagttggatgacttcctcaagattcttgaccaggagaacctg

SEQ ID NO: 210231 - DNA, 75 bp, Homo sapiens
cggtggtttggacgccggcggagacgcgggcgagggtgactatgaccagagcaggaccaaagtgctgcacatgag

SEQ ID NO: 210232 - DNA, 98 bp, Homo sapiens
cagctgtctgattaatgagaaacataatgtattttggtgattcgcaaggggtggctcaccatcagcaacattggcatcatgaaaggcggctcgaaggg

SEQ ID NO: 210233 - DNA, 51 bp, Homo sapiens
ctttggatccgcagaaatcgagtgcctttgttccattgaatgttcccaata

SEQ ID NO: 210234 - DNA, 75 bp, Homo sapiens
tttgaggcggccgtgaaggtgatccagagtttgccgaagaatgcacccccaaattcagaaggagtcccagtatat

SEQ ID NO: 210235 - DNA, 100 bp, Homo sapiens
agagaggatgttctagaggcatggttgaaattgaattgactatgatttaatctccaaagaaccaaagccttttgtatttgagggaaaagtacgtggtcct

SEQ ID NO: 210236 - DNA, 100 bp, Homo sapiens
atgggttttaactacagacccagtctctgccaagagaataaaggcagccccgttgatgactgaaaatgacaaagcatccacctaacagacgaggaatcag

SEQ ID NO: 210237 - DNA, 75 bp, Homo sapiens
cgggaagtgcttggggatggagtgcctccaaaggttgctgagaaatgatggaagaattgcatagcctggacccac

SEQ ID NO: 210238 - DNA, 101 bp, Homo sapiens
gtggagtccgagctgagatccatctgcaccacggtgctgttctcttgcaactagcaagtgaagccttgccaaatgacatgaccttggctcttgcttacctt

SEQ ID NO: 210239 - DNA, 75 bp, Homo sapiens
tatagaccctgttacacaagaatttaaggtctctctgaagaggctatcatggagctgaacctgccgactggtatt

SEQ ID NO: 210240 - DNA, 51 bp, Homo sapiens
caagaaagccaaacgaggagaggaattttctttaaggaaaaacagtagtgc

SEQ ID NO: 210241 - DNA, 106 bp, Homo sapiens
agaaaaggaaactcacttgactaatcttcgggcagagagaaggaaacacttagaggaagttctggagatgaagttcgatacaagaggctgttttcctagcgtggct

SEQ ID NO: 210242 - DNA, 101 bp, Homo sapiens
acttgaagccctacgccgtggacttccagcgcagcttgtacctccttttaaacctcaagtaacatctgagacagatactagatattttgatgaagaattta

SEQ ID NO: 210243 - DNA, 100 bp, Homo sapiens
atggagaaattgtatacactggaacagaatcaacccagaacggatagctccctcctggaaaaggaatgaatctgaagtctgctgcagtaaaacacagaag

SEQ ID NO: 210244 - DNA, 100 bp, Homo sapiens
gaagacgactatgaagctgcttctgatttttataggaagggagttgatttactcctagaaggtgttcaagtgaatgaactcattcttaaacagaagcaaa

SEQ ID NO: 210245 - DNA, 95 bp, Homo sapiens
cccagggtggcaggggaggggtagggtaaaaggaagctgaagagggaactacccttttcattccgatcaattaatacgagagaaaacctgtatct

SEQ ID NO: 210246 - DNA, 83 bp, Homo sapiens
cagagcctcgcctttgccgatccgccgcccgtccacacccgccgccaggtctgtctgctatcagctatgccgctgcccgttgc

SEQ ID NO: 210247 - DNA, 113 bp, Homo sapiens
ccgaaagatgtccaggtcgggcgcggcggctgagaaggcggactccagacagcgaccccagatgaagggcggcgactggcggcgcgatggacctgaccgggctcctgctggac

SEQ ID NO: 210248 - DNA, 98 bp, Homo sapiens
cactgcaatgtttttgtggaacatggatcccttgacaagattgctgtggtaactgctgacgggaagcttgctttaaaccagattagccagatctccat

SEQ ID NO: 210249 - DNA, 97 bp, Homo sapiens
ccggctcacctggcggtgcccgaggagtagtcgctggagtccgcgcctccctgggaaaacccttctgccacgctggaggacctggagaagccggggg

SEQ ID NO: 210250 - DNA, 101 bp, Homo sapiens
actttctcctcattgaagctatgcagtatttctttggcatcactgcagctagtaatttgccttctggattgctaaagtaaataatgccagcctgattggac

SEQ ID NO: 210251 - DNA, 100 bp, Homo sapiens
ttgaaggaaaaagttgcatacctttcagcttctaagtgccagatgatggaggagcgtgccaacctgatgcacatgatgaaactcagcatcaaggtgttgc

SEQ ID NO: 210252 - DNA, 100 bp, Homo sapiens
gtcaatttcaccccaagctgtacctttgagggagaaaacactgtcatgatgctccagacggctagtgctatgctggaaaatgagaagaagaagcgtgaaa

SEQ ID NO: 210253 - DNA, 88 bp, Homo sapiens
aagcgaagttcaggaagagtgacctgatgactatcagccagttcgtctgctcagtaaacctggggaactgagaagagaatatgaagag

SEQ ID NO: 210254 - DNA, 88 bp, Homo sapiens
gggggcgtggtcaagcaccacattgccaatgccaacctcatgacaggggcaagtgtccgagtggtgaatcagctacttacagagatgg

SEQ ID NO: 210255 - DNA, 83 bp, Homo sapiens
cttaaattcccgaagggcaagaagttaaccaagtaaaacagcatcggaacaccagcactccttgctcaagacccctccccagt

SEQ ID NO: 210256 - DNA, 112 bp, Homo sapiens
gtgcagagcgccgtctggagccgagatggagccctggtgggcacggcgtgcaagagtctctggccagccgcagagtgtgaccgcctcctcggacaaggcttttgaagactgg

SEQ ID NO: 210257 - DNA, 90 bp, Homo sapiens
ccattccttccatctgaagatcaggtatccaaaacaaggtggtctgactgacagcttgggtaacttgaagaaccttacaaagctcataat

SEQ ID NO: 210258 - DNA, 50 bp, Homo sapiens
gtggctctcctgttccagcaattggacaagttggatggcttgaggactgg

SEQ ID NO: 210259 - DNA, 90 bp, Homo sapiens
cacagacctgcaggttccggcccctcttttctcaacccagagcaaattgaaacgtccggagttgaagtattgataacaccaaggaactct

SEQ ID NO: 210260 - DNA, 90 bp, Homo sapiens
ggcattcaaggaccccctggccccaagggagaccccggtgcctttggactgaaaggagaaaagggtaatcctgggaatggtgacgcttgg

SEQ ID NO: 210261 - DNA, 100 bp, Homo sapiens
cacacaaggtggatggaagagttgtggaaccaaagagagctgtctccagagaaattccaaatcctttatttgatctggctggaataacgtgtggacactt

SEQ ID NO: 210262 - DNA, 75 bp, Homo sapiens
tagtctttgctgcttatggaaatgttttctctgcatttgcccgtaataaagaggaagaaatgagctccatgcctg

SEQ ID NO: 210263 - DNA, 82 bp, Homo sapiens
ggaacggaggccagagctgcggaattacatgaatgacagtcttcgaaccaatgtgtttgttcgatttcaaccagagactata

SEQ ID NO: 210264 - DNA, 101 bp, Homo sapiens
gactcttggcctgtccctcacatccgatgcaccctttttgtcagattatcaggatgaggaccaccgctgaaacttcacttctacacagaggctttctttcc

SEQ ID NO: 210265 - DNA, 90 bp, Homo sapiens
gaggccagctttgtcctgcacaccattggcaaaactgtggagtatctgcactcacaggggccatccagtccaatggatcagatgggcaag

SEQ ID NO: 210266 - DNA, 75 bp, Homo sapiens
cgcgggaggtgttcgagaacgaccccgagacggcaggaaaaatactattgtattacaaggctcggaccaaagaca

SEQ ID NO: 210267 - DNA, 74 bp, Homo sapiens
tgggcgacgagctgaccctgggagacatcgacggttatcaatactctggctgaccatcatcatcgtgggactga

SEQ ID NO: 210268 - DNA, 82 bp, Homo sapiens
ttgattcacagtagataaagctggcagtaagaaatgctaagcctgtgcctactacactggcacaagtggatagagaaaagat

SEQ ID NO: 210269 - DNA, 82 bp, Homo sapiens
ggccggagcagccgcgggcgcccgaggggccgagcgagggggatatgagactttctactcggaatatcctgagtgttgcgtg

SEQ ID NO: 210270 - DNA, 75 bp, Homo sapiens
gcgggaccccagcgcgggcggcggcggctgggcgggagccccagagcccagcgcagctctgtttgaggcctgctg

SEQ ID NO: 210271 - DNA, 87 bp, Homo sapiens
aggatgtcatccccatggctgatgcagcaggcatcatccgctatgcaattgggaactgggcacctccgggctgtgaaaagttaggga

SEQ ID NO: 210272 - DNA, 75 bp, Homo sapiens
gttagatcgaagtgatcttattgcttagaccatgctcagcctccaagcagccttgtcatcgacaaagaatctgaa

SEQ ID NO: 210273 - DNA, 100 bp, Homo sapiens
acacaatggcttctttggatgaattaaaagtatctatagggaatataacactctccccagcaatatctcttagcagtgtctgcaaaaacgaatcttttcc

SEQ ID NO: 210274 - DNA, 82 bp, Homo sapiens
cggcgccccggccgaggtggcggcggctcctcagcccagctcaacattggcaatgtgctccctgtgggcaccatgcctgagg

SEQ ID NO: 210275 - DNA, 100 bp, Homo sapiens
gccgttgagaggaccatcacaacctgagcagcacagatgaagactggcccatttgcagagcactccaaccagctgtggaacatcagcgccgtcccttcct

SEQ ID NO: 210276 - DNA, 87 bp, Homo sapiens
cgcttcgaagccgagaaagcccgctgggaggccgagcgcgccgagttacaggtgacaccggaaactggtactcaagtgatgaggatg

SEQ ID NO: 210277 - DNA, 75 bp, Homo sapiens
gaaaaagaagttcatcagattcaagatgcttgctctgtcaaggcacagcctattgtctcctttgctcagtgtgac

SEQ ID NO: 210278 - DNA, 100 bp, Homo sapiens
gagcatttgtgttgatgaagatgaaagagactgcaggtggctcgaacatggcacaagttgataaaaacacggcaggaacaaggtgcagaaaatgaagagc

SEQ ID NO: 210279 - DNA, 50 bp, Homo sapiens
aaccggtagcgcttgcagcatggcagacgcgtgccatgcctaccagatca

SEQ ID NO: 210280 - DNA, 88 bp, Homo sapiens
tctagcccagtggaccttctgaagaacatggtccaagacaattcctgggaaagttcagttcttctcaagtgagggttctgacacatct

SEQ ID NO: 210281 - DNA, 79 bp, Homo sapiens
attcgtggcgccacaagctcattcactgtgtaggtgctggagaatctggtaaaagcaccattgtgaagcagatgaggat

SEQ ID NO: 210282 - DNA, 90 bp, Homo sapiens
gtcaaaagcatgtggtcacattacttcaggctccttctcctgaaaaagccgaggaggagagtgagaggcttctgagggaactctatttgt

SEQ ID NO: 210283 - DNA, 100 bp, Homo sapiens
acaattactgatgggagcaagttgactaccaccagtggagtccaggatgagagaacactaaactctacatctcccttcccgagcaaggagctggctgaag

SEQ ID NO: 210284 - DNA, 74 bp, Homo sapiens
tatctaacatcgtaaccagagaagaaaggagactcacttatgtgcacaatgcaggagcgagaacccgagcagcg

SEQ ID NO: 210285 - DNA, 101 bp, Homo sapiens
ggacaggtctacgccacatcacttaggtgcagattcactttataggaacagcttcagcttcagtgatgaaaaactgaattctccaacagactctaccccag

SEQ ID NO: 210286 - DNA, 75 bp, Homo sapiens
ctcagtcactggctgcaacaggaccacagtcaagacgatcatagtcactggagtgattggggcagatgtgagagg

SEQ ID NO: 210287 - DNA, 75 bp, Homo sapiens
tgggaaacttggcccagggctcaggaatctggggtattggtgttgcaactcagaaggttaacttgaatcagattc

SEQ ID NO: 210288 - DNA, 114 bp, Homo sapiens
agctgctgcagcggccggggaacgcgcgctgcgcggactgcggcgccccggtaagactttgaccccgacgcaggcttcagtgattgccgcggatcagaagcctgagcactttgg

SEQ ID NO: 210289 - DNA, 75 bp, Homo sapiens
cgtccttccagaagagatcattcaggaggtccgagaagaatctgtgcggagaccctgggagaagaacagcacaac

SEQ ID NO: 210290 - DNA, 75 bp, Homo sapiens
tcggaggggtgatagatatgatgactaccgagactatgacagtccagaggaactgttgacattcagggatgtgac

SEQ ID NO: 210291 - DNA, 95 bp, Homo sapiens
gttgcatgcctccgcctgtgtcttctgcagtgattttaaccaaggcagttggtggaaatgaggtggttaccctaacagctaatgataagacaagt

SEQ ID NO: 210292 - DNA, 83 bp, Homo sapiens
gagcagtatgccgccctggccacggggactctcttctggatggaggatacgaagcgttttcggcttcctgcccggagctgtgc

SEQ ID NO: 210293 - DNA, 113 bp, Homo sapiens
cccatcctgccgtccttctccactttcgccagcccgtgccgcgagcgcggcctgcaggaggggaacgcccttttgcttgtgactggcagggctgcgacaagaagttcgcccgc

SEQ ID NO: 210294 - DNA, 100 bp, Homo sapiens
agaatctcaaacaagacaacttgagctgaaagcgaaaaactatgctgaccagaagctcagtgcctctgatgacagctccctgtcagatgggctcctcctg

SEQ ID NO: 210295 - DNA, 96 bp, Homo sapiens
aaagagtcaaggtggggagccaacatacaatgtggctgtcggcagagctggtagagggaaatcctcattgacgattcaatttgttgaaggccaatt

SEQ ID NO: 210296 - DNA, 51 bp, Homo sapiens
ctgtggcagagttgaaggctggccagtctgcttccttcagtccctgctctc

SEQ ID NO: 210297 - DNA, 100 bp, Homo sapiens
tttattttggcaagagttggatcaacccagagctattgccttagatccttcaagtggagatctcggctcaccaaattccacaacctgaaggcagtcgtct

SEQ ID NO: 210298 - DNA, 100 bp, Homo sapiens
ctgggtcagaacccaacagaagctgaattgcaggatatgatcaatgaagtggatgctgatggtctgtagcatctctgtctgttggagaaggcacaggtgt

SEQ ID NO: 210299 - DNA, 73 bp, Homo sapiens
gccaagaagcagctcctgcatctggcggaggagaaggtaatattaacggctgctatttgaactattacttttt

SEQ ID NO: 210300 - DNA, 100 bp, Homo sapiens
aagttgaaagggatccacataatgaagaaattgaagattctctacatgtctaataacctggtaaaagactgggggcatattttagcactttatacctgga

SEQ ID NO: 210301 - DNA, 100 bp, Homo sapiens
aggatagtatcttggccagggaactcaaacagcagatgcagcaatcccacagagtattgatgaggaaactgaagtttggagcgatcacatcattttccca

SEQ ID NO: 210302 - DNA, 95 bp, Homo sapiens
tcagaccagagaagagcacagaatgtaccagagagaatgaccagtcaacaggggacataaaagtaattggtggagatgatctctcaactttaact

SEQ ID NO: 210303 - DNA, 100 bp, Homo sapiens
aagggaggtagcatccgttggatatccacaccatccttctcgctgcagggtattatcaaaaccagtaccactgccgagaaaacagatgaagaggagaaag

SEQ ID NO: 210304 - DNA, 75 bp, Homo sapiens
atccagagaacatgctggctacaactaataacactcgtgaaactgctcaggccatcaagggtatgcatatacgaa

SEQ ID NO: 210305 - DNA, 83 bp, Homo sapiens
ctagcctatcagctggggctggatgagtaatctacctgttactcgtattttggacaatcttatggagatgaagtcaaaccccg

SEQ ID NO: 210306 - DNA, 100 bp, Homo sapiens
aaataaatagggaagatggagacaccctctgggggtcctctctgagtcaaatccagtggaattgaatgatctggcacgggaccctccagcacagtgttca

SEQ ID NO: 210307 - DNA, 88 bp, Homo sapiens
ctggagaaggttgaggagtttcgaatcaggagacgtggttgtaccagttgcaaactgtggggtccaggaatacaactcgaaccccaaa

SEQ ID NO: 210308 - DNA, 95 bp, Homo sapiens
tgggcctgcctgactcacccattcatcaggtggctgtgaaaaacaatatcgatgtcttctacttcagctgcctcatcccactcaatgtgcttttt

SEQ ID NO: 210309 - DNA, 98 bp, Homo sapiens
gtggctaagccagctcaagcccggagaccctgtgccctgcttcatccgggggtgaattgggacgaagaaaaggaatgttttgaaagcctcagtaaaga

SEQ ID NO: 210310 - DNA, 101 bp, Homo sapiens
atggggacaaagccgctccacctcccatgtcggcacagtactgctgcgcacggccactgccaacggcttccagatggtcaccagcggggtacagagcaagg

SEQ ID NO: 210311 - DNA, 100 bp, Homo sapiens
aagagggactaggtccaaacgctaggtggctgggtccagggtcctgcagttctgagcttgggttccctttgcctggacaccaaccaagcccccaactgga

SEQ ID NO: 210312 - DNA, 95 bp, Homo sapiens
cttatgtaaagagcattgttcaagagtatgttaagtcatctgcttgggaaaattagccgatgaattacatatgccatctctccctgaaatgatgt

SEQ ID NO: 210313 - DNA, 101 bp, Homo sapiens
ggcgcacgggtacctcaacttgggccaggtatactaaatcacatggtttgcttgttcagcaagctttaccaaaagctaaacttaaagaaattgtggcagaa

SEQ ID NO: 210314 - DNA, 99 bp, Homo sapiens
cagaccctggagcctcagttggaagcagccgatccagcctgcggagcctgtggggcaggctgtattcatcaccaaagaaaaaacttacaccaatgcaga

SEQ ID NO: 210315 - DNA, 100 bp, Homo sapiens
agatgaaaacctgaagcaagctctgcagaaagacttaaacctcatggccccaggtctcactatacaggtggagccccctgagctgcccgctgatctgcag

SEQ ID NO: 210316 - DNA, 97 bp, Homo sapiens
cccaatgcctgtttattcaccatcaacaaagaagaccacacactgggaaacatcattaaatcagggagtctcgctctatcccctaggctggagtgca

SEQ ID NO: 210317 - DNA, 98 bp, Homo sapiens
tgcagtgctatggagaaggggaaattgcacaagccaggaaaggacgcgtcgaagcgcgggcggcagatggggtttcactcttgttgcccaggctggag

SEQ ID NO: 210318 - DNA, 100 bp, Homo sapiens
acttcctgaagcagctgctctagtgaactccagaagcagctgtctgagctggacgaggacgacctgtgctatgagttccggcgagagcgcttcactgtcc

SEQ ID NO: 210319 - DNA, 83 bp, Homo sapiens
taaaaagtgttcttcagcatcaagcctacaggaacatagaaagatggcccactgcgtgaccttggttcagctgtccatttcct

SEQ ID NO: 210320 - DNA, 74 bp, Homo sapiens
ggagacgcagatgtggacttgaaagaagctgcagcggaggaaggcgagctacctcctgccccatctccttccat

SEQ ID NO: 210321 - DNA, 97 bp, Homo sapiens
cggagctgctcaagacagcatcaaacctcactgtctctgtcctggaagcagaaggagtctttgaaaaaggatcgaatcatcaatttagttgttggca

SEQ ID NO: 210322 - DNA, 83 bp, Homo sapiens
gcttggacgactcggagagccggtacatgtcccagagcaagcacacggaggcccgggagctcatgtactcgggagccctgctc

SEQ ID NO: 210323 - DNA, 82 bp, Homo sapiens
agctgccccgcctggagatctcagacctcccagatgctgctgatgcaaggaatcccctgggctcccgtccactccactgctg

SEQ ID NO: 210324 - DNA, 102 bp, Homo sapiens
agaaaggattgtgacatatcgttggacccagaattgagcgccggcatcggccgcacaggcaccatcattgtcatcgacatgctcatggagaacatctccacc

SEQ ID NO: 210325 - DNA, 71 bp, Homo sapiens
agaatggacaagcttaataaaataaccgtccccgccagtcagaagttgagatgtccagaaggcttcttggg

SEQ ID NO: 210326 - DNA, 97 bp, Homo sapiens
cggcggccttcgaggaggtcatgaaggacctgagcctgacgcgggccgcgcggtaagactttgaccccgacgcaggcttcagtgattgccgcggatc

SEQ ID NO: 210327 - DNA, 90 bp, Homo sapiens
caaaggcatggaagtatgaaaatgtgtgctggagaagagaaacgagttggcacacgcacagtgtttgttggcaatcatccagtttcggaa

SEQ ID NO: 210328 - DNA, 100 bp, Homo sapiens
ctttggtggaccaaaaatcgtgacaccagaagaatattataatgtcacagttcaggatttgagagcacctccagaacaaggaaagatttttattgcaagg

SEQ ID NO: 210329 - DNA, 84 bp, Homo sapiens
ccagaagtccagagctgaggactgcctgtttgcagtttggtgccctggttgtcagatgttggaaagcagtaggacggaacatac

SEQ ID NO: 210330 - DNA, 98 bp, Homo sapiens
tgacaaggaaatggagtcaccagaatgtatgaaaaggattaaagttcaggtttaagaattgtttaagctgcatcaatggagcacatacagggagcttg

SEQ ID NO: 210331 - DNA, 80 bp, Homo sapiens
tgtgcagccgcgaggaggcgcgggaggtgttcgagaacgaccccgagacggctgaccaactgactgaagagcagattgca

SEQ ID NO: 210332 - DNA, 101 bp, Homo sapiens
attttacacagttggtattagcatgtttggccttcactattctgtgtgatattttgatgatcttcagccatcagattatgtcaggagggcgtgacatgtta

SEQ ID NO: 210333 - DNA, 100 bp, Homo sapiens
gcaagagtattctgggcagagaaagcagcaagcacaaaggaccaaggcagcagaatgccagcttcaaggttactgactttttatgatgtttggtggctat

SEQ ID NO: 210334 - DNA, 76 bp, Homo sapiens
cacgtacctgtcctacttgaagtaccgggaagcgggcagcaggtcaccccagccaggttccccccggcccaagtga

SEQ ID NO: 210335 - DNA, 89 bp, Homo sapiens
cttgtcagccagggctgaacccccgcagaaaaatggctacaaacttcctagcacatgagaagatctggttcgacaagttcaaatatgac

SEQ ID NO: 210336 - DNA, 100 bp, Homo sapiens
gccccagcctgctgaagctcttgcgctacctctggctgctgcacaggttctggaacctctggcggtctcagattgagcagaaaaaggaaagagagctgct

SEQ ID NO: 210337 - DNA, 98 bp, Homo sapiens
aacaagactggggctgctcccatcattgatgtggtgcgatcggttcatcatgcctagtggcgtataagaagaccccgccaccggtccctccacgcacc

SEQ ID NO: 210338 - DNA, 87 bp, Homo sapiens
ggggcacaccttttatagaagtacgtccaggaatagaagtgacctgctttttcgcaagaaagaccggcagagaccaatgccaatgtg

SEQ ID NO: 210339 - DNA, 120 bp, Homo sapiens
cccacagccaacttccaacaagatgtgggcacaaaaactaccattcgcctgatgaactctcagtctgatgaccgggattccaagcgggattcccttgaggagggggagctgagagatcac

SEQ ID NO: 210340 - DNA, 50 bp, Homo sapiens
ctcatgggcacggctcgggacggtcttgagtcaccacgtccgaatataat

SEQ ID NO: 210341 - DNA, 100 bp, Homo sapiens
tgggattcaaatgaaagtgaaaatgttagaagaactcgtgagccggattgatggcactcaaggagttgcccctggtcctgtaattggacttcaggcacca

SEQ ID NO: 210342 - DNA, 75 bp, Homo sapiens
tccctaagcctcattggacaccgtctgcaggaaactgagagggagagacaagctcaacgagaagatgccctcgag

SEQ ID NO: 210343 - DNA, 50 bp, Homo sapiens
ggaaattctctgctgagagaaaacagatttggaaatagtgggatttattg

SEQ ID NO: 210344 - DNA, 75 bp, Homo sapiens
ttctggactttgggcgtcccattgccatgccaagacaatgcaaactccagtgaacattcccgtgcctgtgctccg

SEQ ID NO: 210345 - DNA, 100 bp, Homo sapiens
cgcagaagcagctgaacaatttaaattaatccaagcagcatatgatgtgttgagtgaccctcaggaaagagcatggactgacatcacatggtctgagagc

SEQ ID NO: 210346 - DNA, 75 bp, Homo sapiens
gtaccaaagacctgggaaaaattattcagagctgggagagcttcccccacgatctcctttagaaccagtttgtga

SEQ ID NO: 210347 - DNA, 75 bp, Homo sapiens
ctacatcactgcaataattgaggagcagcccaaaaactatcaagtttgggtggctacggaccacaacatggataa

SEQ ID NO: 210348 - DNA, 80 bp, Homo sapiens
gtgattctgaggcctccccaaccatgtgcaattgtgagaagccctaccactgcaactgggacggctgcggctggaagttt

SEQ ID NO: 210349 - DNA, 95 bp, Homo sapiens
agggcatccgggaccgagcggtgaagaagctgcgccagtacatcagcgtgaagacgcagagggagacaggtgacatcactcaaaaaggatatgaa

SEQ ID NO: 210350 - DNA, 90 bp, Homo sapiens
tcagtgtggtggatcatttcaaccgcaacacagtcactcctggcggcaaaccaaacaaaaccagagtcatctggggaaaagtaactcggg

SEQ ID NO: 210351 - DNA, 100 bp, Homo sapiens
tgcctctgacaatctctagtacctactgaacgtgaacgaacagaaaggctaattaaaaccaaattaagggagatcatgatgcagaaggatttggagaata

SEQ ID NO: 210352 - DNA, 82 bp, Homo sapiens
agaaatttggagtgtgcgtgcgcgccgagcggatgcagcaccgaggcttcctcctcctcaccctcctcgccctgctggcgct

SEQ ID NO: 210353 - DNA, 90 bp, Homo sapiens
gagattgagaatgtccatggatttgtttctcattctcatatttcaccaataaagctgatgactatcagccagttcgtctgctcagtaaac

SEQ ID NO: 210354 - DNA, 75 bp, Homo sapiens
ctggggacttccagctacacactaatgtgctcggcatggctgcccggggccacagctggccctgcctgcagcaga

SEQ ID NO: 210355 - DNA, 90 bp, Homo sapiens
agcgattggacagaatttgtgaaggttgataggtatatcgagaacaggtacgtgacaacagtttatattccatgatagaaagctaaagtc

SEQ ID NO: 210356 - DNA, 83 bp, Homo sapiens
gaccaagtcctcgctggactgctcagggtgccagacctcatccctgtcctgggggaacagagaggccctgcggtggctacggg

SEQ ID NO: 210357 - DNA, 94 bp, Homo sapiens
gattctctcccaggccacaagacatttcctgctcggaaccttgtttactaattgcagtgaaatcaactgtgcagaccatcactgttggaggagt

SEQ ID NO: 210358 - DNA, 74 bp, Homo sapiens
ctcaaatgccttctcatccccacatacatccttcggaaagctctggacaagatcgcggaaatcaagtctctgtt

SEQ ID NO: 210359 - DNA, 144 bp, Homo sapiens
tgcttccttcggtgctgcggctgtgtgttttctgagcgagccttgaaagagataaaagcggaagtttgccacacgctcctacagaagaatggtcagctgtccaccatcaatggcgtagctgagcaagatgagctcagcctccag

SEQ ID NO: 210360 - DNA, 74 bp, Homo sapiens
ccggggcggtccgttgccaaagccaggaaacactgatgggaaagtatggggaagactccaagcttatctatgac

SEQ ID NO: 210361 - DNA, 80 bp, Homo sapiens
gaccagcgtctcggaggcgccgcaggtcagcccaaggccaaccccactgtcactctgttcccgccctcctctgaggagct

SEQ ID NO: 210362 - DNA, 90 bp, Homo sapiens
tgaaaattggatatctaaatgatagagtgttctccctcgatgctccccacagcacctacaacctctactgccccttccgggcagaggagc

SEQ ID NO: 210363 - DNA, 100 bp, Homo sapiens
cactttcgcaacatcaagggagttttccggggccctctcagcaagaacgggaacaaaactctgccttcatacaccgaattcgacatcagtggcaacgtcc

SEQ ID NO: 210364 - DNA, 98 bp, Homo sapiens
ttaaaacttgaaaaggagaagagaggagcagtattgacaacaacacaatatggaatttgttcctagagacagagaacccaatacaaaagtgagaacat

SEQ ID NO: 210365 - DNA, 100 bp, Homo sapiens
cgctcgcgctctccggccgcgggcatctcccggcccggccgcagcagccgccgccgccgcgcacatcttcatgatacagttaagaggaatcttgacagcg

SEQ ID NO: 210366 - DNA, 83 bp, Homo sapiens
ccagcgacaggacccggcgccgggcactgagcaccgccaccatggggaaggggtctcttgcatggcaccaagaatgttaccaa

SEQ ID NO: 210367 - DNA, 75 bp, Homo sapiens
ccggatctcaacaatcccttcaagaaactgttttggctgggcctacttcacctataccttctctgggaaatgtga

SEQ ID NO: 210368 - DNA, 98 bp, Homo sapiens
ggagatcgccacctccatcgaacccatccgcgacttcctggccatcgttttcttcgcctccatagccgccccgggggaaggtgcggaggacgcagaca

SEQ ID NO: 210369 - DNA, 100 bp, Homo sapiens
gtcaaaccactgaaatctcttttaggggattctgcaccaacactgcacttaaataagggcacacctagtcaggttcaaaccttgtactactcagctgatc

SEQ ID NO: 210370 - DNA, 90 bp, Homo sapiens
aaaacatctgaacttgatatgtctgaaagcaaaacaagaagtggaaaagtctttcagaataaaatggtgaccaagaatatggcccaggtg

SEQ ID NO: 210371 - DNA, 73 bp, Homo sapiens
tgcactgccgcttcggtcactagtcattgaccacagtggcgcccgccttggtgagtatgaggacgtgtcccgg

SEQ ID NO: 210372 - DNA, 100 bp, Homo sapiens
ccctgaggcagaggctgggcccagaatacataagtagccgcatggctggcggaggccagaagatctttgtggagttcacctctgtgtttgactgccagaa

SEQ ID NO: 210373 - DNA, 121 bp, Homo sapiens
gggcctccatcccgtgccctcgctctgagctgcgcctggacctggttctgccttctggacaatctttccggcatcatgtgcatggaccacctggaggagatgctgaagctggtgaacggca

SEQ ID NO: 210374 - DNA, 97 bp, Homo sapiens
ctgctaaaaacaagactggggctgctcccatcattgatgtggtgcgatcggaggtgcttcccaaggaccgtagatgcctctctagagcatgagctca

SEQ ID NO: 210375 - DNA, 82 bp, Homo sapiens
aacacgattgttgtttcttggactgcagaaattggaagaattacctaggaacagtacgatttggggttatcacaaataaaca

SEQ ID NO: 210376 - DNA, 100 bp, Homo sapiens
gcaccatcacgggcattgccaggaagctgaaggagaagtgtcctggatgcagggggtggcgataagcacgtatgccaagtactgttaccacaagctacag

SEQ ID NO: 210377 - DNA, 100 bp, Homo sapiens
gctcacctgtatcagctggcccctgtcggccaacactggacaaattgatgacccccaggagcagcacagagtcatcagcagcaacctggccctcatccag

SEQ ID NO: 210378 - DNA, 89 bp, Homo sapiens
gcaatagctgaagaagaagaggaagtagccaaagagcaactaactgatgctgacaccaaaggcatctccttggaaacaatgccatcttt

SEQ ID NO: 210379 - DNA, 88 bp, Homo sapiens
tggtggctatgaacccagaggtcgtggaggtggccgtggaggcagaggtggcatgggatctccaagaaggagaagcttctctcgcagc

SEQ ID NO: 210380 - DNA, 100 bp, Homo sapiens
acatggattgttttaaagcaacctataaacatcagctctcaacaggtttgttggcatccaaagctgttggggttgatggtgctgaaaaaaaggaagacta

SEQ ID NO: 210381 - DNA, 83 bp, Homo sapiens
ccgcttttctctaaggaacccgatatgaaaagccttcatagaggaagaggatgaaggggcagcataaagaaggaatagtcaag

SEQ ID NO: 210382 - DNA, 90 bp, Homo sapiens
gggaagactcatcggagcgtgtggatttgagccgccgcattttttaaccctagatctcgggaagaatcccactgatgcataccttgatgc

SEQ ID NO: 210383 - DNA, 87 bp, Homo sapiens
gccgtcggcagcaagaacagagagagaggtggacagatctgagagatactgagggatctgaaacttgcccacccttcgggatattgc

SEQ ID NO: 210384 - DNA, 100 bp, Homo sapiens
gatgaagttgttcattgtttgtcaccacaaaaaggacagagccagagcccagaggtggagcagttagggagggttgtggaactggacagtgacatggtag

SEQ ID NO: 210385 - DNA, 100 bp, Homo sapiens
catccgctccttgcccgagaacatccagtttgatgtttactacaagaaatgaccatggttgacacagagatgccattctggcccaccaactttgggatca

SEQ ID NO: 210386 - DNA, 137 bp, Homo sapiens
gtcaaggatgcagccgggaagctagtcgggagagcagcagagacacaagtcctgttcgctcttttcagcccctcggtatttatcaaagtgctggataataatgataatggcccagaattctctcagccgaattacga

SEQ ID NO: 210387 - DNA, 103 bp, Homo sapiens
agaagttacagactctcctgggcgaccccgagagcttaccattcctcagacttcttcacatggtgctaacagatttgttcctaaaagtaaagctttagaggcc

SEQ ID NO: 210388 - DNA, 112 bp, Homo sapiens
gtaaaagtgtctcagttgctgtgtttagagaacatcaaagataaaccctggcatatttgtggatccaaacttctacagcaaaaacttacttcttttaggaaagacatacttg

SEQ ID NO: 210389 - DNA, 83 bp, Homo sapiens
acaagcgagaggaggaggaggatgatgattactgaatcaaatggatggatttgatactctgcatagagttaaaatgatcatgg

SEQ ID NO: 210390 - DNA, 85 bp, Homo sapiens
aataccaggcttgaattgctgtggtcagggaagagcctgctacagatggtcaaaaagagtcacctaaggtcctgcgagtacaagg

SEQ ID NO: 210391 - DNA, 75 bp, Homo sapiens
aatttattaaaggaagcacacctaaggttggtgaactcttgaaagattggcgacgtcttaatgttgctataacca

SEQ ID NO: 210392 - DNA, 96 bp, Homo sapiens
ctgctacctgcagcgccgtgtggcacgacacaaaaatcagcgctcctttaccctcatcgtggaggcctgggactgggacaacgataccaccccgaa

SEQ ID NO: 210393 - DNA, 74 bp, Homo sapiens
ggacctcgcttacctgcatgctggtttggaattcacccagttgcaggccgaatgcctggtcagcttaatgtgct

SEQ ID NO: 210394 - DNA, 100 bp, Homo sapiens
cccaacaacttcctgtcctactaccgcctcacacgcttcctctccagagtgatcaagtgtgacccggtatcgagaaccttccctgcgaacttcagaggaa

SEQ ID NO: 210395 - DNA, 90 bp, Homo sapiens
atctcaccaatttcaaatctgcactgccagtgaaagatgtagaagataaacctgaacaacaaaccagaacaagagagactgacaaatcac

SEQ ID NO: 210396 - DNA, 50 bp, Homo sapiens
ccccggagaaaaagttgaagcgttataattcagaaggagctggcggacat

SEQ ID NO: 210397 - DNA, 101 bp, Homo sapiens
aagaataattggtgccacagacagcagtggagaattgatgtttctcatgaaatggacattcggaaattctttggagtaataccaagtggaaagaaacttgt

SEQ ID NO: 210398 - DNA, 75 bp, Homo sapiens
ggtggtgatgatggtgttggtgttgaggtcctactgctctgttggctcatgaaataggttttggaagtaaagtta

SEQ ID NO: 210399 - DNA, 100 bp, Homo sapiens
gggaagtcagaaatcgatcagatcaacaaggtgttcaaggtgttatgtctggctgtagctgttggtcacgtgaagatgacagacgatgagcttgtgtata

SEQ ID NO: 210400 - DNA, 85 bp, Homo sapiens
tacaccaaaaactcaggcttcgccacctgcgtgcaaagtatcatgatattagctggtttgacatcaagtcatttgtgagtcatca

SEQ ID NO: 210401 - DNA, 100 bp, Homo sapiens
gtgtatctctacatgcgctctttgaaagcgccccggaatgacctgtcgcctgccagctctggcatccgtgtcattctggaccttactcccaactaccggg

SEQ ID NO: 210402 - DNA, 100 bp, Homo sapiens
acctgcgcgaagctggccaaagcctgcccagacggctcacctgtgcgggatggaacaaaaggtgtgattcccttcagtacggcggcaccgtggaagtgca

SEQ ID NO: 210403 - DNA, 100 bp, Homo sapiens
aggagagtaagtataagaatgagcattgaactacaatcagtttctaatccagttcacagaaaggtgccaagctctcctgatgaaatgtgttctgccccac

SEQ ID NO: 210404 - DNA, 100 bp, Homo sapiens
catttctggaagcattctacttaagactttgaccccgacgcaggcttcagtgattgccgcggatcagaagcctgagcactttggctcgagacaattaagg

SEQ ID NO: 210405 - DNA, 100 bp, Homo sapiens
gaggagaccggcacccagacaggtggcgacggcagaggatttcattcattggctcccatgtactatcgaggctcagctgcagctgttatcgtgtatgata

SEQ ID NO: 210406 - DNA, 100 bp, Homo sapiens
tgccctcgctgcgcaccgtgtcctcctccgtcatcgagcagctcttcttcgtccgtttgcacatcaacagcgagcacatccacggggagcggaaggagtt

SEQ ID NO: 210407 - DNA, 75 bp, Homo sapiens
agttcccggacatgatcctctccgcctctcgagaggccatgtggaagtgttacatcaccttttgcttggaaagat

SEQ ID NO: 210408 - DNA, 100 bp, Homo sapiens
ttcactgtatgtaggctgggagtgtctgctgatcacttggagtgctgtcccttggaacaggaggagtaagattgagaccaaagagaaccctgtacagtaa

SEQ ID NO: 210409 - DNA, 75 bp, Homo sapiens
aacctgatcatccgcagatatctcagcaggtgaatgaaatcctgtgccgttcttcagtctggagtgccttcaaag

SEQ ID NO: 210410 - DNA, 90 bp, Homo sapiens
cagattgcaaagtgccatggctctttttgcatgtaaaactctggacaatgcctgtggaagacaagtcagaccccccagaggggtctgagg

SEQ ID NO: 210411 - DNA, 90 bp, Homo sapiens
atgagaaacccggcaatgaaatctcgtttcctctcagtccatccacccttcatggggccagagccctctctccagaatctgagcagcaat

SEQ ID NO: 210412 - DNA, 73 bp, Homo sapiens
gaaagtctggttaataacgagttctctagcgctagtgatgtgaatgagcttcctgaacctgaacaagacaatg

SEQ ID NO: 210413 - DNA, 75 bp, Homo sapiens
gtcagctacgggcaagcgggcagctgaagatgatgagcatgacgggaagccgttctgccacaagccgtgctacgc

SEQ ID NO: 210414 - DNA, 100 bp, Homo sapiens
tgaggacttcccctccgtggtgacagcctctgggtcctcggtcggtacagtctctgcacctcgcgccccagcagctcggcttattccaggggtgtgtttc

SEQ ID NO: 210415 - DNA, 80 bp, Homo sapiens
acccttcttcagatgcctggaaaggtagagcagagccggagccaggtgcaggccattggagagaaggtctccttggccca

SEQ ID NO: 210416 - DNA, 75 bp, Homo sapiens
cgccgggagcgagctgggagggagccgcgcgcctttgtgcgcgcgccgagtgagatggaagattttcgaggtata

SEQ ID NO: 210417 - DNA, 135 bp, Homo sapiens
tcgtgagctccggcccgggcgagcgggtgcgtctgccgcagagtcggcacctgaaggacatggagtgacagctggagtatcagccttggaagtatatacgccaaaagaaatcttcgtggcaaatggtacacaagg

SEQ ID NO: 210418 - DNA, 75 bp, Homo sapiens
cttcactgggagtcgagacaaaaagaaactggcgatggaatatgagaggagccctctggaaagaaaaggacagac

SEQ ID NO: 210419 - DNA, 97 bp, Homo sapiens
agggacggggaggaggagttccccttcgagaggaggcagattcccctctacatagacgacaccctgacgatggcccactgcgtgaccttggttcagc

SEQ ID NO: 210420 - DNA, 90 bp, Homo sapiens
cgaccaactcggcaggcacacgttactcagcccctgcgaacctgtatgtgcgaggtgtttccccccgggccggcctgccgtgacgatcac

SEQ ID NO: 210421 - DNA, 48 bp, Homo sapiens
caaggtctccaagtcccagctcaagagtttattaaccacttaacctct

SEQ ID NO: 210422 - DNA, 123 bp, Homo sapiens
tccagctttgcttcctgagcccaatcacgtcatgctgaaccacctatacgcgctgtctatcaaggatgagaaaatgtcagaatctacaatggatgccttccaaagcctacctgcagaagcaag

SEQ ID NO: 210423 - DNA, 75 bp, Homo sapiens
ttttaataccacatggcaggaggcaaattgtgcaaatgagagctattgttcacataactcaacagttagtgattg

SEQ ID NO: 210424 - DNA, 75 bp, Homo sapiens
tttgaaggtgcaagatactatataaagtcagttgctctccctggaaggaagagtgttctcggatttcaccttaaa

SEQ ID NO: 210425 - DNA, 100 bp, Homo sapiens
cgaagacgcagcagaagtccagaccggagacgtcgctgacaggtggagccgccaccaaaatgcagattttcgtgaaaacccttacggggaagaccatcac

SEQ ID NO: 210426 - DNA, 82 bp, Homo sapiens
cgtgaaaaccacaagcaggtccaaagagagagaattgaatgatctggcacgggaccctccagcacagtgttcagcaggtcct

SEQ ID NO: 210427 - DNA, 90 bp, Homo sapiens
ctttatgtatgcccctgagttcaagttcatgccaccaccgacttatactgagatgcctgaaaacttcatgcctcctgttcccatcacatc

SEQ ID NO: 210428 - DNA, 90 bp, Homo sapiens
ggccccgcgccggggttccccgggtccgagcggatggcgactgcagccagcccgccctggcctcccacgactacatcctgaagattgtgc

SEQ ID NO: 210429 - DNA, 95 bp, Homo sapiens
atctgcaccgcgaccagggccgcaggaagacgcatactatactggcaattgctggagaagattttgcaattgttgcttctgatactcgattgagt

SEQ ID NO: 210430 - DNA, 75 bp, Homo sapiens
cagccacatactatccgtttgttcaggaaccaccagtgacagaattaacgtcttcaaggacccagttgctgatcc

SEQ ID NO: 210431 - DNA, 100 bp, Homo sapiens
gtccaagataggaatgaagtaattgaagctgcaaatgaagcattacttactaaaattttgggaaccagtaggacattgacatacatccgagaacattctg

SEQ ID NO: 210432 - DNA, 75 bp, Homo sapiens
ttaatctcagggaactggatgtcagcaagaatgattgagaggatccagaatccagatctctggaatagctaccag

SEQ ID NO: 210433 - DNA, 101 bp, Homo sapiens
aatcgacttcggtttcagttggagttggaatttgtgcaatgtttagccaacccaaattaccttaattgtgagactgctgctcctcgggccattttgaccgg

SEQ ID NO: 210434 - DNA, 83 bp, Homo sapiens
cccagtatcttctcagaccagcagctaatgttactcccacaaagcacatcatgcagcgaattcagaggcttcaggctgactgg

SEQ ID NO: 210435 - DNA, 100 bp, Homo sapiens
ttaaggggcatgttggtgcatttaactacaaaaccagtatacgctcaacggcaagaaagtggaagttgccgtcaaacagatcatcgctggaaaagccgtg

SEQ ID NO: 210436 - DNA, 74 bp, Homo sapiens
aaaagaaatgtttcactctgctctgctactatgatcccaattcaggcctctactacgtggacagtgaagggaac

SEQ ID NO: 210437 - DNA, 74 bp, Homo sapiens
gggcacgtgtttgcggttcagccctttgatgaccgcagcagacaccatcatccgagcagtattgatttttgcag

SEQ ID NO: 210438 - DNA, 100 bp, Homo sapiens
gccgatccagcctgcggagcctgtggggcagcatgatgccttcttctgtagagtgggcgctttgcagaatacgtgttgaatgaaatcactgatctaggaa

SEQ ID NO: 210439 - DNA, 75 bp, Homo sapiens
cgtgtactttaccaacgagctgaagcaggttaatcactgttctgaagatggtgtttgtaacaccagttatgcttc

SEQ ID NO: 210440 - DNA, 100 bp, Homo sapiens
actgaagacttggagcttgcttctgagaacaaacgcaaaaggacagtaaactgtggaccttgaagttagcagatgggaaaactgacaaccatgcctgcag

SEQ ID NO: 210441 - DNA, 74 bp, Homo sapiens
agggcgacagcaacagctctgccggctggaagatcaaaggtccatcatcaaaacaccaaagactcaagacacag

SEQ ID NO: 210442 - DNA, 75 bp, Homo sapiens
aggtgccctcctatttgggatgccttgggtaccaggatcatctatgaccggaaattcctgatggagtgtcggaac

SEQ ID NO: 210443 - DNA, 100 bp, Homo sapiens
tccgcattgcagactgcggagtcagacggcgctatgtacgccctcttcctcctggccagcctcctgggcgcgggataaaagactcagatcatgctgaacg

SEQ ID NO: 210444 - DNA, 89 bp, Homo sapiens
ggcaaggcggcggacggctgcgtcgcccgaggcgaggaggagcgctggcgcacaacagctccagctggcagcatcacttcccgccaatt

SEQ ID NO: 210445 - DNA, 73 bp, Homo sapiens
tcgcagtggtcgcttcttctccttgtacttacagatcatcagtatttggagaggacaccactatgtgccattt

SEQ ID NO: 210446 - DNA, 101 bp, Homo sapiens
acgctaggtgggcagggctcttcacttgcaggctgaaggtgatgtggccgccctcaaccgacgcatccagctcgttgaggaggagttggacagggctcagg

SEQ ID NO: 210447 - DNA, 51 bp, Homo sapiens
gcaacagaattacagagtatgatgaatctggtggacagtaacaaactttgg

SEQ ID NO: 210448 - DNA, 118 bp, Homo sapiens
ccgcagcaccgcagccttgggcctcgcgccggctatggccgtgccctggggctgagccctcaggtgtcgtgaaaactacccctaaaagccaaaatgggaaaggaaaagactcatatca

SEQ ID NO: 210449 - DNA, 74 bp, Homo sapiens
gtcaccctcatcagcgtggtccagaatgagaaaactgccagctgacttcaaggttctggaagcctcagatctgg

SEQ ID NO: 210450 - DNA, 98 bp, Homo sapiens
atggcaacggccaacttcggcaagatccagatcgggatttacgtggagatcaagcgcagcgatggtatgtgaggagcagcgctgtgaggaggaagtct

SEQ ID NO: 210451 - DNA, 100 bp, Homo sapiens
actgacttccctccaaaggatatctgaagattctctgcccacaaaacccaggcatttataagacgctgtttggcatatcgaaaagaagatcgatttgatg

SEQ ID NO: 210452 - DNA, 75 bp, Homo sapiens
gcctcagcctcccaagtagctgggattacaggcgggcaaaactgttccgatttgcctctgagaacgatctcccag

SEQ ID NO: 210453 - DNA, 83 bp, Homo sapiens
agcagccgatccagcctgcggagcctgtggggcaggttaatgttcgtgaagaaattgaagagttttttccaagaatgtggaag

SEQ ID NO: 210454 - DNA, 116 bp, Homo sapiens
cctggacctggaaggggagactctgctgacacccatcacccacatctcacagcccactgctcagtggagcgtggaggacgaggaggaggccgtccacgagcaatgccagcatgaga

SEQ ID NO: 210455 - DNA, 78 bp, Homo sapiens
aaaaggaagacgagccacctgagcaagctgagccagagcccacagaagcatggaaggaacgtcaaggtcgtgggaaat

SEQ ID NO: 210456 - DNA, 83 bp, Homo sapiens
ggaagccagcagccaagccggggcagtttcagtctccaccccaaatgcagcttcctgcctgacacagctcacttcaagaagtg

SEQ ID NO: 210457 - DNA, 50 bp, Homo sapiens
agtctcaaaggtgttcctggatttgcttattccactaagctcaacaaatt

SEQ ID NO: 210458 - DNA, 97 bp, Homo sapiens
tctaattgaaaagagaatccaattacaccttccaaagatctgaagaagacacttgaatcatgggtgacgttaaaaattttctgtatgcctggtgtgg

SEQ ID NO: 210459 - DNA, 75 bp, Homo sapiens
cgaggagctggactaccggaaacaggccttggaccaggccaacaaggtgagaagccctaccactgcaactgggac

SEQ ID NO: 210460 - DNA, 98 bp, Homo sapiens
tcagcgccgcggggatgggggcctcgggcgccccgcagccccccaacatcctgctcctgctcatggacgacgagccaaggaggtcctgctgctggccc

SEQ ID NO: 210461 - DNA, 100 bp, Homo sapiens
tgccttccttgcagaggccatggaggacgaggagagacagaagaagctggaggccggcaaagccaaggtatcagaatggcaaagcaacttaaccttccag

SEQ ID NO: 210462 - DNA, 90 bp, Homo sapiens
gtggaactggggcaataccaatagaggcttgctgggtacttcactatttttgtgaagtgaagttcaaaagtgatcagaaccttcaaacag

SEQ ID NO: 210463 - DNA, 74 bp, Homo sapiens
ctcctcccagggccaggcgccgctcagaacgatgacgtccggttgtttgccttcgtgcgcttcaccaccgggga

SEQ ID NO: 210464 - DNA, 100 bp, Homo sapiens
aaacctgtgaagagtgcctgaagaacgtctccgtttggtgcacctcgatttggaggaagtagggcagggcccttatctggaaagaagtttggaaaccctg

SEQ ID NO: 210465 - DNA, 74 bp, Homo sapiens
ccgcagggttcggatgagaccaggtgattatcctgaaccatccaggccaaataagcgccggctatgcccctgta

SEQ ID NO: 210466 - DNA, 97 bp, Homo sapiens
cactgcagcctcaacttcttgtcctcaagtgatcctcccaccttagcctcctaagtagctgggaccacagatgacgaagatgatcctgcagaagctg

SEQ ID NO: 210467 - DNA, 83 bp, Homo sapiens
ctgcctcgcgcccgggagcaggaggagctgctggcgcccgcagatgctgtgagccgtgagctttgaggcggtgggatgtgtca

SEQ ID NO: 210468 - DNA, 83 bp, Homo sapiens
atctccttctgcatccttaactgagaatgagaacccagcttagactagaaagtctagaagacacacacataatgaagggggaa

SEQ ID NO: 210469 - DNA, 100 bp, Homo sapiens
ccacaggaagctgagaaagatgcggaagattcgctccatgaatggcaagatattaatttggggaggccagtgcctccacgatgtgggataataatgcctg

SEQ ID NO: 210470 - DNA, 99 bp, Homo sapiens
acggcaacaagagctcgcagctttacctgcgcctggtggagacctcgctgaaaggtgtggatgaggtcaccattgtcaacattttgaccaaccgcagca

SEQ ID NO: 210471 - DNA, 80 bp, Homo sapiens
gtttctcttcgggggcgtccttatgaccctacttgtttgcggccccctactactacggcttctacaacaaccggctgcag

SEQ ID NO: 210472 - DNA, 100 bp, Homo sapiens
tcagagacactgccaagcagccttagccctagtgtagagagttgctggagaatgtaaccctaatccataaaccagtgtcgttgcaaccccgtgggctgat

SEQ ID NO: 210473 - DNA, 50 bp, Homo sapiens
gaggaaccacacgctgatcatgaccccccacccaacctgccttactttgt

SEQ ID NO: 210474 - DNA, 100 bp, Homo sapiens
gggtgcagaactacctgtacaacgtgctggagagaccccgcggctgggcgttcatctaccacgctttcgtatcagtgtactgttacccggacatacctat

SEQ ID NO: 210475 - DNA, 51 bp, Homo sapiens
ggatatgatgattcttccaaagaaacagggcctctacccccagagctgcag

SEQ ID NO: 210476 - DNA, 100 bp, Homo sapiens
gttttacagatggatctcagagcggtatccctgtctcagcgaagtggtgaaagagcatcagagcactcggccgcagccaagacgggcggctgcttccctg

SEQ ID NO: 210477 - DNA, 76 bp, Homo sapiens
gctgtacaagtggaccaactatctgagcgcggacaaggcaaaatctcagcaagttcggacctctagtacaataagg

SEQ ID NO: 210478 - DNA, 73 bp, Homo sapiens
tggtacttctcctagttgcagtcaggcttcatacgctattgtcctgccccttccgacttcgactccttacctt

SEQ ID NO: 210479 - DNA, 99 bp, Homo sapiens
ctgggctcctctccccgtccggctggagcaatgtgttttacatgctgatgtttgcagatgcctgtgccttactggcccggaggctgtttgatgtcctgc

SEQ ID NO: 210480 - DNA, 100 bp, Homo sapiens
ctcaaatgcaagtccaagaggaggaggaggcggaggtccaagcggaaaggaactcattatacaatgacaaatggaggcagcattaacagttctacacatt

SEQ ID NO: 210481 - DNA, 75 bp, Homo sapiens
cttttccttggagagtcataacatatcactgactgtttccaacatggctagatccatcagaaactgaagccgtgg

SEQ ID NO: 210482 - DNA, 110 bp, Homo sapiens
ctcacaatgaggctccctgctcagctcctggggctgctaatgctctgggtctctgatttgaatataacctgccgctttgcaggtgtattccacgtggagaaaaatggtcg

SEQ ID NO: 210483 - DNA, 98 bp, Homo sapiens
tgacatggaggcctatttgcctaagaagaatgggacagagcgggatgccaccagcttgtccaaagggaagttccaggagctcctggtgggcatcgttg

SEQ ID NO: 210484 - DNA, 101 bp, Homo sapiens
aggtcagcgccgacggcagccggcacctgacggcgtgaccgacccgagccggccgaatacatcaagcaatggtaacatctttaaatgaagataatgaaagt

SEQ ID NO: 210485 - DNA, 50 bp, Homo sapiens
attgcggaataacatcggaggagaagttaccatcctcaaaggattggcta

SEQ ID NO: 210486 - DNA, 75 bp, Homo sapiens
ctttgtgcacatttacatcaagcttcggaaccaaaaagaagcttcccagagccggggccaggagccccaagcgcc

SEQ ID NO: 210487 - DNA, 88 bp, Homo sapiens
gttcctcaaccgcttttctacagtttgtgaggaggtgtcatggagaaactccagctgggcccagagattctgcagcgggaaaatccaa

SEQ ID NO: 210488 - DNA, 75 bp, Homo sapiens
accaggcgttgcagaggcgcttcgccaagggggtgcagtacaacaactgtgccctgtccacggtgcctcctgcat

SEQ ID NO: 210489 - DNA, 82 bp, Homo sapiens
ccttggctcactgaggaggtttggtactaggttttgacaagcttgcatcatgcgtgagtataagctagtcgttcttggctca

SEQ ID NO: 210490 - DNA, 83 bp, Homo sapiens
catggctctgctattctccttgatccttgtcaagttcatccgagaagtaacaccatatatcaagaagccatcattagtatcag

SEQ ID NO: 210491 - DNA, 75 bp, Homo sapiens
aagcaaatcagcagctgtcaagggcagcagattatcagcatggcacattacacttctgtggatttaaagtccttg

SEQ ID NO: 210492 - DNA, 90 bp, Homo sapiens
acaaccccttcggagacaacaacctgctgggcaccttcatctggaataagaatgaggaaaatggggagcaggaggctgacaatgaggtag

SEQ ID NO: 210493 - DNA, 96 bp, Homo sapiens
gtctgagaagtgaggagaccctccgcctcgcagccgccccgtctgaaaaattcagaattcctgggctccctgggtgcattctatcattccagttga

SEQ ID NO: 210494 - DNA, 76 bp, Homo sapiens
taacttcacggagtcccttcttcgtatggcagctgatgatgtagaagtgtgccatgcggagctgaatgccatcatg

SEQ ID NO: 210495 - DNA, 100 bp, Homo sapiens
accgaagcgggctgtgtgccccttctccacccagagggtcttactgaagtaacacaaagcttaaaaatggaaaatgaagagtttaagaagaggttcagtg

SEQ ID NO: 210496 - DNA, 100 bp, Homo sapiens
tgattgaattccttcaatctttgtaaaattctctgtggagctccagggtttgagccacaatgtgatcttcaccttggattctttgttaaaaggagaccta

SEQ ID NO: 210497 - DNA, 75 bp, Homo sapiens
tctgtggagctggtcaacgaccgcggggcgcaggaatttagataatgggctgtgtgcaatgtaaggataaagaag

SEQ ID NO: 210498 - DNA, 100 bp, Homo sapiens
cactctgccaagggatttaagcaatcagccaacccctctgtgcccctggatccaatctcagtgtctaactcatcatcccagattattctgaagtggaaac

SEQ ID NO: 210499 - DNA, 100 bp, Homo sapiens
acgacgtgtacctggacatcaccgctatggcattgctggttctaccaacgtgacaggtgatcaagttaagaagctggacgtcctctccaacgacctggtt

SEQ ID NO: 210500 - DNA, 116 bp, Homo sapiens
tacggggtgtacttgggaacgaggggtgaagcggcccaggtgagggttctaagctggtctatgtccatcaccttcttggagaaggagcctttgcccaggtgtacgaagctacccag

SEQ ID NO: 210501 - DNA, 100 bp, Homo sapiens
ggcctcggcggccgctctgcctgcgcgctgctcctgctctgctacctgaacccagcccttgctgacatctacacagagcacgcccatcaggtggtggtgg

SEQ ID NO: 210502 - DNA, 100 bp, Homo sapiens
aacacaggcgccgaccgcctcatgacccagaaactgccagaggcatgcagcattggtgatggaaagccctttgtcatgaatctgcaggatctgtatatgg

SEQ ID NO: 210503 - DNA, 74 bp, Homo sapiens
tcattcatcacaagtattgcaaacaagcacgaaagtcaaagaagttgggaaagttaaaagggattcacgaggag

SEQ ID NO: 210504 - DNA, 59 bp, Homo sapiens
ccgacttcgatgatcgtgtgtcggatgaggagaaggctgcacatggtccgtctaatgct

SEQ ID NO: 210505 - DNA, 97 bp, Homo sapiens
ggacatcctgagtggggagcagctgcgggtgttccgggagcaccggggctccgtcatctgtctggagactatgtcttcagcagtggtgcagttatat

SEQ ID NO: 210506 - DNA, 75 bp, Homo sapiens
gagatgacgggctttctgctgccgcccgcaagcagagaaatgcactcggtgatggaaagagagccactattctga

SEQ ID NO: 210507 - DNA, 75 bp, Homo sapiens
ccagcggccagatcggcttcatgctgtgcagcaagaacccgtctattatcctcccagtccacaacgctgaaccgt

SEQ ID NO: 210508 - DNA, 100 bp, Homo sapiens
acaaatctgaagatgaaacagagtatggctgcagaggatccatctgtcttagcaaggctgtcatcacagttgaactcccaccacctgatcttggaccaag

SEQ ID NO: 210509 - DNA, 97 bp, Homo sapiens
cctggagtctgcgaaggccgggacccggttccccggcccacagtgggggtgtgcaaacccgagagaactgggaaaaatgccagctgtgggacaagga

SEQ ID NO: 210510 - DNA, 75 bp, Homo sapiens
tttctgtcaggatgaattggcagagcttgacccaggcactacctaccgatgttcaccgtgctcaggaaattcacc

SEQ ID NO: 210511 - DNA, 75 bp, Homo sapiens
gaaccttgctccgagagggagtcctcgcggacgtcagccaaggaacatgcttgccaactcagccagcgtgaggat

SEQ ID NO: 210512 - DNA, 74 bp, Homo sapiens
agcccctaagggcccttcgcgggagagcgtcgtgcacgcgggccagaggcggtatgagaaagtgccagtcatct

SEQ ID NO: 210513 - DNA, 82 bp, Homo sapiens
attaagtcaaatataagagtctgactacttgacacactggctcggagaatacttatctctggcgcacatcactatatttggc

SEQ ID NO: 210514 - DNA, 100 bp, Homo sapiens
cggaacatgtcgcctgatgaaatcaagatcccgccagaaccccctggcagatgttcaaatcacttgcaacacacagagccgctgaaaacgactgaagaga

SEQ ID NO: 210515 - DNA, 118 bp, Homo sapiens
gaagaccgcgcgcagggcctgcagcgggagctggacggcgagcgcgagcggcgcgagaaaaggtggcgagaggcgtgctgaccagtctgccaggagacagcgtgactctgacctgccc

SEQ ID NO: 210516 - DNA, 100 bp, Homo sapiens
attcctgcagctcagcagccgccgccagagcaggacgaaccgccaatcgcaaggcacctctgagaacttcagaactacctgaagaagcaggtcacacccc

SEQ ID NO: 210517 - DNA, 100 bp, Homo sapiens
ttaataatgacaatctcctcagggaaggggcagcacaattgcaaaggtcgactgcaaggaagtactagacatcatttgtaatctggaatctgaggggcag

SEQ ID NO: 210518 - DNA, 82 bp, Homo sapiens
gccgctgagccgtcgcggagccgcgcagccctcggagcacggttgggcccgaaggcatcctgcagaacggggctgtggacga

SEQ ID NO: 210519 - DNA, 83 bp, Homo sapiens
gaaccagctctccaagtcagatgtcgtgctgtctttctcattggagaaaacctcggatcaattctcagctggtggcacaacaa

SEQ ID NO: 210520 - DNA, 99 bp, Homo sapiens
gattgcactgctgtaaaaactcagttactcaaactgaaacgtctcctgcatcagcaattcacagaagctgtgagtccttcagtgctacccccttcagct

SEQ ID NO: 210521 - DNA, 82 bp, Homo sapiens
ctagtcgagagacagaccccccccggaattctgagcaccaaaaggtgtcgtgaaaactacccctaaaagccaaaatgggaaa

SEQ ID NO: 210522 - DNA, 75 bp, Homo sapiens
tagaaacgttcttgctgcaatcagcccttacttcaggaaaaacagcactggaggcaatgtttctataaatcaaag

SEQ ID NO: 210523 - DNA, 75 bp, Homo sapiens
gggagttgctgctgcctccaccagacaccaaaccaggtgtatggaatgattcggttctcaggcaccacaggccag

SEQ ID NO: 210524 - DNA, 99 bp, Homo sapiens
tcgggctccagccccgtccgcgcgtctcccggcgtgggtgcgggaccagggcgctgcggggcgcgcagggttttctccaatgagggccagttcaagttc

SEQ ID NO: 210525 - DNA, 75 bp, Homo sapiens
gttgagtggagatgcttctgtggaagatgatgcttttatcaagctttgaagatactgctataatttgaaaatttg

SEQ ID NO: 210526 - DNA, 100 bp, Homo sapiens
ctgaaccgcgcggccgaaccctccggtgcccgtggttgacacgagctgtgtccccagctgttcccgtctacaatggcatcatcttcctctttgtcctggc

SEQ ID NO: 210527 - DNA, 96 bp, Homo sapiens
cagaccttcaagatagacattgaccccgaggagacggccttcaagagtgcactgatgagttcctactggtgctcagggaaaggggatgtgatcgat

SEQ ID NO: 210528 - DNA, 100 bp, Homo sapiens
cagcggcagaatggcctcgcccacgaccgggccccgctgaagccgacgtagcttctctgaacagacgcatccagctggttgaggaagagttggatcgtgc

SEQ ID NO: 210529 - DNA, 75 bp, Homo sapiens
tgtgtgtttgcggagatctggcctttattgctccaccaagggaacttcaaagagagctagcaatctagagaatag

SEQ ID NO: 210530 - DNA, 100 bp, Homo sapiens
ctgccaccctcaaggagttcacgttcatgggcgagggaacagatgagaaacccggcaatgaaagatgcggaagggagagctgtttgactatctcacagag

SEQ ID NO: 210531 - DNA, 95 bp, Homo sapiens
caatcaaatcagtcactgggatttgggaagttccttcttctttgctggcactgttattacaaccatagggccaacattgcctagacaaaactcac

SEQ ID NO: 210532 - DNA, 75 bp, Homo sapiens
caaattgctcacagctgatcctaagatgtggtggtacagtgggagctattctgacatgtccactggaagttgtaa

SEQ ID NO: 210533 - DNA, 90 bp, Homo sapiens
aacatagttttggaactagcagatgctggcgacctatccagaatgatcaaggcactttgtgagtgtgccctccagactccttatgacagc

SEQ ID NO: 210534 - DNA, 100 bp, Homo sapiens
aactaattaactgttcagcccagtttgaagcaaatgcttttgaagcaccacttacatttgcaaatgctgattcagttgttcaggggatgaaggaagctca

SEQ ID NO: 210535 - DNA, 75 bp, Homo sapiens
cacacatcaagttaaatttggtcaacaaaatccacgtcaggtcatcagaagattgagagaaagaggagaaccaat

SEQ ID NO: 210536 - DNA, 75 bp, Homo sapiens
tgcggagccgcgggccggcgagcgcgtcgccaccatggttaatttggagtggcccctggagtcagtttcctacac

SEQ ID NO: 210537 - DNA, 87 bp, Homo sapiens
aagaggcctgcagtgggagagcagggttctgtccacggtgtgtccaggaaaagaggaagaagaagtaggaggagctgtgtgcccgga

SEQ ID NO: 210538 - DNA, 100 bp, Homo sapiens
ctgctgcagtcattgccctcaacaccattaaggaatggcttgccaagaatcaccatgagcttgctgcccttgaatttcctccaaagaaactatttggaaa

SEQ ID NO: 210539 - DNA, 89 bp, Homo sapiens
gggggtggagaatacaaacctgacaagggtaaagggctgtgcctgcgcccagaagcagctacacttcatggaccagttgctcgatacca

SEQ ID NO: 210540 - DNA, 75 bp, Homo sapiens
atgtcctgtacacaatcttcatgaaaggttttacaagatgaattagaaaaccgttctaatcaggtgcgatgtgca

SEQ ID NO: 210541 - DNA, 100 bp, Homo sapiens
gcctgttcctggcccgcagccgccacctacccagtgaccatgataggctccttcctcagagaagcttcctgttatgtaccttatggattctattgtgaaa

SEQ ID NO: 210542 - DNA, 89 bp, Homo sapiens
cggtcctgacttcaactataaaaaatgaagtggatagtacggtgaacatcatagttggaaatgcagaaatcacctgtcttctgcgtcga

SEQ ID NO: 210543 - DNA, 82 bp, Homo sapiens
gaggagcctggctaagcaaaaccctgcagaacggctgcctaatttacagcaaccatgagatgatgataattccgaagaaggc

SEQ ID NO: 210544 - DNA, 90 bp, Homo sapiens
gaaaaaagaaccagatgtcaaaactgatttcagaaatgcatagttttatccagggagcatttccagctcgtttgaagaaggtgctgattg

SEQ ID NO: 210545 - DNA, 82 bp, Homo sapiens
gcctcctcccccatgtaccacacctgtgtggccttcgcctggggacagatgagcaggcaattgtggatgtggtggccaaccg

SEQ ID NO: 210546 - DNA, 90 bp, Homo sapiens
caggaacctgggcgagcagcggcgggggcccgaggggaggatacgaagcgttttcggcttcctgcccggagctgtgcagcaaacagtcga

SEQ ID NO: 210547 - DNA, 75 bp, Homo sapiens
ccactcctgagtttggagtctgctggatgatgggtggtttggggaaggaaaagtttcaccagtgatcattaaaga

SEQ ID NO: 210548 - DNA, 100 bp, Homo sapiens
gctacaaagcctagacctttcagccgctgccgaaatggctctgcgaacatcaatagatgcttatgacaactttgacaatatctcgcttgctcagcgtttg

SEQ ID NO: 210549 - DNA, 78 bp, Homo sapiens
aggcgctgatccgagaccctcgctcccccatcaacgtggagagcttgctggatgcaaagtattgttcctgggtgtgtc

SEQ ID NO: 210550 - DNA, 100 bp, Homo sapiens
ttccagaaagggtttgactggaggaacctctggagcagctgttggtactaagaagtgcctttcctgacgtctctgctgcttggaaccgcttctagagcag

SEQ ID NO: 210551 - DNA, 75 bp, Homo sapiens
gtttgacgaaacatacacaagggaaatgccctttaaaataaaccagccccatgttatagtacattgtgcagcaga

SEQ ID NO: 210552 - DNA, 75 bp, Homo sapiens
agttggaagcagccgatccagcctgcggagcctgtggggcaggtttatggttggctgtgggagatgtgatgactg

SEQ ID NO: 210553 - DNA, 98 bp, Homo sapiens
aagaccctacccgcttcactggcaccatggcgcgggcggtgatgaactttgtggttcgctaccggccagacgagcagccgtctctgcggccacaccac

SEQ ID NO: 210554 - DNA, 100 bp, Homo sapiens
acctggttccagctgcagcacgtggacgctgactcggaagtgcagatccagacatttaatgtggatgcaccatgccagaccgtggaagatttaacgaatg

SEQ ID NO: 210555 - DNA, 100 bp, Homo sapiens
ggtggtggccgtcgctgccaggcacaagtgtcccgccgcatctccttcagcgcgagccaccgattgtacaggaggagatgttaaagtaacccatcttgca

SEQ ID NO: 210556 - DNA, 100 bp, Homo sapiens
ctgggggaaccactatgatcatacttgattctaaagctcgaaaggcctgctatagttcagaatatcacatttggaaaatatgagaaaactcatgtttgca

SEQ ID NO: 210557 - DNA, 98 bp, Homo sapiens
caacggtggacacgtcattctgagaggacagtcattttgtttactcattcagccctgttgcaggtcccaataaactcttcataaggttgacagaagca

SEQ ID NO: 210558 - DNA, 75 bp, Homo sapiens
ctgttcctattgggccatcttggctccaccaccctggtgactctgacatcattagaagcatgccagaacagactg

SEQ ID NO: 210559 - DNA, 90 bp, Homo sapiens
gaaactaaaaaatggcagctctcagaatgggaagaatgagagaagtcatatgcccggcacaactccagggattagagctcgatctgcaag

SEQ ID NO: 210560 - DNA, 75 bp, Homo sapiens
ctatgaataccgcttcctggagttcacgactctgagtgctgttgaaaacgaggcccactgcgactttgtgaagct

SEQ ID NO: 210561 - DNA, 90 bp, Homo sapiens
cgcagcaacagcaagctcccgggcagcccgagcgggaagaagttccgcagcaagccgcagctggcgcgctacctgggcggctccatggac

SEQ ID NO: 210562 - DNA, 90 bp, Homo sapiens
acgctcctgcgggccccgcggagccattgcggccgagttgtgttggtgttgaagaggagaaggctgctgacattgacctctaccactgcc

SEQ ID NO: 210563 - DNA, 75 bp, Homo sapiens
attacctccgagggaaacaagaaaacatcaaagaggtctagcaaagagatggtggccacacagcaggagatgatg

SEQ ID NO: 210564 - DNA, 75 bp, Homo sapiens
tatgccaagctcagccccgaagtgcttcagatgtagagaataacaagcctttgtattcatttgaagataatgcag

SEQ ID NO: 210565 - DNA, 75 bp, Homo sapiens
gcccgtgccgcgagcgcggcctgcaggaggcccagctgagagccagcctggaggttacccagcagcaggccaccc

SEQ ID NO: 210566 - DNA, 100 bp, Homo sapiens
cttatctggtgctgcgtgctgaccccatggccccgggggtgcaggtaccgaaagcacagtaatcactggtgtcgatattgtcatgaaccatcacctgcag

SEQ ID NO: 210567 - DNA, 90 bp, Homo sapiens
cagaattacactgaagaagtagagtatttcaaccataaagacatcttaattgggcacgaaagagaaaatgatgcatcctgttgccagcag

SEQ ID NO: 210568 - DNA, 82 bp, Homo sapiens
acgacgagatggtggaggaggcggtggaagggttccttggatatcacccagagtattgaagacgacccacttctggatgccc

SEQ ID NO: 210569 - DNA, 74 bp, Homo sapiens
ctacatccatgaagacaggtcagtgcacagagctcaagaggtttggatatggaccttcttcaattcctggcctt

SEQ ID NO: 210570 - DNA, 100 bp, Homo sapiens
cgctcggcagccctcttccacctgggtcagtatgaggaaagaaagaaatctcgttttgggaatgctttccacctgtgtcgggaagttctgcgtttgacta

SEQ ID NO: 210571 - DNA, 100 bp, Homo sapiens
agaccaaggatgagcagtttgagcagtgcgtccagaatttcaacaagcagctggcatgtcgggccccaggcctgtggtgctgagcgggccttcgggagct

SEQ ID NO: 210572 - DNA, 82 bp, Homo sapiens
atccgctttgacgtgatggtgaacggcaagggacctcaggatggaaaccagcagcctgcaccgcccgagaaggtcggctggg

SEQ ID NO: 210573 - DNA, 75 bp, Homo sapiens
aaaaaacaaaacagaaaaaaacctctaggaaatgatctaggaaaatgacggaaatggagagctggatttctccac

SEQ ID NO: 210574 - DNA, 97 bp, Homo sapiens
ttgtcctacctgaagtatgccattagttcccaggaggaattttgttgtcagagaataaaaggaggttgtccataattgactttaagcagcaatcagt

SEQ ID NO: 210575 - DNA, 75 bp, Homo sapiens
attagagatttcttctggaaaactggaaacaaggtccacaaggcgattacaatttccagtcccctaaccacagac

SEQ ID NO: 210576 - DNA, 100 bp, Homo sapiens
gggattttcagctcgatacaatttcacacctggtatccaaaccttgaaacctttgctctagatgtcaggcttgtttttgacaactgtgaaacatttaatg

SEQ ID NO: 210577 - DNA, 134 bp, Homo sapiens
gaaatccttggagccctaacagaggaagagctgaggaccctggaaaatgagctggatgagctggaccctgatattcttcagtttgaagatatcttggccaatacgttctaccgagagcactttggaatgtacat

SEQ ID NO: 210578 - DNA, 75 bp, Homo sapiens
cagtctgcaactgtgtctgatggcggtctccgtgttggtcctcttcgccctggccttcctcacctgcgtcgtctt

SEQ ID NO: 210579 - DNA, 98 bp, Homo sapiens
tcaccgtgtgggagcgggagctgcggaaaggtcatcaccgagtggtcttctcacatcatccttcaggcagcaccaagagtcactggcagcagagagag

SEQ ID NO: 210580 - DNA, 90 bp, Homo sapiens
caagaatgctgacccttgtagaagttttctgtctcaactggtctctgacaagcctctgactgaatgtatccgtgctggccactatgcagc

SEQ ID NO: 210581 - DNA, 101 bp, Homo sapiens
ccaagagcacattgcctggtaagatgggagaagcaaagttgttgaaagatgggaaagtcttcagagtggtgcgagagaattgctgggatccagaagttcgt

SEQ ID NO: 210582 - DNA, 113 bp, Homo sapiens
gactcgcgatcttccttccggagccatgtcagaaggagtggacttgattgatatatatgctgacgaggagttcaaccaggagaaggaagccaacatccttttggagccatgaa

SEQ ID NO: 210583 - DNA, 73 bp, Homo sapiens
cgcgaatatcgtcatcgttagaagacacccatcatactgactccaagccccttgctctccagtatccacttct

SEQ ID NO: 210584 - DNA, 80 bp, Homo sapiens
ctgctattctccgagcttcgcaatgttgccaggtataaactccgaattgttaagccaccaaaattacccctagagaaaaa

SEQ ID NO: 210585 - DNA, 82 bp, Homo sapiens
gggggaccacaagatcctcatcgacagggttgtctcctcacagactatgagctccttgaaagagggaatcgtgtcttactca

SEQ ID NO: 210586 - DNA, 90 bp, Homo sapiens
cactgcttcaggtcacgctggtcgactgccccgggcacgcctccctcatccggaccatcatcggcggaagatccgttcagtgtccatcgt

SEQ ID NO: 210587 - DNA, 82 bp, Homo sapiens
ttggaggacactggaagatgggaagaaagaagcagctgccaggttcatggaatccgagctggacctaaatgacatcattcag

SEQ ID NO: 210588 - DNA, 100 bp, Homo sapiens
acacagtttgtcagcccttggaaagagagctattaagaatggcaaaggattgcatagcaagaaggaagtgcctatccaccgtgttgcagatatatctggg

SEQ ID NO: 210589 - DNA, 83 bp, Homo sapiens
atgtcattgaaaggcgctgcaagctggatgtagatgcacccagactgctgaagaaggtggtttgtgatgaaaatggttccaag

SEQ ID NO: 210590 - DNA, 75 bp, Homo sapiens
ccggctccggcccccgcaggagcaggtcctggcattgatgtgcctgctccagacatgagcacaggtgagcgggag

SEQ ID NO: 210591 - DNA, 102 bp, Homo sapiens
cctgttccttcgaagagggcccagggttgttcacctgcccaaaaattgtgtcttgagttctgggaggtgatcagtgatgaacatggcatcgaccccaccggc

SEQ ID NO: 210592 - DNA, 101 bp, Homo sapiens
accgggatggcgacgtctacactgagtcggaggcgaagattatggtgacaagctgaacatggagctgagtgagaaatacaagctggacaaagagagctacc

SEQ ID NO: 210593 - DNA, 100 bp, Homo sapiens
caatctactggattcaaaaacaattcaaggggagctgggctggatctcttatccatcacatgggcaggagcgagaacccgagcagcgccatgagcaacac

SEQ ID NO: 210594 - DNA, 82 bp, Homo sapiens
tggctaagctcatcattgttactggtcagcccaaggccaaccccactgtcactctgttcccgccctcctctgaggagctcca

SEQ ID NO: 210595 - DNA, 83 bp, Homo sapiens
ctcctccaacactggcgtcagggaaaacacaggacattggacaaggaagaggtgcagcggaagcggaggaaggccttgcccac

SEQ ID NO: 210596 - DNA, 80 bp, Homo sapiens
cactgcaagagtcaggttccgatgatcgcgctgcagagcctggagacacaggccccatccttcccaatggggacacttca

SEQ ID NO: 210597 - DNA, 75 bp, Homo sapiens
ggcctactcgcccgccaccctgcgctgccgccgctctgaggagttaaagggttattttggagctgttggagcact

SEQ ID NO: 210598 - DNA, 76 bp, Homo sapiens
ggatgagtctgccggcagcatatataaggttctccggaagaaacggcgtttagagcaacagatcgtggatctgaaa

SEQ ID NO: 210599 - DNA, 100 bp, Homo sapiens
ctcgactttccaacatttttgttattggcaaggacctcaccaccaagatcatgcagctgatcagtattgctccagagaacctgcagcatgacatcatcac

SEQ ID NO: 210600 - DNA, 95 bp, Homo sapiens
ctgggagaatatttaatggaaaatcgcttggttaaaacctgacacttttaacagcaatcccacagagtattgatgaggaaactgaagtttggagc

SEQ ID NO: 210601 - DNA, 85 bp, Homo sapiens
ttgtcatctatttgcaatgactcagagactaaggtgtcagtatgttcttcaagctgctctgctcctgggcccaagctattctcct

SEQ ID NO: 210602 - DNA, 83 bp, Homo sapiens
ctcgcctcgggtctcgggggccgctctgggatcccggccaccagcaattgtccggagaacgtatttaccgggcagtcaaagat

SEQ ID NO: 210603 - DNA, 75 bp, Homo sapiens
acagccgcggcggcagcagcagtgagaggacagaagtggcggttgctgacgcctggaaattcccctgaaggtgga

SEQ ID NO: 210604 - DNA, 98 bp, Homo sapiens
aaccagatgttttcccattgttcaaggacaaaggtggcccagaattttccagtgccctgaaaaatagacctggagttgctggctaccttaccgcaggt

SEQ ID NO: 210605 - DNA, 74 bp, Homo sapiens
gacattggtggaaacatttatgagaaagatcagtctaaagaaaaggagaagaaagtgaaaaaaacaattccttc

SEQ ID NO: 210606 - DNA, 100 bp, Homo sapiens
cctactgcagccacgcgggcgagcggctgtgtggatgtcggcgaagccgcgggcgaggtccctgtgcgttttattgcgacctgccggtgggaactttgtc

SEQ ID NO: 210607 - DNA, 101 bp, Homo sapiens
gaggaggaacgggaacatgaagtgatgacagctggcaaaatttctgaataaattggcagaagaacgcagacagaagaaggaaacttaagatgtgcaaggag

SEQ ID NO: 210608 - DNA, 136 bp, Homo sapiens
ccttcaagacagtgtgttggctttctggaaacatgggatgcagggtaaaagcttcaagtcagatgaggaccgtgacaaacactcatcgttgggtggggctctagtgcagtccgttggtgccaatattttataagcg

SEQ ID NO: 210609 - DNA, 82 bp, Homo sapiens
ttccttcagctctgccatcactccctgccgggtcaggtgtctcctttcctcttgggccgggcactttgggctgccagtcggt

SEQ ID NO: 210610 - DNA, 100 bp, Homo sapiens
tctggctctgaaggcgaacgcttcgctggccatttaggagctctgctcaaagccagacgatgcagcagcttttttatgagaattacgagcagaacaaaaa

SEQ ID NO: 210611 - DNA, 75 bp, Homo sapiens
ccgggagctctgaccgaggcgcctcgctggggcggggaccttgccttgcccgggatcgtaaagctgaaaattgaa

SEQ ID NO: 210612 - DNA, 98 bp, Homo sapiens
cgctgcccgcacaaaatgtcggcccggacgccattgccgacggtgaacgagcgggacacggaaaatgtaagaatgattgatgttggctgatattggag

SEQ ID NO: 210613 - DNA, 75 bp, Homo sapiens
tgaagccgcacgtagaattaagacggagttcctagtgcaaatgcaagtttaattggttggggtcagataagaaga

SEQ ID NO: 210614 - DNA, 100 bp, Homo sapiens
cgggccgcaggcagtcccgcggcagcaggatcacaggtatttctgggaaaagccagcttctgtttgcactggtcttcacaactcgttacctggatctttt

SEQ ID NO: 210615 - DNA, 100 bp, Homo sapiens
atgatccaagtcaccaagaaattactgtctcaagtgatacgcacccaactggtcagctaactttgatgtcccaatggaaacaacccacggtgctccattg

SEQ ID NO: 210616 - DNA, 80 bp, Homo sapiens
gggaaagacctaccagaacatgcggtcctcaaaatgaaaggtatagactatgtgatacctaaaacagggttttactgtaa

SEQ ID NO: 210617 - DNA, 83 bp, Homo sapiens
gagggaggccgttctcctcaggcagataaagagaggtcgtcaaagtcctacattttagctttcagtgctgaacttccttctcc

SEQ ID NO: 210618 - DNA, 75 bp, Homo sapiens
cctccccagccacgtggaactgaaatcatcgagttccccatcctaaagctaaatggccggaccatggagattgag

SEQ ID NO: 210619 - DNA, 51 bp, Homo sapiens
gtggagagcccgtccgacagcgctgagacactcttgcactcctgtaatgag

SEQ ID NO: 210620 - DNA, 75 bp, Homo sapiens
ggctgaccttgagtgcagctccccctataagcctcggcctccacaggtaaaaatgtctccatcgtatcatcagtc

SEQ ID NO: 210621 - DNA, 84 bp, Homo sapiens
tcggactcccgcggcgggaggagcctgttcccctgaggtgagaagccctaccactgcaactgggacggctgcggctggaagttt

SEQ ID NO: 210622 - DNA, 90 bp, Homo sapiens
cgcctcgggtctcgggggccgctctgggatcccggccaccagcaattgtccggaatccccttctggtcgaaggaaagctcttgctactag

SEQ ID NO: 210623 - DNA, 82 bp, Homo sapiens
ctgccatattgtgtcttccccggccggtccctcgcctcccggccgagctgacgtcaccttcaggccattcagaggaggaaag

SEQ ID NO: 210624 - DNA, 75 bp, Homo sapiens
actaaatgggagaagaggaatgttccctgacaatttcgttaaggttttcaaatggaacattttgatgcatcactt

SEQ ID NO: 210625 - DNA, 100 bp, Homo sapiens
cgccgaagaagcatcgttaaagtctctcttcaccctgccgtcatgtctaagtcagaggacctgggtctaccaaggagttgatcaagtccatcaatgaaaa

SEQ ID NO: 210626 - DNA, 50 bp, Homo sapiens
atgatgacccaagtatggaaatgagacgtgcaggtaccatcaggaagcag

SEQ ID NO: 210627 - DNA, 75 bp, Homo sapiens
ttagatctcacatgcttactccttttgtggaggagaacttagtttcagttggtacaggtcttgggcctacactgg

SEQ ID NO: 210628 - DNA, 75 bp, Homo sapiens
gatggaacaacaactggtcaattcaggtacatctccgttcatggatgcattaacagccaatgggacaaccaacat

SEQ ID NO: 210629 - DNA, 75 bp, Homo sapiens
cctccctgcaggcggaaggaaggcaattagagcgggttcgagcatacgggccaggtttggagaaatctggatgca

SEQ ID NO: 210630 - DNA, 82 bp, Homo sapiens
gtcattttactgtcaagacatttcttcggcattctgcaacagggccgcccaataactccagtatacacggtggctccaaacg

SEQ ID NO: 210631 - DNA, 96 bp, Homo sapiens
ttcccgatgacaacacggacctcgccgtggactcacaccacccggcaagaactgctcactacggctccctgccccagaagtcacacggccggaccc

SEQ ID NO: 210632 - DNA, 75 bp, Homo sapiens
cagacactgcaaatgaagctctcgaggctgctaagagactaaatggagatcttataacaatttttgatagttctg

SEQ ID NO: 210633 - DNA, 90 bp, Homo sapiens
ggccggccggtgccagcacctttcggcttctgagacggcggcagcagcggcattcagctgataggaagatgtcttcaggaaatgctaaaa

SEQ ID NO: 210634 - DNA, 101 bp, Homo sapiens
cgaagatcctagagatgcagaagatgcagtacgaggactggatggaaagtgaatatgaccatctcccagaacaggccttctatatggtgggacccattgaa

SEQ ID NO: 210635 - DNA, 87 bp, Homo sapiens
ctctgctcatgatggcatctgggggagcgcgggagccctggaggggaagacatttatgcagtgtgtgattctttctaaaacaactcc

SEQ ID NO: 210636 - DNA, 98 bp, Homo sapiens
tgatactgagctggaagccatctgccctcactatcagcagccaggctgtgattctaggattgaaaaagaggaaatgattccaaagcaggacatttctg

SEQ ID NO: 210637 - DNA, 83 bp, Homo sapiens
gacatgtccaggcggaaacagagcaacccccggcagatcaagcgtgtccctggccagtgtccttccacctgtccacaagcatg

SEQ ID NO: 210638 - DNA, 100 bp, Homo sapiens
gaggctcggagaaacaggcgccgcgggctccgcgcccggccggacccgggcccgagggcccagtgttcaccatcataccaggggccagaggcgatggctt

SEQ ID NO: 210639 - DNA, 100 bp, Homo sapiens
ggcagtgaagctcaagttgctactcgggacgctgcacctcccgcgccgcacggtggacgaggacctgaaggagaagaaggagaaggtggaggagaaggca

SEQ ID NO: 210640 - DNA, 74 bp, Homo sapiens
tcccagccacctctgaagttgccaggcttcccaacattcttgtctgtgttgatggagaaccttgtgacctgtct

SEQ ID NO: 210641 - DNA, 82 bp, Homo sapiens
gagaagtggagcaccaggagactgcctatgataactgttcccaggaaaaaaaggaggaaatcctggaaaatgaaaagcccag

SEQ ID NO: 210642 - DNA, 96 bp, Homo sapiens
gataaatccacgaaaggaaaaacagatctcagtgtacaaatctggggcaaagctgccattgcattcctctgaatattgatttgctgaatagcccag

SEQ ID NO: 210643 - DNA, 75 bp, Homo sapiens
tgcaagtggccaggctgtgaagcagtgtgcgaagatttccaatcatttctaaaggttctcatgtatcagccatct

SEQ ID NO: 210644 - DNA, 89 bp, Homo sapiens
gagtactggcggaggggctggacgttccacgccaaagcgggtgcctcccaggtcaaatggaataaaaaaaatgctaactgccttgccac

SEQ ID NO: 210645 - DNA, 73 bp, Homo sapiens
tagactgcacctggctatcccaaccaggagggacgataaggcagtcgatgatgtgaagaaaggttacatcaaa

SEQ ID NO: 210646 - DNA, 98 bp, Homo sapiens
gagaaactcggcaagcgcgcagtgtcgactccccggtctatgccaggcgcatctcagtgatggaatggggagaagatattaaagcagtttcaaaagat

SEQ ID NO: 210647 - DNA, 101 bp, Homo sapiens
gaaaaagcatccccgaggaggaagacgaatcgttaaacatctgaaagggtcagggtctcctatggacagaagtgcgggcaaggagctttgttcctccccga

SEQ ID NO: 210648 - DNA, 100 bp, Homo sapiens
ccgtgctacctgcagaggggtccatacggcgttgttctgggatcttaccaacagtatcattacagctgtgttcctttcagtagttgccatcttggccatg

SEQ ID NO: 210649 - DNA, 49 bp, Homo sapiens
tgcctcaccaagtcacatgacaagcagaattttggagagtaaaaggctg

SEQ ID NO: 210650 - DNA, 75 bp, Homo sapiens
gtagaccaaaggctcagcccacaactcttgtcctaccacctcagcctgaccttcataagaagacccagagtaaac

SEQ ID NO: 210651 - DNA, 90 bp, Homo sapiens
agggatcaaagagcaaacagattcagtggcctgcattgatacctggaggcatcattgaagactcctgtgtcttgcgtggagtcatgatta

SEQ ID NO: 210652 - DNA, 74 bp, Homo sapiens
ttcagagggcaatgaaggcacagaaatggaagtaccagcagaagcaatggctgccatccggaagaaactggtga

SEQ ID NO: 210653 - DNA, 76 bp, Homo sapiens
ccccccccgcccagagtcatggcggcagcagccgctctgagggcgcctgctcaggaaccagtgaccttcaaggacg

SEQ ID NO: 210654 - DNA, 96 bp, Homo sapiens
cagctctctgtaatgcgatactcaccagggaaacagaagtacctgtgcgccagcagaaatgattgcactattgataaattccgaaggaaaaattgt

SEQ ID NO: 210655 - DNA, 148 bp, Homo sapiens
gaggctgtagtggggctggtggtgcttccaactgcgggacaggaagtggccgtagcggcttgttggataagtgggggcccctgaagccactgatggaagccacactaccggggcatcggaccatgaacccctgtcctgtatgggagca

SEQ ID NO: 210656 - DNA, 100 bp, Homo sapiens
tcgcatcttcaacccccatcttttccaacatggctagatccatcagaaactgaagccgtggagaacgctctcggggcctttgccacttcttggagtagaa

SEQ ID NO: 210657 - DNA, 96 bp, Homo sapiens
cctggatgcacagccccggcgctgctgctggagccagttctgcttctcggcaaggagcgatttgctggtgtagacatccgtgtccgtgtaaagggt

SEQ ID NO: 210658 - DNA, 95 bp, Homo sapiens
agctgtgtggagtgttctaaccaacaaggaagagcagacatctggtccctgggcataacagctattgaacttgcaagaggggaaccacctcattc

SEQ ID NO: 210659 - DNA, 46 bp, Homo sapiens
aaggctgagggacgagaacgaggaatgttttaaaggaagttgggct

SEQ ID NO: 210660 - DNA, 73 bp, Homo sapiens
agagatcggcggagaccctcgaagtgcgcaaacttgacactcaccctgaccgagagtaatgccttctagcttt

SEQ ID NO: 210661 - DNA, 83 bp, Homo sapiens
ctcaagaaagtgatccagactactcagcacagttatccaagcattaggtgaacatcttaaattaagacaacaagttattgcca

SEQ ID NO: 210662 - DNA, 75 bp, Homo sapiens
gccgcccctggtgcacacaccctcgtattctcctgcccttccccaggtgtgctgggcatcaaggtgaagatcatg

SEQ ID NO: 210663 - DNA, 82 bp, Homo sapiens
cggaaacgcactttgggtttgagactgtgtcggaagaggagaaggggggcaaagatgctggttgccaacattgacttgggtc

SEQ ID NO: 210664 - DNA, 76 bp, Homo sapiens
tgagccccggcacccccggaccgaccatgggcagatcccaggctcgggttatgtatgattttgctgctgaacctgg

SEQ ID NO: 210665 - DNA, 87 bp, Homo sapiens
ttctctgtcagctctttccccgtcagcatcccagccgtgctcacggtggcctgtgagtacggcatggtgcacgtggtctcccaggcc

SEQ ID NO: 210666 - DNA, 99 bp, Homo sapiens
cagtgacatctttaccttctctgtgtctttagaaataaaagaagatgatggtaaaggttattttaggagtgagagcgcagagagccctgagacagcccc

SEQ ID NO: 210667 - DNA, 98 bp, Homo sapiens
ggttaatctgttggattctaatgcagttcatcacatcattcatgattttcagatgatagaggtactgacaacaactgactctcagaaactgctacacc

SEQ ID NO: 210668 - DNA, 101 bp, Homo sapiens
atgacagaggaggcagctgttgcaatcaaggccatggcaaaataactggctcccagggttccaggacatagtctgaggcaagatggagggtatgaggggcc

SEQ ID NO: 210669 - DNA, 50 bp, Homo sapiens
tcctgtacagcctgcagaactctttagccagggccctctgaaggatgcac

SEQ ID NO: 210670 - DNA, 100 bp, Homo sapiens
cgagaaatcaaactttgggcacaagtcatgaagccgacaagcccgggagacacagtgtcagaattacaagatgaaggtcaccgtgtccaaagggggcgac

SEQ ID NO: 210671 - DNA, 90 bp, Homo sapiens
caggtgtacaagtaccccttcgagcaggtggtcgccagctttctccgaaagtgagaaagatcagtctaaagaaaaggagaagaaagtgaa

SEQ ID NO: 210672 - DNA, 100 bp, Homo sapiens
cggactggcacgcagactgcttcaggtaccaggacattattcactctattcatctagcacggaagccaaatttgggtctaaaatcttgtgatggcaacca

SEQ ID NO: 210673 - DNA, 100 bp, Homo sapiens
cccgcatcagcggcctcggggaatggaagcggagaacgcgggcagttttcggctttgtgagaaaccttaccatcaaacacgatggccagcaacgttacca

SEQ ID NO: 210674 - DNA, 100 bp, Homo sapiens
ctcatcaagcaggagaaagaccgagtgctgggtaggccaggtttcagcatcgcagacaagaagcgcaggacaggctgcattggggccaaacacagaatca

SEQ ID NO: 210675 - DNA, 82 bp, Homo sapiens
agacgacaagcacacactatggcgctgaaacggattaataagtttgacaacttaaatgctgcgcatgaaacctctaagttgg

SEQ ID NO: 210676 - DNA, 82 bp, Homo sapiens
gccattacgtggctattgtctttgaaagcaacagctcctaccttggacgggagcatgcagccagtaaagatcccagagaagt

SEQ ID NO: 210677 - DNA, 100 bp, Homo sapiens
ccaaattgctgggaatgtccaaagtgctaccaggaggacagctcggagaaagcccaggggtggcctatgtatgcacagctactgattgatttattcaaat

SEQ ID NO: 210678 - DNA, 75 bp, Homo sapiens
ctggggttccctcctccgtttctgtatccccacgaggggacactacacagaaaatgagaactgctcactatccta

SEQ ID NO: 210679 - DNA, 90 bp, Homo sapiens
gcccgggagacccaggaggagcccgcaggtgtccttaagtttgctcgcttggtcaagtcctacgaagcccaggatcctgagatcgccagc

SEQ ID NO: 210680 - DNA, 96 bp, Homo sapiens
ttttcagagggagcttgcaagcctggctatgcttcagccttgatgacggccatcttcccccggactttccttatcccagttgattgtgcagaatac

SEQ ID NO: 210681 - DNA, 50 bp, Homo sapiens
agaggaaccacacgctgatcatgaccatgtctgcaaaggagaagtcgaag

SEQ ID NO: 210682 - DNA, 90 bp, Homo sapiens
gcagtgctggagccaggtggcgagagtgctatgaagggaaatcctccaaagatatcctgaaaagagtagctgcaaatgcattgatgtcac

SEQ ID NO: 210683 - DNA, 121 bp, Homo sapiens
aacagtggaatttcagaggggctccgagaggcaaacttttaagattccaggacctctgatggctgatttcatcttcaagacttgccttcaaggtgtgcaagtaaggacttatctccagaaa

SEQ ID NO: 210684 - DNA, 97 bp, Homo sapiens
ttagctctgattttgaggtgggagactccatggcctcagaggaagtaaagcaagcatattgccaattatatctctgggatccagactatcggacata

SEQ ID NO: 210685 - DNA, 50 bp, Homo sapiens
gagaactggagggggacacctatgaccggagtccagagtgcaagccagaa

SEQ ID NO: 210686 - DNA, 83 bp, Homo sapiens
atctgctctaaaggagaccaagcttaccctgaaagaagcagatcccagttcaaaagtagccataagaaggaaggattcaccac

SEQ ID NO: 210687 - DNA, 98 bp, Homo sapiens
taacatattactggcatcttcaatctgtgcttttttaggaccaaaggatatatttccttactcagaaaataaggaaaagtatggcaaaccaaataaaa

SEQ ID NO: 210688 - DNA, 101 bp, Homo sapiens
tggagatgggcagacggattcatttagagctgcggaacaggacgccctctgatgtgtgagtgtggcaacgtgcatggccatcctccatgtgggtagtgccc

SEQ ID NO: 210689 - DNA, 110 bp, Homo sapiens
gaacttctgcccagctctccttgggattgaggagactgaagaatgctgaagacaggctgatgggctcagctggtaggctccactatctcgccatgactgctgaaaatccc

SEQ ID NO: 210690 - DNA, 90 bp, Homo sapiens
gcgagtgggagcaccaggatctcgggctcggaacgagactgcacggggaaatctgtgcgttcaagatccatggccaggagctgccctttg

SEQ ID NO: 210691 - DNA, 94 bp, Homo sapiens
atatcgacgtcgtgatccagaagtccagagctgaggactgcctgtttgcaggccagcatccttcagaaaaagcatccccgaggaggaagacgaa

SEQ ID NO: 210692 - DNA, 100 bp, Homo sapiens
ggacaatgttcttcacctggcccagcgccacggggtggacctggaaggccaaagaatcctgggagatggataccaaagaaaaattggagcaggctgccat

SEQ ID NO: 210693 - DNA, 98 bp, Homo sapiens
aatgtccgaaggccgcagtacttgaccctgtattttgggagtcgaacggatgtttaactgctgaagagatcttttcccttcatggcttttcaaatgct

SEQ ID NO: 210694 - DNA, 88 bp, Homo sapiens
caaccaaattgtcgccattaagaaagtctatcatttggcaagtgtacgcttacgtgatctatgtctaaaactggatgtttcaaatgag

SEQ ID NO: 210695 - DNA, 98 bp, Homo sapiens
tggaggttcgagcgctgttctcgctccggagccgctgcacatttcgcttgagaatgccagactgtcatcagagatgaatacttctactgtcaacagtg

SEQ ID NO: 210696 - DNA, 100 bp, Homo sapiens
tgcctattaaaatctatgggagaatggtgtttggagaagagggattgaccctgaatcttgaagacgttcagcctcatgacttaggaaaagttggagaggt

SEQ ID NO: 210697 - DNA, 98 bp, Homo sapiens
cagagaagccatgacaggagactggtgattggtgcaagcgacgtgggatgagcaatgttgagaatgacagaagaccatgtgcttcccgagctgaataa

SEQ ID NO: 210698 - DNA, 80 bp, Homo sapiens
gcggccatcgccctgccggaccgcgcctcaggctcccccagtttgtgatggacgcctctgaccccacccagctctctgca

SEQ ID NO: 210699 - DNA, 100 bp, Homo sapiens
cgaccgacgcgccacccgccgacgcctcagccgcttggggcccgcacggaccctctacttcaattacaggagcttattaatcataagaaggctgaggaca

SEQ ID NO: 210700 - DNA, 90 bp, Homo sapiens
tgcgaacatgtaacaagaatccaaagaaaacaaaatggtggtatcatggggatgttggaaattactattatggacaaggccacccaatga

SEQ ID NO: 210701 - DNA, 99 bp, Homo sapiens
cgaaaagcaagaaatcaaataacacagttggaatccttggttgggcccatgagatgtgtgctctgtatattccggaggtacaatttgccagtgtttcca

SEQ ID NO: 210702 - DNA, 90 bp, Homo sapiens
caggaagtggctctgcggggaattgtgaggcggactgcgagggaaagggggccttgttgagtccgccaggagagtcgcggttgctgatcg

SEQ ID NO: 210703 - DNA, 90 bp, Homo sapiens
ccagcatcctggggagcacccatttcctgggaacaagctgacccttttgcgcagtgttgatggtagatgatgacacactcatcagcaccc

SEQ ID NO: 210704 - DNA, 100 bp, Homo sapiens
aactgaagtatctgtctcatccaaaaagtctgagcgaggagtgactgccaaaaaggagtatgtgtgccaggtaaaggcgacacaggaggagaaccgggag

SEQ ID NO: 210705 - DNA, 100 bp, Homo sapiens
ccccaggtgtaagcgcagaaagcaggcgaacccgcggcgcaataacgacatgggaaagcggaaccaccaaaaggagtgatgatcaacgatctcatgataa

SEQ ID NO: 210706 - DNA, 82 bp, Homo sapiens
agagtgggaacatgacgcaggtgcaggtgtctcttctcgccctggcggggaaggaaggtgctcgggtcttcggggcactggg

SEQ ID NO: 210707 - DNA, 99 bp, Homo sapiens
gggcggtgagcagtgacaattgctaggcggagacagtgcagggaagagagaccttagaaaggatcaggactggcgggacggggaggtttactgcatcga

SEQ ID NO: 210708 - DNA, 90 bp, Homo sapiens
ccaccatctttcgggctgccgagggtgttcttgacgattaatcaacagctgtggcagaggtaaaacttcgagatgatcaatatacactgg

SEQ ID NO: 210709 - DNA, 73 bp, Homo sapiens
ttgaagagaaggggaataagactgcatctgttcatatgaggcttgaccactatgctatcatcaagtttccgct

SEQ ID NO: 210710 - DNA, 75 bp, Homo sapiens
cgatccaaaccacctatctgcacactccccaaattttctctgtgggcagttctttttgttttgggaagacttctg

SEQ ID NO: 210711 - DNA, 134 bp, Homo sapiens
tgctgtctacagtggcctgaagggtgagaagcacggccgcggaagcagataccagaatgagctgaaagccagtggtggcgaaatcaaaattcataaaatggagcaaaaggagaatgtgcccccaggtcctgagg

SEQ ID NO: 210712 - DNA, 100 bp, Homo sapiens
gaaaagatgaaaaggaatatgcattgaagcaaattgaaggcacaggaatatccatgtcggcttgtagagagattgcaagttttgaaaagaaacttgctcc

SEQ ID NO: 210713 - DNA, 100 bp, Homo sapiens
gaaggctgctattgaaagagagtatgcacaggaagggaaaaggccgaggcatcagcgtgtgaagaccgcaaagacgatcccgagtacagttgtgaacagc

SEQ ID NO: 210714 - DNA, 98 bp, Homo sapiens
taaagagacacataccaaattggatctatccagatatgaaaaacagtagctccgtatcgaatacattgacaaatggatgtgtcatcaatggacatttg

SEQ ID NO: 210715 - DNA, 101 bp, Homo sapiens
gcaaacaaacccaattcctggtgtcccctagtcttggcggaggagccttttagatgagccccgaaaggccgggcaggacacaactcagatgggaagttcat

SEQ ID NO: 210716 - DNA, 75 bp, Homo sapiens
gagagctcgccccgaacgggggtcttcctcctccgccgttgacagaccacctggtggcccatggtagaatggcag

SEQ ID NO: 210717 - DNA, 80 bp, Homo sapiens
tcgcctcggtgcagggctccaccccgtcgcctcgacagctgtctgcttttctgtggagactgcgggttgcagacaccagc

SEQ ID NO: 210718 - DNA, 83 bp, Homo sapiens
gtgcagccaccctcgctccctctgctcttcctcccttcgctcgcaccatgcatacagtgaagttgttctctgaagttcctcat

SEQ ID NO: 210719 - DNA, 100 bp, Homo sapiens
gcacatttgacttggaagcaatgtttgaacaaactcgaagaacagctgtggaaagaagttgcaaaacactgggtttaccgacaagactgtgaaactttcg

SEQ ID NO: 210720 - DNA, 98 bp, Homo sapiens
cgaactatgtggaggagatgtactgtgcttggctggaaaaccccaaaagtgtacataaggatgaatctgaatttagagacaaactcactccaattact

SEQ ID NO: 210721 - DNA, 100 bp, Homo sapiens
gtcaaatgcactgtccagacggagatccgggtctgtcgagttgcttatgaaattatgcaaacactacatcctgatgcctctgcaaacttccattctttag

SEQ ID NO: 210722 - DNA, 73 bp, Homo sapiens
cgcactggaggagcggcgggcttcagacagtggaatcccccaaagaaggtaaagggagcaagccttccccact

SEQ ID NO: 210723 - DNA, 74 bp, Homo sapiens
ctggggccagggaaccctggtcaccgtctcctcaggtgggtttggaggatttgggacaacatctacaactgcag

SEQ ID NO: 210724 - DNA, 78 bp, Homo sapiens
atctaacgacctctcacagaaactatatgccaccatggagaagcataaagaggttccaatgattcttgttggtaataa

SEQ ID NO: 210725 - DNA, 100 bp, Homo sapiens
ctgagggagagtgtggaagaagcaaccaaggtggaatgaatcttacttgttgaatatcttctggttactagttggattcatttgtgaaagaatcattttc

SEQ ID NO: 210726 - DNA, 75 bp, Homo sapiens
cggggtggccgatgaatcacccaacatgctggtgtacagaaagtggtggtgaccgcggtggcttcaaaaattttg

SEQ ID NO: 210727 - DNA, 74 bp, Homo sapiens
ctgatcgactccagcatcatgattacctcccagaatattgaaggatgtttgttccaagatctctaaaaatcaag

SEQ ID NO: 210728 - DNA, 99 bp, Homo sapiens
gaagaagaaaagcgaaaagttcaaacacacgtcagcaggcagagatcctacaagaatccaggatgatgatcccagattgccagcgcaggttggaagccg

SEQ ID NO: 210729 - DNA, 115 bp, Homo sapiens
tgattgtgaggcctccccagccatgtggaactaatctgtctatgatcttctcccaaaggagttacagttacctccatctagagaaacatctgtagcatcaatgagtcagacaagc

SEQ ID NO: 210730 - DNA, 101 bp, Homo sapiens
agaaaaagttcttgggacaaacttcatttggactacaaagctgatgaagacccagcattattccagtcagtcaagaccaagagaggccctttgggacccaa

SEQ ID NO: 210731 - DNA, 50 bp, Homo sapiens
ggatccctgtggattactttgggcggcgactggcggcgcgatggacctga

SEQ ID NO: 210732 - DNA, 83 bp, Homo sapiens
ggaatctggaatgaaatcttccaagtccaaggatgtggaccatggctaaacctcctggatcattagccagaagcagcagcctg

SEQ ID NO: 210733 - DNA, 82 bp, Homo sapiens
caccgacgtcatcatgctgaccaccaatcagatccgtaagatgtggacgagtgctcactagcagaaaaaacctgtgtgagga

SEQ ID NO: 210734 - DNA, 99 bp, Homo sapiens
aaaagtgcgagatcaacttggacaggaattggaagaactcacagctagtctatttgaggaagctgaatatggtgggcatgatcagatagatttgtatga

SEQ ID NO: 210735 - DNA, 75 bp, Homo sapiens
agaaactgcaccttatcacccggaacctgcaggtgagtgatgaaatggtagtggagctcattgagaagaatttgg

SEQ ID NO: 210736 - DNA, 74 bp, Homo sapiens
acaggcgcctccggcccatttacggtgtagaatgagccaaggagactcaaacccagcagctattccgcatgcag

SEQ ID NO: 210737 - DNA, 96 bp, Homo sapiens
gcaaagtaacgcaggaacagaaaaccaaacaccacatgttgtctcttagaagtgggagctgaacgtgaacctccttggcctgggcgaagctgtgtg

SEQ ID NO: 210738 - DNA, 82 bp, Homo sapiens
gccaacaggggctgccggtaaccttgcagactcagtgttcctgaaagtacacctttcacagcagtcttaaagtttgcagcag

SEQ ID NO: 210739 - DNA, 75 bp, Homo sapiens
tcatgatgctcttagctccaataattcatggctagtgtgagaaacaccaacagcaggcccatctcagatcttcac

SEQ ID NO: 210740 - DNA, 75 bp, Homo sapiens
cagcacagaactgccaaaggccctgcaaggacaagtcacagtggagaggatacaagcagaagaaggcatatcaag

SEQ ID NO: 210741 - DNA, 98 bp, Homo sapiens
cgcctctgcctgccacacctggttgccctcacagatcagggagcagagaaacatgaaggcacaggtcagtcctctgggatcactgatcaagagaagga

SEQ ID NO: 210742 - DNA, 87 bp, Homo sapiens
acggcaaagacctggacttctacgacttcgagccgctgcccaccctccccgaggacgagggagttgaccacatttggccatttccca

SEQ ID NO: 210743 - DNA, 75 bp, Homo sapiens
gtctccttagctgctcacatatggatactttcacagttcaggttaaagaactgaatcattatctggaagctgaga

SEQ ID NO: 210744 - DNA, 89 bp, Homo sapiens
tcctgacctggtacgagcccggaacattcttcacaagaaagaactgaagcagattacctggctcagtgtcacagggctgctgatggtgg

SEQ ID NO: 210745 - DNA, 100 bp, Homo sapiens
ttgagtgcataggtcccggttggtagagggtttgagtccgcatcgccacagctgaaggctgcgagggactaagagcagaaaataaactatcaatcttgcc

SEQ ID NO: 210746 - DNA, 83 bp, Homo sapiens
cttccttcgttattggagccaggcctacaccccaggatctgcttcccagtgcaggtgaaccggctgcctcgggagacactgct

SEQ ID NO: 210747 - DNA, 90 bp, Homo sapiens
ggccaggcggatggtgagcaatggatttttacctcctataactccaccagaaaagttttttctttcccagctgatgctggcacccccacg

SEQ ID NO: 210748 - DNA, 100 bp, Homo sapiens
ccagtggtaaatgtcagctacaggccagcttatgaccaggaaggtactggtcctcgtgttatttctgcttttgtggagattatttttgataattcagaca

SEQ ID NO: 210749 - DNA, 75 bp, Homo sapiens
tgaagaataactgggtgttgctgtccaccgtggccgcggtggtgctaggatctggagtgggagagcaggatgggg

SEQ ID NO: 210750 - DNA, 82 bp, Homo sapiens
ggaatgttcttaacccagaagtagctgaatgtgttactccattgctgaggagtgggccagatattcgaagcttacaacatgg

SEQ ID NO: 210751 - DNA, 123 bp, Homo sapiens
cctgcccgctatgtgaccaatgctttccacccacaaagattgaacgacatgccatgtactgcaatggtctgatggaggaagatacagacaccattcgcttttcacccaagatgatttgatgtc

SEQ ID NO: 210752 - DNA, 100 bp, Homo sapiens
ccacagcctctcctgcccgggatgacaaagcctcctatgttgcctggggacacagcaccgtggtgaacccttggttttgagcaaaattttggactgtgaa

SEQ ID NO: 210753 - DNA, 74 bp, Homo sapiens
caaaggagaacttcctcgaggctggaactgggttgatgttgtgaaggcaaagtgtttcatggatttcaaagctg

SEQ ID NO: 210754 - DNA, 98 bp, Homo sapiens
aaggagactggaggtgtcctaaatgtgtcgccgaggcaatttcttgcaaccaccaccgaggccccgaaaagcactggtcgtcagggagctcctcccct

SEQ ID NO: 210755 - DNA, 98 bp, Homo sapiens
tccaggaggtcattgaggataagaggaaggcaaagaaaatcattgactctgaggtatctgtgcctaggtttgctgtggggattgtaataggaagaaac

SEQ ID NO: 210756 - DNA, 75 bp, Homo sapiens
ccgcttccacggcacctgcacctacatcctcctccaggcagggttcaagcgtgcaatggatctggttcaagagga

SEQ ID NO: 210757 - DNA, 100 bp, Homo sapiens
tctctacccctctgaagtttacccggatggcctgactcatcccagaaacggtgtgctgctgaggactgtcttggaccctgtcactggggatttgtctgat

SEQ ID NO: 210758 - DNA, 50 bp, Homo sapiens
ggatggcggaggcgcctcctgtctcagccagacccggtccgtttggaatg

SEQ ID NO: 210759 - DNA, 100 bp, Homo sapiens
ctgggtggtctggagaccatggagaccctcacggagctgggcgacgagctgaccctgggagacatcgacgatccagagacaatggccccgatgggatgga

SEQ ID NO: 210760 - DNA, 115 bp, Homo sapiens
tctcttctaattgatgctggggccaatgtgaatgtgaaggacagaaatggaaagacgccccttatgttgccttagaagtggtgagatgggaagctgcagttggaagaccctggag

SEQ ID NO: 210761 - DNA, 98 bp, Homo sapiens
agatgaaccaagcactccttaccataggaaaattctgtttgaagatttccggtcctggctttctgatatttctaaaattgacctggaatcaaccattg

SEQ ID NO: 210762 - DNA, 101 bp, Homo sapiens
ggagccgacagactgaaggacagcggcaccgccagacggccagaaagttccgccatgagctggggcacggagctgtggcacgtcagctaactgttcagatg

SEQ ID NO: 210763 - DNA, 100 bp, Homo sapiens
ccagaagataccaacttttgtttccaacctgagcaagtggtcgatcctatccagactgagggggttaaggtgatgcccaatgctattgtgcaatccgttg

SEQ ID NO: 210764 - DNA, 123 bp, Homo sapiens
cagcgagcggcgcggagctggacgccgcgatcgtggggcccgcgaggcgggcagccggggcgtccaggtgacttaagagattaaaattaatttggttgctgttggttctgaacaaataatgag

SEQ ID NO: 210765 - DNA, 74 bp, Homo sapiens
cacacctggatccaggataacggaggctggcatcagccactatgtgattgtcatgtccatgaccatctttttgg

SEQ ID NO: 210766 - DNA, 75 bp, Homo sapiens
cctcggtgcggcggcgagcgcggtcgagatcgccatgcctacccatgtgctggtggacggacagccatgtgaccg

SEQ ID NO: 210767 - DNA, 74 bp, Homo sapiens
cgcagcaaagcgcccagcctgccgcctcgctgtccctgcggcttctggggattacttctctaacaggatcacca

SEQ ID NO: 210768 - DNA, 100 bp, Homo sapiens
ctgggggcaacttggcacttagaaccgcagcagggacgtcggtttgctatcgggactcggcgaggacgctgtcacctgtgtcattcactcacaatggaag

SEQ ID NO: 210769 - DNA, 82 bp, Homo sapiens
gccgagtgggaaagaagctcgcaaaagcagcaaacaggcagtaatcgaggagaaaagccttacagatgctcatgggaagggt

SEQ ID NO: 210770 - DNA, 75 bp, Homo sapiens
tggaagataaagcatggagttggctaatggatgctgactgcttccccacaacaaagagaaatgatggatcaggca

SEQ ID NO: 210771 - DNA, 51 bp, Homo sapiens
aaacctgtcgggtagaaacctcagtgaagggttgaaaggaggagcaggagg

SEQ ID NO: 210772 - DNA, 76 bp, Homo sapiens
agcaccaagccttgttgggcactatcaggctctcagatcaggacctggaccaggcgctcagtgacgaagagctcaa

SEQ ID NO: 210773 - DNA, 98 bp, Homo sapiens
gttgtctgtgccaggtggcctccttggtatgccagtaatctatgccagcaattatgacaatgttagcagaccatgcagctcgtcagctgcttgatttc

SEQ ID NO: 210774 - DNA, 100 bp, Homo sapiens
tgtgtttggagacttcaaagatgtattgtgactctgacatcattagaagcatgccagaacagactggtgaaaagtaaaccttttcacctacaaaatttca

SEQ ID NO: 210775 - DNA, 50 bp, Homo sapiens
gagaaccgtcagtttgagccagatggcaaaggctgccacccaaaaatgtt

SEQ ID NO: 210776 - DNA, 83 bp, Homo sapiens
ctcattcacttctagacgacaaaatgcaaaaaaggaggccaaagactttgtcacatttctctgcagcaatatcattcattttg

SEQ ID NO: 210777 - DNA, 98 bp, Homo sapiens
ctgggctcgccagtcttggggacagtgtcagcttttcaatggttccagcaggtcaacacgggagaaggaacctgttcaaaaacacaaaagcaaagagg

SEQ ID NO: 210778 - DNA, 100 bp, Homo sapiens
ccagaacccaagaagattccgataagaaacacgtttatctggaagaatgtgaactggctaaacagctttatccaaaggaaaacgatttggtgtttttagc

SEQ ID NO: 210779 - DNA, 96 bp, Homo sapiens
tggccccaggtgtaagcgcagaaagcaggcgaacccgcggcgcaataacgtgttatagttttgccgctggactcttccctcccttcccccacccca

SEQ ID NO: 210780 - DNA, 120 bp, Homo sapiens
caaagcagcgcccgtctgcttcgggcctctggaatttagcgctcgcccagctagccgcaggaattgaatgatctggcacgggaccctccagcacagtgttcagcaggtcctgttggagat

SEQ ID NO: 210781 - DNA, 75 bp, Homo sapiens
ctggtcatcttctatttccaaagcgcatattaaatttcctattgactacccctattcaccacctaccttcagatt

SEQ ID NO: 210782 - DNA, 51 bp, Homo sapiens
cgtgactttcccctcgggtccagatggcccactgcgtgaccttggttcagc

SEQ ID NO: 210783 - DNA, 82 bp, Homo sapiens
tggagagaacagttcattgaagctatcactgtcagtgctggagtccaacctataccttctcagggaggcaaactagaaatag

SEQ ID NO: 210784 - DNA, 90 bp, Homo sapiens
caggaaccatttagcgtcagaaataagccgttttttgacatctgtacttcaagaaagaatcgggaccagtattcacatctgctaagtgat

SEQ ID NO: 210785 - DNA, 100 bp, Homo sapiens
cctccgagaagaacctctacgccgacatcgacgccgcgtggcaggcgctgcgcacccgcccactgtttgtaacatggaagattggtcgagacaaaagatt

SEQ ID NO: 210786 - DNA, 110 bp, Homo sapiens
ctcaagcacacccaatggacagcatgcctcaccaagtcacatgacaagcatttgaaaatgagatcatcaccaagctggatcatgaagtcgaaggaggcagaggagacgaa

SEQ ID NO: 210787 - DNA, 74 bp, Homo sapiens
aaaacggccaagaggcagacctaggaaatggtatctacatgaaaatgggattgtccatcgtgatctcaaaccag

SEQ ID NO: 210788 - DNA, 75 bp, Homo sapiens
cctcaagaaaggtgacttggtcctcgcggacgccaggaggaggcgtctccctattccttacttgatatctgcttg

SEQ ID NO: 210789 - DNA, 83 bp, Homo sapiens
tttgcagttcaatttcacattgcccacttatatgaaacccagattcttctaacagagaaaatgccattgaggatgaagaggag

SEQ ID NO: 210790 - DNA, 90 bp, Homo sapiens
cagttgaataacatggatgaagtatgttatgaaaatgttttgaagcaagtaaaggctggacaccaggaccgtataatagacgctggcccc

SEQ ID NO: 210791 - DNA, 127 bp, Homo sapiens
cacatgttgagcttggaggaggtggccccagtgctgcagcagacattacttcaggacaacctcttgggcaggggatcatagacggtatttctatgtaaacgaacagtcgggcgagtctcagtgggag

SEQ ID NO: 210792 - DNA, 114 bp, Homo sapiens
tcctgccgtccttctccactttcgccagcccgtgccgcgagcgcggcctgcaggagagacgtctcccacaacctgctccgggcgctggacgttgggctcctggcgaacctctcg

SEQ ID NO: 210793 - DNA, 74 bp, Homo sapiens
tatttgggtccaactgtgaagccagatgataagacacagaaccacacatgcagctaccccgggtggcacagcac

SEQ ID NO: 210794 - DNA, 83 bp, Homo sapiens
ttgaagcttggaattacatagctggaaaggatcttacagatgttgtgactgtgacagactcactggggtttgtacatgctggg

SEQ ID NO: 210795 - DNA, 90 bp, Homo sapiens
caagccaggctccaagtagcctgtataccagcacggccaggtatctcacatgatgctattgctcaagagtctaaacgatattggcagaat

SEQ ID NO: 210796 - DNA, 100 bp, Homo sapiens
gttctcggcaggagcggagagtttgctccaccaggccaggaggaacaggaattaagcctttcctggaacgctttggagagcgttgtcaagaacatagcaa

SEQ ID NO: 210797 - DNA, 83 bp, Homo sapiens
tacagatgcaggatcggaaagaatcccggccagacgtgcgaacagctccagctgggctctgaaccaagttgtcctatgggaca

SEQ ID NO: 210798 - DNA, 80 bp, Homo sapiens
gagaaatgtttgtactgaagcagaggctgggaggcggcagaatgcagccagaggagggcacaggctggctgctggagctg

SEQ ID NO: 210799 - DNA, 100 bp, Homo sapiens
catctgcgaagtggttgagaagcctgtacctgttttatacttgcttttgcttcagcgttctgtggttgtcaacagagagcagagctgacatctgataaag

SEQ ID NO: 210800 - DNA, 103 bp, Homo sapiens
gggccggtgccatcggaaaccggagtgaccagaggagggacacgctcctacgactttcctgctcttcagtcaaaagagtgccatcaaccgcatggtgattgat

SEQ ID NO: 210801 - DNA, 100 bp, Homo sapiens
gagaattaaagtctaactctccaaatgggcgagaggtcaatgatcttaaaagaaaatctccttcagatctttggaaagaggatttagcggcatttgttga

SEQ ID NO: 210802 - DNA, 100 bp, Homo sapiens
cctcgagcggctgctggacgaaggcgtgcaatggaattgagttttgccctggtaaatgggaataatatccgaggcatgatgaaagaattactttattttc

SEQ ID NO: 210803 - DNA, 50 bp, Homo sapiens
gatgggaatcctgccctaagcaaacggtgttcctcagagccttcaaactt

SEQ ID NO: 210804 - DNA, 100 bp, Homo sapiens
ctcctgagtgactgcgtcaggcatctcaatcatgctccaaagacaacaggccctccctctgccctcccgtctgtgagctccctgcccagcaccacctcct

SEQ ID NO: 210805 - DNA, 50 bp, Homo sapiens
aaagcaatatttcgagcagtttggcaagttgatttggagcatatgcgaac

SEQ ID NO: 210806 - DNA, 82 bp, Homo sapiens
cccctgttgcgatggcgcagaaaccccgttgacaaggcactgctttttcatgacggtgtccctggccagtgtccttccacct

SEQ ID NO: 210807 - DNA, 74 bp, Homo sapiens
ggactaatagctggcaaatttctgttccatcagcgtttgtttgttgagaaaccaaggcagtatcatgagcagga

SEQ ID NO: 210808 - DNA, 75 bp, Homo sapiens
ctgcctcccagccttctctccaggctctgaactttctcagagttcaaagaaggacgcagagccagccacacagcc

SEQ ID NO: 210809 - DNA, 51 bp, Homo sapiens
aggaggaaaattcatcatctggtgctggagagtcatgcctgtgagccctgg

SEQ ID NO: 210810 - DNA, 100 bp, Homo sapiens
ggaagtctgataccgcttgcagaagggaattgaatagatgtctccctattggagctcttgtccctggcaaagcgaaagcgcagtgactctgaggagaagg

SEQ ID NO: 210811 - DNA, 87 bp, Homo sapiens
gccagcgagccacgggagcgagccaggttatgaagacagtatggagtttccagaccatagtagacatttgctacagtgtctgagcga

SEQ ID NO: 210812 - DNA, 83 bp, Homo sapiens
agaagaaaggaagaaaagatgatgatagtgatgatgaatctcaatcatcccacactgactggatgttgaatttgttctctcag

SEQ ID NO: 210813 - DNA, 82 bp, Homo sapiens
ccagggaaccctggtcaccgtctcctcagccgaggcctgcctggagccccagatcaccccttcctactacaccacttctgac

SEQ ID NO: 210814 - DNA, 100 bp, Homo sapiens
ttacgtaaaagaacattacccgaatggagtctgcacttacagaacctgctaaggccatcaaacctattgatcggaagtcagtccatcagatttgctctgg

SEQ ID NO: 210815 - DNA, 82 bp, Homo sapiens
aagtaaagttccatcctgagaatatttcacaaagaatttccttaagagctggactgggaggagatgttaaagtaacccatct

SEQ ID NO: 210816 - DNA, 75 bp, Homo sapiens
gggatcggcagaaaagggtccccccggggcctgtaaggggtgcctgcggtaattttttctgcaggatgaattaag

SEQ ID NO: 210817 - DNA, 101 bp, Homo sapiens
ttcaacaccaccttcatctccaccatcggtgattcggtctgggcaaaaattaaggaaaaagtctgctgacacaggcgagaaacgtggaggctggtttagtg

SEQ ID NO: 210818 - DNA, 90 bp, Homo sapiens
agaagaccgacgtgaaagaggagaagaggaagaaggagctggaagttttggagaaaaggaaatgacactcccttcatacctgggaagacg

SEQ ID NO: 210819 - DNA, 51 bp, Homo sapiens
gttacttggaaagtccaagaggcccaagtgcatttgcccagtataacatgg

SEQ ID NO: 210820 - DNA, 96 bp, Homo sapiens
cgagaagcctctgaggcgctatggggcggtggaggagacggcttggaaaacggagagactggggagaactgaagaagcatctgtagggaatccaga

SEQ ID NO: 210821 - DNA, 98 bp, Homo sapiens
cccacttcaaacattcgtctcggaaaccccgcctcttacagtcacgagatcatacatctgtcggtggcctgggagacagtttttatgaatacttactg

SEQ ID NO: 210822 - DNA, 101 bp, Homo sapiens
cacgagaccggctacttctcggcgctgccgtctctggaggagtactggcaacagccgcggcgagtcctttgcacatgttggcaacacacgcatccgcatcg

SEQ ID NO: 210823 - DNA, 100 bp, Homo sapiens
tggcagccagtttggattttcactggacttccacaaggacagccatgggagtggaatgcagtagccctctgggcctgggatattgtggttgataactgtg

SEQ ID NO: 210824 - DNA, 100 bp, Homo sapiens
ctctccggctgcttggtctacggcacagctacctggcctatcgaaactttatgattgacacttaccgactgaacccccaagagtatcttacctctaccgc

SEQ ID NO: 210825 - DNA, 83 bp, Homo sapiens
aaggcaagagtaacagcagcgccgtcccgtccgacagccaggcccgggagaaaagccccatgtgccactcccctgatctgcag

SEQ ID NO: 210826 - DNA, 98 bp, Homo sapiens
ttgaacgaccagtacttggagctgttagaaaagcagaggctatactttaagactgtgaaagagttcaaggagtgttacctggaatgtcagagagctga

SEQ ID NO: 210827 - DNA, 90 bp, Homo sapiens
gtctctagcagcctgaatccagatcctgatgaatttgagcgaatatatgagcctctggatgtcaaaagtaaaaagattcatgtagtggac

SEQ ID NO: 210828 - DNA, 96 bp, Homo sapiens
ccgcagggacagaaacagttgggactgctcactagaagctcagcccaaatatgttagaggtgggaagcgttacggacgaaggtccttgcccgagtt

SEQ ID NO: 210829 - DNA, 74 bp, Homo sapiens
tcttgctcacagagctctgtaaaggacttcgagtaagaaggtgatttacagccagcctagtgcccgaagtgaag

SEQ ID NO: 210830 - DNA, 82 bp, Homo sapiens
gccacacaaggggagctcgtaaggtccctcaaagcgggaaatgcgtcaaaggtcatctaatacatgggagaaacatggattt

SEQ ID NO: 210831 - DNA, 101 bp, Homo sapiens
gcagaaggtctctggagacatcttcagcagcagcagccgctcttctaaaacattcaaaccaaagaagaatatccctgaaggatctcatcagtatgaactct

SEQ ID NO: 210832 - DNA, 75 bp, Homo sapiens
agaagacatgctctacagtgctcagtctttgagggtggtgtcatcacttctgacatgattgaaatgatattttcc

SEQ ID NO: 210833 - DNA, 51 bp, Homo sapiens
cagcctcccgagtggctgggattacaggcttctcctacgctggctcggtgg

SEQ ID NO: 210834 - DNA, 49 bp, Homo sapiens
caaggaaccggcacccccaagcccaggagtaaaccaagccaattcagca

SEQ ID NO: 210835 - DNA, 100 bp, Homo sapiens
gacaggactcaccttgctggctgctgccagcattgcttacatcagccgatcttcaacttgctgctgagcttgggaagacattactggatcggaacacaga

SEQ ID NO: 210836 - DNA, 75 bp, Homo sapiens
tcgactccagcatcatgattacctcccaggtgattgaattactcagatatgaagatcatcatctaggttttgtgt

SEQ ID NO: 210837 - DNA, 90 bp, Homo sapiens
cccgtgcctgtcttcagatcttcacagcacagttcctgggaaggtggagccaccagcctctccctgatacttgccagaactaatacagct

SEQ ID NO: 210838 - DNA, 89 bp, Homo sapiens
ggagtcacagttcccgcaggcggcgacagcagagcgcccactgcctccagcagatctgccgacaccccaggccatcgagccccaggcca

SEQ ID NO: 210839 - DNA, 82 bp, Homo sapiens
gaagaattcatgctcatccgggcactgcctccttacctgtgaggaatgcaaaataaagcatggattaagtgagaagggagac

SEQ ID NO: 210840 - DNA, 75 bp, Homo sapiens
atctggtgtaccaggcgaagctggccgagcaggctgagcgatacgacggacaatcctccaaacacagactgtttg

SEQ ID NO: 210841 - DNA, 75 bp, Homo sapiens
tcaactttctgggcgttcatgatcctggccagcctgctcatcgcctactgcaacggggcgggcaccatgaacaag

SEQ ID NO: 210842 - DNA, 75 bp, Homo sapiens
ccaagtgccatcttcaaaatttcaggtcttaaatctgatgtgttcagagcaacattgttttgttgacacaagcat

SEQ ID NO: 210843 - DNA, 100 bp, Homo sapiens
taccaggacccgggctttagctatggcagcggcagcaccgggagtcagcagagtgaagatgaaggatttgggggcagagcacttggcaggtcatgaaggg

SEQ ID NO: 210844 - DNA, 100 bp, Homo sapiens
ccgggacctgggctgggaacccgcggtggagcgggacacgaacgtggcgccatgtcagaaccggctggggatgtccgtcagaacccatgcggcagcaagg

SEQ ID NO: 210845 - DNA, 96 bp, Homo sapiens
ttggtgaagcaatttcaacagatatctgggatgacagcagcctttttggtatagatatgcttttctgggagaagaggctacaaggacttagtgcat

SEQ ID NO: 210846 - DNA, 100 bp, Homo sapiens
cgggcttttgctgacacacattcatgtcgtgagttgctaaggatagcagacaagttcacccaacataactttcaagagattatgactgtacccaatgacc

SEQ ID NO: 210847 - DNA, 100 bp, Homo sapiens
gaagaaagctgaatgaggttcagagcttctctgaagctcaaacagaaatcctggctttctccggaccccctgtttctggaacagaggagggtcagagaag

SEQ ID NO: 210848 - DNA, 100 bp, Homo sapiens
gctctgctacatgcccacctgagctcgggccagcccgacacccaggacaaccagacagacagtgggatggtgctggcctcggaggagtttgagcagatag

SEQ ID NO: 210849 - DNA, 100 bp, Homo sapiens
taaaatgaaagaaaccgctgaggcttatttgggaaagaaggtgagagaactggagcagaccttgcaggcctctgaggagcagctccaacagagcaagggc

SEQ ID NO: 210850 - DNA, 100 bp, Homo sapiens
attgctagctgtggccgactggtgaatgaacagaaagagcttgctcaggctggagcattggatttgctaaaggagcttaagaatattcctatgaccctgg

SEQ ID NO: 210851 - DNA, 101 bp, Homo sapiens
ctagtctcaaagcgcatattatgctacatgaaaaggaagagcagcaatgcagcaagtcttggaaaaccttacggagctgccctcgtctactggagcagaag

SEQ ID NO: 210852 - DNA, 90 bp, Homo sapiens
cgcagccggacatttagccgctcatcttcggcccccgaggtcatcatgtcccagcactacgacgggaaggcggacctgtggagcatcggc

SEQ ID NO: 210853 - DNA, 97 bp, Homo sapiens
ctgtcactaacaagctgcgtgatcttcgggcctggattccttctgaaaacattcaagatatcacagtcaacattcatcggctgcacgtgaagcgcag

SEQ ID NO: 210854 - DNA, 50 bp, Homo sapiens
ccgagtgtgcgaagctagccaagtctgaagatgatgagaaactgaaaaag

SEQ ID NO: 210855 - DNA, 88 bp, Homo sapiens
ggcttctcctatgactacgtgttcgactggaacatgctcaaatttactgagcgtgcctaccaaaagcagccgaccatctttcaaaaca

SEQ ID NO: 210856 - DNA, 101 bp, Homo sapiens
ctccactccgtcccccgcgggtctgctctgtgtgccatggacgggccctgggctgcatcttgtacctgctgtgcttccggcagcacccttttgaggatgga

SEQ ID NO: 210857 - DNA, 74 bp, Homo sapiens
gccctccccccatggccaatggaaaacctggcgaccctaagtcagcctcagagagttgtgatcacatgccctca

SEQ ID NO: 210858 - DNA, 75 bp, Homo sapiens
gagctgagtggttgtgtggtcgcgtctcggaaaccggtagcgcttgcagcatgggattaaagcctgtggtttcca

SEQ ID NO: 210859 - DNA, 101 bp, Homo sapiens
ctttcgtattcgttgttctcggcgggctgtggggcctccgcgccgcggccgttagtcatgtcggtgttcacaccctttccagaaattcttggctggtaacc

SEQ ID NO: 210860 - DNA, 50 bp, Homo sapiens
tcagatgctcccttctgctcctgatatcgtagtaaagtgttatcccgttg

SEQ ID NO: 210861 - DNA, 95 bp, Homo sapiens
ggagtgaagtcccagggatattctgtgctgctgacatagcccagagatacaggataagcaaatacccaaccctcaaattgtttcgtaatgggatg

SEQ ID NO: 210862 - DNA, 90 bp, Homo sapiens
gattcaagtgttggcggatggaagggaggagactcctgaccctcagaatggtgtttgatgtacagaggaaagtcacctataggaacctga

SEQ ID NO: 210863 - DNA, 75 bp, Homo sapiens
gatctacgtgtgctttttcaagggagctgataaagaacttcttcccaaaatgggactcagaattcatgattgaag

SEQ ID NO: 210864 - DNA, 75 bp, Homo sapiens
ggtatactcgcagacaacccaaccggtatacaatggtatggacctgtctgccaatcaggacgaggagaccgacca

SEQ ID NO: 210865 - DNA, 98 bp, Homo sapiens
cagcactgtggccagcctcgacacagattccaccaaaagctcagctcgatgctgccaatgtcaccaacagcaatggggcccaccatcagcctggacct

SEQ ID NO: 210866 - DNA, 100 bp, Homo sapiens
tccattctgttggttttatgcatctttatccaatcaagtgcccttggacaaagcctgaaaccaggaagctcttcgtgggcggtcttgactggagcacgac

SEQ ID NO: 210867 - DNA, 100 bp, Homo sapiens
gtgagcctcttccacgacccgccaggtgacgtggcaggaattggctgggagagaactgaggggactccacctcctccgggacagccagccaagggccggg

SEQ ID NO: 210868 - DNA, 76 bp, Homo sapiens
ggaacctctgacaagaccaagtactaccttcaaggtgtgtcacggggtcccagccctgtcagccttggaaatcagg

SEQ ID NO: 210869 - DNA, 100 bp, Homo sapiens
caagagctttctggaagaaaggaaatgttaggatcactttattctgacattgatgaatgctctgatggttttgttcaatgtgacagtcgtgctaattgca

SEQ ID NO: 210870 - DNA, 100 bp, Homo sapiens
tacacatggtgcacaggctaagtagtgacgttcactattatgaagatggcaatgttcagttggttagtcataaagatgtacaggattcactaactgtttc

SEQ ID NO: 210871 - DNA, 100 bp, Homo sapiens
ggctgaagacaccaaagatgggggaggggaaggtatcgagaaccttccctgcgaacttcagaggaacttccagctgatgcgagagctggaccagaggacg

SEQ ID NO: 210872 - DNA, 96 bp, Homo sapiens
gcgtgccgtgattgggattgggattgaggaggaagatcggaagcatacctggatggaggatgctgacagtgtacttaaacttcacccttgtttagc

SEQ ID NO: 210873 - DNA, 90 bp, Homo sapiens
gccgaggcttttaacaagaccatatctacaaaagaccaggccatttgtgtaggaccagaaaacatgcagataatgtatccagctatattt

SEQ ID NO: 210874 - DNA, 100 bp, Homo sapiens
agccccagaggctagacgctagacctgccatgtggagatccggggcggacggtcaaaatgcagatcttcgtgaaaacccttaccggcaagaccatcaccc

SEQ ID NO: 210875 - DNA, 85 bp, Homo sapiens
ccgagagctacacgttcacggtgccccggcgccacctggagagaggccgcgtcctgggcagagatatcagttttagagaatgtgg

SEQ ID NO: 210876 - DNA, 100 bp, Homo sapiens
ctggtccacggagtgtatgaccacaaacagccatcaagaatgcatggatctcaaaggaaacaaacacccaataaactcggagtggcagactgacaactgt

SEQ ID NO: 210877 - DNA, 90 bp, Homo sapiens
gcatgctatggaggcacagctgctgtcttcaatgctgttaactggattgagtccagctcttgggatgcttccttcaaaatgtctactgtt

SEQ ID NO: 210878 - DNA, 100 bp, Homo sapiens
acggaatctaatcaggaggttgctaacccagaacactatattaaacatcccctacagaacagtgtgaccgcaacaagggaaaacatggcttatactgtgg

SEQ ID NO: 210879 - DNA, 94 bp, Homo sapiens
cccctccgagctggggttggacgctgccagtttgcacagcagcaggtactccaaagattcaggtttactcacgtcatccagcagagaatggaaa

SEQ ID NO: 210880 - DNA, 100 bp, Homo sapiens
gtttcccgcctgagcgcaactagcggcgggtcgtgggcacctccagaatgtgaaggctgtgtctgagactcctgcagtgccaccagtttcagaagatgag

SEQ ID NO: 210881 - DNA, 100 bp, Homo sapiens
cagtcaaggcactcagctcaaatacacacacctgttgccattatagagctggaattaggcaaatatggacagattgttcagtttggcatgaatgaaaagg

SEQ ID NO: 210882 - DNA, 78 bp, Homo sapiens
tcactacatctatagttgtgacctggatatcaacgtccagcttaagatgagaaaagccttacagatgctcatgggaag

SEQ ID NO: 210883 - DNA, 90 bp, Homo sapiens
gctattcagacacccctgaaatctgccaaaaaaaaaggtagcagcactgcctaaacaagaggttatacaagaagaggaagagataatcca

SEQ ID NO: 210884 - DNA, 75 bp, Homo sapiens
ggtggatttccgagaacgagcggtggagattgatggggagcgcatcaaggagctgaccagtgctttggtgcatct

SEQ ID NO: 210885 - DNA, 50 bp, Homo sapiens
ctgactttgcagccacggagaggacaaaagactgtgttgtcaaatgttca

SEQ ID NO: 210886 - DNA, 98 bp, Homo sapiens
tacaaccggggctgcggtcagcgcttcgatcctgagaccaattccgacggttcacgcaaagaatctgctccacaagttttgcttccagaagaagagaa

SEQ ID NO: 210887 - DNA, 100 bp, Homo sapiens
tgcagcatctgcgatgtgaggaaaggcacctccaccagtgtctttttctgaagaagagaagtatcagctacgaaaatttgtcaataaatcttatctgctg

SEQ ID NO: 210888 - DNA, 87 bp, Homo sapiens
ggactcgccctctgggaggcttaccgagagtttgaaagtgcgattgtggaagctgctcggaaaaatatccttgtggattatggactc

SEQ ID NO: 210889 - DNA, 90 bp, Homo sapiens
tcatgagcagcctgcccaacttctgcgggatcttcaaccacctcgagcggctgctggacgaaggtggtctggacttggctattgagggcc

SEQ ID NO: 210890 - DNA, 159 bp, Homo sapiens
cgacgtctcctacctcctcacggctcttcccggcgctctcctggctcccttctgccccagctccgtctcggcggcggcggacatgtcatgctgcccaaggacatagccaagctggtccctaaaacccatctgatgtctgaatctgaatggaggaatctt

SEQ ID NO: 210891 - DNA, 88 bp, Homo sapiens
tagaataaaaactgtctgtgaggttgtgaatttaacaaatttacattgtatcctggaatccagatcttacataagatggaagtctctc

SEQ ID NO: 210892 - DNA, 95 bp, Homo sapiens
gtcaagtatgtcccaaacgtctttgtggaagaaggactctgggaaaatggcctttcctatgaatgtaggacgctgctcttcaaagcgatccacaa

SEQ ID NO: 210893 - DNA, 83 bp, Homo sapiens
tacgacgtccctcaaaccttgcttctaggagataaaaaggaagcgccgcggagccatcaacagcaagcagctcacctacctgg

SEQ ID NO: 210894 - DNA, 98 bp, Homo sapiens
aaagttattgccagcttcctgttcagacttggttccttcaacctagagaaagttgaaaacccagctgaagtcattagagaacttatttgttattgctt

SEQ ID NO: 210895 - DNA, 71 bp, Homo sapiens
cttctcccgcttcaacgaagaccgagactttcaggatgtgaccgaggcggagcaggcagaggagcaggcca

SEQ ID NO: 210896 - DNA, 100 bp, Homo sapiens
gccccttgctggcggctgcagctggtgccccagcccctctgtacctcgggggcctgcctggtcaaaatgcagatcttcgtgaaaacccttaccggcaaga

SEQ ID NO: 210897 - DNA, 100 bp, Homo sapiens
tacaagatccgggagatcgcggacgggttgtgcctggaggtggaggggaagattttccatggcctaaaaagcacagatgttgccaagacctttagaaaag

SEQ ID NO: 210898 - DNA, 80 bp, Homo sapiens
gtatgcaacctcaggcttcagccaagtcctgtgtatggaaactcacatgagtcagctcagtctagaagggtagtaatttc

SEQ ID NO: 210899 - DNA, 83 bp, Homo sapiens
aagctgtctctgatccgcaagcatgctcagaccttcattgctctgtgtgccaccggtacatcctgaaggtaaatttgttgtag

SEQ ID NO: 210900 - DNA, 83 bp, Homo sapiens
gtgcttgctgctttttctaactatttcaagatgatatttattcaccaaacaaggctttgtccagggatctgaaaccactttgc

SEQ ID NO: 210901 - DNA, 90 bp, Homo sapiens
tgctggtcctaacaccaacggctcccagttcttcatctgcaccataaagacagactggtcagatgtaccaacagtaccagcaacaggccg

SEQ ID NO: 210902 - DNA, 85 bp, Homo sapiens
atttgggtcgcagttcttgtttgtggatcgctgtgatcgtcacttgccgagtgtttaagacggatatggagctggaggttctgcg

SEQ ID NO: 210903 - DNA, 98 bp, Homo sapiens
tttatatcctgacactatgaatgctacttggatgcctcttaaggacccctaccatggaggagaccatcaaagatccccccacatcagctgtcttgctg

SEQ ID NO: 210904 - DNA, 51 bp, Homo sapiens
ctcggcaggcagtacccctcttctctgcacgtgggaaaaagcgccagatag

SEQ ID NO: 210905 - DNA, 100 bp, Homo sapiens
ctgaaatgagtgaggaaaaacgagccaaacttcgtgaaattgagggtacagctctgccggggggggaaaaagtggtaccattttgggcgttcttgagctt

SEQ ID NO: 210906 - DNA, 82 bp, Homo sapiens
cctggcctgcccggacgagttcgatgacttcgtcacctatgaggacaagatcgcagaggaaggtgggcggcgggagtgccca

SEQ ID NO: 210907 - DNA, 82 bp, Homo sapiens
ctttgcagatagtctctgcccatcaacctctcttctgtatcttgggcgaacagcaattagacggcatccatgtcaccatctt

SEQ ID NO: 210908 - DNA, 101 bp, Homo sapiens
ggagaaacaggggggcgagaagagaaacagcgtttgctgccaattgatggggcaaatgatctcttttttcagccacctccactgactcctacctccaaagt

SEQ ID NO: 210909 - DNA, 100 bp, Homo sapiens
ttgggtccatagtaatgatgttgatgctgaaattgaagatccaccaattccagaaaaaccatggaagggtgtcagcctgaccatggcgcgggagcgtggg

SEQ ID NO: 210910 - DNA, 97 bp, Homo sapiens
cattttaccagtgtgcagaagttctcgaatcattctttgtacagaaattgaaaggcttcaaagctagcagggtgtcggttggtggaaatatgaattc

SEQ ID NO: 210911 - DNA, 100 bp, Homo sapiens
cattgccacagggagagatgctgtgcataacaagttatggctccagactttccatttcaacacggttgaagaggttcattcaagattccagagtctgaat

SEQ ID NO: 210912 - DNA, 75 bp, Homo sapiens
tggagacatggaccgcggcgagcaagtgatcggcatgttggtaaaatttattccaaatgttcttcttttctggat

SEQ ID NO: 210913 - DNA, 50 bp, Homo sapiens
cggcaacatggtgcggtcggggaataagaatcccactctggggtggcgtc

SEQ ID NO: 210914 - DNA, 88 bp, Homo sapiens
gggtcctttatatagaagggagagtaggggattacagtgacgcaattgagacgctgctcacagccattgcggttatcaaacagtcccg

SEQ ID NO: 210915 - DNA, 75 bp, Homo sapiens
gtggacaaagatttccttgataagaaaccactgattgcttgtgtggagaaacagctattaggagaacatttaaca

SEQ ID NO: 210916 - DNA, 82 bp, Homo sapiens
ctcagcttcgagcttgtgccaaataccacatggaaatgaattctaaggaaaatgtttataggaggccttagctgggacacta

SEQ ID NO: 210917 - DNA, 113 bp, Homo sapiens
cctagaccctgcccaacagaatttatatagagatgtgatgttggagaactacagaaacctcgtctccctgggagctcagtctgaatattcttggagaaagatgctgagtggca

SEQ ID NO: 210918 - DNA, 48 bp, Homo sapiens
ggattccaagtaactcttatttgatttacagccagttacttactcaga

SEQ ID NO: 210919 - DNA, 75 bp, Homo sapiens
cggcggtggcgccggcggcgggacagatccaaacaccatctggcactgtctgtgaagaggctttggcagtatttg

SEQ ID NO: 210920 - DNA, 90 bp, Homo sapiens
caggacctttctctcgctgccgctgggaccccgtgtcatcgcccaggccgagcacgatgcctggaatgatgtcgtcagtaatgcctggaa

SEQ ID NO: 210921 - DNA, 101 bp, Homo sapiens
gaggaagatggcgggacggctgccggcctgtgtggtggactgtggcacgggatgcagcagcttttttatgagaattacgagcagaacaaaaaggggtacat

SEQ ID NO: 210922 - DNA, 100 bp, Homo sapiens
caagccccacctgaggaagaaaatgaaagtgagcctgaagaaccatcgggaacaagttccagttccagtctaccacccaacacctagccagactcggcta

SEQ ID NO: 210923 - DNA, 75 bp, Homo sapiens
aacagtaacctgaaatttgcagagagatccagaagctggtgctggagggccgtgtgggcgaggccatcgagacca

SEQ ID NO: 210924 - DNA, 82 bp, Homo sapiens
agtcgaattcatggtcgtggaagctgagcccatattaagagatgtcaggattttttatcaagcagaaatgcatcgaacaacg

SEQ ID NO: 210925 - DNA, 85 bp, Homo sapiens
atccagaagtccagagctgaggactgcctgtttgcagggtggcccagttgaaatccttcccttcctctaccttggaagtgcctac

SEQ ID NO: 210926 - DNA, 97 bp, Homo sapiens
agctgccccaggaggacgaggaggatgttcagatggagcaagtaatacgcagcccagctggagcggcagctgcagttctacacggaggctgcccggc

SEQ ID NO: 210927 - DNA, 48 bp, Homo sapiens
cgagaccctgtggtggcttattactatagtcatttttacttgaaggaa

SEQ ID NO: 210928 - DNA, 101 bp, Homo sapiens
tgcagctccaggaagcgagatgtcgaagccgccacccaaaccagtcaaaccaggttgaaccatgattccggtgacagagctccgctactttgcggacacgc

SEQ ID NO: 210929 - DNA, 101 bp, Homo sapiens
ctcaacatggtgtgcgtgaagctccaggagtacaaggacacctgcactgcagcttacaggtatctcagatgaagacatcatcaacattactcttcctactg

SEQ ID NO: 210930 - DNA, 82 bp, Homo sapiens
aatatggattacaggttgatgtgggagaataccctctaccatctgctttggtcagggtgccgctcgaggatttaaaagcaac

SEQ ID NO: 210931 - DNA, 74 bp, Homo sapiens
cagcctcctgagtagcaattacagtggaatcaactatgacaagccgctgcctcccatccaggtggcatctctcc

SEQ ID NO: 210932 - DNA, 51 bp, Homo sapiens
attccaagtaactcttatttgtgaacagcagagaatttcaaaggaccttgc

SEQ ID NO: 210933 - DNA, 100 bp, Homo sapiens
gccgcacgcggcgatatggaagaggagggcaagaagggcaagaaggtccctggggggtgatgttgcctctgatggtgacttcctcatctttgaggggaac

SEQ ID NO: 210934 - DNA, 80 bp, Homo sapiens
cggaggttcaaagtgtccgacgagacccgaccgcatgtctgtcatggacctcgccaatacttgctccagctttcagtcgg

SEQ ID NO: 210935 - DNA, 90 bp, Homo sapiens
tgagtttgtcacctggctcgatggcattaaatatctcttccaaacgcatgatgaaggaggtcttgtcaacagggcaaggcaatacagaag

SEQ ID NO: 210936 - DNA, 75 bp, Homo sapiens
ggatgccctgcagtacctgcagaaggtctctggagacatcttcagcagggtctttttggagttcctgagctgagt

SEQ ID NO: 210937 - DNA, 75 bp, Homo sapiens
actgtcgctctgcctttgacaggagaggctgcttcttgtagaggtgctggagaatctggtaaaagcaccattgtg

SEQ ID NO: 210938 - DNA, 75 bp, Homo sapiens
ccacggtctgcccacccaacgcgaagacggtaacccgtgtgactttgactggtgcaattccaaaagccaaggtga

SEQ ID NO: 210939 - DNA, 101 bp, Homo sapiens
aaataaagtgttgagtaaacagaccaagttgggtatatttgcttacttaaactaccatgttcctcgaacgagacgagaaatcctggagaccctaatcaaag

SEQ ID NO: 210940 - DNA, 100 bp, Homo sapiens
ggttatcagggagacggcttccgttgcgtgcccggagaggccatgtggaagtgttacatcaccttttgcttggaaagatttactaagaagtcaaatagtg

SEQ ID NO: 210941 - DNA, 82 bp, Homo sapiens
aaggacctgcccccagagagagcagaagctcctcctggggtagagacagatcttattgatgttggattcacagatgatgtga

SEQ ID NO: 210942 - DNA, 75 bp, Homo sapiens
agtactctatatgaacaatccgtctggatcacggatgtaggaagtgagtggaacagatgtgcattcagattaaag

SEQ ID NO: 210943 - DNA, 82 bp, Homo sapiens
caggggctgtctctacctcaaagactggcacttgtgcagatgatgataattccgaagaaggcttccacactattcattcagg

SEQ ID NO: 210944 - DNA, 75 bp, Homo sapiens
caacgccgtggccagctccactgagagaaccccaggctgaccggttccctgatgtgttacctgcttctgctactg

SEQ ID NO: 210945 - DNA, 110 bp, Homo sapiens
ctgactaaagcttgaaatgctacatttccaaggtctcgaagtgctgcagctaaaactcatacaactgccttggctgggcgaagtccttcccctgcttcagggcgacgcgg

SEQ ID NO: 210946 - DNA, 50 bp, Homo sapiens
ggtcgctccccatccactctcacaagagacaaggtctagctctgtgatgc

SEQ ID NO: 210947 - DNA, 50 bp, Homo sapiens
tatttggtcctgttggtattgattcagccatgttcactgcccacttccca

SEQ ID NO: 210948 - DNA, 80 bp, Homo sapiens
cagcagcccagacgcggcacagagagggcctgggagcttgctgcagcttcagccccccctcctctgcacctctcctctca

SEQ ID NO: 210949 - DNA, 101 bp, Homo sapiens
accagtgccttgatcttggacttcctagcctccagaaccgtgagaagtaaatttctgtttctttctgagaccaagatcttcactgcctctaatgtgtcttc

SEQ ID NO: 210950 - DNA, 101 bp, Homo sapiens
cgccgcctggaccaaccacgtcttcctgggctgcaggactcaactaaagaagtttcttggaaaatcagtaaagagagcaaagcaccttgctgaggaatatg

SEQ ID NO: 210951 - DNA, 100 bp, Homo sapiens
ctcaagatgttcagaagttcatggatgctgtcaacaagaagagcagttcccaggatctgcataaaggtgaaaggtgtagcagtcactcggcctacaccca

SEQ ID NO: 210952 - DNA, 75 bp, Homo sapiens
cggttccagcatgaagaggagagctggcctggggggcagcatgagacaatgcagatcttcgtgaagactctgact

SEQ ID NO: 210953 - DNA, 100 bp, Homo sapiens
tcagcaggagcctgttctcatcaccatggcaacaggttcatcatgcctagtggcgtataagaagaccccgccaccggtccctccacgcaccacttcaaag

SEQ ID NO: 210954 - DNA, 74 bp, Homo sapiens
gaccaaagacatctcagacattgaagggacacatgacggaagtgtgtatttttgggccactccacggcaggtcc

SEQ ID NO: 210955 - DNA, 88 bp, Homo sapiens
tcctactacagaaatcttggcaattgcttcagaaaaaatgaaagaagcagtcagattgcacctgtggaatcctctcaagaggaacagt

SEQ ID NO: 210956 - DNA, 51 bp, Homo sapiens
agatgaagaagatgagatttcggaggatgaaattttgaacagatcaccaag

SEQ ID NO: 210957 - DNA, 82 bp, Homo sapiens
ctgagtttcctggtagagccggccgagctgaggcggtcgcggccatgaagggagtgcatccgccccaacccttttccccctc

SEQ ID NO: 210958 - DNA, 100 bp, Homo sapiens
ctttacatcatacttggacatatcaagcattggtgcacgatgtactgggtaatacctgcctggagaatggatctttcttactgaactttacaggctgtgc

SEQ ID NO: 210959 - DNA, 90 bp, Homo sapiens
gccgcggcggggggaaaatggagcccttcaccaatgatgcagatgttggacaaatttcccatggaaggaggacagaaggaccccaagcag

SEQ ID NO: 210960 - DNA, 90 bp, Homo sapiens
aggaaacggcttcttcctcacttcgccgcctggatgtacgaagtaggtccaaagttgttgaccgtatttacagtctctacaaacttacag

SEQ ID NO: 210961 - DNA, 88 bp, Homo sapiens
gcgagcaaggccgccagatgtgcagtgtctgcagaacccatccagcgacatcaggctggtggctgagaagatgatctggtgggcaaat

SEQ ID NO: 210962 - DNA, 90 bp, Homo sapiens
tgctggcgcagggcacggtgggcgcctacctgggatgatcatggtgattttactgctgcttgtggctatcgtggttgttgcagtctggcc

SEQ ID NO: 210963 - DNA, 74 bp, Homo sapiens
ccggcgccgggcacggcatcgggggcctggactgcacggcccggcagcagagcaaacgccctggaggagcagct

SEQ ID NO: 210964 - DNA, 87 bp, Homo sapiens
cgggggcagccgctgagacggtttttcacaagtactatactggcaattgctggagaagattttgcaattgttgcttctgatactcga

SEQ ID NO: 210965 - DNA, 100 bp, Homo sapiens
ccagctccgggacttcagcagcatcatccagacgtgcagcggcaacatccagcggatcagccaagccagggacaccatcgccagcgtcaatggcctgaat

SEQ ID NO: 210966 - DNA, 88 bp, Homo sapiens
cagggtgaacgaggagccctgtgatctcctgaggttcaagagagacttcagaaggaatgtatcctgtcaggtataatgtcagtgaatg

SEQ ID NO: 210967 - DNA, 100 bp, Homo sapiens
ttcctataacttggacgatgaccaggcggcttgggagaatgagctgcagaagatgacccgggggcagtctccaaacgtccacaactatcccgatatggaa

SEQ ID NO: 210968 - DNA, 90 bp, Homo sapiens
ggtgtagggaggtgctcatgaagacggctctgggttttccaggtgtggatgaatggaacatagctcgcctcaatacagtcttggatgtgg

SEQ ID NO: 210969 - DNA, 74 bp, Homo sapiens
atcaactgagagagatgcttaaaaatcaccagttactttaatgagacacattcagctaacgtattttagcaggt

SEQ ID NO: 210970 - DNA, 50 bp, Homo sapiens
cacagaggacaatgatgaggccttaggatttgttaaggattccaagtaac

SEQ ID NO: 210971 - DNA, 88 bp, Homo sapiens
gttccctttcctgagtaacaccattttctatctaaatgaagaaatggaggcatggaagtgcaatgcgtgttttactatctaaattacc

SEQ ID NO: 210972 - DNA, 111 bp, Homo sapiens
aactaggaatctatgatgctgatggtgatggagattttgatgtggatgatgccaaagttttattaggaggaagacaatggtcctataatgcccttggataagaaaaggaaa

SEQ ID NO: 210973 - DNA, 75 bp, Homo sapiens
ccaggtccctgctgaatcacacgccgccatccgggaggcccagggaagaacacgatgatgaacgcgttaatttcc

SEQ ID NO: 210974 - DNA, 82 bp, Homo sapiens
ccagtccctggagctggtgcacaggttccaggaaagccatcaccaagtcgggcctccagcacctggccccccctccgcccac

SEQ ID NO: 210975 - DNA, 100 bp, Homo sapiens
ctcggcacctggcctccagctttcgattcctcttccgccgctggggacactggatggactggtccctggcattcctgctggtcatctctctactggtcac

SEQ ID NO: 210976 - DNA, 100 bp, Homo sapiens
ggagaaaaagctgaaccaggcccttttggatcttcatgccctgggttctgcccgcacggacccccatatatcaacagtgatggtgtcctggatgagcagg

SEQ ID NO: 210977 - DNA, 100 bp, Homo sapiens
tgccacgtgcgtggacgacttctaccatgggaccaagctggggtatggccgtcaatgtgtactccacatctgtgaccagtgaaaatctgagtcgccatga

SEQ ID NO: 210978 - DNA, 75 bp, Homo sapiens
gtgcagggcatcatcaatttcgagcagaagttgctctatatgcaatcagtgctgtctactttgctggagtgatgg

SEQ ID NO: 210979 - DNA, 82 bp, Homo sapiens
tccggagcacgggcacgacgggggcaccttctcggctgctaacaatgcagatcttcgtgaagactctgactggtaagaccat

SEQ ID NO: 210980 - DNA, 138 bp, Homo sapiens
aatgggtctgtgatgtcacatctaggagcatctacccatggacagacatgtcttcccatggagagagacaagagagacacctccaacttcgacaaagagttcaccagacagcctgtggaactgacccccactgataaa

SEQ ID NO: 210981 - DNA, 90 bp, Homo sapiens
ccaaccggctctacatctctcaggagagcgacaagtggtgatcgtggcagaggtggccctggtggcatgcggggaggaagaggtggcctc

SEQ ID NO: 210982 - DNA, 80 bp, Homo sapiens
ctggtgcagccaccctcgctccctctgctcttcctcccttcgctcgcaccatgaaatgaagctgttgtcatttctggaag

SEQ ID NO: 210983 - DNA, 100 bp, Homo sapiens
agaaacctgtcaggaatacgagcttctggaaactggaggaagcagcatctcgtgcagcagaagaggaaaagaaacgccttcagactcaagtggaacttca

SEQ ID NO: 210984 - DNA, 50 bp, Homo sapiens
cgcgagtgaggaaaggaggtactgtagaaatgtgattgataacagtaaag

SEQ ID NO: 210985 - DNA, 87 bp, Homo sapiens
gcgcgggtcggcagcgggagggcgcgcggccgagcggaggcggagtcggcgccgagaacatgaacacacgcaggacttgaaagatgt

SEQ ID NO: 210986 - DNA, 90 bp, Homo sapiens
gaaattaattgctatcaatgcgaatgatcctgaagcctcaaagtttcatggaacttagtgatttggcccgtgaccctccagcacaatgtt

SEQ ID NO: 210987 - DNA, 118 bp, Homo sapiens
ggacaatctttccttctgtcaacggcaggggcaggcctagtttgactctgacagtcctcccactaagtacggcatcaagaagaaggaggagcgcgaggccgaggcccaggccgccatg

SEQ ID NO: 210988 - DNA, 98 bp, Homo sapiens
actccctggatgttcttgccgatgcttctcaccgaaggtgttcaccagcacactgctctgccaggctgctgaacaggatgtcctcggacgacaggcac

SEQ ID NO: 210989 - DNA, 50 bp, Homo sapiens
ggacatcctgaagccaatcctgtgtcttgggacaaggtgcgcattcctgg

SEQ ID NO: 210990 - DNA, 98 bp, Homo sapiens
cgaggatcaaatgagttgatgatacttgcacggcgctcggatcgtgactgctctggcccatttagagtctcttgcagtggatgttgaggtggccaatc

SEQ ID NO: 210991 - DNA, 82 bp, Homo sapiens
aaagcagcgtgcgttcagccctgggccatggccatgcagaaaatctttgcccgggaaatcttggactccaggggcaacccca

SEQ ID NO: 210992 - DNA, 100 bp, Homo sapiens
ggagatctggggaggggagcagtatgaaatctccttcaaggaaggggaacagtttgtgaagaaaatcggtggtatttttgccttcaaggtgaaagatggc

SEQ ID NO: 210993 - DNA, 147 bp, Homo sapiens
tgtagaacagctatctcgggagaaacaacaactgctacatctgttggaggagccaactagcatggaagtgcaggttgttaaaattacacactgtcctacactgctgaccagagatggagatcgaattcgaagtaatggaaagtttgg

SEQ ID NO: 210994 - DNA, 75 bp, Homo sapiens
ttcactgtgaatgatgtcaaaatgtgtgtgggcagagtgtctctggcacagtttgccttggccttcgtgacggac

SEQ ID NO: 210995 - DNA, 75 bp, Homo sapiens
ctgtgtgatgatgcctgagttcagccctcagcaggattttttatcaagcagaaatgcatcgaacaacgagaatca

SEQ ID NO: 210996 - DNA, 100 bp, Homo sapiens
gaggaggaggaggattcagggaataggagctggggagcccttctgcgccacaggaaatgctgtctatgatttcttcattggccgtgaattaaaccctcga

SEQ ID NO: 210997 - DNA, 100 bp, Homo sapiens
cgacggcatgcgcagtgtccgagcgttccactttgacaaggcggccgccagcgtcctcaccaccagcaccaaactagagtcagaacgaatactagcatca

SEQ ID NO: 210998 - DNA, 80 bp, Homo sapiens
aaatactgtatcttctcatgaaggaaggaaccgaagcatacggcggcatcaagaaaggagagcaattttgacccccgttt

SEQ ID NO: 210999 - DNA, 82 bp, Homo sapiens
gaacgaggcaaggagctaaagcagcgtgcgttcagccctggggcttctcacggcattcagcagcagcgttgctgtaaccgac

SEQ ID NO: 211000 - DNA, 83 bp, Homo sapiens
gaaatgaggacatatcagtatcgatttcagagacaactgtctgaaccctgccaccccttccctcctcagccaggagttcctgg

SEQ ID NO: 211001 - DNA, 88 bp, Homo sapiens
tgccgtgaataggcagcctaaagccctgggcgctgcctatggcacagccaagagcggtaccggcattgcggccatgtctgtcatgcgg

SEQ ID NO: 211002 - DNA, 82 bp, Homo sapiens
aaaatgctgcacatcccttaatagtcatctacataggatttacaaaaggtgcaggtatgagcaggtctgaagactaacattt

SEQ ID NO: 211003 - DNA, 90 bp, Homo sapiens
gccaaatacgcacaataccaggcttcctccttccaggaatcattgagaggaattcaagtttggaccaatgctaaggaatgctttagcaag

SEQ ID NO: 211004 - DNA, 51 bp, Homo sapiens
gggagctggaacacatccggcccaagcttcttggacacttaatgattgttg

SEQ ID NO: 211005 - DNA, 75 bp, Homo sapiens
gcctccgcccagcacgccgcggtcaacttcggccaggtaatgcatgccaggactgtgcaaagaggaagttagaag

SEQ ID NO: 211006 - DNA, 90 bp, Homo sapiens
agcatctgatgagtcagatctcccctccaccagccaggatcctccttctagctcatctgtaggaaagcagatggtggagctgaatatgcc

SEQ ID NO: 211007 - DNA, 127 bp, Homo sapiens
ttcagcgtagagtcgctggagcgggcggagctgtgcgagagcctcctcacttggattgataggcagcagtttgaagaaacagttcgaactctaaataacctttatgcagaagcagagaagctcggcg

SEQ ID NO: 211008 - DNA, 100 bp, Homo sapiens
ggccatgcactgttacttaaaggaacctaagtatttggtatgctgttaggagacaccattattttggataatctggatgcggccaatcattatagaaaag

SEQ ID NO: 211009 - DNA, 98 bp, Homo sapiens
acgccgggagctggtacacagcctcaggcattatcctgcactgaaaactctggaacatctagagcatacctacctgcctcaagtaagccactatcgat

SEQ ID NO: 211010 - DNA, 100 bp, Homo sapiens
tctgaccctttttttatatcgcggcgacggcgggctgtcgtcacgacgacgtgcggacgcagcggcgggggcagactctacaggggcaggtaattcactg

SEQ ID NO: 211011 - DNA, 100 bp, Homo sapiens
aactcctttagttaatgagagcctgaaaaagtttttaaataccaaagacgttttatttcaacagggttaacataaacatagtgttttaagcttaaaatga

SEQ ID NO: 211012 - DNA, 100 bp, Homo sapiens
tgaggctgatatgcaatgtcacttacaacattaatcagatactgcatttaagtggtggacttgctttgtgaagagacagttcatgaacaagagtctttca

SEQ ID NO: 211013 - DNA, 95 bp, Homo sapiens
ccttgctactgcagaacttgcaggaacagagtttgtagctgatgcagatctgtggatccagcgtagcatctgtagcagctgggacatcattccag

SEQ ID NO: 211014 - DNA, 83 bp, Homo sapiens
agcaagtctgttgtctgaattgtactgtcaagagatgctgggctcttgcactgtttggtggaaatggtgagacaggatttgag

SEQ ID NO: 211015 - DNA, 98 bp, Homo sapiens
ctctgcaaaaatgggcctggttgaaacaaaattggcgattattcctggtggagagctgaaatatgctaataccgtgatgcgctttgattacgtctggc

SEQ ID NO: 211016 - DNA, 80 bp, Homo sapiens
cgacaagcacacactatggcgctgaaacggattaataagggtgatcagcccatgacctaaacctccagacaaaataaaac

SEQ ID NO: 211017 - DNA, 97 bp, Homo sapiens
tcttatggaagaagaaaggaggttcagagagggaaaggcttgcctgaggtcacacggcagtacatgccacactactacccttcctgctcttgtgcgc

SEQ ID NO: 211018 - DNA, 100 bp, Homo sapiens
ctgtggcctcgttacctgcaggtattgggagatccacagctaagacgccaggacccactggaagcctagaaatgtggatgtaaagctggatcccgccacg

SEQ ID NO: 211019 - DNA, 101 bp, Homo sapiens
gcgcccgaaggccgacacgctggccctgaggcaacggctcatcaggccgctacctgtctgaggaacccgagccctacctggcagtctacctgcactcggag

SEQ ID NO: 211020 - DNA, 75 bp, Homo sapiens
gcaatgcttgccttgggactaatgacatgcttgtcagctttggagtttaacccttctgccaatccagaggcaagc

SEQ ID NO: 211021 - DNA, 100 bp, Homo sapiens
gagaacctagctcatagcaggaggtttcctgttttccagcacccaacataacttgtaaggattccagtggcaatgaaacacattttactgggaacgaagt

SEQ ID NO: 211022 - DNA, 98 bp, Homo sapiens
acagaaagaccacttaagcaaacttaatataccagacactgcaactggtgaccaagaatatggcccaggtgaccaaagccctggacaaggccctgagc

SEQ ID NO: 211023 - DNA, 88 bp, Homo sapiens
cacgattgttgtttcttggactgcagaaattggaagagtgctgctggtgagtagcagccggtacccagaccagtggattgtcccagga

SEQ ID NO: 211024 - DNA, 100 bp, Homo sapiens
agacaccaatggagatctgcctcaatggaacccctgctctggcctacctggcggaatactcccccagttgcaagaggcgcaggaccgtggaagacttcaa

SEQ ID NO: 211025 - DNA, 90 bp, Homo sapiens
gaaagtcatgtacattctttgctgtctattcttcgctatggtgccttatgcaatgaattgcattttgtgaaaaaagaacaagaattttct

SEQ ID NO: 211026 - DNA, 100 bp, Homo sapiens
aggaagcctttcagaagctgcagaacatcaagtacccatctgctacaaataacacacctgccaaacaggtgtgtcacatagttctggggttaagaccagc

SEQ ID NO: 211027 - DNA, 100 bp, Homo sapiens
gcgcgaatatcgtcatcgttagaagtatatttgccttccctccatgatctccaacactatccgataaagtagaagcaactgaggtaccgtgaaagagaaa

SEQ ID NO: 211028 - DNA, 100 bp, Homo sapiens
acttggaatcctcctacctttgtgaatatgactatgtgaagggcattggcactgatgagaagtgcctcattgagatcttggcttcccggaccaatgagca

SEQ ID NO: 211029 - DNA, 89 bp, Homo sapiens
atcatcattaaggacggaggcacgggattaaagcctgtggtttccacagaagcaccacctatcatatttgccacaccaactaaactgac

SEQ ID NO: 211030 - DNA, 85 bp, Homo sapiens
agaggagaaggagatccagagttccaatctggagacggagtgtcatgggccggcagacatgcctggagtgcagcttcgagatccc

SEQ ID NO: 211031 - DNA, 90 bp, Homo sapiens
aggccttccagctgtttgaccgaacagagcactccgctggtccaggcggcaacatgtccatgcttttagtgatgtccctgcctctaatcc

SEQ ID NO: 211032 - DNA, 75 bp, Homo sapiens
tgagaaaggtgaagtgcggggatttctgcgtgtggctgtacaggccatcgcaggcaaaatcctgacagatgactt

SEQ ID NO: 211033 - DNA, 50 bp, Homo sapiens
ttggactcttctttagctttacagaggcggtggatgaattttattccaag

SEQ ID NO: 211034 - DNA, 75 bp, Homo sapiens
caaggaagaaattgatattttgatgaacaatattgaacgctatcttaagtagagacggggtttcgccatgttggc

SEQ ID NO: 211035 - DNA, 75 bp, Homo sapiens
ccttcgggccctcctgccttcggaacaccagctggctgatgagcctggagaacccgctcagccctttctcctcgg

SEQ ID NO: 211036 - DNA, 108 bp, Homo sapiens
tttgccgccgccaagctcctggccctggccctgatcatcctgctgggcttcgtccagatcgggaagggaagctcttcgtgggcggtcttgactggagcacgacccaag

SEQ ID NO: 211037 - DNA, 97 bp, Homo sapiens
aaggctccttcagtgagcaaggcatcaacgagtttctcaggcccataatgaggatcttacaactagagagacctgcaaggctgggttctctgaagat

SEQ ID NO: 211038 - DNA, 83 bp, Homo sapiens
caagagcagcggcgcagaaaggtggaggccgggaggacgaagatcatggaagggaagtggttgctgtgtatgttactggtgct

SEQ ID NO: 211039 - DNA, 85 bp, Homo sapiens
gacgagttctcaaagagttgggtttctgcgtccatgtgaagcatcctcataagggtcgcggcgagcgcgcctatgacatctactc

SEQ ID NO: 211040 - DNA, 50 bp, Homo sapiens
atgaatgtagagagaaagtacttcaagtggaggagtgtctgctggacgag

SEQ ID NO: 211041 - DNA, 101 bp, Homo sapiens
cagagcctcccgcggcccacagagcacagatctgactgcagccatgagcagcaatgagtgcttcaagtgtggacgatctggccactgggcccgggaatgtc

SEQ ID NO: 211042 - DNA, 99 bp, Homo sapiens
aactgcattacaagcagcagtggggacgagctttgaaagaacttgccagacttaaacagtttacaggcagcattaagagcagacccaaaggacttcaat

SEQ ID NO: 211043 - DNA, 80 bp, Homo sapiens
ttcgcattttggcattgacatttaattttagggtcctttatatagaagggagagtagaaatctagttcatatgattgaac

SEQ ID NO: 211044 - DNA, 75 bp, Homo sapiens
tcctaaagaaaatcatttgtgatgggtcagctagtatgcaggctaggcaaactgaaatgaatcgataccgctctt

SEQ ID NO: 211045 - DNA, 83 bp, Homo sapiens
cccgggacgacgagtacgactacctattcaaaggttgtggcagcactgcctgaaggtatgagaccagattctaatctttatgg

SEQ ID NO: 211046 - DNA, 100 bp, Homo sapiens
tggggatgagtatgcggaggacagctctgatgaggagttgcaggaaccttccctctacaccatcaaggctgttttcatcctagataatgacgggcgccgg

SEQ ID NO: 211047 - DNA, 75 bp, Homo sapiens
gccgcctcgcctactcactctggagccggaagggccctccaaagcccacacaaaaggcagtcatcaacgaatcgg

SEQ ID NO: 211048 - DNA, 75 bp, Homo sapiens
gtcggactcccgcggcgggaggagcctgttcccctgagaacaagttgaaatcatcgcagaaggataaagttcgtc

SEQ ID NO: 211049 - DNA, 87 bp, Homo sapiens
tgacatgtctgatcccttgctcccatccctgcagcatgaacaagattccaggagggcttcgtgtatggacctcaagcgttggaggta

SEQ ID NO: 211050 - DNA, 51 bp, Homo sapiens
ggcagatgttgttgaagataaagacaaggatgagcagaagggtacaaatct

SEQ ID NO: 211051 - DNA, 90 bp, Homo sapiens
gaggataccttggtcccagagtcatcatgaaggaacaagcacatcatgattgacttggggactggcaacaacaacaagattaactgggcc

SEQ ID NO: 211052 - DNA, 100 bp, Homo sapiens
cttgcctccctgcttcctgctgctggcactggtccttgtcccctcaggtgttgctctcttgccattcgtggatgagcgaaggctacgagctgccctagaa

SEQ ID NO: 211053 - DNA, 101 bp, Homo sapiens
ggctctgagggcactggcctagttcccgacttgtttctcagaatgattacggacctgaagccaaagaacaagatgcgctagtggacagattgctgaccagg

SEQ ID NO: 211054 - DNA, 100 bp, Homo sapiens
catgtagaagttgatgaatcaagaggaatgcacatctgtgaagatgctgtaaaaagattgaaagctccattctgggtacgactcttcttttggaagcagg

SEQ ID NO: 211055 - DNA, 51 bp, Homo sapiens
gatgcagaagaagccaaaaacattctggagcaagtgcaccggcacctggac

SEQ ID NO: 211056 - DNA, 82 bp, Homo sapiens
gtgtacccgaaaaactgattgactgggctggcgttaactgtgcggaggaccagatggcctttgaggatgtggctgtgtactt

SEQ ID NO: 211057 - DNA, 50 bp, Homo sapiens
gccgggcccacctccccaccaaggaagaaattcattgagtttgaagatgc

SEQ ID NO: 211058 - DNA, 90 bp, Homo sapiens
cgtaagaagaggtcccaatcccccactctttccgccctaatggaggtctccagtttcggaaaaccaattctgtgtcctcggaggaccaca

SEQ ID NO: 211059 - DNA, 75 bp, Homo sapiens
cacgggctctgcgggcctcatgctcgtcgagttcttcgccccctggaccgtataatagacgctggccccaaagga

SEQ ID NO: 211060 - DNA, 100 bp, Homo sapiens
gagaccgtgaccgagagcgtgaccgagagcgcgaatatcgtcatcgttagaagagctggctttatgtgctggggcagaagagatccgatagctatgttct

SEQ ID NO: 211061 - DNA, 97 bp, Homo sapiens
cccatgaggatcccagagttgtggcagctgggcatccacccttcaaacaagatgtatcacctatagaaagaaatgagcagctttggataatgacgac

SEQ ID NO: 211062 - DNA, 97 bp, Homo sapiens
ttggaaggatgcttcagctcatcttaggctgtgctgtgaactgtgaacagaagcaaggggctatctgatgggttagagtgcctttgagaagaaatca

SEQ ID NO: 211063 - DNA, 100 bp, Homo sapiens
tctttagccagcttagttctctgtggagtcagcttgctcctttctgaaaagggagatttcattgccctggatcttggtgggtcttcctttcgaattctgc

SEQ ID NO: 211064 - DNA, 82 bp, Homo sapiens
ccttcaatactacctttatttccaccatagtggacttggttacttatataacaaggttccagtgggacatggccaaatatcc

SEQ ID NO: 211065 - DNA, 100 bp, Homo sapiens
cagaaatttcttcaaataaacagaaccattcttatcctgtgggaaaggggaacctgtgactgaactcagctggcactcctgtcggcagctcctctaccag

SEQ ID NO: 211066 - DNA, 123 bp, Homo sapiens
ggtcagtcctctgaccacctacatggtccccaagccagaagaaatcaacctgctcaccggggagtctgatacacaggttggatttggtctagggagtcccagaaagaagtagaaaaagagaga

SEQ ID NO: 211067 - DNA, 50 bp, Homo sapiens
gagaacttgccggtgccagctgaggttttaaaatcaaagatgggaaaatc

SEQ ID NO: 211068 - DNA, 95 bp, Homo sapiens
agaagcccacgcacagcctgctgcggaggatcgcccagcagctgccccggcagctccaggtctcggcgcggaagatggccggcggcgtggacggc

SEQ ID NO: 211069 - DNA, 51 bp, Homo sapiens
tgatgactcacacccctctgagatgagacttagagacggggtttcgccatg

SEQ ID NO: 211070 - DNA, 75 bp, Homo sapiens
gtcatcaagaactgtaatacttctggaatccagacagaatgagtgtcaatccatatctacaaggacagagactgg

SEQ ID NO: 211071 - DNA, 100 bp, Homo sapiens
gctgttcaggtttatcatgcaaatcctcgcctctggctacggctggctgaatgctgcattgctgccaataaggggtatgtggagggatcttttgagaaat

SEQ ID NO: 211072 - DNA, 90 bp, Homo sapiens
agagtgtggttgtagctgtggacaggaaacgaggtaactgatggacagccgaggcagccccttaggcggcttaggcctcccctgtggagc

SEQ ID NO: 211073 - DNA, 74 bp, Homo sapiens
cttgtcctccttcctcatgaagcccatcaacaagtgcattgggaggaacgtcacagagatgcggcggaccctga

SEQ ID NO: 211074 - DNA, 75 bp, Homo sapiens
gtgcaactctccgggcggccgcacctgccagggaggtggggaagacagggctccagctaccacaggacgggctct

SEQ ID NO: 211075 - DNA, 75 bp, Homo sapiens
cttatcccgctgatgattatgagtctgaggaaggccaggagaatgtcgagatcctcccctctggggagcgaccgc

SEQ ID NO: 211076 - DNA, 98 bp, Homo sapiens
aaagagccggatcgcaggctccctgcctactcccccaccggggatttcagggcgtctctggccgagcctctttttgtggaaaacgacagcagcagcag

SEQ ID NO: 211077 - DNA, 100 bp, Homo sapiens
cgccctggaggagtccctgaagatctatgctcctctgtacttggccctgggaggagcggggacactgaggacctctctccaaattggcctctcaactcac

SEQ ID NO: 211078 - DNA, 95 bp, Homo sapiens
ctcgcagaggccaggatctcctttaacctgggggcaggtgaatggaagagaatccgaagaagaaaatctcaataaatctgaaataagtcaagtgt

SEQ ID NO: 211079 - DNA, 75 bp, Homo sapiens
ggagagactgtggagtttgatgttgttgaaggagaaaagataacaatgaagatggtgccaaaactgctttctcct

SEQ ID NO: 211080 - DNA, 100 bp, Homo sapiens
ctggagctgtgaggagattcgggccgtcaccctgcctcccctgcgtcccgccaccggccgcttctgtcctcgcattttgaaagcgaagcagaagccgtag

SEQ ID NO: 211081 - DNA, 82 bp, Homo sapiens
tgaaatcgacacacaaagaatagagttgagcctgtgggacacttcgggatgaatttcatcctttcatcgaagcacttctgcc

SEQ ID NO: 211082 - DNA, 90 bp, Homo sapiens
gacaggcggcgccatcttcgaacttagacttccggaaggactttggcgagggatgctcacaactgtattcctgagctggacagtgagaca

SEQ ID NO: 211083 - DNA, 100 bp, Homo sapiens
ggcgatgcttgtgaccctgcagctcctcaaagcagtccagaacgtgggcaacatggacacgccggcttccagggccaaggaggcttggatggagccgctg

SEQ ID NO: 211084 - DNA, 100 bp, Homo sapiens
aggagactcagcagaaggtgcaggccgccatggcatcagatgaaggcaaactttttgttggagggctgagttttgacaccaatgagcagtcgctggagca

SEQ ID NO: 211085 - DNA, 82 bp, Homo sapiens
cctgcccgagctgctggggctcgaggctggcagccggcgccaagcccgcaggtgtccctggccagtgtccttccacctgtcc

SEQ ID NO: 211086 - DNA, 135 bp, Homo sapiens
ttcgacgagaaagaggtgatagatgccctcagagtgaacaacaaccagcagaatgccgcgtacctgctccactacctggtttccctccagaactggctgaaccgccacagctggcagcggacccctgttgccgtc

SEQ ID NO: 211087 - DNA, 80 bp, Homo sapiens
agatgtggcccctggtagcggcgctgttgctgggctcggcgtgctgcgaatcctgctgcatcacagaagctggaagttct

SEQ ID NO: 211088 - DNA, 75 bp, Homo sapiens
gaatacatgatttaaacaagagatttccacagaagatggggccactgaggtgcaaagagtttaacttatcccaag

SEQ ID NO: 211089 - DNA, 75 bp, Homo sapiens
gaggaggagcggacgtcggcttctccccgcgggagcccccagcatggacatccacgacagcgatggcagttccag

SEQ ID NO: 211090 - DNA, 90 bp, Homo sapiens
aggatcacacgcctcaagctgttggtccaggctcttcttgtagatatcaaactggaaccactcgcggtcactccagatgctgcaagccag

SEQ ID NO: 211091 - DNA, 100 bp, Homo sapiens
actgagtacctgaaccggcacctgcacacctggatccaggataacggaggctgggtacttaagagattatggcatcagaaacccacaatgttaaaaaacg

SEQ ID NO: 211092 - DNA, 75 bp, Homo sapiens
ggccctctcagcaagaacgggaacaaaactctggcggaaagccaggacctccggcatgtcatcattcccttgctg

SEQ ID NO: 211093 - DNA, 100 bp, Homo sapiens
gcggggctgctggaggcggagaggcacggaggagccgctggggctgccgccacggccgcccggagatctgttacctaaagcaataaaaaatggccagagg

SEQ ID NO: 211094 - DNA, 50 bp, Homo sapiens
cgtctgcctcgagactgaagaccggaagggaaaaggccgaggcatcagcg

SEQ ID NO: 211095 - DNA, 100 bp, Homo sapiens
catgagacagcagccaaacccccaggatgtgtgctgtgtttggtggaatttattgtcttcgccattcagtacagtgccttgtagtggacaaagaatccag

SEQ ID NO: 211096 - DNA, 100 bp, Homo sapiens
gacgacgaggcctacgacaccatggtggaggagcagtacggccagatgtacatcaaggcctccggcagctatgcaggctgaccaactgactgaagagcag

SEQ ID NO: 211097 - DNA, 83 bp, Homo sapiens
atgtctgactctgactctcggactgagaaacgcaaggtatcatgatattagctggtttgacatcaagtcatttgtgagtcatc

SEQ ID NO: 211098 - DNA, 111 bp, Homo sapiens
gcttcatccttgtttaatgactttggtgccctcaacatctctcagagacgaaagggctacaccaagtccattgatatttggtctgtaggctgcattctggcagaaatgctt

SEQ ID NO: 211099 - DNA, 110 bp, Homo sapiens
ggaagaaacctcagacagatcgccggggaggcagcgcgggatcccagcctcaggcgtgcgcggacggtgtgcggttacagatgtagagctaaaacgactgaaggatgctt

SEQ ID NO: 211100 - DNA, 100 bp, Homo sapiens
gaagcgggcggcgtgcctgtgcttccggagcgagcaggaggacgaggatgaatttcatcctttcatcgaagcacttctgccccacgtccgagcctttgcc

SEQ ID NO: 211101 - DNA, 100 bp, Homo sapiens
ttccctgtggatctgcagaagaaagctggccggggcctgggcctgagcatcgttgggaaacgggcactccacagaaggatgttattatcaagtcagatgc

SEQ ID NO: 211102 - DNA, 87 bp, Homo sapiens
ctgatcccttgctcccatccctgcagcatgaacaagaatagctctccagacccccagctggccatgtggtgagttcagggcccaaat

SEQ ID NO: 211103 - DNA, 75 bp, Homo sapiens
ggaaacaaaaggcaacttcagtattcatcgtgatcacgaagatcatgatgcagccgtccttttggatttcttttt

SEQ ID NO: 211104 - DNA, 90 bp, Homo sapiens
gaagattgctggctcagaggctctatgcaggttccactgtcaagaattctaccttgtcaaagattcctgctttacagggtagcacaaagt

SEQ ID NO: 211105 - DNA, 50 bp, Homo sapiens
ctcaggcctgtccagccggggcaagaagctgctgaaaatggcctttgacg

SEQ ID NO: 211106 - DNA, 74 bp, Homo sapiens
gcgagattataagaagcttgggttcattgtccttcaagggttagattacttacacagtaagtgcaagatcattc

SEQ ID NO: 211107 - DNA, 82 bp, Homo sapiens
gagctggagaagctgggattggagattccacccaaacttgctggtcactgggagcaagagtgagccatggagctacgtgtgg

SEQ ID NO: 211108 - DNA, 98 bp, Homo sapiens
ggacaccaccaccctcatcgagcctgcgcccaggtcagataccaggcccaggttccatgatgcccgggcagcacatgccaggccgcatgattcccact

SEQ ID NO: 211109 - DNA, 101 bp, Homo sapiens
acgagggagtttgacagctattaaaaccagggctccacagttaggaggagtccaacctataccttctcagggaggcaaactagaaatagctggcactgtgg

SEQ ID NO: 211110 - DNA, 75 bp, Homo sapiens
gtggagaaagacagttctggtgtctcctctctagattctatggaggtgaaacctatcatgaccagaaagttgcgg

SEQ ID NO: 211111 - DNA, 100 bp, Homo sapiens
ggtggagccaccagcctctccttggctcatgcacaattagttcgagaagttgatgtggagaaggtgtctgcttttgagaatccatatgtagatgcaataa

SEQ ID NO: 211112 - DNA, 100 bp, Homo sapiens
tacaagcagtgttcatggagttcattgaattatggcatagatcttgggaaaattgcggaatgtatcctgtcaggtataatgtcagtgaatggcaagaaag

SEQ ID NO: 211113 - DNA, 90 bp, Homo sapiens
ctacaatgggaataaaactccaagaagccaggtgttcaagacatatctgaagagatggattaagaatgctttggattaaggattgtggag

SEQ ID NO: 211114 - DNA, 75 bp, Homo sapiens
ggctcagggcctggagggaacatggcgtgcggcccactgctcagtggagcgtggaggacgaggaggaggccgtcc

SEQ ID NO: 211115 - DNA, 83 bp, Homo sapiens
ccgtgaccgagagcgtgaccgagagcgcgaatatcgtcatcgttagaagtgcgcaggaccattgtcaagatcccttctaccct

SEQ ID NO: 211116 - DNA, 78 bp, Homo sapiens
gggaattcagcctcagtgatgtccatgagcaacagaagaaccttgaaggctatgtgggatttgccaatctcccaaatc

SEQ ID NO: 211117 - DNA, 83 bp, Homo sapiens
ggaccacggcgcagacgcgggcgagctgcggctcggacgccagcggacacgcgggcgagatctgccggaggcgctgggcaatg

SEQ ID NO: 211118 - DNA, 98 bp, Homo sapiens
cgtccagcaacatgcatgaagccgaagagtggtaccgctccaagatgcttgctctgtcaaggcacagcctattgtctcctttgctcagtgtgacatca

SEQ ID NO: 211119 - DNA, 95 bp, Homo sapiens
accaaaagaattgtgagaggaaaaagaaacttacatctaacaggaagagaaaagttttaggaagaccaaattaatactctgaaacatatttccca

SEQ ID NO: 211120 - DNA, 74 bp, Homo sapiens
tggggaagttcctcatacagatcctgcagctcatggccaacagctgaataccactagaaacatacctgtaacca

SEQ ID NO: 211121 - DNA, 51 bp, Homo sapiens
gctctggcgcggggcttcacggccgcagggccatgtttatgagtggactaa

SEQ ID NO: 211122 - DNA, 82 bp, Homo sapiens
gaggaaggaacgaggcaaggagctaaagcagcgtgcgttcagccctggggtctggcggcttctctgttgacaactcagctgg

SEQ ID NO: 211123 - DNA, 71 bp, Homo sapiens
caaggatggcgagatttactgcaaaggtgggctacgaactgaaggatgagatcgagcgcaaattcgacaag

SEQ ID NO: 211124 - DNA, 83 bp, Homo sapiens
cgtcggaccagccggcgcaagcgggcgaagaccatggtgaatccgggcagcagctcgcagccgcccccggtgacggccggctc

SEQ ID NO: 211125 - DNA, 92 bp, Homo sapiens
ggctacactggtgaaggcatcgtgcctgctccacagcacatttttattcaaggtgtttggagaagagggattgaccctgaatcttgaagacg

SEQ ID NO: 211126 - DNA, 74 bp, Homo sapiens
ctcccatcattgatgtggtgcgatcggttatgatggagggtggtcgcagcaaagggtttggttttgtatgtttc

SEQ ID NO: 211127 - DNA, 75 bp, Homo sapiens
cagcgagctcctgggcatcccgctggaccaggtgtctcaatgcttgtacctactgcaaaactaaacacgccagag

SEQ ID NO: 211128 - DNA, 83 bp, Homo sapiens
aagtaccgcgcccgcttcttccacctggctgacctcttcctgtcctcctcctccaccgcaccgccttgcactgggcctgtctg

SEQ ID NO: 211129 - DNA, 100 bp, Homo sapiens
gtcgcacggatgcagaaaacttaatggaggaggctgaggccatcgaagacggcaatttggaggaaatggaagaggaagtacggcttaagaagcgaaaaag

SEQ ID NO: 211130 - DNA, 116 bp, Homo sapiens
caaaaatcttaaccttcaaccatctggggaaaaggcaaaaatcccatctaccgcaactctcagttcgagagtaaagatatgggaaaatagtctccacaaaggcaattttggataag

SEQ ID NO: 211131 - DNA, 50 bp, Homo sapiens
ctcagttgtcctcagttcggccgccaggagcaccatactggaccaacaca

SEQ ID NO: 211132 - DNA, 100 bp, Homo sapiens
gaactactccgtgacctggtacatcgccgagttctttcgatcctttggtacagaagacagaccgacagatcgtccaataccacctcgagatgaagtcttt

SEQ ID NO: 211133 - DNA, 95 bp, Homo sapiens
acccgacgcgcggcgtttacccagcgcagcgttccaccgctcgggtttggctgggatatgacagcgcgtgatctgctacagcagagatacaccct

SEQ ID NO: 211134 - DNA, 83 bp, Homo sapiens
atggagactcaccctattacttcctgacttcagatactggactaagcatgcccagtgatacttcactctctccagcaagtcag

SEQ ID NO: 211135 - DNA, 101 bp, Homo sapiens
gagggaggaaggtggcaagatggtgttggaaagcactatggtgtgtgaagcgtgacattcaggaaaacgatgaagaggcagtgcaagtcaaagagcagagc

SEQ ID NO: 211136 - DNA, 75 bp, Homo sapiens
cgcatcaacaagatgttgtcctgtgctggggctgacagtgagtgagatcattggccgagacctgagtggcttccc

SEQ ID NO: 211137 - DNA, 123 bp, Homo sapiens
cgggacgccacccacgacgaggcggtgcaggcgttgaagcgcgcgggcaaggaagtgctgctggaagcaatgggccacttttgctagaatatggtatctcttagatgggaaaatgcagccacc

SEQ ID NO: 211138 - DNA, 101 bp, Homo sapiens
tctgcaaacatagagaattctgggcttccacacaactccagtgctaactcaacagtttcccgaaaaccagttcctccattagaagaggccctcaaacaaat

SEQ ID NO: 211139 - DNA, 125 bp, Homo sapiens
ggggcgggcggagggggcggcggcagcgacggcagcggcggcggctggactaaacaggtcacctgcagatgccatggacaatattaccaggcagaaccaattctacgatacccaagtcatcaaac

SEQ ID NO: 211140 - DNA, 83 bp, Homo sapiens
gaaaaagcaagagtttgttatatagcagcagaagctcctcctggggtagagacagatcttattgatgttggattcacagatga

SEQ ID NO: 211141 - DNA, 50 bp, Homo sapiens
tccatcggttgcccaaggctgaaacctggacaagcatgaagaactagagg

SEQ ID NO: 211142 - DNA, 131 bp, Homo sapiens
tggtggtgatggaagcaggtggaattatgccctgttggttccaatgctgggattggctgcttttcgtgtcatggagaaactccagctgggcccagagattctgcagcgggaaaatccaaggcttatttatg

SEQ ID NO: 211143 - DNA, 100 bp, Homo sapiens
ggacgggtttagcggcagcctcttcgatcactactggttacaacctggaagatgaccgctgtgagtgtgtggctctgcaggattttcgggctggagagca

SEQ ID NO: 211144 - DNA, 90 bp, Homo sapiens
aacgccgcccgacaacatccaagtgcaggaaaacttcaatatctctcgggccactggagaatgcacggcaaccgtggggaagaggagcag

SEQ ID NO: 211145 - DNA, 82 bp, Homo sapiens
agctgtgcagccgcgaggaggcgcgggaggtgttcgagaacgaccccgagacggtgacgccgcagccgccgggagccgcgag

SEQ ID NO: 211146 - DNA, 75 bp, Homo sapiens
caagaagacactctggacaccactatggacagatgcagacagacatgctgaactatctggaagtccactgaaaag

SEQ ID NO: 211147 - DNA, 83 bp, Homo sapiens
cgcgcacgttggaaccgaagagagctctgttgttgcagtgtcctagttgcctatgaaggtttgccacttcatcttgcactgtt

SEQ ID NO: 211148 - DNA, 100 bp, Homo sapiens
aaaaagcgtccgcttccagctttgcgcagataacgaaggaggcccaacttcattcaataaggagcctgacggatttatcccagacggtagaacaaaagga

SEQ ID NO: 211149 - DNA, 75 bp, Homo sapiens
cctggtcctttcctgcttctgactctactgctgggacttacagaactgataaatttcaaacggaagagagtggca

SEQ ID NO: 211150 - DNA, 99 bp, Homo sapiens
ctgtggttggccaaactagctggaaacccatttccaatcagtcatgggaccagaagtttacactggaactggacaggcaacctgcggcagatcttccag

SEQ ID NO: 211151 - DNA, 75 bp, Homo sapiens
agccaatcccaggaggaaaaacgatttatcagcaagactgttgaacgcataactgcccaagatgcctgtccctcc

SEQ ID NO: 211152 - DNA, 98 bp, Homo sapiens
attgcatggtctccagatcattctcatgtgccttatgcccgctcagaggcccacctcacagagctgctggaggagatatgtgaccggatgaaggagta

SEQ ID NO: 211153 - DNA, 82 bp, Homo sapiens
ccgctcccggggtccccggccggccaagcaggatctcatagatcagaatatactggagcctgtaacccgtgcacagagggtg

SEQ ID NO: 211154 - DNA, 75 bp, Homo sapiens
aatgcagcatctgcgatgtgaggaaaggcacctccaccagcatcgagagtaaacatgaggttacgatcctgggag

SEQ ID NO: 211155 - DNA, 96 bp, Homo sapiens
ccagtgagtgaccttggaagtggatccttcccccgaaagcccggctttcaggaaagactgcctcacctgagcaagaagcttcaccctggacaaaaa

SEQ ID NO: 211156 - DNA, 100 bp, Homo sapiens
cgttgggctaaagaatgttggcaatacttgttggtttagtgctgttattcagctcttcacagatggaatcacaaataaacttattggctgttacgtggga

SEQ ID NO: 211157 - DNA, 97 bp, Homo sapiens
caatgacgtcctcctgcactgggctcctgtagaggaggctggagattccacccaaatcctcttctccaagaagatcacacgccgctatgcagagttc

SEQ ID NO: 211158 - DNA, 75 bp, Homo sapiens
tggtgatgacagaatcagcttttccatgtttgaccgtgagaacaaggccggcgtgaacttcagcgagttcacggg

SEQ ID NO: 211159 - DNA, 74 bp, Homo sapiens
cagtggagatgaagcctaagaatatgatcagagcatctgttaagaacatcttcagccagccggcctgcttccct

SEQ ID NO: 211160 - DNA, 75 bp, Homo sapiens
ctcaagtacaactcccggcacgaggtgaaatgacaatggatgctctgttggctcgattgaaacttctgaatccag

SEQ ID NO: 211161 - DNA, 100 bp, Homo sapiens
atcattatttgcagtatatgttgtcgggtacattgatatatgtaaattacggaagatcatttatatacacatgggttggattgagattgttggatgtgct

SEQ ID NO: 211162 - DNA, 111 bp, Homo sapiens
caacacggaggataaaatggaggtggacctgagtgaacagacgagttgtactgctgtcacaggaaatggacgctggattacaagcatggcagctcaggcagcagaagttgc

SEQ ID NO: 211163 - DNA, 74 bp, Homo sapiens
cggcgcttcagctgcgaccgcgagccctctcaagcaagaaatggtggagtcaatgaagaaagtagcagggatgg

SEQ ID NO: 211164 - DNA, 87 bp, Homo sapiens
ggggtgcgcagcctcgagtttgagagctacccggagctccaagacagggccgcttacaaacacgcagatggcaagaagattgatggc

SEQ ID NO: 211165 - DNA, 74 bp, Homo sapiens
ctctcagaccattcccatcagtgagcattacagtatcctagaaggaaaacatcaccatggctacagaaattggt

SEQ ID NO: 211166 - DNA, 90 bp, Homo sapiens
cgcagtggtcgcttcttctccttggtgaacagtggtatagcagccactccagcctctgctgcagcagccaccctggatgtggctgttcgg

SEQ ID NO: 211167 - DNA, 75 bp, Homo sapiens
agattttgatgtggatgatgccaaagttttattagccccattgacaaaccttcagattctctcagtatagggaac

SEQ ID NO: 211168 - DNA, 75 bp, Homo sapiens
cccgcggtggagcgggacacgaacgtggaatgggtaccacagaccatgtcatcgtcctggcgtccacgaaccgag

SEQ ID NO: 211169 - DNA, 100 bp, Homo sapiens
atggaaagagataggcgcatctctggagttgatcgttactatgtgtcaaagggagtggagagtgttttcgacatcatggagatggaggatgaagaacgga

SEQ ID NO: 211170 - DNA, 102 bp, Homo sapiens
cgaagagcgctgggttggacctttacctgtggaggcaacactggccaagaagaggaaaggtgtggccgacgacgatgccctcgctgaggagcgcatgcggag

SEQ ID NO: 211171 - DNA, 96 bp, Homo sapiens
aaggcacagctggatgaatggaaagcaaagaagaaagcttctaatgggtatgaaggctatgaagtagagtcatctttaaaggatgccagctttgag

SEQ ID NO: 211172 - DNA, 98 bp, Homo sapiens
ttcgatgccatcgtgatggcggatgagagaaaagtgtgatgaagaccacatggggtgtgctggatcctcctgtggggaatacccggttgaatgtcatt

SEQ ID NO: 211173 - DNA, 101 bp, Homo sapiens
gccaagttgaaaatggacgagtaatcgcctgctttgattcattgaaactagagatgatcgctatggaaaatcctgcagacttgaagaagcagttgtatgtg

SEQ ID NO: 211174 - DNA, 75 bp, Homo sapiens
gataaattgaccggtgtgtttgtacatcaggaacgtctctatcaagaatacaatttcagcaaggctgagggccat

SEQ ID NO: 211175 - DNA, 98 bp, Homo sapiens
cagggacagaggccagcgcgctgcaacacaagatcaagaactccatctgactgcagagagatcctgcttcccatgatgaccgatcagctcaagtacca

SEQ ID NO: 211176 - DNA, 115 bp, Homo sapiens
cggggcctgggggaccgagcagcgggaggctgtctttcccttccagcctggaagtgttgcagaggcctggccagcagccccgagtgtgcttgtggtcggagccacttcacatgtg

SEQ ID NO: 211177 - DNA, 101 bp, Homo sapiens
actgggagggcgatgacattaaaactctgggcaacgtcacttacatgtcccaggtcctgattcagtgtgccggaagtgagcttgtggagagactccagagc

SEQ ID NO: 211178 - DNA, 98 bp, Homo sapiens
gcagcccatggagatccagttcaattatgaatctcaggaacaccaccttctgtcagatagcaacttcatccttgccaatgcccaggtggctaagggtt

SEQ ID NO: 211179 - DNA, 101 bp, Homo sapiens
agaccatgttccgagcggcggctccggggcagctccggcgggcggaatgaatctgaagtctgctgcagtaaaacacagaaggctttaaaatgttttcttgc

SEQ ID NO: 211180 - DNA, 75 bp, Homo sapiens
gccagtgactaccaacgtttggaccagaagtggccccagatgagccagtcccgagcatgtggtggatcagaacag

SEQ ID NO: 211181 - DNA, 75 bp, Homo sapiens
ctgatctgagggccaaagtttggaaggattttttatcaagcagaaatgcatcgaacaacgagaatcaagatcact

SEQ ID NO: 211182 - DNA, 78 bp, Homo sapiens
cgggtaactctcacagtggaagggggaagttgctgaagttatatttgtaggtgctaacccgaagaattcagtacaaaa

SEQ ID NO: 211183 - DNA, 82 bp, Homo sapiens
attggtttcattatacacttgtggcctttgcatggttgggagttgttcctcttacagcataggattcttttctcaaaatgct

SEQ ID NO: 211184 - DNA, 96 bp, Homo sapiens
tttctttactctggggtcccggctgccctgtggcctcgctcctcggaggatgcagtggcagaacgtggagcacgttggtgaccagagcccctacgt

SEQ ID NO: 211185 - DNA, 75 bp, Homo sapiens
cagagttgtaccctacggtgctcaggtggagttctacttcctttcccagtacgtgtcgccagccgactccccgtt

SEQ ID NO: 211186 - DNA, 100 bp, Homo sapiens
aatcctgccaggcttgccgcttcatgaagtgtttaaaagtgggcatgctgaaagaagtaatctcaggggcgatataatcaatgaggtggtcctaaagttg

SEQ ID NO: 211187 - DNA, 98 bp, Homo sapiens
acatcaccaagctggaggtggacgccatcgtcaacgccgtaataaaagactagtggccttagtgcccatgcccagtgaccctccattcaatacccgaa

SEQ ID NO: 211188 - DNA, 51 bp, Homo sapiens
actgactttcagctatggaatcggattactacagcatcccatttcccacac

SEQ ID NO: 211189 - DNA, 100 bp, Homo sapiens
tggcagggtgccacttcccattaatgacctgaaggagggagaccctcctggatgacttccttctcacgtacactgtcttcatgacaactgatgacttgtg

SEQ ID NO: 211190 - DNA, 98 bp, Homo sapiens
aagagacaaagaaaaactttgaagtagtggatctggtggatgtcaatacccctgatttaatgccttgtcttaaaagaagaagcatctgattaccttga

SEQ ID NO: 211191 - DNA, 98 bp, Homo sapiens
cgggagagggggagtgcgcggcggccgcagctgccacaaaccaggtgtccctggccagtgtccttccacctgtccacaagcatggggaacatcttcgc

SEQ ID NO: 211192 - DNA, 100 bp, Homo sapiens
ttccatctactgtctttttcttcaatgggcagcatatgaaagtggattatggtcacaccgaggagaagactcagtgggaacatccaaaaactggaaaaag

SEQ ID NO: 211193 - DNA, 98 bp, Homo sapiens
agagtccccccaagtctcctgaagaggaaggagcggtgtcctcttaagaaaatggtctacagtgaatatagagccagtcttgcttttgaccttgttag

SEQ ID NO: 211194 - DNA, 83 bp, Homo sapiens
ggagccctggtccccctgcagtgcccgcttcatcactgacttcctggacaatggctatggggttatggttttgtgaaattcac

SEQ ID NO: 211195 - DNA, 100 bp, Homo sapiens
gtcagctagtgtccgctctgctcggccgcgggctcccggaggactgcaggactttctgaagaccttttcccccgatgtcttccggttcttctgcctgcgg

SEQ ID NO: 211196 - DNA, 100 bp, Homo sapiens
tgccccgccgggagcccaccgtctccagcttctatgtgaagcgggcggataaggatgacattcggctgctgccgtcagcattgggtgtgaagaagagaaa

SEQ ID NO: 211197 - DNA, 75 bp, Homo sapiens
ggggccgccggcggcccggcttcaggtttggtgcacctcgatttggaggaagtagggcagggcccttatctggaa

SEQ ID NO: 211198 - DNA, 90 bp, Homo sapiens
gcggtgctgcgagggcagaacctggttccaagattatcccctaaaactcatagacccaggtctcccagacagaacagtattggaaatacc

SEQ ID NO: 211199 - DNA, 115 bp, Homo sapiens
atcagattgtgatgaattgtgctgatattgatattattacagcttcatatgcaccagaaggagatgaagctccttgctcggattgaacgtatggaaaggcggatgcagctggtaa

SEQ ID NO: 211200 - DNA, 136 bp, Homo sapiens
gttcgtcgtggcaacgttgctggtgacagcaaaaatgacccaccaatggaagcagctggcttcactgctcagggcggcgactggcggcgcgatggacctgaccgggctcctgctggacgaagaaggcaccttctcc

SEQ ID NO: 211201 - DNA, 100 bp, Homo sapiens
agagaagaggcgatggcggcgatggcatctctcggcgccctggcgctgctcctgctgtccagcctctcccgctgctcagatgaggacggggacttggttg

SEQ ID NO: 211202 - DNA, 73 bp, Homo sapiens
ttttggcattgacatttaattttagggtcctttatatagaagggagagtgtgatccctcacatccacaaatct

SEQ ID NO: 211203 - DNA, 100 bp, Homo sapiens
tgaagatgctgtaaaaagattgaaagctgattatattccatcacaacaagatattctgcttgccagaagacccaccaaaggcatccatgaatacgacttt

SEQ ID NO: 211204 - DNA, 147 bp, Homo sapiens
ttgttcactccttgaaggacctgcccactgtgcttcctcctggcttcaccatcggagccatctgcaacattttccagcctcaggtctcaaggatagaggtgccaccacttcccaatggaccaacatttggtgagcaccgcatcttac

SEQ ID NO: 211205 - DNA, 97 bp, Homo sapiens
agttgtgtccccaaggaaggatgagaatagctactgaagttcaaaccttgtactactcagctgatcacaagctgcttgatgggaacctactagatgg

SEQ ID NO: 211206 - DNA, 83 bp, Homo sapiens
agatgggcagacggattcatttagagctgcggaacaggacgccctctgatgtcaacaacggttccagcctcagggatgagtgc

SEQ ID NO: 211207 - DNA, 75 bp, Homo sapiens
caggatctgaagagctatggtgaaacaccactgaagcattgccaagatctcacattcttgaaggtggcattgaag

SEQ ID NO: 211208 - DNA, 75 bp, Homo sapiens
gcagtggtcgcttcttctccttgaaccagaggcttaaagtccctagtccaaagcgaagagttgtctgtgtgatga

SEQ ID NO: 211209 - DNA, 75 bp, Homo sapiens
aaatgggccatgagctcttcaaattggcccagatctttttcaacgggcattgaacctggccacatcccaggtacc

SEQ ID NO: 211210 - DNA, 73 bp, Homo sapiens
cggcggcggcggcggcggcggcggcgcaggaagatgttggatccagggttgatgacgtgttccaagcaagcta

SEQ ID NO: 211211 - DNA, 100 bp, Homo sapiens
cagtgagaagaatgagtataaaggatgggttttaactacagacccagtctctgccaatacaaaattggacagctgtacatgatcagcaaacacagccatg

SEQ ID NO: 211212 - DNA, 82 bp, Homo sapiens
ctgctgctgctgctgctgccccggacccgggcggacgagcacgaacacacgattgtggtggtgccatgcagcaagaatcaga

SEQ ID NO: 211213 - DNA, 88 bp, Homo sapiens
tcagcagatgaatctgcagatgatctttgcacggtgcagattccaacaacttggagaacaacaggaagctaggaaacctggcagtgcc

SEQ ID NO: 211214 - DNA, 74 bp, Homo sapiens
cagtttccgtgggtctgtgaagaggtcggcggcccctgcgggcgccagtcagagagagtctacagggagattga

SEQ ID NO: 211215 - DNA, 82 bp, Homo sapiens
ctgggtcccggccccccaaggctcggcccactattctcagctcagacactgaggatgctagtgaaactgacctggcaaagca

SEQ ID NO: 211216 - DNA, 103 bp, Homo sapiens
cgcagaagtcgcgtgtctaggtgagtcgcggtgggtcctcgcttgcagttcagcgaccacgcaaattgtggctactaatttgccccctgaagatcaagatggc

SEQ ID NO: 211217 - DNA, 101 bp, Homo sapiens
tttttgcttcaccgacatagtcattatgccgaagagaaaggtactccaaagattcaggtttactcacgtcatccagcagagaatggaaagtcaaatttcct

SEQ ID NO: 211218 - DNA, 101 bp, Homo sapiens
aaaaaaaccacaaatgtttttctgttttgcctgaatacatgatttaaacaagagatttccacagaagaacacagaccaccagtgcaaaacaagaaaaagca

SEQ ID NO: 211219 - DNA, 74 bp, Homo sapiens
cagaaaatgacatccagaagttccccaagctccgggtgccatggagtctccctctatcaccaggctggagtgca

SEQ ID NO: 211220 - DNA, 75 bp, Homo sapiens
gttttacattggctgttttcctcacattcctcaagcagtaccttccactggaagaatctcaaacagcgctactta

SEQ ID NO: 211221 - DNA, 90 bp, Homo sapiens
cctggacccatgatgggaagggaatgttctacaactcataccctcaacaggatggaaaaagtgatggtttcacaagaagtactgtggctg

SEQ ID NO: 211222 - DNA, 75 bp, Homo sapiens
tgaacttcttttggcagctagcagctctctgcagacagaaacatctttccaggaacagcgtgaggaggacagaag

SEQ ID NO: 211223 - DNA, 101 bp, Homo sapiens
tcccggagagccccggagtgagcggagtagcgagtcggcaacccggagtggatgaggatcgcagtacggaacctgaccgattgcaggtgtttcacaagaga

SEQ ID NO: 211224 - DNA, 82 bp, Homo sapiens
gccggcaagagctcggtgctggagaacttcgtgggccggtgaaatgacaatggatgctctgttggctcgattgaaacttctg

SEQ ID NO: 211225 - DNA, 100 bp, Homo sapiens
gaaaatgcaagaagactgatggagcaggcttgcaatattaaagttcaggagctccatgaggaggaggcacagtgggtgaactatgatgaggatgagttgt

SEQ ID NO: 211226 - DNA, 100 bp, Homo sapiens
ggaaaatcatattatagatggagtaaagttctgggaagtcatcagtgatgagcatggcatcgaccccagcggcaactacgtgggcgactcggacttgcag

SEQ ID NO: 211227 - DNA, 100 bp, Homo sapiens
gaagaggaagtgagagcagcggcagccggcggtgcagcagccggccgacccagagtccttatgccagcctggaccatcttggaggcagtgtaggatcatg

SEQ ID NO: 211228 - DNA, 74 bp, Homo sapiens
tgccactggcatccagtcagatcaggctggatcaggtgcaacaccaccataaggaagagtggattcggtggcat

SEQ ID NO: 211229 - DNA, 140 bp, Homo sapiens
atgcctgcggctgctgcgcaggtaccggctctcgcacgactgcatctctctctgcatccaggcgcaggaccacatggtgacaatgcatgatgtgcttgatgctcagtggctgtatgataaccacaaggatgagagttacc

SEQ ID NO: 211230 - DNA, 96 bp, Homo sapiens
tggcaaatttctgttccatcagcgtttgtttgggtgtactctgtgtgaccgcgcctatccctcggactgtcccgaacatggaccagtgacttttgt

SEQ ID NO: 211231 - DNA, 100 bp, Homo sapiens
gagcggcggaggctcaaccagctgctcctgcccctgctgcaggaagagagaagggcacagttacctaagtatcaacgtaatcttcctcggccaggacagg

SEQ ID NO: 211232 - DNA, 82 bp, Homo sapiens
gctcgggagattcagccgtgaagcaagtgcagatagatggcctttgcaagcatctcttggcagtttacctgagtcaggttat

SEQ ID NO: 211233 - DNA, 100 bp, Homo sapiens
ttctttcttcatgaccctgcccttgccagaatttcctgcgctgttccacctcattcaacttcagctgtgagccgtgagctttgaggcggtgggatgtgtc

SEQ ID NO: 211234 - DNA, 90 bp, Homo sapiens
ccaggatgggattagacagtgaggaaggctggaggcctctgttccaaaagacagatcccggagttgaagcaggacatcagcatccccgac

SEQ ID NO: 211235 - DNA, 100 bp, Homo sapiens
cgcacggcgggcggacagcatgctgagcctcctcgtctggatcctcactctctccgatactttctcccaagagatccgtgctcagctcacagagcagatg

SEQ ID NO: 211236 - DNA, 100 bp, Homo sapiens
ggaatgttccccctccatttggcagccttaagcggcttttcagattgctgcagaaaacttctttcttcaggtctctggacctctgactgacactgtgcct

SEQ ID NO: 211237 - DNA, 132 bp, Homo sapiens
acaaaagacaagaaaaatgaaaactcatttgagaaacaggtctcctgtcatgaaaattctaaaagctgtataagtgaaatcaaatacattgcccatctcgctgcagtctataagaagtagcctactgctagg

SEQ ID NO: 211238 - DNA, 100 bp, Homo sapiens
cgcggccccgctgagcctcggtgcggcggcgagcgcggtcgagatcgccatgcctaccccaattctgtggtgttcttggtcacacatttatggagtttct

SEQ ID NO: 211239 - DNA, 76 bp, Homo sapiens
ctcatctggaattttgccgatttcatgactaaccagtgaaagaccacagcaagattctttcattcgtctcctccta

SEQ ID NO: 211240 - DNA, 101 bp, Homo sapiens
ccaccagctgcccagcccccattggcgagtttgagaagattctgtgaggagaccaggaggaattttgaagccaccttaggttggctacaagaacatgcttg

SEQ ID NO: 211241 - DNA, 108 bp, Homo sapiens
tggactgcaacctggctgtacagctcctcaagtgcaacaagtcccacttccgaaaccacaagtttgccgatccgtggtccttcagcatatctctgtgctgcagacaac

SEQ ID NO: 211242 - DNA, 100 bp, Homo sapiens
gccacatcgctgacttggctggcaactctgaagtcatcctgccagtcccgagacgagttgtactgctgtcacaggaaatggacgctggattacaagcatg

SEQ ID NO: 211243 - DNA, 87 bp, Homo sapiens
atggaggatcgtcaggctctaaacaaaattctgggatcatagacggtatttctatgtaaacgaacagtcgggcgagtctcagtggga

SEQ ID NO: 211244 - DNA, 100 bp, Homo sapiens
gaagatggtgtcaaagagaaattctgcctcaagtactacagccttccagcagccttcccagacccacagatcacacccagggaaaactaataaagccaca

SEQ ID NO: 211245 - DNA, 100 bp, Homo sapiens
ggagcttctgtccacctgtcctgcagaggagtcgtttccagcccggctgaaagtttcctacactactgaggtttaggggcactgtgaagcaaaagccacg

SEQ ID NO: 211246 - DNA, 74 bp, Homo sapiens
agaaggtgccggtggtgcgagtcttcggagcgaccccggcaggaactgtggctgcaccatctgtcttcatcttc

SEQ ID NO: 211247 - DNA, 74 bp, Homo sapiens
gagggttgaagattgtgaagcaatagcctaaggagcagtacatttttatccatcagtgtgtgcaactgatgtgg

SEQ ID NO: 211248 - DNA, 90 bp, Homo sapiens
tgcaggcgtacgaggatgtgctggagcggtacaaaggtctgcgcaggcatggcactaagtgtcccatggcacatttggccctcatggagg

SEQ ID NO: 211249 - DNA, 75 bp, Homo sapiens
ccagctagagaatggcatgtgcaaagatacagaggtcatagaaggttatgaaatagcctgcagaaaagctcatga

SEQ ID NO: 211250 - DNA, 75 bp, Homo sapiens
ggacggccgaaccccgcgcccgcaggacgccccagccagattgagaggatccagaatccagatctctggaatagc

SEQ ID NO: 211251 - DNA, 103 bp, Homo sapiens
cagtaataaagtctcccttaaaatgcaccctccttccacctggccaggaatcagaccctctttcccagctgcccgctcctcagcacccgaagattcgcctgta

SEQ ID NO: 211252 - DNA, 100 bp, Homo sapiens
ggtttttctgaagctagtaacacctggttacctaccaattcagattaccacactgtgaatgttgatgacaggcgacactaacaggtgaagatctcgggag

SEQ ID NO: 211253 - DNA, 74 bp, Homo sapiens
tgagagccttctagagaaaagagagatttcggtgtctgaactgctcagcttcgcaagtctgctctcaggatggc

SEQ ID NO: 211254 - DNA, 83 bp, Homo sapiens
atttaagtatctccgctacttcactcgcactatccttgatgctaggtatcacctcttctgggctcaagatggacaacaagaag

SEQ ID NO: 211255 - DNA, 98 bp, Homo sapiens
aaagcaatatataattctggtcaagtactatactggcaattgctggagaagattttgcaattgttgcttctgatactcgattgagtgaagggttttca

SEQ ID NO: 211256 - DNA, 137 bp, Homo sapiens
cttaaagcctccagagaagtagaatctgtagaccttccacactgccacctgattaaaggaattgataatgagtgtgtatatggcaactaccctgaaatacctttggaagaaatgccagatgcagatggagtagccag

SEQ ID NO: 211257 - DNA, 83 bp, Homo sapiens
ctcagttggaagcagccgatccagcctgcggagcctgtggggcagcatacctccagataatctctctattcaagagtttcaaa

SEQ ID NO: 211258 - DNA, 51 bp, Homo sapiens
ccgcgcgctgcccacgattcgcttctgagacctcccagctaactggaacct

SEQ ID NO: 211259 - DNA, 100 bp, Homo sapiens
tgaagagcgacaagccgctggcagccgcggatctcaccgccgctcaggacctcctgccccccgaggtctgcagtctcctgaacccagcagccatctacgc

SEQ ID NO: 211260 - DNA, 101 bp, Homo sapiens
gaataggaatcatggcggctgcgctgttcgtgctgctgggattcgcgctgctgggcacccacggagcctccggggctggcgttgccttcttgccagctagt

SEQ ID NO: 211261 - DNA, 74 bp, Homo sapiens
attccaagtaactcttatttgggcccaccagctctgagcagatcatgaagacaggggcccttttgcttcagggg

SEQ ID NO: 211262 - DNA, 100 bp, Homo sapiens
tggatgttcttcttcgagtatttgtagaaggagcaaaatatgctgtgaattccatcaagaagaaagtcaacgacaagaacccacacgtcgccttgtatgc

SEQ ID NO: 211263 - DNA, 83 bp, Homo sapiens
tggaacaaaaaaaggagatgcctggcagccccgctctctgcagaaatctgagaatgaagatgacagcgagtgggaagatgtgg

SEQ ID NO: 211264 - DNA, 100 bp, Homo sapiens
ggcggggaaaatggcggacgggaaggcgggagacgagaagcctgaaaagtcgcagcgagctggagccgccggagggatgatgcagtgtgtgattgcagtc

SEQ ID NO: 211265 - DNA, 100 bp, Homo sapiens
tggatgaagatggatatactcaattacacttcgactctcaaagcaataccaggatagctgttgtttcagagaaagagcacagggctccctcttcaacgtg

SEQ ID NO: 211266 - DNA, 75 bp, Homo sapiens
gggtttttgggaaagccaaatggagctcagaaagctgtatggacctctgtgtggtggttagcaggaagaagatga

SEQ ID NO: 211267 - DNA, 90 bp, Homo sapiens
ggctccggcttctgctgttgctcttctccgccgcggcactgatccccacaggtaactgtgacatttgatgatgtggccttatatttttcg

SEQ ID NO: 211268 - DNA, 49 bp, Homo sapiens
agaggttccaagaccaattccccggcttccgttacaagatgaggtctgt

SEQ ID NO: 211269 - DNA, 78 bp, Homo sapiens
cagcgtagcccgagtcggtcagcgccggagattcagagcattcttcactccagaataatgagcaaccctctttggcca

SEQ ID NO: 211270 - DNA, 82 bp, Homo sapiens
cgtccttctccactttcgccagcccgtgccgcgagcgcggcctgcaggaggaaagccatcaccaagtcgggcctccagcacc

SEQ ID NO: 211271 - DNA, 100 bp, Homo sapiens
tcaagaggttcggaagtgccaaggtcatccggtccctccacgggcggctgcagggtggaggccctgggaggagcggggacactgaggacctctctccaaa

SEQ ID NO: 211272 - DNA, 82 bp, Homo sapiens
ttgttggctgcttgctggagaggtgaaaggtgtagcagtcactcggcctacacccacagcatcgaccttgtgaacccagcga

SEQ ID NO: 211273 - DNA, 98 bp, Homo sapiens
tccacaatgtcaactgtccccgcggcttcctgtacttcaacagacaggaggcaggcagagcctgagcagagtgatggtgaggaggacttctactacac

SEQ ID NO: 211274 - DNA, 98 bp, Homo sapiens
tgtggaaatgaacttcacaagttcctcatctgggacactgctggtcaggaacgggaaaacagttcctcctgaggatttcagagaagagctggacttcc

SEQ ID NO: 211275 - DNA, 75 bp, Homo sapiens
gtttttcggatcatgtctggtggctccgcggattataacagaaatacactttcgggaaatggcctctaaatcctg

SEQ ID NO: 211276 - DNA, 100 bp, Homo sapiens
gtggggagggaggactggaccacctgtggcggcttgggagcccgcacgccctaggccaaggccacctttgatgccatttctaagacctacagctacctga

SEQ ID NO: 211277 - DNA, 100 bp, Homo sapiens
tccagcccgggctgcccggctctcgcaggcccccccgcgccgaccgcgttcctatggacagacgcacagacacctgcagagggagacgtggtgggcggtc

SEQ ID NO: 211278 - DNA, 90 bp, Homo sapiens
caccatggctctgaagagaatccacaagacaatcatgacatcatctccatgaagctgttccagctgatggtggagcacacgcccgacgag

SEQ ID NO: 211279 - DNA, 88 bp, Homo sapiens
ctggctgggggaaccactatgatcaatcctcagacagattctaagcctcctgagggattgttaggattccacacagactggctgacat

SEQ ID NO: 211280 - DNA, 100 bp, Homo sapiens
tactcgaccaggggcgacggcgtactttgggcttcatcatggaggactacctgcagggttgtcgagctgctctgcaggtgctggagaatctggtaaaagc

SEQ ID NO: 211281 - DNA, 100 bp, Homo sapiens
cgcgatgttcgccccccggctgctggatttccagaagacgaaatacgcgaggtttatgtctcattggatcaacctgtgactgctttaaatcttttcaaac

SEQ ID NO: 211282 - DNA, 100 bp, Homo sapiens
taagaaatatttcaaatacagtaatgaaagtaaagcagatcctgggcagaaggttttctgtctcaactggtctctgacaagcctctgactgaatgtatcc

SEQ ID NO: 211283 - DNA, 100 bp, Homo sapiens
ggcagctgaagacccggccgcccagatgatgcggtggtgggggacctgccggcacgcgactccccccgggcccaaaatgggcaccaacaaatgcgccagc

SEQ ID NO: 211284 - DNA, 83 bp, Homo sapiens
gtttcagatgacaatgctccctctccttatatgggaaaagagtgcaaattcggaaagcacctcaagctgtttcagatacagtt

SEQ ID NO: 211285 - DNA, 75 bp, Homo sapiens
tccgagcgctggattgcatgagaagccctctgattctgttcacattacaaatgatgatgaaagatttctacatca

SEQ ID NO: 211286 - DNA, 88 bp, Homo sapiens
agctgccgtggttgccaggagagctgcgccggcgagaagcggccgagccagcagcaggaagcggtgactttcaaggatgtgatagtgg

SEQ ID NO: 211287 - DNA, 75 bp, Homo sapiens
cggcgcgcgaggacccgagccaggcggggacaggacggcggggcgagccagcgcgccgcgattcaccagcctggt

SEQ ID NO: 211288 - DNA, 90 bp, Homo sapiens
gcggggagagtagggtgctgtggtctgagctagagggtgaagctggcggagcaggaggatgggcgctccagcccacactgtgaagagcct

SEQ ID NO: 211289 - DNA, 75 bp, Homo sapiens
tgggcggtgggccccagccccacagaccagcccagcattcaggaagatgagagactgcttaggcgccaccactag

SEQ ID NO: 211290 - DNA, 97 bp, Homo sapiens
tgaaaacacagtttctgcaggaaaagatctctctacttctcctaaggctgaagggtatgtgattggcagctgtattaaacacattccaatcgcagga

SEQ ID NO: 211291 - DNA, 100 bp, Homo sapiens
cttggacttcccagcctccagaaccgaagcatccaggatgtgggaacattgtgacatttgcacaatttttatttattgctgtggaaggcttcctctttga

SEQ ID NO: 211292 - DNA, 100 bp, Homo sapiens
cctaccagggtattctgaagaagacaagagtcatggaaaaaaccaagtggctggatatcaaaggaaatcatggtatgcccaagaggacagagaacgaatg

SEQ ID NO: 211293 - DNA, 100 bp, Homo sapiens
gtaaagcctgcaattcaggaaaaaagaaaaacgccacctatgtccccagcttgtgaggacacagcagccccatttgtcctacgggaagtgaaggtgctgg

SEQ ID NO: 211294 - DNA, 96 bp, Homo sapiens
gcgacggccttgagcgaggaggagctggacaatgaagactattactcgttgctgaacgtgcgcagggagatataattgaccctgcaatcctgcgcc

SEQ ID NO: 211295 - DNA, 75 bp, Homo sapiens
aattgtacagtgacatcttctgggatttagtctgctagagaccgttggatggcagcttaaccttcagatggctca

SEQ ID NO: 211296 - DNA, 100 bp, Homo sapiens
ccctctccatggaggcagcccgcccctccggctcctggaacggagccctctgccggctgctcctgctgaccctcgcgagtaacagttacccctcaatgag

SEQ ID NO: 211297 - DNA, 75 bp, Homo sapiens
agagagcgccctgagagaacagggtggccgcttggtccagctcaggtgcctaaaaggccagaggggcttctcagg

SEQ ID NO: 211298 - DNA, 90 bp, Homo sapiens
ccttctgtttgggatacttttattgaaggattgaaagcttgtatacagtggatatagcaaagaaaccctaagacagcgagaacttcaact

SEQ ID NO: 211299 - DNA, 98 bp, Homo sapiens
ggagatctctctcatctcgctcggctgcgggaaatcgggctgaagcgactgagtccgcgatggaggcccgatgagagaaagggaaagttaaggatgct

SEQ ID NO: 211300 - DNA, 82 bp, Homo sapiens
cgggctcgtggggcgcctggagtgagggttctggttcccgccggcgagcggccctccaggcactgaagcgtaagaagaggta

SEQ ID NO: 211301 - DNA, 98 bp, Homo sapiens
aaagacaaagcttttgttaattatcttaaatacttgctttactggaaagacccagaatatgccaagtatctaaagtgcggccgggtgtgtggcaacat

SEQ ID NO: 211302 - DNA, 90 bp, Homo sapiens
cgcgtccggagtccccgtggccaggtgtgtgtccaagagatgcaagccactttccagagcccgacactcacagcgttgcctgcaggcagc

SEQ ID NO: 211303 - DNA, 100 bp, Homo sapiens
agctcttggatgttcttggacttgacggaaaggcggtctggggagagagcggcgagctggtgtgtactaagccgatcccttgccagcccacacacttctg

SEQ ID NO: 211304 - DNA, 83 bp, Homo sapiens
cgaacagtctcgttgctgcctctgtgtacgctgaggggggagaacaagttgaaatcatcgcagaaggataaagttcgtcagtt

SEQ ID NO: 211305 - DNA, 82 bp, Homo sapiens
acataatgaactcagacctattgcaaggaaaggacactcccctaacatatttgttacagaatgtctgaaggggacagtgtgg

SEQ ID NO: 211306 - DNA, 51 bp, Homo sapiens
gttccagaccctgccttctcttctgaaagaaactggcgatggaatatgaga

SEQ ID NO: 211307 - DNA, 83 bp, Homo sapiens
ccaccaggccgggaagcccatcggctccacagcacctgttgccttcattagcagcttttcctcctcttccctgcacttcccag

SEQ ID NO: 211308 - DNA, 51 bp, Homo sapiens
gcccctcatcgagctcttcgtcaagtattctaccttgtaaatactgttatt

SEQ ID NO: 211309 - DNA, 101 bp, Homo sapiens
gtggcccctgcagcggaaccggacccagtccctgagccgcccctacacccacagaacgctgtccaactgggcgtacgagtttgacaagtgggccccctccg

SEQ ID NO: 211310 - DNA, 100 bp, Homo sapiens
caccccccgtcccgagagcatcattgtcgccagtatcacggcccgcaagccgctgccaagaaagcagaagccactggagaaaaacggccaagaggcagac

SEQ ID NO: 211311 - DNA, 100 bp, Homo sapiens
aaaggctttgccgcagttcatcttcctccctgtgtactttccatttgccttcctgggatgccaaagaagagtgaatggcccacaaagagcctggtagcac

SEQ ID NO: 211312 - DNA, 82 bp, Homo sapiens
ctcgctctgggtctccaggcccgcgaccgtccgccagtcgtcccgaggatgcctaaatcaaaggaacttgtttcttcaagct

SEQ ID NO: 211313 - DNA, 110 bp, Homo sapiens
cgtgtgccctaagcacacctggagcaacaacctggcggtgctcgagtgcctgcaggatgtgagggagaaaatatttacaccagcagctccagttcataccaataaagaag

SEQ ID NO: 211314 - DNA, 75 bp, Homo sapiens
agaatgagccagagggacacgctggtgcatctgtttgccggaggacactggtgaagacatttgaagtatgtgatc

SEQ ID NO: 211315 - DNA, 100 bp, Homo sapiens
gagatactgaaggagcaggaaaaccggaagggcctgatagccgccatctgtgcaggcacccaggcatgtggaatatgctcatagtggcgatgtgcttggc

SEQ ID NO: 211316 - DNA, 89 bp, Homo sapiens
catgatagactttcacaaattctaacagatttccccaaattggattggaaagaggcaaaacctgatgaattaatggattccaaattgag

SEQ ID NO: 211317 - DNA, 100 bp, Homo sapiens
tttttactacagcaacagatgtccaaaatgcaatatagtagtacatcagacacaacctctttataacataaggaacagattatggcctttgcaagcaaat

SEQ ID NO: 211318 - DNA, 75 bp, Homo sapiens
tggaggggactatgagaggtttggactgccaggctgggctgtggcttcaaggttttgccagatcgaagtcatcct

SEQ ID NO: 211319 - DNA, 98 bp, Homo sapiens
gcggtgcttatggaccagatcgccgtcaccatcgtcggcggccacctcggcccagcgctggcgcagtgagaacttcgagagacccgtggacctggagg

SEQ ID NO: 211320 - DNA, 134 bp, Homo sapiens
gtctcctgatacccggatgtgaggcgatccgctggcgctagtctgaccctccgccaggcaaaaggaagacgccaaggacttattgttgtgctaacactgaagacttggagacagttattcaccatgtacacagc

SEQ ID NO: 211321 - DNA, 100 bp, Homo sapiens
ctcagcaagacatggtggtgagccctgactctcagtcttcatgattgaagaactcttttgtacaacacaaaggtgaattcatgacacctttgactcttct

SEQ ID NO: 211322 - DNA, 74 bp, Homo sapiens
tgcaaaaccacaccgacttcaaggacaaggaacagcatatgccatatatgagctggctgtggcttcatttccca

SEQ ID NO: 211323 - DNA, 98 bp, Homo sapiens
gtggtgccgcgctcctggccccgcgcgggcggacggcggaggcgcctcccaggtcgcaatggaagaagagatcgccgcgctggtcattgacaatggct

SEQ ID NO: 211324 - DNA, 100 bp, Homo sapiens
gagcaggctgagcgatacgacggctcttgggaaagctggtgctgctgctgcctgattcccgccgacagaccttgggaccggggccaacactggcagctgg

SEQ ID NO: 211325 - DNA, 100 bp, Homo sapiens
atctctacatgtaaaaggccactgactcctacttcctctgtatagagcaactgttgaactcagctgcctgtagtaccttctccaggcaaattccgttccc

SEQ ID NO: 211326 - DNA, 78 bp, Homo sapiens
tccaggccacttttcacttctgctgcactgctttcagcatgcaaaggtgctcagcacagtggactttgtcgcccctga

SEQ ID NO: 211327 - DNA, 90 bp, Homo sapiens
tttggcacctatgcgcctgcagaggtgaggacaccagtgatgaattctgaagcaaaagttctggtgcctgggattcctggtcatcatgca

SEQ ID NO: 211328 - DNA, 82 bp, Homo sapiens
cgcctgggacggaagatcgggagcgggtccttcggagatatctacctggctctaagcgaaagacatgaggcctcagcctgaa

SEQ ID NO: 211329 - DNA, 100 bp, Homo sapiens
ctccgtggaagcgtggccggcagcgtcccggacgaggaggtggaggtcctgattgccataagcagcctcacgtctccgctgctgttcacagcctctggat

SEQ ID NO: 211330 - DNA, 51 bp, Homo sapiens
gatgacagctggagaatggagtcagtcactatgaacaagaccgtagtgcac

SEQ ID NO: 211331 - DNA, 95 bp, Homo sapiens
agaagaaaataaaaaatggcagtaaccctgagacaaccacttctggtggttgccactcacctgaggataggccattgcccaagtctggccaggct

SEQ ID NO: 211332 - DNA, 105 bp, Homo sapiens
cctggagtctgcgaaggccgggacccggttccccggcccacagtgggggtgtgcaaacccgagagaactggatgatgggaggcaagggtcttaaacaagccacgg

SEQ ID NO: 211333 - DNA, 74 bp, Homo sapiens
ccttcagaaatccataagattcttcatgagagtcacaattcccttctacaagaccgtataatagacgctggccc

SEQ ID NO: 211334 - DNA, 100 bp, Homo sapiens
aaaaatcgagcagaaagaatgtctttcagatgtcatcgcaacagataaagaagacgttgccttcaaagacctggatgtggccattcttgtgggctccatg

SEQ ID NO: 211335 - DNA, 96 bp, Homo sapiens
gaagacaacatctccaccaggcgacgatattaaaaactctcctggccagtatatttgtcaggatacgaatcaggttctcttcaagtgctgccaggg

SEQ ID NO: 211336 - DNA, 95 bp, Homo sapiens
ttcgagtgacccgggtgccgaggagcgggaagagttgctgggggcgtgatggtgggcatgggtcagaaggattcctatgtgggcgacgaggccca

SEQ ID NO: 211337 - DNA, 51 bp, Homo sapiens
catgcactggggcacagactccagggcaccgcagtatcaagaagatctcca

SEQ ID NO: 211338 - DNA, 75 bp, Homo sapiens
aaaataccacgacaaaaccaccctaaacactctgctccagccaaggtggtgagggcagctgttcctaaacagcgc

SEQ ID NO: 211339 - DNA, 98 bp, Homo sapiens
taaggaatgaaacccttccagctcgatctgctcttcgtctgcttcttcctcttcagtcaagatggatacacaactgatgacattgagttttactggcg

SEQ ID NO: 211340 - DNA, 100 bp, Homo sapiens
ccgggaattaagtccagtttcttttcaatatagggatgggactgaggaagacccacaggcagaactggccatcattcatggtcagatggcttatattctg

SEQ ID NO: 211341 - DNA, 100 bp, Homo sapiens
gtcactgcctgcgcagctccggccgcctggctccccatactagtcgccggtgcttttgaagatgatgatatcacgcacgttgaaggaagtgtagatccta

SEQ ID NO: 211342 - DNA, 75 bp, Homo sapiens
gagaaggagggaggggaaacacaaagccggctacgcgctgcgaggggtagaaatatttctgtcatggctcattca

SEQ ID NO: 211343 - DNA, 109 bp, Homo sapiens
ctgctattgaaccaccaaaagtccattatgaaactgccattccaccctatggtgaatctggattgttctcgggatttccggccttttctttgtgcactctacgctccta

SEQ ID NO: 211344 - DNA, 89 bp, Homo sapiens
gaaggaacgaggcaaggagctaaagcagcgtgcgttcagccctgggaaagcgtggatacccatcaacgaagttttgatattggaattca

SEQ ID NO: 211345 - DNA, 99 bp, Homo sapiens
cgcatccctgctggcacagtgccgggctctgacccaggcgtgcgggtactcagaaggtgccttggtggatcaggcagtctttgaagaacttatcaggga

SEQ ID NO: 211346 - DNA, 100 bp, Homo sapiens
gggaaaacttgctgcggttgctcaagcgttgtagaatgaatgaagacactggcactgattatataacaccttggcagctatctcaagtcgttgatggagg

SEQ ID NO: 211347 - DNA, 103 bp, Homo sapiens
gtgaaaaataccacgacaaaaccaccctagtatgccttacactttcttgtacaaagtggaatttcctactgtatcatgatcatcataggagtggagaacatgc

SEQ ID NO: 211348 - DNA, 135 bp, Homo sapiens
ctgggactggccattatctcagggcttctgttgcattatagccctgtgttctgctggaaagaggaaccgctgctgctggccgaactcaagcccgggcgcccccaccagtttgattggaagtccagctgtgaaacc

SEQ ID NO: 211349 - DNA, 74 bp, Homo sapiens
tttgaagacaatcgtcacttatacaggtcgttgaggacttccacatggagattggcacaggaccagactcaaga

SEQ ID NO: 211350 - DNA, 98 bp, Homo sapiens
ctatctaactggagtttcactagctggaggccattccccgatttaaccagaaaggagaagtatataaggcacagataatgaatgtgagctggtcagct

SEQ ID NO: 211351 - DNA, 98 bp, Homo sapiens
atgaagaattggaggaacagtgtgtccagcatgggagagtacatgagacgatgaagcaaagattctttgtgggaaagagattcctcgctggatcaatc

SEQ ID NO: 211352 - DNA, 97 bp, Homo sapiens
gacatctattccatctgtgagtgactctttgacatggagagaatttcactatattcagatctctctgcaagagtagatgcagttaaggaagaaaatc

SEQ ID NO: 211353 - DNA, 96 bp, Homo sapiens
tggacgctgtgttcccccacgaacttctgctgtttgcagacctgacagacgctgctgcccgcaacgcggagctgctccgccaggccaagcacgaag

SEQ ID NO: 211354 - DNA, 118 bp, Homo sapiens
cccgtaatacctttgctcaataccaatatcaacatcagaacagatctgagcaggtaaacactacacgtgaagagtggtgaaagggaacattgattactgaagtgccctggagagggaa

SEQ ID NO: 211355 - DNA, 82 bp, Homo sapiens
agagctgtgcctcccagcaccacagtccttctgcagtccctcgtccagccacccccagctctggattaatcgaattacagct

SEQ ID NO: 211356 - DNA, 74 bp, Homo sapiens
cagcggcaaagccaggctctccccagatttcaggtatgctgctgaaagtgggaatcctctacattggtgggcag

SEQ ID NO: 211357 - DNA, 100 bp, Homo sapiens
gtgcggcatcacctcctccaagaccgtgctggtctttctcaacctcatcttctgggtagttcctgaaatgactgagatattgaagaaaaaatgaatcagg

SEQ ID NO: 211358 - DNA, 75 bp, Homo sapiens
ccgagaagagcagagcggagggagccccagacacgggaagatcagttttcctgccatccaggctgctccctcctt

SEQ ID NO: 211359 - DNA, 83 bp, Homo sapiens
tagtgcggggtgccggccacatcactgttgaaagcaagttgaatacattggtgcagaagcttcatgacttccttgcacactca

SEQ ID NO: 211360 - DNA, 74 bp, Homo sapiens
gaggaagaggaggagggcgactgtatgatcgtggatgtcccggatgctgcgggcttcgaacctaatgaacaatc

SEQ ID NO: 211361 - DNA, 80 bp, Homo sapiens
ccagagagaacatccagaaatccctggctggagagcaggccgggctctcgccatgggtcactgtcgcctctgccacggga

SEQ ID NO: 211362 - DNA, 88 bp, Homo sapiens
gagttgcggagcccgcccgccggcagcgccgctccccagggagggagtccgcagcctgagatttgggaatggatgatgaaggagatga

SEQ ID NO: 211363 - DNA, 100 bp, Homo sapiens
cagaaccggtcgaaaaccgtgtatgagggattcatctcggctcagggctgttgcaaagaaagttcatagtacaatccagaaaattaagaaggaagggaag

SEQ ID NO: 211364 - DNA, 100 bp, Homo sapiens
ggtcaaaccactgaaatctcttttaggggattctgcaccaacactgcacttaaataagggcacacctagtcagacttcctgctatatcctgatcatcact

SEQ ID NO: 211365 - DNA, 78 bp, Homo sapiens
gcattgctgctaagtacatgctggattgtagaacttctctctctggcttccgagtggacctgccaatcaagtcggccc

SEQ ID NO: 211366 - DNA, 50 bp, Homo sapiens
cttcttacagattgcaaccctggctgatcagctgaccgaagaacagattg

SEQ ID NO: 211367 - DNA, 84 bp, Homo sapiens
gcggacatcgtctcctgtgtggcgatggtcttcctgctggggctcatgtttgagtgagaaagatcagtctaaagaaaaggagaa

SEQ ID NO: 211368 - DNA, 88 bp, Homo sapiens
gacgtcatccttgaagccgaccagaatgatagccagtccctggagctggtgcacaggttccagagagcgcctgctcgctgtgcccccg

SEQ ID NO: 211369 - DNA, 101 bp, Homo sapiens
tcagacattaactggcttgttcaaaggagacaagtgtcacagcctggttggaaaacccaagatatttatcattcagctgtgcctttggctgcaacaagtat

SEQ ID NO: 211370 - DNA, 75 bp, Homo sapiens
aggaatttgaagagatgctggaacatgcagagtctgcacaattacatattattgaagttggcacaccacctacag

SEQ ID NO: 211371 - DNA, 96 bp, Homo sapiens
tcagaagagtgagagagagctattagagattgtgaagaagaatttcgatctccgccctggggtcattgtcagacatatctgaagagatggattaag

SEQ ID NO: 211372 - DNA, 75 bp, Homo sapiens
cggaggtagtcatgatctatgacgccgagaagcagaggccccgagaaatacccgcagcccaaagggcagaagaag

SEQ ID NO: 211373 - DNA, 75 bp, Homo sapiens
gacaatgtccctcacaccccttccagctacatcgaaacaattcccatttgcagaaaccctatgagattaacctga

SEQ ID NO: 211374 - DNA, 83 bp, Homo sapiens
agtttagccacaccaggctggagaatatggtgcagaggccctccacggccataggaaaaggatacagagtagagtttcatgaa

SEQ ID NO: 211375 - DNA, 100 bp, Homo sapiens
ttgtgttggaggctgtggaccttctctgtgcactggcctactgaacttgacgcactggtatttggccatctatacaccattcttaccacacaattgacaa

SEQ ID NO: 211376 - DNA, 88 bp, Homo sapiens
ctggattgctgctttcaattactggcatccagaaattgtgtattcagggttgactttgataaagattgtgaagatcctgaatataaac

SEQ ID NO: 211377 - DNA, 50 bp, Homo sapiens
ctcccgagtagcttggactacagaaaaggcatatggaaggagcatttctc

SEQ ID NO: 211378 - DNA, 82 bp, Homo sapiens
acttccttgcttctttggagaatgatatcaaaccactccttcgagaactcatagaacggaagaccagctccttggatcccaa

SEQ ID NO: 211379 - DNA, 85 bp, Homo sapiens
gagccaatgataccacttttggactagcagctggcgtctttaccaggaacagaggtgccatgcagccccgggtactccttgttgt

SEQ ID NO: 211380 - DNA, 98 bp, Homo sapiens
gaatggaatgggccttagcattgttgcagcaaagggccgttgctccagggagaactgcaaatatcttcatccacccccacatttaaaaacgcagttgg

SEQ ID NO: 211381 - DNA, 98 bp, Homo sapiens
aattcaacagttcaccaccattaccggtatggcgtcatcattgtgggcaacccgaaggcactatcaaagcagccgctctggaaccacctgctgaacta

SEQ ID NO: 211382 - DNA, 90 bp, Homo sapiens
tcggcctcggcggcagcggctgcggagaaggcgagcgaagggcgccctgcgtccggcagaggaggcgagcatcccgctcaggtgatgagg

SEQ ID NO: 211383 - DNA, 100 bp, Homo sapiens
gtcgcctgcggtgcctgggcagcatccagcacctgaagaaccggtgctgacggtggatgctcgtaaccacggtgacagcccccacagcccagacatgagc

SEQ ID NO: 211384 - DNA, 75 bp, Homo sapiens
ctggaacccgctgaaacccacagttctggacatggcaagacatgtgccactctatcgggcactgctggaattgct

SEQ ID NO: 211385 - DNA, 126 bp, Homo sapiens
aagagagacatttctggctctgaaggcgaacgcttcgctggccatttaggagctctgctcaaagccagacggcaagaggaggaacgacgtagaagagaggaagagatgatgattcgtcaacgtgag

SEQ ID NO: 211386 - DNA, 90 bp, Homo sapiens
ggtttttgggctgtgttgacatcaaggatctaccagagcatattgatgagagaaggatctgcaatgctgtttctccagacaaggatgttg

SEQ ID NO: 211387 - DNA, 82 bp, Homo sapiens
caggcgtgtcttgtcgggacgtctatgcgaagcgaaggagtcaagactgagaacaacgatcatattaatttgaaggtggcgg

SEQ ID NO: 211388 - DNA, 104 bp, Homo sapiens
ctgcaaatgaagagtccagaaaagaagcgaaggaagtcaaatactcaggaactgtggctgcaccatctgtcttcatcttcccgccatctgatgagcagttgaaa

SEQ ID NO: 211389 - DNA, 50 bp, Homo sapiens
aacttaaactttcaaaggttggacaagatttgatcaaagatctgaaatct

SEQ ID NO: 211390 - DNA, 75 bp, Homo sapiens
ggagagagaggtggagtccggcccccgaaagaggcgtcagcctcgagtttgaccagcagcaggggtcggtgtgtc

SEQ ID NO: 211391 - DNA, 88 bp, Homo sapiens
agatcatcatgaaatggagatgtgggaactggccagaagagggctggttttcagttacacccgagaagattgctgaacacattgctgg

SEQ ID NO: 211392 - DNA, 101 bp, Homo sapiens
cttcggcaagatccagatcgggatttacgtggagatcaagcgcagcgatggtgtcgtgaaaactacccctaaaagccaaaatgggaaaggaaaagactcat

SEQ ID NO: 211393 - DNA, 90 bp, Homo sapiens
gagggattacagttgacaacagggtacagacagaccctcagaaacccagaggagatgtgttcaagaatgtaactggtcactacatttccc

SEQ ID NO: 211394 - DNA, 75 bp, Homo sapiens
gtatggcacagaagaatatttggcaattcttcagttagatagtcctgaatctgctcagtcaatgtatagctttct

SEQ ID NO: 211395 - DNA, 82 bp, Homo sapiens
cgcctcgcctcgggacccgcggtccccgctcttgctgaaatttaaaagcctgttgattcaagaactttctaaagtatttccg

SEQ ID NO: 211396 - DNA, 75 bp, Homo sapiens
tcttgggaccgggatttcatctggtgtgaatgacacctctctactatataacgataatgcaattcttcattcagc

SEQ ID NO: 211397 - DNA, 100 bp, Homo sapiens
gtcgctcgtctacttcctcagcagcaccttcaagcagggtgtaccagtgatggcaataagaaacaaaatgatatcagaaggactagacccagatcttctt

SEQ ID NO: 211398 - DNA, 59 bp, Homo sapiens
acacacagttacttgccaagacgattgaagggaaaaaagttgttccatgtagacatgac

SEQ ID NO: 211399 - DNA, 100 bp, Homo sapiens
tggttatgagattcaataactccttgctgccaacagagccttctaaatcatgttgttgatgtcagtgttgcggtcagtactcctgcaggactcatcacac

SEQ ID NO: 211400 - DNA, 75 bp, Homo sapiens
cggcgcgcccggcgtgccgagcggcaacggggctccgggccctaaggggctgctgagaaactaggtgaaactgag

SEQ ID NO: 211401 - DNA, 88 bp, Homo sapiens
gctgggctctctaaatggattcagctccagaacatacaacctcctcttcagtgtcaaaaaagccacggttagaccagattcctgccgc

SEQ ID NO: 211402 - DNA, 75 bp, Homo sapiens
gcaatgctgtttgccctgaacatcatgaattcccaagaaggagatgccatggacaatattaccaggcagaaccaa

SEQ ID NO: 211403 - DNA, 100 bp, Homo sapiens
gacagatgccagcgtagctgaatccagtaccaaaaacgtcaacaacagttttacgatgaagtacaacttgccttcctggtgtgaccgagtcctctggaag

SEQ ID NO: 211404 - DNA, 75 bp, Homo sapiens
atgaactgtccttccaacggggtgacctcatccgtattctgagcaagaacatcgggtcagaagttgagatttcca

SEQ ID NO: 211405 - DNA, 95 bp, Homo sapiens
cctcctaaagtgctgggattacagcaatactacatcctgctgatcctgacggacggcgtggtgaccgacatggccgacacacgggaggccattgt

SEQ ID NO: 211406 - DNA, 100 bp, Homo sapiens
ctttgctggagcacttgagccacgtgcatgaaccaaacccacttcgttcaagacaggtgtttaagctcggatcctgacctcccagccgatgtgcagacac

SEQ ID NO: 211407 - DNA, 98 bp, Homo sapiens
ctttcctaagcttaattggagtgccccaagggtgaaaattagttctgctgtgcttaaagctgcggcccatcactatggagctcaatgtgataagccca

SEQ ID NO: 211408 - DNA, 90 bp, Homo sapiens
gtcctagtggcattttcggagcgtttcaaagaggttgcactgctgtgatccatcctcatctcctaaagatgcatcctgacttatctccac

SEQ ID NO: 211409 - DNA, 83 bp, Homo sapiens
ccggacagccgcgcgctgagggtctcggggcgggcgccgcgggacctctccgggccatggaaggatatggccctgaagccaca

SEQ ID NO: 211410 - DNA, 74 bp, Homo sapiens
atttcttggagttgtgttggtaatgaagaaaaggtgacagagctgaatgaacctctctccaatgaagatcgaaa

SEQ ID NO: 211411 - DNA, 87 bp, Homo sapiens
agatgcagatctgaagacctattttactgataagaaaacacatctttacacactaactgtggaggaagatgcagagtcagaagatga

SEQ ID NO: 211412 - DNA, 90 bp, Homo sapiens
cgcccctcggcctcggagcaacgagcgcagcgccggtgaatgaaaactttgccattgatttgatagcagagcagcccgtgagcgaggtgg

SEQ ID NO: 211413 - DNA, 82 bp, Homo sapiens
tcatgtctgcgagccaggattcccggtttacccaaggtccagcctagcccctaggcaccatgtcggacagtgatctaggtga

SEQ ID NO: 211414 - DNA, 51 bp, Homo sapiens
gctcattggccattcctacggttggatcgactggttgtggatgcagcaaag

SEQ ID NO: 211415 - DNA, 100 bp, Homo sapiens
ccctccagcgcatagggcattacttcttttagtttgttgcctggacttgggagttgggcccagagctgcaggaaggttcattttccagacactgaaagag

SEQ ID NO: 211416 - DNA, 75 bp, Homo sapiens
atccagcctgcggagcctgtggggcagatgctttcttcacatgtcgaaaaaatgtccttctggcgaacagctcat

SEQ ID NO: 211417 - DNA, 89 bp, Homo sapiens
cctctttgaagcagaaattgaaaagtactgcccagagaattttgtagacatcaaggagtgtggggctgattgtgctaagttccagaaga

SEQ ID NO: 211418 - DNA, 80 bp, Homo sapiens
cccaagactgcgactctaaacggactcatgtactttgtcagatatggccgcgtggaaagtgtcaaaattcttcccaagag

SEQ ID NO: 211419 - DNA, 90 bp, Homo sapiens
ccagcttctagaagacccattacagagggtggagcgatttagccaagaagttcagattacagaagcccgctgtttctatggcttccaaat

SEQ ID NO: 211420 - DNA, 75 bp, Homo sapiens
tctcctgcctcagcctccagagtagctggaactacaggctccatctatgagatctctgggaatgagtgctgcctc

SEQ ID NO: 211421 - DNA, 130 bp, Homo sapiens
cctcgcgtcgcgcccgggaggaaggaacgaggcaaggagctaaagcagcgtgcgttcagccctgggttgcagagtgggcaggatcttaagacccgataggtgcagaacccatctggacacggagaccagg

SEQ ID NO: 211422 - DNA, 98 bp, Homo sapiens
atagctggggttcttttgacctgagggctgctattgtatatcacactaaagaaatacatgctacaggatttaactatcagaatgaagatgaaaaagtc

SEQ ID NO: 211423 - DNA, 82 bp, Homo sapiens
atgttcttcttcgagtatttgtagaaggagatggtgccaaatgatattcaatctgaattgaaacacttatatgtagctgttg

SEQ ID NO: 211424 - DNA, 83 bp, Homo sapiens
cagcctgcggagcctgtggggcagatcaccgaagtggccttggagtacaacaactgtcatggggaccaggtggtggagcgtct

SEQ ID NO: 211425 - DNA, 115 bp, Homo sapiens
ggaggagctgtgcagccgcgaggaggcgcgggaggtgttcgagaacgaccccgagacggtctcctctgagcctccggcctccataagacccaaaacagatgacacctcttcccag

SEQ ID NO: 211426 - DNA, 100 bp, Homo sapiens
ctgggatttgggaagttccttcttctttgctggcactgttattacaaccataggccctgagcctgtgcaattatttcgagagtcaaaatgtggatttccg

SEQ ID NO: 211427 - DNA, 82 bp, Homo sapiens
ccggctttcgcatttgggaccctgcagggctccaaacaggcatgcgaggtgcctttggaaagccccagggcactgtggccag

SEQ ID NO: 211428 - DNA, 80 bp, Homo sapiens
cccaaagtgctgggattacgggtgtgagccatcatgcctggctgagttaaggatcttgcaacagagagattatcctggat

SEQ ID NO: 211429 - DNA, 74 bp, Homo sapiens
cgccggcctcctcagtgcgaagaagctgcagccgcacctggccaaggcatttattgcagcgctgtacattgata

SEQ ID NO: 211430 - DNA, 75 bp, Homo sapiens
gagccacttcttcagagcaacttgcccgcactggtgtcacagatcagtgttctaagaacggaagcatctgggctg

SEQ ID NO: 211431 - DNA, 112 bp, Homo sapiens
caggatttacacagacgtggggcgatgcttgtgaccctgcagctcctcaaagtagtgaagctgattttagctcctcgagcagcacaggcagcatttccgctcctgaggtcca

SEQ ID NO: 211432 - DNA, 97 bp, Homo sapiens
gaaatggaaaagagcgatgaatctagcacagacttggaagagctgaaaaacgctgactgggtatccatcatcccacgtggcaaaggactaggttatg

SEQ ID NO: 211433 - DNA, 100 bp, Homo sapiens
atcatggtgtccaacatgctagcacaggacagccacctgctgtcgggccagctgcccacgggacagtatgatttggtgaaatgcctggctcctattcgag

SEQ ID NO: 211434 - DNA, 98 bp, Homo sapiens
ccggccccaggcagcgtgtgtcggtcgcctagtctggagaactagtcctcgactcacgacatgtcatgctgcccaaggacatagccaagctggtccct

SEQ ID NO: 211435 - DNA, 100 bp, Homo sapiens
ctgcgcgtggctggggaggcgaggccggacgcacctctgtttgggggtcctcaggtacacagcttctcctagcatgacttcgatctgatcagcaaacaag

SEQ ID NO: 211436 - DNA, 98 bp, Homo sapiens
agcatggggagtcggaaggggacaaatccgcgatcccagtcatgcatatctggaatcgatgtgtgaaaccaagttattatctctaaagaaggaagttt

SEQ ID NO: 211437 - DNA, 50 bp, Homo sapiens
tttggacgccggcggagacgcgggcgagctcaccatggatgatgatatcg

SEQ ID NO: 211438 - DNA, 82 bp, Homo sapiens
ctaggtgagtcgcggtgggtcctcgcttgcagttcagcgaccacgatgcctgaggaaacccagacccaagaccaaccgatgg

SEQ ID NO: 211439 - DNA, 100 bp, Homo sapiens
gtgatcttcagaccccaggttctttggattttttatcaagcagaaatgcatcgaacaacgagaatcaagatcactgagctaaatccccacctgatgtgtg

SEQ ID NO: 211440 - DNA, 97 bp, Homo sapiens
aaaaagacctgtggctattaagatagtgttctggacttggtgcctctttctgttatatgctttcctatttagttgggagaccagttgtatacaaata

SEQ ID NO: 211441 - DNA, 100 bp, Homo sapiens
cctgatcacctgtctggagcaaggaaaaaaacccttcactgtgaagagacatgagatgattgccaaatccccaggtctagatcatccccattgtctgtca

SEQ ID NO: 211442 - DNA, 90 bp, Homo sapiens
gcaccggaggtgacaacaataacaagactgtccttcggacaagttttaggttctcccatgggcaggtggtctctctggatgagctgcgcc

SEQ ID NO: 211443 - DNA, 126 bp, Homo sapiens
cgaagaggtgctgcctgtcctacggccccacagcgcgctcctggagaatatgcacatcgagcaggaccaagaatcgccttcagccctgtctggtgcatccttggcagaaagtgaggaggaaaacac

SEQ ID NO: 211444 - DNA, 90 bp, Homo sapiens
taggggttcatgttaaccaggccaaacagaggaaacaccaattggaagcctccgctcaactgtaagatttataactacctgaacaggatt

SEQ ID NO: 211445 - DNA, 100 bp, Homo sapiens
ctcgccagcagccgtccggagccagccaacgagcggttagtggttacttggatgattgtacctgtgatgttgaaaccattgatagatttaataactacag

SEQ ID NO: 211446 - DNA, 100 bp, Homo sapiens
gtggaggtgaccctctcctacaagtccaagcagttttgcaagggatgccccggccgctttgtctacacaggtacgcagagatgcctaaggcggagaagaa

SEQ ID NO: 211447 - DNA, 82 bp, Homo sapiens
ttggtttcgggatctcggtgctgcagacggcgagacctcctgcacagaatagcctaacatggcagaccagagacagcgctca

SEQ ID NO: 211448 - DNA, 74 bp, Homo sapiens
gaacatctcgctgtcggtgaagaaggtcctaaagaagacgaagagaagccttcagcctcagcacttgagcagcc

SEQ ID NO: 211449 - DNA, 75 bp, Homo sapiens
gaagtacctgcttcagagacatgagaagattcatactgccgttgccgagagatggatgagcagattagactgatg

SEQ ID NO: 211450 - DNA, 96 bp, Homo sapiens
gactacctgctgtacaccctcaacaaacaccagcgctttggattggaaacctggaagattactaccatttttatcacagcaaaacctttaaaagat

SEQ ID NO: 211451 - DNA, 83 bp, Homo sapiens
gacatatactgtgaacacactacagaccctcacaagtcagttactgaaaagggcgccatgtcagaaccggctggggatgtccg

SEQ ID NO: 211452 - DNA, 100 bp, Homo sapiens
ggcgttccatccggcccgtgacctactggctgcaggggacgtggacggggacgtgttcgtaagctgctgatgggagctccaccctgggagggggtgccgg

SEQ ID NO: 211453 - DNA, 75 bp, Homo sapiens
aacggggcgagcctggaggattgtcactccaacctcttttcgctggtgacaaacagcatgtttggtgcttcaaga

SEQ ID NO: 211454 - DNA, 101 bp, Homo sapiens
gttgcgatggcgcagaaaccccgttgacaaggcactgctttttcatgacgggagtgcatccgccccaacccttttccccctcgtctcctgtgagaattccc

SEQ ID NO: 211455 - DNA, 50 bp, Homo sapiens
gcagcaaaggccttcagtcacgctgctggagtgcactggcatgatctcgg

SEQ ID NO: 211456 - DNA, 100 bp, Homo sapiens
cttttgtgctcattttggttctcagtttctacgagctggtgtcaggtggaatatgtgatcaagtgtgacatgtcagctctgcagaagattctgtatcgcc

SEQ ID NO: 211457 - DNA, 101 bp, Homo sapiens
ctaggcgcgctgcacctggtgatgaccctcgtagtggctgcggcgcgggccgagaaggaaggttacactcctggcacaccttacaaagtgtcctgttcccc

SEQ ID NO: 211458 - DNA, 90 bp, Homo sapiens
gggctgtactgaataccgcagaccattgtaattcatggaattgaacaacacatgtgaacccgttgtaacacaaccgaaaccaaaaattga

SEQ ID NO: 211459 - DNA, 75 bp, Homo sapiens
ggaggcgcaggcagcaactgaggcagcggcaggctcaggtgcagccgctgaggagaaggcagagcccccccaggc

SEQ ID NO: 211460 - DNA, 74 bp, Homo sapiens
agggaccaggcggaggcgtcgcgggagcctttggggcaccacagagatgcgggaccgcctgtactttgtgatgg

SEQ ID NO: 211461 - DNA, 101 bp, Homo sapiens
agtggagcaaaagaacccaggcctctgaagaaggagagctgaccccgctgctgatatgctccttaggtgtgttccagagaacaagccttcagacatttgct

SEQ ID NO: 211462 - DNA, 80 bp, Homo sapiens
ctgttgaagttcttaacctagtagcccaggaatgtagtgctgaacaccagaagtgccaccagcacagccaaaacctgggg

SEQ ID NO: 211463 - DNA, 90 bp, Homo sapiens
ggagcgcggagcccggctcccgcaccatggaggaggacgacagctacgataaaaatgaatgccatttcccatccagtactgaagtgttaa

SEQ ID NO: 211464 - DNA, 76 bp, Homo sapiens
caagattgtggtgcacacgccctgcatcgagcagctggagaaggtgcctgtccttgatccctctcccttcccttca

SEQ ID NO: 211465 - DNA, 82 bp, Homo sapiens
cctgctgctgaagatctggaagacgcgctcctgcgccgattttgagaagagggggaaaaaggaagtttgtcctgtcctggat

SEQ ID NO: 211466 - DNA, 100 bp, Homo sapiens
ggaagaacaattgtccagcaactgtgtatgccagattcacagatttattgtgaacactctgaaagacggaagaatcctcactatggatgggctcattgag

SEQ ID NO: 211467 - DNA, 100 bp, Homo sapiens
tattttcagatttctgaaatgtcaccttatcagtttctctggaaacccccctggtaagtgtggaggaggcgggacactctgacccaagacgaaaggcctg

SEQ ID NO: 211468 - DNA, 100 bp, Homo sapiens
gttccagggagcattgcattcagtttacctcaggtcccagacttacagcaccaatgagattgatctgcagctgagtcaggaagatggccagaccatcgag

SEQ ID NO: 211469 - DNA, 83 bp, Homo sapiens
gtgcgctcgatccagcaccatggggaagcgggacaatcgggtgcctcggtggaagatggggccaagggaaagtccagagcctg

SEQ ID NO: 211470 - DNA, 100 bp, Homo sapiens
tccgaaccctcagcctcaagccgctgctcttcggaatagccaggccagaagaaggaaggcctgtggtgagtgggacaggaaatgacatcaccaccccacc

SEQ ID NO: 211471 - DNA, 75 bp, Homo sapiens
aacgagttaaatatcacccacgatctaagctggaaccagaaccaaatacaaagacaagagaatccacatcttctg

SEQ ID NO: 211472 - DNA, 78 bp, Homo sapiens
aagctgtcatcacaaaagagttgattgaaattatctctggtgctgcagctctgcatttattaatacagcaaaagaaat

SEQ ID NO: 211473 - DNA, 100 bp, Homo sapiens
ctcggggaatggaagcggagaacgcgggcagaattggttccttccattatgagcaacttgttgaatccagatgccattttctcaaacaatgaaatgagcc

SEQ ID NO: 211474 - DNA, 102 bp, Homo sapiens
ccgccctgcacaggatcatcgaggtcgtcgacgccatcatgaccacggcccagaggcctagccgcccgtgactctcacactgtctcctgcatgacgggtggc

SEQ ID NO: 211475 - DNA, 50 bp, Homo sapiens
gtgataactcaagtttcatcacctgtgaccgaactagcagttgcccagtg

SEQ ID NO: 211476 - DNA, 100 bp, Homo sapiens
gtgaatcagagccacaccgagaaccgccgcggagccctcatccctaacggtgaaagagatttacaaacgaggaccacctggcagttcataaacacaagca

SEQ ID NO: 211477 - DNA, 100 bp, Homo sapiens
gttggacactgaagaagggacggggatttctcctcctaatctgggcctcttgtcatgctcagaattctgcaaatgcagattttgcaaactttgatgcatt

SEQ ID NO: 211478 - DNA, 82 bp, Homo sapiens
tactgctgttcttagtgcactaaaggaggaagaacgtgcaaaacgtgaggagctagagcgaatactggaagagaataaccga

SEQ ID NO: 211479 - DNA, 74 bp, Homo sapiens
ggatgtaaaggatggaaaatacagccaggatgcaagaagccagtgtctgcctcagggaaggagatggattgggc

SEQ ID NO: 211480 - DNA, 96 bp, Homo sapiens
caatgagaaaatctccctgctccgcagcgacatcaccaagctggaggtggacgccatcgtcaacgccggctccacaaggctgacttcaggacctgg

SEQ ID NO: 211481 - DNA, 98 bp, Homo sapiens
acctatgaaggcaacagcaatgacatccgcgtggctggcacaggggaaaggagaagctgatgccatgagtttggatggaggatatgtgtacactgcag

SEQ ID NO: 211482 - DNA, 75 bp, Homo sapiens
tcctgggctccgtggtcttcatccaccgccagcaaattgtggctactaatttgccccctgaagatcaagatggct

SEQ ID NO: 211483 - DNA, 75 bp, Homo sapiens
gtcttcccgggtcccgagcactctgtgccggagcaattaccagctctggctgggtcgccacaacttgtttgacga

SEQ ID NO: 211484 - DNA, 76 bp, Homo sapiens
cagattcgcagtggtcgcttcttctccttgctcccgttctctgtcatcggttccctcaatggagtccacatgtttg

SEQ ID NO: 211485 - DNA, 90 bp, Homo sapiens
cttcaaaggaccggacccagagaagaggaaaactctaccggtgcaggttttgcaaaaggcatcaaattaaatcaagttcaaatattccct

SEQ ID NO: 211486 - DNA, 100 bp, Homo sapiens
caaaagagtctttggaggatgcggctttgatgggctactacatgtacattgaggcctcccatatggtgtatggacaaaaagcacgcctcttgtccaggcc

SEQ ID NO: 211487 - DNA, 51 bp, Homo sapiens
gtggagaatgtagtgaagcttgcacgatctgattttctggagagatgtgaa

SEQ ID NO: 211488 - DNA, 98 bp, Homo sapiens
cttaactttccggaagcaggtctcgtacagattatctttctcaaggaatagatctttctggaatagaagtgatagaaaatgatctactttttattgca

SEQ ID NO: 211489 - DNA, 101 bp, Homo sapiens
tttgagcaagatgattggtatgaaggactacaaagaggtgttttgaatgctgtatcaaatgcctggggggcattccctatgcctctctgattgccaccatc

SEQ ID NO: 211490 - DNA, 90 bp, Homo sapiens
atttgatgaaagtacttcagggagtcaacggtgaggatatgctgcaggctgctagtcattatcgccaaaatagaaactctttgtatagaa

SEQ ID NO: 211491 - DNA, 80 bp, Homo sapiens
catggacatgagggtccccgctcagctcctggggctcctgctgctctggttcccaggttggtcaaagaaaaagtgatgta

SEQ ID NO: 211492 - DNA, 100 bp, Homo sapiens
gcagaaacggtggtgtgctctcagtaaaacggtattctattattatggaagtgataaagtggcttttcatggcctgccactgaaaatcaagaaagaaccc

SEQ ID NO: 211493 - DNA, 75 bp, Homo sapiens
ggcgtccagggcagctagggcctgggccgcggttcggccgcgccggccgtgcagagcagagcgggcggaggaccc

SEQ ID NO: 211494 - DNA, 100 bp, Homo sapiens
cgtggaggtggccgtggaggcagaggtggcatgggggaagatttaggattcagatttatatcggaacaggtcagtcaccacccccccatcagtgcgttcc

SEQ ID NO: 211495 - DNA, 90 bp, Homo sapiens
ccctgcgcaacctctcagatgtggccaccaagcagcctttgaagaagatggtggagagaattcgcaagttccagattctcaatgatgaga

SEQ ID NO: 211496 - DNA, 75 bp, Homo sapiens
cccggttccccggcccacagtgggggtgtgcaaacccgagagaactggtttcagctgtatatgactgtacactca

SEQ ID NO: 211497 - DNA, 50 bp, Homo sapiens
tttagcgctcgcccagctagccgcagccgatacggaagatgtgtgcattg

SEQ ID NO: 211498 - DNA, 50 bp, Homo sapiens
atctcttctccctccccttcttggttaattatagaaaatgccaagtagga

SEQ ID NO: 211499 - DNA, 76 bp, Homo sapiens
ttgaggaaaagccagtttatatccaagacttagatgagactgtgatcaaccactctatgattgtcctatgtgtggg

SEQ ID NO: 211500 - DNA, 98 bp, Homo sapiens
ttgaggccaaacaggagaaagtttcaactacactgaatgtggctcagcctgtgcctactacactggcacaagtggatagagaaaagatctatcagtgg

SEQ ID NO: 211501 - DNA, 75 bp, Homo sapiens
ctggtctttgggctgtctgctttatgaaatgttttcagggctgcgaataaaggagaccaaggaagtttatgaagg

SEQ ID NO: 211502 - DNA, 90 bp, Homo sapiens
atttggcactaacataacttatgttgtgattggagatggccgagatgaggagcatgccgctaaccaggcatcattcttaacaaagaagtt

SEQ ID NO: 211503 - DNA, 90 bp, Homo sapiens
acgacttcgaccctgcccagcacgaccagctcatgcagaggagaggagacgccgtgagcgggacgaccagatgtaccgagagcggctgcg

SEQ ID NO: 211504 - DNA, 76 bp, Homo sapiens
cttcaaaaatttaaacaagaatccactgttgctactgaaaggatgcagacaatctctttgaacatgaattgggggc

SEQ ID NO: 211505 - DNA, 74 bp, Homo sapiens
gccaaaccgcccagtcacccgacttcccacagtctcagcagtgaactttgaggcgctgatcatcaccatgtcgg

SEQ ID NO: 211506 - DNA, 114 bp, Homo sapiens
gccgcccctgttgcgatggcgcagaaaccccgttgacaaggcactgctttttcatgacgaacctaaaggcagacccagaagagctttttacaaaactagagaaaattgggaagg

SEQ ID NO: 211507 - DNA, 99 bp, Homo sapiens
tggatgttaaaaatcaacaccaggactacagtaaggctgaaatcattgaagtgcttggagtgcagaactgaaagaggttatcaatactctggctgacca

SEQ ID NO: 211508 - DNA, 82 bp, Homo sapiens
cgtgattgcgttacaagctttgtctccttcgacttggagtctttgtccaggacggccaacatagccgaggtagaggtctcca

SEQ ID NO: 211509 - DNA, 85 bp, Homo sapiens
tacattatgaacccaccactgggcaaagaaagtatccctttgttggtcaaagaaaaagtgatgtatgaaaaagaggcaaaacaac

SEQ ID NO: 211510 - DNA, 107 bp, Homo sapiens
gcacaacctccagggccgcatcgggggcgactcaggcctgtccagccggggcaagaaggagacccccagcctgctgcagctccgtgatgcccacgggcctcccccag

SEQ ID NO: 211511 - DNA, 96 bp, Homo sapiens
accggtttttagtccattgactatgcagcctaatggaccgtataatagacgctggccccaaaggaaactactctcgatttatgaatcacagctgcc

SEQ ID NO: 211512 - DNA, 90 bp, Homo sapiens
caagtgtttgtctgatgagttcaggcttagagacagcagtagtccctggcagtgcccagtttgcaggggagactctgggggccctcttct

SEQ ID NO: 211513 - DNA, 95 bp, Homo sapiens
ccagtggagcacccccaagccccactgccaggcccacaggtcctgacttcaggagcaagacacttcaagtgaggtgaggaggaggttccaggacc

SEQ ID NO: 211514 - DNA, 75 bp, Homo sapiens
atgtcctttcttataagaagacaatgttgcacttaactgatattcagaatgagtccctggaacgccagatgcgtg

SEQ ID NO: 211515 - DNA, 100 bp, Homo sapiens
gcactttctcctcagggaagttttctggaagacacaacaggggagcagttcctcacttatcgctatgatgaccagagctaagctaggaatgctgaacact

SEQ ID NO: 211516 - DNA, 89 bp, Homo sapiens
tctagagatgtgggcatggcagacaaatctgtaggaccgccgggagagcctgcccacctccccaccctggacgccgggcgcgtcccggc

SEQ ID NO: 211517 - DNA, 101 bp, Homo sapiens
gccaagccgaaccgagccggggcgccgggagctattgggacctgcggcaaaagctggcaggctgacagaggcggcctcaggacggaccttctggctactga

SEQ ID NO: 211518 - DNA, 99 bp, Homo sapiens
cgcgaggggaacggaggccagagctgcggaaatgcttccagactgcacacttttacttagaggacagtacatcccctagagttatatccacacctccaa

SEQ ID NO: 211519 - DNA, 100 bp, Homo sapiens
ggaagaacccatcgggcagctacacatcttgaaagagaagctcttcctgtgagtcacagcaaactgtacaatggcagttgagtgggttttgaaaaacgtc

SEQ ID NO: 211520 - DNA, 51 bp, Homo sapiens
atggaactcaggcagaaattcgagcatgcttatgagcccactcctgatgat

SEQ ID NO: 211521 - DNA, 75 bp, Homo sapiens
aggatggccgacagctctggttagaggcttgaccactatgctatcatcaagtttccgctgaccactgagtctgcc

SEQ ID NO: 211522 - DNA, 111 bp, Homo sapiens
cacacaggatccgcccctggacatggaggagaaggtccgcttcaaggtgaggacgcttgagcggaagttagaagcaaaaatgatcaaggaggaaagcgactaccacgacct

SEQ ID NO: 211523 - DNA, 100 bp, Homo sapiens
caaaggcagcaaaaacaagagtccctctaaagcagctcaaaagctgccactgcagagccccgccatggaagacacgccgttggtgatatcgaagcagaag

SEQ ID NO: 211524 - DNA, 76 bp, Homo sapiens
cacatactatccgtttgttcaggaaccaccagtgacagaccagatgaattatactttgaggaaggtgatattatct

SEQ ID NO: 211525 - DNA, 100 bp, Homo sapiens
ctgggcggcaccctggccaggaagcggagggcgcgcgaggagcaagtgcaccggcacctggaccaacacgaagtgagatacctgcagtttgccttccgct

SEQ ID NO: 211526 - DNA, 90 bp, Homo sapiens
ctgcagtggaccacagcattcctgaaatacatccaggaaagacatggagattctcttaaaaaggattgtcagtggcttcgccccgaggag

SEQ ID NO: 211527 - DNA, 50 bp, Homo sapiens
ctgtttctcatctttatactcttccaggtgtgtcggcccagtccttcctc

SEQ ID NO: 211528 - DNA, 100 bp, Homo sapiens
taactgaaattaatgaagctcttgcagaaaatccaggacttgtaaacaaatcttgttatgaagatggatcatcaatgggaagcagttactgtgccagagg

SEQ ID NO: 211529 - DNA, 100 bp, Homo sapiens
cccggctgctcagatgcttgtgggagattcttttgccagacattactacttcctaggcagaatgcttggaaagagctgtaggtaaaacttgcctactgat

SEQ ID NO: 211530 - DNA, 82 bp, Homo sapiens
ctgactacctgctgtacaccctcaacaaacaccagcgctttggttccagggtctccctccactgctgtagtaacccgggtcc

SEQ ID NO: 211531 - DNA, 80 bp, Homo sapiens
cccgggcgggggcaccgagggctaccacgttctgcgggaagttggtgaaccatctaaagaagagaaggctgtggccaagt

SEQ ID NO: 211532 - DNA, 75 bp, Homo sapiens
ccaagtgcgacagccacatggagacattcttgcgctgcatcgaagcctcaggatgcttctggctggcacacctgg

SEQ ID NO: 211533 - DNA, 88 bp, Homo sapiens
cagtaccaaaatgagctacataaattcctaatctgggatacagctggacaagaacgactcaaagatcctctcaagacagtatccggct

SEQ ID NO: 211534 - DNA, 100 bp, Homo sapiens
cggggcctggggctgcctgccgggcggccgggcgcggcgagcccaggttggtcaaagaaaaagtgatgtatgaaaaagaggcaaaacaacaagaagaaaa

SEQ ID NO: 211535 - DNA, 50 bp, Homo sapiens
gtggtgctcaacgtgtacgacatgtgctcctgcgggaagaagtgtcgcgg

SEQ ID NO: 211536 - DNA, 50 bp, Homo sapiens
cgccgatggctccgacccgctctgggtgaggaattttaaattggaacaag

SEQ ID NO: 211537 - DNA, 100 bp, Homo sapiens
ccgaagagagctctgttgttgcagcatccgtgtcattctggaccttactcccaactaccggggtgagaactcgtggttctccactcaggttgacactgtg

SEQ ID NO: 211538 - DNA, 100 bp, Homo sapiens
ggacatcctggaagctgggaaatggtaacacaagtggcaagacagccgggaacccctaccccatccccttattcagcacatgaaataaacaaggggcatc

SEQ ID NO: 211539 - DNA, 100 bp, Homo sapiens
ggcggccacgcgcggcgccgctcggatgctcgacatgcagcagaaggagaaatatataccaaactgaatcaaaaaattgatgaatttgttcagcttgctg

SEQ ID NO: 211540 - DNA, 97 bp, Homo sapiens
cgtggtccggaatggaaaagtgggactggatgctacaaactgtttgaggataactgacttaaaatctggtacgaggatgtcgtccaggaaagattgt

SEQ ID NO: 211541 - DNA, 75 bp, Homo sapiens
aaaatggaaaactttaataatttctatatacttacatctaaagagctagggagcacattggagatatatttccac

SEQ ID NO: 211542 - DNA, 100 bp, Homo sapiens
tctgtctgcctgtgtccctgaccatggctccctgcagtaccctttaacgagccataagaaagtgggagccttatggagggaggctgacctcagctggaag

SEQ ID NO: 211543 - DNA, 75 bp, Homo sapiens
tggaaacggaggaactacaaccagggagtcgtggggggtagaaatatttctgtcatggctcattcaaagactagg

SEQ ID NO: 211544 - DNA, 100 bp, Homo sapiens
cacgatgcacttaatgaccctaaaaatggcgattctgcaaccaagcacctgaaacagcagggcaaatgtgagaaacgagtacaggatgtaattgaacgat

SEQ ID NO: 211545 - DNA, 74 bp, Homo sapiens
cgtgttcggttgtctcgcgccctggtgacagctcgcgcgtgctgatgatggcgaatctcacaaactatgatctc

SEQ ID NO: 211546 - DNA, 80 bp, Homo sapiens
ggacttcagtcctagtggcattttcggagcgtttcaaagaggtcagcgtttctcgcagcacacatcccactttttttgta

SEQ ID NO: 211547 - DNA, 75 bp, Homo sapiens
caagaacatcacccagcgcggcaacgtcgccaagacctcggtatgtgcactgcgcgtgaccagccgggcccgcag

SEQ ID NO: 211548 - DNA, 97 bp, Homo sapiens
gtgccacgaccatctcgcactaccctgactacagctggagcgcccagaggcgagccctggtggaggaagaggtaaccaatggtcaaggtgaaaataa

SEQ ID NO: 211549 - DNA, 75 bp, Homo sapiens
agcggctgtgtggatgtcggcgaagccgcgggcgagagatgctcttagtgatcttgcattacactttctgaataa

SEQ ID NO: 211550 - DNA, 100 bp, Homo sapiens
cgagtctgccgaacttggagccgctgggggaacgcctgagccgctttggactccgcacagagaccacaggcactgtcaccttccgcttgcactgtctgca

SEQ ID NO: 211551 - DNA, 78 bp, Homo sapiens
ggagactccacctctcatcaccccagactaccagtccctgcagatcggaggcctcgtcatcgccgggatcctcttcat

SEQ ID NO: 211552 - DNA, 100 bp, Homo sapiens
gatcagtgactttggtgaaagctaagaaggttcaaacaaatttgcaaatgatatacaacttctaaggttctgggaagttctggattgtttaataaccatg

SEQ ID NO: 211553 - DNA, 75 bp, Homo sapiens
atggtgaaacaccactgaagcattgccaagggttgatttgggaagcagagcacagcagcccaaatttgcttgtaa

SEQ ID NO: 211554 - DNA, 80 bp, Homo sapiens
gacatcagcggctctttgtatgatgacgtacagcacatgggaaccggaggaaaacatcctggatgctcgcttgctcgcag

SEQ ID NO: 211555 - DNA, 75 bp, Homo sapiens
tggagatgaagtatttgtggaggcagaatctgaagggaagagagaagggcacagttacctaagtatcaacgtaat

SEQ ID NO: 211556 - DNA, 82 bp, Homo sapiens
aacaaattgaaggttaacaccttaagagttgtagttactgaccagaggctcaaggaactgaaacaaagggaatttgctcgaa

SEQ ID NO: 211557 - DNA, 75 bp, Homo sapiens
agggatcaaagagcaaacagattcagtggcctgcattgaattataagagaccatggattaatcaaccttagaaag

SEQ ID NO: 211558 - DNA, 87 bp, Homo sapiens
aggatgacagcaaggctggcatggaggaagatcacacctacgagcccgtgtcccagcccacccaggtaactctgatcacggcaccta

SEQ ID NO: 211559 - DNA, 74 bp, Homo sapiens
atagtacttcaagagcacagtcttatgtaagttactccacaggatccgctgaacataggatgttgccacaaaat

SEQ ID NO: 211560 - DNA, 75 bp, Homo sapiens
atcaggagttcgagaccagcctgatggtccagtagtctatgcagcatatttaaaaatggagcacagtgacgagaa

SEQ ID NO: 211561 - DNA, 83 bp, Homo sapiens
gagtcaactggcccggcaccgagttctctctggcaccatgactcctgtgaggatgcagcactccctggcaggtcagacctatg

SEQ ID NO: 211562 - DNA, 83 bp, Homo sapiens
ggaagctacacttggcaggcttcgaagagctacagaatatgctccaaagaagaggcagaagctcctcctggggtagagacaga

SEQ ID NO: 211563 - DNA, 50 bp, Homo sapiens
agctgcctcagttcttagcgcagctccacaggatccccatatcctgggcc

SEQ ID NO: 211564 - DNA, 101 bp, Homo sapiens
ccacgagtgggcaggagcttgcaggattacagtttaaagacaatttctgtgatcaagttgtcatttggaagattaaacccatttcacgaggacttggagcc

SEQ ID NO: 211565 - DNA, 51 bp, Homo sapiens
ggccgcgcccgcggaaccagaccaggtactccaaagattcaggtttactca

SEQ ID NO: 211566 - DNA, 99 bp, Homo sapiens
aacttatgctgactacgaatctgtgaatgaatgcatggaaggaactttatattgctgttggaatatctggagccatccaacatttagctgggatgaaag

SEQ ID NO: 211567 - DNA, 49 bp, Homo sapiens
ctaaaatacgaaggtttctggctggaccctatatctacggacctacgtc

SEQ ID NO: 211568 - DNA, 75 bp, Homo sapiens
cagtcagatctcaggaatggaagagacggggttttgccacattggccaagctgatctcgaactcctggcttcaag

SEQ ID NO: 211569 - DNA, 112 bp, Homo sapiens
ttgcagatctattccggccacccattgatttgatgcataaaggcagctttgaaacagtatttgacaccgaaatctcagtttgggtcagcctcacactctgaagctgtacaag

SEQ ID NO: 211570 - DNA, 80 bp, Homo sapiens
ccgggccaggccgcggccggggcaggagcgcagaaatggtggagtcaatgaagaaagtagcagggatggatgtggagctg

SEQ ID NO: 211571 - DNA, 82 bp, Homo sapiens
gcctcccgcctcctgccgcagcccggtctccaattgagaaacatggcactgtttttcctgcactctacccacctattgctgg

SEQ ID NO: 211572 - DNA, 75 bp, Homo sapiens
ttgcctggcaaagaagacagacttcagttacaacaagttcaaatgccggatattgaatgaaaaggtgaatactcc

SEQ ID NO: 211573 - DNA, 51 bp, Homo sapiens
cagccggccacggagcgcctgcagtgttgtctcagcttggctctgccgaga

SEQ ID NO: 211574 - DNA, 75 bp, Homo sapiens
gctctataagattcttcaaggtggggttggcatcccccacatacggtttttgattggtcaaggagcacatgtagg

SEQ ID NO: 211575 - DNA, 78 bp, Homo sapiens
catgccgctcctaagcctgcacagccgcggcggcagcagcagtgagagccatcccaggcctcaggacctgagttctcc

SEQ ID NO: 211576 - DNA, 50 bp, Homo sapiens
tcgacatcgagatcaaccgggagccgggatctactccaagtgaccaacag

SEQ ID NO: 211577 - DNA, 74 bp, Homo sapiens
tggaatattttgtgccacacacaaaaagcatcagaggctccttgaaatgctagatacagagaaggaactgttaa

SEQ ID NO: 211578 - DNA, 75 bp, Homo sapiens
agatgctggccaagctccatgaggagatcgagcatctgaagcgggaaaacaaggaacatatgcagtaatgtcacc

SEQ ID NO: 211579 - DNA, 100 bp, Homo sapiens
agtcatgaatacaggatcacagtttgtgatggaaggagtgaagaacctggttttgaaacagcaaaacaagttgaaatcatcgcagaaggataaagttcgt

SEQ ID NO: 211580 - DNA, 50 bp, Homo sapiens
tcaggcccctgttctgctgatggattgagatgccaacactatttgtggag

SEQ ID NO: 211581 - DNA, 100 bp, Homo sapiens
ctcgccatggctcagctccaaacacgcttctacactgataacaagaagctcctgttccaaagagtgcacttattcctgtaattcccatcaccaaatcaac

SEQ ID NO: 211582 - DNA, 98 bp, Homo sapiens
caattgtgcagacgctgtaaggccaaaacgaggatttgtgttgtgagggggatatgagactttctactcggaatatcctgagtgttgcgtggatgtaa

SEQ ID NO: 211583 - DNA, 51 bp, Homo sapiens
cgcggcgctgatcctacgggagagccccagttgacattttgctaaaggctg

SEQ ID NO: 211584 - DNA, 83 bp, Homo sapiens
atctgctcaacgacgaggacctgacgcaggttggtgttcgaggaagagacattgttgttcttggtgtggagaagaagtcagtg

SEQ ID NO: 211585 - DNA, 89 bp, Homo sapiens
gctcggccgatgaagtgcagaggtttttttctgcctccacaaatgggaagtgttcctgtaatgacgcaaccaaccttaatatacagcca

SEQ ID NO: 211586 - DNA, 100 bp, Homo sapiens
aaagtaccatgagaaatgtcggttcagatatcggagcacagtgctacttggaatgttcagctctgactcagaaaggtctcaaagcggtttttgatgaagc

SEQ ID NO: 211587 - DNA, 75 bp, Homo sapiens
aagcccatttgagccctggataacaagggataaagtggagcggaacccagcccttgctgacatctacacagagca

SEQ ID NO: 211588 - DNA, 98 bp, Homo sapiens
gcggcgctgctcccgggggcgacgggtaagccgtaactttgagctggttggacgggttaacttggatcagctggaacagatgaaggagaaaatggaga

SEQ ID NO: 211589 - DNA, 100 bp, Homo sapiens
gatgttgcagtcttgcaggccaatgatggacactccttccataatatactgttccaagtgaagaccgtgcctcagttggatatgtcaagtgaccagatag

SEQ ID NO: 211590 - DNA, 100 bp, Homo sapiens
ttggtttaaaatcacaggggggacaccagacacctcacttcttacacttggctgcacagtgatgcggtccatgacctccttctggatgtgatcacgtggg

SEQ ID NO: 211591 - DNA, 100 bp, Homo sapiens
tttattgtggtggagtccaccccgctgtggaagaaggtagataatgactataatgcccttcgagaaagactcagcaccttgcctgataaattgtcttata

SEQ ID NO: 211592 - DNA, 98 bp, Homo sapiens
tgcacgacacatggaaattggactaaattaccagaatgcagggggcttcgtgctgtgtcactccatcgctgggggtacgggttctggcctgggctcct

SEQ ID NO: 211593 - DNA, 100 bp, Homo sapiens
gggaaagaaaacaatttctcctgctctgcagcttctgttcagtactatactggcaattgctggagaagattttgcaattgttgcttctgatactcgattg

SEQ ID NO: 211594 - DNA, 100 bp, Homo sapiens
actgccattctggattccagaagatttaactacgtggtccgggttacttcttgctgcagattctgcgcaggatcggagctgtgggccaggctgtgtccag

SEQ ID NO: 211595 - DNA, 74 bp, Homo sapiens
tgggtaaacatcaccttctgtcctgtggatgacagaatgatgagaagacagcagctgattacaagattttaggt

SEQ ID NO: 211596 - DNA, 82 bp, Homo sapiens
tatgtgtagaaagtgaaatcagaggagatgtaactatcgggtgatcagcccatgacctaaacctccagacaaaataaaacgg

SEQ ID NO: 211597 - DNA, 90 bp, Homo sapiens
cggttcccggcgcaccatgtcatcgtcaccgtgcccttaggtgcgggcggcacccagagactcacccgtgctgttgggaagtcgctggcg

SEQ ID NO: 211598 - DNA, 100 bp, Homo sapiens
cttgactactcgcatcgcgcactttttggatcggcatctagtctttccgcttcttgaatttctctctgtaaaggaggaagcaaaatgtggattcagcaaa

SEQ ID NO: 211599 - DNA, 100 bp, Homo sapiens
gcgtgcgcggacggtgtgcgggtgttacacataatattgcattacttcgagaggtgataatcaactcacgctttgtaaaaggagacatcagcactaaatt

SEQ ID NO: 211600 - DNA, 90 bp, Homo sapiens
tttagctgaagtgtggaggggaaatgtgttcccagtgaagcggcggaaccggcacagcctagtggggcctcagcagctaggaggacggcc

SEQ ID NO: 211601 - DNA, 74 bp, Homo sapiens
tgatctcttccaaagaatgccacagaatcaggggaggcatgcttcaggaaactttgagcattcagctgaggggc

SEQ ID NO: 211602 - DNA, 123 bp, Homo sapiens
gccatcagtgaagagaaagagtgggagaaaaaggtttgaggagagaagatttgaaaaatgtgtgagtgctaaggaagctttggagactgatctttataagcggtttattctggtgttgaatga

SEQ ID NO: 211603 - DNA, 97 bp, Homo sapiens
tacaacatattgctgcaatcaggaccattgcaataaaatagaacttccaactactgcaggctatggaactcagtcaactccccagggatatggctcg

SEQ ID NO: 211604 - DNA, 98 bp, Homo sapiens
tcatgttgttaaagtaccagcttcacagaagctcattcacacagaagacccatttaatgatgaacatcaggagaggcaagaggtggaaatgttggcta

SEQ ID NO: 211605 - DNA, 100 bp, Homo sapiens
cgagagctgggagctgtaatagaccaggtggctgcagctctgtgggaccaggcaagcacatctgggcttcttgtggaggggaaggtagagtgaaagaaag

SEQ ID NO: 211606 - DNA, 128 bp, Homo sapiens
tcggtgagcgcgtttcccgcctgagcgcaactagcggcgggtcgtgggcacctccagatgacgtccggttgtttgccttcgtgcgcttcaccaccggggatgccatgagcaagaggtccaagtttgcc

SEQ ID NO: 211607 - DNA, 100 bp, Homo sapiens
cgtgacggtcatcggcggcgggctgatgggcgccggcattgcccagcacaaacgtgcagatatctgatagccctttccgttgcactcaagaggaagcaag

SEQ ID NO: 211608 - DNA, 82 bp, Homo sapiens
ccacttctctacatcccatctcaatcagaattactagattttctctcaaactacgagaccacactgcccacgtttcagagcc

SEQ ID NO: 211609 - DNA, 74 bp, Homo sapiens
aggaaggaagtgcggagccagcctgagttgggagaagagctccagagagaaaccacccctactcctaatccccc

SEQ ID NO: 211610 - DNA, 100 bp, Homo sapiens
ggccttttgggcagcttttccggcctgacaacttcatctttggcatcctgacatcgaggcccaggagagaggagtccggtgtctacttgagaaacagctc

SEQ ID NO: 211611 - DNA, 90 bp, Homo sapiens
ctgttccgcttcaacaacataactgataaatttcaaacggaagagagtggcagcatttagaaagaatctaattgaaatgtctgaactgga

SEQ ID NO: 211612 - DNA, 82 bp, Homo sapiens
gcggtttactcctcatgccgagatggaccttgggcagctcagttcacaaggctactgcagcactggggtgtcagttgttggt

SEQ ID NO: 211613 - DNA, 73 bp, Homo sapiens
tggaaagtcaggctgcagtgacttgaattttcagctgaactctcatctctcaacactggcaaatattcataag

SEQ ID NO: 211614 - DNA, 74 bp, Homo sapiens
tggccacagaagttgctgctgacgctctgggtgaagaatggaaggttttgggtcctgctcctcggtggtgttcc

SEQ ID NO: 211615 - DNA, 95 bp, Homo sapiens
ggcagcggttggaggcttcgcccggctttgcagcggggacttcggcggcggcgcctcaggcacctcggcccggttcccagtgacctgacagcaga

SEQ ID NO: 211616 - DNA, 98 bp, Homo sapiens
gccgtaataaacacctggcaggatatctccaaggctgggaaatcattccccacttaaggagaaagatttgatcaccaggagatttttcgggacattac

SEQ ID NO: 211617 - DNA, 90 bp, Homo sapiens
ggagagcgacccgtggccttgtgtttcaggttggtcaaagaaaaagtgatgtatgaaaaagaggcaaaacaacaagaagaaaagattgaa

SEQ ID NO: 211618 - DNA, 96 bp, Homo sapiens
cgttcatcgaggagggcacattccttttcacctcagagtcggtcggggaaggccacccagacaatgcagatcttcgtgaagactctgactggtaag

SEQ ID NO: 211619 - DNA, 100 bp, Homo sapiens
gttccatgctgtctgttcagacttcagcttggttaatggaggggaaagttccagtcgcagcgctgagaagcgatcagctgaagaagaagctgccgacctc

SEQ ID NO: 211620 - DNA, 100 bp, Homo sapiens
cttttggggggaaactaggtcgatggtcggcggcgcccggatgggcagctgaggttgcacgttttcaaaaaatacctaatggtgaaaatgagacaatgat

SEQ ID NO: 211621 - DNA, 100 bp, Homo sapiens
tagatttagaaggaagttggagtgacatctctttgtctgacattgaatccagcagtggaagacaggaagctgtttattggtatgatttccaagaagtgca

SEQ ID NO: 211622 - DNA, 100 bp, Homo sapiens
ctgagatcaaatggcacttcattggccacctacagaaacaaaatgtcaacaaattgatggagacccagctaagttcctctgaaacttttgaccttgaaag

SEQ ID NO: 211623 - DNA, 89 bp, Homo sapiens
gaggatcctgctccacagagaatgctctgcacccgttgatggccaaggagattaagatcaagttgggaattctcctccagaagccagac

SEQ ID NO: 211624 - DNA, 85 bp, Homo sapiens
ccctaccactataagagagtagaaagccctggtctgtcagtggcccagcggaagtttgctcattcactcagagactttaagtttg

SEQ ID NO: 211625 - DNA, 100 bp, Homo sapiens
gaaaaagcagggaggttatgaggcttaataaagaaggtgactgccaacagccagcccaatgtcgaatccagaaatgcaccacggacttcgtgtccctgac

SEQ ID NO: 211626 - DNA, 100 bp, Homo sapiens
ctggtctgaaggtgtacaggtgccctctgtgcctattcagcaattccctactgatatcaatgatgtcaaacggctgaaacctggctacttagaagctact

SEQ ID NO: 211627 - DNA, 74 bp, Homo sapiens
ggaaacctttccaacacagatgtccaagctgccaaggatgttattcattgcactatgatcacacatcagattct

SEQ ID NO: 211628 - DNA, 60 bp, Homo sapiens
cacccaccaacaacaccacaataatccacagccaagggaggtggggaagacagggctcca

SEQ ID NO: 211629 - DNA, 100 bp, Homo sapiens
ttctcgggagccgtggccctgatccagacctgggcaggccgcaaaagataagtaccgtgaattggctgtggaagggatgcacagagaacttgtgttccgg

SEQ ID NO: 211630 - DNA, 82 bp, Homo sapiens
ttggtatcaccttcaaggagcacaagtagctgctcttccaagcaaggaagtcgacagctataaggaagaccagatggatgag

SEQ ID NO: 211631 - DNA, 90 bp, Homo sapiens
ttaaaaaataagtaatgccatctgttttcctaaaagactgaaatgggggcgaccattcttagagcaatatactttgctgcttattcaaac

SEQ ID NO: 211632 - DNA, 82 bp, Homo sapiens
cgcggttagcccgtcagtccctgctctgtgcgcgcctccatctgggccatggatggatgatatcatcaagttgaatcgaaag

SEQ ID NO: 211633 - DNA, 100 bp, Homo sapiens
cctccttctccatgcctctgttcctcctgctcttacttgtcctgctcctgctgctcgaggacgctggagcccagcaagattggatttgtcctgtatcccc

SEQ ID NO: 211634 - DNA, 100 bp, Homo sapiens
ccccgctctgctgtgggcgctgctggcgctctggctgtgctgcgcggcccccgcgcatgggttgaaaggaggagcaggaggtactgatggacaaggaggt

SEQ ID NO: 211635 - DNA, 83 bp, Homo sapiens
acttttttaactacttcactcttggagtgcctcagagaaccgtgaaagctctgtatgactacaaagccaagcgaagcgatgag

SEQ ID NO: 211636 - DNA, 75 bp, Homo sapiens
caacgtccctgtcactgtggtgctagatgctgctgtcggattggtgtctccgctgtgcctggctccgtatttccg

SEQ ID NO: 211637 - DNA, 83 bp, Homo sapiens
taaatgatgtattttgtgatcgcagcgatgaaaggctggtcgtctgatgataaggaaattagttgcagagaaattgaatatcc

SEQ ID NO: 211638 - DNA, 101 bp, Homo sapiens
atacacccccaaagagcaactgaagattcatacgcagctggcagatattatcatagttgctgcagaaatgacctccaccttcaacccccgagaatgtaaac

SEQ ID NO: 211639 - DNA, 96 bp, Homo sapiens
tcgacattatacaagaaacagcaagcaaatcatttggttttggcaggtccagatggctgtggaggccaagtttgtccaggacaccctgaaaggaga

SEQ ID NO: 211640 - DNA, 115 bp, Homo sapiens
gggaacacctggagtctccgcgggcaggagccagcaccgctctttgaccttgccatgcttgccttagatagtccagagagtggctggacagaggaagatggtcccaaagaaggac

SEQ ID NO: 211641 - DNA, 97 bp, Homo sapiens
gctaaagagccgagcacgcgggtctgtcatcatgtcgcgttacgggcggtacggaggagcaaaatgatgcttcaacacccaggccaggtctctgcct

SEQ ID NO: 211642 - DNA, 100 bp, Homo sapiens
gttggctgtgggtccattctgtagacgagtatctgatttaggaaagtcctatcggatgctgagatcattcaggacatctgtgttaaggcttatctagccc

SEQ ID NO: 211643 - DNA, 100 bp, Homo sapiens
cagaccctgaaaaactggaccaaattagacagagcaccagcaggcagctggctccggttttggggtatctgggctccaggcagaagcacagcctccccga

SEQ ID NO: 211644 - DNA, 98 bp, Homo sapiens
gacaacctgcagcctcctggcaccaaagccattggatttaatgtagagacggtgacgtacaaaaaccttaaattccaagtctgggatttaggaggaca

SEQ ID NO: 211645 - DNA, 100 bp, Homo sapiens
tgatcacctgtctggagcaaggaagaaaacctttgaccatgaagagaaatgagatgatagccaaaccctcaggtgtggagagagtatgctctgtgtcgtc

SEQ ID NO: 211646 - DNA, 98 bp, Homo sapiens
ctgatggcagcggccactctgaggacgccaactcagatggcagcctatttcacccactcaaacctgcagcctgtgcacatgatcctggtgctgcgtac

SEQ ID NO: 211647 - DNA, 101 bp, Homo sapiens
gaaagatatgccaaatttgttaaagagaggatagaaattgaacagaactatgcgaaacaattgagtggatggaactgaggttcaacactctggcaaaatgc

SEQ ID NO: 211648 - DNA, 100 bp, Homo sapiens
ccagactggaatttgagtctttggaggcactcaagcagcaggctgaagccgacgtagcttctctgaacagacgcatccagctggttgaggaagagttgga

SEQ ID NO: 211649 - DNA, 80 bp, Homo sapiens
tccaaagaattttttcagctggttgtggaggaaatcttcaatccagatattgatctatagcatgatgctgcgattatctg

SEQ ID NO: 211650 - DNA, 83 bp, Homo sapiens
ccctgatcatcctgctgggcttcgtccagatcgggaaggcccagagcctgaccacctgcgaggtctgcggtgcctgctttgag

SEQ ID NO: 211651 - DNA, 93 bp, Homo sapiens
gaaggacgccagcatcatacaccggctgttcgaggccttgactgtagtgtggacgaatgtggaacctcgctctgtggctgtgttcccttggca

SEQ ID NO: 211652 - DNA, 90 bp, Homo sapiens
tttaaaggagcagccctggtgtcacctatcagtaaaaggtgctggagaatctggtaaaagcaccattgtgaagcagatgaggatcctgca

SEQ ID NO: 211653 - DNA, 100 bp, Homo sapiens
gttggagaactatagtaacttggtgtcactggaatctccctggaaaaggagacatgaatgtctgcaatgatacttcctgacaagaagttgatacaagaaa

SEQ ID NO: 211654 - DNA, 50 bp, Homo sapiens
cgtggagtgacggtcacaccgcggcggaagaaatgttggctatttggcga

SEQ ID NO: 211655 - DNA, 98 bp, Homo sapiens
ggccggggtccgcaaggccggagaaggccgccgggcccgggcatggtggtctggggcaacgcggaagttccaggaaggatgttacctttgacgatgac

SEQ ID NO: 211656 - DNA, 75 bp, Homo sapiens
actgaggatatagagaagaaaccagagtcatttttcactcaattcgatgctaagtggtccaaaggcaaagttcgg

SEQ ID NO: 211657 - DNA, 111 bp, Homo sapiens
aaagctggcccgtgacctgaaggctgtcaagtatgtggagtgttctgcacttacacaggcagatcgggagcggtgccgagaaaaatttccttactagatgacatttcatcg

SEQ ID NO: 211658 - DNA, 100 bp, Homo sapiens
ccagtcagtgaccaactcagtgccaaaaccaggggtgctggcactgtgggtcctggtgacgcacgtgatgtacatgcaagattattggaggacctggctc

SEQ ID NO: 211659 - DNA, 75 bp, Homo sapiens
cagggaaccctggtcaccgtctcctcagtgcgtcagcatttatcccgtttgccaaccattgatccgaataccagg

SEQ ID NO: 211660 - DNA, 100 bp, Homo sapiens
ggcttcaaccccctcgagttcgagaacttcagctggaggggctacgcgcagatggcacctgtccaggtgtccaccatcatgtcggccagcaccaccaccc

SEQ ID NO: 211661 - DNA, 100 bp, Homo sapiens
atccagggcacgctccggggagatgggacagccccacgggaagagtacgtgtgctggatcgaaggggtattttgccactggaggaaagtggaagtcgacc

SEQ ID NO: 211662 - DNA, 75 bp, Homo sapiens
caactactttagaagaaacgacaccattgtttttaggtagttctcactggaattggtgcagatgagcaacttgca

SEQ ID NO: 211663 - DNA, 97 bp, Homo sapiens
ggacactgtcgtgagggtggagcactctccgggtgatggggaacgtggtgtggccgtcgaggtccgtgtgcagagtcgttccccatcaggaagtcct

SEQ ID NO: 211664 - DNA, 82 bp, Homo sapiens
taatgggaaggaagaagtatccaaggcagcacagcattctcagaagcagtctactgagctcttccagtgcatgtacttcaaa

SEQ ID NO: 211665 - DNA, 98 bp, Homo sapiens
acgaagcctatgtcaagtgtcaagataaagtgagtcagctgtacatggataagttctgaacgtcgaaaagaaaagtctcgagatgcagccagatctcg

SEQ ID NO: 211666 - DNA, 100 bp, Homo sapiens
acacacagaggtttatataaaagtattcagaagacacttaaatttttccagacatttgccttgcttgaggtggtcttcgagggatagcacgaggtggtct

SEQ ID NO: 211667 - DNA, 98 bp, Homo sapiens
tgtccgctctgctcggccgcgggctcccggaggactgcagagcgcatcagcgaggaggtggggctgctgcagctccttggggaccccccgccccagca

SEQ ID NO: 211668 - DNA, 100 bp, Homo sapiens
gcctgcaagacagccaccccggtcagcgccccaccagacaccacgctgctgggcatcgcactggagctggggctgcagaacctagaagtcggaatccgga

SEQ ID NO: 211669 - DNA, 75 bp, Homo sapiens
ttccgtacaagagcttaccggagagcagctgaaaagtggaagaacgcagttttgttgaaaagcacagatggccgt

SEQ ID NO: 211670 - DNA, 83 bp, Homo sapiens
aagaccataaaccagtgggtcaaaggacagacagaagttgaaaccaagactgaagactgaacctgaagaagtttccatagaag

SEQ ID NO: 211671 - DNA, 100 bp, Homo sapiens
attaacagacaagacacttttcagaaagacaggaagcccttagtgtatacaaggaagcaattcagaaaatgccaaggcagtttgccccacagagcttgta

SEQ ID NO: 211672 - DNA, 74 bp, Homo sapiens
tatgatggggagcttgaggacacttaccacgaagttatatcttaagtgtggtgctgctaacattgcccaggcag

SEQ ID NO: 211673 - DNA, 82 bp, Homo sapiens
agaatggtaatgttcaagctctcctagaaatgttgaagaagctgcacagggacctgaagacccttccagcatgccagaggaa

SEQ ID NO: 211674 - DNA, 74 bp, Homo sapiens
ctgagattacgataaacgttcctcaaagtagcaaggttattgattctgcagaactgcaggcgtatccagcactt

SEQ ID NO: 211675 - DNA, 82 bp, Homo sapiens
ttcccatcaccatcacagagagcgatgatactcatccagatcatcaggatattctgaaagcaatcgtagcattcaaaactct

SEQ ID NO: 211676 - DNA, 100 bp, Homo sapiens
ccaagacatacaactgaagacaagtgagccagatttcacctctgcaaatatgagagattctgcagaaggatttggtgctatggagaaatttttggtagaa

SEQ ID NO: 211677 - DNA, 80 bp, Homo sapiens
cacacgcttcctctccagagtgatcaagtgtgacccgggtgcagcccggaatcccgaggatgtggaccgggagcggcgag

SEQ ID NO: 211678 - DNA, 87 bp, Homo sapiens
cctgattggtgctggcatcagcacagacaccgctttgccgatagatttggtgcttccagatgtgagttatcaggtggaatccagtga

SEQ ID NO: 211679 - DNA, 76 bp, Homo sapiens
cggaactggtgtaccctggtggacgtgcacccagaggaccaggcggcggtttgagaggttatttgtccatgggatg

SEQ ID NO: 211680 - DNA, 82 bp, Homo sapiens
cagtaactgggataagtggctgtcacggcgattccagaaggtggggctgcgggacgttaatgactacgtgtcctatgcctgg

SEQ ID NO: 211681 - DNA, 96 bp, Homo sapiens
ggcgtcagagccgcgcaccgcggacgagcaggcccaggaattgaagagaatcctgacaagtggcatgttgggaaaggcctgaaggaagccagacca

SEQ ID NO: 211682 - DNA, 100 bp, Homo sapiens
actgaatatcctcttataattaatgcaataaaacgcttccatctttatccagagaggcgacaggaagaagggtattacagccgcctggaagccgagaggc

SEQ ID NO: 211683 - DNA, 100 bp, Homo sapiens
atgttttttggaggaggaggaaggatgcagagagaaaggagagaaatatatgcaagaggcacgaagtttaggaaaaaacctgaggcaacccaaactgtca

SEQ ID NO: 211684 - DNA, 100 bp, Homo sapiens
tttcttggcgattatgtggacagaggttattttagtatagagcatcgacaccccaggagtgattagtcgtgtgtcccagctattcaaaggccaccccgat

SEQ ID NO: 211685 - DNA, 75 bp, Homo sapiens
acagctggagtctggctaacttgtcttccactaaagagttggacctgtcagacctgagtcagaactccatcacag

SEQ ID NO: 211686 - DNA, 83 bp, Homo sapiens
ggataatgggattaatctggtggactacgttgttaagtattacctgcgttactatgatcagagctgagcagctagccagtgta

SEQ ID NO: 211687 - DNA, 90 bp, Homo sapiens
aagtccccccagccttggggtcatatgcttctgtggacagctgtgctattcctggctgccagttttgagacgctgcagtgtgagggacct

SEQ ID NO: 211688 - DNA, 100 bp, Homo sapiens
tcaagaaactgaagcaaaagatcagcgaggagcagcagcagctccagcaggcgctggctcctgctcagtgtcccagaagcttttgttgacaattccagtt

SEQ ID NO: 211689 - DNA, 100 bp, Homo sapiens
ggcgcccacggcctccagcttcaccacccgcacggcgcagtgccggaacactgtggcggccatcgaggagctccagaacctgggtatcaacccagcaaac

SEQ ID NO: 211690 - DNA, 86 bp, Homo sapiens
ctgcagtacctgcagaaggtctctggagacatcttcagcagctggtaggtgagtgctgtcctcggctcactttcctcaagctctcc

SEQ ID NO: 211691 - DNA, 88 bp, Homo sapiens
aggtgcacggaaatgggaagaggcccagtccagagagctctggccaggctgccgcacctctacaggaactttgccgcggagcagtatg

SEQ ID NO: 211692 - DNA, 101 bp, Homo sapiens
aggttttaaatcaagatttaacattccaacacataaaaattatttatccaacagctcctcccagagaaagtggctcatgccaaagaagaaaaccttagtat

SEQ ID NO: 211693 - DNA, 73 bp, Homo sapiens
tgggcttgaccatctcacaactgctcgcgtgacgaccgcattcgtggcagcagtagaccgactggaagaccac

SEQ ID NO: 211694 - DNA, 82 bp, Homo sapiens
gagatcgtgagttgtgggtgcagcgactgaaggaggaatatcagtcccttatccgggaactgtggctgcaccatctgtcttc

SEQ ID NO: 211695 - DNA, 100 bp, Homo sapiens
ccgagttgccgccggagaggagtggcctcgcccgcttggtttctagagaggaaggatctccccagctgtcttcagcaaggccgtctcctgcccagagaaa

SEQ ID NO: 211696 - DNA, 80 bp, Homo sapiens
ccctctttgtggataggaacattggattgtcttgaagtcaatacagatttgtatgtgaagctattttgaaagtttatgaa

SEQ ID NO: 211697 - DNA, 100 bp, Homo sapiens
aaccatcgcagttggaagcccatggggcagcttcttaatgaagaggataactcagaatcatcggctatagagcagccacctacttcaaacccagcaccgc

SEQ ID NO: 211698 - DNA, 74 bp, Homo sapiens
accgccaagaagcccatcatcgtttgacggtgagaacatgtatatgagcatgacagagccgagccaggactatg

SEQ ID NO: 211699 - DNA, 75 bp, Homo sapiens
ctcaaaatgaagatggcacatggcccaggcagaccttgcagtcaaattggtctcttcccatggcgatgtccatct

SEQ ID NO: 211700 - DNA, 82 bp, Homo sapiens
tggggcaccaagagcagccccggtctctcggacaccattttctgccgctggacgcaagctgcttccctgaatctgtggatgt

SEQ ID NO: 211701 - DNA, 88 bp, Homo sapiens
tggccaaagcctgcccagacggctcacctgtgcgggatggaacaaaaggttatgatgtgattgctcaagcccaatctgggactgggaa

SEQ ID NO: 211702 - DNA, 100 bp, Homo sapiens
gccagccgctgttttgccggaggagcccctcaggccgatgtttcgtctgaactcactttctgctttggcagaactggctgtgggttctcgatggtaccat

SEQ ID NO: 211703 - DNA, 100 bp, Homo sapiens
tcaccagctatggcattagcccacaggccaaggaagtgcttcgggagatccaggatgcagtggccagggcggggcaggtggtgcgggaagccgttggagg

SEQ ID NO: 211704 - DNA, 100 bp, Homo sapiens
tgtcattaaacacagcccaacagtgaaaagagaacctccatcaccccagggtcgatccagcaattctaggagttggtagttgacagtcagatgcagtcaa

SEQ ID NO: 211705 - DNA, 101 bp, Homo sapiens
ggcccaggctcctgctgacccgggcagagaaggtaactgcgtcattgattggctggtatccaaccagtctgttaggaatcgccaggaaggcctcatgattg

SEQ ID NO: 211706 - DNA, 82 bp, Homo sapiens
ccggcctgacaacacagggcgtgggttcttcatgacagccagattccccgtaatggaaaagggcagcaagttggagacagag

SEQ ID NO: 211707 - DNA, 83 bp, Homo sapiens
ttgccaaggacaacatcatccccttcctccggcatgcttttcacttccactgcatctctcgctggctcaaaacacgacaggtg

SEQ ID NO: 211708 - DNA, 98 bp, Homo sapiens
gatgattttgacctcattgaggagaatttgggtgtcaaagtcaaaagaggaatttctaactctgatggaacacggccagttggcatgctggggaaagc

SEQ ID NO: 211709 - DNA, 100 bp, Homo sapiens
gaaagagtcaacagcagtggcaacaggagaatccagctttggcggttgcaattaaaacatgtaaaaactgtacttcggacagcgtgagagagaaatttct

SEQ ID NO: 211710 - DNA, 83 bp, Homo sapiens
caactagcggcgggtcgtgggcacctccagatgatatcatcaagttgaatcgaaaggaagggaagaagcagaattttccaaga

SEQ ID NO: 211711 - DNA, 100 bp, Homo sapiens
agctgcaaggaaggtggagatctcctgtgctgcgaccactgcccggctgccttccacctccagtgctgcccacagcccccatcccgtagcccttcctgga

SEQ ID NO: 211712 - DNA, 101 bp, Homo sapiens
ccgcagcctggacgacatcgacctgtccgccctgcgggtgaacagggatattgtgtcaggcctgaaatacgttcagcacacctacaggactggggtgaaag

SEQ ID NO: 211713 - DNA, 100 bp, Homo sapiens
ctggcctgggaccacacgcagaacagccggcagctgagcctggtggcctccgttctcttggcccagtactataaccaagagtggacattgtgggatcgct

SEQ ID NO: 211714 - DNA, 75 bp, Homo sapiens
gttcttgtttgtggatcgctgtgatcgtcacttggtcccagaacagttttcttctgggctccaattatgaaatgg

SEQ ID NO: 211715 - DNA, 107 bp, Homo sapiens
gggttctggactttgggcgtcccattgccatgagaatggatcttggagaatgtctgaaagtccatgacctggctttaagagcggattatgaaattgcatccaaagaa

SEQ ID NO: 211716 - DNA, 50 bp, Homo sapiens
agaccattcccatcagtgagcattacaggcctactgaacttgacgcactg

SEQ ID NO: 211717 - DNA, 73 bp, Homo sapiens
tcagggcgaagtgaccccatacagctggaaatccacagagattgttcagtttggcatgaatgaaaaggttggg

SEQ ID NO: 211718 - DNA, 75 bp, Homo sapiens
gagagaaaaggagccagaaaagccggcaaaaccacttacagctgaaaaggaagaagctgtttgttttgattctga

SEQ ID NO: 211719 - DNA, 90 bp, Homo sapiens
cagcggcgtcgagaggaccatcctgggtgctggccctgtgctggaggtcgcctggtcggcgctctggatgcagtgttggattccaatgca

SEQ ID NO: 211720 - DNA, 75 bp, Homo sapiens
gaaatctcgtctcgaccaagagctgaagctgatcgctcccagggttgctagagctccttgtagaatatttccgac

SEQ ID NO: 211721 - DNA, 100 bp, Homo sapiens
atcactctttgaaacagcatgggaagcaaaggccatggcagtaatagcgtgtttatctgacacggacgaggagatgttaaagtaacccatcttgcaggac

SEQ ID NO: 211722 - DNA, 90 bp, Homo sapiens
ccctacgagaccattgccttcaagacatgtcctggacttgaacagtatgctattaagaagtttgctgaggcatttgaagctattccccgc

SEQ ID NO: 211723 - DNA, 124 bp, Homo sapiens
agcacggagggagcgacggggccttcggccgacacctccgggtcggagctggacgggaggaagttgccttaaagaatagacaagagctgtatgcactacctcctcctccccagttctactcaag

SEQ ID NO: 211724 - DNA, 100 bp, Homo sapiens
caggcccttcccgtagcgcccccagcagtcctgctcctcgccgtaccaaacaggtgcccctgggcgctgggattgctctagcctgtaagtataatggaaa

SEQ ID NO: 211725 - DNA, 99 bp, Homo sapiens
cagcagctgatgatcgaggccaaagccaactattaccaggtggagcatgactttatcctgcaggccgagcgggaaacgttcatcgagcagatgaaggat

SEQ ID NO: 211726 - DNA, 82 bp, Homo sapiens
gagacagtcactgctgtggctgcgggaaagcctctctcttgcccaaaccacgatgggaataatgtgaaaacctttgcatctt

SEQ ID NO: 211727 - DNA, 75 bp, Homo sapiens
gtagacaccagctccgaaatcaccaccaagtgatgtggagccaactgcaccgatggaggaacccacagtggtgga

SEQ ID NO: 211728 - DNA, 74 bp, Homo sapiens
gaacggctgaaggccctacgggagaaaaccgggcgcaagggtgaggccgagttcaaccgcatcatgagcctggt

SEQ ID NO: 211729 - DNA, 95 bp, Homo sapiens
ccgggggcttcccggaggccaaccgtatcgccagcaagtacggattcatcaacataggacaggtggcttctggcacagcagcttaattgaccgga

SEQ ID NO: 211730 - DNA, 100 bp, Homo sapiens
tggaaaaacgactaccggcagctcgagaaggagctgcagggccaggtgaccattgtgaggtagatattttgttctaattttccagatgaggaagctgaga

SEQ ID NO: 211731 - DNA, 98 bp, Homo sapiens
ggttttctaagaaaggacagcttaatgcagatgagctattttgaactggagagcagtggcctgagggatgagattcggtatcactacatacacaatgg

SEQ ID NO: 211732 - DNA, 100 bp, Homo sapiens
acggcctgaatggcacgtgcatctgtgcacccgggtttacagttgcctagacctggagcagtgttctcttaaggtactggagcctgaaggaagccccagc

SEQ ID NO: 211733 - DNA, 50 bp, Homo sapiens
ccagcagatgacccagaaatagaggctgtaggagtgcaattggaacctga

SEQ ID NO: 211734 - DNA, 98 bp, Homo sapiens
acaccacaataatccacagccaagagcggttctggtgaggttggaaggatgcagccacccggttgtcatgaaaggcctgtgtgctgaatgtggccaag

SEQ ID NO: 211735 - DNA, 98 bp, Homo sapiens
tcccaggctcaagcagtcctaccatgtcagccttcccagtagctgggaccacaggggacaaaacatggatgatgtcatggttttggtggattcagaag

SEQ ID NO: 211736 - DNA, 75 bp, Homo sapiens
cctagccagttacattccagaggatgaggcgctgatgcttcgggatggacgacacttagcctgtgatgaggagag

SEQ ID NO: 211737 - DNA, 100 bp, Homo sapiens
ataactgcacataaggattttgagcaggaaaaccgaaagcgccatggctctagtcgaagtgtagtagatatggatttagatgatacagatgatggtgatg

SEQ ID NO: 211738 - DNA, 100 bp, Homo sapiens
tggttccccggccccacccgatgcggcctccaaggagcaggccgggctctcgccatgggtcactgtcgcctctgccacgggaagttttcctcgagaagcc

SEQ ID NO: 211739 - DNA, 100 bp, Homo sapiens
catgatgtcttcagccagtataaaaacacagctcgacagtacgcctacttctataaagtcatccagagccaagattttcttcttcactcctcgcttggtg

SEQ ID NO: 211740 - DNA, 83 bp, Homo sapiens
cgctcccctagccaggaagagccgccgtccgcaccgggaccggagaggaagcggagggggatatgagactttctactcggaat

SEQ ID NO: 211741 - DNA, 50 bp, Homo sapiens
cccgcagcacagccgcgacttcaagatcaccacgcttattaatcataaag

SEQ ID NO: 211742 - DNA, 100 bp, Homo sapiens
atatttggagttcttacaacatggcagacattgacaagactatgatgatggatatggcactgcttatgatgaacagagttatgattcctatgataacagc

SEQ ID NO: 211743 - DNA, 48 bp, Homo sapiens
tggggatctctgaaattactcaggagttaaagttcctcgtaattttcg

SEQ ID NO: 211744 - DNA, 50 bp, Homo sapiens
gattactgcgagaacaactacatacaggaatatattattcgagtgcaaag

SEQ ID NO: 211745 - DNA, 75 bp, Homo sapiens
gccagatcaacctggagctctacgcctcctacgtttacctgtccatgaagctaaaccagccccagaaatatttga

SEQ ID NO: 211746 - DNA, 100 bp, Homo sapiens
tgattttatggtccttgcgtgttataacataaatgaccgtcaagaagagacggagtatgcaaggtttgagaatggccgatttgtataccgaataaaccgc

SEQ ID NO: 211747 - DNA, 100 bp, Homo sapiens
ctggcctatggtttctgcattttgttaagaagcacctcatgcaagcgagggacctgggactgctcacagccagcctgaaaactggttttttaaaatggaa

SEQ ID NO: 211748 - DNA, 80 bp, Homo sapiens
tggaccgcgagagcatcaaactggtgtccatcgatgtccagcgtctggctgcctgtggcctggagggaccccctcaagag

SEQ ID NO: 211749 - DNA, 96 bp, Homo sapiens
tgaaaccccaggcagagacgggggaagcagcacgggatcccagcctcaggcctgcacggacggtgttggttgggatacttttctgctgtgagaatg

SEQ ID NO: 211750 - DNA, 121 bp, Homo sapiens
gaagcggcgccgagcgcgtattaacgagagcctcgctcagctcaaaaccctcatcctggacgccctcagaaaagagccggcgtaaaggccgtgcctctgagcacaaagaccagctctctcg

SEQ ID NO: 211751 - DNA, 74 bp, Homo sapiens
tttacccgcccgcctgctcggcgaccaggttcctgcacttggccatcatccatgaagaaaaggcactgaccatg

SEQ ID NO: 211752 - DNA, 100 bp, Homo sapiens
cctggataaactttcagattactactatcatgcagatttcctatctgaggctccgggtactggcagtgggacgagctagcccgaactgacttcagcagct

SEQ ID NO: 211753 - DNA, 119 bp, Homo sapiens
cgcggcctacgtgaacaacctgaacgtcaccgaggagaagtaccaggaggcgttggccaaggacaatgcagatcttcgtgaagactctgactggtaagaccatcaccctcgaggttgag

SEQ ID NO: 211754 - DNA, 90 bp, Homo sapiens
taacctatcgggttctctctccgcgcgttcaggtttgcagctaaaactgtgcacagtgggtcattgatgctagtcacagtggaactgaag

SEQ ID NO: 211755 - DNA, 50 bp, Homo sapiens
ggagctgtatggccgccgtcgcaagaaggcaactccaacaacattgccac

SEQ ID NO: 211756 - DNA, 99 bp, Homo sapiens
cctttattttaaaagctgatgttccaagacagttaaatctcacacagaaacagatgagaaacaaacagagagccgcaccatcaccccacctgctgcacc

SEQ ID NO: 211757 - DNA, 100 bp, Homo sapiens
ctgccgagggagactttaggacaagaggcgttgtttttctgtctcctatatataatctggttccagtgaaaatgaaaaatgcacacctaaagaaacaaaa

SEQ ID NO: 211758 - DNA, 75 bp, Homo sapiens
ctgttacaccaaaagtggcatgatcctttgcagaaatgactacattaggtgaatggaagagaatccgaagaagaa

SEQ ID NO: 211759 - DNA, 100 bp, Homo sapiens
aaacaaaattggctggcagagcaacagaaaatgcaggaacaacagatgcagaaagttcaggagccctggaaaggagaaggaataagacggcaggaggaag

SEQ ID NO: 211760 - DNA, 135 bp, Homo sapiens
cgggaggccaaaaaggccctggaggtggaggagtccaactcagaggacgaggcctccttcaagtccgaggtcaaaagcgtcaggcagagagataagaaagcaagtgtgctatacatcgaaggacacatgaacccg

SEQ ID NO: 211761 - DNA, 74 bp, Homo sapiens
caaagccttgcagaggccaagtctactttgaggatgaggacagggcagaactataccgggtgcctgccaagagc

SEQ ID NO: 211762 - DNA, 82 bp, Homo sapiens
atttgggtcgcagttcttgtttgtggatcgctgtgatcgtcacttgtgagacggtttaagcggaagcatcttactgccattg

SEQ ID NO: 211763 - DNA, 91 bp, Homo sapiens
cgtgaccgagaccgtgaccgagagcgtgaccgagagcgcgaatatcgtcatcgttagaaggccaagacccatgttcttgacattgagcagc

SEQ ID NO: 211764 - DNA, 83 bp, Homo sapiens
gaagaccaagtacctgcagatcctgacctctctgatgagatggatcgaggctgtggccaggccagctgggctcggggagcgcc

SEQ ID NO: 211765 - DNA, 98 bp, Homo sapiens
tctgcaccctggatggaaagcaggaaaccacccctactcctaatcccccgactacagaagaggagaaaacggaatctaatcaggaggttgctaaccca

SEQ ID NO: 211766 - DNA, 100 bp, Homo sapiens
ccgagggcggcctgagcccggcgcaggtgaccggcgcgcgggagcgctacggccccaacgtgcactgccagaagatcgtccacagggacatcaagccatc

SEQ ID NO: 211767 - DNA, 100 bp, Homo sapiens
ccgatgtcctcgcatacttggacttcagcgtgtcaaccactgggatattagcgggagtgaagtgtggcccagagttgctcagaattggagcagagcctga

SEQ ID NO: 211768 - DNA, 82 bp, Homo sapiens
ccgcaactctcagttcgagagtaaagggcgaactttctgaccaagtatacaactacccagagggcctaggagaagtgctgta

SEQ ID NO: 211769 - DNA, 74 bp, Homo sapiens
cggatcctggagaacatctcgctgtcggtgaagaaggtccaggccatcaacgtgtccagccgcttcgaggagga

SEQ ID NO: 211770 - DNA, 88 bp, Homo sapiens
ttcccctcctgagccaaggggacagtgtagtggaaaccagactcacttctccctgagggccatgtgaaactttctgactttggtcttt

SEQ ID NO: 211771 - DNA, 83 bp, Homo sapiens
ggaagcagcttgggcttccagctcagcagggaaccctgcaggctttatcctgtggataaacgcagagtgaacgagtttgggga

SEQ ID NO: 211772 - DNA, 82 bp, Homo sapiens
cgggggggagagccactgacgccgggaccgggaccgccgccgccgccgccaccatgcaacacagtcactcctggcggcaaac

SEQ ID NO: 211773 - DNA, 98 bp, Homo sapiens
aagggtggctgggaccatggagacacccagagtatccagcagtgttgtactgctacttctataaacggacagccgtaagactaggcgatcctcacttc

SEQ ID NO: 211774 - DNA, 100 bp, Homo sapiens
cattggctcaggtcttctgtgaggaatctggattgtcacctttgctgcaaaaaattacggggacgcttcggccgaggataccgcaatggatcaggaagag

SEQ ID NO: 211775 - DNA, 78 bp, Homo sapiens
cttcagctcctgcagctctgaagtggttctggtgaaaacaaagcctctgatatcaactccactacaaagccatttgca

SEQ ID NO: 211776 - DNA, 100 bp, Homo sapiens
gggaggagcagtgcttggctccctgcagtttggctacaacactggagtcatcaatgccccccagaaggaacttggaatcaagcattcacttcatcgaaag

SEQ ID NO: 211777 - DNA, 51 bp, Homo sapiens
gcaccgcgcccatggcagagccagaccaggagttattcaaagttcgacccc

SEQ ID NO: 211778 - DNA, 75 bp, Homo sapiens
tgtagccaagactggagaaacaatgccattctacaggttcatgacaaagaggtccttgcctctcagctgctggtg

SEQ ID NO: 211779 - DNA, 100 bp, Homo sapiens
ccagcatggtgggatttatgtgatgttttactgtgcctggctaactatagtcgagggggtgatggtcctatgtgtcgcccagtaattctgttgccggaag

SEQ ID NO: 211780 - DNA, 83 bp, Homo sapiens
cagcaaatacactgcaggtccccagccattaaacacattttacaaagccatgccctacaggagaactgtgtttatgaaactgt

SEQ ID NO: 211781 - DNA, 100 bp, Homo sapiens
cggcgccgatgtccctgatccctggagcgacgacggccgctgcctaagctggaaagacaacataacgatgcacggatgaaccttgccattgctctgactg

SEQ ID NO: 211782 - DNA, 100 bp, Homo sapiens
atacccagtgacttgaaggagcctccccagcctcctagatcaatgaactgagccatgttcaaatccctgttatgttgatgccagatgacttcaaagccta

SEQ ID NO: 211783 - DNA, 82 bp, Homo sapiens
ttgggccaactacacagaccttactccccttagaacagattcatgatgttgctatcaaaagttgagaaattgtcagaagaaa

SEQ ID NO: 211784 - DNA, 90 bp, Homo sapiens
ggttctcccagcctggggagcaggggcatgccgctgatctactggttctcccgccgcatgaccctgtggggcagcatctccttcaacctg

SEQ ID NO: 211785 - DNA, 100 bp, Homo sapiens
tttatttacaaccagggagtctgtggttgactactgcaacagaataactgaagtgaagtgatggactccgatttggagagtagtaagacgtgaaaggaat

SEQ ID NO: 211786 - DNA, 114 bp, Homo sapiens
gagcgcaggcctcgtgccgttacggccatcacggcggccgcagtggcgtcctggagccctcctcagatgccatggacaatattaccaggcagaaccaattctacgatacccaag

SEQ ID NO: 211787 - DNA, 83 bp, Homo sapiens
cggtcccagcggcagcagcagcggcgggaggagcctccgggatgaggtggaaagtgagaaatggtacctgtctacagacttcc

SEQ ID NO: 211788 - DNA, 102 bp, Homo sapiens
ctgcactctgtccctcactcgccgccgacgacctgtctcgccgagcgcacgccttgccgccgccccgcaggaaggtgctcgggtcttcggggcactgggtcc

SEQ ID NO: 211789 - DNA, 100 bp, Homo sapiens
ggaggctgtggcaatggaacaggcttgagaaacaggcccgccatgttcatagaggataaagcagtagacaccctggcttacctcagtgacggtgacgccc

SEQ ID NO: 211790 - DNA, 83 bp, Homo sapiens
aaccaccgccctggccatctaccatgtgttccagggtctccctccactgctgtagtaacccgggtccggggcctcggtggtgc

SEQ ID NO: 211791 - DNA, 51 bp, Homo sapiens
ctgcggaggcggcggtgcagcgctccggatgctcacaactgtattcctgag

SEQ ID NO: 211792 - DNA, 50 bp, Homo sapiens
cggagaccgagcccgaacagcaggtgctggcaaaaccccgactctgggtg

SEQ ID NO: 211793 - DNA, 74 bp, Homo sapiens
tgctggagatggtggagtccgtcagtgcggccggccggacggacctactacgactgcgcagacggtttatgagg

SEQ ID NO: 211794 - DNA, 75 bp, Homo sapiens
accctaaggaagcggccacaatcgacagggacaccgccttcgccattggcccccacagaacacctgaactcaaat

SEQ ID NO: 211795 - DNA, 75 bp, Homo sapiens
acttccccaaggatttcttgtctgtgatgcttgaaaaaggtggaagaagagcccgaagaagaacctgaagagaca

SEQ ID NO: 211796 - DNA, 50 bp, Homo sapiens
gtacgaagcgggcgtttgcgaagctgttccatttcctccaagtcaccggc

SEQ ID NO: 211797 - DNA, 97 bp, Homo sapiens
cccaggtgtgcttgtgcctgggccagctggagaggtccattgcctgggagaagtctgtcaacaaagtgagggtgacattgacattttgctggacaaa

SEQ ID NO: 211798 - DNA, 100 bp, Homo sapiens
cgaggacagcacgtggaggctccgcgctggggcactgctgctcagcccccaacacctgagctcccaggtgtctgacttccagcaactgctggcctgtgcc

SEQ ID NO: 211799 - DNA, 98 bp, Homo sapiens
ctctgtgctgcgtgtggtggaagccttcatctcctcgtcctccaggcagcacaagccattgtggaatctccaccaggtgtacagaacggtgcctctgc

SEQ ID NO: 211800 - DNA, 75 bp, Homo sapiens
ggaacagtctttggcagccttatcattggttatgccagctgttgttgatgaaatccactcactgatagagaaaag

SEQ ID NO: 211801 - DNA, 100 bp, Homo sapiens
agggatccttcacccgtgtctggagctgcagaggctggagacagagttgggccaacccgctgagcgctggaaggacacctgggaccgggtgaaggctgca

SEQ ID NO: 211802 - DNA, 145 bp, Homo sapiens
gacgggcggcggcgtgagggctccgggtcgctggcggcgtggacacctgagtcccggggtaggggtctcccgcgaggtgctggagaatctggtaaaagcaccattgtgaagcagatgaggatcctgcatgttaatgggtttaatg

SEQ ID NO: 211803 - DNA, 82 bp, Homo sapiens
accccctcccccctgagcccgaggtgctgacgtcgcaaaaaaattggatagaattgaatgatctggcacgggaccctccagc

SEQ ID NO: 211804 - DNA, 75 bp, Homo sapiens
ccctgcgactcctggaccaccgggcgctggtctgctcccagccggtgaaagaacttgtcctggacaacagtcggt

SEQ ID NO: 211805 - DNA, 98 bp, Homo sapiens
caagaccccctgactgaccagaagcaggcagactcggtaagtccatggcctacatgcgcggcatgtactttcgcatgaaggatgaggtgttccggggc

SEQ ID NO: 211806 - DNA, 100 bp, Homo sapiens
accctctggagacccaggcagggaaggtgcaggaggctcagggaactgggaacagccaggtgccccaaagcaaatacgcggagctgctggccatcattga

SEQ ID NO: 211807 - DNA, 82 bp, Homo sapiens
cacgtgcggtgctcgtcgggagtgatcacctaccctacaggtttacccaaggtccagcctagcccctaggcaccatgtcgga

SEQ ID NO: 211808 - DNA, 90 bp, Homo sapiens
caaaacccatgttttcccatacaaggattaaagcctgtggtttccacagaagcaccacctatcatatttgccacaccaactaaactgacc

SEQ ID NO: 211809 - DNA, 87 bp, Homo sapiens
gctccccgccccgccgcggccatggaggacgagcggaaaaacggagcctacggattgtcagtggcttcgccccgaggagagctgact

SEQ ID NO: 211810 - DNA, 74 bp, Homo sapiens
aaagaccgaagaggacggccctgccaacaccgagcagaagtcccgcaggacagacagacacagacagcgctagt

SEQ ID NO: 211811 - DNA, 100 bp, Homo sapiens
caggctcagtctgcggccaagactccgtcctgcaagcaataatgacgatgaggacctgacaccagagcagaaggcagagcgtgagaaggagcggaggatg

SEQ ID NO: 211812 - DNA, 51 bp, Homo sapiens
cccagtatccactcttccttatcttggatgagacctgcacgcagtggctca

SEQ ID NO: 211813 - DNA, 74 bp, Homo sapiens
gaaaatatgatgaatgcaatatttaaaggagtgtttgtacatagataccgggtatatttcagaaatcgctgggt

SEQ ID NO: 211814 - DNA, 75 bp, Homo sapiens
agtcaaggaggcggcaaaaaaaaagtctgctactactacgacggtacaacaaataacactgtgactccaacctca

SEQ ID NO: 211815 - DNA, 73 bp, Homo sapiens
tgccctagggcccggccgacccgcggcccgaacaagttgaaatcatcgcagaaggataaagttcgtcagttta

SEQ ID NO: 211816 - DNA, 75 bp, Homo sapiens
tgggaatctggagcttcagtaacagacaagttggatggcttgaggactggtactaaaaggaaacgtgactgggag

SEQ ID NO: 211817 - DNA, 82 bp, Homo sapiens
ctgctgctgcttcaatgtccgcatcgcaaccaccgccctggccatctaccatgtgcttccacagcgcggcacctgtacctcc

SEQ ID NO: 211818 - DNA, 98 bp, Homo sapiens
ctgctcttacttgtcctgctcctgctgctcgaggacgctggagcccagcaaggaatgtttacccttgcggaagttgcatcacttaatgacattcagcc

SEQ ID NO: 211819 - DNA, 90 bp, Homo sapiens
gtttcctactgacgacaggtgattacacgtgtgcttctgatggagggatcaggaaagaaatgggcaagttcatgaaacctgggaaggtgg

SEQ ID NO: 211820 - DNA, 75 bp, Homo sapiens
taaccaatgactgtggaataatatggaagaagatggaaaaaacttgtttaatggcatgcttttcacttccactgc

SEQ ID NO: 211821 - DNA, 100 bp, Homo sapiens
ggctcacgcagcttcaggacgctgtgaattcgacaaagctctgatggcaccaaatcttgactcctttggacgcgatcgggcactgtatcaagagcatgca

SEQ ID NO: 211822 - DNA, 95 bp, Homo sapiens
ggcggagctggagctggagctctcggaggggttcttgaagcttttgagattaacaatggcaggaaaatcatcactttttaaagtaattctccttg

SEQ ID NO: 211823 - DNA, 74 bp, Homo sapiens
ccgggaccggctgcagagacaggcgttcgaggagatcatcctgcagtgtgctggagaatctggtaaaagcacca

SEQ ID NO: 211824 - DNA, 74 bp, Homo sapiens
gacgtgaagaagacgaaaaacgtcgaagaaaggaagaggaggaaaggcggatctatcatggtgaacttacttca

SEQ ID NO: 211825 - DNA, 74 bp, Homo sapiens
gggagtctccgcgtcccgctcgctgggagagaggacatggatttgattgacatactttggaggcaagatataga

SEQ ID NO: 211826 - DNA, 50 bp, Homo sapiens
gcgggactctgaggaaaagctcgcaccagaatgttgctgcgggatgtaaa

SEQ ID NO: 211827 - DNA, 80 bp, Homo sapiens
agttgttgtctcggcagcgcccgcggagacgtgaagagacaaagaaacagccttggtataatagcacgttagcatcaaga

SEQ ID NO: 211828 - DNA, 100 bp, Homo sapiens
actcctgggcccaactgtgaccgatttaaactgcacataccatatgctggagagacattaaagtgtgatggcttggacaacagtgtagcttcccccagca

SEQ ID NO: 211829 - DNA, 51 bp, Homo sapiens
gaagccatggatggccgggaacctctcggaggagcttctacgtgtatgcgg

SEQ ID NO: 211830 - DNA, 75 bp, Homo sapiens
cagaaagagtcaacagcagtggcaacagtgttatccaagataaattctgtgggattataaacatttcagtagaag

SEQ ID NO: 211831 - DNA, 83 bp, Homo sapiens
tcaatatctgtcttcggtggactccttcggcagtccacccaccgccgccgcctcccagatctgccttctggagactgcgccgt

SEQ ID NO: 211832 - DNA, 98 bp, Homo sapiens
ggccctcatcacccgacccggggcgccgagccggaggaaggaggatgaatttcatcctttcatcgaagcacttctgccccacgtccgagcctttgcct

SEQ ID NO: 211833 - DNA, 83 bp, Homo sapiens
agaccaaattaatcagcacattgatttataaggccataggaaaaggatacagagtagagtttcatgaacctgaaacttggtgg

SEQ ID NO: 211834 - DNA, 90 bp, Homo sapiens
gcgaggagtatctgcggcagcatgacaagaatttatagagcggcagcacgcaaagaacaggtattactactaccaccggcagtaccgccg

SEQ ID NO: 211835 - DNA, 100 bp, Homo sapiens
ggaggttcacaacctctgtggtccgtaggagccactatgaggagggccctgggaagggcaattgaaggaacagactaaaaatcgtgtcctggaaggaaac

SEQ ID NO: 211836 - DNA, 116 bp, Homo sapiens
aaccattgacgccatgtcgggttattcgagtgaccgagaccgcggccgggaccgaggattcctggtcgggtggcttccagtggtcttcagtctgtcgtgcaccgatgagaactctc

SEQ ID NO: 211837 - DNA, 60 bp, Homo sapiens
ggcgcgcgggagcgctacggccccaacgacagaacctccactcaatacaccagaaaacag

SEQ ID NO: 211838 - DNA, 99 bp, Homo sapiens
tgagtctcaagatggacaaccgggatgttgcagatatgaatatcgtgtagagatggttcaccagtcctgtaatgatcctacaaaaaatatcattcgaga

SEQ ID NO: 211839 - DNA, 85 bp, Homo sapiens
cattaaatgacagttcacataagaagttcttcgatgtatctaaacttggcaccaagtatgatagagaagcagaggcggatagaac

SEQ ID NO: 211840 - DNA, 100 bp, Homo sapiens
tgaccccatcgaggcttccctggttgcttagctgggtctcggccacggcgtggagagcggcaaagacctcacctctgaggaccagatcgtactgctgaag

SEQ ID NO: 211841 - DNA, 100 bp, Homo sapiens
cagagggtggcccatgagccggttgcgccacccgaggacaaggcatcttattatagaaaactttatccctctggaagaaaaaagtaaaattatgaataga

SEQ ID NO: 211842 - DNA, 83 bp, Homo sapiens
aggagttccgccccaccatctacagcaacgtgatcaaagggggaaatttgcagtggtgagaaaatgtataaagaaagattctg

SEQ ID NO: 211843 - DNA, 100 bp, Homo sapiens
tggggatggggcatcgtctgtttgtgcctcggcttctggcgtgaacagagtatctgtcaggcaagagctgctgtgatggtttatgatgatgccaataaga

SEQ ID NO: 211844 - DNA, 90 bp, Homo sapiens
gcggcgacggagcaccggcggcggcagggcgagagggcttcgtgggacacatatgcaacatgcctatgatttttacaagcctgatatgct

SEQ ID NO: 211845 - DNA, 89 bp, Homo sapiens
gtgaccgagagcgtgaccgagagcgcgaatatcgtcatcgttagaaggtagaagcttaggctattgatttgaacccactattttttcta

SEQ ID NO: 211846 - DNA, 74 bp, Homo sapiens
cagaggccaactgcagaggaactggaacagaggaacattttgaaacgcaaagatgcaccatccaactgtgtggt

SEQ ID NO: 211847 - DNA, 75 bp, Homo sapiens
cccaccatcgagtccctgatagggccatgctatgatagtggaagcttatccaaaataatagatccagaagaagtg

SEQ ID NO: 211848 - DNA, 74 bp, Homo sapiens
acatcactttagaccctccacctaattgcaggtgtgttccagagaacaagccttcagacatttgctatattgac

SEQ ID NO: 211849 - DNA, 100 bp, Homo sapiens
aaatggggattacagagtataacaatcagtgccgagcaattgtgatgagatattctgctgagtggaaggcccagtttgatatctctgtggccagtgaaat

SEQ ID NO: 211850 - DNA, 100 bp, Homo sapiens
ttgagtcatttccttcgtacccacagtgcttcatgagagctgtcaataccagcaaatatgcagaaagctatcggatccaaacctatgctgaatatatggg

SEQ ID NO: 211851 - DNA, 73 bp, Homo sapiens
acgtgggcaaccgggcggccacgttcccgctgcagaaaaatggctacaaacttcctagcacatgagaagatct

SEQ ID NO: 211852 - DNA, 95 bp, Homo sapiens
ccagcatcccgtcaggggttgcaggtgtgtgggaggcctggagctgctgaagactgctattgggaaagctggctacactgataaggtggtcatcg

SEQ ID NO: 211853 - DNA, 83 bp, Homo sapiens
aataggagtctggtcaggcgtcaggctagtccgacgaagagtgggtatcatgaactgatcactaaatatgggaagttggagcc

SEQ ID NO: 211854 - DNA, 100 bp, Homo sapiens
gtggatggtcaagagcgtgccctacttcaaggataagggtgacagcaacagctcggcgggctggaagggagtggggaaggccagggccagattctgcagc

SEQ ID NO: 211855 - DNA, 98 bp, Homo sapiens
actacctcgtgtggcacaaccgccaccgcgagctggagaaggaggtccgcgcgggccaggttttgtagtgcatccctgagcatgagcacagaatgaag

SEQ ID NO: 211856 - DNA, 90 bp, Homo sapiens
cagacagtgaacaaaggcagtctgttgaggcatctggacaccacacacatcatcagtctgattcttcagaaaagtgtgggcctcctccac

SEQ ID NO: 211857 - DNA, 96 bp, Homo sapiens
atggagccatgcgtgtgctgacagtttctccacagacactacccaaagcagtccttcactacagtggcagacagacctgaaaattttcatctgaag

SEQ ID NO: 211858 - DNA, 100 bp, Homo sapiens
agttgaagatggcaaagaggaagatgaagaggaggaaacagaaaattctctgggaccacttaatagtgagtcttccaaccagagcttgtgcagcgtcgga

SEQ ID NO: 211859 - DNA, 100 bp, Homo sapiens
ggcggggaacgactgcggcgcgctgctggacgaagagctctcctccttcttcctcaactatctcgctgacacgcaggaatgtatcctgtcaggtataatg

SEQ ID NO: 211860 - DNA, 90 bp, Homo sapiens
catgcccgtggggcaggattcggaaatctgcctgctgaagtctggagaactgatgaacctctggcgggaggtgacccgatacctgcggct

SEQ ID NO: 211861 - DNA, 100 bp, Homo sapiens
ggggcgtctgggcagcctacgctttccggcatagcgcgctggctaggactccagtaccgtgaagggaggcagtgagagcagacatctgtgcctcattcct

SEQ ID NO: 211862 - DNA, 80 bp, Homo sapiens
agacctgcggccggacgcttgcggaccgggcagccgatgaagtgcaaccttcacatgaatgggaatgttatcacctcaga

SEQ ID NO: 211863 - DNA, 75 bp, Homo sapiens
caaacgtcagtcgaatcacaggcaggagcaattctgtggtgttcttggtcacacatttatggagtttctgaaggg

SEQ ID NO: 211864 - DNA, 83 bp, Homo sapiens
ggagcctcagttggaagcagccgatccagcctgcggagcctgtggggcagaccctgtattcagtggatcagctggcaccaccc

SEQ ID NO: 211865 - DNA, 100 bp, Homo sapiens
gctgccagggacgtctgcagccattttgatttgaataaaaagaccctgtacaccctggtgaccaagagggattcaaagtttgtcccatgaggagcacccc

SEQ ID NO: 211866 - DNA, 101 bp, Homo sapiens
cgcggggtctgtgctgagaataatggcccggttggcccgggacgagtggaatgctgatgcttttttcaaagccgctataagccttgttccggaagttccaa

SEQ ID NO: 211867 - DNA, 75 bp, Homo sapiens
ccggcggctgtggaggccacgctcagctcgccaggcggcgcagggtaatgcatgccaggactgtgcaaagaggaa

SEQ ID NO: 211868 - DNA, 82 bp, Homo sapiens
cttcgatgtgcgagactttggaaaggtcatcttccacgatgttgctgtgctgacggataagctcttccccatcgtggaggcc

SEQ ID NO: 211869 - DNA, 100 bp, Homo sapiens
aaaatctgggctaagtgctggcaagagcgatgtctactacttcagattcatgatgttgctatcaaaagttgagaaattgtcagaagaaatcatggagata

SEQ ID NO: 211870 - DNA, 82 bp, Homo sapiens
cagggcctgcagcgggagctggacggcgagcgcgagcggcgcgagaaaatatggctcgtggacagcagaaaattcagtctca

SEQ ID NO: 211871 - DNA, 100 bp, Homo sapiens
ctgcaggaaacccaaggaccaagtttacatccagagcattccagttgttaatgaagaacacagaggtgatttttcctatattggaaatttgatgacaaaa

SEQ ID NO: 211872 - DNA, 82 bp, Homo sapiens
tttgacacaagaacagttggccaatactggtgcccaagcctggattaaaaagtggcccaggcacccctgaaaccaaaaacac

SEQ ID NO: 211873 - DNA, 89 bp, Homo sapiens
ggtcggagctgggcgcggagcccctcacagtgcagatggcagaaacggtggacacaagcgaaatggtcaacggcgctacagaacaaagg

SEQ ID NO: 211874 - DNA, 83 bp, Homo sapiens
gttttacgatttaaaacttcgccagaatttatgcttcttcagctccctcctcttcctccatgggcggtgcttgcagctccttt

SEQ ID NO: 211875 - DNA, 100 bp, Homo sapiens
atgcaatatagtagtacatcagacacaacctctttataacataagatgttacatcctgtccactgcagacaacgtattgactttgtcgctgcgatcatcc

SEQ ID NO: 211876 - DNA, 100 bp, Homo sapiens
tgggctgtctggagtttgatgaggagcgagcccagctgtgctccattgaagtgacttgtgaatcagccagtgtgatggctgcgacactggctaatggtgg

SEQ ID NO: 211877 - DNA, 100 bp, Homo sapiens
ggcacggccatcgccggctcggtggaggcggtggccagtactgtaagattgatgttaaaggcatggtgttcaccccacttcatcagcgtacataagttat

SEQ ID NO: 211878 - DNA, 75 bp, Homo sapiens
tttctggattctctacgggatctcatagcagattcaaatccaatgttgcagaatgaagaagagtctggagaacct

SEQ ID NO: 211879 - DNA, 75 bp, Homo sapiens
gcgaatatcgtcatcgttagaaggtgactgctggctgctggcagccattgcctccctcaccttgaatgaagaaat

SEQ ID NO: 211880 - DNA, 82 bp, Homo sapiens
atcctgctgggcttcgtccagatcgggaaggatctctgttgaggagctggcgcggaatctggtcatcaaggtcaacagggat

SEQ ID NO: 211881 - DNA, 51 bp, Homo sapiens
tcttattcctgcatcacagcaaggtcatcactccccaaaatggacgttacc

SEQ ID NO: 211882 - DNA, 101 bp, Homo sapiens
taattgcagaggttccagttgaccagcattcataggcatatgggtgattttggaagcattcatagacccggaattgttgttgactatcaaaacaaatccac

SEQ ID NO: 211883 - DNA, 100 bp, Homo sapiens
caccacgcagaacgtcaacaccaagtgcatcaccatccccagggacagtatgatttggtgaaatgcctggctcctattcgagaccccaagaccgagcagg

SEQ ID NO: 211884 - DNA, 75 bp, Homo sapiens
ctaaaatctccgcagctctggttcctgttgcggccgcacaacattctgaaattttttggttattgtaatgatgtt

SEQ ID NO: 211885 - DNA, 50 bp, Homo sapiens
attgtttgaagattccttccaacagagaccctgaaatatggcgtctggcc

SEQ ID NO: 211886 - DNA, 97 bp, Homo sapiens
atgaaacaggcacaactgagaaacttcttggccaagaggaagaccccaccagtgagatccactgctccagcatttaaatcaaacggtattgagatgg

SEQ ID NO: 211887 - DNA, 100 bp, Homo sapiens
tctactctgtcgctcttgtgccctagcaccccgagaaccgtcagtttgagccagatgtctagagaattgcagacactgcacaaccttcggaaactctttg

SEQ ID NO: 211888 - DNA, 75 bp, Homo sapiens
ctatgcctatgataactttggcgtgctgggcctggacctctggcagcctgcacgtggaatgggcgtccctgcagc

SEQ ID NO: 211889 - DNA, 90 bp, Homo sapiens
ggcagttggtaatattgtgactggtgatgatattcaaacacaggaggcaagtgaggcctatctggttggcctttttgaagacaccaacct

SEQ ID NO: 211890 - DNA, 75 bp, Homo sapiens
gcccagcgccgccgccccggacagcggccccgaagcgggcggcctgcactcgggccgaatacatcaagcaatggt

SEQ ID NO: 211891 - DNA, 100 bp, Homo sapiens
agttcacgtgactgtggatctcaagtactaccggccaactgaagtggaaggatcgagatcgagaccgggatcgtgaagatcggtctaaagatcgagaccg

SEQ ID NO: 211892 - DNA, 100 bp, Homo sapiens
tggagccgtctgcaaagtgtccccggcaagaagaatgctgagatgtataaactgtcttcagagcaattccatgaggcagcctcaaagatggagagcacaa

SEQ ID NO: 211893 - DNA, 82 bp, Homo sapiens
caccatgtcagacgcagccgtagacaccagctccgaaatcaccaccaaggtctcctctgagcctccggcctccataagaccc

SEQ ID NO: 211894 - DNA, 50 bp, Homo sapiens
gcaaagactgggctgcccgagaaggaggcatacacggaatacctgaggag

SEQ ID NO: 211895 - DNA, 82 bp, Homo sapiens
atgatcatgatacagttgataaaattgttgatgaacaagagaactgggcaacccatgatccacatctacctggacaaggaaa

SEQ ID NO: 211896 - DNA, 96 bp, Homo sapiens
ccactcgaacagatgtgagcgagaaagccgttgcctccagcaccacttctaatgctcggattctgaaggtaattttgagactcctgaagctgaaac

SEQ ID NO: 211897 - DNA, 100 bp, Homo sapiens
ccgcacaggaaaatctgccctgaagaggatcacctagcccgggtagaagaggcaatcacccgtatgcttgtgtgtgccctgaaaactgcagagaatccac

SEQ ID NO: 211898 - DNA, 83 bp, Homo sapiens
gtcgaacggggagccgagctggagctgccgcggcgcagccagatggacttcagcagaaatctttatgatattggggaacaact

SEQ ID NO: 211899 - DNA, 100 bp, Homo sapiens
actctccctgtggttaaagctttgtaaagatgtacttgctgcatcagctggtttcagatggagctctgcgatgctttgcatcactggctgaccgatttac

SEQ ID NO: 211900 - DNA, 89 bp, Homo sapiens
ggctaaggaaaccctattacctccaggtcacggtctagatcacattctcgatccagaggaaggcgatactctcgctcacgcagcaggag

SEQ ID NO: 211901 - DNA, 91 bp, Homo sapiens
cagcccttccaggaggaccagcaagggctctgtgtgcccaggatgcgccggcctccagatttctccacccaggtgaactcctccctcacct

SEQ ID NO: 211902 - DNA, 100 bp, Homo sapiens
cccggcgccgaggcggccacccgagacgcggcgcgcacgctccggcctgcgttattagaggaagtaacacaaggggatatgagtgcagcagacacatttc

SEQ ID NO: 211903 - DNA, 100 bp, Homo sapiens
ctgggcgtcttcccaggctgtcatataactcctgagaatagtggttcttaactcttgatggtgttgaactactccagatggtgaaggcaccagattccaa

SEQ ID NO: 211904 - DNA, 75 bp, Homo sapiens
aaatttcctagaagcttgcagaaaaattggtgtacctcaggtggttgaagatggatatgaattttttgcaaagag

SEQ ID NO: 211905 - DNA, 146 bp, Homo sapiens
ggcaggatgaaagtgagcagtccagaaagcggcttatcgaacagagccgggagttcaagaagaacactccagagatcgcccaggaccacaccgcagcgtaactgcaggcctctcagcgaaaaagggggaaagcaaagacccgggtg

SEQ ID NO: 211906 - DNA, 88 bp, Homo sapiens
cgcgcctgatgggtcgaggcggacgcgcggctgcgtcaggtgccgtgagcgatgtggagatgcaggaacactatgatgagttttttga

SEQ ID NO: 211907 - DNA, 83 bp, Homo sapiens
gccggttgcaagcagatactggtgccttatctgacgaagcaagtggaacttctacggcagatgaacgaacaacatgcaaaggt

SEQ ID NO: 211908 - DNA, 97 bp, Homo sapiens
gaggagctagggctggagcctctccagcctcccgcgaagccctcgagcatgttccaaactcggttcgcttgtggaaagcagccgttgagctggaaga

SEQ ID NO: 211909 - DNA, 75 bp, Homo sapiens
ggacggcgacgcagcccgcggcagaagactagacgcttgaagcaaagctgccatcccagaagacgacatgctctc

SEQ ID NO: 211910 - DNA, 90 bp, Homo sapiens
agattcagtggatgctaagccagaccggtcctcgtttgtaccgtccctcttcaggaaagaccacagcaagattctttcattcgtctcctc

SEQ ID NO: 211911 - DNA, 100 bp, Homo sapiens
ctcgtggcccgctatctctgctcctgtcccccaggaacgctgggaagcgtcagcccccgtagcacctctgttaccacgacttctagtgcctctgttacca

SEQ ID NO: 211912 - DNA, 100 bp, Homo sapiens
ctggggtataccgttttagtcttgggggtagagtgactgcttgcgaaccagttcagcagtgcctcagcttgaagaagtcatggaaaaagaaacttacaag

SEQ ID NO: 211913 - DNA, 100 bp, Homo sapiens
ggcagtacgcggggacccggctgcggtggctgcgggactgacgacccagaagaatcagtgcggtttctgtggcagagcgagttgcatttgaaagaggaga

SEQ ID NO: 211914 - DNA, 90 bp, Homo sapiens
tccgtcccgacccgggccccgccatgtccttcttccggcggaaaggcctgtctcctccctcctacacatttccagctcctgctgcagtta

SEQ ID NO: 211915 - DNA, 82 bp, Homo sapiens
cgagtatctggtgaagtggaaaggatggcccccaaagagccattccgtagtgccatcccgagcaacgcactgctgcagcttc

SEQ ID NO: 211916 - DNA, 73 bp, Homo sapiens
gagaatgcgagagaaagagcctccgtcaccacatagctgaaggtgatgtggccgccctcaaccgacgcatcca

SEQ ID NO: 211917 - DNA, 90 bp, Homo sapiens
gctcccatcattgatgtggtgcgatcgacgcatcttctctccagactgccgatcccagaaagccaggtgatcaccattaaccccgagctg

SEQ ID NO: 211918 - DNA, 50 bp, Homo sapiens
cggctcctgtgacttcaagtgtcgctccttcccgaactcacaaatcctga

SEQ ID NO: 211919 - DNA, 98 bp, Homo sapiens
agtcccagccagccaagtgacgctgacattaaggaccagccagaaaatgattcattccacttaaaacctgaaaacattggaccacacaaagtcttact

SEQ ID NO: 211920 - DNA, 101 bp, Homo sapiens
gtcggtgtggtgtgcagcgacaaaaggattcctgggttcaaatttgacaattcgttgatcaaccagatagagctgctggaagtgaacaagcagtgggacca

SEQ ID NO: 211921 - DNA, 82 bp, Homo sapiens
aacttcgctgtggtgaagctggggcggcaccggatcaccaagacggagattttctggcatccttaaatcttgtgtcaaggat

SEQ ID NO: 211922 - DNA, 90 bp, Homo sapiens
ctgggcatgcctgcagtactcttggcccatggacctgaaggagaagcacctgttgggatgtatacaaaagtggcggtcaacatggagttg

SEQ ID NO: 211923 - DNA, 99 bp, Homo sapiens
gttggctgaggcacaccagcaggagtgctgccagaaatttgaacaactttccgaatctgcaaaagaagctggtcttttgggatcctgctctatgagatg

SEQ ID NO: 211924 - DNA, 100 bp, Homo sapiens
tgacatgcagttgtccaaaagtgaaattttacgaactcagaattctaccaaatatctggctgggtagctgccctcgtcaggtggaacatgtaaccatcaa

SEQ ID NO: 211925 - DNA, 99 bp, Homo sapiens
tggggaaaatctccccggtgactttcaggtgctcagagccagaccctggtttgaggagccccccaaggctgtggaactggaggggttggcggcctgtga

SEQ ID NO: 211926 - DNA, 100 bp, Homo sapiens
gtggagccaccagcctctccctggacctcagcagccatgtcgaagccccatagtgaagccgggactgccttcattcagacccagcagctgcacgcagcca

SEQ ID NO: 211927 - DNA, 98 bp, Homo sapiens
atacaaatttaagctttcaaaagcagaacaggatataactaccttggagcaaagtgttcgggatgagtatcggcaggactacgatgctgggagaggag

SEQ ID NO: 211928 - DNA, 100 bp, Homo sapiens
aatttgtctgcaaacctggagccagaaacattaccgtcatattccacccattactaagacaagttggatggcttgaggactggtactaaaaggaaacgtg

SEQ ID NO: 211929 - DNA, 74 bp, Homo sapiens
ttctggaaaacgcccagagatttaatcaggtgtatgtggaatttgatgatcttgaatgggataaacgagagtgg

SEQ ID NO: 211930 - DNA, 82 bp, Homo sapiens
cgagaaagaacatcctctttaacccagttcccaccctcacagtcaggctgtctgtccccagaccccagagcacgtccggcac

SEQ ID NO: 211931 - DNA, 98 bp, Homo sapiens
acatgctagaattacctggaacttcatcatcatctacttcacaggaattgccatttgtgcatgaatacctcagaagtaaactctgttcactgtatgaa

SEQ ID NO: 211932 - DNA, 90 bp, Homo sapiens
ctgctggttagtgtgctctgagggagggtccgagccagccgctgttttgccggaggagcccctcaggccctcttttggtacaccagaagg

SEQ ID NO: 211933 - DNA, 100 bp, Homo sapiens
ctcaccatcagcaaccatgatgagttctctggtgatgttgatagcctggaactgggggacatggtcgagtatagcttgtccaaaggcaaaggcaacaaag

SEQ ID NO: 211934 - DNA, 90 bp, Homo sapiens
tggatttcctaatggaaaatggtgtactttctgatcggagctgtttaagagttacggctggtcccacctcactggatcttgatgttaatg

SEQ ID NO: 211935 - DNA, 83 bp, Homo sapiens
gcaccggggaagccgaggcggagaagccgcgcgcgcctcagaagctcccggacgcccagcatggacaccacgttgctgaaaac

SEQ ID NO: 211936 - DNA, 100 bp, Homo sapiens
atggctggaggcctctgttgtaggcaagatcaacaaagaaccctctagtctgaagtcttctgataccaacatctttgatagtaacgtgccttcaaacaag

SEQ ID NO: 211937 - DNA, 50 bp, Homo sapiens
gacggggtctggaacctgcagaatgaggccatacaggcagcccatgatgc

SEQ ID NO: 211938 - DNA, 74 bp, Homo sapiens
ttataatgttccattgccaaagaaatcgatcaactggtgagactgcagtcagtgcttttgagattgacaagatg

SEQ ID NO: 211939 - DNA, 100 bp, Homo sapiens
aagctcttaagcatcgtggcgctggtggggggagtcctcatcatcatcgcctcctgcgtcatcaacttaggcgtcattttttgagaccagtactgttata

SEQ ID NO: 211940 - DNA, 119 bp, Homo sapiens
caaggatgaagaagtcaaggttgcccccaggcggtccttcctggaacactatggctatgcatcctccaacgtcagccccgccctgccgctccccacggcgcactccaccctgccggccc

SEQ ID NO: 211941 - DNA, 82 bp, Homo sapiens
ctcggatgtctgggatctggccactaccgcaggctcgagacaacccaggtgaaatagcccaatttttggtatgtgctcatag

SEQ ID NO: 211942 - DNA, 101 bp, Homo sapiens
ggaaggggcagtacaagcttacgtctctgctcttcagtacaatcctggatctgttccaaataaattttatgttcacaatgatatgtttcgttatgaagatg

SEQ ID NO: 211943 - DNA, 51 bp, Homo sapiens
tggtcttattaaacgctttatgaaagcacttgcacctcctgcgccgccgcc

SEQ ID NO: 211944 - DNA, 100 bp, Homo sapiens
gcggcagcagcagcggtagctgcccaaggagctttttggagaccacggcatatttcttcatgaaaccaaaacttggagagaaggaggtgtccccaaatgc

SEQ ID NO: 211945 - DNA, 100 bp, Homo sapiens
gccctctagggagacgttccctgcctggtactaggttttgacaagcttgcatcatgcgtgagtataagctagtcgttcttggctcaggaggcgttggaaa

SEQ ID NO: 211946 - DNA, 51 bp, Homo sapiens
ccacatgaagtgttacaagtgtgagatgaagatgacgccaacagactcggg

SEQ ID NO: 211947 - DNA, 74 bp, Homo sapiens
gactacaagcatcactggcaagattgagtggggagcttgtgcacttgttctcacaggaaacacagtcatctttg

SEQ ID NO: 211948 - DNA, 100 bp, Homo sapiens
cgccgccgcttgtgctgcagccatgtcaagagaatccatcccattaaatgacctgaagtcagaagtatcaccacggatttcagcagaggacctgattgac

SEQ ID NO: 211949 - DNA, 99 bp, Homo sapiens
atgagcaacacagccttgtcccgggagcttaaggatgaaaactttcggaagagaaagttgcctgtggtaagttcagttgttaaagtaaaaaaattcaat

SEQ ID NO: 211950 - DNA, 75 bp, Homo sapiens
ggcggaagacagtgagctgttcgagctggattattgcctcaaagtgaaggactaccagctggtccagaagggagg

SEQ ID NO: 211951 - DNA, 75 bp, Homo sapiens
ggcggaggcgcctcctgtctcaggagccgggtgtgggctgagccctgcctgattgatgctgccaaggaggagtac

SEQ ID NO: 211952 - DNA, 82 bp, Homo sapiens
tcaatatctgtcttcggtggactccttcggcagtccacccaccgccgccgcctcccagcacaggaagtcctggagaacctga

SEQ ID NO: 211953 - DNA, 74 bp, Homo sapiens
ctgttcgacgtgcggcccgaatgccagcgcctcttctaccggggcaagcagcggaaggagagttttacatggaa

SEQ ID NO: 211954 - DNA, 75 bp, Homo sapiens
tgggaaaccacgcaggcaaacgagaattaaatgccgagaaggccagtacgctgggttaacaactttggccatgaa

SEQ ID NO: 211955 - DNA, 90 bp, Homo sapiens
gaagaattagattttctgctttaactgccgcctcacctgtggagctctgggtacaggcttcccagctggcgtgtatgttgtaaagagagt

SEQ ID NO: 211956 - DNA, 75 bp, Homo sapiens
gccttgttgatccttaacgagctggtccgaatcagcagcatggagggagaggaactggttcagacagtaagtttg

SEQ ID NO: 211957 - DNA, 83 bp, Homo sapiens
ccagcatatacaaaggcatggaagtatgaaaatggaacgaatgatcacacactttgaaaggtccaaaatggagtaaggaatgg

SEQ ID NO: 211958 - DNA, 101 bp, Homo sapiens
atagaatcctgcaaacttgtgagagacaaaattacaggcgacagccctgtactgtgtctgaaattttccatttttgttgggtgctttttatatatgcaaaa

SEQ ID NO: 211959 - DNA, 98 bp, Homo sapiens
gaattcctggtgactggaagggggagtgactcaggccctcaacctctagcagaaactggcgatggaatatgagaggagccctctggaaagaaaaggac

SEQ ID NO: 211960 - DNA, 100 bp, Homo sapiens
ctgctgtcccgggcctaccccctggactccctggagaagcagatggaaaagctctctggcctgacaaccaatgttgtggacattattttggctcatcact

SEQ ID NO: 211961 - DNA, 101 bp, Homo sapiens
tgggcacatctttctggagaatcacttttactacaagatttgtaagaaacaaatttatttccaagggattgtcaatgaggcagatcagattccgatttgac

SEQ ID NO: 211962 - DNA, 100 bp, Homo sapiens
gttgtagtagcaggagccctctatcttttgttctctggcatggaaggggtcctcagagttactgggtcaccaggagactaaagtccatcaaaaacatcca

SEQ ID NO: 211963 - DNA, 87 bp, Homo sapiens
ctgaccccattcagctttgagaactttcagtcccaagttactcaggtgatagagggtaatgagagatccaaacaccaagcgctccag

SEQ ID NO: 211964 - DNA, 75 bp, Homo sapiens
cctggggctgtgctccatggcgagctggttggaactgataatgggagagaagcaattgaaagtggggctgcattt

SEQ ID NO: 211965 - DNA, 50 bp, Homo sapiens
tgccagaatggtgtttgaaaagaggcggggtttcaccatgttgcccagac

SEQ ID NO: 211966 - DNA, 99 bp, Homo sapiens
attcgcagtggtcgcttcttctccttgctgtcggaaaaggtaacagaagatggaactcgaaatcccaatgaaaaacctacccagcaaagaagcatagct

SEQ ID NO: 211967 - DNA, 82 bp, Homo sapiens
ggaggtcacccgcgtgctaatggtggaaacccacaacggtttactgctagaccactagtggaaactatatttgaaaggggaa

SEQ ID NO: 211968 - DNA, 100 bp, Homo sapiens
aaagcattctgtgaattggctgactccacttctatggtgagagagaggagtgcatcaaagattactcccagggtgtacaactatgagcctttgacacagc

SEQ ID NO: 211969 - DNA, 50 bp, Homo sapiens
gtttccacgactttctgggagactcgcagaagattttcgcaagctctgga

SEQ ID NO: 211970 - DNA, 74 bp, Homo sapiens
atcgttggaaacaacggagttctcttttctgaatctgcaaaaaagcaattaccagctctggctgggtcgccaca

SEQ ID NO: 211971 - DNA, 100 bp, Homo sapiens
gcaggacctctacgtcttccaccgggctggattgctcaacataagcagtactataatggatgtagacagcacaatttccagtgggcgttcaactccagca

SEQ ID NO: 211972 - DNA, 100 bp, Homo sapiens
agactctgaagatgatcagacaaggcaaagcgaaattggtcattctcgctaacaactgcccagctttgagatccctttgggcgtcccacaagcttcgcct

SEQ ID NO: 211973 - DNA, 74 bp, Homo sapiens
tgagaagagcagcaagagctttacctatctataccacatcagcttcaaaaatacaaaattggacagctgtacat

SEQ ID NO: 211974 - DNA, 83 bp, Homo sapiens
cgacaagccgctggcagccgcggatctcaccgccgctcagggtgaaaattgatttgcaagtgaccatgcctcacagctacccc

SEQ ID NO: 211975 - DNA, 100 bp, Homo sapiens
tttactctaaagggtggcctggagcacggagaaccattaatcatctctaagtctcaacagatcaccccccaacttgcccttcaagttctacttcagtttg

SEQ ID NO: 211976 - DNA, 75 bp, Homo sapiens
cgcagtggtcgcttcttctccttgaaccatgtgtgctcagtattgcatctcctttgctgatgttgaaaaagctca

SEQ ID NO: 211977 - DNA, 100 bp, Homo sapiens
tatcgggtggcggctcgggacggaggacgcgctagtgcacctcattgtgaacatgctttctgcaacgcctgcatcacccagtggttctctcagcaacaga

SEQ ID NO: 211978 - DNA, 100 bp, Homo sapiens
cacgaccacaccgctgatgaagacaaggactcacagtggctgcaaggttatgaagacagtatggagtttccagaccatagtagacatttgctacagtgtc

SEQ ID NO: 211979 - DNA, 97 bp, Homo sapiens
taattctaagccagactgctggagatcaccctgttctagtgtgtggaggcttccaccaggagaacatgttcttcaagtatacatggaataacttttt

SEQ ID NO: 211980 - DNA, 90 bp, Homo sapiens
aggaggctaagaaagtggtgaatcccctgtttgagaaaaggcctaagaattttggcattggtgtcagctgtgatgcatgtttaaaaggaa

SEQ ID NO: 211981 - DNA, 102 bp, Homo sapiens
cgaaggtggaactgcagcactgtggataacacctctgtttttggcagggtgatgcagatagcaagatgagtatcatatggttcatctagtatgtacttctcg

SEQ ID NO: 211982 - DNA, 96 bp, Homo sapiens
gcattggctgtacctgaaacttatggtggcctagactccccagtatccactcttccttatcttgctcagggagccaatggtactctggagaaccca

SEQ ID NO: 211983 - DNA, 100 bp, Homo sapiens
agtcacttctgattaccatgggagtcttcaggaaaaaggcaagttatcagctgaagaaaatcccgatgactctgaagttccatcatcatcaggaattaac

SEQ ID NO: 211984 - DNA, 100 bp, Homo sapiens
tgagaaggtcaaggtggaggtgaagaagtttgtgaagatcggccgcccgggctacaaagcccagacgcagctgagtcggaagctcccggggacgacgctg

SEQ ID NO: 211985 - DNA, 99 bp, Homo sapiens
attcgtgtctggctctggaattgctactgctgcctctgtcactcctggtgaccagcattcaagaaactaatctggattcactccctctggttgataccc

SEQ ID NO: 211986 - DNA, 82 bp, Homo sapiens
ggcggctggaccacttctctgtcgacggctatgacagttctgccccctcggaaaaccacactgagagttgcattaaaaacca

SEQ ID NO: 211987 - DNA, 50 bp, Homo sapiens
aagaggatgatgtttttggtgaagttcccagtgacctgacagcagaggag

SEQ ID NO: 211988 - DNA, 74 bp, Homo sapiens
ggcagtatagagacgtcggacttcacgagctggtgagtgaagagccctttgtggtgaagctacggtttgaacct

SEQ ID NO: 211989 - DNA, 87 bp, Homo sapiens
ggcatgggttaccgctgctgcccctgctgtcgctcctggtcggcgcgtggctcaagctaggtccaagttgccacattgcttcattaa

SEQ ID NO: 211990 - DNA, 100 bp, Homo sapiens
cggagacatggccaacatcgcggtgcagcgaatcaagcgggagttcaaggaggtgctgaagagcgaggaggaactgatgatgttgtaggccctgaaggca

SEQ ID NO: 211991 - DNA, 83 bp, Homo sapiens
aggccatcaccacgcagaacgtcaacaccaagtgcatcaccatccccaggactgaatgtgggcccagttggcgtcattctgct

SEQ ID NO: 211992 - DNA, 98 bp, Homo sapiens
gcgccattcacttttgaagggaatttctgcccagatagtgtctgcagctctggatagaacttatactggcttgcagactcttggagcagagacggtag

SEQ ID NO: 211993 - DNA, 98 bp, Homo sapiens
ctccatcgcgcgcacggcagcctagcgcaatgaggcgggcagcactgcgacaaatttacatgtattggagaccagaccagaagcccttctgaattaag

SEQ ID NO: 211994 - DNA, 98 bp, Homo sapiens
gctcagcaagaaccagagcatggggaagacactattgctaaagtcaaaggggtggcactgaatcaacaagacaagcaactcaattgattaatgctttg

SEQ ID NO: 211995 - DNA, 75 bp, Homo sapiens
tggagtccatcttccacgagaaaaacactggaactattttggggctgatgagaatcttggtccagtggctgtgag

SEQ ID NO: 211996 - DNA, 100 bp, Homo sapiens
cctgaaggagtacatgccctttatgaagatattcttgaggttaccgagctgatacccagacataccagccttataacaaagactggattaaagagaagat

SEQ ID NO: 211997 - DNA, 83 bp, Homo sapiens
ccagttcaaaagcctacaaaatctgagactgtcattgcttttataaggtgtgatccctcacatccacaaatctctgattggaa

SEQ ID NO: 211998 - DNA, 100 bp, Homo sapiens
aacctggcatatctgggcgccaagccgcggagcctccagacggggggatatgagactttctactcggaatatcctgagtgttgcgtggatgtaaaaccca

SEQ ID NO: 211999 - DNA, 50 bp, Homo sapiens
gctgcagctgatatgcaacttcaggtcttactcatccagttccactgaag

SEQ ID NO: 212000 - DNA, 74 bp, Homo sapiens
ggatgctccccatggagttgcaaattccgggtagatatgcctggctcaggcagtgcattcatccccaccatcaa

SEQ ID NO: 212001 - DNA, 87 bp, Homo sapiens
gattcgcagtggtcgcttcttctccttggcaaatccagatcccaacacttgccttggagtgtttggcctcagtttgtacacaacaga

SEQ ID NO: 212002 - DNA, 101 bp, Homo sapiens
gcggcggcgagcgctcgcgagcggctgcgggacgcgaggtttccggggactttgaacatgtcggggatcgccctcagcagactcgcccaggagaggaaagc

SEQ ID NO: 212003 - DNA, 83 bp, Homo sapiens
ggcagcgacagagccaaaatcagagctggaacctgaggagagaggatggatttgtgtttcggattcgcgtggcctatcagcgg

SEQ ID NO: 212004 - DNA, 100 bp, Homo sapiens
ctggaagatgctatttcaccaaaatctgcaaatgtaaactgaaggacatcgcatgtttaaaatgggcacctcaacacctttgcttcgaatagcctgggct

SEQ ID NO: 212005 - DNA, 103 bp, Homo sapiens
cagcatggcatttcagtcactggtttgcagagtccagggtgtccgcaatgttgccagtgtctgtctgcagattggctacccaactgttgcatcagtaccccat

SEQ ID NO: 212006 - DNA, 100 bp, Homo sapiens
acgacccatacatgtcaaatggatctctttctccacccatcccgagaacagtcacagccaggggctttgggccgctgttacagtttgcctacactgccaa

SEQ ID NO: 212007 - DNA, 82 bp, Homo sapiens
ccatggccgccgccgatgccgagtggaagatagatgataagcctgtaaaaattgacaagtgggatggatcagctgtgaaaaa

SEQ ID NO: 212008 - DNA, 75 bp, Homo sapiens
gaagcagaacccatagaactcgtggaaactggttccagaatctcagcttttacctggacagaggtttcaaactaa

SEQ ID NO: 212009 - DNA, 51 bp, Homo sapiens
gtcttacagccgctggagctatgacagatttctcacattggcaaactgaga

SEQ ID NO: 212010 - DNA, 98 bp, Homo sapiens
gatcccggcctgagcaagcggccgcgcactgaggaggcggcggccgacggtggcggcgggatgcaggaaatgcaacctcaccacaagtacaaagacca

SEQ ID NO: 212011 - DNA, 50 bp, Homo sapiens
agtctctgcacctcgcgccccagcaggtctagatgttgatggaatatatc

SEQ ID NO: 212012 - DNA, 100 bp, Homo sapiens
ggatactttgatgacctatgttcaagatcaaaatgaagactgcctttacttaaacatctatgtgcccatggaagatggtctcagccaatttcttctccag

SEQ ID NO: 212013 - DNA, 104 bp, Homo sapiens
cccgggaggaaggaacgaggcaaggagctaaagcagcgtgcgttcagccctgggttccaatgacaggatttacacagagagcaactattgatccagaactgaat

SEQ ID NO: 212014 - DNA, 82 bp, Homo sapiens
ccacacctacagggcaaccatgaccgaggagagctctgacgttcccagggagttgataggttgtatcagagtaagatggacg

SEQ ID NO: 212015 - DNA, 100 bp, Homo sapiens
agaagcatcaaacctggttcgaatgagaaaccagtcccttggacagtctgcaccttctcttactgctggcctgcccaataggggcacaaaacgtccccgg

SEQ ID NO: 212016 - DNA, 101 bp, Homo sapiens
ctccgagtgccagtgggagcggatccctgagctcgtcaagcagctgtcggccaagctcatcgccaacggtaaataaaggtgacatcctggtggttgcaact

SEQ ID NO: 212017 - DNA, 96 bp, Homo sapiens
tcagacaaagatacagaagcccctcaggtctgtgaatttctggtacgtgctggtgatgaatgatgagcacacagagaggcgatatctgctgttttt

SEQ ID NO: 212018 - DNA, 74 bp, Homo sapiens
aaaataaccacttaccccttctcaccgaggaagagcgggagaaaggttaatgaaggagttcccccttctgagta

SEQ ID NO: 212019 - DNA, 90 bp, Homo sapiens
ctgctactggtcagtcaacccagaggatccccagtatgcatctcaagatgtggcaaaatgggcatatcaagtttttgaccaaaggagata

SEQ ID NO: 212020 - DNA, 75 bp, Homo sapiens
cggcaagagcagcgggagcggcgcggggaagggggcggtgtccgcagagcagattcatgttacatgtaaagctgt

SEQ ID NO: 212021 - DNA, 109 bp, Homo sapiens
ggactaattgaagaaaaaagtaaactacttgaaaaatttagccttgttcaaaaagagcatcagacaacagtcagcgctttcgagaaacctgttttgcatttgccttgac

SEQ ID NO: 212022 - DNA, 75 bp, Homo sapiens
aaagggagcattccgatcatctgaggaacagcagatggacggagaggggttgcttaacgaagaattgccaaattg

SEQ ID NO: 212023 - DNA, 96 bp, Homo sapiens
gtttaactactcaggttgccgatttaaaattgcaactgaagcaaactcagacagacgaagttatacggaagcgtctcctcattgatggagatggtg

SEQ ID NO: 212024 - DNA, 90 bp, Homo sapiens
ctgtactggctattggaaggaggagattctgaagataaggaggactcctcctatttatggagcaggcacccaacatggctgagccccggg

SEQ ID NO: 212025 - DNA, 51 bp, Homo sapiens
tctggctgatgatttgaaaattgacaaggatctgctggaacctggctgctc

SEQ ID NO: 212026 - DNA, 82 bp, Homo sapiens
gccgatccagcctgcggagcctgtggggcaggtatcttacacatcttggtttttggacgccttcaactatgccattttaaag

SEQ ID NO: 212027 - DNA, 100 bp, Homo sapiens
agtcagcacaaatctgaagatggtgtcaaagagaaattctggaacttttcacacctgagtgcaaattcaaagaatcagtgtttgaaaattattatgtgac

SEQ ID NO: 212028 - DNA, 118 bp, Homo sapiens
gtccttctgtcggttggtcctggagcggcgcagccggagtggggccgtgaggcagaggtggaggagacactgaagcgactgcagagccagaagggagtgcagggaatcatcgtcgtga

SEQ ID NO: 212029 - DNA, 100 bp, Homo sapiens
catggcaggaagagccagcagtaaggactggaaaagaagcattcgctacgcgggccgacccttgcagtgcctcatccagcacctggccacattcatcatg

SEQ ID NO: 212030 - DNA, 90 bp, Homo sapiens
caagactctcttcgctctttgcatcttaactgcaggtttgttacagaaggagaaagtggcagttgaagcatttcagatttgctgccttct

SEQ ID NO: 212031 - DNA, 100 bp, Homo sapiens
gacctccaaaggcaccagaagacttttctcaaaactggaaggcgctgcaagaggtggaagaactgagtaagaaactggctgactctgaccaagccagcaa

SEQ ID NO: 212032 - DNA, 100 bp, Homo sapiens
cagccgtgttgagtgaagctcttggggccagcgtgcgtcctgacgcacaggagagagctgaaggccaaggtgatccgtgacaagcgcacaggcaagacca

SEQ ID NO: 212033 - DNA, 100 bp, Homo sapiens
tgggcgttcatgatcctggccagcctgctcatcgcctactgcagtccggcctctttggcctacccccgttggctccgctgccccaggtcgatgagtcccc

SEQ ID NO: 212034 - DNA, 75 bp, Homo sapiens
gatgcatgctgatggcgataagtcattaccacagatgtaaccttctgtaatggaagatgattgaagacaaggggc

SEQ ID NO: 212035 - DNA, 75 bp, Homo sapiens
cttgcacgaaagctttcctaggccaaaaagagcaagaggtggaaacatacagaagaagcaaggaaattacagtta

SEQ ID NO: 212036 - DNA, 98 bp, Homo sapiens
ccgccccgggcaccgcggtgctgctggtcacggccaacgtgggctcgctcttcgacgacgtttacccaaggtccagcctagcccctaggcaccatgtc

SEQ ID NO: 212037 - DNA, 90 bp, Homo sapiens
ccgagtgttccatgaaagcattctcctggccattgcccttctggaaggaggcaacaccaccatccaggaacaagactgccaatggagact

SEQ ID NO: 212038 - DNA, 75 bp, Homo sapiens
gggaagcaccgagactctagaagaaatgccctccgggtcacaggataaggttggtgatgacaaaactgtgaagca

SEQ ID NO: 212039 - DNA, 74 bp, Homo sapiens
gcggggtccaggtggaggtcttgaggctatcagatcggtgaagacattcagtgaagcttgcctgatggtaagga

SEQ ID NO: 212040 - DNA, 100 bp, Homo sapiens
tcaaagtcccccgtggtcacatctgggttgaaggtgatcatcatggacacagttttgacagtaattcttttgggccgaattcccttcttcaagttctgct

SEQ ID NO: 212041 - DNA, 83 bp, Homo sapiens
cttggactgagtcctgcaggacacagctatgagactctgcacggaggagtgcagggtcctgggacactctgaccagtgctgga

SEQ ID NO: 212042 - DNA, 98 bp, Homo sapiens
cactcaacaagtagaaacgtgagagaagaaaaaacacgctcagagataaccttgaataaccctataccttccaatttgaaatcagaagcaaaaaaggc

SEQ ID NO: 212043 - DNA, 100 bp, Homo sapiens
aatcgccatggagtttgtgatgaagcaggctctaggaggtacaccaggggttggaaaaaccacactaggcaaagaacttgcgtcaaaatcaggactgaaa

SEQ ID NO: 212044 - DNA, 71 bp, Homo sapiens
gagttatgagaatgtggactcactggccctgccagccaagttcacagagggtctgaggaatgaagaggccg

SEQ ID NO: 212045 - DNA, 90 bp, Homo sapiens
tgcagaagcctgtagaaaacaggaagaatttgatgttgccaacaacggctcttctcaattggaatttggagctggagacctacaggggcc

SEQ ID NO: 212046 - DNA, 112 bp, Homo sapiens
gcggggacccggctgcggtggctgcgggactgacgaagagaagaagaaggaggttcctgctgtgccagaaacccttaagaaaaagcgaaggaatttcgcagagctgaagatc

SEQ ID NO: 212047 - DNA, 74 bp, Homo sapiens
acgttgcaaaggcgcttaatcggcctccaacgtgtatttgtaggcaaaataccaagggatttatatgaggatga

SEQ ID NO: 212048 - DNA, 93 bp, Homo sapiens
gagcggtacatcgcctcggtgcagggctccaccccgtcgcctcgacaggtgctggagaatctggtaaaagcaccattgtgaagcagatgagga

SEQ ID NO: 212049 - DNA, 98 bp, Homo sapiens
tgaagctgtttcgggccagcgacccgctgctcagcgtcctcatgtggggggtaaaccactcgttcaagacccggcaggccccctaagcgttctttggg

SEQ ID NO: 212050 - DNA, 100 bp, Homo sapiens
gaagaaaacaaagatgatgataatgttttcagcagcaatttgccctcagaggaattacatgaacgacagccttcgcaccgacgtcttcgtgcggttccag

SEQ ID NO: 212051 - DNA, 80 bp, Homo sapiens
gaggggccccagcagcccccgaaggccctatcaggacatggagtatgaaagacggtgggaagcctcccctcccagcggag

SEQ ID NO: 212052 - DNA, 51 bp, Homo sapiens
gtcgcaaggtcgctgagcaggacccaaagcgtaccagtaatgttcgatcca

SEQ ID NO: 212053 - DNA, 120 bp, Homo sapiens
caaagtgcttctcaagtacacggagtacaacgagccgcatgagagccggacaaactcagacatcgtggagtctgtgaatttctggtacgtgctggtgatgaatgatgagcacacagagag

SEQ ID NO: 212054 - DNA, 87 bp, Homo sapiens
gaagagatagcgacttgccccagtccaaccccagagcggaaaaatggctactggacaggatcgagtggttgctctcgtggacatgga

SEQ ID NO: 212055 - DNA, 99 bp, Homo sapiens
ctgtcactgtgaaggtggtcatcatcccgccttttgaggacggcactccccggagccagccatacgtcgtgtgccggcagtgtcctgagtacagaaggc

SEQ ID NO: 212056 - DNA, 76 bp, Homo sapiens
gttcgggtgtctcgtgtgtgaacatcacagaaaaatatgtcgtaactgcaagtgtggccaagaagagcatgatgtc

SEQ ID NO: 212057 - DNA, 96 bp, Homo sapiens
ttcaatgccagaatggtgtttgaaaaggacctggacccttcccagggatcattgacatctttggtattggagggggcctcttggaatatcgagcca

SEQ ID NO: 212058 - DNA, 80 bp, Homo sapiens
ccgggcctcccggcctctccccgccggcccgcgggctcgccgtccggcgcagggcagcaatcccacagagtattgatgag

SEQ ID NO: 212059 - DNA, 83 bp, Homo sapiens
atttttggacctgaaacagaaattctggaacacctatatggcaaaatttggtttctctaatattactggaattgattactctc

SEQ ID NO: 212060 - DNA, 100 bp, Homo sapiens
ggacgccagcatcatacaccggctgttcgaggccttgactgtagaatatcactttcctgattcctggtttctacagctacatggaccttgcgtacaacag

SEQ ID NO: 212061 - DNA, 100 bp, Homo sapiens
ctcctcagggttccctgtgctgccacttttcagccatggccacaaggttctatttcaccaattggcatggaaccaacgacaatgagcagtcagtgtggcg

SEQ ID NO: 212062 - DNA, 75 bp, Homo sapiens
aagaagatcctgctgcccgagcccagggcgccctgcgtccggcagaggaggcgagcatcccgctcaggtgatgag

SEQ ID NO: 212063 - DNA, 100 bp, Homo sapiens
caacaatgtctcagcctttcagccttaccaagcaacaagtgaaattgaggtcacaccttcagtccttcgagcaagtgccgacgccaccgccgagcccatg

SEQ ID NO: 212064 - DNA, 75 bp, Homo sapiens
cgctctggaagacattgaacgggaaatcggcgccatccttcagaatgcagcaattaccagctctggctgggtcgc

SEQ ID NO: 212065 - DNA, 100 bp, Homo sapiens
tactcgggcgccttcgtctgcctggagattgctctagaccaagatagaacagcccttcagaaagtgaagaagtctgtaaaagcaatatataattctggtc

SEQ ID NO: 212066 - DNA, 98 bp, Homo sapiens
taaagatgtcaacggtcaggagtccactcctggaattgttccagatgtatcaccttttgccatgatagcatttctttcattggacagttccttacaag

SEQ ID NO: 212067 - DNA, 100 bp, Homo sapiens
gaaggcggcgcttattggtgttcaccaaaacaccagcatggtgtaccagctttggctagatgatgctcagtgttctaagaacggaagcatctgggctgga

SEQ ID NO: 212068 - DNA, 75 bp, Homo sapiens
cagagaccgtgaagattccaagttcaggagaactcgaccgctctgcgtacgtgtcctatgggggcctgctcatga

SEQ ID NO: 212069 - DNA, 100 bp, Homo sapiens
ccagcgccggcctcctccgtgcggagaagaagctgcggccgcacctggccaagctatccgtggtcctgaaccagttatgtgtgttgcatgagaaaacgcc

SEQ ID NO: 212070 - DNA, 100 bp, Homo sapiens
ctggccatcagagtcaccaaccccaatgccaggctgcgcagtgaagaaaatgaattgtcctaaagcagttggatgggaaaagaaccagaaaggaggcatg

SEQ ID NO: 212071 - DNA, 75 bp, Homo sapiens
aaaccctattgaggatgaagcagtcatagcatctttactggaaaaaagtgaagattatcgaatgtctgaaagaaa

SEQ ID NO: 212072 - DNA, 100 bp, Homo sapiens
ggaaaatggctgtgctggccaatggtgtgatgaattccttgcagatatgggacccgtacacatggactttttaagagactgggaattccagggcccacac

SEQ ID NO: 212073 - DNA, 90 bp, Homo sapiens
acctgcacccgctcagcgagctcctgggcatcccgctggaccagataccatgtttgtgtggaagtgccccgtgtttgctatgccgatgct

SEQ ID NO: 212074 - DNA, 82 bp, Homo sapiens
ctccagcgccctggcctccctcaccttggacacctcgcttggctggtaggtgagtgctgtcctcggctcactttcctcaagc

SEQ ID NO: 212075 - DNA, 75 bp, Homo sapiens
cagaaacatatctattatatcacaggtgaggtcccagcttgaagagaaagaaaacaagaagttccctgtgtttaa

SEQ ID NO: 212076 - DNA, 82 bp, Homo sapiens
cgctctgctgtgggcgctgctggcgctctggctgtgctgcgcgacccccgcgcatggtcatgaaacgagtgcgtaccgagca

SEQ ID NO: 212077 - DNA, 100 bp, Homo sapiens
tatccacttgagaaagagctgccaaacttttgggaacagaatcgaagatcactaatccagtttatgaaacaggactttgcctcccgggccaaactggcag

SEQ ID NO: 212078 - DNA, 76 bp, Homo sapiens
cctattgtgctcacacattcagaacctgttacccaaggaattccctaaagctaaaagatggcggcaaggcagccca

SEQ ID NO: 212079 - DNA, 100 bp, Homo sapiens
tggactttgtttttcctgggaactgcaggtactccaaagattcaggtttactcacgtcatccagcagagaatggaaagtcaaatttcctgaattgctatg

SEQ ID NO: 212080 - DNA, 75 bp, Homo sapiens
ttcccaggatgtgagcaacacgggaccgggcgaactttctgaccaagtatacaactacccagagggcctaggaga

SEQ ID NO: 212081 - DNA, 75 bp, Homo sapiens
ctcagttggaagcagccgatccagcctgcggagcctgtggggcaggtgtggtcactcacctgtctaccactcccg

SEQ ID NO: 212082 - DNA, 75 bp, Homo sapiens
gcggggccacgctgcgggcccgggccatggccgccgccgatgccgaggattatatctgtccaagatgcgagtctg

SEQ ID NO: 212083 - DNA, 75 bp, Homo sapiens
ccgggcccgcgtccgctcccgcgcccggtctcctctgagcctccggcctccataagacccaaaacagatgacacc

SEQ ID NO: 212084 - DNA, 83 bp, Homo sapiens
cccccttccccacgcaaccccagatccatttacactttacacctcttctgaaacagtctccctggagcaaccatcagagcagt

SEQ ID NO: 212085 - DNA, 90 bp, Homo sapiens
ggttcacaaaacaagtgtagtaggccatgggtgtatatggagccctcaccaaagccccagtgccagggactccagactcactctccagtg

SEQ ID NO: 212086 - DNA, 75 bp, Homo sapiens
gattggaatattggtgggccagcaatcctcagacgcctcacttaggacaagttccagcaacagatagaaatgctt

SEQ ID NO: 212087 - DNA, 83 bp, Homo sapiens
agaaactatatgccaccatggagaagcataaagagttatcaggaactgttgccgttattacatcagatgggagaatgattgtg

SEQ ID NO: 212088 - DNA, 123 bp, Homo sapiens
ccggccgcagccaggagcagcagccgcgcctgcagaccggcctcgcggagcccgcgcgccgagccccacgtctcctaaaaacccagaacagaagatcattaagagagtgattgctcttgaagg

SEQ ID NO: 212089 - DNA, 74 bp, Homo sapiens
cctactccaaagcggccgggagtcgcgcttcttccccactcccgagacaggtcctatggcagcgtatacaaagc

SEQ ID NO: 212090 - DNA, 50 bp, Homo sapiens
ggctgcccggcccccgccgcagatggtgatggaatttcctgataatgtgt

SEQ ID NO: 212091 - DNA, 100 bp, Homo sapiens
ccaggggatttcccaggtccaccacctgctccatttgcaaataacatagatcatcagtagaaaacttcttgaagttgttcaagaaaaatttgaaagtagc

SEQ ID NO: 212092 - DNA, 83 bp, Homo sapiens
gccttgggcctcgcgccggctatggccgtgccctggggctgagccctcaggtattagaaaactactcggatgctccaatgaca

SEQ ID NO: 212093 - DNA, 75 bp, Homo sapiens
tgaacaagtcccagctgaagctgggcatctggggcgagctacagagacttctgaagtggagagtctgcgacctcc

SEQ ID NO: 212094 - DNA, 100 bp, Homo sapiens
tcgctcggctgcgggaaatcgggctgaagcgactgagtccgcgatggagcttacaacaggttgatgaacatagtaaacctcctcatctgaggcataggga

SEQ ID NO: 212095 - DNA, 100 bp, Homo sapiens
ttcaagaaggacaaagagatcatagccgagtatgaaagtcaagtcaaaggtggaagtaaatgagctaaaaagtgaaaagcaagaaaatgtgatacacctt

SEQ ID NO: 212096 - DNA, 74 bp, Homo sapiens
gaaagtgtgcattttgacagagatcttccagaatttggaacctgagagccagaagcaacaaagatgccaaggat

SEQ ID NO: 212097 - DNA, 100 bp, Homo sapiens
aattactgtctcaagtgatacgcttcctgcctgacacagctcacttcaagaagtgcacaatgtcagaacgtggaattaagtgggcttgtgaatattgtac

SEQ ID NO: 212098 - DNA, 82 bp, Homo sapiens
acatggtcatgagctttgtgaacctgggaccaggaagaaacaggctcctgccagcaccgacagcaacgaaaatgttcccacg

SEQ ID NO: 212099 - DNA, 82 bp, Homo sapiens
gggcggctctgcgctggccgggggcgcgggcggcggcgccggcaggaaggagcaggaagccgcctaccaccatgagcagcac

SEQ ID NO: 212100 - DNA, 97 bp, Homo sapiens
tcgcaagcgtcagacacattgactattccattgtctagactttgtgttccaagatcagagattggaaaactgcacagtgaattggatatggtgaaaa

SEQ ID NO: 212101 - DNA, 142 bp, Homo sapiens
gccgctgctgggagatgggcctactcgcccgccaccctgcgctgccgccgctctgaggagttaaaggaacaggaaatatagtggtcattatgattagctatccaaaaggaagagaaattttggagctggtgcaaaaaggaat

SEQ ID NO: 212102 - DNA, 100 bp, Homo sapiens
gggtgttcttttggggtagtgtctgggatccagtacgagttgaatcattgttcaaataaggtcctggatgcctcatcccttagtttcaacaccagattga

SEQ ID NO: 212103 - DNA, 98 bp, Homo sapiens
ttcacgcctgtgaagatagaaggatatgaagatcaggaaagtgactattttaccccacagggagaattccgtgtagacaaagcaggatcccctacttt

SEQ ID NO: 212104 - DNA, 95 bp, Homo sapiens
gggcaaagcccatctggtccgccgagcaggttaaaaagatcaagtggcatgagcagccttttggggaaaattggtgccaagaagcagaaaatgag

SEQ ID NO: 212105 - DNA, 100 bp, Homo sapiens
cgctgtcactagcgccgcctgctcccgcgggcccgcggacccagctgtcaggcaaggtaatggaactgctggtccatctgaataaacgtataaaaagccg

SEQ ID NO: 212106 - DNA, 74 bp, Homo sapiens
cgcgagtgaggaaaggaggtactgtagttgtatcacggactgattcaccgagcccaaccgtactcaactcacat

SEQ ID NO: 212107 - DNA, 100 bp, Homo sapiens
gaggggctcggagaggtgctcggattctcgtagctgtgccgggaggtagatgacttctttgagcaagagaagaacttccttattaactattacaatagga

SEQ ID NO: 212108 - DNA, 51 bp, Homo sapiens
cgaagcttggaagttgcagaaggcagagaaaatcctgaaggagcaagagcg

SEQ ID NO: 212109 - DNA, 100 bp, Homo sapiens
gtggagccaccagcctctccctgcctgattacatcaaccccagagccgtgcagctgggctcccttctcgtccgcggcctcaccactctggttttagtcaa

SEQ ID NO: 212110 - DNA, 83 bp, Homo sapiens
aaagactacagtccctacttcaagaccatcgaggatctgaggaacaaggactacccttctgtgggtcaggtagcccaggccct

SEQ ID NO: 212111 - DNA, 90 bp, Homo sapiens
gaaagtatcttcatgcttgcagggcctgatttgaaggaagatctccagaaacttaaagtcacagttgcagattatatttctagagctgag

SEQ ID NO: 212112 - DNA, 100 bp, Homo sapiens
cccgcttccatgcggttcgggtccaagatgatgccggtgatctgcaactctttcaccatctgtaatgcggagatgcaggaagttggtgttggcctatatc

SEQ ID NO: 212113 - DNA, 100 bp, Homo sapiens
gatgacctgtcagagctgtgtggacgcggtgcgcaaatccctgcaaggggtggcaggactcaaagccacccgtcatctcgttacaaaagctcatcgtgag

SEQ ID NO: 212114 - DNA, 83 bp, Homo sapiens
gtacctgcagaaggtctctggagacatcttcagcagccgccaccggcacggccaggccagcatggtggaccacttacttccag

SEQ ID NO: 212115 - DNA, 97 bp, Homo sapiens
gttagtagttcttcatactctcattgagtctggtgtaagaattctctacgcctgtggttttagcgttttgttgaccagctatacacactctgctgtt

SEQ ID NO: 212116 - DNA, 100 bp, Homo sapiens
agtaagaagacatacaaaagcctcttctgaaggaaaagacagtgtagtcctgcaaaacattttgaggcatgatcacacggctccgccaccctgtgtcaac

SEQ ID NO: 212117 - DNA, 74 bp, Homo sapiens
agattcgcagtggtcgcttcttctccttggtaaagagaaatgtgtatgaccttacaagtatccccgttcgccac

SEQ ID NO: 212118 - DNA, 96 bp, Homo sapiens
ggctggaagaggaagatgcctagcacagaccttctgatgttgctgaagtcacctgggagcccccctggacctgagctgcccattgaaacagcgttg

SEQ ID NO: 212119 - DNA, 90 bp, Homo sapiens
gtagctatggcgacggcaagcgcggcccgcggcgccgcctgacagactgtgccctgtccacggtgcctcctgcatgtcctgctgccctga

SEQ ID NO: 212120 - DNA, 98 bp, Homo sapiens
catcgccctgccggaccgcgcctcaggctcccccaggctaggcagctggaagagaaagaccgagtgctaaagaagcaggatgcattctacaaagaaca

SEQ ID NO: 212121 - DNA, 100 bp, Homo sapiens
ggaacatggcgccggggcccccgtcgttgctgccgggattttggaggccggggccgcgctgagggcgcccagctggagcttgaagaaatccgcaaatgtg

SEQ ID NO: 212122 - DNA, 75 bp, Homo sapiens
cgccacgtgtcctgcgtgtagttgtcgggcagccgaggtagctcgtaagctggtcatcctggagggtgagctgga

SEQ ID NO: 212123 - DNA, 80 bp, Homo sapiens
ctgaactggaaacaagatgcaggtggtgttcccactgatgaagagcaggcgactgggttggagagggagatcatgctggc

SEQ ID NO: 212124 - DNA, 100 bp, Homo sapiens
tgccgaatcagtacagcgttcacaagacttcatcacctctttgtacatcttctgcaattactcgaagtttgcctgcaatggtactgtaattgagcatccg

SEQ ID NO: 212125 - DNA, 100 bp, Homo sapiens
cgaagtagagagcgaaaccatcttcaagttagcagcgtttattttacagctactctgggcagttgaaaagtagaaagtcatacatgatacctgaaaatga

SEQ ID NO: 212126 - DNA, 75 bp, Homo sapiens
atgcctgcagagctgtggcttaccagggccatgtggaagagctgtggggcctggccacacaccccagtcgggccc

SEQ ID NO: 212127 - DNA, 78 bp, Homo sapiens
gaaaatgaatgccaaatgggacacgctgtgatgcagatccatccgccctagcaaaatatgttctggctttggtaaaga

SEQ ID NO: 212128 - DNA, 100 bp, Homo sapiens
ggagcttatactcctcccagtgacgggtctggagtgcgtgggggaccggctgttggcggcttgtctttaaccgaactgtcacactgaaggaagacccagg

SEQ ID NO: 212129 - DNA, 74 bp, Homo sapiens
cgcacgtggattcagcgcgatgcccaaatccaagcgcgacaagaaagaggagaaggcagagcccccccaggcta

SEQ ID NO: 212130 - DNA, 100 bp, Homo sapiens
gagagattgttcctgtggagcaaagagctgcatcatgaattcaggagcatcctcggattctgaaggtaattttgagactcctgaagctgaaaccccgatc

SEQ ID NO: 212131 - DNA, 100 bp, Homo sapiens
caggatacaccagcccagatcaagaagctggtaaataatgaggatggcaatgcccaatactgcctggcagtgatgaggttgaaactttgaatggattaaa

SEQ ID NO: 212132 - DNA, 50 bp, Homo sapiens
ccgaggtgcctttctccaaaagaaacctctgtagaggagcaggatgcaac

SEQ ID NO: 212133 - DNA, 96 bp, Homo sapiens
gccatcttctccagccaccccagccagtggaaccaagcaggataacctagggtctcagtttagccacatgagtcttgctcgccagccatctgctga

SEQ ID NO: 212134 - DNA, 100 bp, Homo sapiens
atttttctcacagtcttcttgcttcctgaaatttcctctggtggtgaagcagtattttccaatttgaagattcatttgaaggtggctcctgccacctgct

SEQ ID NO: 212135 - DNA, 99 bp, Homo sapiens
aattttctgcatacaactggaattactctcaataaaccagtaggcctggaaaatccccagagaggagtcacgtctcttcggagccctacgagcccatct

SEQ ID NO: 212136 - DNA, 74 bp, Homo sapiens
gttacccggagctgctgctgtgcggagaacaacggatggagtccgcctgcgtgaccatccatgaggctctgaaa

SEQ ID NO: 212137 - DNA, 82 bp, Homo sapiens
gctggcgctctggctgtgctgcgcgacccccgcgcatggccactcttcacctccaccatgagcctggacatccagagcctgg

SEQ ID NO: 212138 - DNA, 100 bp, Homo sapiens
cgagaccgtgaccgagagcgtgaccgagagcgcgaatatcgtcatcgttagaaggtactaggttttgacaagcttgcatcatgcgtgagtataagctagt

SEQ ID NO: 212139 - DNA, 100 bp, Homo sapiens
tggaaccagaaaagatcattggggcaacagattcctgtggtgatttaatgttcctaatgaaatggaaccaaccggtgagccctctcctaagagacccagg

SEQ ID NO: 212140 - DNA, 83 bp, Homo sapiens
ctcatatccggagatattccaggcccactccagggcaggcatttccggagagttcttttgaagtcacttcagaaggatctaca

SEQ ID NO: 212141 - DNA, 97 bp, Homo sapiens
actagaagggatacccttccatttcaaagaacagaatgctaaggaagctgtggcaagaaggtgggagtcaatcattttgacaagtctcctgaaagga

SEQ ID NO: 212142 - DNA, 75 bp, Homo sapiens
atgtaataaagcagatcacaaaggaatttccagagttagtagcaaggctcagaaatacagctcttcatgaagcaa

SEQ ID NO: 212143 - DNA, 74 bp, Homo sapiens
gaggacctgggacaccgcggaagtcgggaaatgatgagcagcaccagcagtaagagggctccgaccacggcaac

SEQ ID NO: 212144 - DNA, 96 bp, Homo sapiens
caaggaggcttcaagacaaagggccccttacacaccagacaggaaagatctaggagagagggagaaattgatgctgccagaaagaggggacagtta

SEQ ID NO: 212145 - DNA, 98 bp, Homo sapiens
ctcaccccccaagcggatactggtcttctcgtcggattgcccatgcacttgttgcagaaacagccaagaaccatatttatttagagtcagaatggagc

SEQ ID NO: 212146 - DNA, 75 bp, Homo sapiens
catgagagatatagcccacttagaaatcacagctcatgctgaagattcggttatggaccatcatttccggaagcc

SEQ ID NO: 212147 - DNA, 100 bp, Homo sapiens
cagaagacaatatcatgcaagtgtggcaaatgggtctgactgcgtaccatgatatctccctggacaagtgctatgtcatcgaactcaacaccaccattgt

SEQ ID NO: 212148 - DNA, 75 bp, Homo sapiens
cgcctgcctgctgctgcgcgtcttcagacaatgcagatcttcgtgaagactctgactggtaagaccatcaccctc

SEQ ID NO: 212149 - DNA, 99 bp, Homo sapiens
gaggaggacatgtaccgtgctgcagatgaaatagaaaaggagaaagaattgcttatacatgaaagaggggcatcaggttccttgcattgactccatgga

SEQ ID NO: 212150 - DNA, 74 bp, Homo sapiens
ctggctttgagagttatgaggcgcttccccagcacaaactgacctgcttcaggctgagagacttcgaagaatgc

SEQ ID NO: 212151 - DNA, 83 bp, Homo sapiens
attgaagccgcctctgtattacttaccagactgcaaaattcaaaatggggctcaaggtattcgtttcatctacaccagagaag

SEQ ID NO: 212152 - DNA, 83 bp, Homo sapiens
tccagcaggaggatataaaaaagaaggagccatattgtagggaagaagcattgcatgcatttattcagccagagattctggat

SEQ ID NO: 212153 - DNA, 95 bp, Homo sapiens
cgggaaatcctatcaagtgccaatgctggcccagctctccgtgttccggtgtgtggatccaaacttctacagcaaaaacttacttcttttaggaa

SEQ ID NO: 212154 - DNA, 100 bp, Homo sapiens
ctgtcgaagttatctgatgacaaattacgaaagtgctcccccatccccacagtataaaaagatacagatccacgggttttagaaaaacaagaattacagc

SEQ ID NO: 212155 - DNA, 75 bp, Homo sapiens
ctgctcctccaggcgctgcccagccccttgtcagccagggctgaacccccgcagacatgggaaagcggaaccacc

SEQ ID NO: 212156 - DNA, 98 bp, Homo sapiens
agccatcaggtaggctgcgttgaggatctttgctcttccatccgcctttgatcgtcttcctcttcagccatccagggattcgggttcgtaactttcga

SEQ ID NO: 212157 - DNA, 100 bp, Homo sapiens
gtgacatctgatgctgtggaacttgcaaatcgaaggaaccttatgcaaaaatccagatgtaatgaggtggctcctttcacccttcacgtggtctgccagg

SEQ ID NO: 212158 - DNA, 87 bp, Homo sapiens
ctttttggccaggcttttccctctgtctgagaaatcagtgagatggaagattttcgaggtatagcagaagaatcatttccaagcttt

SEQ ID NO: 212159 - DNA, 82 bp, Homo sapiens
tggaggaccagtcagaccagcgcgtcatcatcaagacaatgcagatcttcgtgaagactctgactggtaagaccatcaccct

SEQ ID NO: 212160 - DNA, 100 bp, Homo sapiens
ggtgtgcatagcccttgacagcgaataggtaatagcctgcagctggtgttttgagaagccctactgctgaaaacttaacaattttgtgtaataaaaatgg

SEQ ID NO: 212161 - DNA, 82 bp, Homo sapiens
gtcgtctagtcaaggccgcacaggaacaggagggtctgatgtcctccagctggaccaagctgactgaaagattcttcaagaa

SEQ ID NO: 212162 - DNA, 100 bp, Homo sapiens
gcaggagcgatggccgggatcctggagcactcggtcatgtacccggtggactcggtgaaggtggattctccacagttttcctcgtgcgtactcacggtgg

SEQ ID NO: 212163 - DNA, 98 bp, Homo sapiens
cagcttcaagcttaggaccacccaccatgcctatccaggtctcctctgagcctccggcctccataagacccaaaacagatgacacctcttcccagtcc

SEQ ID NO: 212164 - DNA, 50 bp, Homo sapiens
acgaggaagaggaggtttctgaggcgcagtgagcctgcaggccgacctca

SEQ ID NO: 212165 - DNA, 75 bp, Homo sapiens
gtcagactggtcaccagctgttcaaagtcacccaggctccagggtgcaggttatgacacacctccgtgtgattta

SEQ ID NO: 212166 - DNA, 100 bp, Homo sapiens
ctcaaactcccaggctcaagcaatcctaccatgtcagccttcccagtagctggaactacagagcagagaggagccttcaggggaagtagaggtggccgag

SEQ ID NO: 212167 - DNA, 100 bp, Homo sapiens
gtcctgtctgtacttcatctatgtggccccaggcatcggaatgtttacccttgcggaagttgcatcacttaatgacattcagccaacttaccgaatcctg

SEQ ID NO: 212168 - DNA, 100 bp, Homo sapiens
tttgctacagcatcccacattaagtcaacgggctattgagtggccagacttccccaacaaatgccaaattggagaaactggactctcagcaggtgttgca

SEQ ID NO: 212169 - DNA, 75 bp, Homo sapiens
gtcagggggactgcaaaggccaatgttggtgctggcaaaaaggttgtttacattcagagctctatcaataagagg

SEQ ID NO: 212170 - DNA, 71 bp, Homo sapiens
ccgcccgccgggcgcggctgctccaggaccacagaatgccagaggattcaacatgagcatacctatgcctg

SEQ ID NO: 212171 - DNA, 97 bp, Homo sapiens
ttatgaatctcaggaacaccaccttctgtcagccaaaccaaacaggaagcttacttttctctacctagccaatgatgtcatacagaacagcaagagg

SEQ ID NO: 212172 - DNA, 75 bp, Homo sapiens
gcagaaggagaacacgctgcttcacctcttcgccggcgggtcctcttcctgatggatgggaacaagccatgactc

SEQ ID NO: 212173 - DNA, 90 bp, Homo sapiens
cgaggccggcgaagccatgggcgccgggaccccgccgccgccgccgccgccgccgtctggccccaggctgattactctgagtgcaaacct

SEQ ID NO: 212174 - DNA, 100 bp, Homo sapiens
ctgagtatgttcacgatcggggtcagcactcctgtaggaggcctgctgatggcatttcagaagtactctggtgagactgttcaggaaagaaaacagaagg

SEQ ID NO: 212175 - DNA, 100 bp, Homo sapiens
ctctccagcgtgcagaggagctgcagggtcagcttcacgatgcccagcggtcagctgtccccatgggctcgtcaggcggagtttctctgcacaagctctc

SEQ ID NO: 212176 - DNA, 95 bp, Homo sapiens
caaagcacataaaaacactttctgaagctcatgaagactgtgtaaataatatcaggcctgtatccggtgtccgaggcgaactcagtaagatgatg

SEQ ID NO: 212177 - DNA, 74 bp, Homo sapiens
gcctcttgagtagctgggattacagcaggaagctaggaaacctggcagtgccagctgatgagaagtggaaagcg

SEQ ID NO: 212178 - DNA, 100 bp, Homo sapiens
aaaaggatggcatctcagacagtgatagcagtactagcagtgaggaagaagagagctggctaaatatgaatacatggaagaacaagtaatcttaactgaa

SEQ ID NO: 212179 - DNA, 101 bp, Homo sapiens
gctagacagcagcgactagggctcgggcgccggcgagatgcctttgttcaccgccaaccccttcgagcaagacgtgggtatggcatttcaaatatagatac

SEQ ID NO: 212180 - DNA, 90 bp, Homo sapiens
gggagaaccagccgactggagcaggcagcagcccaggcgaggattaaatccaccacacagggtgaaatctatctccatgacaacattcac

SEQ ID NO: 212181 - DNA, 75 bp, Homo sapiens
ttcgcagtggtcgcttcttctccttgtgggtaattccagaattgattggccataccattgtcactgtattactgc

SEQ ID NO: 212182 - DNA, 82 bp, Homo sapiens
accagaattcggccatgagccgctacatactcatcatggggctcctgtacaagccgcggcgagtcctttgcacatgttggca

SEQ ID NO: 212183 - DNA, 90 bp, Homo sapiens
gcaaacactccagccacgaagtcaaggctctgggggccatgtggaaactacataagataagcatggattcctggttcattcttgttctgc

SEQ ID NO: 212184 - DNA, 90 bp, Homo sapiens
gatcgcccggctgcgtgcggtccagcggaaggcccgctttgccaagctcaagggagactcatgcatctgtatgccgtgtgcgtggactgc

SEQ ID NO: 212185 - DNA, 100 bp, Homo sapiens
ccaaacgaccacctcacggattccttagtctcctctgagcctccggcctccataagacccaaaacagatgacacctcttcccagtcccccgcgccttccg

SEQ ID NO: 212186 - DNA, 100 bp, Homo sapiens
gaccattcagatgggatctttccggatcaatccagatggcagccagtcagtggtggagaatcgttgcagtgtgccagtagatcaggcctctgagtcactg

SEQ ID NO: 212187 - DNA, 100 bp, Homo sapiens
atatgtattcaggggttcagataaggccaacccatggccagcacagacatgatggaataaagactgagcactacaaaacagatcttcattctccaagagg

SEQ ID NO: 212188 - DNA, 100 bp, Homo sapiens
agagtcaacagcagtggcaacagagctggccttgctgaacacctgagctcaacccctaccatccgactcccgaggtgttctgtccaggatggatagaggg

SEQ ID NO: 212189 - DNA, 75 bp, Homo sapiens
gcctttatctgatgatgatgaaagttacacagggattaatgaaaatcaagttccatcctcagacaagaggtaaag

SEQ ID NO: 212190 - DNA, 101 bp, Homo sapiens
aagatggcggccgcggctgtggtggttcccgcagagtggataaagaactgggagaaatcagggagaggcgaattctattgacctgaaaagtggttctggaa

SEQ ID NO: 212191 - DNA, 76 bp, Homo sapiens
ccgcaaaggcctcaatgcctacctggaaggttcatggcaaggcagtttccccggcatgaaccagagtggacttatg

SEQ ID NO: 212192 - DNA, 101 bp, Homo sapiens
ttattggagaaacatgcagattatatcgcatcctatggctcaaagaaagatgattatccgatatttaaataaggcttttcatatctggtccaagaaagaaa

SEQ ID NO: 212193 - DNA, 75 bp, Homo sapiens
aatgaggcacctaaaaattgtataccgcagattcagaaagttcaggagccctggaaaggagaaggaataagacgg

SEQ ID NO: 212194 - DNA, 118 bp, Homo sapiens
atgagacccgttctccctccagaacatacacttacatctctagataacagtctgcactttcacccgtttcaggtgaccaagaatatggcccaggtgaccaaagccctggacaaggccc

SEQ ID NO: 212195 - DNA, 80 bp, Homo sapiens
tggagttgcaagtgggagcactggaagtacgggcagttgcagtgttggagctaaagtagtaaacctattgatggcaattt

SEQ ID NO: 212196 - DNA, 100 bp, Homo sapiens
tacccagtgatgaagtataacccaaatgtccttcccgttcagtgcactggcaaggcccaaggaggtgatagcattttgcagagattgaaaagaatagtat

SEQ ID NO: 212197 - DNA, 50 bp, Homo sapiens
cgcgagagtcagcgagcggcggtgatgtgtccaatctagatcccaacttc

SEQ ID NO: 212198 - DNA, 75 bp, Homo sapiens
gtggactccttcggcagtccacccaccgccgccgcctcccagtattaaaggtggaagaaggtccatatctttttc

SEQ ID NO: 212199 - DNA, 83 bp, Homo sapiens
aggggacagcgagtcggaggaggacgaggacttggaaggccagaagcggactcctagaagaggggagcagcaaggatggaatg

SEQ ID NO: 212200 - DNA, 100 bp, Homo sapiens
cccattgttcctgagcataagaagcaaccatgtccttatgggatgtgtttggccaaatgggagagtggttacaacacacgagctacaaactacaatgctg

SEQ ID NO: 212201 - DNA, 96 bp, Homo sapiens
cacctccgtgtcctgctcctcacaggcaatggccttacctccctgccgcccaatttggccgtcgcagaacagtgtcccatcatccaccaatatctg

SEQ ID NO: 212202 - DNA, 76 bp, Homo sapiens
caacttagcaaaatgttctttactactaagcaccgttggtatcctcatggacgggtgaccctaagaatgactcctg

SEQ ID NO: 212203 - DNA, 87 bp, Homo sapiens
agatgtttcaaggagaggcccagcatatacaaaggcatggaagtatgaaaatggtactccaaagattcaggtttactcacgtcatcc

SEQ ID NO: 212204 - DNA, 98 bp, Homo sapiens
cttatcaatgttatcgtgcctctagcaaaaagggtggacaagttccggcagttcatgcagaatttcaggtttctaagcatgaattgaggaacagaaga

SEQ ID NO: 212205 - DNA, 75 bp, Homo sapiens
actagcaggccttacggtggccaatgaagcagactcactaacttatgatgtacaacagaatatctcgggaatgga

SEQ ID NO: 212206 - DNA, 100 bp, Homo sapiens
tgacaatctctctccaccttttgtcaattccagaatacaaagtcaaactgtgctgaaaatatccgcaaacacattctgcatactggcaaacatgaaggag

SEQ ID NO: 212207 - DNA, 50 bp, Homo sapiens
cttccagactctcagactgtgtggaaagcagagaccacgcagaggctgcc

SEQ ID NO: 212208 - DNA, 90 bp, Homo sapiens
catttttgttactcttcagtacaatgtcaccctcccagcaacagttgtggacatcggatacccaaggagacgaagctgaagcaggagaag

SEQ ID NO: 212209 - DNA, 100 bp, Homo sapiens
tgctgaaaatgtcaaggcatgaaatccaagggaagcgccgccgagctgctatggacttccctggagccaaggtcattgttccccagctgaagggcagggt

SEQ ID NO: 212210 - DNA, 75 bp, Homo sapiens
gaaggacttggggagcccagaagctgccaccgaaccaaggttgctgcttttgctcagaggacatccatgacccta

SEQ ID NO: 212211 - DNA, 74 bp, Homo sapiens
gctaaagagagcagtaccctgatggagtcccttgcagacaatgcagatcttcgtgaagactctgactggtaaga

SEQ ID NO: 212212 - DNA, 85 bp, Homo sapiens
ccaggacaatggggacccgggacgacgagtacgactacctattcaaagggggatatgagactttctactcggaatatcctgagtg

SEQ ID NO: 212213 - DNA, 74 bp, Homo sapiens
aacctctctacattccagtaacccagtctcacagaaagttctccgctcccagacatgggtccctcggcttcctg

SEQ ID NO: 212214 - DNA, 100 bp, Homo sapiens
tgggttttaactacagacccagtctctgccaaaatttagtggcatggttctactgtgtaaagtctgtggggatgtggcgtcaggattccactatggagtt

SEQ ID NO: 212215 - DNA, 100 bp, Homo sapiens
tggagaccaaacctgtgataacctgtctcaaaaccctcctcatcatctactccttcgtcttctggatttcggaaacttctggcagcccagtgtctactgg

SEQ ID NO: 212216 - DNA, 75 bp, Homo sapiens
ccccagtcgctccagccataaccactgaggccacagcacagtgcataccagggtctttttggagttcctgagctg

SEQ ID NO: 212217 - DNA, 73 bp, Homo sapiens
ggctgcaggagctgctactgtgcaacaaccgcccatacatcgtgtacatgcttcaagagatcgacatcctgga

SEQ ID NO: 212218 - DNA, 100 bp, Homo sapiens
gagggagcctgtcacgcgctctggcgctctcctgacctcttaaggctctgtcagtcttagaaatgcactcggtgatggaaagagagccactattctgaag

SEQ ID NO: 212219 - DNA, 101 bp, Homo sapiens
cgggaaaggctacagattccggggctgaccttggaagagacaagagagacacctccaacttcgacaaagagttcaccagacagcctgtggaactgaccccc

SEQ ID NO: 212220 - DNA, 90 bp, Homo sapiens
ggcacccgccaccagcatggacgctcgccgcgtgccggaaatctactttcttcaatgtgttaaccaatagtcaggcttcagcagaaaact

SEQ ID NO: 212221 - DNA, 75 bp, Homo sapiens
ttttccatccaggaactggaactccgttctctgggcaccgtctgcgtcctgctgtccttccccttcatcttcagc

SEQ ID NO: 212222 - DNA, 82 bp, Homo sapiens
gacatgttcacgcacgggatccagagcgccgcgcacttcgtcatgttcttcgcgccctgcacttgcacctcctgcgccgccg

SEQ ID NO: 212223 - DNA, 75 bp, Homo sapiens
aggaagcaccgcacatttttcaggttgcaaaagcttctcatttcagagagatgccaggatcctaagtgcctgcca

SEQ ID NO: 212224 - DNA, 82 bp, Homo sapiens
gttgcatgaagctgacgccctcctcttctggctcagcagggagaagagaagtttacctttattgagaaatgtaacaaccctc

SEQ ID NO: 212225 - DNA, 104 bp, Homo sapiens
tgagggtcaacgtcaagcgggagtatgaccacatgaatggatccaggcagtggaccaatccagctatggcagtttcttctggaattactcactgataaatcctg

SEQ ID NO: 212226 - DNA, 75 bp, Homo sapiens
aaagagtcaacagcagtggcaacaggaatcccgttctgcttccagaagtggaagtgctcacggatcggggaaatc

SEQ ID NO: 212227 - DNA, 82 bp, Homo sapiens
ggcgcccctgcatgagcaaaagcagatgattgaggagaaggcagagcccccccaggctatgaatgccctgatgcggttgaac

SEQ ID NO: 212228 - DNA, 83 bp, Homo sapiens
aaggaactggtgctgcagcgagagggtggcccagttgaaatccttcccttcctctaccttggaagtgcctaccatgcatccaa

SEQ ID NO: 212229 - DNA, 100 bp, Homo sapiens
gccaggcagtatcgggagcaggaaagccagtgttgtggaccctagcacagagaactggtcatgctgctggagtggtggtcctgcacggagtgtacactgt

SEQ ID NO: 212230 - DNA, 100 bp, Homo sapiens
tgctggggaacggaaaatgagggagttcaactctgggaggaagttttattttgtcttcatcaggaagccaactaattcggttgatacctgagagctcagg

SEQ ID NO: 212231 - DNA, 98 bp, Homo sapiens
tggaatgactttgcggaggacagcttgatggagtctgcacgcaaagcatgggagaattctccaaatgtaagggaaaaggggtctccagtaacttccac

SEQ ID NO: 212232 - DNA, 75 bp, Homo sapiens
actgacgaagcttggaagttgcagaagagatgaagcatctggtttttgttatctcaatgatgctgtcctgggaat

SEQ ID NO: 212233 - DNA, 74 bp, Homo sapiens
ccaaatatgattggtggtgcctctcaagctgatttggctgtgctgctgtgcaaccatattgcttctgggaaaaa

SEQ ID NO: 212234 - DNA, 83 bp, Homo sapiens
aaagctcatttcactacagacgaaatccactagaacccagcttagactagaaagtctagaagacacacacataatgaaggggg

SEQ ID NO: 212235 - DNA, 101 bp, Homo sapiens
atgggcctttctgtgagtgcgacaacttctcctgtgccaggaacaagggagtcctctgctcaggtgattatcctgaaccatccaggccaaataagcgccgg

SEQ ID NO: 212236 - DNA, 74 bp, Homo sapiens
ggcagctgcagtgacatgtccagcatgaatcccgaatagacaccagcagtgaaaacactgtggttcctccagaa

SEQ ID NO: 212237 - DNA, 82 bp, Homo sapiens
aggacatggacctgtacagcatcaactacctgcactttggggagcctaagtcctggactccctggaggaaaagcggaagcgg

SEQ ID NO: 212238 - DNA, 100 bp, Homo sapiens
gctccgggcacccccgagggccccgagcccgagcgccccagcccggccggcacagtcttcactaccgtagaagaccttggctccaagatactcctcacct

SEQ ID NO: 212239 - DNA, 100 bp, Homo sapiens
tttgaccgagaggctgctggagctcgtgtttggacgctgcctgagattgtgagggagacccaggacctaattgaacaaggggcactcctgcaagcccacc

SEQ ID NO: 212240 - DNA, 98 bp, Homo sapiens
aagaggaatgacaaacaaccagctcttcaggtacttcgtactggatttcgaggctggcatcctgcagtattttgtgaatgagcaaagcaaacaccaga

SEQ ID NO: 212241 - DNA, 100 bp, Homo sapiens
cttaatcctactcagaagaacttgtacagagatgtgatgttggagaactatagcaatctggttttcttggaaattgaccttggctcccaaactatataac

SEQ ID NO: 212242 - DNA, 82 bp, Homo sapiens
ttcaagggaattttgatctaaataggggcaacaccctccactaaagagtcaagccagccggacgcattctcatctggtgggg

SEQ ID NO: 212243 - DNA, 83 bp, Homo sapiens
tccccggcgcgaagaggctggactcggattcgttgcctgagttccagggtctccctccactgctgtagtaacccgggtccggg

SEQ ID NO: 212244 - DNA, 142 bp, Homo sapiens
atgaaattgtggacctcacttgtgaatctttagagcctgtggtggttgatctgactcacaatgactctgttgtggatgtgtactctggcacacccaccaaggtgagacacatggacagtcaagtggaggatgagtttgattt

SEQ ID NO: 212245 - DNA, 87 bp, Homo sapiens
tcacatctgtggtccagggcagggccactccaggtgttggagcgggccggagagaagtagagtgggctgcgaggagaaggaaacagg

SEQ ID NO: 212246 - DNA, 75 bp, Homo sapiens
gttgtactcatagattgtgtaggcgttggtcttctgatagcaactttaatgtgaaatacactttcgggaaatggc

SEQ ID NO: 212247 - DNA, 100 bp, Homo sapiens
tgtaacctcttcggtccgcgacgatcctctagagcactgtgtgtctccccggacgcgagcccgctcccctgatgtttgaaagatgtatggtgatcttgaa

SEQ ID NO: 212248 - DNA, 51 bp, Homo sapiens
tgtggccgtcaagatgctcaaagagcctaatgggaggtgactggatcatgg

SEQ ID NO: 212249 - DNA, 101 bp, Homo sapiens
agaccctcacggagctgggcgacgagctgaccctgggagacatcgacggtgagaagccctaccactgcaactgggacggctgcggctggaagtttgcgcgc

SEQ ID NO: 212250 - DNA, 50 bp, Homo sapiens
caccaagtgcatcaccatccccaggtttggtgcacctcgatttggaggaa

SEQ ID NO: 212251 - DNA, 98 bp, Homo sapiens
ttcaaaagctgttgaaattgttacttcaacttctgctgagtgcctggaagagctgggatgtctggttgagtcctatggcatgaatgtttgccaaccaa

SEQ ID NO: 212252 - DNA, 50 bp, Homo sapiens
gagcttccgggagggcggctcgcagtactatactggcaattgctggagaa

SEQ ID NO: 212253 - DNA, 74 bp, Homo sapiens
ctagagtacaagttgaagggattaattgacctaaccctggataagagagcagcccgacggccatggaggctgaa

SEQ ID NO: 212254 - DNA, 90 bp, Homo sapiens
caatgtatgggacacagccggccaggagaaattcggtggactgagagatggctattatatccaagccctcggacgacgagaacagcgaca

SEQ ID NO: 212255 - DNA, 82 bp, Homo sapiens
ctcaccgtgcggatctgcctccgcagaaggttttaaaatcaaagatgggaaaatcggagaaaattgcccttccccatggcca

SEQ ID NO: 212256 - DNA, 100 bp, Homo sapiens
gaaaggatgggaggtggtggagtcggacctctatgccatgaacttcaatcccatcatttccagaaaggacatcacaggaaaggccgagggggacggcaag

SEQ ID NO: 212257 - DNA, 100 bp, Homo sapiens
ttcaacgatggcgaacctcccaccaaaaagcccagggacatgagagatggctttagaagaaaaagtttctactcttcccattatgcgagagagcggtctc

SEQ ID NO: 212258 - DNA, 105 bp, Homo sapiens
gagcagagccctgcgatactattatgacaagactggtcgaattgacaaatcttaccctacagtatgtggccacacaggaccagtgctggacatagactggtgccc

SEQ ID NO: 212259 - DNA, 74 bp, Homo sapiens
tggagctctacgcctcctacgtttacctgtccatgggagaggaggtgggcaggaggaacggccctttgtggccc

SEQ ID NO: 212260 - DNA, 75 bp, Homo sapiens
caattttgctaactttgcacatttcaacagtcatgcagatgttgaaatgcttcaggccagtacatctaacccaat

SEQ ID NO: 212261 - DNA, 100 bp, Homo sapiens
ctgcctggcagtttgcacacctgtaaactgaagctgcaggaggaccggcgacagcaaggtcattcaatattaacagggttgcaactcaggctgtagaaga

SEQ ID NO: 212262 - DNA, 82 bp, Homo sapiens
aaacaagtgtgtgcatctggctgttagaagaattcatgctcatccggcaagatgaagagcgacgtcggcagctgagagagag

SEQ ID NO: 212263 - DNA, 106 bp, Homo sapiens
ggaaccggcgccgcgcttgctgctggtaacagggccttgcctagtgggccttccttcccaggttgcttatggaaccacagagaacagtcccgtgacattcgcgcac

SEQ ID NO: 212264 - DNA, 76 bp, Homo sapiens
gaggctccaagacctcatcaacaattaagggacacggccaacacggtgaaggaaaagttcgggaggaagctttatg

SEQ ID NO: 212265 - DNA, 75 bp, Homo sapiens
ctgcgctcccgcgccgcgctcccctcgcccgcccgggccgccaggcgcctgtgtctggcagagctggtgtgagac

SEQ ID NO: 212266 - DNA, 108 bp, Homo sapiens
tatggttctgtcaacaaaatggtccacaaaccaagtgggcaaataatggcagttaaaattcatgttacatgtaaagctgtcctcatttgtgactatggacctatggag

SEQ ID NO: 212267 - DNA, 82 bp, Homo sapiens
gggctccgggaaaactacactggccagccacaacacatgcgtgtatcttgcttgggctatcttccctgctctgccacgccgg

SEQ ID NO: 212268 - DNA, 75 bp, Homo sapiens
cgcagtggtcgcttcttctccttggtggattggtgatagaaaagcagtgctttgatcccacctgtacacacattg

SEQ ID NO: 212269 - DNA, 97 bp, Homo sapiens
caaccctcctgtgcagggagaagtgatggaggccgctatgcagggtagcactgggaacaggagacccacctgaggctcagccctagccctcagccca

SEQ ID NO: 212270 - DNA, 100 bp, Homo sapiens
ttttctattttttttcccagattgaccccaaagttgcatttcctcgtcgagcgcaacccaaggactaatttattattgtgcaactgccagtcctgcgcat

SEQ ID NO: 212271 - DNA, 106 bp, Homo sapiens
acatggggcttaagatgtcctgcctgaaaggtactccaaagattcaggtttactcacgtcatccagcagagaatggaaagtcaaatttcctgaattgctatgtgtc

SEQ ID NO: 212272 - DNA, 90 bp, Homo sapiens
gagactgctccagaagtggagaccagcagaactccaccagctcctacagaagaagggaaaaaagagctgctgttcctaagtaacgcgaac

SEQ ID NO: 212273 - DNA, 75 bp, Homo sapiens
aggcaacatcctgtcacaggccatgctctggcaaaaacgcaatgaatcgctccctggctaatgtgattcttggag

SEQ ID NO: 212274 - DNA, 101 bp, Homo sapiens
ctcaagaggaacatcgtggtgaagaccgtggagatgcgggatggagaggagagaagatgactgaggaggaggtggagaccgttctggcaggacacgaggac

SEQ ID NO: 212275 - DNA, 74 bp, Homo sapiens
cagcattggatttagcagatccatctgccaaagcagtgcttactggtttcagtctgaaagagaaagtggagatc

SEQ ID NO: 212276 - DNA, 90 bp, Homo sapiens
gtcaatcgtaggaagaacacagtacagatttcaccacccaatcctcagtcctttggaaagcagtttccagctggaagttgacgtcctgtg

SEQ ID NO: 212277 - DNA, 89 bp, Homo sapiens
agacggctcagaatcaccccatgctgcgccaggaggtggtggtgtgcatgcggagggacacagcgctggagacagccctcaatgctaag

SEQ ID NO: 212278 - DNA, 75 bp, Homo sapiens
tcttggagaacacaaagaagtgtgatggtttttgactaaaggccagaatgcattggtagagctacagacacaaag

SEQ ID NO: 212279 - DNA, 100 bp, Homo sapiens
ctccacctcgagagaaagcaggcttccttcaccacgtcaagaagtcggacccggaaagaggctttgagagagtgggaagttccagggtctccctccactg

SEQ ID NO: 212280 - DNA, 75 bp, Homo sapiens
gtcatcaatgttactcaggtagaggatttggggtggaaggcaggcatggtcaaacccatttcactgacaggagag

SEQ ID NO: 212281 - DNA, 76 bp, Homo sapiens
tcctgagcttgagatgctaggaagacttggtgccggtggtggtgtgcacattgagccccggtatagacagttcccc

SEQ ID NO: 212282 - DNA, 99 bp, Homo sapiens
ggctgctcagctcgggccacggagaggagcagcccccggagacagcggcacagaggtgcttctgccaggtgttcaaactggatccaaacaataaagaag

SEQ ID NO: 212283 - DNA, 74 bp, Homo sapiens
ctccaatgcctaccccgtcagttcagcaggcttaccactcttctctcatggatcctgataccaaactcatcgga

SEQ ID NO: 212284 - DNA, 87 bp, Homo sapiens
gcaagggcggagggggcccgaaggacttcggcgcgggactcaagtacaactcccggcacgagggagtgcatccgccccaaccctttt

SEQ ID NO: 212285 - DNA, 90 bp, Homo sapiens
gagacatgggagacccggggtcggaggaacaggagtacagctgtgtagtaaagatgccttctggtgaatttgcacgtatatgccgagatc

SEQ ID NO: 212286 - DNA, 101 bp, Homo sapiens
acttcctgatctctctcgctgtgagacatgtctgagactcctgctcagtgtagcattaagtgtctaaaaagcacggcaagctcattacgttcttacgaaca

SEQ ID NO: 212287 - DNA, 74 bp, Homo sapiens
cggcccggcccggctcgacgccaatgggctacagatgcacatgttgaatggagctcttctggcattgctgtttc

SEQ ID NO: 212288 - DNA, 78 bp, Homo sapiens
agcgcccggataaggcggcgctgaacgcactgcagcctcctgagttcaggtataaatgaccaaggattgtacagagtt

SEQ ID NO: 212289 - DNA, 100 bp, Homo sapiens
aagcctctgctctgcctccggggacaagaaactagagcaaataaccgttttgaaattcaccacccagctatgcagaagtggtaacagaggaacaaaggcg

SEQ ID NO: 212290 - DNA, 146 bp, Homo sapiens
tgggtcaattatgaatccatgctgaaagaatgcctggttggcagaatggccattaaacctgctgttctgaaaggaacaggaggcacgtcctgtacccataaaaaccccaggctccactggcagacggcagacaaggggagaagaga

SEQ ID NO: 212291 - DNA, 100 bp, Homo sapiens
gtctccaggagacccggggacagcatcgcccaggcccctggtgagcttgggatctgcgacaaaagggaccgagggctggagtgcagtggcgtgatctcgg

SEQ ID NO: 212292 - DNA, 51 bp, Homo sapiens
cagagtggagcgtaacgcagtgggtctctcattcatcacttttatctgcta

SEQ ID NO: 212293 - DNA, 50 bp, Homo sapiens
ctggagcttttcccctccccgggcaaggattactgcaaagtaatatttcc

SEQ ID NO: 212294 - DNA, 83 bp, Homo sapiens
caagtgtcggcactgtgggaagtgagggccccaaggctgttgcagctcctcgacctgatcggttggtcaatcgcttgaagaat

SEQ ID NO: 212295 - DNA, 100 bp, Homo sapiens
cagttgtatgtgtagaaagtgaaatcagaggagatgtaactatcggatgggactgaggaagacccacaggcagaactggccatcattcatggtcagatgg

SEQ ID NO: 212296 - DNA, 99 bp, Homo sapiens
attcctttcaactctgaggattcacagcagctggaagaggcatatagctctggaccatcgagtctctgtataaggaactggtggaagaaggattactga

SEQ ID NO: 212297 - DNA, 100 bp, Homo sapiens
cttgtcccaccttcggcagagcagcgaccctatgctgagcgagttcaagcttaagatctccttcagcgagacagccctggagaccacgtaccaatacccc

SEQ ID NO: 212298 - DNA, 51 bp, Homo sapiens
cttggactgagtcctgcaggacacaggttcttgatagtccacaatgggtga

SEQ ID NO: 212299 - DNA, 75 bp, Homo sapiens
atagagcttcgcggagacggcggaagcggagagcaacagcgcgccgcaagccagggctgagcaggaagaagaatt

SEQ ID NO: 212300 - DNA, 97 bp, Homo sapiens
tcccaaccgtgaatggactgtttagatggtttaaggatcactaccaggatcctgtaccagggactctcgggcccggccaccttatactgttgcggct

SEQ ID NO: 212301 - DNA, 96 bp, Homo sapiens
tgaagactgcctttacttaaacatctacgtgcccacggaagatggtcacagttacctggagaggctcctgaatgttgaggtgccccagaaagttgg

SEQ ID NO: 212302 - DNA, 96 bp, Homo sapiens
gggaccagattctgcgcgtcaacgacaaatccctggcccgggtgacccacgcggaggccgtcaagggcttccagcggctgaaggctgcccacgcgg

SEQ ID NO: 212303 - DNA, 100 bp, Homo sapiens
cctgtcagcatggaaagtcgggggctttcgcccgggtcctcctagaaattccccccgaagaagactcccccacatctggacactgtcacatgaacccaaa

SEQ ID NO: 212304 - DNA, 97 bp, Homo sapiens
gtcgtggatgaagaagagcaggcggaggtagacgagtgtcccagaagcttttgttgacaattccagtttccgaacaaaacatttcggcaatggtgag

SEQ ID NO: 212305 - DNA, 112 bp, Homo sapiens
atcctgctcctgggtgccgtggcatgtcgatttgtccttcactacagaatgtatgacaacatgtccacaatggtgtacataaaggaagacaagttggagaagcttacacagg

SEQ ID NO: 212306 - DNA, 98 bp, Homo sapiens
ggaggagacccccggaggaggcgacaaacttcgcagtgccgcgacccaaccccagccctgggtaggtatggcgatggtgtcagcaggaacttggtggt

SEQ ID NO: 212307 - DNA, 75 bp, Homo sapiens
gacactttcatttattcctgtgtgtatgaagatcgagaaaagtaaaaagatggcctatcagaaggtccatgcaga

SEQ ID NO: 212308 - DNA, 88 bp, Homo sapiens
cggctctcccaaggaagataccgagtgggagaaaagatcctcttcattagggagggatttgttcgtgttgaccgagattatgtgctga

SEQ ID NO: 212309 - DNA, 90 bp, Homo sapiens
tcatggatcaactgataagttgccttatgtcaccatgggtatctctggagacaaagtagagatagaccctgttacgaatcagaaagccag

SEQ ID NO: 212310 - DNA, 75 bp, Homo sapiens
gccttcaacaccaccttcatctccaccatcggcatcctgacatcgaggcccaggagagaggagtccggtgtctac

SEQ ID NO: 212311 - DNA, 100 bp, Homo sapiens
agttagagtggacctacctgataaataccctttcaaatctccatctatagcggcttcatatacagatagctctgatgatgagacatcgcccagggacaag

SEQ ID NO: 212312 - DNA, 100 bp, Homo sapiens
cctgctgggcccagcactcaaagatgccatgttggaactcaatgcttcaaatgacagaagaagctcattcacacagaagacccatttaatgatgaacatc

SEQ ID NO: 212313 - DNA, 126 bp, Homo sapiens
gcggcgcgtgagcggcactgatttgtccctggggcggcagcgcggacccgcccggagatgagtgaactttgaggcgctgatcatcaccatgtcggtagtcgggggaaccctcctcctgggcattgc

SEQ ID NO: 212314 - DNA, 100 bp, Homo sapiens
gaggcgattccagagagcggcggaaaggataagcctcgacttagaagctaccgagttaccctaagaaagatttttcggacgccgcccgatactacattcc

SEQ ID NO: 212315 - DNA, 97 bp, Homo sapiens
acaaatgtttttctgttttgcctgaatacatgatttaaacaagagatttccacagaagaatttatccagttggcgaaggactttgaggatttccgta

SEQ ID NO: 212316 - DNA, 100 bp, Homo sapiens
tcgtctccaacttgctaaaaatgggtcacacagtgactgtctggaaccgcactgcagagaaagagcctcctcaacaagcccaagagtgagatgaccccag

SEQ ID NO: 212317 - DNA, 100 bp, Homo sapiens
atgatgatcctgccactggtggtctccagccggctcagttcggggaagctgcaggagttcggcgtgggtgatggcagcaagctgaccttggtacccaccg

SEQ ID NO: 212318 - DNA, 100 bp, Homo sapiens
gcagtacaacatctacaatgttggctcaagatgctgtgaaacaagctatgcagaagcatcttcttcaaggctggttacggttctctgaaggaaatatctt

SEQ ID NO: 212319 - DNA, 90 bp, Homo sapiens
gacaaggtggccgacaacctggccatccagcttgctgggtcaactgctacatgccggccaatggcgagacggtgacgctgcccacaagcc

SEQ ID NO: 212320 - DNA, 90 bp, Homo sapiens
agataaacgaggggctggaacacctcgccaaagcagagaaataaaaaatggctacaaacttcctagcacatgagaagatctggttcgaca

SEQ ID NO: 212321 - DNA, 75 bp, Homo sapiens
ggaaaggcttgcccaggtctttccttaacagattcactcaggaaggtgtcttgctgcaggtaactaatgaagaag

SEQ ID NO: 212322 - DNA, 108 bp, Homo sapiens
gcgggagcccaggagcctgccccgccctggggacgaagagctgcagctcctcctgtgcgggtgctggagaatctggtaaaagcaccattgtgaagcagatgaggatcc

SEQ ID NO: 212323 - DNA, 100 bp, Homo sapiens
ccagaagtcagaatccaagatgcacttttccagccattaactccaggctctcgagaatttgaagatgttgtaaatattctccattcttcttaccttgaac

SEQ ID NO: 212324 - DNA, 85 bp, Homo sapiens
gactgaccaccaagtccttccgacccttcgtcccacgggcgcagttgtgtagcagttgagtaatgctggttagctgttaaggtgg

SEQ ID NO: 212325 - DNA, 142 bp, Homo sapiens
aaaacacagcagttgcaccctgttttgcaaaaaccatcagtgtttgggaatgattctgatgatgatgatgaggttaaaacgtttggacctctggccgcaggaaatgggaccaaccttgatgaatatgtggctttggtggatg

SEQ ID NO: 212326 - DNA, 74 bp, Homo sapiens
tggtgaggcttcccgtcatattccagaccagcatctcagacatgtcgaaaaagatgttttgatccctaaaataa

SEQ ID NO: 212327 - DNA, 50 bp, Homo sapiens
ggctgctccttcctcacaatttgaataatccagaatggctactctgatct

SEQ ID NO: 212328 - DNA, 98 bp, Homo sapiens
ctctttcaacagatagaaaggcaggagcagcttctggatgaaatacatcgtgagaagagaggtaaacgcaaagcactgaagttgaattttgcaaatcc

SEQ ID NO: 212329 - DNA, 99 bp, Homo sapiens
ctgctgtacttcgtctatgtggcgcccggcatagcttggctgaagaggaaataaaaacagaacaggaggtggtagagggcatggatatctctactcgct

SEQ ID NO: 212330 - DNA, 82 bp, Homo sapiens
ctctatggagggccatctgtacaatggcttcaacctcatagcagccgacctgagccaacttctctttgcctgaaaaatgcga

SEQ ID NO: 212331 - DNA, 100 bp, Homo sapiens
tcggaccggccctgccgcccggcttcaaggcccgcggaacagcggaggacgaagagcgggacccgagccctggaaggatgataaagactatgctttaaaa

SEQ ID NO: 212332 - DNA, 114 bp, Homo sapiens
gataatcagctgacagcccttcctgacgatctggggcagctgactgccctccaggtggtcattgggactcccacacttaaacaaagaaaggaaattctgcaagtgattacctcg

SEQ ID NO: 212333 - DNA, 83 bp, Homo sapiens
ggtgctatgggtgatcattccaagagtcagcccaaggccaaccccactgtcactctgttcccgccctcctctgaggagctcca

SEQ ID NO: 212334 - DNA, 83 bp, Homo sapiens
gtcctccctgcctgccgatgtgcatcggtacatgaagatctctgatccagtatatacggcctgtgttcgtgtcccggtcagac

SEQ ID NO: 212335 - DNA, 98 bp, Homo sapiens
ggtggctctttgctaagtgctgctgttgcttcccgtgtagaggtcactttggaacttcttgggtgaagcactactgtacatatcaacgggattccaaa

SEQ ID NO: 212336 - DNA, 100 bp, Homo sapiens
cctgaattgtacccttgtttcagagcctaacagaagttaccccccaagcgtccagaactccctccaactctaatgagaatgaaagatgagcctgaagtag

SEQ ID NO: 212337 - DNA, 100 bp, Homo sapiens
cccctggacttctcctcggtgctcctggaggcaggtggtgctttgtaaatttcactccgtgtttctgtctcagaaagggcaggtttatacctgtggtcat

SEQ ID NO: 212338 - DNA, 106 bp, Homo sapiens
cgatcttgggacccaccgctgccctcagctccgagtccagggcgagggggatatgagactttctactcggaatatcctgagtgttgcgtggatgtaaaacccattt

SEQ ID NO: 212339 - DNA, 90 bp, Homo sapiens
ctactcagtctgttctccactcctcatgacagagggagttacaaagcgtttggcagaaaagaatgactttgtgatcttcctgtttacatt

SEQ ID NO: 212340 - DNA, 100 bp, Homo sapiens
ccacactcaagttctttcctgccagtgccgacaggacgcaaatacttccctggacaagaaagccagatgaaactgatctaccagggccgcctgctacaag

SEQ ID NO: 212341 - DNA, 80 bp, Homo sapiens
tgctcctctctccttggcctctcctgggatcggcccaaggccagttctccgcaggagaaaatgcagaagtctccatggac

SEQ ID NO: 212342 - DNA, 50 bp, Homo sapiens
cacccgcctcggactctattgggagctgctgctcttcctccagaacctgc

SEQ ID NO: 212343 - DNA, 51 bp, Homo sapiens
ccgctgcctgcccaggaggactactacaggactatttgctgtggaataagc

SEQ ID NO: 212344 - DNA, 51 bp, Homo sapiens
cgccgtcaacgccttcaaccaggaggtgtcgtgaaaactacccctaaaagc

SEQ ID NO: 212345 - DNA, 100 bp, Homo sapiens
gctggaccagagtcgagttccctcctcctgcaccaaagggagccgccaccgtctggtgtctaaaccgcctcgggtgagagcacagtaaggactattgcta

SEQ ID NO: 212346 - DNA, 101 bp, Homo sapiens
ggcaggtgtacaatgccaccattgcagagcatgccccggttggacactgctttctgcaggcctcattgctacgatttcagagtaccctggtaatagctgag

SEQ ID NO: 212347 - DNA, 48 bp, Homo sapiens
tcaggacgtaaatggaaccctgatgtcatctgggtgattctcagtgtg

SEQ ID NO: 212348 - DNA, 75 bp, Homo sapiens
attacagctctcagatgtcccaaggacctattgctatgcagtggaatgcagtagccctctgggcctgggatattg

SEQ ID NO: 212349 - DNA, 100 bp, Homo sapiens
gctacgtctttgcccaggagtacgcacctgctggggacctgtttgacatcatccctccccagaatctccggcctgtgaaactgtgaggggattcggccaa

SEQ ID NO: 212350 - DNA, 100 bp, Homo sapiens
tcgcgagccccagccaggcccttggagctggggagatcccggcaccttctgagacacgaaaattgcctaagaattatgacccaaaagttaccccagatcc

SEQ ID NO: 212351 - DNA, 90 bp, Homo sapiens
ccattccaaaaaaataagaaaaacagaaaaataataattacatctgcaaagaccttatttccagaacatttccccagaggagctcaaaat

SEQ ID NO: 212352 - DNA, 100 bp, Homo sapiens
gtgctctgccatattgtgtcttccccggccggtccctcgcctcccggccgagctgacggcttatgcaagcaaagatctggaggagcagttacggtctgtg

SEQ ID NO: 212353 - DNA, 82 bp, Homo sapiens
gcaggctctgcgggaggtggagcacctgaagagatgccagcagatgtgaagttcatttccaatccgccctccatggtggcag

SEQ ID NO: 212354 - DNA, 98 bp, Homo sapiens
cgccggggccacggcaggggcggcggccttacgggcatgttttccacaaatcctgcgtggatccctggcttagtgaacattgtacctgtcctatgtgc

SEQ ID NO: 212355 - DNA, 75 bp, Homo sapiens
ctcctgagtaactaggaccacagattgcaaatagaagagtcttccaaaccagtgaggctatcacaacagctggac

SEQ ID NO: 212356 - DNA, 75 bp, Homo sapiens
tcgctcctccccagggcccagtgcggactcgcctccgtgaagggtgaggtggctttgaccccgggttgcccggcc

SEQ ID NO: 212357 - DNA, 82 bp, Homo sapiens
ctggcagcagacatcagccacgcatctgaccttgttggagactggtctctgtgctgacttccacccgagtggggcagttgtg

SEQ ID NO: 212358 - DNA, 96 bp, Homo sapiens
aaagaagattccatggccaggccccactggaggagatgaggaaggctgccgaggatctggaaattaaggaagaggcccagcagaagggactcgctg

SEQ ID NO: 212359 - DNA, 98 bp, Homo sapiens
tttccgtgagggtggaagaaaatcataccatatcagatgcctcgcagagcaccaggcccaccgtgaaaggataacaaagccattgacctttgccgatt

SEQ ID NO: 212360 - DNA, 90 bp, Homo sapiens
ccacgtgcagacatctacaaccttcgatctcctgacgagtctcattcaggaacgtcgcctgataacactgcaccaccacctccccctcca

SEQ ID NO: 212361 - DNA, 50 bp, Homo sapiens
attgctgtattgtgctcaggatttgcaggaagttcatcagcagaggaaat

SEQ ID NO: 212362 - DNA, 90 bp, Homo sapiens
gggacgccggagacccttctctccccatcaggtgccctacgagacgctgaacaaacgctttcgcgccgctcagaagaacattgaccggga

SEQ ID NO: 212363 - DNA, 100 bp, Homo sapiens
cagattttgcattggatattcgcatgcctggggttacacctaaacagatggagaacatcattgcaacagtaagagattccaacctcaagctgacccttgc

SEQ ID NO: 212364 - DNA, 100 bp, Homo sapiens
ctctcaggtgctgaaccagatgatgaagagtatcaggaatttgaagagatgctggaacatgcagagtctgcacaaggtttgtggatgcacttagatgttt

SEQ ID NO: 212365 - DNA, 100 bp, Homo sapiens
ctgaactgactgccccgcatcaccggagcgtcccagctgcgaggagattctctctggcccaaaatccgggttccattaaaagttgtgaggactgctgaaa

SEQ ID NO: 212366 - DNA, 100 bp, Homo sapiens
acacagtagcagctggaaccatgacaggcatgttgtataaatgtacagagcaccagcctccctacatcattgcagtgttgcctcgatatgttgagatccg

SEQ ID NO: 212367 - DNA, 101 bp, Homo sapiens
atcgtcccctggactctctcaagggatgccaagggagcagagatgcctgcagcccgtgggagcaagtcctggcctttgcagttgcaaaaactggctgcaag

SEQ ID NO: 212368 - DNA, 100 bp, Homo sapiens
tacttctgttatctgctcagacaagactggtacacttacaacaaaccagatgtcagtctgcagggaactgacccaggagtgtgatgaaaagaaatcccag

SEQ ID NO: 212369 - DNA, 60 bp, Homo sapiens
tttggaatgaatttggaatcttcccttgaagagtgaaggagaacgacctgctcagaatga

SEQ ID NO: 212370 - DNA, 51 bp, Homo sapiens
atcgaaacagatacagagatgtaagcccatacacatagtggatctgtatgg

SEQ ID NO: 212371 - DNA, 90 bp, Homo sapiens
tgattgatggccatgcaggagaaatatccaactgaggggatctctcacgtcacttcaccgagactttccttatcccagttgattgtgcag

SEQ ID NO: 212372 - DNA, 100 bp, Homo sapiens
tttctttggttgccaaggctacatatttctaaaataaacagagttgtctttgttggaaactttttacgtgtcaataccctctcaatgaaacttttggcat

SEQ ID NO: 212373 - DNA, 100 bp, Homo sapiens
aacaaatttactattcggacaaatacgacgacgaggagtttgagtatcgatgcccatccagggaggacttccccctgattgagacagaggatgaggctta

SEQ ID NO: 212374 - DNA, 75 bp, Homo sapiens
aaacattgacgaagctattacattgcttgaacaaaataattgggacttagtgaacatcataggatcaagtcctgt

SEQ ID NO: 212375 - DNA, 100 bp, Homo sapiens
tcccttgctcccatccctgcagcatgaacaaggagaaaatgctgagaagcttctgcagttcaagcgttggttctggtcaatagtagagaagatgagcatg

SEQ ID NO: 212376 - DNA, 94 bp, Homo sapiens
gaaggagctggagacggtcgtagctgcggtcgcgccgagaaagacaatgcagatcttcgtgaagactctgactggtaagaccatcaccctcgag

SEQ ID NO: 212377 - DNA, 74 bp, Homo sapiens
ggagctagaactcaaggtgcccctggtggtccggcttgaagacccaacatgagtgaagtttcctgcaagaaacg

SEQ ID NO: 212378 - DNA, 82 bp, Homo sapiens
aatagacaactctgggctattttcaggggaaggtgtggctcattgactttaatccatttggtgaagtcacagattcactgct

SEQ ID NO: 212379 - DNA, 75 bp, Homo sapiens
ggcatggatatctctactcgctccaaaggactcagtggcctttgaagatgtggctgtgaacttcacacaagagga

SEQ ID NO: 212380 - DNA, 95 bp, Homo sapiens
gagtcagcccgccagcccgccagctcgtcagcccgccagccagcgcttcgcgggccctgtcggtcccggtttctaagcatgaattgaggaacaga

SEQ ID NO: 212381 - DNA, 82 bp, Homo sapiens
gttcttgtttgtggatcgctgtgatcgtcacttgcttgaaggatgccaatgatgtaccaatccaatgtgaaatctctcctct

SEQ ID NO: 212382 - DNA, 75 bp, Homo sapiens
tcagcggatgtggcagccccgagccatggctctcgccgtccgagtcgtttattgagaggagccatcaaaactcga

SEQ ID NO: 212383 - DNA, 82 bp, Homo sapiens
tgttcgtgttgttggcacaacatttcatggaactgctgagtcagtgctgattctctcaaatagagcttgaaggataaatctt

SEQ ID NO: 212384 - DNA, 117 bp, Homo sapiens
cctcacttccctgtactctcatcgctctcggcctccgacacgctttaatgaagcaccagttgagattcccagtccttctgaaaccccagctaaaccttctgaacctgaaagtacctt

SEQ ID NO: 212385 - DNA, 75 bp, Homo sapiens
ttaaagctaccaatggaccaagatatgttgtgggttgtcgtcgacagatctacagacagtcaatgtggatgagaa

SEQ ID NO: 212386 - DNA, 75 bp, Homo sapiens
aaggggaacagaaccaaccaggctttacagatgcttttactgactctgctatcagtgctaaagtgaatggcgaac

SEQ ID NO: 212387 - DNA, 82 bp, Homo sapiens
gaagaagcatcgttaaagtctctcttcaccctgccgtcatgtctaagtcagagtcatggctccgatcttcatcttgaagaag

SEQ ID NO: 212388 - DNA, 98 bp, Homo sapiens
caaaattatgggcagactgtttgctgacgaaggtatccaattggtttggcaacaaacgaatcaggtacaagaagaacattggcaagtttcaggaagaa

SEQ ID NO: 212389 - DNA, 83 bp, Homo sapiens
cggatcaatccagatggcagccagtcagtggtggagatacagaaggtggtcatggcactaggagactacatgggcgcctcctg

SEQ ID NO: 212390 - DNA, 98 bp, Homo sapiens
atgttgtgaaccgggtcgcggcggccgaggctcggggacccttcaaagttgtacaagaaagcagatgatgttgcagccattgaatgccagtctgaaga

SEQ ID NO: 212391 - DNA, 100 bp, Homo sapiens
gttttggatgatcttgaccccgagagtgatgccaatgaccatccagttctccattctgattatgctgcactcggctctggtcctcatcaccacagcagag

SEQ ID NO: 212392 - DNA, 82 bp, Homo sapiens
gctgttcctattcggccatctttgctcctccctgcaactaactccattcttaattgagtttgaacaactgactcttgatgga

SEQ ID NO: 212393 - DNA, 101 bp, Homo sapiens
ctcagaagctgctcctggagacagctgccccgagggtctcctccagtagacggtacagcgaaggcagagagttcagggccatgaagcccccaggaggagaa

SEQ ID NO: 212394 - DNA, 100 bp, Homo sapiens
ggtaccggccgtggaagcggccaccgactactgtcagcagctgtgccagtgtgcaaagatccaccttacaaagtagaagaatctgggtatgctggtttca

SEQ ID NO: 212395 - DNA, 75 bp, Homo sapiens
gctcgagtcacccgctcctcagccaggctaagccagagttctcaagataagatgctcccaagtcccttgcagctc

SEQ ID NO: 212396 - DNA, 98 bp, Homo sapiens
catgtatggcccacctggctgtgggaagaccatgttggcaaaggcggtggcacatcacacaacagattttccaagatagcctccaacacccagagtcg

SEQ ID NO: 212397 - DNA, 100 bp, Homo sapiens
ctttgaaccccaaataaggaagattgtggatcaaataagaaatgcaatcgtgtctattaaggaactatgtggactccctccaattgccagtctgaagcag

SEQ ID NO: 212398 - DNA, 83 bp, Homo sapiens
gtgtgggctgtgtctctgcagggcaagtaaaggcatgacttcctggcaccacagggaaaatcgggtgcaagcccagaaactat

SEQ ID NO: 212399 - DNA, 100 bp, Homo sapiens
gttaaggattccaagtaactcttatttgattgcattcatggcttctctggcaacccacttcagcaatcagaacagtgggattatcttcagcagtgttgag

SEQ ID NO: 212400 - DNA, 51 bp, Homo sapiens
gtgagtggctaatcgtgaaccggaagattctcagcaagttacagaagtatc

SEQ ID NO: 212401 - DNA, 100 bp, Homo sapiens
gcgctttggagccggccccaggcagcgtgtgtcggtcgcctagtctggagaactagtcctcgactcacggtgtgatgatgatcagatgtctaacgataag

SEQ ID NO: 212402 - DNA, 97 bp, Homo sapiens
aataaatccagtccagcgtgcgacgacttactggcttcatgaattaaacaaccaccatgtcgagcaaaaaggcaaagaccaagaccaccaagaagcg

SEQ ID NO: 212403 - DNA, 74 bp, Homo sapiens
caaggaagaaattgttcagttcttctcagcgggctacattgagagacctcagctgattcgagcaaaagtgccaa

SEQ ID NO: 212404 - DNA, 50 bp, Homo sapiens
ctgggaagccaacgaccacacgcagctccccacaggtgcaggaagccgcc

SEQ ID NO: 212405 - DNA, 83 bp, Homo sapiens
cttcacctgcagaagcgtgtcgttctgcaccagcgccttgatcgagtacttgagatctgccgacaccccaggccatcgagccc

SEQ ID NO: 212406 - DNA, 83 bp, Homo sapiens
aattttagggtcctttatatagaagggagagtagaaatgggacgtcggtcatcagatactgaagaagaaagcagaagcaagag

SEQ ID NO: 212407 - DNA, 82 bp, Homo sapiens
cctggatcttcgaacttttgacacggctttggaaacgacgtcatgtgttagatgaagtggctgtaattgatgaaattcaaat

SEQ ID NO: 212408 - DNA, 98 bp, Homo sapiens
ttacctccatgcaaattgggtgcttcacagagacttgtgtaaacaggaacatcgataagtagtgtaaaaacttgcacaatgaaatccgaagccaagga

SEQ ID NO: 212409 - DNA, 96 bp, Homo sapiens
cgccaatcccatcagccccatgcagtgggtgggcactgtgcttgtgttcctggcttttgaagagggagaacagcagattgctcagttacatgggtc

SEQ ID NO: 212410 - DNA, 82 bp, Homo sapiens
attcagccagcacactcctcgcgagcaagctctaatggtaccaagtgacaggttggctttactgtgactcggggacgccaga

SEQ ID NO: 212411 - DNA, 95 bp, Homo sapiens
gcggagagcaacagcgcgccgattgcaggcctctgctcaccaaaaggccttagccaaggaccagacaaatgagggcaaagagcttgctgagcaag

SEQ ID NO: 212412 - DNA, 98 bp, Homo sapiens
catttatcaccttctgtggaaaggaagctgcacaggaagccgtgaaactggacacagcattgttggttttgccatgtactattttacctatgacccgt

SEQ ID NO: 212413 - DNA, 87 bp, Homo sapiens
gtgcagtaaaagtaaccccgagggaggtctggagcaacaaggactttttcaagtcaatggaaatgctgagacagtggagtggcttcg

SEQ ID NO: 212414 - DNA, 100 bp, Homo sapiens
aaagtcatcaagcaatctcccatcttccaactggacaacctctctccccaaatatgcctccagattccagtgaaccagtagtagaagatgaaagattgca

SEQ ID NO: 212415 - DNA, 100 bp, Homo sapiens
ggaatccctacgcgtccctttgggtttagcacgatgagctcaatcggcactggggtgttgacttcaaaatcaaaactgtagagctaagaggaaagaaaat

SEQ ID NO: 212416 - DNA, 80 bp, Homo sapiens
gcatggcagaaagggggcatctttaagctggtgaaactgcgtgctgtaagctgggaccagctttgtccataactgctgag

SEQ ID NO: 212417 - DNA, 74 bp, Homo sapiens
tcccagcactttaggaggccaaggccgcattgacaggaagattgagttccccctgcctgatgaaaagacgaaga

SEQ ID NO: 212418 - DNA, 90 bp, Homo sapiens
aaaggaggttttaaacagtataacaggagacgcaggtcagaatggaaatgggctgcagaccgggcagctattgtcagccgctggaactgg

SEQ ID NO: 212419 - DNA, 100 bp, Homo sapiens
tgcatggaggagctggtgagcctcatcacacaggatccgcccctggacatggaggagaaggtccgcttcaagctgatcagctgaccgaagaacagattgc

SEQ ID NO: 212420 - DNA, 89 bp, Homo sapiens
cgtcccggccatctcgctgcccgacgatgtccgcaggcgctctgcggccgtcacgatgttctggaagtttgacttgaacaccacgtccc

SEQ ID NO: 212421 - DNA, 82 bp, Homo sapiens
cacagatgcaaacggacgggccaacgccgtggccagctccactgagagaaccccagacaatgcagatcttcgtgaagactct

SEQ ID NO: 212422 - DNA, 98 bp, Homo sapiens
gggtattgtaccgctgagggaaaggagcgggactccggacctccaggagagtacccaaaggcaagtggaacagctctaatggggttgaagaaaaggag

SEQ ID NO: 212423 - DNA, 75 bp, Homo sapiens
accaatgagggagaagtatcggaagaaagcagttccaaggtgaccaagaatatggcccaggtgaccaaagccctg

SEQ ID NO: 212424 - DNA, 75 bp, Homo sapiens
gcgagactccgtgggtgtaggaccctccgagccaggcactgtgctaagttggacttacagagatgaataagattt

SEQ ID NO: 212425 - DNA, 100 bp, Homo sapiens
catcctggattctggaggcatcattgtggccattgagcacagcagccgtcctatcaatgtgattaagccataggaaaaggatacagagtagagtttcatg

SEQ ID NO: 212426 - DNA, 98 bp, Homo sapiens
tctctcagaagatcagatgagccgtcttgccaagtattaaaggtggaagaaggtccatatctttttctgtgggtgcttcaagtgttgttggaagtgga

SEQ ID NO: 212427 - DNA, 75 bp, Homo sapiens
ttacggaatgtgtccagcttgatagctacaaatgaggaccacagagttcttggaaaatactccatccagtctgaa

SEQ ID NO: 212428 - DNA, 82 bp, Homo sapiens
agaccctggagcctcagttggaagcagccgatccagcctgcggagcctgtggggcaggatttccagatgtgacttgcactca

SEQ ID NO: 212429 - DNA, 83 bp, Homo sapiens
cagcggggcgctccaggaggcactcacagcggagcgtgctttggacaccatgaattttgatgttataaagggcaagccagtac

SEQ ID NO: 212430 - DNA, 100 bp, Homo sapiens
tcttacgcctcttctgccattacgttcccaggaatcaagttgccaccttccagagaagaggtacgagatgacaagacaaccataaagtgtgaaacctccc

SEQ ID NO: 212431 - DNA, 100 bp, Homo sapiens
ggcaggtcctaagcaaaggggacaagcggcccctttgttgctttatgcaaacagacgggacttgcgattggttgatgctacaaatggcaaagagaatgct

SEQ ID NO: 212432 - DNA, 75 bp, Homo sapiens
ggaatggtagcttcctggggatggtatgctggatatacaggaactctcctgatgaatgcagtgtggccaaaggcg

SEQ ID NO: 212433 - DNA, 82 bp, Homo sapiens
atgtgtgtgaattggatttgatcttccatatggataagatacattccaccgttgatctgggggaaaagtggacacatccaga

SEQ ID NO: 212434 - DNA, 82 bp, Homo sapiens
tgaaaaaaatgcattatgtggaccctgaccatgtaaaggaaatccttttgtactattgctcattcatacttgttcatcaaag

SEQ ID NO: 212435 - DNA, 75 bp, Homo sapiens
cctatcaagaggaagcagaacgtctgcacaagcgggtttattacccagaactctttgtctgggtcagtcaagaac

SEQ ID NO: 212436 - DNA, 58 bp, Homo sapiens
gagaaactgaagcgggacgttgaggcagccctgaagcagcttcctaggaacaaggtcc

SEQ ID NO: 212437 - DNA, 100 bp, Homo sapiens
ctgaaccagacggacccatcatttaagagttcctgagggaagacctcaattaccatgacccaacagtgaaacacagcaccttccatggtgaggataagct

SEQ ID NO: 212438 - DNA, 74 bp, Homo sapiens
gttcacgtgactgtggatctcaagtactaccggccaactgaagtgctacagcctccgcttggcgtcccgatgct

SEQ ID NO: 212439 - DNA, 90 bp, Homo sapiens
cattggtctggctgttgggaaggaaaaagagctgcgggcgtctttggagacacagcgtgctcagagcagtcgactctgcgtggcactgaa

SEQ ID NO: 212440 - DNA, 83 bp, Homo sapiens
cagcctctagtcatcgtggaagacaaggaacccacagaagagccgaatgcacataaggtcgccagcccaccctccggacccgc

SEQ ID NO: 212441 - DNA, 90 bp, Homo sapiens
ctgcatcgaggttctccgctctatgcgctccctggactttaacacgcgcacgcaggtgaccaggttccgggtgacacacattgagaagcg

SEQ ID NO: 212442 - DNA, 75 bp, Homo sapiens
gcagcccctacactgtcactgttggccaaggaagctggagaagcttcgagagaaggagcgtaagaaggaagccaa

SEQ ID NO: 212443 - DNA, 125 bp, Homo sapiens
ttgacaaggaggggaacggcaaagtcatgggagcagagctcagacatgttctcaccacccttgggagttgaccacatttggccatttcccagaagggccccaccccaagggtgagtggccaatgg

SEQ ID NO: 212444 - DNA, 124 bp, Homo sapiens
gccgcgactacagcatggtggagtcgcctctgatctgcaaagaaggagaaagcgtgcagccttgaaaagatcttttgaggtcgaggaggtcgagacacccaactccaccccaccccggagggtc

SEQ ID NO: 212445 - DNA, 98 bp, Homo sapiens
cgccggcgcccgggagacccaggaggagcccgcagattgtctaaagccccaggaaaaatggtggaaaattcaccgtcgccattgccagaaagagcgat

SEQ ID NO: 212446 - DNA, 100 bp, Homo sapiens
tctctgcagaatttctgaaagttttccttccatctctgctgctctctcatttgctggccatcggattgggaaatggaatctatttggaatttgcagaagc

SEQ ID NO: 212447 - DNA, 75 bp, Homo sapiens
acggctccagcatcaagatccgtctgacagatgccaattctcggaagcaagaagcagagtggaaagaaaaggcaa

SEQ ID NO: 212448 - DNA, 97 bp, Homo sapiens
gcagaaagttcttcttctatctcatcatctgcttcattgagtgctgccaatactccaacagtagttgctctatatgcaatcagtgctgtctactttg

SEQ ID NO: 212449 - DNA, 100 bp, Homo sapiens
cttctatgtgctgtgtccggacaacggctgcggcgacaatttttggttagcaggaagaagatgagccttaagtctgaacgccgaggaattcatgtggatc

SEQ ID NO: 212450 - DNA, 75 bp, Homo sapiens
acggaggtagtcatgatctatgacgccgagaagcagaggccccgagaattcagcggggtgccaagtcgttttctg

SEQ ID NO: 212451 - DNA, 51 bp, Homo sapiens
gtgaccccagaggagtttgctggacttcttgcctcgaggatctggcattgt

SEQ ID NO: 212452 - DNA, 97 bp, Homo sapiens
gagcagggctcaaataccgccgctgaggactggtatgaacagttgtatcccctcatccttaccctgaaggactgcatgggagaagtggtgaaccgag

SEQ ID NO: 212453 - DNA, 90 bp, Homo sapiens
caacactcacgtgaagaagttcagcctggccgcaactcgcagcaatgaccctgtggccattgacagtcattttgtttactcattcagccc

SEQ ID NO: 212454 - DNA, 101 bp, Homo sapiens
tttgcctttctggacacagaagtatttgtgacagttaactgcctgtatccatggatcagctgctcttctatacccaatgtattggcaacacatatacatcc

SEQ ID NO: 212455 - DNA, 75 bp, Homo sapiens
ctggcctcacggaccttgggctgaccggtctgtctggcttcagggggggccctcagcctcttggccttgaacggg

SEQ ID NO: 212456 - DNA, 51 bp, Homo sapiens
cagcaggagatacggaccctggaggtcagtaacagatccaagagatggaaa

SEQ ID NO: 212457 - DNA, 75 bp, Homo sapiens
tctcaggatatgacaggggtaacacccttccagatgatttttgagctctggtagctgaagaacatctcacagtgg

SEQ ID NO: 212458 - DNA, 75 bp, Homo sapiens
ttgctaacgtttagagagtgcttccccttgccgagcactggagccctgaggatgatgacaggaaggtccgaagga

SEQ ID NO: 212459 - DNA, 90 bp, Homo sapiens
agggcattttctacctgacccttttcctcatcctggggacatgtacactcttcttcgcctttgaatgagctcacagtgcctgcactttac

SEQ ID NO: 212460 - DNA, 75 bp, Homo sapiens
gtttgagtccgcatcgccacagctgaaggctgcgagggactaagagcagatttgtgaatagcacaatggaagaag

SEQ ID NO: 212461 - DNA, 100 bp, Homo sapiens
ttcggagagggttggggccgtcttcctcatccttccttttctcggggctcccgtggttacgttatgatgatgaagtgaagcgggtggtggcagagccggt

SEQ ID NO: 212462 - DNA, 100 bp, Homo sapiens
caaagtgagacctgtggccatcaagcaactctccgagaggtgagagacttcagaggctgccctttcttttcatctgctgcttgtgaaaggaaaacatctt

SEQ ID NO: 212463 - DNA, 75 bp, Homo sapiens
tttcaacctgaaagtggaggctgcgaaaatagtttctgtagaaaatgtttcctgactgcaatgagggaaagcgga

SEQ ID NO: 212464 - DNA, 98 bp, Homo sapiens
gcggactccttggaactggcttagcgcacccatcccaccttcccgcaccctgggaccgacatatgtagagtgtgtcggtcagaaggaacacctgagaa

SEQ ID NO: 212465 - DNA, 50 bp, Homo sapiens
ggggagccccgggagccgcacgcactctcgagtggaccctgaggagctct

SEQ ID NO: 212466 - DNA, 83 bp, Homo sapiens
cttcctcaactatctcgctgacacgcaggtagctacagcaagctgggtagcaggcagatccaaaggatatcatgaagtttcca

SEQ ID NO: 212467 - DNA, 100 bp, Homo sapiens
ttacaaaggacaacaatattagagtaattggaggtggcattggtagggtggtcaacggagccttcatggtgctgaaagggcatcgatctattgttaacca

SEQ ID NO: 212468 - DNA, 98 bp, Homo sapiens
cagctggttgtggaggaaatcttcaatccagatattggaaggtgcttcaatattggatattcacacagagcccagtttttcaagtttgctttcacagt

SEQ ID NO: 212469 - DNA, 75 bp, Homo sapiens
aaattgatcagcaacaactaactcagcagcaacttaatggaaactaggtcttatcacaatggccatacttagaac

SEQ ID NO: 212470 - DNA, 75 bp, Homo sapiens
cccccacgactgctaccactactgtttcaagccaaacgtaccaagaaagtcgggatcgtcggtaaatacgggacc

SEQ ID NO: 212471 - DNA, 82 bp, Homo sapiens
taagtttacaattttcctacagagagtgaaggaggaatttttatgatgataagaaatatacgtacacatgtttacattggca

SEQ ID NO: 212472 - DNA, 100 bp, Homo sapiens
ttctactcaggtgaaaaagcaatgacaaatcactgcaagagtacacgtcataagcaaaatactgagtgtcctgggtcatgaaacttaatccacagcaagc

SEQ ID NO: 212473 - DNA, 95 bp, Homo sapiens
ttttggggggaaactaggtcgatggtcggcggcgcccggatgggcagctgagatctgactgcagccatgagcagcaatgagtgcttcaagtgtgg

SEQ ID NO: 212474 - DNA, 83 bp, Homo sapiens
aaaagatctggctcaccgaatagccagtggcgaagagaaggaagaatcctgctcaaaaatgaggtgaattaatacttgggcgc

SEQ ID NO: 212475 - DNA, 100 bp, Homo sapiens
cagagccaagggctgaaccaactcagaatgcattgccattttcacataggtttccttgttgcagaatgaaagtgtagaaaaaaacaagagcatacaaagt

SEQ ID NO: 212476 - DNA, 98 bp, Homo sapiens
gctgagcggagtcgtgcggttggtgggggagccctgccctcctggttcggcctccccgcgcactagaacggagctcttgtccctggcaaagcgaaagc

SEQ ID NO: 212477 - DNA, 75 bp, Homo sapiens
ggggaggtcacctgacgaggaggtgagcgaagcaggtgttcacagaccccatgttggtggaattcatggtcgaag

SEQ ID NO: 212478 - DNA, 75 bp, Homo sapiens
tttaccaccaatgggaacatgcacaggtcccccccgcctccagccagcctgtgcagacttgctgcctgctgtgtc

SEQ ID NO: 212479 - DNA, 75 bp, Homo sapiens
ccagaaaaattacagcacatctcagtgaatttgcaagtgcacaacattctgaaattttttggttattgtaatgat

SEQ ID NO: 212480 - DNA, 83 bp, Homo sapiens
gtgaaaatgaagccagaccgagttcaggcccatgaagttcatcagaaaattctggcaactgatgttagttccaaaaatacacc

SEQ ID NO: 212481 - DNA, 74 bp, Homo sapiens
gaacctctaacacagtggaaaggaaccgttctggatcagcttagcagtgtctgcaaaaacgaatcttttcctac

SEQ ID NO: 212482 - DNA, 82 bp, Homo sapiens
agggcgttggctatgtgcccatcacagataacgaaggaggcccaacttcattcaataaggagcctgacggatttatcccaga

SEQ ID NO: 212483 - DNA, 90 bp, Homo sapiens
tgatggcattccagaatatctcagatgagcagctagaaaattatggcatgccgtttagcagaactgaagatgggaagatttatcagcgtg

SEQ ID NO: 212484 - DNA, 96 bp, Homo sapiens
ctcgattaaagaggaaggggcagtgctcacatttctgggcagcctgcagcatggcccagctgttcctgcccctgctggcagccctggtcctggccc

SEQ ID NO: 212485 - DNA, 51 bp, Homo sapiens
tcgattccccagaggggaaagcagtggttccacgagtgtttgggcgcatgg

SEQ ID NO: 212486 - DNA, 82 bp, Homo sapiens
tcaagtcccccaatctctgccatcaaggccgattttctttgaaccttcagcaaagggcttttgttgtaacaccctgacttta

SEQ ID NO: 212487 - DNA, 95 bp, Homo sapiens
ctagcgcctggcctgcgcgccgctgcccgcgccacaggagagaacattgaaagtattctctaagctatttgaagagagtgactaaatgcacctgg

SEQ ID NO: 212488 - DNA, 82 bp, Homo sapiens
gaaaagactgggccgttactgattgagctacgaggaccaagactcttgttcatctgatagtgaaacagaagatgctttagaa

SEQ ID NO: 212489 - DNA, 116 bp, Homo sapiens
ctgaagtgaaatgacatcaagagacctatcaagacctgtatccaggaaaagaagaatcccagacttcttagagaacccagtgactttttgcaccttaaatctgtgaaatcctcatg

SEQ ID NO: 212490 - DNA, 100 bp, Homo sapiens
gaagtgggctgaagaatttaatgatgaaactaatgtgagattgatgctttgacagaagtggtggctgctgtaaaggggaaaattgaagtctacctggatg

SEQ ID NO: 212491 - DNA, 75 bp, Homo sapiens
ctcttgtcccttcattgtcatctgcttttgaggcagtcatggatcaggtaatgcagtttgttgagccaagtcggc

SEQ ID NO: 212492 - DNA, 100 bp, Homo sapiens
gaattcttataaagctgtcatcaacctgggaaggaattcaggctggaaaccctctggaccccgaggttggaccctactgtgacacacctaccatgcggac

SEQ ID NO: 212493 - DNA, 90 bp, Homo sapiens
ctgctacacggcgaactggaacccactcggggactctgccttttaccgcccaagagttccatggcctccacttcccgccgccaacgccga

SEQ ID NO: 212494 - DNA, 82 bp, Homo sapiens
gggagtgcggccctggctaggcatggcactgatgtctcctctgagcctccggcctccataagacccaaaacagatgacacct

SEQ ID NO: 212495 - DNA, 100 bp, Homo sapiens
cattgcattgattgtcttatatttcaagttaaggtccaaaaaaactccagctgtgaaagcaacataaatgacaaagccacagacccaagcatgtcggaac

SEQ ID NO: 212496 - DNA, 75 bp, Homo sapiens
gagaggaacctctatgccgacatcgacgccgcctggcaggccctgcgcaccagctcagctcacctatgaaccccg

SEQ ID NO: 212497 - DNA, 50 bp, Homo sapiens
gacagatctgagagatactgagacaccattcgcttttcacccaagatgat

SEQ ID NO: 212498 - DNA, 101 bp, Homo sapiens
gtgttctatactggaagaggcatgccagaggtagagcagcctctgaagagccaatccattcaggatgggaaaccacgcaggcaaacgagaattaaatgccg

SEQ ID NO: 212499 - DNA, 82 bp, Homo sapiens
aacttgtacagtatgctggaaacattatcccaaggctttaatatgatcctctgttgaagcaagaagacaaactgtatggtgg

SEQ ID NO: 212500 - DNA, 101 bp, Homo sapiens
ggatgttcttcttcgagtatttgtagaaggaaagctgtatgtgatggcttctgtgtttgtctgtctactcctttctggattggctgtgtttttccttttcc

SEQ ID NO: 212501 - DNA, 80 bp, Homo sapiens
ccagttcctgcaagctcagtatcacagggtgaggtggctttgaccccgggttgcccggccagcacgaccgaggaggtggc

SEQ ID NO: 212502 - DNA, 97 bp, Homo sapiens
tttgaagatattagcctaacaagatggaagcaggtttaaaattttacataagaagttacctttttcaggaaatgaacaatatgtcatcagcagcaga

SEQ ID NO: 212503 - DNA, 101 bp, Homo sapiens
aagatggcgaccgagacggtggagctccataagctaaagttcctctgtgacgagggtgcaggtatctctggggactacatcgatcgcgtggacgagccctt

SEQ ID NO: 212504 - DNA, 100 bp, Homo sapiens
aactgtggccttaatgagcatgttgacagcatcgatgctagacagacaaaacttgtgatactttctcactacatggtgcaaacagctgagtcaagttgtc

SEQ ID NO: 212505 - DNA, 82 bp, Homo sapiens
ccgcctacaaggccctgagggagactgcggaggtgcccctctcagctgaggaggaaccgagagcggcgctggggcacctgag

SEQ ID NO: 212506 - DNA, 100 bp, Homo sapiens
tggggcgggacagcggccccctggagggggcagtcccgggagaacctgcggcggccggagcgaataatcatgggccagactgggaagaaatctgagaagg

SEQ ID NO: 212507 - DNA, 121 bp, Homo sapiens
gtaacacttaaaatggtactcggggacctccaaagactaaactgacaagccttcaaggagcccaggggttttttgtgacatcgtaaacatgagccccacacagtgggacttccctgtggaa

SEQ ID NO: 212508 - DNA, 73 bp, Homo sapiens
agcagcctggtcctcccaggacacccggccgatctttcagcagagatgacagaagacgagacacccaagaaaa

SEQ ID NO: 212509 - DNA, 100 bp, Homo sapiens
ataactgaggcgtttctgtacatggattatctgtccagattcctaagatgaggacacagcatcctgggccactgtcactaatacaaatttgcctctggag

SEQ ID NO: 212510 - DNA, 100 bp, Homo sapiens
cctgaccttgcttatcaccgagaggcagcagaagcactgcctggccttcaggaaggtggaggatctgcagttccgcgtggaggaggagtccatcaccaag

SEQ ID NO: 212511 - DNA, 101 bp, Homo sapiens
agacaaggaagcagttctcaacagtgccggtggtggtgtgcacattgagccccggtatagacagttcccccagctgaccagatcccaggtgttccagagcg

SEQ ID NO: 212512 - DNA, 80 bp, Homo sapiens
ctccaagatttacttccttccctttccagcagaattacctgagacgaatcaatgaactgagccatgttcaaatccctgtt

SEQ ID NO: 212513 - DNA, 90 bp, Homo sapiens
ttttgagaaatttcaggatacagcagaagcattagcagctgtgtgagccacacgccagccctgcggctctggatatcagccatgaagtgg

SEQ ID NO: 212514 - DNA, 75 bp, Homo sapiens
caacatccgcgagttcctgcgcggctgcggggcttccctgcggctggaggtatgttgagtctaaaaaggacagag

SEQ ID NO: 212515 - DNA, 82 bp, Homo sapiens
ggggctgtttggaaagacccaggagaagccgcccaaagaactgctggagattcacattttacctgattgccttcattgccgg

SEQ ID NO: 212516 - DNA, 50 bp, Homo sapiens
tgggaaggacaggcagagctaaacaaggccgaaatagaactatttgtgaa

SEQ ID NO: 212517 - DNA, 100 bp, Homo sapiens
tgacatactcagtgtggcctccgtgcgtccagctgtcttgcagaggcatttcatccttcatgaagccattcaggattttgaattgcatatgagtgcttgg

SEQ ID NO: 212518 - DNA, 88 bp, Homo sapiens
accatgggccgggatcacattctgattacaaggcgcctctgtcgaagagccttctgctggtccccagtgccctctccctcctgctcgc

SEQ ID NO: 212519 - DNA, 75 bp, Homo sapiens
ggcgaaggtctcagagctttacgatgtcacttgggaagacatttctcttgggaagttgtgcatctgacaggaata

SEQ ID NO: 212520 - DNA, 100 bp, Homo sapiens
gctttggcgacggcggtggagctccttcgtgggcccctgaggacgcctggatgggcactcaccctaaggtgcacacatcttgaccaactcagcagcaagg

SEQ ID NO: 212521 - DNA, 101 bp, Homo sapiens
cggtcctcagcgactcttctgacctccgcgcgacgtacccgccgccgccgttggctggagggccggtgcataaacttctcccgagttccatctcagtaaaa

SEQ ID NO: 212522 - DNA, 75 bp, Homo sapiens
gccgccgctctgaggagttaaaggacagagcgggatgccaccagcttgtccaaagggaagttccaggagctcctg

SEQ ID NO: 212523 - DNA, 82 bp, Homo sapiens
cttagacgctggatttttttcgggtagtggaaaaccagactacatgaggaaataattgacttttataacttcatgtcccctt

SEQ ID NO: 212524 - DNA, 80 bp, Homo sapiens
aagaacaactgaaaagtgatgaggaactggcaagaaagctaagcattgatattttcggcaagaacaagaattaagaaatg

SEQ ID NO: 212525 - DNA, 51 bp, Homo sapiens
ggggaggagggtcacttcccgtgaaaagacgaagttatacggaagcgtctc

SEQ ID NO: 212526 - DNA, 82 bp, Homo sapiens
gggacgagttcgtcatccgtgctgaggacatcccttccctcaaggtggatccataaagaacccagccaacccgcagagggag

SEQ ID NO: 212527 - DNA, 80 bp, Homo sapiens
tgacttcaagactcggatatgcaaaaaagtctgtggccactacactcaggtttcagccatgccacagagctccggcagtc

SEQ ID NO: 212528 - DNA, 74 bp, Homo sapiens
tgggacaagcgcacgggcctcgccgccagaacggctaaagaacgtgccaatggaatggagcttgatgggcgtag

SEQ ID NO: 212529 - DNA, 50 bp, Homo sapiens
ccagtgcatcttttgcacagctggcaccatgccggtggaaaggatgcgca

SEQ ID NO: 212530 - DNA, 75 bp, Homo sapiens
caaacgggcgctgacctcaaccagcagcggcggtcctggaagaacgccgaggaccgcatggcgctggccaacaag

SEQ ID NO: 212531 - DNA, 100 bp, Homo sapiens
atgcggctcctcggctggtggcaagtattgctgtgggtgctgggacttcccgtccgcggcgtggaggagtccctggagaagtgggagcgtctgaccgtgg

SEQ ID NO: 212532 - DNA, 98 bp, Homo sapiens
acagactatgacgatgtgaggagatgttgtagataactgttcccaggaaaaaaaggaggaaatcctggaaaatgaaaagcccagtggacacagttcta

SEQ ID NO: 212533 - DNA, 75 bp, Homo sapiens
agcctgcacagccgcggcggcagcagcagtgagaggtgaccagcgccatgtccagccaggtggtgggcattgagc

SEQ ID NO: 212534 - DNA, 100 bp, Homo sapiens
agccagcagctccattgacaagtaagactttgaccccgacgcaggcttcagtgattgccgcggatcagaagcctgagcactttggctcgagacaattaag

SEQ ID NO: 212535 - DNA, 100 bp, Homo sapiens
ggctacggttgttgttggcgactgtgcttcaagcggctgctctctcaggaggcaccaccatgattattgatttcgccattcctcagaaaggtggctccct

SEQ ID NO: 212536 - DNA, 100 bp, Homo sapiens
taaaagaggagcagcatggcatttcagtcactggtttgcagagtccaggccctagactggagctggttacagacggaagaagaagagcacagctgcctgg

SEQ ID NO: 212537 - DNA, 100 bp, Homo sapiens
aatttattgtaaaaagagaacatgcattaacatcaggcacgataaaagccatgttgagtggcccaggactttgtgttttatgccccacgtctgagaatca

SEQ ID NO: 212538 - DNA, 100 bp, Homo sapiens
ttcaccctgtccgtggagagcactggccaggaaagcctcgaggccgtggcccagaggctggagctgcgggagattgatgaagaccctagccttgttccag

SEQ ID NO: 212539 - DNA, 75 bp, Homo sapiens
agggagttgcatacgatgtgcctaatccagttttccagcttgcagctcatctggtgtactggggcaaggccatca

SEQ ID NO: 212540 - DNA, 58 bp, Homo sapiens
aaacagcttgaagactttttcaaggtttcccaggcagctgcagacttgaaacagttct

SEQ ID NO: 212541 - DNA, 74 bp, Homo sapiens
gcaacatcctgtcacaggccatgctctggcaaaaacgatgagttccacccgttcatcgaggccctgctgcctca

SEQ ID NO: 212542 - DNA, 75 bp, Homo sapiens
gcggagacagctggtgtctgaagccgctcgcgcccaggagtgattggggcagatgtgagagggcacggcctcatc

SEQ ID NO: 212543 - DNA, 98 bp, Homo sapiens
gcggattgtggaagaactcttcggctgtggggatgtgaatgccaaagctagtcaggtgaaagtgacgtcctgcatttcacctccaccaccacgtcgaa

SEQ ID NO: 212544 - DNA, 98 bp, Homo sapiens
tttctttggcatcactgcagctagtaatttgccttctggattggttcttagacccagcccttacggtagcatcatggccagggaactgggaatctcac

SEQ ID NO: 212545 - DNA, 75 bp, Homo sapiens
aggggccatgcctgatggagatcgcccagcgggcagttagcacccagaaggaaggggagttcaccctgcacggcc

SEQ ID NO: 212546 - DNA, 83 bp, Homo sapiens
aaccctgcagaacggctgcctaatttacagcaaccatgagtttcagctgtgagttcaacatggaggcaaatcagtgccccctg

SEQ ID NO: 212547 - DNA, 50 bp, Homo sapiens
ccctcatcgagtggatccgcaggaacaaagctatggaacagtctgtgcca

SEQ ID NO: 212548 - DNA, 90 bp, Homo sapiens
gggggacctgccggcacgcgactccccccgggcccaaaggatctgaaacttgcccacccttcgggatattgcaggacgctgcatcatgag

SEQ ID NO: 212549 - DNA, 75 bp, Homo sapiens
ctcgcaccaggcaagaataccctccaataccctcgggtggaccccaagttcctgaggaacatgcgctttgccaag

SEQ ID NO: 212550 - DNA, 74 bp, Homo sapiens
tatggccaaagcgatagctgaccgaaatgcactcggtgatggaaagagagccactattctgaagaacacttggc

SEQ ID NO: 212551 - DNA, 83 bp, Homo sapiens
caacaagctggcgctgcagtatggctgcaaaggtgtactacagacctccacatgttggacagtaggattcagcagagaatgag

SEQ ID NO: 212552 - DNA, 95 bp, Homo sapiens
tctgtggctcattggaaggaaacccaggaattccgatgctgaagatcgtgtttgcaggccatgagcatctctctttaatatctgtacccttgctc

SEQ ID NO: 212553 - DNA, 90 bp, Homo sapiens
cccgcggcgggaggagcctgttcccctgagaatggggcactgcatgtgaccaaggacctgctgtgggagccggcaacccctgggcctctc

SEQ ID NO: 212554 - DNA, 83 bp, Homo sapiens
aattgaccctcaaaacatgttcgagttctgggatctcctcttttgacttggactatgactttcaacgggactattatgatagg

SEQ ID NO: 212555 - DNA, 82 bp, Homo sapiens
ctccgtggagatcgtcccgcgcctgccgatgcagctgactttgcctgtagcctcatagaacccatcccatggctgcagtgga

SEQ ID NO: 212556 - DNA, 74 bp, Homo sapiens
agctggaggacttctactctgcttccagtgaactcttcgaaccctactatgccttcccgcttcctgtggttgtg

SEQ ID NO: 212557 - DNA, 90 bp, Homo sapiens
tgttgttgccggagctgagaccgggcggccacagtccgcagggatgaacctcgagttgctgggcctcccagaagttcctgccgaatcgtc

SEQ ID NO: 212558 - DNA, 74 bp, Homo sapiens
cggctccttaccagctcacctctcaccgcgcatgtttggagagtgcctggaagagctgggatgtctggttgagt

SEQ ID NO: 212559 - DNA, 98 bp, Homo sapiens
ccgctcgctgggagagaggtacctctccttttccctctccctttccctaaggtgtcctcatgacttctcttgtggaccatgtccgtgatcttttttgc

SEQ ID NO: 212560 - DNA, 100 bp, Homo sapiens
cgcgctggcgctgctggaagacgaggagcgcgtcgtgcgcctgggggtgcgcgcctgcgacctgcccgcctgggactcacaccacccggcaagaactgct

SEQ ID NO: 212561 - DNA, 98 bp, Homo sapiens
gccagcctgatagccaacagttgtaaagcaagagtcccacgaactggctgggtatacagaaatgtccagaggccggagagcgtttcagatcacatgta

SEQ ID NO: 212562 - DNA, 87 bp, Homo sapiens
gagacacgccgcttcatcgagctgcctttacaggacgaaaggcactgggacgttcgggcgggtgcacctggtgaaggagaagacagc

SEQ ID NO: 212563 - DNA, 100 bp, Homo sapiens
taagtataaccgcgaaggagacctcctctttactgtggccaaggaccctgacgggctctacgagtgcattctctgtgcctgctgtagcaccagctgcccc

SEQ ID NO: 212564 - DNA, 100 bp, Homo sapiens
cccacaagcagatctactactcggacaagtacttcgacgaacactacgagtaccgactaatagggatgccaaaggaaaaatatgatcctccagatcctcg

SEQ ID NO: 212565 - DNA, 100 bp, Homo sapiens
agcggccgcgcactgaggaggcggcggccgacggtggcggcgggatgcagagagtattatgagggaggccgaggacttcatgctccggacagagaaacgg

SEQ ID NO: 212566 - DNA, 96 bp, Homo sapiens
ggagatgggcagacggattcatttagagctgcggaacaggacgccctctgatgtcactggaaggactgagcgcattcaggagcctggaggaactca

SEQ ID NO: 212567 - DNA, 90 bp, Homo sapiens
gcattgaggactttccttacctgtttttccagctcacccactgccagcagagggggtcctggtcttcatgatccttgtgagcgagaccca

SEQ ID NO: 212568 - DNA, 50 bp, Homo sapiens
tcatgcttatgaatgctcgacttcagcgcataaagtcaggcagagatggc

SEQ ID NO: 212569 - DNA, 101 bp, Homo sapiens
atgcctataatcccagcacttttggaggctgaggcgggcagatcacttgagatcaggagttcgagaccagcctggctggagtgcaatggcgcgatctcgac

SEQ ID NO: 212570 - DNA, 100 bp, Homo sapiens
agttgagcaagagcagcggcgcagaaaggtggaggccgggaggacgaaggcatctgcagccctggctagaaagaaggggaaaagtttgcataaagacatg

SEQ ID NO: 212571 - DNA, 75 bp, Homo sapiens
cagcagcaacttaatggaaactaggttgggggccgtcccgctcctaaggcaggaagatggtggccgcaaagaaga

SEQ ID NO: 212572 - DNA, 48 bp, Homo sapiens
ggagatagctgagctcactacaggtgcgctcccctggggccccagggc

SEQ ID NO: 212573 - DNA, 100 bp, Homo sapiens
catcagaggtgacattggacacaaggcctatgagtatcaggaatatggaccgaagccattaatcaagatgattaccaactggttcgaaaacttggtcggg

SEQ ID NO: 212574 - DNA, 100 bp, Homo sapiens
aagatcctggtgtcgccatgggccgccgccccgcccgttggcctcaggcccaggcccaaggccaagtgagagagcccaggccacaggacatgctgccatt

SEQ ID NO: 212575 - DNA, 49 bp, Homo sapiens
gcaacagtggccgcacgcatagaaagaagatgctgatatgctacaacac

SEQ ID NO: 212576 - DNA, 100 bp, Homo sapiens
ctgcacaaggcggaggacagcctcctggccgccgaagaggccgccgccaagggcaaggggacgcgagataaggtcctgatcagaatcatggtctcccgca

SEQ ID NO: 212577 - DNA, 83 bp, Homo sapiens
caagtggtatgatgccaaggaagactgggatggaaaggtgtctgagattaagaagaagatcaagtcgatcctgcctggaaggt

SEQ ID NO: 212578 - DNA, 119 bp, Homo sapiens
aaaatcccttgttaaaggaggtctgtgccggagggttcttgttcagtctgagcacttcaagacgacatcgcagaaggtggctcgaaaattctggtggaagaacgtgaagatgattgtcc

SEQ ID NO: 212579 - DNA, 50 bp, Homo sapiens
cccccaacactgcatggagcggatccagggcccaatggctgcaaaatcgc

SEQ ID NO: 212580 - DNA, 75 bp, Homo sapiens
gaggaactcagccctgattgcgtctccagtgccagatagtccacagctgtcctctcttggaaaatcagattcatc

SEQ ID NO: 212581 - DNA, 114 bp, Homo sapiens
cgccacccctgcgttcagagccgggcacactgggctctgcagcctcatcctacagccccctaggccggatcacctcaacagtcacgtcagacaagtgcactcaacagaacggcc

SEQ ID NO: 212582 - DNA, 95 bp, Homo sapiens
aagaaagccatcacgctggccatcggagatggggccaatgacgtgaacatgatcaaaactgtgaacttcacagaagttaatgaagaaaacaaaaa

SEQ ID NO: 212583 - DNA, 87 bp, Homo sapiens
aaaagagagccagccgagcaccctccaagcagaggacaagaaggttctgtttgtctccggtcatcagactgtgcctcaggattgtgt

SEQ ID NO: 212584 - DNA, 100 bp, Homo sapiens
ggccatggcgcagctgggaaagctgctcaaggagcagaagtacgaccggcagctgagcaggaggatgcattagcacaacaggcctttgaagaggctcgga

SEQ ID NO: 212585 - DNA, 80 bp, Homo sapiens
ccaagacccttgtgctcgttgtcgccgcggtcctgctgttgaacccagtgacttgattgtaaaaatttacagagcggaat

SEQ ID NO: 212586 - DNA, 75 bp, Homo sapiens
ctcatcagctgatgagaacatcctcaccaaagcaggttagagcagccagcgggtacagaatggattttggaagag

SEQ ID NO: 212587 - DNA, 97 bp, Homo sapiens
ccttccagctgtttgaccgaacaggactgaccgatgatcagattgaagaattgaaattgaaggatgaatggggtgaaaaatgcgtacccagcggagg

SEQ ID NO: 212588 - DNA, 100 bp, Homo sapiens
ccaaaatggagtgtcagggctgggcagctctggccatgccagcacctcagtcagcatcagcatggggcatgcagattgccatgcaatcactgtggaatat

SEQ ID NO: 212589 - DNA, 89 bp, Homo sapiens
tgggtgcagatgcagtgtggctctggatagcaccttatggacaggactatctcaagcaggtgctggacattgatcttcatgctcagatc

SEQ ID NO: 212590 - DNA, 74 bp, Homo sapiens
ctgctgggaaggtgtgcgtgctggatgtcaacccccaggcaaaacatgctccacaaattcaacttgtatatttg

SEQ ID NO: 212591 - DNA, 98 bp, Homo sapiens
atccgcagggttcggatgagaccagatctcagtggttcaatagcatccccagatgtcaaattaaatcttggtggagattttatcaaagaatctacagc

SEQ ID NO: 212592 - DNA, 74 bp, Homo sapiens
ggtggactccttcggcagtccacccaccgccgccgcctcccaggttggaagtactccatgacacacactcggag

SEQ ID NO: 212593 - DNA, 100 bp, Homo sapiens
gctcagggccctgtctgctctgtggactcaacagtttgtggcaagacaagctcagaactgagaagctgtcaccacaggtgacagcggcatggacatatgc

SEQ ID NO: 212594 - DNA, 90 bp, Homo sapiens
cagaagtaggaagtctttgggacaaaactgtatttaccttgagattccatcgtgcctggctcacataagcgcttcctggaagtgaagtcg

SEQ ID NO: 212595 - DNA, 88 bp, Homo sapiens
aggcataaattgattattcctcgcccacatctgtgccagatgtcaatgccaatcgcatcatcccgaggagacgtggagagtgtccgcc

SEQ ID NO: 212596 - DNA, 75 bp, Homo sapiens
ccgatttaaagctgagctgcgaggaaaatggcggcgggagggcagagcggcttgggtaaatccaccttaatcaac

SEQ ID NO: 212597 - DNA, 97 bp, Homo sapiens
ctgcggaagaagtgcccgtccacgcacagcgaggagcgtgacgacagcatgtacgatccctgaatgggcccgtgggcatatttagtcattcattttt

SEQ ID NO: 212598 - DNA, 50 bp, Homo sapiens
ggctgggctttcctcacccggcttgcattgaaaggctctagttacagtgg

SEQ ID NO: 212599 - DNA, 83 bp, Homo sapiens
ccttcttgctggcgttggtgggagccgtgctctacctctatccgggggatatgagactttctactcggaatatcctgagtgtt

SEQ ID NO: 212600 - DNA, 83 bp, Homo sapiens
ctacaacacggctgtcaagctggcgcgccagagcggcatcgaggttaatttggagtggcccctggagtcagtttcctacacca

SEQ ID NO: 212601 - DNA, 50 bp, Homo sapiens
accggcagcagcagcaccaccggacggtgcagacatggccaagtccaaga

SEQ ID NO: 212602 - DNA, 100 bp, Homo sapiens
cactccccggcggcagcacgaaagtaccatggttctgttgaagataccactggctctcagtctctggctgccttgctgaataagtgtaaaacccctcaag

SEQ ID NO: 212603 - DNA, 82 bp, Homo sapiens
cggtggcggcggcaccaaggcccccaagccctccttcgtgtcgtacgtacgccctgagtgattacagtggcgagatcttgaa

SEQ ID NO: 212604 - DNA, 75 bp, Homo sapiens
ggacggacaagcacagtcttcggaagaagcacctgggttcagcaatacgtcactgattatccttcaccagctaga

SEQ ID NO: 212605 - DNA, 100 bp, Homo sapiens
tggtttatcattgtaatcagcttcttaccaaatacagaagttacagctcttttgaggaagcttaagcagcaatccagggaaagtgttgaagaaaaacgac

SEQ ID NO: 212606 - DNA, 90 bp, Homo sapiens
gagtgacctggccccagtgctgcgtccttatcagccgagccgacccaacatgagtgaagtttcctgcaagaaacgggacgactatttgga

SEQ ID NO: 212607 - DNA, 73 bp, Homo sapiens
tcctgcttcggctccgtcaatgggtccctgttcacatcctccaggcttgcagggtggcccccgctccgacttc

SEQ ID NO: 212608 - DNA, 74 bp, Homo sapiens
cgcagcaccgctactcggagggcgagcggacctccctggagaagcaccaaggatgacattgatcttgatgcctt

SEQ ID NO: 212609 - DNA, 80 bp, Homo sapiens
gtgatacccagtgcagtgaactgcagattttatcatgtgggcaacctgctgcaactggttctgcctggatggacagcctg

SEQ ID NO: 212610 - DNA, 75 bp, Homo sapiens
gggctgggtgtgaccaagcaggatctgggcccagttctgggaggtgatcagtgatgaacatggcatcgaccccac

SEQ ID NO: 212611 - DNA, 100 bp, Homo sapiens
tcccaatcccccactctttccgccctaatggaggtctccagtttcgccgagcctcttgaagccattcttacagatgatgaaccagaccacggcccgttgg

SEQ ID NO: 212612 - DNA, 75 bp, Homo sapiens
gcggatcctagtaatctctttgtggtttcttctgatttctgccattgggcctcttcagaagaaacttgactcctt

SEQ ID NO: 212613 - DNA, 82 bp, Homo sapiens
ggaagataaaaatggagaggtacagaatttagctgtcaaatggtggatcagtacaagggaaagcgggatttggagtcactga

SEQ ID NO: 212614 - DNA, 100 bp, Homo sapiens
agaaggggacttgggcccagtttatggcttccagtggaggcattttggggcagaatacagagatatggaatcaggtatggacctgtctgccaatcaggac

SEQ ID NO: 212615 - DNA, 101 bp, Homo sapiens
acaatgaagtatatgcagaggaggtcccacaggctcctgccctggactaccgagggtgcaacaccggaggatttcagcaacctcccacctgaacaaagaag

SEQ ID NO: 212616 - DNA, 100 bp, Homo sapiens
tcctctggcccccggaaaacctaaccatgaagacttgaacttaatacagcaagaaagaccatcaagtttaccaaacccttaggagaaatcttgagagtgg

SEQ ID NO: 212617 - DNA, 90 bp, Homo sapiens
gtctttgcagcgtagcccgagtcggtcagcgccggagatatgttgatgatgtgatcagccgcattgacaggatgtttcctgaaatgtcca

SEQ ID NO: 212618 - DNA, 82 bp, Homo sapiens
ctgtgctcgcgctactctctctttctggcctggaggctatccagccaatggctgccatccggaagaaactggtgattgttgg

SEQ ID NO: 212619 - DNA, 96 bp, Homo sapiens
gagatcgtctctctcatcgaggcccaaaccgccaaggggtttgttaaagttgttaagaataaggcctactttaagagataccaagtgaaatttaga

SEQ ID NO: 212620 - DNA, 97 bp, Homo sapiens
aaatggagccgaggtagtggagtacgctgtgacacaggagagcaaggttaaagatcgaggtccggaagccactaggagattttttaattggttttat

SEQ ID NO: 212621 - DNA, 90 bp, Homo sapiens
gatttttggaggatgatatgggagtataatgttgtggatgcagcagtctcggccctggctgctctatgcagtgaatattacatgaaggag

SEQ ID NO: 212622 - DNA, 100 bp, Homo sapiens
cgaccgagaaatatgcctaggtatcccagatgaagcatccagggaaaggcacgtgtggttctcaaatataggcattctgatgggaacttgtgtgttaaag

SEQ ID NO: 212623 - DNA, 82 bp, Homo sapiens
ttgggatctccctgtcctacctcacgggggcggcgaaggccagggatgtaccgcctacgacgtagctgtcaacagcgacttc

SEQ ID NO: 212624 - DNA, 100 bp, Homo sapiens
taggaatagcttgccaaaccaggttgcatttcctgaaggggaagagcaagatgcagtcagtggagacctaatctgggagcctgcaagtgacaacagcctt

SEQ ID NO: 212625 - DNA, 100 bp, Homo sapiens
ttcatttccatttctaccttgtatgcctcaatttgctggatttaagcactgctgcactttatgaggttatgatgtgattgctcaagcccaatctgggact

SEQ ID NO: 212626 - DNA, 76 bp, Homo sapiens
cgtcgtttaccttttgaccactgcaggcccggacatatatccagtccctgccccccatgccccagaaggacctgag

SEQ ID NO: 212627 - DNA, 76 bp, Homo sapiens
tggacgacgggtttgtgagcctggactcgccctcctatgtcctgtacaggccgtgacttggcgagcacgaccctcc

SEQ ID NO: 212628 - DNA, 75 bp, Homo sapiens
ctcacagttgaagcctgattgcagacaggatcttgctacattgcccaggctggcctcgaactcctggcttcaagt

SEQ ID NO: 212629 - DNA, 100 bp, Homo sapiens
gcatggcggtggaggacgaggggctccgggtcttccagagcgtgaagatcaagatcggtttttcgttggaatatacgttgcacatttatggcgattctga

SEQ ID NO: 212630 - DNA, 100 bp, Homo sapiens
aaccagactcagaaagaaaacctcaggaaattctacaagggcctgctatggtgtgctgcggttcatcatggagagtggggccaaaggctgcgaggttgtg

SEQ ID NO: 212631 - DNA, 75 bp, Homo sapiens
ctttttgacagcttccgccgggactgcctggccgacgtggacaccaaggttccaattgtggacaagataaggacc

SEQ ID NO: 212632 - DNA, 82 bp, Homo sapiens
ctgtgcgagagcctcctcacttgggcttgggcactgtttaaaggaaagttccgagaaggcatcgacaagccggaccctccca

SEQ ID NO: 212633 - DNA, 95 bp, Homo sapiens
gatcattctgcaagcaggcaacctgaatacaggattatctactatctagatccatctgttctgtccggcgtttcctgttttgttatgtttttgtg

SEQ ID NO: 212634 - DNA, 75 bp, Homo sapiens
ggacgaggaaacctttgagctgcggaccccgagtccagcgggcggcgggaggactctggtggagcaacgttcagg

SEQ ID NO: 212635 - DNA, 100 bp, Homo sapiens
acaaattacgatttccaacaaaacaagaaagccagcttcgtaatgaggttgcaattctacaggttccaagaccaaagattaaattaagagaaggtaaagc

SEQ ID NO: 212636 - DNA, 75 bp, Homo sapiens
cagtgcgccctggcgctggagatcagctcaagtgatcagcagctggactgtgccttggacctaatgaggcgcctg

SEQ ID NO: 212637 - DNA, 100 bp, Homo sapiens
ctgtacgacatcctgggcgtcccgcccggcgccagcgagaacgagctgaagaaggttttatgccgctgagataatgtgtggactgcagtttctacacagc

SEQ ID NO: 212638 - DNA, 99 bp, Homo sapiens
cgagcggctgctggggacggcggggaccgcaaatacttccctggacaagaaagccagatgaaactgatctaccagggccgcctgctacaagacccagcc

SEQ ID NO: 212639 - DNA, 97 bp, Homo sapiens
acaacattgctacacatgctaaaagatgacagacttggacaacatgtcccaacattacatcccagcacagatcttgagggatctgggtggcattgtc

SEQ ID NO: 212640 - DNA, 126 bp, Homo sapiens
cttctgcttccgggtcacgccttgacagcggctttcaacccccacctcagcccagcaattcgagggctgtgctgaagtttgctgctgccactggagccactccaattgctggccgcttcactcctg

SEQ ID NO: 212641 - DNA, 83 bp, Homo sapiens
ggaagctatgggtacggaggcaactcggcgacagcaggctacagtgacacttaactccgccatctgcgttttgagcactgttc

SEQ ID NO: 212642 - DNA, 90 bp, Homo sapiens
cgcgtccgccccgcgagcacagagcctcgcctttgccgatccgccgcccgtccacacccgccgccagctctggcaggctgccctgagcac

SEQ ID NO: 212643 - DNA, 75 bp, Homo sapiens
tcagcaccacctatggatcttgctcctttgcctgcaaacctccataaggatgagtttaccattattcctgtactg

SEQ ID NO: 212644 - DNA, 100 bp, Homo sapiens
ccaaaaaggaaacaagcaatctatacaaattacagtagtaaaatagtgagagtactaaacttatggcagaagaataatgtatttaagagtgagattattc

SEQ ID NO: 212645 - DNA, 100 bp, Homo sapiens
cccggccccggggaactagggagcgtctccggctgcacagcgctcagatgttgaaacatttgtagcagatatactgaaaggagaaaatttatccaagaaa

SEQ ID NO: 212646 - DNA, 113 bp, Homo sapiens
ggtatacaaaactaggatatgctggaaatacagaaccacagtttatcatcccttcctagggtgtttgtgagatatggttgaccagtgaagacacgggggcttatggcagagat

SEQ ID NO: 212647 - DNA, 75 bp, Homo sapiens
tagctcagacagtacaggaagacttgagggattcactggcaaaatttgctggcagaaaactgaaagactgtggag

SEQ ID NO: 212648 - DNA, 100 bp, Homo sapiens
gatagttgatgttgctctgggaatcctgattgaggccatttcataattctgaatcatgtctgataacggagaactggaagataagcctccagcacctcct

SEQ ID NO: 212649 - DNA, 100 bp, Homo sapiens
ggcgcccccgcagcccgtcacccacctcatctttgacatggacggacttcttctggcacactgtccgtgaagaaacgatgatggtgatgactgaagacat

SEQ ID NO: 212650 - DNA, 100 bp, Homo sapiens
gggatgttgcagctgcccacacctgcttctcaggagccctcacccatatgcaaaatcggatggtgattttactttgtaacctgaaacctgcaaagatgag

SEQ ID NO: 212651 - DNA, 75 bp, Homo sapiens
cttgaaatgtgtcttttatggggacaagttctatctacaggataccagaaggccctattgatcaggggccagcta

SEQ ID NO: 212652 - DNA, 51 bp, Homo sapiens
acagcccttctgaggagctcccaaacgtttctttacctccagaaagaagaa

SEQ ID NO: 212653 - DNA, 100 bp, Homo sapiens
tgccggatcctccggggacctgatgggctgagtcgaggtacagagccagatggactccttcggacaaactacagttctgtgttaacaaatgttggtgctg

SEQ ID NO: 212654 - DNA, 100 bp, Homo sapiens
tcttactgggttgtaatcaagaagatcagcaggagaatgagctgaaagccagtggtggcgaaatcaaaattcataaaatggagcaaaaggagaatgtgcc

SEQ ID NO: 212655 - DNA, 100 bp, Homo sapiens
cagacaccgaccccacaggccgtcccggatctcagcggacacaggcaggagcgccccatcatttgacgcccgtgtcccagcccacccaggtaactctgat

SEQ ID NO: 212656 - DNA, 88 bp, Homo sapiens
gaagtcgctgcatcccattcaccagggcatcacagataacatttttctggagattttatactctactgatcccaaattgaaagacgca

SEQ ID NO: 212657 - DNA, 98 bp, Homo sapiens
gcgagaccaggacggcgcgggaactctacgccaacgtggtgctgggagtccatatcagcagacagctggaggtggagcccgaggagccggaggcggag

SEQ ID NO: 212658 - DNA, 95 bp, Homo sapiens
acgtgcagacatctacaaccttcgatctcctgacgagaacttgtaatagctggcatcgttgagaatgaatggaaaagaacgtgctccagacccaa

SEQ ID NO: 212659 - DNA, 75 bp, Homo sapiens
aatgaaatttgcagagtatgggatatgtcaatggatgaggtgtgggcagaagaaaaagctagtgatcaacagtgg

SEQ ID NO: 212660 - DNA, 50 bp, Homo sapiens
aaaatctccatcgaagggaacatcggagtccaaaactacttacctggaag

SEQ ID NO: 212661 - DNA, 100 bp, Homo sapiens
ataatgggattaatctggtggactacgttgttaagtattacctgcgttactatgatcagatggtgaccctgataactatattgcttattatcggagggct

SEQ ID NO: 212662 - DNA, 83 bp, Homo sapiens
tcaacagaaagttctgaggatctccaagtaaaagattttttatcaagcagaaatgcatcgaacaacgagaatcaagatcactg

SEQ ID NO: 212663 - DNA, 90 bp, Homo sapiens
gatggcggatgccctgcagtacctgcagaaggtctctggagacatcttcagcagacacgaatgcagagtttgagtccagatcccaaagcc

SEQ ID NO: 212664 - DNA, 51 bp, Homo sapiens
attttaaagagccaagcctcagagaacgagatgatgcctattggccagaag

SEQ ID NO: 212665 - DNA, 75 bp, Homo sapiens
tgactaccacctctgtctgattcaccttcgctggattctaaatgtggaattgagtgatctacagcgcgatccacc

SEQ ID NO: 212666 - DNA, 109 bp, Homo sapiens
ttgaaagcgacaagtggaggcgccgctctagcggccgggactctgaactatggcgcaatgtctcaggctgtgcagacaaacggaactcaaccattaagcaaaacatggg

SEQ ID NO: 212667 - DNA, 74 bp, Homo sapiens
cactgtgaaggtggtcatcatcccgccttttgaggacggcactccccggaggaattgaatgatctggcacggga

SEQ ID NO: 212668 - DNA, 74 bp, Homo sapiens
gagaagacaagctaaaaatgattcgggaatatcggcaaatgcaactttgtaagtgtggctttgagaaatgtcga

SEQ ID NO: 212669 - DNA, 83 bp, Homo sapiens
gcaccagggcatcaagatcgagttcatcgggcagatcgcaaatggttatgagccttagagtttctgaactccaagtactgttg

SEQ ID NO: 212670 - DNA, 100 bp, Homo sapiens
gaacatgctgagaaactgatgaagctgcagaaccaacgaggtggccgaatcttccttcaggatatcaagcccaccccagccagaccagggcctcccgccg

SEQ ID NO: 212671 - DNA, 88 bp, Homo sapiens
gaaaagcgagcgatcgagcgagcgcgcgcgcgaaaactccgggcagtttgcagaaaaaacttcagcatgtgccaggaacacaacctca

SEQ ID NO: 212672 - DNA, 82 bp, Homo sapiens
agccctgtggctgggggcagagctcaggtccagtggcattgcagagcacggatggttgcaggagccaacttttacattgttg

SEQ ID NO: 212673 - DNA, 87 bp, Homo sapiens
gttgttgcagcaagcgattcagtggaatctaatcagaaaagctcattccaagaaatccccaaacttaatgaagaactactcagcaag

SEQ ID NO: 212674 - DNA, 90 bp, Homo sapiens
aaggagtattggaatgatgtgttcaggtgactccccggacagctcaacaccaaagctttcgcgggcacagcggccgcagtcgtgcacgtc

SEQ ID NO: 212675 - DNA, 88 bp, Homo sapiens
cgagatctccttggaagcagaacccatagaactcgtggaaactggcactccgtttcccaagaacttcctgcagacggtgcggaagatc

SEQ ID NO: 212676 - DNA, 101 bp, Homo sapiens
cagcttcctctggtgcaaccagcaagtcttccagtatgaatcccacagaaaccaagtgtggaggctgccagcattggattcattgttgttatcgacagacg

SEQ ID NO: 212677 - DNA, 99 bp, Homo sapiens
aaacagagcttttggaatctgaacaagggtgttcagactgcatcacagtgcttccgatacaagcgacaaaaatcgagttaaaagcagattaaagaagtt

SEQ ID NO: 212678 - DNA, 98 bp, Homo sapiens
tcaggcgtgcgcggacggtgtgcgggctccagacccagttcctggacctgccctggaaaagaagtatcccgtagagatgagctcactgcagttactta

SEQ ID NO: 212679 - DNA, 83 bp, Homo sapiens
caagagtggaaatggagaggtgacatttggtgcaatggatgagcttcatagtctggatccaagaaggcaagagttattggaag

SEQ ID NO: 212680 - DNA, 98 bp, Homo sapiens
ggaagggcgcgtcgcctcggacgtccactgcaccctgcgcgagaagagtttcacgcagagtttgaagaggagaatatccctgaaaaatatattttatt

SEQ ID NO: 212681 - DNA, 100 bp, Homo sapiens
ggcggccgcggggcccgagcgcagcatgcttttcacttccactgcatctctcgctggctcaaaacacgacaggtgtgtccattggacaacagagagtggg

SEQ ID NO: 212682 - DNA, 82 bp, Homo sapiens
ggaaaactggatgctgcagacactgaacgaggagccagtgcactcaaggccaaattatacaagaaaaagagataccagatct

SEQ ID NO: 212683 - DNA, 100 bp, Homo sapiens
ctgagggagctgcctgacagtctgatcacctcagcgttgcagcctcgattcattcaactctttcaggtcaccaaggagctagttagctggatgagaggac

SEQ ID NO: 212684 - DNA, 98 bp, Homo sapiens
caacgccagagcccaggtgcccagaggactttcttccagcttctgctgtccttctttgtggagagcaaggatgtgctgatggagctccttgagcagtg

SEQ ID NO: 212685 - DNA, 89 bp, Homo sapiens
aggaggagacggaggagaccgacgttgttagagcgaaaagctgttgctatatgatacagtccagagtgaactagaggagaagataagaa

SEQ ID NO: 212686 - DNA, 50 bp, Homo sapiens
cggagctggaatgactggcaacccaggcatgaatgctttacagttgcaga

SEQ ID NO: 212687 - DNA, 106 bp, Homo sapiens
agaggatctggtgtaccaggcgaagctggccgagcaggctgagcgatacgacgcaaacggggattcagcgtccgatcctttggaacagggactcacgtgaagcttc

SEQ ID NO: 212688 - DNA, 100 bp, Homo sapiens
gaggcatcgtccccggggctgggctgcagcaagccgcacctggagaagctgaccctgggcatcacgcgcatcctaggttgctgtagtaaaactaaaaaat

SEQ ID NO: 212689 - DNA, 100 bp, Homo sapiens
gagcaacgccagagcccaggtgcccagaggactttcttccagcttctgctgtccttctttgtggagagcaagcattcttgtagttgatccagtccactga

SEQ ID NO: 212690 - DNA, 75 bp, Homo sapiens
acagtgggacctagacaaagggagagggtgaccgacatcccaactagggcttcatccaggccaagggctacccga

SEQ ID NO: 212691 - DNA, 100 bp, Homo sapiens
tctgtgttggtgatattatcaagctagaaaataaccagtttgtggcgaatccttgttgcctgatgactatgtggttccccttgactggaagacactaaag

SEQ ID NO: 212692 - DNA, 48 bp, Homo sapiens
gagaatatgatattctttcagaccctaataggagtattcataccagca

SEQ ID NO: 212693 - DNA, 98 bp, Homo sapiens
atcgacttcggttcgggtgcgctgctcaaggacacggtctacaccgacttcgacgatcgatgctatagaagacaaacaagggaaggttttttttcctt

SEQ ID NO: 212694 - DNA, 75 bp, Homo sapiens
gccccgtcctcttgtcctcctcagcctcgattgctcgctgtaagcagctcatctgtgaccccagctacgtaaaag

SEQ ID NO: 212695 - DNA, 100 bp, Homo sapiens
ccgcgccggcgtccagtggaaattcgccggctccttctactttgcgatcacggtcatcaccaccataggcaatggtcgagacagttaacaacctccttca

SEQ ID NO: 212696 - DNA, 75 bp, Homo sapiens
atgtgaccgggctgaagccaggagactgggtgattccagcaaatgctggtttagacagggtctcgctctgttgcc

SEQ ID NO: 212697 - DNA, 50 bp, Homo sapiens
ggactctgaggaaaagctcgcaccagtgtctccagaacgctatagctatg

SEQ ID NO: 212698 - DNA, 107 bp, Homo sapiens
atgactggagaagaaggaaaagaagtaattacagaaattgagaaaaaacttcctcggctgtacaaagttttaaaggggatcatggaagctgataaagatgacacaca

SEQ ID NO: 212699 - DNA, 74 bp, Homo sapiens
tgagtatttcagcttggtacattttgttaattccggcatcctagaccccaccaacaactgaacgctttggtcag

SEQ ID NO: 212700 - DNA, 96 bp, Homo sapiens
ctcggcgcctctgcgcgcgggaagatggcggaacaggctaccaagtccgtgctgtttgtgtgtctggttgttgacctcctgtactggagagacatt

SEQ ID NO: 212701 - DNA, 75 bp, Homo sapiens
cagctctgtcagcatgaacaccttctccgacagcagcacaccccaacagggagctgccaccaccgtgtactgtgc

SEQ ID NO: 212702 - DNA, 100 bp, Homo sapiens
gtttaagattaagaggcatacaccacttagtaaactaatgaaagcctattgtgaacgacagggggcgagtacttcagtgatgagcagatgcggttccggg

SEQ ID NO: 212703 - DNA, 76 bp, Homo sapiens
ggaagaggagggcaagaagggcaagaagataacaacgaacttgatgcaagtgataggtttgccaaggtcagacctc

SEQ ID NO: 212704 - DNA, 127 bp, Homo sapiens
ctgagctgaaatggcagacgatctcggagacgagtggtgggagaaccagccgactggagcaggcagcagcccaggggctcacaacgaagtaagacagtagatgacaattctgcaaagcagactgcgc

SEQ ID NO: 212705 - DNA, 75 bp, Homo sapiens
taagcgcagaaagcaggcgaacccgcggcgcaataacgagtgtctggaggagagctcttcgatttcctggcccag

SEQ ID NO: 212706 - DNA, 80 bp, Homo sapiens
gaggtacctctccttttccctctccctttccctaaggtttacccaaggtccagcctagcccctaggcaccatgtcggaca

SEQ ID NO: 212707 - DNA, 100 bp, Homo sapiens
gggaactcttccaggagacgctggagtcgctgcgggtcctgggattcagccacgaggaaatcatctgtcgctgtcaagatggagtttccaacccagtaaa

SEQ ID NO: 212708 - DNA, 100 bp, Homo sapiens
tcaggtgcagagctgtgggtctggttccaagacactgtcactgactcctgcaaaatcttccttattctgaaaagatgacagttttgtttgtctacaatgg

SEQ ID NO: 212709 - DNA, 138 bp, Homo sapiens
ccggccccaggtcaccgccagcacgcgcctgcttcccgtctgcgcgagtccacgcagctccccaggcagtcgatgatgtgaagaaaggttacatcaaagcagaagaaaagtcctatcaattacagaagctatacgaac

SEQ ID NO: 212710 - DNA, 95 bp, Homo sapiens
gtggttttgatcatgttgttaccctcggacgtagcccggcttgtattgggccaaagatgaagaggaagcctttctggattggagtgatgatgatg

SEQ ID NO: 212711 - DNA, 90 bp, Homo sapiens
agctcatcctgcagtatggcttgaccctcagtgatctggatcgacacccagaggaagcagtggctgggacaagctgtggaaaaagtacgg

SEQ ID NO: 212712 - DNA, 100 bp, Homo sapiens
ccctcctggggttcatcctcccactgccaggatggatagaatgacagaagatgctcttcgcttgaatctgttgaagcggagcttggacccagcagatgag

SEQ ID NO: 212713 - DNA, 74 bp, Homo sapiens
gattcaacaccttgagttcagctgctctgagaaggtagcactggctgtatccttgaacttgagaacattcctcc

SEQ ID NO: 212714 - DNA, 90 bp, Homo sapiens
ttaggcaggtggctcccaaattaccggaaaggactgttcttgaggtattcaggaagatattttcgattcagataaagaagttcctatcga

SEQ ID NO: 212715 - DNA, 100 bp, Homo sapiens
gaggtgctcaaaacgcccgtgcggaccacggcctgtcagcacgtgacattcggaaattctttggagtaataccaagtggaaagaaacttgtaagtgaaac

SEQ ID NO: 212716 - DNA, 99 bp, Homo sapiens
tcgtagggactccaaaccccagtactcctctgcccaacactgtacctcagttcattgccagagagccatgactcagaattcatgattgaagaaatgcag

SEQ ID NO: 212717 - DNA, 75 bp, Homo sapiens
gcctgggggccacagctgcttcagccttggaaaaccattgcagagtgaatggaggctattcaggcctaagggatg

SEQ ID NO: 212718 - DNA, 100 bp, Homo sapiens
cctctgccaatgaccgtggaggagtaccgcatcgcccagctgtacatgatacagacatccacgacagcgatggcagttccagcagcagccaccagagcct

SEQ ID NO: 212719 - DNA, 83 bp, Homo sapiens
aagagaaacctcatcccgggagcggaatttggaaggtgggagtcaatcattttgacaagtctcctgaaaggaacagctagcag

SEQ ID NO: 212720 - DNA, 90 bp, Homo sapiens
cgcttctcagcaacctcgatgaagcttgatccagctggaggccttcctgagccgcctgtgctgcacatgtgaagccgcctaccgcgtgct

SEQ ID NO: 212721 - DNA, 100 bp, Homo sapiens
gcagccaggccgggggcgcctgcgactgcggggacagcaacgtgatgcgggagagcgggaatttgctgattcccttggaattccgtttttggaaaccagt

SEQ ID NO: 212722 - DNA, 51 bp, Homo sapiens
gtatctgtagatggctacatgaacatgcagaggaaaaactgctactgaagc

SEQ ID NO: 212723 - DNA, 98 bp, Homo sapiens
ttaatggatgttccagtatttaaagctattcaaccagatgtgagtggcagtgtgatgagtgtttatagtggagactttggcaatctggaagttaaagg

SEQ ID NO: 212724 - DNA, 99 bp, Homo sapiens
agaaggactgcctcactgagcaaccaagagtgaagcatcagggcctgaacaagaacatcaacctggactctgcggatgggatgccagtggcaagcactg

SEQ ID NO: 212725 - DNA, 82 bp, Homo sapiens
gaggacccaacatggggcagaagcttgaaatcctcattaaagatactctcggttatcaatactctggctgaccatcatcatc

SEQ ID NO: 212726 - DNA, 100 bp, Homo sapiens
gcgtgggagcgacgccagcgcctcaacaggtgtatgcagggcctcctccaagtggtgcctacctggttgcagggaacgcgcagatgagccacctccagag

SEQ ID NO: 212727 - DNA, 82 bp, Homo sapiens
ctcctccctgcgacagaccttcagcttcctctcgggcatgaccggaaaggccaagaactggagaaccaggagtctcgggtct

SEQ ID NO: 212728 - DNA, 75 bp, Homo sapiens
ctgttccaaaaacagtggataattttgtggccttagctacaggagaggctgtgtttgatgtggacaagaagaaag

SEQ ID NO: 212729 - DNA, 49 bp, Homo sapiens
atccaacacttcgtttactccggttgtcatgaaggttgacgtggtgtat

SEQ ID NO: 212730 - DNA, 100 bp, Homo sapiens
agacctccaaacccctttggccctgtatcaggagcacaggactccctcctccaagaggtctaaatctcctgcctaaaagtcagaccactctaaatttgac

SEQ ID NO: 212731 - DNA, 74 bp, Homo sapiens
ttggatccaggagaacggcggctggtttgctggcctagacctgaactcttcagataatcagagtggaggaagta

SEQ ID NO: 212732 - DNA, 75 bp, Homo sapiens
gggatgccggcagtcagagtcaaaacagagcttttggaatctgaacaagggggtgtgaagaagtttgatgtgccg

SEQ ID NO: 212733 - DNA, 100 bp, Homo sapiens
ccatcgccaagaagaaacttgcagagagccatcatgaagctgaatggccaccagttggagaaccatgccctgaaggtctcctacatccccgatgagcaga

SEQ ID NO: 212734 - DNA, 82 bp, Homo sapiens
acagctccctctatagcacctacctgtggacagatcaggctttgcccgtgtggagtccaaagtccttccctaacgaagtgga

SEQ ID NO: 212735 - DNA, 100 bp, Homo sapiens
ggaagaatccattcacactccccaaaccaggagcatctttccttgaagaagtacattattgacattgtggttgaaagtacagctccagcagaagctttga

SEQ ID NO: 212736 - DNA, 100 bp, Homo sapiens
gtcgcagggaactacttccgggggagcggcgcggcggcgcgggagtgccagcgccacagcccttcaatcattttggttgctatccagcttctccacatca

SEQ ID NO: 212737 - DNA, 75 bp, Homo sapiens
agagagagaggtggacagatctgagagatactgagattgccatcacgaaagccaaagtggatttctccagtgtgg

SEQ ID NO: 212738 - DNA, 85 bp, Homo sapiens
gtagatacaaatttttggatgatgatggatccatttctcctattgaggagtcaaccgctggagagcgaggtggcttcaataagcc

SEQ ID NO: 212739 - DNA, 98 bp, Homo sapiens
caaggtgtccacgtcgggtcagatccgacagaaggagatggtaacctgcacctcaatgtgacggcggaggccttcagcccctcgctcctggctgccct

SEQ ID NO: 212740 - DNA, 60 bp, Homo sapiens
gcggcggcggctgcggcccaatatagagtttgctctccaaagctcggggaattgattcca

SEQ ID NO: 212741 - DNA, 106 bp, Homo sapiens
gggtgctggatgccggctgtacgacatgcggctctcccctttccatttacagcatgcagccagtaaagatcccagagaagttcgagaagctagagatcataaggaa

SEQ ID NO: 212742 - DNA, 100 bp, Homo sapiens
tttgtgttcggacagcccctttccttccagcagcctcagcttcagactacatcaaatgggtctttggagggcctggataaccaggagggaggggtgtgcc

SEQ ID NO: 212743 - DNA, 90 bp, Homo sapiens
cgcccccagccctgggtgggggctgtctcggcaccttcacctccctgctgctgctggcgtcgacaggggactcgggcaagggtgccgaag

SEQ ID NO: 212744 - DNA, 114 bp, Homo sapiens
ctagtggaagcggcaagcagagaaaacctgccaatcaagatgagtatgggtcacaatccaaggtccggctcctccgcgtcccagggccggacggagggatgaggcagggggggc

SEQ ID NO: 212745 - DNA, 100 bp, Homo sapiens
ttgtcttacactgaaacggaggctaccaactccctcatcactgctccgggtgaattctcagttacagaatgtctgaaggggacagtgtgggagaatccgt

SEQ ID NO: 212746 - DNA, 51 bp, Homo sapiens
atggaatccacggatgagacctcagaacaaagatacttatgagcctttctg

SEQ ID NO: 212747 - DNA, 82 bp, Homo sapiens
ctcctgtgtggcgatggtcttcctgctggggctcatgtttgagataaagccaccaatccttccaaccgccaggaggactggg

SEQ ID NO: 212748 - DNA, 50 bp, Homo sapiens
gagaccgcggccgggaccgaggacttcacatgtatcattctccgagcctg

SEQ ID NO: 212749 - DNA, 75 bp, Homo sapiens
gactgttaggcccagaagaacaattagggtgacgtgtgcattgagtaaactttttccagaggcctcaaatacagc

SEQ ID NO: 212750 - DNA, 83 bp, Homo sapiens
cagaagtccagagctgaggactgcctgtttgcagaaaacctcggatcaattctcagctggtggcacaacaagtggcacaacag

SEQ ID NO: 212751 - DNA, 100 bp, Homo sapiens
ggcctgtgtgtcaacgacctggcggtggggctgcggcgcctgggactgcaccgcaccgagggcgagctccaggcgcagctcgtgtatactaccaatatcc

SEQ ID NO: 212752 - DNA, 75 bp, Homo sapiens
tgcgtcaatcagagcgtcctgtgcggtcagaatggcggcagcggagcatcgtcattcttcaggattgccctgctg

SEQ ID NO: 212753 - DNA, 100 bp, Homo sapiens
ccttcaccgcactcgaccaggaccacagcggcaaggtctccaagtcccagctcaaggagctggtcaggctcaccatcgagaagcagggacgtccgtctcc

SEQ ID NO: 212754 - DNA, 75 bp, Homo sapiens
aggccgtctctgtttgaacaatacatcgggtgattcttctcggtcaaacctttttgaagatgcaacgagtgcact

SEQ ID NO: 212755 - DNA, 89 bp, Homo sapiens
ggacaagtcggcgccccagagcggacgaggcagcaaagcacctgctctgagtggccatggggaagcgatacttctgtgactactgcgac

SEQ ID NO: 212756 - DNA, 90 bp, Homo sapiens
tttagagtgtggtgaagggtacttttcatggtgcatggaaggaaagccaatgcgcagtaggtcccattagtccaccacagccaccttcag

SEQ ID NO: 212757 - DNA, 83 bp, Homo sapiens
gctcctcaagaatctcgtgctcaccggtttctcccacatcgacctgcaaacggggattcagcgtccgatcctttggaacaggg

SEQ ID NO: 212758 - DNA, 100 bp, Homo sapiens
agaacatggaggatcgtcaggctctaaacaaaattctggtacccctgagcagaaggctctggtgattggtggagaggcttgtatgtggggagaatatgtg

SEQ ID NO: 212759 - DNA, 100 bp, Homo sapiens
agaatcacgccttgtgaagagatcatccctaagcaggagagaagctactaaaggtacggttcctggagcagcagaacaagatgctggagaccaagtggag

SEQ ID NO: 212760 - DNA, 75 bp, Homo sapiens
ttctcgagaagacactacagcctcaaggaggagccgtgtaaagccagtggaatatagtcagatgtacagttatag

SEQ ID NO: 212761 - DNA, 75 bp, Homo sapiens
ggactggagtggtttgtctgtgatggctggaagttcctctgtaccagcacgggctgtatattgggagttggactt

SEQ ID NO: 212762 - DNA, 98 bp, Homo sapiens
aatttaaatgtgtctctaagtgatgagatgaatgaagacttcagatctggttaacaactctgctcatggtgattacatgcaaaataacgagagcagct

SEQ ID NO: 212763 - DNA, 100 bp, Homo sapiens
agagcggaccagggctgctgccagcacctgccactcagagcgcctctgtcgctgggacccttcagatatccacacagaagcagttcaggctgcactggca

SEQ ID NO: 212764 - DNA, 100 bp, Homo sapiens
tccctctttaaaaattccgccgaaaaagagaagacgctttacccgactctttgggccgttatctcacatattatcactacctatactcccattacctgcc

SEQ ID NO: 212765 - DNA, 100 bp, Homo sapiens
ttggactattgtggttggcttctgttacgctaggaatatggcaaacaatggagatttacagacagtcatctgggtggaggacacccttttgggatcagca

SEQ ID NO: 212766 - DNA, 75 bp, Homo sapiens
gtctttgttggcaaacagttctgggggtcgtccgatcctgcagcatccataccccagtttaccaattcccccaca

SEQ ID NO: 212767 - DNA, 83 bp, Homo sapiens
cttctaccagaaggggaggagacgttggaatcaggaaatgatttgcagctgagtgaatcaggaagtgacagtgatgactgaag

SEQ ID NO: 212768 - DNA, 50 bp, Homo sapiens
tgtcatctttctttactgaagtcggaggaagaagccagacgacagtcagg

SEQ ID NO: 212769 - DNA, 50 bp, Homo sapiens
cctcccaaagtgctaggattacagggcactgtgacctttgaagatgtggc

SEQ ID NO: 212770 - DNA, 100 bp, Homo sapiens
aacttaaagcctggaatgatatcaaaaagcacccagtcagcttgaagagtttcaaatggaccctaccactgagaaatcaagatggcagtctactatgggg

SEQ ID NO: 212771 - DNA, 121 bp, Homo sapiens
caagctggaggaggagcgagccaagctgcacgatgtggagcacttgaagccccgtggcgtggtggtgaacatgatccccgggctgccggctcatatcctgttcatgtgtgtgcgctacgca

SEQ ID NO: 212772 - DNA, 75 bp, Homo sapiens
tccaaggtgtgccgaaggctatgcactatacgcccagtgtctgctgcacagagctttacatccccgggagcctct

SEQ ID NO: 212773 - DNA, 100 bp, Homo sapiens
accgttaggaccatccagagcagcacgggagtgtagcttgcttcttgagtgactgcagcgagcatctgctcacccatgcactggctgcctagtgcagcta

SEQ ID NO: 212774 - DNA, 90 bp, Homo sapiens
tggctgcgagaccctagaggcctgcggcctgcgaatagcctaacatggcagaccagagacagcgctcactgtctacctctggggagtcat

SEQ ID NO: 212775 - DNA, 73 bp, Homo sapiens
tcaccatggcaatgggcagttcaccgagaagcgggtgtatctcaacaggagaacatccggggtcaagcatgaa

SEQ ID NO: 212776 - DNA, 82 bp, Homo sapiens
cgcgctggcgctgagcctgcagccggccctgccgcaattctgtggtgttcttggtcacacatttatggagtttctgaagggc

SEQ ID NO: 212777 - DNA, 101 bp, Homo sapiens
agggcagccgtgcccatttccccagggcatggaggcagcctggcatcctcgctacaacctcattgttgtgggccgatacccagatcctaatttcaaaagtt

SEQ ID NO: 212778 - DNA, 75 bp, Homo sapiens
cgctgaagggcaaggaaagcagcatagagaatgagatagccgtcctgagaaagaggcccctggctcaatgatgcc

SEQ ID NO: 212779 - DNA, 100 bp, Homo sapiens
gtgaagaacttccagatagtccacaaaaatgaccaacgatcgccgcggccggaagagttggcgctcggggcggactccttggaactggcttagcgcaccc

SEQ ID NO: 212780 - DNA, 100 bp, Homo sapiens
ctggagcagagccgctgggcgccggagccgaggcgagcgccgcgcgcaccactggttatcctgaatacatgtctaacaattttccttgcaacgttagctg

SEQ ID NO: 212781 - DNA, 76 bp, Homo sapiens
caggaagttggccaaagtatcccacatgacgagtgggggtccactggacggggcctgagctacaacttcacccacc

SEQ ID NO: 212782 - DNA, 100 bp, Homo sapiens
cttagagcgtctggccaagaatcagaggaagtggttcaaatctgaacatcaatgatgtactagggaactactcattgactcttgttgatgcattggatac

SEQ ID NO: 212783 - DNA, 100 bp, Homo sapiens
gcctgcgacctgcccgcctgggtttgcctgcaatgagatttcattctctacatttaaaggacatcctttctgagctgctgtgaataaatttggaatggta

SEQ ID NO: 212784 - DNA, 98 bp, Homo sapiens
gcatgaacaccttctccgacagcagcacacccagcggcactgcagaggtggagctgaagaagggagccactctcaaaatcacgctggataacgcctac

SEQ ID NO: 212785 - DNA, 119 bp, Homo sapiens
tatggatgcacttttgaacaacagcctgcccccaccccacccagacaatgcagatcttcgtgaagactctgactggtaagaccatcaccctcgaggttgagcccagtgacaccatcgag

SEQ ID NO: 212786 - DNA, 83 bp, Homo sapiens
ccggggacttggggccgcagggaggtaactaggatttctacctcaaccgcgagacctatgcaaggacggtgtggaccaactcg

SEQ ID NO: 212787 - DNA, 100 bp, Homo sapiens
attgaagcaaattgaaggcacaggaatatccatgtcggcttgtagagagattgcagccaaatttgagtttcatcatggtgactatgaaaaacagtttctg

SEQ ID NO: 212788 - DNA, 100 bp, Homo sapiens
atccaggtcgcgatcgaagagtccccccaagtctcctgaagaggaaggagcggtgtcctcttaagaaaatggacctgttactatgactagtgtacacccc

SEQ ID NO: 212789 - DNA, 90 bp, Homo sapiens
atgatgctgccatctttccaggaggctttggagcggctaaaaaccttgagaaggcaaccaaagtgcaggacatcaaaaacaacctgaaag

SEQ ID NO: 212790 - DNA, 75 bp, Homo sapiens
ggtgtacaaatacccctttgaattaattatggctctctaagcgaaagacatgaggcctcagcctgaaatgaggtt

SEQ ID NO: 212791 - DNA, 51 bp, Homo sapiens
ctttgagaaaaacctgaaagatgtctcagcagagatcctacaagaatccag

SEQ ID NO: 212792 - DNA, 88 bp, Homo sapiens
cctgggcgggtcgcagggtctccgcgggcgcaggaaggcgagcagaggaatccgcaggcggggatcttcagtctcctttaacaccgga

SEQ ID NO: 212793 - DNA, 83 bp, Homo sapiens
agtccgcgggaagatggcggcgccgctcatccccctctcccagcagcctgacatttaccccggtaactgctgggcatttaaag

SEQ ID NO: 212794 - DNA, 100 bp, Homo sapiens
agcggctgcagcgctctcgtcttctgcggctctcggtgccctctccttttcgtttccggaaacatggacccgtcgccatgggccgtgtgatccgtggaca

SEQ ID NO: 212795 - DNA, 90 bp, Homo sapiens
atccgctccggcacaggggctgcgagactgagaaagtttgcagattcattcaactttaatccccacaaatggctattggtgaattttgac

SEQ ID NO: 212796 - DNA, 75 bp, Homo sapiens
agtacacagacgagcatggggaagctattgacctgaaaagtggttctggaaaagtgtaccaaggccctgcaaaag

SEQ ID NO: 212797 - DNA, 76 bp, Homo sapiens
gaagttggtcactggcatcacattcgtgccagcgagatttcagattcctgtaaacctctaaagaaaaggagtcgcg

SEQ ID NO: 212798 - DNA, 82 bp, Homo sapiens
cagctgctcccttcgccttcgccctttccacctcgcggcagttcgaacaagttgaaatcatcgcagaaggataaagttcgtc

SEQ ID NO: 212799 - DNA, 74 bp, Homo sapiens
gttcgtctcttacgtctgcggaagtgcagctgcctcagttcttagcgcaggcctgctgggaacgggacttctaa

SEQ ID NO: 212800 - DNA, 87 bp, Homo sapiens
tgaacatggcagaagaagaggactatatgtctgattccttcattaatgtccattcactgattaccaaagctatgtcatccatggctg

SEQ ID NO: 212801 - DNA, 100 bp, Homo sapiens
tgccatggacgacgaggaggagacgtaccggctctggaaaatccgcaagaccatcatgcaggcaatgtcccctgatggggaggccatcgtcactggtgct

SEQ ID NO: 212802 - DNA, 83 bp, Homo sapiens
gtcgtcctgtcaacctcgactcagcgctggccgcgctgcgcaaggagatgacaatgcagatcttcgtgaagactctgactggt

SEQ ID NO: 212803 - DNA, 74 bp, Homo sapiens
gagagagaggtggacagatctgagagatactgagcaattaccagctctggctgggtcgccacaacttgtttgac

SEQ ID NO: 212804 - DNA, 74 bp, Homo sapiens
ccgagttcaacatcctcctggccaccgactcctacaagggatgcctctgcactgctggatccgatggagtgcac

SEQ ID NO: 212805 - DNA, 51 bp, Homo sapiens
attcgcagtggtcgcttcttctccttgagactaggcattgaaaagactgac

SEQ ID NO: 212806 - DNA, 100 bp, Homo sapiens
gtcaatttcgcggaattctccaagaagtgttcggagagatggaagctcctgggcaacgtgctggtctgtgtgctggcccatcactttggcaaagaattca

SEQ ID NO: 212807 - DNA, 50 bp, Homo sapiens
tccacttctaccccaccttccggcattactctactgactggcagagacag

SEQ ID NO: 212808 - DNA, 75 bp, Homo sapiens
agggaggctccaagacctcatcaacaattaaggtcagtttaggggctggtgcaaaggatgagttgcacattgttg

SEQ ID NO: 212809 - DNA, 75 bp, Homo sapiens
cgatgttcttctaatactcctcctctaacatgtcagcgttattgtaatgcaaattacctaggaacagtacgattt

SEQ ID NO: 212810 - DNA, 82 bp, Homo sapiens
tggataattttgtggccttagctacaggagaggtcagtttaggggctggtgcaaaggatgagttgcacattgttgaagcaga

SEQ ID NO: 212811 - DNA, 74 bp, Homo sapiens
gaaaagacagccagcatttccatcgcagaccttgaagctgatgatgttaagggcagtgtaccactgtcttcaag

SEQ ID NO: 212812 - DNA, 90 bp, Homo sapiens
cctgaaccggcacctgcacacctggatccaggataacggaggctggatcgtcagtatttaaacagatcacatcatgcgtgagtacaagct

SEQ ID NO: 212813 - DNA, 88 bp, Homo sapiens
ggaagagggcggcgacggtggtggtgactgagcggagcccggtgacaggatgaaaaatggctacaaacttcctagcacatgagaagat

SEQ ID NO: 212814 - DNA, 87 bp, Homo sapiens
gctgagcccgtccgtccgccgccaccacccactccggacacaggttattcagcttctcaaggctggaaaagcgaaggaagtttccta

SEQ ID NO: 212815 - DNA, 100 bp, Homo sapiens
ggagaggctggttcgcgggctgcgagctggagcccagatttcaagttttgagtaaaataccttcaagcgaatgggccctattgtgctcacacattcagaa

SEQ ID NO: 212816 - DNA, 83 bp, Homo sapiens
ctgaagctcaagggactgtgtccaccctcagccaaaacagagtggagtacgagaaaagggtccgagcacaagccaagaagttt

SEQ ID NO: 212817 - DNA, 97 bp, Homo sapiens
tgctagatcggaacagcacgagcacgtagcaggtctccttgcaagacttcgaaagcataattacttgaaaaccatgatgggcctccagcaggcacat

SEQ ID NO: 212818 - DNA, 101 bp, Homo sapiens
agaacagttgatccactactatctaaatctcagagtatcttaatatctaccagtgcaacagcatcttcaaaggttcatgtgatccgagaggtagcttccat

SEQ ID NO: 212819 - DNA, 100 bp, Homo sapiens
ccagcacaaggatgcaggacaccagcgtctccttcgggtaccagctggacctgcccaaggccaacctcctcttcaaagttctaaatggagcccctggatt

SEQ ID NO: 212820 - DNA, 75 bp, Homo sapiens
cagattcgcagtggtcgcttcttctccttggttatcagtgagctgaatggaaaaaacattgaagacgtcattgcc

SEQ ID NO: 212821 - DNA, 82 bp, Homo sapiens
aacagggacagcacctcatcccctggatgggggaccacaagatcctcatcgacaggactcctcctattttgaggacttctcc

SEQ ID NO: 212822 - DNA, 75 bp, Homo sapiens
tcggctcttgagtacttgcactcgcgggacgtggtataccgcgacatcaagtgactacctgtttaagctgctttt

SEQ ID NO: 212823 - DNA, 82 bp, Homo sapiens
gaactttctgcatttgacagataaagatggtgaacaacctcaaatactgctggtttgcatcgccagcttctatatattacgg

SEQ ID NO: 212824 - DNA, 100 bp, Homo sapiens
ctgcgttgacacgtcttatttaatccacatcatagcttctcggtgaactactactagatagacacaacttcacaattatgacaaaatacatcagtaaacc

SEQ ID NO: 212825 - DNA, 75 bp, Homo sapiens
gcgcccgccccggcgatgcgggccccgcccgtcgcctcagatgtttctttctcagcaaaatagaggagaagctta

SEQ ID NO: 212826 - DNA, 101 bp, Homo sapiens
ttcagcttcctctcgggcatgaccggaaaggccaagtaagactttgaccccgacgcaggcttcagtgattgccgcggatcagaagcctgagcactttggct

SEQ ID NO: 212827 - DNA, 75 bp, Homo sapiens
ttcaccaccaggcgcagagattcaggtggtctttgggaagaagcttcctgcctttgccaccatccccatccacca

SEQ ID NO: 212828 - DNA, 120 bp, Homo sapiens
gccctgcatgccaggcaggtggacatcaggctgaggctggactacctctgggccgcacagcttcgtgctctgtctgatgatggagtatctgatcttgaagacccaaccttgactcccctg

SEQ ID NO: 212829 - DNA, 114 bp, Homo sapiens
gaaaaagcaagctgaagacatcaagaagatcttcgagttcaaagagaccctcggaaccatcctgaggttagcattacacttctcccagtggagcccatgacttctgatcaggac

SEQ ID NO: 212830 - DNA, 100 bp, Homo sapiens
gcctcaggccagtcgcctccaggccaagagggatccttcacccgtgtctggccttcctgggctatgtgctgtatggagagtgccaggaggtcttgtggtg

SEQ ID NO: 212831 - DNA, 101 bp, Homo sapiens
aatactgatatcaactacatcaaagatgataccaggcatataagatttgatgataggcagcttaggctagatgggccagaggggatggacgaactgatctc

SEQ ID NO: 212832 - DNA, 74 bp, Homo sapiens
gacagagcgctactcctggcagtgcgtcaatcagagcgtcctgtgcggatgcctaaatcaaaggaacttgtttc

SEQ ID NO: 212833 - DNA, 100 bp, Homo sapiens
gaggatctggtgtaccaggcgaagctggccgagcaggctgagcgatacgacgatggcaggatggtggctggcaaagtgttgatggcaaagcaagaaattg

SEQ ID NO: 212834 - DNA, 100 bp, Homo sapiens
cagcaacagagattgcacaaatgaactgtctaattcttgcaagtgcaccaggtggcggagcgggtggaggccctggggcagtttgtcatgaagaccagaa

SEQ ID NO: 212835 - DNA, 100 bp, Homo sapiens
cccccccgcccagagtcatggcggcagcagccgctctgagggcgcctgctcaggtgcagcggaactgctgcctgacgctctgcaacttcagcatccccga

SEQ ID NO: 212836 - DNA, 87 bp, Homo sapiens
ggcatccctgcaatggataacaaccgaagcccggtttacctgcctactcagcaggaagacaatgaggatgaagacctttatgatgat

SEQ ID NO: 212837 - DNA, 76 bp, Homo sapiens
gtaaggtccattcctgatggctctggtaaaaatgcatttgcaaagggagaaaatgaaggccaaacagaagcaggct

SEQ ID NO: 212838 - DNA, 75 bp, Homo sapiens
ggctgccgaaaacaagccggaaggaaggcaacagcccccaggggagcaaccagggagtcaaaatcacaccggacc

SEQ ID NO: 212839 - DNA, 74 bp, Homo sapiens
caggagacttatttcagaatggagaatttgcaactcatcatagtcctggaatccagaaccctggctgaaattgc

SEQ ID NO: 212840 - DNA, 87 bp, Homo sapiens
ctgatttcttccctaggcctttacgatgtggtaaaaccaatcccagttaaaggagatggatctgaaatgaatcacttagcagctgag

SEQ ID NO: 212841 - DNA, 95 bp, Homo sapiens
gaagcggcggccagagaagagtcaagggcacgagcatcggttggttgaatctggcgatgtggaacccatggatatggagggctgactatatacac

SEQ ID NO: 212842 - DNA, 100 bp, Homo sapiens
accagttcgctccgagccccggccgcctgtccgtcgatgcaccgaaaagagaccatcatgcagacatcagagactgggtcggacacaggctcgacagtga

SEQ ID NO: 212843 - DNA, 96 bp, Homo sapiens
ggcaacccttccgggtccaggcacagggaatgggtactgttcaaaaaggaatgccccacaagtgttaccatggcaaaactggaagagtctacaatg

SEQ ID NO: 212844 - DNA, 75 bp, Homo sapiens
gcgaattattgaaaatgtggatgtgatcacaaggcctaagccctggactttgtctcacaagatgaaatgttgacg

SEQ ID NO: 212845 - DNA, 82 bp, Homo sapiens
ctgcgagcagcgctactgcgccgtgtgccgcgaggagctgcgccagaaacgcttcgttaagggactcaggcagtacgggaag

SEQ ID NO: 212846 - DNA, 75 bp, Homo sapiens
tgggcaagatcctgtgcactgactgcggtacttggaaaaatggacaaggattgtgaaatgaaacgcaccacactg

SEQ ID NO: 212847 - DNA, 83 bp, Homo sapiens
tggagcctcagttggaagcagccgatccagcctgcggagcctgtggggcagacgttggaacttgccaggaatccagcaatgat

SEQ ID NO: 212848 - DNA, 80 bp, Homo sapiens
ggaaaatttcaggctgaaggtttagcgggtgccgtgaatggtagtgtctagaaagggtatgtcccttcaagagagaggtg

SEQ ID NO: 212849 - DNA, 75 bp, Homo sapiens
tgacagtccatatgtaaccaaatattatggatcctatctgaaggtggaagttgatgggtcgaaactaaatgtgac

SEQ ID NO: 212850 - DNA, 88 bp, Homo sapiens
ggagtttcatgaagagcccaaaacctattacgaactcaaaagtcaaccgctgaagagcagcactttcatttggacccgtggataccca

SEQ ID NO: 212851 - DNA, 100 bp, Homo sapiens
ttatacaagaaaagctgcacttgaggcccagaatgcactgcacaatattaaaactttacctgggctgcagaagaaagatcagcaactggagcctaaaaaa

SEQ ID NO: 212852 - DNA, 100 bp, Homo sapiens
caagcactattggcagctgcagagccagatgatccacaggatgctgtagtagcaaatcaggacgctgccaaggtctgcagagaattcaccgagcgtgagc

SEQ ID NO: 212853 - DNA, 90 bp, Homo sapiens
ggcaaacctcagcccaccacttccagaacactgatcatgacaaccaacaatcaggaatggctttctaaaggacatggggaatacagagaa

SEQ ID NO: 212854 - DNA, 107 bp, Homo sapiens
cctggcgcggggaagcagtgggaaaatcgcaaggaagccggtcttgaatccagataatagttttgaaatactggttgaccaatctgtggtgaatagtggaaatctgc

SEQ ID NO: 212855 - DNA, 74 bp, Homo sapiens
tgaaacatgtgaacactcaagtgaagcaaaagccttccatgattacaaacatgccaaaggccaggatttgtttg

SEQ ID NO: 212856 - DNA, 75 bp, Homo sapiens
ggctttggtccccagcgcagtgaagtggtgagcctttttgtcactgaagtgtatgctgacttgtaaagtgaagaa

SEQ ID NO: 212857 - DNA, 51 bp, Homo sapiens
gcaaaagttctcactcaaactgtccctgcactaggtcagacaatccccttt

SEQ ID NO: 212858 - DNA, 83 bp, Homo sapiens
cgaaaacaccttagtttgcaccgagagaccatttgcagcgggtttattgggcacttcctagcaccaggcactgcaataagaaa

SEQ ID NO: 212859 - DNA, 83 bp, Homo sapiens
tgacagacttggacaacatgtcccaacattacatcccaaccatggcaaaagttataaccaccgtactgaagttccctgatgat

SEQ ID NO: 212860 - DNA, 97 bp, Homo sapiens
gagatgcagctcaaagaggccaagcacattgcggaagaggctgaccgcaaatacgaggagctcatgatggagcagtccaagaagtcctccctcatgg

SEQ ID NO: 212861 - DNA, 99 bp, Homo sapiens
agcagaagactctgagcccccgaactctgcaaagcctccagaggacataccacctccaggatcaggatgcagaggccctggccaacgtcaacattggga

SEQ ID NO: 212862 - DNA, 101 bp, Homo sapiens
ctgcagatggacagttgcacacactaggagatctcctcaaagaagtttgtccttctgctattgatcctgaaggcaccattcaggaagattacctaagagag

SEQ ID NO: 212863 - DNA, 88 bp, Homo sapiens
cttcgctggccatttaggagctctgctcaaagccagacggaactggttcagacagtaagtttgggaggcaactatcttctgaacattg

SEQ ID NO: 212864 - DNA, 50 bp, Homo sapiens
agagcctagcacctcttatactgatgttgaagcactggacaatgccacat

SEQ ID NO: 212865 - DNA, 75 bp, Homo sapiens
gacaaaggaacaggtatctcagctccagcggcgccatgagcaaatgaaaaagaatttggaagcacagcacaaaga

SEQ ID NO: 212866 - DNA, 75 bp, Homo sapiens
ctcctctctgttaatggagtggcactggtgaggtggattgatgatgaatcttctggcacacctggagcaactcca

SEQ ID NO: 212867 - DNA, 74 bp, Homo sapiens
ctggatatcagcccccagcggcccaggcccagcggtaaccagcgtgagctcgcccgccagaagaatatgaaaaa

SEQ ID NO: 212868 - DNA, 100 bp, Homo sapiens
cggaagaagtgcccgtccacgcacagcgaggagaaaaatggagtgctggcatacattgggaattttcgcctgcttgcagagctttccagcccgtttgtga

SEQ ID NO: 212869 - DNA, 76 bp, Homo sapiens
agaaggctatctcaatttcatgggaactgtggctgcaccatctgtcttcatcttcccgccatctgatgagcagttg

SEQ ID NO: 212870 - DNA, 100 bp, Homo sapiens
tgtttgacttagtggaggaggtgcagctcaacttctaccagttcctcggggtgcagcagagatgtgaactttgtccccataaggatggagctttaaaaag

SEQ ID NO: 212871 - DNA, 80 bp, Homo sapiens
gaggaactcaatcaaaccagtattcttttcacacaggtacatcaggaacgtctctatcaagaatacaatttcagcaaggc

SEQ ID NO: 212872 - DNA, 74 bp, Homo sapiens
ctgcattcctaccggtgtgacagatgttaagacatcccacctgaaacctgaagcgcatcctacaaagtatattt

SEQ ID NO: 212873 - DNA, 100 bp, Homo sapiens
cggcggctgtgggaggctgtgaagaggaggaaggccttgtgcaaacgcaagtcgtggatgagtaaggtgtcttgtctgtataccctgggctacccgccag

SEQ ID NO: 212874 - DNA, 75 bp, Homo sapiens
cgacgtgtggatcgtcacctaccccaagtccggttttgggatttgagattgacgcggtgaactctgtccagtttt

SEQ ID NO: 212875 - DNA, 99 bp, Homo sapiens
gaccacaccgctgatgaagacaaggactcacagtggctgcaagggcccagacagaagagaagagtcacatcatctagatgatgaatgaaaagatatgtc

SEQ ID NO: 212876 - DNA, 96 bp, Homo sapiens
tgggaactcttacctaccaccttagtcgtttatttcttccgagttagaaatcctacaaaggaccttactcagcctgcctgcacccaggtgaaataa

SEQ ID NO: 212877 - DNA, 96 bp, Homo sapiens
tggctggagccactgttggactgaataatattaatgcactagcaggtaccatcaacaaatgtgacagtgatgataacatgggtgccaaaaatactt

SEQ ID NO: 212878 - DNA, 75 bp, Homo sapiens
tggtgatgcaagaagtttctaggaaaggccggacaccagggatgttcaatagcccagaaatgcaagccctcctcc

SEQ ID NO: 212879 - DNA, 83 bp, Homo sapiens
ttgacgccatgtcgggttattcgagtgaccgagaccgcggccgggaccgaggaacccccagacctgactccggaggagcggat

SEQ ID NO: 212880 - DNA, 76 bp, Homo sapiens
ggggctgcataatgggacgaaagcctttctctttcaaggaaagaccacagcaagattctttcattcgtctcctcct

SEQ ID NO: 212881 - DNA, 74 bp, Homo sapiens
tcatcaactccatccaacacttcgtttactccgattgtagaaggcatgaaacaaaaaatgtggagtattgaaaa

SEQ ID NO: 212882 - DNA, 88 bp, Homo sapiens
tgcggctctcggtgccctctccttttcgtttccggaaacatggagcatcagatccatgctgctgctgactcggagccccacagcttgg

SEQ ID NO: 212883 - DNA, 90 bp, Homo sapiens
agccgactcagtgaaacgtttcagggagagtccggtagtgaaaggcaatgcgctgttagctctaagcagccttgctgtcgtcgtatctag

SEQ ID NO: 212884 - DNA, 98 bp, Homo sapiens
tgctgtgggcgctgctggcgctctggctgtgctgcgcgacccccgcgcatggcggagaggcgcccgcagcccgtccgggacactttccagaagccgcg

SEQ ID NO: 212885 - DNA, 83 bp, Homo sapiens
ctcacaatgaggctccctgctcagctcctggggctgctaatgctctgggtctctgacctgatggccaaaagaaaggaagaaaa

SEQ ID NO: 212886 - DNA, 90 bp, Homo sapiens
agatcgtggatctgaaagtgacaagcattttagaaagccacataaagaagatccctaatagtcatttctcaacaattatatagtcaactg

SEQ ID NO: 212887 - DNA, 101 bp, Homo sapiens
cgggcggcggcgtgagggctccgggtcgctggcggcgtggacacctgagtcccggggtaggggtctcccgcgagtggctgcttcaacccccaactccactg

SEQ ID NO: 212888 - DNA, 83 bp, Homo sapiens
ccgctctgctgtgggcgctgctggcgctctggctgtgctgcgcgacccccgcgcatgatcatgagcgtcttgttgttcatcga

SEQ ID NO: 212889 - DNA, 100 bp, Homo sapiens
ctaccttgtatgcctcaatttgctggatttaagcactgctgcactttatgaggacacattcagctaacgtattttagcaggtggagtgaggttgaagatt

SEQ ID NO: 212890 - DNA, 75 bp, Homo sapiens
ttggtgacttggatacagaaatttcctgggctaaagtgttggagagcacaatggctgaacaagtccttcctcagg

SEQ ID NO: 212891 - DNA, 75 bp, Homo sapiens
cgaggggaaagtgagcttgacaggtgctggagaatctggtaaaagcaccattgtgaagcagatgaggatcctgca

SEQ ID NO: 212892 - DNA, 90 bp, Homo sapiens
gtttgtctcttccagatcagaactgaggaacaaaaacccccatcctgggaaaaatggggaagctgggctggttgatatgtgaagagccaa

SEQ ID NO: 212893 - DNA, 100 bp, Homo sapiens
tcagataaatacctttgatctaagggttcagcctttcaatgtgacacaaggaaagtattctacagaatgtgacagtgatgataacatgggtgccaaaaat

SEQ ID NO: 212894 - DNA, 100 bp, Homo sapiens
tggagcacaaaagagtctccgcggtggaggtctgcgttgctcttgcttttcctcgctggggtgtacggatcagttcagtgatatgagaatcagcataaac

SEQ ID NO: 212895 - DNA, 75 bp, Homo sapiens
aggcagctgctgcaggtgaagagtaggcggcggggcagagagcggcctccgaggatgatgtctttctacctaaag

SEQ ID NO: 212896 - DNA, 82 bp, Homo sapiens
gtgctgcagggcctctaccaggcgccgctgtccatggacgtccatatggcgggggccggccccagcccagactggaagatga

SEQ ID NO: 212897 - DNA, 83 bp, Homo sapiens
cagatgtaccggaccctgttcttcagacctgcctagagctggaacgttacctccagagcgagccctgctatgtttcagcctca

SEQ ID NO: 212898 - DNA, 83 bp, Homo sapiens
acgcctccgccgccgcctgaggaggcgagctagccgggagttacaccgccaccgccaggttctccccatgacaccacctgaac

SEQ ID NO: 212899 - DNA, 100 bp, Homo sapiens
acacagccatcatatgggatgtcagcaaaggtgcgtcagcaatttcctgctcctcttggttggtcaggcactgaagctcctacacaggtcactgttgaaa

SEQ ID NO: 212900 - DNA, 100 bp, Homo sapiens
acccagccccctggtgatccccatgaaccacgagacagatgtgaacttccagggcaagaacctggacaccgtgaagcgggacctggacttcaccatcgac

SEQ ID NO: 212901 - DNA, 96 bp, Homo sapiens
tgagcgcgtccaggcctgacagctctgcggctcgggccctgaggttcttcctcaagttcttcctcaaatgcaaccagaactgcctgaagaatgcgg

SEQ ID NO: 212902 - DNA, 82 bp, Homo sapiens
ccacctgcccggtgcccgaggaggcagccaagctcgtagcctgccactccgtgcggattacatctactacaacgacgtgtat

SEQ ID NO: 212903 - DNA, 82 bp, Homo sapiens
ttgacgttactttcaacttcctacagaaagcagacctgcttggactgtaagaaaaatttttgcatgacctgttcgagccaag

SEQ ID NO: 212904 - DNA, 100 bp, Homo sapiens
cacgcgctgggattcggagcttcagcgggaaggagagtccagcaagctaaaagtacagaaggtggagccctggaacagcgtgcgtgtgacattcaacatc

SEQ ID NO: 212905 - DNA, 100 bp, Homo sapiens
attgcatcctggaatgcgctggacgtgttgactgttgaactctacccctcagacaagagggagaagacagttctgcagtctaccaatcgaaaactggagc

SEQ ID NO: 212906 - DNA, 100 bp, Homo sapiens
cgagcaccatgtcgaatctgagcaaaggcacgggcagccggaaggacaccaagatgcggatccgggcctttccggtggcttgctttggtgaaggtattca

SEQ ID NO: 212907 - DNA, 100 bp, Homo sapiens
ccgcctggactccacactgggaatccacgtagacagatctgagctagatcactccaaacccttgctgtcattcagggtcctcgaagacaagccatgaaag

SEQ ID NO: 212908 - DNA, 75 bp, Homo sapiens
acaacaggattcacggatcagcctgagatgatcccagctgtgctctggacagggcacgtgcgctaagctgcggct

SEQ ID NO: 212909 - DNA, 75 bp, Homo sapiens
ttccaacatcctgctagacttgttaaggtagcctttccagtaaatatatgactcagggaaaagcctcagcgaaga

SEQ ID NO: 212910 - DNA, 99 bp, Homo sapiens
cttgagtgttttcatttgcggagagctccctggtgactgccagcccaaaaccagaggaagagatcattgccgaggactatgacgatgatcctgtggact

SEQ ID NO: 212911 - DNA, 101 bp, Homo sapiens
aagatggcgaaggtctcagagctttacgatgtcacttgggaaggtggtattaaagataatcaaacattatcaagaagaaggacaaggaactgaagttgttc

SEQ ID NO: 212912 - DNA, 75 bp, Homo sapiens
cgaaagccccaggggccattggaccctacaggaggagacatcacagctttcccagatcgggaggaaaaatatgga

SEQ ID NO: 212913 - DNA, 50 bp, Homo sapiens
gaagacgttccttgaggaggtttgaaaaaacatgggaaagcggaaccacc

SEQ ID NO: 212914 - DNA, 100 bp, Homo sapiens
cgcggagcccggctcccgcaccatggaggaggacgacagctacgatgacgtccggttgtttgccttcgtgcgcttcaccaccggggatgccatgagcaag

SEQ ID NO: 212915 - DNA, 98 bp, Homo sapiens
ttatcccagaagcctcaggtcctgggtccagagaagcaggatggatcttgcgagtgttccaggcacgattctgccttctctcaaatggcataactcag

SEQ ID NO: 212916 - DNA, 96 bp, Homo sapiens
gttgagccgctcagctcccaccaccctctacctcgtgcacactgaccatgcttaccaggaatcccagtcagaagttccagcctgccactgttctct

SEQ ID NO: 212917 - DNA, 90 bp, Homo sapiens
ctgggagcttgctgcagcttcagctcaaactttggaacaaataccgaatttccaacattccatcactaatattcctcgacgccaccactg

SEQ ID NO: 212918 - DNA, 109 bp, Homo sapiens
tgtcctgtttcccagaggaacagttcatttcaacagccagggagaaagcctggatgctcaagatggtgagaacaagaccaagattggaaagccagcttcagaggaggga

SEQ ID NO: 212919 - DNA, 90 bp, Homo sapiens
tgcccagcaagagattaaagatgcagtacgccacggggccgctgctcaagttccagatttgtgatatcagtatcaagataaaagtttgga

SEQ ID NO: 212920 - DNA, 83 bp, Homo sapiens
cgcgtctctctgctgcggcgcggggaccgctgtgctctcggccagaagcggactcctagaagaggggagcagcaaggatggaa

SEQ ID NO: 212921 - DNA, 82 bp, Homo sapiens
ggagcagccgcagcgacggcggcgacagcaggagtaaaagtccctcgcaatttccgactgttggaagaactcgaagaaggcc

SEQ ID NO: 212922 - DNA, 100 bp, Homo sapiens
tgagagaagcagaaatagaatagaatcctgacctgtgaaaacaatgactctgcaataaggaatatgcactttctggttggaatttgaataacatgcctgt

SEQ ID NO: 212923 - DNA, 90 bp, Homo sapiens
aagtgcagctgcctcagttcttagcgcagcccccaaatacatcaagatgtttgtactggatgaagctgacgaaatgttaagccgtggatt

SEQ ID NO: 212924 - DNA, 90 bp, Homo sapiens
gtctgctgatcacttggagtgctgtcccttggaacaggaggagtaagattgagggtgataaaagaaaatgtggctgaagttacccgaagt

SEQ ID NO: 212925 - DNA, 83 bp, Homo sapiens
ggcaagcgcagggggacggggaccagcagctgtcgccgccgctctcagaaatcttcccaaggctgcagacaccgacggatttg

SEQ ID NO: 212926 - DNA, 83 bp, Homo sapiens
gaggccgacggagccggagtcgcggacgccgcggggtctccgggacagagccagcagccacccccgcccagccaacacctccc

SEQ ID NO: 212927 - DNA, 75 bp, Homo sapiens
cttagcagcagctccactgaacagataagggtggaatgaatcttacttgttgaatatcttctggttactagttgg

SEQ ID NO: 212928 - DNA, 90 bp, Homo sapiens
gtgggatttattattttgaagtaaaaattgtcagtaagggaagagatgggacgcacaagaccagccactgctaccgcatcacgtaccgcc

SEQ ID NO: 212929 - DNA, 100 bp, Homo sapiens
tggctttgccggatggtttgaaacctctgcaaaggcattctttagtggcaggctgaaggccagagggaacatcatgctgagccagaaacttcagatgatt

SEQ ID NO: 212930 - DNA, 96 bp, Homo sapiens
agatggacatggcatcacacaaaatgtgctggttgatggtgttaagaaactctcagtttgtgtttctgagaaaggacctagatgtgaaggctggtg

SEQ ID NO: 212931 - DNA, 83 bp, Homo sapiens
ctgtggtgtgtctagaatcagataatgggaagctccgtgtgcccagctggggcacagccccagctgatgccccagaggggcca

SEQ ID NO: 212932 - DNA, 100 bp, Homo sapiens
aaagaaggaaaactccatttgttgttcaccgtccggtcagagaagtggattaaacttcattgacttgatggtgcgacaagggaatattgacaaccctccc

SEQ ID NO: 212933 - DNA, 112 bp, Homo sapiens
aggagttcgtctcttacgtctgcggaagtgcagctgcctcagttcttagcgcagatatatttttgccatcatggatcagtttggagatatattagaaggtgaagtggaccat

SEQ ID NO: 212934 - DNA, 90 bp, Homo sapiens
agctcggccagtgggggctttggatccacagctacctcaagtggagccgccaccaaaatgcagattttcgtgaaaacccttacggggaag

SEQ ID NO: 212935 - DNA, 74 bp, Homo sapiens
ggaaaagaccctcttcagacttgaacaagatcattaagcagcttcgagtctggaaaatttgttgaatgtactga

SEQ ID NO: 212936 - DNA, 83 bp, Homo sapiens
atgagaatacaagatctaacaggactagatgtttccacagcagaggaattacaggattatatgcgtcaggcaggagaagtgac

SEQ ID NO: 212937 - DNA, 88 bp, Homo sapiens
agacgcgcagcgccggcgcccgggagacccaggaggagcccgcagatgccatggacaatattaccaggcagaaccaattctacgatac

SEQ ID NO: 212938 - DNA, 100 bp, Homo sapiens
cttcacggcacctgacctggtttgccgagtggtccgctatttgcagattgtggtgtccgagtgaccggcacactgtctgacacacagtcagtgtgcacgt

SEQ ID NO: 212939 - DNA, 88 bp, Homo sapiens
gcgaggacagcgcgtgcccgcgaggagccgccgcgcgcccgcgccctccgcgcgacgccaggctgaaggtgatgtggccgccctcaac

SEQ ID NO: 212940 - DNA, 100 bp, Homo sapiens
acagactatgaaactcatgagtttcatttgccaagtggagtgaaaagtttgaatgttcaaaaggcatctactgaaaggcaagccctggatgaaaacatgg

SEQ ID NO: 212941 - DNA, 100 bp, Homo sapiens
tcgcctgctcaacgccactcatcagattggctgccagtaacccagcaagcgtagtcgaggagccctggggtccatcgccctcctgggcttggtgggcaca

SEQ ID NO: 212942 - DNA, 110 bp, Homo sapiens
gcagccccaaagcgagcgaagctagggtcgccgccactgccgcaggaggcgtgagagactctccaacatgtgccttctgaccatacaaatgaaacttccaacagtactgt

SEQ ID NO: 212943 - DNA, 82 bp, Homo sapiens
ctgggcgctccggtggcggcggagccatcccaggcctcaggacctgagttctccgacgcccacatgacatggctgaactttg

SEQ ID NO: 212944 - DNA, 74 bp, Homo sapiens
tgtgatgtaaatgactgtgtccagcaagttgtggaacttctacaggaacggattattcagagctgggagagctt

SEQ ID NO: 212945 - DNA, 90 bp, Homo sapiens
tttaccgtagagatgtgcagtctgcaatggacagatatactgcatttgagtgggtaaaaagagaatttgtggcaattcttaaaaacttga

SEQ ID NO: 212946 - DNA, 51 bp, Homo sapiens
gaagtactcagccgctaaatccaaggttgattgtacacagcactatgaact

SEQ ID NO: 212947 - DNA, 101 bp, Homo sapiens
cgggtgctgctggttagtgtgctctgagggagggtccgagccagccgctgttttgccggaggagcccctcaggccgccagctttgctccaatggaggacaa

SEQ ID NO: 212948 - DNA, 50 bp, Homo sapiens
catgcctatcacgctgcacctgctccagaggtccagttccggccgtaccg

SEQ ID NO: 212949 - DNA, 90 bp, Homo sapiens
gcccaggagaggaagacccagtacagctggacgtttgccgtccactctgaggacagagcgggatgccaccagcttgtccaaagggaagtt

SEQ ID NO: 212950 - DNA, 100 bp, Homo sapiens
agtcggcttccgcggggcccagcgtgagtctctacctgagcgaggacgaggtgcgccggctgatcgtgtaaacaggaacatcgataagtagtgtaaaaac

SEQ ID NO: 212951 - DNA, 100 bp, Homo sapiens
gcgacccgaggaggcggaagagcggcgccgtggcaccctgtgctgcgcacactaaagaaccgcattgaagagaacactggccacaccttcaactccttac

SEQ ID NO: 212952 - DNA, 83 bp, Homo sapiens
gagccaagccagcgacccaccatggagacccgctacaacctgaagagtccgggtactccaaagattcaggtttactcacgtca

SEQ ID NO: 212953 - DNA, 83 bp, Homo sapiens
atttactggaggattcagacagtgaagagcattccagatcagattctgtgacaggttatctgggatacactaggaaacaagca

SEQ ID NO: 212954 - DNA, 101 bp, Homo sapiens
tgatgagcagcatgtcagaccagaccgtccgggtgaagaatcatccagaagtgctgaatattcgactacaacgggaaagcaaagaactgatcataaatctg

SEQ ID NO: 212955 - DNA, 83 bp, Homo sapiens
tgctgctgaagtaatgcaatggtctcaatctctggaaaaacttcttgccaaccaaacaaaaaatggccccatttatgatgtag

SEQ ID NO: 212956 - DNA, 73 bp, Homo sapiens
caagatttgatgctcttgtgctcagtgacatcattcagggagaagagaagtttacctttattgagaaatgtaa

SEQ ID NO: 212957 - DNA, 100 bp, Homo sapiens
cagacaccatggtgatgtaatggatttacaggttcttaaagatgtgggattgaaaaaagaagatattgcaatgtgggaagtaaatgaagcctttagtctg

SEQ ID NO: 212958 - DNA, 88 bp, Homo sapiens
ggccactcatattaccaaccgcagagagcagcagtgttgtactgctacttctataaacggacagccgtaagactaggcgatcctcact

SEQ ID NO: 212959 - DNA, 96 bp, Homo sapiens
tcccgccgggaggtactttgctgttgcaaccagtgtggcagagagtctaagcttttgtcaaaattttatgagctggagttaaatatccaaggccac

SEQ ID NO: 212960 - DNA, 75 bp, Homo sapiens
gccgagccgggatctcaggtcctcgggggcggcggccacgccaaggacgggctctgcggctaccctcctttttat

SEQ ID NO: 212961 - DNA, 87 bp, Homo sapiens
ggaagctctacaccttggtcctgacagacccggatgctcccagcaggaaggatcccaaatacaggctgacggggtacgggatccacc

SEQ ID NO: 212962 - DNA, 99 bp, Homo sapiens
cggcagaaccagatgctgagtgccctgtttcagcagaaactccagctcacgacaggctcgctccctcagctgccactgcagagccccgccatggaagac

SEQ ID NO: 212963 - DNA, 100 bp, Homo sapiens
ccttaggcgtggtgaggctgccgggtctcctgttccaactccacctagaatttatccagttggcgaaggactttgaggatttccgtaaaaagtggcagag

SEQ ID NO: 212964 - DNA, 95 bp, Homo sapiens
atgaagagaaaggcccggagactgtaaatgccatctgctatggggccaagattatgcttccaggtgttcttcgatatgaggacggcattgaggtc

SEQ ID NO: 212965 - DNA, 82 bp, Homo sapiens
cgcgcactttttggatcggcatctagtctttccgcttcttgaatttctctctgtaaaggaggacagctttcctgcccgcttt

SEQ ID NO: 212966 - DNA, 100 bp, Homo sapiens
ctggaactgtgttcagattcacttccttctcatccttttccaccagctaaaggagcatattaatgaaaagtgccataaactgaaaaaccaaacatgaggg

SEQ ID NO: 212967 - DNA, 99 bp, Homo sapiens
tgatgattcaggagtgtttgaccagacagcccttgcaattgagcatgtcagggaaagaaatggagctggtatttggactatttattttcacaggggtta

SEQ ID NO: 212968 - DNA, 98 bp, Homo sapiens
cccgttactgcttcagcaattctctaatgacaagcataattatttatctcaggtttggtcaagaccatgccaggtcaaaccttatttggaatttcaaa

SEQ ID NO: 212969 - DNA, 82 bp, Homo sapiens
ggaagcagccgatccagcctgcggagcctgtggggcagggaagaaggagaaagggccaacccctgaagaagcaatacagaaa

SEQ ID NO: 212970 - DNA, 100 bp, Homo sapiens
ttttccttgacctttaggtgcttttatattcatctcaaaaacaaaattctgaactcaggacttggcaagattagaactaagaggacacaccagcatcgga

SEQ ID NO: 212971 - DNA, 100 bp, Homo sapiens
tgcagtttcgatggaaaatgaagatctgaacagaattaagacgaacgagctttcacaattgcagcagatgaagatccattggtaaattgatcaggatttt

SEQ ID NO: 212972 - DNA, 100 bp, Homo sapiens
cgaacaacttatgaacaccctaaggaaattgagacgtcagatggacatcattgtgtctgaattgcttttgaaatcagaaagtcagtgcagggttgtagtg

SEQ ID NO: 212973 - DNA, 101 bp, Homo sapiens
ggcggggaatggtgaggaagagtcgggcatgggtgctggagaagaaggagcggcacaggcgccagggcagatcggatcaacatcaagaggaagggagcgtg

SEQ ID NO: 212974 - DNA, 49 bp, Homo sapiens
cttgactacggaggggttgccagttcaggcccatgaagttcatcagaaa

SEQ ID NO: 212975 - DNA, 83 bp, Homo sapiens
ccccgagctgctggagaactgaaggcggacagtctcctgcgaaaccaggcaatgggtttacccaaggtccagcctagccccta

SEQ ID NO: 212976 - DNA, 75 bp, Homo sapiens
atccgcggcctggggcaggaatgcgtcctgagcagcagccccgcggtgctggggagtctgaagatacagtattgc

SEQ ID NO: 212977 - DNA, 100 bp, Homo sapiens
ggcaaaattactgtatatgcacatgctgggctaccctgctcactttggacaggctgctgagaactagccctagacctctgcgtgagggttcttctgccga

SEQ ID NO: 212978 - DNA, 74 bp, Homo sapiens
tgtcactcctggtgaccagcattcaaggtgaatgaaaactttgccattgatttgatagcagagcagcccgtgag

SEQ ID NO: 212979 - DNA, 74 bp, Homo sapiens
ccggcctagcgtcctggaattacttcaatcaactctggctcttccagcaaaccagcaggagctgactctacaca

SEQ ID NO: 212980 - DNA, 100 bp, Homo sapiens
tgaagacctttataatgatccacttccacttgatgaatactgccactgcagagccccgccatggaagacacgccgttggtgatatcgaagcagaagacgg

SEQ ID NO: 212981 - DNA, 100 bp, Homo sapiens
gggccacggctttagcggtgtcttttgcgactgctcactagaagctcagcccaaatatgttagaggtgggaagcgttacggacgaaggtccttgcccgag

SEQ ID NO: 212982 - DNA, 74 bp, Homo sapiens
ggtgcaggctgagaaaagtcatggggctcccctggagcattgggatcccgtggcagttgcagcactgaagtgga

SEQ ID NO: 212983 - DNA, 100 bp, Homo sapiens
aaagtcttcaagccattaaaatacacagggatacttttctacaacagaaagctcaatcacttaccaagtatggctatcctgatccttcttacctgaaacg

SEQ ID NO: 212984 - DNA, 95 bp, Homo sapiens
gggagcgtccggagctagctggatcctctaggcagggcgccaatgcttcggcattagagaaagagattggtccagaacagtttccggtcaatgag

SEQ ID NO: 212985 - DNA, 100 bp, Homo sapiens
ctccaggccaagagggatccttcacccgtgtctgcctatatatgcaaacagatttgcagtaccaacctatgcagccaagcaacctcagcagttcccatca

SEQ ID NO: 212986 - DNA, 50 bp, Homo sapiens
gtcatattccacccattactaaggcagcaaatatgaagtctatggaccct

SEQ ID NO: 212987 - DNA, 98 bp, Homo sapiens
ctcaggcagtacgggaagaacttcttcagaattagaaaggagctgcttcccaataaggaaacaggaccatatgatgtggtggttctaccaggaggtaa

SEQ ID NO: 212988 - DNA, 75 bp, Homo sapiens
ggcggagcggccaacatggcggaacgcaggagacacaagaagcggatccaggtacagtctttgcccgctgcctga

SEQ ID NO: 212989 - DNA, 97 bp, Homo sapiens
agtaccagagcttgaagaacaggattccacccaggcaaccacacaacaagcccagcttatgttcctgaggaagaattgaaggcagcagaaatagatg

SEQ ID NO: 212990 - DNA, 75 bp, Homo sapiens
ggacaagaccatcgagctcatgtgagaaggcaaccaaagtgcaggacatcaaaaacaacctgaaagaggcgattg

SEQ ID NO: 212991 - DNA, 99 bp, Homo sapiens
ttgatgcgtcacactacgacagtgagaaaggagactgcttttggcttctggatgccctcctccagtacacatcgtatggggtgacaccgcctagcctca

SEQ ID NO: 212992 - DNA, 50 bp, Homo sapiens
caggacccagtcggaaaccccacgggagaagctaaaacttacttatgagg

SEQ ID NO: 212993 - DNA, 101 bp, Homo sapiens
gtttaagattaagaggcatacaccacttagtaaactaatgaaagcctattgtgaacgacagagtacaggggctcaggtccaggtggcaggggatatgctac

SEQ ID NO: 212994 - DNA, 75 bp, Homo sapiens
aaaacccttaaagaaaacttccacactagcagtcaattacagttaaagactcttcatgaagatttgtcaggtaga

SEQ ID NO: 212995 - DNA, 115 bp, Homo sapiens
ggagtgtcgacctcctataaccacccggtcctgggaatgtacgacgccaaagatgacttccctcttaggaaaacaggtgtggaccactacaacgaggtgaagagcgtcaccatct

SEQ ID NO: 212996 - DNA, 100 bp, Homo sapiens
ccacggtggagcagatcctggaggatgtgcggggtgcgccggcagaggatccagtgttcaccatcctggccccggaagatgagcagcaccagcagtaaga

SEQ ID NO: 212997 - DNA, 50 bp, Homo sapiens
tggatccacagcagtgggggctggcacaccgttccggaaggcaaaagcct

SEQ ID NO: 212998 - DNA, 100 bp, Homo sapiens
cacacctggccaatcatgacgagctcatctccaaggagtggtgaaaggacataggaaggagtctggggaactgtactacagcattgaaaaagaaggccaa

SEQ ID NO: 212999 - DNA, 97 bp, Homo sapiens
atcaaactgactaataaacactttccctgcctcacggtctccgtggagctggctctgagttccttggatgaagacgatcccaatatacttcttgcaa

SEQ ID NO: 213000 - DNA, 100 bp, Homo sapiens
gatcatctctggcacaacagctcacttttcttccaaggataagttgcaagagggaattgacataggggatagcttaactattccagatgaattcacggaa

SEQ ID NO: 213001 - DNA, 82 bp, Homo sapiens
gggagccccgggagccgcacggtctggccgtgggcctgggcttcggggcactggcagaggtcgccaagaagagcctgcgctc

SEQ ID NO: 213002 - DNA, 74 bp, Homo sapiens
cggacgacgtgaccagaagtcccgccgcttaaagggcatccagggcattgtggatgcctaccgccaagccctgc

SEQ ID NO: 213003 - DNA, 100 bp, Homo sapiens
agcggcttatcgaacagagccgggagttcaagaagaacactccagagatgtgtatatctcatgattgatatggagaaactagtcatgggccaaaggtcaa

SEQ ID NO: 213004 - DNA, 83 bp, Homo sapiens
agggcaggaagagctgcagtctttgtgggacaagctggtaggtgagtgctgtcctcggctcactttcctcaagctctccggct

SEQ ID NO: 213005 - DNA, 98 bp, Homo sapiens
agcggagatggagtcacccatgttatcccagtggaggtcctgcacataggaagcgcccacaaccgaagtgccatgccctttaccgcctcgcctgcctc

SEQ ID NO: 213006 - DNA, 88 bp, Homo sapiens
catcctccttgaagtatttggctgaggagttttcaatcccagggctttgttatgcacctaaagccatattggaagctccagaagaaag

SEQ ID NO: 213007 - DNA, 100 bp, Homo sapiens
atctttggcctgggccctgtgctgttgctggatgccactgccctgaaggcctgcaaggttccacgctttgagaaggtggatgaaagccaaactggagaac

SEQ ID NO: 213008 - DNA, 134 bp, Homo sapiens
gtgaatctgggcttatgggatacagctggacaagaagattatgacagattacgccccctatcctatccgcaaacaaggagctctacggtgactttgaagacttggaaacaggggacgtgcacaagggaaaatca

SEQ ID NO: 213009 - DNA, 50 bp, Homo sapiens
caggtgttggaaaaacacaattatgaccattaaaaatctcaagtgacgac

SEQ ID NO: 213010 - DNA, 75 bp, Homo sapiens
cgctacaaccagagcgaggctggagccaaaaacctgtatatcatctccgtgaaggggatcaagggacggctgaac

SEQ ID NO: 213011 - DNA, 50 bp, Homo sapiens
gtacctcctgctccggcagcctattcctcacctattcctacctcttggcc

SEQ ID NO: 213012 - DNA, 109 bp, Homo sapiens
gaaatttcaaagaacaggctccaaaaacaagatccctagatcttggagacatctcagctttaatgaggactttccaacattccagactgccgtcctgcaatgaagctct

SEQ ID NO: 213013 - DNA, 99 bp, Homo sapiens
cacacaggccctaaactacacaagaatgacattgccatcaacgaactcatgaaaagatactgtcctaattccgatgctcacttgttggttgagagtaag

SEQ ID NO: 213014 - DNA, 121 bp, Homo sapiens
tgagccccagaaacgaaatacagaggagtcatcctcacctgttagggacccagatgatgtggtaccagttggccaaagaagagcctggtgttggtgcatgtgctttggactagcatttatg

SEQ ID NO: 213015 - DNA, 82 bp, Homo sapiens
tcggatgcacggggcactgggagctgctgaacttgcctggagctccagagagtagccctcgatgacttacgagccctcaagg

SEQ ID NO: 213016 - DNA, 75 bp, Homo sapiens
cgggacaccccggaagctgggaaatgcaagtgttcatcttccacgtattggacatgccacgaaaggttttaactg

SEQ ID NO: 213017 - DNA, 75 bp, Homo sapiens
cttacctctttgatctcgacaataaggtgtgtttgtcaaagtgtctctgatgaaccacaacaagtttgtcaagtg

SEQ ID NO: 213018 - DNA, 83 bp, Homo sapiens
gggcggcttcctggcctgggcgctccggtggcggcggagggaaatcctcattgacgattcaatttgttgaaggccaatttgtg

SEQ ID NO: 213019 - DNA, 98 bp, Homo sapiens
aggcggcggcggaagatggtgccgggggtcgctggctctgctgctgccgccggcgaaggaggaggcgttgccggggtgataaaagaaaatgtggctga

SEQ ID NO: 213020 - DNA, 83 bp, Homo sapiens
ctcgagtgagcggactgcccaggacttcggaactagacgaggtataccaagcttggctacgcaggcaacactgagccccagtt

SEQ ID NO: 213021 - DNA, 97 bp, Homo sapiens
taattaaaacatttttcagggacgtagccatccagagggcgccctgcgtccggcagaggaggcgagcatcccgctcaggtgatgaggaacccctcgc

SEQ ID NO: 213022 - DNA, 83 bp, Homo sapiens
ctctcctctgatggcaggacctgccaagcagggagagcaacaagccccggccctcagagctcagccggatgagcgcagcccag

SEQ ID NO: 213023 - DNA, 50 bp, Homo sapiens
ctgagccccagcaccagtcacctccaggggactcattctcacagttccgg

SEQ ID NO: 213024 - DNA, 75 bp, Homo sapiens
cccaactggaattccacttacgggtcccactctatgaccagtgggaggatgtgatgaaagggatgaaggtggagg

SEQ ID NO: 213025 - DNA, 74 bp, Homo sapiens
ctgcaaaccgagctcccgtctgccttgcaggagaccaagacacattccaccccagtggggggtcccataccact

SEQ ID NO: 213026 - DNA, 80 bp, Homo sapiens
taggagctgtaatcaattgtgctgacaacacagggctggtgtgagcagaaaatgaatgtctggggaagaatgttgacagc

SEQ ID NO: 213027 - DNA, 75 bp, Homo sapiens
gaacggaaaactcccaacttcctgcatttggccctggttgatttctcttctgaatagtttccatccccatgaaga

SEQ ID NO: 213028 - DNA, 83 bp, Homo sapiens
aggagaagaagctggctcccatcacctacccgcagggcctggcactggccaaggagattggggacggcaaaacagaacagaaa

SEQ ID NO: 213029 - DNA, 75 bp, Homo sapiens
caccactttttagtaggcaaagacacttctaccacaacaatcaggcatggattccgtgaaggaacaacacctaaa

SEQ ID NO: 213030 - DNA, 90 bp, Homo sapiens
caagccagtcatccattaagttggggtagaattctctttattggtggcatcacagctcccacagtgagagacccatctattttggatagt

SEQ ID NO: 213031 - DNA, 100 bp, Homo sapiens
ggattagctccagttcgctctagcagacaagatcagatccacagctaaaccaggtggacaggtgaaatgtcagtatatctctgctgtggataaagttata

SEQ ID NO: 213032 - DNA, 98 bp, Homo sapiens
actcctccaagaaccaacccccaaattggctgggacagacgccttctggcaagaggggagagcctctggaacagtgtacagtggggaggagaagctca

SEQ ID NO: 213033 - DNA, 98 bp, Homo sapiens
ctcagatcttgttgtcacccccattatcgacaatccaaagaatgccatgagggcgactgtggaaagccatgagtccagcctcattctcccacccatca

SEQ ID NO: 213034 - DNA, 98 bp, Homo sapiens
cagaactgggttctggactttgggcgtcccattgccatgcaaatggttatgagccttagagtttctgaactccaagtactgttgggctacgccgggag

SEQ ID NO: 213035 - DNA, 100 bp, Homo sapiens
aggacaggcacatacagtgaggttggtagctggcagtgttgtgatggcttttgaagaagtatgcccggacagaatagatctgattcataaaaattaccgc

SEQ ID NO: 213036 - DNA, 98 bp, Homo sapiens
tccaggacaagtcctgcgcttggggatcctctgtacgcccgttcactgactgggctggcttagatgaagatgaagatgcacatgtctgggaggataat

SEQ ID NO: 213037 - DNA, 75 bp, Homo sapiens
gtacagcagccacccaaccaaccagtcccagcttccagtcacagcatagctttccccacaaataaaccagagaaa

SEQ ID NO: 213038 - DNA, 83 bp, Homo sapiens
gcatttattgatctgactgaagattttacagcaggaatatattaaaggaatctgtgaacctgaactagaagaaagagaatgtt

SEQ ID NO: 213039 - DNA, 82 bp, Homo sapiens
ccccgcggccgcaccttcccgccttctcagatgccatggacaatattaccaggcagaaccaattctacgatacccaagtcat

SEQ ID NO: 213040 - DNA, 88 bp, Homo sapiens
gagaggcggctaaggaaaggtgccacagcagagacgcgaaggagaggccctagaaccggagccgatatgtggatttactcccttgatg

SEQ ID NO: 213041 - DNA, 75 bp, Homo sapiens
ggttactccattcgatttgaagactgcagtagtgcaaaaaccattcttaacctcgtgtgcaagctgaacacaagg

SEQ ID NO: 213042 - DNA, 98 bp, Homo sapiens
aagaacccaaggaccaagcccaggactccagtcagccttcccaagaactgcacagtgaatccaaaagaaagtatactgaaaagagtgaaggatatagg

SEQ ID NO: 213043 - DNA, 106 bp, Homo sapiens
gaagtttgagagaagtttaagagaagaaatggacatgattgcctaaatcagccaaacacaggtttgctaatccagactttacacaacctatctcagaagttgtaga

SEQ ID NO: 213044 - DNA, 82 bp, Homo sapiens
tggctgactacctgctgtacaccctcaacaaacaccagcgctttggtttggaaattttagcattcaggtgccaggaatgcag

SEQ ID NO: 213045 - DNA, 100 bp, Homo sapiens
ccccaccgggtctttcaactttactcctgctcccctgaaaaacctacggtggaagccacctcttgtacagccgtgttgccgcccgctgtgctatgagcag

SEQ ID NO: 213046 - DNA, 83 bp, Homo sapiens
ggtgagagtcggcccaaaaagcggcggccgttggaggtggctgcggcagctgtccacctaaacccactgtgttcatctctggg

SEQ ID NO: 213047 - DNA, 100 bp, Homo sapiens
ctagccggctgcggtgtgagaatggagtgggcaggaaagcagcgggactttcagggtgcaaatagctatgggcaacttggcctcggccataaggaagatg

SEQ ID NO: 213048 - DNA, 75 bp, Homo sapiens
ttgacttggtgttgaaagtgaaatgtcatgcctctgaaaatgaagaaagatgtgcgggacatcctcaccccaatt

SEQ ID NO: 213049 - DNA, 79 bp, Homo sapiens
ggcggcggcggctgcggcccaatatagggaaagcaggcaggatgggagagtcgccgatagaaccacctcttccctgcct

SEQ ID NO: 213050 - DNA, 100 bp, Homo sapiens
caagaagggagatgccaagtgacaatcaccaggaagatggaacgtgttgtgggctttcacgtactgggtccaaatgctggagaagttacacaaggctttg

SEQ ID NO: 213051 - DNA, 75 bp, Homo sapiens
gctgtggattggcattaactttgacagactcacacttttggccctgtttgatagtgatgcagccaacacgaacgg

SEQ ID NO: 213052 - DNA, 100 bp, Homo sapiens
agtagcgcagggtctcgagctgtggccgtggacttaggcaacaggtagatatagttgtaggtactccgggaagactagatgacttggtgtcaactggaaa

SEQ ID NO: 213053 - DNA, 87 bp, Homo sapiens
cgagccccgtggactccccatcatccaagacgtcatgctagccgaggcccagcaaatacttccctggacaagaaagccagatgaaac

SEQ ID NO: 213054 - DNA, 98 bp, Homo sapiens
cgagctttcccgggataagtagctttagcgatcgggagacagccgggcgctgcaagtgaaggaagcccatcccccagaattgagctgctgcataatat

SEQ ID NO: 213055 - DNA, 100 bp, Homo sapiens
cttgccagaatttcctgcgctgttccacctcattcaacttcagactcggagccgtgggtcccgactgaacatcatcatcatcgctgagggtgccattgac

SEQ ID NO: 213056 - DNA, 82 bp, Homo sapiens
ccggccgcggccctgggagctggaggaaccgcgtagtgagttgaaactcttggaggaagcaaccatttcagtctgcaggtca

SEQ ID NO: 213057 - DNA, 100 bp, Homo sapiens
cgccgctgcgcgcatgggcctgttcctggcccgcagccgccacctacccagtgaccatgataggtaagaatgattgatgttggctgatattggagtgctc

SEQ ID NO: 213058 - DNA, 90 bp, Homo sapiens
cgaccccagtcgcctggcgcaccggcttttggtgctgttactgatgtgcttccttggctttgctggtaagcgggcccctcagtgctaccc

SEQ ID NO: 213059 - DNA, 100 bp, Homo sapiens
agagccgggtaccggccgtggaagcggccaccgactactgtcagcagctgtgccagatttgatccaggctaccaacgagaccaatgttaatattcctcag

SEQ ID NO: 213060 - DNA, 83 bp, Homo sapiens
agcagcttgggcttccagctcagcagggaaccctgcagcttcagcgcctgctcctggtcatcactaaccagatttacttggag

SEQ ID NO: 213061 - DNA, 98 bp, Homo sapiens
ctggcgctgctgctgcacgggcggctgctggcgattgaccgactcatcagtcacggggccgacatcctgaagcctgtaatgctcaggcagggagaaaa

SEQ ID NO: 213062 - DNA, 49 bp, Homo sapiens
gcggcatcgccggcctcgctatgactgggactcttcaattaatctgaca

SEQ ID NO: 213063 - DNA, 73 bp, Homo sapiens
gacttccctttggatgtagcaaggaagaaattgttcagttcttctcaggaattggaattccagtgtacccagg

SEQ ID NO: 213064 - DNA, 82 bp, Homo sapiens
ctcaaaaacaaaattctgaactcaggacttggcaactatccagtcagttcgctgctattcccatgggtcacaggagacagat

SEQ ID NO: 213065 - DNA, 75 bp, Homo sapiens
gccttctgagtagctgggattacaggtgtgcaccaccacgcccagatgaggtttatataactttccaagacaagg

SEQ ID NO: 213066 - DNA, 83 bp, Homo sapiens
caagcagccttagccctagtgtagagcatcctttcctgaaactggccaaaccgttatctagcttgacaccactgatcatggca

SEQ ID NO: 213067 - DNA, 100 bp, Homo sapiens
cctgactttgcatatctggcatccaaatatccagattttaagcagcatgttcagataaatctgaatggaagagtgagtactatactggcaattgctggag

SEQ ID NO: 213068 - DNA, 58 bp, Homo sapiens
ggagggctggccaacttctgctacagacgactcagaggtatatcgaattccaaagaaa

SEQ ID NO: 213069 - DNA, 100 bp, Homo sapiens
gcatgcacatcttacagatacagagatcatgactttggtagatgagactaacatgtatgaaggtgtaggaagaatcagcagccgctcttctaaaacattc

SEQ ID NO: 213070 - DNA, 107 bp, Homo sapiens
cgggaactgctgacgcttgatgagaaggacccacggcgtctgttcgaaggactatggtgcagccctgcggggcctgtgcgaagacgccctggaaggcctgctcttcc

SEQ ID NO: 213071 - DNA, 95 bp, Homo sapiens
ggagaacctgcggcggccggagcgatttcaactattgcagaaagtgaagattcacaggagtcagtggatagtgtaactgattcccaaaagcgaag

SEQ ID NO: 213072 - DNA, 127 bp, Homo sapiens
gtagggtgggccctccatcatcgtgtcattgcccatgaccagcgttggggatgccagcaggccgtgcgtttagtgggctacagatggcatggcatctaaaaccttacaatgcttgattttcatacag

SEQ ID NO: 213073 - DNA, 99 bp, Homo sapiens
ggacacgctgctaggctaccttgctgatgacctcacatggtgtggtgaattcaacacttccagttgctccttgagggcaggacagttcttatggcttta

SEQ ID NO: 213074 - DNA, 75 bp, Homo sapiens
ggctctccgccgtccccagccctgcctctccctgggctctgcatacttccacaggctgcactcgaggagatccac

SEQ ID NO: 213075 - DNA, 100 bp, Homo sapiens
agctgcctcctgggcacgccggggctccaaggctgttcctagaagagggcatagacatcgagggggcctggccagtcattgacagacggacttgttgacc

SEQ ID NO: 213076 - DNA, 50 bp, Homo sapiens
cggaagaggaggcctgatggggtaggtggagagttttcaaacactgttat

SEQ ID NO: 213077 - DNA, 83 bp, Homo sapiens
ccggctgcaccctgaccgatgggaccctggtacggacattgctgcaggagaagaggttgccatcaagcttgaatgtgtcaaaa

SEQ ID NO: 213078 - DNA, 89 bp, Homo sapiens
gagacagatgttgtcaactctgtgggaagaacagcagctcagatggcagcctttgtggttcgcctctacggaccaaacttcatccttca

SEQ ID NO: 213079 - DNA, 82 bp, Homo sapiens
ccgcgcccggccggacccgggcccgagcagggtttccaggcctgaggtgcccgccctggccccaggagaatgaaccagccgc

SEQ ID NO: 213080 - DNA, 75 bp, Homo sapiens
ggaaaatcacagaggtaaagcatcatttcatcacatcctgtcaagggccctgtctcagcgggaccctcctcacaa

SEQ ID NO: 213081 - DNA, 75 bp, Homo sapiens
tctacacagacaacaccatcttctgaatgacagaggatcaggacacagcattgttggttttgccatgtactattt

SEQ ID NO: 213082 - DNA, 100 bp, Homo sapiens
gggctgagcagtcaactcaaatgcaagtccaagaggaggaggaggcggaggtccaagcggaaagggcacgaccaggagttgacgcactgctgcacacacc

SEQ ID NO: 213083 - DNA, 75 bp, Homo sapiens
ccggcagagggcacccaacttcagcctggagcggacactggcagccgagatggcatgcttttcacttccactgca

SEQ ID NO: 213084 - DNA, 100 bp, Homo sapiens
aattatatggacgtgacagaggaatctttggtatagaggtaaaaagaacgtattctcatggtacttacagagctggcccaatgagacaaataagcttggt

SEQ ID NO: 213085 - DNA, 75 bp, Homo sapiens
agccgccgaggatgataaacacccaggacagacagaacctccactcaatacaccagaaaacagagagtatcttgc

SEQ ID NO: 213086 - DNA, 82 bp, Homo sapiens
atggaaaatcgcttggttaaaacctgacacttttaacagggttgtgagtcccggcccagcccctccacccccctgccccccc

SEQ ID NO: 213087 - DNA, 100 bp, Homo sapiens
cagctgcgcagggcctgccaggtggcgctcgttcaacctggtttgtgatcggaagcacctgaaggacaccacacagtcagtgttcatggctgggctcctt

SEQ ID NO: 213088 - DNA, 99 bp, Homo sapiens
caccacgctctcagtcagcctggggaatgagacccaaactgctcatacagaattacgcatttccacttctaatggtgtttcagggtaactctaactttc

SEQ ID NO: 213089 - DNA, 82 bp, Homo sapiens
tccccaacaagaggaaagacacacctaccaagaagccagtcaagcggccaggacagagcgggatgccaccagcttgtccaaa

SEQ ID NO: 213090 - DNA, 144 bp, Homo sapiens
agaaaagaacctctctcaaatagaaaatgtccatggatatgtcttgcagtctcatatttctcctctgaagctgttcttgaagactaattagttacactggatatgctgctgttctttactttgggattgcttatacattttgtg

SEQ ID NO: 213091 - DNA, 73 bp, Homo sapiens
cgccaccggcagcagcagcaccaccggacggctctgacgcccgctctgcggcttcggtgtttgaacaggccac

SEQ ID NO: 213092 - DNA, 100 bp, Homo sapiens
ccgcagcccccgcacctcccaccccaggcgcagtatctgccgtcccagtcccagcagaggtaccagccgcagcagaacacccatctcggctttctcgcaa

SEQ ID NO: 213093 - DNA, 100 bp, Homo sapiens
gggaattccagcaccgcagcaaccactccagaaactttccctccttcagatataagcttaccaaagtcagcaacaatatgctacacagctgctttgctca

SEQ ID NO: 213094 - DNA, 75 bp, Homo sapiens
tcaccctgacctgtttgaacagcatcacacacctacctttaaccacaggtgaacatgtcaaaccttttaagccag

SEQ ID NO: 213095 - DNA, 100 bp, Homo sapiens
ggagccttaacaagcgcacggagccctcaagtttgtacaatgacgacagaaacctgcttcgaattagagagaaggaaagacgcaaccaggaagcccacca

SEQ ID NO: 213096 - DNA, 73 bp, Homo sapiens
gggcaacaagcatctctctaccaccctctcctgcgcccctgagagaggctgtactatactggcaattgctgga

SEQ ID NO: 213097 - DNA, 77 bp, Homo sapiens
cgggcggctgcgtcgggctgcaggagaagatggcggtctccacaggattaaaagtaagttggatcaaggaggagtga

SEQ ID NO: 213098 - DNA, 100 bp, Homo sapiens
cacaggcctgcttgaaaaccaactcagcgtgggtgactttgtaaaaatacagaaggcctttgagctggagaatgctggaggagaccttaaggatggccac

SEQ ID NO: 213099 - DNA, 121 bp, Homo sapiens
ttcttgtggatattatggctaataacacaacaagtttagggagtccatggccagaaaacttttggggtttttcgttggaatatacgttgcacatttatggcgattctgagtgtgagggcag

SEQ ID NO: 213100 - DNA, 98 bp, Homo sapiens
acaacgacgccgagctctggggcgtcttgcagccctatgagcatctcatctgcggcaagaacgccaatgagcgggacaaggagaaccggcatcggaag

SEQ ID NO: 213101 - DNA, 137 bp, Homo sapiens
ccatggctcagaccgtgcagaatgttacattgtcgctcactctgcccatcacgtgccacatttgcttggggaaggtggccagcatcgaaatgttcagccttttagtgatgaagatgcatcaattgaaacaatgagcc

SEQ ID NO: 213102 - DNA, 110 bp, Homo sapiens
atagaatagacattcccaagaatggcaagttaaacatacagtcgcctctgacaagccaggcttgggcactgtttaaaggaaagttccgagaaggcatcgacaagccggac

SEQ ID NO: 213103 - DNA, 100 bp, Homo sapiens
tatacaggaacagacaaatttctcagaggagtagaaaagtgtgttatccaggattttcaagcttcggtacttcaagtgtcagattcaacttatgatgaac

SEQ ID NO: 213104 - DNA, 98 bp, Homo sapiens
agcacttcagattctgttgatgaagatgtcatttgtcagagtgaaccgctgtggtccccgagttggtgtaagaaagacaccgaaagtaaagaagaaga

SEQ ID NO: 213105 - DNA, 82 bp, Homo sapiens
cagaccctgctccgggtcgcgtcctgggccaacgtggaacctgttgtgccgtcagaggcttcagagccggtgcccagggtgc

SEQ ID NO: 213106 - DNA, 76 bp, Homo sapiens
gcgggtcctacgaggagggctgtcagagcctcatggagtacgaggagaaggcagagcccccccaggctatgaatgc

SEQ ID NO: 213107 - DNA, 104 bp, Homo sapiens
cggcggcgcgcagcacgcgcagtatgttgggccctaccggctggagaagacgctgggcaaggggcagacaggtgtacatcggtgagctcccgcaggacttcctc

SEQ ID NO: 213108 - DNA, 75 bp, Homo sapiens
gttgcaggaaacaagatttccctctggtaaaggctgctggcaaaggggacgtcccaacgaagagaccacctgtcc

SEQ ID NO: 213109 - DNA, 73 bp, Homo sapiens
tgtcaaggagctgagagtgctgctgatatgcaacaaacgtgctacacctggttgagttctacctggaggaagg

SEQ ID NO: 213110 - DNA, 75 bp, Homo sapiens
ttctgcaccaacactgcacttaaataagggcacacctagtcaggtatctactgtgcgtttcagtcaacaatacag

SEQ ID NO: 213111 - DNA, 116 bp, Homo sapiens
ttcaccagcatccctgcagccttctggtataccatcgtcaccatgacaacactagggtgtgatgaatgcagactctgctaccattttggctgtttggatcctcctttgaaaaagtc

SEQ ID NO: 213112 - DNA, 80 bp, Homo sapiens
ggggctcggctgcagacttggccaaatggacgggactattaaggtgacgcagctggaccagaggctggcactcatcaccg

SEQ ID NO: 213113 - DNA, 100 bp, Homo sapiens
cggattggtcttggaggagcaacggctgcgcaggtgactcggtggcctcaagtgtgctacctccgggatgtgacaggcaactacacggcttcttttgtgg

SEQ ID NO: 213114 - DNA, 98 bp, Homo sapiens
agaaactcaaccatgatttctttttcaactctacagcattcctttccttgaagtcttcgtttttaccttagtctcggagttcgcagtatgtgcagtgc

SEQ ID NO: 213115 - DNA, 75 bp, Homo sapiens
ggccgagttcatgagcacatatgtcatgatggaggcaagtgaggcctatctggttggcctttttgaagacaccaa

SEQ ID NO: 213116 - DNA, 100 bp, Homo sapiens
atcttcaggtgcctcattcacatacgtcaaggaaattgaggtatctcaggagattacatttcagcttgaaaaagggtcggtggaatttaaaagaagagga

SEQ ID NO: 213117 - DNA, 100 bp, Homo sapiens
ggggtgcgccggcagaggatccagtgttcaccatcctggccccggaagtgttctaagaacggaagcatctgggctggatggaatttagcatcaagcagag

SEQ ID NO: 213118 - DNA, 82 bp, Homo sapiens
tgacagacttggacaacatgtcccaacattacatcccagatgctgaaaacgccattcaacagatgggtggccagtggcttgg

SEQ ID NO: 213119 - DNA, 82 bp, Homo sapiens
tctgaccagcggtgaatgggaggttttggcgaggcacggctccaaggacacacacctcctctacgtactggcagctgccaac

SEQ ID NO: 213120 - DNA, 100 bp, Homo sapiens
ctattgtggttgaacaatggacagtcctggaagagttcaaagaaggacgcagagccagccacacagccccacaggtcctctttagccacagggaacctcc

SEQ ID NO: 213121 - DNA, 100 bp, Homo sapiens
ggtgatctacgtgtgctttttcaagggagctgataaagaacttcttcccaaaatggggaaaagcttcactctgaccatcactgtcttcacaaacccaccg

SEQ ID NO: 213122 - DNA, 100 bp, Homo sapiens
caaagggcaaagtgatcaaggacagcgtcaccctcctgccctgcttttatttcgtcgaggatgcctcattgatggacatgaactccttcagccctatgat

SEQ ID NO: 213123 - DNA, 75 bp, Homo sapiens
tcttaacccagaagtagctgaatgtgttactccattgctgaggagtgatcttatgccttcattcatccggcatgg

SEQ ID NO: 213124 - DNA, 98 bp, Homo sapiens
gcgctcaacccaaccggctccagggcactggtaatttggctagaggaccgcgcggaggcagcgggtgatgtcttggcattgcccattttcaagcagga

SEQ ID NO: 213125 - DNA, 74 bp, Homo sapiens
gaccttctgattagtccacagtcttcctctatagcgttacagtgtttctgccacctctgtacaaaagacaattt

SEQ ID NO: 213126 - DNA, 82 bp, Homo sapiens
tggtggaggaatacacttatttatgaactgtgctgttagcaacttgaagaaagtttcccttgagcttggtggcaagtctcca

SEQ ID NO: 213127 - DNA, 50 bp, Homo sapiens
tggctatcctgcgcctttccactgctctgatccagctccaggtcccacag

SEQ ID NO: 213128 - DNA, 75 bp, Homo sapiens
tcaggaggagcagcagaggctgttggaggccaagcggaaagaagagcaggagcaaaaatattttgattctgggga

SEQ ID NO: 213129 - DNA, 100 bp, Homo sapiens
gctatgtagagacgcaggccaaggaaaatgcctatgatctggaagccaacctggctgtcctgaagctgtctcctaaaaacccagaacagaagatcattaa

SEQ ID NO: 213130 - DNA, 100 bp, Homo sapiens
attggagtcagcagaactgaaataggccaaatgtgtgtggaaacacccacctggtgatgagatatatcgcaaaggttcaatctctgtgtttgaagtggat

SEQ ID NO: 213131 - DNA, 100 bp, Homo sapiens
tgcagcgtagcatctgggagaatggagacagtctggaagagctgatggaagaggctaaaatagctgtggaagctcagaataagtatgagagagaattgat

SEQ ID NO: 213132 - DNA, 98 bp, Homo sapiens
ctgcccctattgtaagtgcagatggaacacaacagctgattgctgtgtttgaagaacaagaaccactccacaagattgagagccccagtggaaaccct

SEQ ID NO: 213133 - DNA, 83 bp, Homo sapiens
ggacgttcggccaagggaccaaggtggaaatcaaacaatgcttccaggaccactcatgatgtaccagtttcaaagaagtttca

SEQ ID NO: 213134 - DNA, 100 bp, Homo sapiens
cgcctctgccctgcacgtggctgctgccaagggctacattgaggtgatgaggttgtggcatcagctgacacttcaggtgcttgattttgtgcaggatccg

SEQ ID NO: 213135 - DNA, 74 bp, Homo sapiens
agaacagttaatcctcaatttaagcctgatctaacccctagaaacagggtatgttagagcccaccaaggaacca

SEQ ID NO: 213136 - DNA, 83 bp, Homo sapiens
tacttacagcacatattaaagtcaaccaatatgaaatgcctgactccagaaaagtttactatcaatgtgagcacggacatgcg

SEQ ID NO: 213137 - DNA, 75 bp, Homo sapiens
gtggaccagggcaccagttcgacgcgctttttggtatgatctcgtgaaatcttgagagaaactgaatgacgaatg

SEQ ID NO: 213138 - DNA, 101 bp, Homo sapiens
gctccacattgagagcaaaatctacaagatgatgcagggaggagtacatatccagccatactcatggaccccagtgatttccccagtccatttgacccatt

SEQ ID NO: 213139 - DNA, 100 bp, Homo sapiens
tgctggcagagagacagaagcggattgagcagcagaaagaacagaggcgacggctagaagagcttcggaaatgtgtggacacctacaagtaccttttcat

SEQ ID NO: 213140 - DNA, 75 bp, Homo sapiens
gaagaaagaatgcaaagtccccagaatcttcatggccagcaagatggttacaggaggttccagtggcatcgggaa

SEQ ID NO: 213141 - DNA, 100 bp, Homo sapiens
catccagccctctgaggcagactatgccgtagacatccggagtcctgctatttcacaatcattccggccaagattccttggtgtggctgaacaattacac

SEQ ID NO: 213142 - DNA, 82 bp, Homo sapiens
cgagcgcgagcggcgcgagaaagtgttggataaatacaaccctccagaccacttcctccctgagtcctacacctgtttcttc

SEQ ID NO: 213143 - DNA, 111 bp, Homo sapiens
agggccctgcagatgtcgccaggaaagtggtgatccaggcaggaccaggctgcactgaagggacagagcttaattggcttagtgtcgacttcaataattggaaagactggg

SEQ ID NO: 213144 - DNA, 76 bp, Homo sapiens
caagacccgacacaaggcagcttcccacagcaggttggacagttcacagttgctctaggtcgtaaccagcctttga

SEQ ID NO: 213145 - DNA, 100 bp, Homo sapiens
gctgcgcagtgaagaaaatgatggcttccggaagttcctggtccacaacgtcaaggagctggaagtgctgctgatgtgcaacaaatcttactgtgccgag

SEQ ID NO: 213146 - DNA, 75 bp, Homo sapiens
acatcctgctagacttgttaaggtcaatgagctgaaggagaaaggcaacaaggccctgagcgtgggtaacatcga

SEQ ID NO: 213147 - DNA, 100 bp, Homo sapiens
tggacaaaggaacaggtatctcagggaagatggaagagttgagtcaggccctggctagtagcttttctgtgtctcaagatctgaacagcacagctgcccc

SEQ ID NO: 213148 - DNA, 50 bp, Homo sapiens
cgctccagaggacatgagcaaggagcagaacctgcaaccatggtcgtgcc

SEQ ID NO: 213149 - DNA, 82 bp, Homo sapiens
gattatagctctgtatgagaaggacaacacctacttagcgctggccgcgcgccgaacccgagtccggcggcaccgacgacga

SEQ ID NO: 213150 - DNA, 96 bp, Homo sapiens
ggcgaggagaggaggtgaccccgcgaaaggatgtgatcttcgtggtggaaagctaaattttaaaaccaccccaatggatgcagacagtgatgttgc

SEQ ID NO: 213151 - DNA, 50 bp, Homo sapiens
ctgcctactcccccaccggggatttcagagctggaagtcgagtgtgctac

SEQ ID NO: 213152 - DNA, 100 bp, Homo sapiens
cggttcttcacctcctcagtcaacacccttgagcccacctccactcactcccaaagccaccaggaccctaagcaggtatgtttattcctaaaacgaggtg

SEQ ID NO: 213153 - DNA, 100 bp, Homo sapiens
ctgggaaggcatcctggggctggcctatgctgagattgccagggttatccagtgaatctagcagccaatgggcattagtggtgcagttctgcaggctaca

SEQ ID NO: 213154 - DNA, 100 bp, Homo sapiens
cgctctttccacctgatgtgattgcaagcatcttttcttctgcatggtgggtacccccatgctgtggcacggcttcaggatttgaatttgttgaaatgag

SEQ ID NO: 213155 - DNA, 87 bp, Homo sapiens
gatcctgaaactaaaagatgtcacaaaggaaaacgaggaaagtcccaggatgactactgtgtcaactttctaaaaccaatttttcca

SEQ ID NO: 213156 - DNA, 82 bp, Homo sapiens
gtttgatgatgtttcttatgataaggtcagtcttcactgtttccaatggaagatggattcttggatgatggccgtggggatc

SEQ ID NO: 213157 - DNA, 82 bp, Homo sapiens
tgcgctgtgatgcctgcagagctgtggcttaccagatgcctggagttactgtaaaagacgtgaaccagcaggagttcgtcag

SEQ ID NO: 213158 - DNA, 100 bp, Homo sapiens
gggagcgcctcgtcgacatgagtgatgtggaggaaaacaacttcgagggcagaactctccatggaaggtgcatctgtcaaacgttggccctgagatgaca

SEQ ID NO: 213159 - DNA, 75 bp, Homo sapiens
gcacgatgttgaacatgtggaaggtgcgcgagctggtggacaaagcgttgggggccgtcccgctcctaaggcagg

SEQ ID NO: 213160 - DNA, 76 bp, Homo sapiens
ccggtgcaagaggcgcaaacaagccaatcccaggaggaaaaacgatgaagatttcgaaacagctgtcaagaaactt

SEQ ID NO: 213161 - DNA, 100 bp, Homo sapiens
ctgcgggcccgctccgacgcggaagatttggagcaagaggtggtggtggccttcccccgaagaaatttggtaatcctggggagcgtttgcgtaaaaaaaa

SEQ ID NO: 213162 - DNA, 87 bp, Homo sapiens
ttcgtggggcagacggtggaactgggcgagctgcggctgcgggtgcggcgggtcctggccgaaggaccgtataatagacgctggccc

SEQ ID NO: 213163 - DNA, 99 bp, Homo sapiens
gccccatgaatcaatgtctggtagccaccggcactcacggtgaccaagaatatggcccaggtgaccaaagccctggacaaggccctgagcaccatggac

SEQ ID NO: 213164 - DNA, 75 bp, Homo sapiens
atcctaatgctcccaaaaggccacctgcctccggagccagcgtggtggccatagacaacaagatcgaacaggcca

SEQ ID NO: 213165 - DNA, 75 bp, Homo sapiens
gaccacctagagccttggatccaggagaacggcggctgggaatacaaactggcccttttacaatgctatggaaga

SEQ ID NO: 213166 - DNA, 75 bp, Homo sapiens
cggaccggagactttggggcctaactagtcatcagcagtgaggactctgaaggatccactgacgttgatgagccc

SEQ ID NO: 213167 - DNA, 100 bp, Homo sapiens
ttatggaccgctatgacatctctatccagcagctgcatttagttgcgctttcctgcctgcttctagcaagaaacttttgagaagaactttgaaagagaaa

SEQ ID NO: 213168 - DNA, 97 bp, Homo sapiens
ctcaccgcaacctccgcctcccagactgacattttctgaggaggctggggatgtgatttgtgattatggggagcaggatacttataacaaggccaag

SEQ ID NO: 213169 - DNA, 73 bp, Homo sapiens
ctggatacgtgacatcaattgctgcaactgaacttgaagatgtagcaatgaatcgagcccaagtttgtttgat

SEQ ID NO: 213170 - DNA, 100 bp, Homo sapiens
accgcggcgccgacatcaattacgccaatgtggacggactcactgccctgcaccaggctcagtttatgaacctcttaaaagcattaatcttccaagacct

SEQ ID NO: 213171 - DNA, 104 bp, Homo sapiens
gaaagagagctccaaggagaaaatccagaagagcaaaggcgatgatgccacattacctgagtttatacagagaaatcctcttcttatcattagtgtctctagga

SEQ ID NO: 213172 - DNA, 99 bp, Homo sapiens
agctcctcaagaatctcgtgctcaccggtttctcccacatcgacctgagaaagcgtcgtggtggagcaataaattctagacaagctcagaagcgaactc

SEQ ID NO: 213173 - DNA, 73 bp, Homo sapiens
ttcaccatcaacaaagaagaccacacactgggaaacatcattaaatcaagtattgcccaattaatagagaaag

SEQ ID NO: 213174 - DNA, 98 bp, Homo sapiens
cggaaccagcctgcacgcgctggctccgggtgacagccgcgcgcctcggccagcatatcgcacggatgactgccatccctgggttttgccagtagtga

SEQ ID NO: 213175 - DNA, 80 bp, Homo sapiens
agagggcttttactcctacctgtgtaccgagccagcccaagaagatgaaaggattgttcttgttgacaacaaatgtaagt

SEQ ID NO: 213176 - DNA, 100 bp, Homo sapiens
gcagcgtctgcccgcaaccgcactacttgctgcccgacactaatgtgttactgcaccagatattctctaagccgctttcatcatgggagaaatagagcag

SEQ ID NO: 213177 - DNA, 83 bp, Homo sapiens
gccgatccgccgcccgtccacacccgccgccagcatacagtgaagttgttctctgaagttcctcatctgccttaagtctggac

SEQ ID NO: 213178 - DNA, 105 bp, Homo sapiens
ggcgagagcagctcctcctggaaaaagcaagctgaagacatcaagaagatcttcgagttcaaagagaccctcggaacgtgggatgctatggaatatgatgagaag

SEQ ID NO: 213179 - DNA, 100 bp, Homo sapiens
tctgggataagatctggaacttccaagccaagcctgatgacctgcttatttctacctatcctaaagcagactcacccagaaagcacagccctgattctgc

SEQ ID NO: 213180 - DNA, 83 bp, Homo sapiens
cttcggtgcctctctccagcagactgcggactgcctccaagtggaagttggcaggatttaaaggatcacatgcgtgaagcagg

SEQ ID NO: 213181 - DNA, 75 bp, Homo sapiens
agactggtattatgaagaatgctcggatgggtatttgaagtataccatacaactgttttgaaaatccagcgtgga

SEQ ID NO: 213182 - DNA, 75 bp, Homo sapiens
ctgaggtggtaaagaagcatatcaagcttcttggacacttaatgattgttggcaagaaatgtgctgctgatctgg

SEQ ID NO: 213183 - DNA, 82 bp, Homo sapiens
gatttagtggacggcatctttttgaaccaaattatgctgcaaatgttcctgcacttggccatcatccatgaagaaaaggcac

SEQ ID NO: 213184 - DNA, 75 bp, Homo sapiens
caggtctgcaccccctggctggaggccgaggactaccccctgcttctagtctgcgctcctcagaccaccggcagg

SEQ ID NO: 213185 - DNA, 50 bp, Homo sapiens
cccgggacaccctggaagccaggaaatgaacatccagtcatggataaaaa

SEQ ID NO: 213186 - DNA, 82 bp, Homo sapiens
gccgcgagctggaggagcaccgcctgcggaaggagtacctggagtacgaggtcccaagctctttaaggagcccagtagtaaa

SEQ ID NO: 213187 - DNA, 50 bp, Homo sapiens
cggcagatgagagcatccaacggactatacaggctccaacccaagttcca

SEQ ID NO: 213188 - DNA, 100 bp, Homo sapiens
ttgaaaactaccagccatggctagacctgaaaatttcttccaaggttgatgcatctctctcagaggtgttcattgtactcatggcttcaatcgcactggt

SEQ ID NO: 213189 - DNA, 147 bp, Homo sapiens
atgcagtactgtgcccaggacgtgtgggccacccatgaggttttccagcagcagctaccgctcttcttggagagtcaatggaggctggggtccttggtcaccatgggacatctgttctgtcacctgtggaggaggggtacagaaacg

SEQ ID NO: 213190 - DNA, 82 bp, Homo sapiens
tcaaggtggcctaccaggaggccaggggtgtcgccatggtccagtgcacgtgccaacattacactgtcagggaagaagcgca

SEQ ID NO: 213191 - DNA, 87 bp, Homo sapiens
acgggcagccggaaggacaccaagatgcggatccgggcctttccgtggactccagaaggaagacgcttggtcactggagcttctagt

SEQ ID NO: 213192 - DNA, 98 bp, Homo sapiens
gctgggagatgggcctactcgcccgccaccctgcgctgccgccgctctgaggagttaaagtttgttgcatattctaaggacccagacataggcttggt

SEQ ID NO: 213193 - DNA, 90 bp, Homo sapiens
gcgcgcctgcctccaggccgtcaagtacctcatgttcgccttcaacctgctcttctgggaccgaccagctgggcatgttcacgcacaagg

SEQ ID NO: 213194 - DNA, 100 bp, Homo sapiens
ctcagagtctcaatgaacttggatcacagaagaactgcagcttcctggggagcagtttcacctccacaggcatcgcttcatactcctcactgtcaatgct

SEQ ID NO: 213195 - DNA, 50 bp, Homo sapiens
aaagaaatccagtcccgaccagaattcagagcttgctccagggatgtgag

SEQ ID NO: 213196 - DNA, 75 bp, Homo sapiens
agtgaatctatggattttagatatctgccagatgaaaaagagcacttggagctaccttctgtttctttgctgtag

SEQ ID NO: 213197 - DNA, 98 bp, Homo sapiens
gatctgcagagatcaaaacaagccctccaggaactcactgtcgagttatagcagtgctggattgggagctgtcaaccattggtcatcctttgtcagac

SEQ ID NO: 213198 - DNA, 75 bp, Homo sapiens
gctacgggaaaacactttccttctcaagtttgtatgcccaagaggacagagaacgaatgcacagaaatattgtca

SEQ ID NO: 213199 - DNA, 82 bp, Homo sapiens
agattcgcagtggtcgcttcttctccttggttctcagaggcactgtgactgacttccctggatttgatgagcgggctgatgc

SEQ ID NO: 213200 - DNA, 98 bp, Homo sapiens
gaggatccgcgggagctgcccggcagggcggagcctcccctcgcagtcttgaatccagataatagttttgaaatactggttgaccaatctgtggtgaa

SEQ ID NO: 213201 - DNA, 75 bp, Homo sapiens
ccgagacagaactcgtcagattcttgcctgcaggtcagcagatccggaagctcatcaaagatgggctgatcatcc

SEQ ID NO: 213202 - DNA, 75 bp, Homo sapiens
gaacagtacgcagtgaatgttgatgcattcagtctactagcatattcagatccctggaacagcccagttggaaat

SEQ ID NO: 213203 - DNA, 87 bp, Homo sapiens
gacgcaggggggatatccacagttcgatcaagactctttttgatcagaacaatgctgcaaaaaaagaagagtcagaaactgccaaca

SEQ ID NO: 213204 - DNA, 100 bp, Homo sapiens
ctgtgcggtctgccaggagctgcggccccgtccggcccgggctgatatgatcgcttgctggagacctgctctattgcccttgtgggcaaatacacgaagt

SEQ ID NO: 213205 - DNA, 102 bp, Homo sapiens
cagaactgttccttcagccaaagaaacaagccgtggaataggtgtatcaagtaatggtgcaaagcctgaaaatcaggaaacccaggcccaacggcaggtgga

SEQ ID NO: 213206 - DNA, 75 bp, Homo sapiens
ctcgtgtgtgtgcgggcaggagaggacctcagccacactcactgtcagggagctgtttcccattcagatggaggg

SEQ ID NO: 213207 - DNA, 50 bp, Homo sapiens
gccagttcttctgcagccgaaggcggtgattttacaacgagatgctgctc

SEQ ID NO: 213208 - DNA, 75 bp, Homo sapiens
catgggccgggatcacattctgattgctccctgactggcagtcctcacctttccgagctgtctgtgaactcgcag

SEQ ID NO: 213209 - DNA, 74 bp, Homo sapiens
cgggttgcaaggagcgtgcgtgcgtctgcttttgcctaccaaaaagttttgggaacctgatgattcaacaaaag

SEQ ID NO: 213210 - DNA, 96 bp, Homo sapiens
aatggggaggacaacttcgcccgggacttcatggagtaccgggcgtcaaagcagaacgctttgaagaaggaatgacggtaaagcactgtgcattgt

SEQ ID NO: 213211 - DNA, 75 bp, Homo sapiens
ctggcccggaaacaggaggacataccggggagaccacgacgctgcctcctgggcgccatgagttcctgttcagct

SEQ ID NO: 213212 - DNA, 100 bp, Homo sapiens
gcttcctgccatcaccgatgtgcctaggcgcatttcagaatggatagcttgtgtcaggtccaacttcttggtcttatgctacctccatgacgtcaagaac

SEQ ID NO: 213213 - DNA, 98 bp, Homo sapiens
ctgctgcaagttccccagatcttgaggacttgatcatcttccctgacgactgtgagttcaagcgggtgccgcagtgccccagcgggagggtctacgtg

SEQ ID NO: 213214 - DNA, 100 bp, Homo sapiens
ctgagatggctgatgaagtaatttgcagtgaaattttaagcgactgtgactctgctgcaagttccccagatcttgaggtgcggagctctggactgggatt

SEQ ID NO: 213215 - DNA, 100 bp, Homo sapiens
aggagttccaggccacccaggtgtgaggggccctgatggcttgaagggtcagaaaggtccaagacaactttgacaagattgaattcaataggatgtgttg

SEQ ID NO: 213216 - DNA, 74 bp, Homo sapiens
cgacaactggatgaacattaacctgcgagaagtcatctgcacgtccagggatctcgaggacctggaagaagcag

SEQ ID NO: 213217 - DNA, 74 bp, Homo sapiens
ccccagatccatttacactttacaaacccttaggagaaatcttgagagtggacagcaattgtgaagatcgccag

SEQ ID NO: 213218 - DNA, 100 bp, Homo sapiens
aaggacctgtggaatatgagtgatgacaaaccctttctatgtactgcgcctggatgtggccaggtatttacctcctgagtgttttgtagttggaaaagag

SEQ ID NO: 213219 - DNA, 82 bp, Homo sapiens
ctcgccatgccggcccggcggctgctgctgctgctgacgctgctgctgcccggcctcggggctgctgagaactagccctaga

SEQ ID NO: 213220 - DNA, 90 bp, Homo sapiens
ctggctcaggaacagggacagcacctcatcccctggatgggggaccacaagatcctcatcgacaggtcacttatacatctcaagaggatc

SEQ ID NO: 213221 - DNA, 83 bp, Homo sapiens
gaaatttggagtgtgcgtgcgcgccgagcgagaaaacactcattgatcttcaaaatgaaatgagatttggaacaataatggga

SEQ ID NO: 213222 - DNA, 75 bp, Homo sapiens
acatttacgcggatgtcggcgaagagttcaaccaggagcttctacctggccctctacaagcagatgagcttcctg

SEQ ID NO: 213223 - DNA, 101 bp, Homo sapiens
aagatgccctctgaatctttgtgtttggctgcccaggctcgcctcgactccaaatggttgaaaacagatatacagttaccttatcccatatcacacaactg

SEQ ID NO: 213224 - DNA, 90 bp, Homo sapiens
gctgaaggccctacgggagaaaaccgggcgcaaggatgcattcagtctactagcatattcagatccctggaacagcccagttggaaatca

SEQ ID NO: 213225 - DNA, 100 bp, Homo sapiens
catctaccccaatgggggtgacttccagccaggctgtggactcaacgatgtcttgggatcaattgcatatggaagcagaggaccctgcggccttccgcag

SEQ ID NO: 213226 - DNA, 76 bp, Homo sapiens
aagtatgtggagtgttctgcacttacacaggttgctccgactgtgtgttccaggagtggtggctctgaggtgtgac

SEQ ID NO: 213227 - DNA, 75 bp, Homo sapiens
tccagatgcagctcgtggatacgaaggcgggatagccctggtcctttctccagtatttgagtacagcatcccaga

SEQ ID NO: 213228 - DNA, 100 bp, Homo sapiens
gcggacaaggaggccggcggcagcgacgggccccgaggaaaccactgattgcttgtgtggagaaacagctattaggagaacatttaacagcaattctgca

SEQ ID NO: 213229 - DNA, 99 bp, Homo sapiens
tacagctccgcgcccgccagttgcttgatcaggtggaacagattcagaaggagcaggattaccaaagggaatctatggatttcctgaaatatgttgttg

SEQ ID NO: 213230 - DNA, 100 bp, Homo sapiens
atggaagactcagcaggaacaaggtcccgcagcccccggaagccaatagactccctcagggactctcggtccctcagctactcgcctgtggagcgtcgcc

SEQ ID NO: 213231 - DNA, 100 bp, Homo sapiens
gcagggacatcactgaattcaaatgactatggttatgggggacaaaaaagacctttagaagatggagaatcaggaaacccaggcccaacggcaggtggat

SEQ ID NO: 213232 - DNA, 75 bp, Homo sapiens
cccgccagcgacgtgcgcctcgggagtcggcctgtgagacctgcctagagctggaacgttacctccagagcgagc

SEQ ID NO: 213233 - DNA, 100 bp, Homo sapiens
taacggaccttttaccatgaatagttctactccttctacaggttttgcacactagggaccaagaagccctcggggacactgctgagaaaagactgccgaa

SEQ ID NO: 213234 - DNA, 96 bp, Homo sapiens
aacccactcagggcaaccccctgccacctcagatatttaatggcgaccgatactgtggaatggatacacaactgatgacattgagttttactggcg

SEQ ID NO: 213235 - DNA, 80 bp, Homo sapiens
agccgatccagcctgcggagcctgtggggcaggtaactgcatcctgcccagcatgacggccccctgcccgccgccacctc

SEQ ID NO: 213236 - DNA, 111 bp, Homo sapiens
gagcgacaagccgctggcagccgcggatctcaccgccgctcaggcttccccgggcgctgcctggacaggcctgcctgcgtgctgggacatgtctggcctccaaggaccgtc

SEQ ID NO: 213237 - DNA, 89 bp, Homo sapiens
ctttcttatactctagaatatacaaagacaaaaggagattctgatgaagaagttattcaagatgtgctcatcttcaaactctatcagcg

SEQ ID NO: 213238 - DNA, 85 bp, Homo sapiens
ctgcccccaaccagcagcccgaggtcttctgcaaccaggaaagaccacagcaagattctttcattcgtctcctcctagcctgggg

SEQ ID NO: 213239 - DNA, 100 bp, Homo sapiens
gtggggactaagagtggcaagctgaaaaagctctacattaatcatactcctccaccactgtccaagagtaaggagagagaaatggacaagaaagatttgg

SEQ ID NO: 213240 - DNA, 98 bp, Homo sapiens
caaaggaacctggtcaccgaagtgctgggggcgctggaggccaagaccggggtggagaagcggtatctggctgcagggcagctgcaatgactctccgc

SEQ ID NO: 213241 - DNA, 50 bp, Homo sapiens
aaacaagagatttccacagaagaaaccgaaacttcattgccccttcaatg

SEQ ID NO: 213242 - DNA, 90 bp, Homo sapiens
cgcgacgcccgggacccagattgcgggttcaggtaggtgagctcgtgaaacaatatgaagaggagaaaatagccttttaaggaaattggc

SEQ ID NO: 213243 - DNA, 104 bp, Homo sapiens
tcctcatgagttaagaaacatatttctacaggtgcaatggatgagcttcatagtctggatccaagaaggcaagagttattggaagctagatttactggagttgc

SEQ ID NO: 213244 - DNA, 98 bp, Homo sapiens
gacccgcgccgccgggacccccaggacgacgtgtacctggacatcaccggttgcttatcaagtgtcccacaaatgaaaaaaatttctacatcttacga

SEQ ID NO: 213245 - DNA, 89 bp, Homo sapiens
attgagtccaagttccagaaagtactggagagcaggatataaagatgaagcgcagctgtataaagaagagcacctgaggaatcggcagc

SEQ ID NO: 213246 - DNA, 90 bp, Homo sapiens
ctcaaatgtggactgaccaaaaagcagctggacagcacaattggaatccaccctgtctgtgcagaggaagctgaatatggtgggcatgat

SEQ ID NO: 213247 - DNA, 75 bp, Homo sapiens
ggaaccgccatggccgagccggcttcgattcttctaacagagaaaatgccattgaggatgaagaggaggaggagg

SEQ ID NO: 213248 - DNA, 102 bp, Homo sapiens
gtcaccatggacgccgagatggagttcaattgcgaggtgacagagctgaatgaacctctctccaatgaagatcgaaatctcctctctgtggcctacaagaat

SEQ ID NO: 213249 - DNA, 90 bp, Homo sapiens
ccccttcgacctgcgctccgcgctctggcgctacggtctggccgtcggctgcggcgccatcgagcccccctccatgcgcctgaaggcccg

SEQ ID NO: 213250 - DNA, 98 bp, Homo sapiens
ccctctgtgcggcggccggcgggaccataagggcttaactcatatatttaacccccctccaaaaaggaggagatatcaccaaacatgatggaacaggc

SEQ ID NO: 213251 - DNA, 101 bp, Homo sapiens
ttgcctagtcgcggctacggcgtcatggaggagatccggcggcagggcaagctgtgcgacgtgaccctcaagggcttcataaacttcacttaccaaatact

SEQ ID NO: 213252 - DNA, 96 bp, Homo sapiens
cgggcagcgtgggtgagcggcgcagcggcggcagcggagagcgagagaggggagcagatttttgcactgagtggccagccgcactggacagtgacg

SEQ ID NO: 213253 - DNA, 97 bp, Homo sapiens
gtcttctccactgttcctggaggaatccgagaagagcagagcggagggagccccagacacgaaagccattgatctggtgacgaaagccacagaggag

SEQ ID NO: 213254 - DNA, 90 bp, Homo sapiens
gcttcatatggacagatggacttcaaatgctgtttgtattccagagactagggattaatgaaaatcaagttccatcctcagacaagaggt

SEQ ID NO: 213255 - DNA, 102 bp, Homo sapiens
ctgctggagaagggagactacaaggacagcagcgactttggggcccgtcaccctcaggctcttgtcaggatggtgaagctgttcatcggaaacctgccccgg

SEQ ID NO: 213256 - DNA, 50 bp, Homo sapiens
tgactgggcaacatgttattcagatctttggggccgtagaagaggacagc

SEQ ID NO: 213257 - DNA, 73 bp, Homo sapiens
gattccaagtaactcttatttgatactctccattgcataatgtgaagttaccagaagcagatgacatccagta

SEQ ID NO: 213258 - DNA, 83 bp, Homo sapiens
gtctgagtctcacagcttgtaaagaagtttgcctgcaatggtactgtaattgagcatccggaatatggagaagtaattcagct

SEQ ID NO: 213259 - DNA, 79 bp, Homo sapiens
tgcggcagaagccgagttcaacatcctcctggccaccgactcctacaaggactcctcctattttgaggacttctccaac

SEQ ID NO: 213260 - DNA, 73 bp, Homo sapiens
gaacggagaatagagtacattgaagctcgggtggagggagcaaagtcctgcacactggagtggtgtactagcg

SEQ ID NO: 213261 - DNA, 51 bp, Homo sapiens
ccaaagtgcccggacccaaaacaggaagattatcattggcaatggcgttca

SEQ ID NO: 213262 - DNA, 74 bp, Homo sapiens
cgcaaacccaaagatccccgttcctggagattctgattgagttgtcgccgtgatcctgaaggcgctgacctacg

SEQ ID NO: 213263 - DNA, 100 bp, Homo sapiens
agctatacatgatgtcttcagccagtataaaaacacagctcgacagtacgcctacttctataaagtcatccagaatcgacggactgtagcttctattaag

SEQ ID NO: 213264 - DNA, 100 bp, Homo sapiens
catgatcaacaaggccacgccctacaactacccagaagtcttcgaccctgagaaggagagggagtctggtgtcttgaaatcgaacaaaaagtccctgcgg

SEQ ID NO: 213265 - DNA, 100 bp, Homo sapiens
ctcactgcctgagggcatcatggtcaagacttttgaagatagaatggtccctgactatggctccccagagcctgccttcatctaggatggctcctctggg

SEQ ID NO: 213266 - DNA, 89 bp, Homo sapiens
tttctggacacagaagtatttgtgacaggagaccaagacacattccaccccagtggggggtcccataccactcatggatctgaatcaga

SEQ ID NO: 213267 - DNA, 74 bp, Homo sapiens
ccaagatggtgaagcagatcgagagcaaggatcttttgccagaaatgagggcatactggcctgacgtaattcac

SEQ ID NO: 213268 - DNA, 100 bp, Homo sapiens
cagcgcagccggcccagagctcgggtctccggggaccgaggttcgactagtgatagtggatggtattgcttttccatttcgtcatgacctagatgacctg

SEQ ID NO: 213269 - DNA, 96 bp, Homo sapiens
tcgctgtctgcccattgatagaggccagattgtcttggaagttccaaagttgcaacgatttctttttcagtgtggacagcagatgaaggaattgag

SEQ ID NO: 213270 - DNA, 90 bp, Homo sapiens
caagtaccatggaccatgccaggcatggcttcctcccaaggcccgaaggagaaccaccactcagatggaattgctgtatgcagatagcag

SEQ ID NO: 213271 - DNA, 90 bp, Homo sapiens
ggctggccgtgatgctgcccactggtggtcccccgctcccggggtccccggccggccaagcagggatcgcttacacctgagacgaactac

SEQ ID NO: 213272 - DNA, 83 bp, Homo sapiens
tggaaggaagatggcgcctggtggacagcaaaggctttgatgaatacatgaaggagctaggctccctggggaagggaatgcag

SEQ ID NO: 213273 - DNA, 100 bp, Homo sapiens
gagcaccagagtcggcgtaactatcgcctgacagggtatctgaagtaaaagggggcatcaagcatgatggaaccatgtgtgatacctgccgccagcaacc

SEQ ID NO: 213274 - DNA, 78 bp, Homo sapiens
ccgttaccattacgggaatcctctccaaagaaggaggagactgtagcaagtcctcagaatggttggaatgaccctcca

SEQ ID NO: 213275 - DNA, 99 bp, Homo sapiens
gaagaagggacggggatttctcctcctaatctgggcctcttgtcatggaaggtaaatactacagtgaggaggccgaggtggatctgcgggaccctggca

SEQ ID NO: 213276 - DNA, 90 bp, Homo sapiens
tttctggttccgtgttcatcaaggaatccatgtttcttccaagaagcaggtactaggttttgacaagcttgcatcatgcgtgagtataag

SEQ ID NO: 213277 - DNA, 75 bp, Homo sapiens
ggcatctgatcctaattcccttgctgatgatattggatggaagactccagacaggggaccacatcttgaagattg

SEQ ID NO: 213278 - DNA, 89 bp, Homo sapiens
tggcggtcgcctgggtccgcgccgagaactgtcaagtaatccacctctggctaccatccttattcctcctcatgctcggattcaagcag

SEQ ID NO: 213279 - DNA, 100 bp, Homo sapiens
cgcagctggtcatgggccccgcgggcagcgggaaggaatctagagctttggctgaaattgccaaagccgaactggatgatacacccatgagaggtagaca

SEQ ID NO: 213280 - DNA, 100 bp, Homo sapiens
cctgaggttggacgtggggaatttctcctggggctcagagtacaacacaggcagttctacataccggccaccccctcggacccgggaggtgctgatcaac

SEQ ID NO: 213281 - DNA, 51 bp, Homo sapiens
cggaacccgtggtcctccgcttcatgaacttagtgatttggcccgtgaccc

SEQ ID NO: 213282 - DNA, 98 bp, Homo sapiens
gaacgtctacaaagccgtaggccactacaacgtggctatcccctctgacgtctcccacttccgcttccatgtctctaattaacagaagatggcaaagc

SEQ ID NO: 213283 - DNA, 74 bp, Homo sapiens
tctggggatcttcgcactatcccaagaagaaaaagtcagcactttttgaagtgtctgaggttataccagtcatg

SEQ ID NO: 213284 - DNA, 75 bp, Homo sapiens
ctcgtcttgcattttcccgcgtgcgtgtgtgagtggtttggtgccctggttgtcagatgttggaaagcagtagga

SEQ ID NO: 213285 - DNA, 79 bp, Homo sapiens
cgctgcgcggcgcggcggccgggccctcgagacggggacgaaggggaaactgaggcccaaggaaattgagtatctctgc

SEQ ID NO: 213286 - DNA, 78 bp, Homo sapiens
aaggaggccgagccgggatctcaggtcctcgggggcggcggccacgccaaggacgggatgaactggacctcacagaca

SEQ ID NO: 213287 - DNA, 100 bp, Homo sapiens
agcggttgcttgggccagaaggttctctggtggaggcgctcttcctggtgtcccgcccagtagtcgtgagatggagaataaagaaactctcaaagggttg

SEQ ID NO: 213288 - DNA, 100 bp, Homo sapiens
catgtgtctgtgaatgtccgcaaaacattgtctcacgctgttgcatgtgtcaatcagtttatcatcagtaggactcaagctctaatgttgcacattgatt

SEQ ID NO: 213289 - DNA, 74 bp, Homo sapiens
caagatcagcaaatctaactgaccaggttgacatcatggacatatgtgagtccatcctggagaggaagcggcat

SEQ ID NO: 213290 - DNA, 101 bp, Homo sapiens
cccaccacgtccagcttcaccacgcggctgcacaactgcaggaacaccgtcacgctgctggaggaggaaacttggatttaactggccagaagcaggtattc

SEQ ID NO: 213291 - DNA, 75 bp, Homo sapiens
acaagtgaagctcacctttcgaggttcatgtgtgcccagctccctaatcaggtcctggagagcatcagcatcatc

SEQ ID NO: 213292 - DNA, 100 bp, Homo sapiens
tgtacctgcaggcctcctacacctacctctctctgacaccattcgcttttcacccaagatgatttgatgtcttataaaactctgatgaaccatgatggct

SEQ ID NO: 213293 - DNA, 111 bp, Homo sapiens
cccgcacccacgcggccctgctgaaagtggcgcaaatgattttaccaaatgttgcaagaactctggagttcttatggtagtaaaatgccggaaagaaaattctgcattgaa

SEQ ID NO: 213294 - DNA, 83 bp, Homo sapiens
tgctgaccaccaatcagatccgtaagcagaaaaatatggctcaggagactaaccagaccccggggcccatgctgtgtagcaca

SEQ ID NO: 213295 - DNA, 98 bp, Homo sapiens
ggacgtgaaggggaagaggcccaccctggagtaaccctcactggagaatccagagtatctagcagataggaggtactgtgtcacacagctgttggaag

SEQ ID NO: 213296 - DNA, 100 bp, Homo sapiens
ggagtcggtgaagtacttcctggacaacttggaccggatcggccagctgcacttttctgtagaaggtcagttggaattcagggcattgctatttattcct

SEQ ID NO: 213297 - DNA, 97 bp, Homo sapiens
ctgcgatgcctgtataacccagggactggcgcactcacagctttccaggaaagaccacagcaagattctttcattcgtctcctcctagcctggggga

SEQ ID NO: 213298 - DNA, 100 bp, Homo sapiens
gcttggtggagcaggagcggctgggcatcctcctgagactccggggtcagacgcccactccaggtccgggcccaccagctggtcttgccaccttgcgacg

SEQ ID NO: 213299 - DNA, 100 bp, Homo sapiens
tttgatcctcgccctgtttccaaaaacgcgtacaggtgatgaaacaggaagactgaagcccaggcctggccggcccacggccacattcaggccaacagac

SEQ ID NO: 213300 - DNA, 101 bp, Homo sapiens
gcgccgagcgcgtattaacgagagcctcgctcagctcaaaaccctcatcctggacgccctcagaaaagaggtggacaccaagaaccaaggcaggaccgctc

SEQ ID NO: 213301 - DNA, 75 bp, Homo sapiens
gctattcctgcaatgattattggcattcctgtgtatgtgggccgcaaggtgtgctatgatttgggcgcagcatac

SEQ ID NO: 213302 - DNA, 133 bp, Homo sapiens
aagaatgaggagcaggacatcttcatttacagagcaacttgatgaaggtacacccaatagagaggaatctttgtctgaagtggaagaaaaatacaagaaagccatggtttccaatgcacagttagacaatgag

SEQ ID NO: 213303 - DNA, 75 bp, Homo sapiens
tttggacagtccaatgtcaacattgcccagcaagtgatgttcctcctgctgatcaagagaagctttttatccaga

SEQ ID NO: 213304 - DNA, 100 bp, Homo sapiens
actaagccgattttccggaaaaagtttgcagagcagtctctgatgaagaatgccataaaaacatcggaggagtcatggattgaacagcagatgctagaag

SEQ ID NO: 213305 - DNA, 100 bp, Homo sapiens
tggcacttgtcctcctgtttctatagaaactgggttggaagtcagagctgcacaaagggaaagggtgcagcggaactgctgcctgacgctctgcaacttc

SEQ ID NO: 213306 - DNA, 74 bp, Homo sapiens
agcagcacccctacacgttcccgggtggcagtggcactgtctttgcccggatctcaaagatttcatgagacaag

SEQ ID NO: 213307 - DNA, 75 bp, Homo sapiens
ttcagaaactgttggagtttatatacacaggaactttaaatcttgacaggaagagagaagggcacagttacctaa

SEQ ID NO: 213308 - DNA, 100 bp, Homo sapiens
ccacatcccaactacacttggcctttcgacgacatcatcgtcttcgcctatgcctgccaggctgctggcaatgttgtttaatgtagaaaatggaacccca

SEQ ID NO: 213309 - DNA, 101 bp, Homo sapiens
tcctaacatccaggccgtgcttctgcctaagaagaccgagagtcaccacaaggccaagggcaagtgatttgacagatggactagaggcttttaccagattt

SEQ ID NO: 213310 - DNA, 100 bp, Homo sapiens
tttatacagtttgcacaacttcagttcctggaagctaaagagctcttcagagagctattgcttaccttttcccaagtggtttgtttgagaaacgagccag

SEQ ID NO: 213311 - DNA, 82 bp, Homo sapiens
ccagcttccagttagtggatatagcacaccatccccagccagctccagcccccttttggacatcgttggcggccggaaggcg

SEQ ID NO: 213312 - DNA, 151 bp, Homo sapiens
cttataacaatttttgatagttctgacctttcctttgcaattcagtgcagtaggatactgaaactgacattatttgggattgcaaatttttatcctgtacactgttagaacaaaagtcttccagagtgaagcttccaaagtgttgatgttg

SEQ ID NO: 213313 - DNA, 75 bp, Homo sapiens
cgggaggggccgcgccgccaccgtctgaactaggatgtcccgacatgaaggtttccaaagtccttattctaggat

SEQ ID NO: 213314 - DNA, 83 bp, Homo sapiens
cagtggtggccagtagaggaggaggtgaacaaggaggagactagacgcttgaagcaaagctgccatcccagaagacgacatgc

SEQ ID NO: 213315 - DNA, 83 bp, Homo sapiens
gcctcccgggttcaagcaattctcctgcctcagcctcctaagtagctgggactacaggtcaaaatgcagatcttcgtgaaaac

SEQ ID NO: 213316 - DNA, 110 bp, Homo sapiens
gatctaatggaagcaagccaactgtgtagcatggactcgaaagcaaatattgtacatgttgtggaagatatcaataagcgcagagagccgctccccagcctggaggctgt

SEQ ID NO: 213317 - DNA, 75 bp, Homo sapiens
ttttacctacgttggcggccccagaaggtttggaattcacccagttgcaggccgaatgcctggtcagcttaatgt

SEQ ID NO: 213318 - DNA, 95 bp, Homo sapiens
ggcaaagaagtgccccaggtctcctacttgggtgctggagaatctggtaaaagcaccattgtgaagcagatgaggatcctgcatgttaatgggtt

SEQ ID NO: 213319 - DNA, 73 bp, Homo sapiens
tcagccactgataggagccatcgctgcaggaacccggcgatatggctgccgctgtgccccgcgccgcatttct

SEQ ID NO: 213320 - DNA, 74 bp, Homo sapiens
agaactactggacaagtgtgcacaattgatccagctagaacctcagaacctctgcataatgttcaggttttaaa

SEQ ID NO: 213321 - DNA, 75 bp, Homo sapiens
cagaggactcgcgtgggagcgaggtgccggccccgacaggacggtgagacttaattcagtgcacaaatgagatga

SEQ ID NO: 213322 - DNA, 100 bp, Homo sapiens
ctgggaggtaggcgcggggcggtcggctgcggtggcggcgtttggatgattgtctctcggcggcggagtcggaattacatgaatgacagtcttcgaacca

SEQ ID NO: 213323 - DNA, 75 bp, Homo sapiens
atgagagagtggttgtaaaaatcctgaagaatttcgctaaggagtttgtgatcagtgatcggaaggagctggagg

SEQ ID NO: 213324 - DNA, 100 bp, Homo sapiens
ggatgccccttctgagggacataattaagatggcgaccgcacggcaggagaccaaggaaatggcccgctgtggactgtggcattcctgaatccattgaga

SEQ ID NO: 213325 - DNA, 83 bp, Homo sapiens
ccggatggctccgcaagtcccccccggagaaaaagttgaagcgttatgtgcatgcctacatcatcagctacctgaagaaggag

SEQ ID NO: 213326 - DNA, 83 bp, Homo sapiens
cttttggccatcttctcgcagagtgctccctgctaacggggacaggtctcggcgcggaagatggccggcggcgtggacggccc

SEQ ID NO: 213327 - DNA, 82 bp, Homo sapiens
atcacttcatggacaataccacgctgctgattgagctggaatattgtaatggcactgaaggatagcacagaagtagaaattg

SEQ ID NO: 213328 - DNA, 82 bp, Homo sapiens
caagcaggtgaccatggcagaactgaacgccatcattgggtcccttcagtctgaatatgttcattactaaggccttgccact

SEQ ID NO: 213329 - DNA, 73 bp, Homo sapiens
agaggcgctgttgagttctgcagttgatcatggccccagtggacaggaaagctaaggcctcagcgatgccgga

SEQ ID NO: 213330 - DNA, 100 bp, Homo sapiens
ggaagctgtcctggctcagatggctcggtcatcacggaacattactactggatggaaatccattccgagttcctcgagcagccatattaatgaaaggaac

SEQ ID NO: 213331 - DNA, 100 bp, Homo sapiens
tattctggtggggagatgaacccaacctagtgggtgtaatacatcatgaactgcaggggaattcacaactttgaatcaattgaggatgccaccaatgccg

SEQ ID NO: 213332 - DNA, 100 bp, Homo sapiens
ggagtgaagcggatcacagcaacaaagagagaaacagcagcaacatttttgaaaaagaacagtcctgggttctgagcctgccatccaaggaactcaggag

SEQ ID NO: 213333 - DNA, 80 bp, Homo sapiens
gcgacggggccaggaagcaattctggaagcgcagcaacagcaagctcccgggcaggtcgggaactacaagcggactgtga

SEQ ID NO: 213334 - DNA, 98 bp, Homo sapiens
aagacagagaaaggcatagacgggagcatctttccttgaagaagtacattattgacattgtggttgaaagtacagctccagcagaagctttgaaagat

SEQ ID NO: 213335 - DNA, 80 bp, Homo sapiens
cgggagctgcccggcagggcggagcctcccctcgcaggtatgctatacctccggagcatggaaaacgacttgaaagacta

SEQ ID NO: 213336 - DNA, 83 bp, Homo sapiens
tcaccatagcatggcctccttggaaagtactgaaatcccaccttatgtgatgaagtgtccgagcaatggtttgtgtagcaggc

SEQ ID NO: 213337 - DNA, 101 bp, Homo sapiens
ctggagcgggcggagaggaaaggccgctcaggatggatcaaacctcactgcaagtcagagggcctatgcgcctgagcagctgcagaaacaggataatctaa

SEQ ID NO: 213338 - DNA, 75 bp, Homo sapiens
tcgcggcggccggcggggcccgcgctgcagccggagacccggagaaaggggatttatcaaagatgttcatgaaga

SEQ ID NO: 213339 - DNA, 100 bp, Homo sapiens
gctctgcttacctggtggtgaagagattcttaaccgctgacacaattaaacactgcagtggtttgtatttcagcagtcagaaaaatttgcaaaggtggaa

SEQ ID NO: 213340 - DNA, 100 bp, Homo sapiens
tgaacgtctatgtgccgacggaggatgaacacggctctagataaggaggggcagattttctgcagcaagcactgtcaagacagcggcaggcctgggatgg

SEQ ID NO: 213341 - DNA, 75 bp, Homo sapiens
acatgaaggaggtgttgactaatccagccaagtccctgcatcccatgactcggagctgatggccttcatgacgag

SEQ ID NO: 213342 - DNA, 74 bp, Homo sapiens
cctgaaccccaaggccaaccgcgagaagatgacccagatcagaccccaacaccaacaagattcttgaaaaactg

SEQ ID NO: 213343 - DNA, 100 bp, Homo sapiens
tgaaatgaatagacccagaaccctcatcataatggtctgtaaacagatttggctaggattatttgatgatagatcttcagcaattccagacttcagggat

SEQ ID NO: 213344 - DNA, 100 bp, Homo sapiens
tcgacgaagccaaactttctgtcttctcaaccgtagatgctcctgtcgctccttcagacaaaggccctccaggccctccaggtggtctgagaatagaaga

SEQ ID NO: 213345 - DNA, 100 bp, Homo sapiens
ggcacgagctggagggagaatttcaagaactgcaggtggctccgctgccggatgggagtgccccagtgtgctggatgaagctggcgcatgcaccatgtca

SEQ ID NO: 213346 - DNA, 82 bp, Homo sapiens
actgctactgcgaagacagctggcagaattcacagatggattcagtggaaaagacaacaaatagaagtgaacaaaaatccag

SEQ ID NO: 213347 - DNA, 100 bp, Homo sapiens
catgaagctaccggccagggttttctttactctggggtcccggctgccctgtggcctcgctcctcggaggttcattcggctcctaaagaagtagcagtgt

SEQ ID NO: 213348 - DNA, 98 bp, Homo sapiens
ccacggcccgcgctcgtactggagcgaagagcggcctcctgaaggaggggaagggacgtgggggcggccacggcagatcctgataacttaagtgactc

SEQ ID NO: 213349 - DNA, 75 bp, Homo sapiens
ctctggctgtgctgcgcggcccccgcgcatgtacctggagtagaacagaaaaattattatgtctgtgttcccttg

SEQ ID NO: 213350 - DNA, 90 bp, Homo sapiens
cgcgtgcaacgactaacagggctgaccggcacccacgaccgacaagtgaagctcacctttcgaggttgtacatcctggagacctgaagaa

SEQ ID NO: 213351 - DNA, 100 bp, Homo sapiens
cacaaacctttaactcagctgcttccaggaattagtcgagaagcaaaatgatgcttcaacacccaggccaggtctctgcctcggaagtgagtgcttctgc

SEQ ID NO: 213352 - DNA, 100 bp, Homo sapiens
agtgaagtcctccataaagaacttgatgctccgagatgcctccacagtgctacgcaggatgcaggctctggagagagaacaggatgccctgtggcagggt

SEQ ID NO: 213353 - DNA, 83 bp, Homo sapiens
catgatccctaagaagacagcttgaacctagaaatttgggattcaactgaaagaaattgacaaagaagaacacctgtatattc

SEQ ID NO: 213354 - DNA, 90 bp, Homo sapiens
agaatcgtcgagaaccagcggagaaaagaaaaagcaacgtttaattctagaagaccattgtggccgccatgagcaacctggtgccccccg

SEQ ID NO: 213355 - DNA, 75 bp, Homo sapiens
aaaagtaaataaagctgctgtttttgaagagaatgaaaaatctactactcccgtctcaaagtccaatacccctac

SEQ ID NO: 213356 - DNA, 104 bp, Homo sapiens
atttactggagttgcaagtgggagcactggaagtacgggcagttgcagtgttggagctaaagtacaagaaaattccccaggacacagagctggtttggagcctt

SEQ ID NO: 213357 - DNA, 100 bp, Homo sapiens
tcgactgggctcttacagcggccccacctcggtctcccgccagcgcgtcgaaagcctgaggaaaaagcggccgcttgttgacctcctgtactggagagac

SEQ ID NO: 213358 - DNA, 83 bp, Homo sapiens
actatgtccgaagcaaggatttccgggactacctcatgagcagcctcccgcgacgatgcccctcaacgttagcttcaccaaca

SEQ ID NO: 213359 - DNA, 82 bp, Homo sapiens
cacgggatccagagcgccgcgcacttcgtcatgttcttcgcgccctggtgagcacctgcggatctgtccccagggctacacc

SEQ ID NO: 213360 - DNA, 87 bp, Homo sapiens
gaaacagcaagcagccagcaaggaggagctggaagtggtaaaggagtccaatgtgctgattgctgctaacagtcagggtacaattaa

SEQ ID NO: 213361 - DNA, 96 bp, Homo sapiens
tacagcatcatctgaggacggctcaggagcatgacaagcgagaccctgtggtggcttattactgacaacataacgatgcacggatgaaccttgcca

SEQ ID NO: 213362 - DNA, 88 bp, Homo sapiens
tcgccagcgccggcctcctccgtgcggagaagaagctgcggccgcacctggccaagggtgtccgcaatgttgccagtgtctgtctgca

SEQ ID NO: 213363 - DNA, 74 bp, Homo sapiens
gccacttgctattggagttgtgggtattccaaaatcaagcatttgctgaaggacctggatgagctgatggaagc

SEQ ID NO: 213364 - DNA, 75 bp, Homo sapiens
agaagtgtttacagagcagcctccatcgccattgccaaaaagcaaaggtttcccaccgttttcgagaactcatgc

SEQ ID NO: 213365 - DNA, 82 bp, Homo sapiens
cagaactcattctcaccaataatagtctcgtggaactgcttggtaaaatgcggctgacaattccgtgtcgggcccttacatg

SEQ ID NO: 213366 - DNA, 75 bp, Homo sapiens
gattcagccgtgaagcaagtgcagatagatggcctttgggctaccttgagaatggagcgaggagccaaggagaag

SEQ ID NO: 213367 - DNA, 100 bp, Homo sapiens
gagaaagcaactgctacgatcctgagcgagtcaagaattttcttaagggtatcggtacagcaatcggagagctgcctccatatttcatggccagagcagc

SEQ ID NO: 213368 - DNA, 111 bp, Homo sapiens
gggacaacctctttgaaattgtaacaacgtctcgaactttctatgtgcaggtcagcagatccggaagctcatcaaagatgggctgatcatccgcaagcctgtgacggtcca

SEQ ID NO: 213369 - DNA, 83 bp, Homo sapiens
agcacctttcggcttctgagacggcggcagcagcggcattcaggtgtggcagaaaaaacacagcttctgaaattgaatgtacc

SEQ ID NO: 213370 - DNA, 100 bp, Homo sapiens
gaacagtgtggcccgccatgttcttctccgcggcgctccgggcccgggcggctggcctcaccgcccactgggagtacaagcgcaagctagccagagtttc

SEQ ID NO: 213371 - DNA, 82 bp, Homo sapiens
tggagcctggacacgcagtacagcaagcaaacggggattcagcgtccgatcctttggaacagggactcacgtgaagcttcca

SEQ ID NO: 213372 - DNA, 75 bp, Homo sapiens
aatcagagccacaccgagaaccgccgcggagccctcatccctaacggtgaaaggacacatgacggaagtgtgtat

SEQ ID NO: 213373 - DNA, 74 bp, Homo sapiens
gcgatgcctcctcgctcatccgagccaccattgctccgtggatggccgcgtgagacgctatgacctaaggatgg

SEQ ID NO: 213374 - DNA, 101 bp, Homo sapiens
cctcattttagagtatcaagcagtgatggctcatgaagcaatggaatatgatgttcaggtgcagttaaatcatgccgaacaacagccagctcctgctggca

SEQ ID NO: 213375 - DNA, 74 bp, Homo sapiens
cagcggcagccgagcccgcccgcgcgccgtccaaaattgaagacattagagcagaacaagagagagaaggtgag

SEQ ID NO: 213376 - DNA, 100 bp, Homo sapiens
aaccagctcgggggccaactctgaggagtccactgcagcaggaatcggtgagtttcaaggatgtggctgtggacttcacccaggaggagtggggtcaact

SEQ ID NO: 213377 - DNA, 82 bp, Homo sapiens
gagcaagaggaagctgcagcccacccgggcagccctcaccctgatggagttttaacattgaatgcggagaacactaattatg

SEQ ID NO: 213378 - DNA, 112 bp, Homo sapiens
tgatggcaacggccaacttcggcaagatccagatcgggatttacgtggagatcaagcgcagcgatggtcgttgaggacttccacatggagattggcacaggaccagactcaa

SEQ ID NO: 213379 - DNA, 100 bp, Homo sapiens
gtattaattcttccactgatatctcaaaaggtgatctggacaaaggaacaggtatctcagtcactgtatatatgccttatttcctgggtccatgggaagc

SEQ ID NO: 213380 - DNA, 98 bp, Homo sapiens
gcaagtttgccagctccatcgtggggccctatgatgaggtggtcctcccaccacagagccagaatgattacggacctgaagccaaagaacaagatgcg

SEQ ID NO: 213381 - DNA, 97 bp, Homo sapiens
ctgaaacaactggaaactgttttggatgatcttgaccccgaggtacttcgacctggtgtcctgtggtttctaaggaatttgaatgatccagatttca

SEQ ID NO: 213382 - DNA, 75 bp, Homo sapiens
aggtctggcctccaactaagtcttgaacaagggccatgaaatgacaagcattggactgctacttggtgtttctgc

SEQ ID NO: 213383 - DNA, 145 bp, Homo sapiens
gccgcatcgcgggggtggaggacatcgacatccaggcgaactcggcctatcgctaccctccgaagtccggaaaaccaattctgtgtcctcggaggaccacagcccagttgggccccaggcgaaacccagcctggagcttgcaggc

SEQ ID NO: 213384 - DNA, 135 bp, Homo sapiens
taaatagcaaagaccaggaagtgctgcttcaaacgggcagggctctaggaaacatatgttacgatagccatggagtgaaggtacctgagcgcaggaaccatggtcttcattgctgcctcagcattagcggaagtg

SEQ ID NO: 213385 - DNA, 100 bp, Homo sapiens
agtgcaagctggcgatgcagaggggtgcgcagtccagcgtgaactacagtcagggcagcctgaaggatgcaccactggacggatgtccaggtgaagggga

SEQ ID NO: 213386 - DNA, 82 bp, Homo sapiens
gacatcagccccaaacaggacgaaggcgtgctgaaggattttttatcaagcagaaatgcatcgaacaacgagaatcaagatc

SEQ ID NO: 213387 - DNA, 100 bp, Homo sapiens
ctgcctcaggagcggaacaacgtcggcgagcgggaatcttgcctcctggaatccttcaaatcctgaatgtctcttacttgtggtgaaggaacttgtgcaa

SEQ ID NO: 213388 - DNA, 101 bp, Homo sapiens
cggcgtgctactgtgcgctcgatccagcaccatggggaagcgggacaatcgggtgattgcagagggaatggcatacatcgagcggaagaactacattcacc

SEQ ID NO: 213389 - DNA, 100 bp, Homo sapiens
ccgcactgccaggtgctgtcggcccagcctgagagaaaaggaacagttccgtaagctctttattggtggcttaagctttgaaaccacagaagaaagtttg

SEQ ID NO: 213390 - DNA, 97 bp, Homo sapiens
cgctgactttgtaggctccgccaagaggcgccgcaggagcccaaagagtcgattgatccaattaaagaaagagaagctggagtatactccaggagag

SEQ ID NO: 213391 - DNA, 75 bp, Homo sapiens
ctgcaagattgtggtgcacacgccctgcatcgagcagctggagaagggaaatgtttcaacgtgcgcaagcgttgc

SEQ ID NO: 213392 - DNA, 100 bp, Homo sapiens
taaagttgttgggaatccctgccccatctgtcgagatcacaagttgcatgttgactttaggcaacggcagcctttaacagttgagcacatgtatgaagac

SEQ ID NO: 213393 - DNA, 100 bp, Homo sapiens
ctgcgttttgccagtcacctctcaactgtgtgccaaaggttgattcacaaaaggctgcaacaaagcaagtcaacaaggcacacaataggttaatcgaaaa

SEQ ID NO: 213394 - DNA, 50 bp, Homo sapiens
cagagaaggaggaggtgaccacgcgcgagccgcggcgagtcctttgcaca

SEQ ID NO: 213395 - DNA, 75 bp, Homo sapiens
agtaattgaagctgcaaatgaagcattacttactaaagaaggtgggagtcaatcattttgacaagtctcctgaaa

SEQ ID NO: 213396 - DNA, 75 bp, Homo sapiens
gccttttgttgtatttaatttttggaacaatttgatgagctaggaggaggagacatcacagctttcccagatcgg

SEQ ID NO: 213397 - DNA, 90 bp, Homo sapiens
agattcagcccggcgatattgtcattattgatcagttcattgacaggatcaactcactatcctgaaggtccattctcccaagaagagggg

SEQ ID NO: 213398 - DNA, 75 bp, Homo sapiens
tggaactgtcaggtacctcaaagcagagcagaagtgcgaggctgtggggaagttcaccaaggccatggatgacgg

SEQ ID NO: 213399 - DNA, 90 bp, Homo sapiens
gagacactgactgagtccccctgcagagataaaagttagagccgcatgtcctggaggtgactgcaggttgttggatttggagtatcggcc

SEQ ID NO: 213400 - DNA, 60 bp, Homo sapiens
caaatgaccaccatgttgcaaaagatgatgacttttttcatgaactcccagaaacttttc

SEQ ID NO: 213401 - DNA, 83 bp, Homo sapiens
ccggaagggtccgccggctgtgctgccttatgccagcctggaccatcttggaggcagtgtaggatcatggaagaactttgaat

SEQ ID NO: 213402 - DNA, 100 bp, Homo sapiens
ttttctgcagaagatgaagctttgagtaacattgccagagagggacttgcaacaaagcattgccagagaacctagtgctccttcaattcctacacctgcg

SEQ ID NO: 213403 - DNA, 50 bp, Homo sapiens
tgtccctccgctatgaccttactctccagagaaagatggaggagcgccgg

SEQ ID NO: 213404 - DNA, 82 bp, Homo sapiens
gtgcactttcaatcttgcagtatccatatggttcctgatgaaaagttatgatcaggtgcactcaggaaagttggtgtgtggc

SEQ ID NO: 213405 - DNA, 50 bp, Homo sapiens
ctcgggctcttgggcgctgctctgagagacacctatggctgccgatgaag

SEQ ID NO: 213406 - DNA, 50 bp, Homo sapiens
ttctgctgtcaatggtgttgtccagtggccacgtcttttattagaacaat

SEQ ID NO: 213407 - DNA, 75 bp, Homo sapiens
ttcccagaagttgttctaacgctgcctttgctttaaaacagtattacttgcgttgcagagcttgaagtgaaaacc

SEQ ID NO: 213408 - DNA, 100 bp, Homo sapiens
tcgatgtttcaatattggaagcgctttgatttacagcagctgcaggtatccgcccccagatcatgaacggccccctgcacccccgccccctggtggcgct

SEQ ID NO: 213409 - DNA, 90 bp, Homo sapiens
gactatcctactggcactgctcctgggccaaggagcttcaggtctagggagtgagaacgtgatttctcagccgaatgagtttgaacatac

SEQ ID NO: 213410 - DNA, 97 bp, Homo sapiens
tacatgacaagatggcgactaagaggcgaaaacggtttggacagaggagccaaaggccaaatttccactttcagcagttttatttcagctgttagcc

SEQ ID NO: 213411 - DNA, 96 bp, Homo sapiens
attgcttactggtaaacgcgttcaactggcggaagacctcagtgggagtgttaccatacaagaagaatcaataatagaaaaagggaagaaatttcg

SEQ ID NO: 213412 - DNA, 100 bp, Homo sapiens
cagccggctctggagtgcgggcgggggcgacagggccgattccggagtgggtacccactgatggtaatgctggcctgctggctgaaccccagattgccat

SEQ ID NO: 213413 - DNA, 98 bp, Homo sapiens
gtgaaatcagaggagatgtaactatcgcacttctggggcccagtagccaactggggtcttcccattgctgccatcaatgatatgaaaaagtctccaga

SEQ ID NO: 213414 - DNA, 75 bp, Homo sapiens
cggctttttgagcggtcccgcatcaaggctctggcaggatgaatccttaaagcaattgcaggtagttcatcaacc

SEQ ID NO: 213415 - DNA, 100 bp, Homo sapiens
tgattggcatcggagtgggcgccggagcctatgtgctggccaagtttgcagtgaccagcacccatgcagaaactacctagaagttgccaagctatcagtc

SEQ ID NO: 213416 - DNA, 90 bp, Homo sapiens
cttgcaaaccttgctttggattttatgtgctacagtctgcggaacggagcagtatttcaatgtggaggagttcatgatcaagtgttgccc

SEQ ID NO: 213417 - DNA, 82 bp, Homo sapiens
acctcctgttgggccatttccgagaactcccatcagtttctgtatagtgtaaaaggaggctactcacagtcgaactacaact

SEQ ID NO: 213418 - DNA, 98 bp, Homo sapiens
atcccaactgctcctgcgccgccggtgtgatgaatgcagactctgctaccattttggctgtttggatcctcctttgaaaaagtctcctaaacagacag

SEQ ID NO: 213419 - DNA, 82 bp, Homo sapiens
ctagcacctcccccaggagaccgttgcagtcggccagcccccttctccacggcttcacaggctgctcaagaagccgagatca

SEQ ID NO: 213420 - DNA, 100 bp, Homo sapiens
gtacccgagagaggaagcaccctcgtcaccccggccggcaccgcattgaggcaggtgtgcagttaaacacagtgggaatatcacttttgatgagattgtc

SEQ ID NO: 213421 - DNA, 96 bp, Homo sapiens
aaggataataaactagttgagaagcagaacccagctgaaggactgagaacgtttgtctgcctgatgagagccacttgggttaagaaactacctgtg

SEQ ID NO: 213422 - DNA, 75 bp, Homo sapiens
agcacttggaatcacgggttgaagaattgccattgccttcagaaagtgttgatattattatttctgacattccat

SEQ ID NO: 213423 - DNA, 100 bp, Homo sapiens
ttccacacgggtgccggcatcagcactgcctctggcatccccgacttcagagcaaaatatgctgtgaattccatcaagaagaaagtcaacgacaagaacc

SEQ ID NO: 213424 - DNA, 82 bp, Homo sapiens
ccaataatatggagacactaatcgaatgtcaatcagaggcatgctcctggccatcctggagaagtgtggggccatccccaaa

SEQ ID NO: 213425 - DNA, 100 bp, Homo sapiens
catgttctctcgcgcgggtgtcgctgggctgtcggcctggaccttgcagccgcaatggatgctgggcagttttatgctaaatataaagaaacaagattga

SEQ ID NO: 213426 - DNA, 50 bp, Homo sapiens
atcccactgatgaggatcagcccatggcatgttatgttacccagagaact

SEQ ID NO: 213427 - DNA, 83 bp, Homo sapiens
agcgcaccccgactgccgaggaacgagagcgcgaagctaagaacccctgaacagtgcccaagtgttgtctctttgttgtcaga

SEQ ID NO: 213428 - DNA, 75 bp, Homo sapiens
ccaactacttccttaagatcatctagtttatgccaacgtgacttcattcatacagatgaaccaaggatcgggata

SEQ ID NO: 213429 - DNA, 97 bp, Homo sapiens
ggcaacacgataccaggaatggcaggaatgatcaacagcatcaagcagctgagcttgaatgtgaggaagacgttattccagattcaccgataacagc

SEQ ID NO: 213430 - DNA, 76 bp, Homo sapiens
actacaatggctccttgatggacggcaccctcttcgattccagcaaagcaccgcaacatgaccgaaatgagcttcc

SEQ ID NO: 213431 - DNA, 101 bp, Homo sapiens
aaatacctgctgttcggatttaacttcatcttctgggtgctggagaatctggtaaaagcaccattgtgaagcagatgaggatcctgcatgttaatgggttt

SEQ ID NO: 213432 - DNA, 98 bp, Homo sapiens
cggagccgagagccacactttcaagtaaaccagactacgtctactttgagaactcctccagcaacccatacctgatccggagaatcgaggagctcaac

SEQ ID NO: 213433 - DNA, 75 bp, Homo sapiens
gtcccccctgcgccgtgtgaaccagggcggcgactggcggcgcgatggacctgaccgggctcctgctggacgaag

SEQ ID NO: 213434 - DNA, 75 bp, Homo sapiens
cacacctggatccaggataacggaggctgggttcgtgacaataaaaaattaagagtaaatgctgttattgctccc

SEQ ID NO: 213435 - DNA, 50 bp, Homo sapiens
gaacaaacacctgccttgcaatattagggttttggccaaattgggcgagg

SEQ ID NO: 213436 - DNA, 82 bp, Homo sapiens
ctgctttccactcggctcctgtcgtccgttctctcaggctcccgttcagctcaaactggaggattataaggatcgcctgaaa

SEQ ID NO: 213437 - DNA, 105 bp, Homo sapiens
cgcccgggaggaaggaacgaggcaaggagctaaagcagcgtgcgttcagccctgggagatacggggtcaaccttcattcttctgcgtaaagatatccagttttcc

SEQ ID NO: 213438 - DNA, 98 bp, Homo sapiens
tacaaactctgtgcctcaacaaccatttctaagtggaaaacgggccttactatacatcatatcccccatcaccagatttgtgacctgccatctttcag

SEQ ID NO: 213439 - DNA, 88 bp, Homo sapiens
gaggagaacgaacatcttctggacctttgtccagagacgagttgtactgctgtcacaggaaatggacgctggattacaagcatggcag

SEQ ID NO: 213440 - DNA, 100 bp, Homo sapiens
cacgggtactggcaattggttttcggctttggcgctcggggtgactcttctcaaatgccttctcatccccacataggaagatgaagggcttctccctgct

SEQ ID NO: 213441 - DNA, 83 bp, Homo sapiens
aactcgggttctgacaagatggccgggctgccccgcaggatcatcaaggaatcttgtcgattggcctggctgctgcctactac

SEQ ID NO: 213442 - DNA, 50 bp, Homo sapiens
gcacagacttttatatatccaatggagtatttaggtcagttaacgtccat

SEQ ID NO: 213443 - DNA, 88 bp, Homo sapiens
tgggaaccctcgctcatagctgcacagttcaatcaggttggacgtgataagtatgagcctgcagctgtttcagaacaaggtgataaaa

SEQ ID NO: 213444 - DNA, 100 bp, Homo sapiens
caccggcccaccctacatttagcgcatcatgtgatccggatccattacaagattttggcttttctgttgaaaagtgttccaagcaattaaaatcaaatat

SEQ ID NO: 213445 - DNA, 102 bp, Homo sapiens
cccaccctgcccctgccgaggcaggcgcccaccgccggcggtgatgcggctgtgaagccctagtcgtactatactggcaattgctggagaagattttgcaat

SEQ ID NO: 213446 - DNA, 83 bp, Homo sapiens
ttgcgttcaagtttagagtggaattcgtgtgttgtacagacccttaaggaactgtggctgcaccatctgtcttcatcttcccg

SEQ ID NO: 213447 - DNA, 82 bp, Homo sapiens
ggtggccgccctgttccccgcgctgcggcctggcggcttccaggcgcactaccgcggaatgtgggtgccggcaggacaggcg

SEQ ID NO: 213448 - DNA, 100 bp, Homo sapiens
gtcggcggtgttgtaggtagcggtaccttgagtggcaacagcagcgtcaccctttacaccagaaagctggcgggcactatggggaaaaaacaaaacaaga

SEQ ID NO: 213449 - DNA, 98 bp, Homo sapiens
tcttgggcgggggatgtgagcgctgagcccttggcaggttcaagggcagacggggtttttgaggaggattcgcaaattgacatagccacagtacagga

SEQ ID NO: 213450 - DNA, 100 bp, Homo sapiens
ccaaaatggcgcgggtgctgaaggctgcagccgcgaatgccgtaggtgggacgctcgtccctgctggtggggaatctcaagaagaagtatgcacaggggt

SEQ ID NO: 213451 - DNA, 80 bp, Homo sapiens
tgcagatgcagtaccagcagagcatgcagggtcagtatagaccttctgatttgctgtgccctgagacatatgtttgggta

SEQ ID NO: 213452 - DNA, 96 bp, Homo sapiens
aggtgttattatggactttcaaacatctgaagatgacaatttattagatggtgacactgcagttgggaagcagctcgagagtgtcgtagaaagaag

SEQ ID NO: 213453 - DNA, 75 bp, Homo sapiens
tgaaattgtccccgcagttttcaatcatggtgtgtctgacttgctgctccagggatgtcatagttaaagttgacc

SEQ ID NO: 213454 - DNA, 109 bp, Homo sapiens
attaaaagttattttggactacctctatactgatgaagctgtggtgataaaagtggatggaagcacagtatatgcagagagtgtgattctgactactgggacatttctg

SEQ ID NO: 213455 - DNA, 102 bp, Homo sapiens
tattgtatctggggcagatgatcgtcaagtgaagatctggcgcatgaatgtgtaaacaggaacatcgataagtagtgtaaaaacttgcacaatgaaatccga

SEQ ID NO: 213456 - DNA, 50 bp, Homo sapiens
cctacattagcgtctacgaccaccaagggaacctcagaacctgttctgga

SEQ ID NO: 213457 - DNA, 100 bp, Homo sapiens
ggaaccttcacccccccaaggatgaaggacccaaggatgcagacagacatgctgaactatctggaagtccactgaaaagcaaaagcactaggaagccttt

SEQ ID NO: 213458 - DNA, 100 bp, Homo sapiens
cgagacttgtctcttatttagttctggggagcgcctcgtcgacatgagtgatgtggaggaaaacaacttcgagggcagaatataaaccacagtacttcag

SEQ ID NO: 213459 - DNA, 98 bp, Homo sapiens
tccccaaggacagaagtgggattgagacattctcacctcctcctccgcctccaaagtcgcggcaccacactgtaactcgaggcatcaccaaaggcgtg

SEQ ID NO: 213460 - DNA, 96 bp, Homo sapiens
ctcaccccgcggccgcaccttcccgccttctcagtactatactggcaattgctggagaagattttgcaattgttgcttctgatactcgattgagtg

SEQ ID NO: 213461 - DNA, 51 bp, Homo sapiens
ggtcactggtgtatgtcatggaaggacacattcagctaacgtattttagca

SEQ ID NO: 213462 - DNA, 98 bp, Homo sapiens
acagtaatggcagcatttgtcttgatattctacgatcacagtggtctccagcactaactatttcaaaagtactcttgatgaaagaccgtgaaaccaac

SEQ ID NO: 213463 - DNA, 97 bp, Homo sapiens
ctcccaaagtattgggattacaggtgagaaataagaaaggctgctgactttaccatctgaggccacacatctgctgaaatggagataattaacatca

SEQ ID NO: 213464 - DNA, 83 bp, Homo sapiens
atttaccagagataattgataacaccctgtaacagctgaatctgacaggatggcatctgatgactttgacatagtgattgagg

SEQ ID NO: 213465 - DNA, 75 bp, Homo sapiens
ccgactctgggatgaactgatgaagacaaggccttccagtttggaacgggtatttctgtgggacttggatgaaac

SEQ ID NO: 213466 - DNA, 98 bp, Homo sapiens
gcactcacagggaggaggaggcggcagcggcggaggaaggcggcgcaccccgagagatgccttcaattaagttgcagagttctgatggagagatattt

SEQ ID NO: 213467 - DNA, 130 bp, Homo sapiens
cagaaatctcctacattgctcaggaatggaagtttacagagcctcagtgttggctcatctccagttggttcagtctggctcttgctgattgaattcctttggtgcagtttagcatgttcctctgtgttct

SEQ ID NO: 213468 - DNA, 100 bp, Homo sapiens
aagatattattcttagatccggattcaccattgttcagatcttcagtttagatcttggaggcatatcaactgtggttctaaatggctatgatgtagtaaa

SEQ ID NO: 213469 - DNA, 100 bp, Homo sapiens
cattaacagacaagacacttttcagaaagacaggccctggcctattttgagcagttaaaaatttccccagatgcctggcaggtgtgtgcagaagctctag

SEQ ID NO: 213470 - DNA, 100 bp, Homo sapiens
cggcaagatccagatcgggatttacgtggagatcaagcgcagcgatggtgtctgacttccagcaactgctggcctgtgccagggtgcaagctgagcactg

SEQ ID NO: 213471 - DNA, 89 bp, Homo sapiens
cccgaggaggggaccatgacacaaattatatccagatcgagagacagaagattctgaaagggttcaatgaaatgagagtcatcttggac

SEQ ID NO: 213472 - DNA, 87 bp, Homo sapiens
aggatgtggtgctgcccgagaaggtggacgtgctggtgtctgagtggatggggacctgcctgctggagcgggacggtatgcgggcca

SEQ ID NO: 213473 - DNA, 75 bp, Homo sapiens
gtgtggtcgcgtctcggaaaccggtagcgcttgcagcatggctgaccggttccctgatgtgttacctgcttctgc

SEQ ID NO: 213474 - DNA, 76 bp, Homo sapiens
tttgacttcttgcatgcgagggaccattgcctggaaacaacgtggaggtagatgagtctttgttccaagaaatgga

SEQ ID NO: 213475 - DNA, 100 bp, Homo sapiens
aactttcatcctccatctcccggtcccggacggccccctagaacgcgggcaaggtgtgtgtggctgctgtggtgccctacgccccaggtacaaaaggctg

SEQ ID NO: 213476 - DNA, 100 bp, Homo sapiens
gcgcaaacaagccaatcccaggaggaaaaacggctgagtcatcactagagagtgggaagggcagcagcagcagagaatccaaaccctaaagctgatatca

SEQ ID NO: 213477 - DNA, 75 bp, Homo sapiens
ttcatggagaagaaggccttgactacggaggggttgccaggtgtcgtgaaaactacccctaaaagccaaaatggg

SEQ ID NO: 213478 - DNA, 74 bp, Homo sapiens
tgctgtccaagggctctgacatcaacatccgagacaacaacctgttcagttgtgtaagtcagagcagcgtccat

SEQ ID NO: 213479 - DNA, 100 bp, Homo sapiens
acttgatctgtgatgaatcagatgtcaaagacttagcttttaaattaaaaaggaagctattcaccattgagggtaagcttgatgattaccaggaacgaat

SEQ ID NO: 213480 - DNA, 98 bp, Homo sapiens
ttagaccctccacctaattgcagatgattttaaaccagcatctatagacacttcctgtgaaggagagcttcaagttggcaaaggagatgaagtcacaa

SEQ ID NO: 213481 - DNA, 74 bp, Homo sapiens
ggctgcagggcggtaaggatttcaacatgcctctgacaatctctagtgatgcctgccatattagatggagagga

SEQ ID NO: 213482 - DNA, 112 bp, Homo sapiens
gcgggcactgctttccactcggctcctgtcgtccgttctctcaggctcccgttcaggtgagaagccctaccactgcaactgggacggctgcggctggaagtttgcgcgctca

SEQ ID NO: 213483 - DNA, 100 bp, Homo sapiens
atgatggggcagcaagtggccaactgaaactgatgtaaatgtggtcatgcttcaggaatcccaagtttgtgaaaagcgtgccagccaacaattctgttac

SEQ ID NO: 213484 - DNA, 74 bp, Homo sapiens
cgtctcttggttactgtgtggaacagggccagccagtccaggcgggtttcttccctaatgtgggaagttcgata

SEQ ID NO: 213485 - DNA, 100 bp, Homo sapiens
gtagcaaggaccagtccctcggggggaacgtggtcatcagtggtcagtggggggcttcgtgggacacatatgcaacatgcctatgatttttacaagcctg

SEQ ID NO: 213486 - DNA, 90 bp, Homo sapiens
tgattttatgggaaaattaagcagatgctccagtttgagaaacctggatctgcgatctgtttgtgtagaccaaattttggtacaattgaa

SEQ ID NO: 213487 - DNA, 100 bp, Homo sapiens
tgattggcagagacccactgtctgctagatgaggaagaggagcgaaggaaaaggcgccgggagaagaacaaagtcgcagcagcccgatgccggaacaaga

SEQ ID NO: 213488 - DNA, 97 bp, Homo sapiens
tccagccccgagcgggacagcgcggcggggagcgacgagtctatgaaggcctagacatcatcaccaacaaggtttctgcccaagagcagagaatctg

SEQ ID NO: 213489 - DNA, 83 bp, Homo sapiens
ggacgtccggcttcggagcgggagtgttcgttgtgccagcgactaaaaagaggctgatcagctgaccgaagaacagattgctg

SEQ ID NO: 213490 - DNA, 100 bp, Homo sapiens
tgattgaaccagtcaaccagtctattgttgtcagtggagagagtggtgctggaaaggaagagagaagggcacagttacctaagtatcaacgtaatcttcc

SEQ ID NO: 213491 - DNA, 101 bp, Homo sapiens
caagactttggacttcattgatgcacttgtgccgagcaagactggggcagcacctactccgtgtcagtggtggagaccgactacgaccagtacgcgctgct

SEQ ID NO: 213492 - DNA, 100 bp, Homo sapiens
atcgacaagaacggctgcgtggtgaagcgctacggacccatggaggagcccctggccctgtttgtgctcttcgtcctggcctacatccacatcgtcttct

SEQ ID NO: 213493 - DNA, 96 bp, Homo sapiens
ggagcccgccgcgctggtagcggagcctcctcaacaagcccaagagtgagatgaccccagaggagctgcagaagcgagaggaggaggaatttaaca

SEQ ID NO: 213494 - DNA, 75 bp, Homo sapiens
aaaatattcaggagaccgtcgttgccttgtatttccagagaacaggatcaaaatggtttcaatcccagaatacta

SEQ ID NO: 213495 - DNA, 95 bp, Homo sapiens
cagacaccgagcttcagcaagctctctccaacggcgaaacctaaccaaactgtccctcatcttcagccacatgctggcagaactaaaaggaatct

SEQ ID NO: 213496 - DNA, 100 bp, Homo sapiens
actgaggagacacaggctgacgaggaagctggtggtgttgatcactcctcaggtgtccagcctgctcagaatgatatggaacctagcaaagctgttccac

SEQ ID NO: 213497 - DNA, 82 bp, Homo sapiens
cacctcccacctgtcctcaggcatatcaaagccacccccctttgaatgtattggaacaggctactattaaacagtgtgtggt

SEQ ID NO: 213498 - DNA, 100 bp, Homo sapiens
accgccggggacgaaacaataaagaccggaagctgagtttttatccactgggctggcttagatgaagatgaagatgcacatgtctgggaggataattggg

SEQ ID NO: 213499 - DNA, 50 bp, Homo sapiens
gcgccagatgaccaggagctcctcaagcctgagcggtgcatccccgttcc

SEQ ID NO: 213500 - DNA, 100 bp, Homo sapiens
ctgggaaaccagagagtcggagggagtccatctggagcggccaacaatggaagagttaatagttgaacttcgtctctttcttgaactcctggaccatgaa

SEQ ID NO: 213501 - DNA, 90 bp, Homo sapiens
tgttgtgccgtcagaggcttcagagccggtgcccagggtgctttctggagacccccagaacctgtgtctttcacagttctgcagccccag

SEQ ID NO: 213502 - DNA, 100 bp, Homo sapiens
gccaggtgaagcccaacgatcagcacttcagtcggaaagttggaacctctgacaagaccaagtactaccttcaagattctggacaatcaggaagtccaag

SEQ ID NO: 213503 - DNA, 75 bp, Homo sapiens
gaacgaatgaagaagactatggcatcacaagtgtcgtgaagctgtacttcacaaaaacagtagaggagccgtcaa

SEQ ID NO: 213504 - DNA, 74 bp, Homo sapiens
ccgctgtcggggagccggcggtggggctggacgcaggggcccagaggacacagcccagttggcccacgccgtcc

SEQ ID NO: 213505 - DNA, 75 bp, Homo sapiens
cgagctgagtggttgtgtggtcgcgtctcggaaaccggtagcgcttgcagcatgctacgagagtacaaggtagtg

SEQ ID NO: 213506 - DNA, 83 bp, Homo sapiens
tgaaaatgcaatggatgctgatggtggtgatgatgatgatcaaggttggaagtacaagcagatgtacagaaagaacggtacag

SEQ ID NO: 213507 - DNA, 97 bp, Homo sapiens
ccttccagtccgggccgtgacccagaacggaaagcatgcggttcccacgaacagtttagccggcaacgcttacggtacgctatttgaagaacaggtt

SEQ ID NO: 213508 - DNA, 75 bp, Homo sapiens
caaagccccaaacagagaacatccagcactgaacctaccagatgtatttgggttggtcgtcctcccattggaact

SEQ ID NO: 213509 - DNA, 75 bp, Homo sapiens
cgactacaagaagagggcggagcggagacgggagtattatgaaaagatcacgtgctatgggaagagggcaaggca

SEQ ID NO: 213510 - DNA, 101 bp, Homo sapiens
tacggagccgtctaccagatcaacgtcctccgggaccggagtcagaaccctccgcagagtaaaggtcccaaaccagttgtcttcctgcaacatggcttgct

SEQ ID NO: 213511 - DNA, 101 bp, Homo sapiens
ccagcctgcggagcctgtggggcagcaggaacgaatgcaggaatttgggaactgagctgtgcaagtgctgaagaaggagatttgtttggaggaaacaggaa

SEQ ID NO: 213512 - DNA, 82 bp, Homo sapiens
gtgaatttccatgtcaacatagtccaggaactgcaagcacatgttgaccagataactgaaatggcagcagtaatgaggaaag

SEQ ID NO: 213513 - DNA, 74 bp, Homo sapiens
agcaattacacccagaagattacctttgactcttgtcccaggctaacagagaccctgatgctggaattgatgaa

SEQ ID NO: 213514 - DNA, 97 bp, Homo sapiens
tctgcggaagtgcagctgcctcagttcttagcgcagtggtccactgtaggtgtgccaagtgtttctgttatcctacaaagcgaagaataaggaggag

SEQ ID NO: 213515 - DNA, 83 bp, Homo sapiens
aatttttggaacaatttgatgagctaggaggatgaaacaggcgcctatttaatcgacagagaccccacctactttgggcctgt

SEQ ID NO: 213516 - DNA, 48 bp, Homo sapiens
tgactttgcccactgtctgctggggctgcatcttcttcccagtttcaa

SEQ ID NO: 213517 - DNA, 80 bp, Homo sapiens
cagctgaggacttgaggaccagaaaatcgaagctgcaggttgatctgttccagctgcaggtgaacaccctacgacgttat

SEQ ID NO: 213518 - DNA, 75 bp, Homo sapiens
cgtggtcgtttgtttctccaaggtttgaaaagcagctggcctgcaagctctaagcgaaagacatgaggcctcagc

SEQ ID NO: 213519 - DNA, 83 bp, Homo sapiens
acgcggacatggtcatgagctttgtgaacctggaaaccaaggtgtatgttggtaacctgggaactggcgctggcaaaggagag

SEQ ID NO: 213520 - DNA, 90 bp, Homo sapiens
tgaagactgtagtgtgtcatcgattactaaaggtacgctacgggccatgacatcacagagcactctgtgctgatccacgagtactacagc

SEQ ID NO: 213521 - DNA, 75 bp, Homo sapiens
ggcctcctgagcattggcctctgcaaaggtgaccttaatgctgctcgaccagaataaccgggagcacgtgattga

SEQ ID NO: 213522 - DNA, 83 bp, Homo sapiens
ccagcacataggagagatgagcttcctacagcacaacaaatgtgaatgcagacctctctcccctgcacagtggtggttgtgaa

SEQ ID NO: 213523 - DNA, 100 bp, Homo sapiens
caagatatatgggagagccttagaaaaatgcagatcacatcctgaggcagggtttcctcctggagtagtgaatattgttcctggttatgggcctacagca

SEQ ID NO: 213524 - DNA, 100 bp, Homo sapiens
tcaaggtgatcgtctccgtccaggaggtggtccaggccacgctggtggtcctggccttggccatggtgcccatcctgctgcttggcacacccctgcacct

SEQ ID NO: 213525 - DNA, 107 bp, Homo sapiens
tcgggaccggctgccatcttagtctagggactgaggagtcgccgccgccccgagtcccggtgagaagccctaccactgcaactgggacggctgcggctggaagtttg

SEQ ID NO: 213526 - DNA, 89 bp, Homo sapiens
atcgaagctctagaaatgaatgtttccatctcttcagagatgaaccaggaatcacatgcagcccaactacagattcttatggaattcct

SEQ ID NO: 213527 - DNA, 100 bp, Homo sapiens
ccgcagcctggaggagggctgtccggggctttggctggagaatgctggaggagaccttaaggatggccaccaccactatgaaggagctgttgtcattctg

SEQ ID NO: 213528 - DNA, 83 bp, Homo sapiens
cggtgatgccgcaaagaatcaagttgcaatgaaccccaccaacacagtttttggtggcgacatgtctaagaatgtgagccagt

SEQ ID NO: 213529 - DNA, 100 bp, Homo sapiens
gaaattagacaagaaacattggaaaagaaatcctgataagaactgctttttggttgaatctggcgatgtggaacccatggatatggagggctgactatat

SEQ ID NO: 213530 - DNA, 126 bp, Homo sapiens
ttatttcttctgagaggcaaccatgaatgcagacaccttactgaatattttacctttaagcaggaattcctgtccaagaacagcaagcctatccataccaccatcctaaacccacacgtccacgtg

SEQ ID NO: 213531 - DNA, 78 bp, Homo sapiens
atccagaagggacagtttgtgccagctctccagagagaaaaggatctaagcattgaagaacagtcagagtgtgctcag

SEQ ID NO: 213532 - DNA, 82 bp, Homo sapiens
cgacaagccgctggcagccgcggatctcaccgccgctcaggtatggaacctcaaagtctttgtgacaatggaaaccaaaaaa

SEQ ID NO: 213533 - DNA, 95 bp, Homo sapiens
cgcaccgctcccgggatcatggtgttctacttcaccagcagcagcgatctgttacctaaagcaataaaaaatggccagaggatcagtgtccgatg

SEQ ID NO: 213534 - DNA, 100 bp, Homo sapiens
agaggcctcatcccccgacagcgagccagtcctagagaaggatgacctcatggacatggatgcctctcagcagggggccgaaggccagagaccaggattt

SEQ ID NO: 213535 - DNA, 83 bp, Homo sapiens
atcaatgctttcattgaaaaacagcctacaacacagcagtcccctcaggatgagcaggaaaagctcttggatgaagccataca

SEQ ID NO: 213536 - DNA, 126 bp, Homo sapiens
gagctgtcagatggagaaataaaagtggccattagtactgtgagcatgaaccttgaggaatgtatcctgtcaggtataatgtcagtgaatggcaagaaagttcttcatatggatcgaaacccttac

SEQ ID NO: 213537 - DNA, 74 bp, Homo sapiens
tgagccaggagatcacccgcgacttcaacctcctgcaggtctcggagccctcgccccatggcctttctgtggtg

SEQ ID NO: 213538 - DNA, 98 bp, Homo sapiens
ggagagcctgcaggacggcgcggcagagtccccgtacgcctacagtaacggtgccaagtcctgccctgccaacttcttggcagctgccgacgacaaac

SEQ ID NO: 213539 - DNA, 80 bp, Homo sapiens
aacccgagcagcccccggccctgtggaggaatttaagctatgaagaaggacatccctcacactctgaaacagatctcctt

SEQ ID NO: 213540 - DNA, 75 bp, Homo sapiens
cgatccgccgcccgtccacacccgccgccaggcctgggttctgaggaaaacgcaatggtggccatggacttgggc

SEQ ID NO: 213541 - DNA, 80 bp, Homo sapiens
agtcgatcgaggtcaagaacacgatcacgttctagatcacatactccaagaagacagaggaaactccaggaactcctaaa

SEQ ID NO: 213542 - DNA, 90 bp, Homo sapiens
atttaacccccctccaaaaagactcacaccacccggcaagaactgctcactacggctccctgccccagaagtcacacggccggacccaag

SEQ ID NO: 213543 - DNA, 134 bp, Homo sapiens
gccgcttcaccgtgcccctgcccgcgaccatggcctcctccgaggtggcgcggcacctgattattcagagctgggagagcttcccccacgatctcctttagaaccagtttgtgaagatgggccctttggccccc

SEQ ID NO: 213544 - DNA, 100 bp, Homo sapiens
tgctgaagcctttaaatgcagcatctgcgatgtgaggaaaggcacctccaccaggatctggaccaggtacagctccatctggaagaagtgaggttctttg

SEQ ID NO: 213545 - DNA, 74 bp, Homo sapiens
gctaactcctgccaggcagtgcccttcccggagcgtgccctcgccgctgacgctatgtccagcaaaggctccgt

SEQ ID NO: 213546 - DNA, 90 bp, Homo sapiens
gccgccgtcggcagcaagaacagagagagaggtggacagatctgagagatactgaggagtttctgtgtgaccagaagtacagtgatgaag

SEQ ID NO: 213547 - DNA, 75 bp, Homo sapiens
gttatgatcgccatgaagatggaggcaatggtggcttgctatccgggaaatggaacaggttatgttcgccacgtg

SEQ ID NO: 213548 - DNA, 100 bp, Homo sapiens
cgggcgccaatggggagcagaaggactcggacacaggtgtcgtgaaaactacccctaaaagccaaaatgggaaaggaaaagactcatatcaacattgtcg

SEQ ID NO: 213549 - DNA, 100 bp, Homo sapiens
tgccgggatgttgctatagatgtggttccacctaatgtcagggaccttctggatattttacgggaaagaggcgcggatcaagaagatcatgcagacggac

SEQ ID NO: 213550 - DNA, 74 bp, Homo sapiens
ggcatgctgtgctctaactggcgagggaatacaaatggagagatttgcatgggatgcagaaatatggaagacta

SEQ ID NO: 213551 - DNA, 100 bp, Homo sapiens
acctgtctggcctgggcgccagcgcggctgcaggccaaggcatgtggagaccccaaggcaaaaccatcctatcttatcgacaaaaacctggaatctgctg

SEQ ID NO: 213552 - DNA, 100 bp, Homo sapiens
atgcagagggtacaagtcttgtaaatgctctaattttaaaactgacggtctctctgaagaggctatcatggagctgaacctgccgactggtattcccatt

SEQ ID NO: 213553 - DNA, 83 bp, Homo sapiens
tcatttgccagtctcaacaacattatcagatgttcttgacagagtgtcaggtgtcccatttcccaaaaactttatgtctgtgg

SEQ ID NO: 213554 - DNA, 100 bp, Homo sapiens
accaggaattctgggacctccacctccctcatttcatcttgggggaccagcagttggaccaagaggaaatctggttccatgccattgcagtgtcaactag

SEQ ID NO: 213555 - DNA, 100 bp, Homo sapiens
ttgcttcagcagccacttttcatggcgatggtgggacccctgaaaggagagcccttctgggctcttcagaggtgttcctgcccccagaccccatctttgc

SEQ ID NO: 213556 - DNA, 89 bp, Homo sapiens
gacttcctgctcaagccagagttgctccgggccattgtcgactgtggctttgagcatccgtcagaagggacgtccagatcggtgacatc

SEQ ID NO: 213557 - DNA, 100 bp, Homo sapiens
ccgtgctctccgggcacgtcaaccccttcctcccgtatatcaggtgccgacgccaccgccgagcccatgatcctggaacagtacgtggtggtgtccaact

SEQ ID NO: 213558 - DNA, 100 bp, Homo sapiens
cagcggtcccagcggcagcagcagcggcgggaggagcctccggggcaggtgacaaacattaccaccccagctgtgcacgatgcagcagatgcaaccagat

SEQ ID NO: 213559 - DNA, 82 bp, Homo sapiens
aggagaaggagaaactgaaggagatgtccacactagcaacaggccaagattgacagacacctaatattcatgacttgagaat

SEQ ID NO: 213560 - DNA, 100 bp, Homo sapiens
cgagagaatccaagtgaagaggcacaaagtgaagaggacaataccagcgtcgtctggttttggctgcacaaaggcgaggcccagcgatgcccccgctgtg

SEQ ID NO: 213561 - DNA, 98 bp, Homo sapiens
cactgagcgagtgtggagagaggtacagccctcggcctacaagctctttaggcacaggggcagagccagggtcagccatcctcaagtagcttaacagg

SEQ ID NO: 213562 - DNA, 100 bp, Homo sapiens
atgctgtggatcaagcctccccaaccccaccatcccaccaaagggggctgctgaccgagagagctcactcagccaggcaccatgactcctgtgaggatgc

SEQ ID NO: 213563 - DNA, 75 bp, Homo sapiens
tccatcgaggcagccatggtgaaggatgatgatgacgacatgggagaggatgaagatgaggacgatggtttcttt

SEQ ID NO: 213564 - DNA, 75 bp, Homo sapiens
gtcggatgttgcagcagagccagcagctagcgcagatttgtcaaagatgaaagtgaccttatcagctttggatac

SEQ ID NO: 213565 - DNA, 90 bp, Homo sapiens
cgcagatcgcaggaccgtggagaagacttggaagctcatggacaaagtgagtgaaccagaggaaatgcctccagaagcaaagatgaggat

SEQ ID NO: 213566 - DNA, 98 bp, Homo sapiens
gaggatgaacaacaagttcgacgcaacccctgaacagtgcccaagtgttgtctctttgttgtcagagagttacaaccctcatgtgcgctacggagctg

SEQ ID NO: 213567 - DNA, 95 bp, Homo sapiens
tactcagaagaacttgtacagagatgtgatgttggagaactatagcaatctggttttcttgggtgcccagtcccctggaaggcagtgaaggggac

SEQ ID NO: 213568 - DNA, 75 bp, Homo sapiens
gtcgccagcggagcgaacccgagagcgtggagcgggctgggccagggccgcgatgggcctcttggaacattggtg

SEQ ID NO: 213569 - DNA, 90 bp, Homo sapiens
gactcccggggccatggccggaatgcagtaccctcagcagcaggagtcagtggatcggtggggaaaatgctgcttaccctgggccctggg

SEQ ID NO: 213570 - DNA, 100 bp, Homo sapiens
ggaagtagaaagtctcagcagacccttcctgagggccgagcaacagtgtagtggcgtattccacatagcaaacagatgagctttgatccaaaccttctcc

SEQ ID NO: 213571 - DNA, 75 bp, Homo sapiens
gcccagaaatacctgcagactcgggccgtggccgcctacaggaattgcattttgtgaaaaaagaacaagaatttt

SEQ ID NO: 213572 - DNA, 50 bp, Homo sapiens
aagtgcgattgtggaagctgctcggctggaaaacctcatgctggacaaag

SEQ ID NO: 213573 - DNA, 50 bp, Homo sapiens
ggatgcacttgtccaatcctcaatcctggaagtacgcagccatctcctct

SEQ ID NO: 213574 - DNA, 93 bp, Homo sapiens
ctggggccagggaaccctggtcaccgtctcctcagatgatatcatcaagttgaatcgaaaggaagggaagaagcagaattttccaagactaaa

SEQ ID NO: 213575 - DNA, 98 bp, Homo sapiens
atgcacaaaatggatttggaaggactgcgctgcaggagtctcgctctcagtcaaaatctccaacgggaactcctgctcgtgtaaaatcggagagcagg

SEQ ID NO: 213576 - DNA, 75 bp, Homo sapiens
ccgttgcctcaaaccagtcagagatggagttctcttcacttcaggacatggccatccgggatggtgtcattgagg

SEQ ID NO: 213577 - DNA, 51 bp, Homo sapiens
cggatcctgctggtgggagaacacctgtggatgaagagccagagtcctctg

SEQ ID NO: 213578 - DNA, 100 bp, Homo sapiens
gtttacctttggtggtgagtttcatagccagcagcagtgccaatacaggccaacagagcacttatggcaaggcatctcgagggggtggcaatcaccaaaa

SEQ ID NO: 213579 - DNA, 95 bp, Homo sapiens
gcatctgctcaacgacgaggacctgacgcagcaattgctaaccatccaggaggagttaaacaacaaaaagtcagaattggaacaagcaaaggaag

SEQ ID NO: 213580 - DNA, 98 bp, Homo sapiens
ttccttcaaagaagcagtatcggcaaggctgcagaagatgtcaatgttactttcgaagatcaacaaaagataaacaaatttgcacggaatacaagtag

SEQ ID NO: 213581 - DNA, 100 bp, Homo sapiens
cgtcgcttcactgtggctcatacatggttggtcaaagaaaaagtgatgtatgaaaaagaggcaaaacaacaagaagaaaagattgaaaaaatgagagctg

SEQ ID NO: 213582 - DNA, 82 bp, Homo sapiens
ccaccagcgctttggatgccgagagcgagtatctgttctttaaggaaaaacagtagtgctctgcatagtttactgaaacgag

SEQ ID NO: 213583 - DNA, 100 bp, Homo sapiens
ccgagcggtgactccccgccgctcccgggggccgtgacggtgctggagaatctggtaaaagcaccattgtgaagcagatgaggatcctgcatgttaatgg

SEQ ID NO: 213584 - DNA, 74 bp, Homo sapiens
acgttggttacgaaagattcctgggacctgaaatattctttcacccggaggaattacatgaacgacagccttcg

SEQ ID NO: 213585 - DNA, 100 bp, Homo sapiens
gcttaccgcaggatgatggaagcgacggcccgtacaaagacagaagcgttggtttcagagtttccagatgtcttggaatgcactgtatctcatgcagtag

SEQ ID NO: 213586 - DNA, 74 bp, Homo sapiens
gaatgtcatccggcacacagatgctcacaataaggaactgagtatctaccaagatcaggaacaaaggatcttaa

SEQ ID NO: 213587 - DNA, 100 bp, Homo sapiens
gggggttcggtgcgtgccccgacggggcgcgcgcgaagcgagcgagaaggcacggagtcgccgcggagcgcagaattcaatccgccacaacctgtctctg

SEQ ID NO: 213588 - DNA, 100 bp, Homo sapiens
cccagaaccacctcctttgcggagagctgcaagccggtgcagcagccttcagcttttggcagcatgaaagttagcaagccctaatttgtttagaactgta

SEQ ID NO: 213589 - DNA, 80 bp, Homo sapiens
gctgcctgctggccctgttgctctacaagaaggagaggaggagatgaacgccctgcgaggccaggtgggtggtgagatca

SEQ ID NO: 213590 - DNA, 74 bp, Homo sapiens
cgcctctccttgctgcagccatggagagggctccccgaggactttctgaactccctggagaagatggaggacgg

SEQ ID NO: 213591 - DNA, 110 bp, Homo sapiens
aaaatggaacagatttcaaaaggacgtaatactccactgtgcgacaggctttgatgacagtagggaaagaaccatttcctaccatttacgtagattcacaaaaagaaaat

SEQ ID NO: 213592 - DNA, 100 bp, Homo sapiens
ggacacactcacagcagtgcgcaaattcaccaagagagacgtcttcctggagcgggacactttgccaccatcaccttgaccttcatcgacaagaacggag

SEQ ID NO: 213593 - DNA, 100 bp, Homo sapiens
ctggatgaatgccaacttttgcatttcccatgtgtatcctgtgaccattctatctgggagttcctgagttggaggtagaagaagaaacccaagttcaaga

SEQ ID NO: 213594 - DNA, 90 bp, Homo sapiens
gccgagcgcggcccgggcgccatcgagccttggcggcggacgtgcaggaatggcccccagaacatatacaacctttacgagcaagtcagc

SEQ ID NO: 213595 - DNA, 100 bp, Homo sapiens
gggaatctgttccttttcaggacagctgtgatccacgctgagtcatcactagagagtgggaagggcagcagcagcagagaatccaaaccctaaagctgat

SEQ ID NO: 213596 - DNA, 100 bp, Homo sapiens
gaagccctacgagtgcaacatctgcaaggtccgcttcaccaggtgatgtgtccaatctagatcccaacttctcatttgaaggcaccaaactggatgtggg

SEQ ID NO: 213597 - DNA, 90 bp, Homo sapiens
gtgaccccaaaccagaaagttcattgggcctgcacctccagttggcaaccagaacgccaggttccatttaatgaagttagattaccacca

SEQ ID NO: 213598 - DNA, 97 bp, Homo sapiens
ctgcggctcggacgccagcggacacgcgggcgagttgatgcggatgaaattaaaaggctaggaaagagatttaagaagcttgatttggacaattctg

SEQ ID NO: 213599 - DNA, 100 bp, Homo sapiens
caaggcctacgtaggccagaagagcagcttcacagtagactgcagcaaagcaggattttttatcaagcagaaatgcatcgaacaacgagaatcaagatca

SEQ ID NO: 213600 - DNA, 75 bp, Homo sapiens
gatgcctcgcagagcaccaggcccaccgtgaaagggctggttgatatgtgaagagccaacctgtcgcaatcgaac

SEQ ID NO: 213601 - DNA, 82 bp, Homo sapiens
gaagaagccacccgcttaacatcctacctccagtcccagttaaaaaggctgccttggagttttcataagaaattgtccctgg

SEQ ID NO: 213602 - DNA, 100 bp, Homo sapiens
cgtcctcctccccaggcccgccgcctccctgccaagattgtcactgctgttccaagggcacacgcagagggatttggaattcctggagagttgcctttgt

SEQ ID NO: 213603 - DNA, 89 bp, Homo sapiens
cagcaccagcttccagttagtggatatagcacaccatccccagccaatttctccacccaggtgaactcctccctcacctccccgacggg

SEQ ID NO: 213604 - DNA, 74 bp, Homo sapiens
ctggacccaatgcccggggcccaggcagaatggcatttttagatgaattcactaactggtcaagaataaatccc

SEQ ID NO: 213605 - DNA, 75 bp, Homo sapiens
agagaggatatcttgggcgggggatgtgagcgctgagcccttggcagactcggtgaaatacctggagtgctcagc

SEQ ID NO: 213606 - DNA, 96 bp, Homo sapiens
gcgagacacgccgccgccgccgccgccgccggcgcggaaggacgaggctgaggcgagaaacgagctgagatctgtatctgtggacctgaatgttga

SEQ ID NO: 213607 - DNA, 98 bp, Homo sapiens
tccaggccagtccctgatccctgacctaatgttatcgcggaatgatgattgtccagaacatcgtgggcacagctctgatgattttagtggccattggt

SEQ ID NO: 213608 - DNA, 101 bp, Homo sapiens
gaaagaacagatgagtgccaaaagatttgcttggaacggtagaagaaatccttccaagcctctcagaaaatatcagtgtttgggggatgaaagattctgtt

SEQ ID NO: 213609 - DNA, 75 bp, Homo sapiens
aaacttttgcccttatcagtaacacctgaggtggaatacatgttggtatcttttgatcatgaaaataaaaaagtc

SEQ ID NO: 213610 - DNA, 116 bp, Homo sapiens
gcagtcattaccactcacactgtacttccagggagacaccgattataagaagagaaactcagcgctggggaagaagggctacaggggaagaattgaaagtgaaggcatacctacca

SEQ ID NO: 213611 - DNA, 100 bp, Homo sapiens
gaactgtttctcttctgcagaaaaagaggctcttcctcctcctcccgcgacggtcagctgttgccagcaaaccgcaatacaccaagtcccattgatcctg

SEQ ID NO: 213612 - DNA, 107 bp, Homo sapiens
ggatgctgaaaacctttgggcttcatggagtcgtcttagatgttgattcagtctccaattgagaaacatggcactgtttttcctgcactctacccacctattgctgg

SEQ ID NO: 213613 - DNA, 100 bp, Homo sapiens
cctggaaaaagcaagctgaagacatcaagaagatcttcgagttcaaagagaccctcggaacggggggccctcagcctcttggccttgaacgggctgttca

SEQ ID NO: 213614 - DNA, 82 bp, Homo sapiens
gcagatgcggagaggtggctccatggacacagacctgctgtgtgtgcttctgcgccccaggaacctcatcctcaagctggcc

SEQ ID NO: 213615 - DNA, 116 bp, Homo sapiens
atttattcactcaagactaaaaactaaaggcctgggcctgagaactgaatcaggtttattcttcagtccaaggaagcaattcacagtcagctgttagagaagcagaaaatagcaga

SEQ ID NO: 213616 - DNA, 101 bp, Homo sapiens
ggaattctaatttgaaccatgtttggattgaagccgcctctgtattacttaccaggacctcccactctcgggcaaaggccgaggcagccctcacagcagct

SEQ ID NO: 213617 - DNA, 100 bp, Homo sapiens
gtggccctcagaatttaaacttaaggaaagagtgggaaagtgagggctccagtgatcattctacatatattgtacaaacactagattttcacctgggtca

SEQ ID NO: 213618 - DNA, 100 bp, Homo sapiens
aacaactacacgttacgctattcgttgtggtccaaaacagtttacctcttatctaacagactttatattcagagcaccaatcaaattaagcaagcctggg

SEQ ID NO: 213619 - DNA, 50 bp, Homo sapiens
cgggacccgcccgcccgcgggaggacatggatttgattgacatactttgg

SEQ ID NO: 213620 - DNA, 83 bp, Homo sapiens
ggggcattcgtcttggtaaacttggttgagacggtttaagcggaagcatcttactgccattgactgccagcatttggctcgga

SEQ ID NO: 213621 - DNA, 74 bp, Homo sapiens
cccagcagagatcagcaatccttggctcactgaggaggtttggttcttgctggtgtgaaatgactgagtacaaa

SEQ ID NO: 213622 - DNA, 83 bp, Homo sapiens
aatcaatgttgaaaataaaagaaggacttctaaggcagaaagaaattgtaatcgatcgcctcgtgtgcaagctgaacacaagg

SEQ ID NO: 213623 - DNA, 74 bp, Homo sapiens
gggagaatgccgaagactgcatttcaacttcaagaatggtattggcaagcttgccagtgtacctgctggtgggg

SEQ ID NO: 213624 - DNA, 82 bp, Homo sapiens
cacctacgtcccgctgccgtcgccgccgccaccatgcccaagagaaagaacaaagaactttgagtctggcaaggcttataag

SEQ ID NO: 213625 - DNA, 98 bp, Homo sapiens
cataagtacctctggcttcccctctcttcaactaaatttctacttggataacagaggaaaaaaagaaagcaaggaaactaatgagaaaatgaatgcta

SEQ ID NO: 213626 - DNA, 88 bp, Homo sapiens
ccggattgcccttgctcgtgctgtctaccaggtaatcaatattatcaatgctgcccaggaaagtagtcccatgcctgtgacagaagcc

SEQ ID NO: 213627 - DNA, 90 bp, Homo sapiens
atggcagggcctgtgtgatgatgcagggcaggttccacatgtatgaagggtacccactctggaagatggctgcatatttcggattttctg

SEQ ID NO: 213628 - DNA, 100 bp, Homo sapiens
aaggcctgagtagccggtaacaaacgagggttcccgggattggaccgacgcagccatgcggagcgtgctttggacaccatgaattttgatgttataaagg

SEQ ID NO: 213629 - DNA, 100 bp, Homo sapiens
gcgctcttcttcttttctctctcgtcctcgctgctgtacttcgtctatgtggcgcccggcatagagacagatgggaccgtgttcagaattcacacaaaag

SEQ ID NO: 213630 - DNA, 86 bp, Homo sapiens
gcagccgatccagcctgcggagcctgtggggcagaaactatgttccaacttcctgtcaacaatcttggcagtttaagaaaagcccg

SEQ ID NO: 213631 - DNA, 83 bp, Homo sapiens
agccaacatgcagttacaacagcatacagcatttctcccaccagacttcacagagaatgcagttgtcttgacttcaggtctgt

SEQ ID NO: 213632 - DNA, 75 bp, Homo sapiens
caggacaagaaccttgtggtcatcaataagccctacggtctccctgtgcatgctcctgaattcagaccacagatc

SEQ ID NO: 213633 - DNA, 100 bp, Homo sapiens
ttatactggaaagtatgcaccagctgtcatcgtttgtcagaagaaagcagctggctcagaaaacagcctcattacgtcccagacaactacaagaggaatg

SEQ ID NO: 213634 - DNA, 75 bp, Homo sapiens
ttcttcctgctgctgcttttcaggggttctcagaggcactgtgactgacttccctggatttgatgagcgggctga

SEQ ID NO: 213635 - DNA, 76 bp, Homo sapiens
cgacgtgatcgtgctgggcaccggcctgacggttgtcttcaaccaccttactcctccaccgcccgatgaacacctg

SEQ ID NO: 213636 - DNA, 82 bp, Homo sapiens
ccgcagccgcctcagaacccgaccaacatccagaacttccagctgcccccagctacgagttccagggagctctgtcctggtg

SEQ ID NO: 213637 - DNA, 83 bp, Homo sapiens
caggagaggattgtgtctgcttggtgtggagccatgaaggacatatgagacatcgctgctggtagaagaggccattagtgagg

SEQ ID NO: 213638 - DNA, 100 bp, Homo sapiens
ccgtggtccagtgtgagatcgacgagagatgggagcctcactgtattgcccaggctggtcttgaactccggagctcaagtgatcgtcttgcttcagcctt

SEQ ID NO: 213639 - DNA, 95 bp, Homo sapiens
gggacgctccgtggatgaggctctgcggctggtccaggccttccagtacacagacgagcatggggaagccgctgccatggcccagacactgcaga

SEQ ID NO: 213640 - DNA, 98 bp, Homo sapiens
tcagactccttggaaattaaggaatgcaattctgccaccatgatggaagaagttggtgagatggcaaagcagtatatagagaaaagtcttttggttcc

SEQ ID NO: 213641 - DNA, 50 bp, Homo sapiens
ggatttcaccacaagaagggctgccaggtcaaaatgcagatcttcgtgaa

SEQ ID NO: 213642 - DNA, 97 bp, Homo sapiens
gagtagcccggttcacctgtgatgtagagaccctaaagaagagcattgattcatttggacaagagtttacccctcaatcccaaacctttcctcaatg

SEQ ID NO: 213643 - DNA, 50 bp, Homo sapiens
ctcctccgagccatgagaaataagttgccagaggttccaccctctgagga

SEQ ID NO: 213644 - DNA, 136 bp, Homo sapiens
ggccctgctgcgggggggagagccactgacgccgggaccgggaccgccgccgccgccgccaccatggaggctgaaagggaaacatcagccgcccggggggagttaaaatgagtgacaacactactctgcctgctcc

SEQ ID NO: 213645 - DNA, 100 bp, Homo sapiens
ggactgtgaagagtgaggagaccatagctgcacagccagacggaatcagtccccaatgcctggaaattcctcattggattactgtgttttaaacagaatt

SEQ ID NO: 213646 - DNA, 135 bp, Homo sapiens
atgaagcacgagctcgcttctatgctgcagaaatcatttcggctctcatgttcctccatgataaaggaatcatctatagttatatcaacatgccccctttcctgttgctggaagccgtctgtgttttcctgtttt

SEQ ID NO: 213647 - DNA, 90 bp, Homo sapiens
caactctcagaggtggccaataagttcgccaaagcgacaggagctggagatacttcaggggattaccggaagattctgctgaagatctgt

SEQ ID NO: 213648 - DNA, 80 bp, Homo sapiens
acgagcgcggaggaccgggaggctcccgggcttgcgtggtgcagggctcgcggcctggcaagaatgtacagctgacagag

SEQ ID NO: 213649 - DNA, 60 bp, Homo sapiens
cggcgcagctgatagcaggaacagaagatgaatccggcctcggcgccccctccgctcccg

SEQ ID NO: 213650 - DNA, 100 bp, Homo sapiens
agatgaggacagcatggatgggctggagacaacagaaacagaaacgattgtggaaacagctccttgcccgacttgaaggtagaagttccttgaaagaaat

SEQ ID NO: 213651 - DNA, 100 bp, Homo sapiens
tggtggggaggatttgacttcacatcctgagactctgacttcgggcttttttccagacttcaagctcccattccaacagtaagagcttcttccacatcac

SEQ ID NO: 213652 - DNA, 98 bp, Homo sapiens
gccaggcaagcggggcgccgacctcgggcggccccggcccgcgcccttgcccctcggccgggcggacggacccacgcagccacccagcctcagcactc

SEQ ID NO: 213653 - DNA, 75 bp, Homo sapiens
agggcccgcgggccaggagagcgctcggcggccttgttgtcctcctggtgcgaagagctcggccgcctgctgctg

SEQ ID NO: 213654 - DNA, 51 bp, Homo sapiens
gaagacagagggttttcttttgaggtagctacagcaagctgggtagcaggc

SEQ ID NO: 213655 - DNA, 75 bp, Homo sapiens
gaagaaagagaatattgttcagttgattatgccagccagatgcagagcaagctataccagagaatcagatagcaa

SEQ ID NO: 213656 - DNA, 74 bp, Homo sapiens
gagagtgttaattctgctcctctcctgggcggcggggatgggaggtcgggaactacaagcggactgtgaagcgg

SEQ ID NO: 213657 - DNA, 50 bp, Homo sapiens
cgaacccgcggcgcaataacgtgtttctaagacctcagagaaatttggaa

SEQ ID NO: 213658 - DNA, 100 bp, Homo sapiens
ctgaaccttgctccgagagggagtcctcgcggacgtcagccaaggacacattcagctaacgtattttagcaggtggagtgaggttgaagattcctgtgac

SEQ ID NO: 213659 - DNA, 101 bp, Homo sapiens
ctttgtcagtgcacaaaatggcgccctacagcctactggtgactcggctgcaggactcagcccaaaaccatgtttgcccaagttgaatctgatgatgagga

SEQ ID NO: 213660 - DNA, 83 bp, Homo sapiens
aggatatcgacgtcgtgatccagaagtccagagctgaggactgcctgtttgcagcctcggagaagtcaatgtgcccatcgctg

SEQ ID NO: 213661 - DNA, 113 bp, Homo sapiens
ctttctagaaatgactggaaagtttcaagaggcataagatacaggtgctggagaatctggtaaaagcaccattgtgaagcagatgaggatcctgcatgttaatgggtttaatg

SEQ ID NO: 213662 - DNA, 82 bp, Homo sapiens
atttttattggaagaggatctaggagaaagtgttacagttcgagtgcctcaaacaaccacatatgttgtaaacaatggacta

SEQ ID NO: 213663 - DNA, 75 bp, Homo sapiens
acccttaggagataatgaagagaggaccagagtatctactgacaaaagacagatgcttcccagaagaaaggaaag

SEQ ID NO: 213664 - DNA, 76 bp, Homo sapiens
tgagaagccttccgctattcagcagagagctattattccctgtattaaagcgcttttcctgtattatcgggccaaa

SEQ ID NO: 213665 - DNA, 82 bp, Homo sapiens
ctcgaacccgcctgcgatggggcgagaaaggtcccactgcagccctccaagcagtcccgcagcgtggacaagcagcatgccg

SEQ ID NO: 213666 - DNA, 98 bp, Homo sapiens
ctggcagtggctttcctcgcatccagcaactcttcaccagtgtgggcccatcgctggatggatctgtcagaacacggctttgggctggccctgctcaa

SEQ ID NO: 213667 - DNA, 75 bp, Homo sapiens
ttcataccgtagtagcatcaaacaatgggtcagtgttctcgtaacaacatgctgtaccccaaggaagacaaggag

SEQ ID NO: 213668 - DNA, 50 bp, Homo sapiens
gaaaagcgaggcaaggcaggcggctgaagcccattatctctgaccctgag

SEQ ID NO: 213669 - DNA, 49 bp, Homo sapiens
ctcagcaagaacgggaacaaaactctggcaccagcttctgaaaaagaaa

SEQ ID NO: 213670 - DNA, 83 bp, Homo sapiens
cggcgcccggagcccgcgggcctgacacgcggcgggacatgcaggtgctggagaatctggtaaaagcaccattgtgaagcaga

SEQ ID NO: 213671 - DNA, 100 bp, Homo sapiens
agaagaggacacagccatgcagatgactccttttcccacccagataatcagacagctaaatggagtctgagcagctgttccatagaggctactatagaaa

SEQ ID NO: 213672 - DNA, 75 bp, Homo sapiens
gctctgttcacggctccatcgctgttactgcatatctatgtgagactgaattttcctcttagacttcagctaaaa

SEQ ID NO: 213673 - DNA, 100 bp, Homo sapiens
tgagcgtatgtgccacgccgcccaggagacccctctgctgcaccacttcatgattctcattcagattgtggatgcctcgtcagtcatcacttgggatttc

SEQ ID NO: 213674 - DNA, 74 bp, Homo sapiens
ttctatgacggagaatccgtttcaggaaaggatgtagagtcctacattcatcgatccgggcggacaggcagagc

SEQ ID NO: 213675 - DNA, 51 bp, Homo sapiens
aagagctgcttctgtatcttaagagttggattacagaaactcctatgaaat

SEQ ID NO: 213676 - DNA, 98 bp, Homo sapiens
aaaagagttgtatttactcaagaaatcaagtacttcagtaagagatggggtggtaaagactggaattgagcaagggagtgatgccggttatctctgtg

SEQ ID NO: 213677 - DNA, 116 bp, Homo sapiens
ggagggtccccgacctcgctgtgggggctcctgtttctctccgccgcgctctcgctctggccgacgagtggagaaagctctgacgcccgctctgcggcttcggtgtttgaacaggc

SEQ ID NO: 213678 - DNA, 83 bp, Homo sapiens
ctcctctgatggcaggacctgccaaggcttgggcactgtttaaaggaaagttccgagaaggcatcgacaagccggaccctccc

SEQ ID NO: 213679 - DNA, 100 bp, Homo sapiens
tttaaccccaaaatcagtgattctacatctcaagctcatattttgaagtgtttacggtgatatggagaatgcagaaaacattctcacagtgatgagagat

SEQ ID NO: 213680 - DNA, 78 bp, Homo sapiens
acaaggctttatatgataccttctccacctttgggaacatcctctcttgcaagagtctcactctgtcgcccaggatgg

SEQ ID NO: 213681 - DNA, 75 bp, Homo sapiens
gagggtccgagccagccgctgttttgccggaggagcccctcaggccggtgtttgtgaaccgaagtttagcaatgg

SEQ ID NO: 213682 - DNA, 100 bp, Homo sapiens
tgaatgggccaaggaaaaatcgagcagaaagaatgtctttcaggggccacctacagatgctcctgcagtggacacagcagaacaagtctatatctcttcc

SEQ ID NO: 213683 - DNA, 83 bp, Homo sapiens
ttatagaacttggccaaaagcaggtgattccaggacatggccaccgtgttcccagcaggcctggccaacgtggtgacaggaga

SEQ ID NO: 213684 - DNA, 75 bp, Homo sapiens
ttggaggggggctgagggaggagactgttgctgatctttggatgttctgggccgcgatgggcctcttggaacatt

SEQ ID NO: 213685 - DNA, 100 bp, Homo sapiens
ctggaatctctgcacgggccttgggtcattgtgccaaagagtcatccattagtgacaagaatgactggaaaactgtttccaacgccttttctgtcattga

SEQ ID NO: 213686 - DNA, 101 bp, Homo sapiens
accgcccggagttggcgtcccttctccctctccgagtgctgctcctgtcattgtggccatggacgctgcaagctttcttcctggtggcagatgacatcatg

SEQ ID NO: 213687 - DNA, 76 bp, Homo sapiens
gccaggacgaaggccctactgggcaagggtgagcccatcactttctgtgaggagagttttgtaaagcaccgctcaa

SEQ ID NO: 213688 - DNA, 83 bp, Homo sapiens
tctgtggcgacttcatctggggcgtcgtgcgcaaaggcctgcagtgcgcgcttcaaatctgaacatcaatgatgtactaggga

SEQ ID NO: 213689 - DNA, 97 bp, Homo sapiens
aaaaggtgttgaaatagagggaccattgtctacagagaccaactgggatattgcccacatgatcaggttttgggatttgagattgacgcggtgaact

SEQ ID NO: 213690 - DNA, 87 bp, Homo sapiens
ttttgcaccactggatgttgtttactggttgtttacattcagagctctatcaataagaggaatacatattacagtgaattcgacaac

SEQ ID NO: 213691 - DNA, 99 bp, Homo sapiens
gctgaccctaggcctccaccctggcaggaatcccaatttgcctccacttagtgagcggaagaatgatttgtcttcagcgaagcggaagtttgcagattc

SEQ ID NO: 213692 - DNA, 122 bp, Homo sapiens
tgcacgttccgatccctggcttccgtgcccgctggcattgctaaacacgtggaaagaatcaatttggggtgaactgtcacccctacaactcagcttgcaaccagccctggccaccagtttcc

SEQ ID NO: 213693 - DNA, 82 bp, Homo sapiens
gaatcagacaccgcaatgaaaaaaggggagacactgcgaaagcaaaccgaggaggtggtataagttgaaatccaaaccagga

SEQ ID NO: 213694 - DNA, 83 bp, Homo sapiens
gcgcgtttggctgtgacctgacggagtatctggaaagctcgggacaggatggagctctttgttcaatgcctagccacctattc

SEQ ID NO: 213695 - DNA, 75 bp, Homo sapiens
ccgcctgcggcctcctcgcaaaacaagatttctgacttacacaagagcctagaacagaaagaaagtaaaatccag

SEQ ID NO: 213696 - DNA, 98 bp, Homo sapiens
gccgggccgcgtggacacgttctggtacaagttcctgaagcgggagccgggaggagagctctcctgggaagagttcctggaataactattgctacaga

SEQ ID NO: 213697 - DNA, 100 bp, Homo sapiens
ttacactggaggaaggaaaaggagaccttgaggaatatggtcagagggcgtcccctgcaggagagcttcatgcgcctggtggaggcctgtggggactcgg

SEQ ID NO: 213698 - DNA, 74 bp, Homo sapiens
tgggggttatggtgggaggagccgatactgagcttcttcctatttgccatggtttttcagaagaagtgaagtca

SEQ ID NO: 213699 - DNA, 82 bp, Homo sapiens
ttgaaacgctgcctggaaaggaagtaccaggacttgcacagattgtcactgctgttccaagggcacacgcagagggatttgg

SEQ ID NO: 213700 - DNA, 90 bp, Homo sapiens
gcccagacgcggcacagagagggcctgggagcttgctgcagcttcagaggagcaggagcggcttcgcttggagcaggagcgagagcagga

SEQ ID NO: 213701 - DNA, 136 bp, Homo sapiens
gtccaccgagatccagaacagactgaaggagacgcccctcaagtgtgcattaaactcaaagggagccatttgtgcaggccaagctgcggcccgaggacggcctgtacctcattcactggagcaccagccaccccta

SEQ ID NO: 213702 - DNA, 100 bp, Homo sapiens
cggcacccagtgtgtctgttggtgttgggaatggcgggatccgggaaaaccacttttgtacaggtgattacatggatccaacacctgatccccaagattg

SEQ ID NO: 213703 - DNA, 75 bp, Homo sapiens
ccgctctcccctcccagccccagcacccccaaccacagacaatgcctgtggaagacaagtcagaccccccagagg

SEQ ID NO: 213704 - DNA, 89 bp, Homo sapiens
ctgcaacagcagagcaaggccagcaagatcctcattgtagactggctcacagagaagcttctggacctagagaatgaaaacatgatgcg

SEQ ID NO: 213705 - DNA, 100 bp, Homo sapiens
tgccaccaccaccaccaccaccacagagtctgtggaagaggtggttcgagctttccgcttggccctcatccagcttcagatttcttccatcaaatcagat

SEQ ID NO: 213706 - DNA, 51 bp, Homo sapiens
gggccaccgggatgactaggcaccagttatggctgattgtcctcacacaat

SEQ ID NO: 213707 - DNA, 90 bp, Homo sapiens
ggcggcgatcggccgcggccgctctctgaagaacctccgagtacgagaaaaccagaactgatggctctatttgcagtctttcagacaaca

SEQ ID NO: 213708 - DNA, 98 bp, Homo sapiens
gccgtctgtctccgccccacagtccacgaggcgccgcagcaaatgggaccaaccagctccagccccacttctcttcctcccgccagcggccccaggtg

SEQ ID NO: 213709 - DNA, 101 bp, Homo sapiens
tgagaagatagggttaaataaggagcgactcttacatgatgaacaaagtactgatgacagaacaccttccaccatgaccacctcagcaagttcccacttaa

SEQ ID NO: 213710 - DNA, 83 bp, Homo sapiens
attgatattgaagcaatgcttgaggctccttacaagaaggctgaagggtatgtgattggcagctgtattaaacacattccaat

SEQ ID NO: 213711 - DNA, 75 bp, Homo sapiens
agccaattttgctaactttgcacatttcaacagtcatgcagacaagttggatggcttgaggactggtactaaaag

SEQ ID NO: 213712 - DNA, 75 bp, Homo sapiens
gccgccgcccctcaccagacagatcgctgtcaaaaccctaggataaggaagcctgtgtgggtaccaacaatcaaa

SEQ ID NO: 213713 - DNA, 75 bp, Homo sapiens
gtcttcccggcgagtccgcgacggtcgccgcccacggcgagaaagatggatactatgatgctgaatgtgcggaat

SEQ ID NO: 213714 - DNA, 101 bp, Homo sapiens
atggaagggctggaggaggcagaggccaactgctccgtggcgttcgctgaggctcagagatgggtggagattctgtgaggagaccaggaggaattttgaag

SEQ ID NO: 213715 - DNA, 96 bp, Homo sapiens
ataatgatgaagaagatccttcaaaattaaaagaggagcagcatggcatttcagtcactggtttgcagagtccagcatacaatgccttcctaaaca

SEQ ID NO: 213716 - DNA, 101 bp, Homo sapiens
gaggccggttcagaacttcccaaatgatggtcctcctcctgacgttgtaaatcaggaccccaacaataacttacaggtgcccctgggcgctgggattgctc

SEQ ID NO: 213717 - DNA, 50 bp, Homo sapiens
cccttcttggagcccacaggggtggagcgcgtgtcgcacccgctgctgca

SEQ ID NO: 213718 - DNA, 73 bp, Homo sapiens
gaaaatcgcttggttaaaacctgacacttttaacagccatcactggtgcaagctatatttaacggagatcctg

SEQ ID NO: 213719 - DNA, 82 bp, Homo sapiens
cagaattcggccatgagccgctacatactcatcatggggctcctgtacaaggggtcgggccccggctcagtggtcccaggca

SEQ ID NO: 213720 - DNA, 75 bp, Homo sapiens
gcgaatgcaattaggaactgttctgccggaatttgaaaagtgcctcattgatatgaaccatggacaagtatattc

SEQ ID NO: 213721 - DNA, 75 bp, Homo sapiens
attatattttctactctgcagaaaaggaagatgttgctgggcacccaggtggtactttggaaaacttggccgaaa

SEQ ID NO: 213722 - DNA, 80 bp, Homo sapiens
ccggcggcctcctcaccagccaaggcattgcttcagagtttggagttcgaggttatccaacaattaagctgtaagttgag

SEQ ID NO: 213723 - DNA, 74 bp, Homo sapiens
gcggatcccagcttcctgcagccaggtcctagaccagaaggagcacaggctggatggccgtgtcattgacccta

SEQ ID NO: 213724 - DNA, 74 bp, Homo sapiens
tgttcagagcctctctcagaccatgctatcagttgagggatttgcagttgataaaatggctggagaggttaagg

SEQ ID NO: 213725 - DNA, 100 bp, Homo sapiens
cgttcaagttaatccaggtgagactttcacaataagagcagaggatggaacacttcagtgcattcaagatggtccccatccctgctggagtatttacaat

SEQ ID NO: 213726 - DNA, 75 bp, Homo sapiens
caacttgatgaaggtacacccaatagagagagtttcgctgttgttgcccaggctggagtgctggagtgcaatggc

SEQ ID NO: 213727 - DNA, 80 bp, Homo sapiens
cagaaagcaggcgaacccgcggcgcaataacggaatactcccccagttgcaagaggcgcaggaccgtggaagacttcaac

SEQ ID NO: 213728 - DNA, 100 bp, Homo sapiens
ctgggagccccgagccggaacacggttctgtccaggagagccaggtatcggagcagccggccacggaagcaggagtctgctacaccatttttgatttggg

SEQ ID NO: 213729 - DNA, 100 bp, Homo sapiens
acagtgacaaggaagatcaggacctggacaaaatgtttggagcctggcttggagaactagacaaactcactcaggctaggcagctggaagagaaagaccg

SEQ ID NO: 213730 - DNA, 100 bp, Homo sapiens
acaaaactacactaatacacctcctgtaattgatgtgccatccaccggagccccttcaaaaaagaatgtaattgaccggaaaccataccctgatgatgaa

SEQ ID NO: 213731 - DNA, 78 bp, Homo sapiens
gctctgaaccaggacctggacccggacccaaagtgccatgtctttaatatggagtttcactcttgtctcccaggctgg

SEQ ID NO: 213732 - DNA, 75 bp, Homo sapiens
ccagacggctgcccttcaagtaccacaaaaaggcattgggatgaacgagccgctggtggactgtgagggctaccc

SEQ ID NO: 213733 - DNA, 50 bp, Homo sapiens
gccgtgagttcgccgctggtggctccggagggctggtttttaagtttggc

SEQ ID NO: 213734 - DNA, 50 bp, Homo sapiens
gcgcgggcggcggcgccggcaggaagagatccagttgtcatcggtatcca

SEQ ID NO: 213735 - DNA, 100 bp, Homo sapiens
cgaggagcagcagcagctccagcaggcgctggctcctgctcaggctgcagatcaaattacgaagctgtataatctcttcctgaaaattgatgctactcag

SEQ ID NO: 213736 - DNA, 90 bp, Homo sapiens
gtcgaagaaactgtggaagtcattaggaacaatggtgcaaggtgatcccattaagatactaatgccatcactgtctcctacaatggaaga

SEQ ID NO: 213737 - DNA, 101 bp, Homo sapiens
tatcaatgggaaggcacggaagcatggtgaaaactatagtgtggactacctgacagatgttttggaggagctgacaagcacaagtgtggaacacatcattg

SEQ ID NO: 213738 - DNA, 83 bp, Homo sapiens
cggggggcagccgagacccaccgaggcagcccaggagaactacgatgacccgcacaaaacccctgcctccccagttgtccaca

SEQ ID NO: 213739 - DNA, 100 bp, Homo sapiens
gcggccgccgcagccatgaccgtggagttcgaggagtgcgtcaaggactccccgcgcttcagatgtgaagttcatttccaatccgccctccatggtggca

SEQ ID NO: 213740 - DNA, 82 bp, Homo sapiens
tgctgcaggcggcccactggcagttcgaggttttaaaatcaaagatgggaaaatcggagaaaattgcccttccccatggcca

SEQ ID NO: 213741 - DNA, 90 bp, Homo sapiens
caggaatgaaactgaaacatacagtcagatctcaggaatggaagtccggcttcccatctacacttttcaataaagcatccacatacactg

SEQ ID NO: 213742 - DNA, 98 bp, Homo sapiens
cctttgctggacagatgaagagtgacttgtttctggatgattctaagaggctgaaagtcacaacatgaaaaaccaacagatggatccctttactcggc

SEQ ID NO: 213743 - DNA, 98 bp, Homo sapiens
tgctcatggagtgctagaatctactactgtctggccactggctgctgagcctgctgaacactttccaggcagttttggcatctgatgggtctgatagc

SEQ ID NO: 213744 - DNA, 101 bp, Homo sapiens
ctggaacctggctgccagctggagtcgctgtgggtgaacctggtcctcttggcattgccggccctcctggggcccgtggtcctcctggtgctgtgggtagt

SEQ ID NO: 213745 - DNA, 75 bp, Homo sapiens
ctgacaagcccttgcgcctgcctctccaggatgtctacaaaattggtggttgcatcataaatacaaaggactgaa

SEQ ID NO: 213746 - DNA, 75 bp, Homo sapiens
ctggtgtcatcctctggggtgacgcggggtacaccacaagcacgcgctcctggttgcagccagaatgcatgactt

SEQ ID NO: 213747 - DNA, 100 bp, Homo sapiens
ctatggtcggcctccgacagcgctccggagggaccgggggagctcccaggcgcccgggcttgtccagccggaagccctgagggcagctgttcccactggc

SEQ ID NO: 213748 - DNA, 100 bp, Homo sapiens
ctgtgtggatgtcggcgaagccgcgggcgagaaccgcatgcacgagtctctcatgctcttcgactccatctgtaacaacaagttcttcatcgatacctcc

SEQ ID NO: 213749 - DNA, 82 bp, Homo sapiens
cgactcatggagctgccgtaagggacacttgacattcagggacgtggccatagaattctctcaggaggagtggaaatgcctg

SEQ ID NO: 213750 - DNA, 76 bp, Homo sapiens
agatctgtgagaagaagttctacaccatggcccacgtgcgtaagcacatggttgggggacttaggagccattgatg

SEQ ID NO: 213751 - DNA, 101 bp, Homo sapiens
ccaatttttgctatactcctgttctggggacagtttggtattaaaagtgaaaaaccatttcgctgtgatgaatgtggtatgagattcatacaaaaatatca

SEQ ID NO: 213752 - DNA, 75 bp, Homo sapiens
ttaccacccagcagcagggcatcaagggaacatccttctgtatcagaaattcccatgtttccatatccagatttc

SEQ ID NO: 213753 - DNA, 90 bp, Homo sapiens
tggtctcagctgacaaaaacgggatcgctttggaaacatctttaccctgttcattgggccagaggcctccccatggccacccatggacca

SEQ ID NO: 213754 - DNA, 75 bp, Homo sapiens
tcgggttattcgagtgaccgagaccgcggccgggaccgagggtctgtgcagacttttgcagacaaatcaaaacaa

SEQ ID NO: 213755 - DNA, 75 bp, Homo sapiens
actggcatgattttgtggtggtggaaacagtggacttccaacccaatgagcaagctatcagttgagggatttgca

SEQ ID NO: 213756 - DNA, 90 bp, Homo sapiens
tagatacaaatttttggatgatgatggatccatttctcctattgaggagtcaacgaagtccaaagccaagcctaatggcaagaagcccgc

SEQ ID NO: 213757 - DNA, 82 bp, Homo sapiens
gggactgcaaaggccaatgttggtgctggcaaaaagctgctggcagaggactggccatttggagctgagatgtgtaagctgg

SEQ ID NO: 213758 - DNA, 75 bp, Homo sapiens
gtctccttagctgctcacatatggatactttcacagttcaggttgtggtgcctcctggagtgacaaactcctctt

SEQ ID NO: 213759 - DNA, 99 bp, Homo sapiens
cgagaatcaaagggccgggagcgatgcccagagcatgttccagatcccagagtttgagccgagtgagcaggaagactccagctctgcagagaggggcct

SEQ ID NO: 213760 - DNA, 100 bp, Homo sapiens
tccaggagttcgtctcttacgtctgcggaagtgcagctgcctcagttcttagcgcagattagcctgaggcctgctcagtcgttcctaatgaataaaaatc

SEQ ID NO: 213761 - DNA, 76 bp, Homo sapiens
ttcccatcgaagctctagaaatgaatgtttccatctcttcagagatgaaccagagactctccaacatgtgccttct

SEQ ID NO: 213762 - DNA, 100 bp, Homo sapiens
ctgacctgcctgtcgtcgtggtggccaacaagcagtggtcaagcagaggatgcagatgtacaactcaccataccaccgggtgacagactgtgtacgggca

SEQ ID NO: 213763 - DNA, 91 bp, Homo sapiens
gtggctgttccaatcgctcctgtttgtcttctgctttggcccaggtcagcccaaggccaaccccactgtcactctgttcccgccctcctct

SEQ ID NO: 213764 - DNA, 133 bp, Homo sapiens
ctcaatgtccaagagtataatcatctactaaaagtcatgggacagtacttggtccagtactgtaaggacaccggcatcatatcatttccatccataatggtcccactggcccggattttgcccaataagaacc

SEQ ID NO: 213765 - DNA, 100 bp, Homo sapiens
tcaccttcaaggccgtcagacaaggagacaaggacggcagcaaggtgacaacagtggtggcaactcctgggcagggtccagacaggccacaagaagtcag

SEQ ID NO: 213766 - DNA, 82 bp, Homo sapiens
ccatcaggtggtggtggccaagtatgcgcccagcggattctacattgcctccggagatctgactgcagccatgagcagcaat

SEQ ID NO: 213767 - DNA, 98 bp, Homo sapiens
ctacaacggatgcgcctacgcctgcctagaagctgtgccgcccccgccagtgtccgagctgcaggaggagggaatgaacgccatcaacctgcccctca

SEQ ID NO: 213768 - DNA, 99 bp, Homo sapiens
ggccggtggaatgggtccaggccgtggtcagccgcttcgacgagcaggagccattgagcttcaaggacgtggctgtggtcttcactgaggaggagctag

SEQ ID NO: 213769 - DNA, 100 bp, Homo sapiens
ggtccaccaacagctgtggagcacgaggggcttgtaggatatataattccacatatttggggctcttctcaaccatctgtgagtccaggggaaccgtctc

SEQ ID NO: 213770 - DNA, 89 bp, Homo sapiens
caccctgttgtggctctataagcaggttctagagcacaagttgaaagaagctgatgaaatgcacacattgttacagctagagtgtgaaa

SEQ ID NO: 213771 - DNA, 88 bp, Homo sapiens
cagaaagacgcagcttcttaaaaaaagtgtgatgaagaccacatggggtgtgctggatcctcctgtggggaatacccggttgaatgtc

SEQ ID NO: 213772 - DNA, 50 bp, Homo sapiens
ttcacttccctgtcaactcttcagctcgaaatgagccgtcagactgctac

SEQ ID NO: 213773 - DNA, 101 bp, Homo sapiens
aagcacactgcagaatctgcgggcccgcgtgctgagtggaaagttccgcatcccattttttatgtccacagagccaactgtgtttattccccagtccaaat

SEQ ID NO: 213774 - DNA, 85 bp, Homo sapiens
cctggaaaattgactagtattaagtgtgagtaaaagctatgaaacccacgtagtcgaacaccgtgatgcttctcctgcagggcgt

SEQ ID NO: 213775 - DNA, 98 bp, Homo sapiens
gaaagcctttggaatagcagtgttccagtgtgtgaacgtaatggtcaatggccaatcctcttacacctttgaccatagaatcaagcctgaggctgtga

SEQ ID NO: 213776 - DNA, 99 bp, Homo sapiens
ggcgattccagagagcggcggaaaggataagcctcgacttagaagctaccgagttaccctaagaaagaagctttgaggaagagccataactacctggag

SEQ ID NO: 213777 - DNA, 74 bp, Homo sapiens
gcccggcaatgccgccatccgggagaagctggcctgggccaagatgccaacgtccggcggtacctccagctgac

SEQ ID NO: 213778 - DNA, 100 bp, Homo sapiens
ggaaggaaggcggagggaaccatgcgaggttctgagaattgcggcgagggtcgcctcgagagacggtttctgaggccgcccattgtgtccttgcccagga

SEQ ID NO: 213779 - DNA, 90 bp, Homo sapiens
cgcctccccgcctaggtgctggccgagcgcggggcgggcaggcgagcgcggcggcggcggcgagcgtgggagctgcagtccatggctgac

SEQ ID NO: 213780 - DNA, 98 bp, Homo sapiens
acgccagcatcatacaccggctgttcgaggccttgactgtaggtttttgatgccacaaacaccacccgagaacggagagcgaccatctttaattttgg

SEQ ID NO: 213781 - DNA, 98 bp, Homo sapiens
caccatccttctcgctgcaggtacatcgcggtgcacgtggtcccggaccagctcatggccttcggcggctccagcgagccgtgcgcgctctgcagcct

SEQ ID NO: 213782 - DNA, 99 bp, Homo sapiens
tctcaagagaagcattctccttgggaaggtgtttcaggtttctaagcatgaattgaggaacagaagaagcagagcagatgatcggagcagcatttgttt

SEQ ID NO: 213783 - DNA, 100 bp, Homo sapiens
gcggagccactgaaggaagataagcctgtcactggtcctaggaacaagactggcagtgtgtgaagaaaccctgaaggtcgggcctcaagtaggtctcttt

SEQ ID NO: 213784 - DNA, 75 bp, Homo sapiens
cagaaaatgtcaaccagtacctcacgcttggccttcgtgcctctgcagatctggtccaaagtcctggccatctca

SEQ ID NO: 213785 - DNA, 100 bp, Homo sapiens
cctagaccggtttttagtccattgactatgcagcctaatggtgtaattgaaaagtgatcctctcttcagagatgtcaaaaacaaacaaatccaagtctgg

SEQ ID NO: 213786 - DNA, 51 bp, Homo sapiens
gtgcggcggatgaacaagcggcagtatgtttgaacatagattgctaaaaat

SEQ ID NO: 213787 - DNA, 74 bp, Homo sapiens
gaatgtgaaatttgttctcaagcacaaaaggtcagtgcaccagatattctgaaacctctcaatcaagaggatcc

SEQ ID NO: 213788 - DNA, 82 bp, Homo sapiens
tttgcagtctcgacataagtgaactctaatgaatcattgattgaccagcactattttaccagttggaatgaatgatcagaaa

SEQ ID NO: 213789 - DNA, 100 bp, Homo sapiens
tcaaccctgagggcaaagccttgctgaagaaaaccaagaactctgaggagtttgctgcagccatgtccaggttgggggccgtcccgctcctaaggcagga

SEQ ID NO: 213790 - DNA, 50 bp, Homo sapiens
ggacaccaaacatttcctgccgctcgtttcaccagtgatcattaaagaat

SEQ ID NO: 213791 - DNA, 90 bp, Homo sapiens
ggccgttgggactttgagtggtgatgcttttttacaccttcttccacatactggtgtcgttcagtatttctacattgaagactggcaatt

SEQ ID NO: 213792 - DNA, 51 bp, Homo sapiens
gttggaggtttcggacgagtagaactgggtttggacagaggagccaaaggc

SEQ ID NO: 213793 - DNA, 82 bp, Homo sapiens
cgacgacgacgaggaagaggaggtttctgagatgatagtatttctgctgcaagtacttctgatgttcaagatcgcctgtcag

SEQ ID NO: 213794 - DNA, 100 bp, Homo sapiens
tcatgatgccccagcgggtgaggctgcaacacgaggctgccgttcagcacccgtcgagcgtctctaattaacagaagatggcaaagcccagccacagcag

SEQ ID NO: 213795 - DNA, 87 bp, Homo sapiens
ccagaggcaacagggacatggccacctgggacgaaaaggtgttggagcgggccggagagaagtagagtgggctgcgaggagaaggaa

SEQ ID NO: 213796 - DNA, 90 bp, Homo sapiens
ttggaccatttgaaatactggtagatccatacatgcatgaggtcagatggcaaaaatcaagcaaacccttctagacagccggggagtgtt

SEQ ID NO: 213797 - DNA, 100 bp, Homo sapiens
cggatcccgtccgagccccggccccaagtaacgccgccgccccggagccgccgaggccatgctctaccacaaccagaccgccgagctgcgggagctgctg

SEQ ID NO: 213798 - DNA, 74 bp, Homo sapiens
accagcagcatcaagaaaatcgcagactttctcaactcgttcggtggctgcctctttgatgagccgtatagcac

SEQ ID NO: 213799 - DNA, 82 bp, Homo sapiens
gggccacccctcctttcaggtcaagtgtactaatggtcacttgatgtgcgctggctgttttatccacctactagcagatgcc

SEQ ID NO: 213800 - DNA, 75 bp, Homo sapiens
agtgcggcaaccaaatcggcgccaaggcaccaggatcatctacgaccgaaagttcctgctggagtgcaagaactc

SEQ ID NO: 213801 - DNA, 96 bp, Homo sapiens
gaaattcattggacctgatcaacatcgtaatttctattagtcaaaagaaatagactggcaaccttattttactacacgcattgtagatgactttgg

SEQ ID NO: 213802 - DNA, 100 bp, Homo sapiens
atcacaaatgtgatggaggcaaaccagcggcaaattcaacacccaacagcttccttaatagcaaaggtagcaacagcccaggatgatataactggtgatg

SEQ ID NO: 213803 - DNA, 75 bp, Homo sapiens
gaggcagaggcacttatgcttgtcaggtgaaatgacaatggatgctctgttggctcgattgaaacttctgaatcc

SEQ ID NO: 213804 - DNA, 83 bp, Homo sapiens
ctacaagcaagctgaatggaggccagatagtaccatgatagctgtatcaattactgaagatttcattgctacatatcaggcca

SEQ ID NO: 213805 - DNA, 83 bp, Homo sapiens
gatagtggaaagaaaccatgtgctgaaatgtttgacgacactgatggtttggtaagaatgattgatgttggctgatattggag

SEQ ID NO: 213806 - DNA, 74 bp, Homo sapiens
tcctgctgccctcaaggtcgtgcgtctgaagcctacaagaaaggttgcacagagcattgaggatcaccatcagg

SEQ ID NO: 213807 - DNA, 100 bp, Homo sapiens
acaatgccaatttacgtgtcattatggaactacttatgagccatccagtccaatggatcagatgggcaagatgagacctcagccatatggcgggactaac

SEQ ID NO: 213808 - DNA, 113 bp, Homo sapiens
caacggcaaagttttgcagatcttcaacaagaggacccaggagaaattcgccctcaaagttgacatcatggacatatgtgagtccatcctggagaggaagcggcatgacagcg

SEQ ID NO: 213809 - DNA, 100 bp, Homo sapiens
gcaagctctgctctctctatgagaacgactgcatctttgacaagtttgagtgttgctggaacggttcggataggtccctccttgtggtccatttctgggc

SEQ ID NO: 213810 - DNA, 75 bp, Homo sapiens
ctgaagagggaagacacgcggaaacaggtgcttctccgctgcctcactttgctgcagaggcttcttcaagaacac

SEQ ID NO: 213811 - DNA, 101 bp, Homo sapiens
caaaggcaagagtaacagcagcgccgtcccgtccgacagccaggcccgggagaagtaagaatgattgatgttggctgatattggagtgctcattcacatga

SEQ ID NO: 213812 - DNA, 50 bp, Homo sapiens
caggcatgagccaccacgcctggccagttctagaggctgggaagtccaag

SEQ ID NO: 213813 - DNA, 74 bp, Homo sapiens
cacacctgttgccattatagagctggaattaggcaaatatggacaggatatgctgcaggctgctagtcattatc

SEQ ID NO: 213814 - DNA, 115 bp, Homo sapiens
ttccaccgaggaaaaggaatcgtatcgtatgtccgctatccagaacctccactctttcggtttggtgcacctcgatttggaggaagtagggcagggcccttatctggaaagaagt

SEQ ID NO: 213815 - DNA, 103 bp, Homo sapiens
caggtttggatgcatctgctcagactacttctcatgaactcaccattccaaacgattctatccagaagttaaaggagagattgctcgtaaagatgaaaagctg

SEQ ID NO: 213816 - DNA, 75 bp, Homo sapiens
tgtgcggaaaatgccttcaaatcaggctgggaagttcaagatcaagatgctggacgatttggttccttagtgaag

SEQ ID NO: 213817 - DNA, 74 bp, Homo sapiens
tcctggccaccgactcctacaagcgccatcatgaccgggtcctataacaacttcttcaggatgtttgatagaga

SEQ ID NO: 213818 - DNA, 89 bp, Homo sapiens
gttcctaccggagttacaaaagtcacagattggaaagattgttgggagtggcacaccactagggaaaagaagaaggggcgaactgcttg

SEQ ID NO: 213819 - DNA, 100 bp, Homo sapiens
gcctccttcgccgccgcctctgcagtcctcagcgcaggtgatgtttgaggcaccatcagagttaacacaaagaccccaagtagggtgctatatccatgga

SEQ ID NO: 213820 - DNA, 98 bp, Homo sapiens
tttgcacaccatccaggagtcagtttattactggaaacaacaactatatattggttcaacggctggggttgcccagctccctttacaccggtgtgata

SEQ ID NO: 213821 - DNA, 82 bp, Homo sapiens
ggatcggggacggagagaacacgagcccatcagggcccactgatgatggtgaagaagagatggaagaagacacagtcacaaa

SEQ ID NO: 213822 - DNA, 75 bp, Homo sapiens
acgtgccatggagacgcttaacggcctctgtgtcctttgtcccaatagtaacaactccctcctggcctttccggg

SEQ ID NO: 213823 - DNA, 80 bp, Homo sapiens
cgctgctgggtccgctgagcggggcgacccgaggtgcctatggttcatgcttgaagttttaatgacaaagaatgaaaaca

SEQ ID NO: 213824 - DNA, 82 bp, Homo sapiens
gcagctggatattgagccggatagacctattggatatggagcctttggtgttgtctgatatttggagttcttacaacatggc

SEQ ID NO: 213825 - DNA, 100 bp, Homo sapiens
ctccagcaagatctccgatgactcttgtgaagcagcaggcgccaagtgatgaagacttaattcagtgcacaaatgagatgaatgtgaacatcccacagtt

SEQ ID NO: 213826 - DNA, 83 bp, Homo sapiens
cccgcatctgcctccctgccccagcccatcctctctaaccaagacattgccaatctagctgatgaattcaaggatcacttggt

SEQ ID NO: 213827 - DNA, 95 bp, Homo sapiens
ccttggtttggctcctcctccagactcaaaggtgatcagcgagtttgaggcctctcccgactcgttttcctacagaattcccaacctgagtagga

SEQ ID NO: 213828 - DNA, 74 bp, Homo sapiens
tagctgatcaaaccaaggatggtgagggccccaaggctgttgcagctcctcgacctgatcggttggtcaatcgc

SEQ ID NO: 213829 - DNA, 100 bp, Homo sapiens
ctgcaacccgtgcttatgcagatagttactattatgaagatggaggtggtcttggaggcattgggatgggacttggtccgggtggacagcctattagtgc

SEQ ID NO: 213830 - DNA, 98 bp, Homo sapiens
tggagcaagatgagttgcagcaagtcatacgggagaggactactgagcccagccaggctgtatgccattgctgccaaagaaaaagatattcaagagga

SEQ ID NO: 213831 - DNA, 101 bp, Homo sapiens
tgaaagtccaaacagacatctctacgattttgttggaaacataaggcttgatggacatgggtggttagatgaacgtcatgcacaatctcactttattccag

SEQ ID NO: 213832 - DNA, 80 bp, Homo sapiens
ggaaaaagttggaaattggaattttgatatctttctatttgatagactaacaaatgctgtagtaggacaggaccttgctg

SEQ ID NO: 213833 - DNA, 50 bp, Homo sapiens
tgggagaccaccgggatgggcaggacgtggcccagtggaacatcgggagc

SEQ ID NO: 213834 - DNA, 95 bp, Homo sapiens
tcgttgcttgcttgcctgtgcgcgcgtgcgcggacatggcctcaaacgaacccagtgacttgattgtaaaaatttacagagcggaatcatatgct

SEQ ID NO: 213835 - DNA, 98 bp, Homo sapiens
tccgctggcgctagtctgaccctccgccaggcaaaaggaaggcattgccgtctgcaacgtgcccgcggcgtctgtggaggagacggccgactcgacgc

SEQ ID NO: 213836 - DNA, 78 bp, Homo sapiens
ctgcaggtccttcccacagaagacagtatttgtggaaacattagacaaatgttttgaaaatgtctgtgagctggattt

SEQ ID NO: 213837 - DNA, 75 bp, Homo sapiens
tccctgctgaatcacacgccgccatccgggaggcccagggaaggaactgtggctgcaccatctgtcttcatcttc

SEQ ID NO: 213838 - DNA, 101 bp, Homo sapiens
ggggccggcggggtccgtggccagattgtcactgctgttccaagggcacacgcagagggatttggaattcctggagagttgcctttgtgagaagctggaaa

SEQ ID NO: 213839 - DNA, 100 bp, Homo sapiens
agcacacactgcaaggagatcaggaccgtataatagacgctggccccaaaggaaactactctcgatttatgaatcacagctgccagcccaactgtgagac

SEQ ID NO: 213840 - DNA, 73 bp, Homo sapiens
ctgttgtcaggtcttcagggtctcgaggaaaagctgaatctcagttgtatccatagtcctgttgttaatgaac

SEQ ID NO: 213841 - DNA, 90 bp, Homo sapiens
cttgttctcgagttttctctgccatgttgctattgcaggacggagttctcttgccacatcaatatcccagatggtaaagactgaagggaa

SEQ ID NO: 213842 - DNA, 90 bp, Homo sapiens
gaccaagatcaagactgtgatgatggctcagatgaacgtcaagattgctgtttgaaagagaagatagtgaggagctttgaagtctcccca

SEQ ID NO: 213843 - DNA, 100 bp, Homo sapiens
taaagatggcggcttcctagtgagtcggcggctgatttagaaggaggttcaggctacggtgagccgaaggtacaatcctgagaacctggccaccctggag

SEQ ID NO: 213844 - DNA, 82 bp, Homo sapiens
ggttccccaacatgcctcaccctcatctatatcctttggcagctcacaggtgctggagaatctggtaaaagcaccattgtga

SEQ ID NO: 213845 - DNA, 80 bp, Homo sapiens
cgccgcggctccggccctggccccgatggctctgtgcaacggagactccaagatgacttcaaacctgcttctattgacac

SEQ ID NO: 213846 - DNA, 82 bp, Homo sapiens
gtggccgtagcggcttgttggataaggttgcagatgaatacatgttttccctagaagagaataagaagtccaagggacgccg

SEQ ID NO: 213847 - DNA, 75 bp, Homo sapiens
actccagccagagcccccccacgaccccaccaacaactgaacgctttggtcaggctgctacaatggaaggaattg

SEQ ID NO: 213848 - DNA, 80 bp, Homo sapiens
acgccccggtggagaagctgaggtctcctccgggctggggctgagcaagccctcggagtgaccgtgggtgacagcggctc

SEQ ID NO: 213849 - DNA, 98 bp, Homo sapiens
tctgaatatgtgaacaaatccaggcctctcaaggaaaagacttcaaccaggcttccttgtacccacaggtgaaaaatcaatagtcgtggcagtgctgc

SEQ ID NO: 213850 - DNA, 82 bp, Homo sapiens
agcatataagccaggcatgtctcccgaggagtgcaggcgcttcaccacagacggtgcatggaggactgcaacagaggagtgg

SEQ ID NO: 213851 - DNA, 75 bp, Homo sapiens
tcaagttacagatgaagaaatggaggagcagaatgctcagccactgttccatccctgacccatctttgtcgtttg

SEQ ID NO: 213852 - DNA, 82 bp, Homo sapiens
aacaaacagcggcgacacttaatgttcacgcggtggaaacagcagcagcggaaggatgagacttctgtgagcagcgaggatt

SEQ ID NO: 213853 - DNA, 73 bp, Homo sapiens
catcttctaattttcattccttcaaagggctgctcttcacctatcgtggtgaagtttgctgacactcagaagg

SEQ ID NO: 213854 - DNA, 101 bp, Homo sapiens
acggcgtcatggaggagatccggcggcagggcaagctgtgcgacgtgaccctcaagctcctctctgctatatgaaatatgggagacgacagaccgtttgtg

SEQ ID NO: 213855 - DNA, 100 bp, Homo sapiens
tgcttggtgtcgtttttccttgagctgaacgtcttgcaacagtggccgcacgcatagttcccaaagagaatattacgtctgattctctcctaaccgcaag

SEQ ID NO: 213856 - DNA, 110 bp, Homo sapiens
ttcctgtgaaacctgaaacaaggtgatctggggaaccaaagactctgggactcttggtgccaacagagttactctagggagacgtggtgggcggtccttcctgtgacacg

SEQ ID NO: 213857 - DNA, 75 bp, Homo sapiens
gcagccgggagacagatgcgaggcggcggtcagggcgtgatggtgggcatgggtcagaaggattcctatgtgggc

SEQ ID NO: 213858 - DNA, 100 bp, Homo sapiens
gaatcgtttgcttctctgagggggatcaagattgatgtggacatcttcgagccccaggggatcagcaagctggatgcccaggcctctttcctgccgaagg

SEQ ID NO: 213859 - DNA, 100 bp, Homo sapiens
cagccgcgaggaggcgcgggaggtgttcgagaacgaccccgagacggtacaccaggggttggaaaaaccacactaggcaaagaacttgcgtcaaaatcag

SEQ ID NO: 213860 - DNA, 129 bp, Homo sapiens
cctgcgtgtccgcgaggatgcgtgttcgcgggtgtgtgctgcgttcacaggtgtttctgcggcagttccagggtctccctccactgctgtagtaacccgggtccggggcctcggtggtgctcctgatgc

SEQ ID NO: 213861 - DNA, 50 bp, Homo sapiens
ccgccgcccgtccacacccgccgccagacacactttggctgatccccatc

SEQ ID NO: 213862 - DNA, 71 bp, Homo sapiens
ctgcgtgtgggacgggtttagcggcagcctcttcggttgctgaaaagccaggagtcaaaatgactgagcgc

SEQ ID NO: 213863 - DNA, 100 bp, Homo sapiens
cggccgcctcgggccgctgctctgcctgctgctcgccgcgtcctgcgcctggtcaggaggaggagaacggggctgaggaggaagaagaagaaactgccga

SEQ ID NO: 213864 - DNA, 100 bp, Homo sapiens
attccagaactccagtgagatggaaaaaatcccagaaattggcaaatttggggaaaaagagcacagggctccctcttcaacgtggcgaccagtggccctg

SEQ ID NO: 213865 - DNA, 83 bp, Homo sapiens
ctggagcggcggcgggcaggcgtgcggaggacactcctgcgaccagatttctgcgccaggagatgaggggcggtagagccctg

SEQ ID NO: 213866 - DNA, 100 bp, Homo sapiens
ccagcggcgccgacctcagcgcgcacctatgggctcgctaccaggacatgcggagactggtgcacgcgttggaaggtgcagaggataaggaggcactgct

SEQ ID NO: 213867 - DNA, 117 bp, Homo sapiens
aactcggtggaggagaagagaaactccaagatgctccagaaggtggtcctgaagagcaaggatgaccaggtgaccgttatcggggctggggtgaccctgcacgaggccttggccgct

SEQ ID NO: 213868 - DNA, 74 bp, Homo sapiens
cgaattctcaacccctacaacttattcctgtccggagacagcctaagggcacgtgtggttctcaaatataggca

SEQ ID NO: 213869 - DNA, 100 bp, Homo sapiens
tgcagccgtgtgacagtaactgaacattggtctaaagtctttccaaaaggtcaaggttcacaaggctttggtatcaggatggtgctggcctcataaaatg

SEQ ID NO: 213870 - DNA, 102 bp, Homo sapiens
ctgtatgcatggtgtggggttggtgtgattagcttcgcagtctggaaagctttaggagttcacagtaaaccccgagactcttcagttgaagttcgtagtgat

SEQ ID NO: 213871 - DNA, 90 bp, Homo sapiens
cgcggcggcggcgctcggcgatggtaggcgtccctggagcggccgccttccagcttggttgaatctggcgatgtggaacccatggatatg

SEQ ID NO: 213872 - DNA, 100 bp, Homo sapiens
cagccatcatcttctgtgtggagctcagcggctacgacctgaaactctacgaggataaccagacagaggtgttccgctttgcctactacaagctgcttaa

SEQ ID NO: 213873 - DNA, 74 bp, Homo sapiens
cgcagtggtcgcttcttctccttgaggcaaatttctggagatgtgcaatgatctcttagctagagtggagccac

SEQ ID NO: 213874 - DNA, 82 bp, Homo sapiens
agaagatggtgcagaagaaaccagccgaacttcagggtttccaccgttcgttcaaggttctgggccggagaaggggcgacgt

SEQ ID NO: 213875 - DNA, 124 bp, Homo sapiens
ctgctgccctcttgcgcgcgggaagcagcaccaagttcacggccaacgccttggcactagggttggaagtactccatgacacacactcggagaaagtcccttcccatgctgagttcgggcctca

SEQ ID NO: 213876 - DNA, 100 bp, Homo sapiens
taaagcgcctccgttttcggtgacgctgcttcgtatgatgcagggtccttcttacgcacaattcagtagattcaccctataaccttctgttcggtgatga

SEQ ID NO: 213877 - DNA, 98 bp, Homo sapiens
agcatccattgcaaaccttattaatctcagggaactggatgtcagcaagaatgagaagatggcgaattagaagatggtgaaatagacgatgcaggatt

SEQ ID NO: 213878 - DNA, 100 bp, Homo sapiens
gtgctttatttctgagagtgaagattttacagcgtgtgtgccgtagtcgttatatagtgcacgcaggcttacggagttcctatgctagtcagcatagtca

SEQ ID NO: 213879 - DNA, 100 bp, Homo sapiens
aagagcgctcccaggagaaacaaatgatgaaactgaggcacaaactgcttaatgaacttgtccatggtaaagaagaaaggaccctggataagagaggaaa

SEQ ID NO: 213880 - DNA, 50 bp, Homo sapiens
actatgagcagtggctggagatcaaagcatttaaatcaaacggtattgag

SEQ ID NO: 213881 - DNA, 100 bp, Homo sapiens
atccgcggctacgtgggcaaccgggcggccacgttcccgctgcagtaagactttgaccccgacgcaggcttcagtgattgccgcggatcagaagcctgag

SEQ ID NO: 213882 - DNA, 98 bp, Homo sapiens
tatccagcggccagctaatgctatcaaagagatgattgagaactgctgagatgagtgaactgagtgtggcacagaaaccagaaaaacttttggagcgc

SEQ ID NO: 213883 - DNA, 98 bp, Homo sapiens
agaggagggggactacgtgctggtcttgaaatttgcagaggtctactttgcacagtcccagcaaaagggcttatttcaaaacctttgtccctcagttc

SEQ ID NO: 213884 - DNA, 100 bp, Homo sapiens
gcctcaaagtgcccaaggagcgcctggctcttctccacaaagacacgttgaagaagcctcagcggaggcgatacggcctcctcgccaacactgaggaccc

SEQ ID NO: 213885 - DNA, 50 bp, Homo sapiens
ggaaaactcaagcatagtcaagatccaggggttggtgtagacaatgatgg

SEQ ID NO: 213886 - DNA, 75 bp, Homo sapiens
cataaagaacttaaatggactgaaattgttgccaaggtcagagaagtctcccagcccgactggacgcctccacca

SEQ ID NO: 213887 - DNA, 97 bp, Homo sapiens
ccaacactcctagccaatggtggtcatggagtagaagggagcgatactacagtgcttagatgagtacgaagatgatgaagcagggcagaaagagcgg

SEQ ID NO: 213888 - DNA, 75 bp, Homo sapiens
gctttacctcgctgaccctatgaagggacagagcagaatgggctgatatagatccggtgccgcagaatgatggcc

SEQ ID NO: 213889 - DNA, 50 bp, Homo sapiens
aaagtggttatcccaacagaaaggcataaaccttccactcttgaacaaag

SEQ ID NO: 213890 - DNA, 99 bp, Homo sapiens
agaatttttgcaacgcgccaaatctaaactgcaggtagatgaaactcaagagaaaaggtgtggataaatgaaactagcccatgatgaacctgttttctc

SEQ ID NO: 213891 - DNA, 75 bp, Homo sapiens
cttgaatcagaaattgagaagctgcctgtggacatctctacagcaatgagtgaacgggcacttgctcagaaaaga

SEQ ID NO: 213892 - DNA, 100 bp, Homo sapiens
aggaaactatggcctccaggcttccgacggcctggtcctgtctggtggaggccattgtcttgccaatgaaccacaaggagaagtttgagaacttggggat

SEQ ID NO: 213893 - DNA, 100 bp, Homo sapiens
agcgctttgaagagtccaaagagattactccaggcccagcaacatatgagattcgcttcaagctcagcttatcaatatgggtgttattcctaccttagtg

SEQ ID NO: 213894 - DNA, 102 bp, Homo sapiens
tgaagaaaagtagaaggaaaaacagaacgttgcaaactctggaaaaaaacttggacctggaatggccaaatatcaaggtgaagttcaaagtttgaaactgga

SEQ ID NO: 213895 - DNA, 82 bp, Homo sapiens
ccggcagctggcgctggggatccctgctcttcgctctcttcctggctgcgtccctagacctgatggccaaaagaaaggaaga

SEQ ID NO: 213896 - DNA, 100 bp, Homo sapiens
gcaagttatctgggaactgatcaaagtttcagggttgaaactgataaagccactgttggatttgagagcctggaggagtgttatatggcaaagatacttg

SEQ ID NO: 213897 - DNA, 74 bp, Homo sapiens
caacagagcagcagctacgggcagcagaatgaagaagatgactttatgtgtaagaaggcggcctctaaatcaaa

SEQ ID NO: 213898 - DNA, 90 bp, Homo sapiens
catcttcaagctcttctcctccattcaaggcgggagcatccaatcaacttcgagagcgtaggccccacctatcgtgggtcgagttgcttg

SEQ ID NO: 213899 - DNA, 73 bp, Homo sapiens
cggcgatggagctgttatttttagatacttttaaacacccgagcgctgaggctgttaaaagacataatctgac

SEQ ID NO: 213900 - DNA, 107 bp, Homo sapiens
aatcaggcacagtgcttgccatccaggagctcccagtcccaatgaggaaccagcaggtgagaagccctaccactgcaactgggacggctgcggctggaagtttgcgc

SEQ ID NO: 213901 - DNA, 100 bp, Homo sapiens
aggacatccaagccttcaagatgaaccgcaaggagagaagttcttatgactcctccatgtctccaggctctccagcagaactatctcctactactctttc

SEQ ID NO: 213902 - DNA, 75 bp, Homo sapiens
tacaatgatggggcagcaagtggccaaataatgctctaccacaagaaaatggcctctcacctggggccattgctg

SEQ ID NO: 213903 - DNA, 75 bp, Homo sapiens
acctgaagtcagaactgagtggcaacttcgagcaggacctgaaggagaagaaggagaaggtggaggagaaggcaa

SEQ ID NO: 213904 - DNA, 74 bp, Homo sapiens
aactgcatgctgttgtagaaactctagtcaaccataggaaaggaatgggatggtctagtaaggataacctttgt

SEQ ID NO: 213905 - DNA, 98 bp, Homo sapiens
ggctcctttaagacggtctacaaaggtctggacactgaaaccaccgtggaagtcgcctggtgtgaactgcaggttcattttccagacactgaaagagc

SEQ ID NO: 213906 - DNA, 89 bp, Homo sapiens
tgggagtaccagatcatgccacaggtccctgtttttaccgtagaggtaaagaactatgggagaaaagaaatgggtcgctccaattctag

SEQ ID NO: 213907 - DNA, 82 bp, Homo sapiens
aaggtgaacgggcggcccctggagatgattgagccgcgcacgctacagtacaagggacagaagatgagcctgtcggtcctgg

SEQ ID NO: 213908 - DNA, 74 bp, Homo sapiens
ggagaatcgaggagctcaacaagatagcctgggctggaagctcttctacgtcacaggctgcctgtttgtggctg

SEQ ID NO: 213909 - DNA, 100 bp, Homo sapiens
ctgccccggaggacctccgcagagtctcggagcctgacctcacgggagctgtttcgagtacccttgaaatggcgattgaaaacctccaaaaaagcgaagg

SEQ ID NO: 213910 - DNA, 80 bp, Homo sapiens
ccccctgtcgcgggaacaccctgagccgcatttacgtggaaaatgattttagctggaacctatttgcctcagtcctatct

SEQ ID NO: 213911 - DNA, 98 bp, Homo sapiens
agtgagcgaggtttgcccggagcgcgcacgagacggtttgccagtcagtccttagaagaacaacacaggaatgcccagtgcggacatctctagactta

SEQ ID NO: 213912 - DNA, 74 bp, Homo sapiens
cccagacccctcagcgtctggcatctttggtgcttcccgtgctgctgttgatgctggctttgttcccaatgaca

SEQ ID NO: 213913 - DNA, 75 bp, Homo sapiens
ccaagggcctccgtctggatttccaaggaagaatttcctctgaagcaccgatataattggtgattacaactttcc

SEQ ID NO: 213914 - DNA, 83 bp, Homo sapiens
cggggagagaacaaccgttgtttaatggaagatttcgatcagttaggagatctaccgcatcgtgtcacagaaacagatcgcag

SEQ ID NO: 213915 - DNA, 101 bp, Homo sapiens
cagaaatggatgctcgaaccatcttactgaagtgtgcctacaggggttgtggaaggagacgctgcccccggtctatgccctggaattgctgaccatcttcg

SEQ ID NO: 213916 - DNA, 100 bp, Homo sapiens
aggttattccaggcagccagaccaggctccttggtgagaagaccaccacagcggcagctaaaccatttacacagctggtgaaagaaatgcagcttcatcg

SEQ ID NO: 213917 - DNA, 101 bp, Homo sapiens
aggttccttttctccggcaggctcctaagcctaggagagcccgaactggaggtattatacctgaagaaccttagccctcgggtgactgaaagagatcttgt

SEQ ID NO: 213918 - DNA, 75 bp, Homo sapiens
gcgtgttcgcgggtgtgtgctgcgttcacaggtgtttctgcggcaggaaaactaggtgtctgtgttcactccagg

SEQ ID NO: 213919 - DNA, 100 bp, Homo sapiens
agccagtacgtacgtctgacccctgacgagcgcagcaaagagggctctatctggaaccaccaggtggacgacccaccggagcccgtgtacgcgaacatag

SEQ ID NO: 213920 - DNA, 100 bp, Homo sapiens
tgcaccgcggcatgaatgtgcccttcaagcgcctgtctggattcactccttctccagttgcacagccacacccttcagctggccttaatgttgactttga

SEQ ID NO: 213921 - DNA, 74 bp, Homo sapiens
attagaagcattttgcaacgtagtgttgccaatccagcatttttgaagaaactccgggacgttttacagcagag

SEQ ID NO: 213922 - DNA, 75 bp, Homo sapiens
ctgcaggtgagctggatttcagtggcctgttgaagaagagggcagaagacgagggtggggcccgggcccagctgc

SEQ ID NO: 213923 - DNA, 100 bp, Homo sapiens
caggcaaggacatttggaccgatcttttacatgttccacaagaagtgcagcttataatccaagctattactcagtatgagtttaaagccaagaacatcaa

SEQ ID NO: 213924 - DNA, 51 bp, Homo sapiens
atatgtgaagcagacatggaacctgcaggcctcctacacctacctctctct

SEQ ID NO: 213925 - DNA, 75 bp, Homo sapiens
tcagtgactgaagcgcccgtccattccaagccacccacacagaatatgcctatgggtcctggagggatgaatcag

SEQ ID NO: 213926 - DNA, 97 bp, Homo sapiens
cctcaccaagtacgctgaggccgagaacaccattgaccagctacgcctcggggccaaggcctcaggagagcgttaccatgtggagccccacccagaa

SEQ ID NO: 213927 - DNA, 73 bp, Homo sapiens
atccggcggaggccgatcgcgacggctgatgttttactgtgcctggctaactatagtcgagggggtgatggtc

SEQ ID NO: 213928 - DNA, 98 bp, Homo sapiens
ctctatttatatagaaataatcttcaaaagtatatagagatatatgtacagaagggtccacatatagcctcagttacattagctgcttatgaatgcaa

SEQ ID NO: 213929 - DNA, 75 bp, Homo sapiens
attccaagtaactcttatttgaccttgaagctgatgatgttaagggcagtgtaccactgtcttcaagccctcctg

SEQ ID NO: 213930 - DNA, 74 bp, Homo sapiens
agatgtcctatggcttgaacattgaaatgcacaagcagacttccttgtgaaacctcctagtagaaaaagttctt

SEQ ID NO: 213931 - DNA, 51 bp, Homo sapiens
agctcacagccaccggtaccttcttccaggaaccctcttcataaatcaaac

SEQ ID NO: 213932 - DNA, 80 bp, Homo sapiens
acagcccatttgtgttcggacagcccctttccttccagcagcctcagcttcagaatgttcctcctgctgatcaagagaag

SEQ ID NO: 213933 - DNA, 83 bp, Homo sapiens
aagacgctggccgcgggctccatcagcatggctgaggtctggccgtgggcctgggcttcggggcactggcagaggtcgccaag

SEQ ID NO: 213934 - DNA, 75 bp, Homo sapiens
tgactgtacactgaaagaagttgacctccttcaatctagagaaaatgatgcatcctgttgccagcagtaatccag

SEQ ID NO: 213935 - DNA, 126 bp, Homo sapiens
ttcgggccttagccaaacccctggatgacaagaagagactggtgcgcaaggaagcagtgtcagccagaggggagtggtctctagcatcaattcacgctttgccaaagtacacatcctgtatgtggg

SEQ ID NO: 213936 - DNA, 100 bp, Homo sapiens
ctaatttagactagagccctatctcttcttgagaagctgggatttgaaggagctatcctgagatctgtactgctaagggagcactatgtctgcggaagtc

SEQ ID NO: 213937 - DNA, 74 bp, Homo sapiens
aggggccaaccatgggaaaggagagtggatgggactcaggtgctgaaggtcgccatcctggctgagaagtacgc

SEQ ID NO: 213938 - DNA, 100 bp, Homo sapiens
tgatgatggctccttcagcgacaatctttatcctgaggacatagtggaggatggcagactgtcagtatcatacataacagaggaatgcctgaagaagctg

SEQ ID NO: 213939 - DNA, 82 bp, Homo sapiens
ccaaggaccccaagctccgagaagaccggcggccaatcacagtccactttggacagtaagactttgaccccgacgcaggctt

SEQ ID NO: 213940 - DNA, 100 bp, Homo sapiens
caaccttccctgagagccatcttcggactcctcagatgccaccaacaactccatccagcagtttcttcaccaagatgcctgtgaggagccaccaacattt

SEQ ID NO: 213941 - DNA, 98 bp, Homo sapiens
acggacatgcgcgggagggcgccgcggggcagccgccgctcctccggggagctatgaagacatgattggtgaggaggtgccatcggatcaatactact

SEQ ID NO: 213942 - DNA, 100 bp, Homo sapiens
cggagaccagacctactgcagccacgcgggcgagcggctgtgtggatgtcggcgaagccgcgggcgaggtttacccaaggtccagcctagcccctaggca

SEQ ID NO: 213943 - DNA, 97 bp, Homo sapiens
accaaggatagccaatcggaccaaaaattcactcactttgcaatggaagttgctttgaattacggaatttataagcaggatctcccaagcctggatg

SEQ ID NO: 213944 - DNA, 73 bp, Homo sapiens
ggagcatgatgagctgagcttcaaggctggaatggaagttggatacactttgtgacttgtacgagacactgac

SEQ ID NO: 213945 - DNA, 100 bp, Homo sapiens
tacaatctaagaaggatttcagcaaatttggagcaggagctccttaataagcatttatagtcagtttttggcagcaatagaatcactaaaggcattctgg

SEQ ID NO: 213946 - DNA, 83 bp, Homo sapiens
ggacggttttcgtacgggcggccgtgcgcgaggcgagtgccgtggaggtcccagcccccgctgcggttctcggaggtccggag

SEQ ID NO: 213947 - DNA, 75 bp, Homo sapiens
caccgcggtgcgcaagcgcaaccgtcggtgggtcggggatcggtcgcctgagaggctcttgtcaggatggtgaag

SEQ ID NO: 213948 - DNA, 100 bp, Homo sapiens
ggccgccttccctctcgcccacctctacccggcagcgggggcagtcagagcggagccaagatgcgaatggggtttaaacttacacgaatcgctttctgga

SEQ ID NO: 213949 - DNA, 97 bp, Homo sapiens
tttcctgctggtggcaaccgcctacgagacactcaaggtgcaccgggtataatttcttcaccatatgcaggggctgctggatttgccccagccattg

SEQ ID NO: 213950 - DNA, 82 bp, Homo sapiens
gtcggcttcaaagagaaaaggcaacatcctgtcacaggccatgctctggcaaaaacgattttgatgtagattcccaaatccg

SEQ ID NO: 213951 - DNA, 99 bp, Homo sapiens
aggacttcgcggtgctcactgcagagatcaccagcaagattgcgagggtcccacgactcccgcctggtatcctctggcacatgcaggcctgatgtttca

SEQ ID NO: 213952 - DNA, 99 bp, Homo sapiens
gtgaacgccgcggactccggagccgcacaaaccagggctcgccatgaagccaggaacagatggagtcggataactgttcaggaggagatgatgactgga

SEQ ID NO: 213953 - DNA, 112 bp, Homo sapiens
tggatttctgaggagccgttcgaactgtctcaccacttccctgcagctcccggtcatgtaggtacaacagcaaccaagaagatcgatgtctacctccctctgcactcgagcc

SEQ ID NO: 213954 - DNA, 96 bp, Homo sapiens
ctcagacccgggagcgtccgggacgcggagcccggagctggggcgacgaggcgattgcgggggcctgggctagatatgagggaaggcaccattgga

SEQ ID NO: 213955 - DNA, 100 bp, Homo sapiens
gaggagaatcttcaagaacttcctcgcactgtgacatgtctgatcccttgctcccatccctgcagcatgaacaagttcccagtgacctgacagcagagga

SEQ ID NO: 213956 - DNA, 100 bp, Homo sapiens
attggcaccgagagaccaggactgcaggacagtcggaatccagacgctctgcagtgtcccatcgtcttatgcggatggcggggaaaggcctccattcgaa

SEQ ID NO: 213957 - DNA, 75 bp, Homo sapiens
ttttatggtgtttaatctaatacacttaagctgcagtcccaaaattaggggctcttgattgcggggactaactcc

SEQ ID NO: 213958 - DNA, 75 bp, Homo sapiens
agggcaacgagcacaacaggagctacgaggagttgatggggcgcctacccttcttcagcaagatgggaacagctg

SEQ ID NO: 213959 - DNA, 100 bp, Homo sapiens
tggcactcatgtctcactgccccactcagcacgtggtgaggtgtgtatggcttcccgtggactcagcctcttccccgagtcctgtccagatttctgctgt

SEQ ID NO: 213960 - DNA, 73 bp, Homo sapiens
tgggctttgactgcatcgccaccacaggtgaacctatgggtcgtggaacaaaagttatcctacacctgaaaga

SEQ ID NO: 213961 - DNA, 82 bp, Homo sapiens
ccctctctgtttctccccaaaataaccattctccagatccaggttttgattcccaccatggccatcacccagtttcggttat

SEQ ID NO: 213962 - DNA, 83 bp, Homo sapiens
tggttctcccggcagcagcccgacgcaaaccaaggatctggggatcttcgcactatcccaagctacatccgatactcccagat

SEQ ID NO: 213963 - DNA, 51 bp, Homo sapiens
tgccgaaagagcactggactccggaagtcacccacaaaagctgtatataat

SEQ ID NO: 213964 - DNA, 100 bp, Homo sapiens
ttggagaccctgaacagtcctgcagagaacagccccaatcaccgtccttacacggcctctgatttcatagaagaacatgggcctggaattgatatattca

SEQ ID NO: 213965 - DNA, 75 bp, Homo sapiens
gctgtgatcttgacctcttcttggatctgggtgacttggaagagccccagtttgctattggctccctgatggacg

SEQ ID NO: 213966 - DNA, 97 bp, Homo sapiens
gatcttcggcaccatcggcatgcggcccaacgccaagaacaacggcggcgactggcggcgcgatggacctgaccgggctcctgctggacgaagaagg

SEQ ID NO: 213967 - DNA, 100 bp, Homo sapiens
ctttccagcccgtggtccttctccatattcgagaggtcctgctgtactagccaccaaagcagctgctggtactaagaaatatgatcttagtaaatggaaa

SEQ ID NO: 213968 - DNA, 75 bp, Homo sapiens
ggaacgaatgggacaagatcccgtccatgaatcagacaaatttacatgtattggagaccagaccagaagcccttc

SEQ ID NO: 213969 - DNA, 80 bp, Homo sapiens
ttgaagttggagcgagctctgttggttacagcttctcagtgtcaacagccagcagaagaaaatcctgccttgcttcgttg

SEQ ID NO: 213970 - DNA, 101 bp, Homo sapiens
ctgctggcaggctgccttccctgacccccagttacgcctggaatatgaaggcttccccgtcccgtgctgggcctaaaggagataacatttatgaatggaga

SEQ ID NO: 213971 - DNA, 100 bp, Homo sapiens
attcctggtatagaatccccatttgaacaagcaaagaaggtgataaccatgtttgtacagcgacagctatctcattatcgagagcatttgaacattcagg

SEQ ID NO: 213972 - DNA, 82 bp, Homo sapiens
cttccccccgcgcctctcttcgcctcgcctcgggacccgcggtccccgctcttgctgttgtctatcaacgtctatgactaca

SEQ ID NO: 213973 - DNA, 82 bp, Homo sapiens
acggcaaaggtgtcgtggtggtcattaagcggagatccgctggagaagaagcaggcgctccctccattccagccacagatca

SEQ ID NO: 213974 - DNA, 90 bp, Homo sapiens
ctcctgcctcccagagaggggagccggcgaggatcaaaatcttcgaaggagggcgggccttcgtgaggatgagtacaagccctgaggctt

SEQ ID NO: 213975 - DNA, 100 bp, Homo sapiens
caacccagaaccctggctgaccactttgaaggaggatgctccagcaggttcttctgtgtggcagttcagaatgatggatcaagctagatcagcattctct

SEQ ID NO: 213976 - DNA, 75 bp, Homo sapiens
gcgattctcgtgcctcagcctctccagcagctgggattacaggtacctgtgccgggtggaggagatgcgccagtc

SEQ ID NO: 213977 - DNA, 80 bp, Homo sapiens
ttggggaaagtaattttgtttgccgaagtgacccccacaacgatgcgtctcctggatggagaacggagaccaacctgggc

SEQ ID NO: 213978 - DNA, 100 bp, Homo sapiens
tagaagcacattgtttccagaatgaaaaggtcactgccatctggagtggatggacacacctggttgctcagacaggtctcctctgagcctccggcctcca

SEQ ID NO: 213979 - DNA, 100 bp, Homo sapiens
tagacctgaagccatacaaagtaagctggaaagcagatggtactcgagaataccttctgcctcctgagacacagcctctccatgaggtggtgtacttcag

SEQ ID NO: 213980 - DNA, 100 bp, Homo sapiens
gggaaatctgggattcaggaccgtccaccaccacctcccacccgctgtgtaaacctgggctcggtctggggttcttgcagctggcaccagccctcccggc

SEQ ID NO: 213981 - DNA, 88 bp, Homo sapiens
tggcagtggaaacgccagcatgcactctcgaactccccacagagtacggtgttcaggcgttcgtggcattcagggatgtggctgtgta

SEQ ID NO: 213982 - DNA, 74 bp, Homo sapiens
cgggcctgaggcgaaggagcggccgggagcccgccgcgctggtagcggttctccaaaatacttatcattcaggt

SEQ ID NO: 213983 - DNA, 101 bp, Homo sapiens
ccagatggattcctggaagcttgataagaaactggatcattgcctccctttacatggaaaggaatatacagatgttgccacaggaatctaatctgaaatcg

SEQ ID NO: 213984 - DNA, 100 bp, Homo sapiens
ggctggggttgccggcaccatggagtcaccttttagcccgggactctttcacaggctggatgaagattggggtgaaagtgggagatacattggatcttct

SEQ ID NO: 213985 - DNA, 75 bp, Homo sapiens
cgaagattgacgccagtaagaacgaggaggatgaaggctgtgatgcagatccatccgccctagcaaaatatgttc

SEQ ID NO: 213986 - DNA, 74 bp, Homo sapiens
cccacacgtgttcaatacacctcccacctgtcctcaggcatatcaaagttcattcggctcctaaagaagtagca

SEQ ID NO: 213987 - DNA, 90 bp, Homo sapiens
tggtgggcgcgctggccgcagacctgcacaagccgcagggccgtaggcagccatggcgcccagccggaatggcatggtcttgaagcccca

SEQ ID NO: 213988 - DNA, 99 bp, Homo sapiens
ctcccaccccatccagtggaatgcaccacagccatctcacatttccaagtacattctcaggtggagacctccctggtacctgacagtgtaaagaaggag

SEQ ID NO: 213989 - DNA, 101 bp, Homo sapiens
tggaactgtgcccacaccagaagccatcagcagcaaggtcatttcttcagatagctccccagctgtggaaaatgagcatcctcaaggtaagtttactgaag

SEQ ID NO: 213990 - DNA, 100 bp, Homo sapiens
tgatggcctggaagccaagtgtagaaagtatttcaaggagggagtagtccactatgtcaaatgctgctgggagatcagaatgtgaaaacctttgcatctt

SEQ ID NO: 213991 - DNA, 100 bp, Homo sapiens
gccgaggccggggtcgaaaggctgaggaggcagggggcacccggttggagcccctgaagccacttaagtggtgaccatcatcaaggggaaggtggaggag

SEQ ID NO: 213992 - DNA, 100 bp, Homo sapiens
actggaatcttcttgccatccgcctggccttcgtcattgtgtttgaggactccctggaggaaaagcggaagcggcagcggtctgaacgcctggaacggat

SEQ ID NO: 213993 - DNA, 99 bp, Homo sapiens
ttgtgaagttaaaggaaatccaaaacctcatatcaggtgcgttgtagaagacaagaactcaaaggtggcctggttgaaccgttctggcatcatttttgc

SEQ ID NO: 213994 - DNA, 90 bp, Homo sapiens
ggggagagcggccgccgccgctgccgcttccaccacaggttgtctgcattcaaaagagcattctattaaagctaccttaatttggcgctt

SEQ ID NO: 213995 - DNA, 75 bp, Homo sapiens
gctggaatgaagaagataaatgcttgctgcataaagtttgtgatacaggaaaagaagatatgcttcttaaacaag

SEQ ID NO: 213996 - DNA, 90 bp, Homo sapiens
ttcatctaccatctgccccaggagtttggggacgctgagctgatgcagatgttcctccctttcggcttcgtgagctttgataacccggcc

SEQ ID NO: 213997 - DNA, 100 bp, Homo sapiens
ctgcggatgatctgacgccatctgtgacttcccatgaaacttctgatttcttccctaggcctttacgattcgtcattgaattttgagaagcattctgaaa

SEQ ID NO: 213998 - DNA, 75 bp, Homo sapiens
cttttcggtctgattctgctgtcttgctaaggctggaccagaccctgagtgtgcgaggggaagatattggtgaag

SEQ ID NO: 213999 - DNA, 95 bp, Homo sapiens
aaaagggacgtaggaagaagggcaggacctgggcggaggccgccaagacgcaaagaatggctcaagaagtactgacacatttaaaggagcatcct

SEQ ID NO: 214000 - DNA, 100 bp, Homo sapiens
ccgccgaggatgcgacgcaccgcaggccgccatggcatcagatgaaggcaaactttttgttggagggctgagttttgacaccaatgagcagtcgctggag

SEQ ID NO: 214001 - DNA, 75 bp, Homo sapiens
gagagaggtacctctccttttccctctccctttccctaagggccatgtttatgagtggactaagtgaaagcaaac

SEQ ID NO: 214002 - DNA, 75 bp, Homo sapiens
gaacaggcgccttcaaaagcccacttggcgatgggttacagtaagaggtatgacctcacggaagatgggacgagg

SEQ ID NO: 214003 - DNA, 100 bp, Homo sapiens
cgcgagcgctgggcgggtccgcggcgcggtcggtcggcgcctgttctcgggctgtttggcggggtccgcaagcaggtggtgaacatcccgtccttcattg

SEQ ID NO: 214004 - DNA, 76 bp, Homo sapiens
cttcggaagcccgttcggcctggaggagccgcagtgggtcccggacaaggaggaccttttaccaatttgaggctgc

SEQ ID NO: 214005 - DNA, 100 bp, Homo sapiens
caagagcatcacgctgccccccgacgagatcttccgcaacctggagaacgccaagcgcttcgccatcgacatagctgcggataaccgtctggtccttgtg

SEQ ID NO: 214006 - DNA, 83 bp, Homo sapiens
gagctctggacaagctggaatgcatccaagagaatccctcaacatgctgacaaatttacatgtattggagaccagaccagaag

SEQ ID NO: 214007 - DNA, 83 bp, Homo sapiens
gcaggccactcatgatcatgaggctcgattccttttgtccaaagtgaacccatctcagacacacaataacctgtatgcttggg

SEQ ID NO: 214008 - DNA, 100 bp, Homo sapiens
tttattagatggtgacactgcagttggtgatgtccttgttgctgtgaatgatgtcgatgttactactgaaaacatcgagagagttctgtcttgcattcct

SEQ ID NO: 214009 - DNA, 100 bp, Homo sapiens
tctacgacgccctggagagaccgcggggctgggcgctgctttaccacgcgttggtgtcaccgaggaggagcccagctccaaccacacggtcatgatccag

SEQ ID NO: 214010 - DNA, 75 bp, Homo sapiens
cactcgaaacagccctgtgtttgagctccttccctgggattctcattctgtctcccatgctggagtgcagtggcg

SEQ ID NO: 214011 - DNA, 75 bp, Homo sapiens
gggatttcatctggtgtgaatgacacctctctactatataacgacacatttgaggatgttcgtgatgctgaagac

SEQ ID NO: 214012 - DNA, 74 bp, Homo sapiens
gagatgtgatgttggagaactacagaaacctggtctccctaggatttacttcatttgggtcactaggtcacggg

SEQ ID NO: 214013 - DNA, 96 bp, Homo sapiens
ggcatgggaccacttcacaaaagcccagcggaagaacatcagcgtgtggtgcaaacaagctgagatcatatactcctatgaaaggaggaatctcca

SEQ ID NO: 214014 - DNA, 100 bp, Homo sapiens
gagcacctgcctcacataggtgtaggtatagtggaggattacaagccaccgttctacgatgtggttcccaatgacccaagttttgaagatatgaggaagg

SEQ ID NO: 214015 - DNA, 83 bp, Homo sapiens
cgacaagccgctggcagccgcggatctcaccgccgctcagggtgcctacctttgcccgtcgttccaatgtcctgaccggcctc

SEQ ID NO: 214016 - DNA, 74 bp, Homo sapiens
tggaacagcagcatcattgtcaaagacagtgacaataccctcccctcccttgggctggacccctctctacagct

SEQ ID NO: 214017 - DNA, 82 bp, Homo sapiens
gctgaacggatggctgagggagccccgcggatcgtttaggaaagccggccagagagtaaaacttgtctcggcacagagtcaa

SEQ ID NO: 214018 - DNA, 75 bp, Homo sapiens
agtgcagcgcggagtgggcgatgccagcgtgccaggtaaactgtcttgagccccaccctcacctgcctgtgctgg

SEQ ID NO: 214019 - DNA, 88 bp, Homo sapiens
gtggagatatggcgcaactgcggcgccctgcctgctccgcttcagcggactctcgctggtctacctgctcttcctgctgctgctgccc

SEQ ID NO: 214020 - DNA, 100 bp, Homo sapiens
ggatgggggcctcgggcgccccgcagccccccaacatcctgctcctgctcatggacgaccctgcctgctccgcttcagcggactctcgctggtctacctg

SEQ ID NO: 214021 - DNA, 100 bp, Homo sapiens
ctgctgaggagaggagcgtcaacagcagcaccatgggtctcagtggcccttagcagcagctccattcgtgtggccatgctggaggaaaatggggagcgcg

SEQ ID NO: 214022 - DNA, 102 bp, Homo sapiens
tcctgcctgaggaacggctgggtgtgggacaccgtgggctgcgtgtgggacgggtttagcggcagcctcttcgtttccaggaatatggatctactggaacag

SEQ ID NO: 214023 - DNA, 74 bp, Homo sapiens
gatggagcaaaaccactttccctgaaatccgacactactgattctagtcaagtgatcgaactgtgagaatttgg

SEQ ID NO: 214024 - DNA, 75 bp, Homo sapiens
agagactgcagctgccatcgaagaggaggtccagggagtcggtagtaagggatggcgggacgtcaccaccttttt

SEQ ID NO: 214025 - DNA, 50 bp, Homo sapiens
ctttgcaacagaattacagagtatgatctttgtgacaacaaactgtgctc

SEQ ID NO: 214026 - DNA, 76 bp, Homo sapiens
ctcctgagagagctgactggtgaggatgtgttggtcaggtaatacgaggaaatagtatcatcatgttagaagcctt

SEQ ID NO: 214027 - DNA, 80 bp, Homo sapiens
acttaaaaagcagtctaaacctgtgaccacccctgaagaaattgcacaggttgttgatcattatgaaaatcctagaaacg

SEQ ID NO: 214028 - DNA, 75 bp, Homo sapiens
cttggaactcctttataagtgtcagctgtgaggttggtgggacaagtgatgttgaagtgaatgaaaagaaagaca

SEQ ID NO: 214029 - DNA, 135 bp, Homo sapiens
ccagcctgggtcaaagaagtcaaaggggctgcctggaggaggcagcctgtcagctggtgcatcagatcacgaggaatacaacaccaatgtatagaacaccagaaatcatagacttgtattccaacttcccgatcg

SEQ ID NO: 214030 - DNA, 100 bp, Homo sapiens
aggaagatgcagagacgccacagcagcaacacggataacattccacctgaaaggagttcaaagaaggacgcagagccagccacacagccccacaggtcct

SEQ ID NO: 214031 - DNA, 100 bp, Homo sapiens
gcattgacatttaattttagggtcctttatatagaagggagagtaggctactgtggagccgatatcaaggccctgtgcactgaagccgccctgattgcac

SEQ ID NO: 214032 - DNA, 50 bp, Homo sapiens
tctgggtccagccccttacttaaaggttgtccaagcaaacacagtggatg

SEQ ID NO: 214033 - DNA, 102 bp, Homo sapiens
cgaagaaggcgagcagggtgcgggagagccccttgcagaagacgccgtacgagccctgtatgatgagattcgtcagtttcgcaaggcctgtggggaggctca

SEQ ID NO: 214034 - DNA, 100 bp, Homo sapiens
atatcttgatccgtccttttttcaacatcgggaaaatcttaaacggctaagagacagcatcacccgaagacagagagagaagcaaaaatcaggaaagcag

SEQ ID NO: 214035 - DNA, 75 bp, Homo sapiens
cagagacagaaatgttgatgtggtacttgaagacacctgtactgttgttgttcaggggatgaaggaagctcagga

SEQ ID NO: 214036 - DNA, 88 bp, Homo sapiens
tcgaaccccgggacacgcaggaacggctccagcatcaagatccgtctgacaggtgatgatgaacagtctacacagatggctgcaagtt

SEQ ID NO: 214037 - DNA, 100 bp, Homo sapiens
tccaggtccctctgccctttctccgggatcatcagaggaaatagttgcatactcgctgatgaaatgggccttggaaaaacaatacagacgatctcatttc

SEQ ID NO: 214038 - DNA, 100 bp, Homo sapiens
aatgcagattctagccaacataaaggagtcacagatgctgggaagtatggcccgaaagaaacctcgaaatacctcaaggttgcccctggctttaaacccc

SEQ ID NO: 214039 - DNA, 82 bp, Homo sapiens
cgacaagccgctggcagccgcggatctcaccgccgctcaggagatgccctgtatccaagcccaatatgggacaccagcaccg

SEQ ID NO: 214040 - DNA, 90 bp, Homo sapiens
cctcccgcccgcaactccgccgcccaccatggcttccgaggagctgtacgaggatttggagttccatggagtgatgagattttattttca

SEQ ID NO: 214041 - DNA, 75 bp, Homo sapiens
tcactccccaggattatgcgcggatgagcaattcttaggttttggctcagatgaagaagtcagagtgcgaagtcc

SEQ ID NO: 214042 - DNA, 82 bp, Homo sapiens
cagggagtgctctgttcacggctccatcgctgttagaaaatatatgcagatgatgaacattcttaagccaattgcctttgat

SEQ ID NO: 214043 - DNA, 114 bp, Homo sapiens
catctcgctcggctgcgggaaatcgggctgaagcgactgagtccgcgatggagtgaggatgaggatgatgaccttcagtatgccgatcatgattatgaagtaccacaacaaaaa

SEQ ID NO: 214044 - DNA, 90 bp, Homo sapiens
ccagcaccgcacgccctgcaagggaggcggccttctgatctgtttaccacgtgagcaagcagctcggttctgtgcagagataaagtcccc

SEQ ID NO: 214045 - DNA, 90 bp, Homo sapiens
tggagggagtggacatcagccccaaacaggacgaaggcgtgctgaagttccagggtctccctccactgctgtagtaacccgggtccgggg

SEQ ID NO: 214046 - DNA, 100 bp, Homo sapiens
tcgaacttacactgaaactgtcaaccatcactacttgctctttcaagacacagatttggtccagcagactctggaggcccgagcagctgctgcagccaca

SEQ ID NO: 214047 - DNA, 122 bp, Homo sapiens
ggagcctcccctgcagcgactcggaagattcgaggcggcgggggacaagtcggcgccccagagcggacgaggtgtggccgacgacgatgccctcgctgaggagcgcatgcggagaggccaga

SEQ ID NO: 214048 - DNA, 90 bp, Homo sapiens
gaagcctgcacctgctgcattgctgttttcctgattcccaaatgctggaaaatcctctttgctaagttgtgtttctcatgcaaaacctgc

SEQ ID NO: 214049 - DNA, 90 bp, Homo sapiens
cgtatgtgcacagaggacctgcccttcccaccagcctacccgttccatcccgggctatcccagttccccactgccagggaaccccacgcc

SEQ ID NO: 214050 - DNA, 75 bp, Homo sapiens
gtggacatgcgcacctcacacagttttacagctcccagcacagtaggaaagagaaatttgagtcctagtcaagag

SEQ ID NO: 214051 - DNA, 50 bp, Homo sapiens
ccatgaccttatccagaaactctctcctagcagagaggagccttcagggg

SEQ ID NO: 214052 - DNA, 83 bp, Homo sapiens
cgggaacgcgggatcctggggaggtgagaagccctaccactgcaactgggacggctgcggctggaagtttgcgcgctcagacg

SEQ ID NO: 214053 - DNA, 75 bp, Homo sapiens
ggatgacgaaaactggatatacagagcccagcccagaaaagatattgttaatcctgccagtctttctcttcaagc

SEQ ID NO: 214054 - DNA, 98 bp, Homo sapiens
ggcaagaaaaatgccagccagaagaggcgttcgctgcgcgtgcacattccggcttcattccagcgctccaatagtcatgacaaagtaaggagaatagt

SEQ ID NO: 214055 - DNA, 80 bp, Homo sapiens
gccccggcgcaccgactggaccgggaaggagcatcccaggacctaccagaatctgcaaaacaagctatcgatcagggaag

SEQ ID NO: 214056 - DNA, 90 bp, Homo sapiens
caaagtgtgaccagtgtggaaacccaaagggatcaagcatgaattgcaagcaaactgctacgaggaggtcaaggaccgctgcaccctggc

SEQ ID NO: 214057 - DNA, 76 bp, Homo sapiens
gttacctatgtacctgttaccactttcaaaaaatgaattcccagttcctgagcagttcaagaccctatggaacggg

SEQ ID NO: 214058 - DNA, 81 bp, Homo sapiens
atagtctccagcgggcctggactgtgggctggtgtgtggaactggcagcctggcatcctcgctacaacctcattgttgtgg

SEQ ID NO: 214059 - DNA, 81 bp, Homo sapiens
gcgtcccggagcctggccagctgcacttcaaccagtgctgcttttgacacaaaaacggggttacgtgtggcagtgaagaag

SEQ ID NO: 214060 - DNA, 100 bp, Homo sapiens
gtatgagcgcccctcgccaccccgtgtcccaggcccggcctttctgacaagagccgcctgtcttggttagatggctctggattaggattctcactggaat

SEQ ID NO: 214061 - DNA, 82 bp, Homo sapiens
cctgtgccttcatgtggaaaagtgtgcggcaagcctctgccttgtggttccttaggtgaaaagctcttaccgaagcaacaaa

SEQ ID NO: 214062 - DNA, 75 bp, Homo sapiens
aagaaacaatgactatgattcttaagatgtcccggagccgtatcaatgatgctttccgtctgaatgacaacagcc

SEQ ID NO: 214063 - DNA, 119 bp, Homo sapiens
cgcagatcagaggtagtcggacctttcccgctggcgcgcagcctcagctaggaattgtcttagaagaaagaaggcaagccaccattttacccacgtaaatatatgaatatatttctgac

SEQ ID NO: 214064 - DNA, 101 bp, Homo sapiens
gaagaagactcccccacatctgggatttgcagatttacagaatggctgcacattaatggaaagagaagcataaacctatcttctttcattatggagggagg

SEQ ID NO: 214065 - DNA, 90 bp, Homo sapiens
cccgccagactacggcttccccgaacgcaaggagcgcgatgctgcgctcggtcttctcctcggcgttcggggtgcttggtgccatctact

SEQ ID NO: 214066 - DNA, 100 bp, Homo sapiens
cccggccaagctatcttctcgctagcagatgaggtttatataactttccaagacaaggaagttgtgcaaagcctcacagctactaagaggctgggctggg

SEQ ID NO: 214067 - DNA, 83 bp, Homo sapiens
gccgcccgtccacacccgccgccagcttgttctaaagacgaaggggaactccctagtgctacaggctgtttcaggaagccaat

SEQ ID NO: 214068 - DNA, 101 bp, Homo sapiens
cctgctgtacaccctcaacaaacaccagcgctttgggtgaaaggtgtagcagtcactcggcctacacccacagcatcgaccttgtgaacccagcgacctga

SEQ ID NO: 214069 - DNA, 82 bp, Homo sapiens
tgcagaaataccagtccccagtgagggtgtacaaatacccctttgaattaattatggcttactatactggcaattgctggag

SEQ ID NO: 214070 - DNA, 50 bp, Homo sapiens
gaaagatgaaacttcgagctcctctgagacattttaaatccaaaggatgt

SEQ ID NO: 214071 - DNA, 75 bp, Homo sapiens
agagttagtttaataaaacagagggaatctacgttaggtatcatgtatcggaattgaagccattttttatgaagg

SEQ ID NO: 214072 - DNA, 141 bp, Homo sapiens
ctggtgtatttggacctgtcatctaataaaattcgtagcttacccgcagaactcggaaacatggtatcactcagtgtaatttcacaagcccctgactctgtgtagacacccagctctccagaaaaatgctttgaagacaaa

SEQ ID NO: 214073 - DNA, 77 bp, Homo sapiens
gaggagtctccaggagacccggggacagcatcgcccaggcccctgagtatttggagctggttatccaagtctgccaa

SEQ ID NO: 214074 - DNA, 75 bp, Homo sapiens
ccatggaaacaggaggaagaattcccaagccaaagctttccagaaataagcgggttttgaaaacaaaaaaaagaa

SEQ ID NO: 214075 - DNA, 100 bp, Homo sapiens
ggggatcaaagagcagtgggggttgctgacccagaggagagttctccaaacatgatcgtttactgcaaactgcagggaagtcaacatttgtgaatatcct

SEQ ID NO: 214076 - DNA, 75 bp, Homo sapiens
atctccgccctggggtcattgtcaggccaagacccatgttcttgacattgagcagcgactacaaggtgtaatcaa

SEQ ID NO: 214077 - DNA, 89 bp, Homo sapiens
tgcagacaaagcacacgattgctgggcactgtggctcaagagaaggaggagatggagttcaaagaaggacgcagagccagccacacagc

SEQ ID NO: 214078 - DNA, 101 bp, Homo sapiens
cctgtttgagaaaaggcctaagaattttggcattgacatgttagtgtgtctggtttctatggatattcagatgtttggccctgatgcactagctgcggtaa

SEQ ID NO: 214079 - DNA, 82 bp, Homo sapiens
catgggctggacttagatcagatcaattagccaagtacatcgtgcaagtggatggtaagatagggctgttccgaggcctgag

SEQ ID NO: 214080 - DNA, 101 bp, Homo sapiens
cagcttctacagcaacaacacaaaatcaatttgctccagcaacagatccaggactttatggacagcagcctgctaaccaagtcatcattcgagagcgctat

SEQ ID NO: 214081 - DNA, 144 bp, Homo sapiens
cctccagggtagcggctaccggagcgctgcagggggctgcgcctgcctgctccgccccagacctgtcggcgaaagggaggcagacagtggggaggaagaatgccggtcacagcccaggaggtatgtttgttcattatatcctac

SEQ ID NO: 214082 - DNA, 98 bp, Homo sapiens
ctgcccagcggcctcacgctgtaaccctctgctgggtgtggggctggcctcgctcgtggcacctctgctgatctcacaggccatgggactggccctct

SEQ ID NO: 214083 - DNA, 75 bp, Homo sapiens
ggcggcggcgccgggcccgggggtggtgacagcaggtctgaggcaagttaggaaatcaacattgaatcccaatgc

SEQ ID NO: 214084 - DNA, 96 bp, Homo sapiens
gtgatgttggagaactacagccacctgatatcactgggccatttcataattctgaatcatgtctgataacggagaactggaagataagcctccagc

SEQ ID NO: 214085 - DNA, 75 bp, Homo sapiens
gcttccttatgaactgactgaaggggacatcatctgtgtgttctcacaatttatcgaggtgtgagagtcggaggg

SEQ ID NO: 214086 - DNA, 82 bp, Homo sapiens
ctccatagtcaccacttcacttcacctctttctggaaaccaggtgaagagatacctgtggcaacatctgaaaaaacacgtgg

SEQ ID NO: 214087 - DNA, 82 bp, Homo sapiens
cgcccgcggcgcgggactccatcgtcagtgagagggtccaagcctggtaagaatgtccagcttcaggagaatgaaatcagag

SEQ ID NO: 214088 - DNA, 96 bp, Homo sapiens
gccagtgctgggtcttcgccgccgtggcctgcacagttgctggttgagaagacaactgactccccggcggctgagttctcgctggtggaggacgtg

SEQ ID NO: 214089 - DNA, 90 bp, Homo sapiens
ctgccacacggcctgcactctgcgctttgagctactgggctgtgagctgaacggtcctcgcaagggccgagaggtgtaccggcatttcgg

SEQ ID NO: 214090 - DNA, 74 bp, Homo sapiens
cttcatcaacgatatatgtcagatctaaaggtgcgggagtatgagttaagaaaaaacaacttctcagatactgg

SEQ ID NO: 214091 - DNA, 107 bp, Homo sapiens
catggacccctcgcgagccatccagaacgagatcagctccctcaaaggtgagaagccctaccactgcaactgggacggctgcggctggaagtttgcgcgctcagacg

SEQ ID NO: 214092 - DNA, 82 bp, Homo sapiens
ggagagagcgagctgagtggttgtgtggtcgcgtctcggaaaccggtagcgcttgcagcatgctctctgatccttctgactt

SEQ ID NO: 214093 - DNA, 101 bp, Homo sapiens
gcggcgtcgagaggaccatcctgggtgctggccctgtgctggagatatcactcaccccatcccagacttgactggctacattacagaggggcagatctatg

SEQ ID NO: 214094 - DNA, 98 bp, Homo sapiens
ggccatggtctacccgccgcgggaggtgtgtggtgccggcactgcggccatcttgcagttcctctgcaaagaaatggaatctatttggaatttgcaga

SEQ ID NO: 214095 - DNA, 90 bp, Homo sapiens
tggcgcggcccctagctttctccttctggtgtggggcccgagcttagaccatgctcagcctccaagcagccttgtcatcgacaaagaatc

SEQ ID NO: 214096 - DNA, 100 bp, Homo sapiens
ttgaagttattaaagtctgttggtgcacaaaaagacacttatactatgaaagagtgggaaaagcaaggatgaacaatttgcagttacctcaacatgaagc

SEQ ID NO: 214097 - DNA, 88 bp, Homo sapiens
agcagttcagaagagccaaggaataaacatgcaatgaacccaaaagggtggaagatgaaactgttttacataacattccttatatggg

SEQ ID NO: 214098 - DNA, 100 bp, Homo sapiens
tcaacatggaggcggaggtcgataagctggaactgatgaaaataaacagagttgtctttgttggaaactttttacgtgtcaataccctctcaatgaaact

SEQ ID NO: 214099 - DNA, 75 bp, Homo sapiens
acttgcagagggaatctggtcaaacatggaatggggttgtcggggccaaagtggtaacgaacgcccgcagcccgg

SEQ ID NO: 214100 - DNA, 50 bp, Homo sapiens
gacaaagcctcttctgtttccaatgggggatcgcttacacctgagacgaa

SEQ ID NO: 214101 - DNA, 97 bp, Homo sapiens
tggttttaagtgtagttgccgacgcaatggcagcctttgcagtggaacctcaggggcccgcgttaggtctaccccgagccccggagcgagagcgagt

SEQ ID NO: 214102 - DNA, 121 bp, Homo sapiens
cctctggtcttccctgaccccgcggccggacgacccaagcccgctgagcaggatgaggatgccttcaattaagttgcagagttctgatggagagatatttgaagttgatgtggaaattgcc

SEQ ID NO: 214103 - DNA, 113 bp, Homo sapiens
ctcaagttggagaaaggcgaggagccatggatattagaggaaaaatttccaagccagagtcatctgggtctaccaggtccagaaggtcctccaggtctccctggaaatggagg

SEQ ID NO: 214104 - DNA, 97 bp, Homo sapiens
tgaagaaaatttgccgaaattatttgcgcatttcaagaagaacaacctaactccagatatctacctaattgattgctttgtctcctcagcactctgc

SEQ ID NO: 214105 - DNA, 110 bp, Homo sapiens
cccatctcattgccacggctgaaccctccttctcaatcttggaacagcacccccttctttaaggctttggtcttctctccagacccactgctgctctcaaaacaagtgta

SEQ ID NO: 214106 - DNA, 82 bp, Homo sapiens
ttcctggcctgggcgctccggtggcggcggaggaaggaagcagccaccctcgccatggcctccccgcccgcctgcccctcgg

SEQ ID NO: 214107 - DNA, 90 bp, Homo sapiens
cgaacattgtttaccttggaagaactccgtgcccagatgctcataaggattgtcctctttctacaaaagtttttcagttatgggacaaaa

SEQ ID NO: 214108 - DNA, 88 bp, Homo sapiens
gtgataagcttcgaatggacagagccatccctgacacccggcatgaccaatttagtacctcaagacaaactcttatgtggattccaga

SEQ ID NO: 214109 - DNA, 82 bp, Homo sapiens
aagtaaataatccagatcattccacttaccatgatttcgatgatgatgatcctgagacacagcccttgacgtagcagtaaaa

SEQ ID NO: 214110 - DNA, 100 bp, Homo sapiens
aaaacgtaatgaggatgaagattcaccaaataagctatatactttggttacctatgtacctgttaccactttcaaaagcatcaagcatgatggaaccatg

SEQ ID NO: 214111 - DNA, 100 bp, Homo sapiens
gaccatggcggagccgcctcgggtcagagacgagcagcaccagtgttccctggggaacctgaaggtccccctcagccagctgctcaccagtgaggacatg

SEQ ID NO: 214112 - DNA, 82 bp, Homo sapiens
gcgcacttcgtcatgttcttcgcgccctgccactcatctctgcccagctgctgccctccccaggaggcctccatggcttcac

SEQ ID NO: 214113 - DNA, 75 bp, Homo sapiens
ctctacaggtccctcctcgttagtatagtggttcgatacaagaggctgttttcctagcgtggcttgctgcctttg

SEQ ID NO: 214114 - DNA, 100 bp, Homo sapiens
cagcaatatctctgggctttcacagtggaagagaaagccaatacccacctcctcttgggcatgtgcttagacgcctgtgctcgctaccttctgttctcca

SEQ ID NO: 214115 - DNA, 80 bp, Homo sapiens
taaatgttctggttttaaaaaatacatatctggttttgtattccctgggcctccgatttgcagttccacgtcttgagaaa

SEQ ID NO: 214116 - DNA, 50 bp, Homo sapiens
cggcgtttcacggtggcacatacatggtggcacaagaatggctcaactct

SEQ ID NO: 214117 - DNA, 100 bp, Homo sapiens
gtattccaaagggaactgaaattactattgcctttgattttgactatggaaattgaagtatgatgggcatcttccaatagaaataaaagctgttcctgag

SEQ ID NO: 214118 - DNA, 98 bp, Homo sapiens
tggtattcaacaaataattgagtgctttcgatcaggcatgtactggcattgaaaacattgacgaagctattacattgcttgaacaaaataattgggac

SEQ ID NO: 214119 - DNA, 129 bp, Homo sapiens
tgccatgaaactacttcgtgtcctggcctcagctgggaggaatattgctgcccggctgaaacgttcagtgcctgtagccactgtagaactggaagaaaagaggttcagaactctgcctttagtgccaag

SEQ ID NO: 214120 - DNA, 50 bp, Homo sapiens
actcgatccgcctgcctgcgcacctgctgtttctgaaagatctatccagc

SEQ ID NO: 214121 - DNA, 100 bp, Homo sapiens
taccaggcccaggagaggaagacccagtacagctggacgtttgccgtccactctgagctggtcagtgagaaggtcggaggggccgaggggaccaagctgg

SEQ ID NO: 214122 - DNA, 74 bp, Homo sapiens
gtcaacgttctctcctgctccacgggcggactactggaagtcacagccaaagaaattctgtgattactgcaagt

SEQ ID NO: 214123 - DNA, 90 bp, Homo sapiens
cagaatggcagcgttaaaagccaagtataccttgctgcatgacgccgtgatgaggacctgcaaatgcaactggttgatcctgaagacata

SEQ ID NO: 214124 - DNA, 100 bp, Homo sapiens
actgaagaagatggtggataagcccacccagctccttgctcggattgaacgtatggaaaggcggatgcagctggtaaagaaggataacgagaaagaaagg

SEQ ID NO: 214125 - DNA, 90 bp, Homo sapiens
tcctgcctcagcctcctgagtagctgggactacagctccgacagttagttaatatgtgcatcaacccagatccagagaagcgaccagacg

SEQ ID NO: 214126 - DNA, 100 bp, Homo sapiens
aagatgcagatgagaaggttcagttggcaaaccagatatatgacttggtttctaagcatgaattgaggaacagaagaagcagagcagatgatcggagcag

SEQ ID NO: 214127 - DNA, 75 bp, Homo sapiens
ccggagggaggatgttaaagccccgcggagacccggtgagcctccattgataaaaggttggcttccttatcttgg

SEQ ID NO: 214128 - DNA, 90 bp, Homo sapiens
tctacaggaacacgaggaaactccacccatgaaccagagaatcagtcagagtgctccagtgaaacagccaccacccctggctccccagag

SEQ ID NO: 214129 - DNA, 50 bp, Homo sapiens
cgcagtggtcgcttcttctccttggaagcaaatgtcacccttatagtgat

SEQ ID NO: 214130 - DNA, 75 bp, Homo sapiens
tgtttctgcatagaaacagatttcttatgatctttccatttcagtggcaatgcccatatattcccctttgtcctc

SEQ ID NO: 214131 - DNA, 100 bp, Homo sapiens
aacattggaacttagtgttatgccaaaagatgaagacattctccaagtggttatctgggaacaaagcaggacaagtctgggcacctgaaggatctactgc

SEQ ID NO: 214132 - DNA, 100 bp, Homo sapiens
gagtttgttgaagtgggaagattggggccttctgattattttgatgctggatcccctgagcagtgcagaaaattccttgtctggaagctgccaatccttg

SEQ ID NO: 214133 - DNA, 75 bp, Homo sapiens
gactaatctgatcgggtcttccttcatagaaagcttcttgctatctacctccaccatgatgaaagtgtgttaacc

SEQ ID NO: 214134 - DNA, 98 bp, Homo sapiens
cttggttaacttgggagaaagtttcatctgtggatggagtattggttcaagctgaagttcctggatctcccatatttgtgatgagactagccaaacaa

SEQ ID NO: 214135 - DNA, 75 bp, Homo sapiens
ggaagcggatcgcgtggagtgaaggtcacgccgcggcgccaccttgcagagtgaagtcaagcccatcctagagaa

SEQ ID NO: 214136 - DNA, 87 bp, Homo sapiens
atggcatttacagaaagagtcaacagcagtggcaacaggtgctgcgataagcggttgtggacccgcattgacctgaaccactgcaag

SEQ ID NO: 214137 - DNA, 74 bp, Homo sapiens
gttaacttttttgctgcaatcacaaaggaaagccctgagaaactaccagaacggggtccctggggccagtgttg

SEQ ID NO: 214138 - DNA, 100 bp, Homo sapiens
ttacttttaatcatctttattatctcattgaagcttggaattacatagctggaaaggatcttacaggaatggccaacctgctgacgggccccaaacggaa

SEQ ID NO: 214139 - DNA, 82 bp, Homo sapiens
gtcgcggtgggtcctcgcttgcagttcagcgaccacgatcccagatgcagtgactggttactacctgaaccgtgctggcttt

SEQ ID NO: 214140 - DNA, 75 bp, Homo sapiens
gaagaggtgatgatagctttggagacagccgagacgcatccagagctttcgtgaccggggactgttctgaagcag

SEQ ID NO: 214141 - DNA, 74 bp, Homo sapiens
cgagaggtgcgggcgcggctggcggccacgcaggatgctttcattggatttggaggaaatgtgatcaggcaaca

SEQ ID NO: 214142 - DNA, 100 bp, Homo sapiens
tcaaagcccacagagcagtgcttgctgctttttctaactatttcaagatgatatttattcaccaaacaagagctctcgatgttctgaagtatgaggaagt

SEQ ID NO: 214143 - DNA, 75 bp, Homo sapiens
cagctacggactgggttttgtggccagcggaaggtggtgaaggcatttgtggtcctggcctcgcagttcctgtcc

SEQ ID NO: 214144 - DNA, 90 bp, Homo sapiens
atcgacggcacctcgggggccacactgcaggcctccgcgctcagtgatatgttccatttaaggctctgaagatggggagagaattctgga

SEQ ID NO: 214145 - DNA, 124 bp, Homo sapiens
ggcagcatggcgtccgtgacgctgagcgaggcggagaaggtgtacatcgtgcatggcgtccaggaggagatgaccgccgggttctgctatggcacatggaacaagccatccactccagggtcaa

SEQ ID NO: 214146 - DNA, 100 bp, Homo sapiens
atctacaaccctgaagtgcttgatatcacagaggaaactctgcattctcgcttcctggagcaacagcggcgggagcgggagcagcggaagctgcaggaga

SEQ ID NO: 214147 - DNA, 75 bp, Homo sapiens
gaagtacatgaactcagggccggttgtggccatgtgggctcgggatgagtttgaaggcctcttcaagcagccagc

SEQ ID NO: 214148 - DNA, 88 bp, Homo sapiens
tcttgctggaagtgaaagaactaaccggaccagagcagaagggaacagattacgtgaagctgctctggacatcctgagcccaagtccc

SEQ ID NO: 214149 - DNA, 74 bp, Homo sapiens
gctgcagaagcagaagcgtcccgcgaggcccgcgccaagttttgggaggtgatcagcgatgagcacggcatcga

SEQ ID NO: 214150 - DNA, 100 bp, Homo sapiens
ggagagctgcaagccggtgcagcagccttcagcttttggcagcatgaaagttagcaggctacaggggaagaattgaaagtgaaggcatacctaccaacag

SEQ ID NO: 214151 - DNA, 100 bp, Homo sapiens
gcaaccttgatgaacagctcaaggtctttgtgtcccgacactctgccaccttctccagcattgtgaaagtactcctacgaggggaacgatgtcagcgacc

SEQ ID NO: 214152 - DNA, 100 bp, Homo sapiens
cgagaaactggacaaccaacggctcaagaatttcaagaacaaaggccgcgacttggagaggagaacatctgtgagtcgtgcctttcccctattcttccat

SEQ ID NO: 214153 - DNA, 100 bp, Homo sapiens
gaattcctgtccttactccctctttaagattgcgtacccactgcagagtgctgaagacggggtagccacgaggcgttcccacagctgtgcagaacttagc

SEQ ID NO: 214154 - DNA, 95 bp, Homo sapiens
ggcacccattcattatgcatgctggaaacagagcaaatgcagcgttacaatcaaagacttattgaggaattgaaaaacagacagactcaagaaag

SEQ ID NO: 214155 - DNA, 100 bp, Homo sapiens
tgagctaaacatctaactagaagggatacccttccatttcaaagaacagaatgctaaggaagctgtggcaagaattacatgaacgacagccttcgcaccg

SEQ ID NO: 214156 - DNA, 98 bp, Homo sapiens
tcaaagccctgggtcgcttggaagaagccaagcagaaaggacccaggagcgataacagtaaatcaaataagatatttgtcggtggaattcctcacaat

SEQ ID NO: 214157 - DNA, 100 bp, Homo sapiens
ttcccttgcacctgttaacatctttaaggcaggagctgatgaagagagagcagagacagctcgtctgcttcgacaaaatttggatgccctcctgaaccag

SEQ ID NO: 214158 - DNA, 51 bp, Homo sapiens
ctaccaatcgtgaaaactatattcacagcagcgctggagagcgaggtggct

SEQ ID NO: 214159 - DNA, 98 bp, Homo sapiens
gctatttgtttggatatcctgaaagatcaatgtgatgttgcacctgtaaccatctttttatgggtggagcagagagtcaatccctgcagccaccctgc

SEQ ID NO: 214160 - DNA, 90 bp, Homo sapiens
gctgcagctgacttacatggaggagacgtgtcgtcactatgtggcccatgtgaagtcatggctccgatcttcatcttgaagaagagtgac

SEQ ID NO: 214161 - DNA, 98 bp, Homo sapiens
ggaggcccaacgtggtgctgctcctcacggacgaccaggacgaagtgctcggcggcatgagtaaatgtgtcaaatactggcctgatgagtatgctcta

SEQ ID NO: 214162 - DNA, 75 bp, Homo sapiens
ccaggttgatgaagctaatttattgacttggcaagggcttattgttcctttccagaaagctgagtctgatctgga

SEQ ID NO: 214163 - DNA, 98 bp, Homo sapiens
gagactacagagcaccagagcgatcagagatactaaatcagcggatcaaaaaacaacccttttgcattttattgccgacatttgtgaggaaaaatatc

SEQ ID NO: 214164 - DNA, 100 bp, Homo sapiens
tgaagttgaagctgttgatagtgtgcaggcactgatgaacttggaagacaagtaaagcaatggatggcttcaatatccttgggcccagcaaaagataatg

SEQ ID NO: 214165 - DNA, 101 bp, Homo sapiens
tccaggaggtagagtgtgaggagcagcgcttacggaaactgcatgctgttgtagaaactctagtcaaccataggaaagtctatcaggtgtttgaaagtgtg

SEQ ID NO: 214166 - DNA, 83 bp, Homo sapiens
gcgtcgtcggcctctgggcagcagccaagacaatgcaaactccagtgaacattcccgtgcctgtgctccggctgccccggggc

SEQ ID NO: 214167 - DNA, 75 bp, Homo sapiens
gtccgacgcgcctggctaggagcgccgaccgcagggcctctacgggtggcgacatgtctaagaatgtgagccagt

SEQ ID NO: 214168 - DNA, 100 bp, Homo sapiens
agcacgtaccagaggtggaagtccaagtcaaacgcagaaggactgcctcactgagcaaccaagaccacggactttacgttgaaggctttcgattgcccgg

SEQ ID NO: 214169 - DNA, 97 bp, Homo sapiens
catcccaattcaggagacggtggacacacgtgatttgatgaaggctgctgcaggagagttcgcagatgatccctgctcttctgtgaagcgaggcaac

SEQ ID NO: 214170 - DNA, 100 bp, Homo sapiens
cgatttattggaggcctacttgcagcatattacctatcaggagaggaggcaccagttggagatgccaggacattactctcatctggctgccttctatgag

SEQ ID NO: 214171 - DNA, 75 bp, Homo sapiens
ctcgcaaatctggaagcggatcgcgtggagtgacggtcacaccgcggcgcagtacctgacacgtccacttaccag

SEQ ID NO: 214172 - DNA, 100 bp, Homo sapiens
cccccgcggccggcacatcctctcggtgttcccgctggcggcgggcatcttcttcgtgaggctgctcttcgagcgttccctgacatcgtggagttctgcg

SEQ ID NO: 214173 - DNA, 96 bp, Homo sapiens
cgcgtcccgagcatggcaggctccctgcctccctgcgtggtggactgtggcaccggatgctttttcacggatgcctctcatgaatggccttattgg

SEQ ID NO: 214174 - DNA, 96 bp, Homo sapiens
gaaataccttatggttggttgcagttggctattatatctatgtaactttcctgggatacagtggtcagctgtatggactagaaaagttttgggctt

SEQ ID NO: 214175 - DNA, 87 bp, Homo sapiens
agtttttgtgttcctggcctttggaaccccttcatcatattccgcagccagtaaatgacctgcgacataactatttgcaaaacaaat

SEQ ID NO: 214176 - DNA, 100 bp, Homo sapiens
tagagactgccggtgccttcatgggcaggactaggccgaaaactccccaggtctcctctgagcctccggcctccataagacccaaaacagatgacacctc

SEQ ID NO: 214177 - DNA, 100 bp, Homo sapiens
gcattctctttgaactagtgcatatctttctctatgtggtacagccgcgtgatttcccagaagtttccgttactatggcaatgacggcagggactacaac

SEQ ID NO: 214178 - DNA, 80 bp, Homo sapiens
gctcgcaggcgccgcacggagttgcgtcccggggacttggggccgcagggaggttaatttggagtggcccctggagtcag

SEQ ID NO: 214179 - DNA, 50 bp, Homo sapiens
tgagttgcagcaagtcatacgggaggtaacagagattcaaaggtaccttc

SEQ ID NO: 214180 - DNA, 75 bp, Homo sapiens
ggagaaggaagcgagactcatacgcaacctcaatggtgcccgtggttgacacgagctgtgtccccagctgttccc

SEQ ID NO: 214181 - DNA, 76 bp, Homo sapiens
gaagaagtctcaaaaagctcccgactaggtggacgacatccttggagaaggcagcgacgacagcgacagcgagaag

SEQ ID NO: 214182 - DNA, 75 bp, Homo sapiens
gtgctgttcatatatggtggtcctcaggagcaggaactcaaagcagccgctgatggcgtactatctgaagtgagg

SEQ ID NO: 214183 - DNA, 100 bp, Homo sapiens
ctggaatatccctcagcctggtgagggtgatgttcgggaggaggccttgtccacagacggcaaatggatacatcttgttttttcatattacatctacaag

SEQ ID NO: 214184 - DNA, 74 bp, Homo sapiens
gcgttcacggcaggattcggttaggttgcactgctgtgatccatcctcatctcctaaagatgcatcctgactta

SEQ ID NO: 214185 - DNA, 88 bp, Homo sapiens
ccagagaatcaagctatccaaatgcgattagttgatgtggcctgcaaggccgctttgtagttcagaatgtttctgcacagaaagatgg

SEQ ID NO: 214186 - DNA, 100 bp, Homo sapiens
ctagaatgtcttcctcaaggcctgccatggacaattccaccagaggagttcagcaagagaagggatttaagatatggacatttctggaattacagagccc

SEQ ID NO: 214187 - DNA, 89 bp, Homo sapiens
actgtatatatgctagagcctcactcctgtcaatatattcttgggagctccttaataagcatttatagtcagtttttggcagcaataga

SEQ ID NO: 214188 - DNA, 48 bp, Homo sapiens
gaaaatgccaacgccgtgtctgaagattcatgatgttgctatcaaaag

SEQ ID NO: 214189 - DNA, 101 bp, Homo sapiens
gatttccttcttggggttaattttccactctcctttccaaacctttgcagctgccctttgttaaagctccaccagcccattggagaaaagttactgttcag

SEQ ID NO: 214190 - DNA, 90 bp, Homo sapiens
agcccgctctgcgttttgttttcccctcggcactaggcagcggaggagcccgaccgacccgctgcttccagctgccatggtgatgccacc

SEQ ID NO: 214191 - DNA, 100 bp, Homo sapiens
ggacaggtatgcatgcccctggagagaagggaaatttagcagctgtctacactgtgggacacaacttgatcaagtaagaagacatgttggataacaagaa

SEQ ID NO: 214192 - DNA, 83 bp, Homo sapiens
cttcccctttccagagagccagaaagaatgagagggtccaagcctggtaagaatgtccagcttcaggagaatgaaatcagagg

SEQ ID NO: 214193 - DNA, 96 bp, Homo sapiens
gcatcggaaagtccacccagtggctgaatcaagctagctccttggaacaggaagaagaccagctacaaggaaatacttctgaaaaatcactctgaa

SEQ ID NO: 214194 - DNA, 75 bp, Homo sapiens
caaaaactccaaactcctctccaccagcgccaagagggtatttgaagtataccatacaactgttttgaaaatcca

SEQ ID NO: 214195 - DNA, 100 bp, Homo sapiens
acacattcatcttaacattgaagccgattttgttattttctgccctgaaccagggcagaagcttatgaatttgatgctttgtccagacttggaatcccag

SEQ ID NO: 214196 - DNA, 78 bp, Homo sapiens
acttttcctcatacaggatcagcagggcctcatcacactgggctggattcatcatgcaatgatgctacctgttctgac

SEQ ID NO: 214197 - DNA, 75 bp, Homo sapiens
gtggatcgctgtgatcgtcacttgctgtccctttccccccaacacatcgcttgacatctgaagaagtatttgatt

SEQ ID NO: 214198 - DNA, 101 bp, Homo sapiens
attggataaccaagaaatgactaatcaagagtctgccgtacatgtgaaaatgctctagaggacaaaatcccagtccttggcacaaactcaggaaatggaag

SEQ ID NO: 214199 - DNA, 75 bp, Homo sapiens
agctgggtcagtccgccgctcaccccgcggccgcaccttcccgccttctcagaacatccagtcatggataaaaat

SEQ ID NO: 214200 - DNA, 88 bp, Homo sapiens
gaggacgacgactatgaatcggagccggaccaggagaacgtatttaccgggcagtcaaagatctattcctacatgagcccgaacaaat

SEQ ID NO: 214201 - DNA, 50 bp, Homo sapiens
ctgagccccagcaccagtcacctccagctgtgatgcagatccatccgccc

SEQ ID NO: 214202 - DNA, 98 bp, Homo sapiens
ggacaatgacccaagggaccttataggagacttctccaaggttccagtgtgtgttccaagtgctgccaaagtgcctcagcccagagacacccctgcct

SEQ ID NO: 214203 - DNA, 50 bp, Homo sapiens
ggtttcggaaatgcccttacagcagcagggcagctttggaagaagtagaa

SEQ ID NO: 214204 - DNA, 83 bp, Homo sapiens
catccgtccgcgggtccgtggagctggagcagatcccccagccggctgagacaggctgatcagctgaccgaagaacagattgc

SEQ ID NO: 214205 - DNA, 75 bp, Homo sapiens
aagaaatacagcttggtgaagagttactagctcaaggcggctgagccagaggccaactgcagaggaactggaaca

SEQ ID NO: 214206 - DNA, 100 bp, Homo sapiens
gagaggatggtcatccgcgtgttcatcgcctcttcctcgggcttcgtggcgcctctggaattgctttggcactcgttagatgaatggctagttttaatag

SEQ ID NO: 214207 - DNA, 82 bp, Homo sapiens
tctctctcatctcgctcggctgcgggaaatcgggctgaagcgactgagtccgcgatggagtgtgatccagctttgcttcctg

SEQ ID NO: 214208 - DNA, 100 bp, Homo sapiens
ttagaccagacaactttgtatttgggaggtggggaagacagggctccagctaccacaggacgggctctgggtatagccgttccagtcagggacagccgtg

SEQ ID NO: 214209 - DNA, 100 bp, Homo sapiens
tttactactgtgacaacattaacggcaaggcagtttccccggcatgaaccagagtggacttatggcttccagctctccctacagccagcccatgaacaac

SEQ ID NO: 214210 - DNA, 103 bp, Homo sapiens
ccactttggctgcaccattggcctgaaagattctgtgactgcagtcgtgttcgtcgcacttggaacatcagtgccagcccgtgttcccaagaaaatcctcaag

SEQ ID NO: 214211 - DNA, 100 bp, Homo sapiens
tcatattgagagctgtcgacagttacgtcaacagctcagcaggagttgatgaagcagctctccatccttcctcgtgacaactatagtctcctgagctaca

SEQ ID NO: 214212 - DNA, 73 bp, Homo sapiens
ataaacgcccccaatttcccagctgctaaaggaagaggaagttgttgacctcctgtactggagagacattaag

SEQ ID NO: 214213 - DNA, 90 bp, Homo sapiens
tgaccagcggcggcgacgcgcaaggatcctggtgcacctgagccgtggaggggctgaagtccagatctttgctcctgacgtccctcagat

SEQ ID NO: 214214 - DNA, 90 bp, Homo sapiens
atcagcattggaggaggggcccagtactgtccctgcctctatatcgtccagatcagccgcatcgagtatatccactccaagaacttcatc

SEQ ID NO: 214215 - DNA, 83 bp, Homo sapiens
aagagagcggcgcgcccggcgtgccgagcggcaacggggctccgggccctaagggggcgaccattgacgaggtggagacggac

SEQ ID NO: 214216 - DNA, 75 bp, Homo sapiens
gtttttgcagttctaaaaccatggcccatgtgtcagagatggctgaagatgggagcgaagagatcatgttcatct

SEQ ID NO: 214217 - DNA, 96 bp, Homo sapiens
gcaaaactcagcaattttttgatgaggggttaattgtgaaattaattttgatgactgtgcaagtaacccttgtatccatggaatctgtatggatgg

SEQ ID NO: 214218 - DNA, 82 bp, Homo sapiens
tcggaaaccggtagcgcttgcagcatgcttccccgggcgctgcctggacaggcctgcctgcgtgctgggacatgtctggcct

SEQ ID NO: 214219 - DNA, 80 bp, Homo sapiens
ctcagttggaagcagccgatccagcctgcggagcctgtggggcagccccatggctgggggttatggagtgatgggtgacg

SEQ ID NO: 214220 - DNA, 75 bp, Homo sapiens
ggggatcttggcagcgctgcagggcttgaacatgacaagcagatttgggagtccaaggcccagacagaggtccag

SEQ ID NO: 214221 - DNA, 50 bp, Homo sapiens
cgaagagctgcagctcctcctgtgcggatgtggacgagtgtgaggctggg

SEQ ID NO: 214222 - DNA, 112 bp, Homo sapiens
gaaagtcagggggactgcaaaggccaatgttggtgctggcaaaaaggatattaatgcacacgcctgtgttactggtaaacccatcagccaagggggaatccatggacgcatc

SEQ ID NO: 214223 - DNA, 98 bp, Homo sapiens
ctccttccgctttttttggatccagaatgtcagtcttaagtttcagcaacaccagcaaacagtggaagctcttcgtgggcggtcttgactggagcacg

SEQ ID NO: 214224 - DNA, 87 bp, Homo sapiens
aaaagttgctctgtcaggattagatgtgtatgcacataatgtagaaacagtcccggaattacagagaaacattgctgaggctcttgt

SEQ ID NO: 214225 - DNA, 50 bp, Homo sapiens
atttgggagaaacacagccagaaggtgacttaagagattaaaattaattt

SEQ ID NO: 214226 - DNA, 82 bp, Homo sapiens
cgctgcgccgcaacgccgagcgcaccgacatctgcctgctcaaaggtttatgtgtggtacgggggtcaagagtgcacaggac

SEQ ID NO: 214227 - DNA, 90 bp, Homo sapiens
ccaggagcctaatgttaaccctgcttcagcaggcaaccagacccagaagacacaagctggtcctatagtacccctcctcaggaatgtctc

SEQ ID NO: 214228 - DNA, 51 bp, Homo sapiens
cttccgaaaccacaagtttgccgatagcctgccaggcagcatcactaaagc

SEQ ID NO: 214229 - DNA, 100 bp, Homo sapiens
gaaaggggctcatactcatcttatgggagagaatcaaacttacagggttgccaccaggtagctgaaggtaaattaaatgatcattttcctctcgtggtat

SEQ ID NO: 214230 - DNA, 78 bp, Homo sapiens
tggaattacaagagatttcgactgtggaagaaagcataacccctactgtagaactaaatgcactgtgcatgaaacttg

SEQ ID NO: 214231 - DNA, 80 bp, Homo sapiens
tcttcttggacacctaatacccagggtcctccaggcttctcacggcattcagcagcagcgttgctgtaaccgacaaagac

SEQ ID NO: 214232 - DNA, 98 bp, Homo sapiens
ctctgaagaggctggagaagctactgaaacaggcactggagcgaatccctgagctgcaggggatcgtgggggactgctccttggtagctcagctccgc

SEQ ID NO: 214233 - DNA, 98 bp, Homo sapiens
cgacttatcacccagagtgctctgcacagagctccccactataacagttgctgccgccggaagtacagggagcccacctacgatgcagaattccagca

SEQ ID NO: 214234 - DNA, 127 bp, Homo sapiens
accaacgggaagggccggcccgcctccctggccggggcgcagttcggaggttcagcccgagcgggaagaagttccgcagcaagccgcagctggcgcgctacctgggcggctccatggacctgagcac

SEQ ID NO: 214235 - DNA, 118 bp, Homo sapiens
ctggacccctggttcgccggctcctccaatgtgggcatcaacaggtggcggtgctgctggtgagtagcagccggtacccagaccagtggattgtcccaggaggaggaatggaacccga

SEQ ID NO: 214236 - DNA, 100 bp, Homo sapiens
tggtaaatgacgaaggggcttcttccagagccaaggaggaagggttgtccggggtgaccatcgggatgaggaggaagagacccacatgaagaagtcagag

SEQ ID NO: 214237 - DNA, 82 bp, Homo sapiens
gggcctttccagcccgtggtccttctccatattcgaggctaccaagcagtttctcgaagagattaacaagtggacagttcag

SEQ ID NO: 214238 - DNA, 106 bp, Homo sapiens
ctggacattggagggggcttccccggaatggagggctccgggcccaagtttgaggagcagcagtgttgtactgctacttctataaacggacagccgtaagactagg

SEQ ID NO: 214239 - DNA, 149 bp, Homo sapiens
gacgtgggcaagggcgagatcctggagagcctgcaggacggcgcggcagagtccccgtacgcctacagtaacggccaacgcagacccgtcagtgataaactgtctgcataacctgtcccgtcgtatcgccaccgtgctgcagcacgagg

SEQ ID NO: 214240 - DNA, 124 bp, Homo sapiens
acacgcaggcctgggtgtgcagccggcagccgcagagcggggaggaggcggtggccctgctggaggagctctggggacccagacatggagctgcgggaagaagcctggtctccggggccgctgg

SEQ ID NO: 214241 - DNA, 97 bp, Homo sapiens
tggggtcgctcggtttgcggggtaaccaaggagcagtgaacagcagctactacagtagtggaagccgtgcatctatgggcgtgaacggaatgggagg

SEQ ID NO: 214242 - DNA, 82 bp, Homo sapiens
gagtccaactcagaggacgaggcctccttcaagtccgagtttgatgaaggccggaacaactttgaaggggaggtcaccaagg

SEQ ID NO: 214243 - DNA, 82 bp, Homo sapiens
gcaaggagctaaagcagcgtgcgttcagccctggggctccccacaggtgcaggaagccgccgcccagccatggacggggagg

SEQ ID NO: 214244 - DNA, 100 bp, Homo sapiens
gtggaattgcatgggaaaatcatggaagttgattactcagtctctaaaaagctaagatacttggcatatcgaaattttatgattgacacgtatcgtctaa

SEQ ID NO: 214245 - DNA, 75 bp, Homo sapiens
cctaggtatccgcactgctcaggggacctcagcagccatgtcgaagccccatagtgaagccgggactgccttcat

SEQ ID NO: 214246 - DNA, 100 bp, Homo sapiens
tgaaaagacacagataaaagagaaagatagatgccctctctcttcatcttcacttgaaataccggatgattttggaggttgatgaaaaaaccgtaggaga

SEQ ID NO: 214247 - DNA, 80 bp, Homo sapiens
cgccgacatcaattacgccaatgtggacggactcactgccctgcaccagggttacattccgaaaagcaaatgggagatgg

SEQ ID NO: 214248 - DNA, 100 bp, Homo sapiens
gtcgcgtacgggcttcccgagctgacgtggcttgaattgggaggggggcagctggagcctcaggcggcagcgcttctagatctggaaagcatgaagactg

SEQ ID NO: 214249 - DNA, 100 bp, Homo sapiens
acaggactggctgatactacatattccagatggaaaatatgttgtgttcttcttttaccctcttgacttcacctttgtgtgccccacggagatcattgct

SEQ ID NO: 214250 - DNA, 107 bp, Homo sapiens
ctggcaactgttgcactggatccacccagtgaccggacttctcacccccaggatgtcatcgaggctctactgagatgaagaaagaaaaagaatacctgctcagctcc

SEQ ID NO: 214251 - DNA, 100 bp, Homo sapiens
ttccgaagcctgcgcaccaaactgctacttatgtcccgcaatgaagaagctaccaagcacctagaggagcgcctgccaacggtaccgctgtccggcatgt

SEQ ID NO: 214252 - DNA, 100 bp, Homo sapiens
ttcaaatcatttccatctttttctggatgaacctgggcggatgtcagaccagagaagagcacagaatgtaccagagagggttgacaattttggtttgggg

SEQ ID NO: 214253 - DNA, 98 bp, Homo sapiens
ttagatgccgattacccacttcgagtcctttattgtggagtttctcttcagcaacgggtagcagaattggaaaaaattaatgcagaatttttacgtgc

SEQ ID NO: 214254 - DNA, 100 bp, Homo sapiens
agatttaatcaggcttgagtccattgataatcactctagcacagataatacatatgtgtcaagttcagagaatgatgaagatgtgctagttactacagag

SEQ ID NO: 214255 - DNA, 96 bp, Homo sapiens
tgaggttgaagattcctgtgacagcgatgccatagagagaatgtactgtgccccaggaatggcggcgctagatagtaaggcatcagggaagatggg

SEQ ID NO: 214256 - DNA, 75 bp, Homo sapiens
cacatgcccgctcacctgcgctgtgatgcctgcagagctgtggcttaccagcaaacagtgattgctgaccactcg

SEQ ID NO: 214257 - DNA, 101 bp, Homo sapiens
cgcggagtcccgcggagtctcgggccccggagacgggcgaggagcacggcagcagccaggattttttatcaagcagaaatgcatcgaacaacgagaatcaa

SEQ ID NO: 214258 - DNA, 98 bp, Homo sapiens
aaagtcaccgtgaagaccccgaaggaaaaggaggaattcgccgtgcccgagaatagctccgtccagcaggtgtgtatgtaatatagattgcagtggat

SEQ ID NO: 214259 - DNA, 98 bp, Homo sapiens
ctagtcagaagcgagctatagagttggcaacaacacttgatgaatctctcactaacagaaacctccagtcaagagaatccatcccattaaatgacctg

SEQ ID NO: 214260 - DNA, 124 bp, Homo sapiens
gttgctgtacgagagcaagctctataagattcttcaaggtggggttggcatcccccacatacggttggatttggtctagggagtcccagaaagaagtagaaaaagagagagaagcctaccgtcg

SEQ ID NO: 214261 - DNA, 88 bp, Homo sapiens
gggtcgtgggggctgactgtcgctctgcctttgacaggagaggctgcttcttgtagagggaccagttactctccacaagaaaattcac

SEQ ID NO: 214262 - DNA, 83 bp, Homo sapiens
cggtcaacgagttcatcagcaaatacatcgtgaatgaggtgaaaggtgtagcagtcactcggcctacacccacagcatcgacc

SEQ ID NO: 214263 - DNA, 110 bp, Homo sapiens
agggttcctgacagaatatgtggccacacgttggtacagggctccagaaattatgttgaattccaaggtgttggagcgggccggagagaagtagagtgggctgcgaggag

SEQ ID NO: 214264 - DNA, 100 bp, Homo sapiens
cggctcccgcaccatggaggaggacgacagctacgcggaaatgagaaagcagagggagttctatcacaaattgggcatggaggtgccgggagacatcaag

SEQ ID NO: 214265 - DNA, 75 bp, Homo sapiens
gcctactgctccgcggtgtttgcaggtaagaatgattgatgttggctgatattggagtgctcattcacatgaagt

SEQ ID NO: 214266 - DNA, 100 bp, Homo sapiens
cagacaaaacaacaactcttagaatataaatcaatggttgatgcaagtacaccaggggttggaaaaaccacactaggcaaagaacttgcgtcaaaatcag

SEQ ID NO: 214267 - DNA, 49 bp, Homo sapiens
ggcaatggaacaggcttgagaaacaggttatgatgtgattgctcaagcc

SEQ ID NO: 214268 - DNA, 97 bp, Homo sapiens
cttaaaggatacaatatagaggcagaaggccttttttcaaaggttacaatggccaacattggaataaatggaaatcattctctggaaacctgtgaaa

SEQ ID NO: 214269 - DNA, 83 bp, Homo sapiens
tcgcctccaggccaagagggatccttcacccgtgtctggctgttcggctcttgaatcccagcgatgaaaccaggaactcactt

SEQ ID NO: 214270 - DNA, 88 bp, Homo sapiens
aggacgcggccctggcggtgctagaagaccggttccagccgaacatgacggtgtacagtgccaccaacgtggagctggtgacacgcac

SEQ ID NO: 214271 - DNA, 100 bp, Homo sapiens
gtggcaagtattgctgtgggtgctgggacttcccgtccgcggcgtggaggcggagattctggagctggctggcaatgcagcgagagacaacaagaaggga

SEQ ID NO: 214272 - DNA, 100 bp, Homo sapiens
aaaaaggtgaaaggtattcttgtggatattgggcttgacagctgcaaggagttactgaagttcacttcttcaactgagatggacatgatataatctccat

SEQ ID NO: 214273 - DNA, 100 bp, Homo sapiens
tctttggccatcagaaagtacgatgaagccatccagattctcctgcagttataccagtggggtccaagccttatgcatttgatcgggtgttccagtcaag

SEQ ID NO: 214274 - DNA, 100 bp, Homo sapiens
gggagttgggggcaaggagaagatcctgtgacagaaatgttggtaaatgttctgagtatttgctctgatgatgaactaatgactgaaggtgaagaccagt

SEQ ID NO: 214275 - DNA, 82 bp, Homo sapiens
tgagcatttcctcctgacggctgtacttgagcagtcacctggcacagacataaatgagcatattctgatgtactctttggat

SEQ ID NO: 214276 - DNA, 75 bp, Homo sapiens
cgtcgatgccagcttcttcttgaaatgggagcagaccaaggcgctggtcacccaactcaccctcttcaaccagat

SEQ ID NO: 214277 - DNA, 100 bp, Homo sapiens
gagagagatgttatcatgagggaattccggtcagggtcaagtcgtgttctgatcactactgacttgttgtggcagatattgatgggagcactttctggag

SEQ ID NO: 214278 - DNA, 74 bp, Homo sapiens
atcaggccttgcttgttcctgcattagcggatgcagtggtgcagtatgacgtggagctgattgcactaatccga

SEQ ID NO: 214279 - DNA, 90 bp, Homo sapiens
gcggaacagcaggcccgagcccaccgcgccgggccccggacgccgcgcggaaaaggtgaagttaaaatgaactatttgggcaaaccatat

SEQ ID NO: 214280 - DNA, 98 bp, Homo sapiens
aaattcctgtccaaggacaaactcttcaagccttcctttgatgtgaagggctgttttgctgcagcttctgaagtgttaaagcacttgaaggaacgatt

SEQ ID NO: 214281 - DNA, 83 bp, Homo sapiens
tggcgggtgccgagggcccggacgaggtgcccaaggttgaagcaatgaataaaagactgggctccttggtggatgagtttaag

SEQ ID NO: 214282 - DNA, 82 bp, Homo sapiens
ccgggcagcccgggaaatctccaagtcagaaagatcgtctcctctgcctccaccgacctccaggactacacctactacttcg

SEQ ID NO: 214283 - DNA, 100 bp, Homo sapiens
ccagcgtgttcagcctccctgactccaaggcaatgtctatgctgcttcaaggaatataagcatttggagatttttaatcaagtagtgtgtgcacttatta

SEQ ID NO: 214284 - DNA, 100 bp, Homo sapiens
agggtatcatggaaggcaactgtgtttcacttaccagaatactacgttcagctaaattaaggccatcatctctcagcaaggtgacatatttgtttttgac

SEQ ID NO: 214285 - DNA, 100 bp, Homo sapiens
gcaagaaaaggggccttctgtggattggggaaaaatccagagaccccctgaagattcgttccatcaccgggacagcttcaacacagggtccacagcgtgg

SEQ ID NO: 214286 - DNA, 83 bp, Homo sapiens
gtgatttgcttgaagatatgaggaaagtgactattttaccccacagggagaattccgtgtagacaaagcaggatcccctactt

SEQ ID NO: 214287 - DNA, 88 bp, Homo sapiens
acagaagattttcttacctttctctgccttcgagtttcagctgtgagttcaacatggaggcaaatcagtgccccctggttgtggaacc

SEQ ID NO: 214288 - DNA, 114 bp, Homo sapiens
cagcagcaagtcccatcggaggacctccctgccctgtataccgagggaacaggaaacctcgacctgtctcccagttggttgcacagcaggttactcagcagtttgtgcctccta

SEQ ID NO: 214289 - DNA, 75 bp, Homo sapiens
gacttgtgggattatcaccagcaccgatacctgcaagtgtactaatggtcacttgatgtgcgctggctgttttat

SEQ ID NO: 214290 - DNA, 100 bp, Homo sapiens
ctgataccaaactcatcggaaacatggcactgttgcctatcagaagtcaattcaaaggacctgcccccagagagaagggctgaacatgtccgagtttgtc

SEQ ID NO: 214291 - DNA, 100 bp, Homo sapiens
agctcgggcaagccctccgagaagaacctctacgccgacatcgacgccgcgtggcaggcgctgcgcacccgatacattccaccgttgatctgggggaaaa

SEQ ID NO: 214292 - DNA, 75 bp, Homo sapiens
gctgagacagagaggaaaaaggcagttatagatatgtcttctccgactactatgaagaagcctgaaaagccattg

SEQ ID NO: 214293 - DNA, 137 bp, Homo sapiens
gaacttctacttcaactacaagaagaggcagaacctcgatgagatcttgcagcagcacaagctgaagatggacctgaaggagaagaaggagaaggtggaggagaaggcaagccggaaagagcgaaagaaagaagtgg

SEQ ID NO: 214294 - DNA, 83 bp, Homo sapiens
ccttgagtcagtgcgccgctctccagcccgcttgaacggcattggaatggatacttgtgtcattcctttgaggcacggtgggc

SEQ ID NO: 214295 - DNA, 51 bp, Homo sapiens
ctgcaataagccgccttccaagtcaagtccatcatctccagaaccagctag

SEQ ID NO: 214296 - DNA, 100 bp, Homo sapiens
tctctttccagaggccaggctttatgggagcatgggttaccagcgacgcaccctcttacggttattccagaagtttgacacattccggattctggtttgt

SEQ ID NO: 214297 - DNA, 75 bp, Homo sapiens
tgaactcagactggatgacagaagagagctggttattaagtctccccgagtgaaagaatcaatatcaaattctga

SEQ ID NO: 214298 - DNA, 100 bp, Homo sapiens
aggtgtggtgaaatttttaaaaatgaattgtcgatacttcaccgatggaaagtcaccattttggattcttagcattccctctgaagatattgcaagaaat

SEQ ID NO: 214299 - DNA, 74 bp, Homo sapiens
ggagaggtgctcggattctcgtagctgtgccgggaatatattattcgagtgcaaagaggaatttctgtggaaaa

SEQ ID NO: 214300 - DNA, 75 bp, Homo sapiens
agaacgtcccgctggatctgacccgaggtttattacccagaactctttgtctgggtcagtcaagaaccatttcca

SEQ ID NO: 214301 - DNA, 73 bp, Homo sapiens
ggtattcattaaagaaaataatgggaaggaagaagtatccaagcacctgtggaatcctctcaagaggaacagt

SEQ ID NO: 214302 - DNA, 82 bp, Homo sapiens
cgtgagcaagcccaggcacagccgacgccgcgggccgccaccggcacggccaggccagcatggtggaccacttacttccagt

SEQ ID NO: 214303 - DNA, 75 bp, Homo sapiens
attttctagaccttttgtccccgggcaagatgactgtccaagtgcctccaaagtgtacaaagcatcagattcagc

SEQ ID NO: 214304 - DNA, 75 bp, Homo sapiens
cagacatccttcgcttcatttattcaggtataaatgaccaaggattgtacagagttgtgggggtgagttcaaagg

SEQ ID NO: 214305 - DNA, 82 bp, Homo sapiens
gcgagcgaacgaccaagagggtgttcgactgctagagccgagcgaagcgtctccaattgagaaacatggcactgtttttcct

SEQ ID NO: 214306 - DNA, 100 bp, Homo sapiens
gaaacccatgaagacttcctagagaattcacatcttcaaggcccagaggcagagctacacaaccatggaatccaaattaattcctgttctgtgcgactgg

SEQ ID NO: 214307 - DNA, 110 bp, Homo sapiens
atacttcagaaggatgcagctagctgcatgacagtccatgacaagttatcttacagactggagagagtgctagtgaatgcttttgtcttcaatgcccatctcttggaaat

SEQ ID NO: 214308 - DNA, 75 bp, Homo sapiens
tcccacctggagaccctgcagctgctgaggactgcacagctcccagaacaggttttccagcttgcagctcatctg

SEQ ID NO: 214309 - DNA, 75 bp, Homo sapiens
tgacaaccaggcaatgctggatagataccgaattcttatcacaaaggtatggcgtgagtcccgagaacattatcc

SEQ ID NO: 214310 - DNA, 97 bp, Homo sapiens
gatcaccgacaagatcaccacggacgagatgatcaaacgcctgaagtagccatccctgccattggggctcagtattccatgtttccagcagctccag

SEQ ID NO: 214311 - DNA, 98 bp, Homo sapiens
ctaatctcttgttttacggaccacctggaactggaaaaacatccactattttggcagcagctagagaactctttggcttactgaaacaaatgcaggta

SEQ ID NO: 214312 - DNA, 136 bp, Homo sapiens
tgtatctcagttaaagaagatgaagaagtcttcaggggagattgtctactgtgggcaggtgtttgatgcgatcatgaatttcaagaaagaggagacagcaaaactgatagagaaactggacatcaaactggacagc

SEQ ID NO: 214313 - DNA, 100 bp, Homo sapiens
ccggccggcagggtggacggtgggctcttagagatgtttatgattacttccgagctgtcctgcagcgtgatgaaagaagtgaacgagcttttaagctaac

SEQ ID NO: 214314 - DNA, 110 bp, Homo sapiens
gggtgggcaacttacccgagaacgtgcgggaagagaagatcatcgagcatttcaaacgacctgcctagagctggaacgttacctccagagcgagccctgctatgtttcag

SEQ ID NO: 214315 - DNA, 75 bp, Homo sapiens
ctgggcgtctgttccggcgccggacccctatttgcaaaggtggaaatgagttctcaacagtttcctcggttagga

SEQ ID NO: 214316 - DNA, 90 bp, Homo sapiens
gcccgaggcgaggaggagcgctggcggctgcttctgatgcttggaagatatcctctcagccacaaagatggtaataaatctttgcctccc

SEQ ID NO: 214317 - DNA, 98 bp, Homo sapiens
agttcctctccagctcagccgcgtagtattctaccttgtaaatactgttatttgtatatactgtaaatgatgacatcggtgggcactaaccgagcccg

SEQ ID NO: 214318 - DNA, 82 bp, Homo sapiens
tgctatacaacacaattataaaatgtcagcttttaaggactgtgatcaaccactctatgattgtcctatgtgtgggctcata

SEQ ID NO: 214319 - DNA, 75 bp, Homo sapiens
gatggcccccggtgcaagaggcgcaaacaagccaatcccaggaggaaaaacgggttttggccaaattgggcgagg

SEQ ID NO: 214320 - DNA, 75 bp, Homo sapiens
gcgcactggaggagcggcgggcttcagacaggtctcggcgcggaagatggccggcggcgtggacggccccatcgg

SEQ ID NO: 214321 - DNA, 83 bp, Homo sapiens
tggtgttatcaacttaaaagatgccacctctaaggtggcacaagaatggctcaactctccaaatagagagaatttctatcagt

SEQ ID NO: 214322 - DNA, 75 bp, Homo sapiens
gacaatttggaggtggcaaacagcttcgcagtcactaatgcttgaatgaatgtgatttgaactcattcatgttga

SEQ ID NO: 214323 - DNA, 75 bp, Homo sapiens
agcagaggcttaaggtcttcagcggggcgctccaggaggcactcacagcattaaagggcagtatttaaagtcagt

SEQ ID NO: 214324 - DNA, 80 bp, Homo sapiens
ctgcctgcgcgctgctcctgctctgctacctggcgtccgacctccgatcatgaacgggcccctgcacccgcggcccctgg

SEQ ID NO: 214325 - DNA, 90 bp, Homo sapiens
cctgtgggggccgccgggctgcggcaagatttcctttgacctcgctgagtacactgcggacgttgacggagttggcactctacgacttct

SEQ ID NO: 214326 - DNA, 100 bp, Homo sapiens
tgtttgagctgcagacgtcagcctgccagatcctccacggccacacggccggtggctgctggcagcggaatcccccagatcaagtgcttcctcaacgggg

SEQ ID NO: 214327 - DNA, 80 bp, Homo sapiens
taacaaggcagacctggccagcaagagagccgtggaattccagtacacactccaaagacggcagactcacaggagaccaa

SEQ ID NO: 214328 - DNA, 50 bp, Homo sapiens
gaaggcttcagcacagccctcacaatggaaatggcagcagtgtctgcttt

SEQ ID NO: 214329 - DNA, 100 bp, Homo sapiens
tggctacggatcccaggaccctcttcgcgggcgattcgcgtagcctcagacttaaataagctggatggatttggtgattctacaaaaaaagacactgagg

SEQ ID NO: 214330 - DNA, 90 bp, Homo sapiens
cctaccaaggatacccacagtacggctggcagggtggacctcaggagcctcctaaaaccacaggtttctaagcatgaattgaggaacaga

SEQ ID NO: 214331 - DNA, 98 bp, Homo sapiens
aaatgaagaaaaggatgcttgggatgtgaagatgttgctagagtgaaacaaagagtcctcttcgtggaaaagaaaaaaatacgctccctttaaacggt

SEQ ID NO: 214332 - DNA, 100 bp, Homo sapiens
tagccatcttctaattttcattccttcaaaggaacttgcatcagcactgaagtcagccttatctggccacctggagacggtgattttgggcctattgaag

SEQ ID NO: 214333 - DNA, 100 bp, Homo sapiens
tgccagctgagcaactggtcagagtggacagattgctttccgtgccaggacaaaaaggtctttggctcaggcgttggggtagtctctgtatgtcaaggag

SEQ ID NO: 214334 - DNA, 75 bp, Homo sapiens
tgagtcaatatgtattgtggcattcaaatcctagcactctgggagagtttggaatctgtgagtgcaacgtgtaaa

SEQ ID NO: 214335 - DNA, 83 bp, Homo sapiens
ctgatattgatattattacagcttcatatgcaccagaaggagatgaagatccagctatgggacacagcaggacaagaacgatt

SEQ ID NO: 214336 - DNA, 50 bp, Homo sapiens
gcccaggttcttcaaaagatgtacaaacccgtagtgctgatgaaccaatg

SEQ ID NO: 214337 - DNA, 51 bp, Homo sapiens
ctatgattgggttgggagacctattgaagagagaagggcacagttacctaa

SEQ ID NO: 214338 - DNA, 96 bp, Homo sapiens
cttttctacagaaggttaaaagcatcttgactcctgaaggacttgaaagaggagattgatattcgactctccagggttcaggatatcaagtatgag

SEQ ID NO: 214339 - DNA, 78 bp, Homo sapiens
atacacggaggaagcggctgttctacgctcttgatggaaatgtgtatgatcatctcaaggattatttaatagccttca

SEQ ID NO: 214340 - DNA, 105 bp, Homo sapiens
ctctttcaacagatagaaaggcaggagcagcttctggatgaaatacatcgtgagaagagaggtgaaattgggtgaggatgcccccaattccagtgtggtgcatgt

SEQ ID NO: 214341 - DNA, 75 bp, Homo sapiens
gaaatgtctctacgctgcggggatgcagcccgcaccctggggccccgggtaaagtcagtgataaatcttttgttt

SEQ ID NO: 214342 - DNA, 82 bp, Homo sapiens
gactactatcctgacctccacagggtgcggcgcttcctggagagccaggtcacgcatgaagggagcaccgtggagaagacag

SEQ ID NO: 214343 - DNA, 110 bp, Homo sapiens
gggccttggggagctgcttctgtcctgcaactgggcagtggttgccgacatcctgctggcgtccttctggacatccagcagcactttggggtcaaggaccgaggcgccgg

SEQ ID NO: 214344 - DNA, 82 bp, Homo sapiens
tttgctgaccttggacaaatcaatttacgtttctgtgctccagtttcttggtttataaaacacgagacgacttcctgggcca

SEQ ID NO: 214345 - DNA, 87 bp, Homo sapiens
ctctgtccccggactgggagtttgaccgcgttgacgacggctcgcagaagtttgtgaagcggctccggtactgcgaatacctaggga

SEQ ID NO: 214346 - DNA, 100 bp, Homo sapiens
ttttgaaagatctgaaattgatcagtgataaaattggatcacttggattagaagttcagttctgcaagcaagtatgctgctctctctgttgatggtgaag

SEQ ID NO: 214347 - DNA, 100 bp, Homo sapiens
tacaatgatggggcagcaagtggccaagttaacacagaaatctgcctcctgggccatgccgcttctaaggcctgtttcttctcatgagccccagcacaag

SEQ ID NO: 214348 - DNA, 100 bp, Homo sapiens
tcccatcggaggacctccctgccctgtataccgagggaacagggggaaggttcctcctcattcttgtcggaaacttgccatgaggatccctctgtttccc

SEQ ID NO: 214349 - DNA, 75 bp, Homo sapiens
ccctgattggacagtctcatcaagaaggtggtgaagaaggtgaagtccatgcagatgttccacatgcccatcact

SEQ ID NO: 214350 - DNA, 96 bp, Homo sapiens
ctcccccaacagcttctcccccgcggtcgccggagccggtggtgctgggggccagcagggcttcctgggctgcatccgctccttgaggatgaatgg

SEQ ID NO: 214351 - DNA, 51 bp, Homo sapiens
ctaaacttcgcctggtccaacttcaggtggcgggaaatgttttttaaagtg

SEQ ID NO: 214352 - DNA, 100 bp, Homo sapiens
cttctgtgcatttctccagctacatttagatggtttagctgcattgtcattttctatcagttctctgaccttgattggaatgttggcagctataacttac

SEQ ID NO: 214353 - DNA, 100 bp, Homo sapiens
ccctgactacacctggtcctttgacgacatcatcgtctttgccttctcctgcaagcaggcagtgcaggtcagctctgcggacgctcggctcatggtcttt

SEQ ID NO: 214354 - DNA, 73 bp, Homo sapiens
ctgattacctgccacccattgtgtcttctcaagaagatatgtcttgtcgttcaagacttgcaacactaaacga

SEQ ID NO: 214355 - DNA, 96 bp, Homo sapiens
cagtaatgcctggaatgatgatgtctcatatgtctcaggcttccatgcagcctgccttaccgggtgttgtcacaaattttgaaattttccgaatga

SEQ ID NO: 214356 - DNA, 83 bp, Homo sapiens
gatctacaagaaaatccacaagaacgcactttcctcccagggcgaccattgacgaggtggagacggacgtggtggagattgag

SEQ ID NO: 214357 - DNA, 71 bp, Homo sapiens
accataaagatccaagtgctgttcacacagtgagatgcattctggtactgggcctaatcgctacgtgcctc

SEQ ID NO: 214358 - DNA, 75 bp, Homo sapiens
ggctatggagaaggtggcctcggcagtcctgtttccctgtaagagaccaagaagcgggacgttcaccatgggaag

SEQ ID NO: 214359 - DNA, 98 bp, Homo sapiens
ccaggaggatggccacatccccccgggctacatctcacaggtgctggttgccgaggagaacgtggacttccgcatccacgtggagaaccagacgcggg

SEQ ID NO: 214360 - DNA, 75 bp, Homo sapiens
ggacggggcgttcccaggtgggagcctggagggcaaagcgtggtgcgagcagatgtggacgagtgccaccgcgtg

SEQ ID NO: 214361 - DNA, 82 bp, Homo sapiens
ggatgctcttcagttcgtgtgtggagacaggggcttttatttcacttgctgatgaccgtatggcactggtgtcaggcatcag

SEQ ID NO: 214362 - DNA, 88 bp, Homo sapiens
gagacaagctgagcttgccgcacaaaaagctagagaggccggctgcctaccctccagactgtccgctatggctccaaggctgttaccc

SEQ ID NO: 214363 - DNA, 100 bp, Homo sapiens
ccgagggccaccccctggtcctctgccctcgcgccccgctagggccaggtcaaaatgcagatcttcgtgaaaacccttaccggcaagaccatcacccttg

SEQ ID NO: 214364 - DNA, 90 bp, Homo sapiens
gctacctgtttgaagagattgctaacatcgggcatgtggacttcctggagaaggtgcacaggctggcagagaggccctacatcatcgcgg

SEQ ID NO: 214365 - DNA, 83 bp, Homo sapiens
cagaccctggagcctcagttggaagcagccgatccagcctgcggagcctgtggggcagaaaaaaccgggaagatcctgacgga

SEQ ID NO: 214366 - DNA, 90 bp, Homo sapiens
agccatcaggaccccctgacagatagctgctgtaggtgagctcgtgaaacaatatgaagaggagaaaatagccttttaaggaaattggcc

SEQ ID NO: 214367 - DNA, 100 bp, Homo sapiens
gccgccacctcctctgatctacgaaagtcatgttacccaacaccggcttattccactaagctcaacaaatttcctgtatttaatattaatgatgacttga

SEQ ID NO: 214368 - DNA, 97 bp, Homo sapiens
tcagttgttgcatcaaatacttcatatttggcttcaatgtcatattttggatgaagatgaagatggtgatcgaattacagtgagaagtgatgaggaa

SEQ ID NO: 214369 - DNA, 100 bp, Homo sapiens
tgagcgggtcatcacgtcccgtcaggggccgcacatccgcgtggacggcgtctccggagggttgataagctcgtggatggggctggggacttctctgagt

SEQ ID NO: 214370 - DNA, 96 bp, Homo sapiens
gtcttgtgccttttcttgttcctactgtaaaggagatgggttagatgttggtccacatatagcctcagttacattagctgcttatgaatgcaattc

SEQ ID NO: 214371 - DNA, 75 bp, Homo sapiens
ctgggattggaactgtgtttgggagcctcatcattggttatgccagtctctgctggatgaaccgaatcctaacag

SEQ ID NO: 214372 - DNA, 74 bp, Homo sapiens
ccaggatgccatccactacatgacggagcaggcccccgccgccgtggtcgagctcccctgggacctgtggccgc

SEQ ID NO: 214373 - DNA, 101 bp, Homo sapiens
ctagccccgtcggcgcggacgcttgtcgagaatgcagattcctgggtactgccagatacgaaactggatggcttctacagggagccaggcctctgatatag

SEQ ID NO: 214374 - DNA, 101 bp, Homo sapiens
gagcaagcggagctcccccaagagccggaaagagaagcggtcagcaattttctcactgccctcagtttgcaaagaaagagcaggaatcagcagcaagttcc

SEQ ID NO: 214375 - DNA, 50 bp, Homo sapiens
cagaggtgaccatgtctgggatggaaaattggtggaacgagaatgcctac

SEQ ID NO: 214376 - DNA, 88 bp, Homo sapiens
caaccgtttccgcctcctgctagagcggcgaaccgtgggcagtgagagcagctcgtgctgggtgcctcgcaggagccagtaggccgct

SEQ ID NO: 214377 - DNA, 82 bp, Homo sapiens
aagaacagatgaacaaggccttattgttgaagacctagtagaagaggtggtttgggactgacaatagctgactaacatgtcc

SEQ ID NO: 214378 - DNA, 98 bp, Homo sapiens
ttcatgctgcgccgctacctagcctcggaccccgactgccgctggtgcccggccccggactgcgggcacccagattggctgaaaacttctgtgtctgc

SEQ ID NO: 214379 - DNA, 75 bp, Homo sapiens
ttcactgtcctggaaaaggcctgaagtggcactgaaatgaggcatagatgaggttttgctgttactgctcagtgt

SEQ ID NO: 214380 - DNA, 75 bp, Homo sapiens
cccgcgggtctacttcctcaaagatggcatgatcaacattgacatgactggagagaagaggtcgttggatctccc

SEQ ID NO: 214381 - DNA, 95 bp, Homo sapiens
cagaacttttggaactagtgccggcggctctccaccccccagaacatgccagcagaagcattcaccaactgacatgtgccctgaaagaaggcgat

SEQ ID NO: 214382 - DNA, 100 bp, Homo sapiens
ggaggagttccccttcgagaggaggcagattcccctctacatagacgacaccctgacggctgctctttggcgtaaattgcaatcgattagggatcgtttc

SEQ ID NO: 214383 - DNA, 75 bp, Homo sapiens
gtttcgggccagcgacccgctgctcagcgtcctcatgtggggggtaaaccactcgcgccatcatgaccgggtcct

SEQ ID NO: 214384 - DNA, 74 bp, Homo sapiens
gcaggcccggggagggtggttaccgctgaggagctgcagtctctgtcaaggctcgagaattacaagctcgggta

SEQ ID NO: 214385 - DNA, 100 bp, Homo sapiens
ttcgaccctgcccagcacgaccagctcatgcaggtgaacagtctacacgtggctgaccctgtggaggctgtgctgcagctccaggactgcagcatcttca

SEQ ID NO: 214386 - DNA, 100 bp, Homo sapiens
gatgatgaggcctggtcggtggatgacataggcgagctgcaagtggaggaagatgttaccgagtacttcagtgaattccttagtgcaggggaacggagtc

SEQ ID NO: 214387 - DNA, 74 bp, Homo sapiens
ttttgatgttcctcccaggagacagctatatttgcccatgttattcaagtctttctctaatacacagaattcta

SEQ ID NO: 214388 - DNA, 100 bp, Homo sapiens
tctcctaagagacccaggggaagacccaaaggcagcaaaaacaagagtccctctaaagcagctcaaaaggattcttctctaatacttgatgttcctctgg

SEQ ID NO: 214389 - DNA, 83 bp, Homo sapiens
gattaacctggagttaaggaacagatccccggaggaggtgtgagatgcacaatgcgaaacctaggccccagcttttacaccat

SEQ ID NO: 214390 - DNA, 100 bp, Homo sapiens
cgaccgggagttcctccgcaccctgcccggcttcctcatcgtggccgagatcgcagttcaattaacctccagaagatggctgaacctgcaggaataccag

SEQ ID NO: 214391 - DNA, 100 bp, Homo sapiens
cgtgtttgtctcgctctgtgctgagggctgatgctgaggacctccttgactccttccttagcaacattctacaggctatcatggtgaacttacttcagat

SEQ ID NO: 214392 - DNA, 96 bp, Homo sapiens
ccgactcagctctcggcctgctgatgctccagcagtacccgcggctacgggaggagatggagcgcatcgtgaccacccacatccgggagcgcgagg

SEQ ID NO: 214393 - DNA, 100 bp, Homo sapiens
tggaagcagaggaagtagtttaaatgatacctatcactcaagagactcttcatttagattggattctgaatatcagatatggagtctggagaacggttac

SEQ ID NO: 214394 - DNA, 50 bp, Homo sapiens
tccagtcccctgaggtgatggcagagtatgctcaggtaatcaaaatgttg

SEQ ID NO: 214395 - DNA, 119 bp, Homo sapiens
gcagagcttggaaggatgcttcagctcatcttaggctgtgctgtgaactgtgaacagaagcaaggtgtaatcctgagagattcacatggtgttgcacaagtacgttttgtgacaggcaa

SEQ ID NO: 214396 - DNA, 83 bp, Homo sapiens
agaagggagactacaaggacagcagcgactttggggcccgtcaccctcagttaccggtattgtaagaacaagccgtacccaaa

SEQ ID NO: 214397 - DNA, 97 bp, Homo sapiens
attttagggtcctttatatagaagggagagtagaaacatggtggtggctttgaaggagctgtctattcggggtgactttcgaactacagttgaatac

SEQ ID NO: 214398 - DNA, 96 bp, Homo sapiens
agtgtgtgatacacatccatacccttgcaacagcagctggcgcactgtgtgaggagaacatgcggggtgtgcgcttcgacgtccacgacgtcaccc

SEQ ID NO: 214399 - DNA, 90 bp, Homo sapiens
gcggaggcagaggtggaggcgctttgaaagataccccatgtttccccatcactcgaggagtctgggcagagactggactacaccgtggga

SEQ ID NO: 214400 - DNA, 97 bp, Homo sapiens
agcctcccaagcagctggtattacagatcttaaatctgacccaggccttgaaagacaacaagagtcccctgcacctcgtccagatgccacctgtgat

SEQ ID NO: 214401 - DNA, 48 bp, Homo sapiens
cttggtttcatagagactgtttacaggatcttcgaaatcaactatatg

SEQ ID NO: 214402 - DNA, 101 bp, Homo sapiens
agaagaccagcccttgcctgcccgacggctctcctctgactgcagcgtcactcagggcttcgtgggacacatatgcaacatgcctatgatttttacaagcc

SEQ ID NO: 214403 - DNA, 100 bp, Homo sapiens
cagcgccgtagagatcgctcccactcaggtcacagactccaaccgggaagactttgacccagcacctgtaaagagcaaatttgattctcttgactttgac

SEQ ID NO: 214404 - DNA, 75 bp, Homo sapiens
cagaggacaacgaagtgttcgggaccctgatgccccacaaccctgcggcaccacagagccgaccacaagctccag

SEQ ID NO: 214405 - DNA, 100 bp, Homo sapiens
gtgcaaggaggagtgttctctccctacagaagatttcagccccggccacgatgtttgctgtcagcggatggaaaagtcttcctcaattgatggttcatac

SEQ ID NO: 214406 - DNA, 74 bp, Homo sapiens
ccggagctagctggatcctctaggcagctcaaatctaatccaagtgaaaatgaagaaaaggaagcacagtctca

SEQ ID NO: 214407 - DNA, 75 bp, Homo sapiens
gaacaaacttcagaacaaatattcagactttaccgtgccattggaaatataatgaggaaactgaagagttttagt

SEQ ID NO: 214408 - DNA, 100 bp, Homo sapiens
ggcatcctcagcatggccaactccgggcccaacagcaacaggtctcaattgcaaatttagcgatcaacccagcggccttgctgcccacagcggcttccca

SEQ ID NO: 214409 - DNA, 97 bp, Homo sapiens
aatgagattatctttcattgtgttttcttctcaagcaactattattttgccattaactggagacagcttcgcaaacctgggtatacttcatgtgaca

SEQ ID NO: 214410 - DNA, 75 bp, Homo sapiens
ttgggaaaaagctccaggattctgacagggatgttgcgaaggaaagtgactattttaccccacagggagaattcc

SEQ ID NO: 214411 - DNA, 82 bp, Homo sapiens
ccacctcacagattccagcttcggaacaagagaccctgtggacatttgggagcaataaaaataagaagaaaggaaaagccag

SEQ ID NO: 214412 - DNA, 74 bp, Homo sapiens
gtggatttggggatggctataatgggtatggaggaggacctggaggcgtttagagaaaatggcagacgatattg

SEQ ID NO: 214413 - DNA, 82 bp, Homo sapiens
ccctatcaggacatggagtatgaaagacgatttgagttctgtgaacctgcatttgttgttggtaattgcctccagatagctt

SEQ ID NO: 214414 - DNA, 100 bp, Homo sapiens
gttattcgagtgaccgagaccgcggccgggaccgagggtaagtaaggaggtctctgtaccatggctcgtacaaagcagactgcccgcaaatcgaccggtg

SEQ ID NO: 214415 - DNA, 102 bp, Homo sapiens
gaaagcagatgttattaaggcagctcacctttgtgctgaagctgccctacgcctggtcaaacctggaaatcagtctgaagatgatgagaaactgaaaaagag

SEQ ID NO: 214416 - DNA, 75 bp, Homo sapiens
tacataaaccagtcacccaagtgcattgcctttggaaacgagaaggtggtcttctgccctgttaaagaagccctg

SEQ ID NO: 214417 - DNA, 95 bp, Homo sapiens
aggaagtgatattattgtagatctagaagtcactttggaagaagtatatgcaggaaattttgtggaagttttggaacttgaaggtgaaaaaggag

SEQ ID NO: 214418 - DNA, 95 bp, Homo sapiens
atattggtgactcctctcctctgattagagccactgttgagcttgtggacaaatgtataggatcaagaattcacatcgtgatgaagagtgataag

SEQ ID NO: 214419 - DNA, 75 bp, Homo sapiens
gggaggtcctccatgcgcagtcatgagtcgcttcaagtttatcggtgatctgtgaaaatggttcgctattcactt

SEQ ID NO: 214420 - DNA, 88 bp, Homo sapiens
tcattaccgtcgccagcggagcgaacccgagagcgtggagcgggctgggccaggattttgcaggttaattcctcacacacgttcacca

SEQ ID NO: 214421 - DNA, 82 bp, Homo sapiens
gaccgtgtctgcaagagtcaccttctggactgctgcccccatgacatcctggctgggacggaagcggggagaggtggtgaga

SEQ ID NO: 214422 - DNA, 100 bp, Homo sapiens
cggggaaagccgtggccccgagggcggatccgagcaaaagctgatgaagcattgaaagccaaagaaagaaatgaggaagaagcaaagagaagaaaggagg

SEQ ID NO: 214423 - DNA, 74 bp, Homo sapiens
ccaagatggctgcgctgttgctgagagttttgaagcaccatgttgttccgtgtcatctgaaagtatccaggatg

SEQ ID NO: 214424 - DNA, 74 bp, Homo sapiens
ggagagaacgaagcctcggctgggagcgattctggaacttttcaaagcctgactctcttcttgaaacagtggag

SEQ ID NO: 214425 - DNA, 74 bp, Homo sapiens
agtctattcctggattcaatgtcatccagagcccagagcaggtggccactaacacggacaccagccgaaatgcc

SEQ ID NO: 214426 - DNA, 101 bp, Homo sapiens
tgactccgttatctgcaggtattgggagatgcacagctaagatgccaggaccacctggaagcctagaaatggaagatgagaatgtgcctactgctcctgat

SEQ ID NO: 214427 - DNA, 100 bp, Homo sapiens
gaattcgtcctgcagaatcacgcggacatcgtctcctgtgtggcgatggtcttcctgctggggctcatgtttgagccggcacagtcttcactaccgtaga

SEQ ID NO: 214428 - DNA, 102 bp, Homo sapiens
gtcaaaagcttcccaccacatttacccatattcttcctcacaagacgatgctgttgctgtattggacacttgctcccatctactttcttctctagaatccac

SEQ ID NO: 214429 - DNA, 95 bp, Homo sapiens
ctacagagttatcaggttccagaccctgccttctcttctgaaaggtggccctggtacagtggacggaaagtgtgggcttaaccctggtgggccga

SEQ ID NO: 214430 - DNA, 76 bp, Homo sapiens
tggactgtgcagtatttccagtctgtctcaggaagggaaaaggccgaggcatcagcgtgtgaagaccgcaaagacg

SEQ ID NO: 214431 - DNA, 83 bp, Homo sapiens
gaggcttttaacaagaccatatctacaaaagaccagaaccttcagggtttataaatctgacctcattttctcttcatgtcttg

SEQ ID NO: 214432 - DNA, 100 bp, Homo sapiens
gtatttcctgtacctgaagtgtagcgaaaatgctactatgactcttcctggaatacacccacctaccttgaaccaggtacaggtttgcagattccgccag

SEQ ID NO: 214433 - DNA, 100 bp, Homo sapiens
actcctgggctcaagtgatcctcctgcctcagcctcccgagtacctgagattagcccagcatccaggatattgcagtcctcttcaacatcatcatcattt

SEQ ID NO: 214434 - DNA, 100 bp, Homo sapiens
tagacagacctgccgacattgacatgtcatgcctgggtgcagcttctctagctggccttgctgttgaggagaatttgcgctttggcttgatggagatctc

SEQ ID NO: 214435 - DNA, 148 bp, Homo sapiens
caggagcagaggagtctgatgatgagaatgctgtgtgcgcagcacagaactgccaaaggccctgcaaggacaagaacactgtatggagttccagaagaccaacggctccctgaatggtacctctgagaatgccacctctcctgtcatc

SEQ ID NO: 214436 - DNA, 100 bp, Homo sapiens
attcagcatagctattcctgttgatggtgatgaagacagtgatcttccattgtttgaagcactggacctttaatccactgtaggtatggacagggaagaa

SEQ ID NO: 214437 - DNA, 75 bp, Homo sapiens
cggctccccagccccaggccgggagggctccagcgtgacatggctgaagcgcaccaggccgtgggcttccgaccc

SEQ ID NO: 214438 - DNA, 98 bp, Homo sapiens
cggcgaaggaggcagaggcacttatgcttgtcaggtctgctgagaacagacccagtccctgaggaaggagaagatgttgctgccacgatcagtgccac

SEQ ID NO: 214439 - DNA, 99 bp, Homo sapiens
aagccgcggagccggtggtgccttcgctcgtggatcgatacttcactcgctggtacaaaccggaccggaacatgaacattttgcagtactgcccctctt

SEQ ID NO: 214440 - DNA, 83 bp, Homo sapiens
ggagtcgccagggctgcgtaggcttgtggcgcgcccgcggagaggccgggtatggtttgaagtggtgaacatggatttttctc

SEQ ID NO: 214441 - DNA, 74 bp, Homo sapiens
gcttattcctctattgctgcaaaaaatgcagaactagaacaggagcttatggtgatggaagctgttttattgtc

SEQ ID NO: 214442 - DNA, 75 bp, Homo sapiens
cagttccgtgctccattatgtcgtgtgcttccccgctggggcacccagggtgacttctccacaacccatgcactg

SEQ ID NO: 214443 - DNA, 90 bp, Homo sapiens
cgcgagagatggagatgggcagacggattcatttagagctgcggaacaggacgccctctgatgagccggaaaattcaaatccgaaatatt

SEQ ID NO: 214444 - DNA, 104 bp, Homo sapiens
tggatgcctccattaagaaaatgaaacaagcctttgctgaattggagagctgggtgacgactccgatgaggaagatctttgtatcagcaacaaatggactttcc

SEQ ID NO: 214445 - DNA, 100 bp, Homo sapiens
cggctgcggtggcggcgtttggatgattgtctctcggcggcggagtcggtaatagcagtgagtgcccgcctccaggaaatgctgaagatgacactgtttg

SEQ ID NO: 214446 - DNA, 82 bp, Homo sapiens
gggtattttgtggaatctcacccatcagacaatttaacggatgaagagtcccggaaaaattgggaagaatttggaaatccag

SEQ ID NO: 214447 - DNA, 75 bp, Homo sapiens
ggatgtcaaagtcatactgcagtgggacggaacgggttgcagtgagagcagatgctggcaagaagcacttaccag

SEQ ID NO: 214448 - DNA, 100 bp, Homo sapiens
gatcttcgaacttttgacacggctttggaaacgacgtcatgtgttaggtacaccaggggttggaaaaaccacactaggcaaagaacttgcgtcaaaatca

SEQ ID NO: 214449 - DNA, 75 bp, Homo sapiens
gtttgacgacactgatggtttgctcgatcaagtcatccgccaaagaagcctgtccagtttggaactgttcctctc

SEQ ID NO: 214450 - DNA, 100 bp, Homo sapiens
tgctgtgagctctgcaagtatgacttcataatggagaccaagctcaaacccctccggaaggttgggggccgtcccgctcctaaggcaggaagatggtggc

SEQ ID NO: 214451 - DNA, 124 bp, Homo sapiens
gacagccttcatttctctgaacatactgccttatgggacagatcaagtgttacctcattttgaaagtcttgggaaacaggaaaaaattcctaacaaaatgtcagcttttcgaaatcattgtcca

SEQ ID NO: 214452 - DNA, 75 bp, Homo sapiens
gtctgctgcgttcacggcaggattcggttagctttcttggactccgtactgttggtgtaaccaaggcctggaggt

SEQ ID NO: 214453 - DNA, 97 bp, Homo sapiens
gctgtgccctagctcagcggatacccccgtgcccctgcccttctttgtacgcacagccaaccagtcactgcttcaaccacctgtgagaaattagaaa

SEQ ID NO: 214454 - DNA, 98 bp, Homo sapiens
gccctgaagccgaaggcagatgccaagctgggcatgcccatgtgcctgcggctgtggcagcgatcattcttcggaacatagctccgcacactgtggtg

SEQ ID NO: 214455 - DNA, 90 bp, Homo sapiens
ggatccttccggatggcacagtggatgggacaagggacaggagcgaccagcacagtcagtactcctgcatttgtaccaacgaaaactcac

SEQ ID NO: 214456 - DNA, 75 bp, Homo sapiens
gcaaaagaaggagggtcctctcagtgattaagcttcagctttagctgcagctgcctctgttcagccacttgcaac

SEQ ID NO: 214457 - DNA, 90 bp, Homo sapiens
ggcagcgaaccgggggagcgaggcacgtggcctggtttgctttcgaccctggctcggcgcactcggacatcatcctctccaatgacaacc

SEQ ID NO: 214458 - DNA, 100 bp, Homo sapiens
ggagaaaaaaggacctccaattcaattccgaatgatgactggacgaatgaggggccaggcttttatcacctttcccagtggagcccctgttgttgctgaa

SEQ ID NO: 214459 - DNA, 75 bp, Homo sapiens
gcctcctgcaacacctgcggcctcactgggacccccaggaggtgaccctgcaggatgaagtggcacagccactga

SEQ ID NO: 214460 - DNA, 75 bp, Homo sapiens
ctgggatgggtccttctggaaacttagccaaaatatttctgaccttatgtttgatcatcggccaaggtcctggcg

SEQ ID NO: 214461 - DNA, 98 bp, Homo sapiens
ttgggctagtaaggatgccacctatacttctgcccggaccctgctggctatcctgcgcctttccactgctctgccgagaccgacccgcccgcccgcgg

SEQ ID NO: 214462 - DNA, 86 bp, Homo sapiens
caggagcagcccaagcgccttccctcacgtgtcatggagaaactccagctgggcccagagattctgcagcgggaaaatccaaggct

SEQ ID NO: 214463 - DNA, 100 bp, Homo sapiens
ctatcccaagtctatgtccaaggaagctgtggccatctgcaaaggggtcgaggcttgaagagtggagagaactttaagttgttatatgacttggcagatc

SEQ ID NO: 214464 - DNA, 100 bp, Homo sapiens
attactcaaaatatgcagggaagattggagctggagtgagccttccaggaattttggctgccaaatgtggtgcagaagtaatactgtcagacagctcaga

SEQ ID NO: 214465 - DNA, 98 bp, Homo sapiens
gtacccattgagcaatgcctgccttcacttgaaaactccaagtactgccgtttcaaccaggacccagaagcaggtaagaatgattgatgttggctgat

SEQ ID NO: 214466 - DNA, 75 bp, Homo sapiens
cctgtgcagtcctgttggaatttattattcttggagaaaccctgtctgtttactgtaaccttttgcactcaaatt

SEQ ID NO: 214467 - DNA, 143 bp, Homo sapiens
gagagtttgcgctacgctgagtacttgcagccctcggccaaacggccagacgccgacgtcgaccagcagagactgaactgaagcgctgcggcatggcgcgcgcctgcctccaggccgtcaagtacctcatgttcgccttcaac

SEQ ID NO: 214468 - DNA, 75 bp, Homo sapiens
ccgaggtagaggcagtggcgcttgagttggtcgggggcagcggcagtcgggaacatgccctgtgtgccgccgtca

SEQ ID NO: 214469 - DNA, 96 bp, Homo sapiens
ttcagttcgccgatgggaaacccggagaccaaatccttgaatttcgctaaggagtttgtgatcagtgatcggaaggagctggaggaagatttcatc

SEQ ID NO: 214470 - DNA, 100 bp, Homo sapiens
gctccctcctcggtggtcgcggcgacctccggcggcgggaggcccggcctgggcaggcagcctgcttctgcaaagtggtacgatcgaagggactatgtct

SEQ ID NO: 214471 - DNA, 100 bp, Homo sapiens
ctgaagggcaaggaaagcagcatagagaatgagatagccgtcctgagaaagaaatatgagctgtacagcatggactgggacctgaaggaggaactcaggg

SEQ ID NO: 214472 - DNA, 96 bp, Homo sapiens
gcggaccttcagctgccgcggtcgctccgagcggcgggccgcagagtattgaatttgaccgggattgtgactattttgcgattgctggagttacaa

SEQ ID NO: 214473 - DNA, 87 bp, Homo sapiens
gtgctggaagctcatggacaaggagtacttcttgcaagcagagctgacaagcaacgtcttaaaaacaggcgtggtgcgctgctgcgt

SEQ ID NO: 214474 - DNA, 100 bp, Homo sapiens
ccgaaaacccgactttccctcatggctggtcgtctccagactccacactcctagcaagagaactatggatttgataaaattgaggtgcgagataacgggg

SEQ ID NO: 214475 - DNA, 98 bp, Homo sapiens
aacgagacggagttccaggcggtgatgcaggcgaacctcacggccagctccgagggttacatgcacaaatattgatgatgttaagaagttcaaaccgg

SEQ ID NO: 214476 - DNA, 100 bp, Homo sapiens
atttacccttgggatacctgtgcagccgttcatgatgtgaggctttcattattacagcgttattttaaggatgtggagcagttctggaggttttatagcc

SEQ ID NO: 214477 - DNA, 80 bp, Homo sapiens
aaacctgtcagctttctgtttaaataaaagatgtgttcagagcaacattgttttgttgacacaagcatttagaagaaagt

SEQ ID NO: 214478 - DNA, 60 bp, Homo sapiens
cctgggactgggacaacgataccaccccgaatgagacagggtttcgccatgttgaccagg

SEQ ID NO: 214479 - DNA, 74 bp, Homo sapiens
ggctccccagccatgcttcctgtacagcctgcaaaactgtggtcgtgtgatggtaacagatgctgacaggtcaa

SEQ ID NO: 214480 - DNA, 98 bp, Homo sapiens
gctgctgacgtcacatggagcacagaaatcaatgttagcagatagccagcccatacaagatcgtaaggccttacgaccggatatgggctataatacat

SEQ ID NO: 214481 - DNA, 74 bp, Homo sapiens
aaaattctgcttgttaagaacaagtttggctctgcacatacccccggcctcatgagtacctgtccccagcggat

SEQ ID NO: 214482 - DNA, 82 bp, Homo sapiens
catgccccagccagtccccacagcataacaggtgaaatgacaatggatgctctgttggctcgattgaaacttctgaatccag

SEQ ID NO: 214483 - DNA, 83 bp, Homo sapiens
cagacatctacaaccttcgatctcctgacgagtgtggtggacacaggcctattcatcaacatggctgagagagtctactttgg

SEQ ID NO: 214484 - DNA, 101 bp, Homo sapiens
gccactcctcccggaggcgacatggggcacccggtgtaccgcggcgagaagccccagctgcactacgcgtttgaacgccatgaccctgtggatgggagaat

SEQ ID NO: 214485 - DNA, 94 bp, Homo sapiens
gaatttaacccaacgtcaatcaaattcaaaatccagctggtcgctgtgaatggtcctcgtccgaagtgagaatgggcagttgttaatgattcct

SEQ ID NO: 214486 - DNA, 153 bp, Homo sapiens
ctggaacgaacatgatggaacagcagatggagataaacctaaaattctcctctattccctaaacttgcagttcaagactccccatccccaggatgtcaacctcagtccctcaaggccatacctggacccaacgggtgaagaaagacgatgagg

SEQ ID NO: 214487 - DNA, 100 bp, Homo sapiens
ggagagatgctgggcgtggcggccgggatgacccacagtccctgtgttgtgcaaatcaaatgccattgaagtgaacatccccagggagctggttggtggc

SEQ ID NO: 214488 - DNA, 75 bp, Homo sapiens
gcggggctgtggagcggccgctgaccccggttggaaagacttcaaatcatgcaatagttcttgcccagctcatca

SEQ ID NO: 214489 - DNA, 100 bp, Homo sapiens
ctctgggagcctagaatgcatcagtgcccttgtggcgaatggggctcacgtcgagggatgtatggcattgagaatgaagtcttcctgagccttccatgta

SEQ ID NO: 214490 - DNA, 100 bp, Homo sapiens
ctgttcggcctgccatgtggaaaatgatgcttaatatcgatgatgaggaaactgaggcttggtgaagttacgaaacttgtccaaaatcacacaacttgta

SEQ ID NO: 214491 - DNA, 87 bp, Homo sapiens
gggccggagggcccacaacccgcagagacttctactggctgcgctcctttctggccggaggagacggtggctcagggagtaaaggaa

SEQ ID NO: 214492 - DNA, 100 bp, Homo sapiens
cccacgcttagccagctcccgtgtctttggtgcaacactaacaaggcttgtctggactacccagttacaagcgtcttgccaccggcttccctttgtaaat

SEQ ID NO: 214493 - DNA, 71 bp, Homo sapiens
tgcttcagctcatcttaggctgtgctgtgaactgtgaacagaagcaaggcgcagatcaggcctctataacc

SEQ ID NO: 214494 - DNA, 90 bp, Homo sapiens
attggaaatgccccagcatgggggcagagaagctgcctgctcaactaccgcgtggacttcaccttctacccacgccgtacgccgctgcag

SEQ ID NO: 214495 - DNA, 100 bp, Homo sapiens
atcttgttacctgtggaaatcagaagagagaatatagtaaaaatacgcagtacagtcccagtttgaaatgcttactggtacactccctttccaaggaaaa

SEQ ID NO: 214496 - DNA, 90 bp, Homo sapiens
gcacgacacatggaaattggactaaattaccagaatgcagggagtggctgagctcccttcgggcccatgttgtgcgcactggcattggac

SEQ ID NO: 214497 - DNA, 100 bp, Homo sapiens
cgcgggcccgaggccggaggaacccggactccggcgtagcgaaactaaagttacagagtggagaggtaacaaaagaagagaggcagcctgcatcagccca

SEQ ID NO: 214498 - DNA, 74 bp, Homo sapiens
ttccacaatcagacaggtcctcatccagctcacaggaaagtctcaatgatgtcttggcattgcccattttcaag

SEQ ID NO: 214499 - DNA, 75 bp, Homo sapiens
tacaccaaagtcacatttagggtcatggaatctggctgagcaggtatgaaaagatgcattttttcaatgttcccg

SEQ ID NO: 214500 - DNA, 131 bp, Homo sapiens
tggaagaacaactgaaaagtgatgaggaactggcaagaaagctaagcattgatattgtgcaagtgaaagtgtaggaaaacatatgcttgaagcgtgcaacaataatctggaaatggcagtcactatgtttt

SEQ ID NO: 214501 - DNA, 75 bp, Homo sapiens
gaagatctttttcctcaattggaccagtcctgcctctgttgtagaagacatgtggtgtatataaagtttgtgatc

SEQ ID NO: 214502 - DNA, 74 bp, Homo sapiens
gagaatgtgtcagccgatgcaccgagtccagcccaggaaaatggagaggctggagtgcaatggcgcaatctcgg

SEQ ID NO: 214503 - DNA, 74 bp, Homo sapiens
tccggaacagcaagaactgcaccgaaccagagcaattgtatgatggctatgatgaagagtatgactgtcccatt

SEQ ID NO: 214504 - DNA, 98 bp, Homo sapiens
gagatttacctgtgagatgtttcatcccaacacttagcagtgtctgcaaaaacgaatcttttcctacaacctgttaactgactggactgttggtaaca

SEQ ID NO: 214505 - DNA, 152 bp, Homo sapiens
ccgaggcgtcgcgcccgcaccagtggcaggcagacgaggacgcggtgcggaagggcacgtgcagcttcccggtcagggacatggtctgctatacagctcagactctcgtccgaatcctctcacatggtggctttaggaagatccttggccag

SEQ ID NO: 214506 - DNA, 134 bp, Homo sapiens
cacagtatcagttaaggagcttgatttgtttttggcatactacgtgcaggagcaaggtaaatattgcaacttcagcaacttcaaatattgaatatgcccacgttcctcatctcagcccagctgtgattcctact

SEQ ID NO: 214507 - DNA, 101 bp, Homo sapiens
atcaaccgccagatcaacctggagctctacgcctcctacgtttacctgtccatgctcgggttcatgacgctctcgatattcctgtgcagaaacctggacca

SEQ ID NO: 214508 - DNA, 100 bp, Homo sapiens
tgaatttcctacagttcttgatattacaggacaggaaaggccatgtgaggacatagggagaaagcagccaccattggcaagccaagagagagccctcacc

SEQ ID NO: 214509 - DNA, 51 bp, Homo sapiens
accaagagctgaagctgatcggctctgtgtggctgcacagtgaacgtcccc

SEQ ID NO: 214510 - DNA, 83 bp, Homo sapiens
gcgaacgaccaagagggtgttcgactgctagagccgagcgaagcgtctcctccgggctggggctgagcaagccctcggagtga

SEQ ID NO: 214511 - DNA, 100 bp, Homo sapiens
ctcctagccaaattgctcaactaagaccaagtcctcgctggactgctcagggtgccagacctcatcgagcttctggaagaggtgaagaaggaattgcaga

SEQ ID NO: 214512 - DNA, 97 bp, Homo sapiens
caacatcctgctcctgctcatggacgactgatgaacggcagcagccactcaccaacagccatcaatggtgcaccgtgcacacccaacggcttcagca

SEQ ID NO: 214513 - DNA, 74 bp, Homo sapiens
ttgtctccagctgttagccagaagcctcccttccagtcagggctctctgatgtaaaggatggagtaaatcaagc

SEQ ID NO: 214514 - DNA, 50 bp, Homo sapiens
cttttcctaggcaaaatcaagaagggatcagagaaggctgaagaaggtgg

SEQ ID NO: 214515 - DNA, 98 bp, Homo sapiens
gatcgtccgtgcgtctagcctttgcccacgcagctctggcaggctgccctgagcacgctcaaccccaaccccacggacagctgtcccctctacctgaa

SEQ ID NO: 214516 - DNA, 50 bp, Homo sapiens
cggcggttaagtatgcggcgccaggagcttagagacggggtttcaccatg

SEQ ID NO: 214517 - DNA, 90 bp, Homo sapiens
gtgactttgcatttattacctcttcaagtctagttgccacatctggacactccaatgacaatagaaaggaaggcagaggaagccacggcc

SEQ ID NO: 214518 - DNA, 98 bp, Homo sapiens
cggtgtctgcagcaccctccgcttcctctcctaggcgacgagacccagtggctagggctgcccctgatggggcctggcaatgactgagcaggcccagc

SEQ ID NO: 214519 - DNA, 90 bp, Homo sapiens
cgcgtctctctgctgcggcgcggggaccgctgtgctctcggtattgttgcagcatctggcagtgagactgaggatgaggacagcatggac

SEQ ID NO: 214520 - DNA, 74 bp, Homo sapiens
ccctggcccagctgaaccccgagtcctccctgttcatcattgcctccaagattactgattttgggcactccaag

SEQ ID NO: 214521 - DNA, 95 bp, Homo sapiens
tccacccatccgtctgtccatccgcccactcagctatctgtttatcaagtccaagtggtaagaagttcagaagcaagcctcagttggcaaggtac

SEQ ID NO: 214522 - DNA, 100 bp, Homo sapiens
ctcagcctcctgagtagttgggattacaggcaccacaccaaccccgtgggcactgagtggcggtggaagatggaccagcctgaaatgatcttgaaggaag

SEQ ID NO: 214523 - DNA, 101 bp, Homo sapiens
ctggccaacagctcggatgcgaccctcccagaccggccgctctcccctcctctcacggcacctcccaccatgaagaattcttccatctctatgacaacaag

SEQ ID NO: 214524 - DNA, 50 bp, Homo sapiens
tgggagcgacgctcagggcccgcaggtgaaagaaaatggcccgaaccaag

SEQ ID NO: 214525 - DNA, 74 bp, Homo sapiens
cgtgaagactctgactggtaagaccatcaccctcgaggttgaaccctcggatacgatagaaaatgtaaaggcca

SEQ ID NO: 214526 - DNA, 137 bp, Homo sapiens
ggagctataaacagaaaaagaaaaggcgacgtattaaggttcaagaagattcatccagtgaaaacaagaataccctctaccatctgctttggtcagggtgccgctcgaggatttaaaagcaacaagaagaaaaccaa

SEQ ID NO: 214527 - DNA, 128 bp, Homo sapiens
tgacggagttcaacccagaaatccaggtttcccgcatccgatgtggactcagccactttgctgcactgaccagtgtggccgacgacgatgccctcgctgaggagcgcatgcggagaggccagaacgcc

SEQ ID NO: 214528 - DNA, 74 bp, Homo sapiens
agggacaacaggcaggagaattatgggagcgcatttccccagggtagcctttccagtaaatatatgactcaggg

SEQ ID NO: 214529 - DNA, 75 bp, Homo sapiens
gagagaggaggagtcacccggacccagccacacagaatactcccccagttgcaagaggcgcaggaccgtggaaga

SEQ ID NO: 214530 - DNA, 97 bp, Homo sapiens
ttcagcgtagagtcgctggagcgggcggagctgtgcgagagcctcctcacttgggattttgcctaccattttacagtatttgtcttctattttggag

SEQ ID NO: 214531 - DNA, 98 bp, Homo sapiens
attggcgtgttcactgggcagcttctgggcctgcccgagctgctgggaaaggtggtgatgatgtccagcaactctgtgaagcaggagaagaggagttt

SEQ ID NO: 214532 - DNA, 100 bp, Homo sapiens
agcgagttactcacgcttcccctccatcggaagccagccaggccaaaacccagcaagatatgcagtccagattcagaacaatttgtgggcaggaaatgca

SEQ ID NO: 214533 - DNA, 80 bp, Homo sapiens
gatccagcctgcggagcctgtggggcaggctggcagtgatggtgaaagcataggaaactgccccttttcccagaggctct

SEQ ID NO: 214534 - DNA, 90 bp, Homo sapiens
caacatggacttcagagaaattctcatgatagcttccaagggacaaggtgtcaacaatgtgccggtgaagatggttctggtaaaacaacc

SEQ ID NO: 214535 - DNA, 100 bp, Homo sapiens
ccaccatctatgagctgaaagaagacaagagctacaatgtcacctccgtcctgtttaggagttgatccctgaattttattatctccctgagatgtttgtc

SEQ ID NO: 214536 - DNA, 83 bp, Homo sapiens
gaccttcatcagtgacgtgctgcagcgggacttgcgcagtgtggcataaatgccaacgatgtgaagaaattggaagaagctgg

SEQ ID NO: 214537 - DNA, 100 bp, Homo sapiens
ttgaggaagagtactacagattttatacaccaccaaactttgttcttgctcttgttttgccctcaattgtaattctggtgtgcaggatgacagaattcga

SEQ ID NO: 214538 - DNA, 100 bp, Homo sapiens
ggaaatgcgtgcactgcgtccctctagaggacgccaagagtgccgaggatgaggctccttccagacacttgggaaagcaccagccccgctcagcacaggt

SEQ ID NO: 214539 - DNA, 90 bp, Homo sapiens
ctgagattgcatcaggatattaatgattataaccggagattctcagggcaacccagatctgagtcgttcacgcctactgaggagcatgtg

SEQ ID NO: 214540 - DNA, 89 bp, Homo sapiens
gagttcagaaaacagttccccctgcatgaaaaggttgaggaacaggttagcaccactgagagagtgtttcaggatagacaatatcagat

SEQ ID NO: 214541 - DNA, 75 bp, Homo sapiens
ccgaagccccctgcaggaactctacaacccaatccaggatctaccgctaccagtctcatgactatgccttcagta

SEQ ID NO: 214542 - DNA, 100 bp, Homo sapiens
ctgcgaaggccgggacccggttccccggcccacagtgggggtgtgcaaacccgagagaactgggccctgccctgggagaagccctgccacacgtcgtgcc

SEQ ID NO: 214543 - DNA, 75 bp, Homo sapiens
caagaaaacatcaaagaggtctagcaaagtcactcagcctctgaagaagcttcgggttcagactcaggcagtcag

SEQ ID NO: 214544 - DNA, 95 bp, Homo sapiens
ggtgaattacatcttctttaaagatccatcttcggttgtgaatccggcccggaatgcagccaccccttagagcaaccccccttgctgctcgtgcc

SEQ ID NO: 214545 - DNA, 75 bp, Homo sapiens
aagaaaatggcagagaatacaaatttgatgtttcgtcagagttactagagccgcagggccgtaggcagccatggc

SEQ ID NO: 214546 - DNA, 74 bp, Homo sapiens
gggaaagctgctcaaggagcagaagtacgaccggcagctgaggcctctcttcagcttctggagacctcactatc

SEQ ID NO: 214547 - DNA, 75 bp, Homo sapiens
tggctgctgcctcgtgtcacatctgaaactcatctgtacctcacttagaaagagtggaggaaaatccagtacatg

SEQ ID NO: 214548 - DNA, 101 bp, Homo sapiens
cactttattatgcaggtggtctgtgaagccacacagtgtccagatacgaggcaatatgctcccctgctggccgtgttcagctcccaaggccagtcagagct

SEQ ID NO: 214549 - DNA, 90 bp, Homo sapiens
gttatagatttgcaaacaagactttcccagcagactgaagcttatcaaccagcccagccgtatcccttcggaacaggggggtcagcaatg

SEQ ID NO: 214550 - DNA, 100 bp, Homo sapiens
ggaggggagggggcgttagccccgcgcagccgccggcgtcgccgccatggacctaggatgaagtgaagctgccggccaaactgagcatcagcaaatcgct

SEQ ID NO: 214551 - DNA, 83 bp, Homo sapiens
tgaacagaaacacctaggaagggagaactgatgaggacggggacttggttgccttttccagtgacgaggaattgacaatggcc

SEQ ID NO: 214552 - DNA, 115 bp, Homo sapiens
tggaatatgagtgatgacaaaccctttctatgtactgcgcctggatgtggccagctgttgtgaacttggataattctgtggttgacctggagacccttcaagctctctatgagaa

SEQ ID NO: 214553 - DNA, 95 bp, Homo sapiens
ggaacggcggcgacaagggtgttcccgaactagagtggtaatagttatgcacgagtgcgagctgtggtgatgacccgagatgactcaagtggtgg

SEQ ID NO: 214554 - DNA, 75 bp, Homo sapiens
attcctcagtgctcacttggaatacagggagtaggttgcatctttgttgaaatgatccaaggagttgctgctttt

SEQ ID NO: 214555 - DNA, 98 bp, Homo sapiens
gggctcagagatccaagtgcgcgccctggcgggtccggaccaaggccgtaagttcatcatcgccaacgctcgggtggagaactgcgccgtcatctact

SEQ ID NO: 214556 - DNA, 98 bp, Homo sapiens
tccagctccgcccggtgcccagcgttttcgcgccccaagagcaggaataccagcaggcctgcacccccatgttccgggagtactccctgcaggttctg

SEQ ID NO: 214557 - DNA, 100 bp, Homo sapiens
tttaaatccggagggggaaaaaatcccaaggtctgcaaagccattgagacccagagcagcagttctgaagagatagtgcccagccctccctcgccacccc

SEQ ID NO: 214558 - DNA, 75 bp, Homo sapiens
caataagaacttctccaaaaagattcagcagactggcattgctcgggtaccacttgctggagctgctggaggccc

SEQ ID NO: 214559 - DNA, 90 bp, Homo sapiens
ccgggaccggccgaaaggcgaggaaccgattgaagatccaggttgcttctgggttattataaaagggtgtagtccctttttagatcatga

SEQ ID NO: 214560 - DNA, 98 bp, Homo sapiens
taaaagagatcaccgacaagatcaccacggacgagatgatcaaacgcctgaaggccaaacaccagagcaccctagaaggtttaactaaaagaatgctc

SEQ ID NO: 214561 - DNA, 100 bp, Homo sapiens
ccagtacctgcccaggaaactggctgaccccagcccacagcaggaaggccctgcggaattcccgcatcgtcagccagaaggacgacgtccacgtctgtat

SEQ ID NO: 214562 - DNA, 88 bp, Homo sapiens
tcggtggcggggctgaagaagcagttctacaaggcgagccaggagtggagtcaacatatcaatggagcaagtcacagtcgtcgatgcc

SEQ ID NO: 214563 - DNA, 98 bp, Homo sapiens
ttacatggatgccatgggatttggaatgggcaattgctgtctccagctgtccgcaggcttgtccaaaaggaaacatcggaatgaccacttaacatcta

SEQ ID NO: 214564 - DNA, 75 bp, Homo sapiens
ccctgtcattggtggccatgctgggaagaccatcatccccctgatctctcagcttttcctccgcaaccatgtctg

SEQ ID NO: 214565 - DNA, 82 bp, Homo sapiens
ctgcggagcatgtcgaccccggcccggaggaggctcatgcgggatttcaagcgctcaccatggatgatgatatcgccgcgct

SEQ ID NO: 214566 - DNA, 100 bp, Homo sapiens
tcctgacagctgtgtactttgccctcagcatctcccttcatgtctgggtcatggctcttgcagccaatgccggaacaggatttgctgttgctgagcctca

SEQ ID NO: 214567 - DNA, 98 bp, Homo sapiens
gctagtggaagttactgccgcgccaccgagtccggaccggagactttggggcctaactagtggaaagagtggaacgagaaaacctttcagactattgt

SEQ ID NO: 214568 - DNA, 121 bp, Homo sapiens
ttcttttgtcgtttcccagcgctgcgcaggacttctcctggcggcgctgcggatccagggggtcggctgccaggtacagtgaatgccccagccctgcacactttggaaactaaatcaagtc

SEQ ID NO: 214569 - DNA, 88 bp, Homo sapiens
cgggatttgggtcgcagttcttgtttgtggatcgctgtgatcgtcacttggaaacccagcgtttgctggcagaaccagttcctggcat

SEQ ID NO: 214570 - DNA, 82 bp, Homo sapiens
agaaaatacaaggagctggacatcgagcctgagggaggggaaaggcgcaggttggaatcgaagcctcttaaaatggcagatg

SEQ ID NO: 214571 - DNA, 75 bp, Homo sapiens
acaatgttgatgaacagtaccaggaagaggcagaagaggaggatgtgaaatggtctgacttcgggtttcctggaa

SEQ ID NO: 214572 - DNA, 98 bp, Homo sapiens
cggaacctgcggggcagaggcggcggccgcagcggcgcagctgatagcaggaacaggtcatttcttcagatagctccccagctgtggaaaatgagcat

SEQ ID NO: 214573 - DNA, 83 bp, Homo sapiens
agcaaaatgagctcttcagaagaggtgatctttgcagagctgtttcaacttccagcaccccctcacattgatgtgatgtacac

SEQ ID NO: 214574 - DNA, 90 bp, Homo sapiens
ggagactccggcgctcgccatggccgacgaaaagcccaagtcttgctatgttgctcaggctggtcttgaacccctgagctcaagtgatcc

SEQ ID NO: 214575 - DNA, 90 bp, Homo sapiens
gagaacttacgcagatcagccgacttataggctttatactgtggtgcctcgcctggtcaagtttgtagatattctgaccaattggtatgt

SEQ ID NO: 214576 - DNA, 96 bp, Homo sapiens
ctgagacggtccagccaattatggaagcacttagagatggagtttcactcttgtctcccaggctggagtacaatggcatgatctcagcttactgca

SEQ ID NO: 214577 - DNA, 80 bp, Homo sapiens
ggcagtcccgcggcagcaggatcacagggagtgcatccgccccaacccttttccccctcgtctcctgtgagaattccccg

SEQ ID NO: 214578 - DNA, 100 bp, Homo sapiens
gccaacaggatcgctcaggatggacgtcttctactcaagattttttatcaagcagaaatgcatcgaacaacgagaatcaagatcactgagctaaatcccc

SEQ ID NO: 214579 - DNA, 83 bp, Homo sapiens
ctgtctcaaaaccctcctcatcatctactccttcgtcttctgggccagggctcgacccacagagcaccctcagccatcgcgag

SEQ ID NO: 214580 - DNA, 50 bp, Homo sapiens
ctggtgtccgccccgcccgaaaggaaagaccacagcaagattctttcatt

SEQ ID NO: 214581 - DNA, 75 bp, Homo sapiens
caaacttgaagatggatatcagctacagactttcctgagtcagcctggagcattggtaagcgtcacactgccaaa

SEQ ID NO: 214582 - DNA, 75 bp, Homo sapiens
ccagtctcacaaatctcatatgcagtccattattgacaaggctcgattccttttgtccaaagtgaacccatctca

SEQ ID NO: 214583 - DNA, 100 bp, Homo sapiens
gtcgactccctagcagcagccgccgccagagaggcccgcccaccagttcgcccgtccccctgccccgttcacaatgaaacgaggtatcagttacttcagc

SEQ ID NO: 214584 - DNA, 75 bp, Homo sapiens
gagctaaagcagcgtgcgttcagccctgggagcaccaaaactactttggaatagatgaaaaccttggtccagtag

SEQ ID NO: 214585 - DNA, 101 bp, Homo sapiens
agctaaatgggggcctctccagggagtgctctgttcacggctccatcgctgttactccatggctacatggaaaacaagcctctgggacttcagatcttcat

SEQ ID NO: 214586 - DNA, 75 bp, Homo sapiens
tggcggcgcacaggaagcacgatgtgattgatctcactggagatgataaagatgatcttcagagagcaattgcct

SEQ ID NO: 214587 - DNA, 100 bp, Homo sapiens
gaggttcacagatgatacctttgatccagaacttgcagcaacaatagccgggggccattgagactgccatggaagacttgaaaggtcacgtagctgagac

SEQ ID NO: 214588 - DNA, 90 bp, Homo sapiens
agagaggactcgccatcgtggccttggctgtctgtgcggccctacatgcctcagaagattgtgttcacctattgaaaattaaaaagacat

SEQ ID NO: 214589 - DNA, 75 bp, Homo sapiens
ttcatcaaaaatagtgatagctttgataagagtccaatgtgctgattgctgctaacagtcagggtacaattaagg

SEQ ID NO: 214590 - DNA, 75 bp, Homo sapiens
aacgctttaccctgtacagctctaaaaaccttagacaagcatggaataatggatccttcaggttccagggatttc

SEQ ID NO: 214591 - DNA, 100 bp, Homo sapiens
ggctgctctgtgtctcttccaagttcctcctcagatcatgaatatctcctcagacatcactgtgaatgagggaagcagtgtgaccctgctgtgtcttgct

SEQ ID NO: 214592 - DNA, 98 bp, Homo sapiens
cgtccccctgccccgttcacaatcatgttggcagataaattgaacatgactccagaagaagctgaaaggtggattgtaaatttgattagaaatgcaag

SEQ ID NO: 214593 - DNA, 75 bp, Homo sapiens
ctgatggctctccttccaaaatctgatcatagagaggtggacatatgattgaagtcaggttgaacagtcattccc

SEQ ID NO: 214594 - DNA, 82 bp, Homo sapiens
gggccttcgagagctaccgcgccagacagtgtgtcccggcatggatatccggaacaacctcactaggttgcatgagctggag

SEQ ID NO: 214595 - DNA, 100 bp, Homo sapiens
tgttaattgatggaccacaggtttgtgacaagacttctcagagtctgattctttcaaggtgggatataagagtaagggaaaagcttcactctgaccatca

SEQ ID NO: 214596 - DNA, 75 bp, Homo sapiens
tgggggattcgcagggaggatgtcgggacaccccggaagctgggaaatggagtatgctgctgctgttccgctttg

SEQ ID NO: 214597 - DNA, 100 bp, Homo sapiens
gtggccaacacggtcttgctgaaagccagggaaggctgaagaaaaagtcccagtcggtggatattaatgctccagggttcaaccctttggctggtgcagg

SEQ ID NO: 214598 - DNA, 100 bp, Homo sapiens
cctttcttcctgcagactgcatcaacaagtatgggtctccgtacaccaaaaactcaggcttcgccacctgcgtgcaaagccccgccagcaggcgaagcag

SEQ ID NO: 214599 - DNA, 75 bp, Homo sapiens
gtccagcaagactatgaatctctgttccaaatgctttgctgggtgatattcatgaggatttttgcagcgtttgca

SEQ ID NO: 214600 - DNA, 121 bp, Homo sapiens
gctgtgaagctggggaagacgcagaaggtgaaggtgctcacgggcacgggctgaagtacagtggtgtgatctcggctcacggcaacctctgtctcccaggttcaagcaattcttatgcctc

SEQ ID NO: 214601 - DNA, 51 bp, Homo sapiens
gtgcagtcgggcctgcccggcatgcagggaaggtggccatccagaaggagg

SEQ ID NO: 214602 - DNA, 100 bp, Homo sapiens
ggaaactgtacattgaagcagaggttaaaaagatcaagtggcatgagcagccttttggggaaaattggtgccaagaagcagaaaatgagcacccttgaga

SEQ ID NO: 214603 - DNA, 95 bp, Homo sapiens
atgtgatgttggagaactatagcaatctggttttcttggaaagatgaggtctatcttaatctggtgctggactatgttccggaaacagtatacag

SEQ ID NO: 214604 - DNA, 96 bp, Homo sapiens
caacttggagaatggaaaagaaccattgaagcttgagagaaaagcccccaaaagcagctattcagactgtagtcagcttttaacctctggaccagc

SEQ ID NO: 214605 - DNA, 100 bp, Homo sapiens
tgaagcagatgaagcttcgagtgatgaattcccaggagcaggtcaacgtattgaaacttactgttgaagacttggagaaagagagggatttctacttcgg

SEQ ID NO: 214606 - DNA, 82 bp, Homo sapiens
cagccgtagacaccagctccgaaatcaccaccaaggtgacagagctgaatgaacctctctccaatgaagatcgaaatctcct

SEQ ID NO: 214607 - DNA, 100 bp, Homo sapiens
attaggaaacatgctagaattacctggaacttcatcatcatctacttcacaggaattgccatttgttgattcttcaccacactgaaaccattaggaaaaa

SEQ ID NO: 214608 - DNA, 50 bp, Homo sapiens
gagacctggagccgacagacggtaaaccgtcctattggcagggtacagat

SEQ ID NO: 214609 - DNA, 100 bp, Homo sapiens
gccaggacaatggggacccgggacgacgagtacgactacctattcaaaggtttggtgcacctcgatttggaggaagtagggcagggcccttatctggaaa

SEQ ID NO: 214610 - DNA, 125 bp, Homo sapiens
ctgcctggtgcagaggatcctggaggcctgggaagccaacgaccacacgcacacaggaagtcctggagaacctgaaggaccgctggtaccaggcggacagcccccctgcagacctgctgctgacg

SEQ ID NO: 214611 - DNA, 75 bp, Homo sapiens
ggttttcaggaccaaaattgtggaaaagtcactctgcccctgcagatcaagtcagtagtggcaccagagcatgtg

SEQ ID NO: 214612 - DNA, 100 bp, Homo sapiens
tggcaagctgtcccctgatgccatcccagggaccgtttggagggagccattcacctacaggagcaggacatggagaactcaagacaggtcctgaactcct

SEQ ID NO: 214613 - DNA, 74 bp, Homo sapiens
cgccgccctcgcaacctggcagccgccgccgtggaaggtgccattactgcaagtcatcctgccacgtgtcttcc

SEQ ID NO: 214614 - DNA, 83 bp, Homo sapiens
cgactggaccaagatcgagcccagcgtcaacttcctcaagtcgcccaaagctctgctgtgtgcgtgcaccagctgcctccagg

SEQ ID NO: 214615 - DNA, 75 bp, Homo sapiens
acctgttctgaagcaactatacttctttgctatttccacctatgtgcagaggaatgatgagaagacagcagctga

SEQ ID NO: 214616 - DNA, 74 bp, Homo sapiens
acaaaagattgagctgcactgtattcctaaggctgaggagaatgcagagggtggggagtctgccctgggaccgg

SEQ ID NO: 214617 - DNA, 100 bp, Homo sapiens
ctggactcggattcgttgcctgaggaggatgatgaaattccactgtatctaaagggtggggtagctgatgccctcctgtatagagccaccatgattctta

SEQ ID NO: 214618 - DNA, 90 bp, Homo sapiens
cagcggggcacagaacagcgacagtacaaagaagactcttgtcacactaattgccaacaacaatgcaccgacgagagtgctggggaataa

SEQ ID NO: 214619 - DNA, 112 bp, Homo sapiens
atcgacaagaccatgctggcaagtctgaaggtcaagtttttcgttggaatatacgttgcacatttatggcgattctgagtgtgagggcagacttctgccaggctcagcacag

SEQ ID NO: 214620 - DNA, 100 bp, Homo sapiens
tttcgagtgtgtaaaactttccaaatggcagaatacctgaaactggagtttatcaagggggcagtacccaaaggaaacgctacgaaagaatacatggaga

SEQ ID NO: 214621 - DNA, 75 bp, Homo sapiens
tggcctggaagagacaattgatcctgtttggtggcttccatgaaagtacacgggcttcagataacagggagcgtg

SEQ ID NO: 214622 - DNA, 78 bp, Homo sapiens
ccccgagcgggacagcgcggcggggagcgacgaggtgtcaaattgagaaccaggtagatccccaccacctacagtaaa

SEQ ID NO: 214623 - DNA, 76 bp, Homo sapiens
cgctatgccaagaagcgaaatgtgctcattggccattcctacggctctggattaatcgaattacagctgctagcca

SEQ ID NO: 214624 - DNA, 82 bp, Homo sapiens
tgtcatcatgtcgcgttacgggcggtacggaggagggaaagcaggcaggatgggagagtcgccgatagaaccacctcttccc

SEQ ID NO: 214625 - DNA, 83 bp, Homo sapiens
aaggcgtgcgggcagcgcttgaggccctgctgccctacactgatggtcatcatgggccagtgctactacaacgagaccatcgg

SEQ ID NO: 214626 - DNA, 74 bp, Homo sapiens
tatagttgagaatttatcctcaagagtcagctggcagggtatgactggtttccctggtgctgctggacggactg

SEQ ID NO: 214627 - DNA, 94 bp, Homo sapiens
gctcagagcaacaaccagcagcttcgggatttagggattctctccgttcagattgaaggcattcccatcaagagcaccatggacaaccccacca

SEQ ID NO: 214628 - DNA, 87 bp, Homo sapiens
gctgcgggcccgctccgacgcggaagcctgagcagcagactgatgaccttctgaggatgacagaatcctggttttcttctttatctc

SEQ ID NO: 214629 - DNA, 127 bp, Homo sapiens
caacgatcagcacttcagtcggaaagttggaacctctgacaagaccaagtactaccttcaagaatcagcagccaagaagcccaaatgggatgacttcaaaaagaagaagaaagaactgaagcaaagc

SEQ ID NO: 214630 - DNA, 82 bp, Homo sapiens
agaaggcaacgacgttccatctgtggaaggacctaccaaccaggaattggattcaagtacgtggctctgggagacctcatca

SEQ ID NO: 214631 - DNA, 100 bp, Homo sapiens
tgtgctgaaaaagaagaatcagcaaatactactgaaagtgcaatatttgagtatcactgcgagcactattcctgatcagagaactccagttgcttcaaca

SEQ ID NO: 214632 - DNA, 83 bp, Homo sapiens
gctccccaggggagttctctgtgtctgtgaaggcgtctctggccgagcctctttttgtggaaaacgacagcagcagcagtggc

SEQ ID NO: 214633 - DNA, 50 bp, Homo sapiens
gtcatctgtggcagtatatcaaggtccaagacaagctgctgctatctgcg

SEQ ID NO: 214634 - DNA, 82 bp, Homo sapiens
ctgggggccttcccgccggccgccgccgcccgaggtccagcaccatgtgctaggtcactcccagcgcgaggccacacctggg

SEQ ID NO: 214635 - DNA, 100 bp, Homo sapiens
ccctgctgcgggggggagagccactgacgccgggaccgggaccgccgccgccgccgccaccatgaaagtatgctgaggccttggattaccaccgtcaggc

SEQ ID NO: 214636 - DNA, 82 bp, Homo sapiens
ctcggcctctgccggagaaacaggcagcaatgaatgtggatcacgaggttaacctcttagtggaggaaattcatcgtttggg

SEQ ID NO: 214637 - DNA, 100 bp, Homo sapiens
ggatggacaacctgcattggacccagctattgctgcagcatttgccaaggagacatccctcttaggaactcaacagaggcaattattatcccgactgcaa

SEQ ID NO: 214638 - DNA, 76 bp, Homo sapiens
gaaacgggcagccatggccctccacagcccgcaggtgtcccgacccaggctaagcttgagcatggctgagcaggag

SEQ ID NO: 214639 - DNA, 51 bp, Homo sapiens
gagctgctgaagcccaccgaattagcttcggaaccaaaaagaagcttccca

SEQ ID NO: 214640 - DNA, 100 bp, Homo sapiens
aaagaaatagaaaatttgaagggtattgttccagatcttaacagtgtaaatgggcaatgtgctggccacacagctatgcaagctgctagtcagaatggac

SEQ ID NO: 214641 - DNA, 98 bp, Homo sapiens
gaaaaacagacacctgaaagtcttcctcaaaataacaatccaggaaccagctgctactcccgaaacctggaatatgcccggctacggaagattgcaga

SEQ ID NO: 214642 - DNA, 51 bp, Homo sapiens
ctcctactgtcccacggccaccgaagagaacgtgcgcatcgaccccagtag

SEQ ID NO: 214643 - DNA, 100 bp, Homo sapiens
gggaaaatgccaagtggaataaaaaccaacatcaagtcggcttccatgcatccctaccagcggcgcggggacctgccgtttgtcgtgccccgccgaatgg

SEQ ID NO: 214644 - DNA, 100 bp, Homo sapiens
ccagcatggccagcgtcttggagcagctgaacgtcattaacggcatcctcttcattcctctcaggtatctcaggagattacatttcagcttgaaaaaggg

SEQ ID NO: 214645 - DNA, 117 bp, Homo sapiens
gaaagatccaaaacaagtggctgcggccgtcgcccaggagtcatcggacgccagaatctgagactgaattcccttcaggagcttcaacttcttgaaatcatgtgcaattatttccag

SEQ ID NO: 214646 - DNA, 74 bp, Homo sapiens
gacacgcctggagtttgaaaggacgcaagtgaaacggctggaggaccatcagcacgtgcccatcgacatccaga

SEQ ID NO: 214647 - DNA, 80 bp, Homo sapiens
ttctcctgaactgctcttggtctccatgaaggctactggcaggagcacatgagagaggttggacgtgataagtatgagcc

SEQ ID NO: 214648 - DNA, 101 bp, Homo sapiens
gaattgtatgaattcatctttgccagatgccaattctcggaagcaagaagcagagtggaaagaaaaggcaataaaggagctagaagaatggtatgcaagac

SEQ ID NO: 214649 - DNA, 100 bp, Homo sapiens
gtcggggacggtaaccgggacccggtgtctgctcctgtcgccttcgcctcctaatccctagccactatgggacctggtggccttagtctttcaggtggaa

SEQ ID NO: 214650 - DNA, 74 bp, Homo sapiens
ggctgaaggccctacgggagaaaaccgggcgcaagagacgagttgtactgctgtcacaggaaatggacgctgga

SEQ ID NO: 214651 - DNA, 75 bp, Homo sapiens
aatggaaaccagatgaagaagatgagatttcgacagggaaaaatgcattttttgtgggagatcttggaaagattg

SEQ ID NO: 214652 - DNA, 100 bp, Homo sapiens
gggctttctacctccccagcattcccccaaagcagggaccacaccattcttgacccagctccacccctgtcgattgctcgctgtaagcagctcatctgtg

SEQ ID NO: 214653 - DNA, 75 bp, Homo sapiens
aagaggacaatgggggctggtcgtcctttaccacaattagtcctctggagaatgccatagaaaccatgtccacgg

SEQ ID NO: 214654 - DNA, 100 bp, Homo sapiens
agctggctgagctgcagagcggatttgtaaagctgactcgagaacaggaagaactggaagaagctttagaagtggaacgacaggaaaatgaacaaagaag

SEQ ID NO: 214655 - DNA, 109 bp, Homo sapiens
ctggagtaggggcaaaaaaaggaaggaagaagctctacgaatgccagagatggggtctcactgtgttgcctaggctggtcttgagctcctggactcaaaccatccaccc

SEQ ID NO: 214656 - DNA, 75 bp, Homo sapiens
tccctttaccgtctcacgcaggataagaagtacctctaccgagcttgcaagatgccgctcctacgaggactgctg

SEQ ID NO: 214657 - DNA, 90 bp, Homo sapiens
tggatgctttgatgcctatatcaggaacttcatttgccgtgggaatagatttccatgcagggcatggtgctgatgtgaaatgtgtagact

SEQ ID NO: 214658 - DNA, 52 bp, Homo sapiens
ctcaactggagaaacttagcaaggaggtccacattggccaactgtattcaac

SEQ ID NO: 214659 - DNA, 73 bp, Homo sapiens
gcctcaggcgtgcgcggacggtgtgcggttttgaaaagtgaggtacatgacctgcgagtagtccttcattctg

SEQ ID NO: 214660 - DNA, 98 bp, Homo sapiens
acagcaccatcatgccgcggctaagtgaggaagccagccaggctctcatcgagcgttttgctgctgacatcatctccgttttggccatgaccatgagt

SEQ ID NO: 214661 - DNA, 75 bp, Homo sapiens
gagtgatgataatccggaccatgctgtatactccacaggaaatgaaacaggtgtggaaacaggaagagaactaga

SEQ ID NO: 214662 - DNA, 100 bp, Homo sapiens
aagaattggataaaaaaaaagaggaattccagaagggccaccccgacctccaagggcagcctgcgagtaaccagctcataaatcacatcgaacagttttt

SEQ ID NO: 214663 - DNA, 109 bp, Homo sapiens
gtgcgatggcgcggagcccgggacgcgcgtacgccctgctgcttctcctggatggccgagcctcgatttaacaacccctacttctggccccctcctcccaccatgccca

SEQ ID NO: 214664 - DNA, 100 bp, Homo sapiens
gagaaatcactgatgggaagtgagacttgttaaacttgaaaggtgaggtccagagatatatccagagaggagtggaagggctcggagacctacagcccca

SEQ ID NO: 214665 - DNA, 100 bp, Homo sapiens
gctggttggagattctccggggacccttccgtatctgcctaggcattttgctgtctcctcctaatacgggtgctggtatagaaatctaccctgggagtca

SEQ ID NO: 214666 - DNA, 100 bp, Homo sapiens
cttcgcactgtgcatacaggacgggtccatccatcgcataagagcaaagaatactattgttgccacagggtcctcttgcccctggccaatgtggcattaa

SEQ ID NO: 214667 - DNA, 89 bp, Homo sapiens
cacgaggcgcagctccacgagcacatcaagttcaaaagaatgctgaaccgggagctgacacacctctcagagatgagccgatcagggaa

SEQ ID NO: 214668 - DNA, 100 bp, Homo sapiens
catggcgtttggcaagagtcaccgggatccctacgcgacctccgtgggccacctcataggaagacaactgttagttttgtggcttactgctgctccaccc

SEQ ID NO: 214669 - DNA, 100 bp, Homo sapiens
gcgggagaggcgagctcgcgatgagtggtctcggcaggctcttcgggaagggagccgggtgtgggctgagccctgcctgattgatgctgccaaggaggag

SEQ ID NO: 214670 - DNA, 151 bp, Homo sapiens
gcttgcattgggcaatcaagttggcaaactttatgtttgggatttagaagtagaagatcctcataaagccaaacttaattcagtgcacaaatgagatgaatgtgaacatcccacagttggcagacagtttatttgaaagaactactaatag

SEQ ID NO: 214671 - DNA, 98 bp, Homo sapiens
gtgaaggagtgcagaggcatcacctgaaagagccctatgagtttgtctctctggaatggctgcaaaagtggttggatgaatcaacacctaccaaacct

SEQ ID NO: 214672 - DNA, 50 bp, Homo sapiens
agatgcagtggataacagtaattgctggcagcctgttatcgactacattg

SEQ ID NO: 214673 - DNA, 99 bp, Homo sapiens
gctaaggctgtgttggagcccattcagagcaccagtctactgtattgtctgaacttgcattgtgattggcctgtagagttgctgagagggctcgagggg

SEQ ID NO: 214674 - DNA, 83 bp, Homo sapiens
gttccttattttgtgcttgaacttgatcaaacaggcacctgaatggacagaagaggacctcagccaactgacaagaagtatgg

SEQ ID NO: 214675 - DNA, 90 bp, Homo sapiens
ccaaattgaggcgcaatgatgagaggatgtggtggtctactctgatgtcaatcttgagggctaggaatcctgcaatatggcgaacataag

SEQ ID NO: 214676 - DNA, 100 bp, Homo sapiens
gataaagaacaatctaactgggcaaaagaagtacaaggaatttcagaacaaattcagtaattggatcataacgagacttctgcggattgcagcaactccc

SEQ ID NO: 214677 - DNA, 100 bp, Homo sapiens
attccaacatcccattcagcagggtgaaccacagcaagttcatggtcacggagaaggcagcctacatagaggctgggaggcggcagaatgcagccagagg

SEQ ID NO: 214678 - DNA, 75 bp, Homo sapiens
gcctaggcattttgctgtctcctcctaatacggcaaaattgaagaagtagttcttgaagctagaactattgagag

SEQ ID NO: 214679 - DNA, 111 bp, Homo sapiens
tgtgagcagtgggaaaaatggaccaacttctttggcaagtggacattttactggctcaaaccgaccaagaccatcactatgaccgatggagactatgattatctgatcaaa

SEQ ID NO: 214680 - DNA, 83 bp, Homo sapiens
tgagaacaggaccccccgcccccatctttctctggaatcaaaggactccagctgaaagttaacctccaacccaatgataacta

SEQ ID NO: 214681 - DNA, 100 bp, Homo sapiens
ggataatgcaaaggaaaagaggactggagtggtttgtctgtgatggctggaagttcctctgtaccaggccaactacacagacccccagagcaaactgcgg

SEQ ID NO: 214682 - DNA, 100 bp, Homo sapiens
cccacctgctgacatctacctgccaggcacatccagggggcagtaccacaccctgcaggctggcttcagctctcgctctcagggcctgagtggggacaag

SEQ ID NO: 214683 - DNA, 97 bp, Homo sapiens
gggacccggttccccggcccacagtgggggtgtgcaaacccgagagaactgggagccatgtggctagaaatcctcctcacttcagtgctgggctttg

SEQ ID NO: 214684 - DNA, 74 bp, Homo sapiens
tcatgtaatagccagacatgagtatacattcagtatcatggatgaatttcagtgggcctttggagtgacgctgt

SEQ ID NO: 214685 - DNA, 82 bp, Homo sapiens
tgagctgcggcgagcggagcttcgcggggatcctgctggactgcacgaaaaacaagagtgagccatggagctacgtgtgggg

SEQ ID NO: 214686 - DNA, 75 bp, Homo sapiens
ttgaatttgctagtaacgtcatggaggatgaacgacaggtccagagggggcaaacctctttatttaccaccttcc

SEQ ID NO: 214687 - DNA, 83 bp, Homo sapiens
aacaagaccagctgtggattggcactaaaggaactgtggctgcaccatctgtcttcatcttcccgccatctgatgagcagttg

SEQ ID NO: 214688 - DNA, 101 bp, Homo sapiens
gaccttctagtcatgaccaggaccagggcagcactcctcctgttcacaggacccagatgatgtggtaccagttggccaaagaagagcctggtgttggtgca

SEQ ID NO: 214689 - DNA, 74 bp, Homo sapiens
cttcgagttcttcgtgctgctcaagatcattgagaagcagccaggccacattcggagcagggttttcagggagg

SEQ ID NO: 214690 - DNA, 75 bp, Homo sapiens
ctcgtttggaggcactggactacttacaaaaatgagctggagataagatgggtagactgctacttcccttttaca

SEQ ID NO: 214691 - DNA, 98 bp, Homo sapiens
ggaagaagaccaagacccatcatgccccaggtatggctttgtaattgctgtcaccaccattgacaatattggtgctggtgtgatccagccaggccgag

SEQ ID NO: 214692 - DNA, 101 bp, Homo sapiens
cctgaagttacatttagagactgaaatcactgcaccttaaaaacaaaagattgagctgcactgtattcctttttcggctttgtgagaaaccttaccatcaa

SEQ ID NO: 214693 - DNA, 100 bp, Homo sapiens
ttttaccgatgctttaacatacagccactaggcattatccaattggtttgctatttgatcttcttgcatcaagttcagctcttccttggaacatcacagt

SEQ ID NO: 214694 - DNA, 88 bp, Homo sapiens
cctctggcggaagccatcagctatggagataggcagatgagagttgtgtcccagccctcagtttatcgttggtggagccacgcgcaca

SEQ ID NO: 214695 - DNA, 90 bp, Homo sapiens
gtcctagaagaaatttggagtgtgcgtgcgcgccgagcggttgggggccgtcccgctcctaaggcaggaagatggtggccgcaaagaaga

SEQ ID NO: 214696 - DNA, 80 bp, Homo sapiens
gctcagagatccaagtgcgcgccctggcgggtccggaccaagatataatgaagatctggaacttgaagatgccattcata

SEQ ID NO: 214697 - DNA, 100 bp, Homo sapiens
atccaacctgtcagatacaatagaaggagtaaccccgatttggagaaacgacgcatccactactgcgattaccctgttacatgggaattggtctttctgc

SEQ ID NO: 214698 - DNA, 80 bp, Homo sapiens
tttgcctgaatacatgatttaaacaagagatttccacagaaggaacgtgttgtgggctttcacgtactgggtccaaatgc

SEQ ID NO: 214699 - DNA, 100 bp, Homo sapiens
gcggagcgcaacactcgcttggttggggagatcggcgcttggccggcatggagtccgctggaattcatgagacaacctacaattccatcatgaagtgtga

SEQ ID NO: 214700 - DNA, 98 bp, Homo sapiens
atctttgcctcactgctgctggagcgccgggtcatttttgtggcagataagctcagctacctccagggctggcggaagaccttgctgatcgtctccca

SEQ ID NO: 214701 - DNA, 76 bp, Homo sapiens
atctccggccctctcggcgtccgccagcgatggcacaggctgctctttggcgtaaattgcaatcgattagggatcg

SEQ ID NO: 214702 - DNA, 96 bp, Homo sapiens
gctcaagagccggggcctttttgacagcttccgccgggactgcctggccgacgtggacaccaaggttggcgtgcagtggtgtgatctcagctcatt

SEQ ID NO: 214703 - DNA, 100 bp, Homo sapiens
ctcgtgtggcaggaagaactcagagccgggaagcccccattcactagaagcactgagagatgcggccccctcgcaggatcctgataacttaagtgactct

SEQ ID NO: 214704 - DNA, 88 bp, Homo sapiens
cttcttccaaggacctaggtctctcgcccatcggaaagtcctggtacctgggataaaagttgcagcgtcccaccatccaccagacaga

SEQ ID NO: 214705 - DNA, 76 bp, Homo sapiens
gccgcagcccgggcccaggccccggcagcgcctgggacaagtttgaaaaagtaccagaaggtcctatccctccatc

SEQ ID NO: 214706 - DNA, 100 bp, Homo sapiens
gccattgcccaggcagagtctctgcgttacaaactcctaggagggcttgctgtgcggagccaaaatgaagtttaatccctttgtgacttccgaccgaagc

SEQ ID NO: 214707 - DNA, 108 bp, Homo sapiens
ggcagggaggatgacggagctgcagtcggcactgctactgcgaagacagctggcagggagtgcatccgccccaacccttttccccctcgtctcctgtgagaattcccc

SEQ ID NO: 214708 - DNA, 83 bp, Homo sapiens
gggagattccggcctggagctcccagggccgagctcaggagtatctaacctgcaaagatcttaattaaggctttggctttcga

SEQ ID NO: 214709 - DNA, 97 bp, Homo sapiens
gaatggcatcccctttacggtttatgataatgtgagagtggaaccaacggattcaaggccaacaagctggcggagaagcggaaagcccacgatgagg

SEQ ID NO: 214710 - DNA, 90 bp, Homo sapiens
gcctggggcgtggagctgcccaagcgtggctatccccctggtattttgaaggtggcgtctcatctgtctacctctgggatctggatcatg

SEQ ID NO: 214711 - DNA, 100 bp, Homo sapiens
cagaaagtaatattgcttactatgagtctatatatcctggggaatttaagatgccaaagcagctcattcacatacagcaaggagctcaaaaagtgggatg

SEQ ID NO: 214712 - DNA, 96 bp, Homo sapiens
ggcgttcagctgcttcaagatgaaggtctcctctgagcctccggcctccataagacccaaaacagatgacacctcttcccagtcccccgcgccttc

SEQ ID NO: 214713 - DNA, 82 bp, Homo sapiens
gcaggccaggtgctacaggacagcaaatgcggaaccctaaggactctgcaatatgaataattccctagagaacaccatctcc

SEQ ID NO: 214714 - DNA, 100 bp, Homo sapiens
gctataaactgctgatccacatgagagtccactctggggagaagcccaacaagtgtacgattgaaatggcgattgagacgctgcaaaagtctgacggtct

SEQ ID NO: 214715 - DNA, 75 bp, Homo sapiens
ggagtatctggacctgtacctgatgcactggccttatgcctttgagtctcaccaacggctttgggggtgcgagga

SEQ ID NO: 214716 - DNA, 100 bp, Homo sapiens
cgataatcgaggacctgccaataacgcgatgagattggctctaccagtgcacctggacagggaggaatcctggctcagcgggagtttgacaggcgattct

SEQ ID NO: 214717 - DNA, 96 bp, Homo sapiens
ccagggccgaggcaggcctgacccggggccgggcagcccgcgcgactttcgggcaccatgccggtggaaaggatgcgcatgcgcccgtggctggag

SEQ ID NO: 214718 - DNA, 100 bp, Homo sapiens
tgcctggtgctctgcgtcctcatcgggcttatgttcgagtctcctacggtagtgtgcagcttatgcaaacgagagggtcatctaaagaaggactgtcctg

SEQ ID NO: 214719 - DNA, 75 bp, Homo sapiens
gttcgtactggaagtcatgaggacagagatgtacggcttttaatcttggaatatgcccgttggtctatgattgac

SEQ ID NO: 214720 - DNA, 82 bp, Homo sapiens
attcagaaggagctagctgaaataacccttgatcctcctcctaattgcaggtgatgtttgcagacagaaaaagtaaactgtc

SEQ ID NO: 214721 - DNA, 101 bp, Homo sapiens
tgacccagaggagagttctccaaacatgatcgtttactgcaaagctgctgagaactagccctagacctctgcgtgagggttcttctgccgaagacatcacc

SEQ ID NO: 214722 - DNA, 50 bp, Homo sapiens
ctccgccaccgtgcacatccgaatgggactttgcctcccgggccaaactg

SEQ ID NO: 214723 - DNA, 100 bp, Homo sapiens
atcacctgaaggatctgacttccagaagatccaaaatacggagctggcatatacttcaccaagaacctcaaaaacctggcagagaaggccaagaaaatct

SEQ ID NO: 214724 - DNA, 96 bp, Homo sapiens
caaagacttttactgaaaattccttatggatctctgagaaggcgcagcgttgaaaggtattaaaggtggaagaaggtccatatctttttctgtggg

SEQ ID NO: 214725 - DNA, 100 bp, Homo sapiens
tcttcttcttcatcaagctctgattcttccagcagttcttctgattctgaagatgagataaaccgagactactccttccttgactacatcctgggaggct

SEQ ID NO: 214726 - DNA, 83 bp, Homo sapiens
gctgatatgctaggtaaagcactgtgagaatgggaggcattccagctaaaagccataggggagaaaaactacttttatttatg

SEQ ID NO: 214727 - DNA, 97 bp, Homo sapiens
gtttgactctggagccactcaggtttttcctaagctcaactctagccagctaggttcctggtgctttggggattgagcttctagagcctcagagatg

SEQ ID NO: 214728 - DNA, 83 bp, Homo sapiens
ggtctctctgagctgagtggcagcgtggcccagacagccattttgcagactttgatcacagtgaaacgttccatgggaacttg

SEQ ID NO: 214729 - DNA, 140 bp, Homo sapiens
agttttattcaggctcagtacaactgtgcctggaaccagatgccctgtccgtcggcgctggtatggtgagaacaagaccaagattggaaagccagcttcagaggagggaattacagcaaaaattgaaccattgacagaag

SEQ ID NO: 214730 - DNA, 100 bp, Homo sapiens
ttacctgtttttccagctcacccactgccagcagagttcatggcctcccacgggaacgacgccgcgagagccaggtttgagtccaaagtaccctccttct

SEQ ID NO: 214731 - DNA, 120 bp, Homo sapiens
catgagtgctataagatgcgactgctacagggaccatgggacactattacgcaacagagtgctgcagcagctcccagtccagtgctaggaaacattcccccaggagatggcatgccagta

SEQ ID NO: 214732 - DNA, 88 bp, Homo sapiens
ctacgcctgctcaatgagatcattgccgacttcgacgagtcccgagccttcctgaaggactattaccgggaccacaacatcgagctct

SEQ ID NO: 214733 - DNA, 96 bp, Homo sapiens
ccggggcaggggcggaggcggaggcagaggtggaggcgctttgaaagagtggagcctttcaggctggcatggagagcttaaggggcaactgaagga

SEQ ID NO: 214734 - DNA, 101 bp, Homo sapiens
caacttgctctgtgggattatcagaggtgccttggaaatggttccggagtctcaccactgcatttttcagagacgccatgggcttcttattaatgtttgac

SEQ ID NO: 214735 - DNA, 49 bp, Homo sapiens
ctcccgagtacctgggactacaggctggagtgtagtggcatgatctcgg

SEQ ID NO: 214736 - DNA, 100 bp, Homo sapiens
atgaagaccaatttttacgtctagatttccatgcccatggaagggtgttgaaagcagcaggggcctagaagacattaaaccgataccacagaaatacaaa

SEQ ID NO: 214737 - DNA, 75 bp, Homo sapiens
cccagcagctgctgaagacagcactcaaaggtcccttgtatgtcatcgtggagtatgcctccaagggcaacctgc

SEQ ID NO: 214738 - DNA, 50 bp, Homo sapiens
agccaacattcgcaccgtcatggtcacagacatcacttagtgctcttacc

SEQ ID NO: 214739 - DNA, 82 bp, Homo sapiens
ctggaataaacttttgaaacactaatgtacgatctagggcagccctgcagaggtacctgttctactgtaatcgctatatgaa

SEQ ID NO: 214740 - DNA, 90 bp, Homo sapiens
ctcaacaccccatgctgcattccagccaaattcccagaagagacgctcaaaccgccaagttaagcgaaaaaaatatacagaggacctgga

SEQ ID NO: 214741 - DNA, 97 bp, Homo sapiens
aaaattggcacaaataggaactactgtggtaaccactgttccgaagccttcctcagtacaagtcgctgaagagttcgaaaccgtgctcagcaccgcg

SEQ ID NO: 214742 - DNA, 80 bp, Homo sapiens
caatggaccaaaatgaacacagtcactgggaatgatcaagtctcggcctctggattatacctttgttcctcgaacttgga

SEQ ID NO: 214743 - DNA, 82 bp, Homo sapiens
tggtgctgctgaagtccctagggaaccaccaattcttcccagcatatcccagtagaatacgggcttttccagggcaggaacc

SEQ ID NO: 214744 - DNA, 82 bp, Homo sapiens
ctcgctcacgcagcaggagcaggggacgaagatctgaaattcagagtgtagctctgagacttgcttccaaagtcatttccca

SEQ ID NO: 214745 - DNA, 100 bp, Homo sapiens
ctggaagatctcatgatgttcaaccattcacttacactccagacccaggtgatgtacagttcattgattatgaatattctggatacaactacctggcata

SEQ ID NO: 214746 - DNA, 100 bp, Homo sapiens
taggagaaggatgtggactgcagtgctgcagtgccagagttatgcccagccaagtcttcagtatatccaggggcaacagattttcacagctcatccacaa

SEQ ID NO: 214747 - DNA, 100 bp, Homo sapiens
ccggttccccggcccacagtgggggtgtgcaaacccgagagaactggcttataggctttatactgtggtgcctcgcctggtcaagtttgtagatattctg

SEQ ID NO: 214748 - DNA, 100 bp, Homo sapiens
caagtcgacaggggatgggaccctagaggcacagttgaatgctgttgatgctttgattgactccatgagcttggcaaagaaagatgagaagacagacacc

SEQ ID NO: 214749 - DNA, 75 bp, Homo sapiens
ctacctaccaatcgtgaaaactatattcacagaaaaactgcttaaggttgaaaagagaaatttaagaaattgctg

SEQ ID NO: 214750 - DNA, 74 bp, Homo sapiens
gtgcgcggcacctgcgaagatgcttccctgtgcaagaggtggaaccaagctcacaaatcctcaggaaccaactt

SEQ ID NO: 214751 - DNA, 75 bp, Homo sapiens
atgatttatagctaagactccaggacacccctgaagccgagaaatgttcaaagaggaaatctcccggaggtttaa

SEQ ID NO: 214752 - DNA, 98 bp, Homo sapiens
tgcggcaacgcccccgggacatgcatcgtcccctggactctctcaagaccctttagatcctacaagatcagtgattgtgatccgctccctggtagcag

SEQ ID NO: 214753 - DNA, 100 bp, Homo sapiens
ggcaatacatggcctattcagctgtaccagtccgccattttgctaccaagaaagccaaaggttcaaatggtgaaagacgatgacccctcctggaagccca

SEQ ID NO: 214754 - DNA, 100 bp, Homo sapiens
aaatcttcagcctccaaaaaaccactgaaggaaaaagtggtgctgatgtatgatgagatcttcatggtcccaaagttgtttctaaagaaattccagtaga

SEQ ID NO: 214755 - DNA, 99 bp, Homo sapiens
attaaagccatgcccgaggatgctaaggggcagctgctctgttaaaagcgaaaatgaaacaattgcctgcggcaacagttcgactcctttcaagttctc

SEQ ID NO: 214756 - DNA, 100 bp, Homo sapiens
ctggacctggaaggggagactctgctgacacccatcacccacatctcacagtatcgagaaccttccctgcgaacttcagaggaacttccagctgatgcga

SEQ ID NO: 214757 - DNA, 74 bp, Homo sapiens
tcctggtgtgtctgcagtgcaggtggctcctggaagaccctcagatccatctgtgtgtgctgtggaattcagga

SEQ ID NO: 214758 - DNA, 74 bp, Homo sapiens
gcacttggagtccggacatctgaaacttggtcttaaagaaagtgcagaagagatggtcaaaaacaaattggaag

SEQ ID NO: 214759 - DNA, 82 bp, Homo sapiens
ggcaggcgggcagctgtgcccgggcggcacggccagatagcagaccccacgttagctgaaatgggaaaaaacttgaaggagg

SEQ ID NO: 214760 - DNA, 100 bp, Homo sapiens
ggcaattgtaaggccatcgattgttggtgccagttggaaagaaccttttccagaatccagacgctctgcagtgtcccatcgtcttatgcggatggcgggg

SEQ ID NO: 214761 - DNA, 101 bp, Homo sapiens
tctcctagggacagggaaactgagtcatatcaaggtggaaggcagctgaagcatgtttctctggattagcagttacctggactataccatgttccaatctt

SEQ ID NO: 214762 - DNA, 50 bp, Homo sapiens
gctctctgtaagaaatatgctgatcttgacaaagcaggacctcataagga

SEQ ID NO: 214763 - DNA, 89 bp, Homo sapiens
ccctcgcgtccggagtccccgtggccagaataccctctaccatctgctttggtcagggtgccgctcgaggatttaaaagcaacaagaag

SEQ ID NO: 214764 - DNA, 83 bp, Homo sapiens
tgaggccacaggaaaggggccgtcggtcgccgccatgacagcgagcgaggcggaggtatgtgacgcattcccagactcttcag

SEQ ID NO: 214765 - DNA, 75 bp, Homo sapiens
ctttgctggtctttcttggactattccagagagaaatcctgccagaaacctgtagacaaatatatcgagtatgat

SEQ ID NO: 214766 - DNA, 75 bp, Homo sapiens
ggcttgatgaaggcgtggatagcctgaaggcagccattcagatctgcgatgagctgggagtgaagcggccatctt

SEQ ID NO: 214767 - DNA, 75 bp, Homo sapiens
cacatatatgcgaatctataagaaaggtgatattgtagacatcaaggattccagtggaatgacactggtgatgct

SEQ ID NO: 214768 - DNA, 83 bp, Homo sapiens
gggctcgctgctcatcatgctcaagtcagagggcttttactcctacctgtgtaccgagccagatcactccaagaactgaggcc

SEQ ID NO: 214769 - DNA, 50 bp, Homo sapiens
tcgcttcactgtggctcatacatgctctcgtggcattatccttcagtggg

SEQ ID NO: 214770 - DNA, 100 bp, Homo sapiens
cggaatgcctgaaccaactgttttgaggcgcatattaaatttcctattgactacccctattcaccacctaccttcagattcttgaccaaaatgtggcacc

SEQ ID NO: 214771 - DNA, 87 bp, Homo sapiens
tgtcttagatgctcagatggtagtggataggcctgtgacgaaggtgctaccatcgtgagagtaagctccaaatgagaagatgaagca

SEQ ID NO: 214772 - DNA, 106 bp, Homo sapiens
tttgtcaggaagctctggatataagtttggtgttcttgctaagattgtgaattacatgaagggcatccgcttcgatcctgaaattccgcaaacactacgactagag

SEQ ID NO: 214773 - DNA, 75 bp, Homo sapiens
gaagatcggcgagggaggacagggggttcatcatggtgaactttgaggcgctgatcatcaccatgtcggtagtcg

SEQ ID NO: 214774 - DNA, 87 bp, Homo sapiens
catggaaggcaactgtgtttcacttaccagaatactacgttcagctaaattaagtttcccgtcaccaattttccttggaattggaca

SEQ ID NO: 214775 - DNA, 49 bp, Homo sapiens
atatggtgaactcattgtcttaggttggataacagggcaagattcagag

SEQ ID NO: 214776 - DNA, 74 bp, Homo sapiens
ttagaatctcggggaatgggagagaatcatggtgtcatggaaagggatttactttatactgactctgttttggg

SEQ ID NO: 214777 - DNA, 100 bp, Homo sapiens
gtaagatctgatatttctgatcaagaggaagatgaagaaagtgaaggatgtccagtgtctattagcgcttacagcttttagatggggaatatgaagtagc

SEQ ID NO: 214778 - DNA, 74 bp, Homo sapiens
cgcctcccgccgcgcccgggatgtattcgtccccgctctgcctcacccagacaatgcagatcttcgtgaagact

SEQ ID NO: 214779 - DNA, 75 bp, Homo sapiens
ctgggatcccggccaccagcaattgtccgactcctgaggaagaagagattttaaacaaaaaacgatctaaaaaaa

SEQ ID NO: 214780 - DNA, 74 bp, Homo sapiens
atcctcgtgtggctgaaggaacaaggctatgacgtcattgcctatctgacttaagcccttagatgtggcgttta

SEQ ID NO: 214781 - DNA, 90 bp, Homo sapiens
gtttgtgccagctctccagagagaaaaggatgatcacggacgtgcagctcgccatcttcgccaacatgctgggcgtgtcgctcttcttgc

SEQ ID NO: 214782 - DNA, 90 bp, Homo sapiens
ggagaagtgtgagaggaagctgagttacccagactggggaagcggatgctatcagtataactttgaaaatgcatctcagacatttgatga

SEQ ID NO: 214783 - DNA, 85 bp, Homo sapiens
tgcatacttggaatgaatccttctagagacgtccacgccttatgccagcctggaccatcttggaggcagtgtaggatcatggaag

SEQ ID NO: 214784 - DNA, 82 bp, Homo sapiens
agctcggcccgcgggggagccccgggagccgcacgactcggtgaaatacctggagtgctcagctctcacccagagaggcctg

SEQ ID NO: 214785 - DNA, 75 bp, Homo sapiens
cttcctttgatgtgcactccctgcaagcagggtcagagattggtgttttgccttctggagctactgtccaggcat

SEQ ID NO: 214786 - DNA, 76 bp, Homo sapiens
gaaatccacaaggattcttttcaatacatcctaaaacaggggagccttagcatcatcaaatctaaaattccaacat

SEQ ID NO: 214787 - DNA, 82 bp, Homo sapiens
ccgcccacccggacgccgacgaaagccagcgagctcctcagcctcagaacccagtgacttgattgtaaaaatttacagagcg

SEQ ID NO: 214788 - DNA, 95 bp, Homo sapiens
atttaggagacataagaccgttggttctgacgaggcacagcgtttcttgcaagaatgggaggagaactgcgacacatcaccaagctgaagccctg

SEQ ID NO: 214789 - DNA, 87 bp, Homo sapiens
ttgccgaacgtggtggagctgtggcaggcagaagaaggggaactcctgctgcccactcaggaattgtggtgcttggaataaacagag

SEQ ID NO: 214790 - DNA, 75 bp, Homo sapiens
aggaaatcggctttagaatccgggacatgtggtataacctggtgtcttctgggactctcctactcattgcttgcc

SEQ ID NO: 214791 - DNA, 73 bp, Homo sapiens
ggctcctggccattctggccacgccccagccctctgaaggtgctgctccagtattatggcatgacggagatga

SEQ ID NO: 214792 - DNA, 82 bp, Homo sapiens
ggacacagcaatatctctgggctttcacaggttaggaattttagacccagttctgctactgactttctgtgtggacacaaac

SEQ ID NO: 214793 - DNA, 100 bp, Homo sapiens
aactgcttcaagccccgcgagtcgcatctgctcaacgacgaggacctgacgcaggcatgactccacagtttctgcaacaacagagccggggaaaggagga

SEQ ID NO: 214794 - DNA, 100 bp, Homo sapiens
gaacgaattcagtgatatcattaagtccagatctggcatccgtgtacaagatttgcagagaaatgtatgacgatggagtgggtttaccctttcaaagtca

SEQ ID NO: 214795 - DNA, 90 bp, Homo sapiens
cggcaagatcaagcactggaaccgcttccgagaccacatggattaattgatgtatgttgagtttatggagctgccttttggtggcttgct

SEQ ID NO: 214796 - DNA, 75 bp, Homo sapiens
ggatggtgaatttcagtcagcctcagaggttgacttctacattgataaggagccatatattgaagaccatgtctg

SEQ ID NO: 214797 - DNA, 74 bp, Homo sapiens
gatctccaagaaggagaagcttctctcgcagccggagcaggccgatgtcattgtcaacagcgttcccatgaatc

SEQ ID NO: 214798 - DNA, 83 bp, Homo sapiens
aattggttactgggtctcctctcaagaaatctcaagatattaaagttactgctgttaaaaagccaggcgggcaccacggcagg

SEQ ID NO: 214799 - DNA, 99 bp, Homo sapiens
gggccaactccgaggcggggacgccgcgacgggaacttgaggacatggatttgattgacatactttggaggcaagatatagatcttggagtaagtcgag

SEQ ID NO: 214800 - DNA, 82 bp, Homo sapiens
atttttttctattttccctacgaaaaacagatctttttaaggacccttgaacatctgtgaagaaatgactattctgcatgga

SEQ ID NO: 214801 - DNA, 75 bp, Homo sapiens
attatttgcaacagctcacgggagcaagaacggtctgctcaccaggtggccagataccgcccacgtgcccccatc

SEQ ID NO: 214802 - DNA, 50 bp, Homo sapiens
ccggcgccagcgagaacgagctgaagaagatgtcgacgactgtgcagaca

SEQ ID NO: 214803 - DNA, 100 bp, Homo sapiens
gtggcccgaggagataaacagacagagagaggaacattgatgcgtgtgaaatgttggcagaggtctgcggggtttccgagaggctcgccgggatttctgg

SEQ ID NO: 214804 - DNA, 75 bp, Homo sapiens
cggcagccgaggccgcgaactgcatcatggaggagtgaatggtgtgggctcctcaggccccagtgagtacatgga

SEQ ID NO: 214805 - DNA, 100 bp, Homo sapiens
ctgcagcctcaacctcctggactcagatacactctgtgcagttttagagagagacacactcagtattcgagaaagtcgactttttggagctgttgtacgc

SEQ ID NO: 214806 - DNA, 102 bp, Homo sapiens
ctcagaggtaaatgacacatggcctcttccttggtgggggaaacaggcaaacagaccattactttccgaagaggagttgtacgcatgtcagagaggttgcag

SEQ ID NO: 214807 - DNA, 100 bp, Homo sapiens
cgtggcgctcatcaccggtatcacaggccaggctcgcttctcatatgtgcggatgaaatatcttttcttttcctggttagtggtttttgttggaagctgg

SEQ ID NO: 214808 - DNA, 75 bp, Homo sapiens
ggctgactcaagcggaggcgcgcggaacagtcgccgaggcgattcccgcccagacacacctcgccctcaaggaca

SEQ ID NO: 214809 - DNA, 75 bp, Homo sapiens
caagccagagccaatggaagaagatcttccagagaataagaagcaggctttcctgaatgtattggaccagtgtcc

SEQ ID NO: 214810 - DNA, 82 bp, Homo sapiens
gacgaggggctccgggtcttccagagcgtgaagatcaagatcgtgctgctcacggccgtgaactgctacagcgtgaaggccg

SEQ ID NO: 214811 - DNA, 83 bp, Homo sapiens
ctggaacgccaaccggctggacctgttcgagatcagccagccgaccgagaaaactttagaaactgttcctttggagaggaaaa

SEQ ID NO: 214812 - DNA, 100 bp, Homo sapiens
agtacaacagccacaaggggtcttcctgtggccctcaaacaaaaaatcactgcattacatcagcaggatggtgccatgacaatggtgtgaactacaagat

SEQ ID NO: 214813 - DNA, 98 bp, Homo sapiens
cctcctcccagggccaggcgccgctcagaacgggcctattccctggtggattccagtcaagtgtctacatttctgatttccattcttcttatagtcta

SEQ ID NO: 214814 - DNA, 75 bp, Homo sapiens
tgaccgagagcgtgaccgagagcgcgaatatcgtcatcgttagaagatggagtctcactctgtcgcccaggctgg

SEQ ID NO: 214815 - DNA, 83 bp, Homo sapiens
ctcgcttctttcggttctacctgggagaatccaccgccatccgccaccatggagtgtggccatctggggccgtgtggtatttg

SEQ ID NO: 214816 - DNA, 100 bp, Homo sapiens
attttgattcgctttccaaggacaatgtcttcgagaataaccgtttgtgcagctgctcctggaccatggtgctgatcctaaccagcgagatgggctgggg

SEQ ID NO: 214817 - DNA, 100 bp, Homo sapiens
aacacttcatagaaaactatccaagaatgtgacttcctggagtagagtcttttttcactgagggactttaatttttggaagtgaataaaacttgttttag

SEQ ID NO: 214818 - DNA, 101 bp, Homo sapiens
aagaagatttgtaaagaaaactcttagacacgatgaggcgagtggtacgacagagcaagtttcggcatgtatttgggcaagcggtgaaaaatgaccagtgc

SEQ ID NO: 214819 - DNA, 90 bp, Homo sapiens
aaaaccagttattgaatatcaagaggaggagttgttggacattcggaaattctttggagtaataccaagtggaaagaaacttgtaagtga

SEQ ID NO: 214820 - DNA, 100 bp, Homo sapiens
gatactcagcagctggaccggcaaattaaagcaattatgaaagaagtcattccttttttgaaggctgacttatccttgtataatgaattccgattgtgga

SEQ ID NO: 214821 - DNA, 100 bp, Homo sapiens
tggacgtgaccatgggaactgcctgctccttcctgcagccccaatgtggagtgcaaaagcatgaggttcggcatgttgaaggaccatcaagctgtcaccg

SEQ ID NO: 214822 - DNA, 75 bp, Homo sapiens
gagccgtggtacgaccaccaggacctccagcaaggagagcgacttgcagttgtggaggtacagtgtgaacggctg

SEQ ID NO: 214823 - DNA, 100 bp, Homo sapiens
gcagccgatccagcctgcggagcctgtggggcagtctcctgcacatagttactccagctatgactctggcaaaaatgagagtgtagaccgaggagctgag

SEQ ID NO: 214824 - DNA, 75 bp, Homo sapiens
agacgtccaacctgctgctgagccacgccggcatcctcaaggtggtcctgaagagcaaggatgaccaggtgaccg

SEQ ID NO: 214825 - DNA, 88 bp, Homo sapiens
tggagatcctgatgtttctcagtgccattgtgatgatgaagaaccgcagatccaactttatattcagagcaccaatcaaattaagcaa

SEQ ID NO: 214826 - DNA, 100 bp, Homo sapiens
ggagagaaagaagtgatgaaactctggaatctccatgtcatgaagcatggattggcgctgttccactggctgctttgggggctcctactcttgatcctgc

SEQ ID NO: 214827 - DNA, 100 bp, Homo sapiens
agaaacaaatcttgaagcacctctccaggagatcatgaatcagacagataaaaatcaacaagaaatcccatcataccttaatgatgaaccaccagaaggt

SEQ ID NO: 214828 - DNA, 100 bp, Homo sapiens
ctttgataagaatgattcagattttgaagctaaagttaagcaggcagcggaggaggagaaagagatggacctcccggactcggcctcgagggtcttctgc

SEQ ID NO: 214829 - DNA, 100 bp, Homo sapiens
aaaagatgaacttctgagttacataaagaagacctaaaactgatggctactaaaaagcagagcatttctgcacttttccagccattaactccaggctctc

SEQ ID NO: 214830 - DNA, 82 bp, Homo sapiens
ctggagacaagcccaggaaagcaacatggtccttcaaatcgctccaattcagtgtcctccctagacctagaaggagagtctg

SEQ ID NO: 214831 - DNA, 100 bp, Homo sapiens
ggaagaattaaggggcatgttggtgcatttaactacaaaaccagggtcagtatagaccttctgatttgctgtgccctgagacatatgtttgggtacccat

SEQ ID NO: 214832 - DNA, 80 bp, Homo sapiens
caccatgtcagacgcagccgtagacaccagctccgaaatcaccaccaagccatcccaggcctcaggacctgagttctccg

SEQ ID NO: 214833 - DNA, 50 bp, Homo sapiens
ccacggtggaagcgagagaggaggagcagtcattatggcgaaccttggct

SEQ ID NO: 214834 - DNA, 90 bp, Homo sapiens
agacagtgagtgctaaaggcccccctgaaaaacggatgagacttcagtttgcaactgtgcgatatgatcaaggagccaagaacattcgga

SEQ ID NO: 214835 - DNA, 96 bp, Homo sapiens
tgcctccattgcacacagattccacatcatgagagaaaaacacccagagaaattcaacagtaggaaacctggattagaagcatgtgctgctctcag

SEQ ID NO: 214836 - DNA, 82 bp, Homo sapiens
gacggcggaggcgcccgcgggtcccctacagccaaggttgtggcagcactgcctgaaggtatgagaccagattctaatcttt

SEQ ID NO: 214837 - DNA, 100 bp, Homo sapiens
gccagccagccagtcagtgggtcccgcagtcgcccgcaaccggggcgaatcatggcggccgccaaggacatacagtgggagaagttattaaattaggtcc

SEQ ID NO: 214838 - DNA, 50 bp, Homo sapiens
gtggcatgtcgatttgtccttcactacagaggcggggtttcaccatgttg

SEQ ID NO: 214839 - DNA, 100 bp, Homo sapiens
ggaaaatgcaagaagactgatggagcaggcttgcaatattaaagatgcttatagaattttatgagtcaccagatccagaaagaagaaaaagatttcctgg

SEQ ID NO: 214840 - DNA, 90 bp, Homo sapiens
agcaactgccggacgccctatcgcaagcaggtttcaatgtaattaggctactgagcggatcagctgtagcactggttatagcccccactg

SEQ ID NO: 214841 - DNA, 75 bp, Homo sapiens
acctgaacaagtcccagctgaagctgggcatctggggcggactaccgaccagactcccggaaatcatgttggtag

SEQ ID NO: 214842 - DNA, 100 bp, Homo sapiens
cacaaaaacctgcctcaaagttgagattatagagaaggacaccaagtacagtgtcattgtgatccggagtcacagggattatggacccagaacagatgct

SEQ ID NO: 214843 - DNA, 98 bp, Homo sapiens
gccgatcctcgcgtgagacagatcaagatcaagaccggcgtggtgaagcgactttgagagttttgacctgcctgaagagcaccagattgcgcacctcc

SEQ ID NO: 214844 - DNA, 82 bp, Homo sapiens
cttggtttggacatactacatggatcagaacaagttgaaatcatcgcagaaggataaagttcgtcagtttatgatcttcaca

SEQ ID NO: 214845 - DNA, 111 bp, Homo sapiens
ggcaaaacgggcggtcgagcagaacgtgtagccgcgtcccctccagtccgctccgggcagggagtgcatccgccccaacccttttccccctcgtctcctgtgagaattccc

SEQ ID NO: 214846 - DNA, 130 bp, Homo sapiens
aggagatcgccacctccatcgaacccatccgcgacttcctggccatcgttttcttcgcctccatagatctttgaaccaccagctccaggagaaggcaactccagtcagaacagcagaaataagcgtgccg

SEQ ID NO: 214847 - DNA, 97 bp, Homo sapiens
ggcctcctggaggcagcacgggcgaccccccggcgcagcagcatcatcaaggacaagcatgactttcaggactctgtgagaataacgttggacttta

SEQ ID NO: 214848 - DNA, 98 bp, Homo sapiens
ccacagggagcccactccttcatcaacgaggttggtgttcgaggaagagacattgttgttcttggtgtggagaagaagtcagtggccaaactgcagga

SEQ ID NO: 214849 - DNA, 83 bp, Homo sapiens
ggagtgccgtgcgccgcagcccgggcccaggccccggcagcgcctgggacaagcgtttgcctcagcatggagggcggggccgc

SEQ ID NO: 214850 - DNA, 83 bp, Homo sapiens
cttccgcacccgcctcggactctattgggtttttagaacttcagccataaaaatgggcagaattttccttgatcatatcggtg

SEQ ID NO: 214851 - DNA, 100 bp, Homo sapiens
ggcggactatgtccgaagcaaggatttccgggactacctcatgagggctgttgataatcaggtgtatgtggccacagcctctcctgcccgggatgacaaa

SEQ ID NO: 214852 - DNA, 82 bp, Homo sapiens
ttcatgggcgagggaacagatgagaaacccggcaatgaaagtgtatttcgggcgctggctgatcgagggaggccctctggtg

SEQ ID NO: 214853 - DNA, 51 bp, Homo sapiens
gggccagggacacggctcaccgtgctagctgcatatctatgtgagactgaa

SEQ ID NO: 214854 - DNA, 98 bp, Homo sapiens
aactacaatcataaagaaatccaacttaccttgtcaaggagctgatcacgcagtacctggctgagcttcggaaccccgaggagatgactcgctgtggc

SEQ ID NO: 214855 - DNA, 73 bp, Homo sapiens
ttggagcaaagggcagtcggcggagcttcgccaaggctggcgcagtcgaagctaaatttggatttggctgggc

SEQ ID NO: 214856 - DNA, 134 bp, Homo sapiens
catacacagaagcaaactacaaaccaacttttctatcagacgatgaattgaaacacctcattctcaggtttggtgaggattcatcaacctccagtatgatgtctgtgaactttgatgttcaatcaaatcagagt

SEQ ID NO: 214857 - DNA, 112 bp, Homo sapiens
tgcagcaaccactattttcttcctgcccctcgttgatgagagcattcgaagtgacctcagcagggcatccagacaaatttacatgtattggagaccagaccagaagcccttc

SEQ ID NO: 214858 - DNA, 51 bp, Homo sapiens
gattcgcagtggtcgcttcttctccttgatatgggacacagcaggacagga

SEQ ID NO: 214859 - DNA, 82 bp, Homo sapiens
aagaactggcgtcacgtttacaagaaggaagaggcccagcagaagggactcgctgagccaccccccgccccactccatgttg

SEQ ID NO: 214860 - DNA, 75 bp, Homo sapiens
gggaaaagggaagtgaaaagagatctgttttcagggaacataatacaactggatctaagcttaagcaaacacgtg

SEQ ID NO: 214861 - DNA, 60 bp, Homo sapiens
agcattggtactaatggccaactcaagacttggcatccagagatgagccccagaagttat

SEQ ID NO: 214862 - DNA, 96 bp, Homo sapiens
gcctgattaaatactggtttcacactccaccaagcatcccattacagatagaagagatgagaaaactgatttggagagatactgagtgatttgccc

SEQ ID NO: 214863 - DNA, 96 bp, Homo sapiens
gtaccatggaccatgccaggcatggcttcctcccaaggcaccaagatgataccctgtgacttcctcatcccggtccagacccagcaccccatacgg

SEQ ID NO: 214864 - DNA, 100 bp, Homo sapiens
tgatgaccaagagaatgtgtcagccgatgcaccgagtccagcccaggaaaatggagagagagatcttggtagaggagagcaacgtgcagagggtggactc

SEQ ID NO: 214865 - DNA, 101 bp, Homo sapiens
ctctacaacgaaggtgaagccacggaagataagagtccctggagaagtgggagcgtctgaccgtggcggatgcgctggagcccgtccagtttgaagatgga

SEQ ID NO: 214866 - DNA, 75 bp, Homo sapiens
tcaccaccccagccagcaccatcagcagctccaccctgtcaggatgtcacatgtacttcagtttgaggataaaag

SEQ ID NO: 214867 - DNA, 75 bp, Homo sapiens
caaatattatggatcctatctgaagattctatggaggtgaaacctatcatgaccagaaagttgcggaggcgacca

SEQ ID NO: 214868 - DNA, 80 bp, Homo sapiens
agtcatttgggaaggaataagcctggaagaaaaagatacaacgaactagcacaacgaggtctgaccagtgcacaggactt

SEQ ID NO: 214869 - DNA, 127 bp, Homo sapiens
gttttttgatcttccaagtctcaataaaaacatccccgtcatcgagtatgagcagttcatcgcagctcggaatacctggccatcacctctgaaagcaaagagaactgcacgggcgtccaggtggccg

SEQ ID NO: 214870 - DNA, 82 bp, Homo sapiens
atcgagaccatcccggctaaaacggatttaccgaggagcattatggatcctgggagaatactgtagtaccaaggaagacatt

SEQ ID NO: 214871 - DNA, 73 bp, Homo sapiens
ccatacggaagggtctgcatcacaagtgccggagctgggcgaacaggtacattcatagccctcagcaacattt

SEQ ID NO: 214872 - DNA, 75 bp, Homo sapiens
ctttcacggacaacctcagaggacaacgaagtgttcggccaaatttgagtttcatcatggtgactatgaaaaaca

SEQ ID NO: 214873 - DNA, 75 bp, Homo sapiens
gctcaccatcagtgaatttaagcccacatatcaggaccgagtggccccgccagatgggcggaagccatttccaat

SEQ ID NO: 214874 - DNA, 83 bp, Homo sapiens
cctggaagtagcaggccgcatgcttggaggcctcagagaaccatggctactgccaagggaatcgccataggcatcgacctggg

SEQ ID NO: 214875 - DNA, 100 bp, Homo sapiens
ggacctggttctgccttctggacaatctttccgagggcaaggagttggtgcacacctacaagggctgcatcaggtcccaggactgctactccggcgttat

SEQ ID NO: 214876 - DNA, 98 bp, Homo sapiens
atcacctcagcagcccccaccacggccggaccgaaggtgcggcggcggaggggagccagggcgccccagcaggtgagaagccttataagtgctcatgg

SEQ ID NO: 214877 - DNA, 75 bp, Homo sapiens
acttggtgggaacggaccttcctcttagagatagaatctcactatgttgaccaggctggtcttgaactcttggca

SEQ ID NO: 214878 - DNA, 76 bp, Homo sapiens
tctctaaggcactcgatagagttcttgatgttgaaaaatgcctctccagaagatgtggaatattataattgccagc

SEQ ID NO: 214879 - DNA, 90 bp, Homo sapiens
agcagatgctggcgacctatccagaatgatcaaggacgctgtttgtgactgtagtacccagtctctcacctcctgcttcgcccgatcgtc

SEQ ID NO: 214880 - DNA, 106 bp, Homo sapiens
tccgcccgcaagagcgagccgcctgccccggtgcgcagacagagctattccagcaccagcagagatcaggatcctcatgaccagccaaagagaagaagaattagga

SEQ ID NO: 214881 - DNA, 100 bp, Homo sapiens
cgccgcccgagcgctcgagaaagtcctctcgggagaagcagcgcctgttcccggggcagatccaggttcagatggaaaagactaaggtggctggacgtgg

SEQ ID NO: 214882 - DNA, 97 bp, Homo sapiens
ccaattattgacttatatgaagaaatggggaaagtcaagaaaatagatgcttctaaatctgttgatgaaattattcagctgattgaaggcaaagcct

SEQ ID NO: 214883 - DNA, 98 bp, Homo sapiens
tctgcagattctgtaactgaaaatcttgccacttgcctagtgaggcttttccgaacctggaaggagacgtctagaaatcccaactttgctgtgtaagg

SEQ ID NO: 214884 - DNA, 101 bp, Homo sapiens
cccaggtggaccccaagaagaccattcagatgggatctttccggatcaatccagatggcagccagtcagtggtggagggtttcttgaattcctctgagctt

SEQ ID NO: 214885 - DNA, 88 bp, Homo sapiens
aggtggtcatattggttcatggagaattgcgaatagagcttcttggacacttaatgattgttggcaagaaatgtgctgctgatctggg

SEQ ID NO: 214886 - DNA, 90 bp, Homo sapiens
ggccaccccctggtcctctgccctcgcgccccgctagggccaggttgaaatcacaaagattagacacctttttagataggtgttcttcag

SEQ ID NO: 214887 - DNA, 100 bp, Homo sapiens
agctggtgctcagcgccctgccccacgcgctcctcgccgtgctcagtgcctgttacttgggcaccccgagatgatgaggtaccccacgggcaagagtcag

SEQ ID NO: 214888 - DNA, 100 bp, Homo sapiens
gcgggaagagccggggccgtggctgacatggagcagggccaattcctgtccccccagcagcatggcatcgtgtgctgaaccctctgagccctctgcccca

SEQ ID NO: 214889 - DNA, 80 bp, Homo sapiens
ggcgaggggaagccgcgcggccggccggccgactaggagacacctatggctgccgatgaaggctcagcagagaaacaggc

SEQ ID NO: 214890 - DNA, 75 bp, Homo sapiens
cagctctgcggggcgcaggaggcggtgcacagcgccaagggaaatgatcttcattggttagcatgtgccttatat

SEQ ID NO: 214891 - DNA, 75 bp, Homo sapiens
actgattagcaatttaaagatcctctccaagccacagacccctttgcttctgtttttgggaatgaatcatttgga

SEQ ID NO: 214892 - DNA, 75 bp, Homo sapiens
aaaggcctgacatatctgagggagaagcacaagatcatgcacagaggtgtgtcagtacctctgcagctgggcctg

SEQ ID NO: 214893 - DNA, 121 bp, Homo sapiens
cgataagtgggttgacctgaccatggacgacattcgaaggatggaagaagagacgaagagacagctggatgaatgatggcaacaaactcatagagtttaataatggccaaagagaactaca

SEQ ID NO: 214894 - DNA, 123 bp, Homo sapiens
cggcagggtctgaggtcatcggggatgtggacgaaggggccgacctcctagggccatgaagcccccaggaggagaatcgagcaatctttttggaagtccagaagaagctactccttccagcag

SEQ ID NO: 214895 - DNA, 100 bp, Homo sapiens
ctttctcttttcagttagactcatggactgaggctccaaagtatgaggcatccgtgtcattctggaccttactcccaactaccggggtgagaactcgtgg

SEQ ID NO: 214896 - DNA, 80 bp, Homo sapiens
agtatatggatacggagtacaaaaacggcccttggatgatggagaataacaagcctttgtattcatttgaagataatgca

SEQ ID NO: 214897 - DNA, 100 bp, Homo sapiens
atgatcgccatgcgcctggcacagctcagtgaggagaagaactcggctgtacttcgcagccgtgacctgcagctggcgacaccaatgggaatcccaatgg

SEQ ID NO: 214898 - DNA, 75 bp, Homo sapiens
aagccgccacccaaaccagtcaaaccaggttgaaggtttagaacagatgtggaaaaatgtttacttcagagaaag

SEQ ID NO: 214899 - DNA, 83 bp, Homo sapiens
ggcctgcagcgggagctggacggcgagcgcgagcggcgcgagaaacgccactggcttcaccacgcggtcagacattgggcccg

SEQ ID NO: 214900 - DNA, 96 bp, Homo sapiens
cgcctactacatgtactcggggggcggctctgcgctggccgggggcgcgggcggcggcgccggcaggaagataattgcctttgatgagttaaggac

SEQ ID NO: 214901 - DNA, 100 bp, Homo sapiens
cggaaatgtccgaaggccgcagtacttgaccctgtattttgggagtcgaacggatgagaaagatcagtctaaagaaaaggagaagaaagtgaaaaaaaca

SEQ ID NO: 214902 - DNA, 83 bp, Homo sapiens
gcacagccgcggcggcagcagcagtgagaggccctgggctgcatcttgtacctgctgtgcttccggcagcacccttttgagga

SEQ ID NO: 214903 - DNA, 83 bp, Homo sapiens
cagaggactttcttccagcttctgctgtccttctttgtggagagcaagcaaacggggattcagcgtccgatcctttggaacag

SEQ ID NO: 214904 - DNA, 75 bp, Homo sapiens
gtgtttctggccacgtgcttcaacgctctgctgcccgctgtgagggaaaaggatgatgattggggaaacatcaaa

SEQ ID NO: 214905 - DNA, 90 bp, Homo sapiens
gttacctgcaccgttgtcctacttccagaatgcacagatgtctgaggacaaccacctgagcaatactatttgaggcttaagcaacttctt

SEQ ID NO: 214906 - DNA, 100 bp, Homo sapiens
ctatcctcctagccaaattgctcaactaagaccaagtcctcgctggactgctcagggtgccagacctcatcctggtgccgacaagaaagccgaggctggg

SEQ ID NO: 214907 - DNA, 51 bp, Homo sapiens
tcgcagtggtcgcttcttctccttgttctcagcacagatattctacacctc

SEQ ID NO: 214908 - DNA, 100 bp, Homo sapiens
tacccactctatcgccatttcaagctggtgatgaaggcctacagggacactataaagatattgcaactggaaaacctcggatcaattctcagctggtggc

SEQ ID NO: 214909 - DNA, 95 bp, Homo sapiens
ggaggaggctggctctggtcttcgatgcacaggagtggccgttatggaacgcaggacaaaggccatgatggggtcaaggagctggacagcctaaa

SEQ ID NO: 214910 - DNA, 83 bp, Homo sapiens
tgtgcagacgcacatcagcgaggtcatccgaggccaacgtggaacctgttgtgccgtcagaggcttcagagccggtgcccagg

SEQ ID NO: 214911 - DNA, 100 bp, Homo sapiens
gcagccgccccgaaggagccagcgtcacactgctcagctccgcgaagagttgctgaaacttccctgccctgaaggcttggatcctgacactgacgatgcc

SEQ ID NO: 214912 - DNA, 102 bp, Homo sapiens
cgagaaccgtcagtttgagccagatgagcttacaagaccctatgaaaaaattagttgagaaagaagagaagaagaaaatcaaccagcaggaaagtacagatg

SEQ ID NO: 214913 - DNA, 146 bp, Homo sapiens
tacaaccgcagcagtggtggctatgaacccagaggtcgtggaggtggccgtggaggcagaggtggcatgggcgcgatgtacaatacggtgtggagtatggaccgcgatgacgcagactggagggaggtgatgatgccctattcgac

SEQ ID NO: 214914 - DNA, 83 bp, Homo sapiens
ccgcagaggattcgcagcgtgagcgccccgcagcccgctcaggaccagattttaacctttgagaccaagaacccgtcggaatt

SEQ ID NO: 214915 - DNA, 105 bp, Homo sapiens
acttcctgatctctctcgctgtgagacatgtctgagactcctgctcagtgtagcattaagagggagtgcctttccatccacatcggtcaagctggcatccagatt

SEQ ID NO: 214916 - DNA, 98 bp, Homo sapiens
atgccttgtctgcccctgcagaggaccttgtgctcatcaagaatacagacgtgcaggcagcccgcctgggaaacatcatccacgccatgatcatgtat

SEQ ID NO: 214917 - DNA, 100 bp, Homo sapiens
catggacttggtattcagccttcttaggagttgactttggctactactggttccatcgtatggctcatgactcccaggaaggaaattacaagtcagaagt

SEQ ID NO: 214918 - DNA, 144 bp, Homo sapiens
ctttgaaaggtgtgagttggccagaactctgaaaagattgggaatggatggctacaggggaatcagcctagcaaacttatgggtatggcccttatcagccagttccagaacaaccactatacccacaaccataccaaccacaat

SEQ ID NO: 214919 - DNA, 103 bp, Homo sapiens
ggatccttctgtcatagaaactcacatgagacaaatgcgctcagcttcaattggttctgtatgttcctgatcctgaatatgtctccagtgttgagagctctcc

SEQ ID NO: 214920 - DNA, 75 bp, Homo sapiens
agagcttcatcaaaaatagtgatagctttgataagcaacaagaatgggtgaatcagcaaagggaagatattgaaa

SEQ ID NO: 214921 - DNA, 90 bp, Homo sapiens
ctgggacaatgagaacagctctgcgcggctttttgagcggtcccgcatcaaggctctggcagatttatactatggtggggaagctttctc

SEQ ID NO: 214922 - DNA, 74 bp, Homo sapiens
ggagcagtggtcggagatgtggcgaccggtgaaatgacaatggatgctctgttggctcgattgaaacttctgaa

SEQ ID NO: 214923 - DNA, 75 bp, Homo sapiens
ggcgactggacatcccgagtggtgcacctgctcaatgaccagcacttggtgaccctggcaaagatgagagtgcac

SEQ ID NO: 214924 - DNA, 98 bp, Homo sapiens
ccgccgacccgctggccctttgcaagcagccacgctccatgggggtgccagggggagacacagggctgtgcctgcgcccagaagcagctacacttcat

SEQ ID NO: 214925 - DNA, 100 bp, Homo sapiens
caaaggtctggacactgaaaccaccgtggaagtcgcctggtgtgaactgcaggaaaggccgagggggacggcaagatgcacatcaccctctgtgacttca

SEQ ID NO: 214926 - DNA, 100 bp, Homo sapiens
aggaaactggcggctgctggtagttccatgctgtctgttcagacttcagcttggtgggcctttggctactttgaggtcacacatgacattaccaaatact

SEQ ID NO: 214927 - DNA, 100 bp, Homo sapiens
cctcagcctccccaatagctgggattacagatgttggccgatgatgcagaagcaggtgccgaggatgagaaggaggtggaggaactgaagaagcagggca

SEQ ID NO: 214928 - DNA, 75 bp, Homo sapiens
tttccctctccctttccctaagtgaaacaaagagtcctcttcgtggaaaagaaaaaaatacgctccctttaaacg

SEQ ID NO: 214929 - DNA, 75 bp, Homo sapiens
ggagatggtgcagaagatggaggagtaagactttgaccccgacgcaggcttcagtgattgccgcggatcagaagc

SEQ ID NO: 214930 - DNA, 100 bp, Homo sapiens
ggggacaagtcggcgccccagagcggacgagaggatgatgtggacctggaagccctggtgaacgatatgaatgcatccctggagagcctgtactcggcct

SEQ ID NO: 214931 - DNA, 90 bp, Homo sapiens
gccgccgagctggacccggaccggttttgggttatccggtgttggctcctgctgcttactatgaccaaactggtgcccttgtagtgaatg

SEQ ID NO: 214932 - DNA, 100 bp, Homo sapiens
aagctgccgccgttgcctccgccgccaagagtgagcgagcggacccgcgatggattttaaacagacatcccccctttggaacccagataaaagaaactgt

SEQ ID NO: 214933 - DNA, 100 bp, Homo sapiens
gtcccggaaggtccttagggaggaccccagacaccggagactgggaaatggactcagcccaggagagtgttattactcgagatattcatcgtacatttcc

SEQ ID NO: 214934 - DNA, 75 bp, Homo sapiens
cctaaccttaacctctttgcagcaggtgctggagaatctggtaaaagcaccattgtgaagcagatgaggatcctg

SEQ ID NO: 214935 - DNA, 90 bp, Homo sapiens
aagaactgcggcagaaatttgagcaacacagtcactcctggcggcaaaccaaacaaaaccagagtcatctggggaaaagtaactcgggcc

SEQ ID NO: 214936 - DNA, 107 bp, Homo sapiens
ctgagcctggaacaggtcaagaagcttaaggagagatggggctccaacgggacccagtcgcagagcgcaccccactggggacccccagctcagccatgctggcctgt

SEQ ID NO: 214937 - DNA, 75 bp, Homo sapiens
ctggggccggcgatgtgccaccgaggctgaggatgatggtagattgccagggcagcgggtggcatgagacgtggg

SEQ ID NO: 214938 - DNA, 51 bp, Homo sapiens
cctttggagaagttcttatggtgcagggtggagagattcaaccagttagcg

SEQ ID NO: 214939 - DNA, 74 bp, Homo sapiens
catccgcatcaacaagatgttgtcctgtgctggggctgacaggtgtgatgaatgcagactctgctaccattttg

SEQ ID NO: 214940 - DNA, 89 bp, Homo sapiens
ggctaccgacccggaccccgcggagcctcttgcctcggtggagcaggccaggaggaagcagcgagaagaacgcctgcagcagctgcagc

SEQ ID NO: 214941 - DNA, 83 bp, Homo sapiens
cgccgctagggtcgccgttgcatcggtgcagggcaaggtgagaagccctaccactgcaactgggacggctgcggctggaagtt

SEQ ID NO: 214942 - DNA, 97 bp, Homo sapiens
tcccgcgtccgccgattcctcctccttggtcgccgcgtccttggctggcgtgaactctattttaagaacctctcaaaacgaaacaagcaaatcatgg

SEQ ID NO: 214943 - DNA, 100 bp, Homo sapiens
cgagtcagaacccgagtgctgcttggcggcgagtgagaagattgctcacgtctggcatcgtgattcaggtgtttccactgcatgacagtgaagccctgaa

SEQ ID NO: 214944 - DNA, 100 bp, Homo sapiens
ctcgggcaccatgagcgacgtggctattgtgaaggagggttggctgcacaaacgagcattatggtgccggaaagaacagccaaggggacgttgcttcttg

SEQ ID NO: 214945 - DNA, 102 bp, Homo sapiens
cacccagaaacccaggacagtagcacacagactgacacatctcacagtgggtgtgagccactgccccatgttgtgttgatgccaatctgccatgctagcctg

SEQ ID NO: 214946 - DNA, 74 bp, Homo sapiens
ttgtggctgtgcttgccaggcctggctccagatttggtgctatggagaaatttttggtagaatataagagtgca

SEQ ID NO: 214947 - DNA, 76 bp, Homo sapiens
tgtacttggattcagcaaggaaccttccggcaccatgactcctgtgaggatgcagcactccctggcaggtcagacc

SEQ ID NO: 214948 - DNA, 100 bp, Homo sapiens
ctcggacacagaggacagcggcagcgacgagaacctggatcaggaaagaccacagcaagattctttcattcgtctcctcctagcctgggggaccaggctc

SEQ ID NO: 214949 - DNA, 82 bp, Homo sapiens
ccaatctcccataggcactcagtcaagtctttagaagaagtgtgtgacctgctgcacgcggctcctttccagaacatcttgc

SEQ ID NO: 214950 - DNA, 76 bp, Homo sapiens
agcaaatgcaactagccaatgccatgatgcctggtgccccattacaacccgtgattttaccaaatgttgcaagaac

SEQ ID NO: 214951 - DNA, 98 bp, Homo sapiens
gaatttgtttcacccccgtggattccagtgggcccgacagcgcaacaggcatttgcaagtaaaatcactggcatgttgttggaattatccccagctca

SEQ ID NO: 214952 - DNA, 80 bp, Homo sapiens
ccaggccgggagccgaccggcacagcagggcttaaaagacaaccttcttgcttctgggacatccagcctgacagccacca

SEQ ID NO: 214953 - DNA, 100 bp, Homo sapiens
cctagagtcgtgccgcagcatggtgaacctcatggatccctgaaaagcaaaggcctcatctccatggcacaggtgatgaaacaggaagactgaagcccag

SEQ ID NO: 214954 - DNA, 82 bp, Homo sapiens
cgaattcctgtgccacctcctcctttagaaaactgatcttaatacaggcctgcggggagccatcccctatgccctgagccta

SEQ ID NO: 214955 - DNA, 90 bp, Homo sapiens
ctggtttgatccagcaatattcactattggcaagcctgttcttggaatttgctatggtatgcagccaccagctgaacaggccaaagccag

SEQ ID NO: 214956 - DNA, 96 bp, Homo sapiens
cttatctggagcaaggaaaagagccctggaatatgaagcaacatgagatggtggatgaacccacaggatgcttcagtagaaagtggaaatgctgtc

SEQ ID NO: 214957 - DNA, 87 bp, Homo sapiens
ctgagtggttgtgtggtcgcgtctcggaaaccggtagcgcttgcagcatggttatttccagaaagaagagaatggcaaagtatgaga

SEQ ID NO: 214958 - DNA, 90 bp, Homo sapiens
ggaaaacctactgtaaaagagattatatcaggggtacgtcagcttgaaattatgtgctgctttggctgcatgtcagttcttgccaactac

SEQ ID NO: 214959 - DNA, 100 bp, Homo sapiens
agaaggtcgaggctctgtcccccggagacaggcagcagatctacgagaaagtcaagtctctatttatgaggtggacaagcaagattgtcgcaaattttgc

SEQ ID NO: 214960 - DNA, 98 bp, Homo sapiens
ctggcagtcttccagtgtggtgttccacacgggtgccggcatcagcactgcctctggcatccccgacttcaggaccatgggtagcaacaagagcaagc

SEQ ID NO: 214961 - DNA, 50 bp, Homo sapiens
gccaggccagtcatgctagaacgtcctggtgcttgatggtcgaggccatc

SEQ ID NO: 214962 - DNA, 100 bp, Homo sapiens
cttcgatgtgcgagactttggaaagggcagctgtgcggagggtagtggcagccatgaaccggatggaccagaagaagcacgagaagttttcaaaccagtt

SEQ ID NO: 214963 - DNA, 98 bp, Homo sapiens
gagaaacgagatgggggtgaagctggagatatttcggaccgagacatgggtgcccggcaccgcgcccgagcccactccattcagatcatgaaggtgga

SEQ ID NO: 214964 - DNA, 50 bp, Homo sapiens
catgtagatgggcatctctatgaattagtgttctaagaacggaagcatct

SEQ ID NO: 214965 - DNA, 88 bp, Homo sapiens
ccagtagagcactcataacagatgtactgctgcgcacggccactgccaacggcttccagatggtcaccagcggggtacagagcaaggc

SEQ ID NO: 214966 - DNA, 98 bp, Homo sapiens
gacgcgtcctcagacgcagcgtctagtccctggccatagctccgccgctgcccggtaacagtcctttggacagcccccggaatttctctccaaatgca

SEQ ID NO: 214967 - DNA, 100 bp, Homo sapiens
gcaagttcatggtcacggagaaggcagcctacatagagtgtgaacatggctacgcctcttcattcccgtccatgccgagcccccgactgcagcattcaaa

SEQ ID NO: 214968 - DNA, 101 bp, Homo sapiens
catgccgtgtgtgtgctgggcaccttgactcagcttgacatctgcaggtggttctaactttgatggtttgagaccaaatgggaagggagtgcctatggacc

SEQ ID NO: 214969 - DNA, 75 bp, Homo sapiens
cggcgggcagaggtgatgtctgggagcccttccttgacagcccgggccgagaagtcaggatggctaaaggtgacc

SEQ ID NO: 214970 - DNA, 75 bp, Homo sapiens
aagcgggcatttcttccaggaggtcaccgttggagtcccacagaagctattttgccagccacttcattatgggag

SEQ ID NO: 214971 - DNA, 100 bp, Homo sapiens
ggaggagccaagtgtggcagcagttcgtgaagtctgtgaggagagtctaaatggtgtttggctgaacagagcgcgtctggaacctttaagggtctattcc

SEQ ID NO: 214972 - DNA, 100 bp, Homo sapiens
gggaacatggacatgaagaggaggatccacctggagctgaggaaccggaccccggcagcttcacctttctctccagtgccactactgcgctttcgatgca

SEQ ID NO: 214973 - DNA, 97 bp, Homo sapiens
accctggtcttcaccaagaacttcgcagtggtggactgtcccgtgtgcaagcaacagtgcttctccaaagacatcgtggagaattatttcatgcgtg

SEQ ID NO: 214974 - DNA, 75 bp, Homo sapiens
ttcggatgataaacaacagaggagaaaagcacggaacaattactgccagggttgctgctgactcagccattctag

SEQ ID NO: 214975 - DNA, 75 bp, Homo sapiens
ctggcatcatcattgttggagatgagatccttaaggttatcaatactctggctgaccatcatcatcgtgggactg

SEQ ID NO: 214976 - DNA, 99 bp, Homo sapiens
gtactgggcaggactgactgtagcagtggagatgcttctcggcccagtagtgacaatgcagatagctggctttatgtgctggggcagaagagatccgat

SEQ ID NO: 214977 - DNA, 86 bp, Homo sapiens
cttctgtgtggtggaagctggaccagaggccgggaggcgaggaaaccgtggtttgcctgcaatgagatttcattctctacatttaa

SEQ ID NO: 214978 - DNA, 75 bp, Homo sapiens
atccattactatttcatggccctgaagaatgatgaggtaatttcatctgtgccaaagcctccagaggacaagcca

SEQ ID NO: 214979 - DNA, 100 bp, Homo sapiens
acagagcaacgaggtagagaggacacaagcacttcgattagtcagaaaggtgctgggactctggtgcccccaaccctgggcatcctcaggctttgaggag

SEQ ID NO: 214980 - DNA, 88 bp, Homo sapiens
aactggaatgacaggaatggcctcctcccttagctccctgttcttggcctaatgacagtgaagtggacatgtttggtgactatgatag

SEQ ID NO: 214981 - DNA, 83 bp, Homo sapiens
gcaaagctgggagagactggaccagaccatgggcctgagcatcagttactccacaggatccgctgaacataggatgttgccac

SEQ ID NO: 214982 - DNA, 97 bp, Homo sapiens
cgccacattaaccctttcattttgtttggaagatggaccaaagcgatacagtgttgaaaagtctcctctagagctttggaaggctgaatgcactaaa

SEQ ID NO: 214983 - DNA, 98 bp, Homo sapiens
gaaacagccagtgttttgagttctagtagcacacactctgcacctcgaaggctgacaagtcatctgggaaccaaggtgttggagcgggccggagagaa

SEQ ID NO: 214984 - DNA, 90 bp, Homo sapiens
gtaacatgtttaatcatctttcggccgtcagcgaaagcatccctgcccttggatggatagctgtgggtcttactctgtcacccaggctgg

SEQ ID NO: 214985 - DNA, 89 bp, Homo sapiens
caaccatgcggacatcggcttctgcctggtgctctgcgtcctcatcgggcttatgttcgagactgtattggtgatcacgtaccgagaac

SEQ ID NO: 214986 - DNA, 82 bp, Homo sapiens
ccacagtcgtcttgctgtcgagtggacaatatcactgaccagttctgcaatgcttcaggtgtaatcctgagagattcacatg

SEQ ID NO: 214987 - DNA, 50 bp, Homo sapiens
ttaaattgatttcaagtttgaacaaggatttggagtggatcagttacgag

SEQ ID NO: 214988 - DNA, 78 bp, Homo sapiens
cgctgccgctcccgggcggccgcgggcgggaacttgctactaccagcaccatgccctaccaatatccagcactgaccc

SEQ ID NO: 214989 - DNA, 74 bp, Homo sapiens
aagatgtcagcctcccctgtcccgaacgcagtgtgtggaaaggaaagtggagaatgaggacatgaataaagacc

SEQ ID NO: 214990 - DNA, 96 bp, Homo sapiens
tttggcaagtggacattttactggctcaagactcacaccacccggcaagaactgctcactacggctccctgccccagaagtcacacggccggaccc

SEQ ID NO: 214991 - DNA, 49 bp, Homo sapiens
ccggagagttctgcatgttgattcgattggagacacaaaatcagaaatt

SEQ ID NO: 214992 - DNA, 74 bp, Homo sapiens
aatttttaagacacgctgcaacaaagcaggcaccattcaggaagattacctaagagagctgctgacaaccatgg

SEQ ID NO: 214993 - DNA, 87 bp, Homo sapiens
cgagcggctgctgagcgtgcagcaggatttcacctccggctccataatgggagaagtaaagaacaaagacttaaggaacagcttggc

SEQ ID NO: 214994 - DNA, 100 bp, Homo sapiens
ctgctgccttcccgtcgccgctcccgaagcttttccagggagagagatggtggattacatctgccagtacctgagcactgtgcgggagagacgtgtgacg

SEQ ID NO: 214995 - DNA, 90 bp, Homo sapiens
cgcagctggcggagctggagctggagctctcggagggttcgccatcggtggtgtgaactcattgttaagcacaagttcacgaaagcctac

SEQ ID NO: 214996 - DNA, 100 bp, Homo sapiens
taccgtttgctggttttgaaaatggagaaaaagagtgaggaactgagaaacatggatggccttgggaacgtggaaaagtctaacgggatcgcagccatca

SEQ ID NO: 214997 - DNA, 140 bp, Homo sapiens
cggcagcggctgcagcgctctcgtcttctgcggctctcggtgccctctccttttcgtttccggaaacatggctcttgtcaggatggtgaagctgttcatcggaaacctgccccgggaggctacagagcaggagattcgct

SEQ ID NO: 214998 - DNA, 83 bp, Homo sapiens
ctgttcctgagtgtcaactatctgggggggacattcccaggtgtgactgcacagaaaagttacaaaacaaatttgactttttg

SEQ ID NO: 214999 - DNA, 82 bp, Homo sapiens
cagacgctgtgctcgctggcaccccgaacgggttgcttcccccgctgcgaggttaacacagaaatctgcctcctgggccatg

SEQ ID NO: 215000 - DNA, 50 bp, Homo sapiens
ggatccaggataacggaggctgggtggatccataaagaacccagccaacc

SEQ ID NO: 215001 - DNA, 73 bp, Homo sapiens
tggccttggcagtttcggtgcatagaaaatcagatatgattctataacagactcttccagaaatgatatgaag

SEQ ID NO: 215002 - DNA, 100 bp, Homo sapiens
cctggcctggagcctggaagggggagacggcccgagcgggagcgggagcggacgcggcctcagtcctgcgcggagttctaaagttcctgttgcttcagac

SEQ ID NO: 215003 - DNA, 100 bp, Homo sapiens
gcgagagttcctggccgagttcatgagcacatatgtcatgatgagttcgaaccaacgtggcctcaaccagatttggaatgtcaaaaagcagagtgtctat

SEQ ID NO: 215004 - DNA, 75 bp, Homo sapiens
gtttctcattctcatatttcaccaataaagggtatttgaagtataccatacaactgttttgaaaatccagcgtgg

SEQ ID NO: 215005 - DNA, 90 bp, Homo sapiens
aaccaaaattgcctaaagaatgcgggaaacccacgtgacatgcggagattccagggactatgttcggagtgaactggagtttgcctatga

SEQ ID NO: 215006 - DNA, 96 bp, Homo sapiens
ggttcataggcggaagggacttgacttgtctcagtttaagctatgaagaaggacatccctcacactctgaaacagatctccttcagagacagagtt

SEQ ID NO: 215007 - DNA, 100 bp, Homo sapiens
ggaacccgagaccacagccaccactattctagcatccgtgaaggagcaggaagtaacagctagcagtcgccactatgttgacaggctatttgaccctgat

SEQ ID NO: 215008 - DNA, 87 bp, Homo sapiens
tgccaggcagaaggcctctctcctgatacagcaggcgctcaccatgttccctggagggagccatgctcactggtcctcctggtaccg

SEQ ID NO: 215009 - DNA, 144 bp, Homo sapiens
tcggcagtgtgaggagctgctatggtgctgagtttcctggtagagccggccgagctgaggcggtcgcggccatgaagaacggccggtttgtgggcgatgctgaccttgaaagacagaaattttcagatttgaaactcaacggac

SEQ ID NO: 215010 - DNA, 100 bp, Homo sapiens
acaggaacaggactgactccagtgatgacgcaggccttaaggagaaagtttcaggtgaccaagaatatggcccaggtgaccaaagccctggacaaggccc

SEQ ID NO: 215011 - DNA, 83 bp, Homo sapiens
tctcagggcaagggttgccacgaccacccagaacctcaccaggtcaaaatgcagatcttcgtgaaaacccttaccggcaagac

SEQ ID NO: 215012 - DNA, 100 bp, Homo sapiens
caactgccgagcagcgcttctccatggaggaagtttaactaactctttgaatatctcagagtttgaagaatccataaaagattatgaacaagccaacttg

SEQ ID NO: 215013 - DNA, 106 bp, Homo sapiens
ccccgcgctgcggcctggcggcttccaggcgcactaccgcgcatcttcatgatacagttaagaggaatcttgacagcgccacttcccctcagaatggcgatcaaca

SEQ ID NO: 215014 - DNA, 90 bp, Homo sapiens
ctcacaacatgcacagcctggcgacggctgcggggccacctacagatgctcctgcagtggacacagcagaacaagtctatatctcttccc

SEQ ID NO: 215015 - DNA, 98 bp, Homo sapiens
ccactcaggtttttcctaagctcaactctagccagctaggttcctggtgctttggggagctgaaggtcaggccaggacagtgagacctgactccttgc

SEQ ID NO: 215016 - DNA, 100 bp, Homo sapiens
tgggcacactgtgggggtgtcctggtgcacccccagtgggtgctcacagctgcccattgcctaaagaagcgggatgtagctcattttgggatacgagtct

SEQ ID NO: 215017 - DNA, 100 bp, Homo sapiens
tgcagctgctgcgcttcctgagggctgacggcgacctgacgctactatgggccgagtggcagggacgacgcccaggtttgtggtaaatatgccagctcta

SEQ ID NO: 215018 - DNA, 83 bp, Homo sapiens
cggattcgccgaggcaccgaggcactcagaggagttatacatgggaagctgttgataccaaaaataatgtactttataaaatc

SEQ ID NO: 215019 - DNA, 147 bp, Homo sapiens
cttctatttcttgtggatattatggctaataacacaacaagtttagggagtccatggccagaaaacttttggggtaactataactacccaatattgcagccatggagtccatgcttaataaattgaagagtactgttacaaaagtaa

SEQ ID NO: 215020 - DNA, 75 bp, Homo sapiens
gtgaggccgtggatgcaggcattaagaatggacagcaaattatggatgaacctatgggagaggaggagattaacc

SEQ ID NO: 215021 - DNA, 75 bp, Homo sapiens
attccagtcaaacttggaataattggagtagttaacagcacggccacatgatttcttcgatgcacaaacactgga

SEQ ID NO: 215022 - DNA, 82 bp, Homo sapiens
gatgctgctcaaggccaagatggacgccgagcaggatcccagtctgtttctgtcgactgtggaccacttatgtgcgatccgt

SEQ ID NO: 215023 - DNA, 82 bp, Homo sapiens
ggggacggcagtgctgaggcggaacaggccgggcaccaaggcgcagacgctgaccggaaaggagattgagattgacattgaa

SEQ ID NO: 215024 - DNA, 82 bp, Homo sapiens
ctgaggaatttgaagtgaccaaaacagcaggagaactacgatgacccgcacaaaacccctgcctccccagttgtccacatca

SEQ ID NO: 215025 - DNA, 100 bp, Homo sapiens
gtcagagttgctcatggaggtgcacggaaatgggaagaggcccagtccagagaggtcgaatgcaattcccgcctgaaccctataaatacaactttgctaa

SEQ ID NO: 215026 - DNA, 100 bp, Homo sapiens
gacctgtcgtctagaagaagtgatgggtatccggtcttagaatacattccagaaaatgtatcaagttgccgaacaagcaaccggaaaagcttaataggca

SEQ ID NO: 215027 - DNA, 58 bp, Homo sapiens
agttgttgcaaaaatcagtgccctaaagagtcattgaaattatgagactatcattcaa

SEQ ID NO: 215028 - DNA, 90 bp, Homo sapiens
ctcacaggaaagacagatgctgcaaactttgaagtttttgccagattggaagagtaggaagattaggtcaaaatggaacagcgattactt

SEQ ID NO: 215029 - DNA, 50 bp, Homo sapiens
gtgccccaggatcagggaggactgcaggtgagctcaggagataagatgga

SEQ ID NO: 215030 - DNA, 73 bp, Homo sapiens
gtcttctttccaatgccatcaaccgcctcaaagacactggttagtgcctggaagagctgggatgtctggttga

SEQ ID NO: 215031 - DNA, 74 bp, Homo sapiens
ttgggaagtgggagcgggagggccgggcaattcccgaccgaaccaaacgaagtcatcaatgggcagcatgttcc

SEQ ID NO: 215032 - DNA, 98 bp, Homo sapiens
accatggcctccgtctgccacacgctgatggtgcagcaccgcatgatggtacccaaagtcaggtataatacttctccacgtctgcttcaggaagaaag

SEQ ID NO: 215033 - DNA, 100 bp, Homo sapiens
acggtacattggaggaagtggaccaagatgctggtacagagccccacacaagtgaagatgtgtcacatttgaagacgagcactgaggatgaggaaccaac

SEQ ID NO: 215034 - DNA, 76 bp, Homo sapiens
agccgcccccagatcggccagtccgagcgtgccggacacagccaggttgtcggggccaaagtggtaacgaacgccc

SEQ ID NO: 215035 - DNA, 100 bp, Homo sapiens
ctgcgttaatgtttgcaaatgcagaggaagaatttttctatgaggtctaccctgaactgcagatcaccaatgtggtagaagccaaccaaccagtgaccat

SEQ ID NO: 215036 - DNA, 83 bp, Homo sapiens
caaggtcgccctcaaggccatgatcaaaactgatcatgtccgacgaggccgtggaggagaggcgggccttgatcaagcggaag

SEQ ID NO: 215037 - DNA, 100 bp, Homo sapiens
tctaccctttctccccagccaagagcatggctatgggagaaggaaggcaggcagcaggcagttcgaagcattcagcaaacaatggcaaggcagagccacc

SEQ ID NO: 215038 - DNA, 98 bp, Homo sapiens
ccgctatgtcctggatgacgcccagctgcacatatacatgctcatgaagaaggtcccgagcagccccgcccaacatggacccagacccccaggcgggc

SEQ ID NO: 215039 - DNA, 76 bp, Homo sapiens
cctttgagcgggtctacactgccaaaggagtttgaaattcttgcttcaggccatatggagtggatattccttccag

SEQ ID NO: 215040 - DNA, 100 bp, Homo sapiens
cttccattgaacttcccagcactcgaaagggaccgaaatggagagcaaagcttgtgaaactttgtattgcaatgattgatactggaaaagccttttgtgt

SEQ ID NO: 215041 - DNA, 75 bp, Homo sapiens
gccgcagtgccacttcgacatcgagatcaaccgggagccgggaggaaggctgaacaaggacctgcgacattttct

SEQ ID NO: 215042 - DNA, 51 bp, Homo sapiens
tgcgcaaagcttgcgaggtggcgttagggagactcatgcatctgtatgccg

SEQ ID NO: 215043 - DNA, 82 bp, Homo sapiens
ccagcagcaactgtagcgccaaaaaggaaggattctgacaatggagatattaattatgattatgttcatgaattgtcattgg

SEQ ID NO: 215044 - DNA, 75 bp, Homo sapiens
cccaaagcaagaaaattactaaagaggagtttgccaatgaatttctggtcaacaggacatactgctgtggcacct

SEQ ID NO: 215045 - DNA, 83 bp, Homo sapiens
ggactgcacgtagcccggcgctcggcatggctctcctggtgctcgcaattctgtggtgttcttggtcacacatttatggagtt

SEQ ID NO: 215046 - DNA, 100 bp, Homo sapiens
gacgtggaggtgggaaggtgtgtccggaggtttgcaggggtgcagtgtgtctggtcttatgaggatttgcctcaaagggcactgcaaaaattgaacagag

SEQ ID NO: 215047 - DNA, 51 bp, Homo sapiens
ctctgaaggcacagacttggaagcaccaggaggaagaggaggtagaacggg

SEQ ID NO: 215048 - DNA, 83 bp, Homo sapiens
agcagcaagtgcgcggttggggccactgcgaggccgttttagttgccaccttccagagaagaggtacgagatgacaagacaac

SEQ ID NO: 215049 - DNA, 98 bp, Homo sapiens
agccaaacatacatgcatcccatgaagacagcgggaaagccctggctcctaagggtcaacagttgtcaccgacagatggctgagattgctgtgaatgc

SEQ ID NO: 215050 - DNA, 75 bp, Homo sapiens
ggtcctcaactttgaagagatcgactacaaggagatcgaggtggaagagaatcagatgggtgactcaaatatctc

SEQ ID NO: 215051 - DNA, 74 bp, Homo sapiens
ggaggagttaacgacgctttcaaagatgcactgcagagagcccggcaggtgtatactcttgatgtaccagatgc

SEQ ID NO: 215052 - DNA, 100 bp, Homo sapiens
aattgaaaatattggggccatttagtaacttctttgcaaggtattgatgtcaagctgaaccatcgtaggaagttgaaagccttagaaagaggacttggta

SEQ ID NO: 215053 - DNA, 50 bp, Homo sapiens
cacaggctccaaactccactaagttgaagaagcctcagcggaggcgatac

SEQ ID NO: 215054 - DNA, 83 bp, Homo sapiens
agggcatacatctttcttcgacaaaggttgatattcactgatggactccaaagaatcattaactcctggtagagaagaaaacc

SEQ ID NO: 215055 - DNA, 50 bp, Homo sapiens
actatttgtcctcttccagaattgtggcatgccctctcccgtgaagagca

SEQ ID NO: 215056 - DNA, 76 bp, Homo sapiens
gcaggccgaggccatatccgagcgagtgctgatggcagagattggtgaggatttggataaatctgatgtgtcctca

SEQ ID NO: 215057 - DNA, 98 bp, Homo sapiens
tcggcgggctcgcgagcccggccgcggcctgctggtttcaggaattgaatgatctggcacgggaccctccagcacagtgttcagcaggtcctgttgga

SEQ ID NO: 215058 - DNA, 75 bp, Homo sapiens
tttgtggaagcctcgcccgcatcctacagcccagacgagttaggcacgtctgagaatggtggatgtggtggagaa

SEQ ID NO: 215059 - DNA, 48 bp, Homo sapiens
ccctctccagcacgcgagtgtcgggagttcccattagacttgaagttg

SEQ ID NO: 215060 - DNA, 50 bp, Homo sapiens
atcacctggagtgaagacctcacacgcgaagtttattttgagttggatgc

SEQ ID NO: 215061 - DNA, 87 bp, Homo sapiens
ctcaatatctgtcttcggtggactccttcggcagtccacccaccgccgccgcctcccaggtgaaagaaaatggcccgaaccaagcag

SEQ ID NO: 215062 - DNA, 75 bp, Homo sapiens
ccaaaatatggcaaagaaacctattctgaggcttgggcactgtttaaaggaaagttccgagaaggcatcgacaag

SEQ ID NO: 215063 - DNA, 82 bp, Homo sapiens
tcggatgatgatgtgatttatggggagactcatgcatctgtatgccgtgtgcgtggactgcctggaaggggttcacaagatc

SEQ ID NO: 215064 - DNA, 75 bp, Homo sapiens
gaagatcatcattaaggacggaggcacgcagatataatttctacagtagaatttaatcattctggagaattacta

SEQ ID NO: 215065 - DNA, 100 bp, Homo sapiens
ccccggcccacagtgggggtgtgcaaacccgagagaactggaggaagccagatcgctgagggtccggtctccagtttgcctcctgctatatccattggaa

SEQ ID NO: 215066 - DNA, 98 bp, Homo sapiens
gaccccgcgcgggctggttcgggatgagcgatggcatcggtcaaggtggccgtgagggtccggcccatgaatcgcagcccgtggccacccaggagccc

SEQ ID NO: 215067 - DNA, 100 bp, Homo sapiens
ctgcgctttatcgaaatgaagaggaggaagaggccatttacttctctgctgaaaagcaatgggctgacgcgccactatgtagcgggtttcgggcgggcca

SEQ ID NO: 215068 - DNA, 75 bp, Homo sapiens
tgaccaactcataaaagagtttcttagtggttcttactgctttcgtggggtctccagaaatgctttgggttcatc

SEQ ID NO: 215069 - DNA, 125 bp, Homo sapiens
ctgagggcagggacgtgttggacacgctgactttgtaggctccgccaagaggcgccgcaggaggctgattttgtgaaaatcgctcaccctgagccagcattcagagaagctgcggaagaagcttg

SEQ ID NO: 215070 - DNA, 75 bp, Homo sapiens
ctgaagtgaacactgcagggccatttgggcttccgttacaagatgaggtctgtgtatgctcacttccccatcaac

SEQ ID NO: 215071 - DNA, 90 bp, Homo sapiens
gcggcggcggcgcagctattgctggacggccagtgggagagcgaggcctgagcctctgcgtctagtaatccttcccctctaccaccggat

SEQ ID NO: 215072 - DNA, 101 bp, Homo sapiens
cctagtcctgctgttcctgatccgcactgccctttttgcaccccagggagctgctgctgcccattgcagatgcaaaggctcctgagaagcgggcctcacca

SEQ ID NO: 215073 - DNA, 83 bp, Homo sapiens
cttcaggaatggagacacggcttcccccaaggaatatacagacctcctgccccccgaggtctgcagtctcctgaacccagcag

SEQ ID NO: 215074 - DNA, 107 bp, Homo sapiens
cgcgcccggccgcgacgcccgggacccagattgcgggttcaggaaaaggggaagatagtgatgtactcagtataaatgcagatgcttatgacagcgacatagaaggc

SEQ ID NO: 215075 - DNA, 82 bp, Homo sapiens
atcgtcgccacctggatgctggaggctcttgtcaggatggtgaagctgttcatcggaaacctgccccgggaggctacagagc

SEQ ID NO: 215076 - DNA, 75 bp, Homo sapiens
tgtttgtggatcgctgtgatcgtcacttggtaagaagtttgatagctgtaggactgggtgttgcagctcttgcat

SEQ ID NO: 215077 - DNA, 87 bp, Homo sapiens
gcgccaaaaccgggacggacaagaccctggtgaaggaggtcgtacaggtgaaaggtgtagcagtcactcggcctacacccacagcat

SEQ ID NO: 215078 - DNA, 75 bp, Homo sapiens
gggattcgcagggaggatgtcgggacaccccggaagctgggaaatggtttgaattcctcagcaacatctacagca

SEQ ID NO: 215079 - DNA, 98 bp, Homo sapiens
acctacgcctggatggcgccggaggttatccgtctctccctcttctccaaaagcagtgatgtctggaggtactggtgtggcatactcggacagagaag

SEQ ID NO: 215080 - DNA, 97 bp, Homo sapiens
gcaaggataaggagcaacagaaggactcacctgtgttttgccgcttctttcacttcaggagcaggctctccccggaggctcagccccctctgctccc

SEQ ID NO: 215081 - DNA, 82 bp, Homo sapiens
aggcagccaagctcgtggcctgcctctgcgtgcgtgtttcccattaaacactaccaggacaaaatcaggccttacatccagc

SEQ ID NO: 215082 - DNA, 100 bp, Homo sapiens
gctggacagcacaattggaatccaccctgtctgtgcagagtgacagacatcacacctccagtgcaatccctgttcctaagagacaaagctccatatttgg

SEQ ID NO: 215083 - DNA, 100 bp, Homo sapiens
tgaagattctgattcttgtcactttaattacttgagaatttataatggaattggagtcagcagaactgaaataggatcacagaagtgaggccaagatgcc

SEQ ID NO: 215084 - DNA, 135 bp, Homo sapiens
ggaagaatgatgatggagacacagttgttgtggttgagaaagatcatttcatggatgatttcttccatcagggtgtgctggaccggttttctcaaattcagccaaagctcatcttctctgtggaggctgttgtct

SEQ ID NO: 215085 - DNA, 75 bp, Homo sapiens
ctcctgggggcagggcagacgccgtgtgtctgtttcacgatgaacaagagaactgggcaacccatgatccacatc

SEQ ID NO: 215086 - DNA, 50 bp, Homo sapiens
gaaagtgctccagaatattattaagctgaataccactagaaacatacctg

SEQ ID NO: 215087 - DNA, 83 bp, Homo sapiens
gggaaccaaggagacgctcctggcactgcagcatgcagccagtaaagatcccagagaagttcgagaagctagagatcataagg

SEQ ID NO: 215088 - DNA, 109 bp, Homo sapiens
aacagatacgccgtggagggacgagacctgaccttgcagtacaacatctacaatgttggctcaagagcctgtggggcccggatagtcagccgaccagaggaactgagag

SEQ ID NO: 215089 - DNA, 104 bp, Homo sapiens
atcttcaacaaccacgggaagccgcggctctccaagttctaccagccctactttggtgccctggttgtcagatgttggaaagcagtaggacggaacatactctt

SEQ ID NO: 215090 - DNA, 82 bp, Homo sapiens
cttgggtcctccgagagcagcagcggtcaaaatgcagatcttcgtgaaaacccttaccggcaagaccatcacccttgaggtg

SEQ ID NO: 215091 - DNA, 100 bp, Homo sapiens
tattcatcacagacgacttccatgatatgatgcctaaatacctcaattttgtcaagggtgtgataattctttgagcaactactggggcattatattggac

SEQ ID NO: 215092 - DNA, 82 bp, Homo sapiens
tgagcacagcacttgacccagacatgatccaggccctggaggacacgcatgggtggcctcaggctcctcatccaggagtctg

SEQ ID NO: 215093 - DNA, 83 bp, Homo sapiens
caagaagcaatagacttcattgaaccagacgtcctgggtcctctccagcatggcagccctctactggagggtgaaaggccaag

SEQ ID NO: 215094 - DNA, 75 bp, Homo sapiens
ggaagcctgctccctgagggctttttctcaggcccaatagatcagggatgacgtagctttgccaaagacttagaa

SEQ ID NO: 215095 - DNA, 100 bp, Homo sapiens
ccgcgccgccgctgccgccgccgcgcgcggttgaccacgttgttcctgagcctgggacaagcctgctcgctgcctttgaccagtggagggaatgggccga

SEQ ID NO: 215096 - DNA, 82 bp, Homo sapiens
cttcggaagcgctggagcttgagagatcagccagtagacatgatgagcatcaaagcctttacgcttgtctctgctgtggagc

SEQ ID NO: 215097 - DNA, 82 bp, Homo sapiens
gggcagtttgtcgaacgatgttggactcatagtcactgccagaaaggctaaccttgccgcgggccgagccctgcctcgccat

SEQ ID NO: 215098 - DNA, 71 bp, Homo sapiens
ccactactgcctggagctgctgcggtcacgactgctgaatatgagacgatctgcagcaccaagtcagttgc

SEQ ID NO: 215099 - DNA, 75 bp, Homo sapiens
gccctttcttaaggggaaacaagtcaatttggaaaggtcccagcgttgtgtgtacatcggtgagctcccgcagga

SEQ ID NO: 215100 - DNA, 83 bp, Homo sapiens
aaacccaaagatccccgttcctggagattctgattgagaacaagttgaaatcatcgcagaaggataaagttcgtcagtttatg

SEQ ID NO: 215101 - DNA, 75 bp, Homo sapiens
gaggggactagcagcgaatataccaaactagagtcagaacgaatactagcatcagtggggaagaaacctccccag

SEQ ID NO: 215102 - DNA, 98 bp, Homo sapiens
aacgtttaccctagcaaaccaggttggattgagattgttggatgtgctgatcgttcctgttatgacctctcctgtcatgcacgagccaccaaagtccc

SEQ ID NO: 215103 - DNA, 98 bp, Homo sapiens
ggtttttgtggaaactctggataagtgtttcgaaaatgtgtgtgaattggatttgatcttccatatggataagagttatggtgaatggttgcatggat

SEQ ID NO: 215104 - DNA, 118 bp, Homo sapiens
ggagtgcgtggaggagctgtgcagccgcgaggaggcgcgggaggtgttcgagaacgaccccgagacggtactccaaagattcaggtttactcacgtcatccagcagagaatggaaagt

SEQ ID NO: 215105 - DNA, 83 bp, Homo sapiens
ctggtgtaccaggcgaagctggccgagcaggctgagcgatacgacgggtgttgaaagcagcaggggcctagaagacattaaac

SEQ ID NO: 215106 - DNA, 90 bp, Homo sapiens
ccacctggtcggggaggagaccatggctgactacctgctgtacaccctcaacaaacaccagcgctttggatgccatggacaatattacca

SEQ ID NO: 215107 - DNA, 87 bp, Homo sapiens
gaggccggggaccttgccaaccctcccaagaagttcagagggtatgttggagctagaggctgagcatgaccaggacctgagtaaaca

SEQ ID NO: 215108 - DNA, 82 bp, Homo sapiens
agaagggctacgaagaagtgcttcagcgggccaggaagcgcatccaggaggcacgtgtggttctcaaatataggcattctga

SEQ ID NO: 215109 - DNA, 101 bp, Homo sapiens
atggacaccattgagaagtcaaatctgaatcgacagtttcttttccggccctgggatgtcacgggcagcaggatgggtgtggaagcagtgatggcactttt

SEQ ID NO: 215110 - DNA, 100 bp, Homo sapiens
gccagggcagccaggcagagctgcacccgctgccccagctcaaagcctctcaacattgcctacagccacatctacagctcctacaggaatttcgtggggc

SEQ ID NO: 215111 - DNA, 90 bp, Homo sapiens
tccggggcttgccctggtcttgctcggccgatgaagtgcagaggtttttttctgatacagatccacgggttttagaaaaacaagaattac

SEQ ID NO: 215112 - DNA, 100 bp, Homo sapiens
attccggtcagggtcaagtcgtgttctgatcactactgacttgttgggactgctgagatgtcctctattcttgaagagcgtattcttggagctgatacct

SEQ ID NO: 215113 - DNA, 98 bp, Homo sapiens
aaatgcaaaacctcagtcaacatgatgaatcagaactccttacggttcctgatggttggaaggaaccagctttttccaaagaggacaatcccagagga

SEQ ID NO: 215114 - DNA, 100 bp, Homo sapiens
tggaccctgagtgatggggccggcgccagctggagagcagcttcgcggagcgactggagagccagaggccctttctggttactgtggctttatggcagcc

SEQ ID NO: 215115 - DNA, 83 bp, Homo sapiens
ggcacttggcggaggagctgcggttgctcctgcctcgagtgcgggacaggccgacggtcgcaaggtcctacggtcaagcatcc

SEQ ID NO: 215116 - DNA, 75 bp, Homo sapiens
ctgattctgtcacttgtttgtattgcaattccttttccaagcaaagttttaaccgtgattggagataccacaaag

SEQ ID NO: 215117 - DNA, 100 bp, Homo sapiens
caccttcctgcagttcttcggccggctagacttcgggctccttgaggatattcagttttgtatgtttgaatatcctctcaccatgttcagcataaagtac

SEQ ID NO: 215118 - DNA, 100 bp, Homo sapiens
cgcctatcctctccgagcaagatggcaaccccggcggcggtcaaccctccggaatccagcaactatcacaagaatactccttagccacttcaattgggat

SEQ ID NO: 215119 - DNA, 75 bp, Homo sapiens
tcggagtccgctggccacccagctgagaggagaggcgcccccggggacgtacaaggcgagtggataattccaaca

SEQ ID NO: 215120 - DNA, 100 bp, Homo sapiens
accttccccgggcaggggcgctcaacccaaccggctccagggcactgattttaccaaatgttgcaagaactctggagttcttatggtagtaaaatgccgg

SEQ ID NO: 215121 - DNA, 98 bp, Homo sapiens
ggcgccatttgccagtgatggaccgtgctagtgacctgactgatgccttcgtggagaatgtggccccgtcccagagcaccacccgagacatcaggagc

SEQ ID NO: 215122 - DNA, 100 bp, Homo sapiens
gcattttactactgagctgcaaaggtgtatactcttgatgtaccagatgcattctattactgttatagtccagaccctggtaatgcaaagggaaaagatg

SEQ ID NO: 215123 - DNA, 73 bp, Homo sapiens
acactacaagtccacggtgggagtcacgaacccccgccttggtttttgaacacgtaaacaacacagacttcaa

SEQ ID NO: 215124 - DNA, 100 bp, Homo sapiens
aggaggtggccccagtgctgcagcagacattacttcaggacaacctcttgggcaggaaatttaaaagcctgttgattcaagaactttctaaagtatttcc

SEQ ID NO: 215125 - DNA, 100 bp, Homo sapiens
cgtaacaggatgtcacgacggacaaatatgtctctgggatctttcagtagaactgcaacttttctgggagaagaggctacaaggacttagtgcatcagat

SEQ ID NO: 215126 - DNA, 88 bp, Homo sapiens
aaagtcttcaagtctttcagacctatctcctccctggttcgaagggctgccctcacacacaacgacaaccacttcaattatgagaaga

SEQ ID NO: 215127 - DNA, 100 bp, Homo sapiens
ctgggaccagctctttcggaacccgcaccaagctctgctccacactgccaaccggccagaggacgagtgtggaacctcactctggagcctgagatcatgc

SEQ ID NO: 215128 - DNA, 112 bp, Homo sapiens
cttggcagctggacaggcagagtgctgatgtgaaaaataccacgacaaaaccaccctatacctggagtagaacagaaaaattattatgtctgtgttcccttgggactcattg

SEQ ID NO: 215129 - DNA, 100 bp, Homo sapiens
gtgactgccacccctccccccacccgggctcggcgggggagcgactcatggagctgccgtaagggttgccatagtttctaaatcttttgaaggaaaaact

SEQ ID NO: 215130 - DNA, 100 bp, Homo sapiens
tactgtacaccccatcccagacgaagacagtccctggatcaccgacagcacagacagaatccctgctaccacttgtacctccttttaaacctcaagtaac

SEQ ID NO: 215131 - DNA, 90 bp, Homo sapiens
cacgactccatccggctgcccctggagcacctggtggaagaacaagtggcagcctcgaagcggaggatccctgtgtcccagccgggcatg

SEQ ID NO: 215132 - DNA, 100 bp, Homo sapiens
ccccaaagcagcacagcagtaccagtcccttccccacctccacgcccctccgcagaggtctaaaattcccaggactccacagctttgcaccagataagcc

SEQ ID NO: 215133 - DNA, 100 bp, Homo sapiens
aaaagatccggaagaaatatccggacagggtccccaccttgtgccggagccgactactggagatgacagtgatgctgccacctttaagccaactctcccc

SEQ ID NO: 215134 - DNA, 85 bp, Homo sapiens
gccagcttgctcctgaaaccttctacagaggtcatacttacctggttgcttgcgcatctagtaatgttggatcatattctggatg

SEQ ID NO: 215135 - DNA, 90 bp, Homo sapiens
atcgatttgacaaatatcttgatccgtccttttttcaacatcgggagaacgtatttaccgggcagtcaaagatctattcctacatgagcc

SEQ ID NO: 215136 - DNA, 75 bp, Homo sapiens
gaaagtcagtttctgaggaatttcatcagctcctaaaagacgacggcctgcacgttcaatttttgatggtttccg

SEQ ID NO: 215137 - DNA, 100 bp, Homo sapiens
tggccgaagcgaagggcgacgccaagccggaggattatggattggatatgtctacttctggatgcaaattttactgttgttgtaatgatgccagaagcaa

SEQ ID NO: 215138 - DNA, 135 bp, Homo sapiens
ccctgtgacctggccgatgaggaagtactgagcctgttggaggaactggcccggaaacaggaggacaacgacaaatcctccacccctgggctcaagtccaacacaccaaccccaaggaacgacgccccaactcca

SEQ ID NO: 215139 - DNA, 74 bp, Homo sapiens
atctcaggtcctcgggggcggcggccacgccaaggacggtttccagccagagacgacactcttccatggcccgg

SEQ ID NO: 215140 - DNA, 95 bp, Homo sapiens
cttaactaagcagatttcccgagactacggtgtgctgttagaaggttctggtcttgcactaaggggcgacgtcgtaaaccaggacgacctgtacc

SEQ ID NO: 215141 - DNA, 51 bp, Homo sapiens
cgggatttttagcccagcccatgaagagtggtggacatgacaacagagtca

SEQ ID NO: 215142 - DNA, 73 bp, Homo sapiens
tccaagcaaaccgggaaaggagaggatcccggagccggatgaagatataacacttcagataactgagagtgaa

SEQ ID NO: 215143 - DNA, 50 bp, Homo sapiens
ctcagtgttgccctgttcagtctgagaacacttcagttatggaagatcaa

SEQ ID NO: 215144 - DNA, 100 bp, Homo sapiens
acttacgtgtactttaccaacgagctgaagcaggggtttgttaaagttgttaagaataaggcctactttaagagataccaagtgaaatttagaagacgac

SEQ ID NO: 215145 - DNA, 50 bp, Homo sapiens
cataaaggcagctttgaaacagctgctctttggcgtaaattgcaatcgat

SEQ ID NO: 215146 - DNA, 100 bp, Homo sapiens
ggctgtgtggaagggctaaaggaactagtacatctggaatggctgaatttggcaggaaataatcttaagcagctctctctgctccctctaatggaaccaa

SEQ ID NO: 215147 - DNA, 87 bp, Homo sapiens
agacacatgtgatgtaggcgtgagctccgatgatgacaagggggcccaggcagcacggcatattggcgttcctgtgctatgatgatg

SEQ ID NO: 215148 - DNA, 100 bp, Homo sapiens
cggccagggccggcgcggcgatgatgaacaggttccgaaagtggctctacaaacccaaggtctcggacagcccgggagacgagccctcggagtccccata

SEQ ID NO: 215149 - DNA, 114 bp, Homo sapiens
cttccttcccctcccttgcatgatggaaacaccatggctgcggcggcccagctctctctgacacaggtaagaatgattgatgttggctgatattggagtgctcattcacatgaa

SEQ ID NO: 215150 - DNA, 75 bp, Homo sapiens
cccgagtgctgcttggcggcgagaacctgtgagaagtttctacaatggtgggctcagctctcaggagaggtgccc

SEQ ID NO: 215151 - DNA, 82 bp, Homo sapiens
ttcccgcaacatccactccttggaccacctcaagctggagcattggatttgctaaaggagcttaagaatattcctatgaccc

SEQ ID NO: 215152 - DNA, 90 bp, Homo sapiens
tgctgagcttggcctcggcgtcctcgggaaatgcttccagactgcacacttttacttagaggacagtacatcccctagagttatatccac

SEQ ID NO: 215153 - DNA, 98 bp, Homo sapiens
gttggttctgacgaggcacagcgtttcttgcaagaatgggaggttgatgatgcaatgatggcaaatgcagcccagaaatttcccttcaatactcctaa

SEQ ID NO: 215154 - DNA, 82 bp, Homo sapiens
tttgtggccttagctacaggagagattacaggctgtgccagccctggaaaaacagttacaattgttgttcgtggttctaaca

SEQ ID NO: 215155 - DNA, 75 bp, Homo sapiens
ctaacacatacagcatgtgaagcaaagtgtgggatgctgtctcaggagatgaattgatgaccctggctcataaac

SEQ ID NO: 215156 - DNA, 100 bp, Homo sapiens
tggagtatcgttctatttctctagctattgccttattttttctcatggatgttcttcttcgagtatttgtagaaggtcttcctccagacaggcacgccat

SEQ ID NO: 215157 - DNA, 82 bp, Homo sapiens
tttctactgtaaagtcaccaacgagatcttccgccactacgaacctgcctagagctggaacgttacctccagagcgagccct

SEQ ID NO: 215158 - DNA, 100 bp, Homo sapiens
attccttcatttgctccagttttactacttgcaacttctgacaaaccccattccgctttgccagaagagttaagtgggcagaccaacatccacctcagca

SEQ ID NO: 215159 - DNA, 76 bp, Homo sapiens
gctgagcttgccgcacaaaaagctagagaggttatcaatactctggctgaccatcatcatcgtgggactgactttg

SEQ ID NO: 215160 - DNA, 100 bp, Homo sapiens
ctgactgtttattttttggttcactgatgtctgctacagatccaggtgtggaaacaggaagagaactagaactggaagtaaagcattgaagatgtgactg

SEQ ID NO: 215161 - DNA, 75 bp, Homo sapiens
agatgctgaaaatgttgcttcatatgagtttattcttcagtccaaggaagcaattcacagtcagctgttagagaa

SEQ ID NO: 215162 - DNA, 83 bp, Homo sapiens
tctcgctggctcaggagtgaagctgcagaccttcatggctcctgctccagcccagcccccagagagcagaccccaggtgctgg

SEQ ID NO: 215163 - DNA, 75 bp, Homo sapiens
cgttttctccttcggaacgggagcgtctagaggcggggtttcaccatgttgcccagactggtcttgaactcctga

SEQ ID NO: 215164 - DNA, 99 bp, Homo sapiens
cagaaggctgttcttcagtggaccaagcatgatgattcttcagataacttctgtgaagctgatggttattatcaacccttactttgctaagcaagaaac

SEQ ID NO: 215165 - DNA, 109 bp, Homo sapiens
ggaacacggaggataaagtcagccatgtgagcactgggggtggtgccagtttggagctcctggaagacccttcttcagcatcttccctgggcattgctgtgagtttagg

SEQ ID NO: 215166 - DNA, 101 bp, Homo sapiens
cccggtcctgggaatgtacgacgccaaagatgacttccctcttaggaaaacagaatctccgccacctccctactctcggctgtctcctcgcgacgagtaca

SEQ ID NO: 215167 - DNA, 74 bp, Homo sapiens
ccagggcagctgaaagacagagaccttcagattgacaagtatctctatgccatgcggctctccgatgaaactct

SEQ ID NO: 215168 - DNA, 90 bp, Homo sapiens
gaattttccaaatgaatttgcaaaacttactgtagtgttgaacttgaccctcatcgacctcccgggtatcaccaaggtgcctgtgggcga

SEQ ID NO: 215169 - DNA, 75 bp, Homo sapiens
cccagggcagggctcctaaggaaggacccgcctttagaaatctgaacggagaggattaaccaaataccatttgga

SEQ ID NO: 215170 - DNA, 88 bp, Homo sapiens
accagtggctgagcaccgtctcccagtacgaccgggacaagtactggaaccgctttcgagacgtggacgtctgatttatgaagctccc

SEQ ID NO: 215171 - DNA, 106 bp, Homo sapiens
gccaaacagcccagctcgcgcttcagcgtcccggcgccgtcgcgccactcctccgaatcttgtggaagccctgaagccagagtatgtggcacctcttgtcctttgg

SEQ ID NO: 215172 - DNA, 96 bp, Homo sapiens
ccagccctgctcgcagaattaccgcctcttctttagcagaaggagaagacagcctgaagaagatgcagctgatggagcttgcgattctgaatggca

SEQ ID NO: 215173 - DNA, 75 bp, Homo sapiens
cgaagtttgtcggcccttgccttggcagagctgagcgcgttccttcacctcgggcagaataactttgcagaagcc

SEQ ID NO: 215174 - DNA, 84 bp, Homo sapiens
agagcgcggagccggctgactgcgccgaggggccggtgcagtgcaagaacggcctcttggtatcaatgtccgagttaccaccat

SEQ ID NO: 215175 - DNA, 100 bp, Homo sapiens
catgtgaacactcaagtgaagcaaaagccttccatgattacgtaactataactacccaatattgcagccatggagtccatgcttaataaattgaagagta

SEQ ID NO: 215176 - DNA, 111 bp, Homo sapiens
gaattggctgagttcacatatgggctccatcaataactagcggccaggtgagattagtcacaccgaggagaagactcagtgggaacatccaaaaactggaaaaagaaaacg

SEQ ID NO: 215177 - DNA, 75 bp, Homo sapiens
gctgcagcagcatgtaaagtcagtgacagccccattcaactgcttggaccagcatgttcggaagtcccccgagag

SEQ ID NO: 215178 - DNA, 100 bp, Homo sapiens
tgctgctagaatgcaggaacagcagatattctatagagtagttgcagacattgcgccgggagaggagcttctgctgttcatgaagagcgaagactatccc

SEQ ID NO: 215179 - DNA, 89 bp, Homo sapiens
ggcccagctgtcttggagcaaaacatctgttgtgggcctcctgacaaggtgatccgggcgggccccgcaggaattttatcccctcaccg

SEQ ID NO: 215180 - DNA, 83 bp, Homo sapiens
ggccgctctgcgggactctgaggaaaagctcgcaccaggtgctggagaatctggtaaaagcaccattgtgaagcagatgagga

SEQ ID NO: 215181 - DNA, 75 bp, Homo sapiens
tacagtgacggggagatcagcatttgcatggaacacatgggggtccactggacggggcctgagctacaacttcac

SEQ ID NO: 215182 - DNA, 127 bp, Homo sapiens
gatggatacacacagtctgcataaatggaagatgggatccagaagtgaactgctcaaagccatgcacattatcttttactgaaatggaaaagaataatttacttctgaaatgggattttgacaatag

SEQ ID NO: 215183 - DNA, 82 bp, Homo sapiens
caccgagacggcgatccgggcgctcgagacttaccagagccacaaggtgaaaggtgtagcagtcactcggcctacacccaca

SEQ ID NO: 215184 - DNA, 100 bp, Homo sapiens
ggggatccgacttgccggcagaacttacgctgcgggaccccgggcactgttgctgctgcgggagataatgagcttcagtccccaagatctgcgaagacgt

SEQ ID NO: 215185 - DNA, 100 bp, Homo sapiens
gtgaaaccatctgttacctgtgtttcactcagcctctgaagaagcttcgggttcagactcaggcagtcagtcggaaagtgagcagggaagtgatccagga

SEQ ID NO: 215186 - DNA, 83 bp, Homo sapiens
gctgagcacgttcttccaagaaaccaacattcccaacagccaccaccaccaccagatggtgcaatgattctggactgagacgc

SEQ ID NO: 215187 - DNA, 100 bp, Homo sapiens
ggttcaccgtgtacaagggcgccgaggtggcgcacttcatgaacgccctgcgctacgatgccatggtggagaacgccggggccatcggcccgtcccggtt

SEQ ID NO: 215188 - DNA, 82 bp, Homo sapiens
cacacaaagaatagagttgagcctgtgggacacttcgggtgacttaagagattaaaattaatttggttgctgttggttctga

SEQ ID NO: 215189 - DNA, 101 bp, Homo sapiens
gctgggtcagtccgccgctcaccccgcggccgcaccttcccgccttctcagttgtcgccgtgatcctgaaggcgctgacctacgacgagaagcggggtgcc

SEQ ID NO: 215190 - DNA, 82 bp, Homo sapiens
cccagcccggtccggcgcgccacgccgaggagtctccccaggacagtgctatcacccgggatattaaccgaacattcccagc

SEQ ID NO: 215191 - DNA, 83 bp, Homo sapiens
gttgtccgcggttcctcctcctgtcgctgcccgtgtgattactgagactcagattgtcttctcctccaaggtctacatgatta

SEQ ID NO: 215192 - DNA, 83 bp, Homo sapiens
gccgaggcctgggttacaagcagcaagtgcgcggttggggccactgcgaggccgttttagtactatactggcaattgctggag

SEQ ID NO: 215193 - DNA, 75 bp, Homo sapiens
ctgctgctctcacggtccagtctcaggaggacaatctgcgcagcctgcctggtccgacccccagtggcactaacg

SEQ ID NO: 215194 - DNA, 100 bp, Homo sapiens
tgacagctcatccgtggttgtatcaggacttatggtggccgacatgaaaaagaagatggaggacagtgtggggtgcctggaaactgctgaggaggtgaag

SEQ ID NO: 215195 - DNA, 98 bp, Homo sapiens
tctgccaagcactgctctggtactggggagtggagtattatgtcttggaagagactcctgctgtgattgtccaggggcatgaagctttgctgtattat

SEQ ID NO: 215196 - DNA, 51 bp, Homo sapiens
tgagacagcagccaaacccccaggtactccaaagattcaggtttactcacg

SEQ ID NO: 215197 - DNA, 74 bp, Homo sapiens
atttgcctgtatgggacccaaggcaaagccaagatgagcctttgagaagcagaaaagtgtttgtggggcgctgt

SEQ ID NO: 215198 - DNA, 75 bp, Homo sapiens
cagataccggacctgctgacaccttgatcttggacttcccatcttccaggaaggcggagtacgtccagcttgtta

SEQ ID NO: 215199 - DNA, 100 bp, Homo sapiens
tgatgccccaggacacagagactttatcaaaaacatgattacagggacatctcagtaccacttccgctgtcacggtaaagtccgccatcagaagactgaa

SEQ ID NO: 215200 - DNA, 96 bp, Homo sapiens
agatgattgaatacagcttgccttttctccagggaagagagacaagatggagtgccagagaggcctacggcaagatggagtcccactctgtcgccc

SEQ ID NO: 215201 - DNA, 50 bp, Homo sapiens
cggagccgcgcagccctcggagcacgctgagctgactgctgcccactttg

SEQ ID NO: 215202 - DNA, 46 bp, Homo sapiens
atgatgatcttgatggagtgccttcaagctatagtcagcagactgg

SEQ ID NO: 215203 - DNA, 90 bp, Homo sapiens
cgcagtggtcgcttcttctccttgatcctttctctgctactgtagatgctgttgatgatgccattccaagcttaaatcctttcctcacaa

SEQ ID NO: 215204 - DNA, 91 bp, Homo sapiens
ctccaccgctctgaaggggatctgcagagtaacaaatgtggcaattattttggatctatcacctgtcatcataactggcttctgcttgtca

SEQ ID NO: 215205 - DNA, 75 bp, Homo sapiens
gatgaatatgaccctatggaagcagaagaagctgaggatgaagaagatgggacacttggcattcagggacgtggc

SEQ ID NO: 215206 - DNA, 100 bp, Homo sapiens
gatgatttgctgcggtgtggaatttgcttcgagtatttcaacattgcaatgataatacctcagtgttcacataactggcaaacttgaagataaatctttt

SEQ ID NO: 215207 - DNA, 73 bp, Homo sapiens
acttttgaagataatggcctgcattttattggtctacaaagacagcagtagcctcaaggaataggttctccta

SEQ ID NO: 215208 - DNA, 74 bp, Homo sapiens
tctgggctaattgggcccctgctggtctgcaaggaaggtatgaacatagacagtgaaactaaagcaaataatgg

SEQ ID NO: 215209 - DNA, 90 bp, Homo sapiens
taaatgcagcatctgcgatgtgaggaaaggcacctccaccaggttgccaagagggtgatcctgttgtcgggcacaccagccatgtcccgg

SEQ ID NO: 215210 - DNA, 104 bp, Homo sapiens
gccgcagccatgaccgtggagttcgaggagtgcgtcaaggactccccgcgcttcaggagtgagagcgcagagagccctgagacagcccctactggagcacctcc

SEQ ID NO: 215211 - DNA, 97 bp, Homo sapiens
tgagtttaagatgatgcctaacaggagaaatatgtatacagtacagaataattcagaaaatttgaagccattacttccagctggtatacaggataaa

SEQ ID NO: 215212 - DNA, 79 bp, Homo sapiens
tttgtggatcgctgtgatcgtcacttggcctccggtgtggctgtctctgatggtgtcatcaaggtgttcaacgacatga

SEQ ID NO: 215213 - DNA, 97 bp, Homo sapiens
gtcagagagagagcttggttaacttgggagaaagtttcatctgtggatggagtattgtgtttctaagacctcagagaaatttggaatctatagaccc

SEQ ID NO: 215214 - DNA, 82 bp, Homo sapiens
cttgctctcaactgtgttggtgggaaaagctccacagagctgctgcggcagttagcgtggacccccaaaagtacaagggcat

SEQ ID NO: 215215 - DNA, 74 bp, Homo sapiens
ccagcacagccagcaccgcacgccctgcaagggagggagaacagatcccattccaatcgttgtcaagtatgatg

SEQ ID NO: 215216 - DNA, 100 bp, Homo sapiens
aacactcaagcaaagaagagttgagcacaatcagaaagatgttctcgtccgtggcgcacctggcgcgggcgaaccccttcaacacgccacatctgcagct

SEQ ID NO: 215217 - DNA, 80 bp, Homo sapiens
gtgagtgtcaacgaaggctataaagtctgtgagagattattcagcgatgttttactaaccacttctgaaaaaccacagtt

SEQ ID NO: 215218 - DNA, 75 bp, Homo sapiens
aagctatcatcctgccaaactccaggctcagatgtcacaggcaagccgattttttcagttgatattcaccctgac

SEQ ID NO: 215219 - DNA, 74 bp, Homo sapiens
ggacagaatcaccagcactggctgaaggtggagccgccaccaaaatgcagattttcgtgaaaacccttacgggg

SEQ ID NO: 215220 - DNA, 75 bp, Homo sapiens
caggctgttccctaagaaggtctgcccaggactcaggagtggccagacgctaaggactggagcttgcaggacacg

SEQ ID NO: 215221 - DNA, 82 bp, Homo sapiens
gagatcatcgcggcgctcatccacgaagggtgtgccctggacagacaagacaaggttttaaaatcaaagatgggaaaatcgg

SEQ ID NO: 215222 - DNA, 83 bp, Homo sapiens
acgagatgagcgctatcggtcaggatattagaaatggctactccccagtcaattttcatctttgcaatctgcattttaatgat

SEQ ID NO: 215223 - DNA, 100 bp, Homo sapiens
atcaaagataaaatcttttgtgaaagtgtataactacaatcacctaatgcccacaagtgccggtggtggtgtgcacattgagccccggtatagacagttc

SEQ ID NO: 215224 - DNA, 83 bp, Homo sapiens
gccaagggacaatggtcaccgtctcttcagtgttcagcctgcaggacctctgctgccgggccatcgtctcctgcacccccgtg

SEQ ID NO: 215225 - DNA, 89 bp, Homo sapiens
ttgatctggataatgtggtcaaaaagggcttccgttacaagatgaggtctgtgtatgctcacttccccatcaacgttgttatccaggag

SEQ ID NO: 215226 - DNA, 100 bp, Homo sapiens
tctttggttataaattatgatctacctaccaatcgtgaaaactatattcacagcactgttgcaagaattcaattccgtcttcctgatggttcttccttta

SEQ ID NO: 215227 - DNA, 100 bp, Homo sapiens
ctcattttaactttcacaacaacatcatcgtattgattgtccctctcatgaatgacatgtcaaaattgttgctccttcacatgttcccactctctgtgcg

SEQ ID NO: 215228 - DNA, 100 bp, Homo sapiens
cgagctgctgctgaaagtgcggccccagcagctggtcaagcacctgcagatgacggctgcccgaagccccccgagattgcacatggctatgtggagcact

SEQ ID NO: 215229 - DNA, 100 bp, Homo sapiens
ctcggacccgcctccgaagacgtggagcgctgcggcggctggtgtttgtaaaatgtatgaagaacatctgaaaagaatgaatcccaacagtccctctatc

SEQ ID NO: 215230 - DNA, 101 bp, Homo sapiens
tgaatattctgttttgctgcccgaagcttggtttggaaagcagagtggagaacaaagagttgattccaatgcaacaaattttagaagaagcggagccacag

SEQ ID NO: 215231 - DNA, 101 bp, Homo sapiens
gtgatgtgaaactggcctcccaagccctgataagtgatttggatatctactctggagataaagttggttcatcgttaaaatattctgatgaaagcaagcat

SEQ ID NO: 215232 - DNA, 96 bp, Homo sapiens
gcagcaggacactatcctggccgagggccttcacttcagaagtacagtccatccagcgtctcctcccctgctttgtactcgagaagatgttgaagt

SEQ ID NO: 215233 - DNA, 96 bp, Homo sapiens
actgggctggcgttaactgtgcggaggcaggttggacgtgataagtatgagcctgcagctgtttcagaacaaggtgataaaaagggcaaaaagggc

SEQ ID NO: 215234 - DNA, 75 bp, Homo sapiens
caggggaccaagctggagatcaaacggtaaagcccacagcttgaagccaagcataaaggagaagctggcaggcag

SEQ ID NO: 215235 - DNA, 50 bp, Homo sapiens
tagcattatcttgacttttaaggaagtcgatggcctacacaagcatctgg

SEQ ID NO: 215236 - DNA, 59 bp, Homo sapiens
gggacaggcatcgtggggatcttggcagcgctgcaggatattgatgatgctcaaatact

SEQ ID NO: 215237 - DNA, 100 bp, Homo sapiens
caagcagctgtcggccaagctcatcgccaacggttaatgactccagagagtaagatcagattcgtccacaaagagatgggcataataccaagctggggtg

SEQ ID NO: 215238 - DNA, 71 bp, Homo sapiens
aaaatgacggttataagaccatttatttctttggagacaaaactatgccaattgctcttctagacatcgat

SEQ ID NO: 215239 - DNA, 99 bp, Homo sapiens
gggaagatgtctgaaggtggaaggaaatccagcctgctccagaaaagcaaagtagagatggtttcagcatgttggccagtctggtctcagactcctgac

SEQ ID NO: 215240 - DNA, 100 bp, Homo sapiens
ggagtctgtcagtacaggtgccgatatggatggtgccatgacaatggtgtgaactacaagattggagagaagtgggaccgtcagggagaaaatggccaga

SEQ ID NO: 215241 - DNA, 74 bp, Homo sapiens
gccccgggatctcggctgtccttcctcccgatttaaggaacagtgacaccccaccccagtcccgtggagggggt

SEQ ID NO: 215242 - DNA, 80 bp, Homo sapiens
ccgcagtcgccactggctgcctgaggtcagcccaaggccaaccccactgtcactctgttcccgccctcctctgaggagct

SEQ ID NO: 215243 - DNA, 100 bp, Homo sapiens
cccttccttttggggctctcactctggaggatggggtggatgggagctcgccatggccaaacagctgcaggcccgaaggctagacgggatcgactacaac

SEQ ID NO: 215244 - DNA, 98 bp, Homo sapiens
tcaagggcttcagcaccgcgcccatggcagagccagaccgctgacttctgcctgggcaccgccctgcactcttggggactgtggttcacggaggaagg

SEQ ID NO: 215245 - DNA, 76 bp, Homo sapiens
ctctactgtgacttcagagacactgccaagcagccttagccctagtgtagagagtaaagccaatcccagctgaagg

SEQ ID NO: 215246 - DNA, 97 bp, Homo sapiens
tccacttgcacgaaagctttcctaggccaaaaagaggccgctttgaagaggaatttatcaaaatgcgcatggagagacttcaggcctggatgaccag

SEQ ID NO: 215247 - DNA, 75 bp, Homo sapiens
caatgtggatgatgacagctgtgtcaaaggacggagagagatgcttcaaattggtccacggataagctgaaaaca

SEQ ID NO: 215248 - DNA, 90 bp, Homo sapiens
ctggcaacggcggtggcgcccggagcccgaggccttcatggtgaaacacctcttggagtatacccaggcaacagagtctaacctgcagta

SEQ ID NO: 215249 - DNA, 100 bp, Homo sapiens
agcggtgggcagtcctagtccgaggtgccaccgtggaaggacagaatggatcccaggagggcactcatggtggtttatgggactctggactcctgagaag

SEQ ID NO: 215250 - DNA, 73 bp, Homo sapiens
ggggatagtgtcatcggttcgggcttttaccaagatggcctcagctccggccagctatggcagcactaccact

SEQ ID NO: 215251 - DNA, 88 bp, Homo sapiens
ctcaacaccgaggaggcggcggagcagcgggcggaggtggaccggatgctcaggcagcctgcttctgcaaagtggtacgatcgaaggg

SEQ ID NO: 215252 - DNA, 100 bp, Homo sapiens
tcattcgattcgagagacaagcagaagaattcctcaatgcagtcttttatagaaaagatatgcacccaatgtccagggagcgtgcaaaatttgtcaaaag

SEQ ID NO: 215253 - DNA, 100 bp, Homo sapiens
attgtaaaccacatcaccagtttaaagaatctgattgttcctaaggacggtctgaagagccaagagctatttgatgaaattagaatgacctacatcaaag

SEQ ID NO: 215254 - DNA, 89 bp, Homo sapiens
actaattgaagaaaaaagtaaactacttgaaaaatttagccttgttcaaaaagagcttccagggaaaaagacaactaaactttgggttc

SEQ ID NO: 215255 - DNA, 98 bp, Homo sapiens
gttttgtggggactggagagacaagtaaactctcagagtaactgtcccctctgactaccatttctaagagccttttgaatggactgatgtgttctaag

SEQ ID NO: 215256 - DNA, 127 bp, Homo sapiens
gcgtgccctacttcaaggataagggcgacagcaacagctctgccggctggaagacaaatcttcctattttcaagctgaaagaatctactgttagaagaagatacagtgactttgaatggctgcgaag

SEQ ID NO: 215257 - DNA, 75 bp, Homo sapiens
cgggagcttccgggagggcggctcgcaggacttgggaccctggaggactgacgctgctggcctgggcgtcccctt

SEQ ID NO: 215258 - DNA, 83 bp, Homo sapiens
gctggagccacctgcgggtgagtgagcggagccggcgccccggccctgccgggagccccagacaatgcagatcttcgtgaaga

SEQ ID NO: 215259 - DNA, 100 bp, Homo sapiens
gctttttgtgctgccagcaagaaatgatcagtagcaccagtgtttatggcgtcgaccagaagattatgatattcataacagcagaaagaaaccaaggatt

SEQ ID NO: 215260 - DNA, 95 bp, Homo sapiens
aattcaaagaataccggcctgaaactggttcttgggtgtttaaggaaaaagcagttgatcctaagacacgtttacttatgtataaaatggtcaac

SEQ ID NO: 215261 - DNA, 100 bp, Homo sapiens
gttcaaagcttgttgtctttgatactacattacaatactatactggcaattgctggagaagattttgcaattgttgcttctgatactcgattgagtgaag

SEQ ID NO: 215262 - DNA, 90 bp, Homo sapiens
ctgggtgcgtggggctgcctcgccgcgtctcgccacggtcatcctgtacagttctacagcatgaataggcctgcctctcgccatactccc

SEQ ID NO: 215263 - DNA, 75 bp, Homo sapiens
gcggaccgggcgcctggggcactgaccactactgcctggagctgctgcgggatgactctgttccagaagacaaca

SEQ ID NO: 215264 - DNA, 74 bp, Homo sapiens
ccttctcctggagacgcaactcaaggtctctaattaacagaagatggcaaagcccagccacagcagctatgtcc

SEQ ID NO: 215265 - DNA, 98 bp, Homo sapiens
tgcagccagctaacacccctctgtggtttgacatagttgaacagtgctcggcatggcagggattccagggctcctcttccttctcttctttctgctct

SEQ ID NO: 215266 - DNA, 76 bp, Homo sapiens
ggaagccaggagatacgtagacaggggccgttgcatcctccattgccccctccgcatcagcctcagcctcagcaac

SEQ ID NO: 215267 - DNA, 75 bp, Homo sapiens
cagctaaaaccttcctcaccgtgtactaggcctcacgacaggactagtgccttggtaagaagaggaaaaggccag

SEQ ID NO: 215268 - DNA, 78 bp, Homo sapiens
tgccaatagagagaacaaaccatgaagattctgataaagtgtgccccctaccaccggagccagagaatggtggctaca

SEQ ID NO: 215269 - DNA, 80 bp, Homo sapiens
ccagcgcagtgaagtggtgagcctttttgtcactgaatgtcaaaactggaccaatggggccaggctgaagtattgaactt

SEQ ID NO: 215270 - DNA, 75 bp, Homo sapiens
gcggcggcggcgggtccctgagctggaagccgcatttttgaaacgttggggttgttggagtggttggattttccc

SEQ ID NO: 215271 - DNA, 50 bp, Homo sapiens
gagggccctggcactcatgaaggcccgcattggccgcgtaatccaggttg

SEQ ID NO: 215272 - DNA, 75 bp, Homo sapiens
actggcattggaacttcctgttctgatagcgtggaagtatgactatgaatatgatgaaaatggtgacagagtcgt

SEQ ID NO: 215273 - DNA, 90 bp, Homo sapiens
cagattcgcagtggtcgcttcttctccttggatgtgctgatggagctccttgagcagtgcgcagatggactctggaaagccgagcgctac

SEQ ID NO: 215274 - DNA, 75 bp, Homo sapiens
ccgagacatccgctccttgcccgagaacatccagtttgatgtttactacaagtgtaagaagaagcttgggaagct

SEQ ID NO: 215275 - DNA, 90 bp, Homo sapiens
ttagttgcgttgagtcatcaggcaaaagcatcatctactacgtgagccgctcaccaaagctggaggtgtggctcagccatgagggcatca

SEQ ID NO: 215276 - DNA, 100 bp, Homo sapiens
gaagccgacaaggcgttcaagcgaaaacatgaccgctgagcccatgagacttagaaggttttgactccgtggtatcatctactgagaaactcagtcatcc

SEQ ID NO: 215277 - DNA, 96 bp, Homo sapiens
ccttgggtttctttcttaaaggactgatttttagaactccacatttgagcagcaaaccctctgctttgctccaccgcccgctaccactgcaagaac

SEQ ID NO: 215278 - DNA, 87 bp, Homo sapiens
aaattgaaagtggactatttaatagctagtcgtgagatggagaataaagaaactctcaaagggttgcacaagatggatgatcgtcca

SEQ ID NO: 215279 - DNA, 80 bp, Homo sapiens
actctaagtgacaaatgttgagtacattatcaggcctgcacagctgaccacagttgggaaacgttgctgtctttggattc

SEQ ID NO: 215280 - DNA, 100 bp, Homo sapiens
cctcggcctggatgggcagcgccagagggccatgaagcccccaggaggagaatcgagcaatctttttggaagtccagaagaagctactccttccagcagg

SEQ ID NO: 215281 - DNA, 90 bp, Homo sapiens
cctggcgctgccgctctcctcccaggcttgtggtggacattctcaagcaagtcattctggctccggctcccacatcaggacgagaaggag

SEQ ID NO: 215282 - DNA, 51 bp, Homo sapiens
tgagggtcaactttaccagctgaagaaaatgcatccgatgcagatttatgg

SEQ ID NO: 215283 - DNA, 98 bp, Homo sapiens
gtacctttgtcatttggaagaagcgaagagaaaacaatagacctccagtggctgtggccggccctgataaagagctgatcttcccagtggaaagtgct

SEQ ID NO: 215284 - DNA, 75 bp, Homo sapiens
ctctgcctgtcatgtatgcagtagcgcttgaccttcgagtgtttgccaataatgcggcaaagaagtttgtttctg

SEQ ID NO: 215285 - DNA, 100 bp, Homo sapiens
ggcagaaaacaagataaaggtggctttggattcagaaaaggtggaccagatgacagaggccaaacgtaccaagaaagtcgggatcgtcggtaaatacggg

SEQ ID NO: 215286 - DNA, 75 bp, Homo sapiens
cttgccaagtttctccgcaacaagatggatgtgcccagcaagtacaaggttatcagtgagctgaatggaaaaaac

SEQ ID NO: 215287 - DNA, 50 bp, Homo sapiens
ggaaaatggtgtgcacaggagccaagaggaaacgtaaatattttcaccac

SEQ ID NO: 215288 - DNA, 100 bp, Homo sapiens
ggaattccgcccttgtccttacgtcctgctaacccgcttggcattgagattgaaaaagttcctggaataactattgctacagatattatctgtggttttc

SEQ ID NO: 215289 - DNA, 108 bp, Homo sapiens
cgggaagatgctggaactaccaaaggcatttttgaatgagaaagctggagaagggggaggagtgatccagctttctctcctttgaaaacactaagaataatgtcactg

SEQ ID NO: 215290 - DNA, 75 bp, Homo sapiens
gcagcgccgagcgcggcccgggcgccatcgagccttggcggcggacgtgcaggtgcgcgcggagccatggttatc

SEQ ID NO: 215291 - DNA, 95 bp, Homo sapiens
ctctgggagcctagaatgcatcagtgcccttgtggcgaatggggctcacgtcgagctctttggtgtaacgggaaactgcgctgcctgtagtaagc

SEQ ID NO: 215292 - DNA, 82 bp, Homo sapiens
gcagcggtggcggctgcgctggcgcggcttttggcggcctttctgctcctcgcggcccagggacccagacatggagctgcgg

SEQ ID NO: 215293 - DNA, 100 bp, Homo sapiens
gcacagctgatgttgcggtatccagatggaaaaagggaacagatcactcttccagagcaagctaaactgctagatcaatatggaaattatgtaatccaac

SEQ ID NO: 215294 - DNA, 100 bp, Homo sapiens
cgctctcagctctcggcgcacggcccaggtccttcaagaggagcgatcctgttaatccttatcacataggttctggctatgtctttgcaccagccaccag

SEQ ID NO: 215295 - DNA, 82 bp, Homo sapiens
tttccactcggctcctgtcgtccgttctctcaggctcccgttcagaggctgggaggcggcagaatgcagccagaggagggca

SEQ ID NO: 215296 - DNA, 82 bp, Homo sapiens
ccaataaccaggtgcttggcaaaatcgagcgggccattggattttttatcaagcagaaatgcatcgaacaacgagaatcaag

SEQ ID NO: 215297 - DNA, 140 bp, Homo sapiens
aacgtcggggacggctgcgcgggacggctctgtaggaaggaacttggttccccctccctcagcttccgccccaaaaggtaagtaaggaggtctctgtaccatggctcgtacaaagcagactgcccgcaaatcgaccggtg

SEQ ID NO: 215298 - DNA, 97 bp, Homo sapiens
tcaagtccctgatggcctcagaggaggagctctggccactctcagggaggacctgacacggcgacggtacctgatgagtggggtgatggcacctgtg

SEQ ID NO: 215299 - DNA, 75 bp, Homo sapiens
gccttcttggacgcctttcagaaagtggctgacatggccaccaacacacgtgattgcagagggaatggcatacat

SEQ ID NO: 215300 - DNA, 100 bp, Homo sapiens
acaagatcctcaaagtgattcctcgagatcggaaaacattcctcttctctgccaccatgaccaagaagaaaacaattgctcaagtcttagttcatctaca

SEQ ID NO: 215301 - DNA, 83 bp, Homo sapiens
gagataaattcccggaaccgcgattcggcgtgtcagggcactgtgttggcactcactgaaaataacttcgatgacaccattgc

SEQ ID NO: 215302 - DNA, 127 bp, Homo sapiens
tttgtaggagcatggcttggagcacttcctattccactggattgggaaagaccatggcaggttcctggtataaatttacccgtcaatcaactgacctatttcttcacggcagttctcattagtggtg

SEQ ID NO: 215303 - DNA, 90 bp, Homo sapiens
gtgactttaaggacctttggacaaaactaaaagaatgtcatgatagagaagtacaaggctttcgccaaggtcttcaacacaacccctgat

SEQ ID NO: 215304 - DNA, 71 bp, Homo sapiens
catcttacagcagcattttgacaaggtgatgttctgcaccctgaacacccacaaagtggacatggacaagc

SEQ ID NO: 215305 - DNA, 73 bp, Homo sapiens
ttcaaggaggccttccagctgtttgaccgaacagcgccgagcctcgccgctgccctcctgcgccgccgcttcc

SEQ ID NO: 215306 - DNA, 82 bp, Homo sapiens
tcttaatgacctgggactaagagaattatatgcgatggatgtcaacagagatgtatcggcaagcagtgtaaacggaggactt

SEQ ID NO: 215307 - DNA, 100 bp, Homo sapiens
ccgtgagaagatagaggcagaactgcaggacatctgcaatgatgttctgattggactggctaaggacgatcagctgaaggttcatgggttttaagtgctt

SEQ ID NO: 215308 - DNA, 103 bp, Homo sapiens
cccacggctccccccaccaccagcccagctcctctcctccaaacaagctgtcagagaagccagctgccatgccatgaactgcaatgtgaaaaggccaatgtag

SEQ ID NO: 215309 - DNA, 103 bp, Homo sapiens
ttggcgtgccctgctgcctcctgccccaggctattttgcccatgcatcgagaagagcagatggactcaccctgtcacccaggttggactgcactggcctcaac

SEQ ID NO: 215310 - DNA, 83 bp, Homo sapiens
ggtgagcgcgagggaggctactgagaagcccggcgacggaggaacgcaggtctgctgccagaccagagtgaactccgagcagg

SEQ ID NO: 215311 - DNA, 88 bp, Homo sapiens
ggaagcagcagtccaggaatgcagtcagtctgttgatgaaactatgggcccagctggagtaagagcccaggccctggatagagatgga

SEQ ID NO: 215312 - DNA, 74 bp, Homo sapiens
gctgggctctctaaatggattcagctccaggagtcttttagtcctgctatacagctgcaccttgtacatcaagc

SEQ ID NO: 215313 - DNA, 75 bp, Homo sapiens
gatggagttgcaggtgtccagcgctaaagctgttgatggatatgtgaaaccacagatcaagcaagtggtccctga

SEQ ID NO: 215314 - DNA, 100 bp, Homo sapiens
atgcagtgtggctctggatagcaccttatggacagcatcagaagctgctcgcccagctactagtactttgaatcgcttctcagcccttcaacaagcggta

SEQ ID NO: 215315 - DNA, 101 bp, Homo sapiens
gaagatcattaatgccttccgctactacgggtgtgatgaatgcagactctgctaccattttggctgtttggatcctcctttgaaaaagtctcctaaacaga

SEQ ID NO: 215316 - DNA, 101 bp, Homo sapiens
ttttggctgttcgactccatacctttcttacaacttcccttccagcctatcgagctcaactccttcaccaagtctattcttattctgagaaggaacttata

SEQ ID NO: 215317 - DNA, 99 bp, Homo sapiens
ctgagtattgtctttatatcctgacactatgaatgctacttggatgcctcttaagttggatgaaaaatctgacaaacagtatgctgaaaattatacaag

SEQ ID NO: 215318 - DNA, 83 bp, Homo sapiens
cctgaagtagcaaaggcaagaaggcaacgacgttccatctgtggaaggacctaccaaccaggctttatcctgtggataaacgc

SEQ ID NO: 215319 - DNA, 78 bp, Homo sapiens
aacagtggcaatgagaccagtggaagcagcaccatcggggagacaagcaatgattacagcaacataaaggcagcatat

SEQ ID NO: 215320 - DNA, 97 bp, Homo sapiens
gaggatctggtgtaccaggcgaagctggccgagcaggctgagcgatacgacgggttctagagcacctcagcagtcttgccagagaagtgagcctgga

SEQ ID NO: 215321 - DNA, 84 bp, Homo sapiens
ctcagttggaagcagccgatccagcctgcggagcctgtggggcagtgaaagcaagttgaatacattggtgcagaagcttcatga

SEQ ID NO: 215322 - DNA, 73 bp, Homo sapiens
caaaaatgtctctctatccatctctcgaagacttgaaggtatggcgttgacggtggatgtggccgggccagcg

SEQ ID NO: 215323 - DNA, 98 bp, Homo sapiens
gcggagctaggagctggcggcgacggccacaggggcggcgacggcgcagtgcgaagcgaaacaggtgaaaggtgtagcagtcactcggcctacaccca

SEQ ID NO: 215324 - DNA, 101 bp, Homo sapiens
cacctttcagcctcatagtggaaactaggcataaggaagaatgtctcatgttcgagtctggggctgtcgctgtgctctggctctctttacctatgaaggca

SEQ ID NO: 215325 - DNA, 90 bp, Homo sapiens
gccgagcaggaggcgccatcatgttttttgctccactcaagcctgttagaatcaccatggaatacagctccagtgggaaggccactggag

SEQ ID NO: 215326 - DNA, 107 bp, Homo sapiens
ccaagtcgggtggctgcggcgcgggagccggcgtgggcggcggcaacggggcactgacctgggtggttttataggatcacattgacaaaagtaccatggagttttat

SEQ ID NO: 215327 - DNA, 98 bp, Homo sapiens
ggagatgtacatagaaaggttatttgataaagaagacatagctcatccagcaagccgcctttggccgttcctcccacttcagtattttccttcttccc

SEQ ID NO: 215328 - DNA, 90 bp, Homo sapiens
tctgtgtcgttcttggcagaaattatattttccagcccgtgtctgcaggcgacgctctccgaaagcctcgcctccagaagcccatcacgg

SEQ ID NO: 215329 - DNA, 51 bp, Homo sapiens
tcttcttcgagtatttgtagaaggagagctgcttttgcacattttcctgaa

SEQ ID NO: 215330 - DNA, 74 bp, Homo sapiens
agaggaagagagaagacttggcgatagttccctttctagaaagttggatgaaaaatctgacaaacagtatgctg

SEQ ID NO: 215331 - DNA, 100 bp, Homo sapiens
tctgattatggattctgttcagaaggaagccgaattttaagtcatcgttctaggatagatcatgatgctgccgccaccgccgccaccacggagcgagaag

SEQ ID NO: 215332 - DNA, 90 bp, Homo sapiens
cgggggcttcgcgtgttccaagaactgcctgtgcgccctcaacctgctttacaccacttattctggactcttctgtgtagttataaaccc

SEQ ID NO: 215333 - DNA, 100 bp, Homo sapiens
gtacaacccgacgaggaacgaatgggacaagatcccgtccatgaatcaggtcagtcagtacacgtttgccatgtgcagttatcgggagaagaaagcggag

SEQ ID NO: 215334 - DNA, 100 bp, Homo sapiens
atgagactggagagataccacgaaagaatctggatgtcatgaaggaagcaatggttcaggaaactacaagatccccggatcatgaccactctcagcgtcc

SEQ ID NO: 215335 - DNA, 100 bp, Homo sapiens
agaaaaggaagatttgcatccagacccagaaattcagtcagtaaaagatgaaacctttggtgaatacagtaccacaaagcctgctccacacctggatggg

SEQ ID NO: 215336 - DNA, 73 bp, Homo sapiens
ttaggaaatcaaaatcaccatttgcagtttgcaagcatattttgggtgactctgacatcattagaagcatgcc

SEQ ID NO: 215337 - DNA, 74 bp, Homo sapiens
ggatcaccagctctttgccctggagaaactggatgtcaccgaatgatgagaagacagcagctgattacaagatt

SEQ ID NO: 215338 - DNA, 76 bp, Homo sapiens
tcgtaatcagcaggccaaagactcagagcgagtaaccagctcataaatcacatcgaacagtttttggatactaatg

SEQ ID NO: 215339 - DNA, 87 bp, Homo sapiens
gcgggcgctgcggcgggacagctcgacgcgcagggcagctggtggaatttttgaagaaaatggaatctcgaggccccctttcgtgcg

SEQ ID NO: 215340 - DNA, 82 bp, Homo sapiens
tcgcctttgccgatccgccgcccgtccacacccgccgccagcatctgtccgatctttcctgtttcccccactccattccctt

SEQ ID NO: 215341 - DNA, 50 bp, Homo sapiens
ggggcgcccagctgccaacaccaagaacgtgctggccaaagcgctctatg

SEQ ID NO: 215342 - DNA, 74 bp, Homo sapiens
aacccaaacctgtaaaaccagtgacgttttccacaggcatcaaaatggattttggagatggaggtgcttttcca

SEQ ID NO: 215343 - DNA, 83 bp, Homo sapiens
tacgagtcggccaagttgatgaatgtttatctccagaagaagaagagaaaaggagaatccgaagggaaaggaataagatggct

SEQ ID NO: 215344 - DNA, 100 bp, Homo sapiens
agaaactggacatcaaactggacagcgaggacaaggacaaagaaggcaaacccctgctgaagactgtgatgactgggagagcgggctgaatgcaatggag

SEQ ID NO: 215345 - DNA, 76 bp, Homo sapiens
ctggaaaactgggccaaagcagtgaaacgctccatgaattgacctgatggccaaaagaaaggaagaaaatttttcc

SEQ ID NO: 215346 - DNA, 100 bp, Homo sapiens
caacaacaagtgcatccctgagtgtccctccgggtacacgatgaattccagcaatgggacttcccctctcgcatgcctcaatgctatgctacattccaat

SEQ ID NO: 215347 - DNA, 100 bp, Homo sapiens
gaagtggtccgctttgccaagaagatggacaagatggtgcagaagaagaacgcgttctggacatggcaagacatgtgccactctatcgggcactgctgga

SEQ ID NO: 215348 - DNA, 98 bp, Homo sapiens
tcagaagcatcgtgaaaagcctccttctggttccaaatggatctagtgaaaagccatttgatgtatgcggtcagagaagaagtggaggtcctcaaaga

SEQ ID NO: 215349 - DNA, 90 bp, Homo sapiens
cttctttgtggctttgctaaaggacagatggctctggaaactcatttttggacttggatcaaccatctcgttacctggggatctattata

SEQ ID NO: 215350 - DNA, 100 bp, Homo sapiens
gttcatatatccagggtcaaatcagtcaacctagaccaatggacagcagaacagatacaggttgtaaagctctctgaaatagtgaccttagcgaagcaag

SEQ ID NO: 215351 - DNA, 98 bp, Homo sapiens
tggatttgtttctcattctcatatttcaccaataaagggcccaagttgtttgcttcgctgggcagccccagaggtcattgcacatggaaagcatacaa

SEQ ID NO: 215352 - DNA, 75 bp, Homo sapiens
gcagagtcttggaattagaattgttggctatgttggaacatctcatacagtttcctgttttccagcacccaacat

SEQ ID NO: 215353 - DNA, 90 bp, Homo sapiens
attatttcaaagatgaagatgaaaccaagcccttggaactcttgaccctagttccccatacactatggtgtcaccaagtggacgagcagg

SEQ ID NO: 215354 - DNA, 75 bp, Homo sapiens
gcatccctctgggccaggacgccgaggaggcgtctgtagaggcttctggtgaaatcgcattatgcaagactggat

SEQ ID NO: 215355 - DNA, 82 bp, Homo sapiens
caaatgtctgactctgactctcggactgagaaacgcaaggggcctagaagacagttcccaggaggccgaggacgaggcatcg

SEQ ID NO: 215356 - DNA, 83 bp, Homo sapiens
gaagaaatttggagtgtgcgtgcgcgccgagcgcacagtccagaagcgtgagctggtgaatcccgccagtatgaagcaggccc

SEQ ID NO: 215357 - DNA, 74 bp, Homo sapiens
acagacagaatccctgctaccattcacacaaaagatgttggacaatttctacaattttgcttcatcatttgctg

SEQ ID NO: 215358 - DNA, 80 bp, Homo sapiens
agcaggccgaggagcagcagaagttcggggagcggatgctgtgggccctgagggaaaggatcacagaggcgctgagccgg

SEQ ID NO: 215359 - DNA, 83 bp, Homo sapiens
ccggattctcatcaccatgagggtgcgtcttgacagagtacgtggaggtcggcagaagtacaagcgcaggatagatgcggaga

SEQ ID NO: 215360 - DNA, 74 bp, Homo sapiens
ggaagacttgtaacctggagaagaggtttatcatttaaaagtgcctgtgtgaagtcacttttgctggaaaactg

SEQ ID NO: 215361 - DNA, 90 bp, Homo sapiens
cgaaagcgttggagaggtgttaccggaacggcggcgacaagggtgttcccgaactagagtggtttgcatttatgtcggatcctcagtgaa

SEQ ID NO: 215362 - DNA, 90 bp, Homo sapiens
ccatgagtgactgtgggtggaggcttccctgggcagcctggactgaacatttctaaaacctcccgacctcttttgtgaaggagatccatg

SEQ ID NO: 215363 - DNA, 100 bp, Homo sapiens
gccatgaagagtcctgaccacaatggggaggacaacttcgcccgggacttcatgcacgtcgcgtttggaaaaattatctcccagcaattaatgggattgt

SEQ ID NO: 215364 - DNA, 97 bp, Homo sapiens
aactgaagaaaggagggaaggatataccagtcactatccacaatttagaggagtatctaagaaaccagggaccccactcccatgccgacagtatggg

SEQ ID NO: 215365 - DNA, 97 bp, Homo sapiens
cggccgccgccgctgccgcttccaccacagagcagtcattatggcgaaccttggctgctggatgctggttctctttgtggccacatggagtgacctg

SEQ ID NO: 215366 - DNA, 100 bp, Homo sapiens
ccgagctccagccgaaggagaagggggcatgttggcagataaattgaacatgactccagaagaagctgaaaggtggattgtaaatttgattagaaatgca

SEQ ID NO: 215367 - DNA, 99 bp, Homo sapiens
atgtggacggactcactgccctgcaccaggatcatgcggccagatgatgccaacgtggccggcaatgtccacggggggaccatcctgaagatgatcgag

SEQ ID NO: 215368 - DNA, 75 bp, Homo sapiens
tcgacaagaccatgctggcaagtctgaaggtcaaatgatatcatcaagttgaatcgaaaggaagggaagaagcag

SEQ ID NO: 215369 - DNA, 98 bp, Homo sapiens
aggcctggtggaagagtgccaggcggccctacaagtggctgactgttcttgggatgaaacaataaagatctatgaccctgcttgtcttactattcctg

SEQ ID NO: 215370 - DNA, 100 bp, Homo sapiens
gcgtccctgggaaggacagcagagacggcagtgagagtctcacacaggtcccacagcacagaacccggcttggtgctgacactaggccagggcgacgtgg

SEQ ID NO: 215371 - DNA, 75 bp, Homo sapiens
gtgacggtcatgctgcggcgttgtaaggcaaacattggtgggcaccgatcttcctgttcattctgcaagaaccca

SEQ ID NO: 215372 - DNA, 76 bp, Homo sapiens
cgagtttgaagagttccctgccgaaggcagagatcctacaagaatccaggatgatgatcccagattgccagcgcag

SEQ ID NO: 215373 - DNA, 76 bp, Homo sapiens
gtaatattgcgtgaaatatctgaatctacccccgtggaaggattaatgaaaatcaagttccatcctcagacaagag

SEQ ID NO: 215374 - DNA, 101 bp, Homo sapiens
ggggcatggccctccggagtgcgcagggcgacggccccacctccggccactgggacggcggcgcggagaagacactctcgaaagcgatgggaacgctttgt

SEQ ID NO: 215375 - DNA, 95 bp, Homo sapiens
atttgtatctatcctgcttatttaaataataagaagaccatcgcagagggaaggcgaatccccataagtaagataaaccggcccccggtgaagct

SEQ ID NO: 215376 - DNA, 100 bp, Homo sapiens
tcaacgtcactattcttggaacaagccattttaagctgcacacatacatgtaagagaagcaaaaatgtcagatgatatcaggaaaaggtttgaatttcca

SEQ ID NO: 215377 - DNA, 100 bp, Homo sapiens
attcatcctgccacatctgcactgcaggtctggagggtgagcgacctgcgagactcacaagaggggaagctgacagagatacctacagacggagtgctgt

SEQ ID NO: 215378 - DNA, 100 bp, Homo sapiens
gacggcctcagcaggcggggaagatgaaagggtacacacttttcattgtgctgtacccaatgggagtgtcaggagaactgctcacaatatatgcagctct

SEQ ID NO: 215379 - DNA, 90 bp, Homo sapiens
ggctagccggcgacttgagtgacgaagttgctgggagcctgagcacctttcgtttttcggctcagagaaagccaagtgcaacttgcttca

SEQ ID NO: 215380 - DNA, 75 bp, Homo sapiens
gtttgaagcaacaagattgcttgcaacaattgttatgcttgtgctgttacactaccaaactgtcagtgaacccgc

SEQ ID NO: 215381 - DNA, 100 bp, Homo sapiens
gtgcgagaactgcgcagacctggtggaggtgttaaatgaaagaccaagaatcgccttcagccctgtctggtgcatccttggcagaaagtgaggaggaaaa

SEQ ID NO: 215382 - DNA, 50 bp, Homo sapiens
aaccgcctcgaaaacggagaagcagagcatgaataatctttcatttagtg

SEQ ID NO: 215383 - DNA, 100 bp, Homo sapiens
tgcttatggctataaaattacagttctaggcacagacagggtggagcagatgaccaaaacttacaatgacatcgacatggttacacatctcctggcagag

SEQ ID NO: 215384 - DNA, 115 bp, Homo sapiens
attcctgaaatacatccaggaaagacatggagattctcttaaaaaggtctgtctcgttggaaaatccagaacatacccttcctccagagaagcttccgtggatgaaaagaggact

SEQ ID NO: 215385 - DNA, 75 bp, Homo sapiens
ggcgcggatcgaccggagcagagagctggcgagcaagggacctcaggatggaaaccagcagcctgcaccgcccga

SEQ ID NO: 215386 - DNA, 90 bp, Homo sapiens
ccaacatggaccgggagatgatcctggcggattttcaggtagtgaagcgcgcagtggcgagccagccagactctgtggatgcagccgaga

SEQ ID NO: 215387 - DNA, 99 bp, Homo sapiens
aaggagggaggggaaacacaaagccggctacgcgctgcgaggaccagaggagcgagagcagcaagaaccacacccagcagcaatgtcagcggaagtgga

SEQ ID NO: 215388 - DNA, 83 bp, Homo sapiens
ggctcaagaagatttccagcctggaccaactggtggaagccatccagtccaatggatcagatgggcaagatgagacctcagcc

SEQ ID NO: 215389 - DNA, 90 bp, Homo sapiens
ctccagccggccccccacctccccccggagccaggctggtttcggaaatgcccttacagcagcagagggtgtttgtgagatatggttgac

SEQ ID NO: 215390 - DNA, 100 bp, Homo sapiens
tctcgtggaacaagatggcgtgcttcatagcagtgggttgcatatgtccctgctatgtggatatttggtagcaatgactgatgtggaaactacatatgca

SEQ ID NO: 215391 - DNA, 50 bp, Homo sapiens
cgcagtgacaattgaggacctgcagggctgcagggcacccccttacttgg

SEQ ID NO: 215392 - DNA, 98 bp, Homo sapiens
tcgcagcgagctggagccgccggagggccaagaccagcttcaagtctccatggtaccagaaaacaacaacctcacagcacctgaacctcaagaagagg

SEQ ID NO: 215393 - DNA, 90 bp, Homo sapiens
catgtatggagacctggtcatggacacagtccctgaaaaggaactgctgttgtaagcggctcatcaagagttgaacttcacgtagccttg

SEQ ID NO: 215394 - DNA, 75 bp, Homo sapiens
tccagcctgcggagcctgtggggcagggctgccaggcgcccagctgtgcccagatggatgggacagagacccggc

SEQ ID NO: 215395 - DNA, 82 bp, Homo sapiens
caccgggcaggatgaaggcagagcgtgtggcatctccacctcaagggtggtggaagatggatatgaattttttgctaaacga

SEQ ID NO: 215396 - DNA, 97 bp, Homo sapiens
ataccgcttcctggagttcacgactctgagtgctggagatgagtatgatgtatgtgccatttgtttggatgagtatgaagatggagacaaactcaga

SEQ ID NO: 215397 - DNA, 90 bp, Homo sapiens
gaagaactcgagcgacagagacaagctgagcttgccgcacaaaaagctagagagcgctggagagcgaggtggcttcaataagcctggtgg

SEQ ID NO: 215398 - DNA, 105 bp, Homo sapiens
ggatcatgtctgcgagccaggattcccggtcaaaatgcagatcttcgtgaaaacccttaccggcaagaccatcacccttgaggtggagcccagtgacaccatcga

SEQ ID NO: 215399 - DNA, 100 bp, Homo sapiens
ttcggattaaatctggaaatgaaaatggagagttctacctacgagaacttggaatcaagcattcacttcatcgaaagaaactccagctagcactccaagc

SEQ ID NO: 215400 - DNA, 100 bp, Homo sapiens
ggattctcgacctgctaacagaactggaccttttcgaagtacagtccatccagcgtctcctcccctgctttgtactcgagaagatgttgaagtggcagag

SEQ ID NO: 215401 - DNA, 100 bp, Homo sapiens
ggatttagctttcaatcccaacaatgagtacagttgtgaatttggctccgcgaagtattatgcactgtgtggctttggtggggtcttaagttgtggtctg

SEQ ID NO: 215402 - DNA, 130 bp, Homo sapiens
gggaaaataagagatgctcatcgacgaattatgcttttaaatcatcctgacaaagccccaccagctactggaagtcccttgcccctgatcggtcagatgatgagcacgaccctctcgacaacacctccag

SEQ ID NO: 215403 - DNA, 75 bp, Homo sapiens
tccaccaagactgtatgaaaaagtggttacaggccaaaattaactctggctttaaaggagatagatgaagttggg

SEQ ID NO: 215404 - DNA, 82 bp, Homo sapiens
cgaggagaacctgcccttcgccaaggagatcgtctctctcatcgaggcccaaaccgccaagcaattctgtggtgttcttggt

SEQ ID NO: 215405 - DNA, 100 bp, Homo sapiens
ccgccatcaaccgccagatcaacctggagctctacgcctcctacgtttacctgtccatgagcctgccctcgcaaaacccgatcttgaagaatatcaccga

SEQ ID NO: 215406 - DNA, 100 bp, Homo sapiens
agtttagctgatgttgttgacaccttgaagcagaggaaaatggaagagctcatcaaaaacgagccggaaggaaagcgtctctagcagctgatatccccag

SEQ ID NO: 215407 - DNA, 90 bp, Homo sapiens
agcttccacagctggttgatatggctgctcagccaggtgactttatacacactttgggagatgcacatatttacctgaatcacatcgagc

SEQ ID NO: 215408 - DNA, 87 bp, Homo sapiens
ggcgctcggcgatggtaggcgtccctggagcggccgccttccagcgctgttactgaggcggagacacgggtgatgattggctttctg

SEQ ID NO: 215409 - DNA, 75 bp, Homo sapiens
tggaggtgcagggccaggaggaacatgaggtgattgaagcctccgatgttgtcctagaggtgttggatgccagag

SEQ ID NO: 215410 - DNA, 78 bp, Homo sapiens
aggctgcggctgaaacagcaagaactgcttcggcagactgtaaaaggtggaatttctgaaacaagaattgagaaacgc

SEQ ID NO: 215411 - DNA, 100 bp, Homo sapiens
agctaaagacatagttcctggtgatattgtagaaattgctgctggagctctcaaacactgctgtcctgcaccagatgcggcgggaccaggtgacagacac

SEQ ID NO: 215412 - DNA, 100 bp, Homo sapiens
ttttagcaggtttggatgcatctgctcagactacttctcatgaactcaccattccaaacgatttgattggctgtgtgatcgggcgccagggcagcaagat

SEQ ID NO: 215413 - DNA, 100 bp, Homo sapiens
gggtccagccgtccccagaacgcagatcagaggtagtcggacctttcccgctggcgcgcagcctcagctagtgaaatcccattctctggctggagacaca

SEQ ID NO: 215414 - DNA, 50 bp, Homo sapiens
ggaattggagtacaaggtccaaaggttcaaaccttgtactactcagctga

SEQ ID NO: 215415 - DNA, 50 bp, Homo sapiens
ctaatgttcttagtgacattagtggcaaatcataccccttcagggggcca

SEQ ID NO: 215416 - DNA, 83 bp, Homo sapiens
cttcaacctcatagcagccgacctgagtgtactaatggtcacttgatgtgcgctggctgttttatccacctactagcagatgc

SEQ ID NO: 215417 - DNA, 74 bp, Homo sapiens
aggcgctctgcacaggaagctgcagtgtggcccagagttgctcagaattggagcagagcctgagacgtatctgc

SEQ ID NO: 215418 - DNA, 75 bp, Homo sapiens
caagggcggcggggagcacacggagcactgcaggcgccggggggatatgagactttctactcggaatatcctgag

SEQ ID NO: 215419 - DNA, 115 bp, Homo sapiens
cgagatgacaactccgcagcaaacaactccgcaaacgaaaaagaacgacatgatgcaatcttcaggaaagtaagaggtgggtaattccagaattgattggccataccattgtcac

SEQ ID NO: 215420 - DNA, 54 bp, Homo sapiens
caacatctatgcagtcaccgaggaggaggcaccagcttgctgcaggaggtggtc

SEQ ID NO: 215421 - DNA, 83 bp, Homo sapiens
cttggcccttgttcccccaaatgtctgactctgactctcggactgagaaacgcaaggatgccggctccaggagcagcagtgga

SEQ ID NO: 215422 - DNA, 98 bp, Homo sapiens
agggacgagatctagaatcaactgagagagatgcttaaaaatcaccagttactttaatgaactgaggctgatgtgaatccaaaggcctatccccttgc

SEQ ID NO: 215423 - DNA, 75 bp, Homo sapiens
gaggcagccaagctcatggcctgccactgcgtgctcaggatggctaaaggtgaccccaagaaaccaaagggcaag

SEQ ID NO: 215424 - DNA, 98 bp, Homo sapiens
cggaggctggagctggaggcgcggcgccggtgagctgagatgcctgaaaacttcatgcctcctgttcccatcacatcaccaatcatgaacccgttggg

SEQ ID NO: 215425 - DNA, 75 bp, Homo sapiens
cctatgtattccctggggatggcgcatcacacaccaaaggtgacgccttctgggccccatctgtccttcctcaca

SEQ ID NO: 215426 - DNA, 100 bp, Homo sapiens
gcagcccggcagcccgagccgaccaaatttgactacctgaaggaggaggcccaagaagttactaccaaaagctttcaaacaatattggtttatctttaaa

SEQ ID NO: 215427 - DNA, 101 bp, Homo sapiens
gccgagtcctagcgcctggcctgcgcgccgctgcccgcgccacaggaatcccgttctgcttccagaagtggaagtgctcacggatcggggaaatctgcaag

SEQ ID NO: 215428 - DNA, 82 bp, Homo sapiens
ctgagggccttcgagagctaccgcgccagacagtcctgtgcctcctgattgctgagtgttcacctggaccttctgactacct

SEQ ID NO: 215429 - DNA, 76 bp, Homo sapiens
ctcaggtcctcgggggcggcggccacgccaaggacgggtgtttgagaagtcccccctgcgggtgaagaacttcggg

SEQ ID NO: 215430 - DNA, 100 bp, Homo sapiens
tcggacttcatctcattgctcagcgcggacctagacctggaatcgcccaagtccctctactcgcgagagtccttggtataaatgaatggcagaatacggg

SEQ ID NO: 215431 - DNA, 96 bp, Homo sapiens
actggtttgtgtccagagccggactgattctctcaatttgcgatggggaagcagaatagcaaactggcccctgaagtgatggaggacctggtgaag

SEQ ID NO: 215432 - DNA, 100 bp, Homo sapiens
gattttcagcttcagcaagcagaggagaaggcagagcccccccaggctatgaatgccctgatgcggttgaaccagctgaagccagggctgcagtacaagc

SEQ ID NO: 215433 - DNA, 96 bp, Homo sapiens
accgagaccgtgaccgagagcgtgaccgagagcgcgaatatcgtcatcgttagaagtatagcaccttttgggctctaatggttggttgttggtttg

SEQ ID NO: 215434 - DNA, 98 bp, Homo sapiens
ttcggtgcagctgccagatccgctgatctagtgcttctcgaaaaaaaccttcaggcggcccatgggtctatgttaacaatgaatgggcaaccagtgtt

SEQ ID NO: 215435 - DNA, 83 bp, Homo sapiens
cacaccgacaccatctggaggaggcgttgccgtgaggtggctcacaggcccggggcattcaaagctgagctgtccaagctggt

SEQ ID NO: 215436 - DNA, 98 bp, Homo sapiens
aagcagcgacgccagcggcggagaaccgacgaaagctgcaagctttcttcctggtggcagatgacatcatggattcatcccttacccgccggggacag

SEQ ID NO: 215437 - DNA, 75 bp, Homo sapiens
agtgttgtgtggaagccagaacatcgttctcaatggcaagccaagctacatcagtgatgtgggaccccctggtcg

SEQ ID NO: 215438 - DNA, 117 bp, Homo sapiens
cacgagtgcattcctggggaaaagtcagcatggcttatatggtgataatgtggaggagatggactggctcatagagacgagttgtactgctgtcacaggaaatggacgctggattac

SEQ ID NO: 215439 - DNA, 80 bp, Homo sapiens
gccgcacttacctatgaggccagcaagcggaggtgctgggagcgagttggctgcaagagtgagccatggagctacgtgtg

SEQ ID NO: 215440 - DNA, 100 bp, Homo sapiens
cacatcttgaaagagaagctcttcctgtgagtgaaactggaacgccaagctgaagaagaacgaatacggaagcacaaagcagctgctgagaaagctttcc

SEQ ID NO: 215441 - DNA, 100 bp, Homo sapiens
ctgtcattttgccaatcaaattcccacacttgttcacaggctttgtggacatgtgtgtgcagcatatcccttctccaaaggtgggcgccaagcccaagat

SEQ ID NO: 215442 - DNA, 100 bp, Homo sapiens
actggggagagaaagaaaaggaacgggagctgagagaaaaagcttgtggtgaaggggggcaaaaaaaagaagcaagttctgaagttcactcttgattgca

SEQ ID NO: 215443 - DNA, 83 bp, Homo sapiens
cagcaaggtgggcccggacggcacaccctacgttaccgtgctcaaggtaaggctggcctctctgcagtcagaggtctgagctc

SEQ ID NO: 215444 - DNA, 88 bp, Homo sapiens
cgagcggcagcgcggcagtgacccgccctgggagctgcccccagcggtggagaggtagtgaaaatagctcagctggcatccatcacag

SEQ ID NO: 215445 - DNA, 88 bp, Homo sapiens
aaatccatgactccaacccagaaccgggagaaatggatctactactgcaatggccatgattataagcgccatggctatggctagtgtt

SEQ ID NO: 215446 - DNA, 98 bp, Homo sapiens
ttcttatccatcccatctcttggacagatgatgccagttaattactttgaatgtcccgtttccctctgtgcggcggccggcgggaccataagggctta

SEQ ID NO: 215447 - DNA, 75 bp, Homo sapiens
tggggacctcactgagaagtattttgctctgcgaaacatcatccagaaggacgccaggaaagcatgtgcagatgc

SEQ ID NO: 215448 - DNA, 51 bp, Homo sapiens
tcctcccttcgctcgcaccatggaagtgggaaaactcttgcctttgccatc

SEQ ID NO: 215449 - DNA, 90 bp, Homo sapiens
ttgtggatcttctgagtaacggaggacaattcaccatagttttctttaagcgagagctccttgatgttgtggataagaatgagtcagcag

SEQ ID NO: 215450 - DNA, 100 bp, Homo sapiens
acagtttcctgccaggcgccatcatcggcatagcccgggagatgcagccagtttacagctgtgtattcttattacaaccaaggcattttaccagagcaag

SEQ ID NO: 215451 - DNA, 134 bp, Homo sapiens
atccagagggcagtgagagagcctccagaggacgaggaggaagaggacggaagggagaaggagaatgtgactgtcagcccaagactaccccgtcggtcattctgttcctgccgtcctgtgaggagccccaagcc

SEQ ID NO: 215452 - DNA, 82 bp, Homo sapiens
gtggagagtgacatgcagttggatggcggtgactgcgtggtttgtgaatcttatctcagagaggaagacaaagtttgccaag

SEQ ID NO: 215453 - DNA, 100 bp, Homo sapiens
gtgggagaaccagccgactggagcaggcagcagcccagattcccgacagttaagcaatggggagacatttggctttgctcctgcttctgctccttctctt

SEQ ID NO: 215454 - DNA, 50 bp, Homo sapiens
gaaagcgcatacaggaccctaaacagattgatcgtactaaaaaaccagca

SEQ ID NO: 215455 - DNA, 88 bp, Homo sapiens
agatagctagggtcgacttgtgtggattctagtagaacggagctgaccctatccgaacaggcttaatatgatcctctgttgaagcaag

SEQ ID NO: 215456 - DNA, 110 bp, Homo sapiens
cgaagaaggacgtgctgacccgcctgaagcacctgcgggcgctgctggcatggtaagacacaaggatggtggctattccgaggaagaggacgtgaagacctgtgcccggg

SEQ ID NO: 215457 - DNA, 98 bp, Homo sapiens
cttttctgctccgggtgtttccacgaggcaggcatggaatcttccctggacaagcgacataccgtggagagacaggcctacaacatcgacgtggttgc

SEQ ID NO: 215458 - DNA, 50 bp, Homo sapiens
tgccaatgacccacctcctatatcagtttgaagaaaacaggtctgaaaca

SEQ ID NO: 215459 - DNA, 82 bp, Homo sapiens
cgctggaggcgctcatggaggtgtctgtgtctgaaggaagaggcccagcagaagggactcgctgagccaccccccgccccac

SEQ ID NO: 215460 - DNA, 117 bp, Homo sapiens
ccgcgcgcagggcctgcagcgggagctggacggcgagcgcgagcggcgcgagaaagactgaatgtgggcccagttggcgtcattctgctttgacctaaacattcccatctgattggg

SEQ ID NO: 215461 - DNA, 89 bp, Homo sapiens
ccggttggtagagggtttgagtccgcatcgccacagctgaaggctgcgagggactaagagcagaatctgggttggaatttgcccctgac

SEQ ID NO: 215462 - DNA, 82 bp, Homo sapiens
aagcttttgtagaggaacctagtaaaaagggagcacttaaggaagaactacaagataaagttcgagaaactattgaagcatt

SEQ ID NO: 215463 - DNA, 82 bp, Homo sapiens
tttcccgggagatcccaggcggtgacagagtggagccatggctagaggagggtgtgaagacagagaatgaccacatcaacct

SEQ ID NO: 215464 - DNA, 50 bp, Homo sapiens
gacagcggcacagaggtgcttctgccaggcctcctacacctacctctctc

SEQ ID NO: 215465 - DNA, 100 bp, Homo sapiens
cagccggccttcgggtcgggcgtctccgccggctactgccgcttcagttctcccggtgtggccacgagtcgggcctgcacagctgaccacagttgggaaa

SEQ ID NO: 215466 - DNA, 75 bp, Homo sapiens
gaaatcattgtacagaatggaaaagtaattggtgtaaaatctgaaggagaagggtgaaagatttgaaagttgaag

SEQ ID NO: 215467 - DNA, 80 bp, Homo sapiens
gatttactttcccatccgtgactcctggaatgcagactactcgagggcagattttgcaggaatatcgaaaaatcaaaaag

SEQ ID NO: 215468 - DNA, 100 bp, Homo sapiens
tccctgccgccgtcctcgccgcttccccggcggtagcagcctgcagccacgaaactggcagacctttcacttcgtatccaacaaattgaaacaactctca

SEQ ID NO: 215469 - DNA, 100 bp, Homo sapiens
cgagatcatggggcccaagaaaaagcacctggacttatggcatgcagctgtaccagaattatatgcatccatatcaaggtagaagtggctgcagttcaca

SEQ ID NO: 215470 - DNA, 100 bp, Homo sapiens
cctgcagagcttgaagaacaatctaaccatgctggcatggggcccatcctacctgcaatgccaagtctttcccagggaactccgatgaagtgttccaaca

SEQ ID NO: 215471 - DNA, 100 bp, Homo sapiens
cggcccgcaagccgctgccaagggaggttcccctgaaggatgctaaggaatacgctgaatccataggtgccatcgtggttgagacaagtgcaaaaaatgc

SEQ ID NO: 215472 - DNA, 100 bp, Homo sapiens
ctccggcctcgactacggcgagcctgagcgcggcggcggcccacgcgcagcgacagggagagctgcggataaccgtctggtccttgtgcacaaaatccgt

SEQ ID NO: 215473 - DNA, 98 bp, Homo sapiens
aagaagctggaggccggcaaagccaagaggctaagaatattgtacacaaagattcttgatgttcttgaggaaatccctaaaaatgcagcatatagaaa

SEQ ID NO: 215474 - DNA, 75 bp, Homo sapiens
gatgaggaagggaggatgatggtgaggcaggagaggaggacgaagaggtagactgggtacaatgtgatggtggct

SEQ ID NO: 215475 - DNA, 82 bp, Homo sapiens
gtcattatgaccagagtattgccgcggtggaaatggagctgcatagatgaatggtttgaagtaaatagatcttgccctgagc

SEQ ID NO: 215476 - DNA, 58 bp, Homo sapiens
cttcaagaaaattacggtggtgccgtccgccaagtgacatgggctcgagggttggcta

SEQ ID NO: 215477 - DNA, 100 bp, Homo sapiens
ctcagggaatacttcaagaagttcggagtggccacaaggggcaccagtgcctgagccctccactcccctcctgggactctgactccgactgtgaccagga

SEQ ID NO: 215478 - DNA, 50 bp, Homo sapiens
caaggtctctgggaaatttaagcgggtgaaaaatgaagtttctttggtgg

SEQ ID NO: 215479 - DNA, 74 bp, Homo sapiens
gcgagatgagctgagggctgtggtgcggcaccggcgagccagccactgaacctaccagatgtatttgggttggt

SEQ ID NO: 215480 - DNA, 50 bp, Homo sapiens
ggtgaatttccatgtcaacatagtccagattgcaaaggtcgactgcaagg

SEQ ID NO: 215481 - DNA, 75 bp, Homo sapiens
gcggctgctggaaacgcaagacggtgccgagaagcagctgcgaggccagctgcgggccgtccagcggctgtgcca

SEQ ID NO: 215482 - DNA, 87 bp, Homo sapiens
atcatgtctgcgagccaggattcccgcggggatctgacgagcttttctctacttgtgtcactaacggaccgtttatcatgagcagca

SEQ ID NO: 215483 - DNA, 98 bp, Homo sapiens
aggccactacccacccaacattgactgcacatggaacattgagagtacaggggctcaggtccaggtggcaggggatatgctacccaactcaactgagc

SEQ ID NO: 215484 - DNA, 90 bp, Homo sapiens
caacactggacggtcaagagggtttgggtttatcctgttcaaagatgcagccagtgtggagaaggtgatggcccgctccctctccccacc

SEQ ID NO: 215485 - DNA, 131 bp, Homo sapiens
aggacagacaattgttcagttgcaaaaagaaactggagccaccatcaagctgtctaagtccaaagatttttacccagcattcaacagaaggtgtcaaattgacagctctcaatgacagcagcctcgacttg

SEQ ID NO: 215486 - DNA, 100 bp, Homo sapiens
tggaaactctttgggaaagccactcgaaaagaggagttgaagccaaacagccaaattctgccattaggaagtgtgtaagggtccagctgatcaagaatgg

SEQ ID NO: 215487 - DNA, 75 bp, Homo sapiens
aaaaaacccttcactgtgaagagacatgagatgattgccaaatccccagggaccattgcaatttagagatgtggc

SEQ ID NO: 215488 - DNA, 74 bp, Homo sapiens
ctaacccaggagcagacagagaagctgctgcagtttcagaatgagatgctggaggaaggacatgagtatgcggt

SEQ ID NO: 215489 - DNA, 90 bp, Homo sapiens
aggaaaaaatgcgccacctgctgcatgtcctgaaagtagacttaggctgcacatcggaggaaaactcgacccatcctcatgccaacaaac

SEQ ID NO: 215490 - DNA, 71 bp, Homo sapiens
taaagatgcagccaaggtcttagcagaagatggcaattgctggctactttgatatatattttgagaagaat

SEQ ID NO: 215491 - DNA, 90 bp, Homo sapiens
caaggatggtgatttcatcttgaccgaaaggtatcttggagatggccgcttccatctggagtctgtcatgattgccaaccccaatgtccc

SEQ ID NO: 215492 - DNA, 100 bp, Homo sapiens
caggtttccacctgcggccaccgtttctgcgatacctgcctgcaggagttcctcagctctaatggtaccaagtgacaggttggctttactgtgactcggg

SEQ ID NO: 215493 - DNA, 90 bp, Homo sapiens
gaggagacaggacctttttcaacttgacaaatagttgaagactgggatagtttccaagctattttggatcatacctacaaaatgcatgtc

SEQ ID NO: 215494 - DNA, 100 bp, Homo sapiens
catacaggaactaatgaaaatccatggacaagatcctgtttcatttcaagatgtcaaggttgcatgcatcattcctttaattgagcagagttaactggat

SEQ ID NO: 215495 - DNA, 98 bp, Homo sapiens
cgcgacaagctggacggcaacgaactggacctgagcctcagcgacctgaatgaggtcccggtgaaggagctgtaaccgggccgccctgcacctctatt

SEQ ID NO: 215496 - DNA, 101 bp, Homo sapiens
gccagagctccccaggggacttctccatctctgtcagaaagtattaatgaagcttagaaaacctagaattacagctacaatttggtcctcaggaaaaatta

SEQ ID NO: 215497 - DNA, 100 bp, Homo sapiens
aaagaacttcagcaaaggcttggagaagtccagggcgacaacaaggtcaactttgtagtgtgccaactctttgccttgctagcagccatttggtttcgaa

SEQ ID NO: 215498 - DNA, 50 bp, Homo sapiens
cctgttcttctatttcagagcgcagagtgaattactggaactgaaacggc

SEQ ID NO: 215499 - DNA, 50 bp, Homo sapiens
cccagttccaaagtgtcttaaagggtgtcgtagtcattcttcagcacaat

SEQ ID NO: 215500 - DNA, 75 bp, Homo sapiens
cttacaagatggacagggatgataattgggcctccaagagggtcggcaccaggaattattatagaaagatcggct

SEQ ID NO: 215501 - DNA, 50 bp, Homo sapiens
agttaatcaaggcataatggcatggcatctaataggattcaggaatcaaa

SEQ ID NO: 215502 - DNA, 90 bp, Homo sapiens
gtaatactaaatgtgttaccataccaaggacacaatgtttgcacgaggactgaagaggaaatgtgttggccacgaggaagacgtggaggg

SEQ ID NO: 215503 - DNA, 100 bp, Homo sapiens
tggaactaccaagcatgtggctcctggtcagtgtaattctaatctcacggatatcctctgttgggggagaaggtaagaatgattgatgttggctgatatt

SEQ ID NO: 215504 - DNA, 100 bp, Homo sapiens
atatcgacgtcgtgatccagaagtccagagctgaggactgcctgtttgcagtaatctcaggggcgatataatcaatgaggtggtcctaaagttgctcaag

SEQ ID NO: 215505 - DNA, 74 bp, Homo sapiens
tgcgggcccgtagctgggctctgcgagataactgcgacctccacttcaaggtggcccgagatcggagtagtggc

SEQ ID NO: 215506 - DNA, 83 bp, Homo sapiens
ccgagtggcagggacgacgcccagcggagctggagtttgttcagatcatcatcatcgtggtggtgatgatggtgatggtggtg

SEQ ID NO: 215507 - DNA, 90 bp, Homo sapiens
tgaggtcaaaacagacaaaatccactataggagtcatggtaacagcgtcccacaatcctgagttccatgccattgcagtgtcaactaggc

SEQ ID NO: 215508 - DNA, 100 bp, Homo sapiens
cggcgcccctgagccggccgagcggcgacggaccgcgagtccagttacaacacagggatcacaacaaacacaaccgccacagaagcactatggcattact

SEQ ID NO: 215509 - DNA, 82 bp, Homo sapiens
gccagagccaccagcgcagcgctgccatggagcccagcagcaagaccctctttcccagctgcccgctcctcagcacccgaag

SEQ ID NO: 215510 - DNA, 100 bp, Homo sapiens
gaaattcagcctcaaaaccgtcctgctgcttgctgaccaaatgacaatgcagatcttcgtgaagactctgactggtaagaccatcaccctcgaggttgag

SEQ ID NO: 215511 - DNA, 85 bp, Homo sapiens
aacagatgattgagaaagaaatgtaaagaaggttctctttgtgtgagtaagcaagaacctggaattgctgacactggaggatgtt

SEQ ID NO: 215512 - DNA, 99 bp, Homo sapiens
gctttgaccatgctcagcggcagcttggggagcgctgtctgtatgtcttcccagccaaggaatctccgtatgttatgatgaagaaaaatcatgaaatgc

SEQ ID NO: 215513 - DNA, 103 bp, Homo sapiens
gcggcggaagcggagaccatgttccgagcggcggctccggggcagctccggcgggcggtcagcgttgaagttttggtagagtatcctttttttgtgtttggac

SEQ ID NO: 215514 - DNA, 115 bp, Homo sapiens
tcggtgctggaccctgcagagcgtgctgtggtcagagtcgctggaccctatgtactcggaactgggcttatcttgtacgctttatccaaagaaatatatgtgattagcgcagaga

SEQ ID NO: 215515 - DNA, 87 bp, Homo sapiens
ctatcattcttgatggtataaaaatggacactggagtagaagtctctgatattggaagccaagagatctggttggagttggagggtg

SEQ ID NO: 215516 - DNA, 80 bp, Homo sapiens
ctgttgcgggccccgggacctgggctgggaacccgcggtggagcgggacacgaacgtgggacctcaggatggaaaccagc

SEQ ID NO: 215517 - DNA, 100 bp, Homo sapiens
ctctctgcctgatttctcctgaatttggaaactatttggtaccaacacaccaaacctgatatcatcttcaagttggaacaaggagaagagctgtgtatgg

SEQ ID NO: 215518 - DNA, 73 bp, Homo sapiens
gcagtggtcgcttcttctccttgtatgaaatgcttcatgtcacacctccaatgagcccaccagatgtcctcaa

SEQ ID NO: 215519 - DNA, 100 bp, Homo sapiens
ttgggaaccgctcgagcctaccaggtttccagagctttacctgagaaacaaggagaaattgaagctcaaataaaagaccttgggcagcttgaaaaaaagc

SEQ ID NO: 215520 - DNA, 118 bp, Homo sapiens
tcgctgtagtgggcggccagagcgccggcaagagctcggtgctggagaacttcgtgggccggaggctactcacagtcgaactacaactccccggggtccggccagaactacagtggcc

SEQ ID NO: 215521 - DNA, 100 bp, Homo sapiens
gtgtttttggtgcccacaggagaggtttttgaacagcaggtggactgtctgaatcccattaatcaccagagactttgtgtgctcttcagcagctcttctg

SEQ ID NO: 215522 - DNA, 100 bp, Homo sapiens
ctggcagctaggggcgacgaggcgggacgtcatggaagtgaactatactgaagagtctgcttctgaggacagtgaagatgatgagagtgatgaagaggag

SEQ ID NO: 215523 - DNA, 90 bp, Homo sapiens
caggtctacctcaccactggggtcatcacggctgggagtgtccactcgccttccaccagcatggcaacgtcttcacagtaccgccagctg

SEQ ID NO: 215524 - DNA, 100 bp, Homo sapiens
ggactcttctgctggcgtctttctgaatgctgatggggacttggtgaaatggtggagtcaatgaagaaagtagcagggatggatgtggagctgacagttg

SEQ ID NO: 215525 - DNA, 113 bp, Homo sapiens
cttgcttgggatcctttatcctggtcatcttctatttccaaagtatgttgcacccagggggatatgagactttctactcggaatatcctgagtgttgcgtggatgtaaaaccc

SEQ ID NO: 215526 - DNA, 75 bp, Homo sapiens
gagagagaggtggacagatctgagagatactgaggctggtctccaggaggtaaggcccgccctgcaggcaacacc

SEQ ID NO: 215527 - DNA, 100 bp, Homo sapiens
cttagaggagtatttcctgaactgtgtggtgtctcaatttaaaatggtgaattactcctatgatgaagatctggaagagctttgtcccgtgtgtggagat

SEQ ID NO: 215528 - DNA, 103 bp, Homo sapiens
ggtggagatcaacggcatcatgtacacaggcgcaatgtgtcatttaggcctgtgacgtcggaactttattatttgaacatttaaaaataaatgaatccaagag

SEQ ID NO: 215529 - DNA, 82 bp, Homo sapiens
gaaagaggagaggcacccgatatatgttctctaggccttttagaaaacatggttactcactataaacaatatccacccaaca

SEQ ID NO: 215530 - DNA, 100 bp, Homo sapiens
atgtgtcttccccagctctgcagccacatactatccgtttgttcaggaaccaccagtgacagagtcctagccataaatatcctgggtcgtttcttattga

SEQ ID NO: 215531 - DNA, 74 bp, Homo sapiens
gtgattgctccacgcccagagcacacaaaatctgttaatgactccagagagtaagatcagattcgtccacaaag

SEQ ID NO: 215532 - DNA, 100 bp, Homo sapiens
cttgtttatgggagattatgttgacagaggatattattcagttgaaacagttacactgcttgtagctcttaaggttctggccactgcatttgacacgaca

SEQ ID NO: 215533 - DNA, 88 bp, Homo sapiens
ctcgatgagtcggagaagtcccgttcctgatgttattagcagcataaggcaattatctaaagcggccatgaaagaggatgccaaaccc

SEQ ID NO: 215534 - DNA, 88 bp, Homo sapiens
aggaccctggccgcgtttcccgcaggtgaaaggtgtagcagtcactcggcctacacccacagcatcgaccttgtgaacccagcgacct

SEQ ID NO: 215535 - DNA, 75 bp, Homo sapiens
gtgaatttccatgtcaacatagtccagcccagtgtgccatcataatgtttgatgtaacatcgagagttacttaca

SEQ ID NO: 215536 - DNA, 82 bp, Homo sapiens
ggaggaggaggagaggatgatttttggatcctgagaattgatctatgttggatcagctactgcagcactggggtgtcagttg

SEQ ID NO: 215537 - DNA, 100 bp, Homo sapiens
cagatcaacgtcctccgggaccggagtcagaaccctccgcagagtaaagacctgcctagagctggaacgttacctccagagcgagccctgctatgtttca

SEQ ID NO: 215538 - DNA, 98 bp, Homo sapiens
gattaaggaacagcgagctgtttgacccctttgacctcttcgatgtgcgagactttggaaaggccagaagcggactcctagaagaggggagcagcaag

SEQ ID NO: 215539 - DNA, 76 bp, Homo sapiens
gtgcctttgaccttctgccatgattgtgaggcctccccagccacgtgaaactttcattcggctcctaaagaagtag

SEQ ID NO: 215540 - DNA, 74 bp, Homo sapiens
ggaaaaaggaagaggagaaggaaattgtcccgaatccctgcaggaatggtggaaagcagcagacataattggag

SEQ ID NO: 215541 - DNA, 82 bp, Homo sapiens
tgatgaaagtacttcagggagtcaacggtgaggttccaagaccaaagattaaattaagagaaggtaaagctggacaaaatct

SEQ ID NO: 215542 - DNA, 99 bp, Homo sapiens
tatccagaggtctcggacgtggccatgaaagtactcaacagcatcgcctacaaggtaaatattgcagattttcaagagaatcagtgggtgacttgtttc

SEQ ID NO: 215543 - DNA, 99 bp, Homo sapiens
gacgctcatcggagagaacggccacagcacagacacgctcacgggctccggcttccgcgtgggcccatccaagccagattgctggccctttctggtcct

SEQ ID NO: 215544 - DNA, 100 bp, Homo sapiens
ttcgacatcgagatcaaccgggagccggttaagggaagaaagtcggaggctggctttggctgcgaaaagagaaaaaagaaaagagaagagaaggaagaaa

SEQ ID NO: 215545 - DNA, 82 bp, Homo sapiens
ccccagcccaggaacgaatctctcaggctgcatcaggatgaatgatgacccaagtatggaattaaccgacagcgagaccaag

SEQ ID NO: 215546 - DNA, 82 bp, Homo sapiens
ggagaccccaagctgcatcgccgagtgggctgaaggtgatgtggccgccctcaaccgacgcatccagctcgttgaggaggag

SEQ ID NO: 215547 - DNA, 100 bp, Homo sapiens
gaaaaagctgccctgagacggtgtcccgccgaaagaacattaaccaggtggtatttgttggaaatttcttgagaattaatacgatcgccatgcggctttt

SEQ ID NO: 215548 - DNA, 100 bp, Homo sapiens
tgggttctggactttgggcgtcccattgccatgtgtgtagcccacaatgccctggagtgtgcacgagccatctacgcctacgccctgcaggtgttcccca

SEQ ID NO: 215549 - DNA, 100 bp, Homo sapiens
ctgaacccagccggctccatctcagcttctggtttctaagtccatgtgccaaaggctgccaggaaggaggtgctggagaatctggtaaaagcaccattgt

SEQ ID NO: 215550 - DNA, 100 bp, Homo sapiens
ggatgtccctggggacaaactcttagagcctgtggtttgcatgtttttcccaggtcatgagtctcgggctacagaagctttgtgctgggcagaaggacag

SEQ ID NO: 215551 - DNA, 95 bp, Homo sapiens
actcagcaggacctcctcccccaggctttaagtctgagttcacaggctttgaagacaagattcccaaaaggagattctctgagatgcaaaatgaa

SEQ ID NO: 215552 - DNA, 98 bp, Homo sapiens
cagtatgacaacaatgcacactgtgtgtggatcatcacagcactcaacccctccaagctgattctgaaacgcatgaagttgtcccacaccaaggtcag
